United States Patent Application Publication US 2024/0327476 A1 - sequence listing, part 15

SEQ ID NO: 16465 - DNA, 15808 bp, Homo sapiens
  source 1..15808: mol_type = unassigned DNA
aaagtgcagggggcgggccgggcggcagggggcctgcccgctggattcccgcatgcttgttccggggcggtcgggtctaaagggctttatgcactgtctggagggtggggactggcgcgggtagaaaacgggatgcctcgggcgtgggggcaggcttttggccactaggagctggcggaggtgcagacctaaaggagcgttcgctagcagaggcgctgccggtgcggtgtgctacgcgcgcccacctcccggggaaggaacggcgaggccggggaccgtcgcggagatggatcgcgggccggcagcagtggcgtgcacgctgctcctggctctcgtcgcctgcctagcgccggccagtggccaagaatgtgacagtgcgcattttcgctgtggaagtgggcattgcatccctgcagactggaggtgtgatgggaccaaagactgttcagatgacgcggatgaaattggctgcgctgttgtgacctgccagcagggctatttcaagtgccagagtgagggacaatgcatccccaactcctgggtgtgtgaccaagatcaagactgtgatgatggctcagatgaacgtcaagattgctcacaaagtacatgctcaagtcatcagataacatgctccaatggtcagtgtatcccaagtgaatacaggtgcgaccacgtcagagactgccccgatggagctgatgagaatgactgccagtacccaacatgtgagcagcttacttgtgacaatggggcctgctataacaccagtcagaagtgtgattggaaagttgattgcagggactcctcagatgaaatcaactgcactgagatatgcttgcacaatgagttttcatgtggcaatggagagtgtatccctcgtgcttatgtctgtgaccatgacaatgattgccaagacggcagtgacgaacatgcttgcaactatccgacctgcggtggttaccagttcacttgccccagtggccgatgcatttatcaaaactgggtttgtgatggagaagatgactgtaaagataatggagatgaagatggatgtgaaagcggtcctcatgatgttcataaatgttccccaagagaatggtcttgcccagagtcgggacgatgcatctccatttataaagtttgtgatgggattttagattgcccaggaagagaagatgaaaacaacactagtaccggaaaatactgtagtatgactctgtgctctgccttgaactgccagtaccagtgccatgagacgccgtatggaggagcgtgtttttgtcccccaggttatatcatcaaccacaatgacagccgtacctgtgttgagtttgatgattgccagatatggggaatttgtgaccagaagtgtgaaagccgacctggccgtcacctgtgccactgtgaagaagggtatatcttggagcgtggacagtattgcaaagctaatgattcctttggcgaggcctccattatcttctccaatggtcgggatttgttaattggtgatattcatggaaggagcttccggatcctagtggagtctcagaatcgtggagtggccgtgggtgtggctttccactatcacctgcaaagagttttttggacagacaccgtgcaaaataaggttttttcagttgacattaatggtttaaatatccaagaggttctcaatgtttctgttgaaaccccagagaacctggctgtggactgggttaataataaaatctatctagtggaaaccaaggtcaaccgcatagatatggtaaatttggatggaagctatcgggttacccttataactgaaaacttggggcatcctagaggaattgccgtggacccaactgttggttatttatttttctcagattgggagagcctttctggggaacctaagctggaaagggcattcatggatggcagcaaccgtaaagacttggtgaaaacaaagctgggatggcctgctggggtaactctggatatgatatcgaagcgtgtttactgggttgactctcggtttgattacattgaaactgtaacttatgatggaattcaaaggaagactgtagttcatggaggctccctcattcctcatccctttggagtaagcttatttgaaggtcaggtgttctttacagattggacaaagatggccgtgctgaaggcaaacaagttcacagagaccaacccacaagtgtactaccaggcttccctgaggccctatggagtgactgtttaccattccctcagacagccctatgctaccaatccgtgtaaagataacaatgggggctgtgagcaggtctgtgtcctcagccacagaacagataatgatggtttgggtttccgttgcaagtgcacattcggcttccaactggatacagatgagcgccactgcattgctgttcagaatttcctcattttttcatcccaagttgctattcgtgggatcccgttcaccttgtctacccaggaagatgtcatggttccagtttcggggaatccttctttctttgtcgggattgattttgacgcccaggacagcactatctttttttcagatatgtcaaaacacatgatttttaagcaaaagattgatggcacaggaagagaaattctcgcagctaacagggtggaaaatgttgaaagtttggcttttgattggatttcaaagaatctctattggacagactctcattacaagagtatcagtgtcatgaggctagctgataaaacgagacgcacagtagttcagtatttaaataacccacggtcggtggtagttcatccttttgccgggtatctattcttcactgattggttccgtcctgctaaaattatgagagcatggagtgacggatctcacctcttgcctgtaataaacactactcttggatggcccaatggcttggccatcgattgggctgcttcacgattgtactgggtagatgcctattttgataaaattgagcacagcacctttgatggtttagacagaagaagactgggccatatagagcagatgacacatccgtttggacttgccatctttggagagcatttattttttactgactggagactgggtgccattattcgagtcaggaaagcagatggtggagaaatgacagttatccgaagtggcattgcttacatactgcatttgaaatcgtatgatgtcaacatccagactggttctaacgcctgtaatcaacccacgcatcctaacggtgactgcagccacttctgcttcccggtgccaaatttccagcgagtgtgtgggtgcccttatggaatgaggctggcttccaatcacttgacatgcgagggggacccaaccaatgaaccacccacagagcagtgtggcttattttccttcccctgtaaaaatggcagatgtgtgcccaattactatctctgtgatggagtcgatgattgtcatgataacagtgatgagcaactatgtggcacacttaataatacctgttcatcttcggcgttcacctgtggccatggggagtgcattcctgcacactggcgctgtgacaaacgcaacgactgtgtggatggcagtgatgagcacaactgccccacccacgcacctgcttcctgccttgacacccaatacacctgtgataatcaccagtgtatctcaaagaactgggtctgtgacacagacaatgattgtggggatggatctgatgaaaagaactgcaattcgacagagacatgccaacctagtcagtttaattgccccaatcatcgatgtattgacctatcgtttgtctgtgatggtgacaaggattgtgttgatggatctgatgaggttggttgtgtattaaactgtactgcttctcaattcaagtgtgccagtggggataaatgtattggcgtcacaaatcgttgtgatggtgtttttgattgcagtgacaactcggatgaagcaggctgtccaaccaggcctcctggtatgtgccactcagatgaatttcagtgccaagaagatggtatctgcatcccgaacttctgggaatgtgatgggcatccagactgcctctatggatctgatgagcacaatgcctgtgtccccaagacttgcccttcatcatatttccactgtgacaacggaaactgcatccacagggcatggctctgtgatcgggacaatgactgcggggatatgagtgatgagaaggactgccctactcagccctttcgctgtcctagttggcaatggcagtgtcttggccataacatctgtgtgaatctgagtgtagtgtgtgatggcatctttgactgccccaatgggacagatgagtccccactttgcaatgggaacagctgctcagatttcaatggtggttgtactcacgagtgtgttcaagagccctttggggctaaatgcctatgtccattgggattcttacttgccaatgattctaagacctgtgaagacatagatgaatgtgatattctaggctcttgtagccagcactgttacaatatgagaggttctttccggtgctcgtgtgatacaggctacatgttagaaagtgatgggaggacttgcaaagttacagcatctgagagtctgctgttacttgtggcaagtcagaacaaaattattgccgacagtgtcacctcccaggtccacaatatctattcattggtcgagaatggttcttacattgtagctgttgattttgattcaattagtggtcgtatcttttggtctgatgcaactcagggtaaaacctggagtgcgtttcaaaatggaacggacagaagagtggtatttgacagtagcatcatcttgactgaaactattgcaatagattgggtaggtcgtaatctttactggacagactatgctctggaaacaattgaagtctccaaaattgatgggagccacaggactgtgctgattagtaaaaacctaacaaatccaagaggactagcattagatcccagaatgaatgagcatctactgttctggtctgactggggccaccaccctcgcatcgagcgagccagcatggacggcagcatgcgcactgtcattgtccaggacaagatcttctggccctgcggcttaactattgactaccccaacagactgctctacttcatggactcctatcttgattacatggacttttgtgattataatggacaccatcggagacaggtgatagccagtgatttgattatacggcacccctatgccctaactctctttgaagactctgtgtactggactgaccgtgctactcgtcgggttatgcgagccaacaagtggcatggagggaaccagtcagttgtaatgtataatattcaatggccccttgggattgttgcggttcatccttcgaaacaaccaaattccgtgaatccatgtgccttttcccgctgcagccatctctgcctgctttcctcacaggggcctcatttttactcctgtgtttgtccttcaggatggagtctgtctcctgatctcctgaattgcttgagagatgatcaacctttcttaataactgtaaggcaacatataatttttggaatctcccttaatcctgaggtgaagagcaatgatgctatggtccccatagcagggatacagaatggtttagatgttgaatttgatgatgctgagcaatacatctattgggttgaaaatccaggtgaaattcacagagtgaagacagatggcaccaacaggacagtatttgcttctatatctatggtggggccttctatgaacctggccttagattggatttcaagaaacctttattctaccaatcctagaactcagtcaatcgaggttttgacactccacggagatatcagatacagaaaaacattgattgccaatgatgggacagctcttggagttggctttccaattggcataactgttgatcctgctcgtgggaagctgtactggtcagaccaaggaactgacagtggggttcctgccaagatcgccagtgctaacatggatggcacatctgtgaaaactctctttactgggaacctcgaacacctggagtgtgtcactcttgacatcgaagagcagaaactctactgggcagtcactggaagaggagtgattgaaagaggaaacgtggatggaacagatcgaatgatcctggtacaccagctttcccacccctggggaattgcagtccatgattctttcctttattatactgatgaacagtatgaggtcattgaaagagttgataaggccactggggccaacaaaatagtcttgagagataatgttccaaatctgaggggtcttcaagtttatcacagacgcaatgccgccgaatcctcaaatggctgtagcaacaacatgaatgcctgtcagcagatttgcctgcctgtaccaggaggattgttttcctgcgcctgtgccactggatttaaactcaatcctgataatcggtcctgctctccatataactctttcattgttgtttcaatgctgtctgcaatcagaggctttagcttggaattgtcagatcattcagaaaccatggtgccggtggcaggccaaggacgaaacgcactgcatgtggatgtggatgtgtcctctggctttatttattggtgtgattttagcagctcagtggcatctgataatgcgatccgtagaattaaaccagatggatcttctctgatgaacattgtgacacatggaataggagaaaatggagtccggggtattgcagtggattgggtagcaggaaatctttatttcaccaatgcctttgtttctgaaacactgatagaagttctgcggatcaatactacttaccgccgtgttcttcttaaagtcacagtggacatgcctaggcatattgttgtagatcccaagaacagatacctcttctgggctgactatgggcagagaccaaagattgagcgttctttccttgactgtaccaatcgaacagtgcttgtgtcagagggcattgtcacaccacggggcttggcagtggaccgaagtgatggctacgtttattgggttgatgattctttagatataattgcaaggattcgtatcaatggagagaactctgaagtgattcgttatggcagtcgttacccaactccttatggcatcactgtttttgaaaattctatcatatgggtagataggaatttgaaaaagatcttccaagccagcaaggaaccagagaacacagagccacccacagtgataagagacaatatcaactggctaagagatgtgaccatctttgacaagcaagtccagccccggtcaccagcagaggtcaacaacaacccttgcttggaaaacaatggtgggtgctctcatctctgctttgctctgcctggattgcacaccccaaaatgtgactgtgcctttgggaccctgcaaagtgatggcaagaattgtgccatttcaacagaaaatttcctcatctttgccttgtctaattccttgagaagcttacacttggaccctgaaaaccatagcccacctttccaaacaataaatgtggaaagaactgtcatgtctctagactatgacagtgtaagtgatagaatctacttcacacaaaatttagcctctggagttggacagatttcctatgccaccctgtcttcagggatccatactccaactgtcattgcttcaggtatagggactgctgatggcattgcctttgactggattactagaagaatttattacagtgactacctcaaccagatgattaattccatggctgaagatgggtctaaccgcactgtgatagcccgcgttccaaaaccaagagcaattgtgttagatccctgccaagggtacctgtactgggctgactgggatacacatgccaaaatcgagagagccacattgggaggaaacttccgcgtacccattgtgaacagcagtctggtcatgcccagtgggctgactctggactatgaagaggaccttctctactgggtggatgctagtctgcagaggattgaacgcagcactctgacgggcgtggatcgtgaagtcattgtcaatgcagccgttcatgcttttggcttgactctctatggccagtatatttactggactgacttgtacacacaaagaatttaccgagctaacaaatatgacgggtcaggtcagattgcaatgaccacaaatttgctctcccagcccaggggaatcaacactgttgtgaagaaccagaaacaacagtgtaacaatccttgtgaacagtttaatgggggctgcagccatatctgtgcaccaggtccaaatggtgccgagtgccagtgtccacatgagggcaactggtatttggccaacaacaggaagcactgcattgtggacaatggtgaacgatgtggtgcatcttccttcacctgctccaatgggcgctgcatctcggaagagtggaagtgtgataatgacaacgactgtggggatggcagtgatgagatggaaagtgtctgtgcacttcacacctgctcaccgacagccttcacctgtgccaatgggcgatgtgtccaatactcttaccgctgtgattactacaatgactgtggtgatggcagtgatgaggcagggtgcctgttcagggactgcaatgccaccacggagtttatgtgcaataacagaaggtgcatacctcgtgagtttatctgcaatggtgtagacaactgccatgataataacacttcagatgagaaaaattgccctgatcgcacttgccagtctggatacacaaaatgtcataattcaaatatttgtattcctcgcgtttatttgtgtgacggagacaatgactgtggagataacagtgatgaaaaccctacttattgcaccactcacacgtgcagcagcagtgagttccaatgcgcatctgggcgctgtattcctcaacattggtattgtgatcaagaaacagattgttttgatgcctctgatgaacctgcctcttgtggtcactctgagcgaacatgcctagctgatgagttcaagtgtgatggtgggaggtgcatcccaagcgaatggatctgtgacggtgataatgactgtggggatatgagtgacgaggataaaaggcaccagtgtcagaatcaaaactgctcggattccgagtttctctgtgtaaatgacagacctccggacaggaggtgcattccccagtcttgggtctgtgatggcgatgtggattgtactgacggctacgatgagaatcagaattgcaccaggagaacttgctctgaaaatgaattcacctgtggttacggactgtgtatcccaaagatattcaggtgtgaccggcacaatgactgtggtgactatagcgacgagaggggctgcttataccagacttgccaacagaatcagtttacctgtcagaacgggcgctgcattagtaaaaccttcgtctgtgatgaggataatgactgtggagacggatctgatgagctgatgcacctgtgccacaccccagaacccacgtgtccacctcacgagttcaagtgtgacaatgggcgctgcatcgagatgatgaaactctgcaaccacctagatgactgtttggacaacagcgatgagaaaggctgtggcattaatgaatgccatgacccttcaatcagtggctgcgatcacaactgcacagacaccttaaccagtttctattgttcctgtcgtcctggttacaagctcatgtctgacaagcggacttgtgttgatattgatgaatgcacagagatgccttttgtctgtagccagaagtgtgagaatgtaataggctcctacatctgtaagtgtgccccaggctacctccgagaaccagatggaaagacctgccggcaaaacagtaacatcgaaccctatctcatttttagcaaccgttactatttgagaaatttaactatagatggctatttttactccctcatcttggaaggactggacaatgttgtggcattagattttgaccgagtagagaagagattgtattggattgatacacagaggcaagtcattgagagaatgtttctgaataagacaaacaaggagacaatcataaaccacagactaccagctgcagaaagtctggctgtagactgggtttccagaaagctctactggttggatgcccgcctggatggcctctttgtctctgacctcaatggtggacaccgccgcatgctggcccagcactgtgtggatgccaacaacaccttctgctttgataatcccagaggacttgcccttcaccctcaatatgggtacctctactgggcagactggggtcaccgcgcatacattgggagagtaggcatggatggaaccaacaagtctgtgataatctccaccaagttagagtggcctaatggcatcaccattgattacaccaatgatctactctactgggcagatgcccacctgggttacatagagtactctgatttggagggccaccatcgacacacggtgtatgatggggcactgcctcaccctttcgctattaccatttttgaagacactatttattggacagattggaatacaaggacagtggaaaagggaaacaaatatgatggatcaaatagacagacactggtgaacacaacacacagaccatttgacatccatgtgtaccatccatataggcagcccattgtgagcaatccctgtggtaccaacaatggtggctgttctcatctctgcctcatcaagccaggaggaaaagggttcacttgcgagtgtccagatgacttccgcacccttcagctgagtggcagcacctactgcatgcccatgtgctccagcacccagttcctgtgcgctaacaatgaaaagtgcattcctatctggtggaaatgtgatggacagaaagactgctcagatggctctgatgaactggccctttgcccgcagcgcttctgccgactgggacagttccagtgcagtgacggcaactgcaccagcccgcagactttatgcaatgctcaccaaaattgccctgatgggtctgatgaagaccgtcttctttgtgagaatcaccactgtgactccaatgaatggcagtgcgccaacaaacgttgcatcccagaatcctggcagtgtgacacatttaacgactgtgaggataactcagatgaagacagttcccactgtgccagcaggacctgccggccgggccagtttcggtgtgctaatggccgctgcatcccgcaggcctggaagtgtgatgtggataatgattgtggagaccactcggatgagcccattgaagaatgcatgagctctgcccatctctgtgacaacttcacagaattcagctgcaaaacaaattaccgctgcatcccaaagtgggccgtgtgcaatggtgtagatgactgcagggacaacagtgatgagcaaggctgtgaggagaggacatgccatcctgtgggggatttccgctgtaaaaatcaccactgcatccctcttcgttggcagtgtgatgggcaaaatgactgtggagataactcagatgaggaaaactgtgctccccgggagtgcacagagagcgagtttcgatgtgtcaatcagcagtgcattccctcgcgatggatctgtgaccattacaacgactgtggggacaactcagatgaacgggactgtgagatgaggacctgccatcctgaatattttcagtgtacaagtggacattgtgtacacagtgaactgaaatgcgatggatccgctgactgtttggatgcgtctgatgaagctgattgtcccacacgctttcctgatggtgcatactgccaggctactatgttcgaatgcaaaaaccatgtttgtatcccgccatattggaaatgtgatggcgatgatgactgtggcgatggttcagatgaagaacttcacctgtgcttggatgttccctgtaattcaccaaaccgtttccggtgtgacaacaatcgctgcatttatagtcatgaggtgtgcaatggtgtggatgactgtggagatggaactgatgagacagaggagcactgtagaaaaccgacccctaaaccttgtacagaatatgaatataagtgtggcaatgggcattgcattccacatgacaatgtgtgtgatgatgccgatgactgtggtgactggtccgatgaactgggttgcaataaaggaaaagaaagaacatgtgctgaaaatatatgcgagcaaaattgtacccaattaaatgaaggaggatttatctgctcctgtacagctgggttcgaaaccaatgtttttgacagaacctcctgtctagatatcaatgaatgtgaacaatttgggacttgtccccagcactgcagaaataccaaaggaagttatgagtgtgtctgtgctgatggcttcacgtctatgagtgaccgccctggaaaacgatgtgcagctgagggtagctctcctttgttgctactgcctgacaatgtccgaattcgaaaatataatctctcatctgagaggttctcagagtatcttcaagatgaggaatatatccaagctgttgattatgattgggatcccaaggacataggcctcagtgttgtgtattacactgtgcgaggggagggctctaggtttggtgctatcaaacgtgcctacatccccaactttgaatccggccgcaataatcttgtgcaggaagttgacctgaaactgaaatacgtaatgcagccagatggaatagcagtggactgggttggaaggcatatttactggtcagatgtcaagaataaacgcattgaggtggctaaacttgatggaaggtacagaaagtggctgatttccactgacctggaccaaccagctgctattgctgtgaatcccaaactagggcttatgttctggactgactggggaaaggaacctaaaatcgagtctgcctggatgaatggagaggaccgcaacatcctggttttcgaggaccttggttggccaactggcctttctatcgattatttgaacaatgaccgaatctactggagtgacttcaaggaggacgttattgaaaccataaaatatgatgggactgataggagagtcattgcaaaggaagcaatgaacccttacagcctggacatctttgaagaccagttatactggatatctaaggaaaagggagaagtatggaaacaaaataaatttgggcaaggaaagaaagagaaaacgctggtagtgaacccttggctcactcaagttcgaatctttcatcaactcagatacaataagtcagtgcccaacctttgcaaacagatctgcagccacctctgccttctgagacctggaggatacagctgtgcctgtccccaaggctccagctttatagaggggagcaccactgagtgtgatgcagccatcgaactgcctatcaacctgccccccccatgcaggtgcatgcacggaggaaattgctattttgatgagactgacctccccaaatgcaagtgtcctagcggctacaccggaaaatattgtgaaatggcgttttcaaaaggcatctctccaggaacaaccgcagtagctgtgctgttgacaatcctcttgatcgtcgtaattggagctctggcaattgcaggattcttccactatagaaggaccggctcccttttgcctgctctgcccaagctgccaagcttaagcagtctcgtcaagccctctgaaaatgggaatggggtgaccttcagatcaggggcagatcttaacatggatattggagtgtctggttttggacctgagactgctattgacaggtcaatggcaatgagtgaagactttgtcatggaaatggggaagcagcccataatatttgaaaacccaatgtactcagccagagacagtgctgtcaaagtggttcagccaatccaggtgactgtatctgaaaatgtggataataagaattatggaagtcccataaacccttctgagatagttccagagacaaacccaacttcaccagctgctgatggaactcaggtgacaaaatggaatctcttcaaacgaaaatctaaacaaactaccaactttgaaaatccaatctatgcacagatggagaacgagcaaaaggaaagtgttgctgcgacaccacctccatcaccttcgctccctgctaagcctaagcctccttcgagaagagacccaactccaacctattctgcaacagaagacacttttaaagacaccgcaaatcttgttaaagaagactctgaagtatagctataccagctatttagggaataattagaaacacacttttgcacatatattttttacaaacagatgaaaaaagttaacattcagtactttatgaaaaaaatatatttttccctgtttgcctatagttggaggtatcctgtgtgtctttttttacttatgccgtctcatatttttacaaataattatcacaatgtactatatgtatatctttgcactgaagttgtctgaaggtaatactataaatatattgtatatttgtaaattttggaaagattatcctgttactgaatttgctaataaagatgtctgctgatttggttggtgatcattatagtaaatgatccaacaagaaaaggaattgactggggacctttagccgtgtctaaagaagaggcaccactcatatttcctataaaattatctaggaaaggaatccaggccccgctcttgggtccatttttacacattagcacttaattaatgttcaatattacatgtcaatttgattaatggctatgttgataggggccactatgtgttgtatagacatctggacttgactgtagactcctcagataatacagaaggtaggaaaagcaattcagtttggcccttctgtgtgttggcattgtctaaccagaactctctgtttcatgtgtgttctctcactagctgccaagacaacatttttatttgtgatgtctatgaggaaatcccatatcattaagtgccagtgtcctgcattgagtttgtggttaattaaatgagctcttctgctgatggaccctggagcaatttctcccctcacctgacattcaaggtggtcacctgccctagtagttggagctcagtagctgaatttctgaaaccaaatctgtgtcttcataaaataaggtgcaaaaaaaaaaaataccagttaagtaaagcctcaactgggtttttgtttctatgaaaatatcattataatcactatttatttcctaagttgaacctgaatagaaagggaaaccattcttattaagctttttattaggccctgtggctaaatgtgtacatttatattagaatgtactgtacagtccagatcttttctttaattcttattggttttttttttttttttttttttagagatggagtcttgctatattgccaaggctgatcttgaagtcctgggctcaagtgatcctcccacctcagcctcctgagtggttggggttacgggcgtgagccactgtgcctggcttccagctctcctcttaaatagtgggtatagtctgcacaacaggaaccatggcaggaatatacactttcccatagcaaatagcatacctgactctctgtgctaatattgcacatttgttaaacaatgaatgaatggatggatggatggatggatgaatgaatgaaacatatactactgattattttattccagagttctcaaaatatttgttgctgatattttgagtgctgactgtaattactttgattagataaacaactggaaataatgctgctgaaaaagttctaataaatgtgtattttatcaga

SEQ ID NO: 16466 - DNA, 4007 bp, Homo sapiens
  source 1..4007: mol_type = unassigned DNA
aggcttttggccactaggagctggcggaggtgcagacctaaaggagcgttcgctagcagaggcgctgccggtgcggtgtgctacgcgcgcccacctcccggggaaggaacggcgaggccggggaccgtcgcggagatggatcgcgggccggcagcagtggcgtgcacgctgctcctggctctcgtcgcctgcctagcgccggccagtggccaagaatgtgacagtgcgcattttcgctgtggaagtgggcattgcatccctgcagactggaggtgtgatgggaccaaagactgttcagatgacgcggatgaaattggctgcgctgttgtgacctgccagcagggctatttcaagtgccagagtgagggacaatgcatccccaactcctgggtgtgtgaccaagatcaagactgtgatgatggctcagatgaacgtcaagattgctcacaaagtacatgctcaagtcatcagataacatgctccaatggtcagtgtatcccaagtgaatacaggtgcgaccacgtcagagactgccccgatggagctgatgagaatgactgccagtacccaacatgtgagcagcttacttgtgacaatggggcctgctataacaccagtcagaagtgtgattggaaagttgattgcagggactcctcagatgaaatcaactgcactgagatatgcttgcacaatgagttttcatgtggcaatggagagtgtatccctcgtgcttatgtctgtgaccatgacaatgattgccaagacggcagtgacgaacatgcttgcaactatccgacctgcggtggttaccagttcacttgccccagtggccgatgcatttatcaaaactgggtttgtgatggagaagatgactgtaaagataatggagatgaagatggatgtgaaagcggtcctcatgatgttcataaatgttccccaagagaatggtcttgcccagagtcgggacgatgcatctccatttataaagtttgtgatgggattttagattgcccaggaagagaagatgaaaacaacactagtaccggaaaatactgtagtatgactctgtgctctgccttgaactgccagtaccagtgccatgagacgccgtatggaggagcgtgtttttgtcccccaggttatatcatcaaccacaatgacagccgtacctgtgttgagtttgatgattgccagatatggggaatttgtgaccagaagtgtgaaagccgacctggccgtcacctgtgccactgtgaagaagggtatatcttggagcgtggacagtattgcaaagctaatgattcctttggcgaggcctccattatcttctccaatggtcgggatttgttaattggtgatattcatggaaggagcttccggatcctagtggagtctcagaatcgtggagtggccgtgggtgtggctttccactatcacctgcaaagagttttttggacagacaccgtgcaaaataaggttttttcagttgacattaatggtttaaatatccaagaggttctcaatgtttctgttgaaaccccagagaacctggctgtggactgggttaataataaaatctatctagtggaaaccaaggtcaaccgcatagatatggtaaatttggatggaagctatcgggttacccttataactgaaaacttggggcatcctagaggaattgccgtggacccaactgttgggaagactgtagttcatggaggctccctcattcctcatccctttggagtaagcttatttgaaggtcaggtgttctttacagattggacaaagatggccgtgctgaaggcaaacaagttcacagagaccaacccacaagtgtactaccaggcttccctgaggccctatggagtgactgtttaccattccctcagacagccctatgctaccaatccgtgtaaagataacaatgggggctgtgagcaggtctgtgtcctcagccacagaacagataatgatggtttgggtttccgttgcaagtgcacattcggcttccaactggatacagatgagcgccactgcattggaagagaaattctcgcagctaacagggtggaaaatgttgaaagtttggcttttgattggatttcaaagaatctctattggacagactctcattacaagagtatcagtgtcatgaggctagctgataaaacgagacgcacagtagttcagtatttaaataacccacggtcggtggtagttcatccttttgccgggtatctattcttcactgattggttccgtcctgctaaaattatgagagcatggagtgacggatctcacctcttgcctgtaataaacactactcttggatggcccaatggcttggccatcgattgggctgcttcacgattgtactgggtagatgcctattttgataaaattgagcacagcacctttgatggtttagacagaagaagactgggccatatagagcagatgacacatccgtttggacttgccatctttggagagcatttattttttactgactggagactgggtgccattattcgagtcaggaaagcagatggtggagaaatgacagttatccgaagtggcattgcttacatactgcatttgaaatcgtatgatgtcaacatccagactggttctaacgcctgtaatcaacccacgcatcctaacggtgactgcagccacttctgcttcccggtgccaaatttccagcgagtgtgtgggtgcccttatggaatgaggctggcttccaatcacttgacatgcgagggggacccaaccaatgaaccacccacagagcagtgtggcttattttccttcccctgtaaaaatggcagatgtgtgcccaattactatctctgtgatggagtcgatgattgtcatgataacagtgatgagcaactatgtggcacacttaataatacctgttcatcttcggcgttcacctgtggccatggggagtgcattcctgcacactggcgctgtgacaaacgcaacgactgtgtggatggcagtgatgagcacaactgccccacccacgcacctgcttcctgccttgacacccaatacacctgtgataatcaccagtgtatctcaaagaactgggtctgtgacacagacaatgattgtggggatggatctgatgaaaagaactgcaattcgacagagacatgccaacctagtcagtttaattgccccaatcatcgatgtattgacctatcgtttgtctgtgatggtgacaaggattgtgttgatggatctgatgaggttggttgtgtattaaactgtactgcttctcaattcaagtgtgccagtggggataaatgtattggcgtcacaaatcgttgtgatggtgtttttgattgcagtgacaactcggatgaagcaggctgtccaaccaggcctcctggtatgtgccactcagatgaatttcagtgccaagaagatggtatctgcatcccgaacttctgggaatgtgatgggcatccagactgcctctatggatctgatgagcacaatgcctgtgtccccaagacttgcccttcatcatatttccactgtgacaacggaaactgcatccacagggcatggctctgtgatcgggacaatgactgcggggatatgagtgatgagaaggactgccctactcagccctttcgctgtcctagttggcaatggcagtgtcttggccataacatctgtgtgaatctgagtgtagtgtgtgatggcatctttgactgccccaatgggacagatgagtccccactttgcagtaagtttcctgaccacagtttactggccataaactcattctgaacagtagcctggtgtgcatcaccattgtcacagtcactgtgtagctttgtaggaaggatttcagttcctctatgagttcacatctgtgtagggggtaaccataattgaattcaaatacatcaccattggataattttctgattaaatcctttgtacttggttatgtgtttttacttctttttatgtctttgttt

SEQ ID NO: 16467 - DNA, 2913 bp, Homo sapiens
  source 1..2913: mol_type = unassigned DNA
tttgcctgaagaaaggtgacttctaacaactgtctgtgattctcagaaagctctactggttggatgcccgcctggatggcctctttgtctctgacctcaatggtggacaccgccgcatgctggcccagcactgtgtggatgccaacaacaccttctgctttgataatcccagaggacttgcccttcaccctcaatatgggtacctctactgggcagactggggtcaccgcgcatacattgggagagtaggcatggatggaaccaacaagtctgtgataatctccaccaagttagagtggcctaatggcatcaccattgattacaccaatgatctactctactgggcagatgcccacctgggttacatagagtactctgatttggagggccaccatcgacacacggtgtatgatggggcactgcctcaccctttcgctattaccatttttgaagacactatttattggacagattggaatacaaggacagtggaaaagggaaacaaatatgatggatcaaatagacagacactggtgaacacaacacacagaccatttgacatccatgtgtaccatccatataggcagcccattgtgagcaatccctgtggtaccaacaatggtggctgttctcatctctgcctcatcaagccaggaggaaaagggttcacttgcgagtgtccagatgacttccgcacccttcagctgagtggcagcacctactgcatgcccatgtgctccagcacccagttcctgtgcgctaacaatgaaaagtgcattcctatctggtggaaatgtgatggacagaaagactgctcagatggctctgatgaactggccctttgcccgcagcgcttctgccgactgggacagttccagtgcagtgacggcaactgcaccagcccgcagactttatgcaatgctcaccaaaattgccctgatgggtctgatgaagaccgtcttctttgtgagaatcaccactgtgactccaatgaatggcagtgcgccaacaaacgttgcatcccagaatcctggcagtgtgacacatttaacgactgtgaggataactcagatgaagacagttcccactgtgccagcaggacctgccggccgggccagtttcggtgtgctaatggccgctgcatcccgcaggcctggaagtgtgatgtggataatgattgtggagaccactcggatgagcccattgaagaatgcatgagctctgcccatctctgtgacaacttcacagaattcagctgcaaaacaaattaccgctgcatcccaaagtgggccgtgtgcaatggtgtagatgactgcagggacaacagtgatgagcaaggctgtgaggagaggacatgccatcctgtgggggatttccgctgtaaaaatcaccactgcatccctcttcgttggcagtgtgatgggcaaaatgactgtggagataactcagatgaggaaaactgtgctccccgggagtgcacagagagcgagtttcgatgtgtcaatcagcagtgcattccctcgcgatggatctgtgaccattacaacgactgtggggacaactcagatgaacgggactgtgggatgcgtctgatgaagctgattgtcccacacgctttcctgatggtgcatactgccaggctactatgttcgaatgcaaaaaccatgtttgtatcccgccatattggaaatgtgatggcgatgatgactgtggcgatggttcagatgaagaacttcacctgtgcttggatgttccctgtaattcaccaaaccgtttccggtgtgacaacaatcgctgcatttatagtcatgaggtgtgcaatggtgtggatgactgtggagatggaactgatgagacagaggagcactgtagaaaaccgacccctaaaccttgtacagaatatgaatataagtgtggcaatgggcattgcattccacatgacaatgtgtgtgatgatgccgatgactgtggtgactggtccgatgaactgggttgcaataaaggaaaagaaagaacatgtgctgaaaatatatgcgagcaaaattgtacccaattaaatgaaggaggatttatctgctcctgtacagctgggttcgaaaccaatgtttttgacagaacctcctgtctagatatcaatgaatgtgaacaatttgggacttgtccccagcactgcagaaataccaaaggaagttatgagtgtgtctgtgctgatggcttcacgtctatgagtgaccgccctggaaaacgatgtgcagctgagggtagctctcctttgttgctactgcctgacaatgtccgaattcgaaaatataatctctcatctgagaggttctcagagtatcttcaagatgaggaatatatccaagctgttgattatgattgggatcccaaggacataggcctcagtgttgtgtattacactgtgcgaggggagggctctaggtttggtgctatcaaacgtgcctacatccccaactttgaatccggccgcaataatcttgtgcaggaagttgacctgaaactgaaatacgtaatgcagccagatggaatagcagtggactgggttggaaggcatatttactggtcagatgtcaagaataaacgcattgaggtggctaaacttgatggaaggtacagaaagtggctgatttccactgacctggaccaaccagctgctattgctgtgaatcccaaactagggcttatgttctggactgactggggaaaggaacctaaaatcgagtctgcctggatgaatggagaggaccgcaacatcctggttttcgaggaccttggttggccaactggcctttctatcgattatttgaacaatgaccgaatctactggagtgacttcaaggaggacgttattgaaaccataaaatatgatgggactgataggagagtcattgc

SEQ ID NO: 16468 - DNA, 3690 bp, Homo sapiens
  source 1..3690: mol_type = unassigned DNA
gagccgcagccagagccagagccggagccgcagccggaaccggagccggagccgcggggcaggaggcggcgcccgcgggcggccgggcccggcatggagaagcgcgcggccgcggggctggagggcgcgccgggcgcccgggcgcagctggccgtcgtctgtctggtgaacatctttctcaccgggagactcagcagtgcggttcctgccttagcggcctgcagtgggaagctggagcagcacacggagcggcgtggggtcatctacagcccggcctggcccctcaactacccgccaggcaccaactgcagctggtacatccagggcgaccgtggtgacatgattaccatcagcttccgcaactttgacgtggaggagtcccaccagtgctccctggactggctcctgctgggcccagcagccccaccccgccaggaggccttccgcctctgtggctccgccatcccacctgccttcatctctgcccgcgaccatgtctggattttcttccactcagacgcctccagctccggccaggcccagggcttccgtctgtcttacatccgagggaagctgggccaggcatcctgccaggcagatgagttccgctgtgacaacggcaagtgcctgcccggcccgtggcagtgcaacacggtggacgagtgtggagacggctctgatgagggcaactgctcggcgcccgcctccgagcctccaggcagcctgtgccccggggggaccttcccatgcagcggggcgcgctccacgcgctgcctgcctgtggagcggcgctgtgacggcttgcaggactgcggcgacggctcggatgaggcgggctgccccgacctggcgtgcggccggcggctgggcagcttctacggctcctttgcctccccagacctgttcggcgccgctcgcgggccctcagaccttcactgcacgtggctggtggacacacaggactcccggcgggtgctgctgcagctggaactgcggctgggctatgacgactacgtgcaggtatacgagggcctgggcgagcgcggggaccgcctgctgcagacgctgtcctaccgcagcaaccaccggcccgtgagcctggaggccgcccagggccgcctcactgtggcctaccacgcgcgcgcccgcagcgccggccacggcttcaatgccacctaccaggtgaagggctattgcctcccctgggagcagccgtgcgggagcagtagtgacagtgacgggggcagcctgggcgaccagggctgcttctcagagccacagcgctgtgatggctggtggcattgtgccagcggccgagacgagcagggctgccctgcctgcccgcccgaccagtacccctgcgagggtggcagtggtctgtgctacacgcctgccgaccgctgcaacaaccagaaaagctgtcccgacggcgccgacgagaagaactgcttctcctgccagcccggcaccttccactgcggtaccaacctgtgcatcttcgagacgtggcgctgtgacggccaggaagactgccaggacggcagcgatgagcatgggtgcctggccgccgtgccccgcaaggtcatcacggcggcgctcattggcagcctggtgtgtggcctgctgctggtcatcgcgctgggctgcgccttcaagctctactcactgcgcacgcaggaatacagggccttcgagacccagatgacgcgcctggaggctgagttcgtgcggcgggaggcacccccatcctatggtcagctcatcgcccagggcctcattccacccgtggaggactttcctgtctacagtgcgtcccaggcctctgtgctgcagaatcttcgcacagccatgcggagacagatgcgtcggcacgcctcccgccgggggccctcccgccgccgcctcggccgcctctggaaccggctctttcaccggccgcgggcgccccgaggccagatcccactgctgaccgcagcacgcccctcacagaccgtgctgggcgatggcttcctccagcctgctccaggggctgcccccgaccccccagcaccgctcatggacacaggcagcaccagggcggccggagacaggccccccagtgcccccggccgtgcaccggaggtgggaccttcagggccacccttgccctcgggcctgcgagacccagagtgcaggcccgtggacaaggacagaaaggtctgcagggagccactggtagacggcccagctcctgcagatgcacctcgggagccctgctcagcccaggacccgcacccccaggtctccactgccagcagcaccctgggcccccactcgccagagccactgggggtctgcaggaaccccccgcccccctgctccccaatgctggaggccagcgatgatgaggccctgttggtctgttgaccgctgggctcgctggtgaccgccacagccccgctttgtaaccagggaatacacagtcatttctaccctgcctctgcgtcctttcttatggagaggccctccggggaccccagcggaggggctggcccctaagccagctggctgcactggtgggcgggagctgtgggactgaacggcgggggggagaagagtggagtggtgagcccgtctgcagggtcccattgtacacaagcaccctggggtctcacttctctccccccactccattctgggaacccatttccagagaagcaggggaccagagcctttttgcttcatctgccctgcagtggcaacagctgcccctagagctgggagttgtcatgaggatggggccgggccatggggacgctgggtctcatccgtggtgactattttgctcacgcctcaccctcttcctgtccagcaaggcctctggaggacctgggttgggtggctcctgccaaaccctcatgcccctggccaggcaggcgccctttgccctccctgaaggtccaatctcctgggcaccgtggaagggctggggtgtgtgcctgctgtacatgaagcccctggagttccctgcaggcctcaaagcccccaggacatgctgctctgtgctttctggggacagagaggccgaggcaccaacagcagtggccacgtctgttccatcctatctcagggcctcggtttccccacctgtaagccagggtgagactgtgggctctgaagtcctgaccttcactctgtggtgatttacgggaagaaagacaatcccagcctggagcccctgagctctcctgggtggccgagctcagactggcatcgaggggcctggggtaggggcggactgagctgctaccccatcctcgacatccctttagggcagggggactctgggtgccatggtagggagcgcctgtgtcaagcagcaaagccccctaatgtcaagagcctcctccagggcctgccacggcatcttcctggccagcaacatgtgtgcacccaccgaggtacgccccagccactcccatctgtgcccatcagggactccccatagcacgagcgaacagccagccctgtttatttataggccttttcaggaagagctagcagggcagtgctaagacaggaaacccagtccacattttagggcttccttaaacaggcttctgagagtcgtatcttttttcttttttttccagaaaaaaacaaaacaaaacttttttgccaaaacacctcctcaataaacaacatgtaaac

SEQ ID NO: 16469 - DNA, 2880 bp, Homo sapiens
  source 1..2880: mol_type = unassigned DNA
gcgcgtcacgtggctggcgcagcgcggcctccaggctccgggcgcggcctggcccctcaactacccgccaggcaccaactgcagctggtacatccagggcgaccgtggtgacatgattaccatcagcttccgcaactttgacgtggaggagtcccaccagtgctccctggactggctcctgctgggcccagcagccccaccccgccaggaggccttccgcctctgtggctccgccatcccacctgccttcatctctgcccgcgaccatgtctggattttcttccactcagacgcctccagctccggccaggcccagggcttccgtctgtcttacatccgaggtgatggaggctgcagggcaggcaggacaccacggagcacaccgtgcatgcccacaggctcccggcccacaggggcggcaccctccacagggccccggctccctgtgggatgtcccctgaccgccctgtcaatctcaggacagtggcaggactgggcatgcggatgccttggacctctcaaggtcactggccccacttcccagtcttggctagtcctgggaactcacccctaaccccaggctcaggtcagggacagagcccaccctggtgttggaggggtctctgctgccacagtgatggggaaccacctgcccgcttttggccccaggccccctggccgaagggaggctcttctgtctcctgactgtcccctgctacgtctccaccccacagggaagctgggccaggcatcctgccaggcagatgagttccgctgtgacaacggcaagtgcctgcccggcccgtggcagtgcaacacggtggacgagtgtggagacggctctgatgagggcaactgctcggcgcccgcctccgagcctccaggcagcctgtgccccggggggaccttcccatgcagcggggcgcgctccacgcgctgcctgcctgtggagcggcgctgtgacggcttgcaggactgcggcgacggctcggatgaggcgggctgccccgacctggcgtgcggccggcggctgggcagcttctacggctcctttgcctccccagacctgttcggcgccgctcgcgggccctcagaccttcactgcacgtggctggtggacacacaggactcccggcgggtgctgctgcagctggaactgcggctgggctatgacgactacgtgcaggtatacgagggcctgggcgagcgcggggaccgcctgctgcagacgctgtcctaccgcagcaaccaccggcccgtgagcctggaggccgcccagggccgcctcactgtggcctaccacgcgcgcgcccgcagcgccggccacggcttcaatgccacctaccaggtgaagggctattgcctcccctgggagcagccgtgcgggagcagtagtgacagtgacgggggcagcctgggcgaccagggctgcttctcagagccacagcgctgtgatggctggtggcattgtgccagcggccgagacgagcagggctgccctgcctgcccgcccgaccagtacccctgcgagggtggcagtggtctgtgctacacgcctgccgaccgctgcaacaaccagaaaagctgtcccgacggcgccgacgagaagaactgcttctcctgccagcccggcaccttccactgcggtaccaacctgtgcatcttcgagacgtggcgctgtgacggccaggaagactgccaggacggcagcgatgagcatgggtgcctggccgccgtgccccgcaaggtcatcacggcggcgctcattggcagcctggtgtgtggcctgctgctggtcatcgcgctgggctgcgccttcaagctctactcactgcgcacgcaggaatacaggtgggcgctgtgcccgcagccaggggaccgggcttcttcatcacccaggcttgctgtccccgtagctgtgggtttgcaaacgggggcctggactagctacatggaggctgccctggtgcacactggggtccctatatcttggggtgtctgggtggagggtcgtcctggaatcctgttgttgttcctgctgcaggtcccgggcagcccagtcatgtcgccctccgcccactgcttctagggccttcgagacccagatgacgcgcctggaggctgagttcgtgcggcgggaggcacccccatcctatggtcagctcatcgcccagggcctcattccacccgtggaggactttcctgtctacagtgcgtcccaggcctctgtgctgcagaatcttcgcacagccatgcggagacagatgcgtcggcacgcctcccgccgggggccctcccgccgccgcctcggccgcctctggaaccggctctttcaccggccgcgggcgccccgaggccagatcccactgctgaccgcagcacgcccctcacagaccgtgctgggcgatggcttcctccagcctgctccaggggctgcccccgaccccccagcaccgctcatggacacaggcagcaccagggcggccggagacaggccccccagtgcccccggccgtgcaccggaggtgggaccttcagggccacccttgccctcgggcctgcgagacccagagtgcaggcccgtggacaaggacagaaaggtctgcagggagccactggtagacggcccagctcctgcagatgcacctcgggagccctgctcagcccaggacccgcacccccaggtctccactgccagcagcaccctgggcccccactcgccagagccactgggggtctgcaggaaccccccgcccccctgctccccaatgctggaggccagcgatgatgaggccctgttggtctgttgaccgctgggctcgctggtgaccgccacagccccgctttgtaaccagggaatacacagtcatttctaccctg

SEQ ID NO: 16470 - DNA, 8076 bp, Homo sapiens
  source 1..8076: mol_type = unassigned DNA
gtggccggggctgcggcgcggggggcggggcggtcgggcccgggacaccccctcccggtcccctggcggggcagcgtcggctctggcagcactggaggcggcggcggcccgagggcgacttgcggggcgcgcaggccgccgtgcacccgggacgcttccccctcggggaccctccgcgggcttctccgccgcgccgtccggcgggagccggcgggaccccgggcgagcggcgcgggcggcaccatgaggcggcagtggggcgcgctgctgcttggcgccctgctctgcgcacacggcctggccagcagccccgagtgtgcttgtggtcggagccacttcacatgtgcagtgagtgctcttggagagtgtacctgcatccctgcccagtggcagtgtgatggagacaatgactgcggggaccacagcgatgaggatggatgtatactacctacctgttcccctcttgactttcactgtgacaatggcaagtgcatccgccgctcctgggtgtgtgacggggacaacgactgtgaggatgactcggatgagcaggactgtcccccccgggagtgtgaggaggacgagtttccctgccagaatggctactgcatccggagtctgtggcactgcgatggtgacaatgactgtggcgacaacagcgatgagcagtgtgacatgcgcaagtgctccgacaaggagttccgctgtagtgacggaagctgcattgctgagcattggtactgcgacggtgacaccgactgcaaagatggctccgatgaggagaactgtccctcagcagtgccagcgcccccctgcaacctggaggagttccagtgtgcctatggacgctgcatcctcgacatctaccactgcgatggcgacgatgactgtggagactggtcagacgagtctgactgctcctcccaccagccctgccgctctggggagttcatgtgtgacagtggcctgtgcatcaatgcaggctggcgctgcgatggtgacgcggactgtgatgaccagtctgatgagcgcaactgcaccacctccatgtgtacggcagaacagttccgctgtcactcaggccgctgtgtccgcctgtcctggcgctgtgatggggaggacgactgtgcagacaacagcgatgaagagaactgtgagaatacaggaagcccccaatgtgccttggaccagttcctgtgttggaatgggcgctgcattgggcagaggaagctgtgcaacggggtcaacgactgtggtgacaacagcgacgaaagcccacagcagaattgccggccccggacgggtgaggagaactgcaatgttaacaacggtggctgtgcccagaagtgccagatggtgcggggggcagtgcagtgtacctgccacacaggctaccggctcacagaggatgggcacacgtgccaagatgtgaatgaatgtgccgaggaggggtattgcagccagggctgcaccaacagcgaaggggctttccaatgctggtgtgaaacaggctatgaactacggcccgaccggcgcagctgcaaggctctggggccagagcctgtgctgctgttcgccaatcgcatcgacatccggcaggtgctgccacaccgctctgagtacacactgctgcttaacaacctggagaatgccattgcccttgatttccaccaccgccgcgagcttgtcttctggtcagatgtcaccctggaccggatcctccgtgccaacctcaacggcagcaacgtggaggaggttgtgtctactgggctggagagcccagggggcctggctgtggattgggtccatgacaaactctactggaccgactcaggcacctcgaggattgaggtggccaatctggatggggcccaccggaaagtgttgctgtggcagaacctggagaagccccgggccattgccttgcatcccatggagggtaccatttactggacagactggggcaacaccccccgtattgaggcctccagcatggatggctctggacgccgcatcattgccgatacccatctcttctggcccaatggcctcaccatcgactatgccgggcgccgtatgtactgggtggatgctaagcaccatgtcatcgagagggccaatctggatgggagtcaccgtaaggctgtcattagccagggcctcccgcatcccttcgccatcacagtgtttgaagacagcctgtactggacagactggcacaccaagagcatcaatagcgctaacaaatttacggggaagaaccaggaaatcattcgcaacaaactccacttccctatggacatccacaccttgcacccccagcgccaacctgcagggaaaaaccgctgtggggacaacaacggaggctgcacgcacctgtgtctgcccagtggccagaactacacctgtgcctgccccactggcttccgcaagatcagcagccacgcctgtgcccagagtcttgacaagttcctgctttttgcccgaaggatggacatccgtcgaatcagctttgacacagaggacctgtctgatgatgtcatcccactggctgacgtgcgcagtgctgtggcccttgactgggactcccgggatgaccacgtgtactggacagatgtcagcactgataccatcagcagggccaagtgggatggaacaggacaggaggtggtagtggataccagtttggagagcccagctggcctggccattgattgggtcaccaacaaactgtactggacagatgcaggtacagaccggattgaagtagccaacacagatggcagcatgagaacagtactcatctgggagaaccttgatcgtcctcgggacatcgtggtggaacccatgggcgggtacatgtattggactgactggggtgcgagccccaagattgaacgagctggcatggatgcctcaggccgccaagtcattatctcttctaatctgacctggcctaatgggttagctattgattatgggtcccagcgtctatactgggctgacgccggcatgaagacaattgaatttgctggactggatggcagtaagaggaaggtgctgattggaagccagctcccccacccatttgggctgaccctctatggagagcgcatctattggactgactggcagaccaagagcatacagagcgctgaccggctgacagggctggaccgggagactctgcaggagaacctggaaaacctaatggacatccatgtcttccaccgccgccggcccccagtgtctacaccatgtgctatggagaatggcggctgtagccacctgtgtcttaggtccccaaatccaagcggattcagctgtacctgccccacaggcatcaacctgctgtctgatggcaagacctgctcaccaggcatgaacagtttcctcatcttcgccaggaggatagacattcgcatggtctccctggacatcccttattttgctgatgtggtggtaccaatcaacattaccatgaagaacaccattgccattggagtagacccccaggaaggaaaggtgtactggtctgacagcacactgcacaggatcagtcgtgccaatctggatggctcacagcatgaggacatcatcaccacagggctacagaccacagatgggctcgcggttgatgccattggccggaaagtatactggacagacacgggaacaaaccggattgaagtgggcaacctggacgggtccatgcggaaagtgttggtgtggcagaaccttgacagtccccgggccatcgtactgtaccatgagatggggtttatgtactggacagactggggggagaatgccaagttagagcggtccggaatggatggctcagaccgcgcggtgctcatcaacaacaacctaggatggcccaatggactgactgtggacaaggccagctcccaactgctatgggccgatgcccacaccgagcgaattgaggctgctgacctgaatggtgccaatcggcatacattggtgtcaccggtgcagcacccatatggcctcaccctgctcgactcctatatctactggactgactggcagactcggagcatccaccgtgctgacaagggtactggcagcaatgtcatcctcgtgaggtccaacctgccaggcctcatggacatgcaggctgtggaccgggcacagccactaggttttaacaagtgcggctcgagaaatggcggctgctcccacctctgcttgcctcggccttctggcttctcctgtgcctgccccactggcatccagctgaagggagatgggaagacctgtgatccctctcctgagacctacctgctcttctccagccgtggctccatccggcgtatctcactggacaccagtgaccacaccgatgtgcatgtccctgttcctgagctcaacaatgtcatctccctggactatgacagcgtggatggaaaggtctattacacagatgtgttcctggatgttatcaggcgagcagacctgaacggcagcaacatggagacagtgatcgggcgagggctgaagaccactgacgggctggcagtggactgggtggccaggaacctgtactggacagacacaggtcgaaataccattgaggcgtccaggctggatggttcctgccgcaaagtactgatcaacaatagcctggatgagccccgggccattgctgttttccccaggaaggggtacctcttctggacagactggggccacattgccaagatcgaacgggcaaacttggatggttctgagcggaaggtcctcatcaacacagacctgggttggcccaatggccttaccctggactatgatacccgcaggatctactgggtggatgcgcatctggaccggatcgagagtgctgacctcaatgggaaactgcggcaggtcttggtcagccatgtgtcccacccctttgccctcacacagcaagacaggtggatctactggacagactggcagaccaagtcaatccagcgtgttgacaaatactcaggccggaacaaggagacagtgctggcaaatgtggaaggactcatggatatcatcgtggtttcccctcagcggcagacagggaccaatgcctgtggtgtgaacaatggtggctgcacccacctctgctttgccagagcctcggacttcgtatgtgcctgtcctgacgaacctgatagccggccctgctcccttgtgcctggcctggtaccaccagctcctagggctactggcatgagtgaaaagagcccagtgctacccaacacaccacctaccaccttgtattcttcaaccacccggacccgcacgtctctggaggaggtggaaggaagatgctctgaaagggatgccaggctgggcctctgtgcacgttccaatgacgctgttcctgctgctccaggggaaggacttcatatcagctacgccattggtggactcctcagtattctgctgattttggtggtgattgcagctttgatgctgtacagacacaaaaaatccaagttcactgatcctggaatggggaacctcacctacagcaacccctcctaccgaacatccacacaggaagtgaagattgaagcaatccccaaaccagccatgtacaaccagctgtgctataagaaagagggagggcctgaccataactacaccaaggagaagatcaagatcgtagagggaatctgcctcctgtctggggatgatgctgagtgggatgacctcaagcaactgcgaagctcacgggggggcctcctccgggatcatgtatgcatgaagacagacacggtgtccatccaggccagctctggctccctggatgacacagagacggagcagctgttacaggaagagcagtctgagtgtagcagcgtccatactgcagccactccagaaagacgaggctctctgccagacacgggctggaaacatgaacgcaagctctcctcagagagccaggtctaaatgcccacattctcttccctgcctgcctgttccttctcctttatggacgtctagtccttgtgctcgcttacaccgcaggccccgcttctgtgtgcttgtcctcctcctcctcccaccccataactgttcctaagccttcaccggagctgtttaccacgtgagtccataactacctgtgcacaagaaatgatggcacatcacgagaatttagacctggattttaccatgaacctcacatcttgtactccatcctgggccccctgaaactgcttattcgtgattcctcaccagcgtagagctccacctcccctttccccagtaccctcagtgcctgcttctcagtgctgatgcagctgatgacccaggactgcgctctgccccatcacagccagcatgactgcttctctgagagaacttgcccatcaggggctgggacatgggggtgtgggtaaagacagggatgaaggatagaggctgagagaagaaggaagaatcagcccagcaggtatgggcatctgggaaacctccagcctcaagtgtgttagtaacatgaaaaagctttggggggtagttggatctgggtgtctggtccattgctggcagtggacattattcttgccctaagagacactgccttttcagcagcagatactggtgagatgggggtggctcaggctgttcttcctcctcctagaatgtctggagctgtttctacattcagataactgggtcccctatcacaaggctactggctaataggaattccctcctggtgccaccactggccagtacctttcctaagtctttgctcaaattaaccaggttgtgagccagtggcttgagtgaatgttaggccttgggggctgagtctctgaaaagtctaagaagctctgcctagaccaaatatggtatacctcctgacccctctctccctcatgtcctgggattctggggaagagacctagaaacaagctttcaaagaaaaaccagaagttgtcataaatggtcagaaagaacgatcaggttggagacttgggaaacccagggcctaaagagaagtatccatgagggtcaaacttcctgttgaacttcctatgttctttctcaagtgctcagggatctaagttagtggacagcaagcctgtggctacggggtggtgatgttcctcttccagctgtcccctcagctaaggggcttagtttccatgtgggatgccatcacttggttcatgctcattcacacaaagggcacgtgtctcagcctggtatcagggaaattgagacttatttttgccctaaaacgtctccctagctgttcttcgtggggtttttttgtttgtttttttgcctaatttgctttttctgaccaagccttgtggcaccagcaatctccaaagtcctgtggtgggagggctgaataaataaaaatacaaagaggtgggtaaggagtaggaaggtagagagcaccactgatgaggccctcctagcccatggcagacccagacctcttctcccccaggaattagaagtggcaggagagaacaacaggggctgggaatggaggggagaatttctaggggaagtttcctgagttgaaacttctcctgtggttactggtattgagaaatcagctaccaaagtgaaaaaggacaagatcaattcttttctagtcagttctaagactgctagagagagataccaggcccttagccttgctctcagtagcgtcagccccagttctgagcctccccacattacacttaacaagcagtaaaggagtgagcactttgggtccttagactcacgtctggggaggaagagcaagtagaaaagtggcattttcttgattggaaagggggaaggatcttattgcacttgggctgttcagaatgtagaaaggacatatttgaggaagtatctatttgagcactgatttactctgtaaaaagcaaaatctctctgtcctaaactaatggaagcgattctcccatgctcatgtgtaatggttttaacgttactcactggagagattggactttctggagttatttaaccactatgttcagtattttaggactttatgataatttaatataaatttagcttttcttaatc

SEQ ID NO: 16471 - DNA, 5159 bp, Homo sapiens
  source 1..5159: mol_type = unassigned DNA
gcccgaggggggaggcggaggcgccgggagccgcgcgaggagccgccgccgccgcgccatggagcccgagtgagcgcggcgcgggcccgtccggccgccggacaacatggaggcagcgccgcccgggccgccgtggccgctgctgctgctgctgctgctgctgctggcgctgtgcggctgcccggcccccgccgcggcctcgccgctcctgctatttgccaaccgccgggacgtacggctggtggacgccggcggagtcaagctggagtccaccatcgtggtcagcggcctggaggatgcggccgcagtggacttccagttttccaagggagccgtgtactggacagacgtgagcgaggaggccatcaagcagacctacctgaaccagacgggggccgccgtgcagaacgtggtcatctccggcctggtctctcccgacggcctcgcctgcgactgggtgggcaagaagctgtactggacggactcagagaccaaccgcatcgaggtggccaacctcaatggcacatcccggaaggtgctcttctggcaggaccttgaccagccgagggccatcgccttggaccccgctcacgggtacatgtactggacagactggggtgagacgccccggattgagcgggcagggatggatggcagcacccggaagatcattgtggactcggacatttactggcccaatggactgaccatcgacctggaggagcagaagctctactgggctgacgccaagctcagcttcatccaccgtgccaacctggacggctcgttccggcagaaggtggtggagggcagcctgacgcaccccttcgccctgacgctctccggggacactctgtactggacagactggcagacccgctccatccatgcctgcaacaagcgcactggggggaagaggaaggagatcctgagtgccctctactcacccatggacatccaggtgctgagccaggagcggcagcctttcttccacactcgctgtgaggaggacaatggcggctgctcccacctgtgcctgctgtccccaagcgagcctttctacacatgcgcctgccccacgggtgtgcagctgcaggacaacggcaggacgtgtaaggcaggagccgaggaggtgctgctgctggcccggcggacggacctacggaggatctcgctggacacgccggacttcaccgacatcgtgctgcaggtggacgacatccggcacgccattgccatcgactacgacccgctagagggctatgtctactggacagatgacgaggtgcgggccatccgcagggcgtacctggacgggtctggggcgcagacgctggtcaacaccgagatcaacgaccccgatggcatcgcggtcgactgggtggcccgaaacctctactggaccgacacgggcacggaccgcatcgaggtgacgcgcctcaacggcacctcccgcaagatcctggtgtcggaggacctggacgagccccgagccatcgcactgcaccccgtgatgggcctcatgtactggacagactggggagagaaccctaaaatcgagtgtgccaacttggatgggcaggagcggcgtgtgctggtcaatgcctccctcgggtggcccaacggcctggccctggacctgcaggaggggaagctctactggggagacgccaagacagacaagatcgaggtgatcaatgttgatgggacgaagaggcggaccctcctggaggacaagctcccgcacatttttgggttcacgctgctgggggacttcatctactggactgactggcagcgccgcagcatcgagcgggtgcacaaggtcaaggccagccgggacgtcatcattgaccagctgcccgacctgatggggctcaaagctgtgaatgtggccaaggtcgtcggaaccaacccgtgtgcggacaggaacggggggtgcagccacctgtgcttcttcacaccccacgcaacccggtgtggctgccccatcggcctggagctgctgagtgacatgaagacctgcatcgtgcctgaggccttcttggtcttcaccagcagagccgccatccacaggatctccctcgagaccaataacaacgacgtggccatcccgctcacgggcgtcaaggaggcctcagccctggactttgatgtgtccaacaaccacatctactggacagacgtcagcctgaagaccatcagccgcgccttcatgaacgggagctcggtggagcacgtggtggagtttggccttgactaccccgagggcatggccgttgactggatgggcaagaacctctactgggccgacactgggaccaacagaatcgaagtggcgcggctggacgggcagttccggcaagtcctcgtgtggagggacttggacaacccgaggtcgctggccctggatcccaccaagggctacatctactggaccgagtggggcggcaagccgaggatcgtgcgggccttcatggacgggaccaactgcatgacgctggtggacaaggtgggccgggccaacgacctcaccattgactacgctgaccagcgcctctactggaccgacctggacaccaacatgatcgagtcgtccaacatgctgggtcaggagcgggtcgtgattgccgacgatctcccgcacccgttcggtctgacgcagtacagcgattatatctactggacagactggaatctgcacagcattgagcgggccgacaagactagcggccggaaccgcaccctcatccagggccacctggacttcgtgatggacatcctggtgttccactcctcccgccaggatggcctcaatgactgtatgcacaacaacgggcagtgtgggcagctgtgccttgccatccccggcggccaccgctgcggctgcgcctcacactacaccctggaccccagcagccgcaactgcagcccgcccaccaccttcttgctgttcagccagaaatctgccatcagtcggatgatcccggacgaccagcacagcccggatctcatcctgcccctgcatggactgaggaacgtcaaagccatcgactatgacccactggacaagttcatctactgggtggatgggcgccagaacatcaagcgagccaaggacgacgggacccagccctttgttttgacctctctgagccaaggccaaaacccagacaggcagccccacgacctcagcatcgacatctacagccggacactgttctggacgtgcgaggccaccaataccatcaacgtccacaggctgagcggggaagccatgggggtggtgctgcgtggggaccgcgacaagcccagggccatcgtcgtcaacgcggagcgagggtacctgtacttcaccaacatgcaggaccgggcagccaagatcgaacgcgcagccctggacggcaccgagcgcgaggtcctcttcaccaccggcctcatccgccctgtggccctggtggtggacaacacactgggcaagctgttctgggtggacgcggacctgaagcgcattgagagctgtgacctgtcaggggccaaccgcctgaccctggaggacgccaacatcgtgcagcctctgggcctgaccatccttggcaagcatctctactggatcgaccgccagcagcagatgatcgagcgtgtggagaagaccaccggggacaagcggactcgcatccagggccgtgtcgcccacctcactggcatccatgcagtggaggaagtcagcctggaggagttctcagcccacccatgtgcccgtgacaatggtggctgctcccacatctgtattgccaagggtgatgggacaccacggtgctcatgcccagtccacctcgtgctcctgcagaacctgctgacctgtggagagccgcccacctgctccccggaccagtttgcatgtgccacaggggagatcgactgtatccccggggcctggcgctgtgacggctttcccgagtgcgatgaccagagcgacgaggagggctgccccgtgtgctccgccgcccagttcccctgcgcgcggggtcagtgtgtggacctgcgcctgcgctgcgacggcgaggcagactgtcaggaccgctcagacgaggcggactgtgacgccatctgcctgcccaaccagttccggtgtgcgagcggccagtgtgtcctcatcaaacagcagtgcgactccttccccgactgtatcgacggctccgacgagctcatgtgtgaaatcaccaagccgccctcagacgacagcccggcccacagcagtgccatcgggcccgtcattggcatcatcctctctctcttcgtcatgggtggtgtctattttgtgtgccagcgcgtggtgtgccagcgctatgcgggggccaacgggcccttcccgcacgagtatgtcagcgggaccccgcacgtgcccctcaatttcatagccccgggcggttcccagcatggccccttcacaggcatcgcatgcggaaagtccatgatgagctccgtgagcctgatggggggccggggcggggtgcccctctacgaccggaaccacgtcacaggggcctcgtccagcagctcgtccagcacgaaggccacgctgtacccgccgatcctgaacccgccgccctccccggccacggacccctccctgtacaacatggacatgttctactcttcaaacattccggccactgcgagaccgtacaggccctacatcattcgaggaatggcgcccccgacgacgccctgcagcaccgacgtgtgtgacagcgactacagcgccagccgctggaaggccagcaagtactacctggatttgaactcggactcagacccctatccacccccacccacgccccacagccagtacctgtcggcggaggacagctgcccgccctcgcccgccaccgagaggagctacttccatctcttcccgccccctccgtccccctgcacggactcatcctgacctcggccgggccactctggcttctctgtgcccctgtaaatagttttaaatatgaacaaagaaaaaaatatattttatgatttaaaaaataaatataattgggattttaaaaacatgagaaatgtgaactgtgatggggtgggcagggctgggagaactttgtacagtggagaaatatttataaacttaattttgtaaaacagaa

SEQ ID NO: 16472 - DNA, 10020 bp, Homo sapiens
  source 1..10020: mol_type = unassigned DNA
gcggccgccccggctcctcgcctcccccacttctggccacccctcgccggtgagagaagagaacgcgagaagggaagatgggggccgtcctgaggagcctcctggcctgcagcttctgtgtgctcctgagagcggcccctttgttgctttatgcaaacagacgggacttgcgattggttgatgctacaaatggcaaagagaatgctacgattgtagttggaggcttggaggatgcagctgcggtggactttgtgtttagtcatggcttgatatactggagtgatgtcagcgaagaagccattaaacgaacagaatttaacaaaactgagagtgtgcagaatgttgttgtttctggattattgtcccccgatgggctggcatgtgattggcttggagaaaaattgtactggacagattctgaaactaatcggattgaagtttctaatttagatggatctttacgaaaagttttattttggcaagagttggatcaacccagagctattgccttagatccttcaagtgggttcatgtactggacagactggggagaagtgccaaagatagaacgtgctggaatggatggttcaagtcgcttcattataataaacagtgaaatttactggccaaatggactgactttggattatgaagaacaaaagctttattgggcagatgcaaaacttaatttcatccacaaatcaaatctggatggaacaaatcggcaggcagtggttaaaggttcccttccacatccttttgccttgacgttatttgaggacatattgtactggactgactggagcacacactccattttggcttgcaacaagtatactggtgagggtctgcgtgaaatccattctgacatcttctctcccatggatatacatgccttcagccaacagaggcagccaaatgccacaaatccatgtggaattgacaatgggggttgttcccatttgtgtttgatgtctccagtcaagcctttttatcagtgtgcttgccccactggggtcaaactcctggagaatggaaaaacctgcaaagatggtgccacagaattattgcttttagctcgaaggacagacttgagacgcatttctttggatacaccagattttacagacattgttctgcagttagaagacatccgtcatgccattgccatagattacgatcctgtggaaggctacatctactggactgatgatgaagtgagggccatacgccgttcatttatagatggatctggcagtcagtttgtggtcactgctcaaattgcccatcctgatggtattgctgtggactgggttgcacgaaatctttattggacagacactggcactgatcgaatagaagtgacaaggctcaatgggaccatgaggaagatcttgatttcagaggacttagaggaaccccgggctattgtgttagatcccatggttgggtacatgtattggactgactggggagaaattccgaaaattgagcgagcagctctggatggttctgaccgtgtagtattggttaacacttctcttggttggccaaatggtttagccttggattatgatgaaggcaaaatatactggggagatgccaaaacagacaagattgaggttatgaatactgatggcactgggagacgagtactagtggaagacaaaattcctcacatatttggatttactttgttgggtgactatgtttactggactgactggcagaggcgtagcattgaaagagttcataaacgaagtgcagagagggaagtgatcatagatcagctgcctgacctcatgggcctaaaggctacaaatgttcatcgagtgattggttccaacccctgtgctgaggaaaacgggggatgtagccatctctgcctctatagacctcagggccttcgctgtgcttgccctattggctttgaactcatcagtgacatgaagacctgcattgtcccagaggctttccttttgttttcacggagagcagatatcagacgaatttctctggaaacaaacaataataatgtggctattccactcactggtgtcaaagaagcttctgctttggattttgatgtgacagacaaccgaatttattggactgatatatcactcaagaccatcagcagagcctttatgaatggcagtgcactggaacatgtggtagaattcggcttagattatccagaaggcatggcagtagactggcttgggaagaacttgtactgggcagacacaggaacgaatcgaattgaggtgtcaaagttggatgggcagcaccgacaagttttggtgtggaaagacctagatagtcccagagctctcgcgttggaccctgccgaaggatttatgtattggactgaatggggtggaaaacctaagatagacagagctgcaatggatggaagtgaacgtactaccttagttccaaatgtggggcgggcaaacggcctaactattgattatgctaaaaggaggctttattggacagacctggacaccaacttaatagaatcttcaaatatgcttgggctcaaccgtgaagttatagcagatgacttgcctcatccttttggcttaactcagtaccaagattatatctactggacggactggagccgacgcagcattgagcgtgccaacaaaaccagtggccaaaaccgcaccatcattcagggccatttggattatgtgatggacatcctcgtctttcactcatctcgacagtcagggtggaatgaatgtgcttccagcaatgggcactgctcccacctctgcttggctgtgccagttgggggttttgtttgtggatgccctgcccactactctcttaatgctgacaacaggacttgtagtgctcctacgactttcctgctcttcagtcaaaagagtgccatcaaccgcatggtgattgatgaacaacagagccccgacatcatccttcccatccacagccttcggaatgtccgggccattgactatgacccactggacaagcaactctattggattgactcacgacaaaacatgatccgaaaggcacaagaagatggcagccagggctttactgtggttgtgagctcagttccgagtcagaacctggaaatacaaccctatgacctcagcattgatatttacagccgctacatctactggacttgtgaggctaccaatgtcattaatgtgacaagattagatgggagatcagttggagtggtgctgaaaggcgagcaggacagacctcgagccgttgtggtaaacccagagaaagggtatatgtattttaccaatcttcaggaaaggtctcctaaaattgaacgggctgctttggatgggacagaacgggaggtcctctttttcagtggcttaagtaaaccaattgctttagcccttgatagcaggctgggcaagctcttttgggctgattcagatctccggcgaattgaaagcagtgatctctcaggtgctaaccggatagtattagaagactccaatatcttgcagcctgtgggacttactgtgtttgaaaactggctctattggattgataaacagcagcaaatgattgaaaaaattgacatgacaggtcgagagggtagaaccaaagtccaagctcgaattgcccagcttagtgacattcatgcagtaaaggagctgaaccttcaagaatacagacagcacccttgtgctcaggataatggtggctgttcacatatttgtcttgtaaagggggatggtactacaaggtgttcttgccccatgcacctggttctacttcaagatgagctatcatgtggagaacctccaacatgttctcctcagcagtttacttgtttcacgggggaaattgactgtatccctgtggcttggcggtgcgatgggtttactgaatgtgaagaccacagtgatgaactcaattgtcctgtatgctcagagtcccagttccagtgtgccagtgggcagtgtattgatggtgccctccgatgcaatggagatgcaaactgccaggacaaatcagatgagaagaactgtgaagtgctttgtttaattgatcagttccgctgtgccaatggtcagtgcattggaaagcacaagaagtgtgatcataatgtggattgcagtgacaagtcagatgaactggattgttatccgactgaagaaccagcaccacaggccaccaatacagttggttctgttattggcgtaattgtcaccatttttgtgtctggaactgtatactttatctgccagaggatgttgtgtccacgtatgaagggagatggggaaactatgactaatgactatgtagttcatggaccagcttctgtgcctcttggttatgtgccacacccaagttctttgtcaggatctcttccaggaatgtctcgaggtaaatcaatgatcagctccctcagtatcatggggggaagcagtggacccccctatgaccgagcccatgttacaggagcatcatcaagtagttcttcaagcaccaaaggcacttacttccctgcaattttgaaccctccaccatccccagccacagagcgatcacattacactatggaatttggatattcttcaaacagtccttccactcataggtcatacagctacaggccatatagctaccggcactttgcaccccccaccacaccctgcagcacagatgtttgtgacagtgactatgctcctagtcggagaatgacctcagtggcaacagccaagggctataccagtgacttgaactatgattcagaacctgtgcccccacctcccacaccccgaagccaatacttgtcagcagaggagaactatgaaagctgcccaccttctccatacacagagaggagctattctcatcacctctacccaccgccaccctctccctgtacagactcctcctgaggaggggccctcctcctctgactgcctccaacgtaaaaatgtaaatataaatttggttgagatctggagggggggagggagctattagagaaggatgaggcagaccatgtacagttaaaattataaaatggggtagggaatactggagatatttgtacagaagaaaaggatatttatatattttcttaaaacagcagatttgctgcttgtgccataaaagtttgtataaaaaaaatttgtactaaaagttttatttttgcaaactaaatacacaaagcatgccttaaacccagtgaagcaactgagtacaaaggaaacaggaataataaaggcatcactgaccaggaatatctgggctttattgataccaaaaataaaaaagaggaagaagaaaaattaagtccatctcagagcagcaaaccatagatacatggatgtagccagatagccttcagttaactaacatttgagggccaacaagtaagaaatgatgaaaggaaaaaaatgcaattaatactaaccttggacgaagggctttgttttctctaggaatccaacagtgctagtgaggaaagtagatatttctaaaaacccattctgggtgttgctgttgtaggagagatcagccctctggtaagatgccatgaagctgtgtgtgtgtgcaagtctctgtccctacctttagaatccatacctctgtcaaaatgaatttttttctctaggtatgtttaccttgctgcctcctccagcaacttggtaagtcattttgctaagataccatgatttttttaagctgaagcattgactaaatggaattttctaaattaaacttgattttaatatttcttctagctccattccccagtaggcttagctcttcaatttgactgctgtttttgcataatgatcaaaagttagacatattatttctcttcttccaagattgttttaatgctcattaaaatgtctttttacaacacatatagacaatgtttaagaattaaaaatttaaccattatgtttttgttgtaaatctcatatccttgcactactttcagcatatatcacagtacgaaatcatttatatatatatatatatatatatatatatatatatatatatatatatatatattttgtttgtttgtttgttttctgagtaaaacatttaaatatgttctggttagagacaatctatttaaaaagatttttttcttattaggattttccctatattaacagtttgtgatgttttcatgttctttagaccggtttttctcagaataatgtctacatacatacctcttctaatgtgtgacatgaatttaatatctttctgttacccactgtgaatgttaggctgttttcaaattatccacaaattattcttgtaatcacccaatatttttatgtgggtcctctcttacccattatggattaagatagtttaacaaatttaacaatgaggattaaatgagaaggcaaactgttaacttctcagctgtcagaatttgggtggaagggaataatggaagcctcttttgtgatctgcctgacctgctgtcatgtatggtactggggctgctacatcttgagctatcagggctgacctgtggaatgattctagcacttgctctgccaccttgccagaagttcgtttcctgctttttacacatgtgtagcacttctctgctaaaattgaatggttttaaactaatgtatttttagcttaagaggtgttggtcagttaattattgaattttttttttttcttttttaattctgtcttgccaaggcctctctgggtttcagggcccaagagaaaacagtggaagaaaggattcagaatttgggcaagggtgaagtaactgttcatgcaagttaaaaatacctaagtaaagtttttgaagataaaattgtggtttcagaataatgctgattgttggagactgtaagaatcaggtgcacttgattttgcatataagcaaatggtaaatctatcagaatcctaaaacagacaagcatgaactcttcccattgctggaactaagtgcccacagtgtcagacaaaatggacattgaacttggattctgtgatacacagggcacttgatgcttaaatgaagatggaaaggttagcaatacctgggtgtcagttagaatttgagaattctatatgtttacatatttaaatgtgcatcttgatctggtgggcttcccatgtggagacttgcactctaattaactaagaagaatattgccttgttggatctcagtccacgtgcttgcactgcgatggcaatggcctcttcttcaaaatactaatttgtgtgccaatttgtttaaaattatttgaaggcagttcagcctaatctcagtgttctctttctggggtagatgagatggattcttaatatttctgggagtactttttaatgagagaattgtcaaatttggaaagatttattgagccttaggttacatggacagttaagcttaagtaaactgtatattgattatcaaacacaagctgtaattggaaaagttgagaggaaaagcatgagatcacaaattagggggaaaaaagaaaagggatttttaaatttggtgtattaaattcattgtccaagggggaaaatgaataatgtttcattagattccttatatgcaaaagtatttattttgaacatgtgtcctaaaatatatgcactaactgatgtgattaaaattgtccaagaaataaacttgagcataacatactttgtgtgcaccacagtaagctattctgcattgaagtggtcttttataactaaggcctggactttgctccaacagagtcgtggtcttctgaatagtgacttaaggagttttgtttgcttaagtcagataatagcacattcacagggaaacaaagagagttggtggatagaattttctgactattaatttttcttccatgaaattttattatgcctttggcactttctgccactcttacagcatatcacaagatatctgtttagcagaagattatgtagttactttaattttaatataaaagtagcttgtgatacattaccaagagatctctgattctttagtaagtttgagaacacctattctacagagatgataggtacttagaaatgaagactttaaagtacattttaatctaatataggccagtaattgggggaaggggctttgagcagtacaattttaagatgattttgagggttgtatttctttatcatttaaaaatatcctaaagtcagtaatttatatgaaggaaactcattcattattgaaggtattaaaaatagccatcatctgtattaggtagcagttttggaggatcatctttttcttttgctataaagccctattaatgaagaatacttccagtagagttaatagctgtagcttacctagtgtgttaatgaagtgtgtttatttatgtgacttgataccagtagtcataatagagactgaagaggtatgcgttaagcacgcctacttctatgcagtaaacaggctgcagctgcctagattagattcttagaaatgtcatattttgaattgttttatttcttgtaggggaagctttgtcccacttcattcatttgcatgccataggaattacatattggttatcattacgtatctaacaagattcagaaacaaaaatcttggacttttcacatccgaaatatgtcagctcttaataaatgtgtggtgcttaagtctacatatggcatccatagttgatttagagtatggatatgagtgtgttgaccagttatcagtaggtggacaaatatttgggcatctacagatgagactatgcactaagtgtggactgagtcctaaagaagcttatagtcaggtgttgtttaaaacattatcagaattcttaaacccaaggaatttaattttatttggtatttcttaagcctaaaatgaaccaagagaaagatgattttagaaagtacttgtagtgaaagatgattttagaaagtacttgtagtgcatgtgtggcttctgacttttgggatggcaccattttataatagtttcaaaatttagcttttgaaattctcaacattttatggtagaagactttggacctcaagtataaaattatacgtttataatttttttaaaatttaaattataagtattgtgaattcacactctcaggctattgtctgacttgatctacgtctcataaagcctgtacctgagtggagtggaaggtggagtcttaggttaatcagttactgactctaccctcaccctctttcaattgaggtaaactttgctgtttttctttttcataaagcattctcaaattgttgagtttattgctgaaaaaaatctccatgactttacagatagaattacaaactaaatgatgtcttgtatttagaagcagagtacagacctaacgaactgttagattctccaccatcacttagggtttgcccagaagcaacaccagagaattacagacaacgcgcttttgctgaactgtccattttggtggttgtgtttttcagtcaaatataagcaggatgggcgatagagatatatttatatatagatacatattctatatatctaatgcctaaatatgggtattaaagggaaaatttttaaagtctgattaaatccaatatgacatgaaattaaatatatggattagtaaggaaaaatgttaaaaagtagagaggataccaagaagattaaactggactagccttatttgcaagtgaaggatctggtgctgctttcagatgtttatcttttatttttttcccttaagctttaatcttcgtcattgtcttaaagtcaactggtgtttcttgttcattgactttggtacgatggtgctttgcaaggatgtatttatgttataatggccaacatttggtcagcccttgtccacttattcacttccctccttttgtaaaataagtgctttaattataaactgtataaaaataccttgtataaaccccttttttgattattacaataaataagctgaattgtaacaaatgaaatttgatttttgtaataaaacagtggaaaagtaaaa

SEQ ID NO: 16473 - DNA, 7812 bp, Homo sapiens
  source 1..7812: mol_type = unassigned DNA
agttggatcaacccagagctattgccttagatccttcaagtgggttcatgtactggacagactggggagaagtgccaaagatagaacgtgctggaatggatggttcaagtcgcttcattataataaacagtgaaatttactggccaaatggactgactttggattatgaagaacaaaagctttattgggcagatgcaaaacttaatttcatccacaaatcaaatctggatggaacaaatcggcaggcagtggttaaaggttcccttccacatccttttgccttgacgttatttgaggacatattgtactggactgactggagcacacactccattttggcttgcaacaagtatactggtgagggtctgcgtgaaatccattctgacatcttctctcccatggatatacatgccttcagccaacagaggcagccaaatgccacaaatccatgtggaattgacaatgggggttgttcccatttgtgtttgatgtctccagtcaagcctttttatcagtgtgcttgccccactggggtcaaactcctggagaatggaaaaacctgcaaagatggtgccacagaattattgcttttagctcgaaggacagacttgagacgcatttctttggatacaccagattttacagacattgttctgcagttagaagacatccgtcatgccattgccatagattacgatcctgtggaaggctacatctactggactgatgatgaagtgagggccatacgccgttcatttatagatggatctggcagtcagtttgtggtcactgctcaaattgcccatcctgatggtattgctgtggactgggttgcacgaaatctttattggacagacactggcactgatcgaatagaagtgacaaggctcaatgggaccatgaggaagatcttgatttcagaggacttagaggaaccccgggctattgtgttagatcccatggttgggtacatgtattggactgactggggagaaattccgaaaattgagcgagcagctctggatggttctgaccgtgtagtattggttaacacttctcttggttggccaaatggtttagccttggattatgatgaaggcaaaatatactggggagatgccaaaacagacaagattgaggttatgaatactgatggcactgggagacgagtactagtggaagacaaaattcctcacatatttggatttactttgttgggtgactatgtttactggactgactggcagaggcgtagcattgaaagagttcataaacgaagtgcagagagggaagtgatcatagatcagctgcctgacctcatgggcctaaaggctacaaatgttcatcgagtgattggttccaacccctgtgctgaggaaaacgggggatgtagccatctctgcctctatagacctcagggccttcgctgtgcttgccctattggctttgaactcatcagtgacatgaagacctgcattgtcccagaggctttccttttgttttcacggagagcagatatcagacgaatttctctggaaacaaacaataataatgtggctattccactcactggtgtcaaagaagcttctgctttggattttgatgtgacagacaaccgaatttattggactgatatatcactcaagaccatcagcagagcctttatgaatggcagtgcactggaacatgtggtagaattcggcttagattatccagaaggcatggcagtagactggcttgggaagaacttgtactgggcagacacaggaacgaatcgaattgaggtgtcaaagttggatgggcagcaccgacaagttttggtgtggaaagacctagatagtcccagagctctcgcgttggaccctgccgaaggatttatgtattggactgaatggggtggaaaacctaagatagacagagctgcaatggatggaagtgaacgtactaccttagttccaaatgtggggcgggcaaacggcctaactattgattatgctaaaaggaggctttattggacagacctggacaccaacttaatagaatcttcaaatatgcttgggctcaaccgtgaagttatagcagatgacttgcctcatccttttggcttaactcagtaccaagattatatctactggacggactggagccgacgcagcattgagcgtgccaacaaaaccagtggccaaaaccgcaccatcattcagggccatttggattatgtgatggacatcctcgtctttcactcatctcgacagtcagggtggaatgaatgtgcttccagcaatgggcactgctcccacctctgcttggctgtgccagttgggggttttgtttgtggatgccctgcccactactctcttaatgctgacaacaggacttgtagtgctcctacgactttcctgctcttcagtcaaaagagtgccatcaaccgcatggtgattgatgaacaacagagccccgacatcatccttcccatccacagccttcggaatgtccgggccattgactatgacccactggacaagcaactctattggattgactcacgacaaaacatgatccgaaaggcacaagaagatggcagccagggctttactgtggttgtgagctcagttccgagtcagaacctggaaatacaaccctatgacctcagcattgatatttacagccgctacatctactggacttgtgaggctaccaatgtcattaatgtgacaagattagatgggagatcagttggagtggtgctgaaaggcgagcaggacagacctcgagccgttgtggtaaacccagagaaagggtatatgtattttaccaatcttcaggaaaggtctcctaaaattgaacgggctgctttggatgggacagaacgggaggtcctctttttcagtggcttaagtaaaccaattgctttagcccttgatagcaggctgggcaagctcttttgggctgattcagatctccggcgaattgaaagcagtgatctctcaggtgctaaccggatagtattagaagactccaatatcttgcagcctgtgggacttactgtgtttgaaaactggctctattggattgataaacagcagcaaatgattgaaaaaattgacatgacaggtcgagagggtagaaccaaagtccaagctcgaattgcccagcttagtgacattcatgcagtaaaggagctgaaccttcaagaatacagacagcacccttgtgctcaggataatggtggctgttcacatatttgtcttgtaaagggggatggtactacaaggtgttcttgccccatgcacctggttctacttcaagatgagctatcatgtggagaacctccaacatgttctcctcagcagtttacttgtttcacgggggaaattgactgtatccctgtggcttggcggtgcgatgggtttactgaatgtgaagaccacagtgatgaactcaattgtcctgtatgctcagagtcccagttccagtgtgccagtgggcagtgtattgatggtgccctccgatgcaatggagatgcaaactgccaggacaaatcagatgagaagaactgtgaagtgctttgtttaattgatcagttccgctgtgccaatggtcagtgcattggaaagcacaagaagtgtgatcataatgtggattgcagtgacaagtcagatgaactggattgttatccgactgaagaaccagcaccacaggccaccaatacagttggttctgttattggcgtaattgtcaccatttttgtgtctggaactgtatactttatctgccagaggatgttgtgtccacgtatgaagggagatggggaaactatgactaatgactatgtagttcatggaccagcttctgtgcctcttggttatgtgccacacccaagttctttgtcaggatctcttccaggaatgtctcgaggtaaatcaatgatcagctccctcagtatcatggggggaagcagtggacccccctatgaccgagcccatgttacaggagcatcatcaagtagttcttcaagcaccaaaggcacttacttccctgcaattttgaaccctccaccatccccagccacagagcgatcacattacactatggaatttggatattcttcaaacagtccttccactcataggtcatacagctacaggccatatagctaccggcactttgcaccccccaccacaccctgcagcacagatgtttgtgacagtgactatgctcctagtcggagaatgacctcagtggcaacagccaagggctataccagtgacttgaactatgattcagaacctgtgcccccacctcccacaccccgaagccaatacttgtcagcagaggagaactatgaaagctgcccaccttctccatacacagagaggagctattctcatcacctctacccaccgccaccctctccctgtacagactcctcctgaggaggggccctcctcctctgactgcctccaacgtaaaaatgtatgtttaccttgctgcctcctccagcaacttggcctctctgggtttcagggcccaagagaaaacagtggaagaaaggattcagaatttgggcaagggtgaagtaactgttcatgcaagttaaaaatacctaagtaaagtttttgaagataaaattgtggtttcagaataatgctgattgttggagactgtaagaatcaggtgcacttgattttgcatataagcaaatggtaaatctatcagaatcctaaaacagacaagcatgaactcttcccattgctggaactaagtgcccacagtgtcagacaaaatggacattgaacttggattctgtgatacacagggcacttgatgcttaaatgaagatggaaaggttagcaatacctgggtgtcagttagaatttgagaattctatatgtttacatatttaaatgtgcatcttgatctggtgggcttcccatgtggagacttgcactctaattaactaagaagaatattgccttgttggatctcagtccacgtgcttgcactgcgatggcaatggcctcttcttcaaaatactaatttgtgtgccaatttgtttaaaattatttgaaggcagttcagcctaatctcagtgttctctttctggggtagatgagatggattcttaatatttctgggagtactttttaatgagagaattgtcaaatttggaaagatttattgagccttaggttacatggacagttaagcttaagtaaactgtatattgattatcaaacacaagctgtaattggaaaagttgagaggaaaagcatgagatcacaaattagggggaaaaaagaaaagggatttttaaatttggtgtattaaattcattgtccaagggggaaaatgaataatgtttcattagattccttatatgcaaaagtatttattttgaacatgtgtcctaaaatatatgcactaactgatgtgattaaaattgtccaagaaataaacttgagcataacatactttgtgtgcaccacagtaagctattctgcattgaagtggtcttttataactaaggcctggactttgctccaacagagtcgtggtcttctgaatagtgacttaaggagttttgtttgcttaagtcagataatagcacattcacagggaaacaaagagagttggtggatagaattttctgactattaatttttcttccatgaaattttattatgcctttggcactttctgccactcttacagcatatcacaagatatctgtttagcagaagattatgtagttactttaattttaatataaaagtagcttgtgatacattaccaagagatctctgattctttagtaagtttgagaacacctattctacagagatgataggtacttagaaatgaagactttaaagtacattttaatctaatataggccagtaattgggggaaggggctttgagcagtacaattttaagatgattttgagggttgtatttctttatcatttaaaaatatcctaaagtcagtaatttatatgaaggaaactcattcattattgaaggtattaaaaatagccatcatctgtattaggtagcagttttggaggatcatctttttcttttgctataaagccctattaatgaagaatacttccagtagagttaatagctgtagcttacctagtgtgttaatgaagtgtgtttatttatgtgacttgataccagtagtcataatagagactgaagaggtatgcgttaagcacgcctacttctatgcagtaaacaggctgcagctgcctagattagattcttagaaatgtcatattttgaattgttttatttcttgtaggggaagctttgtcccacttcattcatttgcatgccataggaattacatattggttatcattacgtatctaacaagattcagaaacaaaaatcttggacttttcacatccgaaatatgtcagctcttaataaatgtgtggtgcttaagtctacatatggcatccatagttgatttagagtatggatatgagtgtgttgaccagttatcagtaggtggacaaatatttgggcatctacagatgagactatgcactaagtgtggactgagtcctaaagaagcttatagtcaggtgttgtttaaaacattatcagaattcttaaacccaaggaatttaattttatttggtatttcttaagcctaaaatgaaccaagagaaagatgattttagaaagtacttgtagtgaaagatgattttagaaagtacttgtagtgcatgtgtggcttctgacttttgggatggcaccattttataatagtttcaaaatttagcttttgaaattctcaacattttatggtagaagactttggacctcaagtataaaattatacgtttataatttttttaaaatttaaattataagtattgtgaattcacactctcaggctattgtctgacttgatctacgtctcataaagcctgtacctgagtggagtggaaggtggagtcttaggttaatcagttactgactctaccctcaccctctttcaattgaggtaaactttgctgtttttctttttcataaagcattctcaaattgttgagtttattgctgaaaaaaatctccatgactttacagatagaattacaaactaaatgatgtcttgtatttagaagcagagtacagacctaacgaactgttagattctccaccatcacttagggtttgcccagaagcaacaccagagaattacagacaacgcgcttttgctgaactgtccattttggtggttgtgtttttcagtcaaatataagcaggatgggcgatagagatatatttatatatagatacatattctatatatctaatgcctaaatatgggtattaaagggaaaatttttaaagtctgattaaatccaatatgacatgaaattaaatatatggattagtaaggaaaaatgttaaaaagtagagaggataccaagaagattaaactggactagccttatttgcaagtgaaggatctggtgctgctttcagatgtttatcttttatttttttcccttaagctttaatcttcgtcattgtcttaaagtcaactggtgtttcttgttcattgactttggtacgatggtgctttgcaaggatgtatttatgttataatggccaacatttggtcagcccttgtccacttattcacttccctccttttgtaaaataagtgctttaattataaactgtataaaaataccttgtataaaccccttttttgattattacaataaataagctgaattgtaacaaatgaaatttgatttttgtaataaaacagtggaaaagt

SEQ ID NO: 16474 - DNA, 2382 bp, Homo sapiens
  source 1..2382: mol_type = unassigned DNA
atgggcctccccgagccgggccctctccggcttctggcgctgctgctgctgctgctgctgctgctgctgctgcagctccagcatcttgcggcggcagcggctgatccgctgctcggcggccaagggccggccaaggattgcgaaaaggaccaattccagtgccggaacgagcgctgcatcccctctgtgtggagatgcgacgaggacgatgactgcttagaccacagcgacgaggacgactgccccaagaagacctgtgcagacagtgacttcacctgtgacaacggccactgcatccacgaacggtggaagtgtgacggcgaggaggagtgtcctgatggctccgatgagtccgaggccacttgcaccaagcaggtgtgtcctgcagagaagctgagctgtggacccaccagccacaagtgtgtacctgcctcgtggcgctgcgacggggagaaggactgcgagggtggagcggatgaggccggctgtgctacctggctgaacgagtgtctgcacaacaatggcggctgctcacacatctgcactgacctcaagattggctttgaatgcacgtgcccagcaggcttccagctcctggaccagaagacctgtggcgacattgatgagtgcaaggacccagatgcctgcagccagatctgtgtcaattacaagggctattttaagtgtgagtgctaccctggctacgagatggacctactgaccaagaactgcaaggctgctgctggcaagagcccatccctaatcttcaccaaccggcacgaggtgcggaggatcgacctggtgaagcggaactattcacgcctcatccccatgctcaagaatgtcgtggcactagatgtggaagttgccaccaatcgcatctactggtgtgacctctcctaccgtaagatctatagcgcctacatggacaaggccagtgacccgaaagagcaggaggtcctcattgacgagcagttgcactctccagagggcctggcagtggactgggtccacaagcacatctactggactgactcgggcaataagaccatctcagtggccacagttgatggtggccgccgacgcactctcttcagccgtaacctcagtgaaccccgggccatcgctgttgaccccctgcgagggttcatgtattggtctgactggggggaccaggccaagattgagaaatctgggctcaacggtgtggaccggcaaacactggtgtcagacaatattgaatggcccaacggaatcaccctggatctgctgagccagcgcttgtactgggtagactccaagctacaccaactgtccagcattgacttcagtggaggcaacagaaagacgctgatctcctccactgacttcctgagccacccttttgggatagctgtgtttgaggacaaggtgttctggacagacctggagaacgaggccattttcagtgcaaatcggctcaatggcctggaaatctccatcctggctgagaacctcaacaacccacatgacattgtcatcttccatgagctgaagcagccaagagctccagatgcctgtgagctgagtgtccagcctaatggaggctgtgaatacctgtgccttcctgctcctcagatctccagccactctcccaagtacacatgtgcctgtcctgacacaatgtggctgggtccagacatgaagaggtgctaccgagcacctcaatctacctcaactacgacgttagcttctaccatgacgaggacagtacctgccaccacaagagcccccgggaccaccgtccacagatccacctaccagaaccacagcacagagacaccaagcctgacagctgcagtcccaagctcagttagtgtccccagggctcccagcatcagcccgtctaccctaagccctgcaaccagcaaccactcccagcactatgcaaatgaagacagtaagatgggctcaacagtcactgccgctgttatcgggatcatcgtgcccatagtggtgatagccctcctgtgcatgagtggatacctgatctggagaaactggaagcggaagaacaccaaaagcatgaattttgacaacccagtctacaggaaaacaacagaagaagaagacgaagatgagctccatatagggagaactgctcagattggccatgtctatcctgcagcaatcagcagctttgatcgcccactgtgggcagagccctgtcttggggagaccagagaaccggaagacccagcccctgccctcaaggagctttttgtcttgccgggggaaccaaggtcacagctgcaccaactcccgaagaaccctctttccgagctgcctgtcgtcaaatccaagcgagtggcattaagccttgaagatgatggactaccctga

SEQ ID NO: 16475 - DNA, 4467 bp, Homo sapiens
  source 1..4467: mol_type = unassigned DNA
gcagcggcaaccccggcgccgcggcaaggactcggagggctgagacgcggcggcggcggcgcggggagcgcggggcgcggcggccggagccccgggcccgccatgggcctccccgagccgggccctctccggcttctggcgctgctgctgctgctgctgctgctgctgctgctgcagctccagcatcttgcggcggcagcggctgatccgctgctcggcggccaagggccggccaaggattgcgaaaaggaccaattccagtgccggaacgagcgctgcatcccctctgtgtggagatgcgacgaggacgatgactgcttagaccacagcgacgaggacgactgccccaagaagacctgtgcagacagtgacttcacctgtgacaacggccactgcatccacgaacggtggaagtgtgacggcgaggaggagtgtcctgatggctccgatgagtccgaggccacttgcaccaagcaggtgtgtcctgcagagaagctgagctgtggacccaccagccacaagtgtgtacctgcctcgtggcgctgcgacggggagaaggactgcgagggtggagcggatgaggccggctgtgctaccttgtgcgccccgcacgagttccagtgcggcaaccgctcgtgcctggccgccgtgttcgtgtgcgacggcgacgacgactgtggtgacggcagcgatgagcgcggctgtgcagacccggcctgcgggccccgcgagttccgctgcggcggcgatggcggcggcgcctgcatcccggagcgctgggtctgcgaccgccagtttgactgcgaggaccgctcggacgaggcagccgagctctgcggccgtccgggccccggggccacgtccgcgcccgccgcctgcgccaccgcctcccagttcgcctgccgcagcggcgagtgcgtgcacctgggctggcgctgcgacggcgaccgcgactgcaaagacaaatcggacgaggccgactgcccactgggcacctgccgtggggacgagttccagtgtggggatgggacatgtgtccttgcaatcaagcactgcaaccaggagcaggactgtccagatgggagtgatgaagctggctgcctacaggggctgaacgagtgtctgcacaacaatggcggctgctcacacatctgcactgacctcaagattggctttgaatgcacgtgcccagcaggcttccagctcctggaccagaagacctgtggcgacattgatgagtgcaaggacccagatgcctgcagccagatctgtgtcaattacaagggctattttaagtgtgagtgctaccctggctacgagatggacctactgaccaagaactgcaaggctgctgctggcaagagcccatccctaatcttcaccaaccggcacgaggtgcggaggatcgacctggtgaagcggaactattcacgcctcatccccatgctcaagaatgtcgtggcactagatgtggaagttgccaccaatcgcatctactggtgtgacctctcctaccgtaagatctatagcgcctacatggacaaggccagtgacccgaaagagcaggaggtcctcattgacgagcagttgcactctccagagggcctggcagtggactgggtccacaagcacatctactggactgactcgggcaataagaccatctcagtggccacagttgatggtggccgccgacgcactctcttcagccgtaacctcagtgaaccccgggccatcgctgttgaccccctgcgagggttcatgtattggtctgactggggggaccaggccaagattgagaaatctgggctcaacggtgtggaccggcaaacactggtgtcagacaatattgaatggcccaacggaatcaccctggatctgctgagccagcgcttgtactgggtagactccaagctacaccaactgtccagcattgacttcagtggaggcaacagaaagacgctgatctcctccactgacttcctgagccacccttttgggatagctgtgtttgaggacaaggtgttctggacagacctggagaacgaggccattttcagtgcaaatcggctcaatggcctggaaatctccatcctggctgagaacctcaacaacccacatgacattgtcatcttccatgagctgaagcagccaagagctccagatgcctgtgagctgagtgtccagcctaatggaggctgtgaatacctgtgccttcctgctcctcagatctccagccactctcccaagtacacatgtgcctgtcctgacacaatgtggctgggtccagacatgaagaggtgctaccgagcacctcaatctacctcaactacgacgttagcttctaccatgacgaggacagtacctgccaccacaagagcccccgggaccaccgtccacagatccacctaccagaaccacagcacagagacaccaagcctgacagctgcagtcccaagctcagttagtgtccccagggctcccagcatcagcccgtctaccctaagccctgcaaccagcaaccactcccagcactatgcaaatgaagacagtaagatgggctcaacagtcactgccgctgttatcgggatcatcgtgcccatagtggtgatagccctcctgtgcatgagtggatacctgatctggagaaactggaagcggaagaacaccaaaagcatgaattttgacaacccagtctacaggaaaacaacagaagaagaagacgaagatgagctccatatagggagaactgctcagattggccatgtctatcctgcagcaatcagcagctttgatcgcccactgtgggcagagccctgtcttggggagaccagagaaccggaagacccagcccctgccctcaaggagctttttgtcttgccgggggaaccaaggtcacagctgcaccaactcccgaagaaccctctttccgagctgcctgtcgtcaaatccaagcgagtggcattaagccttgaagatgatggactaccctgaggatgggatcacccccttcgtgcctcatggaattcagtcccatgcactacactctggatggtgtatgactggatgaatgggtttctatatatgggtctgtgtgagtgtatgtgtgtgtgtgattttttttttaaatttatgttgcggaaaggtaaccacaaagttatgatgaactgcaaacatccaaaggatgtgagagtttttctatgtataatgttttatacactttttaactggttgcactacccatgaggaattcgtggaatggctactgctgactaacatgatgcacataaccaaatgggggccaatggcacagtaccttactcatcatttaaaaactatatttacagaagatgtttggttgctgggggggcttttttaggttttggggcatttgttttttgtaaataagatgattatgctttgtggctatccatcaacataagtaaaaaaaaaaaaaaaacacttcaactccctcccccatttagattatttattaacatattttaaaaatcagatgagttctataaataatttagagaagtgagagtatttatttttggcatgtttggcccaccacacagactctgtgtgtgtatgtgtgtgtttatatgtgtatgtgtgtgacagaaaaatctgtagagaagaggcacatctatggctactgttcaaatacataaagataaatttattttcacacagtccacaaggggtatatcttgtagttttcagaaaagcctttggaaatctggatcagaaaatagataccatggtttgtgcaattatgtagtaaaaaaggcaaatcttttcacctctggctattcctgagaccccaggaagtcaggaaaagcctttcagctcacccatggctgctgtgactcctaccagggctttcttggctttggcgaaggtcagtgtacagacattccatggtaccagagtgctcagaaactcaagataggatatgcctcaccctcagctactccttgttttaaagttcagctctttgagtaacttcttcaatttctttcaggacacttgggttgaattcagtaagtttcctctgaagcaccctgaagggtgccatccttacagagctaagtggagacgtttccagatcagcccaagtttactatagagactggcccaggcactgaatgtctaggacatgctgtggatgaagataaagatggtggaataggttttatcacatctcttatttctcttttccccttactctctaccatttcctttatgtggggaaacattttaaggtaataaataggttacttaccatcatatgttcatatagatgaaactaatttttggcttaagtcagaacaactggccaaaattgaagtcatatttgaggggggaaatggcatacgcaatattatattatattggatatttatgttcacacaggaatttggtttactgctttgtaaataaaaggaaaaactccgggta

SEQ ID NO: 16476 - DNA, 2553 bp, Homo sapiens
  source 1..2553: mol_type = unassigned DNA
atgggcctccccgagccgggccctctccggcttctggcgctgctgctgctgctgctgctgctgctgctgctgcagctccagcatcttgcggcggcagcggctgatccgctgctcggcggccaagggccggccaaggattgcgaaaaggaccaattccagtgccggaacgagcgctgcatcccctctgtgtggagatgcgacgaggacgatgactgcttagaccacagcgacgaggacgactgccccaagaagacctgtgcagacagtgacttcacctgtgacaacggccactgcatccacgaacggtggaagtgtgacggcgaggaggagtgtcctgatggctccgatgagtccgaggccacttgcaccaagcaggtgtgtcctgcagagaagctgagctgtggacccaccagccacaagtgtgtacctgcctcgtggcgctgcgacggggagaaggactgcgagggtggagcggatgaggccggctgtgctacctcactgggcacctgccgtggggacgagttccagtgtggggatgggacatgtgtccttgcaatcaagcactgcaaccaggagcaggactgtccagatgggagtgatgaagctggctgcctacaggggctgaacgagtgtctgcacaacaatggcggctgctcacacatctgcactgacctcaagattggctttgaatgcacgtgcccagcaggcttccagctcctggaccagaagacctgtggcgacattgatgagtgcaaggacccagatgcctgcagccagatctgtgtcaattacaagggctattttaagtgtgagtgctaccctggctacgagatggacctactgaccaagaactgcaaggctgctgctggcaagagcccatccctaatcttcaccaaccggcacgaggtgcggaggatcgacctggtgaagcggaactattcacgcctcatccccatgctcaagaatgtcgtggcactagatgtggaagttgccaccaatcgcatctactggtgtgacctctcctaccgtaagatctatagcgcctacatggacaaggccagtgacccgaaagagcaggaggtcctcattgacgagcagttgcactctccagagggcctggcagtggactgggtccacaagcacatctactggactgactcgggcaataagaccatctcagtggccacagttgatggtggccgccgacgcactctcttcagccgtaacctcagtgaaccccgggccatcgctgttgaccccctgcgagggttcatgtattggtctgactggggggaccaggccaagattgagaaatctgggctcaacggtgtggaccggcaaacactggtgtcagacaatattgaatggcccaacggaatcaccctggatctgctgagccagcgcttgtactgggtagactccaagctacaccaactgtccagcattgacttcagtggaggcaacagaaagacgctgatctcctccactgacttcctgagccacccttttgggatagctgtgtttgaggacaaggtgttctggacagacctggagaacgaggccattttcagtgcaaatcggctcaatggcctggaaatctccatcctggctgagaacctcaacaacccacatgacattgtcatcttccatgagctgaagcagccaagagctccagatgcctgtgagctgagtgtccagcctaatggaggctgtgaatacctgtgccttcctgctcctcagatctccagccactctcccaagtacacatgtgcctgtcctgacacaatgtggctgggtccagacatgaagaggtgctaccgagatgcaaatgaagacagtaagatgggctcaacagtcactgccgctgttatcgggatcatcgtgcccatagtggtgatagccctcctgtgcatgagtggatacctgatctggagaaactggaagcggaagaacaccaaaagcatgaattttgacaacccagtctacaggaaaacaacagaagaagaagacgaagatgagctccatatagggagaactgctcagattggccatgtctatcctgcacgagtggcattaagccttgaagatgatggactaccctgaggatgggatcacccccttcgtgcctcatggaattcagtcccatgcactacactctggatggtgtatgactggatgaatgggtttctatatatgggtctgtgtgagtgtatgtgtgtgtgtgattttttttttaaatttatgttgcggaaaggtaaccacaaagttatgatgaactgcaaacatccaaaggatgtgagagtttttctatgtataatgttttatacactttttaactggttgcactacccatgaggaattcgtggaatggctactgctgactaacatgatgcacataaccaaatgggggccaatggcacagtaccttactcatcatttaaaaactatatttacagaagatgtttggttgctgggggggcttttttaggttttggggcatttgttttttgtaaataagatgattatgctttgtggctatccatcaacataagt

SEQ ID NO: 16477 - DNA, 3322 bp, Homo sapiens
  source 1..3322: mol_type = unassigned DNA
gccggggcgggcggcagcggcggcggcggcggcggcgggggcagcggcaaccccggcgccgcggcaaggactcggagggctgagacgcggcggcggcggcgcggggagcgcggggcgcggcggccggagccccgggcccgccatgggcctccccgagccgggccctctccggcttctggcgctgctgctgctgctgctgctgctgctgctgctgcagctccagcatcttgcggcggcagcggctgatccgctgctcggcggccaagggccggccaaggattgcgaaaaggaccaattccagtgccggaacgagcgctgcatcccctctgtgtggagatgcgacgaggacgatgactgcttagaccacagcgacgaggacgactgccccaagaagacctgtgcagacagtgacttcacctgtgacaacggccactgcatccacgaacggtggaagtgtgacggcgaggaggagtgtcctgatggctccgatgagtccgaggccacttgcaccaagcaggtgtgtcctgcagagaagctgagctgtggacccaccagccacaagtgtgtacctgcctcgtggcgctgcgacggggagaaggactgcgagggtggagcggatgaggccggctgtgctaccttgtgcgccccgcacgagttccagtgcggcaaccgctcgtgcctggccgccgtgttcgtgtgcgacggcgacgacgactgtggtgacggcagcgatgagcgcggctgtgcagacccggcctgcgggccccgcgagttccgctgcggcggcgatggcggcggcgcctgcatcccggagcgctgggtctgcgaccgccagtttgactgcgaggaccgctcggacgaggcagccgagctctgcggccgtccgggccccggggccacgtccgcgcccgccgcctgcgccaccgcctcccagttcgcctgccgcagcggcgagtgcgtgcacctgggctggcgctgcgacggcgaccgcgactgcaaagacaaatcggacgaggccgactgcccactgggcacctgccgtggggacgagttccagtgtggggatgggacatgtgtccttgcaatcaagcactgcaaccaggagcaggactgtccagatgggagtgatgaagctggctgcctacaggggctgaacgagtgtctgcacaacaatggcggctgctcacacatctgcactgacctcaagattggctttgaatgcacgtgcccagcaggcttccagctcctggaccagaagacctgtggcgacattgatgagtgcaaggacccagatgcctgcagccagatctgtgtcaattacaagggctattttaagtgtgagtgctaccctggctacgagatggacctactgaccaagaactgcaaggctgctgctggcaagagcccatccctaatcttcaccaaccggcacgaggtgcggaggatcgacctggtgaagcggaactattcacgcctcatccccatgctcaagaatgtcgtggcactagatgtggaagttgccaccaatcgcatctactggtgtgacctctcctaccgtaagatctatagcgcctacatggacaaggccagtgacccgaaagagcaggaggtcctcattgacgagcagttgcactctccagagggcctggcagtggactgggtccacaagcacatctactggactgactcgggcaataagaccatctcagtggccacagttgatggtggccgccgacgcactctcttcagccgtaacctcagtgaaccccgggccatcgctgttgaccccctgcgagggttcatgtattggtctgactggggggaccaggccaagattgagaaatctgggctcaacggtgtggaccggcaaacactggtgtcagacaatattgaatggcccaacggaatcaccctggatctgctgagccagcgcttgtactgggtagactccaagctacaccaactgtccagcattgacttcagtggaggcaacagaaagacgctgatctcctccactgacttcctgagccacccttttgggatagctgtgtttgaggacaaggtgttctggacagacctggagaacgaggccattttcagtgcaaatcggctcaatggcctggaaatctccatcctggctgagaacctcaacaacccacatgacattgtcatcttccatgagctgaagcagccaagagctccagatgcctgtgagctgagtgtccagcctaatggaggctgtgaatacctgtgccttcctgctcctcagatctccagccactctcccaagtacacatgtgcctgtcctgacacaatgtggctgggtccagacatgaagaggtgctaccgagcacctcaatctacctcaactacgacgttagcttctaccatgacgaggacagtacctgccaccacaagagcccccgggaccaccgtccacagatccacctaccagaaccacagcacagagacaccaagcctgacagctgcagtcccaagctcagttagtgtccccagggctcccagcatcagcccgtctaccctaagccctgcaaccagcaaccactcccagcactatgcaaatgaagacagtaagatgggctcaacagtcactgccgctgttatcgggatcatcgtgcccatagtggtgatagccctcctgtgcatgagtggatacctgatctggagaaactggaagcggaagaacaccaaaagcatgaattttgacaacccagtctacaggaaaacaacagaagaagaagacgaagatgagctccatatagggagaactgctcagattggccatgtctatcctgcacgagtggcattaagccttgaagatgatggactaccctgaggatgggatcacccccttcgtgcctcatggaattcagtcccatgcactacactctggatggtgtatgactggatgaatgggtttctatatatgggtctgtgtgagtgtatgtgtgtgtgtgattttttttttaaatttatgttgcggaaaggtaaccacaaagttatgatgaactgcaaacatccaaaggatgtgagagtttttctatgtataatgttttatacactttttaactggttgcactacccatgaggaattcgtggaatggctactgctgactaacatgatgcacataaccaaatgggggccaatggcacagtaccttactcatcatttaaaaactatatttacagaagatgtttggttgctgggggggcttttttaggttttggggcatttgttttttgtaaataagatgattatgctttgtggctatccatcaacataagtaaaaaaaaaaaaaaa

SEQ ID NO: 16478 - DNA, 7819 bp, Homo sapiens
  source 1..7819: mol_type = unassigned DNA
gctggagtccgccggcggcctcgccgctgccggccgctcacggaggaactacaattcccaggagaccgcgcggtgggtgggggcggggtagtgggcggggcatcggcaggctaggttttctccgcgcagcgccagtcgcagaggaagatggcgccgcggagggtcaggtcgtttctgcgcgggctcccggcgctgctactgctgctgctcttcctcgggccctggcccgctgcgagccacggcggcaagtactcgcgggagaagaaccagcccaagccgtccccgaaacgcgagtccggagaggagttccgcatggagaagttgaaccagctgtgggagaaggcccagcgactgcatcttcctcccgtgaggctggccgagctccacgctgatctgaagatacaggagagggacgaactcgcctggaagaaactaaagcttgacggcttggacgaagatggggagaaggaagcgagactcatacgcaacctcaatgtcatcttggccaagtatggtctggacggaaagaaggacgctcggcaggtgaccagcaactccctcagtggcacccaggaagacgggctggatgaccccaggctggaaaagctgtggcacaaggcgaagacctctgggaaattctccggcgaagaactggacaagctctggcgggagttcctgcatcacaaagagaaagttcacgagtacaacgtcctgctggagaccctgagcaggaccgaagaaatccacgagaacgtcattagcccctcggacctgagcgacatcaagggcagcgtcctgcacagcaggcacacggagctgaaggagaagctgcgcagcatcaaccagggcctggaccgcctgcgcagggtcagccaccagggctacagcactgaggctgagttcgaggagcccagggtgattgacctgtgggacctggcgcagtccgccaacctcacggacaaggagctggaggcgttccgggaggagctcaagcacttcgaagccaaaatcgagaagcacaaccactaccagaagcagctggagattgcgcacgagaagctgaggcacgcagagagcgtgggcgacggcgagcgtgtgagccgcagccgcgagaagcacgccctgctggaggggcggaccaaggagctgggctacacggtgaagaagcatctgcaggacctgtccggcaggatctccagagctcggcacaacgaactctgaaggcattggggagcccagcccggcagggaagaggccagcgtgaaggacctgggctcttggccgtggcatttccgtggacagcccgccgtcagggtggctggggctggcacgggtgtcgaggcaggaaggattgtttctggtgactgcagccgctgccgtcgcgacacagggcttggtggtggtagcatttgggtctgagatcggcccagctctgactgaaggggcttggcttccactcagcatcagcgtggcagtcaccaccccagtgaggacctcgatgtccagctgctgtcaggtctgatagtcctctgctaaaacaacacgatttacataaaaaatcttacacatctgccaccggaaataccatgcacagagtccttaaaaaatagagtgcagtatttaaaccacccgcttgttggctggtcactaagtgtcctggtggctggggccggagccagtgctcttgaagggatcgcgtcatagccagcttcccctctgggccctgtgggtctttgcagccaacctccttttcccgtgagacggcccggcctgatttaaagccaagagcgcttgagttgagtttgaggggaagatgtggagcgtgtggttctgtggacagtcagagactgtggcctgggggcagcgtctttcaactctcacctctgcagctcagggacctcgggagacctcaccaaacctgcagggcctccgtgtccctaagtgtgctgtgtaaatgccccatctcatgggggagagacagccacggaggccttcctctgaccatagctgatggactggcggttgctcaggtccggctccgagaatgttcctgtgtctgagcctggaagaggctcgggtctggctccaggcgtggttcccttcccgtgtctgagcctggaagaggctcgggtccggctccgagcgtggttcccttcccgtgtctgagcctggaagaggctcgggtccggctccgagcgtggttcccttcccgtgtctgagcctggaagaggctcgggtccggctccgagcgtggttcccttcccgtgtctgagcctggaagaggctcgggtccggctccgagcgtggttcccttcccgtgtctgagcctggaagaggctcgggtccggctctgggcgtggttcccttcccgtgtctgagcctggaagaggctcgggtccggctctgggcgtggttcccgtgtctgagcctggaagaggctcgggtccgggtccagctccgagcgtggttcccgtgtttgaacctggaagaggctccaccaggcgtattgtgttttgactgcagctggatcttggcttgactgttgagatctgccaaacatccgctaagctatcatttctgagaaaggtcaaggctagaggcagcatgtcgggagttggcgcatcagggttggaagggccccagggtacagcatgtgggtgcctgttcctttgtggacttgtgtgtgtgtggctggtggggcggggggtggattctggttcttttttttcccattatcctgagagccttaaggtactcagtgtgttggtgagactcagccctgtcatctagcagaagtgtgttccttttcattgctgtatagtattccattgcatgactgtcctgtgctctgattttaatgcactttattgtgggtggatatttgagttgcttcctttctggggtaataacactcacttggaaatagctgtggtgaacactcgtgtgggggtgggggtgggggccaactctaggagcacctaatggatcttacgaagcgtgttgtccaagtatagagatgattccaaagtggttggactgtgtttctttctcccagctgggtggaaggagaacactagtggattgctgagacttggtgctcggtatttttaattatggacagcctggctggcgttttgtggtgtctaattgcggagtagcgtgtcttactgtataatggcctcttttgtatgtgggagaccatggtgttgaggggaggcagttacacaaaaaacccagataccgagtgttagttccatgggtgtggctggtcatggtgcgcactcacgaaggatgtaggtgatgccctccactccgcagagccagtcccacaggggtacccattctgactcctaccaccgcagctccctacctcccgcctgccatgggttccacgtgcatggctctgggcagtctgtgtctttgcgtgcgtctgtgtatgtctgcgtgtatctgcttacattcgctcagcatctgagattcacccaggcttttgcgtggatcagcggcagactcctgattgccgcgtggcggcctgttgtgtgggtgtgtgccgcgtgtgtatccagtccctactcaggagtgtacgtttccagtgtgggttgcagtcaggatccatttctcccttaactttcagattatttgctgcataggcttttttctcctaatttggcgcctttgtcagaaatcaactgacctacctgtgtgggtctgtttctgtttgtccttacgctcttgccattgccacactttagacaaggtcttgctctgtccctcaggctggagtgcagtagcgtgatctcagctcactgcacccttgacctcccatactccagcaatcccctcgcctcagtctcctgagtagtagctgcgaccacaggcgtgtgtcaccacacccggctgattttattttttttatttttattttttttgtagagacggggttttactatgttgcccaggcaggtcttgatctgggctcaagtgatgctcctgtctcagcctcccaaactactgggattacaggttgtaggtgtgagccatggtgcccggccgccacactgtcttggctacagttgggtttataataaaccctgaatcgaggtgatgtgcattttccaactcttctttttaaagattcttgtggctgtttatgtccttggtgtttccatatatgttttacaatcagtgtctcaatttctaccaaaaaaacatgccttctggaatttcaatagcaattcccttgaacgcatttttgaataccttttctgaatgtcttgaatacatgttgggaagaatcggtgtcttaacagtctccagtgtccacgcgttgactgccgtgtgtgactccagtcggcgtctcaacagtctccagtgtccacgcgttgactgccgtgtgtgactccagtcggcgtctcagcagtctccagtgtccacgcgttgactgccgtgtgtgactccagtcggcgtctcagcagtctccagtgtccacgcgttgactgccgtgtgtgactccagtcggcgtctcagcagtctccggtgtccacgcgttgactgccgtgtgtgactccagtcggcgtctcaacagtctccggtgtccacgcgttgactgccgtgtgtgactccagtcggcgtctcaacagtctccggtgtccacgcgttgactgccgtgtgtgactccagtcggcgtctcaacagtctccggtgtccacgcgttgactgccgtgtgtgactccagtcggcgtctcaacagtctccggtgtccacgcgttgactgccgtgtgtgactccagtcggcgtctcaacagtctccggtgtccacgcgttgactgccgtgtgtgactccagtcggcgtctcaacagtctccggtgtccacgcgttgactgccgtgtgtgactccagtcggcgtctcaacagtctccggtgtccacgcgttgactgccgtgtgtgactccagtcggcgtctcaacagtctccggtgtccatgcgttgactgccatgtatgactccaggtattgagttcatcttcaacttctcccaacaatgaactggagttttctgtgcatgtgtctggcatgttttcctttagatctagtcctaggtgttcgatatgctattgaggactgtgtatttttatttcatttgtcacctgtgcgtggtgctttaatcctgtgccctaaactcccgccttggccatggcggtgtttctgtggactcgtggggtttccgtgtgcacacgcgtgtcctctgtctgacagtggctttgcttccccttgtcagtctgtgcctcggcttctcactgcactggtgaggtgagccggcgctcgctaatcttattcccagtctcggtgaacatgggctcagtctctcccggctcagtgttgggtttgcactggtgcacttacaggcagaagagcttcctcatttgctgagggcttttcctgaatccgtgttgaatgtggtcagctgcctttcctgcacctagtgagatgctcatgaggtcacttccttaccgcattactgtagtgaattacgctgactttcatatgccaagatgacctggcatttccaggtaagtccctgtggccatggtgcattggccttttctctgcatggccagatgagatttgctcataccgggctaaggacctcctgtgtaggaatgctcttgagggacactgggcttggatgttcattgtcttgtcatgtgatgtgtctgtcatggtttgatattgcattaagtgggcctcctgaaacaagttctgccatagtttgtataggattggcattatttgtttcatagagatgtgatgggtgaggccatctatgcctgccattttctttttgcttaggtttttcattaagaacttgatttttaaaaatagacatgaggcctggcatggtggctcacgcttgtaatcccagcactttgggaggccaacgtggatggatcacctgaggtcaggagtttgagaccaacctagtcaacatggtgaaaccccgtctccattaaaaatataaaaattagcagggtgtggtggtgcatgcctgtaatcccagctactctggaggctgaggcaggagaatcacttgaactcaggaggtggaggttgcagtgagctgagatcacaccactgcactccagcctgggcaacagagcgaggctctgtctcaaaaaaaaagacatgaggcttttggattttctgtttcttcctttgtcatttttttaaagataggtttgtcgcagaatttcatctaagttatcaaaacaatttacataaatcattcacagtatcctctgtgcagtgatgtccattctcattcctgctctgggccatttgtgttttcttttccccctgatcagactagctaagagtttatcatttttacagatattttccccaaagaaacctacttttgggtccattgattttttttttctattgttttctttttcattgacttttgctcttttcttatgaatttcctttcttctacctattttgtgttcaatttgctgtccttgttttaggttcttttgatagaggcttagatcattgatgaagaatatgaaagaatgggataatacagttaaaaacttggtctacttatgcccattagagaaaacattcttaagcacgcatggaatcttttaaaaatggacgaggtactaggacccaaagcaaatgtcagtaattcgcagatgataatgtataaatatatgatatgtaggtaaataatacaaatcacattctttggccagagtgcaattgaggaggaaatcagtaacaaaaagacaattaaatccatttgattcttttgttttcgttttgtagtaacttgcacttccctggtgccagaggcatgacacctttttgtctgctcttggccatttgggtggcgtctttgggaagggcctacttaattcttttgcctatttaaaaaactgggtcttggaaatcttgtctttttttttgagtcaggatctttctcgcacaggcttggagtgcagtggtgcgatcatagctcactgcaacctcaaactcctgggctcaagcgagcctcccacctcggtcttctgagtagctgggactacaggcatgcatcactatgctctgctaatttaaagaaaaggttttttttatagagactgggtctcgctgtgttgcccaggctggtctcggagtcctggtctcaagtgattcacctgcctccacctcgcggagtgccaggattacaggtggcgggagccgccacacccagcctggtcttagcgttattcccaggtctaggtgtgagtccttcctcagatatgtgttgtgaataatttccgatcctctggcttgctattttactttcttaatggttatcttttggaaagcaaaggtttccagtttgatgaaatctaatttttattttttatttttccgttctagtggtctttctattttctcatcaaattgagactttggggaaactacacagcagcaaaccaggatatatcctcttaaaaacagctcgagccggccgggtgcggtggctcatgcctggaatcccagcactttgggaggtggaggtgggcggatcacgtgaggtcaggagtttgagaccagcctggccaacatggtgaaaccccatctctactaaaaataaaaaattagccaggcatggtggcaggcacctgtaatcccagctacttgggaggctgaggcaggagaatggcttgaacctgggaggcagaggttgcagtgagccgagatcgcgccattgcactccggcctggggacaagagcaagacttcgcctcaaaaaaaaaaaaaaa

SEQ ID NO: 16479 - DNA, 1147 bp, Homo sapiens
  source 1..1147: mol_type = unassigned DNA
ccgaaagctgagggacggaggtcagtgactctggggtctcgggaacccggagacgaaggaagacaccgtgttccttaagagggagtatacgtttcctcgccatttatccaatggagtttcctcttacctacttaacaggaacagggaaagggtgtcccccaacggtacggctgccccgcctcttcctgggggcccacacgtgttacaggaagtgggtaagggtaatatggaggagcttccggcagcccccggcggctgaaagccggggcagaagtgctggtctcggtcgggattccgggcttggtcccaccgaggcggcgactgcggtaggagggaagaggttttggacgcgctggcctcccgccgctgtgcattgcagcattatttcagttcaaaatgaactatatgcctggcaccgccagcctcatcgaggacattgacaaaaagcacttggttctgcttcgagatggaaggacacttataggctttttaagaagcattgatcaatttgcaaacttagtgctacatcagactgtggagcgtattcatgtgggcaaaaaatacggtgatattcctcgagggatttttgtggtcagaggagaaaatgtggtcctactaggagaaatagacttggaaaaggagagtgacacacccctccagcaagtatccattgaagaaattctagaagaacaaagggtggaacagcagaccaagctggaagcagagaagttgaaagtgcaggccctgaaggaccgaggtctttccattcctcgagcagatactcttgatgagtactaatcttttgcccagaggctgttggctcttgaagagtaggggctgtcactgagtgaaagtgacatcctggccacctcacgcatttgatcacagactgtagagttttgaaaagtcacttttatttttaattattttacatatgcaacatgaagaaatcgtgtaggtgggttttttttttaataacaaaatcactgtttaaagaaacagtggcatagactccttcacacatcactgtggcaccagcaactacttctttatattgttcttcatatcccaaattagagtttacagggacagtcttcatttacttgtaaataaaatatgaatctcaaaagtgtcatgttatttccaa

SEQ ID NO: 16480 - DNA, 2308 bp, Homo sapiens
  source 1..2308: mol_type = unassigned DNA
aggatcccgccccaaccagcgccaggccacgccccggcgtgtgacgcaagcacgctccgtgcgcgccgtcgcgtcgcggcgctcactgggggcccggctttcgcccgctgctgccgccgccgccgccggccgcggctgcactcccaagatggcggctcctccgggcgagtacttcagcgttgggagccaggtgtcgtgccggacgtgccaggagcagcggctgcagggcgaggtggtagcctttgactaccaatccaaaatgctggctttaaaatgtccctcttccagtggaaagcccaaccatgcagacatcttgctcataaacttacagtatgtttcagaagtggaaataattaatgaccgaacagaaacccctcctcccctagcttcactcaatgttagtaagcttgccagcaaagcacggacagagaaggaggagaagctgagccaggcctatgcaatcagtgctggtgtctctctagagggccagcagctcttccagaccattcacaagaccattaaagactgtaaatggcaagaaaaaaacatcgtagtcatggaagaagttgttattacacccccatatcaagtggaaaactgtaaaggcaaagaggggagtgcactgagccatgtacgcaaaatagttgaaaaacattttagagacgtggaaagccaaaagatactgcaacgttcacaagcccagcaaccacagaaggaggctgccctgtcatcctgagtccgtacacatggaggactcttccagcatccagccaaggaggcgctggtggtggcttcagcggaggcaggccgggggagggaagggatcctatatgtcctgttggctcttaacaaagggtcagcatttccaaatcttagacttgaacaaacaaaacacccaacaaaaaagaacaagagaataatttaaaagttgaatcattacttgactaacagacttcggtccaccatgtccttttcacagccctcttctggaacagtcaccttgttaattttatttttgaaaattattttcccactctgccctttacttctgactttcctttcctagtttgttcctgccattctgtttttataagtggctacacttgccttctgaatgattgaaagaaacttttacatcttttcttccaaaataaaagtaacaagctgactgtgattcttaaattgagaccagagcagcaaacgtctcactttaaatttttgttttcttttcctttttttttcttttttctttttttttttttttttgcacagggcatggcttgaattagttttatttttcttaactttaaatatatatatgaaaatatatattaaaatgttctctaaatattttctgcttcttgcaggtctctttttactagatcatggctgttcttcccacctcatccctctgaaaataaaaatgtattgccctccccaccatccatcatagccaggccactaacttgacttggtgcaagagattcttgctgcgaactttgtagagccagtgtgcagatagaatttggctttgagggttcctgatggctttttagtctttaactgtgtgtgtaccagtctcacatttggcccaaacctcaggattctccctctgcctgtcttacttcatggtactagaagaccttcctcgccactctctccacatgagagagtcagctgccctttctcctgtgcctctgcaggaagaactctcttgcatggcacatctcagctcctcattgagggatagttttctttgataagaaacctggagtccatttactctgacctctctttaaatctatatccagagccactagcccaggaaaaacttgggtgacccgtaatttctcttctcctgctgtccttttgctcttacgccccaccccaactccccttaaattttacaggcttatgacagtttgtatgtgctcagccaatgagcagaaaacctggaaagaatttctggactttagcccaccagtttgtctggttgactaacctgctgagagctaaaattggcacccattgccccgtgccttcaggcagtctcctggggcagagtatgccaccatccgaatatcaggcactgagtgggatgtgggtgatgctcacatgactggctagagctttgggggtggggtgggggttaactactatttttttggccatgatctctttccccttccttttttttttaattaaataaatggatcaaattaaataattcaagccctgccttcaaaatgaaattttttttttagtattatttagcaaaaacaataaaacccaaatttttttaaccatc

SEQ ID NO: 16481 - DNA, 2484 bp, Homo sapiens
  source 1..2484: mol_type = unassigned DNA
agcagtaaatagcaccgtccttggaaataggcagactgtttttgctagttgtggaaccgtggacaagtttagtctaaaacttagtttatgtaaaaggaggacattgattcctacctcaaagggctgttagatgctcaagaagtgacaatacaaatgcctatgaagaaacaggatcaggatcccgccccaaccagcgccaggccacgccccggcgtgtgacgcaagcacgctccgtgcgcgccgtcgcgtcgcggcgctcactgggggcccggctttcgcccgctgctgccgccgccgccgccggccgcggctgcactcccaagatggcggctcctccgggcgagtacttcagcgttgggagccaggtgtcgtgccggacgtgccaggagcagcggctgcagggcgaggtggtagcctttgactaccaatccaaaatgctggctttaaaatgtccctcttccagtggaaagcccaaccatgcagacatcttgctcataaacttacagtatgtttcagaagtggaaataattaatgaccgaacagaaacccctcctcccctagcttcactcaatgttagtaagcttgccagcaaagcacggacagagaaggaggagaagctgagccaggcctatgcaatcagtgctggtgtctctctagagggccagcagctcttccagaccattcacaagaccattaaagactgtaaatggcaagaaaaaaacatcgtagtcatggaagaagttgttattacacccccatatcaagtggaaaactgtaaaggcaaagaggggagtgcactgagccatgtacgcaaaatagttgaaaaacattttagagacgtggaaagccaaaagatactgcaacgttcacaagcccagcaaccacagaaggaggctgccctgtcatcctgagtccgtacacatggaggactcttccagcatccagccaaggaggcgctggtggtggcttcagcggaggcaggccgggggagggaagggatcctatatgtcctgttggctcttaacaaagggtcagcatttccaaatcttagacttgaacaaacaaaacacccaacaaaaaagaacaagagaataatttaaaagttgaatcattacttgactaacagacttcggtccaccatgtccttttcacagccctcttctggaacagtcaccttgttaattttatttttgaaaattattttcccactctgccctttacttctgactttcctttcctagtttgttcctgccattctgtttttataagtggctacacttgccttctgaatgattgaaagaaacttttacatcttttcttccaaaataaaagtaacaagctgactgtgattcttaaattgagaccagagcagcaaacgtctcactttaaatttttgttttcttttcctttttttttcttttttctttttttttttttttttgcacagggcatggcttgaattagttttatttttcttaactttaaatatatatatgaaaatatatattaaaatgttctctaaatattttctgcttcttgcaggtctctttttactagatcatggctgttcttcccacctcatccctctgaaaataaaaatgtattgccctccccaccatccatcatagccaggccactaacttgacttggtgcaagagattcttgctgcgaactttgtagagccagtgtgcagatagaatttggctttgagggttcctgatggctttttagtctttaactgtgtgtgtaccagtctcacatttggcccaaacctcaggattctccctctgcctgtcttacttcatggtactagaagaccttcctcgccactctctccacatgagagagtcagctgccctttctcctgtgcctctgcaggaagaactctcttgcatggcacatctcagctcctcattgagggatagttttctttgataagaaacctggagtccatttactctgacctctctttaaatctatatccagagccactagcccaggaaaaacttgggtgacccgtaatttctcttctcctgctgtccttttgctcttacgccccaccccaactccccttaaattttacaggcttatgacagtttgtatgtgctcagccaatgagcagaaaacctggaaagaatttctggactttagcccaccagtttgtctggttgactaacctgctgagagctaaaattggcacccattgccccgtgccttcaggcagtctcctggggcagagtatgccaccatccgaatatcaggcactgagtgggatgtgggtgatgctcacatgactggctagagctttgggggtggggtgggggttaactactatttttttggccatgatctctttccccttccttttttttttaattaaataaatggatcaaattaaataattcaagccctgccttcaaaatgaaattttttttttagtattatttagcaaaaacaataaaacccaaatttttttaaccatca

SEQ ID NO: 16482 - DNA, 876 bp, Homo sapiens
  source 1..876: mol_type = unassigned DNA
ccctttcccggcttcctcctcccctctactctacccagcttgcgctccccagccgcaagtcggccgcgctttgcccgtcagcgcttggagctttctgcgtcgcttcccgctgcgcctgcgcggtcccgcctcgccccacgcgcgggctcgcgcttcggtttccccagacctgctcgcagcaccctgctgtcttcccggtccggcccgctgcccgcggcgccagcaccatgctcttctattcttttttcaagtcccttgtgggcaaggatgtggtcgtggaactaaagaatgacctgagcatctgtggaaccctccattctgtggatcagtatctcaacatcaaactaactgacatcagtgtcacagaccctgagaaataccctcacatgttatcagtgaagaactgcttcattcggggctcagtggtccgatacgtgcagctgccagcagatgaggtcgacacacagttgctacaggatgcggcaaggaaggaagccctgcagcagaaacagtgatggctcctcctcctcttcccctccctctttcattggtgacccataaccccaagtcccagcccagaacccctaacccccaatacttgaaggggttttgtttttttactaatgatggttttgtgggttttttttaagggatgagtggatgagaggagtaatagggaacagctatcctctcttgagaaggggaggataagtaggctgggaaacttcaaagccttcccagtccccagcacctgcctttctcactacttctctggagatggtaggagagtttcctaggtctttccagggcagcatgtgattcatttggggatggaaggaatctgtcccgcatcgggaataaaatttatgatgcaaa

SEQ ID NO: 16483 - DNA, 876 bp, Homo sapiens; identical to SEQ ID NO: 16482
  source 1..876: mol_type = unassigned DNA

SEQ ID NO: 16484 - DNA, 876 bp, Homo sapiens; identical to SEQ ID NO: 16482
  source 1..876: mol_type = unassigned DNA

SEQ ID NO: 16485 - DNA, 876 bp, Homo sapiens; identical to SEQ ID NO: 16482
  source 1..876: mol_type = unassigned DNA

SEQ ID NO: 16486 - DNA, 876 bp, Homo sapiens; identical to SEQ ID NO: 16482
  source 1..876: mol_type = unassigned DNA

SEQ ID NO: 16487 - DNA, 876 bp, Homo sapiens; identical to SEQ ID NO: 16482
  source 1..876: mol_type = unassigned DNA

SEQ ID NO: 16488 - DNA, 3815 bp, Homo sapiens
  source 1..3815: mol_type = unassigned DNA
gcgcagcaacctccaccaggcctccgcgtctggactcccgccctgcctctgggcctcctccgcccaccggcggcgtctcccgcgaagcccgctgggcctcgctctcaccctcctcctcctcctcacgccgggccttgctcttggccttggatttctggctgcgcagttcgcgtccccgcggctccccgccggccgcgcgtttccgagccatgttgcttgtctgggcaaattccacttcgcgagtgacgcacccggccgcgatgcgctagaacgccggccccgccccgaggcggtgcgcttggccacgccccttcgttggaggcctagtcacgcccctaaaggaagctccaccccatacccgtggccactaaaaaactgcgggaagcaggaaagagcacaacaggtttctctctatttccggtgtattgtatcctcacgtttccggagattgacgttgctcttgtgttctcgcgagaggcgggaaagggcgcagggtttgaaacatggcggacgacgtagaccagcaacaaactaccaacactgtagaggagcccctggatcttatcaggctcagcctagatgagcgaatttatgtgaaaatgagaaatgaccgagagcttcgaggcagattacatgcttatgatcaacatttaaatatgatcttgggagatgtggaagaaactgtgactactatagaaattgatgaagaaacatatgaagagatatataaatcaacgaaacggaatattccaatgctctttgtccggggagatggcgttgtcctggttgcccctccactgagagttggctgaaacaaagaatttgtcctgtatggaaaacgggagactttgtacagtggcctctctaaaagtacaaaacattcataagagaaacctgcatacattttgatattaagaaataattccggggattcttccactcctgaaatgagttgatttgcagataactcacaacttcttaagctaaatggtattttcatttttctcaagctctccaataaatatgaccaccaagatgcagaactctttcaggacttcttttgctccattattctcacagatacttactgatttttcttttctttaaattggtgtttccttgtagatttttttaagtgcggtcttctgtcttgtgaattatttaaagtaagcatgtcttaccttcacttagcacacatttgcagtgcacctactgtgtttgaggcaccaggtttgagtgctgggaaccagagttttatcaaaatgctttctgggccagacatggtggctcatgcctgtaatcccagcactttgggaggccaaggtgggtggatcacctgaggtcaggcgtttgagaccagcctggccaacatggtgaaaccctttctctactgaaaatataaaaattagccaggcgtggtggcgcatacttgtaatcccagctactcaggaggctgaggcagtagacgcttgaacccaggaggcagaggttgcagtgagccaagatcacaccattgcacttcaacctggtcaacagagcgagactccgtgtcaaaaaaaaaaaaaaaaaagttttctgccctcaagtcttctggggaggcagatgtttaaaccaacaattgcaggcagtaagattagtgctgatagaatcatgcacatgcaggatgccataggagcatggggaagagcacccaaatatgggagaaaggggcagagggacattgtaaacatcaaccctgcagtagaagacagagcaaagcatgatttctcttttctctggcctgatttaattctaaggtcagacgttcagcttgatcataacctgtttataattatgactcagaccatttttccactcttggatcattggccattaatgatgaggggtctcaaacaacatgtctcagtgacacagtaaagcagaaattggctgaaagcaaagctgtttttatttctagcttcagtcagcacataatgcttaaaacctaaagaggaaagtaaaagcgtgttacaatctctcaaactttatcaagacagggcttagaacctgacatcctccgctatggtcattccattttgaaatgtagaaaatccaacttgtggatggtttgtctgtaaatgagctgaatgtgtgtgcgtgttcattatcaagcacgatatgctcacaaatgcacagtactttaagccttgtgcaagaaagatgctttcagtaaacatatttaaaaggttttattttccttactaatggtacatgcccctgcaagttcatggagaagagaaaaacaagtgtgggtgagctgatggaggcttcatcttaggtgaggaggcaggagagacaccctcccttcacttgtgccatccccacgctttgtccttaagctgtagtggtcccaggagataacctgtttacagcagcccattcagtattgaaaaatgaactccctcctgcagaatgttagaagaaacaacctcaaagacctcaggccgcctgtggtcattagtatgtggcagcaagattgaacctgcctgcctcctacctgtgtgagcctgtggtgtgggtgtggtaccaaggccctggctctgggcagtctgttggctcctggtgttcactaaggcgtggggtgacaggccatctggcctcgctctgccagtctgcagttctccccagcactgcattcatttttagtggtttctgatagtcacactgaattcctggacactttcttctcttcattcttagttatctttctcctttttctcctggaactgatagtttacactaaaacttttggctgtgaggacttgattatacacatttctaaaacccatgaaccttaatatctgacactgttactctcatatgcacacacaactaaaacataccaacctacttcatttcctagctgctaagatacaaggggagggacaataaaaggttaactgcagaatagccacctatgtgtcaggaaatggagggaggggaggcaatgtgtgagtccttttggagctgggactcaatccacaacagagacagctcaagcagggccctgccatggtccacactgaggtttcctctgcagtggtgctgtccactgaggggttatggtgtgagggcccctgggagccacgccttggacttctgagtctgcagagcactcggctccagccagctggatggcaggtggtcagtggagctggtgactggtggtttctgcaatgaggtgtcagattagcctaagggaagcctcttcagcaagtatcatgcctggatcccggtcttggttgttttatgagaggccgatatgaattgccattgcctcccacaaagaaaaatggacaaaatatgggaccacatctttgagatgaaatgtgcccaaaatgaaaagtaacttgagtatcccaagttaaacttaatcattagctgcaaatggacgattttcaaatttcaaatagtgatttttgaagatttgcccaaactagagtactatccctcttcacactaagaggcagaaagtggtttcacacacccttttatttaatcagctaaagtgggtgcggtgacacacacctgtaaactcaaccactaaggagactgaggcgggaggattacttgagcccaggagttcgagatcagcctgagcaacataacaagaccctgtctcaaataatacttagctattacccatattgcttttagcctgctgccaggaggggagaaatgttattgtttgaacagatgtcagatgtgagtaatgctcagctgtgttcaatgtagaaaattaataaaagttccaggagtcatcctggctagatcaa

SEQ ID NO: 16489 - DNA, 1908 bp, Homo sapiens
  source 1..1908: mol_type = unassigned DNA
attacaagccgcggcactttacggctctcgtcctcgttcctccggcgggaacacggcccgccccgccctttcgcccagcgggccccgccctactccgcgtggattggttgaccgcccttcgagcccggtgctgactggcttgcgtctctgccactttctttcagcttagtggcgcgcggcgcggcgacgaccgccgggagcgtgtgcagcggcggcggcggaagtggccggcgagcccggtccccgccggcaccatgcttcccttgtcactgctgaagacggctcagaatcaccccatgttggtggagctgaaaaatggggagacgtacaatggacacctggtgagctgcgacaactggatgaacattaacctgcgagaagtcatctgcacgtccagggacggggacaagttctggcggatgcccgagtgctacatccgcggcagcaccatcaagtacctgcgcatccccgacgagatcatcgacatggtcaaggaggaggtggtggccaagggccgcggccgcggaggcctgcagcagcagaagcagcagaaaggccgcggcatgggcggcgctggccgaggtgtgtttggtggccggggccgaggtgggatcccgggcacaggcagaggccagccagagaagaagcctggcagacaggcgggcaaacagtgagcgcccacccagaccggctgctgcgccccctcctgccagggtggcgattccgctccacagtctcggacggatctgctcagaaaggaagaggcaggcgccagggggaacccccttcgtgttttgtgaccctcccttttaggtgaagcccctttttcttgctaaaaccggcaattctccggttagaaatgttacttggtgttttttggttttgtgaaacggccgtcccaaaactggctggattcctagaagagtctgtgttgaaggcatctttcaagccctcgctctggttctcagggcagcattttccaggcgggtttgttttgcatttcttggagcctctccgagcagcaaccagacgggagatttttattttaagctgttcatgctgggactgacagcctgcagggtttccttgggcgcggccccaaaattgccttcaaaacaaacccgggacggttgaaagccttcgaaccgtgcaggggatgcctcgggccctggcccttcgcttcctctcttgtgttatggaaataaaaacaaataaaactacacactgcacatccactgttccttttgagcttctgggtgcacctagcgggtctcctgccctctgtccatcgctggactctcaggaaatccccgttcccgtaagggaagcttccttttgagagttctcaccaggtgtcagcggcacagtgaggcactgatgtccttttacaaaaggcaagaccagcatctggacagtgggggctcttgagagtccccggcgccccccacaccaggttgtcctataaccctctcccctctgtggagacgttaatgccaaggggtgtgtggggagggaagtcccaggcaggggccacgcatggtccccatcaccccctcctgggtggcctggactccatcatctatcctcatctgtccacactggcgttcacacagagaagacaggacaggaatcccctcggaagatgctcatggaagattctcacgaggctcctgccccctttctgagccaggccgggtttgccactcctcgggcgcgcacctgagacactgagtcagcgctttcgagaaaggctccgggtagcatctgtggaccgtgaagaaaccagagggaagccctgagccaggcagcggcccgtccccctgcatagccttctcttcagggtcctcgttcggagacctattttgagaggtgattggaataaaaggtcccgtccgtgaggaactcttt

SEQ ID NO: 16490 - DNA, 1145 bp, Homo sapiens
  source 1..1145: mol_type = unassigned DNA
cccgccctactccgcgtggattggttgaccgcccttcgagcccggtgctgactggcttgcgtctctgccactttctttcagcttagtggcgcgcggcgcggcgacgaccgccgggagcgtgtgcagcggcggcggcggaagtggccggcgagcccggtccccgccggcaccatgcttcccttgtcactgctgaagacggctcagaatcaccccatgttggtggagctgaaaaatggggagacgtacaatggacacctggtgagctgcgacaactggatgaacattaacctgcgagaagtcatctgcacgtccagggacggggacaagttctggcggatgcccgagtgctacatccgcggcagcaccatcaagtacctgcgcatccccgacgagatcatcgacatggtcaaggaggaggtggtggccaagggccgcggccgcggaggcctgcagcagcagaagcagcagaaaggccgcggcatgggcggcgctggccgaggtgtgtttggtggccggggccgaggtgggatcccgggcacaggcagaggccagccagagaagaagcctggcagacaggcgggcaaacagtgagcgcccacccagaccggctgctgcgccccctcctgccagggtggcgattccgctccacagtctcggacggatctgctcagaaaggaagaggcaggcgccagggggaacccccttcgtgttttgtgaccctcccttttaggtgaagcccctttttcttgctaaaaccggcaattctccggttagaaatgttacttggtgttttttggttttgtgaaacggccgtcccaaaactggctggattcctagaagagtctgtgttgaaggcatctttcaagccctcgctctggttctcagggcagcattttccaggcgggtttgttttgcatttcttggagcctctccgagcagcaaccagacgggagatttttattttaagctgttcatgctgggactgacagcctgcagggtttccttgggcgcggccccaaaattgccttcaaaacaaacccgggacggttgaaagccttcgaaccgtgcaggggatgcctcgggccctggcccttcgcttcctctcttgtgttatggaaataaaaacaaataaaactacacactgc

SEQ ID NO: 16491 - DNA, 2251 bp, Homo sapiens
  source 1..2251: mol_type = unassigned DNA
gcttttcaaagtcgtcccaccatcaatgaaggcaggccacttccggcgtagccatggcggctaacgctactaccaacccgtcgcagctgctgcccttagagcttgtggacaaatgtataggatcaagaattcacatcgtgatgaagagtgataaggaaattgttggtactcttctaggatttgatgactttgtcaatatggtactggaagatgtcactgagtttgaaatcacaccagaaggaagaaggattactaaattagatcagattttgctaaatggaaataatataacaatgctggttcctggaggagaaggacctgaagtgtgaatgagtttccttgacttacactagattttgttttggcttataatgacaagaaaatggaattttttttcccactttctaatgtttaaatcccataaagctaagtttcccgttaaagggaagtgctttgaagatgtgtacccatttttgtaagttaatcatgattatcctggaaaaagaagaaaagagcttcttctttgcagatgaaaataaaggtgtttttggttaactgtcattttgtttattctactgcagtagccagtggaacaaagtttgtagttattttgccacttacttttctgtcattatatgcttatttgttttgtcatttacgtgaccatttgattctcaaacaaaagttgttccaaacaaaatgatgaactttgatttgaacaggtgcatttaaacaaccggaaatgatcacttagaaaattcaattaaaatgctgttgttttgtaatgaggatttttcttctgatttcaaattccatgaactcctattgaaaacaaacaatgtacaggtaatatatgcacattgtagaaatgcaggaattatctattggaattaccctaaagatagaaattttatctatttgcttataaaattgattcagaaggttattaccttaatgtagttattactgaattgccaggaaatgagtggagacagagctttaagataaaggatactaaaagcagctaagaactccaggactcaggtcaaatcaaggaactgataataagatcattgaactgtataaattaagtcaaagaactcctattaaaaacaaacaggtaatatatgcacatcgtagaattgtaggtaagcaaaaaggagaaggttgatcatgctttgctgtatgtcttcgtagactttctcagtccactctcagtacacgttttattttacttgctcatcctgattatactgtttttaccctccacttaagtcattttttgaatttaaatggtgaatatctttctgtgtcaaatatttcaacattaatatgtacatagtattaaatggatttactataaattatttagcctattcttactggccacagtagtctaactagatctttatacatttgtatttttctagaataaactcaaaaatgtgtaagatcaaagggtatatattgtgttgccaagaaaaagtttgtgccaatgtatatttttgccaggagtctttcatagtaccatttatatccttcccagcattagctgtgttctaccttctctcctctttgccatttttacaagaaaaccgggcatgtctaaagttttcttttcctttttttttttttttttttttttttggagagtctcactggaatgcagtggcatgatcttggctccctgcaacctccagtcaggctggtgtgccttgtcgcgatatcaacgcgacctccgcctcccaggttcaagtgattgtcctgcctcaccctcctgagtagctgggattacaggtgggcgccaccactcccatctaatttttatatttttagagagatggggttttaccttgttggccaggctggtcttgaactcctgacctctagtgatccacctgcctcagcctcccaaagtgccggtattaaaggcatgagccaccaggcctggcctaaaattttcttgattaattttgatctcatttgtattttgtaaatgacttatctgttgaggcttttgccattgagatgtttgtctttttcttactaatttgtaagaattcttgatgggtttctgttagtcatgtattttgctaataatttccctagtttgtagtttgccacttagtgctatttttgacataaatgatgtattttaatgtagttgcatgttgacctagtccattatggtttttgtatttggtccacgtggattggaaaacctttgctttgattatacttttctttgggc

SEQ ID NO: 16492 - DNA, 768 bp, Homo sapiens
  source 1..768: mol_type = unassigned DNA
gaagagcactgattggctgaggcagaaaagtgcccctgcctcggcgctttcggttttggctgggatcatccgcggcggccgggctcgtggggcgcctggagtgagggttctggttcccgccggcgaggattgttaaaatgagtcttcggaagcaaacccctagtgacttcttaaagcaaatcatcggacgaccagttgtggtaaaattaaattctggagtggattatcgaggggtcctggcttgcctggatggctacatgaatatagccctggagcagacagaagaatatgtaaatggacaactgaagaataagtatggggatgcatttatccgaggaaacaatgtgttgtacatcagtacacagaagagacggatgtgaagacaccaagagagcaacgcttttcatagttggatatatttttttatgaattttttctaatttttgcttcttttgtgatacaatttgtcctctttttataatagttggtgatttttcactgacatgtgagtaagataaatgtatacaattgtggatttaattgtgaaatgttctttcacttgtaagtttcagtcattttcttttacctcgttgtcagtgtacagaatgctaaaataattaaaaaaagacaaaatatacctcttcctacaagattatttaacttaagtttcgagaagtgtcatttcatttgacttgcttttcttatccagctaaaatgatgcatatattttatatattgtatggacatataattaaaacattttggagg

SEQ ID NO: 16493 - DNA, 1352 bp, Homo sapiens
  source 1..1352: mol_type = unassigned DNA
cgctttcggttttggctgggatcatccgcggcggccgggctcgtggggcgcctggagtgagggttctggttcccgccggcgaggtgagccgcaccgctgcgcgggccgacgacggggccgggcgcagccccaggttcggtgccccagtgttcagtcgcgctgtggagcggcggctgcagcggccctaggccgggcgaggcagccccggaaagggcctgcggtgaacaggctggggctccgggaagggaccgctgggtggcgggtccccgcgaaatgccgcgtccaagctctccgcgcatggaatggctgggagaggtctgatggtgggcgccgggaccgccctcagcgaggcgcctagactgcgcggagaggagcggcaccgtcccggctcctaccgagttggcgtccgagatcaattcaggttgttgaagttccccagggagccccgacgctaatcccaagattcggcgggaaagcggatcccgaacccaggcctaggcttcgcctgtcttccaggagggcttcagggaattgcgaaccctctcctacatcggggtggctgcgcctgaccacaggaattaaaggctggactcgcctgtcttaccaagttgtcaggtcgaggaacccgattgtatggtcttaagtcctatcgcccaaggttttctgtgcgtatgcgtgtccgcacacctgcatagcaggcatttttaaggattgttaaaatgagtcttcggaagcaaacccctagtgacttcttaaagcaaatcatcggacgaccagttgtggtaaaattaaattctggagtggattatcgaggggtcctggcttgcctggatggctacatgaatatagccctggagcagacagaagaatatgtaaatggacaactgaagaataagtatggggatgcatttatccgaggaaacaatgtgttgtacatcagtacacagaagagacggatgtgaagacaccaagagagcaacgcttttcatagttggatatatttttttatgaattttttctaatttttgcttcttttgtgatacaatttgtcctctttttataatagttggtgatttttcactgacatgtgagtaagataaatgtatacaattgtggatttaattgtgaaatgttctttcacttgtaagtttcagtcattttcttttacctcgttgtcagtgtacagaatgctaaaataattaaaaaaagacaaaatatacctcttcctacaagattatttaacttaagtttcgagaagtgtcatttcatttgacttgcttttcttatccagctaaaatgatgcatatattttatatattgtatggacatataattaaaacattttggaggaa

SEQ ID NO: 16494 - DNA, 549 bp, Homo sapiens
  source 1..549: mol_type = unassigned DNA
gatcatccgcggcggccgggctcgtggggcgcctggagtgagggttctggttcccgccggcgaggattgttaaaatgagtcttcggaagcaaacccctagtgacttcttaaagcaaatcatcggacgaccagttgtggtaaaattaaattctggagtggattatcgaggggtcctggcttgcctggatggctacatgaatatagccctggagcagacagaagaatatgtaaatggacaactgaagaataagtatggggatgcatttatccgaggaaacaatgtgttgtacatcagtacacagaagagacggatgtgaagacaccaagagagcaacgcttttcatagttggatatatttttttatgaattttttctaatttttgcttcttttgtgatacaatttgtcctctttttataatagttggtgatttttcactgacataatccttgcgtgaatatgttctacaaaggcatccagtttcagtctgaagctacaaaaaggggccacaggatcagaagttcagccactgattgagtcacctaaataaa

SEQ ID NO: 16495 - DNA, 545 bp, Homo sapiens
  source 1..545: mol_type = unassigned DNA
gaggcagaaaagtgcccctgcctcggcgctttcggttttggctgggatcatccgcggcggccgggctcgtggggcgcctggagtgagggttctggttcccgccggcgaggattgttaaaatgagtcttcggaagcaaacccctagtgacttcttaaagcaaatcatcggacgaccagttgtggtaaaattaaattctggagtggattatcgaggggtcctggcttgcctggatggctacatgaatatagccctggagcagacagaagaatatgtaaatggacaactgaagaataagtatggggatgcatttatccgaggaaacaatgtgttgtacatcagtacacagaagagacggatgtgaagacaccaagagagcaacgcttttcatagttggatatatttttttatgaattttttctaatttttgcttcttttgtgatacaatttgtcctctttttataatagttggtgatttttcactgacatagtctcactcccatcgcccagacttgagtgtagtgatgtgatcactgctcactgcagt

SEQ ID NO: 16496 - DNA, 518 bp, Homo sapiens
  source 1..518: mol_type = unassigned DNA
gtcaaagggcgcggggcggtgcctgcgaagagccacacggcgcgacaagatggcggataaggagaagaagaaaaaggagagcatcttggacttgtccaagtacatcgacaagacgatccgggtaaagttccagggaggccgcgaagccagtggaatcctgaagggcttcgacccactcctcaaccttgtgctggacggcaccattgagtacatgcgagaccctgacgaccagtacaagctcacggaggacacccggcagctgggcctcgtggtgtgccggggcacgtccgtggtgctaatctgcccgcaggacggcatggaggccatccccaaccccttcatccagcagcaggacgcctagcctggccgggggcgcggggggtgcagggcaggcccgagcagctcggtttcccgcggacttggctgctgctcccaccgcagtaccgcctcctggaacggaagcattttcctttttgtataggttgaatttttgttttcttaataaaattgcaaacctc

SEQ ID NO: 16497 - DNA, 1456 bp, Homo sapiens
  source 1..1456: mol_type = unassigned DNA
gaaagagccgagtgggctcgaggccgacgcgaccatcgtttgtcgacgccgctgccaccgcctgcctgagagaagtcgtcgcggccgaccccgtcgcctccgccggctaccatgtccgcccaggcgcagatgcgggccctgctggaccagctcatgggcacggctcgggacggagacgaaaccagacagagggtcaagtttacagatgaccgtgtctgcaagagtcaccttctggactgctgcccccatgacatcctggctgggacgcgcatggatttaggagaatgtaccaaaatccacgacttggccctccgagcagattatgagattgcaagtaaagaaagagacctgttttttgaattagatgcaatggatcacttggagtcctttattgctgaatgtgatcggagaactgagctcgccaagaagcggctggcagaaacacaggaggaaatcagtgcggaagtttctgcaaaggcagaaaaagtacatgagttaaatgaagaaataggaaaactccttgctaaagccgaacagctaggggctgaaggtaatgtggatgaatcccagaagattcttatggaagtggaaaaagttcgtgcgaagaaaaaagaagctgaggaagaatacagaaattccatgcctgcatccagttttcagcagcaaaagctgcgtgtctgcgaggtctgttcagcctaccttggtctccatgacaatgaccgtcgcctggcagaccacttcggtggcaagttacacttggggttcattcagatccgagagaagcttgatcagttgaggaaaactgtcgctgaaaagcaggagaagagaaatcaggatcgcttgaggaggagagaggagagggaacgggaggagcgtctgagcaggaggtcgggatcaagaaccagagatcgcaggaggtcacgctcccgggatcggcgtcggaggcggtcaagatctacctcccgagagcgacggaaattgtcccggtcccggtcccgagatagacatcggcgccaccgcagccgttcccggagccacagccggggacatcgtcgggcttcccgggaccgaagtgcgaaatacaagttctccagagagcgggcatccagagaggagtcctgggagagcgggcggagcgagcgagggcccccggactggaggcttgagagctccaacgggaagatggcttcacggaggtcagaagagaaggaggccggcgagatctgaacccgtctcccgggtgctgtaaatagtctgataaacgttcacacagtctaaaattaccctttatatttgctgaatacaactcatcttttgtagtttaaaatttctattgttttggagctagctgtgagtttctagaagtgtacagagttgctcctgtgttcccgggtcatgttgagtaggaataaataaatctgatgctgcctcctgaggctgcggggggtttctgctg

SEQ ID NO: 16498 - DNA, 2097 bp, Homo sapiens
  source 1..2097: mol_type = unassigned DNA
tcccccgcggcgggaaagagccgagtgggctcgaggccgacgcgaccatcgtttgtcgacgccgctgccaccgcctgcctgagagaagtcgtcgcggccgaccccgtcgcctccgccggctaccatgtccgcccaggcgcagatgcgggccctgctggaccagctcatgggcacggctcgggacggagacgaaaccagacagagggtcaagtttacagatgaccgtgtctgcaagagtcaccttctggactgctgcccccatgacatcctggctgggacgcgcatggatttaggagaatgtaccaaaatccacgacttggccctccgagcagattatgagattgcaagtaaagaaagagacctgttttttgaattagatgcaatggatcacttggagtcctttattgctgaatgtgatcggagaactgagctcgccaagaagcggctggcagaaacacaggaggaaatcagtgcggaagtttctgcaaaggcagaaaaagtacatgagttaaatgaagaaataggaaaactccttgctaaagccgaacagctaggggctgaaggtaatgtggatgaatcccagaagattcttatggaagtggaaaaagttcgtgcgaagaaaaaagaagctgaggaagaatacagaaattccatgcctgcatccagttttcagcagcaaaagctgcgtgtctgcgaggtctgttcagcctaccttggtctccatgacaatgaccgtcgcctggcagaccacttcggtggcaagttacacttggggttcattcagatccgagagaagcttgatcagttgaggaaaactgtcgctgaaaagcaggagaagagaaatcaggatcgcttgaggaggagagaggagagggaacgggaggagcgtctgagcaggaggtcgggatcaagaaccagagatcgcaggaggtcacgctcccgggatcggcgtcggaggcggtcaagatctacctcccgagagcgacggaaattgtcccggtcccggtcccgagatagacatcggcgccaccgcagccgttcccggagccacagccggggacatcgtcgggcttcccgggaccgaagtgcgaaatacaagtaactactctgactccttcggtagctgcaaccaggagtgagcccttctctgtgttcccagggtctgctgagggccgtgtctggtggggatggggctgggctcaccctcaggagtagggctggggagtcgtgaacgggactcaggtgtgggaagaggcgagagggctgtggaggagctcgcacggcgccaggtgatgggctgcacaggcactgtcccctgcctgcgtcctggggcctgtgcactgttgcgtccatgctcagagtggctgagacttgtgtcctgaccaggccctgcttacctctgttttggtttttgtttttgatatttttttttccattgtgtttttacgtagtgtcatgttctgtgcatatagtgttgtattctcctttgcactgtttatgttacagtgaaggctctccttattaaaaatcttcgcaaaggtcactttttaatggctatctaacactccatatgtggtgggcaagtctggttggcctccggggggtttccaggtataggggatgtagggccttgcctggcctggtctgcgggtccatcgtcagtgcctgagcggccagcagaaggggggcagcagcctccactgagcctctggttcccatttcccaggttctccagagagcgggcatccagagaggagtcctgggagagcgggcggagcgagcgagggcccccggactggaggcttgagagctccaacgggaagatggcttcacggaggtcagaagagaaggaggccggcgagatctgaacccgtctcccgggtgctgtaaatagtctgataaacgttcacacagtctaaaattaccctttatatttgctgaatacaactcatcttttgtagtttaaaatttctattgttttggagctagctgtgagtttctagaagtgtacagagttgctcctgtgttcccgggtcatgttgagtaggaataaataaatctgatgctgcctcctgaggctgcggggggtttctgctg

SEQ ID NO: 16499 - DNA, 1335 bp, Homo sapiens
  source 1..1335: mol_type = unassigned DNA
gtggttcatggacctctgattagcttgggttttgcagtctcattgccacatgtatatgtggagccaatggccttttggtgctcagctgtttacgtctgactccttgacttctttggtacagtgatggagtcagatctcattaagtgtgattctccatgatataactagcctcaaaaaaatgtgtattccactccagttgtaaatatctttagatcagcttttcattgcatttgatggggagaacacagaaatgatagtctgcaaatcatccaggtgaattgttatactagttattttttggtggttaatgtgataatattgtcttatttaaaaccacaaatgaatttcaggagacgaaaccagacagagggtcaagtttacagatgaccgtgtctgcaagagtcaccttctggactgctgcccccatgacatcctggctgggacgcgcatggatttaggagaatgtaccaaaatccacgacttggccctccgagcagattatgagattgcaagtaaagaaagagacctgttttttgaattagatgcaatggatcacttggagtcctttattgctgaatgtgatcggagaactgagctcgccaagaagcggctggcagaaacacaggaggaaatcagtgcggaagtttctgcaaaggcagaaaaagtacatgagttaaatgaagaaataggaaaactccttgctaaagccgaacagctaggggctgaaggtaatgtggatgaatcccagaagattcttatggaagtggaaaaagttcgtgcgaagaaaaaagaagctgaggaagaatacagaaattccatgcctgcatccagttttcagcagcaaaagctgcgtgtctgcgaggtctgttcagcctaccttggtctccatgacaatgaccgtcgcctggcagaccacttcggtggcaagttacacttggggttcattcagatccgagagaagcttgatcagttgaggaaaactgtcgctgaaaagcaggagaagagaaatcaggatcgcttgaggaggagagaggagagggaacgggaggagcgtctgagcaggaggtcgggatcaagaaccagagatcgcaggaggtcacgctcccgggatcggcgtcggaggcggtcaagatctacctcccgagagcgacggaaattgtcccggtcccggtcccgagatagacatcggcgccaccgcagccgttcccggagccacagccggggacatcgtcgggcttcccgggaccgaagtgcgaaatacaagtaactactctgactccttcggtagctgcaaccaggagtgagcccttctctgtgttcccagggtctgctgag

SEQ ID NO: 16500 - DNA, 1504 bp, Homo sapiens
  source 1..1504: mol_type = unassigned DNA
tcccccgcggcgggaaagagccgagtgggctcgaggccgacgcgaccatcgtttgtcgacgccgctgccaccgcctgcctgagagaagtcgtcgcggccgaccccgtcgcctccgccggctaccatgtccgcccaggcgcagatgcgggccctgctggaccagctcatgggcacggctcgggacggagacgaaaccagacagagggtcaagtttacagatgaccgtgtctgcaagagtcaccttctggactgctgcccccatgacatcctggctgggacgcgcatggatttaggagaatgtaccaaaatccacgacttggccctccgagcagattatgagattgcaagtaaagaaagagacctgttttttgaattagatgcaatggatcacttggagtcctttattgctgaatgtgatcggagaactgagctcgccaagaagcggctggcagaaacacaggaggaaatcagtgcggaagtttctgcaaaggcagaaaaagtacatgagttaaatgaagaaataggaaaactccttgctaaagccgaacagctaggggctgaaggtaatgtggatgaatcccagaagattcttatggaagtggaaaaagttcgtgcgaagaaaaaagaagctgaggaagaatacagaaattccatgcctgcatccagttttcagcagcaaaagctgcgtgtctgcgaggtctgttcagcctaccttggtctccatgacaatgaccgtcgcctggcagaccacttcggtggcaagttacacttggggttcattcagatccgagagaagcttgatcagttgaggaaaactgtcgctgaaaagcaggagaagagaaatcaggatcgcttgaggaggagagaggagagggaacgggaggagcgtctgagcaggaggtcgggatcaagaaccagagatcgcaggaggtcacgctcccgggatcggcgtcggaggcggtcaagatctacctcccgagagcgacggaaattgtcccggtcccggtcccgagatagacatcggcgccaccgcagccgttcccggagccacagccggggacatcgtcgggcttcccgggaccgaagtgcgaaatacaagtaactactctgactccttcggtagctgcaaccaggagttctccagagagcgggcatccagagaggagtcctgggagagcgggcggagcgagcgagggcccccggactggaggcttgagagctccaacgggaagatggcttcacggaggtcagaagagaaggaggccggcgagatctgaacccgtctcccgggtgctgtaaatagtctgataaacgttcacacagtctaaaattaccctttatatttgctgaatacaactcatcttttgtagtttaaaatttctattgttttggagctagctgtgagtttctagaagtgtacagagttgctcctgtgttcccgggtcatgttgagtaggaataaataaatctgatgctgcctcctgaggctgcggggggtttctgc

SEQ ID NO: 16501 - DNA, 498 bp, Homo sapiens
  source 1..498: mol_type = unassigned DNA
gccagcgcttgacagtcgttaggtaggttgtactgtgtagggaggagctcaagatcatgatggttgtcacaggagaaagcggttgcatctttgcaaaactatatacctgctgtggtttgtgttttcttttctgctgagtaatgaagttgtaagttcacactggcacattctcagggctgtgcagattatttgcactttatttcataggtgaataagtgctttttagctttctttgttcagtgtatctttgcctgcctacatcaatctgcaagggagttgcagaaagcctcatgttcatcgagccgagacgaaaccagacagagggtcaagtttacagatgaccgtgtctgcaagagtcaccttctggactgctgcccccatgacatcctggctgggacgcgcatggatttaggagaatgtaccaaaatccacgacttggccctccgagcagattatgagattgcaagtaaagaaagagacctgttttttgaattagat

SEQ ID NO: 16502 - DNA, 695 bp, Homo sapiens
  source 1..695: mol_type = unassigned DNA
gcgaccatcgtttgtcgacgccgctgccaccgcctgcctgagagaagtcgtcgcggccgaccccgtcgcctccgccggctaccatgtccgcccaggcgcagatgcgggccctgctggaccagctcatgggcacggctcgggacggcaatggatcacttggagtcctttattgctgaatgtgatcggagaactgagctcgccaagaagcggctggcagaaacacaggaggaaatcagtgcggaagtttctgcaaaggcagaaaaagtacatgagttaaatgaagaaataggaaaactccttgctaaagccgaacagctaggggctgaaggtaatgtggatgaatcccagaagattcttatggaagtggaaaaagttcgtgcgaagaaaaaagaagctgaggaagaatacagaaattccatgcctgcatccagttttcagcagcaaaagctgcgtgtctgcgaggtctgttcagcctaccttggtctccatgacaatgaccgtcgcctggcagaccacttcggtggcaagttacacttggggttcattcagatccgagagaagcttgatcagttgaggaaaactgtcgctgaaaagcaggagaagagaaatcaggatcgcttgaggaggagagaggagagggaacgggaggagcgtctgagcaggaggtcgggatcaagaaccagagatcgcaggag

SEQ ID NO: 16503 - DNA, 423 bp, Homo sapiens
  source 1..423: mol_type = unassigned DNA
tcgcaggaggtcacgctcccgggatcggcgtcggaggcggtcaagatctacctcccgagagcgacggaaattgtcccggtcccggtcccgagatagacatcggcgccaccgcagccgttcccggagccacagccggggacatcgtcgggcttcccgggaccgaagtgcgaaatacaagtaactactctgactccttcggttctccagagagcgggcatccagagaggagtcctgggagagcgggcggagcgagcgagggcccccggactggaggcttgagagctccaacgggaagatggcttcacggaggtcagaagagaaggaggccggcgagatctgaacccgtctcccgggtgctgtaaatagtctgataaacgttcacacagtctaaaattaccctttatatttgctgaatacaactca

SEQ ID NO: 16504 - DNA, 833 bp, Homo sapiens
  source 1..833: mol_type = unassigned DNA
tttgcagtctcattgccacatgtatatgtggagccaatggccttttggtgctcagctgtttacgtctgactccttgacttctttggtacagtgatggagtcagatctcattaagtgtgattctccatgatataactagcctcaaaaaaatgtgtattccactccagttgtaaatatctttagatcagcttttcattgcatttgatggggagaacacagaaatgatagtctgcaaatcatccaggtgaattgttatactagttattttttggtggttaatgtgataatattgtcttatttaaaaccacaaatgaatttcaggagacgaaaccagacagagggtcaagtttacagatgaccgtgtctgcaagagtcaccttctggactgctgcccccatgacatcctggctgggacgcgcatggatttaggagaatgtaccaaaatccacgacttggccctccgagcagattatgagattgcaagtaaagaaagagacctgttttttgaattagatgtgaaaggggggaccctaccctcagaacatgagggaataatatttacgtggctcacaaagaccagcaatggatcacttggagtcctttattgctgaatgtgatcggagaactgagctcgccaagaagcggctggcagaaacacaggaggaaatcagtgcggaagtttctgcaaaggcagaaaaagtacatgagttaaatgaagaaataggaaaactccttgctaaagccgaacagctaggggctgaaggtaatgtggatgaatcccagaagattcttatggaagtggaaaaagttcgtgcgaagaaaaaagaagctgag

SEQ ID NO: 16505 - DNA, 2288 bp, Homo sapiens
  source 1..2288: mol_type = unassigned DNA
atgcctgcctacctcaatctgcaagggagtgtcagaaaggccccgcattcgccaagccgagatacaactcgtcaacgaatcaaattcagtgatgacagagtatgcaagagtcaccttctcaactgttgtcctcatgatgtcctttctggaactagaatggatcttggagaatgtctgaaagtccatgacctggctttaagagcggattatgaaattgcatccaaagaacaagattttttctttgaacttgatgccatggatcatctgcagtcattcattgcagattgtgatcgtagaacagaagtggccaagaaaagattagcagaaactcaagaagagattagtgctgaagtagcagcaaaggcagaacgtgttcatgagttaaatgaagaaattggtaaattgttagccaaggtggaacaactaggagctgaagggaatgtggaggaatcccagaaagtaatggatgaagtagagaaagcacgggcaaagaaaagagaagcagaggaagtttatcggaattctatgccagcttccagttttcagcagcagaaacttcgagtctgtgaagtctgctctgcctatttaggacttcatgataatgacagacgactggctgatcattttgggggtaaactgcacctgggatttattgaaataagagagaagcttgaagaattaaagagagtcgtagctgagaagcaggagaaaagaaaccaggaacggctgaaacgaagagaagagagagagagagaagaaagggagaagctgaggaggtcccgatcacacagcaagaatccaaaaagatccaggtccagagagcatcgcagacatcgatctcgctccatgtcacgtgaacgcaagaggagaactcgatccaaatctcgggagaaacgccatcgccacaggtcccgctccagcagccgtagccgcagccgtagccaccagagaagtcggcacagttctagagataggagcagagaacgatccaagaggagatcctcaaaagaaagattcagagaccaagacttagcatcatgtgacagagacaggagttcaagagacagatcacctcgtgacagagatcggaaagataagaagcggtcctatgagagtgctaatggcagatcagaagacaggaggagctctgaagagcgcgaagcaggggagatctaactagctgtgtacatttcttcagtccttaagcttcctacggagttacgtactattgtttagttcacagctgttcagggtgacagtgagcagatccagacaccagatccagctaggctagatgtacagtatctaacttgatctgaactgaacctgttttccttgatgatgcctaaaactacatccatagtttctggtgaacctgtaatacagttctgaaagtacagttttatataataagatgctgatctctttattctttcaagtaagagtgctagtgaacaaattgtgttacttgccttgggattttttgaacgtttgtaaaatgctgtcttcctagtccaaacagctgcagctttgggcatttttctttttaattattcttcctctgactttgtatcccttaatacctacactctccaattgtaagagaaagggggcagggaagcaatatagcttccattctaaggctgtattcccgttatgaattactagctgattacagttcagagcattgatcctggaatgtgtgctggagaaatttaaaatactggggttttttgtttaatggtgcctatttagagttggaagttgaacagctgttgcattacatacttttgcttttttattgaaattttgaaatcaaacgtcttgatttttctgttctgttgaattgctatgttcaggatgttctagggggtgggggcagggactcttttcgtaataagcacttgttttattttgtgtgtgtggagtataaaggctacacccttattgtaaaaaaataataataataaaatgaaagaaacaatcaccaccaccattattaaactgtaacttgtctagtaaattgtcactagaactatttgctgtgggcatttcctctattctgttacgtcattaacagtgccttactgtgcaaggcaccaaaggacataaatacgtacttgcaaagattccagatgagctgttcatgtgggccccttgctgactatattccagccacttcagggttgtttgtaatgaccgttatagagaagggctcgacctgcagaagaaactggggtgtttttattctcattcaacaaacccaaataaaaacagtatatgtaacc

SEQ ID NO: 16506 - DNA, 2645 bp, Homo sapiens
  source 1..2645: mol_type = unassigned DNA
gacggtggcggcgagcggcgtcagagcttgagggggggttgacggcttctggcgggtggcggtgttgaaggcgagagcttgcttggcccgtgtcgcttctgtcccaagaaccggacggagagtgagggcacgagggtcgctgtcgggggctgtcgtcttccacgtacacgtcgtcgtgaggagcgcagtccggactcttcccgcaacccctccggctccctttccgcacgcctcgaggcggcggcggccaccgagacagcagcgcaccttcccccatcccttccccttatcccccagcccaaaagggcccggtctgcgccccacccccgcccgtccgcccgctacgccgccgccatgtcggcgcaggcccagatgcgcgcgatgctggaccagttgatgggcacctcccgggacggagatacaactcgtcaacgaatcaaattcagtgatgacagagtatgcaagagtcaccttctcaactgttgtcctcatgatgtcctttctggaactagaatggatcttggagaatgtctgaaagtccatgacctggctttaagagcggattatgaaattgcatccaaagaacaagattttttctttgaacttgatgccatggatcatctgcagtcattcattgcagattgtgatcgtagaacagaagtggccaagaaaagattagcagaaactcaagaagagattagtgctgaagtagcagcaaaggcagaacgtgttcatgagttaaatgaagaaattggtaaattgttagccaaggtggaacaactaggagctgaagggaatgtggaggaatcccagaaagtaatggatgaagtagagaaagcacgggcaaagaaaagagaagcagaggaagtttatcggaattctatgccagcttccagttttcagcagcagaaacttcgagtctgtgaagtctgctctgcctatttaggacttcatgataatgacagacgactggctgatcattttgggggtaaactgcacctgggatttattgaaataagagagaagcttgaagaattaaagagagtcgtagctgagaagcaggagaaaagaaaccaggaacggctgaaacgaagagaagagagagagagagaagaaagggagaagctgaggaggtcccgatcacacagcaagaatccaaaaagatccaggtccagagagcatcgcagacatcgatctcgctccatgtcacgtgaacgcaagaggagaactcgatccaaatctcgggagaaacgccatcgccacaggtcccgctccagcagccgtagccgcagccgtagccaccagagaagtcggcacagttctagagataggagcagagaacgatccaagaggagatcctcaaaagaaagattcagagaccaagacttagcatcatgtgacagagacaggagttcaagagacagatcacctcgtgacagagatcggaaagataagaagcggtcctatgagagtgctaatggcagatcagaagacaggaggagctctgaagagcgcgaagcaggggagatctaactagctgtgtacatttcttcagtccttaagcttcctacggagttacgtactattgtttagttcacagctgttcagggtgacagtgagcagatccagacaccagatccagctaggctagatgtacagtatctaacttgatctgaactgaacctgttttccttgatgatgcctaaaactacatccatagtttctggtgaacctgtaatacagttctgaaagtacagttttatataataagatgctgatctctttattctttcaagtaagagtgctagtgaacaaattgtgttacttgccttgggattttttgaacgtttgtaaaatgctgtcttcctagtccaaacagctgcagctttgggcatttttctttttaattattcttcctctgactttgtatcccttaatacctacactctccaattgtaagagaaagggggcagggaagcaatatagcttccattctaaggctgtattcccgttatgaattactagctgattacagttcagagcattgatcctggaatgtgtgctggagaaatttaaaatactggggttttttgtttaatggtgcctatttagagttggaagttgaacagctgttgcattacatacttttgcttttttattgaaattttgaaatcaaacgtcttgatttttctgttctgttgaattgctatgttcaggatgttctagggggtgggggcagggactcttttcgtaataagcacttgttttattttgtgtgtgtggagtataaaggctacacccttattgtaaaaaaataataataataaaatgaaagaaacaatcaccaccaccattattaaactgtaacttgtctagtaaattgtcactagaactatttgctgtgggcatttcctctattctgttacgtcattaacagtgccttactgtgcaaggcaccaaaggacataaatacgtacttgcaaagattccagatgagctgttcatgtgggccccttgctgactatattccagccacttcagggttgtttgtaatgaccgttatagagaagggctcgacctgcagaagaaactggggtgtttttattctcattcaacaaacccaaataaaaacagtatatgtaacc

SEQ ID NO: 16507 - DNA, 1525 bp, Homo sapiens
  source 1..1525: mol_type = unassigned DNA
caatttgcccagcgcgctgtgctccgcgacggcgcatgcccgcttttgcgcaggcgcggggactacggcgcaggcgcggagactattgcgcaggcaagcgcgtacgcagaagcgtgcgcgcgcccgttcaacgtccggagcatcggtgcagtttcgaggccttcacagttgttgatcacatagcatggtcatccactcacagcttaaaaaaatacagggagcatcggagagaatgggagatacaactcgtcaacgaatcaaattcagtgatgacagagtatgcaagagtcaccttctcaactgttgtcctcatgatgtcctttctggaactagaatggatcttggagaatgtctgaaagtccatgacctggctttaagagcggattatgaaattgcatccaaagaacaagattttttctttgaacttgatgccatggatcatctgcagtcattcattgcagattgtgatcgtagaacagaagtggccaagaaaagattagcagaaactcaagaagagattagtgctgaagtagcagcaaaggcagaacgtgttcatgagttaaatgaagaaattggtaaattgttagccaaggtggaacaactaggagctgaagggaatgtggaggaatcccagaaagtaatggatgaagtagagaaagcacgggcaaagaaaagagaagcagaggaagtttatcggaattctatgccagcttccagttttcagcagcagaaacttcgagtctgtgaagtctgctctgcctatttaggacttcatgataatgacagacgactggctgatcattttgggggtaaactgcacctgggatttattgaaataagagagaagcttgaagaattaaagagagtcgtagctgagaagcaggagaaaagaaaccaggaacggctgaaacgaagagaagagagagagagagaagaaagggagaagctgaggaggtcccgatcacacagcaagaatccaaaaagatccaggtccagagagcatcgcagacatcgatctcgctccatgtcacgtgaacgcaagaggagaactcgatccaaatctcgggagaaacgccatcgccacaggtcccgctccagcagccgtagccgcagccgtagccaccagagaagtcggcacagttctagagataggagcagagaacgatccaagaggagatcctcaaaagaaagattcagagaccaagacttagcatcatgtgacagagacaggagttcaagagacagatcacctcgtgacagagatcggaaagataagaagcggtcctatgagagtgctaatggcagatcagaagacaggaggagctctgaagagcgcgaagcaggggagatctaactagctgtgtacatttcttcagtccttaagcttcctacggagttacgtactattgtttagttcacagctgttcagggtgacagtgagcagatccagacaccagatccagctaggctagatgtacagtatctaacttgatctgaactgaacctgttttccttgatgatgcct

SEQ ID NO: 16508 - DNA, 1661 bp, Homo sapiens
  source 1..1661: mol_type = unassigned DNA
accacgctcggagaaggacaggacaatggcggccttagggtccccgtcgcacacttttcgaggacttctgcgggagttgcgctacctgagcgcggccaccggccgaccctatcgcgacaccgcggcctatcggtaccttgtgaaggctttccgtgcacatcgggtcaccagtgaaaagttgtgcagagcccaacatgagcttcatttccaagctgccacctatctctgcctcctgcgtagcatccggaaacatgtggccctacatcaggaatttcatggcaagggagatacaactcgtcaacgaatcaaattcagtgatgacagagtatgcaagagtcaccttctcaactgttgtcctcatgatgtcctttctggaactagaatggatcttggagaatgtctgaaagtccatgacctggctttaagagcggattatgaaattgcatccaaagaacaagattttttctttgaacttgatgccatggatcatctgcagtcattcattgcagattgtgatcgtagaacagaagtggccaagaaaagattagcagaaactcaagaagagattagtgctgaagtagcagcaaaggcagaacgtgttcatgagttaaatgaagaaattggtaaattgttagccaaggtggaacaactaggagctgaagggaatgtggaggaatcccagaaagtaatggatgaagtagagaaagcacgggcaaagaaaagagaagcagaggaagtttatcggaattctatgccagcttccagttttcagcagcagaaacttcgagtctgtgaagtctgctctgcctatttaggacttcatgataatgacagacgactggctgatcattttgggggtaaactgcacctgggatttattgaaataagagagaagcttgaagaattaaagagagtcgtagctgagaagcaggagaaaagaaaccaggaacggctgaaacgaagagaagagagagagagagaagaaagggagaagctgaggaggtcccgatcacacagcaagaatccaaaaagatccaggtccagagagcatcgcagacatcgatctcgctccatgtcacgtgaacgcaagaggagaactcgatccaaatctcgggagaaacgccatcgccacaggtcccgctccagcagccgtagccgcagccgtagccaccagagaagtcggcacagttctagagataggagcagagaacgatccaagaggagatcctcaaaagaaagattcagagaccaagacttagcatcatgtgacagagacaggagttcaagagacagatcacctcgtgacagagatcggaaagataagaagcggtcctatgagagtgctaatggcagatcagaagacaggaggagctctgaagagcgcgaagcaggggagatctaactagctgtgtacatttcttcagtccttaagcttcctacggagttacgtactattgtttagttcacagctgttcagggtgacagtgagcagatccagacaccagatccagctaggctagatgtacagtatctaacttgatctgaactgaacctgttttccttgatgatgcctaaaactacatccatagtttctggtgaacctgtaatacagttctgaaagtacagttttatataataagatgctgatctctttattcttt

SEQ ID NO: 16509 - DNA, 2565 bp, Homo sapiens
  source 1..2565: mol_type = unassigned DNA
gaggagcgtgcgcgctcccgtcgtggcgacggtggcggcgagcggcgtcagagcttgagggggggttgacggcttctggcgggtggcggtgttgaaggcgagagcttgcttggcccgtgtcgcttctgtcccaagaaccggacggagagtgagggcacgagggtcgctgtcgggggctgtcgtcttccacgtacacgtcgtcgtgaggagcgcagtccggactcttcccgcaacccctccggctccctttccgtccgcccgctacgccgccgccatgtcggcgcaggcccagatgcgcgcgatgctggaccagttgatgggcacctcccgggacggagatacaactcgtcaacgaatcaaattcagtgatgacagagtatgcaagagtcaccttctcaactgttgtcctcatgatgtcctttctggaactagaatggatcttggagaatgtctgaaagtccatgacctggctttaagagcggattatgaaattgcatccaaagaacaagattttttctttgaacttgatgccatggatcatctgcagtcattcattgcagattgtgatcgtagaacagaagtggccaagaaaagattagcagaaactcaagaagagattagtgctgaagtagcagcaaaggcagaacgtgttcatgagttaaatgaagaaattggtaaattgttagccaaggtggaacaactaggagctgaagggaatgtggaggaatcccagaaagtaatggatgaagtagagaaagcacgggcaaagaaaagagaagcagaggaagtttatcggaattctatgccagcttccagttttcagcagcagaaacttcgagtctgtgaagtctgctctgcctatttaggacttcatgataatgacagacgactggctgatcattttgggggtaaactgcacctgggatttattgaaataagagagaagcttgaagaattaaagagagtcgtagctgagaagcaggagaaaagaaaccaggaacggctgaaacgaagagaagagagagagagagaagaaagggagaagctgaggaggtcccgatcacacagcaagaatccaaaaagatccaggtccagagagcatcgcagacatcgatctcgctccatgtcacgtgaacgcaagaggagaactcgatccaaatctcgggagaaacgccatcgccacaggtcccgctccagcagccgtagccgcagccgtagccaccagagaagtcggcacagttctagagataggagcagagaacgatccaagaggagatcctcaaaagaaagattcagagaccaagacttagcatcatgtgacagagacaggagttcaagagacagatcacctcgtgacagagatcggaaagataagaagcggtcctatgagagtgctaatggcagatcagaagacaggaggagctctgaagagcgcgaagcaggggagatctaactagctgtgtacatttcttcagtccttaagcttcctacggagttacgtactattgtttagttcacagctgttcagggtgacagtgagcagatccagacaccagatccagctaggctagatgtacagtatctaacttgatctgaactgaacctgttttccttgatgatgcctaaaactacatccatagtttctggtgaacctgtaatacagttctgaaagtacagttttatataataagatgctgatctctttattctttcaagtaagagtgctagtgaacaaattgtgttacttgccttgggattttttgaacgtttgtaaaatgctgtcttcctagtccaaacagctgcagctttgggcatttttctttttaattattcttcctctgactttgtatcccttaatacctacactctccaattgtaagagaaagggggcagggaagcaatatagcttccattctaaggctgtattcccgttatgaattactagctgattacagttcagagcattgatcctggaatgtgtgctggagaaatttaaaatactggggttttttgtttaatggtgcctatttagagttggaagttgaacagctgttgcattacatacttttgcttttttattgaaattttgaaatcaaacgtcttgatttttctgttctgttgaattgctatgttcaggatgttctagggggtgggggcagggactcttttcgtaataagcacttgttttattttgtgtgtgtggagtataaaggctacacccttattgtaaaaaaataataataataaaatgaaagaaacaatcaccaccaccattattaaactgtaacttgtctagtaaattgtcactagaactatttgctgtgggcatttcctctattctgttacgtcattaacagtgccttactgtgcaaggcaccaaaggacataaatacgtacttgcaaagattccagatgagctgttcatgtgggccccttgctgactatattccagccacttcagggttgtttgtaatgaccgttatagagaagggctcgacctgcagaagaaactggggtgtttttattctcattcaacaaacccaaataaaaacagtatatgtaacc

SEQ ID NO: 16510 - DNA, 2411 bp, Homo sapiens
  source 1..2411: mol_type = unassigned DNA
gtggcggcgagcggcgtcagagcttgagggggggttgacggcttctggcgggtggcggtgttgaaggcgagagcttgcttggcccgtgtcgcttctgtcccaagaaccggacggagagtgagggcacgagggtcgctgtcgggggctgtcgtcttccacgtacacgtcgtcgtgaggagcgcagtccggactcttcccgcaacccctccggctccctttccgcacgcctcgaggcggcggcggccaccgagacagcagcgcaccttcccccatcccttccccttatcccccagcccaaaagggcccggtctgcgccccacccccgcccgtccgcccgctacgccgccgccatgtcggcgcaggcccagatgcgcgcgatgctggaccagttgatgggcacctcccgggacggttcaatgtatctatgcctgcctacctcaatctgcaagggagtgtcagaaaggccccgcattcgccaagccgagatacaactcgtcaacgaatcaaattcagtgatgacagagtatgcaagagtcaccttctcaactgttgtcctcatgatgtcctttctggaactagaatggatcttggagaatgtctgaaagtccatgacctggctttaagagcggattatgaaattgcatccaaagaacaagattttttctttgaacttgatgccatggatcatctgcagtcattcattgcagattgtgatcgtagaacagaagtggccaagaaaagattagcagaaactcaagaagagattagtgctgaagtagcagcaaaggcagaacgtgttcatgagttaaatgaagaaattggtaaattgttagccaaggtggaacaactaggagctgaagggaatgtggaggaatcccagaaagtaatggatgaagtagagaaagcacgggcaaagaaaagagaagcagaggaagtttatcggaattctatgccagcttccagttttcagcagcagaaacttcgagtctgtgaagtctgctctgcctatttaggacttcatgataatgacagacgactggctgatcattttgggggtaaactgcacctgggatttattgaaataagagagaagcttgaagaattaaagagagtcgtagctgagaagcaggagaaaagaaaccaggaacggctgaaacgaagagaagagagagagagagaagaaagggagaagctgaggaggtcccgatcacacagcaagaatccaaaaagatccaggtccagagagcatcgcagacatcgatctcgctccatgtcacgtgaacgcaagaggagaactcgatccaaatctcgggagaaacgccatcgccacaggtcccgctccagcagccgtagccgcagccgtagccaccagagaagtcggcacagttctagagataggagcagagaacgatccaagaggagatcctcaaaagaaagattcagagaccaagacttagcatcatgtgacagagacaggagttcaagagacagatcacctcgtgacagagatcggaaagataagaagcggtcctatgagagtgctaatggcagatcagaagacaggaggagctctgaagagcgcgaagcaggggagatctaactagctgtgtacatttcttcagtccttaagcttcctacggagttacgtactattgtttagttcacagctgttcagggtgacagtgagcagatccagacaccagatccagctaggctagatgtacagtatctaacttgatctgaactgaacctgttttccttgatgatgcctaaaactacatccatagtttctggtgaacctgtaatacagttctgaaagtacagttttatataataagatgctgatctctttattctttcaagtaagagtgctagtgaacaaattgtgttacttgccttgggattttttgaacgtttgtaaaatgctgtcttcctagtccaaacagctgcagctttgggcatttttctttttaattattcttcctctgactttgtatcccttaatacctacactctccaattgtaagagaaagggggcagggaagcaatatagcttccattctaaggctgtattcccgttatgaattactagctgattacagttcagagcattgatcctggaatgtgtgctggagaaatttaaaatactggggttttttgtttaatggtgcctatttagagttggaagttgaacagctgttgcattacatacttttgcttttttattgaaattttgaaatcaaacgtcttgatttttctgttctgttgaattgctatgttcaggatgttctagggggtgggggcagggactcttttcgtaataagcacttgttttattttgtgtgtgtggagtataaaggctacacccttattgtaaaaaaataataataataaaatgaaagaaacaatca

SEQ ID NO: 16511 - DNA, 1972 bp, Homo sapiens
  source 1..1972: mol_type = unassigned DNA
gtcttgtcggctcctgtgtgtaggagggatttcggcctgagagcgggccgaggagattggcgacggtgtcgcccgtgttttcgttggcgggtgcctgggctggtgggaacagccgcccgaaggaagcaccatgatttcggccgcgcagttgttggatgagttaatgggccgggaccgaaacctagccccggacgagaagcgcagcaacgtgcggtgggaccacgagagcgtttgtaaatattatctctgtggtttttgtcctgcggaattgttcacaaatacacgttctgatcttggtccgtgtgaaaaaattcatgatgaaaatctacgaaaacagtatgagaagagctctcgtttcatgaaagttggctatgagagagattttttgcgatacttacagagcttacttgcagaagtagaacgtaggatcagacgaggccatgctcgtttggcattatctcaaaaccagcagtcttctggggccgctggcccaacaggcaaaaatgaagaaaaaattcaggttctaacagacaaaattgatgtacttctgcaacagattgaagaattagggtctgaaggaaaagtagaagaagcccaggggatgatgaaattagttgagcaattaaaagaagagagagaactgctaaggtccacaacgtcgacaattgaaagctttgctgcacaagaaaaacaaatggaagtttgtgaagtatgtggagcctttttaatagtaggagatgcccagtcccgggtagatgaccatttgatgggaaaacaacacatgggctatgccaaaattaaagctactgtagaagaattaaaagaaaagttaaggaaaagaaccgaagaacctgatcgtgatgagcgtctaaaaaaggagaagcaagaaagagaagaaagagaaaaagaacgggagagagaaagggaagaaagagaaaggaaaagacgaagggaagaggaagaaagagaaaaagaaagggctcgtgacagagaaagaagaaagagaagtcgttcacgaagtagacactcaagccgaacatcagacagaagatgcagcaggtctcgggaccacaaaaggtcacgaagtagagaaagaaggcggagcagaagtagagatcgacgaagaagcagaagccatgatcgatcagaaagaaaacacagatctcgaagtcgggatcgaagaagatcaaaaagccgggatcgaaagtcatataagcacaggagcaaaagtcgggacagagaacaagatagaaaatccaaggagaaagaaaagaggggatctgatgataaaaaaagtagtgtgaagtccggtagtcgagaaaagcagagtgaagacacaaacactgaatcgaaggaaagtgatactaagaatgaggtcaatgggaccagtgaagacattaaatctgaaggtgacactcagtccaattaaaactgatctgataagacctcagatcagacagaggactactgttcgaagatttttggaagaatactgagaacggcataaagtgaagatcgacatttaaaaaatgaggtgaaagaaagctatagtggcatagaaaaagtataaagctcagttagtttttttattattattattattaaaagttaattcaggactgatgtgacctaccagatttcagaacatgtgttaatagtatatatgccactgaaaacttaggtcctgtatcatacttttttctttaagactttttaagaaatattacttaaacatgtggcttgctcagtgtttaattgcaagttttcaatcttggactttgaaaacaggattaaacgttagtattcgtgtgaatcagactaagtgggatttcatttttacaactctgctctacttagcctttggatttagaagtaaaaataaagtatctctgactttctgttacaaagttgattgtctctgtcattgaaaagttttagtattaatctttttctaataaagttattgactctg

SEQ ID NO: 16512 - DNA, 370 bp, Homo sapiens
  source 1..370: mol_type = unassigned DNA
gtcttgtcggctcctgtgtgtaggagggatttcggcctgagagcgggccgaggagattggcgacggtgtcgcccgtgttttcgttggcgggtgcctgggctggtgggaacagccgcccgaaggaagcaccatgatttcggccgcgcagttgttggatgagttaatgggccgggaccgaaacctagccccggacgagaagcgcagcaacgtgcggtgggaccacgagagcgtttgtaaatattatctctgtggtttttgtcctgcggaattgttcacaaatacacgttctgatcttgatgtatttggaagaggagataacattagagatgtcagcaaatttttggaagatgacaagtggatggaggagtag

SEQ ID NO: 16513 - DNA, 7040 bp, Homo sapiens
  source 1..7040: mol_type = unassigned DNA
ctgggcgtgtcccacgggcgcacggcatgctgggaaggcgtccgcgcggcggccattttgtcttgtcggctcctgtgtgtaggagggatttcggcctgagagcgggccgaggagattggcgacggtgtcgcccgtgttttcgttggcgggtgcctgggctggtgggaacagccgcccgaaggaagcaccatgatttcggccgcgcagttgttggatgagttaatgggccgggaccgaaacctagccccggacgagaagcgcagcaacgtgcggtgggaccacgagagcgtttgtaaatattatctctgtggtttttgtcctgcggaattgttcacaaatacacgttctgatcttggtccgtgtgaaaaaattcatgatgaaaatctacgaaaacagtatgagaagagctctcgtttcatgaaagttggctatgagagagattttttgcgatacttacagagcttacttgcagaagtagaacgtaggatcagacgaggccatgctcgtttggcattatctcaaaaccagcagtcttctggggccgctggcccaacaggcaaaaatgaagaaaaaattcaggttctaacagacaaaattgatgtacttctgcaacagattgaagaattagggtctgaaggaaaagtagaagaagcccaggggatgatgaaattagttgagcaattaaaagaagagagagaactgctaaggtccacaacgtcgacaattgaaagctttgctgcacaagaaaaacaaatggaagtttgtgaagtatgtggagcctttttaatagtaggagatgcccagtcccgggtagatgaccatttgatgggaaaacaacacatgggctatgccaaaattaaagctactgtagaagaattaaaagaaaagttaaggaaaagaaccgaagaacctgatcgtgatgagcgtctaaaaaaggagaagcaagaaagagaagaaagagaaaaagaacgggagagagaaagggaagaaagagaaaggaaaagacgaagggaagaggaagaaagagaaaaagaaagggctcgtgacagagaaagaagaaagagaagtcgttcacgaagtagacactcaagccgaacatcagacagaagatgcagcaggtctcgggaccacaaaaggtcacgaagtagagaaagaaggcggagcagaagtagagatcgacgaagaagcagaagccatgatcgatcagaaagaaaacacagatctcgaagtcgggatcgaagaagatcaaaaagccgggatcgaaagtcatataagcacaggagcaaaagtcgggacagagaacaagatagaaaatccaaggagaaagaaaagaggggatctgatgataaaaaaagtagtgtgaagtccggtagtcgagaaaagcagagtgaagacacaaacactgaatcgaaggaaagtgatactaagaatgaggtcaatgggaccagtgaagacattaaatctgaaggtgacactcagtccaattaaaactgatctgataagacctcagatcagacagaggtaagtgtattgtttctcactttgattagggctttttgttactgtttgacagtgcagcgtaagtatgcacagatgaagatggaactaagccgagtaagaagacatacaaaagcctcttctgaaggaaaagacagtgtagtcctgcaaaacattttgaggtacattgttttgtctcagctattttgtagcagactcgtgcccccattagtgtgcctctttggaaattatcgcccacatttgtaatatagtcgccattgaaaagttaattatcctttttttagggattttgatgtcatttcttttttttttttaataaaaaggttgaactgtttttttttttctttttggtattaagtccatcttgtgttggtacattggcagagacatatgctttaaaaacttaaatatttcggaggcacatgttggactactttgttttaattaaactgctagtatttctttgtcaaggatgtttctagttttttgctttattgccttgcattctaatgcagtttgttctgtaactcgagagccagtagcattggattgatggaagtgtagggtttatgaattattgcagctgactaccatacctcacacagcgttggtgttgtgagcggcccatgaaaagccaaattaaaaatcaaggattcagtcaaactaagcaggtactcatgccaggtactcctttctctacccacatccatgtttgaatgctattgcctgtgatctttacgcttaactgttgtgtatcttttttgttctttacaagaagtgcagaggggttttttgtgtattgcgtgaaaacttataaaacaaatgttaacagaatggaattttttttcaactgtatgtagggctgcagtggtggccagaattagatatctttaaagaattttaaatacaataaacacttcatattattcgccttgttacactcaatgcaattctcaagtctataagaggtatgtgcttaatatttcctactgtgtaggagaatttgcagtcagccataggtatgtaggaatagtcactcactggctgatacatttaaagcagcagtgtgaatagcaaggacagacaccttcaatttgtgaaatcaaagaactgatgcactatatagaacgaatttgggtttttaaagaaatattaaaagttaggtactgtaagtgttcttaaaacctgtaaacttcattctgtgggctagtggtgtgggacaaaatattcctaatgaaaggaagtaccaattagttgatttgttggtggcattccccttttgggaaagcaatgtaaggttatgtctgtgtatgtcattcacacttaggcaagcatacacaggcacatggctttaagaaccacactgatgccttgataattaaaaagaatacaagcattccatgtacacatgttaattagcagttagtgactgggccaacactttctcataaaaattggccttttacatgttgtctaattatcatttttccccaaattttgcgttgtaggactactgttcgaagatttttggaagaatactgagaacggcataaagtgaagatcgacatttaaaaaatgaggtgaaagaaagctatagtggcatagaaaaagtataaagctcagttagtttttttattattattattattaaaagttaattcaggactgatgtgacctaccagatttcagaacatgtgttaatagtatatatgccactgaaaacttaggtcctgtatcatacttttttctttaagactttttaagaaatattacttaaacatgtggcttgctcagtgtttaattgcaagttttcaatcttggactttgaaaacaggattaaacgttagtattcgtgtgaatcagactaagtgggatttcatttttacaactctgctctacttagcctttggatttagaagtaaaaataaagtatctctgactttctgttacaaagttgattgtctctgtcattgaaaagttttagtattaatctttttctaataaagttattgactctgaactagtcccctgttttaaatacaagagttacactattactagaggtgttggtgtacagttttatctgatttgttctgtttaagactaatttttatagactttctaatgttttaaataatggtgcttcaattttaggtggttatgaataaatttgaattttgcttttaatagcaaagatgtgcagtgaactagaatatatttttacatccctgagagattcatttagtagaaaattccaagtatcctgacaagcactctttagctggctagctatgggatgatgtagaaaagcattcaagagctagtttttgttaagtcctgtatcaagattaacccagctgtgtcagtttataaatgtatttgtgtatagggtgtgtagtatatatggcaagggttttttccccccacttaagtgattatttttgtgtcacatctaggaaaaccggcagcatgtttctatctatagccagcttcttcgactgtataaaagtattctctccagctacgtatatacacacatacatatatatcatagcaattccttgtggtttataacttgcaaatactgctatcagtttataggtaaagaaacagtgtgttaaatgacttatccagggagggtcctgtggcttcatgtttatggagttgctaggtctctgcctcatggtccagtgcctgttaagccactgtgttcattctaataggcataatgaattgttaaagaatttactaaaatctcttccaccaaactttgaaaaataatgaagccgcccccactttagaggctctgtatgaaaaaatgctgtggagacagagccctcctggctccctagctgatcctggagatgcagcaatagatgaatgggttatctctgaatttgtaagagataattcacatgaggattaagataaaatgggaagtaaaatctaacaaacacaaagatagctcccaggcactgctttgtgtagtttgacagcattgtggttgtagcagcaaaggacttaaagtgatagtttttaaaccatattctgtccctaagtaataaaaaatctaggaagttactaaaataccagatttgttctgctctgcctcatctagaatcaacgtctaactaacttaaatgaagtataataaatgagttcatatgaaaaggcttcctctatggacacttagatatattgtaactattgaagttacctgggatgtgggggtggtgggaggaggacctgcctccccaggacatctatgactaaggcctggctttagttatggagagagacgtagaagttgaattttacacccaaaattgatgtgactgaagaggaactgattgttgctaaccagctcacaagaatccagtattgagaccagttcactagaagaaacaaacatttctgccatgcagaccaaaaagttattagttggtgaatatgtattttctctttggaaggtctttaaggggagcaaaccagttttaatcaatcagattgcttggtaagtttggaatctgcaatcagttggtcttaaaaaaaaaaaaactttattttggaaatttaaagacatacacaaaagaggaacaatataattaacctctgttaactcatcaccaacaagactcatgaccacttttatacttcatgagtgattgtatttgtatccactgttttctattattttcgagcaagtctcagacacaccatttaatctgtaaataattcagcatgtatctctaaaagacaaagacctcttaaataacagttcattagtataaaacaaattgggtaaacttttgttggtcatcaaactatattagcactggtccaatagtttaattttcattgagcctttcaagaggaccgaccagtctgctgctcaagacatcctctcctctggaatgtagagataatacatatcatgctcctttttgttaaaacgtttttttttccccttcaaacacagtccattcatttttcagtttgggttgaaacatccttttcttgatcttgagcttataataacctagtcatattgctcagctcagatatttttactccctctccttaggcattctggttccttaaatatagttagtgtcacagaggataaataaccaaccttatttctaaggtctgagaacacttggaccacatattggttgagctcagccaccttctgattaaagttttcagacttgtaagaactgaaaatttttatggtggaagttctctgagccctcatccattctgtttttaaaaatgcattgcagatgggctatgtgaatatgtttttaaacatctgatatgtgcatgaaacaaaaaacacttgaagttattatgtatacaattctgtgggatgggacttcatgcaggattggttttcaagtttgatttcctgagggattttttagttgtttgtgaaagaaccccaggtctacttttgaaattttgtattataattgtaatgttgcccatggttaaaaaaaaaaagtgttcagtgatctatgtctcctactactcctatttctctgtttttcctctgcaggagcttgctgctgttaacagttattcttccaagttgttttctttgtggggagatgggaggtgggaggaaatataaacatatatgtatagatctttcaaaatatatgacggtatacccgtatgttctgagtcttgctgtttttacctggtaatatttagaaacatttattttgagataaaggagagcacttttaagttgaacctgtagttttaaaaagtacatttcaagtaagccaaagcagagaagtaaatgtatttttcattgttgtatcagaattttgaatttactattttaaaaattcaagagttttgtagctgatctatttcttcccctcagccatcccaaataggtcatttgtcaacagatttaagaatgtttagaaacaacaactttgggaaacgggaaacaatttggtataagtgggtgtgccataacctctctcgtagccattcattcccggatacataccctagagaaactcttacacatgcgtaccaggggatggatttaagcatttgtgtgtaataggaagaaaagaagaaaaaacccgggaagatcccaagtgtccaccaacagtgtgttggataaatactgtggtatattccaacagtggaattccacagaagtgaaactgaactgcagctgtgtatgtgaacatggacaaaactcaacaatagaaggatcaaaaaaagcaagtcacagaagaatacatcactatggttccatttcaatgaaagtcaaaaacaggctgtcaaatacatgataaaaggaaacgattaagacaaaatttaatgttagccgttttgatggagggagaggtgatcatgagggcacaggggtcttcagaagaactggtgagggtctgtttctgaagcctgtgggcatttccttttttaatctgtatgtttatgtgcttttgtatgtatgatatttcttaataaaatttaaaaagaagaatggg

SEQ ID NO: 16514 - DNA, 838 bp, Homo sapiens
  source 1..838: mol_type = unassigned DNA
gtcttgtcggctcctgtgtgtaggagggatttcggcctgagagcgggccgaggagattggcgacggtgtcgcccgtgttttcgttggcgggtgcctgggctggtgggaacagccgcccgaaggaagcaccatgatttcggccgcgcagttgttggatgagttaatgggccgggaccgaaacctagccccggacgagaagcgcagcaacgtgcggtgggaccacgagagcgtttgtaaatattatctctgtggtttttgtcctgcggaattgttcacaaatacacgttctgatcttggtccgtgtgaaaaaattcatgatgaaaatctacgaaaacagtatgagaagagctctcgtttcatgaaagttggctatgagagagattttttgcgatacttacagagcttacttgcagaagtagaacgtaggatcagacgaggccatgctcgtttggcattatctcaaaaccagcagtcttctggggccgctggcccaacaggcaaaaatgaagaaaaaattcaggttctaacagacaaaattgatgtacttctgcaacagattgaagaattagggtctgaaggaaaagtagaagaagcccaggggatgatgaaattagttgagcaattaaaagaagagagagaactgctaaggtccacaacgtcgacaattgaaagctttgctgcacaagaaaaacaaatggaagtttgtgaagtatgtggagcctttttaatagtaggagatgcccagtcccgggtagatgaccatttgatgggaaaacaacacatgggctatgccaaaattaaagctactgtagaagaaaaaaaaaaaaaaaaaaaaaaa

SEQ ID NO: 16515 - DNA, 1597 bp, Homo sapiens
  source 1..1597: mol_type = unassigned DNA
ggatttcggcctgagagcgggccgaggagattggcgacggtgtcgcccgtgttttcgttggcgggtgcctgggctggtgggaacagccgcccgaaggaagcaccatgatttcggccgcgcagttgttggatgagttaatgggccgggaccgaaacctagccccggacgagaagcgcagcaacgtgcggtgggaccacgagagcgtccgtgtgaaaaaattcatgatgaaaatctacgaaaacagtatgagaagagctctcgtttcatgaaagttggctatgagagagattttttgcgatacttacagagcttacttgcagaagtagaacgtaggatcagacgaggccatgctcgtttggcattatctcaaaaccagcagtcttctggggccgctggcccaacaggcaaaaatgaagaaaaaattcaggttctaacagacaaaattgatgtacttctgcaacagattgaagaattagggtctgaaggaaaagtagaagaagcccaggggatgatgaaattagttgagcaattaaaagaagagagagaactgctaaggtccacaacgtcgacaattgaaagctttgctgcacaagaaaaacaaatggaagtttgtgaagtatgtggagcctttttaatagtaggagatgcccagtcccgggtagatgaccatttgatgggaaaacaacacatgggctatgccaaaattaaagctactgtagaagaattaaaagaaaagttaaggaaaagaaccgaagaacctgatcgtgatgagcgtctaaaaaaggagaagcaagaaagagaagaaagagaaaaagaacgggagagagaaagggaagaaagagaaaggaaaagacgaagggaagaggaagaaagagaaaaagaaagggctcgtgacagagaaagaagaaagagaagtcgttcacgaagtagacactcaagccgaacatcagacagaagatgcagcaggtctcgggaccacaaaaggtcacgaagtagagaaagaaggcggagcagaagtagagatcgacgaagaagcagaagccatgatcgatcagaaagaaaacacagatctcgaagtcgggatcgaagaagatcaaaaagccgggatcgaaagtcatataagcacaggagcaaaagtcgggacagagaacaagatagaaaatccaaggagaaagaaaagaggggatctgatgataaaaaaagtagtgtgaagtccggtagtcgagaaaagcagagtgaagacacaaacactgaatcgaaggaaagtgatactaagaatgaggtcaatgggaccagtgaagacattaaatctgaagggctttttgttactgtttgacagtgcagcgtaagtatgcacagatgaagatggaactaagccgagtaagaagacatacaaaagcctcttctgaaggaaaagacagtgtagtcctgcaaaacattttgaggtacattgttttgtctcagctattttgtagcagactcgtgcccccattagtgtgcctctttggaaattatcgcccacatttgtaatatagtcgccattgaaaagttaattatcctttttttagggattttgatgtcatttcttttttttttt

SEQ ID NO: 16516 - DNA, 3008 bp, Homo sapiens
  source 1..3008: mol_type = unassigned DNA
gagcacattgcacttaattgttgccacagccacagatgtaaagaggcttgtaagaaaaatgttctcacagtgagcttccttatttgaagcaggactcaattcttggttaaaagctatggtatttgagctagttaaacacatatctctctcccattccatagggaatgagctgggctgtcctttctccccacgttcacctgcacttcgttagagagcagtgttcacatgccacaccacaagatccccacaatgacataactccattcagagactggcgtgactgggctgggtctccccaccccccttcagctcttgtatcactcagaatctggcagccagttccgtcctgacagagttcacagcatatattggtggattcttgtccatagtgcatctgctttaagaattaacgaaagcagtgtcaagacagtaaggattcaaaccatttgccaaaaatgagtctaagtgcatttactctcttcctggcattgattggtggtaccagtggccagtactatgattatgattttcccctatcaatttatgggcaatcatcaccaaactgtgcaccagaatgtaactgccctgaaagctacccaagtgccatgtactgtgatgagctgaaattgaaaagtgtaccaatggtgcctcctggaatcaagtatctttaccttaggaataaccagattgaccatattgatgaaaaggcctttgagaatgtaactgatctgcagtggctcattctagatcacaaccttctagaaaactccaagataaaagggagagttttctctaaattgaaacaactgaagaagctgcatataaaccacaacaacctgacagagtctgtgggcccacttcccaaatctctggaggatctgcagcttactcataacaagatcacaaagctgggctcttttgaaggattggtaaacctgaccttcatccatctccagcacaatcggctgaaagaggatgctgtttcagctgcttttaaaggtcttaaatcactcgaataccttgacttgagcttcaatcagatagccagactgccttctggtctccctgtctctcttctaactctctacttagacaacaataagatcagcaacatccctgatgagtatttcaagcgttttaatgcattgcagtatctgcgtttatctcacaacgaactggctgatagtggaatacctggaaattctttcaatgtgtcatccctggttgagctggatctgtcctataacaagcttaaaaacataccaactgtcaatgaaaaccttgaaaactattacctggaggtcaatcaacttgagaagtttgacataaagagcttctgcaagatcctggggccattatcctactccaagatcaagcatttgcgtttggatggcaatcgcatctcagaaaccagtcttccaccggatatgtatgaatgtctacgtgttgctaacgaagtcactcttaattaatatctgtatcctggaacaatattttatggttatgtttttctgtgtgtcagttttcatagtatccatattttattactgtttattacttccatgaattttaaaatctgagggaaatgttttgtaaacatttattttttttaaagaaaagatgaaaggcaggcctatttcatcacaagaacacacacatatacacgaatagacatcaaactcaatgctttatttgtaaatttagtgtttttttatttctactgtcaaatgatgtgcaaaaccttttactggttgcatggaaatcagccaagttttataatccttaaatcttaatgttcctcaaagcttggattaaatacatatggatgttactctcttgcaccaaattatcttgatacattcaaatttgtctggttaaaaaataggtggtagatattgaggccaagaatattgcaaaatacatgaagcttcatgcacttaaagaagtatttttagaataagaatttgcatacttacctagtgaaacttttctagaattatttttcactctaagtcatgtatgtttctctttgattatttgcatgttatgtttaataagctactagcaaaataaaacatagcaaatggcatcactgtgtttgacttcttgtgaaatttctgtactttgtatataaaatacataaaacaatagattagaaatcaaaagatatctctggcctgcaatattttactgatgtgaacataggattttccactaaataatttgtctacttctagcattcacttacaaagagttcttaaaaacacctataataggtacttagatttcacaacttacttagatatttgtcattattcccattcctggtgtttttactggttcatatacaatggtattctattagataagaagctgctatgtgatctcagcactcactccttggttgtcaagaaatggtggataactcacaggattaaaaatgaatgaatataaaattttctgaaatagatatttaaaaaatcattttagcttgaagccaatatgtctggatcataggttttgagttcataatccagtaataacagctttcagctttctatgagtatatacaattctatacaatgataaatactctgcatataatttataaaaataacttctgttttacctagttaacaataaaacctatgtgtggagccaaatgttatgcagacaaaggtctgctcatcccataccagtgtatatatagtcaaatatgtgtctagtacaaataaaatgtatctctaaggcataaaatgttttaacacaccacttttagtgaactctatcttatggtacagcggcctttcatcagaggatcatcattgagactgagttgactggcagatatgtgcgatggatattacattaggtacaatgtgtatttttgattttcatgagttttctacattaaggtaaattccttagagtgtgatagcagcctcagtttatttgttggtttaaacttgaaatctactttttctcgataaaactataatgtagatgaa

SEQ ID NO: 16517 - DNA, 2989 bp, Homo sapiens
  source 1..2989: mol_type = unassigned DNA
gcagaagcccagttcgccggccatgaagcagcggttctcggcgctgcagctgctgaagctgctgctgctgctgcagccgccgctgccacgagcgctgcgcgaggcgctctgccctgagccctgcaactgcgtgcccgacggcgccctgcgctgccccggccccacggccggtctcactcgactatcacttgcctacctccctgtcaaagtgatcccatctcaagctttcagaggacttaatgaggtcataaaaattgaaatctctcagattgattccctggaaaggatagaagctaatgcctttgacaacctcctcaatttgtctgaaatactgatccagaacaccaaaaatctgagatacattgagcccggagcatttataaatcttccccgattaaaatacttgagcatctgtaacacaggcatcagaaagtttccagatgttacgaaggtcttctcctctgaatcaaatttcattctggaaatttgtgataacttacacataaccaccataccaggaaatgcttttcaagggatgaataatgaatctgtaacactcaaactatatggaaatggatttgaagaagtacaaagtcatgcattcaatgggacgacactgacttcactggagctaaaggaaaacgtacatctggagaagatgcacaatggagccttccgtggggccacagggccgaaaaccttggatatttcttccaccaaattgcaggccctgccgagctatggcctagagtccattcagaggctaattgccacgtcatcctattctctaaaaaaattgccatcaagagaaacatttgtcaatctcctggaggccacgttgacttaccccagccactgctgtgcttttagaaacttgccaacaaaagaacagaatttttcacattccatttctgaaaacttttccaaacaatgtgaaagcacagtaaggaaagtgaataacaaaacactttattcttccatgcttgctgagagtgaactgagtggctgggactatgaatatggtttctgcttacccaagacaccccgatgtgctcctgaaccagatgcttttaatccctgtgaagatattatgggctatgacttccttagggtcctgatttggctgattaatattctagccatcatgggaaacatgactgttctttttgttctcctgacaagtcgttacaaacttacagtgcctcgttttctcatgtgcaatctctcctttgcagacttttgcatggggctctatctgctgctcatagcctcagttgattcccaaaccaagggccagtactataaccatgccatagactggcagacagggagtgggtgcagcactgctggctttttcactgtattcgcaagtgaactttctgtctacaccctcaccgtcatcactctagaaagatggcacaccatcacctatgctattcacctggaccaaaagctgcgattaagacatgccattctgattatgcttggaggatggctcttttcttctctaattgctatgttgccccttgtcggtgtcagcaattacatgaaggtcagtatttgcttccccatggatgtggaaaccactctctcacaagtctatatattaaccatcctgattctcaatgtggtggccttcttcataatttgtgcttgctacattaaaatttattttgcagttcgaaacccagaattaatggctaccaataaagatacaaagattgctaagaaaatggcaatcctcatcttcaccgatttcacctgcatggcacctatctctttttttgccatctcagctgccttcaaagtacctcttatcacagtaaccaactctaaagttttactggttcttttttatcccatcaattcttgtgccaatccatttctgtatgcaatattcactaagacattccaaagagatttctttcttttgctgagcaaatttggctgctgtaaacgtcgggctgaactttatagaaggaaagatttttcagcttacacctccaactgcaaaaatggcttcactggatcaaataagccttctcaatccaccttgaagttgtccacattgcactgtcaaggtacagctctcctagacaagactcgctacacagagtgttaactgttacatcagtaactgcattattgaattgttcttaaacctgtaaaaaaaaattacctgtaccagtaattttaacataaagggttggatttaggaaattatttatttttaggtacattaggcaagagacctctacctagtagaaagtgtagtctatgaccactgccacactaaaaactatttgtcattgttacatggcataaatactgaagttgagagtgtttagaaatttttatagaaattttgacacagtaattttgtttgatgaatcttttaaaaaactgaggaggtattttgcatatcttttttttcattttcgtaatttgtattgcattctataaaaatattagttcataacagatcagaaatttaaaataactggcctttttcctcaggtagtttgaaaaacacactctagagatgcactgtccaatccggtagccactagccacatgtggctaaattaaaattaaataaaatgagaaatgtagtttctcagttgcactagccacgtttcaagttctcaatggctacgtgtgactagtgcttaccatactggacagcacagacacagaatattttcatcaccacagaaagttctatctgttctattatagagacttttatctatgccctatctggattctacttatttataatttaaggtaaacatctgaaagcacatttcagcctatttgcttagtgaaacattaagctgtagactgtaaactcctcgtgagtaggaaccctgtctcagtgcattttgttttcctgcttcctacctcaagatcttggcaatggtacactacaaatgtgctgagttagaattactctgaagttatgaaacatataatgaaaacaattttt

SEQ ID NO: 16518 - DNA, 2899 bp, Homo sapiens
  source 1..2899: mol_type = unassigned DNA
agaggggtgcgggccgcactcagaggccgtccaagacactggcaagccgcagaagcccagttcgccggccatgaagcagcggttctcggcgctgcagctgctgaagctgctgctgctgctgcagccgccgctgccacgagcgctgcgcgaggcgctctgccctgagccctgcaactgcgtgcccgacggcgccctgcgctgccccggccccacggccggtctcactcgactatcacttgcctacctccctgtcaaagtgatcccatctcaagctttcagaggacttaatgaggtcataaaaattgaaatctctcagattgattccctggaaaggatagaagctaatgcctttgacaacctcctcaatttgtctgaaatactgatccagaacaccaaaaatctgagatacattgagcccggagcatttataaatcttccccgattaaaatacttgagcatctgtaacacaggcatcagaaagtttccagatgttacgaaggtcttctcctctgaatcaaatttcattctggaaatttgtgataacttacacataaccaccataccaggaaatgcttttcaagggatgaataatgaatctgtaacactcaaactatatggaaatggatttgaagaagtacaaagtcatgcattcaatgggacgacactgacttcactggagctaaaggaaaacgtacatctggagaagatgcacaatggagccttccgtggggccacagggccgaaaaccttacagaatttttcacattccatttctgaaaacttttccaaacaatgtgaaagcacagtaaggaaagtgaataacaaaacactttattcttccatgcttgctgagagtgaactgagtggctgggactatgaatatggtttctgcttacccaagacaccccgatgtgctcctgaaccagatgcttttaatccctgtgaagatattatgggctatgacttccttagggtcctgatttggctgattaatattctagccatcatgggaaacatgactgttctttttgttctcctgacaagtcgttacaaacttacagtgcctcgttttctcatgtgcaatctctcctttgcagacttttgcatggggctctatctgctgctcatagcctcagttgattcccaaaccaagggccagtactataaccatgccatagactggcagacagggagtgggtgcagcactgctggctttttcactgtattcgcaagtgaactttctgtctacaccctcaccgtcatcactctagaaagatggcacaccatcacctatgctattcacctggaccaaaagctgcgattaagacatgccattctgattatgcttggaggatggctcttttcttctctaattgctatgttgccccttgtcggtgtcagcaattacatgaaggtcagtatttgcttccccatggatgtggaaaccactctctcacaagtctatatattaaccatcctgattctcaatgtggtggccttcttcataatttgtgcttgctacattaaaatttattttgcagttcgaaacccagaattaatggctaccaataaagatacaaagattgctaagaaaatggcaatcctcatcttcaccgatttcacctgcatggcacctatctctttttttgccatctcagctgccttcaaagtacctcttatcacagtaaccaactctaaagttttactggttcttttttatcccatcaattcttgtgccaatccatttctgtatgcaatattcactaagacattccaaagagatttctttcttttgctgagcaaatttggctgctgtaaacgtcgggctgaactttatagaaggaaagatttttcagcttacacctccaactgcaaaaatggcttcactggatcaaataagccttctcaatccaccttgaagttgtccacattgcactgtcaaggtacagctctcctagacaagactcgctacacagagtgttaactgttacatcagtaactgcattattgaattgttcttaaacctgtaaaaaaaaattacctgtaccagtaattttaacataaagggttggatttaggaaattatttatttttaggtacattaggcaagagacctctacctagtagaaagtgtagtctatgaccactgccacactaaaaactatttgtcattgttacatggcataaatactgaagttgagagtgtttagaaatttttatagaaattttgacacagtaattttgtttgatgaatcttttaaaaaactgaggaggtattttgcatatcttttttttcattttcgtaatttgtattgcattctataaaaatattagttcataacagatcagaaatttaaaataactggcctttttcctcaggtagtttgaaaaacacactctagagatgcactgtccaatccggtagccactagccacatgtggctaaattaaaattaaataaaatgagaaatgtagtttctcagttgcactagccacgtttcaagttctcaatggctacgtgtgactagtgcttaccatactggacagcacagacacagaatattttcatcaccacagaaagttctatctgttctattatagagacttttatctatgccctatctggattctacttatttataatttaaggtaaacatctgaaagcacatttcagcctatttgcttagtgaaacattaagctgtagactgtaaactcctcgtgagtaggaaccctgtctcagtgcattttgttttcctgcttcctacctcaagatcttggcaatggtacactacaaatgtgctgagttagaattactctgaagttatgaaacatataatgaaaacaattttttctagagcttatatttttatttgaatgaaataaaatgtttaaatattt

SEQ ID NO: 16519 - DNA, 1477 bp, Homo sapiens
  source 1..1477: mol_type = unassigned DNA
ggccgcactcagaggccgtccaagacactggcaagccgcagaagcccagttcgccggccatgaagcagcggttctcggcgctgcagctgctgaagctgctgctgctgctgcagccgccgctgccacgagcgctgcgcgaggcgctctgccctgagccctgcaactgcgtgcccgacggcgccctgcgctgccccggccccacggccggtctcactcgactatcacttgcctacctccctgtcaaagtgatcccatctcaagctttcagaggacttaatgaggtcataaaaattgaaatctctcagattgattccctggaaaggatagaagctaatgcctttgacaacctcctcaatttgtctgaaatactgatccagaacaccaaaaatctgagatacattgagcccggagcatttataaatcttccccgattaaaatacttgagcatctgtaacacaggcatcagaaagtttccagatgttacgaaggtcttctcctctgaatcaaatttcattctggaaatttgtgataacttacacataaccaccataccaggaaatgcttttcaagggatgaataatgaatctgtaacactcaaactatatggaaatggatttgaagaagtacaaagtcatgcattcaatgggacgacactgacttcactggagctaaaggaaaacgtacatctggagaagatgcacaatggagccttccgtggggccacagggccgaaaaccttggatatttcttccaccaaattgcaggccctgccgagctatggcctagagtccattcagaggctaattgccacgtcatcctattctctaaaaaaattgccatcaagagaaacatttgtcaatctcctggaggccacgttgacttaccccagccactgctgtgcttttagaaacttgccaacaaaagaacagaatttttcacattccatttctgaaaacttttccaaacaatgtgaaagcacagtaaggaaagtgaataacaaaacactttcgaaacccagaattaatggctaccaataaagatacaaagattgctaagaaaatggcaatcctcatcttcaccgatttcacctgcatggcacctatctctttttttgccatctcagctgccttcaaagtacctcttatcacagtaaccaactctaaagttttactggttcttttttatcccatcaattcttgtgccaatccatttctgtatgcaatattcactaagacattccaaagagatttctttcttttgctgagcaaatttggctgctgtaaacgtcgggctgaactttatagaaggaaagatttttcagcttacacctccaactgcaaaaatggcttcactggatcaaataagccttctcaatccaccttgaagttgtccacattgcactgtcaaggtacagctctcctagacaagactcgctacacagagtgttaactgttacatcagtaactgcattattgaa

SEQ ID NO: 16520 - DNA, 1921 bp, Homo sapiens
  source 1..1921: mol_type = unassigned DNA
ggccgcactcagaggccgtccaagacactggcaagccgcagaagcccagttcgccggccatgaagcagcggttctcggcgctgcagctgctgaagctgctgctgctgctgcagccgccgctgccacgagcgctgcgcgaggcgctctgccctgagccctgcaactgcgtgcccgacggcgccctgcgctgccccggccccacggccggtctcactcgactatcacttgcctacctccctgtcaaagtgatcccatctcaagctttcagaggacttaatgaggtcataaaaattgaaatctctcagattgattccctggaaaggatagaagctaatgcctttgacaacctcctcaatttgtctgaaatactgatccagaacaccaaaaatctgagatacattgagcccggagcatttataaatcttccccgattaaaatacttgagcatctgtaacacaggcatcagaaagtttccagatgttacgaaggtcttctcctctgaatcaaatttcattctggaaatttgtgataacttacacataaccaccataccaggaaatgcttttcaagggatgaataatgaatctgtaacactcaaactatatggaaatggatttgaagaagtacaaagtcatgcattcaatgggacgacactgacttcactggagctaaaggaaaacgtacatctggagaagatgcacaatggagccttccgtggggccacagggccgaaaaccttggatatttcttccaccaaattgcaggccctgccgagctatggcctagagtccattcagaggctaattgccacgtcatcctattctctaaaaaaattgccatcaagagaaacatttgtcaatctcctggaggccacgttgacttaccccagccactgctgtgcttttagaaacttgccaacaaaagaacagaatttttcacattccatttctgaaaacttttccaaacaatgtgaaagcacagtaaggaaagtgaataacaaaacactacttttgcatggggctctatctgctgctcatagcctcagttgattcccaaaccaagggccagtactataaccatgccatagactggcagacagggagtgggtgcagcactgctggctttttcactgtattcgcaagtgaactttctgtctacaccctcaccgtcatcactctagaaagatggcacaccatcacctatgctattcacctggaccaaaagctgcgattaagacatgccattctgattatgcttggaggatggctcttttcttctctaattgctatgttgccccttgtcggtgtcagcaattacatgaaggtcagtatttgcttccccatggatgtggaaaccactctctcacaagtctatatattaaccatcctgattctcaatgtggtggccttcttcataatttgtgcttgctacattaaaatttattttgcagttcgaaacccagaattaatggctaccaataaagatacaaagattgctaagaaaatggcaatcctcatcttcaccgatttcacctgcatggcacctatctctttttttgccatctcagctgccttcaaagtacctcttatcacagtaaccaactctaaagttttactggttcttttttatcccatcaattcttgtgccaatccatttctgtatgcaatattcactaagacattccaaagagatttctttcttttgctgagcaaatttggctgctgtaaacgtcgggctgaactttatagaaggaaagatttttcagcttacacctccaactgcaaaaatggcttcactggatcaaataagccttctcaatccaccttgaagttgtccacattgcactgtcaaggtacagctctcctagacaagactcgctacacagagtgttaactgttacatcagtaactgcattattgaa

SEQ ID NO: 16521 - DNA, 2073 bp, Homo sapiens
  source 1..2073: mol_type = unassigned DNA
atgaagcagcggttctcggcgctgcagctgctgaagctgctgctgctgctgcagccgccgctgccacgagcgctgcgcgaggcgctctgccctgagccctgcaactgcgtgcccgacggcgccctgcgctgccccggccccacggccggtctcactcgactatcacttgcctacctccctgtcaaagtgatcccatctcaagctttcagaggacttaatgaggtcataaaaattgaaatctctcagattgattccctggaaaggatagaagctaatgcctttgacaacctcctcaatttgtctgaaatactgatccagaacaccaaaaatctgagatacattgagcccggagcatttataaatcttccccgattaaaatacttgagcatctgtaacacaggcatcagaaagtttccagatgttacgaaggtcttctcctctgaatcaaatttcattctggaaatttgtgataacttacacataaccaccataccaggaaatgcttttcaagggatgaataatgaatctgtaacactcaaactatatggaaatggatttgaagaagtacaaagtcatgcattcaatgggacgacactgacttcactggagctaaaggaaaacgtacatctggagaagatgcacaatggagccttccgtggggccacagggccgaaaaccttggatatttcttccaccaaattgcaggccctgccgagctatggcctagagtccattcagaggctaattgccacgtcatcctattctctaaaaaaattgccatcaagagaaacatttgtcaatctcctggaggccacgttgacttaccccagccactgctgtgcttttagaaacttgccaacaaaagattattcttccatgcttgctgagagtgaactgagtggctgggactatgaatatggtttctgcttacccaagacaccccgatgtgctcctgaaccagatgcttttaatccctgtgaagatattatgggctatgacttccttagggtcctgatttggctgattaatattctagccatcatgggaaacatgactgttctttttgttctcctgacaagtcgttacaaacttacagtgcctcgttttctcatgtgcaatctctcctttgcagacttttgcatggggctctatctgctgctcatagcctcagttgattcccaaaccaagggccagtactataaccatgccatagactggcagacagggagtgggtgcagcactgctggctttttcactgtattcgcaagtgaactttctgtctacaccctcaccgtcatcactctagaaagatggcacaccatcacctatgctattcacctggaccaaaagctgcgattaagacatgccattctgattatgcttggaggatggctcttttcttctctaattgctatgttgccccttgtcggtgtcagcaattacatgaaggtcagtatttgcttccccatggatgtggaaaccactctctcacaagtctatatattaaccatcctgattctcaatgtggtggccttcttcataatttgtgcttgctacattaaaatttattttgcagttcgaaacccagaattaatggctaccaataaagatacaaagattgctaagaaaatggcaatcctcatcttcaccgatttcacctgcatggcacctatctctttttttgccatctcagctgccttcaaagtacctcttatcacagtaaccaactctaaagttttactggttcttttttatcccatcaattcttgtgccaatccatttctgtatgcaatattcactaagacattccaaagagatttctttcttttgctgagcaaatttggctgctgtaaacgtcgggctgaactttatagaaggaaagatttttcagcttacacctccaactgcaaaaatggcttcactggatcaaataagccttctcaatccaccttgaagttgtccacattgcactgtcaaggtacagctctcctagacaagactcgctacacagagtgttaactgttacatcagtaactgcattattgaattgttcttaaacctgtaaaaaaaaat

SEQ ID NO: 16522 - DNA, 1291 bp, Homo sapiens
  source 1..1291: mol_type = unassigned DNA
tttagggtagaagaaaaggttttatttttctttctcacattggaaaaaatgaaaactttcggacccatgaaattttattacattttgccaaaaacagaaccaataacataagtattcaaagttatgtaaagataattatttaatatgaacattatgatggtgagagggaccacggagcaaggggctgccttgcaggcctgccttccagctttgctacagggaccagaagcgggagctgagcgcaggggaggcaggcggaggccatgggcagcgaggcgggtgcgccaaagggcgccagttccggagctgctgggcctgggctgcaggagggcggagctggggccgcaaggctggtgccggccgacaaacgacgcggcgcgggcgagtgggcggaggcggctgcggggaaggctgggctgccgcgggacgcggtgaagatagcctgcggagtgtccgggctgaacacggttgcagcactcccagtagaccaggagctccgggaggcagggccggccccacgtcctctgcgcaccaccctgagttggatcctctgtgcgccacctgagttggatccagggctagctgctgttgacctccccactcccacgctgccctcctgcctgcagccatgacgcccctgctcaccctgatcctggtggtcctcatgggcttacctctggcccaggccttggactgccacgtgtgtgcctacaacggagacaactgcttcaaccccatgcgctgcccggctatggttgcctactgcatgaccacgcgcacctctgcagccgaagccatatggtgtcaccagtgcacgggcttcggagggtgctcccatggatccagatgcctgagggactccacccactgtgtcaccactgccacccgggtcctcagcaacaccgaggatttgcctctggtcaccaagatgtgccacataggctgccccgatatccccagcctgggcctgggcccctacgtatccatcgcttgctgccagaccagcctctgcaaccatgactgacggctgccctcctccaggcccccggacgctcagcccccacagcccccacagcctggcgccagggctcacagctgcccctccctcgagactggccagcccacctctcccggcctctgcagccaccgtccagcaccgcttgtcctagggaagtcctgcgtggagtcttgcctcaatctgctgccgtccaagcctggggcccatcgtgcctgccgccccttcaggtcccgacctccccacaataaaatgtgattggatcgtgtggtacaa

SEQ ID NO: 16523 - DNA, 866 bp, Homo sapiens
  source 1..866: mol_type = unassigned DNA
gagggggttgggaagctcgaagccgcaggcctgactctggcctttggcatcctggggttggcctgggcaaatgtgtcgtgagagacggatttgttgttctcgggaaggcggttgcagcactcccagtagaccaggagctccgggaggcagggccggccccacgtcctctgcgcaccaccctgagttggatcctctgtgcgccacctgagttggatccagggctagctgctgttgacctccccactcccacgctgccctcctgcctgcagccatgacgcccctgctcaccctgatcctggtggtcctcatgggcttacctctggcccaggccttggactgccacgtgtgtgcctacaacggagacaactgcttcaaccccatgcgctgcccggctatggttgcctactgcatgaccacgcgcacctactacacccccaccaggatgaaggtcagtaagtcctgcgtgccccgctgcttcgagactgtgtatgatggctactccaagcacgcgtccaccacctcctgctgccagtacgacctctgcaacggcaccggccttgccaccccggccaccctggccctggcccccatcctcctggccaccctctggggtctcctctaaagcccccgaggcagacccactcaagaacaaagctctcgagacacactgctacaccctcgcacccagctcaccctgcctcaccctccacactccctgcgacctcctcagccatgcccagggtcaggactgtgggcaagaagacacccgacctcccccaaccaccacacgacctcacttcgaggccttgacctttcgatgctgtgtgggatcccaaaagtgtccggctttgatgggctgatcagcc

SEQ ID NO: 16524 - DNA, 4535 bp, Homo sapiens
  source 1..4535: mol_type = unassigned DNA
ggctgccgcgggacgcggtgaagatagcctgcggagtgtccgggctgaacacggttgcagcactcccagtagaccaggagctccgggaggcagggccggccccacgtcctctgcgcaccaccctgagttggatcctctgtgcgccacctgagttggatccagggctagctgctgttgacctccccactcccacgctgccctcctgcctgcagccatgacgcccctgctcaccctgatcctggtggtcctcatgggcttacctctggcccaggccttggactgccacgtgtgtgcctacaacggagacaactgcttcaaccccatgcgctgcccggctatggttgcctactgcatgaccacgcgcacctactacacccccaccaggatgaaggtcagtaagtcctgcgtgccccgctgcttcgagactgtgtatgatggctactccaagcacgcgtccaccacctcctgctgccagtacgacctctgcaacggcaccggccttgccaccccggccaccctggccctggcccccatcctcctggccaccctctggggtctcctctaaagcccccgaggcagacccactcaagaacaaagctctcgagacacactgctacaccctcgcacccagctcaccctgcctcaccctccacactccctgcgacctcctcagccatgcccagggtcaggactgtgggcaagaagacacccgacctcccccaaccaccacacgacctcacttcgaggccttgacctttcgatgctgtgtgggatcccaaaagtgtccggctttgatgggctgatcagcccctcgcctgtccagggctatttatggggaggggcccagtcaggcagggagcactgagcagatgggagctgtggccaagcccaccttctgggaagccctaggagaggcccctgcctcagtctgcccctggtgtgctggggcagggggaagacaaggaatgcccgcaggtggggtggtggggagactcttaggaggaaaggctcctccaggcctagtcacgcttcctactgaggccaggagctgccaggaccggtacgggatcagggctgtgggaggagggcctttggcaccggcccctgtgctaggaagtctgccaggcccgagttggagccaccccctgcaggggagggggcggctctgcctcagcaggccccagggcccccgaagtcacagaagctttttcgggtccagcaaggggtgtgtgtcctctcagtcaaaccccttgacgtttcccaccccctcacggggagggcaccaggcctgaagctggcaggagctagggccatgctatatttggtgggtcctggacgctgacccggccagcgctattctgggcagggagggaaaggggcagagcaggtggtcccccgagtcctggtccccaaccacagcaggacccagccgagcaaggcaaaagacgcaggactgggggatgcgcgcacaggctgggggttgggagcagcctggggccggcgcgggcctgggcgtgggaaggcggagcatgccaccctctcgtggccgtgcgggggcgggagtggggagggtggggtggggagggcggagacccagcccctcccccgcagcgggatgcgcacagtgagtgggtccctccatcaccttccacctggggatgcacccactgggagggcagggtggaagccccagctgggtgtgtggactcccagggaccccaccccaggcctgggaagcaggggtcagcccaacacgcaccaatccatccccgatgcaggtagcccagggagcacctgcccctgctgtgaatggggcattcgggggcgtgagaccttttggtgccagcggtcacgctgcacctgaggcccccacctgaccagtgctcccagctctggtgtcctgagaaacccttcaagccatcccgcatgggcaggatggtgacatatccatgtggtaggattgtcccggccccaaagtatggccctggtcaggggagcccctgctggaaattgcatctccagagctttgatgcaggacccctgggggatcagggaatgagggtctccaccccaggggtctccttgcagtgagtctatatgcaggcctgcgttctgctcctggggctggttctgagtgcccagcttcagtctcctgagaacatgaggatgggagggggcagagtcttgctgagggcacacccagttcccgctggaggaggacagtgccagtcttctgcaaagggaccttgggtgggaacgggcccggagcgggaggaacgtgactccccagagggaagatgggcatcatactgggcccagagctgggaaggagttgctgccagcacagggtgggcctggactcccctcgcccctacccccagtggttgtggctgtagccctaagcctggagagcaggaccggcccggggtgtctgggaggctgccaggtgcctcccagagctcccaagggcccccacctgcaagtgccagcctcagggcagtgcccaaatgaggccctctcagctgcagccagcgatgccttgggatgcttaccgggagggaggcggctttgggctcctaagtccttgggagaggctgggagcagtcactgcgcggcttgcgcaagcccattgtcgggttgggtggcttcctcagccagggctgggagggactccaggatcaggtcctccctgtctcgagtctcagtggggtgatggggaggagacctggccacccatggctcaggggcagctgagaacaaggacctgctggagctggaagtgctgtggtgttgaggggtggggtgggcagcttctcacacctgcctcctgcctccttctgtccacctttccaccaccctgacctgtcccagccccacacatggttctgcctggctggcctgcccttggcacctggcgtagagcacacagaaggcactcagctaatgctgggcaggcccactcatggggagtgcgtggctgtgcagcaccagggaaccggcacagcagcgccggcagaaatcacagcagtaaacttgtccgggttgtatgcatcaaggtggcgatggacgtgggtccccccactgcactgtggccctgagcactgtatagcagcccggcaatgggagccattatcttgcccctttgacagaggaggacacagaggcacagggaggtgaagtagctgccccacactagtgcctcctcgctcactcaccaccccctgcaccacagtgcagccgcttctcccaccagctggggttccttggacccccaagcctgggaagggggaggtgagtttacaaaatggaaagcttaaaaggagaaaagtggaaccagaggtttgagaagccctgagtggtagagtaaggcctccagcgctgcctctgggtgcagggcagagtggcagaggagagggggagaggcactgggcaccatgggggcccagttcccacttcggggatctctctcgcagaaccgagggtccccttcatgggggtagatgcccagggctagctgttgccactgtctgtgtggacctgagtcctggacatgcccgagtgactcaggagtggctgcttgggcgggctctgtcaccctaggatgttatacattctgggaactggacaggagtggctgcttgggcgggctctggcaccctgggatgttatacattctgggaactggacaggagtggctgcttgggtgggctctggcaccctgggatgttatacattctgggaactgcaatcagccactagagaagtcggagctacaggaagtgaccctggggtgggacctggggacatggccaggtcagcatggggacacccggctccagcaggagctctggtctgtcctggggtctttgggggcagggctgcggccctgggcaggcttcctccaggcggaggtcctggggaagtgggggagccaggccagctgccgcctcccccactatgtagcatctgattcgtcatctctcatgaaggcgatttggttcataactctgaaactctgaaaaaggtcaaaagaagcagagaggccctcggtggatatgccagcttttctgccggtgctttctcccactactctgggtggtctgctctcctcttcaaacctcagctcgcagggagggcctgaatctgccagcccctcaggatctccttccctctgggccctccccagccttaaggagcctcccagacagaagggtggacagagccacctgggcagcccgagagacacacgggggtcctccctgtggacagccctgccagcttccgcccagccctgagcttcatttgcatcttgaggagtaaggggtggtgaaatgggaatgctggtctggctcagctggtcgtgggcataagtgcccgctgaatggatggcatctctccctcctgtcttatgttctggggtccaggtgcttcccagggccatgcccctgctgctaatgcttgccctaacccttaccctaaccagcgtccagcgtcgtctcaccgagccgtaaataaatcaacagattcgcattgtc

SEQ ID NO: 16525 - DNA, 4706 bp, Homo sapiens
  source 1..4706: mol_type = unassigned DNA
ggggccggggcaggcctggggcggggcctgcggtgagctcgcgctgggcgggctgttccgggggcgggactgggctgggcctgcggtgagcatcaggcgatgcggcacgggtgctgcgggacacacagacacgcctacgattagactcaggcaggcacctaccggcgagcggccgcgggtgactcccaggcgcggcggtacctcacggtggtgaaggtcacagggttgcagcactcccagtagaccaggagctccgggaggcagggccggccccacgtcctctgcgcaccaccctgagttggatcctctgtgcgccacctgagttggatccagggctagctgctgttgacctccccactcccacgctgccctcctgcctgcagccatgacgcccctgctcaccctgatcctggtggtcctcatgggcttacctctggcccaggccttggactgccacgtgtgtgcctacaacggagacaactgcttcaaccccatgcgctgcccggctatggttgcctactgcatgaccacgcgcacctactacacccccaccaggatgaaggtcagtaagtcctgcgtgccccgctgcttcgagactgtgtatgatggctactccaagcacgcgtccaccacctcctgctgccagtacgacctctgcaacggcaccggccttgccaccccggccaccctggccctggcccccatcctcctggccaccctctggggtctcctctaaagcccccgaggcagacccactcaagaacaaagctctcgagacacactgctacaccctcgcacccagctcaccctgcctcaccctccacactccctgcgacctcctcagccatgcccagggtcaggactgtgggcaagaagacacccgacctcccccaaccaccacacgacctcacttcgaggccttgacctttcgatgctgtgtgggatcccaaaagtgtccggctttgatgggctgatcagcccctcgcctgtccagggctatttatggggaggggcccagtcaggcagggagcactgagcagatgggagctgtggccaagcccaccttctgggaagccctaggagaggcccctgcctcagtctgcccctggtgtgctggggcagggggaagacaaggaatgcccgcaggtggggtggtggggagactcttaggaggaaaggctcctccaggcctagtcacgcttcctactgaggccaggagctgccaggaccggtacgggatcagggctgtgggaggagggcctttggcaccggcccctgtgctaggaagtctgccaggcccgagttggagccaccccctgcaggggagggggcggctctgcctcagcaggccccagggcccccgaagtcacagaagctttttcgggtccagcaaggggtgtgtgtcctctcagtcaaaccccttgacgtttcccaccccctcacggggagggcaccaggcctgaagctggcaggagctagggccatgctatatttggtgggtcctggacgctgacccggccagcgctattctgggcagggagggaaaggggcagagcaggtggtcccccgagtcctggtccccaaccacagcaggacccagccgagcaaggcaaaagacgcaggactgggggatgcgcgcacaggctgggggttgggagcagcctggggccggcgcgggcctgggcgtgggaaggcggagcatgccaccctctcgtggccgtgcgggggcgggagtggggagggtggggtggggagggcggagacccagcccctcccccgcagcgggatgcgcacagtgagtgggtccctccatcaccttccacctggggatgcacccactgggagggcagggtggaagccccagctgggtgtgtggactcccagggaccccaccccaggcctgggaagcaggggtcagcccaacacgcaccaatccatccccgatgcaggtagcccagggagcacctgcccctgctgtgaatggggcattcgggggcgtgagaccttttggtgccagcggtcacgctgcacctgaggcccccacctgaccagtgctcccagctctggtgtcctgagaaacccttcaagccatcccgcatgggcaggatggtgacatatccatgtggtaggattgtcccggccccaaagtatggccctggtcaggggagcccctgctggaaattgcatctccagagctttgatgcaggacccctgggggatcagggaatgagggtctccaccccaggggtctccttgcagtgagtctatatgcaggcctgcgttctgctcctggggctggttctgagtgcccagcttcagtctcctgagaacatgaggatgggagggggcagagtcttgctgagggcacacccagttcccgctggaggaggacagtgccagtcttctgcaaagggaccttgggtgggaacgggcccggagcgggaggaacgtgactccccagagggaagatgggcatcatactgggcccagagctgggaaggagttgctgccagcacagggtgggcctggactcccctcgcccctacccccagtggttgtggctgtagccctaagcctggagagcaggaccggcccggggtgtctgggaggctgccaggtgcctcccagagctcccaagggcccccacctgcaagtgccagcctcagggcagtgcccaaatgaggccctctcagctgcagccagcgatgccttgggatgcttaccgggagggaggcggctttgggctcctaagtccttgggagaggctgggagcagtcactgcgcggcttgcgcaagcccattgtcgggttgggtggcttcctcagccagggctgggagggactccaggatcaggtcctccctgtctcgagtctcagtggggtgatggggaggagacctggccacccatggctcaggggcagctgagaacaaggacctgctggagctggaagtgctgtggtgttgaggggtggggtgggcagcttctcacacctgcctcctgcctccttctgtccacctttccaccaccctgacctgtcccagccccacacatggttctgcctggctggcctgcccttggcacctggcgtagagcacacagaaggcactcagctaatgctgggcaggcccactcatggggagtgcgtggctgtgcagcaccagggaaccggcacagcagcgccggcagaaatcacagcagtaaacttgtccgggttgtatgcatcaaggtggcgatggacgtgggtccccccactgcactgtggccctgagcactgtatagcagcccggcaatgggagccattatcttgcccctttgacagaggaggacacagaggcacagggaggtgaagtagctgccccacactagtgcctcctcgctcactcaccaccccctgcaccacagtgcagccgcttctcccaccagctggggttccttggacccccaagcctgggaagggggaggtgagtttacaaaatggaaagcttaaaaggagaaaagtggaaccagaggtttgagaagccctgagtggtagagtaaggcctccagcgctgcctctgggtgcagggcagagtggcagaggagagggggagaggcactgggcaccatgggggcccagttcccacttcggggatctctctcgcagaaccgagggtccccttcatgggggtagatgcccagggctagctgttgccactgtctgtgtggacctgagtcctggacatgcccgagtgactcaggagtggctgcttgggcgggctctgtcaccctaggatgttatacattctgggaactggacaggagtggctgcttgggcgggctctggcaccctgggatgttatacattctgggaactggacaggagtggctgcttgggtgggctctggcaccctgggatgttatacattctgggaactgcaatcagccactagagaagtcggagctacaggaagtgaccctggggtgggacctggggacatggccaggtcagcatggggacacccggctccagcaggagctctggtctgtcctggggtctttgggggcagggctgcggccctgggcaggcttcctccaggcggaggtcctggggaagtgggggagccaggccagctgccgcctcccccactatgtagcatctgattcgtcatctctcatgaaggcgatttggttcataactctgaaactctgaaaaaggtcaaaagaagcagagaggccctcggtggatatgccagcttttctgccggtgctttctcccactactctgggtggtctgctctcctcttcaaacctcagctcgcagggagggcctgaatctgccagcccctcaggatctccttccctctgggccctccccagccttaaggagcctcccagacagaagggtggacagagccacctgggcagcccgagagacacacgggggtcctccctgtggacagccctgccagcttccgcccagccctgagcttcatttgcatcttgaggagtaaggggtggtgaaatgggaatgctggtctggctcagctggtcgtgggcataagtgcccgctgaatggatggcatctctccctcctgtcttatgttctggggtccaggtgcttcccagggccatgcccctgctgctaatgcttgccctaacccttaccctaaccagcgtccagcgtcgtctcaccgagccgtaaataaatcaacagattcgcattgtc

SEQ ID NO: 16526 - DNA, 561 bp, Homo sapiens
  source 1..561: mol_type = unassigned DNA
gacaccccaggagcagagaggaggggaacagcgagaagagacccagcttttgggcccagtcctgccatggccagccatccggcccccagggccctgcttgggatggggctgcagaccacctcccatgggacctctgcaccaaccatcccctggggttgcagcactcccagtagaccaggagctccgggaggcagggccggccccacgtcctctgcgcaccaccctgagttggatcctctgtgcgccacctgagttggatccagggctagctgctgttgacctccccactcccacgctgccctcctgcctgcagccatgacgcccctgctcaccctgatcctggtggtcctcatgggcttacctctggcccaggccttggactgccacgtgtgtgcctacaacggagacaactgcttcaaccccatgcgctgcccggctatggttgcctactgcatgaccacgcgcacctactacacccccaccaggatgaaggtcagtaagtcctgcgtgccccgctgcttcgagactgtgtatgatggctactccaagcacgcgtccacc

SEQ ID NO: 16527 - DNA, 637 bp, Homo sapiens
  source 1..637: mol_type = unassigned DNA
ggggccggggcaggcctggggcggggcctgcggtgagctcgcgctgggcgggctgttccgggggcgggactgggctgggcctgcggtgagcatcaggcgatgcggcacgggtgctgcgggacacacagacacgcctacgattagactcaggcaggcacctaccggcgagcggccgcgggtgactcccaggcgcggcggtacctcacggtggtgaaggtcacagggttgcagcactcccagtagaccaggagctccgggaggcagggccggccccacgtcctctgcgcaccaccctgagttggatcctctgtgcgccacctgagttggatccagggctagctgctgttgacctccccactcccacgctgccctcctgcctgcagccatgacgcccctgctcaccctgatcctggtggtcctcatgggcttacctctggcccaggccttggactgccacgtgtgtgcctacaacggagacaactgcttcaaccccatgcgctgcccggctatggttgcctactgcatgaccacgcgcacctactacacccccaccaggatgaaggtcagtaagtcctgcgtgccccgctgcttcgagactgtgtatgatggctactccaagcacgcgtccaccacctcc

SEQ ID NO: 16528 - DNA, 1706 bp, Homo sapiens
  source 1..1706: mol_type = unassigned DNA
aaggctggggttgcctggggcgaggttactcatcctgggctcaggtaagagggcccgagctcggaggcggcacatccaggggggacgccaagggagcaggacggagccatggaccccgccaggaaagcaggtgcccaggccatgatctggactgcaggctggctgctgctgctgctgcttcgcggaggagcgcaggccctggagtgctacagctgcgtgcagaaagcagatgacggatgctccccgaacaagatgaagacagtgaagtgcgcgccgggcgtggacgtctgcaccgaggccgtgggggcggtggagaccatccacggacaattctcgctggcagtgcggggttgcggttcgggactccccggcaagaatgaccgcggcctggatcttcacgggcttctggcgttcatccagctgcagcaatgcgctcaggatcgctgcaacgccaagctcaacctcacctcgcgggcgctcgacccggcaggtaatgagagtgcatacccgcccaacggcgtggagtgctacagctgtgtgggcctgagccgggaggcgtgccagggtacatcgccgccggtcgtgagctgctacaacgccagcgatcatgtctacaagggctgcttcgacggcaacgtcaccttgacggcagctaatgtgactgtgtccttgcctgtccggggctgtgtccaggatgaattctgcactcgggatggagtaacaggcccagggttcacgctcagtggctcctgttgccaggggtcccgctgtaactctgacctccgcaacaagacctacttctcccctcgaatcccaccccttgtccggctgccccctccagagcccacgactgtggcctcaaccacatctgtcaccacttctacctcggccccagtgagacccacatccaccaccaaacccatgccagcgccaaccagtcagactccgagacagggagtagaacacgaggcctcccgggatgaggagcccaggttgactggaggcgccgctggccaccaggaccgcagcaattcagggcagtatcctgcaaaaggggggccccagcagccccataataaaggctgtgtggctcccacagctggattggcagcccttctgttggccgtggctgctggtgtcctactgtgagcttctccacctggaaatttccctctcacctacttctctggccctgggtacccctcttctcatcacttcctgttcccaccactggactgggctggcccagcccctgtttttccaacattccccagtatccccagcttctgctgcgctggtttgcggctttgggaaataaaataccgttgtatatattctgccaggggtgttctagctttttgaggacagctcctgtatccttctcatccttgtctctccgcttgtcctcttgtgatgttaggacagagtgagagaagtcagctgtcacggggaaggtgagagagaggatgctaagcttcctactcactttctcctagccagcctggactttggagcgtggggtgggtgggacaatggctccccactctaagcactgcctcccctactccccgcatctttggggaatcggttccccatatgtcttccttactagactgtgagctcctcgagggcagggaccgtgccttatgtctgtgtgtgatcagtttctggcacataaatgcctcaataaagatttaattactttg

SEQ ID NO: 16529 - DNA, 907 bp, Homo sapiens
  source 1..907: mol_type = unassigned DNA
gccaagggagcaggacggagccatggaccccgccaggaaagcaggtgcccaggccatgatctggactgcaggctggctgctgctgctgctgcttcgcggaggagcgcaggccctggagtgctacagctgcgtgcagaaagcagatgacggatgctccccgaacaagatgaagacagtgaagtgcgcgccgggcgtggacgtctgcaccgaggccgtgggggcggtggagaccatccacggacaattctcgctggcagtgcggggttgcggttcgggactccccggcaagaatgaccgcggcctggatcttcacgggcttctggcgttcatccagctgcagcaatgcgctcaggatcgctgcaacgccaagctcaacctcacctcgcgggcgctcgacccggcagctgcagctaatgtgactgtgtccttgcctgtccggggctgtgtccaggatgaattctgcactcgggatggagtaacaggcccagggttcacgctcagtggctcctgttgccaggggtcccgctgtaactctgacctccgcaacaagacctacttctcccctcgaatcccaccccttgtccggctgccccctccagagcccacgactgtggcctcaaccacatctgtcaccacttctacctcggccccagtgagacccacatccaccaccaaacccatgccagcgccaaccagtcagactccgagacagggagtagaacacgaggcctcccgggatgaggagcccaggttgactggaggcgccgctggccaccaggaccgcagcaattcagggcagtatcctgcaaaaggggggccccagcagccccataataaaggctgtgtggctcccacagctggattggcagcccttctgttggccgtggctgctggtgtcctactgtga

SEQ ID NO: 16530 - DNA, 4071 bp, Homo sapiens
  source 1..4071: mol_type = unassigned DNA
gagtggcgcgcgcgcccctagccgccccccgcctctccccgctgcgctccctcgctccttccctgagctcccgggctccggcagcgggctggcggggcgccgcattgcacactctgggggcgccgcagtgttcgtgggatggggcagcgggctgcagctggcggccggaatccgcgcgcagcccgggtgcaagttctctcctgttgccctgagtgcccactcccaggccctctgtatgagtgacacttcagtctgccatggaacctggccctgctctggcctggctcctgctcctgagcctgctggcggattgtctgaaagctgctcagtcccgagacttcacagtgaaagacattatctacctccatccttcaaccacaccatatcctggtggatttaaatgtttcacctgtgaaaaggcagcagacaattatgagtgcaaccgatgggctccagacatctactgccctcgagagaccagatactgctacactcagcacacaatggaagtcacaggaaacagtatctcagtcaccaaacgctgtgtcccactggaagagtgcttatccactggctgcagagactccgagcatgaaggccacaaggtctgcacttcttgttgtgaaggaaatatctgtaacttgccactgccccgaaatgaaactgatgccacatttgccacgacgtcacctataaatcagacaaatgggcacccacgctgtatgtcagtgatagtgtcctgcttgtggttgtggttagggctcatgttatagtggctcagtggctccatgtgttaatagcgatccatggggatctcgatggtccacagacctgcatgagtcattggcctgacagtaattacacatgtgagacacaacactcttggaggtcatcacagccaagcattgccacttaccatgaggaataaatgttgcttcattgtagccattttgagtctaaccgagactcatcaaagccttctgtcagtacagcccaagttccataccataaacgtttgttttcattccaagaagtagttctgcatttatcgagatctggggttcttaatttggaagaatacatgcatgagatgcagtaggtcctgagactgtaagatattaggagtatgttataggggcatgtatagatgtgggcttttcaggagaaaagtaaccattggtttaaatataatcatgagttcatttgtagctttagaattttaaaacattgactccaaactgaatggactatttccttggaaattctgactgagtccctggaagagtagtaattccaacaattccagccatttgttcaattaattttcccaacattcttctcccagtgctgggaatcacatttcctctgttctgtgcagaagacaaaaaggcaatcataaaagtttgttatatttgtgggggtgcctggaggaggattttcctcaacttaatggagccactgtccataaagtggctgttatcccttcatataattggtgagatcagccttctccttgacttggcacctaattatgcttcatgagatcctagattccacctgagtcaattgtgtccagagccccaaaccaggatggagttgttttccccagatatggggttctattcagccatagataatctagacagaggatttcagaatgaaaggaaaaatgtgtggagattagtcctagttcattctgagggccgactaagtggctcagccagcttcttactccatctgcagttcatactgccaaagagctcccacttccaaatccccagtgactttatggagaagattctgcattaaattgtctttcgaatgatggggaagcaaggcataatatgcgatgatgaggagaaagtagaccagtgaggtgattgcaagactaacaaggagactcaatgggaagtttttctttcttttagatattgcttttgaagtagatggtaaaatttttgtcatccttcttgtattttttgtaccccaagttacaatttttcttcttccttgtaaataatttaaacagtatttatttttgtaaggcataactagaaactaaaatatattctaaaaaattcattattctgaacaaagtgatcaaattagaatacatatttttcaacagtggtagagcttttaatatatgtttattgaaagttatctataatacttgcaccagtgttgaaaaaagttaacatgtaggcaagagcaatatgtttgtctcaaggatttttccatggtttcctcagtgatggtgtcctggaattattcaggtggtgaccatcactggtctaagtttgtgtgcagggttttcagatgtgtttttgtgaaacttggtagaaccatggctaataaagaggacagtgttgtcagggtccatctgccctccatagaaaaatgtctctggctcataaaatgagactccctcagggactaaatatgaactgacagcagtaactctgatacagaataatctaaattgcatcaaatggccttaattcagagtttgttaggcttatcagtatgttgcttttaattggggtgggaaagtagagggagagaaagcaagacatttattaagcacctcgtatgtgccaggcactatgctaagcactttacataagttaggattaatccctgcaagaatcctataaagaatgttactagcatttacacttcccaaatgaaggtaccaaagctcaaacgcaatgttgtgaagctgtttccttcagatttaggttatgtgggatgatgtgggattgaagaggaaagaaaggtgggattatccccctaggaagactttcaggcctgacttcataggaattcatccatcttatcatgtggagtttatctcaccctgctgttgcaggatgctatttgcatgtgtccccaggtgatgttttttctttggggagtaggggtttggcttcctcattcatccctcttgctaaaagaggagatagttgatgttgcatctaaagatgctataagacaatgaaagtttgatgttgtacatacctacaagtaccatttttgtgcatgattacactccactgacatcttccaagtactgcatgtgattgaataagaaacaagaaagtgaccacaccaaagcctccctggctggtgtagagggatcaggtccacagtggtgcagattcaaccaccacccagggagtgcttgcagactctgcatagatgttgctgcatgtgtcccatgtgcctgtcagaatggcagtgtttaattctcttgaaagaaagttatttgctcactatccccagcctcaaggagccaaggaagagtcattcacatggaaggtccgggactggtcagccactctgacttttctaccacattaaattctccattacatctcaatattggtaatggcttaagtgtaaagagccatgatgtgtatattaagctatgtgccacatatttatttttagactctccacagcattcatgtcaatatgggattaatgcctaaactttgtaaatattgtacagtttgtaaatcaatgaataaaggttttgagtgtatcttaccaggctcctccctgcaaatgcacatgtcaatcaatgattaatgcacccaggttatgtacaaggcactgggcttagcaccacagggaacttccttccagaggcttgctttctagttgtgtagacaagaatacatgcatgagaagatacaagacaattcacccatgccaaatgattcatacaggctgtttaagtactgcagaaaataaaagaaggaaaggctaccagacttttcaataaggtctacagcttcccaagagcatgtctttgttaaatcaggaaatataaaaattatgtgtgtatgtgtatgtatatatatataccaccctattaactattttaaaatcgtattctattttgggggttgtgttaatgatgatgaaccagaaaagattttctcttgatggtttcttcaacaggaaacagatattggaatagtgtacatgtcatttttatctatacaatgaatttattatatttttcttagtaaagtgatagacattgaaagcaagcttgaaaaa

SEQ ID NO: 16531 - DNA, 3578 bp, Homo sapiens
  source 1..3578: mol_type = unassigned DNA
actgcaaacgtcaagtggtctccgccttccctgggttcggagcttcacttgctcttgagctctgcggtccggcggatttcgcggggcccaggggatggcggggagtgagatttggccagggtcatttcacactgccgggcctgcagccacgcacgcagctgctggcccggctgaggctggcggctagggagaggcgccagggggtcgcgcacaggaaggtgcaagttctctcctgttgccctgagtgcccactcccaggccctctgtatgagtgacacttcagtctgccatggaacctggccctgctctggcctggctcctgctcctgagcctgctggcggattgtctgaaagctgctcagtcccgagacttcacagtgaaagacattatctacctccatccttcaaccacaccatatcctggtggatttaaatgtttcacctgtgaaaaggcagcagacaattatgagtgcaaccgatgggctccagacatctactgccctcgagagaccagatactgctacactcagcacacaatggaagtcacaggaaacagtatctcagtcaccaaacgctgtgtcccactggaagagtgcttatccactggctgcagagactccgagcatgaaggccacaaggtctgcacttcttgttgtgaaggaaatatctgtaacttgccactgccccgaaatgaaactgatgccacatttgccacgacgtcacctataaatcagacaaatgggcacccacgctgtatgtcagtgatagtgtcctgcttgtggttgtggttagggctcatgttatagtggctcagtggctccatgtgttaatagcgatccatggggatctcgatggtccacagacctgcatgagtcattggcctgacagtaattacacatgtgagacacaacactcttggaggtcatcacagccaagcattgccacttaccatgaggaataaatgttgcttcattgtagccattttgagtctaaccgagactcatcaaagccttctgtcagtacagcccaagttccataccataaacgtttgttttcattccaagaagtagttctgcatttatcgagatctggggttcttaatttggaagaatacatgcatgagatgcagtaggtcctgagactgtaagatattaggagtatgttataggggcatgtatagatgtgggcttttcaggagaaaagtaaccattggtttaaatataatcatgagttcatttgtagctttagaattttaaaacattgactccaaactgaatggactatttccttggaaattctgactgagtccctggaagagtagtaattccaacaattccagccatttgttcaattaattttcccaacattcttctcccagtgctgggaatcacatttcctctgttctgtgcagaagacaaaaaggcaatcataaaagtttgttatatttgtgggggtgcctggaggaggattttcctcaacttaatggagccactgtccataaagtggctgttatcccttcatataattggtgagatcagccttctccttgacttggcacctaattatgcttcatgagatcctagattccacctgagtcaattgtgtccagagccccaaaccaggatggagttgttttccccagatatggggttctattcagccatagataatctagacagaggatttcagaatgaaaggaaaaatgtgtggagattagtcctagttcattctgagggccgactaagtggctcagccagcttcttactccatctgcagttcatactgccaaagagctcccacttccaaatccccagtgactttatggagaagattctgcattaaattgtctttcgaatgatggggaagcaaggcataatatgcgatgatgaggagaaagtagaccagtgaggtgattgcaagactaacaaggagactcaatgggaagtttttctttcttttagatattgcttttgaagtagatggtaaaatttttgtcatccttcttgtattttttgtaccccaagttacaatttttcttcttccttgtaaataatttaaacagtatttatttttgtaaggcataactagaaactaaaatatattctaaaaaattcattattctgaacaaagtgatcaaattagaatacatatttttcaacagtggtagagcttttaatatatgtttattgaaagttatctataatacttgcaccagtgttgaaaaaagttaacatgtaggcaagagcaatatgtttgtctcaaggatttttccatggtttcctcagtgatggtgtcctggaattattcaggtggtgaccatcactggtctaagtttgtgtgcagggttttcagatgtgtttttgtgaaacttggtagaaccatggctaataaagaggacagtgttgtcagggtccatctgccctccatagaaaaatgtctctggctcataaaatgagactccctcagggactaaatatgaactgacagcagtaactctgatacagaataatctaaattgcatcaaatggccttaattcagagtttgttaggcttatcagtatgttgcttttaattggggtgggaaagtagagggagagaaagcaagacatttattaagcacctcgtatgtgccaggcactatgctaagcactttacataagttaggattaatccctgcaagaatcctataaagaatgttactagcatttacacttcccaaatgaaggtaccaaagctcaaacgcaatgttgtgaagctgtttccttcagatttaggttatgtgggatgatgtgggattgaagaggaaagaaaggtgggattatccccctaggaagactttcaggcctgacttcataggaattcatccatcttatcatgtggagtttatctcaccctgctgttgcaggatgctatttgcatgtgtccccaggtgatgttttttctttggggagtaggggtttggcttcctcattcatccctcttgctaaaagaggagatagttgatgttgcatctaaagatgctataagacaatgaaagtttgatgttgtacatacctacaagtaccatttttgtgcatgattacactccactgacatcttccaagtactgcatgtgattgaataagaaacaagaaagtgaccacaccaaagcctccctggctggtgtagagggatcaggtccacagtggtgcagattcaaccaccacccagggagtgcttgcagactctgcatagatgttgctgcatgtgtcccatgtgcctgtcagaatggcagtgtttaattctcttgaaagaaagttatttgctcactatccccagcctcaaggagccaaggaagagtcattcacatggaaggtccgggactggtcagccactctgacttttctaccacattaaattctccattacatctcaatattggtaatggcttaagtgtaaagagccatgatgtgtatattaagctatgtgccacatatttatttttagactctccacagcattcatgtcaatatgggattaatgcctaaactttgtaaatattgtacagtttgtaaatcaatgaataaaggttttgagtgt

SEQ ID NO: 16532 - DNA, 565 bp, Homo sapiens
  source 1..565: mol_type = unassigned DNA
agcactgtgcagggcatgaaagaccaaccactctgtaaatgcacataaagaacaacctccttgagcaatctcaagcaagagaaagaagaggcttccgagctccagcaaaacaatgggaaaaaacatacccttatcttttccttctcattttcaaaggtaccgtgaatataagtagaagaaagacaccgtctcttcctttaaggaacttacagtcttatggaagagacacagatggaagtgcacaattaccgaatatcatcaaaaagcctgagaaaaagttatgcaaaagctactgtgtgagcacagaggctgtaaacctaatcctaagttgcaggtgcaagttctctcctgttgccctgagtgcccactcccaggccctctgtatgagtgacacttcagtctgccatggaacctggccctgctctggcctggctcctgctcctgagcctgctggcggattgtctgaaagctgctcagtcccgagacttcacagtgaaagacattatctacctccatccttcaaccacaccatatcctggtggatttaaatgtttcacctgtgaaa

SEQ ID NO: 16533 - DNA, 3273 bp, Homo sapiens
  source 1..3273: mol_type = unassigned DNA
agcagggaaatccggatgtctcggttatgaagtggagcagtgagtgtgagcctcaacatagttccagaactctccatccggactagttattgagcatctgcctctcatatcaccagtggccatctgaggtgtttccctggctctgaaggggtaggcacgatggccaggtgcttcagcctggtgttgcttctcacttccatctggaccacgaggctcctggtccaaggctctttgcgtgcagaagagctttccatccaggtgtcatgcagaattatggggatcacccttgtgagcaaaaaggcgaaccagcagctgaatttcacagaagctaaggaggcctgtaggctgctgggactaagtttggccggcaaggaccaagttgaaacagccttgaaagctagctttgaaacttgcagctatggctgggttggagatggattcgtggtcatctctaggattagcccaaaccccaagtgtgggaaaaatggggtgggtgtcctgatttggaaggttccagtgagccgacagtttgcagcctattgttacaactcatctgatacttggactaactcgtgcattccagaaattatcaccaccaaagatcccatattcaacactcaaactgcaacacaaacaacagaatttattgtcagtgacagtacctactcggtggcatccccttactctacaatacctgcccctactactactcctcctgctccagcttccacttctattccacggagaaaaaaattgatttgtgtcacagaagtttttatggaaactagcaccatgtctacagaaactgaaccatttgttgaaaataaagcagcattcaagaatgaagctgctgggtttggaggtgtccccacggctctgctagtgcttgctctcctcttctttggtgctgcagctggtcttggattttgctatgtcaaaaggtatgtgaaggccttcccttttacaaacaagaatcagcagaaggaaatgatcgaaaccaaagtagtaaaggaggagaaggccaatgatagcaaccctaatgaggaatcaaagaaaactgataaaaacccagaagagtccaagagtccaagcaaaactaccgtgcgatgcctggaagctgaagtttagatgagacagaaatgaggagacacacctgaggctggtttctttcatgctccttaccctgccccagctggggaaatcaaaagggccaaagaaccaaagaagaaagtccacccttggttcctaactggaatcagctcaggactgccattggactatggagtgcaccaaagagaatgcccttctccttattgtaaccctgtctggatcctatcctcctacctccaaagcttcccacggcctttctagcctggctatgtcctaataatatcccactgggagaaaggagttttgcaaagtgcaaggacctaaaacatctcatcagtatccagtggtaaaaaggcctcctggctgtctgaggctaggtgggttgaaagccaaggagtcactgagaccaaggctttctctactgattccgcagctcagaccctttcttcagctctgaaagagaaacacgtatcccacctgacatgtccttctgagcccggtaagagcaaaagaatggcagaaaagtttagcccctgaaagccatggagattctcataacttgagacctaatctctgtaaagctaaaataaagaaatagaacaaggctgaggatacgacagtacactgtcagcagggactgtaaacacagacagggtcaaagtgttttctctgaacacattgagttggaatcactgtttagaacacacacacttactttttctggtctctaccactgctgatattttctctaggaaatatacttttacaagtaacaaaaataaaaactcttataaatttctatttttatctgagttacagaaatgattactaaggaagattactcagtaatttgtttaaaaagtaataaaattcaacaaacatttgctgaatagctactatatgtcaagtgctgtgcaaggtattacactctgtaattgaatattattcctcaaaaaattgcacatagtagaacgctatctgggaagctatttttttcagttttgatatttctagcttatctacttccaaactaatttttatttttgctgagactaatcttattcattttctctaatatggcaaccattataaccttaatttattattaacatacctaagaagtacattgttacctctatataccaaagcacattttaaaagtgccattaacaaatgtatcactagccctcctttttccaacaagaagggactgagagatgcagaaatatttgtgacaaaaaattaaagcatttagaaaacttctttgctttcttatttacgtagatgcattatacctttcatgtaaaattaaagtgaggaccagatcatatcatattgtttgcaaaaataaaagggacaatgttggttgttaaaatacaagcatatgtcaaccaaacagcatatatcatatggggctattcatgctccaaacattttattttgagttggccaagtacatacacattaaacagtcctttactagagatgctggccctccatttccatccatttcagaattcaccagggagccagagatccaggatggctcattcgtctcacttttgaccgccctgcttctctagttttctctttccctcccgcttagactgctaattgtcttcttcccctcaccagtgaccccacagctccgtggttccttcggcccagatgccacaacctgctggcataatcttttccggttggcccacggagtataatcttaaaatttgatttcatttccaggcattaaaaatcaagagatttcacatggttacatttctgggttccctctaaaaatggaaagatctggaagtaaagaacccatgttccctcatagcaatcattatctgatactgagtagcagctgtcccctttcaatggggtctgctctttttgtttcaccacagtcctcatgactctctgttgcacactcatgccaaagtaaaggtgccctttcctatgaactttgtaacactgtggccttttcttcacacccagcccacgtccctcatatatatcacctgcctgccccagtaggtctatgagtttgaaactggtttgtcagtccttaagctttatcagcttcatccatttctcagggagtaaagaagaaaagagggaaagcgcctaagtagtgatcttccctctgtgtgttagctgaaa

SEQ ID NO: 16534 - DNA, 804 bp, Homo sapiens
  source 1..804: mol_type = unassigned DNA
gcccacccccgcccagcccgtgcctataaggccttggcaatgcaggggcccgcactgctcccagacgacatcagagatgaggacagcattgctgctccttgcagccctggctgtggctacagggccagcccttaccctgcgctgccacgtgtgcaccagctccagcaactgcaagcattctgtggtctgcccggccagctctcgcttctgcaagaccacgaacacagtggagcctctgagggggaatctggtgaagaaggactgtgcggagtcgtgcacacccagctacaccctgcaaggccaggtcagcagcggcaccagctccacccagtgctgccaggaggacctgtgcaatgagaagctgcacaacgctgcacccacccgcaccgccctcgcccacagtgccctcagcctggggctggccctgagcctcctggccgtcatcttagcccccagcctgtgaccttccccccagggaaggcccctcatgcctttccttccctttctctggggattccacacctctcttccccagccgcaacgggggtgccaggagccccaggctgagggcttccccgaaagtctgggaccaggtccaggtgggcatggaatgctgatgacttggagcaggccccacagaccccacagaggatgaagccaccccacagaggatgcagcccccagctgcatggaaggtggaggacagaagccctgtggatccccggatttcacactccttctgttttgttgccgtttatttttgtactcaaatctctacatggagataaatgatttaaaccagtg

SEQ ID NO: 16535 - DNA, 1181 bp, Homo sapiens
  source 1..1181: mol_type = unassigned DNA
cccggggccgcgcggctgcctgggaggctccgggccagccgcggtccagagcgcgcgaggttcggggagctcggccaggctgctggtacctgcgtccgcccggcgagcaggacaggctgctttggtttgtgacctccaggcaggacggccatcctctccagaatgaagatcttcttgccagtgctgctggctgcccttctgggtgtggagcgagccagctcgctgatgtgcttctcctgcttgaaccagaagagcaatctgtactgcctgaagccgaccatctgctccgaccaggacaactactgcgtgactgtgtctgctagtgccggcattgggaatctcgtgacatttggccacagcctgagcaagacctgttccccggcctgccccatcccagaaggcgtcaatgttggtgtggcttccatgggcatcagctgctgccagagctttctgtgcaatttcagtgcggccgatggcgggctgcgggcaagcgtcaccctgctgggtgccgggctgctgctgagcctgctgccggccctgctgcggtttggcccctgaccgcccagaccctgtcccccgatcccccagctcaggaaggaaagcccagccctttctggatcccacagtgtatgggagcccctgactcctcacgtgcctgatctgtgcccttggtcccaggtcaggcccaccccctgcacctccacctgccccagcccctgcctctgccccaagtggggccagctgccctcacttctggggtggatgatgtgaccttccttgggggaccgcggaagggacgagggttccctggagtcttacggtccaacatcaggaccaagtcccatggacatgctgacagggtccccagggagaccgtgtcagtagggatgtgtgcctggctgtgtacgtgggtgtgcagtgcacgtgagagcacgtggcggcttctgggggccatgtttggggagggaggtgtgccagcagcctggagagcctcagtccctgtagccccctgccctggcacagctgcatgcacttcaagggcagcctttgggggttggggtttctgccacttccgggtctaggccctgccccaaatccagccagtcctgccccagcccacccccacattggagccctcctgctgctttggtgcctcaaataaatacagatgtcccccagct

SEQ ID NO: 16536 - DNA, 1173 bp, Homo sapiens
  source 1..1173: mol_type = unassigned DNA
ccggggccgcgcggctgcctgggaggctccgggccagccgcggtccagagcgcgcgaggttcggggagctcggccaggctgctggtacctgcgtccgcccggcggacaggctgctttggtttgtgacctccaggcaggacggccatcctctccagaatgaagatcttcttgccagtgctgctggctgcccttctgggtgtggagcgagccagctcgctgatgtgcttctcctgcttgaaccagaagagcaatctgtactgcctgaagccgaccatctgctccgaccaggacaactactgcgtgactgtgtctgctagtgccggcattgggaatctcgtgacatttggccacagcctgagcaagacctgttccccggcctgccccatcccagaaggcgtcaatgttggtgtggcttccatgggcatcagctgctgccagagctttctgtgcaatttcagtgcggccgatggcgggctgcgggcaagcgtcaccctgctgggtgccgggctgctgctgagcctgctgccggccctgctgcggtttggcccctgaccgcccagaccctgtcccccgatcccccagctcaggaaggaaagcccagccctttctggatcccacagtgtatgggagcccctgactcctcacgtgcctgatctgtgcccttggtcccaggtcaggcccaccccctgcacctccacctgccccagcccctgcctctgccccaagtggggccagctgccctcacttctggggtggatgatgtgaccttccttgggggaccgcggaagggacgagggttccctggagtcttacggtccaacatcaggaccaagtcccatggacatgctgacagggtccccagggagaccgtgtcagtagggatgtgtgcctggctgtgtacgtgggtgtgcagtgcacgtgagagcacgtggcggcttctgggggccatgtttggggagggaggtgtgccagcagcctggagagcctcagtccctgtagccccctgccctggcacagctgcatgcacttcaagggcagcctttgggggttggggtttctgccacttccgggtctaggccctgccccaaatccagccagtcctgccccagcccacccccacattggagccctcctgctgctttggtgcctcaaataaatacagatgtcccccag

SEQ ID NO: 16537 - DNA, 1335 bp, Homo sapiens
  source 1..1335: mol_type = unassigned DNA
gaacagcccagcctggagcgggaagcagggacaagatgacctcaggaatcccaggctgcgggggtgcctgcgtcctcccctcccgagctccactccgcaggcgagacccccaacactgctccccgacactctccgaggcacccctcctccgtgctcacacccaaacacgtctgctcacccgtgggcttcccaccccgaacacaacgaggactgtccaggtgtcagtgacggtcaccccgacctggtcccctgtccggcctcgccaggacaggctgctttggtttgtgacctccaggcaggacggccatcctctccagaatgaagatcttcttgccagtgctgctggctgcccttctgggtgtggagcgagccagctcgctgatgtgcttctcctgcttgaaccagaagagcaatctgtactgcctgaagccgaccatctgctccgaccaggacaactactgcgtgactgtgtctgctagtgccggcattgggaatctcgtgacatttggccacagcctgagcaagacctgttccccggcctgccccatcccagaaggcgtcaatgttggtgtggcttccatgggcatcagctgctgccagagctttctgtgcaatttcagtgcggccgatggcgggctgcgggcaagcgtcaccctgctgggtgccgggctgctgctgagcctgctgccggccctgctgcggtttggcccctgaccgcccagaccctgtcccccgatcccccagctcaggaaggaaagcccagccctttctggatcccacagtgtatgggagcccctgactcctcacgtgcctgatctgtgcccttggtcccaggtcaggcccaccccctgcacctccacctgccccagcccctgcctctgccccaagtggggccagctgccctcacttctggggtggatgatgtgaccttccttgggggaccgcggaagggacgagggttccctggagtcttacggtccaacatcaggaccaagtcccatggacatgctgacagggtccccagggagaccgtgtcagtagggatgtgtgcctggctgtgtacgtgggtgtgcagtgcacgtgagagcacgtggcggcttctgggggccatgtttggggagggaggtgtgccagcagcctggagagcctcagtccctgtagccccctgccctggcacagctgcatgcacttcaagggcagcctttgggggttggggtttctgccacttccgggtctaggccctgccccaaatccagccagtcctgccccagcccacccccacattggagccctcctgctgctttggtgcctcaaataaatacagatgtcccccag

SEQ ID NO: 16538 - DNA, 1419 bp, Homo sapiens
  source 1..1419: mol_type = unassigned DNA
cagagcgcgcgaggttcggggagctcggccaggctgctggtacctgcgtccgcccggcggcctccccgaatgtttccaaagatctggggcgggagcgggcggagactgccgccaggagcctcccggccgccccagggctgcgcagccactggagcccatcacccaactccagacgctcctggctcctctacgtgggccgggagggacagccttgaggactaggggagggggcacgggaccttgcagagctcctggccggaaagggaggattgaccgcccccggcatatcaccccggagcactggaacccgcccccgcttcttgttttggcactggtggtgcttgcgagcaggacaggctgctttggtttgtgacctccaggcaggacggccatcctctccagaatgaagatcttcttgccagtgctgctggctgcccttctgggtgtggagcgagccagctcgctgatgtgcttctcctgcttgaaccagaagagcaatctgtactgcctgaagccgaccatctgctccgaccaggacaactactgcgtgactgtgtctgctagtgccggcattgggaatctcgtgacatttggccacagcctgagcaagacctgttccccggcctgccccatcccagaaggcgtcaatgttggtgtggcttccatgggcatcagctgctgccagagctttctgtgcaatttcagtgcggccgatggcgggctgcgggcaagcgtcaccctgctgggtgccgggctgctgctgagcctgctgccggccctgctgcggtttggcccctgaccgcccagaccctgtcccccgatcccccagctcaggaaggaaagcccagccctttctggatcccacagtgtatgggagcccctgactcctcacgtgcctgatctgtgcccttggtcccaggtcaggcccaccccctgcacctccacctgccccagcccctgcctctgccccaagtggggccagctgccctcacttctggggtggatgatgtgaccttccttgggggaccgcggaagggacgagggttccctggagtcttacggtccaacatcaggaccaagtcccatggacatgctgacagggtccccagggagaccgtgtcagtagggatgtgtgcctggctgtgtacgtgggtgtgcagtgcacgtgagagcacgtggcggcttctgggggccatgtttggggagggaggtgtgccagcagcctggagagcctcagtccctgtagccccctgccctggcacagctgcatgcacttcaagggcagcctttgggggttggggtttctgccacttccgggtctaggccctgccccaaatccagccagtcctgccccagcccacccccacattggagccctcctgctgctttggtgcctcaaataaatacagatgtccccca

SEQ ID NO: 16539 - DNA, 740 bp, Homo sapiens
  source 1..740: mol_type = unassigned DNA
agagcgcgcgaggttcggggagctcggccaggctgctggtacctgcgtccgcccggcgggtctcactctgttgcccaggctgcagtgcagtggcatgatcatagttcacttcagtcttgaactccctggctcaagagatcctcccacctcagcctcccaagtagctgaccacagagcaggacaggctgctttggtttgtgacctccaggcaggacggccatcctctccagaatgaagatcttcttgccagtgctgctggctgcccttctgggtgtggagcgagccagctcgctgatgtgcttctcctgcttgaaccagaagagcaatctgtactgcctgaagccgaccatctgctccgaccaggacaactactgcgtgactgtgtctgctagtgccggcattgggaatctcgtgacatttggccacagcctgagcaagacctgttccccggcctgccccatcccagaaggcgtcaatgttggtgtggcttccatgggcatcagctgctgccagagctttctgtgcaatttcagtgcggccgatggcgggctgcgggcaagcgtcaccctgctgggtgccgggctgctgctgagcctgctgccggccctgctgcggtttggcccctgaccgcccagaccctgtcccccgatcccccagctcaggaaggaaagcccagccctttctggatcccacagtgtatgggagcccctgactcctcacgtgcctgatctgtgcccttg

SEQ ID NO: 16540 - DNA, 1256 bp, Homo sapiens
  source 1..1256: mol_type = unassigned DNA
cagccgcggtccagagcgcgcgaggttcggggagctcggccaggctgctggtacctgcgtccgcccggcgggtctcactctgttgcccaggctgcagtgcagtggcatgatcatagttcacttcagtcttgaactccctggctcaagagatcctcccacctcagcctcccaagtagctgaccacaggacaggctgctttggtttgtgacctccaggcaggacggccatcctctccagaatgaagatcttcttgccagtgctgctggctgcccttctgggtgtggagcgagccagctcgctgatgtgcttctcctgcttgaaccagaagagcaatctgtactgcctgaagccgaccatctgctccgaccaggacaactactgcgtgactgtgtctgctagtgccggcattgggaatctcgtgacatttggccacagcctgagcaagacctgttccccggcctgccccatcccagaaggcgtcaatgttggtgtggcttccatgggcatcagctgctgccagagctttctgtgcaatttcagtgcggccgatggcgggctgcgggcaagcgtcaccctgctgggtgccgggctgctgctgagcctgctgccggccctgctgcggtttggcccctgaccgcccagaccctgtcccccgatcccccagctcaggaaggaaagcccagccctttctggatcccacagtgtatgggagcccctgactcctcacgtgcctgatctgtgcccttggtcccaggtcaggcccaccccctgcacctccacctgccccagcccctgcctctgccccaagtggggccagctgccctcacttctggggtggatgatgtgaccttccttgggggaccgcggaagggacgagggttccctggagtcttacggtccaacatcaggaccaagtcccatggacatgctgacagggtccccagggagaccgtgtcagtagggatgtgtgcctggctgtgtacgtgggtgtgcagtgcacgtgagagcacgtggcggcttctgggggccatgtttggggagggaggtgtgccagcagcctggagagcctcagtccctgtagccccctgccctggcacagctgcatgcacttcaagggcagcctttgggggttggggtttctgccacttccgggtctaggccctgccccaaatccagccagtcctgccccagcccacccccacattggagccctcctgctgctttggtgcctcaaataaatacagatgtcccccagc

SEQ ID NO: 16541 - DNA, 868 bp, Homo sapiens
  source 1..868: mol_type = unassigned DNA
caggctgctggtacctgcgtccgcccggcggcctccccgaatgtttccaaagatctggggcgggagcgggcggagactgccgccaggagcctcccggccgccccagggctgcgcagccactggagcccatcacccaactccagacgctcctggctcctctacgtgggccgggagggacagccttgaggactaggggagggggcacgggaccttgcagagctcctggccggaaagggaggattgaccgcccccggcatatcaccccggagcactggaacccgcccccgcttcttgttttggcactggtggtgcttgcggacaggctgctttggtttgtgacctccaggcaggacggccatcctctccagaatgaagatcttcttgccagtgctgctggctgcccttctgggtgtggagcgagccagctcgctgatgtgcttctcctgcttgaaccagaagagcaatctgtactgcctgaagccgaccatctgctccgaccaggacaactactgcgtgactgtgtctgctagtgccggcattgggaatctcgtgacatttggccacagcctgagcaagacctgttccccggcctgccccatcccagaaggcgtcaatgttggtgtggcttccatgggcatcagctgctgccagagctttctgtgcaatttcagtgcggccgatggcgggctgcgggcaagcgtcaccctgctgggtgccgggctgctgctgagcctgctgccggccctgctgcggtttggcccctgaccgcccagaccctgtcccccgatcccccagctcaggaaggaaagcccagccctttctggatcccacagtgtatgggagcccctgactcctcacgtgcctgatc

SEQ ID NO: 16542 - DNA, 857 bp, Homo sapiens
  source 1..857: mol_type = unassigned DNA
ttcggggagctcggccaggctgctggtacctgcgtccgcccggcggcaggacggccatcctctccagaatgaagatcttcttgccagtgctgctggctgcccttctgggtgtggagcgagccagctcgctgatgtgcttctcctgcttgaaccagaagagcaatctgtactgcctgaagccgaccatctgctccgaccaggacaactactgcgtgactgtgtctgctagtgccggcattgggaatctcgtgacatttggccacagcctgagcaagacctgttccccggcctgccccatcccagaaggcgtcaatgttggtgtggcttccatgggcatcagctgctgccagagctttctgtgcaatttcagtgcggccgatggcgggctgcgggcaagcgtcaccctgctgggtgccgggctgctgctgagcctgctgccggccctgctgcggtttggcccctgaccgcccagaccctgtcccccgatcccccagctcaggaaggaaagcccagccctttctggatcccacagtgtatgggagcccctgactcctcacgtgcctgatctgtgcccttggtcccaggtcaggcccaccccctgcacctccacctgccccagcccctgcctctgccccaagtggggccagctgccctcacttctggggtggatgatgtgaccttccttgggggaccgcggaagggacgagggttccctggagtcttacggtccaacatcaggaccaagtcccatggacatgctgacagggtccccagggagaccgtgtcagtagggatgtgtgcctggctgtgtacgtgggtgtgcagtgcacgtgagagcacgtggcggcttctggggg

SEQ ID NO: 16543 - DNA, 402 bp, Homo sapiens
  source 1..402: mol_type = unassigned DNA
atgaaaccccagtttgttgggatcttgctcagctccctgctaggggctgccttgggaaaccgaatgcggtgctacaactgtggtggaagccccagcagttcttgcaaagaggccgtgaccacctgtggcgagggcagaccccagccaggcctggaacagatcaagctacctggaaaccccccagtgaccttgattcaccaacatccagcctgcgtcgcagcccatcattgcaatcaagtggagacagagtcggtgggagacgtgacttatccagcccacagggactgctacctgggagacctgtgcaacagcgccgtggcaagccatgtggcccctgcaggcattttggctgcagcagctaccgccctgacctgtctcttgccaggactgtggagcggatag

SEQ ID NO: 16544 - DNA, 523 bp, Homo sapiens
  source 1..523: mol_type = unassigned DNA
atgaaaccccagtttgttgggatcttgctcagctccctgctaggggctgccttgggaaaccgaatgcggtgctacaactgtggtggaagccccagcagttcttgcaaagaggccgtgaccacctgtggcgagggcagaccccagccaggcctggaacagatcaagctacctggaaaccggaggtgttttttgagggggctgaaaatccctttgggctccttgaaatcacatctgctctgccccagaaggcaagtcctgaagccaggagtccaacaccccagtttcattctctctctcagccccagtgaccttgattcaccaacatccagcctgcgtcgcagcccatcattgcaatcaagtggagacagagtcggtgggagacgtgacttatccagcccacagggactgctacctgggagacctgtgcaacagcgccgtggcaagccatgtggcccctgcaggcattttggctgcagcagctaccgccctgacctgtctcttgccaggactgtggagcggatag

SEQ ID NO: 16545 - DNA, 402 bp, Homo sapiens; identical to SEQ ID NO: 16543
  source 1..402: mol_type = unassigned DNA

SEQ ID NO: 16546 - DNA, 1266 bp, Homo sapiens
  source 1..1266: mol_type = unassigned DNA
cccatggcagtcttattcctcctcctgttcctatgtggaactccccaggctgcagacaacatgcaggccatctatgtggccttgggggaggcagtagagctgccatgtccctcaccacctactctacatggggacgaacacctgtcatggttctgcagccctgcagcaggctccttcaccaccctggtagcccaagtccaagtgggcaggccagccccagaccctggaaaaccaggaagggaatccaggctcagactgctggggaactattctttgtggttggagggatccaaagaggaagatgccgggcggtactggtgcactgtgctaggtcagcaccacaactaccagaactggagggtgtacgacgtcttggtgctcaaaggatcccagttatctgcaagggctgcagatggatccccctgcaatgtcctcctgtgctctgtggtccccagcagacgcatggactctgtgacctggcaggaagggaagggtcccgtgaggggccgtgttcagtccttctggggcagtgaggctgccctgctcttggtgtgtcctggggaggggctttctgagcccaggagccgaagaccaagaatcatccgctgcctcatgactcacaacaaaggggtcagctttagcctggcagcctccatcgatgcttctcctgccctctgtgccccttccacgggctgggacatgccttggattctgatgctgctgctcacaatgggccagggagttgtcatcctggccctcagcatcgtgctctggaggcagagggtccgtggggctccaggcagaggaaaccgaatgcggtgctacaactgtggtggaagccccagcagttcttgcaaagaggccgtgaccacctgtggcgagggcagaccccagccaggcctggaacagatcaagctacctggaaaccccccagtgaccttgattcaccaacatccagcctgcgtcgcagcccatcattgcaatcaagtggagacagagtcggtgggagacgtgacttatccagcccacagggactgctacctgggagacctgtgcaacagcgccgtggcaagccatgtggcccctgcaggcattttggctgcagcagctaccgccctgacctgtctcttgccaggactgtggagcggatagggggagtaggagtagagaagggaacaagggagcaagggaacaagggacatctgaacatctaatgtgagaagacaaacatccttctgtgagtcattaaaatctatgaaccactct

SEQ ID NO: 16547 - DNA, 402 bp, Homo sapiens; identical to SEQ ID NO: 16543
  source 1..402: mol_type = unassigned DNA

SEQ ID NO: 16548 - DNA, 402 bp, Homo sapiens; identical to SEQ ID NO: 16543
  source 1..402: mol_type = unassigned DNA

SEQ ID NO: 16549 - DNA, 1266 bp, Homo sapiens
  source 1..1266: mol_type = unassigned DNA
cccatggcagtcttattcctcctcctgttcctatgtggaactccccaggctgcagacaacatgcaggccatctatgtggccttgggggaggcagtagagctgccatgtccctcaccacctactctacatggggacgaacacctgtcatggttctgcagccctgcagcaggctccttcaccaccctggtagcccaagtccaagtgggcaggccagccccagaccctggaaaaccaggaagggaatccaggctcagactgctggggaactattctttgtggttggagggatccaaagaggaagatgccgggcggtactggtgcgctgtgctaggtcagcaccacaactaccagaactggagggtgtacgacgtcttggtgctcaaaggatcccagttatctgcaagggctgcagatggatccccctgcaatgtcctcctgtgctctgtggtccccagcagacgcatggactctgtgacctggcaggaagggaagggtcccgtgaggggccgtgttcagtccttctggggcagtgaggctgccctgctcttggtgtgtcctggggaggggctttctgagcccaggagccgaagaccaagaatcatccgctgcctcatgactcacaacaaaggggtcagctttagcctggcagcctccatcgatgcttctcctgccctctgtgccccttccacgggctgggacatgccttggattctgatgctgctgctcacaatgggccagggagttgtcatcctggccctcagcatcgtgctctggaggcagagggtccgtggggctccaggcagaggaaaccgaatgcggtgctacaactgtggtggaagccccagcagttcttgcaaagaggccgtgaccacctgtggcgagggcagaccccagccaggcctggaacagatcaagctacctggaaaccccccagtgaccttgattcaccaacatccagcctgcgtcgcagcccatcattgcaatcaagtggagacagagtcggtgggagacgtgacttatccagcccacagggactgctacctgggagacctgtgcaacagcgccgtggcaagccatgtggcccctgcaggcattttggctgcagcagctaccgccctgacctgtctcttgccaggactgtggagcggatagggggagtaggagtagagaagggaacaagggagcaagggaacaagggacatctgaacatctaatgtgagaagacaaacatccttctgtgagtcattaaaatctatgaaccactct

SEQ ID NO: 16550 - DNA, 402 bp, Homo sapiens
  source 1..402: mol_type = unassigned DNA
atgaaaccccagtttgttgggatcttgctcagctccctgctaggggctgccttgggaaaccgaatgcggtgctacaactgtggtggaagccccagcagtacttgcaaagaggccgtgaccacctgtggcgagggcagaccccagccaggcctggaacagatcaagctacctggaaaccccccagtgaccttgattcaccaacatccagcctgcgtcgcagcccatcattgcaatcaagtggagacagagtcggtgggagacgtgacttatccagcccacagggactgctacctgggagacctgtgcaacagcgccgtggcaagccatgtggcccctgcaggcattttggctgcagcagctaccgccctgacctgtctcttgccaggactgtggagcggatag

SEQ ID NO: 16551 - DNA, 402 bp, Homo sapiens; identical to SEQ ID NO: 16543
  source 1..402: mol_type = unassigned DNA

SEQ ID NO: 16552 - DNA, 402 bp, Homo sapiens; identical to SEQ ID NO: 16543
  source 1..402: mol_type = unassigned DNA

SEQ ID NO: 16553 - DNA, 523 bp, Homo sapiens; identical to SEQ ID NO: 16544
  source 1..523: mol_type = unassigned DNA

SEQ ID NO: 16554 - DNA, 951 bp, Homo sapiens
  source 1..951: mol_type = unassigned DNA
ggtccgcgtctgcggctgcgttccccgaaagacgaggctgcgcccggattccggtccgcagggagaccgaagggcacagctccccgcgccgcgcacgccgcccgagcccggagtgcggacacccccgggatgcttgcgccccagaggacccgcgccccaagcccccgcgccgcccccaggcccacccggagcatgctgcctgcagccatgaagggcctcggcctggcgctgctggccgtcctgctgtgctcggcgcccgctcatggcctgtggtgccaggactgcaccctgaccaccaactccagccattgcaccccaaagcagtgccagccgtccgacacggtgtgtgccagtgtccgaatcaccgatcccagcagcagcaggaaggatcactcggtgaacaagatgtgtgcctcctcctgtgacttcgttaagcgacactttttctcagactatctgatggggtttattaactctgggatcttaaaggtcgacgtggactgctgcgagaaggatttgtgcaatggggcggcaggggcagggcacagcccctgggccctggccggggggctcctgctcagcctggggcctgccctcctctgggctgggccctgatgtctcctccttcccacggggcttctgagcttgctcccctgagcctgtggctgccctctccccagcctggcgtggctggggctgggggcagccttggcccagctccgtggctgtggcctgtggctctcactcctcccccgacgtgaagcctccctgtctctccgccagctctgagtcccaggcagctggacatctccaggaaaccaggccatctgggcaggaggcctggggatgagggtggggggggacccccaggtcccggaggggaagtgaagcaacagcccagctggaagggcgtcttctgcggagaaataaagtcacttttgagtcctgaga

SEQ ID NO: 16555 - DNA, 1056 bp, Homo sapiens
  source 1..1056: mol_type = unassigned DNA
gaccccaggggtctgcgaacccggacctgcgcgtggcgccgcgccgggtacctccccctctctgcgtctttgtgcattttgcttcctttcgcagtaaacgttcttccgagaaattccaaggggatctcagccaagcagagggggaagggatcctgcccacgcctggggagaccgaagggcacagctccccgcgccgcgcacgccgcccgagcccggagtgcggacacccccgggatgcttgcgccccagaggacccgcgccccaagcccccgcgccgcccccaggcccacccggagcatgctgcctgcagccatgaagggcctcggcctggcgctgctggccgtcctgctgtgctcggcgcccgctcatggcctgtggtgccaggactgcaccctgaccaccaactccagccattgcaccccaaagcagtgccagccgtccgacacggtgtgtgccagtgtccgaatcaccgatcccagcagcagcaggaaggatcactcggtgaacaagatgtgtgcctcctcctgtgacttcgttaagcgacactttttctcagactatctgatggggtttattaactctgggatcttaaaggtcgacgtggactgctgcgagaaggatttgtgcaatggggcggcaggggcagggcacagcccctgggccctggccggggggctcctgctcagcctggggcctgccctcctctgggctgggccctgatgtctcctccttcccacggggcttctgagcttgctcccctgagcctgtggctgccctctccccagcctggcgtggctggggctgggggcagccttggcccagctccgtggctgtggcctgtggctctcactcctcccccgacgtgaagcctccctgtctctccgccagctctgagtcccaggcagctggacatctccaggaaaccaggccatctgggcaggaggcctggggatgagggtggggggggacccccaggtcccggaggggaagtgaagcaacagcccagctggaagggcgtcttctgcggagaaataaagtcacttttgagtcctgaga

SEQ ID NO: 16556 - DNA, 925 bp, Homo sapiens
  source 1..925: mol_type = unassigned DNA
agtggcaggtcccacccgctcccgcccctgccgctcattcctgtccggacgcacctgcagctccccggggagaagaggacgccccccatccgctcccccacacaggcttgcgccccagaggacccgcgccccaagcccccgcgccgcccccaggcccacccggagcatgctgcctgcagccatgaagggcctcggcctggcgctgctggccgtcctgctgtgctcggcgcccgctcatggcctgtggtgccaggactgcaccctgaccaccaactccagccattgcaccccaaagcagtgccagccgtccgacacggtgtgtgccagtgtccgaatcaccgatcccagcagcagcaggaaggatcactcggtgaacaagatgtgtgcctcctcctgtgacttcgttaagcgacactttttctcagactatctgatggggtttattaactctgggatcttaaaggtcgacgtggactgctgcgagaaggatttgtgcaatggggcggcaggggcagggcacagcccctgggccctggccggggggctcctgctcagcctggggcctgccctcctctgggctgggccctgatgtctcctccttcccacggggcttctgagcttgctcccctgagcctgtggctgccctctccccagcctggcgtggctggggctgggggcagccttggcccagctccgtggctgtggcctgtggctctcactcctcccccgacgtgaagcctccctgtctctccgccagctctgagtcccaggcagctggacatctccaggaaaccaggccatctgggcaggaggcctggggatgagggtggggggggacccccaggtcccggaggggaagtgaagcaacagcccagctggaagggcgtcttctgcggagaaataaagtcacttttgagtcctgaga

SEQ ID NO: 16557 - DNA, 2440 bp, Homo sapiens
  source 1..2440: mol_type = unassigned DNA
cttcagtctcagttctgaaaatagatcatcatggtggcaccaaagagtcacacagatgactgggctcctgggcctttctccagtaagccacagaggagtcagctgcaaatattctcttctgttctacagacctctctcctcttcctgctcatgggactaagagcctctggaaaggactcagccccaacagtggtgtcagggatcctagggggttccgtgactctccccctaaacatctcagtagacacagagattgagaacgtcatctggattggtcccaaaaatgctcttgctttcgcacgtcccaaagaaaatgtaaccattatggtcaaaagctacctgggccgactagacatcaccaagtggagttactccctgtgcatcagcaatctgactctgaatgatgcaggatcctacaaagcccagataaaccaaaggaattttgaagtcaccactgaggaggaattcaccctgttcgtctatgagcagctgcaggagccccaagtcaccatgaagtctgtgaaggtgtctgagaacttctcctgtaacatcactctaatgtgctccgtgaagggggcagagaaaagtgttctgtacagctggaccccaagggaaccccatgcttctgagtccaatggaggctccattcttaccgtctcccgaacaccatgtgacccagacctgccatacatctgcacagcccagaaccccgtcagccagagaagctccctccctgtccatgttgggcagttctgtacagatccaggagcctccagaggaggaacaacgggggagactgtggtaggggtcctgggagagccagtcaccctgccacttgcactcccagcctgccgggacacagagaaggttgtctggttgtttaacacatccatcattagcaaagagagggaagaagcagcaacggcagatccactcattaaatccagggatccttacaagaacagggtgtgggtctccagccaggactgctccctgaagatcagccagctgaagatagaggacgccggcccctaccatgcctacgtgtgctcagaggcctccagcgtcaccagcatgacacatgtcaccctgctcatctaccgcaggctgaggaagcccaaaatcacgtggagcctcaggcacagtgaggatggcatctgcaggatcagcctgacctgctccgtggaggacgggggaaacactgtcatgtacacatggaccccgctgcagaaggaagctgttgtgtcccaaggggaatcacacctcaatgtctcatggagaagcagtgaaaatcaccccaacctcacatgcacagccagcaaccctgtcagcaggagttcccaccagtttctttctgagaacatctgttcaggacctgagagaaacacaaagctttggattgggttgttcctgatggtttgccttctgtgcgttgggatcttcagctggtgcatttggaagcgaaaaggacggtgttcagtcccagccttctgttccagccaagctgaggccccagcggatacaccagaacccacagctggccacacgctatactctgtgctctcccaaggatatgagaagctggacactcccctcaggcctgccaggcaacagcctacacccacctcagacagcagctctgacagcaacctcacaactgaggaggatgaggacaggcctgaggtgcacaagcccatcagtggaagatatgaggtatttgaccaggtcactcaggagggcgctggacatgacccagcccctgagggccaagcagactatgatcccgtcactccatatgtcacggaagttgagtctgtggttggagagaacaccatgtatgcacaagtgttcaacttacagggaaagaccccagtttctcagaaggaagagagctcagccacaatctactgctccatacggaaacctcaggtggtggtgccaccaccacaacagaatgatcttgagattcctgaaagtcctacctatgaaaatttcacctgaaaggaaaagcagctgctgcctctctcctgggaccgtggggttggaaagtcagctggacctcatggggcctggggctcacagacagaagcacctcagaatttccttcagtgcctcagagatgcctggatgtggcccctccccctccttctcacccttaaggactcccaaacccattaatagttcagacacaggctccttcttggagcctatgggcttcagatgtctttgccccatttgtcacctcgcacacttatagcgtttcctcctcgaaattctaccaagactggtcaaatgttgctgaggggcctggaccagctgtcctttacaccaccttctcaacactgctgaaaagaacccaagagaattgtcacacatgacacaagatgtacataatatcatgctcactgcagtgttatttaaaataaaaggcaggaaataa

SEQ ID NO: 16558 - DNA, 2049 bp, Homo sapiens
  source 1..2049: mol_type = unassigned DNA
gctgtggtaagtgcatcctccttcagtctcagttctgaaaatagatcatcatggtggcaccaaagagtcacacagatgactgggctcctgggcctttctccagtaagccacagaggagtcagctgcaaatattctcttctgttctacagacctctctcctcttcctgctcatgggactaagagcctctggaaaggactcagccccaacagtggtgtcagggatcctagggggttccgtgactctccccctaaacatctcagtagacacagagattgagaacgtcatctggattggtcccaaaaatgctcttgctttcgcacgtcccaaagaaaatgtaaccattatggtcaaaagctacctgggccgactagacatcaccaagtggagttactccctgtgcatcagcaatctgactctgaatgatgcaggatcctacaaagcccagataaaccaaaggaattttgaagtcaccactgaggaggaattcaccctgttcgtctatgagcagctgcaggagccccaagtcaccatgaagtctgtgaaggtgtctgagaacttctcctgtaacatcactctaatgtgctccgtgaagggggcagagaaaagtgttctgtacagctggaccccaagggaaccccatgcttctgagtccaatggaggctccattcttaccgtctcccgaacaccatgtgacccagacctgccatacatctgcacagcccagaaccccgtcagccagagaagctccctccctgtccatgttgggcagttctgtacagatccaggagcctccagaggaggaacaacgggggagactgtggtaggggtcctgggagagccagtcaccctgccacttgcactcccagcctgccgggacacagagaaggttgtctggttgtttaacacatccatcattagcaaagagagggaagaagcagcaacggcagatccactcattaaatccagggatccttacaagaacagggtgtgggtctccagccaggactgctccctgaagatcagccagctgaagatagaggacgccggcccctaccatgcctacgtgtgctcagaggcctccagcgtcaccagcatgacacatgtcaccctgctcatctaccgacctgagagaaacacaaagctttggattgggttgttcctgatggtttgccttctgtgcgttgggatcttcagctggtgcatttggaagcgaaaaggacggtgttcagtcccagccttctgttccagccaagctgaggccccagcggatacaccaggatatgagaagctggacactcccctcaggaagcccatcagtggaagatatgaggtatttgaccaggtcactcaggagggcgctggacatgacccagcccctgagggccaagcagactatgatcccgtcactccatatgtcacggaagttgagtctgtggttggagagaacaccatgtatgcacaagtgttcaacttacagggaaagaccccagtttctcagaaggaagagagctcagccacaatctactgctccatacggaaacctcaggtggtgccaccaccacaacagaatgatcttgagattcctgaaagtcctacctatgaaaatttcacctgaaaggaaaagcagctgctgcctctctcctgggaccgtggggttggaaagtcagctggacctcatggggcctggggctcacagacagaagcacctcagaatttccttcagtgcctcagagatgcctggatgtggcccctccccctccttctcacccttaaggactcccaaacccattaatagttcagacacaggctccttcttggagcctatgggcttcagatgtctttgccccatttgtcacctcgcacacttatagcgtttcctcctcgaaattctaccaagactggtcaaatgttgctgaggggcctggaccagctgtcctttacaccaccttctcaacactgctgaaaagaacccaagagaattgtcacacatgacacaagatgtacataatatcatgctcactgcagtgttatttaaaataaaaggcagg

SEQ ID NO: 16559 - DNA, 1463 bp, Homo sapiens
  source 1..1463: mol_type = unassigned DNA
gaaggttgtctggttgtttaacacatccatcattagcaaagagagggaagaagcagcaacggcagatccactcattaaatccagggatccttacaagaacagggtgtgggtctccagccaggactgctccctgaagatcagccagctgaagatagaggacgccggcccctaccatgcctacgtgtgctcagaggcctccagcgtcaccagcatgacacatgtcaccctgctcatctaccgcaggctgaggaagcccaaaatcacgtggagcctcaggcacagtgaggatggcatctgcaggatcagcctgacctgctccgtggaggacgggggaaacactgtcatgtacacatggaccccgctgcagaaggaagctgttgtgtcccaaggggaatcacacctcaatgtctcatggagaagcagtgaaaatcaccccaacctcacatgcacagccagcaaccctgtcagcaggagttcccaccagtttctttctgagaacatctgttcaggacctgagagaaacacaaagctttggattgggttgttcctgatggtttgccttctgtgcgttgggatcttcagctggtgcatttggaagcgaaaaggacggtgttcagtcccagccttctgttccagccaagctgaggccccagcggatacaccaggatatgagaagctggacactcccctcaggcctgccaggcaacagcctacacccacctcagacagcagctctgacagcaacctcacaactgaggaggatgaggacaggcctgaggtgcacaagcccatcagtggaagatatgaggtatttgaccaggtcactcaggagggcgctggacatgacccagcccctgagggccaagcagactatgatcccgtcactccatatgtcacggaagttgagtctgtggttggagagaacaccatgtatgcacaagtgttcaacttacaggtggtgccaccaccacaacagaatgatcttgagattcctgaaagtcctacctatgaaaatttcacctgaaaggaaaagcagctgctgcctctctcctgggaccgtggggttggaaagtcagctggacctcatggggcctggggctcacagacagaagcacctcagaatttccttcagtgcctcagagatgcctggatgtggcccctccccctccttctcacccttaaggactcccaaacccattaatagttcagacacaggctccttcttggagcctatgggcttcagatgtctttgccccatttgtcacctcgcacacttatagcgtttcctcctcgaaattctaccaagactggtcaaatgttgctgaggggcctggaccagctgtcctttacaccaccttctcaacactgctgaaaagaacccaagagaattgtcacacatgacacaagatgtacataatatcatgctcactgcagtgttatttaaaataaaaggcaggaaataa

SEQ ID NO: 16560 - DNA, 2340 bp, Homo sapiens
  source 1..2340: mol_type = unassigned DNA
gctgtggtaagtgcatcctccttcagtctcagttctgaaaatagatcatcatggtggcaccaaagagtcacacagatgactgggctcctgggcctttctccagtaagccacagaggagtcagctgcaaatattctcttctgttctacagacctctctcctcttcctgctcatgggactaagagcctctggaaaggactcagccccaacagtggtgtcagggatcctagggggttccgtgactctccccctaaacatctcagtagacacagagattgagaacgtcatctggattggtcccaaaaatgctcttgctttcgcacgtcccaaagaaaatgtaaccattatggtcaaaagctacctgggccgactagacatcaccaagtggagttactccctgtgcatcagcaatctgactctgaatgatgcaggatcctacaaagcccagataaaccaaaggaattttgaagtcaccactgaggaggaattcaccctgttcgtctatgagcagctgcaggagccccaagtcaccatgaagtctgtgaaggtgtctgagaacttctcctgtaacatcactctaatgtgctccgtgaagggggcagagaaaagtgttctgtacagctggaccccaagggaaccccatgcttctgagtccaatggaggctccattcttaccgtctcccgaacaccatgtgacccagacctgccatacatctgcacagcccagaaccccgtcagccagagaagctccctccctgtccatgttgggcagttctgtacagatccaggagcctccagaggaggaacaacgggggagactgtggtaggggtcctgggagagccagtcaccctgccacttgcactcccagcctgccgggacacagagaaggttgtctggttgtttaacacatccatcattagcaaagagagggaagaagcagcaacggcagatccactcattaaatccagggatccttacaagaacagggtgtgggtctccagccaggactgctccctgaagatcagccagctgaagatagaggacgccggcccctaccatgcctacgtgtgctcagaggcctccagcgtcaccagcatgacacatgtcaccctgctcatctaccgcaggctgaggaagcccaaaatcacgtggagcctcaggcacagtgaggatggcatctgcaggatcagcctgacctgctccgtggaggacgggggaaacactgtcatgtacacatggaccccgctgcagaaggaagctgttgtgtcccaaggggaatcacacctcaatgtctcatggagaagcagtgaaaatcaccccaacctcacatgcacagccagcaaccctgtcagcaggagttcccaccagtttctttctgagaacatctgttcaggacctgagagaaacacaaagctttggattgggttgttcctgatggtttgccttctgtgcgttgggatcttcagctggtgcatttggaagcgaaaaggacggtgttcagtcccagccttctgttccagccaagctgaggccccagcggatacaccaggatatgagaagctggacactcccctcaggcctgccaggcaacagcctacacccacctcagacagcagctctgacagcaacctcacaactgaggaggatgaggacaggcctgaggtgcacaagcccatcagtggaagatatgaggtatttgaccaggtcactcaggagggcgctggacatgacccagcccctgagggccaagcagactatgatcccgtcactccatatgtcacggaagttgagtctgtggttggagagaacaccatgtatgcacaagtgttcaacttacaggtggtgccaccaccacaacagaatgatcttgagattcctgaaagtcctacctatgaaaatttcacctgaaaggaaaagcagctgctgcctctctcctgggaccgtggggttggaaagtcagctggacctcatggggcctggggctcacagacagaagcacctcagaatttccttcagtgcctcagagatgcctggatgtggcccctccccctccttctcacccttaaggactcccaaacccattaatagttcagacacaggctccttcttggagcctatgggcttcagatgtctttgccccatttgtcacctcgcacacttatagcgtttcctcctcgaaattctaccaagactggtcaaatgttgctgaggggcctggaccagctgtcctttacaccaccttctcaacactgctgaaaagaacccaagagaattgtcacacatgacacaagatgtacataatatcatgctcactgcagtgttatttaaaataaaaggcagg

SEQ ID NO: 16561 - DNA, 2451 bp, Homo sapiens
  source 1..2451: mol_type = unassigned DNA
gctgtggtaagtgcatcctccttcagtctcagttctgaaaatagatcatcatggtggcaccaaagagtcacacagatgactgggctcctgggcctttctccagtaagccacagaggagtcagctgcaaatattctcttctgttctacagacctctctcctcttcctgctcatgggactaagagcctctggaaaggactcagccccaacagtggtgtcagggatcctagggggttccgtgactctccccctaaacatctcagtagacacagagattgagaacgtcatctggattggtcccaaaaatgctcttgctttcgcacgtcccaaagaaaatgtaaccattatggtcaaaagctacctgggccgactagacatcaccaagtggagttactccctgtgcatcagcaatctgactctgaatgatgcaggatcctacaaagcccagataaaccaaaggaattttgaagtcaccactgaggaggaattcaccctgttcgtctatgagcagctgcaggagccccaagtcaccatgaagtctgtgaaggtgtctgagaacttctcctgtaacatcactctaatgtgctccgtgaagggggcagagaaaagtgttctgtacagctggaccccaagggaaccccatgcttctgagtccaatggaggctccattcttaccgtctcccgaacaccatgtgacccagacctgccatacatctgcacagcccagaaccccgtcagccagagaagctccctccctgtccatgttgggcagttctgtacagatccaggagcctccagaggaggaacaacgggggagactgtggtaggggtcctgggagagccagtcaccctgccacttgcactcccagcctgccgggacacagagaaggttgtctggttgtttaacacatccatcattagcaaagagagggaagaagcagcaacggcagatccactcattaaatccagggatccttacaagaacagggtgtgggtctccagccaggactgctccctgaagatcagccagctgaagatagaggacgccggcccctaccatgcctacgtgtgctcagaggcctccagcgtcaccagcatgacacatgtcaccctgctcatctaccgcaggctgaggaagcccaaaatcacgtggagcctcaggcacagtgaggatggcatctgcaggatcagcctgacctgctccgtggaggacgggggaaacactgtcatgtacacatggaccccgctgcagaaggaagctgttgtgtcccaaggggaatcacacctcaatgtctcatggagaagcagtgaaaatcaccccaacctcacatgcacagccagcaaccctgtcagcaggagttcccaccagtttctttctgagaacatctgttcaggacctgagagaaacacaaagctttggattgggttgttcctgatggtttgccttctgtgcgttgggatcttcagctggtgcatttggaagcgaaaaggacggtgttcagtcccagccttctgttccagccaagctgaggccccagcggatacaccagaacccacagctggccacacgctatactctgtgctctcccaaggatatgagaagctggacactcccctcaggcctgccaggcaacagcctacacccacctcagacagcagctctgacagcaacctcacaactgaggaggatgaggacaggcctgaggtgcacaagcccatcagtggaagatatgaggtatttgaccaggtcactcaggagggcgctggacatgacccagcccctgagggccaagcagactatgatcccgtcactccatatgtcacggaagttgagtctgtggttggagagaacaccatgtatgcacaagtgttcaacttacagggaaagaccccagtttctcagaaggaagagagctcagccacaatctactgctccatacggaaacctcaggtggtgccaccaccacaacagaatgatcttgagattcctgaaagtcctacctatgaaaatttcacctgaaaggaaaagcagctgctgcctctctcctgggaccgtggggttggaaagtcagctggacctcatggggcctggggctcacagacagaagcacctcagaatttccttcagtgcctcagagatgcctggatgtggcccctccccctccttctcacccttaaggactcccaaacccattaatagttcagacacaggctccttcttggagcctatgggcttcagatgtctttgccccatttgtcacctcgcacacttatagcgtttcctcctcgaaattctaccaagactggtcaaatgttgctgaggggcctggaccagctgtcctttacaccaccttctcaacactgctgaaaagaacccaagagaattgtcacacatgacacaagatgtacataatatcatgctcactgcagtgttatttaaaataaaaggcagg

SEQ ID NO: 16562 - DNA, 1522 bp, Homo sapiens
  source 1..1522: mol_type = unassigned DNA
gaaaatagatcatcatggtggcaccaaagagtcacacagatgactgggctcctgggcctttctccagtaagccacagaggagtcagctgcaaatattctcttctgttctacagacctctctcctcttcctgctcatgggactaagagcctctggaaaggactcagccccaacagtggtgtcagggatcctagggggttccgtgactctccccctaaacatctcagtagacacagagattgagaacgtcatctggattggtcccaaaaatgctcttgctttcgcacgtcccaaagaaaatgtaaccattatggtcaaaagctacctgggccgactagacatcaccaagtggagttactccctgtgcatcagcaatctgactctgaatgatgcaggatcctacaaagcccagataaaccaaaggaattttgaagtcaccactgaggaggaattcaccctgttcgtctatgagcagctgcaggagccccaagtcaccatgaagtctgtgaaggtgtctgagaacttctcctgtaacatcactctaatgtgctccgtgaagggggcagagaaaagtgttctgtacagctggaccccaagggaaccccatgcttctgagtccaatggaggctccattcttaccgtctcccgaacaccatgtgacccagacctgccatacatctgcacagcccagaaccccgtcagccagagaagctccctccctgtccatgttgggcagttctgtacagatccaggagcctccagaggaggaacaacgggggagactgtggtaggggtcctgggagagccagtcaccctgccacttgcactcccagcctgccgggacacagagaaggttgtctggttgtttaacacatccatcattagcaaagagagggaagaagcagcaacggcagatccactcattaaatccagggatccttacaagaacagggtgtgggtctccagccaggactgctccctgaagatcagccagctgaagatagaggacgccggcccctaccatgcctacgtgtgctcagaggcctccagcgtcaccagcatgacacatgtcaccctgctcatctaccgtgagtctctgggcagggcacccatcaccagattccttctctgaaagctttctcctctgctgccttctccaccttccgcttctccaagggtcttccctcatactgaaatgcctcagaccactaggacagctgttcagttcacaccagttgattcataggaggcaaactcatgactagctgctggacaagtctacccgccaaagtgctgggattacaggcatgagccatggcacctggccccaacctgcatttttataaactattatcattttgaataaggccaaagttggctggggtgaaatcagagaagactgaggagaagcccttggtgtccaaagacactgtggcctccaagaaggtgggccactcagttcccctgggggtgaggaacagaatttgcattctacctcctcagccctgggcctcacaggagctt

SEQ ID NO: 16563 - DNA, 2275 bp, Homo sapiens
  source 1..2275: mol_type = unassigned DNA
ctacagacctctctcctcttcctgctcatgggactaagagcctctggaaaggactcagccccaacagtggtgtcagggatcctagggggttccgtgactctccccctaaacatctcagtagacacagagattgagaacgtcatctggattggtcccaaaaatgctcttgctttcgcacgtcccaaagaaaatgtaaccattatggtcaaaagctacctgggccgactagacatcaccaagtggagttactccctgtgcatcagcaatctgactctgaatgatgcaggatcctacaaagcccagataaaccaaaggaattttgaagtcaccactgaggaggaattcaccctgttcgtctatgagcagctgcaggagccccaagtcaccatgaagtctgtgaaggtgtctgagaacttctcctgtaacatcactctaatgtgctccgtgaagggggcagagaaaagtgttctgtacagctggaccccaagggaaccccatgcttctgagtccaatggaggctccattcttaccgtctcccgaacaccatgtgacccagacctgccatacatctgcacagcccagaaccccgtcagccagagaagctccctccctgtccatgttgggcagttctgtacagatccaggagcctccagaggaggaacaacgggggagactgtggtaggggtcctgggagagccagtcaccctgccacttgcactcccagcctgccgggacacagagaaggttgtctggttgtttaacacatccatcattagcaaagagagggaagaagcagcaacggcagatccactcattaaatccagggatccttacaagaacagggtgtgggtctccagccaggactgctccctgaagatcagccagctgaagatagaggacgccggcccctaccatgcctacgtgtgctcagaggcctccagcgtcaccagcatgacacatgtcaccctgctcatctaccgcaggctgaggaagcccaaaatcacgtggagcctcaggcacagtgaggatggcatctgcaggatcagcctgacctgctccgtggaggacgggggaaacactgtcatgtacacatggaccccgctgcagaaggaagctgttgtgtcccaaggggaatcacacctcaatgtctcatggagaagcagtgaaaatcaccccaacctcacatgcacagccagcaaccctgtcagcaggagttcccaccagtttctttctgagaacatctgttcaggacctgagagaaacacaaagctttggattgggttgttcctgatggtttgccttctgtgcgttgggatcttcagctggtgcatttggaagcgaaaaggacggtgttcagtcccagccttctgttccagccaagctgaggccccagcggatacaccaggatatgagaagctggacactcccctcaggcctgccaggcaacagcctacacccacctcagacagcagctctgacagcaacctcacaactgaggaggatgaggacaggcctgaggtgcacaagcccatcagtggaagatatgaggtatttgaccaggtcactcaggagggcgctggacatgacccagcccctgagggccaagcagactatgatcccgtcactccatatgtcacggaagttgagtctgtggttggagagaacaccatgtatgcacaagtgttcaacttacagggaaagaccccagtttctcagaaggaagagagctcagccacaatctactgctccatacggaaacctcaggtggtggtgccaccaccacaacagaatgatcttgagattcctgaaagtcctacctatgaaaatttcacctgaaaggaaaagcagctgctgcctctctcctgggaccgtggggttggaaagtcagctggacctcatggggcctggggctcacagacagaagcacctcagaatttccttcagtgcctcagagatgcctggatgtggcccctccccctccttctcacccttaaggactcccaaacccattaatagttcagacacaggctccttcttggagcctatgggcttcagatgtctttgccccatttgtcacctcgcacacttatagcgtttcctcctcgaaattctaccaagactggtcaaatgttgctgaggggcctggaccagctgtcctttacaccaccttctcaacactgctgaaaagaacccaagagaattgtcacacatgacacaagatgtacataatatcatgctcactgcagtgttatttaaaataaaaggcaggaaataa

SEQ ID NO: 16564 - DNA, 1364 bp, Homo sapiens
  source 1..1364: mol_type = unassigned DNA
catggtggcaccaaagagtcacacagatgactgggctcctgggcctttctccagtaagccacagaggagtcagctgcaaatattctcttctgttctacagacctctctcctcttcctgctcatgggactaagagcctctggaaaggactcagccccaacagtggtgtcagggatcctagggggttccgtgactctccccctaaacatctcagtagacacagagattgagaacgtcatctggattggtcccaaaaatgctcttgctttcgcacgtcccaaagaaaatgtaaccattatggtcaaaagctacctgggccgactagacatcaccaagtggagttactccctgtgcatcagcaatctgactctgaatgatgcaggatcctacaaagcccagataaaccaaaggaattttgaagtcaccactgaggaggaattcaccctgttcgtctatgcaccatttattgaaaagttgtccgtccacgtcatcgagggtgaccaccgcacactcctggagggcagcggcctggagtccatcatcagcaccctggctgagccacgtgtgagcgtgcgggagggctaggccctcgcccccacctgccactggagaccgctccgccatccccacctcaccgccgcgcagcagagctggaagggtcctgccgatgggaccctgccaggcccagtgccactgccccccgaggctgctagacgtgggcgttaggcgtgtcccacccacccgccgcctcccatggcacgtcgggaacaccggagccgccaacttggagactcctggtctgtgaagagccgctgacgcccgcaggaaccgggctgggccttgtgtgccagtggggtttgtgcttggtctttctccgcttggatttgcttatttattgcattgctggtagagactcccaagcctgtccaccctgcaaagactcctcgggcagcatgcgggtcccgcacactgcacccatttcctggatgtcccctgcaggcgcgggaggccatccgggcctgctggctgcggccccctctcagccaggcctggctcagcccactgcgtgggaggtcaccggccactccccgaggagctgggatccccgggatgcaggcccacagtgcggggctgcacccatgatgcggagctggcctccaaccctgcgggccgcgccaggcaccaactcagtgtttgtcagtgtttgtttttccaagaaatggttcaaattgctgctcagatttttaaatttactgtagctgccagtgtacacgtgtggaccccattttatttttacaccaatttggtgaaaatgctgctttcctcagcctccccacaattaaactgcacatggtctctaaaaaaa

SEQ ID NO: 16565 - DNA, 2090 bp, Homo sapiens
  source 1..2090: mol_type = unassigned DNA
cagtaagccacagaggagtcagctgcaaatattctcttctgttctacagacctctctcctcttcctgctcatgggactaagagcctctggaaaggactcagccccaacagtggtgtcagggatcctagggggttccgtgactctccccctaaacatctcagtagacacagagattgagaacgtcatctggattggtcccaaaaatgctcttgctttcgcacgtcccaaagaaaatgtaaccattatggtcaaaagctacctgggccgactagacatcaccaagtggagttactccctgtgcatcagcaatctgactctgaatgatgcaggatcctacaaagcccagataaaccaaaggaattttgaagtcaccactgaggaggaattcaccctgttcgtctatgagcagctgcaggagccccaagtcaccatgaagtctgtgaaggtgtctgagaacttctcctgtaacatcactctaatgtgctccgtgaagggggcagagaaaagtgttctgtacagctggaccccaagggaaccccatgcttctgagtccaatggaggctccattcttaccgtctcccgaacaccatgtgacccagacctgccatacatctgcacagcccagaaccccgtcagccagagaagctccctccctgtccatgttgggcagttctgtacagatccaggagcctccagaggaggaacaacgggggagactgtggtaggggtcctgggagagccagtcaccctgccacttgcactcccagcctgccgggacacagagaaggttgtctggttgtttaacacatccatcattagcaaagagagggaagaagcagcaacggcagatccactcattaaatccagggatccttacaagaacagggtgtgggtctccagccaggactgctccctgaagatcagccagctgaagatagaggacgccggcccctaccatgcctacgtgtgctcagaggcctccagcgtcaccagcatgacacatgtcaccctgctcatctaccgacctgagagaaacacaaagctttggattgggttgttcctgatggtttgccttctgtgcgttgggatcttcagctggtgcatttggaagcgaaaaggacggtgttcagtcccagccttctgttccagccaagctgaggccccagcggatacaccagaacccacagctggccacacgctatactctgtgctctcccaaggatatgagaagctggacactcccctcaggcctgccaggcaacagcctacacccacctcagacagcagctctgacagcaacctcacaactgaggaggatgaggacaggcctgaggtgcacaagcccatcagtggaagatatgaggtatttgaccaggtcactcaggagggcgctggacatgacccagcccctgagggccaagcagactatgatcccgtcactccatatgtcacggaagttgagtctgtggttggagagaacaccatgtatgcacaagtgttcaacttacagggaaagaccccagtttctcagaaggaagagagctcagccacaatctactgctccatacggaaacctcaggtggtggtgccaccaccacaacagaatgatcttgagattcctgaaagtcctacctatgaaaatttcacctgaaaggaaaagcagctgctgcctctctcctgggaccgtggggttggaaagtcagctggacctcatggggcctggggctcacagacagaagcacctcagaatttccttcagtgcctcagagatgcctggatgtggcccctccccctccttctcacccttaaggactcccaaacccattaatagttcagacacaggctccttcttggagcctatgggcttcagatgtctttgccccatttgtcacctcgcacacttatagcgtttcctcctcgaaattctaccaagactggtcaaatgttgctgaggggcctggaccagctgtcctttacaccaccttctcaacactgctgaaaagaacccaagagaattgtcacacatgacacaagatgtacataatatcatgctcactgcagtgttatttaaaataaaaggcaggaaataa

SEQ ID NO: 16566 - DNA, 3787 bp, Homo sapiens
  source 1..3787: mol_type = unassigned DNA
caggtgatttttggtggggcggggacatgaaaaaaaagttaaaatgtccttataaagacaaaatctttttctttcctggctgatgatttgtcattctagtcacttcctgccttgtgaccacacacccaggcttgacaaagctgttctgcagatcagaaagaaggggttcctggtcatacaccagtactaccaaggacagcttttttcctgcaagatctgttacctaaagcaataaaaaatggccagaggatcagtgtccgatgaggaaatgatggagctcagagaagcttttgccaaagttgatactgatggcaatggatacatcagcttcaatgagttgaatgacttgttcaaggctgcttgcttgcctttgcctgggtatagagtacgagaaattacagaaaacctgatggctacaggtgatctggaccaagatggaaggatcagctttgatgagtttatcaagattttccatggcctaaaaagcacagatgttgccaagacctttagaaaagcaatcaataagaaggaagggatttgtgcaatcggtggtacttcagagcagtctagcgttggcacccaacactcctattcagaggaagaaaagtatgcctttgtcaactggataaacaaagccctggaaaatgatcctgattgtcggcatgtcatcccaatgaacccaaacacgaatgatctctttaatgctgttggagatggcattgtcctttgtaaaatgatcaacctgtcagtgccagacacaattgatgaaagaacaatcaacaaaaagaagctaacccctttcaccattcaggaaaatctgaacttggctctgaactctgcctcagccatcgggtgccatgtggtcaacataggggctgaggacctgaaggaggggaagccttatctggtcctgggacttctgtggcaagtcatcaagattgggttgtttgctgacattgaactcagcagaaatgaagctctgattgctcttttgagagaaggtgagagcctggaggatttgatgaaactctcccctgaagagctcttgctgaggtgggctaattaccacctggaaaatgcaggctgcaacaaaattggcaacttcagtactgacatcaaggactcaaaagcttattaccacctgcttgagcaggtggctccaaaaggagatgaagaaggtgttcctgctgttgttattgacatgtcaggactgcgggagaaggatgacatccagagggcagaatgcatgctgcagcaggcggagaggctgggctgccggcagtttgtcacagccacagatgttgtccgagggaaccccaagttgaacttggcttttattgccaacctctttaacagataccctgccctgcacaaaccagagaaccaggacattgactggggggctcttgaaggtgagacgagagaagagcggacatttaggaactggatgaactccctgggtgttaaccctcgagtcaatcatttgtacagtgacttatcagatgccctggtcatcttccagctctatgaaaagatcaaagttcctgttgactggaacagagtaaacaaaccgccataccccaaactgggaggcaatatgaagaagcttgagaattgtaactacgcggtagaattggggaagaatcaagcgaagttctccctggttggcatcggtggacaagatctcaatgaaggaaaccgcactctcacactggccttgatttggcagctaatgagaaggtatacactgaatatcctcgaagaaattggtggtggccagaaggtcaatgatgacattattgtcaactgggtgaatgaaacattgagggaagcaaagaaaagttcatccatctctagtttcaaggacccgaagattagtacaagtctgcctgttctggacctcatcgatgccatccaaccaggttccattaactatgaccttctgaagacagaaaatctgaatgatgatgagaaactcaacaatgcaaaatatgccatctctatggcccgaaaaattggagcaagagtgtatgccctgccagaagacctggttgaagtgaaccccaaaatggtcatgaccgtgtttgcctgcctcatggggaaaggaatgaagagggtgtgaggcccaatggggctgggtgggaggcggtgcactcactcctgactgcccggcacagatgctccagggatgattcaagccattccaaagttcaacttggtgacactctataagattccaaaaagcacatattagtgcagccaagtagcctctcctgtatttaacaaaaagtgcttcattctttgcaggaggcccaacctcctatatataggtttctattcttgatttatttgcttcttcgaaaatctagaggaaaagaaagaagttattttccaggtacccttctcgcttttgccattagccaaggatagaagctgcagtggtattaattttgatataatctttcaaaccagcttcatgtggcttcccttttctttgttcaagatgagggccaggaggggaaacatcacacctgccctaaaccctgttcctggaggtcagcatttgatctgttgcaagcccctctttctgtcccctcttcctaccctgcctcccttgactttgctcctcacacttttggaaccatgccttccgggggggcccatctcttctggccgtccttgtctctgggccacttggagtgtgtgataaatcagtcaagctgttgaagtctcaggagtctctggtagcctgcagaagtaagcctcatcatcagagcctttcctcaaaactggagtcccaaatgtcatcaggttttgttttttttcagccactaagaacccctctgcttttaactctagaatttgggcttggaccagatctaacatcttgaatactctgccctctagagccttcagccttaatggaaggttggatccaaggagggtgtaatggagcatcaagccactcggcggcagcatggagctataactaagcatcctttagggttctgcctctccaggcatttagccctcacattagatctagttactgtggtatggctaatacctgtcaacatttggaggcaatcctaccttgcttttgcttctagagcttagcatatctgattgttgtcaggccatattatcaatgtttacttttttggtactataaaagctttctgccacccctaaactccaggggggacaatatgtgccaatcaatagcacccctactcacatacacacacacctagccagctgtcaagggcagaatgaatctatgctggataagaaatggtggaactgcgttatgaagagctaatttactggacaaagaattccaaagcaaaaccagaacagtatgaatttgagcaggtctcataggttgagcaatttccccctaaaccaactgaaggctaaaaagcaacaggccattgtgaaccaatgcaagacgccctctatcatggtgaaaagctccatcaatgaggtatcttctttagtggtggtatgtaatggaacttagccatttttcaaagcaattgaaatgcattgctctggatctgttccttggcagtggactcagaaagccaacatgtggctcctcccagcccataaccagtatttttgctgcttctgaatacaaattggttggttttgacttcagattgaacttactgtagcctcagatgatttcccccctccgcctccaggaagaaagaatgttactgccttaataaaaaatgaaaagagaatgatgctcaaaatctttccaaataaaatgttccct

SEQ ID NO: 16567 - DNA, 3903 bp, Homo sapiens
  source 1..3903: mol_type = unassigned DNA
ggtgttgatgaacctgtgtgtgcagtcatagatacatcgtgtgtgtttgcaaaaatggcgaatgaggaaagatccagctctgacagaataatgagttgtgcaaagtgaaggccaaatgacatcaccggagatagcagtagttcaaagaaagcaaagcagaggaattgaactgctgcaaaatgcacgattcctccggcctcagatgaccaggcaccactagatacagaacactgtgctttccttctccaagtcacttcctgccttgtgaccacacacccaggcttgacaaagctgttctgcagatcagaaagaaggggttcctggtcatacaccagtactaccaaggacagcttttttcctgcaagatctgttacctaaagcaataaaaaatggccagaggatcagtgtccgatgaggaaatgatggagctcagagaagcttttgccaaagttgatactgatggcaatggatacatcagcttcaatgagttgaatgacttgttcaaggctgcttgcttgcctttgcctgggtatagagtacgagaaattacagaaaacctgatggctacaggtgatctggaccaagatggaaggatcagctttgatgagtttatcaagattttccatggcctaaaaagcacagatgttgccaagacctttagaaaagcaatcaataagaaggaagggatttgtgcaatcggtggtacttcagagcagtctagcgttggcacccaacactcctattcagaggaagaaaagtatgcctttgtcaactggataaacaaagccctggaaaatgatcctgattgtcggcatgtcatcccaatgaacccaaacacgaatgatctctttaatgctgttggagatggcattgtcctttgtaaaatgatcaacctgtcagtgccagacacaattgatgaaagaacaatcaacaaaaagaagctaacccctttcaccattcaggaaaatctgaacttggctctgaactctgcctcagccatcgggtgccatgtggtcaacataggggctgaggacctgaaggaggggaagccttatctggtcctgggacttctgtggcaagtcatcaagattgggttgtttgctgacattgaactcagcagaaatgaagctctgattgctcttttgagagaaggtgagagcctggaggatttgatgaaactctcccctgaagagctcttgctgaggtgggctaattaccacctggaaaatgcaggctgcaacaaaattggcaacttcagtactgacatcaaggactcaaaagcttattaccacctgcttgagcaggtggctccaaaaggagatgaagaaggtgttcctgctgttgttattgacatgtcaggactgcgggagaaggatgacatccagagggcagaatgcatgctgcagcaggcggagaggctgggctgccggcagtttgtcacagccacagatgttgtccgagggaaccccaagttgaacttggcttttattgccaacctctttaacagataccctgccctgcacaaaccagagaaccaggacattgactggggggctcttgaaggtgagacgagagaagagcggacatttaggaactggatgaactccctgggtgttaaccctcgagtcaatcatttgtacagtgacttatcagatgccctggtcatcttccagctctatgaaaagatcaaagttcctgttgactggaacagagtaaacaaaccgccataccccaaactgggaggcaatatgaagaagcttgagaattgtaactacgcggtagaattggggaagaatcaagcgaagttctccctggttggcatcggtggacaagatctcaatgaaggaaaccgcactctcacactggccttgatttggcagctaatgagaaggtatacactgaatatcctcgaagaaattggtggtggccagaaggtcaatgatgacattattgtcaactgggtgaatgaaacattgagggaagcaaagaaaagttcatccatctctagtttcaaggacccgaagattagtacaagtctgcctgttctggacctcatcgatgccatccaaccaggttccattaactatgaccttctgaagacagaaaatctgaatgatgatgagaaactcaacaatgcaaaatatgccatctctatggcccgaaaaattggagcaagagtgtatgccctgccagaagacctggttgaagtgaaccccaaaatggtcatgaccgtgtttgcctgcctcatggggaaaggaatgaagagggtgtgaggcccaatggggctgggtgggaggcggtgcactcactcctgactgcccggcacagatgctccagggatgattcaagccattccaaagttcaacttggtgacactctataagattccaaaaagcacatattagtgcagccaagtagcctctcctgtatttaacaaaaagtgcttcattctttgcaggaggcccaacctcctatatataggtttctattcttgatttatttgcttcttcgaaaatctagaggaaaagaaagaagttattttccaggtacccttctcgcttttgccattagccaaggatagaagctgcagtggtattaattttgatataatctttcaaaccagcttcatgtggcttcccttttctttgttcaagatgagggccaggaggggaaacatcacacctgccctaaaccctgttcctggaggtcagcatttgatctgttgcaagcccctctttctgtcccctcttcctaccctgcctcccttgactttgctcctcacacttttggaaccatgccttccgggggggcccatctcttctggccgtccttgtctctgggccacttggagtgtgtgataaatcagtcaagctgttgaagtctcaggagtctctggtagcctgcagaagtaagcctcatcatcagagcctttcctcaaaactggagtcccaaatgtcatcaggttttgttttttttcagccactaagaacccctctgcttttaactctagaatttgggcttggaccagatctaacatcttgaatactctgccctctagagccttcagccttaatggaaggttggatccaaggagggtgtaatggagcatcaagccactcggcggcagcatggagctataactaagcatcctttagggttctgcctctccaggcatttagccctcacattagatctagttactgtggtatggctaatacctgtcaacatttggaggcaatcctaccttgcttttgcttctagagcttagcatatctgattgttgtcaggccatattatcaatgtttacttttttggtactataaaagctttctgccacccctaaactccaggggggacaatatgtgccaatcaatagcacccctactcacatacacacacacctagccagctgtcaagggcagaatgaatctatgctggataagaaatggtggaactgcgttatgaagagctaatttactggacaaagaattccaaagcaaaaccagaacagtatgaatttgagcaggtctcataggttgagcaatttccccctaaaccaactgaaggctaaaaagcaacaggccattgtgaaccaatgcaagacgccctctatcatggtgaaaagctccatcaatgaggtatcttctttagtggtggtatgtaatggaacttagccatttttcaaagcaattgaaatgcattgctctggatctgttccttggcagtggactcagaaagccaacatgtggctcctcccagcccataaccagtatttttgctgcttctgaatacaaattggttggttttgacttcagattgaacttactgtagcctcagatgatttcccccctccgcctccaggaagaaagaatgttactgccttaataaaaaatgaaaagagaa

SEQ ID NO: 16568 - DNA, 819 bp, Homo sapiens
  source 1..819: mol_type = unassigned DNA
atctgcctggggccagtgaggagaatgcatctagacagagcttttcgtgctgctgagatctgttacctaaagcaataaaaaatggccagaggatcagtgtccgatgaggaaatgatggagctcagagaagcttttgccaaagttgatactgatggcaatggatacatcagcttcaatgagttgaatgacttgttcaaggctgcttgcttgcctttgcctgggtatagagtacgagaaattacagaaaacctgatggctacaggtgatctggaccaagatggaaggatcagctttgatgagtttatcaagattttccatggcctaaaaagcacagatgttgccaagacctttagaaaagcaatcaataagaaggaagggatttgtgcaatcggtggtacttcagagcagtctagcgttggcacccaacactcctattcagaggaagaaaagtatgcctttgtcaactggataaacaaagccctggaaaatgatcctgattgtcggcatgtcatcccaatgaacccaaacacgaatgatctctttaatgctgttggagatggcattgtcctttgtaaaatgatcaacctgtcagtgccagacacaattgatgaaagaacaatcaacaaaaagaagctaacccctttcaccattcaggaaaatctgaacttggctctgaactctgcctcagccatcgggtgccatgtggtcaacataggggctgaggacctgaaggaggggaagccttatctggtcctgggacttctgtggcaagtcatcaagattgggttgtttgctgacattgaactcagcagaaatgaa

SEQ ID NO: 16569 - DNA, 1552 bp, Homo sapiens
  source 1..1552: mol_type = unassigned DNA
tttctcagcatttcttattgccgtgactgttaatgatccatgcgtagctacaggaatatctgttcacatgtccatttgctatgtgtgcagaggatggagactccaaattttccatgtcaatctccatgaattcaccttttttagaaatattacatcttgagaattgtaactacgcggtagaattggggaagaatcaagcgaagttctccctggttggcatcggtggacaagatctcaatgaaggaaaccgcactctcacactggccttgatttggcagctaatgagaaggtatacactgaatatcctcgaagaaattggtggtggccagaaggtcaatgatgacattattgtcaactgggtgaatgaaacattgagggaagcaaagaaaagttcatccatctctagtttcaaggacccgaagattagtacaagtctgcctgttctggacctcatcgatgccatccaaccaggttccattaactatgaccttctgaagacagaaaatctgaatgatgatgagaaactcaacaatgcaaaatatgccatctctatggcccgaaaaattggagcaagagtgtatgccctgccagaagacctggttgaagtgaaccccaaaatggtcatgaccgtgtttgcctgcctcatggggaaaggaatgaagagggtgtgaggcccaatggggctgggtgggaggcggtgcactcactcctgactgcccggcacagatgctccagggatgattcaagccattccaaagttcaacttggtgacactctataagattccaaaaagcacatattagtgcagccaagtagcctctcctgtatttaacaaaaagtgcttcattctttgcaggaggcccaacctcctatatataggtttctattcttgatttatttgcttcttcgaaaatctagaggaaaagaaagaagttattttccaggtacccttctcgcttttgccattagccaaggatagaagctgcagtggtattaattttgatataatctttcaaaccagcttcatgtggcttcccttttctttgttcaagatgagggccaggaggggaaacatcacacctgccctaaaccctgttcctggaggtcagcatttgatctgttgcaagcccctctttctgtcccctcttcctaccctgcctcccttgactttgctcctcacacttttggaaccatgccttccgggggggcccatctcttctggccgtccttgtctctgggccacttggagtgtgtgataaatcagtcaagctgttgaagtctcaggagtctctggtagcctgcagaagtaagcctcatcatcagagcctttcctcaaaactggagtcccaaatgtcatcaggttttgttttttttcagccactaagaacccctctgcttttaactctagaatttgggcttggaccagatctaacatcttgaatactctgccctctagagccttcagccttaatggaaggttggatccaaggagggtgtaatggagcatcaagccactcggcggcagcatggagctataactaagcatccttta

SEQ ID NO: 16570 - DNA, 753 bp, Homo sapiens
  source 1..753: mol_type = unassigned DNA
ggcgggcgccgggaggggcaggcccagcccacggtgcagcgcgcgcggagccctcgccttcctccgacgcactgtggggctgcaggggaagctgcgggccgtgggggccggaggagaagccggctccacgcgcagctgctggcgaatgaggaaagatccagctctgacagaataatgagttgtgcaaagtgaaggccaaatgacatcaccggagatagcagtagttcaaagaaagcaaagcagaggaattgaactgctgcaaaatgcacgagtctcaaacattgtctcagcagcagcatcatatcttacaaaagttgaggaaatactgtatttccagcttaggaaactgaagattcctccggcctcagatgaccaggcaccactagatacagaacactgtgctttccttctccaagtcacttcctgccttgtgaccacacacccaggcttgacaaagctgttctgcagatcagaaagaaggggttcctggtcatacaccagtactaccaaggacagcttttttcctgcaagatctgttacctaaagcaataaaaaatggccagaggatcagtgtccgatgaggaaatgatggagctcagagaagcttttgccaaagttgatactgatggcaatggatacatcagcttcaatgagttgaatgacttgttcaaggctgcttgcttgcctttgcctgggtatagagtacgagaaattacagaaaacctgatggctacaggtgatctggaccaagat

SEQ ID NO: 16571 - DNA, 4678 bp, Homo sapiens
  source 1..4678: mol_type = unassigned DNA
gacaactgtaaagaggcagctgaaagaatcccagtctttgatggtgggaggggaaagtggttggaaagcattaaaaaaacatgctccagcagttcactgatgtgggaaattgtctgtatttcaggtcaaccgtcaggatagattttggtctgcaaagccccagctgagcaagaatgcagtgtagacatatgggtgcccagagtttaaaggaaaattactcagactcacattggagtttaagaccccttcattgcctctcctactgggttggggtgactggagccagtggggaattaccaaccctgtggctctctctgcatctcaagcctccagagctgggcttccttgtttacttatttagagcccagcagaggaagtggtaaaggaaactagctgagtcgttttctgagaagagaccatatttgttcgcagaggaagccgttgctttctgggatctggctacgccagaaaagacatcggctccaacaggggtgttccacagggtagctgggagttggaagagccaagaacgcctccgagctctggatttgagcttctctgcccatgggtgaagcgcccatgctcagcttgtgagcttcttcccgggagagcagccatggcactgaggaatgtgccctttcgctcagaggtcctgggctgggaccccgacagccttgctgactatttcaagaagctcaactataaggactgtgagaaggcagtgaagaagtaccacatcgatggggctcgcttcttgaacctgacagaaaatgacatccagaagttccccaagctccgggtgccgattctcagtaagttaagtcaggaaatcaacaagaacgaagagaggaggagcatcttcacacgcaaaccccaagtcccgcggtttcctgaagagacagaaagccacgaagaggacaatgggggctggtcgtcctttgaagaagacgattatgaaagtcccaatgatgaccaggatggggaggatgatggagactatgagtcccccaatgaggaggaagaggcacccgtggaagatgacgcggattatgagccgccaccctccaatgacgaggaagctctgcagaactccatcctgcctgccaagcctttccccaactccaactccatgtacatcgaccggcccccctctgggaaaaccccccagcagcctcctgtgcccccccagagaccgatggccgccctcccgcccccaccagccggccggaatcactcgccactgcccccaccccagaccaaccacgaagaacccagcagaagcagaaaccacaaaacggcaaagctccctgctccttcaatagacagaagcacgaaacctcccctagatcgttcattagctccgtttgatagagaacccttcacactaggaaagaaaccaccattttctgacaagccctcgattccagcgggaaggtcactcggggagcatttacccaagattcaaaagcctcctttaccaccgaccacggaaagacatgaaaggagcagccccctgccagggaagaagccacctgtgccaaagcatggatggggaccagacagaagagagaatgatgaagatgatgtgcatcagagacctttgccccagccagcactacttcctatgagctccaacactttcccttcaagatctactaagccaagtcccatgaaccctctcccatcctctcacatgcctggagcattctcagaaagtaacagcagttttccacagagtgcctccctgccaccatacttctctcaaggccctagcaacagaccacctatcagagccgaaggcagaaacttccccttgccacttccaaacaaacctcggcccccatcccccgcggaggaagagaattcattaaatgaagagtggtacgtttcttatattacccgaccagaggcagaagctgctcttagaaagataaaccaggatggcacatttctggtcagagacagctctaaaaaaacaacaaccaatccatatgtcctcatggtgttgtacaaagataaagtttacaacatccagatccgttatcagaaggaaagtcaagtttacttgttgggaactggactccgagggaaagaggactttctgtctgtgtcagatattattgactacttcaggaaaatgccacttctgctcattgatgggaaaaaccgaggttccagataccagtgcacattaacgcatgctgcagggtacccatagcaagttatagccgagcaaatgaaccgtcctcctgcctctgttgccaacacgagatcaatcagccttggtcaatggacaaacacttaggactgaactgaacccctccccatgaacacaagggttttatcctttcctttaaaaacagtgtttgaaatgaagactgtcaactatcccataatttatttattcttcttcaatgtttgtaaagtgcatgagtcatgttcacacttgaagtctagtagtgcactgtaataattcattttttaaaagattatttaatgcccatttcaaaatacagtagtttacacagctacagaaacaatttggggcaagttttaaaacactgaaacagtaatagttattggtgtcacataaaactgatttgttttttacagccaaacctctgtcagtcagaggcattcattagttttatacatgtaatttgaaaatcactaaacctcgttttctcagcagcaataatttaagaggcttcaaaaatataatttcactcttatttagtattttttcctgggggcatttttacgtaatttttttatgaaaagacaaatgcatgttgagataacttctgggattaaaatagtcttttgctttacttttttggtttcctaaaacaactttattgacttttagtccatactgttatatttttgtcttaaagaaaatttaaactacaaataccaaaagaaaacattttaaatttagggatgagactttggtgtatcgtgggtctaggtttaatgaacacatctggggttaagttggcatttcttcacatctccacacccacaccaaccatcacagccccccaccaaccttctcccaaccccaaaagcattgtccagggatatagattttaccaaaggcttcctgggaagacgagggagcaacactttagattaaatgtgatcagactttcctattagatatggctcttctgtctcttgttatccccctgacagctctgccataaagtcccttctcctcatccttcccaaacaggctgtataagtgctttgaggtaattaaactctttcctccagtttacaaatatcacttaacaaaaaatataggcattcagccagattaaaaaactggtattcagccaaatagtgacaatcagttgttcttcaagtttttccctttgggaccttggttgttattgcacaacttttattagcaacaatttttggcgtctctgcttaatctacaagttttcgaaatggaaaagagtatcttgcagcttcattttcatgagctaataaaaggggtattggaaggaatctaagaagtcaccattttaaaactgatgatatgttaaaataaggagtatgcagaaggtagagacttttaactgatgataaaaatggtgtttcacaaaatctcatccttaacaaccagaagttctcagtttagggtccaaaacttgggagtttaaggctgaaaaccctgcattcatttacacgtctacacaacgggctattcagcaagtatttacttagtggctcttctgtgttaaacaagtgagctaggtacaaggtagtaaggatagcatacaccataggttctagtatcgagtaagctccacttgtcttgctttgccgtattctatctttacaattcaaaaatatctaaaatgaaggacctgatagatttcaaagcaactatttggtagcgaatcatgtttataaaacaaaccaaagctcattttaagtctattagtggaaagtgccatcaggattaagatgttctgttccatggctatgactgaaatcaatgttgggaagctaatgttttcatgactagcattctctctctgttcaagcaccgacaactccttttggctgggccttgcctcttttggccacagaccttctatatgaccccaggtgcatcagtcacagttgctcagaaccctgctcagtgataaacatcttactaaagctgggtcaatcagggtcactctctggaatgttaaacatgaagcctgagacaagatctctcttttatctggggtccccaaaggcaatgctgtacacttggagctgcctgctgccctgcaactactcccatttaccaattatctggaagaaccagtctacaatagaagacaacgaggccaacacacaaaaacacagtaaaagtatggacaaattagtgggatccctgaaatctattccaactatgtgcttccaagtcacatgactcaataaatgcttcagctggttgagttgtgcttggcgttcactaccaggagagttctgattaataaaaactcattccatcaattaataatttagtagctctctttcaacctgagccaaattcaagcataagctaaaggataagcagtgacccatggccaatttcctatgtcatacacttgccattagtgacgtaagttaagccattcttcaaaacattaaacagccttcaagaaca

SEQ ID NO: 16572 - DNA, 1974 bp, Homo sapiens
  source 1..1974: mol_type = unassigned DNA
agagaccagcagaacggcatcccagccacgacggccactttgctctgtctgctctccgccacggccctgctctgttccctgggacacccccgcccccacctcctcaggctgcctgatctgcccagctttccagctttcctctggattccggcctctggtcatccctccccaccctctctccaaggccctctcctggtctcccttcttctagaaccccttcctccacctccctctctgcagaacttctcctttaccccccaccccccaccactgccccctttccttttctgacctccttttggagggctcagcgctgcccagaccataggagagatgtgggaggctcagttcctgggcttgctgtttctgcagccgctttgggtggctccagtgaagcctctccagccaggggctgaggtcccggtggtgtgggcccaggagggggctcctgcccagctcccctgcagccccacaatccccctccaggatctcagccttctgcgaagagcaggggtcacttggcagcatcagccagacagtggcccgcccgctgccgcccccggccatcccctggcccccggccctcacccggcggcgccctcctcctgggggcccaggccccgccgctacacggtgctgagcgtgggtcccggaggcctgcgcagcgggaggctgcccctgcagccccgcgtccagctggatgagcgcggccggcagcgcggggacttctcgctatggctgcgcccagcccggcgcgcggacgccggcgagtaccgcgccgcggtgcacctcagggaccgcgccctctcctgccgcctccgtctgcgcctgggccaggcctcgatgactgccagccccccaggatctctcagagcctccgactgggtcattttgaactgctccttcagccgccctgaccgcccagcctctgtgcattggttccggaaccggggccagggccgagtccctgtccgggagtccccccatcaccacttagcggaaagcttcctcttcctgccccaagtcagccccatggactctgggccctggggctgcatcctcacctacagagatggcttcaacgtctccatcatgtataacctcactgttctgggtctggagcccccaactcccttgacagtgtacgctggagcaggttccagggtggggctgccctgccgcctgcctgctggtgtggggacccggtctttcctcactgccaagtggactcctcctgggggaggccctgacctcctggtgactggagacaatggcgactttacccttcgactagaggatgtgagccaggcccaggctgggacctacacctgccatatccatctgcaggaacagcagctcaatgccactgtcacattggcaatcatcacagtgactcccaaatcctttgggtcacctggatccctggggaagctgctttgtgaggtgactccagtatctggacaagaacgctttgtgtggagctctctggacaccccatcccagaggagtttctcaggaccttggctggaggcacaggaggcccagctcctttcccagccttggcaatgccagctgtaccagggggagaggcttcttggagcagcagtgtacttcacagagctgtctagcccaggtgcccaacgctctgggagagccccaggtgccctcccagcaggccacctcctgctgtttctcatccttggtgtcctttctctgctccttttggtgactggagcctttggctttcacctttggagaagacagtggcgaccaagacgattttctgccttagagcaagggattcaccctccgcaggctcagagcaagatagaggagctggagcaagaaccggagccggagccggagccggaaccggagcccgagcccgagcccgagccggagcagctctgacctggagctgaggcagccagcagatctcagcagcccagtccaaataaactccctgtcagcagc

SEQ ID NO: 16573 - DNA, 1699 bp, Homo sapiens
  source 1..1699: mol_type = unassigned DNA
acaccctgacccaagccgagacaggttccaaacctcaacctgcagccggaagggggaagtgaaactcggctgggggtgggggctcagaagccgccccagaaagcactgaaagccacagcacgtacacccactccagggatctgccagcaccctgtggggcccagactacaggctgatggcggaggcttcgagtgacccgggtgccgaggagcgggaagagttgctggggcccactgctcagtggagcgtggaggacgaggaggaggccgtccacgagcaatgccagcatgagagagacaggcagcttcaggcccaggacgaggagggaggcggccatgtccccgagcggccgaagcaggagatgctcctcagcctgaagccctcggaggcccctgaactggatgaggacgagggctttggcgactggtcccagaggccagagcagcggcagcagcacgagggggcgcagggcgccttggacagcggagagcccccccagtgcaggagtcctgagggggagcaagaggacaggcccggcctgcatgcctacgaaaaggaggacagtgatgaagtccacctggaggagttgagtctgagcaaggaggggccaggcccagaggacactgtccaggacaacctgggggccgcaggggctgaggaggaacaggaggagcaccagaaatgtcagcagcccaggacacccagccccttggtcttggaggggaccatcgaacagagctcgcctcccctgagccctaccaccaaactcatcgacaggaccgagtccctaaaccgctccatagagaagagtaacagtgtgaagaaatcccagccagacttgcccatctccaagattgatcagtggctggaacaatacacccaggccatcgagaccgctggccggacccccaagctagcccgccaggcctccatagagctgcccagcatggctgtggccagtaccaagagtcggtgggagacgggtgaggtacaggctcagtctgcggccaagactccgtcctgcaaggatattgtggctggagacatgagcaagaaaagcctctgggagcagaagggaggctccaagacctcatcaacaattaagagcaccccatctgggaagaggtataagtttgtggccaccgggcatgggaagtatgagaaggtgcttgtggaagggggcccggctccctaggcgtcccatctcgcttcctgggtctgcaggtccagccggctggcaccctccatgtacccaggggagattccagccagacacccgccccccggccctggctaagaagttgcttcctgttgccagcatgacctaccctcgcctctttgatgccatccgctgccacctccttttgctcctggaccctttagcctctctgcccttccactctctgaccaccgcccccgccctccccacccagctccgcttcttgttacttgggggaggaaagaaactcctgatcattggccaaagggacttacccctggagaggccaagtgccttctaggaagttaggaggttgaggcacagcctgtgcagagagggtgggtcacccccccagatccaaggagaaactgcaggtcaagggctgataacggccatgcaggatgcttgatgctgcgtcccccgctgcttgccgccccccaccccgccattttgtataataaagctccctgtgtattctca

SEQ ID NO: 16574 - DNA, 1785 bp, Homo sapiens
  source 1..1785: mol_type = unassigned DNA
gggctggaagtcggtcttcggacagagcccgtcctgcccagaagcccaggcgagccagcagcaggggtgcagggaccgagtggcccagccccctgggcagggtgtcagggccagagcccagaggacggcggttcaggcttcagtcccagccggcgaaccagagctgggcagagcggccagcaagcggcagccagggtgccctgggcactcgacccccagatgcccctgctggaaccgtaaaggggaggcaccctgaggccagagggagcatggccccggggactgagcatccggctcagagcggcttggcagaggcccactgctcagtggagcgtggaggacgaggaggaggccgtccacgagcaatgccagcatgagagagacaggcagcttcaggcccaggacgaggagggaggcggccatgtccccgagcggccgaagcaggagatgctcctcagcctgaagccctcggaggcccctgaactggatgaggacgagggctttggcgactggtcccagaggccagagcagcggcagcagcacgagggggcgcagggcgccttggacagcggagagcccccccagtgcaggagtcctgagggggagcaagaggacaggcccggcctgcatgcctacgaaaaggaggacagtgatgaagtccacctggaggagttgagtctgagcaaggaggggccaggcccagaggacactgtccaggacaacctgggggccgcaggggctgaggaggaacaggaggagcaccagaaatgtcagcagcccaggacacccagccccttggtcttggaggggaccatcgaacagagctcgcctcccctgagccctaccaccaaactcatcgacaggaccgagtccctaaaccgctccatagagaagagtaacagtgtgaagaaatcccagccagacttgcccatctccaagattgatcagtggctggaacaatacacccaggccatcgagaccgctggccggacccccaagctagcccgccaggcctccatagagctgcccagcatggctgtggccagtaccaagagtcggtgggagacgggtgaggtacaggctcagtctgcggccaagactccgtcctgcaaggatattgtggctggagacatgagcaagaaaagcctctgggagcagaagggaggctccaagacctcatcaacaattaagagcaccccatctgggaagaggtataagtttgtggccaccgggcatgggaagtatgagaaggtgcttgtggaagggggcccggctccctaggcgtcccatctcgcttcctgggtctgcaggtccagccggctggcaccctccatgtacccaggggagattccagccagacacccgccccccggccctggctaagaagttgcttcctgttgccagcatgacctaccctcgcctctttgatgccatccgctgccacctccttttgctcctggaccctttagcctctctgcccttccactctctgaccaccgcccccgccctccccacccagctccgcttcttgttacttgggggaggaaagaaactcctgatcattggccaaagggacttacccctggagaggccaagtgccttctaggaagttaggaggttgaggcacagcctgtgcagagagggtgggtcacccccccagatccaaggagaaactgcaggtcaagggctgataacggccatgcaggatgcttgatgctgcgtcccccgctgcttgccgccccccaccccgccattttgtataataaagctccctgtgtattctca

SEQ ID NO: 16575 - DNA, 2640 bp, Homo sapiens
  source 1..2640: mol_type = unassigned DNA
ataccccattttgcaaacaggaaagctgaggctcagggaggcaccaaagcttactcccatcctggggcttggcagggggtgcccgcagcacccggggacatacaccggggagtctcctgggaaagaagtgccggcccaggggcagactcttttctgctctgccatgtcttccctgcacccccagggatgatgagtctgggaggggctggtcagccatgaaagcttcggggaggggccggtggccaggccgggcaccccagagctccacaggcagacatggtgtgggggtgtcaggaagagggcctggctgctgggtgctacggtaggaagatcccggtgctgtgggagtggagcaggtggttgaatgccaggctggcttggtccttctctctgggtgccggctgtggctcccgcccaggtgggcaccacgtctgaataatgtatgaagcctctggttgcgtggaggatgggagcgcttcgggcagcatctgtgggcagagacttcagggatgtgaggtacatctgggcatggctagctgggaaggaaagaggatggcagagcctcgagccgttgccagggactggttgcgtgtcccagaacgtgccaaaagcctgcctcgtgagcacggcaagagctctgccagggcagtcccagctggcccaggcgccgcagcgctcccgagggccgtcgagcaaaggcgggaggcgcagccgggctgtcggtggacctgtaggtatcagggctccttggtcccctcctgcgggaagcaggcaccgagtggggctgcatgtagacgcatgcgagggtgagagctgcggcggaggacgctgatcgcggagtgcaggcgagggccccagaaaggtcccgcaggtcgcctcgctcgtggcacgggctcggcagcgttgtggttagtgacacggaggaagacagaaagccatatgcacagcacgcagaacaggaggaggggggaagaaagagcaggcacggggcaggcagagccgcagccacgccgccgggatgcagcaggcagggccacccacgagcagggcggggccctaacctccgacccaggctggtcgccgcagatgggggcagagatgtgaaacagctgcagagcgggacaagggtgctgccggcacagggctgaccacagagcacatcaaaagaggcccactgctcagtggagcgtggaggacgaggaggaggccgtccacgagcaatgccagcatgagagagacaggcagcttcaggcccaggacgaggagggaggcggccatgtccccgagcggccgaagcaggagatgctcctcagcctgaagccctcggaggcccctgaactggatgaggacgagggctttggcgactggtcccagaggccagagcagcggcagcagcacgagggggcgcagggcgccttggacagcggagagcccccccagtgcaggagtcctgagggggagcaagaggacaggcccggcctgcatgcctacgaaaaggaggacagtgatgaagtccacctggaggagttgagtctgagcaaggaggggccaggcccagaggacactgtccaggacaacctgggggccgcaggggctgaggaggaacaggaggagcaccagaaatgtcagcagcccaggacacccagccccttggtcttggaggggaccatcgaacagagctcgcctcccctgagccctaccaccaaactcatcgacaggaccgagtccctaaaccgctccatagagaagagtaacagtgtgaagaaatcccagccagacttgcccatctccaagattgatcagtggctggaacaatacacccaggccatcgagaccgctggccggacccccaagctagcccgccaggcctccatagagctgcccagcatggctgtggccagtaccaagagtcggtgggagacgggtgaggtacaggctcagtctgcggccaagactccgtcctgcaaggatattgtggctggagacatgagcaagaaaagcctctgggagcagaagggaggctccaagacctcatcaacaattaagagcaccccatctgggaagaggtataagtttgtggccaccgggcatgggaagtatgagaaggtgcttgtggaagggggcccggctccctaggcgtcccatctcgcttcctgggtctgcaggtccagccggctggcaccctccatgtacccaggggagattccagccagacacccgccccccggccctggctaagaagttgcttcctgttgccagcatgacctaccctcgcctctttgatgccatccgctgccacctccttttgctcctggaccctttagcctctctgcccttccactctctgaccaccgcccccgccctccccacccagctccgcttcttgttacttgggggaggaaagaaactcctgatcattggccaaagggacttacccctggagaggccaagtgccttctaggaagttaggaggttgaggcacagcctgtgcagagagggtgggtcacccccccagatccaaggagaaactgcaggtcaagggctgataacggccatgcaggatgcttgatgctgcgtcccccgctgcttgccgccccccaccccgccattttgtataataaagctccctgtgtattctca

SEQ ID NO: 16576 - DNA, 887 bp, Homo sapiens
  source 1..887: mol_type = unassigned DNA
agggcagtcccagctggcccaggcgccgcagcgctcccgagggccgtcgagcaaaggcgggaggcgcagccgggctgtcggtggacctgcccactgctcagtggagcgtggaggacgaggaggaggccgtccacgagcaatgccagcatgagagagacaggcagcttcaggcccaggacgaggagggaggcggccatgtccccgagcggccgaagcaggagatgctcctcagcctgaagccctcggaggcccctgaactggatgaggacgagggctttggcgactggtcccagaggccagagcagcggcagcagcacgagggggcgcagggcgccttggacagcggagagcccccccagtgcaggagtcctgagggggagcaagaggacaggcccggcctgcatgcctacgaaaaggaggacagtgatgaagtccacctggaggagttgagtctgagcaaggaggggccaggcccagaggacactgtccaggacaacctgggggccgcaggggctgaggaggaacaggaggagcaccagaaatgtcagcagcccaggacacccagccccttggtcttggaggggaccatcgaacagagctcgcctcccctgagccctaccaccaaactcatcgacaggaccgagtccctaaaccgctccatagagaagagtaacagtgtgaagaaatcccagccagacttgcccatctccaagattgatcagtggctggaacaatacacccaggccatcgagaccgctggccggacccccaagctagcccgccaggcctccatagagctgcccagcatggctgtggccagtaccaagagtcggtgggagacgggtgaggtacaggctcagtctgcggccaagactccgtcctgcaag

SEQ ID NO: 16577 - DNA, 682 bp, Homo sapiens
  source 1..682: mol_type = unassigned DNA
acagcctcacccttgcttccctcagtgttcccaaggtgctgcgcaaccccaactccctggcctggccagggtcatgatagctggggaggcaagaggtggctgttctccttgaatgtagggacagagggtggcatgggcagatgagtgcccgtgcacagatggtggcccaggactaattgggtggccagcggccggcagatctggctctggttctggctgtgccaggccctcactctgtgaccttggatgccagtgctgctggctggaccttggtttctccatcctggacatgggtacatggtggttctgagtgccagcgagctgggcaaaccgccggatgtgagactgccgtcgcggagctgaccctcggcccactgctcagtggagcgtggaggacgaggaggaggccgtccacgagcaatgccagcatgagagagacaggcagcttcaggcccaggacgaggagggaggcggccatgtccccgagcggccgaagcaggagatgctcctcagcctgaagccctcggaggcccctgaactggatgaggacgagggctttggcgactggtcccagaggccagagcagcggcagcagcacgagggggcgcagggcgccttggacagcggagagcccccccagtgcaggagtcctgagggggagcaagaggacaggcccggcctg

SEQ ID NO: 16578 - DNA, 968 bp, Homo sapiens
  source 1..968: mol_type = unassigned DNA
gagcctcctcactccccaggaccccagagaggacggaccctctccagccgccctctgggctcaggacagccgggtggggcagccacaggagctgcctgcagggggcagagtcgggacggggaccgagccggacacccattctgcaagtgtctgcagggggaggacggaggcccactgctcagtggagcgtggaggacgaggaggaggccgtccacgagcaatgccagcatgagagagacaggcagcttcaggcccaggacgaggagggaggcggccatgtccccgagcggccgaagcaggagatgctcctcagcctgaagccctcggaggcccctgaactggatgaggacgagggctttggcgactggtcccagaggccagagcagcggcagcagcacgagggggcgcagggcgccttggacagcggagagcccccccagtgcaggagtcctgagggggagcaagaggacaggcccggcctgcatgcctacgaaaaggaggacagtgatgaagtccacctggaggagttgagtctgagcaaggaggggccaggcccagaggacactgtccaggacaacctgggggccgcaggggctgaggaggaacaggaggagcaccagaaatgtcagcagcccaggacacccagccccttggtcttggaggggaccatcgaacagagctcgcctcccctgagccctaccaccaaactcatcgacaggaccgagtccctaaaccgctccatagagaagagtaacagtgtgaagaaatcccagccagacttgcccatctccaagattgatcagtggctggaacaatacacccaggccatcgagaccgctggccggacccccaagctagcccgccaggcctccatagagctgcccagcatggctgtggccagtaccaagagtcggtgggagacgggtgaggtacaggctcagtctgcggccaagactccgtcctgcaag

SEQ ID NO: 16579 - DNA, 574 bp, Homo sapiens
  source 1..574: mol_type = unassigned DNA
gagacggggaaggaggggacgggacaaagaggaaccagcgaagggtccaggcctgcgatgatggcccactgctcagtggagcgtggaggacgaggaggaggccgtccacgagcaatgccagcatgagagagacaggcagcttcaggcccaggacgaggagggaggcggccatgtccccgagcggccgaagcaggagatgctcctcagcctgaagccctcggaggcccctgaactggatgaggacgagggctttggcgactggtcccagaggccagagcagcggcagcagcacgagggggcgcagggcgccttggacagcggagagcccccccagtgcaggagtcctgagggggagcaagaggacaggcccggcctgcatgcctacgaaaaggaggacagtgatgaagtccacctggaggagttgagtctgagcaaggaggggccaggcccagaggacactgtccaggacaacctgggggccgcaggggctgaggaggaacaggaggagcaccagaaatgtcagcagcccaggacacccagccccttggtcttggaggggaccatcgaacagagc

SEQ ID NO: 16580 - DNA, 417 bp, Homo sapiens
  source 1..417: mol_type = unassigned DNA
gtgggctgagacccgggaggcttgagggtcggctgctacccatgacgggttggggaggtattggtgcgagctgaggtggtgcttgcggaggcccactgctcagtggagcgtggaggacgaggaggaggccgtccacgagcaatgccagcatgagagagacaggcagcttcaggcccaggacgaggagggaggcggccatgtccccgagcggccgaagcaggagatgctcctcagcctgaagccctcggaggcccctgaactggatgaggacgagggctttggcgactggtcccagaggccagagcagcggcagcagcacgagggggcgcagggcgccttggacagcggagagcccccccagtgcaggagtcctgagggggagcaagaggacaggcccggcctgcatgcctacgaaaa

SEQ ID NO: 16581 - DNA, 2016 bp, Homo sapiens
  source 1..2016: mol_type = unassigned DNA
ggtcaggccaggtcgccgcctgagcagaggctgcagcctgggcagtcccgggcttctgaggaggaactctagcagacagggcctggatacctcttgagatgcagagagatggctccgatctggtccccacctggcagggtctccggctgtcacctgagttcaggaccagcaccaggatctgcagtgggcccctggctgggcacacctcatcccagcctccccctacccctggccccccataagcctcctcctcctgggcttccaggctctgctggtcagacctccctccctgcccaacgggaatgtgttttcccaggggacgctgctgtccaccaggagctctgtggcctgggatttgaggagtgcctggggtcaatcccccaggctcaccagtgctacttaacaaatgggcccaagagaaggaagtgcagcccccggaggaggggcagagcccctgcctggctgtgcggtggctcacccccttgtcaccaggggctcggccatgagcatccgtccagcgggcccagcaccaactgcagccccaggcccactgctcagtggagcgtggaggacgaggaggaggccgtccacgagcaatgccagcatgagagagacaggcagcttcaggcccaggacgaggagggaggcggccatgtccccgagcggccgaagcaggagatgctcctcagcctgaagccctcggaggcccctgaactggatgaggacgagggctttggcgactggtcccagaggccagagcagcggcagcagcacgagggggcgcagggcgccttggacagcggagagcccccccagtgcaggagtcctgagggggagcaagaggacaggcccggcctgcatgcctacgaaaaggaggacagtgatgaagtccacctggaggagttgagtctgagcaaggaggggccaggcccagaggacactgtccaggacaacctgggggccgcaggggctgaggaggaacaggaggagcaccagaaatgtcagcagcccaggacacccagccccttggtcttggaggggaccatcgaacagagctcgcctcccctgagccctaccaccaaactcatcgacaggaccgagtccctaaaccgctccatagagaagagtaacagtgtgaagaaatcccagccagacttgcccatctccaagattgatcagtggctggaacaatacacccaggccatcgagaccgctggccggacccccaagctagcccgccaggcctccatagagctgcccagcatggctgtggccagtaccaagagtcggtgggagacgggtgaggtacaggctcagtctgcggccaagactccgtcctgcaaggatattgtggctggagacatgagcaagaaaagcctctgggagcagaagggaggctccaagacctcatcaacaattaagagcaccccatctgggaagaggtataagtttgtggccaccgggcatgggaagtatgagaaggtgcttgtggaagggggcccggctccctaggcgtcccatctcgcttcctgggtctgcaggtccagccggctggcaccctccatgtacccaggggagattccagccagacacccgccccccggccctggctaagaagttgcttcctgttgccagcatgacctaccctcgcctctttgatgccatccgctgccacctccttttgctcctggaccctttagcctctctgcccttccactctctgaccaccgcccccgccctccccacccagctccgcttcttgttacttgggggaggaaagaaactcctgatcattggccaaagggacttacccctggagaggccaagtgccttctaggaagttaggaggttgaggcacagcctgtgcagagagggtgggtcacccccccagatccaaggagaaactgcaggtcaagggctgataacggccatgcaggatgcttgatgctgcgtcccccgctgcttgccgccccccaccccgccattttgtataataaagctccctgtgtattctca

SEQ ID NO: 16582 - DNA, 1507 bp, Homo sapiens
  source 1..1507: mol_type = unassigned DNA
tcccagcccacgattcccctgacccgactccctttcccagaactcagtcgcctgaacccccagcctgtggttctctcctaggcctcagcctttcctgcctttgactgaaacagcagtatcttctaagccctgggggcttccccgggccccagccccgacctagaacccgcccgctgcctgccacgctgccactgccgcttcctctataaagggacctgagcgtccgggcccaggggctccacacagcaggttctccccatgacaccacctgaacgtctcttcctcccaagggtgtgtggcaccaccctacacctcctccttctggggctgctgctggttctgctgcctggggcccaggggctccctggtgttggcctcacaccttcagctgcccagactgcccgtcagcaccccaagatgcatcttgcccacagcaacctcaaacctgctgctcacctcattggagaccccagcaagcagaactcactgctctggagagcaaacacggaccgtgccttcctccaggatggtttctccttgagcaacaattctctcctggtccccaccagtggcatctacttcgtctactcccaggtggtcttctctgggaaagcctactctcccaaggccacctcctccccactctacctggcccatgaggtccagctcttctcctcccagtaccccttccatgtgcctctcctcagctcccagaagatggtgtatccagggctgcaggaaccctggctgcactcgatgtaccacggggctgcgttccagctcacccagggagaccagctatccacccacacagatggcatcccccacctagtcctcagccctagtactgtcttctttggagccttcgctctgtagaacttggaaaaatccagaaagaaaaaataattgatttcaagaccttctccccattctgcctccattctgaccatttcaggggtcgtcaccacctctcctttggccattccaacagctcaagtcttccctgatcaagtcaccggagctttcaaagaaggaattctaggcatcccaggggaccacacctccctgaaccatccctgatgtctgtctggctgaggatttcaagcctgcctaggaattcccagcccaaagctgttggtctgtcccaccagctaggtggggcctagatccacacacagaggaagagcaggcacatggaggagcttgggggatgactagaggcagggaggggactatttatgaaggcaaaaaaattaaattatttatttatggaggatggagagaggggaataatagaagaacatccaaggagaaacagagacaggcccaagagatgaagagtgagagggcatgcgcacaaggctgaccaagagagaaagaagtaggcatgagggatcacagggccccagaaggcagggaaaggctctgaaagccagctgccgaccagagccccacacggaggcatctgcaccctcgatgaagcccaataaacctcttttctctgaaa

SEQ ID NO: 16583 - DNA, 1422 bp, Homo sapiens
  source 1..1422: mol_type = unassigned DNA
ccaggggctccacacagcaggtgaggctctcctgccccatctccttgggctgcccgtgcttcgtgctttggactaccgccccgcagtgtcctgccctctgcctgggcctcggtccctcctgcacctgctgcctggatccccggcctgcctgggcctgggccttggttctccccatgacaccacctgaacgtctcttcctcccaagggtgtgtggcaccaccctacacctcctccttctggggctgctgctggttctgctgcctggggcccaggggctccctggtgttggcctcacaccttcagctgcccagactgcccgtcagcaccccaagatgcatcttgcccacagcaacctcaaacctgctgctcacctcattggagaccccagcaagcagaactcactgctctggagagcaaacacggaccgtgccttcctccaggatggtttctccttgagcaacaattctctcctggtccccaccagtggcatctacttcgtctactcccaggtggtcttctctgggaaagcctactctcccaaggccacctcctccccactctacctggcccatgaggtccagctcttctcctcccagtaccccttccatgtgcctctcctcagctcccagaagatggtgtatccagggctgcaggaaccctggctgcactcgatgtaccacggggctgcgttccagctcacccagggagaccagctatccacccacacagatggcatcccccacctagtcctcagccctagtactgtcttctttggagccttcgctctgtagaacttggaaaaatccagaaagaaaaaataattgatttcaagaccttctccccattctgcctccattctgaccatttcaggggtcgtcaccacctctcctttggccattccaacagctcaagtcttccctgatcaagtcaccggagctttcaaagaaggaattctaggcatcccaggggaccacacctccctgaaccatccctgatgtctgtctggctgaggatttcaagcctgcctaggaattcccagcccaaagctgttggtctgtcccaccagctaggtggggcctagatccacacacagaggaagagcaggcacatggaggagcttgggggatgactagaggcagggaggggactatttatgaaggcaaaaaaattaaattatttatttatggaggatggagagaggggaataatagaagaacatccaaggagaaacagagacaggcccaagagatgaagagtgagagggcatgcgcacaaggctgaccaagagagaaagaagtaggcatgagggatcacagggccccagaaggcagggaaaggctctgaaagccagctgccgaccagagccccacacggaggcatctgcaccctcgatgaagcccaataaacctcttttctctgaaa

SEQ ID NO: 16584 - DNA, 1422 bp, Homo sapiens
  source 1..1422: mol_type = unassigned DNA
ccaggggctccgcacagcaggtgaggctctcctgccccatctccttgggctgcccgtgcttcgtgctttggactaccgcccagcagtgtcctgccctctgcctgggcctcggtccctcctgcacctgctgcctggatccccggcctgcctgggcctgggccttggttctccccatgacaccacctgaacgtctcttcctcccaagggtgtgtggcaccaccctacacctcctccttctggggctgctgctggttctgctgcctggggcccaggggctccctggtgttggcctcacaccttcagctgcccagactgcccgtcagcaccccaagatgcatcttgcccacagcaccctcaaacctgctgctcacctcattggagaccccagcaagcagaactcactgctctggagagcaaacacggaccgtgccttcctccaggatggtttctccttgagcaacaattctctcctggtccccaccagtggcatctacttcgtctactcccaggtggtcttctctgggaaagcctactctcccaaggccacctcctccccactctacctggcccatgaggtccagctcttctcctcccagtaccccttccatgtgcctctcctcagctcccagaagatggtgtatccagggctgcaggaaccctggctgcactcgatgtaccacggggctgcgttccagctcacccagggagaccagctatccacccacacagatggcatcccccacctagtcctcagccctagtactgtcttctttggagccttcgctctgtagaacttggaaaaatccagaaagaaaaaataattgatttcaagaccttctccccattctgcctccattctgaccatttcaggggtcgtcaccacctctcctttggccattccaacagctcaagtcttccctgatcaagtcaccggagctttcaaagaaggaattctaggcatcccaggggaccacacctccctgaaccatccctgatgtctgtctggctgaggatttcaagcctgcctaggaattcccagcccaaagctgttggtctgtcccaccagctaggtggggcctagatccacacacagaggaagagcaggcacatggaggagcttgggggatgactagaggcagggaggggactatttatgaaggcaaaaaaattaaattatttatttatggaggatggagagaggggaataatagaagaacatccaaggagaaacagagacaggcccaagagatgaagagtgagagggcatgcgcacaaggctgaccaagagagaaagaagtaggcatgagggatcacagggccccagaaggcagggaaaggctctgaaagccagctgccgaccagagccccacacggaggcatctgcaccctcgatgaagcccaataaacctcttttctctgaaa

SEQ ID NO: 16585 - DNA, 1422 bp, Homo sapiens; identical to SEQ ID NO: 16584
  source 1..1422: mol_type = unassigned DNA

SEQ ID NO: 16586 - DNA, 1507 bp, Homo sapiens
  source 1..1507: mol_type = unassigned DNA
tcccagcccacgattcccctgacccgactccctttcccagaactcagtcgcctgaacccccagcctgtggttctctcctaggcctcagcctttcctgcctttgactgaaacagcagtatcttctaagccctgggggcttccccgggccccagccccgacctagaacccgcccgctgcctgccacgctgccactgccgcttcctctataaagggacctgagcgtccgggcccaggggctccgcacagcaggttctccccatgacaccacctgaacgtctcttcctcccaagggtgtgtggcaccaccctacacctcctccttctggggctgctgctggttctgctgcctggggcccaggggctccctggtgttggcctcacaccttcagctgcccagactgcccgtcagcaccccaagatgcatcttgcccacagcaccctcaaacctgctgctcacctcattggagaccccagcaagcagaactcactgctctggagagcaaacacggaccgtgccttcctccaggatggtttctccttgagcaacaattctctcctggtccccaccagtggcatctacttcgtctactcccaggtggtcttctctgggaaagcctactctcccaaggccacctcctccccactctacctggcccatgaggtccagctcttctcctcccagtaccccttccatgtgcctctcctcagctcccagaagatggtgtatccagggctgcaggaaccctggctgcactcgatgtaccacggggctgcgttccagctcacccagggagaccagctatccacccacacagatggcatcccccacctagtcctcagccctagtactgtcttctttggagccttcgctctgtagaacttggaaaaatccagaaagaaaaaataattgatttcaagaccttctccccattctgcctccattctgaccatttcaggggtcgtcaccacctctcctttggccattccaacagctcaagtcttccctgatcaagtcaccggagctttcaaagaaggaattctaggcatcccaggggaccacacctccctgaaccatccctgatgtctgtctggctgaggatttcaagcctgcctaggaattcccagcccaaagctgttggtctgtcccaccagctaggtggggcctagatccacacacagaggaagagcaggcacatggaggagcttgggggatgactagaggcagggaggggactatttatgaaggcaaaaaaattaaattatttatttatggaggatggagagaggggaataatagaagaacatccaaggagaaacagagacaggcccaagagatgaagagtgagagggcatgcgcacaaggctgaccaagagagaaagaagtaggcatgagggatcacagggccccagaaggcagggaaaggctctgaaagccagctgccgaccagagccccacacggaggcatctgcaccctcgatgaagcccaataaacctcttttctctgaaa

SEQ ID NO: 16587 - DNA, 1507 bp, Homo sapiens
  source 1..1507: mol_type = unassigned DNA
tcccagcccacgattcccctgacccgactccctttcccagaactcagtcgcctgaacccccagcctgtggttctctcctaggcctcagcctttcctgcctttgactgaaacagcagtatcttctaagccctgggggcttccccgggccccagccccgacctagaacccgcccgctgcctgccacgctgccactgccgcttcctctataaagggacctgagcgtccgggcccaggggctccgcacagcaggttctccccatgacaccacctgaacgtctcttcctcccaagggtgcgtggcaccaccctacacctcctccttctggggctgctgctggttctgctgcctggggcccaggggctccctggtgttggcctcacaccttcagctgcccagactgcccgtcagcaccccaagatgcatcttgcccacagcaccctcaaacctgctgctcacctcattggagaccccagcaagcagaactcactgctctggagagcaaacacggaccgtgccttcctccaggatggtttctccttgagcaacaattctctcctggtccccaccagtggcatctacttcgtctactcccaggtggtcttctctgggaaagcctactctcccaaggccacctcctccccactctacctggcccatgaggtccagctcttctcctcccagtaccccttccatgtgcctctcctcagctcccagaagatggtgtatccagggctgcaggaaccctggctgcactcgatgtaccacggggctgcgttccagctcacccagggagaccagctatccacccacacagatggcatcccccacctagtcctcagccctagtactgtcttctttggagccttcgctctgtagaacttggaaaaatccagaaagaaaaaataattgatttcaagaccttctccccattctgcctccattctgaccatttcaggggtcgtcaccacctctcctttggccattccaacagctcaagtcttccctgatcaagtcaccggagctttcaaagaaggaattctaggcatcccaggggaccacacctccctgaaccatccctgatgtctgtctggctgaggatttcaagcctgcctaggaattcccagcccaaagctgttggtctgtcccaccagctaggtggggcctagatccacacacagaggaagagcaggcacatggaggagcttgggggatgactagaggcagggaggggactatttatgaaggcaaaaaaattaaattatttatttatggaggatggagagaggggaataatagaagaacatccaaggagaaacagagacaggcccaagagatgaagagtgagagggcatgcgcacaaggctgaccaagagagaaagaagtaggcatgagggatcacagggccccagaaggcagggaaaggctctgaaagccagctgccgaccagagccccacacggaggcatctgcaccctcgatgaagcccaataaacctcttttctctgaaa

SEQ ID NO: 16588 - DNA, 1507 bp, Homo sapiens; identical to SEQ ID NO: 16586
  source 1..1507: mol_type = unassigned DNA

SEQ ID NO: 16589 - DNA, 554 bp, Homo sapiens
  source 1..554: mol_type = unassigned DNA
gccccatctccttgggctgcccgtgcttcgtgctttggactaccgcccagcagtgtcctgccctctgcctgggcctcggtccctcctgcacctgctgcctggatccccggcctgcctgggcctgggccttggttctccccatgacaccacctgaacgtctcttcctcccaagggtgtgtggcaccaccctacacctcctccttctggggctgctgctggttctgctgcctggggcccaggggctccctggtgttggcctcacaccttcagctgcccagactgcccgtcagcaccccaagatgcatcttgcccacagcaccctcaaacctgctgctcacctcattggagaccccagcaagcagaactcactgctctggagagcaaacacggaccgtgccttcctccaggatggtttctccttgagcaacaattctctcctggtccccaccagtggcatctacttcgtctactcccaggggtcgtcaccacctctcctttggccattccaacagctcaagtcttccctgatcaagtcaccggagctttcaaagaag

SEQ ID NO: 16590 - DNA, 1422 bp, Homo sapiens
  source 1..1422: mol_type = unassigned DNA
ccaggggctccgcacagcaggtgaggctctcctgccccatctccttgggctgcccgtgcttcgtgctttggactaccgccccgcagtgtcctgccctctgcctgggcctcggtccctcctgcacctgctgcctggatccccggcctgcctgggcctgggccttggttctccccatgacaccacctgaacgtctcttcctcccaagggtgcgtggcaccaccctacacctcctccttctggggctgctgctggttctgctgcctggggcccaggggctccctggtgttggcctcacaccttcagctgcccagactgcccgtcagcaccccaagatgcatcttgcccacagcaccctcaaacctgctgctcacctcattggagaccccagcaagcagaactcactgctctggagagcaaacacggaccgtgccttcctccaggatggtttctccttgagcaacaattctctcctggtccccaccagtggcatctacttcgtctactcccaggtggtcttctctgggaaagcctactctcccaaggccacctcctccccactctacctggcccatgaggtccagctcttctcctcccagtaccccttccatgtgcctctcctcagctcccagaagatggtgtatccagggctgcaggaaccctggctgcactcgatgtaccacggggctgcgttccagctcacccagggagaccagctatccacccacacagatggcatcccccacctagtcctcagccctagtactgtcttctttggagccttcgctctgtagaacttggaaaaatccagaaagaaaaaataattgatttcaagaccttctccccattctgcctccattctgaccatttcaggggtcgtcaccacctctcctttggccattccaacagctcaagtcttccctgatcaagtcaccggagctttcaaagaaggaattctaggcatcccaggggaccacacctccctgaaccatccctgatgtctgtctggctgaggatttcaagcctgcctaggaattcccagcccaaagctgttggtctgtcccaccagctaggtggggcctagatccacacacagaggaagagcaggcacatggaggagcttgggggatgactagaggcagggaggggactatttatgaaggcaaaaaaattaaattatttatttatggaggatggagagaggggaataatagaagaacatccaaggagaaacagagacaggcccaagagatgaagagtgagagggcatgcgcacaaggctgaccaagagagaaagaagtaggcatgagggatcacagggccccagaaggcagggaaaggctctgaaagccagctgccgaccagagccccacacggaggcatctgcaccctcgatgaagcccaataaacctcttttctctgaaa

SEQ ID NO: 16591 - DNA, 1422 bp, Homo sapiens; identical to SEQ ID NO: 16590
  source 1..1422: mol_type = unassigned DNA

SEQ ID NO: 16592 - DNA, 1422 bp, Homo sapiens; identical to SEQ ID NO: 16584
  source 1..1422: mol_type = unassigned DNA

SEQ ID NO: 16593 - DNA, 1507 bp, Homo sapiens; identical to SEQ ID NO: 16586
  source 1..1507: mol_type = unassigned DNA

SEQ ID NO: 16594 - DNA, 1507 bp, Homo sapiens; identical to SEQ ID NO: 16587
  source 1..1507: mol_type = unassigned DNA

SEQ ID NO: 16595 - DNA, 554 bp, Homo sapiens
  source 1..554: mol_type = unassigned DNA
gccccatctccttgggctgcccgtgcttcgtgctttggactaccgccccgcagtgtcctgccctctgcctgggcctcggtccctcctgcacctgctgcctggatccccggcctgcctgggcctgggccttggttctccccatgacaccacctgaacgtctcttcctcccaagggtgcgtggcaccaccctacacctcctccttctggggctgctgctggttctgctgcctggggcccaggggctccctggtgttggcctcacaccttcagctgcccagactgcccgtcagcaccccaagatgcatcttgcccacagcaccctcaaacctgctgctcacctcattggagaccccagcaagcagaactcactgctctggagagcaaacacggaccgtgccttcctccaggatggtttctccttgagcaacaattctctcctggtccccaccagtggcatctacttcgtctactcccaggggtcgtcaccacctctcctttggccattccaacagctcaagtcttccctgatcaagtcaccggagctttcaaagaag

SEQ ID NO: 16596 - DNA, 614 bp, Homo sapiens
  source 1..614: mol_type = unassigned DNA
gccccatctccttgggctgcccgtgcttcgtgctttggactaccgccccgcagtgtcctgccctctgcctgggcctcggtccctcctgcacctgctgcctggatccccggcctgcctgggcctgggccttggttctccccatgacaccacctgaacgtctcttcctcccaagggtgtgtggcaccaccctacacctcctccttctggggctgctgctggttctgctgcctggggcccaggggctccctggtgttggcctcacaccttcagctgcccagactgcccgtcagcaccccaagatgcatcttgcccacagcaacctcaaacctgctgctcacctcattggagaccccagcaagcagaactcactgctctggagagcaaacacggaccgtgccttcctccaggatggtttctccttgagcaacaattctctcctggtccccaccagtggcatctacttcgtctactcccagctcccagaagatggtgtatccagggctgcaggaaccctggctgcactcgatgtaccacggggctgcgttccagctcacccagggagaccagctatccacccacacagatggcatcccccacctagtcctcagccctag

SEQ ID NO: 16597 - DNA, 554 bp, Homo sapiens; identical to SEQ ID NO: 16589
  source 1..554: mol_type = unassigned DNA

SEQ ID NO: 16598 - DNA, 554 bp, Homo sapiens; identical to SEQ ID NO: 16589
  source 1..554: mol_type = unassigned DNA

SEQ ID NO: 16599 - DNA, 554 bp, Homo sapiens; identical to SEQ ID NO: 16595
  source 1..554: mol_type = unassigned DNA

SEQ ID NO: 16600 - DNA, 897 bp, Homo sapiens
  source 1..897: mol_type = unassigned DNA
cagtctcaatgggggcactggggctggagggcaggggtgggaggctccaggggaggggttccctcctgctagctgtggcaggagccacttctctggtgaccttgttgctggcggtgcctatcactgtcctggctgtgctggccttagtgccccaggatcagggaggactggtaacggagacggccgaccccggggcacaggcccagcaaggactggggtttcagaagctgccagaggaggagccagaaacagatctcagccccgggctcccagctgcccacctcataggcgctccgctgaaggggcaggggctaggctgggagacgacgaaggaacaggcgtttctgacgagcgggacgcagttctcggacgccgaggggctggcgctcccgcaggacggcctctattacctctactgtctcgtcggctaccggggccgggcgccccctggcggcggggacccccagggccgctcggtcacgctgcgcagctctctgtaccgggcggggggcgcctacgggccgggcactcccgagctgctgctcgagggcgccgagacggtgactccagtgctggacccggccaggagacaagggtacgggcctctctggtacacgagcgtggggttcggcggcctggtgcagctccggaggggcgagagggtgtacgtcaacatcagtcaccccgatatggtggacttcgcgagagggaagaccttctttggggccgtgatggtggggtgagggaatatgagtgcgtggtgcgagtgcgtgaatattgggggcccggacgcccaggaccccatggcagtgggaaaaatgtaggagactgtttggaaattgattttgaacctgatgaaaataaagaatggaaagcttcagtgctgccgataaagat

SEQ ID NO: 16601 - DNA, 897 bp, Homo sapiens; identical to SEQ ID NO: 16600
  source 1..897: mol_type = unassigned DNA

SEQ ID NO: 16602 - DNA, 897 bp, Homo sapiens; identical to SEQ ID NO: 16600
  source 1..897: mol_type = unassigned DNA

SEQ ID NO: 16603 - DNA, 897 bp, Homo sapiens; identical to SEQ ID NO: 16600
  source 1..897: mol_type = unassigned DNA

SEQ ID NO: 16604 - DNA, 897 bp, Homo sapiens; identical to SEQ ID NO: 16600
  source 1..897: mol_type = unassigned DNA

SEQ ID NO: 16605 - DNA, 897 bp, Homo sapiens; identical to SEQ ID NO: 16600
  source 1..897: mol_type = unassigned DNA

SEQ ID NO: 16606 - DNA, 853 bp, Homo sapiens
  source 1..853: mol_type = unassigned DNA
ttcagtctcaatgggggcactggggctggagggcaggggtgggaggctccaggggaggggttccctcctgctagctgtggcaggagccacttctctggtgaccttgttgctggcggtgcctatcactgtcctggctgtgctggccttagtgccccaggatcagggaggactgggtttcagaagctgccagaggaggagccagaaacagatctcagccccgggctcccagctgcccacctcataggcgctccgctgaaggggcaggggctaggctgggagacgacgaaggaacaggcgtttctgacgagcgggacgcagttctcggacgccgaggggctggcgctcccgcaggacggcctctattacctctactgtctcgtcggctaccggggccgggcgccccctggcggcggggacccccagggccgctcggtcacgctgcgcagctctctgtaccgggcggggggcgcctacgggccgggcactcccgagctgctgctcgagggcgccgagacggtgactccagtgctggacccggccaggagacaagggtacgggcctctctggtacacgagcgtggggttcggcggcctggtgcagctccggaggggcgagagggtgtacgtcaacatcagtcaccccgatatggtggacttcgcgagagggaagaccttctttggggccgtgatggtggggtgagggaatatgagtgcgtggtgcgagtgcgtgaatattgggggcccggacgcccaggaccccatggcagtgggaaaaatgtaggagactgtttggaaattgattttgaacctgatgaaaataaagaatggaaagcttcagtgctgccgataaagat

SEQ ID NO: 16607 - DNA, 897 bp, Homo sapiens; identical to SEQ ID NO: 16600
  source 1..897: mol_type = unassigned DNA

SEQ ID NO: 16608 - DNA, 897 bp, Homo sapiens; identical to SEQ ID NO: 16600
  source 1..897: mol_type = unassigned DNA

SEQ ID NO: 16609 - DNA, 1486 bp, Homo sapiens
  source 1..1486: mol_type = unassigned DNA
gcgcccgcccccgaagcggcgcgggacgcctggcgccgtccgcgatccgcagggctgcccgcttaggcttaggcccggcccgctggcaaagccgagccgcagcattttatttcgttcgtggtttccgcacaggctggagtttcgtgggttgggtcgtacttgggacctcggcgaagaggacccgtttatttttttttctttccaaaatggcagcctccagtcgcgcacaagtgttatctctgtaccgggcgatgctgagagagagcaagcgtttcagcgcctacaattacagaacatatgctgtcaggaggataagagatgccttcagagaaaataaaaatgtaaaggatcctgtagaaattcaaaccctagtgaataaagccaagagagaccttggagtaattcgtcgacaggtccacattggccaactgtattcaactgacaagctgatcattgagaatcgagacatgcccaggacctagcaagccggggaccagccaccagtggcggccagggaccaccttcagcatccactctctgtttgagatgggggctcccaaaaccagcttacaatagccttttgcgctgcctgtcctgtgggagctgataaaccaagtcacatttgcattctgttgcaggcttagtgaaaaaggactgctgtctttccttggttcaagtgttagaatggagagctggagttcgttcagaatagtgctgtgtgttaccacgtctcccctgcaccccattcctaccttgtagctcatgaccattgtgtatagcatttctacactttgtttcttggtccttggcaataaaaagaatgatctccctgagcctttgaccccagataaacccctcccaattaatgcattttcatttcctactgatacaaggcctggagagggctgttgggggccctcagggagggttcaactctgagacgagaactgccttggtgaaggcaagttcaagcaccacttgagactgggggcagcatggagtagggcagggctacggggatacacggtgcaccctgcaacttatacctgagcccagtacaacaaaggtgacgggtgtgtaggtacacacccagagatggagcactgcagatcagcaacctcagccccacctgggaatttgctggaaatgcaggctcaagcccctccccacacctggtgaatgagagagccccagcctgacccaagcccagggcgactcccataccctgaagcctggggcatgctgggcagcaccggtgcccaaatctggctggtggacagaagcacctggagagttggagagctttttaaaaagacatctctcagcacttccctctctgcagattctgactcagtaagtgaggggtgaggcacagtcatttttctctattctgaagctctcccactgttttcaatgtttaaccaactggggacccctgctctttaagtatattacaggtaataaagatattgtttgtatgctttta

SEQ ID NO: 16610 - DNA, 794 bp, Homo sapiens
  source 1..794: mol_type = unassigned DNA
gcgcccgcccccgaagcggcgcgggacgcctggcgccgtccgcgatccgcagggctgcccgcttaggcttaggcccggcccgctggcaaagccgagccgcagcattttatttcgttcgtggtttccgcacaggctggagtttcgtgggttgggtcgtacttgggacctcggcgaagaggacccgtttatttttttttctttccaaaatggcagcctccagtcgcgcacaagtgttatctctgtaccgggcgatgctgagagagagcaagcgtttcagcgcctacaattacagaacatatgctgtcaggaggataagagatgccttcagagaaaataaaaatgtaaaggatcctgtagaaattcaaaccctagtgaataaagccaagagagaccttggagtaattcgtcgacagatggactctcactctgtcgcccaggctggagtgcattggaacgatctcagctcactacaacctctgcctccctggttcaagcaattctcctgcctcagcctcccgagtagctgggattataggcgcacgccaccacgcctggctaatttttgtattcttagtagagatgtgatttcactgtattagtcaggctggtctcgaagtcctgacctcaagtgatccacctgcctcagcctcccaaagtgctgggattacaggtgtgaaccactgtgcccggcagacaattataatttttatgtagttacatttcacttcattgtctttgaattttgtgtcatgctgaattcccactccaagacaataaaaattctcttgcatttc

SEQ ID NO: 16611 - DNA, 1401 bp, Homo sapiens
  source 1..1401: mol_type = unassigned DNA
atggcagcctccagtcgcgcacaagtgttatctctgtaccgggcgatgctgagagagagcaagcgtttcagcgcctacaattacagaacatatgctgtcaggaggataagagatgccttcagagaaaataaaaatgtaaaggatcctgtagaaattcaaaccctagtgaataaagccaagagagaccttggagtaattcgtcgacaggtagctgagcaaggcacagccgccaggaggaagtcggggaacagcagccggagcctggggaagccctgcacaagttggccttgaggaaaccacctgacagacgtttgctcttcctcacagagctggtccacattggccaactgtattcaactgacaagctgatcattgagaatcgagacatgcccaggacctagcaagccggggaccagccaccagtggcggccagggaccaccttcagcatccactctctgtttgagatgggggctcccaaaaccagcttacaatagccttttgcgctgcctgtcctgtgggagctgataaaccaagtcacatttgcattctgttgcaggcttagtgaaaaaggactgctgtctttccttggttcaagtgttagaatggagagctggagttcgttcagaatagtgctgtgtgttaccacgtctcccctgcaccccattcctaccttgtagctcatgaccattgtgtatagcatttctacactttgtttcttggtccttggcaataaaaagaatgatctccctgagcctttgaccccagataaacccctcccaattaatgcattttcatttcctactgatacaaggcctggagagggctgttgggggccctcagggagggttcaactctgagacgagaactgccttggtgaaggcaagttcaagcaccacttgagactgggggcagcatggagtagggcagggctacggggatacacggtgcaccctgcaacttatacctgagcccagtacaacaaaggtgacgggtgtgtaggtacacacccagagatggagcactgcagatcagcaacctcagccccacctgggaatttgctggaaatgcaggctcaagcccctccccacacctggtgaatgagagagccccagcctgacccaagcccagggcgactcccataccctgaagcctggggcatgctgggcagcaccggtgcccaaatctggctggtggacagaagcacctggagagttggagagctttttaaaaagacatctctcagcacttccctctctgcagattctgactcagtaagtgaggggtgaggcacagtcatttttctctattctgaagctctcccactgttttcaatgtttaaccaactggggacccctgctctttaagtatattacaggtaataaagatattgtttgtatgct

SEQ ID NO: 16612 - DNA, 3033 bp, Homo sapiens
  source 1..3033: mol_type = unassigned DNA
ggcgcggcgggagcgcgcttggcgcgtgcgtacgcgacggcggttggcggcgcgcgggcagcgtgaagcgaggcgaggcaaggcttttcggacccacggagcgacagagcgagcggcccctacggccgtcggcggcccggcggcccgagatgttatctgggaagaaggcggcagccgcggcggcggcggctgcagcggcagcaaccgggacggaggctggccctgggacagcaggcggctccgagaacgggtctgaggtggccgcgcagcccgcgggcctgtcgggcccagccgaggtcgggccgggggcggtgggggagcgcacaccccgcaagaaagagcctccgcgggcctcgccccccgggggcctggcggaaccgccggggtccgcagggcctcaggccggccctactgtcgtgcctgggtctgcgacccccatggaaactggaatagcagagactccggaggggcgtcggaccagccggcgcaagcgggcgaaggtagagtacagagagatggatgaaagcttggccaacctctcagaagatgagtattattcagaagaagagagaaatgccaaagcagagaaggaaaagaagcttcccccaccaccccctcaagccccacctgaggaagaaaatgaaagtgagcctgaagaaccatcgggtgtggagggcgcagctttccagagccgacttcctcatgaccggatgacttctcaagaagcagcctgttttccagatattatcagtggaccacaacagacccagaaggtttttcttttcattagaaaccgcacactgcagttgtggttggataatccaaagattcagctgacatttgaggctactctccaacaattagaagcaccttataacagtgatactgtgcttgtccaccgagttcacagttatttagagcgtcatggtcttatcaacttcggcatctataagaggataaaacccctaccaactaaaaagacaggaaaggtaattattataggctctggggtctcaggcttggcagcagctcgacagttacaaagttttggaatggatgtcacacttttggaagccagggatcgtgtgggtggacgagttgccacatttcgcaaaggaaactatgtagctgatcttggagccatggtggtaacaggtcttggagggaatcctatggctgtggtcagcaaacaagtaaatatggaactggccaagatcaagcaaaaatgcccactttatgaagccaacggacaagctgttcctaaagagaaagatgaaatggtagagcaagagtttaaccggttgctagaagctacatcttaccttagtcatcaactagacttcaatgtcctcaataataagcctgtgtcccttggccaggcattggaagttgtcattcagttacaagagaagcatgtcaaagatgagcagattgaacattggaagaagatagtgaaaactcaggaagaattgaaagaacttcttaataagatggtaaatttgaaagagaaaattaaagaactccatcagcaatacaaagaagcatctgaagtaaagccacccagagatattactgccgagttcttagtgaaaagcaaacacagggatctgaccgccctatgcaaggaatatgatgaattagctgaaacacaaggaaagctagaagaaaaacttcaggagttggaagcgaatcccccaagtgatgtatatctctcatcaagagacagacaaatacttgattggcattttgcaaatcttgaatttgctaatgccacacctctctcaactctctcccttaagcactgggatcaggatgatgactttgagttcactggcagccacctgacagtaaggaatggctactcgtgtgtgcctgtggctttagcagaaggcctagacattaaactgaatacagcagtgcgacaggttcgctacacggcttcaggatgtgaagtgatagctgtgaatacccgctccacgagtcaaacctttatttataaatgcgacgcagttctctgtacccttcccctgggtgtgctgaagcagcagccaccagccgttcagtttgtgccacctctccctgagtggaaaacatctgcagtccaaaggatgggatttggcaaccttaacaaggtggtgttgtgttttgatcgggtgttctgggatccaagtgtcaatttgttcgggcatgttggcagtacgactgccagcaggggtgagctcttcctcttctggaacctctataaagctccaatactgttggcactagtggcaggagaagctgctggtatcatggaaaacataagtgacgatgtgattgttggccgatgcctggccattctcaaagggatttttggtagcagtgcagtacctcagcccaaagaaactgtggtgtctcgttggcgtgctgatccctgggctcggggctcttattcctatgttgctgcaggatcatctggaaatgactatgatttaatggctcagccaatcactcctggcccctcgattccaggtgccccacagccgattccacgactcttctttgcgggagaacatacgatccgtaactacccagccacagtgcatggtgctctgctgagtgggctgcgagaagcgggaagaattgcagaccagtttttgggggccatgtatacgctgcctcgccaggccacaccaggtgttcctgcacagcagtccccaagcatgtgagacagatgcattctaagggaagaggcccatgtgcctgtttctgccatgtaaggaaggctcttctagcaatactagatcccactgagaaaatccaccctggcatctgggctcctgatcagctgatggagctcctgatttgacaaaggagcttgcctcctttgaatgacctagagcacagggaggaacttgtccattagtttggaattgtgttcttcgtaaagactgaggcaagcaagtgctgtgaaataacatcatcttagtcccttggtgtgtggggtttttgttttttttttatattttgagaataaaacttcatataaaattg

SEQ ID NO: 16613 - DNA, 3058 bp, Homo sapiens
  source 1..3058: mol_type = unassigned DNA
cggcgcgcgggcagcgtgaagcgaggcgaggcaaggcttttcggacccacggagcgacagagcgagcggcccctacggccgtcggcggcccggcggcccgagatgttatctgggaagaaggcggcagccgcggcggcggcggctgcagcggcagcaaccgggacggaggctggccctgggacagcaggcggctccgagaacgggtctgaggtggccgcgcagcccgcgggcctgtcgggcccagccgaggtcgggccgggggcggtgggggagcgcacaccccgcaagaaagagcctccgcgggcctcgccccccgggggcctggcggaaccgccggggtccgcagggcctcaggccggccctactgtcgtgcctgggtctgcgacccccatggaaactggaatagcagagactccggaggggcgtcggaccagccggcgcaagcgggcgaaggtagagtacagagagatggatgaaagcttggccaacctctcagaagatgagtattattcagaagaagagagaaatgccaaagcagagaaggaaaagaagcttcccccaccaccccctcaagccccacctgaggaagaaaatgaaagtgagcctgaagaaccatcggggcaagcaggaggacttcaagacgacagttctggagggtatggagacggccaagcatcaggtgtggagggcgcagctttccagagccgacttcctcatgaccggatgacttctcaagaagcagcctgttttccagatattatcagtggaccacaacagacccagaaggtttttcttttcattagaaaccgcacactgcagttgtggttggataatccaaagattcagctgacatttgaggctactctccaacaattagaagcaccttataacagtgatactgtgcttgtccaccgagttcacagttatttagagcgtcatggtcttatcaacttcggcatctataagaggataaaacccctaccaactaaaaagacaggaaaggtaattattataggctctggggtctcaggcttggcagcagctcgacagttacaaagttttggaatggatgtcacacttttggaagccagggatcgtgtgggtggacgagttgccacatttcgcaaaggaaactatgtagctgatcttggagccatggtggtaacaggtcttggagggaatcctatggctgtggtcagcaaacaagtaaatatggaactggccaagatcaagcaaaaatgcccactttatgaagccaacggacaagctgaaaggattattgttcctaaagagaaagatgaaatggtagagcaagagtttaaccggttgctagaagctacatcttaccttagtcatcaactagacttcaatgtcctcaataataagcctgtgtcccttggccaggcattggaagttgtcattcagttacaagagaagcatgtcaaagatgagcagattgaacattggaagaagatagtgaaaactcaggaagaattgaaagaacttcttaataagatggtaaatttgaaagagaaaattaaagaactccatcagcaatacaaagaagcatctgaagtaaagccacccagagatattactgccgagttcttagtgaaaagcaaacacagggatctgaccgccctatgcaaggaatatgatgaattagctgaaacacaaggaaagctagaagaaaaacttcaggagttggaagcgaatcccccaagtgatgtatatctctcatcaagagacagacaaatacttgattggcattttgcaaatcttgaatttgctaatgccacacctctctcaactctctcccttaagcactgggatcaggatgatgactttgagttcactggcagccacctgacagtaaggaatggctactcgtgtgtgcctgtggctttagcagaaggcctagacattaaactgaatacagcagtgcgacaggttcgctacacggcttcaggatgtgaagtgatagctgtgaatacccgctccacgagtcaaacctttatttataaatgcgacgcagttctctgtacccttcccctgggtgtgctgaagcagcagccaccagccgttcagtttgtgccacctctccctgagtggaaaacatctgcagtccaaaggatgggatttggcaaccttaacaaggtggtgttgtgttttgatcgggtgttctgggatccaagtgtcaatttgttcgggcatgttggcagtacgactgccagcaggggtgagctcttcctcttctggaacctctataaagctccaatactgttggcactagtggcaggagaagctgctggtatcatggaaaacataagtgacgatgtgattgttggccgatgcctggccattctcaaagggatttttggtagcagtgcagtacctcagcccaaagaaactgtggtgtctcgttggcgtgctgatccctgggctcggggctcttattcctatgttgctgcaggatcatctggaaatgactatgatttaatggctcagccaatcactcctggcccctcgattccaggtgccccacagccgattccacgactcttctttgcgggagaacatacgatccgtaactacccagccacagtgcatggtgctctgctgagtgggctgcgagaagcgggaagaattgcagaccagtttttgggggccatgtatacgctgcctcgccaggccacaccaggtgttcctgcacagcagtccccaagcatgtgagacagatgcattctaagggaagaggcccatgtgcctgtttctgccatgtaaggaaggctcttctagcaatactagatcccactgagaaaatccaccctggcatctgggctcctgatcagctgatggagctcctgatttgacaaaggagcttgcctcctttgaatgacctagagcacagggaggaacttgtccattagtttggaattgtgttcttcgtaaagactgaggcaagcaagtgctgtgaaataacatcatcttagtcccttggtgtgtggggtttttgttttttttttatattttgagaataaaacttcatataaaattg

SEQ ID NO: 16614 - DNA, 3059 bp, Homo sapiens
  source 1..3059: mol_type = unassigned DNA
ggcggcgcgcgggcagcgtgaagcgaggcgaggcaaggcttttcggacccacggagcgacagagcgagcggcccctacggccgtcggcggcccggcggcccgagatgttatctgggaagaaggcggcagccgcggcggcggcggctgcagcggcagcaaccgggacggaggctggccctgggacagcaggcggctccgagaacgggtctgaggtggccgcgcagcccgcgggcctgtcgggcccagccgaggtcgggccgggggcggtgggggagcgcacaccccgcaagaaagagcctccgcgggcctcgccccccgggggcctggcggaaccgccggggtccgcagggcctcaggccggccctactgtcgtgcctgggtctgcgacccccatggaaactggaatagcagagactccggaggggcgtcggaccagccggcgcaagcgggcgaaggtagagtacagagagatggatgaaagcttggccaacctctcagaagatgagtattattcagaagaagagagaaatgccaaagcagagaaggaaaagaagcttcccccaccaccccctcaagccccacctgaggaagaaaatgaaagtgagcctgaagaaccatcggggcaagcaggaggacttcaagacgacagttctggagggtatggagacggccaagcatcaggtgtggagggcgcagctttccagagccgacttcctcatgaccggatgacttctcaagaagcagcctgttttccagatattatcagtggaccacaacagacccagaaggtttttcttttcattagaaaccgcacactgcagttgtggttggataatccaaagattcagctgacatttgaggctactctccaacaattagaagcaccttataacagtgatactgtgcttgtccaccgagttcacagttatttagagcgtcatggtcttatcaacttcggcatctataagaggataaaacccctaccaactaaaaagacaggaaaggtaattattataggctctggggtctcaggcttggcagcagctcgacagttacaaagttttggaatggatgtcacacttttggaagccagggatcgtgtgggtggacgagttgccacatttcgcaaaggaaactatgtagctgatcttggagccatggtggtaacaggtcttggagggaatcctatggctgtggtcagcaaacaagtaaatatggaactggccaagatcaagcaaaaatgcccactttatgaagccaacggacaagctgacactgtcaaggttcctaaagagaaagatgaaatggtagagcaagagtttaaccggttgctagaagctacatcttaccttagtcatcaactagacttcaatgtcctcaataataagcctgtgtcccttggccaggcattggaagttgtcattcagttacaagagaagcatgtcaaagatgagcagattgaacattggaagaagatagtgaaaactcaggaagaattgaaagaacttcttaataagatggtaaatttgaaagagaaaattaaagaactccatcagcaatacaaagaagcatctgaagtaaagccacccagagatattactgccgagttcttagtgaaaagcaaacacagggatctgaccgccctatgcaaggaatatgatgaattagctgaaacacaaggaaagctagaagaaaaacttcaggagttggaagcgaatcccccaagtgatgtatatctctcatcaagagacagacaaatacttgattggcattttgcaaatcttgaatttgctaatgccacacctctctcaactctctcccttaagcactgggatcaggatgatgactttgagttcactggcagccacctgacagtaaggaatggctactcgtgtgtgcctgtggctttagcagaaggcctagacattaaactgaatacagcagtgcgacaggttcgctacacggcttcaggatgtgaagtgatagctgtgaatacccgctccacgagtcaaacctttatttataaatgcgacgcagttctctgtacccttcccctgggtgtgctgaagcagcagccaccagccgttcagtttgtgccacctctccctgagtggaaaacatctgcagtccaaaggatgggatttggcaaccttaacaaggtggtgttgtgttttgatcgggtgttctgggatccaagtgtcaatttgttcgggcatgttggcagtacgactgccagcaggggtgagctcttcctcttctggaacctctataaagctccaatactgttggcactagtggcaggagaagctgctggtatcatggaaaacataagtgacgatgtgattgttggccgatgcctggccattctcaaagggatttttggtagcagtgcagtacctcagcccaaagaaactgtggtgtctcgttggcgtgctgatccctgggctcggggctcttattcctatgttgctgcaggatcatctggaaatgactatgatttaatggctcagccaatcactcctggcccctcgattccaggtgccccacagccgattccacgactcttctttgcgggagaacatacgatccgtaactacccagccacagtgcatggtgctctgctgagtgggctgcgagaagcgggaagaattgcagaccagtttttgggggccatgtatacgctgcctcgccaggccacaccaggtgttcctgcacagcagtccccaagcatgtgagacagatgcattctaagggaagaggcccatgtgcctgtttctgccatgtaaggaaggctcttctagcaatactagatcccactgagaaaatccaccctggcatctgggctcctgatcagctgatggagctcctgatttgacaaaggagcttgcctcctttgaatgacctagagcacagggaggaacttgtccattagtttggaattgtgttcttcgtaaagactgaggcaagcaagtgctgtgaaataacatcatcttagtcccttggtgtgtggggtttttgttttttttttatattttgagaataaaacttcatataaaatt

SEQ ID NO: 16615 - DNA, 3811 bp, Homo sapiens
  source 1..3811: mol_type = unassigned DNA
gcggccgagaagaggctggggctcgcggcgcggctgcagccgtcctgtgcgcgcggcgcgcggctccggagaggcgcccgcagtccagggcggcgcgcaccgcctcgctggcgctcagagcggtgccttttccccgagactcccggcacctcttcagcgcaaagattatttaatgtaatggcaactccacgggggaggacaaagaaaaaagcatcttttgatcattctccggatagccttcctttgaggagctccggtaggcaggcgaagaagaaagcaacagagacaacagatgaggatgaagatggtggctcagagaagaagtacaggaaatgtgaaaaggcaggctgtacggcaacatgtcctgtgtgctttgcaagtgcttctgaaagatgtgccaaaaatggctacacctcccgatggtatcatctctcctgtggggaacatttctgtaatgaatgctttgaccattactacagaagccataaggatggatatgacaaatatactacatggaaaaaaatatggactagcaatggcaaaaccgaacctagtcccaaagctttcatggcagaccagcaactcccctactgggttcagtgtacaaaacctgagtgtagaaaatggaggcagcttaccaaggaaatccagcttactccacagatagccaagacttatcgatgcggtatgaaaccaaatactgctattaagcctgagacctcagatcattgttccctcccagaggatctagaagctcttactcctcagaaatgtattcctcacatcatcgtccggggtctcgtgcgtattcgatgcgttcaggaagtggagagaatactgtattttatgaccagaaaaggtctcatcaacactggagttctcagcgtgggagccgaccagtatcttctccctaaggactaccacaataaatcagtcatcattatcggggctggtccagcaggattagcagctgctaggcaactgcataactttggaattaaggtgactgtcctggaagccaaagacagaattggaggccgagtctgggatgataaatcttttaaaggcgtcacagtgggaagaggagctcagattgtcaatgggtgtattaacaacccagtagcattaatgtgtgaacaagtatctgctcgctcgtgggaccacaatgaattctttgcccagtttgctggtgaccacactctgctaactcccgggtactcggtgataattgaaaaactggcagaagggcttgacattcaactcaaatctccagtgcagtgtattgattattctggagatgaagtgcaggttaccactacagatggcacagggtattctgcacaaaaggtattagtcactgtaccactggctttactacagaaaggtgccattcagtttaatccaccgttgtcagagaagaagatgaaggctatcaacagcttaggcgcaggcatcattgaaaagattgccttgcaatttccgtatagattttgggacagtaaagtacaaggggctgacttttttggtcacgttcctcccagtgccagcaagcgagggctttttgccgtgttctatgacatggatccccagaagaagcacagcgtgctgatgtctgtgattgccggggaggctgtcgcatccgtgaggaccctggatgacaaacaggtgctgcagcagtgcatggccacgctccgggagctgttcaaggagcaggaggtcccagatcccacaaagtattttgtcactcggtggagcacagacccatggatccagatggcatacagttttgtgaagacaggtggaagtggggaggcctacgatatcattgctgaagacattcaaggaaccgtctttttcgctggtgaggcaacaaacaggcatttcccacaaactgttacaggggcatatttgagtggcgttcgagaagcaagcaagattgcagcattttaagaattcggtggacccagctttcttctgtaccccagatggggaaatttgaatcacatgttaaacctcagttttataagagggggaaaaaaccgtctctacatagtaaaactgaaatgtttctaaggcgatatgataatgcaaacctatttcatcactctaaaagcactgacctcaaaaaaccttataagcacttagatttaattgcattttccataggttcaactactgctgaaagtctggatttcagaataaagcagaatgtaagtttcagttgaggccatggatttgattgttccatggctggaagttccctttagatttcacattttatatggctgatcaattttcatacattgagaaaccaagtcaatcaagcaggaatcatttaaaaaccagataaagccatgtttttcttctgtgacaatttatcagtatctttaccaatgagccttaatttttatataggtccaatattgagcttttacttaaaatttagatagaacttttttttggatacagcacaaactccagttgacagtaaaatgaagcttctaggtattttgtattgtacatatttcctcctactgggtgttcaaaagaaatttaaattcaagtaccttttgtgataaaatgttttagatttgtgcacccattggcaaaacaggaaagtttccagataggtattgtatcattgagaatgcagcacagatagtgtgggcttcacactatagacacagaatatagctttttcttaaagccaaatttgggtgataggacactttaaatatccttaattttggcaaccactagcaaaaaaacttgtcagaataatttaaccaagcccctctccacttcttttatttaaaagcactgattcaattgctaggaatatttttgcagatttttctttacagtattccataggcaggtccactggaaaactgcagaaaaatgtgagctctcctggtaaatagtatacattttataagctatattttaaaggcctaagaacatggcaagtatttacttttatcttttttttaaaaacactcatgacagaaaacagtttaataatatctcattctaaaataaaacactggttgcagggtcttcaggatgcctattttgccaagaaacttcagtatacaggttagaaatatgcttttgtttttgaacaataatatactggtttgctttaaagaagggactaaatatgactttaaagagacttcaaaatattgagtattttaaaaatttaaaagtaggtcagtttataacgagtaaatacctaacacaccaagaatgtgcagtgaacctcaggcatttaagacacctcccccaccgcccgccccccgccccccccaatcaaagtgtggtcccaaaacaagccaacagctgtatatctcaaaagttaacccaagacaactctgatatttaggttatttgttgagactcattggtactgactggcaagtattctgctttaaagtatcatgtattaaaatgtttagacagcatgtgttttaaagtgataaatgcaaaatgttaagtttgaaatggttaacagtaaattattatgttagtttccaggcacttgaactgtgctacaagtaggggaaaacctactttaaagtatggtaaatgtgtgttttaaacttcctatcaagtgacatacttcatttgattttttgtttaagaagccatggtacttttttcttgagttactttggatatgttttttcaatgccatctgaagattttgtaattgagtagcagtaaatatacagatttacaatgttttaactacagttcatgaatagctggttgtgtaaaactaataaaaaactagactttcacatgt

SEQ ID NO: 16616 - DNA, 3223 bp, Homo sapiens
  source 1..3223: mol_type = unassigned DNA
gcagtccagggcggcgcgcaccgcctcgctggcgctcagagattatttaatgtaatggcaactccacgggggaggacaaagaaaaaagcatcttttgatcattctccggatagccttcctttgaggagctccggtaggcaggcgaagaagaaagcaacagagacaacagatgaggatgaagatggtggctcagagaagaagtacaggaaatgtgaaaaggcaggctgtacggcaacatgtcctgtgtgctttgcaagtgcttctgaaagatgtgccaaaaatggctacacctcccgatggtatcatctctcctgtggggaacatttctgtaatgaatgctttgaccattactacagaagccataaggatggatatgacaaatatactacatggaaaaaaatatggactagcaatggcaaaaccgaacctagtcccaaagctttcatggcagaccagcaactcccctactgggttcagtgtacaaaacctgagtgtagaaaatggaggcagcttaccaaggaaatccagcttactccacagatagccaagacttatcgatgcggtatgaaaccaaatactgctattaagcctgagacctcagatcattgttccctcccagaggatctaagagtattggaagtttccaaccattggtggtactctatgctcatcctacctcctttgctgaaagacagtgtggcagcgcccctgctgtctgcctactaccctgactgtgttggcatgagcccctcctgcaccagcacaaaccgcgccgctgccactggcaatgccagccctgggaagctggagcactccaaggctgccctctccgtgcacgttccaggcatgaaccgatacttccagcctttctaccagcccaatgagtgtggcaaagccctctgtgtgaggccggatgtgatggaactggatgagctctatgagtttccagagtattcccgagaccccaccatgtacctggctttgagaaacctcatcctcgcactgtggtatactaactgcaaagaagctcttactcctcagaaatgtattcctcacatcatcgtccggggtctcgtgcgtattcgatgcgttcaggaagtggagagaatactgtattttatgaccagaaaaggtctcatcaacactggagttctcagcgtgggagccgaccagtatcttctccctaaggactaccacaataaatcagtcatcattatcggggctggtccagcaggattagcagctgctaggcaactgcataactttggaattaaggtgactgtcctggaagccaaagacagaattggaggccgagtctgggatgataaatcttttaaaggcgtcacagtgggaagaggagctcagattgtcaatgggtgtattaacaacccagtagcattaatgtgtgaacaacttggcatcagcatgcataaatttggagaaagatgtgacttaattcaggaaggtggaagaataactgaccccactattgacaagcgcatggattttcattttaatgctctcttggatgttgtctctgagtggagaaaggataagactcagctccaagatgtccctttaggagaaaagatagaagaaatctacaaggcatttattaaggaatctggtatccaattcagtgagctggagggacaggtgcttcagttccatctcagtaacctggagtacgcctgtggcagcaaccttcaccaggtatctgctcgctcgtgggaccacaatgaattctttgcccagtttgctggtgaccacactctgctaactcccgggtactcggtgataattgaaaaactggcagaagggcttgacattcaactcaaatctccagtgcagtgtattgattattctggagatgaagtgcaggttaccactacagatggcacagggtattctgcacaaaaggtattagtcactgtaccactggctttactacagaaaggtgccattcagtttaatccaccgttgtcagagaagaagatgaaggctatcaacagcttaggcgcaggcatcattgaaaagattgccttgcaatttccgtatagattttgggacagtaaagtacaaggggctgacttttttggtcacgttcctcccagtgccagcaagcgagggctttttgccgtgttctatgacatggatccccagcacagcgtgctgatgtctgtgattgccggggaggctgtcgcatccgtgaggaccctggatgacaaacaggtgctgcagcagtgcatggccacgctccgggagctgttcaaggagcaggaggtcccagatcccacaaagtattttgtcactcggtggagcacagacccatggatccagatggcatacagttttgtgaagacaggtggaagtggggaggcctacgatatcattgctgaagacattcaaggaaccgtctttttcgctggtgaggcaacaaacaggcatttcccacaaactgttacaggggcatatttgagtggcgttcgagaagcaagcaagattgcagcattttaagaattcggtggacccagctttcttctgtaccccagatggggaaatttgaatcacatgttaaacctcagttttataagagggggaaaaaaccgtctctacatagtaaaactgaaatgtttctaaggcgatatgataatgcaaacctatttcatcactctaaaagcactgacctcaaaaaaccttataagcacttagatttaattgcattttccataggttcaactactgctgaaagtctggatttcagaataaagcagaatgtaagtttcagttgaggccatggatttgattgttccatggctggaagttccctttagatttcacattttatatggctgatcaattttcatacattgagaaaccaagtcaatcaagcaggaatcatttaaaaaccagataaagccatgtttttcttctgtgacaatttatcagtatctttaccaatgagccttaatttttatataggtccaatattgagcttttacttaaaatttagatagaacttttttttggatacagcacaaactccagttgacagtaaaatgaagcttctaggtattttgtattgtacatatttcctcctactgggtgttcaaaagaaatttaaattcaagtaccttttgtgataaaatgttttagatttgtgcacccattggcaaaacaggaaagtttccagataggtattgtatcattgagaatgcagcac

SEQ ID NO: 16617 - DNA, 4574 bp, Homo sapiens
  source 1..4574: mol_type = unassigned DNA
agtcctgtcggctcctcccaccccgggtcacgccgtgacaggggcggaagcggcggcggcggcggcggccgagaagaggctggggctcgcggcgcggctgcagccgtcctgtgcgcgcggcgcgcggctccggagaggcgcccgcagtccagggcggcgcgcaccgcctcgctggcgctcagagcggtgccttttccccgagactcccggcacctcttcagcgcaaagattatttaatgtaatggcaactccacgggggaggacaaagaaaaaagcatcttttgatcattctccggatagccttcctttgaggagctccggtaggcaggcgaagaagaaagcaacagagacaacagatgaggatgaagatggtggctcagagaagaagtacaggaaatgtgaaaaggcaggctgtacggcaacatgtcctgtgtgctttgcaagtgcttctgaaagatgtgccaaaaatggctacacctcccgatggtatcatctctcctgtggggaacatttctgtaatgaatgctttgaccattactacagaagccataaggatggatatgacaaatatactacatggaaaaaaatatggactagcaatggcaaaaccgaacctagtcccaaagctttcatggcagaccagcaactcccctactgggttcagtgtacaaaacctgagtgtagaaaatggaggcagcttaccaaggaaatccagcttactccacagatagccaagacttatcgatgcggtatgaaaccaaatactgctattaagcctgagacctcagatcattgttccctcccagaggatctaagagtattggaagtttccaaccattggtggtactctatgctcatcctacctcctttgctgaaagacagtgtggcagcgcccctgctgtctgcctactaccctgactgtgttggcatgagcccctcctgcaccagcacaaaccgcgccgctgccactggcaatgccagccctgggaagctggagcactccaaggctgccctctccgtgcacgttccaggcatgaaccgatacttccagcctttctaccagcccaatgagtgtggcaaagccctctgtgtgaggccggatgtgatggaactggatgagctctatgagtttccagagtattcccgagaccccaccatgtacctggctttgagaaacctcatcctcgcactgtggtatactaactgcaaagaagctcttactcctcagaaatgtattcctcacatcatcgtccggggtctcgtgcgtattcgatgcgttcaggaagtggagagaatactgtattttatgaccagaaaaggtctcatcaacactggagttctcagcgtgggagccgaccagtatcttctccctaaggactaccacaataaatcagtcatcattatcggggctggtccagcaggattagcagctgctaggcaactgcataactttggaattaaggtgactgtcctggaagccaaagacagaattggaggccgagtctgggatgataaatcttttaaaggcgtcacagtgggaagaggagctcagattgtcaatgggtgtattaacaacccagtagcattaatgtgtgaacaacttggcatcagcatgcataaatttggagaaagatgtgacttaattcaggaaggtggaagaataactgaccccactattgacaagcgcatggattttcattttaatgctctcttggatgttgtctctgagtggagaaaggataagactcagctccaagatgtccctttaggagaaaagatagaagaaatctacaaggcatttattaaggaatctggtatccaattcagtgagctggagggacaggtgcttcagttccatctcagtaacctggagtacgcctgtggcagcaaccttcaccaggtatctgctcgctcgtgggaccacaatgaattctttgcccagtttgctggtgaccacactctgctaactcccgggtactcggtgataattgaaaaactggcagaagggcttgacattcaactcaaatctccacaggtgcagtgtattgattattctggagatgaagtgcaggttaccactacagatggcacagggtattctgcacaaaaggtattagtcactgtaccactggctttactacagaaaggtgccattcagtttaatccaccgttgtcagagaagaagatgaaggctatcaacagcttaggcgcaggcatcattgaaaagattgccttgcaatttccgtatagattttgggacagtaaagtacaaggggctgacttttttggtcacgttcctcccagtgccagcaagcgagggctttttgccgtgttctatgacatggatccccagaagaagcacagcgtgctgatgtctgtgattgccggggaggctgtcgcatccgtgaggaccctggatgacaaacaggtgctgcagcagtgcatggccacgctccgggagctgttcaaggagcaggaggtcccagatcccacaaagtattttgtcactcggtggagcacagacccatggatccagatggcatacagttttgtgaagacaggtggaagtggggaggcctacgatatcattgctgaagacattcaaggaaccgtctttttcgctggtgaggcaacaaacaggcatttcccacaaactgttacaggggcatatttgagtggcgttcgagaagcaagcaagattgcagcattttaagaattcggtggacccagctttcttctgtaccccagatggggaaatttgaatcacatgttaaacctcagttttataagagggggaaaaaaccgtctctacatagtaaaactgaaatgtttctaaggcgatatgataatgcaaacctatttcatcactctaaaagcactgacctcaaaaaaccttataagcacttagatttaattgcattttccataggttcaactactgctgaaagtctggatttcagaataaagcagaatgtaagtttcagttgaggccatggatttgattgttccatggctggaagttccctttagatttcacattttatatggctgatcaattttcatacattgagaaaccaagtcaatcaagcaggaatcatttaaaaaccagataaagccatgtttttcttctgtgacaatttatcagtatctttaccaatgagccttaatttttatataggtccaatattgagcttttacttaaaatttagatagaacttttttttggatacagcacaaactccagttgacagtaaaatgaagcttctaggtattttgtattgtacatatttcctcctactgggtgttcaaaagaaatttaaattcaagtaccttttgtgataaaatgttttagatttgtgcacccattggcaaaacaggaaagtttccagataggtattgtatcattgagaatgcagcacagatagtgtgggcttcacactatagacacagaatatagctttttcttaaagccaaatttgggtgataggacactttaaatatccttaattttggcaaccactagcaaaaaaacttgtcagaataatttaaccaagcccctctccacttcttttatttaaaagcactgattcaattgctaggaatatttttgcagatttttctttacagtattccataggcaggtccactggaaaactgcagaaaaatgtgagctctcctggtaaatagtatacattttataagctatattttaaaggcctaagaacatggcaagtatttacttttatcttttttttaaaaacactcatgacagaaaacagtttaataatatctcattctaaaataaaacactggttgcagggtcttcaggatgcctattttgccaagaaacttcagtatacaggttagaaatatgcttttgtttttgaacaataatatactggtttgctttaaagaagggactaaatatgactttaaagagacttcaaaatattgagtattttaaaaatttaaaagtaggtcagtttataacgagtaaatacctaacacaccaagaatgtgcagtgaacctcaggcatttaagacacctcccccaccgcccgccccccgccccccccaatcaaagtgtggtcccaaaacaagccaacagctgtatatctcaaaagttaacccaagacaactctgatatttaggttatttgttgagactcattggtactgactggcaagtattctgctttaaagtatcatgtattaaaatgtttagacagcatgtgttttaaagtgataaatgcaaaatgttaagtttgaaatggttaacagtaaattattatgttagtttccaggcacttgaactgtgctacaagtaggggaaaacctactttaaagtatggtaaatgtgtgttttaaacttcctatcaagtgacatacttcatttgattttttgtttaagaagccatggtacttttttcttgagttactttggatatgttttttcaatgccatctgaagattttgtaattgagtagcagtaaatatacagatttacaatgttttaactacagttcatgaatagctggttgtgtaaaactaataaaaaactagactttcacatgt

SEQ ID NO: 16618 - DNA, 3878 bp, Homo sapiens
  source 1..3878: mol_type = unassigned DNA
agtcctgtcggctcctcccaccccgggtcacgccgtgacaggggcggaagcggcggcggcggcggcggccgagaagaggctggggctcgcggcgcggctgcagccgtcctgtgcgcgcggcgcgcggctccggagaggcgcccgcagtccagggcggcgcgcaccgcctcgctggcgctcagagcggtgccttttccccgagactcccggcacctcttcagcgcaaagattatttaatgtaatggcaactccacgggggaggacaaagaaaaaagcatcttttgatcattctccggatagccttcctttgaggagctccggtaggcaggcgaagaagaaagcaacagagacaacagatgaggatgaagatggtggctcagagaagaagtacaggaaatgtgaaaaggcaggctgtacggcaacatgtcctgtgtgctttgcaagtgcttctgaaagatgtgccaaaaatggctacacctcccgatggtatcatctctcctgtggggaacatttctgtaatgaatgctttgaccattactacagaagccataaggatggatatgacaaatatactacatggaaaaaaatatggactagcaatggcaaaaccgaacctagtcccaaagctttcatggcagaccagcaactcccctactgggttcagtgtacaaaacctgagtgtagaaaatggaggcagcttaccaaggaaatccagcttactccacagatagccaagacttatcgatgcggtatgaaaccaaatactgctattaagcctgagacctcagatcattgttccctcccagaggatctagaagctcttactcctcagaaatgtattcctcacatcatcgtccggggtctcgtgcgtattcgatgcgttcaggaagtggagagaatactgtattttatgaccagaaaaggtctcatcaacactggagttctcagcgtgggagccgaccagtatcttctccctaaggactaccacaataaatcagtcatcattatcggggctggtccagcaggattagcagctgctaggcaactgcataactttggaattaaggtgactgtcctggaagccaaagacagaattggaggccgagtctgggatgataaatcttttaaaggcgtcacagtgggaagaggagctcagattgtcaatgggtgtattaacaacccagtagcattaatgtgtgaacaagtatctgctcgctcgtgggaccacaatgaattctttgcccagtttgctggtgaccacactctgctaactcccgggtactcggtgataattgaaaaactggcagaagggcttgacattcaactcaaatctccacaggtgcagtgtattgattattctggagatgaagtgcaggttaccactacagatggcacagggtattctgcacaaaaggtattagtcactgtaccactggctttactacagaaaggtgccattcagtttaatccaccgttgtcagagaagaagatgaaggctatcaacagcttaggcgcaggcatcattgaaaagattgccttgcaatttccgtatagattttgggacagtaaagtacaaggggctgacttttttggtcacgttcctcccagtgccagcaagcgagggctttttgccgtgttctatgacatggatccccagaagaagcacagcgtgctgatgtctgtgattgccggggaggctgtcgcatccgtgaggaccctggatgacaaacaggtgctgcagcagtgcatggccacgctccgggagctgttcaaggagcaggaggtcccagatcccacaaagtattttgtcactcggtggagcacagacccatggatccagatggcatacagttttgtgaagacaggtggaagtggggaggcctacgatatcattgctgaagacattcaaggaaccgtctttttcgctggtgaggcaacaaacaggcatttcccacaaactgttacaggggcatatttgagtggcgttcgagaagcaagcaagattgcagcattttaagaattcggtggacccagctttcttctgtaccccagatggggaaatttgaatcacatgttaaacctcagttttataagagggggaaaaaaccgtctctacatagtaaaactgaaatgtttctaaggcgatatgataatgcaaacctatttcatcactctaaaagcactgacctcaaaaaaccttataagcacttagatttaattgcattttccataggttcaactactgctgaaagtctggatttcagaataaagcagaatgtaagtttcagttgaggccatggatttgattgttccatggctggaagttccctttagatttcacattttatatggctgatcaattttcatacattgagaaaccaagtcaatcaagcaggaatcatttaaaaaccagataaagccatgtttttcttctgtgacaatttatcagtatctttaccaatgagccttaatttttatataggtccaatattgagcttttacttaaaatttagatagaacttttttttggatacagcacaaactccagttgacagtaaaatgaagcttctaggtattttgtattgtacatatttcctcctactgggtgttcaaaagaaatttaaattcaagtaccttttgtgataaaatgttttagatttgtgcacccattggcaaaacaggaaagtttccagataggtattgtatcattgagaatgcagcacagatagtgtgggcttcacactatagacacagaatatagctttttcttaaagccaaatttgggtgataggacactttaaatatccttaattttggcaaccactagcaaaaaaacttgtcagaataatttaaccaagcccctctccacttcttttatttaaaagcactgattcaattgctaggaatatttttgcagatttttctttacagtattccataggcaggtccactggaaaactgcagaaaaatgtgagctctcctggtaaatagtatacattttataagctatattttaaaggcctaagaacatggcaagtatttacttttatcttttttttaaaaacactcatgacagaaaacagtttaataatatctcattctaaaataaaacactggttgcagggtcttcaggatgcctattttgccaagaaacttcagtatacaggttagaaatatgcttttgtttttgaacaataatatactggtttgctttaaagaagggactaaatatgactttaaagagacttcaaaatattgagtattttaaaaatttaaaagtaggtcagtttataacgagtaaatacctaacacaccaagaatgtgcagtgaacctcaggcatttaagacacctcccccaccgcccgccccccgccccccccaatcaaagtgtggtcccaaaacaagccaacagctgtatatctcaaaagttaacccaagacaactctgatatttaggttatttgttgagactcattggtactgactggcaagtattctgctttaaagtatcatgtattaaaatgtttagacagcatgtgttttaaagtgataaatgcaaaatgttaagtttgaaatggttaacagtaaattattatgttagtttccaggcacttgaactgtgctacaagtaggggaaaacctactttaaagtatggtaaatgtgtgttttaaacttcctatcaagtgacatacttcatttgattttttgtttaagaagccatggtacttttttcttgagttactttggatatgttttttcaatgccatctgaagattttgtaattgagtagcagtaaatatacagatttacaatgttttaactacagttcatgaatagctggttgtgtaaaactaataaaaaactagactttcacatgt

SEQ ID NO: 16619 - DNA, 2045 bp, Homo sapiens
  source 1..2045: mol_type = unassigned DNA
attgttccctcccagaggatctaagagtattggaagtttccaaccattggtggtactctatgctcatcctacctcctttgctgaaagacagtgtggcagcgcccctgctgtctgcctactaccctgactgtgttggcatgagcccctcctgcaccagcacaaaccgcgccgctgccactggcaatgccagccctgggaagctggagcactccaaggctgccctctccgtgcacgttccaggcatgaaccgatacttccagcctttctaccagcccaatgagtgtggcaaagccctctgtgtgaggccggatgtgatggaactggatgagctctatgagtttccagagtattcccgagaccccaccatgtacctggctttgagaaacctcatcctcgcactgtggtatactaactgcaaagaagctcttactcctcagaaatgtattcctcacatcatcgtccggggtctcgtgcgtattcgatgcgttcaggaagtggagagaatactgtattttatgaccagaaaaggtctcatcaacactggagttctcagcgtgggagccgaccagtatcttctccctaaggactaccacaataaatcagtcatcattatcggggctggtccagcaggattagcagctgctaggcaactgcataactttggaattaaggtgactgtcctggaagccaaagacagaattggaggccgagtctgggatgataaatcttttaaaggcgtcacagtgggaagaggagctcagattgtcaatgggtgtattaacaacccagtagcattaatgtgtgaacaacttggcatcagcatgcataaatttggagaaagatgtgacttaattcaggaaggtggaagaataactgaccccactattgacaagcgcatggattttcattttaatgctctcttggatgttgtctctgagtggagaaaggataagactcagctccaagatgtccctttaggagaaaagatagaagaaatctacaaggcatttattaaggaatctggtatccaattcagtgagctggagggacaggtgcttcagttccatctcagtaacctggagtacgcctgtggcagcaaccttcaccaggtatctgctcgctcgtgggaccacaatgaattctttgcccagtttgctggtgaccacactctgctaactcccgggtactcggtgataattgaaaaactggcagaagggcttgacattcaactcaaatctccacaggtgcagtgtattgattattctggagatgaagtgcaggttaccactacagatggcacagggtattctgcacaaaaggtattagtcactgtaccactggctttactacagaaaggtgccattcagtttaatccaccgttgtcagagaagaagatgaaggctatcaacagcttaggcgcaggcatcattgaaaagattgccttgcaatttccgtatagattttgggacagtaaagtacaaggggctgacttttttggtcacgttcctcccagtgccagcaagcgagggctttttgccgtgttctatgacatggatccccagaagaagcacagcgtgctgatgtctgtgattgccggggaggctgtcgcatccgtgaggaccctggatgacaaacaggtgctgcagcagtgcatggccacgctccgggagctgttcaaggagcaggaggtcccagatcccacaaagtattttgtcactcggtggagcacagacccatggatccagatggcatacagttttgtgaagacaggtggaagtggggaggcctacgatatcattgctgaagacattcaaggaaccgtctttttcgctggtgaggcaacaaacaggcatttcccacaaactgttacaggggcatatttgagtggcgttcgagaagcaagcaagattgcagcattttaagaattcggtggacccagctttcttctgtaccccagatggggaaatttgaatcacatgttaaacctcagttttataagagggggaaaaaaccgtctctacatagtaaaactgaaatgtttctaa

SEQ ID NO: 16620 - DNA, 495 bp, Homo sapiens
  source 1..495: mol_type = unassigned DNA
atgggcagggcggagcgagcgctgcggctaaagcgaaggcggggaccctacccatccctagtcctgtcggctcctcccaccccggaagaagcacagcgtgctgatgtctgtgattgccggggaggctgtcgcatccgtgaggaccctggatgacaaacaggtgctgcagcagtgcatggccacgctccgggagctgttcaaggagcaggaggtcccagatcccacaaagtattttgtcactcggtggagcacagacccatggatccagatggcatacagttttgtgaagacaggtggaagtggggaggcctacgatatcattgctgaagacattcaaggaaccgtctttttcgctggtgaggcaacaaacaggcatttcccacaaactgttacaggggcatatttgagtggcgttcgagaagcaagcaagattgcagcattttaagaattcggtggacccagctttcttctgtaccccagatggggaaatttgaa

SEQ ID NO: 16621 - DNA, 4884 bp, Homo sapiens
  source 1..4884: mol_type = unassigned DNA
taatgggggtcgcccgggagtcggaagggggaggggaaagggaggaggcagccaaggaattgtttttttctctggccccgccctcgcccggggggccaatggtgatgatctgtttcccccggagcctcgcccagctcctgtgtttcagccaatgagcggcggaagcggctccgaggggggcgggtccgggaggctgtgcgtgtcttgtgagagctcttgaaccaagtcagcgctggagtcggctaggcggctggaaacggcggctgccgccggtgactcagggaggcgggaggcgggggaggagctcttcctgcaggcgtggaaaccatggtgctcacgctcggagaaagttggccggtattggtggggaggaggtttctcagtctgtccgcagccgacggcagcgatggcagccacgacagctgggacgtggagcgcgtcgccgagtggccctggctctccgggaccattcgagctgtttcccacaccgacgttaccaagaaggatctgaaggtgtgtgtggaatttgatggggaatcttggaggaaaagaagatggatagaagtctacagccttctaaggagagcatttttagtagaacataatttggttttagctgaacgaaagtcacctgaaatttctgaacgaattgtacagtggcctgcaataacgtacaaacctctgttggacaaagctggtttgggatccataacttctgttcgctttctgggagatcaacaaagagtatttctttctaaagaccttttgaagcctatacaggatgtaaacagtcttcgactttctcttacggataatcagattgtcagtaaagaatttcaagctttgattgtgaagcatttagatgaaagccatcttttaaaaggtgacaaaaacttagttggttcagaagtaaaaatttatagcttggacccatctactcagtggttttcagcaaccgttataaatggaaacccagcatcaaaaactcttcaagtcaactgtgaggagattccagcactgaaaattgttgatccgtcactgattcatgttgaagttgtacacgataaccttgtgacatgtggtaattctgcaagaattggagctgtaaaacgcaagtcttctgagaataatggaaccctggtttccaaacaagcaaaatcttgctctgaggcctctcccagtatgtgtcctgtgcagtctgtacctacaacagtttttaaggagatactgcttggctgtactgcggcaactccacctagtaaggacccaagacagcaaagtactccccaggctgccaactctccacctaaccttggagcaaaaattcctcaaggatgtcataaacaaagtttaccagaggaaatttcttcctgtctaaatacaaagtctgaagctctgagaacaaaaccagatgtctgcaaagcagggttgctctcaaagtcctctcagattggaactggagacttgaaaattctgactgagccaaaaggcagctgtactcagcctaagacaaacactgatcaggaaaacagattggagtctgttccacaagcattgactggccttcctaaggagtgcttacctacaaaggcttcttctaaggcagaattggaaattgccaatcctcctgaactgcagaagcacctagaacatgcaccttccccatcggatgtttcaaatgcaccagaagtgaaagcaggtgtcaatagtgatagccctaataactgttcaggaaaaaaggtagaaccttcagctttagcttgccgatcacagaatttaaaggaatcttcagtaaaagtagataatgaaagctgttgttcaagaagcaacaataaaatccagaatgccccatccaggaagtcggttttgacagacccagctaaactcaaaaagctgcaacagagtggcgaggccttcgtacaggatgattcttgtgtgaacatcgtggcacagttgcctaaatgccgagagtgtcgcttggacagtctccgcaaggataaggagcaacagaaggactcacctgtgttttgccgcttctttcacttcaggaggttacaattcaacaaacatggtgtgttgcgggtagaaggcttcttaacaccaaacaagtatgacaatgaagcaattggcttgtggttacctttaaccaaaaacgttgtggggattgatttggacacagcaaagtacatcttggccaacattggagaccacttctgtcaaatggtgatttctgaaaaggaagctatgtcaactattgagccacacagacaggttgcttggaagcgagctgtcaaaggtgttcgagaaatgtgtgatgtgtgcgacaccaccatcttcaacctgcactgggtgtgtcctcggtgtgggtttggagtatgtgtggactgctaccggatgaagagaaagaattgccaacagggtgctgcttacaagactttctcttggctaaaatgtgtgaagagtcagatacatgaaccagagaacttaatgcccacacagatcattcctggaaaagcactctatgatgttggagacattgttcattctgtaagagcgaaatggggaataaaggcaaactgcccttgttcaaacaggcaattcaaactcttttcaaagccagcctcaaaggaagacctaaaacagacttctttagctggagaaaaaccgactcttggtgcagtgctccagcagaatccctcagtgttggagccagcagctgtgggtggggaagcagcctccaagccagccggcagcatgaagcctgcctgtccagccagcacatctcctctaaactggctggccgacctaaccagcgggaatgtcaacaaggaaaacaaggaaaaacaaccaacaatgccaattttaaagaatgaaatcaaatgccttccacccctcccacctttaagcaaatccagcacagtcctccatacgtttaacagcacaattttgacacccgtaagcaacaacaattctggtttcctccggaatctcttgaattcttctacaggaaagacagaaaatggactcaagaatacaccaaaaatccttgatgacatctttgcctctttggtgcaaaataagacgacttctgatttatctaagaggcctcaaggactaaccatcaagcccagcattctgggctttgacactcctcactattggctttgtgataatcgcttgctgtgcttgcaagaccccaacaataagagcaactggaatgtgtttagggagtgctggaaacaagggcagccagtgatggtgtctggagtgcatcataaattgaactctgaactttggaaacctgaatccttcaggaaagagtttggtgagcaggaagtagacctagttaattgtaggaccaatgaaatcatcacaggagccacagtaggagacttctgggatggatttgaagatgttccaaatcgtttgaaaaatgaaaaagaaccaatggtgttgaaacttaaggactggccaccaggagaagattttagagatatgatgccttccaggtttgatgatctgatggccaacattccactgcccgagtacacaaggcgagatggcaaactgaatttggcctctaggctgccaaactactttgttcggccagatctgggccccaagatgtataatgcttatggattaatcactcctgaagatcggaaatatggaacaacaaatcttcacttagatgtatctgatgcagctaatgtcatggtctatgtgggaattcccaaaggacagtgtgagcaagaagaagaagtccttaagaccatccaagatggagattctgacgaactcacaataaagcgatttattgaaggaaaagagaagccaggagcactgtggcacatatatgctgcaaaggacacggagaagataagggaatttcttaaaaaggtatcagaagagcaaggtcaagaaaacccagcagaccacgatcctattcatgatcaaagctggtatttagaccgatcattaagaaaacgtcttcatcaagagtatggagttcaaggctgggctattgtacagtttcttggggatgtggtgtttatcccggcaggagctccacatcaggttcataacttatatagctgcatcaaagtggctgaagattttgtttctccagagcatgttaaacactgcttctggcttactcaggaattccgatatctgtcacagactcataccaatcacgaagataaattacaggtgaagaatgttatctaccatgcagtgaaagatgcagttgctatgctgaaagccagtgaatccagttttggcaaaccttaatctccctgcacattggaaatgaattacaggcagctgttcaaactcttcaggcaggattcctgtggactttgagattcatgttacctcatcttcttttttaaactgtacccaacttgtgagggtactctgtctaatgtatatttctagtgtttacagacagtaaatgtgtatatgtagtaactatttacagaacatgcatccttaaactgtgacttctcacctagtgcagaacttttaccaggctgtaaaagcaaaacctcgtatcagctctggaacaatacctgcagttattcttcagctgtttggacaacttagattgggtttataactattaggaatcactgcacagtttatttgggttgtgttttgtgtctgagtcccctccctcatcccttagggtccagaagagcaatggaggaagtgacagctaatgttgcagttcttattgtatggcataggactggcattatatagcagaaatcaactactgtacaatttcttggggttaaccatctttagttaaatggaattttaatttaaatgacgctttgctaattttaagtgttaagcattttgcattaaaatattcat

SEQ ID NO: 16622 - DNA, 4621 bp, Homo sapiens
  source 1..4621: mol_type = unassigned DNA
ctcggctgcggggagaggggagagaaagggaggagctcttcctgcaggcgtggaaaccatggtgctcacgctcggagaaagttggccggtattggtggggaggaggtttctcagtctgtccgcagccgacggcagcgatggcagccacgacagctgggacgtggagcgcgtcgccgagtggccctggctctccgggaccattcgagctgtttcccacaccgacgttaccaagaaggatctgaaggtgtgtgtggaatttgatggggaatcttggaggaaaagaagatggatagaagtctacagccttctaaggagagcatttttagtagaacataatttggttttagctgaacgaaagtcacctgaaatttctgaacgaattgtacagtggcctgcaataacgtacaaacctctgttggacaaagctggtttgggatccataacttctgttcgctttctgggagatcaacaaagagtatttctttctaaagaccttttgaagcctatacaggatgtaaacagtcttcgactttctcttacggataatcagattgtcagtaaagaatttcaagctttgattgtgaagcatttagatgaaagccatcttttaaaaggtgacaaaaacttagttggttcagaagtaaaaatttatagcttggacccatctactcagtggttttcagcaaccgttataaatggaaacccagcatcaaaaactcttcaagtcaactgtgaggagattccagcactgaaaattgttgatccgtcactgattcatgttgaagttgtacacgataaccttgtgacatgtggtaattctgcaagaattggagctgtaaaacgcaagtcttctgagaataatggaaccctggtttccaaacaagcaaaatcttgctctgaggcctctcccagtatgtgtcctgtgcagtctgtacctacaacagtttttaaggagatactgcttggctgtactgcggcaactccacctagtaaggacccaagacagcaaagtactccccaggctgccaactctccacctaaccttggagcaaaaattcctcaaggatgtcataaacaaagtttaccagaggaaatttcttcctgtctaaatacaaagtctgaagctctgagaacaaaaccagatgtctgcaaagcagggttgctctcaaagtcctctcagattggaactggagacttgaaaattctgactgagccaaaaggcagctgtactcagcctaagacaaacactgatcaggaaaacagattggagtctgttccacaagcattgactggccttcctaaggagtgcttacctacaaaggcttcttctaaggcagaattggaaattgccaatcctcctgaactgcagaagcacctagaacatgcaccttccccatcggatgtttcaaatgcaccagaagtgaaagcaggtgtcaatagtgatagccctaataactgttcaggaaaaaaggtagaaccttcagctttagcttgccgatcacagaatttaaaggaatcttcagtaaaagtagataatgaaagctgttgttcaagaagcaacaataaaatccagaatgccccatccaggaagtcggttttgacagacccagctaaactcaaaaagctgcaacagagtggcgaggccttcgtacaggatgattcttgtgtgaacatcgtggcacagttgcctaaatgccgagagtgtcgcttggacagtctccgcaaggataaggagcaacagaaggactcacctgtgttttgccgcttctttcacttcaggaggttacaattcaacaaacatggtgtgttgcgggtagaaggcttcttaacaccaaacaagtatgacaatgaagcaattggcttgtggttacctttaaccaaaaacgttgtggggattgatttggacacagcaaagtacatcttggccaacattggagaccacttctgtcaaatggtgatttctgaaaaggaagctatgtcaactattgagccacacagacaggttgcttggaagcgagctgtcaaaggtgttcgagaaatgtgtgatgtgtgcgacaccaccatcttcaacctgcactgggtgtgtcctcggtgtgggtttggagtatgtgtggactgctaccggatgaagagaaagaattgccaacagggtgctgcttacaagactttctcttggctaaaatgtgtgaagagtcagatacatgaaccagagaacttaatgcccacacagatcattcctggaaaagcactctatgatgttggagacattgttcattctgtaagagcgaaatggggaataaaggcaaactgcccttgttcaaacaggcaattcaaactcttttcaaagccagcctcaaaggaagacctaaaacagacttctttagctggagaaaaaccgactcttggtgcagtgctccagcagaatccctcagtgttggagccagcagctgtgggtggggaagcagcctccaagccagccggcagcatgaagcctgcctgtccagccagcacatctcctctaaactggctggccgacctaaccagcgggaatgtcaacaaggaaaacaaggaaaaacaaccaacaatgccaattttaaagaatgaaatcaaatgccttccacccctcccacctttaagcaaatccagcacagtcctccatacgtttaacagcacaattttgacacccgtaagcaacaacaattctggtttcctccggaatctcttgaattcttctacaggaaagacagaaaatggactcaagaatacaccaaaaatccttgatgacatctttgcctctttggtgcaaaataagacgacttctgatttatctaagaggcctcaaggactaaccatcaagcccagcattctgggctttgacactcctcactattggctttgtgataatcgcttgctgtgcttgcaagaccccaacaataagagcaactggaatgtgtttagggagtgctggaaacaagggcagccagtgatggtgtctggagtgcatcataaattgaactctgaactttggaaacctgaatccttcaggaaagagtttggtgagcaggaagtagacctagttaattgtaggaccaatgaaatcatcacaggagccacagtaggagacttctgggatggatttgaagatgttccaaatcgtttgaaaaatgaaaaagaaccaatggtgttgaaacttaaggactggccaccaggagaagattttagagatatgatgccttccaggtttgatgatctgatggccaacattccactgcccgagtacacaaggcgagatggcaaactgaatttggcctctaggctgccaaactactttgttcggccagatctgggccccaagatgtataatgcttatggattaatcactcctgaagatcggaaatatggaacaacaaatcttcacttagatgtatctgatgcagctaatgtcatggtctatgtgggaattcccaaaggacagtgtgagcaagaagaagaagtccttaagaccatccaagatggagattctgacgaactcacaataaagcgatttattgaaggaaaagagaagccaggagcactgtggcacatatatgctgcaaaggacacggagaagataagggaatttcttaaaaaggtatcagaagagcaaggtcaagaaaacccagcagaccacgatcctattcatgatcaaagctggtatttagaccgatcattaagaaaacgtcttcatcaagagtatggagttcaaggctgggctattgtacagtttcttggggatgtggtgtttatcccggcaggagctccacatcaggttcataacttatatagctgcatcaaagtggctgaagattttgtttctccagagcatgttaaacactgcttctggcttactcaggaattccgatatctgtcacagactcataccaatcacgaagataaattacaggtgaagaatgttatctaccatgcagtgaaagatgcagttgctatgctgaaagccagtgaatccagttttggcaaaccttaatctccctgcacattggaaatgaattacaggcagctgttcaaactcttcaggcaggattcctgtggactttgagattcatgttacctcatcttcttttttaaactgtacccaacttgtgagggtactctgtctaatgtatatttctagtgtttacagacagtaaatgtgtatatgtagtaactatttacagaacatgcatccttaaactgtgacttctcacctagtgcagaacttttaccaggctgtaaaagcaaaacctcgtatcagctctggaacaatacctgcagttattcttcagctgtttggacaacttagattgggtttataactattaggaatcactgcacagtttatttgggttgtgttttgtgtctgagtcccctccctcatcccttagggtccagaagagcaatggaggaagtgacagctaatgttgcagttcttattgtatggcataggactggcattatatagcagaaatcaactactgtacaatttcttggggttaaccatctttagttaaatggaattttaatttaaatgacgctttgctaattttaagtgttaagcattttgcattaaaatattcatataata

SEQ ID NO: 16623 - DNA, 4928 bp, Homo sapiens
  source 1..4928: mol_type = unassigned DNA
actatcgctcctccctctagctgagtacgcctgaaaccgcacgttctcttccctgccctcccccgctaaccctgcaccgccctcaccctttcctgtgagattcttccgccaagtggaaggctcatcttcggtcgacagcctacgcggttgaagaacaatccacctcgcccagctcctgtgtttcagccaatgagcggcggaagcggctccgaggggggcgggtccgggaggctgtgcgtgtcttgtgagagctcttgaaccaagtcagcgctggagtcggctaggcggctggaaacggcggctgccgccggtgactcagggaggcgggaggcgggggaggagctcttcctgcaggcgtggaaaccatggtgctcacgctcggagaaagttggccggtattggtggggaggaggtttctcagtctgtccgcagccgacggcagcgatggcagccacgacagctgggacgtggagcgcgtcgccgagtggccctggctctccgggaccattcgagctgtttcccacaccgacgttaccaagaaggatctgaaggtgtgtgtggaatttgatggggaatcttggaggaaaagaagatggatagaagtctacagccttctaaggagagcatttttagtagaacataatttggttttagctgaacgaaagtcacctgaaatttctgaacgaattgtacagtggcctgcaataacgtacaaacctctgttggacaaagctggtttgggatccataacttctgttcgctttctgggagatcaacaaagagtatttctttctaaagaccttttgaagcctatacaggatgtaaacagtcttcgactttctcttacggataatcagattgtcagtaaagaatttcaagctttgattgtgaagcatttagatgaaagccatcttttaaaaggtgacaaaaacttagttggttcagaagtaaaaatttatagcttggacccatctactcagtggttttcagcaaccgttataaatggaaacccagcatcaaaaactcttcaagtcaactgtgaggagattccagcactgaaaattgttgatccgtcactgattcatgttgaagttgtacacgataaccttgtgacatgtggtaattctgcaagaattggagctgtaaaacgcaagtcttctgagaataatggaaccctggtttccaaacaagcaaaatcttgctctgaggcctctcccagtatgtgtcctgtgcagtctgtacctacaacagtttttaaggagatactgcttggctgtactgcggcaactccacctagtaaggacccaagacagcaaagtactccccaggctgccaactctccacctaaccttggagcaaaaattcctcaaggatgtcataaacaaagtttaccagaggaaatttcttcctgtctaaatacaaagtctgaagctctgagaacaaaaccagatgtctgcaaagcagggttgctctcaaagtcctctcagattggaactggagacttgaaaattctgactgagccaaaaggcagctgtactcagcctaagacaaacactgatcaggaaaacagattggagtctgttccacaagcattgactggccttcctaaggagtgcttacctacaaaggcttcttctaaggcagaattggaaattgccaatcctcctgaactgcagaagcacctagaacatgcaccttccccatcggatgtttcaaatgcaccagaagtgaaagcaggtgtcaatagtgatagccctaataactgttcaggaaaaaaggtagaaccttcagctttagcttgccgatcacagaatttaaaggaatcttcagtaaaagtagataatgaaagctgttgttcaagaagcaacaataaaatccagaatgccccatccaggaagtcggttttgacagacccagctaaactcaaaaagctgcaacagagtggcgaggccttcgtacaggatgattcttgtgtgaacatcgtggcacagttgcctaaatgccgagagtgtcgcttggacagtctccgcaaggataaggagcaacagaaggactcacctgtgttttgccgcttctttcacttcaggaggttacaattcaacaaacatggtgtgttgcgggtagaaggcttcttaacaccaaacaagtatgacaatgaagcaattggcttgtggttacctttaaccaaaaacgttgtggggattgatttggacacagcaaagtacatcttggccaacattggagaccacttctgtcaaatggtgatttctgaaaaggaagctatgtcaactattgagccacacagacaggttgcttggaagcgagctgtcaaaggtgttcgagaaatgtgtgatgtgtgcgacaccaccatcttcaacctgcactgggtgtgtcctcggtgtgggtttggagtatgtgtggactgctaccggatgaagagaaagaattgccaacagggtgctgcttacaagactttctcttggctaaaatgtgtgaagagtcagatacatgaaccagagaacttaatgcccacacagatcattcctggaaaagcactctatgatgttggagacattgttcattctgtaagagcgaaatggggaataaaggcaaactgcccttgttcaaacaggcaattcaaactcttttcaaagccagcctcaaaggaagacctaaaacagacttctttagctggagaaaaaccgactcttggtgcagtgctccagcagaatccctcagtgttggagccagcagctgtgggtggggaagcagcctccaagccagccggcagcatgaagcctgcctgtccagccagcacatctcctctaaactggctggccgacctaaccagcgggaatgtcaacaaggaaaacaaggaaaaacaaccaacaatgccaattttaaagaatgaaatcaaatgccttccacccctcccacctttaagcaaatccagcacagtcctccatacgtttaacagcacaattttgacacccgtaagcaacaacaattctggtttcctccggaatctcttgaattcttctacaggaaagacagaaaatggactcaagaatacaccaaaaatccttgatgacatctttgcctctttggtgcaaaataagacgacttctgatttatctaagaggcctcaaggactaaccatcaagcccagcattctgggctttgacactcctcactattggctttgtgataatcgcttgctgtgcttgcaagaccccaacaataagagcaactggaatgtgtttagggagtgctggaaacaagggcagccagtgatggtgtctggagtgcatcataaattgaactctgaactttggaaacctgaatccttcaggaaagagtttggtgagcaggaagtagacctagttaattgtaggaccaatgaaatcatcacaggagccacagtaggagacttctgggatggatttgaagatgttccaaatcgtttgaaaaatgaaaaagaaccaatggtgttgaaacttaaggactggccaccaggagaagattttagagatatgatgccttccaggtttgatgatctgatggccaacattccactgcccgagtacacaaggcgagatggcaaactgaatttggcctctaggctgccaaactactttgttcggccagatctgggccccaagatgtataatgcttatggattaatcactcctgaagatcggaaatatggaacaacaaatcttcacttagatgtatctgatgcagctaatgtcatggtctatgtgggaattcccaaaggacagtgtgagcaagaagaagaagtccttaagaccatccaagatggagattctgacgaactcacaataaagcgatttattgaaggaaaagagaagccaggagcactgtggcacatatatgctgcaaaggacacggagaagataagggaatttcttaaaaaggtatcagaagagcaaggtcaagaaaacccagcagaccacgatcctattcatgatcaaagctggtatttagaccgatcattaagaaaacgtcttcatcaagagtatggagttcaaggctgggctattgtacagtttcttggggatgtggtgtttatcccggcaggagctccacatcaggttcataacttatatagctgcatcaaagtggctgaagattttgtttctccagagcatgttaaacactgcttctggcttactcaggaattccgatatctgtcacagactcataccaatcacgaagataaattacaggtgaagaatgttatctaccatgcagtgaaagatgcagttgctatgctgaaagccagtgaatccagttttggcaaaccttaatctccctgcacattggaaatgaattacaggcagctgttcaaactcttcaggcaggattcctgtggactttgagattcatgttacctcatcttcttttttaaactgtacccaacttgtgagggtactctgtctaatgtatatttctagtgtttacagacagtaaatgtgtatatgtagtaactatttacagaacatgcatccttaaactgtgacttctcacctagtgcagaacttttaccaggctgtaaaagcaaaacctcgtatcagctctggaacaatacctgcagttattcttcagctgtttggacaacttagattgggtttataactattaggaatcactgcacagtttatttgggttgtgttttgtgtctgagtcccctccctcatcccttagggtccagaagagcaatggaggaagtgacagctaatgttgcagttcttattgtatggcataggactggcattatatagcagaaatcaactactgtacaatttcttggggttaaccatctttagttaaatggaattttaatttaaatgacgctttgctaattttaagtgttaagcattttgcattaaaatattcatataata

SEQ ID NO: 16624 - DNA, 565 bp, Homo sapiens
  source 1..565: mol_type = unassigned DNA
attttgtttttgtgtttttgcagggaggagctcttcctgcaggcgtggaaaccatggtgctcacgctcggagaaagttggccggtattggtggggaggaggtttctcagtctgtccgcagccgacggcagcgatggcagccacgacagctgggacgtggagcgcgtcgccgagtggccctggctctccgggaccattcgagctgtttcccacaccgacgttaccaagaaggatctgaaggtgtgtgtggaatttgatggggaatcttggaggaaaagaagatggatagaagtctacagccttctaaggagagcatttttagtagaacataatttggttttagctgaacgaaagtcacctgaaatttctgaacgaattgtacagtggcctgcaataacgtacaaacctctgttggacaaagctggtttgggatccataacttctgttcgctttctgggagatcaacaaagagtatttctttctaaagaccttttgaagcctatacaggatgtaaacagtcttcgactttctcttacggataatcagattgtcagtaaagaatttca

SEQ ID NO: 16625 - DNA, 8741 bp, Homo sapiens
  source 1..8741: mol_type = unassigned DNA
gctggagtcggctaggcggctggaaacggcggctgccgccggtgactcagggaggcgggaggcgggggaggagctcttcctgcaggcgtggaaaccatggtgctcacgctcggagaaagttggccggtattggtggggaggaggtttctcagtctgtccgcagccgacggcagcgatggcagccacgacagctgggacgtggagcgcgtcgccgagtggccctggctctccgggaccattcgagctgtttcccacaccgacgttaccaagaaggatctgaaggtgtgtgtggaatttgatggggaatcttggaggaaaagaagatggatagaagtctacagccttctaaggagagcatttttagtagaacataatttggttttagctgaacgaaagtcacctgaaatttctgaacgaattgtacagtggcctgcaataacgtacaaacctctgttggacaaagctggtttgggatccataacttctgttcgctttctgggagatcaacaaagagtatttctttctaaagaccttttgaagcctatacaggatgtaaacagtcttcgactttctcttacggataatcagattgtcagtaaagaatttcaagctttgattgtgaagcatttagatgaaagccatcttttaaaaggtgacaaaaacttagttggttcagaagtaaaaatttatagcttggacccatctactcagtggttttcagcaaccgttataaatggaaacccagcatcaaaaactcttcaagtcaactgtgaggagattccagcactgaaaattgttgatccgtcactgattcatgttgaagttgtacacgataaccttgtgacatgtggtaattctgcaagaattggagctgtaaaacgcaagtcttctgagaataatggaaccctggtttccaaacaagcaaaatcttgctctgaggcctctcccagtatgtgtcctgtgcagtctgtacctacaacagtttttaaggagatactgcttggctgtactgcggcaactccacctagtaaggacccaagacagcaaagtactccccaggctgccaactctccacctaaccttggagcaaaaattcctcaaggatgtcataaacaaagtttaccagaggaaatttcttcctgtctaaatacaaagtctgaagctctgagaacaaaaccagatgtctgcaaagcagggttgctctcaaagtcctctcagattggaactggagacttgaaaattctgactgagccaaaaggcagctgtactcagcctaagacaaacactgatcaggaaaacagattggagtctgttccacaagcattgactggccttcctaaggagtgcttacctacaaaggcttcttctaaggcagaattggaaattgccaatcctcctgaactgcagaagcacctagaacatgcaccttccccatcggatgtttcaaatgcaccagaagtgaaagcaggtgtcaatagtgatagccctaataactgttcaggaaaaaaggtagaaccttcagctttagcttgccgatcacagaatttaaaggaatcttcagtaaaagtagataatgaaagctgttgttcaagaagcaacaataaaatccagaatgccccatccaggaagtcggttttgacagacccagctaaactcaaaaagctgcaacagagtggcgaggccttcgtacaggatgattcttgtgtgaacatcgtggcacagttgcctaaatgccgagagtgtcgcttggacagtctccgcaaggataaggagcaacagaaggactcacctgtgttttgccgcttctttcacttcaggaggttacaattcaacaaacatggtgtgttgcgggtagaaggcttcttaacaccaaacaagtatgacaatgaagcaattggcttgtggttacctttaaccaaaaacgttgtggggattgatttggacacagcaaagtacatcttggccaacattggagaccacttctgtcaaatggtgatttctgaaaaggaagctatgtcaactattgagccacacagacaggttgcttggaagcgagctgtcaaaggtgttcgagaaatgtgtgatgtgtgcgacaccaccatcttcaacctgcactgggtgtgtcctcggtgtgggtttggagtatgtgtggactgctaccggatgaagagaaagaattgccaacagggtgagaaccgatttgattctcctccagcccctctacacagttaaatcaagtgtttttgttgatttgtgtttggcgggtttcttgaagcatgtggagacagagtctgtaaagaacagttactacaaatcagttatttgcaggtgctgcttacaagactttctcttggctaaaatgtgtgaagagtcagatacatgaaccagagaacttaatgcccacacagatcattcctggaaaagcactctatgatgttggagacattgttcattctgtaagagcgaaatggggaataaaggcaaactgcccttgttcaaacaggcaattcaaactcttttcaaagccagcctcaaaggaagacctaaaacaggtatttactgcttatgttaaattcaacatctcttgtaattgtcatttgtctgtttttcaaataacccaaggatttctatcagtgcatttgaaaggaacctggggatagctatcaagtggaaagagagagagaaagaattcatacagttcatgtgacagttcagagacccgttctgacttttcacattactttcgtagactctactgtggcctcttgtagtaggttttacatttttgtttcttgaagaagcacaaagttctaaagtagtctacctaataagtagctgtcgaatttgtaaagggtttaaaaaaattttttgtgtattttgcagaattaaaattattaagataagctttaacatttttaaaattactaaatatattttgcctgtgtttatgcagagttgaaggaaatgatgaaatgaacctttagttgcccatcacacaatgtaaaaaatgttaattttctcagtcctcatatgtctctccttggtggcatccctctcctccccaccatcacatgtacgtcttgctgtcccttctccccctcgttccagtaatcagtatgccgcattgtgtttaataatcagaaatttacatttctataaagctgtggtgtcataaggcaggatgggagagcagaagacttgtaatatttggagtcagaactgaatttgagttcttttccttccacgtgctagttgtgttactttggctgaagtgagctggtttctatgtgcttcagcttcctcatcagtaatatagaaataagaagcaatattgatgattgggcatcacagaattacatcacatgtaaagagagggcctggaccacaacaggggtttgaatattttttttcctccttcttatgtatgtataaactcactcttgccagtttttaaaattattttcttctacagcagtcatcttagatttaatttatgggttcttttaagagctcatcacatttttaaagctaagtcaaaatagcattttctctttctctgcatcccatttccttctgaaatcaccgctttacctttcctgcctgcgtcatttattcgtttttaaccatgttttctgtgcctatcctgaattctgggatgagttcataggggagacaggcacaaactggtcattttaaaccagcatggtacatagagtaatagggatatgtaccagcaggggctggtgaaagggtgcggggggtaataccttgctgtgtttaagttgctgacatctctcctaccttttagttattctctactagtgcgggattactgcagctgtggggatacccagggctaactattaggtggttttgttctggatatttatcttacttgttggtcggctattaggagagaagaaaagaaaaggaagctgtcattcttcagcttatgtaaaatcgtcctttaatgcttaacacagacttctttagctggagaaaaaccgactcttggtgcagtgctccagcagaatccctcagtgttggagccagcagctgtgggtggggaagcagcctccaagccagccggcagcatgaagcctgcctgtccagccagcacatctcctctaaactggctggccgacctaaccagcgggaatgtcaacaaggaaaacaaggaaaaacaaccaacaatgccaattttaaagaatgaaatcaaatgccttccacccctcccacctttaagcaaatccagcacagtcctccatacgtttaacagcacaattttgacacccgtaagcaacaacaattctggtttcctccggaatctcttgaattcttctacaggaaagacagaaaatggactcaagaatacaccaaaaatccttgatgacatctttgcctctttggtgcaaaataagacgacttctgatttatctaagaggcctcaaggactaaccatcaagcccagcattctgggctttgacactcctcactattggctttgtgataatcgcttgctgtgcttgcaagaccccaacaataagagcaactggaatgtgtttagggagtgctggaaacaagggcaggtaatgtaggcctcccatcctcctgccctattcagaacccccttctcagttcctttagcagacttctgacaaccccaccccaggctttccccctccttcacctcctgttttattctttattgtttcaggtgaatataatcaggtcaggatgtggccatgggtcttactttttaaagcagatggtcctaagctggacttttccagtcaggtttttgttgcttcctaccagtccctgttgggtttttgacgagggcatccaggcttggtgattcctatggtaaacttcagcagaggaagtgagggtgtgactacaggctgatgggatttgggagatcagacaaaatgtgctacaaaatcatgcacccctcttacctgaatgaaaagcctgtgctgaaggcagttctaggtgggctagggccgcgtggtgtcacatagtccccaggtgcctgcttcaaagggcagtgttgttggatcttaagtgccggttaatatctttaggagaatttctaggcctgcttctgtgctttcttgttttggttctgttttctggatctctggcttctctgtttggccagatagggtctttgctaaaggaacactctgctcttggacaagaatttgggagaattgccaaacagaaagatgtgagtgtttaaccaaaaataaatttccaaaatgtttttctccatccagtgtactaataggatttgctcatttaatcatatatagacaagaaacaaaatgatgggctgaatacagtttatcggcaggctttctttcttgcttgtcaatattttaatgttagactatttcacataaaggttagagcttctgggttgtcttagacggccaaaagatttggcaccctcacacagccagtagtagtgaggggtgtcacaggccatattcctgcttggcaataacaggctcaagtacggtggggtcagtcaccctgtttcactggtgactggtgtcactggacactccttccagcgcttgtcttcttcacagtccgtcttgctgtaagtaatgagatcttactaggagaggtgatcctttctcctagatgcttacccatgtagtttgagagcaagggtgtgtagcagatgaatggtgaaggttggaggtgctttgggagctcagagaactaagccgaaactgtcacatcaccatctgagacggagcaccagctccatggaaatataccaatagcagtgtgaagagggactgccttcgggagtggggacagagctggcagagttcagactaaagttttccttctcttcatttagccagtgatggtgtctggagtgcatcataaattgaactctgaactttggaaacctgaatccttcaggaaagagtttggtgagcaggaagtagacctagttaattgtaggaccaatgaaatcatcacaggagccacagtaggagacttctgggatggatttgaagatgttccaaatcgtttgaaaaatgaaaaagaaccaatggtgttgaaacttaaggactggccaccaggagaagattttagagatatgatgccttccaggtttgatgatctgatggccaacattccactgcccgagtacacaaggcgagatggcaaactgaatttggcctctaggctgccaaactactttgttcggccagatctgggccccaagatgtataatgcttatggattaatcactcctgaagatcggaaatatggaacaacaaatcttcacttagatgtatctgatgcagctaatgtcatggtctatgtgggaattcccaaaggacagtgtgagcaagaagaagaagtccttaagaccatccaagatggagattctgacgaactcacaataaagcgatttattgaaggaaaagagaagccaggagcactgtggcacatatatgctgcaaaggacacggagaagataagggaatttcttaaaaaggtgtgctgcttatggcatgtgtgaacagaggcataaggaatagcaatattatgttactacatgtggtgaactgactggcttggctaggggaattgtcacaacctgaaaagttaaatctgtacctgtcagattgaataggctgaaggtggttgctaaggaacaaggattctaaatgattagggttacacttctaaaaaaagcaggccttgtcttttatgtctgtgttttgtgttagagtgcatttagagatttttgttctctgctttcaagttagaagttagttcatctgatcatctcccagcatatatctgtttttattgccttgagaatctgagcacttcagacgttcatgtatccttggccctgagtgaccatgttctgagtgagttgctaagtttggttttgtccactgtcatgtagcaagtggtcctacttgttactagcaagggttgcagggatttggaagattctaggtttcccctgtagttggcaggtttttttttcagcaagggctatgtgtggaaattctaggcaactagaaagatgagtcgtgttcagttttaaaattgtttggcactgaggctgccggttgcaactcaggtgtctttggctgatattcttcagtcattcatgagtcttggatatgaacattcgtaacctgttagctggccccaagtatgtctttaacaagcatttgtttgaatcaaagtgtttctggctaaggatcatttggctcttccagaaaaccggcttggtcaccatattgttcttttgatattgtcactctgagtctctgctttaccagttactggatcaaggataaacaagtctaatctgcagctgtctttgggactgtttcgtaagtcagattaagtaaaggcaggtttctaataactttaaaacaagttcatttataaggatactgagcctacttatgtttaaaaatctagactaaaatattgtttaaatacagtatttacaaacttatgcagagcctgtcagtcatggtttatgggaactgacatcacattttcttcgtcattcttctgttggttcattcagctgaagtctttgatactactagtcgtcttctgccaatgggggcacttaagttgaagaaggcctgacatttatgaactgccaacactgtttagaggaaaaaaatggcttattgggccttagcatgttactgagttgcataatattttgaatgtattctaggtatcagaagagcaaggtcaagaaaacccagcagaccacgatcctattcatgatcaaagctggtatttagaccgatcattaagaaaacgtcttcatcaagagtatggagttcaaggctgggctattgtacagtttcttggggatgtggtgtttatcccggcaggagctccacatcaggttcataacttatatagctgcatcaaagtggctgaagattttgtttctccagagcatgttaaacactgcttctggcttactcaggaattccgatatctgtcacagactcataccaatcacgaagataaattacaggtgaagaatgttatctaccatgcagtgaaagatgcagttgctatgctgaaagccagtgaatccagttttggcaaaccttaatctccctgcacattggaaatgaattacaggcagctgttcaaactcttcaggcaggattcctgtggactttgagattcatgttacctcatcttcttttttaaactgtacccaacttgtgagggtactctgtctaatgtatatttctagtgtttacagacagtaaatgtgtatatgtagtaactatttacagaacatgcatccttaaactgtgacttctcacctagtgcagaacttttaccaggctgtaaaagcaaaacctcgtatcagctctggaacaatacctgcagttattcttcagctgtttggacaacttagattgggtttataactattaggaatcactgcacagtttatttgggttgtgttttgtgtctgagtcccctccctcatcccttagggtccagaagagcaatggaggaagtgacagctaatgttgcagttcttattgtatggcataggactggcattatatagcagaaatcaactactgtacaatttcttggggttaaccatctttagttaaatggaattttaatttaaatgacgctttgctaattttaagtgttaagcattttgcattaaaatattcatataa

SEQ ID NO: 16626 - DNA, 709 bp, Homo sapiens
  source 1..709: mol_type = unassigned DNA
attatccagtaactccacgcctttcttcatttatccttcaaaatggcggactttagacgttccacgatcagtaccacgtgcgcctgcgcctcccgcagccatttcgcccagcagcctaagctcggcgaggcgcctgcgcacgagcctccagagcactatcgctcctccctctagctgagtacgcctgaaaccgcacgttctcttccctgccctcccccgctaaccctgcaccgccctcaccctttcctgtgagattcttccgccaagtggaaggctcatcttcggtcgacagcctacgcggttgaagaacaatccaggaggagctcttcctgcaggcgtggaaaccatggtgctcacgctcggagaaagttggccggtattggtggggaggaggtttctcagtctgtccgcagccgacggcagcgatggcagccacgacagctgggacgtggagcgcgtcgccgagtggccctggctctccgggaccattcgagctgtttcccacaccgacgttaccaagaaggatctgaaggtgtgtgtggaatttgatggggaatcttggaggaaaagaagatggatagaagtctacagccttctaaggagagcatttttagtagaacataatttggttttagctgaacgaaagtcacctgaaatttctgaacgaattgtacagtggcctgcaataacgtacaaacctctgttggac

SEQ ID NO: 16627 - DNA, 4880 bp, Homo sapiens
  source 1..4880: mol_type = unassigned DNA
taatgggggtcgcccgggagtcggaagggggaggggaaagggaggaggcagccaaggaattgtttttttctctggccccgccctcgcccggggggccaatggtgatgatctgtttcccccggagcctcgcccagctcctgtgtttcagccaatgagcggcggaagcggctccgaggggggcgggtccgggaggctgtgcgtgtcttgtgagagctcttgaaccaagtcagcgctggagtcggctaggcggctggaaacggcggctgccgccggtgactcagggaggcgggaggcgggggaggagctcttcctgcaggcgtggaaaccatggtgctcacgctcggagaaagttggccggtattggtggggaggaggtttctcagtctgtccgcagccgacggcagcgatggcagccacgacagctgggacgtggagcgcgtcgccgagtggccctggctctccgggaccattcgagctgtttcccacaccgacgttaccaagaaggatctgaaggtgtgtgtggaatttgatggggaatcttggaggaaaagaagatggatagaagtctacagccttctaaggagagcatttttagtagaacataatttggttttagctgaacgaaagtcacctgaaatttctgaacgaattgtacagtggcctgcaataacgtacaaacctctgttggacaaagctggtttgggatccataacttctgttcgctttctgggagatcaacaaagagtatttctttctaaagaccttttgaagcctatacaggatgtaaacagtcttcgactttctcttacggataatcagattgtcagtaaagaatttcaagctttgattgtgaagcatttagatgaaagccatcttttaaaaggtgacaaaaacttagttggttcagaagtaaaaatttatagcttggacccatctactcagtggttttcagcaaccgttataaatggaaacccagcatcaaaaactcttcaagtcaactgtgaggagattccagcactgaaaattgttgatccgtcactgattcatgttgaagttgtacacgataaccttgtgacatgtggtaattctgcaagaattggagctgtaaaacgcaagtcttctgagaataatggaaccctggtttccaaacaagcaaaatcttgctctgaggcctctcccagtatgtgtcctgtgcagtctgtacctacaacagtttttaaggagatactgcttggctgtactgcggcaactccacctagtaaggacccaagacagcaaagtactccccaggctgccaactctccacctaaccttggagcaaaaattcctcaaggatgtcataaacaaagtttaccagaggaaatttcttcctgtctaaatacaaagtctgaagctctgagaacaaaaccagatgtctgcaaagcagggttgctctcaaagtcctctcagattggaactggagacttgaaaattctgactgagccaaaaggcagctgtactcagcctaagacaaacactgatcaggaaaacagattggagtctgttccacaagcattgactggccttcctaaggagtgcttacctacaaaggcttcttctaaggcagaattggaaattgccaatcctcctgaactgcagaagcacctagaacatgcaccttccccatcggatgtttcaaatgcaccagaagtgaaagcaggtgtcaatagtgatagccctaataactgttcaggaaaaaaggtagaaccttcagctttagcttgccgatcacagaatttaaaggaatcttcagtaaaagtagataatgaaagctgttgttcaagaagcaacaataaaatccagaatgccccatccaggaagtcggttttgacagacccagctaaactcaaaaagctgcaacagagtggcgaggccttcgtacaggatgattcttgtgtgaacatcgtggcacagttgcctaaatgccgagagtgtcgcttggacagtctccgcaaggataaggagcaacagaaggactcacctgtgttttgccgcttctttcacttcaggaggttacaattcaacaaacatggtgtgttgcgggtagaaggcttcttaacaccaaacaagtatgacaatgaagcaattggcttgtggttacctttaaccaaaaacgttgtggggattgatttggacacagcaaagtacatcttggccaacattggagaccacttctgtcaaatggtgatttctgaaaaggaagctatgtcaactattgagccacacagacaggttgcttggaagcgagctgtcaaaggtgttcgagaaatgtgtgatgtgtgcgacaccaccatcttcaacctgcactgggtgtgtcctcggtgtgggtttggagtatgtgtggactgctaccggatgaagagaaagaattgccaacagggtgctgcttacaagactttctcttggctaaaatgtgtgaagagtcagatacatgaaccagagaacttaatgcccacacagatcattcctggaaaagcactctatgatgttggagacattgttcattctgtaagagcgaaatggggaataaaggcaaactgcccttgttcaaacaggcaattcaaactcttttcaaagccagcctcaaaggaagacctaaaacagacttctttagctggagaaaaaccgactcttggtgcagtgctccagcagaatccctcagtgttggagccagcagctgtgggtggggaagcagcctccaagccagccggcagcatgaagcctgcctgtccagccagcacatctcctctaaactggctggccgacctaaccagcgggaatgtcaacaaggaaaacaaggaaaaacaaccaacaatgccaattttaaagaatgaaatcaaatgccttccacccctcccacctttaagcaaatccagcacagtcctccatacgtttaacagcacaattttgacacccgtaagcaacaacaattctggtttcctccggaatctcttgaattcttctacaggaaagacagaaaatggactcaagaatacaccaaaaatccttgatgacatctttgcctctttggtgcaaaataagacgacttctgatttatctaagaggcctcaaggactaaccatcaagcccagcattctgggctttgacactcctcactattggctttgtgataatcgcttgctgtgcttgcaagaccccaacaataagagcaactggaatgtgtttagggagtgctggaaacaagggcagccagtgatggtgtctggagtgcatcataaattgaactctgaactttggaaacctgaatccttcaggaaagagtttggtgagcaggaagtagacctagttaattgtaggaccaatgaaatcatcacaggagccacagtaggagacttctgggatggatttgaagatgttccaaatcgtttgaaaaatgaaaaagaaccaatggtgttgaaacttaaggactggccaccaggagaagattttagagatatgatgccttccaggtttgatgatctgatggccaacattccactgcccgagtacacaaggcgagatggcaaactgaatttggcctctaggctgccaaactactttgttcggccagatctgggccccaagatgtataatgcttatggattaatcactcctgaagatcggaaatatggaacaacaaatcttcacttagatgtatctgatgcagctaatgtcatggtctatgtgggaattcccaaaggacagtgtgagcaagaagaagaagtccttaagaccatccaagatggagattctgacgaactcacaataaagcgatttattgaaggaaaagagaagccaggagcactgtggcacatatatgctgcaaaggacacggagaagataagggaatttcttaaaaaggtatcagaagagcaaggtcaagaaaacccagcagaccacgatcctattcatgatcaaagctggtatttagaccgatcattaagaaaacgtcttcatcaagagtatggagttcaaggctgggctattgtacagtttcttggggatgtggtgtttatcccggcaggagctccacatcaggttcataacttatatagctgcatcaaagtggctgaagattttgtttctccagagcatgttaaacactgcttctggcttactcaggaattccgatatctgtcacagactcataccaatcacgaagataaattacaggtgaagaatgttatctaccatgcagtgaaagatgcagttgctatgctgaaagtgaatccagttttggcaaaccttaatctccctgcacattggaaatgaattacaggcagctgttcaaactcttcaggcaggattcctgtggactttgagattcatgttacctcatcttcttttttaaactgtacccaacttgtgagggtactctgtctaatgtatatttctagtgtttacagacagtaaatgtgtatatgtagtaactatttacagaacatgcatccttaaactgtgacttctcacctagtgcagaacttttaccaggctgtaaaagcaaaacctcgtatcagctctggaacaatacctgcagttattcttcagctgtttggacaacttagattgggtttataactattaggaatcactgcacagtttatttgggttgtgttttgtgtctgagtcccctccctcatcccttagggtccagaagagcaatggaggaagtgacagctaatgttgcagttcttattgtatggcataggactggcattatatagcagaaatcaactactgtacaatttcttggggttaaccatctttagttaaatggaattttaatttaaatgacgctttgctaattttaagtgttaagcattttgcattaaaatattcat

SEQ ID NO: 16628 - DNA, 3903 bp, Homo sapiens
  source 1..3903: mol_type = unassigned DNA
atggtgctcacgctcggagaaagttggccggtattggtggggaggaggtttctcagtctgtccgcagccgacggcagcgatggcagccacgacagctgggacgtggagcgcgtcgccgagtggccctggctctccgggaccattcgagctgtttcccacaccgacgttaccaagaaggatctgaagacgtacaaacctctgttggacaaagctggtttgggatccataacttctgttcgctttctgggagatcaacaaagagtatttctttctaaagaccttttgaagcctatacaggatgtaaacagtcttcgactttctcttacggataatcagattgtcagtaaagaatttcaagctttgattgtgaagcatttagatgaaagccatcttttaaaaggtgacaaaaacttagttggttcagaagtaaaaatttatagcttggacccatctactcagtggttttcagcaaccgttataaatggaaacccagcatcaaaaactcttcaagtcaactgtgaggagattccagcactgaaaattgttgatccgtcactgattcatgttgaagttgtacacgataaccttgtgacatgtggtaattctgcaagaattggagctgtaaaacgcaagtcttctgagaataatggaaccctggtttccaaacaagcaaaatcttgctctgaggcctctcccagtatgtgtcctgtgcagtctgtacctacaacagtttttaaggagatactgcttggctgtactgcggcaactccacctagtaaggacccaagacagcaaagtactccccaggctgccaactctccacctaaccttggagcaaaaattcctcaaggatgtcataaacaaagtttaccagaggaaatttcttcctgtctaaatacaaagtctgaagctctgagaacaaaaccagatgtctgcaaagcagggttgctctcaaagtcctctcagattggaactggagacttgaaaattctgactgagccaaaaggcagctgtactcagcctaagacaaacactgatcaggaaaacagattggagtctgttccacaagcattgactggccttcctaaggagtgcttacctacaaaggcttcttctaaggcagaattggaaattgccaatcctcctgaactgcagaagcacctagaacatgcaccttccccatcggatgtttcaaatgcaccagaagtgaaagcaggtgtcaatagtgatagccctaataactgttcaggaaaaaaggtagaaccttcagctttagcttgccgatcacagaatttaaaggaatcttcagtaaaagtagataatgaaagctgttgttcaagaagcaacaataaaatccagaatgccccatccaggaagtcggttttgacagacccagctaaactcaaaaagctgcaacagagtggcgaggccttcgtacaggatgattcttgtgtgaacatcgtggcacagttgcctaaatgccgagagtgtcgcttggacagtctccgcaaggataaggagcaacagaaggactcacctgtgttttgccgcttctttcacttcaggaggttacaattcaacaaacatggtgtgttgcgggtagaaggcttcttaacaccaaacaagtatgacaatgaagcaattggcttgtggttacctttaaccaaaaacgttgtggggattgatttggacacagcaaagtacatcttggccaacattggagaccacttctgtcaaatggtgatttctgaaaaggaagctatgtcaactattgagccacacagacaggttgcttggaagcgagctgtcaaaggtgttcgagaaatgtgtgatgtgtgcgacaccaccatcttcaacctgcactgggtgtgtcctcggtgtgggtttggagtatgtgtggactgctaccggatgaagagaaagaattgccaacagggtgctgcttacaagactttctcttggctaaaatgtgtgaagagtcagatacatgaaccagagaacttaatgcccacacagatcattcctggaaaagcactctatgatgttggagacattgttcattctgtaagagcgaaatggggaataaaggcaaactgcccttgttcaaacaggcaattcaaactcttttcaaagccagcctcaaaggaagacctaaaacagacttctttagctggagaaaaaccgactcttggtgcagtgctccagcagaatccctcagtgttggagccagcagctgtgggtggggaagcagcctccaagccagccggcagcatgaagcctgcctgtccagccagcacatctcctctaaactggctggccgacctaaccagcgggaatgtcaacaaggaaaacaaggaaaaacaaccaacaatgccaattttaaagaatgaaatcaaatgccttccacccctcccacctttaagcaaatccagcacagtcctccatacgtttaacagcacaattttgacacccgtaagcaacaacaattctggtttcctccggaatctcttgaattcttctacaggaaagacagaaaatggactcaagaatacaccaaaaatccttgatgacatctttgcctctttggtgcaaaataagacgacttctgatttatctaagaggcctcaaggactaaccatcaagcccagcattctgggctttgacactcctcactattggctttgtgataatcgcttgctgtgcttgcaagaccccaacaataagagcaactggaatgtgtttagggagtgctggaaacaagggcagccagtgatggtgtctggagtgcatcataaattgaactctgaactttggaaacctgaatccttcaggaaagagtttggtgagcaggaagtagacctagttaattgtaggaccaatgaaatcatcacaggagccacagtaggagacttctgggatggatttgaagatgttccaaatcgtttgaaaaatgaaaaagaaccaatggtgttgaaacttaaggactggccaccaggagaagattttagagatatgatgccttccaggtttgatgatctgatggccaacattccactgcccgagtacacaaggcgagatggcaaactgaatttggcctctaggctgccaaactactttgttcggccagatctgggccccaagatgtataatgcttatggattaatcactcctgaagatcggaaatatggaacaacaaatcttcacttagatgtatctgatgcagctaatgtcatggtctatgtgggaattcccaaaggacagtgtgagcaagaagaagaagtccttaagaccatccaagatggagattctgacgaactcacaataaagcgatttattgaaggaaaagagaagccaggagcactgtggcacatatatgctgcaaaggacacggagaagataagggaatttcttaaaaaggtatcagaagagcaaggtcaagaaaacccagcagaccacgatcctattcatgatcaaagctggtatttagaccgatcattaagaaaacgtcttcatcaagagtatggagttcaaggctgggctattgtacagtttcttggggatgtggtgtttatcccggcaggagctccacatcaggttcataacttatatagctgcatcaaagtggctgaagattttgtttctccagagcatgttaaacactgcttctggcttactcaggaattccgatatctgtcacagactcataccaatcacgaagataaattacaggtgaagaatgttatctaccatgcagtgaaagatgcagttgctatgctgaaagccagtgaatccagttttggcaaaccttaatctccctgcacattggaaatgaattacaggcagctgttcaaactcttcaggcaggattcctgtggactttgagattcatgttacctcatcttc

SEQ ID NO: 16629 - DNA, 6813 bp, Homo sapiens
  source 1..6813: mol_type = unassigned DNA
gcggggcccaggctgcggctccgctcccggccacggggggcgctgcgctgcgccggtggttggtggtggctgttggggggggtgggggggaacggcggccgcgggtggtgcggagggaggccttgcgggcggatcgggcgcttggcggcggaggtggtgggaggcggcgggcgggagcgcgggtcaggccggccccggcgatggcggacgcggcggcctccccggtgggcaagcggctgctgctgctgttcgcggacactgcggcctcagcctcggcctcggctcccgcggcggcagcggcgagcggagatccggggcctgcgctgcgcactcgagcctggcgggccggcacggtgcgggccatgagcggggcggtgccccaggacctagcgatctttgtagaatttgatggctgtaactggaagcaacactcctgggtaaaagttcatgctgaggaagttatcgtgcttctgctggaagggtctcttgtatgggcgccccgtgaggacccagtccttctccagggcattcgagtctccattgcacaatggccagccctgacttttactccccttgtagataaactgggtttgggttctgtggttccagtggaatatcttctggatcgagagcttcggttcctgtcagatgccaatgggttgcatctgtttcagatgggaacagatagccaaaaccagattcttttggaacatgctgcactgagagaaacagttaatgctttgatcagtgaccaaaagctacaagagatattcagccgaggtccctacagtgttcaaggtcacagggtcaaaatatatcagccagagggggaagaagggtggctctatggtgttgtgagccatcaggactccatcactcgtcttatggaggtgtctgtaactgagagtggtgagatcaagtcggtagatcccagactaatccatgtgatgctgatggataattcagcgcctcaaagcgaggggggtacgttaaaagcagtaaaatcttccaaaggaaagaagaagagagaaagcatagaggggaaagatggccggaggaggaaaagtgcttcggactctgggtgtgaccctgcatcaaagaaattaaaaggagacaggggtgaagtagacagtaatgggagcgatggaggtgaggcaagccgagggccctggaaaggagggaatgccagtggagagccagggctggatcagagagccaagcagccaccgtctacatttgtcccccagataaaccgcaacattcgctttgccacttacaccaaagaaaacggcaggactctggtggtgcaggatgagcctgtaggtggggacacacctgcatctttcactccatattctacagccacaggtcagacacctttggccccagaggtgggtggagccgaaaacaaagaggcaggaaaaacactggaacaagttggccagggcatagtggcttccgcagctgtggtcactaccgccagctccaccccaaacacagtgaggatctcagacactggccttgcagcagggactgtgccagaaaaacagaaaggcagccggtcgcaggcctcgggagagaattcaagaaattctattctggcctcttctggatttggagcacctctccctagttcatcgcaacctttgacttttggaagtggaaggagccagtccaatggtgttctagccacagagaacaaacctttgggcttctcttttggctgtagctctgcacaagaggcacagaaagacactgatctctccaaaaacttgttttttcaatgcatgtcccaaactttacctaccagtaactacttcactactgtttcagagagtttggctgatgattcttctagtcgggactcattcaaacaaagccttgagagcctgagctcaggcctgtgtaaaggcagatccgttcttggaacagacactaagccaggctctaaggctggcagctctgtggaccggaaagtgcctgcagagtccatgcccaccctcactccagccttcccacggagcctcctaaatgcccgtaccccagagaatcatgaaaatctatttttacagccccccaaattgtcccgagaagagccttctaatcctttcctggcatttgtggagaaagttgaacacagccctttcagtagttttgcatctcaggcatcaggtagctcctcttctgctaccactgtcacctccaaggtggcacccagctggcccgagtctcactcctctgcagattcggcatctttagcaaagaagaaacccctcttcattacaactgactcctccaagctagtatctggtgttctgggctcagctcttaccagtgggggcccaagcctctctgccatggggaatggccgctccagctcgcccaccagcagcctcactcagcccattgagatgccaactctctcctctagccccacagaggagaggccaactgtggggcctgggcagcaggacaatcccctcctcaaaacctttagtaacgtctttggcaggcactcaggcggctttctgtcctccccggcagatttttcacaggagaacaaagctccttttgaagctgtgaaaaggttctcactggatgaacgaagcttggcttgcagacaagactcggactccagcaccaacagtgacctgtcagatttgagtgactctgaggagcagctgcaggctaagacaggcctgaagggaattccagagcacctgatggggaagctgggccccaatggggagcgcagtgctgagctgttgctgggcaaaagcaaagggaagcaggcccccaagggccggcctcggactgcccccctgaaagttggccagtcagtgctgaaagatgtaagcaaagtgaagaagctgaagcaatctggagagcccttcctgcaggatgggtcatgcatcaatgtggcacctcatctgcacaagtgtcgtgaatgccgcctggagcggtaccggaagtttaaggaacaggagcaagatgattctactgtagcctgccgtttctttcacttccggaggttgatcttcactcgaaaaggggtactccgtgtggaggggtttttaagcccccagcaaagtgaccctgatgccatgaacctgtggattccctcttcctccctagcagaagggatagatctagagacctcaaaatacatcctggccaatgttggggaccagttctgccagctcgtaatgtctgagaaggaggccatgatgatggtggagccacaccagaaagtggcatggaagcgagctgtgcgtggtgtacgggagatgtgtgatgtgtgtgaaacaactctcttcaacatccactgggtttgtcgcaaatgtggatttggggtctgccttgactgttaccggctcaggaaaagccggccacgcagtgagacagaagagatgggtgatgaagaagttttctcctggttgaagtgtgcaaagggacagtcccacgaaccagagaatctcatgcccacacaaattattcctggcacagctctttacaatattggagacatggtacatgctgcccggggcaagtggggaattaaagcaaactgcccttgtatcagtcgacagaacaaatctgtattgagacctgccgtcaccaatgggatgtcacagcttcctagcataaaccctagtgcctcttctggaaacgaaactaccttctctggtggaggaggaccggcaccagtaacaactccagagccggaccatgttcccaaagccgacagcactgacatcagatctgaagagcctctgaaaacagacagttcggcatcaaatagcaatagtgaactgaaagccatcaggcctccttgccctgacacggccccaccctcctccgccctgcactggttggcagatttagcaactcagaaggctaaagaagaaacaaaagaagcagggtccctgaggtcggtgctcaataaagagtctcattcaccctttgggctggactcgttcaactccactgcaaaggtctctccgctgactccaaagctttttaacagtctgttgctgggtcccactgcctccaacaacaaaaccgaagggtctagccttcgagacctccttcactccgggccgggaaaacttcctcaaacccccttggacacaggcataccctttcccccggtcttctctacatcctcagcaggagtgaagagcaaggccagcctacccaactttcttgaccacatcattgcctcagtggtagaaaataagaaaacctcagatgcttcaaagcgggcctgcaacttgactgatacccagaaggaagtgaaggagatggtgatggggttaaatgtgctagatccccatacttctcactcctggctttgtgatgggaggcttctgtgtctccatgaccccagcaacaaaaacaattggaagatcttccgggagtgttggaagcaaggtcagccagtgctggtttcgggggtacataaaaagctcaagtctgagctctggaagccagaagcctttagccaggaatttggagaccaggatgtagacttggtgaactgcaggaactgtgctataatttccgatgtgaaagttcgggatttctgggatggtttcgagatcatatgcaaacgactacggtcagaagatgggcagccaatggtgctcaaactcaaggactggcctcctggggaagattttcgagacatgatgccaaccaggtttgaagatctgatggagaaccttcctctgccagaatataccaaacgagatggcaggctcaatctggcctctaggctacctagctactttgtaaggcctgatctgggccccaagatgtacaacgcctatgggttgataacagcagaagatagaagagttggtacaacaaatcttcacttagatgtgtctgatgctgttaatgtgatggtgtatgttgggattcccatcggggagggtgctcatgatgaagaggtactcaagacaattgacgagggagatgccgatgaggtgacgaagcagaggattcatgatggaaaagagaagccaggtgctttatggcacatctatgcagccaaggatgcagagaagatccgggagctgctccgaaaggttggagaagaacaaggccaagagaacccccctgatcatgacccaattcatgaccaaagttggtacctggaccagaccctccgtaagcgactctatgaggagtatggcgtgcaaggctgggctattgtgcagttcctaggtgatgctgttttcatacctgctggagccccacaccaggttcacaatctatacagttgcataaaagtagcagaagactttgtatctccagaacatgtaaagcactgtttccgcctgactcaggaattcaggcatctctctaacactcatacaaatcatgaggataaactgcaggtgaagaacatcatttaccatgcagtgaaagatgcggttggcaccctcaaggctcatgaatccaaactggcaaggtcctaggcatggagaaactccaagctcctctgtgaagcaggtctttcactcacaacacttaacagggaacggcagggctctttgctggagcagaggcccttcacccagagccagtgtggtcagtattccaaactctccagccactctcttctacgctgcctcaacactgaaggttgacacaggaaagtcgtactgttcacacacacagtttgagactccaagccaagagtgccacatccctatcctgtggccttttggaaatccaaattgcctgaacatggcggggctttcctgcacattctcctgatttgagattcacgggcacacctttcttttcttttcctcttgtgcctagttaagtggaaatgtgtttggagataggggaaatcacataactggtacaagtatggggtaattgcttaaacatgcctggtggaagtctgatagcgtctctgcacgtgacctctgacaaagcccatcccaggagacggggtgaagctattccccacactctcctgtgaacactggagtcttgcaagacccagggagaacccactgcttttcccaggaggctccaggattaggaaatgtgtgtatttagtgaaaaataggtttgtagtgaaatagttactatttcatgaaagtagatatttttagaatttttgaaataccacagttgttttcctggattataaggaaaggcacattacatttagtcttcctttcgatataaaactctttgaagaaatatgatttttagaaatcagctacccattatagcacaaaatcagccaaagcagaatttttaaaaattggcttttttaggattctttttctccccctcccatcttagtcttaccttgagggaacagtcatatgagaaggaactttgtcacatctaagctgtggtgtgttccccatgtgtgtgtacaacactggtgactccaggaaccattttcacctattaccagtgttccctggggactcctcttaatgtttccaaatgggaaggacagttgatttccaacatgaggttttttgttttttatccagaaatattttcagcaaaactttccaactgagtggagtctgattaaggatttatttgaaaatggtgggattcattggcccataggtacattggaaaatgtatatctctccagctgtactgtagtgccctgcaggctgtttatatgttcacagttacttttttttttttttttaaataaaagtcatttaatgtagaatacttttaatttcactttctgtattttaattttgttgaagggctgattgggatttccatgttcttattaaaaatctaacaaatctg

SEQ ID NO: 16630 - DNA, 5581 bp, Homo sapiens
  source 1..5581: mol_type = unassigned DNA
atgggagcgatggagataaaccgcaacattcgctttgccacttacaccaaagaaaacggcaggactctggtggtgcaggatgagcctgtaggtggggacacacctgcatctttcactccatattctacagccacaggtcagacacctttggccccagaggtgggtggagccgaaaacaaagaggcaggaaaaacactggaacaagttggccagggcatagtggcttccgcagctgtggtcactaccgccagctccaccccaaacacagtgaggatctcagacactggccttgcagcagggactgtgccagaaaaacagaaaggcagccggtcgcaggcctcgggagagaattcaagaaattctattctggcctcttctggatttggagcacctctccctagttcatcgcaacctttgacttttggaagtggaaggagccagtccaatggtgttctagccacagagaacaaacctttgggcttctcttttggctgtagctctgcacaagaggcacagaaagacactgatctctccaaaaacttgttttttcaatgcatgtcccaaactttacctaccagtaactacttcactactgtttcagagagtttggctgatgattcttctagtcgggactcattcaaacaaagccttgagagcctgagctcaggcctgtgtaaaggcagatccgttcttggaacagacactaagccaggctctaaggctggcagctctgtggaccggaaagtgcctgcagagtccatgcccaccctcactccagccttcccacggagcctcctaaatgcccgtaccccagagaatcatgaaaatctatttttacagccccccaaattgtcccgagaagagccttctaatcctttcctggcatttgtggagaaagttgaacacagccctttcagtagttttgcatctcaggcatcaggtagctcctcttctgctaccactgtcacctccaaggtggcacccagctggcccgagtctcactcctctgcagattcggcatctttagcaaagaagaaacccctcttcattacaactgactcctccaagctagtatctggtgttctgggctcagctcttaccagtgggggcccaagcctctctgccatggggaatggccgctccagctcgcccaccagcagcctcactcagcccattgagatgccaactctctcctctagccccacagaggagaggccaactgtggggcctgggcagcaggacaatcccctcctcaaaacctttagtaacgtctttggcaggcactcaggcggctttctgtcctccccggcagatttttcacaggagaacaaagctccttttgaagctgtgaaaaggttctcactggatgaacgaagcttggcttgcagacaagactcggactccagcaccaacagtgacctgtcagatttgagtgactctgaggagcagctgcaggctaagacaggcctgaagggaattccagagcacctgatggggaagctgggccccaatggggagcgcagtgctgagctgttgctgggcaaaagcaaagggaagcaggcccccaagggccggcctcggactgcccccctgaaagttggccagtcagtgctgaaagatgtaagcaaagtgaagaagctgaagcaatctggagagcccttcctgcaggatgggtcatgcatcaatgtggcacctcatctgcacaagtgtcgtgaatgccgcctggagcggtaccggaagtttaaggaacaggagcaagatgattctactgtagcctgccgtttctttcacttccggaggttgatcttcactcgaaaaggggtactccgtgtggaggggtttttaagcccccagcaaagtgaccctgatgccatgaacctgtggattccctcttcctccctagcagaagggatagatctagagacctcaaaatacatcctggccaatgttggggaccagttctgccagctcgtaatgtctgagaaggaggccatgatgatggtggagccacaccagaaagtggcatggaagcgagctgtgcgtggtgtacgggagatgtgtgatgtgtgtgaaacaactctcttcaacatccactgggtttgtcgcaaatgtggatttggggtctgccttgactgttaccggctcaggaaaagccggccacgcagtgagacagaagagatgggtgatgaagaagttttctcctggttgaagtgtgcaaagggacagtcccacgaaccagagaatctcatgcccacacaaattattcctggcacagctctttacaatattggagacatggtacatgctgcccggggcaagtggggaattaaagcaaactgcccttgtatcagtcgacagaacaaatctgtattgagacctgccgtcaccaatgggatgtcacagcttcctagcataaaccctagtgcctcttctggaaacgaaactaccttctctggtggaggaggaccggcaccagtaacaactccagagccggaccatgttcccaaagccgacagcactgacatcagatctgaagagcctctgaaaacagacagttcggcatcaaatagcaatagtgaactgaaagccatcaggcctccttgccctgacacggccccaccctcctccgccctgcactggttggcagatttagcaactcagaaggctaaagaagaaacaaaagaagcagggtccctgaggtcggtgctcaataaagagtctcattcaccctttgggctggactcgttcaactccactgcaaaggtctctccgctgactccaaagctttttaacagtctgttgctgggtcccactgcctccaacaacaaaaccgaagggtctagccttcgagacctccttcactccgggccgggaaaacttcctcaaacccccttggacacaggcataccctttcccccggtcttctctacatcctcagcaggagtgaagagcaaggccagcctacccaactttcttgaccacatcattgcctcagtggtagaaaataagaaaacctcagatgcttcaaagcgggcctgcaacttgactgatacccagaaggaagtgaaggagatggtgatggggttaaatgtgctagatccccatacttctcactcctggctttgtgatgggaggcttctgtgtctccatgaccccagcaacaaaaacaattggaagatcttccgggagtgttggaagcaaggtcagccagtgctggtttcgggggtacataaaaagctcaagtctgagctctggaagccagaagcctttagccaggaatttggagaccaggatgtagacttggtgaactgcaggaactgtgctataatttccgatgtgaaagttcgggatttctgggatggtttcgagatcatatgcaaacgactacggtcagaagatgggcagccaatggtgctcaaactcaaggactggcctcctggggaagattttcgagacatgatgccaaccaggtttgaagatctgatggagaaccttcctctgccagaatataccaaacgagatggcaggctcaatctggcctctaggctacctagctactttgtaaggcctgatctgggccccaagatgtacaacgcctatgggttgataacagcagaagatagaagagttggtacaacaaatcttcacttagatgtgtctgatgctgttaatgtgatggtgtatgttgggattcccatcggggagggtgctcatgatgaagaggtactcaagacaattgacgagggagatgccgatgaggtgacgaagcagaggattcatgatggaaaagagaagccaggtgctttatggcacatctatgcagccaaggatgcagagaagatccgggagctgctccgaaaggttggagaagaacaaggccaagagaacccccctgatcatgacccaattcatgaccaaagttggtacctggaccagaccctccgtaagcgactctatgaggagtatggcgtgcaaggctgggctattgtgcagttcctaggtgatgctgttttcatacctgctggagccccacaccaggttcacaatctatacagttgcataaaagtagcagaagactttgtatctccagaacatgtaaagcactgtttccgcctgactcaggaattcaggcatctctctaacactcatacaaatcatgaggataaactgcaggtgaagaacatcatttaccatgcagtgaaagatgcggttggcaccctcaaggctcatgaatccaaactggcaaggtcctaggcatggagaaactccaagctcctctgtgaagcaggtctttcactcacaacacttaacagggaacggcagggctctttgctggagcagaggcccttcacccagagccagtgtggtcagtattccaaactctccagccactctcttctacgctgcctcaacactgaaggttgacacaggaaagtcgtactgttcacacacacagtttgagactccaagccaagagtgccacatccctatcctgtggccttttggaaatccaaattgcctgaacatggcggggctttcctgcacattctcctgatttgagattcacgggcacacctttcttttcttttcctcttgtgcctagttaagtggaaatgtgtttggagataggggaaatcacataactggtacaagtatggggtaattgcttaaacatgcctggtggaagtctgatagcgtctctgcacgtgacctctgacaaagcccatcccaggagacggggtgaagctattccccacactctcctgtgaacactggagtcttgcaagacccagggagaacccactgcttttcccaggaggctccaggattaggaaatgtgtgtatttagtgaaaaataggtttgtagtgaaatagttactatttcatgaaagtagatatttttagaatttttgaaataccacagttgttttcctggattataaggaaaggcacattacatttagtcttcctttcgatataaaactctttgaagaaatatgatttttagaaatcagctacccattatagcacaaaatcagccaaagcagaatttttaaaaattggcttttttaggattctttttctccccctcccatcttagtcttaccttgagggaacagtcatatgagaaggaactttgtcacatctaagctgtggtgtgttccccatgtgtgtgtacaacactggtgactccaggaaccattttcacctattaccagtgttccctggggactcctcttaatgtttccaaatgggaaggacagttgatttccaacatgaggttttttgttttttatccagaaatattttcagcaaaactttccaactgagtggagtctgattaaggatttatttgaaaatggtgggattcattggcccataggtacattggaaaatgtatatctctccagctgtactgtagtgccctgcaggctgtttatatgttcacagttacttttttttttttttttaaataaaagtcatttaatgtagaatacttttaatttcactttctgtattttaattttgttgaagggctgattgggatttccatgttcttattaaaaatctaacaaatctg

SEQ ID NO: 16631 - DNA, 3034 bp, Homo sapiens
  source 1..3034: mol_type = unassigned DNA
gtgccagaaaaacagaaaggcagccggtcgcaggcctcgggagagttggccagtcagtgctgaaagatgtaagcaaagtgaagaagctgaagcaatctggagagcccttcctgcaggatgggtcatgcatcaatgtggcacctcatctgcacaagtgtcgtgaatgccgcctggagcggtaccggaagtttaaggaacaggagcaagatgattctactgtagcctgccgtttctttcacttccggaggttgatcttcactcgaaaaggggtactccgtgtggaggggtttttaagcccccagcaaagtgaccctgatgccatgaacctgtggattccctcttcctccctagcagaagggatagatctagagacctcaaaatacatcctggccaatgttggggaccagttctgccagctcgtaatgtctgagaaggaggccatgatgatggtggagccacaccagaaagtggcatggaagcgagctgtgcgtggtgtacgggagatgtgtgatgtgtgtgaaacaactctcttcaacatccactgggtttgtcgcaaatgtggatttggggtctgccttgactgttaccggctcaggaaaagccggccacgcagtgagacagaagagatgggtgatgaagaagttttctcctggttgaagtgtgcaaagggacagtcccacgaaccagagaatctcatgcccacacaaattattcctggcacagctctttacaatattggagacatggtacatgctgcccggggcaagtggggaattaaagcaaactgcccttgtatcagtcgacagaacaaatctgtattgagacctgccgtcaccaatgggatgtcacagcttcctagcataaaccctagtgcctcttctggaaacgaaactaccttctctggtggaggaggaccggcaccagtaacaactccagagccggaccatgttcccaaagccgacagcactgacatcagatctgaagagcctctgaaaacagacagttcggcatcaaatagcaatagtgaactgaaagccatcaggcctccttgccctgacacggccccaccctcctccgccctgcactggttggcagatttagcaactcagaaggctaaagaagaaacaaaagaagcagggtccctgaggtcggtgctcaataaagagtctcattcaccctttgggctggactcgttcaactccactgcaaaggtctctccgctgactccaaagctttttaacagtctgttgctgggtcccactgcctccaacaacaaaaccgaagggtctagccttcgagacctccttcactccgggccgggaaaacttcctcaaacccccttggacacaggcataccctttcccccggtcttctctacatcctcagcaggagtgaagagcaaggccagcctacccaactttcttgaccacatcattgcctcagtggtagaaaataagaaaacctcagatgcttcaaagcgggcctgcaacttgactgatacccagaaggaagtgaaggagatggtgatggggttaaatgtgctagatccccatacttctcactcctggctttgtgatgggaggcttctgtgtctccatgaccccagcaacaaaaacaattggaagatcttccgggagtgttggaagcaaggtcagccagtgctggtttcgggggtacataaaaagctcaagtctgagctctggaagccagaagcctttagccaggaatttggagaccaggatgtagacttggtgaactgcaggaactgtgctataatttccgatgtgaaagttcgggatttctgggatggtttcgagatcatatgcaaacgactacggtcagaagatgggcagccaatggtgctcaaactcaaggactggcctcctggggaagattttcgagacatgatgccaaccaggtttgaagatctgatggagaaccttcctctgccagaatataccaaacgagatggcaggctcaatctggcctctaggctacctagctactttgtaaggcctgatctgggccccaagatgtacaacgcctatgggttgataacagcagaagatagaagagttggtacaacaaatcttcacttagatgtgtctgatgctgttaatgtgatggtgtatgttgggattcccatcggggagggtgctcatgatgaagaggtactcaagacaattgacgagggagatgccgatgaggtgacgaagcagaggattcatgatggaaaagagaagccaggtgctttatggcacatctatgcagccaaggatgcagagaagatccgggagctgctccgaaaggttggagaagaacaaggccaagagaacccccctgatcatgacccaattcatgaccaaagttggtacctggaccagaccctccgtaagcgactctatgaggagtatggcgtgcaaggctgggctattgtgcagttcctaggtgatgctgttttcatacctgctggagccccacaccaggttcacaatctatacagttgcataaaagtagcagaagactttgtatctccagaacatgtaaagcactgtttccgcctgactcaggaattcaggcatctctctaacactcatacaaatcatgaggataaactgcaggtgaagaacatcatttaccatgcagtgaaagatgcggttggcaccctcaaggctcatgaatccaaactggcaaggtcctaggcatggagaaactccaagctcctctgtgaagcaggtctttcactcacaacacttaacagggaacggcagggctctttgctggagcagaggcccttcacccagagccagtgtggtcagtattccaaactctccagccactctcttctacgctgcctcaacactgaaggttgacacaggaaagtcgtactgttcacacacacagtttgagactccaagccaagagtgccacatccctatcctgtggccttttggaaatccaaattgcctgaacatggcggggctttcctgcacattctcctgatttgagattcacgggcacacctttcttttct

SEQ ID NO: 16632 - DNA, 5983 bp, Homo sapiens
  source 1..5983: mol_type = unassigned DNA
ggctggaggtggctctatggtgttgtgagccatcaggactccatcactcgtcttatggaggtgtctgtaactgagagtggtgagatcaagtcggtagatcccagactaatccatgtgatgctgatggataattcagcgcctcaaagcgaggggggtacgttaaaagcagtaaaatcttccaaaggaaagaagaagagagaaagcatagaggggaaagatggccggaggaggaaaagtgcttcggactctgggtgtgaccctgcatcaaagaaattaaaaggagacaggggtgaagtagacagtaatgggagcgatggaggtgaggcaagccgagggccctggaaaggagggaatgccagtggagagccagggctggatcagagagccaagcagccaccgtctacatttgtcccccagataaaccgcaacattcgctttgccacttacaccaaagaaaacggcaggactctggtggtgcaggatgagcctgtaggtggggacacacctgcatctttcactccatattctacagccacaggtcagacacctttggccccagaggtgggtggagccgaaaacaaagaggcaggaaaaacactggaacaagttggccagggcatagtggcttccgcagctgtggtcactaccgccagctccaccccaaacacagtgaggatctcagacactggccttgcagcagggactgtgccagaaaaacagaaaggcagccggtcgcaggcctcgggagagaattcaagaaattctattctggcctcttctggatttggagcacctctccctagttcatcgcaacctttgacttttggaagtggaaggagccagtccaatggtgttctagccacagagaacaaacctttgggcttctcttttggctgtagctctgcacaagaggcacagaaagacactgatctctccaaaaacttgttttttcaatgcatgtcccaaactttacctaccagtaactacttcactactgtttcagagagtttggctgatgattcttctagtcgggactcattcaaacaaagccttgagagcctgagctcaggcctgtgtaaaggcagatccgttcttggaacagacactaagccaggctctaaggctggcagctctgtggaccggaaagtgcctgcagagtccatgcccaccctcactccagccttcccacggagcctcctaaatgcccgtaccccagagaatcatgaaaatctatttttacagccccccaaattgtcccgagaagagccttctaatcctttcctggcatttgtggagaaagttgaacacagccctttcagtagttttgcatctcaggcatcaggtagctcctcttctgctaccactgtcacctccaaggtggcacccagctggcccgagtctcactcctctgcagattcggcatctttagcaaagaagaaacccctcttcattacaactgactcctccaagctagtatctggtgttctgggctcagctcttaccagtgggggcccaagcctctctgccatggggaatggccgctccagctcgcccaccagcagcctcactcagcccattgagatgccaactctctcctctagccccacagaggagaggccaactgtggggcctgggcagcaggacaatcccctcctcaaaacctttagtaacgtctttggcaggcactcaggcggctttctgtcctccccggcagatttttcacaggagaacaaagctccttttgaagctgtgaaaaggttctcactggatgaacgaagcttggcttgcagacaagactcggactccagcaccaacagtgacctgtcagatttgagtgactctgaggagcagctgcaggctaagacaggcctgaagggaattccagagcacctgatggggaagctgggccccaatggggagcgcagtgctgagctgttgctgggcaaaagcaaagggaagcaggcccccaagggccggcctcggactgcccccctgaaagttggccagtcagtgctgaaagatgtaagcaaagtgaagaagctgaagcaatctggagagcccttcctgcaggatgggtcatgcatcaatgtggcacctcatctgcacaagtgtcgtgaatgccgcctggagcggtaccggaagtttaaggaacaggagcaagatgattctactgtagcctgccgtttctttcacttccggaggttgatcttcactcgaaaaggggtactccgtgtggaggggtttttaagcccccagcaaagtgaccctgatgccatgaacctgtggattccctcttcctccctagcagaagggatagatctagagacctcaaaatacatcctggccaatgttggggaccagttctgccagctcgtaatgtctgagaaggaggccatgatgatggtggagccacaccagaaagtggcatggaagcgagctgtgcgtggtgtacgggagatgtgtgatgtgtgtgaaacaactctcttcaacatccactgggtttgtcgcaaatgtggatttggggtctgccttgactgttaccggctcaggaaaagccggccacgcagtgagacagaagagatgggtgatgaagaagttttctcctggttgaagtgtgcaaagggacagtcccacgaaccagagaatctcatgcccacacaaattattcctggcacagctctttacaatattggagacatggtacatgctgcccggggcaagtggggaattaaagcaaactgcccttgtatcagtcgacagaacaaatctgtattgagacctgccgtcaccaatgggatgtcacagcttcctagcataaaccctagtgcctcttctggaaacgaaactaccttctctggtggaggaggaccggcaccagtaacaactccagagccggaccatgttcccaaagccgacagcactgacatcagatctgaagagcctctgaaaacagacagttcggcatcaaatagcaatagtgaactgaaagccatcaggcctccttgccctgacacggccccaccctcctccgccctgcactggttggcagatttagcaactcagaaggctaaagaagaaacaaaagaagcagggtccctgaggtcggtgctcaataaagagtctcattcaccctttgggctggactcgttcaactccactgcaaaggtctctccgctgactccaaagctttttaacagtctgttgctgggtcccactgcctccaacaacaaaaccgaagggtctagccttcgagacctccttcactccgggccgggaaaacttcctcaaacccccttggacacaggcataccctttcccccggtcttctctacatcctcagcaggagtgaagagcaaggccagcctacccaactttcttgaccacatcattgcctcagtggtagaaaataagaaaacctcagatgcttcaaagcgggcctgcaacttgactgatacccagaaggaagtgaaggagatggtgatggggttaaatgtgctagatccccatacttctcactcctggctttgtgatgggaggcttctgtgtctccatgaccccagcaacaaaaacaattggaagatcttccgggagtgttggaagcaaggtcagccagtgctggtttcgggggtacataaaaagctcaagtctgagctctggaagccagaagcctttagccaggaatttggagaccaggatgtagacttggtgaactgcaggaactgtgctataatttccgatgtgaaagttcgggatttctgggatggtttcgagatcatatgcaaacgactacggtcagaagatgggcagccaatggtgctcaaactcaaggactggcctcctggggaagattttcgagacatgatgccaaccaggtttgaagatctgatggagaaccttcctctgccagaatataccaaacgagatggcaggctcaatctggcctctaggctacctagctactttgtaaggcctgatctgggccccaagatgtacaacgcctatgggttgataacagcagaagatagaagagttggtacaacaaatcttcacttagatgtgtctgatgctgttaatgtgatggtgtatgttgggattcccatcggggagggtgctcatgatgaagaggtactcaagacaattgacgagggagatgccgatgaggtgacgaagcagaggattcatgatggaaaagagaagccaggtgctttatggcacatctatgcagccaaggatgcagagaagatccgggagctgctccgaaaggttggagaagaacaaggccaagagaacccccctgatcatgacccaattcatgaccaaagttggtacctggaccagaccctccgtaagcgactctatgaggagtatggcgtgcaaggctgggctattgtgcagttcctaggtgatgctgttttcatacctgctggagccccacaccaggttcacaatctatacagttgcataaaagtagcagaagactttgtatctccagaacatgtaaagcactgtttccgcctgactcaggaattcaggcatctctctaacactcatacaaatcatgaggataaactgcaggtgaagaacatcatttaccatgcagtgaaagatgcggttggcaccctcaaggctcatgaatccaaactggcaaggtcctaggcatggagaaactccaagctcctctgtgaagcaggtctttcactcacaacacttaacagggaacggcagggctctttgctggagcagaggcccttcacccagagccagtgtggtcagtattccaaactctccagccactctcttctacgctgcctcaacactgaaggttgacacaggaaagtcgtactgttcacacacacagtttgagactccaagccaagagtgccacatccctatcctgtggccttttggaaatccaaattgcctgaacatggcggggctttcctgcacattctcctgatttgagattcacgggcacacctttcttttcttttcctcttgtgcctagttaagtggaaatgtgtttggagataggggaaatcacataactggtacaagtatggggtaattgcttaaacatgcctggtggaagtctgatagcgtctctgcacgtgacctctgacaaagcccatcccaggagacggggtgaagctattccccacactctcctgtgaacactggagtcttgcaagacccagggagaacccactgcttttcccaggaggctccaggattaggaaatgtgtgtatttagtgaaaaataggtttgtagtgaaatagttactatttcatgaaagtagatatttttagaatttttgaaataccacagttgttttcctggattataaggaaaggcacattacatttagtcttcctttcgatataaaactctttgaagaaatatgatttttagaaatcagctacccattatagcacaaaatcagccaaagcagaatttttaaaaattggcttttttaggattctttttctccccctcccatcttagtcttaccttgagggaacagtcatatgagaaggaactttgtcacatctaagctgtggtgtgttccccatgtgtgtgtacaacactggtgactccaggaaccattttcacctattaccagtgttccctggggactcctcttaatgtttccaaatgggaaggacagttgatttccaacatgaggttttttgttttttatccagaaatattttcagcaaaactttccaactgagtggagtctgattaaggatttatttgaaaatggtgggattcattggcccataggtacattggaaaatgtatatctctccagctgtactgtagtgccctgcaggctgtttatatgttcacagttacttttttttttttttttaaataaaagtcatttaatgtagaatacttttaatttcactttctgtattttaattttgttgaagggctgattgggatttccatgttcttattaaaaatctaacaaatctg

SEQ ID NO: 16633 - DNA, 9692 bp, Homo sapiens
  source 1..9692: mol_type = unassigned DNA
gcagaactttggcgggcaaggagacaaacagccacactgtgctgccggggaagagaagaagaaggaaaggccagacacacaggcgtcgtgcagctgcggaaggattccgtttcctgcagggggcggagggatttgacagcacggtaacttccggaaaagtcctgaacctcagtggaaaagccttgcaagaaacaataacaaacgggaggaggaagcgattctggggtttctgtgttgaacggttcttgtccgcgaagatgcgcttcggcctctgtcaggggacttgaacgggcttagtgggcttcagccagcttttctccaccggttccccacggggacccccccccccccccggccgttgcaatggcgggcgtggggccggggggctacgcggcggagttcgtgccaccgccagagtgccccgtctttgagccgagttgggaggagttcacagatccgctcagctttatcggccgcatccggcctttggcggagaaaaccggcatctgcaaaattcggccgcccaaggaatatgcactttctggttggaatttgaataacatgcctgtcctggaacagtctgttcttgcacatattaatgtggacatctctggtatgaaagtgccgtggctctatgtgggaatgtgcttctcttctttttgctggcacattgaggatcactggagttattccatcaactacttgcactggggggagccaaagacatggtatggtgtgccatctcatgctgcagagcaactggaggaggtgatgagagagctggcccccgagttatttgaatcccagcctgatcttctgcatcagttagttaccatcatgaaccccaacgtgctaatggagcatggtgtgcctgtgtacaggaccaatcagtgtgctggcgagtttgttgtgacatttcctcgtgcctatcactctggatttaaccagggctacaactttgctgaagctgtgaacttctgtactgctgactggttgcccattggacgtcaatgtgtaaatcattaccgacgcctaaggcgccactgtgtcttttcacacgaggaactaattttcaagatggcagcagatccagaatgcttagatgtggggctggctgccatggtctgcaaagaattgactctcatgactgaagaagaaacacgattaagagagtctgttgtacagatgggtgtcctgatgtcagaagaagaagtgtttgaacttgttcctgatgatgagcggcagtgttcagcatgcagaaccacatgttttctctctgctctcacatgttcctgtaatcctgagcggcttgtatgtctctaccatccaactgatctgtgcccctgccccatgcagaagaaatgtcttagatatcgctacccattagaagacctcccttctctgctatatggtgtaaaagtcagggcacagtcctatgacacttgggtcagtcgtgttacagaagcattgtctgctaacttcaaccacaaaaaagatttgattgaattgcgagtaatgctggaagatgctgaggataggaaatacccagagaatgatctctttcgaaaactcagggatgctgtaaaagaagctgagacctgtgcttctgtggctcagctgcttctgagcaaaaagcagaaacacagacagagcccagatagtgggaggactcggaccaaactgacagtggaagaattgaaggcctttgtccaacaactttttagtcttccgtgtgtcatcagccaagctcggcaagtaaagaatctgctagatgatgtggaagagtttcatgaacgtgctcaggaggccatgatggatgaaaccccagattcttccaaactccagatgttgatagatatgggctctagtctctatgtggaactccctgaattaccacgactgaagcaagagctacaacaggctcggtggttggacgaagtaagactgaccttatcagatccgcaacaagtcactttggatgtcatgaagaagctgatagactctggggtagggttggcaccccaccatgctgtggagaaagcaatggctgaactacaggagctccttacagtctctgaacgatgggaagaaaaggctaaggtctgcctacaggcaagaccgaggcacagtgtggcaagtttagaaagcattgtgaatgaagccaagaacattccagcctttctacccaatgtgttgtccttgaaagaagccttacaaaaggctcgagaatggaccgctaaagtggaagctattcagagtggcagcaattacgcttatttggagcagcttgagagcttgtctgcgaaaggacgccctattcctgtgcgtcttgaagcactgccgcaagtggaatcacaggtagcagcagcacgggcatggagagaacggactgggcggacgtttcttaagaagaattctagccatacattgttacaggtgctgagcccccggaccgacattggtgtatatgggagtggcaaaaataggaggaaaaaagtaaaagaactaatagaaaaagaaaaagaaaaggatctggacctggagcctctgagtgatctggaggaaggattggaggaaaccagagatacagccatggtggtggcagttttcaaagaacgggagcaaaaagagattgaagccatgcattctctcagagcagccaacctagccaagatgacaatggtggaccgcatagaagaagtaaaattttgcatttgccgcaagacagccagtgggtttatgctacagtgtgagctctgcaaagactggttccataacagctgtgttcctcttcctaaatcaagttcccaaaaaaaaggatccagctggcaagctaaagaagtaaaattcctttgccctctttgtatgcggtctcgaaggcccaggctagagactattctgtcactcctggtatcccttcagaagttgcccgtacggttgcctgaaggagaggccctgcagtgtttgacagaacgtgctatgagttggcaagatagagcgcggcaggctctagccacagatgaactatcctctgccctggccaaactatctgtgttgagccagcgtatggtggaacaggcggctcgagaaaaaactgaaaagatcatcagtgcagaactccaaaaagcagctgccaatccagacttacagggacacttacctagtttccagcagtctgcttttaaccgggtggtgagcagtgtgtcatcttctcctcgacaaacaatggactatgatgatgaagaaacagactctgatgaagacattcgagagacatatggctacgacatgaaggacacagccagtgtgaagtcctctagtagtcttgaacccaatcttttttgtgatgaagagattcccatcaaatccgaggaggtggtgacccacatgtggacagcaccttcattttgtgcagagcatgcttattcttctgcttctaagagttgttctcaaggttctagcaccccaaggaaacaacctcggaagagccctttggtgccccgaagtttggaacctccagtgctggagttgtcacctggagctaaggcacaactggaagaacttatgatggttggagatctcctggaagtatctctggacgagactcaacacatatggcggattttgcaggccacacacccaccctctgaagacagattcttgcatatcatggaggatgacagcatggaagagaaaccactaaaagtgaaaggaaaggactcttcagagaagaaacggaaacggaagctagaaaaggtagagcaactttttggagaaggaaaacagaagtccaaggagttaaagaaaatggacaaacctagaaagaagaaattaaaattaggtgcagacaaatcaaaggagctgaataaactggccaagaaactagcaaaagaagaagagagaaagaaaaagaaggagaaggctgctgcagccaaagttgaacttgtgaaagagagcactgaaaagaaaagagagaaaaaggtgctggacatcccctcaaagtatgactggtcaggagcagaggagtctgatgatgagaatgctgtgtgcgcagcacagaactgccaaaggccctgcaaggacaaggtagactgggtacaatgtgatggtggctgtgatgagtggtttcatcaagtttgtgtgggtgtatctccagaaatggctgaaaatgaagattacatctgtataaactgtgcaaagaagcaggggccagttagcccaggtccagcaccacctccttccttcataatgagctacaaactaccaatggaggatcttaaagagaccagttagcagatgcttggttagtttgggacatggggggacatggaccacattgagaccttagtcatcaagtagagtggtttatatccacttggaatgttgcttccaaagatgaatggccttcagagaaagtccccttagtgctggcttcctctttgcatggactctgtgggttacattctctatcaacatatctatgcagagggtgtcttctttggtacaacagccaatatttcatgtctcctttgagtgtggtttactgcattaaggccagatgcttaattgagctctagggtggctggttagtattaatacattggtgtgctaacagggcatataggatgtggcttttgtccagctgatagtagttagaggcttacaacttaggagcagcaccaactgaaggtgctaattgcttggatctccttcattgggatagttggagagggattggagtaccactttccttccactgttacctggtacttaatgccctaaagatacaactaggagtaacagggccaaagttatttctgttagacgtcaaggaatggtatcacagtctattgacctcagcgatttgtgcttgtttgtgctagaagaacatcccaaataggagaacctctcacaagctggggcaggtcaccttatctttgtaagatgaggatatcatctagatcagaaatctgactagattggattctgaggagaagaacctactacaaggcaaggagccgttttttggctttgaaaagtcttgctgtcttgggtctacattttagggaagagcaggtacatggatccaggcttctgccaaaaaaaaaaagagaagaagatgacgatgatgaccagtcgtactatcttactgagccacagtgatgcatgcttttcggggaaaacttcattcacaagtattccagacaccaggcttcaggcatggccatgagcaagaccagcaaataacagctttttgccttgcagccctgaccccaatgtctgctgtttccaacactggtgatttctaactacggcccacagcagatgctgttgaataacaccatggcttcatcagaggatgtggggttgtagtacctctgggtgatgaagttgttttagtaaatccatttttaaaaaaaaaaaaggacttgtttttacttttttctaaatgtctctgactactgactgttctatacatagattatttttccttttttaatatacatatatgaatatataaatatatatatttactgttaccagcagcatatgacagagtttcaacatcaaaaatccatttgggggcttgctttttcttttttgctttaaaaaaaaaaatcccattccttctttgtagtacaaggagttagcactccctcctccatcccagcctgaccagatcttccattttgcttttgttcatatagataattatatgtcctttgtgtgttgggacttgtccctgtctgttgggaaacttggtctcactctagtctgtgctggctcttttttcttttgtgtgtgaatgtttgaaactatggtgctgtgtcctcttccctcctgttgtgttctctgttcttcttaaggtattaggtaagctgtatgtaaactcttattagaaggggactaatttttttttaaaggacaaaaaaaaaaatgactaaaaatagtgttttgtcatcactgtctggtgtctttattttggtttaaaaaaatctgtggtttgacttaaattcatcagttttccttttaaaggggggattggggtggacctagcaacagcttatagtttcctcttccctttttgccccagtctcttttaaagaactgtcttctagtaactagaagtgaaatgtactgtccagttacagtttgagtgggtatgagatttaactcaaaaggaatcttacaaaaaaaaagatgttttcttataaaatccaatttctgtaaatgttttctctgaagttcatactacctactttttattcattcttaatactgtataacattttgagtgttttgacttgttcagaggtttgttagtgttgctgtgcatatgtcttgaggtctcatctgaagtaagtttgtgtatgatcgaagatttcaatggatattgcaaggtaactaattaactgatttcataagttttcgttttgccaagctaacgattatcaattaagaatttcctctggttgatgttatacaagaaagcacaatattttttgcctgttgatcttctttgtaacagtcttcagatatttgtgggttaaaaattgaatgtaattttaagtgacagatgcctggaatacatttaaaatttttatttttccttcctaatcatccattaactattccactatcagtggagagtcatgaggatgctgagaaagtatgaatagcttcctgtcaccttctgacgttttgaaacttaaatatgtcttttcgttgatactgtgggattttctgtatttacttgacagtcatggaggatttggtatgacttgaccacaggtttagaccaaggctgagaagaacagaagggagaaattaatggcaaaacaaaaaatacacaaatctgcggttttggaattaatgaaacaagattcatctatttaaagaaatgttggtgttctaatacaaagcattattttcacttagagaaaattacttacttgctcccttctgtattgtaatattttgtattaagacatgatttaaaatgtctttctacccttatctcctctaaactgcaactgaagttgcaattcttcatcattagtattttaactctggcaaaggttatagaaagaaaaatggaaatatggtaggcctgtggtattcttaaaagctaagtcattagaactatgcagatccccaagtttaaaagtacaaatacagcaccagtagttagctttctagctgggggagaagacaggagatttttcttccacagatgtttattttgcttcctgataggtactgcagcaaagccatgttgatgtgtagatgcatgacttcctcactaagctgctgcacaccagctttgcctgcatgattcaaatttgtgcctcagtaaaattataaattattgcatgtcataccttgaataatggaaacggcaaacattaaacctgtgattacccataatgtactttaataataaaaaacatggcagccaggtgcagtagagtgcacctgtggtcaggaggctgaagtgggaagattgcttcaacctgtgagtttgagtcccgcctggtcaacagcgagaccccatgtgtctgtctgtctctctctttttttaaaggacagaggctaagctgtaaggttagcatggttctgcctgggctttgcttctgtgcttctgtgcaggctgagctgtaaggttagcatggttctgcctgggctttgcttctgcgcttctgtgcaggctgagctgtaaggttagcatggttctgcctgggctttgcttctgcgcttctgtgcaggctgagctgtaaggttagcatggttctgcctgggctttgcttctgcgcttctgtgctagcaggtgcccacaaaatgtctttttgaatttcttaatttttgggttctggatgcaattcgtgcacgccaagaaactacttgcttgtcagtattttaattctgtagtacatgtgtgtgaatatcagccagtacttacagtaggaggatgaacagaaaaactgagaagacctgtctttcaaaagatgggtttatccactttttaagggaaaaagtgacagtttggcatgggatttgaaaagtggaaattgtggaaaaattgagctgttgaagtcccacatataaccagatttaataaagcttcacatgtgaattagctccatatgtgtgtagaaggttgcttttatagcaggtccttaagtactccttttgaaattcctcctttttttttaagtcataccattacttctttggatatgaatgtcccaagtggtatctcctactgtagtatgaggaagaatggctgttaatgtattttttgaattttggtcttgtcttggcctggatcatatccagtcaccactatgcaacaaatgatgtgcactgggcaaggatatgatgggttatgaaagctgtatcttgtttgttttttcttttgcagtactccaagtggtctaaacaggaatgtcttgtaaaacctcaagactccctattgattattcccttacatatttatttacaatttatcagggtaattggtggtgccttatgaaaagtataactcgatttcttgatctttgagcatgttttgtgtttcttgtgttttctaaaagaatattagatatggttaattgcattacatctaaaagatttaaaaaattgtgtgtatgctcaggttccccacacccatacccaccctaacccctgtcatttacattggtggcaactttaaatggtaaccaagcaaaagtacattttgataatgagtattgataatcctgaggaaaactagtgagtatatgggagccacctttgacctgtgccaaagcagtttctaatttcatttgctaactataaaataaagaactgagccaaaataatttgatcagtggtgtgattagcctattatcattgctgagaatagtgtttttggagtgtgaagtgattcctgaagatttcacctgccttctgtttccagcaagaatccagtgatgaccaacacatttcctcacttttggttcttgagaagtttatccctttgcaacaaaccattaatagggaaaacaaggaaatgctttccctttctctttggcttcttaaagctcacaaccaattcagaccccaagttacttcagagaagcaaatggcaccttttccccattgccaaggatcccagcttatgcagatatgaaggacggatcatttctgaaaatgttaagactctgcttgcagtggacttggcctcagtttcatgaaatgtgtaactctgtatgtgtatgttaggaggagggttggttgaaagagcgggggcagggaggggaatctgattacctcttgggaaataattttcttgccaacaaaaagatacacttgaagtttcttaaggtggcaagtccattaaaaaaaaaaattgtgttggaccctcccagtttagatcaagtatttcttgggggtcttgctattgtggttgataccaataaatggaagatccagaatattttcatttaaagctcaaccattaattggaacatggtgaaacattgtacacattgtaaaagtagggaacagtacaaaagaatggaatcaaatactatattatgtgaataaactagagtgattttggaatttcactctcttcaccccttctcacttgtatgttctgtaaagtgtatttctactttggtaggaagaaagacttgatttaatatttc

SEQ ID NO: 16634 - DNA, 5274 bp, Homo sapiens
  source 1..5274: mol_type = unassigned DNA
gcagaactttggcgggcaaggagacaaacagccacactgtgctgccggggaagagaagaagaaggaaaggccagacacacaggcgtcgtgcagctgcggaaggattccgtttcctgcagggggcggagggatttgacagcacggtaacttccggaaaagtcctgaacctcagtggaaaagccttgcaagaaacaataacaaacgggaggaggaagcgattctggggtttctgtgttgaacggttcttgtccgcgaagatgcgcttcggcctctgtcaggggacttgaacgggcttagtgggcttcagccagcttttctccaccggttccccacggggacccccccccccccccggccgttgcaatggcgggcgtggggccggggggctacgcggcggagttcgtgccaccgccagagtgccccgtctttgagccgagttgggaggagttcacagatccgctcagctttatcggccgcatccggcctttggcggagaaaaccggcatctgcaaaattcggccgcccaaggactggcagcctccatttgcctgtgaagtaaaaagctttcgtttcactccaagagtccagcgcctgaatgaacttgaggcaatgaccagagtgagattggatttcttggatcaactagcaaaattttgggaacttcaaggatctactctgaagatccctgtggtagagagaaaaatcctggatctgtatgctttgagcaagattgttgccagcaaaggaggttttgaaatggtcaccaaagagaagaaatggtctaaagtgggtagtcgcttgggatatctgccaggaaaaggaactgggtctcttttgaagtcacattatgaaagaattctctacccatatgagcttttccagtctggtgtgagccttatgggtgtgcagatgcctaatttagatcttaaagaaaaagtggagcctgaggttctcagcactgatacccaaacttccccagagccaggcacaaggatgaacattctgccgaagagaacaagacgtgtgaagactcagtcagaatctggagatgtgagtagaaacacggaactgaagaaacttcagatttttggggctgggcccaaggttgtgggcttggcaatgggaacaaaagataaagaagatgaggtcacccgaagacgaaaagttaccaacaggtcagacgcatttaacatgcaaatgagacaacggaaaggcactctctctgttaactttgttgatctctatgtttgtatgttttgtggtcggggaaacaatgaagataaattgcttttgtgtgatggatgtgatgacagctatcatacattttgtctaattcctccactacctgatgtgcccaaaggagactggaggtgtcctaaatgtgtcgccgaggaatgtagcaaacctcgagaagcctttggatttgaacaagctgtacgagagtatacacttcagagctttggagagatggcagataattttaagtctgattattttaatatgccagtccatatggttcccacagaactagtagaaaaggaattttggcggctggtaagcagcattgaagaagatgttattgtggaatatggagcagatatctcctcaaaagactttggaagtggatttccggtgaaggatgggcggagaaagattctgccagaagaagaggaatatgcactttctggttggaatttgaataacatgcctgtcctggaacagtctgttcttgcacatattaatgtggacatctctggtatgaaagtgccgtggctctatgtgggaatgtgcttctcttctttttgctggcacattgaggatcactggagttattccatcaactacttgcactggggggagccaaagacatggtatggtgtgccatctcatgctgcagagcaactggaggaggtgatgagagagctggcccccgagttatttgaatcccagcctgatcttctgcatcagttagttaccatcatgaaccccaacgtgctaatggagcatggtgtgcctgtgtacaggaccaatcagtgtgctggcgagtttgttgtgacatttcctcgtgcctatcactctggatttaaccagggctacaactttgctgaagctgtgaacttctgtactgctgactggttgcccattggacgtcaatgtgtaaatcattaccgacgcctaaggcgccactgtgtcttttcacacgaggaactaattttcaagatggcagcagatccagaatgcttagatgtggggctggctgccatggtctgcaaagaattgactctcatgactgaagaagaaacacgattaagagagtctgttgtacagatgggtgtcctgatgtcagaagaagaagtgtttgaacttgttcctgatgatgagcggcagtgttcagcatgcagaaccacatgttttctctctgctctcacatgttcctgtaatcctgagcggcttgtatgtctctaccatccaactgatctgtgcccctgccccatgcagaagaaatgtcttagatatcgctacccattagaagacctcccttctctgctatatggtgtaaaagtcagggcacagtcctatgacacttgggtcagtcgtgttacagaagcattgtctgctaacttcaaccacaaaaaagatttgattgaattgcgagtaatgctggaagatgctgaggataggaaatacccagagaatgatctctttcgaaaactcagggatgctgtaaaagaagctgagacctgtgcttctgtggctcagctgcttctgagcaaaaagcagaaacacagacagagcccagatagtgggaggactcggaccaaactgacagtggaagaattgaaggcctttgtccaacaactttttagtcttccgtgtgtcatcagccaagctcggcaagtaaagaatctgctagatgatgtggaagagtttcatgaacgtgctcaggaggccatgatggatgaaaccccagattcttccaaactccagatgttgatagatatgggctctagtctctatgtggaactccctgaattaccacgactgaagcaagagctacaacaggctcggtggttggacgaagtaagactgaccttatcagatccgcaacaagtcactttggatgtcatgaagaagctgatagactctggggtagggttggcaccccaccatgctgtggagaaagcaatggctgaactacaggagctccttacagtctctgaacgatgggaagaaaaggctaaggtctgcctacaggcaagaccgaggcacagtgtggcaagtttagaaagcattgtgaatgaagccaagaacattccagcctttctacccaatgtgttgtccttgaaagaagccttacaaaaggctcgagaatggaccgctaaagtggaagctattcagagtggcagcaattacgcttatttggagcagcttgagagcttgtctgcgaaaggacgccctattcctgtgcgtcttgaagcactgccgcaagtggaatcacaggtagcagcagcacgggcatggagagaacggactgggcggacgtttcttaagaagaattctagccatacattgttacaggtgctgagcccccggaccgacattggtgtatatgggagtggcaaaaataggaggaaaaaagtaaaagaactaatagaaaaagaaaaagaaaaggatctggacctggagcctctgagtgatctggaggaaggattggaggaaaccagagatacagccatggtggtggcagttttcaaagaacgggagcaaaaagagattgaagccatgcattctctcagagcagccaacctagccaagatgacaatggtggaccgcatagaagaagtaaaattttgcatttgccgcaagacagccagtgggtttatgctacagtgtgagctctgcaaagactggttccataacagctgtgttcctcttcctaaatcaagttcccaaaaaaaaggatccagctggcaagctaaagaagtaaaattcctttgccctctttgtatgcggtctcgaaggcccaggctagagactattctgtcactcctggtatcccttcagaagttgcccgtacggttgcctgaaggagaggccctgcagtgtttgacagaacgtgctatgagttggcaagatagagcgcggcaggctctagccacagatgaactatcctctgccctggccaaactatctgtgttgagccagcgtatggtggaacaggcggctcgagaaaaaactgaaaagatcatcagtgcagaactccaaaaagcagctgccaatccagacttacagggacacttacctagtttccagcagtctgcttttaaccgggtggtgagcagtgtgtcatcttctcctcgacaaacaatggactatgatgatgaagaaacagactctgatgaagacattcgagagacatatggctacgacatgaaggacacagccagtgtgaagtcctctagtagtcttgaacccaatcttttttgtgatgaagagattcccatcaaatccgaggaggtggtgacccacatgtggacagcaccttcattttgtgcagagcatgcttattcttctgcttctaagagttgttctcaaggttctagcaccccaaggaaacaacctcggaagagccctttggtgccccgaagtttggaacctccagtgctggagttgtcacctggagctaaggcacaactggaagaacttatgatggttggagatctcctggaagtatctctggacgagactcaacacatatggcggattttgcaggccacacacccaccctctgaagacagattcttgcatatcatggaggatgacagcatggaagagaaaccactaaaagtgaaaggaaaggactcttcagagaagaaacggaaacggaagctagaaaaggtagagcaactttttggagaaggaaaacagaagtccaaggagttaaagaaaatggacaaacctagaaagaagaaattaaaattaggtgcagacaaatcaaaggagctgaataaactggccaagaaactagcaaaagaagaagagagaaagaaaaagaaggagaaggctgctgcagccaaagttgaacttgtgaaagagagcactgaaaagaaaagagagaaaaaggtgctggacatcccctcaaagtatgactggtcaggagcagaggagtctgatgatgagaatgctgtgtgcgcagcacagaactgccaaaggccctgcaaggacaagggagttgtatttgtaacggaagaagagaagaataaaaaatattag

SEQ ID NO: 16635 - DNA, 10712 bp, Homo sapiens
  source 1..10712: mol_type = unassigned DNA
gcagaactttggcgggcaaggagacaaacagccacactgtgctgccggggaagagaagaagaaggaaaggccagacacacaggcgtcgtgcagctgcggaaggattccgtttcctgcagggggcggagggatttgacagcacggtaacttccggaaaagtcctgaacctcagtggaaaagccttgcaagaaacaataacaaacgggaggaggaagcgattctggggtttctgtgttgaacggttcttgtccgcgaagatgcgcttcggcctctgtcaggggacttgaacgggcttagtgggcttcagccagcttttctccaccggttccccacggggacccccccccccccccggccgttgcaatggcgggcgtggggccggggggctacgcggcggagttcgtgccaccgccagagtgccccgtctttgagccgagttgggaggagttcacagatccgctcagctttatcggccgcatccggcctttggcggagaaaaccggcatctgcaaaattcggccgcccaaggactggcagcctccatttgcctgtgaagtaaaaagctttcgtttcactccaagagtccagcgcctgaatgaacttgagattgttgccagcaaaggaggttttgaaatggtcaccaaagagaagaaatggtctaaagtgggtagtcgcttgggatatctgccaggaaaaggaactgggtctcttttgaagtcacattatgaaagaattctctacccatatgagcttttccagtctggtgtgagccttatgggtgtgcagatgcctaatttagatcttaaagaaaaagtggagcctgaggttctcagcactgatacccaaacttccccagagccaggcacaaggatgaacattctgccgaagagaacaagacgtgtgaagactcagtcagaatctggagatgtgagtagaaacacggaactgaagaaacttcagatttttggggctgggcccaaggttgtgggcttggcaatgggaacaaaagataaagaagatgaggtcacccgaagacgaaaagttaccaacaggtcagacgcatttaacatgcaaatgagacaacggaaaggcactctctctgttaactttgttgatctctatgtttgtatgttttgtggtcggggaaacaatgaagataaattgcttttgtgtgatggatgtgatgacagctatcatacattttgtctaattcctccactacctgatgtgcccaaaggagactggaggtgtcctaaatgtgtcgccgaggaatgtagcaaacctcgagaagcctttggatttgaacaagctgtacgagagtatacacttcagagctttggagagatggcagataattttaagtctgattattttaatatgccagtccatatggttcccacagaactagtagaaaaggaattttggcggctggtaagcagcattgaagaagatgttattgtggaatatggagcagatatctcctcaaaagactttggaagtggatttccggtgaaggatgggcggagaaagattctgccagaagaagaggaatatgcactttctggttggaatttgaataacatgcctgtcctggaacagtctgttcttgcacatattaatgtggacatctctggtatgaaagtgccgtggctctatgtgggaatgtgcttctcttctttttgctggcacattgaggatcactggagttattccatcaactacttgcactggggggagccaaagacatggtatggtgtgccatctcatgctgcagagcaactggaggaggtgatgagagagctggcccccgagttatttgaatcccagcctgatcttctgcatcagttagttaccatcatgaaccccaacgtgctaatggagcatggtgtgcctgtgtacaggaccaatcagtgtgctggcgagtttgttgtgacatttcctcgtgcctatcactctggatttaaccagggctacaactttgctgaagctgtgaacttctgtactgctgactggttgcccattggacgtcaatgtgtaaatcattaccgacgcctaaggcgccactgtgtcttttcacacgaggaactaattttcaagatggcagcagatccagaatgcttagatgtggggctggctgccatggtctgcaaagaattgactctcatgactgaagaagaaacacgattaagagagtctgttgtacagatgggtgtcctgatgtcagaagaagaagtgtttgaacttgttcctgatgatgagcggcagtgttcagcatgcagaaccacatgttttctctctgctctcacatgttcctgtaatcctgagcggcttgtatgtctctaccatccaactgatctgtgcccctgccccatgcagaagaaatgtcttagatatcgctacccattagaagacctcccttctctgctatatggtgtaaaagtcagggcacagtcctatgacacttgggtcagtcgtgttacagaagcattgtctgctaacttcaaccacaaaaaagatttgattgaattgcgagtaatgctggaagatgctgaggataggaaatacccagagaatgatctctttcgaaaactcagggatgctgtaaaagaagctgagacctgtgcttctgtggctcagctgcttctgagcaaaaagcagaaacacagacagagcccagatagtgggaggactcggaccaaactgacagtggaagaattgaaggcctttgtccaacaactttttagtcttccgtgtgtcatcagccaagctcggcaagtaaagaatctgctagatgatgtggaagagtttcatgaacgtgctcaggaggccatgatggatgaaaccccagattcttccaaactccagatgttgatagatatgggctctagtctctatgtggaactccctgaattaccacgactgaagcaagagctacaacaggctcggtggttggacgaagtaagactgaccttatcagatccgcaacaagtcactttggatgtcatgaagaagctgatagactctggggtagggttggcaccccaccatgctgtggagaaagcaatggctgaactacaggagctccttacagtctctgaacgatgggaagaaaaggctaaggtctgcctacaggcaagaccgaggcacagtgtggcaagtttagaaagcattgtgaatgaagccaagaacattccagcctttctacccaatgtgttgtccttgaaagaagccttacaaaaggctcgagaatggaccgctaaagtggaagctattcagagtggcagcaattacgcttatttggagcagcttgagagcttgtctgcgaaaggacgccctattcctgtgcgtcttgaagcactgccgcaagtggaatcacaggtagcagcagcacgggcatggagagaacggactgggcggacgtttcttaagaagaattctagccatacattgttacaggtgctgagcccccggaccgacattggtgtatatgggagtggcaaaaataggaggaaaaaagtaaaagaactaatagaaaaagaaaaagaaaaggatctggacctggagcctctgagtgatctggaggaaggattggaggaaaccagagatacagccatggtggtggcagttttcaaagaacgggagcaaaaagagattgaagccatgcattctctcagagcagccaacctagccaagatgacaatggtggaccgcatagaagaagtaaaattttgcatttgccgcaagacagccagtgggtttatgctacagtgtgagctctgcaaagactggttccataacagctgtgttcctcttcctaaatcaagttcccaaaaaaaaggatccagctggcaagctaaagaagtaaaattcctttgccctctttgtatgcggtctcgaaggcccaggctagagactattctgtcactcctggtatcccttcagaagttgcccgtacggttgcctgaaggagaggccctgcagtgtttgacagaacgtgctatgagttggcaagatagagcgcggcaggctctagccacagatgaactatcctctgccctggccaaactatctgtgttgagccagcgtatggtggaacaggcggctcgagaaaaaactgaaaagatcatcagtgcagaactccaaaaagcagctgccaatccagacttacagggacacttacctagtttccagcagtctgcttttaaccgggtggtgagcagtgtgtcatcttctcctcgacaaacaatggactatgatgatgaagaaacagactctgatgaagacattcgagagacatatggctacgacatgaaggacacagccagtgtgaagtcctctagtagtcttgaacccaatcttttttgtgatgaagagattcccatcaaatccgaggaggtggtgacccacatgtggacagcaccttcattttgtgcagagcatgcttattcttctgcttctaagagttgttctcaaggttctagcaccccaaggaaacaacctcggaagagccctttggtgccccgaagtttggaacctccagtgctggagttgtcacctggagctaaggcacaactggaagaacttatgatggttggagatctcctggaagtatctctggacgagactcaacacatatggcggattttgcaggccacacacccaccctctgaagacagattcttgcatatcatggaggatgacagcatggaagagaaaccactaaaagtgaaaggaaaggactcttcagagaagaaacggaaacggaagctagaaaaggtagagcaactttttggagaaggaaaacagaagtccaaggagttaaagaaaatggacaaacctagaaagaagaaattaaaattaggtgcagacaaatcaaaggagctgaataaactggccaagaaactagcaaaagaagaagagagaaagaaaaagaaggagaaggctgctgcagccaaagttgaacttgtgaaagagagcactgaaaagaaaagagagaaaaaggtgctggacatcccctcaaagtatgactggtcaggagcagaggagtctgatgatgagaatgctgtgtgcgcagcacagaactgccaaaggccctgcaaggacaaggtagactgggtacaatgtgatggtggctgtgatgagtggtttcatcaagtttgtgtgggtgtatctccagaaatggctgaaaatgaagattacatctgtataaactgtgcaaagaagcaggggccagttagcccaggtccagcaccacctccttccttcataatgagctacaaactaccaatggaggatcttaaagagaccagttagcagatgcttggttagtttgggacatggggggacatggaccacattgagaccttagtcatcaagtagagtggtttatatccacttggaatgttgcttccaaagatgaatggccttcagagaaagtccccttagtgctggcttcctctttgcatggactctgtgggttacattctctatcaacatatctatgcagagggtgtcttctttggtacaacagccaatatttcatgtctcctttgagtgtggtttactgcattaaggccagatgcttaattgagctctagggtggctggttagtattaatacattggtgtgctaacagggcatataggatgtggcttttgtccagctgatagtagttagaggcttacaacttaggagcagcaccaactgaaggtgctaattgcttggatctccttcattgggatagttggagagggattggagtaccactttccttccactgttacctggtacttaatgccctaaagatacaactaggagtaacagggccaaagttatttctgttagacgtcaaggaatggtatcacagtctattgacctcagcgatttgtgcttgtttgtgctagaagaacatcccaaataggagaacctctcacaagctggggcaggtcaccttatctttgtaagatgaggatatcatctagatcagaaatctgactagattggattctgaggagaagaacctactacaaggcaaggagccgttttttggctttgaaaagtcttgctgtcttgggtctacattttagggaagagcaggtacatggatccaggcttctgccaaaaaaaaaaagagaagaagatgacgatgatgaccagtcgtactatcttactgagccacagtgatgcatgcttttcggggaaaacttcattcacaagtattccagacaccaggcttcaggcatggccatgagcaagaccagcaaataacagctttttgccttgcagccctgaccccaatgtctgctgtttccaacactggtgatttctaactacggcccacagcagatgctgttgaataacaccatggcttcatcagaggatgtggggttgtagtacctctgggtgatgaagttgttttagtaaatccatttttaaaaaaaaaaaaggacttgtttttacttttttctaaatgtctctgactactgactgttctatacatagattatttttccttttttaatatacatatatgaatatataaatatatatatttactgttaccagcagcatatgacagagtttcaacatcaaaaatccatttgggggcttgctttttcttttttgctttaaaaaaaaaaatcccattccttctttgtagtacaaggagttagcactccctcctccatcccagcctgaccagatcttccattttgcttttgttcatatagataattatatgtcctttgtgtgttgggacttgtccctgtctgttgggaaacttggtctcactctagtctgtgctggctcttttttcttttgtgtgtgaatgtttgaaactatggtgctgtgtcctcttccctcctgttgtgttctctgttcttcttaaggtattaggtaagctgtatgtaaactcttattagaaggggactaatttttttttaaaggacaaaaaaaaaaatgactaaaaatagtgttttgtcatcactgtctggtgtctttattttggtttaaaaaaatctgtggtttgacttaaattcatcagttttccttttaaaggggggattggggtggacctagcaacagcttatagtttcctcttccctttttgccccagtctcttttaaagaactgtcttctagtaactagaagtgaaatgtactgtccagttacagtttgagtgggtatgagatttaactcaaaaggaatcttacaaaaaaaaagatgttttcttataaaatccaatttctgtaaatgttttctctgaagttcatactacctactttttattcattcttaatactgtataacattttgagtgttttgacttgttcagaggtttgttagtgttgctgtgcatatgtcttgaggtctcatctgaagtaagtttgtgtatgatcgaagatttcaatggatattgcaaggtaactaattaactgatttcataagttttcgttttgccaagctaacgattatcaattaagaatttcctctggttgatgttatacaagaaagcacaatattttttgcctgttgatcttctttgtaacagtcttcagatatttgtgggttaaaaattgaatgtaattttaagtgacagatgcctggaatacatttaaaatttttatttttccttcctaatcatccattaactattccactatcagtggagagtcatgaggatgctgagaaagtatgaatagcttcctgtcaccttctgacgttttgaaacttaaatatgtcttttcgttgatactgtgggattttctgtatttacttgacagtcatggaggatttggtatgacttgaccacaggtttagaccaaggctgagaagaacagaagggagaaattaatggcaaaacaaaaaatacacaaatctgcggttttggaattaatgaaacaagattcatctatttaaagaaatgttggtgttctaatacaaagcattattttcacttagagaaaattacttacttgctcccttctgtattgtaatattttgtattaagacatgatttaaaatgtctttctacccttatctcctctaaactgcaactgaagttgcaattcttcatcattagtattttaactctggcaaaggttatagaaagaaaaatggaaatatggtaggcctgtggtattcttaaaagctaagtcattagaactatgcagatccccaagtttaaaagtacaaatacagcaccagtagttagctttctagctgggggagaagacaggagatttttcttccacagatgtttattttgcttcctgataggtactgcagcaaagccatgttgatgtgtagatgcatgacttcctcactaagctgctgcacaccagctttgcctgcatgattcaaatttgtgcctcagtaaaattataaattattgcatgtcataccttgaataatggaaacggcaaacattaaacctgtgattacccataatgtactttaataataaaaaacatggcagccaggtgcagtagagtgcacctgtggtcaggaggctgaagtgggaagattgcttcaacctgtgagtttgagtcccgcctggtcaacagcgagaccccatgtgtctgtctgtctctctctttttttaaaggacagaggctaagctgtaaggttagcatggttctgcctgggctttgcttctgtgcttctgtgcaggctgagctgtaaggttagcatggttctgcctgggctttgcttctgcgcttctgtgcaggctgagctgtaaggttagcatggttctgcctgggctttgcttctgcgcttctgtgcaggctgagctgtaaggttagcatggttctgcctgggctttgcttctgcgcttctgtgctagcaggtgcccacaaaatgtctttttgaatttcttaatttttgggttctggatgcaattcgtgcacgccaagaaactacttgcttgtcagtattttaattctgtagtacatgtgtgtgaatatcagccagtacttacagtaggaggatgaacagaaaaactgagaagacctgtctttcaaaagatgggtttatccactttttaagggaaaaagtgacagtttggcatgggatttgaaaagtggaaattgtggaaaaattgagctgttgaagtcccacatataaccagatttaataaagcttcacatgtgaattagctccatatgtgtgtagaaggttgcttttatagcaggtccttaagtactccttttgaaattcctcctttttttttaagtcataccattacttctttggatatgaatgtcccaagtggtatctcctactgtagtatgaggaagaatggctgttaatgtattttttgaattttggtcttgtcttggcctggatcatatccagtcaccactatgcaacaaatgatgtgcactgggcaaggatatgatgggttatgaaagctgtatcttgtttgttttttcttttgcagtactccaagtggtctaaacaggaatgtcttgtaaaacctcaagactccctattgattattcccttacatatttatttacaatttatcagggtaattggtggtgccttatgaaaagtataactcgatttcttgatctttgagcatgttttgtgtttcttgtgttttctaaaagaatattagatatggttaattgcattacatctaaaagatttaaaaaattgtgtgtatgctcaggttccccacacccatacccaccctaacccctgtcatttacattggtggcaactttaaatggtaaccaagcaaaagtacattttgataatgagtattgataatcctgaggaaaactagtgagtatatgggagccacctttgacctgtgccaaagcagtttctaatttcatttgctaactataaaataaagaactgagccaaaataatttgatcagtggtgtgattagcctattatcattgctgagaatagtgtttttggagtgtgaagtgattcctgaagatttcacctgccttctgtttccagcaagaatccagtgatgaccaacacatttcctcacttttggttcttgagaagtttatccctttgcaacaaaccattaatagggaaaacaaggaaatgctttccctttctctttggcttcttaaagctcacaaccaattcagaccccaagttacttcagagaagcaaatggcaccttttccccattgccaaggatcccagcttatgcagatatgaaggacggatcatttctgaaaatgttaagactctgcttgcagtggacttggcctcagtttcatgaaatgtgtaactctgtatgtgtatgttaggaggagggttggttgaaagagcgggggcagggaggggaatctgattacctcttgggaaataattttcttgccaacaaaaagatacacttgaagtttcttaaggtggcaagtccattaaaaaaaaaaattgtgttggaccctcccagtttagatcaagtatttcttgggggtcttgctattgtggttgataccaataaatggaagatccagaatattttcatttaaagctcaaccattaattggaacatggtgaaacattgtacacattgtaaaagtagggaacagtacaaaagaatggaatcaaatactatattatgtgaataaactagagtgattttggaatttcactctcttcaccccttctcacttgtatgttctgtaaagtgtatttctactttggtaggaagaaagacttgatttaatatttc

SEQ ID NO: 16636 - DNA, 10763 bp, Homo sapiens
  source 1..10763: mol_type = unassigned DNA
gcagaactttggcgggcaaggagacaaacagccacactgtgctgccggggaagagaagaagaaggaaaggccagacacacaggcgtcgtgcagctgcggaaggattccgtttcctgcagggggcggagggatttgacagcacggtaacttccggaaaagtcctgaacctcagtggaaaagccttgcaagaaacaataacaaacgggaggaggaagcgattctggggtttctgtgttgaacggttcttgtccgcgaagatgcgcttcggcctctgtcaggggacttgaacgggcttagtgggcttcagccagcttttctccaccggttccccacggggacccccccccccccccggccgttgcaatggcgggcgtggggccggggggctacgcggcggagttcgtgccaccgccagagtgccccgtctttgagccgagttgggaggagttcacagatccgctcagctttatcggccgcatccggcctttggcggagaaaaccggcatctgcaaaattcggccgcccaaggactggcagcctccatttgcctgtgaagtaaaaagctttcgtttcactccaagagtccagcgcctgaatgaacttgaggcaatgaccagagtgagattggatttcttggatcaactagcaaaattttgggaacttcaaggatctactctgaagatccctgtggtagagagaaaaatcctggatctgtatgctttgagcaagattgttgccagcaaaggaggttttgaaatggtcaccaaagagaagaaatggtctaaagtgggtagtcgcttgggatatctgccaggaaaaggaactgggtctcttttgaagtcacattatgaaagaattctctacccatatgagcttttccagtctggtgtgagccttatgggtgtgcagatgcctaatttagatcttaaagaaaaagtggagcctgaggttctcagcactgatacccaaacttccccagagccaggcacaaggatgaacattctgccgaagagaacaagacgtgtgaagactcagtcagaatctggagatgtgagtagaaacacggaactgaagaaacttcagatttttggggctgggcccaaggttgtgggcttggcaatgggaacaaaagataaagaagatgaggtcacccgaagacgaaaagttaccaacaggtcagacgcatttaacatgcaaatgagacaacggaaaggcactctctctgttaactttgttgatctctatgtttgtatgttttgtggtcggggaaacaatgaagataaattgcttttgtgtgatggatgtgatgacagctatcatacattttgtctaattcctccactacctgatgtgcccaaaggagactggaggtgtcctaaatgtgtcgccgaggaatgtagcaaacctcgagaagcctttggatttgaacaagctgtacgagagtatacacttcagagctttggagagatggcagataattttaagtctgattattttaatatgccagtccatatggttcccacagaactagtagaaaaggaattttggcggctggtaagcagcattgaagaagatgttattgtggaatatggagcagatatctcctcaaaagactttggaagtggatttccggtgaaggatgggcggagaaagattctgccagaagaagaggaatatgcactttctggttggaatttgaataacatgcctgtcctggaacagtctgttcttgcacatattaatgtggacatctctggtatgaaagtgccgtggctctatgtgggaatgtgcttctcttctttttgctggcacattgaggatcactggagttattccatcaactacttgcactggggggagccaaagacatggtatggtgtgccatctcatgctgcagagcaactggaggaggtgatgagagagctggcccccgagttatttgaatcccagcctgatcttctgcatcagttagttaccatcatgaaccccaacgtgctaatggagcatggtgtgcctgtgtacaggaccaatcagtgtgctggcgagtttgttgtgacatttcctcgtgcctatcactctggatttaaccagggctacaactttgctgaagctgtgaacttctgtactgctgactggttgcccattggacgtcaatgtgtaaatcattaccgacgcctaaggcgccactgtgtcttttcacacgaggaactaattttcaagatggcagcagatccagaatgcttagatgtggggctggctgccatggtctgcaaagaattgactctcatgactgaagaagaaacacgattaagagagtctgttgtacagatgggtgtcctgatgtcagaagaagaagtgtttgaacttgttcctgatgatgagcggcagtgttcagcatgcagaaccacatgttttctctctgctctcacatgttcctgtaatcctgagcggcttgtatgtctctaccatccaactgatctgtgcccctgccccatgcagaagaaatgtcttagatatcgctacccattagaagacctcccttctctgctatatggtgtaaaagtcagggcacagtcctatgacacttgggtcagtcgtgttacagaagcattgtctgctaacttcaaccacaaaaaagatttgattgaattgcgagtaatgctggaagatgctgaggataggaaatacccagagaatgatctctttcgaaaactcagggatgctgtaaaagaagctgagacctgtgcttctgtggctcagctgcttctgagcaaaaagcagaaacacagacagagcccagatagtgggaggactcggaccaaactgacagtggaagaattgaaggcctttgtccaacaactttttagtcttccgtgtgtcatcagccaagctcggcaagtaaagaatctgctagatgatgtggaagagtttcatgaacgtgctcaggaggccatgatggatgaaaccccagattcttccaaactccagatgttgatagatatgggctctagtctctatgtggaactccctgaattaccacgactgaagcaagagctacaacaggctcggtggttggacgaagtaagactgaccttatcagatccgcaacaagtcactttggatgtcatgaagaagctgatagactctggggtagggttggcaccccaccatgctgtggagaaagcaatggctgaactacaggagctccttacagtctctgaacgatgggaagaaaaggctaaggtctgcctacaggcaagaccgaggcacagtgtggcaagtttagaaagcattgtgaatgaagccaagaacattccagcctttctacccaatgtgttgtccttgaaagaagccttacaaaaggctcgagaatggaccgctaaagtggaagctattcagagtggcagcaattacgcttatttggagcagcttgagagcttgtctgcgaaaggacgccctattcctgtgcgtcttgaagcactgccgcaagtggaatcacaggtagcagcagcacgggcatggagagaacggactgggcggacgtttcttaagaagaattctagccatacattgttacaggtgctgagcccccggaccgacattggtgtatatgggagtggcaaaaataggaggaaaaaagtaaaagaactaatagaaaaagaaaaagaaaaggatctggacctggagcctctgagtgatctggaggaaggattggaggaaaccagagatacagccatggtggtggcagttttcaaagaacgggagcaaaaagagattgaagccatgcattctctcagagcagccaacctagccaagatgacaatggtggaccgcatagaagaagtaaaattttgcatttgccgcaagacagccagtgggtttatgctacagtgtgagctctgcaaagactggttccataacagctgtgttcctcttcctaaatcaagttcccaaaaaaaaggatccagctggcaagctaaagaagtaaaattcctttgccctctttgtatgcggtctcgaaggcccaggctagagactattctgtcactcctggtatcccttcagaagttgcccgtacggttgcctgaaggagaggccctgcagtgtttgacagaacgtgctatgagttggcaagatagagcgcggcaggctctagccacagatgaactatcctctgccctggccaaactatctgtgttgagccagcgtatggtggaacaggcggctcgagaaaaaactgaaaagatcatcagtgcagaactccaaaaagcagctgccaatccagacttacagggacacttacctagtttccagcagtctgcttttaaccgggtggtgagcagtgtgtcatcttctcctcgacaaacaatggactatgatgatgaagaaacagactctgatgaagacattcgagagacatatggctacgacatgaaggacacagccagtgtgaagtcctctagtagtcttgaacccaatcttttttgtgatgaagagattcccatcaaatccgaggaggtggtgacccacatgtggacagcaccttcattttgtgcagagcatgcttattcttctgcttctaagagttgttctcaaggttctagcaccccaaggaaacaacctcggaagagccctttggtgccccgaagtttggaacctccagtgctggagttgtcacctggagctaaggcacaactggaagaacttatgatggttggagatctcctggaagtatctctggacgagactcaacacatatggcggattttgcaggccacacacccaccctctgaagacagattcttgcatatcatggaggatgacagcatggaagagaaaccactaaaagtgaaaggaaaggactcttcagagaagaaacggaaacggaagctagaaaaggtagagcaactttttggagaaggaaaacagaagtccaaggagttaaagaaaatggacaaacctagaaagaagaaattaaaattaggtgcagacaaatcaaaggagctgaataaactggccaagaaactagcaaaagaagaagagagaaagaaaaagaaggagaaggctgctgcagccaaagttgaacttgtgaaagagagcactgaaaagaaaagagagaaaaaggtgctggacatcccctcaaagtatgactggtcaggagcagaggagtctgatgatgagaatgctgtgtgcgcagcacagaactgccaaaggccctgcaaggacaaggtagactgggtacaatgtgatggtggctgtgatgagtggtttcatcaagtttgtgtgggtgtatctccagaaatggctgaaaatgaagattacatctgtataaactgtgcaaagaagcaggggccagttagcccaggtccagcaccacctccttccttcataatgagctacaaactaccaatggaggatcttaaagagaccagttagcagatgcttggttagtttgggacatggggggacatggaccacattgagaccttagtcatcaagtagagtggtttatatccacttggaatgttgcttccaaagatgaatggccttcagagaaagtccccttagtgctggcttcctctttgcatggactctgtgggttacattctctatcaacatatctatgcagagggtgtcttctttggtacaacagccaatatttcatgtctcctttgagtgtggtttactgcattaaggccagatgcttaattgagctctagggtggctggttagtattaatacattggtgtgctaacagggcatataggatgtggcttttgtccagctgatagtagttagaggcttacaacttaggagcagcaccaactgaaggtgctaattgcttggatctccttcattgggatagttggagagggattggagtaccactttccttccactgttacctggtacttaatgccctaaagatacaactaggagtaacagggccaaagttatttctgttagacgtcaaggaatggtatcacagtctattgacctcagcgatttgtgcttgtttgtgctagaagaacatcccaaataggagaacctctcacaagctggggcaggtcaccttatctttgtaagatgaggatatcatctagatcagaaatctgactagattggattctgaggagaagaacctactacaaggcaaggagccgttttttggctttgaaaagtcttgctgtcttgggtctacattttagggaagagcaggtacatggatccaggcttctgccaaaaaaaaaaagagaagaagatgacgatgatgaccagtcgtactatcttactgagccacagtgatgcatgcttttcggggaaaacttcattcacaagtattccagacaccaggcttcaggcatggccatgagcaagaccagcaaataacagctttttgccttgcagccctgaccccaatgtctgctgtttccaacactggtgatttctaactacggcccacagcagatgctgttgaataacaccatggcttcatcagaggatgtggggttgtagtacctctgggtgatgaagttgttttagtaaatccatttttaaaaaaaaaaaaggacttgtttttacttttttctaaatgtctctgactactgactgttctatacatagattatttttccttttttaatatacatatatgaatatataaatatatatatttactgttaccagcagcatatgacagagtttcaacatcaaaaatccatttgggggcttgctttttcttttttgctttaaaaaaaaaaatcccattccttctttgtagtacaaggagttagcactccctcctccatcccagcctgaccagatcttccattttgcttttgttcatatagataattatatgtcctttgtgtgttgggacttgtccctgtctgttgggaaacttggtctcactctagtctgtgctggctcttttttcttttgtgtgtgaatgtttgaaactatggtgctgtgtcctcttccctcctgttgtgttctctgttcttcttaaggtattaggtaagctgtatgtaaactcttattagaaggggactaatttttttttaaaggacaaaaaaaaaaatgactaaaaatagtgttttgtcatcactgtctggtgtctttattttggtttaaaaaaatctgtggtttgacttaaattcatcagttttccttttaaaggggggattggggtggacctagcaacagcttatagtttcctcttccctttttgccccagtctcttttaaagaactgtcttctagtaactagaagtgaaatgtactgtccagttacagtttgagtgggtatgagatttaactcaaaaggaatcttacaaaaaaaaagatgttttcttataaaatccaatttctgtaaatgttttctctgaagttcatactacctactttttattcattcttaatactgtataacattttgagtgttttgacttgttcagaggtttgttagtgttgctgtgcatatgtcttgaggtctcatctgaagtaagtttgtgtatgatcgaagatttcaatggatattgcaaggtaactaattaactgatttcataagttttcgttttgccaagctaacgattatcaattaagaatttcctctggttgatgttatacaagaaagcacaatattttttgcctgttgatcttctttgtaacagtcttcagatatttgtgggttaaaaattgaatgtaattttaagtgacagatgcctggaatacatttaaaatttttatttttccttcctaatcatccattaactattccactatcagtggagagtcatgaggatgctgagaaagtatgaatagcttcctgtcaccttctgacgttttgaaacttaaatatgtcttttcgttgatactgtgggattttctgtatttacttgacagtcatggaggatttggtatgacttgaccacaggtttagaccaaggctgagaagaacagaagggagaaattaatggcaaaacaaaaaatacacaaatctgcggttttggaattaatgaaacaagattcatctatttaaagaaatgttggtgttctaatacaaagcattattttcacttagagaaaattacttacttgctcccttctgtattgtaatattttgtattaagacatgatttaaaatgtctttctacccttatctcctctaaactgcaactgaagttgcaattcttcatcattagtattttaactctggcaaaggttatagaaagaaaaatggaaatatggtaggcctgtggtattcttaaaagctaagtcattagaactatgcagatccccaagtttaaaagtacaaatacagcaccagtagttagctttctagctgggggagaagacaggagatttttcttccacagatgtttattttgcttcctgataggtactgcagcaaagccatgttgatgtgtagatgcatgacttcctcactaagctgctgcacaccagctttgcctgcatgattcaaatttgtgcctcagtaaaattataaattattgcatgtcataccttgaataatggaaacggcaaacattaaacctgtgattacccataatgtactttaataataaaaaacatggcagccaggtgcagtagagtgcacctgtggtcaggaggctgaagtgggaagattgcttcaacctgtgagtttgagtcccgcctggtcaacagcgagaccccatgtgtctgtctgtctctctctttttttaaaggacagaggctaagctgtaaggttagcatggttctgcctgggctttgcttctgtgcttctgtgcaggctgagctgtaaggttagcatggttctgcctgggctttgcttctgcgcttctgtgcaggctgagctgtaaggttagcatggttctgcctgggctttgcttctgcgcttctgtgcaggctgagctgtaaggttagcatggttctgcctgggctttgcttctgcgcttctgtgctagcaggtgcccacaaaatgtctttttgaatttcttaatttttgggttctggatgcaattcgtgcacgccaagaaactacttgcttgtcagtattttaattctgtagtacatgtgtgtgaatatcagccagtacttacagtaggaggatgaacagaaaaactgagaagacctgtctttcaaaagatgggtttatccactttttaagggaaaaagtgacagtttggcatgggatttgaaaagtggaaattgtggaaaaattgagctgttgaagtcccacatataaccagatttaataaagcttcacatgtgaattagctccatatgtgtgtagaaggttgcttttatagcaggtccttaagtactccttttgaaattcctcctttttttttaagtcataccattacttctttggatatgaatgtcccaagtggtatctcctactgtagtatgaggaagaatggctgttaatgtattttttgaattttggtcttgtcttggcctggatcatatccagtcaccactatgcaacaaatgatgtgcactgggcaaggatatgatgggttatgaaagctgtatcttgtttgttttttcttttgcagtactccaagtggtctaaacaggaatgtcttgtaaaacctcaagactccctattgattattcccttacatatttatttacaatttatcagggtaattggtggtgccttatgaaaagtataactcgatttcttgatctttgagcatgttttgtgtttcttgtgttttctaaaagaatattagatatggttaattgcattacatctaaaagatttaaaaaattgtgtgtatgctcaggttccccacacccatacccaccctaacccctgtcatttacattggtggcaactttaaatggtaaccaagcaaaagtacattttgataatgagtattgataatcctgaggaaaactagtgagtatatgggagccacctttgacctgtgccaaagcagtttctaatttcatttgctaactataaaataaagaactgagccaaaataatttgatcagtggtgtgattagcctattatcattgctgagaatagtgtttttggagtgtgaagtgattcctgaagatttcacctgccttctgtttccagcaagaatccagtgatgaccaacacatttcctcacttttggttcttgagaagtttatccctttgcaacaaaccattaatagggaaaacaaggaaatgctttccctttctctttggcttcttaaagctcacaaccaattcagaccccaagttacttcagagaagcaaatggcaccttttccccattgccaaggatcccagcttatgcagatatgaaggacggatcatttctgaaaatgttaagactctgcttgcagtggacttggcctcagtttcatgaaatgtgtaactctgtatgtgtatgttaggaggagggttggttgaaagagcgggggcagggaggggaatctgattacctcttgggaaataattttcttgccaacaaaaagatacacttgaagtttcttaaggtggcaagtccattaaaaaaaaaaattgtgttggaccctcccagtttagatcaagtatttcttgggggtcttgctattgtggttgataccaataaatggaagatccagaatattttcatttaaagctcaaccattaattggaacatggtgaaacattgtacacattgtaaaagtagggaacagtacaaaagaatggaatcaaatactatattatgtgaataaactagagtgattttggaatttcactctcttca

SEQ ID NO: 16637 - DNA, 4418 bp, Homo sapiens
  source 1..4418: mol_type = unassigned DNA
acactcccggcttcttctggctcagccgctcggctccccggggaggcctgggctgtgctggtggggatggggtccgggcgaggccgtgtttgtaggggaacgtcagacggagagacctccgaagatttcgtgctcgtttcccccggccctcaggctccgggcactgaaaggcagtcacccaccgcagcccttccagccctgtctacagcgcctcgggcctgggggcagtgagtgaggggtgggtgttgctgaaaccatccgtaacggctccaacgttcgctgaggagagcccggccaactccttcctccgtggccggaactgggattggcagccaccatttgcatgtgatgttgataaacttcattttacgccacgtatccagagactgaatgaattggaggcccaaactcgtgtaaaattgaatttcttggaccagattgcaaagtactgggagttacagggaagtactctgaaaattccacatgtggagaggaagatcttggacttatttcagcttaataagttagttgcagaagaaggtggatttgcagttgtttgcaaggatagaaaatggaccaaaattgctaccaagatggggtttgctcctggcaaagcagtgggctcacatatcagagggcattatgaacgaattctcaacccctacaacttattcctgtccggagacagcctaaggtgtttgcagaagccaaacctgaccacagacactaaggacaaggagtacaaaccccatgatattccccagaggcagtctgtgcagccttcggaaacgtgccccccagcccgacgagcaaaacgcatgagagcagaggccatgaatattaaaatagaacccgaggagacaacggaagccagaactcataatctgagacgtcgaatgggttgtccaactccaaaatgtgaaaatgagaaagaaatgaagagtagcatcaagcaagaacctattgagaggaaagattatattgtagaaaatgagaaggaaaagcccaagagtcgatctaaaaaagccaccaatgctgtggacctgtatgtctgtcttttatgtggcagtggcaatgatgaagaccggctactgttgtgtgatggctgtgatgacagttaccataccttttgcttgatcccacctctccatgatgttcccaagggagactggaggtgtcctaagtgtttggctcaggaatgtagtaagccacaagaagcatttggctttgaacaagcagccagggactataccctccgtacttttggggaaatggcagatgcgttcaaatctgattacttcaacatgccagtccatatggtccccacagagcttgttgagaaagaattttggagactagtaagcactattgaggaggatgtcacagtggaatatggagctgacattgcctcaaaggaatttggcagtggctttcctgtccgagatgggaaaatcaaactctcacctgaggaagaggagtatcttgatagtggctggaatttgaacaacatgccagtgatggagcagtctgtccttgcacatattactgctgatatatgtggcatgaaacttccttggttgtatgtgggaatgtgcttttcttcattctgttggcacattgaagaccactggagctattcaattaactacttgcactggggtgagccaaaaacctggtatggagtcccagggtatgctgctgagcagctagaaaatgtaatgaagaaactagctccagaactctttgtgtcccagccggatctcctccatcagcttgtgaccatcatgaaccccaataccctgatgactcatgaagtgcctgtttaccgaactaatcagtgtgctggggagtttgtgattacatttccaagagcctaccacagtggttttaaccagggttttaattttgctgaggctgttaacttctgcactgttgattggctgccattaggccgacagtgtgtggagcattatcgcttgcttcatcgatattgtgtgttttcccacgatgagatgatctgcaagatggcttccaaggctgatgtattagatgttgtagtggcttcaactgttcagaaagacatggccattatgattgaggatgagaaagctttaagagaaactgtccgtaaattgggagtgattgattcggaaagaatggattttgagctgttgccagatgatgaacgtcagtgtgtaaaatgcaaaactacatgcttcatgtctgccatctcctgttcttgtaaacctggccttcttgtttgcctgcatcatgtaaaagaattgtgttcctgtcctccttacaaatataaattgcggtataggtacacgctggatgatctctaccctatgatgaatgcattgaagcttcgagcagaatcttacaacgaatgggccttgaatgtgaatgaagctttggaggcaaagatcaacaagaagaaaagccttgtcagcttcaaggctttaattgaagaatctgaaatgaagaaattcccagacaatgatcttttgcgacaccttcgcctagtcacacaggatgcagagaagtgtgcctctgttgcgcagcagttgcttaatggcaaaaggcaaactagatatcgatctggtggagggaaatcccaaaatcagttgacagtgaatgagctccggcagtttgtaacacagctgtatgctcttccatgtgtcctcagtcagacaccattactaaaggatctcttgaatcgtgtagaagattttcaacagcatagtcagaaactactctctgaggaaacgcctagtgctgcggagctgcaggacttgctagatgtcagctttgaatttgatgttgaacttccacagcttgctgagatgcgtatccgtttggaacaagcccgttggctagaagaggtgcagcaagcttgcctagaccccagctcccttactttagatgatatgagacgtctcatagacctaggggtagggctggccccgtattcagcagtggagaaagctatggcccggctgcaggaactgctcacagtgtcagagcactgggacgacaaagccaagagtctcctcaaggccaggccacgacattcattgaatagccttgctacggcagtaaaggaaatcgaagagatccctgcatatctgcccaatggtgcggctctgaaagactcagtgcagagagccagagactggcttcaggatgtagagggcctgcaggctggaggacgtgtgccagtgttagacacactcatagaacttgttacacgaggccgatctatccccgtacatctgaattctttgccaagactggaaaccctagtagctgaggttcaggcttggaaagaatgtgctgttaatacattcttgactgagaattctccatattctctcttagaggtgctgtgtcctcgatgtgatattggccttttgggattgaaaaggaagcagagaaagttaaaggagcccttgccaaatggaaagaaaaaaagcaccaaattagagagtctgagtgacctggagagagctttaactgaaagcaaggagactgcttcagctatggcaactcttggggaagctcgcctaagggaaatggaagccttgcagtctctcagactcgccaatgaagggaaattgctgtcgcctctccaagatgtggatataaaaatctgcctatgtcagaaggccccagctgcccctatgattcaatgtgaactctgcagggatgctttccacaccagttgtgtggcggtacccagtatttcacagggcctgcgaatctggctttgtccccattgtcggaggtcagagaaacctccattagagaaaattctgcccctgctcgcctcccttcagcgtatccgagttcgccttcctgagggagatgcacttcgatatatgattgaaagaaccgtgaactggcagcacagagcccagcaactgctttcgtcagggaatcttaaatttgtgcaagatcgagtgggctcaggactgttatatagcagatggcaagcctcagcaggacaggtgtcagacacaaacaaggtatctcaacctcctggcacaacatcattttctttgcctgatgactgggacaacagaacctcatatttgcactcccccttctcaactggacgaagttgtatccccctccatggtgttagtccagaagtgaatgaactattgatggaagcccagctgctccaggtatcccttcctgaaattcaggaactttaccagactttacttgcaaagccaagccctgctcagcagactgaccgaagctcaccagtgagacccagcagtgagaagaatgactgttgccgagggaagcgagatggaattaacagtcttgagagaaaactgaagagacgcctggaaagagagggcctctccagtgagcggtgggaacgagttaagaaaatgcggaccccc

SEQ ID NO: 16638 - DNA, 6449 bp, Homo sapiens
  source 1..6449: mol_type = unassigned DNA
caactcggacttgctgttgctcgagccgcgtctgcacgggtctcggaccgagcggagctcgcagcctcggtcccggagcccaccttcgcctcgcccttgcccagcctgcggtgatggaggcggccaccacactgcacccaggcccgcgcccggcgctgcccctcgggggcccgggcccgctgggcgagttcctgcctccacccgagtgcccggtcttcgaacccagctgggaagagttcgcggaccccttcgctttcatccacaagatccggcccatagccgagcagactggcatctgtaaggtgcggccgccgccggattggcagccaccatttgcatgtgatgttgataaacttcattttacgccacgtatccagagactgaatgaattggaggcccaaactcgtgtaaaattgaatttcttggaccagattgcaaagtactgggagttacagggaagtactctgaaaattccacatgtggagaggaagatcttggacttatttcagcttaataagttagttgcagaagaaggtggatttgcagttgtttgcaaggatagaaaatggaccaaaattgctaccaagatggggtttgctcctggcaaagcagtgggctcacatatcagagggcattatgaacgaattctcaacccctacaacttattcctgtccggagacagcctaaggtgtttgcagaagccaaacctgaccacagacactaaggacaaggagtacaaaccccatgatattccccagaggcagtctgtgcagccttcggaaacgtgccccccagcccgacgagcaaaacgcatgagagcagagagacagagtctcgctgtgttgcccaggctggagtgcagtggcgcgatcttggctcactgcaacctccgcctcctagattccagcaattcttctgcctcagcctcccaagccatgaatattaaaatagaacccgaggagacaacggaagccagaactcataatctgagacgtcgaatgggttgtccaactccaaaatgtgaaaatgagaaagaaatgaagagtagcatcaagcaagaacctattgagaggaaagattatattgtagaaaatgagaaggaaaagcccaagagtcgatctaaaaaagccaccaatgctgtggacctgtatgtctgtcttttatgtggcagtggcaatgatgaagaccggctactgttgtgtgatggctgtgatgacagttaccataccttttgcttgatcccacctctccatgatgttcccaagggagactggaggtgtcctaagtgtttggctcaggaatgtagtaagccacaagaagcatttggctttgaacaagcagccagggactataccctccgtacttttggggaaatggcagatgcgttcaaatctgattacttcaacatgccagtccatatggtccccacagagcttgttgagaaagaattttggagactagtaagcactattgaggaggatgtcacagtggaatatggagctgacattgcctcaaaggaatttggcagtggctttcctgtccgagatgggaaaatcaaactctcacctgaggaagaggagtatcttgatagtggctggaatttgaacaacatgccagtgatggagcagtctgtccttgcacatattactgctgatatatgtggcatgaaacttccttggttgtatgtgggaatgtgcttttcttcattctgttggcacattgaagaccactggagctattcaattaactacttgcactggggtgagccaaaaacctggtatggagtcccagggtatgctgctgagcagctagaaaatgtaatgaagaaactagctccagaactctttgtgtcccagccggatctcctccatcagcttgtgaccatcatgaaccccaataccctgatgactcatgaagtgcctgtttaccgaactaatcagtgtgctggggagtttgtgattacatttccaagagcctaccacagtggttttaaccagggttttaattttgctgaggctgttaacttctgcactgttgattggctgccattaggccgacagtgtgtggagcattatcgcttgcttcatcgatattgtgtgttttcccacgatgagatgatctgcaagatggcttccaaggctgatgtattagatgttgtagtggcttcaactgttcagaaagacatggccattatgattgaggatgagaaagctttaagagaaactgtccgtaaattgggagtgattgattcggaaagaatggattttgagctgttgccagatgatgaacgtcagtgtgtaaaatgcaaaactacatgcttcatgtctgccatctcctgttcttgtaaacctggccttcttgtttgcctgcatcatgtaaaagaattgtgttcctgtcctccttacaaatataaattgcggtataggtacacgctggatgatctctaccctatgatgaatgcattgaagcttcgagcagaatcttacaacgaatgggccttgaatgtgaatgaagctttggaggcaaagatcaacaagaagaaaagccttgtcagcttcaaggctttaattgaagaatctgaaatgaagaaattcccagacaatgatcttttgcgacaccttcgcctagtcacacaggatgcagagaagtgtgcctctgttgcgcagcagttgcttaatggcaaaaggcaaactagatatcgatctggtggagggaaatcccaaaatcagttgacagtgaatgagctccggcagtttgtaacacagctgtatgctcttccatgtgtcctcagtcagacaccattactaaaggatctcttgaatcgtgtagaagattttcaacagcatagtcagaaactactctctgaggaaacgcctagtgctgcggagctgcaggacttgctagatgtcagctttgaatttgatgttgaacttccacagcttgctgagatgcgtatccgtttggaacaagcccgttggctagaagaggtgcagcaagcttgcctagaccccagctcccttactttagatgatatgagacgtctcatagacctaggggtagggctggccccgtattcagcagtggagaaagctatggcccggctgcaggaactgctcacagtgtcagagcactgggacgacaaagccaagagtctcctcaaggccaggccacgacattcattgaatagccttgctacggcagtaaaggaaatcgaagagatccctgcatatctgcccaatggtgcggctctgaaagactcagtgcagagagccagagactggcttcaggatgtagagggcctgcaggctggaggacgtgtgccagtgttagacacactcatagaacttgttacacgaggccgatctatccccgtacatctgaattctttgccaagactggaaaccctagtagctgaggttcaggcttggaaagaatgtgctgttaatacattcttgactgagaattctccatattctctcttagaggtgctgtgtcctcgatgtgatattggccttttgggattgaaaaggaagcagagaaagttaaaggagcccttgccaaatggaaagaaaaaaagcaccaaattagagagtctgagtgacctggagagagctttaactgaaagcaaggagactgcttcagctatggcaactcttggggaagctcgcctaagggaaatggaagccttgcagtctctcagactcgccaatgaagggaaattgctgtcgcctctccaagatgtggatataaaaatctgcctatgtcagaaggccccagctgcccctatgattcaatgtgaactctgcagggatgctttccacaccagttgtgtggcggtacccagtatttcacagggcctgcgaatctggctttgtccccattgtcggaggtcagagaaacctccattagagaaaattctgcccctgctcgcctcccttcagcgtatccgagttcgccttcctgagggagatgcacttcgatatatgattgaaagaaccgtgaactggcagcacagagcccagcaactgctttcgtcagggaatcttaaatttgtgcaagatcgagtgggctcaggactgttatatagcagatggcaagcctcagcaggacaggtgtcagacacaaacaaggtatctcaacctcctggcacaacatcattttctttgcctgatgactgggacaacagaacctcatatttgcactcccccttctcaactggacgaagttgtatccccctccatggtgttagtccagaagtgaatgaactattgatggaagcccagctgctccaggtatcccttcctgaaattcaggaactttaccagactttacttgcaaagccaagccctgctcagcagactgaccgaagctcaccagtgagacccagcagtgagaagaatgactgttgccgagggaagcgagatggaattaacagtcttgagagaaaactgaagagacgcctggaaagagagggcctctccagtgagcggtgggaacgagttaagaaaatgcggacccccaaaaagaagaaaatcaaactgagccaccccaaggacatgaacaatttcaagttagagagagagcgtagctatgaattagttcgttctgctgaaactcattccctgccctcagacacatcctattccgaacaggaagactctgaggatgaagatgccatctgcccagctgtgagctgcctgcagccagaaggagatgaggtggactgggtccagtgtgatggcagctgcaatcagtggtttcatcaggtctgtgttggtgtctccccagagatggcagagaaagaagactacatctgtgtgcgctgtactgtgaaggacgcaccaagccgaaagtaaaaacacaaaaacagatacccccctacttaatgtaattcaggactccaaccaagaggatttcttcaaatctcagcaaagctacaggactggtactcaagccagcctgtaaacggtgctatttctattccttatgggatcatttttccaggactctttgaagaaaagaaaaaacaactaaaaaaatttttgacactttttgtattttttccttaagagctatttgtggttgttgaggtttgaaaagctgactgttttttttgcaggggttcccaccaatttggaaggcattgaagcttgcaccttttcatgtacagcattaaaattttacctctctctgggatttaccagcttaagagtccaactcacttccagtgcccaaaagggcacccaccagaaattccagtaaatcctcatttgaggaagctctcccttgtttactctgttaccacattggggaaatttttaagtttttcactttgggagtttttgtttgtttcttcttttcctttatccacttttcttcttcctggtagactaggtttatttatctgagcaataacttctatgttggtttcagtggctggaattaaaacaaaacaaaacaaacttccaaacagtgtgttggtgctttagcgattgattgatgtacagaacacaaatgtctagtttctagtgtcactgatgaactagtgatgtagaaaagagacttctctgtaagtaattgccacagctgtattttggctttctccctgtcccttcctttctcccctattttttggtagcttgtatcaaatgttacagtttatattgtggaataaatccttcgtcctaacataacactaaatgctgattatttagagccattagagcacagcttcttctgcccctctactgttgcacagccagaaggggctgcttgcttttgcctctgcccaaccaggttgcagtagcagtggatgttagcctgcaaacaacattaggggattcttcttttgtgtcctgctctgtttggtgggccatatgcctacagccctcactaacaaagaacccctctgtcttcaaggactagaacctatctttaaagccgtgctcttttaaaataagctttctcagaatgttggcaaatcacttcaatcctcaaatcagtcttccttgtggaatgctgcctttattatatttgaattgacaggggaacttggtttagggttaagacgttggaaggaaatctaaggaaaattaatcctcacagaggtccgggtttagtatatgtcttgagaggagacttgtgaattcccagactctgcctcctggtttcctttctcatttctttctaactgtagctatcattactggctgtggatagcccatagctattttccttgcttttcttttttaaaggggtctgttctgcagtggagaagacattctggtgaccagacttttgcttaccttttcctattctgttgccaatttttgttttccccacattctatagccataaacctgaagatgagtaaaactggtgggtctttaataaaacaacaacaaaaacagcagtttgtgatatagcagaggtttaaatgtaccctcccc

SEQ ID NO: 16639 - DNA, 7438 bp, Homo sapiens
  source 1..7438: mol_type = unassigned DNA
ttcagtctgttgaaggataccccgttgtgtatttctacctgtatgtaccagagacacctcaaattcaaaatgtccagaaatgaacacagtatcttcttcccttgagtaactcgccttctgtatataattggggtgaatgttccagcaatgccaacgggctagcatctactcaggcaggtacgccagacatctgaatcttaatacctcgtcgtcccccctcaatctgtcactatgtcctaattttatttcctacctttgcatcccttcctcataattatcagcaccactgccttaatttagatcctatcattccttgtctggattatttcaagtctttcgcccctctcaagtctgacctcgtcatagactgtttgtggatgattattttccctgcaacatctccacctcccaatagtctccatcacttattagccatgtgaattatggcaaattgcttaacctacctatgcctcactttccttattgtaaagtggaaataagagtacctatctcatagggttgtgtgattaatcatgcgatgcaattagaacagtgcctaggatatgaaagtgccccaaaatgttacgttattattattattactactattgccttctcatgaacatgctatgtgtatgttcaagctgttatctctactggaaaatccttctccgtttccaatactctttccaaaaccccctcctgggttttactgcacctaccattgtgtactgacgtgattgaatgattggcttatgggactgatcctttctaccagacttaacttcttcagggcaggaactctgatacatagtaaatggtcaataaaagttggctcaactgaaaccctaaggataaactccatccacagcggaaggcgcggccccgcccgattcgggggcggggcggggagccgcgcgcggagggtgggtcgatgggggtggggtgggactctttttcctcgccgtggcggcggaggcgcacggcgtgggcttgcggcgagacgtcgtcgtcggaggctgaaaaagcccaaggtgctgccgttgcccgtacaactcggacttgctgttgctcgagccgcgtctgcacgggtctcggaccgagcggagctcgcagcctcggtcccggagcccaccttcgcctcgcccttgcccagcctgcggtgatggaggcggccaccacactgcacccaggcccgcgcccggcgctgcccctcgggggcccgggcccgctgggcgagttcctgcctccacccgagtgcccggtcttcgaacccagctgggaagagttcgcggaccccttcgctttcatccacaagatccggcccatagccgagcagactggcatctgtaaggtgcggccgccgccggattggcagccaccatttgcatgtgatgttgataaacttcattttacgccacgtatccagagactgaatgaattggaggcccaaactcgtgtaaaattgaatttcttggaccagattgcaaagtactgggagttacagggaagtactctgaaaattccacatgtggagaggaagatcttggacttatttcagcttaataagttagttgcagaagaaggtggatttgcagttgtttgcaaggatagaaaatggaccaaaattgctaccaagatggggtttgctcctggcaaagcagtgggctcacatatcagagggcattatgaacgaattctcaacccctacaacttattcctgtccggagacagcctaaggtgtttgcagaagccaaacctgaccacagacactaaggacaaggagtacaaaccccatgatattccccagaggcagtctgtgcagccttcggaaacgtgccccccagcccgacgagcaaaacgcatgagagcagaggccatgaatattaaaatagaacccgaggagacaacggaagccagaactcataatctgagacgtcgaatgggttgtccaactccaaaatgtgaaaatgagaaagaaatgaagagtagcatcaagcaagaacctattgagaggaaagattatattgtagaaaatgagaaggaaaagcccaagagtcgatctaaaaaagccaccaatgctgtggacctgtatgtctgtcttttatgtggcagtggcaatgatgaagaccggctactgttgtgtgatggctgtgatgacagttaccataccttttgcttgatcccacctctccatgatgttcccaagggagactggaggtgtcctaagtgtttggctcaggaatgtagtaagccacaagaagcatttggctttgaacaagcagccagggactataccctccgtacttttggggaaatggcagatgcgttcaaatctgattacttcaacatgccagtccatatggtccccacagagcttgttgagaaagaattttggagactagtaagcactattgaggaggatgtcacagtggaatatggagctgacattgcctcaaaggaatttggcagtggctttcctgtccgagatgggaaaatcaaactctcacctgaggaagaggagtatcttgatagtggctggaatttgaacaacatgccagtgatggagcagtctgtccttgcacatattactgctgatatatgtggcatgaaacttccttggttgtatgtgggaatgtgcttttcttcattctgttggcacattgaagaccactggagctattcaattaactacttgcactggggtgagccaaaaacctggtatggagtcccagggtatgctgctgagcagctagaaaatgtaatgaagaaactagctccagaactctttgtgtcccagccggatctcctccatcagcttgtgaccatcatgaaccccaataccctgatgactcatgaagtgcctgtttaccgaactaatcagtgtgctggggagtttgtgattacatttccaagagcctaccacagtggttttaaccagggttttaattttgctgaggctgttaacttctgcactgttgattggctgccattaggccgacagtgtgtggagcattatcgcttgcttcatcgatattgtgtgttttcccacgatgagatgatctgcaagatggcttccaaggctgatgtattagatgttgtagtggcttcaactgttcagaaagacatggccattatgattgaggatgagaaagctttaagagaaactgtccgtaaattgggagtgattgattcggaaagaatggattttgagctgttgccagatgatgaacgtcagtgtgtaaaatgcaaaactacatgcttcatgtctgccatctcctgttcttgtaaacctggccttcttgtttgcctgcatcatgtaaaagaattgtgttcctgtcctccttacaaatataaattgcggtataggtacacgctggatgatctctaccctatgatgaatgcattgaagcttcgagcagaatcttacaacgaatgggccttgaatgtgaatgaagctttggaggcaaagatcaacaagaagaaaagccttgtcagcttcaaggctttaattgaagaatctgaaatgaagaaattcccagacaatgatcttttgcgacaccttcgcctagtcacacaggatgcagagaagtgtgcctctgttgcgcagcagttgcttaatggcaaaaggcaaactagatatcgatctggtggagggaaatcccaaaatcagttgacagtgaatgagctccggcagtttgtaacacagctgtatgctcttccatgtgtcctcagtcagacaccattactaaaggatctcttgaatcgtgtagaagattttcaacagcatagtcagaaactactctctgaggaaacgcctagtgctgcggagctgcaggacttgctagatgtcagctttgaatttgatgttgaacttccacagcttgctgagatgcgtatccgtttggaacaagcccgttggctagaagaggtgcagcaagcttgcctagaccccagctcccttactttagatgatatgagacgtctcatagacctaggggtagggctggccccgtattcagcagtggagaaagctatggcccggctgcaggaactgctcacagtgtcagagcactgggacgacaaagccaagagtctcctcaaggccaggccacgacattcattgaatagccttgctacggcagtaaaggaaatcgaagagatccctgcatatctgcccaatggtgcggctctgaaagactcagtgcagagagccagagactggcttcaggatgtagagggcctgcaggctggaggacgtgtgccagtgttagacacactcatagaacttgttacacgaggccgatctatccccgtacatctgaattctttgccaagactggaaaccctagtagctgaggttcaggcttggaaagaatgtgctgttaatacattcttgactgagaattctccatattctctcttagaggtgctgtgtcctcgatgtgatattggccttttgggattgaaaaggaagcagagaaagttaaaggagcccttgccaaatggaaagaaaaaaagcaccaaattagagagtctgagtgacctggagagagctttaactgaaagcaaggagactgcttcagctatggcaactcttggggaagctcgcctaagggaaatggaagccttgcagtctctcagactcgccaatgaagggaaattgctgtcgcctctccaagatgtggatataaaaatctgcctatgtcagaaggccccagctgcccctatgattcaatgtgaactctgcagggatgctttccacaccagttgtgtggcggtacccagtatttcacagggcctgcgaatctggctttgtccccattgtcggaggtcagagaaacctccattagagaaaattctgcccctgctcgcctcccttcagcgtatccgagttcgccttcctgagggagatgcacttcgatatatgattgaaagaaccgtgaactggcagcacagagcccagcaactgctttcgtcagggaatcttaaatttgtgcaagatcgagtgggctcaggactgttatatagcagatggcaagcctcagcaggacaggtgtcagacacaaacaaggtatctcaacctcctggcacaacatcattttctttgcctgatgactgggacaacagaacctcatatttgcactcccccttctcaactggacgaagttgtatccccctccatggtgttagtccagaagtgaatgaactattgatggaagcccagctgctccaggtatcccttcctgaaattcaggaactttaccagactttacttgcaaagccaagccctgctcagcagactgaccgaagctcaccagtgagacccagcagtgagaagaatgactgttgccgagggaagcgagatggaattaacagtcttgagagaaaactgaagagacgcctggaaagagagggcctctccagtgagcggtgggaacgagttaagaaaatgcggacccccaaaaagaagaaaatcaaactgagccaccccaaggacatgaacaatttcaagttagagagagagcgtagctatgaattagttcgttctgctgaaactcattccctgccctcagacacatcctattccgaacaggaagactctgaggatgaagatgccatctgcccagctgtgagctgcctgcagccagaaggagatgaggtggactgggtccagtgtgatggcagctgcaatcagtggtttcatcaggtctgtgttggtgtctccccagagatggcagagaaagaagactacatctgtgtgcgctgtactgtgaaggacgcaccaagccgaaagtaaaaacacaaaaacagatacccccctacttaatgtaattcaggactccaaccaagaggatttcttcaaatctcagcaaagctacaggactggtactcaagccagcctgtaaacggtgctatttctattccttatgggatcatttttccaggactctttgaagaaaagaaaaaacaactaaaaaaatttttgacactttttgtattttttccttaagagctatttgtggttgttgaggtttgaaaagctgactgttttttttgcaggggttcccaccaatttggaaggcattgaagcttgcaccttttcatgtacagcattaaaattttacctctctctgggatttaccagcttaagagtccaactcacttccagtgcccaaaagggcacccaccagaaattccagtaaatcctcatttgaggaagctctcccttgtttactctgttaccacattggggaaatttttaagtttttcactttgggagtttttgtttgtttcttcttttcctttatccacttttcttcttcctggtagactaggtttatttatctgagcaataacttctatgttggtttcagtggctggaattaaaacaaaacaaaacaaacttccaaacagtgtgttggtgctttagcgattgattgatgtacagaacacaaatgtctagtttctagtgtcactgatgaactagtgatgtagaaaagagacttctctgtaagtaattgccacagctgtattttggctttctccctgtcccttcctttctcccctattttttggtagcttgtatcaaatgttacagtttatattgtggaataaatccttcgtcctaacataacactaaatgctgattatttagagccattagagcacagcttcttctgcccctctactgttgcacagccagaaggggctgcttgcttttgcctctgcccaaccaggttgcagtagcagtggatgttagcctgcaaacaacattaggggattcttcttttgtgtcctgctctgtttggtgggccatatgcctacagccctcactaacaaagaacccctctgtcttcaaggactagaacctatctttaaagccgtgctcttttaaaataagctttctcagaatgttggcaaatcacttcaatcctcaaatcagtcttccttgtggaatgctgcctttattatatttgaattgacaggggaacttggtttagggttaagacgttggaaggaaatctaaggaaaattaatcctcacagaggtccgggtttagtatatgtcttgagaggagacttgtgaattcccagactctgcctcctggtttcctttctcatttctttctaactgtagctatcattactggctgtggatagcccatagctattttccttgcttttcttttttaaaggggtctgttctgcagtggagaagacattctggtgaccagacttttgcttaccttttcctattctgttgccaatttttgttttccccacattctatagccataaacctgaagatgagtaaaactggtgggtctttaataaaacaacaacaaaaacagcagtttgtgatatagcagaggtttaaatgtaccctccccttttatgcacttcaaataattaaatctctttaagaatgacttcta

SEQ ID NO: 16640 - DNA, 7396 bp, Homo sapiens
  source 1..7396: mol_type = unassigned DNA
tacctgtatgtaccagagacacctcaaattcaaaatgtccagaaatgaacacagtatcttcttcccttgagtaactcgccttctgtatataattggggtgaatgttccagcaatgccaacgggctagcatctactcaggcaggtacgccagacatctgaatcttaatacctcgtcgtcccccctcaatctgtcactatgtcctaattttatttcctacctttgcatcccttcctcataattatcagcaccactgccttaatttagatcctatcattccttgtctggattatttcaagtctttcgcccctctcaagtctgacctcgtcatagactgtttgtggatgattattttccctgcaacatctccacctcccaatagtctccatcacttattagccatgtgaattatggcaaattgcttaacctacctatgcctcactttccttattgtaaagtggaaataagagtacctatctcatagggttgtgtgattaatcatgcgatgcaattagaacagtgcctaggatatgaaagtgccccaaaatgttacgttattattattattactactattgccttctcatgaacatgctatgtgtatgttcaagctgttatctctactggaaaatccttctccgtttccaatactctttccaaaaccccctcctgggttttactgcacctaccattgtgtactgacgtgattgaatgattggcttatgggactgatcctttctaccagacttaacttcttcagggcaggaactctgatacatagtaaatggtcaataaaagttggctcaactgaaaccctaaggataaactccatccacagcggaaggcgcggccccgcccgattcgggggcggggcggggagccgcgcgcggagggtgggtcgatgggggtggggtgggactctttttcctcgccgtggcggcggaggcgcacggcgtgggcttgcggcgagacgtcgtcgtcggaggctgaaaaagcccaaggtgctgccgttgcccgtacaactcggacttgctgttgctcgagccgcgtctgcacgggtctcggaccgagcggagctcgcagcctcggtcccggagcccaccttcgcctcgcccttgcccagcctgcggtgatggaggcggccaccacactgcacccaggcccgcgcccggcgctgcccctcgggggcccgggcccgctgggcgagttcctgcctccacccgagtgcccggtcttcgaacccagctgggaagagttcgcggaccccttcgctttcatccacaagatccggcccatagccgagcagactggcatctgtaaggtgcggccgccgccggattggcagccaccatttgcatgtgatgttgataaacttcattttacgccacgtatccagagactgaatgaattggaggcccaaactcgtgtaaaattgaatttcttggaccagattgcaaagtactgggagttacagggaagtactctgaaaattccacatgtggagaggaagatcttggacttatttcagcttaataagttagttgcagaagaaggtggatttgcagttgtttgcaaggatagaaaatggaccaaaattgctaccaagatggggtttgctcctggcaaagcagtgggctcacatatcagagggcattatgaacgaattctcaacccctacaacttattcctgtccggagacagcctaaggtgtttgcagaagccaaacctgaccacagacactaaggacaaggagtacaaaccccatgatattccccagaggcagtctgtgcagccttcggaaacgtgccccccagcccgacgagcaaaacgcatgagagcagaggccatgaatattaaaatagaacccgaggagacaacggaagccagaactcataatctgagacgtcgaatgggttgtccaactccaaaatgtgaaaatgagaaagaaatgaagagtagcatcaagcaagaacctattgagaggaaagattatattgtagaaaatgagaaggaaaagcccaagagtcgatctaaaaaagccaccaatgctgtggacctgtatgtctgtcttttatgtggcagtggcaatgatgaagaccggctactgttgtgtgatggctgtgatgacagttaccataccttttgcttgatcccacctctccatgatgttcccaagggagactggaggtgtcctaagtgtttggctcaggaatgtagtaagccacaagaagcatttggctttgaacaagcagccagggactataccctccgtacttttggggaaatggcagatgcgttcaaatctgattacttcaacatgccagtccatatggtccccacagagcttgttgagaaagaattttggagactagtaagcactattgaggaggatgtcacagtggaatatggagctgacattgcctcaaaggaatttggcagtggctttcctgtccgagatgggaaaatcaaactctcacctgaggaagaggagtatcttgatagtggctggaatttgaacaacatgccagtgatggagcagtctgtccttgcacatattactgctgatatatgtggcatgaaacttccttggttgtatgtgggaatgtgcttttcttcattctgttggcacattgaagaccactggagctattcaattaactacttgcactggggtgagccaaaaacctggtatggagtcccagggtatgctgctgagcagctagaaaatgtaatgaagaaactagctccagaactctttgtgtcccagccggatctcctccatcagcttgtgaccatcatgaaccccaataccctgatgactcatgaagtgcctgtttaccgaactaatcagtgtgctggggagtttgtgattacatttccaagagcctaccacagtggttttaaccagggttttaattttgctgaggctgttaacttctgcactgttgattggctgccattaggccgacagtgtgtggagcattatcgcttgcttcatcgatattgtgtgttttcccacgatgagatgatctgcaagatggcttccaaggctgatgtattagatgttgtagtggcttcaactgttcagaaagacatggccattatgattgaggatgagaaagctttaagagaaactgtccgtaaattgggagtgattgattcggaaagaatggattttgagctgttgccagatgatgaacgtcagtgtgtaaaatgcaaaactacatgcttcatgtctgccatctcctgttcttgtaaacctggccttcttgtttgcctgcatcatgtaaaagaattgtgttcctgtcctccttacaaatataaattgcggtataggtacacgctggatgatctctaccctatgatgaatgcattgaagcttcgagcagaatcttacaacgaatgggccttgaatgtgaatgaagctttggaggcaaagatcaacaagaagaaaagccttgtcagcttcaaggctttaattgaagaatctgaaatgaagaaattcccagacaatgatcttttgcgacaccttcgcctagtcacacaggatgcagagaagtgtgcctctgttgcgcagcagttgcttaatggcaaaaggcaaactagatatcgatctggtggagggaaatcccaaaatcagttgacagtgaatgagctccggcagtttgtaacacagctgtatgctcttccatgtgtcctcagtcagacaccattactaaaggatctcttgaatcgtgtagaagattttcaacagcatagtcagaaactactctctgaggaaacgcctagtgctgcggagctgcaggacttgctagatgtcagctttgaatttgatgttgaacttccacagcttgctgagatgcgtatccgtttggaacaagcccgttggctagaagaggtgcagcaagcttgcctagaccccagctcccttactttagatgatatgagacgtctcatagacctaggggtagggctggccccgtattcagcagtggagaaagctatggcccggctgcaggaactgctcacagtgtcagagcactgggacgacaaagccaagagtctcctcaaggccaggccacgacattcattgaatagccttgctacggcagtaaaggaaatcgaagagatccctgcatatctgcccaatggtgcggctctgaaagactcagtgcagagagccagagactggcttcaggatgtagagggcctgcaggctggaggacgtgtgccagtgttagacacactcatagaacttgttacacgaggccgatctatccccgtacatctgaattctttgccaagactggaaaccctagtagctgaggttcaggcttggaaagaatgtgctgttaatacattcttgactgagaattctccatattctctcttagaggtgctgtgtcctcgatgtgatattggccttttgggattgaaaaggaagcagagaaagttaaaggagcccttgccaaatggaaagaaaaaaagcaccaaattagagagtctgagtgacctggagagagctttaactgaaagcaaggagactgcttcagctatggcaactcttggggaagctcgcctaagggaaatggaagccttgcagtctctcagactcgccaatgaagggaaattgctgtcgcctctccaagatgtggatataaaaatctgcctatgtcagaaggccccagctgcccctatgattcaatgtgaactctgcagggatgctttccacaccagttgtgtggcggtacccagtatttcacagggcctgcgaatctggctttgtccccattgtcggaggtcagagaaacctccattagagaaaattctgcccctgctcgcctcccttcagcgtatccgagttcgccttcctgagggagatgcacttcgatatatgattgaaagaaccgtgaactggcagcacagagcccagcaactgctttcgtcagggaatcttaaatttgtgcaagatcgagtgggctcaggactgttatatagcagatggcaagcctcagcaggacaggtgtcagacacaaacaaggtatctcaacctcctggcacaacatcattttctttgcctgatgactgggacaacagaacctcatatttgcactcccccttctcaactggacgaagttgtatccccctccatggtgttagtccagaagtgaatgaactattgatggaagcccagctgctccaggtatcccttcctgaaattcaggaactttaccagactttacttgcaaagccaagccctgctcagcagactgaccgaagctcaccagtgagacccagcagtgagaagaatgactgttgccgagggaagcgagatggaattaacagtcttgagagaaaactgaagagacgcctggaaagagagggcctctccagtgagcggtgggaacgagttaagaaaatgcggacccccaaaaagaagaaaatcaaactgagccaccccaaggacatgaacaatttcaagttagagagagagcgtagctatgaattagttcgttctgctgaaactcattccctgccctcagacacatcctattccgaacaggaagactctgaggatgaagatgccatctgcccagctgtgagctgcctgcagccagaaggagatgaggtggactgggtccagtgtgatggcagctgcaatcagtggtttcatcaggtctgtgttggtgtctccccagagatggcagagaaagaagactacatctgtgtgcgctgtactgtgaaggacgcaccaagccgaaagtaaaaacacaaaaacagatacccccctacttaatgtaattcaggactccaaccaagaggatttcttcaaatctcagcaaagctacaggactggtactcaagccagcctgtaaacggtgctatttctattccttatgggatcatttttccaggactctttgaagaaaagaaaaaacaactaaaaaaatttttgacactttttgtattttttccttaagagctatttgtggttgttgaggtttgaaaagctgactgttttttttgcaggggttcccaccaatttggaaggcattgaagcttgcaccttttcatgtacagcattaaaattttacctctctctgggatttaccagcttaagagtccaactcacttccagtgcccaaaagggcacccaccagaaattccagtaaatcctcatttgaggaagctctcccttgtttactctgttaccacattggggaaatttttaagtttttcactttgggagtttttgtttgtttcttcttttcctttatccacttttcttcttcctggtagactaggtttatttatctgagcaataacttctatgttggtttcagtggctggaattaaaacaaaacaaaacaaacttccaaacagtgtgttggtgctttagcgattgattgatgtacagaacacaaatgtctagtttctagtgtcactgatgaactagtgatgtagaaaagagacttctctgtaagtaattgccacagctgtattttggctttctccctgtcccttcctttctcccctattttttggtagcttgtatcaaatgttacagtttatattgtggaataaatccttcgtcctaacataacactaaatgctgattatttagagccattagagcacagcttcttctgcccctctactgttgcacagccagaaggggctgcttgcttttgcctctgcccaaccaggttgcagtagcagtggatgttagcctgcaaacaacattaggggattcttcttttgtgtcctgctctgtttggtgggccatatgcctacagccctcactaacaaagaacccctctgtcttcaaggactagaacctatctttaaagccgtgctcttttaaaataagctttctcagaatgttggcaaatcacttcaatcctcaaatcagtcttccttgtggaatgctgcctttattatatttgaattgacaggggaacttggtttagggttaagacgttggaaggaaatctaaggaaaattaatcctcacagaggtccgggtttagtatatgtcttgagaggagacttgtgaattcccagactctgcctcctggtttcctttctcatttctttctaactgtagctatcattactggctgtggatagcccatagctattttccttgcttttcttttttaaaggggtctgttctgcagtggagaagacattctggtgaccagacttttgcttaccttttcctattctgttgccaatttttgttttccccacattctatagccataaacctgaagatgagtaaaactggtgggtctttaataaaacaacaacaaaaacagcagtttgtgatatagcagaggtttaaatgtaccctccccttttatgcacttcaaataattaaatctctttaagaatg

SEQ ID NO: 16641 - DNA, 2513 bp, Homo sapiens
  source 1..2513: mol_type = unassigned DNA
tttgctgaggctgttaacttctgcactgttgattggctgccattaggccgacagtgtgtggagcattatcgcttgcttcatcgatattgtgtgttttcccacgatgagatgatctgcaagatggcttccaaggctgatgtattagatgttgtagtggcttcaactgttcagaaagacatggccattatgattgaggatgagaaagctttaagagaaactgtccgtaaattgggagtgattgattcggaaagaatggattttgagctgttgccagatgatgaacgtcagtgtgtaaaatgcaaaactacatgcttcatgtctgccatctcctgttcttgtaaacctggccttcttgtttgcctgcatcatgtaaaagaattgtgttcctgtcctccttacaaatataaattgcggtataggtacacgctggatgatctctaccctatgatgaatgcattgaagcttcgagcagaatcttacaacgaatgggccttgaatgtgaatgaagctttggaggcaaagatcaacaagaagaaaagccttgtcagcttcaaggctttaattgaagaatctgaaatgaagaaattcccagacaatgatcttttgcgacaccttcgcctagtcacacaggatgcagagaagtgtgcctctgttgcgcagcagttgcttaatggcaaaaggcaaactagatatcgatctggtggagggaaatcccaaaatcagttgacagtgaatgagctccggcagtttgtaacacagctgtatgctcttccatgtgtcctcagtcagacaccattactaaaggatctcttgaatcgtgtagaagattttcaacagcatagtcagaaactactctctgaggaaacgcctagtgctgcggagctgcaggacttgctagatgtcagctttgaatttgatgttgaacttccacagcttgctgagatgcgtatccgtttggaacaagcccgttggctagaagaggtgcagcaagcttgcctagaccccagctcccttactttagatgatatgagagtctcatagacctaggggtagggctggccccgtattcagcagtggagaaagctatggcccggctgcaggaactgctcacagtgtcagagcactgggacgacaaagccaagagtctcctcaaggccaggccacgacattcattgaatagccttgctacggcagtaaaggaaatcgaagagatccctgcatatctgcccaatggtgcggctctgaaagactcagtgcagagagccagagactggcttcaggatgtagagggcctgcaggctggaggacgtgtgccagtgttagacacactcatagaacttgttacacgaggccgatctatccccgtacatctgaattctttgccaagactggaaaccctagtagctgaggttcaggcttggaaagaatgtgctgttaatacattcttgactgagaattctccatattctctcttagaggtgctgtgtcctcgatgtgatattggccttttgggattgaaaaggaagcagagaaagttaaaggagcccttgccaaatggaaagaaaaaaagcaccaaattagagagtctgagtgacctggagagagctttaactgaaagcaaggagactgcttcagctatggcaactcttggggaagctcgcctaagggaaatggaagccttgcagtctctcagactcgccaatgaagggaaattgctgtcgcctctccaagatgtggatataaaaatctgcctatgtcagaaggccccagctgcccctatgattcaatgtgaactctgcagggatgctttccacaccagttgtgtggcggtacccagtatttcacagggcctgcgaatctggctttgtccccattgtcggaggtcagagaaacctccattagagaaaattctgcccctgctcgcctcccttcagcgtatccgagttcgccttcctgagggagatgcacttcgatatatgattgaaagaaccgtgaactggcagcacagagcccagcaactgctttcgtcagggaatcttaaatttgtgcaagatcgagtgggctcaggactgttatatagcagatggcaagcctcagcaggacaggtgtcagacacaaacaaggtatctcaacctcctggcacaacatcattttctttgcctgatgactgggacaacagaacctcatatttgcactcccccttctcaactggacgaagttgtatccccctccatggtgttagtccagaagtgaatgaactattgatggaagcccagctgctccaggtatcccttcctgaaattcaggaactttaccagactttacttgcaaagccaagccctgctcagcagactgaccgaagctcaccagtgagacccagcagtgagaagaatgactgttgccgagggaagcgagatggaattaacagtcttgagagaaaactgaagagacgcctggaaagagagggcctctccagtgagcggtgggaacgagttaagaaaatgcggaccccc

SEQ ID NO: 16642 - DNA, 5245 bp, Homo sapiens
  source 1..5245: mol_type = unassigned DNA
cttgttcctccgccgttgcaatgaactattttctctcagtccggggtggtacttttgagtaaccccttccaaatagaaacccataccagcctatttagctcggtctccactatatgaaggtttcctagggcttggtgtgacgcaacgtatacgaggctcggaaggacaccccgcggaaggatccggtttgttgtggtgtggggaggggagacgctgacaaaccaagatggcggcggcggcgctgaaggccgcggcgtttgggaggtaactgtggtggcgaaggctgcggtagtggggaggcaaccacacagtttggaagaaacggagcgggacgaagaggcggtagcagtagagtcagcctgagactctcagagcacgacggccacacgcccccttaggccctcggcgggcggcggctgccccgcttagggcctagcctccgagcattgcctcggcttcaaacagcggcggcgccatgagtccttaagggcggtccaagcctcccgatccctggcccagacctcgggcccaccatggagccggggtccgacgatttcctaccgccaccggagtgcccggtgttcgagcctagctgggccgagttccgagaccctcttggctacatcgcgaaaatcaggcccatcgcagagaaatcgggcatttgcaagatccgcccacccgcggactggcagccaccctttgctgtggaagtggacaacttcaggtttaccccccgaatccagaggctgaatgagctagaggcccagacgagagtgaaactgaactacttggaccagattgccaaattctgggaaatccagggctcctccttaaagattcccaatgtagaacggcggatcttggacctctacagtctcagcaaaattgtggtggaggaaggtggttatgaagctatctgcaaggaccgtcggtgggctcgggtagcccagcgcctcaactatccaccaggcaaaaatattggctccttgctacgctcccactacgaacgcattgtttatccctatgaaatgtaccagtctggagccaaccttgtgcagtgtaacacacgtccatttgataatgaggagaaggacaaggaatacaaaccccacagcatccccctacgacagtctgtgcagccttccaagttcaacagctatggccggcgggccaagagactgcagcctgatccggaacccacagaggaagacattgagaagaatccagagctgaaaaagctacagatctatggggcaggccccaagatgatgggcctgggcctcatggccaaagacaagactctgcggaagaaagataaggaggggcctgagtgtccccccacagtagtggtgaaggaggagttaggtggggatgtgaaggtggagtcaacatcgcctaagaccttcctggagagcaaggaggagctgagtcacagcccagaaccctgcaccaagatgaccatgaggctacggaggaaccacagcaatgcccagtttattgagtcatatgtctgccggatgtgttctcgaggggatgaggatgacaagctcctgctgtgtgatggctgtgatgacaactaccacatcttctgcctgctgcctcctctgcctgagatccccaagggtgtctggcggtgcccaaagtgtgtcatggcggagtgtaagcggcccccagaagcctttggctttgagcaggctacccgggaatacactctgcagagctttggcgagatggccgactcctttaaagctgactacttcaacatgcccgtgcatatggtgcccacagaacttgtggagaaggagttctggaggctggtaaatagcattgaggaagatgtgactgttgagtatggagctgacatccattccaaagaatttggcagcggtttccctgtcagtgacagtaaacggcacctaacccccgaagaggaggagtatgctaccagtggttggaacctaaatgtgatgccggtgttggaacagtctgtactgtgccacatcaatgcagatatctctggcatgaaggtgccctggctctacgtgggcatggtcttctcagccttttgctggcatattgaggatcactggagttactccattaactacctccactggggtgagccgaagacctggtatggggtgccctcacttgcagcagaacatttggaagaagtgatgaagaagctgacacctgaactatttgatagccagcctgacctcctgcaccaacttgtcaccctcatgaatcccaacaccctcatgtcccatggtgtgccagttgtccgcacaaaccagtgtgcaggagagtttgtcatcaccttcccccgtgcttaccacagcggcttcaaccaaggctacaactttgccgaggctgtcaacttttgcactgctgactggttgcctgctgggcgccagtgcattgagcactaccgccggctccggagatactgcgtcttctcccatgaggagcttatctgcaagatggctgcctgcccagagaagctagacctgaacctggcggcagctgtgcataaggagatgttcatcatggtgcaagaagagcggcgtctacgaaaggccctgctggagaagggtatcacagaggctgagcgagaggctttcgagctgctcccagatgatgagcgccagtgtatcaagtgcaagactacgtgtttcctgtcagccctggcctgctacgactgcccagacggccttgtctgcctttcccacatcaatgatctctgcaagtgctccagtagccggcagtacctgcggtatcggtataccttggatgagcttcctgccatgctgcataagctgaaggttcgggctgagtcctttgacacctgggccaacaaagtgcgagtggccctggaggtggaggatgggcggaagcgcagccttgaagaactgagggcactagagtctgaagcccgtgagcggaggtttcctaatagtgagctgctgcagcaactaaagaactgcctgagtgaggcagaggcttgcgtgtcccgagctctgggactggtcagcggccaggaagctggcccccacagggtggctggtctacagatgaccctgactgagctccgggcctttctggaccagatgaacaacctgccttgcgccatgcaccagattggggatgtcaagggtgttctggaacaggtggaggcctaccaggctgaggctcgtgaggccctggcctcactgccctccagtccagggctactgcagtccctgttggagagggggcggcagctgggggtggaggtgcctgaggcccagcagctccagcggcaggtggaacaggcgcgatggctggatgaggtgaaacgcacactggccccctcagcccgaaggggcaccttggctgtcatgcgaggactgttggtcgcgggtgccagtgtagcccctagccctgctgtggataaagcccaggccgagctgcaggaactgctgaccattgctgaacgctgggaggagaaagcccacctctgcctggaggccaggcagaagcatccaccagccacacttgaggccataatccgtgaagcggaaaacatccctgttcacctgcccaacatccaggctctcaaggaggctcttgctaaggcccgggcctggattgctgatgttgatgagatccaaaatggtgaccactacccctgcctggatgacttggagggcctagtagctgtgggccgggacctacctgtggggctggaggagctgagacagctagagctacaggtactgacagcgcactcctggagggagaaggcctccaagaccttcctcaagaaaaattcttgctacacgctgctggaggttctctgcccatgtgcagatgccggctcagacagcaccaagcgcagccggtggatggagaaggagctggggttgtacaaatctgacacagagctgctggggctgtctgcgcaggacctcagggacccaggctctgtgatcgtggccttcaaggagggggaacagaaggagaaggagggtatcctgcagctgcgtcgcaccaattcggccaagcccagtccactggcatcatcgagcacggcctcctctacaacctctatctgtgtgtgtgggcaggtgctggctggggcgggagctctgcagtgtgacctgtgtcaggactggttccatgggcggtgtgtgtcagtgcctcgcctcctcagctctccgaggcccaatcccacctcatccccactgctggcctggtgggaatgggacaccaaattcctgtgtccactgtgtatgcgctcaaggcgcccgcgcctggagaccatcctggcactgctggtagccctgcagagactgcctgtgcggctgcccgagggcgaggccctgcagtgcctcacagagagggccatcagctggcaaggccgcgccaggcaggctctggcctctgaagatgtgactgctcttttgggacggctggctgagctccgccaacggctacaggctgaacctagacctgaggagcctcctaactaccctgcagcccctgcttctgaccccctcagagagggcagtggcaaggatatgcctaaggtccagggcttactggagaatggagacagtgtgaccagtcctgagaaggtagccccggaggagggctcagatctggagctgctgtcctcgctgttgccacagttgactggccctgtgttggaactgcctgaggcaacccgggcccccttggaggagctcatgatggagggggacctgctcgaggtgaccctggatgagaaccacagcatatggcagctgctgcaggctggacagcccccagacctggagaggatccgcacacttctggagctggagaaggcagagcgtcacgggagtcgggctcggggccgggccctggagaggcggcggcggcggaaggtggatcggggtggggagggcgatgacccagcccgagaggagctagagccaaagagggtacggagctcagggccagaggctgaggaggtccaggaggaggaagagctggaggaggagactgggggtgagggcccccctgcacccatccccaccactggcagccccagcacccaggagaaccagaatggcttggaaccggcggaagggaccacttcaggcccctcggcccctttctccactctgactccccggctgcatctgccctgcccacagcagccgcctcagcaacagttgtgacagtggctgagcctagcacagaccctgacagagacccc

SEQ ID NO: 16643 - DNA, 5122 bp, Homo sapiens
  source 1..5122: mol_type = unassigned DNA
cttgttcctccgccgttgcaatgaactattttctctcagtccggggtggtacttttgagtaaccccttccaaatagaaacccataccagcctatttagctcggtctccactatatgaaggtttcctagggcttggtgtgacgcaacgtatacgaggctcggaaggacaccccgcggaaggatccggtttgttgtggtgtggggaggggagacgctgacaaaccaagatggcggcggcggcgctgaaggccgcggcgtttgggaggtaactgtggtggcgaaggctgcggtagtggggaggcaaccacacagtttggaagaaacggagcgggacgaagaggcggtagcagtagagtcagcctgagactctcagagcacgacggccacacgcccccttaggccctcggcgggcggcggctgccccgcttagggcctagcctccgagcattgcctcggcttcaaacagcggcggcgccatgagtccttaagggcggtccaagcctcccgatccctggcccagacctcgggcccaccatggagccggggtccgacgatttcctaccgccaccggagtgcccggtgttcgagcctagctgggccgagttccgagaccctcttggctacatcgcgaaaatcaggcccatcgcagagaaatcgggcatttgcaagatccgcccacccgcggactggcagccaccctttgctgtggaagtggacaacttcaggtttaccccccgaatccagaggctgaatgagctagagattgtggtggaggaaggtggttatgaagctatctgcaaggaccgtcggtgggctcgggtagcccagcgcctcaactatccaccaggcaaaaatattggctccttgctacgctcccactacgaacgcattgtttatccctatgaaatgtaccagtctggagccaaccttgtgcagtgtaacacacgtccatttgataatgaggagaaggacaaggaatacaaaccccacagcatccccctacgacagtctgtgcagccttccaagttcaacagctatggccggcgggccaagagactgcagcctgatccggaacccacagaggaagacattgagaagaatccagagctgaaaaagctacagatctatggggcaggccccaagatgatgggcctgggcctcatggccaaagacaagactctgcggaagaaagataaggaggggcctgagtgtccccccacagtagtggtgaaggaggagttaggtggggatgtgaaggtggagtcaacatcgcctaagaccttcctggagagcaaggaggagctgagtcacagcccagaaccctgcaccaagatgaccatgaggctacggaggaaccacagcaatgcccagtttattgagtcatatgtctgccggatgtgttctcgaggggatgaggatgacaagctcctgctgtgtgatggctgtgatgacaactaccacatcttctgcctgctgcctcctctgcctgagatccccaagggtgtctggcggtgcccaaagtgtgtcatggcggagtgtaagcggcccccagaagcctttggctttgagcaggctacccgggaatacactctgcagagctttggcgagatggccgactcctttaaagctgactacttcaacatgcccgtgcatatggtgcccacagaacttgtggagaaggagttctggaggctggtaaatagcattgaggaagatgtgactgttgagtatggagctgacatccattccaaagaatttggcagcggtttccctgtcagtgacagtaaacggcacctaacccccgaagaggaggagtatgctaccagtggttggaacctaaatgtgatgccggtgttggaacagtctgtactgtgccacatcaatgcagatatctctggcatgaaggtgccctggctctacgtgggcatggtcttctcagccttttgctggcatattgaggatcactggagttactccattaactacctccactggggtgagccgaagacctggtatggggtgccctcacttgcagcagaacatttggaagaagtgatgaagaagctgacacctgaactatttgatagccagcctgacctcctgcaccaacttgtcaccctcatgaatcccaacaccctcatgtcccatggtgtgccagttgtccgcacaaaccagtgtgcaggagagtttgtcatcaccttcccccgtgcttaccacagcggcttcaaccaaggctacaactttgccgaggctgtcaacttttgcactgctgactggttgcctgctgggcgccagtgcattgagcactaccgccggctccggagatactgcgtcttctcccatgaggagcttatctgcaagatggctgcctgcccagagaagctagacctgaacctggcggcagctgtgcataaggagatgttcatcatggtgcaagaagagcggcgtctacgaaaggccctgctggagaagggtatcacagaggctgagcgagaggctttcgagctgctcccagatgatgagcgccagtgtatcaagtgcaagactacgtgtttcctgtcagccctggcctgctacgactgcccagacggccttgtctgcctttcccacatcaatgatctctgcaagtgctccagtagccggcagtacctgcggtatcggtataccttggatgagcttcctgccatgctgcataagctgaaggttcgggctgagtcctttgacacctgggccaacaaagtgcgagtggccctggaggtggaggatgggcggaagcgcagccttgaagaactgagggcactagagtctgaagcccgtgagcggaggtttcctaatagtgagctgctgcagcaactaaagaactgcctgagtgaggcagaggcttgcgtgtcccgagctctgggactggtcagcggccaggaagctggcccccacagggtggctggtctacagatgaccctgactgagctccgggcctttctggaccagatgaacaacctgccttgcgccatgcaccagattggggatgtcaagggtgttctggaacaggtggaggcctaccaggctgaggctcgtgaggccctggcctcactgccctccagtccagggctactgcagtccctgttggagagggggcggcagctgggggtggaggtgcctgaggcccagcagctccagcggcaggtggaacaggcgcgatggctggatgaggtgaaacgcacactggccccctcagcccgaaggggcaccttggctgtcatgcgaggactgttggtcgcgggtgccagtgtagcccctagccctgctgtggataaagcccaggccgagctgcaggaactgctgaccattgctgaacgctgggaggagaaagcccacctctgcctggaggccaggcagaagcatccaccagccacacttgaggccataatccgtgaagcggaaaacatccctgttcacctgcccaacatccaggctctcaaggaggctcttgctaaggcccgggcctggattgctgatgttgatgagatccaaaatggtgaccactacccctgcctggatgacttggagggcctagtagctgtgggccgggacctacctgtggggctggaggagctgagacagctagagctacaggtactgacagcgcactcctggagggagaaggcctccaagaccttcctcaagaaaaattcttgctacacgctgctggaggttctctgcccatgtgcagatgccggctcagacagcaccaagcgcagccggtggatggagaaggagctggggttgtacaaatctgacacagagctgctggggctgtctgcgcaggacctcagggacccaggctctgtgatcgtggccttcaaggagggggaacagaaggagaaggagggtatcctgcagctgcgtcgcaccaattcggccaagcccagtccactggcatcatcgagcacggcctcctctacaacctctatctgtgtgtgtgggcaggtgctggctggggcgggagctctgcagtgtgacctgtgtcaggactggttccatgggcggtgtgtgtcagtgcctcgcctcctcagctctccgaggcccaatcccacctcatccccactgctggcctggtgggaatgggacaccaaattcctgtgtccactgtgtatgcgctcaaggcgcccgcgcctggagaccatcctggcactgctggtagccctgcagagactgcctgtgcggctgcccgagggcgaggccctgcagtgcctcacagagagggccatcagctggcaaggccgcgccaggcaggctctggcctctgaagatgtgactgctcttttgggacggctggctgagctccgccaacggctacaggctgaacctagacctgaggagcctcctaactaccctgcagcccctgcttctgaccccctcagagagggcagtggcaaggatatgcctaaggtccagggcttactggagaatggagacagtgtgaccagtcctgagaaggtagccccggaggagggctcagatctggagctgctgtcctcgctgttgccacagttgactggccctgtgttggaactgcctgaggcaacccgggcccccttggaggagctcatgatggagggggacctgctcgaggtgaccctggatgagaaccacagcatatggcagctgctgcaggctggacagcccccagacctggagaggatccgcacacttctggagctggagaaggcagagcgtcacgggagtcgggctcggggccgggccctggagaggcggcggcggcggaaggtggatcggggtggggagggcgatgacccagcccgagaggagctagagccaaagagggtacggagctcagggccagaggctgaggaggtccaggaggaggaagagctggaggaggagactgggggtgagggcccccctgcacccatccccaccactggcagccccagcacccaggagaaccagaatggcttggaaccggcggaagggaccacttcaggcccctcggcccctttctccactctgactccccggctgcatctgccctgcccacagcagccgcctcagcaacagttgtgacagtggctgagcctagcacagaccctgacagagacccc

SEQ ID NO: 16644 - DNA, 6031 bp, Homo sapiens
  source 1..6031: mol_type = unassigned DNA
cttgttcctccgccgttgcaatgaactattttctctcagtccggggtggtacttttgagtaaccccttccaaatagaaacccataccagcctatttagctcggtctccactatatgaaggtttcctagggcttggtgtgacgcaacgtatacgaggctcggaaggacaccccgcggaaggatccggtttgttgtggtgtggggaggggagacgctgacaaaccaagatggcggcggcggcgctgaaggccgcggcgtttgggaggtaactgtggtggcgaaggctgcggtagtggggaggcaaccacacagtttggaagaaacggagcgggacgaagaggcggtagcagtagagtcagcctgagactctcagagcacgacggccacacgcccccttaggccctcggcgggcggcggctgccccgcttagggcctagcctccgagcattgcctcggcttcaaacagcggcggcgccatgagtccttaagggcggtccaagcctcccgatccctggcccagacctcgggcccaccatggagccggggtccgacgatttcctaccgccaccggagtgcccggtgttcgagcctagctgggccgagttccgagaccctcttggctacatcgcgaaaatcaggcccatcgcagagaaatcgggcatttgcaagatccgcccacccgcggactggcagccaccctttgctgtggaagtggacaacttcaggtttaccccccgaatccagaggctgaatgagctagaggcccagacgagagtgaaactgaactacttggaccagattgccaaattctgggaaatccagggctcctccttaaagattcccaatgtagaacggcggatcttggacctctacagtctcagcaaaattgtggtggaggaaggtggttatgaagctatctgcaaggaccgtcggtgggctcgggtagcccagcgcctcaactatccaccaggcaaaaatattggctccttgctacgctcccactacgaacgcattgtttatccctatgaaatgtaccagtctggagccaaccttgtgcagtgtaacacacgtccatttgataatgaggagaaggacaaggaatacaaaccccacagcatccccctacgacagtctgtgcagccttccaagttcaacagctatggccggcgggccaagagactgcagcctgatccggaacccacagaggaagacattgagaagaatccagagctgaaaaagctacagatctatggggcaggccccaagatgatgggcctgggcctcatggccaaagacaagactctgcggaagaaagataaggaggggcctgagtgtccccccacagtagtggtgaaggaggagttaggtggggatgtgaaggtggagtcaacatcgcctaagaccttcctggagagcaaggaggagctgagtcacagcccagaaccctgcaccaagatgaccatgaggctacggaggaaccacagcaatgcccagtttattgagtcatatgtctgccggatgtgttctcgaggggatgaggatgacaagctcctgctgtgtgatggctgtgatgacaactaccacatcttctgcctgctgcctcctctgcctgagatccccaagggtgtctggcggtgcccaaagtgtgtcatggcggagtgtaagcggcccccagaagcctttggctttgagcaggctacccgggaatacactctgcagagctttggcgagatggccgactcctttaaagctgactacttcaacatgcccgtgcatatggtgcccacagaacttgtggagaaggagttctggaggctggtaaatagcattgaggaagatgtgactgttgagtatggagctgacatccattccaaagaatttggcagcggtttccctgtcagtgacagtaaacggcacctaacccccgaagaggaggagtatgctaccagtggttggaacctaaatgtgatgccggtgttggaacagtctgtactgtgccacatcaatgcagatatctctggcatgaaggtgccctggctctacgtgggcatggtcttctcagccttttgctggcatattgaggatcactggagttactccattaactacctccactggggtgagccgaagacctggtatggggtgccctcacttgcagcagaacatttggaagaagtgatgaagaagctgacacctgaactatttgatagccagcctgacctcctgcaccaacttgtcaccctcatgaatcccaacaccctcatgtcccatggtgtgccagttgtccgcacaaaccagtgtgcaggagagtttgtcatcaccttcccccgtgcttaccacagcggcttcaaccaaggctacaactttgccgaggctgtcaacttttgcactgctgactggttgcctgctgggcgccagtgcattgagcactaccgccggctccggagatactgcgtcttctcccatgaggagcttatctgcaagatggctgcctgcccagagaagctagacctgaacctggcggcagctgtgcataaggagatgttcatcatggtgcaagaagagcggcgtctacgaaaggccctgctggagaagggtatcacagaggctgagcgagaggctttcgagctgctcccagatgatgagcgccagtgtatcaagtgcaagactacgtgtttcctgtcagccctggcctgctacgactgcccagacggccttgtctgcctttcccacatcaatgatctctgcaagtgctccagtagccggcagtacctgcggtatcggtataccttggatgagcttcctgccatgctgcataagctgaaggttcgggctgagtcctttgacacctgggccaacaaagtgcgagtggccctggaggtggaggatgggcggaagcgcagccttgaagaactgagggcactagagtctgaagcccgtgagcggaggtttcctaatagtgagctgctgcagcaactaaagaactgcctgagtgaggcagaggcttgcgtgtcccgagctctgggactggtcagcggccaggaagctggcccccacagggtggctggtctacagatgaccctgactgagctccgggcctttctggaccagatgaacaacctgccttgcgccatgcaccagattggggatgtcaagggtgttctggaacaggtggaggcctaccaggctgaggctcgtgaggccctggcctcactgccctccagtccagggctactgcagtccctgttggagagggggcggcagctgggggtggaggtgcctgaggcccagcagctccagcggcaggtggaacaggcgcgatggctggatgaggtgaaacgcacactggccccctcagcccgaaggggcaccttggctgtcatgcgaggactgttggtcgcgggtgccagtgtagcccctagccctgctgtggataaagcccaggccgagctgcaggaactgctgaccattgctgaacgctgggaggagaaagcccacctctgcctggaggccaggcagaagcatccaccagccacacttgaggccataatccgtgaagcggaaaacatccctgttcacctgcccaacatccaggctctcaaggaggctcttgctaaggcccgggcctggattgctgatgttgatgagatccaaaatggtgaccactacccctgcctggatgacttggagggcctagtagctgtgggccgggacctacctgtggggctggaggagctgagacagctagagctacaggtactgacagcgcactcctggagggagaaggcctccaagaccttcctcaagaaaaattcttgctacacgctgctggaggttctctgcccatgtgcagatgccggctcagacagcaccaagcgcagccggtggatggagaaggagctggggttgtacaaatctgacacagagctgctggggctgtctgcgcaggacctcagggacccaggctctgtgatcgtggccttcaaggagggggaacagaaggagaaggagggtatcctgcagctgcgtcgcaccaattcggccaagcccagtccactggcatcatcgagcacggcctcctctacaacctctatctgtgtgtgtgggcaggtgctggctggggcgggagctctgcagtgtgacctgtgtcaggactggttccatgggcggtgtgtgtcagtgcctcgcctcctcagctctccgaggcccaatcccacctcatccccactgctggcctggtgggaatgggacaccaaattcctgtgtccactgtgtatgcgctcaaggcgcccgcgcctggagaccatcctggcactgctggtagccctgcagagactgcctgtgcggctgcccgagggcgaggccctgcagtgcctcacagagagggccatcagctggcaaggccgcgccaggcaggctctggcctctgaagatgtgactgctcttttgggacggctggctgagctccgccaacggctacaggctgaacctagacctgaggagcctcctaactaccctgcagcccctgcttctgaccccctcagagagggcagtggcaaggatatgcctaaggtccagggcttactggagaatggagacagtgtgaccagtcctgagaaggtagccccggaggagggctcaggtaagagagatctggagctgctgtcctcgctgttgccacagttgactggccctgtgttggaactgcctgaggcaacccgggcccccttggaggagctcatgatggagggggacctgctcgaggtgaccctggatgagaaccacagcatatggcagctgctgcaggctggacagcccccagacctggagaggatccgcacacttctggagctggagaaggcagagcgtcacgggagtcgggctcggggccgggccctggagaggcggcggcggcggaaggtggatcggggtggggagggcgatgacccagcccgagaggagctagagccaaagagggtacggagctcagggccagaggctgaggaggtccaggaggaggaagagctggaggaggagactgggggtgagggcccccctgcacccatccccaccactggcagccccagcacccaggagaaccagaatggcttggaaccggcggaagggaccacttcaggcccctcggcccctttctccactctgactccccggctgcatctgccctgcccacagcagccgcctcagcaacagttgtgacagtggctgagcctagcacagaccctgacagagacccccctcggcctcaaggatcctctttctgaccatcaagcctgcttcttggggggtgggcgggtaggggggtggccatccctgctacccgcccacccctgagtcccttgacttttgtattctgactccaaggtattgttcagacctcagctcctgggggccggcccctggagtcttccctccctggtagcctctaaccagcattcccagacacctgaggcagatagatggatgggctggtgggcaggggggtggctggggctgggccatcaccattccagagacaaggccagtgtatatgcaaactgggggactctcctcccttctctccccagttctggtcctggccaggccatgctacactaacccctgcccccactctcctcccctcttttccttccttcctacccccttctccctctcccttcccctgactgttccacccaggaggaggaaacttcacatagccgtgctcacagttttttattttaaaggaatttggctggggagctgaacagggctccctgtgatctgaagaaagcttttggtgcttgtcctcacaaccacctcagtcctccctccctgtcctcccctgtctcctttcctcctcctgggttcatgttgtaataaaagaagattgttggtgtgtaattaatttgttcaaaagaaaaaaaaaagcaaaacaagaaacttggttccaactgaagcctattttaattttattttattattttcctcttgttagaaataaaacccttagaaacattttttggaaacatgtt

SEQ ID NO: 16645 - DNA, 5677 bp, Homo sapiens
  source 1..5677: mol_type = unassigned DNA
ggccgcggcgtttgggaggtaactgtggtggcgaaggctgcggtagtggggaggcaaccacacagtttggaagaaacggagcgggacgaagaggcggtagcagtagagtcagcctgagactctcagagcacgacggccacacgcccccttaggccctcggcgggcggcggctgccccgcttagggcctagcctccgagcattgcctcggcttcaaacagcggcggcgccatgagtccttaagggcggtccaagcctcccgatccctggcccagacctcgggcccaccatggagccggggtccgacgatttcctaccgccaccggagtgcccggtgttcgagcctagctgggccgagttccgagaccctcttggctacatcgcgaaaatcaggcccatcgcagagaaatcgggcatttgcaagatccgcccacccgcggactggcagccaccctttgctgtggaagtggacaacttcaggtttaccccccgaatccagaggctgaatgagctagaggcccagacgagagtgaaactgaactacttggaccagattgccaaattctgggaaatccagggctcctccttaaagattcccaatgtagaacggcggatcttggacctctacagtctcagcaaaattgtggtggaggaaggtggttatgaagctatctgcaaggaccgtcggtgggctcgggtagcccagcgcctcaactatccaccaggcaaaaatattggctccttgctacgctcccactacgaacgcattgtttatccctatgaaatgtaccagtctggagccaaccttgtgtgtaacacacgtccatttgataatgaggagaaggacaaggaatacaaaccccacagcatccccctacgacagtctgtgcagccttccaagttcaacagctatggccggcgggccaagagactgcagcctgatccggaacccacagaggaagacattgagaagaatccagagctgaaaaagctacagatctatggggcaggccccaagatgatgggcctgggcctcatggccaaagacaagactctgcggaagaaagataaggaggggcctgagtgtccccccacagtagtggtgaaggaggagttaggtggggatgtgaaggtggagtcaacatcgcctaagaccttcctggagagcaaggaggagctgagtcacagcccagaaccctgcaccaagatgaccatgaggctacggaggaaccacagcaatgcccagtttattgagtcatatgtctgccggatgtgttctcgaggggatgaggatgacaagctcctgctgtgtgatggctgtgatgacaactaccacatcttctgcctgctgcctcctctgcctgagatccccaagggtgtctggcggtgcccaaagtgtgtcatggcggagtgtaagcggcccccagaagcctttggctttgagcaggctacccgggaatacactctgcagagctttggcgagatggccgactcctttaaagctgactacttcaacatgcccgtgcatatggtgcccacagaacttgtggagaaggagttctggaggctggtaaatagcattgaggaagatgtgactgttgagtatggagctgacatccattccaaagaatttggcagcggtttccctgtcagtgacagtaaacggcacctaacccccgaagaggaggagtatgctaccagtggttggaacctaaatgtgatgccggtgttggaacagtctgtactgtgccacatcaatgcagatatctctggcatgaaggtgccctggctctacgtgggcatggtcttctcagccttttgctggcatattgaggatcactggagttactccattaactacctccactggggtgagccgaagacctggtatggggtgccctcacttgcagcagaacatttggaagaagtgatgaagaagctgacacctgaactatttgatagccagcctgacctcctgcaccaacttgtcaccctcatgaatcccaacaccctcatgtcccatggtgtgccagttgtccgcacaaaccagtgtgcaggagagtttgtcatcaccttcccccgtgcttaccacagcggcttcaaccaaggctacaactttgccgaggctgtcaacttttgcactgctgactggttgcctgctgggcgccagtgcattgagcactaccgccggctccggagatactgcgtcttctcccatgaggagcttatctgcaagatggctgcctgcccagagaagctagacctgaacctggcggcagctgtgcataaggagatgttcatcatggtgcaagaagagcggcgtctacgaaaggccctgctggagaagggtatcacagaggctgagcgagaggctttcgagctgctcccagatgatgagcgccagtgtatcaagtgcaagactacgtgtttcctgtcagccctggcctgctacgactgcccagacggccttgtctgcctttcccacatcaatgatctctgcaagtgctccagtagccggcagtacctgcggtatcggtataccttggatgagcttcctgccatgctgcataagctgaaggttcgggctgagtcctttgacacctgggccaacaaagtgcgagtggccctggaggtggaggatgggcggaagcgcagccttgaagaactgagggcactagagtctgaagcccgtgagcggaggtttcctaatagtgagctgctgcagcaactaaagaactgcctgagtgaggcagaggcttgcgtgtcccgagctctgggactggtcagcggccaggaagctggcccccacagggtggctggtctacagatgaccctgactgagctccgggcctttctggaccagatgaacaacctgccttgcgccatgcaccagattggggatgtcaagggtgttctggaacaggtggaggcctaccaggctgaggctcgtgaggccctggcctcactgccctccagtccagggctactgcagtccctgttggagagggggcggcagctgggggtggaggtgcctgaggcccagcagctccagcggcaggtggaacaggcgcgatggctggatgaggtgaaacgcacactggccccctcagcccgaaggggcaccttggctgtcatgcgaggactgttggtcgcgggtgccagtgtagcccctagccctgctgtggataaagcccaggccgagctgcaggaactgctgaccattgctgaacgctgggaggagaaagcccacctctgcctggaggccaggcagaagcatccaccagccacacttgaggccataatccgtgaagcggaaaacatccctgttcacctgcccaacatccaggctctcaaggaggctcttgctaaggcccgggcctggattgctgatgttgatgagatccaaaatggtgaccactacccctgcctggatgacttggagggcctagtagctgtgggccgggacctacctgtggggctggaggagctgagacagctagagctacaggtactgacagcgcactcctggagggagaaggcctccaagaccttcctcaagaaaaattcttgctacacgctgctggaggttctctgcccatgtgcagatgccggctcagacagcaccaagcgcagccggtggatggagaaggagctggggttgtacaaatctgacacagagctgctggggctgtctgcgcaggacctcagggacccaggctctgtgatcgtggccttcaaggagggggaacagaaggagaaggagggtatcctgcagctgcgtcgcaccaattcggccaagcccagtccactggcatcatcgagcacggcctcctctacaacctctatctgtgtgtgtgggcaggtgctggctggggcgggagctctgcagtgtgacctgtgtcaggactggttccatgggcggtgtgtgtcagtgcctcgcctcctcagctctccgaggcccaatcccacctcatccccactgctggcctggtgggaatgggacaccaaattcctgtgtccactgtgtatgcgctcaaggcgcccgcgcctggagaccatcctggcactgctggtagccctgcagagactgcctgtgcggctgcccgagggcgaggccctgcagtgcctcacagagagggccatcagctggcaaggccgcgccaggcaggctctggcctctgaagatgtgactgctcttttgggacggctggctgagctccgccaacggctacaggctgaacctagacctgaggagcctcctaactaccctgcagcccctgcttctgaccccctcagagagggcagtggcaaggatatgcctaaggtccagggcttactggagaatggagacagtgtgaccagtcctgagaaggtagccccggaggagggctcaggtaagagagatctggagctgctgtcctcgctgttgccacagttgactggccctgtgttggaactgcctgaggcaacccgggcccccttggaggagctcatgatggagggggacctgctcgaggtgaccctggatgagaaccacagcatatggcagctgctgcaggctggacagcccccagacctggagaggatccgcacacttctggagctggagaaggcagagcgtcacgggagtcgggctcggggccgggccctggagaggcggcggcggcggaaggtggatcggggtggggagggcgatgacccagcccgagaggagctagagccaaagagggtacggagctcagggccagaggctgaggaggtccaggaggaggaagagctggaggaggagactgggggtgagggcccccctgcacccatccccaccactggcagccccagcacccaggagaaccagaatggcttggaaccggcggaagggaccacttcaggcccctcggcccctttctccactctgactccccggctgcatctgccctgcccacagcagccgcctcagcaacagttgtgacagtggctgagcctagcacagaccctgacagagacccccctcggcctcaaggatcctctttctgaccatcaagcctgcttcttggggggtgggcgggtaggggggtggccatccctgctacccgcccacccctgagtcccttgacttttgtattctgactccaaggtattgttcagacctcagctcctgggggccggcccctggagtcttccctccctggtagcctctaaccagcattcccagacacctgaggcagatagatggatgggctggtgggcaggggggtggctggggctgggccatcaccattccagagacaaggccagtgtatatgcaaactgggggactctcctcccttctctccccagttctggtcctggccaggccatgctacactaacccctgcccccactctcctcccctcttttccttccttcctacccccttctccctctcccttcccctgactgttccacccaggaggaggaaacttcacatagccgtgctcacagttttttattttaaaggaatttggctggggagctgaacagggctccctgtgatctgaagaaagcttttggtgcttgtcctcacaaccacctcagtcctccctccctgtcctcccctgtctcctttcctcctcctgggttcatgttgtaataaaagaagattgttggtgtgtaattaatttgttcaaaagaaaaaaaaaa

SEQ ID NO: 16646 - DNA, 6096 bp, Homo sapiens
  source 1..6096: mol_type = unassigned DNA
cttgttcctccgccgttgcaatgaactattttctctcagtccggggtggtacttttgagtaaccccttccaaatagaaacccataccagcctatttagctcggtctccactatatgaaggtttcctagggcttggtgtgacgcaacgtatacgaggctcggaaggacaccccgcggaaggatccggtttgttgtggtgtggggaggggagacgctgacaaaccaagatggcggcggcggcgctgaaggccgcggcgtttgggaggtaactgtggtggcgaaggctgcggtagtggggaggcaaccacacagtttggaagaaacggagcgggacgaagaggcggtagcagtagagtcagcctgagactctcagagcacgacggccacacgcccccttaggccctcggcgggcggcggctgccccgcttagggcctagcctccgagcattgcctcggcttcaaacagcggcggcgccatgagtccttaagggcggtccaagcctcccgatccctggcccagacctcgggcccaccatggagccggggtccgacgatttcctaccgccaccggagtgcccggtgttcgagcctagctgggccgagttccgagaccctcttggctacatcgcgaaaatcaggcccatcgcagagaaatcgggcatttgcaagatccgcccacccgcgattgtggtggaggaaggtggttatgaagctatctgcaaggaccgtcggtgggctcgggtagcccagcgcctcaactatccaccaggcaaaaatattggctccttgctacgctcccactacgaacgcattgtttatccctatgaaatgtaccagtctggagccaaccttgtgcagtgtaacacacgtccatttgataatgaggagaaggacaaggaatacaaaccccacagcatccccctacgacagtctgtgcagccttccaagttcaacagctatggccggcgggccaagagactgcagcctgatccggaacccacagaggaagacattgagaagaatccagagctgaaaaagctacagatctatggggcaggccccaagatgatgggcctgggcctcatggccaaagacaagactctgcggaagaaagataaggaggggcctgagtgtccccccacagtagtggtgaaggaggagttaggtggggatgtgaaggtggagtcaacatcgcctaagaccttcctggagagcaaggaggagctgagtcacagcccagaaccctgcaccaagatgaccatgaggctacggaggaaccacagcaatgcccagtttattgagtcatatgtctgccggatgtgttctcgaggggatgaggatgacaagctcctgctgtgtgatggctgtgatgacaactaccacatcttctgcctgctgcctcctctgcctgagatccccaagggtgtctggcggtgcccaaagtgtgtcatggcggagtgtaagcggcccccagaagcctttggctttgagcaggctacccgggaatacactctgcagagctttggcgagatggccgactcctttaaagctgactacttcaacatgcccgtgcatatggtgcccacagaacttgtggagaaggagttctggaggctggtaaatagcattgaggaagatgtgactgttgagtatggagctgacatccattccaaagaatttggcagcggtttccctgtcagtgacagtaaacggcacctaacccccgaagaggaggagtatgctaccagtggttggaacctaaatgtgatgccggtgttggaacagtctgtactgtgccacatcaatgcagatatctctggcatgaaggtgccctggctctacgtgggcatggtcttctcagccttttgctggcatattgaggatcactggagttactccattaactacctccactggggtgagccgaagacctggtatggggtgccctcacttgcagcagaacatttggaagaagtgatgaagaagctgacacctgaactatttgatagccagcctgacctcctgcaccaacttgtcaccctcatgaatcccaacaccctcatgtcccatggtgtgccagttgtccgcacaaaccagtgtgcaggagagtttgtcatcaccttcccccgtgcttaccacagcggcttcaaccaaggctacaactttgccgaggctgtcaacttttgcactgctgactggttgcctgctgggcgccagtgcattgagcactaccgccggctccggagatactgcgtcttctcccatgaggagcttatctgcaagatggctgcctgcccagagaagctagacctgaacctggcggcagctgtgcataaggagatgttcatcatggtgcaagaagagcggcgtctacgaaaggccctgctggagaagggtatcacagaggctgagcgagaggctttcgagctgctcccagatgatgagcgccagtgtatcaagtgcaagactacgtgtttcctgtcagccctggcctgctacgactgcccagacggccttgtctgcctttcccacatcaatgatctctgcaagtgctccagtagccggcagtacctgcggtatcggtataccttggatgagcttcctgccatgctgcataagctgaaggttcgggctgagtcctttgacacctgggccaacaaagtgcgagtggccctggaggtggaggatgggcggaagcgcagccttgaagaactgagggcactagagtctgaagcccgtgagcggaggtttcctaatagtgagctgctgcagcaactaaagaactgcctgagtgaggcagaggcttgcgtgtcccgagctctgggactggtcagcggccaggaagctggcccccacagggtggctggtctacagatgaccctgactgagctccgggcctttctggaccagatgaacaacctgccttgcgccatgcaccagattggggatgtcaagggtgttctggaacaggtggaggcctaccaggctgaggctcgtgaggccctggcctcactgccctccagtccagggctactgcagtccctgttggagagggggcggcagctgggggtggaggtgcctgaggcccagcagctccagcggcaggtggaacaggcgcgatggctggatgaggtgaaacgcacactggccccctcagcccgaaggggcaccttggctgtcatgcgaggactgttggtcgcgggtgccagtgtagcccctagccctgctgtggataaagcccaggccgagctgcaggaactgctgaccattgctgaacgctgggaggagaaagcccacctctgcctggaggccaggcagaagcatccaccagccacacttgaggccataatccgtgaagcggaaaacatccctgttcacctgcccaacatccaggctctcaaggaggctcttgctaaggcccgggcctggattgctgatgttgatgagatccaaaatggtgaccactacccctgcctggatgacttggagggcctagtagctgtgggccgggacctacctgtggggctggaggagctgagacagctagagctacaggtactgacagcgcactcctggagggagaaggcctccaagaccttcctcaagaaaaattcttgctacacgctgctggaggttctctgcccatgtgcagatgccggctcagacagcaccaagcgcagccggtggatggagaaggagctggggttgtacaaatctgacacagagctgctggggctgtctgcgcaggacctcagggacccaggctctgtgatcgtggccttcaaggagggggaacagaaggagaaggagggtatcctgcagctgcgtcgcaccaattcggccaagcccagtccactggcatcatcgagcacggcctcctctacaacctctatctgtgtgtgtgggcaggtgctggctggggcgggagctctgcagtgtgacctgtgtcaggactggttccatgggcggtgtgtgtcagtgcctcgcctcctcagctctccgaggcccaatcccacctcatccccactgctggcctggtgggaatgggacaccaaattcctgtgtccactgtgtatgcgctcaaggcgcccgcgcctggagaccatcctggcactgctggtagccctgcagagactgcctgtgcggctgcccgagggcgaggccctgcagtgcctcacagagagggccatcagctggcaaggccgcgccaggcaggctctggcctctgaagatgtgactgctcttttgggacggctggctgagctccgccaacggctacaggctgaacctagacctgaggagcctcctaactaccctgcagcccctgcttctgaccccctcagagagggcagtggcaaggatatgcctaaggtccagggcttactggagaatggagacagtgtgaccagtcctgagaaggtagccccggaggagggctcagatctggagctgctgtcctcgctgttgccacagttgactggccctgtgttggaactgcctgaggcaacccgggcccccttggaggagctcatgatggagggggacctgctcgaggtgaccctggatgagaaccacagcatccctgagtcccttgacttttgtattctgactccaaggtattgttcagacctcagctcctgggggccggcccctggagtcttccctccctggtagcctctaaccagcattcccagacacctgaggcagatagatggatgggctggtgggcaggggggtggctggggctgggccatcaccattccagagacaaggccagtgtatatgcaaactgggggactctcctcccttctctccccagttctggtcctggccaggccatgctacactaacccctgcccccactctcctcccctcttttccttccttcctacccccttctccctctcccttcccctgactgttccacccaggaggaggaaacttcacatagccgtgctcacagttttttattttaaaggaatttggctggggagctgaacagggctccctgtgatctgaagaaagcttttggtgcttgtcctcacaaccacctcagtcctccctccctgtcctcccctgtctcctttcctcctcctgggttcatgttgtaataaaagaagattgttggtgtgtaattaatttgttcaaaagaaaaaaaaaagcaaaacaagaaacttggttccaactgaagcctattttaattttattttattattttcctcttgttagaaataaaacccttagaaacattttttggaaacatgtttctgaagtgcatttctcttagacggggaagacagtgcttccatcaccagtcagtggagcagctgtagtgctggcaggagcactagggctgaagccagggagctctgggttctgaaatcaagttccaccagcttcttaaccttgggcaagacattctgatcctcccccgactctaaccccaagccactttccctcaagtccaaacagatgggctcgggccccctcacccaaactcctacactacaacctcccccagttgatgccctccagtttatcctcctcaagctcccaaagggatttttttgttaatggctttattgagatataatttacatactataaaattcacttgtttgaaatgtacaattcagtgatttggggggtttctaaagtgtagatctgattatatactgcttaaaaccttccatgatgctttattgcccttaagattatacatagaatctcgttcttcctagaatgttttcctgtctaacccatctactgcataattccctgatttttctccacaggttatgcccctgatgaatggggactaaagctcagatgtgtggtcatttgcaacccctgagttcacttttttaagacagcttattgatatatataatgtacataccatacagtcacccacttaaaagtatacaattaaatagcttttagtatattcagagttgtgcagccatcattcgaaaaaaaatttcagaacattttcatcactgcagaaagaaactccatatcccttaggcgtcctttacccctcatcccatttgcctattctggacattttacataaatggaatcgtataatatgtga

SEQ ID NO: 16647 - DNA, 5472 bp, Homo sapiens
  source 1..5472: mol_type = unassigned DNA
cggccatactatttttatcttgctttttcgttctgtcgcagtactgtttaatatgagtccagcgacggctctgtgactgttttcctctggtaaaatcgctcttgcgtcctcagcgtttatctcaggtgcggaaggtctcacaggtttggaaatagcgccggaaaaatcgatccgcggagtgagacggctcgtaccacactgcagggcccggaggtcaagatggtggctgtaaaactaggatccctgacgattgcttagcattaaggcccgacatggaaccggggtgtgacgagttcctgccgccaccggagtgcccggtttttgagcctagctgggctgaattccaagacccgcttggctacattgcgaaaataaggcccatagcagagaagtctggcatctgcaaaatccgcccacccgcggattggcagcctccttttgcagtagaagttgacaatttcagatttactcctcgcgtccaaaggctaaatgaactggaggcccaaactagagtgaaattgaactatttggatcagattgcaaaattctgggaaattcaaggctcctctttaaagattcccaatgtggagcggaagatcttggacctctacagccttagtaagattgtgattgaggaaggtggctatgaagccatctgcaaggatcgtcggtgggctcgagttgcccagcgtctccactacccaccaggcaaaaacattggctccctgctacgatcacattacgaacgcattatttacccctatgaaatgtttcagtctggagccaaccatgtgcaatgtaacacacacccgtttgacaatgaggtaaaagataaggaatacaagccccacagcatcccccttagacagtctgtgcagccttcaaagttcagcagctacagtcgacgggcaaaaaggctacagcctgatccagagcctacagaggaggacattgagaagcatccagagctaaagaagttacagatatatgggccaggtcccaaaatgatgggcttgggccttatggctaaggataaggataagactgtgcataagaaagtcacatgccccccaactgttacggtgaaggatgagcaaagtggaggtgggaacgtgtcatcaacattgctcaagcagcacttgagcctagagccctgcactaagacaaccatgcaacttcgaaagaatcacagcagtgcccagtttattgactcatatatttgccaagtatgctcccgtggggatgaagatgataagcttcttttctgtgatggctgtgatgacaattaccacatcttctgcttgttaccaccccttcctgaaatccccagaggcatctggaggtgcccaaaatgtatcttggcggagtgtaaacagcctcctgaagcttttggatttgaacaggctacccaggagtacagtttgcagagttttggtgaaatggctgattccttcaagtccgactacttcaacatgcctgtacatatggtgcctacagaacttgtagagaaggaattctggaggctggtgagcagcattgaggaagacgtgacagttgaatatggagctgatattcattccaaagaatttggcagtggctttcctgtcagcaatagcaaacaaaacttatctcctgaggagaaggagtatgcgaccagtggttggaacctgaatgtgatgccagtgctagatcagtctgttctctgtcacatcaatgcagacatctcaggcatgaaggtgccctggctgtacgtgggcatggttttctcagcattttgttggcatattgaggatcactggagttactctattaactatctgcattggggtgagccgaagacctggtatggtgtaccctccctggcagcagagcatttggaggaggtgatgaagatgctgacacctgagctgtttgatagccagcctgatctcctacaccagcttgtcactctcatgaatcccaacactttgatgtcccatggtgtgccagttgtccgcacaaaccagtgtgcaggggagtttgtcatcacttttcctcgtgcttaccacagtggttttaaccaaggctacaattttgctgaagctgtcaacttttgtactgctgactggctacctgctggacgccagtgcattgaacactaccgccggctccggcgctattgtgtcttctcccacgaggagctcatctgcaagatggctgccttcccagagacgttggatctcaatctagcagtagctgtgcacaaggagatgttcattatggttcaggaggagcgacgtctacgaaaggcccttttggagaagggcgtcacggaggctgagcgagaggcttttgagctgctcccagatgatgaacgccagtgcatcaagtgcaagaccacgtgcttcttgtcagccctggcctgctacgactgcccagatggccttgtatgcctttcccacatcaatgacctctgcaagtgctctagtagccgacagtacctccggtatcggtacaccttggatgagctccccaccatgctgcataaactgaagattcgggctgagtcttttgacacctgggccaacaaagtgcgagtggccttggaggtggaggatggccgtaaacgcagctttgaagagctaagggcactggagtctgaggctcgtgagaggaggtttcctaatagtgagctgcttcagcgactgaagaactgcctgagtgaggtggaggcttgtattgctcaagtcctggggctggtcagtggtcaggtggccaggatggacactccacagctgaccttgactgaactccgggtccttcttgagcagatgggcagcctgccctgtgccatgcatcagattggggatgtcaaggatgtcctggaacaggtggaggcctatcaagctgaggctcgtgaggctctggccacactgccctctagtccagggctattgcggtccctgttggagagggggcagcagctgggtgtagaggtgcctgaagcccatcagcttcagcagcaggtggagcaggcgcaatggctagatgaagtgaagcaggccctggccccttctgctcacaggggctctctggtcatcatgcaggggcttttggttatgggtgccaagatagcctccagcccttctgtggacaaggcccgggctgagctgcaagaactactgaccattgcagagcgctgggaagaaaaggctcatttctgcctggaggccaggcagaagcatccaccagccacattggaagccataattcgtgagacagaaaacatccctgttcacctgcctaacatccaggctctcaaagaagctctgactaaggcacaagcttggattgctgatgtggatgagatccaaaatggtgaccactacccctgtctagatgacttggagggcctggtggctgtgggccgggacctgcctgtggggctggaagagctgagacagctagagctgcaggtattgacagcacattcctggagagagaaggcctccaagacctttctcaagaagaattcttgctacacactgcttgaggtgctttgcccgtgtgcagacgctggctcagacagcaccaagcgtagccggtggatggagaaggcgctggggttgtaccagtgtgacacagagctgctggggctgtctgcacaggacctcagagacccaggctctgtgattgtggccttcaaggaaggggaacagaaggagaaggagggtatcctgcagctgcgtcgcaccaactcagccaagcccagtccactggcaccatccctcatggcctcttctccgacttctatctgtgtgtgtgggcaggtgccagctggggtgggagttctgcagtgtgacctgtgtcaggactggttccatgggcagtgtgtgtcagtgccccatctcctcacctctccaaagcccagtctcacttcatctccactgctagcctggtgggaatgggacacaaaattcctgtgtccactgtgtatgcgctcacgacggccacgcctagagacaatcctagccttgctggttgccctgcagaggctgcccgtgcggctgcctgagggtgaggcccttcagtgtctcacagagagggccattggctggcaagaccgtgccagaaaggctctggcctctgaagatgtgactgctctgttgcgacagctggctgagcttcgccaacagctacaggccaaacccagaccagaggaggcctcagtctacacttcagccactgcctgtgaccctatcagagaaggcagtggcaacaatatttctaaggtccaagggctgctggagaatggagacagtgtgaccagtcctgagaacatggctccaggaaagggctctgacctggagctactgtcctcactgttgccgcagttgactggccctgtgttggagctgcctgaggcaatccgggctcccctggaggagctcatgatggaaggggacctgcttgaggtgaccctggatgagaaccacagcatctggcagctgctgcaggctggacagcctccagacctggacagaattcgcacacttctggagctggaaaaatttgaacatcaagggagtcggacaaggagccgggctctggagaggcgacggcggcggcagaaggtggatcagggtagaaacgttgagaatcttgttcaacaggagcttcagtcaaaaagggctcggagctcagggattatgtctcaggtgggccgagaagaagaacattatcaggagaaagcagaccgtgaaaatatgttcctgacaccttccacagaccacagccctttcttgaaaggaaaccaaaatagcttacaacacaaggattcaggctcttcagctgcttgtccttctttaatgcctttgctacaactctcctactctgatgagcaacagttgtgacagtggcaccaaaggtcatttgtggttgtttttgtttgtttgtttcttaaatcctactatctcctggcctggacctcagaaggagctttttgcttatctataatttttcactgccaatttttgatatcctctctcctagagttactgttaaaaggttggttcgtaaagtccacaccccgatgctcagaagtgtcttgccagcaacattcctgctagcatacaggagtgatttcctaaaccagtttcattctagtctgaatagggacaaacaaatcttgaggaagcccaagtgcgtacctttatttttgcccccaccaccctctttctgtacttcaatttttgtttgttttttgtttttttgtccctgtcataaaatattttggtgcttcaaaacttgtaccttcattgtacatccttttcttttctccccttgggtcttattataaaagaagacaatgtacgttgtaattaccaaaaagaatagggaaaaacaagaatttcatgactctacctgtggtctatctttaatttcatttcttttgttaaaaataaaacaatgagtatgtttggatactatgaa

SEQ ID NO: 16648 - DNA, 5134 bp, Homo sapiens
  source 1..5134: mol_type = unassigned DNA
aaaatcgatccgcggagtgagacggctcgtaccacactgcagggcccggaggtcaagatggtggctgtaaaactaggatccctgacgattgcttagcattaaggcccgacatggaaccggggtgtgacgagttcctgccgccaccggagtgcccggtttttgagcctagctgggctgaattccaagacccgcttggctacattgcgaaaataaggcccatagcagagaagtctggcatctgcaaaatccgcccacccgcggattggcagcctccttttgcagtagaagttgacaatttcagatttactcctcgcgtccaaaggctaaatgaactggaggcccaaactagagtgaaattgaactatttggatcagattgcaaaattctgggaaattcaaggctcctctttaaagattcccaatgtggagcggaagatcttggacctctacagccttagtaagcaatgtaacacacacccgtttgacaatgaggtaaaagataaggaatacaagccccacagcatcccccttagacagtctgtgcagccttcaaagttcagcagctacagtcgacgggcaaaaaggctacagcctgatccagagcctacagaggaggacattgagaagcatccagagctaaagaagttacagatatatgggccaggtcccaaaatgatgggcttgggccttatggctaaggataaggataagactgtgcataagaaagtcacatgccccccaactgttacggtgaaggatgagcaaagtggaggtgggaacgtgtcatcaacattgctcaagcagcacttgagcctagagccctgcactaagacaaccatgcaacttcgaaagaatcacagcagtgcccagtttattgactcatatatttgccaagtatgctcccgtggggatgaagatgataagcttcttttctgtgatggctgtgatgacaattaccacatcttctgcttgttaccaccccttcctgaaatccccagaggcatctggaggtgcccaaaatgtatcttggcggagtgtaaacagcctcctgaagcttttggatttgaacaggctacccaggagtacagtttgcagagttttggtgaaatggctgattccttcaagtccgactacttcaacatgcctgtacatatggtgcctacagaacttgtagagaaggaattctggaggctggtgagcagcattgaggaagacgtgacagttgaatatggagctgatattcattccaaagaatttggcagtggctttcctgtcagcaatagcaaacaaaacttatctcctgaggagaaggagtatgcgaccagtggttggaacctgaatgtgatgccagtgctagatcagtctgttctctgtcacatcaatgcagacatctcaggcatgaaggtgccctggctgtacgtgggcatggttttctcagcattttgttggcatattgaggatcactggagttactctattaactatctgcattggggtgagccgaagacctggtatggtgtaccctccctggcagcagagcatttggaggaggtgatgaagatgctgacacctgagctgtttgatagccagcctgatctcctacaccagcttgtcactctcatgaatcccaacactttgatgtcccatggtgtgccagttgtccgcacaaaccagtgtgcaggggagtttgtcatcacttttcctcgtgcttaccacagtggttttaaccaaggctacaattttgctgaagctgtcaacttttgtactgctgactggctacctgctggacgccagtgcattgaacactaccgccggctccggcgctattgtgtcttctcccacgaggagctcatctgcaagatggctgccttcccagagacgttggatctcaatctagcagtagctgtgcacaaggagatgttcattatggttcaggaggagcgacgtctacgaaaggcccttttggagaagggcgtcacggaggctgagcgagaggcttttgagctgctcccagatgatgaacgccagtgcatcaagtgcaagaccacgtgcttcttgtcagccctggcctgctacgactgcccagatggccttgtatgcctttcccacatcaatgacctctgcaagtgctctagtagccgacagtacctccggtatcggtacaccttggatgagctccccaccatgctgcataaactgaagattcgggctgagtcttttgacacctgggccaacaaagtgcgagtggccttggaggtggaggatggccgtaaacgcagctttgaagagctaagggcactggagtctgaggctcgtgagaggaggtttcctaatagtgagctgcttcagcgactgaagaactgcctgagtgaggtggaggcttgtattgctcaagtcctggggctggtcagtggtcaggtggccaggatggacactccacagctgaccttgactgaactccgggtccttcttgagcagatgggcagcctgccctgtgccatgcatcagattggggatgtcaaggatgtcctggaacaggtggaggcctatcaagctgaggctcgtgaggctctggccacactgccctctagtccagggctattgcggtccctgttggagagggggcagcagctgggtgtagaggtgcctgaagcccatcagcttcagcagcaggtggagcaggcgcaatggctagatgaagtgaagcaggccctggccccttctgctcacaggggctctctggtcatcatgcaggggcttttggttatgggtgccaagatagcctccagcccttctgtggacaaggcccgggctgagctgcaagaactactgaccattgcagagcgctgggaagaaaaggctcatttctgcctggaggccaggcagaagcatccaccagccacattggaagccataattcgtgagacagaaaacatccctgttcacctgcctaacatccaggctctcaaagaagctctgactaaggcacaagcttggattgctgatgtggatgagatccaaaatggtgaccactacccctgtctagatgacttggagggcctggtggctgtgggccgggacctgcctgtggggctggaagagctgagacagctagagctgcaggtattgacagcacattcctggagagagaaggcctccaagacctttctcaagaagaattcttgctacacactgcttgaggtgctttgcccgtgtgcagacgctggctcagacagcaccaagcgtagccggtggatggagaaggcgctggggttgtaccagtgtgacacagagctgctggggctgtctgcacaggacctcagagacccaggctctgtgattgtggccttcaaggaaggggaacagaaggagaaggagggtatcctgcagctgcgtcgcaccaactcagccaagcccagtccactggcaccatccctcatggcctcttctccgacttctatctgtgtgtgtgggcaggtgccagctggggtgggagttctgcagtgtgacctgtgtcaggactggttccatgggcagtgtgtgtcagtgccccatctcctcacctctccaaagcccagtctcacttcatctccactgctagcctggtgggaatgggacacaaaattcctgtgtccactgtgtatgcgctcacgacggccacgcctagagacaatcctagccttgctggttgccctgcagaggctgcccgtgcggctgcctgagggtgaggcccttcagtgtctcacagagagggccattggctggcaagaccgtgccagaaaggctctggcctctgaagatgtgactgctctgttgcgacagctggctgagcttcgccaacagctacaggccaaacccagaccagaggaggcctcagtctacacttcagccactgcctgtgaccctatcagagaaggcagtggcaacaatatttctaaggtccaagggctgctggagaatggagacagtgtgaccagtcctgagaacatggctccaggaaagggctctgacctggagctactgtcctcactgttgccgcagttgactggccctgtgttggagctgcctgaggcaatccgggctcccctggaggagctcatgatggaaggggacctgcttgaggtgaccctggatgagaaccacagcatctggcagctgctgcaggctggacagcctccagacctggacagaattcgcacacttctggagctggaaaaatttgaacatcaagggagtcggacaaggagccgggctctggagaggcgacggcggcggcagaaggtggatcagggtagaaacgttgagaatcttgttcaacaggagcttcagtcaaaaagggctcggagctcagggattatgtctcaggtgggccgagaagaagaacattatcaggagaaagcagaccgtgaaaatatgttcctgacaccttccacagaccacagccctttcttgaaaggaaaccaaaatagcttacaacacaaggattcaggctcttcagctgcttgtccttctttaatgcctttgctacaactctcctactctgatgagcaacagttgtgacagtggcaccaaaggtcatttgtggttgtttttgtttgtttgtttcttaaatcctactatctcctggcctggacctcagaaggagctttttgcttatctataatttttcactgccaatttttgatatcctctctcctagagttactgttaaaaggttggttcgtaaagtccacaccccgatgctcagaagtgtcttgccagcaacattcctgctagcatacaggagtgatttcctaaaccagtttcattctagtctgaatagggacaaacaaatcttgaggaagcccaagtgcgtacctttatttttgcccccaccaccctctttctgtacttcaatttttgtttgttttttgtttttttgtccctgtcataaaatattttggtgcttcaaaacttgtaccttcattgtacatccttttcttttctccccttgggtcttattataaaagaagacaatgtacgttgtaattaccaaaaagaatagggaaaaacaagaatttcatgactctacctgtggtctatctttaatttcatttcttttgttaaaaataaaacaatgagtatgtttggatact

SEQ ID NO: 16649 - DNA, 880 bp, Homo sapiens
  source 1..880: mol_type = unassigned DNA
ctgcctaacatccaggctctcaaagaagctctgactaaggcacaagcttggattgctgatgtggatgagatccaaaatggtgaccactacccctgtctagatgacttggagggcctggtggctgtgggccgggacctgcctgtggggctggaagagctgagacagctagagctgcaggtgctttgcccgtgtgcagacgctggctcagacagcaccaagcgtagccggtggatggagaaggcgctggggttgtaccagtgtgacacagagctgctggggctgtctgcacaggacctcagagacccaggctctgtgattgtggccttcaaggaaggggaacagaaggagaaggagggtatcctgcagctgcgtcgcaccaactcagccaagcccagtccactggcaccatccctcatggcctcttctccgacttctatctgtgtgtgtgggcaggtgccagctggggtgggagttctgcagtgtgacctgtgtcaggactggttccatgggcagtgtgtgtcagtgccccatctcctcacctctccaaagcccagtctcacttcatctccactgctagcctggtgggaatgggacacaaaattcctgtgtccactgtgtatgcgctcacgacggccacgcctagagacaatcctagccttgctggttgccctgcagaggctgcccgtgcggctgcctgagggtgaggcccttcagtgtctcacagagagggccattggctggcaagaccgtgccagaaaggctctggcctctgaagatgtgactgctctgttgcgacagctggctgagcttcgccaacagctacaggccaaacccagaccagaggaggcctcagtctacacttcagccactgcctgtgacc

SEQ ID NO: 16650 - DNA, 4701 bp, Homo sapiens
  source 1..4701: mol_type = unassigned DNA
cggccatactatttttatcttgctttttcgttctgtcgcagtactgtttaatatgagtccagcgacggctctgtgactgttttcctctggtaaaatcgctcttgcgtcctcagcgtttatctcaggtgcggaaggtctcacaggtttggaaatagcgccggaaaaatcgatccgcggagtgagacggctcgtaccacactgcagggcccggaggtcaagatggtggctgtaaaactaggatccctgacgattgcttagcattaaggcccgacatggaaccggggtgtgacgagttcctgccgccaccggagtgcccggtttttgagcctagctgggctgaattccaagacccgcttggctacattgcgaaaataaggcccatagcagagaagtctggcatctgcaaaatccgcccacccgcggattggcagcctccttttgcagtagaagttgacaatttcagatttactcctcgcgtccaaaggctaaatgaactggagattgtgattgaggaaggtggctatgaagccatctgcaaggatcgtcggtgggctcgagttgcccagcgtctccactacccaccaggcaaaaacattggctccctgctacgatcacattacgaacgcattatttacccctatgaaatgtttcagtctggagccaaccatgtgcaatgtaacacacacccgtttgacaatgaggtaaaagataaggaatacaagccccacagcatcccccttagacagtctgtgcagccttcaaagttcagcagctacagtcgacgggcaaaaaggctacagcctgatccagagcctacagaggaggacattgagaagcatccagagctaaagaagttacagatatatgggccaggtcccaaaatgatgggcttgggccttatggctaaggataaggataagactgtgcataagaaagtcacatgccccccaactgttacggtgaaggatgagcaaagtggaggtgggaacgtgtcatcaacattgctcaagcagcacttgagcctagagccctgcactaagacaaccatgcaacttcgaaagaatcacagcagtgcccagtttattgactcatatatttgccaagtatgctcccgtggggatgaagatgataagcttcttttctgtgatggctgtgatgacaattaccacatcttctgcttgttaccaccccttcctgaaatccccagaggcatctggaggtgcccaaaatgtatcttggcggagtgtaaacagcctcctgaagcttttggatttgaacaggctacccaggagtacagtttgcagagttttggtgaaatggctgattccttcaagtccgactacttcaacatgcctgtacatatggtgcctacagaacttgtagagaaggaattctggaggctggtgagcagcattgaggaagacgtgacagttgaatatggagctgatattcattccaaagaatttggcagtggctttcctgtcagcaatagcaaacaaaacttatctcctgaggagaaggagtatgcgaccagtggttggaacctgaatgtgatgccagtgctagatcagtctgttctctgtcacatcaatgcagacatctcaggcatgaaggtgccctggctgtacgtgggcatggttttctcagcattttgttggcatattgaggatcactggagttactctattaactatctgcattggggtgagccgaagacctggtatggtgtaccctccctggcagcagagcatttggaggaggtgatgaagatgctgacacctgagctgtttgatagccagcctgatctcctacaccagcttgtcactctcatgaatcccaacactttgatgtcccatggtgtgccagttgtccgcacaaaccagtgtgcaggggagtttgtcatcacttttcctcgtgcttaccacagtggttttaaccaaggctacaattttgctgaagctgtcaacttttgtactgctgactggctacctgctggacgccagtgcattgaacactaccgccggctccggcgctattgtgtcttctcccacgaggagctcatctgcaagatggctgccttcccagagacgttggatctcaatctagcagtagctgtgcacaaggagatgttcattatggttcaggaggagcgacgtctacgaaaggcccttttggagaagggcgtcacggaggctgagcgagaggcttttgagctgctcccagatgatgaacgccagtgcatcaagtgcaagaccacgtgcttcttgtcagccctggcctgctacgactgcccagatggccttgtatgcctttcccacatcaatgacctctgcaagtgctctagtagccgacagtacctccggtatcggtacaccttggatgagctccccaccatgctgcataaactgaagattcgggctgagtcttttgacacctgggccaacaaagtgcgagtggccttggaggtggaggatggccgtaaacgcagctttgaagagctaagggcactggagtctgaggctcgtgagaggaggtttcctaatagtgagctgcttcagcgactgaagaactgcctgagtgaggtggaggcttgtattgctcaagtcctggggctggtcagtggtcaggtggccaggatggacactccacagctgaccttgactgaactccgggtccttcttgagcagatgggcagcctgccctgtgccatgcatcagattggggatgtcaaggatgtcctggaacaggtggaggcctatcaagctgaggctcgtgaggctctggccacactgccctctagtccagggctattgcggtccctgttggagagggggcagcagctgggtgtagaggtgcctgaagcccatcagcttcagcagcaggtggagcaggcgcaatggctagatgaagtgaagcaggccctggccccttctgctcacaggggctctctggtcatcatgcaggggcttttggttatgggtgccaagatagcctccagcccttctgtggacaaggcccgggctgagctgcaagaactactgaccattgcagagcgctgggaagaaaaggctcatttctgcctggaggccaggcagaagcatccaccagccacattggaagccataattcgtgagacagaaaacatccctgttcacctgcctaacatccaggctctcaaagaagctctgactaaggcacaagcttggattgctgatgtggatgagatccaaaatggtgaccactacccctgtctagatgacttggagggcctggtggctgtgggccgggacctgcctgtggggctggaagagctgagacagctagagctgcaggtattgacagcacattcctggagagagaaggcctccaagacctttctcaagaagaattcttgctacacactgcttgaggtgctttgcccgtgtgcagacgctggctcagacagcaccaagcgtagccggtggatggagaaggcgctggggttgtaccagtgtgacacagagctgctggggctgtctgcacaggacctcagagacccaggctctgtgattgtggccttcaaggaaggggaacagaaggagaaggagggtatcctgcagctgcgtcgcaccaactcagccaagcccagtccactggcaccatccctcatggcctcttctccgacttctatctgtgtgtgtgggcaggtgccagctggggtgggagttctgcagtgtgacctgtgtcaggactggttccatgggcagtgtgtgtcagtgccccatctcctcacctctccaaagcccagtctcacttcatctccactgctagcctggtgggaatgggacacaaaattcctgtgtccactgtgtatgcgctcacgacggccacgcctagagacaatcctagccttgctggttgccctgcagaggctgcccgtgcggctgcctgagggtgaggcccttcagtgtctcacagagagggccattggctggcaagaccgtgccagaaaggctctggcctctgaagatgtgactgctctgttgcgacagctggctgagcttcgccaacagctacaggccaaacccagaccagaggaggcctcagtctacacttcagccactgcctgtgaccctatcagagaaggcagtggcaacaatatttctaaggtccaagggctgctggagaatggagacagtgtgaccagtcctgagaacatggctccaggaaagggctctgacctggagctactgtcctcactgttgccgcagttgactggccctgtgttggagctgcctgaggcaatccgggctcccctggaggagctcatgatggaaggggacctgcttgaggtgaccctggatgagaaccacagcatctggcagctgctgcaggctggacagcctccagacctggacagaattcgcacacttctggagctggaaaaatttgaacatcaagggagtcggacaaggagccgggctctggagaggcgacggcggcggcagaaggtggatcagggtagaaacgttgagaatcttgttcaacaggagcttcagtcaaaaagggctcggagctcagggattatgtctcaggtgggccgagaagaagaacattatcaggagaaagcagaccgtgaaaatatgttcctgacaccttccacagaccacagccctttcttgaaaggaaaccaaaatagcttacaacacaaggattcaggct

SEQ ID NO: 16651 - DNA, 1336 bp, Homo sapiens
  source 1..1336: mol_type = unassigned DNA
ggtcaagatggtggctgtaaaactaggatccctgacgattgcttagcattaaggcccgacatggaaccggggtgtgacgagttcctgccgccaccggagtgcccggtttttgagcctagctgggctgaattccaagacccgcttggctacattgcgaaaataaggcccatagcagagaagtctggcatctgcaaaatccgcccacccgcggattggcagcctccttttgcagtagaagttgacaatttcagatttactcctcgcgtccaaaggctaaatgaactggaggcccaaactagagtgaaattgaactatttggatcagattgcaaaattctgggaaattcaaggctcctctttaaagattcccaatgtggagcggaagatcttggacctctacagccttagtaagattgtgattgaggaaggtggctatgaagccatctgcaaggatcgtcggtgggctcgagttgcccagcgtctccactacccaccaggcaaaaacattggctccctgctacgatcacattacgaacgcattatttacccctatgaaatgtttcagtctggagccaaccatgtgccagagcctacagaggaggacattgagaagcatccagagctaaagaagttacagatatatgggccaggtcccaaaatgatgggcttgggccttatggctaaggataaggataagactgtgcataagaaagtcacatgccccccaactgttacggtgaaggatgagcaaagtggaggtgggaacgtgtcatcaacattgctcaagcagcacttgagcctagagccctgcactaagacaaccatgcaacttcgaaagaatcacagcagtgcccagtttattgactcatatatttgccaagtatgctcccgtggggatgaagatgataagcttcttttctgtgatggctgtgatgacaattaccacatcttctgcttgttaccaccccttcctgaaatccccagaggcatctggaggtgcccaaaatgtatcttggcggagtgtaaacagcctcctgaagcttttggatttgaacaggctacccaggagtacagtttgcagagttttggtgaaatggctgattccttcaagtccgactacttcaacatgcctgtacatatggtgcctacagaacttgtagagaaggaattctggaggctggtgagcagcattgaggaagacgtgacagttgaatatggagctgatattcattccaaagaatttggcagtggctttcctgtcagcaatagcaaacaaaacttatctcctgaggagaaggagtatgcgaccagtggttggaacctgaatgtgatgccag

SEQ ID NO: 16652 - DNA, 2894 bp, Homo sapiens
  source 1..2894: mol_type = unassigned DNA
ctgcagggcccggaggtcaagatggtggctgtaaaactaggatccctgacgattgcttagcattaaggcccgacatggaaccggggtgtgacgagttcctgccgccaccggagtgcccggtttttgagcctagctgggctgaattccaagacccgcttggctacattgcgaaaataaggcccatagcagagaagtctggcatctgcaaaatccgcccacccgcggattggcagcctccttttgcagtagaagttgacaatttcagatttactcctcgcgtccaaaggctaaatgaactggaggcccaaactagagtgaaattgaactatttggatcagattgcaaaattctgggaaattcaaggctcctctttaaagattcccaatgtggagcggaagatcttggacctctacagccttagtaagattgtgattgaggaaggtggctatgaagccatctgcaaggatcgtcggtgggctcgagttgcccagcgtctccactacccaccaggcaaaaacattggctccctgctacgatcacattacgaacgcattatttacccctatgaaatgtttcagtctggagccaaccatgtgcaatgtaacacacacccgtttgacaatgaggtaaaagataaggaatacaagccccacagcatcccccttagacagtctgtgcagccttcaaagttcagcagctacagtcgacgggcaaaaaggctacagcctgatccagagcctacagaggaggacattgagaagcatccagagctaaagaagttacagatatatgggccaggtcccaaaatgatgggcttgggccttatggctaaggataaggataagactgtgcataagaaagtcacatgccccccaactgttacggtgaaggatgagcaaagtggaggtgggaacgtgtcatcaacattgctcaagcagcacttgagcctagagccctgcactaagacaaccatgcaacttcgaaagaatcacagcagtgcccagtttattgactcatatatttgccaagtatgctcccgtggggatgaagatgataagcttcttttctgtgatggctgtgatgacaattaccacatcttctgcttgttaccaccccttcctgaaatccccagaggcatctggaggtgcccaaaatgtatcttggcggagtgtaaacagcctcctgaagcttttggatttgaacaggctacccaggagtacagtttgcagagttttggtgaaatggctgattccttcaagtccgactacttcaacatgcctgtacatatggtgcctacagaacttgtagagaaggaattctggaggctggtgagcagcattgaggaagacgtgacagttgaatatggagctgatattcattccaaagaatttggcagtggctttcctgtcagcaatagcaaacaaaacttatctcctgaggagaaggagtatgcgaccagtggttggaacctgaatgtgatgccagtgctagatcagtctgttctctgtcacatcaatgcagacatctcaggcatgaaggtgccctggctgtacgtgggcatggttttctcagcattttgttggcatattgaggatcactggagttactctattaactatctgcattggggtgagccgaagacctggtatggtgtaccctccctggcagcagagcatttggaggaggtgatgaagatgctgacacctgagctgtttgatagccagcctgatctcctacaccagcttgtcactctcatgaatcccaacactttgatgtcccatggtgtgccagttgtccgcacaaaccagtgtgcaggggagtttgtcatcacttttcctcgtgcttaccacagtggttttaaccaaggctacaattttgctgaagctgtcaacttttgtactgctgactggctacctgctggacgccagtgcattgaacactaccgccggctccggcgctattgtgtcttctcccacgaggagctcatctgcaagatggctgccttcccagagacgttggatctcaatctagcagtagctgtgcacaaggagatgttcattatggttcaggaggagcgacgtctacgaaaggcccttttggagaagggcgtcacggaggctgagcgagaggcttttgagctgctcccagatgatgaacgccagtgcatcaagtgcaagaccacgtgcttcttgtcagccctggcctgctacgactgcccagatggccttgtatgcctttcccacatcaatgacctctgcaagtgctctagtagccgacagtacctccggtatcggtacaccttggatgagctccccaccatgctgcataaactgaagattcgggctgagtcttttgacacctgggccaacaaagtgcgagtggccttggaggtggaggatggccgtaaacgcagctttgaagagctaagggcactggagtctgaggctcgtgagaggaggtttcctaatagtgagctgcttcagcgactgaagaactgcctgagtgaggtggaggcttgtattgctcaagtcctggggctggtcagtggtcaggtggccaggatggacactccacagctgaccttgactgaactccgggtccttcttgagcagatgggcagcctgccctgtgccatgcatcagattggggatgtcaaggttctttcctggaagtggcggagatatgtgttcccataccatctctgtgtgtacagcatgcaaggaaatatccttccagactgaaataattaaaaactctaaactgggcctacataagacactggctcttgggaatggggtggagaggactgattggttggttggttgatttccctccagacaccagagtcttagaaagcttactagatggataagattgtattaaagtgggtttgg

SEQ ID NO: 16653 - DNA, 5579 bp, Homo sapiens
  source 1..5579: mol_type = unassigned DNA
cattttaaaaaagatccggccatactatttttatcttgctttttcgttctgtcgcagtactgtttaatatgagtccagcgacggctctgtgactgttttcctctggtaaaatcgctcttgcgtcctcagcgtttatctcaggtgcggaaggtctcacaggtttggaaatagcgccggaaaaatcgatccgcggagtgagacggctcgtaccacactgcagggcccggaggtcaagatggtggctgtaaaactaggatccctgacgattgcttagcattaaggcccgacatggaaccggggtgtgacgagttcctgccgccaccggagtgcccggtttttgagcctagctgggctgaattccaagacccgcttggctacattgcgaaaataaggcccatagcagagaagtctggcatctgcaaaatccgcccacccgcggattggcagcctccttttgcagtagaagttgacaatttcagatttactcctcgcgtccaaaggctaaatgaactggaggcccaaactagagtgaaattgaactatttggatcagattgcaaaattctgggaaattcaaggctcctctttaaagattcccaatgtggagcggaagatcttggacctctacagccttagtaagattgtgattgaggaaggtggctatgaagccatctgcaaggatcgtcggtgggctcgagttgcccagcgtctccactacccaccaggcaaaaacattggctccctgctacgatcacattacgaacgcattatttacccctatgaaatgtttcagtctggagccaaccatgtgcaatgtaacacacacccgtttgacaatgaggtaaaagataaggaatacaagccccacagcatcccccttagacagtctgtgcagccttcaaagttcagcagctacagtcgacgggcaaaaaggctacagcctgatccagagcctacagaggaggacattgagaagcatccagagctaaagaagttacagatatatgggccaggtcccaaaatgatgggcttgggccttatggctaaggataaggataagactgtgcataagaaagtcacatgccccccaactgttacggtgaaggatgagcaaagtggaggtgggaacgtgtcatcaacattgctcaagcagcacttgagcctagagccctgcactaagacaaccatgcaacttcgaaagaatcacagcagtgcccagtttattgactcatatatttgccaagtatgctcccgtggggatgaagatgataagcttcttttctgtgatggctgtgatgacaattaccacatcttctgcttgttaccaccccttcctgaaatccccagaggcatctggaggtgcccaaaatgtatcttggcggagtgtaaacagcctcctgaagcttttggatttgaacaggctacccaggagtacagtttgcagagttttggtgaaatggctgattccttcaagtccgactacttcaacatgcctgtacatatggtgcctacagaacttgtagagaaggaattctggaggctggtgagcagcattgaggaagacgtgacagttgaatatggagctgatattcattccaaagaatttggcagtggctttcctgtcagcaatagcaaacaaaacttatctcctgaggagaagagacaaagtctcactgtgttgaccaggctgatctcaagcttctgggctcaagcagtcctcccaccttggcctcccaaagtgttgggattacaggagtatgcgaccagtggttggaacctgaatgtgatgccagtgctagatcagtctgttctctgtcacatcaatgcagacatctcaggcatgaaggtgccctggctgtacgtgggcatggttttctcagcattttgttggcatattgaggatcactggagttactctattaactatctgcattggggtgagccgaagacctggtatggtgtaccctccctggcagcagagcatttggaggaggtgatgaagatgctgacacctgagctgtttgatagccagcctgatctcctacaccagcttgtcactctcatgaatcccaacactttgatgtcccatggtgtgccagttgtccgcacaaaccagtgtgcaggggagtttgtcatcacttttcctcgtgcttaccacagtggttttaaccaaggctacaattttgctgaagctgtcaacttttgtactgctgactggctacctgctggacgccagtgcattgaacactaccgccggctccggcgctattgtgtcttctcccacgaggagctcatctgcaagatggctgccttcccagagacgttggatctcaatctagcagtagctgtgcacaaggagatgttcattatggttcaggaggagcgacgtctacgaaaggcccttttggagaagggcgtcacggaggctgagcgagaggcttttgagctgctcccagatgatgaacgccagtgcatcaagtgcaagaccacgtgcttcttgtcagccctggcctgctacgactgcccagatggccttgtatgcctttcccacatcaatgacctctgcaagtgctctagtagccgacagtacctccggtatcggtacaccttggatgagctccccaccatgctgcataaactgaagattcgggctgagtcttttgacacctgggccaacaaagtgcgagtggccttggaggtggaggatggccgtaaacgcagctttgaagagctaagggcactggagtctgaggctcgtgagaggaggtttcctaatagtgagctgcttcagcgactgaagaactgcctgagtgaggtggaggcttgtattgctcaagtcctggggctggtcagtggtcaggtggccaggatggacactccacagctgaccttgactgaactccgggtccttcttgagcagatgggcagcctgccctgtgccatgcatcagattggggatgtcaaggatgtcctggaacaggtggaggcctatcaagctgaggctcgtgaggctctggccacactgccctctagtccagggctattgcggtccctgttggagagggggcagcagctgggtgtagaggtgcctgaagcccatcagcttcagcagcaggtggagcaggcgcaatggctagatgaagtgaagcaggccctggccccttctgctcacaggggctctctggtcatcatgcaggggcttttggttatgggtgccaagatagcctccagcccttctgtggacaaggcccgggctgagctgcaagaactactgaccattgcagagcgctgggaagaaaaggctcatttctgcctggaggccaggcagaagcatccaccagccacattggaagccataattcgtgagacagaaaacatccctgttcacctgcctaacatccaggctctcaaagaagctctgactaaggcacaagcttggattgctgatgtggatgagatccaaaatggtgaccactacccctgtctagatgacttggagggcctggtggctgtgggccgggacctgcctgtggggctggaagagctgagacagctagagctgcaggtattgacagcacattcctggagagagaaggcctccaagacctttctcaagaagaattcttgctacacactgcttgaggtgctttgcccgtgtgcagacgctggctcagacagcaccaagcgtagccggtggatggagaaggcgctggggttgtaccagtgtgacacagagctgctggggctgtctgcacaggacctcagagacccaggctctgtgattgtggccttcaaggaaggggaacagaaggagaaggagggtatcctgcagctgcgtcgcaccaactcagccaagcccagtccactggcaccatccctcatggcctcttctccgacttctatctgtgtgtgtgggcaggtgccagctggggtgggagttctgcagtgtgacctgtgtcaggactggttccatgggcagtgtgtgtcagtgccccatctcctcacctctccaaagcccagtctcacttcatctccactgctagcctggtgggaatgggacacaaaattcctgtgtccactgtgtatgcgctcacgacggccacgcctagagacaatcctagccttgctggttgccctgcagaggctgcccgtgcggctgcctgagggtgaggcccttcagtgtctcacagagagggccattggctggcaagaccgtgccagaaaggctctggcctctgaagatgtgactgctctgttgcgacagctggctgagcttcgccaacagctacaggccaaacccagaccagaggaggcctcagtctacacttcagccactgcctgtgaccctatcagagaaggcagtggcaacaatatttctaaggtccaagggctgctggagaatggagacagtgtgaccagtcctgagaacatggctccaggaaagggctctgacctggagctactgtcctcactgttgccgcagttgactggccctgtgttggagctgcctgaggcaatccgggctcccctggaggagctcatgatggaaggggacctgcttgaggtgaccctggatgagaaccacagcatctggcagctgctgcaggctggacagcctccagacctggacagaattcgcacacttctggagctggaaaaatttgaacatcaagggagtcggacaaggagccgggctctggagaggcgacggcggcggcagaaggtggatcagggtagaaacgttgagaatcttgttcaacaggagcttcagtcaaaaagggctcggagctcagggattatgtctcaggtgggccgagaagaagaacattatcaggagaaagcagaccgtgaaaatatgttcctgacaccttccacagaccacagccctttcttgaaaggaaaccaaaatagcttacaacacaaggattcaggctcttcagctgcttgtccttctttaatgcctttgctacaactctcctactctgatgagcaacagttgtgacagtggcaccaaaggtcatttgtggttgtttttgtttgtttgtttcttaaatcctactatctcctggcctggacctcagaaggagctttttgcttatctataatttttcactgccaatttttgatatcctctctcctagagttactgttaaaaggttggttcgtaaagtccacaccccgatgctcagaagtgtcttgccagcaacattcctgctagcatacaggagtgatttcctaaaccagtttcattctagtctgaatagggacaaacaaatcttgaggaagcccaagtgcgtacctttatttttgcccccaccaccctctttctgtacttcaatttttgtttgttttttgtttttttgtccctgtcataaaatattttggtgcttcaaaacttgtaccttcattgtacatccttttcttttctccccttgggtcttattataaaagaagacaatgtacgttgtaattaccaaaaagaatagggaaaaacaagaatttcatgactctacctgtggtctatctttaatttcatttcttttgttaaaaataaaacaatgagtatgtttggatactatg

SEQ ID NO: 16654 - DNA, 5924 bp, Homo sapiens
  source 1..5924: mol_type = unassigned DNA
gtgacacaattacaacaactttgtgctggtgccggggaagtttgtgtctccaacgaatcccctcagtgctccccagccccgcgcgctccggccgttcccgccgtccccgcctgtggctgccccctgcccaaccccgcgatgtgaccctacagccgaaagccgccgctgccgacccgggggctccgcagcccctgccgccgccgccgccgccttcaccgccgccgcgttgggatttttcgtcgccgccgcccgcggcggaggaggaggcggcgataaagttggtgtgctggtcccgcgcgcagattgggggcgtcactgcgggccccggtccgagggggggtgtcggcgttggagttgtgaattcgctgcgtttccatgaaatcctgcggagtgtcgctcgctaccgccgccgctgccgccgccgctttcggtgatgaggaaaagaaaatggcggcgggaaaagcgagcggcgagagcgaggaggcgtcccccagcctgacagccgaggagagggaggcgctcggcggactggacagccgcctctttgggttcgtgagatttcatgaagatggcgccaggacgaaggccctactgggcaaggctgttcgctgctatgaatctctaatcttaaaagctgaaggaaaagtggagtctgatttcttttgtcaattaggtcacttcaacctcttattggaagattatccaaaagcattatctgcataccagaggtactacagtttacagtctgactactggaagaatgctgcctttttatatggtcttggtttggtctacttccattataatgcatttcagtgggcaattaaagcatttcaggaggtgctttatgttgatcccagcttttgtcgagccaaggaaattcatttacgacttgggcttatgttcaaagtgaacacagactatgagtctagtttaaagcattttcagttagctttggttgactgtaatccctgcactttgtccaatgctgaaattcaatttcacattgcccacttatatgaaacccagaggaaatatcattctgcaaaagaagcttatgaacaacttttgcagacagagaatctttctgcacaagtaaaagcaactgtcttacaacagttaggttggatgcatcacactgtagatctcctgggagataaagccaccaaggaaagctatgctattcagtatctccaaaagtccttggaagcagatcctaattctggccagtcctggtatttcctcggaaggtgctattcaagtattgggaaagttcaggatgcctttatatcttacaggcagtctattgataaatcagaagcaagtgcagatacatggtgttcaataggtgtgctatatcagcagcaaaatcagcccatggatgctttacaggcctatatttgtgctgtacaattggaccatggccatgctgcagcctggatggacctaggcactctctatgaatcctgcaaccagcctcaggatgccattaaatgctacttaaatgcaactagaagcaaaagttgtagtaatacctctgcacttgcagcacgaattaagtatttacaggctcagttgtgtaaccttccacaaggtagtctacagaataaaactaaattacttcctagtattgaggaggcgtggagcctaccaattcccgcagagcttacctccaggcagggtgccatgaacacagcacagcaggcatgtaaacctcatcatccaaatactgaacctgtattaggcctcagtcaaacaccaatttcacagcaatccttgccactacacatgattccttctagccaagtagatgacctgtccagtcctgccaagaggaaaagaacatctagtccaacaaagaatacttctgacaattggagtggtggacatgctgtgtcacatcctccagtacagcaacaagctcattcatggtgtttgacaccacagaaattacagcatttggaacagctccgcgcaaatagaaataatttaaatccagcacagaaactgatgctggaacagctggaaagtcagtttgtcttaatgcaacaacaccaaatgagaccaacaggagttgcacaggtacgatctactggaattcctaatgggccaacagctgactcatcactgcctacaaactcagtctctggccagcagccacagcttgctctgaccagagtgcctagcgtctctcagcctggagtccgtcctgcctgccctgggcagcctttggccaatggacccttttctgcaggccatgttccctgtagcacatcaagaacgctgggaagtacagacactattttgataggcaataatcatataacaggaagtggaagtaatggaaacgtgccttacctgcagcgaaacgcactcactctacctcataaccgcacaaacctgaccagcagcgcagaggagccgtggaaaaaccaactatctaactccactcaggggcttcacaaaggtcagagttcacattcggcaggtcctaatggtgaacgacctctctcttccactgggccttcccagcatctccaggcagctggctctggtattcagaatcagaacggacatcccaccctgcctagcaattcagtaacacagggggctgctctcaatcacctctcctctcacactgctacctcaggtggacaacaaggcattaccttaaccaaagagagcaagccttcaggaaacatattgacggtgcctgaaacaagcaggcacactggagagacacctaacagcactgccagtgtcgagggacttcctaatcatgtccatcagatgacggcagatgctgtttgcagtcctagccatggagattctaagtcaccaggtttactaagttcagacaatcctcagctctctgccttgttgatgggaaaagccaataacaatgtgggtactggaacctgtgacaaagtcaataacatccacccagctgttcatacaaagactgataactctgttgcctcttcaccatcttcagccatttcaacagcaacaccttctccaaaatccactgagcagacaaccacaaacagtgttaccagccttaacagccctcacagtgggctacacacaattaatggagaagggatggaagaatctcagagccccatgaaaacagatctgcttctggttaaccacaaacctagtccacagatcataccatcaatgtctgtgtccatataccccagctcagcagaagttctgaaggcatgcaggaatctaggtaaaaatggcttatctaacagtagcattttgttggataaatgtccacctccaagaccaccatcttcaccataccctcccttgccaaaggacaagttgaatccacctacacctagtatttacttggaaaataaacgtgatgctttctttcctccattacatcaattttgtacaaatccgaacaaccctgttacagtaatacgtggccttgctggagctcttaagttagacctgggacttttctctactaaaactttggtggaagctaacaatgaacatatggtagaagtgaggacacagttgttgcagccagcagatgaaaactgggatcccactggaacaaagaaaatctggcattgtgaaagtaatagatctcatactacaattgctaaatatgcacagtaccaggcctcctcattccaggaatcattgagagaagaaaatgaaaaaagaagtcatcataaagaccactcagatagtgaatctacatcgtcagataattctgggaggaggaggaaaggaccctttaaaaccataaagtttgggaccaatattgacctatctgatgacaaaaagtggaagttgcagctacatgagctgactaaacttcctgcttttgtgcgtgtcgtatcagcaggaaatcttctaagccatgttggtcataccatattgggcatgaacacagttcaactatacatgaaagttccagggagcagaacaccaggtcatcaggaaaataacaacttctgttcagttaacataaatattggcccaggtgactgtgaatggtttgttgttcctgaaggttactggggtgttctgaatgacttctgtgaaaaaaataatttgaatttcctaatgggttcttggtggcccaatcttgaagatctttatgaagcaaatgttccagtgtataggtttattcagcgacctggagatttggtctggataaatgcaggcactgttcattgggttcaggctattggctggtgcaacaacattgcttggaatgttggtccacttacagcctgccagtataaattggcagtggaacggtacgaatggaacaaattgcaaagtgtgaagtcaatagtacccatggttcatctttcctggaatatggcacgaaatatcaaggtctcagatccaaagctttttgaaatgattaagtattgtcttctaagaactctgaagcaatgtcagacattgagggaagctctcattgctgcaggaaaagagattatatggcatgggcggacaaaagaagaaccagctcattactgtagcatttgtgaagtggaggtttttgatctgctttttgtcactaatgagagtaattcacgaaagacctacatagtacattgccaagattgtgcacgaaaaacaagcggaaacttggaaaactttgtggtgctagaacagtacaaaatggaggacctgatgcaagtctatgaccaatttacattagctcctccattaccatccgcctcatcttgatattgttccatggacattaaatgagaccttttctgctattcaggaaataacccagttctgcaccactggtttttgtagctatctcgtaaggctgctggctgaaaactgtgtctatgcaaccttccaagtgcggagtgtcaaccaactggacgggagagagtactgctcctactccaggactctcacaaagctgatgagctgtacttcagaaaaaaataataatttccatgttttgtatatatctgacaaaactggcaacatcttacagactactgacttgaagacaacctcttttatatttctctatttctgggctgatgaatttgttttcatctgtcttttcccccttcagaattttccttggaaaaaaaatactagcctagctggtcatttctttgtaaggtagttagcaattttaagtctttctttggtcaacttttttttaatgtgaaaagttaggtaagacacttttttactgcttttatgtttttctgtcttgttttgagaccatgatggttacacttttggttcctaaataaaatttaaaaaattaacagccaagtcacaaaggtaatggattgcacatagactaaggaataaacttcagatttgtgatttttgtttctaatcttgatgtaaatttacactatttataaatacatatttattgcttgaaaatatttgtgaatggaatgctgttattttttccagatttacctgccattgaaattttaaggagttctgtaatttcaaacactactcctattacattttctatgtgtaaataaaactgcttagcattgtacagaaacttttattaaaattgtttaatgtttaaagagttttctattgtttgagttttaaaaaagactttatgtacagtgcccagtttttgttcatttttgaaatctgattatatatattttatatatacttatgtatgtatatataatatatatagaaatctggatatatatgtataaatctttagaacttaaatttttctcgttttaagtttcacatctatggtagatttttgaggtgtctactgtaaagtattgcttacaaaaagtatgattatttttaaagaaatatatatggtatgtatcctcaagacctaaaatgtcagactggtttattgttaagttgcaattactgcaatgacagaccaataaacaattgctgcc

SEQ ID NO: 16655 - DNA, 5438 bp, Homo sapiens
  source 1..5438: mol_type = unassigned DNA
ggggggtgtcggcgttggagttgtgaattcgctgcgtttccatgaaatcctgcggagtgtcgctcgctaccgccgccgctgccgccgccgctttcggtgatgaggaaaagaaaatggcggcgggaaaagcgagcggcgagagcgaggaggcgtcccccagcctgacagccgaggagagggaggcgctcggcggactggacagccgcctctttgggttcgtgagatttcatgaagatggcgccaggacgaaggccctactgggcaaggctgttcgctgctatgaatctctaatcttaaaagctgaaggaaaagtggagtctgatttcttttgtcaattaggtcacttcaacctcttattggaagattatccaaaagcattatctgcataccagaggtactacagtttacagtctgactactggaagaatgctgcctttttatatggtcttggtttggtctacttccattataatgcatttcagtgggcaattaaagcatttcaggaggtgctttatgttgatcccagcttttgtcgagccaaggaaattcatttacgacttgggcttatgttcaaagtgaacacagactatgagtctagtttaaagcattttcagttagctttggttgactgtaatccctgcactttgtccaatgctgaaattcaatttcacattgcccacttatatgaaacccagaggaaatatcattctgcaaaagaagcttatgaacaacttttgcagacagagaatctttctgcacaagtaaaagcaactgtcttacaacagttaggttggatgcatcacactgtagatctcctgggagataaagccaccaaggaaagctatgctattcagtatctccaaaagtccttggaagcagatcctaattctggccagtcctggtatttcctcggaaggtgctattcaagtattgggaaagttcaggatgcctttatatcttacaggcagtctattgataaatcagaagcaagtgcagatacatggtgttcaataggtgtgctatatcagcagcaaaatcagcccatggatgctttacaggcctatatttgtgctgtacaattggaccatggccatgctgcagcctggatggacctaggcactctctatgaatcctgcaaccagcctcaggatgccattaaatgctacttaaatgcaactagaagcaaaagttgtagtaatacctctgcacttgcagcacgaattaagtatttacaggctcagttgtgtaaccttccacaaggtagtctacagaataaaactaaattacttcctagtattgaggaggcgtggagcctaccaattcccgcagagcttacctccaggcagggtgccatgaacacagcacagcagaatacttctgacaattggagtggtggacatgctgtgtcacatcctccagtacagcaacaagctcattcatggtgtttgacaccacagaaattacagcatttggaacagctccgcgcaaatagaaataatttaaatccagcacagaaactgatgctggaacagctggaaagtcagtttgtcttaatgcaacaacaccaaatgagaccaacaggagttgcacaggtacgatctactggaattcctaatgggccaacagctgactcatcactgcctacaaactcagtctctggccagcagccacagcttgctctgaccagagtgcctagcgtctctcagcctggagtccgtcctgcctgccctgggcagcctttggccaatggacccttttctgcaggccatgttccctgtagcacatcaagaacgctgggaagtacagacactattttgataggcaataatcatataacaggaagtggaagtaatggaaacgtgccttacctgcagcgaaacgcactcactctacctcataaccgcacaaacctgaccagcagcgcagaggagccgtggaaaaaccaactatctaactccactcaggggcttcacaaaggtcagagttcacattcggcaggtcctaatggtgaacgacctctctcttccactgggccttcccagcatctccaggcagctggctctggtattcagaatcagaacggacatcccaccctgcctagcaattcagtaacacagggggctgctctcaatcacctctcctctcacactgctacctcaggtggacaacaaggcattaccttaaccaaagagagcaagccttcaggaaacatattgacggtgcctgaaacaagcaggcacactggagagacacctaacagcactgccagtgtcgagggacttcctaatcatgtccatcagatgacggcagatgctgtttgcagtcctagccatggagattctaagtcaccaggtttactaagttcagacaatcctcagctctctgccttgttgatgggaaaagccaataacaatgtgggtactggaacctgtgacaaagtcaataacatccacccagctgttcatacaaagactgataactctgttgcctcttcaccatcttcagccatttcaacagcaacaccttctccaaaatccactgagcagacaaccacaaacagtgttaccagccttaacagccctcacagtgggctacacacaattaatggagaagggatggaagaatctcagagccccatgaaaacagatctgcttctggttaaccacaaacctagtccacagatcataccatcaatgtctgtgtccatataccccagctcagcagaagttctgaaggcatgcaggaatctaggtaaaaatggcttatctaacagtagcattttgttggataaatgtccacctccaagaccaccatcttcaccataccctcccttgccaaaggacaagttgaatccacctacacctagtatttacttggaaaataaacgtgatgctttctttcctccattacatcaattttgtacaaatccgaacaaccctgttacagtaatacgtggccttgctggagctcttaagttagacctgggacttttctctactaaaactttggtggaagctaacaatgaacatatggtagaagtgaggacacagttgttgcagccagcagatgaaaactgggatcccactggaacaaagaaaatctggcattgtgaaagtaatagatctcatactacaattgctaaatatgcacagtaccaggcctcctcattccaggaatcattgagagaagaaaatgaaaaaagaagtcatcataaagaccactcagatagtgaatctacatcgtcagataattctgggaggaggaggaaaggaccctttaaaaccataaagtttgggaccaatattgacctatctgatgacaaaaagtggaagttgcagctacatgagctgactaaacttcctgcttttgtgcgtgtcgtatcagcaggaaatcttctaagccatgttggtcataccatattgggcatgaacacagttcaactatacatgaaagttccagggagcagaacaccaggtcatcaggaaaataacaacttctgttcagttaacataaatattggcccaggtgactgtgaatggtttgttgttcctgaaggttactggggtgttctgaatgacttctgtgaaaaaaataatttgaatttcctaatgggttcttggtggcccaatcttgaagatctttatgaagcaaatgttccagtgtataggtttattcagcgacctggagatttggtctggataaatgcaggcactgttcattgggttcaggctattggctggtgcaacaacattgcttggaatgttggtccacttacagcctgccagtataaattggcagtggaacggtacgaatggaacaaattgcaaagtgtgaagtcaatagtacccatggttcatctttcctggaatatggcacgaaatatcaaggtctcagatccaaagctttttgaaatgattaagtattgtcttctaagaactctgaagcaatgtcagacattgagggaagctctcattgctgcaggaaaagagattatatggcatgggcggacaaaagaagaaccagctcattactgtagcatttgtgaagtggaggtttttgatctgctttttgtcactaatgagagtaattcacgaaagacctacatagtacattgccaagattgtgcacgaaaaacaagcggaaacttggaaaactttgtggtgctagaacagtacaaaatggaggacctgatgcaagtctatgaccaatttacattagctcctccattaccatccgcctcatcttgatattgttccatggacattaaatgagaccttttctgctattcaggaaataacccagttctgcaccactggtttttgtagctatctcgtaaggctgctggctgaaaactgtgtctatgcaaccttccaagtgcggagtgtcaaccaactggacgggagagagtactgctcctactccaggactctcacaaagctgatgagctgtacttcagaaaaaaataataatttccatgttttgtatatatctgacaaaactggcaacatcttacagactactgacttgaagacaacctcttttatatttctctatttctgggctgatgaatttgttttcatctgtcttttcccccttcagaattttccttggaaaaaaaatactagcctagctggtcatttctttgtaaggtagttagcaattttaagtctttctttggtcaacttttttttaatgtgaaaagttaggtaagacacttttttactgcttttatgtttttctgtcttgttttgagaccatgatggttacacttttggttcctaaataaaatttaaaaaattaacagccaagtcacaaaggtaatggattgcacatagactaaggaataaacttcagatttgtgatttttgtttctaatcttgatgtaaatttacactatttataaatacatatttattgcttgaaaatatttgtgaatggaatgctgttattttttccagatttacctgccattgaaattttaaggagttctgtaatttcaaacactactcctattacattttctatgtgtaaataaaactgcttagcattgtacagaaacttttattaaaattgtttaatgtttaaagagttttctattgtttgagttttaaaaaagactttatgtacagtgcccagtttttgttcatttttgaaatctgattatatatattttatatatacttatgtatgtatatataatatatatagaaatctggatatatatgtataaatctttagaacttaaatttttctcgttttaagtttcacatctatggtagatttttgaggtgtctactgtaaagtattgcttacaaaaagtatgattatttttaaagaaatatatatggtatgtatcctcaagacctaaaatgtcagactggtttattgttaagttgcaattactgcaatgacagaccaataaacaattgctgccaaaa

SEQ ID NO: 16656 - DNA, 4337 bp, Homo sapiens
  source 1..4337: mol_type = unassigned DNA
gaattcgctgcgtttccatgaaatcctgcggagtgtcgctcgctaccgccgccgctgccgccgccgctttcggtgatgaggaaaagaaaatggcggcgggaaaagcgagcggcgagagcgaggaggcgtcccccagcctgacagccgaggagagggaggcgctcggcggactggacagccgcctctttgggttcgtgagatttcatgaagatggcgccaggacgaaggccctactgggcaaggctgttcgctgctatgaatctctaatcttaaaagctgaaggaaaagtggagtctgatttcttttgtcaattaggtcacttcaacctcttattggaagattatccaaaagcattatctgcataccagaggtactacagtttacagtctgactactggaagaatgctgcctttttatatggtcttggtttggtctacttccattataatgcatttcagtgggcaattaaagcatttcaggaggtgctttatgttgatcccagcttttgtcgagccaaggaaattcatttacgacttgggcttatgttcaaagtgaacacagactatgagtctagtttaaagcattttcagttagctttggttgactgtaatccctgcactttgtccaatgctgaaattcaatttcacattgcccacttatatgaaacccagaggaaatatcattctgcaaaagaagcttatgaacaacttttgcagacagagaatctttctgcacaagtaaaagcaactgtcttacaacagttaggttggatgcatcacactgtagatctcctgggagataaagccaccaaggaaagctatgctattcagtatctccaaaagtccttggaagcagatcctaattctggccagtcctggtatttcctcggaaggtgctattcaagtattgggaaagttcaggatgcctttatatcttacaggcagtctattgataaatcagaagcaagtgcagatacatggtgttcaataggtgtgctatatcagcagcaaaatcagcccatggatgctttacaggcctatatttgtgctgtacaattggaccatggccatgctgcagcctggatggacctaggcactctctatgaatcctgcaaccagcctcaggatgccattaaatgctacttaaatgcaactagaagcaaaagttgtagtaatacctctgcacttgcagcacgaattaagtatttacaggcatgtaaacctcatcatccaaatactgaacctgtattaggcctcagtcaaacaccaatttcacagcaatccttgccactacacatgattccttctagccaagtagatgacctgtccagtcctgccaagaggaaaagaacatctagtccaacaaagaatacttctgacaattggagtggtggacatgctgtgtcacatcctccagtacagcaacaagctcattcatggtgtttgacaccacagaaattacagcatttggaacagctccgcgcaaatagaaataatttaaatccagcacagaaactgatgctggaacagctggaaagtcagtttgtcttaatgcaacaacaccaaatgagaccaacaggagttgcacaggtacgatctactggaattcctaatgggccaacagctgactcatcactgcctacaaactcagtctctggccagcagccacagcttgctctgaccagagtgcctagcgtctctcagcctggagtccgtcctgcctgccctgggcagcctttggccaatggacccttttctgcaggccatgttccctgtagcacatcaagaacgctgggaagtacagacactattttgataggcaataatcatataacaggaagtggaagtaatggaaacgtgccttacctgcagcgaaacgcactcactctacctcataaccgcacaaacctgaccagcagcgcagaggagccgtggaaaaaccaactatctaactccactcaggggcttcacaaaggtcagagttcacattcggcaggtcctaatggtgaacgacctctctcttccactgggccttcccagcatctccaggcagctggctctggtattcagaatcagaacggacatcccaccctgcctagcaattcagtaacacagggggctgctctcaatcacctctcctctcacactgctacctcaggtggacaacaaggcattaccttaaccaaagagagcaagccttcaggaaacatattgacggtgcctgaaacaagcaggcacactggagagacacctaacagcactgccagtgtcgagggacttcctaatcatgtccatcagatgacggcagatgctgtttgcagtcctagccatggagattctaagtcaccaggtttactaagttcagacaatcctcagctctctgccttgttgatgggaaaagccaataacaatgtgggtactggaacctgtgacaaagtcaataacatccacccagctgttcatacaaagactgataactctgttgcctcttcaccatcttcagccatttcaacagcaacaccttctccaaaatccactgagcagacaaccacaaacagtgttaccagccttaacagccctcacagtgggctacacacaattaatggagaagggatggaagaatctcagagccccatgaaaacagatctgcttctggttaaccacaaacctagtccacagatcataccatcaatgtctgtgtccatataccccagctcagcagaagttctgaaggcatgcaggaatctaggtaaaaatggcttatctaacagtagcattttgttggataaatgtccacctccaagaccaccatcttcaccataccctcccttgccaaaggacaagttgaatccacctacacctagtatttacttggaaaataaacgtgatgctttctttcctccattacatcaattttgtacaaatccgaacaaccctgttacagtaatacgtggccttgctggagctcttaagttagacctgggacttttctctactaaaactttggtggaagctaacaatgaacatatggtagaagtgaggacacagttgttgcagccagcagatgaaaactgggatcccactggaacaaagaaaatctggcattgtgaaagtaatagatctcatactacaattgctaaatatgcacagtaccaggcctcctcattccaggaatcattgagagaagaaaatgaaaaaagaagtcatcataaagaccactcagatagtgaatctacatcgtcagataattctgggaggaggaggaaaggaccctttaaaaccataaagtttgggaccaatattgacctatctgatgacaaaaagtggaagttgcagctacatgagctgactaaacttcctgcttttgtgcgtgtcgtatcagcaggaaatcttctaagccatgttggtcataccatattgggcatgaacacagttcaactatacatgaaagttccagggagcagaacaccaggtcatcaggaaaataacaacttctgttcagttaacataaatattggcccaggtgactgtgaatggtttgttgttcctgaaggttactggggtgttctgaatgacttctgtgaaaaaaataatttgaatttcctaatgggttcttggtggcccaatcttgaagatctttatgaagcaaatgttccagtgtataggtttattcagcgacctggagatttggtctggataaatgcaggcactgttcattgggttcaggctattggctggtgcaacaacattgcttggaatgttggtccacttacagcctgccagtataaattggcagtggaacggtacgaatggaacaaattgcaaagtgtgaagtcaatagtacccatggttcatctttcctggaatatggcacgaaatatcaaggtctcagatccaaagctttttgaaatgattaagtattgtcttctaagaactctgaagcaatgtcagacattgagggaagctctcattgctgcaggaaaagagattatatggcatgggcggacaaaagaagaaccagctcattactgtagcatttgtgaagtggaggtttttgatctgctttttgtcactaatgagagtaattcacgaaagacctacatagtacattgccaagattgtgcacgaaaaacaagcggaaacttggaaaactttgtggtgctagaacagtacaaaatggaggacctgatgcaagtctatgaccaatttacattagctcctccattaccatccgcctcatcttgatattgttccatggacattaaatgagaccttttctgctattcaggaaataacccagttctgcaccactggtttttgtagctatctcgtaaggct

SEQ ID NO: 16657 - DNA, 4189 bp, Homo sapiens
  source 1..4189: mol_type = unassigned DNA
aggcactctctatgaatcctgcaaccagcctcaggatgccattaaatgctacttaaatgcaactagaagcaaaagttgtagtaatacctctgcacttgcagcacgaattaagtatttacagaatacttctgacaattggagtggtggacatgctgtgtcacatcctccagtacagcaacaagctcattcatggtgtttgacaccacagaaattacagcatttggaacagctccgcgcaaatagaaataatttaaatccagcacagaaactgatgctggaacagctggaaagtcagtttgtcttaatgcaacaacaccaaatgagaccaacaggagttgcacaggtacgatctactggaattcctaatgggccaacagctgactcatcactgcctacaaactcagtctctggccagcagccacagcttgctctgaccagagtgcctagcgtctctcagcctggagtccgtcctgcctgccctgggcagcctttggccaatggacccttttctgcaggccatgttccctgtagcacatcaagaacgctgggaagtacagacactattttgataggcaataatcatataacaggaagtggaagtaatggaaacgtgccttacctgcagcgaaacgcactcactctacctcataaccgcacaaacctgaccagcagcgcagaggagccgtggaaaaaccaactatctaactccactcaggggcttcacaaaggtcagagttcacattcggcaggtcctaatggtgaacgacctctctcttccactgggccttcccagcatctccaggcagctggctctggtattcagaatcagaacggacatcccaccctgcctagcaattcagtaacacagggggctgctctcaatcacctctcctctcacactgctacctcaggtggacaacaaggcattaccttaaccaaagagagcaagccttcaggaaacatattgacggtgcctgaaacaagcaggcacactggagagacacctaacagcactgccagtgtcgagggacttcctaatcatgtccatcagatgacggcagatgctgtttgcagtcctagccatggagattctaagtcaccaggtttactaagttcagacaatcctcagctctctgccttgttgatgggaaaagccaataacaatgtgggtactggaacctgtgacaaagtcaataacatccacccagctgttcatacaaagactgataactctgttgcctcttcaccatcttcagccatttcaacagcaacaccttctccaaaatccactgagcagacaaccacaaacagtgttaccagccttaacagccctcacagtgggctacacacaattaatggagaagggatggaagaatctcagagccccatgaaaacagatctgcttctggttaaccacaaacctagtccacagatcataccatcaatgtctgtgtccatataccccagctcagcagaagttctgaaggcatgcaggaatctaggtaaaaatggcttatctaacagtagcattttgttggataaatgtccacctccaagaccaccatcttcaccataccctcccttgccaaaggacaagttgaatccacctacacctagtatttacttggaaaataaacgtgatgctttctttcctccattacatcaattttgtacaaatccgaacaaccctgttacagtaatacgtggccttgctggagctcttaagttagacctgggacttttctctactaaaactttggtggaagctaacaatgaacatatggtagaagtgaggacacagttgttgcagccagcagatgaaaactgggatcccactggaacaaagaaaatctggcattgtgaaagtaatagatctcatactacaattgctaaatatgcacagtaccaggcctcctcattccaggaatcattgagagaagaaaatgaaaaaagaagtcatcataaagaccactcagatagtgaatctacatcgtcagataattctgggaggaggaggaaaggaccctttaaaaccataaagtttgggaccaatattgacctatctgatgacaaaaagtggaagttgcagctacatgagctgactaaacttcctgcttttgtgcgtgtcgtatcagcaggaaatcttctaagccatgttggtcataccatattgggcatgaacacagttcaactatacatgaaagttccagggagcagaacaccaggtcatcaggaaaataacaacttctgttcagttaacataaatattggcccaggtgactgtgaatggtttgttgttcctgaaggttactggggtgttctgaatgacttctgtgaaaaaaataatttgaatttcctaatgggttcttggtggcccaatcttgaagatctttatgaagcaaatgttccagtgtataggtttattcagcgacctggagatttggtctggataaatgcaggcactgttcattgggttcaggctattggctggtgcaacaacattgcttggaatgttggtccacttacagcctgccagtataaattggcagtggaacggtacgaatggaacaaattgcaaagtgtgaagtcaatagtacccatggttcatctttcctggaatatggcacgaaatatcaaggtctcagatccaaagctttttgaaatgattaagtattgtcttctaagaactctgaagcaatgtcagacattgagggaagctctcattgctgcaggaaaagagattatatggcatgggcggacaaaagaagaaccagctcattactgtagcatttgtgaagtggaggtttttgatctgctttttgtcactaatgagagtaattcacgaaagacctacatagtacattgccaagattgtgcacgaaaaacaagcggaaacttggaaaactttgtggtgctagaacagtacaaaatggaggacctgatgcaagtctatgaccaatttacattagctcctccattaccatccgcctcatcttgatattgttccatggacattaaatgagaccttttctgctattcaggaaataacccagttctgcaccactggtttttgtagctatctcgtaaggctgctggctgaaaactgtgtctatgcaaccttccaagtgcggagtgtcaaccaactggacgggagagagtactgctcctactccaggactctcacaaagctgatgagctgtacttcagaaaaaaataataatttccatgttttgtatatatctgacaaaactggcaacatcttacagactactgacttgaagacaacctcttttatatttctctatttctgggctgatgaatttgttttcatctgtcttttcccccttcagaattttccttggaaaaaaaatactagcctagctggtcatttctttgtaaggtagttagcaattttaagtctttctttggtcaacttttttttaatgtgaaaagttaggtaagacacttttttactgcttttatgtttttctgtcttgttttgagaccatgatggttacacttttggttcctaaataaaatttaaaaaattaacagccaagtcacaaaggtaatggattgcacatagactaaggaataaacttcagatttgtgatttttgtttctaatcttgatgtaaatttacactatttataaatacatatttattgcttgaaaatatttgtgaatggaatgctgttattttttccagatttacctgccattgaaattttaaggagttctgtaatttcaaacactactcctattacattttctatgtgtaaataaaactgcttagcattgtacagaaacttttattaaaattgtttaatgtttaaagagttttctattgtttgagttttaaaaaagactttatgtacagtgcccagtttttgttcatttttgaaatctgattatatatattttatatatacttatgtatgtatatataatatatatagaaatctggatatatatgtataaatctttagaacttaaatttttctcgttttaagtttcacatctatggtagatttttgaggtgtctactgtaaagtattgcttacaaaaagtatgattatttttaaagaaatatatatggtatgtatcctcaagacctaaaatgtcagactggtttattgttaagttgcaattactgcaatgacagaccaataaacaattgctgccaaaa

SEQ ID NO: 16658 - DNA, 735 bp, Homo sapiens
  source 1..735: mol_type = unassigned DNA
ggcacgaaatatcaaggtctcagatccaaagctttttgaaatgattaagatattttcattgtctccgaattttagagctgaaaagtgccttagagatcatctagttcaacctctccgttcaaatggagaacctgagccactaagattcacaggagagtattgtcttctaagaactctgaagcaatgtcagacattgagggaagctctcattgctgcaggaaaagagattatatggcatgggcggacaaaagaagaaccagctcattactgtagcatttgtgaagtggaggtttttgatctgctttttgtcactaatgagagtaattcacgaaagacctacatagtacattgccaagattgtgcacgaaaaacaagcggaaacttggaaaactttgtggtgctagaacagtacaaaatggaggacctgatgcaagtctatgaccaatttacattagctcctccattaccatccgcctcatcttgatattgttccatggacattaaatgagaccttttctgctattcaggaaataacccagttctgcaccactggtttttgtagctatctcgtaaggctgctggctgaaaactgtgtctatgcaaccttccaagtgcggagtgtcaaccaactggacgggagagagtactgctcctactccaggactctcacaaagctgatgagctgtacttcagaaaaaaataataatttccatgttttgtatatatctgacaaaa

SEQ ID NO: 16659 - DNA, 4324 bp, Homo sapiens
  source 1..4324: mol_type = unassigned DNA
gaataaaactaaattacttcctagtattgaggaggcgtggagcctaccaattcccgcagagcttacctccaggcagggtgccatgaacacagcacagcaggcatgtaaacctcatcatccaaatactgaacctgtattaggcctcagtcaaacaccaatttcacagcaatccttgccactacacatgattccttctagccaagtagatgacctgtccagtcctgccaagaggaaaagaacatctagtccaacaaagaatacttctgacaattggagtggtggacatgctgtgtcacatcctccagtacagcaacaagctcattcatggtgtttgacaccacagaaattacagcatttggaacagctccgcgcaaatagaaataatttaaatccagcacagaaactgatgctggaacagctggaaagtcagtttgtcttaatgcaacaacaccaaatgagaccaacaggagttgcacaggtacgatctactggaattcctaatgggccaacagctgactcatcactgcctacaaactcagtctctggccagcagccacagcttgctctgaccagagtgcctagcgtctctcagcctggagtccgtcctgcctgccctgggcagcctttggccaatggacccttttctgcaggccatgttccctgtagcacatcaagaacgctgggaagtacagacactattttgataggcaataatcatataacaggaagtggaagtaatggaaacgtgccttacctgcagcgaaacgcactcactctacctcataaccgcacaaacctgaccagcagcgcagaggagccgtggaaaaaccaactatctaactccactcaggggcttcacaaaggtcagagttcacattcggcaggtcctaatggtgaacgacctctctcttccactgggccttcccagcatctccaggcagctggctctggtattcagaatcagaacggacatcccaccctgcctagcaattcagtaacacagggggctgctctcaatcacctctcctctcacactgctacctcaggtggacaacaaggcattaccttaaccaaagagagcaagccttcaggaaacatattgacggtgcctgaaacaagcaggcacactggagagacacctaacagcactgccagtgtcgagggacttcctaatcatgtccatcagatgacggcagatgctgtttgcagtcctagccatggagattctaagtcaccaggtttactaagttcagacaatcctcagctctctgccttgttgatgggaaaagccaataacaatgtgggtactggaacctgtgacaaagtcaataacatccacccagctgttcatacaaagactgataactctgttgcctcttcaccatcttcagccatttcaacagcaacaccttctccaaaatccactgagcagacaaccacaaacagtgttaccagccttaacagccctcacagtgggctacacacaattaatggagaagggatggaagaatctcagagccccatgaaaacagatctgcttctggttaaccacaaacctagtccacagatcataccatcaatgtctgtgtccatataccccagctcagcagaagttctgaaggcatgcaggaatctaggtaaaaatggcttatctaacagtagcattttgttggataaatgtccacctccaagaccaccatcttcaccataccctcccttgccaaaggacaagttgaatccacctacacctagtatttacttggaaaataaacgtgatgctttctttcctccattacatcaattttgtacaaatccgaacaaccctgttacagtaatacgtggccttgctggagctcttaagttagacctgggacttttctctactaaaactttggtggaagctaacaatgaacatatggtagaagtgaggacacagttgttgcagccagcagatgaaaactgggatcccactggaacaaagaaaatctggcattgtgaaagtaatagatctcatactacaattgctaaatatgcacagtaccaggcctcctcattccaggaatcattgagagaagaaaatgaaaaaagaagtcatcataaagaccactcagatagtgaatctacatcgtcagataattctgggaggaggaggaaaggaccctttaaaaccataaagtttgggaccaatattgacctatctgatgacaaaaagtggaagttgcagctacatgagctgactaaacttcctgcttttgtgcgtgtcgtatcagcaggaaatcttctaagccatgttggtcataccatattgggcatgaacacagttcaactatacatgaaagttccagggagcagaacaccaggtcatcaggaaaataacaacttctgttcagttaacataaatattggcccaggtgactgtgaatggtttgttgttcctgaaggttactggggtgttctgaatgacttctgtgaaaaaaataatttgaatttcctaatgggttcttggtggcccaatcttgaagatctttatgaagcaaatgttccagtgtataggtttattcagcgacctggagatttggtctggataaatgcaggcactgttcattgggttcaggctattggctggtgcaacaacattgcttggaatgttggtccacttacagcctgccagtataaattggcagtggaacggtacgaatggaacaaattgcaaagtgtgaagtcaatagtacccatggttcatctttcctggaatatggcacgaaatatcaaggtctcagatccaaagctttttgaaatgattaagtattgtcttctaagaactctgaagcaatgtcagacattgagggaagctctcattgctgcaggaaaagagattatatggcatgggcggacaaaagaagaaccagctcattactgtagcatttgtgaagtggaggtttttgatctgctttttgtcactaatgagagtaattcacgaaagacctacatagtacattgccaagattgtgcacgaaaaacaagcggaaacttggaaaactttgtggtgctagaacagtacaaaatggaggacctgatgcaagtctatgaccaatttacattagctcctccattaccatccgcctcatcttgatattgttccatggacattaaatgagaccttttctgctattcaggaaataacccagttctgcaccactggtttttgtagctatctcgtaaggctgctggctgaaaactgtgtctatgcaaccttccaagtgcggagtgtcaaccaactggacgggagagagtactgctcctactccaggactctcacaaagctgatgagctgtacttcagaaaaaaataataatttccatgttttgtatatatctgacaaaactggcaacatcttacagactactgacttgaagacaacctcttttatatttctctatttctgggctgatgaatttgttttcatctgtcttttcccccttcagaattttccttggaaaaaaaatactagcctagctggtcatttctttgtaaggtagttagcaattttaagtctttctttggtcaacttttttttaatgtgaaaagttaggtaagacacttttttactgcttttatgtttttctgtcttgttttgagaccatgatggttacacttttggttcctaaataaaatttaaaaaattaacagccaagtcacaaaggtaatggattgcacatagactaaggaataaacttcagatttgtgatttttgtttctaatcttgatgtaaatttacactatttataaatacatatttattgcttgaaaatatttgtgaatggaatgctgttattttttccagatttacctgccattgaaattttaaggagttctgtaatttcaaacactactcctattacattttctatgtgtaaataaaactgcttagcattgtacagaaacttttattaaaattgtttaatgtttaaagagttttctattgtttgagttttaaaaaagactttatgtacagtgcccagtttttgttcatttttgaaatctgattatatatattttatatatacttatgtatgtatatataatatatatagaaatctggatatatatgtataaatctttagaacttaaatttttctcgttttaagtttcacatctatggtagatttttgaggtgtctactgtaaagtattgcttacaaaaagtatgattatttttaaagaaatatatatggtatgtatcctcaagacctaaaatgtcagactggtttattgttaagttgcaattactgcaatgacagaccaataaacaattgctgccaaaa

SEQ ID NO: 16660 - DNA, 671 bp, Homo sapiens
  source 1..671: mol_type = unassigned DNA
ctttacaggcctatatttgtgctgtacaattggaccatggccatgctgcagcctggatggacctaggcactctctatgaatcctgcaaccagcctcaggatgccattaaatgctacttaaatgcaactagaagcaaaagttgtagtaatacctctgcacttgcagcacgaattaagtatttacaggctcagttgtgtaaccttccacaaggtagtctacagaataaaactaaattacttcctagtattgaggaggcgtggagcctaccaattcccgcagagcttacctccaggcagggtgccatgaacacagcacagcagaatacttctgacaattggagtggtggacatgctgtgtcacatcctccagtacagcaacaagctcattcatggtgtttgacaccacagaaattacagatgagaccaacaggagttgcacaggtacgatctactggaattcctaatgggccaacagctgactcatcactgcctacaaactcagtctctggccagcagccacagcttgctctgaccagagtgcctagcgtctctcagcctggagtccgtcctgcctgccctgggcagcctttggccaatggacccttttctgcaggccatgttccctgtagcacatcaagaacgctgggaagtacagacactattttgataggc

SEQ ID NO: 16661 - DNA, 1918 bp, Homo sapiens
  source 1..1918: mol_type = unassigned DNA
agtctacagaataaaactaaattacttcctagtattgaggaggcgtggagcctaccaattcccgcagagcttacctccaggcagggtgccatgaacacagcacagcagaatacttctgacaattggagtggtggacatgctgtgtcacatcctccagtacagcaacaagctcattcatggtgtttgacaccacagaaattacagcatttggaacagctccgcgcaaatagaaataatttaaatccagcacagaaactgatgctggaacagctggaaagtcagtttgtcttaatgcaacaacaccaaatgagaccaacaggagttgcacaggtacgatctactggaattcctaatgggccaacagctgactcatcactgcctacaaactcagtctctggccagcagccacagcttgctctgaccagagtgcctagcgtctctcagcctggagtccgtcctgcctgccctgggcagcctttggccaatggacccttttgcaggccatgttccctgtagcacatcaagaacgctgggaagtacagacactattttgataggcaataatcatataacaggaagtggaagtaatggaaacgtgccttacctgcagcgaaacgcactcactctacctcataaccgcacaaacctgaccagcagcgcagaggagccgtggaaaaaccaactatctaactccactcaggggcttcacaaaggtcagagttcacattcggcaggtcctaatggtgaacgacctctctcttccactgggccttcccagcatctccaggcagctggctctggtattcagaatcagaacggacatcccaccctgcctagcaattcagtaacacagggggctgctctcaatcacctctcctctcacactgctacctcaggtggacaacaaggcattaccttaaccaaagagagcaagccttcaggaaacatattgacggtgcctgaaacaagcaggcacactggagagacacctaacagcactgccagtgtcgagggacttcctaatcatgtccatcagatgacggcagatgctgtttgcagtcctagccatggagattctaagtcaccaggtttactaagttcagacaatcctcagctctctgccttgttgatgggaaaagccaataacaatgtgggtactggaacctgtgacaaagtcaataacatccacccagctgttcatacaaagactgataactctgttgcctcttcaccatcttcagccatttcaacagcaacaccttctccaaaatccactgagcagacaaccacaaacagtgttaccagccttaacagccctcacagtgggctacacacaattaatggagaagggatggaagaatctcagagccccatgaaaacagatctgcttctggttaaccacaaacctagtccacagatcataccatcaatgtctgtgtccatataccccagctcagcagaagttctgaaggcatgcaggaatctaggtaaaaatggcttatctaacagtagcattttgttggataaatgtccacctccaagaccaccatcttcaccataccctcccttgccaaaggacaagttgaatccacctacacctagtatttacttggaaaataaacgtgatgctttctttcctccattacatcaattttgtacaaatccgaacaaccctgttacagtaatacgtggccttgctggagctcttaagttagacctgggacttttctctactaaaactttggtggaagctaacaatgaacatatggtagaagtgaggacacagttgttgcagccagcagatgaaaactgggatcccactggaacaaagaaaatctggcattgtgaaagtaatagatctcatactacaattgctaaatatgcacagtaccaggcctcctcattccaggaatcattg

SEQ ID NO: 16662 - DNA, 4185 bp, Homo sapiens
  source 1..4185: mol_type = unassigned DNA
gaattcgctgcgtttccatgaaatcctgcggagtgtcgctcgctaccgccgccgctgccgccgccgctttcggtgatgaggaaaagaaaatggcggcgggaaaagcgagcggcgagagcgaggaggcgtcccccagcctgacagccgaggagagggaggcgctcggcggactggacagccgcctctttgggttcgtgagatttcatgaagatggcgccaggacgaaggccctactgggcaaggctgttcgctgctatgaatctctaatcttaaaagctgaaggaaaagtggagtctgatttcttttgtcaattaggtcacttcaacctcttattggaagattatccaaaagcattatctgcataccagaggtactacagtttacagtctgactactggaagaatgctgcctttttatatggtcttggtttggtctacttccattataatgcatttcagtgggcaattaaagcatttcaggaggtgctttatgttgatcccagcttttgtcgagccaaggaaattcatttacgacttgggcttatgttcaaagtgaacacagactatgagtctagtttaaagcattttcagttagctttggttgactgtaatccctgcactttgtccaatgctgaaattcaatttcacattgcccacttatatgaaacccagaggaaatatcattctgcaaaagaagcttatgaacaacttttgcagacagagaatctttctgcacaagtaaaagcaactgtcttacaacagttaggttggatgcatcacactgtagatctcctgggagataaagccaccaaggaaagctatgctattcagtatctccaaaagtccttggaagcagatcctaattctggccagtcctggtatttcctcggaaggtgctattcaagtattgggaaagttcaggatgcctttatatcttacaggcagtctattgataaatcagaagcaagtgcagatacatggtgttcaataggtgtgctatatcagcagcaaaatcagcccatggatgctttacaggcctatatttgtgctgtacaattggaccatggccatgctgcagcctggatggacctaggcactctctatgaatcctgcaaccagcctcaggatgccattaaatgctacttaaatgcaactagaagcaaaagttgtagtaatacctctgcacttgcagcacgaattaagtatttacagaatacttctgacaattggagtggtggacatgctgtgtcacatcctccagtacagcaacaagctcattcatggtgtttgacaccacagaaattacagcatttggaacagctccgcgcaaatagaaataatttaaatccagcacagaaactgatgctggaacagctggaaagtcagtttgtcttaatgcaacaacaccaaatgagaccaacaggagttgcacaggtacgatctactggaattcctaatgggccaacagctgactcatcactgcctacaaactcagtctctggccagcagccacagcttgctctgaccagagtgcctagcgtctctcagcctggagtccgtcctgcctgccctgggcagcctttggccaatggacccttttctgcaggccatgttccctgtagcacatcaagaacgctgggaagtacagacactattttgataggcaataatcatataacaggaagtggaagtaatggaaacgtgccttacctgcagcgaaacgcactcactctacctcataaccgcacaaacctgaccagcagcgcagaggagccgtggaaaaaccaactatctaactccactcaggggcttcacaaaggtcagagttcacattcggcaggtcctaatggtgaacgacctctctcttccactgggccttcccagcatctccaggcagctggctctggtattcagaatcagaacggacatcccaccctgcctagcaattcagtaacacagggggctgctctcaatcacctctcctctcacactgctacctcaggtggacaacaaggcattaccttaaccaaagagagcaagccttcaggaaacatattgacggtgcctgaaacaagcaggcacactggagagacacctaacagcactgccagtgtcgagggacttcctaatcatgtccatcagatgacggcagatgctgtttgcagtcctagccatggagattctaagtcaccaggtttactaagttcagacaatcctcagctctctgccttgttgatgggaaaagccaataacaatgtgggtactggaacctgtgacaaagtcaataacatccacccagctgttcatacaaagactgataactctgttgcctcttcaccatcttcagccatttcaacagcaacaccttctccaaaatccactgagcagacaaccacaaacagtgttaccagccttaacagccctcacagtgggctacacacaattaatggagaagggatggaagaatctcagagccccatgaaaacagatctgcttctggttaaccacaaacctagtccacagatcataccatcaatgtctgtgtccatataccccagctcagcagaagttctgaaggcatgcaggaatctaggtaaaaatggcttatctaacagtagcattttgttggataaatgtccacctccaagaccaccatcttcaccataccctcccttgccaaaggacaagttgaatccacctacacctagtatttacttggaaaataaacgtgatgctttctttcctccattacatcaattttgtacaaatccgaacaaccctgttacagtaatacgtggccttgctggagctcttaagttagacctgggacttttctctactaaaactttggtggaagctaacaatgaacatatggtagaagtgaggacacagttgttgcagccagcagatgaaaactgggatcccactggaacaaagaaaatctggcattgtgaaagtaatagatctcatactacaattgctaaatatgcacagtaccaggcctcctcattccaggaatcattgagagaagaaaatgaaaaaagaagtcatcataaagaccactcagatagtgaatctacatcgtcagataattctgggaggaggaggaaaggaccctttaaaaccataaagtttgggaccaatattgacctatctgatgacaaaaagtggaagttgcagctacatgagctgactaaacttcctgcttttgtgcgtgtcgtatcagcaggaaatcttctaagccatgttggtcataccatattgggcatgaacacagttcaactatacatgaaagttccagggagcagaacaccaggtcatcaggaaaataacaacttctgttcagttaacataaatattggcccaggtgactgtgaatggtttgttgttcctgaaggttactggggtgttctgaatgacttctgtgaaaaaaataatttgaatttcctaatgggttcttggtggcccaatcttgaagatctttatgaagcaaatgttccagtgtataggtttattcagcgacctggagatttggtctggataaatgcaggcactgttcattgggttcaggctattggctggtgcaacaacattgcttggaatgttggtccacttacagcctgccagtataaattggcagtggaacggtacgaatggaacaaattgcaaagtgtgaagtcaatagtacccatggttcatctttcctggaatatggcacgaaatatcaaggtctcagatccaaagctttttgaaatgattaagtattgtcttctaagaactctgaagcaatgtcagacattgagggaagctctcattgctgcaggaaaagagattatatggcatgggcggacaaaagaagaaccagctcattactgtagcatttgtgaagtggaggtttttgatctgctttttgtcactaatgagagtaattcacgaaagacctacatagtacattgccaagattgtgcacgaaaaacaagcggaaacttggaaaactttgtggtgctagaacagtacaaaatggaggacctgatgcaagtctatgaccaatttacattagctcctccattaccatccgcctcatcttgatattgttccatggacattaaatgagaccttttctgctattcaggaaataacccagttctgcaccactggtttttgtagctatctcgtaaggctgctg

SEQ ID NO: 16663 - DNA, 2876 bp, Homo sapiens
  source 1..2876: mol_type = unassigned DNA
atgaaatcctgcggagtgtcgctcgctaccgccgccgctgccgccgccgctttcggtgatgaggaaaagaaaatggcggcgggaaaagcgagcggcgagagcgaggaggcgtcccccagcctgacagccgaggagagggaggcgctcggcggactggacagccgcctctttgggttcgtgagatttcatgaagatggcgccaggacgaaggccctactgggcaaggctgttcgctgctatgaatctctaatcttaaaagctgaaggaaaagtggagtctgatttcttttgtcaattaggtcacttcaacctcttattggaagattatccaaaagcattatctgcataccagaggtactacagtttacagtctgactactggaagaatgctgcctttttatatggtcttggtttggtctacttccattataatgcatttcagtgggcaattaaagcatttcaggaggtgctttatgttgatcccagcttttgtcgagccaaggaaattcatttacgacttgggcttatgttcaaagtgaacacagactatgagtctagtttaaagcattttcagttagctttggttgactgtaatccctgcactttgtccaatgctgaaattcaatttcacattgcccacttatatgaaacccaggttggatgcatcacactgtagatctcctgggagataaagccaccaaggaaagctatgctattcagtatctccaaaagtccttggaagcagatcctaattctggccagtcctggtatttcctcggaaggtgctattcaagtattgggaaagttcaggatgcctttatatcttacaggcagtctattgataaatcagaagcaagtgcagatacatggtgttcaataggtgtgctatatcagcagcaaaatcagcccatggatgctttacaggcctatatttgtgctgtacaattggaccatggccatgctgcagcctggatggacctaggcactctctatgaatcctgcaaccagcctcaggatgccattaaatgctacttaaatgcaactagaagcaaaagttgtagtaatacctctgcacttgcagcacgaattaagtatttacagaatacttctgacaattggagtggtggacatgctgtgtcacatcctccagtacagcaacaagctcattcatggtgtttgacaccacagaaattacagatgagaccaacaggagttgcacaggtacgatctactggaattcctaatgggccaacagctgactcatcactgcctacaaactcagtctctggccagcagccacagcttgctctgaccagagtgcctagcgtctctcagcctggagtccgtcctgcctgccctgggcagcctttggccaatggacccttttctgcaggccatgttccctgtagcacatcaagaacgctgggaagtacagacactattttgataggcaataatcatataacaggaagtggaagtaatggaaacgtgccttacctgcagcgaaacgcactcactctacctcataaccgcacaaacctgaccagcagcgcagaggagccgtggaaaaaccaactatctaactccactcaggggcttcacaaaggtcagagttcacattcggcaggtcctaatggtgaacgacctctctcttccactgggccttcccagcatctccaggcagctggctctggtattcagaatcagaacggacatcccaccctgcctagcaattcagtaacacagggggctgctctcaatcacctctcctctcacactgctacctcaggtggacaacaaggcattaccttaaccaaagagagcaagccttcaggaaacatattgacggtgcctgaaacaagcaggcacactggagagacacctaacagcactgccagtgtcgagggacttcctaatcatgtccatcagatgacggcagatgctgtttgcagtcctagccatggagattctaagtcaccaggtttactaagttcagacaatcctcagctctctgccttgttgatgggaaaagccaataacaatgtgggtactggaacctgtgacaaagtcaataacatccacccagctgttcatacaaagactgataactctgttgcctcttcaccatcttcagccatttcaacagcaacaccttctccaaaatccactgagcagacaaccacaaacagtgttaccagccttaacagccctcacagtgggctacacacaattaatggagaagggatggaagaatctcagagccccatgaaaacagatctgcttctggttaaccacaaacctagtccacagatcataccatcaatgtctgtgtccatataccccagctcagcagaagttctgaaggcatgcaggaatctaggtaaaaatggcttatctaacagtagcattttgttggataaatgtccacctccaagaccaccatcttcaccataccctcccttgccaaaggacaagttgaatccacctacacctagtatttacttggaaaataaacgtgatgctttctttcctccattacatcaattttgtacaaatccgaacaaccctgttacagtaatacgtggccttgctggagctctcattgctgcaggaaaagagattatatggcatgggcggacaaaagaagaaccagctcattactgtagcatttgtgaagtggaggtttttgatctgctttttgtcactaatgagagtaattcacgaaagacctacatagtacattgccaagattgtgcacgaaaaacaagcggaaacttggaaaactttgtggtgctagaacagtacaaaatggaggacctgatgcaagtctatgaccaatttacattagctcctccattaccatccgcctcatcttga

SEQ ID NO: 16664 - DNA, 3969 bp, Homo sapiens
  source 1..3969: mol_type = unassigned DNA
atgaaatcctgcggagtgtcgctcgctaccgccgccgctgccgccgccgctttcggtgatgaggaaaagaaaatggcggcgggaaaagcgagcggcgagagcgaggaggcgtcccccagcctgacagccgaggagagggaggcgctcggcggactggacagccgcctctttgggttcgtgagatttcatgaagatggcgccaggacgaaggccctactgggcaaggctgttcgctgctatgaatctctaatcttaaaagctgaaggaaaagtggagtctgatttcttttgtcaattaggtcacttcaacctcttattggaagattatccaaaagcattatctgcataccagaggtactacagtttacagtctgactactggaagaatgctgcctttttatatggtcttggtttggtctacttccattataatgcatttcagtgggcaattaaagcatttcaggaggtgctttatgttgatcccagcttttgtcgagccaaggaaattcatttacgacttgggcttatgttcaaagtgaacacagactatgagtctagtttaaagcattttcagttagctttggttgactgtaatccctgcactttgtccaatgctgaaattcaatttcacattgcccacttatatgaaacccagaggaaatatcattctgcaaaagaagcttatgaacaacttttgcagacagagaatctttctgcacaagtaaaagcaactgtcttacaacagttaggttggatgcatcacactgtagatctcctgggagataaagccaccaaggaaagctatgctattcagtatctccaaaagtccttggaagcagatcctaattctggccagtcctggtatttcctcggaaggtgctattcaagtattgggaaagttcaggatgcctttatatcttacaggcagtctattgataaatcagaagcaagtgcagatacatggtgttcaataggtgtgctatatcagcagcaaaatcagcccatggatgctttacaggcctatatttgtgctgtacaattggaccatggccatgctgcagcctggatggacctaggcactctctatgaatcctgcaaccagcctcaggatgccattaaatgctacttaaatgcaactagaagcaaaagttgtagtaatacctctgcacttgcagcacgaattaagtatttacagaatacttctgacaattggagtggtggacatgctgtgtcacatcctccagtacagcaacaagctcattcatggtgtttgacaccacagaaattacagatgagaccaacaggagttgcacaggtacgatctactggaattcctaatgggccaacagctgactcatcactgcctacaaactcagtctctggccagcagccacagcttgctctgaccagagtgcctagcgtctctcagcctggagtccgtcctgcctgccctgggcagcctttggccaatggacccttttctgcaggccatgttccctgtagcacatcaagaacgctgggaagtacagacactattttgataggcaataatcatataacaggaagtggaagtaatggaaacgtgccttacctgcagcgaaacgcactcactctacctcataaccgcacaaacctgaccagcagcgcagaggagccgtggaaaaaccaactatctaactccactcaggggcttcacaaaggtcagagttcacattcggcaggtcctaatggtgaacgacctctctcttccactgggccttcccagcatctccaggcagctggctctggtattcagaatcagaacggacatcccaccctgcctagcaattcagtaacacagggggctgctctcaatcacctctcctctcacactgctacctcaggtggacaacaaggcattaccttaaccaaagagagcaagccttcaggaaacatattgacggtgcctgaaacaagcaggcacactggagagacacctaacagcactgccagtgtcgagggacttcctaatcatgtccatcagatgacggcagatgctgtttgcagtcctagccatggagattctaagtcaccaggtttactaagttcagacaatcctcagctctctgccttgttgatgggaaaagccaataacaatgtgggtactggaacctgtgacaaagtcaataacatccacccagctgttcatacaaagactgataactctgttgcctcttcaccatcttcagccatttcaacagcaacaccttctccaaaatccactgagcagacaaccacaaacagtgttaccagccttaacagccctcacagtgggctacacacaattaatggagaagggatggaagaatctcagagccccatgaaaacagatctgcttctggttaaccacaaacctagtccacagatcataccatcaatgtctgtgtccatataccccagctcagcagaagttctgaaggcatgcaggaatctaggtaaaaatggcttatctaacagtagcattttgttggataaatgtccacctccaagaccaccatcttcaccataccctcccttgccaaaggacaagttgaatccacctacacctagtatttacttggaaaataaacgtgatgctttctttcctccattacatcaattttgtacaaatccgaacaaccctgttacagtaatacgtggccttgctggagctcttaagttagacctgggacttttctctactaaaactttggtggaagctaacaatgaacatatggtagaagtgaggacacagttgttgcagccagcagatgaaaactgggatcccactggaacaaagaaaatctggcattgtgaaagtaatagatctcatactacaattgctaaatatgcacagtaccaggcctcctcattccaggaatcattgagagaagaaaatgaaaaaagaagtcatcataaagaccactcagatagtgaatctacatcgtcagataattctgggaggaggaggaaaggaccctttaaaaccataaagtttgggaccaatattgacctatctgatgacaaaaagtggaagttgcagctacatgagctgactaaacttcctgcttttgtgcgtgtcgtatcagcaggaaatcttctaagccatgttggtcataccatattgggcatgaacacagttcaactatacatgaaagttccagggagcagaacaccaggtcatcaggaaaataacaacttctgttcagttaacataaatattggcccaggtgactgtgaatggtttgttgttcctgaaggttactggggtgttctgaatgacttctgtgaaaaaaataatttgaatttcctaatgggttcttggtggcccaatcttgaagatctttatgaagcaaatgttccagtgtataggtttattcagcgacctggagatttggtctggataaatgcaggcactgttcattgggttcaggctattggctggtgcaacaacattgcttggaatgttggtccacttacagcctgccagtataaattggcagtggaacggtacgaatggaacaaattgcaaagtgtgaagtcaatagtacccatggttcatctttcctggaatatggcacgaaatatcaaggtctcagatccaaagctttttgaaatgattaagtattgtcttctaagaactctgaagcaatgtcagacattgagggaagctctcattgctgcaggaaaagagattatatggcatgggcggacaaaagaagaaccagctcattactgtagcatttgtgaagtggaggtttttgatctgctttttgtcactaatgagagtaattcacgaaagacctacatagtacattgccaagattgtgcacgaaaaacaagcggaaacttggaaaactttgtggtgctagaacagtacaaaatggaggacctgatgcaagtctatgaccaatttacattagctcctccattaccatccgcctcatcttga

SEQ ID NO: 16665 - DNA, 6705 bp, Homo sapiens
  source 1..6705: mol_type = unassigned DNA
aggttccccccagggcaacatgccagccccgtagcactgcccaccccacccactgtggtctgttgtaccccactgctggggtggtggttccaatgagacagggcacaccaaactccatctggctgttactgaggcggagacacgggtgatgattggctttctggggagagaggaagtcctgtgattggccagatctctggagcttgccgacgcggtgtgaggacgctcccacggaggccggaattggctgtgaaaggactgaggcagccatctgggggtagcgggcactcttatcagagcggctggagccggaccatcgtcccagagagctggggcagggggccgtgcccaatctccagggctcctggggccactgctgacctggctggatgcatcgggcagtggaccctccaggggcccgcgctgcacgggaagcctttgcccttgggggcctgagctgtgctggggcctggagctcctgcccgcctcatccccctcctcgtagcgcatggctgcctggaggcagatgctcagccagcattgggcagcccccgcttcctgctcccctacccccttcacatggcagtagttctgggcaccccagcaaaccatattatgctccaggggcgcccactccaagacccctccatgggaagctggaatccctgcatggctgtgtgcaggcattgctccgggagccagcccagccagggctttgggaacagcttgggcaactgtacgagtcagagcacgatagtgaggaggccacacgctgctaccacagcgcccttcgatacggaggaagcttcgctgagctggggccccgcattggccgactgcagcaggcccagctctggaactttcatactggctcctgccagcaccgagccaaggtcctgcccccactggagcaagtgtggaacttgctacaccttgagcacaaacggaactatggagccaagcggggaggtcccccggtgaagcgagctgctgaacccccagtggtgcagcctgtgcctcctgcagcactctcaggcccctcaggggaggagggcctcagccctggaggcaagcgaaggagaggctgcaactctgaacagactggccttcccccagggctgccactgcctccaccaccattaccaccaccaccaccaccaccaccaccaccaccaccacccctgcctggcctggctaccagccccccatttcagctaaccaagccagggctgtggagtaccctgcatggagatgcctggggcccagagcgcaagggttcagcacccccagagcgccaggagcagcggcactcgctgcctcacccatatccatacccagctccagcgtacaccgcgcacccccctggccaccggctggtcccggctgctcccccaggcccaggcccccgccccccaggagcagagagccatggctgcctgcctgccacccgtccccccggaagtgaccttagagagagcagagttcagaggtcgcggatggactccagcgtttcaccagcagcaaccaccgcctgcgtgccttacgccccttcccggccccctggcctccccggcaccaccaccagcagcagcagtagcagcagcagcaacactggtctccggggcgtggagccgaacccaggcattcccggcgctgaccattaccaaactcccgcgctggaggtctctcaccatggccgcctggggccctcggcacacagcagtcggaaaccgttcttgggggctcccgctgccactccccacctatccctgccacctggaccttcctcaccccctccacccccctgtccccgcctcttacgccccccaccaccccctgcctggttgaagggtccggcctgccgggcagcccgagaggatggagagatcttagaagagctcttctttgggactgagggacccccccgccctgccccaccacccctcccccatcgcgagggcttcttggggcctccggcctcccgcttttctgtgggcactcaggattctcacacccctcccactcccccaaccccaaccaccagcagtagcaacagcaacagtggcagccacagcagcagccctgctgggcctgtgtcctttcccccaccaccctatctggccagaagtatagacccccttccccggcctcccagcccagcacagaacccccaggacccacctcttgtacccctgactcttgccctgcctccagcccctccttcctcctgccaccaaaatacctcaggaagcttcaggcgcccggagagcccccggcccagggtctccttcccaaagacccccgaggtggggccggggccacccccaggccccctgagtaaagccccccagcctgtgccgcccggggttggggagctgcctgcccgaggccctcgactctttgattttccccccactccgctggaggaccagtttgaggagccagccgaattcaagatcctacctgatgggctggccaacatcatgaagatgctggacgaatccattcgcaaggaagaggaacagcaacaacacgaagcaggcgtggccccccaacccccgctgaaggagccctttgcatctctgcagtctcctttccccaccgacacagcccccaccactactgctcctgctgtcgccgtcaccaccaccaccaccaccaccaccaccaccacggccacccaggaagaggagaagaagccaccaccagccctaccaccaccaccgcctctagccaagttccctccaccctctcagccacagccaccaccacccccaccccccagcccggccagcctgctcaaatccttggcctccgtgctggagggacaaaagtactgttatcgggggactggagcagctgtttccacccggcctgggcccttgcccaccactcagtattcccctggccccccatcaggtgctaccgccctgccgcccacctcagcggcccctagcgcccagggctccccacagccctctgcttcctcgtcatctcagttctctacctcaggcgggccctgggcccgggagcgcagggcgggcgaagagccagtcccgggccccatgacccccacccaaccgcccccacccctatctctgccccctgctcgctctgagtctgaggtgctagaagagatcagccgggcttgcgagacccttgtggagcgggtgggccggagtgccactgacccagccgacccagtggacacagcagagccagcggacagtgggactgagcgactgctgccccccgcacaggccaaggaggaggctggcggggtggcggcagtgtcaggcagctgtaagcggcgacagaaggagcatcagaaggagcatcggcggcacaggcgggcctgtaaggacagtgtgggtcgtcggccccgtgagggcagggcaaaggccaaggccaaggtccccaaagaaaagagccgccgggtgctggggaacctggacctgcagagcgaggagatccagggtcgtgagaagtcccggcccgatcttggcggggcctccaaggccaagccacccacagctccagcccctccatcagctcctgcaccttctgcccagcccacacccccgtcagcctctgtccctggaaagaaggctcgggaggaagccccagggccaccgggtgtcagccgggccgacatgctgaagctgcgctcacttagtgaggggccccccaaggagctgaagatccggctcatcaaggtagagagtggtgacaaggagacctttatcgcctctgaggtggaagagcggcggctgcgcatggcagacctcaccatcagccactgtgctgctgacgtcgtgcgcgccagcaggaatgccaaggtgaaagggaagtttcgagagtcctacctttcccctgcccagtctgtgaaaccgaagatcaacactgaggagaagctgccccgggaaaaactcaacccccctacacccagcatctatctggagagcaaacgggatgccttctcacctgtcctgctgcagttctgtacagaccctcgaaatcccatcacagtgatccggggcctggcgggctccctgcggctcaacttgggcctcttctccaccaagaccctggtggaagcgagtggcgaacacaccgtggaagttcgcacccaggtgcagcagccctcagatgagaactgggatctgacaggcactcggcagatctggccttgtgagagctcccgttcccacaccaccattgccaagtacgcacagtaccaggcctcatccttccaggagtctctgcaggaggagaaggagagtgaggatgaggagtcagaggagccagacagcaccactggaacccctcctagcagcgcaccagacccgaagaaccatcacatcatcaagtttggcaccaacatcgacttgtctgatgctaagcggtggaagccccagctgcaggagctgctgaagctgcccgccttcatgcgggtaacatccacgggcaacatgctgagccacgtgggccacaccatcctgggcatgaacacggtgcagctgtacatgaaggtgcccggcagccgaacgccaggccaccaggagaataacaacttctgctccgtcaacatcaacattggcccaggcgactgcgagtggttcgcggtgcacgagcactactgggagaccatcagcgctttctgtgatcggcacggcgtggactacttgacgggttcctggtggccaatcctggatgatctctatgcatccaatattcctgtgtaccgcttcgtgcagcgacccggagacctcgtgtggattaatgcggggactgtgcactgggtgcaggccaccggctggtgcaacaacattgcctggaacgtggggcccctcaccgcctatcagtaccagctggccctggaacgatacgagtggaatgaggtgaagaacgtcaaatccatcgtgcccatgattcacgtgtcatggaacgtggctcgcacggtcaaaatcagcgaccccgacttgttcaagatgatcaagttctgcctgctgcagtccatgaagcactgccaggtgcaacgcgagagcctggtgcgggcagggaagaaaatcgcttaccagggccgtgtcaaggacgagccagcctactactgcaacgagtgcgatgtggaggtgtttaacatcctgttcgtgacaagtgagaatggcagccgcaacacgtacctggtacactgcgagggctgtgcccggcgccgcagcgcaggcctgcagggcgtggtggtgctggagcagtaccgcactgaggagctggctcaggcctacgacgccttcacgctggtgagggcccggcgggcgcgcgggcagcggaggagggcactggggcaggctgcagggacgggcttcgggagcccggccgcgcctttccctgagcccccgccggctttctccccccaggccccagccagcacgtcgcgatgaggccggacgccccgcccgcctgcctgcccgcgcaaggcgccgcggggccaccagcacatgcctgggctggacctaggtcccgcctgtggccgagaagggggtcgggcccagcccttccaccccattggcagctcccctcacttaatttattaagaaaaactttttttttttttttagcaaatatgaggaaaaaaggaaaaaaaatgggagacgggggagggggctggcagcccctcgcccaccagcgcctcccctcaccgactttggcctttttagcaacagacacaaggaccaggctccggcggcggcgggggtcacatacgggttccctcaccctgccagccgcccgcccgcccggcgcagatgcacgcggctcgtgtatgtacatagacgttacggcagccgaggtttttaatgagattctttctatgggctttacccctcccccggaacctccttttttacttccaatgctagctgtgacccctgtacatgtctctttattcacttggttatgatttgtattttttgttcttttcttgtttttttgtttttaatttataacagtcccactcacctctatttattcatttttgggaaaacccgacctcccacacccccaagccatcctgcccgcccctccagggaccgcccgtcgccgggctctccccgcgccccagtgtgtgtccgggcccggcccgaccgtctccacccgtccgcccgcggctccagccgggttctcatggtgctcaaacccgctcccctcccctacgtcctgcactttctcggaccagtccccccactcccgacccgaccccagccccacctgagggtgagcaactcctgtactgtaggggaagaagtgggaactgaaatggtattttgtaaaaaaaataaataaaataaaaaaattaaaggttttaaagaaagaactatgaggaaaaggaaccccgtccttcccagccccggccaactttaaaaaacacagaccttcacccccacccccttttctttttaagtgtgaaacaacccagggccagggcctcactggggcagggacaccccggggtgagtttctctggggctttattttcgttttgttggttgttttttctccacgctggggctgcggaggggtggggggtttacagtcccgcaccctcgcactgcactgtctctctgccccaggggcagaggggtcttcccaaccctacccctattttcggtgatttttgtgtgagaatattaatattaaaaataaacggag

SEQ ID NO: 16666 - DNA, 5321 bp, Homo sapiens
  source 1..5321: mol_type = unassigned DNA
aggttccccccagggcaacatgccagccccgtagcactgcccaccccacccactgtggtctgttgtaccccactgctggggtggtggttccaatgagacagggcacaccaaactccatctggctgttactgaggcggagacacgggtgatgattggctttctggggagagaggaagtcctgtgattggccagatctctggagcttgccgacgcggtgtgaggacgctcccacggaggccggaattggctgtgaaaggactgaggcagccatctgggggtagcgggcactcttatcagagcggctggagccggaccatcgtcccagagagctggggcagggggccgtgcccaatctccagggctcctggggccactgctgacctggctggatgcatcgggcagtggaccctccaggggcccgcgctgcacgggaagcctttgcccttgggggcctgagctgtgctggggcctggagctcctgcccgcctcatccccctcctcgtagcgcatggctgcctggaggcagatgctcagccagcattgggcagcccccgcttcctgctcccctacccccttcacatggcagtagttctgggcaccccagcaaaccatattatgctccaggggcgcccactccaagacccctccatgggaagctggaatccctgcatggctgtgtgcaggcattgctccgggagccagcccagccagggctttgggaacagcttgggcaactgtacgagtcagagcacgatagtgaggaggccacacgctgctaccacagcgcccttcgatacggaggaagcttcgctgagctggggccccgcattggccgactgcagcaggcccagctctggaactttcatactggctcctgccagcaccgagccaaggtcctgcccccactggagcaagtgtggaacttgctacaccttgagcacaaacggaactatggagccaagcggggaggtcccccggtgaagcgagctgctgaacccccagtggtgcagcctgtgcctcctgcagcactctcaggcccctcaggggaggagggcctcagccctggaggcaagcgaaggagaggctgcaactctgaacagactggccttcccccagggctgccactgcctccaccaccattaccaccaccaccaccaccaccaccaccaccaccaccacccctgcctggcctggctaccagccccccatttcagctaaccaagccagggctgtggagtaccctgcatggagatgcctggggcccagagcgcaagggttcagcacccccagagcgccaggagcagcggcactcgctgcctcacccatatccatacccagctccagcgtacaccgcgcacccccctggccaccggctggtcccggctgctcccccaggcccaggcccccgccccccaggagcagagagccatggctgcctgcctgccacccgtccccccggaagtgaccttagagagagcagagttcagaggtcgcggatggactccagcgtttcaccagcagcaaccaccgcctgcgtgccttacgccccttcccggccccctggcctccccggcaccaccaccagcagcagcagtagcagcagcagcaacactggtctccggggcgtggagccgaacccaggcattcccggcgctgaccattaccaaactcccgcgctggaggtctctcaccatggccgcctggggccctcggcacacagcagtcggaaaccgttcttgggggctcccgctgccactccccacctatccctgccacctggaccttcctcaccccctccacccccctgtccccgcctcttacgccccccaccaccccctgcctggttgaagggtccggcctgccgggcagcccgagaggatggagagatcttagaagagctcttctttgggactgagggacccccccgccctgccccaccacccctcccccatcgcgagggcttcttggggcctccggcctcccgcttttctgtgggcactcaggattctcacacccctcccactcccccaaccccaaccaccagcagtagcaacagcaacagtggcagccacagcagcagccctgctgggcctgtgtcctttcccccaccaccctatctggccagaagtatagacccccttccccggcctcccagcccagcacagaacccccaggacccacctcttgtacccctgactcttgccctgcctccagcccctccttcctcctgccaccaaaatacctcaggaagcttcaggcgcccggagagcccccggcccagggtctccttcccaaagacccccgaggtggggccggggccacccccaggccccctgagtaaagccccccagcctgtgccgcccggggttggggagctgcctgcccgaggccctcgactctttgattttccccccactccgctggaggaccagtttgaggagccagccgaattcaagatcctacctgatgggctggccaacatcatgaagatgctggacgaatccattcgcaaggaagaggaacagcaacaacacgaagcaggcgtggccccccaacccccgctgaaggagccctttgcatctctgcagtctcctttccccaccgacacagcccccaccactactgctcctgctgtcgccgtcaccaccaccaccaccaccaccaccaccaccacggccacccaggaagaggagaagaagccaccaccagccctaccaccaccaccgcctctagccaagttccctccaccctctcagccacagccaccaccacccccaccccccagcccggccagcctgctcaaatccttggcctccgtgctggagggacaaaagtactgttatcgggggactggagcagctgtttccacccggcctgggcccttgcccaccactcagtattcccctggccccccatcaggtgctaccgccctgccgcccacctcagcggcccctagcgcccagggctccccacagccctctgcttcctcgtcatctcagttctctacctcaggcgggccctgggcccgggagcgcagggcgggcgaagagccagtcccgggccccatgacccccacccaaccgcccccacccctatctctgccccctgctcgctctgagtctgaggtgctagaagagatcagccgggcttgcgagacccttgtggagcgggtgggccggagtgccactgacccagccgacccagtggacacagcagagccagcggacagtgggactgagcgactgctgccccccgcacaggccaaggaggaggctggcggggtggcggcagtgtcaggcagctgtaagcggcgacagaaggagcatcagaaggagcatcggcggcacaggcgggcctgtaaggacagtgtgggtcgtcggccccgtgagggcagggcaaaggccaaggccaaggtccccaaagaaaagagccgccgggtgctggggaacctggacctgcagagcgaggagatccagggtcgtgagaagtcccggcccgatcttggcggggcctccaaggccaagccacccacagctccagcccctccatcagctcctgcaccttctgcccagcccacacccccgtcagcctctgtccctggaaagaaggctcgggaggaagccccagggccaccgggtgtcagccgggccgacatgctgaagctgcgctcacttagtgaggggccccccaaggagctgaagatccggctcatcaaggtagagagtggtgacaaggagacctttatcgcctctgaggtggaagagcggcggctgcgcatggcagacctcaccatcagccactgtgctgctgacgtcgtgcgcgccagcaggaatgccaaggtgaaagggaagtttcgagagtcctacctttcccctgcccagtctgtgaaaccgaagatcaacactgaggagaagctgccccgggaaaaactcaacccccctacacccagcatctatctggagagcaaacgggatgccttctcacctgtcctgctgcagttctgtacagaccctcgaaatcccatcacagtgatccggggcctggcgggctccctgcggctcaacttgggcctcttctccaccaagaccctggtggaagcgagtggcgaacacaccgtggaagttcgcacccaggtgcagcagccctcagatgagaactgggatctgacaggcactcggcagatctggccttgtgagagctcccgttcccacaccaccattgccaagtacgcacagtaccaggcctcatccttccaggagtctctgcaggaggagaaggagagtgaggatgaggagtcagaggagccagacagcaccactggaacccctcctagcagcgcaccagacccgaagaaccatcacatcatcaagtttggcaccaacatcgacttgtctgatgctaagcggtggaagccccagctgcaggagctgctgaagctgcccgccttcatgcgggtaacatccacgggcaacatgctgagccacgtgggccacaccatcctgggcatgaacacggtgcagctgtacatgaaggtgcccggcagccgaacgccaggccaccaggagaataacaacttctgctccgtcaacatcaacattggcccaggcgactgcgagtggttcgcggtgcacgagcactactgggagaccatcagcgctttctgtgatcggcacggcgtggactacttgacgggttcctggtggccaatcctggatgatctctatgcatccaatattcctgtgtaccgcttcgtgcagcgacccggagacctcgtgtggattaatgcggggactgtgcactgggtgcaggccaccggctggtgcaacaacattgcctggaacgtggggcccctcaccgcctatcagtaccagctggccctggaacgatacgagtggaatgaggtgaagaacgtcaaatccatcgtgcccatgattcacgtgtcatggaacgtggctcgcacggtcaaaatcagcgaccccgacttgttcaagatgatcaagttctgcctgctgcagtccatgaagcactgccaggtgcaacgcgagagcctggtgcgggcagggaagaaaatcgcttaccagggccgtgtcaaggacgagccagcctactactgcaacgagtgcgatgtggaggtgtttaacatcctgttcgtgacaagtgagaatggcagccgcaacacgtacctggtacactgcgagggctgtgcccggcgccgcagcgcaggcctgcagggcgtggtggtgctggagcagtaccgcactgaggagctggctcaggcctacgacgccttcacgctggccccagccagcacgtcgcgatga

SEQ ID NO: 16667 - DNA, 5060 bp, Homo sapiens
  source 1..5060: mol_type = unassigned DNA
ggccggacgcctccgcgttacgggatgaattaacggcgggttccgcacggaggttgtgacccctacggagccccagcttgcccacgcaccccactcggcgtcgcgcggcgtgccctgcttgtcacaggtgggaggctggaactatcaggctgaaaaacagagtgggtactctcttctgggaagctggcaacaaatggatgatgtgatatatgcattccaggggaagggaaattgtggtgcttctgaacccatggtcaattaacgaggcagtttctagctactgcacgtacttcataaagcaggactctaaaagctttggaatcatggtgtcatggaaagggatttactttatactgactctgttttggggaagcttttttggaagcattttcatgctgagtccctttttacctttgatgtttgtaaacccatcttggtatcgctggatcaacaaccgccttgtggcaacatggctcaccctacctgtggcattattggagaccatgtttggtgtaaaagtgattataactggggatgcatttgttcctggagaaagaagtgtcattatcatgaaccatcggacaagaatggactggatgttcctgtggaattgcctgatgcgatatagctacctcagattggagaaaatttgcctcaaagcgagtctcaaaggtgttcctggatttggttgggccatgcaggctgctgcctatatcttcattcataggaaatggaaggatgacaagagccatttcgaagacatgattgattacttttgtgatattcacgaaccacttcaactcctcatattcccagaagggactgatctcacagaaaacagcaagtctcgaagtaatgcatttgctgaaaaaaatggacttcagaaatatgaatatgttttacatccaagaactacaggctttacttttgtggtagaccgtctaagagaaggtaagaaccttgatgctgtccatgatatcactgtggcgtatcctcacaacattcctcaatcagagaagcacctcctccaaggagactttcccagggaaatccactttcacgtccaccggtatccaatagacaccctccccacatccaaggaggaccttcaactctggtgccacaaacggtgggaagagaaagaagagaggctgcgttccttctatcaaggggagaagaatttttattttaccggacagagtgtcattccaccttgcaagtctgaactcagggtccttgtggtcaaattgctctctatactgtattggaccctgttcagccctgcaatgtgcctactcatatatttgtacagtcttgttaagtggtattttataatcaccattgtaatctttgtgctgcaagagagaatatttggtggactggagatcatagaacttgcatgttaccgacttttacacaaacagccacatttaaattcaaagaaaaatgagtaagattataaggtttgccatgtgaaaacctagagcatattttggaaatgttctaaacctttctaagctcagatgcatttttgcatgactatgtcgaatatttcttactgccatcattatttgttaaagatattttgcacttaattttgtgggaaaaatattgctacaattttttttaatctctgaatgtaatttcgatactgtgtacatagcagggagtgatcggggtgaaataacttgggccagaatattattaaacaatcatcaggcttttagcgacaaggaacacacacatttttcttaaaggcccaatcctaacagactccccgtaccagaggcagatctggaactcgtcaacaacagcccggatcacatgctgttactggactgcccaggtcacctcattgaggtgagcgctgtccctccaggtactcaggcaggtggtgcccaggctccctcccttggcgtccttcttcctgcgccaaacccatctcatccttaagatcagaaaatggaaccccctttgtcgtgaaaccgatcaagcattttgacaggaagcccttcattattcataacattgtatgctgaccaagacgtcagaagaccacctgtgcccttttctctcgtggaagataaaacctggactcagggagcaaccacaggctctccactttgaaactttagtttgaattttaaaagataggaagtaatacagtttaagttcctttctcacactcagtattgcatgcttagtgctggttttcttacaacattttggcaggtgtagctttttctgttaaaaatggtatacatgaagtcacatacttttttaaaggaacactcagaacattctgtcattccagtcagaaactgtcttttgaaatatttctttacaacctaccaaaaaaggaaggttgttttttctacatgtgcttgggtatctaacatctaccattaaaacaacaaatggcttgcagacagggcagtaatggtttatcctaaattactcaaccccttgtagccttgacaaattttaccttaaaaccaaaatgaaacacaaaaattaatccttaataatgatagcaagtgatctttctttttagttttagccttcctttttcaatagtaatatttaaacccacttttgaccaattgtttgcccaaatattcttgtcatttggagtcagtggaaaatccagcacaccaagcaccagtcttcttctgaggcaaaagaaaagtgttgtcattttcactctgttggagctgcacacttttttttctttttttttttctttttttttttgtcgtgtaagaaggatgctggtcagagctgcagaaaatatgaggcaattaaaagtctttagctgttagcaaacctgttagttttacttctgcattgaaccagcctcagaagctacttactgctttatgtactctttgggcattaatgccttctctgtaattatatctcgtttttgcttgacagtgacctacccaataattgcatcgtgcattgccatgaaaggtaaacacattgtgaactgaacttaccaagcagattctgtgagaaagcactggttgaggctgaacactgttgacacatcatttttattggaagagtattaactggtgcctcttctgaaacacaccaacccatattcctctgctcccccaaagctgtttctgatcctgctgggagcaactaactagttattatgcacatctgctccagacccagctctttaacttcatggttttacagcttgttttttctttttcttttctttttttttttttttttttaaaaaagcacctttttttgttgtttccccttaataaaagaggtttctaatttatgtttctctaagatttcctttggttgtatttagaaacacaaatagttttataatcaggattgcatttgtgctgggtaaaagaggagagctgtgctttctaccccaaagttgttggtaatggagccggtctgcccttcctacaaactcaagaggctcattgttcaaggtgtaacaacatttaattgcatgtcctctaacgctttgaaacctttagagggaagatcctcattttttacaattttgttccttttcatcatagaaaacatgtttaagataaaatacaaactttacctaccccaaattcataaagtacatttagtgctgtatagcactaaaacttagagatacagacactgtacttactttttaagaattagagacagtaactccaaaaataattgtccttttttctttctttctttttttacaataaggctcttgaaaattgtcattacttgtgttttcctatacattcatctgtgtgaaagcctttttcttctttgatttaaaaaaattaactatacagttaatggtttagaacttagaactacttagaattaatgctaaagtgtcaggaagaaattaatttagcttcaataattgtgactggcctcaggaattctcccttccacacctgcccacctcacctcactgcaccgcaccgcaccagagccagagcagctgcttgtctgcagcaggacacagttcctacatacgtttcagttctttcatggtaagctcaatggactttgaattgtttacagtgctgtatgtccaattgttaaatgtaccattctgaacgatgttaaagcaagtgtggtttatttatggcatgaaccatgtaacttgaaatatgaacttacaaggaggggcactcattaggtaacaagttcttacaccaaacttccttgatgaaataagccaaaataatcctaaaattcattagaagaacttgataaaagactcaaataaatgttagaaagagcccgtaattttaggactcctataaaattcttccttgtttgttaatgctattaaaactcagattcaagggaaataccagcttccacttgagtcactttgaaatagttaattcaacagcaccatgttagaaatatattggcagccaagactctgaactctgcagaaacatttgtttcacccagacttcaaactctagccctgactatgatgcccctgtgtgcatttacaataaagactccaacggagggagcctgttggtgttaaattgtttacatttctttatacaaataatgtgctttcagtgccttagttacagctccctttctgtttcttgttccaaggattctgtagtatgtagtgtgtttcttaggtaaagtctctttttgctactgaaagggaaatggtctctaaacactggtcactgtagcaggtaaacactactctaacgtggagaaatgagcttcatgctgaggtagtggttgccttagagctgttatttatgctgtagaaaacgaaaatggttttgctacctgataagcttcagattagatatagccctaaagttatcctgtacctgcattaaattttcattttagaagagaatcttggttttggtaattcatttttttttaagatcattatgtgcaaaacaccaagttttaaaaataactcacagaatggccttagttttcaatgtctgatggtatatttgtgagttgtgttatctgtaatatacatcccagaataaaggagtgaattaaatagttta

SEQ ID NO: 16668 - DNA, 2774 bp, Homo sapiens
  source 1..2774: mol_type = unassigned DNA
attactagggcgacggccggacgcctccgcgttacgggatgaattaacggcgggttccgcacggaggttgtgacccctacggagccccagcttgcccacgcaccccactcggcgtcgcgcggcgtgccctgcttgtcacaggctgaaaaacagagtgggtactctcttctgggaagctggcaacaaatggatgatgtgatatatgcattccaggggaagggaaattgtggtgcttctgaacccatggtcaattaacgaggcagtttctagctactgcacgtacttcataaagcaggactctaaaagctttggaatcatggtgtcatggaaagggatttactttatactgactctgttttggggaagcttttttggaagcattttcatgctgagtccctttttacctttgatgtttgtaaacccatcttggtatcgctggatcaacaaccgccttgtggcaacatggctcaccctacctgtggcattattggagaccatgtttggtgtaaaagtgattataactggggatgcatttgttcctggagaaagaagtgtcattatcatgaaccatcggacaagaatggactggatgttcctgtggaattgcctgatgcgatatagctacctcagattggagaaaatttgcctcaaagcgagtctcaaaggtgttcctggatttggttgggccatgcaggctgctgcctatatcttcattcataggaaatggaaggatgacaagagccatttcgaagacatgattgattacttttgtgatattcacgaaccacttcaactcctcatattcccagaagggactgatctcacagaaaacagcaagtctcgaagtaatgcatttgctgaaaaaaatggacttcagaaatatgaatatgttttacatccaagaactacaggctttacttttgtggtagaccgtctaagagaaggcaggaggcagagcgagggaagtaaaggaccacttcaaggagaactacaaatcactgctcaaggaaatcagagaggacacaaacaaatggaaaaacactccatgctcatggattggaagaatcaatatcgtgaaattggccatactgcccaaagcaatttacagattcaatgctattcccattaaactgccgttgacattcttcatagaattagaaaaaactcttaaaattcatatggaaccaacaaaaagcccatatagccaagacaatcttaagcaaaaagaacacagctggaggcatcacattacctgacttcaaactatactacagggctacagtaaccaaaatagcatggtactgttacaaaaacagacacatagaccaatggaacagaatagagaactcagaaataagtccgtgcaactacagccatctgatctttgacaaacctgacaaaaacaagcaatggggaaaggattccctatttaataaatggtgctgggagaactggctagccatatgcagaaaactgaaactggaccccttccttacaccttatgcaaaaattaactcaagatggattaaagacttaaatgaaaaacccaaaactataaaaaccctagaaaaaaatctaggcaataccattcaggacataagcatgggcaaagatttcatgatgaagatgacaaaagcaattgcaaccaaagcaaaaattgacaaatgggatctgattaaactaaagggcttctgcacaggaaaagaaactatcatcagagcaaacagacattctacagaaagggagaaaatttttgcaatctatccatctgacaaaggtctaatattcagagtcaacaagaaactaaaacaaatttacaagaaaaaacaaccccattaaaaaagtgggcaagggacatgaacagacacttctcaaaagaagacatttatatggctaataaacttatgaaaaaaagctcaacatcactgatcatcagagaaatgcaaatcaaaaccacaatgagataccatctcacaccagtccaaatggcaattatttaaaagtcatgaaacaacagatgctggcaaggctgtggagcgagaggaatgcttttacattgttggtgggaatgtatattagttcaaccattgtgtagctgggactacaggcgtccactaccacgcccggctaatttttttgtatttttagtagagacagggtttcaccatgttagccaggatggtctcgatctcctgacctcatgatccacccgcctcagcttcccaaagtgctgggattacaggcatgagccaccgcgcccagccaaggaaatatctttatagatgtcttcttgtgtacctgtgtaagaattcctttgggatatacagtcatgcaacacataatgacgttctagttagtggcaaaccacatatatgatggcagtctcataagatcataatggagctagaaaattcctatcacctggtgacatcatcacatgtttgtgatgatgctgatgtaaaccactatgctaccagttgtgtaaaacagtagcacataaaattatataccgtaatgataatgactatgttactgatttacatagttactgtactatactttttattgttacttgagtgtattccttctgcttatagtaaaagcagtaaaacagccccaggcaggtccttcaggaggtattccagaagaaggcattgctgtcataggacatgacagctccatgcttgttattacctctgaagaccttgcagtgagacaagatgtggaggtgaagacagtgatattgatgatcctgaccctgtgtaggcctaggc

SEQ ID NO: 16669 - DNA, 1136 bp, Homo sapiens
  source 1..1136: mol_type = unassigned DNA
ggccggacgcctccgcgttacgggatgaattaacggcgggttccgcacggaggttgtgacccctacggagccccagcttgcccacgcaccccactcggcgtcgcgcggcgtgccctgcttgtcacaggtgggaggctggaactatcaggctgaaaaacagagtgggtactctcttctgggaagctggcaacaaatggatgatgtgatatatgcattccaggggaagggaaattgtggtgcttctgaacccatggtcaattaacgaggcagtttctagctactgcacgtacttcataaagcaggactctaaaagctttggaatcatggtgtcatggaaagggatttactttatactgactctgttttggggaagcttttttggaagcattttcatgctgagtccctttttacctttgatgtttgtaaacccatcttggtatcgctggatcaacaaccgccttgtggcaacatggctcaccctacctgtggcattattggagaccatgtttggtgtaaaagtgattataactggggatgcatttgttcctggagaaagaagtgtcattatcatgaaccatcggacaagaatggactggatgttcctgtggaattgcctgatgcgatatagctacctcagattggagaaaatttgcctcaaagcgagtctcaaaggtgttcctggatttggttgggccatgcaggctgctgcctatatcttcattcataggaaatggaaggatgacaagagccatttcgaagacatgattgattacttttgtgatattcacgaaccacttcaactcctcatattcccagaagggactgatctcacagaaaacagcaagtctcgaagtaatgcatttgctgaaaaaaatggacttcagaaatatgaatatgttttacatccaagaactacaggctttacttttgtggtagaccgtctaagagaaggcaggaggcagagcgagggaagtaaaggaccacttcaaggagaactacaaatcactgctcaaggaaatcagagaggacacaaacaaatggaaaaacactccatgctcatggattggaagaatcaatatcgtgaaattggccatactgcccaaagcaatttacagattcaatgctattcccattaa

SEQ ID NO: 16670 - DNA, 4888 bp, Homo sapiens
  source 1..4888: mol_type = unassigned DNA
gggacgcattactagggcgacggccggacgcctccgcgttacgggatgaattaacggcgggttccgcacggaggttgtgacccctacggagccccagcttgcccacgcaccccactcggcgtcgcgcggcgtgccctgcttgtcacagaatcatggtgtcatggaaagggatttactttatactgactctgttttggggaagcttttttggaagcattttcatgctgagtccctttttacctttgatgtttgtaaacccatcttggtatcgctggatcaacaaccgccttgtggcaacatggctcaccctacctgtggcattattggagaccatgtttggtgtaaaagtgattataactggggatgcatttgttcctggagaaagaagtgtcattatcatgaaccatcggacaagaatggactggatgttcctgtggaattgcctgatgcgatatagctacctcagattggagaaaatttgcctcaaagcgagtctcaaaggtgttcctggatttggttgggccatgcaggctgctgcctatatcttcattcataggaaatggaaggatgacaagagccatttcgaagacatgattgattacttttgtgatattcacgaaccacttcaactcctcatattcccagaagggactgatctcacagaaaacagcaagtctcgaagtaatgcatttgctgaaaaaaatggacttcagaaatatgaatatgttttacatccaagaactacaggctttacttttgtggtagaccgtctaagagaaggtaagaaccttgatgctgtccatgatatcactgtggcgtatcctcacaacattcctcaatcagagaagcacctcctccaaggagactttcccagggaaatccactttcacgtccaccggtatccaatagacaccctccccacatccaaggaggaccttcaactctggtgccacaaacggtgggaagagaaagaagagaggctgcgttccttctatcaaggggagaagaatttttattttaccggacagagtgtcattccaccttgcaagtctgaactcagggtccttgtggtcaaattgctctctatactgtattggaccctgttcagccctgcaatgtgcctactcatatatttgtacagtcttgttaagtggtattttataatcaccattgtaatctttgtgctgcaagagagaatatttggtggactggagatcatagaacttgcatgttaccgacttttacacaaacagccacatttaaattcaaagaaaaatgagtaagattataaggtttgccatgtgaaaacctagagcatattttggaaatgttctaaacctttctaagctcagatgcatttttgcatgactatgtcgaatatttcttactgccatcattatttgttaaagatattttgcacttaattttgtgggaaaaatattgctacaattttttttaatctctgaatgtaatttcgatactgtgtacatagcagggagtgatcggggtgaaataacttgggccagaatattattaaacaatcatcaggcttttagcgacaaggaacacacacatttttcttaaaggcccaatcctaacagactccccgtaccagaggcagatctggaactcgtcaacaacagcccggatcacatgctgttactggactgcccaggtcacctcattgaggtgagcgctgtccctccaggtactcaggcaggtggtgcccaggctccctcccttggcgtccttcttcctgcgccaaacccatctcatccttaagatcagaaaatggaaccccctttgtcgtgaaaccgatcaagcattttgacaggaagcccttcattattcataacattgtatgctgaccaagacgtcagaagaccacctgtgcccttttctctcgtggaagataaaacctggactcagggagcaaccacaggctctccactttgaaactttagtttgaattttaaaagataggaagtaatacagtttaagttcctttctcacactcagtattgcatgcttagtgctggttttcttacaacattttggcaggtgtagctttttctgttaaaaatggtatacatgaagtcacatacttttttaaaggaacactcagaacattctgtcattccagtcagaaactgtcttttgaaatatttctttacaacctaccaaaaaaggaaggttgttttttctacatgtgcttgggtatctaacatctaccattaaaacaacaaatggcttgcagacagggcagtaatggtttatcctaaattactcaaccccttgtagccttgacaaattttaccttaaaaccaaaatgaaacacaaaaattaatccttaataatgatagcaagtgatctttctttttagttttagccttcctttttcaatagtaatatttaaacccacttttgaccaattgtttgcccaaatattcttgtcatttggagtcagtggaaaatccagcacaccaagcaccagtcttcttctgaggcaaaagaaaagtgttgtcattttcactctgttggagctgcacacttttttttctttttttttttctttttttttttgtcgtgtaagaaggatgctggtcagagctgcagaaaatatgaggcaattaaaagtctttagctgttagcaaacctgttagttttacttctgcattgaaccagcctcagaagctacttactgctttatgtactctttgggcattaatgccttctctgtaattatatctcgtttttgcttgacagtgacctacccaataattgcatcgtgcattgccatgaaaggtaaacacattgtgaactgaacttaccaagcagattctgtgagaaagcactggttgaggctgaacactgttgacacatcatttttattggaagagtattaactggtgcctcttctgaaacacaccaacccatattcctctgctcccccaaagctgtttctgatcctgctgggagcaactaactagttattatgcacatctgctccagacccagctctttaacttcatggttttacagcttgttttttctttttcttttctttttttttttttttttttaaaaaagcacctttttttgttgtttccccttaataaaagaggtttctaatttatgtttctctaagatttcctttggttgtatttagaaacacaaatagttttataatcaggattgcatttgtgctgggtaaaagaggagagctgtgctttctaccccaaagttgttggtaatggagccggtctgcccttcctacaaactcaagaggctcattgttcaaggtgtaacaacatttaattgcatgtcctctaacgctttgaaacctttagagggaagatcctcattttttacaattttgttccttttcatcatagaaaacatgtttaagataaaatacaaactttacctaccccaaattcataaagtacatttagtgctgtatagcactaaaacttagagatacagacactgtacttactttttaagaattagagacagtaactccaaaaataattgtccttttttctttctttctttttttacaataaggctcttgaaaattgtcattacttgtgttttcctatacattcatctgtgtgaaagcctttttcttctttgatttaaaaaaattaactatacagttaatggtttagaacttagaactacttagaattaatgctaaagtgtcaggaagaaattaatttagcttcaataattgtgactggcctcaggaattctcccttccacacctgcccacctcacctcactgcaccgcaccgcaccagagccagagcagctgcttgtctgcagcaggacacagttcctacatacgtttcagttctttcatggtaagctcaatggactttgaattgtttacagtgctgtatgtccaattgttaaatgtaccattctgaacgatgttaaagcaagtgtggtttatttatggcatgaaccatgtaacttgaaatatgaacttacaaggaggggcactcattaggtaacaagttcttacaccaaacttccttgatgaaataagccaaaataatcctaaaattcattagaagaacttgataaaagactcaaataaatgttagaaagagcccgtaattttaggactcctataaaattcttccttgtttgttaatgctattaaaactcagattcaagggaaataccagcttccacttgagtcactttgaaatagttaattcaacagcaccatgttagaaatatattggcagccaagactctgaactctgcagaaacatttgtttcacccagacttcaaactctagccctgactatgatgcccctgtgtgcatttacaataaagactccaacggagggagcctgttggtgttaaattgtttacatttctttatacaaataatgtgctttcagtgccttagttacagctccctttctgtttcttgttccaaggattctgtagtatgtagtgtgtttcttaggtaaagtctctttttgctactgaaagggaaatggtctctaaacactggtcactgtagcaggtaaacactactctaacgtggagaaatgagcttcatgctgaggtagtggttgccttagagctgttatttatgctgtagaaaacgaaaatggttttgctacctgataagcttcagattagatatagccctaaagttatcctgtacctgcattaaattttcattttagaagagaatcttggttttggtaattcatttttttttaagatcattatgtgcaaaacaccaagttttaaaaataactcacagaatggccttagttttcaatgtctgatggtatatttgtgagttgtgttatctgtaatatacatcccagaataaaggagtgaattaaatagttt

SEQ ID NO: 16671 - DNA, 4883 bp, Homo sapiens
  source 1..4883: mol_type = unassigned DNA
gggacgcattactagggcgacggccggacgcctccgcgttacgggatgaattaacggcgggttccgcacggaggttgtgacccctacggagccccagcttgcccacgcaccccactcggcgtcgcgcggcgtgccctgcttgtcacagaatcatggtgtcatggaaagggatttactttatactgactctgttttggggaagcttttttggaagcattttcatgctgagtccctttttacctttgatgtttgtaaacccatcttggtatcgctggatcaacaaccgccttgtggcaacatggctcaccctacctgtggcattattggagaccatgtttggtgtaaaagtgattataactggggatgcatttgttcctggagaaagaagtgtcattatcatgaaccatcggacaagaatggactggatgttcctgtggaattgcctgatgcgatatagctacctcagattggagaaaatttgcctcaaagcgagtctcaaaggtgttcctggatttggttgggccatgcaggctgctgcctatatcttcattcataggaaatggaaggatgacaagagccatttcgaagacatgattgattacttttgtgatattcacgaaccacttcaactcctcatattcccagaagggactgatctcacagaaaacagcaagtctcgaagtaatgcatttgctgaaaaaaatggacttcagaaatatgaatatgttttacatccaagaactacaggctttacttttgtggtagaccgtctaagagaaggtaagaaccttgatgctgtccatgatatcactgtggcgtatcctcacaacattcctcaatcagagaagcacctcctccaaggagactttcccagggaaatccactttcacgtccaccggtatccaatagacaccctccccacatccaaggaggaccttcaactctggtgccacaaacggtgggaagagaaagaagagaggctgcgttccttctatcaaggggagaagaatttttattttaccggacagagtgtcattccaccttgcaagtctgaactcagggtccttgtggtcaaactctatactgtattggaccctgttcagccctgcaatgtgcctactcatatatttgtacagtcttgttaagtggtattttataatcaccattgtaatctttgtgctgcaagagagaatatttggtggactggagatcatagaacttgcatgttaccgacttttacacaaacagccacatttaaattcaaagaaaaatgagtaagattataaggtttgccatgtgaaaacctagagcatattttggaaatgttctaaacctttctaagctcagatgcatttttgcatgactatgtcgaatatttcttactgccatcattatttgttaaagatattttgcacttaattttgtgggaaaaatattgctacaattttttttaatctctgaatgtaatttcgatactgtgtacatagcagggagtgatcggggtgaaataacttgggccagaatattattaaacaatcatcaggcttttagcgacaaggaacacacacatttttcttaaaggcccaatcctaacagactccccgtaccagaggcagatctggaactcgtcaacaacagcccggatcacatgctgttactggactgcccaggtcacctcattgaggtgagcgctgtccctccaggtactcaggcaggtggtgcccaggctccctcccttggcgtccttcttcctgcgccaaacccatctcatccttaagatcagaaaatggaaccccctttgtcgtgaaaccgatcaagcattttgacaggaagcccttcattattcataacattgtatgctgaccaagacgtcagaagaccacctgtgcccttttctctcgtggaagataaaacctggactcagggagcaaccacaggctctccactttgaaactttagtttgaattttaaaagataggaagtaatacagtttaagttcctttctcacactcagtattgcatgcttagtgctggttttcttacaacattttggcaggtgtagctttttctgttaaaaatggtatacatgaagtcacatacttttttaaaggaacactcagaacattctgtcattccagtcagaaactgtcttttgaaatatttctttacaacctaccaaaaaaggaaggttgttttttctacatgtgcttgggtatctaacatctaccattaaaacaacaaatggcttgcagacagggcagtaatggtttatcctaaattactcaaccccttgtagccttgacaaattttaccttaaaaccaaaatgaaacacaaaaattaatccttaataatgatagcaagtgatctttctttttagttttagccttcctttttcaatagtaatatttaaacccacttttgaccaattgtttgcccaaatattcttgtcatttggagtcagtggaaaatccagcacaccaagcaccagtcttcttctgaggcaaaagaaaagtgttgtcattttcactctgttggagctgcacacttttttttctttttttttttctttttttttttgtcgtgtaagaaggatgctggtcagagctgcagaaaatatgaggcaattaaaagtctttagctgttagcaaacctgttagttttacttctgcattgaaccagcctcagaagctacttactgctttatgtactctttgggcattaatgccttctctgtaattatatctcgtttttgcttgacagtgacctacccaataattgcatcgtgcattgccatgaaaggtaaacacattgtgaactgaacttaccaagcagattctgtgagaaagcactggttgaggctgaacactgttgacacatcatttttattggaagagtattaactggtgcctcttctgaaacacaccaacccatattcctctgctcccccaaagctgtttctgatcctgctgggagcaactaactagttattatgcacatctgctccagacccagctctttaacttcatggttttacagcttgttttttctttttcttttctttttttttttttttttttaaaaaagcacctttttttgttgtttccccttaataaaagaggtttctaatttatgtttctctaagatttcctttggttgtatttagaaacacaaatagttttataatcaggattgcatttgtgctgggtaaaagaggagagctgtgctttctaccccaaagttgttggtaatggagccggtctgcccttcctacaaactcaagaggctcattgttcaaggtgtaacaacatttaattgcatgtcctctaacgctttgaaacctttagagggaagatcctcattttttacaattttgttccttttcatcatagaaaacatgtttaagataaaatacaaactttacctaccccaaattcataaagtacatttagtgctgtatagcactaaaacttagagatacagacactgtacttactttttaagaattagagacagtaactccaaaaataattgtccttttttctttctttctttttttacaataaggctcttgaaaattgtcattacttgtgttttcctatacattcatctgtgtgaaagcctttttcttctttgatttaaaaaaattaactatacagttaatggtttagaacttagaactacttagaattaatgctaaagtgtcaggaagaaattaatttagcttcaataattgtgactggcctcaggaattctcccttccacacctgcccacctcacctcactgcaccgcaccgcaccagagccagagcagctgcttgtctgcagcaggacacagttcctacatacgtttcagttctttcatggtaagctcaatggactttgaattgtttacagtgctgtatgtccaattgttaaatgtaccattctgaacgatgttaaagcaagtgtggtttatttatggcatgaaccatgtaacttgaaatatgaacttacaaggaggggcactcattaggtaacaagttcttacaccaaacttccttgatgaaataagccaaaataatcctaaaattcattagaagaacttgataaaagactcaaataaatgttagaaagagcccgtaattttaggactcctataaaattcttccttgtttgttaatgctattaaaactcagattcaagggaaataccagcttccacttgagtcactttgaaatagttaattcaacagcaccatgttagaaatatattggcagccaagactctgaactctgcagaaacatttgtttcacccagacttcaaactctagccctgactatgatgcccctgtgtgcatttacaataaagactccaacggagggagcctgttggtgttaaattgtttacatttctttatacaaataatgtgctttcagtgccttagttacagctccctttctgtttcttgttccaaggattctgtagtatgtagtgtgtttcttaggtaaagtctctttttgctactgaaagggaaatggtctctaaacactggtcactgtagcaggtaaacactactctaacgtggagaaatgagcttcatgctgaggtagtggttgccttagagctgttatttatgctgtagaaaacgaaaatggttttgctacctgataagcttcagattagatatagccctaaagttatcctgtacctgcattaaattttcattttagaagagaatcttggttttggtaattcatttttttttaagatcattatgtgcaaaacaccaagttttaaaaataactcacagaatggccttagttttcaatgtctgatggtatatttgtgagttgtgttatctgtaatatacatcccagaataaaggagtgaattaaatagttt

SEQ ID NO: 16672 - DNA, 658 bp, Homo sapiens
  source 1..658: mol_type = unassigned DNA
gaggctggaactatcaggtggggttacggcgcgaggaaaatggcggcggccgggggatctcagaggtgcaggaaggggagctgcagcccgggcttttcctcctgagccatggaccttccccgggccgcgacctcgggctgaaaaacagagtgggtactctcttctgggaagctggcaacaaatggatgatgtgatatatgcattccaggggaagggaaattgtggtgcttctgaacccatggtcaattaacgaggcagtttctagctactgcacgtacttcataaagcaggactctaaaagctttggaatcatggtgtcatggaaagggatttactttatactgactctgttttggggaagcttttttggaagcattttcatgctgagtccctttttacctttgatgtttgtaaacccatcttggtatcgctggatcaacaaccgccttgtggcaacatggctcaccctacctgtggcattattggagaccatgtttggtgtaaaagtgattataactggggatgcatttgttcctggagaaagaagtgtcattatcatgaaccatcggacaagaatggactggatgttcctgtggaattgcctgatgcgatatagctacctcagattggagaaaatttgcctcaaagcgagtctcaa

SEQ ID NO: 16673 - DNA, 1862 bp, Homo sapiens
  source 1..1862: mol_type = unassigned DNA
gttacgggatgaattaacggcgggttccgcacggaggttgtgacccctacggagccccagcttgcccacgcaccccactcggcgtcgcgcggcgtgccctgcttgtcacaggctgaaaaacagagtgggtactctcttctgggaagctggcaacaaatggatgatgtgatatatgcattccaggggaagggaaattgtggtgcttctgaacccatggtcaattaacgaggcagtttctagctactgcacgtacttcataaagcaggactctaaaagctttggccactccacatcacttgaattatctcctgatttccacctctgctcagatccgccactgcattcgattcttacaggaacgcaggccctataactgtgcttgcaggggatctaggttgcatgttccttaggagaatctaatgcctgatgatctgtcactgtctcctatcatccccagataggaccatctagtctcaggaaaacaagctcagaacgctcgccgattctaccattatgaatcatggtgtcatggaaagggatttactttatactgactctgttttggggaagcttttttggaagcattttcatgctgagtccctttttacctttgatgtttgtaaacccatcttggtatcgctggatcaacaaccgccttgtggcaacatggctcaccctacctgtggcattattggagaccatgtttggtgtaaaagtgattataactggggatgcatttgttcctggagaaagaagtgtcattatcatgaaccatcggacaagaatggactggatgttcctgtggaattgcctgatgcgatatagctacctcagattggagaaaatttgcctcaaagcgagtctcaaaggtgttcctggatttggttgggccatgcaggctgctgcctatatcttcattcataggaaatggaaggatgacaagagccatttcgaagacatgattgattacttttgtgatattcacgaaccacttcaactcctcatattcccagaagggactgatctcacagaaaacagcaagtctcgaagtaatgcatttgctgaaaaaaatggacttcagaaatatgaatatgttttacatccaagaactacaggctttacttttgtggtagaccgtctaagagaaggtaagaaccttgatgctgtccatgatatcactgtggcgtatcctcacaacattcctcaatcagagaagcacctcctccaaggagactttcccagggaaatccactttcacgtccaccggtatccaatagacaccctccccacatccaaggaggaccttcaactctggtgccacaaacggtgggaagagaaagaagagaggctgcgttccttctatcaaggggagaagaatttttattttaccggacagagtgtcattccaccttgcaagtctgaactcagggtccttgtggtcaaattgctctctatactgtattggaccctgttcagccctgcaatgtgcctactcatatatttgtacagtcttgttaagtggtattttataatcaccattgtaatctttgtgctgcaagagagaatatttggtggactggagatcatagaacttgcatgttaccgacttttacacaaacagccacatttaaattcaaagaaaaatgagtaagattataaggtttgccatgtgaaaacctagagcatattttggaaatgttctaaacctttctaagctcagatgcatttttgcatgactatgtcgaatatttcttactgccatcattatttgttaaagatattttgcacttaattttgtgggaaaaatattgctacaattttttttaatctctgaatgtaatttcgatactgtgtacatagca

SEQ ID NO: 16674 - DNA, 2687 bp, Homo sapiens
  source 1..2687: mol_type = unassigned DNA
acggcgcgctgggctcacactgtcccgccgcggacgggctttgtggttgggggcgcgcgtgcgagtgccagtgagagtgtgggtgcgcgctgtgggccgcggcgcgggtgggtggccgtgcgttcttgcgagccggcctgcaggaggcgaggctcccctggcctcccgcacccagcggcggaccgagcccctggagggaagttgccgcagccgcccgggccgccggccctcctgtcccgcgccaggtacacagcttctcctagcatgacttcgatctgatcagcaaacaagaaaatttgtctcccgtagttctggggcgtgttcaccacctacaaccacagagctgtcatggctgccatctctacttccatccctgtaatttcacagccccagttcacagccatgaatgaaccacagtgcttctacaacgagtccattgccttcttttataaccgaagtggaaagcatcttgccacagaatggaacacagtcagcaagctggtgatgggacttggaatcactgtttgtatcttcatcatgttggccaacctattggtcatggtggcaatctatgtcaaccgccgcttccattttcctatttattacctaatggctaatctggctgctgcagacttctttgctgggttggcctacttctatctcatgttcaacacaggacccaatactcggagactgactgttagcacatggctccttcgtcagggcctcattgacaccagcctgacggcatctgtggccaacttactggctattgcaatcgagaggcacattacggttttccgcatgcagctccacacacggatgagcaaccggcgggtagtggtggtcattgtggtcatctggactatggccatcgttatgggtgctatacccagtgtgggctggaactgtatctgtgatattgaaaattgttccaacatggcacccctctacagtgactcttacttagtcttctgggccattttcaacttggtgacctttgtggtaatggtggttctctatgctcacatctttggctatgttcgccagaggactatgagaatgtctcggcatagttctggaccccggcggaatcgggataccatgatgagtcttctgaagactgtggtcattgtgcttggggcctttatcatctgctggactcctggattggttttgttacttctagacgtgtgctgtccacagtgcgacgtgctggcctatgagaaattcttccttctccttgctgaattcaactctgccatgaaccccatcatttactcctaccgcgacaaagaaatgagcgccacctttaggcagatcctctgctgccagcgcagtgagaaccccaccggccccacagaaggctcagaccgctcggcttcctccctcaaccacaccatcttggctggagttcacagcaatgaccactctgtggtttagaacggaaactgagatgaggaaccagccgtcctctcttggaggataaacagcctccccctacccaattgccagggcaaggtggggtgtgagagaggagaaaagtcaactcatgtacttaaacactaaccaatgacagtatttgttcctggaccccacaagacttgatatatattgaaaattagcttatgtgacaaccctcatcttgatccccatcccttctgaaagtaggaagttggagctcttgcaatggaattcaagaacagactctggagtgtccatttagactacactaactagacttttaaaagattttgtgtggtttggtgcaagtcagaataaattctggctagttgaatccacaacttcatttatatacaggcttcccttttttatttttaaaggatacgtttcacttaataaacacgtttatgcctatcagcatgtttgtgatggatgagactatggactgcttttaaactaccataattccattttttcccttacataggaaaactgtaagttggaattatcttttgtttagaaagcatgcatgtaatgtatgtatgcagtatgccttacttaaaaagattaaaaggatactaatgttaaatcttctaggaaatagaacctagacttcaaagccagtatttgtttaggtcatgaagcaaacaatgctctaatcacaatattaactgtttaattaaaatgttgtaacaagtataaaacagggaatgtaagtttattaccaaagtgatatgtattccaaaaaagtcatagaagatgaagcactataatattgttcccatatatttaaaatacccaagtacattctaattaccagtatatcagaggaaaattttcgtagtctttgtaaaataatatactcatcatagaaaacttgaaaaatgcagaaatgtataaaaaagcaaaaatgattactgataatatcacaacccagaagtaaccacctttaaaaagcaacccccatgtatgcctatatgtgtattgtatactttttttacataattggagtcatactgtaaacagttttataagtagatctttttcattgcaaaattgccacattttcttatggcattaaaaattttacaaaaacataattttaatggctatattatattccatttaatggatgcaactcagtttatttaaccattcccatgttgttaactatttaggttgtttctaattttcattattataaagttgcagaaatttggtgt

SEQ ID NO: 16675 - DNA, 2995 bp, Homo sapiens
  source 1..2995: mol_type = unassigned DNA
agaaagcagggctgcatggtgtggggatgctgctgctactcattcctgctcattccagtgttctggaaaatgaggtgtggacgtctgatttatgaagctccccatccacctatctgagtacctgacttctcaggactgacacctacagcatcaggtacacagcttctcctagcatgacttcgatctgatcagcaaacaagaaaatttgtctcccgtagttctggggcgtgttcaccacctacaaccacagagctgtcatggctgccatctctacttccatccctgtaatttcacagccccagttcacagccatgaatgaaccacagtgcttctacaacgagtccattgccttcttttataaccgaagtggaaagcatcttgccacagaatggaacacagtcagcaagctggtgatgggacttggaatcactgtttgtatcttcatcatgttggccaacctattggtcatggtggcaatctatgtcaaccgccgcttccattttcctatttattacctaatggctaatctggctgctgcagacttctttgctgggttggcctacttctatctcatgttcaacacaggacccaatactcggagactgactgttagcacatggctccttcgtcagggcctcattgacaccagcctgacggcatctgtggccaacttactggctattgcaatcgagaggcacattacggttttccgcatgcagctccacacacggatgagcaaccggcgggtagtggtggtcattgtggtcatctggactatggccatcgttatgggtgctatacccagtgtgggctggaactgtatctgtgatattgaaaattgttccaacatggcacccctctacagtgactcttacttagtcttctgggccattttcaacttggtgacctttgtggtaatggtggttctctatgctcacatctttggctatgttcgccagaggactatgagaatgtctcggcatagttctggaccccggcggaatcgggataccatgatgagtcttctgaagactgtggtcattgtgcttggggcctttatcatctgctggactcctggattggttttgttacttctagacgtgtgctgtccacagtgcgacgtgctggcctatgagaaattcttccttctccttgctgaattcaactctgccatgaaccccatcatttactcctaccgcgacaaagaaatgagcgccacctttaggcagatcctctgctgccagcgcagtgagaaccccaccggccccacagaaggctcagaccgctcggcttcctccctcaaccacaccatcttggctggagttcacagcaatgaccactctgtggtttagaacggaaactgagatgaggaaccagccgtcctctcttggaggataaacagcctccccctacccaattgccagggcaaggtggggtgtgagagaggagaaaagtcaactcatgtacttaaacactaaccaatgacagtatttgttcctggaccccacaagacttgatatatattgaaaattagcttatgtgacaaccctcatcttgatccccatcccttctgaaagtaggaagttggagctcttgcaatggaattcaagaacagactctggagtgtccatttagactacactaactagacttttaaaagattttgtgtggtttggtgcaagtcagaataaattctggctagttgaatccacaacttcatttatatacaggcttcccttttttatttttaaaggatacgtttcacttaataaacacgtttatgcctatcagcatgtttgtgatggatgagactatggactgcttttaaactaccataattccattttttcccttacataggaaaactgtaagttggaattatcttttgtttagaaagcatgcatgtaatgtatgtatgcagtatgccttacttaaaaagattaaaaggatactaatgttaaatcttctaggaaatagaacctagacttcaaagccagtatttgtttaggtcatgaagcaaacaatgctctaatcacaatattaactgtttaattaaaatgttgtaacaagtataaaacagggaatgtaagtttattaccaaagtgatatgtattccaaaaaagtcatagaagatgaagcactataatattgttcccatatatttaaaatacccaagtacattctaattaccagtatatcagaggaaaattttcgtagtctttgtaaaataatatactcatcatagaaaacttgaaaaatgcagaaatgtataaaaaagcaaaaatgattactgataatatcacaacccagaagtaaccacctttaaaaagcaacccccatgtatgcctatatgtgtattgtatactttttttacataattggagtcatactgtaaacagttttataagtagatctttttcattgcaaaattgccacattttcttatggcattaaaaattttacaaaaacataattttaatggctatattatattccatttaatggatgcaactcagtttatttaaccattcccatgttgttaactatttaggttgtttctaattttcattattataaagttgcagaaatttggtgtacataaaactgtctccatataattgattattaggatatattcccatgaaggattctttttttaaaaaaatgtgaaatgtcatcttgtacttacacctttcatgaaaagggatttcctgcttttgtactgcatgggtggcagttgtgaggaaaagccagtcaaatgacctttttacaaaagaaatgcagtggtcacttcagttgagagtgactttttaatacaacaagatcaactagaagaattcaactgtctcaagaatcaaggtaccccaatatatctcgcaattccaaactttgtttgagggactcgttatccagctcttggtagccacacctgcaatgtaaaatggaagaaaatgcaaagaaaccaaatgtgccgagtgaataaaggattgtcata

SEQ ID NO: 16676 - DNA, 3637 bp, Homo sapiens
  source 1..3637: mol_type = unassigned DNA
gtggttgggggcgcgcgtgcgagtgccagtgagagtgtgggtgcgcgctgtgggccgcggcgcgggtgggtggccgtgcgttcttgcgagccggcctgcaggaggcgaggctcccctggcctcccgcacccagcggcggaccgagcccctggagggaagttgccgcagccgcccgggccgccggccctcctgtcccgcgccaggtggacgtctgatttatgaagctccccatccacctatctgagtacctgacttctcaggactgacacctacagcatcaggtacacagcttctcctagcatgacttcgatctgatcagcaaacaagaaaatttgtctcccgtagttctggggcgtgttcaccacctacaaccacagagctgtcatggctgccatctctacttccatccctgtaatttcacagccccagttcacagccatgaatgaaccacagtgcttctacaacgagtccattgccttcttttataaccgaagtggaaagcatcttgccacagaatggaacacagtcagcaagctggtgatgggacttggaatcactgtttgtatcttcatcatgttggccaacctattggtcatggtggcaatctatgtcaaccgccgcttccattttcctatttattacctaatggctaatctggctgctgcagacttctttgctgggttggcctacttctatctcatgttcaacacaggacccaatactcggagactgactgttagcacatggctccttcgtcagggcctcattgacaccagcctgacggcatctgtggccaacttactggctattgcaatcgagaggcacattacggttttccgcatgcagctccacacacggatgagcaaccggcgggtagtggtggtcattgtggtcatctggactatggccatcgttatgggtgctatacccagtgtgggctggaactgtatctgtgatattgaaaattgttccaacatggcacccctctacagtgactcttacttagtcttctgggccattttcaacttggtgacctttgtggtaatggtggttctctatgctcacatctttggctatgttcgccagaggactatgagaatgtctcggcatagttctggaccccggcggaatcgggataccatgatgagtcttctgaagactgtggtcattgtgcttggggcctttatcatctgctggactcctggattggttttgttacttctagacgtgtgctgtccacagtgcgacgtgctggcctatgagaaattcttccttctccttgctgaattcaactctgccatgaaccccatcatttactcctaccgcgacaaagaaatgagcgccacctttaggcagatcctctgctgccagcgcagtgagaaccccaccggccccacagaaggctcagaccgctcggcttcctccctcaaccacaccatcttggctggagttcacagcaatgaccactctgtggtttagaacggaaactgagatgaggaaccagccgtcctctcttggaggataaacagcctccccctacccaattgccagggcaaggtggggtgtgagagaggagaaaagtcaactcatgtacttaaacactaaccaatgacagtatttgttcctggaccccacaagacttgatatatattgaaaattagcttatgtgacaaccctcatcttgatccccatcccttctgaaagtaggaagttggagctcttgcaatggaattcaagaacagactctggagtgtccatttagactacactaactagacttttaaaagattttgtgtggtttggtgcaagtcagaataaattctggctagttgaatccacaacttcatttatatacaggcttcccttttttatttttaaaggatacgtttcacttaataaacacgtttatgcctatcagcatgtttgtgatggatgagactatggactgcttttaaactaccataattccattttttcccttacataggaaaactgtaagttggaattatcttttgtttagaaagcatgcatgtaatgtatgtatgcagtatgccttacttaaaaagattaaaaggatactaatgttaaatcttctaggaaatagaacctagacttcaaagccagtatttgtttaggtcatgaagcaaacaatgctctaatcacaatattaactgtttaattaaaatgttgtaacaagtataaaacagggaatgtaagtttattaccaaagtgatatgtattccaaaaaagtcatagaagatgaagcactataatattgttcccatatatttaaaatacccaagtacattctaattaccagtatatcagaggaaaattttcgtagtctttgtaaaataatatactcatcatagaaaacttgaaaaatgcagaaatgtataaaaaagcaaaaatgattactgataatatcacaacccagaagtaaccacctttaaaaagcaacccccatgtatgcctatatgtgtattgtatactttttttacataattggagtcatactgtaaacagttttataagtagatctttttcattgcaaaattgccacattttcttatggcattaaaaattttacaaaaacataattttaatggctatattatattccatttaatggatgcaactcagtttatttaaccattcccatgttgttaactatttaggttgtttctaattttcattattataaagttgcagaaatttggtgtacataaaactgtctccatataattgattattaggatatattcccatgaaggattctttttttaaaaaaatgtgaaatgtcatcttgtacttacacctttcatgaaaagggatttcctgcttttgtactgcatgggtggcagttgtgaggaaaagccagtcaaatgacctttttacaaaagaaatgcagtggtcacttcagttgagagtgactttttaatacaacaagatcaactagaagaattcaactgtctcaagaatcaaggtaccccaatatatctcgcaattccaaactttgtttgagggactcgttatccagctcttggtagccacacctgcaatgtaaaatggaagaaaatgcaaagaaaccaaatgtgccgagtgaataaaggattgtcatatcaattagtgtgggtccatctgtagcaaatgggttgagtgtgtcagtatgtggttggttactgtgtattcgccaggaatcaccccgataggctgccaccctattaggtgatacctgtttaatatgttgtccaggtagactagtagttgcatcagtttgctgtaacaagtaaccagtgaggtaacacagtggtgaagcaggtcaggggaggtcaggaggatgtctgagagaaagaagtccgggagatgaatggctgtctaggaaggaggatgtcagtgcacggttagtgtttgagcagagggcagacttgtaaagtacctgtagtgaaaagaatgtggggacccgattagcagaaaggtgtttgcacgtactttatacaaaatacagaatactttatattggaagtgaaagaaatgaacgtggacttttacacatgtgcatatttttctggaggctatatggattatttgaaatgaaaagcatactaattggactttaataaatcattttcaatca

SEQ ID NO: 16677 - DNA, 1019 bp, Homo sapiens
  source 1..1019: mol_type = unassigned DNA
ctggcggctgacgctccctgagtggcgactccgtctccagccccgctgcggagcgcgggccggatctggggcggccagggcccggagccgcggagccctccccgccgcccggccgagcacgggaccccggcggggtgggcgcagggggcggccccgctctgggcgactgccgaggggcgggcggagggccgggctcggctggcggtggggcgggggccgccgggactgggcgcgcggcctgaagccagcccgggggcggcaggagagggacgcgcggcggcagcgagcgcaggtggacgtctgatttatgaagctccccatccacctatctgagtacctgacttctcaggactgacacctacagcatcaggtacacagcttctcctagcatgacttcgatctgatcagcaaacaagaaaatttgtctcccgtagttctggggcgtgttcaccacctacaaccacagagctgtcatggctgccatctctacttccatccctgtaatttcacagccccagttcacagccatgaatgaaccacagtgcttctacaacgagtccattgccttcttttataaccgaagtggaaagcatcttgccacagaatggaacacagtcagcaagctggtgatgggacttggaatcactgtttgtatcttcatcatgttggccaacctattggtcatggtggcaatctatgtcaaccgccgcttccattttcctatttattacctaatggctaatctggctgctgcagacttctttgctgggttggcctacttctatctcatgttcaacacaggacccaatactcggagactgactgttagcacatggctccttcgtcagggcctcattgacaccagcctgacggcatctgtggccaacttactggctattgcaatcgagaggcacattacggttttccgcatgcagctccacacacggatgagcaaccggcgggtagtggtggtcattgtggtcatctggactatggccatcgttatgggtgctataccc

SEQ ID NO: 16678 - DNA, 2490 bp, Homo sapiens
  source 1..2490: mol_type = unassigned DNA
ctcaagggaacagctcctgcccaggtctgtgggcactcagcatggatttcagtctccctgtgagtgatgggaaagaactaacagaggtggacgtctgatttatgaagctccccatccacctatctgagtacctgacttctcaggactgacacctacagcatcaggtacacagcttctcctagcatgacttcgatctgatcagcaaacaagaaaatttgtctcccgtagttctggggcgtgttcaccacctacaaccacagagctgtcatggctgccatctctacttccatccctgtaatttcacagccccagtgggaggtgatttcttctttggcgagagttcacagccatgaatgaaccacagtgcttctacaacgagtccattgccttcttttataaccgaagtggaaagcatcttgccacagaatggaacacagtcagcaagctggtgatgggacttggaatcactgtttgtatcttcatcatgttggccaacctattggtcatggtggcaatctatgtcaaccgccgcttccattttcctatttattacctaatggctaatctggctgctgcagacttctttgctgggttggcctacttctatctcatgttcaacacaggacccaatactcggagactgactgttagcacatggctccttcgtcagggcctcattgacaccagcctgacggcatctgtggccaacttactggctattgcaatcgagaggcacattacggttttccgcatgcagctccacacacggatgagcaaccggcgggtagtggtggtcattgtggtcatctggactatggccatcgttatgggtgctatacccagtgtgggctggaactgtatctgtgatattgaaaattgttccaacatggcacccctctacagtgactcttacttagtcttctgggccattttcaacttggtgacctttgtggtaatggtggttctctatgctcacatctttggctatgttcgccagaggactatgagaatgtctcggcatagttctggaccccggcggaatcgggataccatgatgagtcttctgaagactgtggtcattgtgcttggggcctttatcatctgctggactcctggattggttttgttacttctagacgtgtgctgtccacagtgcgacgtgctggcctatgagaaattcttccttctccttgctgaattcaactctgccatgaaccccatcatttactcctaccgcgacaaagaaatgagcgccacctttaggcagatcctctgctgccagcgcagtgagaaccccaccggccccacagaaggctcagaccgctcggcttcctccctcaaccacaccatcttggctggagttcacagcaatgaccactctgtggtttagaacggaaactgagatgaggaaccagccgtcctctcttggaggataaacagcctccccctacccaattgccagggcaaggtggggtgtgagagaggagaaaagtcaactcatgtacttaaacactaaccaatgacagtatttgttcctggaccccacaagacttgatatatattgaaaattagcttatgtgacaaccctcatcttgatccccatcccttctgaaagtaggaagttggagctcttgcaatggaattcaagaacagactctggagtgtccatttagactacactaactagacttttaaaagattttgtgtggtttggtgcaagtcagaataaattctggctagttgaatccacaacttcatttatatacaggcttcccttttttatttttaaaggatacgtttcacttaataaacacgtttatgcctatcagcatgtttgtgatggatgagactatggactgcttttaaactaccataattccattttttcccttacataggaaaactgtaagttggaattatcttttgtttagaaagcatgcatgtaatgtatgtatgcagtatgccttacttaaaaagattaaaaggatactaatgttaaatcttctaggaaatagaacctagacttcaaagccagtatttgtttaggtcatgaagcaaacaatgctctaatcacaatattaactgtttaattaaaatgttgtaacaagtataaaacagggaatgtaagtttattaccaaagtgatatgtattccaaaaaagtcatagaagatgaagcactataatattgttcccatatatttaaaatacccaagtacattctaattaccagtatatcagaggaaaattttcgtagtctttgtaaaataatatactcatcatagaaaacttgaaaaatgcagaaatgtataaaaaagcaaaaatgattactgataatatcacaacccagaagtaaccacctttaaaaagcaacccccatgtatgcctatatgtgtattgtatactttttttacataattggagtcatactgtaaacagttttataagtagatctttttcattgcaaaattgccacattttcttatggcatt

SEQ ID NO: 16679 - DNA, 1345 bp, Homo sapiens
  source 1..1345: mol_type = unassigned DNA
gaatggaggagggggcgcagaggtcaggggcgctgggggcgccacaccagttcacagccatgaatgaaccacagtgcttctacaacgagtccattgccttcttttataaccgaagtggaaagcatcttgccacagaatggaacacagtcagcaagctggtgatgggacttggaatcactgtttgtatcttcatcatgttggccaacctattggtcatggtggcaatctatgtcaaccgccgcttccattttcctatttattacctaatggctaatctggctgctgcagacttctttgctgggttggcctacttctatctcatgttcaacacaggacccaatactcggagactgactgttagcacatggctccttcgtcagggcctcattgacaccagcctgacggcatctgtggccaacttactggctattgcaatcgagaggcacattacggttttccgcatgcagctccacacacggatgagcaaccggcgggtagtggtggtcattgtggtcatctggactatggccatcgttatgggtgctatacccagtgtgggctggaactgtatctgtgatattgaaaattgttccaacatggcacccctctacagtgactcttacttagtcttctgggccattttcaacttggtgacctttgtggtaatggtggttctctatgctcacatctttggctatgttcgccagaggactatgagaatgtctcggcatagttctggaccccggcggaatcgggataccatgatgagtcttctgaagactgtggtcattgtgcttggggcctttatcatctgctggactcctggattggttttgttacttctagacgtgtgctgtccacagtgcgacgtgctggcctatgagaaattcttccttctccttgctgaattcaactctgccatgaaccccatcatttactcctaccgcgacaaagaaatgagcgccacctttaggcagatcctctgctgccagcgcagtgagaaccccaccggccccacagaaggctcagaccgctcggcttcctccctcaaccacaccatcttggctggagttcacagcaatgaccactctgtggtttagaacggaaactgagatgaggaaccagccgtcctctcttggaggataaacagcctccccctacccaattgccagggcaaggtggggtgtgagagaggagaaaagtcaactcatgtacttaaacactaaccaatgacagtatttgttcctggaccccacaagacttgatatatattgaaaattagcttatgtgacaaccctcatcttgatccccatcccttctgaaagtaggaagttggagctcttgc

SEQ ID NO: 16680 - DNA, 3255 bp, Homo sapiens
  source 1..3255: mol_type = unassigned DNA
atgctgctgctactcattcctgctcattccagtgttctggaaaatgagttcacagccatgaatgaaccacagtgcttctacaacgagtccattgccttcttttataaccgaagtggaaagcatcttgccacagaatggaacacagtcagcaagctggtgatgggacttggaatcactgtttgtatcttcatcatgttggccaacctattggtcatggtggcaatctatgtcaaccgccgcttccattttcctatttattacctaatggctaatctggctgctgcagacttctttgctgggttggcctacttctatctcatgttcaacacaggacccaatactcggagactgactgttagcacatggctccttcgtcagggcctcattgacaccagcctgacggcatctgtggccaacttactggctattgcaatcgagaggcacattacggttttccgcatgcagctccacacacggatgagcaaccggcgggtagtggtggtcattgtggtcatctggactatggccatcgttatgggtgctatacccagtgtgggctggaactgtatctgtgatattgaaaattgttccaacatggcacccctctacagtgactcttacttagtcttctgggccattttcaacttggtgacctttgtggtaatggtggttctctatgctcacatctttggctatgttcgccagaggactatgagaatgtctcggcatagttctggaccccggcggaatcgggataccatgatgagtcttctgaagactgtggtcattgtgcttggggcctttatcatctgctggactcctggattggttttgttacttctagacgtgtgctgtccacagtgcgacgtgctggcctatgagaaattcttccttctccttgctgaattcaactctgccatgaaccccatcatttactcctaccgcgacaaagaaatgagcgccacctttaggcagatcctctgctgccagcgcagtgagaaccccaccggccccacagaaggctcagaccgctcggcttcctccctcaaccacaccatcttggctggagttcacagcaatgaccactctgtggtttagaacggaaactgagatgaggaaccagccgtcctctcttggaggataaacagcctccccctacccaattgccagggcaaggtggggtgtgagagaggagaaaagtcaactcatgtacttaaacactaaccaatgacagtatttgttcctggaccccacaagacttgatatatattgaaaattagcttatgtgacaaccctcatcttgatccccatcccttctgaaagtaggaagttggagctcttgcaatggaattcaagaacagactctggagtgtccatttagactacactaactagacttttaaaagattttgtgtggtttggtgcaagtcagaataaattctggctagttgaatccacaacttcatttatatacaggcttcccttttttatttttaaaggatacgtttcacttaataaacacgtttatgcctatcagcatgtttgtgatggatgagactatggactgcttttaaactaccataattccattttttcccttacataggaaaactgtaagttggaattatcttttgtttagaaagcatgcatgtaatgtatgtatgcagtatgccttacttaaaaagattaaaaggatactaatgttaaatcttctaggaaatagaacctagacttcaaagccagtatttgtttaggtcatgaagcaaacaatgctctaatcacaatattaactgtttaattaaaatgttgtaacaagtataaaacagggaatgtaagtttattaccaaagtgatatgtattccaaaaaagtcatagaagatgaagcactataatattgttcccatatatttaaaatacccaagtacattctaattaccagtatatcagaggaaaattttcgtagtctttgtaaaataatatactcatcatagaaaacttgaaaaatgcagaaatgtataaaaaagcaaaaatgattactgataatatcacaacccagaagtaaccacctttaaaaagcaacccccatgtatgcctatatgtgtattgtatactttttttacataattggagtcatactgtaaacagttttataagtagatctttttcattgcaaaattgccacattttcttatggcattaaaaattttacaaaaacataattttaatggctatattatattccatttaatggatgcaactcagtttatttaaccattcccatgttgttaactatttaggttgtttctaattttcattattataaagttgcagaaatttggtgtacataaaactgtctccatataattgattattaggatatattcccatgaaggattctttttttaaaaaaatgtgaaatgtcatcttgtacttacacctttcatgaaaagggatttcctgcttttgtactgcatgggtggcagttgtgaggaaaagccagtcaaatgacctttttacaaaagaaatgcagtggtcacttcagttgagagtgactttttaatacaacaagatcaactagaagaattcaactgtctcaagaatcaaggtaccccaatatatctcgcaattccaaactttgtttgagggactcgttatccagctcttggtagccacacctgcaatgtaaaatggaagaaaatgcaaagaaaccaaatgtgccgagtgaataaaggattgtcatatcaattagtgtgggtccatctgtagcaaatgggttgagtgtgtcagtatgtggttggttactgtgtattcgccaggaatcaccccgataggctgccaccctattaggtgatacctgtttaatatgttgtccaggtagactagtagttgcatcagtttgctgtaacaagtaaccagtgaggtaacacagtggtgaagcaggtcaggggaggtcaggaggatgtctgagagaaagaagtccgggagatgaatggctgtctaggaaggaggatgtcagtgcacggttagtgtttgagcagagggcagacttgtaaagtacctgtagtgaaaagaatgtggggacccgattagcagaaaggtgtttgcacgtactttatacaaaatacagaatactttatattggaagtgaaagaaatgaacgtggacttttacacatgtgcatatttttctggaggctatatggattatttgaaatgaaaagcatactaattggactttaataaatcattttcaatc

SEQ ID NO: 16681 - DNA, 1792 bp, Homo sapiens
  source 1..1792: mol_type = unassigned DNA
ctcccgcgccctctcagcaacccgcacagggcgcacccggacgctctaccgctcccgccgcagtcgccgggccatgggcctcgagcccgccccgaacccccgcgagcccgccttgtctgcggcgtgactggaggcccagatggtcatcatgggccagtgctactacaacgagaccatcggcttcttctataacaacagtggcaaagagctcagctcccactggcggcccaaggatgtggtcgtggtggcactggggctgaccgtcagcgtgctggtgctgctgaccaatctgctggtcatagcagccatcgcctccaaccgccgcttccaccagcccatctactacctgctcggcaatctggccgcggctgacctcttcgcgggcgtggcctacctcttcctcatgttccacactggtccccgcacagcccgactttcacttgagggctggttcctgcggcagggcttgctggacacaagcctcactgcgtcggtggccacactgctggccatcgccgtggagcggcaccgcagtgtgatggccgtgcagctgcacagccgcctgccccgtggccgcgtggtcatgctcattgtgggcgtgtgggtggctgccctgggcctggggctgctgcctgcccactcctggcactgcctctgtgccctggaccgctgctcacgcatggcacccctgctcagccgctcctatttggccgtctgggctctgtcgagcctgcttgtcttcctgctcatggtggctgtgtacacccgcattttcttctacgtgcggcggcgagtgcagcgcatggcagagcatgtcagctgccacccccgctaccgagagaccacgctcagcctggtcaagactgttgtcatcatcctgggggcgttcgtggtctgctggacaccaggccaggtggtactgctcctggatggtttaggctgtgagtcctgcaatgtcctggctgtagaaaagtacttcctactgttggccgaggccaactccctggtcaatgctgctgtgtactcttgccgagatgctgagatgcgccgcaccttccgccgccttctctgctgcgcgtgcctccgccagtccacccgcgagtctgtccactatacatcctctgcccagggaggtgccagcactcgcatcatgcttcccgagaacggccacccactgatggactccaccctttagctaccttgaacttcagcggtacgcggcaagcaacaaatccacagcccctgatgacttgtgggtgctcctggctcaacccaaccaacaggactgactgactggcaggacaaggtctggcatggcacagcaccactgccaggcctccccaggcacaccactctgcccagggaatgggggctttgggtcatctcccactgcctgggggagtcagatggggtgcaggaatctggctcttcagccatctcaggtttagggggtttgtaacagacattattctgttttcactgcgtatccttggtaagccctgtggactggttcctgctgtgtgatgctgagggttttaaggtggggagagataagggctctctcgggccatgctacccggtatgactgggtaatgaggacagactgtggacaccccatctacctgagtctgattctttagcagcagagactgaggggtgcagagtgtgagctgggaaaggtttgtggctccttgcagcctccagggactggcctgtccccgatagaattgaagcagtccacggggaggggatgatacaaggagtaaacctttctttacactctgaggtctcc

SEQ ID NO: 16682 - DNA, 2546 bp, Homo sapiens
  source 1..2546: mol_type = unassigned DNA
ataacaaagtaccgataaccgggacaatggggctgtgtgctccggaccgtgggagcccggggccgccgcagggaggccgagggaggaagccacagggcagggcagggcagggccgggctttgcagggggcagcgctgtcccagggtgaggggtacgggggcgggattgcaaaaccctagcgtgcgcccgatgatcagctggggccgcagaggtgggcctcgcacaggaggccgcggctcgctgatactgcgagctggcaaagccgaagctgggcgggggtccgggcggtgggagccaagtcggatcagggagtggcttgtaactcggcggccgattggacacgaagaagagagcggggtggggctgggagggttgggggtccggagcgggggcgcggacccaagaccacctggagctccgcccgggcagcgcggggtcacggcgggaattttcgggtcgccgagtgactcagccccgcaggctcgaaactgcgggcgcatgagtcgccgggccatgggcctcgagcccgccccgaacccccgcgagcccgccttgtctgcggcgtgactggaggcccagtctggagacgcctggaggcccggccatccatcccttccccaaccgctgtctttgtcccggagaccgccagtgtcctccgtcccacccggaacagcctattgccccgcccgcttgggaagcactcgcgcccaaatcccgccgactaacttctggggccgcctctctgtccactccgatcacctccacgcctcggcaccgccccctcgcagggttctagtcttattagtaggtaagaaacagctgctcctccacctccaccccagccccatggagcttgctttttccaggccaccgtagtcctcaccactgccactttgcttcgagatggtcatcatgggccagtgctactacaacgagaccatcggcttcttctataacaacagtggcaaagagctcagctcccactggcggcccaaggatgtggtcgtggtggcactggggctgaccgtcagcgtgctggtgctgctgaccaatctgctggtcatagcagccatcgcctccaaccgccgcttccaccagcccatctactacctgctcggcaatctggccgcggctgacctcttcgcgggcgtggcctacctcttcctcatgttccacactggtccccgcacagcccgactttcacttgagggctggttcctgcggcagggcttgctggacacaagcctcactgcgtcggtggccacactgctggccatcgccgtggagcggcaccgcagtgtgatggccgtgcagctgcacagccgcctgccccgtggccgcgtggtcatgctcattgtgggcgtgtgggtggctgccctgggcctggggctgctgcctgcccactcctggcactgcctctgtgccctggaccgctgctcacgcatggcacccctgctcagccgctcctatttggccgtctgggctctgtcgagcctgcttgtcttcctgctcatggtggctgtgtacacccgcattttcttctacgtgcggcggcgagtgcagcgcatggcagagcatgtcagctgccacccccgctaccgagagaccacgctcagcctggtcaagactgttgtcatcatcctgggggcgttcgtggtctgctggacaccaggccaggtggtactgctcctggatggtttaggctgtgagtcctgcaatgtcctggctgtagaaaagtacttcctactgttggccgaggccaactccctggtcaatgctgctgtgtactcttgccgagatgctgagatgcgccgcaccttccgccgccttctctgctgcgcgtgcctccgccagtccacccgcgagtctgtccactatacatcctctgcccagggaggtgccagcactcgcatcatgcttcccgagaacggccacccactgatggactccaccctttagctaccttgaacttcagcggtacgcggcaagcaacaaatccacagcccctgatgacttgtgggtgctcctggctcaacccaaccaacaggactgactgactggcaggacaaggtctggcatggcacagcaccactgccaggcctccccaggcacaccactctgcccagggaatgggggctttgggtcatctcccactgcctgggggagtcagatggggtgcaggaatctggctcttcagccatctcaggtttagggggtttgtaacagacattattctgttttcactgcgtatccttggtaagccctgtggactggttcctgctgtgtgatgctgagggttttaaggtggggagagataagggctctctcgggccatgctacccggtatgactgggtaatgaggacagactgtggacaccccatctacctgagtctgattctttagcagcagagactgaggggtgcagagtgtgagctgggaaaggtttgtggctccttgcagcctccagggactggcctgtccccgatagaattgaagcagtccacggggaggggatgatacaaggagtaaacctttctttacactc

SEQ ID NO: 16683 - DNA, 1720 bp, Homo sapiens
  source 1..1720: mol_type = unassigned DNA
aaactttcctttggctctggacgcgtcgcaggggtcgctggagaggaggcgctccgcccgcccgccgcgtcctccgctgcttctccgcgcccggctggagcccggcgcccggtcgccccgtcgcgctcgaccccgagggcatgcggcagccgcaggggcccccgctcccgggctcggcggcgcgggtgaacgtgagcggatgttcacttctccacaatgaatgagtgtcactatgacaagcacatggactttttttataataggagcaacactgatactgtcgatgactggacaggaacaaagcttgtgattgttttgtgtgttgggacgtttttctgcctgtttatttttttttctaattctctggtcatcgcggcagtgatcaaaaacagaaaatttcatttccccttctactacctgttggctaatttagctgctgccgatttcttcgctggaattgcctatgtattcctgatgtttaacacaggcccagtttcaaaaactttgactgtcaaccgctggtttctccgtcaggggcttctggacagtagcttgactgcttccctcaccaacttgctggttatcgccgtggagaggcacatgtcaatcatgaggatgcgggtccatagcaacctgaccaaaaagagggtgacactgctcattttgcttgtctgggccatcgccatttttatgggggcggtccccacactgggctggaattgcctctgcaacatctctgcctgctcttccctggcccccatttacagcaggagttaccttgttttctggacagtgtccaacctcatggccttcctcatcatggttgtggtgtacctgcggatctacgtgtacgtcaagaggaaaaccaacgtcttgtctccgcatacaagtgggtccatcagccgccggaggacacccatgaagctaatgaagacggtgatgactgtcttaggggcgtttgtggtatgctggaccccgggcctggtggttctgctcctcgacggcctgaactgcaggcagtgtggcgtgcagcatgtgaaaaggtggttcctgctgctggcgctgctcaactccgtcgtgaaccccatcatctactcctacaaggacgaggacatgtatggcaccatgaagaagatgatctgctgcttctctcaggagaacccagagaggcgtccctctcgcatcccctccacagtcctcagcaggagtgacacaggcagccagtacatagaggatagtattagccaaggtgcagtctgcaataaaagcacttcctaaactctggatgcctctcggcccacccaggcctcctctgggaaaagagctgttaagaatgattacctgtctctaacaaagcccatgtacagtgttatttgaggtctccattaatcactgctagatttctttaaaaaattttttttcatagtttaaaagcatgggcagtaaagagaggacctgctgcatttagagaaagcacagaaacgggagaggttcggcgggtccctgcttgtcctatgaactgctcagagctcctgtcagtccagctgggccttctgggttctggcaccatttcgtagccattctctttgtattttaaaaggacgttatgaaagggcttagaccaaaataaatcataatgttacttgagccaccttatatagctgcttggagagtctatgtagttctttctgcatgcattaaaaatgtttagaaatgcttc

SEQ ID NO: 16684 - DNA, 3345 bp, Homo sapiens
  source 1..3345: mol_type = unassigned DNA
cttctttaaatttctttctaggatgttcacttctccacaatgaatgagtgtcactatgacaagcacatggactttttttataataggagcaacactgatactgtcgatgactggacaggaacaaagcttgtgattgttttgtgtgttgggacgtttttctgcctgtttatttttttttctaattctctggtcatcgcggcagtgatcaaaaacagaaaatttcatttccccttctactacctgttggctaatttagctgctgccgatttcttcgctggaattgcctatgtattcctgatgtttaacacaggcccagtttcaaaaactttgactgtcaaccgctggtttctccgtcaggggcttctggacagtagcttgactgcttccctcaccaacttgctggttatcgccgtggagaggcacatgtcaatcatgaggatgcgggtccatagcaacctgaccaaaaagagggtgacactgctcattttgcttgtctgggccatcgccatttttatgggggcggtccccacactgggctggaattgcctctgcaacatctctgcctgctcttccctggcccccatttacagcaggagttaccttgttttctggacagtgtccaacctcatggccttcctcatcatggttgtggtgtacctgcggatctacgtgtacgtcaagaggaaaaccaacgtcttgtctccgcatacaagtgggtccatcagccgccggaggacacccatgaagctaatgaagacggtgatgactgtcttaggggcgtttgtggtatgctggaccccgggcctggtggttctgctcctcgacggcctgaactgcaggcagtgtggcgtgcagcatgtgaaaaggtggttcctgctgctggcgctgctcaactccgtcgtgaaccccatcatctactcctacaaggacgaggacatgtatggcaccatgaagaagatgatctgctgcttctctcaggagaacccagagaggcgtccctctcgcatcccctccacagtcctcagcaggagtgacacaggcagccagtacatagaggatagtattagccaaggtgcagtctgcaataaaagcacttcctaaactctggatgcctctcggcccacccaggcctcctctgggaaaagagctgttaagaatgattacctgtctctaacaaagcccatgtacagtgttatttgaggtctccattaatcactgctagatttctttaaaaaattttttttcatagtttaaaagcatgggcagtaaagagaggacctgctgcatttagagaaagcacagaaacgggagaggttcggcgggtccctgcttgtcctatgaactgctcagagctcctgtcagtccagctgggccttctgggttctggcaccatttcgtagccattctctttgtattttaaaaggacgttatgaaagggcttagaccaaaataaatcataatgttacttgagccaccttatatagctgcttggagagtctatgtagttctttctgcatgcattaaaaatgtttagaaatgcttcagcaatggtgtttttttcctcaaagaaaccatggccagtagctaggtgttcagtaggaatcaaagaaaaatcagtaagagctccagattaaacctgatttttaactgaaggaacattctgaggaaaaatacttaaaagtaaaaaaggtcaatgtgaaaaccctttttgacctgaaaaaggccttagtatggtcctccatgcatgtgtgtgtatatgcatgtgtgtgtgtgtgtgtgtgtgtgtctatatatatatatatatatatatatatatatattcctgtttttactgatttttattgattttgttcaaagatatctggggattggattggggaatgcttaatctgactattgaaagaaacatggatccctggagtatttcagatacggggttaccgccccagactgcctcccgccagtccacattagttctcattttccctcatgatggtgaaaaacagtggagagctagtaaagggtttatgcagaaaacaaggagaagagaatgtgaagtttgaagtgcctatggaacatccagctgataatcttgcctagtaagagcaaaagaagccaagagaacaccaacgtttaaggagcaggtagagaaaacccagcaaaaggacagaggaataagaggaccaaagaacaatgttaagaatcaaggagagaggtcaggcacgctggctcatgcctgtaatcccagcactttgggaggctgaggcaggtggatcacttgaggccaggagtatgagaccagcctgggcaatgtggtgaaattgcatctttactaaaaatacaaaaactagccaggcatggtggcacatgcctgtaataccaggtacttgggaagctgaggcataagaatcacttgaacccgggaggtggaggttgcagagtgagccaagatcgcagcactgcactctagtctgggtgacagagcaagactctgtctcaaaaaaaaaaaaaaaaaaaaaaaaagactagagaatgtcagggaacacatgtgtatatttaaacaacttcactttgcatttaaaaactcgaaggacagcgaaggtgaaatcaattcacgggccacctagactttccagtctaggactagagctgtagcaatgatctgttgtgctgtacaagaaaagagaaagaggtgttcatttgagaacagatgtttttatacatcagagtaaaagctgtattgaagagcaggctgaatcccttccatatagaatgaaatatgagcttgaccccagtccttatcttcagttacctccataccaactggtggcatgttggatttagcatgtagaataatttcccatctcttatttttcccaaggttaatggcatccttctggtacctggcttacatgtgaactgaattttgatctgggttctattttgaatttttctccttcagagacctaagtaggcaacatgaaagacaagtagttaagaaagaaaaaatgatgtttcatacacacaggctaccaacgagagttttctatgtaaaacatttagagtgtattctgatttaaaatgagaataacttcaaggtagatattatagtatttatgtagtttgcaaaagaagtttacatttttttgctattgtgatataacatttatgtgcaagaactacttgtaataaaaggatttgagatgtcatgcttctaaatataatagcctaaaatagagaatattatgatttgaaagtgtagatttcacaaactctgtatagtatgtgggtctatctgaagcttttatcgaagctacctataaaataaaattttaaaagatctgt

SEQ ID NO: 16685 - DNA, 2291 bp, Homo sapiens
  source 1..2291: mol_type = unassigned DNA
cctaccggtccatagtgtcagagtggtgaacccctgcagccagcaggcctcctgaaaaaaaagtccatgggtgacagaagattcattgacttccaattccaagattcaaattcaagcctcagacccaggttgggcaatgctactgccaataatacttgcattgttgatgattccttcaagtataatctcaatggtgctgtctacagtgttgtattcatcttgggtctgataaccaacagtgtctctctgtttgtcttctgtttccgcatgaaaatgagaagtgagactgctatttttatcaccaatctagctgtctctgatttgctttttgtctgtacactaccttttaaaatattttacaacttcaaccgccactggccttttggtgacaccctctgcaagatctctggaactgcattccttaccaacatctatgggagcatgctctttctcacctgtattagtgtggatcgtttcctggccattgtctatccttttcgatctcgtactattaggactaggaggaattctgccattgtgtgtgctggtgtctggatcctagtcctcagtggcggtatttcagcctctttgttttccaccactaatgtcaacaatgcaaccaccacctgctttgaaggcttctccaaacgtgtctggaagacttatttatccaagatcacaatatttattgaagttgttgggtttatcattcctctaatattgaatgtctcttgctcttctgtggtgctgagaactcttcgcaagcctgctactctgtctcaaattgggaccaataagaaaaaagtactgaaaatgatcacagtacatatggcagtctttgtggtatgctttgtaccctacaactctgtcctcttcttgtatgccctggtgcgctcccaagctattactaattgctttttggaaagatttgcaaagatcatgtacccaatcaccttgtgccttgcaactctgaactgttgttttgaccctttcatctattacttcacccttgaatcctttcagaagtccttctacatcaatgcccacatcagaatggagtccctgtttaagactgaaacacctttgaccacaaagccttcccttccagctattcaagaggaagtgagtgatcaaacaacaaataatggtggtgaattaatgctagaatccaccttttaggtatgagaaatgtgttcaggtccagatatggtttctcctataatttttcctatgctataaactaaagatttgaagctaatgatactgagaataatgcaccaaatccagtcagatacatttgtttgaaggtatactgtagagtttttattgctgttttgttcagtaattataggtcaaatctaattacaacaaccaagatggattgccaaactcttctgcttggttggaatttcattgtatcgcattatccaggtggctagtggcatttgataatatagagatgactttgaaactttcaaaaaggtatttctattccaatgatatttggtaattaggttgggcctataaatatagaacaaattcagggatttttaaaaaattgtgttactactgatatatgctagttttattttatttttttgaactgtcattgagtttattttagcacaagaatatttttagcctaacattattaataagaaatgtgtcaaatttttaacattggtaaaatatgttatgtgcattttgaaaacagaaaacaaattgcgttggcatgtacgtgggtgggaagaaaaagaaaattaacaggatttacacaattataatcaccagcagtgtgagtttaaaaaacttcgttgtttttacaccaaattaaaattttcatgtcaaacttcaaagccagaaagctgctaaatacgtgtctggcaggtaaaagctggaaaattacttaaaacaggaaagtgtcaataaaaaaacttgagcaacaccaacatattttttcttaaaatgtcacgttatcttcattttgggaaactaggttctataaaatatttatcctccctgttatactttggagcacagcacagccagaaaggggctgcatttgtgcccaggtcaggagcaaattgaaaaaaaaaataaagtaatacaaaaaaatcaaactataaagcaaaaacatttattaaaacctgaattaatcctttttggagggaggagtagagatatataacctgaaaatacttattctttcttatcgaattttggagcctaatatagccaggagctgctgaatttgtgcccctggattggaagcaaataaaaaaaaaaaacaa

SEQ ID NO: 16686 - DNA, 2611 bp, Homo sapiens
  source 1..2611: mol_type = unassigned DNA
ggacttcaggcctttttgtgtcctgtttgctaaaggcatgcgggctacagcattcaagagagggagtcgttaacaaagggaaagagataaatgtaaataagctcacatttacagaatgagcggtttgcagtaaaaagctgcggcagcccagagtctgctactttaggctgggctaacctttccctgtaaaaaaaaaaaaaaaaaaaaaaaaaaaaaaatggataaaaatatgcacttccaaagggcgagttgcccatttacatgtttattagctaattatctacaggcatcagcacattctctcatctagcacactctttcttggggaggaaaatatttcctaccggtccatagtgtcagagtggtgaacccctgcagccagcaggcctcctgaaaaaaaagtccatgggtgacagaagattcattgacttccaattccaagattcaaattcaagcctcagacccaggttgggcaatgctactgccaataatacttgcattgttgatgattccttcaagtataatctcaatggtgctgtctacagtgttgtattcatcttgggtctgataaccaacagtgtctctctgtttgtcttctgtttccgcatgaaaatgagaagtgagactgctatttttatcaccaatctagctgtctctgatttgctttttgtctgtacactaccttttaaaatattttacaacttcaaccgccactggccttttggtgacaccctctgcaagatctctggaactgcattccttaccaacatctatgggagcatgctctttctcacctgtattagtgtggatcgtttcctggccattgtctatccttttcgatctcgtactattaggactaggaggaattctgccattgtgtgtgctggtgtctggatcctagtcctcagtggcggtatttcagcctctttgttttccaccactaatgtcaacaatgcaaccaccacctgctttgaaggcttctccaaacgtgtctggaagacttatttatccaagatcacaatatttattgaagttgttgggtttatcattcctctaatattgaatgtctcttgctcttctgtggtgctgagaactcttcgcaagcctgctactctgtctcaaattgggaccaataagaaaaaagtactgaaaatgatcacagtacatatggcagtctttgtggtatgctttgtaccctacaactctgtcctcttcttgtatgccctggtgcgctcccaagctattactaattgctttttggaaagatttgcaaagatcatgtacccaatcaccttgtgccttgcaactctgaactgttgttttgaccctttcatctattacttcacccttgaatcctttcagaagtccttctacatcaatgcccacatcagaatggagtccctgtttaagactgaaacacctttgaccacaaagccttcccttccagctattcaagaggaagtgagtgatcaaacaacaaataatggtggtgaattaatgctagaatccaccttttaggtatgagaaatgtgttcaggtccagatatggtttctcctataatttttcctatgctataaactaaagatttgaagctaatgatactgagaataatgcaccaaatccagtcagatacatttgtttgaaggtatactgtagagtttttattgctgttttgttcagtaattataggtcaaatctaattacaacaaccaagatggattgccaaactcttctgcttggttggaatttcattgtatcgcattatccaggtggctagtggcatttgataatatagagatgactttgaaactttcaaaaaggtatttctattccaatgatatttggtaattaggttgggcctataaatatagaacaaattcagggatttttaaaaaattgtgttactactgatatatgctagttttattttatttttttgaactgtcattgagtttattttagcacaagaatatttttagcctaacattattaataagaaatgtgtcaaatttttaacattggtaaaatatgttatgtgcattttgaaaacagaaaacaaattgcgttggcatgtacgtgggtgggaagaaaaagaaaattaacaggatttacacaattataatcaccagcagtgtgagtttaaaaaacttcgttgtttttacaccaaattaaaattttcatgtcaaacttcaaagccagaaagctgctaaatacgtgtctggcaggtaaaagctggaaaattacttaaaacaggaaagtgtcaataaaaaaacttgagcaacaccaacatattttttcttaaaatgtcacgttatcttcattttgggaaactaggttctataaaatatttatcctccctgttatactttggagcacagcacagccagaaaggggctgcatttgtgcccaggtcaggagcaaattgaaaaaaaaaataaagtaatacaaaaaaatcaaactataaagcaaaaacatttattaaaacctgaattaatcctttttggagggaggagtagagatatataacctgaaaatacttattctttcttatcgaattttggagcctaatatagccaggagctgctgaatttgtgcccctggattggaagc

SEQ ID NO: 16687 - DNA, 3171 bp, Homo sapiens
  source 1..3171: mol_type = unassigned DNA
agtgggaggcaggacctagcagagcactgtcatgaagagggccccgggcagggtggggcacaagccacgagtggcatggactaagccacgagtagcatggactaaaccacctggcagacctaggaaaggaagacagacacccagggggaaccggtgaggacagcgagaggctggtgggttagtcatctggcatcagacggtgggtgtgccaggaagagttcccagacacagcaggaatatctgaacgatgggtgggggcagttcctagtcggggctggattaagtatccttagctgctggggtttcttctctggccagtccgtgaaggcctctgagggcaatgcttcctcttcactctctccttggcccgtgtggggttgggtgagtgcactgagctgggagggatgggctgagatctgctgaggtgggtgtgtcccctcccgccctgggagcaggtcctaccagcccagcccagcccagcccagcccagagcaggcagcggaagccagcttggggcagcgcagagcaacacggagcacaggtctctgctgctgatgaagctgtgaccaaacgcacccaacccttggcagccatctgtccctgcagccatagcccacattcccatgacctccctctgcttgttttgggaccatgtctgtacagcctctaggccccagccccggaggtgaatgccatgccatgattctggtgtgctccatggcatccccagcctagctcccaatcccactttggcacgatgttagccaacagctcctcaaccaacagttctgttctcccgtgtcctgactaccgacctacccaccgcctgcacttggtggtctacagcttggtgctggctgccgggctccccctcaacgcgctagccctctgggtcttcctgcgcgcgctgcgcgtgcactcggtggtgagcgtgtacatgtgtaacctggcggccagcgacctgctcttcaccctctcgctgcccgttcgtctctcctactacgcactgcaccactggcccttccccgacctcctgtgccagacgacgggcgccatcttccagatgaacatgtacggcagctgcatcttcctgatgctcatcaacgtggaccgctacgccgccatcgtgcacccgctgcgactgcgccacctgcggcggccccgcgtggcgcggctgctctgcctgggcgtgtgggcgctcatcctggtgtttgccgtgcccgccgcccgcgtgcacaggccctcgcgttgccgctaccgggacctcgaggtgcgcctatgcttcgagagcttcagcgacgagctgtggaaaggcaggctgctgcccctcgtgctgctggccgaggcgctgggcttcctgctgcccctggcggcggtggtctactcgtcgggccgagtcttctggacgctggcgcgccccgacgccacgcagagccagcggcggcggaagaccgtgcgcctcctgctggctaacctcgtcatcttcctgctgtgcttcgtgccctacaacagcacgctggcggtctacgggctgctgcggagcaagctggtggcggccagcgtgcctgcccgcgatcgcgtgcgcggggtgctgatggtgatggtgctgctggccggcgccaactgcgtgctggacccgctggtgtactactttagcgccgagggcttccgcaacaccctgcgcggcctgggcactccgcaccgggccaggacctcggccaccaacgggacgcgggcggcgctcgcgcaatccgaaaggtccgccgtcaccaccgacgccaccaggccggatgccgccagtcaggggctgctccgaccctccgactcccactctctgtcttccttcacacagtgtccccaggattccgccctctgaacacacatgccattgcgctgtccgtgcccgactcccaacgcctctcgttctgggaggcttacagggtgtacacacaagaaggtgggctgggcacttggacctttgggtggcaattccagcttagcaacgcagaagagtacaaagtgtggaagccagggcccagggaaggcagtgctgctggaaatggcttctttaaactgtgagcacgcagagcaccccttctccagcggtgggaagtgatgcagagagcccacccgtgcagagggcagaagaggacgaaatgcctttgggtgggcagggcattaaactgctaaaagctggttagatggaacagaaaatgggcattctggatctaaaccgccacaggggcctgagagctgaagagcaccaggtttggtggacaaagctactgagatgcctgttcatctgctgacttctgtctaggctcatggatgccaccccctttcatttcggcctaggcttcccctgctcaccactgaggcctaatacaagagttcctatggacagaactacattctttctcgcatagtgacttgtgacaatttagacttggcatccagcatgggatagttggggcaaggcaaaactaacttagagtttccccctcaacaacatccaagtccaaaccctttttaggttatcctttcttccatcacatccccttttccaggcctcctccattttaggtccttaatattctttctttttctctctctctcgtttctctcttctctctcctctcctctcctctctcttctcctcttctctctctctccctctctctcctttgtccagagtaaggataaaattctttctactaaagcactggttctcaaactttttggtctcagaccccactcttagaaattgaggatctcaaagagctttgcttatattttgttcttttgatacttaccatactagaaattaaagcgaatacatttttaaaataaatacacatgcacacattacattagccatgggagcaataatgtcaccacacacacttcatgaagcctctggaaaactctacagtatacttgtgagagaatgagagtgaaagggacaaataacatctgtgtagcagtattatgaaaatagcttgacctcgtggacttcctcagagggttggtccctggatcacactttgagaaccatacttgtcctgaagtattggagttcatgtctaacttcttcccagggcattatgtacagtgctttttattactgtggggagagggcagtgctaaataaattaatcactactgatagtc

SEQ ID NO: 16688 - DNA, 2695 bp, Homo sapiens
  source 1..2695: mol_type = unassigned DNA
agcaaagagcagtgcccagcccagctcagagggcaaatgggacagatcccagaggccctgaggaggtctctgctgctgatgaagctgtgaccaaacgcacccaacccttggcagccatctgtccctgcagccatagcccacattcccatgacctccctctgcttgttttgggaccatgtctgtacagcctctaggccccagccccggaggtgaatgccatgccatgattctggtgtgctccatggcatccccagcctagctcccaatcccactttggcacgatgttagccaacagctcctcaaccaacagttctgttctcccgtgtcctgactaccgacctacccaccgcctgcacttggtggtctacagcttggtgctggctgccgggctccccctcaacgcgctagccctctgggtcttcctgcgcgcgctgcgcgtgcactcggtggtgagcgtgtacatgtgtaacctggcggccagcgacctgctcttcaccctctcgctgcccgttcgtctctcctactacgcactgcaccactggcccttccccgacctcctgtgccagacgacgggcgccatcttccagatgaacatgtacggcagctgcatcttcctgatgctcatcaacgtggaccgctacgccgccatcgtgcacccgctgcgactgcgccacctgcggcggccccgcgtggcgcggctgctctgcctgggcgtgtgggcgctcatcctggtgtttgccgtgcccgccgcccgcgtgcacaggccctcgcgttgccgctaccgggacctcgaggtgcgcctatgcttcgagagcttcagcgacgagctgtggaaaggcaggctgctgcccctcgtgctgctggccgaggcgctgggcttcctgctgcccctggcggcggtggtctactcgtcgggccgagtcttctggacgctggcgcgccccgacgccacgcagagccagcggcggcggaagaccgtgcgcctcctgctggctaacctcgtcatcttcctgctgtgcttcgtgccctacaacagcacgctggcggtctacgggctgctgcggagcaagctggtggcggccagcgtgcctgcccgcgatcgcgtgcgcggggtgctgatggtgatggtgctgctggccggcgccaactgcgtgctggacccgctggtgtactactttagcgccgagggcttccgcaacaccctgcgcggcctgggcactccgcaccgggccaggacctcggccaccaacgggacgcgggcggcgctcgcgcaatccgaaaggtccgccgtcaccaccgacgccaccaggccggatgccgccagtcaggggctgctccgaccctccgactcccactctctgtcttccttcacacagtgtccccaggattccgccctctgaacacacatgccattgcgctgtccgtgcccgactcccaacgcctctcgttctgggaggcttacagggtgtacacacaagaaggtgggctgggcacttggacctttgggtggcaattccagcttagcaacgcagaagagtacaaagtgtggaagccagggcccagggaaggcagtgctgctggaaatggcttctttaaactgtgagcacgcagagcaccccttctccagcggtgggaagtgatgcagagagcccacccgtgcagagggcagaagaggacgaaatgcctttgggtgggcagggcattaaactgctaaaagctggttagatggaacagaaaatgggcattctggatctaaaccgccacaggggcctgagagctgaagagcaccaggtttggtggacaaagctactgagatgcctgttcatctgctgacttctgtctaggctcatggatgccaccccctttcatttcggcctaggcttcccctgctcaccactgaggcctaatacaagagttcctatggacagaactacattctttctcgcatagtgacttgtgacaatttagacttggcatccagcatgggatagttggggcaaggcaaaactaacttagagtttccccctcaacaacatccaagtccaaaccctttttaggttatcctttcttccatcacatccccttttccaggcctcctccattttaggtccttaatattctttctttttctctctctctcgtttctctcttctctctcctctcctctcctctctcttctcctcttctctctctctccctctctctcctttgtccagagtaaggataaaattctttctactaaagcactggttctcaaactttttggtctcagaccccactcttagaaattgaggatctcaaagagctttgcttatattttgttcttttgatacttaccatactagaaattaaagcgaatacatttttaaaataaatacacatgcacacattacattagccatgggagcaataatgtcaccacacacacttcatgaagcctctggaaaactctacagtatacttgtgagagaatgagagtgaaagggacaaataacatctgtgtagcagtattatgaaaatagcttgacctcgtggacttcctcagagggttggtccctggatcacactttgagaaccatacttgtcctgaagtattggagttcatgtctaacttcttcccagggcattatgtacagtgctttttattactgtggggagagggcagtgctaaataaattaatcactactgatagtc

SEQ ID NO: 16689 - DNA, 2275 bp, Homo sapiens
  source 1..2275: mol_type = unassigned DNA
agtgctgaggaagctgagggcagaacccagctgggagattggtaactccactctgaagaatagcttccaagaacttggaggtttccaacccaggtctgtgacagccttgggcggcgacacatgtctacctgtgccctctgtgacttctgctccttgaagctggagcagtgccactcagaggccagcctgcagcggcaacaatgcgacacctcccacaagactccctttgtcagccccttgcttgcctcccagagcctgtccatcggcaaccaggtagggtccccagaatcaggccgcttttacgggctggatttgtacggtgggctccacatggacttctggtgtgcccggcttgccacgaaaggctgtgaagatgtccgagtctctgggtggctccagactgagttccttagcttccaggatggggatttccctaccaagatttgtgacacagactatatccagtacccaaactactgttccttcaaaagccagcagtgtctgatgagaaaccgcaatcggaaggtctctgctgctgatgaagctgtgaccaaacgcacccaacccttggcagccatctgtccctgcagccatagcccacattcccatgacctccctctgcttgttttgggaccatgtctgtacagcctctaggccccagccccggaggtgaatgccatgccatgattctggtgtgctccatggcatccccagcctagctcccaatcccactttggcacgatgttagccaacagctcctcaaccaacagttctgttctcccgtgtcctgactaccgacctacccaccgcctgcacttggtggtctacagcttggtgctggctgccgggctccccctcaacgcgctagccctctgggtcttcctgcgcgcgctgcgcgtgcactcggtggtgagcgtgtacatgtgtaacctggcggccagcgacctgctcttcaccctctcgctgcccgttcgtctctcctactacgcactgcaccactggcccttccccgacctcctgtgccagacgacgggcgccatcttccagatgaacatgtacggcagctgcatcttcctgatgctcatcaacgtggaccgctacgccgccatcgtgcacccgctgcgactgcgccacctgcggcggccccgcgtggcgcggctgctctgcctgggcgtgtgggcgctcatcctggtgtttgccgtgcccgccgcccgcgtgcacaggccctcgcgttgccgctaccgggacctcgaggtgcgcctatgcttcgagagcttcagcgacgagctgtggaaaggcaggctgctgcccctcgtgctgctggccgaggcgctgggcttcctgctgcccctggcggcggtggtctactcgtcgggccgagtcttctggacgctggcgcgccccgacgccacgcagagccagcggcggcggaagaccgtgcgcctcctgctggctaacctcgtcatcttcctgctgtgcttcgtgccctacaacagcacgctggcggtctacgggctgctgcggagcaagctggtggcggccagcgtgcctgcccgcgatcgcgtgcgcggggtgctgatggtgatggtgctgctggccggcgccaactgcgtgctggacccgctggtgtactactttagcgccgagggcttccgcaacaccctgcgcggcctgggcactccgcaccgggccaggacctcggccaccaacgggacgcgggcggcgctcgcgcaatccgaaaggtccgccgtcaccaccgacgccaccaggccggatgccgccagtcaggggctgctccgaccctccgactcccactctctgtcttccttcacacatgccattgcgctgtccgtgcccgactcccaacgcctctcgttctgggaggcttacagggtgtacacacaagaaggtgggctgggcacttggacctttgggtggcaattccagcttagcaacgcagaagagtacaaagtgtggaagccagggcccagggaaggcagtgctgctggaaatggcttctttaaactgtgagcacgcagagcaccccttctccagcggtgggaagtgatgcagagagcccacccgtgcagagggcagaagaggacgaaatgcctttgggtgggcagggcattaaactgctaaaagctggttagatggaacagaaaatgggcattctggatctaaaccgccacaggggcctgagagctgaagagcaccaggtttggtggacaaagctactgagatgcctgttcatctgctgacttctgtctaggct

SEQ ID NO: 16690 - DNA, 3966 bp, Homo sapiens
  source 1..3966: mol_type = unassigned DNA
cgcgcctgcgcgcccggcccgctccagccgccgcgcatcctcggcccgcgccccgagacccgcgcccagctagccccggccccgctcggcgccccaggcagctcggctgcgctcgccgcgggacggcgcggccatgaggctgcggggatgcggaccccgggccgcccctgcctccagcgcaggggccagcgacgctcggctgctggcgcccccggggcggaaccccttcgtgcacgagctgcgcctcagcgccctgcagaaggcccaggtggccctcatgacactgacgctcttcccggtccggctcctggttgccgctgccatgatgctgctggcctggcccctcgcacttgtcgcatccctgggctctgcggagaaggaacccgagcagcccccggccctgtggaggaaggttgtggacttcctgctgaaggccatcatgcgcaccatgtggttcgccggcggcttccaccgggtggccgtgaaggggcggcaggcgctgcccaccgaggcggccatcctcacgctcgcgcctcactcgtcctacttcgacgccatccctgtgaccatgacgatgtcctccatcgtgatgaaggcagagagcagagacatcccgatctggggaactctgatccagtatatacggcctgtgttcgtgtcccggtcagaccaggattctcgcaggaaaacagtagaagaaatcaagagacgggcgcagtccaacggaaagtggccacagataatgatttttccagaaggaacttgtacaaacaggacctgcctaattaccttcaaacctggtgcattcatccctggagcgcccgtccagcctgtggttttacgatatccaaataaactggacaccatcacatggacgtggcaaggacctggagcgctggaaatcctgtggctcacgctgtgtcagtttcacaaccaagtggaaatcgagttccttcctgtgtacagcccttctgaggaggagaagaggaaccccgcgctgtatgccagcaacgtgcggcgagtcatggccgaggccttgggtgtctccgtgactgactacacgttcgaggactgccagctggccctggcggaaggacagctccgtctccccgctgacacttgccttttagaatttgccaggctcgtgcggggcctcgggctaaaaccagaaaagcttgaaaaagatctggacagatactcagaaagagccaggatgaagggaggagagaagataggtattgcggagtttgccgcctccctggaagtccccgtttctgacttgctggaagacatgttttcactgttcgacgagagcggcagcggcgaggtggacctgcgagagtgtgtggttgccctgtctgtcgtctgccggccggcccggaccctggacaccatccagctggctttcaagatgtacggagcgcaagaggacggcagcgtcggcgaaggtgacctgtcctgcatcctcaagacggccctgggggtggcagagctcaccgtgaccgacctattccgagccattgaccaagaggagaaggggaagatcacattcgctgacttccacaggtttgcagaaatgtaccctgccttcgcagaggaatacctgtacccggatcagacacatttcgaaagctgtgcagagacctcacctgcgccaatcccaaacggcttctgtgccgatttcagcccggaaaactcagacgctgggcggaagcctgttcgcaagaagctggattaggacccagggttgcggagagacgcggcccctcccgcgtggacatcaccgccatgagcctctttgcgagtgacctctgggctccgctcctcactcctgctgtacaggcactgtcttcagcccgagttccaggggcctcgggggctgtttgtatcttgttcctttgtgaagtgtgttgcagaaccgacgcttactgtgcgagaatcggagggcgcgcacgcggatcccccgcctggcctggaccccgtggggtcaggttccctgccgggcggggggcaccggtgccgccccgtgttctcccacggggccctggtttcgagtctctgtcacagcctcttccggcggcagcgtgcaccgggcgggcctccgtgcacactcagcacacgcctgccacacagcgtgcgcttgcgtgtcactctggcacgaaacctgtctgcctctgtggatccacagcctggcagagccgagccgtcacctgatttttcagtgtttctacctgtgtgctggagctcatgagtattttataaactccatttaggtacttcaggaaacatgcagcattttttaaaaaatgaaaattgtttttctacttcatttttccttttagagtcaaaggatatttatttataggcctttttttttttaatatagaatctgaggctgtttgggctttgacttaaatttccatcaggcctctctccagcaggtaatccctctccttccgctgggtcccctggggaggtgtgaactcaagggcctagccccaaaacactttttctgcttttcttaatccttttccagtcccctctttttttataaacgttggcagtttgatgtttctgtttcggcataacgtaatccatttcactgtagcctaaactccagtccgaggttggatattgttcaaatgagcagggcccgagctggaagcgcaaggcagccgccgccgtgccgctcctcccttgccctcaggccaggtccctgctggaagcggctgcatcttcctgtcagccctggtttccatggtgactggcgtcacgctgccacccgagtatggctgaccttcctgcagagagaggagccgcagtcttttgcttgtggaaggagacgctgggctgtgcggtgcggagggtgatgaggatgtctggtgacagccgtgcggacaccactcctctctgcagcactgcctcccagcgccagggtcgcgggcacatcccactgagagcgggggtcctgccccatcttagagtcaaaggcagaggggcttccaggccctggatggggtattttggtgtcacctgaagtccctctgacatcaccttgtttcatcattttttatgacagaattagaaacccatccttcaagcacaataatcatcacagacttgagtttgcttcctaaagcaaaggctccgggtttgtttggaaaatttttttgatttctgaaatgaattgatttttatatttggggcatctctatagaaagtgaccaccaaggccagtaagtacgggaaaaaatgtttactaacttcctcagagattcgtgatacgcgtttctccactgacagacatttaaaaacaaccttcagctccgtttcaatcaatcacctcgacttgttttttagcatggacactgccagcaggacagacagggatggagtaaaccgaagtcaatttcagggctcttggcgtgttggacacagaagaaatcctagtgcagcctttggtagctaacagtcactgattttataattggagaatgcgtaaagattcatttttcaaggagaagagcctgcaaatggccaatgaaggaggtaaataaactaagatattccgagggaagggacccaggccacctcccttccgcaggtctgcagatgaagggttttttgaatgaaatgccactgtgcattttcagaaaaaaaaatctctgataaacagactttgaatggatgtttgttcctcctgattctcttttctcttcgtggcgacttagagttggcggatattcggaactgtgaatgtacatagcgttgagttaaaccccttgtgtgtgagacaggacgcagcgggcccctggtggcctgggggccagacccgtgggcaggtggggcatgggccctggcctgcggggacctgctggggtgtgagggcagagggagggttgccatgaaggaacttgggattttcaatggaataagtaaaacataaagtctatacttgggaatgat

SEQ ID NO: 16691 - DNA, 5610 bp, Homo sapiens
  source 1..5610: mol_type = unassigned DNA
ggcccgctccagccgccgcgcatcctcggcccgcgccccgagacccgcgcccagctagccccggccccgctcggcgccccaggcagctcggctgcgctcgccgcgggacggcgcggccatgaggctgcggggatgcggaccccgggccgcccctgcctccagcgcaggggccagcgacgctcggctgctggcgcccccggggcggaaccccttcgtgcacgagctgcgcctcagcgccctgcagaaggcccaggtggccctcatgacactgacgctcttcccggtccggctcctggttgccgctgccatgatgctgctggcctggcccctcgcacttgtcgcatccctgggctctgcggagaaggaacccgagcagcccccggccctgtggaggaaggttgtggacttcctgctgaaggccatcatgcgcaccatgtggttcgccggcggcttccaccgggtggccgtgaaggggcggcaggcgctgcccaccgaggcggccatcctcacgctcgcgcctcactcgtcctacttcgacgccatccctgtgaccatgacgatgtcctccatcgtgatgaaggcagagagcagagacatcccgatctggggaactctgatccagtatatacggcctgtgttcgtgtcccggtcagaccaggattctcgcaggaaaacagtagaagaaatcaagagacgggcgcagtccaacggaaagtggccacagataatgatttttccagaaggaacttgtacaaacaggacctgcctaattaccttcaaacctggtgcattcatccctggagcgcccgtccagcctgtggttttacgatatccaaataaactggacaccatcacatggacgtggcaaggacctggagcgctggaaatcctgtggctcacgctgtgtcagtttcacaaccaagtggaaatcgagttccttcctgtgtacagcccttctgaggaggagaagaggaaccccgcgctgtatgccagcaacgtgcggcgagtcatggccgaggccttgggtgtctccgtgactgactacacgttcgaggactgccagctggccctggcggaaggacagctccgtctccccgctgacacttgccttttagaatttgccaggctcgtgcggggcctcgggctaaaaccagaaaagcttgaaaaagatctggacagatactcagaaagagccaggatgaagggaggagagaagataggtattgcggagtttgccgcctccctggaagtccccgtttctgacttgctggaagacatgttttcactgttcgacgagagcggcagcggcgaggtggacctgcgagagtgtgtggttgccctgtctgtcgtctgccggccggcccggaccctggacaccatccagctggctttcaagatgtacggagcgcaagaggacggcagcgtcggcgaaggtgacctgtcctgcatcctcaagacggccctgggggtggcagagctcaccgtgaccgacctattccgagccattgaccaagaggagaaggggaagatcacattcgctgacttccacaggtttgcagaaatgtaccctgccttcgcagaggaatacctgtacccggatcagacacatttcgaaagctgtgcagagacctcacctgcgccaatcccaaacggcttctgtgccgatttcagcccggaaaactcagacgctgggcggaagcctgttcgcaagaagctggattaggacccagggttgcggagagacgcggcccctcccgcgtggacatcaccgccatgagcctctttgcgagtgacctctgggctccgctcctcactcctgctgtacaggcactgtcttcagcccgagttccaggggcctcgggggctgtttgtatcttgttcctttgtgaagtgtgttgcagaaccgacgcttactgtgcgagaatcggagggcgcgcacgcggatcccccgcctggcctggaccccgtggggtcaggttccctgccgggcggggggcaccggtgccgccccgtgttctcccacggggccctggtttcgagtctctgtcacagcctcttccggcggcagcgtgcaccgggcgggcctccgtgcacactcagcacacgcctgccacacagcgtgcgcttgcgtgtcactctggcacgaaacctgtctgcctctgtggatccacagcctggcagagccgagccgtcacctgatttttcagtgtttctacctgtgtgctggagctcatgagtattttataaactccatttaggtacttcaggaaacatgcagcattttttaaaaaatgaaaattgtttttctacttcatttttccttttagagtcaaaggatatttatttataggcctttttttttttaatatagaatctgaggctgtttgggctttgacttaaatttccatcaggcctctctccagcaggtaatccctctccttccgctgggtcccctggggaggtgtgaactcaagggcctagccccaaaacactttttctgcttttcttaatccttttccagtcccctctttttttataaacgttggcagtttgatgtttctgtttcggcataacgtaatccatttcactgtagcctaaactccagtccgaggttggatattgttcaaatgagcagggcccgagctggaagcgcaaggcagccgccgccgtgccgctcctcccttgccctcaggccaggtccctgctggaagcggctgcatcttcctgtcagccctggtttccatggtgactggcgtcacgctgccacccgagtatggctgaccttcctgcagagagaggagccgcagtcttttgcttgtggaaggagacgctgggctgtgcggtgcggagggtgatgaggatgtctggtgacagccgtgcggacaccactcctctctgcagcactgcctcccagcgccagggtcgcgggcacatcccactgagagcgggggtcctgccccatcttagagtcaaaggcagaggggcttccaggccctggatggggtattttggtgtcacctgaagtccctctgacatcaccttgtttcatcattttttatgacagaattagaaacccatccttcaagcacaataatcatcacagacttgagtttgcttcctaaagcaaaggctccgggtttgtttggaaaatttttttgatttctgaaatgaattgatttttatatttggggcatctctatagaaagtgaccaccaaggccagtaagtacgggaaaaaatgtttactaacttcctcagagattcgtgatacgcgtttctccactgacagacatttaaaaacaaccttcagctccgtttcaatcaatcacctcgacttgttttttagcatggacactgccagcaggacagacagggatggagtaaaccgaagtcaatttcagggctcttggcgtgttggacacagaagaaatcctagtgcagcctttggtagctaacagtcactgattttataattggagaatgcgtaaagattcatttttcaaggagaagagcctgcaaatggccaatgaaggagaaagacaacaacaggcattgtgagaggagagccaatccagatgagattttcttggtgtggttctagcatgtttggaaaacacaagaattgaaattctgtagaaaaagctgtcttggtggcaaagggacgctccggagtgttctggtattttgcggacagtagcagacatcttacagagttgaaacatggatggctggctgcctgcctgttctccactcagcattggagccaggagaaatgaaggtgggaccctcaggaaaaagcaaacccacccccggtgttcacgcaagagttgacacagctgcacctgctgctgccgtatgctgatcctaaccagaagctggctgggaggagaggccccctgggccatgaagcagagctcgggaatgtgagaagtggggctgagggcaaacggggtagtgaaggaccagcactgcccacccatagctgctctgtgtccacaagcaggtcagctgcagctctgctccatgtcaccatctgcatccagcccagcacagcagcccctcctgggactcagccagtcagatggctttgggaagaggtgacaagcaagcctgcctagatgctatatctgctgcacagacgcagaatacagcaggcccactcctggttcattggccacagtaagccatgtggtcacagctgaattcaacagccagagacgtacagtcctgcaagggagcccctcaaaggaggtgaaggatcttctgaacagcagcaccagccaccctgcagtaagtgttggatgtggtggtgagcagggccagtcctaattccacccattgacattacagacattattctggctatgaaatggtgccatgtcttggtccacagttcgaggcactatgtcatccatcaggatggcagtccaatgttctagggcactgcctccccatgggcagcacacctaaagcttcaagaagtcatcctcatgcttaatcagactcgccacctctgggtgatgggaaacgtagggattccaagtgtgtacctgttcccatgctgcctttgctgtaaagtaaattccttaacaatgccataggaggtgggcaatagtgaataagccattcatcaagcccacagatggtgctgtcagaaacactgacagcaaagacatatccatatctggaataagggaaactgaaaccaagagatactcccctcaatgatggaagagtccagtgtgatcaacctgcctccagggggctggctagtccctttcccaggaatggtacctggggctaagtatgggaccctgcttccgacatgttgggagtccagtgataactgcatcagcctaggctattgttgatgggtcagctctttgttattgatccacactcatctccatccctatttccagtgccagtttgtgaatggttctactaggtaaacactgggttggctgggaaagagacaggctgacatccactgcctgtgtcataccctggcagagactatagtaaattagacccgacaagagaaaatattagtgaacctgaaaatacagctatgtgtgatcccagtgatgtacagggagaaacagacagaaatgaagcacaagtgggcatggaataatgccacaaggcccatcacatgtgattggagccctagaaaaggaggaggacaggacagaaaaattatttgatgaaataatggccagaatttttttccaaatctataaactaagatacccaagaagctcaataagcacccagcagaaaaaatacaataaaaacacagcaagacacacatcacaaactgctgaaagccactgaaaaggagaaaaatcttaaaagcagctggagaaaaacaacatactatcaaggaacagagataagaatgaaagccaacttctcttcagaaactatgcaacccagacgtcaaggaacagagataagaacgacagccgacttctctgcagaaactatgcaacccagacgtcaaggaacagagataagaacgacagccgacttctctgcagaaactatgcaacccagacgtcaaggaacagagataagaacgacagccgacttctctgcagaaactatg

SEQ ID NO: 16692 - DNA, 2268 bp, Homo sapiens
  source 1..2268: mol_type = unassigned DNA
ccggaattgggggtgaagcgatagcgttttgcccgcattcggggcgcgcggagctggggggtccctgtggggctcccggagttaagatggcgtcctcagcggagggggacgaggggactgtggtggcgctggcgggggttctgcagtcgggtttccaggagctgagccttaacaagttggcgacgtccctgggcgcgtcagaacaggcgctgcggctgatcatctccatcttcctgggttacccctttgctttgttttatcggcattaccttttctacaaggagacctacctcatccacctcttccatacctttacaggcctctcaattgcttattttaactttggaaaccagctctaccactccctgctgtgtattgtgcttcagttcctcatccttcgactaatgggccgcaccatcactgccgtcctcactaccttttgcttccagatggcctaccttctggctggatactattacactgccaccggcaactacgatatcaagtggacaatgccacattgtgttctgactttgaagctgattggtttggctgttgactactttgacggagggaaagatcagaattccttgtcctctgagcaacagaaatatgccatacgtggtgttccttccctgctggaagttgctggtttctcctacttctatggggccttcttggtagggccccagttctcaatgaatcactacatgaagctggtgcagggagagctgattgacataccaggaaagataccaaacagcatcattcctgctctcaagcgcctgagtctgggccttttctacctagtgggctacacactgctcagcccccacatcacagaagactatctcctcactgaagactatgacaaccaccccttctggttccgctgcatgtacatgctgatctggggcaagtttgtgctgtacaaatatgtcacctgttggctggtcacagaaggagtatgcattttgacgggcctgggcttcaatggctttgaagaaaagggcaaggcaaagtgggatgcctgtgccaacatgaaggtgtggctctttgaaacaaacccccgcttcactggcaccattgcctcattcaacatcaacaccaacgcctgggtggcccgctacatcttcaaacgactcaagttccttggaaataaagaactctctcagggtctctcgttgctattcctggccctctggcacggcctgcactcaggatacctggtctgcttccagatggaattcctcattgttattgtggaaagacaggctgccaggctcattcaagagagccccaccctgagcaagctggccgccattactgtcctccagcccttctactatttggtgcaacagaccatccactggctcttcatgggttactccatgactgccttctgcctcttcacgtgggacaaatggcttaaggtgtataaatccatctatttccttggccacatcttcttcctgagcctactattcatattgccttatattcacaaagcaatggtgccaaggaaagagaagttaaagaagatggaataatccatttccctggtggcctgtgcgggactggtgcagaaactactcgtctcccttttcacagcactcctttgccccagagcagagaatggaaaagccagggaggtggaagatcgatgcttccagctgtgcctctgctgccagccaagtcttcatttggggccaaaggggaaacttttttttggagaaggcgtcttgctttgtcacccacgctggaatgcagtggcgggatctcagctcaccgcaacctccacctcctgggttcaagtgattttcctgcctcagcctcccaagtagctgggaatacaggcacgccaccatgcccagctaatttttgtattttcagtagaaacgggatttcaccacgttggccaggctggtctcgaactcctgaccgcaagtgatccacccgcctccgcctcccaaagtgctgggattacaggcgtgagccaccgtgcccggcccaaaggggaaactcttgtgggaggagcagaggggctcacatctcccctctgattcccccatgcacattgccttatctctccccatctagccaggaatctattgtgtttttcttctgccaatttactatgattgtgtatgtgccgctaccaccaccccccccatgggggggtggagaggggtgcaaggccctgcctgctccactttttctaccttggaactgtattagataaaatcacttctgtttgttcagtttttc

SEQ ID NO: 16693 - DNA, 1971 bp, Homo sapiens
  source 1..1971: mol_type = unassigned DNA
ggcgccctgacaacgcgggcgggctgggctgcgccgcctgctccccgcccctcggccgcctgcaccgggcggggcccgggccagagcgccgccgccgccgctgctgcagcagcagctgctctgcagagtggtggccggggccagggccggggtgccctccctcccaccttctcccgccatgagccagggaagtccgggggactgggcccccctagatcccacccccggacccccagcatcccccaaccccttcgtgcatgagttacatctctctcgcctccagagggttaagttctgcctcctgggggcattgctggcccccatccgagtgcttctggcctttatcgtcctctttctcctctggccctttgcctggcttcaagtggccggtcttagtgaggagcagcttcaggagccaattacaggatggaggaagactgtgtgccacaacggggtgctaggcctgagccgcctgctgtttttcctgctgggcttcctccggattcgcgttcgtggccagcgagcctctcgccttcaagcccctgtccttgttgctgccccacactccactttctttgaccccattgttctgctgccctgtgacctgcccaaagttgtgtcccgagctgagaacctttccgttcctgtcattggagcccttcttcgattcaaccaagccatcctggtatcccggcatgacccggcttctcgacgcagagtggtggaggaggtccgaaggcgggccacctcaggaggcaagtggccgcaggtgctattctttcctgagggcacctgttccaacaagaaggctttgcttaagttcaaaccaggagccttcatcgcaggggtgcctgtgcagcctgtcctcatccgctaccccaacagtctggacaccaccagctgggcatggaggggtcctggagtactcaaagtcctctggctcacagcctctcagccctgcagcattgtggatgtggagttccttcctgtgtatcaccccagccctgaggagagcagggaccccaccctctatgccaacaatgttcagagggtcatggcacaggctctgggcattccagccaccgaatgtgagtttgtagggagcttacctgtgattgtggtgggccggctgaaggtggcgttggaaccacagctctgggaactgggaaaagtgcttcggaaggctgggctgtccgctggctatgtggacgctggggcagagccaggccggagtcgaatgatcagccaggaagagtttgccaggcagctacagctctctgatcctcagacggtggctggtgcctttggctacttccagcaggataccaagggtttggtggacttccgagatgtggcccttgcactagcagctctggatgggggcaggagcctggaagagctaactcgtctggcctttgagctctttgctgaagagcaagcagagggtcccaaccgcctgctgtacaaagacggcttcagcaccatcctgcacctgctgctgggttcaccccaccctgctgccacagctttgcatgctgagctgtgccaggcaggatccagccaaggcctctccctctgtcagttccagaacttctccctccatgacccactctatgggaaactcttcagcacctacctgcgccccccacacacctctcgaggcacctcccagacaccaaatgcctcatccccaggcaaccccactgctctggccaatgggactgtgcaagcacccaagcagaagggagactgagtgcctcagcctctcaccccctcctcctcagggcagcgctaggggcctcccctatgcctcagccccatctctgctcctgtttgaattttgttattgttgtttggttgttgtttttttaagttgattttaattttttgtttggttgatttttttgtaaaaaactattttatatataaatataaatctatatctatatctattaaaaaaaatgaagtcca

SEQ ID NO: 16694 - DNA, 2574 bp, Homo sapiens
  source 1..2574: mol_type = unassigned DNA
cggcgggcgaggggcagggcagggcggaccctggacgcgcgggcgcgcgcggaaggtagcgcggggccgcgttggcgcgcacgcgcctgagcgtgcgcccggtggggccggccgggactcgccgctcgcacgcccttgggccgcggccgggcgcccgctcttccttccgcttgcgctgtgagctgaggcggtgtatgtgcggcaataacatgtcaaccccgctgcccgccatcgtgcccgccgcccggaaggccaccgctgcggtgattttcctgcatggattgggagatactgggcacggatgggcagaagcctttgcaggtatcagaagttcacatatcaaatatatctgcccgcatgcgcctgttaggcctgttacattaaatatgaacgtggctatgccttcatggtttgatattattgggctttcaccagattcacaggaggatgaatctgggattaaacaggcagcagaaaatataaaagctttgattgatcaagaagtgaagaatggcattccttctaacagaattattttgggagggttttctcagggaggagctttatctttatatactgcccttaccacacagcagaaactggcaggtgtcactgcactcagttgctggcttccacttcgggcttcctttccacagggtcctatcggtggtgctaatagagatatttctattctccagtgccacggggattgtgaccctttggttcccctgatgtttggttctcttacggtggaaaaactaaaaacattggtgaatccagccaatgtgacctttaaaacctatgaaggtatgatgcacagttcgtgtcaacaggaaatgatggatgtcaagcaattcattgataaactcctacctccaattgattgacgtcactaagaggccttgtgtagaagtacaccagcatcattgtagtagagtgtaaaccttttcccatgcccagtcttcaaatttctaatgttttgcagtgttaaaatgttttgcaaatacatgccaataacacagatcaaataatatctcctcatgagaaatttatgatcttttaagtttctatacatgtattcttataagacgacccaggatctactatattagaatagatgaagcaggtagcttcttttttctcaaatgtaattcagcaaaataatacagtactgccaccagattttttattacatcatttgaaaattagcagtatgcttaatgaaaatttgttcaggtataaatgagcagttaagatataaacaatttatgcatgctgtgacttagtctatggatttattccaaaattgcttagtcaccatgcagtgtctgtatttttatatatgtgttcatatatacataatgattataatacataataagaatgaggtggtattacattattcctaataatagggataatgctgtttattgtcaagaaaaagtaaaatcgttctcttcaattaatggcccttttattttgggaccaggcttttattttccctgatattatttctatttaatactcttttctctcaagaaaaaaaaaaaagtttgttttttctttattgtccttcatagcaggccaagtattgcctctctgcaatagacagctactgtcaatacatgctgtaatttgacattctgggtcacagatataaggtatttaaaatctatttatgctttatagagaaaccagacattaaaacttcatgcactacttatttcgaattactgtaccttatccaaatttacacctagctattaggatcttcaacccaggtaacaggaataattctgtggtttcatttttctgtaaacaactgaaagaataattagatcatattctagtatgttctgaaatatctttaagactgatcttaaaaactaacttctaagatgatttcatcttctcatagtatagagtttactttgtacacgtttgaaaccaactactgtagaagatgaggaatctattgtaattttttgctttattttcatctgccagtggacttatttgaaattttcactttagtcaaattattttttgtattagtttttgatgcagacataaaaatagcaatcattttaaattgtcaaaatttccagattactggtaaaaattatttgaaaacaaacttatgggtaataaaggctagtcagaaccctataccataaagtgtagttaccatacagattaatatgtagcaaaaatgtatgcttgatatttctcaactgtgttaatttttctgctgtattccagctgaccaaaacaatattaagaatgcatctttataaatgggtgctaattgataatggaaataatttagtaatggactatacaggatgttaataatgaagccatatgtttatgtctggatttaaaaattttaaacaatcatttactatgtcatttttctttaccttgaagaacataaactgttatttcacttctacaaatcagcaagatattatttatggcaagaaatattccattgaaatattgtgctgtaacatgggaaagtgtaaatgtttttcatggtttctatcaatgtgaaataaaatttaattctga

SEQ ID NO: 16695 - DNA, 1308 bp, Homo sapiens
  source 1..1308: mol_type = unassigned DNA
ggtgtatgtgcggcaataacatgtcaaccccgctgcccgccatcgtgcccgccgcccggaaggccaccgctgcggtgattttcctgcatggattgggagatactgggcacggatgggcagaagcctttgcaggtatcagaagttcacatatcaaatatatctgcccgcatgcgtttgatattattgggctttcaccagattcacaggaggatgaatctgggattaaacaggcagcagaaaatataaaagctttgattgatcaagaagtgaagaatggcattccttctaacagaattattttgggagggttttctcagggaggagctttatctttatatactgcccttaccacacagcagaaactggcaggtgtcactgcactcagttgctggcttccacttcgggcttcctttccacagggtcctatcggtggtgctaatagagatatttctattctccagtgccacggggattgtgaccctttggttcccctgatgtttggttctcttacggtggaaaaactaaaaacattggtgaatccagccaatgtgacctttaaaacctatgaaggtatgatgcacagttcgtgtcaacaggaaatgatggatgtcaagcaattcattgataaactcctacctccaattgattgacgtcactaagaggccttgtgtagaagtacaccagcatcattgtagtagagtgtaaaccttttcccatgcccagtcttcaaatttctaatgttttgcagtgttaaaatgttttgcaaatacatgccaataacacagatcaaataatatctcctcatgagaaatttatgatcttttaagtttctatacatgtattcttataagacgacccaggatctactatattagaatagatgaagcaggtagcttcttttttctcaaatgtaattcagcaaaataatacagtactgccaccagattttttattacatcatttgaaaattagcagtatgcttaatgaaaatttgttcaggtataaatgagcagttaagatataaacaatttatgcatgctgtgacttagtctatggatttattccaaaattgcttagtcaccatgcagtgtctgtatttttatatatgtgttcatatatacataatgattataatacataataagaatgaggtggtattacattattcctaataatagggataatgctgtttattgtcaagaaaaagtaaaatcgttctcttcaattaatggcccttttattttgggaccaggcttttattttccctgatattatttctatttaatactcttttctctcaagaaaaaa

SEQ ID NO: 16696 - DNA, 2212 bp, Homo sapiens
  source 1..2212: mol_type = unassigned DNA
atggagttacacgaacggccagatgaaagaaggaaggcccggacctccactcagggccgactaggggactggcggagggtgcacgctgatggatttactcaccgggtgtggagctccagcagctggctggagcccgcgatgacgtcacggactcgggtcacatggccaagtccgccccgccccctccccgtccccgccgctgcagcggtcgccttcggagcgaagggtaccgacccggcagaagctcggagctctcggggtatcgaggaggcaggcccgcgggcgcacgggcgagcgggccgggagccggagcggcggaggagccggcagcagcggcgcggcgggctccaggcgaggcggtcgacgctcctgaaaacttgcgcgcgcgctcgcgccactgcgcccggagcgatgaagatggtcgcgccctggacgcggttctactccaacagctgctgcttgtgctgccatgtccgcaccggcaccatcctgctcggcgtctggtatctgatcatcaatgctgtggtactgttgattttattgagtgccctggctgatccggatcagtataacttttcaagttctgaactgggaggtgactttgagttcatggatgatgccaacatgtgcattgccattgcgatttctcttctcatgatcctgatatgtgctatggctacttacggagcgtacaagcaacgcgcagcctggatcatcccattcttctgttaccagatctttgactttgccctgaacatgttggttgcaatcactgtgcttatttatccaaactccattcaggaatacatacggcaactgcctcctaattttccctacagagatgatgtcatgtcagtgaatcctacctgtttggtccttattattcttctgtttattagcattatcttgacttttaagggttacttgattagctgtgtttggaactgctaccgatacatcaatggtaggaactcctctgatgtcctggtttatgttaccagcaatgacactacggtgctgctacccccgtatgatgatgccactgtgaatggtgctgccaaggagccaccgccaccttacgtgtctgcctaagccttcaagtgggcggagctgagggcagcagcttgactttgcagacatctgagcaatagttctgttatttcacttttgccatgagcctctctgagcttgtttgttgctgaaatgctactttttaaaatttagatgttagattgaaaactgtagttttcaacatatgctttgctggaacactgtgatagattaactgtagaattcttcctgtacgattggggatataatgggcttcactaaccttccctaggcattgaaacttcccccaaatctgatggacctagaagtctgcttttgtacctgctgggccccaaagttgggcatttttctctctgttccctctcttttgaaaatgtaaaataaaaccaaaaatagacaactttttcttcagccattccagcatagagaacaaaaccttatggaaacaggaatgtcaattgtgtaatcattgttctaattaggtaaatagaagtccttatgtatgtgttacaagaatttcccccacaacatcctttatgactgaagttcaatgacagtttgtgtttggtggtaaaggattttctccatggcctgaattaagaccattagaaagcaccaggccgtgggagcagtgaccatctgctgactgttcttgtggatcttgtgtccagggacatggggtgacatgcctcgtatgtgttagagggtggaatggatgtgtttggcgctgcatgggatctggtgcccctcttctcctggattcacatccccacccagggcccgcttttactaagtgttctgccctagattggttcaaggaggtcatccaactgactttatcaagtggaattgggatatatttgatatacttctgcctaacaacatggaaaagggttttcttttccctgcaagctacatcctactgctttgaacttccaagtatgtctagtcaccttttaaaatgtaaacattttcagaaaaatgaggattgccttccttgtatgcgctttttaccttgactacctgaattgcaagggatttttatatattcatatgttacaaagtcagcaactctcctgttggttcattattgaatgtgctgtaaattaagttgtttgcaattaaaacaaggtttgcccac

SEQ ID NO: 16697 - DNA, 3173 bp, Homo sapiens
  source 1..3173: mol_type = unassigned DNA
atcctattttctgggaaaagattactaccacagtaattgagctgtgaagcggagacaaattgctctcggtggtggttcaaagtactgcaattgactggaatagcaccgcgcagttttccttcctctcgtgcaagataagagtgataggagctgtatcgattacctgcaagatagaagtagaagcgggccgggtgcggtggctcacgcctgtaatcccagcactttgggaggctgaggcgggtggatcattcgacgtcaggagttccagaccagcctgaccaacatggtgaaaccccgtctctactaaaaatacaacaaattagccgggtgtggtggcaagcgcctgtaatcccagctactcggttggttgggcaggagaatcgcttgaacccgggaggcggaggttgcagtgagccgagatcgcgccattgcactccagcctgggcgacaagagcgagactctgtctcaaaaaaaaaaaaaaaagaagtagaagggaagaaaatcgcaaggaactagactaaaagaatctcgacccttgaatggagttacacgaacggccagatgaaagaaggaaggcccggacctccactcagggccgactaggggactggcggagggtgcacgctgatggatttactcaccgggtgcttggagctccagcagctggctggagcccgcgatgacgtcacggactcgggtcacatggccaagtccgccccgccccctccccgtccccgccgctgcagcggtcgccttcggagcgaagggtaccgacccggcagaagctcggagctctcggggtatcgaggaggcaggcccgcgggcgcacgggcgagcgggccgggagccggagcggcggaggagccggcagcagcggcgcggcgggctccaggcgaggcggtcgacgctcctgaaaacttgcgcgcgcgctcgcgccactgcgcccggagcgatgaagatggtcgcgccctggacgcggttctactccaacagctgctgcttgtgctgccatgtccgcaccggcaccatcctgctcggcgtctggtatctgatcatcaatgctgtggtactgttgattttattgagtgccctggctgatccggatcagtataacttttcaagttctgaactgggaggtgactttgagttcatggatgatgccaacatgtgcattgccattgcgatttctcttctcatgatcctgatatgtgctatggctacttacggagcgtacaagcaacgcgcagcctggatcatcccattcttctgttaccagatctttgactttgccctgaacatgttggttgcaatcactgtgcttatttatccaaactccattcaggaatacatacggcaactgcctcctaattttccctacagagatgatgtcatgtcagtgaatcctacctgtttggtccttattattcttctgtttattagcattatcttgacttttaagggttacttgattagctgtgtttggaactgctaccgatacatcaatggtaggaactcctctgatgtcctggtttatgttaccagcaatgacactacggtgctgctacccccgtatgatgatgccactgtgaatggtgctgccaaggagccaccgccaccttacgtgtctgcctaagccttcaagtgggcggagctgagggcagcagcttgactttgcagacatctgagcaatagttctgttatttcacttttgccatgagcctctctgagcttgtttgttgctgaaatgctactttttaaaatttagatgttagattgaaaactgtagttttcaacatatgctttgctggaacactgtgatagattaactgtagaattcttcctgtacgattggggatataatgggcttcactaaccttccctaggcattgaaacttcccccaaatctgatggacctagaagtctgcttttgtacctgctgggccccaaagttgggcatttttctctctgttccctctcttttgaaaatgtaaaataaaaccaaaaatagacaactttttcttcagccattccagcatagagaacaaaaccttatggaaacaggaatgtcaattgtgtaatcattgttctaattaggtaaatagaagtccttatgtatgtgttacaagaatttcccccacaacatcctttatgactgaagttcaatgacagtttgtgtttggtggtaaaggattttctccatggcctgaattaagaccattagaaagcaccaggccgtgggagcagtgaccatctgctgactgttcttgtggatcttgtgtccagggacatggggtgacatgcctcgtatgtgttagagggtggaatggatgtgtttggcgctgcatgggatctggtgcccctcttctcctggattcacatccccacccagggcccgcttttactaagtgttctgccctagattggttcaaggaggtcatccaactgactttatcaagtggaattgggatatatttgatatacttctgcctaacaacatggaaaagggttttcttttccctgcaagctacatcctactgctttgaacttccaagtatgtctagtcaccttttaaaatgtaaacattttcagaaaaatgaggattgccttccttgtatgcgctttttaccttgactacctgaattgcaagggatttttatatattcatatgttacaaagtcagcaactctcctgttggttcattattgaatgtgctgtaaattaagttgtttgcaattaaaacaaggtttgcccacatccaagatgaccttgtgattttgtgctgattgtgtctgaggacctttccctccacatatggtctggcagatgcacccagttcagcctaaggagtaggcttttttttgggggggggaggtcgggtgggggggatttttaatcttttaattttcaagatggttaaaatattgaaatgtttaagtggataactatattattcataaaatgactgagtgaaaactaatacactatgagatgaaaagtacttgtcagggattttcaagcttttgctcaagtaattactatgaaataacaatttctagaaatgaagaacaatccgtggagaataaattaccattggtgtgggggaaaaaagccaaacagaagtagaaaaaggtgtagccggcatacaaatgttatctacagtgtatttttagat

SEQ ID NO: 16698 - DNA, 681 bp, Homo sapiens
  source 1..681: mol_type = unassigned DNA
atgaagatggtcgcgccctggacgcggttctactccaacagctgctgcttgtgctgccatgtccgcaccggcaccatcctgctcggcgtctggtatctgatcatcaatgctgtggtactgttgattttattgagtgccctggctgatccggatcagtataacttttcaagttctgaactgggaggtgactttgagttcatggatgatgccaacatgtgcattgccattgcgatttctcttctcatgatcctgatatgtgctatggctacttacggagcgtacaagcaacgcgcagcctggatcatcccattcttctgttaccagatctttgactttgccctgaacatgttggttgcaatcactgtgcttatttatccaaactccattcaggaatacatacggcaactgcctcctaattttccctacagagatgatgtcatgtcagtgaatcctacctgtttggtccttattattcttctgtttattagcattatcttgacttttaagggttacttgattagctgtgtttggaactgctaccgatacatcaatggtaggaactcctctgatgtcctggtttatgttaccagcaatgacactacggtgctgctacccccgtatgatgatgccactgtgaatggtgctgccaaggagccaccgccaccttacgtgtctgcctaa

SEQ ID NO: 16699 - DNA, 2223 bp, Homo sapiens
  source 1..2223: mol_type = unassigned DNA
cttccccttctctgccctgctccaggcaccaggctctttccccttcagtgtctcagaggaggggacggcagcaccatggacccccgcttgtccactgtccgccagacctgctgctgcttcaatgtccgcatcgcaaccaccgccctggccatctaccatgtgatcatgagcgtcttgttgttcatcgagcactcagtagaggtggcccatggcaaggcgtcctgcaagctctcccagatgggctacctcaggatcgctgacctgatctccagcttcctgctcatcaccatgctcttcatcatcagcctgagcctactgatcggcgtagtcaagaaccgggagaagtacctgctgcccttcctgtccctgcaaatcatggactatctcctgtgcctgctcaccctgctgggctcctacattgagctgcccgcctacctcaagttggcctcccggagccgtgctagctcctccaagttccccctgatgacgctgcagctgctggacttctgcctgagcatcctgaccctctgcagctcctacatggaagtgcccacctatctcaacttcaagtccatgaaccacatgaattacctccccagccaggaggatatgcctcataaccagttcatcaagatgatgatcatcttttccatcgccttcatcactgtccttatcttcaaggtctacatgttcaagtgcgtgtggcggtgctacagattgatcaagtgcatgaactcggtggaggagaagagaaactccaagatgctccagaaggtggtcctgccgtcctacgaggaagccctgtctttgccatcgaagaccccagaggggggcccagcaccacccccatactcagaggtgtgaccctcgccaggccccagccccagtgctgggaggggtggagctgcctcataatctgcttttttgctttggtggcccctgtggcctgggtgggccctcccgcccctccctggcaggacaatctgcttgtgtctccctcgctggcctgctcctcctgcagggcctgtgagctgctcacaactgggtcaacgctttaggctgagtcactcctcgggtctctccataattcagcccaacaatgcttggtttatttcaatcagctctgacacttgtttagacgattggccattctaaagttggtgagtttgtcaagcaactatcgacttgatcagttcagccaagcaactgacaaatcaaaaacccacttgtcagttcagtaaaataatttggtcaaacaacagtctattgcattgatttataaatagttgtcagttcacatagcaatttaatcaagtaatcattaattagttaccccctatatataaatatatgtaatcaatttcttcaaatagcttgcttacatgataatcaattagccaaccatgagtcatttagaatagtgataaatagaatacacagaatagtgatgaaattcaatttaaaaaatcacgttagcctccaaaccatttaattcaaatgaacccatcaactggatgccaactctggcgaatgtaggacctctgagtggctgtataattgttaattcaaatgaaattcatttaaacagttgacaaactgtcattcaacaattagctccaggaaataacagttatttcatcataaaacagtcccttcaaacacacaattgttctgctgaagagttgtcatcaacaatccaatgctcacctattcagttgctctgtggtcagtgtggctgcataacagtggattccatgaaaggagtcattttagtgatgagctgccagtccattcccaggccaggctgtcgctggccatccattcagtcgattcagtcataggcgaatctgttctgcccgaggcttgtggtcaagcaaaaattcagccctgaaatcaggcacatctgttcgttggactaaacccacaggttagttcagtcaaagcaggcaacccccttgtgggcactgaccctgccactggggtcatggcggttgtggcagctggggaggtttggccccaacagccctcctgtgcctgcttccctgtgtgtcggggtcctccagggagctgacccagaggtggaggccacggaggcagggtctctggggactgtcggggggtacagagggagaaggctctgcaagagctccctggcaatacccccttgtgtaattgctttgtgtgcgacagggaggaagtttcaataaagcagcaacaagcttc

SEQ ID NO: 16700 - DNA, 986 bp, Homo sapiens
  source 1..986: mol_type = unassigned DNA
agtgtctcagaggaggggacggcagcaccatggacccccgcttgtccactgtccgccagacctgctgctgcttcaatgtccgcatcgcaaccaccgccctggccatctaccatgtgatcatgagcgtcttgttgttcatcgagcactcagtagaggtggcccatggcaaggcgtcctgcaagctctcccagatgggctacctcaggatcgctgacctgatctccagcttcctgctcatcaccatgctcttcatcatcagcctgagcctactgatcggcgtagtcaagaaccgggagaagtacctgctgcccttcctgtccctgcaaatcatggactatctcctgtgcctgctcaccctgctgggctcctacattgagctgcccgcctacctcaagttggcctcccggagccgtgctagctcctccaagttccccctgatgacgctgcagctgctggacttctgcctgagcatcctgaccctctgcagctcctacatggaagtgcccacctatctcaacttcaagtccatgaaccacatgaattacctccccagccaggaggatatgcctcataaccagttcatcaagatgatgatcatcttttccatcgccttcatcactgtccttatcttcaaggtctacatgttcaagtgcgtgtggcggtgctacagattgatcaagtgcatgaactcggtggaggagaagagaaactccaagatgctccagaaggtggtcctgccgtcctacgaggaagccctgtctcctgcagggcctgtgagctgctcacaactgggtcaacgctttaggctgagtcactcctcgggtctctccataattcagcccaacaatgcttggtttatttcaatcagctctgacacttgtttagacgattggccattctaaagttggtgagtttgtcaagcaactatcgacttgatcagttcagccaagcaactgacaaatcaaaaacccacttgtcagttcagt

SEQ ID NO: 16701 - DNA, 13471 bp, Homo sapiens
  source 1..13471: mol_type = unassigned DNA
gcggcggcggcagcggcgtcggctcggggttctccgggagagggggagtgcgcggcggccgcagctgccacaaaccaggtgaagctttgttctaagaatatttgtttcatctagtttatgagtccaaatgatatagactgtaaatgtcacagcagtggtgaaagactgctcggtcatgagcaccgacagtaactcactggcacgtgaatttctgaccgatgtcaaccggctttgcaatgcagtggtccagagggtggaggccagggaggaagaagaggaggagacgcacatggcaacccttggacagtaccttgtccatggtcgaggatttctattacttaccaagctaaattctataattgatcaggcattgacatgtagagaagaactcctgactcttcttctgtctctccttccactggtatggaagatacctgtccaagaagaaaaggcaacagattttaacctaccgctctcagcagatataatcctgaccaaagaaaagaactcaagttcacaaagatccactcaggaaaaattacatttagaaggaagtgccctgtctagtcaggtttctgcaaaagtaaatgtttttcgaaaaagcagacgacagcgtaaaattacccatcgctattctgtaagagatgcaagaaagacacagctctccacctcagattcagaagccaattcagatgaaaaaggcatagcaatgaataagcatagaaggccccatctgctgcatcattttttaacatcgtttcctaaacaagaccaccccaaagctaaacttgaccgcttagcaaccaaagaacagactcctccagatgctatggctttggaaaattccagagagattattccaagacaggggtcaaacactgacattttaagtgagccagctgccttgtctgttatcagtaacatgaacaattctccatttgacttatgtcatgttttgttatctttattagaaaaagtttgtaagtttgacgttaccttgaatcataattctcctttagcagccagtgtagtgcccacactaactgaattcctagcaggctttggggactgctgcagtctgagcgacaacttggagagtcgagtagtttctgcaggttggaccgaagaaccggtggctttgattcaaaggatgctctttcgaacagtgttgcatcttctgtcagtagatgttagtactgcagagatgatgccagaaaatcttaggaaaaatttaactgaattgcttagagcagctttaaaaattagaatatgcctagaaaagcagcctgacccttttgcaccaagacaaaagaaaacactgcaggaggttcaggaagattttgtgttttcaaagtatcgtcatagagcccttcttttacctgagcttttggaaggagttcttcagattctgatctgttgtcttcaaagtgcagcttcaaatcccttctacttcagtcaagccatggatttggttcaagaattcattcagcatcatggatttaatttatttgaaacagcagttcttcaaatggaatggctggttttaagagatggagttcctcccgaggcctcagagcatttgaaagccctaataaatagtgtgatgaaaataatgagcactgtcaaaaaagtgaaatcagagcaacttcatcattcgatgtgtacaagaaaaaggcacagacgatgtgaatattctcattttatgcatcatcaccgagatctctcaggtcttctggtttcggcttttaaaaaccaggtttccaaaaacccatttgaagagactgcagatggagatgtttattatcctgagcggtgctgttgcattgcagtgtgtgcccatcagtgcttgcgcttactacagcaggcttccttgagcagcacttgtgtccagatcctatcgggtgttcataacattggaatatgctgttgtatggatcccaaatctgtaatcattcctttgctccatgcttttaaattgccagcactgaaaaattttcagcagcatatattgaatatccttaacaaacttattttggatcagttaggaggagcagagatatcaccaaaaattaaaaaagcagcttgtaatatttgtactgttgactctgaccaactagcccaattagaagagacactgcagggaaacttatgtgatgctgaactctcctcaagtttatccagtccttcttacagatttcaagggatcctgcccagcagtggatctgaagatttgttgtggaaatgggatgctttaaaggcttatcagaactttgtttttgaagaagacagattacatagtatacagattgcaaatcacatttgcaatttaatccagaaaggcaatatagttgttcagtggaaattatataattacatatttaatcctgtgctccaaagaggagttgaattagcacatcattgtcaacacctaagcgttacttcagctcaaagtcatgtatgtagccatcataaccagtgcttgcctcaggacgtgcttcagatttatgtaaaaactctgcctatcctgcttaaatccagggtaataagagatttgtttttgagttgtaatggagtaagtcaaataatcgaattaaattgcttaaatggtattcgaagtcattctctaaaagcatttgaaactctgataatcagcctaggggagcaacagaaagatgcctcagttccagatattgatgggatagacattgaacagaaggagttgtcctctgtacatgtgggtacttcttttcatcatcagcaagcttattcagattctcctcagagtctcagcaaattttatgctggcctcaaagaagcttatccaaagagacggaagactgttaaccaagatgttcatatcaacacaataaacctattcctctgtgtggcttttttatgcgtaagtaaagaagcagagtctgacagggagtcggccaatgactcagaagatacttctggctatgacagcacagccagcgagcctttaagtcatatgctgccatgtatatctctcgagagccttgtcttgccttctcctgaacatatgcaccaagcagcagacatttggtctatgtgtcgttggatctacatgttgagttcagtgttccagaaacagttttataggcttggtggtttccgagtatgccataagttaatatttatgataatacagaaactgttcagaagtcacaaagaggagcaaggaaaaaaggagggagatacaagtgtaaatgaaaaccaggatttaaacagaatttctcaacctaagagaactatgaaggaagatttattatctttggctataaaaagtgaccccataccatcagaactaggtagtctaaaaaagagtgctgacagtttaggtaaattagagttacagcatatttcttccataaatgtggaagaagtttcagctactgaagccgctcccgaggaagcaaagctatttacaagtcaagaaagtgagacctcacttcaaagtatacgacttttggaagcccttctggccatttgtcttcatggtgccagaactagtcaacagaagatggaattggagttacctaatcagaacttgtctgtggaaagtatattatttgaaatgagggaccatctttcccagtcaaaggtgattgaaacacaactagcaaagcctttatttgatgccctgcttcgagttgccctcgggaattattcagcagattttgaacataatgatgctatgactgagaagagtcatcaatctgcagaagaattgtcatcccagcctggtgatttttcagaagaagctgaggattctcagtgttgtagttttaaacttttagttgaagaagaaggttacgaagcagatagtgaaagcaatcctgaagatggcgaaacccaggatgatggggtagacttaaagtctgaaacagaaggtttcagtgcatcaagcagtccaaatgacttactcgaaaacctcactcaaggggaaataatttatcctgagatttgtatgctggaattaaatttgctttctgctagtaaagccaaacttgatgtgcttgcccatgtatttgagagttttttgaaaattattaggcagaaagaaaagaatgtttttctgctcatgcaacagggaactgtgaaaaatcttttaggagggttcttgagtattttaacacaggatgattctgattttcaagcatgccagagagtattggtggatcttttggtatctttgatgagttcaagaacatgttcagaagagctaacccttcttttgagaatatttctggagaaatctccttgtacaaaaattcttcttctgggtattctgaaaattattgaaagtgatactactatgagcccttcacagtatctaaccttccctttactgcacgctccaaatttaagcaacggtgtttcatcacaaaagtatcctgggattttaaacagtaaggccatgggtttattgagaagagcacgagtttcacggagcaagaaagaggctgatagagagagttttccccatcggctgctttcatcttggcacatagccccagtccacctgccgttgctggggcaaaactgctggccacacctatcagaaggtttcagtgtttccctgtggtttaatgtggagtgtatccatgaagctgagagtactacagaaaaaggaaagaagataaagaaaagaaacaaatcattaattttaccagatagcagttttgatggtacagagagcgacagaccagaaggtgcagagtacataaatcctggtgaaagactcatagaagaaggatgtattcatataatttcactgggatccaaagcgttgatgatccaagtgtgggctgatccccacaatgccactcttatctttcgtgtgtgcatggattcaaatgatgacatgaaagctgttttactagcacaggttgaatcacaggagaatattttcctcccaagcaaatggcaacatttagtactcacctacttacagcagccccaagggaaaaggaggattcatgggaaaatctccatatgggtctctggacagaggaagcctgatgttactttggattttatgcttccaagaaaaacaagtttgtcatctgatagcaataaaacattttgcatgattggccattgtttatcatcccaagaagagtttttgcagttggctggaaaatgggacctgggaaatttgcttctcttcaacggagctaaggttggttcacaagaggccttttatctgtatgcttgtggacccaaccatacatctgtaatgccatgtaagtatggcaagccagtcaatgactactccaaatatattaataaagaaattttgcgatgtgaacaaatcagagaactttttatgaccaagaaagatgtggatattggtctcttaattgaaagtctttcagttgtttatacaacttactgtcctgctcagtataccatctatgaaccagtgattagacttaaaggtcaaatgaaaacccaactctctcaaagacccttcagctcaaaagaagttcagagcatcttattagaacctcatcatctaaagaatctccaacctactgaatataaaactattcaaggcattctgcacgaaattggtggaactggcatatttgtttttctctttgccagggttgttgaactcagtagctgtgaagaaactcaagcattagcactgcgagttatactctcattaattaaatacaaccaacaaagagtacatgaattagaaaattgtaatggactttctatgattcatcaggtgttgatcaaacaaaaatgcattgttgggttttacattttgaagacccttcttgaaggatgctgtggtgaagatattatttatatgaatgagaatggagagtttaagttggatgtagactctaatgctataatccaagatgttaagctgttagaggaactattgcttgactggaagatatggagtaaagcagagcaaggtgtttgggaaactttgctagcagctctagaagtcctcatcagagcagatcaccaccagcagatgtttaatattaagcagttattgaaagctcaagtggttcatcactttctactgacttgtcaggttttgcaggaatacaaagaggggcaactcacacccatgccccgagaggtttgtagatcatttgtgaaaattatagcagaagtccttggatctcctccagatttggaattattgacaattatcttcaatttccttttagcagttcaccctcctactaatacttacgtttgtcacaatcccacgaacttctacttttctttgcacatagatggcaagatctttcaggagaaagtgcggtcaatcatgtacctgaggcattccagcagtggaggaaggtcccttatgagccctggatttatggtaataagcccatctggttttactgcttcaccatatgaaggagagaattcctctaatattattccacaacagatggccgcccatatgctgcgttctagaagcctaccagcattccctacttcttcactactaacgcaatcacaaaaactgactggaagtttgggttgtagtatcgacaggttacaaaatattgcagatacttatgttgccacccaatcaaagaaacaaaattctttggggagttccgacacactgaaaaaaggcaaagaggacgcattcatcagtagctgtgagtctgcaaaaactgtttgtgaaatggaagctgtcctctcagcccaggtctctgtcagtgatgtcccaaagggagtgctgggatttccagtggtcaaagcagatcataaacagttgggagcagaacccaggtcagaagatgacagtcctggggatgagtcctgcccacgccgacctgattacctaaagggattggcctccttccagcgaagccacagcactattgcaagccttgggctagcttttccttcacagaacggatctgcagctgttggccgttggccaagtcttgttgatagaaacactgatgattgggaaaactttgcctattctcttggttatgagccaaattacaaccgaactgcaagtgctcacagtgtaactgaagactgtttggtacctatatgctgtggattatatgaactcctaagtggggttcttcttatcctgcctgatgttttgcttgaagatgtgatggacaagcttattcaagcagatacacttttggtcctcgttaaccacccatcaccagctatacaacaaggtgttattaaactattagatgcatattttgctagagcatctaaggaacaaaaagataaatttctgaagaatcgtggattttccttgctagccaaccagttgtatcttcatcgaggaactcaagaattgttagaatgcttcatcgaaatgttctttggtcgacatattggccttgatgaagaatttgatctggaagatgtgagaaacatgggattgtttcagaagtggtctgtcattcctattctgggactaatagagacctctctatatgacaacatactcttgcataatgctcttttacttcttctccaaattttaaattcttgttctaaggtagcagatatgttgctggataatggtctactctatgtgttatgtaatacagtagcagccctgaatggattagaaaagaacattcccatgagtgaatataaattgcttgcttgtgatatacagcaacttttcatagcagttacaattcatgcttgcagttcctcaggctcacaatattttagggttattgaagaccttattgtaatgcttggatatcttcaaaatagcaaaaacaagaggacacaaaatatggctgttgcactacagcttagagttctccaggctgctatggaatttataaggaccaccgcaaatcatgactctgaaaacctcacagattcactccagtcaccttctgctccccatcatgcagtagttcaaaagcggaaaagcattgctggtcctcgaaaatttccccttgctcaaactgaatcgcttctgatgaaaatgcgttcagtggcaaatgatgagcttcatgtgatgatgcaacggagaatgagccaagagaaccctagccaagcaactgaaacggaacttgcgcagagactacagaggctcactgttttagcagtcaacaggattatttatcaagaatttaattcagacattattgacattttgagaactccagaaaatgtaactcaaagcaagacctcagttttccagaccgaaatttctgaggaaaatattcatcatgaacagtcttctgttttcaatccatttcagaaagaaatttttacatatctggtagaaggattcaaagtatctattggttcaagtaaagccagtggttccaagcagcaatggactaaaattctgtggtcttgtaaggagaccttccgaatgcagcttgggagactactagtgcatattttgtcgccagcccacgctgcacaagagagaaagcaaatttttgaaatagttcatgaaccaaatcatcaggaaatactacgagactgtctcagcccatccctacaacatggagccaagttagttttgtatttgtcagagttgatacataatcaccaaggtgaattgactgaagaagagctaggcacagcagaactgcttatgaatgctttgaagttatgtggtcacaagtgcatccctcccagtgcatcaacaaaagcagaccttattaaaatgatcaaagaggaacaaaagaaatatgaaactgaagaaggagtgaataaagctgcttggcagaaaacagttaacaataatcaacaaagtctctttcagcgtctggattcaaaatcaaaggatatatctaaaatagctgcagatatcacccaggcagtgtctctctcccaaggaaatgagagaaaaaaggtgatccagcatattagaggaatgtataaagtagatttgagtgccagcagacattggcaggaacttattcagcagctgacacatgatagagcagtatggtatgaccccatctactatccaacctcatggcagttggatccaacagaagggccaaatcgagagaggagacgtttacagagatgttatttaactattccaaataagtatctccttagggatagacagaaatcagaagatgttgtcaaaccaccactctcttacctgtttgaagacaaaactcattcttctttctcttctactgtcaaagacaaagctgcaagtgaatctataagagtgaatcgaagatgcatcagtgttgcaccatctagagagacagctggtgaattgttactaggtaaatgtggaatgtattttgtggaagataatgcttctgatacagttgaaagttcgagccttcagggagagttggaaccagcatcattttcctggacatatgaagaaattaaagaagttcacaagcgttggtggcaattgagagataatgctgtagaaatctttctaacaaatggcagaacactcctgttggcatttgataacaccaaggttcgtgatgatgtataccacaatatactcacaaataacctccctaatcttctggaatatggtaacatcaccgctctgacaaatttatggtatactgggcaaattactaattttgaatatttgactcacttaaacaaacatgctggccgatccttcaatgatctcatgcagtatcctgtgttcccatttatacttgctgactacgttagtgagacacttgacctcaatgatctgttgatatacagaaatctctctaaacctatagctgttcagtataaagaaaaagaagatcgttatgtggacacatacaagtacttggaggaagagtaccgcaaaggagccagagaagatgaccccatgcctcccgtgcagccctatcactatggctcccactattccaatagcggcactgtgcttcacttcctggtcaggatgcctcctttcactaaaatgtttttagcctatcaagatcaaagttttgacattccagacagaacttttcattctacaaatacaacttggcgactctcatcttttgaatctatgactgatgtgaaagaacttatcccagagtttttctatcttccagagttcctagttaaccgtgaaggttttgattttggtgtgcgtcagaatggtgaacgggttaatcacgtcaaccttcccccttgggcgcgtaatgatcctcgtctttttatcctcatccatcggcaggctctagagtctgactacgtgtcgcagaacatctgtcagtggattgacttggtgtttgggtataagcaaaaggggaaggcttctgttcaagcgatcaatgtttttcatcctgctacatattttggaatggatgtctctgcagttgaagatccagttcagagacgagcgctagaaaccatgataaaaacctacgggcagactccccgtcagctgttccacatggcccatgtgagcagacctggagccaagctcaatattgaaggagagcttccagctgctgtggggttgctagtgcagtttgctttcagggagacccgagaacaggtcaaagaaatcacctatccgagtcctttgtcatggataaaaggcttgaaatggggggaatacgtgggttcccccagtgctccagtacctgtggtctgcttcagccagccccacggagaaagatttggctctctccaggctctgcccaccagagcaatctgtggtttgtcacggaatttctgtcttctgatgacatatagcaaggaacaaggtgtgagaagcatgaacagtacggacattcagtggtcagccatcctgagctggggatatgctgataatattttaaggttgaagagtaaacaaagtgagcctccagtaaactttattcaaagttcacaacagtaccaggtgactagttgtgcttgggtgcctgacagttgccagctgtttactggaagcaaatgcggtgtcatcacagcctacacaaacagatttacaagcagcacgccatcagaaatagaaatggagactcaaatacatctctatggtcacacagaagagataaccagcttatttgtttgcaaaccatacagtatactgataagtgtgagcagagacggaacctgcatcatatgggatttaaacaggttatgctatgtacaaagtctggcgggacacaaaagccctgtcacagctgtctctgccagtgaaacctcaggtgatattgctactgtgtgtgattcagctggcggaggcagtgacctcagactctggacggtgaacggggatctcgttggacatgtccactgcagggagatcatctgttccgtggctttctccaaccagcctgagggagtatctatcaatgtaatcgctgggggattagaaaatggaattgtaaggttatggagcacatgggacttaaagcctgtgagagaaattacatttcccaaatcaaataagcccatcatcagccttacattttcttgtgatggccaccatttgtacacagcaaacagtgatgggaccgtgattgcctggtgtcggaaggaccagcagcgcttgaaacagccaatgttctattccttccttagcagctatgcagccgggtgaatgcgaatgaacttcacgttctccaaagcactttaactccaaactagatttgttgacttcaccagttttaggaggttgaacctaaagaaatggatgactggacaaaccatccaaataatgataaagtctattcatctgcacaaaattctgaagagtcacatgatcctaagaggaaagttctgttctattttagtgataatctggaagattgtgtcaatatgcactagccaacaagttttaagcctcgcatggtacattaaaatgatattcttaaaattttttcccaccaaggtattccaaagaaaatattaaggtctcccctttttctatgattccaaaaggaccagtagaatttaaattggttggttgattgtttatataaaacacactaaaattatattttaaaagtttactgccatgaaatactcctcccaccacacacacatgctccaaaagaggaaagaaaaaaagataatttttaggacttgataattgctttctttgagaagcaaattattcagtaggtgcctctgtaccaaatattttatggaatatctaaatactaaaataaactatgaatgaatctcaaaattaggcagtttttgccagttgctttcttagctcaaaggagaaccagaatttttttgacagccacaaacaagaatacaggtatcttggatttcagacacattctgtttcttcataaaaattttacttaaaatctgtaacgctagatattgactatccttagttgagtcactgaggtttaaacacaatggtaagtcttaaagtctgctatttacagagcattgaatctgtaccaatttgcaatagaaagccttcagtatgcaagaagtttgcatgggtattaagaacacagcctaaataaggcatttgatctaatctgcaggaagaattttcttccccaaaacagaattataaaagcttactttaaacaggaggcagaataattcttttaggaaaccatttcattctgtttctactaacctataccatctgagaattctaggaagaataataaaatctcgtgtattccacagcaaacttacataccataaagacagaattcctaaacatcttggagccgtctgtctctcccatatgatggctgtctgtatatttttacttggggtgctgctttattggctttgaaaacactgtcagataagctcagtaatatgttaccatgggataaaaatatgtatccctgcctaagaataacttgtgcatttgttatggaaatttaattcatatggtgtttacagtactacttttgtaacttccagactttctaaaacattctgcttaaaaaccatataaaatataattccaaagtctctgctgtcaagatagattcgagagaaagcacgtggccatgtatgctttaaccttaaactgcatacacatgtagtgatacctaggctgcatttagatcaccgtgtgctcaggccaggtgtgaatcctgaggtccatggaggtgcagagatgagattactcctattcacgttgaagtgatttgctttgttaacaaaaaattgcagctattgtctagctttcatttttttactgagaactttaaattagtcccctattagaatagggttgctactcatctttttttaaaaaccgaatttcatcatttatctaaagagaaaatatgcagaataactggtcttgttaagagtgcaatattatatttttatgtaaaaataaaaattaatttggggggattatttattcagcatgaaacctaatatgtatatgtttgaaatacttcataatgtgcatgttgtagcaaacatttctgtaaattatcacaagctctgttacctttatatacactgcctcttcaatttggaaataaatttc

SEQ ID NO: 16702 - DNA, 13480 bp, Homo sapiens
  source 1..13480: mol_type = unassigned DNA
gcggcggcggcagcggcgtcggctcggggttctccgggagagggggagtgcgcggcggccgcagctgccacaaaccaggtaaagctttgttctaagaatatttgtttcatctagtttatgagtccaaatgatatagactgtaaatgtcacagcagtggtgaaagactgctcggtcatgagcaccgacagtaactcactggcacgtgaatttctgaccgatgtcaaccggctttgcaatgcagtggtccagagggtggaggccagggaggaagaagaggaggagacgcacatggcaacccttggacagtaccttgtccatggtcgaggatttctattacttaccaagctaaattctataattgatcaggcattgacatgtagagaagaactcctgactcttcttctgtctctccttccactggtatggaagatacctgtccaagaagaaaaggcaacagattttaacctaccgctctcagcagatataatcctgaccaaagaaaagaactcaagttcacaaagatccactcaggaaaaattacatttagaaggaagtgccctgtctagtcaggtttctgcaaaagtaaatgtttttcgaaaaagcagacgacagcgtaaaattacccatcgctattctgtaagagatgcaagaaagacacagctctccacctcagattcagaagccaattcagatgaaaaaggcatagcaatgaataagcatagaaggccccatctgctgcatcattttttaacatcgtttcctaaacaagaccaccccaaagctaaacttgaccgcttagcaaccaaagaacagactcctccagatgctatggctttggaaaattccagagagattattccaagacaggggtcaaacactgacattttaagtgagccagctgccttgtctgttatcagtaacatgaacaattctccatttgacttatgtcatgttttgttatctttattagaaaaagtttgtaagtttgacgttaccttgaatcataattctcctttagcagccagtgtagtgcccacactaactgaattcctagcaggctttggggactgctgcagtctgagcgacaacttggagagtcgagtagtttctgcaggttggaccgaagaaccggtggctttgattcaaaggatgctctttcgaacagtgttgcatcttctgtcagtagatgttagtactgcagagatgatgccagaaaatcttaggaaaaatttaactgaattgcttagagcagctttaaaaattagaatatgcctagaaaagcagcctgacccttttgcaccaagacaaaagaaaacactgcaggaggttcaggaagattttgtgttttcaaagtatcgtcatagagcccttcttttacctgagcttttggaaggagttcttcagattctgatctgttgtcttcaaagtgcagcttcaaatcccttctacttcagtcaagccatggatttggttcaagaattcattcagcatcatggatttaatttatttgaaacagcagttcttcaaatggaatggctggttttaagagatggagttcctcccgaggcctcagagcatttgaaagccctaataaatagtgtgatgaaaataatgagcactgtcaaaaaagtgaaatcagagcaacttcatcattcgatgtgtacaagaaaaaggcacagacgatgtgaatattctcattttatgcatcatcaccgagatctctcaggtcttctggtttcggcttttaaaaaccaggtttccaaaaacccatttgaagagactgcagatggagatgtttattatcctgagcggtgctgttgcattgcagtgtgtgcccatcagtgcttgcgcttactacagcaggcttccttgagcagcacttgtgtccagatcctatcgggtgttcataacattggaatatgctgttgtatggatcccaaatctgtaatcattcctttgctccatgcttttaaattgccagcactgaaaaattttcagcagcatatattgaatatccttaacaaacttattttggatcagttaggaggagcagagatatcaccaaaaattaaaaaagcagcttgtaatatttgtactgttgactctgaccaactagcccaattagaagagacactgcagggaaacttatgtgatgctgaactctcctcaagtttatccagtccttcttacagatttcaagggatcctgcccagcagtggatctgaagatttgttgtggaaatgggatgctttaaaggcttatcagaactttgtttttgaagaagacagattacatagtatacagattgcaaatcacatttgcaatttaatccagaaaggcaatatagttgttcagtggaaattatataattacatatttaatcctgtgctccaaagaggagttgaattagcacatcattgtcaacacctaagcgttacttcagctcaaagtcatgtatgtagccatcataaccagtgcttgcctcaggacgtgcttcagatttatgtaaaaactctgcctatcctgcttaaatccagggtaataagagatttgtttttgagttgtaatggagtaagtcaaataatcgaattaaattgcttaaatggtattcgaagtcattctctaaaagcatttgaaactctgataatcagcctaggggagcaacagaaagatgcctcagttccagatattgatgggatagacattgaacagaaggagttgtcctctgtacatgtgggtacttcttttcatcatcagcaagcttattcagattctcctcagagtctcagcaaattttatgctggcctcaaagaagcttatccaaagagacggaagactgttaaccaagatgttcatatcaacacaataaacctattcctctgtgtggcttttttatgcgtaagtaaagaagcagagtctgacagggagtcggccaatgactcagaagatacttctggctatgacagcacagccagcgagcctttaagtcatatgctgccatgtatatctctcgagagccttgtcttgccttctcctgaacatatgcaccaagcagcagacatttggtctatgtgtcgttggatctacatgttgagttcagtgttccagaaacagttttataggcttggtggtttccgagtatgccataagttaatatttatgataatacagaaactgttcagaagtcacaaagaggagcaaggaaaaaaggagggagatacaagtgtaaatgaaaaccaggatttaaacagaatttctcaacctaagagaactatgaaggaagatttattatctttggctataaaaagtgaccccataccatcagaactaggtagtctaaaaaagagtgctgacagtttaggtaaattagagttacagcatatttcttccataaatgtggaagaagtttcagctactgaagccgctcccgaggaagcaaagctatttacaagtcaagaaagtgagacctcacttcaaagtatacgacttttggaagcccttctggccatttgtcttcatggtgccagaactagtcaacagaagatggaattggagttacctaatcagaacttgtctgtggaaagtatattatttgaaatgagggaccatctttcccagtcaaaggtgattgaaacacaactagcaaagcctttatttgatgccctgcttcgagttgccctcgggaattattcagcagattttgaacataatgatgctatgactgagaagagtcatcaatctgcagaagaattgtcatcccagcctggtgatttttcagaagaagctgaggattctcagtgttgtagttttaaacttttagttgaagaagaaggttacgaagcagatagtgaaagcaatcctgaagatggcgaaacccaggatgatggggtagacttaaagtctgaaacagaaggtttcagtgcatcaagcagtccaaatgacttactcgaaaacctcactcaaggggaaataatttatcctgagatttgtatgctggaattaaatttgctttctgctagtaaagccaaacttgatgtgcttgcccatgtatttgagagttttttgaaaattattaggcagaaagaaaagaatgtttttctgctcatgcaacagggaactgtgaaaaatcttttaggagggttcttgagtattttaacacaggatgattctgattttcaagcatgccagagagtattggtggatcttttggtatctttgatgagttcaagaacatgttcagaagagctaacccttcttttgagaatatttctggagaaatctccttgtacaaaaattcttcttctgggtattctgaaaattattgaaagtgatactactatgagcccttcacagtatctaaccttccctttactgcacgctccaaatttaagcaacggtgtttcatcacaaaagtatcctgggattttaaacagtaaggccatgggtttattgagaagagcacgagtttcacggagcaagaaagaggctgatagagagagttttccccatcggctgctttcatcttggcacatagccccagtccacctgccgttgctggggcaaaactgctggccacacctatcagaaggtttcagtgtttccctgtggtttaatgtggagtgtatccatgaagctgagagtactacagaaaaaggaaagaagataaagaaaagaaacaaatcattaattttaccagatagcagttttgatggtacagagagcgacagaccagaaggtgcagagtacataaatcctggtgaaagactcatagaagaaggatgtattcatataatttcactgggatccaaagcgttgatgatccaagtgtgggctgatccccacaatgccactcttatctttcgtgtgtgcatggattcaaatgatgacatgaaagctgttttactagcacaggttgaatcacaggagaatattttcctcccaagcaaatggcaacatttagtactcacctacttacagcagccccaagggaaaaggaggattcatgggaaaatctccatatgggtctctggacagaggaagcctgatgttactttggattttatgcttccaagaaaaacaagtttgtcatctgatagcaataaaacattttgcatgattggccattgtttatcatcccaagaagagtttttgcagttggctggaaaatgggacctgggaaatttgcttctcttcaacggagctaaggttggttcacaagaggccttttatctgtatgcttgtggacccaaccatacatctgtaatgccatgtaagtatggcaagccagtcaatgactactccaaatatattaataaagaaattttgcgatgtgaacaaatcagagaactttttatgaccaagaaagatgtggatattggtctcttaattgaaagtctttcagttgtttatacaacttactgtcctgctcagtataccatctatgaaccagtgattagacttaaaggtcaaatgaaaacccaactctctcaaagacccttcagctcaaaagaagttcagagcatcttattagaacctcatcatctaaagaatctccaacctactgaatataaaactattcaaggcattctgcacgaaattggtggaactggcatatttgtttttctctttgccagggttgttgaactcagtagctgtgaagaaactcaagcattagcactgcgagttatactctcattaattaaatacaaccaacaaagagtacatgaattagaaaattgtaatggactttctatgattcatcaggtgttgatcaaacaaaaatgcattgttgggttttacattttgaagacccttcttgaaggatgctgtggtgaagatattatttatatgaatgagaatggagagtttaagttggatgtagactctaatgctataatccaagatgttaagctgttagaggaactattgcttgactggaagatatggagtaaagcagagcaaggtgtttgggaaactttgctagcagctctagaagtcctcatcagagcagatcaccaccagcagatgtttaatattaagcagttattgaaagctcaagtggttcatcactttctactgacttgtcaggttttgcaggaatacaaagaggggcaactcacacccatgccccgagaggtttgtagatcatttgtgaaaattatagcagaagtccttggatctcctccagatttggaattattgacaattatcttcaatttccttttagcagttcaccctcctactaatacttacgtttgtcacaatcccacgaacttctacttttctttgcacatagatggcaagatctttcaggagaaagtgcggtcaatcatgtacctgaggcattccagcagtggaggaaggtcccttatgagccctggatttatggtaataagcccatctggttttactgcttcaccatatgaaggagagaattcctctaatattattccacaacagatggccgcccatatgctgcgttctagaagcctaccagcattccctacttcttcactactaacgcaatcacaaaaactgactggaagtttgggttgtagtatcgacaggttacaaaatattgcagatacttatgttgccacccaatcaaagaaacaaaattctttggggagttccgacacactgaaaaaaggcaaagaggacgcattcatcagtagctgtgagtctgcaaaaactgtttgtgaaatggaagctgtcctctcagcccaggtctctgtcagtgatgtcccaaagggagtgctgggatttccagtggtcaaagcagatcataaacagttgggagcagaacccaggtcagaagatgacagtcctggggatgagtcctgcccacgccgacctgattacctaaagggattggcctccttccagcgaagccacagcactattgcaagccttgggctagcttttccttcacagaacggatctgcagctgttggccgttggccaagtcttgttgatagaaacactgatgattgggaaaactttgcctattctcttggttatgagccaaattacaaccgaactgcaagtgctcacagtgtaactgaagactgtttggtacctatatgctgtggattatatgaactcctaagtggggttcttcttatcctgcctgatgttttgcttgaagatgtgatggacaagcttattcaagcagatacacttttggtcctcgttaaccacccatcaccagctatacaacaaggtgttattaaactattagatgcatattttgctagagcatctaaggaacaaaaagataaatttctgaagaatcgtggattttccttgctagccaaccagttgtatcttcatcgaggaactcaagaattgttagaatgcttcatcgaaatgttctttggtcgacatattggccttgatgaagaatttgatctggaagatgtgagaaacatgggattgtttcagaagtggtctgtcattcctattctgggactaatagagacctctctatatgacaacatactcttgcataatgctcttttacttcttctccaaattttaaattcttgttctaaggtagcagatatgttgctggataatggtctactctatgtgttatgtaatacagtagcagccctgaatggattagaaaagaacattcccatgagtgaatataaattgcttgcttgtgatatacagcaacttttcatagcagttacaattcatgcttgcagttcctcaggctcacaatattttagggttattgaagaccttattgtaatgcttggatatcttcaaaatagcaaaaacaagaggacacaaaatatggctgttgcactacagcttagagttctccaggctgctatggaatttataaggaccaccgcaaatcatgactctgaaaacctcacagattcactccagtcaccttctgctccccatcatgcagtagttcaaaagcggaaaagcattgctggtcctcgaaaatttccccttgctcaaactgaatcgcttctgatgaaaatgcgttcagtggcaaatgatgagcttcatgtgatgatgcaacggagaatgagccaagagaaccctagccaagcaactgaaacggaacttgcgcagagactacagaggctcactgttttagcagtcaacaggattatttatcaagaatttaattcagacattattgacattttgagaactccagaaaatgtaactcaaagcaagacctcagttttccagaccgaaatttctgaggaaaatattcatcatgaacagtcttctgttttcaatccatttcagaaagaaatttttacatatctggtagaaggattcaaagtatctattggttcaagtaaagccagtggttccaagcagcaatggactaaaattctgtggtcttgtaaggagaccttccgaatgcagcttgggagactactagtgcatattttgtcgccagcccacgctgcacaagagagaaagcaaatttttgaaatagttcatgaaccaaatcatcaggaaatactacgagactgtctcagcccatccctacaacatggagccaagttagttttgtatttgtcagagttgatacataatcaccaaggtgaattgactgaagaagagctaggcacagcagaactgcttatgaatgctttgaagttatgtggtcacaagtgcatccctcccagtgcatcaacaaaagcagaccttattaaaatgatcaaagaggaacaaaagaaatatgaaactgaagaaggagtgaataaagctgcttggcagaaaacagttaacaataatcaacaaagtctctttcagcgtctggattcaaaatcaaaggatatatctaaaatagctgcagatatcacccaggcagtgtctctctcccaaggaaatgagagaaaaaaggtgatccagcatattagaggaatgtataaagtagatttgagtgccagcagacattggcaggaacttattcagcagctgacacatgatagagcagtatggtatgaccccatctactatccaacctcatggcagttggatccaacagaagggccaaatcgagagaggagacgtttacagagatgttatttaactattccaaataagtatctccttagggatagacagaaatcagaagatgttgtcaaaccaccactctcttacctgtttgaagacaaaactcattcttctttctcttctactgtcaaagacaaagctgcaagtgaatctataagagtgaatcgaagatgcatcagtgttgcaccatctagagagacagctggtgaattgttactaggtaaatgtggaatgtattttgtggaagataatgcttctgatacagttgaaagttcgagccttcagggagagttggaaccagcatcattttcctggacatatgaagaaattaaagaagttcacaagcgttggtggcaattgagagataatgctgtagaaatctttctaacaaatggcagaacactcctgttggcatttgataacaccaaggttcgtgatgatgtataccacaatatactcacaaataacctccctaatcttctggaatatggtaacatcaccgctctgacaaatttatggtatactgggcaaattactaattttgaatatttgactcacttaaacaaacatgctggccgatccttcaatgatctcatgcagtatcctgtgttcccatttatacttgctgactacgttagtgagacacttgacctcaatgatctgttgatatacagaaatctctctaaacctatagctgttcagtataaagaaaaagaagatcgttatgtggacacatacaagtacttggaggaagagtaccgcaaaggagccagagaagatgaccccatgcctcccgtgcagccctatcactatggctcccactattccaatagcggcactgtgcttcacttcctggtcaggatgcctcctttcactaaaatgtttttagcctatcaagatcaaagttttgacattccagacagaacttttcattctacaaatacaacttggcgactctcatcttttgaatctatgactgatgtgaaagaacttatcccagagtttttctatcttccagagttcctagttaaccgtgaaggttttgattttggtgtgcgtcagaatggtgaacgggttaatcacgtcaaccttcccccttgggcgcgtaatgatcctcgtctttttatcctcatccatcggcaggctctagagtctgactacgtgtcgcagaacatctgtcagtggattgacttggtgtttgggtataagcaaaaggggaaggcttctgttcaagcgatcaatgtttttcatcctgctacatattttggaatggatgtctctgcagttgaagatccagttcagagacgagcgctagaaaccatgataaaaacctacgggcagactccccgtcagctgttccacatggcccatgtgagcagacctggagccaagctcaatattgaaggagagcttccagctgctgtggggttgctagtgcagtttgctttcagggagacccgagaacaggtcaaagaaatcacctatccgagtcctttgtcatggataaaaggcttgaaatggggggaatacgtgggttcccccagtgctccagtacctgtggtctgcttcagccagccccacggagaaagatttggctctctccaggctctgcccaccagagcaatctgtggtttgtcacggaatttctgtcttctgatgacatatagcaaggaacaaggtgtgagaagcatgaacagtacggacattcagtggtcagccatcctgagctggggatatgctgataatattttaaggttgaagagtaaacaaagtgagcctccagtaaactttattcaaagttcacaacagtaccaggtgactagttgtgcttgggtgcctgacagttgccagctgtttactggaagcaaatgcggtgtcatcacagcctacacaaacagatttacaagcagcacgccatcagaaatagaaatggagactcaaatacatctctatggtcacacagaagagataaccagcttatttgtttgcaaaccatacagtatactgataagtgtgagcagagacggaacctgcatcatatgggatttaaacaggttatgctatgtacaaagtctggcgggacacaaaagccctgtcacagctgtctctgccagtgaaacctcaggtgatattgctactgtgtgtgattcagctggcggaggcagtgacctcagactctggacggtgaacggggatctcgttggacatgtccactgcagggagatcatctgttccgtggctttctccaaccagcctgagggagtatctatcaatgtaatcgctgggggattagaaaatggaattgtaaggttatggagcacatgggacttaaagcctgtgagagaaattacatttcccaaatcaaataagcccatcatcagccttacattttcttgtgatggccaccatttgtacacagcaaacagtgatgggaccgtgattgcctggtgtcggaaggaccagcagcgcttgaaacagccaatgttctattccttccttagcagctatgcagccgggtgaatgcgaatgaacttcacgttctccaaagcactttaactccaaactagatttgttgacttcaccagttttaggaggttgaacctaaagaaatggatgactggacaaaccatccaaataatgataaagtctattcatctgcacaaaattctgaagagtcacatgatcctaagaggaaagttctgttctattttagtgataatctggaagattgtgtcaatatgcactagccaacaagttttaagcctcgcatggtacattaaaatgatattcttaaaattttttcccaccaaggtattccaaagaaaatattaaggtctcccctttttctatgattccaaaaggaccagtagaatttaaattggttggttgattgtttatataaaacacactaaaattatattttaaaagtttactgccatgaaatactcctcccaccacacacacatgctccaaaagaggaaagaaaaaaagataatttttaggacttgataattgctttctttgagaagcaaattattcagtaggtgcctctgtaccaaatattttatggaatatctaaatactaaaataaactatgaatgaatctcaaaattaggcagtttttgccagttgctttcttagctcaaaggagaaccagaatttttttgacagccacaaacaagaatacaggtatcttggatttcagacacattctgtttcttcataaaaattttacttaaaatctgtaacgctagatattgactatccttagttgagtcactgaggtttaaacacaatggtaagtcttaaagtctgctatttacagagcattgaatctgtaccaatttgcaatagaaagccttcagtatgcaagaagtttgcatgggtattaagaacacagcctaaataaggcatttgatctaatctgcaggaagaattttcttccccaaaacagaattataaaagcttactttaaacaggaggcagaataattcttttaggaaaccatttcattctgtttctactaacctataccatctgagaattctaggaagaataataaaatctcgtgtattccacagcaaacttacataccataaagacagaattcctaaacatcttggagccgtctgtctctcccatatgatggctgtctgtatatttttacttggggtgctgctttattggctttgaaaacactgtcagataagctcagtaatatgttaccatgggataaaaatatgtatccctgcctaagaataacttgtgcatttgttatggaaatttaattcatatggtgtttacagtactacttttgtaacttccagactttctaaaacattctgcttaaaaaccatataaaatataattccaaagtctctgctgtcaagatagattcgagagaaagcacgtggccatgtatgctttaaccttaaactgcatacacatgtagtgatacctaggctgcatttagatcaccgtgtgctcaggccaggtgtgaatcctgaggtccatggaggtgcagagatgagattactcctattcacgttgaagtgatttgctttgttaacaaaaaattgcagctattgtctagctttcatttttttactgagaactttaaattagtcccctattagaatagggttgctactcatctttttttaaaaaccgaatttcatcatttatctaaagagaaaatatgcagaataactggtcttgttaagagtgcaatattatatttttatgtaaaaataaaaattaatttggggggattatttattcagcatgaaacctaatatgtatatgtttgaaatacttcataatgtgcatgttgtagcaaacatttctgtaaattatcacaagctctgttacctttatatacactgcctcttcaatttggaaataaatttcataaaaata

SEQ ID NO: 16703 - DNA, 6650 bp, Homo sapiens
  source 1..6650: mol_type = unassigned DNA
tgtttggggttttggcctctttcagtgtttattcattcttacgtgggaaagttgtattccgaggtttctgtggtgcatgaagcttttgccttcaccatctgttcccgtgtcttcctcgggtgacatcagagtacagcagtattttcccttgccatctaatggggtttgggctgtttgactcaaccgtgtgtgttcctcaatgccaggggaataatcctaccctaagtcagctgaacagaagccaggatctaactgcaaacaagagacccagcttgcttaacagcatggaagagaccagtttcgttgcagctacctgggaagacggttgctaattagcctgcaacaaagagttccttgctcatctaaaagaggcaatcaccgttcaggtgaagctttgttctaagaatatttgtttcatctagtttatgagtccaaatgatatagactgtaaatgtcacagcagtggtgaaagactgctcggtcatgagcaccgacagtaactcactggcacgtgaatttctgaccgatgtcaaccggctttgcaatgcagtggtccagagggtggaggccagggaggaagaagaggaggagacgcacatggcaacccttggacagtaccttgtccatggtcgaggatttctattacttaccaagctaaattctataattgatcaggcattgacatgtagagaagaactcctgactcttcttctgtctctccttccactggtatggaagatacctgtccaagaagaaaaggcaacagattttaacctaccgctctcagcagatataatcctgaccaaagaaaagaactcaagttcacaaagatccactcaggaaaaattacatttagaaggaagtgccctgtctagtcaggtttctgcaaaagtaaatgtttttcgaaaaagcagacgacagcgtaaaattacccatcgctattctgtaagagatgcaagaaagacacagctctccacctcagattcagaagccaattcagatgaaaaaggcatagcaatgaataagcatagaaggccccatctgctgcatcattttttaacatcgtttcctaaacaagaccaccccaaagctaaacttgaccgcttagcaaccaaagaacagactcctccagatgctatggctttggaaaattccagagagattattccaagacaggggtcaaacactgacattttaagtgagccagctgccttgtctgttatcagtaacatgaacaattctccatttgacttatgtcatgttttgttatctttattagaaaaagtttgtaagtttgacgttaccttgaatcataattctcctttagcagccagtgtagtgcccacactaactgaattcctagcaggctttggggactgctgcagtctgagcgacaacttggagagtcgagtagtttctgcaggttggaccgaagaaccggtggctttgattcaaaggatgctctttcgaacagtgttgcatcttctgtcagtagatgttagtactgcagagatgatgccagaaaatcttaggaaaaatttaactgaattgcttagagcagctttaaaaattagaatatgcctagaaaagcagcctgacccttttgcaccaagacaaaagaaaacactgcaggaggttcaggaagattttgtgttttcaaagtatcgtcatagagcccttcttttacctgagcttttggaaggagttcttcagattctgatctgttgtcttcaaagtgcagcttcaaatcccttctacttcagtcaagccatggatttggttcaagaattcattcagcatcatggatttaatttatttgaaacagcagttcttcaaatggaatggctggttttaagagatggagttcctcccgaggcctcagagcatttgaaagccctaataaatagtgtgatgaaaataatgagcactgtcaaaaaagtgaaatcagagcaacttcatcattcgatgtgtacaagaaaaaggcacagacgatgtgaatattctcattttatgcatcatcaccgagatctctcaggtcttctggtttcggcttttaaaaaccaggtttccaaaaacccatttgaagagactgcagatggagatgtttattatcctgagcggtgctgttgcattgcagtgtgtgcccatcagtgcttgcgcttactacagcaggcttccttgagcagcacttgtgtccagatcctatcgggtgttcataacattggaatatgctgttgtatggatcccaaatctgtaatcattcctttgctccatgcttttaaattgccagcactgaaaaattttcagcagcatatattgaatatccttaacaaacttattttggatcagttaggaggagcagagatatcaccaaaaattaaaaaagcagcttgtaatatttgtactgttgactctgaccaactagcccaattagaagagacactgcagggaaacttatgtgatgctgaactctcctcaagtttatccagtccttcttacagatttcaagggatcctgcccagcagtggatctgaagatttgttgtggaaatgggatgctttaaaggcttatcagaactttgtttttgaagaagacagattacatagtatacagattgcaaatcacatttgcaatttaatccagaaaggcaatatagttgttcagtggaaattatataattacatatttaatcctgtgctccaaagaggagttgaattagcacatcattgtcaacacctaagcgttacttcagctcaaagtcatgtatgtagccatcataaccagtgcttgcctcaggacgtgcttcagatttatgtaaaaactctgcctatcctgcttaaatccagggtaataagagatttgtttttgagttgtaatggagtaagtcaaataatcgaattaaattgcttaaatggtattcgaagtcattctctaaaagcatttgaaactctgataatcagcctaggggagcaacagaaagatgcctcagttccagatattgatgggatagacattgaacagaaggagttgtcctctgtacatgtgggtacttcttttcatcatcagcaagcttattcagattctcctcagagtctcagcaaattttatgctggcctcaaagaagcttatccaaagagacggaagactgttaaccaagatgttcatatcaacacaataaacctattcctctgtgtggcttttttatgcgtaagtaaagaagcagagtctgacagggagtcggccaatgactcagaagatacttctggctatgacagcacagccagcgagcctttaagtcatatgctgccatgtatatctctcgagagccttgtcttgccttctcctgaacatatgcaccaagcagcagacatttggtctatgtgtcgttggatctacatgttgagttcagtgttccagaaacagttttataggcttggtggtttccgagtatgccataagttaatatttatgataatacagaaactgttcagaagtcacaaagaggagcaaggaaaaaaggagggagatacaagtgtaaatgaaaaccaggatttaaacagaatttctcaacctaagagaactatgaaggaagatttattatctttggctataaaaagtgaccccataccatcagaactaggtagtctaaaaaagagtgctgacagtttaggtaaattagagttacagcatatttcttccataaatgtggaagaagtttcagctactgaagccgctcccgaggaagcaaagctatttacaagtcaagaaagtgagacctcacttcaaagtatacgacttttggaagcccttctggccatttgtcttcatggtgccagaactagtcaacagaagatggaattggagttacctaatcagaacttgtctgtggaaagtatattatttgaaatgagggaccatctttcccagtcaaaggtgattgaaacacaactagcaaagcctttatttgatgccctgcttcgagttgccctcgggaattattcagcagattttgaacataatgatgctatgactgagaagagtcatcaatctgcagaagaattgtcatcccagcctggtgatttttcagaagaagctgaggattctcagtgttgtagttttaaacttttagttgaagaagaaggttacgaagcagatagtgaaagcaatcctgaagatggcgaaacccaggatgatggggtagacttaaagtctgaaacagaaggtttcagtgcatcaagcagtccaaatgacttactcgaaaacctcactcaaggggaaataatttatcctgagatttgtatgctggaattaaatttgctttctgctagtaaagccaaacttgatgtgcttgcccatgtatttgagagttttttgaaaattattaggcagaaagaaaagaatgtttttctgctcatgcaacagggaactgtgaaaaatcttttaggagggttcttgagtattttaacacaggatgattctgattttcaagcatgccagagagtattggtggatcttttggtatctttgatgagttcaagaacatgttcagaagagctaacccttcttttgagaatatttctggagaaatctccttgtacaagagcgacagaccagaaggtgcagagtacataaatcctggtgaaagactcatagaagaaggatgtattcatataatttcactgggatccaaagcgttgatgatccaagtgtgggctgatccccacaatgccactcttatctttcgtgtgtgcatggattcaaatgatgacatgaaagctgttttactagcacaggttgaatcacaggagaatattttcctcccaagcaaatggcaacatttagtactcacctacttacagcagccccaagggaaaaggaggattcatgggaaaatctccatatgggtctctggacagaggaagcctgatgttactttggattttatgcttccaagaaaaacaagtttgtcatctgatagcaataaaacattttgcatgattggccattgtttatcatcccaagaagagtttttgcagttggctggaaaatgggacctgggaaatttgcttctcttcaacggagctaaggttggttcacaagaggccttttatctgtatgcttgtggacccaaccatacatctgtaatgccatgtaagtatggcaagccagtcaatgactactccaaatatattaataaagaaattttgcgatgtgaacaaatcagagaactttttatgaccaagaaagatgtggatattggtctcttaattgaaagtctttcagttgtttatacaacttactgtcctgctcagtataccatctatgaaccagtgattagacttaaaggtcaaatgaaaacccaactctctcaaagacccttcagctcaaaagaagttcagagcatcttattagaacctcatcatctaaagaatctccaacctactgaatataaaactattcaaggcattctgcacgaaattggtggaactggcatatttgtttttctctttgccagggttgttgaactcagtagctgtgaagaaactcaagcattagcactgcgagttatactctcattaattaaatacaaccaacaaagagtacatgaattagaaaattgtaatggactttctatgattcatcaggtgttgatcaaacaaaaatgcattgttgggttttacattttgaagacccttcttgaaggatgctgtggtgaagatattatttatatgaatgagaatggagagtttaagttggatgtagactctaatgctataatccaagatgttaagctgttagaggaactattgcttgactggaagatatggagtaaagcagagcaaggtgtttgggaaactttgctagcagctctagaagtcctcatcagagcagatcaccaccagcagatgtttaatattaagcagttattgaaagctcaagtggttcatcactttctactgacttgtcaggttttgcaggaatacaaagaggggcaactcacacccatgccccgagaggtttgtagatcatttgtgaaaattatagcagaagtccttggatctcctccagatttggaattattgacaattatcttcaatttccttttagcagttcaccctcctactaatacttacgtttgtcacaatcccacgaacttctacttttctttgcacatagatggcaagatctttcaggagaaagtgcggtcaatcatgtacctgaggcattccagcagtggaggaaggtcccttatgagccctggatttatggtaataagcccatctggttttactgcttcaccatatgaaggagagaattcctctaatattattccacaacagatggccgcccatatgctgcgttctagaagcctaccagcattccctacttcttcactactaacgcaatcacaaaaactgactggaagtttgggttgtagtatcgacaggttacaaaatattgcagatacttatgttgccacccaatcaaagaaacaaaattctttggggagttccgacacactgaaaaaaggcaaagaggacgcattcatcagtagctgtgagtctgcaaaaactgtttgtgaaatggaagctgtcctctcagcccaggtctctgtcagtgatgtcccaaagggagtgctgggatttcca

SEQ ID NO: 16704 - DNA, 2699 bp, Homo sapiens
  source 1..2699: mol_type = unassigned DNA
gtgacaagcgctgccggccgcggtgtcttcttcgtgccggcgtcgcagtggccgggcctcttgcgtctggtaacgccgctgtctctaacgccagcccttggcgcccgcgccccgccaccgcagcgcccggcagtccgcggcccaaccgccgcccgcgcccccgctccccgcaccgtacccggccgcctcgcgccatggcggcccccggcagcgcccggcgacccctgctgctgctactgctgttgctgctgctcggcctcatgcattgtgcgtcagcagcaatgtttatggtgaaaaatggcaacgggaccgcgtgcataatggccaacttctctgctgccttctcagtgaactacgacaccaagagtggccctaagaacatgacctttgacctgccatcagatgccacagtggtgctcaaccgcagctcctgtggaaaagagaacacttctgaccccagtctcgtgattgcttttggaagaggacatacactcactctcaatttcacgagaaatgcaacacgttacagcgtccagctcatgagttttgtttataacttgtcagacacacaccttttccccaatgcgagctccaaagaaatcaagactgtggaatctataactgacatcagggcagatatagataaaaaatacagatgtgttagtggcacccaggtccacatgaacaacgtgaccgtaacgctccatgatgccaccatccaggcgtacctttccaacagcagcttcagccggggagagacacgctgtgaacaagacaggccttccccaaccacagcgccccctgcgccacccagcccctcgccctcacccgtgcccaagagcccctctgtggacaagtacaacgtgagcggcaccaacgggacctgcctgctggccagcatggggctgcagctgaacctcacctatgagaggaaggacaacacgacggtgacaaggcttctcaacatcaaccccaacaagacctcggccagcgggagctgcggcgcccacctggtgactctggagctgcacagcgagggcaccaccgtcctgctcttccagttcgggatgaatgcaagttctagccggtttttcctacaaggaatccagttgaatacaattcttcctgacgccagagaccctgcctttaaagctgccaacggctccctgcgagcgctgcaggccacagtcggcaattcctacaagtgcaacgcggaggagcacgtccgtgtcacgaaggcgttttcagtcaatatattcaaagtgtgggtccaggctttcaaggtggaaggtggccagtttggctctgtggaggagtgtctgctggacgagaacagcatgctgatccccatcgctgtgggtggtgccctggcggggctggtcctcatcgtcctcatcgcctacctcgtcggcaggaagaggagtcacgcaggctaccagactatctagcctggtgcacgcaggcacagcagctgcaggggcctctgttcctttctctgggcttagggtcctgtcgaaggggaggcacactttctggcaaacgtttctcaaatctgcttcatccaatgtgaagttcatcttgcagcatttactatgcacaacagagtaactatcgaaatgacggtgttaattttgctaactgggttaaatattttgctaactggttaaacattaatatttaccaaagtaggattttgagggtgggggtgctctctctgagggggtgggggtgccgctgtctctgaggggtgggggtgccgctgtctctgaggggtgggggtgccgctctctctgagggggtgggggtgccgctttctctgagggggtgggggtgccgctctctctgagggggtgggggtgctgctctctccgaggggtggaatgccgctgtctctgaggggtgggggtgccgctctaaattggctccatatcatttgagtttagggttctggtgtttggtttcttcattctttactgcactcagatttaagccttacaaagggaaagcctctggccgtcacacgtaggacgcatgaaggtcactcgtggtgaggctgacatgctcacacattacaacagtagagagggaacatcctaagacagaggaactccagagatgagtgtctggagcgcttcagttcagctttaaaggccaggacgggccacacgtggctggcggcctcgttccagtggcggcacgtccttgggcgtctctaatgtctgcagctcaagggctggcacttttttaaatataaaaatgggtgttatttttatttttatttgtaaagtgatttttggtcttctgttgacattcggggtgatcctgttctgcgctgtgtacaatgtgagatcggtgcgttctcctgatgttttgccgtggcttggggattgtacacgggaccagctcacgtaatgcattgcctgtaacaatgtaataaaaagcctctttctttttggggtgggccttgtccttctgtcagctaaaatgggagctcatgagagaaggacgtcagggaaacggggttgagggtggtctcggtgcagagagaagggtgtcagggaaacggggggtgagggtggtcttggtgccagacgtagggaatggtgttgggagtggcccgagtgcctggcacagttgtctggttcattcatgtaacatgataatttttaaatcattaaaaaaattacctttcatacaga

SEQ ID NO: 16705 - DNA, 1441 bp, Homo sapiens
  source 1..1441: mol_type = unassigned DNA
accgccgcccgcgcccccgctccccgcaccgtacccggccgcctcgcgccatggcggcccccggcagcgcccggcgacccctgctgctgctactgctgttgctgctgctcggcctcatgcattgtgcgtcagcagcaatgtttatggtgaaaaatggcaacgggaccgcgtgcataatggccaacttctctgctgccttctcagtgaactacgacaccaagagtggccctaagaacatgacctttgacctgccatcagatgccacagtggtgctcaaccgcagctcctgtggaaaagagaacacttctgaccccagtctcgtgattgcttttggaagaggacatacactcactctcaatttcacgagaaatgcaacacgttacagcgtccagctcatgagttttgtttataacttgtcagacacacaccttttccccaatgcgagctccaaagagacacgctgtgaacaagacaggccttccccaaccacagcgccccctgcgccacccagcccctcgccctcacccgtgcccaagagcccctctgtggacaagtacaacgtgagcggcaccaacgggacctgcctgctggccagcatggggctgcagctgaacctcacctatgagaggaaggacaacacgacggtgacaaggcttctcaacatcaaccccaacaagacctcggccagcgggagctgcggcgcccacctggtgactctggagctgcacagcgagggcaccaccgtcctgctcttccagttcgggatgaatgcaagttctagccggtttttcctacaaggaatccagttgaatacaattcttcctgacgccagagaccctgcctttaaagctgccaacggctccctgcgagcgctgcaggccacagtcggcaattcctacaagtgcaacgcggaggagcacgtccgtgtcacgaaggcgttttcagtcaatatattcaaagtgtgggtccaggctttcaaggtggaaggtggccagtttggctctgtggaggagtgtctgctggacgagaacagcatgctgatccccatcgctgtgggtggtgccctggcggggctggtcctcatcgtcctcatcgcctacctcgtcggcaggaagaggagtcacgcaggctaccagactatctagcctggtgcacgcaggcacagcagctgcaggggcctctgttcctttctctgggcttagggtcctgtcgaaggggaggcacactttctggcaaacgtttctcaaatctgcttcatccaatgtgaagttcatcttgcagcatttactatgcacaacagagtaactatcgaaatgacggtgttaattttgctaactgggttaaatattttgctaactggttaaacattaatatttaccaaagtaggattttgagggtgggggtgctctctctgagggggtgggggtgccgctgtctctga

SEQ ID NO: 16706 - DNA, 1867 bp, Homo sapiens
  source 1..1867: mol_type = unassigned DNA
ccgattcctggcttttgcaaggctgtggtcggtggtcatcagtgctcttgacccaggtccagcgagccttttccctggtgttgcagctgttgttgtaccgccgccgtcgccgccgtcgccgcctgctctgcggggtcatggtgtgcttccgcctcttcccggttccgggctcagggctcgttctggtctgcctagtcctgggagctgtgcggtcttatgcattggaacttaatttgacagattcagaaaatgccacttgcctttatgcaaaatggcagatgaatttcacagtacgctatgaaactacaaataaaacttataaaactgtaaccatttcagaccatggcactgtgacatataatggaagcatttgtggggatgatcagaatggtcccaaaatagcagtgcagttcggacctggcttttcctggattgcgaattttaccaaggcagcatctacttattcaattgacagcgtctcattttcctacaacactggtgataacacaacatttcctgatgctgaagataaaggaattcttactgttgatgaacttttggccatcagaattccattgaatgacctttttagatgcaatagtttatcaactttggaaaagaatgatgttgtccaacactactgggatgttcttgtacaagcttttgtccaaaatggcacagtgagcacaaatgagttcctgtgtgataaagacaaaacttcaacagtggcacccaccatacacaccactgtgccatctcctactacaacacctactccaaaggaaaaaccagaagctggaacctattcagttaataatggcaatgatacttgtctgctggctaccatggggctgcagctgaacatcactcaggataaggttgcttcagttattaacatcaaccccaatacaactcactccacaggcagctgccgttctcacactgctctacttagactcaatagcagcaccattaagtatctagactttgtctttgctgtgaaaaatgaaaaccgattttatctgaaggaagtgaacatcagcatgtatttggttaatggctccgttttcagcattgcaaataacaatctcagctactgggatgcccccctgggaagttcttatatgtgcaacaaagagcagactgtttcagtgtctggagcatttcagataaatacctttgatctaagggttcagcctttcaatgtgacacaaggaaagtattctacagctcaagactgcagtgcagatgacgacaacttccttgtgcccatagcggtgggagctgccttggcaggagtacttattctagtgttgctggcttattttattggtctcaagcaccatcatgctggatatgagcaattttagaatctgcaacctgattgattatataaaaatacatgcaaataacaagattttcttacctctcagttgttgaaacactttgcttcttaaaattgatatgttgaaactttaattcttttatcaatcccagcattttgagatcagtctttattaataaaacctgttctctttaatcagcttaaaatccaaagtgtcatatttactggtcctggagacaaacttgttcaaaagaacatcaacgtgcaatgttttaaggtctatcttaagaagccctggccaaattttgatcctaaccttgaagtatgccttgaacttattaacatggccattataagaataaaatatgtagttgtgtcttaatggaattaataaatgtcatttcactactggtgttctgtttcaatgtataaggactatagtgatttaaactcatcaatgtgcctttgcataaagttcattaaataaatattgatgtggtataaatgcccatcagatatgct

SEQ ID NO: 16707 - DNA, 4030 bp, Homo sapiens
  source 1..4030: mol_type = unassigned DNA
ccgattcctggcttttgcaaggctgtggtcggtggtcatcagtgctcttgacccaggtccagcgagccttttccctggtgttgcagctgttgttgtaccgccgccgtcgccgccgtcgccgcctgctctgcggggtcatggtgtgcttccgcctcttcccggttccgggctcagggctcgttctggtctgcctagtcctgggagctgtgcggtcttatgcattggaacttaatttgacagattcagaaaatgccacttgcctttatgcaaaatggcagatgaatttcacagtacgctatgaaactacaaataaaacttataaaactgtaaccatttcagaccatggcactgtgacatataatggaagcatttgtggggatgatcagaatggtcccaaaatagcagtgcagttcggacctggcttttcctggattgcgaattttaccaaggcagcatctacttattcaattgacagcgtctcattttcctacaacactggtgataacacaacatttcctgatgctgaagataaaggaattcttactgttgatgaacttttggccatcagaattccattgaatgacctttttagatgcaatagtttatcaactttggaaaagaatgatgttgtccaacactactgggatgttcttgtacaagcttttgtccaaaatggcacagtgagcacaaatgagttcctgtgtgataaagacaaaacttcaacagtggcacccaccatacacaccactgtgccatctcctactacaacacctactccaaaggaaaaaccagaagctggaacctattcagttaataatggcaatgatacttgtctgctggctaccatggggctgcagctgaacatcactcaggataaggttgcttcagttattaacatcaaccccaatacaactcactccacaggcagctgccgttctcacactgctctacttagactcaatagcagcaccattaagtatctagactttgtctttgctgtgaaaaatgaaaaccgattttatctgaaggaagtgaacatcagcatgtatttggttaatggctccgttttcagcattgcaaataacaatctcagctactgggatgcccccctgggaagttcttatatgtgcaacaaagagcagactgtttcagtgtctggagcatttcagataaatacctttgatctaagggttcagcctttcaatgtgacacaaggaaagtattctacagcccaagagtgttcgctggatgatgacaccattctaatcccaattatagttggtgctggtctttcaggcttgattatcgttatagtgattgcttacgtaattggcagaagaaaaagttatgctggatatcagactctgtaacactaatcaatacgtgatctctgttacaaaagaaaaaagcaagtacaagttccaacatgcaatactggtcaacttaaggtatatttagttgcagtccagctctttagaatgggtggtatgggggatttcaaacttaaacaaaaaactatcaactacaaattagttgcctgactttggtttttccaaccaaggaatttaaaactgttatttttacagcaaaagatgtgcaaaatcactggattataagttctattttactgtcttgaattagtatttcagtgttttcattttagacattcagactaaaaatacaccgtttagaaaaaacaatttttgaaaaagagattttttttccctgcaggtagttgagttggaacaacatgttctaccgtggatttgtacttgctccttttgctctttttgtgtgtgtgtgtgtgtgtgtgtgtgtgtgtgtgtgtgtgatttttgtttgcaggttaacttagctactttggcattgctgcatatttgacctttgagagatataatagtagatttgaacaggggctggtattattatgttcttagcaataaatgcttttctaatgccttttgaatacatttgtatttatgtggctgtaatgacaaaagatacaaaagctttttaaaatttagagtaggtattaatcttattgtttaatcttttttttaaaaaaactggatatttcaatcttttaaattgcaatatataagactattccaactgggcatttcaatccattttttaggtgctttagagataattgcttgccagtgccaattgagggcattagtactttgtgctcataaattggcctctgtatgcagtactaaaattaatgcagatttctctttagccttccaacatttcttgttgatagtgatgtattttattattttctttttcttaagaaatgccagtgtgtcctagaacctagataacgaagtgcacttacacttataaaataacttgcatctaggctgggcgtggcggctcacgcctgtaatcccagcactttgggaggccgaagtgggtggatcacttgaggccaggagtttgagaccagcctggccaacatggtgaaaccccatctctatcagaaatacaaaaaattagctgggcgtggtggtgggcgcctgtaatcccagttactcgggaggctgaggcaggagaatcacttgaacccgggaggcagaggttgcggtgagccaagagcgcaccattgcactccagcctgggcgacaaaaacgaaactccatctcaaaacaaaacaaaacaaaacaaacaaacaaacaaaacttgcatctaaccaaaaagtcttggttttatcttaatccattaaaaagttgttctttgtttccagcttgcattgattgctacaacatcactaatttggctttcacatttaaatggttctgtgctaatcaaaactttcgttgttattattcattatggtagaatcatttttaattcacgtgctttgtgttcagttttgtggtctgagagatgtaccaattgtcaaattaccgtgtaccacctaatgtttataggagaaagcaaaatacatcagcttggtagttaacacatcaaatatttcttgctgcttctaggagaacttttttggtgtgtgttggaatggctgagcaaatattaaaattgttaatatgcagccatatatggaaggttcctgtggggttgttttttcgtgttttttttttttttgtggtgggattatgtgcctcccattcactagaaaatgagaaaattgtctgggttccaaaatattgacattgaatggatcaatacacacacacagacatatatatatatatgcacacatatataggcagttgcatgctagcatgggtatttttataacaatataactgagttatattggaattataaatattttccgtcacttaaatttgttctttgtttagcctgaaaacctttatggctcaagatcagattcctgactaacccctctcttagagctacagcgagctgcattaccagcttaaaacacttcttagggattaaatatagatgtaatttttcaaaatcgtttttaatttaaactgtgttttagtgtaaaattgttaaccttgtaagatggataatgtgtataagaatgtaggccttaactatttcacatgagtcaaaacaaagcagctttaaaaaaataattggaagcacaagtgcatggcactgactgaatgctgttaatatttctaaaagtttctacattcagattatatgcctgattcatagtaaaatacctctaataaacactgttttatagaaaacctgacttcagtgaatatttttgtattttacatgggccagtttatatactgctatttacactattatttcctatagctacatgttctttgtaccttttgtagttttatttgtattactagattcataccttgatggtaacgctctatctggttttgggtgtttttcatgttttagcatttgtataaagaaactggtccatgtaaatactttccatgttttttcttcaaatgtttaaaccactagttgatgtatggtatctttagatatttgcctgtctgtttgctcaaaattgcttctaaaacaataaagattcttttatttcttaaggcaa

SEQ ID NO: 16708 - DNA, 2089 bp, Homo sapiens
  source 1..2089: mol_type = unassigned DNA
gagattggctgtaagcaagaaagagccccgcccctagtcttatgactcgcactgaagcgccgattcctggcttttgcaaggctgtggtcggtggtcatcagtgctcttgacccaggtccagcgagccttttccctggtgttgcagctgttgttgtaccgccgccgtcgccgccgtcgccgcctgctctgcggggtcatggtgtgcttccgcctcttcccggttccgggctcagggctcgttctggtctgcctagtcctgggagctgtgcggtcttatgcattggaacttaatttgacagattcagaaaatgccacttgcctttatgcaaaatggcagatgaatttcacagtacgctatgaaactacaaataaaacttataaaactgtaaccatttcagaccatggcactgtgacatataatggaagcatttgtggggatgatcagaatggtcccaaaatagcagtgcagttcggacctggcttttcctggattgcgaattttaccaaggcagcatctacttattcaattgacagcgtctcattttcctacaacactggtgataacacaacatttcctgatgctgaagataaaggaattcttactgttgatgaacttttggccatcagaattccattgaatgacctttttagatgcaatagtttatcaactttggaaaagaatgatgttgtccaacactactgggatgttcttgtacaagcttttgtccaaaatggcacagtgagcacaaatgagttcctgtgtgataaagacaaaacttcaacagtggcacccaccatacacaccactgtgccatctcctactacaacacctactccaaaggaaaaaccagaagctggaacctattcagttaataatggcaatgatacttgtctgctggctaccatggggctgcagctgaacatcactcaggataaggttgcttcagttattaacatcaaccccaatacaactcactccacaggcagctgccgttctcacactgctctacttagactcaatagcagcaccattaagtatctagactttgtctttgctgtgaaaaatgaaaaccgattttatctgaaggaagtgaacatcagcatgtatttggttaatggctccgttttcagcattgcaaataacaatctcagctactgggatgcccccctgggaagttcttatatgtgcaacaaagagcagactgtttcagtgtctggagcatttcagataaatacctttgatctaagggttcagcctttcaatgtgacacaaggaaagtattctacagctgaagaatgttctgctgactctgacctcaactttcttattcctgttgcagtgggtgtggccttgggcttccttataattgttgtctttatctcttatatgattggaagaaggaaaagtcgtactggttatcagtctgtgtaatcagttaaatctagtgtttgtttgtttttttcaattagaagttacgtttccattggctaaaagccaggacatgctgtgcaatagattgtttaagatatgcagactaacttcagtgagttcctagctaacttgggcatgagtacacttatttaagacaaaatatattaggaccaatttttttctgttttttttcttcctttgttaaagtataattaaaagaaaaattgtggcttagaattttttaagtaaataatgattttaagcccctggatccaattatgaaagcatttttgctgatgtgtaattttatatgttacagttacttatattttactactttgatgttatttgcaaaatcaaaggtgttaaagaatttaacttgcttcaggaaataaattcaagaacatagtggattcattttcattggtggcagacacgaaatttggttcatgataagacttcctttccccacctcctgatcagcattatttaaatctgtatttttctgttagttaagaaagaaatggcttcatgatattgtatttaatagcaaaagtttggctgtcttcttcattactgttaatagctactatattttaacaaggagatttctttttttgttgttgttgttctagagtttggaatatactgattatc

SEQ ID NO: 16709 - DNA, 1433 bp, Homo sapiens
  source 1..1433: mol_type = unassigned DNA
gtcttatgactcgcactgaagcgccgattcctggcttttgcaaggctgtggtcggtggtcatcagtgctcttgacccaggtccagcgagccttttccctggtgttgcagctgttgttgtaccgccgccgtcgccgccgtcgccgcctgctctgcggggtcatggtgtgcttccgcctcttcccggttccgggctcagggctcgttctggtctgcctagtcctgggaattcttactgttgatgaacttttggccatcagaattccattgaatgacctttttagatgcaatagtttatcaactttggaaaagaatgatgttgtccaacactactgggatgttcttgtacaagcttttgtccaaaatggcacagtgagcacaaatgagttcctgtgtgataaagacaaaacttcaacagtggcacccaccatacacaccactgtgccatctcctactacaacacctactccaaaggaaaaaccagaagctggaacctattcagttaataatggcaatgatacttgtctgctggctaccatggggctgcagctgaacatcactcaggataaggttgcttcagttattaacatcaaccccaatacaactcactccacaggcagctgccgttctcacactgctctacttagactcaatagcagcaccattaagtatctagactttgtctttgctgtgaaaaatgaaaaccgattttatctgaaggaagtgaacatcagcatgtatttggttaatggctccgttttcagcattgcaaataacaatctcagctactgggatgcccccctgggaagttcttatatgtgcaacaaagagcagactgtttcagtgtctggagcatttcagataaatacctttgatctaagggttcagcctttcaatgtgacacaaggaaagtattctacagctgaagaatgttctgctgactctgacctcaactttcttattcctgttgcagtgggtgtggccttgggcttccttataattgttgtctttatctcttatatgattggaagaaggaaaagtcgtactggttatcagtctgtgtaatcagttaaatctagtgtttgtttgtttttttcaattagaagttacgtttccattggctaaaagccaggacatgctgtgcaatagattgtttaagatatgcagactaacttcagtgagttcctagctaacttgggcatgagtacacttatttaagacaaaatatattaggaccaatttttttctgttttttttcttcctttgttaaagtataattaaaagaaaaattgtggcttagaattttttaagtaaataatgattttaagcccctggatccaattatgaaagcatttttgctgatgtgtaattttatatgttacagttacttatattttactactttgatgttatttgcaaaatcaaaggtgttaaa

SEQ ID NO: 16710 - DNA, 1625 bp, Homo sapiens
  source 1..1625: mol_type = unassigned DNA
aacactgggcggcggcggttggcccggggaggcaagcggtgacctagagaaggcctgaccgacggatggcggggaagaagggcccaggagagagctgtgcggtcttatgcattggaacttaatttgacagattcagaaaatgccacttgcctttatgcaaaatggcagatgaatttcacagtacgctatgaaactacaaataaaacttataaaactgtaaccatttcagaccatggcactgtgacatataatggaagcatttgtggggatgatcagaatggtcccaaaatagcagtgcagttcggacctggcttttcctggattgcgaattttaccaaggcagcatctacttattcaattgacagcgtctcattttcctacaacactggtgataacacaacatttcctgatgctgaagataaaggaattcttactgttgatgaacttttggccatcagaattccattgaatgacctttttagatgcaatagtttatcaactttggaaaagaatgatgttgtccaacactactgggatgttcttgtacaagcttttgtccaaaatggcacagtgagcacaaatgagttcctgtgtgataaagacaaaacttcaacagtggcacccaccatacacaccactgtgccatctcctactacaacacctactccaaaggaaaaaccagaagctggaacctattcagttaataatggcaatgatacttgtctgctggctaccatggggctgcagctgaacatcactcaggataaggttgcttcagttattaacatcaaccccaatacaactcactccacaggcagctgccgttctcacactgctctacttagactcaatagcagcaccattaagtatctagactttgtctttgctgtgaaaaatgaaaaccgattttatctgaaggaagtgaacatcagcatgtatttggttaatggctccgttttcagcattgcaaataacaatctcagctactgggatgcccccctgggaagttcttatatgtgcaacaaagagcagactgtttcagtgtctggagcatttcagataaatacctttgatctaagggttcagcctttcaatgtgacacaaggaaagtattctacagcccaagagtgttcgctggatgatgacaccattctaatcccaattatagttggtgctggtctttcaggcttgattatcgttatagtgattgcttacgtaattggcagaagaaaaagttatgctggatatcagactctgtaacactaatcaatacgtgatctctgttacaaaagaaaaaagcaagtacaagttccaacatgcaatactggtcaacttaaggtatatttagttgcagtccagctctttagaatgggtggtatgggggatttcaaacttaaacaaaaaactatcaactacaaattagttgcctgactttggtttttccaaccaaggaatttaaaactgttatttttacagcaaaagatgtgcaaaatcactggattataagttctattttactgtcttgaattagtatttcagtgttttcattttagacattcagactaaaaatacaccgtttagaaaaaacaatttttgaaaaagagattttttttccctgcaggtag

SEQ ID NO: 16711 - DNA, 1530 bp, Homo sapiens
  source 1..1530: mol_type = unassigned DNA
gttaaaagatgttaaatactggggccagctcaccctggtcagcctagcactctgacctagcagtcaacatgaaggctctcattgttctggggcttgtcctcctttctgttacggtccagggcaaggtctttgaaaggtgtgagttggccagaactctgaaaagattgggaatggatggctacaggggaatcagcctagcaaactggatgtgtttggccaaatgggagagtggttacaacacacgagctacaaactacaatgctggagacagaagcactgattatgggatatttcagatcaatagccgctactggtgtaatgatggcaaaaccccaggagcagttaatgcctgtcatttatcctgcagtgctttgctgcaagataacatcgctgatgctgtagcttgtgcaaagagggttgtccgtgatccacaaggcattagagcatgggtggcatggagaaatcgttgtcaaaacagagatgtccgtcagtatgttcaaggttgtggagtgtaactccagaattttccttcttcagctcattttgtctctctcacattaagggagtaggaattaagtgaaaggtcacactaccattatttccccttcaaacaaataatatttttacagaagcaggagcaaaatatggcctttcttctaagagatataatgttcactaatgtggttattttacattaagcctacaacatttttcagtttgcaaatagaactaatactggtgaaaatttacctaaaaccttggttatcaaatacatctccagtacattccgttctttttttttttgagacagtctcgctctgtcgcccaggctggagtgcagtggcgcaatctcggctcactgcaacctccacctcccgggttcacgccattctcctgcctcagcctcccgagtagctgggattacgggcgcccgccaccacgcccggctaattttttgtatttttagtagagacagggtttcaccgtgttagccaggatggtctcgatctcctgaccttgtgatccacccacctcggcctcccaaagtgctgggattacaggcgtgagccactgcgcccggccacattcagttcttatcaaagaaataacccagacttaatcttgaatgatacgattatgcccaatattaagtaaaaaatataagaaaaggttatcttaaatagatcttaggcaaaataccagctgatgaaggcatctgatgccttcatctgttcagtcatctccaaaaacagtaaaaataaccactttttgttgggcaatatgaaatttttaaaggagtagaataccaaatgatagaaacagactgcctgaattgagaattttgatttcttaaagtgtgtttctttctaaattgctgttccttaatttgattaatttaattcatgtattatgattaaatctgaggcagatgagcttacaagtattgaaataattactaattaatcacaaatgtgaagttatgcatgatgtaaaaaatacaaacattctaattaaaggctttgcaacaca

SEQ ID NO: 16712 - DNA, 808 bp, Homo sapiens
  source 1..808: mol_type = unassigned DNA
tcttgagctaggaaaggattactcgagccttgttagaatcagacatggcttcaggggatgcaggacgctcccctgagctgcctgtcaccgactaagtggagcagtgtttcttccgcagactcaactgagaagtcagcctctgcggcaggcaccaggaatctgccttttcagttctgtctccggcaggctttgaggatgaaggctgcgggcattctgaccctcattggctgcctggtcacaggcgccgagtccaaaatctacactcgttgcaaactggcaaaaatattctcgagggctggcctggacaattactggggcttcagccttggaaactggatctgcatggcgtattatgagagcggctacaacaccacagcccagacggtcctggatgacggcagcatcgactacggcatcttccagatcaacagcttcgcgtggtgcagacgcggaaagctgaaggagaacaaccactgccacgtcgcctgctcagccttggtcactgatgacctcacagatgcgattatctgtgccaagaaaattgttaaagagacacaaggaatgaactattggcaaggctggaagaaacactgtgaggggagagacctgtccgactggaaaaaagactgtgaggtttcctaaactggaactggacccaggatgctttgcagcaacgccctagggtttgcagtgaatgtccaaatgcctgtgtcatcttgtcccgtttcctcccaatattccttctcaaacttggagagggaaaattaagctatacttttaagaaaataaatatttccatttaaatgtc

SEQ ID NO: 16713 - DNA, 904 bp, Homo sapiens
  source 1..904: mol_type = unassigned DNA
gtcatggagaactcttgggtgcagacaagtggatgattaatgaagtagcatctgaaaaacccaaggaaccaaatgtaggtggagcaacttccctgcaacacacgtcgaagctgctgcagtggctgttcttcccctccccttggaaaggcaccaaaagccagcctttggaagggctggtggactgtgcccttctttcccttcagagaaccagtgtccctgtgactccacccactcatctggccaccgttgccctgacctgccaggagcctggagaagatgaaggcatccgtggttctctccctccttggctacctggtggttccaagtggtgcttacatcttggggcgttgcacagtggctaagaaactccacgatggaggcctggattattttgagggctatagccttgagaactgggtgtgcctggcctacttcgagagcaagttcaaccccatggccatctacgagaacacacgtgagggctacactggctttggcctctttcagatgcgtggcagtgactggtgtggcgaccatggcaggaaccgctgccatatgtcatgttccgctttactgaatcctaatttagagaagacaattaaatgtgccaagaccattgtaaaaggaaaagaagggatgggagcatggcccacctggtcccggtactgccagtactccgataccctggcacggtggctggatggttgcaagctgtagccacctgcatggcccctgcagcactcaccagttgcatcttgtgaatgaaggtgcttttctgcttgctgcttcagtcaatccttttgatgatctcaccactttaagagttccagatggaaaaagacaaaagtttgcttcatccggggatgcaggatgcagaataaaccaaactagttactcaacttgg

SEQ ID NO: 16714 - DNA, 838 bp, Homo sapiens
  source 1..838: mol_type = unassigned DNA
aagtagcatctgaaaaacccaaggaaccaaatgtaggtggagcaacttccctgcaacacacgtcgaagctgctgcagtggctgttcttcccctccccttggaaaggcaccaaaagccagcctttggaagggctggtggactgagaaccagtgtccctgtgactccacccactcatctggccaccgttgccctgacctgccaggagcctggagaagatgaaggcatccgtggttctctccctccttggctacctggtggttccaagtggtgcttacatcttggggcgttgcacagtggctaagaaactccacgatggaggcctggattattttgagggctatagccttgagaactgggtgtgcctggcctacttcgagagcaagttcaaccccatggccatctacgagaacacacgtgagggctacactggctttggcctctttcagatgcgtggcagtgactggtgtggcgaccatggcaggaaccgctgccatatgtcatgttccgctttactgaatcctaatttagagaagacaattaaatgtgccaagaccattgtaaaaggaaaagaagggatgggagcatggcccacctggtcccggtactgccagtactccgataccctggcacggtggctggatggttgcaagctgtagccacctgcatggcccctgcagcactcaccagttgcatcttgtgaatgaaggtgcttttctgcttgctgcttcagtcaatccttttgatgatctcaccactttaagagttccagatggaaaaagacaaaagtttgcttcatccggggatgcaggatgcagaataaaccaaactagttactcaa

SEQ ID NO: 16715 - DNA, 891 bp, Homo sapiens
  source 1..891: mol_type = unassigned DNA
ggtgaggaagaagaggctcctactgtagacagccttgttctacagatcctcccagaaatctctgggccaggtggaacccagggtcagagagggatgggagagagattccccaggctctcagagaagatcagcagaaagtctgcaagaccctaagaaccatcagccctcagctgcacctcctcccctccaaggatgacaaaggcgctactcatctatttggtcagcagctttcttgccctaaatcaggccagcctcatcagtcgctgtgacttggcccaggtgctgcagctggaggacttggatgggtttgagggttactccctgagtgactggctgtgcctggcttttgtggaaagcaagttcaacatatcaaagataaatgaaaatgcagatggaagctttgactatggcctcttccagatcaacagccactactggtgcaacgattataagagttactcggaaaacctttgccacgtagactgtcaagatctgctgaatcccaaccttcttgcaggcatccactgcgcaaaaaggattgtgtccggagcacgggggatgaacaactgggtagaatggaggttgcactgttcaggccggccactcttctactggctgacaggatgccgcctgagatgaaacagggtgcgggtgcaccgtggagtcattccaagactcctgtcctcactcagggattcttcatttcttcttcctactgcctccacttcatgttattttcttcccttcccatttacaactaaaactgaccagagccccaggaataaatggttttcttggcttcctccttactcccatctggacccagtcccctggttcctgtctgttatttgtaaactgaggaccacaataaagaaatctttatatttatcg

SEQ ID NO: 16716 - DNA, 899 bp, Homo sapiens
  source 1..899: mol_type = unassigned DNA
ttaattttccatgataaataaaaatctataaaataataaacaagagaaaagagattggaaacagccaggttggagcagtgagtgagtaaggaaacctggctgccctctccagattccccaggctctcagagaagatcagcagaaagtctgcaagaccctaagaaccatcagccctcagctgcacctcctcccctccaaggatgacaaaggcgctactcatctatttggtcagcagctttcttgccctaaatcaggccagcctcatcagtcgctgtgacttggcccaggtgctgcagctggaggacttggatgggtttgagggttactccctgagtgactggctgtgcctggcttttgtggaaagcaagttcaacatatcaaagataaatgaaaatgcagatggaagctttgactatggcctcttccagatcaacagccactactggtgcaacgattataagagttactcggaaaacctttgccacgtagactgtcaagatctgctgaatcccaaccttcttgcaggcatccactgcgcaaaaaggattgtgtccggagcacgggggatgaacaactgggtagaatggaggttgcactgttcaggccggccactcttctactggctgacaggatgccgcctgagatgaaacagggtgcgggtgcaccgtggagtcattccaagactcctgtcctcactcagggattcttcatttcttcttcctactgcctccacttcatgttattttcttcccttcccatttacaactaaaactgaccagagccccaggaataaatggttttcttggcttcctccttactcccatctggacccagtcccctggttcctgtctgttatttgtaaactgaggaccacaataaagaaatctttatatttatcg

SEQ ID NO: 16717 - DNA, 1047 bp, Homo sapiens
  source 1..1047: mol_type = unassigned DNA
tgttagttgggcagggctgaagtgtatgtggtgaggaagaagaggctcctactgtagacagccttgttctacagatcctcccagaaatctctgggccaggtggaacccagggtcagagagggatgggagagaggtttaattttccatgataaataaaaatctataaaataataaacaagagaaaagagattggaaacagccaggttggagcagtgagtgagtaaggaaacctggctgccctctccagattccccaggctctcagagaagatcagcagaaagtctgcaagaccctaagaaccatcagccctcagctgcacctcctcccctccaaggatgacaaaggcgctactcatctatttggtcagcagctttcttgccctaaatcaggccagcctcatcagtcgctgtgacttggcccaggtgctgcagctggaggacttggatgggtttgagggttactccctgagtgactggctgtgcctggcttttgtggaaagcaagttcaacatatcaaagataaatgaaaatgcagatggaagctttgactatggcctcttccagatcaacagccactactggtgcaacgattataagagttactcggaaaacctttgccacgtagactgtcaagatctgctgaatcccaaccttcttgcaggcatccactgcgcaaaaaggattgtgtccggagcacgggggatgaacaactgggtagaatggaggttgcactgttcaggccggccactcttctactggctgacaggatgccgcctgagatgaaacagggtgcgggtgcaccgtggagtcattccaagactcctgtcctcactcagggattcttcatttcttcttcctactgcctccacttcatgttattttcttcccttcccatttacaactaaaactgaccagagccccaggaataaatggttttcttggcttcctccttactcccatctggacccagtcccctggttcctgtctgttatttgtaaactgaggaccacaataaagaaatctttatatttatcgaaatattaaagca

SEQ ID NO: 16718 - DNA, 5102 bp, Homo sapiens
  source 1..5102: mol_type = unassigned DNA
aaaatctctcctccttccttcactccagacactgcccgctctccgggactgccgcgccgctccccgttgccttccaggactgagaaaggggaaagggaagggtgccacgtccgagcagccgccttgactggggaagggtctgaatcccacccttggcattgcttggtggagactgagatacccgtgctccgctcgcctccttggttgaagatttctccttccctcacgtgatttgagccccgtttttattttctgtgagccacgtcctcctcgagcggggtcaatctggcaaaaggagtgatgcgcttcgcctggaccgtgctcctgctcgggcctttgcagctctgcgcgctagtgcactgcgcccctcccgccgccggccaacagcagcccccgcgcgagccgccggcggctccgggcgcctggcgccagcagatccaatgggagaacaacgggcaggtgttcagcttgctgagcctgggctcacagtaccagcctcagcgccgccgggacccgggcgccgccgtccctggtgcagccaacgcctccgcccagcagccccgcactccgatcctgctgatccgcgacaaccgcaccgccgcggcgcgaacgcggacggccggctcatctggagtcaccgctggccgccccaggcccaccgcccgtcactggttccaagctggctactcgacatctagagcccgcgaagctggcgcctcgcgcgcggagaaccagacagcgccgggagaagttcctgcgctcagtaacctgcggccgcccagccgcgtggacggcatggtgggcgacgacccttacaacccctacaagtactctgacgacaacccttattacaactactacgatacttatgaaaggcccagacctgggggcaggtaccggcccggatacggcactggctacttccagtacggtctcccagacctggtggccgacccctactacatccaggcgtccacgtacgtgcagaagatgtccatgtacaacctgagatgcgcggcggaggaaaactgtctggccagtacagcatacagggcagatgtcagagattatgatcacagggtgctgctcagatttccccaaagagtgaaaaaccaagggacatcagatttcttacccagccgaccaagatattcctgggaatggcacagttgtcatcaacattaccacagtatggatgagtttagccactatgacctgcttgatgccaacacccagaggagagtggctgaaggccacaaagcaagtttctgtcttgaagacacatcctgtgactatggctaccacaggcgatttgcatgtactgcacacacacagggattgagtcctggctgttatgatacctatggtgcagacatagactgccagtggattgatattacagatgtaaaacctggaaactatatcctaaaggtcagtgtaaaccccagctacctggttcctgaatctgactataccaacaatgttgtgcgctgtgacattcgctacacaggacatcatgcgtatgcctcaggctgcacaatttcaccgtattagaaggcaaagcaaaactcccaatggataaatcagtgcctggtgttctgaagtgggaaaaaatagactaacttcagtaggatttatgtattttgaaaaagagaacagaaaacaacaaaagaatttttgtttggactgttttcaataacaaagcacataactggattttgaacgcttaagtcatcattacttgggaaatttttaatgtttattatttacatcactttgtgaattaacacagtgtttcaattctgtaattacatatttgactctttcaaagaaatccaaatttctcatgttccttttgaaattgtagtgcaaaatggtcagtattatctaaatgaatgagccaaaatgactttgaactgaaacttttctaaagtgctggaactttagtgaaacataataataatgggtttatatatgtcatagcatagatgaatttagaaacaatgctcctactgtttaaatacatatggacacatctggtgctgagaaagaaacaaacacattaccattggtgtcaagaaatattactatatagcagagaaatggcaatacatgtactcagatagttacatccctatataaaaagtatgtttacatttaaaaaattagtagataacttcctttctttcaagtgcacaatttcattttgacttgagtcaacttttgttttggaacaaattaagtaagggagctgcccaatcctgtctgatatttcttgaggctgccctctatcattttatctttcccatgggcagagatgttgtaagtgggattcttaatatcaccattcttgggactggtatacataaggcagccgtgaaactggaaagtcattttgatgactgatgtgatacatccagaggtaaaatgcatttaaacatattaaagtatttgccaaagatacaattttcttgctgacataaaaatcacacaaacaagtcccccccaaaccacaactgtctctcaaatagcttaaaaaaattgaaaaacattttaggatttttcaagttttctagattttaaaaagatgttcagctattagaggaatgttaaaaattttatattatctagaacacaggaacatcatcctgggttattcaggaatcagtcacacatgtgtgtgtgtctgagatatagtctaaattagcaaagcacatagtattacatacttgaggggttggtgaacaaaggaaaaatatactttctgcaaaaccaaggactgtgctgcgtaatgagacagctgtgatttcatttgaaactgtgaaaccatgtgccataatagaattttgagaattttgcttttacctaaattcaagaaaatgaaattacacttttaagttagtggtgcttaagcataatttttcctatattaaccagtattaaaatctcaagtaagattttccagtgccagaacatgttaggtggaattttaaaagtgcctcggcatcctgtattacatgtcatagaattgtaaagtcaacatcaattactagtaatcattctgcactcactgggtgcatagcatggttagaggggctagagatggacagtcatcaactggcggatatagcggtacatatgatccttagccaccagggcacaagcttaccagtagacaatacagacagagcttttgttgagctgtaactgagctatggaatagcttctttgatgtacctctttgccttaaattgctttttagttctaagattgtagaatgatcctttcaaattgtaatcttttctaacagagatattttaatatacttgctttcttaaaaaacaaaaaaactactgtcagtattaatactgagccagactggcatctacagatttcagatctatcattttattgattcttaagcttgtattaaaaactaggcaatatcatcatggatacataggagaagacacatttacaatcattcattgggccttttatctgtctatccatccatcatcatttgaaggcctaatatatgccaagtactcacatggtatgcattgagacataaaaaagactgtctataacctcaataagtattaaaaatcccattattacccataaggttcatcttatttcatttttagggaataaaattacatgtctatgaaatttcaattttaagcactattgtttttcatgaccataatttatttttaaaaataaattaaaggttaattatatgcatgtatgtatttctaataattaaaaatgtgttcaatccctgaaatgtctgccttttaaatataacacctactatttggttaattttgacgatttttttttttcaattaggaagctaaaaatactactttattccttatatgaacattcatccccctcctggcacctctaaacacacccaaataactcacaagtactgatttaacactctgtattactgaacttctttgaactattttgaactttgaatctcttctctgaataactgccgaaactcaaagataataattagttgatgaaggttatcaattaataaaataacacagaccagtcttaccaaactctaaatacattttaaaaaataggaactggcaatgataaaaagaatgttgagtactgacaggagattggcttttacactaaaaaagacagaaaatggactaaataggaacataatttcagagtttatgagtcagtttacaatatgccatattagcgatctcatgatgattcagaccacagtctgggttaaagatgtcttgacctctgaggctagcataacatatatgagaatacaacttgcctatttccagaaaatctgtatatttttatagaataactttatttacaatttctatcatccaattactcactaggcattatttgtagtactttttttctctttgaaatctcataggatagtcacacttataaacattcccaatattcggattctagaagaaatgcaattcattaaaattttcctggcactgagagttaatctttagcagattgcatgaaaatactgaattcctggtaaggagatattttgttttaaaaataatgtgttttgatacgaatcagtgtattaactgataactaaaaagtactcttttttctatatatacatatttttttgaactcatattcacaatcaacatattcaatcagtgagttaagtctcattcctagctaccaaaattcctgggccacttttaaacactaaacatttcatttatcctctaagctaaaatggtgctgagttatttaaatctgaatgtaaaatgcattaaatcttagcttgtggtatataaacatttaattaatataaaactgcttgctataaactaagtaacatgtcatttggtgttaggtttttagtgaagttttagcttctcccaaatttttcaggaatgttatttgtaagacgtgtaacttttttgaagaactcttattttaaatgctcagacattggctttatgttcctctttgcattctcatattcttttattatacatctatactatgattgcaagattatataaaaatgccttgaataaatgatttcaagtgtc

SEQ ID NO: 16719 - DNA, 565 bp, Homo sapiens
  source 1..565: mol_type = unassigned DNA
agattaagccagtgtgtctcaggatacactgcccgctctccgggactgccgcgccgctccccgttgccttccaggactgagaaaggggaaagggaagggtgccacgtccgagcagccgccttgactggggaagggtctgaatcccacccttggcattgcttggtggagactgagatacccgtgctccgctcgcctccttggttgaagatttctccttccctcacgtgatttgagccccgtttttattttctgtgagccacgtcctcctcgagcggggtcaatctggcaaaaggagtgatgcgcttcgcctggaccgtgctcctgctcgggcctttgcagctctgcgcgctagtgcactgcgcccctcccgccgccggccaacagcagcccccgcgcgagccgccggcggctccgggcgcctggcgccagcagatccaatgggagaacaacgggcaggtgttcagcttgctgagcctgggctcacagtaccagcctcagcgccgccgggacccgggcgccgccgtccctggtgcagccaacgcctccgcccagcagccccgcactc

SEQ ID NO: 16720 - DNA, 1724 bp, Homo sapiens
  source 1..1724: mol_type = unassigned DNA
agacactgcccgctctccgggactgccgcgccgctccccgttgccttccaggactgagaaaggggaaagggaagggtgccacgtccgagcagccgccttgactggggaagggtctgaatcccacccttggcattgcttggtggagactgagatacccgtgctccgctcgcctccttggttgaagatttctccttccctcacgtgatttgagccccgtttttattttctgtgagccacgtcctcctcgagcggggtcaatctggcaaaaggagtgatgcgcttcgcctggaccgtgctcctgctcgggcctttgcagctctgcgcgctagtgcactgcgcccctcccgccgccggccaacagcagcccccgcgcgagccgccggcggctccgggcgccgcctccgcccagcagccccgcactccgatcctgctgatccgcgacaaccgcaccgccgcggcgcgaacgcggacggccggctcatctggagtcaccgctggccgccccaggcccaccgcccgtcactggttccaagctggctactcgacatctagagcccgcgaagctggcgcctcgcgcgcggagaaccagacagcgccgggagaagttcctgcgctcagtaacctgcggccgcccagccgcgtggacggcatggtgggcgacgacccttacaacccctacaagtactctgacgacaacccttattacaactactacgatacttatgaaaggcccagacctgggggcaggtaccggcccggatacggcactggctacttccagtacggtctcccagacctggtggccgacccctactacatccaggcgtccacgtacgtgcagaagatgtccatgtacaacctgagatgcgcggcggaggaaaactgtctggccagtacagcatacagggcagatgtcagagattatgatcacagggtgctgctcagatttccccaaagagtgaaaaaccaagggacatcagatttcttacccagccgaccaagatattcctgggaatggcacagttgtcatcaacattaccacagtatggatgagtttagccactatgacctgcttgatgccaacacccagaggagagtggctgaaggccacaaagcaagtttctgtcttgaagacacatcctgtgactatggctaccacaggcgatttgcatgtactgcacacacacagggattgagtcctggctgttatgatacctatggtgcagacatagactgccagtggattgatattacagatgtaaaacctggaaactatatcctaaaggtcagtgtaaaccccagctacctggttcctgaatctgactataccaacaatgttgtgcgctgtgacattcgctacacaggacatcatgcgtatgcctcaggctgcacaatttcaccgtattagaaggcaaagcaaaactcccaatggataaatcagtgcctggtgttctgaagtgggaaaaaatagactaacttcagtaggatttatgtattttgaaaaagagaacagaaaacaacaaaagaatttttgtttggactgttttcaataacaaagcacataactggattttgaacgcttaagtcatcattacttgggaaatttttaatgtttattatttacatcactttgtgaattaacacagtgtttcaattctgtaattacatatttgactctttcaaagaaatccaaatttctcatgttccttttgaaattgtagtgc

SEQ ID NO: 16721 - DNA, 3549 bp, Homo sapiens
  source 1..3549: mol_type = unassigned DNA
acaacaaaagaggccggaggccgggcctgctgcggcggccgccttcggggaagggggtgggtccggggaggggtttgccatcctcctctagttaaaagtaagggggaaaagagtaaacgcgcgactccagcgcgcggctacctacgcttggtgcttgctttctccagccatcggagaccagagccgccccctctgctcgagaaaggggctcagcggcggcggaagcggagggggaccaccgtggagagcgcggtcccagcccggccactgcggatccctgaaaccaaaaagctcctgctgcttctgtaccccgcctgtccctcccagctgcgcagggccccttcgtgggatcatcagcccgaagacagggatggagaggcctctgtgctcccacctctgcagctgcctggctatgctggccctcctgtcccccctgagcctggcacagtatgacagctggccccattaccccgagtacttccagcaaccggctcctgagtatcaccagccccaggcccccgccaacgtggccaagattcagctgcgcctggctgggcagaagaggaagcacagcgagggccgggtggaggtgtactatgatggccagtggggcaccgtgtgcgatgacgacttctccatccacgctgcccacgtcgtctgccgggagctgggctacgtggaggccaagtcctggactgccagctcctcctacggcaagggagaagggcccatctggttagacaatctccactgtactggcaacgaggcgacccttgcagcatgcacctccaatggctggggcgtcactgactgcaagcacacggaggatgtcggtgtggtgtgcagcgacaaaaggattcctgggttcaaatttgacaattcgttgatcaaccagatagagaacctgaatatccaggtggaggacattcggattcgagccatcctctcaacctaccgcaagcgcaccccagtgatggagggctacgtggaggtgaaggagggcaagacctggaagcagatctgtgacaagcactggacggccaagaattcccgcgtggtctgcggcatgtttggcttccctggggagaggacatacaataccaaagtgtacaaaatgtttgcctcacggaggaagcagcgctactggccattctccatggactgcaccggcacagaggcccacatctccagctgcaagctgggcccccaggtgtcactggaccccatgaagaatgtcacctgcgagaatgggctaccggccgtggtgagttgtgtgcctgggcaggtcttcagccctgacggaccctcaagattccggaaagcgtacaagccagagcaacccctggtgcgactgagaggcggtgcctacatcggggagggccgcgtggaggtgctcaaaaatggagaatgggggaccgtctgcgacgacaagtgggacctggtgtcggccagtgtggtctgcagagagctgggctttgggagtgccaaagaggcagtcactggctcccgactggggcaagggatcggacccatccacctcaacgagatccagtgcacaggcaatgagaagtccattatagactgcaagttcaatgccgagtctcagggctgcaaccacgaggaggatgctggtgtgagatgcaacacccctgccatgggcttgcagaagaagctgcgcctgaacggcggccgcaatccctacgagggccgagtggaggtgctggtggagagaaacgggtcccttgtgtgggggatggtgtgtggccaaaactggggcatcgtggaggccatggtggtctgccgccagctgggcctgggattcgccagcaacgccttccaggagacctggtattggcacggagatgtcaacagcaacaaagtggtcatgagtggagtgaagtgctcgggaacggagctgtccctggcgcactgccgccacgacggggaggacgtggcctgcccccagggcggagtgcagtacggggccggagttgcctgctcagaaaccgcccctgacctggtcctcaatgcggagatggtgcagcagaccacctacctggaggaccggcccatgttcatgctgcagtgtgccatggaggagaactgcctctcggcctcagccgcgcagaccgaccccaccacgggctaccgccggctcctgcgcttctcctcccagatccacaacaatggccagtccgacttccggcccaagaacggccgccacgcgtggatctggcacgactgtcacaggcactaccacagcatggaggtgttcacccactatgacctgctgaacctcaatggcaccaaggtggcagagggccacaaggccagcttctgcttggaggacacagaatgtgaaggagacatccagaagaattacgagtgtgccaacttcggcgatcagggcatcaccatgggctgctgggacatgtaccgccatgacatcgactgccagtgggttgacatcactgacgtgccccctggagactacctgttccaggttgttattaaccccaacttcgaggttgcagaatccgattactccaacaacatcatgaaatgcaggagccgctatgacggccaccgcatctggatgtacaactgccacataggtggttccttcagcgaagagacggaaaaaaagtttgagcacttcagcgggctcttaaacaaccagctgtccccgcagtaaagaagcctgcgtggtcaactcctgtcttcaggccacaccacatcttccatgggacttccccccaacaactgagtctgaacgaatgccacgtgccctcacccagcccggcccccaccctgtccagacccctacagctgtgtctaagctcaggaggaaagggaccctcccatcattcatggggggctgctacctgacccttggggcctgagaaggccttgcgggggtggggtttgtccacagagctgctggagcagcaccaagagccagtcttgaccgggatgaggcccacagacaggttgtcatcagcttgtcccattcaagccaccgagctcaccacagacacagtggagccgcgctcttctccagtgacacgtggacaaatgcgggctcatcagcccccccagagagggtcaggccgaaccccatttctcctcctcttaggtcattttcagcaaacttgaatatctagacctctcttccaatgaaaccctccagtctattatagtcacatagataatggtgccacgtgttttctgatttggtgagctcagacttggtgcttccctatccacagcccccaccccttgtttttcaagatactattattatattttcacagacttttgaagcacaaatttattggcatttaatattggacatctgggcccttggaagtacaaatctaaggaaaaaccaacccactgtgtaagtgactcatcttcctgttgttccaattctgtgggtttttgattcaacggtgctataaccagggtcctgggtgacagggcgctcactgagcaccatgtgtcatcacagacacttacacatacttgaaacttggaataaaagaaaga

SEQ ID NO: 16722 - DNA, 588 bp, Homo sapiens
  source 1..588: mol_type = unassigned DNA
tatttgtgttgaggggaccagctgttagtctttctgctgctctttctaagaaagctcctgctgcttctgtaccccgcctgtccctcccagctgcgcagggccccttcgtgggatcatcagcccgaagacagggatggagaggcctctgtgctcccacctctgcagctgcctggctatgctggccctcctgtcccccctgagcctggcacagtatgacagctggccccattaccccgagtacttccagcaaccggctcctgagtatcaccagccccaggcccccgccaacgtggccaagattcagctgcgcctggctgggcagaagaggaagcacagcgagggccgggtggaggtgtactatgatggccagtggggcaccgtgtgcgatgacgacttctccatccacgctgcccacgtcgtctgccgggagctgggctacgtggaggccaagtcctggactgccagctcctcctacggcaagggagaagggcccatctggttagacaatctccactgtactggcaacgaggcgacccttgcagcatgcacctccaatggctggggcgtcactgactgcaagcacacgga

SEQ ID NO: 16723 - DNA, 763 bp, Homo sapiens
  source 1..763: mol_type = unassigned DNA
cggaggccgggcctgctgcggcggccgccttcggggaagggggtgggtccggggaggggtttgccatcctcctctagttaaaagtaagggggaaaagagtaaacgcgcgactccagcgcgcggctacctacgcttggtgcttgctttctccagccatcggagaccagagccgccccctctgctcgagaaaggggctcagcggcggcggaagcggagggggaccaccgtggagagcgcggtcccagcccggccactgcggatccctgaaaccaagttctgaactcccggtctccccagtccctggaggctgcctgcagctttgcttagcttctcagcctgttgatcactgccgtggaattggcgagtatcttccgggggaaagcagagacaaaaaaagctcctgctgcttctgtaccccgcctgtccctcccagctgcgcagggccccttcgtgggatcatcagcccgaagacagggatggagaggcctctgtgctcccacctctgcagctgcctggctatgctggccctcctgtcccccctgagcctggcacagtatgacagctggccccattaccccgagtacttccagcaaccggctcctgagtatcaccagccccaggcccccgccaacgtggccaagattcagctgcgcctggctgggcagaagaggaagcacagcgagggccgggtggaggtgtactatgatggccagtggggcaccgtgtgcgatgacgacttctccatccacgctgcccacgtcgt

SEQ ID NO: 16724 - DNA, 746 bp, Homo sapiens
  source 1..746: mol_type = unassigned DNA
cagccatcggagaccagagccgccccctctgctcgagaaaggggctcagcggcggcggaagcggagggggaccaccgtggagagcgcggtcccagcccggccactgcggatccctgaaaccaaatggagtctcgctctgtcacccaggctggagtacagtggcacgatcttggctgactgcaagctttgcctcccgggttcaagcgattctcctgcctcaagcctcctgagtaactgggactacagaaagctcctgctgcttctgtaccccgcctgtccctcccagctgcgcagggccccttcgtgggatcatcagcccgaagacagggatggagaggcctctgtgctcccacctctgcagctgcctggctatgctggccctcctgtcccccctgagcctggcacagtatgacagctggccccattaccccgagtacttccagcaaccggctcctgagtatcaccagccccaggcccccgccaacgtggccaagattcagctgcgcctggctgggcagaagaggaagcacagcgagggccgggtggaggtgtactatgatggccagtggggcaccgtgtgcgatgacgacttctccatccacgctgcccacgtcgtctgccgggagctgggctacgtggaggccaagtcctggactgccagctcctcctacggcaagggagaagggcccatctggttagacaatctccactgtactggcaacgaggcgacccttgcagcatgcacc

SEQ ID NO: 16725 - DNA, 3502 bp, Homo sapiens
  source 1..3502: mol_type = unassigned DNA
taggactgatctccaggaccagcactcttctcccagcccttagggtcctgctcggccaaggccttccctgccatgcgacctgtcagtgtctggcagtggagcccctgggggctgctgctgtgcctgctgtgcagttcgtgcttggggtctccgtccccttccacgggccctgagaagaaggccgggagccaggggcttcggttccggctggctggcttccccaggaagccctacgagggccgcgtggagatacagcgagctggtgaatggggcaccatctgcgatgatgacttcacgctgcaggctgcccacatcctctgccgggagctgggcttcacagaggccacaggctggacccacagtgccaaatatggccctggaacaggccgcatctggctggacaacttgagctgcagtgggaccgagcagagtgtgactgaatgtgcctcccggggctgggggaacagtgactgtacgcacgatgaggatgctggggtcatctgcaaagaccagcgcctccctggcttctcggactccaatgtcattgaggtagagcatcacctgcaagtggaggaggtgcgaattcgacccgccgttgggtggggcagacgacccctgcccgtgacggaggggctggtggaagtcaggcttcctgacggctggtcgcaagtgtgcgacaaaggctggagcgcccacaacagccacgtggtctgcgggatgctgggcttccccagcgaaaagagggtcaacgcggccttctacaggctgctagcccaacggcagcaacactcctttggtctgcatggggtggcgtgcgtgggcacggaggcccacctctccctctgttccctggagttctatcgtgccaatgacaccgccaggtgccctggggggggccctgcagtggtgagctgtgtgccaggccctgtctacgcggcatccagtggccagaagaagcaacaacagtcgaagcctcagggggaggcccgtgtccgtctaaagggcggcgcccaccctggagagggccgggtagaagtcctgaaggccagcacatggggcacagtctgtgaccgcaagtgggacctgcatgcagccagcgtggtgtgtcgggagctgggcttcgggagtgctcgagaagctctgagtggcgctcgcatggggcagggcatgggtgctatccacctgagtgaagttcgctgctctggacaggagctctccctctggaagtgcccccacaagaacatcacagctgaggattgttcacatagccaggatgccggggtccggtgcaacctaccttacactggggcagagaccaggatccgactcagtgggggccgcagccaacatgaggggcgagtcgaggtgcaaatagggggacctgggccccttcgctggggcctcatctgtggggatgactgggggaccctggaggccatggtggcctgtaggcaactgggtctgggctacgccaaccacggcctgcaggagacctggtactgggactctgggaatataacagaggtggtgatgagtggagtgcgctgcacagggactgagctgtccctggatcagtgtgcccatcatggcacccacatcacctgcaagaggacagggacccgcttcactgctggagtcatctgttctgagactgcatcagatctgttgctgcactcagcactggtgcaggagaccgcctacatcgaagaccggcccctgcatatgttgtactgtgctgcggaagagaactgcctggccagctcagcccgctcagccaactggccctatggtcaccggcgtctgctccgattctcctcccagatccacaacctgggacgagctgacttcaggcccaaggctgggcgccactcctgggtgtggcacgagtgccatgggcattaccacagcatggacatcttcactcactatgatatcctcaccccaaatggcaccaaggtggctgagggccacaaagctagtttctgtctcgaagacactgagtgtcaggaggatgtctccaagcggtatgagtgtgccaactttggagagcaaggcatcactgtgggttgctgggatctctaccggcatgacattgactgtcagtggattgacatcacggatgtgaagccaggaaactacattctccaggttgtcatcaacccaaactttgaagtagcagagagtgactttaccaacaatgcaatgaaatgtaactgcaaatatgatggacatagaatctgggtgcacaactgccacattggtgatgccttcagtgaagaggccaacaggaggtttgaacgctaccctggccagaccagcaaccagattatctaagtgccactgccctctgcaaaccaccactggcccctaatggcaggggtctgaggctgccattacctcaggagcttaccaagaaacccatgtcagcaaccgcactcatcagaccatgcactatggatgtggaactgtcaagcagaagttttcaccctccttcagaggccagctgtcagtatctgtagccaagcatgggaatctttgctcccaggcccagcaccgagcagaacagaccagagcccaccacaccacaaagagcagcacctgactaactgcccacaaaagatggcagcagctcattttctttaataggaggtcaggatggtcagctccagtatctcccctaagtttagggggatacagctttacctctagccttttggtgggggaaaagatccagccctcccacctcattttttactataatatgttgctaggtataattttattttatataaaaagtgtttctgtgattcttcagagcccaggagtcagtgctggtggttggagggacctgcccccactggttcatttaaccctctgtctcggtgccctcagaacctcagccagaaaggcaaggaggaaatcagagcaggagcctcatactcttggtgatctattcattctgtgacctcaggggtcacatataaggtcagtgtttctcgtccccgccggatctgcactgccaactgggattgggttcgaacagcttcataaacatcttcagcattttgtaccatctgctccccaatggccaaaatcacatcaccaggccgcagaccagccctatagagaaaaatggacagagagaaaggaaggagtacaaagcctagttcaaggacacatgcacaccttgcccatccccatatcacactgcagcctctccctcaccggtgtgcaggggagcccaggatgactttatggatgagtacaccatgctgaacatcgggaaagcttggttctcgaagctgtagttcagcaaggatgctgaaagtacacagatcaccctattagccaaacccaggcattctccccatcctgagttccacctcaagtctctcatcaacacattgataaatatatggacaggacatgggctaggtactacaaaatacaatggcaactcactttctgtcttctagcaataaagtgcaacatgtacataaaa

SEQ ID NO: 16726 - DNA, 2398 bp, Homo sapiens
  source 1..2398: mol_type = unassigned DNA
tttttttttttttttggaagtcctaggactgatctccaggaccagcactcttctcccagcccttagggtcctgctcggccaaggccttccctgccatgcgacctgtcagtgtctggcagtggagcccctgggggctgctgctgtgcctgctgtgcagttcgtgcttggggtctccgtccccttccacgggccctgagaagaaggccgggagccaggggcttcggttccggctggctggcttccccaggaagccctacgagggccgcgtggagatacagcgagctggtgaatggggcaccatctgcgatgatgacttcacgctgcaggctgcccacatcctctgccgggagctgggcttcacagaggccacaggctggacccacagtgccaaatatggccctggaacaggccgcatctggctggacaacttgagctgcagtgggaccgagcagagtgtgactgaatgtgcctcccggggctgggggaacagtgactgtacgcacgatgaggatgctggggtcatctgcaaagaccagcgcctccctggcttctcggactccaatgtcattgaggcccgtgtccgtctaaagggcggcgcccaccctggagagggccgggtagaagtcctgaaggccagcacatggggcacagtctgtgaccgcaagtgggacctgcatgcagccagcgtggtgtgtcgggagctgggcttcgggagtgctcgagaagctctgagtggcgctcgcatggggcagggcatgggtgctatccacctgagtgaagttcgctgctctggacaggagctctccctctggaagtgcccccacaagaacatcacagctgaggattgttcacatagccaggatgccggggtccggtgcaacctaccttacactggggcagagaccaggatccgactcagtgggggccgcagccaacatgaggggcgagtcgaggtgcaaatagggggacctgggccccttcgctggggcctcatctgtggggatgactgggggaccctggaggccatggtggcctgtaggcaactgggtctgggctacgccaaccacggcctgcaggagacctggtactgggactctgggaatataacagaggtggtgatgagtggagtgcgctgcacagggactgagctgtccctggatcagtgtgcccatcatggcacccacatcacctgcaagaggacagggacccgcttcactgctggagtcatctgttctgagactgcatcagatctgttgctgcactcagcactggtgcaggagaccgcctacatcgaagaccggcccctgcatatgttgtactgtgctgcggaagagaactgcctggccagctcagcccgctcagccaactggccctatggtcaccggcgtctgctccgattctcctcccagatccacaacctgggacgagctgacttcaggcccaaggctgggcgccactcctgggtgtggcacgagtgccatgggcattaccacagcatggacatcttcactcactatgatatcctcaccccaaatggcaccaaggtggctgagggccacaaagctagtttctgtctcgaagacactgagtgtcaggaggatgtctccaagcggtatgagtgtgccaactttggagagcaaggcatcactgtgggttgctgggatctctaccggcatgacattgactgtcagtggattgacatcacggatgtgaagccaggaaactacattctccaggttgtcatcaacccaaactttgaagtagcagagagtgactttaccaacaatgcaatgaaatgtaactgcaaatatgatggacatagaatctgggtgcacaactgccacattggtgatgccttcagtgaagaggccaacaggaggtttgaacgctaccctggccagaccagcaaccagattatctaagtgccactgccctctgcaaaccaccactggcccctaatggcaggggtctgaggctgccattacctcaggagcttaccaagaaacccatgtcagcaaccgcactcatcagaccatgcactatggatgtggaactgtcaagcagaagttttcaccctccttcagaggccagctgtcagtatctgtagccaagcatgggaatctttgctcccaggcccagcaccgagcagaacagaccagagcccaccacaccacaaagagcagcacctgactaactgcccacaaaagatggcagcagctcattttctttaataggaggtcaggatggtcagctccagtatctcccctaagtttagggggatacagctttacctctagccttttggtgggggaaaagatccagccctcccacctcattttttactataatatgttgctaggtataattttattttatataaaaagtgtttctgtgattc

SEQ ID NO: 16727 - DNA, 2897 bp, Homo sapiens
  source 1..2897: mol_type = unassigned DNA
atactgagtgcttagttctttgcctatcactttctatccgttgtctctctcctctgtgtctttctggttttctctctctcattcccacagtctcccttcctctcacatcctgtctgtctgggtcttcctctctctctacgtgtctcttgctcagtctctatctctttttattgacccttctctgactctcgatctctcatagttgtctcttatctctgggtctctcaggctgtgcctctatgacctgtgcctcagcccttatttaatgtgtttctctccctgtctcttggtccctggggctctttctctcctgttgtctctcgctgtctctgtcttactcagtgtctgtttttctttcgtgacttctccctctctttctgactctgggccccactcaatctgtttctctcacgcacactttgtctctggggcacccaggccttccctgccatgcgacctgtcagtgtctggcagtggagcccctgggggctgctgctgtgcctgctgtgcagttcgtgcttggggtctccgtccccttccacgggccctgagaagaaggccgggagccaggggcttcggttccggctggctggcttccccaggaagccctacgagggccgcgtggagatacagcgagctggtgaatggggcaccatctgcgatgatgacttcacgctgcaggctgcccacatcctctgccgggagctgggcttcacagaggccacaggctggacccacagtgccaaatatggccctggaacaggccgcatctggctggacaacttgagctgcagtgggaccgagcagagtgtgactgaatgtgcctcccggggctgggggaacagtgactgtacgcacgatgaggatgctggggtcatctgcaaagaccagcgcctccctggcttctcggactccaatgtcattgaggtagagcatcacctgcaagtggaggaggtgcgaattcgacccgccgttgggtggggcagacgacccctgcccgtgacggaggggctggtggaagtcaggcttcctgacggctggtcgcaagtgtgcgacaaaggctggagcgcccacaacagccacgtggtctgcgggatgctgggcttccccagcgaaaagagggtcaacgcggccttctacaggctgctagcccaacggcagcaacactcctttggtctgcatggggtggcgtgcgtgggcacggaggcccacctctccctctgttccctggagttctatcgtgccaatgacaccgccaggtgccctggggggggccctgcagtggtgagctgtgtgccaggccctgtctacgcggcatccagtggccagaagaagcaacaacagtcgaagcctcagggggaggcccgtgtccgtctaaagggcggcgcccaccctggagagggccgggtagaagtcctgaaggccagcacatggggcacagtctgtgaccgcaagtgggacctgcatgcagccagcgtggtgtgtcgggagctgggcttcgggagtgctcgagaagctctgagtggcgctcgcatggggcagggcatgggtgctatccacctgagtgaagttcgctgctctggacaggagctctccctctggaagtgcccccacaagaacatcacagctgaggattgttcacatagccaggatgccggggtccggtgcaacctaccttacactggggcagagaccagggagacctggtactgggactctgggaatataacagaggtggtgatgagtggagtgcgctgcacagggactgagctgtccctggatcagtgtgcccatcatggcacccacatcacctgcaagaggacagggacccgcttcactgctggagtcatctgttctgagactgcatcagatctgttgctgcactcagcactggtgcaggagaccgcctacatcgaagaccggcccctgcatatgttgtactgtgctgcggaagagaactgcctggccagctcagcccgctcagccaactggccctatggtcaccggcgtctgctccgattctcctcccagatccacaacctgggacgagctgacttcaggcccaaggctgggcgccactcctgggtgtggcacgagtgccatgggcattaccacagcatggacatcttcactcactatgatatcctcaccccaaatggcaccaaggtggctgagggccacaaagctagtttctgtctcgaagacactgagtgtcaggaggatgtctccaagcggtatgagtgtgccaactttggagagcaaggcatcactgtgggttgctgggatctctaccggcatgacattgactgtcagtggattgacatcacggatgtgaagccaggaaactacattctccaggttgtcatcaacccaaactttgaagtagcagagagtgactttaccaacaatgcaatgaaatgtaactgcaaatatgatggacatagaatctgggtgcacaactgccacattggtgatgccttcagtgaagaggccaacaggaggtttgaacgctaccctggccagaccagcaaccagattatctaagtgccactgccctctgcaaaccaccactggcccctaatggcaggggtctgaggctgccattacctcaggagcttaccaagaaacccatgtcagcaaccgcactcatcagaccatgcactatggatgtggaactgtcaagcagaagttttcaccctccttcagaggccagctgtcagtatctgtagccaagcatgggaatctttgctcccaggcccagcaccgagcagaacagaccagagcccaccacaccacaaagagcagcacctgactaactgcccacaaaagatggcagcagctcattttctttaataggaggtcaggatggtcagctccagtatctcccctaagtttag

SEQ ID NO: 16728 - DNA, 1001 bp, Homo sapiens
  source 1..1001: mol_type = unassigned DNA
cccgggcttctgaggcgtctaccttcccaggtagggctgtacaaggagttctccagcatctccagggcagaaagcttaggccttccctgccatgcgacctgtcagtgtctggcagtggagcccctgggggctgctgctgtgcctgctgtgcagttcgtgcttggggtctccgtccccttccacgggccctgagaagaaggccgggagccaggggcttcggttccggctggctggcttccccaggaagccctacgagggccgcgtggagatacagcgagctggtgaatggggcaccatctgcgatgatgacttcacgctgcaggctgcccacatcctctgccgggagctgggcttcacagaggccacaggctggacccacagtgccaaatatggccctggaacaggccgcatctggctggacaacttgagctgcagtgggaccgagcagagtgtgactgaatgtgcctcccggggctgggggaacagtgactgtacgcacgatgaggatgctggggtcatctgcaaagaccagcgcctccctggcttctcggactccaatgtcattgaggtagagcatcacctgcaagtggaggaggtgcgaattcgacccgccgttgggtggggcagacgacccctgcccgtgacggaggggctggtggaagtcaggcttcctgacggctggtcgcaagtgtgcgacaaaggctggagcgcccacaacagccacgtggtctgcgggatgctgggcttccccagcgaaaagagggtcaacgcggccttctacaggctgctagcccaacggcagcaacactcctttggtctgcatggggtggcgtgcgtgggcacggaggcccacctctccctctgttccctggagttctatcgtgccaatgacaccgccaggtgccctggggggggccctgcagtggtgagctgtgtgccaggccctgtctacgcggcatccagtggccagaagaagcaacaacagtcgaagcctcaggggg

SEQ ID NO: 16729 - DNA, 3653 bp, Homo sapiens
  source 1..3653: mol_type = unassigned DNA
ggctggggggccgcgggcgggaggcggataaaaaggccccagggcgcccggggagggagcccgttagcgctgctccgccgcggcgcccgcccagccccggactgtccgcgctccatctggtatcttggcctcagctgtccttgaagtcaccatggcgtggtccccaccagccaccctctttctgttcctgctgctgctaggccagccccctcccagcaggccacagtcactgggcaccactaagctccggctggtgggcccagagagcaagccagaggagggccgcctggaggtgctgcaccagggccagtggggcaccgtgtgtgatgacaactttgctatccaggaggccacagtggcttgccgccagctgggcttcgaagctgccttgacctgggcccacagtgccaagtacggccaaggggagggacccatctggctggacaatgtgcgctgtgtgggcacagagagctccttggaccagtgcgggtctaatggctggggagtcagtgactgcagtcactcagaagacgtaggggtgatatgccacccccggcgccatcgtggctacctttctgaaactgtctccaatgcccttgggccccagggccggcggctggaggaggtgcggctcaagcccatccttgccagtgccaagcagcatagcccagtgaccgagggagccgtggaggtgaagtatgagggccactggcggcaggtgtgtgaccagggctggaccatgaacaacagcagggtggtgtgcgggatgctgggcttccccagcgaggtgcctgtcgacagccactactacaggaaagtctgggatctgaagatgagggaccctaagtctaggctgaagagcctgacgaataagaactccttctggatccaccaggtcacctgcctggggacagagccccacatggccaactgccaggtgcaggtggctccagcccggggcaagctgcggccagcctgcccaggtggcatgcacgctgtggtcagctgtgtggcagggcctcacttccgcccaccgaagacaaagccacaacgcaaagggtcctgggcagaggagccgagggtgcgcctgcgctccggggcccaggtgggcgagggccgggtggaagtgctcatgaaccgccagtggggcacggtctgtgaccacaggtggaacctcatctctgccagtgtcgtgtgtcgtcagctgggctttggctctgctcgggaggccctctttggggcccggctgggccaagggctagggcccatccacctgagtgaggtgcgctgcaggggatatgagcggaccctcagcgactgccctgccctggaagggtcccagaatggttgccaacatgagaatgatgctgctgtcaggtgcaatgtccctaacatgggctttcagaatcaggtgcgcttggctggtgggcgtatccctgaggaggggctattggaggtgcaggtggaggtgaacggggtcccacgctgggggagcgtgtgcagtgaaaactgggggctcaccgaagccatggtggcctgccgacagctcggcctgggttttgccatccatgcctacaaggaaacctggttctggtcggggacgccaagggcccaggaggtggtgatgagtggggtgcgctgctcaggcacagagctggccctgcagcagtgccagaggcacgggccggtgcactgctcccacggtggcgggcgcttcctggctggagtctcctgcatggacagtgcaccagacctggtgatgaacgcccagctagtgcaggagacggcctacttggaggaccgcccgctcagccagctgtattgtgcccacgaggagaactgcctctccaagtctgcggatcacatggactggccctacggataccgccgcctattgcgcttctccacacagatctacaatctgggccggactgactttcgtccaaagactggacgcgatagctgggtttggcaccagtgccacaggcattaccacagcattgaggtcttcacccactacgacctcctcactctcaatggctccaaggtggctgaggggcacaaggccagcttctgtctggaggacacaaactgccccacaggactgcagcggcgctacgcatgtgccaactttggagaacagggagtgactgtaggctgctgggacacctaccggcatgacattgattgccagtgggtggatatcacagatgtgggccccgggaattatatcttccaggtgattgtgaacccccactatgaagtggcagagtcagatttctccaacaatatgctgcagtgccgctgcaagtatgatgggcaccgggtctggctgcacaactgccacacagggaattcatacccagccaatgcagaactctccctggagcaggaacagcgtctcaggaacaacctcatctgaagctgtcactgcacactcctagctgctgccgatacaccagatacctcagcttattggagccatgcccttcacagagtcccaactcagaggaaaagggccagtgccaaggggcaccaagaacctgctcaggaagccttttgatggcaagatcaccaatccagatggtattgctccctcaggatggctctgggcctgcccctaagggcctgtggcctatggaatatgtcctccaggctttgctcagctgagctcctcttctgtaaggaaacccagtcatccctgaatcttgccacagagatccgggattcaggagctctcagtttcttagggatggactatggcccagtcccccatctaagtggtgctttgcaaatgtcttggaggagtataggacagaggaccaaaatacacagcaggtagtgttagctctctgctaggagctcaaagcaacacaacttgtatcaaaatcacaactggcagagaagctggtggatccaatcctttcttcatctgttgttatttagaactcacctctcacactctgttctttagtgtccttacctttatcttaccacacacatgggtgtttctattatccttggaagcacagacctcgggcatccccttattgcctgatgggccaacaccaacagttacggagtgcttgagaaggggcaagtttcacagaaatggccagatagggccttcctacagagcagcaagagtaggccaagcagaaagactgctgaggtaacacggaccccagcccctgtcagggcctctgccaaggaaataatatggaccatttacctggcaggcagtctgctctctctcaggatcaccacgcatctcaggattggtctaaacttcaagtctcaaccaagtgtctgaagtgaactttgcattgaataaatttttgccatggaaagaacatcaaacaagccactcatctctacagagataagaaaacaagtttggcagagcaagagacagaagaccgtggagaaatcagaagggggaacagtcagtttagttaaggatggaacctgggaaaggccaccattcctgcttgatggggctctgatttgctcttgctcaagtggaataaaaccccatggtcttcttgacatgattcttgatcttttctccactgagacacacttaagtgatgatccttacaggactgacaccctaatgccaataaaagttgctcattatggactgctacaaa

SEQ ID NO: 16730 - DNA, 2005 bp, Homo sapiens
  source 1..2005: mol_type = unassigned DNA
gtactatcctccttacttttgggtcgggccctccgggaagatggcggccgtgcaggcggccgaggtgaaagtggatggcagcgagccgaaactgagcaagaatgagctgaagagacgcctgaaagctgagaagaaagtagcagagaaggaggccaaacagaaagagctcagtgagaaacagctaagccaagccactgctgctgccaccaaccacaccactgataatggtgtgggtcctgaggaagagagcgtggacccaaatcaatactacaaaatccgcagtcaagcaattcatcagctgaaggtcaatggggaagacccatacccacacaagttccatgtagacatctcactcactgacttcatccaaaaatatagtcacctgcagcctggggatcacctgactgacatcaccttaaaggtggcaggtaggatccatgccaaaagagcttctgggggaaagctcatcttctatgatcttcgaggagagggggtgaagttgcaagtcatggccaattccagaaattataaatcagaagaagaatttattcatattaataacaaactgcgtcggggagacataattggagttcaggggaatcctggtaaaaccaagaagggtgagctgagcatcattccgtatgagatcacactgctgtctccctgtttgcatatgttacctcatcttcactttggcctcaaagacaaggaaacaaggtatcgccagagatacttggacttgatcctgaatgactttgtgaggcagaaatttatcatccgctctaagatcatcacatatataagaagtttcttagatgagctgggattcctagagattgaaactcccatgatgaacatcatcccagggggagccgtggccaagcctttcatcacttatcacaacgagctggacatgaacttatatatgagaattgctccagaactctatcataagatgcttgtggttggtggcatcgaccgggtttatgaaattggacgccagttccggaatgaggggattgatttgacgcacaatcctgagttcaccacctgtgagttctacatggcctatgcagactatcacgatctcatggaaatcacggagaagatggtttcagggatggtgaagcatattacaggcagttacaaggtcacctaccacccagatggcccagagggccaagcctacgatgttgacttcaccccacccttccggcgaatcaacatggtagaagagcttgagaaagccctggggatgaagctgccagaaacgaacctctttgaaactgaagaaactcgcaaaattcttgatgatatctgtgtggcaaaagctgttgaatgccctccacctcggaccacagccaggctccttgacaagcttgttggggagttcctggaagtgacttgcatcaatcctacattcatctgtgatcacccacagataatgagccctttggctaaatggcaccgctctaaagagggtctgactgagcgctttgagctgtttgtcatgaagaaagagatatgcaatgcgtatactgagctgaatgatcccatgcggcagcggcagctttttgaagaacaggccaaggccaaggctgcaggtgatgatgaggccatgttcatagatgaaaacttctgtactgccctggaatatgggctgccccccacagctggctggggcatgggcattgatcgagtcgccatgtttctcacggactccaacaacatcaaggaagtacttctgtttcctgccatgaaacccgaagacaagaaggagaatgtagcaaccactgatacactggaaagcacaacagttggcacttctgtctagaaaataataattgcaagttgtataactcaggcgtctttgcatttctgcgaaagatcaaggtctgcaagggaattcttgtgtgctgctttccatttgacaccgcagttctgttcagccatcagaagagagacaaggaattaaaaatttctttttaatcctgttaccaaataa

SEQ ID NO: 16731 - DNA, 2171 bp, Homo sapiens
  source 1..2171: mol_type = unassigned DNA
acttttgggtcgggccctccgggaagatggcggccgtgcaggcggccgaggtgaaagtggatggcagcgagccgaaactgagcaagaagtggtggtaatcattagttccagggtgctctgccatgttgacgcaagctgctgtaaggcttgttagggggtccctgcgcaaaacctcctgggcagagtggggtcacagggaactgcgactgggtcaacttgctcctttcacagcgcctcacaaggacaagtcattttctgatcaaagaagtgagctgaagagacgcctgaaagctgagaagaaagtagcagagaaggaggccaaacagaaagagctcagtgagaaacagctaagccaagccactgctgctgccaccaaccacaccactgataatggtgtgggtcctgaggaagagagcgtggacccaaatcaatactacaaaatccgcagtcaagcaattcatcagctgaaggtcaatggggaagacccatacccacacaagttccatgtagacatctcactcactgacttcatccaaaaatatagtcacctgcagcctggggatcacctgactgacatcaccttaaaggtggcaggtaggatccatgccaaaagagcttctgggggaaagctcatcttctatgatcttcgaggagagggggtgaagttgcaagtcatggccaattccagaaattataaatcagaagaagaatttattcatattaataacaaactgcgtcggggagacataattggagttcaggggaatcctggtaaaaccaagaagggtgagctgagcatcattccgtatgagatcacactgctgtctccctgtttgcatatgttacctcatcttcactttggcctcaaagacaaggaaacaaggtatcgccagagatacttggacttgatcctgaatgactttgtgaggcagaaatttatcatccgctctaagatcatcacatatataagaagtttcttagatgagctgggattcctagagattgaaactcccatgatgaacatcatcccagggggagccgtggccaagcctttcatcacttatcacaacgagctggacatgaacttatatatgagaattgctccagaactctatcataagatgcttgtggttggtggcatcgaccgggtttatgaaattggacgccagttccggaatgaggggattgatttgacgcacaatcctgagttcaccacctgtgagttctacatggcctatgcagactatcacgatctcatggaaatcacggagaagatggtttcagggatggtgaagcatattacaggcagttacaaggtcacctaccacccagatggcccagagggccaagcctacgatgttgacttcaccccacccttccggcgaatcaacatggtagaagagcttgagaaagccctggggatgaagctgccagaaacgaacctctttgaaactgaagaaactcgcaaaattcttgatgatatctgtgtggcaaaagctgttgaatgccctccacctcggaccacagccaggctccttgacaagcttgttggggagttcctggaagtgacttgcatcaatcctacattcatctgtgatcacccacagataatgagccctttggctaaatggcaccgctctaaagagggtctgactgagcgctttgagctgtttgtcatgaagaaagagatatgcaatgcgtatactgagctgaatgatcccatgcggcagcggcagctttttgaagaacaggccaaggccaaggctgcaggtgatgatgaggccatgttcatagatgaaaacttctgtactgccctggaatatgggctgccccccacagctggctggggcatgggcattgatcgagtcgccatgtttctcacggactccaacaacatcaaggaagtacttctgtttcctgccatgaaacccgaagacaagaaggagaatgtagcaaccactgatacactggaaagcacaacagttggcacttctgtctagaaaataataattgcaagttgtataactcaggcgtctttgcatttctgcgaaagatcaaggtctgcaagggaattcttgtgtgctgctttccatttgacaccgcagttctgttcagccatcagaagagagacaaggaattaaaaatttctttttaatcctgttaccaaataa

SEQ ID NO: 16732 - DNA, 3182 bp, Homo sapiens
  source 1..3182: mol_type = unassigned DNA
agtagtgcttggtttccaacagctgctgctggctcttcctcttgcggccttttcctgaaacggattcttctttcggggaacagaaagcgccagccatgcagccttggcacggaaaggccatgcagagagcttccgaggccggagccactgcccccaaggcttccgcacggaatgccaggggcgccccgatggatcccaccgagtctccggctgcccccgaggccgccctgcctaaggcgggaaagttcggccccgccaggaagtcgggatcccggcagaaaaagagcgccccggacacccaggagaggccgcccgtccgcgcaactggggcccgcgccaaaaaggcccctcagcgcgcccaggacacgcagccgtctgacgccaccagcgcccctggggcagaggggctggagcctcctgcggctcgggagccggctctttccagggctggttcttgccgccagaggggcgcgcgctgctccacgaagccaagacctccgcccgggccctgggacgtgcccagccccggcctgccggtctcggcccccattctcgtacggagggatgcggcgcctggggcctcgaagctccgggcggttttggagaagttgaagctcagccgcgatgatatctccacggcggcggggatggtgaaaggggttgtggaccacctgctgctcagactgaagtgcgactccgcgttcagaggcgtcgggctgctgaacaccgggagctactatgagcacgtgaagatttctgcacctaatgaatttgatgtcatgtttaaactggaagtccccagaattcaactagaagaatattccaacactcgtgcatattactttgtgaaatttaaaagaaatccgaaagaaaatcctctgagtcagtttttagaaggtgaaatattatcagcttctaagatgctgtcaaagtttaggaaaatcattaaggaagaaattaacgacattaaagatacagatgtcatcatgaagaggaaaagaggagggagccctgctgtaacacttcttattagtgaaaaaatatctgtggatataaccctggctttggaatcaaaaagtagctggcctgctagcacccaagaaggcctgcgcattcaaaactggctttcagcaaaagttaggaagcaactacgactaaagccattttaccttgtacccaagcatgcaaaggaaggaaatggtttccaagaagaaacatggcggctatccttctctcacatcgaaaaggaaattttgaacaatcatggaaaatctaaaacgtgctgtgaaaacaaagaagagaaatgttgcaggaaagattgtttaaaactaatgaaataccttttagaacagctgaaagaaaggtttaaagacaaaaaacatctggataaattctcttcttatcatgtgaaaactgccttctttcacgtatgtacccagaaccctcaagacagtcagtgggaccgcaaagacctgggcctctgctttgataactgcgtgacatactttcttcagtgcctcaggacagaaaaacttgagaattattttattcctgaattcaatctattctctagcaacttaattgacaaaagaagtaaggaatttctgacaaagcaaattgaatatgaaagaaacaatgagtttccagtttttgatgaattttgagattgtatttttagaaagatctaagaactagagtcaccctaaatcctggagaatacaagaaaaatttgaaaaggggccagacgctgtggctcacacctgtaatcccagctctttggaggccgaggcaggcggatcacttgaggtcaggagtttgagaccagcctgaccaacatggtgaaactccatctctactaaaaatataaaaattagccgggcatggtgatgcatgcctgtaatcccagctactcgggaggcttagacatgagaatcacttgaacccaggaggtggaggttgcagtgagtcaagatggcaccactgcactccatcctgggtgacagagcaagacttcctctcaaaaaataaataaataaataagaaaaataaattaggaaattattaaaataattttttagaaaagcaacaaaataacaaaaattagtgactgtaataattggaatgtttgaaatttgtcacagcaataattgactaaaatgaatgtaaataattattcagttttcagtttgttgtaataaactctaatcagtataaaggattgactatcctaggaaaaagattagtcaaggaataagaagcaaaagtagtatttgaaatctaaaaacattaccatgtttgctttatcatgcaggcaaataaataaataaatgacatttttaggttggaataaaaaaagataaagtacatattgccttaattaaattcatcaagttcttactgaaaaacagctctccgccgtgcctggccaggaaatacataattttttttttttttttttagatggagtctcgctctgtcgcccaggctggagtccagtggcatgatcttggctcactgcaagctctgcttcctgggttcatgccattctcctgcctcagccttccgagtagctgggactacaggtgcccgccaccacatccggctaattttttgtatttttagtaaagatggggtttcaccatgttagccaggatggtctcgatctccttaccttgtgatccgcccgccttggcctcccaaagtgctgggattacaggtgtgagccaccacgcctggctgaaatacataatcttaaaagaaaacataagatactttattttaatatacgtgactaaatgtaaaacctaacttattttctgttatctatttatttttactttcagtaacactttttttattttaggtagcattcagcctagaggcaactgctgtttgttaaatatttcctgttcatatattttgcacattttcttatgggttagttttcttctcattgttttgggaagttcttaatatatttggggtatttatctttcattcgttgtctgtgtaacaaataacttctgccatatgggttgtctgcacattttttggtgtcttttagtaaacaaggtttttttgttttgtattgttttgtttattgtaaagatttttaaattttaatggagttgatttcttttctcattcaagcttttgagaataaattggagttgaatttttta

SEQ ID NO: 16733 - DNA, 1917 bp, Homo sapiens
  source 1..1917: mol_type = unassigned DNA
aacagctgctgctggctcttcctcttgcggccttttcctgaaacggattcttctttcggggaacagaaagcgccagccatgcagccttggcacggaaaggccatgcagagagcttccgaggccggagccactgcccccaaggcttccgcacggaatgccaggggcgccccgatggatcccaccgagtctccggctgcccccgaggccgccctgcctaaggcgggaaagttcggccccgccaggaagtcgggatcccggcagaaaaagagcgccccggacacccaggagaggccgcccgtccgcgcaactggggcccgcgccaaaaaggcccctcagcgcgcccaggacacgcagccgtctgacgccaccagcgcccctggggcagaggggctggagcctcctgcggctcgggagccggctctttccagggctggttcttgccgccagaggggcgcgcgctgctccacgaagccaagacctccgcccgggccctgggacgtgcccagccccggcctgccggtctcggcccccattctcgtacggagggatgcggcgcctggggcctcgaagctccgggcggttttggagaagttgaagctcagccgcgatgatatctccacggcggcggggatggtgaaaggggttgtggaccacctgctgctcagactgaagtgcgactccgcgttcagaggcgtcgggctgctgaacaccgggagctactatgagcacgtgaagatttctgcacctaatgaatttgatgtcatgtttaaactggaagtccccagaattcaactagaagaatattccaacactcgtgcatattactttgtgaaatttaaaagaaatccgaaagaaaatcctctgagtcagtttttagaaggtgaaatattatcagcttctaagatgctgtcaaagtttaggaaaatcattaaggaagaaattaacgacattaaagatacagatgtcatcatgaagaggaaaagaggagggagccctgctgtaacacttcttattagtgaaaaaatatctgtggatataaccctggctttggaatcaaaaagtagctggcctgctagcacccaagaaggcctgcgcattcaaaactggctttcagcaaaagttaggaagcaactacgactaaagccattttaccttgtacccaagcatgcaaaggaaggaaatggtttccaagaagaaacatggcggctatccttctctcacatcgaaaaggaaattttgaacaatcatggaaaatctaaaacgtgctgtgaaaacaaagaagagaaatgttgcaggaaagattgtttaaaactaatgaaataccttttagaacagctgaaagaaaggtttaaagacaaaaaacatctggataaattctcttcttatcatgtgaaaactgccttctttcacagactctactgatatatttccaagtattaggtcacttgataagtgatccgcactgaagcaaaagataaactcagcattcttaggtgcttattctaatgccaccagttttacttctgttagcaaaaatctaaagtaacataacagacttatcacccccatttggaattagtatacaaatagaaatgatcctaatcaatttaattaattataatggacacacaagaaaaaatacctacacagcttttcgagaaacgaagacaatgactttgtctgtggatgacatactctgtagaaaagtttgcatgtgactccatttctcttcctcggtggttacaattatattttgcttcactgaacttacagcctaaaggattcaaagaacatagttcatcaaggtcatcatgattgagggtgagaccgcatacatcagctcaaaatgcatcttctctctcattggttaatgtttttaataaactgctaagcaaaatggcagacgtcctaaaaaaa

SEQ ID NO: 16734 - DNA, 2907 bp, Homo sapiens
  source 1..2907: mol_type = unassigned DNA
gctcttagacaaaccaacagcagcttcttctgacatatacacacgcacactcaccccggacacacactcagcacacttttcctccatttgattaacagtgctgcacacacaatgattacgggaaagcgcaaataaatacggaaaggggtgcttattttgactactggaagagctttgctgggtctcagcgcaacttttgttttttattcctgagaaggtgatctctccatgcggttctctcacacaaggattctttaaaagaggaagagagacaagcagaggggggaggacagtctttcactttaagaacggctgggctcaaagataaaaggaagggaaaagcagcagcagcagcagcagcagcagcagcagcagcagcagcagcagcagcagcagcagggaaaccaacgctgcagcacttccgaaaggcatttttgatccatttctgagtgttgcggcccgtttctccaccgaagttggctccagctctagcagccgcattggatcccacagcttactgcgagactccggtgtacaatccggatctctgccccaacatgattgcggcccaggccaagctggtctaccatctgaataaatactacaacgaaaaatgccaagccaggaaagctgccattgccaaaactatccgggaagtctgcaaagtagtttccgacgtactgaaggaagtggaagtgcaggagccgcggttcatcagctctctcaacgagatggacaatcgctacgagggcctcgaggtcatctcccccaccgaatttgaagtggtgctttatctcaaccaaatgggggtgttcaacttcgtggacgatggctcactgcccggctgcgcggtgctgaagttgagcgacgggcgcaagaggagcatgtccctctgggtggaattcattaccgcctccggctacctctcggcgcgcaaaatccggtccaggtttcagacgctggtggctcaagcggtagacaaatgtagctaccgggatgtggtaaagatggtggcagacaccagcgaagtgaaactgagaatccgagataggtacgtggtgcagatcacgccggcctttaaatgcaccgggatctggccgaggagtgctgcccactggccacttccccacatcccctggccgggacccaaccgggtggcggaggtcaaggcggaaggtttcaatctcttgtccaaggagtgccactccttggccggcaagcagagctcggcggagagcgacgcctgggtgctgcagttcgcggaggcagagaacagactgcagatggggggctgcagaaagaagtgcctctccatcctcaaaaccttaagggatcgtcaccttgaactgccgggccagcccttgaacaattaccatatgaagactctggtttcctacgagtgtgaaaagcatccccgagagtcggactgggacgagtcttgcctgggtgatcggctgaacgggattttgctgcaacttatctcctgcctgcagtgccggcggtgtccccactactttctaccgaacttagatctgtttcaaggcaaacctcactcagctctggaaaacgctgccaaacaaacgtggcgactggcaagagagatcctgaccaacccgaaaagtttggaaaaactttagaggatgatttaatcaagagccgaaattattacccttctcaaagtccttattaagtgtaaacttctgttcaattcctaatattccactccgcagtgcaaacaatctcttcctttaaaaaggaataataatacaatatttaaacatcatctcacccacccccacaaggggagaaaaagtaggggaagcggatggagaaaaacccaaagccactagtattagaagacttctttccacacgatttcctatctcccttgaaaagtacaccgtaacactccgtaaacagcccagctgtaacgccagaccgagacgaacactctgcctaactatcaaaggattatagcaatcctggtgatttaggtgcatctgtctgtgagtaaacacgatttggatatgccatctgaaagaaactgtaatgtatattttgatttgtaacaaatattgtgatctcacattgtctttgaaagtgtggatgttggtgttttgtgatttggtgaacagaacttaaattgccattctggatacttccagacattttccactaacaaagatatcatttaaaggtagatttcttcctggtacttttatctgtctttgaaagtgtctgaactttaaaaagtttacattttgtttcaaatattgcttgttctatttctaacattccataaatatacttgaaatgttatttaaatatattcaaagaaatttgaattcagcttatataataacgcttgaatatctgaattatatatttgaaaaatgcacttgaaatacactggataattacttttgtgatttagattttaatttgttgctggtttttatttaattagatggtaataaatgaagtaaaataaaagttgttgtgtctcactttaaattgtttcctatcacaagatgtaatgatgcattttgaaaatcaaacccacttgaatatcttaaatattttgagaaatatgctaatgaaatccttaaaaataaaacattggagaaaagctctttctgtataggtccataagataacaatctactctcagtctctaacttacttgtaagacaattcctttctacaacagaaacaatttaaatctacctttgaaagcttgctcttcttgtagcatttttgataatataagaaaaaaagtctatcatgacagtagagatgactgagttaaaaatctgactaattcagaggaaatgaacttaacaaagtcataatgaaacttcgaaaattatgtatgaaaactaataaaacgatcctttctgaccaata

SEQ ID NO: 16735 - DNA, 4994 bp, Homo sapiens
  source 1..4994: mol_type = unassigned DNA
gcgtgcgccctggggcccaagttggggcgcgccgtggctagaacacggagagcggcgggcagtgcagccaatgggaggcggcgctgcctagcggctggtaggcggtgcctgcgcgggtgttaggttagcgcgaggcgtgacctagttgacaggctctgaggtgctgctgtggcggcgtccgcggggctgaggcgggtgggagccggagccgagcgcgggctgagggaggagggcggcgactggagagcggcgagcggcgagcagcgcaggacgcagagcctctttcactttttccctgctgagtgccccctcccacccctcccactccacacacaccctgtttgcccgtgagcctggggaacttgcagcttaaagccagccacccccacggcaacatgtaccccagcaacaagaagaaaaaggtgtggagagaggagaaagaacgtttattgaagatgaccttagaagagagacgcaaagaatacctaagagactatattcccctgaacagcattctatcatggaaggaggagatgaagggcaagggccaaaatgatgaagaaaatactcaggaaacatcccaggtgaagaaaagtttgactgaaaaagtttctctctatagaggtgacatcacattgctagaggtagatgctatagtcaatgccgcaaatgccagtcttcttggaggaggaggtgtggatggctgtattcatagagcagccggcccctgtttgctagctgaatgtcgtaacctgaatggctgtgatactggacatgcaaaaatcacatgtggctatgaccttcctgcaaaatatgtcatccatactgtagggccaatagccaggggccatattaatggttcccacaaggaagaccttgcaaattgctataaatcatctctgaagctcgtgaaagaaaataacatccgatcagttgcatttccctgcatctcaacaggcatttatggctttcccaacgagcctgctgcagtcattgccctcaacaccattaaggaatggcttgccaagaatcaccatgaggtggatcggatcattttctgtgtcttcttagaagttgacttcaaaatctacaaaaagaaaatgaatgagtttttctccgtagacgataataatgaagaagaagaggatgttgaaatgaaagaagattcagatgagaacggtccagaggagaagcaaagtgtggaagaaatggaagagcagagccaagatgcagatggtgtcaacactgtcactgtgcccggccctgcttcagaagaggcagttgaagactgtaaagatgaagattttgcaaaggatgaaaatattacaaaaggcggtgaagtgacagatcattctgtgcgtgaccaagatcatcccgatggacaagagaatgattcaacgaagaatgaaataaaaattgaaacagaatcgcagagctcatatatggaaacagaagaactttcatcaaaccaagaagatgccgtgattgtggagcaaccagaagtgattccattaacagaggaccaagaagaaaaagaaggtgaaaaagctccaggcgaggacacacctaggatgcctgggaaaagtgaaggctccagtgacctagaaaatactccaggtcctgatgcaggggcacaagatgaagcgaaggaacaaagaaatggaactaaatgacaatcctcagcatcgcaaggcctctcctggctctgggggagctcgggaagatagcagcacacgctgtggaggagggtgggggtggggggaaggcaagtcccatggaaggacggggaatcctttactctaatttctccagctgcattttgttccgtttatctgcagaaaaagaaagaaaaaaaagaaaaaaaaagtttcctttaatttggtggagggacccatgttgacgcatctttcaggcattatccttgtaatttctgtcttttctcttacaactttgccccagggtcacagtggcttgattgaacactcacatgtgtatcctggcccctgtctgctttcttggttatttcacaaagctggtcacacagtggtttattcaaaggaaggggaggaagacagtggtttgataagctgcaggataaattttaggaatcaatgagcccagcagcagtataatccccagacagaggaggcaggatagaaaatgggcaaaagcctcggaaaccacttggaaaaggtctggacaatgaggtgaaaatattttcttcagggttcccaaggcacaatttgttccaagtggctaatgagaaatatggaagctgaattttttccagagcagagtgcagaggcataacagaagggtgggccctggcagccatctgggtctcttccttcctaaccatggtggcaggtgcatccttctttgacactgactttcagcagagcttacttggttcatgaggtcttcacatggagactaccagcaagaggtgactctctgctgcataactgtaaaggatggccctttgctaggtgttacagttaaaagctaagaaaaggggcagtgcatttaggacccaaacatatgcctatgaatatcaaaagctcctcctgaaattgctgtgagttttccataaaagaatatcctgtcttcacccaaggcttgacagcccacagagtggtctcatttgaaattacaggaaattagagcttttgcttgcagttctgccttcctggcctgtgtttaaatgctgtcacttgtttatgccaagttcaaggctgattcaatggttggtcccctcacccagaaaaccctgaaggggaggatacagctctgaaggggggcagcagtactaaaaacccaagatgccagtggtatagtgggcacaagggatggcgaccatgaggatgccaggcatcatcaccaatatctatcctagagccagtataaggccagatgcctacttcccacagcctccccgggttccaaagtcatgtcattgttttcagtggaaacatatcgtttgttgcatatcttcttaaatccatcttccttgtaagggctttagaactaaaacttacttatattgtttttccttaacagagggagaaaaatagtggattattatttctaaaataaaaggatgttctgctttctaaatatcccatcaaaatcttcagttttgcacttttttgatggaaaattcatcttatcttcctatgactttggttttagcctttctgaatttgttaccccttctggatggcttatttgatatactggaatagttaacaagctatacttcagcatatgcactatattctaacaaattttttttaataaaatcaagacatcagcaagaatgacatttacgtgacctcataatgtgggattatggccttctgttgctattccagtttgatatggaagcatctatatcctctattgccgttagatgttgttgcttttcagaaaagtaacgaaaaggctcattttaaagaatccaagaaacgatgtcatccaaatattgacagtttctacatttcatgccatctttataactcaattgaaagttgccgtcattcttgtgaagtatttgacaagtgcaatctgctagaagctcgtttttcttgtgactcccaaatgttagtgctacttagcctcagtaatgagttacagttgaaaaaaacatgagggaaacagagggacagagattttctaatgaacaatgatggaagagacctaatgtccttgctagaaacagccaggatggaaattatccagccctggcattctccttatcatcaatgacagtcattttattcatttatttcaaatgtgggtgggctagaagtggaaggagggaattctctctgcctaaaaattctagaagaatgaaagtaatctttgtatccaggaaactaagagaatgaggaataaatatcttcagcccgactcctgaatttgtttattcttccatctataattagattgtgttttcatttttgctttgtcatgctttttggttgttatttggctatacagttttatgctttaaaacaaatgataaagttaatttccaattcaatagtgaaatattaacaatctaactatagccagatcaaagacacctgaacacagaaaacctttatttgctggtgctgccattgcacaggctgtacaatgaaatagatttgaaaagctgattgattttcccgcacataaattctggatgtcaatttccaaccaaactccaatacagctatgtggcatgaagagttacaggagggagggaggaaaatagccctatgttagtcatgtttgcatacagaggatcaaagtaggccttcaccataatagttctaattaaaatggtcctcgctgtaggagagacaaaggggcttttcctctagctggtaactattcagatgatggacaagtcttctttcataaaagattacaaagaaggcatccgaatcactgtctgtgatactgggtcacatattaatcactgcagctaattgtaaatctttctatgaaacactgaaaagcctctttgtgaattaatacagttctgcttgatgcacttgatttgaaaagacatttctctgtatgtggcgcatgtcggctttgctttgaaaaataacaaagttagcagaatatgttcaatatattttcttggggaatagggtttttattacatgattcattaaggatttgccttaccctgacatttgtgatataaaggaaaatcagaaaaaaagtaattttcttgatcaagatatgtttttacttaatgcaaataaatgtagtctgttgcttgcaaggaaaaaaaaatggcttctgatatctggtataaactgctaaataggataatacgtgcctcttttgttaaaccggcatttaaatgctggactgcttctaaatctgtttgtttcttttcatctgtgccatacactaaaaaacaactgttgccttcatactatatttgttagagcagaatacaaataaaatttgtttgagaggataatgtgaaa

SEQ ID NO: 16736 - DNA, 1347 bp, Homo sapiens
  source 1..1347: mol_type = unassigned DNA
atgtaccccagcaacaagaagaaaaaggtgtggagagaggagaaagaacgtttattgaagatgaccttagaagagagacgcaaagaatacctaagagactatattcccctgaacagcattctatcatggaaggaggagatgaagggcaagggccaaaatgatgaagaaaatactcaggaaacatcccaggtgaagaaaagtttgactgaaaaagtttctctctatagaggtgacatcacattgctagaggtagatgctatagtcaatgccgcaaatgccagtcttcttggaggaggaggtgtggatggctgtattcatagagcagccggcccctgtttgctagctgaatgtcgtaacctgaatggctgtgatactggacatgcaaaaatcacatgtggctatgaccttcctgcaaaatatgtcatccatactgtagggccaatagccaggggccatattaatggttcccacaaggaagaccttgcaaattgctataaatcatctctgaagctcgtgaaagaaaataacatccgatcagttgcatttccctgcatctcaacaggcatttatggctttcccaacgagcctgctgcagtcattgccctcaacaccattaaggaatggcttgccaagaatcaccatgaggtggatcggatcattttctgtgtcttcttagaagttgacttcaaaatctacaaaaagaaaatgaatgagtttttctccgtagacgataataatgaagaagaagaggatgttgaaatgaaagaagattcagatgagaacggtccagaggagaagcaaagtgtggaagaaatggaagagcagagccaagatgcagatggtgtcaacactgtcactgtgcccggccctgcttcagaagaggcagttgaagactgtaaagatgaagattttgcaaaggatgaaaatattacaaaaggcggtgaagtgacagatcattctgtgcgtgaccaagatcatcccgatggacaagagaatgattcaacgaagaatgaaataaaaattgaaacagaatcgcagagctcatatatggaaacagaagaactttcatcaaaccaagaagatgccgtgattgtggagcaaccagaagtgattccattaacagaggaccaagaagaaaaagaaggtgaaaaagctccaggcgaggacacacctaggatgcctgggaaaagtgaaggctccagtgacctagaaaatactccaggtcctgatgttgaaatgaatagtcaggttgacaaggtaaatgacccaacagagagtcaacaagaagatcaactaatagcaggggcacaagatgaagcgaaggaacaaagaaatggaactaaatga

SEQ ID NO: 16737 - DNA, 704 bp, Homo sapiens
  source 1..704: mol_type = unassigned DNA
atgaatgagtttttctccgtagacgataataatgaagaagaagaggatgttgaaatgaaagaagattcagatgagaacggtccagaggagaagcaaagtgtggaagaaatggaagagcagagccaagatgcagatggtgtcaacactgtcactgtgcccggccctgcttcagaagaggcagttgaagactgtaaagatgaagattttgcaaaggatgaaaatattacaaaaggcggtgaagtgacagatcattctgtgcgtgaccaagatcatcccgatggacaagagaatgattcaacgaagaatgaaataaaaattgaaacagaatcgcagagctcatatatggaaacagaagaactttcatcaaaccaagaagatgccgtgattgtggagcaaccagaagtgattccattaacagaggaccaagaagaaaaagaaggtgaaaaagctccaggcgaggacacacctaggatgcctgggaaaagtgaaggctccagtgacctagaaaatactccaggtcctgatgttgaaatgaatagtcaggttgacaaggtaaatgacccaacagagagtcaacaagaagatcaactaatagcaggggcacaagatgaagcgaaggaacaaagaaatggaactaaatgacaatcctcagcatcgcaaggcctctcctggctctgggggagctcgggaagatagcagcacac

SEQ ID NO: 16738 - DNA, 4425 bp, Homo sapiens
  source 1..4425: mol_type = unassigned DNA
actatcgagaagcagatgacaggctcaggccttaccagggatgcacttgccacattttggaaagactacataaaaaacctttaaaaattggagccctttgggcctcaggtatccaaagagcacattttttggaaactcaacactcaggaaggtcgcatagagccagtttatgcagatgtcatccatactgtagggccaatagccaggggccatattaatggttcccacaaggaagaccttgcaaattgctataaatcatctctgaagctcgtgaaagaaaataacatccgatcagttgcatttccctgcatctcaacaggcatttatggctttcccaacgagcctgctgcagtcattgccctcaacaccattaaggaatggcttgccaagaatcaccatgaggtggatcggatcattttctgtgtcttcttagaagttgacttcaaaatctacaaaaagaaaatgaatgagtttttctccgtagacgataataatgaagaagaagaggatgttgaaatgaaagaagattcagatgagaacggtccagaggagaagcaaagtgtggaagaaatggaagagcagagccaagatgcagatggtgtcaacactgtcactgtgcccggccctgcttcagaagaggcagttgaagactgtaaagatgaagattttgcaaaggatgaaaatattacaaaaggcggtgaagtgacagatcattctgtgcgtgaccaagatcatcccgatggacaagagaatgattcaacgaagaatgaaataaaaattgaaacagaatcgcagagctcatatatggaaacagaagaactttcatcaaaccaagaagatgccgtgattgtggagcaaccagaagtgattccattaacagaggaccaagaagaaaaagaaggtgaaaaagctccaggcgaggacacacctaggatgcctgggaaaagtgaaggctccagtgacctagaaaatactccaggtcctgatgttgaaatgaatagtcaggttgacaaggtaaatgacccaacagagagtcaacaagaagatcaactaatagcaggggcacaagatgaagcgaaggaacaaagaaatggaactaaatgacaatcctcagcatcgcaaggcctctcctggctctgggggagctcgggaagatagcagcacacgctgtggaggagggtgggggtggggggaaggcaagtcccatggaaggacggggaatcctttactctaatttctccagctgcattttgttccgtttatctgcagaaaaagaaagaaaaaaaagaaaaaaaaagtttcctttaatttggtggagggacccatgttgacgcatctttcaggcattatccttgtaatttctgtcttttctcttacaactttgccccagggtcacagtggcttgattgaacactcacatgtgtatcctggcccctgtctgctttcttggttatttcacaaagctggtcacacagtggtttattcaaaggaaggggaggaagacagtggtttgataagctgcaggataaattttaggaatcaatgagcccagcagcagtataatccccagacagaggaggcaggatagaaaatgggcaaaagcctcggaaaccacttggaaaaggtctggacaatgaggtgaaaatattttcttcagggttcccaaggcacaatttgttccaagtggctaatgagaaatatggaagctgaattttttccagagcagagtgcagaggcataacagaagggtgggccctggcagccatctgggtctcttccttcctaaccatggtggcaggtgcatccttctttgacactgactttcagcagagcttacttggttcatgaggtcttcacatggagactaccagcaagaggtgactctctgctgcataactgtaaaggatggccctttgctaggtgttacagttaaaagctaagaaaaggggcagtgcatttaggacccaaacatatgcctatgaatatcaaaagctcctcctgaaattgctgtgagttttccataaaagaatatcctgtcttcacccaaggcttgacagcccacagagtggtctcatttgaaattacaggaaattagagcttttgcttgcagttctgccttcctggcctgtgtttaaatgctgtcacttgtttatgccaagttcaaggctgattcaatggttggtcccctcacccagaaaaccctgaaggggaggatacagctctgaaggggggcagcagtactaaaaacccaagatgccagtggtatagtgggcacaagggatggcgaccatgaggatgccaggcatcatcaccaatatctatcctagagccagtataaggccagatgcctacttcccacagcctccccgggttccaaagtcatgtcattgttttcagtggaaacatatcgtttgttgcatatcttcttaaatccatcttccttgtaagggctttagaactaaaacttacttatattgtttttccttaacagagggagaaaaatagtggattattatttctaaaataaaaggatgttctgctttctaaatatcccatcaaaatcttcagttttgcacttttttgatggaaaattcatcttatcttcctatgactttggttttagcctttctgaatttgttaccccttctggatggcttatttgatatactggaatagttaacaagctatacttcagcatatgcactatattctaacaaattttttttaataaaatcaagacatcagcaagaatgacatttacgtgacctcataatgtgggattatggccttctgttgctattccagtttgatatggaagcatctatatcctctattgccgttagatgttgttgcttttcagaaaagtaacgaaaaggctcattttaaagaatccaagaaacgatgtcatccaaatattgacagtttctacatttcatgccatctttataactcaattgaaagttgccgtcattcttgtgaagtatttgacaagtgcaatctgctagaagctcgtttttcttgtgactcccaaatgttagtgctacttagcctcagtaatgagttacagttgaaaaaaacatgagggaaacagagggacagagattttctaatgaacaatgatggaagagacctaatgtccttgctagaaacagccaggatggaaattatccagccctggcattctccttatcatcaatgacagtcattttattcatttatttcaaatgtgggtgggctagaagtggaaggagggaattctctctgcctaaaaattctagaagaatgaaagtaatctttgtatccaggaaactaagagaatgaggaataaatatcttcagcccgactcctgaatttgtttattcttccatctataattagattgtgttttcatttttgctttgtcatgctttttggttgttatttggctatacagttttatgctttaaaacaaatgataaagttaatttccaattcaatagtgaaatattaacaatctaactatagccagatcaaagacacctgaacacagaaaacctttatttgctggtgctgccattgcacaggctgtacaatgaaatagatttgaaaagctgattgattttcccgcacataaattctggatgtcaatttccaaccaaactccaatacagctatgtggcatgaagagttacaggagggagggaggaaaatagccctatgttagtcatgtttgcatacagaggatcaaagtaggccttcaccataatagttctaattaaaatggtcctcgctgtaggagagacaaaggggcttttcctctagctggtaactattcagatgatggacaagtcttctttcataaaagattacaaagaaggcatccgaatcactgtctgtgatactgggtcacatattaatcactgcagctaattgtaaatctttctatgaaacactgaaaagcctctttgtgaattaatacagttctgcttgatgcacttgatttgaaaagacatttctctgtatgtggcgcatgtcggctttgctttgaaaaataacaaagttagcagaatatgttcaatatattttcttggggaatagggtttttattacatgattcattaaggatttgccttaccctgacatttgtgatataaaggaaaatcagaaaaaaagtaattttcttgatcaagatatgtttttacttaatgcaaataaatgtagtctgttgcttgcaaggaaaaaaaaatggcttctgatatctggtataaactgctaaataggataatacgtgcctcttttgttaaaccggcatttaaatgctggactgcttctaaatctgtttgtttcttttcatctgtgccatacactaaaaaacaactgttgccttcatactatatttgttagagcagaatacaaataaaatttgtttgagaggataatgtgaaa

SEQ ID NO: 16739 - DNA, 2058 bp, Homo sapiens
  source 1..2058: mol_type = unassigned DNA
gctaatgttttggccgcttcaagatggcggtgcaggagtcggcggctcagttgtccatgaccctgaaggtccaggagtacccgaccctcaaggtgccctacgagacgctgaacaaacgctttcgcgccgctcagaagaacattgaccgggagaccagccacgtcaccatggtggtggccgagctggagaagacgttgagcggctgccccgccgtggactccgtggtcagcctgctggacggcgtggtggagaagctcagcgtcctcaagaggaaggcggtggaatccatccaggccgaggacgagagcgccaagctgtgcaagcgccggatcgagcacctcaaagagcatagcagcgaccagcccgcggcggccagcgtgtggaagaggaagcgcatggatcgcatgatggtggagcacctgctgcgttgcggctactacaacacggctgtcaagctggcgcgccagagcggcatcgagagctgcctggagttcagcctcagaatccaggagttcattgaactcatccggcagaataagagactggacgctgtgagacatgcaagaaagcacttcagccaagcagaagggagccagctggacgaggtgcgccaggccatgggcatgctggccttcccgcccgacacgcacatctccccgtacaaggaccttctggaccctgcacggtggcggatgctgatccagcagttccggtacgacaactaccgactacaccagctgggaaacaattctgtgttcaccctcaccctgcaggctggcctctcagccatcaagacaccacagtgctacaaggaggacggcagctccaagagccctgactgccctgtgtgcagccgctccctgaacaagctggcgcagcccctgcccatggcccactgtgccaactcccgcctggtctgcaagatttctggcgacgtgatgaacgagaacaatccgcccatgatgctgcccaacggctacgtctacggctacaattctctgctttctatccgtcaagatgataaagtcgtgtgcccgagaaccaaagaagtcttccacttctcacaagccgagaaggtgtacatcatgtaggccccacgtcgtgaagcgcacgcctcggggacgggctgcagtgggcggggaggccacgccttcctcctgtcccacgctccagcctgccgcggcgtttctgtttcttgcgaccaaagatccgtgagcaacgataaatactcttaggaagagagaaaataaggtttcataagtttgtacttgaaaacatttggattggtaggattttgtaacacgtcaaccatttgatgcttctgaaaagtactttcaacttgcgaaggaaactcttctttaaagactgacctaaacaccgagggaaacttaagaacgtttaaaatataggagtccgtgatttccctgtgttttcagtttctttccttctgtgaacgatgagacttggagaacgggctggtccttcaccacttcctgttggccctggcctggccggggaaggtggcagcggcaccggactgacctgcagtgacccgcgatgccgcgccacgagggacacttatggcttcattcgagagctgctgccaaaacgcctggcgccgccaccgtcgggggctggcttcgaggacgcccgcctgcctcgcgggtcgtgtccgcgggactgtgttcgtacgtgcatagtttcgatatcacatcgcggggctgtgttcgtagctgcgtcgtttcgatatcacaccctctgtgtgccgccttacttcctgcttcgagaatgtataacgtggaaatccacgggaccaaatttctgcagaggccttgccggatggttccataactgtagagtctaattgctatccattacagaaattaatcgttcagttgaaagaagtactgatgacttttcaaaacaaatgaaccaccgtagctgacagagaaccgtatcgtagaggtttgtagttagtgcttatttttgcatgttgatgttgactagctaataaactgtaaatgtaaaccatgcgaataaaatggttttctatttctc

SEQ ID NO: 16740 - DNA, 2222 bp, Homo sapiens
  source 1..2222: mol_type = unassigned DNA
tcatttcccggcgtgcagcgcgctcgcgcgtcccccgcccgctaatgttttggccgcttcaagatggcggtgcaggagtcggcggctcagttgtccatgaccctgaaggtccaggagtacccgaccctcaaggtgccctacgagacgctgaacaaacgctttcgcgccgctcagaagaacattgaccgggagaccagccacgtcaccatggtggtggccgagctggagaagacgttgagcggctgccccgccgtggactccgtggtcagcctgctggacggcgtggtggagaagctcagcgtcctcaagaggaaggcggtggaatccatccaggccgaggacgagagcgccaagctgtgcaagcgccggatcgagcacctcaaagagcatagcagcgaccagcccgcggcggccagcgtgtggaagaggaagcgcatggatcgcatgatggtggagcacctgctgcgttgcggctactacaacacggctgtcaagctggcgcgccagagcggcatcgaggacctagtgaatattgagatgttcctgacggccaaagaggtggaggagtccctggagaggcgtgagacggccacctgcctggcctggtgccatgacaacaagtcccggctccggaagatgaagagctgcctggagttcagcctcagaatccaggagttcattgaactcatccggcagaataagagactggacgctgtgagacatgcaagaaagcacttcagccaagcagaagggagccagctggacgaggtgcgccaggccatgggcatgctggccttcccgcccgacacgcacatctccccgtacaaggaccttctggaccctgcacggtggcggatgctgatccagcagttccggtacgacaactaccgactacaccagctgggaaacaattctgtgttcaccctcaccctgcaggctggcctctcagccatcaagacaccacagtgctacaaggaggacggcagctccaagagccctgactgccctgtgtgcagccgctccctgaacaagctggcgcagcccctgcccatggcccactgtgccaactcccgcctggtctgcaagatttctggcgacgtgatgaacgagaacaatccgcccatgatgctgcccaacggctacgtctacggctacaattctctgctttctatccgtcaagatgataaagtcgtgtgcccgagaaccaaagaagtcttccacttctcacaagccgagaaggtgtacatcatgtaggccccacgtcgtgaagcgcacgcctcggggacgggctgcagtgggcggggaggccacgccttcctcctgtcccacgctccagcctgccgcggcgtttctgtttcttgcgaccaaagatccgtgagcaacgataaatactcttaggaagagagaaaataaggtttcataagtttgtacttgaaaacatttggattggtaggattttgtaacacgtcaaccatttgatgcttctgaaaagtactttcaacttgcgaaggaaactcttctttaaagactgacctaaacaccgagggaaacttaagaacgtttaaaatataggagtccgtgatttccctgtgttttcagtttctttccttctgtgaacgatgagacttggagaacgggctggtccttcaccacttcctgttggccctggcctggccggggaaggtggcagcggcaccggactgacctgcagtgacccgcgatgccgcgccacgagggacacttatggcttcattcgagagctgctgccaaaacgcctggcgccgccaccgtcgggggctggcttcgaggacgcccgcctgcctcgcgggtcgtgtccgcgggactgtgttcgtacgtgcatagtttcgatatcacatcgcggggctgtgttcgtagctgcgtcgtttcgatatcacaccctctgtgtgccgccttacttcctgcttcgagaatgtataacgtggaaatccacgggaccaaatttctgcagaggccttgccggatggttccataactgtagagtctaattgctatccattacagaaattaatcgttcagttgaaagaagtactgatgacttttcaaaacaaatgaaccaccgtagctgacagagaaccgtatcgtagaggtttgtagttagtgcttatttttgcatgttgatgttgactagctaataaactgtaaatgtaaaccatgcgaataaaatggttttctatttctca

SEQ ID NO: 16741 - DNA, 1944 bp, Homo sapiens
  source 1..1944: mol_type = unassigned DNA
gctaatgttttggccgcttcaagatggcggtgcaggagtcggcggctcagttgtccatgaccctgaaggtccaggagtacccgaccctcaaggtgccctacgagacgctgaacaaacgctttcgcgccgctcagaagaacattgaccgggagaccagccacgtcaccatggtggtggccgagctggagaagacgttgagcggctgccccgccgtggactccgtggtcagcctgctggacggcgtggtggagaagctcagcgtcctcaagaggaaggcggtggaatccatccaggccgaggacgagagcgccaagctgtgcaagcgccggatcgagcacctcaaagagcatagcagcgaccagcccgcggcggccagcgtgtggaagaggaagcgcatggatcgcatgatggtggagcacctgctgcgttgcggctactacaacacggctgtcaagctggcgcgccagagcggcatcgagacatgcaagaaagcacttcagccaagcagaagggagccagctggacgaggtgcgccaggccatgggcatgctggccttcccgcccgacacgcacatctccccgtacaaggaccttctggaccctgcacggtggcggatgctgatccagcagttccggtacgacaactaccgactacaccagctgggaaacaattctgtgttcaccctcaccctgcaggctggcctctcagccatcaagaacagtgctacaaggaggacggcagctccaagagccctgactgccctgtgtgcagccgctccctgaacaagctggcgcagcccctgcccatggcccactgtgccaactcccgcctggtctgcaagatttctggcgacgtgatgaacgagaacaatccgcccatgatgctgcccaacggctacgtctacggctacaattctctgctttctatccgtcaagatgataaagtcgtgtgcccgagaaccaaagaagtcttccacttctcacaagccgagaaggtgtacatcatgtaggccccacgtcgtgaagcgcacgcctcggggacgggctgcagtgggcggggaggccacgccttcctcctgtcccacgctccagcctgccgcggcgtttctgtttcttgcgaccaaagatccgtgagcaacgataaatactcttaggaagagagaaaataaggtttcataagtttgtacttgaaaacatttggattggtaggattttgtaacacgtcaaccatttgatgcttctgaaaagtactttcaacttgcgaaggaaactcttctttaaagactgacctaaacaccgagggaaacttaagaacgtttaaaatataggagtccgtgatttccctgtgttttcagtttctttccttctgtgaacgatgagacttggagaacgggctggtccttcaccacttcctgttggccctggcctggccggggaaggtggcagcggcaccggactgacctgcagtgacccgcgatgccgcgccacgagggacacttatggcttcattcgagagctgctgccaaaacgcctggcgccgccaccgtcgggggctggcttcgaggacgcccgcctgcctcgcgggtcgtgtccgcgggactgtgttcgtacgtgcatagtttcgatatcacatcgcggggctgtgttcgtagctgcgtcgtttcgatatcacaccctctgtgtgccgccttacttcctgcttcgagaatgtataacgtggaaatccacgggaccaaatttctgcagaggccttgccggatggttccataactgtagagtctaattgctatccattacagaaattaatcgttcagttgaaagaagtactgatgacttttcaaaacaaatgaaccaccgtagctgacagagaaccgtatcgtagaggtttgtagttagtgcttatttttgcatgttgatgttgactagctaataaactgtaaatgt

SEQ ID NO: 16742 - DNA, 1202 bp, Homo sapiens
  source 1..1202: mol_type = unassigned DNA
aatgttttggccgcttcaagatggcggtgcaggagtcggcggctcagttgtccatgaccctgaaggtccaggagtacccgaccctcaaggtgccctacgagacgctgaacaaacgctttcgcgccgctcagaagaacattgaccgggagaccagccacgtcaccatggtggtggccgagctggagaagacgttgagcggctgccccgccgtggactccgtggtcagcctgctggacggcgtggtggagaagctcagcgtcctcaagaggaaggacctagtgaatattgagatgttcctgacggccaaagaggtggaggagtccctggagaggcgtgagacggccacctgcctggcctggtgccatgacaacaagtcccggctccggaagatgaagagctgcctggagttcagcctcagaatccaggagttcattgaactcatccggcagaataagagactggacgctgtgagacatgcaagaaagcacttcagccaagcagaagggagccagctggacgaggtgcgccaggccatgggcatgctggccttcccgcccgacacgcacatctccccgtacaaggaccttctggaccctgcacggtggcggatgctgatccagcagttccggtacgacaactaccgactacaccagctgggaaacaattctgtgttcaccctcaccctgcaggctggcctctcagccatcaagacaccacagtgctacaaggaggacggcagctccaagagccctgactgccctgtgtgcagccgctccctgaacaagctggcgcagcccctgcccatggcccactgtgccaactcccgcctggtctgcaagatttctggcgacgtgatgaacgagaacaatccgcccatgatgctgcccaacggctacgtctacggctacaattctctgctttctatccgtcaagatgataaagtcgtgtgcccgagaaccaaagaagtcttccacttctcacaagccgagaaggtgtacatcatgtaggccccacgtcgtgaagcgcacgcctcggggacgggctgcagtgggcggggaggccacgccttcctcctgtcccacgctccagcctgccgcggcgtttctgtttcttgcgaccaaagatccgtgagcaacgataaatactcttaggaagagagaaaataaggtttcataagtttgtacttgaaaacatttggattg

SEQ ID NO: 16743 - DNA, 1340 bp, Homo sapiens
  source 1..1340: mol_type = unassigned DNA
gcccgctaatgttttggccgcttcaagatggcggtgcaggagtcggcggctcagttgtccatgaccctgaaggtccaggagtacccgaccctcaaggtgccctacgagacgctgaacaaacgctttcgcgccgctcagaagaacattgaccgggagaccagccacgtcaccatggtggtggccgagctggagaagacgttgagcggctgccccgccgtggactccgtggtcagcctgctggacggcgtggtggagaagctcagcgtcctcaagaggaaggcggtggaatccatccaggccgaggacgagagcgccaagctgtgcaagcgccggatcgagcacctcaaagagcatagcagcgaccagcccgcggcggccagcgtgtggaagaggaagcgcatggatcgcatgatggtggagcacctgctgcgttgcggctactacaacacggctgtcaagctggcgcgccagagcggcatcgaggacctagtgaatattgagatgttcctgacggccaaagaggtggaggagtccctggagaggcgtgagacggccacctgcctggcctggtgccatgacaacaagtcccggctccggaagatgaagggccgccaaaacaagcacgaagcaaagacgggacgaaaaagtagagcggctagtagctcccctaaagagagtttggaccttggtatggaaaccctaaaaggaaagccagaattgagctgcctggagttcagcctcagaatccaggagttcattgaactcatccggcagaataagagactggacgctgtgagacatgcaagaaagcacttcagccaagcagaagggagccagctggacgaggtgcgccaggccatgggcatgctggccttcccgcccgacacgcacatctccccgtacaaggaccttctggaccctgcacggtggcggatgctgatccagcagttccggtacgacaactaccgactacaccagctgggaaacaattctgtgttcaccctcaccctgcaggctggcctctcagccatcaagacaccacagtgctacaaggaggacggcagctccaagagccctgactgccctgtgtgcagccgctccctgaacaagctggcgcagcccctgcccatggcccactgtgccaactcccgcctggtctgcaagatttctggcgacgtgatgaacgagaacaatccgcccatgatgctgcccaacggctacgtctacggctacaattctctgctttctatccgtcaagatgataaagtcgtgtgcccgagaaccaaagaagtcttccacttctcacaagccgagaaggtgtacatcatgtaggccccacg

SEQ ID NO: 16744 - DNA, 1444 bp, Homo sapiens
  source 1..1444: mol_type = unassigned DNA
ttgcactgggagcaaagggttcctgtctgcagcacaccagctgcccggagctctgccctgtgcctgagcagcgtcagcaccgcggtgaggcggacggcccggcaggggttggaaagtccagaaaggccccgttcccgcgtagaacttgaatgcagctaagggacgtccagagaggcctttccttttctggtggcggtctggaatgtgctggtgccctacgagacgctgaacaaacgctttcgcgccgctcagaagaacattgaccgggagaccagccacgtcaccatggtggtggccgagctggagaagacgttgagcggctgccccgccgtggactccgtggtcagcctgctggacggcgtggtggagaagctcagcgtcctcaagaggaaggcggtggaatccatccaggccgaggacgagagcgccaagctgtgcaagcgccggatcgagcacctcaaagagcatagcagcgaccagcccgcggcggccagcgtgtggaagaggaagcgcatggatcgcatgatggtggagcacctgctgcgttgcggctactacaacacggctgtcaagctggcgcgccagagcggcatcgaggacctagtgaatattgagatgttcctgacggccaaagaggtggaggagtccctggagaggcgtgagacggccacctgcctggcctggtgccatgacaacaagtcccggctccggaagatgaagagctgcctggagttcagcctcagaatccaggagttcattgaactcatccggcagaataagagactggacgctgtgagacatgcaagaaagcacttcagccaagcagaagggagccagctggacgaggtgcgccaggccatgggcatgctggccttcccgcccgacacgcacatctccccgtacaaggaccttctggaccctgcacggtggcggatgctgatccagcagttccggtacgacaactaccgactacaccagctgggaaacaattctgtgttcaccctcaccctgcaggctggcctctcagccatcaagacaccacagtgctacaaggaggacggcagctccaagagccctgactgccctgtgtgcagccgctccctgaacaagctggcgcagcccctgcccatggcccactgtgccaactcccgcctggtctgcaagatttctggcgacgtgatgaacgagaacaatccgcccatgatgctgcccaacggctacgtctacggctacaattctctgctttctatccgtcaagatgataaagtcgtgtgcccgagaaccaaagaagtcttccacttctcacaagccgagaaggtgtacatcatgtaggccccacgtcgtgaagcgcacgcctcggggacgggctgcagtgggcggggaggccacgccttcctcctgtcccacgctccagcctgccgcggcgtttctgtttcttgcgacc

SEQ ID NO: 16745 - DNA, 1607 bp, Homo sapiens
  source 1..1607: mol_type = unassigned DNA
ggcctggctcctctggggggcgtggatgtggggaggagctgctgtctgggtcagcagctgccctgctggagggagagggggtgctgcgctcatcccctgaactcagattggatagccccgggccagcgctggaggaggagcagaggcagggaggtgggaggagcgtgcgcagaggcgtgggaggcctgaggagtaagcggctggatgtggaccctgagagccactggcagggaggtggggtcttccagttgtgaagacaccgtggccccggtgccctacgagacgctgaacaaacgctttcgcgccgctcagaagaacattgaccgggagaccagccacgtcaccatggtggtggccgagctggagaagacgttgagcggctgccccgccgtggactccgtggtcagcctgctggacggcgtggtggagaagctcagcgtcctcaagaggaaggcggtggaatccatccaggccgaggacgagagcgccaagctgtgcaagcgccggatcgagcacctcaaagagcatagcagcgaccagcccgcggcggccagcgtgtggaagaggaagcgcatggatcgcatgatggtggagcacctgctgcgttgcggctactacaacacggctgtcaagctggcgcgccagagcggcatcgaggacctagtgaatattgagatgttcctgacggccaaagaggtggaggagtccctggagaggcgtgagacggccacctgcctggcctggtgccatgacaacaagtcccggctccggaagatgaagagctgcctggagttcagcctcagaatccaggagttcattgaactcatccggcagaataagagactggacgctgtgagacatgcaagaaagcacttcagccaagcagaagggagccagctggacgaggtgcgccaggccatgggcatgctggccttcccgcccgacacgcacatctccccgtacaaggaccttctggaccctgcacggtggcggatgctgatccagcagttccggtacgacaactaccgactacaccagctgggaaacaattctgtgttcaccctcaccctgcaggctggcctctcagccatcaagacaccacagtgctacaaggaggacggcagctccaagagccctgactgccctgtgtgcagccgctccctgaacaagctggcgcagcccctgcccatggcccactgtgccaactcccgcctggtctgcaagatttctggcgacgtgatgaacgagaacaatccgcccatgatgctgcccaacggctacgtctacggctacaattctctgctttctatccgtcaagatgataaagtcgtgtgcccgagaaccaaagaagtcttccacttctcacaagccgagaaggtgtacatcatgtaggccccacgtcgtgaagcgcacgcctcggggacgggctgcagtgggcggggaggccacgccttcctcctgtcccacgctccagcctgccgcggcgtttctgtttcttgcgaccaaagatccgtgagcaacgataaatactcttaggaagagagaaaataaggtttcataagtttgtacttgaaaacatttggattggtaggattttgtaacacgtc

SEQ ID NO: 16746 - DNA, 1945 bp, Homo sapiens
  source 1..1945: mol_type = unassigned DNA
atgttttggccgcttcaagatggcggtgcaggagtcggcggctcagttgtccatgaccctgaaggtccaggagtacccgaccctcaaggtgccctacgagacgctgaacaaacgctttcgcgccgctcagaagaacattgaccgggagaccagccacgtcaccatggtggtggccgagctggagaagacgttgagcggctgccccgccgtggactccgtggtcagcctgctggacggcgtggtggagaagctcagcgtcctcaagaggaaggcggtggaatccatccaggccgaggacgagagcgccaagctgtgcaagcgccggatcgagcacctcaaagagcatagcagcgaccagcccgcggcggccagcgtgtggaagaggaagcgcatggatcgcatgatggtggagcacctgctgcgttgcggctactacaacacggctgtcaagctggcgcgccagagcggcatcgagacatgcaagaaagcacttcagccaagcagaagggagccagctggacgaggtgcgccaggccatgggcatgctggccttcccgcccgacacgcacatctccccgtacaaggaccttctggaccctgcacggtggcggatgctgatccagcagttccggtacgacaactaccgactacaccagctgggaaacaattctgtgttcaccctcaccctgcaggctggcctctcagccatcaagacacctgctacaaggaggacggcagctccaagagccctgactgccctgtgtgcagccgctccctgaacaagctggcgcagcccctgcccatggcccactgtgccaactcccgcctggtctgcaagatttctggcgacgtgatgaacgagaacaatccgcccatgatgctgcccaacggctacgtctacggctacaattctctgctttctatccgtcaagatgataaagtcgtgtgcccgagaaccaaagaagtcttccacttctcacaagccgagaaggtgtacatcatgtaggccccacgtcgtgaagcgcacgcctcggggacgggctgcagtgggcggggaggccacgccttcctcctgtcccacgctccagcctgccgcggcgtttctgtttcttgcgaccaaagatccgtgagcaacgataaatactcttaggaagagagaaaataaggtttcataagtttgtacttgaaaacatttggattggtaggattttgtaacacgtcaaccatttgatgcttctgaaaagtactttcaacttgcgaaggaaactcttctttaaagactgacctaaacaccgagggaaacttaagaacgtttaaaatataggagtccgtgatttccctgtgttttcagtttctttccttctgtgaacgatgagacttggagaacgggctggtccttcaccacttcctgttggccctggcctggccggggaaggtggcagcggcaccggactgacctgcagtgacccgcgatgccgcgccacgagggacacttatggcttcattcgagagctgctgccaaaacgcctggcgccgccaccgtcgggggctggcttcgaggacgcccgcctgcctcgcgggtcgtgtccgcgggactgtgttcgtacgtgcatagtttcgatatcacatcgcggggctgtgttcgtagctgcgtcgtttcgatatcacaccctctgtgtgccgccttacttcctgcttcgagaatgtataacgtggaaatccacgggaccaaatttctgcagaggccttgccggatggttccataactgtagagtctaattgctatccattacagaaattaatcgttcagttgaaagaagtactgatgacttttcaaaacaaatgaaccaccgtagctgacagagaaccgtatcgtagaggtttgtagttagtgcttatttttgcatgttgatgttgactagctaataaactgtaaatgtaaacc

SEQ ID NO: 16747 - DNA, 1294 bp, Homo sapiens
  source 1..1294: mol_type = unassigned DNA
gctaatgttttggccgcttcaagatggcggtgcaggagtcggcggctcagttgtccatgaccctgaaggtccaggagtacccgaccctcaaggtgccctacgagacgctgaacaaacgctttcgcgccgctcagaagaacattgaccgggagaccagccacgtcaccatggtggtggccgagctggagaagctcagcgtcctcaagaggaaggcggtggaatccatccaggccgaggacgagagcgccaagctgtgcaagcgccggatcgagcacctcaaagagcatagcagcgaccagcccgcggcggccagcgtgtggaagaggaagcgcatggatcgcatgatggtggagcacctgctgcgttgcggctactacaacacggctgtcaagctggcgcgccagagcggcatcgaggacctagtgaatattgagatgttcctgacggccaaagaggtggaggagtccctggagaggcgtgagacggccacctgcctggcctggtgccatgacaacaagtcccggctccggaagatgaagagctgcctggagttcagcctcagaatccaggagttcattgaactcatccggcagaataagagactggacgctgtgagacatgcaagaaagcacttcagccaagcagaagggagccagctggacgaggtgcgccaggccatgggcatgctggccttcccgcccgacacgcacatctccccgtacaaggaccttctggaccctgcacggtggcggatgctgatccagcagttccggtacgacaactaccgactacaccagctgggaaacaattctgtgttcaccctcaccctgcaggctggcctctcagccatcaagacaccacagtgctacaaggaggacggcagctccaagagccctgactgccctgtgtgcagccgctccctgaacaagctggcgcagcccctgcccatggcccactgtgccaactcccgcctggtctgcaagatttctggcgacgtgatgaacgagaacaatccgcccatgatgctgcccaacggctacgtctacggctacaattctctgctttctatccgtcaagatgataaagtcgtgtgcccgagaaccaaagaagtcttccacttctcacaagccgagaaggtgtacatcatgtaggccccacgtcgtgaagcgcacgcctcggggacgggctgcagtgggcggggaggccacgccttcctcctgtcccacgctccagcctgccgcggcgtttctgtttcttgcgaccaaagatccgtgagcaacgataaatactctta

SEQ ID NO: 16748 - DNA, 939 bp, Homo sapiens
  source 1..939: mol_type = unassigned DNA
acaggggctcagtgcgtgcagtggaatgaactgggcttcatctctggaagggtaaggggccatcttccgggttcaccgccgcatccccacccccggcacagcgcctcctggcgactaacatcggtgacttagtgaaaggactaagaaagacccgaggcgaggccggaacaggccgatttctagccgccaagtggagaacaggttggagcggtgcgccgggcttagcggcggttgctggaggaacgggcggagtcgcccagggtcctgccctgcgggggtcgagccgaggcaggcggtgacttccccactcggggcggagccgcagcctcgcgggggcggggcctggcgccggcggtggcgtcacaaaaggcgggaccacagtggtgtccgagaagtcaggcacgtagctcagcggcggccgcggcgcgtgcgtctgtgcctctgcgcgggtctcctggtccttctgccatcatgccgatgttcatcgtaaacaccaacgtgccccgcgcctccgtgccggacgggttcctctccgagctcacccagcagctggcgcaggccaccggcaagcccccccagtacatcgcggtgcacgtggtcccggaccagctcatggccttcggcggctccagcgagccgtgcgcgctctgcagcctgcacagcatcggcaagatcggcggcgcgcagaaccgctcctacagcaagctgctgtgcggcctgctggccgagcgcctgcgcatcagcccggacagggtctacatcaactattacgacatgaacgcggccaatgtgggctggaacaactccaccttcgcctaagagccgcagggacccacgctgtctgcgctggctccacccgggaacccgccgcacgctgtgttctaggcccgcccaccccaaccttctggtggggagaaataaacggtttagagactagga

SEQ ID NO: 16749 - DNA, 1838 bp, Homo sapiens
  source 1..1838: mol_type = unassigned DNA
agagccaaagggaagtgctgcgaggtttacaaccagctgcagtggttcgatgggaaggatctttctccaagtggttcctcttgaggggagcatttctgctggctccaggactttggccatctataaagcttggcaatgagaaataagaaaattctcaaggaggacgagctcttgagtgagacccaacaagctgcttttcaccaaattgcaatggagcctttcgaaatcaatgttccaaagcccaagaggagaaatggggtgaacttctccctagctgtggtggtcatctacctgatcctgctcaccgctggcgctgggctgctggtggtccaagttctgaatctgcaggcgcggctccgggtcctggagatgtatttcctcaatgacactctggcggctgaggacagcccgtccttctccttgctgcagtcagcacaccctggagaacacctggctcagggtgcatcgaggctgcaagtcctgcaggcccaactcacctgggtccgcgtcagccatgagcacttgctgcagcgggtagacaacttcactcagaacccagggatgttcagaatcaaaggtgaacaaggcgccccaggtcttcaaggtcacaagggggccatgggcatgcctggtgcccctggcccgccgggaccacctgctgagaagggagccaagggggctatgggacgagatggagcaacaggcccctcgggaccccaaggcccaccgggagtcaagggagaggcgggcctccaaggaccccagggtgctccagggaagcaaggagccactggcaccccaggaccccaaggagagaagggcagcaaaggcgatgggggtctcattggcccaaaaggggaaactggaactaagggagagaaaggagacctgggtctcccaggaagcaaaggggacaggggcatgaaaggagatgcaggggtcatggggcctcctggagcccaggggagtaaaggtgacttcgggaggccaggcccaccaggtttggctggttttcctggagctaaaggagatcaaggacaacctggactgcagggtgttccgggccctcctggtgcagtgggacacccaggtgccaagggtgagcctggcagtgctggctcccctgggcgagcaggacttccagggagccccgggagtccaggagccacaggcctgaaaggaagcaaaggggacacaggacttcaaggacagcaaggaagaaaaggagaatcaggagttccaggccctgcaggtgtgaagggagaacaggggagcccagggctggcaggtcccaagggagcccctggacaagctggccagaagggagaccagggagtgaaaggatcttctggggagcaaggagtaaagggagaaaaaggtgaaagaggtgaaaactcagtgtccgtcaggattgtcggcagtagtaaccgaggccgggctgaagtttactacagtggtacctgggggacaatttgcgatgacgagtggcaaaattctgatgccattgtcttctgccgcatgctgggttactccaaaggaagggccctgtacaaagtgggagctggcactgggcagatctggctggataatgttcagtgtcggggcacggagagtaccctgtggagctgcaccaagaatagctggggccatcatgactgcagccacgaggaggacgcaggcgtggagtgcagcgtctgacccggaaaccctttcacttctctgctcccgaggtgtcctcgggctcatatgtgggaaggcagaggatctctgaggagttccctggggacaactgagcagcctctggagaggggccattaataaagctcaacatcattggc

SEQ ID NO: 16750 - DNA, 1843 bp, Homo sapiens
  source 1..1843: mol_type = unassigned DNA
ataaagcttggcaatgagaaataagaaaattctcaaggaggacgagctcttgagtgagacccaacaagctgcttttcaccaaattgcaatggagcctttcgaaatcaatggatgaggagtgtaaatttcacactgtaccctctagaagcacagtgcaacttgcatccctctttcctgccatcacctccagcctccctcattagaacaagcctccttcattccattatctgcactagaattaagttccaaagcccaagaggagaaatggggtgaacttctccctagctgtggtggtcatctacctgatcctgctcaccgctggcgctgggctgctggtggtccaagttctgaatctgcaggcgcggctccgggtcctggagatgtatttcctcaatgacactctggcggctgaggacagcccgtccttctccttgctgcagtcagcacaccctggagaacacctggctcagggtgcatcgaggctgcaagtcctgcaggcccaactcacctgggtccgcgtcagccatgagcacttgctgcagcgggtagacaacttcactcagaacccagggatgttcagaatcaaaggtgaacaaggcgccccaggtcttcaaggtcacaagggggccatgggcatgcctggtgcccctggcccgccgggaccacctgctgagaagggagccaagggggctatgggacgagatggagcaacaggcccctcgggaccccaaggcccaccgggagtcaagggagaggcgggcctccaaggaccccagggtgctccagggaagcaaggagccactggcaccccaggaccccaaggagagaagggcagcaaaggcgatgggggtctcattggcccaaaaggggaaactggaactaagggagagaaaggagacctgggtctcccaggaagcaaaggggacaggggcatgaaaggagatgcaggggtcatggggcctcctggagcccaggggagtaaaggtgacttcgggaggccaggcccaccaggtttggctggttttcctggagctaaaggagatcaaggacaacctggactgcagggtgttccgggccctcctggtgcagtgggacacccaggtgccaagggtgagcctggcagtgctggctcccctgggcgagcaggacttccagggagccccgggagtccaggagccacaggcctgaaaggaagcaaaggggacacaggacttcaaggacagcaaggaagaaaaggagaatcaggagttccaggccctgcaggtgtgaagggagaacaggggagcccagggctggcaggtcccaagggagcccctggacaagctggccagaagggagaccagggagtgaaaggatcttctggggagcaaggagtaaagggagaaaaaggtgaaagaggtgaaaactcagtgtccgtcaggattgtcggcagtagtaaccgaggccgggctgaagtttactacagtggtacctgggggacaatttgcgatgacgagtggcaaaattctgatgccattgtcttctgccgcatgctgggttactccaaaggaagggccctgtacaaagtgggagctggcactgggcagatctggctggataatgttcagtgtcggggcacggagagtaccctgtggagctgcaccaagaatagctggggccatcatgactgcagccacgaggaggacgcaggcgtggagtgcagcgtctgacccggaaaccctttcacttctctgctcccgaggtgtcctcgggctcatatgtgggaaggcagaggatctctgaggagttccctggggacaactgagcagcctctggagaggggccattaataaagctcaacatc

SEQ ID NO: 16751 - DNA, 2132 bp, Homo sapiens
  source 1..2132: mol_type = unassigned DNA
tgtgtcatttcctttcttcatgtaccagatgctgaaatactatgagataaagattttaggtttcaattgtaaagagagagaagtggataaatcagtgctgctttctttaggacgaaagaagtatggagcagtgggatcactttcacaatcaacaggaggacactgatagctgctccgaatctgtgaaatttgatgctcgctcaatgacagctttgcttcctccgaatcctaaaaacagcccttcccttcaagagaaactgaagtccttcaaagctgcactgattgccctttacctcctcgtgtttgcagttctcatccctctcattggaatagtggcagctcaactcctgaagtgggaaacgaagaattgctcagttagttcaactaatgcaaatgatataactcaaagtctcacgggaaaaggaaatgacagcgaagaggaaatgagatttcaagaagtctttatggaacacatgagcaacatggagaagagaatccagcatattttagacatggaagccaacctcatggacacagagcatttccaaaatttcagcatgacaactgatcaaagatttaatgacattcttctgcagctaagtaccttgttttcctcagtccagggacatgggaatgcaatagatgaaatctccaagtccttaataagtttgaataccacattgcttgatttgcagctcaacatagaaaatctgaatggcaaaatccaagagaataccttcaaacaacaagaggaaatcagtaaattagaggagcgtgtttacaatgtatcagcagaaattatggctatgaaagaagaacaagtgcatttggaacaggaaataaaaggagaagtgaaagtactgaataacatcactaatgatctcagactgaaagattgggaacattctcagaccttgagaaatatcactttaattcaaggtcctcctggacccccgggtgaaaaaggagatcgaggtcccactggagaaagtggtccacgaggatttccaggtccaataggtcctccgggtcttaaaggtgatcggggagcaattggctttcctggaagtcgaggactcccaggatatgccggaaggccaggaaattctggaccaaaaggccagaaaggggaaaaggggagtggaaacacattaactccatttacgaaagttcgactggtcggtgggagcggccctcacgaggggagggtggagatactccacagcggccagtggggtacaatttgtgacgatcgctgggaagtgcgcgttggacaggtcgtctgtaggagcttgggatacccaggtgttcaagccgtgcacaaggcagctcactttggacaaggtactggtccaatatggctgaatgaagtgttttgttttgggagagaatcatctattgaagaatgtaaaattcggcaatgggggacaagagcctgttcacattctgaagatgctggagtcacttgcactttataatgcatcatattttcattcacaactatgaaatcgctgctcaaaaatgattttattaccttgttcctgtaaaatccatttaatcaatatttaagagattaagaatattgcccaaataatattttagattacaggattaatatattgaacaccttcatgcttactattttatgtctatatttaaatcattttaacttctataggtttttaaatggaattttctaatataatgacttatatgctgaattgaacattttgaagtttatagcttccagattacaaaggccaagggtaatagaaatgcataccagtaattggctccaattcataatatgttcaccaggagattacaattttttgctcttcttgtctttgtaatctatttagttgattttaattactttctgaataacggaagggatcagaagatatcttttgtgcctagattgcaaaatctccaatccacacatattgttttaaaataagaatgttatccaactattaagatatctcaatgtgcaataacttgtgtattagatatcaatgttaatgatatgtcttggccactatggaccagggagcttatttttcttgtcatgtactgacaactgtttaattgaatcatgaagtaaattgaaagcaggacatatgagaaaa

SEQ ID NO: 16752 - DNA, 3572 bp, Homo sapiens
  source 1..3572: mol_type = unassigned DNA
aaatttagattttgcaaacctgtgcattgatgagagtgctattgaaacacattaagaaagattttcaacgcaggaatgtgtcatttcctttcttcatgtaccagatgctgaaatactatgagataaagattttaggtttcaattgtaaagagagagaagtggataaatcagtgctgctttctttaggacgaaagaagtatggagcagtgggatcactttcacaatcaacaggaggacactgatagctgctccgaatctgtgaaatttgatgctcgctcaatgacagctttgcttcctccgaatcctaaaaacagcccttcccttcaagagaaactgaagtccttcaaagctgcactgattgccctttacctcctcgtgtttgcagttctcatccctctcattggaatagtggcagctcaactcctgaagtgggaaacgaagaattgctcagttagttcaactaatgcaaatgatataactcaaagtctcacgggaaaaggaaatgacagcgaagaggaaatgagatttcaagaagtctttatggaacacatgagcaacatggagaagagaatccagcatattttagacatggaagccaacctcatggacacagagcatttccaaaatttcagcatgacaactgatcaaagatttaatgacattcttctgcagctaagtaccttgttttcctcagtccagggacatgggaatgcaatagatgaaatctccaagtccttaataagtttgaataccacattgcttgatttgcagctcaacatagaaaatctgaatggcaaaatccaagagaataccttcaaacaacaagaggaaatcagtaaattagaggagcgtgtttacaatgtatcagcagaaattatggctatgaaagaagaacaagtgcatttggaacaggaaataaaaggagaagtgaaagtactgaataacatcactaatgatctcagactgaaagattgggaacattctcagaccttgagaaatatcactttaattcaaggtcctcctggacccccgggtgaaaaaggagatcgaggtcccactggagaaagtggtccacgaggatttccaggtccaataggtcctccgggtcttaaaggtgatcggggagcaattggctttcctggaagtcgaggactcccaggatatgccggaaggccaggaaattctggaccaaaaggccagaaaggggaaaaggggagtggaaacacattaagtactggtccaatatggctgaatgaagtgttttgttttgggagagaatcatctattgaagaatgtaaaattcggcaatgggggacaagagcctgttcacattctgaagatgctggagtcacttgcactttataatgcatcatattttcattcacaactatgaaatcgctgctcaaaaatgattttattaccttgttcctgtaaaatccatttaatcaatatttaagagattaagaatattgcccaaataatattttagattacaggattaatatattgaacaccttcatgcttactattttatgtctatatttaaatcattttaacttctataggtttttaaatggaattttctaatataatgacttatatgctgaattgaacattttgaagtttatagcttccagattacaaaggccaagggtaatagaaatgcataccagtaattggctccaattcataatatgttcaccaggagattacaattttttgctcttcttgtctttgtaatctatttagttgattttaattactttctgaataacggaagggatcagaagatatcttttgtgcctagattgcaaaatctccaatccacacatattgttttaaaataagaatgttatccaactattaagatatctcaatgtgcaataacttgtgtattagatatcaatgttaatgatatgtcttggccactatggaccagggagcttatttttcttgtcatgtactgacaactgtttaattgaatcatgaagtaaattgaaagcaggacatatgagaaaactgaccatcagtatatttgtccagataattggtggatcaaaaatgccacttaacaggaagtttagtttgttatgcactttaaatggaataattagcttgttacaattctaggacatggtgtttaaaatttaaatctgattaatccattttaacaaacaatgcaaacatcttcagtgcagaaggaagagtggtttcaactgtttggagtcttttatgaagtcagtcaacatttacaaccaaagggcgggggggggggtggggggtgcgtctttagtcctaaagggacaataactctgagcatgccccaaaaaagtagtttagcaaccttttgttggtagtcaacccatccccagggccatagtgtagagtgtgaaaagctaccctgaaacccagtaattctaccctgaaagtgactgcctgcagaaagaccagcagttgatattaaagcgcaaatgaattcaacctcagccctgaaaataacagaattctgaagtttcctatgactaattcacaaaaaaagtaattgtaaactagtactattatggaattactctactgttctttctttaatagtggcaaatgaaagcataagcttaagcattttttcatattctgaagtctcaccacacataataaccaagtggtagactcacagccgtccaacttaaaaaggcaaaaccttaccttggaattggaattactgtaaacagcctactgaaaatgcatttttatcatgtaacattcttctacttgtttaacattgctgattttctctggcagcataattttgtggttaagagaatgaattctgaatgtacactttctgtctcaaaccctggctgtaatttcagctagttaataattctttgtgttcagttccactatctaggtattttcttcaaaaggtaaatacaatggtttctgaaagaatcatttgcattatcagcctgtttgggatgtctgagatcagtgcctctgggttgttaatactgtattgctgtatggtatatgtatgctgatttactacttatgcgtaagtggtatgcatgggatgtctgaaatcagtgcctatgggttgtcaatagtattaactattagtgttaactgttagtattaactattagtattattaacactaataatagtactattactattactatttttattttaaaataaaatttacctttaaaataataatagtactattgctagtactagtactattgctattactagtactattactagtactagtactatgacactgttaatagtactattaacaacccataggcacttgggatgtctgagatcagtgcctatgggttgttaatactatattgctgtatggtatatgcatgctgatttaccacttatgcatagatatatctttaataagtaatctaaaaatcctttttgtatttgagagaatctactaagttcagtccagtcaagaaaagaacctaatagcaccaatacaaattgaggacttaatttactttggaatgttgaattgcatttgttccattaaaaaaaacagaaatttgcga

SEQ ID NO: 16753 - DNA, 1167 bp, Homo sapiens
  source 1..1167: mol_type = unassigned DNA
atggagcagtgggatcactttcacaatcaacaggaggacactgatagctgctccgaatctgtgaaatttgatgctcgctcaatgacagctttgcttcctccgaatcctaaaaacagcccttcccttcaagagaaactgaagtccttcaaagctgcactgattgccctttacctcctcgtgtttgcagttctcatccctctcattggaatagtggcagctcaactcctgaagtgggaaacgaagaattgctcagttagttcaactaatgcaaatgatataactcaaagtctcacgggaaaaggaaatgacagcgaagaggaaatgagatttcaagaagtctttatggaacacatgagcaacatggagaagagaatccagcatattttagacatggaagccaacctcatggacacagagcatttccaaaatttcagcatgacaactgatcaaagatttaatgacattcttctgcagctaagtaccttgttttcctcagtccagggacatgggaatgcaatagatgaaatctccaagtccttaataagtttgaataccacattgcttgatttgcagctcaacatagaaaatctgaatggcaaaatccaagagaataccttcaaacaacaagaggaaatcagtaaattagaggagcgtgtttacaatgtatcagcagaaattatggctatgaaagaagaacaagtgcatttggaacaggaaataaaaggagaagtgaaagtactgaataacatcactaatgatctcagactgaaagattgggaacattctcagaccttgagaaatatcactttaattcaaggtcctcctggacccccgggtgaaaaaggagatcgaggtcccactggagaaagtggtccacgaggatttccaggtccaataggtcctccgggtcttaaaggtgatcggggagcaattggctttcctggaagtcgaggactcccaggatatgccggaaggccaggaaattctggaccaaaaggccagaaaggggaaaaggggagtggaaacacattaagtactggtccaatatggctgaatgaagtgttttgttttgggagagaatcatctattgaagaatgtaaaattcggcaatgggggacaagagcctgttcacattctgaagatgctggagtcacttgcactttataa

SEQ ID NO: 16754 - DNA, 2826 bp, Homo sapiens
  source 1..2826: mol_type = unassigned DNA
taggtttcaattgtaaagagagagaagtggataaatcagtgctgctttctttaggacgaaagaagtatggagcagtgggatcactttcacaatcaacaggaggacactgatagctgctccgaatctgtgaaatttgatgctcgctcaatgacagctttgcttcctccgaatcctaaaaacagcccttcccttcaagagaaactgaagtccttcaaagctgcactgattgccctttacctcctcgtgtttgcagttctcatccctctcattggaatagtggcagctcaactcctgaagtgggaaacgaagaattgctcagttagttcaactaatgcaaatgatataactcaaagtctcacgggaaaaggaaatgacagcgaagaggaaatgagatttcaagaagtctttatggaacacatgagcaacatggagaagagaatccagcatattttagacatggaagccaacctcatggacacagagcatttccaaaatttcagcatgacaactgatcaaagatttaatgacattcttctgcagctaagtaccttgttttcctcagtccagggacatgggaatgcaatagatgaaatctccaagtccttaataagtttgaataccacattgcttgatttgcagctcaacatagaaaatctgaatggcaaaatccaagagaataccttcaaacaacaagaggaaatcagtaaattagaggagcgtgtttacaatgtatcagcagaaattatggctatgaaagaagaacaagtgcatttggaacaggaaataaaaggagaagtgaaagtactgaataacatcactaatgatctcagactgaaagattgggaacattctcagaccttgagaaatatcactttaattcaaggtcctcctggacccccgggtgaaaaaggagatcgaggtcccactggagaaagtggtccacgaggatttccaggtccaataggtcctccgggtcttaaaggtgatcggggagcaattggctttcctggaagtcgaggactcccaggatatgccggaaggccaggaaattctggaccaaaaggccagaaaggggaaaaggggagtggaaacacattaagaccagtacaactcactgatcatattagggcagggccctcttaagatcaggtgggttgggcgggacatcctctgctaccatctcattaaaaggcccttcacctctggacaagtcatctgcacaactgacttccaagatccttttgtgactcctccaaatgactttggttcccgtgttgtacctgacttccacatggccttctctcctggtccctggtgctgtttgggcctctgctcccatgctcatacctcttcttactccaattactccaccatcacctctctcccctatcacccccagcctggacacctctcatgcacggactggagggctgctccaaccagtcctcagttctctgccacccattgacctagagtcttgaacccaatttaatttattgggttctaggagaactgctgtgttctcaccctaacttggaagagtgatgtttcagtcaagcaaagcgattcctaccatacaatataacacttgtgtgaggctctgtcctaaatatctcaattaccaatatgtggtttggtagtatttctcgccatgctttgctcatgcgcaatgagactacaactagggtgtaaattttaagtatcccatctaaaactcatacaatgataggaaaaatccatttgtttttcatttgatttttactgaggaatcagctcaatcttcaatgaatactggtctctttccaaagcatttttgatcaaagtaaagactgagtcaagggctttttttttttctttttcttgttttaagagacagagccttgttctattgcacaggctggactacacgcattcacctagagtctagaacacaatttaatttattgggttctaggagaactgtcatgagtattgataatatgagagttctttatattcaaacattattctcaaccagagatagggatgtcatagaagaaaatccattcattcaatcattaattcacatgtccattatgtacctccatgagctggacataacagctaataagagataattgtctctggttttacagagctaattgtccctaagagatgtagacaaatgaacaagcaattacaatacatctaagctatactgggggaggaacagggctggataggtatgcagaggagataaaaaaattttaattccttagaatattttttaaaaattgattcttattttaccttctcatcttcttattttccaaattacagcatatatatatatatatatatatatatatatatatatatatatatatatattttttttttttttttttttttttttttaagttttgaagtgtagtcgagcttgggcaatttatccaacccatttaaaccaaaaataaaacttttcatgtattacctggtcatttcaaacaaaaatattttgatcatgaaaaagaataccaatattcttttgttctaaaaatctcttatgggattacatgttatatttttggtttctctctactgatcaacagactacattttcacaactcttctttcctttacgttttaacacacagacccaagattcatactattaagattctagtagaactctagatggtatgcctctgtgtatctcagcatttttattcccactcttgtataatgaacatgttaacacctacctcacagggttgttgtgaggatcaagtaagatattgtgtgtgtgaagatgctctgtgaaatcataaagtcctttaaagatgt

SEQ ID NO: 16755 - DNA, 1513 bp, Homo sapiens
  source 1..1513: mol_type = unassigned DNA
actctgctgttgagacgttggggagatgaggaggaatacccagaaataaataaaactcccctggatgtgctatctcagtgcaatcatcagtatctctcttctcaacaaaaaaccaagtatggagcagtgggatcactttcacaatcaacaggaggacactgatagctgctccgaatctgtgaaatttgatgctcgctcaatgacagctttgcttcctccgaatcctaaaaacagcccttcccttcaagagaaactgaagtccttcaaagctgcactgattgccctttacctcctcgtgtttgcagttctcatccctctcattggaatagtggcagctcaactcctgaagtgggaaacgaagaattgctcagttagttcaactaatgcaaatgatataactcaaagtctcacgggaaaaggaaatgacagcgaagaggaaatgagatttcaagaagtctttatggaacacatgagcaacatggagaagagaatccagcatattttagacatggaagccaacctcatggacacagagcatttccaaaatttcagcatgacaactgatcaaagatttaatgacattcttctgcagctaagtaccttgttttcctcagtccagggacatgggaatgcaatagatgaaatctccaagtccttaataagtttgaataccacattgcttgatttgcagctcaacatagaaaatctgaatggcaaaatccaagagaataccttcaaacaacaagaggaaatcagtaaattagaggagcgtgtttacaatgtatcagcagaaattatggctatgaaagaagaacaagtgcatttggaacaggaaataaaaggagaagtgaaagtactgaataacatcactaatgatctcagactgaaagattgggaacattctcagaccttgagaaatatcactttaattcaaggtcctcctggacccccgggtgaaaaaggagatcgaggtcccactggagaaagtggtccacgaggatttccaggtccaataggtcctccgggtcttaaaggtgatcggggagcaattggctttcctggaagtcgaggactcccaggatatgccggaaggccaggaaattctggaccaaaaggccagaaaggggaaaaggggagtggaaacacattaactccatttacgaaagttcgactggtcggtgggagcggccctcacgaggggagggtggagatactccacagcggccagtggggtacaatttgtgacgatcgctgggaagtgcgcgttggacaggtcgtctgtaggagcttgggatacccaggtgttcaagccgtgcacaaggcagctcactttggacaaggtactggtccaatatggctgaatgaagtgttttgttttgggagagaatcatctattgaagaatgtaaaattcggcaatgggggacaagagcctgttcacattctgaagatgctggagtcacttgcactttataatgcatcatattttcattcacaactatgaaatcgctgctc

SEQ ID NO: 16756 - DNA, 353 bp, Homo sapiens
  source 1..353: mol_type = unassigned DNA
ctcagggttatagaacagccgccttcagctattctcccccagggctctgcagaaccttcccacctttcagcaggctggagtgcagtggcatgatcgtgactcactgcagccttccactcctgggctcaagcaatcctactgcctcaggctcccagaagtatggagcagtgggatcactttcacaatcaacaggaggacactgatagctgctccgaatctgtgaaatttgatgctcgctcaatgacagctttgcttcctccgaatcctaaaaacagcccttcccttcaagagaaactgaagtccttcaaagctgcactgattgccctttacctcctcgtgtttgcagttctcat

SEQ ID NO: 16757 - DNA, 955 bp, Homo sapiens
  source 1..955: mol_type = unassigned DNA
aattgtaaagagagagaagtggataaatcagtgctgctttctttaggacgaaagaagtatggagcagtgggatcactttcacaatcaacaggaggacactgatagctgctccgaatctgtgaaatttgatgctcgctcaatgacagctttgcttcctccgagaaatcagtaaattagaggagcgtgtttacaatgtatcagcagaaattatggctatgaaagaagaacaagtgcatttggaacaggaaataaaaggagaagtgaaagtactgaataacatcactaatgatctcagactgaaagattgggaacattctcagaccttgagaaatatcactttaattcaaggtcctcctggacccccgggtgaaaaaggagatcgaggtcccactggagaaagtggtccacgaggatttccaggtccaataggtcctccgggtcttaaaggtgatcggggagcaattggctttcctggaagtcgaggactcccaggatatgccggaaggccaggaaattctggaccaaaaggccagaaaggggaaaaggggagtggaaacacattaagaccagtacaactcactgatcatattagggcagggccctcttaagatcaggtgggttgggcgggacatcctctgctaccatctcattaaaaggcccttcacctctggacaagtcatctgcacaactgacttccaagatccttttgtgactcctccaaatgactttggttcccgtgttgtacctgacttccacatggccttctctcctggtccctggtgctgtttgggcctctgctcccatgctcatacctcttcttactccaattactccaccatcacctctctcccctatcacccccagcctggacacctctcatgcacggactggagggctgctccaaccagtcctcagttctctgccacccattgacctagagtcttgaacccaattt

SEQ ID NO: 16758 - DNA, 4536 bp, Homo sapiens
  source 1..4536: mol_type = unassigned DNA
ggatcctctagggtcccagctcgcctcgatggagctcctcccgccgctgcctcagtccttcctgttgctgctgctgttgcctgccaagcccgcggcgggcgaggactggcagtgcccgcgcaccccctacgcggcctctcgcgactttgacgtgaagtacgtggtgcccagcttctccgccggaggcctggtacaggccatggtgacctacgagggcgacagaaatgagagtgctgtgtttgtagccatacgcaatcgcctgcatgtgcttgggcctgacctgaagtctgtccagagcctggccacgggccctgctggagaccctggctgccagacgtgtgcagcctgtggcccaggaccccacggccctcccggtgacacagacacaaaggtgctggtgctggatcccgcgctgcctgcgctggtcagttgtggctccagcctgcagggccgctgcttcctgcatgacctagagccccaagggacagccgtgcatctggcagcgccagcctgcctcttctcagcccaccataaccggcccgatgactgccccgactgtgtggccagcccattgggcacccgtgtaactgtggttgagcaaggccaggcctcctatttctacgtggcatcctcactggacgcagccgtggctgccagcttcagcccacgctcagtgtctatcaggcgtctcaaggctgacgcctcgggattcgcaccgggctttgtggcgttgtcagtgctgcccaagcatcttgtctcctacagtattgaatacgtgcacagcttccacacgggagccttcgtatacttcctgactgtacagccggccagcgtgacagatgatcctagtgccctgcacacacgcctggcacggcttagcgccactgagccagagttgggtgactatcgggagctggtcctcgactgcagatttgctccaaaacgcaggcgccggggggccccagaaggcggacagccctaccctgtgctgcgggtggcccactccgctccagtgggtgcccaacttgccactgagctgagcatcgccgagggccaggaagtactatttggggtctttgtgactggcaaggatggtggtcctggcgtgggccccaactctgtcgtctgtgccttccccattgacctgctggacacactaattgatgagggtgtggagcgctgttgtgaatccccagtccatccaggcctccggcgaggcctcgacttcttccagtcgcccagtttttgccccaacccgcctggcctggaagccctcagccccaacaccagctgccgccacttccctctgctggtcagtagcagcttctcacgtgtggacctattcaatgggctgttgggaccagtacaggtcactgcattgtatgtgacacgccttgacaacgtcacagtggcacacatgggcacaatggatgggcgtatcctgcaggtggagctggtcaggtcactaaactacttgctgtatgtgtccaacttctcactgggtgacagtgggcagcccgtgcagcgggatgtcagtcgtcttggggaccacctactctttgcctctggggaccaggttttccaggtacctatccaaggccctggctgccgccacttcctgacctgtgggcgttgcctaagggcatggcatttcatgggctgtggctggtgtgggaacatgtgcggccagcagaaggagtgtcctggctcctggcaacaggaccactgcccacctaagcttactgagttccacccccacagtggacctctaaggggcagtacaaggctgaccctgtgtggctccaacttctaccttcacccttctggtctggtgcctgagggaacccatcaggtcactgtgggccaaagtccctgccggccactgcccaaggacagctcaaaactcagaccagtgccccggaaagactttgtagaggagtttgagtgtgaactggagcccttgggcacccaggcagtggggcctaccaacgtcagcctcaccgtgactaacatgccaccgggcaagcacttccgggtagacggcacctccgtgctgagaggcttctctttcatggagccagtgctgatagcagtgcaacccctctttggcccacgggcaggaggcacctgtctcactcttgaaggccagagtctgtctgtaggcaccagccgggctgtgctggtcaatgggactgagtgtctgctagcacgggtcagtgaggggcagcttttatgtgccacaccccctggggccacggtggccagtgtcccccttagcctgcaggtggggggtgcccaggtacctggttcctggaccttccagtacagagaagaccctgtcgtgctaagcatcagccccaactgtggctacatcaactcccacatcaccatctgtggccagcatctaacttcagcatggcacttagtgctgtcattccatgacgggcttagggcagtggaaagcaggtgtgagaggcagcttccagagcagcagctgtgccgccttcctgaatatgtggtccgagacccccagggatgggtggcagggaatctgagtgcccgaggggatggagctgctggctttacactgcctggctttcgcttcctacccccaccccatccacccagtgccaacctagttccactgaagcctgaggagcatgccattaagtttgagtatattgggctgggcgctgtggctgactgtgtgggtatcaacgtgaccgtgggtggtgagagctgccagcacgagttccggggggacatggttgtctgccccctgcccccatccctgcagcttggccaggatggtgccccattgcaggtctgcgtagatggtgaatgtcatatcctgggtagagtggtgcggccagggccagatggggtcccacagagcacgctccttggtatcctgctgcctttgctgctgcttgtggctgcactggcgactgcactggtcttcagctactggtggcggaggaagcagctagttcttcctcccaacctgaatgacctggcatccctggaccagactgctggagccacacccctgcctattctgtactcgggctctgactacagaagtggccttgcactccctgccattgatggtctggattccaccacttgtgtccatggagcatccttctccgatagtgaagatgaatcctgtgtgccactgctgcggaaagagtccatccagctaagggacctggactctgcgctcttggctgaggtcaaggatgtgctgattccccatgagcgggtggtcacccacagtgaccgagtcattggcaaaggccactttggagttgtctaccacggagaatacatagaccaggcccagaatcgaatccaatgtgccatcaagtcactaagtcgcatcacagagatgcagcaggtggaggccttcctgcgagaggggctgctcatgcgtggcctgaaccacccgaatgtgctggctctcattggtatcatgttgccacctgagggcctgccccatgtgctgctgccctatatgtgccacggtgacctgctccagttcatccgctcacctcagcggaaccccaccgtgaaggacctcatcagctttggcctgcaggtagcccgcagcatggagtacctggcagagcagaagtttgtgcacagggacctggctgcgcggaactgcatgctggacgagtcattcacagtcaaggtggctgactttggtttggcccgcgacatcctggacagggagtactatagtgttcaacagcatcgccacgctcgcctacctgtgaagtggatggcgctggagagcctgcagacctatagatttaccaccaagtctgatgtgtggtcatttggtgtgctgctgtgggaactgctgacacggggtgccccaccataccgccacattgacccttttgaccttacccacttcctggcccagggtcggcgcctgccccagcctgagtattgccctgattctctgtaccaagtgatgcagcaatgctgggaggcagacccagcagtgcgacccaccttcagagtactagtgggggaggtggagcagatagtgtctgcactgcttggggaccattatgtgcagctgccagcaacctacatgaacttgggccccagcacctcgcatgagatgaatgtgcgtccagaacagccgcagttctcacccatgccagggaatgtacgccggccccggccactctcagagcctcctcggcccacttgacttagttcttgggctggacctgcttagctgccttgagctaaccccaagctgcctctgggccatgccaggccagagggcagtggccctccaccttgttcctgccctttaactttcagaggcaataggtaaatggggcccattaggtccctcactccacagagtgagccagtgagggcagtcctgcaacatgtatttatggagtgcctgctgtggaccctgtcttctgggcacagtggactcagcagtgaccacaccaacactgacccttgaaccaataaaggaacaaatgactattaaagcacaaa

SEQ ID NO: 16759 - DNA, 4198 bp, Homo sapiens
  source 1..4198: mol_type = unassigned DNA
atggagctcctcccgccgctgcctcagtccttcctgttgctgctgctgttgcctgccaagcccgcggcgggcgaggactggcagtgcccgcgcaccccctacgcggcctctcgcgactttgacgtgaagtacgtggtgcccagcttctccgccggaggcctggtacaggccatggtgacctacgagggcgacagaaatgagagtgctgtgtttgtagccatacgcaatcgcctgcatgtgcttgggcctgacctgaagtctgtccagagcctggccacgggccctgctggagaccctggctgccagacgtgtgcagcctgtggcccaggaccccacggccctcccggtgacacagacacaaaggtgctggtgctggatcccgcgctgcctgcgctggtcagttgtggctccagcctgcagggccgctgcttcctgcatgacctagagccccaagggacagccgtgcatctggcagcgccagcctgcctcttctcagcccaccataaccggcccgatgactgccccgactgtgtggccagcccattgggcacccgtgtaactgtggttgagcaaggccaggcctcctatttctacgtggcatcctcactggacgcagccgtggctgccagcttcagcccacgctcagtgtctatcaggcgtctcaaggctgacgcctcgggattcgcaccgggctttgtggcgttgtcagtgctgcccaagcatcttgtctcctacagtattgaatacgtgcacagcttccacacgggagccttcgtatacttcctgactgtacagccggccagcgtgacagatgatcctagtgccctgcacacacgcctggcacggcttagcgccactgagccagagttgggtgactatcgggagctggtcctcgactgcagatttgctccaaaacgcaggcgccggggggccccagaaggcggacagccctaccctgtgctgcgggtggcccactccgctccagtgggtgcccaacttgccactgagctgagcatcgccgagggccaggaagtactatttggggtctttgtgactggcaaggatggtggtcctggcgtgggccccaactctgtcgtctgtgccttccccattgacctgctggacacactaattgatgagggtgtggagcgctgttgtgaatccccagtccatccaggcctccggcgaggcctcgacttcttccagtcgcccagtttttgccccaacccgcctggcctggaagccctcagccccaacaccagctgccgccacttccctctgctggtcagtagcagcttctcacgtgtggacctattcaatgggctgttgggaccagtacaggtcactgcattgtatgtgacacgccttgacaacgtcacagtggcacacatgggcacaatggatgggcgtatcctgcaggtggagctggtcaggtcactaaactacttgctgtatgtgtccaacttctcactgggtgacagtgggcagcccgtgcagcgggatgtcagtcgtcttggggaccacctactctttgcctctggggaccaggttttccaggtacctatccaaggccctggctgccgccacttcctgacctgtgggcgttgcctaagggcatggcatttcatgggctgtggctggtgtgggaacatgtgcggccagcagaaggagtgtcctggctcctggcaacaggaccactgcccacctaagcttactgagttccacccccacagtggacctctaaggggcagtacaaggctgaccctgtgtggctccaacttctaccttcacccttctggtctggtgcctgagggaacccatcaggtcactgtgggccaaagtccctgccggccactgcccaaggacagctcaaaactcagaccagtgccccggaaagactttgtagaggagtttgagtgtgaactggagcccttgggcacccaggcagtggggcctaccaacgtcagcctcaccgtgactaacatgccaccgggcaagcacttccgggtagacggcacctccgtgctgagaggcttctctttcatggagccagtgctgatagcagtgcaacccctctttggcccacgggcaggaggcacctgtctcactcttgaaggccagagtctgtctgtaggcaccagccgggctgtgctggtcaatgggactgagtgtctgctagcacgggtcagtgaggggcagcttttatgtgccacaccccctggggccacggtggccagtgtcccccttagcctgcaggtggggggtgcccaggtacctggttcctggaccttccagtacagagaagaccctgtcgtgctaagcatcagccccaactgtggctacatcaactcccacatcaccatctgtggccagcatctaacttcagcatggcacttagtgctgtcattccatgacgggcttagggcagtggaaagcaggtgtgagaggcagcttccagagcagcagctgtgccgccttcctgaatatgtggtccgagacccccagggatgggtggcagggaatctgagtgcccgaggggatggagctgctggctttacactgcctggctttcgcttcctacccccaccccatccacccagtgccaacctagttccactgaagcctgaggagcatgccattaagtttgaggtctgcgtagatggtgaatgtcatatcctgggtagagtggtgcggccagggccagatggggtcccacagagcacgctccttggtatcctgctgcctttgctgctgcttgtggctgcactggcgactgcactggtcttcagctactggtggcggaggaagcagctagttcttcctcccaacctgaatgacctggcatccctggaccagactgctggagccacacccctgcctattctgtactcgggctctgactacagaagtggccttgcactccctgccattgatggtctggattccaccacttgtgtccatggagcatccttctccgatagtgaagatgaatcctgtgtgccactgctgcggaaagagtccatccagctaagggacctggactctgcgctcttggctgaggtcaaggatgtgctgattccccatgagcgggtggtcacccacagtgaccgagtcattggcaaaggccactttggagttgtctaccacggagaatacatagaccaggcccagaatcgaatccaatgtgccatcaagtcactaagtcgcatcacagagatgcagcaggtggaggccttcctgcgagaggggctgctcatgcgtggcctgaaccacccgaatgtgctggctctcattggtatcatgttgccacctgagggcctgccccatgtgctgctgccctatatgtgccacggtgacctgctccagttcatccgctcacctcagcggaaccccaccgtgaaggacctcatcagctttggcctgcaggtagcccgcagcatggagtacctggcagagcagaagtttgtgcacagggacctggctgcgcggaactgcatgctggacgagtcattcacagtcaaggtggctgactttggtttggcccgcgacatcctggacagggagtactatagtgttcaacagcatcgccacgctcgcctacctgtgaagtggatggcgctggagagcctgcagacctatagatttaccaccaagtctgatgtgtggtcatttggtgtgctgctgtgggaactgctgacacggggtgccccaccataccgccacattgacccttttgaccttacccacttcctggcccagggtcggcgcctgccccagcctgagtattgccctgattctctgtaccaagtgatgcagcaatgctgggaggcagacccagcagtgcgacccaccttcagagtactagtgggggaggtggagcagatagtgtctgcactgcttggggaccattatgtgcagctgccagcaacctacatgaacttgggccccagcacctcgcatgagatgaatgtgcgtccagaacagccgcagttctcacccatgccagggaatgtacgccggccccggccactctcagagcctcctcggcccacttgacttagttcttgggctggacctgcttagctgccttgagctaaccccaagctgcctctgggccatgccaggccagagggcagtggccctccaccttgttcctgccctttaactttcagaggcaataggtaaatggggcccatta

SEQ ID NO: 16760 - DNA, 2500 bp, Homo sapiens
  source 1..2500: mol_type = unassigned DNA
gtcgcgataaatgggcgccggcggagcggagggagatccgagcggcggcggcaagctggctgcgagcggctgaggaaagcaaccatggaagacctgggggaaaacaccatggttttatccaccctgagatctttgaacaacttcatctctcagcgtgtggagggaggctctggactggatatttctacctcggccccaggttctctgcagatgcagtaccagcagagcatgcagctggaggaaagagcagagcagatccgttcgaagtcccacctcatccaggtggagcgggagaaaatgcagatggagctgagtcacaagagggctcgagtggagctggagagagcagccagcaccagtgccaggaactacgagcgtgaggtcgaccgcaaccaggagctcctgacgcgcatccggcagcttcaggagcgggaggccggggcggaggagaagatgcaggagcagctggagcgcaacaggcagtgtcagcagaacttggatgctgccagcaagaggctgcgtgagaaagaggacagtctggcccaggctggcgagaccatcaacgcactgaaggggaggatctcggaactgcagtggagcgtgatggaccaggagatgcgggtgaagcgcctggagtcggagaagcaggagctgcaggagcagctggacctgcaacacaaaaaatgccaggaagccaatcagaaaatccaggaactccaggccagccaagaagcaagagcagaccacgagcagcagattaaggatctggagcagaagctgtccctgcaagagcaggatgcagcgattgtgaagaacatgaagtctgagctggtacggctccctaggctggaacgggagctgaagcagctgcgggaggagagcgcgcacctgcgggagatgagagagaccaacgggctgctccaggaagagctggaagggctgcagaggaagctggggcgccaggagaagatgcaggagacgctggttggcttggagctggagaacgagaggctgctggccaagctgcaaagctgggagagactggaccagaccatgggcctgagcatcaggactccagaagacctttccagattcgtggttgagctgcagcagagggagcttgccttgaaggacaagaacagcgccgtcaccagcagcgcccgggggctggagaaggccaggcagcagctgcaggaggagctccggcaggtcagcggccagctgttggaggagaggaagaagcgcgagacccacgaggcgctggcccggaggctccagaaacgggtcctgctgctcaccaaggagcgggacggtatgcgggccatcctggggtcctacgacagcgagctgaccccggccgagtactcaccccagctgacgcggcgcatgcgggaggctgaggatatggtgcagaaggtgcacagccacagcgccgagatggaggctcagctgtcgcaggccctggaggagctgggaggccagaaacaaagagcagacatgctggagatggagctgaagatgctgaagtctcagtccagctctgccgaacagagcttcctgttctccagggaggaggcggacacgctcaggttgaaggtcgaggagctggaaggcgagcggagtcggctggaggaggaaaagaggatgctggaggcacagctggagcggcgagctctgcagggtgactatgaccagagcaggaccaaagtgctgcacatgagcctgaaccccaccagtgtggccaggcagcgcctgcgcgaggaccacagccagctgcaggcggagtgcgagcgactgcgcgggctcctgcgcgccatggagagaggaggcaccgtcccagccgaccttgaggctgccgccgcgagtctgccatcgtccaaggaggtggcagagctgaagaagcaggtggagagtgccgagctgaagaaccagcggctcaaggaggttttccagaccaagatccaggagttccgcaaggcctgctacacgctcaccggctaccagatcgacatcaccacggagaaccagtaccggctgacctcgctgtacgccgagcacccaggcgactgcctcatcttcaaggccaccagcccctcgggttccaagatgcagctactggagacagagttctcacacaccgtgggcgagctcatcgaggtgcacctgcggcgccaggacagcatccctgccttcctcagctcgctcaccctcgagctcttcagccgccagaccgtggcgtagcctgcaggctcgggggcatagccggagccactctgcttggcctgacctgcaggtcccctgccccgccagccacaggctgggtgcacgtcctgcctctccagccccacagggcagcagcatgactgacagacacgctgggacctacgtcgggcttcctgctggggcggccagcaccctctccacgtgcagaccccatgcgtcccggagcctggtgtgtgggcgtcggccaccagcctgggttcctcaccttgtgaaataa

SEQ ID NO: 16761 - DNA, 2762 bp, Homo sapiens
  source 1..2762: mol_type = unassigned DNA
gcaggtctcgcgagagcgcaggcgcaagtgtcgcgataaatgggcgccggcggagcggagggagatccgagcggcggcggcaagctggctgcgagcggctgaggagctgggatacactcttcctctcctctcctcaacagcagcactccaagctcgccggcctttggtctccaggacttgtcccagcagcccctcgaactgagaattacaccatcggacccctggctctgaggccttcagacttggactgtgtcacactgccaggcttccagggctccaacttgcagacggcctgttgtgggacagtctctgtaatcgcgaaagcaaccatggaagacctgggggaaaacaccatggttttatccaccctgagatctttgaacaacttcatctctcagcgtgtggagggaggctctggactggatatttctacctcggccccaggttctctgcagatgcagtaccagcagagcatgcagctggaggaaagagcagagcagatccgttcgaagtcccacctcatccaggtggagcgggagaaaatgcagatggagctgagtcacaagagggctcgagtggagctggagagagcagccagcaccagtgccaggaactacgagcgtgaggtcgaccgcaaccaggagctcctgacgcgcatccggcagcttcaggagcgggaggccggggcggaggagaagatgcaggagcagctggagcgcaacaggcagtgtcagcagaacttggatgctgccagcaagaggctgcgtgagaaagaggacagtctggcccaggctggcgagaccatcaacgcactgaaggggaggatctcggaactgcagtggagcgtgatggaccaggagatgcgggtgaagcgcctggagtcggagaagcaggagctgcaggagcagctggacctgcaacacaaaaaatgccaggaagccaatcagaaaatccaggaactccaggccagccaagaagcaagagcagaccacgagcagcagattaaggatctggagcagaagctgtccctgcaagagcaggatgcagcgattgtgaagaacatgaagtctgagctggtacggctccctaggctggaacgggagctgaagcagctgcgggaggagagcgcgcacctgcgggagatgagagagaccaacgggctgctccaggaagagctggaagggctgcagaggaagctggggcgccaggagaagatgcaggagacgctggttggcttggagctggagaacgagaggctgctggccaagctgcaaagctgggagagactggaccagaccatgggcctgagcatcaggactccagaagacctttccagattcgtggttgagctgcagcagagggagcttgccttgaaggacaagaacagcgccgtcaccagcagcgcccgggggctggagaaggccaggcagcagctgcaggaggagctccggcaggtcagcggccagctgttggaggagaggaagaagcgcgagacccacgaggcgctggcccggaggctccagaaacgggtcctgctgctcaccaaggagcgggacggtatgcgggccatcctggggtcctacgacagcgagctgaccccggccgagtactcaccccagctgacgcggcgcatgcgggaggctgaggatatggtgcagaaggtgcacagccacagcgccgagatggaggctcagctgtcgcaggccctggaggagctgggaggccagaaacaaagagcagacatgctggagatggagctgaagatgctgaagtctcagtccagctctgccgaacagagcttcctgttctccagggaggaggcggacacgctcaggttgaaggtcgaggagctggaaggcgagcggagtcggctggaggaggaaaagaggatgctggaggcacagctggagcggcgagctctgcagggtgactatgaccagagcaggaccaaagtgctgcacatgagcctgaaccccaccagtgtggccaggcagcgcctgcgcgaggaccacagccagctgcaggcggagtgcgagcgactgcgcgggctcctgcgcgccatggagagaggaggcaccgtcccagccgaccttgaggctgccgccgcgagtctgccatcgtccaaggaggtggcagagctgaagaagcaggtggagagtgccgagctgaagaaccagcggctcaaggaggttttccagaccaagatccaggagttccgcaaggcctgctacacgctcaccggctaccagatcgacatcaccacggagaaccagtaccggctgacctcgctgtacgccgagcacccaggcgactgcctcatcttcaaggccaccagcccctcgggttccaagatgcagctactggagacagagttctcacacaccgtgggcgagctcatcgaggtgcacctgcggcgccaggacagcatccctgccttcctcagctcgctcaccctcgagctcttcagccgccagaccgtggcgtagcctgcaggctcgggggcatagccggagccactctgcttggcctgacctgcaggtcccctgccccgccagccacaggctgggtgcacgtcctgcctctccagccccacagggcagcagcatgactgacagacacgctgggacctacgtcgggcttcctgctggggcggccagcaccctctccacgtgcagaccccatgcgtcccggagcctggtgtgtgggcgtcggccaccagcctgggttcctcaccttgtgaaataaaatcttctcccctagac

SEQ ID NO: 16762 - DNA, 2355 bp, Homo sapiens
  source 1..2355: mol_type = unassigned DNA
gtcgcgataaatgggcgccggcggagcggagggagatccgagcggcggcggcaagctggctgcgagcggctgagcgtgaggtcgaccgcaaccaggagctcctgacgcgcatccggcagcttcaggagcgggaggccggggcggaggagaagatgcaggagcagctggagcgcaacaggcagtgtcagcagaacttggatgctgccagcaagaggctgcgtgagaaagaggacagtctggcccaggctggcgagggtcctgattgtcacgctccttactctggaattatcttatgcgcctcttccttgccaactgtccggcgtcccctacaacacgggtgaccctgtgggcaggtgggctcggccctgcatctggccttgcccctggcacacgaccatcaacgcactgaaggggaggatctcggaactgcagtggagcgtgatggaccaggagatgcgggtgaagcgcctggagtcggagaagcaggagctgcaggagcagctggacctgcaacacaaaaaatgccaggaagccaatcagaaaatccaggaactccaggccagccaagaagcaagagcagaccacgagcagcagattaaggatctggagcagaagctgtccctgcaagagcaggatgcagcgattgtgaagaacatgaagtctgagctggtacggctccctaggctggaacgggagctgaagcagctgcgggaggagagcgcgcacctgcgggagatgagagagaccaacgggctgctccaggaagagctggaagggctgcagaggaagctggggcgccaggagaagatgcaggagacgctggttggcttggagctggagaacgagaggctgctggccaagctgcaaagctgggagagactggaccagaccatgggcctgagcatcaggactccagaagacctttccagattcgtggttgagctgcagcagagggagcttgccttgaaggacaagaacagcgccgtcaccagcagcgcccgggggctggagaaggccaggcagcagctgcaggaggagctccggcaggtcagcggccagctgttggaggagaggaagaagcgcgagacccacgaggcgctggcccggaggctccagaaacgggtcctgctgctcaccaaggagcgggacggtatgcgggccatcctggggtcctacgacagcgagctgaccccggccgagtactcaccccagctgacgcggcgcatgcgggaggctgaggatatggtgcagaaggtgcacagccacagcgccgagatggaggctcagctgtcgcaggccctggaggagctgggaggccagaaacaaagagcagacatgctggagatggagctgaagatgctgaagtctcagtccagctctgccgaacagagcttcctgttctccagggaggaggcggacacgctcaggttgaaggtcgaggagctggaaggcgagcggagtcggctggaggaggaaaagaggatgctggaggcacagctggagcggcgagctctgcagggtgactatgaccagagcaggaccaaagtgctgcacatgagcctgaaccccaccagtgtggccaggcagcgcctgcgcgaggaccacagccagctgcaggcggagtgcgagcgactgcgcgggctcctgcgcgccatggagagaggaggcaccgtcccagccgaccttgaggctgccgccgcgagtctgccatcgtccaaggaggtggcagagctgaagaagcaggtggagagtgccgagctgaagaaccagcggctcaaggaggttttccagaccaagatccaggagttccgcaaggcctgctacacgctcaccggctaccagatcgacatcaccacggagaaccagtaccggctgacctcgctgtacgccgagcacccaggcgactgcctcatcttcaaggccaccagcccctcgggttccaagatgcagctactggagacagagttctcacacaccgtgggcgagctcatcgaggtgcacctgcggcgccaggacagcatccctgccttcctcagctcgctcaccctcgagctcttcagccgccagaccgtggcgtagcctgcaggctcgggggcatagccggagccactctgcttggcctgacctgcaggtcccctgccccgccagccacaggctgggtgcacgtcctgcctctccagccccacagggcagcagcatgactgacagacacgctgggacctacgtcgggcttcctgctggggcggccagcaccctctccacgtgcagaccccatgcgtcccggagcctggtgtgtgggcgtcggccaccagcctgggttcctcaccttgtgaaataaaatcttctcccctagac

SEQ ID NO: 16763 - DNA, 2991 bp, Homo sapiens
  source 1..2991: mol_type = unassigned DNA
gcaaaattttgggaagagtcaacggtgcaagtttgtccgaggaggctgccgtgggcgcggctattccacacattacggcgcgaggcgaaagccttagtggaagcgcgtcctgcgcaaagccggggggcccccgactgcgccttggctcagccttcggttccgagtcctttccgtgcggagtctcccaggggtggcggctccgggtgcggacgcggagtccccaggatcagccggtgcgcagactcggttctttacggcccgattgccacgcaggtctcgcgagagcgcaggcgcaagtgtcgcgataaatgggcgccggcggagcggagggagatccgagcggcggcggcaagctggctgcgagcggctgagcactccaagctcgccggcctttggtctccaggacttgtcccagcagcccctcgaactgagaattacaccatcggacccctggctctgaggccttcagacttggactgtgtcacactgccaggcttccagggctccaacttgcagacggcctgttgtgggacagtctctgtaatcgcgaaagcaaccatggaagacctgggggaaaacaccatggttttatccaccctgagatctttgaacaacttcatctctcagcgtgtggagggaggctctggactggatatttctacctcggccccaggttctctgcagatgcagtaccagcagagcatgcagctggaggaaagagcagagcagatccgttcgaagtcccacctcatccaggtggagcgggagaaaatgcagatggagctgagtcacaagagggctcgagtggagctggagagagcagccagcaccagtgccaggaactacgagcgtgaggtcgaccgcaaccaggagctcctgacgcgcatccggcagcttcaggagcgggaggccggggcggaggagaagatgcaggagcagctggagcgcaacaggcagtgtcagcagaacttggatgctgccagcaagaggctgcgtgagaaagaggacagtctggcccaggctggcgagaccatcaacgcactgaaggggaggatctcggaactgcagtggagcgtgatggaccaggagatgcgggtgaagcgcctggagtcggagaagcaggagctgcaggagcagctggacctgcaacacaaaaaatgccaggaagccaatcagaaaatccaggaactccaggccagccaagaagcaagagcagaccacgagcagcagattaaggatctggagcagaagctgtccctgcaagagcaggatgcagcgattgtgaagaacatgaagtctgagctggtacggctccctaggctggaacgggagctgaagcagctgcgggaggagagcgcgcacctgcgggagatgagagagaccaacgggctgctccaggaagagctggaagggctgcagaggaagctggggcgccaggagaagatgcaggagacgctggttggcttggagctggagaacgagaggctgctggccaagctgcaaagctgggagagactggaccagaccatgggcctgagcatcaggactccagaagacctttccagattcgtggttgagctgcagcagagggagcttgccttgaaggacaagaacagcgccgtcaccagcagcgcccgggggctggagaaggccaggcagcagctgcaggaggagctccggcaggtcagcggccagctgttggaggagaggaagaagcgcgagacccacgaggcgctggcccggaggctccagaaacgggtcctgctgctcaccaaggagcgggacggtatgcgggccatcctggggtcctacgacagcgagctgaccccggccgagtactcaccccagctgacgcggcgcatgcgggaggctgaggatatggtgcagaaggtgcacagccacagcgccgagatggaggctcagctgtcgcaggccctggaggagctgggaggccagaaacaaagagcagacatgctggagatggagctgaagatgctgaagtctcagtccagctctgccgaacagagcttcctgttctccagggaggaggcggacacgctcaggttgaaggtcgaggagctggaaggcgagcggagtcggctggaggaggaaaagaggatgctggaggcacagctggagcggcgagctctgcagggtgactatgaccagagcaggaccaaagtgctgcacatgagcctgaaccccaccagtgtggccaggcagcgcctgcgcgaggaccacagccagctgcaggcggagtgcgagcgactgcgcgggctcctgcgcgccatggagagaggaggcaccgtcccagccgaccttgaggctgccgccgcgagtctgccatcgtccaaggaggtggcagagctgaagaagcaggtggagagtgccgagctgaagaaccagcggctcaaggaggttttccagaccaagatccaggagttccgcaaggcctgctacacgctcaccggctaccagatcgacatcaccacggagaaccagtaccggctgacctcgctgtacgccgagcacccaggcgactgcctcatcttcaaggccaccagcccctcgggttccaagatgcagctactggagacagagttctcacacaccgtgggcgagctcatcgaggtgcacctgcggcgccaggacagcatccctgccttcctcagctcgctcaccctcgagctcttcagccgccagaccgtggcgtagcctgcaggctcgggggcatagccggagccactctgcttggcctgacctgcaggtcccctgccccgccagccacaggctgggtgcacgtcctgcctctccagccccacagggcagcagcatgactgacagacacgctgggacctacgtcgggcttcctgctggggcggccagcaccctctccacgtgcagaccccatgcgtcccggagcctggtgtgtgggcgtcggccaccagcctgggttcctcaccttgtgaaataaaatcttctcccctagac

SEQ ID NO: 16764 - DNA, 555 bp, Homo sapiens
  source 1..555: mol_type = unassigned DNA
gtcgcgataaatgggcgccggcggagcggagggagatccgagcggcggcggcaagctggctgcgagcggctgaggaaagcaaccatggaagacctgggggaaaacaccatggttttatccaccctgagatctttgaacaacttcatctctcagcgtgtggagggaggctctggactggatatttctacctcggccccaggttctctgcagatgcagtaccagcagagcatgcagctggaggaaagagcagagcagatccgttcgaagtcccacctcatccaggtggagcgggagaaaatgcagatggagctgagtcacaagagggctcgagtggagctggagagagcagccagcaccagtgccaggaactacgagcgtgaggtcgaccgcaaccaggagctcctgacgcgcatccggcagcttcaggagcgggaggccggggcggaggagaagatgcaggagcagctggagcgcaacaggcagtgtcagcagaacttggatgctgccagcaagaggctgcgtgagaaagaggacagtctggcccaggctggcgag

SEQ ID NO: 16765 - DNA, 1086 bp, Homo sapiens
  source 1..1086: mol_type = unassigned DNA
atgagagaacttgagtttgcaaagttagagtgctgtctggcctggcagcttcaggcttccaggagagagctggagatggagctgaagatgctgaagtctcagtccagctctgccgaacagagcttcctgttctccagggaggaggcggacacgctcaggttgaaggtcgaggagctggaaggcgagcggagtcggctggaggaggaaaagaggatgctggaggcacagctggagcggcgagctctgcagggtgactatgaccagagcaggaccaaagtgctgcacatgagcctgaaccccaccagtgtggccaggcagcgcctgcgcgaggaccacagccagctgcaggcggagtgcgagcgactgcgcgggctcctgcgcgccatggagagaggaggcaccgtcccagccgaccttgaggctgccgccgcgagtctgccatcgtccaaggaggtggcagagctgaagaagcaggtggagagtgccgagctgaagaaccagcggctcaaggaggttttccagaccaagatccaggagttccgcaaggcctgctacacgctcaccggctaccagatcgacatcaccacggagaaccagtaccggctgacctcgctgtacgccgagcacccaggcgactgcctcatcttcaaggccaccagcccctcgggttccaagatgcagctactggagacagagttctcacacaccgtgggcgagctcatcgaggtgcacctgcggcgccaggacagcatccctgccttcctcagctcgctcaccctcgagctcttcagccgccagaccgtggcgtagcctgcaggctcgggggcatagccggagccactctgcttggcctgacctgcaggtcccctgccccgccagccacaggctgggtgcacgtcctgcctctccagccccacagggcagcagcatgactgacagacacgctgggacctacgtcgggcttcctgctggggcggccagcaccctctccacgtgcagaccccatgcgtcccggagcctggtgtgtgggcgtcggccaccagcctgggttcctcaccttgtgaaataaaatcttctcccctagac

SEQ ID NO: 16766 - DNA, 1654 bp, Homo sapiens
  source 1..1654: mol_type = unassigned DNA
ggaatcgtcatcttcttccctcggccccaactagtagaccacgaccagaagacacatcctaacctacacctaccgtagtgtcacacccggcacagcgcgaccaggtccaccaactgcgcctgcgcgaaccggccgctcccgcgacatcacaggaaggctgagagaaagggcaggtccccgctgcgtggggctgggcttaaaggctcgtcgcgcctgcgcaaaggacctgacgacgtgctgcgtcgttacttttgaaacgcttggcggggaagtgctgttggagccgctgtggttgctgtccgcggagtggaagcgcgtgcttttgtttgtgtccctggccatggcgctgcagctctcccgggagcagggaatcaccctgcgcgggagcgccgaaatcgtggccgagttcttctcattcggcatcaacagcattttatatcagcgtggcatatatccatctgaaacctttactcgagtgcagaaatacggactcaccttgcttgtaactactgatcttgagctcataaaatacctaaataatgtggtggaacaactgaaagattggttatacaagtgttcagttcagaaactggttgtagttatctcaaatattgaaagtggtgaggtcctggaaagatggcagtttgatattgagtgtgacaagactgcaaaagatgacagtgcacccagagaaaagtctcagaaagctatccaggatgaaatccgttcagtgatcagacagatcacagctacggtgacatttctgccactgttggaagtttcttgttcatttgatctgctgatttatacagacaaagatttggttgtacctgaaaaatgggaagagtcgggaccacagtttattaccaattctgaggaagtccgccttcgttcatttactactacaatccacaaagtaaatagcatggtggcctacaaaattcctgtcaatgactgaggatgacatgaggaaaataatgtaattgtaattttgaaatgtggttttcctgaaatcaagtcatctatagttgatatgttttatttcattggttaatttttacatggagaaaaccaaaatgatacttactgaactgtgtgtaattgttccttttatttttttggtacctatttgacttaccatggagttaacatcatgaatttattgcacattgttcaaaaggaaccaggaggtttttttgtcaacattgtgatgtatattcctttgaagatagtaactgtagatggaaaaacttgtgctataaagctagatgctttcctaaatcagatgttttggtcaagtagtttgactcagtataggtagggagatatttaagtataaaatacaacaaaggaagtctaaatattcagaatctttgttaaggtcctgaaagtaactcataatctataaacaatgaaatattgctgtatagctccttttgaccttcatttcatgtatagttttccctattgaatcagtttccaattatttgactttaatttatgtaacttgaacctatgaagcaatggatatttgtactgtttaatgttctgtgatacagaactcttaaaaatgttttttcatgtgttttataaaatcaagttttaagtgaaagtgaggaaataaagttaagtttgttttaaatttgtcttaaaa

SEQ ID NO: 16767 - DNA, 1626 bp, Homo sapiens
  source 1..1626: mol_type = unassigned DNA
gcaggcgcctacctctgttacttagggcgggagcccggcgagggcgccggtgctttgttctgtctgaggccaggaagtttgaccgcgctgccatgccgaaccgtaaggccagccggaatgcttactatttcttcgtgcaggagaagatccccgaactacggcgacgaggcctgcctgtggctcgcgttgctgatgccatcccttactgctcctcagactgggcgaaacctgttttcacaccactgaggaggccaggcatgcttgtaccaaagcagaatgtttcacctccagatatgtcagctttgtctttaaaaggtgatcaagctctccttggaggcattttttattttttgaacatttttagccatggcgagctacctcctcattgtgaacagcgcttcctcccttgtgaaattggctgtgttaagtattctctccaagaaggtattatggcagatttccacagttttataaatcctggtgaaattccacgaggatttcgatttcattgtcaggctgcaagtgattctagtcacaagattcctatttcaaattttgaacgtgggcataaccaagcaactgtgttacaaaacctttatagatttattcatcccaacccagggaactggccacctatctactgcaagtctgatgatagaaccagagtcaactggtgtttgaagcatatggcaaaggcatcagaaatcaggcaagatctacaacttctcactgtagaggaccttgtagtggggatctaccaacaaaaatttctcaaggagccctctaagacttggattcgaagcctcctagatgtggccatgtgggattattctagcaacacaaggtgcaagtggcatgaagaaaatgatattctcttctgtgctttagctgtttgcaagaagattgcgtactgcatcagtaattctctggccactctctttggaatccagctcacagaggctcatgtaccactacaagattatgaggccagcaatagtgtgacacccaaaatggttgtattggatgcagggcgttaccagaagctaagggttgggagttcaggattctctcatttcaactcttctaatgaggaacaaagatcaaacacacccattggtgactacccatctagggcaaaaatttctggccaaaacagcagcgttcggggaagaggaattacccgcttactagagagcatttccaattcttccagcaatatccacaaattctccaactgtgacacttcactctcaccttacatgtcccaaaaagatggatacaaatctttctcttccttatcttaatgatggtactcttttcaatttctgaaaacagtaacaggcccaacttccttcttactacagtcatattaaacagatcacatcaatgacaaatgtcactactataaaaactacttaatttgtaaggaaattgtttcatagatttaaaaaaattgtggttggagagcatcttggcatttgtgctttttttcttgagggattgttctgcttcctggctgtatgatgggtatatcattaaagtttggagtcctatatgaacaaaactgacatttttagagttgtacttttgggaatgttatagattgatcattctttctcctgataa

SEQ ID NO: 16768 - DNA, 1908 bp, Homo sapiens
  source 1..1908: mol_type = unassigned DNA
agagcacttggcacctgcgacggcgctctccccccacctcacccgcaaggcggcacgagccggaatcttccagtctcaggctgtttgttcccccgcggggcaatgcgactgcgcgtcgcttcctgattggccgagagttgcgggctgcgtgcgcaggcgcctacctctgttacttagggcgggagcccggcgagggcgccggtgctttgttctgtctgaggccaggaagtttgaccgcgctgccatgccgaaccgtaaggccagccggaatgcttactatttcttcgtgcaggagaagatccccgaactacggcgacgaggcctgcctgtggctcgcgttgctgatgccatcccttactgctcctcagactgggcgcttctgagggaggaagaaaaggagaaatacgcagaaatggctcgagaatggagggccgctcagggaaaggaccctgggccctcagagaagcagaaacctgttttcacaccactgaggaggccaggcatgcttgtaccaaagcagaatgtttcacctccagatatgtcagctttgtctttaaaaggtgatcaagctctccttggaggcattttttattttttgaacatttttagccatggcgagctacctcctcattgtgaacagcgcttcctcccttgtgaaattggctgtgttaagtattctctccaagaaggtattatggcagatttccacagttttataaatcctggtgaaattccacgaggatttcgatttcattgtcaggctgcaagtgattctagtcacaagattcctatttcaaattttgaacgtgggcataaccaagcaactgtgttacaaaacctttatagatttattcatcccaacccagggaactggccacctatctactgcaagtctgatgatagaaccagagtcaactggtgtttgaagcatatggcaaaggcatcagaaatcaggcaagatctacaacttctcactgtagaggaccttgtagtggggatctaccaacaaaaatttctcaaggagccctctaagacttggattcgaagcctcctagatgtggccatgtgggattattctagcaacacaaggtgcaagtggcatgaagaaaatgatattctcttctgtgctttagctgtttgcaagaagattgcgtactgcatcagtaattctctggccactctctttggaatccagctcacagaggctcatgtaccactacaagattatgaggccagcaatagtgtgacacccaaaatggttgtattggatgcagggcgttaccagaagctaagggttgggagttcaggattctctcatttcaactcttctaatgaggaacaaagatcaaacacacccattggtgactacccatctagggcaaaaatttctggccaaaacagcagcgttcggggaagaggaattacccgcttactagagagcatttccaattcttccagcaatatccacaaattctccaactgtgacacttcactctcaccttacatgtcccaaaaagatggatacaaatctttctcttccttatcttaatgatggtactcttttcaatttctgaaaacagtaacaggcccaacttccttcttactacagtcatattaaacagatcacatcaatgacaaatgtcactactataaaaactacttaatttgtaaggaaattgtttcatagatttaaaaaaattgtggttggagagcatcttggcatttgtgctttttttcttgagggattgttctgcttcctggctgtatgatgggtatatcattaaagtttggagtcctatatgaacaaaactgacatttttagagttgtacttttgggaatgttatagattgatcattctttctcctgataataaaggtattgaatatctgttatgaaaggttctaaaa

SEQ ID NO: 16769 - DNA, 1013 bp, Homo sapiens
  source 1..1013: mol_type = unassigned DNA
cgggagcccggcgagggcgccggtgctttgttctgtctgaggccaggaagtttgaccgcgctgccatgccgaaccgtaaggccagccggaatgcttactatttcttcgtgcaggagaagatccccgaactacggcgacgaggcctgcctgtggctcgcgttgctgatgccatcccttactgctcctcagactgggcgaaacctgttttcacaccactgaggaggccaggcatgcttgtaccaaagcagaatgtttcacctccagatatgtcagctttgtctttaaaaggtgatcaagctctccttggaggcattttttattttttgaacatttttagccatggcgagctacctcctcattgtgaacagcgcttcctcccttgtgaaattggctgtgttaagtattctctccaagaaggtattatggcagatttccacagttttataaatcctggtgaaattccacgaggatttcgatttcattgtcaggctgcaagtgattctagtcacaagattcctatttcaaattttgaacgtgggcataaccaagcaactgtgttacaaaacctttatagatttattcatcccaacccagggaactggccacctatctactgcaagtctgatgatagaaccagagtcaactggtgtttgaagcatatggcaaaggcatcagaaatcaggcaagatctacaacttctcactgtagaggaccttgtagtggggatctaccaacaaaaatttctcaaggagccctctaagacttggattcgaagcctcctagatgtggccatgtgggattattctagcaacacaaggtgcaagtggcatgaagaaaatgatattctcttctgtgctttagctgtttgcaagaagattgcgtactgcatcagtaattctctggccactctctttggaatccagctcacagaggctcatgtaccactacaagattatgaggccagcaatagtgtgacacccaaaatggttgtattggatgcagggcgttaccag

SEQ ID NO: 16770 - DNA, 793 bp, Homo sapiens
  source 1..793: mol_type = unassigned DNA
ctacttcagaggtgcaagtggcatgaagaaaatgatattctcttctgtgctttagctgtttgcaagaagattgcgtactgcatcagtaattctctggccactctctttggaatccagctcacagaggctcatgtaccactacaagattatgaggccagcaatagtgtgacacccaaaatggttgtattggatgcagggcgttaccagaagctaagggttgggagttcaggattctctcatttcaactcttctaatgaggaacaaagatcaaacacacccattggtgactacccatctagggcaaaaatttctggccaaaacagcagcgttcggggaagaggaattacccgcttactagagagcatttccaattcttccagcaatatccacaaattctccaactgtgacacttcactctcaccttacatgtcccaaaaagatggatacaaatctttctcttccttatcttaatgatggtactcttttcaatttctgaaaacagtaacaggcccaacttccttcttactacagtcatattaaacagatcacatcaatgacaaatgtcactactataaaaactacttaatttgtaaggaaattgtttcatagatttaaaaaaattgtggttggagagcatcttggcatttgtgctttttttcttgagggattgttctgcttcctggctgtatgatgggtatatcattaaagtttggagtcctatatgaacaaaactgacatttttagagttgtacttttgggaatgttatagattgatcattctttctcctgataa

SEQ ID NO: 16771 - DNA, 1156 bp, Homo sapiens
  source 1..1156: mol_type = unassigned DNA
attcatattcacccttcatgaggatgagcacagagcaagaagctagccacgctgggctcctcattgcctagctcaggaattcagggctgggaaaatttagccgagtcatcacatttggctactacccgggaaagcagccctcccgagtcaggaacgggctccggttcatcacgtggcagccgcctgcaggagccgcagttccatggaccaaagacagaggagaatcctgggccagcccctttccatccctacttcccagcccaagcagaaaaggacatcaatgatatctttcttttccaaggtctcttggaaactgaggttccagaagcgggagcctctgaagaatgtgtttttcatcttggcagaaagagctcgggaccccagtgctaaaaagcgtcacatggcaatgagaaacttgggaaccatggcctatgaagcccctgacaaggtgagaaagtataagaaaattgtcctcgacctgctggtgtatggactgtatgaccctgtgaatttggaagtcatccatgagagtatgaagactctgaccgtcgttctgggcaagatccaggggaaaggtttgggttccttcttcatagatatcacccttcagaccaggactttattagatgacgagaacgacagtctgagatactcggcctttgttttgtttgggcaattggctgcctttgccgggaggaaatggaaaaaatttttcaccagtcaggttaagcagacacgagattccctcctgatccatttacaggacagaaatccccaggttgccaaggcttgcaaaacaacatttcaagcctgttctccatatctgaaactaaaggaggaatacagcttccagagtgaagaagatcaaaggaacactaagctctaccagcagctgagccactatcatccagagatcctgcagttcttctacgcaaataaaattctgtaagcgcagagcagcagggaaatggttctgtatgagtgcattgctgagccatcatgttcccctgttttatctcactggatgcctcttctcactgcttgcctcttgggattgtaatgggaaagagggtgctgggagagcaatcaaaggcaaaaataatacatggaattgtatgattttatctaaagtaaaattctagactgctttcactta

SEQ ID NO: 16772 - DNA, 5257 bp, Homo sapiens
  source 1..5257: mol_type = unassigned DNA
aacgggccttggcagggaggttttgtttggtgcagaggaaaggtccccagaattgccatctgcagaatttctgcagaaagtgtcgaccaggctggcatgagggaagaaggaggggaaatcacagcaaggagaaggaaaaacacctcagcatggcgtggggaagcaaaggaattcagggctgggaaaatttagccgagtcatcacatttggctactacccgggaaagcagccctcccgagtcaggaacgggctccggttcatcacgtggcagccgcctgcaggagccgcagttccatggaccaaagacagaggagaatcctgggccagcccctttccatccctacttcccagcccaagcagaaaaggacatcaatgatatctttcttttccaaggtctcttggaaactgaggttccagaagcgggagcctctgaagaatgtgtttttcatcttggcagaaagagctcgggaccccagtgctaaaaagcgtcacatggcaatgagaaacttgggaaccatggcctatgaagcccctgacaaggtgagaaagtataagaaaattgtcctcgacctgctggtgtatggactgtatgaccctgtgaatttggaagtcatccatgagagtatgaagactctgaccgtcgttctgggcaagatccaggggaaaggtttgggttccttcttcatagatatcacccttcagaccaggactttattagatgacgagaacgacagtctgagatactcggcctttgttttgtttgggcaattggctgcctttgccgggaggaaatggaaaaaatttttcaccagtcaggttaagcagacacgagattccctcctgatccatttacaggacagaaatccccaggttgccaaggcttgcaaaacaacatttcaagcctgttctccatatctgaaactaaaggaggaatacagcttccagagtgaagaagatcaaaggaacactaagctctaccagcagctgagccactatcatccagagatcctgcagttcttctacgcaaataaaattctgtaagcgcagagcagcagggaaatggttctgtatgagtgcattgctgagccatcatgttcccctgttttatctcactggatgcctcttctcactgcttgcctcttgggattgtaatgggaaagagggtgctgggagagcaatcaaaggcaaaaataatacatggaattgtatgattttatctaaagtaaaattctagactgctttcacttatttcatttcctccccatacaaatttgatgagcaggtacacactttctttaaaacattccaagtgtatatagattcagtgcttatttctcagctttttctttcttaagttcatctctgtcacctagcttttatttttaatactcaatttctgaggcttaggagaatacttgttaccttaagcgtttttttgtttttttgttgttgttgttttgtttttttttagtgtatttgctattgatactttgctattgatacctttacttgccaagatttatttaaagttggccaagataccaagaaggtggcttgcaggggcatctttggcttctcataattttaaacagtcattgctttcaagatcatgctaaacaagaattaatagagagaaaaaaatctataaagcatgtgttgaaaatcctcaggctcatgataacttacgggataacaatagtaggtaacaccgagtgcttacaattcagtgggcacggtcaaagtgctttttgtaagttctatttaatacttgcgacaaccctgagatagtaagtattattattgttctcattttatagatgagaaagctaacacatagggaaattaggtaactttccccagataactcagtaaacagtggagctggaattcaaacatgtacggtctgacttcttgagcccatactcaataatcatgccatcctgcctttccatggaataactgatggatggttagaaatgttaaaaacaaagcaaatgcaaacatctctgcttctgctcctctactaagcccagttaacttttgattttatatgtactaagtatacatttttattaatttatgtgagctgagtgtttttattaattactttttggctattaatgtcaattattttggtgatcaatcctagttatccaaggagtcacatcactcgtaaaaattacaagaaaaatctctaagtccctctcaccctccctctaaccagattgcatcccaagcttctatagaaactctggtaccacccctgaattcagtatccaggccacacccggagcgttttgttcaagacaatttaaaacacgggggattataaaagctatagctggatcttaagtggcattctgagaatgaggaactcaattttctgctgtagctcccagggacagggtggtgtgacacagatgcggggatgaggagagacctaggcgagatgaggatgtgggagatggcagacagagtggcaagtgccaggcaggaatggattttcttccttcctgttctgaatctgaagaacatgacagcaagagattttaggagggacacaggctcacgagcaaatgggtggttctgagctgtaagccccctgcccctccctagcacccactccccggatgctggcctctttgaaattttgttgcaaggttggtttaaacttgatgcagttccattaagtgatcagtgagtggtctgagaaatggctgcatgtggctggcattcaaaaaggtggggatagggtgagatgggtggggttacgtgctctggagtagaaaaacctatgcagttaatgtccctctgtcggttaaaattgtggaagatgcggttggattatttgactttaagattcaatggtaggcttttattttggtggcccccaatgagtcatgcctcctgatactcatgtctttatttagtcccttctgtttgaatctgggctgcctttgtgacttgctttaatcaggagattgtgataaatggcactgtgccgggcatagaaaccctggcagtttcctcgtttgaattgtgggggaagccagctgccacataaggagttgaactaccaggaacaaatgagagtgcctgagatcaccatgtgaaggagaacggagacacccaacccacagcagagtctgaggcccggacacatgacacaagttgtcccttccagccagacccgagctgttgaagctactccagctgacaccatacggaaaagagacgagcgtctccatcaagcctgtgtcagttgcagaagcatgaacaaagaatcaaatgattgttgttttaagtcattaacctttgggataatttgtcacactgcaataagtaaccagagaagattccttattattaactgttgtcttggctaattttgttttgctcttcataagtcctctttgagtttaaattctatttccagaaatttatgttatcatgaaatttggtggcaagagcaagggactatgtttttttgtttgtttgtttctgtttctcaccatacctaccacagagcctggccatgtgattaaggaacatttgctgaatgactaaatgattccaaattgtagagggaataaagtccaatgtccagtctgccatttcaggctttcaaccttcgttttcttctgttactctctttgcttcagacaagtttgggtcctttctcttctctcaacatgtcttgttctcctataccccctcacctttgctcagtctgctatttctgtgttgagtcccctccctgctcacctgtacacacccacctggaatcacatgcacacacacacacacacatttcacgtgtatctcttatctgtactccaatgcctaggtcaaagtcctgatccccccaatcaggggagagctcaagtctctgaattcccagaacattctagcaatattataccacttatatcttatctgaaaagtttttttttgtatatggctttatgtttttttttttatcctgttagattgaaactacagaaggcagggctgtatcttgtacatcattgtatctccccggtgactgcaaaagtactctgtaaatgaatgttgattagggggaaaaatgtcagaaagtcatctgaagctgtcattccttactgggaggagcccattttgacaaatgagggtcaccaatttcattccttataaccaatgtacaggttacttttatgcttgtgcatttcaagtttccccttccccacgtttatctgaatgccaacccaaaggtaatgttttgacatttcttaattttgaacattaattttgaaccttattgagcagttgaatgaaagaaagaaaaaaggaatgttcaagtgccccgaccctcatgctaagtgcccagggtagagctttgcttggtccctgtgtctctggtgctcatgagataggtctttctttctttatttttatttttgagatggagcctcactctgtcacccaggctggagtgcaatgacacgatctcggctcactgcaacctccacctcctgggttcaagcgattctcctgtctcagcctcctgagtagctgggattacaggtgcctgccaccatggctggctaatttttgtgtttttagtagagacggggtttcaccatgttggccaggctggtctcaaactcctgacctcaagtgatctgctcaccttggtctcccaaagtgctgggattacaggcgtgagccaccgctcctggctgagataggtctttcttaaaggggagagggaagtggtggagagagaggagagaaaatgacaaaggaggaggctgagaatctaacaggtgtgaccaattctgctactgaatgagagcagaagcctgtgaacttccagttaatagaccacttaattgggggaacgcttcacacgttataaaaaagcactagaatgttttgaaagcgagaaacaacagctgtgtagggtagctagcagttagtgttgtacagaagacagatatttgtgcatttctgcattttctaagtttgctgcaatgagcatgtattactttcatagttataaaacacatgcaaaatgcccttttaaaatgaaaaaaaagtccatgagtgtaagtgatatatatgctttggaaagcctgggacggtcattgtttactctcaatagtatgtgtttgcctttgtctttttgagacattttgttttaatctgttgatgacaataacctgttgataatataacttgataacaaataaaatgacttatgattgattatcatttt

SEQ ID NO: 16773 - DNA, 4887 bp, Homo sapiens
  source 1..4887: mol_type = unassigned DNA
attcatattcacccttcatgaggatgagcacagagcaagaagctagccacgctgggctcctcattgcctagctcagttccatggaccaaagacagaggagaatcctgggccagcccctttccatccctacttcccagcccaagcagaaaaggacatcaatgatatctttcttttccaaggtctcttggaaactgaggttccagaagcgggagcctctgaagaatgtgtttttcatcttggcagaaagagctcgggaccccagtgctaaaaagcgtcacatggcaatgagaaacttgggaaccatggcctatgaagcccctgacaaggtgagaaagtataagaaaattgtcctcgacctgctggtgtatggactgtatgaccctgtgaatttggaagtcatccatgagagtatgaagactctgaccgtcgttctgggcaagatccaggggaaaggtttgggttccttcttcatagatatcacccttcagaccaggactttattagatgacgcttgcaaaacaacatttcaagcctgttctccatatctgaaactaaaggaggaatacagcttccagagtgaagaagatcaaaggaacactaagctctaccagcagctgagccactatcatccagagatcctgcagttcttctacgcaaataaaattctgtaagcgcagagcagcagggaaatggttctgtatgagtgcattgctgagccatcatgttcccctgttttatctcactggatgcctcttctcactgcttgcctcttgggattgtaatgggaaagagggtgctgggagagcaatcaaaggcaaaaataatacatggaattgtatgattttatctaaagtaaaattctagactgctttcacttatttcatttcctccccatacaaatttgatgagcaggtacacactttctttaaaacattccaagtgtatatagattcagtgcttatttctcagctttttctttcttaagttcatctctgtcacctagcttttatttttaatactcaatttctgaggcttaggagaatacttgttaccttaagcgtttttttgtttttttgttgttgttgttttgtttttttttagtgtatttgctattgatactttgctattgatacctttacttgccaagatttatttaaagttggccaagataccaagaaggtggcttgcaggggcatctttggcttctcataattttaaacagtcattgctttcaagatcatgctaaacaagaattaatagagagaaaaaaatctataaagcatgtgttgaaaatcctcaggctcatgataacttacgggataacaatagtaggtaacaccgagtgcttacaattcagtgggcacggtcaaagtgctttttgtaagttctatttaatacttgcgacaaccctgagatagtaagtattattattgttctcattttatagatgagaaagctaacacatagggaaattaggtaactttccccagataactcagtaaacagtggagctggaattcaaacatgtacggtctgacttcttgagcccatactcaataatcatgccatcctgcctttccatggaataactgatggatggttagaaatgttaaaaacaaagcaaatgcaaacatctctgcttctgctcctctactaagcccagttaacttttgattttatatgtactaagtatacatttttattaatttatgtgagctgagtgtttttattaattactttttggctattaatgtcaattattttggtgatcaatcctagttatccaaggagtcacatcactcgtaaaaattacaagaaaaatctctaagtccctctcaccctccctctaaccagattgcatcccaagcttctatagaaactctggtaccacccctgaattcagtatccaggccacacccggagcgttttgttcaagacaatttaaaacacgggggattataaaagctatagctggatcttaagtggcattctgagaatgaggaactcaattttctgctgtagctcccagggacagggtggtgtgacacagatgcggggatgaggagagacctaggcgagatgaggatgtgggagatggcagacagagtggcaagtgccaggcaggaatggattttcttccttcctgttctgaatctgaagaacatgacagcaagagattttaggagggacacaggctcacgagcaaatgggtggttctgagctgtaagccccctgcccctccctagcacccactccccggatgctggcctctttgaaattttgttgcaaggttggtttaaacttgatgcagttccattaagtgatcagtgagtggtctgagaaatggctgcatgtggctggcattcaaaaaggtggggatagggtgagatgggtggggttacgtgctctggagtagaaaaacctatgcagttaatgtccctctgtcggttaaaattgtggaagatgcggttggattatttgactttaagattcaatggtaggcttttattttggtggcccccaatgagtcatgcctcctgatactcatgtctttatttagtcccttctgtttgaatctgggctgcctttgtgacttgctttaatcaggagattgtgataaatggcactgtgccgggcatagaaaccctggcagtttcctcgtttgaattgtgggggaagccagctgccacataaggagttgaactaccaggaacaaatgagagtgcctgagatcaccatgtgaaggagaacggagacacccaacccacagcagagtctgaggcccggacacatgacacaagttgtcccttccagccagacccgagctgttgaagctactccagctgacaccatacggaaaagagacgagcgtctccatcaagcctgtgtcagttgcagaagcatgaacaaagaatcaaatgattgttgttttaagtcattaacctttgggataatttgtcacactgcaataagtaaccagagaagattccttattattaactgttgtcttggctaattttgttttgctcttcataagtcctctttgagtttaaattctatttccagaaatttatgttatcatgaaatttggtggcaagagcaagggactatgtttttttgtttgtttgtttctgtttctcaccatacctaccacagagcctggccatgtgattaaggaacatttgctgaatgactaaatgattccaaattgtagagggaataaagtccaatgtccagtctgccatttcaggctttcaaccttcgttttcttctgttactctctttgcttcagacaagtttgggtcctttctcttctctcaacatgtcttgttctcctataccccctcacctttgctcagtctgctatttctgtgttgagtcccctccctgctcacctgtacacacccacctggaatcacatgcacacacacacacacacatttcacgtgtatctcttatctgtactccaatgcctaggtcaaagtcctgatccccccaatcaggggagagctcaagtctctgaattcccagaacattctagcaatattataccacttatatcttatctgaaaagtttttttttgtatatggctttatgtttttttttttatcctgttagattgaaactacagaaggcagggctgtatcttgtacatcattgtatctccccggtgactgcaaaagtactctgtaaatgaatgttgattagggggaaaaatgtcagaaagtcatctgaagctgtcattccttactgggaggagcccattttgacaaatgagggtcaccaatttcattccttataaccaatgtacaggttacttttatgcttgtgcatttcaagtttccccttccccacgtttatctgaatgccaacccaaaggtaatgttttgacatttcttaattttgaacattaattttgaaccttattgagcagttgaatgaaagaaagaaaaaaggaatgttcaagtgccccgaccctcatgctaagtgcccagggtagagctttgcttggtccctgtgtctctggtgctcatgagataggtctttctttctttatttttatttttgagatggagcctcactctgtcacccaggctggagtgcaatgacacgatctcggctcactgcaacctccacctcctgggttcaagcgattctcctgtctcagcctcctgagtagctgggattacaggtgcctgccaccatggctggctaatttttgtgtttttagtagagacggggtttcaccatgttggccaggctggtctcaaactcctgacctcaagtgatctgctcaccttggtctcccaaagtgctgggattacaggcgtgagccaccgctcctggctgagataggtctttcttaaaggggagagggaagtggtggagagagaggagagaaaatgacaaaggaggaggctgagaatctaacaggtgtgaccaattctgctactgaatgagagcagaagcctgtgaacttccagttaatagaccacttaattgggggaacgcttcacacgttataaaaaagcactagaatgttttgaaagcgagaaacaacagctgtgtagggtagctagcagttagtgttgtacagaagacagatatttgtgcatttctgcattttctaagtttgctgcaatgagcatgtattactttcatagttataaaacacatgcaaaatgcccttttaaaatgaaaaaaaagtccatgagtgtaagtgatatatatgctttggaaagcctgggacggtcattgtttactctcaatagtatgtgtttgcctttgtctttttgagacattttgttttaatctgttgatgacaataacctgttgataatataacttgataacaaataaaatgacttatgattgattatcatttt

SEQ ID NO: 16774 - DNA, 4998 bp, Homo sapiens
  source 1..4998: mol_type = unassigned DNA
aacgggccttggcagggaggttttgtttggtgcagaggaaaggtccccagaattgccatctgcagaatttctgcagaaagtgtcgaccaggctggcatgagggaagaaggaggggaaatcacagcaaggagaaggaaaaacacctcagcatggcgtggggaagcaaaggaattcagggctgggaaaatttagccgagtcatcacatttggctactacccgggaaagcagccctcccgagtcaggaacgggctccggttcatcacgtggcagccgcctgcaggagccgcaggtctcttggaaactgaggttccagaagcgggagcctctgaagaatgtgtttttcatcttggcagaaagagctcgggaccccagtgctaaaaagcgtcacatggcaatgagaaacttgggaaccatggcctatgaagcccctgacaaggtgagaaagtataagaaaattgtcctcgacctgctggtgtatggactgtatgaccctgtgaatttggaagtcatccatgagagtatgaagactctgaccgtcgttctgggcaagatccaggggaaaggtttgggttccttcttcatagatatcacccttcagaccaggactttattagatgacgcttgcaaaacaacatttcaagcctgttctccatatctgaaactaaaggaggaatacagcttccagagtgaagaagatcaaaggaacactaagctctaccagcagctgagccactatcatccagagatcctgcagttcttctacgcaaataaaattctgtaagcgcagagcagcagggaaatggttctgtatgagtgcattgctgagccatcatgttcccctgttttatctcactggatgcctcttctcactgcttgcctcttgggattgtaatgggaaagagggtgctgggagagcaatcaaaggcaaaaataatacatggaattgtatgattttatctaaagtaaaattctagactgctttcacttatttcatttcctccccatacaaatttgatgagcaggtacacactttctttaaaacattccaagtgtatatagattcagtgcttatttctcagctttttctttcttaagttcatctctgtcacctagcttttatttttaatactcaatttctgaggcttaggagaatacttgttaccttaagcgtttttttgtttttttgttgttgttgttttgtttttttttagtgtatttgctattgatactttgctattgatacctttacttgccaagatttatttaaagttggccaagataccaagaaggtggcttgcaggggcatctttggcttctcataattttaaacagtcattgctttcaagatcatgctaaacaagaattaatagagagaaaaaaatctataaagcatgtgttgaaaatcctcaggctcatgataacttacgggataacaatagtaggtaacaccgagtgcttacaattcagtgggcacggtcaaagtgctttttgtaagttctatttaatacttgcgacaaccctgagatagtaagtattattattgttctcattttatagatgagaaagctaacacatagggaaattaggtaactttccccagataactcagtaaacagtggagctggaattcaaacatgtacggtctgacttcttgagcccatactcaataatcatgccatcctgcctttccatggaataactgatggatggttagaaatgttaaaaacaaagcaaatgcaaacatctctgcttctgctcctctactaagcccagttaacttttgattttatatgtactaagtatacatttttattaatttatgtgagctgagtgtttttattaattactttttggctattaatgtcaattattttggtgatcaatcctagttatccaaggagtcacatcactcgtaaaaattacaagaaaaatctctaagtccctctcaccctccctctaaccagattgcatcccaagcttctatagaaactctggtaccacccctgaattcagtatccaggccacacccggagcgttttgttcaagacaatttaaaacacgggggattataaaagctatagctggatcttaagtggcattctgagaatgaggaactcaattttctgctgtagctcccagggacagggtggtgtgacacagatgcggggatgaggagagacctaggcgagatgaggatgtgggagatggcagacagagtggcaagtgccaggcaggaatggattttcttccttcctgttctgaatctgaagaacatgacagcaagagattttaggagggacacaggctcacgagcaaatgggtggttctgagctgtaagccccctgcccctccctagcacccactccccggatgctggcctctttgaaattttgttgcaaggttggtttaaacttgatgcagttccattaagtgatcagtgagtggtctgagaaatggctgcatgtggctggcattcaaaaaggtggggatagggtgagatgggtggggttacgtgctctggagtagaaaaacctatgcagttaatgtccctctgtcggttaaaattgtggaagatgcggttggattatttgactttaagattcaatggtaggcttttattttggtggcccccaatgagtcatgcctcctgatactcatgtctttatttagtcccttctgtttgaatctgggctgcctttgtgacttgctttaatcaggagattgtgataaatggcactgtgccgggcatagaaaccctggcagtttcctcgtttgaattgtgggggaagccagctgccacataaggagttgaactaccaggaacaaatgagagtgcctgagatcaccatgtgaaggagaacggagacacccaacccacagcagagtctgaggcccggacacatgacacaagttgtcccttccagccagacccgagctgttgaagctactccagctgacaccatacggaaaagagacgagcgtctccatcaagcctgtgtcagttgcagaagcatgaacaaagaatcaaatgattgttgttttaagtcattaacctttgggataatttgtcacactgcaataagtaaccagagaagattccttattattaactgttgtcttggctaattttgttttgctcttcataagtcctctttgagtttaaattctatttccagaaatttatgttatcatgaaatttggtggcaagagcaagggactatgtttttttgtttgtttgtttctgtttctcaccatacctaccacagagcctggccatgtgattaaggaacatttgctgaatgactaaatgattccaaattgtagagggaataaagtccaatgtccagtctgccatttcaggctttcaaccttcgttttcttctgttactctctttgcttcagacaagtttgggtcctttctcttctctcaacatgtcttgttctcctataccccctcacctttgctcagtctgctatttctgtgttgagtcccctccctgctcacctgtacacacccacctggaatcacatgcacacacacacacacacatttcacgtgtatctcttatctgtactccaatgcctaggtcaaagtcctgatccccccaatcaggggagagctcaagtctctgaattcccagaacattctagcaatattataccacttatatcttatctgaaaagtttttttttgtatatggctttatgtttttttttttatcctgttagattgaaactacagaaggcagggctgtatcttgtacatcattgtatctccccggtgactgcaaaagtactctgtaaatgaatgttgattagggggaaaaatgtcagaaagtcatctgaagctgtcattccttactgggaggagcccattttgacaaatgagggtcaccaatttcattccttataaccaatgtacaggttacttttatgcttgtgcatttcaagtttccccttccccacgtttatctgaatgccaacccaaaggtaatgttttgacatttcttaattttgaacattaattttgaaccttattgagcagttgaatgaaagaaagaaaaaaggaatgttcaagtgccccgaccctcatgctaagtgcccagggtagagctttgcttggtccctgtgtctctggtgctcatgagataggtctttctttctttatttttatttttgagatggagcctcactctgtcacccaggctggagtgcaatgacacgatctcggctcactgcaacctccacctcctgggttcaagcgattctcctgtctcagcctcctgagtagctgggattacaggtgcctgccaccatggctggctaatttttgtgtttttagtagagacggggtttcaccatgttggccaggctggtctcaaactcctgacctcaagtgatctgctcaccttggtctcccaaagtgctgggattacaggcgtgagccaccgctcctggctgagataggtctttcttaaaggggagagggaagtggtggagagagaggagagaaaatgacaaaggaggaggctgagaatctaacaggtgtgaccaattctgctactgaatgagagcagaagcctgtgaacttccagttaatagaccacttaattgggggaacgcttcacacgttataaaaaagcactagaatgttttgaaagcgagaaacaacagctgtgtagggtagctagcagttagtgttgtacagaagacagatatttgtgcatttctgcattttctaagtttgctgcaatgagcatgtattactttcatagttataaaacacatgcaaaatgcccttttaaaatgaaaaaaaagtccatgagtgtaagtgatatatatgctttggaaagcctgggacggtcattgtttactctcaatagtatgtgtttgcctttgtctttttgagacattttgttttaatctgttgatgacaataacctgttgataatataacttgataacaaataaaatgacttatgattgattatcatttt

SEQ ID NO: 16775 - DNA, 5154 bp, Homo sapiens
  source 1..5154: mol_type = unassigned DNA
aacgggccttggcagggaggttttgtttggtgcagaggaaaggtccccagaattgccatctgcagaatttctgcagaaagtgtcgaccaggctggcatgagggaagaaggaggggaaatcacagcaaggagaaggaaaaacacctcagcatggcgtggggaagcaaaggaattcagggctgggaaaatttagccgagtcatcacatttggctactacccgggaaagcagccctcccgagtcaggaacgggctccggttcatcacgtggcagccgcctgcaggagccgcaggtctcttggaaactgaggttccagaagcgggagcctctgaagaatgtgtttttcatcttggcagaaagagctcgggaccccagtgctaaaaagcgtcacatggcaatgagaaacttgggaaccatggcctatgaagcccctgacaaggtgagaaagtataagaaaattgtcctcgacctgctggtgtatggactgtatgaccctgtgaatttggaagtcatccatgagagtatgaagactctgaccgtcgttctgggcaagatccaggggaaaggtttgggttccttcttcatagatatcacccttcagaccaggactttattagatgacgagaacgacagtctgagatactcggcctttgttttgtttgggcaattggctgcctttgccgggaggaaatggaaaaaatttttcaccagtcaggttaagcagacacgagattccctcctgatccatttacaggacagaaatccccaggttgccaaggcttgcaaaacaacatttcaagcctgttctccatatctgaaactaaaggaggaatacagcttccagagtgaagaagatcaaaggaacactaagctctaccagcagctgagccactatcatccagagatcctgcagttcttctacgcaaataaaattctgtaagcgcagagcagcagggaaatggttctgtatgagtgcattgctgagccatcatgttcccctgttttatctcactggatgcctcttctcactgcttgcctcttgggattgtaatgggaaagagggtgctgggagagcaatcaaaggcaaaaataatacatggaattgtatgattttatctaaagtaaaattctagactgctttcacttatttcatttcctccccatacaaatttgatgagcaggtacacactttctttaaaacattccaagtgtatatagattcagtgcttatttctcagctttttctttcttaagttcatctctgtcacctagcttttatttttaatactcaatttctgaggcttaggagaatacttgttaccttaagcgtttttttgtttttttgttgttgttgttttgtttttttttagtgtatttgctattgatactttgctattgatacctttacttgccaagatttatttaaagttggccaagataccaagaaggtggcttgcaggggcatctttggcttctcataattttaaacagtcattgctttcaagatcatgctaaacaagaattaatagagagaaaaaaatctataaagcatgtgttgaaaatcctcaggctcatgataacttacgggataacaatagtaggtaacaccgagtgcttacaattcagtgggcacggtcaaagtgctttttgtaagttctatttaatacttgcgacaaccctgagatagtaagtattattattgttctcattttatagatgagaaagctaacacatagggaaattaggtaactttccccagataactcagtaaacagtggagctggaattcaaacatgtacggtctgacttcttgagcccatactcaataatcatgccatcctgcctttccatggaataactgatggatggttagaaatgttaaaaacaaagcaaatgcaaacatctctgcttctgctcctctactaagcccagttaacttttgattttatatgtactaagtatacatttttattaatttatgtgagctgagtgtttttattaattactttttggctattaatgtcaattattttggtgatcaatcctagttatccaaggagtcacatcactcgtaaaaattacaagaaaaatctctaagtccctctcaccctccctctaaccagattgcatcccaagcttctatagaaactctggtaccacccctgaattcagtatccaggccacacccggagcgttttgttcaagacaatttaaaacacgggggattataaaagctatagctggatcttaagtggcattctgagaatgaggaactcaattttctgctgtagctcccagggacagggtggtgtgacacagatgcggggatgaggagagacctaggcgagatgaggatgtgggagatggcagacagagtggcaagtgccaggcaggaatggattttcttccttcctgttctgaatctgaagaacatgacagcaagagattttaggagggacacaggctcacgagcaaatgggtggttctgagctgtaagccccctgcccctccctagcacccactccccggatgctggcctctttgaaattttgttgcaaggttggtttaaacttgatgcagttccattaagtgatcagtgagtggtctgagaaatggctgcatgtggctggcattcaaaaaggtggggatagggtgagatgggtggggttacgtgctctggagtagaaaaacctatgcagttaatgtccctctgtcggttaaaattgtggaagatgcggttggattatttgactttaagattcaatggtaggcttttattttggtggcccccaatgagtcatgcctcctgatactcatgtctttatttagtcccttctgtttgaatctgggctgcctttgtgacttgctttaatcaggagattgtgataaatggcactgtgccgggcatagaaaccctggcagtttcctcgtttgaattgtgggggaagccagctgccacataaggagttgaactaccaggaacaaatgagagtgcctgagatcaccatgtgaaggagaacggagacacccaacccacagcagagtctgaggcccggacacatgacacaagttgtcccttccagccagacccgagctgttgaagctactccagctgacaccatacggaaaagagacgagcgtctccatcaagcctgtgtcagttgcagaagcatgaacaaagaatcaaatgattgttgttttaagtcattaacctttgggataatttgtcacactgcaataagtaaccagagaagattccttattattaactgttgtcttggctaattttgttttgctcttcataagtcctctttgagtttaaattctatttccagaaatttatgttatcatgaaatttggtggcaagagcaagggactatgtttttttgtttgtttgtttctgtttctcaccatacctaccacagagcctggccatgtgattaaggaacatttgctgaatgactaaatgattccaaattgtagagggaataaagtccaatgtccagtctgccatttcaggctttcaaccttcgttttcttctgttactctctttgcttcagacaagtttgggtcctttctcttctctcaacatgtcttgttctcctataccccctcacctttgctcagtctgctatttctgtgttgagtcccctccctgctcacctgtacacacccacctggaatcacatgcacacacacacacacacatttcacgtgtatctcttatctgtactccaatgcctaggtcaaagtcctgatccccccaatcaggggagagctcaagtctctgaattcccagaacattctagcaatattataccacttatatcttatctgaaaagtttttttttgtatatggctttatgtttttttttttatcctgttagattgaaactacagaaggcagggctgtatcttgtacatcattgtatctccccggtgactgcaaaagtactctgtaaatgaatgttgattagggggaaaaatgtcagaaagtcatctgaagctgtcattccttactgggaggagcccattttgacaaatgagggtcaccaatttcattccttataaccaatgtacaggttacttttatgcttgtgcatttcaagtttccccttccccacgtttatctgaatgccaacccaaaggtaatgttttgacatttcttaattttgaacattaattttgaaccttattgagcagttgaatgaaagaaagaaaaaaggaatgttcaagtgccccgaccctcatgctaagtgcccagggtagagctttgcttggtccctgtgtctctggtgctcatgagataggtctttctttctttatttttatttttgagatggagcctcactctgtcacccaggctggagtgcaatgacacgatctcggctcactgcaacctccacctcctgggttcaagcgattctcctgtctcagcctcctgagtagctgggattacaggtgcctgccaccatggctggctaatttttgtgtttttagtagagacggggtttcaccatgttggccaggctggtctcaaactcctgacctcaagtgatctgctcaccttggtctcccaaagtgctgggattacaggcgtgagccaccgctcctggctgagataggtctttcttaaaggggagagggaagtggtggagagagaggagagaaaatgacaaaggaggaggctgagaatctaacaggtgtgaccaattctgctactgaatgagagcagaagcctgtgaacttccagttaatagaccacttaattgggggaacgcttcacacgttataaaaaagcactagaatgttttgaaagcgagaaacaacagctgtgtagggtagctagcagttagtgttgtacagaagacagatatttgtgcatttctgcattttctaagtttgctgcaatgagcatgtattactttcatagttataaaacacatgcaaaatgcccttttaaaatgaaaaaaaagtccatgagtgtaagtgatatatatgctttggaaagcctgggacggtcattgtttactctcaatagtatgtgtttgcctttgtctttttgagacattttgttttaatctgttgatgacaataacctgttgataatataacttgataacaaataaaatgacttatgattgattatcatttt

SEQ ID NO: 16776 - DNA, 866 bp, Homo sapiens
  source 1..866: mol_type = unassigned DNA
atattcacccttcatgaggatgagcacagagcaagaagctagccacgctgggctcctcattgcctagctcagttccatggaccaaagacagaggagaatcctgggccagcccctttccatccctacttcccagcccaagcagaaaaggacatcaatgatatctttcttttccaaggtctcttggaaactgaggttccagaagcgggagcctctgaagaatgtgtttttcatcttggcagaaagagctcgggaccccagtgctaaaaagcgtcacatggcaatgagaaacttgggaaccatggcctatgaagcccctgacaaggtgagaaagtataagaaaattgtcctcgacctgctggtgtatggactgtatgaccctgtgaatttggaagtcatccatgagagtatgaagactctgaccgtcgttctgggcaagatccaggggaaaggtttgggttccttcttcatagatatcacccttcagaccaggactttattagatgacgcttgcaaaacaacatttcaagcctgttctccatatctgaaactaaaggaggaatacagcttccagagtgaagaagatcaaaggaacactaagctctaccagcagctgagccactatcatccagagatcctgcagttcttctacgcaaataaaattctgtaagcgcagagcagcagggaaatggttctgtatgagtgcattgctgagccatcatgttcccctgttttatctcactggatgcctcttctcactgcttgcctcttgggattgtaatgggaaagagggtgctgggagagcaatcaaaggcaaaaataatacatggaattgtatgattttatctaaagtaaaattctagactgct

SEQ ID NO: 16777 - DNA, 1677 bp, Homo sapiens
  source 1..1677: mol_type = unassigned DNA
gttgtccggccgggggaggcggaggtcgctcgctcgctcgctcggctcgctgactcgccggagcgctctgtggcggtcggcggcaggtcggtcgcgagagcgggctctgtggaagggggcgaggctatgtcgcggtggcagcccggatgggccggcagggccgggagtaacgggacgtcgccgcggagcttcttcccccggatacagtgcggcccgagcggaggccgcggcgccgccctccgatcttgaagagcccgcgctgcgcggagcccgcccccgcctgcgcaccggcaccgacgcggagcgacccagcccagccagacccggcccggcgcggcctgatctaacccagccaggcaggcaatactagcccctctggagcacggagctccttccccaaagacatgaagctattggagaactcgagctttgaagccatcaactcacagctgactgtggagactggagatgcccacatcattggcaggattgagagctactcatgtaagatggcaggagacgacaaacacatgttcaagcagttctgccaggagggccagccccacgtgctggaggcactttctccaccccagacttcaggactgagccccagcagactcagcaaaagccaaggcggtgaggaggagggccccctcagtgacaagtgcagccgcaagaccctcttctacctgattgccacgctcaatgagtccttcaggcctgactatgacttcagcacagcccgcagccatgagttcagccgggagcccagccttagctgggtggtgaatgcagtcaactgcagtctgttctcagctgtgcgggaggacttcaaggatctgaaaccacagctgtggaacgcggtggacgaggagatctgcctggctgaatgtgacatctacagctataacccagacttggactcagatcccttcggggaggatggtagcctctggtccttcaactacttcttctacaacaagcggctcaagcgaatcgtcttctttagctgccgttccatcagtggctccacctacacaccctcagaggcaggcaacgagctggacatggagctgggggaggaggaggtggaggaagaaagcagaagcgggggcagtggggccgaggagaccagcaccatggaggaggacagggtcccagtgatctgtatttgatgaggaggagccgaggccccagcttcatccagcttcaaccaatgcctggacctgtccacctgagaggcccctggggcctccccagctgctggccagaccctggcgctgccacagtcctggcactgcccaaggccatacctgcctagccctttggctccatcctgtggatgcccactcacccctcagactcctgctgcccatgctgtggccggacttgtcagcagggggcctggtgggaggagcgactgccctgcccaaatgaactgccacagcagggacagctggaccgcagagtttatttttgtatttctactgggcctgcacactccagcccaaagggtctgtggccggaggccccacgagcaggccccagcagtcaccggctctggtcttgggccggccccggtgcccacctgtacccccacctcgcccatttggccgcgtgcactgagtgtcactttgctgcagctcgtttctttccaataaaagtttctgtgactta

SEQ ID NO: 16778 - DNA, 737 bp, Homo sapiens
  source 1..737: mol_type = unassigned DNA
gacgtggcccaggcgggcgctgcctggtgactgcagcgccccagcggggccgagggaccgccctcctaggcgtctggagaaactaggcaatttttccgggtagagtggaggaacctgtagttttcctctccccgggccagaaagtagccaaaacgaaagagcgcccgcccaggtgaccgcagggcccggagtcccaggtgtcctggttcctaaccgggatgcagcctcttaccttggctgaggagcccagccagcctgagggagactgcaggagtcacgtcccgttgcggactcaagagttacccccatggtggctggagctcttttggagtgggcgtggagatggggaatgggaatgttgagcaacaatctcagccagcagccccagggtgagcagggtccccggtggtctagtctagtcccagaactcgcgtgttctgcagggggtatggctgacctggagcctggacttaccaccctcaggcaatactagcccctctggagcacggagctccttccccaaagacatgaagctattggagaactcgagctttgaagccatcaactcacagctgactgtggagactggagatgcccacatcattggcaggattgagagctactcatgtaagatggcaggagacgacaaacacatgttcaagcagttctgccaggagggccagccccacgtgctggaggcactttctccaccccagacttcaggactgagccccagc

SEQ ID NO: 16779 - DNA, 1098 bp, Homo sapiens
  source 1..1098: mol_type = unassigned DNA
cccgacgtggcccaggcgggcgctgcctggtgactgcagcgccccagcggggccgagggaccgccctcctaggcgtctggagaaactaggcaatttttccgggtagagtggaggaacctgtagttttcctctccccgggccagaaagtagccaaaacgaaagagcgcccgcccaggcaatactagcccctctggagcacggagctccttccccaaagacatgaagctattggagaactcgagctttgaagccatcaactcacagctgactgtggagactggagatgcccacatcattggcaggattgagagctactcatgtaagatggcaggagacgacaaacacatgttcaagcagttctgccaggagggccagccccacgtgctggaggcactttctccaccccagacttcaggactgagccccagcagactcagcaaaagccaaggcggtgaggaggagggccccctcagtgacaagtgcagccgcaagaccctcttctacctgattgccacgctcaatgagtccttcaggcctgactatgacttcagcacagcccgcagccatgagttcagccgggagcccagccttagctgggtggtgaatgcagtcaactgcagtctgttctcagctgtgcgggaggacttcaaggatctgaaaccacagctgtggaacgcggtggacgaggagatctgcctggctgaatgtgacatctacagctataacccagacttggactcagatcccttcggggaggatggtagcctctggtccttcaactacttcttctacaacaagcggctcaagcgaatcgtcttctttagctgccgttccatcagtggctccacctacacaccctcagaggcaggcaacgagctggacatggagctgggggaggaggaggtggaggaagaaagcagaagcgggggcagtggggccgaggagaccagcaccatggaggaggacagggtcccagtgatctgtatttgatgaggaggagccgaggccccagcttcatccagcttcaaccaatgcctggacctgtccacctgagaggcccctggggcctccccagctgctggccagaccctggcgctg

SEQ ID NO: 16780 - DNA, 4047 bp, Homo sapiens
  source 1..4047: mol_type = unassigned DNA
agaaatcaaccttcttttagcgggcgtgtagcgccagcgcgctgtgacgtaatgtgaggggtctcccggcagggctgagctggaccaatgaggaaaggcaaggggccgatttgcctgttctcacgccccaccctcagacctagccggagcaaagtttcacttatagaagggagaggagcgaacatggcagcgcgttggcggttttggtgtgtctctgtgaccatggtggtggcgctgctcatcgtttgcgacgttccctcagcctctgcccaaagaaagaaggagatggtgttatctgaaaaggttagtcagctgatggaatggactaacaaaagacctgtaataagaatgaatggagacaagttccgtcgccttgtgaaagccccaccgagaaattactccgttatcgtcatgttcactgctctccaactgcatagacagtgtgtcgtttgcaagcaagctgatgaagaattccagatcctggcaaactcctggcgatactccagtgcattcaccaacaggatattttttgccatggtggattttgatgaaggctctgatgtatttcagatgctaaacatgaattcagctccaactttcatcaactttcctgcaaaagggaaacccaaacggggtgatacatatgagttacaggtgcggggtttttcagctgagcagattgcccggtggatcgccgacagaactgatgtcaatattagagtgattagacccccaaattatgctggtccccttatgttgggattgcttttggctgttattggtggacttgtgtatcttcgaagaagtaatatggaatttctctttaataaaactggatgggcttttgcagctttgtgttttgtgcttgctatgacatctggtcaaatgtggaaccatataagaggaccaccatatgcccataagaatccccacacgggacatgtgaattatatccatggaagcagtcaagcccagtttgtagctgaaacacacattgttcttctgtttaatggtggagttaccttaggaatggtgcttttatgtgaagctgctacctctgacatggatattggaaagcgaaagataatgtgtgtggctggtattggacttgttgtattattcttcagttggatgctctctatttttagatctaaatatcatggctacccatacagctttctgatgagttaaaaaggtcccagagatatatagacactggagtactggaaattgaaaaacgaaaatcgtgtgtgtttgaaaagaagaatgcaacttgtatattttgtattacctctttttttcaagtgatttaaatagttaatcatttaaccaaagaagatgtgtagtgccttaacaagcaatcctctgtcaaaatctgaggtatttgaaaataattatcctcttaaccttctcttcccagtgaactttatggaacatttaatttagtacaattaagtatattataaaaattgtaaaactactactttgttttagttagaacaaagctcaaaactactttagttaacttggtcatctgattttatattgccttatccaaagatggggaaagtaagtcctgaccaggtgttcccacatatgcctgttacagataactacattaggaattcattcttagcttcttcatctttgtgtggatgtgtatactttacgcatctttccttttgagtagagaaattatgtgtgtcatgtggtcttctgaaaatggaacaccattcttcagagcacacgtctagccctcagcaagacagttgtttctcctcctccttgcatatttcctactgaaatacagtgctgtctatgattgtttttgttttgttgtttttttgagacggtctcgctgtgtcacacaggctggagtgcagtggcgtgagctcggctgactgcaaactctgcctcccaggtttaagcgattctcctgtcacagcttcccaagtagctgggatttacaggtgtgcaccgccatgccaggctaatttttgtgtttttagtagagacagggtttcgccaagttgtccaggctggtcttgaactcctgggctcaagtgatccgcccgcctcagtctcccaaagtgcgaggatgacatgtgtgagctaccacaccagcaatgtctatgcttctcgatagctgtgaacatgaaaagacatctattgggagtccgaggcaggtggattgcttgaggccaggagttagagaccagcctggccaacaaggcaaaaccccgtctctactaaaaatatgaaaattagctgggcttggtggctcatgcctataatcctagctacttgggaggctgaggcacgagacttgcttaatacctgggaggcggagattgcagtgagccgagatcacgctactgcgctccagcctgagtgatagagtgagactctgtctcaaaaaaaagtatctctaaatacaggattataatttctgcttgagtatggtgttaactaccttgtatttagaaagatttcagattcattccatctccttagttttcttttaaggtgacccatctgtgataaaaatatagcttagtgctaaaatcagtgtaacttatacatggcctaaaatgtttctacaaattagagtttgtcacttattccatttgtacctaagagaaaaataggctcagttagaaaaggactccctggccaggcgcagtgacttacgcctgtaatctcagcactttgggaggccaaggcaggcagatcacgaggtcaggagttcgagaccatcctggccaacatggtgaaaccccgtctctactaaaaatataaaaattagctgggtgtggtggcaggagcctgtaatcccagctacacaggaggctgaggcacgagaatcacttgaactcaggagatggaggtttcagtgagccaagatcacaccactgcactccagcctggcaacagagcgagactccatctcaaaaaaaaaaaaaaaagtaagaaagaaaaggactcccttagaatgggaaagaaaaatcataaaatattgagctgatgcctgtatatagaaattaagcgtttctcgaaagctgttctatgttttgctgttattttagtctttattctcttcctttaggtggagaaacaaagtaccaatttgaagggattttttttattttgtcttttggtttctgtcagtagaaataaccatatgtgctaaccaaatttctgtgaagaatgttttcatggttatcattatatctaactataacctcccccatagttatgaagagtaacctgaaatgccactattgtggaaataggataattgtaattgtgaaaaaataattttaaggaaatcttacaagtattacattaaaaagatactatgactgccacctgccatttaccttctaataaccctgccatgtggtttgcagaaagagatggatatagtagcctcagaagaaatattttatgtgggttttttgtttttcgttactagatttcatggatgaggggatatggttgaccttttactttttaatggagcagccagtttttgttaattactcacttgtaaattgtgagattctgaattccttacctgctattcttgtacttgtctcaggccaaatctatgctgtggttcttatgagacttgtatgaagatgccctgatttgtacagattgaccacgggaatactactgccatgtaatctgtatagttccagataatttgtcatgaacattgacagaatgacaattttttgtatttgctttttctccctttaagagcacattcttctgtaaggagaaaggcagcattctggctaaaatgtgtagaaggtaatttactacacttataaaatagtgtgacttttgtgaaaattttgaattagctttcatatgaagtgccttaagtagactcttcatttacttttctggtaatggtttaaatatcatttgttatgcatttttaagatacagttcagaatgacacattgtagtggcaaagataaccaaatgtctggctgtttgctttttgaccatatcaataaacttttacaatctaaa

SEQ ID NO: 16781 - DNA, 3016 bp, Homo sapiens
  source 1..3016: mol_type = unassigned DNA
cattcaccaacaggatattttttgccatggtggattttgatgaaggctctgatgtatttcagatgctaaacatgaattcagctccaactttcatcaactttcctgcaaaagggaaacccaaacggggtgatacatatgagttacaggtgcggggtttttcagctgagcagattgcccggtggatcgccgacagaactgatgtcaatattagagtgattagacccccaaattatgctggtccccttatgttgggattgcttttggctgttattggtggacttgtgtatcttcgaagaagtaatatggaatttctctttaataaaactggatgggcttttgcagctttgtgttttgtgcttgctatgacatctggtcaaatgtggaaccatataagaggaccaccatatgcccataagaatccccacacgggacatgtgaattatatccatggaagcagtcaagcccagtttgtagctgaaacacacattgttcttctgtttaatggtggagttaccttaggaatggtgcttttatgtgaagctgctacctctgacatggatattggaaagcgaaagataatgtgtgtggctggtattggacttgttgtattattcttcagttggatgctctctatttttagatctaaatatcatggctacccatacagctttctgatgagttaaaaaggtcccagagatatatagacactggagtactggaaattgaaaaacgaaaatcgtgtgtgtttgaaaagaagaatgcaacttgtatattttgtattacctctttttttcaagtgatttaaatagttaatcatttaaccaaagaagatgtgtagtgccttaacaagcaatcctctgtcaaaatctgaggtatttgaaaataattatcctcttaaccttctcttcccagtgaactttatggaacatttaatttagtacaattaagtatattataaaaattgtaaaactactactttgttttagttagaacaaagctcaaaactactttagttaacttggtcatctgattttatattgccttatccaaagatggggaaagtaagtcctgaccaggtgttcccacatatgcctgttacagataactacattaggaattcattcttagcttcttcatctttgtgtggatgtgtatactttacgcatctttccttttgagtagagaaattatgtgtgtcatgtggtcttctgaaaatggaacaccattcttcagagcacacgtctagccctcagcaagacagttgtttctcctcctccttgcatatttcctactgaaatacagtgctgtctatgattgtttttgttttgttgtttttttgagacgctactgcgctccagcctgagtgatagagtgagactctgtctcaaaaaaaagtatctctaaatacaggattataatttctgcttgagtatggtgttaactaccttgtatttagaaagatttcagattcattccatctccttagttttcttttaaggtgacccatctgtgataaaaatatagcttagtgctaaaatcagtgtaacttatacatggcctaaaatgtttctacaaattagagtttgtcacttattccatttgtacctaagagaaaaataggctcagttagaaaaggactccctggccaggcgcagtgacttacgcctgtaatctcagcactttgggaggccaaggcaggcagatcacgaggtcaggagttcgagaccatcctggccaacatggtgaaaccccgtctctactaaaaatataaaaattagctgggtgtggtggcaggagcctgtaatcccagctacacaggaggctgaggcacgagaatcacttgaactcaggagatggaggtttcagtgagccaagatcacaccactgcactccagcctggcaacagagcgagactccatctcaaaaaaaaaaaaaaaagtaagaaagaaaaggactcccttagaatgggaaagaaaaatcataaaatattgagctgatgcctgtatatagaaattaagcgtttctcgaaagctgttctatgttttgctgttattttagtctttattctcttcctttaggtggagaaacaaagtaccaatttgaagggattttttttattttgtcttttggtttctgtcagtagaaataaccatatgtgctaaccaaatttctgtgaagaatgttttcatggttatcattatatctaactataacctcccccatagttatgaagagtaacctgaaatgccactattgtggaaataggataattgtaattgtgaaaaaataattttaaggaaatcttacaagtattacattaaaaagatactatgactgccacctgccatttaccttctaataaccctgccatgtggtttgcagaaagagatggatatagtagcctcagaagaaatattttatgtgggttttttgtttttcgttactagatttcatggatgaggggatatggttgaccttttactttttaatggagcagccagtttttgttaattactcacttgtaaattgtgagattctgaattccttacctgctattcttgtacttgtctcaggccaaatctatgctgtggttcttatgagacttgtatgaagatgccctgatttgtacagattgaccacgggaatactactgccatgtaatctgtatagttccagataatttgtcatgaacattgacagaatgacaattttttgtatttgctttttctccctttaagagcacattcttctgtaaggagaaaggcagcattctggctaaaatgtgtagaaggtaatttactacacttataaaatagtgtgacttttgtgaaaattttgaattagctttcatatgaagtgccttaagtagactcttcatttacttttctggtaatggtttaaatatcatttgttatgcatttttaagatacagttcagaatgacacattgtagtggcaaagataaccaaatgtctggctgtttgctttttgaccatatcaataaacttttacaatct

SEQ ID NO: 16782 - DNA, 500 bp, Homo sapiens
  source 1..500: mol_type = unassigned DNA
ggcagtgcggcttgctcttggaagttcaggctcggttgtcttttgggagccatggagagtgacttttatctgcgttactacgtggggcacaagggcaagttcggccacgagttcctggagtttgagtttcgaccggacgggaagttaagatatgccaacaacagcaattacaagaatgatgtcatgatcagaaaagaggagcttgaaatcgtcattggagatgaacacatttcttttacaacatcaaaaattggttcccttattgatgtcaatcaatccaaggatccagaaggcttacgagtattttattatcttgtccaggacctgaagtgtttggtcttcagtcttattggattacacttcaagattaaaccaatctagactgaatattggtgtggacatggggggtgggtgggagtagaaaattttgtgtatatcagggcagtatttttttatgaactataaatgattgtctttaataaatatgtgataaaatccaa

SEQ ID NO: 16783 - DNA, 756 bp, Homo sapiens
  source 1..756: mol_type = unassigned DNA
gccacttccgggcgaagaggttagcgagaaggaacccctccacgcagcgacgacgggacctgacgtcacttccgcgcgccgccgcaaacgtcagtgtcgggcgcagacggcggcagtgcggcttgctcttggaagttcaggctcggttgtcttttgggagccatggagagtgacttttatctgcgttactacgtggggcacaagggcaagttcggccacgagttcctggagtttgagtttcgaccggacgggaagttaagatatgccaacaacagcaattacaagaatgatgtcatgatcagaaaagaggcttatgtacataaaagcgtgatggaggaactgaagagaataattgacgacagtgaaattaccaaagaggatgatgcattgtggcctcctcctgaccgagtgggccggcaggagcttgaaatcgtcattggagatgaacacatttcttttacaacatcaaaaattggttcccttattgatgtcaatcaatccaaggatccagaaggcttacgagtattttattatcttgtccaggacctgaagtgtttggtcttcagtcttattggattacacttcaagattaaaccaatctagactgaatattggtgtggacatggggggtgggtgggagtagaaaattttgtgtatatcagggcagtatttttttatgaactataaatgattgtctttaataaatatgtgataaaatccaatttttattattttataaagacctgaacatgtgaa

SEQ ID NO: 16784 - DNA, 3933 bp, Homo sapiens
  source 1..3933: mol_type = unassigned DNA
tgggggctcgaggcgcctccgcggccgtggacgagcgtccgtgcggcctggtccgggccatgtccgcgtgaggaccccgccgctgtcgccgctcccgttccggccctggcccctctgcccggcagcgccgcgcaccatgggctccattctcagccgccgcatcgcgggggtggaggacatcgacatccaggcgaactcggcctatcgctaccctccgaagtccggaaactactttgcttcgcactttttcatgggaggagagaaattcgacaccccccaccctgaaggttacctctttggagagaacatggatctgaacttcctgggcagccgcccggtccagtttccctacgtcactcctgccccccacgagcccgtgaagacgctgcggagcctggtgaacatccgcaaagactccctgcggctggtgaggtacaaagacgatgccgacagccccaccgaggacggcgacaagccccgggtgctctacagcctggagttcaccttcgacgccgatgcccgcgtggccatcaccatctactgccaggcatcggaggagttcctgaacggcagggcagtatacagccccaagagcccctcgctacagtccgagaccgtccactacaagagaggggtgagccagcagttctccctgccctccttcaagattgacttctcggaatggaaggatgacgagctgaactttgacctggaccggggcgtgtttccagtagtcatccaggctgtggtggacgaaggagatgtggtggaagtgactggccacgcccacgtgctcttggctgcctttgaaaagcacatggacggcagcttctctgtgaagcctttaaagcagaagcaaattgtggaccgggtcagctacctcctgcaggagatctatggcattgagaacaagaacaaccaggagaccaagccctcggacgacgagaacagcgacaacagcaacgagtgtgtggtgtgcctgtccgacctgcgggacacgctgatcctgccctgccgccacctgtgcctctgtacctcctgcgccgacacgctgcgctaccaggccaacaactgccccatctgccggctgcctttccgggccctcctgcagatccgggcggtgcggaagaagccaggagccctgtcccccgtgtccttcagccccgtcctggcccagagcctggagcatgatgagcactcttgtccctttaaaaaatcaaagccgcaccccgcctccctggccagcaagaaacctaaaagggaaacaaactctgacagcgtcccacctggctacgagcccatctcgctgctcgaggcgctcaacggcctccgggctgtctccccggccatcccctcggcccctctttatgaagaaatcacctattcaggcatctcggacggcctgtcccaggccagctgtcccctcgcggctatcgaccacatcctggacagcagccgccagaagggcaggccgcagagcaaggcccccgacagcaccctacggtccccgtcttcccccatccacgaagaggatgaggagaagctctccgaggacgtggacgcccctcccccactgggtggcgcagagctggccctgcgggaaagcagctcccctgagagtttcataacagaagaggttgatgagtcgtcgtcaccacagcaagggacccgagcagcttccattgagaatgtcctgcaggacagcagccccgagcactgtggccgaggcccacctgctgacatctacctgccaggacggcccacctccatggagacggcccacggcctcgccaccaccagccccacctggcctccacttggtggccccagccccgatcccagcgccgccgagctgaccccactctgagagcctggccgagctggcagcatggagccctcggctccccagactttgccgaggggctgctccggaccccgttgtgagccggcctcctgtctgcatgccccctgtggccaccaggctccgaggggccgtggtgactcttgatcaaagagcacagtgaactgtcccttctgagtctcccttttctacagttgatatatttgtaactggtacaagatgaaggacagcagctttccatccctagttcagagcccccgttccccagggtcctgtgggctgagcggctggggctggggctgcccacgtgtggcctccgctggctctgcctgctcctgcaacagtgcggtccctgcccggagaactcaggaggcctgcagaagagaactgattggtggtcgaagcaccatcttcacagatgttcaggggcagtggggggctccaggcacggtcaatgaaggaaacagtgcctgtccacccaccctgcgtgtcactgtggcggcctggctgtcgctgctttttgtcctctgccgtgtttgcgcggcctcagtgccctccctggtgcgtctgcgctggggccctcagtgctcggggccttggggtgcatgggtgccgccctgggcagctagagtgtctcagcccggtgctgggcctggccgaggggcggaggcacagctgcttccagcagccagcattcagtggccttgtcaccaagctccacacctcctcctggtgctggctttggtgacatcacaaggcccctccaggtgcaggggcttctgtttggcaggcccctgccagggaggacctggtggcctcctcattctcttttgccattggaatgtccccttgcagttctcttctctttttttttttttttgagatggagtttcactcttgctgcccaggctggagtgcagtggctcaatctcgggtcactgcaacctccgcctcccgggttcaagtgatcgtcctgccttaggctcctgagtagctggggattacaggtgcctaccagcatgctcggctaatttttttgtatttttagtagagaagggatttcaccatgttggccgggctggtctcaaactcctaaggtcatccacctgcctcggcctcccagagtgctgagattacaggcgtgagcctccgcgcccggcccccttgcagttctctctgatttggtttgttctgtctcaggcttctgtggcaggactggcccagggaggaggaagccagcagcacacctggggaatggggtcccggccgggaggcttggcctctgggcgacctcgtcctgttttttttgtttgtttgtttgtttttttaaaggtaaacctcctgggccgcagatggcaaagggagtgcctgggcctggtgacccagggctggatccacccctgcggagccctgggccaggcaggtgtctgctgctcacctggctctggagggctgccctgcagctgggcctggggacaggtcggctgtggggcagctcagtaccctccctgaggctcacggtggctccgagcatgaggtccgcctcctgggcgagacccagcagtggacagcatggtcctcacacccagctccctgcacacccaggccagccacccctcccgctcgtgcacaggcacgcagatgcgctcacacgtacacacacacaaatgcacgcccacttgcacatgctcacgcacatgttcacacatgcacactcacgctcacacatgctgtcacgcatacacacacgcacatactcctgcacatgttcccatgcatgtgtgtgcactcggaccgagcatctcccacgcacctctaccccaccccaagcacctctctccccccatgcacctctccccaacaacacacacagccccctgcaccgcccgccccccgcccccaccaaggccccagcctctggccatcagtcctggtgccagagctttgcgtgaagttcgggccgcagagtggcccgctgggactcccatgtgctgccgtctgatgtgctcagatgggctcatcgttggttcgtttttactgtatatttatagtaataaaatcatgcagcaata

SEQ ID NO: 16785 - DNA, 6470 bp, Homo sapiens
  source 1..6470: mol_type = unassigned DNA
tgggggctcgaggcgcctccgcggccgtggacgagcgtccgtgcggcctggtccgggccatgtccgcgtgaggaccccgccgctgtcgccgctcccgttccggccctggcccctctgcccggcagcgccgcgcaccatgggctccattctcagccgccgcatcgcgggggtggaggacatcgacatccaggcgaactcggcctatcgctaccctccgaagtccggaaactactttgcttcgcactttttcatgggaggagagaaattcgacaccccccaccctgaaggttacctctttggagagaacatggatctgaacttcctgggcagccgcccggtccagtttccctacgtcactcctgccccccacgagcccgtgaagacgctgcggagcctggtgaacatccgcaaagactccctgcggctggtgaggtacaaagacgatgccgacagccccaccgaggacggcgacaagccccgggtgctctacagcctggagttcaccttcgacgccgatgcccgcgtggccatcaccatctactgccaggcatcggaggagttcctgaacggcagggcagtatacagccccaagagcccctcgctacagtccgagaccgtccactacaagagaggggtgagccagcagttctccctgccctccttcaagattgacttctcggaatggaaggatgacgagctgaactttgacctggaccggggcgtgtttccagtagtcatccaggctgtggtggacgaaggagatgtggtggaagtgactggccacgcccacgtgctcttggctgcctttgaaaagcacatggacggcagcttctctgtgaagcctttaaagcagaagcaaattgtggaccgggtcagctacctcctgcaggagatctatggcattgagaacaagaacaaccaggagaccaagccctcggacgacgagaacagcgacaacagcaacgagtgtgtggtgtgcctgtccgacctgcgggacacgctgatcctgccctgccgccacctgtgcctctgtacctcctgcgccgacacgctgcgctaccaggccaacaactgccccatctgccggctgcctttccgggccctcctgcagatccgggcggtgcggaagaagccaggagccctgtcccccgtgtccttcagccccgtcctggcccagagcctggagcatgatgagcactcttgtccctttaaaaaatcaaagccgcaccccgcctccctggccagcaagaaacctaaaagggaaacaaactctgacagcgtcccacctggctacgagcccatctcgctgctcgaggcgctcaacggcctccgggctgtctccccggccatcccctcggcccctctttatgaagaaatcacctattcaggcatctcggacggcctgtcccaggccagctgtcccctcgcggctatcgaccacatcctggacagcagccgccagaagggcaggccgcagagcaaggcccccgacagcaccctacggtccccgtcttcccccatccacgaagaggatgaggagaagctctccgaggacgtggacgcccctcccccactgggtggcgcagagctggccctgcgggaaagcagctcccctgagagtttcataacagaagaggttgatgagtcgtcgtcaccacagcaagggacccgagcagcttccattgagaatgtcctgcaggacagcagccccgagcactgtggccgaggcccacctgctgacatctacctgccagccctggggcccgactcctgctctgttggtatagacgagtaagccggtacgtgacctcccagacgcgcttcgggggctctgacgcgcgtccttggagagaggagccctcccctgctctctggcgggggttccttctggtttttgggtcttcgtccgcatccgcatcttcccaggggccctggattccgaatccagagctctccagtggctgctgcaccttcccccagaaagtggcctcctggggggtcctgactttcggggccagaggtctctccatctggactaggcggccggtcaggctcttcttccagccttgaggggccctggaacagtcccagcccaggcagggagacagacacagcccaggtgcgccagagccactgtccactgcgggaggcaggagcttgagggatgagggcagcaccgtggagggaaccccagggagacatggggtgagcgtcccaaggggagaggcctgggcctggccttgttccggatggtcccaccatgagttcgcatcggtcctgcagcagacacgttaggacgctcagcaggtccactcccgtgttccggtcgtggctttaacaattcatggggaaagaatgcgccccgattgggagagcccctggatcacgtcttcccaagctcagtccctgtctcttggagggagtccgtcctcgaggggccctctggtgcccaggggagagtatcttgcgtcctgtcctgagggcgtccgctcacacagccacctgctcccccgctccctccttcccttgtcagcatggccaccgtgggcctggcatcaccatgggcctggcacacagtccctcgtgggctgcctttgtgccatgagcccactgctgccgactcacctgtccctcccagtactggaaccttctggaacaccagcactaaaagataggaggccctgtgaggttggcatcccccatcccccccaagaggcgccctctaccagggtggcccaggtgagtgttttacagaaggcggctctgtccaggcagtggttcgcacctataagcccggtactttgggagaccgaggggatagatcacttgagcccaggaattcaagatcagtgtagaaaacatagaccccctctctatgaaaaataaaaaattggcttgggcgtggtagcttgtgcctgtggtcccagctactcaggggtgctgaggtgggaggattgccggagctggggaggtcaaggcccactccagcctgagacgctgtctcaataaaaaaaaatacacacacacccacccacccactccagcctgagaccctgtctcaagaaaaaaaaaatacacacacacacacacacacacacacacacgggggagagagagaaggcagctccaggagtgccaccaaaatgtaggcagacggattggggaccctctgccttcccagagggtcttggcacacaagctgcgtgcagctctggtctgccgaggcccatgcagcctgctgggaggtgcctggccgggggtgcaggctctaagaggccctttccccttgggtggacttgagccgggtcagggagaacttcgcttcttttgactgcgctctgcattcccatgaacctctgtcttcttgagcccagcgagtccctctgttgacccctgtcctgagccattatacccctagattgaaacagtcagcacctttcagacggccccggcctgcgcatcggtggaaggtgccgtgcgaatgtcacgattcaggtcaagcttccggagctggggagtgcaggtgtgatctagaacagggctcacagcctcggaaacctgctctcgccgcggcccccgaagaaaatagacgcccttcaccggagagtggggcctgggccgtgtctgctgggagccatgtgtcagggctggtggctgggtgtcaggcagccctgaggccatgctggccccgtcccaggctctgcaccagcaccattgcccaagccccagggacgccagacccatctggggacagcgcccggcggcgtcgtgcaggccacagtctgggcattggggctctgtgggaggctcctctctttgccttgcagtagccatccgggggctactctgagcacgggcttgttctcacccagggccgctccccacccctgcaccctgggttgaccgagttccaccctaacccagccgtaagaaccttggcaggacagtggctggccacatcccaggaaaccggaaccagggcaagggcaggaggcccagagggcatccaccgcggtgccgtgtcgcgctctgactcggggctgcagatctgctgtgggtgtccggggatctgggatcgtctgtcccaagagggacacagcgtatttggcacagttagggagtccccgggcccttggtgtgctcacatctgagtgaatgctgttgtggccacaggcggcgggagtgggggtgctggatggcccagcccctctggggctccagatcggtaggagcgggtggcgtggcaccaggcatccgagtgtgaccctcctccctctgctcccacctgcaggacggcccacctccatggagacggcccacggcctcgccaccaccagccccacctggcctccacttggtggccccagccccgatcccagcgccgccgagctgaccccactctgagagcctggccgagctggcagcatggagccctcggctccccagactttgccgaggggctgctccggaccccgttgtgagccggcctcctgtctgcatgccccctgtggccaccaggctccgaggggccgtggtgactcttgatcaaagagcacagtgaactgtcccttctgagtctcccttttctacagttgatatatttgtaactggtacaagatgaaggacagcagctttccatccctagttcagagcccccgttccccagggtcctgtgggctgagcggctggggctggggctgcccacgtgtggcctccgctggctctgcctgctcctgcaacagtgcggtccctgcccggagaactcaggaggcctgcagaagagaactgattggtggtcgaagcaccatcttcacagatgttcaggggcagtggggggctccaggcacggtcaatgaaggaaacagtgcctgtccacccaccctgcgtgtcactgtggcggcctggctgtcgctgctttttgtcctctgccgtgtttgcgcggcctcagtgccctccctggtgcgtctgcgctggggccctcagtgctcggggccttggggtgcatgggtgccgccctgggcagctagagtgtctcagcccggtgctgggcctggccgaggggcggaggcacagctgcttccagcagccagcattcagtggccttgtcaccaagctccacacctcctcctggtgctggctttggtgacatcacaaggcccctccaggtgcaggggcttctgtttggcaggcccctgccagggaggacctggtggcctcctcattctcttttgccattggaatgtccccttgcagttctcttctctttttttttttttttgagatggagtttcactcttgctgcccaggctggagtgcagtggctcaatctcgggtcactgcaacctccgcctcccgggttcaagtgatcgtcctgccttaggctcctgagtagctggggattacaggtgcctaccagcatgctcggctaatttttttgtatttttagtagagaagggatttcaccatgttggccgggctggtctcaaactcctaaggtcatccacctgcctcggcctcccagagtgctgagattacaggcgtgagcctccgcgcccggcccccttgcagttctctctgatttggtttgttctgtctcaggcttctgtggcaggactggcccagggaggaggaagccagcagcacacctggggaatggggtcccggccgggaggcttggcctctgggcgacctcgtcctgttttttttgtttgtttgtttgtttttttaaaggtaaacctcctgggccgcagatggcaaagggagtgcctgggcctggtgacccagggctggatccacccctgcggagccctgggccaggcaggtgtctgctgctcacctggctctggagggctgccctgcagctgggcctggggacaggtcggctgtggggcagctcagtaccctccctgaggctcacggtggctccgagcatgaggtccgcctcctgggcgagacccagcagtggacagcatggtcctcacacccagctccctgcacacccaggccagccacccctcccgctcgtgcacaggcacgcagatgcgctcacacgtacacacacacaaatgcacgcccacttgcacatgctcacgcacatgttcacacatgcacactcacgctcacacatgctgtcacgcatacacacacgcacatactcctgcacatgttcccatgcatgtgtgtgcactcggaccgagcatctcccacgcacctctaccccaccccaagcacctctctccccccatgcacctctccccaacaacacacacagccccctgcaccgcccgccccccgcccccaccaaggccccagcctctggccatcagtcctggtgccagagctttgcgtgaagttcgggccgcagagtggcccgctgggactcccatgtgctgccgtctgatgtgctcagatgggctcatcgttggttcgtttttactgtatatttatagtaataaaatcatgcagcaata

SEQ ID NO: 16786 - DNA, 6407 bp, Homo sapiens
  source 1..6407: mol_type = unassigned DNA
tgggggctcgaggcgcctccgcggccgtggacgagcgtccgtgcggcctggtccgggccatgtccgcgtgaggaccccgccgctgtcgccgctcccgttccggccctggcccctctgcccggcagcgccgcgcaccatgggctccattctcagccgccgcatcgcgggggtggaggacatcgacatccaggcgaactcggcctatcgctaccctccgaagtccggaaactactttgcttcgcactttttcatgggaggagagaaattcgacaccccccaccctgaaggttacctctttggagagaacatggatctgaacttcctgggcagccgcccggtccagtttccctacgtcactcctgccccccacgagcccgtgaagacgctgcggagcctggtgaacatccgcaaagactccctgcggctggtgaggtacaaagacgatgccgacagccccaccgaggacggcgacaagccccgggtgctctacagcctggagttcaccttcgacgccgatgcccgcgtggccatcaccatctactgccaggcatcggaggagttcctgaacggcagggcagtatacagccccaagagcccctcgctacagtccgagaccgtccactacaagagaggggtgagccagcagttctccctgccctccttcaagattgacttctcggaatggaaggatgacgagctgaactttgacctggaccggggcgtgtttccagtagtcatccaggctgtggtggacgaaggagatgcagtggtggaagtgactggccacgcccacgtgctcttggctgcctttgaaaagcacatggacggcagcttctctgtgaagcctttaaagcagaagcaaattgtggaccgggtcagctacctcctgcaggagatctatggcattgagaacaagaacaaccaggagaccaagccctcggacgacgagaacagcgacaacagcaacgagtgtgtggtgtgcctgtccgacctgcgggacacgctgatcctgccctgccgccacctgtgcctctgtacctcctgcgccgacacgctgcgctaccaggccaacaactgccccatctgccggctgcctttccgggccctcctgcagatccgggcggtgcggaagaagccaggagccctgtcccccgtgtccttcagccccgtcctggcccagagcctggagcatgatgagcactctaactctgacagcgtcccacctggctacgagcccatctcgctgctcgaggcgctcaacggcctccgggctgtctccccggccatcccctcggcccctctttatgaagaaatcacctattcaggcatctcggacggcctgtcccaggccagctgtcccctcgcggctatcgaccacatcctggacagcagccgccagaagggcaggccgcagagcaaggcccccgacagcaccctacggtccccgtcttcccccatccacgaagaggatgaggagaagctctccgaggacgtggacgcccctcccccactgggtggcgcagagctggccctgcgggaaagcagctcccctgagagtttcataacagaagaggttgatgagtcgtcgtcaccacagcaagggacccgagcagcttccattgagaatgtcctgcaggacagcagccccgagcactgtggccgaggcccacctgctgacatctacctgccagccctggggcccgactcctgctctgttggtatagacgagtaagccggtacgtgacctcccagacgcgcttcgggggctctgacgcgcgtccttggagagaggagccctcccctgctctctggcgggggttccttctggtttttgggtcttcgtccgcatccgcatcttcccaggggccctggattccgaatccagagctctccagtggctgctgcaccttcccccagaaagtggcctcctggggggtcctgactttcggggccagaggtctctccatctggactaggcggccggtcaggctcttcttccagccttgaggggccctggaacagtcccagcccaggcagggagacagacacagcccaggtgcgccagagccactgtccactgcgggaggcaggagcttgagggatgagggcagcaccgtggagggaaccccagggagacatggggtgagcgtcccaaggggagaggcctgggcctggccttgttccggatggtcccaccatgagttcgcatcggtcctgcagcagacacgttaggacgctcagcaggtccactcccgtgttccggtcgtggctttaacaattcatggggaaagaatgcgccccgattgggagagcccctggatcacgtcttcccaagctcagtccctgtctcttggagggagtccgtcctcgaggggccctctggtgcccaggggagagtatcttgcgtcctgtcctgagggcgtccgctcacacagccacctgctcccccgctccctccttcccttgtcagcatggccaccgtgggcctggcatcaccatgggcctggcacacagtccctcgtgggctgcctttgtgccatgagcccactgctgccgactcacctgtccctcccagtactggaaccttctggaacaccagcactaaaagataggaggccctgtgaggttggcatcccccatcccccccaagaggcgccctctaccagggtggcccaggtgagtgttttacagaaggcggctctgtccaggcagtggttcgcacctataagcccggtactttgggagaccgaggggatagatcacttgagcccaggaattcaagatcagtgtagaaaacatagaccccctctctatgaaaaataaaaaattggcttgggcgtggtagcttgtgcctgtggtcccagctactcaggggtgctgaggtgggaggattgccggagctggggaggtcaaggcccactccagcctgagacgctgtctcaataaaaaaaaatacacacacacccacccacccactccagcctgagaccctgtctcaagaaaaaaaaaatacacacacacacacacacacacacacacacgggggagagagagaaggcagctccaggagtgccaccaaaatgtaggcagacggattggggaccctctgccttcccagagggtcttggcacacaagctgcgtgcagctctggtctgccgaggcccatgcagcctgctgggaggtgcctggccgggggtgcaggctctaagaggccctttccccttgggtggacttgagccgggtcagggagaacttcgcttcttttgactgcgctctgcattcccatgaacctctgtcttcttgagcccagcgagtccctctgttgacccctgtcctgagccattatacccctagattgaaacagtcagcacctttcagacggccccggcctgcgcatcggtggaaggtgccgtgcgaatgtcacgattcaggtcaagcttccggagctggggagtgcaggtgtgatctagaacagggctcacagcctcggaaacctgctctcgccgcggcccccgaagaaaatagacgcccttcaccggagagtggggcctgggccgtgtctgctgggagccatgtgtcagggctggtggctgggtgtcaggcagccctgaggccatgctggccccgtcccaggctctgcaccagcaccattgcccaagccccagggacgccagacccatctggggacagcgcccggcggcgtcgtgcaggccacagtctgggcattggggctctgtgggaggctcctctctttgccttgcagtagccatccgggggctactctgagcacgggcttgttctcacccagggccgctccccacccctgcaccctgggttgaccgagttccaccctaacccagccgtaagaaccttggcaggacagtggctggccacatcccaggaaaccggaaccagggcaagggcaggaggcccagagggcatccaccgcggtgccgtgtcgcgctctgactcggggctgcagatctgctgtgggtgtccggggatctgggatcgtctgtcccaagagggacacagcgtatttggcacagttagggagtccccgggcccttggtgtgctcacatctgagtgaatgctgttgtggccacaggcggcgggagtgggggtgctggatggcccagcccctctggggctccagatcggtaggagcgggtggcgtggcaccaggcatccgagtgtgaccctcctccctctgctcccacctgcaggacggcccacctccatggagacggcccacggcctcgccaccaccagccccacctggcctccacttggtggccccagccccgatcccagcgccgccgagctgaccccactctgagagcctggccgagctggcagcatggagccctcggctccccagactttgccgaggggctgctccggaccccgttgtgagccggcctcctgtctgcatgccccctgtggccaccaggctccgaggggccgtggtgactcttgatcaaagagcacagtgaactgtcccttctgagtctcccttttctacagttgatatatttgtaactggtacaagatgaaggacagcagctttccatccctagttcagagcccccgttccccagggtcctgtgggctgagcggctggggctggggctgcccacgtgtggcctccgctggctctgcctgctcctgcaacagtgcggtccctgcccggagaactcaggaggcctgcagaagagaactgattggtggtcgaagcaccatcttcacagatgttcaggggcagtggggggctccaggcacggtcaatgaaggaaacagtgcctgtccacccaccctgcgtgtcactgtggcggcctggctgtcgctgctttttgtcctctgccgtgtttgcgcggcctcagtgccctccctggtgcgtctgcgctggggccctcagtgctcggggccttggggtgcatgggtgccgccctgggcagctagagtgtctcagcccggtgctgggcctggccgaggggcggaggcacagctgcttccagcagccagcattcagtggccttgtcaccaagctccacacctcctcctggtgctggctttggtgacatcacaaggcccctccaggtgcaggggcttctgtttggcaggcccctgccagggaggacctggtggcctcctcattctcttttgccattggaatgtccccttgcagttctcttctctttttttttttttttgagatggagtttcactcttgctgcccaggctggagtgcagtggctcaatctcgggtcactgcaacctccgcctcccgggttcaagtgatcgtcctgccttaggctcctgagtagctggggattacaggtgcctaccagcatgctcggctaatttttttgtatttttagtagagaagggatttcaccatgttggccgggctggtctcaaactcctaaggtcatccacctgcctcggcctcccagagtgctgagattacaggcgtgagcctccgcgcccggcccccttgcagttctctctgatttggtttgttctgtctcaggcttctgtggcaggactggcccagggaggaggaagccagcagcacacctggggaatggggtcccggccgggaggcttggcctctgggcgacctcgtcctgttttttttgtttgtttgtttgtttttttaaaggtaaacctcctgggccgcagatggcaaagggagtgcctgggcctggtgacccagggctggatccacccctgcggagccctgggccaggcaggtgtctgctgctcacctggctctggagggctgccctgcagctgggcctggggacaggtcggctgtggggcagctcagtaccctccctgaggctcacggtggctccgagcatgaggtccgcctcctgggcgagacccagcagtggacagcatggtcctcacacccagctccctgcacacccaggccagccacccctcccgctcgtgcacaggcacgcagatgcgctcacacgtacacacacacaaatgcacgcccacttgcacatgctcacgcacatgttcacacatgcacactcacgctcacacatgctgtcacgcatacacacacgcacatactcctgcacatgttcccatgcatgtgtgtgcactcggaccgagcatctcccacgcacctctaccccaccccaagcacctctctccccccatgcacctctccccaacaacacacacagccccctgcaccgcccgccccccgcccccaccaaggccccagcctctggccatcagtcctggtgccagagctttgcgtgaagttcgggccgcagagtggcccgctgggactcccatgtgctgccgtctgatgtgctcagatgggctcatcgttggttcgtttttactgtatatttatagtaataaaatcatgcagcaata

SEQ ID NO: 16787 - DNA, 1575 bp, Homo sapiens
  source 1..1575: mol_type = unassigned DNA
tccgcggccgtggacgagcgtccgtgcggcctggtccgggccatgtccgcgtgaggaccccgccgctgtcgccgctcccgttccggccctggcccctctgcccggcagcgccgcgcaccatgggctccattctcagccgccgcatcgcgggggtggaggacatcgacatccaggcgaactcggcctatcgctaccctccgaagtccggaaactactttgcttcgcactttttcatgggaggagagaaattcgacaccccccaccctgaaggttacctctttggagagaacatggatctgaacttcctgggcagccgcccggtccagtttccctacgtcactcctgccccccacgagcccgtgaagacgctgcggagcctggtgaacatccgcaaagactccctgcggctggtgaggtacaaagacgatgccgacagccccaccgaggacggcgacaagccccgggtgctctacagcctggagttcaccttcgacgccgatgcccgcgtggccatcaccatctactgccaggcatcggaggagttcctgaacggcagggcagtatacagccccaagagcccctcgctacagtccgagaccgtccactacaagagaggggtgagccagcagttctccctgccctccttcaagattgacttctcggaatggaaggatgacgagctgaactttgacctggaccggggcgtgtttccagtagtcatccaggctgtggtggacgaaggagatgtggtggaagtgactggccacgcccacgtgctcttggctgcctttgaaaagcacatggacggcagcttctctgtgaagcctttaaagcagaagcaaattgtggaccgggtcagctacctcctgcaggagatctatggcattgagaacaagaacaaccaggagaccaagccctcggacgacgagaacagcgacaacagcaacgagtgtgtggtgtgcctgtccgacctgcgggacacgctgatcctgccctgccgccacctgtgcctctgtacctcctgcgccgacacgctgcgctaccaggccaacaactgccccatctgccggctgcaactctgacagcgtcccacctggctacgagcccatctcgctgctcgaggcgctcaacggcctccgggctgtctccccggccatcccctcggcccctctttatgaagaaatcacctattcaggcatctcggacggcctgtcccaggccagctgtcccctcgcggctatcgaccacatcctggacagcagccgccagaagggcaggccgcagagcaaggcccccgacagcaccctacggtccccgtcttcccccatccacgaagaggatgaggagaagctctccgaggacgtggacgcccctcccccactgggtggcgcagagctggccctgcgggaaagcagctcccctgagagtttcataacagaagaggttgatgagtcgtcgtcaccacagcaagggacccgagcagcttccattgagaatgtcctgcaggacagcagccccgagcactgtggccgaggcccacctgctgacatctacctgccaggacggcccacctcc

SEQ ID NO: 16788 - DNA, 2173 bp, Homo sapiens
  source 1..2173: mol_type = unassigned DNA
gcgttcctcgtctgccagccggcttggctagcgcgcggcggccgtggctaaggctgctacgaagcgagcttgggaggagcagcggcctgcggggcagaggagcatcccgtctaccaggtcccaagcggcgtggcccgcgggtcatggccaaaggagaaggcgccgagagcggctccgcggcggggctgctacccaccagcatcctccaaagcactgaacgcccggcccaggtgaagaaagaaccgaaaaagaagaaacaacagttgtctgtttgcaacaagctttgctatgcacttgggggagccccctaccaggtgacgggctgtgccctgggtttcttccttcagatctacctattggatgtggctcagaaggatgaggaagttgtcttttgcttctcctcattccaggtgggccctttctctgcctccatcatcctgtttgtgggccgagcctgggatgccatcacagaccccctggtgggcctctgcatcagcaaatccccctggacctgcctgggtcgccttatgccctggatcatcttctccacgcccctggccgtcattgcctacttcctcatctggttcgtgcccgacttcccacacggccagacctattggtacctgcttttctattgcctctttgaaacaatggtcacgtgtttccatgttccctactcggctctcaccatgttcatcagcaccgagcagactgagcgggattctgccaccgcctatcggatgactgtggaagtgctgggcacagtgctgggcacggcgatccagggacaaatcgtgggccaagcagacacgccttgtttccaggacctcaatagctctacagtagcttcacaaagtgccaaccatacacatggcaccacctcacacagggaaacgcaaaaggcatacctgctggcagcgggggtcattgtctgtatctatataatctgtgctgtcatcctgatcctgggcgtgcgggagcagagagaaccctatgaagcccagcagtctgagccaatcgcctacttccggggcctacggctggtcatgagccacggcccatacatcaaacttattactggcttcctcttcacctccttggctttcatgctggtggaggggaactttgtcttgttttgcacctacaccttgggcttccgcaatgaattccagaatctactcctggccatcatgctctcggccactttaaccattcccatctggcagtggttcttgacccggtttggcaagaagacagctgtatatgttgggatctcatcagcagtgccatttctcatcttggtggccctcatggagagtaacctcatcattacatatgcggtagctgtggcagctggcatcagtgtggcagctgccttcttactaccctggtccatgctgcctgatgtcattgacgacttccatctgaagcagccccacttccatggaaccgagcccatcttcttctccttctatgtcttcttcaccaagtttgcctctggagtgtcactgggcatttctaccctcagtctggactttgcagggtaccagacccgtggctgctcgcagccggaacgtgtcaagtttacactgaacatgctcgtgaccatggctcccatagttctcatcctgctgggcctgctgctcttcaaaatgtaccccattgatgaggagaggcggcggcagaataagaaggccctgcaggcactgagggacgaggccagcagctctggctgctcagaaacagactccacagagctggctagcatcctctagggcccgccacgttgcccgaagccaccatgcagaaggccacagaagggatcaggacctgtctgccggcttgctgagcagctggactgcaggtgctaggaagggaactgaagactcaaggaggtggcccaggacacttgctgtgctcactgtggggccggctgctctgtggcctcctgcctcccctctgcctgcctgtggggccaagccctggggctgccactgtgaatatgccaaggactgatcgggcctagcccggaacactaatgtagaaacctttttttttacagagcctaattaataacttaatgactgtgtacatagcaatgtgtgtgtatgtatatgtctgtgagctattaatgttattaattttcataaaagctggaaagcagctgcctgtt

SEQ ID NO: 16789 - DNA, 2154 bp, Homo sapiens
  source 1..2154: mol_type = unassigned DNA
gagggggcgtgcagcagagtgcgttcctcgtctgccagccggcttggctagcgcgcggcggccgtggctaaggctgctacgaagcgagcttgggaggagcagcggcctgcggggcagaggagcatcccgtctaccaggtcccaagcggcgtggcccgcgggtcatggccaaaggagaaggcgccgagagcggctccgcggcggggctgctacccaccagcatcctccaaagcactgaacgcccggcccaggtgaagaaagaaccgaaaaagaagaaacaacagttgtctgtttgcaacaagctttgctatgcacttgggggagccccctaccaggtgacgggctgtgccctgggtttcttccttcagatctacctattggatgtggctcaggtgggccctttctctgcctccatcatcctgtttgtgggccgagcctgggatgccatcacagaccccctggtgggcctctgcatcagcaaatccccctggacctgcctgggtcgccttatgccctggatcatcttctccacgcccctggccgtcattgcctacttcctcatctggttcgtgcccgacttcccacacggccagacctattggtacctgcttttctattgcctctttgaaacaatggtcacgtgtttccatgttccctactcggctctcaccatgttcatcagcaccgagcagactgagcgggattctgccaccgcctatcggatgactgtggaagtgctgggcacagtgctgggcacggcgatccagggacaaatcgtgggccaagcagacacgccttgtttccaggacctcaatagctctacagtagcttcacaaagtgccaaccatacacatggcaccacctcacacagggaaacgcaaaaggcatacctgctggcagcgggggtcattgtctgtatctatataatctgtgctgtcatcctgatcctgggcgtgcgggagcagagagaaccctatgaagcccagcagtctgagccaatcgcctacttccggggcctacggctggtcatgagccacggcccatacatcaaacttattactggcttcctcttcacctccttggctttcatgctggtggaggggaactttgtcttgttttgcacctacaccttgggcttccgcaatgaattccagaatctactcctggccatcatgctctcggccactttaaccattcccatctggcagtggttcttgacccggtttggcaagaagacagctgtatatgttgggatctcatcagcagtgccatttctcatcttggtggccctcatggagagtaacctcatcattacatatgcggtagctgtggcagctggcatcagtgtggcagctgccttcttactaccctggtccatgctgcctgatgtcattgacgacttccatctgaagcagccccacttccatggaaccgagcccatcttcttctccttctatgtcttcttcaccaagtttgcctctggagtgtcactgggcatttctaccctcagtctggactttgcagggtaccagacccgtggctgctcgcagccggaacgtgtcaagtttacactgaacatgctcgtgaccatggctcccatagttctcatcctgctgggcctgctgctcttcaaaatgtaccccattgatgaggagaggcggcggcagaataagaaggccctgcaggcactgagggacgaggccagcagctctggctgctcagaaacagactccacagagctggctagcatcctctagggcccgccacgttgcccgaagccaccatgcagaaggccacagaagggatcaggacctgtctgccggcttgctgagcagctggactgcaggtgctaggaagggaactgaagactcaaggaggtggcccaggacacttgctgtgctcactgtggggccggctgctctgtggcctcctgcctcccctctgcctgcctgtggggccaagccctggggctgccactgtgaatatgccaaggactgatcgggcctagcccggaacactaatgtagaaacctttttttttacagagcctaattaataacttaatgactgtgtacatagcaatgtgtgtgtatgtatatgtctgtgagctattaatgttattaattttcataaaagctggaaagcagctgcctgtt

SEQ ID NO: 16790 - DNA, 1514 bp, Homo sapiens
  source 1..1514: mol_type = unassigned DNA
agagtgcgttcctcgtctgccagccggcttggctagcgcgcggcggccgtggctaaggctgctacgaagcgagcttgggaggagcagcggcctgcggggcagaggagcatcccgtctaccaggtcccaagcggcgtggcccgcgggtcatggccaaaggagaaggcgccgagagcggctccgcggcggggctgctacccaccagcatcctccaaagcactgaacgcccggcccaggtgaaggatcatcttctccacgcccctggccgtcattgcctacttcctcatctggttcgtgcccgacttcccacacggccagacctattggtacctgcttttctattgcctctttgaaacaatggtcacgtgtttccatgttccctactcggctctcaccatgttcatcagcaccgagcagactgagcgggattctgccaccgcctatcggatgactgtggaagtgctgggcacagtgctgggcacggcgatccagggacaaatcgtgggccaagcagacacgccttgtttccaggacctcaatagctctacagtagcttcacaaagtgccaaccatacacatggcaccacctcacacagggaaacgcaaaaggcatacctgctggcagcgggggtcattgtctgtatctatataatctgtgctgtcatcctgatcctgggcgtgcgggagcagagagaaccctatgaagcccagcagtctgagccaatcgcctacttccggggcctacggctggtcatgagccacggcccatacatcaaacttattactggcttcctcttcacctccttggctttcatgctggtggaggggaactttgtcttgttttgcacctacaccttgggcttccgcaatgaattccagaatctactcctggccatcatgctctcggccactttaaccattcccatctggcagtggttcttgacccggtttggcaagaagacagctgtatatgttgggatctcatcagcagtgccatttctcatcttggtggccctcatggagagtaacctcatcattacatatgcggtagctgtggcagctggcatcagtgtggcagctgccttcttactaccctggtccatgctgcctgatgtcattgacgacttccatctgaagcagccccacttccatggaaccgagcccatcttcttctccttctatgtcttcttcaccaagtttgcctctggagtgtcactgggcatttctaccctcagtctggactttgcagggtaccagacccgtggctgctcgcagccggaacgtgtcaagtttacactgaacatgctcgtgaccatggctcccatagttctcatcctgctgggcctgctgctcttcaaaatgtaccccattgatgaggagaggcggcggcagaataagaaggccctgcaggcactgagggacgaggccagcagctctggctgctcagaaacagactccacagagctggctagcatcctctagggcccgccacgttgcccgaagccaccatgcaga

SEQ ID NO: 16791 - DNA, 946 bp, Homo sapiens
  source 1..946: mol_type = unassigned DNA
gagtgcgttcctcgtctgccagccggcttggctagcgcgcggcggccgtggctaaggctgctacgaagcgagcttgggaggagcagcggcctgcggggcagaggagcatcccgtctaccaggtcccaagcggcgtggcccgcgggtcatggccaaaggagaaggcgccgagagcggctccgcggcggggctgctacccaccagcatcctccaaagcactgaacgcccggcccagaaagaaccgaaaaagaagaaacaacagttgtctgtttgcaacaagctttgctatgcacttgggggagccccctaccaggtgacgggctgtgccctgggtttcttccttcagatctacctattggatgtggctcaggtgggccctttctctgcctccatcatcctgtttgtgggccgagcctgggatgccatcacagaccccctggtgggcctctgcatcagcaaatccccctggacctgcctgggtcgccttatgccctggatcatcttctccacgcccctggccgtcattgcctacttcctcatctggttcgtgcccgacttcccacacggccagacctattggtacctgcttttctattgcctctttgaaacaatggtcacgtgtttccatgttccctactcggctctcaccatgttcatcagcaccgagcagactgagcgggattctgccaccgcctatcggatgactgtggaagtgctgggcacagtgctgggcacggcgatccagggacaaatcgtgggccaagcagacacgccttgtttccaggacctcaatagctctacagtagcttcacaaagtgccaaccatacacatggcaccacctcacacagggaaacgcaaaaggcatacctgctggcagcgggggtcattgtctgtatctatataatctgtgctgtcatcctgatcctgggcgtgcgggagcagagag

SEQ ID NO: 16792 - DNA, 4608 bp, Homo sapiens
  source 1..4608: mol_type = unassigned DNA
cttaatttcctgcaagatgaagttctgtgtttacatgttatgattttcattactaagccatcttttaaattttactttacagatcaacagtacaaattctgaagtttgtaaacttgctgatggtggtggtaagccatggcagatgataaagttgctatcttaacggatgatgaagaggaacagaagagaaagtatgtgcttgcagatccctttaatggtatttccagggaaccagaaccaccttcgaatgaaacaccttcctccacagaaacatctgctattcctgaggaggaaatagactggatagagaaacattgtgttaagataaacaacgatcttctaatttccaaggtcttttattttttcttttactctgcctatggctctctctatccccttttgcctgtgtattacaaacagctgggaatgtctccaagccagagtggactactagtaggtattcgttacttcattgaattctgcagtgcccccttttggggtgtagttgcagaccgctttaaaaaaggcaaaattgtcctcctcttttctcttttgtgttgggttttattcaacctgggcattggatttgtcaaacctgctaccttgagatgtgtaccaaagattcgcccaacaactcaccccaccaatgcaagtcaccagttaactatcctgccaacaaattcttcctttacctctttcctcaccatatcaccaaaaatgcgtgagaaaagaaaccttttggaaacaaggctcaatgtctcagacaccgttactttgccaacagctccaaacatgaacagtgaacccactctgcagccccagacaggtgaaattactaaccgtatgatggacttgactttgaactcaagcacagcaacccctgtctccccaggaagcgtaaccaaggagacaaccactgttattgttaccaccaccaaatctttaccttctgaccaagtcatgcttgtttatgatcaacaagaagttgaagctatattcttggtgatcttggtagttgtcataataggagaatttttcagtgcctcttctgtcacaatcgtagacacggtcacactccagtatctgggaaaacacagagatcgctatgggttgcagcgcatgtggggctccctgggctggggcctggcgatgctgtctgtgggcatcgggatcgactacacccacatcgaagtgctcatcgatggaaaggggtgtaagccccccgagtacaggaattaccagatcgtcttcatcgtcttcggcgttctcatgaccatggccttgatcgttgccactcagttccggttccgctacaaccatttcaaaaacgatgattctaaagggaaagaggtggagatcccgcaggtggaaaggaacaactctacagagtcctctgaggagacaccaaccaccacaagccactcgcaggccttcaacttttgggacttaatcaagctgctctgcagcgtgcagtatggctcagtgctgtttgtggcttggttcatgggttttggatatggcttcgtgttcacctttctctactggcatttggaagacctcaatggaactacaaccctctttggggtctgttcagtcctgagtcatgtgtctgagctgacagcatatttttttagtcacaagcttattgaattgatcggccacatcagggttctgtacattggcctggcctgcaatacggctcgctatatttatatttcctacctggagaatgcctggactgttctccccatggaagttcttcaaggagtgacacacgcggccatctgggcagcatgcatttcttacctcagtgcagccgttccccctgagctgaggacatctgctcagggcatcctgcagggccttcacctgggtttgggaagaggatgtggtgccatgatcggaggcgtgttagtcaattattttggggctgctgcaaccttccgaggaattggcatggcctgcttggtgatcctactgctctttgccctgatccagtggctggcagtgccagatgaggaagaagacaagacaatgttggcagaaagaattcctgttccctccagtcccgttcctatagcaaccatcgacttggtacagcaacagacagaagatgtcatgccacgcattgagcccagacttccacccaagaaaactaagcaccaggaagaacaggaagatgtgaacaaaccagcctggggagtcagctcttctccctgggtgacctttgtctatgcactctaccaaattaaagagatgatgcaactcacaagagacaaccgtgcttctgagatacagcctttacaggggaccaatgagaatagggaaaattctcctgctggtagagcccagcctgtcccatgtgagactcactctgacccatctagaaaccagccatcccctgacgcagcagcatctcagacgcagaccagccccgctcaccccagtgtggacccgtgcacagaggagagtgaagagcagcaggctcagctggccgcgggaggacactgagggcatcctgctcatctcacaccctgcatggaatcaggctcctcagccaggacacagggtgaggccccccagccaggatatgcctcccctggaggagcacagcactgcatatgcttctaaatatctaaactcattaacatggaaacacacacacaggagctacagtacatattggcaggaaaaggtaaactttcgtaatctcattggaattacaacagggaaatggagttcaatgaggactttcagttctttgcttggttaggttaaggatgatagaatttctctgccagtgcagtaagagttgaaaccggcagttacactaagtaagtggagggaatgaaagtgtttcgaggtgaatgtggatataatttccctcttctgattatttattcttatttggttcctaacacaaactgggaagagatagaattcatctatactttcttttttcttggagagaaccgtttaaaaaattacaagatatatttaaaaagtaaccagataaaagtagcacatgtgcttttgttaaaaataaagttaaaagttaaagttaaaaaatgaagttaaaagtttcatcagaaactttacatatctttagcaaatatatttttatatgtgtatggcatataatggaaataattctttgagcaacagaagctattattaactactgcaagctaagccgagcttaaaaatgccttttgttttaaatgggctttgagaaaaaaaacagaaacaagcgattatttcaaatcaaccaaccaactcagtatcctgtgttttgatagacaagagtttactaaatatattgatactgtaaatagcctctctcgctatttactatcttatagtaattcaggctctaattagctgagggaatgaaacacacaaaaatcactgaattcctaagagttccttaaataagcagtactagttacaaatcacagtataagatttaagtgcctgggggaaggatacaatttttagaaattacatattgggtcagttttgttttgtttttggtgaggaaaaggtggtaaataggaaaccatgaatgggaaggatggcaataagtagcaactatactttccaatgactaaagaaagaaaatctcagtatattcgttctcatgaagacacagtcagacactggacaatgtaatgtatgcaactgcaaacgttacaactgcagccagaacaatggctgggtggatcgcacgtaaagcttgccactaaaaatcaaagcagaggttaacaggaaacctggggggagtgtggaaaagggaaaactgttttagctgaataaaggtgaattatataatttataatagctgtggatgagcacaggagagagaggaaagaaaagaacagtcgaaatgagcaactcaccttaccctctgaccctgattagacaggatcaattgtaaagtgagggcttctccatgacaccatagttctgcccaatactgcatttgggataagaaattctacacttggatgtctcgcttcacaataaaacacagcttaaaaataaaataactgaaagaaatagaattcagcaaatagttattttttgcacttgaactgaaacgtactgtactgtaaattatgactcattttaagtgacctttaaaatcagatgtatttattatgcttgtgtaattatagaaataaagaaatgggtgacaggcttaacctcacctatgaatgtacagtatgtggatttgtgaaactgactgtaggaagtcaaaaacttgtactgtatcttgtgtttacagttctgatttattcctttgaaaagcctgctgttttggaaatgcacagttgacatgttgaaataaaaatgaataccatttttaaatgtttcttaaatgataaagatgtgaccaaacaaaagtcctatactctaatgaatgagaccaaattcaacatgcctttgttatggaacatttactgtgacagcagaatcgataatgcagtcatttccagccttgtgagctgacaccttcatgggtttgtggactttgtgactttttcttcctgtccccaaagtgccatatgctaccttaaaaaatattaaagtgaattcaaattacat

SEQ ID NO: 16793 - DNA, 4797 bp, Homo sapiens
  source 1..4797: mol_type = unassigned DNA
gtcgcagccccggaggagcgcgcgagcagcccgggatggtgcgcgctgccccgacagccgccgccccggcgccccgagccgccgccccgtgctccggggacagggctccccgcgccccgcgcagctgagcgctgccgccgccgcagcagacaggatctctctcagttacccaggccggagtgcagtggcgtgatcctagctcactgcagccttgaacccctgggctcaagtgattctcctgccttggcctcctgaatagctagaactacagatcaacagtacaaattctgaagtttgtaaacttgctgatggtggtggtaagccatggcagatgataaagttgctatcttaacggatgatgaagaggaacagaagagaaagtatgtgcttgcagatccctttaatggtatttccagggaaccagaaccaccttcgaatgaaacaccttcctccacagaaacatctgctattcctgaggaggaaatagactggatagagaaacattgtgttaagataaacaacgatcttctaatttccaaggtcttttattttttcttttactctgcctatggctctctctatccccttttgcctgtgtattacaaacagctgggaatgtctccaagccagagtggactactagtaggtattcgttacttcattgaattctgcagtgcccccttttggggtgtagttgcagaccgctttaaaaaaggcaaaattgtcctcctcttttctcttttgtgttgggttttattcaacctgggcattggatttgtcaaacctgctaccttgagatgtgtaccaaagattcgcccaacaactcaccccaccaatgcaagtcaccagttaactatcctgccaacaaattcttcctttacctctttcctcaccatatcaccaaaaatgcgtgagaaaagaaaccttttggaaacaaggctcaatgtctcagacaccgttactttgccaacagctccaaacatgaacagtgaacccactctgcagccccagacaggtgaaattactaaccgtatgatggacttgactttgaactcaagcacagcaacccctgtctccccaggaagcgtaaccaaggagacaaccactgttattgttaccaccaccaaatctttaccttctgaccaagtcatgcttgtttatgatcaacaagaagttgaagctatattcttggtgatcttggtagttgtcataataggagaatttttcagtgcctcttctgtcacaatcgtagacacggtcacactccagtatctgggaaaacacagagatcgctatgggttgcagcgcatgtggggctccctgggctggggcctggcgatgctgtctgtgggcatcgggatcgactacacccacatcgaagtgctcatcgatggaaaggggtgtaagccccccgagtacaggaattaccagatcgtcttcatcgtcttcggcgttctcatgaccatggccttgatcgttgccactcagttccggttccgctacaaccatttcaaaaacgatgattctaaagggaaagaggtggagatcccgcaggtggaaaggaacaactctacagagtcctctgaggagacaccaaccaccacaagccactcgcaggccttcaacttttgggacttaatcaagctgctctgcagcgtgcagtatggctcagtgctgtttgtggcttggttcatgggttttggatatggcttcgtgttcacctttctctactggcatttggaagacctcaatggaactacaaccctctttggggtctgttcagtcctgagtcatgtgtctgagctgacagcatatttttttagtcacaagcttattgaattgatcggccacatcagggttctgtacattggcctggcctgcaatacggctcgctatatttatatttcctacctggagaatgcctggactgttctccccatggaagttcttcaaggagtgacacacgcggccatctgggcagcatgcatttcttacctcagtgcagccgttccccctgagctgaggacatctgctcagggcatcctgcagggccttcacctgggtttgggaagaggatgtggtgccatgatcggaggcgtgttagtcaattattttggggctgctgcaaccttccgaggaattggcatggcctgcttggtgatcctactgctctttgccctgatccagtggctggcagtgccagatgaggaagaagacaagacaatgttggcagaaagaattcctgttccctccagtcccgttcctatagcaaccatcgacttggtacagcaacagacagaagatgtcatgccacgcattgagcccagacttccacccaagaaaactaagcaccaggaagaacaggaagatgtgaacaaaccagcctggggagtcagctcttctccctgggtgacctttgtctatgcactctaccaaattaaagagatgatgcaactcacaagagacaaccgtgcttctgagatacagcctttacaggggaccaatgagaatagggaaaattctcctgctggtagagcccagcctgtcccatgtgagactcactctgacccatctagaaaccagccatcccctgacgcagcagcatctcagacgcagaccagccccgctcaccccagtgtggacccgtgcacagaggagagtgaagagcagcaggctcagctggccgcgggaggacactgagggcatcctgctcatctcacaccctgcatggaatcaggctcctcagccaggacacagggtgaggccccccagccaggatatgcctcccctggaggagcacagcactgcatatgcttctaaatatctaaactcattaacatggaaacacacacacaggagctacagtacatattggcaggaaaaggtaaactttcgtaatctcattggaattacaacagggaaatggagttcaatgaggactttcagttctttgcttggttaggttaaggatgatagaatttctctgccagtgcagtaagagttgaaaccggcagttacactaagtaagtggagggaatgaaagtgtttcgaggtgaatgtggatataatttccctcttctgattatttattcttatttggttcctaacacaaactgggaagagatagaattcatctatactttcttttttcttggagagaaccgtttaaaaaattacaagatatatttaaaaagtaaccagataaaagtagcacatgtgcttttgttaaaaataaagttaaaagttaaagttaaaaaatgaagttaaaagtttcatcagaaactttacatatctttagcaaatatatttttatatgtgtatggcatataatggaaataattctttgagcaacagaagctattattaactactgcaagctaagccgagcttaaaaatgccttttgttttaaatgggctttgagaaaaaaaacagaaacaagcgattatttcaaatcaaccaaccaactcagtatcctgtgttttgatagacaagagtttactaaatatattgatactgtaaatagcctctctcgctatttactatcttatagtaattcaggctctaattagctgagggaatgaaacacacaaaaatcactgaattcctaagagttccttaaataagcagtactagttacaaatcacagtataagatttaagtgcctgggggaaggatacaatttttagaaattacatattgggtcagttttgttttgtttttggtgaggaaaaggtggtaaataggaaaccatgaatgggaaggatggcaataagtagcaactatactttccaatgactaaagaaagaaaatctcagtatattcgttctcatgaagacacagtcagacactggacaatgtaatgtatgcaactgcaaacgttacaactgcagccagaacaatggctgggtggatcgcacgtaaagcttgccactaaaaatcaaagcagaggttaacaggaaacctggggggagtgtggaaaagggaaaactgttttagctgaataaaggtgaattatataatttataatagctgtggatgagcacaggagagagaggaaagaaaagaacagtcgaaatgagcaactcaccttaccctctgaccctgattagacaggatcaattgtaaagtgagggcttctccatgacaccatagttctgcccaatactgcatttgggataagaaattctacacttggatgtctcgcttcacaataaaacacagcttaaaaataaaataactgaaagaaatagaattcagcaaatagttattttttgcacttgaactgaaacgtactgtactgtaaattatgactcattttaagtgacctttaaaatcagatgtatttattatgcttgtgtaattatagaaataaagaaatgggtgacaggcttaacctcacctatgaatgtacagtatgtggatttgtgaaactgactgtaggaagtcaaaaacttgtactgtatcttgtgtttacagttctgatttattcctttgaaaagcctgctgttttggaaatgcacagttgacatgttgaaataaaaatgaataccatttttaaatgtttcttaaatgataaagatgtgaccaaacaaaagtcctatactctaatgaatgagaccaaattcaacatgcctttgttatggaacatttactgtgacagcagaatcgataatgcagtcatttccagccttgtgagctgacaccttcatgggtttgtggactttgtgactttttcttcctgtccccaaagtgccatatgctaccttaaaaaatattaaagtgaattcaaattacat

SEQ ID NO: 16794 - DNA, 517 bp, Homo sapiens
  source 1..517: mol_type = unassigned DNA
gtcgcagccccggaggagcgcgcgagcagcccgggatggtgcgcgctgccccgacagccgccgccccggcgccccgagccgccgccccgtgctccggggacagggctccccgcgccccgcgcagctgagcgctgccgccgccgcagcagacaggatctctctcagttacccaggccggagtgcagtggcgtgatcctagctcactgcagccttgaacccctgggctcaagtgattctcctgccttggcctcctgaatagctagaactacagatgatgaaatggaattggagccgctgagctggataggtgaaggcactaatgatgaaggaaaaatagatcaacagtacaaattctgaagtttgtaaacttgctgatggtggtggtaagccatggcagatgataaagttgctatcttaacggatgatgaagaggaacagaagagaaagtatgtgcttgcagatccctttaatggtatttccagggaaccagaaccaccttcgaatgaaacaccttcct

SEQ ID NO: 16795 - DNA, 546 bp, Homo sapiens
  source 1..546: mol_type = unassigned DNA
gtcgcagccccggaggagcgcgcgagcagcccgggatggtgcgcgctgccccgacagccgccgccccggcgccccgagccgccgccccgtgctccggggacagggctccccgcgccccgcgcagctgagcgctgccgccgccgcagcagatcaacagtacaaattctgaagtttgtaaacttgctgatggtggtggtaagccatggcagatgataaagttgctatcttaacggatgatgaagaggaacagaagagaaagtatgtgcttgcagatccctttaatggtatttccagggaaccagaaccaccttcgaatgaaacaccttcctccacagaaacatctgctattcctgaggaggaaatagactggatagagaaacattgtgttaagataaacaacgatcttctaatttccaaggtcttttattttttcttttactctgcctatggctctctctatccccttttgcctgtgtattacaaacagctgggaatgtctccaagccagagtggactactagtaggtattcgttacttcattgaatt

SEQ ID NO: 16796 - DNA, 551 bp, Homo sapiens
  source 1..551: mol_type = unassigned DNA
aatcttatctgatacagagtgctaaataaatcaacagtacaaattctgaagtttgtaaacttgctgatggtggtggtaagccatggcagatgataaagttgctatcttaacggatgatgaagaggaacagaagagaaagtatgtgcttgcagatccctttaatggtatttccagggaaccagaaccaccttcgaatgaaacaccttcctccacagaaacatctgctattcctgaggaggaaatagactggatagagaaacattgtgttaagataaacaacgatcttctaatttccaaggtcttttattttttcttttactctgcctatggctctctctatccccttttgcctgtgtattacaaacagctgggaatgtctccaagccagagtggactactagtaggtattcgttacttcattgaattctgcagtgcccccttttggggtgtagttgcagaccgctttaaaaaaggcaaaattgtcctcctcttttctcttttgtgttgggttttattcaacctgggcattggatttgtcaaacctgctacct

SEQ ID NO: 16797 - DNA, 1431 bp, Homo sapiens
  source 1..1431: mol_type = unassigned DNA
gaaaaggctgagggcagatatgttagaagccatcttcttattcctaaattcatgcttaaatgtaattgtccttcagttttcccactcctgagtttggagtctgctggatgatgggtggtttggggaaggaaaagggttctgtacattggcctggcctgcaatacggctcgctatatttatatttcctacctggagaatgcctggactgttctccccatggaagttcttcaaggagtgacacacgcggccatctgggcagcatgcatttcttacctcagtgcagccgttccccctgagctgaggacatctgctcagggcatcctgcagggccttcacctgggtttgggaagaggatgtggtgccatgatcggaggcgtgttagtcaattattttggggctgctgcaaccttccgaggaattggcatggcctgcttggtgatcctactgctctttgccctgatccagtggctggcagtgccagatgaggaagaagacaagacaatgttggcagaaagaattcctgttccctccagtcccgttcctatagcaaccatcgacttggtacagcaacagacagaagatgtcatgccacgcattgagcccagacttccacccaagaaaactaagcaccaggaagaacaggaagatgtgaacaaaccagcctggggagtcagctcttctccctgggtgacctttgtctatgcactctaccaaattaaagagatgatgcaactcacaagagacaaccgtgcttctgagatacagcctttacaggggaccaatgagaatagggaaaattctcctgctggtagagcccagcctgtcccatgtgagactcactctgacccatctagaaaccagccatcccctgacgcagcagcatctcagacgcagaccagccccgctcaccccagtgtggacccgtgcacagaggagagtgaagagcagcaggctcagctggccgcgggaggacactgagggcatcctgctcatctcacaccctgcatggaatcaggctcctcagccaggacacagggtgaggccccccagccaggatatgcctcccctggaggagcacagcactgcatatgcttctaaatatctaaactcattaacatggaaacacacacacaggagctacagtacatattggcaggaaaaggtaaactttcgtaatctcattggaattacaacagggaaatggagttcaatgaggactttcagttctttgcttggttaggttaaggatgatagaatttctctgccagtgcagtaagagttgaaaccggcagttacactaagtaagtggagggaatgaaagtgtttcgaggtgaatgtggatataatttccctcttctgattatttattcttatttggttcctaacacaaactgggaagagatagaattcatctatactttcttttttctt

SEQ ID NO: 16798 - DNA, 1388 bp, Homo sapiens
  source 1..1388: mol_type = unassigned DNA
acttttatattaacaagcattttgaaaaggctgagggcagatatgttagaagccatcttcttattcctaaattcatgcttaaatgtaattgtccttcagttttcccactcctgagtttggagtctgctggatgatgggtggtttggggaaggaaaagggttctgtacattggcctggcctgcaatacggctcgctatatttatatttcctacctggagaatgcctggactgttctccccatggaagttcttcaaggagtgacacacgcggccatctgggcagcatgcatttcttacctcagtgcagccgttccccctgagctgaggacatctgctcagggcatcctgcagggccttcacctgggtttgggaagaggatgtggtgccatgatcggaggcgtgttagtcaattattttggggctgctgcaaccttccgaggaattggcatggcctgcttggtgatcctactgctctttgccctgatccagtggctggcagtgccagatgaggaagaagacaagacaatgttggcagaaagaattcctgttccctccagtcccgttcctatagcaaccatcgacttggtacagcaacagacagaagatgtgaacaaaccagcctggggagtcagctcttctccctgggtgacctttgtctatgcactctaccaaattaaagagatgatgcaactcacaagagacaaccgtgcttctgagatacagcctttacaggggaccaatgagaatagggaaaattctcctgctggtagagcccagcctgtcccatgtgagactcactctgacccatctagaaaccagccatcccctgacgcagcagcatctcagacgcagaccagccccgctcaccccagtgtggacccgtgcacagaggagagtgaagagcagcaggctcagctggccgcgggaggacactgagggcatcctgctcatctcacaccctgcatggaatcaggctcctcagccaggacacagggtgaggccccccagccaggatatgcctcccctggaggagcacagcactgcatatgcttctaaatatctaaactcattaacatggaaacacacacacaggagctacagtacatattggcaggaaaaggtaaactttcgtaatctcattggaattacaacagggaaatggagttcaatgaggactttcagttctttgcttggttaggttaaggatgatagaatttctctgccagtgcagtaagagttgaaaccggcagttacactaagtaagtggagggaatgaaagtgtttcgaggtgaatgtggatataatttccctcttctgattatttattcttatttggttcctaacacaaactgggaagagatagaattcatctatactttcttttttctt

SEQ ID NO: 16799 - DNA, 4510 bp, Homo sapiens
  source 1..4510: mol_type = unassigned DNA
aggttacaagcagcagatcccaccttcagtcctggctctgacaagccctccagcttcacgccacccgggatgggagaaagcaggtgtcgcgagagttgggcgcaagacgccttgtagggagtgtaactatggccggcctgcggaacgaaagtgaacaggagccgctcttaggcgacacacctggaagcagagaatgggacattttagagactgaagagcattataagagccgatggagatctattaggattttatatcttactatgtttctcagcagtgtagggttttctgtagtgatgatgtccatatggccatatctccaaaagattgatccgacagctgatacaagttttttgggctgggttattgcttcatatagtcttggccaaatggtagcttcacctatatttggtttatggtctaattatagaccaagaaaagagcctcttattgtctccatcttgatttccgtggcagccaactgcctctatgcatatctccacatcccagcttctcataataaatactacatgctggttgctcgtggattgttgggaattggagcaggaaatgtagcagttgttagatcatatactgctggtgctacttcccttcaggaaagaacaagttccatggcaaacataagcatgtgtcaagcattaggttttattctaggtccagtttttcagacttgttttacattccttggagaaaaaggtgtgacatgggatgtgattaaactgcagataaacatgtatacaacaccagttttacttagcgccttcctgggaattttaaatattattctgatccttgccatactaagagaacatcgtgtggatgactcaggaagacagtgtaaaagtattaattttgaagaagcaagtacagatgaagctcaggttccccaaggaaatattgaccaggttgctgttgtggccatcaatgttctgttttttgtgactctatttatctttgccctttttgaaaccatcattactccattaacaatggatatgtatgcctggactcaagaacaagctgtgttatataatggcataatacttgctgctcttggggttgaagccgttgttattttcttaggagttaagttgctttccaaaaagattggcgagcgtgctattctactgggaggactcatcgttgtatgggttggcttctttatcttgttaccttggggaaatcaatttcccaaaatacagtgggaagatttgcacaataattcaatccctaataccacatttggggaaattattattggtctttggaagtctccaatggaagatgacaatgaaagaccaactggttgctcgattgaacaagcctggtgcctctacaccccggtgattcatctggcccagttccttacatcagctgtgctaataggattaggctatccagtctgcaatcttatgtcctatactctatattcaaaaattctaggaccaaaacctcagggtgtatacatgggctggttaacagcatctggaagtggagcccggattcttgggcctatgttcatcagccaagtgtatgctcactggggaccacgatgggcattcagcctggtgtgtggaataatagtgctcaccatcaccctcctgggagtggtttacaaaagactcattgctctttctgtaagatatgggaggattcaggaataaactagctaagactgtgatggaaactacttgctgtgtggcacttcctggtctaaagctctgctagacaattgcggtgagccagtctccaagaatcagactacagatattgcagattttgaagaacaagaacatatgttgaataacagagagaattctacatgtcattgtgaatagtaggttatataaaaacatactagatgataatttccttacctcagaaatgaaatattattcttataatacctttttgtggttgcatgaactaatgagtgaatggacaatgatgaataaatgtgaagctgtattcttaatacccactgcagaagtgtcattaaaataatatacagtggaaccagaaagagggttctgtaagaattagccatagcagaacaaaattatagaattttaaatacctctacccaagtagaggtatttttattcagacacctactttttatttataaaaaaatgcattttctattatcaagttcacttatgaaataaaaattataacacatattttccatttagcgtgcctaacatcctaccttgccttctatgagtctttcttctaatactacacctctgccttattttagttcagggtttcactaagtaacccctacattaataaatgagtatggataatgctaatatttgagcaatacagaggattaagagatcaagatacttcactgcctattagcctaatagggatacctactttctttcaaatgccaaaaattcacattagaaacataatccagatatgtgttattttatatatatatatacaaaacagtaaatggtttcttaaaattattgctatttttcaacccccttaaactggagaaaaacatttaattagtaaaacattaattaatttactttaatttttcccatctctcagtagtggcggggaggaacacaacagttttcaatctatgtctgcatagttgtgtagagctgcagaattttagttggatttttaatttggatgatccctgacagccccaaactagtcaggctaataagtatttgaggcaaaatggctttaatctaacaatttactgagtttacctgaagttggctaaataacactgtatgtttaacttctacctctacataagttgaatgctgataaaaggaactagtagataactatgtatattgataagcactgttaagaaaatgcaaaaatatttctaaacacttttccaaatgttttctactttaagttagaaatagtttcaaatctgagaataaacactatataatctgcactttataggttgggtgcagtgtctcatgcctgtaatcccagcactttggaaggccaaggcaggaggattgcttgaggccaggaattcaagaccagcctgggaaacaaagtgagaccctgtctttacaaaaaataaaaacaaaaatttaaaactgtataatctgcactttatgctaaactagctgtgctcttaaactcaattttttcagctctaataaagggcttaatttgatagaattattctacgattaaattttgaagactgttttcactctcctctgccgcccatagcaagactgcttccatagatttctcagaaccgtagccagttctggctatttggtcaagtctgggatccctcttacctgctattctgcagctgctttctctgtcttacattttttgggccacgtctaatcttaaagagtaaactctacccttggtttgcatagtgtgcatgacaaaaataacaagaataatggtaatgatgaaaatgataagagcaaaatttgtggagtgctttccacattccaggtaatgtgtaacatacaatttaattcttacagcagtcttatggagtgaaaatactattatgattcccgttttacagatgaaagaatggaggcacagaaaagttacttgtctaagtaacagtctatccttaaagtccacagtcttaaccacttgatttttcatagtgaggaaaatatcccagaaagttgcagtttcaattaatcactaattgtagggtaatttaactataccagtgagtcctactagcagaaatatttgggcaacataagcccactgactggagcttttgtcttagcataataacctgtttccagcaagaatataacagaaaaaagtttcccagctttcaaaggtttataatattgattaaaatttagataaacttaaccttacacaaatgactcttactttcctttttattgagagcattttctttggagcattttcttctttggaggattataccttgctcatcttggcacaaaagaaggcgaaaggaagtaacatgggattgggaaaagagcaaggagataaagtttgaggaaaaaaaatcaccatgttgatgtcttcttgagtaggccaagttgcgtataaagagaaaatgacaacaggagattttaaggtatgatatattgttaagagtagtacatatttaagaagagaaaatatgtttttgaaaacaaatttaaacttgaaaggatgattttcatattttgaagggatttataacttcacaaagcatctccattctatcttgttcagctttacatttaaaaataaactcttcttgttcatataaaccttatctcttacataaagtgaaatctgttaattttttgttttgacaaggataaactacttacctgcatctgtttaagaatagattaacttattttgagaagaaattctgggcaccatttttgaccattgaagacttatttgtaatttaatttctactttacattgtgaatgttcattttctaataaacaagattattttgcatatgta

SEQ ID NO: 16800 - DNA, 910 bp, Homo sapiens
  source 1..910: mol_type = unassigned DNA
agcagatcccaccttcagtcctggctctgacaagccctccagagaatgggacattttagagactgaagagcattataagagccgatggagatctattaggattttatatcttactatgtttctcagcagtgtagggttttctgtagtgatgatgtccatatggccatatctccaaaagattgatccgacagctgatacaagttttttgggctgggttattgcttcatatagtcttggccaaatggtagcttcacctatatttggtttatggtctaattatagaccaagaaaagagcctcttattgtctccatcttgatttccgtggcagccaactgcctctatgcatatctccacatcccagcttctcataataaatactacatgctggttgctcgtggattgttgggaattggagcagtttttcagacttgttttacattccttggagaaaaaggtgtgacatgggatgtgattaaactgcagataaacatgtatacaacaccagttttacttagcgccttcctgggaattttaaatattattctgatccttgccatactaagcaagtacagatgaagctcaggttccccaaggaaatattgaccaggttgctgttgtggccatcaatgttctgttttttgtgactctatttatctttgccctttttgaaaccatcattactccattaacaatggatatgtatgcctggactcaagaacaagctgtgttatataatggcataatacttgctgctcttggggttgaagccgttgttattttcttaggagttaagttgctttccaaaaagattggcgagcgtgctattctactgggaggactcatcgttgtatgggttggcttctttatcttgttaccttggggaaatcaatttcccaaaatacagtggga

SEQ ID NO: 16801 - DNA, 816 bp, Homo sapiens
  source 1..816: mol_type = unassigned DNA
acaagcagcagatcccaccttcagtcctggctctgacaagccctccagagaatgggacattttagagactgaagagcattataagagccgatggagatctattaggattttatatcttactatgtttctcagcagtgtagggttttctgtagtgatgatgtccatatggccatatctccaaaagattgatccgacagctgatacaagttttttgggctgggttattgcttcatatagtcttggccaaatggtagcttcacctatatttggtttatggtctaattatagaccaagaaaagagcctcttattgtctccatcttgatttccgtggcagccaactgcctctatgcatatctccacatcccagcttctcataataaatactacatgctggttgctcgtggattgttgggaattggagcaggaaatgtagcagttgttagatcatatactgctggtgctacttcccttcaggaaagaacaagttccatggcaaacataagcatgtgtcaagcattaggttttattctaggtccagagaacatcgtgtggatgactcaggaagacagtgtaaaagtattaattttgaagaagcaagtacagatgaagctcaggttccccaaggaaatattgaccaggttgctgttgtggccatcaatgttctgttttttgtgactctatttatctttgccctttttgaaaccatcattactccattaacaatggatatgtatgcctggactcaagaacaagctgtgttatataatggcataatacttgctgctcttggggttgaagccgttgttattttctta

SEQ ID NO: 16802 - DNA, 2043 bp, Homo sapiens
  source 1..2043: mol_type = unassigned DNA
ggactatgggggaactgatggcgttcctgttacctctcatcattgtgttaatggtgaagcacagcgattcccggacgcactctctgagatattttcgcctgggcgtttcggatcccatccatggggtccctgaatttatttcggttgggtacgtggactcgcaccctatcaccacatatgacagtgtcactcggcagaaggagccacgggccccatggatggcagagaacctcgcgcctgatcactgggagaggtacactcagctgctgaggggctggcagcagatgttcaaggtggaactgaagcgcctacagaggcactacaatcactcagggtctcacacttaccagagaatgattggctgtgagctgctggaggatggaagcaccacaggatttctgcagtatgcatatgacgggcaggatttcctgatcttcaataaagacaccctctcctggctggctgtagataatgtggctcacaccatcaagcaggcatgggaggccaatcagcatgagttgctgtatcaaaagaattggctggaagaagaatgtattgcctggctaaagagattcctggagtatgggaaagacaccctacaaagaacagaatcagaaactatccctcttgtgatgaaagctgtctctgggtccattgtccttgtcattgtgctggctggagttggtgttctagtctggagaagaaggccccgagagcaaaatggagccatctaccttccaacaccagatcgatgattgcagatccctcttttccagttctccttcctctaggagccatgttatcctctgtcccccatagagtcaagcctagtgcttgaaggtcctgacgacacccacaacatacatgagagtaatgggattgagcatttatggcagcaacagaggagccacaaaatgttctttgttctttggctccaaaaagactgtcagctttcagtctcttttgatggactgttttatcagagttgactttaaatacagcttgtctcatgacacaacgcttccctacattctatttgtcaatgatgatttgcaactagttggagattctcagagcaggaaggaatcttttcaaccagagcaggaactgtcttctgcaatgccttggacttgagcctccagcctccacttgaacaccatgtgaagggaacctcagtacttcataaaatggcctttctcattcatctttcatgggaacatttattgtacaagcgctttgaatatcatgggcaccatgactgtgaccctacaggtaggattggatcactccatgagagtagccggcaggtttctacaatggcctgggaatggactgattatttttatacattttctggcctgagagaaagccaaagtcccctgctgttcacagcaaccctgcctgggagcttggaatcttggtaatctgcccggttggatctatggaggtagtctcaccctttttgtcttttgtgggaaattaagagaaataattatcagacatatcatcacctccagtggaactacagagacctggacccagctgcactattttaatgtaaaaataacagtatggccaggtgcagtggctcacgcctgtaatcccatcactttgagcagccaaggcgggcggatcacgaggtcaggagattaagaccatcctggccaatatggtgaaaccctgtctctactaaaatacaaaaaattagctgggcatggtgttgcgtgcctgtagtcccagctacttgggaggctgagacaggggaattgcttgaacccgggaggcagagattgcagtgagccgagatcacgccactgcactccagcctggcgacagagtgagactctatctcaaaataataataataataataataataataataataataataacagtatatttggtgtcaggagagggctcaattctcatttctgcctttcctgtgctggctcatggtagctgggcatgacttgccttcctacataggttgtcttcatacatatgcactgggaatcaataaaagcccatggtgagaatgaa

SEQ ID NO: 16803 - DNA, 1704 bp, Homo sapiens
  source 1..1704: mol_type = unassigned DNA
acgcgtagcattcctgccgtccctggaaaagtgctagaggcccacagtttcagtctcatctgcctccactcggcctcagttcctcatcactgttcctgtgctcacagtcatcaattatagaccccacaacatgcgccctgaagacagaatgttccatatcagagctgtgatcttgagagccctctccttggctttcctgctgagtctccgaggagctggggccatcaaggcggaccatgtgtcaacttatgccgcgtttgtacagacgcatagaccaacaggggagtttatgtttgaatttgatgaagatgagatgttctatgtggatctggacaagaaggagaccgtctggcatctggaggagtttggccaagccttttcctttgaggctcagggcgggctggctaacattgctatattgaacaacaacttgaataccttgatccagcgttccaaccacactcaggccaccaacgatccccctgaggtgaccgtgtttcccaaggagcctgtggagctgggccagcccaacaccctcatctgccacattgacaagttcttcccaccagtgctcaacgtcacgtggctgtgcaacggggagctggtcactgagggtgtcgctgagagcctcttcctgcccagaacagattacagcttccacaagttccattacctgacctttgtgccctcagcagaggacttctatgactgcagggtggagcactggggcttggaccagccgctcctcaagcactgggaggcccaagagccaatccagatgcctgagacaacggagactgtgctctgtgccctgggcctggtgctgggcctagtcggcatcatcgtgggcaccgtcctcatcataaagtctctgcgttctggccatgacccccgggcccaggggaccctgtgaaatactgtaaaggtgacaaaatatctgaacagaagaggacttaggagagatctgaactccagctgccctacaaactccatctcagcttttcttctcacttcatgtgaaaactactccagtggctgactgaattgctgacccttcaagctctgtccttatccattacctcaaagcagtcattccttagtaaagtttccaacaaatagaaattaatgacactttggtagcactaatatggagattatcctttcattgagccttttatcctctgttctcctttgaagaacccctcactgtcaccttcccgagaataccctaagaccaataaatacttcagtatttcagagcggggagactctgagtcattcttactggaagtctaggaccaggtcacatgtgaatactatttcttgaaggtgtggtttcaacctctgttgccgatgtggttactaaaggttctgatcccacttgaacggaaaggtctgaggatattgattcagtcctgggtttttccctaactacaggatagggtggggtagagaaaggatatttgggggaaattttacttggatgaagattttcttggatgtagtttgaagactgcagtgtttgaagtctctgagggaagagatttggtctgtctggatcaagatttcaggcagattaggattccattcacagcccctgagcttccttcccaaggctgtattgtaattatagcaatatttcatggaggatttttctacatgataaactaagagccaagaaataaaatttttaaaatgccctaa

SEQ ID NO: 16804 - DNA, 1704 bp, Homo sapiens
  source 1..1704: mol_type = unassigned DNA
acgcgtagcattcctgccgtccctggaaaagtgctagaggcccacagtttcagtctcatctgcctccactcggcctcagttcctcatcactgttcctgtgctcacagtcatcaattatagaccccacaacatgcgccctgaagacagaatgttccatatcagagctgtgatcttgagagccctctccttggctttcctgctgagtctccgaggagctggggccatcaaggcggaccatgtgtcaacttatgccgcgtttgtacagacgcatagaccaacaggggagtttatgtttgaatttgatgaagatgagatgttctatgtggatctggacaagaaggagaccgtctggcatctggaggagtttggccaagccttttcctttgaggctcagggcgggctggctaacattgctatattgaacaacaacttgaataccttgatccagcgttccaaccacactcaggccaccaacgatccccctgaggtgaccgtgtttcccaaggagcctgtggagctgggccagcccaacaccctcatctgccacattgacaagttcttcccaccagtgctcaacgtcacgtggctgtgcaacggggagctggtcactgagggtgtcgctgagagcctcttcctgcccagaacagattacagcttccacaagttccattacctgacctttgtgccctcagcagaggacttctatgactgcagggtggagcactggggcttggaccagccgctcctcaagcactgggaggcccaagagccaatccagatgcctgagacaacggagactgtgctctgtgccctgggcctggtgctgggcctagtcggcatcatcgtgggcaccgtcctcatcataaagtctctgcgttctggccatgacccccgggcccaggggaccctgtgaaatactgtaaaggtgacaaaatatctgaacagaagaggacttaggagagatctgaactccagctgccctacaaactccatctcagcttttcttctcacttcatgtgaaaactactccagtggctgactgaattgctgacccttcaagctctgtccttatccattacctcaaagcagtcattccttagtaaagtttccaacaaatagaaattaatgacactttggtagcactaatatggagattatcctttcattgagccttttatcctctgttctcctttgaagagcccctcactgtcaccttcccgagaataccctaagaccaataaatacttcagtatttcagagcggggagactctgagtcattcttactggaagtctaggaccaggtcacatgtgaatactatttcttgaaggtgtggtttcaacctctgttgccgatgtggttactaaaggttctgatcccacttgaacggaaaggtctgaggatattgattcagtcctgggtttttccctaactacaggatagggtggggtagagaaaggatatttgggggaaattttacttggatgaagattttcttggatgtagtttgaagactgcagtgtttgaagtctctgagggaagagatttggtctgtctggatcaagatttcaggcagattaggattccattcacagcccctgagcttccttcccaaggctgtattgtaattatagcaatatttcatggaggatttttctacatgataaactaagagccaagaaataaattttttaaaatgccctaa

SEQ ID NO: 16805 - DNA, 305 bp, Homo sapiens
  source 1..305: mol_type = unassigned DNA
gtcgaagcgcacgaactcctcccggttgtagatgtatctctccaggaagcgctgtgtcccattaaacgcgtagcattcctgccgtccctggaaaaggtgaatcccagccatgctgattcctctccacccatttccagtgctagaggcccacagtttcagtctcatctgcctccactcggcctcagttcctcatcactgttcctgtgctcacagtcatcaattatagaccccacaacatgcgccctgaagacagaatgttccatatcagagctgtgatcttgagagccctctccttggctttcctg

SEQ ID NO: 16806 - DNA, 1375 bp, Homo sapiens
  source 1..1375: mol_type = unassigned DNA
caacaccctcatctgccacattgacaagttcttcccaccagtgctcaacgtcacgtggctgtgcaacggggagctggtcactgagggtgtcgctgagagcctcttcctgcccagaacagattacagcttccacaagttccattacctgacctttgtgccctcagcagaggacttctatgactgcagggtggagcactggggcttggaccagccgctcctcaagcactgggaggcccaagagccaatccagatgcctgagacaacggagactgtgctctgtgccctgggcctggtgctgggcctagtcggcatcatcgtgggcaccgtcctcatcataaagtctctgcgttctggccatgacccccgggcccaggggaccctgtgaaatactgtaaaggtgggaatgtaaagaggaggccctaggatttgtagaatgtaaggaagggaggaaaaattcaatctgataagtgttcattgatcttctaatgggttaaaagcattcagccacataacaacaacaacaccgataactaactgagtagttaatatggtcaggcgctattctgaggatttacatttattaactcactttattctcacacatagtctttgaggtaggtactattattttcactatttcacatgagagatacttacatctttttacatacacagagactttaagcactttgatcaagttcccacagctatgaagtagtagggctagcttccaatccagaaagtctggatccaagactgtttatccactgtcctattcaccctattttgtgaaggaaaagaccaagttcaaattctccagagtccattgccaaataatggagtcagatctatatttctatacataattacaacacagtgtggtgggtgcctgtaactacttactgtctctacttggactcattccatggcaatgttcacacaaaaaatgcccctccagagatcttacaggtttctatttatcataacactcaccatgctttatatttttatatgttttgggaattctcttagcattagacagtgaacttccatgcagatgaccacatctaattcattattattattgttattcatgctggacctcaggtacaaaaggttaagaacttctcagttcattatatgatcatcattggtgcctccgagctctctctctctcccttgatttatttggtcccttttatctccagtccttactcccatatctaacctcttacccctacctcataggtaaacattttaatgaatttgatgtttccttttatttgcatagatcctctgtaatatgtagtagtgtccagtgtacatgtatttttaattaaccaaaatggcattaaattatagatctaattttgta

SEQ ID NO: 16807 - DNA, 918 bp, Homo sapiens
  source 1..918: mol_type = unassigned DNA
gcacgaactcctcccggttgtagatgtatctctccaggaagcgctgtgtcccattaaacgcgtagcattcctgccgtccctggaaaagcaccttccagcgtcctctttacccagcaacagagaatgtcagctctatgatttctctgataggtgaatcccagccatgctgattcctctccacccatttccagtgctagaggcccacagtttcagtctcatctgcctccactcggcctcagttcctcatcactgttcctgtgctcacagtcatcaattatagaccccacaacatgcgccctgaagacagaatgttccatatcagagctgtgatcttgagagccctctccttggctttcctgctgagtctccgaggagctggggccatcaaggcggaccatgtgtcaacttatgccgcgtttgtacagacgcatagaccaacaggggagtttatgtttgaatttgatgaagatgagatgttctatgtggatctggacaagaaggagaccgtctggcatctggaggagtttggccaagccttttcctttgaggctcagggcgggctggctaacattgctatattgaacaacaacttgaataccttgatccagcgttccaaccacactcaggccaccaacgatccccctgaggtgaccgtgtttcccaaggagcctgtggagctgggccagcccaacaccctcatctgccacattgacaagttcttcccaccagtgctcaacgtcacgtggctgtgcaacggggagctggtcactgagggtgtcgctgagagcctcttcctgcccagaacagattacagcttccacaagttccattacctgacctttgtgccctcagcagaggacttctatgactgcagggtggagcactggggcttggaccagccgctcctcaagcactggg

SEQ ID NO: 16808 - DNA, 1626 bp, Homo sapiens
  source 1..1626: mol_type = unassigned DNA
gttcctcatcactgttcctgtgctcacagtcatcaattatagaccccacaacatgcgccctgaagacagaatgttccatatcagagctgtgatcttgagagccctctccttggctttcctgctgagtctccgaggagctggggccatcaaggcggaccatgtgtcaacttatgccgcgtttgtacagacgcatagaccaacaggggagtttatgtttgaatttgatgaagatgagatgttctatgtggatctggacaagaaggagaccgtctggcatctggaggagtttggccaagccttttcctttgaggctcagggcgggctggctaacattgctatattgaacaacaacttgaataccttgatccagcgttccaaccacactcaggccaccaacgatccccctgaggtgaccgtgtttcccaaggagcctgtggagctgggccagcccaacaccctcatctgccacattgacaagttcttcccaccagtgctcaacgtcacgtggctgtgcaacggggagctggtcactgagggtgtcgctgagagcctcttcctgcccagaacagattacagcttccacaagttccattacctgacctttgtgccctcagcagaggacttctatgactgcagggtggagcactggggcttggaccagccgctcctcaagcactgggaggcccaagagccaatccagatgcctgagacaacggagactgtgctctgtgccctgggcctggtgctgggcctagtcggcatcatcgtgggcaccgtcctcatcataaagtctctgcgttctggccatgacccccgggcccaggggaccctgtgaaatactgtaaaggtgacaaaatatctgaacagaagaggacttaggagagatctgaactccagctgccctacaaactccatctcagcttttcttctcacttcatgtgaaaactactccagtggctgactgaattgctgacccttcaagctctgtccttatccattacctcaaagcagtcattccttagtaaagtttccaacaaatagaaattaatgacactttggtagcactaatatggagattatcctttcattgagccttttatcctctgttctcctttgaagaacccctcactgtcaccttcccgagaataccctaagaccaataaatacttcagtatttcagagcggggagactctgagtcattcttactggaagtctaggaccaggtcacatgtgaatactatttcttgaaggtgtggtttcaacctctgttgccgatgtggttactaaaggttctgatcccacttgaacggaaaggtctgaggatattgattcagtcctgggtttttccctaactacaggatagggtggggtagagaaaggatatttgggggaaattttacttggatgaagattttcttggatgtagtttgaagactgcagtgtttgaagtctctgagggaagagatttggtctgtctggatcaagatttcaggcagattaggattccattcacagcccctgagcttccttcccaaggctgtattgtaattatagcaatatttcatggaggatttttctacatgataaactaagagccaagaaataaaatttttaaaatgccctaa

SEQ ID NO: 16809 - DNA, 305 bp, Homo sapiens
  source 1..305: mol_type = unassigned DNA
gtcgaagcgcgcgaactcctcccggttgtagatgtatctctccaggaagcgctgtgtcccattaaacgcgtagcattcctgccgtccctggaaaaggtgaatcccagccatgctgattcctctccacccatttccagtgctagaggcccacagtttcagtctcatctgcctccactcggcctcagttcctcatcactgttcctgtgctcacagtcatcaattatagaccccacaacatgcgccctgaagacagaatgttccatatcagagctgtgatcttgagagccctctccttggctttcctg

SEQ ID NO: 16810 - DNA, 1704 bp, Homo sapiens; identical to SEQ ID NO: 16803
  source 1..1704: mol_type = unassigned DNA

SEQ ID NO: 16811 - DNA, 1375 bp, Homo sapiens
  source 1..1375: mol_type = unassigned DNA
caacaccctcatctgccacattgacaagttcttcccaccagtgctcaacgtcacgtggctgtgcaacggggagctggtcactgagggtgtcgctgagagcctcttcctgcccagaacagattacagcttccacaagttccattacctgacctttgtgccctcagcagaggacttctatgactgcagggtggagcactggggcttggaccagccgctcctcaagcactgggaggcccaagagccaatccagatgcctgagacaacggagactgtgctctgtgccctgggcctggtgctgggcctagtcggcatcatcgtgggcaccgtcctcatcataaagtctctgcgttctggccatgacccccgggcccaggggaccctgtgaaatactgtaaaggtgggaatgtaaagaggaggccctaggatttgtagaatgtaaggaagggaggaaaaattcaatctgataagtgttcattgatcttctaatgggttaaaagcattcagccacataacaacaacaacaccgataactaactgagtagttaatatggtcaggcgctattctgaggatttacatttattaactcactttattctcacacatagtctttgaggtaggtactattattttcactatttcacatgagagatacttacatctttttacatacacagagactttaagcactttgatcaagttcccacagctatgaagtagtagggctagcttccaatccagaaagtctggatccaagactgtttatccactgtcctattcaccctattttgtgaaggaaaagaccaagttcaaattctccagagtccattgccaaataatggagtcagatctatatttctatacataattacaacacagtgtggtgggtgcctgtaactacttactgtctctacttggactcattccatggcaatgttcacacaaaaaatgcctctccagagatcttacaggtttctatttatcataacactcaccatgctttatatttttatatgttttgggaattctcttagcattagacagtgaacttccatgcagatgaccacatctaattcattattattattgttattcatgctggacctcaggtacaaaaggttaagaacttctcagttcattatatgatcatcattggtgcctccgagctctctctctctcccttgatttatttggtcccttttatctccagtccttactcccatatctaacctcttacccctacctcataggtaaacattttaatgaatttgatgtttccttttatttgcatagatcctctgtaatatgtagtagtgtccagtgtacatgtatttttaattaaccaaaatggcattaaattatagatctaattttgta

SEQ ID NO: 16812 - DNA, 1704 bp, Homo sapiens; identical to SEQ ID NO: 16804
  source 1..1704: mol_type = unassigned DNA

SEQ ID NO: 16813 - DNA, 305 bp, Homo sapiens; identical to SEQ ID NO: 16809
  source 1..305: mol_type = unassigned DNA

SEQ ID NO: 16814 - DNA, 918 bp, Homo sapiens
  source 1..918: mol_type = unassigned DNA
gcacgaactcctcccggttgtagatgtatctctccaggaagcgctgtgtcccattaaacgcgtagcattcctgccgtaactggtacaccaccttccagcgtcctctttacccagcaacagagaatgtcagctctatgatttctctgataggtgaatcccagccatgctgattcctctccacccatttccagtgctagaggcccacagtttcagtctcatctgcctccactcggcctcagttcctcatcactgttcctgtgctcacagtcatcaattatagaccccacaacatgcgccctgaagacagaatgttccatatcagagctgtgatcttgagagccctctccttggctttcctgctgagtctccgaggagctggggccatcaaggcggaccatgtgtcaacttatgccgcgtttgtacagacgcatagaccaacaggggagtttatgtttgaatttgatgaagatgagatgttctatgtggatctggacaagaaggagaccgtctggcatctggaggagtttggccaagccttttcctttgaggctcagggcgggctggctaacattgctatattgaacaacaacttgaataccttgatccagcgttccaaccacactcaggccaccaacgatccccctgaggtgaccgtgtttcccaaggagcctgtggagctgggccagcccaacaccctcatctgccacattgacaagttcttcccaccagtgctcaacgtcacgtggctgtgcaacggggagctggtcactgagggtgtcgctgagagcctcttcctgcccagaacagattacagcttccacaagttccattacctgacctttgtgccctcagcagaggacttctatgactgcagggtggagcactggggcttggaccagccgctcctcaagcactggg

SEQ ID NO: 16815 - DNA, 305 bp, Homo sapiens; identical to SEQ ID NO: 16805
  source 1..305: mol_type = unassigned DNA

SEQ ID NO: 16816 - DNA, 1375 bp, Homo sapiens; identical to SEQ ID NO: 16806
  source 1..1375: mol_type = unassigned DNA

SEQ ID NO: 16817 - DNA, 1157 bp, Homo sapiens
  source 1..1157: mol_type = unassigned DNA
gctcacagtcatcaattatagaccccacaacatgcgccctgaagacagaatgttccatatcagagctgtgatcttgagagccctctccttggctttcctgctgagtctccgaggagctggggccatcaaggcggaccatgtgtcaacttatgccgcgtttgtacagacgcatagaccaacaggggagtttatgtttgaatttgatgaagatgagatgttctatgtggatctggacaagaaggagaccgtctggcatctggaggagtttggccaagccttttcctttgaggctcagggcgggctggctaacattgctatattgaacaacaacttgaataccttgatccagcgttccaaccacactcaggccaccaacgatccccctgaggtgaccgtgtttcccaaggagcctgtggagctgggccagcccaacaccctcatctgccacattgacaagttcttcccaccagtgctcaacgtcacgtggctgtgcaacggggagctggtcactgagggtgtcgctgagagcctcttcctgcccagaacagattacagcttccacaagttccattacctgacctttgtgccctcagcagaggacttctatgactgcagggtggagcactggggcttggaccagccgctcctcaagcactgggaggcccaagagccaatccagatgcctgagacaacggagactgtgctctgtgccctgggcctggtgctgggcctagtcggcatcatcgtgggcaccgtcctcatcataaagtctctgcgttctggccatgacccccgggcccaggggaccctgtgaaatactgtaaaggtgacaaaatatctgaacagaagaggacttaggagagatctgaactccagctgccctacaaactccatctcagcttttcttctcacttcatgtgaaaactactccagtggctgactgaattgctgacccttcaagctctgtccttatccattacctcaaagcagtcattccttagtaaagtttccaacaaatagaaattaatgacactttggtagcactaatatggagattatcctttcattgagccttttatcctctgttctcctttgaagaacccctcactgtcaccttcccgagaataccctaagaccaataaatacttcagtatttc

SEQ ID NO: 16818 - DNA, 1375 bp, Homo sapiens; identical to SEQ ID NO: 16811
  source 1..1375: mol_type = unassigned DNA

SEQ ID NO: 16819 - DNA, 305 bp, Homo sapiens; identical to SEQ ID NO: 16805
  source 1..305: mol_type = unassigned DNA

SEQ ID NO: 16820 - DNA, 918 bp, Homo sapiens
  source 1..918: mol_type = unassigned DNA
gcgcgaactcctcccggttgtagatgtatctctccaggaagcgctgtgtcccattaaacgcgtagcattcctgccgtccctggaaaagcaccttccagcgtcctctttacccagcaacagagaatgtcagctctatgatttctctgataggtgaatcccagccatgctgattcctctccacccatttccagtgctagaggcccacagtttcagtctcatctgcctccactcggcctcagttcctcatcactgttcctgtgctcacagtcatcaattatagaccccacaacatgcgccctgaagacagaatgttccatatcagagctgtgatcttgagagccctctccttggctttcctgctgagtctccgaggagctggggccatcaaggcggaccatgtgtcaacttatgccgcgtttgtacagacgcatagaccaacaggggagtttatgtttgaatttgatgaagatgagatgttctatgtggatctggacaagaaggagaccgtctggcatctggaggagtttggccaagccttttcctttgaggctcagggcgggctggctaacattgctatattgaacaacaacttgaataccttgatccagcgttccaaccacactcaggccaccaacgatccccctgaggtgaccgtgtttcccaaggagcctgtggagctgggccagcccaacaccctcatctgccacattgacaagttcttcccaccagtgctcaacgtcacgtggctgtgcaacggggagctggtcactgagggtgtcgctgagagcctcttcctgcccagaacagattacagcttccacaagttccattacctgacctttgtgccctcagcagaggacttctatgactgcagggtggagcactggggcttggaccagccgctcctcaagcactggg

SEQ ID NO: 16821 - DNA, 703 bp, Homo sapiens
  source 1..703: mol_type = unassigned DNA
ctccactcggcctcagttcctcatcactgttcctgtgctcacagtcatcaattatagaccccacaacatgcgccctgaagacagaatgttccatatcagagctgtgatcttgagagccctctccttggctttcctgctgagtctccgaggagctggggccatcaaggcggaccatgtgtcaacttatgccgcgtttgtacagacgcatagaccaacaggggagtttatgtttgaatttgatgaagatgagatgttctatgtggatctggacaagaaggagaccgtctggcatctggaggagtttggccaagccttttcctttgaggtgaccgtgtttcccaaggagcctgtggagctgggccagcccaacaccctcatctgccacattgacaagttcttcccaccagtgctcaacgtcacgtggctgtgcaacggggagctggtcactgagggtgtcgctgagagcctcttcctgcccagaacagattacagcttccacaagttccattacctgacctttgtgccctcagcagaggacttctatgactgcagggtggagcactggggcttggaccagccgctcctcaagcactgggaggcccaagagccaatccagatgcctgagacaacggagactgtgctctgtgccctgggcctggtgctgggcctagtcggcatcatcgtgggcaccgtcctcatcata

SEQ ID NO: 16822 - DNA, 703 bp, Homo sapiens; identical to SEQ ID NO: 16821
  source 1..703: mol_type = unassigned DNA

SEQ ID NO: 16823 - DNA, 1375 bp, Homo sapiens; identical to SEQ ID NO: 16806
  source 1..1375: mol_type = unassigned DNA

SEQ ID NO: 16824 - DNA, 703 bp, Homo sapiens; identical to SEQ ID NO: 16821
  source 1..703: mol_type = unassigned DNA

SEQ ID NO: 16825 - DNA, 918 bp, Homo sapiens; identical to SEQ ID NO: 16807
  source 1..918: mol_type = unassigned DNA

SEQ ID NO: 16826 - DNA, 305 bp, Homo sapiens
  source 1..305: mol_type = unassigned DNA
gtcgaagcgcacgagctcctcccggttgtagatgtatctctccaggaagcgctgtgtcccattaaacgcgtagcattcctgccgtccctggaaaaggtgaatcccagccatgctgattcctctccacccatttccagtgctagaggcccacagtttcagtctcatctgcctccactcggcctcagttcctcatcactgttcctgtgctcacagtcatcaattatagaccccacaacatgcgccctgaagacagaatgttccatatcagagctgtgatcttgagagccctctccttggctttcctg

SEQ ID NO: 16827 - DNA, 703 bp, Homo sapiens; identical to SEQ ID NO: 16821
  source 1..703: mol_type = unassigned DNA

SEQ ID NO: 16828 - DNA, 918 bp, Homo sapiens
  source 1..918: mol_type = unassigned DNA
gcacgagctcctcccggttgtagatgtatctctccaggaagcgctgtgtcccattaaacgcgtagcattcctgccgtccctggaaaagcaccttccagcgtcctctttacccagcaacagagaatgtcagctctatgatttctctgataggtgaatcccagccatgctgattcctctccacccatttccagtgctagaggcccacagtttcagtctcatctgcctccactcggcctcagttcctcatcactgttcctgtgctcacagtcatcaattatagaccccacaacatgcgccctgaagacagaatgttccatatcagagctgtgatcttgagagccctctccttggctttcctgctgagtctccgaggagctggggccatcaaggcggaccatgtgtcaacttatgccgcgtttgtacagacgcatagaccaacaggggagtttatgtttgaatttgatgaagatgagatgttctatgtggatctggacaagaaggagaccgtctggcatctggaggagtttggccaagccttttcctttgaggctcagggcgggctggctaacattgctatattgaacaacaacttgaataccttgatccagcgttccaaccacactcaggccaccaacgatccccctgaggtgaccgtgtttcccaaggagcctgtggagctgggccagcccaacaccctcatctgccacattgacaagttcttcccaccagtgctcaacgtcacgtggctgtgcaacggggagctggtcactgagggtgtcgctgagagcctcttcctgcccagaacagattacagcttccacaagttccattacctgacctttgtgccctcagcagaggacttctatgactgcagggtggagcactggggcttggaccagccgctcctcaagcactggg

SEQ ID NO: 16829 - DNA, 1375 bp, Homo sapiens; identical to SEQ ID NO: 16806
  source 1..1375: mol_type = unassigned DNA

SEQ ID NO: 16830 - DNA, 1704 bp, Homo sapiens; identical to SEQ ID NO: 16803
  source 1..1704: mol_type = unassigned DNA

SEQ ID NO: 16831 - DNA, 703 bp, Homo sapiens; identical to SEQ ID NO: 16821
  source 1..703: mol_type = unassigned DNA

SEQ ID NO: 16832 - DNA, 305 bp, Homo sapiens; identical to SEQ ID NO: 16809
  source 1..305: mol_type = unassigned DNA

SEQ ID NO: 16833 - DNA, 703 bp, Homo sapiens; identical to SEQ ID NO: 16821
  source 1..703: mol_type = unassigned DNA

SEQ ID NO: 16834 - DNA, 305 bp, Homo sapiens
  source 1..305: mol_type = unassigned DNA
gtcgaagcgcacgaactcctcccggttgtagatgtatctctccaggaagcgctgtgtcccattaaacgcgtagcattcctgccgtaactggtacacgtgaatcccagccatgctgattcctctccacccatttccagtgctagaggcccacagtttcagtctcatctgcctccactcggcctcagttcctcatcactgttcctgtgctcacagtcatcaattatagaccccacaacatgcgccctgaagacagaatgttccatatcagagctgtgatcttgagagccctctccttggctttcctg

SEQ ID NO: 16835 - DNA, 703 bp, Homo sapiens; identical to SEQ ID NO: 16821
  source 1..703: mol_type = unassigned DNA

SEQ ID NO: 16836 - DNA, 1375 bp, Homo sapiens
  source 1..1375: mol_type = unassigned DNA
caacaccctcatctgccacattgacaagttcttcccaccagtgctcaacgtcacgtggctgtgcaacggggagctggtcactgagggtgtcgctgagagcctcttcctgcccagaacagattacagcttccacaagttccattacctgacctttgtgccctcagcagaggacttctatgactgcagggtggagcactggggcttggaccagccgctcctcaagcactgggaggcccaagagccaatccagatgcctgagacaacggagactgtgctctgtgccctgggcctggtgctgggcctagtcggcatcatcgtgggcaccgtcctcatcataaagtctctgcgttctggccatgacccccgggcccaggggaccctgtgaaatactgtaaaggtgggaatgtaaagaggaggccctaggatttgtagaatgtaaggaagggaggaaaaattcaatctgataagtgttcattgatcttctaatgggttaaaagcattcagccacataacaacaacaataccgataactaactgagtagttaatatggtcaggcgctattctgaggatttacatttattaactcactttattctcacacatagtctttgaggtaggtactattattttcactatttcacatgagagatacttacatctttttacatacacagagactttaagcactttgatcaagttcccacagctatgaagtagtagggctagcttccaatccagaaagtctggatccaagactgtttatccactgtcctattcaccctattttgtgaaggaaaagaccaagttcaaattctccagagtccattgccaaataatggagtcagatctatatttctatacataattacaacacagtgtggtgggtgcctgtaactacttactgtctctacttggactcattccatggcaatgttcacacaaaaaatgcccctccagagatcttacaggtttctatttatcataacactcaccatgctttatatttttatatgttttgggaattctcttagcattagacagtgaacttccatgcagatgaccacatctaattcattattattattgttattcatgctggacctcaggtacaaaaggttaagaacttctcagttcattatatgatcatcattggtgcctccgagctctctctctctcccttgatttatttggtcccttttatctccagtccttactcccatatctaacctcttacccctacctcataggtaaacattttaatgaatttgatgtttccttttatttgcatagatcctctgtaatatgtagtagtgtccagtgtacatgtatttttaattaaccaaaatggcattaaattatagatctaattttgta

SEQ ID NO: 16837 - DNA, 918 bp, Homo sapiens; identical to SEQ ID NO: 16820
  source 1..918: mol_type = unassigned DNA

SEQ ID NO: 16838 - DNA, 1704 bp, Homo sapiens; identical to SEQ ID NO: 16803
  source 1..1704: mol_type = unassigned DNA

SEQ ID NO: 16839 - DNA, 1375 bp, Homo sapiens; identical to SEQ ID NO: 16806
  source 1..1375: mol_type = unassigned DNA

SEQ ID NO: 16840 - DNA, 918 bp, Homo sapiens; identical to SEQ ID NO: 16807
  source 1..918: mol_type = unassigned DNA

SEQ ID NO: 16841 - DNA, 918 bp, Homo sapiens; identical to SEQ ID NO: 16820
  source 1..918: mol_type = unassigned DNA

SEQ ID NO: 16842 - DNA, 1704 bp, Homo sapiens; identical to SEQ ID NO: 16803
  source 1..1704: mol_type = unassigned DNA

SEQ ID NO: 16843 - DNA, 703 bp, Homo sapiens; identical to SEQ ID NO: 16821
  source 1..703: mol_type = unassigned DNA

SEQ ID NO: 16844 - DNA, 1157 bp, Homo sapiens; identical to SEQ ID NO: 16817
  source 1..1157: mol_type = unassigned DNA

SEQ ID NO: 16845 - DNA, 1157 bp, Homo sapiens; identical to SEQ ID NO: 16817
  source 1..1157: mol_type = unassigned DNA

SEQ ID NO: 16846 - DNA, 1157 bp, Homo sapiens
  source 1..1157: mol_type = unassigned DNA
gctcacagtcatcaattatagaccccacaacatgcgccctgaagacagaatgttccatatcagagctgtgatcttgagagccctctccttggctttcctgctgagtctccgaggagctggggccatcaaggcggaccatgtgtcaacttatgccgcgtttgtacagacgcatagaccaacaggggagtttatgtttgaatttgatgaagatgagatgttctatgtggatctggacaagaaggagaccgtctggcatctggaggagtttggccaagccttttcctttgaggctcagggcgggctggctaacattgctatattgaacaacaacttgaataccttgatccagcgttccaaccacactcaggccaccaacgatccccctgaggtgaccgtgtttcccaaggagcctgtggagctgggccagcccaacaccctcatctgccacattgacaagttcttcccaccagtgctcaacgtcacgtggctgtgcaacggggagctggtcactgagggtgtcgctgagagcctcttcctgcccagaacagattacagcttccacaagttccattacctgacctttgtgccctcagcagaggacttctatgactgcagggtggagcactggggcttggaccagccgctcctcaagcactgggaggcccaagagccaatccagatgcctgagacaacggagactgtgctctgtgccctgggcctggtgctgggcctagtcggcatcatcgtgggcaccgtcctcatcataaagtctctgcgttctggccatgacccccgggcccaggggaccctgtgaaatactgtaaaggtgacaaaatatctgaacagaagaggacttaggagagatctgaactccagctgccctacaaactccatctcagcttttcttctcacttcatgtgaaaactactccagtggctgactgaattgctgacccttcaagctctgtccttatccattacctcaaagcagtcattccttagtaaagtttccaacaaatagaaattaatgacactttggtagcactaatatggagattatcctttcattgagccttttatcctctgttctcctttgaagagcccctcactgtcaccttcccgagaataccctaagaccaataaatacttcagtatttc

SEQ ID NO: 16847 - DNA, 1157 bp, Homo sapiens; identical to SEQ ID NO: 16817
  source 1..1157: mol_type = unassigned DNA

SEQ ID NO: 16848 - DNA, 1157 bp, Homo sapiens; identical to SEQ ID NO: 16846
  source 1..1157: mol_type = unassigned DNA

SEQ ID NO: 16849 - DNA, 1157 bp, Homo sapiens; identical to SEQ ID NO: 16817
  source 1..1157: mol_type = unassigned DNA

SEQ ID NO: 16850 - DNA, 1560 bp, Homo sapiens
  source 1..1560: mol_type = unassigned DNA
gtcacagaagactacttgggttcatggtctctaatatttcaaacaggagctccctttagcgagtccttcttttcctgactgcagctcttttcattttgccatccttttccagctccatgatggttctgcaggtttctgcggccccccggacagtggctctgacggcgttactgatggtgctgctcacatctgtggtccagggcagggccactccagagaattacgtgtaccagttacggcaggaatgctacgcgtttaatgggacacagcgcttcctggagagatacatctacaaccgggaggagttcgtgcgcttcgacagcgacgtgggggagttccgggcggtgacggagctggggcggcctgatgaggactactggaacagccagaaggacctcctggaggagaagcgggcagtgccggacagggtatgcagacacaactacgagctggacgaggccgtgaccctgcagcgccgagtccagcctaaggtgaacgtttccccctccaagaaggggcccctgcagcaccacaacctgcttgtctgccacgtgacagatttctacccaggcagcattcaagtccgatggttcctgaatggacaggaggaaacagctggggtcgtgtccaccaacctgatccgtaatggagactggaccttccagatcctggtgatgctggaaatgaccccccagcagggagacgtctacatctgccaagtggagcacaccagcctggacagtcctgtcaccgtggagtggaaggcacagtctgattctgcccggagtaagacattgacgggagctgggggcttcgtgctggggctcatcatctgtggagtgggcatcttcatgcacaggaggagcaagaaagttcaacgaggatctgcataaacagggttcctgacctcaccgaaaagactaatgtgccttagaacaagcatttgctgtgttttgttagcacctggttccaggacagaccctcagcttcccaagaggatactgctgccaagaagttgctctgaagtcagtttctatcgttctgctctttgattcaaagcactgtttctctcactgggcctccaaccatgttcccttcttcttagcaccacaaataatcaaaacccaacataagtgtttgttttcctttaaaaatatgcatcaaatcgtctctcattacttttctctgagggttttagtaaacagtaggagttaataaagaagttcattttggtttacacgtaggaaagaagagaagcatgaaagtggagatatgttaactattgtataatgtggcctgttatacatgacactcttctgaattgactgtatttcagtgagctgcccccaaatcaagtttagtgccctcatccatttatgtctcagaccgctattcttaactattcaatggtgagcagactgcaaatctgcctgataggacccgtattcccacagcactaattcaacatatatcttactgagagcatgttttatcattaccattaagaagttaaatgaacatcagaatttaaaatcataaatataatctaatacactttaa

SEQ ID NO: 16851 - DNA, 1424 bp, Homo sapiens
  source 1..1424: mol_type = unassigned DNA
gagctccctttagcgagtccttcttttcctgactgcagctcttttcattttgccatccttttccagctccatgatggttctgcaggtttctgcggccccccggacagtggctctgacggcgttactgatggtgctgctcacatctgtggtccagggcagggccactccagagaattaccttttccagggacggcaggaatgctacgcgtttaatgggacacagcgcttcctggagagatacatctacaaccgggaggagctcgtgcgcttcgacagcgacgtgggggagttccgggcggtgacggagctggggcggcctgaggcggagtactggaacagccagaaggacatcctggaggaggagcgggcagtgccggacaggatgtgcagacacaactacgagctgggcgggcccatgaccctgcagcgccgaggcagcattcaagtccgatggttcctgaatggacaggaggaaacagctggggtcgtgtccaccaacctgatccgtaatggagactggaccttccagatcctggtgatgctggaaatgaccccccagcagggagatgtctacacctgccaagtggagcacaccagcctggatagtcctgtcaccgtggagtggaaggcacagtctgattctgcccggagtaagacattgacgggagctgggggcttcgtgctggggctcatcatctgtggagtgggcatcttcatgcacaggaggagcaagaaagttcaacgaggatctgcataaacagggttcctgagctcactgaaaagactattgtgccttaggaaaagcatttgctgtgtttcgttagcatctggctccaggacagaccttcaacttccaaattggatactgctgccaagaagttgctctgaagtcagtttctatcattctgctctttgattcaaagcactgtttctctcactgggcctccaaccatgttcccttcttcttagcaccacaaataatcaaaacccaacatgactgtttgttttcctttaaaaatatgcaccaaatcatctctcatcacttttctctgagggttttagtagacagtaggagttaataaagaagttcattttggtttaaacataggaaagaagagaaccatgaaaatggggatatgttaactattgtataatggggcctgttacacatgacactcttctgaattgactgtatttcagtgagctgcccccaaatcaagtttagtgccctcatccatttatgtctcagaccactattcttaactattcaatggtgagcagactgcaaatctgcctgataggacccatattcccacagcactaattcaacatataccttactgagagcatgttttatcattaccattaagaagttaaatgaacatcagaatttaaaatcataaatataatctaatacactttaa

SEQ ID NO: 16852 - DNA, 1560 bp, Homo sapiens
  source 1..1560: mol_type = unassigned DNA
gtcacagaagactacttgggttcatggtctctaatatttcaaacaggagctccctttagcgagtccttcttttcctgactgcagctcttttcattttgccatccttttccagctccatgatggttctgcaggtttctgcggccccccggacagtggctctgacggcgttactgatggtgctgctcacatctgtggtccagggcagggccactccagagaattaccttttccagggacggcaggaatgctacgcgtttaatgggacacagcgcttcctggagagatacatctacaaccgggaggagctcgtgcgcttcgacagcgacgtgggggagttccgggcggtgacggagctggggcggcctgaggcggagtactggaacagccagaaggacatcctggaggaggagcgggcagtgccggacaggatgtgcagacacaactacgagctgggcgggcccatgaccctgcagcgccgagtccagcctagggtgaatgtttccccctccaagaaggggcccttgcagcaccacaacctgcttgtctgccacgtgacggatttctacccaggcagcattcaagtccgatggttcctgaatggacaggaggaaacagctggggtcgtgtccaccaacctgatccgtaatggagactggaccttccagatcctggtgatgctggaaatgaccccccagcagggagatgtctacacctgccaagtggagcacaccagcctggatagtcctgtcaccgtggagtggaaggcacagtctgattctgcccggagtaagacattgacgggagctgggggcttcgtgctggggctcatcatctgtggagtgggcatcttcatgcacaggaggagcaagaaagttcaacgaggatctgcataaacagggttcctgagctcactgaaaagactattgtgccttaggaaaagcatttgctgtgtttcgttagcatctggctccaggacagaccttcaacttccaaattggatactgctgccaagaagttgctctgaagtcagtttctatcattctgctctttgattcaaagcactgtttctctcactgggcctccaaccatgttcccttcttcttagcaccacaaataatcaaaacccaacatgactgtttgttttcctttaaaaatatgcaccaaatcatctctcatcacttttctctgagggttttagtagacagtaggagttaataaagaagttcattttggtttaaacataggaaagaagagaaccatgaaaatggggatatgttaactattgtataatggggcctgttacacatgacactcttctgaattgactgtatttcagtgagctgcccccaaatcaagtttagtgccctcatccatttatgtctcagaccactattcttaactattcaatggtgagcagactgcaaatctgcctgataggacccatattcccacagcactaattcaacatataccttactgagagcatgttttatcattaccattaagaagttaaatgaacatcagaatttaaaatcataaatataatctaatacactttaa

SEQ ID NO: 16853 - DNA, 688 bp, Homo sapiens
  source 1..688: mol_type = unassigned DNA
aaacaggcctggagaggctctgcgacccgcttaggaccacagaactcgggacggcaggaatgctacgcgtttaatgggacacagcgcttcctggagagatacatctacaaccgggaggagctcgtgcgcttcgacagcgacgtgggggagttccgggcggtgacggagctggggcggcctgaggcggagtactggaacagccagaaggacatcctggaggaggagcgggcagtgccggacaggatgtgcagacacaactacgagctgggcgggcccatgaccctgcagcgccgagtccagcctagggtgaatgtttccccctccaagaaggggcccttgcagcaccacaacctgcttgtctgccacgtgacggatttctacccaggcagcattcaagtccgatggttcctgaatggacaggaggaaacagctggggtcgtgtccaccaacctgatccgtaatggagactggaccttccagatcctggtgatgctggaaatgaccccccagcagggagatgtctacacctgccaagtggagcacaccagcctggatagtcctgtcaccgtggagtggaaggcacagtctgattctgcccggagtaagacattgacgggagctgggggcttcgtgctggggctcatcatctgtggagtgggcatcttcatgcacaggaggagcaagaaag

SEQ ID NO: 16854 - DNA, 1424 bp, Homo sapiens
  source 1..1424: mol_type = unassigned DNA
gagctccctttagcgagtccttcttttcctgactgcagctcttttcattttgccatccttttccagctccatgatggttctgcaggtttctgcggccccccggacagtggctctgacggcgttactgatggtgctgctcacatctgtggtccagggcagggccactccagagaattaccttttccagggacggcaggaatgctacgcgtttaatgggacacagcgcttcctggagagatacatctacaaccgggaggagttcgcgcgcttcgacagcgacgtgggggagttccgggcggtgacggagctggggcggcctgctgcggagtactggaacagccagaaggacatcctggaggagaagcgggcagtgccggacaggatgtgcagacacaactacgagctgggcgggcccatgaccctgcagcgccgaggcagcattcaagtccgatggttcctgaatggacaggaggaaacagctggggtcgtgtccaccaacctgatccgtaatggagactggaccttccagatcctggtgatgctggaaatgaccccccagcagggagatgtctacacctgccaagtggagcacaccagcctggatagtcctgtcaccgtggagtggaaggcacagtctgattctgcccggagtaagacattgacgggagctgggggcttcgtgctggggctcatcatctgtggagtgggcatcttcatgcacaggaggagcaagaaagttcaacgaggatctgcataaacagggttcctgagctcactgaaaagactattgtgccttaggaaaagcatttgctgtgtttcgttagcatctggctccaggacagaccttcaacttccaaattggatactgctgccaagaagttgctctgaagtcagtttctatcattctgctctttgattcaaagcactgtttctctcactgggcctccaaccatgttcccttcttcttagcaccacaaataatcaaaacccaacatgactgtttgttttcctttaaaaatatgcaccaaatcatctctcatcacttttctctgagggttttagtagacagtaggagttaataaagaagttcattttggtttaaacataggaaagaagagaaccatgaaaatggggatatgttaactattgtataatggggcctgttacacatgacactcttctgaattgactgtatttcagtgagctgcccccaaatcaagtttagtgccctcatccatttatgtctcagaccactattcttaactattcaatggtgagcagactgcaaatctgcctgataggacccatattcccacagcactaattcaacatataccttactgagagcatgttttatcattaccattaagaagttaaatgaacatcagaatttaaaatcataaatataatctaatacactttaa

SEQ ID NO: 16855 - DNA, 1424 bp, Homo sapiens
  source 1..1424: mol_type = unassigned DNA
gagctccctttagcgagtccttcttttcctgactgcagctcttttcattttgccatccttttccagctccatgatggttctgcaggtttctgcggccccccggacagtggctctgacggcgttactgatggtgctgctcacatctgtggtccagggcagggccactccagagaattaccttttccagggacggcaggaatgctacgcgtttaatgggacacagcgcttcctggagagatacatctacaaccgggaggagttcgtgcgcttcgacagcgacgtgggggagttccgggcggtgacggagctggggcggcctgatgaggagtactggaacagccagaaggacatcctggaggagaagcgggcagtgccggacaggatgtgcagacacaactacgagctgggcgggcccatgaccctgcagcgccgaggcagcattcaagtccgatggttcctgaatggacaggaggaaacagctggggtcgtgtccaccaacctgatccgtaatggagactggaccttccagatcctggtgatgctggaaatgaccccccagcagggagatgtctacacctgccaagtggagcacaccagcatggatagtcctgtcaccgtggagtggaaggcacagtctgattctgcccggagtaagacattgacgggagctgggggcttcgtgctggggctcatcatctgtggagtgggcatcttcatgcacaggaggagcaagaaagttcaacgaggatctgcataaacagggttcctgagctcactgaaaagactattgtgccttaggaaaagcatttgctgtgtttcgttagcatctggctccaggacagaccttcaacttccaaattggatactgctgccaagaagttgctctgaagtcagtttctatcattctgctctttgattcaaagcactgtttctctcactgggcctccaaccatgttcccttcttcttagcaccacaaataatcaaaacccaacatgactgtttgttttcctttaaaaatatgcaccaaatcatctctcatcacttttctctgagggttttagtagacagtaggagttaataaagaagttcattttggtttaaacataggaaagaagagaaccatgaaaatggggatatgttaactattgtataatggggcctgttacacatgacactcttctgaattgactgtatttcagtgagctgcccccaaatcaagtttagtgccctcatccatttatgtctcagaccactattcttaactattcaatggtgagcagactgcaaatctgcctgataggacccatattcccacagcactaattcaacatataccttactgagagcatgttttatcattaccattaagaagttaaatgaacatcagaatttaaaatcataaatataatctaatacactttaa

SEQ ID NO: 16856 - DNA, 1361 bp, Homo sapiens
  source 1..1361: mol_type = unassigned DNA
agaattaccttttccagggacggcaggaatgctacgcgtttaatgggacacagcgcttcctggagagatacatctacaaccgggaggagttcgtgcgcttcgacagcgacgtgggggagttccgggcggtgacggagctggggcggcctgatgaggagtactggaacagccagaaggacatcctggaggagaagcgggcagtgccggacaggatgtgcagacacaactacgagctgggcgggcccatgaccctgcagcgccgagtccagcctagggtgaatgtttccccctccaagaaggggcccttgcagcaccacaacctgcttgtctgccacgtgacggatttctacccaggcagcattcaagtccgatggttcctgaatggacaggaggaaacagctggggtcgtgtccaccaacctgatccgtaatggagactggaccttccagatcctggtgatgctggaaatgaccccccagcagggagatgtctacacctgccaagtggagcacaccagcatggatagtcctgtcaccgtggagtggaaggcacagtctgattctgcccggagtaagacattgacgggagctgggggcttcgtgctggggctcatcatctgtggagtgggcatcttcatgcacaggaggagcaagaaaggtgagaaagcctgcaggttcaacgaggatctgcataaacagggttcctgagctcactgaaaagactattgtgccttaggaaaagcatttgctgtgtttcgttagcatctggctccaggacagaccttcaacttccaaattggatactgctgccaagaagttgctctgaagtcagtttctatcattctgctctttgattcaaagcactgtttctctcactgggcctccaaccatgttcccttcttcttagcaccacaaataatcaaaacccaacatgactgtttgttttcctttaaaaatatgcaccaaatcatctctcatcacttttctctgagggttttagtagacagtaggagttaataaagaagttcattttggtttaaacataggaaagaagagaaccatgaaaatggggatatgttaactattgtataatggggcctgttacacatgacactcttctgaattgactgtatttcagtgagctgcccccaaatcaagtttagtgccctcatccatttatgtctcagaccactattcttaactattcaatggtgagcagactgcaaatctgcctgataggacccatattcccacagcactaattcaacatataccttactgagagcatgttttatcattaccattaagaagttaaatgaacatcagaatttaaaatcataaatataatctaatacactttaa

SEQ ID NO: 16857 - DNA, 1560 bp, Homo sapiens
  source 1..1560: mol_type = unassigned DNA
gtcacagaagactacttgggttcatggtctctaatatttcaaacaggagctccctttagcgagtccttcttttcctgactgcagctcttttcattttgccatccttttccagctccatgatggttctgcaggtttctgcggccccccggacagtggctctgacggcgttactgatggtgctgctcacatctgtggtccagggcagggccactccagagaattaccttttccagggacggcaggaatgctacgcgtttaatgggacacagcgcttcctggagagatacatctacaaccgggaggagttcgtgcgcttcgacagcgacgtgggggagttccgggcggtgacggagctggggcggcctgatgaggagtactggaacagccagaaggacatcctggaggagaagcgggcagtgccggacaggatgtgcagacacaactacgagctgggcgggcccatgaccctgcagcgccgagtccagcctagggtgaatgtttccccctccaagaaggggcccttgcagcaccacaacctgcttgtctgccacgtgacggatttctacccaggcagcattcaagtccgatggttcctgaatggacaggaggaaacagctggggtcgtgtccaccaacctgatccgtaatggagactggaccttccagatcctggtgatgctggaaatgaccccccagcagggagatgtctacacctgccaagtggagcacaccagcatggatagtcctgtcaccgtggagtggaaggcacagtctgattctgcccggagtaagacattgacgggagctgggggcttcgtgctggggctcatcatctgtggagtgggcatcttcatgcacaggaggagcaagaaagttcaacgaggatctgcataaacagggttcctgagctcactgaaaagactattgtgccttaggaaaagcatttgctgtgtttcgttagcatctggctccaggacagaccttcaacttccaaattggatactgctgccaagaagttgctctgaagtcagtttctatcattctgctctttgattcaaagcactgtttctctcactgggcctccaaccatgttcccttcttcttagcaccacaaataatcaaaacccaacatgactgtttgttttcctttaaaaatatgcaccaaatcatctctcatcacttttctctgagggttttagtagacagtaggagttaataaagaagttcattttggtttaaacataggaaagaagagaaccatgaaaatggggatatgttaactattgtataatggggcctgttacacatgacactcttctgaattgactgtatttcagtgagctgcccccaaatcaagtttagtgccctcatccatttatgtctcagaccactattcttaactattcaatggtgagcagactgcaaatctgcctgataggacccatattcccacagcactaattcaacatataccttactgagagcatgttttatcattaccattaagaagttaaatgaacatcagaatttaaaatcataaatataatctaatacactttaa

SEQ ID NO: 16858 - DNA, 1424 bp, Homo sapiens; identical to SEQ ID NO: 16854
  source 1..1424: mol_type = unassigned DNA

SEQ ID NO: 16859 - DNA, 688 bp, Homo sapiens
  source 1..688: mol_type = unassigned DNA
aaacaggcctggagaggctctgcgacccgcttaggaccacagaactcgggacggcaggaatgctacgcgtttaatgggacacagcgcttcctggagagatacatctacaaccgggaggagttcgtgcgcttcgacagcgacgtgggggagttccgggcggtgacggagctggggcggcctgatgaggagtactggaacagccagaaggacatcctggaggaggagcgggcagtgccggacaggatgtgcagacacaactacgagctgggcgggcccatgaccctgcagcgccgagtccagcctagggtgaatgtttccccctccaagaaggggcccttgcagcaccacaacctgcttgtctgccacgtgacggatttctacccaggcagcattcaagtccgatggttcctgaatggacaggaggaaacagctggggtcgtgtccaccaacctgatccgtaatggagactggaccttccagatcctggtgatgctggaaatgaccccccagcagggagatgtctacacctgccaagtggagcacaccagcctggatagtcctgtcaccgtggagtggaaggcacagtctgattctgcccggagtaagacattgacgggagctgggggcttcgtgctggggctcatcatctgtggagtgggcatcttcatgcacaggaggagcaagaaag

SEQ ID NO: 16860 - DNA, 1560 bp, Homo sapiens
  source 1..1560: mol_type = unassigned DNA
gtcacagaagactacttgggttcatggtctctaatatttcaaacaggagctccctttagcgagtccttcttttcctgactgcagctcttttcattttgccatccttttccagctccatgatggttctgcaggtttctgcggccccccggacagtggctctgacggcgttactgatggtgctgctcacatctgtggtccagggcagggccactccagagaattaccttttccagggacggcaggaatgctacgcgtttaatgggacacagcgcttcctggagagatacatctacaaccgggaggagttcgtgcgcttcgacagcgacgtgggggagttccgggcggtgacggagctggggcggcctgatgaggagtactggaacagccagaaggacatcctggaggaggagcgggcagtgccggacaggatgtgcagacacaactacgagctgggcgggcccatgaccctgcagcgccgagtccagcctagggtgaatgtttccccctccaagaaggggcccttgcagcaccacaacctgcttgtctgccacgtgacggatttctacccaggcagcattcaagtccgatggttcctgaatggacaggaggaaacagctggggtcgtgtccaccaacctgatccgtaatggagactggaccttccagatcctggtgatgctggaaatgaccccccagcagggagatgtctacacctgccaagtggagcacaccagcctggatagtcctgtcaccgtggagtggaaggcacagtctgattctgcccggagtaagacattgacgggagctgggggcttcgtgctggggctcatcatctgtggagtgggcatcttcatgcacaggaggagcaagaaagttcaacgaggatctgcataaacagggttcctgagctcactgaaaagactattgtgccttaggaaaagcatttgctgtgtttcgttagcatctggctccaggacagaccttcaacttccaaattggatactgctgccaagaagttgctctgaagtcagtttctatcattctgctctttgattcaaagcactgtttctctcactgggcctccaaccatgttcccttcttcttagcaccacaaataatcaaaacccaacatgactgtttgttttcctttaaaaatatgcaccaaatcatctctcatcacttttctctgagggttttagtagacagtaggagttaataaagaagttcattttggtttaaacataggaaagaagagaaccatgaaaatggggatatgttaactattgtataatggggcctgttacacatgacactcttctgaattgactgtatttcagtgagctgcccccaaatcaagtttagtgccctcatccatttatgtctcagaccactattcttaactattcaatggtgagcagactgcaaatctgcctgataggacccatattcccacagcactaattcaacatataccttactgagagcatgttttatcattaccattaagaagttaaatgaacatcagaatttaaaatcataaatataatctaatacactttaa

SEQ ID NO: 16861 - DNA, 1361 bp, Homo sapiens
  source 1..1361: mol_type = unassigned DNA
agaattaccttttccagggacggcaggaatgctacgcgtttaatgggacacagcgcttcctggagagatacatctacaaccgggaggagttcgcgcgcttcgacagcgacgtgggggagttccgggcggtgacggagctggggcggcctgctgcggagtactggaacagccagaaggacatcctggaggagaagcgggcagtgccggacaggatgtgcagacacaactacgagctgggcgggcccatgaccctgcagcgccgagtccagcctagggtgaatgtttccccctccaagaaggggcccttgcagcaccacaacctgcttgtctgccacgtgacggatttctacccaggcagcattcaagtccgatggttcctgaatggacaggaggaaacagctggggtcgtgtccaccaacctgatccgtaatggagactggaccttccagatcctggtgatgctggaaatgaccccccagcagggagatgtctacacctgccaagtggagcacaccagcctggatagtcctgtcaccgtggagtggaaggcacagtctgattctgcccggagtaagacattgacgggagctgggggcttcgtgctggggctcatcatctgtggagtgggcatcttcatgcacaggaggagcaagaaaggtgagaaagcctgcaggttcaacgaggatctgcataaacagggttcctgagctcactgaaaagactattgtgccttaggaaaagcatttgctgtgtttcgttagcatctggctccaggacagaccttcaacttccaaattggatactgctgccaagaagttgctctgaagtcagtttctatcattctgctctttgattcaaagcactgtttctctcactgggcctccaaccatgttcccttcttcttagcaccacaaataatcaaaacccaacatgactgtttgttttcctttaaaaatatgcaccaaatcatctctcatcacttttctctgagggttttagtagacagtaggagttaataaagaagttcattttggtttaaacataggaaagaagagaaccatgaaaatggggatatgttaactattgtataatggggcctgttacacatgacactcttctgaattgactgtatttcagtgagctgcccccaaatcaagtttagtgccctcatccatttatgtctcagaccactattcttaactattcaatggtgagcagactgcaaatctgcctgataggacccatattcccacagcactaattcaacatataccttactgagagcatgttttatcattaccattaagaagttaaatgaacatcagaatttaaaatcataaatataatctaatacactttaa

SEQ ID NO: 16862 - DNA, 688 bp, Homo sapiens
  source 1..688: mol_type = unassigned DNA
aaacaggcctggagaggctctgcgacccgcttaggaccacagaactcgggacggcaggaatgctacgcgtttaatgggacacagcgcttcctggagagatacatctacaaccgggaggagttcgcgcgcttcgacagcgacgtgggggagttccgggcggtgacggagctggggcggcctgctgcggagtactggaacagccagaaggacatcctggaggagaagcgggcagtgccggacaggatgtgcagacacaactacgagctgggcgggcccatgaccctgcagcgccgagtccagcctagggtgaatgtttccccctccaagaaggggcccttgcagcaccacaacctgcttgtctgccacgtgacggatttctacccaggcagcattcaagtccgatggttcctgaatggacaggaggaaacagctggggtcgtgtccaccaacctgatccgtaatggagactggaccttccagatcctggtgatgctggaaatgaccccccagcagggagatgtctacacctgccaagtggagcacaccagcctggatagtcctgtcaccgtggagtggaaggcacagtctgattctgcccggagtaagacattgacgggagctgggggcttcgtgctggggctcatcatctgtggagtgggcatcttcatgcacaggaggagcaagaaag

SEQ ID NO: 16863 - DNA, 1560 bp, Homo sapiens
  source 1..1560: mol_type = unassigned DNA
gtcacagaagactacttgggttcatggtctctaatatttcaaacaggagctccctttagcgagtccttcttttcctgactgcagctcttttcattttgccatccttttccagctccatgatggttctgcaggtttctgcggccccccggacagtggctctgacggcgttactgatggtgctgctcacatctgtggtccagggcagggccactccagagaattaccttttccagggacggcaggaatgctacgcgtttaatgggacacagcgcttcctggagagatacatctacaaccgggaggagttcgcgcgcttcgacagcgacgtgggggagttccgggcggtgacggagctggggcggcctgctgcggagtactggaacagccagaaggacatcctggaggagaagcgggcagtgccggacaggatgtgcagacacaactacgagctgggcgggcccatgaccctgcagcgccgagtccagcctagggtgaatgtttccccctccaagaaggggcccttgcagcaccacaacctgcttgtctgccacgtgacggatttctacccaggcagcattcaagtccgatggttcctgaatggacaggaggaaacagctggggtcgtgtccaccaacctgatccgtaatggagactggaccttccagatcctggtgatgctggaaatgaccccccagcagggagatgtctacacctgccaagtggagcacaccagcctggatagtcctgtcaccgtggagtggaaggcacagtctgattctgcccggagtaagacattgacgggagctgggggcttcgtgctggggctcatcatctgtggagtgggcatcttcatgcacaggaggagcaagaaagttcaacgaggatctgcataaacagggttcctgagctcactgaaaagactattgtgccttaggaaaagcatttgctgtgtttcgttagcatctggctccaggacagaccttcaacttccaaattggatactgctgccaagaagttgctctgaagtcagtttctatcattctgctctttgattcaaagcactgtttctctcactgggcctccaaccatgttcccttcttcttagcaccacaaataatcaaaacccaacatgactgtttgttttcctttaaaaatatgcaccaaatcatctctcatcacttttctctgagggttttagtagacagtaggagttaataaagaagttcattttggtttaaacataggaaagaagagaaccatgaaaatggggatatgttaactattgtataatggggcctgttacacatgacactcttctgaattgactgtatttcagtgagctgcccccaaatcaagtttagtgccctcatccatttatgtctcagaccactattcttaactattcaatggtgagcagactgcaaatctgcctgataggacccatattcccacagcactaattcaacatataccttactgagagcatgttttatcattaccattaagaagttaaatgaacatcagaatttaaaatcataaatataatctaatacactttaa

SEQ ID NO: 16864 - DNA, 1499 bp, Homo sapiens
  source 1..1499: mol_type = unassigned DNA
agcgagtccttcttttcctgactgcagctcttttcattttgccatccttttccagctccatgatggttctgcaggtttctgcggccccccggacagtggctctgacggcgttactgatggtgctgctcacatctgtggtccagggcagggccactccagagaattaccttttccagggacggcaggaatgctacgcgtttaatgggacacagcgcttcctggagagatacatctacaaccgggaggagttcgcgcgcttcgacagcgacgtgggggagttccgggcggtgacggagctggggcggcctgctgcggagtactggaacagccagaaggacatcctggaggagaagcgggcagtgccggacaggatgtgcagacacaactacgagctgggcgggcccatgaccctgcagcgccgagtccagcctagggtgaatgtttccccctccaagaaggggcccttgcagcaccacaacctgcttgtctgccacgtgacggatttctacccaggcagcattcaagtccgatggttcctgaatggacaggaggaaacagctggggtcgtgtccaccaacctgatccgtaatggagactggaccttccagatcctggtgatgctggaaatgaccccccagcagggagatgtctacacctgccaagtggagcacaccagcctggatagtcctgtcaccgtggagtggaaggcacagtctgattctgcccggagtaagacattgacgggagctgggggccgtgctggggctcatcatctgtggagtgggcatcttcatgcacaggaggagcaagaaagttcaacgaggatctgcataaacagggttcctgagctcactgaaaagactattgtgccttaggaaaagcatttgctgtgtttcgttagcatctggctccaggacagaccttcaacttccaaattggatactgctgccaagaagttgctctgaagtcagtttctatcattctgctctttgattcaaagcactgtttctctcactgggcctccaaccatgttcccttcttcttagcaccacaaataatcaaaacccaacatgactgtttgttttcctttaaaaatatgcaccaaatcatctctcatcacttttctctgagggttttagtagacagtaggagttaataaagaagttcattttggtttaaacataggaaagaagagaaccatgaaaatggggatatgttaactattgtataatggggcctgttacacatgacactcttctgaattgactgtatttcagtgagctgcccccaaatcaagtttagtgccctcatccatttatgtctcagaccactattcttaactattcaatggtgagcagactgcaaatctgcctgataggacccatattcccacagcactaattcaacatataccttactgagagcatgttttatcattaccattaagaagttaaatgaacatcagaatttaaaatcataaatataatctaatacacttt

SEQ ID NO: 16865 - DNA, 1560 bp, Homo sapiens; identical to SEQ ID NO: 16857
  source 1..1560: mol_type = unassigned DNA

SEQ ID NO: 16866 - DNA, 688 bp, Homo sapiens; identical to SEQ ID NO: 16862
  source 1..688: mol_type = unassigned DNA

SEQ ID NO: 16867 - DNA, 1361 bp, Homo sapiens
  source 1..1361: mol_type = unassigned DNA
agaattaccttttccagggacggcaggaatgctacgcgtttaatgggacacagcgcttcctggagagatacatctacaaccgggaggagctcgtgcgcttcgacagcgacgtgggggagttccgggcggtgacggagctggggcggcctgaggcggagtactggaacagccagaaggacatcctggaggaggagcgggcagtgccggacaggatgtgcagacacaactacgagctgggcgggcccatgaccctgcagcgccgagtccagcctagggtgaatgtttccccctccaagaaggggcccttgcagcaccacaacctgcttgtctgccacgtgacggatttctacccaggcagcattcaagtccgatggttcctgaatggacaggaggaaacagctggggtcgtgtccaccaacctgatccgtaatggagactggaccttccagatcctggtgatgctggaaatgaccccccagcagggagatgtctacacctgccaagtggagcacaccagcctggatagtcctgtcaccgtggagtggaaggcacagtctgattctgcccggagtaagacattgacgggagctgggggcttcgtgctggggctcatcatctgtggagtgggcatcttcatgcacaggaggagcaagaaaggtgagaaagcctgcaggttcaacgaggatctgcataaacagggttcctgagctcactgaaaagactattgtgccttaggaaaagcatttgctgtgtttcgttagcatctggctccaggacagaccttcaacttccaaattggatactgctgccaagaagttgctctgaagtcagtttctatcattctgctctttgattcaaagcactgtttctctcactgggcctccaaccatgttcccttcttcttagcaccacaaataatcaaaacccaacatgactgtttgttttcctttaaaaatatgcaccaaatcatctctcatcacttttctctgagggttttagtagacagtaggagttaataaagaagttcattttggtttaaacataggaaagaagagaaccatgaaaatggggatatgttaactattgtataatggggcctgttacacatgacactcttctgaattgactgtatttcagtgagctgcccccaaatcaagtttagtgccctcatccatttatgtctcagaccactattcttaactattcaatggtgagcagactgcaaatctgcctgataggacccatattcccacagcactaattcaacatataccttactgagagcatgttttatcattaccattaagaagttaaatgaacatcagaatttaaaatcataaatataatctaatacactttaa

SEQ ID NO: 16868 - DNA, 1560 bp, Homo sapiens; identical to SEQ ID NO: 16863
  source 1..1560: mol_type = unassigned DNA

SEQ ID NO: 16869 - DNA, 1361 bp, Homo sapiens
  source 1..1361: mol_type = unassigned DNA
agaattacgtgtaccagttacggcaggaatgctacgcgtttaatgggacacagcgcttcctggagagatacatctacaaccgggaggagttcgtgcgcttcgacagcgacgtgggggagttccgggcggtgacggagctggggcggcctgatgaggactactggaacagccagaaggacctcctggaggagaagcgggcagtgccggacagggtatgcagacacaactacgagctggacgaggccgtgaccctgcagcgccgagtccagcctaaggtgaacgtttccccctccaagaaggggcccctgcagcaccacaacctgcttgtctgccacgtgacagatttctacccaggcagcattcaagtccgatggttcctgaatggacaggaggaaacagctggggtcgtgtccaccaacctgatccgtaatggagactggaccttccagatcctggtgatgctggaaatgaccccccagcagggagacgtctacatctgccaagtggagcacaccagcctggacagtcctgtcaccgtggagtggaaggcacagtctgattctgcccggagtaagacattgacgggagctgggggcttcgtgctggggctcatcatctgtggagtgggcatcttcatgcacaggaggagcaagaaaggtgagaaagcctgcaagttcaacgaggatctgcataaacagggttcctgacctcaccgaaaagactaatgtgccttagaacaagcatttgctgtgttttgttagcacctggttccaggacagaccctcagcttcccaagaggatactgctgccaagaagttgctctgaagtcagtttctatcgttctgctctttgattcaaagcactgtttctctcactgggcctccaaccatgttcccttcttcttagcaccacaaataatcaaaacccaacataagtgtttgttttcctttaaaaatatgcatcaaatcgtctctcattacttttctctgagggttttagtaaacagtaggagttaataaagaagttcattttggtttacacgtaggaaagaagagaagcatgaaagtggagatatgttaactattgtataatgtggcctgttatacatgacactcttctgaattgactgtatttcagtgagctgcccccaaatcaagtttagtgccctcatccatttatgtctcagaccgctattcttaactattcaatggtgagcagactgcaaatctgcctgataggacccgtattcccacagcactaattcaacatatatcttactgagagcatgttttatcattaccattaagaagttaaatgaacatcagaatttaaaatcataaatataatctaatacactttaa

SEQ ID NO: 16870 - DNA, 688 bp, Homo sapiens
  source 1..688: mol_type = unassigned DNA
aaacaggcctggagaggctctgcgacccgcttaggaccacagaactcgggacggcaggaatgctacgcgtttaatgggacacagcgcttcctggagagatacatctacaaccgggaggagttcgtgcgcttcgacagcgacgtgggggagttccgggcggtgacggagctggggcggcctgatgaggagtactggaacagccagaaggacatcctggaggagaagcgggcagtgccggacaggatgtgcagacacaactacgagctgggcgggcccatgaccctgcagcgccgagtccagcctagggtgaatgtttccccctccaagaaggggcccttgcagcaccacaacctgcttgtctgccacgtgacggatttctacccaggcagcattcaagtccgatggttcctgaatggacaggaggaaacagctggggtcgtgtccaccaacctgatccgtaatggagactggaccttccagatcctggtgatgctggaaatgaccccccagcagggagatgtctacacctgccaagtggagcacaccagcatggatagtcctgtcaccgtggagtggaaggcacagtctgattctgcccggagtaagacattgacgggagctgggggcttcgtgctggggctcatcatctgtggagtgggcatcttcatgcacaggaggagcaagaaag

SEQ ID NO: 16871 - DNA, 1424 bp, Homo sapiens
  source 1..1424: mol_type = unassigned DNA
gagctccctttagcgagtccttcttttcctgactgcagctcttttcattttgccatccttttccagctccatgatggttctgcaggtttctgcggccccccggacagtggctctgacggcgttactgatggtgctgctcacatctgtggtccagggcagggccactccagagaattacgtgtaccagttacggcaggaatgctacgcgtttaatgggacacagcgcttcctggagagatacatctacaaccgggaggagttcgtgcgcttcgacagcgacgtgggggagttccgggcggtgacggagctggggcggcctgatgaggactactggaacagccagaaggacctcctggaggagaagcgggcagtgccggacagggtatgcagacacaactacgagctggacgaggccgtgaccctgcagcgccgaggcagcattcaagtccgatggttcctgaatggacaggaggaaacagctggggtcgtgtccaccaacctgatccgtaatggagactggaccttccagatcctggtgatgctggaaatgaccccccagcagggagacgtctacatctgccaagtggagcacaccagcctggacagtcctgtcaccgtggagtggaaggcacagtctgattctgcccggagtaagacattgacgggagctgggggcttcgtgctggggctcatcatctgtggagtgggcatcttcatgcacaggaggagcaagaaagttcaacgaggatctgcataaacagggttcctgacctcaccgaaaagactaatgtgccttagaacaagcatttgctgtgttttgttagcacctggttccaggacagaccctcagcttcccaagaggatactgctgccaagaagttgctctgaagtcagtttctatcgttctgctctttgattcaaagcactgtttctctcactgggcctccaaccatgttcccttcttcttagcaccacaaataatcaaaacccaacataagtgtttgttttcctttaaaaatatgcatcaaatcgtctctcattacttttctctgagggttttagtaaacagtaggagttaataaagaagttcattttggtttacacgtaggaaagaagagaagcatgaaagtggagatatgttaactattgtataatgtggcctgttatacatgacactcttctgaattgactgtatttcagtgagctgcccccaaatcaagtttagtgccctcatccatttatgtctcagaccgctattcttaactattcaatggtgagcagactgcaaatctgcctgataggacccgtattcccacagcactaattcaacatatatcttactgagagcatgttttatcattaccattaagaagttaaatgaacatcagaatttaaaatcataaatataatctaatacactttaa

SEQ ID NO: 16872 - DNA, 1424 bp, Homo sapiens; identical to SEQ ID NO: 16855
  source 1..1424: mol_type = unassigned DNA

SEQ ID NO: 16873 - DNA, 1424 bp, Homo sapiens; identical to SEQ ID NO: 16854
  source 1..1424: mol_type = unassigned DNA

SEQ ID NO: 16874 - DNA, 688 bp, Homo sapiens; identical to SEQ ID NO: 16870
  source 1..688: mol_type = unassigned DNA

SEQ ID NO: 16875 - DNA, 1361 bp, Homo sapiens
  source 1..1361: mol_type = unassigned DNA
agaattaccttttccagggacggcaggaatgctacgcgtttaatgggacacagcgcttcctggagagatacatctacaaccgggaggagttcgtgcgcttcgacagcgacgtgggggagttccgggcggtgacggagctggggcggcctgatgaggagtactggaacagccagaaggacatcctggaggaggagcgggcagtgccggacaggatgtgcagacacaactacgagctgggcgggcccatgaccctgcagcgccgagtccagcctagggtgaatgtttccccctccaagaaggggcccttgcagcaccacaacctgcttgtctgccacgtgacggatttctacccaggcagcattcaagtccgatggttcctgaatggacaggaggaaacagctggggtcgtgtccaccaacctgatccgtaatggagactggaccttccagatcctggtgatgctggaaatgaccccccagcagggagatgtctacacctgccaagtggagcacaccagcctggatagtcctgtcaccgtggagtggaaggcacagtctgattctgcccggagtaagacattgacgggagctgggggcttcgtgctggggctcatcatctgtggagtgggcatcttcatgcacaggaggagcaagaaaggtgagaaagcctgcaggttcaacgaggatctgcataaacagggttcctgagctcactgaaaagactattgtgccttaggaaaagcatttgctgtgtttcgttagcatctggctccaggacagaccttcaacttccaaattggatactgctgccaagaagttgctctgaagtcagtttctatcattctgctctttgattcaaagcactgtttctctcactgggcctccaaccatgttcccttcttcttagcaccacaaataatcaaaacccaacatgactgtttgttttcctttaaaaatatgcaccaaatcatctctcatcacttttctctgagggttttagtagacagtaggagttaataaagaagttcattttggtttaaacataggaaagaagagaaccatgaaaatggggatatgttaactattgtataatggggcctgttacacatgacactcttctgaattgactgtatttcagtgagctgcccccaaatcaagtttagtgccctcatccatttatgtctcagaccactattcttaactattcaatggtgagcagactgcaaatctgcctgataggacccatattcccacagcactaattcaacatataccttactgagagcatgttttatcattaccattaagaagttaaatgaacatcagaatttaaaatcataaatataatctaatacactttaa

SEQ ID NO: 16876 - DNA, 1361 bp, Homo sapiens; identical to SEQ ID NO: 16861
  source 1..1361: mol_type = unassigned DNA

SEQ ID NO: 16877 - DNA, 1424 bp, Homo sapiens
  source 1..1424: mol_type = unassigned DNA
gagctccctttagcgagtccttcttttcctgactgcagctcttttcattttgccatccttttccagctccatgatggttctgcaggtttctgcggccccccggacagtggctctgacggcgttactgatggtgctgctcacatctgtggtccagggcagggccactccagagaattaccttttccagggacggcaggaatgctacgcgtttaatgggacacagcgcttcctggagagatacatctacaaccgggaggagttcgtgcgcttcgacagcgacgtgggggagttccgggcggtgacggagctggggcggcctgatgaggagtactggaacagccagaaggacatcctggaggaggagcgggcagtgccggacaggatgtgcagacacaactacgagctgggcgggcccatgaccctgcagcgccgaggcagcattcaagtccgatggttcctgaatggacaggaggaaacagctggggtcgtgtccaccaacctgatccgtaatggagactggaccttccagatcctggtgatgctggaaatgaccccccagcagggagatgtctacacctgccaagtggagcacaccagcctggatagtcctgtcaccgtggagtggaaggcacagtctgattctgcccggagtaagacattgacgggagctgggggcttcgtgctggggctcatcatctgtggagtgggcatcttcatgcacaggaggagcaagaaagttcaacgaggatctgcataaacagggttcctgagctcactgaaaagactattgtgccttaggaaaagcatttgctgtgtttcgttagcatctggctccaggacagaccttcaacttccaaattggatactgctgccaagaagttgctctgaagtcagtttctatcattctgctctttgattcaaagcactgtttctctcactgggcctccaaccatgttcccttcttcttagcaccacaaataatcaaaacccaacatgactgtttgttttcctttaaaaatatgcaccaaatcatctctcatcacttttctctgagggttttagtagacagtaggagttaataaagaagttcattttggtttaaacataggaaagaagagaaccatgaaaatggggatatgttaactattgtataatggggcctgttacacatgacactcttctgaattgactgtatttcagtgagctgcccccaaatcaagtttagtgccctcatccatttatgtctcagaccactattcttaactattcaatggtgagcagactgcaaatctgcctgataggacccatattcccacagcactaattcaacatataccttactgagagcatgttttatcattaccattaagaagttaaatgaacatcagaatttaaaatcataaatataatctaatacactttaa

SEQ ID NO: 16878 - DNA, 688 bp, Homo sapiens
  source 1..688: mol_type = unassigned DNA
aaacaggcctggagaggctctgcgacccgcttaggaccacagaactcgttacggcaggaatgctacgcgtttaatgggacacagcgcttcctggagagatacatctacaaccgggaggagttcgtgcgcttcgacagcgacgtgggggagttccgggcggtgacggagctggggcggcctgatgaggactactggaacagccagaaggacctcctggaggagaagcgggcagtgccggacagggtatgcagacacaactacgagctggacgaggccgtgaccctgcagcgccgagtccagcctaaggtgaacgtttccccctccaagaaggggcccctgcagcaccacaacctgcttgtctgccacgtgacagatttctacccaggcagcattcaagtccgatggttcctgaatggacaggaggaaacagctggggtcgtgtccaccaacctgatccgtaatggagactggaccttccagatcctggtgatgctggaaatgaccccccagcagggagacgtctacatctgccaagtggagcacaccagcctggacagtcctgtcaccgtggagtggaaggcacagtctgattctgcccggagtaagacattgacgggagctgggggcttcgtgctggggctcatcatctgtggagtgggcatcttcatgcacaggaggagcaagaaag

SEQ ID NO: 16879 - DNA, 1560 bp, Homo sapiens; identical to SEQ ID NO: 16863
  source 1..1560: mol_type = unassigned DNA

SEQ ID NO: 16880 - DNA, 1361 bp, Homo sapiens; identical to SEQ ID NO: 16856
  source 1..1361: mol_type = unassigned DNA

SEQ ID NO: 16881 - DNA, 688 bp, Homo sapiens; identical to SEQ ID NO: 16862
  source 1..688: mol_type = unassigned DNA

SEQ ID NO: 16882 - DNA, 1361 bp, Homo sapiens; identical to SEQ ID NO: 16861
  source 1..1361: mol_type = unassigned DNA

SEQ ID NO: 16883 - DNA, 940 bp, Homo sapiens
  source 1..940: mol_type = unassigned DNA
aaacaggagctccctttagcgagtccttcttttcctgactgcagctcttttcattttgccatccttttccagctccatgatggttctgcaggtttctgcggccccccggacagtggctctgacggcgttactgatggtgctgctcacatctgtggtccagggcagggccactccagagaattaccttttccagggacggcaggaatgctacgcgtttaatgggacacagcgcttcctggagagatacatctacaaccgggaggagttcgcgcgcttcgacagcgacgtgggggagttccgggcggtgacggagctggggcggcctgctgcggagtactggaacagccagaaggacatcctggaggagaagcgggcagtgccggacaggatgtgcagacacaactacgagctgggcgggcccatgaccctgcagcgccgaggtgagtgagggctttgggccggcggtcccagggcagccccgcgggcccgtgcccagggcgcaggagcagccgggttggcctaagggaccttagtgccgggcggaaaggggactttgggttggggattcatggggggagcccatctggagcttgtcaggggagcgagcgcggggacctggactgggctgagcatggagtgaggaggacgagagcagagagacccccgggacttcatcaggcctggcagctgactgcatgtggggtgaaaaaaggaagccacaggacagcgcacaagggtatggtgtggagatggaggtggagatggcacagcaggccacacagagaagaaacctacagggagaaagaggaaaaaaatgaagggaggaggaggaggaagctggggagatcacacctttgattttcttgttcctggaaagtgaaaggaagttcacctgctatgagtgagaaggtggacacactgggtggggatgaggtgagtg

SEQ ID NO: 16884 - DNA, 1499 bp, Homo sapiens
  source 1..1499: mol_type = unassigned DNA
agcgagtccttcttttcctgactgcagctcttttcattttgccatccttttccagctccatgatggttctgcaggtttctgcggccccccggacagtggctctgacggcgttactgatggtgctgctcacatctgtggtccagggcagggccactccagagaattaccttttccagggacggcaggaatgctacgcgtttaatgggacacagcgcttcctggagagatacatctacaaccgggaggagttcgtgcgcttcgacagcgacgtgggggagttccgggcggtgacggagctggggcggcctgatgaggagtactggaacagccagaaggacatcctggaggaggagcgggcagtgccggacaggatgtgcagacacaactacgagctgggcgggcccatgaccctgcagcgccgagtccagcctagggtgaatgtttccccctccaagaaggggcccttgcagcaccacaacctgcttgtctgccacgtgacggatttctacccaggcagcattcaagtccgatggttcctgaatggacaggaggaaacagctggggtcgtgtccaccaacctgatccgtaatggagactggaccttccagatcctggtgatgctggaaatgaccccccagcagggagatgtctacacctgccaagtggagcacaccagcctggatagtcctgtcaccgtggagtggaaggcacagtctgattctgcccggagtaagacattgacgggagctgggggccgtgctggggctcatcatctgtggagtgggcatcttcatgcacaggaggagcaagaaagttcaacgaggatctgcataaacagggttcctgagctcactgaaaagactattgtgccttaggaaaagcatttgctgtgtttcgttagcatctggctccaggacagaccttcaacttccaaattggatactgctgccaagaagttgctctgaagtcagtttctatcattctgctctttgattcaaagcactgtttctctcactgggcctccaaccatgttcccttcttcttagcaccacaaataatcaaaacccaacatgactgtttgttttcctttaaaaatatgcaccaaatcatctctcatcacttttctctgagggttttagtagacagtaggagttaataaagaagttcattttggtttaaacataggaaagaagagaaccatgaaaatggggatatgttaactattgtataatggggcctgttacacatgacactcttctgaattgactgtatttcagtgagctgcccccaaatcaagtttagtgccctcatccatttatgtctcagaccactattcttaactattcaatggtgagcagactgcaaatctgcctgataggacccatattcccacagcactaattcaacatataccttactgagagcatgttttatcattaccattaagaagttaaatgaacatcagaatttaaaatcataaatataatctaatacacttt

SEQ ID NO: 16885 - DNA, 1499 bp, Homo sapiens; identical to SEQ ID NO: 16864
  source 1..1499: mol_type = unassigned DNA

SEQ ID NO: 16886 - DNA, 940 bp, Homo sapiens
  source 1..940: mol_type = unassigned DNA
aaacaggagctccctttagcgagtccttcttttcctgactgcagctcttttcattttgccatccttttccagctccatgatggttctgcaggtttctgcggccccccggacagtggctctgacggcgttactgatggtgctgctcacatctgtggtccagggcagggccactccagagaattaccttttccagggacggcaggaatgctacgcgtttaatgggacacagcgcttcctggagagatacatctacaaccgggaggagctcgtgcgcttcgacagcgacgtgggggagttccgggcggtgacggagctggggcggcctgaggcggagtactggaacagccagaaggacatcctggaggaggagcgggcagtgccggacaggatgtgcagacacaactacgagctgggcgggcccatgaccctgcagcgccgaggtgagtgagggctttgggccggcggtcccagggcagccccgcgggcccgtgcccagggcgcaggagcagccgggttggcctaagggaccttagtgccgggcggaaaggggactttgggttggggattcatggggggagcccatctggagcttgtcaggggagcgagcgcggggacctggactgggctgagcatggagtgaggaggacgagagcagagagacccccgggacttcatcaggcctggcagctgactgcatgtggggtgaaaaaaggaagccacaggacagcgcacaagggtatggtgtggagatggaggtggagatggcacagcaggccacacagagaagaaacctacagggagaaagaggaaaaaaatgaagggaggaggaggaggaagctggggagatcacacctttgattttcttgttcctggaaagtgaaaggaagttcacctgctatgagtgagaaggtggacacactgggtggggatgaggtgagtg

SEQ ID NO: 16887 - DNA, 940 bp, Homo sapiens
  source 1..940: mol_type = unassigned DNA
aaacaggagctccctttagcgagtccttcttttcctgactgcagctcttttcattttgccatccttttccagctccatgatggttctgcaggtttctgcggccccccggacagtggctctgacggcgttactgatggtgctgctcacatctgtggtccagggcagggccactccagagaattaccttttccagggacggcaggaatgctacgcgtttaatgggacacagcgcttcctggagagatacatctacaaccgggaggagttcgtgcgcttcgacagcgacgtgggggagttccgggcggtgacggagctggggcggcctgatgaggagtactggaacagccagaaggacatcctggaggagaagcgggcagtgccggacaggatgtgcagacacaactacgagctgggcgggcccatgaccctgcagcgccgaggtgagtgagggctttgggccggcggtcccagggcagccccgcgggcccgtgcccagggcgcaggagcagccgggttggcctaagggaccttagtgccgggcggaaaggggactttgggttggggattcatggggggagcccatctggagcttgtcaggggagcgagcgcggggacctggactgggctgagcatggagtgaggaggacgagagcagagagacccccgggacttcatcaggcctggcagctgactgcatgtggggtgaaaaaaggaagccacaggacagcgcacaagggtatggtgtggagatggaggtggagatggcacagcaggccacacagagaagaaacctacagggagaaagaggaaaaaaatgaagggaggaggaggaggaagctggggagatcacacctttgattttcttgttcctggaaagtgaaaggaagttcacctgctatgagtgagaaggtggacacactgggtggggatgaggtgagtg

SEQ ID NO: 16888 - DNA, 940 bp, Homo sapiens
  source 1..940: mol_type = unassigned DNA
aaacaggagctccctttagcgagtccttcttttcctgactgcagctcttttcattttgccatccttttccagctccatgatggttctgcaggtttctgcggccccccggacagtggctctgacggcgttactgatggtgctgctcacatctgtggtccagggcagggccactccagagaattaccttttccagggacggcaggaatgctacgcgtttaatgggacacagcgcttcctggagagatacatctacaaccgggaggagttcgtgcgcttcgacagcgacgtgggggagttccgggcggtgacggagctggggcggcctgatgaggagtactggaacagccagaaggacatcctggaggaggagcgggcagtgccggacaggatgtgcagacacaactacgagctgggcgggcccatgaccctgcagcgccgaggtgagtgagggctttgggccggcggtcccagggcagccccgcgggcccgtgcccagggcgcaggagcagccgggttggcctaagggaccttagtgccgggcggaaaggggactttgggttggggattcatggggggagcccatctggagcttgtcaggggagcgagcgcggggacctggactgggctgagcatggagtgaggaggacgagagcagagagacccccgggacttcatcaggcctggcagctgactgcatgtggggtgaaaaaaggaagccacaggacagcgcacaagggtatggtgtggagatggaggtggagatggcacagcaggccacacagagaagaaacctacagggagaaagaggaaaaaaatgaagggaggaggaggaggaagctggggagatcacacctttgattttcttgttcctggaaagtgaaaggaagttcacctgctatgagtgagaaggtggacacactgggtggggatgaggtgagtg

SEQ ID NO: 16889 - DNA, 1510 bp, Homo sapiens
  source 1..1510: mol_type = unassigned DNA
cttcttttcctgactgcagctcttttcattttgccatccttttccagctccatgatggttctgcaggtttctgcggccccccggacagtggctctgacggcgttactgatggtgctgctcacatctgtggtccagggcagggccactccagagaattacgtgtaccagttacggcaggaatgctacgcgtttaatgggacacagcgcttcctggagagatacatctacaaccgggaggagttcgtgcgcttcgacagcgacgtgggggagttccgggcggtgacggagctggggcggcctgatgaggactactggaacagccagaaggacctcctggaggagaagcgggcagtgccggacagggtatgcagacacaactacgagctggacgaggccgtgaccctgcagcgccgagtccagcctaaggtgaacgtttccccctccaagaaggggcccctgcagcaccacaacctgcttgtctgccacgtgacagatttctacccaggcagcattcaagtccgatggttcctgaatggacaggaggaaacagctggggtcgtgtccaccaacctgatccgtaatggagactggaccttccagatcctggtgatgctggaaatgaccccccagcagggagacgtctacatctgccaagtggagcacaccagcctggacagtcctgtcaccgtggagtggaaggcacagtctgattctgcccggagtaagacattgacgggagctgggggcttcgtgctggggctcatcatctgtggagtgggcatcttcatgcacaggaggagcaagaaaggtgagaaagcctgcaagttcaacgaggatctgcataaacagggttcctgacctcaccgaaaagactaatgtgccttagaacaagcatttgctgtgttttgttagcacctggttccaggacagaccctcagcttcccaagaggatactgctgccaagaagttgctctgaagtcagtttctatcgttctgctctttgattcaaagcactgtttctctcactgggcctccaaccatgttcccttcttcttagcaccacaaataatcaaaacccaacataagtgtttgttttcctttaaaaatatgcatcaaatcgtctctcattacttttctctgagggttttagtaaacagtaggagttaataaagaagttcattttggtttacacgtaggaaagaagagaagcatgaaagtggagatatgttaactattgtataatgtggcctgttatacatgacactcttctgaattgactgtatttcagtgagctgcccccaaatcaagtttagtgccctcatccatttatgtctcagaccgctattcttaactattcaatggtgagcagactgcaaatctgcctgataggacccgtattcccacagcactaattcaacatatatcttactgagagcatgttttatcattaccattaagaagttaaatgaacatcagaatttaaaatcataaatataatctaatacacttt

SEQ ID NO: 16890 - DNA, 1499 bp, Homo sapiens
  source 1..1499: mol_type = unassigned DNA
agcgagtccttcttttcctgactgcagctcttttcattttgccatccttttccagctccatgatggttctgcaggtttctgcggccccccggacagtggctctgacggcgttactgatggtgctgctcacatctgtggtccagggcagggccactccagagaattaccttttccagggacggcaggaatgctacgcgtttaatgggacacagcgcttcctggagagatacatctacaaccgggaggagctcgtgcgcttcgacagcgacgtgggggagttccgggcggtgacggagctggggcggcctgaggcggagtactggaacagccagaaggacatcctggaggaggagcgggcagtgccggacaggatgtgcagacacaactacgagctgggcgggcccatgaccctgcagcgccgagtccagcctagggtgaatgtttccccctccaagaaggggcccttgcagcaccacaacctgcttgtctgccacgtgacggatttctacccaggcagcattcaagtccgatggttcctgaatggacaggaggaaacagctggggtcgtgtccaccaacctgatccgtaatggagactggaccttccagatcctggtgatgctggaaatgaccccccagcagggagatgtctacacctgccaagtggagcacaccagcctggatagtcctgtcaccgtggagtggaaggcacagtctgattctgcccggagtaagacattgacgggagctgggggccgtgctggggctcatcatctgtggagtgggcatcttcatgcacaggaggagcaagaaagttcaacgaggatctgcataaacagggttcctgagctcactgaaaagactattgtgccttaggaaaagcatttgctgtgtttcgttagcatctggctccaggacagaccttcaacttccaaattggatactgctgccaagaagttgctctgaagtcagtttctatcattctgctctttgattcaaagcactgtttctctcactgggcctccaaccatgttcccttcttcttagcaccacaaataatcaaaacccaacatgactgtttgttttcctttaaaaatatgcaccaaatcatctctcatcacttttctctgagggttttagtagacagtaggagttaataaagaagttcattttggtttaaacataggaaagaagagaaccatgaaaatggggatatgttaactattgtataatggggcctgttacacatgacactcttctgaattgactgtatttcagtgagctgcccccaaatcaagtttagtgccctcatccatttatgtctcagaccactattcttaactattcaatggtgagcagactgcaaatctgcctgataggacccatattcccacagcactaattcaacatataccttactgagagcatgttttatcattaccattaagaagttaaatgaacatcagaatttaaaatcataaatataatctaatacacttt

SEQ ID NO: 16891 - DNA, 940 bp, Homo sapiens; identical to SEQ ID NO: 16883
  source 1..940: mol_type = unassigned DNA

SEQ ID NO: 16892 - DNA, 940 bp, Homo sapiens; identical to SEQ ID NO: 16883
  source 1..940: mol_type = unassigned DNA

SEQ ID NO: 16893 - DNA, 908 bp, Homo sapiens
  source 1..908: mol_type = unassigned DNA
aattaccttttccagggacggcaggaatgctacgcgtttaatgggacacagcgcttcctggagagatacatctacaaccgggaggagttcgtgcgcttcgacagcgacgtgggggagttccgggcggtgacggagctggggcggcctgatgaggagtactggaacagccagaaggacatcctggaggagaagcgggcagtgccggacaggatgtgcagacacaactacgagctgggcgggcccatgaccctgcagcgccgagtccagcctagggtgaatgtttccccctccaagaaggggcccttgcagcaccacaacctgcttgtctgccacgtgacggatttctacccaggcagcattcaagtccgatggttcctgaatggacaggaggaaacagctggggtcgtgtccaccaacctgatccgtaatggagactggaccttccagatcctggtgatgctggaaatgaccccccagcagggagatgtctacacctgccaagtggagcacaccagcatggatagtcctgtcaccgtggagtggaaggcacagtctgattctgcccggagtaagacattgacgggagctgggggccgtgctggggctcatcatctgtggagtgggcatcttcatgcacaggaggagcaagaaagttcaacgaggatctgcataaacagggttcctgagctcactgaaaagactattgtgccttaggaaaagcatttgctgtgtttcgttagcatctggctccaggacagaccttcaacttccaaattggatactgctgccaagaagttgctctgaagtcagtttctatcattctgctctttgattcaaagcactgtttctctcactgggcctccaaccatgttcccttcttcttagcaccacaaataatcaaaacccaa

SEQ ID NO: 16894 - DNA, 1400 bp, Homo sapiens
  source 1..1400: mol_type = unassigned DNA
aatatttcaaacaggagctccctttagcgagtccttcttttcctgactgcagctcttttcattttgccatccttttccagctccatgatggttctgcaggtttctgcggccccccggacagtggctctgacggcgttactgatggtgctgctcacatctgtggtccagggcagggccactccagagaattacgtgtaccagttacggcaggaatgctacgcgtttaatgggacacagcgcttcctggagagatacatctacaaccgggaggagttcgtgcgcttcgacagcgacgtgggggagttccgggcggtgacggagctggggcggcctgatgaggactactggaacagccagaaggacctcctggaggagaagcgggcagtgccggacagggtatgcagacacaactacgagctggacgaggccgtgaccctgcagcgccgagaaagaggaaaaaaatgaagggaggaggaggaggaagctggggagatcacacctttgattttcttgttcctggaaagtgaaaggaagttcacctgctatgagtgagaaggtggacacactgggtggggatgagtccagcctaaggtgaacgtttccccctccaagaaggggcccctgcagcaccacaacctgcttgtctgccacgtgacagatttctacccaggcagcattcaagtccgatggttcctgaatggacaggaggaaacagctggggtcgtgtccaccaacctgatccgtaatggagactggaccttccagatcctggtgatgctggaaatgaccccccagcagggagacgtctacatctgccaagtggagcacaccagcctggacagtcctgtcaccgtggagtggaaggcacagtctgattctgcccggagtaagacattgacgggagctgggggcttcgtgctggggctcatcatctgtggagtgggcatcttcatgcacaggaggagcaagaaagttcaacgaggatctgcataaacagggttcctgacctcaccgaaaagactaatgtgccttagaacaagcatttgctgtgttttgttagcacctggttccaggacagaccctcagcttcccaagaggatactgctgccaagaagttgctctgaagtcagtttctatcgttctgctctttgattcaaagcactgtttctctcactgggcctccaaccatgttcccttcttcttagcaccacaaataatcaaaacccaacataagtgtttgttttcctttaaaaatatgcatcaaatcgtctctcattacttttctctgagggttttagtaaacagtaggagttaataaagaagttcattttggtttacacgtaggaaagaagagaagcatgaaagtggagatatgttaactattgtataatgtggcctgt

SEQ ID NO: 16895 - DNA, 1491 bp, Homo sapiens
  source 1..1491: mol_type = unassigned DNA
cttcttttcctgactgcagctcttttcattttgccatccttttccagctccatgatggttctgcaggtttctgcggccccccggacagtggctctgacggcgttactgatggtgctgctcacatctgtggtccagggcagggccactccagagaattacgtgtaccagttacggcaggaatgctacgcgtttaatgggacacagcgcttcctggagagatacatctacaaccgggaggagttcgtgcgcttcgacagcgacgtgggggagttccgggcggtgacggagctggggcggcctgatgaggactactggaacagccagaaggacctcctggaggagaagcgggcagtgccggacagggtatgcagacacaactacgagctggacgaggccgtgaccctgcagcgccgagtccagcctaaggtgaacgtttccccctccaagaaggggcccctgcagcaccacaacctgcttgtctgccacgtgacagatttctacccaggcagcattcaagtccgatggttcctgaatggacaggaggaaacagctggggtcgtgtccaccaacctgatccgtaatggagactggaccttccagatcctggtgatgctggaaatgaccccccagcagggagacgtctacatctgccaagtggagcacaccagcctggacagtcctgtcaccgtggagtggaaggcacagtctgattctgcccggagtaagacattgacgggagctgggggccgtgctggggctcatcatctgtggagtgggcatcttcatgcacaggaggagcaagaaagttcaacgaggatctgcataaacagggttcctgacctcaccgaaaagactaatgtgccttagaacaagcatttgctgtgttttgttagcacctggttccaggacagaccctcagcttcccaagaggatactgctgccaagaagttgctctgaagtcagtttctatcgttctgctctttgattcaaagcactgtttctctcactgggcctccaaccatgttcccttcttcttagcaccacaaataatcaaaacccaacataagtgtttgttttcctttaaaaatatgcatcaaatcgtctctcattacttttctctgagggttttagtaaacagtaggagttaataaagaagttcattttggtttacacgtaggaaagaagagaagcatgaaagtggagatatgttaactattgtataatgtggcctgttatacatgacactcttctgaattgactgtatttcagtgagctgcccccaaatcaagtttagtgccctcatccatttatgtctcagaccgctattcttaactattcaatggtgagcagactgcaaatctgcctgataggacccgtattcccacagcactaattcaacatatatcttactgagagcatgttttatcattaccattaagaagttaaatgaacatcagaatttaaaatcataaatataatctaatacacttt

SEQ ID NO: 16896 - DNA, 1499 bp, Homo sapiens; identical to SEQ ID NO: 16864
  source 1..1499: mol_type = unassigned DNA

SEQ ID NO: 16897 - DNA, 940 bp, Homo sapiens; identical to SEQ ID NO: 16887
  source 1..940: mol_type = unassigned DNA

SEQ ID NO: 16898 - DNA, 908 bp, Homo sapiens; identical to SEQ ID NO: 16893
  source 1..908: mol_type = unassigned DNA

SEQ ID NO: 16899 - DNA, 1591 bp, Homo sapiens
  source 1..1591: mol_type = unassigned DNA
ggcagggtttggtttgggtgtcttcagatttccttgtcttgaggtcctcacaattactctacagctcagaacaccaactgctgaggctgccttgggaagaggatgatcctaaacaaagctctgctgctgggggccctcgctctgaccaccgtgatgagcccctgtggaggtgaagacattgtggctgaccacgttgcctcttgtggtgtaaacttgtaccagttttacggtccctctggccagtacacccatgaatttgatggagatgagcagttctacgtggacctggagaggaaggagactgcctggcggtggcctgagttcagcaaatttggaggttttgacccgcagggtgcactgagaaacatggctgtggcaaaacacaacttgaacatcatgattaaacgctacaactctaccgctgctaccaatgaggttcctgaggtcacagtgttttccaagtctcccgtgacactgggtcagcccaacaccctcatttgtcttgtggacaacatctttcctcctgtggtcaacatcacatggctgagcaatgggcagtcagtcacagaaggtgtttctgagaccagcttcctctccaagagtgatcattccttcttcaagatcagttacctcaccttcctcccttctgctgatgagatttatgactgcaaggtggagcactggggcctggaccagcctcttctgaaacactgggagcctgagattccagcccctatgtcagagctcacagagactgtggtctgtgccctggggttgtctgtgggcctcatgggcattgtggtgggcactgtcttcatcatccaaggcctgcgttcagttggtgcttccagacaccaagggccattgtgaatcccatcctggaagggaaggtgcatcgccatctacaggagcagaagaatggacttgctaaatgacctagcactattctctggcccgatttatcatatcccttttctcctccaaatatttctcctctcaccttttctctgggacttaagctgctatatcccctcagagctcacaaatgcctttacattctttccctgacctcctgattttttttttcttttctcaaatgttacctacaaagacatgcctggggtaagccacccggctacctaattcctcagtaacctccatctaaaatctccaaggaagcaataaattccttttatgagatctatgtcaaatttttccatctttcatccagggctgactgaaactatggctaataattggggtactcttatgtttcaatccaatttaacctcatttcccagatcatttttcatgtccagtaacacagaagccaccaagtacagtatagcctgataatatgttgatttcttagctgacattaatatttcttgcttccttgtgttcccacccttggcactgccacccacccctcaattcaggcaacaatgaaattaatggataccgtctgcccttggcccagaattgttatagcaaaaattttagaaccaaaaaataagtctgtactaatttcaatgtggcttttaaaagtatgacagagaaataagttaggataaaggaaatttgaatctca

SEQ ID NO: 16900 - DNA, 1060 bp, Homo sapiens
  source 1..1060: mol_type = unassigned DNA
gctcagaacaccaactgctgaggctgccttgggaagaggatgatcctaaacaaagctctgctgctgggggccctcgctctgaccaccgtgatgagcccctgtggaggtgaagacattgtggctgaccacgttgcctcttgtggtgtaaacttgtaccagttttacggtccctctggccagtacacccatgaatttgatggagatgagcagttctacgtggacctggagaggaaggagactgcctggcggtggcctgagttcagcaaatttggaggttttgacccgcagggtgcactgagaaacatggctgtggcaaaacacaacttgaacatcatgattaaacgctacaactctaccgctgctaccaatgaggttcctgaggtcacagtgttttccaagtctcccgtgacactgggtcagcccaacaccctcatttgtcttgtggacaacatctttcctcctgtggtcaacatcacatggctgagcaatgggcagtcagtcacagaaggtgtttctgagaccagcttcctctccaagagtgatcattccttcttcaagatcagttacctcaccttcctcccttctgctgatgagatttatgactgcaaggtggagcactggggcctggaccagcctcttctgaaacactgggagcctgagattccagcccctatgtcagagctcacagagactgtggtctgtgccctggggttgtctgtgggcctcatgggcattgtggtgggcactgtcttcatcatccaaggcctgcgttcagttggtgcttccagacaccaagggccattgtgaatcccatcctggaagggaaggtaagattgagactggttacagttgaagcggcagtatgaaaggaaggaaagtgggagggcgttgtggacatgaatgtggttgaaagttgtaggggaattgggaagtggcatgatgatgacacaggagccccctcggacccattgatctcatgtctgccctgttgcaggtgcatcgccatctacaggagcagaagaatggacttgctaaatgacctagcactattctctggccc

SEQ ID NO: 16901 - DNA, 1522 bp, Homo sapiens
  source 1..1522: mol_type = unassigned DNA
ggcagggtttggtttgggtgtcttcagattgccttgtctcgaggtcctcacaattgctctacaactcagaacagcaactgctaaggctgccttgggaagaggatgatcctaaacaaagctctgatgctgggggcccttgccctgaccaccgtgatgagcccctgtggaggtgaagacattgtggctgaccacgtcgcctcttatggtgtaaacttgtaccagtcttacggtccctctggccagtacacccatgaatttgatggagatgagcagttctacgtggacctggggaggaaggagactgtctggtgtttgcctgttctcagacaatttagatttgacccgcaatttgcactgacaaacatcgctgtcctaaaacataacttgaacagtctgattaaacgctccaactctaccgctgctaccaatgaggttcctgaggtcacagtgttttccaagtctcccgtgacactgggtcagcccaacatcctcatctgtcttgtggacaacatctttcctcctgtggtcaacatcacatggctgagcaatgggcactcagtcacagaaggtgtttctgagaccagcttcctctccaagagtgatcattccttcttcaagatcagttacctcaccctcctcccttctgctgaggagagttatgactgcaaggtggagcactggggcctggacaagcctcttctgaaacactgggagcctgagattccagcccctatgtcagagctcacagagactgtggtctgcgccctgggattgtctgtgggcctcgtgggcattgtggtgggcactgtcttcatcatccgaggcctgcgttcagttggtgcttccagacaccaagggcccttgtgaatcccatcctggaatggaaggtgcatcgccatctacaggagcagaagagtggacttgctacatgacctagcattattttctggccccatttatcatatcccttttctcctccaaatgtttctcctctcacctcttctgtgggacttaaattgctatatctgctcagagctcacaaatgcctttgaattatttccctgacttcctgatttttttcttcttaagtgttacctactaagagttgcctggagtaagccacccagctacctaattcctcagtaacctccatctataatctccatggaagcaacaaattccctttatgagatatatgtcaaatttttccatctttcatccagggctgactgaaaccgtggctaagaattgggagactctcttgtttcaagccaatttaacatcatttaccagatcatttgtcatgtccagtaacacagaagcaaccaactacagtatagcctgataacatgatttcttagctgacattaatatttctttcttccttgtgttcccacccttggcattgccacccacccctcaattaaggcaacaatgaagttaatggataccctctgcctttggctcagaaatgttatagcaaaaattttaaaataaaaaagtaagtctgtactaatttcaa

SEQ ID NO: 16902 - DNA, 1206 bp, Homo sapiens
  source 1..1206: mol_type = unassigned DNA
tcctcacaattactctacagctcagaacaccaactgctgaggctgccttgggaagaggatgatcctaaacaaagctctgctgctgggggccctcgctctgaccaccgtgatgagcccctgtggaggtgaagacattgtggctgaccacgttgcctcttgtggtgtaaacttgtaccagttttacggtccctctggccagtacacccatgaatttgatggagatgagcagttctacgtggacctggagaggaaggagactgcctggcggtggcctgagttcagcaaatttggaggttttgacccgcagggtgcactgagaaacatggctgtggcaaaacacaacttgaacatcatgattaaacgctacaactctaccgctgctaccaatgaggttcctgaggtcacagtgttttccaagtctcccgtgacactgggtcagcccaacaccctcatttgtcttgtggacaacatctttcctcctgtggtcaacatcacatggctgagcaatgggcagtcagtcacagaaggtgtttctgagaccagcttcctctccaagagtgatcattccttcttcaagatcagttacctcaccttcctcccttctgctgatgagatttatgactgcaaggtggagcactggggcctggaccagcctcttctgaaacactgggagcctgagattccagcccctatgtcagagctcacagagactgtggtctgtgccctggggttgtctgtgggcctcatgggcattgtggtgggcactgtcttcatcatccaaggcctgcgttcagttggtgcttccagacaccaagggccattgtgaatcccatcctggaagggaagggctgactgaaactatggctaataattggggtactcttatgtttcaatccaatttaacctcatttcccagatcatttttcatgtccagtaacacagaagccaccaagtacagtatagcctgataatatgttgatttcttagctgacattaatatttcttgcttccttgtgttcccacccttggcactgccacccacccctcaattcaggcaacaatgaaattaatggataccgtctgcccttggcccagaattgttatagcaaaaattttagaaccaaaaaataagtctgtactaatttcaatgtggcttttaaaagtatgacagagaaataagttaggataaaggaaatttgaatctca

SEQ ID NO: 16903 - DNA, 1385 bp, Homo sapiens
  source 1..1385: mol_type = unassigned DNA
ggcagggtttggtttgggtgtcttcagatttccttgtcttgaggtcctcacaattactctacagctcagaacaccaactgctgaggctgccttgggaagaggatgatcctaaacaaagctctgctgctgggggccctcgctctgaccaccgtgatgagcccctgtggaggtgaagacattgtggctgaccacgttgcctcttgtggtgtaaacttgtaccagttttacggtccctctggccagtacacccatgaatttgatggagatgagcagttctacgtggacctggagaggaaggagactgcctggcggtggcctgagttcagcaaatttggaggttttgacccgcagggtgcactgagaaacatggctgtggcaaaacacaacttgaacatcatgattaaacgctacaactctaccgctgctaccaatgaggttcctgaggtcacagtgttttccaagtctcccgtgacactgggtcagcccaacaccctcatttgtcttgtggacaacatctttcctcctgtggtcaacatcacatggctgagcaatgggcagtcagtcacagaaggtgtttctgagaccagcttcctctccaagagtgatcattccttcttcaagatcagttacctcaccttcctcccttctgctgatgagatttatgactgcaaggtggagcactggggcctggaccagcctcttctgaaacactgggagcctgagattccagcccctatgtcagagctcacagagactgtggtctgtgccctggggttgtctgtgggcctcatgggcattgtggtgggcactgtcttcatcatccaaggcctgcgttcagttggtgcttccagacaccaagggccattgtgaatcccatcctggaagggaagatgttacctacaaagacatgcctggggtaagccacccggctacctaattcctcagtaacctccatctaaaatctccaaggaagcaataaattccttttatgagatctatgtcaaatttttccatctttcatccagggctgactgaaactatggctaataattggggtactcttatgtttcaatccaatttaacctcatttcccagatcatttttcatgtccagtaacacagaagccaccaagtacagtatagcctgataatatgttgatttcttagctgacattaatatttcttgcttccttgtgttcccacccttggcactgccacccacccctcaattcaggcaacaatgaaattaatggataccgtctgcccttggcccagaattgttatagcaaaaattttagaaccaaaaaataagtctgtactaatttcaatgtggcttttaaaagtatgacagagaaataagttaggataaaggaaatttgaatctca

SEQ ID NO: 16904 - DNA, 1103 bp, Homo sapiens
  source 1..1103: mol_type = unassigned DNA
aggctgccttgggaagaggatgatcctaaacaaagctctgatgctgggggcccttgccctgaccaccgtgatgagcccctgtggaggtgaagacattgtggctgaccacgtcgcctcttatggtgtaaacttgtaccagtcttacggtccctctggccagtacacccatgaatttgatggagatgagcagttctacgtggacctggggaggaaggagactgtctggtgtttgcctgttctcagacaatttagatttgacccgcaatttgcactgacaaacatcgctgtcctaaaacataacttgaacagtctgattaaacgctccaactctaccgctgctaccaatgaggttcctgaggtcacagtgttttccaagtctcccgtgacactgggtcagcccaacatcctcatctgtcttgtggacaacatctttcctcctgtggtcaacatcacatggctgagcaatgggcactcagtcacagaaggtgtttctgagaccagcttcctctccaagagtgatcattccttcttcaagatcagttacctcaccctcctcccttctgctgaggagagttatgactgcaaggtggagcactggggcctggacaagcctcttctgaaacactgggagcctgagattccagcccctatgtcagagctcacagagactgtggtctgcgccctgggattgtctgtgggcctcgtgggcattgtggtgggcactgtcttcatcatccgaggcctgcgttcagttggtgcttccagacaccaagggcccttgtgaatcccatcctggaatggaagggctgactgaaaccgtggctaagaattgggagactctcttgtttcaagccaatttaacatcatttaccagatcatttgtcatgtccagtaacacagaagcaaccaactacagtatagcctgataacatgatttcttagctgacattaatatttctttcttccttgtgttcccacccttggcattgccacccacccctcaattaaggcaacaatgaagttaatggataccctctgcctttggctcagaaatgttatagcaaaaattttaaaataaaaaagtaagtctgtactaatttcaa

SEQ ID NO: 16905 - DNA, 1237 bp, Homo sapiens
  source 1..1237: mol_type = unassigned DNA
aggctgccttgggaagaggatgatcctaaacaaagctctgatgctgggggcccttgccctgaccaccgtgatgagcccctgtggaggtgaagacattgtggctgaccacgtcgcctcttatggtgtaaacttgtaccagtcttacggtccctctggccagtacacccatgaatttgatggagatgagcagttctacgtggacctggggaggaaggagactgtctggtgtttgcctgttctcagacaatttagatttgacccgcaatttgcactgacaaacatcgctgtcctaaaacataacttgaacagtctgattaaacgctccaactctaccgctgctaccaatgaggttcctgaggtcacagtgttttccaagtctcccgtgacactgggtcagcccaacatcctcatctgtcttgtggacaacatctttcctcctgtggtcaacatcacatggctgagcaatgggcactcagtcacagaaggtgtttctgagaccagcttcctctccaagagtgatcattccttcttcaagatcagttacctcaccctcctcccttctgctgaggagagttatgactgcaaggtggagcactggggcctggacaagcctcttctgaaacactgggagcctgagattccagcccctatgtcagagctcacagagactgtggtctgcgccctgggattgtctgtgggcctcgtgggcattgtggtgggcactgtcttcatcatccgaggcctgcgttcagttggtgcttccagacaccaagggcccttgtgaatcccatcctggaatggaagtgttacctactaagagttgcctggagtaagccacccagctacctaattcctcagtaacctccatctataatctccatggaagcaacaaattccctttatgagatatatgtcaaatttttccatctttcatccagggctgactgaaaccgtggctaagaattgggagactctcttgtttcaagccaatttaacatcatttaccagatcatttgtcatgtccagtaacacagaagcaaccaactacagtatagcctgataacatgatttcttagctgacattaatatttctttcttccttgtgttcccacccttggcattgccacccacccctcaattaaggcaacaatgaagttaatggataccctctgcctttggctcagaaatgttatagcaaaaattttaaaataaaaaagtaagtctgtactaatttcaa

SEQ ID NO: 16906 - DNA, 520 bp, Homo sapiens
  source 1..520: mol_type = unassigned DNA
aagagcaaaataatatgaaaagtatttaacaaggaatataaagaatcatcaaagaaaatgttataaaacttctttgagaccacaagagatgatagagatggggtttcactgtgttagcgaggatggtcttgatctcctgacctcgtgatccgcctgcttctgcctcccaaagtgctgggattacagtcgtgagccaccgcgcctggcctcctcatattattttttattgtgcagtttattcaagagagctttccagcacctgtgataagcctcagcccgcctgctggataatgagcccacatggattgagagaggcctcctatccctgccaaacctattgatgctacagagatgtgagggagcccacctgagaaaagctgaacctgcccagtacataaaaaccactcagctcagaacagcaactgctgaggctgccttgggaagaagatgatcctaaacaaagctctgatgctgggggccctcgccctgaccaccgtgatgagcccttgtggaggtgaag

SEQ ID NO: 16907 - DNA, 1203 bp, Homo sapiens
  source 1..1203: mol_type = unassigned DNA
tcctcacaattactctacagctcagaacagcaactgctgaggctgccttgggaagaagatgatcctaaacaaagctctgatgctgggggccctcgccctgaccaccgtgatgagcccttgtggaggtgaagacattgtggctgaccacgttgcctcttacggtgtaaacttgtaccagtcttacggtccctctggccagttcacccatgaatttgatggagacgaggagttctatgtggacctggagaggaaggagactgtctggaagttgcctctgttccacagacttagatttgacccgcaatttgcactgacaaacatcgctgtgctaaaacataacttgaacatcctgattaaacgctccaactctaccgctgctaccaatgaggttcctgaggtcacagtgttttccaagtctcccgtgacactgggtcagcccaacaccctcatctgtcttgtggacaacatctttcctcctgtggtcaacatcacctggctgagcaatgggcactcagtcacagaaggtgtttctgagaccagcttcctctccaagagtgatcattccttcttcaagatcagttacctcaccttcctcccttctgctgatgagatttatgactgcaaggtggagcactggggcctggatgagcctcttctgaaacactgggagcctgagattccagcacctatgtcagagctcacagagactgtggtctgtgccctggggttgtctgtgggcctcgtgggcattgtggtggggaccgtcttgatcatccgaggcctgcgttcagttggtgcttccagacaccaagggcccttgtgaatcccatcctgaaaaagaagggctgactgaacctatggctaagaattgggacactctcatgtttcaagccaatttcatctcatttcccagatcatatttcatatccagtaacacagaagcaaccaagtacaatatagcctgataatatgttgatttcttagctgacattaatatttctttcttctttgtgttctcacccttggcactgccgcccatccctcaattcaggcaacaatgaagttaatggatactctctgccctttgctcagaattgttatagcaaaaattttaaaaccaaaaaataagtttgtactaatttcaatatggcttttaaaagtatgatggagaaataaattaggataaaggaactttgaatcaca

SEQ ID NO: 16908 - DNA, 1217 bp, Homo sapiens
  source 1..1217: mol_type = unassigned DNA
ggcagggtttggtttgggtgtcttcagatttccttgtcttgaggccctcacaattgctctacagctcagaacagcaactgctgaggctgccttgggaagaggatgatcctaaacaaagctctgatgctgggggccctcgccctgaccaccgtgatgagcccttgtggaggtgaagacattgtggctgaccatgttgcctcttacggtgtaaacttgtaccagtcttatggtccctctgggcagtacagccatgaatttgatggagacgaggagttctatgtggacctggagaggaaggagactgtctggcagttgcctctgttccgcagatttagaagatttgacccgcaatttgcactgacaaacatcgctgtgctaaaacataacttgaacatcgtgattaaacgctccaactctaccgctgctaccaatgaggttcctgaggtcacagtgttttccaagtctcccgtgacactgggtcagcccaacaccctcatctgtcttgtggacaacatctttcctcctgtggtcaacatcacctggctgagcaatgggcactcagtcacagaaggtgtttctgagaccagcttcctctccaagagtgatcattccttcttcaagatcagttacctcaccttcctcccttctgctgatgagatttatgactgcaaggtggagcactggggcctggatgagcctcttctgaaacactgggagcctgagattccaacacctatgtcagagctcacagagactgtggtctgcgccctggggttgtctgtgggcctcgtgggcattgtggtggggaccgtcttgatcatccgaggcctgcgttcagttggtgcttccagacaccaagggcccttgtgaatcccatcctgaaaaggaaggtgcatcaccatctacagcagcggaagagtggacttgctacatgacctagcactattctctggcccgatttatcataccctttttctcctgcaaatgtttctcctcttaccttttctctgctttttttttcttaagcttctgtatcccctcagagctcacaaatgcctttgaattctttccctgacctcctgatttttttttcttttctcaggtgttacctactaagagatgcctggggtaagccgcccagctacctaattcctcagtaacatcgatctaaaatctccatggaagcaataaattccctttaagagatctatgtcaaa

SEQ ID NO: 16909 - DNA, 1001 bp, Homo sapiens
  source 1..1001: mol_type = unassigned DNA
aacagcaactgctgaggctgccttgggaagaggatgatcctaaacaaagctctgatgctgggggccctcgccctgaccaccgtgatgagcccttgtggaggtgaagacattgtggctgaccatgttgcctcttacggtgtaaacttgtaccagtcttatggtccctctgggcagtacagccatgaatttgatggagacgaggagttctatgtggacctggagaggaaggagactgtctggcagttgcctctgttccgcagatttagaagatttgacccgcaatttgcactgacaaacatcgctgtgctaaaacataacttgaacatcgtgattaaacgctccaactctaccgctgctaccaatgaggttcctgaggtcacagtgttttccaagtctcccgtgacactgggtcagcccaacaccctcatctgtcttgtggacaacatctttcctcctgtggtcaacatcacctggctgagcaatgggcactcagtcacagaaggtgtttctgagaccagcttcctctccaagagtgatcattccttcttcaagatcagttacctcaccttcctcccttctgatgatgagatttatgactgcaaggtggagcactggggcctggatgagcctcttctgaaacactgggagcctgagattccaacacctatgtcagagctcacagagactgtggtctgcgccctggggttgtctgtgggcctcgtgggcattgtggtggggaccgtcttgatcatccgaggcctgcgttcagttggtgcttccagacaccaagggcccttgtgaatcccatcctgaaaaggaaggtaagattgagatttgttagagctgaagctgcaggaaggaaagtgggaggaggctgtggacatgaatgtggttgaaagttgtaggggaattgggaagtggcatgatgatgacacaggagcccccttggacccatcgatctcatgtctgtcctgttgcaggtgcatcaccatctacagcag

SEQ ID NO: 16910 - DNA, 520 bp, Homo sapiens
  source 1..520: mol_type = unassigned DNA
aagagcaaaataatatgaaaagtatttaacaaggaatataaagaatcatcaaagaaaatgttataaaacttctttgagaccacaagagatgatagagatggggtttcactgtgttagcgaggatggtcttgatctcctgacctcgtgatccgcctgcttctgcctcccaaagtgctgggattacagtcgtgagccaccgcgcctggcctcctcatattattttttattgtgcagtttattcaagagagctttccagcacctgtgataagcctcagcccgcctgccggataatgagcccacatggattgagagaggcctcctatccctgccaaacctattgatgctacagagatgtgagggagcccacctgagaaaagctgaacctgcccagtacataaaaaccactcagctcagaacaccaactgctgaggctgccttgggaagaggatgatcctaaacaaagctctgctgctgggggccctcgctctgaccaccgtgatgagcccctgtggaggtgaag

SEQ ID NO: 16911 - DNA, 1548 bp, Homo sapiens
  source 1..1548: mol_type = unassigned DNA
acaattgctctacagctcagaacagcaactgctgaggctgccttgggaagaggatgatcctaaacaaagctctgatgctgggggccctcgccctgaccaccgtgatgagcccttgtggaggtgaagacattgtggctgaccatgttgcctcttacggtgtaaacttgtaccagtcttatggtccctctgggcagtacagccatgaatttgatggagacgaggagttctatgtggacctggagaggaaggagactgtctggcagttgcctctgttccgcagatttagaagatttgacccgcaatttgcactgacaaacatcgctgtgctaaaacataacttgaacatcgtgattaaacgctccaactctaccgctgctaccaatgaggttcctgaggtcacagtgttttccaagtctcccgtgacactgggtcagcccaacaccctcatctgtcttgtggacaacatctttcctcctgtggtcaacatcacctggctgagcaatgggcactcagtcacagaaggtgtttctgagaccagcttcctctccaagagtgatcattccttcttcaagatcagttacctcaccttcctcccttctgatgatgagatttatgactgcaaggtggagcactggggcctggatgagcctcttctgaaacactgggagcctgagattccaacacctatgtcagagctcacagagactgtggtctgcgccctggggttgtctgtgggcctcgtgggcattgtggtggggaccgtcttgatcatccgaggcctgcgttcagttggtgcttccagacaccaagggcccttgtgaatcccatcctgaaaaggaaggtgcatcaccatctacagcagcggaagagtggacttgctacatgacctagcactattctctggcccgatttatcataccctttttctcctgcaaatgtttctcctcttaccttttctctgctttttttttcttaagcttctgtatcccctcagagctcacaaatgcctttgaattctttccctgacctcctgatttttttttcttttctcaggtgttacctactaagagatgcctggggtaagccgcccagctacctaattcctcagtaacatcgatctaaaatctccatggaagcaataaattccctttaagagatctatgtcaaatttttctatctttcatccggggctgactgaacctatggctaagaattgtgacactctcatgtttcaagccaatttcatctcatttcccagatcatatttcatatccagtaacacagaagcaaccaagtacaatatagcctgataatatgttgatttcttagctgacattaatatttctttcttctttgtgttctcacccttggcactgccgcccatccctcaattcaggcaacaatgaagttaatggatactctctgccctttgctcagaattgttatagcaaaaattttaaaaccaaaaaataagtttgtactaatttcaatatggcttttaaaagtatgatggagaaataaattaggataaaggaactttgaatcaca

SEQ ID NO: 16912 - DNA, 1203 bp, Homo sapiens; identical to SEQ ID NO: 16907
  source 1..1203: mol_type = unassigned DNA

SEQ ID NO: 16913 - DNA, 1049 bp, Homo sapiens
  source 1..1049: mol_type = unassigned DNA
gctcagaacagcaactgctgaggctgccttgggaagaagatgatcctaaacaaagctctgatgctgggggccctcgccctgaccaccgtgatgagcccttgtggaggtgaagacattgtggctgaccacgttgcctcttacggtgtaaacttgtaccagtcttacggtccctctggccagttcacccatgaatttgatggagacgaggagttctatgtggacctggagaggaaggagactgtctggaagttgcctctgttccacagacttagatttgacccgcaatttgcactgacaaacatcgctgtgctaaaacataacttgaacatcctgattaaacgctccaactctaccgctgctaccaatgaggttcctgaggtcacagtgttttccaagtctcccgtgacactgggtcagcccaacaccctcatctgtcttgtggacaacatctttcctcctgtggtcaacatcacctggctgagcaatgggcactcagtcacagaaggtgtttctgagaccagcttcctctccaagagtgatcattccttcttcaagatcagttacctcaccttcctcccttctgctgatgagatttatgactgcaaggtggagcactggggcctggatgagcctcttctgaaacactgggagcctgagattccagcacctatgtcagagctcacagagactgtggtctgtgccctggggttgtctgtgggcctcgtgggcattgtggtggggaccgtcttgatcatccgaggcctgcgttcagttggtgcttccagacaccaagggcccttgtgaatcccatcctgaaaaagaaggtaagtttgagatttgttagagctgaagctgcaggaaggaaagtgggaggaggctgtggacatgaatgtggttgaaagttgtaggggaattgggaagtggcatgatgatgacacaggagcccccttggacccatcgatctcatgtctgtcctgttgcaggtgcatcaccatctacagcagcggaagagtggacttgctacatgacctagcactattctctggccc

SEQ ID NO: 16914 - DNA, 1594 bp, Homo sapiens
  source 1..1594: mol_type = unassigned DNA
ggcagggtttggtttgggtgtcttcagatttccttgtcttgaggtcctcacaattactctacagctcagaacagcaactgctgaggctgccttgggaagaagatgatcctaaacaaagctctgatgctgggggccctcgccctgaccaccgtgatgagcccttgtggaggtgaagacattgtggctgaccacgttgcctcttacggtgtaaacttgtaccagtcttacggtccctctggccagttcacccatgaatttgatggagacgaggagttctatgtggacctggagaggaaggagactgtctggaagttgcctctgttccacagacttagatttgacccgcaatttgcactgacaaacatcgctgtgctaaaacataacttgaacatcctgattaaacgctccaactctaccgctgctaccaatgaggttcctgaggtcacagtgttttccaagtctcccgtgacactgggtcagcccaacaccctcatctgtcttgtggacaacatctttcctcctgtggtcaacatcacctggctgagcaatgggcactcagtcacagaaggtgtttctgagaccagcttcctctccaagagtgatcattccttcttcaagatcagttacctcaccttcctcccttctgctgatgagatttatgactgcaaggtggagcactggggcctggatgagcctcttctgaaacactgggagcctgagattccagcacctatgtcagagctcacagagactgtggtctgtgccctggggttgtctgtgggcctcgtgggcattgtggtggggaccgtcttgatcatccgaggcctgcgttcagttggtgcttccagacaccaagggcccttgtgaatcccatcctgaaaaagaaggtgcatcaccatctacagcagcggaagagtggacttgctacatgacctagcactattctctggcccgatttatcataccctttttctcctgcaaatgtttctcctcttaccttttctctgcttttttttccttaagcttctgtatcccctcagagctcacaaatgcctttgaattctttccctgacctcctgatttttttttcttttctcaggtgttacctactaagagatgcctggggtaagccgcccagctacctaattcctcagtaacatcgatctaaaatctccatggaagcaataaattccctttaagagatctatgtcaaatttttccatctttcatccggggctgactgaacctatggctaagaattgggacactctcatgtttcaagccaatttcatctcatttcccagatcatatttcatatccagtaacacagaagcaaccaagtacaatatagcctgataatatgttgatttcttagctgacattaatatttctttcttctttgtgttctcacccttggcactgccgcccatccctcaattcaggcaacaatgaagttaatggatactctctgccctttgctcagaattgttatagcaaaaattttaaaaccaaaaaataagtttgtactaatttcaatatggcttttaaaagtatgatggagaaataaattaggataaaggaactttgaatcaca

SEQ ID NO: 16915 - DNA, 922 bp, Homo sapiens
  source 1..922: mol_type = unassigned DNA
aggctgccttgggaagaggatgatcctaaacaaagctctgatgctgggggccctcgccctgaccaccgtgatgagcccttgtggaggtgaagacattgtggctgaccatgttgcctcttacggtgtaaacttgtaccagtcttatggtccctctgggcagtacagccatgaatttgatggagacgaggagttctatgtggacctggagaggaaggagactgtctggcagttgcctctgttccgcagatttagaagatttgacccgcaatttgcactgacaaacatcgctgtgctaaaacataacttgaacatcgtgattaaacgctccaactctaccgctgctaccaatgaggttcctgaggtcacagtgttttccaagtctcccgtgacactgggtcagcccaacaccctcatctgtcttgtggacaacatctttcctcctgtggtcaacatcacctggctgagcaatgggcactcagtcacagaaggtgtttctgagaccagcttcctctccaagagtgatcattccttcttcaagatcagttacctcaccttcctcccttctgctgatgagatttatgactgcaaggtggagcactggggcctggatgagcctcttctgaaacactgggagcctgagattccaacacctatgtcagagctcacagagactgtggtctgcgccctggggttgtctgtgggcctcgtgggcattgtggtggggaccgtcttgatcatccgaggcctgcgttcagttggtgcttccagacaccaagggcccttgtgaatcccatcctgaaaaggaaggtgttacctactaagagatgcctggggtaagccgcccagctacctaattcctcagtaacatcgatctaaaatctccatggaagcaataaattccctttaagagatctatgtcaaa

SEQ ID NO: 16916 - DNA, 520 bp, Homo sapiens
  source 1..520: mol_type = unassigned DNA
aagagcaaaataatatgaaaagtatttaacaaggaatataaagaatcatcaaagaaaatgttataaaacttctttgagaccacaagagatgatagagatggggtttcactgtgttagcgaggatggtcttgatctcctgacctcgtgatccgcctgcttctgcctcccaaagtgctgggattacagtcgtgagccaccgcgcctggcctcctcatattattttttattgtgcagtttattcaagagagctttccagcacctgtgataagcctcagcccgcctgccggataatgagcccacatggattgagagaggcctcctatccctgccaaacctattgatgctacagagatgtgagggagcccacctgagaaaagctgaacctgcccagtacataaaaaccactcagctcagaacagcaactgctgaggctgccttgggaagaggatgatcctaaacaaagctctgatgctgggggccctcgccctgaccaccgtgatgagcccttgtggaggtgaag

SEQ ID NO: 16917 - DNA, 520 bp, Homo sapiens; identical to SEQ ID NO: 16906
  source 1..520: mol_type = unassigned DNA

SEQ ID NO: 16918 - DNA, 1206 bp, Homo sapiens
  source 1..1206: mol_type = unassigned DNA
ccctcacaattgctctacagctcagaacagcaactgctgaggctgccttgggaagaggatgatcctaaacaaagctctgatgctgggggccctcgccctgaccaccgtgatgagcccttgtggaggtgaagacattgtggctgaccatgttgcctcttacggtgtaaacttgtaccagtcttatggtccctctgggcagtacagccatgaatttgatggagacgaggagttctatgtggacctggagaggaaggagactgtctggcagttgcctctgttccgcagatttagaagatttgacccgcaatttgcactgacaaacatcgctgtgctaaaacataacttgaacatcgtgattaaacgctccaactctaccgctgctaccaatgaggttcctgaggtcacagtgttttccaagtctcccgtgacactgggtcagcccaacaccctcatctgtcttgtggacaacatctttcctcctgtggtcaacatcacctggctgagcaatgggcactcagtcacagaaggtgtttctgagaccagcttcctctccaagagtgatcattccttcttcaagatcagttacctcaccttcctcccttctgatgatgagatttatgactgcaaggtggagcactggggcctggatgagcctcttctgaaacactgggagcctgagattccaacacctatgtcagagctcacagagactgtggtctgcgccctggggttgtctgtgggcctcgtgggcattgtggtggggaccgtcttgatcatccgaggcctgcgttcagttggtgcttccagacaccaagggcccttgtgaatcccatcctgaaaaggaagggctgactgaacctatggctaagaattgtgacactctcatgtttcaagccaatttcatctcatttcccagatcatatttcatatccagtaacacagaagcaaccaagtacaatatagcctgataatatgttgatttcttagctgacattaatatttctttcttctttgtgttctcacccttggcactgccgcccatccctcaattcaggcaacaatgaagttaatggatactctctgccctttgctcagaattgttatagcaaaaattttaaaaccaaaaaataagtttgtactaatttcaatatggcttttaaaagtatgatggagaaataaattaggataaaggaactttgaatcaca

SEQ ID NO: 16919 - DNA, 1049 bp, Homo sapiens; identical to SEQ ID NO: 16913
  source 1..1049: mol_type = unassigned DNA

SEQ ID NO: 16920 - DNA, 1382 bp, Homo sapiens
  source 1..1382: mol_type = unassigned DNA
ggcagggtttggtttgggtgtcttcagatttccttgtcttgaggtcctcacaattactctacagctcagaacagcaactgctgaggctgccttgggaagaagatgatcctaaacaaagctctgatgctgggggccctcgccctgaccaccgtgatgagcccttgtggaggtgaagacattgtggctgaccacgttgcctcttacggtgtaaacttgtaccagtcttacggtccctctggccagttcacccatgaatttgatggagacgaggagttctatgtggacctggagaggaaggagactgtctggaagttgcctctgttccacagacttagatttgacccgcaatttgcactgacaaacatcgctgtgctaaaacataacttgaacatcctgattaaacgctccaactctaccgctgctaccaatgaggttcctgaggtcacagtgttttccaagtctcccgtgacactgggtcagcccaacaccctcatctgtcttgtggacaacatctttcctcctgtggtcaacatcacctggctgagcaatgggcactcagtcacagaaggtgtttctgagaccagcttcctctccaagagtgatcattccttcttcaagatcagttacctcaccttcctcccttctgctgatgagatttatgactgcaaggtggagcactggggcctggatgagcctcttctgaaacactgggagcctgagattccagcacctatgtcagagctcacagagactgtggtctgtgccctggggttgtctgtgggcctcgtgggcattgtggtggggaccgtcttgatcatccgaggcctgcgttcagttggtgcttccagacaccaagggcccttgtgaatcccatcctgaaaaagaaggtgttacctactaagagatgcctggggtaagccgcccagctacctaattcctcagtaacatcgatctaaaatctccatggaagcaataaattccctttaagagatctatgtcaaatttttccatctttcatccggggctgactgaacctatggctaagaattgggacactctcatgtttcaagccaatttcatctcatttcccagatcatatttcatatccagtaacacagaagcaaccaagtacaatatagcctgataatatgttgatttcttagctgacattaatatttctttcttctttgtgttctcacccttggcactgccgcccatccctcaattcaggcaacaatgaagttaatggatactctctgccctttgctcagaattgttatagcaaaaattttaaaaccaaaaaataagtttgtactaatttcaatatggcttttaaaagtatgatggagaaataaattaggataaaggaactttgaatcaca

SEQ ID NO: 16921 - DNA, 1594 bp, Homo sapiens; identical to SEQ ID NO: 16914
  source 1..1594: mol_type = unassigned DNA

SEQ ID NO: 16922 - DNA, 1385 bp, Homo sapiens
  source 1..1385: mol_type = unassigned DNA
ggcagggtttggtttgggtgtcttcagatttccttgtcttgaggccctcacaattgctctacagctcagaacagcaactgctgaggctgccttgggaagaggatgatcctaaacaaagctctgatgctgggggccctcgccctgaccaccgtgatgagcccttgtggaggtgaagacattgtggctgaccatgttgcctcttacggtgtaaacttgtaccagtcttatggtccctctgggcagtacagccatgaatttgatggagacgaggagttctatgtggacctggagaggaaggagactgtctggcagttgcctctgttccgcagatttagaagatttgacccgcaatttgcactgacaaacatcgctgtgctaaaacataacttgaacatcgtgattaaacgctccaactctaccgctgctaccaatgaggttcctgaggtcacagtgttttccaagtctcccgtgacactgggtcagcccaacaccctcatctgtcttgtggacaacatctttcctcctgtggtcaacatcacctggctgagcaatgggcactcagtcacagaaggtgtttctgagaccagcttcctctccaagagtgatcattccttcttcaagatcagttacctcaccttcctcccttctgatgatgagatttatgactgcaaggtggagcactggggcctggatgagcctcttctgaaacactgggagcctgagattccaacacctatgtcagagctcacagagactgtggtctgcgccctggggttgtctgtgggcctcgtgggcattgtggtggggaccgtcttgatcatccgaggcctgcgttcagttggtgcttccagacaccaagggcccttgtgaatcccatcctgaaaaggaaggtgttacctactaagagatgcctggggtaagccgcccagctacctaattcctcagtaacatcgatctaaaatctccatggaagcaataaattccctttaagagatctatgtcaaatttttctatctttcatccggggctgactgaacctatggctaagaattgtgacactctcatgtttcaagccaatttcatctcatttcccagatcatatttcatatccagtaacacagaagcaaccaagtacaatatagcctgataatatgttgatttcttagctgacattaatatttctttcttctttgtgttctcacccttggcactgccgcccatccctcaattcaggcaacaatgaagttaatggatactctctgccctttgctcagaattgttatagcaaaaattttaaaaccaaaaaataagtttgtactaatttcaatatggcttttaaaagtatgatggagaaataaattaggataaaggaactttgaatcaca

SEQ ID NO: 16923 - DNA, 1382 bp, Homo sapiens; identical to SEQ ID NO: 16920
  source 1..1382: mol_type = unassigned DNA

SEQ ID NO: 16924 - DNA, 696 bp, Homo sapiens
  source 1..696: mol_type = unassigned DNA
acaattactctacagctcagaacaccaactgctgaggctgccttgggaagaggatgatcctaaacaaagctctgctgctgggggccctcgctctgaccaccgtgatgagcccctgtggaggtgaagacattgtggctgaccacgttgcctcttgtggtgtaaacttgtaccagttttacggtccctctggccagtacacccatgaatttgatggagatgagcagttctacgtggacctggagaggaaggagactgcctggcggtggcctgagttcagcaaatttggaggttttgacccgcagggtgcactgagaaacatggctgtggcaaaacacaacttgaacatcatgattaaacgctacaactctaccgctgctaccaatgaggttcctgaggtcacagtgttttccaagtctcccgtgacactgggtcagcccaacaccctcatttgtcttgtggacaacatctttcctcctgtggtcaacatcacatggctgagcaatgggcagtcagtcacagaaggtgtttctgagaccagcttcctctccaagagtgatcattccttcttcaagatcagttacctcaccttcctcccttctgctgatgagatttatgactgcaaggtggagcactggggcctggaccagcctcttctgaaacactggggtgcatcgccatctacaggagcagaagaat

SEQ ID NO: 16925 - DNA, 674 bp, Homo sapiens
  source 1..674: mol_type = unassigned DNA
attgctctacagctcagaacagcaactgctgaggctgccttgggaagaggatgatcctaaacaaagctctgatgctgggggccctcgccctgaccaccgtgatgagcccttgtggaggtgaagacattgtggctgaccatgttgcctcttacggtgtaaacttgtaccagtcttatggtccctctgggcagtacagccatgaatttgatggagacgaggagttctatgtggacctggagaggaaggagactgtctggcagttgcctctgttccgcagatttagaagatttgacccgcaatttgcactgacaaacatcgctgtgctaaaacataacttgaacatcgtgattaaacgctccaactctaccgctgctaccaatgaggttcctgaggtcacagtgttttccaagtctcccgtgacactgggtcagcccaacaccctcatctgtcttgtggacaacatctttcctcctgtggtcaacatcacctggctgagcaatgggcactcagtcacagaaggtgtttctgagaccagcttcctctccaagagtgatcattccttcttcaagatcagttacctcaccttcctcccttctgctgatgagatttatgactgcaaggtggagcactggggcctggatgagcctcttctgaaacactggggtttgttacac

SEQ ID NO: 16926 - DNA, 943 bp, Homo sapiens
  source 1..943: mol_type = unassigned DNA
acaattgctctacaactcagaacagcaactgctaaggctgccttgggaagaggatgatcctaaacaaagctctgatgctgggggcccttgccctgaccaccgtgatgagcccctgtggaggtgaagacattgtggctgaccacgtcgcctcttatggtgtaaacttgtaccagtcttacggtccctctggccagtacacccatgaatttgatggagatgagcagttctacgtggacctggggaggaaggagactgtctggtgtttgcctgttctcagacaatttagatttgacccgcaatttgcactgacaaacatgtgcatcgccatctacaggagcagaagagtggacttgctacatgacctagcattattttctggccccatttatcatatcccttttctcctccaaatgtttctcctctcacctcttctgtgggacttaaattgctatatctgctcagagctcacaaatgcctttgaattatttccctgacttcctgatttttttcttcttaagtgttacctactaagagttgcctggagtaagccacccagctacctaattcctcagtaacctccatctataatctccatggaagcaacaaattccctttatgagatatatgtcaaatttttccatctttcatccagggctgactgaaaccgtggctaagaattgggagactctcttgtttcaagccaatttaacatcatttaccagatcatttgtcatgtccagtaacacagaagcaaccaactacagtatagcctgataacatgatttcttagctgacattaatatttctttcttccttgtgttcccacccttggcattgccacccacccctcaattaaggcaacaatgaagttaatggataccctctgcctttggctcagaaatgttatagcaaaaattttaaaataaaaaagtaagtctgtact

SEQ ID NO: 16927 - DNA, 794 bp, Homo sapiens
  source 1..794: mol_type = unassigned DNA
acaattgctctacaactcagaacagcaactgctaaggctgccttgggaagaggatgatcctaaacaaagctctgatgctgggggcccttgccctgaccaccgtgatgagcccctgtggaggtgaagacattgtggctgaccacgtcgcctcttatggtgtaaacttgtaccagtcttacggtccctctggccagtacacccatgaatttgatggagatgagcagttctacgtggacctggggaggaaggagactgtctggtgtttgcctgttctcagacaatttagatttgacccgcaatttgcactgacaaacatcgctgtcctaaaacataacttgaacagtctgattaaacgctccaactctaccgctgctaccaatgaggttcctgaggtcacagtgttttccaagtctcccgtgacactgggtcagcccaacatcctcatctgtcttgtggacaacatctttcctcctgtggtcaacatcacatggctgagcaatgggcactcagtcacagaaggtgtttctgagaccagcttcctctccaagagtgatcattccttcttcaagatcagttacctcaccctcctcccttctgctgaggagagttatgactgcaaggtggagcactggggcctggacaagcctcttctgaaacactggggtaaggatgagttccaccactttttgatgctttcttgtctgtcaagttcagaacttcctgccttttactcctatatcccaaaacttgttttccacacttcatgggtttctttctttcttatttttttcttc

SEQ ID NO: 16928 - DNA, 701 bp, Homo sapiens
  source 1..701: mol_type = unassigned DNA
attgctctacagctcagaacagcaactgctgaggctgccttgggaagaggatgatcctaaacaaagctctgatgctgggggccctcgccctgaccaccgtgatgagcccttgtggaggtgaagacattgtggctgaccatgttgcctcttacggtgtaaacttgtaccagtcttatggtccctctgggcagtacagccatgaatttgatggagacgaggagttctatgtggacctggagaggaaggagactgtctggcagttgcctctgttccgcagatttagaagatttgacccgcaatttgcactgacaaacatcgctgtgctaaaacataacttgaacatcgtgattaaacgctccaactctaccgctgctaccaatgaggttcctgaggtcacagtgttttccaagtctcccgtgacactgggtcagcccaacaccctcatctgtcttgtggacaacatctttcctcctgtggtcaacatcacctggctgagcaatgggcactcagtcacagaaggtgtttctgagaccagcttcctctccaagagtgatcattccttcttcaagatcagttacctcaccttcctcccttctgctgatgagatttatgactgcaaggtggagcactggggcctggatgagcctcttctgaaacactgggaatctcagtctagagaatctgaagaaagcaccaaatca

SEQ ID NO: 16929 - DNA, 683 bp, Homo sapiens
  source 1..683: mol_type = unassigned DNA
acaattgctctacaactcagaacagcaactgctaaggctgccttgggaagaggatgatcctaaacaaagctctgatgctgggggcccttgccctgaccaccgtgatgagcccctgtggaggtgaagacattgtggctgaccacgtcgcctcttatggtgtaaacttgtaccagtcttacggtccctctggccagtacacccatgaatttgatggagatgagcagttctacgtggacctggggaggaaggagactgtctggtgtttgcctgttctcagacaatttagatttgacccgcaatttgcactgacaaacatcgctgtcctaaaacataacttgaacagtctgattaaacgctccaactctaccgctgctaccaatgaggttcctgaggtcacagtgttttccaagtctcccgtgacactgggtcagcccaacatcctcatctgtcttgtggacaacatctttcctcctgtggtcaacatcacatggctgagcaatgggcactcagtcacagaaggtgtttctgagaccagcttcctctccaagagtgatcattccttcttcaagatcagttacctcaccctcctcccttctgctgaggagagttatgactgcaaggtggagcactggggcctggacaagcctcttctgaaacactgggttcatgggtttctttctttc

SEQ ID NO: 16930 - DNA, 704 bp, Homo sapiens
  source 1..704: mol_type = unassigned DNA
attgctctacagctcagaacagcaactgctgaggctgccttgggaagaggatgatcctaaacaaagctctgatgctgggggccctcgccctgaccaccgtgatgagcccttgtggaggtgaagacattgtggctgaccatgttgcctcttacggtgtaaacttgtaccagtcttatggtccctctgggcagtacagccatgaatttgatggagacgaggagttctatgtggacctggagaggaaggagactgtctggcagttgcctctgttccgcagatttagaagatttgacccgcaatttgcactgacaaacatcgctgtgctaaaacataacttgaacatcgtgattaaacgctccaactctaccgctgctaccaatgaggttcctgaggtcacagtgttttccaagtctcccgtgacactgggtcagcccaacaccctcatctgtcttgtggacaacatctttcctcctgtggtcaacatcacctggctgagcaatgggcactcagtcacagaaggtgtttctgagaccagcttcctctccaagagtgatcattccttcttcaagatcagttacctcaccttcctcccttctgctgatgagatttatgactgcaaggtggagcactggggcctggatgagcctcttctgaaacactggggcattcaggcagaagaaggccagcgaagaaagaaactaggt

SEQ ID NO: 16931 - DNA, 255 bp, Homo sapiens
  source 1..255: mol_type = unassigned DNA
aacaccctcatctgtcttgtggacaacatctttcctcctgtggtcaacatcacctggctgagcaatgggcactcagtcacagaaggtgtttctgagaccagcttcctctccaagagtgatcattccttcttcaagatcagttacctcaccttcctcccttctgctgatgagatttatgactgcaaggtggagcactggggcctggatgagcctcttctgaaacactggggtaaggacttcatgagtttcttttat

SEQ ID NO: 16932 - DNA, 764 bp, Homo sapiens
  source 1..764: mol_type = unassigned DNA
attgctctacagctcagaacagcaactgctgaggctgccttgggaagaggatgatcctaaacaaagctctgatgctgggggccctcgccctgaccaccgtgatgagcccttgtggaggtgaagacattgtggctgaccatgttgcctcttacggtgtaaacttgtaccagtcttatggtccctctgggcagtacagccatgaatttgatggagacgaggagttctatgtggacctggagaggaaggagactgtctggcagttgcctctgttccgcagatttagaagatttgacccgcaatttgcactgacaaacatcgctgtgctaaaacataacttgaacatcgtgattaaacgctccaactctaccgctgctaccaatgaggttcctgaggtcacagtgttttccaagtctcccgtgacactgggtcagcccaacaccctcatctgtcttgtggacaacatctttcctcctgtggtcaacatcacctggctgagcaatgggcactcagtcacagaaggtgtttctgagaccagcttcctctccaagagtgatcattccttcttcaagatcagttacctcaccttcctcccttctgctgatgagatttatgactgcaaggtggagcactggggcctggatgagcctcttctgaaacactggggtaaggatgagtttcaccattttttgatgctttcttgtctgtcaagttcagaacttcctgccttttactatatcccaaaacttgttttccacacttcatga

SEQ ID NO: 16933 - DNA, 1517 bp, Homo sapiens
  source 1..1517: mol_type = unassigned DNA
ggcagggtttggtttgggtgtcttcagatttgcttgtctcgaggtcctcacaattgctctacagctcagagcagcaactgctgaggctgccttgggaagaagatgatcctaaacaaagctctgctgctgggggccctcgccctgactgccgtgatgagcccctgtggaggtgaagacattgtggctgaccatgttgcctcctatggtgtgaacttctaccagtctcacggtccctctggccagtacacccatgaatttgatggagacgaggagttctacgtggacctggagacgaaagagactgtctggcagttgcctatgtttagcaaatttataagttttgacccgcagagtgcactgagaaatatggctgtgggaaaacacaccttggaattcatgatgagacagtccaactctaccgctgccaccaatgaggttcctgaggtcacagtgttttccaagtttcctgtgacgctgggtcagcccaacaccctcatctgtcttgtggacaacatctttcctcctgtggtcaacatcacctggctgagcaatgggcactcagtcacagaaggtgtttctgagaccagcttcctctccaagagtgatcattccttcttcaagatcagttacctcaccttcctcccttctgctgatgagatttatgactgcaaggtggagcactggggcctggacgagcctcttctgaaacactgggagcctgagattccagcccctatgtcagagctcacagagactttggtctgcgccctggggttgtctgtgggcctcatgggcattgtggtgggcactgtcttcatcatccaaggcctgcgttcagttgatgcttccagacaccaagggctcttatgaatctcatcctgaaaggaaggtgcatcaccatctacaggagaagaagaatggacttgctaaatgacctagcactattctctggcctgatttatcatatcccttttctcctccaaatgtttcttctctcacctcttctctgggacttaaggtgctatattccctcagagctcacaaatgcctttcaattctttccctgacctcctttcctgaatttttttattttctcaaatgttacctactaagggatgcctgagtaagccactcagctacctaattcctcaatgacctttatctaaaatctccatggaagcaataaattcccttttgatgcctctattgaatttttcccatctttcatctcagggctgactgagagcataacttagaatgggtgactcttatgttttaggccaatttcatgtcattccccagatcatatttcatgtccagtaacacaggagcaaccaagtacagtgtatcctgataatttgttgatttcttaactggtgttaatatttctttcttccttttgttcctacccttggccactgccacccacccctcaattcaggtaccaacgaaccctctgcccttggctcagaatggttatagcagaaatacaaaaaaaaaaaaaaaaagtctgtact

SEQ ID NO: 16934 - DNA, 1524 bp, Homo sapiens
  source 1..1524: mol_type = unassigned DNA
ggcagggtttggtttgggtgtcttcagatttgcttgtctcgaggtcctcacaattgctctacagctcagagcagcaactgctgaggctgccttgggaagaagatgatcctaaacaaagctctgctgctgggggccctcgccctgactgccgtgatgagcccctgtggaggtgaagacattgtggctgaccatgttgcctcctatggtgtgaacttctaccagtctcacggtccctctggccagtacacccatgaatttgatggagacgaggagttctatgtggacctggagacgaaagagactgtctggcagttgcctatgtttagcaaatttataagttttgacccgcagagtgcactgagaaatatggctgtgggaaaacacaccttggaattcatgatgagacagtccaactctaccgctgccaccaatgaggttcctgaggtcacagtgttttccaagtttcctgtgacgctgggtcagcccaacaccctcatctgtcttgtggacaacatctttcctcctgtggtcaacatcacctggctgagcaatgggcactcagtcacagaaggtgtttctgagaccagcttcctctccaagagtgatcattccttcttcaagatcagttacctcaccttcctcccttctgctgatgagatttatgactgcaaggtggagcactggggcctggacgagcctcttctgaaacactgggagcctgagattccagcccctatgtcagagctcacagagactttggtctgcgccctggggttgtctgtgggcctcatgggcattgtggtgggcactgtcttcatcatccaaggcctgcgttcagttggtgcttccagacaccaagggctcttatgaatcccatcctgaaaaggaaggtgcatcaccatctacaggagaagaagaatggacttgctaaatgacctagcactattctctggcctgatttatcatatcccttttctcctccaaatgtttcttctctcacctcttctctgggacttaaggtgctatattccctcagagctcacaaatgcctttcaattctttccctgacctcctttcctgaatttttttattttctcaaatgttacctactaagggatgcctgggtaagccactcagctacctaattcctcaatgacctttatctaaaatctccatggaagcaataaattcccttttgatgcctctattgaatttttcccatctttcatctcagggctgactgagagcataacttagaatgggcgactcttatgttttaggccaatttcatatcattccccagatcatatttcaagtccagtaacacaggagcaaccaagtacagtgtatcctgataatttgttgatttcttaactggtgttaatatttctttcttccttttgttcctacccttggccactgccagccacccctcaattcaggtaccaacgaaccctctgcccttggctcagaatggttatagcagaaatacaaaaaaaaaaaaaaagtctgtactaatttcaa

SEQ ID NO: 16935 - DNA, 1521 bp, Homo sapiens
  source 1..1521: mol_type = unassigned DNA
ggcagggtttggtttgggtgtcttcagatttgcttgtctcgaggtcctcacaattgctctacagctcagagcagcaactgctgaggctgccttgggaagaagatgatcctaaacaaagctctgctgctgggggccctcgccctgactgccgtgatgagcccctgtggaggtgaagacattgtggctgaccatgttgcctcctatggtgtgaacttctaccagtctcacggtccctctggccagtacacccatgaatttgatggagacgaggagttctatgtggacctggagacgaaagagactgtctggcagttgcctatgtttagcaaatttataagttttgacccgcagagtgcactgagaaatatggctgtgggaaaacacaccttggaattcatgatgggacagtccaactctaccgctgccaccaatgaggttcctgaggtcacagtgttttccaagtttcctgtgacgctgggtcagcccaacaccctcatctgtcttgtggacaacatctttcctcctgtggtcaacatcacctggctgagcaatgggcactcagtcacagaaggtgtttctgagaccagcttcctctccaagagtgatcattccttcttcaagatcagttacctcaccttcctcccttctgctgatgagatttatgactgcaaggtggagcactggggcctggacgagcctcttctgaaacactgggagcctgagattccagcccctatgtcagagctcacagagactttggtctgcgccctggggttgtctgtgggcctcatgggcattgtggtgggcactgtcttcatcatccaaggcctgcgttcagttggtgcttccagacaccaagggctcttatgaatcccatcctgaaaaggaaggtgcatcaccatctacaggagaagaagaatggacttgctaaatgacctagcactattctctggcctgatttatcatatcccttttctcctccaaatgtttcttctctcacctcttctctgggacttaaggtgctatattccctcagagctcacaaatgcctttcaattctttccctgacctcctttcctgaatttttttattttctcaaatgttacctactaagggatgcctgggtaagccactcagctacctaattcctcaatgacctttatctaaaatctccatggaagcaataaattcccttttgatgcctctattgaatttttcccatctttcatctcagggctgactgagagcataacttagaatgggcgactcttatgttttaggccaatttcatatcattccccagatcatatttcaagtccagtaacacaggagcaaccaagtacagtgtatcctgataatttgttgatttcttaactggtgttaatatttctttcttccttttgttcctacccttggccactgccagccacccctcaattcaggtaccaacgaaccctctgcccttggctcagaatggttatagcagaaatacaaaaaaaaaaaaaaaagtctgtactaatt

SEQ ID NO: 16936 - DNA, 1725 bp, Homo sapiens
  source 1..1725: mol_type = unassigned DNA
ggcagggtttggtttgggtgtcttcagatttgcttgtctcgaggtcctcacaattgctctacagctcagagcagcaactgctgagcctgccttgggaagaagatgatcctaaacaaagctctgctgctgggggccctcgccctgactgccgtgatgagcccctgtggaggtgaagacattgtggctgaccatgttgcctcctatggtgtgaacttctaccagtctcacggtccctctggccagtacacccatgaatttgatggagacgaggagttctatgtggacctggagacgaaagagactgtctggcagttgcctatgtttagcaaatttataagttttgacccgcagagtgcactgagaaatatggctgtgggaaaacacaccttggaattcatgatgagacagtccaactctaccgctgccaccaatgaggttcctgaggtcacagtgttttccaagtttcctgtgacgctgggtcagcccaacaccctcatctgtcttgtggacaacatctttcctcctgtggtcaacatcacctggctgagcaatgggcactcagtcacagaaggtgtttctgagaccagcttcctctccaagagtgatcattccttcttcaagatcagttacctcaccttcctcccttctgctgatgagatttatgactgcaaggtggagcactggggcctggacgagcctcttctgaaacactgggagcctgagattccagcccctatgtcagagctcacagagactttggtctgcgccctggggttgtctgtgggcctcatgggcattgtggtgggcactgtcttcatcatccaaggcctgcgttcagttggtgcttccagacaccaagggctcttatgaatcccatcctgaaaaggaaggtgcatcaccatctacaggagaagaagaatggacttgctaaatgacctagcactattctctggcctgatttatcatatcccttttctcctccaaatgtttcttctctcacctcttctctgggacttaaggtgctatattccctcagagctcacaaatgcctttcaattctttccctgacctcctttcctgaatttttttattttctcaaatgttacctactaagggatgcctgggtaagccactcagctacctaattcctcaatgacctttatctaaaatctccatggaagcaataaattcccttttgatgcctctattgaatttttcccatctttcatctcagggctgactgagagcataacttagaatgggcgactcttatgttttaggccaatttcatatcattccccagatcatatttcaagtccagtaacacaggagcaaccaagtacagtgtatcctgataatttgttgatttcttaactggtgttaatatttctttcttccttttgttcctacccttggccactgccagccacccctcaattcaggtaccaacgaaccctctgcccttggctcagaatggttatagcagaaatacaaaaaaaaaaaaaaaagtctgtactaatttcaatatggctcttaaaaggaatgacagagaaataggatacaagaattttgaatctcaaaagttatcaaaagtaaaaaattttgttaccaaaagtcaaactgcattctcaaaactttaaatttgtgaagaatgacaacagtagaagctttcctctccccttctcaccttgaggagataaaaattctctaggcaggaaaagaaat

SEQ ID NO: 16937 - DNA, 1499 bp, Homo sapiens
  source 1..1499: mol_type = unassigned DNA
ggcagggtttggtttgggtgtcttcagatttgcttgtctcgaggtcctcacaattgctctgcagctcagagcagcaactgctgaggctgccttgggaagaagatgatcctaaacaaagctctgctgctgggggccctcgccctgactgccgtgatgagcccctgtggaggtgaagacattgtggctgaccatgttgcctcctatggtgtgaacttctaccagtctcacggtccctctggccagtacacccatgaatttgatggagatgaggagttctacgtggacctggagacgaaagagactgtctggcagttgcctatgtttagcaaatttataagttttgacccgcagagtgcactgagaaatatggctgtgggaaaacacaccttggaattcatgatgagacagtccaactctaccgctgccaccaatgaggttcctgaggtcacagtgttttccaagtttcctgtgacgctgggtcagcccaacaccctcatctgtcttgtggacaacatctttcctcctgtggtcaacatcacctggctgagcaatgggcactcagtcacagaaggtgtttctgagaccagcttcctctccaagagtgatcattccttcttcaagatcagttacctcaccttcctcccttctgctgatgagatttatgactgcaaggtggagcactggggcctggacgagcctcttctgaaacactgggagcctgagattccagcccctatgtcagagctcacagagactttggtctgcgccctggggttgtctgcgggcctcatgggcattgtggtgggcactgtcttcatcatccaaggcctgcgttcagttggtgcttccagacaccaagggctcttgtgaatcccatcctgaaaaggaaggtgcatcaccatctacaggagaagaagaatggacttgctaaatgacctagcactattctctggcctgatttatcatatcccttttctcctccaaatgtttcttctctcacctcttctctgggacttaaggtgctatattccctcagagctcacaaatacctttcaattctttccctgacctcctttcctgaatttttttattttctcaaatgttacctactaagggatgcctgggtaagccacttagctacctaattcctcaatgacctttatctaaaatctccatggaagcaataaattcccttttatgatgcctctattgaatttttcccatctttcatctcagggctgactgagagcataacttagaatgggcgactcttatgttttaggccaatttcatatcattccccagatcatatttcatgtccagtaacacaggagcaaccaagtacagtgtatcctgataatttgttgatttcttaactggtgttaatatttctttcttccttttgttcctacccttggccactgccacccacccttcaattcaggtaccaacgaaccctctgcccttggctcagaatggttatagcagaaatccaaaaa

SEQ ID NO: 16938 - DNA, 1500 bp, Homo sapiens
  source 1..1500: mol_type = unassigned DNA
ggtgtcttcagatttgcttgtctcgaggtcctcacaattgctctacagctcagagcagcaactgctgaggctgccttgggaagaagatgatcctaaacaaagctctgctgctgggggccctcgccctgactgccgtgatgagcccctgtggaggtgaagacattgtggctgaccatgttgcctcctatggtgtgaacttctaccagtctcacggtccctctggccagtacacccatgaatttgatggagacgaggagttctacgtggacctggagacgaaagagactgtctggcagttgcctatgtttagcaaatttataagttttgacccgcagagtgcactgagaaatatggctgtgggaaaacacaccttggaattcatgatgagacagtccaactctaccgctgccaccaatgaggttcctgaggtcacagtgttttccaagtttcctgtgacgctgggtcagcccaacaccctcatctgtcttgtggacaacatctttcctcctgtggtcaacatcacctggctgagcaatgggcactcagtcacagaaggtgtttctgagaccagcttcctctccaagagtgatcattccttcttcaagatcagttacctcaccttcctcccttctgctgatgagatttatgactgcaaggtggagcactggggcctggacgagcctcttctgaaacactgggagcctgagattccagcccctatgtcagagctcacagagactttggtctgcgccctggggttgtctgtgggcctcatgggcattgtggtgggcactgtcttcatcatccaaggcctgcgttcagttggtgcttccagacaccaagggctcttatgaatctcatcctgaaaggaaggtgcatcaccatctacaggagaagaagaatggacttgctaaatgacctagcactattctctggcctgatttatcatatcccttttctcctccaaatgtttcttctctcacctcttctctgggacttaaggtgctatattccctcagagctcacaaatgcctttcaattctttccctgacctcctttcctgaatttttttattttctcaaatgttacctactaagggatgcctgagtaagccactcagctacctaattcctcaatgacctttatctaaaatctccatggaagcaataaattcccttttgatgcctctattgaatttttcccatctttcatctcagggctgactgagagcataacttagaatgggtgactcttatgttttaggccaatttcatgtcattccccagatcatatttcatgtccagtaacacaggagcaaccaagtacagtgtatcctgataatttgttgatttcttaactggtgttaatatttctttcttccttttgttcctacccttggccactgccacccacccctcaattcaggtaccaacgaaccctctgcccttggctcagaatggttatagcagaaatacaaaaaaaaaaaaaaaagtctgtact

SEQ ID NO: 16939 - DNA, 1648 bp, Homo sapiens
  source 1..1648: mol_type = unassigned DNA
gaggtcctcacaattgctctacagctcagagcagcaactgctgagcctgccttgggaagaagatgatcctaaacaaagctctgctgctgggggccctcgccctgactgccgtgatgagcccctgtggaggtgaagacattgtggctgaccatgttgcctcctatggtgtgaacttctaccagtctcacggtccctctggccagtacacccatgaatttgatggagacgaggagttctatgtggacctggagacgaaagagactgtctggcagttgcctatgtttagcaaatttataagttttgacccgcagagtgcactgagaaatatggctgtgggaaaacacaccttggaattcatgatgagacagtccaactctaccgctgccaccaatgaggttcctgaggtcacagtgttttccaagtttcctgtgacgctgggtcagcccaacaccctcatctgtcttgtggacaacatctttcctcctgtggtcaacatcacctggctgagcaatgggcactcagtcacagaaggtgtttctgagaccagcttcctctccaagagtgatcattccttcttcaagatcagttacctcaccttcctcccttctgctgatgagatttatgactgcaaggtggagcactggggcctggacgagcctcttctgaaacactgggagcctgagattccagcccctatgtcagagctcacagagactttggtctgcgccctggggttgtctgtgggcctcatgggcattgtggtgggcactgtcttcatcatccaaggcctgcgttcagttggtgcttccagacaccaagggctcttatgaatcccatcctgaaaaggaaggtaagattgagatttgttggagctgaaacctcagtatgagagggaggaaagtgggagggggttgtggacatgaatgtggttgaaagttgtaggcgaattgggaagtggcatgatgatcacacaggaggcccctcagacccatcgatctcatgtctgtcctgttgcaggtgcatcaccatctacaggagaagaagaatggacttgctaaatgacctagcactattctctggcctgatttatcatatcccttttctcctccaaatgtttcttctctcacctcttctctgggacttaaggtgctatattccctcagagctcacaaatgcctttcaattctttccctgacctcctttcctgaatttttttattttctcaaatgttacctactaagggatgcctgggtaagccactcagctacctaattcctcaatgacctttatctaaaatctccatggaagcaataaattcccttttgatgcctctattgaatttttcccatctttcatctcagggctgactgagagcataacttagaatgggcgactcttatgttttaggccaatttcatatcattccccagatcatatttcaagtccagtaacacaggagcaaccaagtacagtgtatcctgataatttgttgatttcttaactggtgttaatatttctttcttccttttgttcctacccttggccactgccagccacccctcaattcaggtaccaacgaaccctctgcccttggctcagaatggttatagcagaaatacaaaaaaaaaaaaaaaagtctgtactaatt

SEQ ID NO: 16940 - DNA, 1201 bp, Homo sapiens
  source 1..1201: mol_type = unassigned DNA
ggcagggtttggtttgggtgtcttcagatttgcttgtctcgaggtcctcacaattgctctgcagctcagagcagcaactgctgaggctgccttgggaagaagatgatcctaaacaaagctctgctgctgggggccctcgccctgactgccgtgatgagcccctgtggaggtgaagacattgtggctgaccatgttgcctcctatggtgtgaacttctaccagtctcacggtccctctggccagtacacccatgaatttgatggagatgaggagttctacgtggacctggagacgaaagagactgtctggcagttgcctatgtttagcaaatttataagttttgacccgcagagtgcactgagaaatatggctgtgggaaaacacaccttggaattcatgatgagacagtccaactctaccgctgccaccaatgaggttcctgaggtcacagtgttttccaagtttcctgtgacgctgggtcagcccaacaccctcatctgtcttgtggacaacatctttcctcctgtggtcaacatcacctggctgagcaatgggcactcagtcacagaaggtgtttctgagaccagcttcctctccaagagtgatcattccttcttcaagatcagttacctcaccttcctcccttctgctgatgagatttatgactgcaaggtggagcactggggcctggacgagcctcttctgaaacactgggagcctgagattccagcccctatgtcagagctcacagagactttggtctgcgccctggggttgtctgcgggcctcatgggcattgtggtgggcactgtcttcatcatccaaggcctgcgttcagttggtgcttccagacaccaagggctcttgtgaatcccatcctgaaaaggaaggtgcatcaccatctacaggagaagaagaatggacttgctaaatgacctagcactattctctggcctgatttatcatatcccttttctcctccaaatgtttcttctctcacctcttctctgggacttaaggtgctatattccctcagagctcacaaatacctttcaattctttccctgacctcctttcctgaatttttttattttctcaaatgttacctactaagggatgcctgggtaagccacttagctacctaattcctcaatgacctttatctaaaatctccatggaagcaataaattcccttttatga

SEQ ID NO: 16941 - DNA, 1710 bp, Homo sapiens
  source 1..1710: mol_type = unassigned DNA
tcctcacaattgctctacagctcagagcagcaactgctgagcctgccttgggaagaagatgatcctaaacaaagctctgctgctgggggccctcgccctgactgccgtgatgagcccctgtggaggtgaagacattgtggctgaccatgttgcctcctatggtgtgaacttctaccagtctcacggtccctctggccagtacacccatgaatttgatggagacgaggagttctatgtggacctggagacgaaagagactgtctggcagttgcctatgtttagcaaatttataagttttgacccgcagagtgcactgagaaatatggctgtgggaaaacacaccttggaattcatgatgagacagtccaactctaccgctgccaccaatgaggttcctgaggtcacagtgttttccaagtttcctgtgacgctgggtcagcccaacaccctcatctgtcttgtggacaacatctttcctcctgtggtcaacatcacctggctgagcaatgggcactcagtcacagaaggtgtttctgagaccagcttcctctccaagagtgatcattccttcttcaagatcagttacctcaccttcctcccttctgctgatgagatttatgactgcaaggtggagcactggggcctggacgagcctcttctgaaacactgggagcctgagattccagcccctatgtcagagctcacagagactttggtctgcgccctggggttgtctgtgggcctcatgggcattgtggtgggcactgtcttcatcatccaaggcctgcgttcagttggtgcttccagacaccaagggctcttatgaatcccatcctgaaaaggaaggtgcatcaccatctacaggagaagaagaatggacttgctaaatgacctagcactattctctggcctgatttatcatatcccttttctcctccaaatgtttcttctctcacctcttctctgggacttaaggtgctatattccctcagagctcacaaatgcctttcaattctttccctgacctcctttcctgaatttttttattttctcaaatgttacctactaagggatgcctgggtaagccactcagctacctaattcctcaatgacctttatctaaaatctccatggaagcaataaattcccttttgatgcctctattgaatttttcccatctttcatctcagggctgactgagagcataacttagaatgggcgactcttatgttttaggccaatttcatatcattccccagatcatatttcaagtccagtaacacaggagcaaccaagtacagtgtatcctgataatttgttgatttcttaactggtgttaatatttctttcttccttttgttcctacccttggccactgccagccacccctcaattcaggtaccaacgaaccctctgcccttggctcagaatggttatagcagaaatacaaaaaaaaaaaaaaaagtctgtactaatttcaatatggctcttaaaaggaatgacagagaaataggatacaagaattttgaatctcaaaagttatcaaaagtaaaaaattttgttaccaaaagtcaaactgcattctcaaaactttaaatttgtgaagaatgacaacagtagaagctttcctctccccttctcaccttgaggagataaaaattctctaggcaggaaaagaaatggaagccagttagaaaaacattgaaataa

SEQ ID NO: 16942 - DNA, 246 bp, Homo sapiens
  source 1..246: mol_type = unassigned DNA
gaccatgttgcctcctatggtgtgaacttctaccagtctcacggtccctctggccagtacacccatgaatttgatggagacgaggagttctacgtggacctggagacgaaagagactgtctggcagttgcctatgtttagcaaatttataagttttgacccgcagagtgcactgagaaatatggctgtgggaaaacacaccttggaattcatgatgagacagtccaactctaccgctgccaccaat

SEQ ID NO: 16943 - DNA, 768 bp, Homo sapiens
  source 1..768: mol_type = unassigned DNA
atgatcctaaacaaagctctgctgctgggggccctcgccctgactgccgtgatgagcccctgtggaggtgaagacattgtggctgaccatgttgcctcctatggtgtgaacttctaccagtctcacggtccctctggccagtacacccatgaatttgatggagacgaggagttctacgtggacctggagacgaaagagactgtctggcagttgcctatgtttagcaaatttataagttttgacccgcagagtgcactgagaaatatggctgtgggaaaacacaccttggaattcatgatgagacagtccaactctaccgctgccaccaatgaggttcctgaggtcacagtgttttccaagtttcctgtgacgctgggtcagcccaacaccctcatctgtcttgtggacaacatctttcctcctgtggtcaacatcacctggctgagcaatgggcactcagtcacagaaggtgtttctgagaccagcttcctctccaagagtgatcattccttcttcaagatcagttacctcaccttcctcccttctgctgatgagatttatgactgcaaggtggagcactggggcctggacgagcctcttctgaaacactgggagcctgagattccagcccctatgtcagagctcacagagactttggtctgcgccctggggttgtctgtgggcctcatgggcattgtggtgggcactgtcttcatcatccaaggcctgcgttcagttggtgcttccagacaccaagggctcttatga

SEQ ID NO: 16944 - DNA, 81 bp, Homo sapiens
  source 1..81: mol_type = unassigned DNA
atgatcctaaacaaagctctgctgctgggggccctcgccctgactgccgtgatgagcccctgtggaggtgaagacattgtg

SEQ ID NO: 16945 - DNA, 1656 bp, Homo sapiens
  source 1..1656: mol_type = unassigned DNA
attctttctgccaggtacatcagatccatcaggtccgagctgtgttgactaccactgcttttcccttcgtctcagttatgtcttggaagaaggctttgcggatccccggagaccttcgggtagcaactgtcaccttgatgctggcgatgctgagctccctactggctgagggcagagactctcccgaggatttcgtgttccagtttaagggcatgtgctacttcaccaacgggacggagcgcgtgcgtcttgtgaccagatacatctataaccgagaggagtacgcgcgcttcgacagcgacgtgggggtgtaccgcgcggtgacgccgcaggggcggcctgatgccgagtactggaacagccagaaggaagtcctggaggggacccgggcggagttggacacggtgtgcagacacaactacgaggtggcgttccgcgggatcttgcagaggagagtggagcccacagtgaccatctccccatccaggacagaggccctcaaccaccacaacctgctggtctgctcggtgacagatttctatccaggccagatcaaagtccggtggtttcggaatgatcaggaggagacagccggcgttgtgtccaccccccttattaggaatggtgactggactttccagatcctggtgatgctggaaatgactccccagcgtggagatgtctacacctgccacgtggagcaccccagcctccagagccccatcaccgtggagtggcgggctcagtctgaatctgcccagagcaagatgctgagtggcgttggaggcttcgtgctggggctgatcttccttgggctgggccttatcatccgtcaaaggagtcagaaaggacctcaagggcctccaccagcagggcttctgcactgactcctgagactattttaactaggattggttatcactcttctgtgatgcctgcttatgcctgcccagaattcccagctgcctgtgtcagcttgtccccctgagatcaaagtcctacagtggctgtcacgcagccaccaggtcatctcctttcatccccaccccaaggcgctggctgtgactctgcttcctgcactgacccagagcctctgcctgtgcatggccagctgcgtctactcaggtcccaaggggtttctgtttctattctttcctcagactgctcaagagaagcacatgaaaaacattacctgactttagagcttttttacataattaaacatgatcctgagttatctgtattctgaactttcttaattgagaagaggcaggaaatcactgcagaatgaaggaacatcccttgaggtgacccagcaaacctgtggccagaaggaggattgtaccttgaaaagacactgaaagcattttggggtgtgaagtaagggtgggcagaggaggtagaaaataattcaattgtcgcatcattcatggttctttaatactgatgctcagtgcattggccttagaatatcccagcctctcttctggtttggtgagtgctgtgtaaataagcatggtagaattgtttggagacatatatagtgatccttggtcactggtgtttcaaacattctggaaagtcacatcgatcaagaatattttttatttttaagaaagcataaccagcaataaaaatactatttttgagtctaaa

SEQ ID NO: 16946 - DNA, 1649 bp, Homo sapiens
  source 1..1649: mol_type = unassigned DNA
atcagatccatcaggtccgagctgtgttgactaccacttttcccttcgtctcaattatgtcttggaaaaaggctttgcggatccccggaggccttcgggcagcaactgtgaccttgatgctgtcgatgctgagcaccccagtggctgagggcagagactctcccgaggatttcgtgtaccagtttaagggcatgtgctacttcaccaacgggacagagcgcgtgcgtcttgtgagcagaagcatctataaccgagaagagatcgtgcgcttcgacagcgacgtgggggagttccgggcggtgacgctgctggggctgcctgccgccgagtactggaacagccagaaggacatcctggagaggaaacgggcggcggtggacagggtgtgcagacacaactaccagttggagctccgcacgaccttgcagcggcgagtggagcccacagtgaccatctccccatccaggacagaggccctcaaccaccacaacctgctggtctgctcggtgacagatttctatccagcccagatcaaagtccggtggtttcggaatgaccaggaggagacagctggcgttgtgtccaccccccttattaggaatggtgactggaccttccagatcctggtgatgctggaaatgactccccagcgtggagacgtctacacctgccacgtggagcaccccagcctccagagccccatcaccgtggagtggcgggctcaatctgaatctgcccagagcaagatgctgagtggcattggaggcttcgtgctggggctgatcttcctcgggctgggccttatcatccatcacaggagtcagaaagggctcctgcactgactcctgagactattttaactgggattggttatcacttttctgtaacgcctgcttgtccctgcccagaattcccagctgtctgtgtcagcctgtccccctgagatcagagtcctacagtggctgtcacgcagccaccaggtcatctcctttcatccccaccttgaggcggatggctgtgaccctacttcctgcactgacccacagcctctgcctgtgcacggccagctgcatctactcaggccccaaggggtttctgtttctattctctcctcagactgctcaagagaagcacatgaaaaccattacctgactttagagcttttttacataattaaacatgatcctgagttatctgtattctgaacttccttaattgagcagaggcaggaaatcactgcagaatgaaggaacataccttgaggtgacccagccaacctgtgcccagaaggagggttgtaccttgaaaagacactgaaagaatttggggtgcaaagtcatggtgggcagaggaggtagaaaatcaactcagttgttgcatcattcatggttctttcatattgatgttcagtgcagtggcctgagaatatcccagcctctcttctggtttggtgagtgctatataagtaaacatggtggaattgtttgggggcagatatagtgacccttggtcactggtgtttcaaacattctggcaagtcacatcaatcaagaataatttttacttttaagaaagcataaccagcaataaaagtattatttttgattctaaatgatagaaacccaaatatattttgttcatggtgcaaa

SEQ ID NO: 16947 - DNA, 1649 bp, Homo sapiens; identical to SEQ ID NO: 16946
  source 1..1649: mol_type = unassigned DNA

SEQ ID NO: 16948 - DNA, 1788 bp, Homo sapiens
  source 1..1788: mol_type = unassigned DNA
gcactggattgagaaccttcacaaaaaaaaatctgcccagagacagatgaggtccttcagctccagtgctgattggttcctttccaagggaccatccaatcctaccacgcatggaaacatccacaggtttttattctttctgccaggtacatcagatccatcaggtccgagctgtgttgactaccactacttttcccttcgtctcaattatgtcttggaaaaaggctttgcggatccccggaggccttcgggcagcaactgttaccttgatgctggcgatgctgagcaccccagtggctgagggcagagactctcccgaggatttcgtgtaccagtttaaggccatgtgctacttcaccaacgggacggagcgcgtgcgttatgtgaccagatacatctataaccgagaggagtacgcacgcttcgacagcgacgtggaggtgtaccgggcggtgacgccgctggggccgcctgacgccgagtactggaacagccagaaggaagtcctggagaggacccgggcggagttggacacggtgtgcagacacaactaccagttggagctccgcacgaccttgcagcggcgagtggagcccacagtgaccatctccccatccaggacagaggccctcaaccaccacaacctgctggtctgctcagtgacagatttctatccagcccagatcaaagtccggtggtttcggaatgaccaggaggagacaaccggcgttgtgtccaccccccttattaggaacggtgactggaccttccagatcctggtgatgctggaaatgactccccagcatggagacgtctacacctgccacgtggagcaccccagcctccagaaccccatcaccgtggagtggcgggctcagtctgaatctgcccagagcaagatgctgagtggcattggaggcttcgtgctggggctcatcttcctcgggctgggccttattatccatcacaggagtcagaaaggacctcaagggcctccaccagcagggctcctgcactgactcctgagactattttaactgggattggttatcacttttctgtaacgcctgcttgtccctgcccagaattcccaactgcctgtgtcagcctgtccccctgagatcagagtcctacagtggctgtcacgcagccaccaggtcatctcctttcatccccaccccaaggcgctggctgtgactctgcttcctgcactgacccagagcctctgcctgtgcatggccagctgcgtctactcaggccccaaggggtttctgtttctattctctcctcagactgctcaagagaagcacatgaaaaccattacctgactttagagcttttttacataattaaacatgatcctgagttatctgtattctcaacttccttaattgagcagaggcaggaaatcactgcagaatgaaggaacataccttgaggtgacccagccaacctgtgcccagaaggagggttgtaccttgaaaagacactgaaagaatttggggtgcaaagtcatggtgggcagaggaggtagaaaatcaactcagttgtcgcatcattcatggttctttcatattgatgttcagtgcagtggcctgagaatatcccagcctctcttctggtttggtgagtgctatataagtaaacatggtggaattgtttgggggcagatatagtgacccttggtcactggtgtttcaaacattctggcaagtcacatcaatcaagaataatttttacttttaagaaagcataaccagcaataaaagtattatttttgattctaaa

SEQ ID NO: 16949 - DNA, 1789 bp, Homo sapiens
  source 1..1789: mol_type = unassigned DNA
actggattgagaaccttcacaaaaaaaaaatgtctgcctagagacagattaggtccttcagctccagtgctgattggttcctttccaaaggaccatccaatcctgccacgcagggaaacatccacaggtttttattctttctgccaggtacatcagatccatcaggtccaagctgtgttgactaccactacttttcccttcgtctcaattatgtcttggaagaaggctttgcggatccctggaggccttcgggtagcaactgtgaccttgatgctggcgatgctgagcaccccggtggctgagggcagagactctcccgaggatttcgtgtaccagtttaagggcatgtgctacttcaccaacgggacggagcgcgtgcgtcttgtgaccagatacatctataaccgagaggagtacgcacgcttcgacagcgacgtgggggtgtatcgggcggtgacgccgctggggccgcctgacgccgagtactggaacagccagaaggaagtcctggagaggacccgggcggagttggacacggtgtgcagacacaactaccagttggagctccgcacgaccttgcagcggcgagtggagcccacagtgaccatctccccatccaggacagaggccctcaaccaccacaacctgctggtctgctcagtgacagatttctatccagcccagatcaaagtccggtggtttcggaatgaccaggaggagacaactggcgttgtgtccaccccccttattaggaacggtgactggaccttccagatcctggtgatgctggaaatgactccccagcgtggagacgtctacacctgccacgtggagcaccccagcctccagaaccccatcatcgtggagtggcgggctcagtctgaatctgcccagagcaagatgctgagtggcattggaggcttcgtgctggggctgatcttcctcgggctgggccttattatccatcacaggagtcagaaaggacctcaagggcctccaccagcagggctcctgcactgactcctgagactattttaactgggattggttatcacttttctgtaacgcctgcttgtccctgcccagaattcccagctgcctgtgtcagcctgtcccccgagatcagagtcctacagtggctgtcacgcagccaccaggtcatctcctttcatccccacctcaaggctgatggctgtgaccctgcttcctgcactgacccagagcctctgcctgtgcacggccagctgcgtctactgaggccccaaggggtttctgtttctattctctcctcagactgctcaagagaagcacatgaaaaccattacctgactttagagcttttttacataattaaacatgatcctgagttatctgtattctcaacttccttaattgagcagaggcaggaaatcactgcagaatgaaggaacataccttgaggtgacccagccaacctgtgcccagaaggagggttgtaccttgaaaagacactgaaagaattttgggtgcaaagtcagggtgggcagaggaggtagaagatcaactcagttgtcgcatcattcatggttctttcatattgatgttcaatgcagtggcctgagaatatcccagcctctcttctggtttggtgagtgctatataagtaagcatggtggaattgtttgggggcagatatagtgacccttggtcactggtgtttcaaacattctggcaagtcacatcaatcaagaataatttttacttttaagaaagcataaccagcaataaaagtattatttttgagtctaaa

SEQ ID NO: 16950 - DNA, 1501 bp, Homo sapiens
  source 1..1501: mol_type = unassigned DNA
cagatccatcaggtccgagctgtgttgactaccactgcttttcccttcgtctcagttatgtcttggaagaaggctttgcggatccccggagaccttcgggtagcaactgtcaccttgatgctggcgatgctgagctccctactggctgagggcagagactctcccgaggatttcgtgttccagtttaagggcatgtgctacttcaccaacgggacggagcgcgtgcgtcttgtgaccagatacatctataaccgagaggagtacgcgcgcttcgacagcgacgtgggggtgtaccgcgcggtgacgccgcaggggcggcctgatgccgagtactggaacagccagaaggaagtcctggaggggacccgggcggagttggacacggtgtgcagacacaactacgaggtggcgttccgcgggatcttgcagaggagagtggagcccacagtgaccatctccccatccaggacagaggccctcaaccaccacaacctgctggtctgctcggtgacagatttctatccaggccagatcaaagtccggtggtttcggaatgatcaggaggagacagccggcgttgtgtccaccccccttattaggaatggtgactggactttccagatcctggtgatgctggaaatgactccccagcgtggagatgtctacacctgccacgtggagcaccccagcctccagagccccatcaccgtggagtggcggcttctgcactgactcctgagactattttaactaggattggttatcactcttctgtgatgcctgcttatgcctgcccagaattcccagctgcctgtgtcagcttgtccccctgagatcaaagtcctacagtggctgtcacgcagccaccaggtcatctcctttcatccccaccccaaggcgctggctgtgactctgcttcctgcactgacccagagcctctgcctgtgcatggccagctgcgtctactcaggtcccaaggggtttctgtttctattctttcctcagactgctcaagagaagcacatgaaaaacattacctgactttagagcttttttacataattaaacatgatcctgagttatctgtattctgaactttcttaattgagaagaggcaggaaatcactgcagaatgaaggaacatcccttgaggtgacccagcaaacctgtggccagaaggaggattgtaccttgaaaagacactgaaagcattttggggtgtgaagtaagggtgggcagaggaggtagaaaataattcaattgtcgcatcattcatggttctttaatactgatgctcagtgcattggccttagaatatcccagcctctcttctggtttggtgagtgctgtgtaaataagcatggtagaattgtttggagacatatatagtgatccttggtcactggtgtttcaaacattctggaaagtcacatcgatcaagaatattttttatttttaagaaagcataaccagcaataaaaatactatttttgagtctaaa

SEQ ID NO: 16951 - DNA, 1734 bp, Homo sapiens
  source 1..1734: mol_type = unassigned DNA
aggatggattagagacctctattttgaggcgcactgatgtaggggctgaggaaggacattgagggcaccttcaggtctctctgcctattcttccttgccccaactccattccaggtgtacatcagatccatcaggtccgagctgtgttgactaccactgcttttcccttcgtctcagttatgtcttggaagaaggctttgcggatccccggagaccttcgggtagcaactgtcaccttgatgctggcgatgctgagctccctactggctgagggcagagactctcccgaggatttcgtgttccagtttaagggcatgtgctacttcaccaacgggacggagcgcgtgcgtcttgtgaccagatacatctataaccgagaggagtacgcgcgcttcgacagcgacgtgggggtgtaccgcgcggtgacgccgcaggggcggcctgatgccgagtactggaacagccagaaggaagtcctggaggggacccgggcggagttggacacggtgtgcagacacaactacgaggtggcgttccgcgggatcttgcagaggagagtggagcccacagtgaccatctccccatccaggacagaggccctcaaccaccacaacctgctggtctgctcggtgacagatttctatccaggccagatcaaagtccggtggtttcggaatgatcaggaggagacagccggcgttgtgtccaccccccttattaggaatggtgactggactttccagatcctggtgatgctggaaatgactccccagcgtggagatgtctacacctgccacgtggagcaccccagcctccagagccccatcaccgtggagtggcgggctcagtctgaatctgcccagagcaagatgctgagtggcgttggaggcttcgtgctggggctgatcttccttgggctgggccttatcatccgtcaaaggagtcagaaagggcttctgcactgactcctgagactattttaactaggattggttatcactcttctgtgatgcctgcttatgcctgcccagaattcccagctgcctgtgtcagcttgtccccctgagatcaaagtcctacagtggctgtcacgcagccaccaggtcatctcctttcatccccaccccaaggcgctggctgtgactctgcttcctgcactgacccagagcctctgcctgtgcatggccagctgcgtctactcaggtcccaaggggtttctgtttctattctttcctcagactgctcaagagaagcacatgaaaaacattacctgactttagagcttttttacataattaaacatgatcctgagttatctgtattctgaactttcttaattgagaagaggcaggaaatcactgcagaatgaaggaacatcccttgaggtgacccagcaaacctgtggccagaaggaggattgtaccttgaaaagacactgaaagcattttggggtgtgaagtaagggtgggcagaggaggtagaaaataattcaattgtcgcatcattcatggttctttaatactgatgctcagtgcattggccttagaatatcccagcctctcttctggtttggtgagtgctgtgtaaataagcatggtagaattgtttggagacatatatagtgatccttggtcactggtgtttcaaacattctggaaagtcacatcgatcaagaatattttttatttttaagaaagcataaccagcaataaaaatactatttttgagtctaaa

SEQ ID NO: 16952 - DNA, 1642 bp, Homo sapiens
  source 1..1642: mol_type = unassigned DNA
acaggtttttattctttctgccaggtacatcagatccatcaggtccgagctgtgttgactaccactacttttcccttcgtctcaattatgtcttggaaaaaggctttgcggatccccggaggccttcgggcagcaactgttaccttgatgctggcgatgctgagcaccccagtggctgagggcagagactctcccgaggatttcgtgtaccagtttaaggccatgtgctacttcaccaacgggacggagcgcgtgcgttatgtgaccagatacatctataaccgagaggagtacgcacgcttcgacagcgacgtggaggtgtaccgggcggtgacgccgctggggccgcctgacgccgagtactggaacagccagaaggaagtcctggagaggacccgggcggagttggacacggtgtgcagacacaactaccagttggagctccgcacgaccttgcagcggcgagtggagcccacagtgaccatctccccatccaggacagaggccctcaaccaccacaacctgctggtctgctcagtgacagatttctatccagcccagatcaaagtccggtggtttcggaatgaccaggaggagacaaccggcgttgtgtccaccccccttattaggaacggtgactggaccttccagatcctggtgatgctggaaatgactccccagcatggagacgtctacacctgccacgtggagcaccccagcctccagaaccccatcaccgtggagtggcgggctcagtctgaatctgcccagagcaagatgctgagtggcattggaggcttcgtgctggggctcatcttcctcgggctgggccttattatccatcacaggagtcagaaagggctcctgcactgactcctgagactattttaactgggattggttatcacttttctgtaacgcctgcttgtccctgcccagaattcccaactgcctgtgtcagcctgtccccctgagatcagagtcctacagtggctgtcacgcagccaccaggtcatctcctttcatccccaccccaaggcgctggctgtgactctgcttcctgcactgacccagagcctctgcctgtgcatggccagctgcgtctactcaggccccaaggggtttctgtttctattctctcctcagactgctcaagagaagcacatgaaaaccattacctgactttagagcttttttacataattaaacatgatcctgagttatctgtattctcaacttccttaattgagcagaggcaggaaatcactgcagaatgaaggaacataccttgaggtgacccagccaacctgtgcccagaaggagggttgtaccttgaaaagacactgaaagaatttggggtgcaaagtcatggtgggcagaggaggtagaaaatcaactcagttgtcgcatcattcatggttctttcatattgatgttcagtgcagtggcctgagaatatcccagcctctcttctggtttggtgagtgctatataagtaaacatggtggaattgtttgggggcagatatagtgacccttggtcactggtgtttcaaacattctggcaagtcacatcaatcaagaataatttttacttttaagaaagcataaccagcaataaaagtattatttttgattctaaa

SEQ ID NO: 16953 - DNA, 1473 bp, Homo sapiens
  source 1..1473: mol_type = unassigned DNA
ctgtgttgactaccacttttcccttcgtctcaattatgtcttggaaaaaggctttgcggatccccggaggccttcgggcagcaactgtgaccttgatgctgtcgatgctgagcaccccagtggctgagggcagagactctcccgaggatttcgtgtaccagtttaagggcatgtgctacttcaccaacgggacagagcgcgtgcgtcttgtgagcagaagcatctataaccgagaagagatcgtgcgcttcgacagcgacgtgggggagttccgggcggtgacgctgctggggctgcctgccgccgagtactggaacagccagaaggacatcctggagaggaaacgggcggcggtggacagggtgtgcagacacaactaccagttggagctccgcacgaccttgcagcggcgagtggagcccacagtgaccatctccccatccaggacagaggccctcaaccaccacaacctgctggtctgctcggtgacagatttctatccagcccagatcaaagtccggtggtttcggaatgaccaggaggagacagctggcgttgtgtccaccccccttattaggaatggtgactggaccttccagatcctggtgatgctggaaatgactccccagcgtggagacgtctacacctgccacgtggagcaccccagcctccagagccccatcaccgtggagtggcggctcctgcactgactcctgagactattttaactgggattggttatcacttttctgtaacgcctgcttgtccctgcccagaattcccagctgtctgtgtcagcctgtccccctgagatcagagtcctacagtggctgtcacgcagccaccaggtcatctcctttcatccccaccttgaggcggatggctgtgaccctacttcctgcactgacccacagcctctgcctgtgcacggccagctgcatctactcaggccccaaggggtttctgtttctattctctcctcagactgctcaagagaagcacatgaaaaccattacctgactttagagcttttttacataattaaacatgatcctgagttatctgtattctgaacttccttaattgagcagaggcaggaaatcactgcagaatgaaggaacataccttgaggtgacccagccaacctgtgcccagaaggagggttgtaccttgaaaagacactgaaagaatttggggtgcaaagtcatggtgggcagaggaggtagaaaatcaactcagttgttgcatcattcatggttctttcatattgatgttcagtgcagtggcctgagaatatcccagcctctcttctggtttggtgagtgctatataagtaaacatggtggaattgtttgggggcagatatagtgacccttggtcactggtgtttcaaacattctggcaagtcacatcaatcaagaataatttttacttttaagaaagcataaccagcaataaaagtattatttttga

SEQ ID NO: 16954 - DNA, 1734 bp, Homo sapiens
  source 1..1734: mol_type = unassigned DNA
aggatggattagaggcctctattctgagggacactgaggtgggggctgaggaaggacattgagggcagcttcaggtctctctgcctactcttccttgccccaactccattccaggtgtacatcagatccatcaggtccgagctgtgttgactaccactacttttcccttcgtctcaattatgtcttggaaaaaggctttgcggatccccggaggccttcgggcagcaactgttaccttgatgctggcgatgctgagcaccccagtggctgagggcagagactctcccgaggatttcgtgtaccagtttaaggccatgtgctacttcaccaacgggacggagcgcgtgcgttatgtgaccagatacatctataaccgagaggagtacgcacgcttcgacagcgacgtggaggtgtaccgggcggtgacgccgctggggccgcctgacgccgagtactggaacagccagaaggaagtcctggagaggacccgggcggagttggacacggtgtgcagacacaactaccagttggagctccgcacgaccttgcagcggcgagtggagcccacagtgaccatctccccatccaggacagaggccctcaaccaccacaacctgctggtctgctcagtgacagatttctatccagcccagatcaaagtccggtggtttcggaatgaccaggaggagacaaccggcgttgtgtccaccccccttattaggaacggtgactggaccttccagatcctggtgatgctggaaatgactccccagcatggagacgtctacacctgccacgtggagcaccccagcctccagaaccccatcaccgtggagtggcgggctcagtctgaatctgcccagagcaagatgctgagtggcattggaggcttcgtgctggggctcatcttcctcgggctgggccttattatccatcacaggagtcagaaagggctcctgcactgactcctgagactattttaactgggattggttatcacttttctgtaacgcctgcttgtccctgcccagaattcccaactgcctgtgtcagcctgtccccctgagatcagagtcctacagtggctgtcacgcagccaccaggtcatctcctttcatccccaccccaaggcgctggctgtgactctgcttcctgcactgacccagagcctctgcctgtgcatggccagctgcgtctactcaggccccaaggggtttctgtttctattctctcctcagactgctcaagagaagcacatgaaaaccattacctgactttagagcttttttacataattaaacatgatcctgagttatctgtattctcaacttccttaattgagcagaggcaggaaatcactgcagaatgaaggaacataccttgaggtgacccagccaacctgtgcccagaaggagggttgtaccttgaaaagacactgaaagaatttggggtgcaaagtcatggtgggcagaggaggtagaaaatcaactcagttgtcgcatcattcatggttctttcatattgatgttcagtgcagtggcctgagaatatcccagcctctcttctggtttggtgagtgctatataagtaaacatggtggaattgtttgggggcagatatagtgacccttggtcactggtgtttcaaacattctggcaagtcacatcaatcaagaataatttttacttttaagaaagcataaccagcaataaaagtattatttttgattctaaa

SEQ ID NO: 16955 - DNA, 1643 bp, Homo sapiens
  source 1..1643: mol_type = unassigned DNA
acaggtttttattctttctgccaggtacatcagatccatcaggtccaagctgtgttgactaccactacttttcccttcgtctcaattatgtcttggaagaaggctttgcggatccctggaggccttcgggtagcaactgtgaccttgatgctggcgatgctgagcaccccggtggctgagggcagagactctcccgaggatttcgtgtaccagtttaagggcatgtgctacttcaccaacgggaccgagcgcgtgcggggtgtgaccagatacatctataaccgagaggagtacgcgcgcttcgacagcgacgtgggggtgtatcgggcggtgacgccgctggggccgcctgccgccgagtactggaacagccagaaggaagtcctggagaggacccgggcggagttggacacggtgtgcagacacaactaccagttggagctccgcacgaccttgcagcggcgagtggagcccacagtgaccatctccccatccaggacagaggccctcaaccaccacaacctgctggtctgctcagtgacagatttctatccagcccagatcaaagtccggtggtttcggaatgaccaggaggagacaactggcgttgtgtccaccccccttattaggaacggtgactggaccttccagatcctggtgatgctggaaatgactccccagcgtggagacgtctacacctgccacgtggagcaccccagcctccagaaccccatcatcgtggagtggcgggctcagtctgaatctgcccagagcaagatgctgagtggcattggaggcttcgtgctggggctgatcttcctcgggctgggccttattatccatcacaggagtcagaaagggctcctgcactgactcctgagactattttaactgggattggttatcacttttctgtaacgcctgcttgtccctgcccagaattcccagctgcctgtgtcagcctgtccccctgagatcagagtcctacagtggctgtcacgcagccaccaggtcatctcctttcatccccacctcgaggctgatggctgtgaccctgcttcctgcacttacccagagcctctgcctgtgcacggccagctgcgtctactgaggccccaaggggtttctgtttctattctctcctcagactgctcaagagaagcacatgaaaaccattacctgactttagagcttttttacataattaaacatgatcctgagttatctgtattctcaacttccttaattgagcagaggcaggaaatcactgcagaatgaaggaacataccttgaggtgacccagccaacctgtgcccagaaggagggttgtaccttgaaaagacactgaaagaatttggggtgcaaagtcagggtgggcagaggaggtagaagatcaactcagttgttgcatcattcatggttctttcatattgatgctcagtgcagtggcctgagaatatcccagcctctcttctggtttggtgagtgctatataagtaagcatggtggaattgtttgggggcagatatagtgacccttggtcactggtgtttcaaacattctggcaagtcacatcaatcaagaataatttttacttttaagaaagcataaccagcaataaaagtactatttttgattctaaa

SEQ ID NO: 16956 - DNA, 1483 bp, Homo sapiens
  source 1..1483: mol_type = unassigned DNA
gagctgtgttgactaccacttttcccttcgtctcaattatgtcttggaaaaaggctttgcggatccccggaggccttcgggcagcaactgtgaccttgatgctgtcgatgctgagcaccccagtggctgagggcagagactctcccgaggatttcgtgtaccagtttaagggcatgtgctacttcaccaacgggacagagcgcgtgcgtcttgtgagcagaagcatctataaccgagaagagatcgtgcgcttcgacagcgacgtgggggagttccgggcggtgacgctgctggggctgcctgccgccgagtactggaacagccagaaggacatcctggagaggaaacgggcggcggtggacagggtgtgcagacacaactaccagttggagctccgcacgaccttgcagcggcgagtggagcccacagtgaccatctccccatccaggacagaggccctcaaccaccacaacctgctggtctgctcggtgacagatttctatccagcccagatcaaagtccggtggtttcggaatggccaggaggagacagctggcgttgtgtccaccccccttattaggaatggtgactggaccttccagatcctggtgatgctggaaatgactccccagcgtggagacgtctacacctgccacgtggagcaccccagcctccagagccccatcaccgtggagtggcggctcctgcactgactcctgagactattttaactgggattggttatcacttttctgtaacgcctgcttgtccctgcccagaattcccagctgtctgtgtcagcctgtccccctgagatcagagtcctacagtggctgtcacgcagccaccaggtcatctcctttcatccccaccttgaggcggatggctgtgaccctacttcctgcactgacccacagcccctgcctgtgcacagccagctgcatctactcaggccccaaggggtttctgtttctattctctcctcagactgctcaagagaagcacatgaaaactattacctgactttagagcttttttacataattaaacatgatcctgagttatctgtattctgaacttccttaattgagcagaggcaggaaatcactgcagaatgaaggaacataccttgaggtgacccagccaacctgtgcccagaaggagggttgtaccttgaaaagacactgaaagaatttggggtgcaaagtcagggtgggcagaggaggtagaaaatcaactcagttgtcgcatcattcatggttctttcatattgatgttcagtgcagtggcctgagaatatcccagcctctcttctggtttggtgagtgctatataagtaaacatggtggaattgtttgggggcagatatagtgacccttggtcactggtgtttcaaacattctggcaagtcacatcaatcaagaataatttttacttttaagaaagcataaccagcaataaaagtattatttttgattctaaa

SEQ ID NO: 16957 - DNA, 1642 bp, Homo sapiens
  source 1..1642: mol_type = unassigned DNA
acaggtttttattctttctgccaggtacatcagatccatcaggtccaagctgtgttgactaccactacttttcccttcgtctcaattatgtcttggaagaaggctttgcggatccctggaggccttcgggtagcaactgtgaccttgatgctggcgatgctgagcaccccggtggctgagggcagagactctcccgaggatttcgtgtaccagtttaagggcatgtgctacttcaccaacgggacggagcgcgtgcgtcttgtgaccagatacatctataaccgagaggagtacgcacgcttcgacagcgacgtgggggtgtatcgggcggtgacgccgctggggccgcctgacgccgagtactggaacagccagaaggaagtcctggagaggacccgggcggagttggacacggtgtgcagacacaactaccagttggagctccgcacgaccttgcagcggcgagtggagcccacagtgaccatctccccatccaggacagaggccctcaaccaccacaacctgctggtctgctcagtgacagatttctatccagcccagatcaaagtccggtggtttcggaatgaccaggaggagacaactggcgttgtgtccaccccccttattaggaacggtgactggaccttccagatcctggtgatgctggaaatgactccccagcgtggagacgtctacacctgccacgtggagcaccccagcctccagaaccccatcatcgtggagtggcgggctcagtctgaatctgcccagagcaagatgctgagtggcattggaggcttcgtgctggggctgatcttcctcgggctgggccttattatccatcacaggagtcagaaagggctcctgcactgactcctgagactattttaactgggattggttatcacttttctgtaacgcctgcttgtccctgcccagaattcccagctgcctgtgtcagcctgtcccccgagatcagagtcctacagtggctgtcacgcagccaccaggtcatctcctttcatccccacctcaaggctgatggctgtgaccctgcttcctgcactgacccagagcctctgcctgtgcacggccagctgcgtctactgaggccccaaggggtttctgtttctattctctcctcagactgctcaagagaagcacatgaaaaccattacctgactttagagcttttttacataattaaacatgatcctgagttatctgtattctcaacttccttaattgagcagaggcaggaaatcactgcagaatgaaggaacataccttgaggtgacccagccaacctgtgcccagaaggagggttgtaccttgaaaagacactgaaagaattttgggtgcaaagtcagggtgggcagaggaggtagaagatcaactcagttgtcgcatcattcatggttctttcatattgatgttcaatgcagtggcctgagaatatcccagcctctcttctggtttggtgagtgctatataagtaagcatggtggaattgtttgggggcagatatagtgacccttggtcactggtgtttcaaacattctggcaagtcacatcaatcaagaataatttttacttttaagaaagcataaccagcaataaaagtattatttttgagtctaaa

SEQ ID NO: 16958 - DNA, 1640 bp, Homo sapiens
  source 1..1640: mol_type = unassigned DNA
acagatttttattctttctgccaggtacatcagatccatcaggtccgagctgtgttgactaccacttttcccttcgtctcaattatgtcttggaaaaaggctttgcggatccccggaggccttcgggcagcaactgtgaccttgatgctgtcgatgctgagcaccccagtggctgagggcagagactctcccgaggatttcgtgtaccagtttaagggcatgtgctacttcaccaacgggacagagcgcgtgcgtcttgtgagcagaagcatctataaccgagaagagatcgtgcgcttcgacagcgacgtgggggagttccgggcggtgacgctgctggggctgcctgccgccgagtactggaacagccagaaggacatcctggagaggaaacgggcggcggtggacagggtgtgcagacacaactaccagttggagctccgcacgaccttgcagcggcgagtggagcccacagtgaccatctccccatccaggacagaggccctcaaccaccacaacctgctggtctgctcggtgacagatttctatccagcccagatcaaagtccggtggtttcggaatggccaggaggagacagctggcgttgtgtccaccccccttattaggaatggtgactggaccttccagatcctggtgatgctggaaatgactccccagcgtggagacgtctacacctgccacgtggagcaccccagcctccagagccccatcaccgtggagtggcgggctcaatctgaatctgcccagagcaagatgctgagtggcattggaggcttcgtgctggggctgatcttcctcgggctgggccttatcatccatcacaggagtcagaaagggctcctgcactgactcctgagactattttaactgggattggttatcacttttctgtaacgcctgcttgtccctgcccagaattcccagctgtctgtgtcagcctgtccccctgagatcagagtcctacagtggctgtcacgcagccaccaggtcatctcctttcatccccaccttgaggcggatggctgtgaccctacttcctgcactgacccacagcccctgcctgtgcacagccagctgcatctactcaggccccaaggggtttctgtttctattctctcctcagactgctcaagagaagcacatgaaaactattacctgactttagagcttttttacataattaaacatgatcctgagttatctgtattctgaacttccttaattgagcagaggcaggaaatcactgcagaatgaaggaacataccttgaggtgacccagccaacctgtgcccagaaggagggttgtaccttgaaaagacactgaaagaatttggggtgcaaagtcagggtgggcagaggaggtagaaaatcaactcagttgtcgcatcattcatggttctttcatattgatgttcagtgcagtggcctgagaatatcccagcctctcttctggtttggtgagtgctatataagtaaacatggtggaattgtttgggggcagatatagtgacccttggtcactggtgtttcaaacattctggcaagtcacatcaatcaagaataatttttacttttaagaaagcataaccagcaataaaagtattatttttgattctaaa

SEQ ID NO: 16959 - DNA, 1787 bp, Homo sapiens
  source 1..1787: mol_type = unassigned DNA
gcactggattcagaaccttcacacaaaaaaaatctgcccagagacagatgaggtccttcagctccagtgctgattggttcctttccaagggaccatccaatcctaccacgcatggaaacatccacagatttttattctttctgccaggtacatcagatccatcaggtccgagctgtgttgactaccacttttcccttcgtctcaattatgtcttggaaaaaggctttgcggatccccggaggccttcgggcagcaactgtgaccttgatgctgtcgatgctgagcaccccagtggctgagggcagagactctcccgaggatttcgtgtaccagtttaagggcatgtgctacttcaccaacgggacagagcgcgtgcgtcttgtgagcagaagcatctataaccgagaagagatcgtgcgcttcgacagcgacgtgggggagttccgggcggtgacgctgctggggctgcctgccgccgagtactggaacagccagaaggacatcctggagaggaaacgggcggcggtggacagggtgtgcagacacaactaccagttggagctccgcacgaccttgcagcggcgagtggagcccacagtgaccatctccccatccaggacagaggccctcaaccaccacaacctgctggtctgctcggtgacagatttctatccagcccagatcaaagtccggtggtttcggaatggccaggaggagacagctggcgttgtgtccaccccccttattaggaatggtgactggaccttccagatcctggtgatgctggaaatgactccccagcgtggagacgtctacacctgccacgtggagcaccccagcctccagagccccatcaccgtggagtggcgggctcaatctgaatctgcccagagcaagatgctgagtggcattggaggcttcgtgctggggctgatcttcctcgggctgggccttatcatccatcacaggagtcagaaaggacctcaagggcctccaccagcagggctcctgcactgactcctgagactattttaactgggattggttatcacttttctgtaacgcctgcttgtccctgcccagaattcccagctgtctgtgtcagcctgtccccctgagatcagagtcctacagtggctgtcacgcagccaccaggtcatctcctttcatccccaccttgaggcggatggctgtgaccctacttcctgcactgacccacagcccctgcctgtgcacagccagctgcatctactcaggccccaaggggtttctgtttctattctctcctcagactgctcaagagaagcacatgaaaactattacctgactttagagcttttttacataattaaacatgatcctgagttatctgtattctgaacttccttaattgagcagaggcaggaaatcactgcagaatgaaggaacataccttgaggtgacccagccaacctgtgcccagaaggagggttgtaccttgaaaagacactgaaagaatttggggtgcaaagtcagggtgggcagaggaggtagaaaatcaactcagttgtcgcatcattcatggttctttcatattgatgttcagtgcagtggcctgagaatatcccagcctctcttctggtttggtgagtgctatataagtaaacatggtggaattgtttgggggcagatatagtgacccttggtcactggtgtttcaaacattctggcaagtcacatcaatcaagaataatttttacttttaagaaagcataaccagcaataaaagtattatttttgattctaaa

SEQ ID NO: 16960 - DNA, 1734 bp, Homo sapiens
  source 1..1734: mol_type = unassigned DNA
aggatgcattagaggcctctatcctgagggacactgatgtgggggctgaggaaggacattgagggcaccttcaggtctctctgcctattattccttgtgccaactccattccaggtgtacatcagatccatcaggtccaagctgtgttgactaccactacttttcccttcgtctcaattatgtcttggaagaaggctttgcggatccctggaggccttcgggtagcaactgtgaccttgatgctggcgatgctgagcaccccggtggctgagggcagagactctcccgaggatttcgtgtaccagtttaagggcatgtgctacttcaccaacgggacggagcgcgtgcgtcttgtgaccagatacatctataaccgagaggagtacgcacgcttcgacagcgacgtgggggtgtatcgggcggtgacgccgctggggccgcctgacgccgagtactggaacagccagaaggaagtcctggagaggacccgggcggagttggacacggtgtgcagacacaactaccagttggagctccgcacgaccttgcagcggcgagtggagcccacagtgaccatctccccatccaggacagaggccctcaaccaccacaacctgctggtctgctcagtgacagatttctatccagcccagatcaaagtccggtggtttcggaatgaccaggaggagacaactggcgttgtgtccaccccccttattaggaacggtgactggaccttccagatcctggtgatgctggaaatgactccccagcgtggagacgtctacacctgccacgtggagcaccccagcctccagaaccccatcatcgtggagtggcgggctcagtctgaatctgcccagagcaagatgctgagtggcattggaggcttcgtgctggggctgatcttcctcgggctgggccttattatccatcacaggagtcagaaagggctcctgcactgactcctgagactattttaactgggattggttatcacttttctgtaacgcctgcttgtccctgcccagaattcccagctgcctgtgtcagcctgtcccccgagatcagagtcctacagtggctgtcacgcagccaccaggtcatctcctttcatccccacctcaaggctgatggctgtgaccctgcttcctgcactgacccagagcctctgcctgtgcacggccagctgcgtctactgaggccccaaggggtttctgtttctattctctcctcagactgctcaagagaagcacatgaaaaccattacctgactttagagcttttttacataattaaacatgatcctgagttatctgtattctcaacttccttaattgagcagaggcaggaaatcactgcagaatgaaggaacataccttgaggtgacccagccaacctgtgcccagaaggagggttgtaccttgaaaagacactgaaagaattttgggtgcaaagtcagggtgggcagaggaggtagaagatcaactcagttgtcgcatcattcatggttctttcatattgatgttcaatgcagtggcctgagaatatcccagcctctcttctggtttggtgagtgctatataagtaagcatggtggaattgtttgggggcagatatagtgacccttggtcactggtgtttcaaacattctggcaagtcacatcaatcaagaataatttttacttttaagaaagcataaccagcaataaaagtattatttttgagtctaaa

SEQ ID NO: 16961 - DNA, 1485 bp, Homo sapiens
  source 1..1485: mol_type = unassigned DNA
gagctgtgttgactaccactacttttcccttcgtctcaattatgtcttggaaaaaggctttgcggatccccggaggccttcgggcagcaactgttaccttgatgctggcgatgctgagcaccccagtggctgagggcagagactctcccgaggatttcgtgtaccagtttaaggccatgtgctacttcaccaacgggacggagcgcgtgcgttatgtgaccagatacatctataaccgagaggagtacgcacgcttcgacagcgacgtggaggtgtaccgggcggtgacgccgctggggccgcctgacgccgagtactggaacagccagaaggaagtcctggagaggacccgggcggagttggacacggtgtgcagacacaactaccagttggagctccgcacgaccttgcagcggcgagtggagcccacagtgaccatctccccatccaggacagaggccctcaaccaccacaacctgctggtctgctcagtgacagatttctatccagcccagatcaaagtccggtggtttcggaatgaccaggaggagacaaccggcgttgtgtccaccccccttattaggaacggtgactggaccttccagatcctggtgatgctggaaatgactccccagcatggagacgtctacacctgccacgtggagcaccccagcctccagaaccccatcaccgtggagtggcggctcctgcactgactcctgagactattttaactgggattggttatcacttttctgtaacgcctgcttgtccctgcccagaattcccaactgcctgtgtcagcctgtccccctgagatcagagtcctacagtggctgtcacgcagccaccaggtcatctcctttcatccccaccccaaggcgctggctgtgactctgcttcctgcactgacccagagcctctgcctgtgcatggccagctgcgtctactcaggccccaaggggtttctgtttctattctctcctcagactgctcaagagaagcacatgaaaaccattacctgactttagagcttttttacataattaaacatgatcctgagttatctgtattctcaacttccttaattgagcagaggcaggaaatcactgcagaatgaaggaacataccttgaggtgacccagccaacctgtgcccagaaggagggttgtaccttgaaaagacactgaaagaatttggggtgcaaagtcatggtgggcagaggaggtagaaaatcaactcagttgtcgcatcattcatggttctttcatattgatgttcagtgcagtggcctgagaatatcccagcctctcttctggtttggtgagtgctatataagtaaacatggtggaattgtttgggggcagatatagtgacccttggtcactggtgtttcaaacattctggcaagtcacatcaatcaagaataatttttacttttaagaaagcataaccagcaataaaagtattatttttgattctaaa

SEQ ID NO: 16962 - DNA, 1732 bp, Homo sapiens
  source 1..1732: mol_type = unassigned DNA
aggatggattagaggcctctattctgagggacactgaggtgggggctgaggaaggacattgagggcagcttcaggtctctctgcctactcttccttgccccaactccattccaggtgtacatcagatccatcaggtccgagctgtgttgactaccacttttcccttcgtctcaattatgtcttggaaaaaggctttgcggatccccggaggccttcgggcagcaactgtgaccttgatgctgtcgatgctgagcaccccagtggctgagggcagagactctcccgaggatttcgtgtaccagtttaagggcatgtgctacttcaccaacgggacagagcgcgtgcgtcttgtgagcagaagcatctataaccgagaagagatcgtgcgcttcgacagcgacgtgggggagttccgggcggtgacgctgctggggctgcctgccgccgagtactggaacagccagaaggacatcctggagaggaaacgggcggcggtggacagggtgtgcagacacaactaccagttggagctccgcacgaccttgcagcggcgagtggagcccacagtgaccatctccccatccaggacagaggccctcaaccaccacaacctgctggtctgctcggtgacagatttctatccagcccagatcaaagtccggtggtttcggaatggccaggaggagacagctggcgttgtgtccaccccccttattaggaatggtgactggaccttccagatcctggtgatgctggaaatgactccccagcgtggagacgtctacacctgccacgtggagcaccccagcctccagagccccatcaccgtggagtggcgggctcaatctgaatctgcccagagcaagatgctgagtggcattggaggcttcgtgctggggctgatcttcctcgggctgggccttatcatccatcacaggagtcagaaagggctcctgcactgactcctgagactattttaactgggattggttatcacttttctgtaacgcctgcttgtccctgcccagaattcccagctgtctgtgtcagcctgtccccctgagatcagagtcctacagtggctgtcacgcagccaccaggtcatctcctttcatccccaccttgaggcggatggctgtgaccctacttcctgcactgacccacagcccctgcctgtgcacagccagctgcatctactcaggccccaaggggtttctgtttctattctctcctcagactgctcaagagaagcacatgaaaactattacctgactttagagcttttttacataattaaacatgatcctgagttatctgtattctgaacttccttaattgagcagaggcaggaaatcactgcagaatgaaggaacataccttgaggtgacccagccaacctgtgcccagaaggagggttgtaccttgaaaagacactgaaagaatttggggtgcaaagtcagggtgggcagaggaggtagaaaatcaactcagttgtcgcatcattcatggttctttcatattgatgttcagtgcagtggcctgagaatatcccagcctctcttctggtttggtgagtgctatataagtaaacatggtggaattgtttgggggcagatatagtgacccttggtcactggtgtttcaaacattctggcaagtcacatcaatcaagaataatttttacttttaagaaagcataaccagcaataaaagtattatttttgattctaaa

SEQ ID NO: 16963 - DNA, 1217 bp, Homo sapiens
  source 1..1217: mol_type = unassigned DNA
gtccgagctgtgttgactaccacttttcccttcgtctcaattatgtcttggaaaaaggctttgcggatccccggaggccttcgggcagcaactgtgaccttgatgctgtcgatgctgagcaccccagtggctgagggcagagactctcccgtggagcccacagtgaccatctccccatccaggacagaggccctcaaccaccacaacctgctggtctgctcggtgacagatttctatccagcccagatcaaagtccggtggtttcggaatggccaggaggagacagctggcgttgtgtccaccccccttattaggaatggtgactggaccttccagatcctggtgatgctggaaatgactccccagcgtggagacgtctacacctgccacgtggagcaccccagcctccagagccccatcaccgtggagtggcggctcctgcactgactcctgagactattttaactgggattggttatcacttttctgtaacgcctgcttgtccctgcccagaattcccagctgtctgtgtcagcctgtccccctgagatcagagtcctacagtggctgtcacgcagccaccaggtcatctcctttcatccccaccttgaggcggatggctgtgaccctacttcctgcactgacccacagcccctgcctgtgcacagccagctgcatctactcaggccccaaggggtttctgtttctattctctcctcagactgctcaagagaagcacatgaaaactattacctgactttagagcttttttacataattaaacatgatcctgagttatctgtattctgaacttccttaattgagcagaggcaggaaatcactgcagaatgaaggaacataccttgaggtgacccagccaacctgtgcccagaaggagggttgtaccttgaaaagacactgaaagaatttggggtgcaaagtcagggtgggcagaggaggtagaaaatcaactcagttgtcgcatcattcatggttctttcatattgatgttcagtgcagtggcctgagaatatcccagcctctcttctggtttggtgagtgctatataagtaaacatggtggaattgtttgggggcagatatagtgacccttggtcactggtgtttcaaacattctggcaagtcacatcaatcaagaataatttttacttttaagaaagcataaccagcaataaaagtattatttttgattctaaa

SEQ ID NO: 16964 - DNA, 1219 bp, Homo sapiens
  source 1..1219: mol_type = unassigned DNA
gtccaagctgtgttgactaccactacttttcccttcgtctcaattatgtcttggaagaaggctttgcggatccctggaggccttcgggtagcaactgtgaccttgatgctggcgatgctgagcaccccggtggctgagggcagagactctcccgtggagcccacagtgaccatctccccatccaggacagaggccctcaaccaccacaacctgctggtctgctcagtgacagatttctatccagcccagatcaaagtccggtggtttcggaatgaccaggaggagacaactggcgttgtgtccaccccccttattaggaacggtgactggaccttccagatcctggtgatgctggaaatgactccccagcgtggagacgtctacacctgccacgtggagcaccccagcctccagaaccccatcatcgtggagtggcggctcctgcactgactcctgagactattttaactgggattggttatcacttttctgtaacgcctgcttgtccctgcccagaattcccagctgcctgtgtcagcctgtcccccgagatcagagtcctacagtggctgtcacgcagccaccaggtcatctcctttcatccccacctcaaggctgatggctgtgaccctgcttcctgcactgacccagagcctctgcctgtgcacggccagctgcgtctactgaggccccaaggggtttctgtttctattctctcctcagactgctcaagagaagcacatgaaaaccattacctgactttagagcttttttacataattaaacatgatcctgagttatctgtattctcaacttccttaattgagcagaggcaggaaatcactgcagaatgaaggaacataccttgaggtgacccagccaacctgtgcccagaaggagggttgtaccttgaaaagacactgaaagaattttgggtgcaaagtcagggtgggcagaggaggtagaagatcaactcagttgtcgcatcattcatggttctttcatattgatgttcaatgcagtggcctgagaatatcccagcctctcttctggtttggtgagtgctatataagtaagcatggtggaattgtttgggggcagatatagtgacccttggtcactggtgtttcaaacattctggcaagtcacatcaatcaagaataatttttacttttaagaaagcataaccagcaataaaagtattatttttgagtctaaa

SEQ ID NO: 16965 - DNA, 484 bp, Homo sapiens
  source 1..484: mol_type = unassigned DNA
atcaggtccaagctgtgttgactaccactacttttcccttcgtctcaattatgtcttggaagaaggctttgcggatccctggaggccttcgggtagcaactgtgacgccgctggggccgcctgacgccgagtactggaacagccagaaggaagtcctggagaggacccgggcggagttggacacggtgtgcagacacaactaccagttggagctccgcacgaccttgcagcggcgagtggagcccacagtgaccatctccccatccaggacagaggccctcaaccaccacaacctgctggtctgctcagtgacagatttctatccagcccagatcaaagtccggtggtttcggaatgaccaggaggagacaactggcgttgtgtccaccccccttattaggaacggtgactggaccttccagatcctggtgatgctggaaatgactccccagcgtggagacgtctacacctgccacgtggagca

SEQ ID NO: 16966 - DNA, 1219 bp, Homo sapiens
  source 1..1219: mol_type = unassigned DNA
gtccgagctgtgttgactaccactacttttcccttcgtctcaattatgtcttggaaaaaggctttgcggatccccggaggccttcgggcagcaactgttaccttgatgctggcgatgctgagcaccccagtggctgagggcagagactctcccgtggagcccacagtgaccatctccccatccaggacagaggccctcaaccaccacaacctgctggtctgctcagtgacagatttctatccagcccagatcaaagtccggtggtttcggaatgaccaggaggagacaaccggcgttgtgtccaccccccttattaggaacggtgactggaccttccagatcctggtgatgctggaaatgactccccagcatggagacgtctacacctgccacgtggagcaccccagcctccagaaccccatcaccgtggagtggcggctcctgcactgactcctgagactattttaactgggattggttatcacttttctgtaacgcctgcttgtccctgcccagaattcccaactgcctgtgtcagcctgtccccctgagatcagagtcctacagtggctgtcacgcagccaccaggtcatctcctttcatccccaccccaaggcgctggctgtgactctgcttcctgcactgacccagagcctctgcctgtgcatggccagctgcgtctactcaggccccaaggggtttctgtttctattctctcctcagactgctcaagagaagcacatgaaaaccattacctgactttagagcttttttacataattaaacatgatcctgagttatctgtattctcaacttccttaattgagcagaggcaggaaatcactgcagaatgaaggaacataccttgaggtgacccagccaacctgtgcccagaaggagggttgtaccttgaaaagacactgaaagaatttggggtgcaaagtcatggtgggcagaggaggtagaaaatcaactcagttgtcgcatcattcatggttctttcatattgatgttcagtgcagtggcctgagaatatcccagcctctcttctggtttggtgagtgctatataagtaaacatggtggaattgtttgggggcagatatagtgacccttggtcactggtgtttcaaacattctggcaagtcacatcaatcaagaataatttttacttttaagaaagcataaccagcaataaaagtattatttttgattctaaa

SEQ ID NO: 16967 - DNA, 1642 bp, Homo sapiens
  source 1..1642: mol_type = unassigned DNA
acaggtttttattctttctgccaggtacatcagatccatcaggtccgagctgtgttgactaccactgcttttcccttcgtctcagttatgtcttggaagaaggctttgcggatccccggagaccttcgggtagcaactgtcaccttgatgctggcgatgctgagctccctactggctgagggcagagactctcccgaggatttcgtgttccagtttaagggcatgtgctacttcaccaacgggacggagcgcgtgcgtcttgtgaccagatacatctataaccgagaggagtacgcgcgcttcgacagcgacgtgggggtgtaccgcgcggtgacgccgcaggggcggcctgatgccgagtactggaacagccagaaggaagtcctggaggggacccgggcggagttggacacggtgtgcagacacaactacgaggtggcgttccgcgggatcttgcagaggagagtggagcccacagtgaccatctccccatccaggacagaggccctcaaccaccacaacctgctggtctgctcggtgacagatttctatccaggccagatcaaagtccggtggtttcggaatgatcaggaggagacagccggcgttgtgtccaccccccttattaggaatggtgactggactttccagatcctggtgatgctggaaatgactccccagcgtggagatgtctacacctgccacgtggagcaccccagcctccagagccccatcaccgtggagtggcgggctcagtctgaatctgcccagagcaagatgctgagtggcgttggaggcttcgtgctggggctgatcttccttgggctgggccttatcatccgtcaaaggagtcagaaagggcttctgcactgactcctgagactattttaactaggattggttatcactcttctgtgatgcctgcttatgcctgcccagaattcccagctgcctgtgtcagcttgtccccctgagatcaaagtcctacagtggctgtcacgcagccaccaggtcatctcctttcatccccaccccaaggcgctggctgtgactctgcttcctgcactgacccagagcctctgcctgtgcatggccagctgcgtctactcaggtcccaaggggtttctgtttctattctttcctcagactgctcaagagaagcacatgaaaaacattacctgactttagagcttttttacataattaaacatgatcctgagttatctgtattctgaactttcttaattgagaagaggcaggaaatcactgcagaatgaaggaacatcccttgaggtgacccagcaaacctgtggccagaaggaggattgtaccttgaaaagacactgaaagcattttggggtgtgaagtaagggtgggcagaggaggtagaaaataattcaattgtcgcatcattcatggttctttaatactgatgctcagtgcattggccttagaatatcccagcctctcttctggtttggtgagtgctgtgtaaataagcatggtagaattgtttggagacatatatagtgatccttggtcactggtgtttcaaacattctggaaagtcacatcgatcaagaatattttttatttttaagaaagcataaccagcaataaaaatactatttttgagtctaaa

SEQ ID NO: 16968 - DNA, 1484 bp, Homo sapiens
  source 1..1484: mol_type = unassigned DNA
agctgtgttgactaccactacttttcccttcgtctcaattatgtcttggaagaaggctttgcggatccctggaggccttcgggtagcaactgtgaccttgatgctggcgatgctgagcaccccggtggctgagggcagagactctcccgaggatttcgtgtaccagtttaagggcatgtgctacttcaccaacgggacggagcgcgtgcgtcttgtgaccagatacatctataaccgagaggagtacgcacgcttcgacagcgacgtgggggtgtatcgggcggtgacgccgctggggccgcctgacgccgagtactggaacagccagaaggaagtcctggagaggacccgggcggagttggacacggtgtgcagacacaactaccagttggagctccgcacgaccttgcagcggcgagtggagcccacagtgaccatctccccatccaggacagaggccctcaaccaccacaacctgctggtctgctcagtgacagatttctatccagcccagatcaaagtccggtggtttcggaatgaccaggaggagacaactggcgttgtgtccaccccccttattaggaacggtgactggaccttccagatcctggtgatgctggaaatgactccccagcgtggagacgtctacacctgccacgtggagcaccccagcctccagaaccccatcatcgtggagtggcggctcctgcactgactcctgagactattttaactgggattggttatcacttttctgtaacgcctgcttgtccctgcccagaattcccagctgcctgtgtcagcctgtcccccgagatcagagtcctacagtggctgtcacgcagccaccaggtcatctcctttcatccccacctcaaggctgatggctgtgaccctgcttcctgcactgacccagagcctctgcctgtgcacggccagctgcgtctactgaggccccaaggggtttctgtttctattctctcctcagactgctcaagagaagcacatgaaaaccattacctgactttagagcttttttacataattaaacatgatcctgagttatctgtattctcaacttccttaattgagcagaggcaggaaatcactgcagaatgaaggaacataccttgaggtgacccagccaacctgtgcccagaaggagggttgtaccttgaaaagacactgaaagaattttgggtgcaaagtcagggtgggcagaggaggtagaagatcaactcagttgtcgcatcattcatggttctttcatattgatgttcaatgcagtggcctgagaatatcccagcctctcttctggtttggtgagtgctatataagtaagcatggtggaattgtttgggggcagatatagtgacccttggtcactggtgtttcaaacattctggcaagtcacatcaatcaagaataatttttacttttaagaaagcataaccagcaataaaagtattatttttgagtctaaa

SEQ ID NO: 16969 - DNA, 484 bp, Homo sapiens
  source 1..484: mol_type = unassigned DNA
atcaggtccgagctgtgttgactaccactgcttttcccttcgtctcagttatgtcttggaagaaggctttgcggatccccggagaccttcgggtagcaactgtgacgccgcaggggcggcctgatgccgagtactggaacagccagaaggaagtcctggaggggacccgggcggagttggacacggtgtgcagacacaactacgaggtggcgttccgcgggatcttgcagaggagagtggagcccacagtgaccatctccccatccaggacagaggccctcaaccaccacaacctgctggtctgctcggtgacagatttctatccaggccagatcaaagtccggtggtttcggaatgatcaggaggagacagccggcgttgtgtccaccccccttattaggaatggtgactggactttccagatcctggtgatgctggaaatgactccccagcgtggagatgtctacacctgccacgtggagca

SEQ ID NO: 16970 - DNA, 481 bp, Homo sapiens
  source 1..481: mol_type = unassigned DNA
atcaggtccgagctgtgttgactaccacttttcccttcgtctcaattatgtcttggaaaaaggctttgcggatccccggaggccttcgggcagcaactgtgacgctgctggggctgcctgccgccgagtactggaacagccagaaggacatcctggagaggaaacgggcggcggtggacagggtgtgcagacacaactaccagttggagctccgcacgaccttgcagcggcgagtggagcccacagtgaccatctccccatccaggacagaggccctcaaccaccacaacctgctggtctgctcggtgacagatttctatccagcccagatcaaagtccggtggtttcggaatggccaggaggagacagctggcgttgtgtccaccccccttattaggaatggtgactggaccttccagatcctggtgatgctggaaatgactccccagcgtggagacgtctacacctgccacgtggagca

SEQ ID NO: 16971 - DNA, 484 bp, Homo sapiens
  source 1..484: mol_type = unassigned DNA
atcaggtccgagctgtgttgactaccactacttttcccttcgtctcaattatgtcttggaaaaaggctttgcggatccccggaggccttcgggcagcaactgtgacgccgctggggccgcctgacgccgagtactggaacagccagaaggaagtcctggagaggacccgggcggagttggacacggtgtgcagacacaactaccagttggagctccgcacgaccttgcagcggcgagtggagcccacagtgaccatctccccatccaggacagaggccctcaaccaccacaacctgctggtctgctcagtgacagatttctatccagcccagatcaaagtccggtggtttcggaatgaccaggaggagacaaccggcgttgtgtccaccccccttattaggaacggtgactggaccttccagatcctggtgatgctggaaatgactccccagcatggagacgtctacacctgccacgtggagca

SEQ ID NO: 16972 - DNA, 1421 bp, Homo sapiens
  source 1..1421: mol_type = unassigned DNA
gactaccacttttcccttcgtctcaattatgtcttggaaaaaggctttgcggatccccggaggccttcgggcagcaactgtgaccttgatgctgtcgatgctgagcaccccagtggctgagggcagagactctcccgaggatttcgtgtaccagtttaagggcatgtgctacttcaccaacgggacagagcgcgtgcgtcttgtgagcagaagcatctataaccgagaagagatcgtgcgcttcgacagcgacgtgggggagttccgggcggtgacgctgctggggctgcctgccgccgagtactggaacagccagaaggacatcctggagaggaaacgggcggcggtggacagggtgtgcagacacaactaccagttggagctccgcacgaccttgcagcggcgaggaatggtgactggaccttccagatcctggtgatgctggaaatgactccccagcgtggagacgtctacacctgccacgtggagcaccccagcctccagagccccatcaccgtggagtggcgggctcaatctgaatctgcccagagcaagatgctgagtggcattggaggcttcgtgctggggctgatcttcctcgggctgggccttatcatccatcacaggagtcagaaagggctcctgcactgactcctgagactattttaactgggattggttatcacttttctgtaacgcctgcttgtccctgcccagaattcccagctgtctgtgtcagcctgtccccctgagatcagagtcctacagtggctgtcacgcagccaccaggtcatctcctttcatccccaccttgaggcggatggctgtgaccctacttcctgcactgacccacagcccctgcctgtgcacagccagctgcatctactcaggccccaaggggtttctgtttctattctctcctcagactgctcaagagaagcacatgaaaactattacctgactttagagcttttttacataattaaacatgatcctgagttatctgtattctgaacttccttaattgagcagaggcaggaaatcactgcagaatgaaggaacataccttgaggtgacccagccaacctgtgcccagaaggagggttgtaccttgaaaagacactgaaagaatttggggtgcaaagtcagggtgggcagaggaggtagaaaatcaactcagttgtcgcatcattcatggttctttcatattgatgttcagtgcagtggcctgagaatatcccagcctctcttctggtttggtgagtgctatataagtaaacatggtggaattgtttgggggcagatatagtgacccttggtcactggtgtttcaaacattctggcaagtcacatcaatcaagaataatttttacttttaagaaagcataaccagcaataaaagtattatttttgattctaaa

SEQ ID NO: 16973 - DNA, 1423 bp, Homo sapiens
  source 1..1423: mol_type = unassigned DNA
gactaccactacttttcccttcgtctcaattatgtcttggaaaaaggctttgcggatccccggaggccttcgggcagcaactgttaccttgatgctggcgatgctgagcaccccagtggctgagggcagagactctcccgaggatttcgtgtaccagtttaaggccatgtgctacttcaccaacgggacggagcgcgtgcgttatgtgaccagatacatctataaccgagaggagtacgcacgcttcgacagcgacgtggaggtgtaccgggcggtgacgccgctggggccgcctgacgccgagtactggaacagccagaaggaagtcctggagaggacccgggcggagttggacacggtgtgcagacacaactaccagttggagctccgcacgaccttgcagcggcgaggaacggtgactggaccttccagatcctggtgatgctggaaatgactccccagcatggagacgtctacacctgccacgtggagcaccccagcctccagaaccccatcaccgtggagtggcgggctcagtctgaatctgcccagagcaagatgctgagtggcattggaggcttcgtgctggggctcatcttcctcgggctgggccttattatccatcacaggagtcagaaagggctcctgcactgactcctgagactattttaactgggattggttatcacttttctgtaacgcctgcttgtccctgcccagaattcccaactgcctgtgtcagcctgtccccctgagatcagagtcctacagtggctgtcacgcagccaccaggtcatctcctttcatccccaccccaaggcgctggctgtgactctgcttcctgcactgacccagagcctctgcctgtgcatggccagctgcgtctactcaggccccaaggggtttctgtttctattctctcctcagactgctcaagagaagcacatgaaaaccattacctgactttagagcttttttacataattaaacatgatcctgagttatctgtattctcaacttccttaattgagcagaggcaggaaatcactgcagaatgaaggaacataccttgaggtgacccagccaacctgtgcccagaaggagggttgtaccttgaaaagacactgaaagaatttggggtgcaaagtcatggtgggcagaggaggtagaaaatcaactcagttgtcgcatcattcatggttctttcatattgatgttcagtgcagtggcctgagaatatcccagcctctcttctggtttggtgagtgctatataagtaaacatggtggaattgtttgggggcagatatagtgacccttggtcactggtgtttcaaacattctggcaagtcacatcaatcaagaataatttttacttttaagaaagcataaccagcaataaaagtattatttttgattctaaa

SEQ ID NO: 16974 - DNA, 783 bp, Homo sapiens
  source 1..783: mol_type = unassigned DNA
gactaccactgcttttcccttcgtctcagttatgtcttggaagaaggctttgcggatccccggagaccttcgggtagcaactgtcaccttgatgctggcgatgctgagctccctactggctgagggcagagactctcccgaggatttcgtgttccagtttaagggcatgtgctacttcaccaacgggacggagcgcgtgcgtcttgtgaccagatacatctataaccgagaggagtacgcgcgcttcgacagcgacgtgggggtgtaccgcgcggtgacgccgcaggggcggcctgatgccgagtactggaacagccagaaggaagtcctggaggggacccgggcggagttggacacggtgtgcagacacaactacgaggtggcgttccgcgggatcttgcagaggagaggaatggtgactggactttccagatcctggtgatgctggaaatgactccccagcgtggagatgtctacacctgccacgtggagcaccccagcctccagagccccatcaccgtggagtggcgggctcagtctgaatctgcccagagcaagatgctgagtggcgttggaggcttcgtgctggggctgatcttccttgggctgggccttatcatccgtcaaaggagtcagaaagggcttctgcactgactcctgagactattttaactaggattggttatcactcttctgtgatgcctgcttatgcctgcccagaattcccagctgcctgtgtcagcttgtccccctgagatcaaagtcctacagtggctgtcacgc

SEQ ID NO: 16975 - DNA, 1455 bp, Homo sapiens
  source 1..1455: mol_type = unassigned DNA
tgttgactaccacttttcccttcgtctcaattatgtcttggaaaaaggctttgcggatccccggaggccttcgggcagcaactgtgaccttgatgctgtcgatgctgagcaccccagtggctgagggcagagactctcccgaggatttcgtgtaccagtttaagggcatgtgctacttcaccaacgggacagagcgcgtgcgtcttgtgagcagaagcatctataaccgagaagagatcgtgcgcttcgacagcgacgtgggggagttccgggcggtgacgctgctggggctgcctgccgccgagtactggaacagccagaaggacatcctggagaggaaacgggcggcggtggacagggtgtgcagacacaactaccagttggagctccgcacgaccttgcagcggcgagtggagcccacagtgaccatctccccatccaggacagaggccctcaaccaccacaacctgctggtctgctcggtgacagatttctatccagcccagatcaaagtccggtggtttcggaatggccaggaggagacagctggcgttgtgtccaccccccttattaggaatggtgactggaccttccagatcctggtgatgctggaaatgactccccagcgtggagacgtctacacctgccacgtggagcaccccagcctccagagccccatcaccgtggagtggcgggctcaatctgaatctgcccagagcaagatgctgagtggcattggaggcttcgtgctggggctgatcttcctcgggctgggccttatcatccatcacaggagtcagaaagggctcctgcactgactcctgagactattttaactgggattggttatcacttttctgtaacgcctgcttgtccctgcccagaattcccagctgtctgtgtcagcctgtccccctgagatcagagtcctacagtggctgtcacgcagccaccaggtcatctcctttcatccccaccttgaggcggatggctgtgaccctacttcctgcactgacccacagcccctgcctgtgcacagccagctgcatctactcaggccccaaggggtttctgtttctattctctcctcagactgctcaagagaagcacatgaaaactattacctgactttagagcttttttacataattaaacatgatcctgagttatctgtattctgaacttccttaattgagcagaggcaggaaatcactgcagaatgaaggaacataccttgaggtgacccagccaacctgtgcccagaaggagggttgtaccttgaaaagacactgaaagaatttggggtgcaaagtcagggtgggcagaggaggtagaaaatcaactcagttgtcgcatcattcatggttctttcatattgatgttcagtgcagtggcctgagaatatcccagcctctcttctggtttggtgagtgctatataagtaaacatggtgga

SEQ ID NO: 16976 - DNA, 729 bp, Homo sapiens
  source 1..729: mol_type = unassigned DNA
atccatcaggtccaagctgtgttgactaccactacttttcccttcgtctcaattatgtcttggaagaaggctttgcggatccctggaggccttcgggtagcaactgtgaccttgatgctggcgatgctgagcaccccggtggctgagggcagagactctcccgaggatttcgtgtaccagtttaagggcatgtgctacttcaccaacgggaccgagcgcgtgcggggtgtgaccagatacatctataaccgagaggagtacgcgcgcttcgacagcgacgtgggggtgtatcgggcggtgacgccgctggggccgcctgccgccgagtactggaacagccagaaggaagtcctggagaggacccgggcggagttggacacggtgtgcagacacaactaccagttggagctccgcacgaccttgcagcggcgagtggagcccacagtgaccatctccccatccaggacagaggccctcaaccaccacaacctgctggtctgctcagtgacagatttctatccagcccagatcaaagtccggtggtttcggaatgaccaggaggagacaactggcgttgtgtccaccccccttattaggaacggtgactggaccttccagatcctggtgatgctggaaatgactccccagcgtggagacgtctacacctgccacgtggagcaccccagcctccagaaccccatcatcgtggagtggcgtatggatgagttc

SEQ ID NO: 16977 - DNA, 1455 bp, Homo sapiens
  source 1..1455: mol_type = unassigned DNA
tgttgactaccacttttcccttcgtctcaattatgtcttggaaaaaggctttgcggatccccggaggccttcgggcagcaactgtgaccttgatgctgtcgatgctgagcaccccagtggctgagggcagagactctcccgaggatttcgtgtaccagtttaagggcatgtgctacttcaccaacgggacagagcgcgtgcgtcttgtgagcagaagcatctataaccgagaagagatcgtgcgcttcgacagcgacgtgggggagttccgggcggtgacgctgctggggctgcctgccgccgagtactggaacagccagaaggacatcctggagaggaaacgggcggcggtggacagggtgtgcagacacaactaccagttggagctccgcacgaccttgcagcggcgagtggagcccacagtgaccatctccccatccaggacagaggccctcaaccaccacaacctgctggtctgctcggtgacagatttctatccagcccagatcaaagtccggtggtttcggaatgaccaggaggagacagctggcgttgtgtccaccccccttattaggaatggtgactggaccttccagatcctggtgatgctggaaatgactccccagcgtggagacgtctacacctgccacgtggagcaccccagcctccagagccccatcaccgtggagtggcgggctcaatctgaatctgcccagagcaagatgctgagtggcattggaggcttcgtgctggggctgatcttcctcgggctgggccttatcatccatcacaggagtcagaaagggctcctgcactgactcctgagactattttaactgggattggttatcacttttctgtaacgcctgcttgtccctgcccagaattcccagctgtctgtgtcagcctgtccccctgagatcagagtcctacagtggctgtcacgcagccaccaggtcatctcctttcatccccaccttgaggcggatggctgtgaccctacttcctgcactgacccacagcctctgcctgtgcacggccagctgcatctactcaggccccaaggggtttctgtttctattctctcctcagactgctcaagagaagcacatgaaaaccattacctgactttagagcttttttacataattaaacatgatcctgagttatctgtattctgaacttccttaattgagcagaggcaggaaatcactgcagaatgaaggaacataccttgaggtgacccagccaacctgtgcccagaaggagggttgtaccttgaaaagacactgaaagaatttggggtgcaaagtcatggtgggcagaggaggtagaaaatcaactcagttgttgcatcattcatggttctttcatattgatgttcagtgcagtggcctgagaatatcccagcctctcttctggtttggtgagtgctatataagtaaacatggtgga

SEQ ID NO: 16978 - DNA, 864 bp, Homo sapiens
  source 1..864: mol_type = unassigned DNA
atccatcaggtccaagctgtgttgactaccactacttttcccttcgtctcaattatgtcttggaagaaggctttgcggatccctggaggccttcgggtagcaactgtgaccttgatgctggcgatgctgagcaccccggtggctgagggcagagactctcccgaggatttcgtgtaccagtttaagggcatgtgctacttcaccaacgggaccgagcgcgtgcggggtgtgaccagatacatctataaccgagaggagtacgcgcgcttcgacagcgacgtgggggtgtatcgggcggtgacgccgctggggccgcctgccgccgagtactggaacagccagaaggaagtcctggagaggacccgggcggagttggacacggtgtgcagacacaactaccagttggagctccgcacgaccttgcagcggcgagtggagcccacagtgaccatctccccatccaggacagaggccctcaaccaccacaacctgctggtctgctcagtgacagatttctatccagcccagatcaaagtccggtggtttcggaatgaccaggaggagacaactggcgttgtgtccaccccccttattaggaacggtgactggaccttccagatcctggtgatgctggaaatgactccccagcgtggagacgtctacacctgccacgtggagcaccccagcctccagaaccccatcatcgtggagtggcgggctcagtctgaatctgcccagagcaagatgctgagtggcattggaggcttcgtgctggggctgatcttcctcgggctgggccttattatccatcacaggagtcagaaagccctacctcaagggcctccaccagcaggtgatatttca

SEQ ID NO: 16979 - DNA, 1455 bp, Homo sapiens; identical to SEQ ID NO: 16977
  source 1..1455: mol_type = unassigned DNA

SEQ ID NO: 16980 - DNA, 1230 bp, Homo sapiens
  source 1..1230: mol_type = unassigned DNA
agtaacttactccctataacttggaatgtgggtggaggggttcatagttctccctgagtgagacttgcctgctgctctggcccctggtcctgtcctgttctccagcatggtgtgtctgaggctccctggaggctcctgcatggcagttctgacagtgacactgatggtgctgagctccccactggctttggctggggacaccagaccacgtttcttggagtactctacgtctgagtgtcatttcttcaatgggacggagcgggtgcggtacctggacagatacttccataaccaggaggagaacgtgcgcttcgacagcgacgtgggggagttccgggcggtgacggagctggggcggcctgatgccgagtactggaacagccagaaggacctcctggagcagaagcggggccgggtggacaactactgcagacacaactacggggttgtggagagcttcacagtgcagcggcgagtccatcctaaggtgactgtgtatccttcaaagacccagcccctgcagcaccataacctcctggtctgttctgtgagtggtttctatccaggcagcattgaagtcaggtggttccggaatggccaggaagagaagactggggtggtgtccacaggcctgatccacaatggagactggaccttccagaccctggtgatgctggaaacagttcctcggagtggagaggtttacacctgccaagtggagcacccaagcgtgacaagccctctcacagtggaatggagagcacggtctgaatctgcacagagcaagatgctgagtggagtcgggggctttgtgctgggcctgctcttccttggggccgggctgttcatctacttcaggaatcagaaaggacactctggacttcagccaagaggattcctgagctgaagtgcagatgacacattcaaagaagaactttctgccccagctttgcaggatgaaaagctttccctcctggctgttattcttccacaagagagggctttctcaggacctggttgctactggttcagcaactgcagaaaatgtcctcccttgtggcttcctcagctcctgttcttggcctgaagccccacagctttgatggcagtgcctcatcttcaacttttgtgctcccctttgcctaaaccctatggcctcctgtgcatctgtactcaccctgtaccacaaacacattacattattaaatgtttctcaaagatggagttaaa

SEQ ID NO: 16981 - DNA, 1229 bp, Homo sapiens
  source 1..1229: mol_type = unassigned DNA
agtaacttcctccctataacttggaatgtgggtggaggggttcatagttctccctgagtgagacttgcctgcttctctggcccctggtcctgtcctgttctccagcatggtgtgtctgaagctccctggaggctcctgcatgacagcgctgacagtgacactgatggtgctgagctccccactggctttgtctggggacacccgaccacgtttcctgtggcagcctaagagggagtgtcatttcttcaatgggacggagcgggtgcggttcctggacagatacttctataaccaggaggagtccgtgcgcttcgacagcgacgtgggggagttccgggcggtgacggagctggggcggcctgacgctgagtactggaacagccagaaggacatcctggagcaggcgcgggccgcggtggacacctactgcagacacaactacggggttgtggagagcttcacagtgcagcggcgagtccaacctaaggtgactgtatatccttcaaagacccagcccctgcagcaccacaacctcctggtctgctctgtgagtggtttctatccaggcagcattgaagtcaggtggttcctgaacggccaggaagagaaggctgggatggtgtccacaggcctgatccagaatggagactggaccttccagaccctggtgatgctggaaacagttcctcgaagtggagaggtttacacctgccaagtggagcacccaagcgtgacaagccctctcacagtggaatggagagcacggtctgaatctgcacagagcaagatgctgagtggagtcgggggctttgtgctgggcctgctcttccttggggccgggctgttcatctacttcaggaatcagaaaggacactctggacttcagccaacaggattcctgagctgaaatgcagatgaccacattcaaggaagaactttctgccccggctttgcaggatgaaaagctttcctgcttggcagttattcttccacaagagagggctttctcaggacctggttgctactggttcggcaactgcagaaaatgtcctcccttgtggcttcctcagctcctgcccttggcctgaagtcccagcattgatggcagcgcctcatcttcaacttttgtgctcccctttgcctaaaccgtatggcctcccgtgcatctgtattcaccctgtatgacaaacacattacattattaaatgtttctcaaagatggagttaaa

SEQ ID NO: 16982 - DNA, 1230 bp, Homo sapiens; identical to SEQ ID NO: 16980
  source 1..1230: mol_type = unassigned DNA

SEQ ID NO: 16983 - DNA, 751 bp, Homo sapiens
  source 1..751: mol_type = unassigned DNA
cttttaaaactcaccagggacttcccacagaggcatgaaaaatatcagtcctgggcagggactttccacctatgtctgaaaaagaacaagtatcctgattcacgctctacattcattaagcatgctggatcttacttgaaaaggggagagttcttgtcaatccacacagctatcacctgtttctttctacaaatttcagcacgtttcttggagcaggttaaacatgagtgtcatttcttcaacgggacggagcgggtgcggttcctggacagatacttctatcaccaagaggagtacgtgcgcttcgacagcgacgtgggggagtaccgggcggtgacggagctggggcggcctgatgccgagtactggaacagccagaaggacctcctggagcagaggcgggccgaggtggacacctactgcagacacaactacggggttgtggagagcttcacagtgcagcggcgagtctatcctgaggtgactgtgtatcctgcaaagacccagcccctgcagcaccacaacctcctggtctgctctgtgaatggtttctatccaggcagcattgaagtcaggtggttccggaacggccaggaagagaagactggggtggtgtccacaggcctgatccagaatggagactggaccttccagaccctggtgatgctggaaacagttcctcggagtggagaggtttacacctgccaagtggagcacccaagcctgacgagccctctcacagtggaatgga

SEQ ID NO: 16984 - DNA, 753 bp, Homo sapiens
  source 1..753: mol_type = unassigned DNA
cccttttaaaactcaccagggacttcccacagaggcatgaaaaatatcagtcctgggcagggactttccacctatgtctgaaaaagaacaagtatcctgattcacgctctacattcattaagcatgctggatcttacttgaaaaggggagagttcttggcaatccacacagctatcacctgtttctttcgacaaatttcagcacgtttcttggagtactctacgtctgagtgtcatttcttcaatgggacggagcgggtgcggtacctggacagatacttccataaccaggaggagaacgtgcgcttcgacagcgacgtgggggagttccgggcggtgacggagctggggcggcctgatgccgagtactggaacagccagaaggacctcctggagcagaagcggggccgggtggacaactactgcagacacaactacggggttgtggagagcttcacagtgcagcggcgagtccatcctaaggtgactgtgtatccttcaaagacccagcccctgcagcaccataacctcctggtctgttctgtgagtggtttctatccaggcagcattgaagtcaggtggttccggaatggccaggaagagaagactggggtggtgtccacaggcctgatccacaatggagactggaccttccagaccctggtgatgctggaaacagttcctcggagtggagaggtttacacctgccaagtggagcacccaagcgtgacaagccctctcacagtggaatgga

SEQ ID NO: 16985 - DNA, 1191 bp, Homo sapiens
  source 1..1191: mol_type = unassigned DNA
atagttctccctgagtgagactcacctgctcctctggcccctggtcctgtcctgttctccagcatggtgtgtctgaagttccctggaggctcctgcatggcagctctgacagtgacactgatggtgctgagctccccactggctttggctggggacacccgaccacgtttcttggagcaggttaaacatgagtgtcatttcttcaacgggacggagcgggtgcggttcctggacagatacttctatcaccaagaggagtacgtgcgcttcgacagcgacgtgggggagtaccgggcggtgacggagctggggcggcctgatgccgagtactggaacagccagaaggacctcctggagcagaggcgggccgaggtggacacctactgcagacacaactacggggttgtggagagcttcacagtgcagcggcgagtctatcctgaggtgactgtgtatcctgcaaagacccagcccctgcagcaccacaacctcctggtctgctctgtgaatggtttctatccaggcagcattgaagtcaggtggttccggaacggccaggaagagaagactggggtggtgtccacaggcctgatccagaatggagactggaccttccagaccctggtgatgctggaaacagttcctcggagtggagaggtttacacctgccaagtggagcacccaagcctgacgagccctctcacagtggaatggagagcacggtctgaatctgcacagagcaagatgctgagtggagtcgggggcttcgtgctgggcctgctcttccttggggccgggctgttcatctacttcaggaatcagaaaggacactctggacttcagccaacaggattcctgagctgaagtgaagatgaccacattcaaggaagaaccttctgccccagctttgcaggatgaaacacttccccgcttggctctcattcttccacaagagagacctttctccggacctggttgctactggttcagcagctctgcagaaaatgtcctcccttgtggctgcctcagctcgtacctttggcctgaagtcccagcattaatggcagcccctcatcttccaagttttgtgctcccctttacctaatgcttcctgcctcccatgcatctgtactcctgctgtgccacaaacacattacattattaaatgtttctcaaacatggagttaaaaa

SEQ ID NO: 16986 - DNA, 753 bp, Homo sapiens; identical to SEQ ID NO: 16984
  source 1..753: mol_type = unassigned DNA

SEQ ID NO: 16987 - DNA, 749 bp, Homo sapiens
  source 1..749: mol_type = unassigned DNA
ctcttttaaaactcaccagggacttcccacagaggcatgaaaaatatcagtcctgggcagggactttccacctatgtctgaaaaagaacaagtatcctgattcacgctctacattcattaagcatgctggatcttacttgaaaaggggagagttcttgtcaatccacacagctatcacctgtttctttctacaaatttcagcacgtttcctgtggcagggtaagtataagtgtcatttcttcaacgggacggagcgggtgcagttcctggaaagactcttctataaccaggaggagttcgtgcgcttcgacagcgacgtgggggagtaccgggcggtgacggagctagggcggcctgtcgccgagtcctggaacagccagaaggacatcctggaggacaggcggggccaggtggacaccgtgtgcagacacaactacggggttggtgagagcttcacagtgcagcggcgagtccatcctgaggtgactgtgtatcctgccaagactcagcccctgcagcaccacaacctcctggtctgctctgtgagtggtttctatccaggcagcattgaagtcaggtggttccggaacggccaggaagagaaggctggggtggtgtccacaggcctgatccagaatggagactggaccttccagaccctggtgatgctggaaacagttcctcggagtggagaagtttacacctgccaagtggagcacccaagtgtgatgagccctctcacagtggaa

SEQ ID NO: 16988 - DNA, 1235 bp, Homo sapiens
  source 1..1235: mol_type = unassigned DNA
agtaacttcttccctataatttggaatgtgggtggagaggggtcatagttctccctgagtgagactcacctgctcctctggcccctggtcctgtcctgttctccagcatggtgtgtctgaagctccctggaggctcctgcatggcagctctgacagtgacactgatggtgctgagctccccactggctttggctggggacacccaaccacgtttcctgtggcagggtaagtataagtgtcatttcttcaacgggacggagcgggtgcagttcctggaaagactcttctataaccaggaggagttcgtgcgcttcgacagcgacgtgggggagtaccgggcggtgacggagctagggcggcctgtcgccgagtcctggaacagccagaaggacatcctggaggacaggcggggccaggtggacaccgtgtgcagacacaactacggggttggtgagagcttcacagtgcagcggcgagtccatcctgaggtgactgtgtatcctgccaagactcagcccctgcagcaccacaacctcctggtctgctctgtgagtggtttctatccaggcagcattgaagtcaggtggttccggaacggccaggaagagaaggctggggtggtgtccacaggcctgatccagaatggagactggaccttccagaccctggtgatgctggaaacagttcctcggagtggagaagtttacacctgccaagtggagcacccaagtgtgatgagccctctcacagtggaatggagagcacggtctgaatctgcacagagcaagatgctgagtggagtcgggggctttgtgctgggcctgctcttccttggggccgggttgttcatctacttcaggaatcagaaaggacactctggacttcagccaacaggattcctgagctgaagtgaagatgaccacattcaaggaaaaaccttctgccccagctttgcaggatgaaacacttccccgcttggctctcattcttccacaagagagacctttctccggacctggttgctactggttcagcaactctgcagaaaatgtcctcccctgtggctgcctcagctcatgcctttggcctgaagtcccagcattgatggcagcccctcatcttccaagttttgtgctcccctttacctaacgcttcctgcctcccatgcatctgtactcctcctgtgccacaaacacattacattattaaatgtttctcaaacatggagttaaaaa

SEQ ID NO: 16989 - DNA, 1180 bp, Homo sapiens
  source 1..1180: mol_type = unassigned DNA
gttctccctgagtgagactcacctgctcctctggcccctggtcctgtcctgttctccagcatggtgtgtctgaagctccctggaggctcctgcatggcagctctgacagtgacactgatggtgctgagctccccactggctttggctggggacacccaaccacgtttcctgtggcagggtaagtataagtgtcatttcttcaacgggacggagcgggtgcagttcctggaaagactcttctataaccaggaggagttcgtgcgcttcgacagcgacgtgggggagtaccgggcggtgacggagctagggcggcctgtcgccgagtcctggaacagccagaaggacatcctggaggacaggcggggccaggtggacaccgtgtgcagacacaactacggggttggtgagagcttcacagtgcagcggcgagtccatcctgaggtgactgtgtatcctgccaagactcagcccctgcagcaccacaacctcctggtctgctctgtgagtggtttctatccaggcagcattgaagtcaggtggttccggaacggccaggaagagaaggctggggtggtgtccacaggcctgatccagaatggagactggaccttccagaccctggtgatgctggaaacagttcctcggagtggagaagtttacacctgccaagtggagcacccaagtgtgatgagccctctcacagtggaatggagagcacggtctgaatctgcacagagcaagatgctgagtggagtcgggggctttgtgctgggcctgctcttccttggggccgggttgttcatctacttcaggaatcagaaaggacactctggacttcagccaacaggattcctgagctgaagtgaagatgaccacattcaaggaaaaaccttctgccccagctttgcaggatgaaacacttccccgcttggctctcattcttccacaagagagacctttctccggacctggttgctactggttcagcaactctgcagaaaatgtcctcccctgtggctgcctcagctcatgcctttggcctgaagtcccagcattgatggcagcccctcatcttccaagttttgtgctcccctttacctaacgcttcctgcctcccatgcatctgtactcctcctgtgccacaaacacattacattattaaatgtttctcaaacatgga

SEQ ID NO: 16990 - DNA, 1120 bp, Homo sapiens
  source 1..1120: mol_type = unassigned DNA
atgtcttggaagaaggctttgcggatccctggaggccttcgggtagcaactgtgaccttgatgctggcgatgctgagcaccccggtggctgagggcagagactctcccgaggatttcgtgtaccagtttaagggcatgtgctacttcaccaacgggaccgagcgcgtgcggggtgtgaccagatacatctataaccgagaggagtacgcgcgcttcgacagcgacgtgggggtgtatcgggcggtgacgccgctggggccgcctgccgccgagtactggaacagccagaaggaagtcctggagaggacccgggcggagttggacacggtgtgcagacacaactaccagttggagctccgcacgaccttgcagcggcgagtctatcctgaggtgactgtgtatcctgcaaagacccagcccctgcagcaccacaacctcctggtctgctctgtgaatggtttctatccaggcagcattgaagtcaggtggttccggaacggccaggaagagaagactggggtggtgtccacaggcctgatccagaatggagactggaccttccagaccctggtgatgctggaaacagttcctcggagtggagaggtttacacctgccaagtggagcacccaagcctgacgagccctctcacagtggaatggagagcacggtctgaatctgcacagagcaagatgctgagtggagtcgggggcttcgtgctgggcctgctcttccttggggccgggctgttcatctacttcaggaatcagaaaggacactctggacttcagccaacaggattcctgagctgaagtgaagatgaccacattcaaggaagaaccttctgccccagctttgcaggatgaaacacttccccgcttggctctcattcttccacaagagagacctttctccggacctggttgctactggttcagcagctctgcagaaaatgtcctcccttgtggctgcctcagctcgtacctttggcctgaagtcccagcattaatggcagcccctcatcttccaagttttgtgctcccctttacctaatgcttcctgcctcccatgcatctgtactcctgctgtgccacaaacacattacattattaaatgtttctc

SEQ ID NO: 16991 - DNA, 798 bp, Homo sapiens
  source 1..798: mol_type = unassigned DNA
ttctccagcatggtgtgtctgaagttccctggaggctcctgcatggcagctctgacagtgacactgatggtgctgagctccccactggctttggctggggacacccgaccacgtttcttggagcaggttaaacatgagtgtcatttcttcaacgggacggagcgggtgcggttcctggacagatacttctatcaccaagaggagtacgtgcgcttcgacagcgacgtgggggagtaccgggcggtgacggagctggggcggcctgatgccgagtactggaacagccagaaggacctcctggagcagaggcgggccgaggtggacacctactgcagacacaactacggggttgtggagagcttcacagtgcagcggcgagtctatcctgaggtgactgtgtatcctgcaaagacccagcccctgcagcaccacaacctcctggtctgctctgtgaatggtttctatccaggcagcattgaagtcaggtggttccggaacggccaggaagagaagactggggtggtgtccacaggcctgatccagaatggagactggaccttccagaccctggtgatgctggaaacagttcctcggagtggagaggtttacacctgccaagtggagcacccaagcctgacgagccctctcacagtggaatggagagcacggtctgaatctgcacagagcaagatgctgagtggagtcgggggcttcgtgctgggcctgctcttccttggggccgggctgttcatctacttcaggaatcagaaaggacactctggacttcagccaacaggt

SEQ ID NO: 16992 - DNA, 446 bp, Homo sapiens
  source 1..446: mol_type = unassigned DNA
cactctggacttcagccaacaggtaataccttttcatcctctttaagaaacagatttggaggccaggcgcagcacgcctgtaatcccagcactttgggaggccgaggcgggcgaatcatgaggattcctgagctgaagtgaagatgaccacattcaaggaagaaccttctgccccagctttgcaggatgaaacacttccccgcttggctctcattcttccacaagagagacctttctccggacctggttgctactggttcagcagctctgcagaaaatgtcctcccttgtggctgcctcagctcgtacctttggcctgaagtcccagcattaatggcagcccctcatcttccaagttttgtgctcccctttacctaatgcttcctgcctcccatgcatctgtactcctgctgtgccacaaacacattacattattaaatgtttctc

SEQ ID NO: 16993 - DNA, 1167 bp, Homo sapiens
  source 1..1167: mol_type = unassigned DNA
tctccctgagtgagactcacctgctcctctggcccctggtcctgtcctgttctccagcatggtgtgtctgaagttccctggaggctcctgcatggcagctctgacagtgacactgatggtgctgagctccccactggctttggctggggacacccgaccacgtttcttggagcaggttaaacatgagtgtcatttcttcaacgggacggagcgggtgcggttcctggacagatacttctatcaccaagaggagtacgtgcgcttcgacagcgacgtgggggagtaccgggcggtgacggagctggggcggcctgatgccgagtactggaacagccagaaggacctcctggagcagaggcgggccgaggtggacacctactgcagacacaactacggggttgtggagagcttcacagtgcagcggcgagtctatcctgaggtgactgtgtatcctgcaaagacccagcccctgcagcaccacaacctcctggtctgctctgtgaatggtttctatccaggcagcattgaagtcaggtggttccggaacggccaggaagagaagactggggtggtgtccacaggcctgatccagaatggagactggaccttccagaccctggtgatgctggaaacagttcctcggagtggagaggtttacacctgccaagtggagcacccaagcctgacgagccctctcacagtggaatggagagcacggtctgaatctgcacagagcaagatgctgagtggagtcgggggcttcgtgctgggcctgctcttccttggggccgggctgttcatctacttcaggaatcagaaaggacactctggacttcagccaacaggtaataccttttcatcctctttaagaaacagatttggaggccaggcgcagtggctcacgcctgtaatcccagcactttgggaggccgaggcgggcgaatcatgaggtcaggagttcgagaccagcctgaccaacgtggtgaaaccccgtctctactaaaaatacaaaaaaaaatcagtcgggcgtggtggtgtgcgcctgtaatcccagctactcaggaggccaaggcaggagaatcgctggaacccgggaggcagaggttgcagtgagccgagattgggccactgcactccagcctaggtgacagagtgagaccccatctc

SEQ ID NO: 16994 - DNA, 1178 bp, Homo sapiens
  source 1..1178: mol_type = unassigned DNA
atagttctccctgagtgagacttgcctgctcctctggcccctggtcctgtcctcttctccagcatggtgtgtctgaagctccctggaggctccagcttggcagcgttgacagtgacactgatggtgctgagctcccgactggctttcgctggggacacccgaccacgtttcttggagctgcttaagtctgagtgtcatttcttcaatgggacggagcgggtgcggttcctggagagacacttccataaccaggaggagtacgcgcgcttcgacagcgacgtgggggagtaccgggcggtgagggagctggggcggcctgatgccgagtactggaacagccagaaggacctcctggagcagaagcggggccaggtggacaattactgcagacacaactacggggttggtgagagcttcacagtgcagcggcgagtccatcctcaggtgactgtgtatcctgcaaagacccagcccctgcagcaccacaacctcctggtctgctctgtgagtggtttctatccaggcagcattgaagtcaggtggttccggaacggccaggaagagaaggctggggtggtgtccacgggcctgatccagaatggagactggaccttccagaccctggtgatgctagaaacagttcctcggagtggagaggtttacacctgccaagtggagcacccaagcgtaacgagccctctcacagtggaatggagtgcacggtctgaatctgcacagagcaagatgctgagtggagtcgggggctttgtgctgggcctgctcttccttggggccgggctgttcatctacttcaggaatcagaaaggacactctggacttcagccaacaggattcctgagctgaagtgcagatgacaatttaaggaagaatcttcttccccagctttgcaggatgaaaagctttcccgcctggctgttattcttccacgagagagggctttctcaggacctagttgctactggttcagcaactgcagaaaatgtcctcccttgtggcttcctcagttcctgcccttggcctgaagtcccagcattgatggcagcgcctcatcttcaacttttgtgctcccctttgcctaaaccctatggcctcctgtgcatctgtactcaccctgtaccacaaacacattacattattaaatgtttctcaaagatgga

SEQ ID NO: 16995 - DNA, 1207 bp, Homo sapiens
  source 1..1207: mol_type = unassigned DNA
ggtggaggggggtcatagttctccctgagtgagacttgcctgctcctctggcccctggtcctgtcctcttctccagcatggtgtgtctgaagctccctggaggctccagcttggcagcgttgacagtgacactgatggtgctgagctcccgactggctttcgctggggacacccgaccacgtttcttggagctgcgtaagtctgagtgtcatttcttcaatgggacggagcgggtgcggtacctggacagatacttccataaccaggaggagttcctgcgcttcgacagcgacgtgggggagtaccgggcggtgacggagctggggcggcctgtcgccgagtcctggaacagccagaaggacctcctggagcagaagcggggccgggtggacaattactgcagacacaactacggggttggtgagagcttcacagtgcagcggcgagtccatcctcaggtgactgtgtatcctgcaaagacccagcccctgcagcaccacaacctcctggtctgctctgtgagtggtttctatccaggcagcattgaagtcaggtggttccggaacggccaggaagagaaggctggggtggtgtccacgggcctgatccagaatggagactggaccttccagaccctggtgatgctagaaacagttcctcggagtggagaggtttacacttgccaagtggagcacccaagcgtaacgagcgctctcacagtggaatggagagcacggtctgaatctgcacagagcaagatgctgagtggagtcgggggctttgtgctgggcctgctcttccttggggccgggctgttcatctacttcaggaatcagaaaggacactctggacttcagccaacaggattcctgagctgaagtgcagatgacaatttaaggaagaatcttctgccccagctttgcaggatgaaaagctttcccgcctggctgttattcttccacgagagagggctttctcaggacctagttgctactggttcagcaactgcagaaaatgtcctcccttgtggcttcctcagttcctgcccttggcctgaagtcccagcattgatggcagcgcctcatcttcaacttttgtgctcccctttgcctaaaccctatggcctcctgtgcatctgtactcaccctgtaccacaaacacattacattattaaatgtttctcaaagatggagttaaatatcatctg

SEQ ID NO: 16996 - DNA, 1839 bp, Homo sapiens
  source 1..1839: mol_type = unassigned DNA
cctccctataatttggaatgtgggtggaggggggtcatagttctccctgagtgagacttgcctgctcctctggcccctggtcctgtcctcttctccagcatggtgtgtctgaagctccctggaggctccagcttggcagcgttgacagtgacactgatggtgctgagctcccgactggctttcgctggggacacccgaccacgtttcttggagctgcttaagtctgagtgtcatttcttcaatgggacggagcgggtgcggttcctggagagacacttccataaccaggaggagtacgcgcgcttcgacagcgacgtgggggagtaccgggcggtgagggagctggggcggcctgatgccgagtactggaacagccagaaggacctcctggagcagaagcggggccaggtggacaattactgcagacacaactacggggttggtgagagcttcacagtgcagcggcgagtccatcctcaggtgactgtgtatcctgcaaagacccagcccctgcagcaccacaacctcctggtctgctctgtgagtggtttctatccaggcagcattgaagtcaggtggttccggaacggccaggaagagaaggctggggtggtgtccacgggcctgatccagaatggagactggaccttccagaccctggtgatgctagaaacagttcctcggagtggagaggtttacacctgccaagtggagcacccaagcgtaacgagccctctcacagtggaatggagtgcacggtctgaatctgcacagagcaagatgctgagtggagtcgggggctttgtgctgggcctgctcttccttggggccgggctgttcatctacttcaggaatcagaaaggacactctggacttcagccaacaggattcctgagctgaagtgcagatgacaatttaaggaagaatcttcttccccagctttgcaggatgaaaagctttcccgcctggctgttattcttccacgagagagggctttctcaggacctagttgctactggttcagcaactgcagaaaatgtcctcccttgtggcttcctcagttcctgcccttggcctgaagtcccagcattgatggcagcgcctcatcttcaacttttgtgctcccctttgcctaaaccctatggcctcctgtgcatctgtactcaccctgtaccacaaacacattacattattaaatgtttctcaaagatggagttaaatatcatctggtccatttggctccaaagacaaaaaatgaaaagaaaagaaaagaaaaagggaagattatttcctaacagaataatgattttcacgtgtgtgtcatgagtatgtgaggtaatgtatatgttaaataccatgatttagtcattccacactataggcatataacaaaacttcatgcttccacataaatatgctatacaatttttacttgtcaattaaaaaagtaatgctaacatttaaaaaggcagtgcataaaaactgagaacagactataacaactgaaacaaacttggcaaaccgatgagaaaccagccagcaagtcaatcagaactcttcaccccatctacaatattttgtatttataactgtaaattagtgtatagtgtttcactccagagacttcaataatatagtgttatcaaaggacttgtacagatttcagagaaagacacatttagaagacggagaatggagtctccattatgttctacctgagagtcagtatgaaatgtcaaatataaaagtacataattcagaggtctatttcaaagtaataatcatttgagcataatttctccactgacagagacgactgttattttattttcaatcaaa

SEQ ID NO: 16997 - DNA, 1260 bp, Homo sapiens
  source 1..1260: mol_type = unassigned DNA
atagttctccctgagtgagacttgcctgctcctctggcccctggtcctgtcctgttctccagcatggtgtgtctgaagctccctggaggttcctacatggcaaagctgacagtgacactgatggtgctgagctccccactggctttggctggggacacccgaccacgtttcttgcagcaggataagtatgagtgtcatttcttcaacgggacggagcgggtgcggttcctgcacagagacatctataaccaagaggaggacttgcgcttcgacagcgacgtgggggagtaccgggcggtgacggagctggggcggcctgacgctgagtactggaacagccagaaggacttcctggaagacaggcgcgccgcggtggacacctactgcagacacaactacggggttggtgagagcttcacagtgcagcggcgagttgagcctaaggtgactgtgtatcctgcaaggacccagaccctgcagcaccacaacctcctggtctgctctgtgaatggtttctatccaggcagcattgaagtcaggtggttccggaacagccaggaagagaaggctggggtggtgtccacaggcctgattcagaatggagactggaccttccagaccctggtgatgctggaaacagttcctcgaagtggagaggtttacacctgccaagtggagcacccaagcgtgacgagccctctcacagtggaatggagagcacagtctgaatctgcacagagcaagatgctgagtggagtcgggggctttgtgctgggcctgctcttccttggggccgggctattcatctacttcaagaatcagaaagggcactctggacttcacccaacaggactcgtgagctgaagtgcagatgaccacattcaagggggaaccttctgccccagctttgcatgatgaaaagctttcctgcttggctcttattcttccacaagagaggactttctcaggccctggttgctaccggttcagcaactctgcagaaaatgtccatccttgtggcttcctcagctcctgcccttggcctgaagtcccagcattgatggcagtgcctcatcttcaactttagtgctcccctttacctaaccctacggcctcccatgcatctgtactccccctgtgtgccacaaatgcactacgttattaaatttttctgaagcccagagttaaaaatcatctgtccacctggctccaaagacaaaaaataaaaagaaaagaaaaagggaagattatttcctaata

SEQ ID NO: 16998 - DNA, 1154 bp, Homo sapiens
  source 1..1154: mol_type = unassigned DNA
ggactatgggggaactgatggcgttcctgttacctctcatcattgtgttaatggtgaagcacagcgattcccggacgcactctctgagatattttcgcctgggcgtttcggatcccatccatggggtccctgaatttatttcggttgggtacgtggactcgcaccctatcaccacatatgacagtgtcactcggcagaaggagccacgggccccatggatggcagagaacctcgcgcctgatcactgggagaggtacactcagctgctgaggggctggcagcagatgttcaaggtggaactgaagcgcctacagaggcactacaatcactcagataatgtggctcacaccatcaagcaggcatgggaggccaatcagcatgagttgctgtatcaaaagaattggctggaagaagaatgtattgcctggctaaagagattcctggagtatgggaaagacaccctacaaagaacagagcccccactggtcagagtaaatcgcaaagaaacttttccaggggttacagctctcttctgcaaagctcatggcttttaccccccagaaatttacatgacatggatgaaaaacggggaagaaattgtccaagaaattgattatggagacattcttcccagtggggatggaacctatcaggcgtgggcatcaattgagcttgatcctcagagcagcaacctttactcctgtcatgtggagcactgcggtgtccacatggttcttcaggtcccccaggaatcagaaactatccctcttgtgatgaaagctgtctctgggtccattgtccttgtcattgtgctggctggagttggtgttctagtctggagaagaaggccccgagagcaaaatggagccatctaccttccaacaccagatcgatgattgcagatccctcttttccagttctccttcctctaggagccatgttatcctctgtcccccatagagtcaagcctagtgcttgaaggtcctgacgacacccacaacatacatgagagtaatgggattgagcatttatggcagcaacagaggagccacaaaatgttctttgttctttggctccaaaaagactgtcagctttcagtctcttttgatggactgttttatcagagttgactttaaatacagcttgtctcatga

SEQ ID NO: 16999 - DNA, 7704 bp, Homo sapiens
  source 1..7704: mol_type = unassigned DNA
ggactatgggggaactgatggcgttcctgttacctctcatcattgtgttaatggtgaagcacagcgattcccggacgcactctctgagatattttcgcctgggcgtttcggatcccatccatggggtccctgaatttatttcggttgggtacgtggactcgcaccctatcaccacatatgacagtgtcactcggcagaaggagccacgggccccatggatggcagagaacctcgcgcctgatcactgggagaggtacactcagctgctgaggggctggcagcagatgttcaaggtggaactgaagcgcctacagaggcactacaatcactcagggtctcacacttaccagagaatgattggctgtgagctgctggaggatggaagcaccacaggatttctgcagtatgcatatgacgggcaggatttcctgatcttcaataaagacaccctctcctggctggctgtagataatgtggctcacaccatcaagcaggcatgggaggccaatcagcatgagttgctgtatcaaaagaattggctggaagaagaatgtattgcctggctaaagagattcctggagtatgggaaagacaccctacaaagaacagagcccccactggtcagagtaaatcgcaaagaaacttttccaggggttacagctctcttctgcaaagctcatggcttttaccccccagaaatttacatgacatggatgaaaaacggggaagaaattgtccaagaaattgattatggagacattcttcccagtggggatggaacctatcaggcgtgggcatcaattgagcttgatcctcagagcagcaacctttactcctgtcatgtggagcactgcggtgtccacatggttcttcaggtcccccaggaatcagaaactatccctcttgtgatgaaagctgtctctgggtccattgtccttgtcattgtgctggctggagttggtgttctagtctggagaagaaggccccgagagcaaaatggagccatctaccttccaacaccagatcgatgattgcagatccctcttttccagttctccttcctctaggagccatgttatcctctgtcccccatagagtcaagcctagtgcttgaaggtcctgacgacacccacaacatacatgagagtaatgggattgagcatttatggcagcaacagaggagccacaaaatgttctttgttctttggctccaaaaagactgtcagctttcagtctcttttgatggactgttttatcagagttgactttaaatacagcttgtctcatgacacaacgcttccctacattctatttgtcaatgatgatttgcaactagttggagattctcagagcaggaaggaatcttttcaaccagagcaggaactgtcttctgcaatgccttggacttgagcctccagcctccacttgaacaccatgtgaagggaacctcagtacttcataaaatggcctttctcattcatctttcatgggaacatttattgtacaagcgctttgaatatcatgggcaccatgactgtgaccctacaggtaggattggatcactccatgagagtagccggcaggtttctacaatggcctgggaatggactgattatttttatacattttctggcctgagagaaagccaaagtcccctgctgttcacagcaaccctgcctgggagcttggaatcttggtaatctgcccggttggatctatggaggtagtctcaccctttttgtcttttgtgggaaattaagagaaataattatcagacatatcatcacctccagtggaactacagagacctggacccagctgcactattttaatgtaaaaataacagtatggccaggtgcagtggctcacgcctgtaatcccatcactttgagcagccaaggcgggcggatcacgaggtcaggagattaagaccatcctggccaatatggtgaaaccctgtctctactaaaatacaaaaaattagctgggcatggtgttgcgtgcctgtagtcccagctacttgggaggctgagacaggggaattgcttgaacccgggaggcagagattgcagtgagccgagatcacgccactgcactccagcctggcgacagagtgagactctatctcaaaataataataataataataataataataataataataataacagtatatttggtgtcaggagagggctcaattctcatttctgcctttcctgtgctggctcatggtagctgggcatgacttgccttcctacataggttgtcttcatacatatgcactgggaatcaataaaagcccatggtgagaatgaacatccccttaatgttccttactatccccaacccctgaggcctcacctactgccctgccatgtggagctacttgccctggggctgccagtcacacattcctcggtcctacttctctgaccccgtttgactctgcacctgagccctaatgcttacttcagtgacctgaactttgacaagtggcttttgtcctgcacctcaggtttgacctctgctctcccttgaccttgactgtgacatttgacctttggctttaatcattacagcctcagataaaggtaccttcagcccgggcacagtggctcacgcctgtaatcctagcactttgggaggctgaggcaggcggattccctgagctcaggagttcaagaccagcctgggcaacacggtgaaaccctgtctctactaaaatacaaataattagctgggcatggtggcatgtgcctatagtcccagctacttgggaggctaaggcaggagaatcacttgaatctataaggcagaggtggcagtgagccgagatcacaccactgcactccagcctgggcaacggagcaagactctgtctccaaaaaaaaaaagaaagataccctcagtgtgccaggcctctaagagctcacctgccaggcttcctccttgctccactgtcccatgtaattccatatatgaagctaccactgtacatctctcttttccggtgcctgttgagttgcatagaagcacagttgtgtttattttgtttttagggttgccatgggcaatttccgtgccacttttaagcagtgttgcactgtgaagagaatgtaggcaagtttatttctggaatggtttcttcttacaatcagaatagttaggatgtaatatatttttgggtgggcatttaaagtgaaaaggtacatatttacatagacacaggtgataatgtatctatgtaaatgccttttgattctgcaactgcaggatactctcatcaaagacacagataaaaagcctctgtgtttccaaggccttgccctacacctaacacataatatgtccaaatggatgaagaggaggcaaggacaaggatgtgatgacaaaacattctgttatgcacttgtagcatttatgtttcttcctgggggattttataatactaaaagaatcataatataaagagatgattaaaaaaaaaatactgccgggcacggtggctcatgcctgtaatcccagcattttgggaggccgaggtgggcagatcacctgaggtcgggagttcgagaccagcctgaccaacatggagaaaccctgtctctaccaaacatacaaaattagccggggatggtggcgcatgcctataatcccagctactcgggagtctgaggcagaagaaccgcttgaacccgggaggcagaggttgtggtgagccgagatcgcgccatcgcactctagcctgggcaacaagagtgaaactccatctcaaaaaaataaaaataaaataagtaagtaatacctaaaattctgcaaccttcattttactatagatggttgaagattatattacttcttaattgttttagccttgttattgcttcattacttcatggttgttgagtacagatgctcagtaatcataacctatgaaatatttgacaccatgatctaaacattaaaaacaaataactgtgctattgccacagctatgttttggctttgaattttctttactgaatattttggatcaagaacactagatgagaaacctgttcaactctgttcttttttttttttttaactccactgtatttattacctgtttttgttttttttgtttgtttgtttttgatgtgcatatagaccaagatgtggtaaatttaaatggcagatgtttttgatgtggtacatttaagggagagaaagcagtttaaagagcagggtgaaaaatccaacaagactccatcgagagtttctgagctctcccatcaggggccagtcctcctttcctctctcctcttactcccatgatttccaagttgtgatcctttccttatttctgaggaatgacttggtttctcctcttctttttttggcctgagagaagatgtttttgcacttgtagctatgaggaacagattgtccactagggaggccagctgatcattttctgccagagtcacacagagcagtcacaccttattttgaaaaccactgtctggggtctttgtcctcacatatgcaggtctagtgtccccacaaagtgatcagatggatatataaagtggagtgccaatgtattaatttactgtgagaaacacaattgctaagtgggtcagatatctgtctcagctggtcagtacaccttccagcaggaaaatctacataagaacaactaaatcacaatctgtagagtgcttgatgaccccagaattggtgcaaggggacacattcttgcttgttagcacctgctctctggagtttgctattttctcacacacagtgtattagttcacagaatgttctccaaggaggacagggggctttgcccatagccatgtgctgtgggcagcagagctaggaagaagcacaggcatctcccagcccaggtgtttcccacttaactgcattgcccttttcatcttttttttttccccaatagcttcaggacattcagtacattgtgctttttagaggttgatgattccactgcctgagctgccttcacctctctttctttggaaattgccatctttgagcattgtatgtctctgtaacatctctgcatctccttttcactctggcctccctttctccattgtccttctagcttctggttgccccaaaccccacagactgtgtaacaaaacccaaaacctattggtttaaaacaatacccattttattttctttcatagtttctatgggtcaggaatttggatatggcttgggtaagcagttctggcttctcatggagttggaggcaagtggtggctggaacagaaatggggcagccaggggtggtggccaggcatcagctacatctcctccatgtagtctcaggaactctccatgtaatctctctgtgtgggttgggcttcctcacaacatggtggcctcagggcagtcactgcttacatggcagctagcttccctcagagtgagtatcccaagagatcacagtcaaagtgcatagcatttatataatctaatcttggaagtcacaaaatgtcattcttgtgatactctcattggtgaagaagtcataaaatcctgctcaggttcaaaaagagggtgtatagaacccaacactcaataggaagattgtcagagttacattgtaagaagagcatgtagttgggagatatcattgtggccattttgggaaagatgcaacatgtcacaatgtcatgttctccatcgtctccccgttccaccttgtactggtttccaagggtagtcgtttaaaagtaccacaaaaactgggtggcttggaacaacagaaatttattgtttcacagttctggaggccagaagttcaaaatgaagtgttggcagaaacatgctgcctctaaagggactgggaaaggatctgttccaggcttccctcctatcttctggttgttccttgccttctggctgcgtaactctagtcttcatttggtgttctccctgcatgcatggctttgtgtccaaatttccttttttcatgaggccatcagtcatactggattagggacccactctactactgcaggatgacctcaccttcccaaattacatctgcaacaaccctatttccaaagaaggccacattctgaggtactgggggttataacttcaacatgaattttttggaggaaacaattcaactcctaacacatctctacccaacctctgtaggttccctcaatccaccaaaattttttggctccactggattatctagcagttaggaaaccaagatcattaaatgaattcaccgcaactacagtgagactgactaccttagcttacctctgtgaaaggagttaagccaaaggaatctgtggaattttggagagtttgggagcatttgggggcaggaggcaaatgttcttcctttaaatcacaacacttagttctcttccatttataagactcacccctccatcccaacccctgcaccacaggacaaggaagtgttcttggtcttcaactttcatccctgatggtgaaagcagttgctcctgacctatttgcccaccagcttctcctctggagcctgaggcttctgatgcctgcctggctggttctcagtaagaaggtcaagttcaaccagaggggagatgctgatgcctttcagtacttaaatatgagttcagaccctggggcctggacataagatttggggtcccctggatataagatttctgaaaacactcagactgtggagacccctgctgagggagaagccccaaactgtggcttcaggggaatgcaccaaggctctcattgaggccaccttctccaacaagctcccctcctgcttccccatggctggcatggctgaggaaaaaggacactgagcacagcccgtgcatgagcggcttgccatgcaacaggataaaacccataatgccactcagcaagccttggttgtaaatctagtttgattacatttgtaatcaaatgatggccatttgttctgtttctggtttgtgaaccaactgaagacataagcagggcctcagctaacccacaaatagcacatgtgtgcaaactggaaaaatgaacccttcttctgggaggacgccagcccaggccaggtcacccggcttggccagcagaacacagagtagattttggtcccgtttgttccccagtggggtatctatccttgtgcagggcacaagcctacatggtggctctggtcatatcattagaaaatagacagaaatgggctgcacaccagaatgaatgaattgaattgaaagggaggagtgatggtggaaaaaaaaacaagtcaattcatttagactggtagaaccagaaccactgtgtagtacatccaaacggttaaaattccctggaagatgttacataatcctatcatggtgtttatttatggaaatctattttaaaaattttatgtaatactgcacagtctgtttgcatgatgccttgtacgtagtagcaactcagtaaatactttttgaatgaactagtatagtattttaattagctagtcttcatgtactggtacaaaagaacagtgtcatcttacagctgaagtcatagaggggaaatatcccactcaagatcatataacattccaggtactcaggatgaatggtttgaggactggtctgaattcttcaaaggtttcagctgtattaacattctccatctaataaactttatcttgtcattgca

SEQ ID NO: 17000 - DNA, 1046 bp, Homo sapiens
  source 1..1046: mol_type = unassigned DNA
ggccttgtgtgtcaccaagaggttctcagaagggacctgtcagtttttggttaaaagaacccggaaagagaaggactatgggggaactgatggcgttcctgttacctctcatcattgtgttaatggtgaagcacagcgattcccggacgcactctctgagatattttcgcctgggcgtttcggatcccatccatggggtccctgaatttatttcggttgggtacgtggactcgcaccctatcaccacatatgacagtgtcactcggcagaaggagccacgggccccatggatggcagagaacctcgcgcctgatcactgggagaggtacactcagctgctgaggggctggcagcagatgttcaaggtggaactgaagcgcctacagaggcactacaatcactcagggtctcacacttaccagagaatgattggctgtgagctgctggaggatggaagcaccacaggatttctgcagtatgcatatgacgggcaggatttcctgatcttcaataaagacaccctctcctggctggctgtagataatgtggctcacaccatcaagcaggcatgggaggccaatcagcatgagttgctgtatcaaaagaattggctggaagaagaatgtattgcctggctaaagagattcctggagtatgggaaagacaccctacaaagaacagagcaaaatggagccatctaccttccaacaccagatcgatgattgcagatccctcttttccagttctccttcctctaggagccatgttatcctctgtcccccatagagtcaagcctagtgcttgaaggtcctgacgacacccacaacatacatgagagtaatgggattgagcatttatggcagcaacagaggagccacaaaatgttctttgttctttggctccaaaaagactgtcagctttcagtctcttttgatggactgttttatcagagttgactttaaatacagcttgtctcatgacacaacgcttccctacattctatttgtcaatgatgatttgcaactagttggagattctcagagcag

SEQ ID NO: 17001 - DNA, 2599 bp, Homo sapiens
  source 1..2599: mol_type = unassigned DNA
acccaggcactgtgaccatcccccctgccatgtgggaactgcgatcagcctccttttggagggccatattcgctgagttctttgccaccctcttctatgtcttctttgggctggggtcctcactgcgctgggctcctggacccctgcatgttctgcaggtggctatggcatttggcttggccctggctacactggtgcagtctgtgggccacatcagtggagcccacgtcaatcctgcagtcacttttgctttccttgtgggctcccagatgtccctgctccgtgccttctgctatatggcagcccagctcctgggagctgtggctggggccgctgtgctgtatagcgttaccccacctgctgtccgaggaaacctagcactcaacacgttgcaccctgcggtgagcgtgggccaggcaaccacagtggagatcttcctgacgctccagttcgtgctctgcatctttgccacatacgacgagaggcggaatggccaactgggctccgtggccctggccgttggcttctcccttgccctggggcacctctttgggatgtattatactggtgcaggcatgaatcctgcccgctcctttgctcctgccattctcactgggaacttcactaaccactgggtgtactgggtaggcccaatcattggagggggtctgggcagcctcctgtacgactttcttctcttcccccggctcaagagtatttctgagagactgtctgtcctcaagggtgccaaacccgatgtctccaatggacaaccagaggtcacaggggaacctgttgaactgaacacccaggccctgtagaagctccagctgaatagagggagtagaaagcttctgagtttacgtggaggggtttagccagcccctagatgaagaaagagactgtggggagggtcatgtacttctttattttttaacttatgtatgtggttgttttttttttttttttccttttgctgtgtgaaatctttcaagttgcattcatgagctggttggtgcaaacttcccttcctccccatcccaccacccttcgccgtgtgtgctgattgtgcatatgaatgtgagtgtggctgtgtctgagttttggggcatgagagctaaggaagcaaaaagaggtgccatcctatacctcccttcctcgacccagtatggtgagtactgggtaaccgacaccttaagtttctggcctttaccctgctgccagtcaagtgtgtggctcttgatttctgagggaacagagaagcagggagttactcctcacacgaggcagatggagagaagtggaggagacaaggcttccaagggttaggagaagggactcaagggaggtgggtggtgaaaacggagtattagccccagatcaggatgtaggtgtaccgaagaattggggggaagttaatgggaatatatagcctacttatcttagggatgcttgccccagggacttgggtggggaagtagctctgagaaaagtgaacactaggatttagctgttctgtaaagccacgtaaacctgtctacatccgctggctggttgtgttcattctgacataatggatctcttcagaggtcctgggccaaagagcttccaacctaaatagagcttgggcaagcctagaatctagaaaaattaagcagcttaactggtcagcctgacatccactgttgtggctgcctggcagatggtatttaagccccacaattgttccctaaggccaacacaggaaatctgattcctggagcaaataaatgaacgggtggtagtagggggcatgaggggagaggctttgactctgttctaatttatttagagcaaatcaaaacactcctcaaatggcatctttctgcttttatcactagttccgtgttttttttcttgttttgtgtctgtgtattttcatttctctgtcatccgtcctttcatcttgaagcaaatctcttctaactccctcataccccagaaattgattccttctattcaaatgcttaataattcaggagattattatttgtttgagccctatcttctttttttttttgagagggggtcttactatgttgaccaggttggagtgcaatggatattcacaggcacgatcatcgcacactacagtctagaaatcctgggctcaagcgatcttcctgcttcagcctccccagtagctgggattacagggggccagagcacagccctattttcttttccttttggcaagatcatctcagcagaggccagaagagaccctcaactgttcaatgaatatttacggttgctttcttccttttatgagcctcttgcatactttgaaagctttaaatttatacctataatacaacggacatcccctatcccagaagaccattcctccctgtacttcagctctttacttcctcccaaataaaacctaacttttctaactaactatttaagacttggaatagtccgcttgactagaagaaggggaagaatgtttgtaaattcacctctaatcggactttgattctactataattcagcagaaaattcatagcgctgtgatttttagatcgacctcacataaaacagtccctgcactcgc

SEQ ID NO: 17002 - DNA, 2865 bp, Homo sapiens
  source 1..2865: mol_type = unassigned DNA
acccctgggcttggcctgccttgccctgccgggaagtgatccccaaggcagggtgagagttccccatctgaggcgtttgttgcagctacctgcacttctagattcatcttcttgtgagccctgggcttaggagtcaccatggcaactgaagagttcatcatccgcatccccccataccactatatccatgtgctggaccagaacagcaacgtgtcccgtgtggaggtcgggccaaagacctacatccggcaggacaatgagagggtactgtttgcccccatgcgcatggtgaccgtccccccacgtcactactgcacagtggccaaccctgtgtctcgggatgcccagggcttggtgctgtttgatgtcacagggcaagttcggcttcgccacgctgacctcgagatccggctggcccaggaccccttccccctgtacccaggggaggtgctggaaaaggacatcacacccctgcaggtggttctgcccaacactgccctccatctaaaggcgctgcttgattttgaggataaagatggagacaaggtggtggcaggagatgagtggcttttcgagggacctggcacgtacatcccccggaaggaagtggaggtcgtggagatcattcaggccaccatcatcaggcagaaccaggctctgcggctcagggcccgcaaggagtgctgggaccgggacggcaaggagagggtgacaggggaagaatggctggtcaccacagtaggggcgtacctcccagcggtgtttgaggaggttctggatttggtggacgccgtcatccttacggaaaagacagccctgcacctccgggctcggcggaacttccgggacttcaggggagtgtcccgccgcactggggaggagtggctggtaacagtgcaggacacagaggcccacgtgccagatgtccacgaggaggtgctgggggttgtgcccatcaccaccctgggcccccacaactactgcgtgattctcgaccctgtcggaccggatggcaagaatcagctggggcagaagcgcgtggtcaagggagagaagtcttttttcctccagccaggagagcagctggaacaaggcatccaggatgtgtatgtgctgtcggagcagcaggggctgctgctgagggccctgcagcccctggaggagggggaggatgaggagaaggtctcacaccaggctggggaccactggctcatccgcggacccctggagtatgtgccatctgccaaagtggaggtggtggaggagcgccaggccatccctctagacgagaacgagggcatctatgtgcaggatgtcaagaccggaaaggtgcgcgctgtgattggaagcacctacatgctgacccaggacgaagtcctgtgggagaaagagctgcctcccggggtggaggagctgctgaacaaggggcaggaccctctggcagacaggggtgagaaggacacagctaagagcctccagcccttggcgccccggaacaagacccgtgtggtcagctaccgcgtgccccacaacgctgcggtgcaggtgtacgactaccgagagaagcgagcccgcgtggtcttcgggcctgagctggtgtcgctgggtcctgaggagcagttcacagtgttgtccctctcagctgggcggcccaagcgtccccatgcccgccgtgcgctctgcctgctgctggggcctgacttcttcacagacgtcatcaccatcgaaacggcggatcatgccaggctgcaactgcagctggcctacaactggcactttgaggtgaatgaccggaaggacccccaagagacggccaagctcttttcagtgccagactttgtaggtgatgcctgcaaagccatcgcatcccgggtgcggggggccgtggcctctgtcactttcgatgacttccataagaactcagcccgcatcattcgcactgctgtctttggctttgagacctcggaagcgaagggccccgatggcatggccctgcccaggccccgggaccaggctgtcttcccccaaaacgggctggtggtcagcagtgtggacgtgcagtcagtggagcctgtggatcagaggacccgggacgccctgcaacgcagcgtccagctggccatcgagatcaccaccaactcccaggaagcggcggccaagcatgaggctcagagactggagcaggaagcccgcggccggcttgagcggcagaagatcctggaccagtcagaagccgagaaagctcgcaaggaacttttggagctggaggctctgagcatggccgtggagagcaccgggactgccaaggcggaggccgagtcccgtgcggaggcagcccggattgagggagaagggtccgtgctgcaggccaagctaaaagcacaggccttggccattgaaacggaggctgagctccagagggtccagaaggtccgagagctggaactggtctatgcccgggcccagctggagctggaggtgagcaaggctcagcagctggctgaggtggaggtgaagaagttcaagcagatgacagaggccataggccccagcaccatcagggaccttgctgtggctgggcctgagatgcaggtaaaactgctccagtccctgggcctgaaatcaaccctcatcaccgatggctccactcccatcaacctcttcaacacagcctttgggctgctggggatggggcccgagggtcagcccctgggcagaagggtggccagtgggcccagccctggggaggggatatccccccagtctgctcaggcccctcaagctcctggagacaaccacgtggtgcctgtactgcgctaactcctgattaatacaatggaagtttctgggcatttacaatttcaa

SEQ ID NO: 17003 - DNA, 2833 bp, Homo sapiens
  source 1..2833: mol_type = unassigned DNA
ttccccatctgaggcgtttgttgcagctacctgcacttctagatgctccccaggttcatcctgtgtcgtctcccccacctaccagtcatcttcttgtgagccctgggcttaggagtcaccatggcaactgaagagttcatcatccgcatccccccataccactatatccatgtgctggaccagaacagcaacgtgtcccgtgtggaggtcgggccaaagacctacatccggcaggacaatgagagggtactgtttgcccccatgcgcatggtgaccgtccccccacgtcactactgcacagtggccaaccctgtgtctcgggatgcccagggcttggtgctgtttgatgtcacagggcaagttcggcttcgccacgctgacctcgagatccggctggcccaggaccccttccccctgtacccaggggaggtgctggaaaaggacatcacacccctgcaggtggttctgcccaacactgccctccatctaaaggcgctgcttgattttgaggataaagatggagacaaggtggtggcaggagatgagtggcttttcgagggacctggcacgtacatcccccggaaggaagtggaggtcgtggagatcattcaggccaccatcatcaggcagaaccaggctctgcggctcagggcccgcaaggagtgctgggaccgggacggcaaggagagggtgacaggggaagaatggctggtcaccacagtaggggcgtacctcccagcggtgtttgaggaggttctggatttggtggacgccgtcatccttacggaaaagacagccctgcacctccgggctcggcggaacttccgggacttcaggggagtgtcccgccgcactggggaggagtggctggtaacagtgcaggacacagaggcccacgtgccagatgtccacgaggaggtgctgggggttgtgcccatcaccaccctgggcccccacaactactgcgtgattctcgaccctgtcggaccggatggcaagaatcagctggggcagaagcgcgtggtcaagggagagaagtcttttttcctccagccaggagagcagctggaacaaggcatccaggatgtgtatgtgctgtcggagcagcaggggctgctgctgagggccctgcagcccctggaggagggggaggatgaggagaaggtctcacaccaggctggggaccactggctcatccgcggacccctggagtatgtgccatctgccaaagtggaggtggtggaggagcgccaggccatccctctagacgagaacgagggcatctatgtgcaggatgtcaagaccggaaaggtgcgcgctgtgattggaagcacctacatgctgacccaggacgaagtcctgtgggagaaagagctgcctcccggggtggaggagctgctgaacaaggggcaggaccctctggcagacaggggtgagaaggacacagctaagagcctccagcccttggcgccccggaacaagacccgtgtggtcagctaccgcgtgccccacaacgctgcggtgcaggtgtacgactaccgagagaagcgagcccgcgtggtcttcgggcctgagctggtgtcgctgggtcctgaggagcagttcacagtgttgtccctctcagctgggcggcccaagcgtccccatgcccgccgtgcgctctgcctgctgctggggcctgacttcttcacagacgtcatcaccatcgaaacggcggatcatgccaggctgcaactgcagctggcctacaactggcactttgaggtgaatgaccggaaggacccccaagagacggccaagctcttttcagtgccagactttgtaggtgatgcctgcaaagccatcgcatcccgggtgcggggggccgtggcctctgtcactttcgatgacttccataagaactcagcccgcatcattcgcactgctgtctttggctttgagacctcggaagcgaagggccccgatggcatggccctgcccaggccccgggaccaggctgtcttcccccaaaacgggctggtggtcagcagtgtggacgtgcagtcagtggagcctgtggatcagaggacccgggacgccctgcaacgcagcgtccagctggccatcgagatcaccaccaactcccaggaagcggcggccaagcatgaggctcagagactggagcaggaagcccgcggccggcttgagcggcagaagatcctggaccagtcagaagccgagaaagctcgcaaggaacttttggagctggaggctctgagcatggccgtggagagcaccgggactgccaaggcggaggccgagtcccgtgcggaggcagcccggattgagggagaagggtccgtgctgcaggccaagctaaaagcacaggccttggccattgaaacggaggctgagctccagagggtccagaaggtccgagagctggaactggtctatgcccgggcccagctggagctggaggtgagcaaggctcagcagctggctgaggtggaggtgaagaagttcaagcagatgacagaggccataggccccagcaccatcagggaccttgctgtggctgggcctgagatgcaggtaaaactgctccagtccctgggcctgaaatcaaccctcatcaccgatggctccactcccatcaacctcttcaacacagcctttgggctgctggggatggggcccgagggtcagcccctgggcagaagggtggccagtgggcccagccctggggaggggatatccccccagtctgctcaggcccctcaagctcctggagacaaccacgtggtgcctgtactgcgctaactcctgattaatacaatggaagtttctgggc

SEQ ID NO: 17004 - DNA, 1098 bp, Homo sapiens
  source 1..1098: mol_type = unassigned DNA
aaggcagggtgagagttccccatctgaggcgtttgttgcagctacctgcacttctagattcatcttcttgtgagccctgggcttaggagtcaccatggcaactgaagagttcatcatccgcatccccccataccactatatccatgtgctggaccagaacagcaacgtgtcccgtgtggaggtcgggccaaagacctacatccggcaggacaatgagaggttctggatttggtggacgccgtcatccttacggaaaagacagccctgcacctccgggctcggcggaacttccgggacttcaggggagtgtcccgccgcactggggaggagtggctggtaacagtgcaggacacagaggcccacgtgccagatgtccacgaggaggtgctgggggttgtgcccatcaccaccctgggcccccacaactactgcgtgattctcgaccctgtcggaccggatggcaagaatcagctggggcagaagcgcgtggtcaagggagagaagtcttttttcctccagccaggagagcagctggaacaaggcatccaggatgtgtatgtgctgtcggagcagcaggggctgctgctgagggccctgcagcccctggaggagggggaggatgaggagaaggtctcacaccaggctggggaccactggctcatccgcggacccctggagtatgtgccatctgccaaagtggaggtggtggaggagcgccaggccatccctctagacgagaacgagggcatctatgtgcaggatgtcaagaccggaaaggtgcgcgctgtgattggaagcacctacatgctgacccaggacgaagtcctgtgggagaaagagctgcctcccggggtggaggagctgctgaacaaggggcaggaccctctggcagacaggggtgagaaggacacagctaagagcctccagcccttggcgccccggaacaagacccgtgtggtcagctaccgcgtgccccacaacgctgcggtgcaggtgtacgactaccgagagaagcgagcccgcgtggtcttcgggcctgagctggtgtcgctgggtcctgaggagcagttcacagtgttgtccctctcagctgggcgg

SEQ ID NO: 17005 - DNA, 2848 bp, Homo sapiens
  source 1..2848: mol_type = unassigned DNA
cacaccggaggggcggcgtgcgccggcgtgcgccggcgtgacgcggctacgcgggatgggccgggccagggccaaggccgaggcggcagcggctgcgagaggcggcggcacgacgacggtccctcagcccagccaccatgagcaccaagcagatcacttgcaggtattttatgcatggtgtgtgtcgggaaggaagtcagtgcctattctcacatgacttggcaaacagcaaaccgtccaccatctgcaagtactaccagaagggctactgtgcctatggaactcggtgcagatatgaccacacgaggccctctgctgcagctggaggtgctgtgggcaccatggcccacagtgtgccctccccagctttccacagtcctcaccctccttccgaggtcactgcatccattgtgaaaactaactcacatgaacccggaaagcgtgaaaagagaacattggttcttagagaccgaaatctctctggcatggctgaaaggaagacccagccgagcatggtgagtaatccaggcagctgcagcgacccccagcccagccccgagatgaagccgcattcctacctggatgccatcaggagtggccttgatgacgtggaggccagcagctcctacagcaacgagcagcagctgtgcccctacgcagctgctggggagtgccggtttggggatgcctgtgtctacctgcacggggaggtgtgtgaaatctgtaggctgcaagtcttgcacccattcgacccagagcagaggaaggctcatgaaaagatctgcatgttgacgttcgaacacgagatggaaaaggcctttgccttccaggcaagccaggacaaagtgtgcagtatctgcatggaagtgatcctggagaaggcctctgcttctgagaggagatttgggattctctccaattgcaatcacacgtactgtttgtcctgcatccggcagtggcggtgtgccaaacagtttgaaaacccaatcattaagtcttgtccagaatgccgtgtgatatcagagtttgtaattccaagtgtgtattgggtggaagatcagaataaaaagaacgagttgattgaagctttcaaacaggggatggggaaaaaagcctgtaaatactttgagcaaggcaaggggacctgcccatttggaagcaaatgtctttatcgccatgcttaccccgatgggcggctagcagagcctgagaaacctcggaaacagctcagttctcaaggcactgtgaggttctttaattcagtgcggctctgggatttcatcgagaaccgagaaagccggcatgtccccaacaatgaagatgtcgacatgacagagctcggggacctcttcatgcacctttctggagtggaatcatcagaaccctaaagagtagatggttgccctgcatcttgggctccatcggccgaaactttcccaagccagggtgtgcggagcttccctgtactgcagccaaggtgacgtgtgacttggatttgagtggagttgggcttagccttagtctcattcaatctccattattacagccatggggaagagtgaaagatataaagtaacctaattaaatgtatggaattgctatttttatagctgatatagttacacctcaagcccctcaggggtaacaactaacaaacacccaaactgtttggattgattgctttaaaaaacaaacctggctcttacctttgatcttttcttccccagaaatagtaaacttgcagctgcccctaatgcagcatatttttcttaccaaaggagtcttcagccctataaaaggattcctctatagtgtatttctctagtgtatttagtgtgtcgtcaaaattttgatttatacagagctttcaagaacacacaatgcaaagtgagcgcagcatagctgttaacaaacatacaacttttttctagggctttaagggtggtcatttttttcaagttctctcaagtgtcccaaatcagggtagcaatcttgttgccacatgtgcagcaaacaaagtggaagtatagatcttcttctcccttagggaggctcttgaaggagcaggaggtacagtactgggtagcagtctggccctcctgtcgtctggttggtgttggggcctccagccagggccctctaggggaaccaagcctctgctctcacctgtgggttcttgcccatcagggtaattgtattgagaactcaaatatacgtgcacttacatgtgtggttcgtactcaagtgatctattatctagctgcaaagcctggctttgatttgaaattttgtaaaaatttcatggcacccaaggtttctgattctgacccagcagtggtcctgaagagagctgatggcaagtcttgtagtcattttgattttaattgaagggtgagcataaccttgtgaaccagcactagcttgttccaagctggaatttatctaatctatttttgtgtttaaaaaagctgtacctaccaaataaataaatagtttataaaatgtattacttaaggtattagctgagtttagagtactttctgcttaattaatttttatacttaactcttcagtagaggtttacaaagagtacaaaggttaaattacaaattcattcccagcctaggctctgggcacatttcctgttcttgaattctgctcctgaagagggtgaacaaatggggcattcaagttgtgagctcagaattactttaaaaggaggtaacagccagccattacacctaaatttaatttattttattaaaataacataattgagggaccatcagataactgtattttgtcaggtgcaataaaaacaaaattaaaacccaaatcatcaagaaaa

SEQ ID NO: 17006 - DNA, 2711 bp, Homo sapiens
  source 1..2711: mol_type = unassigned DNA
tgtttcagaatctataggattatattttttttaaggcagacagatacgaaaatacaacgaagcgtgcatgaccgaaaccagaagagattaaagtaaaacctcattctcctgaggaaatcgtgtgagaagggacttagggactgccggaacacagcgaagcagaggcagaaggcagacaaaaggggctgggttggtccccgcctgtgtgaacgaaaaaatatgtcagattggaaaattgcggtaaaaaccaggcagagcacgtacgttgcccccacaggaagtgtccgccatgctgcctgtgcccggaagtaggtaggaacacacagtcagagggacccaaaagcaggggggaaggaaaaagagatgcacacttcccccagagaagcctccgagcgcggccgccattccgggcctcaagcccataaagaaaaaataccggagaggttctggcaccatttcggggtgccaaagcagccatggaagagcctgcagctccctcagaagcccacgaggcagccggggcccaggcaggtgctgaggcagcaagggagggtgtgtctgggccggaccttcccgtctgtgagccctccggggaatctgctgctccagattcagccctgccacatgcggcaaggggctgggcccccttccctgtagctccagtccctgcccacctccgcagaggaggcctgaggcctgccccagcctcaggaggaggagcctggcccagtccgttgccaagccgaagcagcggcatttggacaaagcagatcatctgcaggtattatatacatgggcagtgcaaggagggggagaactgtcgctattcgcacgacctttctggtcggaagatggccactgagggtggcgtttcgccgcctggggcctctgcaggtggaggccctagcacggctgcgcacatcgagcccccgactcaggaagtggcggaagcccccccggctgcatcctccctttccttgcctgtgattggctcggctgctgaaaggggtttctttgaagccgagagagacaatgcagaccgtggagctgctggaggagcaggtgtagaaagctgggcggatgccattgagtttgttccagggcagccctaccggggccgctgggttgcatctgcccccgaggctcctctacagagctcagagactgagaggaagcagatggctgtgggcagtgggttgcggttttgctattatgcttccaggggagtttgctttcgtggggagagctgtatgtacctccatggagacatatgcgacatgtgtgggctgcagaccttgcaccccatggatgctgcccagagggaagaacatatgagggcctgcattgaagcacacgagaaagatatggaactctcgtttgctgtgcagcgtggtatggacaaggtgtgtggcatctgcatggaggttgtctatgagaaggccaaccccaatgaccgccgctttggcattctttccaattgcaaccattccttctgtattaggtgtatccgcaggtggagaagtgccagacagtttgagaacaggatcgtcaagtcttgcccacagtgcagggtcacctctgaattggtcattcccagtgagttctgggtggaggaggaggaagagaagcagaaacttattcagcaatacaaggaggcaatgagcaacaaggcctgcaggtattttgcggaaggcaggggtaactgcccatttggagacacatgcttttacaagcatgaataccctgagggctggggagatgagcctcctgggccaggtggtgggtcattcagcgcatactggcatcaacttgtggagcctgtgcgaatgggagagggcaacatgctctataaaagcattaagaaggagcttgtcgtgcttcggctggccagtctgttgtttaagcggtttctttcactgagagatgagttacccttctctgaggaccagtgggacttgcttcattatgagctggaagaatatttcaatttgattctgtagcatcgtgctgtggcatgtggtctagtctgctgaggttctgtcgtctgctattgcctgttttccctgtgttgacactcttactgctttcaggggctgttgaggcagtgcttctgttttcttgtctattctgcatatctttccccctaggattatggtgattatctgtgttaaaaaataagtccttaaagttactgttttggtgaaattaatattaatgtcagcttatggcttttttttgtcatctctgttgtcaacaggattaactcagttctagtgtagtgtttactgaatttccacacttattttgaagaccctcaagagtaaatgtggcagagtgaaaggagaagttttaattgaactagtagctttgtgctataatagccttaacaaatggacccttgcagggctttgcagctgctcatctgtttgtttacagtttgttctttccctccttccccttcaagtgcacttgttaaactgtgatgaacttgtgattttgtgttttacttgaccaaaaccaagtgtatatgtttacatgtttttatcctgtttagcttgacatgaaataatttatatttggaaatatatatttaagaattatatatataaaaatatatatgtataagagttatgtatttgaaaaaaatatataaaagaatatacatcacaatataatatttatgtttatgtaataaagtaaatacagagctg

SEQ ID NO: 17007 - DNA, 1108 bp, Homo sapiens
  source 1..1108: mol_type = unassigned DNA
cccgcgcgcgggggcgcccaggccactgggctccgcggagccagcgagaggtctgcgcggagtctgagcggcgctcgtcccgtcccaaggccgacgccagcacgccgtcatggcccccgcagcggcgacggggggcagcaccctgcccagtggcttctcggtcttcaccaccttgcccgacttgctcttcatctttgagtttatcttcgggggcctggtgtggatcctggtggcctcctccctggtgccctggcccctggtccagggctgggtgatgttcgtgtctgtgttctgcttcgtggccaccaccaccttgatcatcctgtacataattggagcccacggtggagagacttcctgggtcaccttggacgcagcctaccactgcaccgctgccctcttttacctcagcgcctcagtcctggaggccctggccaccatcacgatgcaagacggcttcacctacaggcactaccatgaaaacattgctgccgtggtgttctcctacatagccactctgctctacgtggtccatgcggtgttctctttaatcagatggaagtcttcataaagccgcagtagaacttgagctgaaaacccagatggtgttaactggccgccccactttccggcataactttttagaaaacagaaatgcccttgatggtggaaaaaagaaaacaaccacccccccactgcccaaaaaaaaaagccctgccctgttgctcgtgggtgctgtgtttactctcccgtgtgccttcgcgtccgggttgggagcttgctgtgtctaacctccaactgctgtgctgtctgctagggtcacctcctgtttgtgaaaggggaccttcttgttcgggggtgggaagtggcgaccgtgacctgagaaggaaagaaagatcctctgctgacccctggagcagctctcgagaactacctgttggtattgtccacaagctctcccgagcgccccatcttgtgccatgttttaagtcttcatggatgttctgcatgtcatggggactaaaactcacccaacagatctttccagaggtccatggtggaagacgataaccctgtgaaatactttataaaatgtcttaatgttcaa

SEQ ID NO: 17008 - DNA, 705 bp, Homo sapiens
  source 1..705: mol_type = unassigned DNA
atggcccccgcagcggcgacggggggcagcaccctgcccagtggcttctcggtcttcaccaccttgcccgacttgctcttcatctttgagtttgtgttctcctacatagccactctgctctacgtggtccatgcggtgttctctttaatcagatggaagtcttcataaagccgcagtagaacttgagctgaaaacccagatggtgttaactggccgccccactttccggcataactttttagaaaacagaaatgcccttgatggtggaaaaaagaaaacaaccacccccccactgcccaaaaaaaaaagccctgccctgttgctcgtgggtgctgtgtttactctcccgtgtgccttcgcgtccgggttgggagcttgctgtgtctaacctccaactgctgtgctgtctgctagggtcacctcctgtttgtgaaaggggaccttcttgttcgggggtgggaagtggcgaccgtgacctgagaaggaaagaaagatcctctgctgacccctggagcagctctcgagaactacctgttggtattgtccacaagctctcccgagcgccccatcttgtgccatgttttaagtcttcatggatgttctgcatgtcatggggactaaaactcacccaacagatctttccagaggtccatggtggaagacgataaccctgtgaaatactttataaaatgtcttaatgttcaa

SEQ ID NO: 17009 - DNA, 873 bp, Homo sapiens
  source 1..873: mol_type = unassigned DNA
atggcccccgcagcggcgacggggggcagcaccctgcccagtggcttctcggtcttcaccaccttgcccgacttgctcttcatctttgagtttatcttcgggggcctggtgtggatcctggtggcctcctccctggtgccctggcccctggtccagggctgggtgatgttcgtgtctgtgttctgcttcgtggccaccaccaccttgatcatcctgtacataattggagcccacggtggagagacttcctgggtcaccttggtgttctcctacatagccactctgctctacgtggtccatgcggtgttctctttaatcagatggaagtcttcataaagccgcagtagaacttgagctgaaaacccagatggtgttaactggccgccccactttccggcataactttttagaaaacagaaatgcccttgatggtggaaaaaagaaaacaaccacccccccactgcccaaaaaaaaaagccctgccctgttgctcgtgggtgctgtgtttactctcccgtgtgccttcgcgtccgggttgggagcttgctgtgtctaacctccaactgctgtgctgtctgctagggtcacctcctgtttgtgaaaggggaccttcttgttcgggggtgggaagtggcgaccgtgacctgagaaggaaagaaagatcctctgctgacccctggagcagctctcgagaactacctgttggtattgtccacaagctctcccgagcgccccatcttgtgccatgttttaagtcttcatggatgttctgcatgtcatggggactaaaactcacccaacagatctttccagaggtccatggtggaagacgataaccctgtgaaatactttataaaatgtcttaatgttcaa

SEQ ID NO: 17010 - DNA, 831 bp, Homo sapiens
  source 1..831: mol_type = unassigned DNA
atggcccccgcagcggcgacggggggcagcaccctgcccagtggcttctcggtcttcaccaccttgcccgacttgctcttcatctttgagtttgacgcagcctaccactgcaccgctgccctcttttacctcagcgcctcagtcctggaggccctggccaccatcacgatgcaagacggcttcacctacaggcactaccatgaaaacattgctgccgtggtgttctcctacatagccactctgctctacgtggtccatgcggtgttctctttaatcagatggaagtcttcataaagccgcagtagaacttgagctgaaaacccagatggtgttaactggccgccccactttccggcataactttttagaaaacagaaatgcccttgatggtggaaaaaagaaaacaaccacccccccactgcccaaaaaaaaaagccctgccctgttgctcgtgggtgctgtgtttactctcccgtgtgccttcgcgtccgggttgggagcttgctgtgtctaacctccaactgctgtgctgtctgctagggtcacctcctgtttgtgaaaggggaccttcttgttcgggggtgggaagtggcgaccgtgacctgagaaggaaagaaagatcctctgctgacccctggagcagctctcgagaactacctgttggtattgtccacaagctctcccgagcgccccatcttgtgccatgttttaagtcttcatggatgttctgcatgtcatggggactaaaactcacccaacagatctttccagaggtccatggtggaagacgataaccctgtgaaatactttataaaatgtcttaatgttcaa

SEQ ID NO: 17011 - DNA, 3061 bp, Homo sapiens
  source 1..3061: mol_type = unassigned DNA
actagaggcagcagccagccagcccagcccttctctggtgcctgccggtgtggtcctctcccagagactggggggccttcatctgccccatgaggaaaagaggagtggaggaccatggaaagggatccagaaaaagaaggaaacaccaagtcccaggggcatgagctggaagggagggctgctcctcccaggggaggctggggactgagagctgtccccaagagtggaaaaggagggagctgggcaagacccagcattgttagtaaccagctctgtggtcttgacttgacctcactgattctcagtctcctcacttggaaaagggcaaaacagccacgtgcaggccgtggtgggcacccgggctgtctgcagatagcttggctcattgttggtcctcagtacgcagccctcgtagccaagcagcttgggcctacactctgggcccaggggagtggctgtcgctggcatcccctggaataacatgctccgggggtcaaagattccttagctggaaaggtctaggaggagactcccgctctgctccctcctgcaccagcgctgtgccccccgccggccaggcagagccatccgatgccgctgggccgcccactgaggatctgctggctgcagcgagtggaaggacctgctcggctggaacgttttttttttttttccctcccaggcgacgtccgatgggtgtgtcgggcaggaggtgatatttgacaggctgcgcgcgggcgagctgccgcggagcacccggcaggggctgacagcatggcctcgcccgacccgcccgccaccagctacgccccgtccgacgtgccctcgggggtcgcgctgttcctcaccatccctttcgccttcttcctgcccgagctgatatttgggttcttggtctggaccatggtagccgccacccacatagtataccccttgctgcaaggatgggtgatgtatgtctcgctcacctcgtttctcatctccttgatgttcctgttgtcttacttgtttggattttacaaaagatttgaatcctggagagttctggacagcctgtaccacgggaccactggcatcctgtacatgagcgctgccgtcctacaagtacatgccacgattgtttctgagaaactgctggacccaagaatttactacattaattcggcagcctcgttcttcgccttcatcgccacgctgctctacattctccatgccttcagcatctattaccactgatgcacaggcgccaggccaagggggaaatgctctttgaaagctccaattattggtccccaaaagcagcttccaacgtttgccatctggatgacaaacggaagatccactaaaacgtccacgggattaacagaacgtccttgcagactgagcgatgacaccacactttgtttggacatttaaattcactctgctgaataggaggaagcttttctttttcctgggaaaacaactgtctcttggaattatctgaccatgaacttgctcttctagacaactcacatcaaagccctcactccactaatggagaatcctagccccactaatgccaagtctgtttggggattttgcctcagctatgggcttccctagagtaggtctaggggaatactcagtctgatcttttttttgtttgttttattttgttttttttgagacggagtctcgctcttcctccaaggctggagtgcagtgacgcgatctccactcactgcaggctccgcctcccgggttcccgccattctcctgcctcagcctcccgagtagccgggactacaggcgcccaccaccgtgcccggctaatttagttgtatttttagtagagatggggtttcaccgtattagccaggatggtctcgatctcctgacctcgtgatccgcccgcctcggcctcccaaagtgctgggattacaggcgtgagccaccgcgcccggcctgattctcttaaaattgaagaggtgctgccaaggccttcagatctaacgcagatgcatagaccttgttcctggtacttgttcagcctgtgctggggagccgtggtcccgagttccctgggaggctgacagggtcaagccaccctgcccaccaccctcccacttcccctcccctttcctctccagcattaggattcaagggaaatttgcatgaagccaattttgagggtagacgtgtggggaaaataaatcattatacagtaagacctggggcttgaggggtggggaatggggagggaagggcatagcctgctcctccatgagtctgacatctcggaaactgagcagctgccggacgcctgggtcaggaatccaagaccccacctcttaaggactggttcctcagaaagcaccctcagggaaaaaggtgaaaacattacatccgtggattctcctgccacaaccgcattggaagaaaaggctgccgcaacatctcagcgaggagtgaaggacccatgtcccaggaaccgcgctgcgccacctgcactcacccccctcacattctcttaagcacccggtggccctccgaggcctggcggaatggtggtgcccacggggttgggcaagggctcaccaggacctcaacgggcaaagttgtgcacactaaaatatcaaatcaaggtgcttggttttaaagtaaatgtttttctaaagaaagctgtgctcttctgttgacccagacgaatagggcacagccctgtaactgcacgtgccttctgtcattgggaatgaaataaattattacgagaaagggacttgtcctaactggtttgaggccttacagttttgtatctacatttttcccctcctggggtttgcggggacagggacagaactacaggagtcatgggaaagaaaattctggcttcactactgctcactgctcactttctgatcactctgatacttttttttttttttttttttttgcaacctgataccttgaaaagcttctatgtgtctctccttttgttgcctggcagctgtctaggatgatcactgattactatttactaagtagccacatgcaaataaaagttgtttggtaaaaagga

SEQ ID NO: 17012 - DNA, 1650 bp, Homo sapiens
  source 1..1650: mol_type = unassigned DNA
gcgcgtgggggtgatgtcgctaaggggtgattctcccctccctagagttacacacgctatctctcccgccaattgccgggctccatcaggcaggtcctttcctcctgagcccaaaccatccgtttgttgtcgtcctccaatcacaggggctcatcctcagggactactttgcaatcggcgcagagcgcagtgagaagagcttgaaaaaaacctctggtatcgggaagtgtagttcaacacttgaaggaaatgctttggagattgcgccacaaccagggcagcgtaaactacagttcccagagagcgccgcgtcgggagcggagccttttctcgctaacaccgctcgccctctccgagtcagttccgcggtagaggtgacctgactctctgaggctcattttgcagttgttgaaattgtccccgcagttttcaatcatgtctgaaccaatcagagtccttgtgactggagcagctggtcaaattgcatattcactgctgtacagtattggaaatggatctgtctttggtaaagatcagcctataattcttgtgctgttggatatcacccccatgatgggtgtcctggacggtgtcctaatggaactgcaagactgtgcccttcccctcctgaaagatgtcatcgcaacagataaagaagacgttgccttcaaagacctggatgtggccattcttgtgggctccatgccaagaagggaaggcatggagagaaaagatttactgaaagcaaatgtgaaaatcttcaaatcccagggtgcagccttagataaatacgccaagaagtcagttaaggttattgttgtgggtaatccagccaataccaactgcctgactgcttccaagtcagctccatccatccccaaggagaacttcagttgcttgactcgtttggatcacaaccgagctaaagctcaaattgctcttaaacttggtgtgactgctaatgatgtaaagaatgtcattatctggggaaaccattcctcgactcagtatccagatgtcaaccatgccaaggtgaaattgcaaggaaaggaagttggtgtttatgaagctctgaaagatgacagctggctcaagggagaatttgtcacgactgtgcagcagcgtggcgctgctgtcatcaaggctcgaaaactatccagtgccatgtctgctgcaaaagccatctgtgaccacgtcagggacatctggtttggaaccccagagggagagtttgtgtccatgggtgttatctctgatggcaactcctatggtgttcctgatgatctgctctactcattccctgttgtaatcaagaataagacctggaagtttgttgaaggtctccctattaatgatttctcacgtgagaagatggatcttactgcaaaggaactgacagaagaaaaagaaagtgcttttgaatttctttcctctgcctgactagacaatgatgttactaaatgcttcaaagctgaagaatctaaatgtcgtctttgactcaagtaccaaataataataatgctatacttaaattacttgtgaaaaacaacacattttaaagattacgtgcttcttggtacaggtttgtgaatgacagtttatcgtcatgctgttagtgtgcattctaaataaatatatattcaaatgaaa

SEQ ID NO: 17013 - DNA, 1212 bp, Homo sapiens
  source 1..1212: mol_type = unassigned DNA
atgtctgaaccaatcagagtccttgtgactggagcagctggtcaaattgcatattcactgctgtacagtattggaaatggatctgtctttggtaaagatcagcctataattcttgtgctgttggatatcacccccatgatgggtgtcctggacggtgtcctaatggaactgcaagactgtgcccttcccctcctgaaagatgtcatcgcaacagataaagaagacgttgccttcaaagacctggatgtggccattcttgtgggctccatgccaagaagggaaggcatggagagaaaagatttactgaaagcaaatgtgaaaatcttcaaatcccagggtgcagccttagataaatacgccaagaagtcagttaaggttattgttgtgggtaatccagccaataccaactgcctgactgcttccaagtcagctccatccatccccaaggagaacttcagttgcttgactcgtttggatcacaaccgagctaaagctcaaattgctcttaaacttggtgtgactgctaatgatgtaaagaatgtcattatctggggaaaccattcctcgactcagtatccagatgtcaaccatgccaaggtgaaattgcaaggaaaggaagttggtgtttatgaagctctgaaagatgacagctggctcaagggagaatttgtcacgactgtgcagcagcgtggcgctgctgtcatcaaggctcgaaaactatccagtgccatgtctgctgcaaaagccatctgtgaccacgtcagggacatctggtttggaaccccagagggagagtttgtgtccatgggtgttatctctgatggcaactcctatggtgttcctgatgatctgctctactcattccctgttgtaatcaagaataagacctggaagtttgttgaaggtctccctattaatgatttctcacgtgagaagatggatcttactgcaaaggaactgacagaagaaaaagaaagtgcttttgaatttctttcctctgcctgactagacaatgatgttactaaatgcttcaaagctgaagaatctaaatgtcgtctttgactcaagtaccaaataataataatgctatacttaaattacttgtgaaaaacaacacattttaaagattacgtgcttcttggtacaggtttgtgaatgacagtttatcgtcatgctgttagtgtgcattctaaataaatatatattcaaatg

SEQ ID NO: 17014 - DNA, 1340 bp, Homo sapiens
  source 1..1340: mol_type = unassigned DNA
cttgcggggtatggggcgctcttaggaggactctggagaagtagttgtcctgggagaggagcgatcttaatcctgctgcatgacgggaggacaaaatgcgacgctgcagctattttccaaaggacgttacggtgtttgataaggacgataagtctgaaccaatcagagtccttgtgactggagcagctggtcaaattgcatattcactgctgtacagtattggaaatggatctgtctttggtaaagatcagcctataattcttgtgctgttggatatcacccccatgatgggtgtcctggacggtgtcctaatggaactgcaagactgtgcccttcccctcctgaaagatgtcatcgcaacagataaagaagacgttgccttcaaagacctggatgtggccattcttgtgggctccatgccaagaagggaaggcatggagagaaaagatttactgaaagcaaatgtgaaaatcttcaaatcccagggtgcagccttagataaatacgccaagaagtcagttaaggttattgttgtgggtaatccagccaataccaactgcctgactgcttccaagtcagctccatccatccccaaggagaacttcagttgcttgactcgtttggatcacaaccgagctaaagctcaaattgctcttaaacttggtgtgactgctaatgatgtaaagaatgtcattatctggggaaaccattcctcgactcagtatccagatgtcaaccatgccaaggtgaaattgcaaggaaaggaagttggtgtttatgaagctctgaaagatgacagctggctcaagggagaatttgtcacgactgtgcagcagcgtggcgctgctgtcatcaaggctcgaaaactatccagtgccatgtctgctgcaaaagccatctgtgaccacgtcagggacatctggtttggaaccccagagggagagtttgtgtccatgggtgttatctctgatggcaactcctatggtgttcctgatgatctgctctactcattccctgttgtaatcaagaataagacctggaagtttgttgaaggtctccctattaatgatttctcacgtgagaagatggatcttactgcaaaggaactgacagaagaaaaagaaagtgcttttgaatttctttcctctgcctgactagacaatgatgttactaaatgcttcaaagctgaagaatctaaatgtcgtctttgactcaagtaccaaataataataatgctatacttaaattacttgtgaaaaacaacacattttaaagattacgtgcttcttggtacaggtttgtgaatgacagtttatcgtcatgctgttagtgtgcattct

SEQ ID NO: 17015 - DNA, 1172 bp, Homo sapiens
  source 1..1172: mol_type = unassigned DNA
aaaatgcgacgctgcagctattttccaaaggacgttacggtgtttgataaggacgataagtctgaaccaatcagagtccttgtgactggagcagctggtcaaattgcatattcactgctgtacagtattggaaatggatctgtctttggtaaagatcagatgtcatcgcaacagataaagaagacgttgccttcaaagacctggatgtggccattcttgtgggctccatgccaagaagggaaggcatggagagaaaagatttactgaaagcaaatgtgaaaatcttcaaatcccagggtgcagccttagataaatacgccaagaagtcagttaaggttattgttgtgggtaatccagccaataccaactgcctgactgcttccaagtcagctccatccatccccaaggagaacttcagttgcttgactcgtttggatcacaaccgagctaaagctcaaattgctcttaaacttggtgtgactgctaatgatgtaaagaatgtcattatctggggaaaccattcctcgactcagtatccagatgtcaaccatgccaaggtgaaattgcaaggaaaggaagttggtgtttatgaagctctgaaagatgacagctggctcaagggagaatttgtcacgactgtgcagcagcgtggcgctgctgtcatcaaggctcgaaaactatccagtgccatgtctgctgcaaaagccatctgtgaccacgtcagggacatctggtttggaaccccagagggagagtttgtgtccatgggtgttatctctgatggcaactcctatggtgttcctgatgatctgctctactcattccctgttgtaatcaagaataagacctggaagtttgttgaaggtctccctattaatgatttctcacgtgagaagatggatcttactgcaaaggaactgacagaagaaaaagaaagtgcttttgaatttctttcctctgcctgactagacaatgatgttactaaatgcttcaaagctgaagaatctaaatgtcgtctttgactcaagtaccaaataataataatgctatacttaaattacttgtgaaaaacaacacattttaaagattacgtgcttcttggtacaggtttgtgaatgacagtttatcgtcatgctgttagtgtgcattctaaataaatatatattcaaatg

SEQ ID NO: 17016 - DNA, 2209 bp, Homo sapiens
  source 1..2209: mol_type = unassigned DNA
agagagcaggcgctgggcagtgtggaggtcgttggagtcacttccccgtcaccagctcctgtgcctgccagtcggtgcccctcccgctccagccatgctctccgccctcgcccggcctgccagcgctgctctccgccgcagcttcagcacctcggcccagaacaatgctaaagtagctgtgctaggggcctctggaggcatcgggcagccactttcacttctcctgaagaacagccccttggtgagccgcctgaccctctatgatatcgcgcacacacccggagtggccgcagatctgagccacatcgagaccaaagccgctgtgaaaggctacctcggacctgaacagctgcctgactgcctgaaaggttgtgatgtggtagttattccggctggagtccccagaaagccaggcatgacccgggacgacctgttcaacaccaatgccacgattgtggccaccctgaccgctgcctgtgcccagcactgcccggaagccatgatctgcgtcattgccaatccggttaattccaccatccccatcacagcagaagttttcaagaagcatggagtgtacaaccccaacaaaatcttcggcgtgacgaccctggacatcgtcagagccaacacctttgttgcagagctgaagggtttggatccagctcgagtcaacgtccctgtcattggtggccatgctgggaagaccatcatccccctgatctctcagtgcacccccaaggtggactttccccaggaccagctgacagcactcactgggcggatccaggaggccggcacggaggtggtcaaggctaaagccggagcaggctctgccaccctctccatggcgtatgccggcgcccgctttgtcttctcccttgtggatgcaatgaatggaaaggaaggtgttgtggaatgttccttcgttaagtcacaggaaacggaatgtacctacttctccacaccgctgctgcttgggaaaaagggcatcgagaagaacctgggcatcggcaaagtctcctcttttgaggagaagatgatctcggatgccatccccgagctgaaggcctccatcaagaagggggaagatttcgtgaagaccctgaagtgagccgctgtgacgggtggccagtttccttaatttatgaaggcatcatgtcactgcaaagccgttgcagataaactttgtattttaatttgctttggtgatgattactgtattgacatcatcatgccttccaaattgtgggtggctctgtgggcgcatcaataaaagccgtccttgattttatttttcaaggtcccttctgtaaatgctgtgctttcttccctgtgagagccaactttagagtgtctgctacctcttcattaccaatcagaattagatgatgtttaactgttagactgaagcgtgacgctttcatcagtagcttcaagaaagtctaaattgttaatttatggaattggacacagtattcagtttacccgtacatgctcctcccgcccctcctgttggcacccttgcatcgcccaggcctgattcctcctgggggtagttcacccccacgggttcatagttcagcggcgaatgccaggcagctgttttctggctgagcaaacagcacctttctcattgagcttcctctactgacctctgtcccccttgggatttcatcttctgaccgaaccctgatgttcagtggcagagacagcccatagccagaactgtgggtagaccagggttggggtgtgcggtttgggacagcccaaaccccagccgctgtgtcaaggcctaggacgccatgctgccatcaaaagggggttccaggtttccatcagtggcctaaagaagggacttcttgttgtactgaggagtgcggaattaaagagatttgactccctttagtattgggggcagtccgttccccagacactgtggcctctgaagtggaaactgaaagctgcatacctgggaaagaactttctaggaataggcaatggccttcagtggaagagggagggctggaggtgtgcccagtacttggatgttcatctgtccacaacagctttttgtttttttaaaaaagctaaaatggaaatggattttatcataaaggatgacatcgttttcttctacaattaatacatgttcattgtataaaacccaaaaagcagctaaaaaataaagcgggaaaggaactactggtaa

SEQ ID NO: 17017 - DNA, 3984 bp, Homo sapiens
  source 1..3984: mol_type = unassigned DNA
gcaggcgcggacaggtaatccccagcgggctgcagggccaccaccctctgtccgacccagccggagcccgacctgcgaggctggccgggcatgtcccctcggcgccctgtgctaccagggccaatctccgcccggagaccggtccctgacgccgggtgtttataagaatggaagtgttgtttccttgcccgattccttcatgctatatctcatgaacctctgtaatcttgggggagagactatatttaatgatgacaaacctgtcaccagtgtagcaacaacagtgtgaggacaaaagcaaataaaaattaagaagcgttcaaatttatattcaacaaggaagtcatttcaatcaacaacttctgctgcattatttttccaagatgaaccgatacacaaccatgagacagttgggggacggcacgtatgggagtgtgcttatgggcaagagtaatgaatccggggagctggtggccatcaaaaggatgaagagaaagttctattcttgggatgaatgcatgaacttgagagaagttaagtctctgaagaaacttaatcatgccaatgttattaaattgaaagaagttatcagagaaaatgaccatctttattttatatttgaatatatgaaagaaaacctctatcaattaatgaaagacagaaacaagttgttccctgaatcagtcatcagaaatattatgtatcaaatattgcaagggctggcttttatccataaacatggcttttttcatagggacatgaaaccagaaaacttgctttgtatgggtccagagcttgtgaaaattgctgattttggacttgcaagagaattaaggtcacagccaccatacactgattatgtatctaccagatggtatcgtgcccctgaagttttactgagatcttcagtttatagttctcccattgatgtgtgggctgttggaagtatcatggctgaactctatatgttaaggccacttttcccagggacaagtgaggtcgatgaaatctttaaaatttgccaagttttagggactcccaaaaaaagtgactggccagaaggataccagctggcatcctctatgaacttccgttttccccagtgtgttcctataaacttaaaaactcttattcccaatgccagtaatgaagctattcagctcatgaccgaaatgttgaattgggatccaaagaaacgaccgacagcaagccaggcattgaaacacccatattttcaagttggtcaggtattaggcccttcgtcaaatcatctggaatcaaaacagtctttaaataagcagctgcaaccattagaatcaaagccatctttagttgaggtagagcctaagcctctgccggatataatcgatcaggttgttggacaaccccagccaaaaactagccagcagccactgcagcccattcagccgccacagaacctgagcgtccagcaacctccaaagcaacagagtcaggagaaaccgccacaaacgctattcccgagcatcgtcaaaaacatgccaactaagccaaatggcacactgagtcataaaagtggtaggaggcgttggggtcagactatcttcaagtctggagatagctgggaagagttggaggactatgatttcggagcctcccattccaagaagccaagcatgggtgtttttaaagaaaaaaggaaaaaagattctccatttcggcttccagagccagtaccctcaggctccaaccactcgacaggggaaaacaagagcttacctgctgttacttccctaaaatctgattccgaattgtcaactgctccaacctctaaacagtactacttgaaacaatcaagatatcttccaggtgtgaatcccaagaaggtgtccttgatagccagtggaaaggaaataaacccccacacttggagcaaccagttattccccaagtcactgggacccgttggggcagaacttgctttcaaaaggagcaatgcaggaaatcttggaagttatgctacttacaatcagtcaggatatattccttcctttctcaaaaaagaagtgcagtcagctggccagaggatccacttagcacctctcaatgcaacggcttcagaatatacctggaacacaaaaactggtcgggggcagttttcaggacgtacttataatcctacagcaaaaaacctaaatattgtgaaccgtgcacagcccattccctcagtgcatgggaggacagactgggtggccaagtatggaggccaccggtaggagtctatggtgtgaaaccctacagcattgctccgtagagtacgtgcaagttccttgaccctgggaaatgtctacaaatgtctatttctactgagttctggaagaaatatgcaaaagtgggtacttggaagggcaaaaatcatcccctattttacttatttccaagaaatgcattttcttagcatcattgcccacagtgttgatatatgggtaggatgttacaaagtattgaataaactatttgccaaagtatgaagtatttgatctacaatttaataaatagtaaatccaataagaacccttaaaaaaaaacaacttccagaaaatgtttagagtgttttagttttcatttgttgtatgtgcccaaatggtttagtagttcttcactttgctgtggttggcttaagaggtttgtcttttgtttttgtacagcagttgggccaacctttgctggctgtcagctgtggttcttatttgactaaggctctgcgctgccattttgtcaatgacagaaagattgcaattatttgtttttctactttgaagctatgggagcgatggtaatttcaatcttgagcaggatatctttttttttttttttgaggcgatgtttcactcttgtgtccaggctggagtgcagtggcactatcttggcttactgcaacctccacctcctgggttcaagtgattctcctgcctcagcctcccgagtagctgggattagaggcgtgtgccaccatgcctggctaatttttgtagtattagtagagacagggtttcaccatgttggtcaggctcaggctggtctcaaactcctgacctcaggtgatccacctgcctcggcctcccaaagtgcagggcttacaggtgtgagccacagtgcccagctttttttttttttttttagaaataaatttatctttaacatagagaatatcaaagttatgccacttgattttagtggacggcttgtgttttgatcttgaccagtacagttcccatgaattcaaggtgacaatcaagcccaatggcttgatgacttcaatagtaaccaagtcaaggttctcttggctggacatcattaagaaagttctggaaactgtgtttgtttgatgctggttcattggacttttcaaattgttttgtttctgtgtccctaccagacacaaagatgaagtgtgccagctggttcccccaagccagctcatgctgctgaccactgactcagctctgaccttcacatttgctctgaagcaagtgcgttcagctgctggggcagtgatatcacatagtacatatattatttccttagtttatttccaaactggtattttaaatagacacttcgaactttgggctactctgtttaaatctgccactttctggactggaccttagtactgtaaattctttttaaagaataataatgttaccaactgctgagatttttatgtattttgtgactttgtaacaactgctattgtaataagtgtcatcttgtgggcattatacaaaggcatattataaaataataatgatatttttgtatagaagagtcaactgttcagatgtaagatgttgaaaaatgttaaaatctaaagagtaatttatcctagtggtaatggttatatgtatttgtacagtttaaattaatgtctcaaagctgtgcagtcttttgttactgggacacttttaaactctgaataggcattaaaaaaaatatggctaa

SEQ ID NO: 17018 - DNA, 3830 bp, Homo sapiens
  source 1..3830: mol_type = unassigned DNA
ggtgtttataagaatggaagtgttgtttccttgcccgattccttcatgctatatctcatgaacctctgtaatcttgggggagagactatatttaatgatgacaaacctgtcaccagtgtagcaacaacagtgtgaggacaaaagcaaataaaaattaagaagcgttcaaatttatattcaacaaggaagtcatttcaatcaacaacttctgctgcattatttttccaagatgaaccgatacacaaccatgagacagttgggggacggcacgtatgggagtgtgcttatgggcaagagtaatgaatccggggagctggtggccatcaaaaggatgaagagaaagttctattcttgggatgaatgcatgaacttgagagaagttaagtctctgaagaaacttaatcatgccaatgttattaaattgaaagaagttatcagagaaaatgaccatctttattttatatttgaatatatgaaagaaaacctctatcaattaatgaaagacagaaacaagttgttccctgaatcagtcatcagaaatattatgtatcaaatattgcaagggctggcttttatccataaacatggcttttttcatagggacatgaaaccagaaaacttgctttgtatgggtccagagcttgtgaaaattgctgattttggacttgcaagagaattaaggtcacagccaccatacactgattatgtatctaccagatggtatcgtgcccctgaagttttactgagatcttcagtttatagttctcccattgatgtgtgggctgttggaagtatcatggctgaactctatatgttaaggccacttttcccagggacaagtgaggtcgatgaaatctttaaaatttgccaagttttagggactcccaaaaaaagtgactggccagaaggataccagctggcatcctctatgaacttccgttttccccagtgtgttcctataaacttaaaaactcttattcccaatgccagtaatgaagctattcagctcatgaccgaaatgttgaattgggatccaaagaaacgaccgacagcaagccaggcattgaaacacccatattttcaagttggtcaggtattaggcccttcgtcaaatcatctggaatcaaaacagtctttaaataagcagctgcaaccattagaatcaaagccatctttagttgaggtagagcctaagcctctgccggatataatcgatcaggttgttggacaaccccagccaaaaactagccagcagccactgcagcccattcagccgccacagaacctgagcgtccagcaacctccaaagcaacagagtcaggagaaaccgccacaaacgctattcccgagcatcgtcaaaaacatgccaactaagccaaatggcacactgagtcataaaagtggtaggaggcgttggggtcagactatcttcaagtctggagatagctgggaagagttggaggactatgatttcggagcctcccattccaagaagccaagcatgggtgtttttaaagaaaaaaggaaaaaagattctccatttcggcttccagagccagtaccctcaggctccaaccactcgacaggggaaaacaagagcttacctgctgttacttccctaaaatctgattccgaattgtcaactgctccaacctctaaacagtactacttgaaacaatcaagatatcttccaggtgtgaatcccaagaaggtgtccttgatagccagtggaaaggaaataaacccccacacttggagcaaccagttattccccaagtcactgggacccgttggggcagaacttgctttcaaaaggagcaatgcaggaaatcttggaagttatgctacttacaatcagtcaggatatattccttcctttctcaaaaaagaagtgcagtcagctggccagaggatccacttagcacctctcaatgcaacggcttcagaatatacctggaacacaaaaactggtcgggggcagttttcaggacgtacttataatcctacagcaaaaaacctaaatattgtgaaccgtgcacagcccattccctcagtgcatgggaggacagactgggtggccaagtatggaggccaccggtaggagtctatggtgtgaaaccctacagcattgctccgtagagtacgtgcaagttccttgaccctgggaaatgtctacaaatgtctatttctactgagttctggaagaaatatgcaaaagtgggtacttggaagggcaaaaatcatcccctattttacttatttccaagaaatgcattttcttagcatcattgcccacagtgttgatatatgggtaggatgttacaaagtattgaataaactatttgccaaagtatgaagtatttgatctacaatttaataaatagtaaatccaataagaacccttaaaaaaaaacaacttccagaaaatgtttagagtgttttagttttcatttgttgtatgtgcccaaatggtttagtagttcttcactttgctgtggttggcttaagaggtttgtcttttgtttttgtacagcagttgggccaacctttgctggctgtcagctgtggttcttatttgactaaggctctgcgctgccattttgtcaatgacagaaagattgcaattatttgtttttctactttgaagctatgggagcgatggtaatttcaatcttgagcaggatatctttttttttttttttgaggcgatgtttcactcttgtgtccaggctggagtgcagtggcactatcttggcttactgcaacctccacctcctgggttcaagtgattctcctgcctcagcctcccgagtagctgggattagaggcgtgtgccaccatgcctggctaatttttgtagtattagtagagacagggtttcaccatgttggtcaggctcaggctggtctcaaactcctgacctcaggtgatccacctgcctcggcctcccaaagtgcagggcttacaggtgtgagccacagtgcccagctttttttttttttttttagaaataaatttatctttaacatagagaatatcaaagttatgccacttgattttagtggacggcttgtgttttgatcttgaccagtacagttcccatgaattcaaggtgacaatcaagcccaatggcttgatgacttcaatagtaaccaagtcaaggttctcttggctggacatcattaagaaagttctggaaactgtgtttgtttgatgctggttcattggacttttcaaattgttttgtttctgtgtccctaccagacacaaagatgaagtgtgccagctggttcccccaagccagctcatgctgctgaccactgactcagctctgaccttcacatttgctctgaagcaagtgcgttcagctgctggggcagtgatatcacatagtacatatattatttccttagtttatttccaaactggtattttaaatagacacttcgaactttgggctactctgtttaaatctgccactttctggactggaccttagtactgtaaattctttttaaagaataataatgttaccaactgctgagatttttatgtattttgtgactttgtaacaactgctattgtaataagtgtcatcttgtgggcattatacaaaggcatattataaaataataatgatatttttgtatagaagagtcaactgttcagatgtaagatgttgaaaaatgttaaaatctaaagagtaatttatcctagtggtaatggttatatgtatttgtacagtttaaattaatgtctcaaagctgtgcagtcttttgttactgggacacttttaaactctgaataggcattaaaaaaaatatggctaa

SEQ ID NO: 17019 - DNA, 1788 bp, Homo sapiens
  source 1..1788: mol_type = unassigned DNA
acaagggagcgaacgagggtgtttataagaatggaagtgttgtttccttgcccgattccttcatgctatatctcatgaacctctgtaatcttgggggagagactatatttaatgatgacaaacctgtcaccagtgtagcaacaacagtgtgaggacaaaagcaaataaaaattaagaagcgttcaaatttatattcaacaaggaagtcatttcaatcaacaacttctgctgcattatttttccaagatgaaccgatacacaaccatgagacagttgggggacggcacgtatgggagtgtgcttatgggcaagagtaatgaatccggggagctggtggccatcaaaaggatgaagagaaagttctattcttgggatgaatgcatgaacttgagagaagttaagtctctgaagaaacttaatcatgccaatgttattaaattgaaagaagttatcagagaaaatgaccatctttattttatatttgaatatatgaaagaaaacctctatcaattaatgaaagacagaaacaagttgttccctgaatcagtcatcagaaatattatgtatcaaatattgcaagggctggcttttatccataaacatggcttttttcatagggacatgaaaccagaaaacttgctttgtatgggtccagagcttgtgaaaattgctgattttggacttgcaagagaattaaggtcacagccaccatacactgattatgtatctaccagatggtatcgtgcccctgaagttttactgagatcttcagtttatagttctcccattgatgtgtgggctgttggaagtatcatggctgaactctatatgttaaggccacttttcccagggacaagtgaggtcgatgaaatctttaaaatttgccaagttttagggactcccaaaaaaagtgactggccagaaggataccagctggcatcctctatgaacttccgttttccccagtgtgttcctataaacttaaaaactcttattcccaatgccagtaatgaagctattcagctcatgaccgaaatgttgaattgggatccaaagaaacgaccgacagcaagccagccctgctttttagtggaagtggaaagacctaattagggagagaggttggttaagttgtagaatatgaagaccatttaaagtaccaagctgccttctgttcctctaaaaactgcccttacacatgggaggagttaactgttggtcagggctatgttcccacctatgtggggactggctaaaggcaggaggttcaggggaacagagcttgaccatcttaaggaacccatccccccaaaaatgaccagctactttgcccaggcattgaaacacccatattttcaagttggtcaggtattaggcccttcgtcaaatcatctggaatcaaaacagtctttaaataagcagctgcaaccattagaatcaaagccatctttagttgaggtagagcctaagcctctgccggatataatcgatcaggttgttggacaaccccagccaaaaactagccagcagccactgcagcccattcagccgccacagaacctgagcgtccagcaacctccaaagcaacagagtcaggagaaaccgccacaaacgctattcccgagcatcgtcaaaaacatgccaactaagccaaatggcacactgagtcataaaagtggtaggaggcgttggggtcagactatcttcaagtctggagatagctgggaagagttggaggactatgatttcggagcctcccattccaagaagccaagcatgggtgttttt

SEQ ID NO: 17020 - DNA, 2459 bp, Homo sapiens
  source 1..2459: mol_type = unassigned DNA
agggtgtttataagaatggaagtgttgtttccttgcccgattccttcatgctatatctcatgaacctctgtaatcttgggggagagactatatttaatgatgacaaacctgtcaccagtgtagcaacaacagtgtgaggacaaaagcaaataaaaattaagaagcgttcaaatttatattcaacaaggaagtcatttcaatcaacaacttctgctgcattatttttccaagatgaaccgatacacaaccatgagacagttgggggacggcacgtatgggagtgtgcttatgggcaagagtaatgaatccggggagctggtggccatcaaaaggatgaagagaaagttctattcttgggatgaatgcatgaacttgagagaagttaagtctctgaagaaacttaatcatgccaatgttattaaattgaaagaagttatcagagaaaatgaccatctttattttatatttgaatatatgaaagaaaacctctatcaattaatgaaagacagaaacaagttgttccctgaatcagtcatcagaaatattatgtatcaaatattgcaagggctggcttttatccataaacatggcttttttcatagggacatgaaaccagaaaacttgctttgtatgggtccagagcttgtgaaaattgctgattttggacttgcaagagaattaaggtcacagccaccatacactgattatgtatctaccagatggtatcgtgcccctgaagttttactgagatcttcagtttatagttctcccattgatgtgtgggctgttggaagtatcatggctgaactctatatgttaaggccacttttcccagggacaagtgaggtcgatgaaatctttaaaatttgccaagttttagggactcccaaaaaaagtgactggccagaaggataccagctggcatcctctatgaacttccgttttccccagtgtgttcctataaacttaaaaactcttattcccaatgccagtaatgaagctattcagctcatgaccgaaatgttgaattgggatccaaagaaacgaccgacagcaagccaggcattgaaacacccatattttcaagttggtcaggtattaggcccttcgtcaaatcatctggaatcaaaacagtctttaaataagcagctgcaaccattagaatcaaagccatctttagttgaggtagagcctaagcctctgccggatataatcgatcaggttgttggacaaccccagccaaaaactagccagcagccactgcagcccattcagccgccacagaacctgagcgtccagcaacctccaaagcaacagagtcaggagaaaccgccacaaacgctattcccgagcatcgtcaaaaacatgccaactaagccaaatggcacactgagtcataaaagtggtaggaggcgttggggtcagactatcttcaagtctggagatagctgggaagagttggaggactatgatttcggagcctcccattccaagaagccaagcatgggtgtttttaaagaaaaaaggaaaaaagattctccatttcgtcaacaggtgaagatggctgttatttccctctcagcacaccagtttcccacgttatgaatccaactgcagccgttgcaggacagatagaaacatgttacacacaagcttccagagccagtaccctcaggctccaaccactcgacaggggaaaacaagagcttacctgctgttacttccctaaaatctgattccgaattgtcaactgctccaacctctaaacagtactacttgaaacaatcaagatatcttccaggtgtgaatcccaagaaggtgtccttgatagccagtggaaaggaaataaacccccacacttggagcaaccagttattccccaagtcactgggacccgttggggcagaacttgctttcaaaaggagcaatgcaggaaatcttggaagttatgctacttacaatcagtcaggatatattccttcctttctcaaaaaagaagtgcagtcagctggccagaggatccacttagcacctctcaatgcaacggcttcagaatatacctggaacacaaaaactggtcgggggcagttttcaggacgtacttataatcctacagcaaaaaacctaaatattgtgaaccgtgcacagcccattccctcagtgcatgggaggacagactgggtggccaagtatggaggccaccggtaggagtctatggtgtgaaaccctacagcattgctccgtagagtacgtgcaagttccttgaccctgggaaatgtctacaaatgtctatttctactgagttctggaagaaatatgcaaaagtgggtacttggaagggcaaaaatcatcccctattttacttatttccaagaaatgcattttcttagcatcattgcccacagtgttgatatatgggtaggatgttacaaagtattgaataaactatttgccaaagt

SEQ ID NO: 17021 - DNA, 6626 bp, Homo sapiens
  source 1..6626: mol_type = unassigned DNA
gtgggattccggggccgcctgggcgctgcacccgccacttccgcatcgaaccgccgcttcaaccgaactcactccctctgcgcgcgctccatctggtgcccgactgctgggccggcgcctgggagaagccacgccctttcccgcgcctgacagccaatgagcgggcgcctcccggcggggtggtgggtaattaatgagggccgggcgctgattggctgcagcgtcgtggccgggggcagggcggcggggtaggttgttcctgaggtgggaggcggtacccgtggctgagaagaaggaggcctgagagcgacatgtccccggcggctcaggcggagcggcccgtggcgctgtttttctgagtccggggtggcctggcagccggccgaggacgagggtcggcgggggctgcccccgtggtggtggccgccatgctgggagcctgggcggttgagggaaccgctgtggcgctcctgcgactgctgctgctgctgctgccgccggcgatccggggacccgggctcggcgtggccggcgtggccggcgcggcgggggccgggctgcccgagagcgtcatttgggcggtcaacgcgggtggagaggcgcatgtggacgtgcacgggatccacttccgcaaggaccctttggaaggccgggtgggccgagcctcagactatggcatgaaactgccaatcctgcgttccaaccctgaggaccagatcctgtatcaaactgagcggtacaatgaggagacctttggctacgaagtgcccatcaaagaggagggggactacgtgctggtcttgaaatttgcagaggtctactttgcacagtcccagcaaaaggtatttgatgtacgattgaatggccacgtcgtggtgaaggacttggatatctttgatcgtgttgggcatagcacagctcacgatgaaattatacctatgagcatcagaaaggggaagctgagtgtccagggggaggtgtccaccttcacagggaaactctacattgagtttgtcaaggggtactatgacaatcccaaggtctgtgcactctacatcatggctgggacagtggatgatgtaccaaagcttcagcctcatccgggattggagaagaaagaagaggaagaagaagaagaagaatatgatgaagggtctaatctcaaaaaacagaccaataagaaccgggtgcagtcaggcccccgcacacccaacccctatgcctcggacaacagcagcctcatgtttcccatcctggtggccttcggagtcttcattccaaccctcttctgcctctgccggttgtgagaacaaatgactatcctgaacagggtggaggggtgtgggaaagaaaccagccatattggttttggtttctgtatttttcacaatgattaatgaacaaaaacaaagagaaaaaaacacacatcaattaaaggagacaaaaagaggcagagcgagtagagagcagccctcattcaccacctggtcccagacgtgcttcagtcctcgtcctctctttgtggctggctcccagccttctctttcctcttgaggatacttagggtaaactggatccttcctgctcaaggatcctcatttgtatacctagtggaaaggactctgaactcagaggagtcactgttcctttttttaggttagaaattaacagcagggaaatgccatcttattacctgagacgaccagcactgggagttaggtacggtctgaagttatgtctagataagacttcagacgtcctgggattgaaagaatgtgtgtgaaggggtagaatttgtgcggtaaagacttaaaaaaaaaagtagggagattaaaaaaaaagaaagaaaatgcttccttatctggaagcctttctggattaatccagtgatggtcccacctttagtgtttgagctttgtcattgcttgtctccctggcatgtgccagttatagactgtccagcatccaagacgtttcggttatgtcgggtcctcagatcgcctctgacttgttaccacaacaaatcattttgatttcagtgcctgttggggacttgatttcttctcagttttgtttgtttgtttgtttccttaatctggctcatttgaaatttcttctccctctcaaccatcccactaagttatagccaagaagggaaggagacacggggatttggggttctctgcttgaatgtcttctcctttaccacctcaccttgttggtacctccctccctggatctctgagccagcagccaggaggacctgacccagcagttctttactggcccctttgtagggccttgctgccagggggcagggatgctttccagcctgcagcaacagaacacttgaccttaaaagtctcttctggtctttggattagaaaaggcttatgttagcatagcttaagagcaacctcagagatttgagccctactaagtgactgaccactgtttagagtgtctggtatctgatgttcatttattcccatgttcttgtgtgtcacagttcagccagttttggtttatgcctagagctacttcaaggaactagactaattagctatataggcccagcgatgcttcttattgatcttaatagtatgcccctccttcccctgtcctttcatttctctatccaagtagcagtcaggttcttggtgtgatgggactgaaagaattccagtcagccagagccttggcagctctgaagctaaccttagcatctaagtgtcgatcttgaattccctgaaaaaatttctataggaaatgaagcttccctggtcccctcctttctggccattgtcatccatttcccagttagggcaacaatgaaggaggacccagccaagctagaaggaattttgtggatgggagacagcaggattagcttcagcttgggctggagcagtcaatataggatctcaggccaggcccgcttttctagaatgtgtttaattttgagtttgctttattagatatgttttttaagagctctgtatatttgaactgctccttatgtgacaaaataggtagctcttgggctcatgtcctgggttttggctctttaatgattactccaggccagcatttagtcgtttgagaattgtagcctgttgttttcgctgtgacttgggtctcagtgctagggtattgagtcaggcagctggagggttgtggcccgaggctgcagtcagaggtatacttcccatagtgcttcacacagctcccctgcttctaaaggataaggtactgtagccttggtcctggggaccacctgcctggggcagtggacatcctaactaaacaggcttctggcagtagctttggttcctatcccatcgaaattccccaaagccctgggccactgccattgggttagtcaagatgaaggaggaggactggctgcctccattttgccttgtttgttagtttgcctgggtctgtctgaggaaggagggggtcccgccttccacctcaacacatcccttcagtgactcagagtctcagaaggaaaccctgactcctggggccatttcctaatggtactgtaagccaagcagctttgcttctgcctctgtttccaagcccacccttttcccctgagctcagggttagggatgggcgctttcctctctggttgtgaacgaaaggaaggaacatctttctatggctaacaaaaactaaaggggaagtgaggaaacaggaagaagtatggtgggggctggggtagactcccctggagccaagcctatccagctaacaagagctccctggggctggtcacagctggctcatgatgctgaacttgaaagtttttttgtttttgtttttgttttgtggctcctccaagatataggtacatgaagtttaggttaaaggggtgggattctttatttttatttttgtattgtatgtgtcaagaattactctgttgttcaccttttgctttttgcactgtttgttctcttatctgtattttgagcttagtgctaggactgagaggctgcaccatagggaatgtatgggagatggtgaggggtgccagtgaggggtgcgtggaggagaggcctgggctcctctactggatctacactctgtcccaggtttttagatcccactgagcccagctgactgaaaacaaggacagtcagggtgaaacttcttttgccagaagtgtggcctgagttgaatttctgggaggatgacgcagatgtctgctgcagagctgggctgagagttctgcagtctagctctgacttaggtcaggggcctgttggtctctcattggacgtttttgggtctcactcatgcttactgaaacattgtgccaagaaactctgtgggatttgtgtcccttaaaccagactcacttttctgaaaaatctccattgttgaggagaggctgctcaatcgacaccccgagttctcatgactgggaagatagttttcttcaggtgtcaatggcgttagactcccaggaagactagccctgcccacagggccacctgttggtttgagagcgtgttcgtgttctcttgccctccctgcctaagagctactgggatcacgttagcgggcatttaggctttgatgagagggcacagtttgagttaggtttacctccccctttctgtgcctgggaactgtttggtccagctttagaactgtggttttgacttccttatctcttgggagaagcttctgttttaaggaatttctcttccttcttctcctgcctctagcctctcctggaaaggcctggatatggtttctaaaatctcagctgagaacttcagaaaacagcagcagtattttccttttcctagtgctaaaatccctttccctagaaattggctcaccttgggaaacccagggaaagaatcagcaggttctctgccctccctaggggttggggaaggacccaccccggtcagcacagtgccttttcctctcctgctctgagccagggtggggcattccctctagattcaggtttgggcaggggtcctatagtccctgccatggggctgcttccctgtcccttccctcccctttgctggcctactctggcataattcaagtgtcttcttgccttggggatccttagtggcatcaaatggcaacatggaatattgtcctccatgcccctccagaaggacctaggagagtaggtgagctttccaaagtgagagacgaatctttctttctttttttttttaaagggcaggatgggtatgctttgggctttctccttctgtggccccggaggaaggagagactgaggcaaggcaaagtgatagtacacggaagcagaaccggaaacacccaggaactgttcagaaatctcagaagaaatctgcttctcttcgatggaaagatataattaacgatcaaagagctctaagaaaattgcaaagaagccttaatgttcaagctttagaaagatcagagcaatttttctctttcagtccaaactaagactctctgtatttaaatctctctggggcaagagggctagatttcctcattttgttatgagactagattggtaccagtagatcagctgcctagcgagggcaggtttcttctttgcatctgtgtggcttgcttccagtctggcctgtcctttccagctgccttttgtctagcctgctatggggggccagattatcttgataagagcaggtgatttggggactagctgggttggcaggaaaagagcaggatggatctcttgggacaggttcccccaggagtataaacacaaggagccaggattgtgctggcagccaaggaaacagtagtgcctgtttgagttggcagagagggccttggcacctcttgcatccaggcagtcttgtgagatgggggcacatagcactggggaaagcagaactccattctcacctctattttgagcttcagtgctttatttcagtatgaggaaaaacaacaacaaactgaagtgcgctttccgtcctttcaaaggacaactgtcgggaagggagagccgagttgcgaggtaggaggggagcactggcagggagagacattcttgactcctctcttccctggtgtgttgtgatccagggaatgaaaagaaatttgaccctggattggttctctccttggacttaaggaatcttaccttttccttccacaaagttctcccaggcaaggaccagctgcccattctgagcccagggcagcctcttcaaccattattggtctaacctggcttgtcaggaaaccaagcccacccttccacattgggcctggctgctctattctgtaccaagtactggagaaaaagcatcaagttcttagcccttgtagcttctaccctagtttcccatcctctctctgtggaggccaaaccaactctttgccagcagccacaacatgcattgacagcggcacagtgagatataactgatgggctttgaacctggttggccggggaagctgtaggggtggatagagctggctttccttctgggctgtctccatctgaccctaccccttccatgtcccaccccactcccaccaaaaagtacaaaatcaggatgtttttcactgtccattgctttgtgttttaataaacaatttgcagtgacactctg

SEQ ID NO: 17022 - DNA, 1089 bp, Homo sapiens
  source 1..1089: mol_type = unassigned DNA
gcggggctggaggactaggcacctctgcacgtcctgccccgccggaagtggaggccgcgggctctgagcgggtgaggcgcgcgggaacaccggcgccgggattcggatgggggcgggtgggggacgctgcagctggggccatttgaggggagcccatggggcctgaaaggcatctgtcaggcgcccctgcccggatggcaacagtagttctaggaggagacaccatgggccctgagcgtatcttccccaatcagactgaggaactgggacatcagggcccttcagaaggcactggggattggagcagtgaggagcctgaggaagagcaggaggaaacggggtcgggcccagctggctactcctaccagcccctgaaccaagatcctgaacaagaggaggtggaactggcaccagtgggggatggagatgtagttgctgacatccaggatcgaatccaggccctggggcttcatttgccagacccaccattagagagtgaagatgaagatgaggagggagctacagcgttgaacaaccacagctctattcccatggacccagaacatgtagagctggtgaaaaggacaatggctggagtaagcctgcctgcgccaggggttcctgcctgggctcgggagatatcggatgcccagtgggaagatgtggtacagaaagccctccaagcccggcaggcatcccctgcctggaagtgaccacagtgagagctgccttatattcctacattccaggccagaaccagcacaggactgaacacatccctggttgtaatgtccatttccatcttccccgtctccctttccacatcaaggcacatcagacttctcagagacccactttattcagttctgtacatatggggacatcggtccaagcccaacccaccttagcatgtatcactctgtggagaataaagcaccctatgtacacagccaaaagccgcactgcctgcgcccctggaacctgggtccggccttcctcagcccctggcccctccaaggtacctataagggacaagagaaggcctgcccagcatagcacaaacaaggaaataaataggtgttggcagga

SEQ ID NO: 17023 - DNA, 3371 bp, Homo sapiens
  source 1..3371: mol_type = unassigned DNA
agtgcggccgccgccgccacagctgcagtcagcaccgtcaccccagcagcatccgccgcctgcaccgcgcgtgcggcccgccccggcctgaccccgccgccgaacccggcgccagccatggagcccgaagccccccgtcgccgccacacccatcagcgcggctacctgctgacacggaaccctcacctcaacaaggacttggcctttaccctggaagagagacagcaattgaacattcatggattgttgccaccttccttcaacagtcaggagatccaggttcttagagtagtaaaaaatttcgagcatctgaactctgactttgacaggtatcttctcttaatggatctccaagatagaaatgaaaaactcttttatagagtgctgacatctgacattgagaaattcatgcctattgtttatactcccactgtgggtctggcttgccaacaatatagtttggtgtttcggaagccaagaggtctctttattactatccacgatcgagggcatattgcttcagttctcaatgcatggccagaagatgtcatcaaggccattgtggtgactgatggagagcgtattcttggcttgggagaccttggctgtaatggaatgggcatccctgtgggtaaattggctctatatacagcttgcggagggatgaatcctcaagaatgtctgcctgtcattctggatgtgggaaccgaaaatgaggagttacttaaagatccactctacattggactacggcagagaagagtaagaggttctgaatatgatgattttttggacgaattcatggaggcagtttcttccaagtatggcatgaattgccttattcagtttgaagattttgccaatgtgaatgcatttcgtctcctgaacaagtatcgaaaccagtattgcacattcaatgatgatattcaaggaacagcatctgttgcagttgcaggtctccttgcagctcttcgaataaccaagaacaaactgtctgatcaaacaatactattccaaggagctggagaggctgccctagggattgcacacctgattgtgatggccttggaaaaagaaggtttaccaaaagagaaagccatcaaaaagatatggctggttgattcaaaaggattaatagttaagggacgtgcttccttaacacaagagaaagagaagtttgcccatgaacatgaagaaatgaagaacctagaagccattgttcaagaaataaaaccaactgccctcataggagttgctgcaattggtggtgcattctcagaacaaattctcaaagatatggctgccttcaatgaacggcctattatttttgctttgagtaatccaactagcaaagcagaatgttctgcagagcagtgctacaaaataaccaagggacgtgcaatttttgccagtggcagtccttttgatccagtcactcttccaaatggacagaccctatatcctggccaaggcaacaattcctatgtgttccctggagttgctcttggtgttgtggcgtgtggattgaggcagatcacagataatattttcctcactactgctgaggttatagctcagcaagtgtcagataaacacttggaagagggtcggctttatcctcctttgaataccattagagatgtttctctgaaaattgcagaaaagattgtgaaagatgcataccaagaaaagacagccacagtttatcctgaaccgcaaaacaaagaagcatttgtccgctcccagatgtatagtactgattatgaccagattctacctgattgttattcttggcctgaagaggtgcagaaaatacagaccaaagttgaccagtaggataatagcaaacatttctaactctattaatgaggtctttaaacctttcataatttttaaaggttggaatcttttataatgattcataagacacttagattaagattttactttaacagtctaaaaattgatagaagaatatcgatataaattgggataaacatcacatgagacaattttgcttcactttgccttctggttatttatggtttctgtctgaattattctgcctacgttctctttaaaagctgttgtacgtactacggagaaactcatcatttttatacaggacactaatgggaagaccaaaattactaataaattgacataaccaacattaaaactcataattattttgttgaccattttgttaaaatctacttttcaaaaaaaaaaagctagaaatgaatctaggcgtaggtgaacttttgctaagcagaaataacactactttgttgcctagagaaagataacttctcaagtatttttattccagtcctagatcatatatgttcttttgtgcaacggaattctaacagttctaagagaaagatcactgctgtttacagcgccttgtgcagccttagattttaatattcttttgtcattgttacatctcatagagtaaagctcttattaccttgatcctgagtcagaaatcccacctgaaatcaccttttttcccccttgatcaaacatcccatccttcagctaccatactgttgctacagggattttgtggactgtggcccctgtcctgaggttggcaccttcagttcagcacagcctgagcagtgagaaggtctgaaaggagagtatatagttaagatccttgagaaagggctgcctgaggaactgacctcttaaagatctcaggatctttaagacaacaagttaggttcctactggagttacctgccagaatggcctcttaattaactcaggtaatgaagagctaactgtgttataatcatcttgcttttgcctgaatttggagaaagtattataattaagttcccagtatcagaaatgtccttacataagattaaaatatcttgatgactaataccattctatgagaaagagtagttatatgcccagactgtattaatttactttagaaactaatgtttgaagtaatggaaaaaattttaaattataaagctaaggtgcaataacatttgctacttatttatagaattatttgaagaattttgtttttgaagtaatgctttaaggagtataagatattcaagataaattatactataaaatgattttattgaaagttgaaggttacacaaattgttttaggtatgagcagaagaggttaaggtatttctaaaggtaacatatagtcaagagtttcctcaaaatagttatttggagaagaatcagaatgtctgtgtatttcttgtctgtttctatgttgtcttatagctctgactaaatgtgtttacctatgcaaaagatttattaaagcatagaaaaggtgaatgaataaaaatataaaataattgtcctttttcttaaaa

SEQ ID NO: 17024 - DNA, 2234 bp, Homo sapiens
  source 1..2234: mol_type = unassigned DNA
gtaaaaggacgtgcttccttaacacaagagaaagagaagtttgcccatgaacatgaagaaatgaagaacctagaagccattgttcaagaaataaaaccaactgccctcataggagttgctgcaattggtggtgcattctcagaacaaattctcaaagatatggctgccttcaatgaacggcctattatttttgctttgagtaatccaactagcaaagcagaatgttctgcagagcagtgctacaaaataaccaagggacgtgcaatttttgccagtggcagtccttttgatccagtcactcttccaaatggacagaccctatatcctggccaaggcaacaattcctatgtgttccctggagttgctcttggtgttgtggcgtgtggattgaggcagatcacagataatattttcctcactactgctgaggttatagctcagcaagtgtcagataaacacttggaagagggtcggctttatcctcctttgaataccattagagatgtttctctgaaaattgcagaaaagattgtgaaagatgcataccaagaaaagacagccacagtttatcctgaaccgcaaaacaaagaagcatttgtccgctcccagatgtatagtactgattatgaccagattctacctgattgttattcttggcctgaagaggtgcagaaaatacagaccaaagttgaccagtaggataatagcaaacatttctaactctattaatgaggtctttaaacctttcataatttttaaaggttggaatcttttataatgattcataagacacttagattaagattttactttaacagtctaaaaattgatagaagaatatcgatataaattgggataaacatcacatgagacaattttgcttcactttgccttctggttatttatggtttctgtctgaattattctgcctacgttctctttaaaagctgttgtacgtactacggagaaactcatcatttttatacaggacactaatgggaagaccaaaattactaataaattgacataaccaacattaaaactcataattattttgttgaccattttgttaaaatctacttttcaaaaaaaaaaagctagaaatgaatctaggcgtaggtgaacttttgctaagcagaaataacactactttgttgcctagagaaagataacttctcaagtatttttattccagtcctagatcatatatgttcttttgtgcaacggaattctaacagttctaagagaaagatcactgctgtttacagcgccttgtgcagccttagattttaatattcttttgtcattgttacatctcatagagtaaagctcttattaccttgatcctgagtcagaaatcccacctgaaatcaccttttttcccccttgatcaaacatcccatccttcagctaccatactgttgctacagggattttgtggactgtggcccctgtcctgaggttggcaccttcagttcagcacagcctgagcagtgagaaggtctgaaaggagagtatatagttaagatccttgagaaagggctgcctgaggaactgacctcttaaagatctcaggatctttaagacaacaagttaggttcctactggagttacctgccagaatggcctcttaattaactcaggtaatgaagagctaactgtgttataatcatcttgcttttgcctgaatttggagaaagtattataattaagttcccagtatcagaaatgtccttacataagattaaaatatcttgatgactaataccattctatgagaaagagtagttatatgcccagactgtattaatttactttagaaactaatgtttgaagtaatggaaaaaattttaaattataaagctaaggtgcaataacatttgctacttatttatagaattatttgaagaattttgtttttgaagtaatgctttaaggagtataagatattcaagataaattatactataaaatgattttattgaaagttgaaggttacacaaattgttttaggtatgagcagaagaggttaaggtatttctaaaggtaacatatagtcaagagtttcctcaaaatagttatttggagaagaatcagaatgtctgtgtatttcttgtctgtttctatgttgtcttatagctctgactaaatgtgtttacctatgcaaaagatttattaaagcatagaaaaggtgaatgaataaaaatataaaataattgtcctttttcttaaaa

SEQ ID NO: 17025 - DNA, 1872 bp, Homo sapiens
  source 1..1872: mol_type = unassigned DNA
agtcagcaccgtcaccccagcagcatccgccgcctgcaccgcgcgtgcggcccgccccggcctgaccccgccgccgaacccggcgccagccatggagcccgaagccccccgtcgccgccacacccatcagcgcggctacctgctgacacggaaccctcacctcaacaagaggtctctttattactatccacgatcgagggcatattgcttcagttctcaatgcatggccagaagatgtcatcaaggccattgtggtgactgatggagagcgtattcttggcttgggagaccttggctgtaatggaatgggcatccctgtgggtaaattggctctatatacagcttgcggagggatgaatcctcaagaatgtctgcctgtcattctggatgtgggaaccgaaaatgaggagttacttaaagatccactctacattggactacggcagagaagagtaagaggttctgaatatgatgattttttggacgaattcatggaggcagtttcttccaagtatggcatgaattgccttattcagtttgaagattttgccaatgtgaatgcatttcgtctcctgaacaagtatcgaaaccagtattgcacattcaatgatgatattcaaggaacagcatctgttgcagttgcaggtctccttgcagctcttcgaataaccaagaacaaactgtctgatcaaacaatactattccaaggagctggagaggctgccctagggattgcacacctgattgtgatggccttggaaaaagaaggtttaccaaaagagaaagccatcaaaaagatatggctggttgattcaaaaggattaatagttaagggacgtgcttccttaacacaagagaaagagaagtttgcccatgaacatgaagaaatgaagaacctagaagccattgttcaagaaataaaaccaactgccctcataggagttgctgcaattggtggtgcattctcagaacaaattctcaaagatatggctgccttcaatgaacggcctattatttttgctttgagtaatccaactagcaaagcagaatgttctgcagagcagtgctacaaaataaccaagggacgtgcaatttttgccagtggcagtccttttgatccagtcactcttccaaatggacagaccctatatcctggccaaggcaacaattcctatgtgttccctggagttgctcttggtgttgtggcgtgtggattgaggcagatcacagataatattttcctcactactgctgaggttatagctcagcaagtgtcagataaacacttggaagagggtcggctttatcctcctttgaataccattagagatgtttctctgaaaattgcagaaaagattgtgaaagatgcataccaagaaaagacagccacagtttatcctgaaccgcaaaacaaagaagcatttgtccgctcccagatgtatagtactgattatgaccagattctacctgattgttattcttggcctgaagaggtgcagaaaatacagaccaaagttgaccagtaggataatagcaaacatttctaactctattaatgaggtctttaaacctttcataatttttaaaggttggaatcttttataatgattcataagacacttagattaagattttactttaacagtctaaaaattgatagaagaatatcgatataaattgggataaacatcacatgagacaattttgcttcactttgccttctggttatttatggtttctgtctgaattattctgcctacgttctctttaaaagctgttgtacgtactacggagaaactcatcatttttatacaggacactaatgggaagaccaaaattactaataaattgacataaccaacattaaaactc

SEQ ID NO: 17026 - DNA, 1928 bp, Homo sapiens
  source 1..1928: mol_type = unassigned DNA
ctttcccagtgcggccgccgccgccacagctgcagtcagcaccgtcaccccagcagcatccgccgcctgcaccgcgcgtgcggcccgccccggcctgaccccgccgccgaacccggcgccagccatggagcccgaagccccccgtcgccgccacacccatcagcgcggctacctgctgacacggaaccctcacctcaacaaggtatcttctcttaatggatctccaagatagaaatgaaaaactcttttatagagtgctgacatctgacattgagaaattcatgcctattgtttatactcccactgtgggtctggcttgccaacaatatagtttggtgtttcggaagccaagaggtctctttattactatccacgatcgagggcatattgcttcagttctcaatgcatggccagaagatgtcatcaaggccattgtggtgactgatggagagcgtattcttggcttgggagaccttggctgtaatggaatgggcatccctgtgggtaaattggctctatatacagcttgcggagggatgaatcctcaagaatgtctgcctgtcattctggatgtgggaaccgaaaatgaggagttacttaaagatccactctacattggactacggcagagaagagtaagaggttctgaatatgatgattttttggacgaattcatggaggcagtttcttccaagtatggcatgaattgccttattcagtttgaagattttgccaatgtgaatgcatttcgtctcctgaacaagtatcgaaaccagtattgcacattcaatgatgatattcaaggaacagcatctgttgcagttgcaggtctccttgcagctcttcgaataaccaagaacaaactgtctgatcaaacaatactattccaaggagctggagaggctgccctagggattgcacacctgattgtgatggccttggaaaaagaaggtttaccaaaagagaaagccatcaaaaagatatggctggttgattcaaaaggattaatagttaagggacgtgcttccttaacacaagagaaagagaagtttgcccatgaacatgaagaaatgaagaacctagaagccattgttcaagaaataaaaccaactgccctcataggagttgctgcaattggtggtgcattctcagaacaaattctcaaagatatggctgccttcaatgaacggcctattatttttgctttgagtaatccaactagcaaagcagaatgttctgcagagcagtgctacaaaataaccaagggacgtgcaatttttgccagtggcagtccttttgatccagtcactcttccaaatggacagaccctatatcctggccaaggcaacaattcctatgtgttccctggagttgctcttggtgttgtggcgtgtggattgaggcagatcacagataatattttcctcactactgctgaggttatagctcagcaagtgtcagataaacacttggaagagggtcggctttatcctcctttgaataccattagagatgtttctctgaaaattgcagaaaagattgtgaaagatgcataccaagaaaagacagccacagtttatcctgaaccgcaaaacaaagaagcatttgtccgctcccagatgtatagtactgattatgaccagattctacctgattgttattcttggcctgaagaggtgcagaaaatacagaccaaagttgaccagtaggataatagcaaacatttctaactctattaatgaggtctttaaacctttcataatttttaaaggttggaatcttttataatgattcataagacacttagattaagattttactttaacagtctaaaaattgatagaagaatatcgatataaattgggataaacatcacatgagacaattttgcttcactttgccttctggttatttatggtttctgtctg

SEQ ID NO: 17027 - DNA, 3164 bp, Homo sapiens
  source 1..3164: mol_type = unassigned DNA
cccgtccgtctccaccgtgggccacgccttccgggccccgcggctggccggctcctcgcgccctcccctctctcggccgctcttcgggccgcctctgcgtgtggggccgcccgcgccagtgtgagcctgagctgacggcggctccgggaggctcgcagaaggggagggccgggcggcgcgggagctgagcatcgccagggcgggcggcagggcgcggcctctccgccgggtgtaccacctgtcgcggcgcgagacctctggtgaaagaaaagatgttgtcccggttaagagtagtttccaccacttgtactttggcatgtcgacatttgcacataaaagaaaaaggcaagccacttatgctgaacccaagaacaaacaagggaatggcatttactttacaagaacgacaaatgcttggtcttcaaggacttctacctcccaaaatagagacacaagatattcaagccttacgatttcatagaaacttgaagaaaatgactagccctttggaaaaatatatctacataatgggaatacaagaaagaaatgagaaattgttttatagaatactgcaagatgacattgagagtttaatgccaattgtatatacaccgacggttggtcttgcctgctcccagtatggacacatctttagaagacctaagggattatttatttcgatctcagacagaggtcatgttagatcaattgtggataactggccagaaaatcatgttaaggctgttgtagtgactgatggagagagaattctgggtcttggagatctgggtgtctatggaatgggaattccagtaggaaaactttgtttgtatacagcttgtgcaggaatacggcctgatagatgcctgccagtgtgtattgatgtgggaactgataatatcgcactcttaaaagacccattttacatgggcttgtaccagaaacgagatcgcacacaacagtatgatgacctgattgatgagtttatgaaagctattactgacagatatggccggaacacactcattcagttcgaagactttggaaatcataatgcattcaggttcttgagaaagtaccgagaaaaatattgtactttcaatgatgatattcaagggacagctgcagtagctctagcaggtcttcttgcagcacaaaaagttattagtaaaccaatctccgaacacaaaatcttattccttggagcaggagaggctgctcttggaattgcaaatcttatagttatgtctatggtagaaaatggcctgtcagaacaagaggcacaaaagaaaatctggatgtttgacaagtatggtttattagttaagggacggaaagcaaaaatagatagttatcaggaaccatttactcactcagccccagagagcatacctgatacttttgaagatgcagtgaatatactgaagccttcaactataattggagttgcaggtgctggccgtcttttcactcctgatgtaatcagagccatggcctctatcaatgaaaggcctgtaatatttgcattaagtaatcctacagcacaggcagagtgcacggctgaagaagcatatacacttacagagggcaggtgtttgtttgccagtggcagtccatttgggccagtgaaacttacagatgggcgagtctttacaccaggtcaaggaaacaatgtttatatttttccaggtgtggctttagctgttattctctgtaacacccggcatattagtgacagtgttttcctagaagctgcaaaggccctgacaagccaattgacagatgaagagctagcccaagggagactttacccaccgcttgctaatattcaggaagtttctattaacattgctattaaagttacagaatacctatatgctaataaaatggctttccgatacccagaacctgaagacaaggccaaatatgttaaagaaagaacatggcggagtgaatatgattccctgctgccagatgtgtatgaatggccagaatctgcatcaagccctcctgtgataacagaatagaagcactcccctgataaatactttctgtgctccagggaaccccttttttcagacaagaagagataatgtcttcagttttatggtgttttctgtgttttgttctccctgaccactttggttgatgtattttttccatgcgtctccacatctgttggggtagacgtgttgattgattgcattgcccaccagcaccctacagtcagatagttgtgatgctttaattctaacatacagcccgtaccacatccaggagatgtaaaaagtgtgtttgtgaatgtcttcacttgtactctaattcagacttgccaaagtatttgctatttactattatgggtaatactcttctctggcctagttcttacagagctactaaaatagaaatttacttttatggatagaagtacagaattttgagaagaaactaaattttcaccaaattttaaggaaaaattgtcattatctaaaaatgttcttatatatctgcttcatcttaccttcatactctgaaattccctatagcagacagagctagggaaatattaaaaatttaccctatttattttctggaactaaatcaagccttaactataacattatgagagtaatgggaactactgctggctttaagtaaataaaagtcattgttttcaacagtgtataaaaatcatagtgtaacctttttatttaataaatatcttacatttaattgcttcagttatgctatcttattgcccaactagaaatttagatttgcttatgaaaaacacatatttttgttacttctagatgattctaggagggagtataagatacctaatcatatgggaacatcacgtgactttttaaatctaaattagtcatgcttcacatcaaaatgagtcatatttaactggagaaactatgcccttattccagaactgatgctctttattgcttgagataattttggaatgttactatgatactgtttctttgaatatcattagtagtgacaactctttctccattgaaggcagacttaatttttttaaaccaccaacattaatttagagctaaatggggatgaataaggttggtgttcatctgggaaatgccttttttaatcccagtaaaatgggtaataatggctatccagaa

SEQ ID NO: 17028 - DNA, 4450 bp, Homo sapiens
  source 1..4450: mol_type = unassigned DNA
accgtgggccacgccttccgggccccgcggctggccggctcctcgcgccctcccctctctcggccgctcttcgggccgcctctgcgtgtggggccgcccgcgccagtgtgagcctgagctgacggcggctccgggaggctcgcagaaggggagggccgggcggcgcgggagctgagcatcgccagggcgggcggcagggcgcggcctctccgccgggtgtaccacctgtcgcggcgcgagacctctggtgaaagaaaagatgttgtcccggttaagagtagtttccaccacttgtactttggcatgtcgacatttgcacataaaagaaaaaggcaagccacttatgctgaacccaagaacaaacaagggaatggcatttactttacaagaacgacaaatgcttggtcttcaaggacttctacctcccaaaatagagacacaagatattcaagccttacgatttcatagaaacttgaagaaaatgactagccctttggaaaaatatatctacataatgggaatacaagaaagaaatgagaaattgttttatagaatactgcaagatgacattgagagtttaatgccaattgtatatacaccgacggttggtcttgcctgctcccagtatggacacatctttagaagacctaagggattatttatttcgatctcagacagaggtcatgttagatcaattgtggataactggccagaaaatcatgttaaggctgttgtagtgactgatggagagagaattctgggtcttggagatctgggtgtctatggaatgggaattccagtaggaaaactttgtttgtatacagcttgtgcaggaatacggcctgatagatgcctgccagtgtgtattgatgtgggaactgataatatcgcactcttaaaagacccattttacatgggcttgtaccagaaacgagatcgcacacaacagtatgatgacctgattgatgagtttatgaaagctattactgacagatatggccggaacacactcattcagttcgaagactttggaaatcataatgcattcaggttcttgagaaagtaccgagaaaaatattgtactttcaatgatgatattcaagggacagctgcagtagctctagcaggtcttcttgcagcacaaaaagttattagtaaaccaatctccgaacacaaaatcttattccttggagcaggagaggctgctcttggaattgcaaatcttatagttatgtctatggtagaaaatggcctgtcagaacaagaggcacaaaagaaaatctggatgtttgacaagtatggtttattagttaagggacggaaagcaaaaatagatagttatcaggaaccatttactcactcagccccagagagcatacctgatacttttgaagatgcagtgaatatactgaagccttcaactataattggagttgcaggtgctggccgtcttttcactcctgatgtaatcagagccatggcctctatcaatgaaaggcctgtaatatttgcattaagtaatcctacagcacaggcagagtgcacggctgaagaagcatatacacttacagagggcaggtgtttgtttgccagtggcagtccatttgggccagtgaaacttacagatgggcgagtctttacaccaggtcaaggaaacaatgtttatatttttccaggttacagaatacctatatgctaataaaatggctttccgatacccagaacctgaagacaaggccaaatatgttaaagaaagaacatggcggagtgaatatgattccctgctgccagatgtgtatgaatggccagaatctgcatcaagccctcctgtgataacagaatagaagcactcccctgataaatactttctgtgctccagggaaccccttttttcagacaagaagagataatgtcttcagttttatggtgttttctgtgttttgttctccctgaccactttggttgatgtattttttccatgcgtctccacatctgttggggtagacgtgttgattgattgcattgcccaccagcaccctacagtcagatagttgtgatgctttaattctaacatacagcccgtaccacatccaggagatgtaaaaagtgtgtttgtgaatgtcttcacttgtactctaattcagacttgccaaagtatttgctatttactattatgggtaatactcttctctggcctagttcttacagagctactaaaatagaaatttacttttatggatagaagtacagaattttgagaagaaactaaattttcaccaaattttaaggaaaaattgtcattatctaaaaatgttcttatatatctgcttcatcttaccttcatactctgaaattccctatagcagacagagctagggaaatattaaaaatttaccctatttattttctggaactaaatcaagccttaactataacattatgagagtaatgggaactactgctggctttaagtaaataaaagtcattgttttcaacagtgtataaaaatcatagtgtaacctttttatttaataaatatcttacatttaattgcttcagttatgctatcttattgcccaactagaaatttagatttgcttatgaaaaacacatatttttgttacttctagatgattctaggagggagtataagatacctaatcatatgggaacatcacgtgactttttaaatctaaattagtcatgcttcacatcaaaatgagtcatatttaactggagaaactatgcccttattccagaactgatgctctttattgcttgagataattttggaatgttactatgatactgtttctttgaatatcattagtagtgacaactctttctccattgaaggcagacttaatttttttaaaccaccaacattaatttagagctaaatggggatgaataaggttggtgttcatctgggaaatgccttttttaatcccagtaaaatgggtaataatggctatccagaacagttttcttgtgtggcttgcatattgaagaattctaaaggaaaatatatctgcctaccatgcttgctcttagggaagaaaacttaaatgctcattctaggatagtaacaacaacagataattcatcgataatatgagcatgcacagtatttgatattgctctgtaggaaaaaagagacttcatttttttcatcttctgcctatgaatacaaattgattctttttttttttttttttttttgagacagagtctcactctgttaccaggctggagtgcagtggtgtgatctcagctcactgcaacctctgcctcccaggttcaagcagttctcctgcctcagcctcccaagtagctgggactacaggtacacgccaccacgcccagctaatttttgtatttttagtagagacgggatttcaccatgttggccaggagggtctcgatttcctgacctcgcgatccgcccacctcagccttccaaagtgctgggattacaggcgtgagccaccgcacccagccaattttttttttttttttttttgagacagagtctcgcttttgtcgcccagtctggagtgtagtggcatgatctctgcaacctctgcctcctcggttcaggcgattcttctgccttagcctcccaagtagctgggattacaggcaccggccaccacacccagctaatttttgtatttttagtagagatggggtttcaccatgttggccaggctggtctcaaaatcctgacttcaggtgatccacccactttggcctcccaaagtgctgggattacaggcgtgagccaccacacctggtccaattcatcataattctgaatataatttaataattttaaaatggtcgcaatggcattgccatttggagtatgggaaaatgcagttggttaattcattgaacagattagtaaagtcagaagtctttttcataacatacggtcacaattcctttcttttaattaaagacaaaaggtttatgggttttggtttgtttgttttagatatggggttttgctatgtcacccttgctggagggcggtggctgttcacaggcgtgggtcatagagcactgcagcctggaactcctgggttcaagctctcctcctgcctcagcctcctgagcagcttggactaaaggtgtgcaccaccgcacctggctgagaggcttctgtttttcatgttccctttatcaaaacaaaatcacgcctaaacatactctctgtgtgaaatcttgattttagttcaacctaagaaatataataaatataaacctgtttcttgcttagtgtttattgaaggcaggaacgtatgctgaattaaagtaattttactacgaagtttgcttattaagtatgcctggtacagtcttcatggaagttattaagtattttaaggaaaaaaataggctaaatggcatatagcctgcttaaataaaataattctattttttt

SEQ ID NO: 17029 - DNA, 780 bp, Homo sapiens
  source 1..780: mol_type = unassigned DNA
atggcctttacccttgaagaaaggctgcagcttggaatccacggcctaatcccgccctgctttctgagccaggacgtccagctcctccgaatcatgagatattacgagcggcagcagagtgacctggacaagtacatcattctcatgacactccaagaccggaacgagaagctcttctaccgagtgctgacttcggacgtggagaagttcatgccaatcgtgtacacgcctaccgtggggctggcctgtcagcactatggcctgactttccgcaggccccgtggactgttcatcaccattcatgacaaaggtcatcttgcaacaatgctgaattcttggccagaagacaatattaaggccgtggtggtgactgatggggagcgcatcctgggcctgggagacctgggctgctacggcatgggcatccctgtgggcaagctggccctgtacacggcatgcggaggggtgaacccgcagcagtgcctccctgtgctgctggacgtcggcaccaacaatgaggagctgctcagagaccctctgtacatcggcctgaaacaccagcgcgtgcacgggaaggcatacgatgacttgctggatgagttcatgcaggctgtgacagacaagtttggaataaattgcctcatccaatttgaagacttcgccaatgccaatgccttccgcctgctcaacaaataccgtaacaagtactgcatgttcaatgatgacatccaagatgacttctccagaggcccaaagaggtcacaacttttcttcaagtga

SEQ ID NO: 17030 - DNA, 2088 bp, Homo sapiens
  source 1..2088: mol_type = unassigned DNA
gctcctcaccccgcctgctccgcagcgggaccgcgtagacctcagctccccgagcagcgcaggtgggccagggaaggagaggaccgaggtctgccaaggaccatgggtgccgcgctggggacaggcacgcggctggctccctggccgggccgggcctgcggcgccctcccgcgctggacacccaccgcgcccgcccaaggctgccactccaagcctggcccggcgcgccctgtgcccctgaagaagcgcggatacgatgtcaccaggaaccctcatctcaacaaggggatggcctttacccttgaagaaaggctgcagcttggaatccacggcctaatcccgccctgctttctgagccaggacgtccagctcctccgaatcatgagatattacgagcggcagcagagtgacctggacaagtacatcattctcatgacactccaagaccggaacgagaagctcttctaccgagtgctgacttcggacgtggagaagttcatgccaatcgtgtacacgcctaccgtggggctggcctgtcagcactatggcctgactttccgcaggccccgtggactgttcatcaccattcatgacaaaggtcatcttgcaacaatgctgaattcttggccagaagacaatattaaggccgtggtggtgactgatggggagcgcatcctgggcctgggagacctgggctgctacggcatgggcatccctgtgggcaagctggccctgtacacggcatgcggaggggtgaacccgcagcagtgcctccctgtgctgctggacgtcggcaccaacaatgaggagctgctcagagaccctctgtacatcggcctgaaacaccagcgcgtgcacgggaaggcatacgatgacttgctggatgagttcatgcaggctgtgacagacaagtttggaataaattgcctcatccaatttgaagacttcgccaatgccaatgccttccgcctgctcaacaaataccgtaacaagtactgcatgttcaatgatgacatccaaggcacagcctccgttgctgtggcagggatcttggctgctctgcgaatcaccaagaacaagctttccaatcacgtgtttgttttccaaggtgcaggcgaggcagctatgggcattgcccacctccttgtcatggccctagagaaagaaggtgtaccgaaggcagaggccacaagaaagatctggatggtggactctaaagggctcattgtcaaggggaggagccacctgaaccatgaaaaggagatgtttgcccaagaccatcctgaagtcaactccctggaggaggtggtgaggctggtgaagcccacagccatcataggtgttgctgccatcgcaggagccttcacggagcagattctgagggacatggcctccttccacgagcgccctatcatctttgccctgagcaaccccaccagcaaggccgagtgcacggctgagaagtgctaccgggtcaccgagggccgagggatttttgccagtggaagtccttttaagagtgtgactctggaagatggcaagaccttcattcctgggcagggaaacaatgcttacgtgttccccggggtggcactgggagtcatcgccggcgggatccggcacatcccagatgagatcttcctcctgacagcagagcaaattgcccaggaagtctctgagcagcatctgtcccaggggagactctacccaccactcagcaccatccgagacgtgtctttgagaattgccatcaaagttctcgactacgcgtacaaacacaacctggcttcctactacccagagcctaaggacaaggaggcttttgtaagatccctggtctacactccagactatgactcctttacactggacagctacacttggcccaaggaagccatgaatgttcagacggtctgaggcagtctcagaggctagtatggggctagatgaagcccagagtaacacccacaatataaatgggttccaaaatggcccaagtgaatccttgtcgctgtgttttttcttttaaactttctggtgtgagaggagatgccaaggcatacagtgaataaaagccttgtctctgaa

SEQ ID NO: 17031 - DNA, 2154 bp, Homo sapiens
  source 1..2154: mol_type = unassigned DNA
caccggatctgcttccagggcttggtttcgctttgcctggctcttggctaggcctggcgccccgcgcggagccgagcaggtggcagccgaggagtggcgggggctggaacatttaaccctttgggagcacctgccctctcccagagggcgcgtccccggatcaggcccggtgccccgcagcgcgcgtgggtcctggctggctggaaggaggccctgaccttgctttctctcccgtgccaggtctgccaaggaccatgggtgccgcgctggggacaggcacgcggctggctccctggccgggccgggcctgcggcgccctcccgcgctggacacccaccgcgcccgcccaaggctgccactccaagcctggcccggcgcgccctgtgcccctgaagaagcgcggatacgatgtcaccaggaaccctcatctcaacaaggggatggcctttacccttgaagaaaggctgcagcttggaatccacggcctaatcccgccctgctttctgagccaggacgtccagctcctccgaatcatgagatattacgagcggcagcagagtgacctggacaagtacatcattctcatgacactccaagaccggaacgagaagctcttctaccgagtgctgacttcggacgtggagaagttcatgccaatcgtgtacacgcctaccgtggggctggcctgtcagcactatggcctgactttccgcaggccccgtggactgttcatcaccattcatgacaaaggtcatcttgcaacaatgctgaattcttggccagaagacaatattaaggccgtggtggtgactgatggggagcgcatcctgggcctgggagacctgggctgctacggcatgggcatccctgtgggcaagctggccctgtacacggcatgcggaggggtgaacccgcagcagtgcctccctgtgctgctggacgtcggcaccaacaatgaggagctgctcagagaccctctgtacatcggcctgaaacaccagcgcgtgcacgggaaggcatacgatgacttgctggatgagttcatgcaggctgtgacagacaagtttggaataaattgcctcatccaatttgaagacttcgccaatgccaatgccttccgcctgctcaacaaataccgtaacaagtactgcatgttcaatgatgacatccaaggcacagcctccgttgctgtggcagggatcttggctgctctgcgaatcaccaagaacaagctttccaatcacgtgtttgttttccaaggtgcaggcgaggcagctatgggcattgcccacctccttgtcatggccctagagaaagaaggtgtaccgaaggcagaggccacaagaaagatctggatggtggactctaaagggctcattgtcaaggggaggagccacctgaaccatgaaaaggagatgtttgcccaagaccatcctgaagtcaactccctggaggaggtggtgaggctggtgaagcccacagccatcataggtgttgctgccatcgcaggagccttcacggagcagattctgagggacatggcctccttccacgagcgccctatcatctttgccctgagcaaccccaccagcaaggccgagtgcacggctgagaagtgctaccgggtcaccgagggccgagggatttttgccagtggaagtccttttaagagtgtgactctggaagatggcaagaccttcattcctgggcagggaaacaatgcttacgtgttccccggggtggcactgggagtcatcgccggcgggatccggcacatcccagatgagatcttcctcctgacagcagagcaaattgcccaggaagtctctgagcagcatctgtcccaggggagactctacccaccactcagcaccatccgagacgtgtctttgagaattgccatcaaagttctcgactacgcgtacaaacacaacctggcttcctactacccagagcctaaggacaaggaggcttttgtaagatccctggtctacactccagactatgactcctttacactggacagctacacttggcccaaggaagccatgaatgttcagacggtctgaggcagtctcagaggctagtatggggctagatgaagcccagagtaacacccacaatataaatgggttccaaaatggcccaagtgaa

SEQ ID NO: 17032 - DNA, 2069 bp, Homo sapiens
  source 1..2069: mol_type = unassigned DNA
aaacgcaaatccccctctgtgcatttagtcttgccaagatggagagtctcaggcgggcattctgagctgcttcttgtcactggggaaaaccacgtgcacgcagtgctgaggcgccccacgcgcgtcctcaggggaagccaggcactgagaacaaaggttgtgggaccgctctttgaggaactcaccagctccgcgagctcgcggccgccagcgcggtccacccattggcgggagaggactcacagaccgcagctcctcaccccgcctgctccgcagcgggaccgcgtagacctcagctccccgagcagcgcaggtctgccaaggaccatgggtgccgcgctggggacaggcacgcggctggctccctggccgggccgggcctgcggcgccctcccgcgctggacacccaccgcgcccgcccaaggctgccactccaagcctggcccggcgcgccctgtgcccctgaagaagcgcggatacgatgtcaccaggaaccctcatctcaacaaggggatggcctttacccttgaagaaaggctgcagcttggaatccacggcctaatcccgccctgctttctgagccaggacgtccagctcctccgaatcatgagatattacgagcggcagcagagtgacctggacaagtacatcattctcatgacactccaagaccggaacgagaagctcttctaccgagtgctgacttcggacgtggagaagttcatgccaatcgtgtacacgcctaccgtggggctggcctgtcagcactatggcctgactttccgcaggccccgtggactgttcatcaccattcatgacaaaggtcatcttgcaacaatgctgaattcttggccagaagacaatattaaggccgtggtggtgactgatggggagcgcatcctgggcctgggagacctgggctgctacggcatgggcatccctgtgggcaagctggccctgtacacggcatgcggaggggtgaacccgcagcagtgcctccctgtgctgctggacgtcggcaccaacaatgaggagctgctcagagaccctctgtacatcggcctgaaacaccagcgcgtgcacgggaaggcatacgatgacttgctggatgagttcatgcaggctgtgacagacaagtttggaataaattgcctcatccaatttgaagacttcgccaatgccaatgccttccgcctgctcaacaaataccgtaacaagtactgcatgttcaatgatgacatccaaggcacagcctccgttgctgtggcagggatcttggctgctctgcgaatcaccaagaacaagctttccaatcacgtgtttgttttccaaggtgcaggcgaggcagctatgggcattgcccacctccttgtcatggccctagagaaagaaggtgtaccgaaggcagaggccacaagaaagatctggatggtggactctaaagggctcattgtcaaggggaggagccacctgaaccatgaaaaggagatgtttgcccaagaccatcctgaagtcaactccctggaggaggtggtgaggctggtgaagcccacagccatcataggtgttgctgccatcgcaggagccttcacggagcagattctgagggacatggcctccttccacgagcgccctatcatctttgccctgagcaaccccaccagcaaggccgagtgcacggctgagaagtgctaccgggtcaccgagggccgagggatttttgccagtggaagtccttttaagagtgtgactctggaagatggcaagaccttcattcctgggcagggaaacaatgcttacgtgttccccggggtggcactgggagtcatcgccggcgggatccggcacatcccagatgagatcttcctcctgacagcagagcaaattgcccaggaagtctctgagcagcatctgtcccaggggagactctacccaccactcagcaccatccgagacgtgtctttgagaattgccatcaaagttctcgactacgcgtacaaacacaacctggcttcctactacccagagcctaaggacaaggaggcttttgtaagatccctggtctacac

SEQ ID NO: 17033 - DNA, 1776 bp, Homo sapiens
  source 1..1776: mol_type = unassigned DNA
aaacgcaaatccccctctgtgcatttagtcttgccaagatggagagtctcaggcgggcattctgagctgcttcttgtcactggggaaaaccacgtgcacgcagtgctgaggcgccccacgcgcgtcctcaggggaagccaggcactgagaacaaaggttgtgggaccgctctttgaggaactcaccagctccgcgagctcgcggccgccagcgcggtccacccattggcgggagaggactcacagaccgcagctcctcaccccgcctgctccgcagcgggaccgcgtagacctcagctccccgagcagcgcaggtctgccaaggaccatgggtgccgcgctggggacaggcacgcggctggctccctggccgggccgggcctgcggcgccctcccgcgctggacacccaccgcgcccgcccaaggctgccactccaagcctggcccggcgcgccctgtgcccctgaagaagcgcggatacgatgtcaccaggaaccctcatctcaacaaggggatggcctttacccttgaagaaaggctgcagcttggaatccacggcctaatcccgccctgctttctgagccaggacgtccagctcctccgaatcatgagatattacgagcggcagcagagtgacctggacaagtacatcattctcatgacactccaagaccggaacgagaagctcttctaccgagtgctgacttcggacgtggagaagttcatgccaatcgtgtacacgcctaccgtggggctggcctgtcagcactatggcctgactttccgcaggccccgtggactgttcatcaccattcatgacaaaggtcatcttgcaacaatgctgaattcttggccagaagacaatattaaggccgtggtggtgactgatggggagcgcatcctgggcctgggagacctgggctgctacggcatgggcatccctgtgggcaagctggccctgtacacggcatgcggaggggtgaacccgcagcagtgcctccctgtgctgctggacgtcggcaccaacaatgaggagctgctcagagaccctctgtacatcggcctgaaacaccagcgcgtgcacgggaaggcatacgatgacttgctggatgagttcatgcaggctgtgacagacaagtttggaataaattgcctcatccaatttgaagacttcgccaatgccaatgccttccgcctgctcaacaaataccgtaacaagtactgcatgttcaatgatgacatccaaggaacaacctgccacactttcagctgcccatggcatttatgggcacaagtcatgttccagcacatccctggacccatgggcttctcagagtggttacctcgaaacagctaagtagcttcctttccagttttaaacccctagtgcatagcccaagagcaccccaaaaatgcaggttaatgatggagataactttatttgccaaattttgtaatttggagcttaagaaccactgtttttcctcttgagttctggcctgtaccaagtgcagaaatagcttcccaaaggaaaaaaatgggcaacagtaccaaatgctgctgagaggtcaagaaagaagaaggctgagaactgattactgaatttggccacctggaggtacttggggaccctgacaagaggcacagcctccgttgctgtggcagggatcttggctgctctgcgaatcaccaagaacaagctttccaatcacgtgtttgttttccaaggtgcaggcgaggcagctatgggcattgcccacctccttgtcatggccct

SEQ ID NO: 17034 - DNA, 298 bp, Homo sapiens
  source 1..298: mol_type = unassigned DNA
cctgctccgcagcgggaccgcgtagacctcagctccccgagcagcgcaggtgggccagggaaggagaggaccgaggcaagccaccacgcgggattaggggtctgccaaggaccatgggtgccgcgctggggacaggcacgcggctggctccctggccgggccgggcctgcggcgccctcccgcgctggacacccaccgcgcccgcccaaggctgccactccaagcctggcccggcgcgccctgtgcccctgaagaagcgcggatacgatgtcaccaggaaccctcatctcaacaaggt

SEQ ID NO: 17035 - DNA, 487 bp, Homo sapiens
  source 1..487: mol_type = unassigned DNA
tttagtcttgccaagatggagagtctcaggcgggcattctgagctgcttcttgtcactggggaaaaccacgtgcacgcagtgctgaggcgccccacgcgcgtcctcaggggaagccaggcactgagaacaaaggttgtgggaccgctctttgaggaactcaccagctccgcgagctcgcggccgccagcgcggtccacccattggcgggagaggactcacagaccgcagctcctcaccccgcctgctccgcagcgggaccgcgtagacctcagctccccgagcagcgcaggtctgccaaggaccatgggtgccgcgctggggacaggcacgcggctggctccctggccgggccgggcctgcggcgccctcccgcgctggacacccaccgcgcccgcccaaggctgccactccaagcctggcccggcgcgccctgtgcccctgaagaagcgcggatacgatgtcaccaggaaccctcatctcaacaag

SEQ ID NO: 17036 - DNA, 814 bp, Homo sapiens
  source 1..814: mol_type = unassigned DNA
gtgcatttagtcttgccaagatggagagtctcaggcgggcattctgagctgcttcttgtcactggggaaaaccacgtgcacgcagtgctgaggcgccccacgcgcgtcctcaggggaagccaggcactgagaacaaaggttgtgggaccgctctttgaggaactcaccagctccgcgagctcgcggccgccagcgcggtccacccattggcgggagaggactcacagaccgcagctcctcaccccgcctgctccgcagcgggaccgcgtagacctcagctccccgagcagcgcaggtgggccagggaaggagaggaccgaggcaagccaccacgcgggattaggggtctgccaaggaccatgggtgccgcgctggggacaggcacgcggctggctccctggccgggccgggcctgcggcgccctcccgcgctggacacccaccgcgcccgcccaaggctgccactccaagcctggcccggcgcgccctgtgcccctgaagaagcgcggatacgatgtcaccaggaaccctcatctcaacaaggggatggcctttacccttgaagaaaggctgcagcttggaatccacggcctaatcccgccctgctttctgagccaggacgtccagctcctccgaatcatgagatattacgagcggcagcagagtgacctggacaagtacatcattctcatgacactccaagaccggaacgagaagctcttctaccgagtgctgacttcggacgtggagaagttcatgccaatcgtgtacacgcctaccgtggggctggcctgtcagcactatggcctgacttt

SEQ ID NO: 17037 - DNA, 384 bp, Homo sapiens
  source 1..384: mol_type = unassigned DNA
cagcgcggtccacccattggcgggagaggactcacagaccgcagctcctcaccccgcctgctccgcagcgggaccgcgtagacctcagctccccgagcagcgcaggtgggccagggaaggagaggaccgaggtctgccaaggaccatgggtgccgcgctggggacaggcacgcggctggctccctggccgggccgggcctgcggcgccctcccgcgctggacacccaccgcgcccgcccaaggctgccactccaagcctggcccggcgcgccctgtgcccctgaagaagcgcggatacgatgtcaccaggaaccctcatctcaacaaggtaatgggccagagggcaggacggcccgcgttgcgatcccgtggctgccggaaaat

SEQ ID NO: 17038 - DNA, 2311 bp, Homo sapiens
  source 1..2311: mol_type = unassigned DNA
aaacgcaaatccccctctgtgcatttagtcttgccaagatggagagtctcaggcgggcattctgagctgcttcttgtcactggggaaaaccacgtgcacgcagtgctgaggcgccccacgcgcgtcctcaggggaagccaggcactgagaacaaaggttgtgggaccgctctttgaggaactcaccagctccgcgagctcgcggccgccagcgcggtccacccattggcgggagaggactcacagaccgcagctcctcaccccgcctgctccgcagcgggaccgcgtagacctcagctccccgagcagcgcaggtctgccaaggaccatgggtgccgcgctggggacaggcacgcggctggctccctggccgggccgggcctgcggcgccctcccgcgctggacacccaccgcgcccgcccaaggctgccactccaagcctggcccggcgcgccctgtgcccctgaagaagcgcggatacgatgtcaccaggaaccctcatctcaacaaggggatggcctttacccttgaagaaaggctgcagcttggaatccacggcctaatcccgccctgctttctgagccaggacgtccagctcctccgaatcatgagatattacgagcggcagcagagtgacctggacaagtacatcattctcatgacactccaagaccggaacgagaagctcttctaccgagtgctgacttcggacgtggagaagttcatgccaatcgtgtacacgcctaccgtggggctggcctgtcagcactatggcctgactttccgcaggccccgtggactgttcatcaccattcatgacaaaggtcatcttgcaacaatgctgaattcttggccagaagacaatattaaggccgtggtggtgactgatggggagcgcatcctgggcctgggagacctgggctgctacggcatgggcatccctgtgggcaagctggccctgtacacggcatgcggaggggtgaacccgcagcagtgcctccctgtgctgctggacgtcggcaccaacaatgaggagctgctcagagaccctctgtacatcggcctgaaacaccagcgcgtgcacgggaaggcatacgatgacttgctggatgagttcatgcaggctgtgacagacaagtttggaataaattgcctcatccaatttgaagacttcgccaatgccaatgccttccgcctgctcaacaaataccgtaacaagtactgcatgttcaatgatgacatccaaggcacagcctccgttgctgtggcagggatcttggctgctctgcgaatcaccaagaacaagctttccaatcacgtgtttgttttccaaggtgcaggcgaggcagctatgggcattgcccacctccttgtcatggccctagagaaagaaggtgtaccgaaggcagaggccacaagaaagatctggatggtggactctaaagggctcattgtcaaggggaggagccacctgaaccatgaaaaggagatgtttgcccaagaccatcctgaagtcaactccctggaggaggtggtgaggctggtgaagcccacagccatcataggtgttgctgccatcgcaggagccttcacggagcagattctgagggacatggcctccttccacgagcgccctatcatctttgccctgagcaaccccaccagcaaggccgagtgcacggctgagaagtgctaccgggtcaccgagggccgagggatttttgccagtggaagtccttttaagagtgtgactctggaagatggcaagaccttcattcctgggcagggaaacaatgcttacgtgttccccggggtggcactgggagtcatcgccggcgggatccggcacatcccagatgagatcttcctcctgacagcagagcaaattgcccaggaagtctctgagcagcatctgtcccaggggagactctacccaccactcagcaccatccgagacgtgtctttgagaattgccatcaaagttctcgactacgcgtacaaacacaacctggcttcctactacccagagcctaaggacaaggaggcttttgtaagatccctggtctacactccagactatgactcctttacactggacagctacacttggcccaaggaagccatgaatgttcagacggtctgaggcagtctcagaggctagtatggggctagatgaagcccagagtaacacccacaatataaatgggttccaaaatggcccaagtgaatccttgtcgctgtgttttttcttttaaactttctggtgtgagaggagatgccaaggcatacagtgaataaaagccttgtctctg

SEQ ID NO: 17039 - DNA, 1629 bp, Homo sapiens
  source 1..1629: mol_type = unassigned DNA
cccgcaccggatctgcttccagggcttggtttcgctttgcctggctcttggctaggcctggcgccccgcgcggagccgagcaggtggcagccgaggagtggcgggggctggaacatttaaccctttgggagcacctgccctctcccagagggcgcgtccccggatcaggcccggtgccccgcagcgcgccctgtgcccctgaagaagcgcggatacgatgtcaccaggaaccctcatctcaacaaggggatggcctttacccttgaagaaaggctgcagcttggaatccacggcctaatcccgccctgctttctgagccaggacgtccagctcctccgaatcatgagatattacgagcggcagcagagtgacctggacaagtacatcattctcatgacactccaagaccggaacgagaagctcttctaccgagtgctgacttcggacgtggagaagttcatgccaatcgtgtacacgcctaccgtggggctggcctgtcagcactatggcctgactttccgcaggccccgtggactgttcatcaccattcatgacaaaggtcatcttgcaacaatgctgaattcttggccagaagacaatattaaggccgtggtggtgactgatggggagcgcatcctgggcctgggagacctgggctgctacggcatgggcatccctgtgggcaagctggccctgtacacggcatgcggaggggtgaacccgcagcagtgcctccctgtgctgctggacgtcggcaccaacaatgaggagctgctcagagaccctctgtacatcggcctgaaacaccagcgcgtgcacgggaaggcatacgatgacttgctggatgagttcatgcaggctgtgacagacaagtttggaataaattgcctcatccaatttgaagacttcgccaatgccaatgccttccgcctgctcaacaaataccgtaacaagtactgcatgttcaatgatgacatccaagctcccagcaccgcgcctgctacatgatagatgcctaataaatgtttaaagaatatatgaatgatgtctacacatacaaactgacatcctcataagcacacccacctgttcatgtgagtatgtctacactggacacctgcccctgcagcctctctgttatccaggtcatcattcatgtacagctgacccttgaacaaaggtggtggttacaggtgccaatgccccacacagtcaaaaatctgcataacttttgcctctccagaaacttagctactaatagcctactgttgaccagaagccttactaataacatcagtagtggattaacacataaatagactagtatctatccctattttatgtatgcatgacatacctaacttcttaatttttttgatatttctaggctacacagttcatctgtgagtgttcgcaaattgttacaaacctccaaaattttaaaaaatatatgtattgaaaaaatctgcatataagtggactcacacagctcaaccccatgttgttcaaggattgactgtgctcacatataaatgcacctctacatgtgctcatacatattcacatgtgtaccccacatgcagacacatggagctgtttgtttttaattaaatcaatccatttgtttac

SEQ ID NO: 17040 - DNA, 2193 bp, Homo sapiens
  source 1..2193: mol_type = unassigned DNA
ggcagctgttgtggggcaccatgcgaggcttcgggccaggcttgacggccaggcgtctcctcccgctgcggttgcccccgcggccgcccgggccccggctggcgagcgggcaggcggccggcgccctggagcgggccatggacgagctgctgcgccgcgcggtgccgccgacgccggcctacgagctgcgcgagaagacaccggcgcccgccgagggtcagtgcgcggacttcgtgagcttctacggtgggctggccgagacggcccagcgggccgaactgctgggccgcctggcgcggggcttcggcgtggaccacggccaggtggcggagcagagcgccggcgtgctccatctgcgccagcagcagcgggaggcggcggtgctgctgcaggccgaggaccggctgcgctacgcgctggtgccgcgctatcgcggcctcttccaccacatcagcaagctggacggcggcgtgcgcttcctggtgcagctgcgggccgacctgctggaggcgcaggccctcaagctggtggaggggccggacgtccgggaaatgaatggggtgctgaaaggaatgctctcagaatggttttcctccgggttcctgaacctagaacgggttacctggcattcaccgtgtgaagtgcttcagaaaatcagtgaggctgaggctgtgcatcctgtaaaaaactggatggacatgaagcgccgcgttgggccctacagaaggtgttacttcttttctcactgttcgacccctggggagcccctggtcgttttgcacgtggcactgactggtgacatctccagcaacatccaggcaatcgtgaaggaacatcctccatcagaaacagaagagaagaacaaaatcactgctgcgatcttttattccatcagcttgacccagcagggactccaaggggtggagctgggaacattcctcataaagcgagtcgtcaaggagttgcagagagagtttcctcaccttggggtgttttcaagtctgtcacctatacctggtttcaccaaatggcttctggggcttctgaactcgcaaacgaaggagcatgggaggaatgaactctttacagattcggaatgtaaggaaatctcggagatcacaggtggccccattaacgagaccctcaagctcctcctcagcagcagcgagtgggtgcagtcggagaagctggtgcgggcgctgcagactccgctgatgaggctgtgcgcctggtacctgtatggagagaagcaccgcggctacgcgctgaaccccgtggccaacttccacctgcagaacggggcggtgctgtggcgcatcaactggatggcggatgtgagcctcagaggcatcaccggctcctgcggcctgatggccaactaccgctacttcctggaggagacgggccccaacagcacctcctacctcggctccaagatcatcaaagcctctgagcaggtcctcagcctagtggcccagtttcaaaagaacagcaagctctgacagtaaacctctcctaaagcacagggccccggctaagaaaacgatcattttcaggaggggccgggagttatgtatctgaagcagctttccaagcaaagccaaagttgactgtgttcttgtcccgcagccggtccacactgtgaggccaggcctcaacttccctcaccctgggcgtgacatgcacccagtgcaagacggttgtgggtgcgggtgcacacaaatgagtgggttgctgtgctgtctccggaagattctgtcgttgcccttggcctggctccctgcccggggctggtgctgtggtacctacatcttcaggaagctgtgcagcctctgccattgccatcccagggggatctggcatcctcctaaggaccggggcgcgtggcccagataagaataggtgttcctttgtgctcataaaacagaatgcggcgatggttgctttagccgtttctcaccatgcaatgcagagggacaaagggctgtgctacacttcccagttacattctgaagctcataaatgtatgagaaggtttgtgattttgcacaaggtgtgtgtagtaagttaaattgttgaacacaaaaatgttgctgcttgaggcataagttggataataggctttaaatgatcagggattcaggttcataatgaacttcacagtaaagaacacgtttgttctgtaaagcattg

SEQ ID NO: 17041 - DNA, 790 bp, Homo sapiens
  source 1..790: mol_type = unassigned DNA
gggttaacactgggaaataaaaacttcccacccacttcttgcaggaggctgtgtggttaaatcctgttacattatacttcagctcttaccatggccttgtcattgggttgaactggagctgtattttagattttgccaacaataacaagcgctgccaagtacttcagctgagatcacccaaataatactctactagcaaaagctttgcgtggcgttctaaccatcagaaactgagatggcaagaaagaagctgaaaaaatttactactttggagattgtgctcagtgttcttctgcttgtgttgtttatcatcagtattgttctaattgtgcttttagccaaagagtcactgaaatcaacagccccagatcctgggacaactggtaccccagatcctgggacaactggtaccccagatcctggaacaactggtaccacacatgctaggacaacgggtcccccagatcctggaacaactggtaccactcctgtttctgctgaatgtccagtggtaaatgaattggaacgaattaattgcatccctgaccagccgccaacaaaggccacatgtgaccaacgtggctgttgctggaatccccagggagctgtaagtgttccctggtgctactattccaagaatcatagctaccatgtagagggcaaccttgtcaacacaaatgcaggattcacagcccggttgaaaaatctgccttcttcaccagtgtttggaagcaatgttgacaatgttcttctcacagcagaatatcagacatctaatcgtttccacttt

SEQ ID NO: 17042 - DNA, 4986 bp, Homo sapiens
  source 1..4986: mol_type = unassigned DNA
gctgtaagtgttccctggtgctactattccaagaatcatagctaccatgtagagggcaaccttgtcaacacaaatgcaggattcacagcccggttgaaaaatctgccttcttcaccagtgtttggaagcaatgttgacaatgttcttctcacagcagaatatcagacatctaatcgtttccactttaagttgactgaccaaaccaataacaggtttgaagtgccccacgaacacgtgcagtccttcagtggaaatgctgctgcttctttgacctaccaagttgaaatctccagacagccatttagcatcaaagtgaccagaagaagcaacaatcgtgttttgtttgactcgagcattgggcccctactgtttgctgaccagttcttgcagctctccactcgactgcctagcactaacgtgtatggcctgggagagcatgtgcaccagcagtatcggcatgatatgaattggaagacctggcccatatttaacagagacacaactcccaatggaaacggaactaatttgtatggtgcgcagacattcttcttgtgccttgaagatgctagtggattgtcctttggggtgtttctgatgaacagcaatgccatggaggttgtccttcagcctgcgccagccatcacttaccgcaccattgggggcattctcgacttctatgtgttcttgggaaacactccagagcaagttgttcaagaatatctagagctcattgggcggccagcccttccctcctactgggcgcttggatttcacctcagtcgttacgaatatggaaccttagacaacatgagggaagtcgtggagagaaatcgcgcagcacagctcccttatgatgttcagcatgctgatattgattatatggatgagagaagggacttcacttatgattcagtggattttaaaggcttccctgaatttgtcaacgagttacacaataatggacagaagcttgtcatcattgtggatccagccatctccaacaactcttcctcaagtaaaccctatggcccatatgacaggggttcagatatgaagatatgggtgaatagttcagatggagtgactccactcattggggaggtctggcctggacaaactgtgtttcctgattataccaatcccaactgtgctgtttggtggacaaaggaatttgagctttttcacaatcaagtagagtttgatggaatctggattgatatgaatgaagtctccaactttgttgatggttcggtctcaggatgttccacaaacaacctaaataatcccccattcactcccagaatcctggatgggtacctgttctgcaagactctctgtatggatgcagtgcagcactggggcaagcagtatgacattcacaatctgtatggctactccatggcggtcgccacagcagaagctgccaagactgtgttccctaataagagaagcttcattctgacccgttctacctttgcgggctctggcaagtttgcagcacattggttaggagacaacactgccacctgggatgacctgagatggtccatccctggcgtgcttgagttcaacctttttggcatcccaatggtgggtcctgacatatgtggctttgctttggacacccctgaggagctctgtaggcggtggatgcagttgggtgcattttatccgttttctagaaatcacaatggccaaggctacaaggaccaggatcctgcctcctttggagctgactccctgctgttgaattcctccaggcactaccttaacatccgctatactctattgccctacctatacaccctcttcttccgtgctcacagccgaggggacacggtggccaggccccttttgcatgagttctacgaggacaacagcacttgggatgtgcaccaacagttcttatgggggcccggcctcctcatcactccagttctggatgaaggtgcagagaaagtgatggcatatgtgcctgatgctgtctggtatgactacgagactgggagccaagtgagatggaggaagcaaaaagtcgagatggaacttcctggagacaaaattggacttcaccttcgaggaggctacatcttccccacacagcagccaaatacaaccactctggccagtcgaaagaaccctcttggtcttatcattgccctagatgagaacaaagaagcaaaaggagaacttttctgggataatggggaaacgaaggatactgtggccaataaagtgtatcttttatgtgagttttctgtcactcaaaaccgcttggaggtgaatatttcacaatcaacctacaaggaccccaataatttagcatttaatgagattaaaattcttgggacggaggaacctagcaatgttacagtgaaacacaatggtgtcccaagtcagacttctcctacagtcacttatgattctaacctgaaggttgccattatcacagatattgatcttctcctgggagaagcatacacagtggaatggagcataaagataagggatgaagaaaaaatagactgttaccctgatgagaatggtgcttctgccgaaaactgcactgcccgtggctgtatctgggaggcatccaattcttctggagtccctttttgctattttgtcaacgacctatactctgtcagtgatgttcagtataattcccatggggccacagctgacatctccttaaagtcttccgtttatgccaatgccttcccctccacacccgtgaacccccttcgcctggatgtcacttaccataagaatgaaatgctgcagttcaagatttatgatcccaacaagaatcggtatgaagttccagtccctctgaacatacccagcatgccatccagcacccctgagggtcaactctatgatgtgctcattaagaagaatccatttgggattgaaattcgccggaagagtacaggcactataatttgggactctcagctccttggctttaccttcagtgacatgtttatccgcatctccacccgccttccctccaagtacctctatggctttggggaaactgagcacaggtcctataggagagacttggagtggcacacttgggggatgttctcccgagaccagcccccagggtacaagaagaattcctatggtgtccacccctactacatggggctggaggaggacggcagtgcccatggagtgctcctgctgaacagcaatgccatggatgtgacgttccagcccctgcctgccttgacataccgcaccacagggggagttctggacttttatgtgttcttggggccgactccagagcttgtcacccagcagtacactgagttgattggccggcctgtgatggtaccttactggtctttggggttccagctgtgtcgctatggctaccagaatgactctgagatcgccagcttgtatgatgagatggtggctgcccagatcccttatgatgtgcagtactcagacatcgactacatggagcggcagctggacttcaccctcagccccaagtttgctgggtttccagctctgatcaatcgcatgaaggctgatgggatgcgggtcatcctcattctggatccagccatttctggcaatgagacacagccttatcctgccttcactcggggcgtggaggatgacgtcttcatcaaatacccaaatgatggagacattgtctggggaaaggtctggcctgattttcctgatgttgttgtgaatgggtctctagactgggacagccaagtggagctatatcgagcttatgtggccttcccagactttttccgtaattcaactgccaagtggtggaagagggaaatagaagaactatacaacaatccacagaatccagagaggagcttgaagtttgatggcatgtggattgatatgaatgaaccatcaagcttcgtgaatggggcagtttctccaggctgcagggacgcctctctgaaccaccctccctacatgccacatttggagtccagggacaggggcctgagcagcaagaccctttgtatggagagtcagcagatcctcccagacggctccctggtgcagcactacaacgtgcacaacctgtatgggtggtcccagaccagacccacatacgaagccgtgcaggaggtgacgggacagcgaggggtcgtcatcacccgctccacatttccctcttctggccgctgggcaggacattggctgggagacaacacggccgcatgggatcagctgaagaagtctatcattggcatgatggagttcagcctctttggcatatcctatacgggagcagatatctgtgggttctttcaagacgctgagtacgagatgtgtgttcgctggatgcagctgggggccttttaccccttctcaagaaaccacaataccattgggaccaggagacaagaccctgtgtcctgggatgctgcttttgtgaatatttccagaaatgtcctgcagaccagatacaccctgttgccatatctgtataccttgatgcaaaaggcccacacggagggcgtcactgttgtgcggcctctgctccatgagtttgtgtcagaccaggtgacatgggacatagacagtcagttcctgctgggcccagccttcctggtcagccctgtcctggagcgcaatgccagaaatgtcactgcatatttccctagagcccgttggtacgattactacacgggtgtggatattaatgcaagaggagagtggaagaccttgccagcccctcttgaccacattaatcttcatgtccgtgggggctacatcctgccctggcaagagcctgcactgaacacccacttaagtcgaaagaaccctcttggtcttattattgccctagatgaaaacaaagaagcaaaaggagaacttttctgggatgatgggcaaacaaaggatactgtggccaagaaagtatatcttttatgtgagttttctgtcactcaacaagtagtgtttctaaatatagtttttaat

SEQ ID NO: 17043 - DNA, 6525 bp, Homo sapiens
  source 1..6525: mol_type = unassigned DNA
agatctttggttgctttggtggactgtgctcctctgcttttattgctaagccatccttcagacagagagggagcggctgcaagaggtaatgagagatggcaagaaagaagctgaaaaaatttactactttggagattgtgctcagtgttcttctgcttgtgttgtttatcatcagtattgttctaattgtgcttttagccaaagagtcactgaaatcaacagccccagatcctgggacaactggtaccccagatcctgggacaactggtaccccagatcctggaacaactggtaccacacatgctaggacaacgggtcccccagatcctggaacaactggtaccactcctgtttctgctgaatgtccagtggtaaatgaattggaacgaattaattgcatccctgaccagccgccaacaaaggccacatgtgaccaacgtggctgttgctggaatccccagggagctgtaagtgttccctggtgctactattccaagaatcatagctaccatgtagagggcaaccttgtcaacacaaatgcaggattcacagcccggttgaaaaatctgccttcttcaccagtgtttggaagcaatgttgacaatgttcttctcacagcagaatatcagacatctaatcgtttccactttaagttgactgaccaaaccaataacaggtttgaagtgccccacgaacacgtgcagtccttcagtggaaatgctgctgcttctttgacctaccaagttgaaatctccagacagccatttagcatcaaagtgaccagaagaagcaacaatcgtgttttgtttgactcgagcattgggcccctactgtttgctgaccagttcttgcagctctccactcgactgcctagcactaacgtgtatggcctgggagagcatgtgcaccagcagtatcggcatgatatgaattggaagacctggcccatatttaacagagacacaactcccaatggaaacggaactaatttgtatggtgcgcagacattcttcttgtgccttgaagatgctagtggattgtcctttggggtgtttctgatgaacagcaatgccatggaggttgtccttcagcctgcgccagccatcacttaccgcaccattgggggcattctcgacttctatgtgttcttgggaaacactccagagcaagttgttcaagaatatctagagctcattgggcggccagcccttccctcctactgggcgcttggatttcacctcagtcgttacgaatatggaaccttagacaacatgagggaagtcgtggagagaaatcgcgcagcacagctcccttatgatgttcagcatgctgatattgattatatggatgagagaagggacttcacttatgattcagtggattttaaaggcttccctgaatttgtcaacgagttacacaataatggacagaagcttgtcatcattgtggatccagccatctccaacaactcttcctcaagtaaaccctatggcccatatgacaggggttcagatatgaagatatgggtgaatagttcagatggagtgactccactcattggggaggtctggcctggacaaactgtgtttcctgattataccaatcccaactgtgctgtttggtggacaaaggaatttgagctttttcacaatcaagtagagtttgatggaatctggattgatatgaatgaagtctccaactttgttgatggttcggtctcaggatgttccacaaacaacctaaataatcccccattcactcccagaatcctggatgggtacctgttctgcaagactctctgtatggatgcagtgcagcactggggcaagcagtatgacattcacaatctgtatggctactccatggcggtcgccacagcagaagctgccaagactgtgttccctaataagagaagcttcattctgacccgttctacctttgcgggctctggcaagtttgcagcacattggttaggagacaacactgccacctgggatgacctgagatggtccatccctggcgtgcttgagttcaacctttttggcatcccaatggtgggtcctgacatatgtggctttgctttggacacccctgaggagctctgtaggcggtggatgcagttgggtgcattttatccgttttctagaaatcacaatggccaaggctacaaggaccaggatcctgcctcctttggagctgactccctgctgttgaattcctccaggcactaccttaacatccgctatactctattgccctacctatacaccctcttcttccgtgctcacagccgaggggacacggtggccaggccccttttgcatgagttctacgaggacaacagcacttgggatgtgcaccaacagttcttatgggggcccggcctcctcatcactccagttctggatgaaggtgcagagaaagtgatggcatatgtgcctgatgctgtctggtatgactacgagactgggagccaagtgagatggaggaagcaaaaagtcgagatggaacttcctggagacaaaattggacttcaccttcgaggaggctacatcttccccacacagcagccaaatacaaccactctggccagtcgaaagaaccctcttggtcttatcattgccctagatgagaacaaagaagcaaaaggagaacttttctgggataatggggaaacgaaggatactgtggccaataaagtgtatcttttatgtgagttttctgtcactcaaaaccgcttggaggtgaatatttcacaatcaacctacaaggaccccaataatttagcatttaatgagattaaaattcttgggacggaggaacctagcaatgttacagtgaaacacaatggtgtcccaagtcagacttctcctacagtcacttatgattctaacctgaaggttgccattatcacagatattgatcttctcctgggagaagcatacacagtggaatggagcataaagataagggatgaagaaaaaatagactgttaccctgatgagaatggtgcttctgccgaaaactgcactgcccgtggctgtatctgggaggcatccaattcttctggagtccctttttgctattttgtcaacgacctatactctgtcagtgatgttcagtataattcccatggggccacagctgacatctccttaaagtcttccgtttatgccaatgccttcccctccacacccgtgaacccccttcgcctggatgtcacttaccataagaatgaaatgctgcagttcaagatttatgatcccaacaagaatcggtatgaagttccagtccctctgaacatacccagcatgccatccagcacccctgagggtcaactctatgatgtgctcattaagaagaatccatttgggattgaaattcgccggaagagtacaggcactataatttgggactctcagctccttggctttaccttcagtgacatgtttatccgcatctccacccgccttccctccaagtacctctatggctttggggaaactgagcacaggtcctataggagagacttggagtggcacacttgggggatgttctcccgagaccagcccccagggtacaagaagaattcctatggtgtccacccctactacatggggctggaggaggacggcagtgcccatggagtgctcctgctgaacagcaatgccatggatgtgacgttccagcccctgcctgccttgacataccgcaccacagggggagttctggacttttatgtgttcttggggccgactccagagcttgtcacccagcagtacactgagttgattggccggcctgtgatggtaccttactggtctttggggttccagctgtgtcgctatggctaccagaatgactctgagatcgccagcttgtatgatgagatggtggctgcccagatcccttatgatgtgcagtactcagacatcgactacatggagcggcagctggacttcaccctcagccccaagtttgctgggtttccagctctgatcaatcgcatgaaggctgatgggatgcgggtcatcctcattctggatccagccatttctggcaatgagacacagccttatcctgccttcactcggggcgtggaggatgacgtcttcatcaaatacccaaatgatggagacattgtctggggaaaggtctggcctgattttcctgatgttgttgtgaatgggtctctagactgggacagccaagtggagctatatcgagcttatgtggccttcccagactttttccgtaattcaactgccaagtggtggaagagggaaatagaagaactatacaacaatccacagaatccagagaggagcttgaagtttgatggcatgtggattgatatgaatgaaccatcaagcttcgtgaatggggcagtttctccaggctgcagggacgcctctctgaaccaccctccctacatgccacatttggagtccagggacaggggcctgagcagcaagaccctttgtatggagagtcagcagatcctcccagacggctccctggtgcagcactacaacgtgcacaacctgtatgggtggtcccagaccagacccacatacgaagccgtgcaggaggtgacgggacagcgaggggtcgtcatcacccgctccacatttccctcttctggccgctgggcaggacattggctgggagacaacacggccgcatgggatcagctgaagaagtctatcattggcatgatggagttcagcctcttcggcatatcctatacgggagcagatatctgtgggttctttcaagatgctgaatatgagatgtgtgttcgctggatgcagctgggggccttttaccccttctcaagaaaccacaacaccattgggaccaggagacaagaccctgtgtcctgggatgttgcttttgtgaatatttccagaactgtcctgcagaccagatacaccctgttgccatatctgtataccttgatgcataaggcccacacggagggcgtcactgttgtgcggcctctgctccatgagtttgtgtcagaccaggtgacatgggacatagacagtcagttcctgctgggcccagccttcctggtcagccctgtcctggagcgtaatgccagaaatgtcactgcatatttccctagagcccgctggtatgattactacacgggtgtggatattaatgcaagaggagagtggaagaccttgccagcccctcttgaccacattaatcttcatgtccgtgggggctacatcctgccctggcaagagcctgcactgaacacccacttaagccgccagaaattcatgggcttcaaaattgccttggatgatgaaggaactgctgggggctggctcttctgggatgatgggcaaagcattgatacctatgggaaaggactctattacttggccagcttttctgccagccagaatacgatgcaaagccatataattttcaacaattacatcactggtacaaatcctttgaaactgggctacattgaaatctggggagtgggcagtgtccccgttaccagtgtcagcatctctgtgagtggcatggtcataacaccctccttcaacaatgaccccacgacacaggtattaagcatcgatgtgactgacagaaacatcagcctacataattttacttcattgacgtggataagcactctgtgaatttttacagcaagattctaactaactatgaatgactttgaaactacttatacttcatactcataaaaattattgtgtgttgctaatttgttcatacccactattggtgaaatatttctgttaattttgttatatgttttttgtgtgaaccctaaaggttaaaccttagccctgtgggataggcagttagggaggtgtggaaaatctatgcattaccttaatgtctctgtgtggttagtatggtagtgactgttcatcatatgacatttactgaagatgaactgggtccatgatgaagtgtgtgtatgtccacgtttgtaatcatagaatggaccccattcttttgttaaatacacaagagaaagctttctgtgacagttccaggtcttgaagctaatcagcatctcaagaaagtatccagaaagaacatctgctagttggttataggcggtgggaggaataatatacctaattggttataggtggggggagcatgataagcaaagaaaaggcaaacacaaggaaagatcagatgaaacagaagatgatagtaaaagtgatcctaagtaagaacataatgtaaaattgtcagcagcctcatggggaggaaaaaggaagagtcaactcacttgaagaagagggtcttgagaaatccttagcataaagggctactggtgagattgagatctgagcaggcaaagctcaaaagagagtttggaggttaaaaataatttatttttgcagtagtgtgctttgaaatgtgtaaatcttatttctaatgtatacaaccacatttcacataaaaatatgcaatttatatgccagataaaaataaaacaagtgaatttgcaagtga

SEQ ID NO: 17044 - DNA, 3616 bp, Homo sapiens
  source 1..3616: mol_type = unassigned DNA
aaattttcctccaggctgtccttggagaattccaccctctttcattctggggagaagaagttaaaattagggccagccctgcgggactgacatgccagatgcagggaagctgtccccagaaataagcgagttcccaccgcggctgggcggggcgggagcctcgggtcccaacccagcggagggactcctggaaggcctgccccttccaagtgtctgcaagggctctggtcccaagctttaaaatcctgagcgaaggcactgcgggccgacctctcctctcccagccagtcgtggctggcctttcaaagtgtgcagttgtctcctccctgtccagccccatcgtcgcccaggaccagctgggccgcggtctgacctgaggctgctgctcagcgccggggcgctggcgctctccattcgagcaccttccagcataccgctcggctccgggagccgctctgcaaagttgggcagctcagagcgcaagctttgcctctcgacttctccctccttgggtccccggcgcccccgcctcccacgatccctttcactaggagcagccagtcccagcgggctggcaacttgcaccccttcctagtcatcctccctgaaacgcgaccatgctgttaaggggcgtcctcctggcgttgcaagccctgcagctcgccggtgccctcgacctgcccgctgggtcctgtgcctttgaagagagcacttgcggctttgactccgtgttggcctctctgccgtggattttaaatgaggaaggccattacatttatgtggatacctcctttggcaagcagggggagaaagctgtgctgctaagtcctgacttacaggctgaggaatggagctgcctccgtttggtctaccagataaccacatcttcggagtctctgtcagatcccagccagctgaacctctacatgagatttgaagatgaaagctttgatcgcttgctttggtcagctaaggaaccttcagacagctggctcatagccagcttggatttgcaaaacagttccaagaaattcaagattttaatagaaggtgtactaggacagggaaacacagccagcatcgcactatttgaaatcaagatgacaaccggctactgtattgaatgtgactttgaagaaaatcatctctgtggctttgtgaaccgctggaatcccaatgtgaactggtttgttggaggaggaagtattcggaatgtccactccattctcccacaggatcacaccttcaagagtgaactgggccactacatgtacgtggactcagtttatgtgaagcacttccaggaggtggcacagctcatctccccgttgaccacggcccccatggctggctgcctgtcattttattaccagatccagcaggggaatgacaatgtcttttccctttacactcgggatgtggctggcctttacgaggaaatctggaaagcagacaggccagggaatgctgcctggaaccttgcggaggtcgagttcagtgctccttaccccatggaggttatttttgaagttgctttcaatggtcccaagggaggttatgttgccctggatgatatttcattctctcctgttcactgccagaatcagacagaacttctgttcagtgccgtggaagccagctgcaattttgagcaagatctctgcaacttttaccaagataaagaaggtccaggttggacccgagtgaaagtaaaaccaaacatgtatcgggctggagaccacactacaggcttagggtattacctgctagccaacacaaagttcacatctcagcctggctacattggaaggctctatgggccctccctaccaggaaacttgcagtattgtctgcgttttcattatgccatctatggatttttaaaaatgagtgacaccctagcagtttacatctttgaagagaaccatgtggttcaagagaagatctggtctgtgttggagtccccaaggggtgtttggatgcaagctgaaatcacctttaagaagcccatgcctaccaaggtggttttcatgagcctatgcaaaagtttctgggactgtgggcttgtagccctggatgacattacaatacaattgggaagctgctcatcttcagagaaacttccacctccacctggagagtgtactttcgagcaagatgaatgtacatttactcaggagaaaagaaaccggagcagctggcacaggaggaggggagaaactcccacttcctacacaggaccaaagggagatcacactactggggtaggctactacatgtacattgaggcctcccatatggtgtatggacaaaaagcacgcctcttgtccaggcctctgcgaggagtctctggaaaacactgcttgacctttttctaccacatgtatggagggggcactggcctgctgagtgtttatctgaaaaaggaagaagacagtgaagagtccctcttatggaggagaagaggtgaacagagcatttcctggctacgagcactgattgaatacagctgtgagaggcaacaccagataatttttgaagccattcgaggagtatcaataagaagtgatattgccattgatgatgttaaatttcaggcaggaccctgtggagaaatggaagatacaactcaacaatcatcaggatattctgaggacttaaatgaaattgagtattaagaaatgatctgcattggatttactagacgaaaaccatacctctcttcaatcaaaatgaaaacaaagcaaatgaatactggacagtcttaacaattttataagttataaaatgactttagagcaccctccttcattacttttgcaaaaacatactgactcagggctctttttttctttttgcatatgacaactgttactagaaatacaggctactggttttgcatagatcattcatcttaattttggtaccagttaaaaatacaaatgtactatattgtagtcattttaaagtacacaaagggcacaatcaaaatgagatgcactcatttaaatctgcattcagtgaatgtattgggagaaaaataggtcttgcaggtttccttttgaattttaagtatcataaatatttttaaagtaaataatacggggtgtcagtaatatctgcagaatgaatgcagtctttcatgctaatgagttagtctggaaaaataaagtcttattttctatgttttattcatagaaatggagtattaatttttaatattttcaccatatgtgataacaaaggatctttcatgaatgtccaagggtaagtcagtattaattaatgctgtattacaaggcaatgctaccttctttattccccctttgaactacctttgaagtcactatgagcacatggatagaaatttaacttttttttgtaaagcaagcttaaaatgtttatgtatacatacccagcaacttttataaatgtgttaaacaattttactgatttttataataaatattttggtaagattttgaataatatgaattcaggcagatatactaaactgcttttatttacttgtttagaaaattgtatatatatgtttgtgtatcctaacagctgctatgaaattataaaattacctaataaaaataatttgaaaatc

SEQ ID NO: 17045 - DNA, 8919 bp, Homo sapiens
  source 1..8919: mol_type = unassigned DNA
ggagagcgagagaccgaacgaggagacgcgaggaggagggaggaggaagagagggagggaggcgggaggagcgcggaatgaaaagctcggaggggcgaaaaagcagcacagcaaagcccaagttgctgagcgagcggagcgctcccgcggcccggagccgagcggccgccgcgccccggagcccggcccggccccgcccgctctgggcccccgcaggccaaggccgccgggcgggggcggggacgaccaacttggggcgcggcgtagccccgctctcccgagagctcggagcccgggagggctacggccgcggccagacggcgggagaggagcgcggcgagcggaggcggcgagcggcgcccgcgccgcagccccggcctgggcgagagcgcgaatatttttcaaaagactcaaactttcctcctttccccgttttctggggcccttcttgcctggaattgctctccagattcccgcggggcgccgggctgctattcttcccccgggtttatcggcggctcggctaacttcacggacccggggacccgcggcgctcgtccctcggccgaacccagcccgcgctgctccccggatcaggagggccgggcccggggctgcttcgccgccgcgagtgctttcagcccggccccctggagtcgggccgctgagcccacggcagcggccgcaggactggaaacagcagattgattaactcgagcggagccccggcctccccgactccgctccgctgaggggcggccccagtgcggggaaacgacaagtttgtcagtcgtccgtggcctgttggatcgaagcgccgcctccgccgccgagaggtccccggcgcctagcatcccgcgcggacggccctgggtacccggggcggctcggcggccgggctcctcgggtcggggcgctggctgctgtgccgggcgcgccgaggcacccggggctgggccagcgccccctgcgtccccacgcgggcagcggccccgccggaggagaaacacgggtcgccgccacctccgcctcttcagtctcctggtcttcgtcgccgctctctctctcacctctcagggaaagggggggacataggggcgtcgcggggccccggcgaatgcgccccccgccgcctctcgggctgcgccgcctcgcggggatgaagcaccggccgtgaagatggaggtgacctgccttctacttctggcgctgatccccttccactgccggggacaaggagtctacgctccagcccaggcgcagatcgtgcatgcgggccaggcatgtgtggtgaaagaggacaatatcagcgagcgtgtctacaccatccgggagggggacaccctcatgctgcagtgccttgtaacagggcaccctcgaccccaggtacggtggaccaagacggcaggtagcgcctcggacaagttccaggagacatcggtgttcaacgagacgctgcgcatcgagcgtattgcacgcacgcagggcggccgctactactgcaaggctgagaacggcgtgggggtgccggccatcaagtccatccgcgtggacgtgcagtacctggatgagccaatgctgacggtgcaccagacggtgagcgatgtgcgaggcaacttctaccaggagaagacggtgttcctgcgctgtactgtcaactccaacccgcctgcccgcttcatctggaagcggggttccgataccctatcccacagccaggacaatggggttgacatctatgagcccctctacactcagggggagaccaaggtcctgaagctgaagaacctgcggccccaggactatgccagctacacctgccaggtgtctgtgcgtaacgtgtgcggcatcccagacaaggccatcaccttccggctcaccaacaccacggcaccaccagccctgaagctgtctgtgaacgaaactctggtggtgaaccctggggagaatgtgacggtgcagtgtctgctgacaggcggtgatcccctcccccagctgcagtggtcccatgggcctggcccactgcccctgggtgctctggcccagggtggcaccctcagcatcccttcagtgcaggcccgggactctggctactacaactgcacagccaccaacaatgtgggcaaccctgccaagaagactgtcaacctgctggtgcgatccatgaagaacgctacattccagatcactcctgacgtgatcaaagagagtgagaacatccagctgggccaggacctgaagctatcgtgccacgtggatgcagtgccccaggagaaggtgacctaccagtggttcaagaatggcaagccggcacgcatgtccaagcggctgctggtgacccgcaatgatcctgagctgcccgcagtcaccagcagcctagagctcattgacctgcacttcagtgactatggcacctacctgtgcatggcttctttcccaggggcacccgtgcccgacctcagcgtcgaggtcaacatctcctctgagacagtgccgcccaccatcagtgtgcccaagggtagggccgtggtgaccgtgcgcgagggatcgcctgccgagctgcaatgcgaggtgcggggcaagccgcggccgccagtgctctggtcccgcgtggacaaggaggctgcactgctgccctcggggctgcccctggaggagactccggacgggaagctgcggctggagcgagtgagccgagacatgagcgggacctaccgctgccagacggcccgctataatggcttcaacgtgcgcccccgtgaggcccaggtgcagctgaacgtgcagtccccatgcttcccgccggaggtggagcccagttcccaggacgtgcgccaggcgctgggccggcccgtgctcctgcgctgctcgctgctgcgaggcagcccccagcgcatcgcctcggctgtgtggcgtttcaaagggcagctgctgccgccgccgcctgttgttcccgccgccgccgaggcgccggatcacgcggagctgcgcctcgacgccgtaactcgcgacagcagcggcagctacgagtgcagcgtctccaacgatgtgggctcggctgcctgcctcttccaggtctccgccaaagcctacagcccggagttttacttcgacacccccaaccccacccgcagccacaagctgtccaagaactactcctacgtgctgcagtggactcagagggagcccgacgctgtcgaccctgtgctcaactacagactcagcatccgccagttgaaccagcacaatgcggtggtcaaggccatcccggtccggcgtgtggagaaggggcagctgctggagtacatcctgaccgatctccgtgtgccccacagctatgaggtccgcctcacaccctataccaccttcggggctggtgacatggcctcccgcatcatccactacacagagctcctggctctgaggaccctgtcctctgacaacacctgccactttgaggatgagaagatctgtggctatacccaggacctgacagacaactttgactggacgcggcagaatgccctcacccagaaccccaaacgctcccccaacactggtccccccaccgacataagtggcacccctgagggctactacatgttcatcgagacatcgaggcctcgggagctgggggaccgtgcaaggttagtgagtcccctctacaatgccagcgccaagttctactgtgtctccttcttctaccacatgtacgggaaacacatcggctccctcaacctcctggtgcggtcccggaacaaaggggctctggacacgcacgcctggtctctcagtggcaataagggcaatgtgtggcagcaggcccatgtgcccatcagccccagtgggcccttccagattatttttgagggggttcgaggcccgggctacctgggggatattgccatagatgacgtcacactgaagaagggggagtgtccccggaagcagacggatcccaataaagtggtggtgatgccgggcagtggagccccctgccagtccagcccacagctgtgggggcccatggccatcttcctcttggcgttgcagagatgatgagagctgtgtggccacccccccaaccttgcccccggcacaccaaagtgtccacattgtaccaaagactgacccccgccagctggggtgcccaggggcagggccggcccgccagggagggggcctgcattggctgcaaggatgagcagagaacaaggacagaggccaggcactgaggccctggagacagctgttccacttgcacacacgcacacactcatgctcacacacacagagatatattaaagcacaagtttctatctgacctgccagcaccttctttactgcaaagacaggggacttgcctgaatggcatccgccaacccagggacctcggcgcaacataggccttgtccttgctgcactcgtggtgtgcttctgactttaccctgtcccctaagtcaaggccgaactccagcctggtggctttgccagaagggagccagaagtggggcagacatggagcccctcccttggtcagactctgggactcctgagatgggagaggcagggatcagaggacgaacaggtgggactttgcgagctctgtgactgtcccacgtccaggagacaaggaaggtagggcacctgctgcacacgattctgtccagagtgagcactggatggtggagaccataggtcaccccagattccttgacctatttctgggacaccatatttccctcctcagtgtgcaccctttgaagggacccagcacagggtcttgggcctgggcagtctgaagactgataacttccccactccaccctacaagcagtgggactcctgagaacacggttctctcctagcctcagcccccagctgggtctcagaggagctgggggagcggtggccagcccattttctggggtgaggcttgacttggagaaaggcagaagagacgtcccgcttctgtgatttggtgcccccatatcagacaatgaatttggaagtggagaggggccttcatttcttatctacttggcatgaaagggtgccctggataggagggtgtgtacagggcaaaatgccaaaaagcactgtctagttgaaagttcccttctccacccaggggcagtgaaggaggaggggcttatagagctgggattggtggagggagcaggtgccagtcccctcactctctgggagctgtgaaagggatccctgtccttgggtcctgggttaggcacctgagattgacatgatgggatctagatctttcctccttgacatcacctgagcccccacctagccatccatgggagagagaaggcccagccccttctagaatgactctttaggcatgcgtgcatatgtgtgtatgtgtttgtgcccgtctgtgtctaggtaccaccgtgggtacattgttgggcaggagtgtgtgcaaacacaggtctgtgtgtgcaatctcacatatctgcctgtgagactggattgagacccattcgtttctatgaatgtccgtgtacgtcagcgtgtgtgtccaccttcctgagtgatgtgttcgcttgtagggtgctggctgaatagactctgtccagccctgttctgtagtctcaagctgcctgcgatggcctgaaattccacctttcatcccctatggatgacggagagcttacagatgaccctattgaatgcaagcacctttggtgaggagcatcacagggctccttctggagcatttggtggggacagctgcagagaagaggcctggaactcgggcagcactgcagtgccaggaggcaggcggggaaccgaggcaaaggctgcccatctccccctgccaggcctgtgtgatcattatcaccaacagctggtgggtggccgggccaggatgcagcggggccttctgatgcccaatcagcacggctgccttcctgacccagtcaaggcctctgtctgaaatgagtcgctccaggttctcagcatacacttccatcgcgtctgtcgggtattgttccttaactgtcccatctgtgcagagtccattgccccaactagactgtgagctcctcctctgagccttccaagtcccccctccaccttcgccacctcccgctcgtgcccagcacaagtgagcctggtgtggaaaccactccattgcccggtggaatggattctgtaatcagtggttcctggccttgcctgcagaatagaaccaccagagtcctttaaaaagtattgctgcttggttcccacctcagaggttctgagttaattggactggagcgcagtcggacatcaagaaatgttgaaaagctccttgggttctcctgacagcaggaaccactggcctggcaccacctgggtgcttcctctgtgccctcgctggggtaggcattggagcaccagagatgaatagccccaagtgctccctctttggggttcccaaggcaccctgtgcctgcttccctcagaggaccttccaatccatttgccccgcaaccctggctgctccgacaggggagacttgtctcccttgttcccctcaggatccatagagtggacagtaaaggtgctcagtacatgttggctgagctgaactgcatacatgtggcccccaggttcctggtctttatggacgaagggcacaaggtggaggggggatggggggatgctgctggaggtctcagtgggtgcagacagccctgccttgaggatggcttgacctgggattgacaaaatgtgtctgctgaaatgctgaggtccccacgtgtgaatgggtgaggctgatgtggatgtctgtgtgtgccagcaggtgggtgggggatgtgggtgtcagtgtatgccagtgggcactgtaaatgtctaggcatgtgctggtctctgtgtgtttgtgtgttcctcagcaggaatgagtgtctttgtgtatcacctggtgacttgtcagtgtctgtgtctgtgtgtgcctgtgagccagcatctctgtatcagtgttgctcatgctgtgtctttgtgcgccatggtgtgtcagtgtctgtgtgttgatgggtggcccatgagtgacccccgccaggggagaccaggctggctggatccagcacatctccccagtggcagcctcgccctctgggtcagggtgactgaggcattttgtggccttaaaacggggtgttcagggtcagccctcagggtgctggggcccttccatcccttgtccccttcaggttggtgaaaaggactccgggggccaggtgctgtatagcagcttatggaagtctcagctgggctatcctgcccttgggagcacagacaggctcctagggtgctgagtgaagcctgaagaccaagccccctcctcctggaatgctccttccacccctacctctcagagatgggcctgacacctctttctcattcattctccttttccctgtgctctgggaaagcccctggctcaggctgtcagagtgaggatggacctcaaaagtttgatcccctcgtgcagatgaagaagctgaagcccagagtggggaaggggagtggcccaaggtcacacagctagtttgagtagagccagtcttgggagagccaagtactacagccctgggggtgtcacaccgcttgtcactgcccctgaggtctcctgccaaacaactgcagggagtttggctaacagtcctgtgtccagggtgccggtggggatgttatagatgttgctgggatcctgccctcggctccaaattctggcctctcatcccaggctgcagacccttctgccccatgacaggcctgggtgccacacagaggtggccaccctcccaccacagtgtctgcagctgctgcccttctcccaggcccccagacagaagagaccctgtttcccctcctctcccctgtgacttcacaagagcttgggctaggagtgaaggtcagcatgttctcatgtgctcatcctcttggtttccccaaagaccgggagggtcacggatggggcgtgcagaatccttgtgttttttctcgctgggcagcttgaggggctggggagtattcccagggtctttgctctggagagtccctgcagagccactggctgaggttgggttcagggttcagcggagtcctccatgcttccaaaggccgggaagcacccgcctctctatcgagtcagtgctgtgcgtgtgtgtctgagaatgtgtgtgatgtgtggagtgtgcgtgtgtttgtgtgtgtgtgtgtgtgtgttggggcagaaggaccactctttcctggggatcccttgacccttataactagaagggaccttagggagcatctaagctggtgcccccattgtacaggcgaggtccagagggatggcatctgcccaccccaccccttgccctcttgttgcctgcactcatttcccagggaccctcctaggataggactgccctccttcctggccccctcccgccatcctcccagccacccacataatcaccatctcagcccaactctggtggccctctaggtctccatgcattcttcctgccctagagtagccagctcaccaaggcctttatccccagcccaggagaagggtcagggagggaaggggctgcaccagccctgagacctcaaagacttgggagaaaagccaaaactcctcatgcccaggcccacatgtctgaccaccccagcccaccccgccaccaaggtaaaagcacaacaggagacccccttattaatgggtgaaatgattggggttgtttttttagtcacacagccccatcctcacccctttgccttgctgtctgtctccaccccagcctctgttccccatttgcctctctttcacctccaagcccccaaatgtaacctctagttgcggacgcggttgttctatcaataaagctgcagtgttctagcgctcagcgt

SEQ ID NO: 17046 - DNA, 10736 bp, Homo sapiens
  source 1..10736: mol_type = unassigned DNA
ggagagcgagagaccgaacgaggagacgcgaggaggagggaggaggaagagagggagggaggcgggaggagcgcggaatgaaaagctcggaggggcgaaaaagcagcacagcaaagcccaagttgctgagcgagcggagcgctcccgcggcccggagccgagcggccgccgcgccccggagcccggcccggccccgcccgctctgggcccccgcaggccaaggccgccgggcgggggcggggacgaccaacttggggcgcggcgtagccccgctctcccgagagctcggagcccgggagggctacggccgcggccagacggcgggagaggagcgcggcgagcggaggcggcgagcggcgcccgcgccgcagccccggcctgggcgagagcgcgaatatttttcaaaagactcaaactttcctcctttccccgttttctggggcccttcttgcctggaattgctctccagattcccgcggggcgccgggctgctattcttcccccgggtttatcggcggctcggctaacttcacggacccggggacccgcggcgctcgtccctcggccgaacccagcccgcgctgctccccggatcaggagggccgggcccggggctgcttcgccgccgcgagtgctttcagcccggccccctggagtcgggccgctgagcccacggcagcggccgcaggactggaaacagcagattgattaactcgagcggagccccggcctccccgactccgctccgctgaggggcggccccagtgcggggaaacgacaagtttgtcagtcgtccgtggcctgttggatcgaagcgccgcctccgccgccgagaggtccccggcgcctagcatcccgcgcggacggccctgggtacccggggcggctcggcggccgggctcctcgggtcggggcgctggctgctgtgccgggcgcgccgaggcacccggggctgggccagcgccccctgcgtccccacgcgggcagcggccccgccggaggagaaacacgggtcgccgccacctccgcctcttcagtctcctggtcttcgtcgccgctctctctctcacctctcagggaaagggggggacataggggcgtcgcggggccccggcgaatgcgccccccgccgcctctcgggctgcgccgcctcgcggggatgaagcaccggccgtgaagatggaggtgacctgccttctacttctggcgctgatccccttccactgccggggacaaggagtctacgctccagcccaggcgcagatcgtgcatgcgggccaggcatgtgtggtgaaagaggacaatatcagcgagcgtgtctacaccatccgggagggggacaccctcatgctgcagtgccttgtaacagggcaccctcgaccccaggtacggtggaccaagacggcaggtagcgcctcggacaagttccaggagacatcggtgttcaacgagacgctgcgcatcgagcgtattgcacgcacgcagggcggccgctactactgcaaggctgagaacggcgtgggggtgccggccatcaagtccatccgcgtggacgtgcagtacctggatgagccaatgctgacggtgcaccagacggtgagcgatgtgcgaggcaacttctaccaggagaagacggtgttcctgcgctgtactgtcaactccaacccgcctgcccgcttcatctggaagcggggttccgataccctatcccacagccaggacaatggggttgacatctatgagcccctctacactcagggggagaccaaggtcctgaagctgaagaacctgcggccccaggactatgccagctacacctgccaggtgtctgtgcgtaacgtgtgcggcatcccagacaaggccatcaccttccggctcaccaacaccacggcaccaccagccctgaagctgtctgtgaacgaaactctggtggtgaaccctggggagaatgtgacggtgcagtgtctgctgacaggcggtgatcccctcccccagctgcagtggtcccatgggcctggcccactgcccctgggtgctctggcccagggtggcaccctcagcatcccttcagtgcaggcccgggactctggctactacaactgcacagccaccaacaatgtgggcaaccctgccaagaagactgtcaacctgctggtgcgatccatgaagaacgctacattccagatcactcctgacgtgatcaaagagagtgagaacatccagctgggccaggacctgaagctatcgtgccacgtggatgcagtgccccaggagaaggtgacctaccagtggttcaagaatggcaagccggcacgcatgtccaagcggctgctggtgacccgcaatgatcctgagctgcccgcagtcaccagcagcctagagctcattgacctgcacttcagtgactatggcacctacctgtgcatggcttctttcccaggggcacccgtgcccgacctcagcgtcgaggtcaacatctcctctgagacagtgccgcccaccatcagtgtgcccaagggtagggccgtggtgaccgtgcgcgagggatcgcctgccgagctgcaatgcgaggtgcggggcaagccgcggccgccagtgctctggtcccgcgtggacaaggaggctgcactgctgccctcggggctgcccctggaggagactccggacgggaagctgcggctggagcgagtgagccgagacatgagcgggacctaccgctgccagacggcccgctataatggcttcaacgtgcgcccccgtgaggcccaggtgcagctgaacgtgcagttcccgccggaggtggagcccagttcccaggacgtgcgccaggcgctgggccggcccgtgctcctgcgctgctcgctgctgcgaggcagcccccagcgcatcgcctcggctgtgtggcgtttcaaagggcagctgctgccgccgccgcctgttgttcccgccgccgccgaggcgccggatcacgcggagctgcgcctcgacgccgtaactcgcgacagcagcggcagctacgagtgcagcgtctccaacgatgtgggctcggctgcctgcctcttccaggtctccgccaaagcctacagcccggagttttacttcgacacccccaaccccacccgcagccacaagctgtccaagaactactcctacgtgctgcagtggactcagagggagcccgacgctgtcgaccctgtgctcaactacagactcagcatccgccagttgaaccagcacaatgcggtggtcaaggccatcccggtccggcgtgtggagaaggggcagctgctggagtacatcctgaccgatctccgtgtgccccacagctatgaggtccgcctcacaccctataccaccttcggggctggtgacatggcctcccgcatcatccactacacagagcccatcaactctccgaacctttcagacaacacctgccactttgaggatgagaagatctgtggctatacccaggacctgacagacaactttgactggacgcggcagaatgccctcacccagaaccccaaacgctcccccaacactggtccccccaccgacataagtggcacccctgagggctactacatgttcatcgagacatcgaggcctcgggagctgggggaccgtgcaaggttagtgagtcccctctacaatgccagcgccaagttctactgtgtctccttcttctaccacatgtacgggaaacacatcggctccctcaacctcctggtgcggtcccggaacaaaggggctctggacacgcacgcctggtctctcagtggcaataagggcaatgtgtggcagcaggcccatgtgcccatcagccccagtgggcccttccagattatttttgagggggttcgaggcccgggctacctgggggatattgccatagatgacgtcacactgaagaagggggagtgtccccggaagcagacggatcccaataaagtggtggtgatgccgggcagtggagccccctgccagtccagcccacagctgtgggggcccatggccatcttcctcttggcgttgcagagatgatgagagctgtgtggccacccccccaaccttgcccccggcacaccaaagtgtccacattgtaccaaagactgacccccgccagctggggtgcccaggggcagggccggcccgccagggagggggcctgcattggctgcaaggatgagcagagaacaaggacagaggccaggcactgaggccctggagacagctgttccacttgcacacacgcacacactcatgctcacacacacagagatatattaaagcacaagtttctatctgacctgccagcaccttctttactgcaaagacaggggacttgcctgaatggcatccgccaacccagggacctcggcgcaacataggccttgtccttgctgcactcgtggtgtgcttctgactttaccctgtcccctaagtcaaggccgaactccagcctggtggctttgccagaagggagccagaagtggggcagacatggagcccctcccttggtcagactctgggactcctgagatgggagaggcagggatcagaggacgaacaggtgggactttgcgagctctgtgactgtcccacgtccaggagacaaggaaggtagggcacctgctgcacacgattctgtccagagtgagcactggatggtggagaccataggtcaccccagattccttgacctatttctgggacaccatatttccctcctcagtgtgcaccctttgaagggacccagcacagggtcttgggcctgggcagtctgaagactgataacttccccactccaccctacaagcagtgggactcctgagaacacggttctctcctagcctcagcccccagctgggtctcagaggagctgggggagcggtggccagcccattttctggggtgaggcttgacttggagaaaggcagaagagacgtcccgcttctgtgatttggtgcccccatatcagacaatgaatttggaagtggagaggggccttcatttcttatctacttggcatgaaagggtgccctggataggagggtgtgtacagggcaaaatgccaaaaagcactgtctagttgaaagttcccttctccacccaggggcagtgaaggaggaggggcttatagagctgggattggtggagggagcaggtgccagtcccctcactctctgggagctgtgaaagggatccctgtccttgggtcctgggttaggcacctgagattgacatgatgggatctagatctttcctccttgacatcacctgagcccccacctagccatccatgggagagagaaggcccagccccttctagaatgactctttaggcatgcgtgcatatgtgtgtatgtgtttgtgcccgtctgtgtctaggtaccaccgtgggtacattgttgggcaggagtgtgtgcaaacacaggtctgtgtgtgcaatctcacatatctgcctgtgagactggattgagacccattcgtttctatgaatgtccgtgtacgtcagcgtgtgtgtccaccttcctgagtgatgtgttcgcttgtagggtgctggctgaatagactctgtccagccctgttctgtagtctcaagctgcctgcgatggcctgaaattccacctttcatcccctatggatgacggagagcttacagatgaccctattgaatgcaagcacctttggtgaggagcatcacagggctccttctggagcatttggtggggacagctgcagagaagaggcctggaactcgggcagcactgcagtgccaggaggcaggcggggaaccgaggcaaaggctgcccatctccccctgccaggcctgtgtgatcattatcaccaacagctggtgggtggccgggccaggatgcagcggggccttctgatgcccaatcagcacggctgccttcctgacccagtcaaggcctctgtctgaaatgagtcgctccaggttctcagcatacacttccatcgcgtctgtcgggtattgttccttaactgtcccatctgtgcagagtccattgccccaactagactgtgagctcctcctctgagccttccaagtcccccctccaccttcgccacctcccgctcgtgcccagcacaagtgagcctggtgtggaaaccactccattgcccggtggaatggattctgtaatcagtggttcctggccttgcctgcagaatagaaccaccagagtcctttaaaaagtattgctgcttggttcccacctcagaggttctgagttaattggactggagcgcagtcggacatcaagaaatgttgaaaagctccttgggttctcctgacagcaggaaccactggcctggcaccacctgggtgcttcctctgtgccctcgctggggtaggcattggagcaccagagatgaatagccccaagtgctccctctttggggttcccaaggcaccctgtgcctgcttccctcagaggaccttccaatccatttgccccgcaaccctggctgctccgacaggggagacttgtctcccttgttcccctcaggatccatagagtggacagtaaaggtgctcagtacatgttggctgagctgaactgcatacatgtggcccccaggttcctggtctttatggacgaagggcacaaggtggaggggggatggggggatgctgctggaggtctcagtgggtgcagacagccctgccttgaggatggcttgacctgggattgacaaaatgtgtctgctgaaatgctgaggtccccacgtgtgaatgggtgaggctgatgtggatgtctgtgtgtgccagcaggtgggtgggggatgtgggtgtcagtgtatgccagtgggcactgtaaatgtctaggcatgtgctggtctctgtgtgtttgtgtgttcctcagcaggaatgagtgtctttgtgtatcacctggtgacttgtcagtgtctgtgtctgtgtgtgcctgtgagccagcatctctgtatcagtgttgctcatgctgtgtctttgtgcgccatggtgtgtcagtgtctgtgtgttgatgggtggcccatgagtgacccccgccaggggagaccaggctggctggatccagcacatctccccagtggcagcctcgccctctgggtcagggtgactgaggcattttgtggccttaaaacggggtgttcagggtcagccctcagggtgctggggcccttccatcccttgtccccttcaggttggtgaaaaggactccgggggccaggtgctgtatagcagcttatggaagtctcagctgggctatcctgcccttgggagcacagacaggctcctagggtgctgagtgaagcctgaagaccaagccccctcctcctggaatgctccttccacccctacctctcagagatgggcctgacacctctttctcattcattctccttttccctgtgctctgggaaagcccctggctcaggctgtcagagtgaggatggacctcaaaagtttgatcccctcgtgcagatgaagaagctgaagcccagagtggggaaggggagtggcccaaggtcacacagctagtttgagtagagccagtcttgggagagccaagtactacagccctgggggtgtcacaccgcttgtcactgcccctgaggtctcctgccaaacaactgcagggagtttggctaacagtcctgtgtccagggtgccggtggggatgttatagatgttgctgggatcctgccctcggctccaaattctggcctctcatcccaggctgcagacccttctgccccatgacaggcctgggtgccacacagaggtggccaccctcccaccacagtgtctgcagctgctgcccttctcccaggcccccagacagaagagaccctgtttcccctcctctcccctgtgacttcacaagagcttgggctaggagtgaaggtcagcatgttctcatgtgctcatcctcttggtttccccaaagaccgggagggtcacggatggggcgtgcagaatccttgtgttttttctcgctgggcagcttgaggggctggggagtattcccagggtctttgctctggagagtccctgcagagccactggctgaggttgggttcagggttcagcggagtcctccatgcttccaaaggccgggaagcacccgcctctctatcgagtcagtgctgtgcgtgtgtgtctgagaatgtgtgtgatgtgtggagtgtgcgtgtgtttgtgtgtgtgtgtgtgtgtgttggggcagaaggaccactctttcctggggatcccttgacccttataactagaagggaccttagggagcatctaagctggtgcccccattgtacaggcgaggtccagagggatggcatctgcccaccccaccccttgccctcttgttgcctgcactcatttcccagggaccctcctaggataggactgccctccttcctggccccctcccgccatcctcccagccacccacataatcaccatctcagcccaactctggtggccctctaggtctccatgcattcttcctgccctagagtagccagctcaccaaggcctttatccccagcccaggagaagggtcagggagggaaggggctgcaccagccctgagacctcaaagacttgggagaaaagccaaaactcctcatgcccaggcccacatgtctgaccaccccagcccaccccgccaccaaggtaaaagcacaacaggagacccccttattaatgggtgaaatgattggggttgtttttttagtcacacagccccatcctcacccctttgccttgctgtctgtctccaccccagcctctgttccccatttgcctctctttcacctccaagcccccaaatgtaacctctagttgcggacgcggttgttctatcaataaagctgcagtgttctagcgctcagcgtcagccgtgtgtgttggcagggcagagtgggccagggtcggggccggggcactggagggctcctctcagctccctgggggcagcctttcttctctttggcacctgtcgacagggatcctgctctgtggcctggacagtgaggacctgcatcctggtctgctcccagtgaacttgtgtgcatttgttcattcagcaaataccaaccaaacactgcctttgtggaagcccctgtttaatgggagagatggacagtaagctaataatgacaccaagacatatataatgatgtgtacagtgagggctgggaagggaaattggtgctatgaaagaaggtatgaagagggttcttatttgggttggggcttcggggaagacttctctaagagacatttaggagagacagaatgattggagttagcctgttgggattgggagaggcttctgagcagagggaacagaatatgcaaaggccaacagggcccaaaaacttagaaggctcaaggaaggggagtaagggcaaaggaggaggactaaagttggtatggtggttgaaatgccattttcccttctcggcacccaaccctaccatccctcctacacgcttggagtcccttccctcttaatctctattctggccctacagaccccaccctgcaccctacttggggctgcctcccttattcaccaccagctagctgcatccttgccctaagatcaagttatgccaacctttccctttaccccagacctctcagaattctagaatttcagagctaggaggtccttaaaggtcacttatttcaaacatctactcatatattgtaggtgagatgggcttgccaaggtcatggggataggcagtgatgagcatttgcaaagtgaccccaaatcaagggtgtggatgtcatgatatggactacatcatatcaggcaaatgacaggaagtgtctttcaggttacttggttacaatgattcaggtaggtcgattgggcagtttcacttccatgttccagatggggaaactgaagctcagattacaagaccaagggctccctctccctaccacctaagttttattggctctcatgttgggtaacttcttgctggcacacctggcctttcttttctaatggaagaggaagggtctaagggactcaccactgctgtaggttggctccctgagcacaggaagagaaatccgctcaagctcactcaagtacaggtgcattattgtgaggacaaacacagtgagggggatgggcactcagaaatccaaacaggagttgcaacagggatggttttcctgaaccagatgggcattttggattcaaggtagctctaggatcatcatctacagaagtttctggtgcttctgtattcttctggtgcttctgtattctacctgtggtagaataaagatggctgcaaatcccatgttatccttcctgtagagaggcagagtctaattcccttcctcttgaatctgggttgctcttagtgccttgtttgtgcaatagaatgtgacatgctgagttgaagatgccttggagcttcagctcaggcctcttggaacgttctctctggaagccctgaactgccacctaggatgtcctctgagttgctctgagaccgtcatgctggaggggctctggctgaccatcccagctgagtccagccttccagccatctccaccaaagcaccagaagatatgggagtgcagctgcctcagaccttccagaccagcctaactgccacctgaattgctcggccaagctctgtccaaattcctgacccatcgtcatgggatataataaaatagttgttttaa

SEQ ID NO: 17047 - DNA, 3021 bp, Homo sapiens
  source 1..3021: mol_type = unassigned DNA
atggaggtgacctgccttctacttctggcgctgatccccttccactgccggggacaaggagtctacgctccagcccaggcgcagatcgtgcatgcgggccaggcatgtgtggtgaaagaggacaatatcagcgagcgtgtctacaccatccgggagggggacaccctcatgctgcagtgccttgtaacagggcaccctcgaccccaggtacggtggaccaagacggcaggtagcgcctcggacaagttccaggagacatcggtgttcaacgagacgctgcgcatcgagcgtattgcacgcacgcagggcggccgctactactgcaaggctgagaacggcgtgggggtgccggccatcaagtccatccgcgtggacgtgcagtacctggatgagccaatgctgacggtgcaccagacggtgagcgatgtgcgaggcaacttctaccaggagaagacggtgttcctgcgctgtactgtcaactccaacccgcctgcccgcttcatctggaagcggggttccgataccctatcccacagccaggacaatggggttgacatctatgagcccctctacactcagggggagaccaaggtcctgaagctgaagaacctgcggccccaggactatgccagctacacctgccaggtgtctgtgcgtaacgtgtgcggcatcccagacaaggccatcaccttccggctcaccaacaccacggcaccaccagccctgaagctgtctgtgaacgaaactctggtggtgaaccctggggagaatgtgacggtgcagtgtctgctgacaggcggtgatcccctcccccagctgcagtggtcccatgggcctggcccactgcccctgggtgctctggcccagggtggcaccctcagcatcccttcagtgcaggcccgggactctggctactacaactgcacagccaccaacaatgtgggcaaccctgccaagaagactgtcaacctgctggtgcgatccatgaagaacgctacattccagatcactcctgacgtgatcaaagagagtgagaacatccagctgggccaggacctgaagctatcgtgccacgtggatgcagtgccccaggagaaggtgacctaccagtggttcaagaatggcaagccggcacgcatgtccaagcggctgctggtgacccgcaatgatcctgagctgcccgcagtcaccagcagcctagagctcattgacctgcacttcagtgactatggcacctacctgtgcatggcttctttcccaggggcacccgtgcccgacctcagcgtcgaggtcaacatctcctctgagacagtgccgcccaccatcagtgtgcccaagggtagggccgtggtgaccgtgcgcgagggatcgcctgccgagctgcaatgcgaggtgcggggcaagccgcggccgccagtgctctggtcccgcgtggacaaggaggctgcactgctgccctcggggctgcccctggaggagactccggacgggaagctgcggctggagcgagtgagccgagacatgagcgggacctaccgctgccagacggcccgctataatggcttcaacgtgcgcccccgtgaggcccaggtgcagctgaacgtgcagttcccgccggaggtggagcccagttcccaggacgtgcgccaggcgctgggccggcccgtgctcctgcgctgctcgctgctgcgaggcagcccccagcgcatcgcctcggctgtgtggcgtttcaaagggcagctgctgccgccgccgcctgttgttcccgccgccgccgaggcgccggatcacgcggagctgcgcctcgacgccgtaactcgcgacagcagcggcagctacgagtgcagcgtctccaacgatgtgggctcggctgcctgcctcttccaggtctccgccaaagcctacagcccggagttttacttcgacacccccaaccccacccgcagccacaagctgtccaagaactactcctacgtgctgcagtggactcagagggagcccgacgctgtcgaccctgtgctcaactacagactcagcatccgccagttgaaccagcacaatgcggtggtcaaggccatcccggtccggcgtgtggagaaggggcagctgctggagtacatcctgaccgatctccgtgtgccccacagctatgaggtccgcctcacaccctataccaccttcggggctggtgacatggcctcccgcatcatccactacacagagcccatcaactctccgaacctttcagacaacacctgccactttgaggatgagaagatctgtggctatacccaggacctgacagacaactttgactggacgcggcagaatgccctcacccagaaccccaaacgctcccccaacactggtccccccaccgacataagtggcacccctgagggctactacatgttcatcgagacatcgaggcctcgggagctgggggaccgtgcaaggttagtgagtcccctctacaatgccagcgccaagttctactgtgtctccttcttctaccacatgtacgggaaacacatcggctccctcaacctcctggtgcggtcccggaacaaaggggctctggacacgcacgcctggtctctcagtggcaataagggcaatgtgtggcagcaggcccatgtgcccatcagccccagtgggcccttccagattatttttgagggggttcgaggcccgggctacctgggggatattgccatagatgacgtcacactgaagaagggggagtgtccccggaagcagacggatcccaataaaggtgcaagacgggaaggaggtgggggagctgaatctggagggagctgtgcgtggcgggggttcctgtctgttgagggagggtgtttgggtctgaataggggttcagaatgtctgagtgatgggaatcatgtggctctgactgtgtgaaggtgtgccccacactcactcaggctgtgtacttgtgtaaacaatgagaagcctggcccccaccctcgtgatgagcatactgacctgttcacggtatca

SEQ ID NO: 17048 - DNA, 2965 bp, Homo sapiens
  source 1..2965: mol_type = unassigned DNA
tcgagcatctggttattcaagctcctcccacggttcgtattgtgcactcaggcttggcctgtaacattgaagaggagcgctactccgaaagggtctacactatccgggaaggagaaacccttgagttgacttgtctagtcacaggacatccacgtccacagatcaggtggaccaaaacagcaggaagtgcctctgacagattccaagactcaagtgtcttcaatgagactttgaggattacaaatattcagcgacaccaaggaggccggtattactgtaaagcagagaatggcttggggtctccagcgataaagtcaatcagagtggatgtatactatttggatgatccagtagtaactgttcatcaaagtataggtgaagctaaagaacaattttactatgagagaacagtgttcctccggtgtgttgccaattccaatcctcctgttcggtatagctggagacgtggccaggaggtcttgctgcaaggatctgataaaggagttgagatttatgaaccattctttacccagggtgaaacaaagatcttaaaactaaagaatcttcgacctcaggactatgctaattatagctgcattgcttcagtgaggaatgtatgtaatattcctgataagatggtgtcgtttagactgtccaataaaacagcatcaccgtcaattaaactcttggtggatgatcctatagttgtaaatcctggagaggccataacattagtatgtgttacaacaggaggagagcctgcaccttctctcacctgggtcaggtcctttgggactctgcctgaaaagactgttttgaatggaggaactttgaccatacctgccatcacctcagatgatgctggtacttacagctgcattgccaataataatgtgggaaaccctgcaaaaaagtccaccaacatcattgtgagagcattaaaaaaaggacgattttggatcacaccagatccttatcacaaagatgacaacatccagattggccgtgaggtgaaaatatcttgccaagtagaagctgttccttctgaggagctaacatttagttggtttaaaaatggtcgtccattaagaagttctgagcggatggtcattacacagactgatcctgatgtctctccgggaacaacaaacttggacatcattgatttaaaattcacggattttgggacgtacacatgtgtagcatctctgaagggaggaggaatatctgatatcagtatcgatgttaatatatccagcagcacagttccacccaatctgactgttccacaggaaaaatcaccattggtcaccagagaaggagacacaatagaactgcaatgtcaagtaactggcaaacctaaaccaatcatcctttggtctagagcggataaagaagttgcaatgcctgatggatcaatgcaaatggagagttatgatggaacactgaggattgtgaatgtatctagggaaatgtcaggaatgtacagatgtcagaccagccaatacaatggatttaacgtgaaaccaagggaagccttggtgcagctcatcgttcagtatccccctgcagtggaaccagcattcttggaaatccggcaaggacaggatcgaagtgtcactatgagttgcagagtactgagagcctatccaatacgggtgctgacctatgagtggcgcttgggcaataaattattacggacgggtcaatttgactctcaggaatacacagagtacgctgtgaagagtctttccaatgaaaactatggggtttataactgtagcatcataaatgaagctggagctgggagatgcagctttcttgttacaggaaaggcctatgctccagaattctattatgatacctacaatccagtatggcagaacagacaccgtgtttattcttacagtctacagtggacacagatgaatcctgatgcagtggatcggattgttgcataccggttgggcatcaggcaggctggacagcagcgctggtgggagcaggagattaaaataaatgggaatattcaaaagggagaattaattacatataacttgacagagctaattaaaccagaagcttatgaagtccgactgactcctctcaccaaatttggtgaaggagattcaacaattcgtgtgatcaaatatagtgctcctgtaaatcctcatttgagagaatttcattgtggatttgaagatggtaatatttgtttgttcactcaagatgatacagataattttgactggacaaagcaaagtacagcaacaagaaatacaaaatatactcctaatacaggacctaatgctgaccgtagtggctccaaagaaggtttttatatgtacattgagacatcacgacccagattggaaggcgaaaaggctcgacttctcagccctgttttcagcatagctcccaaaaacccttatggacccacaaacactgcatattgtttcagcttcttttatcacatgtatggacaacatataggtgtcttaaatgtttatctacgtttgaaagggcaaacaacaatagagaatccactgtggtcttcaagtgggaataaaggacaaagatggaatgaggctcatgttaatatatacccaattacttcatttcagctcatttttgaaggtatccgaggtcctggaatagaaggtgacattgctattgatgatgtatcaattgcagaaggagaatgtgcaaaacaagacctagcaactaagaattccgttgatggtgctgttgggattttggttcatatatggctttttcccattatcgtcctcatctctatcttaagtcctcgaaggtgaccttatcctggcagaggctataaaagattcaccaggcactggcatgaagaaagagtctttgtaaatggacattgaacaaacaaactaccaaagattcctccactgactactgactcaaaaataaaataataaaaacaaattttttt

SEQ ID NO: 17049 - DNA, 2416 bp, Homo sapiens
  source 1..2416: mol_type = unassigned DNA
aaaataaatgggaatattcaaaagggagaattaattacatataacttgacagagctaattaaaccagaagcttatgaagtccgactgactcctctcaccaaatttggtgaaggagattcaacaattcgtgtgatcaaatatagtggagaatttcattgtggatttgaagatggtaatatttgtttgttcactcaagatgatacagataattttgactggacaaagcaaagtacagcaacaagaaatacaaaatatactcctaatacaggacctaatgctgaccgtagtggctccaaagaaggtttttatatgtacattgagacatcacgacccagattggaaggcgaaaaggctcgacttctcagccctgttttcagcatagctcccaaaaacccttatggacccacaaacactgcatattgtttcagcttcttttatcacatgtatggacaacatataggtgtcttaaatgtttatctacgtttgaaagggcaaacaacaatagagaatccactgtggtcttcaagtgggaataaaggacaaagatggaatgaggctcatgttaatatatacccaattacttcatttcagctcatttttgaaggtatccgaggtcctggaatagaaggtgacattgctattgatgatgtatcaattgcagaaggagaatgtgcaaaacaagacctagcaactaagaattccgttgatggtgctgttgggattttggttcatatatggctttttcccattatcgtcctcatctctatcttaagtcctcgaaggtgaccttatcctggcagaggctataaaagattcaccaggcactggcatgaagaaagagtctttgtaaatggacattgaacaaacaaactaccaaagattcctccactgactactgactcaaaaataaaataataaaaacaaatttttttaagcactggggataaaaagacatcatggaagtataacttattccagactaaacataaaagataatcttgacctgagtagagaagagaccttcaggtgcttttgtggctaaaaagattacagcgtcatctggttgaactctggaaaaaaaaaaaaaaatgaaaaaaagaaaaaaaaaagagctatagaaatccttgtcaaagcacaaagtcatggctggttttgtttcaaatgaatagtttgcttgttaccatggaaacctaatggcctgccaacaaaaacctcactgtaaacagggtacgtgaagagctggcatttattttccttacgagaaggttttcgtagagaattaaataaatgtaggcccttttacctttggctgttacccttccttgaaaataacccgaactcagaattatttaaagcattcatgtttctccccaccttatccccatcccacctttattattattatttttctcccatggctaagctagataactgtatgctgtctctttttgcatgcactactatccaggatggtaaacctgggcttacatgttacacaggcttatcggagtttgcttgcggccacttgaacacccaaactacgtcatctgttccaatgaagaaaccaaaccaccatcttttataaattgccatggaaaccaagtgccttcaatgaaacaagcctgaataattttcaactcagaagcttgcactgctaagagtggtttgtgtaaaactattttataaacaaactacagagcctaaatgtgcaaattacaggcaagacaacaaagccgcttctgaagaagaaaggaccgaagctgctgcgtaagcccatgcagacaagatatttgttgtttaacctcctagacagccatggcctttcggcttattgtccattagaaaatcacttccattgagaccagacatggagcaacactttttttcttccaggttattaaatgggtcaaccagagcaaaaggttattaagaatacttagtgcagaaggtggtaaaacacaaaagtgatttttttactctaacctccatttgaaatgaaattggccctagctttagagggaacaagaaaatgtttgggattgcagtgcatactaactctacagtggaactgggcctgaaaaatctggctttattctaaactctgagggtaatatgcctctgccctttagtcagactctgtgcaaattgtgaaatattattttattattttaccaagattataaaaacacttttacaaaaaaacaaaaacctgtaaaaataattttgagctacctgacgacaaatcatatctttaaccagccagttttccaatgcattgtaaatttcacttaaacctgttggttatgaaaatttgaagatcattttccttaaattatctcagcttttaacttcatttaaaaagacttttgtctaagaagaatattattattatatgttctttcaacaccccaggatt

SEQ ID NO: 17050 - DNA, 5075 bp, Homo sapiens
  source 1..5075: mol_type = unassigned DNA
acttcgcctcgcagctccccttcccatcaccgccccctgctcctccccggcgtctgcgattttcccaggcacccggtgtgagtgcggcgtgcgtgtgagtgtgtgtcagggtattgtgttgtgggagagtgtgtgagtgtgtgtgagtgtgtgtgtgcatgagtgtgtggagtgcggggctcctgcgctccgctcgccgccgccgccggggaaggacagacggacggcgcttcctccttcggcgagcggttcccgggcacctcggcttggcccgggcgcgagtggagcgcgcctggctggccgccggcctcctgaaggtcccgttgcgtaccccctgggctggatatgttcatgttcacgtgaagatggatttactgtacggtctcgtgtggctgctgacagtcctcctggaggggatctctggccaaggagtgtacgctcctcccacggttcgtattgtgcactcaggcttggcctgtaacattgaagaggagcgctactccgaaagggtctacactatccgggaaggagaaacccttgagttgacttgtctagtcacaggacatccacgtccacagatcaggtggaccaaaacagcaggaagtgcctctgacagattccaagactcaagtgtcttcaatgagactttgaggattacaaatattcagcgacaccaaggaggccggtattactgtaaagcagagaatggcttggggtctccagcgataaagtcaatcagagtggatgtatactatttggatgatccagtagtaactgttcatcaaagtataggtgaagctaaagaacaattttactatgagagaacagtgttcctccggtgtgttgccaattccaatcctcctgttcggtatagctggagacgtggccaggaggtcttgctgcaaggatctgataaaggagttgagatttatgaaccattctttacccagggtgaaacaaagatcttaaaactaaagaatcttcgacctcaggactatgctaattatagctgcattgcttcagtgaggaatgtatgtaatattcctgataagatggtgtcgtttagactgtccaataaaacagcatcaccgtcaattaaactcttggtggatgatcctatagttgtaaatcctggagaggccataacattagtatgtgttacaacaggaggagagcctgcaccttctctcacctgggtcaggtcctttgggactctgcctgaaaagactgttttgaatggaggaactttgaccatacctgccatcacctcagatgatgctggtacttacagctgcattgccaataataatgtgggaaaccctgcaaaaaagtccaccaacatcattgtgagagcattaaaaaaaggacgattttggatcacaccagatccttatcacaaagatgacaacatccagattggccgtgaggtgaaaatatcttgccaagtagaagctgttccttctgaggagctaacatttagttggtttaaaaatggtcgtccattaagaagttctgagcggatggtcattacacagactgatcctgatgtctctccgggaacaacaaacttggacatcattgatttaaaattcacggattttgggacgtacacatgtgtagcatctctgaagggaggaggaatatctgatatcagtatcgatgttaatatatccagcagcacagttccacccaatctgactgttccacaggaaaaatcaccattggtcaccagagaaggagacacaatagaactgcaatgtcaagtaactggcaaacctaaaccaatcatcctttggtctagagcggataaagaagttgcaatgcctgatggatcaatgcaaatggagagttatgatggaacactgaggattgtgaatgtatctagggaaatgtcaggaatgtacagatgtcagaccagccaatacaatggatttaacgtgaaaccaagggaagccttggtgcagctcatcgttcagtatccccctgcagtggaaccagcattcttggaaatccggcaaggacaggatcgaagtgtcactatgagttgcagagtactgagagcctatccaatacgggtgctgacctatgagtggcgcttgggcaataaattattacggacgggtcaatttgactctcaggaatacacagagtacgctgtgaagagtctttccaatgaaaactatggggtttataactgtagcatcataaatgaagctggagctgggagatgcagctttcttgttacaggaaaggcctatgctccagaattctattatgatacctacaatccagtatggcagaacagacaccgtgtttattcttacagtctacagtggacacagatgaatcctgatgcagtggatcggattgttgcataccggttgggcatcaggcaggctggacagcagcgctggtgggagcaggagattaaaataaatgggaatattcaaaagggagaattaattacatataacttgacagagctaattaaaccagaagcttatgaagtccgactgactcctctcaccaaatttggtgaaggagattcaacaattcgtgtgatcaaatatagtgctcctgtaaatcctcatttgagagaatttcattgtggatttgaagatggtaatatttgtttgttcactcaagatgatacagataattttgactggacaaagcaaagtacagcaacaagaaatacaaaatatactcctaatacaggacctaatgctgaccgtagtggctccaaagaaggtttttatatgtacattgagacatcacgacccagattggaaggcgaaaaggctcgacttctcagccctgttttcagcatagctcccaaaaacccttatggacccacaaacactgcatattgtttcagcttcttttatcacatgtatggacaacatataggtgtcttaaatgtttatctacgtttgaaagggcaaacaacaatagagaatccactgtggtcttcaagtgggaataaaggacaaagatggaatgaggctcatgttaatatatacccaattacttcatttcagctcatttttgaaggtatccgaggtcctggaatagaaggtgacattgctattgatgatgtatcaattgcagaaggagaatgtgcaaaacaagacctagcaactaagaattccgttgatggtgctgttgggattttggttcatatatggctttttcccattatcgtcctcatctctatcttaagtcctcgaaggtgaccttatcctggcagaggctataaaagattcaccaggcactggcatgaagaaagagtctttgtaaatggacattgaacaaacaaactaccaaagattcctccactgactactgactcaaaaataaaataataaaaacaaatttttttaagcactggggataaaaagacatcatggaagtataacttattccagactaaacataaaagataatcttgacctgagtagagaagagaccttcaggtgcttttgtggctaaaaagattacagcgtcatctggttgaactctggaaaaaaaaaaaaaaatgaaaaaaagaaaaaaaaaagagctatagaaatccttgtcaaagcacaaagtcatggctggttttgtttcaaatgaatagtttgcttgttaccatggaaacctaatggcctgccaacaaaaacctcactgtaaacagggtacgtgaagagctggcatttattttccttacgagaaggttttcgtagagaattaaataaatgtaggcccttttacctttggctgttacccttccttgaaaataacccgaactcagaattatttaaagcattcatgtttctccccaccttatccccatcccacctttattattattatttttctcccatggctaagctagataactgtatgctgtctctttttgcatgcactactatccaggatggtaaacctgggcttacatgttacacaggcttatcggagtttgcttgcggccacttgaacacccaaactacgtcatctgttccaatgaagaaaccaaaccaccatcttttataaattgccatggaaaccaagtgccttcaatgaaacaagcctgaataattttcaactcagaagcttgcactgctaagagtggtttgtgtaaaactattttataaacaaactacagagcctaaatgtgcaaattacaggcaagacaacaaagccgcttctgaagaagaaaggaccgaagctgctgcgtaagcccatgcagacaagatatttgttgtttaacctcctagacagccatggcctttcggcttattgtccattagaaaatcacttccattgagaccagacatggagcaacactttttttcttccaggttattaaatgggtcaaccagagcaaaaggttattaagaatacttagtgcagaaggtggtaaaacacaaaagtgatttttttactctaacctccatttgaaatgaaattggccctagctttagagggaacaagaaaatgtttgggattgcagtgcatactaactctacagtggaactgggcctgaaaaatctggctttattctaaactctgagggtaatatgcctctgccctttagtcagactctgtgcaaattgtgaaatattattttattattttaccaagattataaaaacacttttacaaaaaaacaaaaacctgtaaaaataattttgagctacctgacgacaaatcatatctttaaccagccagttttccaatgcattgtaaatttcacttaaacctgttggttatgaaaatttgaagatcattttccttaaattatctcagcttttaacttcatttaaaaagacttttgtctaagaagaatattattattatatgttctttcaacaccccaggattaaaaaaactgattatgcaagcaattggaatataagtattaaattatagcatttgcaaatattaatataaaagcacaacaaaatgtagtggaaaatgacaaagcttgttttttaaaacaattctgtagaaatgtttgtgcaaattcagtaattcaacttaaaatataattttacagctatgttcaataaagcctctttccaggtaaggta

SEQ ID NO: 17051 - DNA, 5239 bp, Homo sapiens
  source 1..5239: mol_type = unassigned DNA
gaaaaaaacaaacaaacaaaaaaaatcaccattccttttaatagcttgagcctgtaccagaatgataagtggaaattagtcctcaaagtaacctcagctgtttcattattgtgtgcctcgagcatctggttattcaagctcctcccacggttcgtattgtgcactcaggcttggcctgtaacattgaagaggagcgctactccgaaagggtctacactatccgggaaggagaaacccttgagttgacttgtctagtcacaggacatccacgtccacaggtggaccaaaacagcaggaagtgcctctgacagattccaagactcaagtgtcttcaatgagactttgaggattacaaatattcagcgacaccaaggaggccggtattactgtaaagcagagaatggcttggggtctccagcgataaagtcaatcagagtggatgtatactatttggatgatccagtagtaactgttcatcaaagtataggtgaagctaaagaacaattttactatgagagaacagtgttcctccggtgtgttgccaattccaatcctcctgttcggtatagctggagacgtggccaggaggtcttgctgcaaggatctgataaaggagttgagatttatgaaccattctttacccagggtgaaacaaagatcttaaaactaaagaatcttcgacctcaggactatgctaattatagctgcattgcttcagtgaggaatgtatgtaatattcctgataagatggtgtcgtttagactgtccaataaaacagcatcaccgtcaattaaactcttggtggatgatcctatagttgtaaatcctggagaggccataacattagtatgtgttacaacaggaggagagcctgcaccttctctcacctgggtcaggtcctttgggactctgcctgaaaagactgttttgaatggaggaactttgaccatacctgccatcacctcagatgatgctggtacttacagctgcattgccaataataatgtgggaaaccctgcaaaaaagtccaccaacatcattgtgagagcattaaaaaaaggacgattttggatcacaccagatccttatcacaaagatgacaacatccagattggccgtgaggtgaaaatatcttgccaagtagaagctgttccttctgaggagctaacatttagttggtttaaaaatggtcgtccattaagaagttctgagcggatggtcattacacagactgatcctgatgtctctccgggaacaacaaacttggacatcattgatttaaaattcacggattttgggacgtacacatgtgtagcatctctgaagggaggaggaatatctgatatcagtatcgatgttaatatatccagcagcacagttccacccaatctgactgttccacaggaaaaatcaccattggtcaccagagaaggagacacaatagaactgcaatgtcaagtaactggcaaacctaaaccaatcatcctttggtctagagcggataaagaagttgcaatgcctgatggatcaatgcaaatggagagttatgatggaacactgaggattgtgaatgtatctagggaaatgtcaggaatgtacagatgtcagaccagccaatacaatggatttaacgtgaaaccaagggaagccttggtgcagctcatcgttcagtatccccctgcagtggaaccagcattcttggaaatccggcaaggacaggatcgaagtgtcactatgagttgcagagtactgagagcctatccaatacgggtgctgacctatgagtggcgcttgggcaataaattattacggacgggtcaatttgactctcaggaatacacagagtacgctgtgaagagtctttccaatgaaaactatggggtttataactgtagcatcataaatgaagctggagctgggagatgcagctttcttgttacaggaaaggcctatgctccagaattctattatgatacctacaatccagtatggcagaacagacaccgtgtttattcttacagtctacagtggacacagatgaatcctgatgcagtggatcggattgttgcataccggttgggcatcaggcaggctggacagcagcgctggtgggagcaggagattaaaataaatgggaatattcaaaagggagaattaattacatataacttgacagagctaattaaaccagaagcttatgaagtccgactgactcctctcaccaaatttggtgaaggagattcaacaattcgtgtgatcaaatatagtgctcctgtaaatcctcatttgagagaatttcattgtggatttgaagatggtaatatttgtttgttcactcaagatgatacagataattttgactggacaaagcaaagtacagcaacaagaaatacaaaatatactcctaatacaggacctaatgctgaccgtagtggctccaaagaaggtttttatatgtacattgagacatcacgacccagattggaaggcgaaaaggctcgacttctcagccctgttttcagcatagctcccaaaaacccttatggacccacaaacactgcatattgtttcagcttcttttatcacatgtatggacaacatataggtgtcttaaatgtttatctacgtttgaaagggcaaacaacaatagagaatccactgtggtcttcaagtgggaataaaggacaaagatggaatgaggctcatgttaatatatacccaattacttcatttcagctcatttttgaaggtatccgaggtcctggaatagaaggtgacattgctattgatgatgtatcaattgcagaaggagaatgtgcaaaacaagacctagcaactaagaattccgttgatggtgctgttgggattttggttcatatatggctttttcccattatcgtcctcatctctatcttaagtcctcgaaggtgaccttatcctggcagaggctataaaagattcaccaggcactggcatgaagaaagagtctttgtaaatggacattgaacaaacaaactaccaaagattcctccactgactactgactcaaaaataaaataataaaaacaaatttttttaagcactggggataaaaagacatcatggaagtataacttattccagactaaacataaaagataatcttgacctgagtagagaagagaccttcaggtgcttttgtggctaaaaagattacagcgtcatctggttgaactctggaaaaaaaaaaaaaaatgaaaaaaagaaaaaaaaaagagctatagaaatccttgtcaaagcacaaagtcatggctggttttgtttcaaatgaatagtttgcttgttaccatggaaacctaatggcctgccaacaaaaacctcactgtaaacagggtacgtgaagagctggcatttattttccttacgagaaggttttcgtagagaattaaataaatgtaggcccttttacctttggctgttacccttccttgaaaataacccgaactcagaattatttaaagcattcatgtttctccccaccttatccccatcccacctttattattattatttttctcccatggctaagctagataactgtatgctgtctctttttgcatgcactactatccaggatggtaaacctgggcttacatgttacacaggcttatcggagtttgcttgcggccacttgaacacccaaactacgtcatctgttccaatgaagaaaccaaaccaccatcttttataaattgccatggaaaccaagtgccttcaatgaaacaagcctgaataattttcaactcagaagcttgcactgctaagagtggtttgtgtaaaactattttataaacaaactacagagcctaaatgtgcaaattacaggcaagacaacaaagccgcttctgaagaagaaaggaccgaagctgctgcgtaagcccatgcagacaagatatttgttgtttaacctcctagacagccatggcctttcggcttattgtccattagaaaatcacttccattgagaccagacatggagcaacactttttttcttccaggttattaaatgggtcaaccagagcaaaaggttattaagaatacttagtgcagaaggtggtaaaacacaaaagtgatttttttactctaacctccatttgaaatgaaattggccctagctttagagggaacaagaaaatgtttgggattgcagtgcatactaactctacagtggaactgggcctgaaaaatctggctttattctaaactctgagggtaatatgcctctgccctttagtcagactctgtgcaaattgtgaaatattattttattattttaccaagattataaaaacacttttacaaaaaaacaaaaacctgtaaaaataattttgagctacctgacgacaaatcatatctttaaccagccagttttccaatgcattgtaaatttcacttaaacctgttggttatgaaaatttgaagatcattttccttaaattatctcagcttttaacttcatttaaaaagacttttgtctaagaagaatattattattatatgttctttcaacaccccaggattaaaaaaactgattatgcaagcaattggaatataagtattaaattatagcatttgcaaatattaatataaaagcacaacaaaatgtagtggaaaatgacaaagcttgttttttaaaacaattctgtagaaatgtttgtgcaaattcagtaattcaacttaaaatataattttacagctatgttcaataaagcctctttccaggtaaggtatgacaagcagtatgtgtgtttgttgagcaatgttcacttatcactaaaatgaaattagttatacaatttattggttaccatgggataaatcttcagtgctccacataccttaatgtctgcagaaagaaattttaataggaactccctgatgcactcccctatattgtaatacatgcagaaagcagttaaacctttgaaggtaaaatatgaaacatatatgaacctggaatttaatgtctattttcagtcagttcaaaaggggaccagtttgaatatttaggtagtgatggaattgatctgaaccaagtcctttaaattaaacataataaacaaatgagtttcataacttatttgaatgaattagacatcttaaaattttttcagagtttcacagtaacccatatactttatcagaccaaagagattcaagtacacaatatctggggcatttcttttacgttttacaaaa

SEQ ID NO: 17052 - DNA, 5179 bp, Homo sapiens
  source 1..5179: mol_type = unassigned DNA
atggatttactgtacggtctcgtgtggctgctgacagtcctcctggaggggatctctggccaaggagtgtacgctcctcccacggttcgtattgtgcactcaggcttggcctgtaacattgaagaggagcgctactccgaaagggtctacactatccgggaaggagaaacccttgagttgacttgtctagtcacaggacatccacgtccacagatcaggtggaccaaaacagcaggaagtgcctctgacagattccaagactcaagtgtcttcaatgagactttgaggattacaaatattcagcgacaccaaggaggccggtattactgtaaagcagagaatggcttggggtctccagcgataaagtcaatcagagtggatgtatactatttggatgatccagtagtaactgttcatcaaagtataggtgaagctaaagaacaattttactatgagagaacagtgttcctccggtgtgttgccaattccaatcctcctgttcggtatagctggagacgtggccaggaggtcttgctgcaaggatctgataaaggagttgagatttatgaaccattctttacccagggtgaaacaaagatcttaaaactaaagaatcttcgacctcaggactatgctaattatagctgcattgcttcagtgaggaatgtatgtaatattcctgataagatggtgtcgtttagactgtccaataaaacagcatcaccgtcaattaaactcttggtggatgatcctatagttgtaaatcctggagaggccataacattagtatgtgttacaacaggaggagagcctgcaccttctctcacctgggtcaggtcctttgggactctgcctgaaaagactgttttgaatggaggaactttgaccatacctgccatcacctcagatgatgctggtacttacagctgcattgccaataataatgtgggaaaccctgcaaaaaagtccaccaacatcattgtgagagcattaaaaaaaggacgattttggatcacaccagatccttatcacaaagatgacaacatccagattggccgtgaggtgaaaatatcttgccaagtagaagctgttccttctgaggagctaacatttagttggtttaaaaatggtcgtccattaagaagttctgagcggatggtcattacacagactgatcctgatgtctctccgggaacaacaaacttggacatcattgatttaaaattcacggattttgggacgtacacatgtgtagcatctctgaagggaggaggaatatctgatatcagtatcgatgttaatatatccagcagcacagttccacccaatctgactgttccacaggaaaaatcaccattggtcaccagagaaggagacacaatagaactgcaatgtcaagtaactggcaaacctaaaccaatcatcctttggtctagagcggataaagaagttgcaatgcctgatggatcaatgcaaatggagagttatgatggaacactgaggattgtgaatgtatctagggaaatgtcaggaatgtacagatgtcagaccagccaatacaatggatttaacgtgaaaccaagggaagccttggtgcagctcatcgttcagtatccccctgcagtggaaccagcattcttggaaatccggcaaggacaggatcgaagtgtcactatgagttgcagagtactgagagcctatccaatacgggtgctgacctatgagtggcgcttgggcaataaattattacggacgggtcaatttgactctcaggaatacacagagtacgctgtgaagagtctttccaatgaaaactatggggtttataactgtagcatcataaatgaagctggagctgggagatgcagctttcttgttacaggaaaggcctatgctccagaattctattatgatacctacaatccagtatggcagaacagacaccgtgtttattcttacagtctacagtggacacagatgaatcctgatgcagtggatcggattgttgcataccggttgggcatcaggcaggctggacagcagcgctggtgggagcaggagattaaaataaatgggaatattcaaaagggagaattaattacatataacttgacagagctaattaaaccagaagcttatgaagtccgactgactcctctcaccaaatttggtgaaggagattcaacaattcgtgtgatcaaatatagtgctcctgtaaatcctcatttgagagaatttcattgtggatttgaagatggtaatatttgtttgttcactcaagatgatacagataattttgactggacaaagcaaagtacagcaacaagaaatacaaaatatactcctaatacaggacctaatgctgaccgtagtggctccaaagaaggtttttatatgtacattgagacatcacgacccagattggaaggcgaaaaggctcgacttctcagccctgttttcagcatagctcccaaaaacccttatggacccacaaacactgcatattgtttcagcttcttttatcacatgtatggacaacatataggtgtcttaaatgtttatctacgtttgaaagggcaaacaacaatagagaatccactgtggtcttcaagtgggaataaaggacaaagatggaatgaggctcatgttaatatatacccaattacttcatttcagctcatttttgaaggtatccgaggtcctggaatagaaggtgacattgctattgatgatgtatcaattgcagaaggagaatgtgcaaaacaagacctagcaactaagaattccgttgatggtgctgttgggattttggttcatatatggctttttcccattatcgtcctcatctctatcttaagtcctcgaaggtgaccttatcctggcagaggctataaaagattcaccaggcactggcatgaagaaagagtctttgtaaatggacattgaacaaacaaactaccaaagattcctccactgactactgactcaaaaataaaataataaaaacaaatttttttaagcactggggataaaaagacatcatggaagtataacttattccagactaaacataaaagataatcttgacctgagtagagaagagaccttcaggtgcttttgtggctaaaaagattacagcgtcatctggttgaactctggaaaaaaaaaaaaaaatgaaaaaaagaaaaaaaaaagagctatagaaatccttgtcaaagcacaaagtcatggctggttttgtttcaaatgaatagtttgcttgttaccatggaaacctaatggcctgccaacaaaaacctcactgtaaacagggtacgtgaagagctggcatttattttccttacgagaaggttttcgtagagaattaaataaatgtaggcccttttacctttggctgttacccttccttgaaaataacccgaactcagaattatttaaagcattcatgtttctccccaccttatccccatcccacctttattattattatttttctcccatggctaagctagataactgtatgctgtctctttttgcatgcactactatccaggatggtaaacctgggcttacatgttacacaggcttatcggagtttgcttgcggccacttgaacacccaaactacgtcatctgttccaatgaagaaaccaaaccaccatcttttataaattgccatggaaaccaagtgccttcaatgaaacaagcctgaataattttcaactcagaagcttgcactgctaagagtggtttgtgtaaaactattttataaacaaactacagagcctaaatgtgcaaattacaggcaagacaacaaagccgcttctgaagaagaaaggaccgaagctgctgcgtaagcccatgcagacaagatatttgttgtttaacctcctagacagccatggcctttcggcttattgtccattagaaaatcacttccattgagaccagacatggagcaacactttttttcttccaggttattaaatgggtcaaccagagcaaaaggttattaagaatacttagtgcagaaggtggtaaaacacaaaagtgatttttttactctaacctccatttgaaatgaaattggccctagctttagagggaacaagaaaatgtttgggattgcagtgcatactaactctacagtggaactgggcctgaaaaatctggctttattctaaactctgagggtaatatgcctctgccctttagtcagactctgtgcaaattgtgaaatattattttattattttaccaagattataaaaacacttttacaaaaaaacaaaaacctgtaaaaataattttgagctacctgacgacaaatcatatctttaaccagccagttttccaatgcattgtaaatttcacttaaacctgttggttatgaaaatttgaagatcattttccttaaattatctcagcttttaacttcatttaaaaagacttttgtctaagaagaatattattattatatgttctttcaacaccccaggattaaaaaaactgattatgcaagcaattggaatataagtattaaattatagcatttgcaaatattaatataaaagcacaacaaaatgtagtggaaaatgacaaagcttgttttttaaaacaattctgtagaaatgtttgtgcaaattcagtaattcaacttaaaatataattttacagctatgttcaataaagcctctttccaggtaaggtatgacaagcagtatgtgtgtttgttgagcaatgttcacttatcactaaaatgaaattagttatacaatttattggttaccatgggataaatcttcagtgctccacataccttaatgtctgcagaaagaaattttaataggaactccctgatgcactcccctatattgtaatacatgcagaaagcagttaaacctttgaaggtaaaatatgaaacatatatgaacctggaatttaatgtctattttcagtcagttcaaaaggggaccagtttgaatatttaggtagtgatggaattgatctgaaccaagtcctttaaattaaacataataaacaaatgagtttcataacttatttgaatgaattagacatcttaaaattttttcagagtttcacagtaacccatatactttatcagaccaaagagattcaagtacacaatatctggggcatttcttttacgttttacaaaa

SEQ ID NO: 17053 - DNA, 2440 bp, Homo sapiens
  source 1..2440: mol_type = unassigned DNA
gccacacaggataaaggagggaagggaaggagcagatcttttcggtaggaagacagattttgttgtcaggttcctgggagtgcaagagcaagtcaaaggagagagagaggagagaggaaaagccagagggagagagggggagaggggatctgttgcaggcaggggaaggcgtgacctgaatggagaatgccagccaattccagagacacacagggacctcagaacaaagataaggcatcacggacaccacaccgggcacgagctcacaggcaagtcaagctgggaggaccaaggccgggcagccgggagcacccaaggcaggaaaatgaggtggctgcttctctattatgctctgtgcttctccctgtcaaaggcttcagcccacaccgtggagctaaacaatatgtttggccagatccagtcgcctggttatccagactcctatcccagtgattcagaggtgacttggaatatcactgtcccagatgggtttcggatcaagctttacttcatgcacttcaacttggaatcctcctacctttgtgaatatgactatgtgaaggtagaaactgaggaccaggtgctggcaaccttctgtggcagggagaccacagacacagagcagactcccggccaggaggtggtcctctcccctggctccttcatgtccatcactttccggtcagatttctccaatgaggagcgtttcacaggctttgatgcccactacatggctgtggatgtggacgagtgcaaggagagggaggacgaggagctgtcctgtgaccactactgccacaactacattggcggctactactgctcctgccgcttcggctacatcctccacacagacaacaggacctgccgagtggagtgcagtgacaacctcttcactcaaaggactggggtgatcaccagccctgacttcccaaacccttaccccaagagctctgaatgcctgtataccatcgagctggaggagggtttcatggtcaacctgcagtttgaggacatatttgacattgaggaccatcctgaggtgccctgcccctatgactacatcaagatcaaagttggtccaaaagttttggggcctttctgtggagagaaagccccagaacccatcagcacccagagccacagtgtcctgatcctgttccatagtgacaactcgggagagaaccggggctggaggctctcatacagggctgcaggaaatgagtgcccagagctacagcctcctgtccatgggaaaatcgagccctcccaagccaagtatttcttcaaagaccaagtgctcgtcagctgtgacacaggctacaaagtgctgaaggataatgtggagatggacacattccagattgagtgtctgaaggatgggacgtggagtaacaagattcccacctgtaaaaaaaatgaaatcgatctggagagcgaactcaagtcagagcaagtgacagagtgaatgacgggaccccacacaatgcagacatccagaaatggatcactcccaagacccctggggcccagagctgcaccacccctccccacccacaacacccccgtgcccctttccatgtggattagaatgggtgctgaacaacatgatctcagcagttgaagctgctacgtgtgtgaaagcaaattctccacttgagggtttgcccatcattcaaacactattccagaaaataatgaaaaaaaaatgtgggatttattttagcacctctgagtggactgtacttttctcaacggaaaaaaaaaatgcccttggtccttgagacaaaagatttaatatacaaccatgtggcctcaggctgaccagatcaaagtggtttctaatccattctacatgtcaagtttaaatgaaccagactgcctgtgactttatgaatctgaaggtattacctgttgctgctttcttaaccaccatgagtaggtaaagcaaataataactcacagagtgtggatttttgagaatctgaatgttttctcattcacaaaagtatcccttctacccctatctggcgcagggctgaaatgtcatcattagaggttctgtcttctggggcttacaagttctatgtttcttaaaattcgctgattaaaaattttaaaaagataggatcacacctgaaagcagtggtcccagctctgtgctgtgggacatcacaggtcctaaacagtgatagagaaagggctggggagtggcagctggaatctctgcttccgtctgaacatctggacacacatgtcagagaatctttgcattaaatggactgcccgatctatttggtgattaaatggctgtgcggtgaggggagaaccctgggcagtctggagactgaggtgccattctcggctagagacaccacccaaagaagagatgggctggctactaaagacaagtgtcagttgaataaatgtctttaaacct

SEQ ID NO: 17054 - DNA, 4015 bp, Homo sapiens
  source 1..4015: mol_type = unassigned DNA
agagagagaggagagaggaaaagccagagggagagagggggagaggggatctgttgcaggcaggggaaggcgtgacctgaatggagaatgccagccaattccagagacacacagggacctcagaacaaagataaggcatcacggacaccacaccgggcacgagctcacaggcaagtcaagctgggaggaccaaggccgggcagccgggagcacccaaggcaggaaaatgaggtggctgcttctctattatgctctgtgcttctccctgtcaaaggcttcagcccacaccgtggagctaaacaatatgtttggccagatccagtcgcctggttatccagactcctatcccagtgattcagaggtgacttggaatatcactgtcccagatgggtttcggatcaagctttacttcatgcacttcaacttggaatcctcctacctttgtgaatatgactatgtgaaggtagaaactgaggaccaggtgctggcaaccttctgtggcagggagaccacagacacagagcagactcccggccaggaggtggtcctctcccctggctccttcatgtccatcactttccggtcagatttctccaatgaggagcgtttcacaggctttgatgcccactacatggctgtggatgtggacgagtgcaaggagagggaggacgaggagctgtcctgtgaccactactgccacaactacattggcggctactactgctcctgccgcttcggctacatcctccacacagacaacaggacctgccgagtggagtgcagtgacaacctcttcactcaaaggactggggtgatcaccagccctgacttcccaaacccttaccccaagagctctgaatgcctgtataccatcgagctggaggagggtttcatggtcaacctgcagtttgaggacatatttgacattgaggaccatcctgaggtgccctgcccctatgactacatcaagatcaaagttggtccaaaagttttggggcctttctgtggagagaaagccccagaacccatcagcacccagagccacagtgtcctgatcctgttccatagtgacaactcgggagagaaccggggctggaggctctcatacagggctgcaggaaatgagtgcccagagctacagcctcctgtccatgggaaaatcgagccctcccaagccaagtatttcttcaaagaccaagtgctcgtcagctgtgacacaggctacaaagtgctgaaggataatgtggagatggacacattccagattgagtgtctgaaggatgggacgtggagtaacaagattcccacctgtaaaattgtagactgtagagccccaggagagctggaacacgggctgatcaccttctctacaaggaacaacctcaccacatacaagtctgagatcaaatactcctgtcaggagccctattacaagatgctcaacaataacacaggtatatatacctgttctgcccaaggagtctggatgaataaagtattggggagaagcctacccacctgccttccagagtgtggtcagccctcccgctccctgccaagcctggtcaagaggatcattgggggccgaaatgctgagcctggcctcttcccgtggcaggccctgatagtggtggaggacacttcgagagtgccaaatgacaagtggtttgggagtggggccctgctctctgcgtcctggatcctcacagcagctcatgtgctgcgctcccagcgtagagacaccacggtgataccagtctccaaggagcatgtcaccgtctacctgggcttgcatgatgtgcgagacaaatcgggggcagtcaacagctcagctgcccgagtggtgctccacccagacttcaacatccaaaactacaaccacgatatagctctggtgcagctgcaggagcctgtgcccctgggaccccacgttatgcctgtctgcctgccaaggcttgagcctgaaggcccggccccccacatgctgggcctggtggccggctggggcatctccaatcccaatgtgacagtggatgagatcatcagcagtggcacacggaccttgtcagatgtcctgcagtatgtcaagttacccgtggtgcctcacgctgagtgcaaaactagctatgagtcccgctcgggcaattacagcgtcacggagaacatgttctgtgctggctactacgagggcggcaaagacacgtgccttggagatagcggtggggcctttgtcatctttgatgacttgagccagcgctgggtggtgcaaggcctggtgtcctgggggggacctgaagaatgcggcagcaagcaggtctatggagtctacacaaaggtctccaattacgtggactgggtgtgggagcagatgggcttaccacaaagtgttgtggagccccaggtggaacggtgagctgacttacttcctcggggcctgcctcccctgagcgaagctacaccgcacttccgacagcacactccacattacttatcagaccatatggaatggaacacactgacctagcggtggcttctcctaccgagacagcccccaggaccctgagaggcagagtgtggtatagggaaaaggctccaggcaggagacctgtgttcctgagcttgtccaagtctctttccctgtctgggcctcactctaccgagtaatacaatgcaggagctcaaccaaggcctctgtgccaatcccagcactcctttccaggccatgcttcttaccccagtggcctttattcactcctgaccacttatcaaacccatcggtcctactgttggtataactgagcttggacctgactattagaaaatggtttctaacattgaactgaatgccgcatctgtatattttcctgctctgccttctgggactagccttggcctaatccttcctctaggagaagagcattcaggttttgggagatggctcatagccaagcccctctctcttagtgtgatcccttggagcaccttcatgcctggggtttctctcccaaaagcttcttgcagtctaagccttatcccttatgttccccattaaaggaatttcaaaagacatggagaaagttgggaaggtttgtgctgactgctgggagcagaatagccgtgggaggcccaccaagcccttaaattcccattgtcaactcagaacacatttgggcccatatgccaccctggaacaccagctgacaccatgggcgtccacacctgctgctccagacaagcacaaagcaatctttcagccttgaaatgtattatctgaaaggctacctgaagcccaggcccgaatatggggacttagtcgattacctggaaaaagaaaagacccacactgtgtcctgctgtgcttttgggcaggaaaatggaagaaagagtggggtgggcacattagaagtcacccaaatcctgccaggctgcctggcatccctggggcatgagctgggcggagaatccaccccgcaggatgttcagagggacccactccttcatttttcagagtcaaaggaatcagaggctcacccatggcaggcagtgaaaagagccaggagtcctgggttctagtccctgctctgcccccaactggctgtataacctttgaaaaatcattttctttgtctgagtctctggttctccgtcagcaacaggctggcataaggtcccctgcaggttccttctagctggagcactcagagcttccctgactgctagcagcctctctggccctcacagggctgattgttctccttctccctggagctctctctcctgaaaatctccatcagagcaaggcagccagagaagcccctgagagggaatgattgggaagtgtccactttctcaaccggctcatcaaacacactcctttgtctatgaatggcacatgtaaatgatgttatattttgtatcttttatatcatatgcttcaccattctgtaaagggcctctgcattgttgctcccatcaggggtctcaagtggaaataaaccctcgtggataaccaaca

SEQ ID NO: 17055 - DNA, 4407 bp, Homo sapiens
  source 1..4407: mol_type = unassigned DNA
acacacagagtgatacaaatacctgcttgagcccctcagttattttctctcaagggctgaagtcagccacacaggataaaggagggaagggaaggagcagatcttttcggtaggaagacagattttgttgtcaggttcctgggagtgcaagagcaagtcaaaggagagagagaggagagaggaaaagccagagggagagagggggagaggggatctgttgcaggcaggggaaggcgtgacctgaatggagaatgccagccaattccagagacacacagggacctcagaacaaagataaggcatcacggacaccacaccgggcacgagctcacaggcaagtcaagctgggaggaccaaggccgggcagccgggagcacccaaggcaggaaaatgaggtggctgcttctctattatgctctgtgcttctccctgtcaaaggcttcagcccacaccgtggagctaaacaatatgtttggccagatccagtcgcctggttatccagactcctatcccagtgattcagaggtgacttggaatatcactgtcccagatgggtttcggatcaagctttacttcatgcacttcaacttggaatcctcctacctttgtgaatatgactatgtgaaggtagaaactgaggaccaggtgctggcaaccttctgtggcagggagaccacagacacagagcagactcccggccaggaggtggtcctctcccctggctccttcatgtccatcactttccggtcagatttctccaatgaggagcgtttcacaggctttgatgcccactacatggctgtggatgtggacgagtgcaaggagagggaggacgaggagctgtcctgtgaccactactgccacaactacattggcggctactactgctcctgccgcttcggctacatcctccacacagacaacaggacctgccgagtggagtgcagtgacaacctcttcactcaaaggactggggtgatcaccagccctgacttcccaaacccttaccccaagagctctgaatgcctgtataccatcgagctggaggagggtttcatggtcaacctgcagtttgaggacatatttgacattgaggaccatcctgaggtgccctgcccctatgactacatcaagatcaaagttggtccaaaagttttggggcctttctgtggagagaaagccccagaacccatcagcacccagagccacagtgtcctgatcctgttccatagtgacaactcgggagagaaccggggctggaggctctcatacagggctgcaggaaatgagtgcccagagctacagcctcctgtccatgggaaaatcgagccctcccaagccaagtatttcttcaaagaccaagtgctcgtcagctgtgacacaggctacaaagtgctgaaggataatgtggagatggacacattccagattgagtgtctgaaggatgggacgtggagtaacaagattcccacctgtaaaattgtagactgtagagccccaggagagctggaacacgggctgatcaccttctctacaaggaacaacctcaccacatacaagtctgagatcaaatactcctgtcaggagccctattacaagatgctcaacaataacacaggtatatatacctgttctgcccaaggagtctggatgaataaagtattggggagaagcctacccacctgccttccagtgtgtgggctccccaagttctcccggaagctgatggccaggatcttcaatggacgcccagcccagaaaggcaccactccctggattgccatgctgtcacacctgaatgggcagcccttctgcggaggctcccttctaggctccagctggatcgtgaccgccgcacactgcctccaccagtcactcgatccggaagatccgaccctacgtgattcagacttgctcagcccttctgacttcaaaatcatcctgggcaagcattggaggctccggtcagatgaaaatgaacagcatctcggcgtcaaacacaccactctccacccccagtatgatcccaacacattcgagaatgacgtggctctggtggagctgttggagagcccagtgctgaatgccttcgtgatgcccatctgtctgcctgagggaccccagcaggaaggagccatggtcatcgtcagcggctgggggaagcagttcttgcaaaggttcccagagaccctgatggagattgaaatcccgattgttgaccacagcacctgccagaaggcttatgccccgctgaagaagaaagtgaccagggacatgatctgtgctggggagaaggaagggggaaaggacgcctgtgcgggtgactctggaggccccatggtgaccctgaatagagaaagaggccagtggtacctggtgggcactgtgtcctggggtgatgactgtgggaagaaggaccgctacggagtatactcttacatccaccacaacaaggactggatccagagggtcaccggagtgaggaactgaatttggctcctcagccccagcaccaccagctgtgggcagtcagtagcagaggacgatcctccgatgaaagcagccatttctcctttccttcctcccatcccccctccttcggcctatccattactgggcaatagagcaggtatcttcacccccttttcactctctttaaagagatggagcaagagagtggtcagaacacaggccgaatccaggctctatcacttactagtttgcagtgctgggcaggtgacttcatctcttcgaacttcagtttcttcataagatggaaatgctataccttacctacctcgtaaaagtctgatgaggaaaagattaactaatagatgcatagcacttaacagagtgcatagcatacactgttttcaataaatgcaccttagcagaaggtcgatgtgtctaccaggcagacgaagctctcttacaaacccctgcctgggtcttagcattgatcagtgacacacctctcccctcaaccttgaccatctccatctgcccttaaatgctgtatgcttttttgccaccgtgcaacttgcccaacatcaatcttcaccctcatccctaaaaaagtaaaacagacaaggttctgagtcctgtggtatgtcccctagcaaatgtaactaggaacatgcactagatgacagattgcgggagggcctgagagaagcagggacaggagggagcctggggattgtggtttgggaaggcagacacctggttctagaactagctctgcccttagccccctgtatgaccctatgcaagtcctcctccctcatctcaaagggtcctcaaagctctgacgatctaagatacaatgaagccattttccccctgataagatgaggtaaagccaatgtaaccaaaaggcaaaaattacaatcggttcaaaggaactttgatgcagacaaaatgctgctgctgctgctcctgaaatacccacccctttccactacgggtgggttcccaaggacatgggacaggcaaagtgtgagccaaaggatccttccttattcctaagcagagcatctgctctgggccctggcctccttcccttcttgggaaactgggctgcatgaggtgggccctggtagtttgtaccccaggcccctatactcttccttcctatgtccacagctgaccccaagcagccgttccccgactcctcacccctgagcctcaccctgaactccctcatcttgcaaggccataagtgttttccaagcaaaatgcctctcccatcctctctcaggaagcttctagagactttatgccctccagagctccaagatataagccctccaagggatcagaagctccaagttcctgtcttctgttttatagaaattgatcttccctgggggactttaactcttgacctgtatgcagctgttggagtaattccaggtctcttgaaaaaaaagaggaagataatggagaatgagaacatatatatatatatattaagccccaggctgaatactcagggacagcaattcacagcctgcctctggttctataaacaagtcattctacctctttgtgccctgctgtttattctgtaaggggaaggtggcaatgggacccagctccatcagacacttgtcaagctagcagaaactccattttcaatgccaaagaagaactgtaatgctgttttggaatcatcccaaggcatcccaagacaccatatcttcccatttcaagcactgcctgggcacaccccaacatcccaggctgtggtggctcctgtgggaactacctagatgaagagagtatcatttataccttctaggagctcctattgggagacatgaaacatatgtaattgactaccatgtaatagaacaaaccctgccaagtgctgctttggaaagtcatggaggtaaaagaaagacc

SEQ ID NO: 17056 - DNA, 3900 bp, Homo sapiens
  source 1..3900: mol_type = unassigned DNA
tctctcaagggctgaagtcagccacacaggataaaggagggaagggaaggagcagatcttttcggtaggaagacagattttgttgtcaggttcctgggagtgcaagagcaagtcaaaggagagagagaggagagaggaaaagccagagggagagagggggagaggggatctgttgcaggcaggggaaggcgtgacctgaatggagaatgccagccaattccagagacacacagggacctcagaacaaagataaggcatcacggacaccacaccgggcacgagctcacaggcaagtcaagctgggaggaccaaggccgggcagccgggagcacccaaggcaggaaaatgaggtagaaactgaggaccaggtgctggcaaccttctgtggcagggagaccacagacacagagcagactcccggccaggaggtggtcctctcccctggctccttcatgtccatcactttccggtcagatttctccaatgaggagcgtttcacaggctttgatgcccactacatggctgtggatgtggacgagtgcaaggagagggaggacgaggagctgtcctgtgaccactactgccacaactacattggcggctactactgctcctgccgcttcggctacatcctccacacagacaacaggacctgccgagtggagtgcagtgacaacctcttcactcaaaggactggggtgatcaccagccctgacttcccaaacccttaccccaagagctctgaatgcctgtataccatcgagctggaggagggtttcatggtcaacctgcagtttgaggacatatttgacattgaggaccatcctgaggtgccctgcccctatgactacatcaagatcaaagttggtccaaaagttttggggcctttctgtggagagaaagccccagaacccatcagcacccagagccacagtgtcctgatcctgttccatagtgacaactcgggagagaaccggggctggaggctctcatacagggctgcaggaaatgagtgcccagagctacagcctcctgtccatgggaaaatcgagccctcccaagccaagtatttcttcaaagaccaagtgctcgtcagctgtgacacaggctacaaagtgctgaaggataatgtggagatggacacattccagattgagtgtctgaaggatgggacgtggagtaacaagattcccacctgtaaaattgtagactgtagagccccaggagagctggaacacgggctgatcaccttctctacaaggaacaacctcaccacatacaagtctgagatcaaatactcctgtcaggagccctattacaagatgctcaacaataacacaggtatatatacctgttctgcccaaggagtctggatgaataaagtattggggagaagcctacccacctgccttccagagtgtggtcagccctcccgctccctgccaagcctggtcaagaggatcattgggggccgaaatgctgagcctggcctcttcccgtggcaggccctgatagtggtggaggacacttcgagagtgccaaatgacaagtggtttgggagtggggccctgctctctgcgtcctggatcctcacagcagctcatgtgctgcgctcccagcgtagagacaccacggtgataccagtctccaaggagcatgtcaccgtctacctgggcttgcatgatgtgcgagacaaatcgggggcagtcaacagctcagctgcccgagtggtgctccacccagacttcaacatccaaaactacaaccacgatatagctctggtgcagctgcaggagcctgtgcccctgggaccccacgttatgcctgtctgcctgccaaggcttgagcctgaaggcccggccccccacatgctgggcctggtggccggctggggcatctccaatcccaatgtgacagtggatgagatcatcagcagtggcacacggaccttgtcagatgtcctgcagtatgtcaagttacccgtggtgcctcacgctgagtgcaaaactagctatgagtcccgctcgggcaattacagcgtcacggagaacatgttctgtgctggctactacgagggcggcaaagacacgtgccttggagatagcggtggggcctttgtcatctttgatgacttgagccagcgctgggtggtgcaaggcctggtgtcctgggggggacctgaagaatgcggcagcaagcaggtctatggagtctacacaaaggtctccaattacgtggactgggtgtgggagcagatgggcttaccacaaagtgttgtggagccccaggtggaacggtgagctgacttacttcctcggggcctgcctcccctgagcgaagctacaccgcacttccgacagcacactccacattacttatcagaccatatggaatggaacacactgacctagcggtggcttctcctaccgagacagcccccaggaccctgagaggcagagtgtggtatagggaaaaggctccaggcaggagacctgtgttcctgagcttgtccaagtctctttccctgtctgggcctcactctaccgagtaatacaatgcaggagctcaaccaaggcctctgtgccaatcccagcactcctttccaggccatgcttcttaccccagtggcctttattcactcctgaccacttatcaaacccatcggtcctactgttggtataactgagcttggacctgactattagaaaatggtttctaacattgaactgaatgccgcatctgtatattttcctgctctgccttctgggactagccttggcctaatccttcctctaggagaagagcattcaggttttgggagatggctcatagccaagcccctctctcttagtgtgatcccttggagcaccttcatgcctggggtttctctcccaaaagcttcttgcagtctaagccttatcccttatgttccccattaaaggaatttcaaaagacatggagaaagttgggaaggtttgtgctgactgctgggagcagaatagccgtgggaggcccaccaagcccttaaattcccattgtcaactcagaacacatttgggcccatatgccaccctggaacaccagctgacaccatgggcgtccacacctgctgctccagacaagcacaaagcaatctttcagccttgaaatgtattatctgaaaggctacctgaagcccaggcccgaatatggggacttagtcgattacctggaaaaagaaaagacccacactgtgtcctgctgtgcttttgggcaggaaaatggaagaaagagtggggtgggcacattagaagtcacccaaatcctgccaggctgcctggcatccctggggcatgagctgggcggagaatccaccccgcaggatgttcagagggacccactccttcatttttcagagtcaaaggaatcagaggctcacccatggcaggcagtgaaaagagccaggagtcctgggttctagtccctgctctgcccccaactggctgtataacctttgaaaaatcattttctttgtctgagtctctggttctccgtcagcaacaggctggcataaggtcccctgcaggttccttctagctggagcactcagagcttccctgactgctagcagcctctctggccctcacagggctgattgttctccttctccctggagctctctctcctgaaaatctccatcagagcaaggcagccagagaagcccctgagagggaatgattgggaagtgtccactttctcaaccggctcatcaaacacactcctttgtctatgaatggcacatgtaaatgatgttatattttgtatcttttatatcatatgcttcaccattctgtaaagggcctctgcattgttgctcccatcaggggtctcaagtggaaataaaccctcgtggataaccaa

SEQ ID NO: 17057 - DNA, 2428 bp, Homo sapiens
  source 1..2428: mol_type = unassigned DNA
aaagataaggcatcacggacaccacaccgggcacgagctcacaggcaagtcaagctgggaggaccaaggccgggcagccgggagcacccaaggcaggaaaatgaggtagaaactgaggaccaggtgctggcaaccttctgtggcagggagaccacagacacagagcagactcccggccaggaggtggtcctctcccctggctccttcatgtccatcactttccggtcagatttctccaatgaggagcgtttcacaggctttgatgcccactacatggctgtggatgtggacgagtgcaaggagagggaggacgaggagctgtcctgtgaccactactgccacaactacattggcggctactactgctcctgccgcttcggctacatcctccacacagacaacaggacctgccgagtggagtgcagtgacaacctcttcactcaaaggactggggtgatcaccagccctgacttcccaaacccttaccccaagagctctgaatgcctgtataccatcgagctggaggagggtttcatggtcaacctgcagtttgaggacatatttgacattgaggaccatcctgaggtgccctgcccctatgactacatcaagatcaaagttggtccaaaagttttggggcctttctgtggagagaaagccccagaacccatcagcacccagagccacagtgtcctgatcctgttccatagtgacaactcgggagagaaccggggctggaggctctcatacagggctgcaggaaatgagtgcccagagctacagcctcctgtccatgggaaaatcgagccctcccaagccaagtatttcttcaaagaccaagtgctcgtcagctgtgacacaggctacaaagtgctgaaggataatgtggagatggacacattccagattgagtgtctgaaggatgggacgtggagtaacaagattcccacctgtaaaattgtagactgtagagccccaggagagctggaacacgggctgatcaccttctctacaaggaacaacctcaccacatacaagtctgagatcaaatactcctgtcaggagccctattacaagatgctcaacaataacacaggtatatatacctgttctgcccaaggagtctggatgaataaagtattggggagaagcctacccacctgccttccagagtgtggtcagccctcccgctccctgccaagcctggtcaagaggatcattgggggccgaaatgctgagcctggcctcttcccgtggcaggccctgatagtggtggaggacacttcgagagtgccaaatgacaagtggtttgggagtggggccctgctctctgcgtcctggatcctcacagcagctcatgtgctgcgctcccagcgtagagacaccacggtgataccagtctccaaggagcatgtcaccgtctacctgggcttgcatgatgtgcgagacaaatcgggggcagtcaacagctcagctgcccgagtggtgctccacccagacttcaacatccaaaactacaaccacgatatagctctggtgcagctgcaggagcctgtgcccctgggaccccacgttatgcctgtctgcctgccaaggcttgagcctgaaggcccggccccccacatgctgggcctggtggccggctggggcatctccaatcccaatgtgacagtggatgagatcatcagcagtggcacacggaccttgtcagatgtcctgcagtatgtcaagttacccgtggtgcctcacgctgagtgcaaaactagctatgagtcccgctcgggcaattacagcgtcacggagaacatgttctgtgctggctactacgagggcggcaaagacacgtgccttggagatagcggtggggcctttgtcatctttgatgacttgagccagcgctgggtggtgcaaggcctggtgtcctgggggggacctgaagaatgcggcagcaagcaggtctatggagtctacacaaaggtctccaattacgtggactgggtgtgggagcagatgggcttaccacaaagtgttgtggagccccaggtggaacggtgagctgacttacttcctcggggcctgcctcccctgagcgaagctacaccgcacttccgacagcacactccacattacttatcagaccatatggaatggaacacactgacctagcggtggcttctcctaccgagacagcccccaggaccctgagaggcagagtgtggtatagggaaaaggctccaggcaggagacctgtgttcctgagcttgtccaagtctctttccctgtctgggcctcactctaccgagtaatacaatgcaggagctcaaccaaggcctctgtgccaatcccagcactcctttccaggccatgcttcttaccccagtggcctttattcactcctgaccacttatcaaacccatcggtcctactg

SEQ ID NO: 17058 - DNA, 2169 bp, Homo sapiens
  source 1..2169: mol_type = unassigned DNA
acacacagagtgatacaaatacctgcttgagcccctcagttattttctctcaagggctgaagtcagccacacaggataaaggagggaagggaaggagcagatcttttcggtaggaagacagattttgttgtcaggttcctgggagtgcaagagcaagtcaaaggagagagagaggagagaggaaaagccagagggagagagggggagaggggatctgttgcaggcaggggaaggcgtgacctgaatggagaatgccagccaattccagagacacacagggacctcagaacaaagataaggcatcacggacaccacaccgggcacgagctcacaggcaagtcaagctgggaggaccaaggccgggcagccgggagcacccaaggcaggaaaatgaggtggctgcttctctattatgctctgtgcttctccctgtcaaaggcttcagcccacaccgtggagctaaacaatatgtttggccagatccagtcgcctggttatccagactcctatcccagtgattcagaggtgacttggaatatcactgtcccagatgggtttcggatcaagctttacttcatgcacttcaacttggaatcctcctacctttgtgaatatgactatgtgaaggtagaaactgaggaccaggtgctggcaaccttctgtggcagggagaccacagacacagagcagactcccggccaggaggtggtcctctcccctggctccttcatgtccatcactttccggtcagatttctccaatgaggagcgtttcacaggctttgatgcccactacatggctgtggatgtggacgagtgcaaggagagggaggacgaggagctgtcctgtgaccactactgccacaactacattggcggctactactgctcctgccgcttcggctacatcctccacacagacaacaggacctgccgagtggagtgcagtgacaacctcttcactcaaaggactggggtgatcaccagccctgacttcccaaacccttaccccaagagctctgaatgcctgtataccatcgagctggaggagggtttcatggtcaacctgcagtttgaggacatatttgacattgaggaccatcctgaggtgccctgcccctatgactacatcaagatcaaagttggtccaaaagttttggggcctttctgtggagagaaagccccagaacccatcagcacccagagccacagtgtcctgatcctgttccatagtgacaactcgggagagaaccggggctggaggctctcatacagggctgcaggaaatgagtgcccagagctacagcctcctgtccatgggaaaatcgagccctcccaagccaagtatttcttcaaagaccaagtgctcgtcagctgtgacacaggctacaaagtgctgaaggataatgtggagatggacacattccagattgagtgtctgaaggatgggacgtggagtaacaagattcccacctgtaaaattgtagactgtagagccccaggagagctggaacacgggctgatcaccttctctacaaggaacaacctcaccacatacaagtctgagatcaaatactcctgtcaggagccctattacaagatgctcaacaataacacaggtatatatacctgttctgcccaaggagtctggatgaataaagtattggggagaagcctacccacctgccttccagagtgtggtcagccctcccgctccctgccaagcctggtcaagaggatcattgggggccgaaatgctgagcctggcctcttcccgtggcaggccctgatagtggtggaggacacttcgagagtgccaaatgacaagtggtttgggagtggggccctgctctctgcgtcctggatcctcacagcagctcatgtgctgcgctcccagcgtagagacaccacggtgataccagtctccaaggagcatgtcaccgtctacctgggcttgcatgatgtgcgagacaaatcgggggcagtcaacagctcagctgcccgagtggtgctccacccagacttcaacatccaaaactacaaccacgatatagctctggtgcagctgcaggagcctgtgcccctgggaccccacgttatgcctgtctgcctgccaaggcttgagcctcctggtggccggctggggcatctccaatcccaatgtgacagt

SEQ ID NO: 17059 - DNA, 2439 bp, Homo sapiens
  source 1..2439: mol_type = unassigned DNA
gctggacgggcacaccatgaggctgctgaccctcctgggccttctgtgtggctcggtggccacccccttgggcccgaagtggcctgaacctgtgttcgggcgcctggcatcccccggctttccaggggagtatgccaatgaccaggagcggcgctggaccctgactgcaccccccggctaccgcctgcgcctctacttcacccacttcgacctggagctctcccacctctgcgagtacgacttcgtcaagctgagctcgggggccaaggtgctggccacgctgtgcgggcaggagagcacagacacggagcgggcccctggcaaggacactttctactcgctgggctccagcctggacattaccttccgctccgactactccaacgagaagccgttcacggggttcgaggccttctatgcagccgaggacattgacgagtgccaggtggccccgggagaggcgcccacctgcgaccaccactgccacaaccacctgggcggtttctactgctcctgccgcgcaggctacgtcctgcaccgtaacaagcgcacctgctcagccctgtgctccggccaggtcttcacccagaggtctggggagctcagcagccctgaatacccacggccgtatcccaaactctccagttgcacttacagcatcagcctggaggaggggttcagtgtcattctggactttgtggagtccttcgatgtggagacacaccctgaaaccctgtgtccctacgactttctcaagattcaaacagacagagaagaacatggcccattctgtgggaagacattgccccacaggattgaaacaaaaagcaacacggtgaccatcacctttgtcacagatgaatcaggagaccacacaggctggaagatccactacacgagcacagcgcagccttgcccttatccgatggcgccacctaatggccacgtttcacctgtgcaagccaaatacatcctgaaagacagcttctccatcttttgcgagactggctatgagcttctgcaaggtcacttgcccctgaaatcctttactgcagtttgtcagaaagatggatcttgggaccggccaatgcccgcgtgcagcattgttgactgtggccctcctgatgatctacccagtggccgagtggagtacatcacaggtcctggagtgaccacctacaaagctgtgattcagtacagctgtgaagagaccttctacacaatgaaagtgaatgatggtaaatatgtgtgtgaggctgatggattctggacgagctccaaaggagaaaaatcactcccagtctgtgagcctgtttgtggactatcagcccgcacaacaggagggcgtatatatggagggcaaaaggcaaaacctggtgattttccttggcaagtcctgatattaggtggaaccacagcagcaggtgcacttttatatgacaactgggtcctaacagctgctcatgccgtctatgagcaaaaacatgatgcatccgccctggacattcgaatgggcaccctgaaaagactatcacctcattatacacaagcctggtctgaagctgtttttatacatgaaggttatactcatgatgctggctttgacaatgacatagcactgattaaattgaataacaaagttgtaatcaatagcaacatcacgcctatttgtctgccaagaaaagaagctgaatcctttatgaggacagatgacattggaactgcatctggatggggattaacccaaaggggttttcttgctagaaatctaatgtatgtcgacataccgattgttgaccatcaaaaatgtactgctgcatatgaaaagccaccctatccaaggggaagtgtaactgctaacatgctttgtgctggcttagaaagtgggggcaaggacagctgcagaggtgacagcggaggggcactggtgtttctagatagtgaaacagagaggtggtttgtgggaggaatagtgtcctggggttccatgaattgtggggaagcaggtcagtatggagtctacacaaaagttattaactatattccctggatcgagaacataattagtgatttttaacttgcgtgtctgcagtcaaggattcttcatttttagaaatgcctgtgaagaccttggcagcgacgtggctcgagaagcattcatcattactgtggacatggcagttgttgctccacccaaaaaaacagactccaggtgaggctgctgtcatttctccacttgccagtttaattccagccttacccattgactcaaggggacataaaccacgagagtgacagtcatctttgcccacccagtgtaatgtcactgctcaaattacatttcattaccttaaaaagccagtctcttttcatactggctgttggcatttctgtaaactgcctgtccatgctctttgtttttaaacttgttcttattga

SEQ ID NO: 17060 - DNA, 726 bp, Homo sapiens
  source 1..726: mol_type = unassigned DNA
ggccaggccagctggacgggcacaccatgaggctgctgaccctcctgggccttctgtgtggctcggtggccacccccttgggcccgaagtggcctgaacctgtgttcgggcgcctggcatcccccggctttccaggggagtatgccaatgaccaggagcggcgctggaccctgactgcaccccccggctaccgcctgcgcctctacttcacccacttcgacctggagctctcccacctctgcgagtacgacttcgtcaagctgagctcgggggccaaggtgctggccacgctgtgcgggcaggagagcacagacacggagcgggcccctggcaaggacactttctactcgctgggctccagcctggacattaccttccgctccgactactccaacgagaagccgttcacggggttcgaggccttctatgcagccgaggacattgacgagtgccaggtggccccgggagaggcgcccacctgcgaccaccactgccacaaccacctgggcggtttctactgctcctgccgcgcaggctacgtcctgcaccgtaacaagcgcacctgctcagagcagagcctctagcctcccctggagctccggcctgcccagcaggtcagaagccagagccagcctgctggcctcagctccgggttgggctgagatggctgtgccccaactcccattcacccaccatggacccaataataaacctggccccacccca

SEQ ID NO: 17061 - DNA, 1605 bp, Homo sapiens
  source 1..1605: mol_type = unassigned DNA
ctggtgcagggggcgagcatggccgctccgcgagtattcccactttcctgtgcggtgcagcagtatgcctgggggaagatgggttccaacagcgaagtggcgcggctgttggccagcagtgatccactggcccagatcgcagaggacaagccttatgcagagttgtggatggggactcacccccgaggggatgccaagatccttgacaaccgcatctcacagaagaccctaagccagtggattgctgagaaccaggacagcttgggctcaaaggtcaaggacacctttaatggcaacctgcccttcctcttcaaagtgctctcagttgaaacacccctgtccatccaggcacaccctaacaaggagctggcagagaagctgcacctccaggctccgcagcactaccccgatgccaaccacaagccagagatggccattgccctcacccccttccagggcttgtgtggcttccggccagttgaggagattgtaacctttctaaagacggctgccggaaacaacatggaggacatctttggggagcttttgctacagctgcaccagcagtacccaggtgatatcggctgctttgccatctacttcctgaacctgcttaccctgaagcctggggaggccatgtttctggaggccaacgtaccccatgcctacctgaaaggagactgcgtggagtgcatggcgtgttcagacaacacagttcgtgctggcctgacacccaagttcattgatgtgccaaccctgtgtgaaatgctcagctatacccctagctccagcaaggacaggctctttctcccaacacggagtcaggaagacccctacctctcaatctatgacccccctgtaccagacttcaccattatgaagacggaggtccctggctctgtcactgaatacaaggtcttggcactggactctgccagcatcctcctgatggtacaggggacagtaatagccagcacacccacaacccagacaccaatccctctgcaacgtggtggcgtgctcttcattggggccaatgagagtgtctcactgaagcttactgagccgaaggacctgctgatattccgtgcctgctgtctgctgtaaaggctgcagcctccccagctctcctctgccagccaccctaaattccagccaacctcacctcctcgggcccagctcaagcccccttccttgctctggaccccttaggtataccctggaagagctggggtgggggaggagggagcgtgaaggtagtgactcctgaacacacccaggtggaaccatctttggggaggagaggcccgtgtgaggggtctgatactccctttgtcttccctctctactcctcgctacacctgagccaggctcttgccaactctgttccagcctatggctttaggctagctgttaaatatgtgacccagcattagctcagcatctgtcagagcaagagaccaggtaatttctaagaacagggttctagcgatgggactgcccatttcctcagctgcagaggaggaaagggaaagggtaggcctgtagactaacgctgtttacacccttgttctgtcaaagcaattaaagatcacttgtgttgag

SEQ ID NO: 17062 - DNA, 3051 bp, Homo sapiens
  source 1..3051: mol_type = unassigned DNA
cgggggctgccgggaaaggcatacgtgcttaatcctggtgcagggggcgagcatggccgctccgcgagtattcccactttcctgtgcggtgcagcagtatgcctgggggaagatgggttccaacagcgaagtggcgcggctgttggccagcagtgatccactggcccagatcgcagaggacaagccttatgcagagttgtggatggggactcacccccgaggggatgccaagatccttgacaaccgcatctcacagaagaccctaagccagtggattgctgagaaccaggacagcttgggctcaaaggtcaaggacacctttaatggcaacctgcccttcctcttcaaagtgctctcagttgaaacacccctgtccatccaggcacaccctaacaaggagctggcagagaagctgcacctccaggctccgcagcactaccccgatgccaaccacaagccagagatggccattgccctcacccccttccagggcttgtgtggcttccggccagttgaggagattgtaacctttctaaagaaggtgcctgagtttcagttcctgattggagatgaggcagcaacacacctgaagcagaccatgagccatgactcccaggctgtggcctcctctctgcagagctgtttctcccacctgatgaagagtgagaagaaggtggtggtggaacagctcaacctgttggtgaagcggatctcccagcaagcggctgccggaaacaacatggaggacatctttggggagcttttgctacagctgcaccagcagtacccaggtgatatcggctgctttgccatctacttcctgaacctgcttaccctgaagcctggggaggccatgtttctggaggccaacgtaccccatgcctacctgaaaggagactgcgtggagtgcatggcgtgttcagacaacacagttcgtgctggcctgacacccaagttcattgatgtgccaaccctgtgtgaaatgctcagctatacccctagctccagcaaggacaggctctttctcccaacacggagtcaggaagacccctacctctcaatctatgacccccctgtaccagacttcaccattatgaagacggaggtccctggctctgtcactgaatacaaggtcttggcactggactctgccagcatcctcctgatggtacaggggacagtaatagccagcacacccacaacccagacaccaatccctctgcaacgtggtggcgtgctcttcattggggccaatgagagtgtctcactgaagcttactgagccgaaggacctgctgatattccgtgcctgctgtctgctgtaaaggctgcagcctccccagctctcctctgccagccaccctaaattccagccaacctcacctcctcgggcccagctcaagcccccttccttgctctggaccccttaggtataccctggaagagctggggtgggggaggagggagcgtgaaggtagtgactcctgaacacacccaggtggaaccatctttggggaggagaggcccgtgtgaggggtctgatactccctttgtcttccctctctactcctcgctacacctgagccaggctcttgccaactctgttccagcctatggctttaggctagctgttaaatatgtgacccagcattagctcagcatctgtcagagcaagagaccaggtaatttctaagaacagggttctagcgatgggactgcccatttcctcagctgcagaggaggaaagggaaagggtaggcctgtagactaacgctgtttacacccttgttctgtcaaagcaattaaagatcacttgtgttgaggctgtggggtaatgagcactcagcctttggggtacctgttcctaaagtgggccaaaagagccctccctacatgatgccccagtttttgctttattcctatttcatacagcttctcgggggagtgagcaggctacactccagaacaccggtatgggaaggagtgggagaggaagccagctttggcctcacaggcacagcttgcaagcaggccttgggtctgcccagaggcacagcttgcaagcagccctacagagaaggtgactcaaaggatacaccagtcaccagtgcaagactcttcgctcctgtttttctcttttttttttttttgagacggagtctcggtctgtagcccaggctggagtgcagtggcacgatctcggctcattgcaagctccgcctcccgggttcacgccactcttctgcctcagcctcccaagtagctgggaccacaggcgcccaccaccacgcccagccaatttttttggtatttttagtagagatggggtttcactgtgttagccaggatggtctcgatcttctgacctcgtgatccgcccacctcagcctcccaaagtgctgggattacaggcgtgagccaccacgcctggcccggctcctgtttttcaactggccctagaggaggggtccgcaaaccaggctggcaggccagttctggccatacctgttcatttccatactgtctggctgctttcaagccacagtggcaaagttgaagagttgcactagactgtacggcctgcaaaactgaaaccattgactgtcaaccacttctctacaacatactcaactgttgcagattacagggactcaggaaccgaattagacaattttcatggcgaggagaagcccagttagctttcctaaacgggcaggaagtgtgaaggagggaatctcctgatgccctgctccaggggtggcacacacctgcaagaggctgtcggctgtctgctgctgctgaggtttctgacctgcaatcgtagatcctgtcaccacagactaatcacttagtccactggctccttcctgtgggataaaggtttaaattcatgcaaaagaatctttctgggcttctgcccacactagagtccctatacaatggagttccaggaaaccaccttcaaaaatctcctgggttttcttgcctccaaattttcttcagctaaaaaacaataaagatgagctggaaagaaaaggtctgctaaagggaa

SEQ ID NO: 17063 - DNA, 1587 bp, Homo sapiens
  source 1..1587: mol_type = unassigned DNA
tgcttaatcctggtgcagggggcgagcatggccgctccgcgaggtattcccactttcctgtgcggtgcagcagtatgcctgggggaagatgggttccaacagcgaagtggcgcggctgttggccagcagtgatccactggcccagatcgcagaggacaagccttatgcagagttgtggatggggactcacccccgaggggatgccaagatccttgacaaccgcatctcacagaagaccctaagccagtggattgctgagaaccaggacagcttgggctcaaaggtcaaggacacctttaatggcaacctgcccttcctcttcaaagtgctctcagttgaaacacccctgtccatccaggcacaccctaacaaggagctggcagagaagctgcacctccaggctccgcagcactaccccgatgccaaccacaagccagagatggccattgccctcacccccttccagggcttgtgtggcttccggccagttgaggagattgtaacctttctaaagaaggtgcctgagtttcagttcctgattggagatgaggcagcaacacacctgaagcagaccatgagccatgactcccaggctgtggcctcctctctgcagagctgtttctcccacctgatgaagagtgagaagaaggtggtggtggaacagctcaacctgttggtgaagcggatctcccagcaagcggctgccggaaacaacatggaggacatctttggggagcttttgctacagctgcaccagcagtacccaggtgatatcggctgctttgccatctacttcctgaacctgcttaccctgaagcctggggaggccatgtttctggaggccaacgtaccccatgcctacctgaaaggaggtccctggctctgtcactgaatacaaggtcttggcactggactctgccagcatcctcctgatggtacaggggacagtaatagccagcacacccacaacccagacaccaatccctctgcaacgtggtggcgtgctcttcattggggccaatgagagtgtctcactgaagcttactgagccgaaggacctgctgatattccgtgcctgctgtctgctgtaaaggctgcagcctccccagctctcctctgccagccaccctaaattccagccaacctcacctcctcgggcccagctcaagcccccttccttgctctggaccccttaggtataccctggaagagctggggtgggggaggagggagcgtgaaggtagtgactcctgaacacacccaggtggaaccatctttggggaggagaggcccgtgtgaggggtctgatactccctttgtcttccctctctactcctcgctacacctgagccaggctcttgccaactctgttccagcctatggctttaggctagctgttaaatatgtgacccagcattagctcagcatctgtcagagcaagagaccaggtaatttctaagaacagggttctagcgatgggactgcccatttcctcagctgcagaggaggaaagggaaagggtaggcctgtagactaacgctgtttacacccttgttctgtcaaagcaattaaagatcacttgtgttg

SEQ ID NO: 17064 - DNA, 1523 bp, Homo sapiens
  source 1..1523: mol_type = unassigned DNA
atacgtgcttaatcctggtgcagggggcgagcatggccgctccgcgagttgtggatggggactcacccccgaggggatgccaagatccttgacaaccgcatctcacagaagaccctaagccagtggattgctgagaaccaggacagcttgggctcaaaggtcaaggacacctttaatggcaacctgcccttcctcttcaaagtgctctcagttgaaacacccctgtccatccaggcacaccctaacaaggagctggcagagaagctgcacctccaggctccgcagcactaccccgatgccaaccacaagccagagatggccattgccctcacccccttccagggcttgtgtggcttccggccagttgaggagattgtaacctttctaaagaaggtgcctgagtttcagttcctgattggagatgaggcagcaacacacctgaagcagaccatgagccatgactcccaggctgtggcctcctctctgcagagctgtttctcccacctgatgaagagtgagaagaaggtggtggtggaacagctcaacctgttggtgaagcggatctcccagcaagcggctgccggaaacaacatggaggacatctttggggagcttttgctacagctgcaccagcagtacccaggtgatatcggctgctttgccatctacttcctgaacctgcttaccctgaagcctggggaggccatgtttctggaggccaacgtaccccatgcctacctgaaaggagactgcgtggagtgcatggcgtgttcagacaacacagttcgtgctggcctgacacccaagttcattgatgtgccaaccctgtgtgaaatgctcagctatacccctagctccagcaaggacaggctctttctcccaacacggagtcaggaagacccctacctctcaatctatgacccccctgtaccagacttcaccattatgaagacggaggtccctggctctgtcactgaatacaaggtcttggcactggactctgccagcatcctcctgatggtacaggggacagtaatagccagcacacccacaacccagacaccaatccctctgcaacgtggtggcgtgctcttcattggggccaatgagagtgtctcactgaagcttactgagccgaaggacctgctgatattccgtgcctgctgtctgctgtaaaggctgcagcctccccagctctcctctgccagccaccctaaattccagccaacctcacctcctcgggcccagctcaagcccccttccttgctctggaccccttaggtataccctggaagagctggggtgggggaggagggagcgtgaaggtagtgactcctgaacacacccaggtggaaccatctttggggaggagaggcccgtgtgaggggtctgatactccctttgtcttccctctctactcctcgctacacctgagccaggctcttgccaactctgttccagcctatggctttaggctagctgttaaatatgtgacccagcattagctcagcatctgtcagagc

SEQ ID NO: 17065 - DNA, 5171 bp, Homo sapiens
  source 1..5171: mol_type = unassigned DNA
gggaacttggattaggtggagaggcagttggggggcctcgttgttttgcgtcttagttccgccctcctgtccatcaggagaaggaaaggataaaccctgggccatgaggctacccctgctcctggtttttgcctctgtcattccgggtgctgttctcctactggacaccaggcaatttttaatctataatgaagatcacaagcgctgcgtggatgcagtgagtcccagtgccgtccaaaccgcagcttgcaaccaggatgccgaatcacagaaattccgatgggtgtccgaatctcagattatgagtgttgcatttaaattatgcctgggagtgccatcaaaaacagactgggttgctatcactctctatgcctgtgactcaaaaagtgaatttcagaaatgggagtgcaaaaatgacacacttttggggatcaaaggagaagatttattttttaactacggcaacagacaagaaaagaatattatgctctacaagggatcgggtttatggagcaggtggaagatctatggaaccacagacaatctgtgctccagaggttatgaagccatgtatacgctactaggcaatgccaatggagcaacctgtgcattcccgttcaagtttgaaaacaagtggtacgcagattgcacgagtgctgggcggtcggatggatggctctggtgcggaaccactactgactatgacacagacaagctatttggatattgtccattgaaatttgagggcagtgaaagcttatggaataaagacccgctgaccagcgtttcctaccagataaactccaaatccgctttaacgtggcaccaagcgaggaaaagctgccaacaacagaacgctgagctcctgagcatcacagagatacatgagcaaacatacctgacaggattaaccagttccttgacctcaggactctggattggacttaacagtctgagcttcaacagcggttggcagtggagtgaccgcagtcctttccgatatttgaactggttaccaggaagtccatcagctgaacctggaaaaagctgtgtgtcactaaatcctggaaaaaatgctaaatgggaaaatctggaatgtgttcagaaactgggctatatttgcaaaaagggcaacaccactttaaattcttttgttattccctcagaaagtgatgtgcctactcactgtcctagtcagtggtggccgtatgccggtcactgttacaagattcacagagatgagaaaaaaatccagagggatgctctgaccacctgcaggaaggaaggcggtgacctcacaagtatccacaccatcgaggaattggactttattatctcccagctaggatatgagccaaatgacgaattgtggatcggcttaaatgacattaagattcaaatgtactttgagtggagtgatgggacccctgtaacgtttaccaaatggcttcgtggagaaccaagccatgaaaacaacagacaggaggattgtgtggtgatgaaaggcaaggatgggtactgggcagatcggggctgtgagtggcctcttggctacatctgcaagatgaaatcacgaagccaaggtccagaaatagtggaagtcgaaaaaggctgcaggaaaggctggaaaaaacatcacttttactgctatatgattggacatacgctttcaacatttgcagaagcaaaccaaacctgtaataatgagaatgcttatttaacaactattgaagacagatatgaacaagccttcctgactagtttcgttggcttaaggcctgaaaaatatttctggacaggactttcagatatacaaaccaaagggacttttcagtggaccatcgaggaagaggttcggttcacccactggaattcagatatgccagggcgaaagccagggtgtgttgccatgagaaccgggattgcagggggcttatgggatgttttgaaatgtgatgaaaaggcaaaatttgtgtgcaagcactgggcagaaggagtaacccacccaccgaagcccacgacgactcccgaacccaaatgtccggaggattggggcgccagcagtagaacaagcttgtgtttcaagctgtatgcaaaaggaaaacatgagaagaaaacgtggtttgaatctcgagatttttgtcgagctctgggtggagacttagctagcatcaataacaaagaggaacagcaaacaatatggcgattaataacagctagtggaagctaccacaaactgttttggttgggattgacatatggaagcccttcagaaggttttacttggagtgatggttctcctgtttcatatgaaaactgggcttatggagaacctaataattatcaaaatgttgaatactgtggtgagctgaaaggtgaccctactatgtcttggaatgatattaattgtgaacaccttaacaactggatttgccagatacaaaaaggacaaacaccaaaacctgagccaacaccagctcctcaagacaatccaccagttactgaagatgggtgggttatttacaaagactaccagtattatttcagcaaagagaaggaaaccatggacaatgcgcgagcgttttgcaagaggaattttggtgatcttgtttctattcaaagtgaaagtgaaaagaagtttctatggaaatatgtaaacagaaatgatgcacagtctgcatattttattggtttattgatcagcttggataaaaagtttgcttggatggatggaagcaaagtggattacgtgtcttgggccacaggtgaacccaattttgcaaatgaagatgaaaactgtgtgaccatgtattcaaattcagggttttggaatgacattaactgtggctatccaaacgccttcatttgccagcgacataacagtagtatcaatgctaccacagttatgcctaccatgccctcggtcccatcagggtgcaaggaaggttggaatttctacagcaacaagtgtttcaaaatctttggatttatggaagaagaaagaaaaaattggcaagaggcacgaaaagcttgtataggctttggagggaatctggtctccatacaaaatgaaaaagagcaagcatttcttacctatcacatgaaggactccactttcagtgcctggactgggctgaatgatgtcaattcagaacacacgttcctttggacggatggacgaggagtccattacacaaactgggggaaaggttaccctggtggaagaagaagcagtctttcttatgaagatgctgactgtgttgttattattggaggtgcatcaaatgaagcaggaaaatggatggatgatacctgcgacagtaaacgaggctacatatgccagacacgatccgacccttccttgactaatcctccagcaacgattcaaacagatggctttgttaaatatggcaaaagcagctattcactcatgagacaaaaatttcaatggcatgaagcggagacatactgcaagcttcacaattcccttatagccagcattctggatccctacagtaatgcatttgcgtggctgcagatggaaacatctaatgaacgtgtgtggatcgccctgaacagtaacttgactgataatcaatacacttggactgataagtggagggtgaggtacactaactgggctgctgatgagcccaaattgaaatcagcatgtgtttatctggatcttgatggctactggaagacagcacattgcaatgaaagtttttactttctctgtaaaagatcagatgaaatccctgctactgaacccccacaactgcctggcagatgcccggagtcagatcacacagcatggattcctttccatggtcactgttactatattgagtcctcatatacaagaaactggggccaagcttctctggaatgtcttcgaatgggttcctctctggtttccattgaaagtgctgcagaatccagttttctgtcatatcgggttgagccacttaaaagtaaaaccaatttttggataggattgttcagaaatgttgaagggacgtggctgtggataaataacagtccggtctcctttgtcaactggaacacaggagatccctctggtgaacggaatgattgtgtagctttacatgcgtcttctgggttttggagtaatattcactgttcatcctacaaaggatatatttgtaaaagaccaaaaattattgatgctaaacctactcatgaattacttacaacaaaagctgacacaaggaagatggacccttctaaaccgtcttccaacgtggccggagtagtcatcattgtgatcctcctgattttaacgggtgctggccttgccgcctatttcttttataagaaaagacgtgtgcacctacctcaagagggcgcctttgaaaacactctgtattttaacagtcagtcaagcccaggaactagtgatatgaaagatctcgtgggcaatattgaacagaatgaacactcggtcatctagtacctcaatgcgattctgagatatttgaatttcataaaattgtaactgaaatttaaaatttttagttcaatgtgattgttttctttaaaatgagtactgaattgtactggtctgtccttttttcctttgcctaattgaagaaataattgcttgttttctagcctggcaagatattttcataaaagagggataacaatgctgattactaccttttaaaatattttagataaatgcacagcaccacagcaccacatctaagcattagtgatgggtagctgatgtcagcttcatgtggattttaagcactctagaaacaatgaagcttcttggcatattttaaggagctcccaaaatgtgttacctattaaattgtaactcagcaagtagaagaccatttgaaaagtcaggtacaaatttcctcaagtggcataaaaatgtagtcagttttctcttttaccagtttttatttccactccaattatttagaactttatttgtacatgtgcagaagaataaggcagctgagaatcttgtttcccccaagagagttttacaggctgagtgttgcaaatgtgttctttgtcctgttatatgtatatcaggaatacaaggatgtgaaataaaactgtaaatttgcataactggatgtacttagataatgtgaaataaacattaaagacaaggtctatttttaata

SEQ ID NO: 17066 - DNA, 5983 bp, Homo sapiens
  source 1..5983: mol_type = unassigned DNA
gaaggcgaggcggggagagactgggaaacagagcagcaagagaaagggcgcacgctggggtcctcctggacccggcgtgtcctcctctccgccacccctttctctccctcccgacgctctagccccagacccgcgcctcctccccttcccctcccacgctgcccacttcccttcccctctacccctcgaaccctcctccccggttctgcgctcctccctccgccctccctccgcccgggctgcctcctccctcctcctccccgggaggcatcacttcgtcccgacccggaggaggacgcgagccccttgcgggcggtcatcacagcccagcctcggggctgccacagcgcgttgcgcctgtgcgccctcggtccccgcgtccactgagcgccgcgctcggggatggggcccggccggccggcccccgcgccctggcctcgtcacctgctgcgctgcgtcctgctcctcgggtgcctgcacctcggccgtcccggcgcccctggggacgccgccctcccggaacccaacgtcttcctcatcttcagccatggactgcagggctgcctggaggcccagggcgggcaggtcagagtcaccccggcttgcaataccagcctccctgcccagcgctggaagtgggtctcccgaaaccggctattcaacctgggtaccatgcagtgcctgggcacaggctggccaggcaccaacaccacggcctccctgggcatgtatgagtgtgaccgggaagcactgaatcttcgctggcattgtcgtacactgggtgaccagctgtccttgctcctgggggcccgcaccagcaacatatccaagcctggcacccttgagcgtggtgaccagacccgcagtggccagtggcgcatctacggcagcgaggaggacctatgtgctctgccctaccacgaggtctacaccatccagggaaactcccacggaaagccgtgcaccatccccttcaaatatgacaaccagtggttccacggctgcaccagcacgggccgcgaggatggtcacctgtggtgtgccaccacccaggactacggcaaagacgagcgctggggcttctgccccatcaagagtaacgactgcgagaccttctgggacaaggaccagctgactgacagctgctaccagtttaacttccagtccacgctgtcgtggagggaggcctgggccagctgcgagcagcagggtgcggatctgctgagcatcacggagatccacgagcagacctacatcaacggcctcctcactgggtacagctccaccctgtggatcggcttgaatgacttggacacgagcggaggctggcagtggtcggacaactcgcccctcaagtacctcaactgggagagtgaccagccggacaaccccagtgaggagaactgtggagtgatccgcactgagtcctcgggcggctggcagaaccgtgactgcagcatcgcgctgccctatgtgtgcaagaagaagcccaacgccacggccgagcccacccctccagacaggtgggccaatgtgaaggtggagtgcgagccgagctggcagcccttccagggccactgctaccgcctgcaggccgagaagcgcagctggcaggagtccaagaaggcatgtctacggggcggtggcgacctggtcagcatccacagcatggcggagctggaattcatcaccaagcagatcaagcaagaggtggaggagctgtggatcggcctcaacgatttgaaactgcagatgaattttgagtggtctgacgggagccttgtgagcttcacccactggcacccctttgagcccaacaacttccgggacagtctggaggactgtgtcaccatctggggcccggaaggccgctggaacgacagtccctgtaaccagtccttgccatccatctgcaagaaggcaggccagctgagccagggggccgccgaggaggaccatggctgccggaagggttggacgtggcacagcccatcctgctactggctgggagaagaccaagtgacctacagtgaggcccggcgcctgtgcactgaccatggctctcagctggtcaccatcaccaacaggttcgagcaggccttcgtcagcagcctcatctacaactgggagggcgagtacttctggacggccctgcaggacctcaacagcaccggctccttcttctggctcagtggggatgaagtcatgtacacccactggaaccgggaccagcccgggtacagccgtgggggctgcgtggcgctggccactggcagcgccatggggctgtgggaggtgaagaactgtacctcgttccgggcccgctacatctgccggcagagcctgggcactccagtgacgccggagctgccggggccagatcccacgcccagcctcactggctcctgtccccagggctgggcctcggacaccaaactccggtattgctataaggtgttcagctcagagcggctgcaggacaagaagagctgggtccaggcccagggggcctgccaggagctgggggcccagctgctgagcctggccagctacgaggaggagcactttgtggccaacatgctcaacaagatcttcggtgaatcagaacccgagatccacgagcagcactggttctggatcggcctgaaccgtcgggatcccagagggggtcagagttggcgctggagcgacggcgtagggttctcttaccacaatttcgaccggagccggcacgacgacgacgacatccgaggctgtgcggtgctggacctggcctccctgcagtgggtggccatgcagtgcgacacacagctggactggatctgcaagatccccagaggtacggacgtgcgggagcccgacgacagccctcaaggccgacgggaatggctgcgcttccaggaggccgagtacaagttctttgagcaccactccacgtgggcgcaggcgcagcgcatctgcacgtggttccaggccgagctgacctcggtgcacagccaggcggagctagacttcctgagccacaacttgcagaagttctcccgggcccaggagcagcactggtggatcggcctgcacacctctgagagcgatgggcgcttcagatggacagatggttccattataaacttcatctcctgggcaccaggcaaacctcggcctgtcggcaaggacaagaagtgcgtgtacatgacagccagccgagaggactggggggaccagaggtgcctgacagccttgccctacatctgcaagcgcagcaacgtcaccaaagaaacgcagcccccagacctgccaactacagccctggggggctgcccctctgactggatccagttcctcaacaagtgttttcaggtccagggccaggaaccccagagccgggtgaagtggtcagaggcacagttctcctgtgaacagcaagaggcccagctggtcaccatcacaaaccccttagagcaagcattcatcacagccagcctgcccaatgtgacctttgacctttggattggcctccatgcctcgcagagggacttccagtgggtggagcaggagcctttgatgtatgccaactgggcacctggggagccctctggccctagccctgctcccagtggcaacaaaccgaccagctgtgcagtggtcctgcacagcccctcagcccacttcactggccgctgggacgatcggagctgcacggaggagacccatggcttcatctgccagaagggcacggacccctccctgagcccgtccccagcagcgctgccccccgccccgggcactgagctctcctacctcaacggcaccttccggctgcttcagaagccgctgcgctggcacgatgccctcctgctgtgtgagagccgcaatgccagcctggcctacgtgcccgacccctacacccaggccttcctcacgcaggctgcccgagggctgcgcacgccgctctggattgggctggctggcgaggagggctctcggcggtactcctgggtctcagaggagccgctgaactacgtgggctggcaggacggggagccgcagcagccggggggctgtacctacgtagatgtggacggggcctggcgcaccaccagctgtgacaccaagctgcagggggctgtgtgtggggttagcagtgggccccctcctccccgaagaataagctaccatggcagctgtccccagggactggcagactccgcgtggattcccttccgggagcactgctattctttccacatggagctgctgctgggccacaaggaggcgcgacagcgctgccagagagcgggtggggccgtcctgtctatcctggatgagatggagaatgtgtttgtctgggagcacctgcagagctatgagggccagagtcggggcgcctggctgggcatgaacttcaaccccaaaggaggcactctggtctggcaggacaacacagctgtgaactactccaactgggggcccccgggcttgggccccagcatgctgagccacaacagctgctactggattcagagcaacagcgggctatggcgccccggcgcttgcaccaacatcaccatgggtgtcgtctgcaagcttcctcgtgctgagcagagcagcttctccccatcagcgcttccagagaacccagcggccctggtggtggtgctgatggcggtgctgctgctcctggccttgctgaccgcagccctcatcctttaccggaggcgccagagcatcgagcgcggggcctttgagggtgcccgctacagccgcagcagctccagccccaccgaggccactgagaagaacatcctggtgtcagacatggaaatgaatgagcaacaagaatagagccaggcgcgtgggcagggccagggcgggaggagctggggagctggggccctgggtcagtctggccccccaccagctgcctgtccagttggcctatggaagggtgcccttgggagtcgctgttgggagccggagctgggcagagcctgggctggtggggtgccaccctcccacaagggctgggctgagacccagctgagtgcagcgtggcgtttccctttctgggggggcctgaggtcttgtcacctggtcctgtgcccccacaggaaccagaggtaggatgggagggggaacgagagcctctttctccccagagcccccggcccaggcctgttgatccgcgccccaggacccccttctttgcagagcccgaggagcctcccctgtcccctcgggcagatctgttgtgtctctcttcccacctggcagcctcagctctgtgcccctcaccctgctccctctcgccccttctctcccaccccttccttctgagccgggccctggggattggggagccctcttgttcctgatgagggtcagctgagggggctgagcatccatcactcctgtgcctgctggggtggctgtggggcgtggcaggaggggcctaggtgggttgggcctgagaaccagggcacgggtgtggtgtctgctgggctggagataagactggggagagacaccccaacctcccagggtgggagctgggccgggctgggatgtcatctcctgccgggcgggggagggctctgcccctggaagagtcccctgtggggaccaaaataagttccctaacatctccagctcctggctctggtttggagcaaggggaagggttgccagagtcctgggggccccagaggagcaggagtctgggagggcccagagttcaccctctagtggatccaggaggagcagcacccgagccctggagtggcccagtacccttccaagaggccacagtcccagccaggacaaagtatgcggcccatcctggtgcgacagcgtgggacaatgtgaacatggactcgaagacatggccctttctctgtagttgattttttaaatgtgccattattgtttttaaaaaaaaaggaaaaaagaaaagcaaacaaataaaacacctttaagaggcttgaaa

SEQ ID NO: 17067 - DNA, 3201 bp, Homo sapiens
  source 1..3201: mol_type = unassigned DNA
atatgatgatccgggggcctctttgtatttggtgcctacttaccatgtactggggggcttgaggcaggaaggaccaggagcacctgggactcagaatttgagcttgtctttttgcccttgggcttcctgccctggagtcctcaggcttcttttctggagcagcaagtgtccagggacagctggggccttatctagaggcaccaggtccttgggtctttgactgccctgagctcagtagctccacccctcagcctacagccactaaaccccagaacctgggcccttccctgcccccattcctgcggccttcattgctgcatccggtggaggcccagctgggggccggtgctggagttacctctgctccatgccattgcagatggacagatggttccattataaacttcatctcctgggcaccaggcaaacctcggcctgtcggcaaggacaagaagtgcgtgtacatgacagccagccgaggctagactcagcgaggggtggacctgtctccatggtccagaagacttgaattcggagctggacacaggccctgagcctctgcccagactcctctcagggcatgaggctgagtgtgctgccagccatgccctgccctgctctgccctgggggtgactgccctcccctcccctttccgcagaggactggggggaccagaggtgcctgacagccttgccctacatctgcaagcgcagcaacgtcaccaaagaaacgcagcccccagacctgccaactacagccctggggggctgcccctctgactggatccagttcctcaacaagtgttttcaggtccagggccaggaaccccagagccgggtgaagtggtcagaggcacagttctcctgtgaacagcaagaggcccagctggtcaccatcacaaaccccttagagcaagcattcatcacagccagcctgcccaatgtgacctttgacctttggattggcctccatgcctcgcagagggacttccagtgggtggagcaggagcctttgatgtatgccaactgggcacctggggagccctctggccctagccctgctcccagtggcaacaaaccgaccagctgtgcagtggtcctgcacagcccctcagcccacttcactggccgctgggacgatcggagctgcacggaggagacccatggcttcatctgccagaagggcacggggctctcggcggtactcctgggtctcagaggagccgctgaactacgtgggctggcaggacggggagccgcagcagccggggggctgtacctacgtagatgtggacggggcctggcgcaccaccagctgtgacaccaagctgcagggggctgtgtgtggggttagcagtgggccccctcctccccgaagaataagctaccatggcagctgtccccagggactggcagactccgcgtggattcccttccgggagcactgctattctttccacatggagctgctgctgggccacaaggaggcgcgacagcgctgccagagagcgggtggggccgtcctgtctatcctggatgagatggagaatgtgtttgtctgggagcacctgcagagctatgagggccagagtcggggcgcctggctgggcatgaacttcaaccccaaaggaggcactctggtctggcaggacaacacagctgtgaactactccaactgggggcccccgggcttgggccccagcatgctgagccacaacagctgctactggattcagagcaacagcgggctatggcgccccggcgcttgcaccaacatcaccatgggtgtcgtctgcaagcttcctcgtgctgagcagagcagcttctccccatcagcgcttccagagaacccagcggccctggtggtggtgctgatggcggtgctgctgctcctggccttgctgaccgcagccctcatcctttaccggaggcgccagagcatcgagcgcggggcctttgagggtgcccgctacagccgcagcagctccagccccaccgaggccactgagaagaacatcctggtgtcagacatggaaatgaatgagcaacaagaatagagccaggcgcgtgggcagggccagggcgggaggagctggggagctggggccctgggtcagtctggccccccaccagctgcctgtccagttggcctatggaagggtgcccttgggagtcgctgttgggagccggagctgggcagagcctgggctggtggggtgccaccctcccacaagggctgggctgagacccagctgagtgcagcgtggcgtttccctttctgggggggcctgaggtcttgtcacctggtcctgtgcccccacaggaaccagaggtaggatgggagggggaacgagagcctctttctccccagagcccccggcccaggcctgttgatccgcgccccaggacccccttctttgcagagcccgaggagcctcccctgtcccctcgggcagatctgttgtgtctctcttcccacctggcagcctcagctctgtgcccctcaccctgctccctctcgccccttctctcccaccccttccttctgagccgggccctggggattggggagccctcttgttcctgatgagggtcagctgagggggctgagcatccatcactcctgtgcctgctggggtggctgtggggcgtggcaggaggggcctaggtgggttgggcctgagaaccagggcacgggtgtggtgtctgctgggctggagataagactggggagagacaccccaacctcccagggtgggagctgggccgggctgggatgtcatctcctgccgggcgggggagggctctgcccctggaagagtcccctgtggggaccaaaataagttccctaacatctccagctcctggctctggtttggagcaaggggaagggttgccagagtcctgggggccccagaggagcaggagtctgggagggcccagagttcaccctctagtggatccaggaggagcagcacccgagccctggagtggcccagtacccttccaagaggccacagtcccagccaggacaaagtatgcggcccatcctggtgcgacagcgtgggacaatgtgaacatggactcgaagacatggccctttctctgtagttgattttttaaatgtgccattattgtttttaaaaaaaaaggaaaaaagaaaagcaaacaaataaaacacctttaagaggcttgaaagag

SEQ ID NO: 17068 - DNA, 2756 bp, Homo sapiens
  source 1..2756: mol_type = unassigned DNA
ccgggagcggtcaggcgcgtgaccccgcgtgaccggggtgcgcgagccgagaggccctggaagcgggactctgggaccccattgaaagaaaggcaaccagaaaaggcgaaacgacaacctcgatagtgattggagctgatggaacgagggcggagctaaagtcccagaatactggccaatcagagtttaagattatcagggagcccgggaaggggaaaggggcgaaatggttctatggtcacatgccgcggggtctggtgggaggagcggttgcccagcggcctcttggcgcttcctgtttccggttcccagagtggggcacagcgaggcgctagggggaacgctggcctctgaaactagctctgggaccggggtctgcggccggcccctagctggccccgtctcccatccccagaagggtattcactggggattctgagctttggctactccagtttcccacgacacgatgttccctttctacagctgctggaggactggactgctactactactcctggctgtggcagtgagagaatcctggcagacagaagaaaaaacttgcgacttggtaggagaaaagggtaaagagtcagagaaagagttggctctagtgaagaggctgaaaccactgtttaataaaagctttgagagcactgtgggccagggttcagacacatacatctacatcttcagggtgtgccgggaagctggcaaccacacttctggggcaggcctggtgcaaatcaacaaaagtaatgggaaggagacagtggtagggagactcaacgagactcacatcttcaacggaagtaattggatcatgctgatctataaagggggtgatgaatatgacaaccactgtggcaaggagcagcgtcgtgcagtggtgatgatctcctgcaatcgacacaccctagcggacaattttaaccctgtgtctgaggagcgtggcaaagtccaagattgtttctacctctttgagatggatagcagcctggcctgttcaccagagatctcccacctcagtgtgggttccatcttacttgtcacgtttgcatcactggttgctgtttatgttgttggggggttcctataccagcgactggtagtgggagccaaaggaatggagcagtttccccacttagccttctggcaggatcttggcaacctggtagcagatggctgtgactttgtctgccgttctaaacctcgaaatgtgcctgcagcatatcgtggtgtgggggatgaccagctgggggaggagtcagaagaaagggatgaccatttattaccaatgtagattgcactttatatgtccagcctcttcctcagtcccccaaaccaaagctacacagccagatttctcaagcagtctcaactccagtccctcatctcacccttactattgctcttgctttccagtttgcttttgatttgcatcttctcactagtaaaactgccttccctttgttccttattttctgttttttctctagagaggtacagttgtaagtcagagttaatataatagggcctgtgaaaacagaggcttttgcattgtctcttgacatcagaagttacaataggcatatgggcaaaatggtgtagcaggctcactggccgtttgttttttaaacacattttcacaagtttttgagacactggatttctttaattaaaaaaaaaatgccaagaaacattatttatacagggttgattgctttcatgttgttattctgtaccctatagtagcctccatgagaatctggtatttcttgctgcttggaactactttgcagtgattacttggttgcagtccaagtactctcgtttagtctgagcctggagatgttctagacttgcttctcccacctctgagattaggacaggaaaaatgtgaaatttcccaattacaggattatacggtaccatcacatcatttgtggaaattggggtgactgtatagctgggattgggctaaggactgtggtcttatctgtccacatacagccaaaatgcctatccagaaatccagttcgttggaaaggaaaattggtactcctgtgccacaggggttccagaaaagggaagtcactttaccttgcggtggtgggatcctgatgtctttcatccatttgtagtaaaagctggtaaagcttttcttactcctggttccctaccagtatttctaaacatgtcgcactttctccacaggcatgtggttttgacctttttttcaatcttctagaaagggaacggaagcagaagtgggacatcgagggctctgctgtcctctgcgctgggtgtggaatgctgctgcacctgtcccttctgctggctcagggaagtgtcttcttgcccacatttctgtggggaaaggtttttaatcctctgatgcttccatcttcctgtttaggccatgtgcccagaaacctggactgatctttctttaatagtgaacccctgggccactgaagagtaacatggctccactggacacaaaagagggatggaatcaacaggcagggggccttttataagccttaggaaaagaaaatgaaactatttcatctttggacttttcaatactattggagtgatttttttctttctaaacagggaaaataatgttacaaaagcatcttttttgttatttgtttgcatccctcccccacaccctggtgttttaaaatgaagaaaaaaaaccatcaccttttgtacaaaaactcttaatgattaaaaaacaaacaaaa

SEQ ID NO: 17069 - DNA, 720 bp, Homo sapiens
  source 1..720: mol_type = unassigned DNA
caatttgttgtcattgatttgtagtgtaaaagacaactgtacttatgggaagtctagaaacccttgagatttgtgacctgtagaggccaaagaggtttcagaagactacatcaagccatcaaacagtaaagaggcaaggatggctccacccaagctgtcatcattcttttttaagttctttcatttccctcttcccaactttgtagtttgttctgaaagactcacctatacattagactacaagttacatataaatgaattttctgctgcagatgctcttgttacagagatattaaaatgtactatgtgttgcatatgccagagaatcttgtactttctggataattaaaataccatcgatttattacacattcatacgctttatctctttcctctctctcctgatcctacctgccctccccaacacacactctctcccaaaggatgttccctttctacagctgctggaggactggactgctactactactcctggctgtggcagtgagagaatcctggcagacagaagaaaaaacttgcgacttggtaggagaaaagggtaaagagtcagagaaagagttggctctagtgaagaggctgaaaccactgtttaataaaagctttgagagcactgtgggccagggttcagacacatacatctacatcttcagggtgtgccgggaagctggcaaccacacttctggggcaggcctggtgcaa

SEQ ID NO: 17070 - DNA, 596 bp, Homo sapiens
  source 1..596: mol_type = unassigned DNA
agagtggggcacagcgaggcgctagggggaacgctggcctctgaaactagctctgggaccggggtctgcggccggcccctagctggccccgtctcccatccccagaagggtattcactggggattctgagctttggctactccagtttcccacgacactgtaaaagacaactgtacttatgggaagtctagaaacccttgagatttgtgacctgtagaggccaaagaggtttcagaagactacatcaagccatcaaacagtaaagaggatgttccctttctacagctgctggaggactggactgctactactactcctggctgtggcagtgagagaatcctggcagacagaagaaaaaacttgcgacttggtaggagaaaagggtaaagagtcagagaaagagttggctctagtgaagaggctgaaaccactgtttaataaaagctttgagagcactgtgggccagggttcagacacatacatctacatcttcagggtgtgccgggaagctggcaaccacacttctggggcaggcctggtgcaaatcaacaaaagtaatgggaaggagacagtggtagggagactcaacgagactc

SEQ ID NO: 17071 - DNA, 3569 bp, Homo sapiens
  source 1..3569: mol_type = unassigned DNA
ggtaaatatgtgttcattaactgagattaaccttccctgagttttctcacaccaaggtgaggaccatgtccctgtttccatcactccctctccttctcctgagtatggtggcagcgtcttactcagaaactgtgacctgtgaggatgcccaaaagacctgccctgcagtgattgcctgtagctctccaggcatcaacggcttcccaggcaaagatgggcgtgatggcaccaagggagaaaagggggaaccaggccaagggctcagaggcttacagggcccccctggaaagttggggcctccaggaaatccagggccttctgggtcaccaggaccaaagggccaaaaaggagaccctggaaaaagtccggatggtgatagtagcctggctgcctcagaaagaaaagctctgcaaacagaaatggcacgtatcaaaaagtggctcaccttctctctgggcaaacaagttgggaacaagttcttcctgaccaatggtgaaataatgacctttgaaaaagtgaaggccttgtgtgtcaagttccaggcctctgtggccacccccaggaatgctgcagagaatggagccattcagaatctcatcaaggaggaagccttcctgggcatcactgatgagaagacagaagggcagtttgtggatctgacaggaaatagactgacctacacaaactggaacgagggtgaacccaacaatgctggttctgatgaagattgtgtattgctactgaaaaatggccagtggaatgacgtcccctgctccacctcccatctggccgtctgtgagttccctatctgaagggtcatatcactcaggccctccttgtctttttactgcaacccacaggcccacagtatgcttgaaaagataaattatatcaatttcctcatatccagtattgttccttttgtgggcaatcactaaaaatgatcactaacagcaccaacaaagcaataatagtagtagtagtagttagcagcagcagtagtagtcatgctaattatataatatttttaatatatactatgaggccctatcttttgcatcctacattaattatctagtttaattaatctgtaatgctttcgatagtgttaacttgctgcagtatgaaaataagacggatttatttttccatttacaacaaacacctgtgctctgttgagccttcctttctgtttgggtagagggctcccctaatgacatcaccacagtttaataccacagctttttaccaagtttcaggtattaagaaaatctattttgtaactttctctatgaactctgttttctttctaatgagatattaaaccatgtaaagaacataaataacaaatctcaagcaaacagcttcacaaattctcacacacatacatacctatatactcactttctagattaagatatgggacatttttgactccctagaagccccgttataactcctcctagtactaactcctaggaaaatactattctgacctccatgactgcacagtaatttcgtctgtttataaacattgtatagttggaatcatattgtgtgtaatgttgtatgtcttgtttactcagaattaagtctgtgagattcattcatgtcatgtgtacaaaagtttcatccttttcattgccatgtagggttcccttatattaatattcctcagttcatccattctattgttaataggcacttaagtggcttccaatttttggccatgaggaagagaacccacgaacattcctggacttgtcttttggtggacatggtgcactaatttcactacctatccaggagtggaactggtagaggatgaggaaagcatgtattcagctttagtagatattaccagttttcctaagtgattgtatgaatttatgctcctaccggcaatgtgtggcagtcctagatgctctatgtgcttgtaaaaagtcaatgttttcagttctcttgattttcattattcctgtggatgtaaagtgatatttccccatggttttaatctgtatttccccaacatgtaataaggttgaacacttttttatatgcttattgggcacttgggtatcttcttttgtgaagtacccgttcacatttttgtattttgtttaaattagttagccaatatttttcttactgatttttaagttatttttacattctgaatatgtcctttttaatgtgtattacaaatattttgctagtttttgacttgctcctaatgttgaattttgatgaacaaaatttcctaattttgagaaagtcttatttattcatattttctttcaaaattagtgctttttgtgtcatgtttaagaaatttttgcccatcccaaaatcataagatatttttcatgattttgaaaccatgaagagatttttcatgattttgaaatcatgaagatatttttccatttttttctaatagttttattaataaacattctatctattcctggtagaatagatatccacttgagacagcactatgtaggaaagaccatttttcctccactgaactagggtggtgcatttttgtaagttaggtaactgtatgtgtgtgtgtctgtttctgggctgtctattctagtctatttgttgatgcttgtgtcaaacagtacactatcttaattattgtacatttatagttgtaactatagtccagctttgttcttcttaaagtcaagatttccatataaatattagaaacagcttctcaatttctacaaaatcctgatgaggtttctactgggaccacattgagtctatcaatcaacttatgcagaactggcaacttactactgaatctctaatcaatgttcatcatgtatcgcttcatgtaactagaatttctttaacttaattgctatgttttgacatttttagtttaaaaaccttgtatatcttgttttggtggttttagtgattttaataatatattttaaatattttttcttttctattgttgtacacagaaatacagttaagttttgtgtgtagtcttacgatgtttagtaaactcaataagtttatttcttaaatctagtaatttgtagattcctctggattttgtatatgcatagtcatgtaagctgaaaatatggcaatacttgcttcttcccaattgctttaccttttttcttaccttattgcactggttagcaaccccaatacagagaccaccagatcaggtatagactcctgaaagacaatataatgaagtgctccagtcaggcctatctaaactggattcacagctctgtcacttaattgctacatgatctagagccagttactttgtgtttcagccatgtatttgcagctgagagaaaataatcattcttatttcatgaaaattgtggggatgatgaaataagttaacacctttaaagtgtgtagtaaagtatcaggatactatattttaggtcttaatacacacagttatgccgctagatacatgctttttaatgagataatgtgatattatacataacacatatcgatttttaaaaattaaatcaaccttgctttgatggaataaactccatttagtcaca

SEQ ID NO: 17072 - DNA, 1605 bp, Homo sapiens
  source 1..1605: mol_type = unassigned DNA
aattccaacagcgcgtccaaaacgtggtccctgactgagacttattttacgccactagagtgagggtgggtagcgtcagaaagagcggggcacggggcgggccagcttcgccgcgggaaaagaacgggaggcggagtgtccgcagcgcgcacgcgcaacgaaagtcaatggcggtctggagagactggcggaagctagctttgcaatatggcggccgaggcggacggaccgcttaaacggctgctcgtgccgattcttttacctgagaaatgctacgaccaacttttcgttcagtgggacttgcttcacgtcccctgcctcaagattctcctcagcaaaggcctggggctgggcattgtggctggctcacttctagtaaagctgccccaggtgtttaaaatcctgggagccaagagtgctgaagggttgagtctccagtctgtaatgctggagctagtggcattgactgggaccatggtctacagcatcactaacaacttcccattcagctcttggggtgaagccttattcctgatgctccagacgatcaccatctgcttcctggtcatgcactacagaggacagactgtgaaaggtgtcgctttcctcgcttgctacggcctggtcctgctggtgcttctctcacctctgacgcccttgactgtagtcaccctgctccaggcctccaatgtgcctgctgtggtggtggggaggcttctccaggcagccaccaactaccacaacgggcacacaggccagctctcagccatcacagtcttcctgctgtttgggggctccctggcccgaatcttcacttccattcaggaaaccggagatcccctgatggctgggacctttgtggtctcctctctctgcaacggcctcatcgccgcccagctgctcttctactggaatgcaaagcctccccacaagcagaaaaaggcgcagtagagccagctactggagtcattccgtttccactcattcacccaacctcagggttctccccatctgagccagcctgctggtgtgacttactcatcctccattcctctgcacttgcagactttctgagccagggttttcttttagtggaaacaaatggttgatggatccagatccttagaaaaggagaggatgggggtagagtctcccaagccaaaattttgacatttgagtgctttcgtaagccctgtacatgtactattaattcagtcattcagccaagcctcctcctctagcagcaatttccagctgtgtaacactatcctgggcaaatgttttaccctgtcctccagcctccctgcttcccttctggccctggaagactgagtctggacggcagagtggagggactgggaggctgtggctgcctccctccctcagcccggctgggactgtctcccggaccccagtgctggggtgggggaagggggacggagaatgactcaggcagggccccagggtggggtgaggaggttcctgctctggcaggtctaggcggaagggagtggagatggggctggttcctgctgcagtgaggggaacagatgggacaataaagactggagactcagttgaataatacaaaactgtttaatacta

SEQ ID NO: 17073 - DNA, 1790 bp, Homo sapiens
  source 1..1790: mol_type = unassigned DNA
agctagctttgcaatatggcggccgaggcggacggaccgcttaaacggctgctcgtgccgattcttttacctgagaaatgctacgaccaacttttcgttcagtgggacttgcttcacgtcccctgcctcaagattctcctcagcaaaggcctggggctgggcattgtggctggctcacttctagtaaagctgccccaggtgtttaaaatcctgggagccaagagtgctgctggattaaaaaaggaggatgaggcccgtcccgtgaggtctgcgtccatgagggttagaggtgggttaggggcatgggggcaccagcaaggggagggttgtatggagtgggagagccagggggcaggtagtgggtataggtgggcagcagttccccctggagcctagggtcactctgagggagggagcacggtgagggggcttccagtttgcagtgggaagagctgcagagagaaacaagaggttagagggcacttccctgggttggaggtgagtctggccagttctgggcagacagggtagagcgtgccacccacccagccctggctacccagcccgctgggcgcagcaggcatggaagccgaccccgggatggagagcccgcggccctgttggggcacgctcgggagcgggcttgcgtgctgcacggctgttttcctcttggggagtcaggccaggaaagggcagaatgagctcggcctctccttgccctgggggctgggagaggaagctgggtcacacacaggccagaagcaggggggaaacggggcatctaactaggacacagtcgcatccaggggtcagtcacctgaccctacagggcccaccaccttcagactgagatggaaacgccctctgggagaaccctgatccgccccaccctacacaggccccggaggtactgggcctgcgcccgccacaccttggccgcgagtggcctctgcttgggtgggctcccgtcctccggcatccgcccccaccaaggctccagaagaggggcgcatgggcctccgtcttcggcccgcttcccaggcactcacccatagctgccaggcaggtaggctgtcgagtagctggggggtctgtacccaaagcctctgctcggttgggtggtcgcgtaccccggcccccagagcgggccgccgctggccaggttgcctcttccctgtccgcagcgggaaggtccggcgcccgagctcttggccttgcgccgaggccggtacttgtagtcggggtagtcgcgcaggtgtcgggcgcggagccgcttggcctcctccacgaagggccgcttctcgtcctcgtccagcagcttccactgcgcgcccaggcgcttggagatctcggagttgtgcatcttggggttctgctgcgccatctggcggcgctgagcggagctccacaccatgaacgcgttcatcggccgcttcaccttctccaggggcagcgtcccggaccaccaccccaacccctttcctggtgcctgttgctcctcaaatcccagaactgcccctggggcaagaaaggccgaggagggagaccatttttgtttcctgagtcattccagcagaagtaagaccatctttgggacaagagacaatgaagagaagtcagatgtggaggaacagaaaacaagagccaggggccagggcaggtcagtcctagagaaacaaatggaccaaactggggacaaagaaggcacaggagccagacagccatttggatttttttattctctttttaaatactgtacagtgaaaaataaatacgccttctcatccacc

SEQ ID NO: 17074 - DNA, 900 bp, Homo sapiens
  source 1..900: mol_type = unassigned DNA
atggcggccgaggcggacggaccgcttaaacggctgctcgtgccgattcttttacctgagaaatgctacgaccaacttttcgttcagtgggacttgcttcacgtcccctgcctcaagattctcctcagcaaaggcctggggctgggcattgtggctggctcacttctagtaaagctgccccaggtgtttaaaatcctgggagccaagagtgctgaagggttgagtctccagtctgtaatgctggagctagtggcattgactgggaccatggtctacagcatcactaacaacttcccattcagctcttggggtgaagccttattcctgatgctccagacgatcaccatctgcttcctggtcatgcactacagaggacagactgtgaaaggtgtcgctttcctcgcttgctacggcctggtcctgctggtgcttctctcacctctgacgcccttgactgtagtcccctgctccggcctccaatgtgcctgctgtggtggtggggaggcttctccaggcagccaccaactaccacaacgggcacacaggccagctctcagccatcacagtcttcctgctgtttgggggctccctggcccgaatcttcacttccattcaggaaaccggagatcccctgatggctgggacctttgtggtctcctctctctgcaacggcctcatcgccgcccagctgctcttctactggaatgcaaagcctccccacaagcagaaaaaggcgcagtagagccagctactggagtcattccgtttccactcattcacccaacctcagggttctccccatctgagccagcctgctggtgtgacttactcatcctccattcctctgcacttgcagactttctgagccagggttttcttttagtggaaacaaatggttga

SEQ ID NO: 17075 - DNA, 1007 bp, Homo sapiens
  source 1..1007: mol_type = unassigned DNA
gcgcaacgaaagtcaatggcggtctggagagactggcggaagctagctttgcaatatggcggccgaggcggacggaccgcttaaacggctgctcgtgccgattcttttacctgagaaatgctacgaccaacttttcgttcagtgggacttgcttcacgtcccctgcctcaagattctcctcagcaaaggcctggggctgggcattgtggctggctcacttctagtaaagctgccccaggtgtttaaaatcctgggagccaagagtgctgaagggttgagtctccagtctgtaatgctggagctagtggcattgactgggaccatggtctacagcatcactaacaacttcccattcagctcttggggtgaagccttattcctgatgctccagacgatcaccatctgcttcctggtcatgcactacagaggacagactgtgaaaggtgtcgctttcctcgcttgctacggcctggtcctgctggtgcttctctcacctctgacgcccttgactgtagtcaccctgctccaggcctccaatgtgcctgctgtggtggtggggaggcttctccaggcagccaccaacaccacaacgggcacacaggccagctctcagccatcacagtcttcctgctgtttgggggctccctggcccgaatcttcacttccattcaggaaaccggagatcccctgatggctgggacctttgtggtctcctctctctgcaacggcctcatcgccgcccagctgctcttctactggaatgcaaagcctccccacaagcagaaaaaggcgcagtagagccagctactggagtcattccgtttccactcattcacccaacctcagggttctccccatctgagccagcctgctggtgtgacttactcatcctccattcctctgcacttgcagactttctgagccagggttttcttttagtggaaacaaatggttgatggatccagatccttagaaaaggagaggatgggggtagagtctcccaagcc

SEQ ID NO: 17076 - DNA, 888 bp, Homo sapiens
  source 1..888: mol_type = unassigned DNA
gctttgcaatatggcggccgaggcggacggaccgcttaaacggctgctcgtgccgattcttttacctgagaaatgctacgaccaacttttcgttcagtgggacttgcttcacgtcccctgcctcaagattctcctcagcaaaggcctggggctgggcattgtggctggctcacttctagtaaagctgccccaggtgtttaaaatcctgggagccaagagtgctgaagggttgagtctccagtctgtaatgctggagctagtggcattgactgggaccatggtctacagcatcactaacaacttcccattcaggtgtcgctttcctcgcttgctacggcctggtcctgctggtgcttctctcacctctgacgcccttgactgtagtcaccctgctccaggcctccaatgtgcctgctgtggtggtggggaggcttctccaggcagccaccaactaccacaacgggcacacaggccagctctcagccatcacagtcttcctgctgtttgggggctccctggcccgaatcttcacttccattcaggggtgagcatcccattctctcagctctgaggaaggattctggtgtccagagttggctgacctggctggcggtctccactgatagagccatcagtccgattaccacggttacggcggcggcggctgcgattacgacgttgaggtcttgattcatcttctgtagggtaggaaaaaaccagagtcacacatccaacctcccaccctcgattcctacccatctctaactttccagaccccaggcacaccctcacccaggccattctctgtcatgttgggcccatctgattccaggcctccatccatgacggtcctgtcttcatcagtgcggcggcggcgggagcggcggc

SEQ ID NO: 17077 - DNA, 2961 bp, Homo sapiens
  source 1..2961: mol_type = unassigned DNA
aagaggagcgagagcccggcgatggcggctgcgccggccttgaagcactggcgcaccacgctggagcgggtggagaagttcgtgtcgccgctctactttaccgactgtaacctccgcggcaggctttttggggccagctgccctgtggctgtgctctccagcttcctgacgccggagagacttccctaccaggaggcagtccagcgggacttccgccccgcgcaggtcggcgacagcttcggacccacatggtggacctgctggttccgggtggagctgaccatcccagaggcatgggtgggccaggaagttcacctttgctgggaaagtgatggagaaggtctggtgtggcgtgatggagaacctgtccagggtttaaccaaagagggtgagaagaccagctatgtcctgactgacaggctgggggaaagagacccccgaagcctcactctctatgtggaagtagcctgcaatgggctcctgggggccgggaagggaagcatgattgcagcccctgaccctgagaagatgttccagctgagccgggctgagctagctgtgttccaccgggatgtccacatgctcctggtggatctggagctgctgctgggcatagccaaggcgcagcagctggaatgggtgaagagccgctaccctggcctgtactcccgcatccaggagtttgcgtgccgtgggcagtttgtgcctgtggggggcacctgggtggagatggatgggaacctgcccagtggagaggccatggtgaggcagtttttgcagggccagaacttctttctgcaggagtttgggaagatgtgctctgagttctggctgccggacacctttggctactcagcacagctcccccagatcatgcacggctgtggcatcaggcgctttctcacccagaaattgagctggaatttggtgaactccttcccacaccatacatttttctgggagggcctggatggctcccgtgtactggtccacttcccacctggcgactcctatgggatgcagggcagcgtggaggaggtgctgaagaccgtggccaacaaccgggacaaggggcgggccaaccacagtgccttcctctttggctttggggatgggggtggtggccccacccagaccatgctggaccgcctgaagcgcctgagcaatacggatgggctgcccagggtgcagctatcttctccaagacagctcttctcagcactggagagtgactcagagcagctgtgcacgtgggttggggagctcttcttggagctgcacaatggcacatacaccacccatgcccagatcaagaaggggaaccgggaatgtgagcggatcctgcacgacgtggagctgctcagtagcctggccctggcccgcagtgcccagttcctatacccagcagcccagctgcagcacctctggaggctccttcttctgaaccagttccatgatgtggtgactggaagctgcatccagatggtggcagaggaagccatgtgccattatgaagacatccgttcccatggcaatacactgctcagcgctgcagccgcagccctgtgtgctggggagccaggtcctgagggcctcctcatcgtcaacacactgccctggaagcggatcgaagtgatggccctgcccaaaccgggcggggcccacagcctagccctggtgacagtgcccagcatgggctatgctcctgttcctccccccacctcactgcagcccctgctgccccagcagcctgtgttcgtagtgcaagagactgatggctccgtgactctggacaatggcatcatccgagtgaagctggacccaactggtcgcctgacgtccttggtcctggtggcctctggcagggaggccattgctgagggcgccgtggggaaccagtttgtgctatttgatgatgtccccttgtactgggatgcatgggacgtcatggactaccacctggagacacggaagcctgtgctgggccaggcagggaccctggcagtgggcaccgagggcggcctgcggggcagcgcctggttcttgctacagatcagccccaacagtcggcttagccaggaggttgtgctggacgttggctgcccctatgtccgcttccacaccgaggtacactggcatgaggcccacaagttcctgaaggtggagttccctgctcgcgtgcggagttcccaggccacctatgagatccagtttgggcacctgcagcgacctacccactacaatacctcttgggactgggctcgatttgaggtgtgggcccatcgctggatggatctgtcagaacacggctttgggctggccctgctcaacgactgcaagtatggcgcgtcagtgcgaggcagcatcctcagcctctcgctcttgcgggcgcctaaagccccggacgctactgctgacacggggcgccacgagttcacctatgcactgatgccgcacaagggctctttccaggatgctggcgttatccaagctgcctacagcctaaacttccccctgttggctctgccagcccccagcccagcgcccgccacctcctggagtgcgttttccgtgtcttcacccgcggtcgtattggagaccgtcaagcaggcggagagcagcccccagcgccgctcgctggtcctgaggctgtatgaggcccacggcagccacgtggactgctggctgcacttgtcgctgccggttcaggaggccatcctctgcgatctcttggagcgaccagaccctgctggccacttgacccttcgggacaaccgcctgaagctcaccttttctcccttccaagtgctgtccctgttgctcgtgcttcagcctccgccacactgagtccctggggctggggttttgtttgtagaaggctctggggactcctaatttctgcttccccagcctaaagcagggatcagtcttttcttgtggaataaatccttggatcgggaa

SEQ ID NO: 17078 - DNA, 3300 bp, Homo sapiens
  source 1..3300: mol_type = unassigned DNA
gagagcccggcgatggcggctgcgccggccttgaagcactggcgcaccacgctggagcgggtggagaagttcgtgtcgccgctctactttaccgactgtaacctccgcggcaggctttttggggccagctgccctgtggctgtgctctccagcttcctgacgccggagagacttccctaccaggaggcagtccagcgggacttccgccccgcgcaggtcggcgacagcttcggacccacatggtggacctgctggttccgggtggagctgaccatcccagaggcatgggtgggccaggaagttcacctttgctgggaaagtgatggagaaggtctggtgtggcgtgatggagaacctgtccagggtttaaccaaagagggtgagaagaccagctatgtcctgactgacaggctgggggaaagagacccccgaagcctcactctctatgtggaagtagcctgcaatgggctcctgggggccgggaagggaagcatgattgcagcccctgaccctgagaagatgttccagctgagccgggctgagctagctgtgttccaccgggatgtccacatgctcctggtggatctggagctgctgctgggcatagccaagggcctcgggaaggacaaccagcgcagcttccaggccctgtacacagccaatcagatggtgaacgtgtgtgaccctgcccagcccgagaccttcccagtggcccaggccctggcctccaggttctttggccaacatgggggtgaaagccaacacaccattcatgccacagggcactgccacattgatacagcctggctttggcccttcaaagagactgtgaggaaatgtgcccggagctgggtgaccgccctgcagctcatggagcggaaccctgagttcatctttgcctgctcccaggcgcagcagctggaatgggtgaagagccgctaccctggcctgtactcccgcatccaggagtttgcgtgccgtgggcagtttgtgcctgtggggggcacctgggtggagatggatgggaacctgcccagtggagaggccatggtgaggcagtttttgcagggccagaacttctttctgcaggagtttgggaagatgtgctctgagttctggctgccggacacctttggctactcagcacagctcccccagatcatgcacggctgtggcatcaggcgctttctcacccagaaattgagctggaatttggtgaactccttcccacaccatacatttttctgggagggcctggatggctcccgtgtactggtccacttcccacctggcgactcctatgggatgcagggcagcgtggaggaggtgctgaagaccgtggccaacaaccgggacaaggggcgggccaaccacagtgccttcctctttggctttggggatgggggtggtggccccacccagaccatgctggaccgcctgaagcgcctgagcaatacggatgggctgcccagggtgcagctatcttctccaagacagctcttctcagcactggagagtgactcagagcagctgtgcacgtgggttggggagctcttcttggagctgcacaatggcacatacaccacccatgcccagatcaagaaggggaaccgggaatgtgagcggatcctgcacgacgtggagctgctcagtagcctggccctggcccgcagtgcccagttcctatacccagcagcccagctgcagcacctctggaggctccttcttctgaaccagttccatgatgtggtgactggaagctgcatccagatggtggcagaggaagccatgtgccattatgaagacatccgttcccatggcaatacactgctcagcgctgcagccgcagccctgtgtgctggggagccaggtcctgagggcctcctcatcgtcaacacactgccctggaagcggatcgaagtgatggccctgcccaaaccgggcggggcccacagcctaggcctcacccccagccctggtgacagtgcccagcatgggctatgctcctgttcctccccccacctcactgcagcccctgctgccccagcagcctgtgttcgtagtgcaagagcccctacagactcagcctcaaggcctcctcccacaaagactgatggctccgtgactctggacaatggcatcatccgagtgaagctggacccaactggtcgcctgacgtccttggtcctggtggcctctggcagggaggccattgctgagggcgccgtggggaaccagtttgtgctatttgatgatgtccccttgtactgggatgcatgggacgtcatggactaccacctggagacacggaagcctgtgctgggccaggcagggaccctggcagtgggcaccgagggcggcctgcggggcagcgcctggttcttgctacagatcagccccaacagtcggcttagccaggaggttgtgctggacgttggctgcccctatgtccgcttccacaccgaggtacactggcatgaggcccacaagttcctgaaggtggagttccctgctcgcgtgcggagttcccaggccacctatgagatccagtttgggcacctgcagcgacctacccactacaatacctcttgggactgggctcgatttgaggtgtgggcccatcgctggatggatctgtcagaacacggctttgggctggccctgctcaacgactgcaagtatggcgcgtcagtgcgaggcagcatcctcagcctctcgctcttgcgggcgcctaaagccccggacgctactgctgacacggggcgccacgagttcacctatgcactgatgccgcacaagggctctttccaggatgctggcgttatccaagctgcctacagcctaaacttccccctgttggctctgccagcccccagcccagcgcccgccacctcctggagtgcgttttccgtgtcttcacccgcggtcgtattggagaccgtcaagcaggcggagagcagcccccagcgccgctcgctggtcctgaggctgtatgaggcccacggcagccacgtggactgctggctgcacttgtcgctgccggttcaggaggccatcctctgcgatctcttggagcgaccagaccctgctggccacttgacccttcgggacaaccgcctgaagctcaccttttctcccttccaagtgctgtccctgttgctcgtgcttcagcctccgccacactgagtccctggggctggggttttgtttgtagaaggctctggggactcctaatttctgcttccccagcctaaagcagggatcagtcttttcttgtggaataaatccttggatcgggaa

SEQ ID NO: 17079 - DNA, 3177 bp, Homo sapiens
  source 1..3177: mol_type = unassigned DNA
agcccggcgatggcggctgcgccggccttgaagcactggcgcaccacgctggagcgggtggagaagttcgtgtcgccgctctactttaccgactgtaacctccgcggcaggctttttggggccagctgccctgtggctgtgctctccagcttcctgacgccggagagacttccctaccaggaggcagtccagcgggacttccgccccgcgcaggtcggcgacagcttcggacccacatggtggacctgctggttccgggtggagctgaccatcccagaggcatgggtgggccaggaagttcacctttgctgggaaagtgatggagaaggtctggtgtggcgtgatggagaacctgtccagggtttaaccaaagagggtgagaagaccagctatgtcctgactgacaggctgggggaaagagacccccgaagcctcactctctatgtggaagtagcctgcaatgggctcctgggggccgggaagggaagcatgattgcagcccctgaccctgagaagatgttccagctgagccgggctgagctagctgtgttccaccgggatgtccacatgctcctggtggatctggagctgctgctgggcatagccaagggcctcgggaaggacaaccagcgcagcttccaggccctgtacacagccaatcagatggtgaacgtgtgtgaccctgcccagcccgagaccttcccagtggcccaggccctggcctccaggttctttggccaacatgggggtgaaagccaacacaccattcatgccacagggcactgccacattgatacagcctggctttggcccttcaaagagactgtgaggaaatgtgcccggagctgggtgaccgccctgcagctcatggagcggaaccctgagttcatctttgcctgctcccaggcgcagcagctggaatgggtgaagagccgctaccctggcctgtactcccgcatccaggagtttgcgtgccgtgggcagtttgtgcctgtggggggcacctgggtggagatggatgggaacctgcccagtggagaggccatggtgaggcagtttttgcagggccagaacttctttctgcaggagtttgggaagatgtgctctgagttctggctgccggacacctttggctactcagcacagctcccccagatcatgcacggctgtggcatcaggcgctttctcacccagaaattgagctggaatttggtgaactccttcccacaccatacatttttctgggagggcctggatggctcccgtgtactggtccacttcccacctggcgactcctatgggatgcagggcagcgtggaggaggtgctgaagaccgtggccaacaaccgggacaaggggcgggccaaccacagtgccttcctctttggctttggggatgggggtggtggccccacccagaccatgctggaccgcctgaagcgcctgagcaatacggatgggctgcccagggtgcagctatcttctccaagacagctcttctcagcactggagagtgactcagagcagctgtgcacgtgggttggggagctcttcttggagctgcacaatggcacatacaccacccatgcccagatcaagaaggggaaccgggaatgtgagcggatcctgcacgacgtggagctgctcagtagcctggccctggcccgcagtgcccagttcctatacccagcagcccagctgcagcacctctggaggctccttcttctgaaccagttccatgatgtggtgactggaagctgcatccagatggtggcagaggaagccatgtgccattatgaagacatccgttcccatggcaatacactgctcagcgctgcagccgcagccctgtgtgctggggagccaggtcctgagggcctcctcatcgtcaacacactgccctggaagcggatcgaagtgatggccctgcccaaaccgggcggggcccacagcctagccctggtgacagtgcccagcatgggctatgctcctgttcctccccccacctcactgcagcccctgctgccccagcagcctgtgttcgtagtgcaagagactgatggctccgtgactctggacaatggcatcatccgagtgaagctggacccaactggtcgcctgacgtccttggtcctggtggcctctggcagggaggccattgctgagggcgccgtggggaaccagtttgtgctatttgatgatgtccccttgtactgggatgcatgggacgtcatggactaccacctggagacacggaagcctgtgctgggccaggcagggaccctggcagtgggcaccgagggcggcctgcggggcagcgcctggttcttgctacagatcagccccaacagtcggcttagccaggaggttgtgctggacgttggctgcccctatgtccgcttccacaccgaggtacactggcatgaggcccacaagttcctgaaggtggagttccctgctcgcgtgcggagttcccaggccacctatgagatccagtttgggcacctgcagcgacctacccactacaatacctcttgggactgggctcgatttgaggtgtgggcccatcgctggatggatctgtcagaacacggctttgggctggccctgctcaacgactgcaagtatggcgcgtcagtgcgaggcagcatcctcagcctctcgctcttgcgggcgcctaaagccccggacgctactgctgacacggggcgccacgagttcacctatgcactgatgccgcacaaggcccccagcccagcgcccgccacctcctggagtgcgttttccgtgtcttcacccgcggtcgtattggagaccgtcaagcaggcggagagcagcccccagcgccgctcgctggtcctgaggctgtatgaggcccacggcagccacgtggactgctggctgcacttgtcgctgccggttcaggaggccatcctctgcgatctcttggagcgaccagaccctgctggccacttgacccttcgggacaaccgcctgaagctcaccttttctcccttccaagtgctgtccctgttgctcgtgcttcagcctccgccacactgagtccctggggctggggttttgtttgtagaaggctctggggactcctaatttctgcttccccagcctaaagcagggatcagtcttttcttgtggaataaatccttggatcgggaa

SEQ ID NO: 17080 - DNA, 1909 bp, Homo sapiens
  source 1..1909: mol_type = unassigned DNA
gtaccgtgctgctctactcgctgccattcgcccgcaggtcggcgcgctcgcccacctgagccgcgccggggctgcgggaccgtgggacagcgcgctcagcccagcctaggaaagaggcagcagtctcagcgcggagatggggagcgggcgaagttgacgagtctcccgcccacgctgcgcccctcctgcccagaggggctgcagccagcggtctgtcgcgcgtgcctgtgtgcccgaggagccgccccggggagaagacccggcgcggagttgttcccccagggaggatccgcagcccagccgagggggtcgggcggcctggctacgcaggacccagccccgcagccgcggactcccagcggcggcgaagtttggctgctgagcggcgcggcgccggaccactggacagcgggagcgatgcccgtggggggcctgttgccgctcttcagcagccccgcgggcggcgtcctgggcggggggctcggcggcggcggtggcaggaaggggtcgggccccgccgccctccgcctgacggagaagttcgtgctgctgctggtattcagcgccttcatcacgctctgcttcggggcgatcttcttcctgccagactcctccaagctgctcagcggggtcctgttccactccagccccgccttgcagccggccgccgaccacaagcccgggcccggggcgcgcgccgaggacgcggccgaggggcgagcccggcgccgcgaggagggggcacccggggacccggaggccgccctggaggacaacttggccaggatccgcgaaaaccacgagcgggctctcagggaagccaaggagaccctgcagaagctgcccgaggagatccaaagagacatcctactggagaagaagaaggtggcccaggaccagctgcgtgacaaggcgccgttcagaggcctgcccccggtggacttcgtgcccccaatcggggtggagagccgggagcccgccgacgccgccatccgcgagaaaagggcaaagatcaaagaggaaattgaagccaggaaggggcaagcaaattgcccagggtcgagcagctcctgcgaggttgaaatccagatgatgaaacatgcttggaataattataaaggttatgcctggggattaaatgaactcaaacctatatcaaaaggaggccattcaagcagtttgtttggtaacatcaaaggagcaactatagtagatgccctggatacactttttattatggaaatgaaacatgaatttgaagaagcaaaatcatgggttgaagaaaatttagattttaatgtgaatgctgaaatttctgtctttgaagtaaatatacgctttgttggtggactactctcagcctactatctgtctggagaagagatttttcgaaagaaagcagtggaacttggggtaaaattgctacctgcatttcatactccctctggaataccttgggcattgctgaatatgaaaaggtggatgtgcaatatcccaagggctatggaggctaccatatgaggtgggatatcattggcccacactggaaagagaaatagctctgataaagtcatcatctcctcttaccctgatattgccttatgtcgcagctttgtttttaatatttctccagaccacagaaatttgtagttttgctaaataggcttattgacgttagtcagtgatggagtgattggaataaaacagtgatatgtcatgacaactagttaatgaccaattaccatgtgcatttgccatatgttagtaaactttgaaagtagctattcatcctatttggatgattggaaattcttttttataagccaactatgaaaataaaacctgactcacattcccagagcctaataaatttagggcattttgtaaaataaatgaatatatcattttc

SEQ ID NO: 17081 - DNA, 5014 bp, Homo sapiens
  source 1..5014: mol_type = unassigned DNA
agtgctcgcggggccgcggcggagtgtaccgtgctgctctactcgctgccattcgcccgcaggtcggcgcgctcgcccacctgagccgcgccggggctgcgggaccgtgggacagcgcgctcagcccagcctaggaaagaggcagcagtctcagcgcggagatggggagcgggcgaagttgacgagtctcccgcccacgctgcgcccctcctgcccagaggggctgcagccagcggtctgtcgcgcgtgcctgtgtgcccgaggagccgccccggggagaagacccggcgcggagttgttcccccagggaggatccgcagcccagccgagggggtcgggcggcctggctacgcaggacccagccccgcagccgcggactcccagcggcggcgaagtttggctgctgagcggcgcggcgccggaccactggacagcgggagcgatgcccgtggggggcctgttgccgctcttcagcagccccgcgggcggcgtcctgggcggggggctcggcggcggcggtggcaggaaggggtcgggccccgccgccctccgcctgacggagaagttcgtgctgctgctggtattcagcgccttcatcacgctctgcttcggggcgatcttcttcctgccagactcctccaagctgctcagcggggtcctgttccactccagccccgccttgcagccggccgccgaccacaagcccgggcccggggcgcgcgccgaggacgcggccgaggggcgagcccggcgccgcgaggagggggcacccggggacccggaggccgccctggaggacaacttggccaggatccgcgaaaaccacgagcgggctctcagggaagccaaggagaccctgcagaagctgcccgaggagatccaaagagacatcctactggagaagaagaaggtggcccaggaccagctgcgtgacaaggcgccgttcagaggcctgcccccggtggacttcgtgcccccaatcggggtggagagccgggagcccgccgacgccgccatccgcgagaaaagggcaaagatcaaagagatgatgaaacatgcttggaataattataaaggttatgcctggggattaaatgaactcaaacctatatcaaaaggaggccattcaagcagtttgtttggtaacatcaaaggagcaactatagtagatgccctggatacactttttattatggaaatgaaacatgaatttgaagaagcaaaatcatgggttgaagaaaatttagattttaatgtgaatgctgaaatttctgtctttgaagtaaatatacgctttgttggtggactactctcagcctactatctgtctggagaagagatttttcgaaagaaagcagtggaacttggggtaaaattgctacctgcatttcatactccctctggaataccttgggcattgctgaatatgaaaagtggtattggaaggaactggccctgggcctctggaggcagcagtattctggcagaatttggaaccctgcatttggagtttatgcacttgagccacttatcaggaaaccccatctttgctgaaaaggtaatgaatattcgaacagtactgaacaaactggaaaaaccacaaggcctttatcctaactatctgaatcccagtagtggacagtggggtcaacatcatgtatcagttggaggacttggagacagcttctatgagtatttgctgaaggcctggttaatgtctgacaagacagatctggaagctaagaagatgtattttgatgctgttcaggctatcgagactcatttgatccgcaagtctagcagcggactaacttatatcgcagagtggaaagggggcctcctggagcacaagatgggccacctgacctgcttcgcggggggcatgttcgcactcggggctgatgcagctcccgaaggcatggcccaacactaccttgaactcggggctgaaattgcccgtacttgtcatgaatcatataatcgaacatttatgaaactgggaccagaagctttcagatttgatggtggtgttgaagccatcgctacaagacaaaatgaaaaatactacatcttacggccagaagttatggagacttacatgtatatgtggagactgactcatgatccaaagtacaggaaatgggcctgggaagccgtagaggccttggaaaaccattgcagagtgaatggaggctattcaggcctaagggatgtttaccttcttcatgagagttatgatgatgtgcagcagagtttcttcctggcagagacattgaaatatttgtacctaatattttctgacgacgatcttcttccactggagcattggatcttcaatagcgaggcacatcttctccctatcctccctaaagataaaaaggaagttgaaatcagagaggaataaaaagacattttatattttattctgctccattcccttcactgtataccttaataattccttttctggtaatcaggcacatgatgaactttgattagtaggtctgtgattaagttcttaaattgttttgcagtcttttatgtttattatcataggtataggtggacctaaattccttatcatatcctttattaattcagccagtgtatccaccagttttttgtttatgtttttaagtaacctattatctctggatttcatgaaggtgtaatatcgtttttgttaaactgaatagaattgtatagcgatgacctcttaattataatttgatttgactgcaaaactttttcctcctctaagaggagatgatgtctgctttaagctgtaatgttttgccatgttgcaaaaagccataataataagtataaaaaagctttttcctttacaatttcatgttaatctggtttgtctgtccaccagagacagatcttctgtgacagcctccttatgcaggtctatcattatttgatagaatgtcttctaaaatacttcactcacattgtaattcaaattagaaagtcattccaaaaggatcatgtcatgttgacctcatttcatcggaactgcagtatatttttgttggttaattatattagtgttttctattttgtaaatgtgtcctttaattttactttaaatgccctgtgtcatttctggattatatactagttaatttcttccattccccactacacagagaggtgagctttcaaattttgcagagctctgctatcactgaattacatttatctgaagaaaatagtacaacttaatggattagcttttgggtttaactgaatatatgaagaaattgggtctgtctaaagagagggtatttcatatggcttttagttcacttgtttgtatttcatcttgatttttttctttggaaaataaagcattctatttggttcagatttctcagatttgaaaaaggctctatctcagatgtagtaaattatttcctttcagtttgtgaaagcaggatttgactctgaaagaagctttgccaattttacttattcgtgatcaatcaaggaaaatctaataaattttaggccaaataagaatatagcatatttagtatggttatagtcaacacagagatcacaacttagaagaaatataaagaaatggccactccccatcccccacagtcctggagtaaatcaaaatcaatatatgattcttttaaacattaagtttgaaataggaatggttttctcaagaatagatttggtgtgataccttgtgtttgcttacattggcccactatatatacatatatatttatgtagatatacttccatgaaagggctaatacgatgcatatactgaagggcaaggactttgaccatgtcaattttcagccgagaatggtcagaaagatcagtacaaccccatggattaggctgaaacatatgaaattgctgcatttgtagtttaaaaactgtcagcagtttcatatggttccacctaatattattgaagacaattattttcttagctatcaataggcttaatagttttagttattttagcttttgaaagtgttttaaaagatttcctttatcggacaggaccatctttatgacctgctttctgtttttcaatatcatacattggtgtatgtcaaagaataaattagtaaaattagtaaatgaaaaagactcttccgtacatcattatttccatgctaatgtgtgtctgtgatccagaataacttctcccactcatatcttcagttcacctaatgaaatgaatggatagcaagagccctttgttcccaggactttaaggcaaaatattaaaaattattgccaaaattaagaatataatgtttgtataaatgtccttgaatttgccatttaaattaactcattttcttttcactttgatttgaaagctgataagtatttctgcagcagatagaatattaaaatcaggttgtgtgtacacactgcactatgaggtaccttggtgtcctggtgtgaatagacaagaagctgtactatatgttgctctctcagtggcaacaatgaagtttttgcaattctagaacttggatttttttttaacaaaagtcccaaaacaccaaaaatgtaaacaagataagagattaatattgtagtgatgtaatttaattaaagttatattttgggttaattttaacaactgaagtcttattgttgaaacttattttcaacaaaactgtgcagttaaatttgtatacgtattcacatactgaaagatgaaccgttaaaatagcacttaattttgtgtttcttcaatatgtcttgatatactttgtgcaattaatattacacatgtaagttgtatggcagtttacagaactcaatgacttgtcatgaggttttcatatgagctacacattgtgtacattgattgttttttatttttacataaatccattctgtcattttcaactttatatataaatctccaatgttatgggaaacaatagattgacacataatttttaaaaattatatttgtaaaatttctctattgtgaataaagtcttttaatata

SEQ ID NO: 17082 - DNA, 2497 bp, Homo sapiens
  source 1..2497: mol_type = unassigned DNA
gggagaccttcctccctgtttgcagacgtccgtgggagacccttattttttccaccgctaaggttaagagattctggaatagaagcgtcgaaggagatcaagtgaaccttctacaactcctcggatgtcgccagtctccctttcggggcggaagactacgtttgagcatctcactgaggtgcaggaatggaagaacccaccttgcagcttttctgcagtgtggcttgcctgatctacccctaggaatgaagaggaggcttgtaataatccgatgaagtacagatgttgaagaggatatcgcaggacctaaacttgtgatcgtttgggggaggtcacacacgtttctgagtgggaatggatgggcgtgaatgacgtgccctcttaaaaagcacaacagtcctttaagaggagcaaaattgagttttcccattttggccaagattttgaagacagttcaatgtattctacatttgacataagatgagaactttctaaagtattctctccaagagcgtaaacgatgactaccccagccctgctgcccctctctggacgtaggataccacctctgaacctggggccgccttccttcccacatcacagggctaccttgagactttctgagaagtttattcttctccttattcttagtgccttcatcactctgtgttttggggcattctttttccttccagactcttcaaaacacaaacgctttgatttgggtttagaagatgtgttaattccacatgtagatgccggtaaaggggctaaaaaccccggagtcttcctgatccatggacccgatgaacatagacacagggaagaggaagaacgtctgagaaataaaattcgagctgatcatgagaaggccttggaagaagcaaaagaaaaattaagaaagtcaagagaggaaattcgagcagaaattcagacagagaaaaataaggtagtccaagaaatgaagataaaagagaacaagccactgccaccagtccctattcccaaccttgtaggaatacgtggtggagacccagaagataatgacataagagagaaaagggaaaaaattaaagagatgatgaaacatgcttgggataactataggacatatgggtggggacataatgaactcagacctattgcaaggaaaggacactcccctaacatatttggaagttcacaaatgggtgctaccatagtagatgctttggataccctttatatcatgggacttcatgatgaattcctagatgggcaaagatggattgaagacaaccttgatttcagtgtgaattcagaggtgtctgtgtttgaagtcaacattcgatttattggaggcctacttgcagcatattacctatcaggagaggagatattcaagattaaagcagtgcaattggctgagaaactccttcctgcctttaacacacctactgggattccttgggcaatggtgaatttgaaaagtggagtagggcgaaactggggctgggcatctgcaggtagcagcattctggctgaatttggtacactacatatggagttcatccacctcagctacttgacaggggacctgacttactacaaaaaggttatgcacattcggaaactacttcagaaaatggatcgtccaaatggtctttatccaaattatttgaaccccagaacagggcgctggggtcagtatcatacatctgtcggtggcctgggagacagtttttatgaatacttactgaaagcatggttgatgtcagataaaacagaccatgaggcaagaaagatgtatgatgatgctattgaggctatagaaaaacatcttattaagaagtctcgtggaggtcttacctttattggagaatggaagaatgggcacttggaaaaaaagatggggcatttggcctgctttgctgggggaatgtttgcactaggagcagatggttccagagcagataaagctggtcattatttagagctaggggcagaaattgcacgtacttgtcatgagtcatatgacagaactgcattaaagctaggtcctgaatcattcaagtttgatggtgcagtggaggctgtggctgtccggcaggctgaaaagtattatatcctccgtccagaagtaattgaaacctattggtacctatggcgattcactcacgatccaagatacaggcagtggggctgggaagcagcactggccattgaaaagtattgccgagttaatggtgggttttctggagtcaaagatgtatattcctctactcctacacatgatgatgtacagcagagcttttttcttgctgaaacattaaaatatttgtatctgctgttctccggtgatgaccttttacctttagaccactgggtgtttaatacagaggctcaccctctgcctgtgttacatttagccaacaccacactttcaggaacttctcaagggatgaggagacagaacccctacttccaagtgctctatttgtattacccagatgactga

SEQ ID NO: 17083 - DNA, 8576 bp, Homo sapiens
  source 1..8576: mol_type = unassigned DNA
agacccgtgcggtagcaacagcggcggcggccgcggcggctggccggactcaggtgtttcggacgctattgcccttcgcgccagccgtcgagtgggcagcagcgggactcagccgggcgccaggttcctgccaggcagcgccgggaagcgcgggcggccgagaactccttcctgctacttcgcccagcgccgctgcttcggcttcccagcgaagtgggagaccttcctccctgtttgcagacgtccgtgggagacccttattttttccaccgctaaggttaagagattctggaatagaagcgtcgaaggagatcaagtgaaccttctacaactcctcggatgtcgccagtctccctttcggggcggaagactacgtttgagcatctcactgaggtgcaggaatggaagaacccaccttgcagcttttctgcagtgtggcttgcctgatctacccctaggaatgaagaggaggcttgtaataatccgatgaagtacagatgttgaagaggatatcgcaggacctaaacttgtgatcgtttgggggaggtcacacacgtttctgagtgggaatggatgggcgtgaatgacgtgccctcttaaaaagcacaacagtcctttaagaggagcaaaattgagttttcccattttggccaagattttgaagacagttcaatgtattctacatttgacataagatgagaactttctaaagtattctctccaagagcgtaaacgatgactaccccagccctgctgcccctctctggacgtaggataccacctctgaacctggggccgccttccttcccacatcacagggctaccttgagactttctgagaagtttattcttctccttattcttagtgccttcatcactctgtgttttggggcattctttttccttccagactcttcaaaacacaaacgctttgatttgggtttagaagatgtgttaattccacatgtagatgccggtaaaggggctaaaaaccccggagtcttcctgatccatggacccgatgaacatagacacagggaagaggaagaacgtctgagaaataaaattcgagctgatcatgagaaggccttggaagaagcaaaagaaaaattaagaaagtcaagagaggaaattcgagcagaaattcagacagagaaaaataaggtagtccaagaaatgaagataaaagagaacaagccactgccaccagtccctattcccaaccttgtaggaatacgtggtggagacccagaagataatgacataagagagaaaagggaaaaaattaaagagatgatgaaacatgcttgggataactataggacatatgggtggggacataatgaactcagacctattgcaaggaaaggacactcccctaacatatttggaagttcacaaatgggtgctaccatagtagatgctttggataccctttatatcatgggacttcatgatgaattcctagatgggcaaagatggattgaagacaaccttgatttcagtgtgaattcagaggtgtctgtgtttgaagtcaacattcgatttattggaggcctacttgcagcatattacctatcaggagaggagatattcaagattaaagcagtgcaattggctgagaaactccttcctgcctttaacacacctactgggattccttgggcaatggtgaatttgaaaagtggagtagggcgaaactggggctgggcatctgcaggtagcagcattctggctgaatttggtacactacatatggagttcatccacctcagctacttgacaggggacctgacttactacaaaaaggttatgcacattcggaaactacttcagaaaatggatcgtccaaatggtctttatccaaattatttgaaccccagaacagggcgctggggtcagtatcatacatctgtcggtggcctgggagacagtttttatgaatacttactgaaagcatggttgatgtcagataaaacagaccatgaggcaagaaagatgtatgatgatgctattgaggctatagaaaaacatcttattaagaagtctcgtggaggtcttacctttattggagaatggaagaatgggcacttggaaaaaaagatggggcatttggcctgctttgctgggggaatgtttgcactaggagcagatggttccagagcagataaagctggtcattatttagagctaggggcagaaattgcacgtacttgtcatgagtcatatgacagaactgcattaaagctaggtcctgaatcattcaagtttgatggtgcagtggaggctgtggctgtccggcaggctgaaaagtattatatcctccgtccagaagtaattgaaacctattggtacctatggcgattcactcacgatccaagatacaggcagtggggctgggaagcagcactggccattgaaaagtattgccgagttaatggtgggttttctggagtcaaagatgtatattcctctactcctacacatgatgatgtacagcagagcttttttcttgctgaaacattaaaatatttgtatctgctgttctccggtgatgaccttttacctttagaccactgggtgtttaatacagaggctcaccctctgcctgtgttacatttagccaacaccacactttcaggtaatcctgctgttcgatgaaagcagttccagaaggaccattctcacctgtgttttgtttacatggaccactacagaaattagtttgaaggggcggcttttgaaaacctggacctctatgtcaacatgacagggtgaaactattccccctaagactgttcaacttgtagatacatcaactttgaaattattccattttatacctgaccaaaacatgttctgatatgtgtaggacagagacctggatgtgctttgatcgttaatgaggtggtcacatgagaaatgatacctgttactactgtattgtttttagagtcctgaagtctggaggctagacttcctgaaagcaagtcaagaatatagagcaccttgcaggagttcaagatggcctttggaaccaattatgtatttgtttcctcctacagtggagcagcattcaaatcaaatatttacatattgcttatcactttttctccattttaataatggaatgaactaaaataaacaagaacaaaagaatagtataattatatcagtaacaagaagactcaaaaaagaaacaggagtacctatccctatctgaattttcaagttccccattggatgaccagactggcaaccatttcaaatcccagtctatttcattgaaatttcttggttaagtttaattttctctgggggcatgatctcacaaagaatactcaagtctttttcttcttatggaatcatcgaaactgctatttatcataatcaccacttatgagcctgggtttgggattttgtgcatgtagttcagtctagtgttggtagcatgacagaaagtggggaaaatgccgcagtttgttgccttgaaacctaagagcaatccttggttttgttgctacattatttttccagaccaacacatctaccaagtaaattttattcactttaatttcataataaagttagtagagtcactcaacttacaactttatttatgtggcttggcaaaaatcactataaggcagctctaaatttgccttgataagctaaataaattacttttataacttactaaagcagaacaaacagtgaaactttctaaaatattctatctggaatagggacaggggatcttttatttataatctcatcagatgagtgagttgttcacagatattttatgtttttttaattttctccaagaatatttatagaattccaaagaatcagaatagtttcaaaataattttcagtgataaaagagtgttgtaattaatcatattacactaaaattgggatacatctaaggaactttatcttactatcagtaggttttgcattgatatttctttttaaataaactactagttctttatattttgacaaaaagaacttaaattttatcaggaactgtaagataaatatctagtgcttataaattttctgtccttaaatttatgtgacagtgcaagatacttttgctcttttcatttaatataggcatcttccattgacattaataaaacttagaaacagtataattagtataacatttactctgaatttgaagatttcctgaaacaaagtttgtacaagaagcccaccttggaattctgaaggcttattttcttgtttgataagcttttcttttaaacttaggttttaagttggggaaagacttaattaactaatatagtattttctaaggttgatcatcttataccacgaatcgttaattttgacagttctactgatccgtaaatgataaccactgcaaattttttcagtataaaatttttcactgcaaaaaaatttcagtagaaaataaggatgcagggccagttacaatagtccttaagagagttaaattatagcacatgttttgacattgtaatatcttttactacttgaacatttaaatttctaaatgagaaaggtatatatattactgtaactgtagaagggaaaagggaaagtatttggttctaaaaaatgttagccttcctcgtaaaagtagcacaagcccacttatgaatcactgagaaaaagtgaaaaacttgagttggcaaagatgcagagcagcagtgcagatggcaatgaactctctgaattctcttttaccttatttagaagaatgcagagtaaagggaccttcttggttctgcaggaacttctcaagggatgaggagacagaacccctacttccaagtgctctatttgtattacccagatgactgaagcttaagagaaggcagggaagtatacaagcagagccagttctggtacaaacaaagaatttgacagggacaatggaagggtcttcttcaccactccttaccttctatgtgatggaaagactagagcttataaaagtacttccatttttttattctcctgaataccaaaggcaattaaagtcagctacaaatgacttgccagtgtcatgttttatttttgttatagatttttaaattatttccttcaagatcaattcttatcccatataatgcttagcttccaagaatattctttactttcttctgtcttttacagctctttgcattttgtagaccttaatactcaggttaaatattcattgcatttataagatcttctgcaaaaagcccagaaatggtccttttcaggtgcctcttcaaagagctgacaccttaccttgtgcctttggcacaaatgtgcagaatagatacatcagttggtgcataatcgaaaaaaataggaattttgaacactgttcttccttctacatttatttctcttcattttagaatcacactttttatgttaaaccagattattattattattattattcaaccagtattaagttgttaaaaccaagggaatggggccctaaccaaaaagaagtctcaactcagaaaaataagtccccagtcaggtggttcttactttcttgtgggttgcacattttgtatctctctaacatcagcgtattcctgactttaagcaggtgtttatatgtaaaataaaacctgggtatcgaagggaaatgcattctttttatggagtattgaccctgatcctctatgatgtcatatagagcaactcagggctatacttgctagattttaaccaagcagtttgaaatattaatcatcatcctctcatcttctccactctccattgccaaagtctttgtcaaaactccaaatttgttgataaaagattgtgtttgccattctcatttataatgcagtttctccttaagcctggagttttttgaatgagtgcatgagtaaatgagagaatgtgtgaacgaacatttatgaagtatctaacatgtgccaagcattgtgcctggcactttcaatcattagaatgttttatgtgattccacagcattttctgtatgagagtagctcacaacattttaaatgtttccaatatgaatcgtgttacaaaattcttaattttatatttcatataaattaaagaggaaaaagaaaaggtttataatatattttaaaacaatgtgttactgtataatacaactataattgtagttaataactaaaacctcttgaaaatgtcaaagaaatacttgatttctgatgcaactttgactaaaatatttactttagaaataaaaacgttcttattttgctatatcactttaattgcataattaaaaagcagtgttttatagaaatgctggttattttatattcaaaaagattttgtcacataattcatgggtaaaacttgcagttgtaaattgtgtctgctctggtatgggccctattaatagtcccatgctgttaaatataaagaaaaatatactaaaatattcaaagttccaaataacagttcctagtaatagtattttgagttatttttctttaggtttccttatactcaaattggctaggtcctatcttttcctctctctctctctctctctctctctctctctctctctctatatatatatatatatatatatatatatgagagatatatgagatatatgagagatcaagatctatatatgtatataaatacaattatacacagataatttttaatactctttgttaacaaacacagttgaaaactggtttcggctgcacaaataagcagaatatttgagtaactatatatgatatggagatattttaatccatttatcctggctcaagaacactgataaagatgattttctgttactttagctcattcagatcaggatggacatgctctttttgatctataactgttcagccagcttccagataatattttaggctatgagagctatacagtctctcttattactcatttctgctgttgaagtatcgaaaacagatagagatactatgtaaagaatgggcgtagctatgttccaggaaaactttatttacaaaagcagatggagggctggatttggtccatgggtcatagttagtgaccctgatcccaagtttattttgtgttagaccctctaacctttgatctgcgtcttttctgttttgatttacataattcatttttaaatcaaaaagatgtgcgtatatatggttgtgtgtatctgtataacctaaagctataatattttgttgtcttgaaagcagatacactcttcctggagtctgttcaggtttcaggacgattgactataatgaaagagacagaatagggtaagggaagatgggtatgctatcagccattttctttgccttgtcatttaatgccataatttcagattctctatgtaaaaagaaggtctgtgtattgtcaaaataatatactctccaagttctcctgctcattgacccttgaaccaggattctggattgctagagctgcagaaattcacccacttgggtactcttagagctctacagcaagaatatgatagaatgtctgatctttgtgctgcagaaagcaaacttttgaagaattctaagcaacagaaaatgggttatgtgactcatctgctatttggcagccactattccttttttagactgcagaacggtactgcccctgttacctctagaatagcctgagtctgaggagtgcagagaaaagatatatccaaaaggagaatccctttctcttgcataactctcaatcctttacaagtaagtagcattatttcagaatgtctatatgcatcattttcaactaaagcatacctcatccttaaacttccactatttaacagctaatccatttcaaacttggtttgagcctagcaattgcagaactcataaaattgcttgtgaaattacacaccatattactagcatatacattgcagtgctccaatcatgctaacagataatagatttttctttaagaattttatcaaatatttcactatttggggaaattttagaggaggggaagcctgtattcaggatgatagagggagcagagacttactgtctctcttccacattataaatgaactgcctttccaggtccaacatgctgtcaggttgcttcagctcggtgtgaatgtaagtgtggggatcaaacacacacacctatacacatacatattaatatgcagaggattttaaataattgcaaatgtcttgtggctgttttatttctacaaaattctgtaagatgtataccagaaaacataataaagataagctcagttcttcattgggaaaaaatatttttaaagaaaatttagaagtttttgctgaattaaagtatcttcaattttaattactggatttggaagttgaaatgccatccttcaatatcactggtctcaaattcattgatagaattttttcttaaactaataagtggggtaagtataatctcctaaattggtacccactggctgctcctaaactggtttccagtcatgtcctccagtatgtgatttttataaattaaaggtaatattgtatattaaagttcaaataaagatgttctttaagtgaaaa

SEQ ID NO: 17084 - DNA, 2571 bp, Homo sapiens
  source 1..2571: mol_type = unassigned DNA
agacccgtgcggtagcaacagcggcggcggccgcggcggctggccggactcaggtgtttcggacgctattgcccttcgcgccagccgtcgagtgggcagcagcgggactcagccgggcgccaggttcctgccaggcagcgccgggaagcgcgggcggccgagaactccttcctgctacttcgcccagcgccgctgcttcggcttcccagcgaagtgggagaccttcctccctgtttgcagacgtccgtgggagacccttattttttccaccgctaaggttaagagattctggaatagaagcgtcgaaggagatcaagtgaaccttctacaactcctcggatgtcgccagtctccctttcggggcggaagactacgtttgagcatctcactgaggtgcaggaatggaagaacccaccttgcagcttttctgcagtgtggcttgcctgatctacccctaggaatgaagaggaggcttgtaataatccgatgaagtacagatgttgaagaggatatcgcaggacctaaacttgtgatcgtttgggggaggtcacacacgtttctgagtgggaatggatgggcgtgaatgacgtgccctcttaaaaagcacaacagtcctttaagaggagcaaaattgagttttcccattttggccaagattttgaagacagttcaatgtattctacatttgacataagatgagaactttctaaagtattctctccaagagcgtaaacgatgactaccccagccctgctgcccctctctggacgtaggataccacctctgaacctggggccgccttccttcccacatcacagggctaccttgagactttctgagaagtttattcttctccttattcttagtgccttcatcactctgtgttttggggcattctttttccttccagactcttcaaaacacaaacgctttgatttgggtttagaagatgtgttaattccacatgtagatgccggtaaaggggctaaaaaccccggagtcttcctgatccatggacccgatgaacatagacacagggaagaggaagaacgtctgagaaataaaattcgagctgatcatgagaaggccttggaagaagcaaaagaaaaattaagaaagtcaagagaggaaattcgagcagaaattcagacagagaaaaataaggtagtccaagaaatgaagataaaagagaacaagccactgccaccagtccctattcccaaccttgtaggaatacgtggtggagacccagaagataatgacataagagagaaaagggaaaaaattaaagagatgatgaaacatgcttgggataactataggacatatgggtggggacataatgaactcagacctattgcaaggaaaggacactcccctaacatatttggaagttcacaaatgggtgctaccatagtagatgctttggataccctttatatcatgggacttcatgatgaattcctagatgggcaaagatggattgaagacaaccttgatttcagtgtgaattcagaggtgtctgtgtttgaagtcaacattcgatttattggaggcctacttgcagcatattacctatcaggagaggagatattcaagattaaagcagtgcaattggctgagaaactccttcctgcctttaacacacctactgggattccttgggcaatggtgaatttgaaaagtggagtagggcgaaactggggctgggcatctgcaggtagcagcattctggctgaatttggtacactacatatggagttcatccacctcagctacttgacaggggacctgacttactacaaaaaggttatgcacattcggaaactacttcagaaaatggatcgtccaaatggtctttatccaaattatttgaaccccagaacagggcgctggggtcagtatcatacatctgtcggtggcctgggagacagtttttatgaatacttactgaaagcatggttgatgtcagataaaacagaccatgaggcaagaaagatgtatgatgatgctattgaggctatagaaaaacatcttattaagaagtctcgtggaggtcttacctttattggagaatggaagaatgggcacttggaaaaaaagatggggcatttggcctgctttgctgggggaatgtttgcactaggagcagatggttccagagcagataaagctggtcattatttagagctaggggcagaaattgcacgtacttgtcatgagtcatatgacagaactgcattaaagctaggtcctgaatcattcaagtttgatggtgcagtggaggctgtggctgtccggcaggctgaaaagtattatatcctccgtccagaagtaattgaaacctattggtacctatggcgattcactcacgatccaagatacaggcagtggggctgggaagcagcactggccattgaaaagtattgccgagttaatggtgggttttctggagtcaaagatgtatattcctctactcctacacatgatgatgtacagcagagcttttttcttgctgaaacattaaagttagcctcctaccatgagagaactgtttttccagctggatga

SEQ ID NO: 17085 - DNA, 678 bp, Homo sapiens
  source 1..678: mol_type = unassigned DNA
tattaagaagtctcgtggaggtcttacctttattggagaatggaagaatgggcacttggaaaaaaagatggggcatttggcctgctttgctgggggaatgtttgcactaggagcagatggttccagagcagataaagctggtcattatttagagctaggggcagaaattgcacgtacttgtcatgagtcatatgacagaactgcattaaagctaggtcctgaatcattcaagtttgatggtgcagtggaggctgtggctgtccggcaggctgaaaagtattatatcctccgtccagaagtaattgaaacctattggtacctatggcgattcactcacgatccaagatacaggcagtggggctgggaagcagcactggccattgaaaagtattgccgagttaatggtgggttttctggagtcaaagatgtatattcctctactcctacacatgatgatgtacagcagagcttttttcttgctgaaacattaaaatatttgtatctgctgttctccggtgatgaccttttacctttagaccactgggtgtttaatacagaggctcaccctctgcctgtgttacatttagccaacaccacactttcagagtcctgaagtctggaggctagacttcctgaaagcaagtcaagaatatagagcaccttgcaggagttcaagat

SEQ ID NO: 17086 - DNA, 487 bp, Homo sapiens
  source 1..487: mol_type = unassigned DNA
gaaaagtattgccgagttaatggtgggttttctggagtcaaagatgtatattcctctactcctacacatgatgatgtacagcagagcttttttcttgctgaaacattaaaatatttgtatctgctgttctccggtgatgaccttttacctttagaccactgggtgtttaatacagaggctcaccctctgcctgtgttacatttagccaacaccacactttcaggaacttctcaagggatgaggagacagaacccctacttccaagtgctctatttgtattacccagatgactgaagcttaagagaaggcagggaagtatacaagcagagccagttctggtacaaacaaagaatttgacagggacaatggaagggtcttcttcaccactccttaccttctatgtgatggaaagactagagcttataaaagtacttccatttttttattctcctgaataccaaaggcaattaaagtcagctacaaatga

SEQ ID NO: 17087 - DNA, 2083 bp, Homo sapiens
  source 1..2083: mol_type = unassigned DNA
acattcgatttattggaggcctacttgcagcatattacctatcaggagaggagatattcaagattaaagcagtgcaattggctgagaaactccttcctgcctttaacacacctactgggattccttgggcaatggtgaatttgaaaagtggagtagggcgaaactggggctgggcatctgcaggtagcagcattctggctgaatttggtacactacatatggagttcatccacctcagctacttgacaggggacctgacttactacaaaaaggttatgcacattcggaaactacttcagaaaatggatcgtccaaatggtctttatccaaattatttgaaccccagaacagggcgctggggtcagtatcatacatctgtcggtggcctgggagacagtttttatgaatacttactgaaagcatggttgatgtcagataaaacagaccatgaggcaagaaagatgtatgatgatgctattgaggctatagaaaaacatcttattaagaagtctcgtggaggtcttacctttattggagaatggaagaatgggcacttggaaaaaaagatggggcatttggcctgctttgctgggggaatgtttgcactaggagcagatggttccagagcagataaagctggtcattatttagagctaggggcagaaattgcacgtacttgtcatgagtcatatgacagaactgcattaaagctaggtcctgaatcattcaagtttgatggtgcagtggaggctgtggctgtccggcaggctgaaaagtattatatcctccgtccagaagtaattgaaacctattggtacctatggcgattcactcacgatccaagatacaggcagtggggctgggaagcagcactggccattgaaaagtattgccgagttaatggtgggttttctggagtcaaagatgtatattcctctactcctacacatgatgatgtacagcagagcttttttcttgctgaaacattaaagttagcctcctaccatgagagaactgtttttccagctggatgaaaagagtagcatcaagtcccctattctgctgttttctgctcacttactcctggagacaagctaagtcaaatcaatatgtacttataagtacctgctttctcagagttgtatttgagaattaaagtatatgaaatgtatactctacccataaatagcttggagtctggtttagaaatctcttacctttaggcatggacaaatttaataaaagtacaaagtatatatgcagttggccctccatgtcaatgggttcatggattcaaccaaacatggattgaagatatagttttttaaaaattacatctgttttgagcatgtatatacctttttcttgtcattattccctaggcaatataacaactatttacatagatttaaagtatgtgggagcatatgcattggttatatgaatatactataccattttatatcaaggatttgagcattcaaggatttttgtatctgcgagaggtcctggaaccaatcccccatagatactgagggacaactgtattcagtgctaaatagaaaataaatgttttagaaattcagagaagggaattttggtgcaggccagagtagtcatgaagaaagactaaaatgatgctgaattagtaagatgttaataggtggggtaaaacagaaagtagctttgtgaaaagaaggattcagcctgaaaaaatacctttaaaaaaacactaaagaaactagaccgactaaagtacattcactaggagaagtagtaggaaataagagctctagaatcaaaatcagggaagcagcatggatgacccttgaggacattatgctaagtgaaataagtcagccataaaaagacaaatatggggtgattccacttctatgaggtctctaaagtagtcacatttatggaaacaaagtagaatgttggttaccagggacctggggaggggaatggaaatgagttttagttttgcaaagaacagtgtgaatatacttaatactactgaactatacgctgaaaaatggtgaagatggtaaactttatgtcatgtgtttattaccacaat

SEQ ID NO: 17088 - DNA, 2765 bp, Homo sapiens
  source 1..2765: mol_type = unassigned DNA
actggccgcatagagacgcagcgcacgcgcagtcgcgtatccgtgtgatgggcgggctgttgacggcgctgcgatggctgcctgcgagggcaggagaagcggagctctcggttcctctcagtcggacttcctgacgccgccagtgggcggggccccttgggccgtcgccaccactgtagtcatgtacccaccgccgccgccgccgcctcatcgggacttcatctcggtgacgctgagctttggcgagaactatgacaacagcaagagttggcggcggcgctcgtgctggaggaaatggaagcaactgtcgagattgcagcggaatatgattctcttcctccttgcctttctgcttttctgtggactcctcttctacatcaacttggctgaccattggaaagctctggctttcaggctagaggaagagcagaagatgaggccagaaattgctgggttaaaaccagcaaatccacccgtcttaccagctcctcagaaggcggacaccgaccctgagaacttacctgagatttcgtcacagaagacacaaagacacatccagcggggaccacctcacctgcagattagacccccaagccaagacctgaaggatgggacccaggaggaggccacaaaaaggcaagaagcccctgtggatccccgcccggaaggagatccgcagaggacagtcatcagctggaggggagcggtgatcgagcctgagcagggcaccgagctcccttcaagaagagcagaagtgcccaccaagcctcccctgccaccggccaggacacagggcacaccagtgcatctgaactatcgccagaagggcgtgattgacgtcttcctgcatgcatggaaaggataccgcaagtttgcatggggccatgacgagctgaagcctgtgtccaggtccttcagtgagtggtttggcctcggtctcacactgatcgacgcgctggacaccatgtggatcttgggtctgaggaaagaatttgaggaagccaggaagtgggtgtcgaagaagttacactttgaaaaggacgtggacgtcaacctgtttgagagcacgatccgcatcctgggggggctcctgagtgcctaccacctgtctggggacagcctcttcctgaggaaagctgaggattttggaaatcggctaatgcctgccttcagaacaccatccaagattccttactcggatgtgaacatcggtactggagttgcccacccgccacggtggacctccgacagcactgtggccgaggtgaccagcattcagctggagttccgggagctctcccgtctcacaggggataagaagtttcaggaggcagtggagaaggtgacacagcacatccacggcctgtctgggaagaaggatgggctggtgcccatgttcatcaatacccacagtggcctcttcacccacctgggcgtattcacgctgggcgccagggccgacagctactatgagtacctgctgaagcagtggatccagggcgggaagcaggagacacagctgctggaagactacgtggaagccatcgagggtgtcagaacgcacctgctgcggcactccgagcccagtaagctcacctttgtgggggagcttgcccacggccgcttcagtgccaagatggaccacctggtgtgcttcctgccagggacgctggctctgggcgtctaccacggcctgcccgccagccacatggagctggcccaggagctcatggagacttgttaccagatgaaccggcagatggagacggggctgagtcccgagatcgtgcacttcaacctttacccccagccgggccgtcgggacgtggaggtcaagccagcagacaggcacaacctgctgcggccagagaccgtggagagcctgttctacctgtaccgcgtcacaggggaccgcaaataccaggactggggctgggagattctgcagagcttcagccgattcacacgggtcccctcgggtggctattcttccatcaacaatgtccaggatcctcagaagcccgagcctagggacaagatggagagcttcttcctgggggagacgctcaagtatctgttcttgctcttctccgatgacccaaacctgctcagcctggatgcctacgtgttcaacaccgaagcccaccctctgcctatctggacccctgcctagggtggatggctgctggtgtggggacttcgggtgggcagaggcaccttgctgggtctgtggcattttccaagggcccacgtagcaccggcaaccgccaagtggcccaggctctgaactggctctgggctcctcctcgtctctgctttaatcaggacaccgtgaggacaagtgaggccgtcagtcttggtgtgatgcggggtgggctgggccgctggagcctccgcctgcttcctccagaagacacgaatcatgactcacgattgctgaagcctgagcaggtctctgtgggccgaccagaggggggcttcgaggtggtccctggtactggggtgaccgagtggacagcccagggtgcagctctgcccgggctcgtgaagcctcagatgtccccaatccaagggtctggaggggctgccgtgactccagaggcctgaggctccagggctggctctggtgtttacaagctggactcagggatcctcctggccgccccgcagggggcttggagggctggacggcaagtccgtctagctcacgggcccctccagtggaatgggtcttttcggtggagataaaagttgatttgctctaa

SEQ ID NO: 17089 - DNA, 2336 bp, Homo sapiens
  source 1..2336: mol_type = unassigned DNA
attctttttgaagaccagccatggccagttccggttttacttctgactgtgcagtgttgaataagacagacctgtttcctctcaagaggccacagctggtaggagaggctgaagacacaaagacacatccagcggggaccacctcacctgcagattagacccccaagccaagacctgaaggatgggacccaggaggaggccacaaaaaggcaagaagcccctgtggatccccgcccggaaggagatccgcagaggacagtcatcagctggaggggagcggtgatcgagcctgagcagggcaccgagctcccttcaagaagagcagaagtgcccaccaagcctcccctgccaccggccaggacacagggcacaccagtgcatctgaactatcgccagaagggcgtgattgacgtcttcctgcatgcatggaaaggataccgcaagtttgcatggggccatgacgagctgaagcctgtgtccaggtccttcagtgagtggtttggcctcggtctcacactgatcgacgcgctggacaccatgtggatcttgggtctgaggaaagaatttgaggaagccaggaagtgggtgtcgaagaagttacactttgaaaaggacgtggacgtcaacctgtttgagagcacgatccgcatcctgggggggctcctgagtgcctaccacctgtctggggacagcctcttcctgaggaaagctgaggattttggaaatcggctaatgcctgccttcagaacaccatccaagattccttactcggatgtgaacatcggtactggagttgcccacccgccacggtggacctccgacagcactgtggccgaggtgaccagcattcagctggagttccgggagctctcccgtctcacaggggataagaagtttcaggaggcagtggagaaggtgacacagcacatccacggcctgtctgggaagaaggatgggctggtgcccatgttcatcaatacccacagtggcctcttcacccacctgggcgtattcacgctgggcgccagggccgacagctactatgagtacctgctgaagcagtggatccagggcgggaagcaggagacacagctgctggaagactacgtggaagccatcgagggtgtcagaacgcacctgctgcggcactccgagcccagtaagctcacctttgtgggggagcttgcccacggccgcttcagtgccaagatggaccacctggtgtgcttcctgccagggacgctggctctgggcgtctaccacggcctgcccgccagccacatggagctggcccaggagctcatggagacttgttaccagatgaaccggcagatggagacggggctgagtcccgagatcgtgcacttcaacctttacccccagccgggccgtcgggacgtggaggtcaagccagcagacaggcacaacctgctgcggccagagaccgtggagagcctgttctacctgtaccgcgtcacaggggaccgcaaataccaggactggggctgggagattctgcagagcttcagccgattcacacgggtcccctcgggtggctattcttccatcaacaatgtccaggatcctcagaagcccgagcctagggacaagatggagagcttcttcctgggggagacgctcaagtatctgttcttgctcttctccgatgacccaaacctgctcagcctggatgcctacgtgttcaacaccgaagcccaccctctgcctatctggacccctgcctagggtggatggctgctggtgtggggacttcgggtgggcagaggcaccttgctgggtctgtggcattttccaagggcccacgtagcaccggcaaccgccaagtggcccaggctctgaactggctctgggctcctcctcgtctctgctttaatcaggacaccgtgaggacaagtgaggccgtcagtcttggtgtgatgcggggtgggctgggccgctggagcctccgcctgcttcctccagaagacacgaatcatgactcacgattgctgaagcctgagcaggtctctgtgggccgaccagaggggggcttcgaggtggtccctggtactggggtgaccgagtggacagcccagggtgcagctctgcccgggctcgtgaagcctcagatgtccccaatccaagggtctggaggggctgccgtgactccagaggcctgaggctccagggctggctctggtgtttacaagctggactcagggatcctcctggccgccccgcagggggcttggagggctggacggcaagtccgtctagctcacgggcccctccagtggaatgggtcttttcggtggagataaaagttgatttgctct

SEQ ID NO: 17090 - DNA, 2296 bp, Homo sapiens
  source 1..2296: mol_type = unassigned DNA
cccttgggccgtcgccaccactgtagtcatgtacccaccgccgccgccgccgcctcatcgggacttcatctcggtgacgctgagctttggcgagaactatgacaacagcaagagttggcggcggcgctcgtgctggaggaaatggaagcaactgtcgagattgcagcggaatatgattctcttcctccttgcctttctgcttttctgtggactcctcttctacatcaacttggctgaccattggaaagctctggctttcaggctagaggaagagcagaagatgaggccagaaattgctgggttaaaaccagcaaatccacccgtcttaccagctcctcagaaggcggacaccgaccctgagaacttacctgagatttcgtcacagaagacacaaagacacatccagcggggaccacctcacctgcagattagacccccaagccaagacctgaaggatgggacccaggaggaggccacaaaaaggcaagaagcccctgtggatccccgcccggaaggagatccgcagaggacagtcatcagctggaggggagcggtgatcgagcctgagcagggcaccgagctcccttcaagaagagcagaagtgcccaccaagcctcccctgccaccggccaggacacagggcacaccagtgcatctgaactatcgccagaagggcgtgattgacgtcttcctgcatgcatggaaaggataccgcaagtttgcatggggccatgacgagctgaagcctgtgtccaggtccttcagtgagtggtttggcctcggtctcacactgatcgacgcgctggacaccatgtggatcttgggtctgaggaaagaatttgaggaagccaggaagtgggtgtcgaagaagttacactttgaaaaggacgtggacgtcaacctgtttgagagcacgatccgcatcctgggggggctcctgagtgcctaccacctgtctggggacagcctcttcctgaggaaagctgaggattttggaaatcggctaatgcctgccttcagaacaccatccaagattccttactcggatgtgaacatcggtactggagttgcccacccgccacggtggacctccgacagcactgtggccgaggtgaccagcattcagctggagttccgggagctctcccgtctcacaggggataagaagtttcaggaggcagtggagaaggtgacacagcacatccacggcctgtctgggaagaaggatgggctggtgcccatgttcatcaatacccacagtggcctcttcacccacctgggcgtattcacgctgggcgccagggccgacagctactatgagtacctgctgaagcagtggatccagggcgggaagcaggagacacagctgctggaagactacgtggaagccatcgagggtgtcagaacgcacctgctgcggcactccgagcccagtaagctcacctttgtgggggagcttgcccacggccgcttcagtgccaagatggaccacctggtgtgcttcctgccagggacgctggctctgggcgtctaccacggcctgcccgccagccacatggagctggcccaggagctcatggagacttgttaccagatgaaccggcagatggagacggggctgagtcccgagatcgtgcacttcaacctttacccccagccgggccgtcgggacgtggaggtcaagccagcagacaggcacaacctgctgcggccagagaccgtggagagcctgttctacctgtaccgcgtcacaggggaccgcaaataccaggactggggctgggagattctgcagagcttcagccgattcacacgggtgagcacctgtcctcgccccgcgtggtcacggccaccgggccacaggcacggctgggctgtggggctcaggctggctccgctcttggtggtggctgtgacctggatccgggaggggcgggcttgccgcagcctcggggtggccacactgcagcttgggggccctggcatccccatccccactgagcttcatggttgtgggacccagagtacttggaggggctgggcacccctcattttcatttctcagggcctgtctagggagggtctctgctgtgggcccagcatccccccagtttaggaggcacacgcacccatgactggggcaccatccccactgtggaccaggccctgttttaggtcacgccctccacgccagagtgtcacttcctggctctgctgtgatcttggcctgaggcccccgctgcctccgctcccaccgtctgccctgtgccctgtgccctgtgcggcaactgtgagg

SEQ ID NO: 17091 - DNA, 4667 bp, Homo sapiens
  source 1..4667: mol_type = unassigned DNA
ggcggggccagccgcccgctcggctcaggcgctgcgggcgcctattgacccagcggctgctgcgccgccgctgtctcctcctgctcgtggcgggcggtgctggagcgccaagtggcgctggagaaccggcgcttcctttcgccgcttccgccgccatctccgcgtttgtggggcgggaaagagggagggggctagcggctgcagctggagcgggcttctctccggggacggtcctttcctccctgctctccttttccttctttccgcgttgccgccgcccgccccctgcgcctccccgcggagcctgggtccgggagggggaaggtaggggcggcggggggcgggagagtctggcgagcggacgctagctctgaggaaactcatcaatccgtgagccccggagtccggggtgcacatcggcccagccgcagcgtcggcggcggcggcggcagcagcacgaaggggctcagtcggggtaggcgggggcggtgccggtgccgcgggggcgggcccgaccgtcccgcccagaagttgtagggcttggctcctcgcgatcttgttcctttcccctccgcttctctgacctagctgcgcggccccggcccgggagctgccgaacccgcgcctcccctgggtgaggaggacacgcctgccctcgtcgagaaaacttttcctgccgactcagttggggcggcggtggcaggaagtgcgggcagcgacctctcctccgcctgccccgcgcgccctgccggaggtcggcgctgagcttgcgatcaagtttgtgggggccccccttcccagttgccggcgagtctcgcctcgagaggggcgcccgaccccggggagggcggcaggccagggcgaaggccaagggcgtgtggtggcgccggagactaggtgcggagcaaggcggggactcgcacccgcatccgagagcgcggaggtcgcgcagcccgggagaagggagcctccggcggctgcttcctagagtccacagtgcgctgtctcctttggctgaggagagtgtcctggccccgagtctatcgaggaaaatgaagttaagccgccagttcaccgtgttcggcagtgcgatcttctgtgtggtgattttctcgctctacctgatgctggaccggggtcacttagactaccccaggaacccgcgccgcgagggctccttccctcagggccagctctcaatgttgcaagaaaaaatagaccatttggagcgtttgctagctgagaataatgagatcatctcaaatattagagactcagtcatcaatttgagtgagtctgtggaggatggtccgaaaagttcacaaagcaatttcagccaaggtgctggctcacatcttctgccctcacaattatccctctcagttgacactgcagactgtctgtttgcttcacaaagtggaagtcacaattcagatgtgcagatgttggatgtttacagtctaatttcttttgacaatccagatggtggagtttggaagcaaggatttgacattacttatgaatctaatgaatgggacactgaaccccttcaagtctttgtggtgcctcattcccataacgacccaggttggttgaagactttcaatgactactttagagacaagactcagtatatttttaataacatggtcctaaagctgaaagaagactcacggaggaagtttatttggtctgagatctcttacctttcaaagtggtgggatattatagatattcagaagaaggatgctgttaaaagtttaatagaaaatggtcagcttgaaattgtgacaggtggctgggttatgcctgatgaagctactccacattattttgccttaattgatcaactaattgaaggacatcagtggctggaaaataatataggagtgaaacctcggtccggctgggctattgatccctttggacactcaccaacaatggcttatcttctaaaccgtgctggactttctcacatgcttatccagagagttcattatgcagttaaaaaacactttgcactgcataaaacattggagtttttttggagacagaattgggatctgggatctgtcacagatattttatgccacatgatgcccttctacagctatgacatccctcacacttgtggacctgatcctaaaatatgctgccagtttgattttaaacgtcttcctggaggcagatttggttgtccctggggagtccccccagaaacaatacatcctggaaatgtccaaagcagggctcggatgctactagatcagtaccgaaagaagtcaaagctttttcgtaccaaagttctcctggctccactaggagatgatttccgctactgtgaatacacggaatgggatttacagtttaagaattatcagcagctttttgattatatgaattctcagtccaagtttaaagttaagatacagtttggaactttatcagatttttttgatgcgctggataaagcagatgaaactcagagagacaagggccaatcgatgttccctgttttaagtggagattttttcacttatgccgatcgagatgatcattactggagtggctattttacatccagacccttttacaaacgaatggacagaatcatggaatctcatttaagggctgctgaaattctttactatttcgccctgagacaagctcacaaatacaagataaataaatttctctcatcatcactttacacggcactgacagaagccagaaggaatttgggactgtttcaacatcatgatgctatcacaggaactgcaaaagactgggtggttgtggattatggtaccagactttttcattcgttaatggttttggagaagataattggaaattctgcatttcttcttattttgaaggacaaactcacatacgactcttactctcctgataccttcctggagatggatttgaaacaaaaatcacaagattctctgccacaaaaaaatataataaggctgagtgcggagccaaggtaccttgtggtctataatcctttagaacaagaccgaatctcgttggtctcagtctatgtgagttccccgacagtgcaagtgttctctgcttcaggaaaacctgtggaagttcaagtcagcgcagtttgggatacagcaaatactatttcagaaacagcctatgagatctcttttcgagcacatataccgccattgggactgaaagtgtataagattttggaatcagcaagttcaaattcacatttagctgattatgtcttgtataagaataaagtagaagatagcggaattttcaccataaagaatatgataaatactgaagaaggtataacactagagaactcctttgttttacttcggtttgatcaaactggacttatgaagcaaatgatgactaaagaagatggtaaacaccatgaagtaaatgtgcaattttcatggtatggaaccacaattaaaagagacaaaagtggtgcctacctcttcttacctgatggtaatgccaagccttatgtttacacaacaccgccctttgtcagagtgacacatggaaggatttattcggaagtgacttgcttttttgaccatgttactcatagagtccgactataccacatacagggaatagaaggacagtctgtggaagtttccaatattgtggacatccgaaaagtatataaccgtgagattgcaatgaaaatttcttctgatataaaaagccaaaatagattttatactgacctaaatgggtaccagattcaacctagaatgacactgagcaaattgcctcttcaagcaaatgtctatcccatgaccacaatggcctatatccaggatgccaaacatcgtttgacactgctctctgctcagtcattaggggtttcgagtttgaatagtggtcagattgaagttatcatggatcgaagactcatgcaagatgataatcgtggccttgagcaaggtatccaggataacaagattacagctaatctatttcgaatactactagaaaaaagaagtgctgttaatacggaagaagaaaagaagtcggtcagttatccttctctccttagccacataacttcttctctcatgaatcatccagtcattccaatggcaaataagttctcctcacctacccttgagctgcaaggtgaattctctccattacagtcatctttgccttgtgacattcatctggttaatttgagaacaatacagtcaaaggtgggcaatgggcactccaatgaggcagccttgatcctccacagaaaagggtttgattgtcggttctctagcaaaggcacagggctgttttgttctactactcagggaaagatattggtacagaaacttttaaacaagtttattgtcgaaagtctcacaccttcatcactatccttgatgcattcacctcccggcactcagaatataagtgagatcaacttgagtccaatggaaatcagcacattccgaatccagttgaggtgaacctgactttcacatttggattgagaatcattggcttttatacctttcttggtttgacgtgcaataaagaagcacattattttagcttctggctactgtgagaacatgaattctgtgattctgtgggttttttcttttttcttttaccagtacagtaagaaaaaaaaaaaaaaaaaaaaa

SEQ ID NO: 17092 - DNA, 6268 bp, Homo sapiens
  source 1..6268: mol_type = unassigned DNA
gtgtgtgtggaggccagtatgaagctgaaaaagcaggtgacagtgtgtggggctgccatcttctgtgtggcagtcttctcgctctacctcatgctggaccgagtgcaacacgatcccacccgacaccagaatggtgggaacttcccccggagccaaatttctgtgctgcagaaccgcattgagcagctggagcagcttttggaggagaaccatgagattatcagccatatcaaggactccgtgctggagctgacagccaacgcagagggcccgcccgccatgctgccctactacacggtcaatggctcctgggtggtgccaccggagccccggcccagcttcttctccatctccccgcaggactgccagtttgctttggggggccggggtcagaagccagagctgcagatgctcactgtgtcggaggagctgccgtttgacaacgtggatggtggtgtgtggaggcaaggcttcgacatctcctacgacccgcacgactgggatgctgaagacctgcaggtgtttgtggtgccccactctcacaatgacccaggctggatcaagacctttgacaagtactacacagagcagacccaacacatcctcaatagcatggtgtctaagctgcaggaggacccccggcggcgcttcctctgggcagaggtctccttcttcgccaagtggtgggacaacatcaatgtccaaaagagagcggcagtccgaaggctggtgggaaacgggcagctggagattgcgacaggaggctgggtgatgccagatgaggccaattcccactactttgcattgattgaccagctcatcgaaggacaccagtggctggagagaaatcttggtgcaaccccccgctctggctgggcagtggacccctttggatacagctccaccatgccttacctgctgcgccgtgccaacctcaccagcatgctgattcagagagtgcactatgccatcaagaagcactttgctgccacccacagcctagagttcatgtggaggcagacatgggactcggactccagcacagacatcttctgtcacatgatgcccttctacagctatgacgtcccccatacctgtggcccagatcccaagatctgctgccaatttgatttcaaacgcctgcctggtgggcgcatcaactgcccttggaaggtgccaccccgggccatcacagaggccaacgtggcagagagggcagccctgcttctggaccaataccggaagaagtcccagctgttccgaagcaacgtcctcctggtgcctcttggagatgacttccgatatgacaagccccaggagtgggatgcccagttcttcaactaccaacggctctttgacttcttcaacagcaggcctaacctccatgtgcaggcccagtttggcactctttctgactattttgatgccctgtacaagaggacaggggtggagccaggggcccggcctccagggtttcctgtgctgagcggggatttcttctcctatgcggaccgggaggatcattactggacaggctattacacttcccggcccttctacaagagcttagaccgagtcctggaagcccacctgcggggggcagaggttctgtacagcctggctgcagctcacgctcgccgctctggtctggctggccggtacccactgtctgatttcaccctcctgacggaagctcggcgcacattggggctcttccagcatcacgatgccatcactggcacggccaaggaggctgtggtggtggactatggggtcaggcttctgcgctcccttgtcaacctgaagcaggtcatcattcatgcagcccactatctggtgctgggggacaaggagacctaccactttgaccctgaggcgcccttcctccaagtggatgacactcgcttaagtcacgacgccctcccagagcgcacggtgatccagctggattcctcgcccaggtttgtggtcctattcaacccactggaacaggagcgattcagcatggtgtccctgctggtcaactctccccgcgtgcgtgtcctttcggaggagggtcagcccctggccgtgcagatcagcgcacactggagctctgccaccgaggcggtccctgacgtctaccaggtgtctgtgcctgtccgcctgccagccctgggcctgggcgtgctgcagctacagctgggcctggatgggcaccgcacgctgccctcctctgtgcgcatctacctgcacggccggcagctgtccgtcagcaggcacgaagcgtttcctctccgtgtcattgactctggcaccagcgacttcgccctcagcaaccgctacatgcaggtctggttctcaggccttactgggctcctcaagagcatccgaagggtggatgaggagcacgagcagcaggtggacatgcaggtccttgtctatggcacccgtacgtccaaagacaagagtggagcctacctcttcctgcccgatggcgaggccaagccctacgtccccaaggagccccccgtgctgcgtgtcactgaaggccctttcttctcagaggtggttgcgtactatgagcacattcaccaggcggtccggctttacaatctgccaggggtggaggggctgtctctggacatatcatccctggtggacatccgggactacgtcaacaaggagctggccctgcacatccatacagacatcgacagccagggtatcttcttcacagacctcaatggctttcaggtgcagccccgacggtatctgaagaagctccccctccaggccaacttctaccccatgccagtcatggcctatatccaggacgcacagaagcgcctcacgctgcacactgcccaggccctgggtgtctctagcctcaaagatggccagctggaggtgatcttggaccggcggctgatgcaggatgacaaccggggcctaggccaagggctcaaggacaacaagagaacctgcaaccgtttccgcctcctgctagagcggcgaaccgtgggcagtgaggtccaagatagccactctaccagctacccatccctcctcagccacctgacctccatgtacctgaacgccccggcgctcgctctgcctgtagccaggatgcagctcccaggccctggtctgcgctcatttcatcctctggcttcctcactgccctgtgacttccacctgctcaacctacgtacgctccaggctgaggaggacaccctaccctcggcggagaccgcactcatcttacaccgcaagggttttgactgcggcctggaggccaagaacttgggcttcaactgcaccacaagccaaggcaaggtagccctgggcagccttttccatggcctggatgtggtattccttcagccaacctccttgacgttactgtaccctctggcctccccgtccaacagcactgacgtctatttggagcccatggagattgctacctttcgcctccgcttgggttagggcttcttgtggcctgaagagaaagttcattcacagagactgcctcttaacatgaagatcattggacaagccacacgggtatcccatcccgatctgcctcccagaactgtgacacactgggctctgccctcattttctgtttattgctgctgctgtgttttcggcgcaacccacaaacccagtgatgggtaaatagggcagacgccagtgagatcagggagagaaggcccttggtcagagtgggcagtgccaggctctgctttgggttgtgagtggacacccaactgggcacaggctcaggcacccatcctttttccaaacagggatatagaagtggtggaagcagacagaagaggtaagggaggctaagtgggtaacagcccagcatcagggtcactgtggcaacagcaggctctaggggaatcctgtggttatgtagagactccatgtcctggtgtgatgagcaggatcagagtgactctgggaggacaggggtggggacccagagttagcagtggggatggagcagtagaaggaatcactgtttctcctaggagtctgaaggcctcgctgctttctgtgatggctttgcagtaagtgccgcctggcctgcatgcattggctaacaggctgcagaatggcaggaaggactcgctagagattgtcatggccagagatcataggtcacttcaggtagcaagacccctggcaaactgggcacttggcctatgtactgatttgtgggatggtggcaggggtgtggggtccttcaccctgcctgaattctctttggcttctgtgctctgtatgctgctgtccccaagggctctttcttattatggcagggagtggggattggtcctactttctttctctggaaaggaaagcctccaagactccatgtgcttgggcagcttgagaaggcgttcagcaccacgcctagcaggcagaccttgaagcctcacctttagtctatctgcagaggtattcagttcctggcacaggggactaggggcatgtagagtatatgaggaggcagtatggctgtgcaggagccttcatttcagcttcaattaatagggaagaatttatgatagctctatagatgctgaaaaggtatttcgtaagatttaaaatccatcccttattaaaactcttagtaaattaagtctggaaagaaacaccctaatctagataaaggtctgtttcagaaaccaacagtgatggcattctaaagagtcagacgccacaggcattcccattaaagtcagaaactagccaagggcaagctattattcagcagtgtcccggcactactaacccctgcaacaagccagatgaggaacataaggaagaattataattgtcattatttgtagacaataaaactgcctacctgtaaaacctaagaatcaactgaagacctgttaagagtattctgtaagtcaacccaatgatacacatcatgttcctgtccacatactggttttccccaaatcagctgataaattcagtgtaattccaatgagattgaaactttggaattgacagttctaaagtgcatttgggagagtgaatgtgtgagaacactaagaccactctgaacgatgataatgagttggggggtggactgctcgggggtgatcctgccagattcccagaggattctcacgccaccattacctcactcagtgtgacctggagggggtcagacagacgggagagtccagaaacagacccagggctacaggaatttagtatatggtaagagggatgttttaagtggggaaaaaggtggattatttaataaacagcacttttagacaactagctatcaaagctagatctcagctgggtgcgatggctcacgcctgtaatcccggcactttgggaggccaaggtgggtggatcacttgaggtcaggagttcgagaccagcctggccaagatggcgaaaccctgtgtctactaaaaatacaaaaactagccaggaatggtggcgcgcgcctgtaatcccagttacttaggaggctgaggcaggagaatcacatcaacctgggaggcggaggttgcagtgagcttagatcatgccaccatgccactgcactccagcctgggtgacacagccaaaaaaaaaaccactaagttagatctctacctcacagtgtccatacaaattagttccagagggaagatataccacaaaattactcaaaaatttttatacctctggtgtgggacggtcttttctaaactttaacatgagacttaaaagatataataagggaaaagataagcagatttcgcaaccaaaaaatatcgaaagtctctgtgtgatggaaaacatcaaggttaaaacacaaatgacagatatggaagaaaatatttgcagcacataaaaaaatcaacgagtacaattactttaggagaaaagcttgcttcagggtccttagagaaagtcactggggcctgccaagctgccacctaaagacaagagtgagagggctgagttcttccaggtcatcagagttgttgctgcccgtattaggccacacagtggaaccccatttatatcatagcagaagaaataggattatcaatgtgaactgcttagcatggtgcctggtatatacgagagctccacaaatgtgagctataatcctactagtaaaggatgctaagcagttccactgtggcaggtgtcatttgctagtagaatttgtaatcaaacaataggaggggaatctgtgaacgcctagaaaatgagcagaataaaggatattatctttggaagtctt

SEQ ID NO: 17093 - DNA, 1443 bp, Homo sapiens
  source 1..1443: mol_type = unassigned DNA
gtttcctctccgtgtcattgactctggcaccagcgacttcgccctcagcaaccgctacatgcaggtctggttctcaggccttactgggctcctcaagccctacgtccccaaggagccccccgtgctgcgtgtcactgaaggccctttcttctcagaggtggttgcgtactatgagcacattcaccaggcggtccggctttacaatctgccaggggtggaggggctgtctctggacatatcatccctggtggacatccgggactacgtcaacaaggagctggccctgcacatccatacagacatcgacagccagggtatcttcttcacagacctcaatggctttcaggtgcagccccgacggtatctgaagaagctccccctccaggccaacttctaccccatgccagtcatggcctatatccaggacgcacagaagcgcctcacgctgcacactgcccaggccctgggtgtctctagcctcaaagatggccagctggaggtgatcttggaccggcggctgatgcaggatgacaaccggggcctaggccaagggctcaaggacaacaagagaacctgcaaccgtttccgcctcctgctagagcggcgaaccgtgggcagtgaggtccaagatagccactctaccagctacccatccctcctcagccacctgacctccatgtacctgaacgccccggcgctcgctctgcctgtagccaggatgcagctcccaggccctggtctgcgctcatttcatcctctggcttcctcactgccctgtgacttccacctgctcaacctacgtacgctccaggctgaggaggacaccctaccctcggcggagaccgcactcatcttacaccgcaagggttttgactgcggcctggaggccaagaacttgggcttcaactgcaccacaagccaaggcaaggtagccctgggcagccttttccatggcctggatgtggtattccttcagccaacctccttgacgttactgtaccctctggcctccccgtccaacagcactgacgtctatttggagcccatggagattgctacctttcgcctccgcttgggttagggcttcttgtggcctgaagagaaagttcattcacagagactgcctcttaacatgaagatcattggacaagccacacggggatatagaagtggtggaagcagacagaagaggtaagggaggctaagtgggtaacagcccagcatcagggtcactgtggcaacagcaggctctaggggaatcctgtggttatgtagagactccatgtcctggtgtgatgagcaggatcagagtgactctgggaggacaggggtggggacccagagttagcagtggggatggagcagtagaaggaatcactgtttctcctaggagtctgaaggcctcgctgctttctgtgatggctttgcagtaagtgccgcctg

SEQ ID NO: 17094 - DNA, 2461 bp, Homo sapiens
  source 1..2461: mol_type = unassigned DNA
tcccaagatctgctgccaatttgatttcaaacgcctgcctggtgggcgcatcaactgcccttggaaggtgccaccccgggccatcacagaggccaacgtggcagagagggcagccctgcttctggaccaataccggaagaagtcccagctgttccgaagcaacgtcctcctggtgcctcttggagatgacttccgatatgacaagccccaggagtgggatgcccagttcttcaactaccaacggctctttgacttcttcaacagcaggcctaacctccatgtgcaggggggcagaggttctgtacagcctggctgcagctcacgctcgccgctctggtctggctggccggtacccactgtctgatttcaccctcctgacggaagctcggcgcacattggggctcttccagcatcacgatgccatcactggcacggccaaggaggctgtggtggtggactatggggtcaggcttctgcgctcccttgtcaacctgaagcaggtcatcattcatgcagcccactatctggtgctgggggacaaggagacctaccactttgaccctgaggcgcccttcctccaagtggatgacactcgcttaagtcacgacgccctcccagagcgcacggtgatccagctggattcctcgcccaggtttgtggtcctattcaacccactggaacaggagcgattcagcatggtgtccctgctggtcaactctccccgcgtgcgtgtcctttcggaggagggtcagcccctggccgtgcagatcagcgcacactggagctctgccaccgaggcggtccctgacgtctaccaggtgtctgtgcctgtccgcctgccagccctgggcctgggcgtgctgcagctacagctgggcctggatgggcaccgcacgctgccctcctctgtgcgcatctacctgcacggccggcagctgtccgtcagcaggcacgaagcgtttcctctccgtgtcattgactctggcaccagcgacttcgccctcagcaaccgctacatgcaggtctggttctcaggccttactgggctcctcaagagcatccgaagggtggatgaggagcacgagcagcaggtggacatgcaggtccttgtctatggcacccgtacgtccaaagacaagagtggagcctacctcttcctgcccgatggcgaggccaagccctacgtccccaaggagccccccgtgctgcgtgtcactgaaggccctttcttctcagaggtggttgcgtactatgagcacattcaccaggcggtccggctttacaatctgccaggggtggaggggctgtctctggacatatcatccctggtggacatccgggactacgtcaacaaggagctggccctgcacatccatacagacatcgacagccagggtatcttcttcacagacctcaatggctttcaggtgcagccccgacggtatctgaagaagctccccctccaggccaacttctaccccatgccagtcatggcctatatccaggacgcacagaagcgcctcacgctgcacactgcccaggccctgggtgtctctagcctcaaagatggccagctggaggtgatcttggaccggcggctgatgcaggatgacaaccggggcctaggccaagggctcaaggacaacaagagaacctgcaaccgtttccgcctcctgctagagcggcgaaccgtgggcagtgaggtccaagatagccactctaccagctacccatccctcctcagccacctgacctccatgtacctgaacgccccggcgctcgctctgcctgtagccaggatgcagctcccaggccctggtctgcgctcatttcatcctctggcttcctcactgccctgtgacttccacctgctcaacctacgtacgctccaggctgaggaggacaccctaccctcggcggagaccgcactcatcttacaccgcaagggttttgactgcggcctggaggccaagaacttgggcttcaactgcaccacaagccaaggcaaggtagccctgggcagccttttccatggcctggatgtggtattccttcagccaacctccttgacgttactgtaccctctggcctccccgtccaacagcactgacgtctatttggagcccatggagattgctacctttcgcctccgcttgggttagggcttcttgtggcctgaagagaaagttcattcacagagactgcctcttaacatgaagatcattggacaagccacacgggtatcccatcccgatctgcctcccagaactgtgacacactgggctctgccctcattttctgtttattgctgctgctgtgttttcggcgcaacccacaaacccagtgatgggtaaatagggcagacgccagtgagatcagggagagaaggcccttggtcagagtgggcagtgccaggctctgctttgggttgtgagtggacacccaactgggcacaggctca

SEQ ID NO: 17095 - DNA, 1049 bp, Homo sapiens
  source 1..1049: mol_type = unassigned DNA
attgcagtatggattacactgaaaaactgtaaacaacctagatgcccagtaaaagggaaacagccaagaaaagtctgtgtcttgttcactcgctggcaggaaacatagagcaggcacggaaaggaaagggactcgaggaatgcgctgtaccgacaggaggcagcacccctttgcccgaggggcgcaacgacagagacctaaggctacctgggccggagccgggtgaggccgcggagaacgcaccccgctacgcgtctgccgagacggaggcgggcgtttcgaccactgcccgatcatgcgcttactcaactccacccacattggcctagacccagtctctaagggctgaaaatattgcccggaagctcccgagcagaatcagatcgcgctaagtagggcacaacgcagaggcgacaaagctcctcggccccagggcccgcggagcagactccggagcgcggtcccgcccacgctcggctccgcagttagcgtcctccttcctcctgagcaggcaagcggagcccgagggcggtggcggcggggggcacgggtcccctgaagttgcctcgcagctgagcactgggccccgtctctcccttcccagggggccttcggcgtcactgcaggcttcctaggggtcccctaagtgctctgcaaaccgcggctggaagtttcccactgcagtgaacagtagagaaacagggagaacacacagggcttgctttatgctagaaacacaagcatctttcttctttattagaaagaaactcattctgtgtttctgagaaaggatcgtgccaggcactgtttctggtgtgtgtggaggccagtatgaagctgaaaaagcaggtgacagtgtgtggggctgccatcttctgtgtggcagtcttctcgctctacctcatgctggaccgagtgcaacacgatcccacccgacaccagaatggtgggaacttcccccggagccaaatttctgtgctgcagaaccgcattgagcagctggagcagcttttggaggagaaccatgagattatcagccatatcaagga

SEQ ID NO: 17096 - DNA, 624 bp, Homo sapiens
  source 1..624: mol_type = unassigned DNA
aaacagccaagaaaagtctgtgtcttgttcactcgctggcaggaaacatagagcaggcacggaaaggaaagggactcgaggaatgcgctgtaccgacaggaggcagcacccctttgcccgaggggcgcaacgacagagacctaaggctacctgggccggagccgggtgaggccgcggagaacgcaccccgctacgcgtctgccgagacggaggcgggcgtttcgaccactgcccgatcatgcgcttactcaactccacccacattggcctagacccagtctctaagggctgaaaatattgcccggaagctcccgagcagaatcagatcgcgctaagtagggcacaacgcagaggcgacaaagctcctcggccccagggcccgcggagcagactccggagcgcggtcccgcccacgctcggctccgcagttagcgtcctccttcctcctgagcaggtgtgtgtggaggccagtatgaagctgaaaaagcaggtgacagtgtgtggggctgccatcttctgtgtggcagtcttctcgctctacctcatgctggaccgagtgcaacacgatcccacccgacaccagaatggtgggaacttcccccggagccaaatttctgtgctgca

SEQ ID NO: 17097 - DNA, 5478 bp, Homo sapiens
  source 1..5478: mol_type = unassigned DNA
gcgcgcgggagggctccggctgccccgacagaggccgggctcgggcggcgggagtgcgagcgccactgcggcgtcagaggggccaggaagggacaggaggctgcctgaggcccgtacctggcgcctgtctctgcggtccccggggccgacgaagtcggagcgggtggggagggagccgggcgggcggccagagacctggcggcaggtgcctgccctctgtgatccaactctctccccagctccacccacattggcctagacccagtctctaagggctgaaaatattgcccggaagctcccgagcagaatcagatcgcgctaagtagggcacaacgcagaggcgacaaagctcctcggccccagggcccgcggagcagactccggagcgcggtcccgcccacgctcggctccgcagttagcgtcctccttcctcctgagcaggtgtgtgtggaggccagtatgaagctgaaaaagcaggtgacagtgtgtggggctgccatcttctgtgtggcagtcttctcgctctacctcatgctggaccgagtgcaacacgatcccacccgacaccagaatggtgggaacttcccccggagccaaatttctgtgctgcagaaccgcattgagcagctggagcagcttttggaggagaaccatgagattatcagccatatcaaggactccgtgctggagctgacagccaacgcagagggcccgcccgccatgctgccctactacacggtcaatggctcctgggtggtgccaccggagccccggcccagcttcttctccatctccccgcaggactgccagtttgctttggggggccggggtcagaagccagagctgcagatgctcactgtgtcggaggagctgccgtttgacaacgtggatggtggtgtgtggaggcaaggcttcgacatctcctacgacccgcacgactgggatgctgaagacctgcaggtgtttgtggtgccccactctcacaatgacccaggctggatcaagacctttgacaagtactacacagagcagacccaacacatcctcaatagcatggtgtctaagctgcaggaggacccccggcggcgcttcctctgggcagaggtctccttcttcgccaagtggtgggacaacatcaatgtccaaaagagagcggcagtccgaaggctggtgggaaacgggcagctggagattgcgacaggaggctgggtgatgccagatgaggccaattcccactactttgcattgattgaccagctcatcgaaggacaccagtggctggagagaaatcttggtgcaaccccccgctctggctgggcagtggacccctttggatacagctccaccatgccttacctgctgcgccgtgccaacctcaccagcatgctgattcagagagtgcactatgccatcaagaagcactttgctgccacccacagcctagagttcatgtggaggcagacatgggactcggactccagcacagacatcttctgtcacatgatgcccttctacagctatgacgtcccccatacctgtggcccagatcccaagatctgctgccaatttgatttcaaacgcctgcctggtgggcgcatcaactgcccttggaaggtgccaccccgggccatcacagaggccaacgtggcagagagggcagccctgcttctggaccaataccggaagaagtcccagctgttccgaagcaacgtcctcctggtgcctcttggagatgacttccgatatgacaagccccaggagtgggatgcccagttcttcaactaccaacggctctttgacttcttcaacagcaggcctaacctccatgtgcaggcccagtttggcactctttctgactattttgatgccctgtacaagaggacaggggtggagccaggggcccggcctccagggtttcctgtgctgagcggggatttcttctcctatgcggaccgggaggatcattactggacaggctattacacttcccggcccttctacaagagcttagaccgagtcctggaagcccacctgcggggggcagaggttctgtacagcctggctgcagctcacgctcgccgctctggtctggctggccggtacccactgtctgatttcaccctcctgacggaagctcggcgcacattggggctcttccagcatcacgatgccatcactggcacggccaaggaggctgtggtggtggactatggggtcaggcttctgcgctcccttgtcaacctgaagcaggtcatcattcatgcagcccactatctggtgctgggggacaaggagacctaccactttgaccctgaggcgcccttcctccaagtggatgacactcgcttaagtcacgacgccctcccagagcgcacggtgatccagctggattcctcgcccaggtttgtggtcctattcaacccactggaacaggagcgattcagcatggtgtccctgctggtcaactctccccgcgtgcgtgtcctttcggaggagggtcagcccctggccgtgcagatcagcgcacactggagctctgccaccgaggcggtccctgacgtctaccaggtgtctgtgcctgtccgcctgccagccctgggcctgggcgtgctgcagctacagctgggcctggatgggcaccgcacgctgccctcctctgtgcgcatctacctgcacggccggcagctgtccgtcagcaggcacgaagcgtttcctctccgtgtcattgactctggcaccagcgacttcgccctcagcaaccgctacatgcaggtctggttctcaggccttactgggctcctcaagagcatccgaagggtggatgaggagcacgagcagcaggtggacatgcaggtccttgtctatggcacccgtacgtccaaagacaagagtggagcctacctcttcctgcccgatggcgaggccaagccctacgtccccaaggagccccccgtgctgcgtgtcactgaaggccctttcttctcagaggtggttgcgtactatgagcacattcaccaggcggtccggctttacaatctgccaggggtggaggggctgtctctggacatatcatccctggtggacatccgggactacgtcaacaaggagctggccctgcacatccatacagacatcgacagccagggtatcttcttcacagacctcaatggctttcaggtgcagccccgacggtatctgaagaagctccccctccaggccaacttctaccccatgccagtcatggcctatatccaggacgcacagaagcgcctcacgctgcacactgcccaggccctgggtgtctctagcctcaaagatggccagctggaggtgatcttggaccggcggctgatgcaggatgacaaccggggcctaggccaagggctcaaggacaacaagagaacctgcaaccgtttccgcctcctgctagagcggcgaaccgtgggcagtgaggtccaagatagccactctaccagctacccatccctcctcagccacctgacctccatgtacctgaacgccccggcgctcgctctgcctgtagccaggatgcagctcccaggccctggtctgcgctcatttcatcctctggcttcctcactgccctgtgacttccacctgctcaacctacgtacgctccaggctgaggaggacaccctaccctcggcggagaccgcactcatcttacaccgcaagggttttgactgcggcctggaggccaagaacttgggcttcaactgcaccacaagccaaggcaaggtagccctgggcagccttttccatggcctggatgtggtattccttcagccaacctccttgacgttactgtaccctctggcctccccgtccaacagcactgacgtctatttggagcccatggagattgctacctttcgcctccgcttgggttagggcttcttgtggcctgaagagaaagttcattcacagagactgcctcttaacatgaagatcattggacaagccacacgggtatcccatcccgatctgcctcccagaactgtgacacactgggctctgccctcattttctgtttattgctgctgctgtgttttcggcgcaacccacaaacccagtgatgggtaaatagggcagacgccagtgagatcagggagagaaggcccttggtcagagtgggcagtgccaggctctgctttgggttgtgagtggacacccaactgggcacaggctcaggcacccatcctttttccaaacagggatatagaagtggtggaagcagacagaagaggtaagggaggctaagtgggtaacagcccagcatcagggtcactgtggcaacagcaggctctaggggaatcctgtggttatgtagagactccatgtcctggtgtgatgagcaggatcagagtgactctgggaggacaggggtggggacccagagttagcagtggggatggagcagtagaaggaatcactgtttctcctaggagtctgaaggcctcgctgctttctgtgatggctttgcagtaagtgccgcctggcctgcatgcattggctaacaggctgcagaatggcaggaaggactcgctagagattgtcatggccagagatcataggtcacttcaggtagcaagacccctggcaaactgggcacttggcctatgtactgatttgtgggatggtggcaggggtgtggggtccttcaccctgcctgaattctctttggcttctgtgctctgtatgctgctgtccccaagggctctttcttattatggcagggagtggggattggtcctactttctttctctggaaaggaaagcctccaagactccatgtgcttgggcagcttgagaaggcgttcagcaccacgcctagcaggcagaccttgaagcctcacctttagtctatctgcagaggtattcagttcctggcacaggggactaggggcatgtagagtatatgaggaggcagtatggctgtgcaggagccttcatttcagcttcaattaatagggaagaatttatgatagctctatagatgctgaaaaggtatttcgtaagatttaaaatccatcccttattaaaactcttagtaaattaagtctggaaagaaacaccctaatctagataaaggtctgtttcagaaaccaacagtgatggcattctaaagagtcagacgccacaggcattcccattaaagtcagaaactagccaagggcaagctattattcagcagtgtcccggcactactaacccctgcaacaagccagatgaggaacataaggaagaattataattgtcattatttgtagacaataaaactgcctacctgtaaaacctaagaatcaactgaagacctgttaagagtattctgtaagtcaacccaatgatacacatcatgttcctgtccacatactggttttccccaaatcagctgataaattcagtgtaattccaatgagattgaaactttggaattgacagttctaaagtgcattt

SEQ ID NO: 17098 - DNA, 537 bp, Homo sapiens
  source 1..537: mol_type = unassigned DNA
agtttgacccgaaagggcactgagaaaggctttcctatcagtctctttgggttctggctaaacttttaaatcaaacaaaatagagactagcttattcacctgaaactagaagcacatggccgaggagcctgaacaggcacctcctatctaggcagggaagctgtgtaatcaggagcttgtgtggtgcgctccagtcggagctgggactcttatcctgggcccgtttttcatagcaccagccaaaggagagcgtcctctccaccctagcggcagagctgctaccaggaccaggtgtgtgtggaggccagtatgaagctgaaaaagcaggtgacagtgtgtggggctgccatcttctgtgtggcagtcttctcgctctacctcatgctggaccgagtgcaacacgatcccacccgacaccagaatggtgggaacttcccccggagccaaatttctgtgctgcagaaccgcattgagcagctggagcagcttttggaggagaaccatgagattatcagccatatcaaggactccgtgctg

SEQ ID NO: 17099 - DNA, 529 bp, Homo sapiens
  source 1..529: mol_type = unassigned DNA
gcagcacccctttgcccgaggggcgcaacgacagagacctaaggctacctgggccggagccgggtgaggccgcggagaacgcaccccgctacgcgtctgccgagacggaggcgggcgtttcgaccactgcccgatcatgcgcttactcaagtgtgtgtggaggccagtatgaagctgaaaaagcaggtgacagtgtgtggggctgccatcttctgtgtggcagtcttctcgctctacctcatgctggaccgagtgcaacacgatcccacccgacaccagaatggtgggaacttcccccggagccaaatttctgtgctgcagaaccgcattgagcagctggagcagcttttggaggagaaccatgagattatcagccatatcaaggactccgtgctggagctgacagccaacgcagagggcccgcccgccatgctgccctactacacggtcaatggctcctgggtggtgccaccggagccccggcccagcttcttctccatctccccgcaggactgccagtttgctttgg

SEQ ID NO: 17100 - DNA, 3254 bp, Homo sapiens
  source 1..3254: mol_type = unassigned DNA
ggagcgagagcccggcgatggcggctgcgccggccttgaagcactggcgcaccacgctggagcgggtggagaagttcgtgtcgccgctctactttaccgactgtaacctccgcggcaggctttttggggccagctgccctgtggctgtgctctccagcttcctgacgccggagagacttccctaccaggaggcagtccagcgggacttccgccccgcgcaggtcggcgacagcttcggacccacatggtggacctgctggttccgggtggagctgaccatcccagaggcatgggtgggccaggaagttcacctttgctgggaaagtgatggagaaggtctggtgtggcgtgatggagaacctgtccagggtttaaccaaagagggtgagaagaccagctatgtcctgactgacaggctgggggaaagagacccccgaagcctcactctctatgtggaagtagcctgcaatgggctcctgggggccgggaagggaagcatgattgcagcccctgaccctgagaagatgttccagctgagccgggctgagctagctgtgttccaccgggatgtccacatgctcctggtggatctggagctgctgctgggcatagccaagggcctcgggaaggacaaccagcgcagcttccaggccctgtacacagccaatcagatggtgaacgtgtgtgaccctgcccagcccgagaccttcccagtggcccaggccctggcctccaggttctttggccaacatgggggtgaaagccaacacaccattcatgccacagggcactgccacattgatacagcctggctttggcccttcaaagagactgtgaggaaatgtgcccggagctgggtgaccgccctgcagctcatggagcggaaccctgagttcatctttgcctgctcccaggcgcagcagctggaatgggtgaagagccgctaccctggcctgtactcccgcatccaggagtttgcgtgccgtgggcagtttgtgcctgtggggggcacctgggtggagatggatgggaacctgcccagtggagaggccatggtgaggcagtttttgcagggccagaacttctttctgcaggagtttgggaagatgtgctctgagttctggctgccggacacctttggctactcagcacagctcccccagatcatgcacggctgtggcatcaggcgctttctcacccagaaattgagctggaatttggtgaactccttcccacaccatacatttttctgggagggcctggatggctcccgtgtactggtccacttcccacctggcgactcctatgggatgcagggcagcgtggaggaggtgctgaagaccgtggccaacaaccgggacaaggggcgggccaaccacagtgccttcctctttggctttggggatgggggtggtggccccacccagaccatgctggaccgcctgaagcgcctgagcaatacggatgggctgcccagggtgcagctatcttctccaagacagctcttctcagcactggagagtgactcagagcagctgtgcacgtgggttggggagctcttcttggagctgcacaatggcacatacaccacccatgcccagatcaagaaggggaaccgggaatgtgagcggatcctgcacgacgtggagctgctcagtagcctggccctggcccgcagtgcccagttcctatacccagcagcccagctgcagcacctctggaggctccttcttctgaaccagttccatgatgtggtgactggaagctgcatccagatggtggcagaggaagccatgtgccattatgaagacatccgttcccatggcaatacactgctcagcgctgcagccgcagccctgtgtgctggggagccaggtcctgagggcctcctcatcgtcaacacactgccctggaagcggatcgaagtgatggccctgcccaaaccgggcggggcccacagcctagccctggtgacagtgcccagcatgggctatgctcctgttcctccccccacctcactgcagcccctgctgccccagcagcctgtgttcgtagtgcaagagactgatggctccgtgactctggacaatggcatcatccgagtgaagctggacccaactggtcgcctgacgtccttggtcctggtggcctctggcagggaggccattgctgagggcgccgtggggaaccagtttgtgctatttgatgatgtccccttgtactgggatgcatgggacgtcatggactaccacctggagacacggaagcctgtgctgggccaggcagggaccctggcagtgggcaccgagggcggcctgcggggcagcgcctggttcttgctacagatcagccccaacagtcggcttagccaggaggttgtgctggacgttggctgcccctatgtccgcttccacaccgaggtacactggcatgaggcccacaagttcctgaaggtggagttccctgctcgcgtgcggagttcccaggccacctatgagatccagtttgggcacctgcagcgacctacccactacaatacctcttgggactgggctcgatttgaggtgtgggcccatcgctggatggatctgtcagaacacggctttgggctggccctgctcaacgactgcaagtatggcgcgtcagtgcgaggcagcatcctcagcctctcgctcttgcgggcgcctaaagccccggacgctactgctgacacggggcgccacgagttcacctatgcactgatgccgcacaagggctctttccaggatgctggcgttatccaagctgcctacagcctaaacttccccctgttggctctgccagcccccagcccagcgcccgccacctcctggagtgcgttttccgtgtcttcacccgcggtcgtattggagaccgtcaagcaggcggagagcagcccccagcgccgctcgctggtcctgaggctgtatgaggcccacggcagccacgtggactgctggctgcacttgtcgctgccggttcaggaggccatcctctgcgatctcttggagcgaccagaccctgctggccacttgacccttcgggacaaccgcctgaagctcaccttttctcccttccaagtgctgtccctgttgctcgtgcttcagcctccgccacactgagtccctggggctggggttttgtttgtagaaggctctggggactcctaatttctgcttccccagcctaaagcagggatcagtcttttcttgtggaataaatccttggatcgggaa

SEQ ID NO: 17101 - DNA, 1111 bp, Homo sapiens
  source 1..1111: mol_type = unassigned DNA
aaagaggagcgagagcccggcgatggcggctgcgccggccttgaagcactggcgcaccacgctggagcgggtggagaagttcgtgtcgccgctctactttaccgactgtaacctccgcggcaggctttttggggccagctgccctgtggctgtgctctccagcttcctgacgccggagagacttccctaccaggaggcagtccagcgggacttccgccccgcgcaggtcggcgacagcttcggacccacatggtggacctgctggttccgggtggagctgaccatcccagaggcatgggtgggccaggaagttcacctttgctgggaaagtgatggagaaggtctggtgtggcgtgatggagaacctgtccagggtttaaccaaagagggtgagaagaccagctatgtcctgactgacaggctgggggaaagagacccccgaagcctcactctctatgtggaagtagcctgcaatgggctcctgggggccgggaagggaagcatgattgcagcccctgaccctgagaagatgttccagctgagccgggctgagctagctgtgttccaccgggatgtccacatgctcctggtggatctggagctgctgctgggcatagccaagcctggctttggcccttcaaagagactgtgaggaaatgtgcccggagctgggtgaccgccctgcagctcatggagcggaaccctgagttcatctttgcctgctcccaggcgcagcagctggaatgggtgaagagccgctaccctggcctgtactcccgcatccaggagtttgcgtgccgtgggcagtttgtgcctgtggggggcacctgggtggagatggatgggaacctgcccagtggagaggccatggtgaggcagtttttgcagggccagaacttctttctgcaggagtttgggaagatgtgctctgagttctggctgccggacacctttggctactcagcacagctcccccagatcatgcacggctgtggcatcaggcgctttctcacccagaaattgagctggaatttggtgaactccttcccacaccatacatttttctgggagggcctggatggctcccgtgtactggtccacttcccacctg

SEQ ID NO: 17102 - DNA, 2904 bp, Homo sapiens
  source 1..2904: mol_type = unassigned DNA
aaagcctcggctacttccgagggggtgagtggcttcaccgccggtcccttgcagcgctgcctttcgatctctccacatctcggtggcgcgggatctcaagatgcgcctccacctgctcctgctgctcgcgctgtgcggtgcaggcaccaccgccgcggagctcagttacagcttgcgtggcaactggagcatctgcaatgggaacggctcgctggagctgcccggggcggtccctggctgcgtgcacagcgccttgttccagcagggcctgatccaggattcttactacagatttaatgaccttaactacagatgggtctctttggataactggacctatagcaaagaatttaaaatcccctttgaaattagcaaatggcaaaaagtaaatttgattcttgagggagtggatacggtttcaaaaatcctgttcaatgaagtcactattggggaaacagacaatatgttcaatagatatagctttgatattaccaacgtggtcagggacgtgaactccattgagctgcgtttccagtcagcggtgttgtatgcagcacagcagagcaaagctcacactcgctaccaggttcccccagactgccctccacttgtgcagaagggtgaatgccatgtcaactttgttcggaaggagcaatgttcctttagttgggactgggggccttcctttcctacccagggaatctggaaagatgttagaattgaagcctataatatttgtcacctgaactacttcacattttccccaatatatgataagagtgcccaggagtggaatctggaaatagagtctacatttgatgttgtcagctcaaagccagttggtggtcaagtgatcgtagccatccctaagttgcaaacacaacagacatacagcattgaacttcaacctgggaaaaggattgttgagctatttgtgaacattagcaagaatattactgtagaaacttggtggcctcatggacatggaaaccagactgggtacaacatgactgttctttttgaactggatggaggcttaaatattgaaaaatcagctaaggtttattttaggacagtggaacttatagaagagcctataaaagggtctcctggtttgagtttctatttcaaaattaatggatttcccatatttctaaaaggctcaaactggatcccagcagattcattccaggaccgagtaacctctgagttgttacggctccttttacagtctgttgtggatgctaatatgaatactcttcgggtttggggaggaggaatttatgagcaggatgaattctatgaactctgtgatgaactaggaataatggtatggcaggattttatgtttgcctgtgccctttatccaactgatcagggcttcctggattcagtgacagcagaagttgcctaccagatcaagagactgaaatctcatccttctatcatcatatggagtggcaataatgaaaatgaggaggcgctgatgatgaattggtatcatatcagtttcactgaccggccaatctacatcaaggactatgtgacactctatgtgaaaaacatcagagagctcgtactggcaggagacaagagtcgtccttttattacgtccagtcctacaaatggggctgaaactgttgcagaagcctgggtctctcaaaaccctaatagcaattattttggtgatgtacatttttatgactatatcagtgattgctggaactggaaagttttcccaaaagctcgatttgcatctgaatatggatatcagtcctggccgtccttcagtacattagaaaaggtctcgtctacagaggactggtctttcaatagcaagttttcacttcatcgacaacatcacgaaggtggtaacaaacaaatgctttatcaggctggacttcatttcaaactcccccaaagcacagatccattacgcacatttaaagataccatctaccttactcaggtgatgcaggcccagtgtgtcaaaacagaaactgaattctaccgccgtagtcgcagcgagatagtggatcagcaagggcacacgatgggggcactttattggcagttgaatgacatctggcaagctccttcctgggcttctcttgagtacggaggaaagtggaaaatgcttcattactttgctcagaatttctttgctccactgttgccagtaggctttgagaatgaaaacacgttctatatctatggtgtgtcagatcttcactcggattattcgatgacactcagtgtgagagtccatacatggagctccctggagcccgtgtgctctcgtgtgactgaacgttttgtgatgaaaggaggagaggctgtctgcctttatgaggagccagtgtctgaattgctgaggagatgtgggaattgcacacgggaaagctgtgtggtttccttttacctttcagctgaccatgaactcctgagcccgaccaactaccacttcttgtcctcaccgaaggaggccgtggggctctgcaaggcgcagatcactgccatcatctctcagcaaggtgacatatttgtttttgacctggagacctcagctgtcgctccctttgtttggttggatgtaggaagcatcccagggagatttagtgacaatggtttcctcatgactgagaagacacgaactatattattttacccttgggagcccaccagcaagaatgagttggagcaatcttttcatgtgacctccttaacagatatttactgaaggaatctaggttgtattttcagtggacaatgggaataaagcatttctaaagcaccgactggagaggaaggcaacagagacaaggagagaagccgagagacatgtctgcgtgctgccacgcatttgagcgattgctctgtgaagagttgtacactgaacacttt

SEQ ID NO: 17103 - DNA, 4575 bp, Homo sapiens
  source 1..4575: mol_type = unassigned DNA
gtctgggctcggggcgcggcggcagtcagctctatgttcgcggtcttaacctctcctctggccgagtccttgcaagaagtgaattacccgaccctgcaaaacacttactattttggagtttaaagtatgtcatcatggcaaagtttcggagaaggacttgcatcattttggcactttttattctatttattttctctctgatgatgggtttaaaaatgctgagaccaaatacagctacttttggagctccttttggacttgaccttcttccagaacttcatcaacgaactattcatttggggaaaaattttgatttccaaaagagtgacagaatcaacagtgaaacaaataccaagaatttaaaaagtgttgaaatcactatgaaaccttccaaagcctctgaacttaacttggatgaactaccacctctgaacaattatctacatgtattttattacagttggtatggaaatccacaatttgatggtaaatatatacattggaatcatccagtgttagagcattgggaccctagaatagccaagaattatccacaagggagacacaaccctccagatgacattggctccagcttttatcctgaattgggaagttacagttctcgggatccttctgtcatagaaactcacatgagacaaatgcgctcagcttcaattggtgtactagccctctcttggtacccacctgatgtaaatgatgaaaatggagaacctactgataacttggtacccactattttggataaagctcataaatataacctaaaggttacttttcacatagaaccatatagcaatcgagatgatcaaaacatgtacaaaaatgtcaagtatattatagacaaatatggaaatcatccggccttttacaggtacaagacgaagactggcaatgctcttcctatgttttatgtctatgattcctatattaccaagcctgaaaaatgggccaatctgttaaccacctcagggtctcggagtattcgcaattctccttatgatggactgtttattgcccttctggtagaagaaaaacataagtatgatattcttcaaagtggttttgatggaatttacacatattttgccacaaatggctttacttatggctcatcacatcagaattgggctagcctaaaattattttgtgataaatacaacttaatatttatcccaagtgtgggcccaggatacatagataccagcatccgtccatggaacacgcaaaacactcggaaccgaatcaatgggaagtattatgaaattggtctgagtgccgcacttcagacacgccccagcttaatttctatcacctcttttaatgagtggcatgaaggaactcagattgaaaaagctgttcccaaaagaaccagtaatacagtgtacctagattaccgtcctcataaaccaggtctttacctagaactgactcgcaagtggtctgaaaaatacagtaaggaaagagcaacttatgcattagatcgccagctgcctgtttcttaatgcattgattaaagtttaatagttatcaaaatcacctaatttttaaaaatagctttcgttttgagttctggaaagaaaactgtcaaaatcagtatatactattagttatatttaaaaatatttttttaaattctttacagataatattatacttgttacccttcacaataccacatgagaaaatatctgagacaaaatgtatacaaatatattccttatggcataatttattgcatttctgactgaaatcaaaattctgatttgatggcaattgaattttcattttacaatagataaatgcttgtgctacctaaagcacttagcacacagttaaattatatttacatcctagacccaaataaataggattgtgtgtatatttgggatatctattgaagaaaaaaagaaaaccccttaaagataatgtacatgcttcatgtcatgtctttaaaataatttaatcaactttattgtcttagtatttagactctggataactctacaataatgaggaaattcttaagaataacaaaatcactgtaccttcctctcaattttgctgtgaacctgaaatggctttaaattaatactcttattttttatttaatttaattacataaattaaaccttaccatgaccaaattgtgttaggacggcctgctatctacagcacagtgtgtcatttgcagatttgtggttacctataccacgctaggtgttttgacatgtttagtgtttctgctttacagtgctgaattccatattttagaagctatgaaagtccttttatgaaaaagttactgattgcttctcagttattaggaaaacagttgtttcacaattattatgtagatatgatgcccaaatatcatttttagtatatcttgtcgatctttaagttgttactattgtgttattcatgtctttaaatcagataccaaatattttttaggaaagaaaaatgttattactgtcattaggttgtcttttaatactttaagttattttgacgaaaagtaatagagaaaatttacttagcattttagattctagagacatggaaatgaaaattattttatgtctagagtaggtcctgaagtttggctttacattaagtttagcactgtatcagaatgaagaaactaatattttacataaaaactaatactttcaattttttatatagtaatatccccattttgtaaatgttagacttttatcatacctgtaagttaaaatacttgttatcaataacttgtcatgttgtgacaaattgatcacttgtgtacgaaaaataaatctccttaaaaactaaataaaatgcactgtattcttacagttaatgtttataactatagtaaaaaattaatatatatcctattacataaatgttatttcttaggtgttccattaagaagagcaatagaataatgctaaaaaataatgcctataaatcttcagagtataaagacatccattcagaaacaaaaattagcactaaattttttataaaatagaccagatgacaaaatttattttatttttaaacagtggttttgacacaaattatgttattgaaaagcattattaatgtttaatttatttaaaattttggaatttgccatttctcagagaatgatcaggccttaggaaattaatacagtagtagtaatcattttctaggggaaaataaaagaataaatcactatactgatattttgatacaagcaagcacttacatggtaatcactatatagatccaacctgtggattttcttcttatgtccatttaactagaatatattattttaggtataatttacaaatgtcacacctaataatcttttataatataccatatttcattaaagttttgttagagaagtatctaccacagaggagtttttgtcattgtgtacgttgtgtatttgaacccaccatgacagaaagtaaattttaggaaatagttatgagattaagggaaaatctataaaaacaaggttagcatattctcaacacagataccaccactttctttttcccattatagacatggtgaatccacacagcatacttcatctctgagctttgttgtgattcctcaacacattaccctaaccagccagcagtaacagatttcagagtaagataaagcagattctgtcttcattgcaaaaagttattctcaatggaagaatggcatctgatctcataattactagtttatattaatatagtttttttctccctttttaataaaataattacagtcatccctcagtgtctgtgggggattggttccagttacccctatagataccaaaatctgcagatgctcaagtccctgatataaactggcatagtagttgcatataatctatgcacatcctcctgtatacattaagtcatctctagattatttataacacttaatacaatgtaaatgctatgtagttgttataccatactggttagtgaataattacatgaaaaaaaagagtctgtacatcttcagagtttcagtcggcaatttcttggccatggatgtagaacctacagataaggtgagccaactgcattaggaaataactctaataattctgttaattcttagagaggaaaactttcaaaatcttcctcaggtatttattacaactgcctttaccattttagttgtaacacagtttaaattgttatgataacaagtaaataagagcaaagaatgtatttcttaattcaaaactatacgtttgaattcaatatggtataacttaaagtggtataatacatacaatgcatgaatcataatggattcttttataagttattaatttttatggtttaatcagtctaattgttttgactgttatagaaaccaaatattttactgtttcttttaaggactaatattgtcaaaaactgctgttattaacttcacttgagttgtttaacttccttctgttttaagattgtaattaaaaattactattttgttatatggaatggttaatttttacctaataaaaacatagatgaaatacattgtatttta

SEQ ID NO: 17104 - DNA, 1076 bp, Homo sapiens
  source 1..1076: mol_type = unassigned DNA
gtctgggctcggggcgcggcggcagtcagctctatgttcgcggtcttaacctctcctctggccgagtccttgcaagaagtgaattacccgaccctgcaaaacacttactattttggagtttaaagtatgtcatcatggcaaagtttcggagaaggacttgcatcattttggcactttttattctatttattttctctctgatgatgggtttaaaaatgctgagaccaaatacagctacttttggagctccttttggacttgaccttcttccagaacttcatcaacgaactattcatttggggaaaaattttgatttccaaaagagtgacagaatcaacagtgaaacaaataccaagaatttaaaaagtgttgaaatcactatgaaaccttccaaagcctctgaacttaacttggatgaactaccacctctgaacaattatctacatgtattttattacagttggtatggaaatccacaatttgatggtaaatatatacattggaatcatccagtgttagagcattgggaccctagaatagccaagaattatccacaagggagacacaaccctccagatgacattggctccagcttttatcctgaattgggaagttacagttctcgggatccttctgtcatagaaactcacatgagacaaatgcgctcagcttcaattggtaattattgtatatatatatatgtgtgtttgtgtctgtatatatgcatataaatgattttttgtgtaactttactagttaattttctcattattattaattatattgttaagctcatacctccaaattaaactgtatgtatgatcttaaacatccaggcaaccacattttaacactgcccttagtgtatattgtttaatttttacattttggagcatttctggatatattgttgatttctaatttaattcactttctcaattttattaaattatgatttacataaaatacaatgaatttcccactttaagtttatagctcattgatgttactcaaaagtatatacctgtttgaataccaccccaatcaagaagtaaaatatttctatagcccaaaaa

SEQ ID NO: 17105 - DNA, 1069 bp, Homo sapiens
  source 1..1069: mol_type = unassigned DNA
gtctgggctcggggcgcggcggcagtcagctctatgttcgcggtcttaacctctcctctggccgagtccttgcaagaagtgaattacccgaccctgcaaaacacttactattttggagtttaaagtatgtcatcatggcaaagtttcggagaaggacttgcatcattttggcactttttattctatttattttctctctgatgatgggtttaaaaatgctgagaccaaatacagctacttttggagctccttttggacttgaccttcttccagaacttcatcaacgaactattcatttggggaaaaattttgatttccaaaagagtgacagaatcaacagtgaaacaaataccaagaatttaaaaagtgttgaaatcactatgaaaccttccaaagcctctgaacttaacttggatgaactaccacctctgaacaattatctacatgtattttattacagttggtatggaaatccacaatttgatggtaaatatatacattggaatcatccagtgttagagcattgggaccctagaatagccaagaattatccacaagggagacacaaccctccagatgacattggctccagcttttatcctgaattgggaagttacagttctcgggatccttctgtcatagaaactcacatgagacaaatgcgctcagcttcaattggtaattattgtatatatatatgtgtgtttgtgtctgtatatatgcatataaatgattttttgtgtaactttactagttaattttctcattattattaattatattgttaagctcatacctccaaattaaactgtatgtatgatcttaaacatccaggcaaccacattttaacactgcccttagtgtatattgtttaatttttacattttggagcatttctggatatattgttgatttctaatttaattcactttctcaattttattaaattatgatttacataaaatacaatgaatttcccactttaagtttatagctcattgatgttactcaaaagtatatacctgtttgaataccaccccaatcaagaagtaaaatatttctatagccc

SEQ ID NO: 17106 - DNA, 4492 bp, Homo sapiens
  source 1..4492: mol_type = unassigned DNA
gcggggccggacgccggacaccagagcgcgggcggcggagccagcgggcgagagagcgcgcggcgggcgcgggttgccctcgtcgagagccatgggcgcggcgcggcgcggggctgaggatcggcgcggcccggaggcgctggggaccggggcgcgggcccggggccgcctttagccggcaccgagggcgcggggccggggatgagggcgcccgccgcggggagcccgtctgcgcgccgcggcaccttcccgcccagcgagcgagcccgagcaggcagacgcgcggccggcggtctgggggcgcgccgcctcccggtccccaaaatgtgaagcggggagggcggagacgcagagacggcccggccgggcgccctcgccgccctccggcagccgcgccgctccctccgctgcacgcccaggcctgagcagcgaggccaccgggccgcgcgctcccagcttcgctcggacgcggcttcggcccgcagagggttcgtggcccggacgcggcgagagctgggcccaggacggtgcgtccggcctcgcccgcggctgctcgcaccaacaagtttgaacaatgatcaccgtcaaccccgatgggaagataatggtcagaagatgcctggtcaccctgagaccctttcggctttttgtcctgggcatcggcttcttcactctctgcttcctgatgacgtctctgggaggccagttctcggcccggcgcctgggggactcgccattcaccatccgcacagaagtgatggggggccccgagtcccgcggcgtcctgcgcaagatgagcgacctgctggagctgatggtgaagcgcatggacgcactggccaggctggagaacagcagtgagctgcaccgggccggcggcgacctgcactttcccgcagacaggatgccccctggggccggcctcatggagcggatccaggctattgcccagaacgtctccgacatcgctgtgaaggtggaccagatcctgcgccacagtctgctcctgcacagcaaggtgtcagaaggccggcgggaccagtgtgaggcacccagtgaccccaagttccctgactgctcagggaaggtggagtggatgcgtgcccgctggacctctgacccctgctacgccttctttggggtggacggcaccgagtgctccttcctcatctacctcagtgaggtcgagtggttctgccccccgctgccctggaggaaccagacggctgcccagagggcacccaagcccctccccaaagtccaggcagttttccgaagcaacctgtcccaccttctggacctgatgggcagcgggaaggagtccctgatcttcatgaagaagcggaccaagaggctcacagcccagtgggcgctggctgcccagcgcctggcacagaagctgggggccacccagagggaccagaagcagatcctggtccacatcggcttcctgacggaggagtccggggacgtgttcagccctcgggtcctgaagggcgggcccctaggggagatggtgcagtgggcggacattctgactgcactctatgtcctgggccatggcctgcgggtcacagtctccctgaaggagctgcagagtaacttaggggtaccgccaggccggggaagctgcccgctcaccatgcccctgcccttcgacctcatctacaccgactaccacggcctgcagcagatgaagcggcacatgggactctccttcaagaagtaccggtgccgaatcagggtcatcgacaccttcgggacggaacctgcgtacaaccacgaggagtacgccacgctgcacggctaccggaccaactggggctactggaacctcaaccccaagcagttcatgaccatgtttcctcatacccccgacaactccttcatgggcttcgtgtccgaggagctcaacgagacggagaagcggctcatcaaaggcggcaaggccagcaacatggccgtggtgtacggcaaggaggcgagcatctggaagctccaggggaaggagaagttcctgggcatcctgaacaaatacatggagatccatggcaccgtgtactacgagagccagcggccccccgaggtgccagcctttgtgaagaaccacggcctcttaccgcagcctgagtttcagcagctgctgcgcaaggccaaactcttcatcgggtttggcttcccctacgagggccccgcccccctggaggccatcgccaatggttgcatcttcctgcagtcccgcttcagcccgccccacagctccctcaaccacgagttcttccgaggcaagcccacctccagagaggtgttctcccagcatccctacgcggagaacttcatcggcaagccccacgtgtggacagtcgactacaacaactcagaggagtttgaagcagccatcaaggccattatgagaactcaggtagacccctacctaccctacgagtacacctgcgaggggatgctggagcggatccacgcctacatccagcaccaggacttctgcagagctccagaccctgccctaccagaggcccacgccccgcagagcccctttgtcctggcccccaatgccacccacctcgagtgggctcggaacaccagcttggctcctggggcctggccccccgcgcacgccctgcgggcctggctggccgtgcctgggagggcctgcaccgacacctgcctggaccacgggctaatctgtgagccctccttcttccccttcctgaacagccaggacgccttcctcaagctgcaggtgccctgtgacagcaccgagtcggagatgaaccacctgtacccggcgttcgcccagcctggccaggagtgctacctgcagaaggagcctctgctcttcagctgcgccggctccaacaccaagtaccgccggctctgcccctgccgcgacttccgcaagggccaggtggccttgtgccagggctgtctgtgaatccgcctctgccgccctgcctggcacccacgctggctctctcctgccgcgggagaaagcaccagcaggttctgagccctggctgcttgtcctcctcgcaacccccccaggccggagcttccttccttagccgggaagctggcagaggagagccgtgcccgggaataggaggaggcagcatgccgagcccctgggacctcccaggcaggctccggttctctcctggggactcacagaagcatcgtggccaagcaggtgtcggactgctcagagtccgcatggcccaggagcaggtggtcggaggcccctggctttgtgcaaggccggatctgggccaggtggcgaaaggggcccagtcgttcttgggcccaggatggggcctctagacttgcaagggagaggaacagggaccaggctgccccacggtccctgaagggtccaaggaggggccctccccatggccctggagagtgggcctgggtggtacctgctccaggcagggaaactgggggctcgcccttctcctgtgaggggagccaggcacacagggcccattggtgtttgggatgtggacagaggggcagggggctgggagaaggctaagccgaggggtcctgtttgtgcctccccttagtcccttccctcccgatttcccgattcccccaccctccctctacacttgaggaccacagttgggggtgtagggaccacccagaccctggttgaattgtttctctctcctgcttgttccaacccttttcactctgggcttctcccaaaacccatcctggcatgacctgcaactccaggtggtggatttgttccaaagcctcaatccctaccccctccaaggggcaggtttccagtccagcctcagagatcaggctctgggacccctgcctggggggtggccttcatgcactagccacttccgcaggtgctgactcccgcactccctggcattttttgcagacaagggcttgggatggaccctcagccccatggtacgccctgcccagtttccagttgccctgtccacttaccctaggtagccccccaccccatcagtgccgagtccttgtccctacctccagcttcctccagcctcaaaccgcctctggatctagctgtccttctccgagtggcacgcctgccccaggatgccccctttccctcccccccatgcccagagccccgcctgcctcagcgggtcaggccttcagaacactgccacccacccagttttataatcccgctccctctccaggcaaccccacccaccagcctaggcctgctcctccacccttcccgggaggcagccccgggatgctgagagttggtggaggggccaggctggacgcttcctgtgggagtcccctccagacctggctggcccctgcagccacagaaaccacgatggcaaaaaatctcattggttctcaaggactaacctgtgggggaaagcaatagagacactctttttctctcttttttttaaagatttatttcttgaaataataaatattttattgggatgtg

SEQ ID NO: 17107 - DNA, 2761 bp, Homo sapiens
  source 1..2761: mol_type = unassigned DNA
cccctcagtccgccccgccccgccccgcctgccggggaagggccacgttgcccgcccggccgtccggccccggcgcgccgcagaaagggctggcgagtcgaaaggcgaggcggccgcggcagcgcttgggacgcgcctgggcaccgggctcgctccctgcgccccggagcaggccaagttcggggccaggacgtcgggaggacctggtgcatggctgcctcctaatcccatagtccagaggaggcatccctaggactgcgggcaagggagccgggcaagcccagggcagccttgaaccgtcccctggcctgccctccccggtgggggccaggatgctgaagaagcagtctgcagggcttgtgctgtggggcgctatcctctttgtggcctggaatgccctgctgctcctcttcttctggacgcgcccagcacctggcaggccaccctcagtcagcgctctcgatggcgaccccgccagcctcacccgggaagtgattcgcctggcccaagacgccgaggtggagctggagcggcagcgtgggctgctgcagcagatcggggatgccctgtcgagccagcgggggagggtgcccaccgcggcccctcccgcccagccgcgtgtgcctgtgacccccgcgccggcggtgattcccatcctggtcatcgcctgtgaccgcagcactgttcggcgctgcctggacaagctgctgcattatcggccctcggctgagctcttccccatcatcgttagccaggactgcgggcacgaggagacggcccaggccatcgcctcctacggcagcgcggtcacgcacatccggcagcccgacctgagcagcattgcggtgccgccggaccaccgcaagttccagggctactacaagatcgcgcgccactaccgctgggcgctgggccaggtcttccggcagtttcgcttccccgcggccgtggtggtggaggatgacctggaggtggccccggacttcttcgagtactttcgggccacctatccgctgctgaaggccgacccctccctgtggtgcgtctcggcctggaatgacaacggcaaggagcagatggtggacgccagcaggcctgagctgctctaccgcaccgactttttccctggcctgggctggctgctgttggccgagctctgggctgagctggagcccaagtggccaaaggccttctgggacgactggatgcggcggccggagcagcggcaggggcgggcctgcatacgccctgagatctcaagaacgatgacctttggccgcaagggtgtgagccacgggcagttctttgaccagcacctcaagtttatcaagctgaaccagcagtttgtgcacttcacccagctggacctgtcttacctgcagcgggaggcctatgaccgagatttcctcgcccgcgtctacggtgctccccagctgcaggtggagaaagtgaggaccaatgaccggaaggagctgggggaggtgcgggtgcagtatacgggcagggacagcttcaaggctttcgccaaggctctgggtgtcatggatgaccttaagtcgggggttccgagagctggctaccggggtattgtcaccttccagttccggggccgccgtgtccacctggcgcccccactgacgtgggagggctatgatcctagctggaattagcacctgcctgtccttcctgggcccctccttgccacatcatgagctgaggtgggaccacagtccccaggctgcatcggcctgcctgtgtttccctcttaggtgcatttatctttttgatttttccgagtggcatttaagtgcacaaatgataacaagaggattattctcccgttctcaagggagtcagatcaggggaactattctagggtatgttgcggggtattaagcaggaaaccactgtgtggtggggggcactgggcttgttggggccagaaatgtccacgtcctgagctttctcctggagcatgtgcagagagtttggcaacgttcgctctcttgaccagaccccttctccctgacctggctcttccagccagggcacgagccctccttctatacctgctccccttcccccagtggggactgagttatgggagaaggggacatatttgtggccaaaatgatactaaccaaaggggcttccttgtcagggcctggtggagttggtgggtcatcggggctcactgcctcctgcccttctctcctgtctgacccccacttagcccttctctccttgcagcctagcagtttatagttctgagatggaaagttgaagggggcaagcaagacctctcctcagcccatgcccagctgtcaggagagaggtgcagggaggaaggccttgtgctgggacaacctctctcttgccttacctcagagagggactatgccctgacccctcctttctgaaaatcagtgccctccctgttgctctaggaggctcctgctggcttggtagaagacagaattcgatctgcctgtccctttttcccctggggtttgacacacaggctcctctcagcatgaggtggagcagtgaccaggtggagcagtgaccaggacgcctctggcccagtgctgcccagcctccccgcccgctcccaggcgccccatgtcctcacaggccaggacgccatggcaggatggagaggacttggtggatttttgtttcttgcctgacctcagtttcatgaaagaaagtggaagctacagaattattttctaaaataaaggctgaattgtctgaaaaa

SEQ ID NO: 17108 - DNA, 3104 bp, Homo sapiens
  source 1..3104: mol_type = unassigned DNA
ggcttttgactgactggatgtgggaatgttgtggaagacttctggcctgccatttcctgagaacgggactgctgagagaggagctgggaggagcactgcaaatttcactttggacacgtgagtcagagaaatctgcctcctgggccatgccgcttctaaggcctgtttcttctcatgagccccagcacaagacagatgggccagttctcacagtggataacttcccctgcctgagcaagagatgggatagtatctgggatctgtccatcaccagactctgagcttaataaggcagctgaatgaagggaggtaacggacccctgagaggggcactgaagtctgcagtggggggggaggggcctggacacaccccttcccccccagactcctccccgtcagggtcagctcagccatggactttggacctggataagaagagagaagctgcactttggtggatctgatttgggattctcagttttgaaaatggagtgctgaatggggatttgatgatctcctggagagcaactgagacaagagaagaaaggtgcatggctgcctcctaatcccatagtccagaggaggcatccctaggactgcgggcaagggagccgggcaagcccagggcagccttgaaccgtcccctggcctgccctccccggtgggggccaggatgctgaagaagcagtctgcagggcttgtgctgtggggcgctatcctctttgtggcctggaatgccctgctgctcctcttcttctggacgcgcccagcacctggcaggccaccctcagtcagcgctctcgatggcgaccccgccagcctcacccgggaagtgattcgcctggcccaagacgccgaggtggagctggagcggcagcgtgggctgctgcagcagatcggggatgccctgtcgagccagcgggggagggtgcccaccgcggcccctcccgcccagccgcgtgtgcctgtgacccccgcgccggcggtgattcccatcctggtcatcgcctgtgaccgcagcactgttcggcgctgcctggacaagctgctgcattatcggccctcggctgagctcttccccatcatcgttagccaggactgcgggcacgaggagacggcccaggccatcgcctcctacggcagcgcggtcacgcacatccggcagcccgacctgagcagcattgcggtgccgccggaccaccgcaagttccagggctactacaagatcgcgcgccactaccgctgggcgctgggccaggtcttccggcagtttcgcttccccgcggccgtggtggtggaggatgacctggaggtggccccggacttcttcgagtactttcgggccacctatccgctgctgaaggccgacccctccctgtggtgcgtctcggcctggaatgacaacggcaaggagcagatggtggacgccagcaggcctgagctgctctaccgcaccgactttttccctggcctgggctggctgctgttggccgagctctgggctgagctggagcccaagtggccaaaggccttctgggacgactggatgcggcggccggagcagcggcaggggcgggcctgcatacgccctgagatctcaagaacgatgacctttggccgcaagggtgtgagccacgggcagttctttgaccagcacctcaagtttatcaagctgaaccagcagtttgtgcacttcacccagctggacctgtcttacctgcagcgggaggcctatgaccgagatttcctcgcccgcgtctacggtgctccccagctgcaggtggagaaagtgaggaccaatgaccggaaggagctgggggaggtgcgggtgcagtatacgggcagggacagcttcaaggctttcgccaaggctctgggtgtcatggatgaccttaagtcgggggttccgagagctggctaccggggtattgtcaccttccagttccggggccgccgtgtccacctggcgcccccactgacgtgggagggctatgatcctagctggaattagcacctgcctgtccttcctgggcccctccttgccacatcatgagctgaggtgggaccacagtccccaggctgcatcggcctgcctgtgtttccctcttaggtgcatttatctttttgatttttccgagtggcatttaagtgcacaaatgataacaagaggattattctcccgttctcaagggagtcagatcaggggaactattctagggtatgttgcggggtattaagcaggaaaccactgtgtggtggggggcactgggcttgttggggccagaaatgtccacgtcctgagctttctcctggagcatgtgcagagagtttggcaacgttcgctctcttgaccagaccccttctccctgacctggctcttccagccagggcacgagccctccttctatacctgctccccttcccccagtggggactgagttatgggagaaggggacatatttgtggccaaaatgatactaaccaaaggggcttccttgtcagggcctggtggagttggtgggtcatcggggctcactgcctcctgcccttctctcctgtctgacccccacttagcccttctctccttgcagcctagcagtttatagttctgagatggaaagttgaagggggcaagcaagacctctcctcagcccatgcccagctgtcaggagagaggtgcagggaggaaggccttgtgctgggacaacctctctcttgccttacctcagagagggactatgccctgacccctcctttctgaaaatcagtgccctccctgttgctctaggaggctcctgctggcttggtagaagacagaattcgatctgcctgtccctttttcccctggggtttgacacacaggctcctctcagcatgaggtggagcagtgaccaggtggagcagtgaccaggacgcctctggcccagtgctgcccagcctccccgcccgctcccaggcgccccatgtcctcacaggccaggacgccatggcaggatggagaggacttggtggatttttgtttcttgcctgacctcagtttcatgaaagaaagtggaagctacagaattattttctaaaataaaggctgaattgtctgaaaaata

SEQ ID NO: 17109 - DNA, 3045 bp, Homo sapiens
  source 1..3045: mol_type = unassigned DNA
agtctcttctgcccctccccctcctgtacggccgctactctgcgcccggcttccttctcacaacctggttctgcccacacctgttcttcagccctgtgaacagtggctgtagaacagtctcaggccctgcagacccacctccctcgctcccgtggtggcggtggtgacgggctggggacgttgggtagaaaaatgggcgggatgtggaacgctgcgttgccggggcccacttccggaggacgggcggaagtggctgcggtggatggttaacacagaaatctgcctcctgggccatgccgcttctaaggcctgtttcttctcatgagccccagactcctccccgtcagggtcagctcagccatggactttggacctggataagaagagagaagctgcactttggtggatctgatttgggattctcagttttgaaaatggagtgctgaatggggatttgatgatctcctggagagcaactgagacaagagaagaaaggtgcatggctgcctcctaatcccatagtccagaggaggcatccctaggactgcgggcaagggagccgggcaagcccagggcagccttgaaccgtcccctggcctgccctccccggtgggggccaggatgctgaagaagcagtctgcagggcttgtgctgtggggcgctatcctctttgtggcctggaatgccctgctgctcctcttcttctggacgcgcccagcacctggcaggccaccctcagtcagcgctctcgatggcgaccccgccagcctcacccgggaagtgattcgcctggcccaagacgccgaggtggagctggagcggcagcgtgggctgctgcagcagatcggggatgccctgtcgagccagcgggggagggtgcccaccgcggcccctcccgcccagccgcgtgtgcctgtgacccccgcgccggcggtgattcccatcctggtcatcgcctgtgaccgcagcactgttcggcgctgcctggacaagctgctgcattatcggccctcggctgagctcttccccatcatcgttagccaggactgcgggcacgaggagacggcccaggccatcgcctcctacggcagcgcggtcacgcacatccggcagcccgacctgagcagcattgcggtgccgccggaccaccgcaagttccagggctactacaagatcgcgcgccactaccgctgggcgctgggccaggtcttccggcagtttcgcttccccgcggccgtggtggtggaggatgacctggaggtggccccggacttcttcgagtactttcgggccacctatccgctgctgaaggccgacccctccctgtggtgcgtctcggcctggaatgacaacggcaaggagcagatggtggacgccagcaggcctgagctgctctaccgcaccgactttttccctggcctgggctggctgctgttggccgagctctgggctgagctggagcccaagtggccaaaggccttctgggacgactggatgcggcggccggagcagcggcaggggcgggcctgcatacgccctgagatctcaagaacgatgacctttggccgcaagggtgtgagccacgggcagttctttgaccagcacctcaagtttatcaagctgaaccagcagtttgtgcacttcacccagctggacctgtcttacctgcagcgggaggcctatgaccgagatttcctcgcccgcgtctacggtgctccccagctgcaggtggagaaagtgaggaccaatgaccggaaggagctgggggaggtgcgggtgcagtatacgggcagggacagcttcaaggctttcgccaaggctctgggtgtcatggatgaccttaagtcgggggttccgagagctggctaccggggtattgtcaccttccagttccggggccgccgtgtccacctggcgcccccactgacgtgggagggctatgatcctagctggaattagcacctgcctgtccttcctgggcccctccttgccacatcatgagctgaggtgggaccacagtccccaggctgcatcggcctgcctgtgtttccctcttaggtgcatttatctttttgatttttccgagtggcatttaagtgcacaaatgataacaagaggattattctcccgttctcaagggagtcagatcaggggaactattctagggtatgttgcggggtattaagcaggaaaccactgtgtggtggggggcactgggcttgttggggccagaaatgtccacgtcctgagctttctcctggagcatgtgcagagagtttggcaacgttcgctctcttgaccagaccccttctccctgacctggctcttccagccagggcacgagccctccttctatacctgctccccttcccccagtggggactgagttatgggagaaggggacatatttgtggccaaaatgatactaaccaaaggggcttccttgtcagggcctggtggagttggtgggtcatcggggctcactgcctcctgcccttctctcctgtctgacccccacttagcccttctctccttgcagcctagcagtttatagttctgagatggaaagttgaagggggcaagcaagacctctcctcagcccatgcccagctgtcaggagagaggtgcagggaggaaggccttgtgctgggacaacctctctcttgccttacctcagagagggactatgccctgacccctcctttctgaaaatcagtgccctccctgttgctctaggaggctcctgctggcttggtagaagacagaattcgatctgcctgtccctttttcccctggggtttgacacacaggctcctctcagcatgaggtggagcagtgaccaggtggagcagtgaccaggacgcctctggcccagtgctgcccagcctccccgcccgctcccaggcgccccatgtcctcacaggccaggacgccatggcaggatggagaggacttggtggatttttgtttcttgcctgacctcagtttcatgaaagaaagtggaagctacagaattattttctaaaataaaggctgaattgtctg

SEQ ID NO: 17110 - DNA, 1919 bp, Homo sapiens
  source 1..1919: mol_type = unassigned DNA
ctgatcacatggcagcagcccttcttggggaagtcagctacccagcagcctgtagtcctcggctacccaccctcaccgcctggggtcccatggtgagacagctgggtgggcatcaggcttctgcagagggccaggccggagggagctgggcgagggagtggggctggctcctggcttgcaccggcctcgtggaatccaggcctcagacctgatcgctggcgaaactggctctgtgcgctggagcccctggtcttctgcgtctgtcctcctcccggccagactttactcctggctcagcgacaggtgcatggctgcctcctaatcccatagtccagaggaggcatccctaggactgcgggcaagggagccgggcaagcccagggcagccttgaaccgtcccctggcctgccctccccggtgggggccaggatgctgaagaagcagtctgcagggcttgtgctgtggggcgctatcctctttgtggcctggaatgccctgctgctcctcttcttctggacgcgcccagcacctggcaggccaccctcagtcagcgctctcgatggcgaccccgccagcctcacccgggaagtgattcgcctggcccaagacgccgaggtggagctggagcggcagcgtgggctgctgcagcagatcggggatgccctgtcgagccagcgggggagggtgcccaccgcggcccctcccgcccagccgcgtgtgcctgtgacccccgcgccggcggtgattcccatcctggtcatcgcctgtgaccgcagcactgttcggcgctgcctggacaagctgctgcattatcggccctcggctgagctcttccccatcatcgttagccaggactgcgggcacgaggagacggcccaggccatcgcctcctacggcagcgcggtcacgcacatccggcagcccgacctgagcagcattgcggtgccgccggaccaccgcaagttccagggctactacaagatcgcgcgccactaccgctgggcgctgggccaggtcttccggcagtttcgcttccccgcggccgtggtggtggaggatgacctggaggtggccccggacttcttcgagtactttcgggccacctatccgctgctgaaggccgacccctccctgtggtgcgtctcggcctggaatgacaacggcaaggagcagatggtggacgccagcaggcctgagctgctctaccgcaccgactttttccctggcctgggctggctgctgttggccgagctctgggctgagctggagcccaagtggccaaaggccttctgggacgactggatgcggcggccggagcagcggcaggggcgggcctgcatacgccctgagatctcaagaacgatgacctttggccgcaagggtgtgagccacgggcagttctttgaccagcacctcaagtttatcaagctgaaccagcagtttgtgcacttcacccagctggacctgtcttacctgcagcgggaggcctatgaccgagatttcctcgcccgcgtctacggtgctccccagctgcaggtggagaaagtgaggaccaatgaccggaaggagctgggggaggtgcgggtgcagtatacgggcagggacagcttcaaggctttcgccaaggctctgggtgtcatggatgaccttaagtcgggggttccgagagctggctaccggggtattgtcaccttccagttccggggccgccgtgtccacctggcgcccccactgacgtgggagggctatgatcctagctggaattagcacctgcctgtccttcctgggcccctccttgccacatcatgagctgaggtgggaccacagtccccaggctgcatcggcctgcctgtgtttccctcttaggtgcatttatctttttgatttttccgagtggcatttaagtgcacaaatgataa

SEQ ID NO: 17111 - DNA, 3175 bp, Homo sapiens
  source 1..3175: mol_type = unassigned DNA
gtgtggatggatgtgtgttgagagagagaatggatgtgtgtgtgtttacgaataaacttggaggggagggggcaacaggggtgggttttcgggctgagaaatgggaacactgtggggctgctgcaagcaggacttgggccttaaacattccaggagagtgttctcgggagtagccccgggaaggactttaacagaggttaacacagaaatctgcctcctgggccatgccgcttctaaggcctgtttcttctcatgagccccagcacaagacagatgggccagttctcacagtggataacttcccctgcctgagcaagagatgggatagtatctgggatctgtccatcaccagactctgagcttaataaggcagctgaatgaagggaggtaacggacccctgagaggggcactgaagtctgcagtggggggggaggggcctggacacaccccttcccccccagactcctccccgtcagggtcagctcagccatggactttggacctggataagaagagagaagctgcactttggtggatctgatttgggattctcagttttgaaaatggagtgctgaatggggatttgatgatctcctggagagcaactgagacaagagaagaaaggtgcatggctgcctcctaatcccatagtccagaggaggcatccctaggactgcgggcaagggagccgggcaagcccagggcagccttgaaccgtcccctggcctgccctccccggtgggggccaggatgctgaagaagcagtctgcagggcttgtgctgtggggcgctatcctctttgtggcctggaatgccctgctgctcctcttcttctggacgcgcccagcacctggcaggccaccctcagtcagcgctctcgatggcgaccccgccagcctcacccgggaagtgattcgcctggcccaagacgccgaggtggagctggagcggcagcgtgggctgctgcagcagatcggggatgccctgtcgagccagcgggggagggtgcccaccgcggcccctcccgcccagccgcgtgtgcctgtgacccccgcgccggcggtgattcccatcctggtcatcgcctgtgaccgcagcactgttcggcgctgcctggacaagctgctgcattatcggccctcggctgagctcttccccatcatcgttagccaggactgcgggcacgaggagacggcccaggccatcgcctcctacggcagcgcggtcacgcacatccggcagcccgacctgagcagcattgcggtgccgccggaccaccgcaagttccagggctactacaagatcgcgcgccactaccgctgggcgctgggccaggtcttccggcagtttcgcttccccgcggccgtggtggtggaggatgacctggaggtggccccggacttcttcgagtactttcgggccacctatccgctgctgaaggccgacccctccctgtggtgcgtctcggcctggaatgacaacggcaaggagcagatggtggacgccagcaggcctgagctgctctaccgcaccgactttttccctggcctgggctggctgctgttggccgagctctgggctgagctggagcccaagtggccaaaggccttctgggacgactggatgcggcggccggagcagcggcaggggcgggcctgcatacgccctgagatctcaagaacgatgacctttggccgcaagggtgtgagccacgggcagttctttgaccagcacctcaagtttatcaagctgaaccagcagtttgtgcacttcacccagctggacctgtcttacctgcagcgggaggcctatgaccgagatttcctcgcccgcgtctacggtgctccccagctgcaggtggagaaagtgaggaccaatgaccggaaggagctgggggaggtgcgggtgcagtatacgggcagggacagcttcaaggctttcgccaaggctctgggtgtcatggatgaccttaagtcgggggttccgagagctggctaccggggtattgtcaccttccagttccggggccgccgtgtccacctggcgcccccactgacgtgggagggctatgatcctagctggaattagcacctgcctgtccttcctgggcccctccttgccacatcatgagctgaggtgggaccacagtccccaggctgcatcggcctgcctgtgtttccctcttaggtgcatttatctttttgatttttccgagtggcatttaagtgcacaaatgataacaagaggattattctcccgttctcaagggagtcagatcaggggaactattctagggtatgttgcggggtattaagcaggaaaccactgtgtggtggggggcactgggcttgttggggccagaaatgtccacgtcctgagctttctcctggagcatgtgcagagagtttggcaacgttcgctctcttgaccagaccccttctccctgacctggctcttccagccagggcacgagccctccttctatacctgctccccttcccccagtggggactgagttatgggagaaggggacatatttgtggccaaaatgatactaaccaaaggggcttccttgtcagggcctggtggagttggtgggtcatcggggctcactgcctcctgcccttctctcctgtctgacccccacttagcccttctctccttgcagcctagcagtttatagttctgagatggaaagttgaagggggcaagcaagacctctcctcagcccatgcccagctgtcaggagagaggtgcagggaggaaggccttgtgctgggacaacctctctcttgccttacctcagagagggactatgccctgacccctcctttctgaaaatcagtgccctccctgttgctctaggaggctcctgctggcttggtagaagacagaattcgatctgcctgtccctttttcccctggggtttgacacacaggctcctctcagcatgaggtggagcagtgaccaggtggagcagtgaccaggacgcctctggcccagtgctgcccagcctccccgcccgctcccaggcgccccatgtcctcacaggccaggacgccatggcaggatggagaggacttggtggatttttgtttcttgcctgacctcagtttcatgaaagaaagtggaagctacagaattattttctaaaataaaggctgaattgtctg

SEQ ID NO: 17112 - DNA, 2246 bp, Homo sapiens
  source 1..2246: mol_type = unassigned DNA
agaaagggctggcgagtcgaaaggcgaggcggccgcggcagcgcttgggacgcgcctgggcaccgggctcgctccctgcgccccggagcaggccaagttcggggccaggacgtcgggaggacctggtgcatggctgcctcctaatcccatagtccagaggaggcatccctaggactgcgggcaagggagccgggcaagcccagggcagccttgaaccgtcccctggcctgccctccccggtgggggccaggatgctgaagaagcagtctgcagggcttgtgctgtggggcgctatcctctttgtggcctggaatgccctgctgctcctcttcttctggacgcgcccagcacctggcaggccaccctcagtcagcgctctcgatggcgaccccgccagcctcacccgggtcttccggcagtttcgcttccccgcggccgtggtggtggaggatgacctggaggtggccccggacttcttcgagtactttcgggccacctatccgctgctgaaggccgacccctccctgtggtgcgtctcggcctggaatgacaacggcaaggagcagatggtggacgccagcaggcctgagctgctctaccgcaccgactttttccctggcctgggctggctgctgttggccgagctctgggctgagctggagcccaagtggccaaaggccttctgggacgactggatgcggcggccggagcagcggcaggggcgggcctgcatacgccctgagatctcaagaacgatgacctttggccgcaagggtgtgagccacgggcagttctttgaccagcacctcaagtttatcaagctgaaccagcagtttgtgcacttcacccagctggacctgtcttacctgcagcgggaggcctatgaccgagatttcctcgcccgcgtctacggtgctccccagctgcaggtggagaaagtgaggaccaatgaccggaaggagctgggggaggtgcgggtgcagtatacgggcagggacagcttcaaggctttcgccaaggctctgggtgtcatggatgaccttaagtcgggggttccgagagctggctaccggggtattgtcaccttccagttccggggccgccgtgtccacctggcgcccccactgacgtgggagggctatgatcctagctggaattagcacctgcctgtccttcctgggcccctccttgccacatcatgagctgaggtgggaccacagtccccaggctgcatcggcctgcctgtgtttccctcttaggtgcatttatctttttgatttttccgagtggcatttaagtgcacaaatgataacaagaggattattctcccgttctcaagggagtcagatcaggggaactattctagggtatgttgcggggtattaagcaggaaaccactgtgtggtggggggcactgggcttgttggggccagaaatgtccacgtcctgagctttctcctggagcatgtgcagagagtttggcaacgttcgctctcttgaccagaccccttctccctgacctggctcttccagccagggcacgagccctccttctatacctgctccccttcccccagtggggactgagttatgggagaaggggacatatttgtggccaaaatgatactaaccaaaggggcttccttgtcagggcctggtggagttggtgggtcatcggggctcactgcctcctgcccttctctcctgtctgacccccacttagcccttctctccttgcagcctagcagtttatagttctgagatggaaagttgaagggggcaagcaagacctctcctcagcccatgcccagctgtcaggagagaggtgcagggaggaaggccttgtgctgggacaacctctctcttgccttacctcagagagggactatgccctgacccctcctttctgaaaatcagtgccctccctgttgctctaggaggctcctgctggcttggtagaagacagaattcgatctgcctgtccctttttcccctggggtttgacacacaggctcctctcagcatgaggtggagcagtgaccaggtggagcagtgaccaggacgcctctggcccagtgctgcccagcctccccgcccgctcccaggcgccccatgtcctcacaggccaggacgccatggcaggatggagaggacttggtggatttttgtttcttgcctgacctcagtttcatgaaagaaagtggaagctacagaattattttctaaaataaaggctgaattgtctg

SEQ ID NO: 17113 - DNA, 693 bp, Homo sapiens
  source 1..693: mol_type = unassigned DNA
gagagaagctgcactttggtggatctgatttgggattctcagttttgaaaatggagtgctgaatggggatttgatgatctcctggagagcaactgagacaagagaagaaaggtaaggctcctgtctcatttcccacttaatgtcttgctgtgcctgtgcagaaggtgttgagctggcgagttcgcggaggctactattcaggaaatcttatccagatgagtacactggaagctacacctctccattactctgtccaggtgcatggctgcctcctaatcccatagtccagaggaggcatccctaggactgcgggcaagggagccgggcaagcccagggcagccttgaaccgtcccctggcctgccctccccggtgggggccaggatgctgaagaagcagtctgcagggcttgtgctgtggggcgctatcctctttgtggcctggaatgccctgctgctcctcttcttctggacgcgcccagcacctggcaggccaccctcagtcagcgctctcgatggcgaccccgccagcctcacccgggaagtgattcgcctggcccaagacgccgaggtggagctggagcggcagcgtgggctgctgcagcagatcggggatgccctgtcgagccagcgggggagggtgcccaccgcggcccctcccgcccagccgcgtgtgcctgtgacccccgcgccgg

SEQ ID NO: 17114 - DNA, 878 bp, Homo sapiens
  source 1..878: mol_type = unassigned DNA
ggcgagtcgaaaggcgaggcggccgcggcagcgcttgggacgcgcctgggcaccgggctcgctccctgcgccccggagcaggccaagttcggggccaggacgtcgggaggacctgagcctggcagagagcaggtgtgtgatacacgtcgtcaggtgcatggctgcctcctaatcccatagtccagaggaggcatccctaggactgcgggcaagggagccgggcaagcccagggcagccttgaaccgtcccctggcctgccctccccggtgggggccaggatgctgaagaagcagtctgcagggcttgtgctgtggggcgctatcctctttgtggcctggaatgccctgctgctcctcttcttctggacgcgcccagcacctggcaggccaccctcagtcagcgctctcgatggcgaccccgccagcctcacccgggaagtgattcgcctggcccaagacgccgaggtggagctggagcggcagcgtgggctgctgcagcagatcggggatgccctgtcgagccagcgggggagggtgcccaccgcggcccctcccgcccagccgcgtgtgcctgtgacccccgcgccggcggtgattcccatcctggtcatcgcctgtgaccgcagcactgttcggcgctgcctggacaagctgctgcattatcggccctcggctgagctcttccccatcatcgttagccaggactgcgggcacgaggagacggcccaggccatcgcctcctacggcagcgcggtcacgcacatccggcagcccgacctgagcagcattgcggtgccgccggaccaccgcaagttccagggctactacaagatcgcgcgccactaccgctgggcgctgggccaggtcttccggcagtt

SEQ ID NO: 17115 - DNA, 564 bp, Homo sapiens
  source 1..564: mol_type = unassigned DNA
ctctcttcgctttctttactcagaactgaagctctcattccccacccaccaaggaaaaacaaaagggaagaagccacagctggccccggcttgctttggcacaggtgcatggctgcctcctaatcccatagtccagaggaggcatccctaggactgcgggcaagggagccgggcaagcccagggcagccttgaaccgtcccctggcctgccctccccggtgggggccaggatgctgaagaagcagtctgcagggcttgtgctgtggggcgctatcctctttgtggcctggaatgccctgctgctcctcttcttctggacgcgcccagcacctggcaggccaccctcagtcagcgctctcgatggcgaccccgccagcctcacccgggaagtgattcgcctggcccaagacgccgaggtggagctggagcggcagcgtgggctgctgcagcagatcggggatgccctgtcgagccagcgggggagggtgcccaccgcggcccctcccgcccagccgcgtgtgcctgtgacccccgcgccggcggtgattcccatcctggtcatcg

SEQ ID NO: 17116 - DNA, 1104 bp, Homo sapiens
  source 1..1104: mol_type = unassigned DNA
ggccagcgctggggatcgggcctggggcctggattgcgacccgcggcgggccgcggctcctagccgagacggggcgggcgggaaccaggttaacacagaaatctgcctcctgggccatgccgcttctaaggcctgtttcttctcatgagccccagcacaagacagatgggccagttctcacagtggataacttcccctgcctgagcaagagatgggatagtatctgggatctgtccatcaccagactctgagcttaataaggcagctgaatgaagggaggtaacggacccctgagaggggcactgaagtctgcagtggggggggaggggcctggacacaccccttcccccccagactcctccccgtcagggtcagctcagccatggactttggacctggataagaagagagaagctgcactttggtggatctgatttgggattctcagttttgaaaatggagtgctgaatggggatttgatgatctcctggagagcaactgagacaagagaagaaaggtgcatggctgcctcctaatcccatagtccagaggaggcatccctaggactgcgggcaagggagccgggcaagcccagggcagccttgaaccgtcccctggcctgccctccccggtgggggccaggatgctgaagaagcagtctgcagggcttgtgctgtggggcgctatcctctttgtggcctggaatgccctgctgctcctcttcttctggacgcgcccagcacctggcaggccaccctcagtcagcgctctcgatggcgaccccgccagcctcacccgggaagtgattcgcctggcccaagacgccgaggtggagctggagcggcagcgtgggctgctgcagcagatcggggatgccctgtcgagccagcgggggagggtgcccaccgcggcccctcccgcccagccgcgtgtgcctgtgacccccgcgccggcggtgattcccatcctggtcatcgcctgtgaccgcagcactgttcggcgctgcctggacaagctgctgcattatcggccctcggctgagctcttccccatcatcgttagccaggactgcgggcacgaggagacggcccaggccatcgcctc

SEQ ID NO: 17117 - DNA, 572 bp, Homo sapiens
  source 1..572: mol_type = unassigned DNA
gaaagggctggcgagtcgaaaggcgaggcggccgcggcagcgcttgggacgcgcctgggcaccgggctcgctccctgcgccccggagcaggccaagttcggggccaggacgtcgggaggacctgagcctggcagagagcaggtgtgtgatacacgtcgtcaggtgactgaccgaggaattcagggcaaacagatcatctcaatttgccttgctgatgtgccagctgggattacgctgatggatgaagctcttcagagctatgggcaatatctacatatttgattgtcaagaaacttcgtgtggaaatagcttcaaacttacacaaattgcaagaataaaaaatagtgcatggctgcctcctaatcccatagtccagaggaggcatccctaggactgcgggcaagggagccgggcaagcccagggcagccttgaaccgtcccctggcctgccctccccggtgggggccaggatgctgaagaagcagtctgcagggcttgtgctgtggggcgctatcctctttgtggcctggaatgccctgctgctcctcttcttctggacgcgcccagcacct

SEQ ID NO: 17118 - DNA, 549 bp, Homo sapiens
  source 1..549: mol_type = unassigned DNA
aggcttttccatggtgcttccgccaaagcttgtgaccgagtccttcccgcctagggctggtgggcctcccctgctggtgcatggctgcctcctaatcccatagtccagaggaggcatccctaggactgcgggcaagggagccgggcaagcccagggcagccttgaaccgtcccctggcctgccctccccggtgggggccaggatgctgaagaagcagtctgcagggcttgtgctgtggggcgctatcctctttgtggcctggaatgccctgctgctcctcttcttctggacgcgcccagcacctggcaggccaccctcagtcagcgctctcgatggcgaccccgccagcctcacccgggaagtgattcgcctggcccaagacgccgaggtggagctggagcggcagcgtgggctgctgcagcagatcggggatgccctgtcgagccagcgggggagggtgcccaccgcggcccctcccgcccagccgcgtgtgcctgtgacccccgcgccggcggtgattcccatcctggtcatcgcctgtgaccgcag

SEQ ID NO: 17119 - DNA, 555 bp, Homo sapiens
  source 1..555: mol_type = unassigned DNA
aaataaccgggagacaagctttcggaggcttttgactgactggatgtgggaatgttgtggaagacttctggcctgccatttcctgagaacgggactgctgagagaggagctgggaggagcactgcaaatttcactttggacacgtgcatggctgcctcctaatcccatagtccagaggaggcatccctaggactgcgggcaagggagccgggcaagcccagggcagccttgaaccgtcccctggcctgccctccccggtgggggccaggatgctgaagaagcagtctgcagggcttgtgctgtggggcgctatcctctttgtggcctggaatgccctgctgctcctcttcttctggacgcgcccagcacctggcaggccaccctcagtcagcgctctcgatggcgaccccgccagcctcacccgggaagtgattcgcctggcccaagacgccgaggtggagctggagcggcagcgtgggctgctgcagcagatcggggatgccctgtcgagccagcgggggagggtgcccaccgcggcccctcccgcccagccgc

SEQ ID NO: 17120 - DNA, 619 bp, Homo sapiens
  source 1..619: mol_type = unassigned DNA
gatgtcaggggcgtgggtcctgatcacatggcagcagcccttcttggggaagtcagctacccagcagcctgtagtcctcggctacccaccctcaccgcctggggtcccatggtgcatggctgcctcctaatcccatagtccagaggaggcatccctaggactgcgggcaagggagccgggcaagcccagggcagccttgaaccgtcccctggcctgccctccccggtgggggccaggatgctgaagaagcagtctgcagggcttgtgctgtggggcgctatcctctttgtggcctggaatgccctgctgctcctcttcttctggacgcgcccagcacctggcaggccaccctcagtcagcgctctcgatggcgaccccgccagcctcacccgggaagtgattcgcctggcccaagacgccgaggtggagctggagcggcagcgtgggctgctgcagcagatcggggatgccctgtcgagccagcgggggagggtgcccaccgcggcccctcccgcccagccgcgtgtgcctgtgacccccgcgccggcggtgattcccatcctggtcatcgcctgtgaccgcagcactgttcggcgctgcctggacaagctgctgcatt

SEQ ID NO: 17121 - DNA, 607 bp, Homo sapiens
  source 1..607: mol_type = unassigned DNA
gaaaagagccacgaaataaccgggagacaagctttcggaggcttttgactgactggatgtgggaatgttgtggaagacttctggcctgccatttcctgagaacgggactgctgagagaggagctgggaggagcactgcaaatttcactttggacacgtgagtcagaggtgcatggctgcctcctaatcccatagtccagaggaggcatccctaggactgcgggcaagggagccgggcaagcccagggcagccttgaaccgtcccctggcctgccctccccggtgggggccaggatgctgaagaagcagtctgcagggcttgtgctgtggggcgctatcctctttgtggcctggaatgccctgctgctcctcttcttctggacgcgcccagcacctggcaggccaccctcagtcagcgctctcgatggcgaccccgccagcctcacccgggaagtgattcgcctggcccaagacgccgaggtggagctggagcggcagcgtgggctgctgcagcagatcggggatgccctgtcgagccagcgggggagggtgcccaccgcggcccctcccgcccagccgcgtgtgcctgtgacccccgcgccggcggt

SEQ ID NO: 17122 - DNA, 3183 bp, Homo sapiens
  source 1..3183: mol_type = unassigned DNA
atgtagggataatctttatagatgcaatttagccctgccaaaagtctgtttataatgatgaatagtaaatgaagaaacttacattttgcattaccgaatgagcttgactttctcttttcccctgaataggaagggaaaaggccgaggcatcagcgtgtgaagaccgcaaagacgatcccgagtacagttgtgaacagcattgctgctaggctcctcctgcagatcatctgaaatgaacctctcttattgatttttattggcctagagccaggagtactgcattcagttgactttcagggtaaaaagaaaacagtcctggttgttgtcatcataaacatatggaccagtgtgatggtgaaatgagatgaggctccgcaatggaactgtagccactgctttagcatttatcacttccttccttactttgtcttggtatactacatggcaaaatgggaaagaaaaactgattgcttatcaacgagaattccttgctttgaaagaacgtcttcgaatagctgaacacagaatctcacagcgctcttctgaattaaatacgattgtgcaacagttcaagcgtgtaggagcagaaacaaatggaagtaaggatgcgttgaataagttttcagataataccctaaagctgttaaaggagttaacaagcaaaaaatctcttcaagtgccaagtatttattatcatttgcctcatttattgaaaaatgaaggaagtcttcaacctgctgtacagattggcaacggaagaacaggagtttcaatagtcatgggcattcccacagtgaagagagaagttaaatcttacctcatagaaactcttcattcccttattgataacctgtatcctgaagagaagttggactgtgttatagtagtcttcataggagagacagatattgattatgtacatggtgttgtagccaacctggagaaagaattttctaaagaaatcagttctggcttggtggaagtcatatcaccccctgaaagctattatcctgacttgacaaacctaaaggagacatttggagactccaaagaaagagtaagatggagaacaaagcaaaacctagattactgttttctaatgatgtatgctcaagaaaagggcatatattacattcagcttgaagatgatattattgtcaaacaaaattattttaataccataaaaaattttgcacttcaactttcttctgaggaatggatgattctagagttttcccagctgggcttcattggtaaaatgtttcaagcgccggatcttactctgattgtagaattcatattcatgttttacaaggagaaacccattgattggctcctggaccatattctctgggtgaaagtctgcaaccctgaaaaagatgcaaaacattgtgatagacagaaagcaaatctgcgaattcgcttcagaccttcccttttccaacatgttggtctgcactcatcactatcaggaaaaatccaaaaactcacggataaagattatatgaaaccattacttcttaaaatccatgtaaacccacctgcggaggtatctacttccttgaaggtctaccaagggcatacgctggagaaaacttacatgggagaggatttcttctgggctatcacaccgatagctggagactacatcttgtttaaatttgataaaccagtcaatgtagaaagttatttgttccatagcggcaaccaagaacatcctggagatattctgctaaacacaactgtggaagttttgccttttaagagtgaaggtttggaaataagcaaagaaaccaaagacaaacgattagaagatggctatttcagaataggaaaatttgagaatggtgttgcagaaggaatggtggatccaagtctcaatcccatttcagcctttcgactttcagttattcagaattctgctgtttgggccattcttaatgagattcatattaaaaaagccaccaactgatcatctgagaaaccaacacattttttcctgtgaatttgttaattaaagatagttaagcatgtatcttttttttatttctacttgaacactacctcttgtgaagtctactgtagataagacgattgtcatttccacttggaaagtgaatctcccataataattgtatttgtttgaaactaagctgtcctcagattttaacttgactcaaacatttttcaattatgacagcctgttaatatgacttgtactattttggtattatactaatacataagagttgtacatattgttacattctttaaatttgagaaaaactaatgttacatacattttatgaagggggtacttttgaggttcacttattttactattatagaccctcttttatagattatcagggattatatatataaatatataaatatacataaaaatgttatggaattaatttattagaaacacttaagaagtacatatttttgtgcagtagatttttgaatcgatactttttttgaaaaccagtttccttgcttttttaagttctttctatatttttctttggaaatgcaaacattacaaaccaatgccatttttcaaatgcactgccatttaagattgattatagatggatttcttaattgaagtacttttataatcacagtgactgaacaaaatattttcaaagacatttgtcattccttaaagccaagattttaaagactaatgtccttcctgagggttactttactatactgtgtatggtgtatagccacagaaagtcagtctgataaattttcaatgtgtaagtgtgatgcattcaacccagattattgtagacttaacttattatatttcctctgatatgtaaaatgacaaactcttctttcctttttaatctttgtctttaatccatgaattaggtgcattatctgctgttgattcttttatatctgcactcattttatgacgtcagacaaaatgttttctaggtgttgctattgtatgagtcataattggtataattttaaagaaaattgtaatattgttttttggtgaaatatattattagtagtatattttccaaaatgattttattgtagtatgaactgataagtgagtcccgtgtccaagagactgtatttattactcttaaacacgctattccaaatgatattactactataaacaaagaatattaccggtctcagcaa

SEQ ID NO: 17123 - DNA, 8382 bp, Homo sapiens
  source 1..8382: mol_type = unassigned DNA
cgcagcggcggcggcagcggcggcggcggctacagcagctccgccggcagccgcgggagcacggcgacgccagcggcgggaagggaaaaggccgaggcatcagcgtgtgaagaccgcaaagacgatcccgagtacagttgtgaacagcattgctgctaggctcctcctgcagatcatctgaaatgaacctctcttattgatttttattggcctagagccaggagtactgcattcagttgactttcagggtaaaaagaaaacagtcctggttgttgtcatcataaacatatggaccagtgtgatggtgaaatgagatgaggctccgcaatggaactgtagccactgctttagcatttatcacttccttccttactttgtcttggtatactacatggcaaaatgggaaagaaaaactgattgcttatcaacgagaattccttgctttgaaagaacgtcttcgaatagctgaacacagaatctcacagcgctcttctgaattaaatacgattgtgcaacagttcaagcgtgtaggagcagaaacaaatggaagtaaggatgcgttgaataagttttcagataataccctaaagctgttaaaggagttaacaagcaaaaaatctcttcaagtgccaagtatttattatcatttgcctcatttattgaaaaatgaaggaagtcttcaacctgctgtacagattggcaacggaagaacaggagtttcaatagtcatgggcattcccacagtgaagagagaagttaaatcttacctcatagaaactcttcattcccttattgataacctgtatcctgaagagaagttggactgtgttatagtagtcttcataggagagacagatattgattatgtacatggtgttgtagccaacctggagaaagaattttctaaagaaatcagttctggcttggtggaagtcatatcaccccctgaaagctattatcctgacttgacaaacctaaaggagacatttggagactccaaagaaagagtaagatggagaacaaagcaaaacctagattactgttttctaatgatgtatgctcaagaaaagggcatatattacattcagcttgaagatgatattattgtcaaacaaaattattttaataccataaaaaattttgcacttcaactttcttctgaggaatggatgattctagagttttcccagctgggcttcattggtaaaatgtttcaagcgccggatcttactctgattgtagaattcatattcatgttttacaaggagaaacccattgattggctcctggaccatattctctgggtgaaagtctgcaaccctgaaaaagatgcaaaacattgtgatagacagaaagcaaatctgcgaattcgcttcagaccttcccttttccaacatgttggtctgcactcatcactatcaggaaaaatccaaaaactcacggataaagattatatgaaaccattacttcttaaaatccatgtaaacccacctgcggaggtatctacttccttgaaggtctaccaagggcatacgctggagaaaacttacatgggagaggatttcttctgggctatcacaccgatagctggagactacatcttgtttaaatttgataaaccagtcaatgtagaaagttatttgttccatagcggcaaccaagaacatcctggagatattctgctaaacacaactgtggaagttttgccttttaagagtgaaggtttggaaataagcaaagaaaccaaagacaaacgattagaagatggctatttcagaataggaaaatttgagaatggtgttgcagaaggaatggtggatccaagtctcaatcccatttcagcctttcgactttcagttattcagaattctgctgtttgggccattcttaatgagattcatattaaaaaagccaccaactgatcatctgagaaaccaacacattttttcctgtgaatttgttaattaaagatagttaagcatgtatcttttttttatttctacttgaacactacctcttgtgaagtctactgtagataagacgattgtcatttccacttggaaagtgaatctcccataataattgtatttgtttgaaactaagctgtcctcagattttaacttgactcaaacatttttcaattatgacagcctgttaatatgacttgtactattttggtattatactaatacataagagttgtacatattgttacattctttaaatttgagaaaaactaatgttacatacattttatgaagggggtacttttgaggttcacttattttactattatagaccctcttttatagattatcagggattatatatataaatatataaatatacataaaaatgttatggaattaatttattagaaacacttaagaagtacatatttttgtgcagtagatttttgaatcgatactttttttgaaaaccagtttccttgcttttttaagttctttctatatttttctttggaaatgcaaacattacaaaccaatgccatttttcaaatgcactgccatttaagattgattatagatggatttcttaattgaagtacttttataatcacagtgactgaacaaaatattttcaaagacatttgtcattccttaaagccaagattttaaagactaatgtccttcctgagggttactttactatactgtgtatggtgtatagccacagaaagtcagtctgataaattttcaatgtgtaagtgtgatgcattcaacccagattattgtagacttaacttattatatttcctctgatatgtaaaatgacaaactcttctttcctttttaatctttgtctttaatccatgaattaggtgcattatctgctgttgattcttttatatctgcactcattttatgacgtcagacaaaatgttttctaggtgttgctattgtatgagtcataattggtataattttaaagaaaattgtaatattgttttttggtgaaatatattattagtagtatattttccaaaatgattttattgtagtatgaactgataagtgagtcccgtgtccaagagactgtatttattactcttaaacacgctattccaaatgatattactactataaacaaagaatattaccggtctcagcaatcagtgatctttataaaagtacttttaaaaaatgatgaattatcaccaggcgctgtggctcacgcctgtaatcccagcactttgggaggccgaggcgggcggatcacgaggtcaggagatcaagaccatcctggctaacacggtgaaaccctgtctctactaaaaatacaaaaaattagccaggcgtggtggcaggtgcctgtaatcccagctacttgggaggctgaggcaggagaatggcgtgaacccaggaggcagagctggcagtgagctgagatcgcaccactgcactccagcctgggcgacacagctagactccgtctcaaaaaaaaaaaaagatgaagtatcaacatcagttcccagccagtctgcttggacacactggggtgccacaagtgggttgcaggttggttgcagacgggcagagatggattctgctgagctttcagagtgaccactggctggggcctagcgctggggcaaggttccagctggctgcctctagcctggaggagcttcatctagttacccaatgtgctgaaccaacagcatgaaatagcatcatttcctgtgctgtgttacaaagtgcaaacgtttggaaacactgatacagtacaattatttccatcactccatgttgttataatttttagttacttttcttgattgaaaagtcaatcacattgccaaaaatgatttttatgtcagttaaaggccagttgaaatttttttattaggatgttttaaatttacttttcactttcttgaatttttttcttctcaaatttccttggcccagtgcccatgagcaaatttcattcaaaaacaggaataaccttttgtcataaaattttggcaccagcttggtatactaaattactgcaaagataactgagtaccagaagtaaaaatctctgcaggtgggcttaggagtactcttgggtccctggttcctcagttgccaactctggtttcatgaagaaagaccatgctctgaaaatctagggaggagaaagttattgcagcacctggtgtgatttgttacaacttctttaaagacagcctgcctggctagctttttcctgttttcatgcagtttgccctcccagcattggtccacctgttgttcccaagaaactcattcttgttcccaagactccttttagccaaatctttcctatcattccaggacttttttgtgcttctctccccatgaatctacccgtgcctagggtgtgtgccaggcacgtggcaggtggccagtcagcatctggatgtgagaccaattattccagcctgccctcctctttctctttttatcattttgtattatttttgagacagggtctcgctttgttgcccaggctggagtgcagtggtgctctcatagctcactgcagcctcgatctctggcctcaagcaatcctcctgcctcagcctcccaaagtgctgggattataggtgtgtgccaccatgtccagccccctttctctctcttaactccctctccctgctgtcgttgccatactcttgcatacacaatcggttgtctagtttttgattgtttgtgtgtatggtgtgtgctgtctctctgaccagatttcaggttcctgaggcgagcctgcagctcatactgctcatctgtcctctcctatggtgggtgctcagggcctctcactgttagttactccctcctttctgcccagttctgcactcaactagtagaagcagccatcctttccccaagcaggaaattgtagtggtcgcccttaagagcagtgtgagggcagaagattaagggaggggaagagtccctggaactggaagaaggtaaatactttgccttgagagggcgccgaatcattttaccaaaatagtaaatggaaaaagtgtcaaaggttgggactagttttaaaaacacatatagccagtagacacatgggggctgtttaaataaaaacatttttttacccggttctgccatcacacacactagtgacattccaagtactcagtggccatgtggagctagtggccaccacacttgacaccacggatgcagaacttttccatcactgcagaaagctctgttgaacagtactgtgtccagagtgctaattatgaacagcttagaaaccacaattaatacattctcatgaggttaaaagcagacatgggaatagaacataatgcaaatgatgatgaatattttgggtgagaagagaaagctgaggacccatttctaggattctaagatgtaagatttcttaagttctttatcttagtctcatgcattctccacatcacgcgctgtaccatactgtgtagtcagaacagacagtgtgattgaaaagctttggaaaaagttaacacaaaggattatttagcacataggctgtagatacgtatgtgtgtatttgttcaacaattggagatggttgaatacccttgaacaaagtgtgtatcttctcaaatcagtggttgcactagtcaataattagaaggtgttgttatttttaaaactataagcaaaattatgaaggcctttaaaaaatctatcataataatgaaaaagaggttgtctcccaacagtgctgtccctcaaagaaaagactggttatgtggaaacagcacgtttggagagattattctagtgaataacagtgtatatttgtggtaggcaaatttctaagaatgacccctactgacacccccaccaatgaccttgtataatatcctcccactttgagcatgggtggaacctgtttgatccatgattatatcatgttatgtagcaaaaggaagactgtctgggggtggctaatcaaatcttgtgactcctttaaaagcagagagttttctcgggctggtggcagaagtcaagagacaaagcagaaggacctcaggcaccattgctgttttaaggtagagggggctgcatgagaaggaatgcacatggctttgaggagctgagagaggccttggctaacagcaaaggagctgggaactgcagtcctacagccacgggaactgaattcagcccataagctcattcataggcttggaaaggcattcatctccagtctccagataagacccagcctggccaacactttgaatccagccttgtgagaccctaagccgagaactcacttaagcctgcttggacttctgacctacagaactatgagataataaatcagtggtgttttaagctgctaaatttgtggcaatttgttatgtaggaataggaaatgaatacagtattttaaaagaggtaaagaggaaatcttcatacttgattccctgtagtatgctggatatttcttggtaaatgcatgaataaagtctttagtagcaagtcatgtacctggaccttgttggggatgttctcgccagagatctcaattagtcttcattggacgtttgttggcaaagttgcagcatcttactgagtagcgtttggtaaaggaactgctagaatgagactataggaataggactgaaacagtgtgtaagggatcttttttatttctagaagaggtgttactttatactgatttagactgctctgagcctgtcagaagtaaattcaagaatgattaacagtggtattttagatacattaagagcaaaaataacctttgccttgtagagatcagataatctgtgtatcgagggatttaattttttttaaccaaaacttagtttctctttttatcatctagcacagatcaaatcctgtatgggccagccaaatgtttgtagtttgagaatgttttgcaaatacctctctgcttccaagccattaatagctaatgaagttttattttggtttgtccattaatttttctgcttatttttactgtattgccatgtccttgatacgagacaagtagaactaaaagagagaaaatgagaggttaagactgtcagaagatgagaaatgtgagtcataaccataccttagtgttttaagggaactttatccagtccaatccctttatagaaaaggaacttttccaagttatgttgcagtatttatagtgtgtaaaattttgtttgactttggtagttgtgcattttaaattatgaatcttatatgctacgataactagtatgcttactttctttaatgcatgtgatcatacaatgctaaaaaggtattttttaaagacccaaccaaactgaggattttgttatacatatctgtatcaacacctatatataaactcttcttcttacctgaaacactccttcacccggtttgggcactaactagatcattttcaaaggaacaaacaggaaggagcaagctggcactccagggtgcatctgagctgagaatttagaagacctcattcaagaaagtaaactgagcattgatgggaaagcactttgcgcgaagtaacattcccactgttaatgttgcagtcaaaattgtggaaaaaaaaaagtggtgctaaaattgttctgaaatgaagattgtttgttgtggggaatattttaatactcttggactttagggaggctattttatgtgtcacttgctcctagttgtttcattgtattagtaattagcaaactgtcctggaaccaagggtttggtacttttgcctgattagcattccattatttatttgaaatgctcagtgtttgctcaaatttggtgaaaatatcttttgaagacatattctctgagccttaaaaatggctgctatcgacagtactgtaagatgcactgccagtagatttgatacttttcatttcagtgtaggcagtaatgttttctaagaaagatttagaaatcagcaaagtgtaacaattgtgtttcatttatggaatggaaaaactgaagtgtcccattcagaacactttggaaaggttgtctgcattaggggatgtttctggaagcatcccttagagaagctgcctgaggaatctccttgccaggttgtaccagatttttttttttcttaaatgtattgtatatattttccttaaaatgtcttcattggctgaatgattcctatccgtagtaatattttaggtacttgttggatttttaaaggaagattatttattttcagatttgctgctataattgaaaacctagtaactggtcctgttgattgtgccttcatcactgtttctctgtgccacgaccgttcatgtgtatttgaaataaagaagtttaaaaagccatgttgaattcaagattccttctaataaaaataggtgaaacttaa

SEQ ID NO: 17124 - DNA, 2018 bp, Homo sapiens
  source 1..2018: mol_type = unassigned DNA
aaaatcagtcaccataactttctttttacagacaaaacaaaaccaatgaggagggaatatagtttgaagctgttttgtatttttttccaggaggagaaggaccatataattccagaagggaaaaggccgaggcatcagcgtgtgaagaccgcaaagacgatcccgagtacagttgtgaacagcattgctgctaggctcctcctgcagatcatctgaaatgaacctctcttattgatttttattggcctagagccaggagtactgcattcagttgactttcagggtaaaaagaaaacagtcctggttgttgtcatcataaacatatggaccagtgtgatggtgaaatgagatgaggctccgcaatggaactgtagccactgctttagcatttatcacttccttccttactttgtcttggtatactacatggcaaaatgggaaagaaaaactgattgcttatcaacgagaattccttgctttgaaagaacgtcttcgaatagctgaacacagaatctcacagcgctcttctgaattaaatacgattgtgcaacagttcaagcgtgtaggagcagaaacaaatggaagtaaggatgcgttgaataagttttcagataataccctaaagctgttaaaggagttaacaagcaaaaaatctcttcaagtgccaagtatttattatcatttgcctcatttattgaaaaatgaaggaagtcttcaacctgctgtacagattggcaacggaagaacaggagtttcaatagtcatgggcattcccacagtgaagagagaagttaaatcttacctcatagaaactcttcattcccttattgataacctgtatcctgaagagaagttggactgtgttatagtagtcttcataggagagacagatattgattatgtacatggtgttgtagccaacctggagaaagaattttctaaagaaatcagttctggcttggtggaagtcatatcaccccctgaaagctattatcctgacttgacaaacctaaaggagacatttggagactccaaagaaagagtaagatggagaacaaagcaaaacctagattactgttttctaatgatgtatgctcaagaaaagggcatatattacattcagcttgaagatgatattattgtcaaacaaaattattttaataccataaaaaattttgcacttcaactttcttctgaggaatggatgattctagagttttcccagctgggcttcattggtaaaatgtttcaagcgccggatcttactctgattgtagaattcatattcatgttttacaaggagaaacccattgattggctcctggaccatattctctgggtgaaagtctgcaaccctgaaaaagatgcaaaacattgtgatagacagaaagcaaatctgcgaattcgcttcagaccttcccttttccaacatgttggtctgcactcatcactatcaggaaaaatccaaaaactcacggataaagattatatgaaaccattacttcttaaaatccatgtaaacccacctgcggaggtatctacttccttgaaggtctaccaagggcatacgctggagaaaacttacatgggagaggatttcttctgggctatcacaccgatagctggagactacatcttgtttaaatttgataaaccagtcaatgtagaaagttatttgttccatagcggcaaccaagaacatcctggagatattctgctaaacacaactgtggaagttttgccttttaagagtgaaggtttggaaataagcaaagaaaccaaagacaaacgattagaagatggctatttcagaataggaaaatttgagaatggtgttgcagaaggaatggtggatccaagtctcaatcccatttcagcctttcgactttcagttattcagaattctgctgtttgggccattcttaatgagattcatattaaaaaagccaccaactgatcatctgagaaaccaacacattttttcctgtgaatttgttaattaaagatagttaagcatg

SEQ ID NO: 17125 - DNA, 3709 bp, Homo sapiens
  source 1..3709: mol_type = unassigned DNA
agttgtaaaatacagtttgctgtttatacttcgcagccattcattttttagtgtgaagtttaatgtctttcatttttatcagttctttttttcttatggttaagccatgtgaaaatgaattacagtattacagtttcaatagtcatgggcattcccacagtgaagagagaagttaaatcttacctcatagaaactcttcattcccttattgataacctgtatcctgaagagaagttggactgtgttatagtagtcttcataggagagacagatattgattatgtacatggtgttgtagccaacctggagaaagaattttctaaagaaatcagttctggcttggtggaagtcatatcaccccctgaaagctattatcctgacttgacaaacctaaaggagacatttggagactccaaagaaagagtaagatggagaacaaagcaaaacctagattactgttttctaatgatgtatgctcaagaaaagggcatatattacattcagcttgaagatgatattattgtcaaacaaaattattttaataccataaaaaattttgcacttcaactttcttctgaggaatggatgattctagagttttcccagctgggcttcattggtaaaatgtttcaagcgccggatcttactctgattgtagaattcatattcatgttttacaaggagaaacccattgattggctcctggaccatattctctgggtgaaagtctgcaaccctgaaaaagatgcaaaacattgtgatagacagaaagcaaatctgcgaattcgcttcagaccttcccttttccaacatgttggtctgcactcatcactatcaggaaaaatccaaaaactcacggataaagattatatgaaaccattacttcttaaaatccatgtaaacccacctgcggaggtatctacttccttgaaggtctaccaagggcatacgctggagaaaacttacatgggagaggatttcttctgggctatcacaccgatagctggagactacatcttgtttaaatttgataaaccagtcaatgtagaaagttatttgttccatagcggcaaccaagaacatcctggagatattctgctaaacacaactgtggaagttttgccttttaagagtgaaggtttggaaataagcaaagaaaccaaagacaaacgattagaagatggctatttcagaataggaaaatttgagaatggtgttgcagaaggaatggtggatccaagtctcaatcccatttcagcctttcgactttcagttattcagaattctgctgtttgggccattcttaatgagcagagagttttctcgggctggtggcagaagtcaagagacaaagcagaaggacctcaggcaccattgctgttttaaggtagagggggctgcatgagaaggaatgcacatggctttgaggagctgagagaggccttggctaacagcaaaggagctgggaactgcagtcctacagccacgggaactgaattcagcccataagctcattcataggcttggaaaggcattcatctccagtctccagataagacccagcctggccaacactttgaatccagccttgtgagaccctaagccgagaactcacttaagcctgcttggacttctgacctacagaactatgagataataaatcagtggtgttttaagctgctaaatttgtggcaatttgttatgtaggaataggaaatgaatacagtattttaaaagaggtaaagaggaaatcttcatacttgattccctgtagtatgctggatatttcttggtaaatgcatgaataaagtctttagtagcaagtcatgtacctggaccttgttggggatgttctcgccagagatctcaattagtcttcattggacgtttgttggcaaagttgcagcatcttactgagtagcgtttggtaaaggaactgctagaatgagactataggaataggactgaaacagtgtgtaagggatcttttttatttctagaagaggtgttactttatactgatttagactgctctgagcctgtcagaagtaaattcaagaatgattaacagtggtattttagatacattaagagcaaaaataacctttgccttgtagagatcagataatctgtgtatcgagggatttaattttttttaaccaaaacttagtttctctttttatcatctagcacagatcaaatcctgtatgggccagccaaatgtttgtagtttgagaatgttttgcaaatacctctctgcttccaagccattaatagctaatgaagttttattttggtttgtccattaatttttctgcttatttttactgtattgccatgtccttgatacgagacaagtagaactaaaagagagaaaatgagaggttaagactgtcagaagatgagaaatgtgagtcataaccataccttagtgttttaagggaactttatccagtccaatccctttatagaaaaggaacttttccaagttatgttgcagtatttatagtgtgtaaaattttgtttgactttggtagttgtgcattttaaattatgaatcttatatgctacgataactagtatgcttactttctttaatgcatgtgatcatacaatgctaaaaaggtattttttaaagacccaaccaaactgaggattttgttatacatatctgtatcaacacctatatataaactcttcttcttacctgaaacactccttcacccggtttgggcactaactagatcattttcaaaggaacaaacaggaaggagcaagctggcactccagggtgcatctgagctgagaatttagaagacctcattcaagaaagtaaactgagcattgatgggaaagcactttgcgcgaagtaacattcccactgttaatgttgcagtcaaaattgtggaaaaaaaaaagtggtgctaaaattgttctgaaatgaagattgtttgttgtggggaatattttaatactcttggactttagggaggctattttatgtgtcacttgctcctagttgtttcattgtattagtaattagcaaactgtcctggaaccaagggtttggtacttttgcctgattagcattccattatttatttgaaatgctcagtgtttgctcaaatttggtgaaaatatcttttgaagacatattctctgagccttaaaaatggctgctatcgacagtactgtaagatgcactgccagtagatttgatacttttcatttcagtgtaggcagtaatgttttctaagaaagatttagaaatcagcaaagtgtaacaattgtgtttcatttatggaatggaaaaactgaagtgtcccattcagaacactttggaaaggttgtctgcattaggggatgtttctggaagcatcccttagagaagctgcctgaggaatctccttgccaggttgtaccagatttttttttttcttaaatgtattgtatatattttccttaaaatgtcttcattggctgaatgattcctatccgtagtaatattttaggtacttgttggatttttaaaggaagattatttattttcagatttgctgctataattgaaaacctagtaactggtcctgttgattgtgccttcatcactgtttctctgtgccacgaccgttcatgtgtatttgaaataaagaagtttaaaaagccatgttgaattcaagattccttctaataaaaataggtgaaactt

SEQ ID NO: 17126 - DNA, 2446 bp, Homo sapiens
  source 1..2446: mol_type = unassigned DNA
cgcggctctcgccgcccagcccagcccagcccggcccggcccggccctgccgcggaggcgaggccgccagtgtcccgcgcccctgatatctgcagtgagcctgatacctgcctctgcccttctgagcctgttcctcttccctgagtacagggcacaaagcttgcgccctgaggggcggccggcgcgctccctggcccggtccccgcccggccccgggccccccgcccctccccgacccggggccggggcccctgccgccgccgccgccgccttccgacccctgcgccccggccccggtcccccgggccatgcagcctcggccccgcgggcgcccgccgcgcacccgaggagatgaggctccgcaatggcaccttcctgacgctgctgctcttctgcctgtgcgccttcctctcgctgtcctggtacgcggcactcagcggccagaaaggcgacgttgtggacgtttaccagcgggagttcctggcgctgcgcgatcggttgcacgcagctgagcaggagagcctcaagcgctccaaggagctcaacctggtgctggacgagatcaagagggccgtgtcagaaaggcaggcgctgcgagacggagacggcaatcgcacctggggccgcctaacagaggacccccgattgaagccgtggaacggctcacaccggcacgtgctgcacctgcccaccgtcttccatcacctgccacacctgctggccaaggagagcagtctgcagcccgcggtgcgcgtgggccagggccgcaccggagtgtcggtggtgatgggcatcccgagcgtgcggcgcgaggtgcactcgtacctgactgacactctgcactcgctcatctccgagctgagcccgcaggagaaggaggactcggtcatcgtggtgctgatcgccgagactgactcacagtacacttcggcagtgacagagaacatcaaggccttgttccccacggagatccattctgggctcctggaggtcatctcaccctccccccacttctaccctgacttctcccgcctccgagagtcctttggggaccccaaggagagagtcaggtggaggaccaaacagaacctcgattactgcttcctcatgatgtacgcgcagtccaaaggcatctactacgtgcagctggaggatgacatcgtggccaagcccaactacctgagcaccatgaagaactttgcactgcagcagccttcagaggactggatgatcctggagttctcccagctgggcttcattggtaagatgttcaagtcgctggacctgagcctgattgtagagttcattctcatgttctaccgggacaagcccatcgactggctcctggaccatattctgtgggtgaaagtctgcaaccccgagaaggatgcgaagcactgtgaccggcagaaagccaacctgcggatccgcttcaaaccgtccctcttccagcacgtgggcactcactcctcgctggctggcaagatccagaaactgaaggacaaagactttggaaagcaggcgctgcggaaggagcatgtgaacccgccagcagaggtgagcacgagcctgaagacataccagcacttcaccctggagaaagcctacctgcgcgaggacttcttctgggccttcacccctgccgcgggggacttcatccgcttccgcttcttccaacctctaagactggagcggttcttcttccgcagtgggaacatcgagcacccggaggacaagctcttcaacacgtctgtggaggtgctgcccttcgacaaccctcagtcagacaaggaggccctgcaggagggccgcaccgccaccctccggtaccctcggagccccgacggctacctccagatcggctccttctacaagggagtggcagagggagaggtggacccagccttcggccctctggaagcactgcgcctctcgatccagacggactcccctgtgtgggtgattctgagcgagatcttcctgaaaaaggccgactaagctgcgggcttctgagggtaccctgtggccagccctgaagcccacatttctgggggtgtcgtcactgccgtccccggagggccagatacggccccgcccaaagggttctgcctggcgtcgggcttgggccggcctggggtccgccgctggcccggaggccctaggagctggtgctgcccccgcccgccgggccgcggaggaggcaggcggcccccacactgtgcctgaggcccggaaccgttcgcacccggcctgccccagtcaggccgttttagaagagcttttacttgggcgcccgccgtctctggcgcgaacactggaatgcatatactactttatgtgctgtgttttttattcttggatacatttgattttttcacgtaagtccacatatacttctataagagcgtgacttgtaataaagggttaatgaagtgtgtgcctcaaa

SEQ ID NO: 17127 - DNA, 3027 bp, Homo sapiens
  source 1..3027: mol_type = unassigned DNA
ctctggggtctgtgaagccaccaaggatcaaggaatggaagagctgcctgagtgtagagggagttcggtcaggcttcttaaacttggagacttggaaacagaaggccttgtaggccacataggttttcagagactcgcctggcagaggcctggagcgtcctgctgcgtggactgtgggcaccgagccaccaggaggttgttgatctcattcttgctcactggtccctgccagactggtggtgcctctctactgtcgggcagccccacctctgtgctgccccatccacctacagccctcatgcctgggcccagctggaggttctgacaggggccccctggggtggcatgcggacccttcagggtgccccaggcgcagcacaggtctccagagacacaggcaccagggcgttcagagctagtcccctcgctgctgttgactgtccttgagcagccccagggccggtttctcaacctcatttgctcacctgagcaatgaagtgaggtgggctcctggaactgcagcagccaccccccggggccatcgtgaggctaagaatccagtgcagggtgagcaaccagcgaccgctacaaggacagtgaagagctagcaccaggaccttgggtagcccacccgctggagggagcgtgtgctgcaaaaagcaagagtgggctttggaggccaacggatggagcggattcagtctgaggctgttccagcccttgcttaggatccacctacctaggtctggaaatcgtatttccacttcagatgccttctcagaggataaaataacccccggtgggggagagtactggaagagggctaattcccctggttttctccccatgagcattagtgtcagtgtaattttagagtgaccccagctatgtcacgtgtggcaggcacaagaacagatgtcaatgagctattgcagaggtggacacccagatgtgtgcgctggcacactggaggggcccgtagggtggctctagaccgccccctcgtgacggcttgcctaccacctgcaggcgacgttgtggacgtttaccagcgggagttcctggcgctgcgcgatcggttgcacgcagctgagcaggagagcctcaagcgctccaaggagctcaacctggtgctggacgagatcaagagggccgtgtcagaaaggcaggcgctgcgagacggagacggcaatcgcacctggggccgcctaacagaggacccccgattgaagccgtggaacggctcacaccggcacgtgctgcacctgcccaccgtcttccatcacctgccacacctgctggccaaggagagcagtctgcagcccgcggtgcgcgtgggccagggccgcaccggagtgtcggtggtgatgggcatcccgagcgtgcggcgcgaggtgcactcgtacctgactgacactctgcactcgctcatctccgagctgagcccgcaggagaaggaggactcggtcatcgtggtgctgatcgccgagactgactcacagtacacttcggcagtgacagagaacatcaaggccttgttccccacggagatccattctgggctcctggaggtcatctcaccctccccccacttctaccctgacttctcccgcctccgagagtcctttggggaccccaaggagagagtcaggtggaggaccaaacagaacctcgattactgcttcctcatgatgtacgcgcagtccaaaggcatctactacgtgcagctggaggatgacatcgtggccaagcccaactacctgagcaccatgaagaactttgcactgcagcagccttcagaggactggatgatcctggagttctcccagctgggcttcattggtaagatgttcaagtcgctggacctgagcctgattgtagagttcattctcatgttctaccgggacaagcccatcgactggctcctggaccatattctgtgggtgaaagtctgcaaccccgagaaggatgcgaagcactgtgaccggcagaaagccaacctgcggatccgcttcaaaccgtccctcttccagcacgtgggcactcactcctcgctggctggcaagatccagaaactgaaggacaaagactttggaaagcaggcgctgcggaaggagcatgtgaacccgccagcagaggtgagcacgagcctgaagacataccagcacttcaccctggagaaagcctacctgcgcgaggacttcttctgggccttcacccctgccgcgggggacttcatccgcttccgcttcttccaacctctaagactggagcggttcttcttccgcagtgggaacatcgagcacccggaggacaagctcttcaacacgtctgtggaggtgctgcccttcgacaaccctcagtcagacaaggaggccctgcaggagggccgcaccgccaccctccggtaccctcggagccccgacggctacctccagatcggctccttctacaagggagtggcagagggagaggtggacccagccttcggccctctggaagcactgcgcctctcgatccagacggactcccctgtgtgggtgattctgagcgagatcttcctgaaaaaggccgactaagctgcgggcttctgagggtaccctgtggccagccctgaagcccacatttctgggggtgtcgtcactgccgtccccggagggccagatacggccccgcccaaagggttctgcctggcgtcgggcttgggccggcctggggtccgccgctggcccggaggccctaggagctggtgctgcccccgcccgccgggccgcggaggaggcaggcggcccccacactgtgcctgaggcccggaaccgttcgcacccggcctgccccagtcaggccgttttagaagagcttttacttgggcgcccgccgtctctggcgcgaacactggaatgcatatactactttatgtgctgtgttttttattcttggatacatttgattttttcacgtaagtccacatatacttctataagagcgtgacttgtaataaagggttaatgaagtgtgtgcctcaaa

SEQ ID NO: 17128 - DNA, 2710 bp, Homo sapiens
  source 1..2710: mol_type = unassigned DNA
gggccggagggccgcggtgtgccgcggggcagttgcgggttgtcataacggtccccgccggagtgaggcgaggccgcgtcgctcagttctggccgtctagggcccctgtaaggatgagagcgcagaggacgcagggccgctggaggcgcaggtaacgaagctagggtgcggttgggaccgcggctgagctttttccgggacccgtggtgctgaatggagaggacggagacgaagccgagccgcggctcctagcggcggcgccgatgctcgagctgtagctgccaggcgaggatgtgtggagcgcaggcggcgcggggtaaatgagaggtctcgggccccaggacccccggggcccgggatgagttagcgagggcagccgcgggggccagttccgaccgtgacaggccaaggcgacggccgccgcccgcccgccccttccgtgcagaagcagctgctcctttccgcgcccgcccgcctgcgctcccggccctggagaccatgaggttccgcatctacaaacggaaggtgctaatcctgacgctcgtggtggccgcctgcggcttcgtcctctggagcagcaatgggcgacaaaggaagaacgaggccctcgccccaccgttgctggacgccgaacccgcgcggggtgccggcggccgcggtggggaccacccctctgtggctgtgggcatccgcagggtctccaacgtgtcggcggcttccctggtcccggcggtcccccagcccgaggcggacaacctgacgctgcggtaccggtccctggtgtaccagctgaactttgatcagaccctgaggaatgtagataaggctggcacctgggccccccgggagctggtgctggtggtccaggtgcataaccggcccgaatacctcagactgctgctggactcacttcgaaaagcccagggaattgacaacgtcctcgtcatctttagccatgacttctggtcgaccgagatcaatcagctgatcgccggggtgaatttctgtccggttctgcaggtgttctttcctttcagcattcagttgtaccctaacgagtttccaggtagtgaccctagagattgtcccagagacctgccgaagaatgccgctttgaaattggggtgcatcaatgctgagtatcccgactccttcggccattatagagaggccaaattctcccagaccaaacatcactggtggtggaagctgcattttgtgtgggaaagagtgaaaattcttcgagattatgctggccttatacttttcctagaagaggatcactacttagccccagacttttaccatgtcttcaaaaagatgtggaaactgaagcagcaagagtgccctgaatgtgatgttctctccctggggacctatagtgccagtcgcagtttctatggcatggctgacaaggtagatgtgaaaacttggaaatccacagagcacaatatgggtctagccttgacccggaatgcctatcagaagctgatcgagtgcacagacactttctgtacttatgatgattataactgggactggactcttcaatacttgactgtatcttgtcttccaaaattctggaaagtgctggttcctcaaattcctaggatctttcatgctggagactgtggtatgcatcacaagaaaacctgtagaccatccactcagagtgcccaaattgagtcactcttaaataataacaaacaatacatgtttccagaaactctaactatcagtgaaaagtttactgtggtagccatttccccacctagaaaaaatggagggtggggagatattagggaccatgaactctgtaaaagttatagaagactgcagtgaaaatcacagttacaaaagcgacagtcttctatttttgatatttgtccaaacaggacatacaattgaataaaagagtttaggaactggtttctgctttaatacaaaaacaaaatcttgtaaaaggtgtccaaatacatagtaatcttttccagttatgtctgattaagatttaaaactgaaggtttcattttgggagtagggttttaaagctcaatctgttatctgctaaaattgattattgttgatatgagagaagaggggaaattttatttaaattgcatttattaatctttttatctgaaactttgtacacttttccactttcaaaacctattttaagtacagcaaaatttatttaaaactgtcatagcagtaaaaagtattacgatgaaattgttagggtattaatggaacaaacccagtttcactctcttgacacacttattaggaagggattgcttcactggtttaataatttaaaagttatgtttgttaaacaccctgtcagaacagtcattttcagtattagattcctgtactattgtgttttgagtgtgttttggaaccttcatagaacacactttcttttggaatgtatttgattgataagaaagtttaaacattgttttcacctcaatgtagaaatacagtggttttgtttttttttttcttttagtgctgacaaaataaaatactcatttttgcataaaaaggttcctaatccttttgcagaataagttttgtttactctttataccaaaattcagtgaaggcattctacaagttttgagttagcattacattttaatatttactattgctacattgtataattgagtttgaaataaaacccagcttatgacaatgc

SEQ ID NO: 17129 - DNA, 1784 bp, Homo sapiens
  source 1..1784: mol_type = unassigned DNA
ataacggtccccgccggagtgaggcgaggccgcgtcgctcagttctggccgtctagggcccctgtaaggatgagagcgcagaggacgcagggccgctggaggcgcaggtaacgaagctagggtgcggttgggaccgcggctgagctttttccgggacccgtggtgctgaatggagaggacggagaccatgaggttccgcatctacaaacggaaggtgctaatcctgacgctcgtggtggccgcctgcggcttcgtcctctggagcagcaatgggcgacaaaggaagaacgaggccctcgccccaccgttgctggacgccgaacccgcgcggggtgccggcggccgcggtggggaccacccctctgtggctgtgggcatccgcagggtctccaacgtgtcggcggcttccctggtcccggcggtcccccagcccgaggcggacaacctgacgctgcggtaccggtccctggtgtaccagctgaactttgatcagaccctgaggaatgtagataaggctggcacctgggccccccgggagctggtgctggtggtccaggtgcataaccggcccgaatacctcagactgctgctggactcacttcgaaaagcccagggaattgacaacgtcctcgtcatctttagccatgacttctggtcgaccgagatcaatcagctgatcgccggggtgaatttctgtccggttctgcaggtgttctttcctttcagcattcagttgtaccctaacgagtttccaggtagtgaccctagagattgtcccagagacctgccgaagaatgccgctttgaaattggggtgcatcaatgctgagtatcccgactccttcggccattatagagaggccaaattctcccagaccaaacatcactggtggtggaagctgcattttgtgtgggaaagagtgaaaattcttcgagattatgctggccttatacttttcctagaagaggatcactacttagccccagacttttaccatgtcttcaaaaagatgtggaaactgaagcagcaagagtgccctgaatgtgatgttctctccctggggacctatagtgccagtcgcagtttctatggcatggctgacaaggtagatgtgaaaacttggaaatccacagagcacaatatgggtctagccttgacccggaatgcctatcagaagctgatcgagtgcacagacactttctgtacttatgatgattataactgggactggactcttcaatacttgactgtatcttgtcttccaaaattctggaaagtgctggttcctcaaattcctaggatctttcatgctggagactgtggtatgcatcacaagaaaacctgtagaccatccactcagagtgcccaaattgagtcactcttaaataataacaaacaatacatgtttccagaaactctaactatcagtgaaaagtttactgtggtagccatttccccacctagaaaaaatggagggtggggagatattagggaccatgaactctgtaaaagttatagaagactgcagtgaaaatcacagttacaaaagcgacagtcttctatttttgatatttgtccaaacaggacatacaattgaataaaagagtttaggaactggtttctgctttaatacaaaaacaaaatcttgtaaaaggtgtccaaatacatagtaatcttttccagttatgtctgattaagatttaaaactgaaggtttcattttgggagtagggttttaaagctcaatctgttatctgctaaaattgattattgttgatatgagag

SEQ ID NO: 17130 - DNA, 4232 bp, Homo sapiens
  source 1..4232: mol_type = unassigned DNA
gcgagcccgagcaggcagacgcgcggccggcggtctgggggcgcgccgcctcccggtccccaaaatgtgaagcggggagggcggagacgcagagacggcccggccgggcgccctcgccgccctccggcagccgcgccgctccctccgctgcacgcccaggcctgagcagcgaggccaccgggccgcgcgctcccagcttcgctcggacgcggcttcggcccgcagagggttcgtggcccggacgcggcgagagctgggcccaggacggtgcgtccggcctcgcccgcggctgctcgcaccaacaagtttgaacaatgatcaccgtcaaccccgatgggaagataatggtcagaagatgcctggtcaccctgagaccctttcggctttttgtcctgggcatcggcttcttcactctctgcttcctgatgacgtctctgggaggccagttctcggcccggcgcctgggggactcgccattcaccatccgcacagaagtgatggggggccccgagtcccgcggcgtcctgcgcaagatgagcgacctgctggagctgatggtgaagcgcatggacgcactggccaggctggagaacagcagtgagctgcaccgggccggcggcgacctgcactttcccgcagacaggatgccccctggggccggcctcatggagcggatccaggctattgcccagaacgtctccgacatcgctgtgaaggtggaccagatcctgcgccacagtctgctcctgcacagcaaggtgtcagaaggccggcgggaccagtgtgaggcacccagtgaccccaagttccctgactgctcagggaaggtggagtggatgcgtgcccgctggacctctgacccctgctacgccttctttggggtggacggcaccgagtgctccttcctcatctacctcagtgaggtcgagtggttctgccccccgctgccctggaggaaccagacggctgcccagagggcacccaagcccctccccaaagtccaggcagttttccgaagcaacctgtcccaccttctggacctgatgggcagcgggaaggagtccctgatcttcatgaagaagcggaccaagaggctcacagcccagtgggcgctggctgcccagcgcctggcacagaagctgggggccacccagagggaccagaagcagatcctggtccacatcggcttcctgacggaggagtccggggacgtgttcagccctcgggtcctgaagggcgggcccctaggggagatggtgcagtgggcggacattctgactgcactctatgtcctgggccatggcctgcgggtcacagtctccctgaaggagctgcagagtaacttaggggtaccgccaggccggggaagctgcccgctcaccatgcccctgcccttcgacctcatctacaccgactaccacggcctgcagcagatgaagcggcacatgggactctccttcaagaagtaccggtgccgaatcagggtcatcgacaccttcgggacggaacctgcgtacaaccacgaggagtacgccacgctgcacggctaccggaccaactggggctactggaacctcaaccccaagcagttcatgaccatgtttcctcatacccccgacaactccttcatgggcttcgtgtccgaggagctcaacgagacggagaagcggctcatcaaaggcggcaaggccagcaacatggccgtggtgtacggcaaggaggcgagcatctggaaggggaaggagaagttcctgggcatcctgaacaaatacatggagatccatggcaccgtgtactacgagagccagcggccccccgaggtgccagcctttgtgaagaaccacggcctcttaccgcagcctgagtttcagcagctgctgcgcaaggccaaactcttcatcgggtttggcttcccctacgagggccccgcccccctggaggccatcgccaatggttgcatcttcctgcagtcccgcttcagcccgccccacagctccctcaaccacgagttcttccgaggcaagcccacctccagagaggtgttctcccagcatccctacgcggagaacttcatcggcaagccccacgtgtggacagtcgactacaacaactcagaggagtttgaagcagccatcaaggccattatgagaactcaggtagacccctacctaccctacgagtacacctgcgaggggatgctggagcggatccacgcctacatccagcaccaggacttctgcagagctccagaccctgccctaccagaggcccacgccccgcagagcccctttgtcctggcccccaatgccacccacctcgagtgggctcggaacaccagcttggctcctggggcctggccccccgcgcacgccctgcgggcctggctggccgtgcctgggagggcctgcaccgacacctgcctggaccacgggctaatctgtgagccctccttcttccccttcctgaacagccaggacgccttcctcaagctgcaggtgccctgtgacagcaccgagtcggagatgaaccacctgtacccggcgttcgcccagcctggccaggagtgctacctgcagaaggagcctctgctcttcagctgcgccggctccaacaccaagtaccgccggctctgcccctgccgcgacttccgcaagggccaggtggccttgtgccagggctgtctgtgaatccgcctctgccgccctgcctggcacccacgctggctctctcctgccgcgggagaaagcaccagcaggttctgagccctggctgcttgtcctcctcgcaacccccccaggccggagcttccttccttagccgggaagctggcagaggagagccgtgcccgggaataggaggaggcagcatgccgagcccctgggacctcccaggcaggctccggttctctcctggggactcacagaagcatcgtggccaagcaggtgtcggactgctcagagtccgcatggcccaggagcaggtggtcggaggcccctggctttgtgcaaggccggatctgggccaggtggcgaaaggggcccagtcgttcttgggcccaggatggggcctctagacttgcaagggagaggaacagggaccaggctgccccacggtccctgaagggtccaaggaggggccctccccatggccctggagagtgggcctgggtggtacctgctccaggcagggaaactgggggctcgcccttctcctgtgaggggagccaggcacacagggcccattggtgtttgggatgtggacagaggggcagggggctgggagaaggctaagccgaggggtcctgtttgtgcctccccttagtcccttccctcccgatttcccgattcccccaccctccctctacacttgaggaccacagttgggggtgtagggaccacccagaccctggttgaattgtttctctctcctgcttgttccaacccttttcactctgggcttctcccaaaacccatcctggcatgacctgcaactccaggtggtggatttgttccaaagcctcaatccctaccccctccaaggggcaggtttccagtccagcctcagagatcaggctctgggacccctgcctggggggtggccttcatgcactagccacttccgcaggtgctgactcccgcactccctggcattttttgcagacaagggcttgggatggaccctcagccccatggtacgccctgcccagtttccagttgccctgtccacttaccctaggtagccccccaccccatcagtgccgagtccttgtccctacctccagcttcctccagcctcaaaccgcctctggatctagctgtccttctccgagtggcacgcctgccccaggatgccccctttccctcccccccatgcccagagccccgcctgcctcagcgggtcaggccttcagaacactgccacccacccagttttataatcccgctccctctccaggcaaccccacccaccagcctaggcctgctcctccacccttcccgggaggcagccccgggatgctgagagttggtggaggggccaggctggacgcttcctgtgggagtcccctccagacctggctggcccctgcagccacagaaaccacgatggcaaaaaatctcattggttctcaaggactaacctgtgggggaaagcaatagagacactctttttctctcttttttttaaagatttatttcttgaaataataaatattttattgggatgtgaggtgc

SEQ ID NO: 17131 - DNA, 1759 bp, Homo sapiens
  source 1..1759: mol_type = unassigned DNA
gcggggccggacgccggacaccagagcgcgggcggcggagccagcgggcgagagagcgcgcggcgggcgcgggttgccctcgtcgagagccatgggcgcggcgcggcgcggggctgaggatcggcgcggcccggaggcgctggggaccggggcgcgggcccggggccgcctttagccggcaccgagggcgcggggccggggatgagggcgcccgccgcggggagcccgtctgcgcgccgcggcaccttcccgcccagcgagcgagcccgagcaggcagacgcgcggccggcggtctgggggcgcgccgcctcccggtccccaaaatgtgaagcggggagggcggagacgcagagacggcccggccgggcgccctcgccgccctccggcagccgcgccgctccctccgctgcacgcccaggcctgagcagcgaggccaccgggccgcgcgctcccagcttcgctcggacgcggcttcggcccgcagagggttcgtggcccggacgcggcgagagctgggcccaggacggtgcgtccggcctcgcccgcggctgctcgcaccaacaagtttgaacaatgatcaccgtcaaccccgatgggaagataatggtcagaagatgcctggtcaccctgagaccctttcggctttttgtcctgggcatcggcttcttcactctctgcttcctgatgacgtctctgggaggccagttctcggcccggcgcctgggggactcgccattcaccatccgcacagaagtgatggggggccccgagtcccgcggcgtcctgcgcaagatgagcgacctgctggagctgatggtgaagcgcatggacgcactggccaggctggagaacagcagtgagctgcaccgggccggcggcgacctgcactttcccgcagacaggatgccccctggggccggcctcatggagcggatccaggctattgcccagaacgtctccgacatcgctgtgaaggtggaccagatcctgcgccacagtctgctcctgcacagcaaggtgtcagaaggccggcgggaccagtgtgaggcacccagtgaccccaagttccctgactgctcagggaaggtggagtggatgcgtgcccgctggacctctgacccctgctacgccttctttggggtggacggcaccgagtgctccttcctcatctacctcagtgaggtcgagtggttctgccccccgctgccctggaggaaccagacggctgcccagagggcacccaagcccctccccaaagtccaggcagttttccgaagcaacctgtcccaccttctggacctgatgggcagcgggaaggagtccctgatcttcatgaagaagcggaccaagaggctcacagcccagtgggcgctggctgcccagcgcctggcacagaagctgggggccacccagagggaccagaagcagatcctggtccacatcggcttcctgacggaggagtccggggacgtgttcagccctcgggtcctgaagggcgggcccctaggggagatggtgcagtgggcggacattctgactgcactctatgtcctgggccatggcctgcgggtcacagtctccctgaaggagctgcagaggcaaaggagactgaggagtagccaagagcaagccagatgtggagtcatgggtgcctgtgagaagatgcttctagaaggagatgtggccagcaacacattgctcattgaaaagccaagtaagaaggagactgaaaaatgtccaaagaatttggtcacatga

SEQ ID NO: 17132 - DNA, 4054 bp, Homo sapiens
  source 1..4054: mol_type = unassigned DNA
gccagcatcttgtagttgagctctctttatcctatagtgggggggccctcctgggtctggagctcagcccccatcctttcattctcccttgcttccttcactcatgcactcattcgtaaaacatttgtgcagccggtacgtggtggagcgtcagggcacgatggcccttcctgccctcctgacccgcctccttcctctccgcaggctttttgtcctgggcatcggcttcttcactctctgcttcctgatgacgtctctgggaggccagttctcggcccggcgcctgggggactcgccattcaccatccgcacagaagtgatggggggccccgagtcccgcggcgtcctgcgcaagatgagcgacctgctggagctgatggtgaagcgcatggacgcactggccaggctggagaacagcagtgagctgcaccgggccggcggcgacctgcactttcccgcagacaggatgccccctggggccggcctcatggagcggatccaggctattgcccagaacgtctccgacatcgctgtgaaggtggaccagatcctgcgccacagtctgctcctgcacagcaaggtgtcagaaggccggcgggaccagtgtgaggcacccagtgaccccaagttccctgactgctcagggaaggtggagtggatgcgtgcccgctggacctctgacccctgctacgccttctttggggtggacggcaccgagtgctccttcctcatctacctcagtgaggtcgagtggttctgccccccgctgccctggaggaaccagacggctgcccagagggcacccaagcccctccccaaagtccaggcagttttccgaagcaacctgtcccaccttctggacctgatgggcagcgggaaggagtccctgatcttcatgaagaagcggaccaagaggctcacagcccagtgggcgctggctgcccagcgcctggcacagaagctgggggccacccagagggaccagaagcagatcctggtccacatcggcttcctgacggaggagtccggggacgtgttcagccctcgggtcctgaagggcgggcccctaggggagatggtgcagtgggcggacattctgactgcactctatgtcctgggccatggcctgcgggtcacagtctccctgaaggagctgcagagtaacttaggggtaccgccaggccggggaagctgcccgctcaccatgcccctgcccttcgacctcatctacaccgactaccacggcctgcagcagatgaagcggcacatgggactctccttcaagaagtaccggtgccgaatcagggtcatcgacaccttcgggacggaacctgcgtacaaccacgaggagtacgccacgctgcacggctaccggaccaactggggctactggaacctcaaccccaagcagttcatgaccatgtttcctcatacccccgacaactccttcatgggcttcgtgtccgaggagctcaacgagacggagaagcggctcatcaaaggcggcaaggccagcaacatggccgtggtgtacggcaaggaggcgagcatctggaaggggaaggagaagttcctgggcatcctgaacaaatacatggagatccatggcaccgtgtactacgagagccagcggccccccgaggtgccagcctttgtgaagaaccacggcctcttaccgcagcctgagtttcagcagctgctgcgcaaggccaaactcttcatcgggtttggcttcccctacgagggccccgcccccctggaggccatcgccaatggttgcatcttcctgcagtcccgcttcagcccgccccacagctccctcaaccacgagttcttccgaggcaagcccacctccagagaggtgttctcccagcatccctacgcggagaacttcatcggcaagccccacgtgtggacagtcgactacaacaactcagaggagtttgaagcagccatcaaggccattatgagaactcaggtagacccctacctaccctacgagtacacctgcgaggggatgctggagcggatccacgcctacatccagcaccaggacttctgcagagctccagaccctgccctaccagaggcccacgccccgcagagcccctttgtcctggcccccaatgccacccacctcgagtgggctcggaacaccagcttggctcctggggcctggccccccgcgcacgccctgcgggcctggctggccgtgcctgggagggcctgcaccgacacctgcctggaccacgggctaatctgtgagccctccttcttccccttcctgaacagccaggacgccttcctcaagctgcaggtgccctgtgacagcaccgagtcggagatgaaccacctgtacccggcgttcgcccagcctggccaggagtgctacctgcagaaggagcctctgctcttcagctgcgccggctccaacaccaagtaccgccggctctgcccctgccgcgacttccgcaagggccaggtggccttgtgccagggctgtctgtgaatccgcctctgccgccctgcctggcacccacgctggctctctcctgccgcgggagaaagcaccagcaggttctgagccctggctgcttgtcctcctcgcaacccccccaggccggagcttccttccttagccgggaagctggcagaggagagccgtgcccgggaataggaggaggcagcatgccgagcccctgggacctcccaggcaggctccggttctctcctggggactcacagaagcatcgtggccaagcaggtgtcggactgctcagagtccgcatggcccaggagcaggtggtcggaggcccctggctttgtgcaaggccggatctgggccaggtggcgaaaggggcccagtcgttcttgggcccaggatggggcctctagacttgcaagggagaggaacagggaccaggctgccccacggtccctgaagggtccaaggaggggccctccccatggccctggagagtgggcctgggtggtacctgctccaggcagggaaactgggggctcgcccttctcctgtgaggggagccaggcacacagggcccattggtgtttgggatgtggacagaggggcagggggctgggagaaggctaagccgaggggtcctgtttgtgcctccccttagtcccttccctcccgatttcccgattcccccaccctccctctacacttgaggaccacagttgggggtgtagggaccacccagaccctggttgaattgtttctctctcctgcttgttccaacccttttcactctgggcttctcccaaaacccatcctggcatgacctgcaactccaggtggtggatttgttccaaagcctcaatccctaccccctccaaggggcaggtttccagtccagcctcagagatcaggctctgggacccctgcctggggggtggccttcatgcactagccacttccgcaggtgctgactcccgcactccctggcattttttgcagacaagggcttgggatggaccctcagccccatggtacgccctgcccagtttccagttgccctgtccacttaccctaggtagccccccaccccatcagtgccgagtccttgtccctacctccagcttcctccagcctcaaaccgcctctggatctagctgtccttctccgagtggcacgcctgccccaggatgccccctttccctcccccccatgcccagagccccgcctgcctcagcgggtcaggccttcagaacactgccacccacccagttttataatcccgctccctctccaggcaaccccacccaccagcctaggcctgctcctccacccttcccgggaggcagccccgggatgctgagagttggtggaggggccaggctggacgcttcctgtgggagtcccctccagacctggctggcccctgcagccacagaaaccacgatggcaaaaaatctcattggttctcaaggactaacctgtgggggaaagcaatagagacactctttttctctcttttttttaaagatttatttcttgaaataataaatattttattgggatgtgaggtgc

SEQ ID NO: 17133 - DNA, 5062 bp, Homo sapiens
  source 1..5062: mol_type = unassigned DNA
acggggtggaagtgggggtggggggaggggatcggggccgggccggggccgcgctgcctgcgatgccgggcgcccgccgcagccgctgccgccggagcccgggatggggcgagaggctgcggcggacgccagcatctccccgccggggaccccgggggccgcggagccgccgccgccgctgctgccgccgttgctgagacccagcgggcgatgggatgaagatgagacgctacaagctctttctcatgttctgtatggccggcctgtgcctcatctccttcctgcacttcttcaagaccctgtcctatgtcaccttcccccgagaactggcctccctcagccctaacctggtgtccagctttttctggaacaatgccccggtcacgccccaggccagccccgagccaggaggccctgacctgctgcgtaccccactctactcccactcgcccctgctgcagccgctgccgcccagcaaggcggccgaggagctccaccgggtggacttggtgctgcccgaggacaccaccgagtatttcgtgcgcaccaaggccggcggcgtctgcttcaaacccggcaccaagatgctggagaggccgcccccgggacggccggaggagaagcctgagggggccaacggctcctcggcccggcggccaccccggtacctcctgagcgcccgggagcgcacggggggccgaggcgcccggcgcaagtgggtggagtgcgtgtgcctgcccggctggcacggacccagctgcggcgtgcccactgtggtgcagtactccaacctgcccaccaaggagcggctggtgcccagggaggtgccgcgccgcgtcatcaacgccatcaacgtcaaccacgagttcgacctgctggacgtgcgcttccacgagctgggcgacgtggtggacgcctttgtggtgtgcgagtccaacttcacggcttatggggagccgcggccgctcaagttccgggagatgctgaccaatggcaccttcgagtacatccgccacaaggtgctctatgtcttcctggaccacttcccgcccggcggccggcaggacggctggatcgccgacgactacctgcgcaccttcctcacccaggacggcgtctcgcggctgcgcaacctgcggcccgacgacgtcttcatcattgacgatgcggacgagatcccggcccgtgacggcgtccttttcctcaagctctacgatggctggaccgagcccttcgccttccacatgcgcaagtcgctctacggcttcttctggaagcagccgggcaccctggaggtggtgtcaggctgcacggtggacatgctgcaggcagtgtatgggctggacggcatccgcctgcgccgccgccagtactacaccatgcccaacttcagacagtatgagaaccgcaccggccacatcctggtgcagtggtcgctgggcagccccctgcacttcgccggctggcactgctcctggtgcttcacgcccgagggcatctacttcaagctcgtgtccgcccagaatggcgacttcccacgctggggtgactacgaggacaagcgggacctgaactacatccgcggcctgatccgcaccgggggctggttcgacggcacgcagcaggagtacccgcctgcagaccccagcgagcacatgtatgcgcccaagtacctgctgaagaactacgaccggttccactacctgctggacaacccctaccaggagcccaggagcacggcggcgggcgggtggcgccacaggggtcccgagggaaggccgcccgcccggggcaaactggacgaggcggaagtctagagctgcatgatctgatagggtttgtgacagggcgggggtggcggcggcccctagcgctatctccctgcctcctgccggctccttggttcttgaggggaccaggagtgggtggggagtgggggtgggggtagggtttccctactgaagcccttgtgaatcaagggtcaggcctttgagctcagaaaatatccctcctgttgggagagggcgcaggccgtgacgtctgggtggcccttatgactgccaagactgctgtggccaggaggtgccactggagtgtgcgtggtggtccctgggtagcgggggagggtaggcaggattggggaagagagcctgcaggatctcaccaggcagcctctggggggtggccaggccgggaaaaagcccaccatttggcatccctgggccttgggctccgtgtgggagaccggcctgccaggaggacccagggctctgtaagtagatgcatttgggtccaggaggaagcgtggacacctcgtagggaagagatgaaaaagccacatcctaccaagaggaggtgctgagggatgctttgcagtgtagtcagaagtgctgggccagatggagacagaactccaccccctgccgcaaaggacaggacctggctgccctgggatgctggtgcctgagtctgtctctgtgcacccctcaggctgtcgtgagccaacacaggggcctggagaaccctgaggagctttccttttggttctaaacccggcgttgacgttccttctccctttcacattgctgtcttgtggactgtgcactcagtccttgcaaggccaagagtccagttgtaggtgtggccttgagggggaagtggggaggagaagactgacatgagtcctctgcacggatccgtctctccctccccatcaccccttccttctgacacccagtcccagctgtccactgtcccaggtgcagtcactgttgtgcccttccttggggcaggctggctgggggccagaaaggggccatgaggctgtcttgggcccaaaaagggacaataaggccagttgtatgcttcctgttcctcatagcttgccttggtggggatgtctttgttggagttgattctgagctgctgtgattaggagaccctgaaatacagtggtttaagcaagatggaagcttgtttctaattagtctagattgagatggcccagagctggtagggcagctctgcgtttcttcatacgcaccttccaattctgggtacacagcggctgctccagcgcccaccctcctgtgtgcatccaagcctgggggaagcagaaatagacaagagggcacacccactttttgctaaaggcatgagccagaattggcaggctcacctctgctggcctctcattggctgggactcagtcacatggccacaagcagctgctagggaacctgggaagtgtagtcttcagcggggccgccatgtgcctggcctcaccttgggagttatcttattgatggaggagaagagaatggatatgggggaccagtagcatctctgggagagggggagggagcagcaataactcagtcgtcggatccagctctcattgtcagagtttccggaacagcttgctcctgtttccctcactgtgcagcccagggctgggggcagtgaggagcttgcagctctgtgggaaggggaaacaccccctcccctcggcccctcagacgctacccaatgatgccggtttgcagagttggcctgtggaatggctcatgtttgtgcgtgtgtgtgtgtatatttatgggcatgggtgcatgcttggtgtgtatttgtacatgtctgtattgctgtgtccctgtaaatacatgcttgtgtatggatggaagaggccaggcccaggcctggcctcttcctcgggcctgtggccacacctcctgcagctccccaaaatgactgaggcagaaagcccttggggagcctagaaagcaaagctaaaggggatgcagggtctgtctgtctgtctgtctttcagtctgaggaatgagaatcctgacctgagggctgtgcagctgagagcccactacctccccagcccctctcggccccagccgcatcatcccacctgtcccctcccccccacctccagtggggctttctccagatgtcttatggttgggggtttcctgatgggccaggagaggagggcatcttcttgcgacagcactgtctgggttaagtgcccagtgagggcatggtgtggggagctggcctcagaggagccgctggtgggcaagcgtgaagtgggctgaggggctctgagccactttgctcccatctaggggactgccccccatggaactcctttgaagtcacagcagccttcctttctgtttgctcttggggctgagaggtggctcaaacactcggggtccctatggctctgggtcaatctaggccaggctgcaccccatggacagggagtctcagggctcctgatcatgcccaggccctggcctggggcctccctccttggcagctttcccacccccacgcccctggcatcctcagttgctatgggatgcccctccagggcaccagctcagggctaagcgaaggaagataggagcagctcagagctgccaggctctgccttcctcacagacctggtggggcaggtcctgttcacagcagcaggagtgaaggcctggccatcggtggagagggcagctgtcagagggctgggggccagggcacaggattgaagagtttcacatatcatcacagcatacactgggaatttggtgggggcagaagaacccagggccactccctcaatatgaagggaaaccaagctgaatgtgaccaccggcacactgctgccatgtcccatgtccacctttctccccgggaataactggccctgagacccctagacccaaggaggcctgtccatgccaagcatccgggaagcatggctggccttatccacccatgggtcacgtcggttcccaggggcagcatgggagatctttgggggcaacagggagagtctgggtggggagacgggacttgtccaagcagaaggcaggaccctgggaaatgcataatgtaaggacatcaataatagtattattttttttgtaagggaaaatcaatatgtacattctgaaatcattttctctgtaaatggttggatttcatttcacccttaaagggatgcttaaaggagaagataatattaataataaaaacagctacaaagtctgaa

SEQ ID NO: 17134 - DNA, 552 bp, Homo sapiens
  source 1..552: mol_type = unassigned DNA
gtatttggtcgtccagcgggaaacccaaatggaaggaaagaaaaaaaaaaaaaaccatgcatttatagaacctctgccaatggccaggctccatgcagaatgctttgacaccgtggctcagccaggtctcccacaggactgcaaaacagagggtgacatctttcttttagatcggagaagactgaggaccagagaagctaagtaacttgccaaagggcacacagcaaatggagtcttgctcttgtcacccaggttctggagtgcaatggcgtgatcatggctcactgcaacttccgccccctgggttcaagatgaagatgagacgctacaagctctttctcatgttctgtatggccggcctgtgcctcatctccttcctgcacttcttcaagaccctgtcctatgtcaccttcccccgagaactggcctccctcagccctaacctggtgtccagctttttctggaacaatgccccggtcacgccccaggccagccccgagccaggaggccctgacctgctgcgtaccccactctactcccactcgcccctgc

SEQ ID NO: 17135 - DNA, 569 bp, Homo sapiens
  source 1..569: mol_type = unassigned DNA
acacctgggctcagcctctagggaggaaactgctgccatagagccttgaaagccaggcagaggggactagacactgtgcctcaaggatgaagatgagacgctacaagctctttctcatgttctgtatggccggcctgtgcctcatctccttcctgcacttcttcaagaccctgtcctatgtcaccttcccccgagaactggcctccctcagccctaacctggtgtccagctttttctggaacaatgccccggtcacgccccaggccagccccgagccaggaggccctgacctgctgcgtaccccactctactcccactcgcccctgctgcagccgctgccgcccagcaaggcggccgaggagctccaccgggtggacttggtgctgcccgaggacaccaccgagtatttcgtgcgcaccaaggccggcggcgtctgcttcaaacccggcaccaagatgctggagaggccgcccccgggacggccggaggagaagcctgagggggccaacggctcctcggcccggcggccaccccggtacctcctgagcgcccgggagcgcacggggggc

SEQ ID NO: 17136 - DNA, 2631 bp, Homo sapiens
  source 1..2631: mol_type = unassigned DNA
tctctgatcgggcccaccccctggatctagcaccgcctcttccgcgttctcggaggagcgatctgcaggtaggggtgcgcgcgaccgctccccggcgggagccagcgaaggtttccatgtcagaggccaatggagaactgaagattgccacctacgcacaaaggccattgagacacttcgtgtagctggaagacaccaacttcctgacaggagctttatttcatttgggatttcaagtttacagatggtatcttctcaaaagttggaaaaacctatagagatgggcagtagcgaaccccttcccatcgcagatggtgacaggaggaggaagaagaagcggaggggccgggccactgactccttgccaggaaagtttgaagatatgtacaagctgacctctgaattgcttggagagggagcctatgccaaagttcaaggtgccgtgagcctacagaatggcaaagagtatgccgtcaaaatcatcgagaaacaagcagggcacagtcggagtagggtgtttcgagaggtggagacgctgtatcagtgtcagggaaacaagaacattttggagctgattgagttctttgaagatgacacaaggttttacttggtctttgagaaattgcaaggaggttccatcttagcccacatccagaagcaaaagcacttcaatgagcgagaagccagccgagtggtgcgggacgttgctgctgcccttgacttcctgcataccaaaggcattgctcatcgtgatctgaaaccagaaaatatattgtgtgaatctccagaaaaggtgtctccagtgaaaatctgtgactttgacttgggcagtgggatgaaactgaacaactcctgtacccccataaccacaccagagctgaccaccccatgtggctctgcagaatacatggcccctgaggtagtggaggtcttcacggaccaggccacattctacgacaagcgctgtgacctgtggagcctgggcgtggtcctctacatcatgctgagtggctacccacccttcgtgggtcactgcggggccgactgtggctgggaccggggcgaggtctgcagggtgtgccagaacaagctgtttgaaagcatccaggaaggcaagtatgagtttcctgacaaggactgggcacacatctccagtgaagccaaagacctcatctccaagctcctggtgcgagatgcaaagcagagacttagcgccgcccaagttctgcagcacccatgggtgcagggggaacagcagcacaatggacctgacgctcttcgcagctgaggccatcgcccttaaccgccagctatctcagcacgaagagaacgaactagcagaggagccagaggcactagctgatggcctctgctccatgaagctttcccctccctgcaagtcacgcctggcccggagacgggccctggcccaggcaggccgtggtgaagacaggagcccgcccacagcactctgaaatgctccagtcacaccttataggccctaggcctggccaggcattgtcccctggaaacctgtgtggctaaagtctgctgagcaggcagcagcctctgctctgtggctccattcaggctttttcatctacgaaggccctgaggttcccatcaacccccatttccctagggtcctggaggaaaaagctttttccaaaggggttgtctttgaaaaggaaagcaatcacttctcactttgcataattgcctgcagcaggaacatctcttcactgggctccacctgctcacccgcctgcagatctgggatccagcctgctctcaccgctgtagctgtggcggctggggctgcagcctgcagggagaagcaagaagcatcagttgacagaggctgccgacacgtgcctcttccctctcttctctgtcaccctcctctggcggtccttccaccttcctctgtcctccggatgtcctctttgcccgtcttctcccttggctgagcaaagccatcccctcaattcagggaagggcaaggagccttcctcattcaggaaatcaaatcagtcttccggtctgcagcacggaaaagcacataatctttctttgctgtgactgaaatgtatccctcgtttatcatcccctttgtttgtgattgctgctaaagtcagtagtatcgtttttttaaaaaaaaagtttggtgtttttaaccatgctgttccagcaaagatgataccttaaactcccactgcaagcccatgaacttcccagagagtggaacggcttgctcttctttctagaatgtccatgcacttgggttttaatcagcagttccctattattctgattttaagctgttcctgtgatgaacttagagacagcatcggtgtctgctgctgtgtccccaggtcttgtgtgggtggcacagatctgggcagttagatagtgctctgtgcctaaggtgaagccacactagggtgaagcctcacttccctgtttgagcaatgcagtgcctgctgcccgtgtgcatgaaggtacagccattcagataagtggaactattgagttacataaagaaaatagatttgcatttgtcaggcagacgtttatacaacaccacggtgcttttatacattgtgcttattttaataaaactgaaattct

SEQ ID NO: 17137 - DNA, 2421 bp, Homo sapiens
  source 1..2421: mol_type = unassigned DNA
cagaaacaactctccaagttccatttccaaggaaagtcttaaccatttgtcccttctggcgtaccctctttcattgaaatccatgcagaatataccagagatgggcagtagcgaaccccttcccatcgcagatggtgacaggaggaggaagaagaagcggaggggccgggccactgactccttgccaggaaagtttgaagatatgtacaagctgacctctgaattgcttggagagggagcctatgccaaagttcaaggtgccgtgagcctacagaatggcaaagagtatgccgtcaaaatcatcgagaaacaagcagggcacagtcggagtagggtgtttcgagaggtggagacgctgtatcagtgtcagggaaacaagttccatcttagcccacatccagaagcaaaagcacttcaatgagcgagaagccagccgagtggtgcgggacgttgctgctgcccttgacttcctgcataccaaaggcattgctcatcgtgatctgaaaccagaaaatatattgtgtgaatctccagaaaaggtgtctccagtgaaaatctgtgactttgacttgggcagtgggatgaaactgaacaactcctgtacccccataaccacaccagagctgaccaccccatgtggctctgcagaatacatggcccctgaggtagtggaggtcttcacggaccaggccacattctacgacaagcgctgtgacctgtggagcctgggcgtggtcctctacatcatgctgagtggctacccacccttcgtgggtcactgcggggccgactgtggctgggaccggggcgaggtctgcagggtgtgccagaacaagctgtttgaaagcatccaggaaggcaagtatgagtttcctgacaaggactgggcacacatctccagtgaagccaaagacctcatctccaagctcctggtgcgagatgcaaagcagagacttagcgccgcccaagttctgcagcacccatgggtgcaggggcaagctccagaaaagggactccccacgccgcaagtcctccagaggaacagcagcacaatggacctgacgctcttcgcagctgaggccatcgcccttaaccgccagctatctcagcacgaagagaacgaactagcagaggagccagaggcactagctgatggcctctgctccatgaagctttcccctccctgcaagtcacgcctggcccggagacgggccctggcccaggcaggccgtggtgaagacaggagcccgcccacagcactctgaaatgctccagtcacaccttataggccctaggcctggccaggcattgtcccctggaaacctgtgtggctaaagtctgctgagcaggcagcagcctctgctctgtggctccattcaggctttttcatctacgaaggccctgaggttcccatcaacccccatttccctagggtcctggaggaaaaagctttttccaaaggggttgtctttgaaaaggaaagcaatcacttctcactttgcataattgcctgcagcaggaacatctcttcactgggctccacctgctcacccgcctgcagatctgggatccagcctgctctcaccgctgtagctgtggcggctggggctgcagcctgcagggagaagcaagaagcatcagttgacagaggctgccgacacgtgcctcttccctctcttctctgtcaccctcctctggcggtccttccaccttcctctgtcctccggatgtcctctttgcccgtcttctcccttggctgagcaaagccatcccctcaattcagggaagggcaaggagccttcctcattcaggaaatcaaatcagtcttccggtctgcagcacggaaaagcacataatctttctttgctgtgactgaaatgtatccctcgtttatcatcccctttgtttgtgattgctgctaaagtcagtagtatcgtttttttaaaaaaaaagtttggtgtttttaaccatgctgttccagcaaagatgataccttaaactcccactgcaagcccatgaacttcccagagagtggaacggcttgctcttctttctagaatgtccatgcacttgggttttaatcagcagttccctattattctgattttaagctgttcctgtgatgaacttagagacagcatcggtgtctgctgctgtgtccccaggtcttgtgtgggtggcacagatctgggcagttagatagtgctctgtgcctaaggtgaagccacactagggtgaagcctcacttccctgtttgagcaatgcagtgcctgctgcccgtgtgcatgaaggtacagccattcagataagtggaactattgagttacataaagaaaatagatttgcatttgtcaggcagacgtttatacaacaccacggtgcttttatacattgtgcttattttaataaaactgaaattct

SEQ ID NO: 17138 - DNA, 2618 bp, Homo sapiens
  source 1..2618: mol_type = unassigned DNA
gcgatctgcaggtaggggtgcgcgcgaccgctccccggcgggagccagcgaaggtttccatgtcagaggccaatggagaactgaagattgccacctacgcacaaaggccattgagacacttcgtgtagctggaagacaccaacttcctgacaggagctttatttcatttgggatttcaagtttacagatggtatcttctcaaaagttggaaaaacctatagagatgggcagtagcgaaccccttcccatcgcagatggtgacaggaggaggaagaagaagcggaggggccgggccactgactccttgccaggaaagtttgaagatatgtacaagctgacctctgaattgcttggagagggagcctatgccaaagttcaaggtgccgtgagcctacagaatggcaaagagtatgccgtcaaaatcatcgagaaacaagcagggcacagtcggagtagggtgtttcgagaggtggagacgctgtatcagtgtcagggaaacaagaacattttggagctgattgagttctttgaagatgacacaaggttttacttggtctttgagaaattgcaaggaggttccatcttagcccacatccagaagcaaaagcacttcaatgagcgagaagccagccgagtggtgcgggacgttgctgctgcccttgacttcctgcataccaaaggcattgctcatcgtgatctgaaaccagaaaatatattgtgtgaatctccagaaaaggtgtctccagtgaaaatctgtgactttgacttgggcagtgggatgaaactgaacaactcctgtacccccataaccacaccagagctgaccaccccatgtggctctgcagaatacatggcccctgaggtagtggaggtcttcacggaccaggccacattctacgacaagcgctgtgacctgtggagcctgggcgtggtcctctacatcatgctgagtggctacccacccttcgtgggtcactgcggggccgactgtggctgggaccggggcgaggtctgcagggtgtgccagaacaagctgtttgaaagcatccaggaaggcaagtatgagtttcctgacaaggactgggcacacatctccagtgaagccaaagacctcatctccaagctcctggtgcgagatgcaaagcagagacttagcgccgcccaagttctgcagcacccatgggtgcaggggcaagctccagaaaagggactccccacgccgcaagtcctccagaggaacagcagcacaatggacctgacgctcttcgcagctgaggccatcgcccttaaccgccagctatctcagcacgaagagaacgaactagcagaggagccagaggcactagctgatggcctctgctccatgaagctttcccctccctgcaagtcacgcctggcccggagacgggccctggcccaggcaggccgtggtgaagacaggagcccgcccacagcactctgaaatgctccagtcacaccttataggccctaggcctggccaggcattgtcccctggaaacctgtgtggctaaagtctgctgagcaggcagcagcctctgctctgtggctccattcaggctttttcatctacgaaggccctgaggttcccatcaacccccatttccctagggtcctggaggaaaaagctttttccaaaggggttgtctttgaaaaggaaagcaatcacttctcactttgcataattgcctgcagcaggaacatctcttcactgggctccacctgctcacccgcctgcagatctgggatccagcctgctctcaccgctgtagctgtggcggctggggctgcagcctgcagggagaagcaagaagcatcagttgacagaggctgccgacacgtgcctcttccctctcttctctgtcaccctcctctggcggtccttccaccttcctctgtcctccggatgtcctctttgcccgtcttctcccttggctgagcaaagccatcccctcaattcagggaagggcaaggagccttcctcattcaggaaatcaaatcagtcttccggtctgcagcacggaaaagcacataatctttctttgctgtgactgaaatgtatccctcgtttatcatcccctttgtttgtgattgctgctaaagtcagtagtatcgtttttttaaaaaaaaagtttggtgtttttaaccatgctgttccagcaaagatgataccttaaactcccactgcaagcccatgaacttcccagagagtggaacggcttgctcttctttctagaatgtccatgcacttgggttttaatcagcagttccctattattctgattttaagctgttcctgtgatgaacttagagacagcatcggtgtctgctgctgtgtccccaggtcttgtgtgggtggcacagatctgggcagttagatagtgctctgtgcctaaggtgaagccacactagggtgaagcctcacttccctgtttgagcaatgcagtgcctgctgcccgtgtgcatgaaggtacagccattcagataagtggaactattgagttacataaagaaaatagatttgcatttgtcaggcagacgtttatacaacaccacggtgcttttatacattgtgcttattttaataaaactgaaattct

SEQ ID NO: 17139 - DNA, 2719 bp, Homo sapiens
  source 1..2719: mol_type = unassigned DNA
gcgaccgctccccggcgggagccagcgaaggtttccatgtcagaggccaatggagaactgaagattgccacctacgcacaaaggccattgagacacttcgtgtagctggaagacaccaacttcctgacaggagctttatttcatttgggatttcaagtttacagatggtatcttctcaaaagttggaaaaacctatagagatgggcagtagcgaaccccttcccatcgcagatggtgacaggaggaggaagaagaagcggaggggccgggccactgactccttgccaggaaagtttgaagatatgtacaagctgacctctgaattgcttggagagggagcctatgccaaagttcaaggtgccgtgagcctacagaatggcaaagagtatgccgtcaaaatcatcgagaaacaagcagggcacagtcggagtagggtgtttcgagaggtggagacgctgtatcagtgtcagggaaacaagaacattttggagctgattgagttctttgaagatgacacaaggttttacttggtctttgagaaattgcaaggaggttccatcttagcccacatccagaagcaaaagcacttcaatgagcgagaagccagccgagtggtgcgggacgttgctgctgcccttgacttcctgcataccaaagacaaagtctctctctgtcacctaggctggagtgctatggcgccatcagggctcactgcagccccaacctccctgggctccagtgatcctcccacctcagcctcccaagtagctgggactacaggcattgctcatcgtgatctgaaaccagaaaatatattgtgtgaatctccagaaaaggtgtctccagtgaaaatctgtgactttgacttgggcagtgggatgaaactgaacaactcctgtacccccataaccacaccagagctgaccaccccatgtggctctgcagaatacatggcccctgaggtagtggaggtcttcacggaccaggccacattctacgacaagcgctgtgacctgtggagcctgggcgtggtcctctacatcatgctgagtggctacccacccttcgtgggtcactgcggggccgactgtggctgggaccggggcgaggtctgcagggtgtgccagaacaagctgtttgaaagcatccaggaaggcaagtatgagtttcctgacaaggactgggcacacatctccagtgaagccaaagacctcatctccaagctcctggtgcgagatgcaaagcagagacttagcgccgcccaagttctgcagcacccatgggtgcaggggcaagctccagaaaagggactccccacgccgcaagtcctccagaggaacagcagcacaatggacctgacgctcttcgcagctgaggccatcgcccttaaccgccagctatctcagcacgaagagaacgaactagcagaggagccagaggcactagctgatggcctctgctccatgaagctttcccctccctgcaagtcacgcctggcccggagacgggccctggcccaggcaggccgtggtgaagacaggagcccgcccacagcactctgaaatgctccagtcacaccttataggccctaggcctggccaggcattgtcccctggaaacctgtgtggctaaagtctgctgagcaggcagcagcctctgctctgtggctccattcaggctttttcatctacgaaggccctgaggttcccatcaacccccatttccctagggtcctggaggaaaaagctttttccaaaggggttgtctttgaaaaggaaagcaatcacttctcactttgcataattgcctgcagcaggaacatctcttcactgggctccacctgctcacccgcctgcagatctgggatccagcctgctctcaccgctgtagctgtggcggctggggctgcagcctgcagggagaagcaagaagcatcagttgacagaggctgccgacacgtgcctcttccctctcttctctgtcaccctcctctggcggtccttccaccttcctctgtcctccggatgtcctctttgcccgtcttctcccttggctgagcaaagccatcccctcaattcagggaagggcaaggagccttcctcattcaggaaatcaaatcagtcttccggtctgcagcacggaaaagcacataatctttctttgctgtgactgaaatgtatccctcgtttatcatcccctttgtttgtgattgctgctaaagtcagtagtatcgtttttttaaaaaaaaagtttggtgtttttaaccatgctgttccagcaaagatgataccttaaactcccactgcaagcccatgaacttcccagagagtggaacggcttgctcttctttctagaatgtccatgcacttgggttttaatcagcagttccctattattctgattttaagctgttcctgtgatgaacttagagacagcatcggtgtctgctgctgtgtccccaggtcttgtgtgggtggcacagatctgggcagttagatagtgctctgtgcctaaggtgaagccacactagggtgaagcctcacttccctgtttgagcaatgcagtgcctgctgcccgtgtgcatgaaggtacagccattcagataagtggaactattgagttacataaagaaaatagatttgcatttgtcaggcagacgtttatacaacaccacggtgcttttatacattgtgcttattttaataaaactgaaattcta

SEQ ID NO: 17140 - DNA, 1270 bp, Homo sapiens
  source 1..1270: mol_type = unassigned DNA
ttccgcgttctcggaggagcgatctgcaggtttccatgtcagaggccaatggagaactgaagattgccacctacgcacaaaggccattgagacacttcgtgtagctggaagacaccaacttcctgacaggagctttatttcatttgggatttcaagtttacagatggtatcttctcaaaagttggaaaaacctatagagatgggcagtagcgaaccccttcccatcgcagatggtgacaggaggaggaagaagaagcggaggggccgggccactgactccttgccaggaaagtttgaagatatgtacaagctgacctctgaattgcttggagagggagcctatgccaaagttcaaggtgccgtgagcctacagaatggcaaagagtatgccgtcaaaatcatcgagaaacaagcagggcacagtcggagtagggtgtttcgagaggtggagacgctgtatcagtgtcagggaaacaagaacattttggagctgattgagttctttgaagatgacacaaggttttacttggtctttgagaaattgcaaggaggttccatcttagcccacatccagaagcaaaagcacttcaatgagcgagaagccagccgagtggtgcgggacgttgctgctgcccttgacttcctgcataccaaaggcattgctcatcgtgatctgaaaccagaaaatatattgtgtgaatctccagaaaaggtgtctccagtgaaaatctgtgactttgacttgggcagtgggatgaaactgaacaactcctgtacccccataaccacaccagagctgaccaccccatgtggctctgcagaatacatggcccctgaggtagtggaggtcttcacggaccaggccacattctacgacaagcgctgtgacctgtggagcctgggcgtggtcctctacatcatgctgagtggctacccacccttcgtgggtcactgcggggccgactgtggctgggaccggggcgaggtctgcagggtgtgccagaacaagctgtttgaaagcatccaggaaggcaagtatgagtttcctgacaaggactgggcacacatctccagtgaagccaaagacctcatctccaagctcctggtgcgagatgcaaagcagagacttagcgccgcccaagttctgcagcacccatgggtgcagggggaacagcagcacaatggacctgacgctcttcgcagctgaggccatcgcccttaaccgccagctatctcagcacgaagagaacgaactagcagaggagccaga

SEQ ID NO: 17141 - DNA, 738 bp, Homo sapiens
  source 1..738: mol_type = unassigned DNA
tctctgatcgggcccaccccctggatctagcaccgcctcttccgcgttctcggaggagcgatctgcaggtttccatgtcagaggccaatggagaactgaagattgccacctacgcacaaaggccattgagacacttcgtgtagctggaagacaccaacttcctgacaggagctttatttcatttgggatttcaagtttacagatggtatcttctcaaaagttggaaaaacctatagagatgggcagtagcgaaccccttcccatcgcagatggtgacaggaggaggaagaagaagcggaggggccgggccactgactccttgccaggaaagtttgaagatatgtacaagctgacctctgaattgcttggagagggagcctatgccaaagttcaaggtgccgtgagcctacagaatggcaaagagtatgccgtcaaaatcatcgagaaacaagcagggcacagtcggagtagggtgtttcgagaggtggagacgctgtatcagtgtcagggaaacaagaacattttggagctgattgagttctttgaagatgacacaaggttttacttggtctttgagaaattgcaaggaggttccatcttagcccacatccagaagcaaaagcacttcaatgagcgagaagccagccgagtggtgcgggacgttgctgctgcccttgacttcctgcataccaaaggcattgctcatcgtgatctgaaaccagaaaatatattgtgtga

SEQ ID NO: 17142 - DNA, 530 bp, Homo sapiens
  source 1..530: mol_type = unassigned DNA
ttccgcgttctcggaggagcgatctgcaggtaggggtgcgcgcgaccgctccccggcgggagccagcgaaggtaaaagcgagacctgcgaggtttccatgtcagaggccaatggagaactgaagattgccacctacgcacaaaggccattgagacacttcgtgtagctggaagacaccaacttcctgacaggagctttatttcatttgggatttcaagtttacagatggtatcttctcaaaagttggaaaaacctatagagatgggcagtagcgaaccccttcccatcgcagatggtgacaggaggaggaagaagaagcggaggggccgggccactgactccttgccaggaaagtttgaagatatgtacaagctgacctctgaattgcttggagagggagcctatgccaaagttcaaggtgccgtgagcctacagaatggcaaagagtatgccgtcaaaatcatcgagaaacaagcagggcacagtcggagtagggtgtttcgagaggtggagacgctgtatcagtgtca

SEQ ID NO: 17143 - DNA, 567 bp, Homo sapiens
  source 1..567: mol_type = unassigned DNA
gcaggagggcagccgcggccggcaggacaggcagacggacaggctgacaggagagagaacaggcactgcgggacctgcaggagaaaggcgatcctgtggctgggaatgtgaccccacggccagaagaggacccgtttccatgtcagaggccaatggagaactgaagattgccacctacgcacaaaggccattgagacacttcgtgtagctggaagacaccaacttcctgacaggagctttatttcatttgggatttcaagtttacagatggtatcttctcaaaagttggaaaaacctatagagatgggcagtagcgaaccccttcccatcgcagatggtgacaggaggaggaagaagaagcggaggggccgggccactgactccttgccaggaaagtttgaagatatgtacaagctgacctctgaattgcttggagagggagcctatgccaaagttcaaggtgccgtgagcctacagaatggcaaagagtatgccgtcaaaatcatcgagaaacaagcagggcacagtcggagtagggtgtttcgagaggtggagacgctgtatcag

SEQ ID NO: 17144 - DNA, 1127 bp, Homo sapiens
  source 1..1127: mol_type = unassigned DNA
gcaggagggcagccgcggccggcaggacaggcagacggacaggctgacaggagagagaacaggcactgcgggacctgcaggagaaaggcgatcctgtggctgggaatgtgaccccacggccagaagaggacccgtttccatgtcagaggccaatggagaactgaagattgccacctacgcacaaaggccattgagacacttcgtgtagctggaagacaccaacttcctgacaggagctttatttcatttgggatttcaagtttacagatggtatcttctcaaaagttggaaaaacctatagagatgggcagtagcgaaccccttcccatcgcagatggtgacaggaggaggaagaagaagcggaggggccgggccactgactccttgccaggaaagtttgaagatatgtacaagctgacctctgaattgcttggagagggagcctatgccaaagttcaaggtgccgtgagcctacagaatggcaaagagtatgccgtcaaaatcatcgagaaacaagcagggcacagtcggagtagggtgtttcgagaggtggagacgctgtatcagtgtcagggaaacaagaacattttggagctgattgagttctttgaagatgacacaaggttttacttggtctttgagaaattgcaaggaggtacttaccgttgagtatgtgtgtggacttctgattaagacccagggtggtgatcatccatcatgaatcccagagacttccaaaacgagtcaagctaataaaaaggatgaaggacttaaaaactgcccttgatttgggagaagggaggccggagggaaggatgataattagcattttgcagagcttagaatgtcacctgtgtgggtattttataaatgccttttcattataataggagtcatatatagatacatttagtcatcgatttatcaatcccgttttgacatgttcactgtttaactacattaattatggggtggaagctctcaaatacattgcgaagtctagaaaggctaaaacagaggagaggagggtcctattgtttgggacacagacccaggataaaggggaagcctgagaatgtgccatccttcagatggaaagatgccatcacccacacacataatcactg

SEQ ID NO: 17145 - DNA, 3774 bp, Homo sapiens
  source 1..3774: mol_type = unassigned DNA
cggctcctctcagcggcggtggcccaggtagaggggtccgcgctggcggcggcggcggcgctgttccccgcgcggtccgcggagcggggtccgggctgcgcgacgtggggcggcggcggcactgcggccccggcccaagcccgaccccgggtcccctcctcggccgccccccgcccggccgcccgccctcgggcctccccccgggccctcggtcccctcccccgctggcggggcccggacagaagatggtgcagaagaaaccagccgaacttcagggtttccaccgttcgttcaaggggcagaaccccttcgagctggccttctccctagaccagcccgaccacggagactctgactttggcctgcagtgctcagcccgccctgacatgcccgccagccagcccattgacatcccggacgccaagaagaggggcaagaagaagaagcgcggccgggccaccgacagcttctcgggcaggtttgaagacgtctaccagctgcaggaagatgtgctgggggagggcgctcatgcccgagtgcagacctgcatcaacctgatcaccagccaggagtacgccgtcaagatcattgagaagcagccaggccacattcggagcagggttttcagggaggtggagatgctgtaccagtgccagggacacaggaacgtcctagagctgattgagttcttcgaggaggaggaccgcttctacctggtgtttgagaagatgcggggaggctccatcctgagccacatccacaagcgccggcacttcaacgagctggaggccagcgtggtggtgcaggacgtggccagcgccttggactttctgcataacaaaggcatcgcccacagggacctaaagccggaaaacatcctctgtgagcaccccaaccaggtctcccccgtgaagatctgtgacttcgacctgggcagcggcatcaaactcaacggggactgctcccctatctccaccccggagctgctcactccgtgcggctcggcggagtacatggccccggaggtagtggaggccttcagcgaggaggctagcatctacgacaagcgctgcgacctgtggagcctgggcgtcatcttgtatatcctactcagcggctacccgcccttcgtgggccgctgtggcagcgactgcggctgggaccgcggcgaggcctgccctgcctgccagaacatgctgtttgagagcatccaggagggcaagtacgagttccccgacaaggactgggcccacatctcctgcgctgccaaagacctcatctccaagctgctggtccgtgacgccaagcagaggctgagtgccgcccaagtcctgcagcacccctgggttcaggggtgcgccccggagaacaccttgcccactcccatggtcctgcagaggaacagctgtgccaaagacctcacgtccttcgcggctgaggccattgccatgaaccggcagctggcccagcacgacgaggacctggctgaggaggaggccgcggggcagggccagcccgtcctggtccgagctacctcacgctgcctgcagctgtctccaccctcccagtccaagctggcgcagcggcggcaaagggccagtctgtcctcggccccagtggtcctggtgggagaccacgcctgaccctcccatctcccctctgtacataggtcacccgtcccccaatcaaatctaaaggttttttaagctatcgccagccggtgtccagcgggctgcccctcctctgcctggattcccaggcactaagctcagctgaggggggtgttttatagaaggtttttgcttttgggttttttttttcctgtttccacccctccccgttattttttcctttggatggttaaaagcattgcaggcacccgggaaggtgagcagagggtaggtgggtgggcttgtcccctccccggtcccccgccctgctcacctctactatgaaggtgcccccaggtcacctgtgctgcccgccatctgcccacgtggcttgcagtgactcaggagagcaggcccacagcgtttgccatcttgcagagctggggaggggcacaggaccctgccctcgtgttccctcccagcccgcagtatttcagggacaggctcttcccctctatccctcaccctgagagcacccctggtggcttggttggggaagggaggggctgcctgtctctggaggtgtcaggcaggcaggtggcaggcagctcacccacccaccccatgggatcccccagcccttcacccgcgcctgccttgtccccatgatagttgacaatcggggcttcctgcaaggcccgtctgtctgtccaggactcctggtggccagattcggcctccgaccttgaccttaaactgcagctgaccccaggggctcgccgctgcccctcccctccacaccaaggcctgagacagcaggagccccgcctggcccgaagccgtttccaccgcagcaggcagaggggctggacaggcactgtcagccaatgtggggggtcctgaagacacccccttggggcacccgagtgccccttctcagggctcagtctgaccgtagccacgtcctgcctcgcgccgcccctcgggcctgacctggaagctccgtcagctccgtccttgtccttagagctgagcccagaccccggggtctggccgaatcctcacccccagggcagtgtttttggtctgccaccttcaggaaaacggctgcggcctcggcctcccttcgggcacccaggaatgcgggggtctgctcagtccccccaccctccatgctccaacccccgggggctgcggagcctgctgccccctccccgcgggtggggacgttctatgcaatacagggttccactttagaagtgcgcgcggctagggtcaccgcccgcccttcccggcgcagcccccgagctccacagctggggcagcccctctggcttctaaatccgcggtcgggattcttcctcctgtttagttttttagtttttccttaaaaaaaaacaacacatcgatggactttgcttccctgttcttgaagaatacttgaatgtcggggggcctgggggtgggggcctcggagaccgtctgcctggccctgctgcccctcctgaatctcgtatgatggtcacagtccggtggccgtgggggtgctctgccttccctggtccccactgcccatatctgtggactgccccttccaaagacccctggggggggtggggcattccgcccacccctttcccccatcacttctcgcctgtcagtgattccatgtttcgtaacgggggattctctgcctttttgtatcaaagaacaagcaaatggacccccgcccgctgcaggcgcccatagccatcgggtctctaaagctgagtggctagcagcgtttgtttgtttgtttttttttttttttctgaaggtgggacagtcacttcctcctccctccccacccctgtcgcatccacgtgcgacctggaggactggtcagaaccgttactgtgaatgagtgaagatcctggaggaccctgggccccaggccagctcccatcgctgggggacggtgaacggccatgtgttaatgttacgatgtttttaaaagacaaaaaaaaaaaaaaaacctcaaaagtttttttaaagtgggggaaaaacatccaagcactttaattccaatgtaccaggtgaactgacggagctcagaagttttcctttacaccaactgtcaatgccggaattttgtattctgttttgtaaagatttaataaaagtc

SEQ ID NO: 17146 - DNA, 1747 bp, Homo sapiens
  source 1..1747: mol_type = unassigned DNA
cggctcctctcagcggcggtggcccaggtagaggggtccgcgctggcggcggcggcggcgctgttccccgcgcggtccgcggagcggggtccgggctgcgcgacgtggggcggcggcggcactgcggccccggcccaagcccgaccccgggtcccctcctcggccgccccccgcccggccgcccgccctcgggcctccccccgggccctcggtcccctcccccgctggcggggcccggacagaagatggtgcagaagaaaccagccgaacttcagggtttccaccgttcgttcaaggggcagaaccccttcgagctggccttctccctagaccagcccgaccacggagactctgactttggcctgcagtgctcagcccgccctgacatgcccgccagccagcccattgacatcccggacgccaagaagaggggcaagaagaagaagcgcggccgggccaccgacagcttctcgggcaggtttgaagacgtctaccagctgcaggaagatgtgctgggggagggcgctcatgcccgagtgcagacctgcatcaacctgatcaccagccaggagtacgccgtcaagatcattgagaagcagccaggccacattcggagcagggttttcagggaggtggagatgctgtaccagtgccagggacacaggaacgtcctagagctgattgagttcttcgaggaggaggaccgcttctacctggtgtttgagaagatgcggggaggctccatcctgagccacatccacaagcgccggcacttcaacgagctggaggccagcgtggtggtgcaggacgtggccagcgccttggactttctgcataacaaaggcatcgcccacagggacctaaagccggaaaacatcctctgtgagcaccccaaccaggtctcccccgtgaagatctgtgacttcgacctgggcagcggcatcaaactcaacggggactgctcccctatctccaccccggagctgctcactccgtgcggctcggcggagtacatggccccggaggtagtggaggccttcagcgaggaggctagcatctacgacaagcgctgcgacctgtggagcctgggcgtcatcttgtatatcctactcagcggctacccgcccttcgtgggccgctgtggcagcgactgcggctgggaccgcggcgaggcctgccctgcctgccagaacatgctgtttgagagcatccaggagggcaagtacgagttccccgacaaggactgggcccacatctcctgcgctgccaaagacctcatctccaagctgctggtccgtgacgccaagcagaggctgagtgccgcccaagtcctgcagcacccctgggttcaggggtgcgccccggagaacaccttgcccactcccatggtcctgcagaggtgggacagtcacttcctcctccctccccacccctgtcgcatccacgtgcgacctggaggactggtcagaaccgttactgtgaatgagtgaagatcctggaggaccctgggccccaggccagctcccatcgctgggggacggtgaacggccatgtgttaatgttacgatgtttttaaaagacaaaaaaaaaaaaaaaacctcaaaagtttttttaaagtgggggaaaaacatccaagcactttaattccaatgtaccaggtgaactgacggagctcagaagttttcctttacaccaactgtcaatgccggaattttgtattctgttttgtaaagatttaataaaagtc

SEQ ID NO: 17147 - DNA, 1503 bp, Homo sapiens
  source 1..1503: mol_type = unassigned DNA
agatggtgcagaagaaaccagccgaacttcagggtttccaccgttcgttcaaggggcagaaccccttcgagctggccttctccctagaccagcccgaccacggagactctgactttggcctgcagtgctcagcccgccctgacatgcccgccagccagcccattgacatcccggacgccaagaagaggggcaagaagaagaagcgcggccgggccaccgacagcttctcgggcaggtttgaagatcattgagaagcagccaggccacattcggagcagggttttcagggaggtggagatgctgtaccagtgccagggacacaggaacgtcctagagctgattgagttcttcgaggaggaggaccgcttctacctggtgtttgagaagatgcggggaggctccatcctgagccacatccacaagcgccggcacttcaacgagctggaggccagcgtggtggtgcaggacgtggccagcgccttggactttctgcataacaaaggcatcgcccacagggacctaaagccggaaaacatcctctgtgagcaccccaaccaggtctcccccgtgaagatctgtgacttcgacctgggcagcggcatcaaactcaacggggactgctcccctatctccaccccggagctgctcactccgtgcggctcggcggagtacatggccccggaggtagtggaggccttcagcgaggaggctagcatctacgacaagcgctgcgacctgtggagcctgggcgtcatcttgtatatcctactcagcggctacccgcccttcgtgggccgctgtggcagcgactgcggctgggaccgcggcgaggcctgccctgcctgccagaacatgctgtttgagagcatccaggagggcaagtacgagttccccgacaaggactgggcccacatctcctgcgctgccaaagacctcatctccaagctgctggtccgtgacgccaagcagaggctgagtgccgcccaagtcctgcagcacccctgggttcaggggtgcgccccggagaacaccttgcccactcccatggtcctgcagaggaacagctgtgccaaagacctcacgtccttcgcggctgaggccattgccatgaaccggcagctggcccagcacgacgaggacctggctgaggaggaggccgcggggcagggccagcccgtcctggtccgagctacctcacgctgcctgcagctgtctccaccctcccagtccaagctggcgcagcggcggcaaagggccagtctgtcctcggccccagtggtcctggtgggagaccacgcctgaccctcccatctcccctctgtacataggtcacccgtcccccaatcaaatctaaaggttttttaagctatcgccagccggtgtccagcgggctgcccctcctctgcctggattcccaggcactaagctcagctgaggggggtgttttatagaaggtttttgcttttgggttttttttttcctgtttccacccctccccgttat

SEQ ID NO: 17148 - DNA, 1425 bp, Homo sapiens
  source 1..1425: mol_type = unassigned DNA
aggggcagaaccccttcgagctggccttctccctagaccagcccgaccacggagactctgactttggcctgcagtgctcagcccgccctgacatgcccgccagccagcccattgacatcccggacgccaagaagaggggcaagaagaagaagcgcggccgggccaccgacagcttctcgggcaggtttgaagacgtctaccagctgcaggaagatgtgctgggggagggcgctcatgcccgagtgcagacctgcatcaacctgatcaccagccaggagtacgccgtcaagatcattgagaagcagccaggccacattcggagcagggttttcagggaggtggagatgctgtaccagtgccagggacacaggaacgtcctagagctgattgagaagatgcggggaggctccatcctgagccacatccacaagcgccggcacttcaacgagctggaggccagcgtggtggtgcaggacgtggccagcgccttggactttctgcataacaaaggcatcgcccacagggacctaaagccggaaaacatcctctgtgagcaccccaaccaggtctcccccgtgaagatctgtgacttcgacctgggcagcggcatcaaactcaacggggactgctcccctatctccaccccggagctgctcactccgtgcggctcggcggagtacatggccccggaggtagtggaggccttcagcgaggaggctagcatctacgacaagcgctgcgacctgtggagcctgggcgtcatcttgtatatcctactcagcggctacccgcccttcgtgggccgctgtggcagcgactgcggctgggaccgcggcgaggcctgccctgcctgccagaacatgctgtttgagagcatccaggagggcaagtacgagttccccgacaaggactgggcccacatctcctgcgctgccaaagacctcatctccaagctgctggtccgtgacgccaagcagaggctgagtgccgcccaagtcctgcagcacccctgggttcaggggtgcgccccggagaacaccttgcccactcccatggtcctgcagaggaacagctgtgccaaagacctcacgtccttcgcggctgaggccattgccatgaaccggcagctggcccagcacgacgaggacctggctgaggaggaggccgcggggcagggccagcccgtcctggtccgagctacctcacgctgcctgcagctgtctccaccctcccagtccaagctggcgcagcggcggcaaagggccagtctgtcctcggccccagtggtcctggtgggagaccacgcctgaccctcccatctcccctctgtacataggtcacccgtcccccaatcaaatctaaaggttttttaagctatcgccagccggtgtccagcgggctgcccctcctctgcctggattccca

SEQ ID NO: 17149 - DNA, 2946 bp, Homo sapiens
  source 1..2946: mol_type = unassigned DNA
cgggcaaccgcctcgcccgaagccctccctcgttactgtccgcataccccggcggcgccgccgcgggaagcggctccccctcctcttcctccgcgtcctcttccctctttcccccgccggggccgcttgttgcaccgccccgcggcctgcgggagccgctcgccccggccttgtgctcgcgtccgcacccctttcctgtcgccccccggggcccgcaccacagcccggccggcgagaccccggccagaccccgctgcccgcacaaaatgtcggcccggacgccattgccgacggtgaacgagcgggacacggaaaatcatacatctgtggatggatatactgaaccacacatccagcctaccaagtcgagtagcagacagaacatcccccggtgtagaaactccattacgtcagcaacagatgaacagcctcacattggaaattaccgtttacaaaaaacaatagggaagggaaattttgccaaagtcaaattggcaagacacgttctaactggtagagaggttgctgtgaaaataatagacaaaactcagctaaatcctaccagtctacaaaagttatttcgagaagtacgaataatgaagatactgaatcatcctaatatagtaaaattgtttgaagttattgaaacagagaagactctctatttagtcatggaatacgcgagtgggggtgaagtatttgattacttagttgcccatggaagaatgaaagagaaagaggcccgtgcaaaatttaggcagattgtatctgctgtacagtattgtcatcaaaagtacattgttcaccgtgatcttaaggctgaaaaccttctccttgatggtgatatgaatattaaaattgctgactttggttttagtaatgaatttacagttgggaacaaattggacacattttgtggaagcccaccctatgctgctcccgagcttttccaaggaaagaagtatgatgggcctgaagtggatgtgtggagtctgggcgtcattctctatacattagtcagtggctccttgcctttcgatggccagaatttaaaggaactgcgagagcgagttttacgagggaagtaccgtattcccttctatatgtccacagactgtgaaaatcttctgaagaaattattagtcctgaatccaataaagagaggcagcttggaacaaataatgaaagatcgatggatgaatgttggtcatgaagaggaagaactaaagccatatactgagcctgatccggatttcaatgacacaaaaagaatagacattatggtcaccatgggctttgcacgagatgaaataaatgatgccttaataaatcagaagtatgatgaagttatggctacttatattcttctaggtagaaaaccacctgaatttgaaggtggtgaatcgttatccagtggaaacttgtgtcagaggtcccggcccagtagtgacttaaacaacagcactcttcagtcccctgctcacctgaaggtccagagaagtatctcagcaaatcagaagcagcggcgtttcagtgatcatgctggtccatccattcctcctgctgtatcatataccaaaagacctcaggctaacagtgtggaaagtgaacagaaagaggagtgggacaaagatgtggctcgaaaacttggcagcacaacagttggatcaaaaagcgagatgactgcaagccctcttgtagggccagagaggaaaaaatcttcaactattccaagtaacaatgtgtattctggaggtagcatggcaagaaggaatacatatgtctgtgaaaggaccacagatcgatacgtagcattgcagaatggaaaagacagcagccttacggagatgtctgtgagtagcatatcttctgcaggctcttctgtggcctctgctgtcccctcagcacgaccccgccaccagaagtccatgtccacttctggtcatcctattaaagtcacactgccaaccattaaagacggctctgaagcttaccggcctggtacaacccagagagtgcctgctgcttccccatctgctcacagtattagtactgcgactccagaccggacccgttttccccgagggagctcaagccgaagcactttccatggtgaacagctccgggagcgacgcagcgttgcttataatgggccacctgcttcaccatcccatgaaacgggtgcatttgcacatgccagaaggggaacgtcaactggtataataagcaaaatcacatccaaatttgttcgcagggatccaagtgaaggcgaagccagtggcagaaccgacacctcaagaagtacatcaggggaaccaaaagaaagagacaaggaagagggtaaagattctaagccgcgttctttgcggttcacatggagtatgaagaccactagttcaatggaccctaatgacatgatgagagaaatccgaaaagtgttagatgcaaataactgtgattatgagcaaaaagagagatttttgcttttctgtgtccatggagacgctagacaggatagcctcgtgcagtgggagatggaagtctgcaagttgccacgactgtcacttaatggggttcgcttcaagcgaatatctgggacatctattgcctttaagaacattgcatcaaaaatagcaaatgagcttaagctgtaaagaagtccaaatttacaggttcagggaagatacatacatatatgaggtacagtttttgaatgtactggtaatgcctaatgtggtctgcctgtgaatctccccatgtagaatttgcccttaatgcaataaggttatacatagttatgaactgtaaaattaaagtcagtatgaactataataaatatctgtagcttaaaaagtaggttcacatgtacaggtaagtatattgtgtatttctgttcattttctgttcatagagttgtataataaaacatgattgcttaaaaacttg

SEQ ID NO: 17150 - DNA, 5169 bp, Homo sapiens
  source 1..5169: mol_type = unassigned DNA
ggcgcggcggcggcggtggctgtgaccgcgcggaccgagccgagacattcgcgccgggggatcgggcgccgccgccgctgggccccgggcgcgtggatgcggctgggtcgggcggcgccgtacacctgaggcggagaacggggcgcggcgcgggtgacgctgtcagggccgcggttcctgacgcccaggcgctcgccaggacgagccaggcagtgatttgaggcaccggcttcaccttcacccatggtccggagagcctagcggggctcgccaccgcctcccggctccccttccacgcctcatcctgccagcctcgccgccccgccagcgccgggcaaccgcctcgcccgaagccctccctcgttactgtccgcataccccggcggcgccgccgcgggaagcggctccccctcctcttcctccgcgtcctcttccctctttcccccgccggggccgcttgttgcaccgccccgcggcctgcgggagccgctcgccccggccttgtgctcgcgtccgcacccctttcctgtcgccccccggggcccgcaccacagcccggccggcgagaccccggccagaccccgctgcccgcacaaaatgtcggcccggacgccattgccgacggtgaacgagcgggacacggaaaatcatacatctgtggatggatatactgaaccacacatccagcctaccaagtcgagtagcagacagaacatcccccggtgtagaaactccattacgtcagcaacagatgaacagcctcacattggaaattaccgtttacaaaaaacaatagggaagggaaattttgccaaagtcaaattggcaagacacgttctaactggtagagaggttgctgtgaaaataatagacaaaactcagctaaatcctaccagtctacaaaagttatttcgagaagtacgaataatgaagatactgaatcatcctaatataggtgaagtatttgattacttagttgcccatggaagaatgaaagagaaagaggcccgtgcaaaatttaggcagattgtatctgctgtacagtattgtcatcaaaagtacattgttcaccgtgatcttaaggctgaaaaccttctccttgatggtgatatgaatattaaaattgctgactttggttttagtaatgaatttacagttgggaacaaattggacacattttgtggaagcccaccctatgctgctcccgagcttttccaaggaaagaagtatgatgggcctgaagtggatgtgtggagtctgggcgtcattctctatacattagtcagtggctccttgcctttcgatggccagaatttaaaggaactgcgagagcgagttttacgagggaagtaccgtattcccttctatatgtccacagactgtgaaaatcttctgaagaaattattagtcctgaatccaataaagagaggcagcttggaacaaataatgaaagatcgatggatgaatgttggtcatgaagaggaagaactaaagccatatactgagcctgatccggatttcaatgacacaaaaagaatagacattatggtcaccatgggctttgcacgagatgaaataaatgatgccttaataaatcagaagtatgatgaagttatggctacttatattcttctaggtagaaaaccacctgaatttgaaggtggtgaatcgttatccagtggaaacttgtgtcagaggtcccggcccagtagtgacttaaacaacagcactcttcagtcccctgctcacctgaaggtccagagaagtatctcagcaaatcagaagcagcggcgtttcagtgatcatgctggtccatccattcctcctgctgtatcatataccaaaagacctcaggctaacagtgtggaaagtgaacagaaagaggagtgggacaaagatgtggctcgaaaacttggcagcacaacagttggatcaaaaagcgagatgactgcaagccctcttgtagggccagagaggaaaaaatcttcaactattccaagtaacaatgtgtattctggaggtagcatggcaagaaggaatacatatgtctgtgaaaggaccacagatcgatacgtagcattgcagaatggaaaagacagcagccttacggagatgtctgtgagtagcatatcttctgcaggctcttctgtggcctctgctgtcccctcagcacgaccccgccaccagaagtccatgtccacttctggtcatcctattaaagtcacactgccaaccattaaagacggctctgaagcttaccggcctggtacaacccagagagtgcctgctgcttccccatctgctcacagtattagtactgcgactccagaccggacccgttttccccgagggagctcaagccgaagcactttccatggtgaacagctccgggagcgacgcagcgttgcttataatgggccacctgcttcaccatcccatgaaacgggtgcatttgcacatgccagaaggggaacgtcaactggtataataagcaaaatcacatccaaatttgttcgcagaagtacatcaggggaaccaaaagaaagagacaaggaagagggtaaagattctaagccgcgttctttgcggttcacatggagtatgaagaccactagttcaatggaccctaatgacatgatgagagaaatccgaaaagtgttagatgcaaataactgtgattatgagcaaaaagagagatttttgcttttctgtgtccatggagacgctagacaggatagcctcgtgcagtgggagatggaagtctgcaagttgccacgactgtcacttaatggggttcgcttcaagcgaatatctgggacatctattgcctttaagaacattgcatcaaaaatagcaaatgagcttaagctgtaaagaagtccaaatttacaggttcagggaagatacatacatatatgaggtacagtttttgaatgtactggtaatgcctaatgtggtctgcctgtgaatctccccatgtagaatttgcccttaatgcaataaggttatacatagttatgaactgtaaaattaaagtcagtatgaactataataaatatctgtagcttaaaaagtaggttcacatgtacaggtaagtatattgtgtatttctgttcattttctgttcatagagttgtataataaaacatgattgcttaaaaacttgtatagttgtctagatttctgcacctgaatgtatgtttgatgctttgatttgaaaatgttcttccctgttatttacattctggtgggtttttaaaattcttacctccatcatgcaattttgaaaattgtgtccagaattaaaagtgcatagaaatagcctttacaattgtagcatggacctttaaaaattgttttaaaatcttatttaaatttaaaccagaagctgaaaaatagatcagctttattatacacaaaattattactgcttatctttgctcttttccttgttatcccgcaaggtttagttgagaagatacaaaatgtttacagtgttggcacttagagtttttaaattcaagtacatgaaattcagtaatagcattgccttgagctaactaggaagtaccgggaaaaaagttaaatctacatcaagtttcttttgaactttgaagtgttttctgacccactgctaactgtagcaacaaaatttaaaagaaaaaaaacatactttatctggctattataacataaactgtcacgtaggtttgctgccttcagaataccgcaatttaattgcgggaatataataatattgggactgtttcacagcacaaactcatctttacagtgttgatcaatgcatcagttaagaaataatgccacctcaggaattaactggcattgggaacatttgcctcattctcctgctatcctcttcattcacccctgccactgtaatatctataagtacttaagagacttgtgagcaaaacatactatttataacagtatatgattgatttatgcttatgtggttgttcagtttgttcccatgtaactcgtttgttttaaatattttgccagatttcttgtatttattccacatcattatgcctataatgtgccgctttgtgattgggcatttgcctacttttctttcataattagtgatatatgcgatgtaaaaccactagtaaaggtacattttaatacttgttattttatactgaattagccttggaggttgactgtgcaatgttatttactgttgtaattactgtaataccaacatatgggccccatctgcacactcctgaaaaacagaaagtgtattcaaattttatcagtttaaagaaaataaagctgtgataaatactgtaattccaacctacattagaaggtctaagtgtaggtgatgtgccattccataatggcttccagactagggtgaattttatgttctgtactgtactgtgatgtagctttcttctgtaacagttatgttttaaaattaagtgagttttttttttgccttagcaaagggtggtgtttgaaaaaaaaaatgtgtagcccctttttaacctagtgttcattcaaaaaaaaattgatgcaaatctttattcactttcactggtgcacactgaaattttacttgaacagttctcataataaagcacttgtcttttgctctttatcagaatgtgaattacctgttttctggtacaaaagtattctgtatgaggagtttattgtatgtgttctaaatttagttggcaaagggtgaagctgtgaaggttttcaagattattgaaactatgaaggtttcttgtcattatgacaagaaagtttaatctttttataggaattcctgtcactgaaatacgtttttaaaaaaatagactcatgtgttttccacggtagaaactgatatttttttacattttctcactgtggccaactcttctgtgtttgtagaaaggaatttgacttcaatatcttttatgaactaaaaatgaaatcttgatactcactttagatttttcattttatgtgttcatgacaacataaatatttttcaaagatttagaggaattttgcaatgtgtttgcataaataaataccagtttatgttcaccggctatgtgataccaggatttccttggcttctgttgaaatattatttgatatgacatcccttatattaaattaattattttgtagaaa

SEQ ID NO: 17151 - DNA, 5230 bp, Homo sapiens
  source 1..5230: mol_type = unassigned DNA
ggcgcggcggcggcggtggctgtgaccgcgcggaccgagccgagacattcgcgccgggggatcgggcgccgccgccgctgggccccgggcgcgtggatgcggctgggtcgggcggcgccgtacacctgaggcggagaacggggcgcggcgcgggtgacgctgtcagggccgcggttcctgacgcccaggcgctcgccaggacgagccaggcagtgatttgaggcaccggcttcaccttcacccatggtccggagagcctagcggggctcgccaccgcctcccggctccccttccacgcctcatcctgccagcctcgccgccccgccagcgccgggcaaccgcctcgcccgaagccctccctcgttactgtccgcataccccggcggcgccgccgcgggaagcggctccccctcctcttcctccgcgtcctcttccctctttcccccgccggggccgcttgttgcaccgccccgcggcctgcgggagccgctcgccccggccttgtgctcgcgtccgcacccctttcctgtcgccccccggggcccgcaccacagcccggccggcgagaccccggccagaccccgctgcccgcacaaaatgtcggcccggacgccattgccgacggtgaacgagcgggacacggaaaatcatacatctgtggatggatatactgaaccacacatccagcctaccaagtcgagtagcagacagaacatcccccggtgtagaaactccattacgtcagcaacagatgaacagcctcacattggaaattaccgtttacaaaaaacaatagggaagggaaattttgccaaagtcaaattggcaagacacgttctaactggtagagaggttgctgtgaaaataatagacaaaactcagctaaatcctaccagtctacaaaagttatttcgagaagtacgaataatgaagatactgaatcatcctaatatagtaaaattgtttgaagttattgaaacagagaagactctctatttagtcatggaatacgcgagtgggggtgaagtatttgattacttagttgcccatggaagaatgaaagagaaagaggcccgtgcaaaatttaggcagattgtatctgctgtacagtattgtcatcaaaagtacattgttcaccgtgatcttaaggctgaaaaccttctccttgatggtgatatgaatattaaaattgctgactttggttttagtaatgaatttacagttgggaacaaattggacacattttgtggaagcccaccctatgctgctcccgagcttttccaaggaaagaagtatgatgggcctgaagtggatgtgtggagtctgggcgtcattctctatacattagtcagtggctccttgcctttcgatggccagaatttaaaggaactgcgagagcgagttttacgagggaagtaccgtattcccttctatatgtccacagactgtgaaaatcttctgaagaaattattagtcctgaatccaataaagagaggcagcttggaacaaataatgaaagatcgatggatgaatgttggtcatgaagaggaagaactaaagccatatactgagcctgatccggatttcaatgacacaaaaagaatagacattatggtcaccatgggctttgcacgagatgaaataaatgatgccttaataaatcagaagtatgatgaagttatggctacttatattcttctaggtagaaaaccacctgaatttgaaggtggtgaatcgttatccagtggaaacttgtgtcagaggtcccggcccagtagtgacttaaacaacagcactcttcagtcccctgctcacctgaaggtccagagaagtatctcagcaaatcagaagcagcggcgtttcagtgatcatgctggtccatccattcctcctgctgtatcatataccaaaagacctcaggctaacagtgtggaaagtgaacagaaagaggagtgggacaaagatgtggctcgaaaacttggcagcacaacagttggatcaaaaagcgagatgactgcaagccctcttgtagggccagagaggaaaaaatcttcaactattccaagtaacaatgtgtattctggaggtagcatggcaagaaggaatacatatgtctgtgaaaggaccacagatcgatacgtagcattgcagaatggaaaagacagcagccttacggagatgtctgtgagtagcatatcttctgcaggctcttctgtggcctctgctgtcccctcagcacgaccccgccaccagaagtccatgtccacttctggtcatcctattaaagtcacactgccaaccattaaagacggctctgaagcttaccggcctggtacaacccagagagtgcctgctgcttccccatctgctcacagtattagtactgcgactccagaccggacccgttttccccgagggagctcaagccgaagcactttccatggtgaacagctccgggagcgacgcagcgttgcttataatgggccacctgcttcaccatcccatgaaacgggtgcatttgcacatgccagaaggggaacgtcaactggtataataagcaaaatcacatccaaatttgttcgcagaagtacatcaggggaaccaaaagaaagagacaaggaagagggtaaagattctaagccgcgttctttgcggttcacatggagtatgaagaccactagttcaatggaccctaatgacatgatgagagaaatccgaaaagtgttagatgcaaataactgtgattatgagcaaaaagagagatttttgcttttctgtgtccatggagacgctagacaggatagcctcgtgcagtgggagatggaagtctgcaagttgccacgactgtcacttaatggggttcgcttcaagcgaatatctgggacatctattgcctttaagaacattgcatcaaaaatagcaaatgagcttaagctgtaaagaagtccaaatttacaggttcagggaagatacatacatatatgaggtacagtttttgaatgtactggtaatgcctaatgtggtctgcctgtgaatctccccatgtagaatttgcccttaatgcaataaggttatacatagttatgaactgtaaaattaaagtcagtatgaactataataaatatctgtagcttaaaaagtaggttcacatgtacaggtaagtatattgtgtatttctgttcattttctgttcatagagttgtataataaaacatgattgcttaaaaacttgtatagttgtctagatttctgcacctgaatgtatgtttgatgctttgatttgaaaatgttcttccctgttatttacattctggtgggtttttaaaattcttacctccatcatgcaattttgaaaattgtgtccagaattaaaagtgcatagaaatagcctttacaattgtagcatggacctttaaaaattgttttaaaatcttatttaaatttaaaccagaagctgaaaaatagatcagctttattatacacaaaattattactgcttatctttgctcttttccttgttatcccgcaaggtttagttgagaagatacaaaatgtttacagtgttggcacttagagtttttaaattcaagtacatgaaattcagtaatagcattgccttgagctaactaggaagtaccgggaaaaaagttaaatctacatcaagtttcttttgaactttgaagtgttttctgacccactgctaactgtagcaacaaaatttaaaagaaaaaaaacatactttatctggctattataacataaactgtcacgtaggtttgctgccttcagaataccgcaatttaattgcgggaatataataatattgggactgtttcacagcacaaactcatctttacagtgttgatcaatgcatcagttaagaaataatgccacctcaggaattaactggcattgggaacatttgcctcattctcctgctatcctcttcattcacccctgccactgtaatatctataagtacttaagagacttgtgagcaaaacatactatttataacagtatatgattgatttatgcttatgtggttgttcagtttgttcccatgtaactcgtttgttttaaatattttgccagatttcttgtatttattccacatcattatgcctataatgtgccgctttgtgattgggcatttgcctacttttctttcataattagtgatatatgcgatgtaaaaccactagtaaaggtacattttaatacttgttattttatactgaattagccttggaggttgactgtgcaatgttatttactgttgtaattactgtaataccaacatatgggccccatctgcacactcctgaaaaacagaaagtgtattcaaattttatcagtttaaagaaaataaagctgtgataaatactgtaattccaacctacattagaaggtctaagtgtaggtgatgtgccattccataatggcttccagactagggtgaattttatgttctgtactgtactgtgatgtagctttcttctgtaacagttatgttttaaaattaagtgagttttttttttgccttagcaaagggtggtgtttgaaaaaaaaaatgtgtagcccctttttaacctagtgttcattcaaaaaaaaattgatgcaaatctttattcactttcactggtgcacactgaaattttacttgaacagttctcataataaagcacttgtcttttgctctttatcagaatgtgaattacctgttttctggtacaaaagtattctgtatgaggagtttattgtatgtgttctaaatttagttggcaaagggtgaagctgtgaaggttttcaagattattgaaactatgaaggtttcttgtcattatgacaagaaagtttaatctttttataggaattcctgtcactgaaatacgtttttaaaaaaatagactcatgtgttttccacggtagaaactgatatttttttacattttctcactgtggccaactcttctgtgtttgtagaaaggaatttgacttcaatatcttttatgaactaaaaatgaaatcttgatactcactttagatttttcattttatgtgttcatgacaacataaatatttttcaaagatttagaggaattttgcaatgtgtttgcataaataaataccagtttatgttcaccggctatgtgataccaggatttccttggcttctgttgaaatattatttgatatgacatcccttatattaaattaattattttgt

SEQ ID NO: 17152 - DNA, 4701 bp, Homo sapiens
  source 1..4701: mol_type = unassigned DNA
aaacagagccgaagcttcgtcttcggaatcgaggaggagagcgcgtccccggggtttaccttcttcggctgtttccggaattcacccgtagtctgtggccgggaggagaaggcgcgccccacctcccgtttctagccgcttcggatgtttccggctgctgccggcgaaaagagccgagggccggcggtggtggcggccatgttgggagcagcaggtccggcggcggctgcctgtgtgccgggcgcggagcagtgccgctgagggcaggggaggagcgaggcaggcggccggctgcggcggcagagagtaggcggagcggcgcggcccggccgaaaggcggcacagcccagccgggggtcgggggggtgcggtccggagccgctcggagccggcgcggcctagcccgagcggcgcatccccgggctggcgtgagcggctgcccggcctccccgcacccccggccggggcccatgcggcgggtgctcctgctgtgagaagccccgcccggccgggctccgcgccttcccttccctcccttcctccaagcttctcggttccctcccccgagataccggcgccatgtccagcgctcggacccccctacccacgctgaacgagagggacacggagcagcccaccttgggacaccttgactccaagcccagcagtaagtccaacatgattcggggccgcaactcagccacctctgctgatgagcagccccacattggaaactaccggctcctcaagaccattggcaagggtaattttgccaaggtgaagttggcccgacacatcctgactgggaaagaggtagctgtgaagatcattgacaagactcaactgaactcctccagcctccagaaactattccgcgaagtaagaataatgaaggttttgaatcatcccaacatagttaaattatttgaagtgattgagactgagaaaacgctctaccttgtcatggagtacgctagtggcggagaggtatttgattacctagtggctcatggcaggatgaaagaaaaagaggctcgagccaaattccgccagatagtgtctgctgtgcagtactgtcaccagaagtttattgtccatagagacttaaaggcagaaaacctgctcttggatgctgatatgaacatcaagattgcagactttggcttcagcaatgaattcacctttgggaacaagctggacaccttctgtggcagtcccccttatgctgccccagaactcttccagggcaaaaaatatgatggacccgaggtggatgtgtggagcctaggagttatcctctatacactggtcagcggatccctgccttttgatggacagaacctcaaggagctgcgggaacgggtactgaggggaaaataccgtattccattctacatgtccacggactgtgaaaacctgcttaagaaatttctcattcttaatcccagcaagagaggcactttagagcaaatcatgaaagatcgatggatgaatgtgggtcacgaagatgatgaactaaagccttacgtggagccactccctgactacaaggacccccggcggacagagctgatggtgtccatgggttatacacgggaagagatccaggactcgctggtgggccagagatacaacgaggtgatggccacctatctgctcctgggctacaagagctccgagctggaaggcgacaccatcaccctgaaaccccggccttcagctgatctgaccaatagcagcgccccatccccatcccacaaggtacagcgcagcgtgtcggccaatcccaagcagcggcgcttcagcgaccaggcagctggtcctgccattcccacctctaattcttactctaagaagactcagagtaacaacgcagaaaataagcggcctgaggaggaccgggagtcagggcggaaagccagcagcacagccaaggtgcctgccagccccctgcccggtctggagaggaagaagaccaccccaaccccctccacgaacagcgtcctctccaccagcacaaatcgaagcaggaattccccacttttggagcgggccagcctcggccaggcctccatccagaatggcaaagacagcctaaccatgccagggtcccgggcctccacggcttctgcttctgccgcagtctctgcggcccggccccgccagcaccagaaatccatgtcggcctccgtgcaccccaacaaggcctctgggctgccccccacggagagtaactgtgaggtgccgcggcccagcacagccccccagcgtgtccctgttgcctccccatccgcccacaacatcagcagcagtggtggagccccagaccgaactaacttcccccggggtgtgtccagccgaagcaccttccatgctgggcagctccgacaggtgcgggaccagcagaatttgccctacggtgtgaccccagcctctccctctggccacagccagggccggcggggggcctctgggagcatcttcagcaagttcacctccaagtttgtacgcaggaacctgaatgaacctgaaagcaaagaccgagtggagacgctcagacctcacgtggtgggcagtggcggcaacgacaaagaaaaggaagaatttcgggaggccaagccccgctccctccgcttcacgtggagtatgaagaccacgagctccatggagcccaacgagatgatgcgggagatccgcaaggtgctggacgcgaacagctgccagagcgagctgcatgagaagtacatgctgctgtgcatgcacggcacgccgggccacgaggacttcgtgcagtgggagatggaggtgtgcaaactgccgcggctctctctcaacggggttcgatttaagcggatatcgggcacctccatggccttcaaaaacattgcctccaaaatagccaacgagctgaagctttaacaggctgccaggagcgggggcggcgggggcgggccagctggacgggctgccggccgctgcgccgccccacctgggcgagactgcagcgatggattggtgtgtctcccctgctggcacttctcccctccctggcccttctcagttttctcttacatgtttgtggggggtgggagattgttctccagcaccccacattcacccctgcccagagattcccccttctcctctcccctactggaggcaaaggaaggggagggtggatgggggggcagggctccccctcggtactgcggttgcacagagtatttcgcctaaaccaagaaattttttattaccaaaaagaaaaaagaaaaaaaaaatcccagcggccacctttcctccctgccccattgggacagtcgagactggatctgtggggtttcccgggagggtggctcagggctggaacactctcaggcaagagtggtggagctcccgtcaggccctccgccaggcccactgtgggcttctcccctctcctccctccttcccctccaagcaaaccaccagaggtggccttcccctgacctcaggcccctgggctggaggcctgggcggtggggcagggggcgggggtgctgcgcagccctgcagtgggtggggctgggggctgctccggggctgctgaggctggagggccggcacaaggctccgcctccctccacactgtaccctctgcccctcctccccagagctgggcatttccttccacaagctgctgtggggacgtgtgttccctcaaagtctgtgccatcttctcccacccctcccgggtagaaggaggggctgaccccagggctgggagaggggaggggactggagggcagactggcttctcggtccccagggggccgcttgggctgttggtctccagagcagggccactgggcactctgtgatgggggagcctttgtctgaaagcacagccccctcgcccttcctctccccatggcttccccttcattggcattaatctgggcaccagctctctccatagcagtgacttccctcaccactctcatctctcagccttgccttttcttcctgacactgtcgccccctcctctcaggagacactgccgagggccacctggcagaaggctgagttaggcagcagggccgggagcgtctgccctccacagggtgggggacagataggctaagcgactcccagcttgctaccctcagtggccagtgtgggcgtgggcggtttggggcgcttggctggtggtggccactgcatcccttaatttatttctctgctgtttctgttcttgagaaattgggggtgggagtcctacacagaggctgcccctaccctcacctgagttgtacatttttttgtgatgggttttattttttattattttattttattttttttttttttgatttatgatgactccacccctcttcatcacccccgctcccaggccaggctcagcgattaagccgagcccttgcgtcctaggaaggggccttgccaacctcagccctcctgccccacactcctactgcggctcagaccaagggctccccctccctcccttcccccctcctgccctatggaacagcccgggtgctctgagggggctgggagggcatggcttggctcccaaagggggtaggggcccggggcacccaggcaaggtggcccctccccgtctagccccctcctccccaaccctgcacttagtttctcctctggatcaaacacgtaataaagagaatgtttggaatctg

SEQ ID NO: 17153 - DNA, 2903 bp, Homo sapiens
  source 1..2903: mol_type = unassigned DNA
gaaaagagccgagggccggcggtggtggcggccatgttgggagcagcaggtccggcggcggctgcctgtgtgccgggcgcggagcagtgccgctgagggcaggggaggagcgaggcaggcggccggctgcggcggcagagagtaggcggagcggcgcggcccggccgaaaggcggcacagcccagccgggggtcgggggggtgcggtccggagccgctcggagccggcgcggcctagcccgagcggcgcatccccgggctggcgtgagcggctgcccggcctccccgcacccccggccggggcccatgcggcgggtgctcctgctgtgagaagccccgcccggccgggctccgcgccttcccttccctcccttcctccaagcttctcggttccctcccccgagataccggcgccatgtccagcgctcggacccccctacccacgctgaacgagagggacacggagcagcccaccttgggacaccttgactccaagcccagcagtaagtccaacatgattcggggccgcaactcagccacctctgctgatgagcagccccacattggaaactaccggctcctcaagaccattggcaagggtaattttgccaaggtgaagttggcccgacacatcctgactgggaaagaggtagctgtgaagatcattgacaagactcaactgaactcctccagcctccagaaactattccgcgaagtaagaataatgaaggttttgaatcatcccaacatagttaaattatttgaagtgattgagactgagaaaacgctctaccttgtcatggagtacgctagtggcggagaggtatttgattacctagtggctcatggcaggatgaaagaaaaagaggctcgagccaaattccgccagatagtgtctgctgtgcagtactgtcaccagaagtttattgtccatagagacttaaaggcagaaaacctgctcttggatgctgatatgaacatcaagattgcagactttggcttcagcaatgaattcacctttgggaacaagctggacaccttctgtggcagtcccccttatgctgccccagaactcttccagggcaaaaaatatgatggacccgaggtggatgtgtggagcctaggagttatcctctatacactggtcagcggatccctgccttttgatggacagaacctcaaggagctgcgggaacgggtactgaggggaaaataccgtattccattctacatgtccacggactgtgaaaacctgcttaagaaatttctcattcttaatcccagcaagagaggcactttagagcaaatcatgaaagatcgatggatgaatgtgggtcacgaagatgatgaactaaagccttacgtggagccactccctgactacaaggacccccggcggacagagctgatggtgtccatgggttatacacgggaagagatccaggactcgctggtgggccagagatacaacgaggtgatggccacctatctgctcctgggctacaagagctccgagctggaaggcgacaccatcaccctgaaaccccggccttcagctgatctgaccaatagcagcgccccatccccatcccacaaggtacagcgcagcgtgtcggccaatcccaagcagcggcgcttcagcgaccaggctggtcctgccattcccacctctaattcttactctaagaagactcagagtaacaacgcagaaaataagcggcctgaggaggaccgggagtcagggcggaaagccagcagcacagccaaggtgcctgccagccccctgcccggtctggagaggaagaagaccaccccaaccccctccacgaacagcgtcctctccaccagcacaaatcgaagcaggaattccccacttttggagcgggccagcctcggccaggcctccatccagaatggcaaagacagcacagccccccagcgtgtccctgttgcctccccatccgcccacaacatcagcagcagtggtggagccccagaccgaactaacttcccccggggtgtgtccagccgaagcaccttccatgctgggcagctccgacaggtgcgggaccagcagaatttgccctacggtgtgaccccagcctctccctctggccacagccagggccggcggggggcctctgggagcatcttcagcaagttcacctccaagtttgtacgcagacctcacgtggtgggcagtggcggcaacgacaaagaaaaggaagaatttcgggaggccaagccccgctccctccgcttcacgtggagtatgaagaccacgagctccatggagcccaacgagatgatgcgggagatccgcaaggtgctggacgcgaacagctgccagagcgagctgcatgagaagtacatgctgctgtgcatgcacggcacgccgggccacgaggacttcgtgcagtgggagatggaggtgtgcaaactgccgcggctctctctcaacggggttcgatttaagcggatatcgggcacctccatggccttcaaaaacattgcctccaaaatagccaacgagctgaagctttaacaggctgccaggagcgggggcggcgggggcgggccagctggacgggctgccggccgctgcgccgccccacctgggcgagactgcagcgatggattggtgtgtctcccctgctggcacttctcccctccctggcccttctcagttttctcttacatgtttgtggggggtgggagattgttctccagcaccccacattcacccctgcccagagattcccccttctcctctcccctactggaggcaaaggaaggggagggtggatgggggggcagggctccccctcggtactgcggttgcacagagtatttcgcctaaaccaagaaattttttattaccaaaaagaaaaaagaaaaaaaaaa

SEQ ID NO: 17154 - DNA, 3004 bp, Homo sapiens
  source 1..3004: mol_type = unassigned DNA
gaattcacccgtagtctgtggccgggaggagaaggcgcgccccacctcccgtttctagccgcttcggatgtttccggctgctgccggcgaaaagagccgagggccggcggtggtggcggccatgttgggagcagcaggtccggcggcggctgcctgtgtgccgggcgcggagcagtgccgctgagggcaggggaggagcgaggcaggcggccggctgcggcggcagagagtaggcggagcggcgcggcccggccgaaaggcggcacagcccagccgggggtcgggggggtgcggtccggagccgctcggagccggcgcggcctagcccgagcggcgcatccccgggctggcgtgagcggctgcccggcctccccgcacccccggccggggcccatgcggcgggtgctcctgctgtgagaagccccgcccggccgggctccgcgccttcccttccctcccttcctccaagcttctcggttccctcccccgagataccggcgccatgtccagcgctcggacccccctacccacgctgaacgagagggacacggagcagcccaccttgggacaccttgactccaagcccagcagtaagtccaacatgattcggggccgcaactcagccacctctgctgatgagcagccccacattggaaactaccggctcctcaagaccattggcaagggtaattttgccaaggtgaagttggcccgacacatcctgactgggaaagaggtagctgtgaagatcattgacaagactcaactgaactcctccagcctccagaaactattccgcgaagtaagaataatgaaggttttgaatcatcccaacatagttaaattatttgaagtgattgagactgagaaaacgctctaccttgtcatggagtacgctagtggcggagaggtatttgattacctagtggctcatggcaggatgaaagaaaaagaggctcgagccaaattccgccagatagtgtctgctgtgcagtactgtcaccagaagtttattgtccatagagacttaaaggcagaaaacctgctcttggatgctgatatgaacatcaagattgcagactttggcttcagcaatgaattcacctttgggaacaagctggacaccttctgtggcagtcccccttatgctgccccagaactcttccagggcaaaaaatatgatggacccgaggtggatgtgtggagcctaggagttatcctctatacactggtcagcggatccctgccttttgatggacagaacctcaaggagctgcgggaacgggtactgaggggaaaataccgtattccattctacatgtccacggactgtgaaaacctgcttaagaaatttctcattcttaatcccagcaagagaggcactttagagcaaatcatgaaagatcgatggatgaatgtgggtcacgaagatgatgaactaaagccttacgtggagccactccctgactacaaggacccccggcggacagagctgatggtgtccatgggttatacacgggaagagatccaggactcgctggtgggccagagatacaacgaggtgatggccacctatctgctcctgggctacaagagctccgagctggaaggcgacaccatcaccctgaaaccccggccttcagctgatctgaccaatagcagcgccccatccccatcccacaaggtacagcgcagcgtgtcggccaatcccaagcagcggcgcttcagcgaccaggcagctggtcctgccattcccacctctaattcttactctaagaagactcagagtaacaacgcagaaaataagcggcctgaggaggaccgggagtcagggcggaaagccagcagcacagccaaggtgcctgccagccccctgcccggtctggagaggaagaagaccaccccaaccccctccacgaacagcgtcctctccaccagcacaaatcgaagcaggaattccccacttttggagcgggccagcctcggccaggcctccatccagaatggcaaagacagcacagccccccagcgtgtccctgttgcctccccatccgcccacaacatcagcagcagtggtggagccccagaccgaactaacttcccccggggtgtgtccagccgaagcaccttccatgctgggcagctccgacaggtgcgggaccagcagaatttgccctacggtgtgaccccagcctctccctctggccacagccagggccggcggggggcctctgggagcatcttcagcaagttcacctccaagtttgtacgcagaaatctgtctttcaggtttgccagaagacctcacgtggtgggcagtggcggcaacgacaaagaaaaggaagaatttcgggaggccaagccccgctccctccgcttcacgtggagtatgaagaccacgagctccatggagcccaacgagatgatgcgggagatccgcaaggtgctggacgcgaacagctgccagagcgagctgcatgagaagtacatgctgctgtgcatgcacggcacgccgggccacgaggacttcgtgcagtgggagatggaggtgtgcaaactgccgcggctctctctcaacggggttcgatttaagcggatatcgggcacctccatggccttcaaaaacattgcctccaaaatagccaacgagctgaagctttaacaggctgccaggagcgggggcggcgggggcgggccagctggacgggctgccggccgctgcgccgccccacctgggcgagactgcagcgatggattggtgtgtctcccctgctggcacttctcccctccctggcccttctcagttttctcttacatgtttgtggggggtgggagattgttctccagcaccccacattcacccctgcccagagattcccccttctcctctcccctactggaggcaaaggaaggggagggtggatgggggggcagggctccccctcggtactgcggttgcacagagtatttcgcctaaaccaagaaattttttattaccaaaaag

SEQ ID NO: 17155 - DNA, 4683 bp, Homo sapiens
  source 1..4683: mol_type = unassigned DNA
aaacagagccgaagcttcgtcttcggaatcgaggaggagagcgcgtccccggggtttaccttcttcggctgtttccggaattcacccgtagtctgtggccgggaggagaaggcgcgccccacctcccgtttctagccgcttcggatgtttccggctgctgccggcgaaaagagccgagggccggcggtggtggcggccatgttgggagcagcaggtccggcggcggctgcctgtgtgccgggcgcggagcagtgccgctgagggcaggggaggagcgaggcaggcggccggctgcggcggcagagagtaggcggagcggcgcggcccggccgaaaggcggcacagcccagccgggggtcgggggggtgcggtccggagccgctcggagccggcgcggcctagcccgagcggcgcatccccgggctggcgtgagcggctgcccggcctccccgcacccccggccggggcccatgcggcgggtgctcctgctgtgagaagccccgcccggccgggctccgcgccttcccttccctcccttcctccaagcttctcggttccctcccccgagataccggcgccatgtccagcgctcggacccccctacccacgctgaacgagagggacacggagcagcccaccttgggacaccttgactccaagcccagcagtaagtccaacatgattcggggccgcaactcagccacctctgctgatgagcagccccacattggaaactaccggctcctcaagaccattggcaagggtaattttgccaaggtgaagttggcccgacacatcctgactgggaaagaggtagctgtgaagatcattgacaagactcaactgaactcctccagcctccagaaactattccgcgaagtaagaataatgaaggttttgaatcatcccaacatagttaaattatttgaagtgattgagactgagaaaacgctctaccttgtcatggagtacgctagtggcggagaggtatttgattacctagtggctcatggcaggatgaaagaaaaagaggctcgagccaaattccgccagatagtgtctgctgtgcagtactgtcaccagaagtttattgtccatagagacttaaaggcagaaaacctgctcttggatgctgatatgaacatcaagattgcagactttggcttcagcaatgaattcacctttgggaacaagctggacaccttctgtggcagtcccccttatgctgccccagaactcttccagggcaaaaaatatgatggacccgaggtggatgtgtggagcctaggagttatcctctatacactggtcagcggatccctgccttttgatggacagaacctcaaggagctgcgggaacgggtactgaggggaaaataccgtattccattctacatgtccacggactgtgaaaacctgcttaagaaatttctcattcttaatcccagcaagagaggcactttagagcaaatcatgaaagatcgatggatgaatgtgggtcacgaagatgatgaactaaagccttacgtggagccactccctgactacaaggacccccggcggacagagctgatggtgtccatgggttatacacgggaagagatccaggactcgctggtgggccagagatacaacgaggtgatggccacctatctgctcctgggctacaagagctccgagctggaaggcgacaccatcaccctgaaaccccggccttcagctgatctgaccaatagcagcgccccatccccatcccacaaggtacagcgcagcgtgtcggccaatcccaagcagcggcgcttcagcgaccaggcagctggtcctgccattcccacctctaattcttactctaagaagactcagagtaacaacgcagaaaataagcggcctgaggaggaccgggagtcagggcggaaagccagcagcacagccaaggtgcctgccagccccctgcccggtctggagaggaagaagaccaccccaaccccctccacgaacagcgtcctctccaccagcacaaatcgaagcaggaattccccacttttggagcgggccagcctcggccaggcctccatccagaatggcaaagacagcctaaccatgccagggtcccgggcctccacggcttctgcttctgccgcagtctctgcggcccggccccgccagcaccagaaatccatgtcggcctccgtgcaccccaacaaggcctctgggctgccccccacggagagtaactgtgaggtgccgcggcccagcacagccccccagcgtgtccctgttgcctccccatccgcccacaacatcagcagcagtggtggagccccagaccgaactaacttcccccggggtgtgtccagccgaagcaccttccatgctgggcagctccgacaggtgcgggaccagcagaatttgccctacggtgtgaccccagcctctccctctggccacagccagggccggcggggggcctctgggagcatcttcagcaagttcacctccaagtttgtacgcagaaatctgtctttcaggtttgccagaagacctcacgtggtgggcagtggcggcaacgacaaagaaaaggaagaatttcgggaggccaagccccgctccctccgcttcacgtggagtatgaagaccacgagctccatggagcccaacgagatgatgcgggagatccgcaaggtgctggacgcgaacagctgccagagcgagctgcatgagaagtacatgctgctgtgcatgcacggcacgccgggccacgaggacttcgtgcagtgggagatggaggtgtgcaaactgccgcggctctctctcaacggggttcgatttaagcggatatcgggcacctccatggccttcaaaaacattgcctccaaaatagccaacgagctgaagctttaacaggctgccaggagcgggggcggcgggggcgggccagctggacgggctgccggccgctgcgccgccccacctgggcgagactgcagcgatggattggtgtgtctcccctgctggcacttctcccctccctggcccttctcagttttctcttacatgtttgtggggggtgggagattgttctccagcaccccacattcacccctgcccagagattcccccttctcctctcccctactggaggcaaaggaaggggagggtggatgggggggcagggctccccctcggtactgcggttgcacagagtatttcgcctaaaccaagaaattttttattaccaaaaagaaaaaagaaaaaaaaaatcccagcggccacctttcctccctgccccattgggacagtcgagactggatctgtggggtttcccgggagggtggctcagggctggaacactctcaggcaagagtggtggagctcccgtcaggccctccgccaggcccactgtgggcttctcccctctcctccctccttcccctccaagcaaaccaccagaggtggccttcccctgacctcaggcccctgggctggaggcctgggcggtggggcagggggcgggggtgctgcgcagccctgcagtgggtggggctgggggctgctccggggctgctgaggctggagggccggcacaaggctccgcctccctccacactgtaccctctgcccctcctccccagagctgggcatttccttccacaagctgctgtggggacgtgtgttccctcaaagtctgtgccatcttctcccacccctcccgggtagaaggaggggctgaccccagggctgggagaggggaggggactggagggcagactggcttctcggtccccagggggccgcttgggctgttggtctccagagcagggccactgggcactctgtgatgggggagcctttgtctgaaagcacagccccctcgcccttcctctccccatggcttccccttcattggcattaatctgggcaccagctctctccatagcagtgacttccctcaccactctcatctctcagccttgccttttcttcctgacactgtcgccccctcctctcaggagacactgccgagggccacctggcagaaggctgagttaggcagcagggccgggagcgtctgccctccacagggtgggggacagataggctaagcgactcccagcttgctaccctcagtggccagtgtgggcgtgggcggtttggggcgcttggctggtggtggccactgcatcccttaatttatttctctgctgtttctgttcttgagaaattgggggtgggagtcctacacagaggctgcccctaccctcacctgagttgtacatttttttgtgatgggttttattttttattattttattttattttttttttttttgatttatgatgactccacccctcttcatcacccccgctcccaggccaggctcagcgattaagccgagcccttgcgtcctaggaaggggccttgccaacctcagccctcctgccccacactcctactgcggctcagaccaagggctccccctccctcccttcccccctcctgccctatggaacagcccgggtgctctgagggggctgggagggcatggcttggctcccaaagggggtaggggcccggggcacccaggcaaggtggcccctccccgtctagccccctcctccccaaccctgcacttagtttctcctctggatcaaacacgtaataaagagaatgtttggaatctg

SEQ ID NO: 17156 - DNA, 4536 bp, Homo sapiens
  source 1..4536: mol_type = unassigned DNA
aaacagagccgaagcttcgtcttcggaatcgaggaggagagcgcgtccccggggtttaccttcttcggctgtttccggaattcacccgtagtctgtggccgggaggagaaggcgcgccccacctcccgtttctagccgcttcggatgtttccggctgctgccggcgaaaagagccgagggccggcggtggtggcggccatgttgggagcagcaggtccggcggcggctgcctgtgtgccgggcgcggagcagtgccgctgagggcaggggaggagcgaggcaggcggccggctgcggcggcagagagtaggcggagcggcgcggcccggccgaaaggcggcacagcccagccgggggtcgggggggtgcggtccggagccgctcggagccggcgcggcctagcccgagcggcgcatccccgggctggcgtgagcggctgcccggcctccccgcacccccggccggggcccatgcggcgggtgctcctgctgtgagaagccccgcccggccgggctccgcgccttcccttccctcccttcctccaagcttctcggttccctcccccgagataccggcgccatgtccagcgctcggacccccctacccacgctgaacgagagggacacggagcagcccaccttgggacaccttgactccaagcccagcagtaagtccaacatgattcggggccgcaactcagccacctctgctgatgagcagccccacattggaaactaccggctcctcaagaccattggcaagggtaattttgccaaggtgaagttggcccgacacatcctgactgggaaagaggtagctgtgaagatcattgacaagactcaactgaactcctccagcctccagaaactattccgcgaagtaagaataatgaaggttttgaatcatcccaacatagttaaattatttgaagtgattgagactgagaaaacgctctaccttgtcatggagtacgctagtggcggagaggtatttgattacctagtggctcatggcaggatgaaagaaaaagaggctcgagccaaattccgccagatagtgtctgctgtgcagtactgtcaccagaagtttattgtccatagagacttaaaggcagaaaacctgctcttggatgctgatatgaacatcaagattgcagactttggcttcagcaatgaattcacctttgggaacaagctggacaccttctgtggcagtcccccttatgctgccccagaactcttccagggcaaaaaatatgatggacccgaggtggatgtgtggagcctaggagttatcctctatacactggtcagcggatccctgccttttgatggacagaacctcaaggagctgcgggaacgggtactgaggggaaaataccgtattccattctacatgtccacggactgtgaaaacctgcttaagaaatttctcattcttaatcccagcaagagaggcactttagagcaaatcatgaaagatcgatggatgaatgtgggtcacgaagatgatgaactaaagccttacgtggagccactccctgactacaaggacccccggcggacagagctgatggtgtccatgggttatacacgggaagagatccaggactcgctggtgggccagagatacaacgaggtgatggccacctatctgctcctgggctacaagagctccgagctggaaggcgacaccatcaccctgaaaccccggccttcagctgatctgaccaatagcagcgccccatccccatcccacaaggtacagcgcagcgtgtcggccaatcccaagcagcggcgcttcagcgaccaggctggtcctgccattcccacctctaattcttactctaagaagactcagagtaacaacgcagaaaataagcggcctgaggaggaccgggagtcagggcggaaagccagcagcacagccaaggtgcctgccagccccctgcccggtctggagaggaagaagaccaccccaaccccctccacgaacagcgtcctctccaccagcacaaatcgaagcaggaattccccacttttggagcgggccagcctcggccaggcctccatccagaatggcaaagacagcacagccccccagcgtgtccctgttgcctccccatccgcccacaacatcagcagcagtggtggagccccagaccgaactaacttcccccggggtgtgtccagccgaagcaccttccatgctgggcagctccgacaggtgcgggaccagcagaatttgccctacggtgtgaccccagcctctccctctggccacagccagggccggcggggggcctctgggagcatcttcagcaagttcacctccaagtttgtacgcaggaacctgaatgaacctgaaagcaaagaccgagtggagacgctcagacctcacgtggtgggcagtggcggcaacgacaaagaaaaggaagaatttcgggaggccaagccccgctccctccgcttcacgtggagtatgaagaccacgagctccatggagcccaacgagatgatgcgggagatccgcaaggtgctggacgcgaacagctgccagagcgagctgcatgagaagtacatgctgctgtgcatgcacggcacgccgggccacgaggacttcgtgcagtgggagatggaggtgtgcaaactgccgcggctctctctcaacggggttcgatttaagcggatatcgggcacctccatggccttcaaaaacattgcctccaaaatagccaacgagctgaagctttaacaggctgccaggagcgggggcggcgggggcgggccagctggacgggctgccggccgctgcgccgccccacctgggcgagactgcagcgatggattggtgtgtctcccctgctggcacttctcccctccctggcccttctcagttttctcttacatgtttgtggggggtgggagattgttctccagcaccccacattcacccctgcccagagattcccccttctcctctcccctactggaggcaaaggaaggggagggtggatgggggggcagggctccccctcggtactgcggttgcacagagtatttcgcctaaaccaagaaattttttattaccaaaaagaaaaaagaaaaaaaaaatcccagcggccacctttcctccctgccccattgggacagtcgagactggatctgtggggtttcccgggagggtggctcagggctggaacactctcaggcaagagtggtggagctcccgtcaggccctccgccaggcccactgtgggcttctcccctctcctccctccttcccctccaagcaaaccaccagaggtggccttcccctgacctcaggcccctgggctggaggcctgggcggtggggcagggggcgggggtgctgcgcagccctgcagtgggtggggctgggggctgctccggggctgctgaggctggagggccggcacaaggctccgcctccctccacactgtaccctctgcccctcctccccagagctgggcatttccttccacaagctgctgtggggacgtgtgttccctcaaagtctgtgccatcttctcccacccctcccgggtagaaggaggggctgaccccagggctgggagaggggaggggactggagggcagactggcttctcggtccccagggggccgcttgggctgttggtctccagagcagggccactgggcactctgtgatgggggagcctttgtctgaaagcacagccccctcgcccttcctctccccatggcttccccttcattggcattaatctgggcaccagctctctccatagcagtgacttccctcaccactctcatctctcagccttgccttttcttcctgacactgtcgccccctcctctcaggagacactgccgagggccacctggcagaaggctgagttaggcagcagggccgggagcgtctgccctccacagggtgggggacagataggctaagcgactcccagcttgctaccctcagtggccagtgtgggcgtgggcggtttggggcgcttggctggtggtggccactgcatcccttaatttatttctctgctgtttctgttcttgagaaattgggggtgggagtcctacacagaggctgcccctaccctcacctgagttgtacatttttttgtgatgggttttattttttattattttattttattttttttttttttgatttatgatgactccacccctcttcatcacccccgctcccaggccaggctcagcgattaagccgagcccttgcgtcctaggaaggggccttgccaacctcagccctcctgccccacactcctactgcggctcagaccaagggctccccctccctcccttcccccctcctgccctatggaacagcccgggtgctctgagggggctgggagggcatggcttggctcccaaagggggtaggggcccggggcacccaggcaaggtggcccctccccgtctagccccctcctccccaaccctgcacttagtttctcctctggatcaaacacgtaataaagagaatgtttggaatctg

SEQ ID NO: 17157 - DNA, 4728 bp, Homo sapiens
  source 1..4728: mol_type = unassigned DNA
aaacagagccgaagcttcgtcttcggaatcgaggaggagagcgcgtccccggggtttaccttcttcggctgtttccggaattcacccgtagtctgtggccgggaggagaaggcgcgccccacctcccgtttctagccgcttcggatgtttccggctgctgccggcgaaaagagccgagggccggcggtggtggcggccatgttgggagcagcaggtccggcggcggctgcctgtgtgccgggcgcggagcagtgccgctgagggcaggggaggagcgaggcaggcggccggctgcggcggcagagagtaggcggagcggcgcggcccggccgaaaggcggcacagcccagccgggggtcgggggggtgcggtccggagccgctcggagccggcgcggcctagcccgagcggcgcatccccgggctggcgtgagcggctgcccggcctccccgcacccccggccggggcccatgcggcgggtgctcctgctgtgagaagccccgcccggccgggctccgcgccttcccttccctcccttcctccaagcttctcggttccctcccccgagataccggcgccatgtccagcgctcggacccccctacccacgctgaacgagagggacacggagcagcccaccttgggacaccttgactccaagcccagcagtaagtccaacatgattcggggccgcaactcagccacctctgctgatgagcagccccacattggaaactaccggctcctcaagaccattggcaagggtaattttgccaaggtgaagttggcccgacacatcctgactgggaaagaggtagctgtgaagatcattgacaagactcaactgaactcctccagcctccagaaactattccgcgaagtaagaataatgaaggttttgaatcatcccaacatagttaaattatttgaagtgattgagactgagaaaacgctctaccttgtcatggagtacgctagtggcggagaggtatttgattacctagtggctcatggcaggatgaaagaaaaagaggctcgagccaaattccgccagatagtgtctgctgtgcagtactgtcaccagaagtttattgtccatagagacttaaaggcagaaaacctgctcttggatgctgatatgaacatcaagattgcagactttggcttcagcaatgaattcacctttgggaacaagctggacaccttctgtggcagtcccccttatgctgccccagaactcttccagggcaaaaaatatgatggacccgaggtggatgtgtggagcctaggagttatcctctatacactggtcagcggatccctgccttttgatggacagaacctcaaggagctgcgggaacgggtactgaggggaaaataccgtattccattctacatgtccacggactgtgaaaacctgcttaagaaatttctcattcttaatcccagcaagagaggcactttagagcaaatcatgaaagatcgatggatgaatgtgggtcacgaagatgatgaactaaagccttacgtggagccactccctgactacaaggacccccggcggacagagctgatggtgtccatgggttatacacgggaagagatccaggactcgctggtgggccagagatacaacgaggtgatggccacctatctgctcctgggctacaagagctccgagctggaaggcgacaccatcaccctgaaaccccggccttcagctgatctgaccaatagcagcgccccatccccatcccacaaggtacagcgcagcgtgtcggccaatcccaagcagcggcgcttcagcgaccaggcagctggtcctgccattcccacctctaattcttactctaagaagactcagagtaacaacgcagaaaataagcggcctgaggaggaccgggagtcagggcggaaagccagcagcacagccaaggtgcctgccagccccctgcccggtctggagaggaagaagaccaccccaaccccctccacgaacagcgtcctctccaccagcacaaatcgaagcaggaattccccacttttggagcgggccagcctcggccaggcctccatccagaatggcaaagacagcctaaccatgccagggtcccgggcctccacggcttctgcttctgccgcagtctctgcggcccggccccgccagcaccagaaatccatgtcggcctccgtgcaccccaacaaggcctctgggctgccccccacggagagtaactgtgaggtgccgcggcccagcacagccccccagcgtgtccctgttgcctccccatccgcccacaacatcagcagcagtggtggagccccagaccgaactaacttcccccggggtgtgtccagccgaagcaccttccatgctgggcagctccgacaggtgcgggaccagcagaatttgccctacggtgtgaccccagcctctccctctggccacagccagggccggcggggggcctctgggagcatcttcagcaagttcacctccaagtttgtacgcagaaatctgtctttcaggtttgccagaaggaacctgaatgaacctgaaagcaaagaccgagtggagacgctcagacctcacgtggtgggcagtggcggcaacgacaaagaaaaggaagaatttcgggaggccaagccccgctccctccgcttcacgtggagtatgaagaccacgagctccatggagcccaacgagatgatgcgggagatccgcaaggtgctggacgcgaacagctgccagagcgagctgcatgagaagtacatgctgctgtgcatgcacggcacgccgggccacgaggacttcgtgcagtgggagatggaggtgtgcaaactgccgcggctctctctcaacggggttcgatttaagcggatatcgggcacctccatggccttcaaaaacattgcctccaaaatagccaacgagctgaagctttaacaggctgccaggagcgggggcggcgggggcgggccagctggacgggctgccggccgctgcgccgccccacctgggcgagactgcagcgatggattggtgtgtctcccctgctggcacttctcccctccctggcccttctcagttttctcttacatgtttgtggggggtgggagattgttctccagcaccccacattcacccctgcccagagattcccccttctcctctcccctactggaggcaaaggaaggggagggtggatgggggggcagggctccccctcggtactgcggttgcacagagtatttcgcctaaaccaagaaattttttattaccaaaaagaaaaaagaaaaaaaaaatcccagcggccacctttcctccctgccccattgggacagtcgagactggatctgtggggtttcccgggagggtggctcagggctggaacactctcaggcaagagtggtggagctcccgtcaggccctccgccaggcccactgtgggcttctcccctctcctccctccttcccctccaagcaaaccaccagaggtggccttcccctgacctcaggcccctgggctggaggcctgggcggtggggcagggggcgggggtgctgcgcagccctgcagtgggtggggctgggggctgctccggggctgctgaggctggagggccggcacaaggctccgcctccctccacactgtaccctctgcccctcctccccagagctgggcatttccttccacaagctgctgtggggacgtgtgttccctcaaagtctgtgccatcttctcccacccctcccgggtagaaggaggggctgaccccagggctgggagaggggaggggactggagggcagactggcttctcggtccccagggggccgcttgggctgttggtctccagagcagggccactgggcactctgtgatgggggagcctttgtctgaaagcacagccccctcgcccttcctctccccatggcttccccttcattggcattaatctgggcaccagctctctccatagcagtgacttccctcaccactctcatctctcagccttgccttttcttcctgacactgtcgccccctcctctcaggagacactgccgagggccacctggcagaaggctgagttaggcagcagggccgggagcgtctgccctccacagggtgggggacagataggctaagcgactcccagcttgctaccctcagtggccagtgtgggcgtgggcggtttggggcgcttggctggtggtggccactgcatcccttaatttatttctctgctgtttctgttcttgagaaattgggggtgggagtcctacacagaggctgcccctaccctcacctgagttgtacatttttttgtgatgggttttattttttattattttattttattttttttttttttgatttatgatgactccacccctcttcatcacccccgctcccaggccaggctcagcgattaagccgagcccttgcgtcctaggaaggggccttgccaacctcagccctcctgccccacactcctactgcggctcagaccaagggctccccctccctcccttcccccctcctgccctatggaacagcccgggtgctctgagggggctgggagggcatggcttggctcccaaagggggtaggggcccggggcacccaggcaaggtggcccctccccgtctagccccctcctccccaaccctgcacttagtttctcctctggatcaaacacgtaataaagagaatgtttggaatctg

SEQ ID NO: 17158 - DNA, 2112 bp, Homo sapiens
  source 1..2112: mol_type = unassigned DNA
cccagcagtaagtccaacatgattcggggccgcaactcagccacctctgctgatgagcagccccacattggaaactaccggctcctcaagaccattggcaagggtaattttgccaaggtgaagttggcccgacacatcctgactgggaaagaggtagctgtgaagatcattgacaagactcaactgaactcctccagcctccagaaactattccgcgaagtaagaataatgaaggttttgaatcatcccaacatagttaaattatttgaagtgattgagactgagaaaacgctctaccttgtcatggagtacgctagtggcggagaggtatttgattacctagtggctcatggcaggatgaaagaaaaagaggctcgagccaaattccgccagatagtgtctgctgtgcagtactgtcaccagaagtttattgtccatagagacttaaaggcagaaaacctgctcttggatgctgatatgaacatcaagattgcagactttggcttcagcaatgaattcacctttgggaacaagctggacaccttctgtggcagtcccccttatgctgccccagaactcttccagggcaaaaaatatgatggacccgaggtggatgtgtggagcctaggagttatcctctatacactggtcagcggatccctgccttttgatggacagaacctcaaggagctgcgggaacgggtactgaggggaaaataccgtattccattctacatgtccacggactgtgaaaacctgcttaagaaatttctcattcttaatcccagcaagagaggcactttagagcaaatcatgaaagatcgatggatgaatgtgggtcacgaagatgatgaactaaagccttacgtggagccactccctgactacaaggacccccggcggacagagctgatggtgtccatgggttatacacgggaagagatccaggactcgctggtgggccagagatacaacgaggtgatggccacctatctgctcctgggctacaagagctccgagctggaaggcgacaccatcaccctgaaaccccggccttcagctgatctgaccaatagcagcgccccatccccatcccacaaggtacagcgcagcgtgtcggccaatcccaagcagcggcgcttcagcgaccaggctggtcctgccattcccacctctaattcttactctaagaagactcagagtaacaacgcagaaaataagcggcctgaggaggaccgggagtcagggcggaaagccagcagcacagccaaggtgcctgccagccccctgcccggtctggagaggaagaagaccaccccaaccccctccacgaacagcgtcctctccaccagcacaaatcgaagcaggaattccccacttttggagcgggccagcctcggccaggcctccatccagaatggcaaagacagcacagccccccagcgtgtccctgttgcctccccatccgcccacaacatcagcagcagtggtggagccccagaccgaactaacttcccccggggtgtgtccagccgaagcaccttccatgctgggcagctccgacaggtgcgggaccagcagaatttgccctacggtgtgaccccagcctctccctctggccacagccagggccggcggggggcctctgggagcatcttcagcaagttcacctccaagtttgtacgcaggaacctgaatgaacctgaaagcaaagaccgagtggagacgctcagacctcacgtggtgggcagtggcggcaacgacaaagaaaaggaagaatttcgggaggccaagccccgctccctccgcttcacgtggagtatgaagaccacgagctccatggagcccaacgagatgatgcgggagatccgcaaggtgctggacgcgaacagctgccagagcgagctgcatgagaagtacatgctgctgtgcatgcacggcacgccgggccacgaggacttcgtgcagtgggagatggaggtgtgcaaactgccgcggctctctctcaacggggttcgatttaagcggatatcgggcacctccatggccttcaaaaacattgcctccaaaatagccaacgagctgaagctttaacaggctgccaggagcggg

SEQ ID NO: 17159 - DNA, 4566 bp, Homo sapiens
  source 1..4566: mol_type = unassigned DNA
aaacagagccgaagcttcgtcttcggaatcgaggaggagagcgcgtccccggggtttaccttcttcggctgtttccggaattcacccgtagtctgtggccgggaggagaaggcgcgccccacctcccgtttctagccgcttcggatgtttccggctgctgccggcgaaaagagccgagggccggcggtggtggcggccatgttgggagcagcaggtccggcggcggctgcctgtgtgccgggcgcggagcagtgccgctgagggcaggggaggagcgaggcaggcggccggctgcggcggcagagagtaggcggagcggcgcggcccggccgaaaggcggcacagcccagccgggggtcgggggggtgcggtccggagccgctcggagccggcgcggcctagcccgagcggcgcatccccgggctggcgtgagcggctgcccggcctccccgcacccccggccggggcccatgcggcgggtgctcctgctgtgagaagccccgcccggccgggctccgcgccttcccttccctcccttcctccaagcttctcggttccctcccccgagataccggcgccatgtccagcgctcggacccccctacccacgctgaacgagagggacacggagcagcccaccttgggacaccttgactccaagcccagcagtaagtccaacatgattcggggccgcaactcagccacctctgctgatgagcagccccacattggaaactaccggctcctcaagaccattggcaagggtaattttgccaaggtgaagttggcccgacacatcctgactgggaaagaggtagctgtgaagatcattgacaagactcaactgaactcctccagcctccagaaactattccgcgaagtaagaataatgaaggttttgaatcatcccaacatagttaaattatttgaagtgattgagactgagaaaacgctctaccttgtcatggagtacgctagtggcggagaggtatttgattacctagtggctcatggcaggatgaaagaaaaagaggctcgagccaaattccgccagatagtgtctgctgtgcagtactgtcaccagaagtttattgtccatagagacttaaaggcagaaaacctgctcttggatgctgatatgaacatcaagattgcagactttggcttcagcaatgaattcacctttgggaacaagctggacaccttctgtggcagtcccccttatgctgccccagaactcttccagggcaaaaaatatgatggacccgaggtggatgtgtggagcctaggagttatcctctatacactggtcagcggatccctgccttttgatggacagaacctcaaggagctgcgggaacgggtactgaggggaaaataccgtattccattctacatgtccacggactgtgaaaacctgcttaagaaatttctcattcttaatcccagcaagagaggcactttagagcaaatcatgaaagatcgatggatgaatgtgggtcacgaagatgatgaactaaagccttacgtggagccactccctgactacaaggacccccggcggacagagctgatggtgtccatgggttatacacgggaagagatccaggactcgctggtgggccagagatacaacgaggtgatggccacctatctgctcctgggctacaagagctccgagctggaaggcgacaccatcaccctgaaaccccggccttcagctgatctgaccaatagcagcgccccatccccatcccacaaggtacagcgcagcgtgtcggccaatcccaagcagcggcgcttcagcgaccaggcagctggtcctgccattcccacctctaattcttactctaagaagactcagagtaacaacgcagaaaataagcggcctgaggaggaccgggagtcagggcggaaagccagcagcacagccaaggtgcctgccagccccctgcccggtctggagaggaagaagaccaccccaaccccctccacgaacagcgtcctctccaccagcacaaatcgaagcaggaattccccacttttggagcgggccagcctcggccaggcctccatccagaatggcaaagacagcacagccccccagcgtgtccctgttgcctccccatccgcccacaacatcagcagcagtggtggagccccagaccgaactaacttcccccggggtgtgtccagccgaagcaccttccatgctgggcagctccgacaggtgcgggaccagcagaatttgccctacggtgtgaccccagcctctccctctggccacagccagggccggcggggggcctctgggagcatcttcagcaagttcacctccaagtttgtacgcagaaatctgtctttcaggtttgccagaaggaacctgaatgaacctgaaagcaaagaccgagtggagacgctcagacctcacgtggtgggcagtggcggcaacgacaaagaaaaggaagaatttcgggaggccaagccccgctccctccgcttcacgtggagtatgaagaccacgagctccatggagcccaacgagatgatgcgggagatccgcaaggtgctggacgcgaacagctgccagagcgagctgcatgagaagtacatgctgctgtgcatgcacggcacgccgggccacgaggacttcgtgcagtgggagatggaggtgtgcaaactgccgcggctctctctcaacggggttcgatttaagcggatatcgggcacctccatggccttcaaaaacattgcctccaaaatagccaacgagctgaagctttaacaggctgccaggagcgggggcggcgggggcgggccagctggacgggctgccggccgctgcgccgccccacctgggcgagactgcagcgatggattggtgtgtctcccctgctggcacttctcccctccctggcccttctcagttttctcttacatgtttgtggggggtgggagattgttctccagcaccccacattcacccctgcccagagattcccccttctcctctcccctactggaggcaaaggaaggggagggtggatgggggggcagggctccccctcggtactgcggttgcacagagtatttcgcctaaaccaagaaattttttattaccaaaaagaaaaaagaaaaaaaaaatcccagcggccacctttcctccctgccccattgggacagtcgagactggatctgtggggtttcccgggagggtggctcagggctggaacactctcaggcaagagtggtggagctcccgtcaggccctccgccaggcccactgtgggcttctcccctctcctccctccttcccctccaagcaaaccaccagaggtggccttcccctgacctcaggcccctgggctggaggcctgggcggtggggcagggggcgggggtgctgcgcagccctgcagtgggtggggctgggggctgctccggggctgctgaggctggagggccggcacaaggctccgcctccctccacactgtaccctctgcccctcctccccagagctgggcatttccttccacaagctgctgtggggacgtgtgttccctcaaagtctgtgccatcttctcccacccctcccgggtagaaggaggggctgaccccagggctgggagaggggaggggactggagggcagactggcttctcggtccccagggggccgcttgggctgttggtctccagagcagggccactgggcactctgtgatgggggagcctttgtctgaaagcacagccccctcgcccttcctctccccatggcttccccttcattggcattaatctgggcaccagctctctccatagcagtgacttccctcaccactctcatctctcagccttgccttttcttcctgacactgtcgccccctcctctcaggagacactgccgagggccacctggcagaaggctgagttaggcagcagggccgggagcgtctgccctccacagggtgggggacagataggctaagcgactcccagcttgctaccctcagtggccagtgtgggcgtgggcggtttggggcgcttggctggtggtggccactgcatcccttaatttatttctctgctgtttctgttcttgagaaattgggggtgggagtcctacacagaggctgcccctaccctcacctgagttgtacatttttttgtgatgggttttattttttattattttattttattttttttttttttgatttatgatgactccacccctcttcatcacccccgctcccaggccaggctcagcgattaagccgagcccttgcgtcctaggaaggggccttgccaacctcagccctcctgccccacactcctactgcggctcagaccaagggctccccctccctcccttcccccctcctgccctatggaacagcccgggtgctctgagggggctgggagggcatggcttggctcccaaagggggtaggggcccggggcacccaggcaaggtggcccctccccgtctagccccctcctccccaaccctgcacttagtttctcctctggatcaaacacgtaataaagagaatgtttggaatctg

SEQ ID NO: 17160 - DNA, 2891 bp, Homo sapiens
  source 1..2891: mol_type = unassigned DNA
gcggtccggagccgctcggagccggcgcggcctagcccgagcggcgcatccccgggctggcgtgagcggctgcccggcctccccgcacccccggccggggcccatgcggcgggtgctcctgctgtgagaagccccgcccggccgggctccgcgccttcccttccctcccttcctccaagcttctcggttccctcccccgagataccggcgccatgtccagcgctcggacccccctacccacgctgaacgagagggacacggagcagcccaccttgggacaccttgactccaagcccagcagtaagtccaacatgattcggggccgcaactcagccacctctgctgatgagcagccccacattggaaactaccggctcctcaagaccattggcaagggtaattttgccaaggtgaagttggcccgacacatcctgactgggaaagaggtagctgtgaagatcattgacaagactcaactgaactcctccagcctccagaaactattccgcgaagtaagaataatgaaggttttgaatcatcccaacatagttaaattatttgaagtgattgagactgagaaaacgctctaccttgtcatggagtacgctagtggcggagaggtatttgattacctagtggctcatggcaggatgaaagaaaaagaggctcgagccaaattccgccagatagtgtctgctgtgcagtactgtcaccagaagtttattgtccatagagacttaaaggcagaaaacctgctcttggatgctgatatgaacatcaagattgcagactttggcttcagcaatgaattcacctttgggaacaagctggacaccttctgtggcagtcccccttatgctgccccagaactcttccagggcaaaaaatatgatggacccgaggtggatgtgtggagcctaggagttatcctctatacactggtcagcggatccctgccttttgatggacagaacctcaaggagctgcgggaacgggtactgaggggaaaataccgtattccattctacatgtccacggactgtgaaaacctgcttaagaaatttctcattcttaatcccagcaagagaggcactttagagcaaatcatgaaagatcgatggatgaatgtgggtcacgaagatgatgaactaaagccttacgtggagccactccctgactacaaggacccccggcggacagagctgatggtgtccatgggttatacacgggaagagatccaggactcgctggtgggccagagatacaacgaggtgatggccacctatctgctcctgggctacaagagctccgagctggaaggcgacaccatcaccctgaaaccccggccttcagctgatctgaccaatagcagcgccccatccccatcccacaaggtacagcgcagcgtgtcggccaatcccaagcagcggcgcttcagcgaccaggctggtcctgccattcccacctctaattcttactctaagaagactcagagtaacaacgcagaaaataagcggcctgaggaggaccgggagtcagggcggaaagccagcagcacagccaaggtgcctgccagccccctgcccggtctggagaggaagaagaccaccccaaccccctccacgaacagcgtcctctccaccagcacaaatcgaagcaggaattccccacttttggagcgggccagcctcggccaggcctccatccagaatggcaaagacagcctaaccatgccagggtcccgggcctccacggcttctgcttctgccgcagtctctgcggcccggccccgccagcaccagaaatccatgtcggcctccgtgcaccccaacaaggcctctgggctgccccccacggagagtaactgtgaggtgccgcggcccaggcaagtcacagccccccagcgtgtccctgttgcctccccatccgcccacaacatcagcagcagtggtggagccccagaccgaactaacttcccccggggtgtgtccagccgaagcaccttccatgctgggcagctccgacaggtgcgggaccagcagaatttgccctacggtgtgaccccagcctctccctctggccacagccagggccggcggggggcctctgggagcatcttcagcaagttcacctccaagtttgtacgcaggaacctgaatgaacctgaaagcaaagaccgagtggagacgctcagacctcacgtggtgggcagtggcggcaacgacaaagaaaaggaagaatttcgggaggccaagccccgctccctccgcttcacgtggagtatgaagaccacgagctccatggagcccaacgagatgatgcgggagatccgcaaggtgctggacgcgaacagctgccagagcgagctgcatgagaagtacatgctgctgtgcatgcacggcacgccgggccacgaggacttcgtgcagtgggagatggaggtgtgcaaactgccgcggctctctctcaacggggttcgatttaagcggatatcgggcacctccatggccttcaaaaacattgcctccaaaatagccaacgagctgaagctttaacaggctgccaggagcgggggcggcgggggcgggccagctggacgggctgccggccgctgcgccgccccacctgggcgagactgcagcgatggattggtgtgtctcccctgctggcacttctcccctccctggcccttctcagttttctcttacatgtttgtggggggtgggagattgttctccagcaccccacattcacccctgcccagagattcccccttctcctctcccctactggaggcaaaggaaggggagggtggatgggggggcagggctccccctcggtactgcggttgcacagagtatttcgcctaaaccaagaaattttttattacc

SEQ ID NO: 17161 - DNA, 1176 bp, Homo sapiens
  source 1..1176: mol_type = unassigned DNA
gttgggagcagcaggtccggcggcggctgcctgtgtgccgggcgcggagcagtgccgctgagggcaggggaggagcgaggcaggcggccggctgcggcggcagagagtaggcgggtgctcctgctgtgagaagccccgcccggccgggctccgcgccttcccttccctcccttcctccaagcttctcggttccctcccccgagataccggcgccatgtccagcgctcggacccccctacccacgctgaacgagagggacacggagcagcccaccttgggacaccttgactccaagcccagcagtaagtccaacatgattcggggccgcaactcagccacctctgctgatgagcagccccacattggaaactaccggctcctcaagaccattggcaagggtaattttgccaaggtgaagttggcccgacacatcctgactgggaaagaggtagctgtgaagatcattgacaagactcaactgaactcctccagcctccagaaactattccgcgaagtaagaataatgaaggttttgaatcatcccaacatagttaaattatttgaagtgattgagactgagaaaacgctctaccttgtcatggagtacgctagtggcggagaggtatttgattacctagtggctcatggcaggatgaaagaaaaagaggctcgagccaaattccgccagatagtgtctgctgtgcagtactgtcaccagaagtttattgtccatagagacttaaaggcagaaaacctgctcttggatgctgatatgaacatcaagattgcagactttggcttcagcaatgaattcacctttgggaacaagctggacaccttctgtggcagtcccccttatgctgccccagaactcttccagggcaaaaaatatgatggacccgaggtggatgtgtggagcctaggagttatcctctatacactggtcagcggatccctgccttttgatggacagaacctcaaggagctgcgggaacgggtactgaggggaaaataccgtattccattctacatgtccacggactgtgaaaacctgcttaagaaatttctcattcttaatcccagcaagagaggcactttagagcaaatcatgaaagatcgatggatgaatgtgggtcacgaagatgatgaactaaagccttacgtggagccactccc

SEQ ID NO: 17162 - DNA, 2924 bp, Homo sapiens
  source 1..2924: mol_type = unassigned DNA
gaattcacccgtagtctgtggccgggaggagaaggcgcgccccacctcccgtttctagccgcttcggatgtttccggctgctgccggcgaaaagagccgagggccggcggtggtggcggccatgttgggagcagcaggtccggcggcggctgcctgtgtgccgggcgcggagcagtgccgctgagggcaggggaggagcgaggcaggcggccggctgcggcggcagagagtaggcggagcggcgcggcccggccgaaaggcggcacagcccagccgggggtcgggggggtgcggtccggagccgctcggagccggcgcggcctagcccgagcggcgcatccccgggctggcgtgagcggctgcccggcctccccgcacccccggccggggcccatgcggcgggtgctcctgctgtgagaagccccgcccggccgggctccgcgccttcccttccctcccttcctccaagcttctcggttccctcccccgagataccggcgccatgtccagcgctcggacccccctacccacgctgaacgagagggacacggagcagcccaccttgggacaccttgactccaagcccagcagtaagtccaacatgattcggggccgcaactcagccacctctgctgatgagcagccccacattggaaactaccggctcctcaagaccattggcaagggtaattttgccaaggtgaagttggcccgacacatcctgactgggaaagaggtagctgtgaagatcattgacaagactcaactgaactcctccagcctccagaaactattccgcgaagtaagaataatgaaggttttgaatcatcccaacatagttaaattatttgaagtgattgagactgagaaaacgctctaccttgtcatggagtacgctagtggcggagaggtatttgattacctagtggctcatggcaggatgaaagaaaaagaggctcgagccaaattccgccagatagtgtctgctgtgcagtactgtcaccagaagtttattgtccatagagacttaaaggcagaaaacctgctcttggatgctgatatgaacatcaagattgcagactttggcttcagcaatgaattcacctttgggaacaagctggacaccttctgtggcagtcccccttatgctgccccagaactcttccagggcaaaaaatatgatggacccgaggtggatgtgtggagcctaggagttatcctctatacactggtcagcggatccctgccttttgatggacagaacctcaaggagctgcgggaacgggtactgaggggaaaataccgtattccattctacatgtccacggactgtgaaaacctgcttaagaaatttctcattcttaatcccagcaagagaggcactttagagcaaatcatgaaagatcgatggatgaatgtgggtcacgaagatgatgaactaaagccttacgtggagccactccctgactacaaggacccccggcggacagagctgatggtgtccatgggttatacacgggaagagatccaggactcgctggtgggccagagatacaacgaggtgatggccacctatctgctcctgggctacaagagctccgagctggaaggcgacaccatcaccctgaaaccccggccttcagctgatctgaccaatagcagcgccccatccccatcccacaaggtacagcgcagcgtgtcggccaatcccaagcagcggcgcttcagcgaccaggctggtcctgccattcccacctctaattcttactctaagaagactcagagtaacaacgcagaaaataagcggcctgaggaggaccgggagtcagggcggaaagccagcagcacagccaaggtgcctgccagccccctgcccggtctggagaggaagaagaccaccccaaccccctccacgaacagcgtcctctccaccagcacaaatcgaagcaggaattccccacttttggagcgggccagcctcggccaggcctccatccagaatggcaaagacagcacagccccccagcgtgtccctgttgcctccccatccgcccacaacatcagcagcagtggtggagccccagaccgaactaacttcccccggggtgtgtccagccgaagcaccttccatgctgggcagctccgacaggtgcgggaccagcagaatttgccctacggtgtgaccccagcctctccctctggccacagccagggccggcggggggcctctgggagcatcttcagcaagttcacctccaagtttgtacgcaggaacctgaatgaacctgaaagcaaagaccgagtggagacgctcagacctcacgtggtgggcagtggcggcaacgacaaagaaaaggaagaatttcgggaggccaagccccgctccctccgcttcacgtggagtatgaagaccacgagctccatggagcccaacgagatgatgcgggagatccgcaaggtgctggacgcgaacagctgccagagcgagctgcatgagaagtacatgctgctgtgcatgcacggcacgccgggccacgaggacttcgtgcagtgggagatggaggtgtgcaaactgccgcggctctctctcaacggggttcgatttaagcggatatcgggcacctccatggccttcaaaaacattgcctccaaaatagccaacgagctgaagctttaacaggctgccaggagcgggggcggcgggggcgggccagctggacgggctgccggccgctgcgccgccccacctgggcgagactgcagcgatggattggtgtgtctcccctgctggcacttctcccctccctggcccttctcagttttctcttacatgtttgtggggggtgggagattgttctccagcaccccacattcacccctgcccagagattcccccttctcctctcccctactggaggcaaagg

SEQ ID NO: 17163 - DNA, 1022 bp, Homo sapiens
  source 1..1022: mol_type = unassigned DNA
atggaagtcgctggtagtccttttccctttctccagtcggtggcttgcctccttaccctggctcacatccctgctgtgggaaacatcttacagcatagaagaaggggtgcagggcccaccttgggacaccttgactccaagcccagcagtaagtccaacatgattcggggccgcaactcagccacctctgctgatgagcagccccacattggaaactaccggctcctcaagaccattggcaagggtaattttgccaaggtgaagttggcccgacacatcctgactgggaaagaggtagctgtgaagatcattgacaagactcaactgaactcctccagcctccagaaactattccgcgaagtaagaataatgaaggttttgaatcatcccaacatagttaaattatttgaagtgattgagactgagaaaacgctctaccttgtcatggagtacgctagtggcggagaggtatttgattacctagtggctcatggcaggatgaaagaaaaagaggctcgagccaaattccgccagatagtgtctgctgtgcagtactgtcaccagaagtttattgtccatagagacttaaaggcagaaaacctgctcttggatgctgatatgaacatcaagattgcagactttggcttcagcaatgaattcacctttgggaacaagctggacaccttctgtggcagtcccccttatgctgccccagaactcttccagggcaaaaaatatgatggacccgaggtggatgtgtggagcctaggagttatcctctatacactggtcagcggatccctgccttttgatggacagaacctcaaggagctgcgggaacgggtactgaggggaaaataccgtattccattctacatgtccacggactgtgaaaacctgcttaagaaatttctcattcttaatcccagcaagagaggcactttagagcaaatcatgaaagatcgatggatgaatgtgggtcacgaagatgatgaactaaagccttacgtggagccactccc

SEQ ID NO: 17164 - DNA, 558 bp, Homo sapiens
  source 1..558: mol_type = unassigned DNA
agtttctcttcatggattacctgctcgcggcaggcaggcaggcagctccccacctggaagcctgcagactcgccgagctgagagaatcatgctgcagatctcatgcttcttttttactttgtgttggcaaaaaccccaggagaagatgggagattctgggaggagatgattatgctggcccaccttgggacaccttgactccaagcccagcagtaagtccaacatgattcggggccgcaactcagccacctctgctgatgagcagccccacattggaaactaccggctcctcaagaccattggcaagggtaattttgccaaggtgaagttggcccgacacatcctgactgggaaagaggtagctgtgaagatcattgacaagactcaactgaactcctccagcctccagaaactattccgcgaagtaagaataatgaaggttttgaatcatcccaacatagttaaattatttgaagtgattgagactgagaaaacgctctaccttgtcatggagtacgctagtggcggagaggtatttgattacctagtggctcatgg

SEQ ID NO: 17165 - DNA, 595 bp, Homo sapiens
  source 1..595: mol_type = unassigned DNA
gatcattgtcattattgttccagttgaacaacacagtgaattttatctgagcaccacacaactctagcccaccttgggacaccttgactccaagcccagcagtaagtccaacatgattcggggccgcaactcagccacctctgctgatgagcagccccacattggaaactaccggctcctcaagaccattggcaagggtaattttgccaaggtgaagttggcccgacacatcctgactgggaaagaggtagctgtgaagatcattgacaagactcaactgaactcctccagcctccagaaactattccgcgaagtaagaataatgaaggttttgaatcatcccaacatagttaaattatttgaagtgattgagactgagaaaacgctctaccttgtcatggagtacgctagtggcggagaggtatttgattacctagtggctcatggcaggatgaaagaaaaagaggctcgagccaaattccgccagatagtgtctgctgtgcagtactgtcaccagaagtttattgtccatagagacttaaaggcagaaaacctgctcttggatgctgatatgaacatcaagattgcagacttt

SEQ ID NO: 17166 - DNA, 557 bp, Homo sapiens
  source 1..557: mol_type = unassigned DNA
agtatcttaagtaggtgtggtaatgactacagagaagtgctttttcaggatgagaagatgagggagaaaatttacaccattgctggattgtgttaagaactcggagaggaaaccacagggaggatgcactgctgaggaaatcgtctggcttcctggagtggggaccagagccagagagccaagccctcctggctttgctgagttctgtccttgcccctgacaccaacgtgtctgcctgcgttgttgctcctggttacagtgggctcagtcttgcctcttttttgatgggtgggcagaggaacactagtgttgggaatattgtccagcgttggagagatcatgtggtctgtcagaaggctggagttatttatagtgggagaaaagcccaggagcatggcacgggaagaactgatttcacaccagctcagcgcctgatgatgcccaccttgggacaccttgactccaagcccagcagtaagtccaacatgattcggggccgcaactcagccacctctgctgatgagcagccccacattggaaactaccggctcctcaag

SEQ ID NO: 17167 - DNA, 2862 bp, Homo sapiens
  source 1..2862: mol_type = unassigned DNA
cttcctgccctattcccctcctgccccttccctcccaccttgcttctggtgtgctgtcctggaattgcacgcgcttcctgaccaccaggctctggcccttgagaagccagcggggctttgtccctgttgctctccttgccaaacccagtctctctgctagtggtggtttcggttgcgacaccgtccaggttcccaggcaggaaccgctcggcctggctgcttagctacttttcactgaggaggtggtggaaggtgtcgcctgctctggctgagtaagggtggctggctgagccggcagcccccgccctaggcctggctcttcccggcctctgtactttgccctcgctgcctgacaggttctgctgtgggctctgctgaatggaagtcgctggtagtccttttccctttctccagtcggcccaccttgggacaccttgactccaagcccagcagtaagtccaacatgattcggggccgcaactcagccacctctgctgatgagcagccccacattggaaactaccggctcctcaagaccattggcaagggtaattttgccaaggtgaagttggcccgacacatcctgactgggaaagaggtagctgtgaagatcattgacaagactcaactgaactcctccagcctccagaaactattccgcgaagtaagaataatgaaggttttgaatcatcccaacatagttaaattatttgaagtgattgagactgagaaaacgctctaccttgtcatggagtacgctagtggcggagaggtatttgattacctagtggctcatggcaggatgaaagaaaaagaggctcgagccaaattccgccagatagtgtctgctgtgcagtactgtcaccagaagtttattgtccatagagacttaaaggcagaaaacctgctcttggatgctgatatgaacatcaagattgcagactttggcttcagcaatgaattcacctttgggaacaagctggacaccttctgtggcagtcccccttatgctgccccagaactcttccagggcaaaaaatatgatggacccgaggtggatgtgtggagcctaggagttatcctctatacactggtcagcggatccctgccttttgatggacagaacctcaaggagctgcgggaacgggtactgaggggaaaataccgtattccattctacatgtccacggactgtgaaaacctgcttaagaaatttctcattcttaatcccagcaagagaggcactttagagcaaatcatgaaagatcgatggatgaatgtgggtcacgaagatgatgaactaaagccttacgtggagccactccctgactacaaggacccccggcggacagagctgatggtgtccatgggttatacacgggaagagatccaggactcgctggtgggccagagatacaacgaggtgatggccacctatctgctcctgggctacaagagctccgagctggaaggcgacaccatcaccctgaaaccccggccttcagctgatctgaccaatagcagcgccccatccccatcccacaaggtacagcgcagcgtgtcggccaatcccaagcagcggcgcttcagcgaccaggctggtcctgccattcccacctctaattcttactctaagaagactcagagtaacaacgcagaaaataagcggcctgaggaggaccgggagtcagggcggaaagccagcagcacagccaaggtgcctgccagccccctgcccggtctggagaggaagaagaccaccccaaccccctccacgaacagcgtcctctccaccagcacaaatcgaagcaggaattccccacttttggagcgggccagcctcggccaggcctccatccagaatggcaaagacagcctaaccatgccagggtcccgggcctccacggcttctgcttctgccgcagtctctgcggcccggccccgccagcaccagaaatccatgtcggcctccgtgcaccccaacaaggcctctgggctgccccccacggagagtaactgtgaggtgccgcggcccagcacagccccccagcgtgtccctgttgcctccccatccgcccacaacatcagcagcagtggtggagccccagaccgaactaacttcccccggggtgtgtccagccgaagcaccttccatgctgggcagctccgacaggtgcgggaccagcagaatttgccctacggtgtgaccccagcctctccctctggccacagccagggccggcggggggcctctgggagcatcttcagcaagttcacctccaagtttgtacgcaggaacctgaatgaacctgaaagcaaagaccgagtggagacgctcagacctcacgtggtgggcagtggcggcaacgacaaagaaaaggaagaatttcgggaggccaagccccgctccctccgcttcacgtggagtatgaagaccacgagctccatggagcccaacgagatgatgcgggagatccgcaaggtgctggacgcgaacagctgccagagcgagctgcatgagaagtacatgctgctgtgcatgcacggcacgccgggccacgaggacttcgtgcagtgggagatggaggtgtgcaaactgccgcggctctctctcaacggggttcgatttaagcggatatcgggcacctccatggccttcaaaaacattgcctccaaaatagccaacgagctgaagctttaacaggctgccaggagcgggggcggcgggggcgggccagctggacgggctgccggccgctgcgccgccccacctgggcgagactgcagcgatggattggtgtgtctcccctgctggcacttctcccctccctggcccttctcagttttctcttacatgtttgt

SEQ ID NO: 17168 - DNA, 2911 bp, Homo sapiens
  source 1..2911: mol_type = unassigned DNA
gacggcccgggccaggcccgggatctagacggccgtagggggaagggagccgccctccccacggcgccttttcggaactgccgtggactcgaggacgctggtcgccggcctcctagggctgtgctgttttgttttgaccctcgcattgtgcagaattaaagtgcagtaaaatgtccactaggaccccattgccaacggtgaatgaacgagacactgaaaaccacacgtcacatggagatgggcgtcaagaagttacctctcgtaccagccgctcaggagctcggtgtagaaactctatagcctcctgtgcagatgaacaacctcacatcggaaactacagactgttgaaaacaatcggcaaggggaattttgcaaaagtaaaattggcaagacatatccttacaggcagagaggttgcaataaaaataattgacaaaactcagttgaatccaacaagtctacaaaagctcttcagagaagtaagaataatgaagattttaaatcatcccaatatagtgaagttattcgaagtcattgaaactgaaaaaacactctacctaatcatggaatatgcaagtggaggtgaagtatttgactatttggttgcacatggcaggatgaaggaaaaagaagcaagatctaaatttagacagattgtgtctgcagttcaatactgccatcagaaacggatcgtacatcgagacctcaaggctgaaaatctattgttagatgccgatatgaacattaaaatagcagatttcggttttagcaatgaatttactgttggcggtaaactcgacacgttttgtggcagtcctccatacgcagcacctgagctcttccagggcaagaaatatgacgggccagaagtggatgtgtggagtctgggggtcattttatacacactagtcagtggctcacttccctttgatgggcaaaacctaaaggaactgagagagagagtattaagagggaaatacagaattcccttctacatgtctacagactgtgaaaaccttctcaaacgtttcctggtgctaaatccaattaaacgcggcactctagagcaaatcatgaaggacaggtggatcaatgcagggcatgaagaagatgaactcaaaccatttgttgaaccagagctagacatctcagaccaaaaaagaatagatattatggtgggaatgggatattcacaagaagaaattcaagaatctcttagtaagatgaaatacgatgaaatcacagctacatatttgttattggggagaaaatcttcagaggttaggccgagcagtgatctcaacaacagtactggccagtctcctcaccacaaagtgcagagaagtgttttttcaagccaaaagcaaagacgctacagtgaccatgctggaccagctattccttctgttgtggcgtatccgaaaaggagtcagaccagcactgcagatagtgacctcaaagaagatggaatttcctcccggaaatcaagtggcagtgctgttggaggaaagggaattgctccagccagtcccatgcttgggaatgcaagtaatcctaataaggcggatattcctgaacgcaagaaaagctccactgtccctagtagtaacacagcatctggtggaatgacacgacgaaatacttatgtttgcagtgagagaactacagctgatagacactcagtgattcagaatggcaaagaaaacagcactattcctgatcagagaactccagttgcttcaacacacagtatcagtagtgcagccaccccagatcgaatccgcttcccaagaggcactgccagtcgtagcactttccacggccagccccgggaacggcgaaccgcaacatataatggccctcctgcctctcccagcctgtcccatgaagccacaccattgtcccagactcgaagccgaggctccactaatctctttagtaaattaacttcaaaactcacaaggagtcgcaatgtatctgctgagcaaaaagatgaaaacaaagaagcaaagcctcgatccctacgcttcacctggagcatgaaaaccactagttcaatggatcccggggacatgatgcgggaaatccgcaaagtgttggacgccaataactgcgactatgagcagagggagcgcttcttgctcttctgcgtccacggagatgggcacgcggagaacctcgtgcagtgggaaatggaagtgtgcaagctgccaagactgtctctgaacggggtccggtttaagcggatatcggggacatccatagccttcaaaaatattgcttccaaaattgccaatgagctaaagctgtaacccagtgattatgatgtaaattaagtagcaattaaagtgttttcctgaacactgatggaaatgtatagaataatatttaggcaataacgtctgcatcttctaaatcatgaaattaaagtctgaggacgagagcacgcctgggagcgaaagctggccttttttctacgaatgcactacattaaagatgtgcaacctatgcgccccctgccctacttccgttaccctgagagtcggtgtgtggccccatctccatgtgcctcccgtctgggtgggtgtgagagtggacggtatgtgtgtgaagtggtgtatatggaagcatctccctacactggcagccagtcattactagtacctctgcgggagatcatccggtgctaaaacattacagttgccaaggaggaaaatactgaatgactgctaagaattaaccttaagaccagttcatagttaatacaggtttacagttcatgcctgtggttttgtgtttgttgttttgtgtttttttagtgcaaaaggtttaaatttatagttgtgaacattgcttgtgtgtgtttttctaagtagattcacaagataattaaaaattcactttttctcag

SEQ ID NO: 17169 - DNA, 3283 bp, Homo sapiens
  source 1..3283: mol_type = unassigned DNA
gctccatggtcggcgcccacagcccgcggcggcctgtcttgcgctccacttccttcacatcctcctccgcctcctcgttttcaggcgccgccggcggcgctgtgtggaggcccgcgagctgaaattcgcggtgcgacgggagggagtggagaaggaggtgagggggcccaggatcgcggggcgccctgaggcaaggggacgccggcgggccgaagcgcagcccgccgcccgcaggctcggctccgccactgccgccctcccggtctcctcgcctcggccgccgaggcagggagagaatgagccccgggacccgccgggggacggcccgggccaggcccgggatctagacggccgtagggggaagggagccgccctccccacggcgccttttcggaactgccgtggactcgaggacgctggtcgccggcctcctagggctgtgctgttttgttttgaccctcgcattgtgcagaattaaagtgcagtaaaatgtccactaggaccccattgccaacggtgaatgaacgagacactgaaaaccacacgtcacatggagatgggcgtcaagaagttacctctcgtaccagccgctcaggagctcggtgtagaaactctatagcctcctgtgcagatgaacaacctcacatcggaaactacagactgttgaaaacaatcggcaaggggaattttgcaaaagtaaaattggcaagacatatccttacaggcagagaggttgcaataaaaataattgacaaaactcagttgaatccaacaagtctacaaaagctcttcagagaagtaagaataatgaagattttaaatcatcccaatatagtgaagttattcgaagtcattgaaactgaaaaaacactctacctaatcatggaatatgcaagtggaggtgaagtatttgactatttggttgcacatggcaggatgaaggaaaaagaagcaagatctaaatttagacagattgtgtctgcagttcaatactgccatcagaaacggatcgtacatcgagacctcaaggctgaaaatctattgttagatgccgatatgaacattaaaatagcagatttcggttttagcaatgaatttactgttggcggtaaactcgacacgttttgtggcagtcctccatacgcagcacctgagctcttccagggcaagaaatatgacgggccagaagtggatgtgtggagtctgggggtcattttatacacactagtcagtggctcacttccctttgatgggcaaaacctaaaggaactgagagagagagtattaagagggaaatacagaattcccttctacatgtctacagactgtgaaaaccttctcaaacgtttcctggtgctaaatccaattaaacgcggcactctagagcaaatcatgaaggacaggtggatcaatgcagggcatgaagaagatgaactcaaaccatttgttgaaccagagctagacatctcagaccaaaaaagaatagatattatggtgggaatgggatattcacaagaagaaattcaagaatctcttagtaagatgaaatacgatgaaatcacagctacatatttgttattggggagaaaatcttcagagctggatgctagtgattccagttctagcagcaatctttcacttgctaaggttaggccgagcagtgatctcaacaacagtactggccagtctcctcaccacaaagtgcagagaagtgttttttcaagccaaaagcaaagacgctacagtgaccatgctggaccagctattccttctgttgtggcgtatccgaaaaggagtcagaccagcactgcagatagtgacctcaaagaagatggaatttcctcccggaaatcaagtggcagtgctgttggaggaaagggaattgctccagccagtcccatgcttgggaatgcaagtaatcctaataaggcggatattcctgaacgcaagaaaagctccactgtccctagtagtaacacagcatctggtggaatgacacgacgaaatacttatgtttgcagtgagagaactacagctgatagacactcagtgattcagaatggcaaagaaaacagcactattcctgatcagagaactccagttgcttcaacacacagtatcagtagtgcagccaccccagatcgaatccgcttcccaagaggcactgccagtcgtagcactttccacggccagccccgggaacggcgaaccgcaacatataatggccctcctgcctctcccagcctgtcccatgaagccacaccattgtcccagactcgaagccgaggctccactaatctctttagtaaattaacttcaaaactcacaaggagtcgcaatgtatctgctgagcaaaaagatgaaaacaaagaagcaaagcctcgatccctacgcttcacctggagcatgaaaaccactagttcaatggatcccggggacatgatgcgggaaatccgcaaagtgttggacgccaataactgcgactatgagcagagggagcgcttcttgctcttctgcgtccacggagatgggcacgcggagaacctcgtgcagtgggaaatggaagtgtgcaagctgccaagactgtctctgaacggggtccggtttaagcggatatcggggacatccatagccttcaaaaatattgcttccaaaattgccaatgagctaaagctgtaacccagtgattatgatgtaaattaagtagcaattaaagtgttttcctgaacactgatggaaatgtatagaataatatttaggcaataacgtctgcatcttctaaatcatgaaattaaagtctgaggacgagagcacgcctgggagcgaaagctggccttttttctacgaatgcactacattaaagatgtgcaacctatgcgccccctgccctacttccgttaccctgagagtcggtgtgtggccccatctccatgtgcctcccgtctgggtgggtgtgagagtggacggtatgtgtgtgaagtggtgtatatggaagcatctccctacactggcagccagtcattactagtacctctgcgggagatcatccggtgctaaaacattacagttgccaaggaggaaaatactgaatgactgctaagaattaaccttaagaccagttcatagttaatacaggtttacagttcatgcctgtggttttgtgtttgttgttttgtgtttttttagtgcaaaaggtttaaatttatagttgtgaacattgcttgtgtgtgtttttctaagtagattcacaagataattaaaaattcactttttctcagtaaaa

SEQ ID NO: 17170 - DNA, 3657 bp, Homo sapiens
  source 1..3657: mol_type = unassigned DNA
gtcacttccggcagccggaggcagcagaggaagccgaggggcggccatcttggctccgtgaggctctgaggtgccggggtgcggcggcggcagcggcggccagcagggcggaggctgaggcagcaagctcgctagagagggagaagcagtcgggcgcaggcgcctcctccgcagcccgctccatggtcggcgcccacagcccgcggcggcctgtcttgcgctccacttccttcacatcctcctccgcctcctcgttttcaggcgccgccggcggcgctgtgtggaggcccgcgagctgaaattcgcggtgcgacgggagggagtggagaaggaggtgagggggcccaggatcgcggggcgccctgaggcaaggggacgccggcgggccgaagcgcagcccgccgcccgcaggctcggctccgccactgccgccctcccggtctcctcgcctcggccgccgaggcagggagagaatgagccccgggacccgccgggggacggcccgggccaggcccgggatctagacggccgtagggggaagggagccgccctccccacggcgccttttcggaactgccgtggactcgaggacgctggtcgccggcctcctagggctgtgctgttttgttttgaccctcgcattgtgcagaattaaagtgcagtaaaatgtccactaggaccccattgccaacggtgaatgaacgagacactgaaaaccacacgtcacatggagatgggcgtcaagaagttacctctcgtaccagccgctcaggagctcggtgtagaaactctatagcctcctgtgcagatgaacaacctcacatcggaaactacagactgttgaaaacaatcggcaaggggaattttgcaaaagtaaaattggcaagacatatccttacaggcagagaggttgcaataaaaataattgacaaaactcagttgaatccaacaagtctacaaaagctcttcagagaagtaagaataatgaagattttaaatcatcccaatatagtgaagttattcgaagtcattgaaactgaaaaaacactctacctaatcatggaatatgcaagtggaggtgaagtatttgactatttggttgcacatggcaggatgaaggaaaaagaagcaagatctaaatttagacagattgtgtctgcagttcaatactgccatcagaaacggatcgtacatcgagacctcaaggctgaaaatctattgttagatgccgatatgaacattaaaatagcagatttcggttttagcaatgaatttactgttggcggtaaactcgacacgttttgtggcagtcctccatacgcagcacctgagctcttccagggcaagaaatatgacgggccagaagtggatgtgtggagtctgggggtcattttatacacactagtcagtggctcacttccctttgatgggcaaaacctaaaggaactgagagagagagtattaagagggaaatacagaattcccttctacatgtctacagactgtgaaaaccttctcaaacgtttcctggtgctaaatccaattaaacgcggcactctagagcaaatcatgaaggacaggtggatcaatgcagggcatgaagaagatgaactcaaaccatttgttgaaccagagctagacatctcagaccaaaaaagaatagatattatggtgggaatgggatattcacaagaagaaattcaagaatctcttagtaagatgaaatacgatgaaatcacagctacatatttgttattggggagaaaatcttcagagctggatgctagtgattccagttctagcagcaatctttcacttgctaaggttaggccgagcagtgatctcaacaacagtactggccagtctcctcaccacaaagtgcagagaagtgttttttcaagccaaaagcaaagacgctacagtgaccatgctggaccagctattccttctgttgtggcgtatccgaaaaggagtcagaccagcactgcagatagtgacctcaaagaagatggaatttcctcccggaaatcaagtggcagtgctgttggaggaaagggaattgctccagccagtcccatgcttgggaatgcaagtaatcctaataaggcggatattcctgaacgcaagaaaagctccactgtccctagtagtaacacagcatctggtggaatgacacgacgaaatacttatgtttgcagtgagagaactacagctgatagacactcagtgattcagaatggcaaagaaaacagcctgacagaaatgttcgcttacgcagctagccctgcctcagtttgtacatctacctgtcggctgagacatcagaagtcgatgtccatgtcagcctctgggcaccccaagatgatgttacctccaatagacagtgaaggagataacttcaaggctatcactattcctgatcagagaactccagttgcttcaacacacagtatcagtagtgcagccaccccagatcgaatccgcttcccaagaggcactgccagtcgtagcactttccacggccagccccgggaacggcgaaccgcaacatataatggccctcctgcctctcccagcctgtcccatgaagccacaccattgtcccagactcgaagccgaggctccactaatctctttagtaaattaacttcaaaactcacaaggaggcttccaactgaatatgagaggaacgggagatatgagggctcaagtcgcaatgtatctgctgagcaaaaagatgaaaacaaagaagcaaagcctcgatccctacgcttcacctggagcatgaaaaccactagttcaatggatcccggggacatgatgcgggaaatccgcaaagtgttggacgccaataactgcgactatgagcagagggagcgcttcttgctcttctgcgtccacggagatgggcacgcggagaacctcgtgcagtgggaaatggaagtgtgcaagctgccaagactgtctctgaacggggtccggtttaagcggatatcggggacatccatagccttcaaaaatattgcttccaaaattgccaatgagctaaagctgtaacccagtgattatgatgtaaattaagtagcaattaaagtgttttcctgaacactgatggaaatgtatagaataatatttaggcaataacgtctgcatcttctaaatcatgaaattaaagtctgaggacgagagcacgcctgggagcgaaagctggccttttttctacgaatgcactacattaaagatgtgcaacctatgcgccccctgccctacttccgttaccctgagagtcggtgtgtggccccatctccatgtgcctcccgtctgggtgggtgtgagagtggacggtatgtgtgtgaagtggtgtatatggaagcatctccctacactggcagccagtcattactagtacctctgcgggagatcatccggtgctaaaacattacagttgccaaggaggaaaatactgaatgactgctaagaattaaccttaagaccagttcatagttaatacaggtttacagttcatgcctgtggttttgtgtttgttgttttgtgtttttttagtgcaaaaggtttaaatttatagttgtgaacattgcttgtgtgtgtttttctaagtagattcacaagataattaaaaattcactttttctcagt

SEQ ID NO: 17171 - DNA, 2969 bp, Homo sapiens
  source 1..2969: mol_type = unassigned DNA
gcagcggcggccagcagggcggaggctgaggcagcaagctcgctagagagggagaagcagtcgggcgcaggcgcctcctccgcagcccgctccatggtcggcgcccacagcccgcggcggcctgtcttgcgctccacttccttcacatcctcctccgcctcctcgttttcaggcgccgccggcggcgctgtgtggaggcccgcgagctgaaattcgcggtgcgacgggagggagtggagaaggaggtgagggggcccaggatcgcggggcgccctgaggcaaggggacgccggcgggccgaagcgcagcccgccgcccgcaggctcggctccgccactgccgccctcccggtctcctcgcctcggccgccgaggcagggagagaatgagccccgggacccgccgggggacggcccgggccaggcccgggatctagacggccgtagggggaagggagccgccctccccacggcgccttttcggaactgccgtggactcgaggacgctggtcgccggcctcctagggctgtgctgttttgttttgaccctcgcattgtgcagaattaaagtgcagtaaaatgtccactaggaccccattgccaacggtgaatgaacgagacactgaaaaccacacgtcacatggagatgggcgtcaagaagttacctctcgtaccagccgctcaggagctcggtgtagaaactctatagcctcctgtgcagatgaacaacctcacatcggaaactacagactgttgaaaacaatcggcaaggggaattttgcaaaagtaaaattggcaagacatatccttacaggcagagaggttgcaataaaaataattgacaaaactcagttgaatccaacaagtctacaaaagctcttcagagaagtaagaataatgaagattttaaatcatcccaatatagtgaagttattcgaagtcattgaaactgaaaaaacactctacctaatcatggaatatgcaagtggaggtgaagtatttgactatttggttgcacatggcaggatgaaggaaaaagaagcaagatctaaatttagacagggttgtcaagctggacagactattaaagttcaagtctcctttgatttgcttagtctgatgtttacatttattgtgtctgcagttcaatactgccatcagaaacggatcgtacatcgagacctcaaggctgaaaatctattgttagatgccgatatgaacattaaaatagcagatttcggttttagcaatgaatttactgttggcggtaaactcgacacgttttgtggcagtcctccatacgcagcacctgagctcttccagggcaagaaatatgacgggccagaagtggatgtgtggagtctgggggtcattttatacacactagtcagtggctcacttccctttgatgggcaaaacctaaaggaactgagagagagagtattaagagggaaatacagaattcccttctacatgtctacagactgtgaaaaccttctcaaacgtttcctggtgctaaatccaattaaacgcggcactctagagcaaatcatgaaggacaggtggatcaatgcagggcatgaagaagatgaactcaaaccatttgttgaaccagagctagacatctcagaccaaaaaagaatagatattatggtgggaatgggatattcacaagaagaaattcaagaatctcttagtaagatgaaatacgatgaaatcacagctacatatttgttattggggagaaaatcttcagagctggatgctagtgattccagttctagcagcaatctttcacttgctaaggttaggccgagcagtgatctcaacaacagtactggccagtctcctcaccacaaagtgcagagaagtgttttttcaagccaaaagcaaagacgctacagtgaccatgctggaccagctattccttctgttgtggcgtatccgaaaaggagtcagaccagcactgcagatagtgacctcaaagaagatggaatttcctcccggaaatcaagtggcagtgctgttggaggaaagggaattgctccagccagtcccatgcttgggaatgcaagtaatcctaataaggcggatattcctgaacgcaagaaaagctccactgtccctagtagtaacacagcatctggtggaatgacacgacgaaatacttatgtttgcagtgagagaactacagctgatagacactcagtgattcagaatggcaaagaaaacagcactattcctgatcagagaactccagttgcttcaacacacagtatcagtagtgcagccaccccagatcgaatccgcttcccaagaggcactgccagtcgtagcactttccacggccagccccgggaacggcgaaccgcaacatataatggccctcctgcctctcccagcctgtcccatgaagccacaccattgtcccagactcgaagccgaggctccactaatctctttagtaaattaacttcaaaactcacaaggagtcgcaatgtatctgctgagcaaaaagatgaaaacaaagaagcaaagcctcgatccctacgcttcacctggagcatgaaaaccactagttcaatggatcccggggacatgatgcgggaaatccgcaaagtgttggacgccaataactgcgactatgagcagagggagcgcttcttgctcttctgcgtccacggagatgggcacgcggagaacctcgtgcagtgggaaatggaagtgtgcaagctgccaagactgtctctgaacggggtccggtttaagcggatatcggggacatccatagccttcaaaaatattgcttccaaaattgccaatgagctaaagctgtaacccagtgattatgatgtaaattaagtagcaattaaagtgttttcctgaacactgatggaaatgtatagaataatatttaggcaataacgtctgcatcttctaaatcatgaaattaaagtctgaggacgagagc

SEQ ID NO: 17172 - DNA, 3371 bp, Homo sapiens
  source 1..3371: mol_type = unassigned DNA
caggcgcctcctccgcagcccgctccatggtcggcgcccacagcccgcggcggcctgtcttgcgctccacttccttcacatcctcctccgcctcctcgttttcaggcgccgccggcggcgctgtgtggaggcccgcgagctgaaattcgcggtgcgacgggagggagtggagaaggaggtgagggggcccaggatcgcggggcgccctgaggcaaggggacgccggcgggccgaagcgcagcccgccgcccgcaggctcggctccgccactgccgccctcccggtctcctcgcctcggccgccgaggcagggagagaatgagccccgggacccgccgggggacggcccgggccaggcccgggatctagacggccgtagggggaagggagccgccctccccacggcgccttttcggaactgccgtggactcgaggacgctggtcgccggcctcctagggctgtgctgttttgttttgaccctcgcattgtgcagaattaaagtgcagtaaaatgtccactaggaccccattgccaacggtgaatgaacgagacactgaaaaccacacgtcacatggagatgggcgtcaagaagttacctctcgtaccagccgctcaggagctcggtgtagaaactctatagcctcctgtgcagatgaacaacctcacatcggaaactacagactgttgaaaacaatcggcaaggggaattttgcaaaagtaaaattggcaagacatatccttacaggcagagaggttgcaataaaaataattgacaaaactcagttgaatccaacaagtctacaaaagctcttcagagaagtaagaataatgaagattttaaatcatcccaatatagtgaagttattcgaagtcattgaaactgaaaaaacactctacctaatcatggaatatgcaagtggaggtgaagtatttgactatttggttgcacatggcaggatgaaggaaaaagaagcaagatctaaatttagacagattgtgtctgcagttcaatactgccatcagaaacggatcgtacatcgagacctcaaggctgaaaatctattgttagatgccgatatgaacattaaaatagcagatttcggttttagcaatgaatttactgttggcggtaaactcgacacgttttgtggcagtcctccatacgcagcacctgagctcttccagggcaagaaatatgacgggccagaagtggatgtgtggagtctgggggtcattttatacacactagtcagtggctcacttccctttgatgggcaaaacctaaaggaactgagagagagagtattaagagggaaatacagaattcccttctacatgtctacagactgtgaaaaccttctcaaacgtttcctggtgctaaatccaattaaacgcggcactctagagcaaatcatgaaggacaggtggatcaatgcagggcatgaagaagatgaactcaaaccatttgttgaaccagagctagacatctcagaccaaaaaagaatagatattatggtgggaatgggatattcacaagaagaaattcaagaatctcttagtaagatgaaatacgatgaaatcacagctacatatttgttattggggagaaaatcttcagagctggatgctagtgattccagttctagcagcaatctttcacttgctaaggttaggccgagcagtgatctcaacaacagtactggccagtctcctcaccacaaagtgcagagaagtgttttttcaagccaaaagcaaagacgctacagtgaccatgctggaccagctattccttctgttgtggcgtatccgaaaaggagtcagaccagcactgcagatagtgacctcaaagaagatggaatttcctcccggaaatcaagtggcagtgctgttggaggaaagggaattgctccagccagtcccatgcttgggaatgcaagtaatcctaataaggcggatattcctgaacgcaagaaaagctccactgtccctagtagtaacacagcatctggtggaatgacacgacgaaatacttatgtttgcagtgagagaactacagctgatagacactcagtgattcagaatggcaaagaaaacagcactattcctgatcagagaactccagttgcttcaacacacagtatcagtagtgcagccaccccagatcgaatccgcttcccaagaggcactgccagtcgtagcactttccacggccagccccgggaacggcgaaccgcaacatataatggccctcctgcctctcccagcctgtcccatgaagccacaccattgtcccagactcgaagccgaggctccactaatctctttagtaaattaacttcaaaactcacaaggagaaacatgtcattcaggtttatcaaaaggcttccaactgaatatgagaggaacgggagatatgagggctcaagtcgcaatgtatctgctgagcaaaaagatgaaaacaaagaagcaaagcctcgatccctacgcttcacctggagcatgaaaaccactagttcaatggatcccggggacatgatgcgggaaatccgcaaagtgttggacgccaataactgcgactatgagcagagggagcgcttcttgctcttctgcgtccacggagatgggcacgcggagaacctcgtgcagtgggaaatggaagtgtgcaagctgccaagactgtctctgaacggggtccggtttaagcggatatcggggacatccatagccttcaaaaatattgcttccaaaattgccaatgagctaaagctgtaacccagtgattatgatgtaaattaagtagcaattaaagtgttttcctgaacactgatggaaatgtatagaataatatttaggcaataacgtctgcatcttctaaatcatgaaattaaagtctgaggacgagagcacgcctgggagcgaaagctggccttttttctacgaatgcactacattaaagatgtgcaacctatgcgccccctgccctacttccgttaccctgagagtcggtgtgtggccccatctccatgtgcctcccgtctgggtgggtgtgagagtggacggtatgtgtgtgaagtggtgtatatggaagcatctccctacactggcagccagtcattactagtacctctgcgggagatcatccggtgctaaaacattacagttgccaaggaggaaaatactgaatgactgctaagaattaaccttaagaccagttcatagttaatacaggtttacagttcatgcctgtggttttgtgtttgttgttttgtgtttttttagtgcaaaaggtttaaatttatagttgtgaacattgcttgtgtgtgtttttctaagtagattcacaagataattaaaaattcactttttctcag

SEQ ID NO: 17173 - DNA, 2643 bp, Homo sapiens
  source 1..2643: mol_type = unassigned DNA
ggaagccgaggggcggccatcttggctccgtgaggctctgaggtgccggggtgcggcggcggcagcggcggccagcagggcggaggctgaggcagcaagctcgctagagagggagaagcagtcgggcgcaggcgcctcctccgcagcccgctccatggtcggcgcccacagcccgcggcggcctgtcttgcgctccacttccttcacatcctcctccgcctcctcgttttcaggcgccgccggcggcgctgtgtggaggcccgcgagctgaaattcgcggtgcgacgggagggagtggagaaggaggtgagggggcccaggatcgcggggcgccctgaggcaaggggacgccggcgggccgaagcgcagcccgccgcccgcaggctcggctccgccactgccgccctcccggtctcctcgcctcggccgccgaggcagggagagaatgagccccgggacccgccgggggacggcccgggccaggcccgggatctagacggccgtagggggaagggagccgccctccccacggcgccttttcggaactgccgtggactcgaggacgctggtcgccggcctcctagggctgtgctgttttgttttgaccctcgcattgtgcagaattaaagtgcagtaaaatgtccactaggaccccattgccaacggtgaatgaacgagacactgaaaaccacacgtcacatggagatgggcgtcaagaagttacctctcgtaccagccgctcaggagctcggtgtagaaactctatagcctcctgtgcagatgaacaacctcacatcggaaactacagactgttgaaaacaatcggcaaggggaattttgcaaaagtaaaattggcaagacatatccttacaggcagagaggttgcaataaaaataattgacaaaactcagttgaatccaacaagtctacaaaagctcttcagagaagtaagaataatgaagattttaaatcatcccaatatagtgaagttattcgaagtcattgaaactgaaaaaacactctacctaatcatggaatatgcaagtggaggtgaagtatttgactatttggttgcacatggcaggatgaaggaaaaagaagcaagatctaaatttagacagattgtgtctgcagttcaatactgccatcagaaacggatcgtacatcgagacctcaaggaactgagagagagagtattaagagggaaatacagaattcccttctacatgtctacagactgtgaaaaccttctcaaacgtttcctggtgctaaatccaattaaacgcggcactctagagcaaatcatgaaggacaggtggatcaatgcagggcatgaagaagatgaactcaaaccatttgttgaaccagagctagacatctcagaccaaaaaagaatagatattatggtgggaatgggatattcacaagaagaaattcaagaatctcttagtaagatgaaatacgatgaaatcacagctacatatttgttattggggagaaaatcttcagagctggatgctagtgattccagttctagcagcaatctttcacttgctaaggttaggccgagcagtgatctcaacaacagtactggccagtctcctcaccacaaagtgcagagaagtgttttttcaagccaaaagcaaagacgctacagtgaccatgctggaccagctattccttctgttgtggcgtatccgaaaaggagtcagaccagcactgcagatagtgacctcaaagaagatggaatttcctcccggaaatcaagtggcagtgctgttggaggaaagggaattgctccagccagtcccatgcttgggaatgcaagtaatcctaataaggcggatattcctgaacgcaagaaaagctccactgtccctagtagtaacacagcatctggtggaatgacacgacgaaatacttatgtttgcagtgagagaactacagctgatagacactcagtgattcagaatggcaaagaaaacagcactattcctgatcagagaactccagttgcttcaacacacagtatcagtagtgcagccaccccagatcgaatccgcttcccaagaggcactgccagtcgtagcactttccacggccagccccgggaacggcgaaccgcaacatataatggccctcctgcctctcccagcctgtcccatgaagccacaccattgtcccagactcgaagccgaggctccactaatctctttagtaaattaacttcaaaactcacaaggagaaacatgtcattcaggtttatcaaaagtcgcaatgtatctgctgagcaaaaagatgaaaacaaagaagcaaagcctcgatccctacgcttcacctggagcatgaaaaccactagttcaatggatcccggggacatgatgcgggaaatccgcaaagtgttggacgccaataactgcgactatgagcagagggagcgcttcttgctcttctgcgtccacggagatgggcacgcggagaacctcgtgcagtgggaaatggaagtgtgcaagctgccaagactgtctctgaacggggtccggtttaagcggatatcggggacatccatagccttcaaaaatattgcttccaaaattgccaatgagctaaagctgtaacccagtgattatgatgtaaattaag

SEQ ID NO: 17174 - DNA, 2298 bp, Homo sapiens
  source 1..2298: mol_type = unassigned DNA
gttttgttttgaccctcgcattgtgcagaattaaagtgcagtaaaatgtccactaggaccccattgccaacggtgaatgaacgagacactgaaaaccacacgtcacatggagatgggcgtcaagaagttacctctcgtaccagccgctcaggagctcggtgtagaaactctatagcctcctgtgcagatgaacaacctcacatcggaaactacagactgttgaaaacaatcggcaaggggaattttgcaaaagtaaaattggcaagacatatccttacaggcagagaggttgcaataaaaataattgacaaaactcagttgaatccaacaagtctacaaaagctcttcagagaagtaagaataatgaagattttaaatcatcccaatatagtgaagttattcgaagtcattgaaactgaaaaaacactctacctaatcatggaatatgcaagtggaggtgaagtatttgactatttggttgcacatggcaggatgaaggaaaaagaagcaagatctaaatttagacagattgtgtctgcagttcaatactgccatcagaaacggatcgtacatcgagacctcaaggctgaaaatctattgttagatgccgatatgaacattaaaatagcagatttcggttttagcaatgaatttactgttggcggtaaactcgacacgttttgtggcagtcctccatacgcagcacctgagctcttccagggcaagaaatatgacgggccagaagtggatgtgtggagtctgggggtcattttatacacactagtcagtggctcacttccctttgatgggcaaaacctaaaggaactgagagagagagtattaagagggaaatacagaattcccttctacatgtctacagactgtgaaaaccttctcaaacgtttcctggtgctaaatccaattaaacgcggcactctagagcaaatcatgaaggacaggtggatcaatgcagggcatgaagaagatgaactcaaaccatttgttgaaccagagctagacatctcagaccaaaaaagaatagatattatggtgggaatgggatattcacaagaagaaattcaagaatctcttagtaagatgaaatacgatgaaatcacagctacatatttgttattggggagaaaatcttcagagctggatgctagtgattccagttctagcagcaatctttcacttgctaaggttaggccgagcagtgatctcaacaacagtactggccagtctcctcaccacaaagtgcagagaagtgttttttcaagccaaaagcaaagacgctacagtgaccatgctggaccagctattccttctgttgtggcgtatccgaaaaggagtcagaccagcactgcagatagtgacctcaaagaagatggaatttcctcccggaaatcaagtggcagtgctgttggaggaaagggaattgctccagccagtcccatgcttgggaatgcaagtaatcctaataaggcggatattcctgaacgcaagaaaagctccactgtccctagtagtaacacagcatctggtggaatgacacgacgaaatacttatgtttgcagtgagagaactacagctgatagacactcagtgattcagaatggcaaagaaaacagcactattcctgatcagagaactccagttgcttcaacacacagtatcagtagtgcagccaccccagatcgaatccgcttcccaagaggcactgccagtcgtagcactttccacggccagccccgggaacggcgaaccgcaacatataatggccctcctgcctctcccagcctgtcccatgaagccacaccattgtcccagactcgaagccgaggctccactaatctctttagtaaattaacttcaaaactcacaaggaggcttccaactgaatatgagaggaacgggagatatgagggctcaagtcgcaatgtatctgctgagcaaaaagatgaaaacaaagaagcaaagcctcgatccctacgcttcacctggagcatgaaaaccactagttcaatggatcccggggacatgatgcgggaaatccgcaaagtgttggacgccaataactgcgactatgagcagagggagcgcttcttgctcttctgcgtccacggagatgggcacgcggagaacctcgtgcagtgggaaatggaagtgtgcaagctgccaagactgtctctgaacggggtccggtttaagcggatatcggggacatccatagccttcaaaaatattgcttccaaaattgccaatgagctaaagctgtaacccagtgattatgatgta

SEQ ID NO: 17175 - DNA, 1571 bp, Homo sapiens
  source 1..1571: mol_type = unassigned DNA
aagtggatgtgtggagtctgggggtcattttatacacactagtcagtggctcacttccctttgatgggcaaaacctaaaggaactgagagagagagtattaagagggaaatacagaattcccttctacatgtctacagactgtgaaaaccttctcaaacgtttcctggtgctaaatccaattaaacgcggcactctagagcaaatcatgaaggacaggtggatcaatgcagggcatgaagaagatgaactcaaaccatttgttgaaccagagctagacatctcagaccaaaaaagaatagatattatggtgggaatgggatattcacaagaagaaattcaagaatctcttagtaagatgaaatacgatgaaatcacagctacatatttgttattggggagaaaatcttcagaggttaggccgagcagtgatctcaacaacagtactggccagtctcctcaccacaaagtgcagagaagtgttttttcaagccaaaagcaaagacgctacagtgaccatgctggaccagctattccttctgttgtggcgtatccgaaaaggagtcagaccagcactgcagatagtgacctcaaagaagatggaatttcctcccggaaatcaagtggcagtgctgttggaggaaagggaattgctccagccagtcccatgcttgggaatgcaagtaatcctaataaggcggatattcctgaacgcaagaaaagctccactgtccctagtagtaacacagcatctggtggaatgacacgacgaaatacttatgtttgcagtgagagaactacagctgatagacactcagtgattcagaatggcaaagaaaacagcactattcctgatcagagaactccagttgcttcaacacacagtatcagtagtgcagccaccccagatcgaatccgcttcccaagaggcactgccagtcgtagcactttccacggccagccccgggaacggcgaaccgcaacatataatggccctcctgcctctcccagcctgtcccatgaagccacaccattgtcccagactcgaagccgaggctccactaatctctttagtaaattaacttcaaaactcacaaggagaaacatgtcattcaggtttatcaaaaggcttccaactgaatatgagaggaacgggagatatgagggctcaagtcgcaatgtatctgctgagcaaaaagatgaaaacaaagaagcaaagcctcgatccctacgcttcacctggagcatgaaaaccactagttcaatggatcccggggacatgatgcgggaaatccgcaaagtgttggacgccaataactgcgactatgagcagagggagcgcttcttgctcttctgcgtccacggagatgggcacgcggagaacctcgtgcagtgggaaatggaagtgtgcaagctgccaagactgtctctgaacggggtccggtttaagcggatatcggggacatccatagccttcaaaaatattgcttccaaaattgccaatgagctaaagctgtaacccagtgattatgatgtaaattaagtagcaattaaagtgttttcctgaacactg

SEQ ID NO: 17176 - DNA, 4837 bp, Homo sapiens
  source 1..4837: mol_type = unassigned DNA
agaagatgtcttcgcggacggtgctggccccgggcaacgatcggaactcggacacgcatggcaccttgggcagtggccgctcctcggacaaaggcccgtcctggtccagccgctcactgggtgcccgttgccggaactccatcgcctcctgtcccgaggagcagccccacgtgggcaactaccgcctgctgaggaccattgggaagggcaactttgccaaagtcaagctggctcggcacatcctcactggtcgggaggttgccatcaagattatcgacaaaacccagctgaatcccagcagcctgcagaagctgttccgagaagtccgcatcatgaagggcctaaaccaccccaacatcgtgaagctctttgaggtgattgagactgagaagacgctgtacctggtgatggagtacgcaagtgctggagaagtgtttgactacctcgtgtcgcatggccgcatgaaggagaaggaagctcgagccaagttccgacagattgtttcggctgtgcactattgtcaccagaaaaatattgtacacagggacctgaaggctgagaacctcttgctggatgccgaggccaacatcaagattgctgactttggcttcagcaacgagttcacgctgggatcgaagctggacacgttctgcgggagccccccatatgccgccccggagctgtttcagggcaagaagtacgacgggccggaggtggacatctggagcctgggagtcatcctgtacaccctcgtcagcggctccctgcccttcgacgggcacaacctcaaggagctgcgggagcgagtactcagagggaagtaccgggtccctttctacatgtcaacagactgtgagagcatcctgcggagatttttggtgctgaacccagctaaacgctgtactctcgagcaaatcatgaaagacaaatggatcaacatcggctatgagggtgaggagttgaagccatacacagagcccgaggaggacttcggggacaccaagagaattgaggtgatggtgggtatgggctacacacgggaagaaatcaaagagtccttgaccagccagaagtacaacgaagtgaccgccacctacctcctgctgggcaggaagactgaggagggtggggaccggggcgccccagggctggccctggcacgggtgcgggcgcccagcgacaccaccaacggaacaagttccagcaaaggcaccagccacagcaaagggcagcggagttcctcttccacctaccaccgccagcgcaggcatagcgatttctgtggcccatcccctgcacccctgcaccccaaacgcagcccgacgagcacgggggaggcggagctgaaggaggagcggctgccaggccggaaggcgagctgcagcaccgcggggagtgggagtcgagggctgcccccctccagccccatggtcagcagcgcccacaaccccaacaaggcagagatcccagagcggcggaaggacagcacgagcacccccaacaacctccctcctagcatgatgacccgcagaaacacctacgtttgcacagaacgcccgggggctgagcgcccgtcactgttgccaaatgggaaagaaaacagctcaggcaccccacgggtgccccctgcctccccctccagtcacagcctggcacccccatcaggggagcggagccgcctggcacgtggttccaccatccgcagcaccttccatggtggccaggtccgggaccggcgggcagggggtgggggtggtgggggtgtgcagaatgggccccctgcctctcccacactggcccatgaggctgcacccctgcccgccgggcggccccgccccaccaccaacctcttcaccaagctgacctccaaactgacccgaagggtcgcagacgaacctgagagaatcgggggacctgaggtcacaagttgccatctaccttgggatcaaacggaaaccgccccccggctgctccgattcccctggagtgtgaagctgaccagctcgcgccctcctgaggccctgatggcagctctgcgccaggccacagcagccgcccgctgccgctgccgccagccacagccgttcctgctggcctgcctgcacgggggtgcgggcgggcccgagcccctgtcccacttcgaagtggaggtctgccagctgccccggccaggcttgcggggagttctcttccgccgtgtggcgggcaccgccctggccttccgcaccctcgtcacccgcatctccaacgacctcgagctctgagccaccacggtcccagggcccttactcttcctctcccttgtcgccttcacttctacaggaggggaaggggccagggaggggattctccctttatcatcacctcagtttccctgaattatatttgggggcaaagattgtcccctctgctgttctctggggccgctcagcacagaagaaggatgagggggctcagcggggggagctggcaccttcctggagcctccagccagtcctgtcctccctcgccctaccaagagggcacctgaggagactttggggacagggcaggggcagggagggaaactgaggaaatcttccattcctcccaacagctcaaaattaggccttgggcaggggcagggagagctgctgagcctaaagactggagaatctgggggactgggagtgggggtcagagaggcagattccttcccctcccgtcccctcacgctcaaacccccacttcctgccccaggctggcgcggggcactttgtacaaatccttgtaaataccccacaccctcccctctgcaaaggtctcttgaggagctgccgctgtcacctacggtttttaagttattacaccccgaccctcctcctgtcagccccctcacctgcagcctgttgcccaataaatttaagagagtccccccctccccaatgctgaccctaggattttccttccctgccctcacctgcaaatgagttaaagaagaggcgtgggaatccaggcagtggtttttcctttcggagcctcggttttctcatctgcagaatgggagcggtgggggtgggaaggtaaggatggtcgtggaagaaggcaggatggaactcggcctcatccccgaggccccagttcctatatcgggccccccattcatccactcacactcccagccaccatgttacactggactctaagccacttcttactccagtagtaaatttattcaataaacaatcattgacccatgcctactccatgccaggcccagtgctggacacagagacatgaagctctgtctgtgggagacagggattctgacacagacaccggacaaaccattgtcttggggagcccagaagagaaagtgggcagggtggggtcattggggaagatgctctagaggaattaatgctggaatggggtgttgaaggatgagtaggagttagttaggcattgagtttgccctgggcaaaagcccagaagtgggagtatgtggtatatcttcagagaactgggtaatttcagtgtggctgctgtgttgggcatggatggagaatcagcaagagaaatgctgtattaggactaataatccatctacgctgcttaagcaaaaaggtatttgttggtttatgttacttaatagtccaggggcacctggcttcaggtaggtttgatccaggcatcaggccattgcatctattttttcagtgtaagttgaattctagtaatttttatcaagtaagggctcctttcctggtggcacagatgacttcagcagttagaagtttctatccctccagctttctgcagcagaaagaccctcattgtcagtttcccagcaaaagtcccagggcagactctcattggcccaaatgggccatgtgattttctctaaaccaatcactgtgactctagagtggccagactcagagctgcacttagtaggggttcctcaaaggaaggtcaagtgtcatgagcaggagaaaaggcatgggagctggacagattatagtggttgaagtctgtgcagtacagaagggcggagcttattcacacagcacctttggggccaaaatgaataagctggactttctccccatggcactggggaaccatggaagttcagggaacttcagggaagaggcttggtcaattcctgagagcatcctctgtgctggggacacagtggtaatcaagacagccccaacactgccctcatagagctcacagtccaatggaggaggcagatgtgtcctcaggcagcgactgggcagggctggtataggggagtccagaggtgatgcctgcctcagccagggagggcttcctggaggagaaggagccagctagacatggataggagtgcgttttaggcacagcaaatggcacatacaagggccagggagcaagagagaggacaggtcctcaacaaatggcatgtgactttgtaagtgtagaattgctgtgaggtatggggctaggggcgtcagtagggccttgaaggttatggacaggggcctgggctttcttccaagggcactgggggagccatggcaaggttgtaggtagggtagagatgggcgggtttgtgctatgtgcagggtggaagggagggaagttgacaggtcagaagatcaggaaagaggtcggggctggacagatggggagagcgcagatagatttaagagagtcctgtgaggcaaagtgggcaggacctggtaacaggtgtctggactgtggctttggctggctcagaaggtccccactggcgtgtgtggtctatgtagcctctgggtgtggagctgggatcttcaactggggacagtacagtaaagaacatcacagc

SEQ ID NO: 17177 - DNA, 1683 bp, Homo sapiens
  source 1..1683: mol_type = unassigned DNA
cgcctccctccgccgccgcttgggccggctccgcgccccctccgcggcccccgcccgcccgcctgcccgccgcccccatggcgcccggggtccccgctgcacggggccactaggaccctcggcgtcccttcccctcccccgccctgccccctctcccgccgcgcggacccgggcgttctcggcgcccagcttttgagctcgcgtccccaggccggcggggggggaggggaagagaggggaccctgggacccccgccccccccacccggccgcccctgccccccgggacccggagaagatgtcttcgcggacggtgctggccccgggcaacgatcggaactcggacacgcatggcaccttgggcagtggccgctcctcggacaaaggcccgtcctggtccagccgctcactgggtgcccgttgccggaactccatcgcctcctgtcccgaggagcagccccacgtgggcaactaccgcctgctgaggaccattgggaagggcaactttgccaaagtcaagctggctcggcacatcctcactggtcgggaggttgccatcaagattatcgacaaaacccagctgaatcccagcagcctgcagaagctgttccgagaagtccgcatcatgaagggcctaaaccaccccaacatcgtgaagctctttgaggtgattgagactgagaagacgctgtacctggtgatggagtacgcaagtgctggtgagccgcccaccctctccgccctgcccctgtgccacctccccctgccgctgcacctgaccctgaccccgctcggcctctgccctgcaggagaagtgtttgactacctcgtgtcgcatggccgcatgaaggagaaggaagctcgagccaagttccgacagattgtttcggctgtgcactattgtcaccagaaaaatattgtacacagggacctgaaggctgagaacctcttgctggatgccgaggccaacatcaagattgctgactttggcttcagcaacgagttcacgctgggatcgaagctggacacgttctgcgggagccccccatatgccgccccggagctgtttcagggcaagaagtacgacgggccggaggtggacatctggagcctgggagtcatcctgtacaccctcgtcagcggctccctgcccttcgacgggcacaacctcaaggagctgcgggagcgagtactcagagggaagtaccgggtccctttctacatgtcaacagactgtgagagcatcctgcggagatttttggtgctgaacccagctaaacgctgtactctcgagcaaatcatgaaagacaaatggatcaacatcggctatgagggtgaggagttgaagccatacacagagcccgaggaggacttcggggacaccaagagaattgaggtgatggtgggtatgggctacacacgggaagaaatcaaagagtccttgaccagccagaagtacaacgaagtgaccgccacctacctcctgctgggcaggaagactgagcccgacgagcacgggggaggcggagctgaaggaggagcggctgccaggccggaaggcgagctgcagcaccgcggggagtgggagtcgagggctgcccccctccagccccatggtcagcagcgcccacaaccccaacaaggcagagatcccagagcggcggaaggacagcacgagcacccc

SEQ ID NO: 17178 - DNA, 4917 bp, Homo sapiens
  source 1..4917: mol_type = unassigned DNA
agaagatgtcttcgcggacggtgctggccccgggcaacgatcggaactcggacacgcatggcaccttgggcagtggccgctcctcggacaaaggcccgtcctggtccagccgctcactgggtgcccgttgccggaactccatcgcctcctgtcccgaggagcagccccacgtgggcaactaccgcctgctgaggaccattgggaagggcaactttgccaaagtcaagctggctcggcacatcctcactggtcgggaggttgccatcaagattatcgacaaaacccagctgaatcccagcagcctgcagaagctgttccgagaagtccgcatcatgaagggcctaaaccaccccaacatcgtgaagctctttgaggtgattgagactgagaagacgctgtacctggtgatggagtacgcaagtgctggagaagtgtttgactacctcgtgtcgcatggccgcatgaaggagaaggaagctcgagccaagttccgacagattgtttcggctgtgcactattgtcaccagaaaaatattgtacacagggacctgaaggctgagaacctcttgctggatgccgaggccaacatcaagattgctgactttggcttcagcaacgagttcacgctgggatcgaagctggacacgttctgcgggagccccccatatgccgccccggagctgtttcagggcaagaagtacgacgggccggaggtggacatctggagcctgggagtcatcctgtacaccctcgtcagcggctccctgcccttcgacgggcacaacctcaaggagctgcgggagcgagtactcagagggaagtaccgggtccctttctacatgtcaacagactgtgagagcatcctgcggagatttttggtgctgaacccagctaaacgctgtactctcgagcaaatcatgaaagacaaatggatcaacatcggctatgagggtgaggagttgaagccatacacagagcccgaggaggacttcggggacaccaagagaattgaggtgatggtgggtatgggctacacacgggaagaaatcaaagagtccttgaccagccagaagtacaacgaagtgaccgccacctacctcctgctgggcaggaagactgaggagggtggggaccggggcgccccagggctggccctggcacgggtgcgggcgcccagcgacaccaccaacggaacaagttccagcaaaggcaccagccacagcaaagggcagcggagttcctcttccacctaccaccgccagcgcaggcatagcgatttctgtggcccatcccctgcacccctgcaccccaaacgcagcccgacgagcacgggggaggcggagctgaaggaggagcggctgccaggccggaaggcgagctgcagcaccgcggggagtgggagtcgagggctgcccccctccagccccatggtcagcagcgcccacaaccccaacaaggcagagatcccagagcggcggaaggacagcacgagcacccccaacaacctccctcctagcatgatgacccgcagaaacacctacgtttgcacagaacgcccgggggctgagcgcccgtcactgttgccaaatgggaaagaaaacagctcaggcaccccacgggtgccccctgcctccccctccagtcacagcctggcacccccatcaggggagcggagccgcctggcacgtggttccaccatccgcagcaccttccatggtggccaggtccgggaccggcgggcagggggtgggggtggtgggggtgtgcagaatgggccccctgcctctcccacactggcccatgaggctgcacccctgcccgccgggcggccccgccccaccaccaacctcttcaccaagctgacctccaaactgacccgaagggttaccctcgatccctctaaacggcagaactctaaccgctgtgtttcgggcgcctctctgccccagggatccaagatcaggtcgcagacgaacctgagagaatcgggggacctgaggtcacaagttgccatctaccttgggatcaaacggaaaccgccccccggctgctccgattcccctggagtgtgaagctgaccagctcgcgccctcctgaggccctgatggcagctctgcgccaggccacagcagccgcccgctgccgctgccgccagccacagccgttcctgctggcctgcctgcacgggggtgcgggcgggcccgagcccctgtcccacttcgaagtggaggtctgccagctgccccggccaggcttgcggggagttctcttccgccgtgtggcgggcaccgccctggccttccgcaccctcgtcacccgcatctccaacgacctcgagctctgagccaccacggtcccagggcccttactcttcctctcccttgtcgccttcacttctacaggaggggaaggggccagggaggggattctccctttatcatcacctcagtttccctgaattatatttgggggcaaagattgtcccctctgctgttctctggggccgctcagcacagaagaaggatgagggggctcagcggggggagctggcaccttcctggagcctccagccagtcctgtcctccctcgccctaccaagagggcacctgaggagactttggggacagggcaggggcagggagggaaactgaggaaatcttccattcctcccaacagctcaaaattaggccttgggcaggggcagggagagctgctgagcctaaagactggagaatctgggggactgggagtgggggtcagagaggcagattccttcccctcccgtcccctcacgctcaaacccccacttcctgccccaggctggcgcggggcactttgtacaaatccttgtaaataccccacaccctcccctctgcaaaggtctcttgaggagctgccgctgtcacctacggtttttaagttattacaccccgaccctcctcctgtcagccccctcacctgcagcctgttgcccaataaatttaagagagtccccccctccccaatgctgaccctaggattttccttccctgccctcacctgcaaatgagttaaagaagaggcgtgggaatccaggcagtggtttttcctttcggagcctcggttttctcatctgcagaatgggagcggtgggggtgggaaggtaaggatggtcgtggaagaaggcaggatggaactcggcctcatccccgaggccccagttcctatatcgggccccccattcatccactcacactcccagccaccatgttacactggactctaagccacttcttactccagtagtaaatttattcaataaacaatcattgacccatgcctactccatgccaggcccagtgctggacacagagacatgaagctctgtctgtgggagacagggattctgacacagacaccggacaaaccattgtcttggggagcccagaagagaaagtgggcagggtggggtcattggggaagatgctctagaggaattaatgctggaatggggtgttgaaggatgagtaggagttagttaggcattgagtttgccctgggcaaaagcccagaagtgggagtatgtggtatatcttcagagaactgggtaatttcagtgtggctgctgtgttgggcatggatggagaatcagcaagagaaatgctgtattaggactaataatccatctacgctgcttaagcaaaaaggtatttgttggtttatgttacttaatagtccaggggcacctggcttcaggtaggtttgatccaggcatcaggccattgcatctattttttcagtgtaagttgaattctagtaatttttatcaagtaagggctcctttcctggtggcacagatgacttcagcagttagaagtttctatccctccagctttctgcagcagaaagaccctcattgtcagtttcccagcaaaagtcccagggcagactctcattggcccaaatgggccatgtgattttctctaaaccaatcactgtgactctagagtggccagactcagagctgcacttagtaggggttcctcaaaggaaggtcaagtgtcatgagcaggagaaaaggcatgggagctggacagattatagtggttgaagtctgtgcagtacagaagggcggagcttattcacacagcacctttggggccaaaatgaataagctggactttctccccatggcactggggaaccatggaagttcagggaacttcagggaagaggcttggtcaattcctgagagcatcctctgtgctggggacacagtggtaatcaagacagccccaacactgccctcatagagctcacagtccaatggaggaggcagatgtgtcctcaggcagcgactgggcagggctggtataggggagtccagaggtgatgcctgcctcagccagggagggcttcctggaggagaaggagccagctagacatggataggagtgcgttttaggcacagcaaatggcacatacaagggccagggagcaagagagaggacaggtcctcaacaaatggcatgtgactttgtaagtgtagaattgctgtgaggtatggggctaggggcgtcagtagggccttgaaggttatggacaggggcctgggctttcttccaagggcactgggggagccatggcaaggttgtaggtagggtagagatgggcgggtttgtgctatgtgcagggtggaagggagggaagttgacaggtcagaagatcaggaaagaggtcggggctggacagatggggagagcgcagatagatttaagagagtcctgtgaggcaaagtgggcaggacctggtaacaggtgtctggactgtggctttggctggctcagaaggtccccactggcgtgtgtggtctatgtagcctctgggtgtggagctgggatcttcaactggggacagtacagtaaagaacatcacagc

SEQ ID NO: 17179 - DNA, 1147 bp, Homo sapiens
  source 1..1147: mol_type = unassigned DNA
ctccctcctagcatgatgacccgcagggttaccctcgatccctctaaacggcagaactctaaccgctgtgtttcgggcgcctctctgccccagggatccaagatcaggtcgcagacgaacctgagagaatcgggggacctgaggtcacaagttgccatctaccttgggatcaaacggaaaccgccccccggctgctccgattcccctggagtgtgaagctgaccagctcgcgccctcctgaggccctgatggcagctctgcgccaggccacagcagccgcccgctgccgctgccgccagccacagccgttcctgctggcctgcctgcacgggggtgcgggcgggcccgagcccctgtcccacttcgaagtggaggtctgccagctgccccggccaggcttgcggggagttctcttccgccgtgtggcgggcaccgccctggccttccgcaccctcgtcacccgcatctccaacgacctcgagctctgagccaccacggtcccagggcccttactcttcctctcccttgtcgccttcacttctacaggaggggaaggggccagggaggggattctccctttatcatcacctcagtttccctgaattatatttgggggcaaagattgtcccctctgctgttctctggggccgctcagcacagaagaaggatgagggggctcagcggggggagctggcaccttcctggagcctccagccagtcctgtcctccctcgccctaccaagagggcacctgaggagactttggggacagggcaggggcagggagggaaactgaggaaatcttccattcctcccaacagctcaaaattaggccttgggcaggggcagggagagctgctgagcctaaagactggagaatctgggggactgggagtgggggtcagagaggcagattccttcccctcccgtcccctcacgctcaaacccccacttcctgccccaggctggcgcggggcactttgtacaaatccttgtaaataccccacaccctcccctctgcaaaggtctcttgaggagctgccgctgtcacctacggtttttaagttattacaccccgaccctcctcctgtcagccccctcacctgcagcctgttgcccaataaatttaagagagtccccccctcccc

SEQ ID NO: 17180 - DNA, 1586 bp, Homo sapiens
  source 1..1586: mol_type = unassigned DNA
cttggtggtggtggtggtggggcggcctgagaagatatcatggctgctgccacggagcttaatcgcccgagcagcggtgacaggaacctggagcgaagatgcagacccaacctctcccgagaggtgctctacgaaatctttcgctccctacacaccctggttggacagcttgacctcagagatgatgtggtgaaaattacaatcgattggaacaagctccagagcctctcggcattccagcctgcattgctctttagtgcacttgaacaacacattttatatttacagccttttttagcaaaacttcagtctccgattaaagaggagaatacaactgctgttgaagagataggaagaacagaaatggggaacaaaaatgaagtaaatgacaaattttccattggcgacctacaagaggaagaaaagcacaaagaaagtgatttaagagatgtgaaaaagacacagatccattttgatccagaagtagttcagataaaggctggaaaagcagaaattgacagacgaatatctgcatttattgaaagaaagcaagctgaaatcaatgaaaacaacgtcagggaattttgcaatgttattgattgtaatcaagaaaatagttgtgcaagaactgatgcgatttttaccccttaccccggatttaaaagtcacgtaaaagtttctagagttgtgaatacatacggaccacagactagacctgaaggaattccagggtcaggtcataaacctaacagcatgcttcgagactgtggtaatcaggctgtagaagaacgactacaaaatattgaggcccacttgcggttacagacaggtggtccagtgccaagagacatttatcagagaattaaaaaacttgaggataaaatccttgaattggaaggcatctctcctgaatattttcagtctgtaagcttttctggaaaaagaagaaaagttcaaccacctcaaaactattcactggctgaacttgatgagaaaattagtgccctcaaacaagccctcctcagaaaatcaagagaagcagaatccatggcaacccaccaccttccatgaaaaactcctctcatccttgtcattttacttttttgtatacatatgtgtaacttacactgttattaattcaacggatatatatttatcaatgtagacttctctgtgaagtcaaggtttattttcacatgagtccagcttgcagcaagtaatcttcaaatattccagtaagttttgaaataatgaatgcattgaaaatagcattgttggaatttattcccttctgttttaaaggaggtattttggaaattgaaaaacttaatttacaagtgctggtacatcttttttcttttgtggaccacaggaaggaagatttattttgatattgatactttaaaaggactttatatttgtaacattgatgttaaccagtttattagtttaaatcagtactttgcatataataagcattcaacaaaaatttattgactgaaatgaattttaaatgcatgtgtatgaacttgtttttcttaatctttaagatgtcagtattcatgtaaataaacaatagatccagc

SEQ ID NO: 17181 - DNA, 1642 bp, Homo sapiens
  source 1..1642: mol_type = unassigned DNA
tcgccaagcgactaaagctggaagggagggggcggggttgtgagcaaatcttggtggtggtggtggtggggcggcctgagaagatatcatggctgctgccacggagcttaatcgcccgagcagcggtgacaggaacctggagcgaagatgcagacccaacctctcccgagaggtgctctacgaaatctttcgctccctacacaccctggttggacagcttgacctcagagatgatgtggtgaaaattacaatcgattggaacaagctccagagcctctcggcattccagcctgcattgctctttagtgcacttgaacaacacattttatatttacagccttttttagcaaaacttcagtctccgattaaagaggagaatacaactgctgttgaagagataggaagaacagaaatggggaacaaaaatgaagtaaatgacaaattttccattggcgacctacaagaggaagaaaagcacaaagaaagtgatttaagagatgtgaaaaagacacagatccattttgatccagaagtagttcagataaaggctggaaaagcagaaattgacagacgaatatctgcatttattgaaagaaagcaagctgaaatcaatgaaaacaacgtcagggaattttgcaatgttattgattgtaatcaagaaaatagttgtgcaagaactgatgcgatttttaccccttaccccggatttaaaagtcacgtaaaagtttctagagttgtgaatacatacggaccacagactagacctgaaggaattccagggtcaggtcataaacctaacagcatgcttcgagactgtggtaatcaggctgtagaagaacgactacaaaatattgaggcccacttgcggttacagacaggtggtccagtgccaagagacatttatcagagaattaaaaaacttgaggataaaatccttgaattggaaggcatctctcctgaatattttcagtctgtaagcttttctggaaaaagaagaaaagttcaaccacctcaacagaactattcactggctgaacttgatgagaaaattagtgccctcaaacaagccctcctcagaaaatcaagagaagcagaatccatggcaacccaccaccttccatgaaaaactcctctcatccttgtcattttacttttttgtatacatatgtgtaacttacactgttattaattcaacggatatatatttatcaatgtagacttctctgtgaagtcaaggtttattttcacatgagtccagcttgcagcaagtaatcttcaaatattccagtaagttttgaaataatgaatgcattgaaaatagcattgttggaatttattcccttctgttttaaaggaggtattttggaaattgaaaaacttaatttacaagtgctggtacatcttttttcttttgtggaccacaggaaggaagatttattttgatattgatactttaaaaggactttatatttgtaacattgatgttaaccagtttattagtttaaatcagtactttgcatataataagcattcaacaaaaatttattgactgaaatgaattttaaatgcatgtgtatgaacttgtttttcttaatctttaagatgtcagtattcatgtaaataaacaatagatccagcttta

SEQ ID NO: 17182 - DNA, 5990 bp, Homo sapiens
  source 1..5990: mol_type = unassigned DNA
cccgctgcccaggattggtaggctccaccgctcggcagccggcttccctgctcggacgccgagcaccgccaaagcgcacttcgattttcagaattcctcctgggaatgctgactccttgcttggtgccctgatgcttctctgagataaactgatgaattggaaccatggtgcaaaagaagaagttctgtcctcggttacttgactatctagtgatcgtaggggccaggcacccgagcagtgatagcgtggcccagactcctgaattgctacggcgataccccttggaggatcacactgagtttcccctgcccccagatgtagtgttcttctgccagcccgagggctgcctgagcgtgcggcagcggcgcatgagccttcgggatgatacctcttttgtcttcaccctcactgacaaggacactggagtcacgcgatatggcatctgtgttaacttctaccgctccttccaaaagcgaatctctaaggagaagggggaaggtggggcagggtcccgtgggaaggaaggaacccatgccacctgtgcctcagaagagggtggcactgagagctcagagagtggctcatccctgcagcctctcagtgctgactctacccctgatgtgaaccagtctcctcggggcaaacgccgggccaaggcggggagccgctcccgcaacagtactctcacgtccctgtgcgtgctcagccactaccctttcttctccaccttccgagagtgtttgtatactctcaagcgcctggtggactgctgtagtgagcgccttctgggcaagaaactgggcatccctcgaggcgtacaaagggacaccatgtggcggatctttactggatcgctgctggtagaggagaagtcaagtgcccttctgcatgaccttcgagagattgaggcctggatctatcgattgctgcgctccccagtacccgtctctgggcagaagcgagtagacatcgaggtcctaccccaagagctccagccagctctgacctttgctcttccagacccatctcgattcaccctagtggatttcccactgcaccttcccttggaacttctaggtgtggacgcctgtctccaggtgctaacctgcattctgttagagcacaaggtggtgctacagtcccgagactacaatgcactctccatgtctgtgatggcattcgtggcaatgatctacccactggagtatatgtttcctgtcatcccgctgctacccacctgcatggcatcagcagagcagctgctgttggctccaaccccgtacatcattggggttcctgccagcttcttcctctacaaactggacttcaaaatgcctgatgatgtatggctagtggatctggacagcaatagggtgattgcccccaccaatgcagaagtgctgcctatcctgccagaaccagaatcactagagctgaaaaagcatttaaagcaggccttggccagcatgagtctcaacacccagcccatcctcaatctggagaaatttcatgagggccaggagatcccccttctcttgggaaggccttctaatgacctgcagtccacaccgtccactgaattcaacccactcatctatggcaatgatgtggattctgtggatgttgcaaccagggttgccatggtacggttcttcaattccgccaacgtgctgcagggatttcagatgcacacgcgtaccctgcgcctctttcctcggcctgtggtagcttttcaagctggctcctttctagcctcacgtccccggcagactccttttgccgagaaattggccaggactcaggctgtggagtactttggggaatggatccttaaccccaccaactatgcctttcagcgaattcacaacaatatgtttgatccagccctgattggtgacaagccaaagtggtatgctcatcagctgcagcctatccactatcgcgtctatgacagcaattcccagctggctgaggccctgagtgtaccaccagagcgggactctgactccgaacctactgatgatagtggcagtgatagtatggattatgacgattcaagctcttcttactcctcccttggtgactttgtcagtgaaatgatgaaatgtgacattaatggtgatactcccaatgtggaccctctgacacatgcagcactgggggatgccagcgaggtggagattgacgagctgcagaatcagaaggaagcagaagagcctggcccagacagtgagaactctcaggaaaaccccccactgcgctccagctctagcaccacagccagcagcagccccagcactgtcatccacggagccaactctgaacctgctgactctacggagatggatgataaggcagcagtaggcgtctccaagcccctcccttccgtgcctcccagcattggcaaatcgaacgtggacagacgtcaggcagaaattggagaggggtcagtgcgccggcgaatctatgacaatccatacttcgagccccaatatggctttccccctgaggaagatgaggatgagcagggggaaagttacactccccgattcagccaacatgtcagtggcaatcgggctcaaaagctgctgcggcccaacagcttgagactggcaagtgactcagatgcagagtcagactctcgggcaagctctcccaactccaccgtctccaacaccagcaccgagggcttcgggggcatcatgtcttttgccagcagcctctatcggaaccacagtaccagcttcagtctttcaaacctcacactgcccaccaaaggtgcccgagagaaggccacgcccttccccagtctgaaagtatttgggctaaatactctaatggagattgttactgaagccggccccgggagtggtgaaggaaacaggagggcgttagtggatcagaagtcatctgtcattaaacacagcccaacagtgaaaagagaacctccatcaccccagggtcgatccagcaattctagtgagaaccagcagttcctgaaggaggtggtgcacagcgtgctggacggccagggagttggctggctcaacatgaaaaaggtgcgccggctgctggagagcgagcagctgcgagtctttgtcctgagcaagctgaaccgcatggtgcagtcagaggacgatgcccggcaggacatcatcccggatgtggagatcagtcggaaggtgtacaagggaatgttagacctcctcaagtgtacagtcctcagcttggagcagtcctatgcccacgcgggtctgggtggcatggccagcatctttgggcttttggagattgcccagacccactactatagtaaagaaccagacaagcggaagagaagtccaacagaaagtgtaaataccccagttggcaaggatcctggcctagctgggcggggggacccaaaggctatggcacaactgagagttccacaactgggacctcgggcaccaagtgccacaggaaagggtcctaaggaactggacaccagaagtttaaaggaagaaaattttatagcatctattgaattgtggaacaagcaccaggaagtgaaaaagcaaaaagctttggaaaaacagaggcctgaagtaatcaaacctgtctttgaccttggtgagacagaggagaaaaagtcccagatcagcgcagacagtggtgtgagcctgacgtctagttcccagaggactgatcaagactctgtcatcggcgtgagtccagctgttatgatccgcagctcaagtcaggattctgaagttagcaccgtggtgagtaatagctctggagagacccttggagctgacagtgacttgagcagcaatgcaggtgatggaccaggtggcgagggcagtgttcacctggcaagctctcggggcactttgtctgatagtgaaattgagaccaactctgccacaagcaccatctttggtaaagcccacagcttgaagccaagcataaaggagaagctggcaggcagccccattcgtacttctgaagatgtgagccagcgagtctatctctatgagggactcctaggaagggacaaaggatccatgtgggaccagttagaggatgcagctatggagaccttttctataagcaaagagcgttctactttatgggaccaaatgcaattctgggaagatgccttcttagatgctgtgatgttggagagagaagggatgggtatggaccagggtccccaggaaatgatcgacaggtacctgtcccttggagaacatgaccggaagcgcctggaagatgatgaagatcgcttgttggccacacttctgcacaacctcatctcctacatgctgctgatgaaggtaaataagaatgacatccgcaagaaggtgaggcgcctaatgggaaagtcgcacattgggcttgtgtacagccagcaaatcaatgaggtgcttgatcagctggcgaacctgaatggacgcgatctctctatctggtccagtggcagccggcacatgaagaagcagacatttgtggtacatgcagggacagatacaaacggagatatctttttcatggaggtgtgcgatgactgtgtggtgttgcgtagtaacatcggaacagtgtatgagcgctggtggtacgagaagctcatcaacatgacctactgtcccaagacgaaggtgttgtgcttgtggcgtagaaatggctctgagacccagctcaacaagttctatactaaaaagtgtcgggagctgtactactgtgtgaaggacagcatggagcgcgctgccgcccgacagcaaagcatcaaacccggacctgaattgggtggcgagttccctgtgcaggacctgaagactggtgagggtggcctgctgcaggtgaccctggaagggatcaacctcaaattcatgcacaatcaggttttcatagagctgaatcacattaaaaagtgcaatacagttcgaggcgtctttgtcctggaggaatttgttcctgaaattaaagaagtggtgagccacaagtacaagacaccaatggcccacgaaatctgctactccgtattatgtctcttctcgtacgtggctgcagttcatagcagtgaggaagatctcagaaccccgccccggcctgtctctagctgatggagaggggctacgcagctgccccagcccagggcacgcccctggccccttgctgttcccaagtgcacgatgctgctgtgactgaggagtggatgatgctcgtgtgtcctctgcaagccccctgctgtggcttggttggttaccggttatgtgtccctctgagtgtgtcttgagcgtgtccaccttctccctctccactcccagaagaccaaactgccttcccctcagggctcaagaatgtgtacagtctgtggggccggtgtgaacccactattttgtgtccttgagacatttgtgttgtggttccttgtccttgtccctggcgttataactgtccactgcaagagtctggctctcccttctctgtgacccggcatgactgggcgcctggagcagtttcactctgtgaggagtgagggaaccctggggctcaccctctcagaggaagggcacagagaggaagggaagaattggggggcagccggagtgagtggcagcctccctgcttccttctgcattcccaagccggcagctactgcccagggcccgcagtgttggctgctgcctgccacagcctctgtgactgcagtggagcggcgaattccctgtggcctgccatgccttcggcatcagaggatggagtggtcgaggctagtggagtcccagggaccgctggctgctctgcctgagcatcagggagggggcaggaaagaccaagctgggtttgcacatctgtctgcaggctgtctctccaggcacggggtgtcaggagggagagacagcctgggtatgggcaagaaatgactgtaaatatttcagccccacattatttatagaaaatgtacagttgtgtgaatgtgaaataaatgtcctcaactccc

SEQ ID NO: 17183 - DNA, 6005 bp, Homo sapiens
  source 1..6005: mol_type = unassigned DNA
gatttcagcgctaaggcgtcggcggtgcacctcacgtgcatgtgtagcatgccttggtttttcctttggcatctgaaaaaggcacaacctgaaagacctagaacccagtgtcggtccccaggccctttgggacaggaagagaagagccgtgtggccgcggggaggatgtcctgaggcggggctgtcctcgcggactgactggactccatctcccagcgggcgccgcggcgcggccacgcccccccactccccgcgcgcgcccggtggagacttcgattttcagaattcctcctgggaatgctgactccttgcttggtgccctgatgcttctctgagataaactgatgaattggaaccatggtgcaaaagaagaagttctgtcctcggttacttgactatctagtgatcgtaggggccaggcacccgagcagtgatagcgtggcccagactcctgaattgctacggcgataccccttggaggatcacactgagtttcccctgcccccagatgtagtgttcttctgccagcccgagggctgcctgagcgtgcggcagcggcgcatgagccttcgggatgatacctcttttgtcttcaccctcactgacaaggacactggagtcacgcgatatggcatctgtgttaacttctaccgctccttccaaaagcgaatctctaaggagaagggggaaggtggggcagggtcccgtgggaaggaaggaacccatgccacctgtgcctcagaagagggtggcactgagagctcagagagtggctcatccctgcagcctctcagtgctgactctacccctgatgtgaaccagtctcctcggggcaaacgccgggccaaggcggggagccgctcccgcaacagtactctcacgtccctgtgcgtgctcagccactaccctttcttctccaccttccgagagtgtttgtatactctcaagcgcctggtggactgctgtagtgagcgccttctgggcaagaaactgggcatccctcgaggcgtacaaagggacaccatgtggcggatctttactggatcgctgctggtagaggagaagtcaagtgcccttctgcatgaccttcgagagattgaggcctggatctatcgattgctgcgctccccagtacccgtctctgggcagaagcgagtagacatcgaggtcctaccccaagagctccagccagctctgacctttgctcttccagacccatctcgattcaccctagtggatttcccactgcaccttcccttggaacttctaggtgtggacgcctgtctccaggtgctaacctgcattctgttagagcacaaggtggtgctacagtcccgagactacaatgcactctccatgtctgtgatggcattcgtggcaatgatctacccactggagtatatgtttcctgtcatcccgctgctacccacctgcatggcatcagcagagcagctgctgttggctccaaccccgtacatcattggggttcctgccagcttcttcctctacaaactggacttcaaaatgcctgatgatgtatggctagtggatctggacagcaatagggtgattgcccccaccaatgcagaagtgctgcctatcctgccagaaccagaatcactagagctgaaaaagcatttaaagcaggccttggccagcatgagtctcaacacccagcccatcctcaatctggagaaatttcatgagggccaggagatcccccttctcttgggaaggccttctaatgacctgcagtccacaccgtccactgaattcaacccactcatctatggcaatgatgtggattctgtggatgttgcaaccagggttgccatggtacggttcttcaattccgccaacgtgctgcagggatttcagatgcacacgcgtaccctgcgcctctttcctcggcctgtggtagcttttcaagctggctcctttctagcctcacgtccccggcagactccttttgccgagaaattggccaggactcaggctgtggagtactttggggaatggatccttaaccccaccaactatgcctttcagcgaattcacaacaatatgtttgatccagccctgattggtgacaagccaaagtggtatgctcatcagctgcagcctatccactatcgcgtctatgacagcaattcccagctggctgaggccctgagtgtaccaccagagcgggactctgactccgaacctactgatgatagtggcagtgatagtatggattatgacgattcaagctcttcttactcctcccttggtgactttgtcagtgaaatgatgaaatgtgacattaatggtgatactcccaatgtggaccctctgacacatgcagcactgggggatgccagcgaggtggagattgacgagctgcagaatcagaaggaagcagaagagcctggcccagacagtgagaactctcaggaaaaccccccactgcgctccagctctagcaccacagccagcagcagccccagcactgtcatccacggagccaactctgaacctgctgactctacggagatggatgataaggcagcagtaggcgtctccaagcccctcccttccgtgcctcccagcattggcaaatcgaacgtggacagacgtcaggcagaaattggagaggggtcagtgcgccggcgaatctatgacaatccatacttcgagccccaatatggctttccccctgaggaagatgaggatgagcagggggaaagttacactccccgattcagccaacatgtcagtggcaatcgggctcaaaagctgctgcggcccaacagcttgagactggcaagtgactcagatgcagagtcagactctcgggcaagctctcccaactccaccgtctccaacaccagcaccgagggcttcgggggcatcatgtcttttgccagcagcctctatcggaaccacagtaccagcttcagtctttcaaacctcacactgcccaccaaaggtgcccgagagaaggccacgcccttccccagtctgaaaggaaacaggagggcgttagtggatcagaagtcatctgtcattaaacacagcccaacagtgaaaagagaacctccatcaccccagggtcgatccagcaattctagtgagaaccagcagttcctgaaggaggtggtgcacagcgtgctggacggccagggagttggctggctcaacatgaaaaaggtgcgccggctgctggagagcgagcagctgcgagtctttgtcctgagcaagctgaaccgcatggtgcagtcagaggacgatgcccggcaggacatcatcccggatgtggagatcagtcggaaggtgtacaagggaatgttagacctcctcaagtgtacagtcctcagcttggagcagtcctatgcccacgcgggtctgggtggcatggccagcatctttgggcttttggagattgcccagacccactactatagtaaagaaccagacaagcggaagagaagtccaacagaaagtgtaaataccccagttggcaaggatcctggcctagctgggcggggggacccaaaggctatggcacaactgagagttccacaactgggacctcgggcaccaagtgccacaggaaagggtcctaaggaactggacaccagaagtttaaaggaagaaaattttatagcatctattgggcctgaagtaatcaaacctgtctttgaccttggtgagacagaggagaaaaagtcccagatcagcgcagacagtggtgtgagcctgacgtctagttcccagaggactgatcaagactctgtcatcggcgtgagtccagctgttatgatccgcagctcaagtcaggattctgaagttagcaccgtggtgagtaatagctctggagagacccttggagctgacagtgacttgagcagcaatgcaggtgatggaccaggtggcgagggcagtgttcacctggcaagctctcggggcactttgtctgatagtgaaattgagaccaactctgccacaagcaccatctttggtaaagcccacagcttgaagccaagcataaaggagaagctggcaggcagccccattcgtacttctgaagatgtgagccagcgagtctatctctatgagggactcctaggcaaagagcgttctactttatgggaccaaatgcaattctgggaagatgccttcttagatgctgtgatgttggagagagaagggatgggtatggaccagggtccccaggaaatgatcgacaggtacctgtcccttggagaacatgaccggaagcgcctggaagatgatgaagatcgcttgttggccacacttctgcacaacctcatctcctacatgctgctgatgaaggtaaataagaatgacatccgcaagaaggtgaggcgcctaatgggaaagtcgcacattgggcttgtgtacagccagcaaatcaatgaggtgcttgatcagctggcgaacctgaatggacgcgatctctctatctggtccagtggcagccggcacatgaagaagcagacatttgtggtacatgcagggacagatacaaacggagatatctttttcatggaggtgtgcgatgactgtgtggtgttgcgtagtaacatcggaacagtgtatgagcgctggtggtacgagaagctcatcaacatgacctactgtcccaagacgaaggtgttgtgcttgtggcgtagaaatggctctgagacccagctcaacaagttctatactaaaaagtgtcgggagctgtactactgtgtgaaggacagcatggagcgcgctgccgcccgacagcaaagcatcaaacccggacctgaattgggtggcgagttccctgtgcaggacctgaagactggtgagggtggcctgctgcaggtgaccctggaagggatcaacctcaaattcatgcacaatcaggttttcatagagctgaatcacattaaaaagtgcaatacagttcgaggcgtctttgtcctggaggaatttgttcctgaaattaaagaagtggtgagccacaagtacaagacaccaatggcccacgaaatctgctactccgtattatgtctcttctcgtacgtggctgcagttcatagcagtgaggaagatctcagaaccccgccccggcctgtctctagctgatggagaggggctacgcagctgccccagcccagggcacgcccctggccccttgctgttcccaagtgcacgatgctgctgtgactgaggagtggatgatgctcgtgtgtcctctgcaagccccctgctgtggcttggttggttaccggttatgtgtccctctgagtgtgtcttgagcgtgtccaccttctccctctccactcccagaagaccaaactgccttcccctcagggctcaagaatgtgtacagtctgtggggccggtgtgaacccactattttgtgtccttgagacatttgtgttgtggttccttgtccttgtccctggcgttataactgtccactgcaagagtctggctctcccttctctgtgacccggcatgactgggcgcctggagcagtttcactctgtgaggagtgagggaaccctggggctcaccctctcagaggaagggcacagagaggaagggaagaattggggggcagccggagtgagtggcagcctccctgcttccttctgcattcccaagccggcagctactgcccagggcccgcagtgttggctgctgcctgccacagcctctgtgactgcagtggagcggcgaattccctgtggcctgccatgccttcggcatcagaggatggagtggtcgaggctagtggagtcccagggaccgctggctgctctgcctgagcatcagggagggggcaggaaagaccaagctgggtttgcacatctgtctgcaggctgtctctccaggcacggggtgtcaggagggagagacagcctgggtatgggcaagaaatgactgtaaatatttcagccccacattatttatagaaaatgtacagttgtgtgaatgtgaaataaatgtcctcaactccc

SEQ ID NO: 17184 - DNA, 5873 bp, Homo sapiens
  source 1..5873: mol_type = unassigned DNA
cccgctgcccaggattggtaggctccaccgctcggcagccggcttccctgctcggacgccgagcaccgccaaagcgcacttcgattttcagaattcctcctgggaatgctgactccttgcttggtgccctgatgcttctctgagataaactgatgaattggaaccatggtgcaaaagaagaagttctgtcctcggttacttgactatctagtgatcgtaggggccaggcacccgagcagtgatagcgtggcccagactcctgaattgctacggcgataccccttggaggatcacactgagtttcccctgcccccagatgtagtgttcttctgccagcccgagggctgcctgagcgtgcggcagcggcgcatgagccttcgggatgatacctcttttgtcttcaccctcactgacaaggacactggagtcacgcgatatggcatctgtgttaacttctaccgctccttccaaaagcgaatctctaaggagaagggggaaggtggggcagggtcccgtgggaaggaaggaacccatgccacctgtgcctcagaagagggtggcactgagagctcagagagtggctcatccctgcagcctctcagtgctgactctacccctgatgtgaaccagtctcctcggggcaaacgccgggccaaggcggggagccgctcccgcaacagtactctcacgtccctgtgcgtgctcagccactaccctttcttctccaccttccgagagtgtttgtatactctcaagcgcctggtggactgctgtagtgagcgccttctgggcaagaaactgggcatccctcgaggcgtacaaagggacaccatgtggcggatctttactggatcgctgctggtagaggagaagtcaagtgcccttctgcatgaccttcgagagattgaggcctggatctatcgattgctgcgctccccagtacccgtctctgggcagaagcgagtagacatcgaggtcctaccccaagagctccagccagctctgacctttgctcttccagacccatctcgattcaccctagtggatttcccactgcaccttcccttggaacttctaggtgtggacgcctgtctccaggtgctaacctgcattctgttagagcacaaggtggtgctacagtcccgagactacaatgcactctccatgtctgtgatggcattcgtggcaatgatctacccactggagtatatgtttcctgtcatcccgctgctacccacctgcatggcatcagcagagcagctgctgttggctccaaccccgtacatcattggggttcctgccagcttcttcctctacaaactggacttcaaaatgcctgatgatgtatggctagtggatctggacagcaatagggtgattgcccccaccaatgcagaagtgctgcctatcctgccagaaccagaatcactagagctgaaaaagcatttaaagcaggccttggccagcatgagtctcaacacccagcccatcctcaatctggagaaatttcatgagggccaggagatcccccttctcttgggaaggccttctaatgacctgcagtccacaccgtccactgaattcaacccactcatctatggcaatgatgtggattctgtggatgttgcaaccagggttgccatggtacggttcttcaattccgccaacgtgctgcagggatttcagatgcacacgcgtaccctgcgcctctttcctcggcctgtggtagcttttcaagctggctcctttctagcctcacgtccccggcagactccttttgccgagaaattggccaggactcaggctgtggagtactttggggaatggatccttaaccccaccaactatgcctttcagcgaattcacaacaatatgtttgatccagccctgattggtgacaagccaaagtggtatgctcatcagctgcagcctatccactatcgcgtctatgacagcaattcccagctggctgaggccctgagtgtaccaccagagcgggactctgactccgaacctactgatgatagtggcagtgatagtatggattatgacgattcaagctcttcttactcctcccttggtgactttgtcagtgaaatgatgaaatgtgacattaatggtgatactcccaatgtggaccctctgacacatgcagcactgggggatgccagcgaggtggagattgacgagctgcagaatcagaaggaagcagaagagcctggcccagacagtgagaactctcaggaaaaccccccactgcgctccagctctagcaccacagccagcagcagccccagcactgtcatccacggagccaactctgaacctgctgactctacggagatggatgataaggcagcagtaggcgtctccaagcccctcccttccgtgcctcccagcattggcaaatcgaacgtggacagacgtcaggcagaaattggagaggggtcagtgcgccggcgaatctatgacaatccatacttcgagccccaatatggctttccccctgaggaagatgaggatgagcagggggaaagttacactccccgattcagccaacatgtcagtggcaatcgggctcaaaagctgctgcggcccaacagcttgagactggcaagtgactcagatgcagagtcagactctcgggcaagctctcccaactccaccgtctccaacaccagcaccgagggcttcgggggcatcatgtcttttgccagcagcctctatcggaaccacagtaccagcttcagtctttcaaacctcacactgcccaccaaaggtgcccgagagaaggccacgcccttccccagtctgaaagtatttgggctaaatactctaatggagattgttactgaagccggccccgggagtggtgaaggaaacaggagggcgttagtggatcagaagtcatctgtcattaaacacagcccaacagtgaaaagagaacctccatcaccccagggtcgatccagcaattctagtgagaaccagcagttcctgaaggaggtggtgcacagcgtgctggacggccagggagttggctggctcaacatgaaaaaggtgcgccggctgctggagagcgagcagctgcgagtctttgtcctgagcaagctgaaccgcatggtgcagtcagaggacgatgcccggcaggacatcatcccggatgtggagatcagtcggaaggtgtacaagggaatgttagacctcctcaagtgtacagtcctcagcttggagcagtcctatgcccacgcgggtctgggtggcatggccagcatctttgggcttttggagattgcccagacccactactatagtaaagaaccagacaagcggaagagaagtccaacagaaagtgtaaataccccagttggcaaggatcctggcctagctgggcggggggacccaaaggctatggcacaactgagagttccacaactgggacctcgggcaccaagtgccacaggaaagggtcctaaggaactggacaccagaagtttaaaggaagaaaattttatagcatctattgggcctgaagtaatcaaacctgtctttgaccttggtgagacagaggagaaaaagtcccagatcagcgcagacagtggtgtgagcctgacgtctagttcccagaggactgatcaagactctgtcatcggcgtgagtccagctgttatgatccgcagctcaagtcaggattctgaagttagcaccgtggtgagtaatagctctggagagacccttggagctgacagtgacttgagcagcaatgcaggtgatggaccaggtggcgagggcagtgttcacctggcaagctctcggggcactttgtctgatagtgaaattgagaccaactctgccacaagcaccatctttggtaaagcccacagcttgaagccaagcataaaggagaagctggcaggcagccccattcgtacttctgaagatgtgagccagcgagtctatctctatgagggactcctaggcaaagagcgttctactttatgggaccaaatgcaattctgggaagatgccttcttagatgctgtgatgttggagagagaagggatgggtatggaccagggtccccaggaaatgatcgacaggtacctgtcccttggagaacatgaccggaagcgcctggaagatgatgaagatcgcttgttggccacacttctgcacaacctcatctcctacatgctgctgatgaaggtaaataagaatgacatccgcaagaaggtgaggcgcctaatgggaaagtcgcacattgggcttgtgtacagccagcaaatcaatgaggtgcttgatcagctggcgaacctgaatggacgcgatctctctatctggtccagtggcagccggcacatgaagaagcagacatttgtggtacatgcagggacagatacaaacggagatatctttttcatggaggtgtgcgatgactgtgtggtgttgcgtagtaacatcggaacagtgtatgagcgctggtggtacgagaagctcatcaacatgacctactgtcccaagacgaaggtgttgtgcttgtggcgtagaaatggctctgagacccagctcaacaagttctatactaaaaagtgtcgggagctgtactactgtgtgaaggacagcatggagcgcgctgccgcccgacagcaaagcatcaaacccggacctgaattgggtggcgagttccctgtgcaggacctgaagactggtgagggtggcctgctgcaggtgaccctggaagggatcaacctcaaattcatgcacaatcaggttttcatagagctgaatcacattaaaaagtgcaatacagttcgaggcgtctttgtcctggaggaatttgttcctgaaattaaagaagtggtgagccacaagtacaagacaccaatggcccacgaaatctgctactccgtattatgtctcttctcgtacgtggctgcagttcatagcagtgaggaagatctcagaaccccgccccggcctgtctctagctgatggagaggggctacgcagctgccccagcccagggcacgcccctggccccttgctgttcccaagtgcacgatgctgctgtgactgaggagtggatgatgctcgtgtgtcctctgcaagccccctgctgtggcttggttggttaccggttatgtgtccctctgagtgtgtcttgagcgtgtccaccttctccctctccactcccagaagaccaaactgccttcccctcagggctcaagaatgtgtacagtctgtggggccggtgtgaacccactattttgtgtccttgagacatttgtgttgtggttccttgtccttgtccctggcgttataactgtccactgcaagagtctggctctcccttctctgtgacccggcatgactgggcgcctggagcagtttcactctgtgaggagtgagggaaccctggggctcaccctctcagaggaagggcacagagaggaagggaagaattggggggcagccggagtgagtggcagcctccctgcttccttctgcattcccaagccggcagctactgcccagggcccgcagtgttggctgctgcctgccacagcctctgtgactgcagtggagcggcgaattccctgtggcctgccatgccttcggcatcagaggatggagtggtcgaggctagtggagtcccagggaccgctggctgctctgcctgagcatcagggagggggcaggaaagaccaagctgggtttgcacatctgtctgcaggctgtctctccaggcacggggtgtcaggagggagagacagcctgggtatgggcaagaaatgactgtaaatatttcagccccacattatttatagaaaatgtacagttgtgtgaatgtgaaataaatgtcctcaactccc

SEQ ID NO: 17185 - DNA, 5942 bp, Homo sapiens
  source 1..5942: mol_type = unassigned DNA
ctggcgcccgctcggagcggcgccgcgctggggagcgactgacgccccgctgccgggggacgtcgggctgggcctggccagtcccccagagcttgggagacttcgattttcagaattcctcctgggaatgctgactccttgcttggtgccctgatgcttctctgagataaactgatgaattggaaccatggtgcaaaagaagaagttctgtcctcggttacttgactatctagtgatcgtaggggccaggcacccgagcagtgatagcgtggcccagactcctgaattgctacggcgataccccttggaggatcacactgagtttcccctgcccccagatgtagtgttcttctgccagcccgagggctgcctgagcgtgcggcagcggcgcatgagccttcgggatgatacctcttttgtcttcaccctcactgacaaggacactggagtcacgcgatatggcatctgtgttaacttctaccgctccttccaaaagcgaatctctaaggagaagggggaaggtggggcagggtcccgtgggaaggaaggaacccatgccacctgtgcctcagaagagggtggcactgagagctcagagagtggctcatccctgcagcctctcagtgctgactctacccctgatgtgaaccagtctcctcggggcaaacgccgggccaaggcggggagccgctcccgcaacagtactctcacgtccctgtgcgtgctcagccactaccctttcttctccaccttccgagagtgtttgtatactctcaagcgcctggtggactgctgtagtgagcgccttctgggcaagaaactgggcatccctcgaggcgtacaaagggacaccatgtggcggatctttactggatcgctgctggtagaggagaagtcaagtgcccttctgcatgaccttcgagagattgaggcctggatctatcgattgctgcgctccccagtacccgtctctgggcagaagcgagtagacatcgaggtcctaccccaagagctccagccagctctgacctttgctcttccagacccatctcgattcaccctagtggatttcccactgcaccttcccttggaacttctaggtgtggacgcctgtctccaggtgctaacctgcattctgttagagcacaaggtggtgctacagtcccgagactacaatgcactctccatgtctgtgatggcattcgtggcaatgatctacccactggagtatatgtttcctgtcatcccgctgctacccacctgcatggcatcagcagagcagctgctgttggctccaaccccgtacatcattggggttcctgccagcttcttcctctacaaactggacttcaaaatgcctgatgatgtatggctagtggatctggacagcaatagggtgattgcccccaccaatgcagaagtgctgcctatcctgccagaaccagaatcactagagctgaaaaagcatttaaagcaggccttggccagcatgagtctcaacacccagcccatcctcaatctggagaaatttcatgagggccaggagatcccccttctcttgggaaggccttctaatgacctgcagtccacaccgtccactgaattcaacccactcatctatggcaatgatgtggattctgtggatgttgcaaccagggttgccatggtacggttcttcaattccgccaacgtgctgcagggatttcagatgcacacgcgtaccctgcgcctctttcctcggcctgtggtagcttttcaagctggctcctttctagcctcacgtccccggcagactccttttgccgagaaattggccaggactcaggctgtggagtactttggggaatggatccttaaccccaccaactatgcctttcagcgaattcacaacaatatgtttgatccagccctgattggtgacaagccaaagtggtatgctcatcagctgcagcctatccactatcgcgtctatgacagcaattcccagctggctgaggccctgagtgtaccaccagagcgggactctgactccgaacctactgatgatagtggcagtgatagtatggattatgacgattcaagctcttcttactcctcccttggtgactttgtcagtgaaatgatgaaatgtgacattaatggtgatactcccaatgtggaccctctgacacatgcagcactgggggatgccagcgaggtggagattgacgagctgcagaatcagaaggaagcagaagagcctggcccagacagtgagaactctcaggaaaaccccccactgcgctccagctctagcaccacagccagcagcagccccagcactgtcatccacggagccaactctgaacctgctgactctacggagatggatgataaggcagcagtaggcgtctccaagcccctcccttccgtgcctcccagcattggcaaatcgaacgtggacagacgtcaggcagaaattggagaggggtcagtgcgccggcgaatctatgacaatccatacttcgagccccaatatggctttccccctgaggaagatgaggatgagcagggggaaagttacactccccgattcagccaacatgtcagtggcaatcgggctcaaaagctgctgcggcccaacagcttgagactggcaagtgactcagatgcagagtcagactctcgggcaagctctcccaactccaccgtctccaacaccagcaccgagggcttcgggggcatcatgtcttttgccagcagcctctatcggaaccacagtaccagcttcagtctttcaaacctcacactgcccaccaaaggtgcccgagagaaggccacgcccttccccagtctgaaagtatttgggctaaatactctaatggagattgttactgaagccggccccgggagtggtgaaggaaacaggagggcgttagtggatcagaagtcatctgtcattaaacacagcccaacagtgaaaagagaacctccatcaccccagggtcgatccagcaattctagtgagaaccagcagttcctgaaggaggtggtgcacagcgtgctggacggccagggagttggctggctcaacatgaaaaaggtgcgccggctgctggagagcgagcagctgcgagtctttgtcctgagcaagctgaaccgcatggtgcagtcagaggacgatgcccggcaggacatcatcccggatgtggagatcagtcggaaggtgtacaagggaatgttagacctcctcaagtgtacagtcctcagcttggagcagtcctatgcccacgcgggtctgggtggcatggccagcatctttgggcttttggagattgcccagacccactactatagtaaagaaccagacaagcggaagagaagtccaacagaaagtgtaaataccccagttggcaaggatcctggcctagctgggcggggggacccaaaggctatggcacaactgagagttccacaactgggacctcgggcaccaagtgccacaggaaagggtcctaaggaactggacaccagaagtttaaaggaagaaaattttatagcatctattgaattgtggaacaagcaccaggaagtgaaaaagcaaaaagctttggaaaaacagaggcctgaagtaatcaaacctgtctttgaccttggtgagacagaggagaaaaagtcccagatcagcgcagacagtggtgtgagcctgacgtctagttcccagaggactgatcaagactctgtcatcggcgtgagtccagctgttatgatccgcagctcaagtcaggattctgaagttagcaccgtggtgagtaatagctctggagagacccttggagctgacagtgacttgagcagcaatgcaggtgatggaccaggtggcgagggcagtgttcacctggcaagctctcggggcactttgtctgatagtgaaattgagaccaactctgccacaagcaccatctttggtaaagcccacagcttgaagccaagcataaaggagaagctggcaggcagccccattcgtacttctgaagatgtgagccagcgagtctatctctatgagggactcctaggaagggacaaaggatccatgtgggaccagttagaggatgcagctatggagaccttttctataagcaaagagcgttctactttatgggaccaaatgcaattctgggaagatgccttcttagatgctgtgatgttggagagagaagggatgggtatggaccagggtccccaggaaatgatcgacaggtacctgtcccttggagaacatgaccggaagcgcctggaagatgatgaagatcgcttgttggccacacttctgcacaacctcatctcctacatgctgctgatgaaggtaaataagaatgacatccgcaagaaggtgaggcgcctaatgggaaagtcgcacattgggcttgtgtacagccagcaaatcaatgaggtgcttgatcagctggcgaacctgaatggacgcgatctctctatctggtccagtggcagccggcacatgaagaagcagacatttgtggtacatgcagggacagatacaaacggagatatctttttcatggaggtgtgcgatgactgtgtggtgttgcgtagtaacatcggaacagtgtatgagcgctggtggtacgagaagctcatcaacatgacctactgtcccaagacgaaggtgttgtgcttgtggcgtagaaatggctctgagacccagctcaacaagttctatactaaaaagtgtcgggagctgtactactgtgtgaaggacagcatggagcgcgctgccgcccgacagcaaagcatcaaacccggacctgaattgggtggcgagttccctgtgcaggacctgaagactggtgagggtggcctgctgcaggtgaccctggaagggatcaacctcaaattcatgcacaatcagttcctgaaattaaagaagtggtgagccacaagtacaagacaccaatggcccacgaaatctgctactccgtattatgtctcttctcgtacgtggctgcagttcatagcagtgaggaagatctcagaaccccgccccggcctgtctctagctgatggagaggggctacgcagctgccccagcccagggcacgcccctggccccttgctgttcccaagtgcacgatgctgctgtgactgaggagtggatgatgctcgtgtgtcctctgcaagccccctgctgtggcttggttggttaccggttatgtgtccctctgagtgtgtcttgagcgtgtccaccttctccctctccactcccagaagaccaaactgccttcccctcagggctcaagaatgtgtacagtctgtggggccggtgtgaacccactattttgtgtccttgagacatttgtgttgtggttccttgtccttgtccctggcgttataactgtccactgcaagagtctggctctcccttctctgtgacccggcatgactgggcgcctggagcagtttcactctgtgaggagtgagggaaccctggggctcaccctctcagaggaagggcacagagaggaagggaagaattggggggcagccggagtgagtggcagcctccctgcttccttctgcattcccaagccggcagctactgcccagggcccgcagtgttggctgctgcctgccacagcctctgtgactgcagtggagcggcgaattccctgtggcctgccatgccttcggcatcagaggatggagtggtcgaggctagtggagtcccagggaccgctggctgctctgcctgagcatcagggagggggcaggaaagaccaagctgggtttgcacatctgtctgcaggctgtctctccaggcacggggtgtcaggagggagagacagcctgggtatgggcaagaaatgactgtaaatatttcagccccacattatttatagaaaatgtacagttgtgtgaatgtgaaataaatgtcctcaactccc

SEQ ID NO: 17186 - DNA, 4628 bp, Homo sapiens
  source 1..4628: mol_type = unassigned DNA
accgcggccgcgcgcccccctctgcccccgctgcccaggattggtaggctccaccgctcggcagccggcttccctgctcggacgccgagcaccgccaaagcgcacttcgattttcagaattcctcctgggaatgctgactccttgcttggtgccctgatgcttctctgagataaactgatgaattggaaccatggtgcaaaagaagaagttctgtcctcggttacttgactatctagtgatcgtaggggccaggcacccgagcagtgatagcgtggcccagactcctgaattgctacggcgataccccttggaggatcacactgagtttcccctgcccccagatgtagtgttcttctgccagcccgagggctgcctgagcgtgcggcagcggcgcatgagccttcgggatgatacctcttttgtcttcaccctcactgacaaggacactggagtcacgcgatatggcatctgtgttaacttctaccgctccttccaaaagcgaatctctaaggagaagggggaaggtggggcagggtcccgtgggaaggaaggaacccatgccacctgtgcctcagaagagggtggcactgagagctcagagagtggctcatccctgcagcctctcagtgctgactctacccctgatgtgaaccagtctcctcggggcaaacgccgggccaaggcggggagccgctcccgcaacagtactctcacgtccctgtgcgtgctcagccactaccctttcttctccaccttccgagagtgtttgtatactctcaagcgcctggtggactgctgtagtgagcgccttctgggcaagaaactgggcatccctcgaggcgtacaaagggacaccatgtggcggatctttactggatcgctgctggtagaggagaagtcaagtgcccttctgcatgaccttcgagagattgaggcctggatctatcgattgctgcgctccccagtacccgtctctgggcagaagcgagtagacatcgaggtcctaccccaagagctccagccagctctgacctttgctcttccagacccatctcgattcaccctagtggatttcccactgcaccttcccttggaacttctaggtgtggacgcctgtctccaggtgctaacctgcattctgttagagcacaaggtggtgctacagtcccgagactacaatgcactctccatgtctgtgatggcattcgtggcaatgatctacccactggagtatatgtttcctgtcatcccgctgctacccacctgcatggcatcagcagagcagctgctgttggctccaaccccgtacatcattggggttcctgccagcttcttcctctacaaactggacttcaaaatgcctgatgatgtatggctagtggatctggacagcaatagggtgattgcccccaccaatgcagaagtgctgcctatcctgccagaaccagaatcactagagctgaaaaagcatttaaagcaggccttggccagcatgagtctcaacacccagcccatcctcaatctggagaaatttcatgagggccaggagatcccccttctcttgggaaggccttctaatgacctgcagtccacaccgtccactgaattcaacccactcatctatggcaatgatgtggattctgtggatgttgcaaccagggttgccatggtacggttcttcaattccgccaacgtgctgcagggatttcagatgcacacgcgtaccctgcgcctctttcctcggcctgtggtagcttttcaagctggctcctttctagcctcacgtccccggcagactccttttgccgagaaattggccaggactcaggctgtggagtactttggggaatggatccttaaccccaccaactatgcctttcagcgaattcacaacaatatgtttgatccagccctgattggtgacaagccaaagtggtatgctcatcagctgcagcctatccactatcgcgtctatgacagcaattcccagctggctgaggccctgagtgtaccaccagagcgggactctgactccgaacctactgatgatagtggcagtgatagtatggattatgacgattcaagctcttcttactcctcccttggtgactttgtcagtgaaatgatgaaatgtgacattaatggtgatactcccaatgtggaccctctgacacatgcagcactgggggatgccagcgaggtggagattgacgagctgcagaatcagaaggaagcagaagagcctggcccagacagtgagaactctcaggaaaaccccccactgcgctccagctctagcaccacagccagcagcagccccagcactgtcatccacggagccaactctgaacctgctgactctacggagatggatgataaggcagcagtaggcgtctccaagcccctcccttccgtgcctcccagcattggcaaatcgaacgtggacagacgtcaggcagaaattggagagggggctcaaaagctgctgcggcccaacagcttgagactggcaagtgactcagatgcagagtcagactctcgggcaagctctcccaactccaccgtctccaacaccagcaccgagggcttcgggggcatcatgtcttttgccagcagcctctatcggaaccacagtaccagcttcagtctttcaaacctcacactgcccaccaaaggtgcccgagagaaggccacgcccttccccagtctgaaaggaaacaggagggcgttagtggatcagaagtcatctgtcattaaacacagcccaacagtgaaaagagaacctccatcaccccagggtcgatccagcaattctagtgagaaccagcagttcctgaaggaggtggtgcacagcgtgctggacggccagggagttggctggctcaacatgaaaaaggtgcgccggctgctggagagcgagcagctgcgagtctttgtcctgagcaagctgaaccgcatggtgcagtcagaggacgatgcccggcaggacatcatcccggatgtggagatcagtcggaaggtgtacaagggaatgttagacctcctcaagtgtacagtcctcagcttggagcagtcctatgcccacgcgggtctgggtggcatggccagcatctttgggcttttggagattgcccagacccactactatagtaaagaaccagacaagcggaagagaagtccaacagaaagtgtaaataccccagttggcaaggatcctggcctagctgggcggggggacccaaaggctatggcacaactgagagttccacaactgggacctcgggcaccaagtgccacaggaaagggtcctaaggaactggacaccagaagtttaaaggaagaaaattttatagcatctattgggcctgaagtaatcaaacctgtctttgaccttggtgagacagaggagaaaaagtcccagatcagcgcagacagtggtgtgagcctgacgtctagttcccagaggactgatcaagactctgtcatcggcgtgagtccagctgttatgatccgcagctcaagtcaggattctgaagttagcaccgtggtgagtaatagctctggagagacccttggagctgacagtgacttgagcagcaatgcaggtgatggaccaggtggcgagggcagtgttcacctggcaagctctcggggcactttgtctgatagtgaaattgagaccaactctgccacaagcaccatctttggtaaagcccacagcttgaagccaagcataaaggagaagctggcaggcagccccattcgtacttctgaagatgtgagccagcgagtctatctctatgagggactcctaggcaaagagcgttctactttatgggaccaaatgcaattctgggaagatgccttcttagatgctgtgatgttggagagagaagggatgggtatggaccagggtccccaggaaatgatcgacaggtacctgtcccttggagaacatgaccggaagcgcctggaagatgatgaagatcgcttgttggccacacttctgcacaacctcatctcctacatgctgctgatgaaggtaaataagaatgacatccgcaagaaggtgaggcgcctaatgggaaagtcgcacattgggcttgtgtacagccagcaaatcaatgaggtgcttgatcagctggcgaacctgaatggacgcgatctctctatctggtccagtggcagccggcacatgaagaagcagacatttgtggtacatgcagggacagatacaaacggagatatctttttcatggaggtgtgcgatgactgtgtggtgttgcgtagtaacatcggaacagtgtatgagcgctggtggtacgagaagctcatcaacatgacctactgtcccaagacgaaggtgttgtgcttgtggcgtagaaatggctctgagacccagctcaacaagttctatactaaaaagtgtcgggagctgtactactgtgtgaaggacagcatggagcgcgctgccgcccgacagcaaagcatcaaacccggacctgaattgggtggcgagttccctgtgcaggacctgaagactggtgagggtggcctgctgcaggtgaccctggaagggatcaacctcaaattcatgcacaatcagctactcagaaggctgaggtgg

SEQ ID NO: 17187 - DNA, 4988 bp, Homo sapiens
  source 1..4988: mol_type = unassigned DNA
aggattggtaggctccaccgctcggcagccggcttccctgctcggacgccgagcaccgccaaagcgcacttcgattttcagaattcctcctgggaatgctgactccttgcttggtgccctgatgcttctctgagataaactgatgaattggaaccatggtgcaaaagaagaagttctgtcctcggttacttgactatctagtgatcgtaggggccaggcacccgagcagtgatagcgtggcccagactcctgaattgctacggcgataccccttggaggatcacactgagtttcccctgcccccagatgtagtgttcttctgccagcccgagggctgcctgagcgtgcggcagcggcgcatgagccttcgggatgatacctcttttgtcttcaccctcactgacaaggacactggagtcacgcgatatggcatctgtgttaacttctaccgctccttccaaaagcgaatctctaaggagaagggggaaggtggggcagggtcccgtgggaaggaaggaacccatgccacctgtgcctcagaagagggtggcactgagagctcagagagtggctcatccctgcagcctctcagtgctgactctacccctgatgtgaaccagtctcctcggggcaaacgccgggccaaggcggggagccgctcccgcaacagtactctcacgtccctgtgcgtgctcagccactaccctttcttctccaccttccgagagtgtttgtatactctcaagcgcctggtggactgctgtagtgagcgccttctgggcaagaaactgggcatccctcgaggcgtacaaagggacaccatgtggcggatctttactggatcgctgctggtagaggagaagtcaagtgcccttctgcatgaccttcgagagattgaggcctggatctatcgattgctgcgctccccagtacccgtctctgggcagaagcgagtagacatcgaggtcctaccccaagagctccagccagctctgacctttgctcttccagacccatctcgattcaccctagtggatttcccactgcaccttcccttggaacttctaggtgtggacgcctgtctccaggtgctaacctgcattctgttagagcacaaggtggtgctacagtcccgagactacaatgcactctccatgtctgtgatggcattcgtggcaatgatctacccactggagtatatgtttcctgtcatcccgctgctacccacctgcatggcatcagcagagcagctgctgttggctccaaccccgtacatcattggggttcctgccagcttcttcctctacaaactggacttcaaaatgcctgatgatgtatggctagtggatctggacagcaatagggtgattgcccccaccaatgcagaagtgctgcctatcctgccagaaccagaatcactagagctgaaaaagcatttaaagcaggccttggccagcatgagtctcaacacccagcccatcctcaatctggagaaatttcatgagggccaggagatcccccttctcttgggaaggccttctaatgacctgcagtccacaccgtccactgaattcaacccactcatctatggcaatgatgtggattctgtggatgttgcaaccagggttgccatggtacggttcttcaattccgccaacgtgctgcagggatttcagatgcacacgcgtaccctgcgcctctttcctcggcctgtggtagcttttcaagctggctcctttctagcctcacgtccccggcagactccttttgccgagaaattggccaggactcaggctgtggagtactttggggaatggatccttaaccccaccaactatgcctttcagcgaattcacaacaatatgtttgatccagccctgattggtgacaagccaaagtggtatgctcatcagctgcagcctatccactatcgcgtctatgacagcaattcccagctggctgaggccctgagtgtaccaccagagcgggactctgactccgaacctactgatgatagtggcagtgatagtatggattatgacgattcaagctcttcttactcctcccttggtgactttgtcagtgaaatgatgaaatgtgacattaatggtgatactcccaatgtggaccctctgacacatgcagcactgggggatgccagcgaggtggagattgacgagctgcagaatcagaaggaagcagaagagcctggcccagacagtgagaactctcaggaaaaccccccactgcgctccagctctagcaccacagccagcagcagccccagcactgtcatccacggagccaactctgaacctgctgactctacggagatggatgataaggcagcagtaggcgtctccaagcccctcccttccgtgcctcccagcattggcaaatcgaacgtggacagacgtcaggcagaaattggagagggggctcaaaagctgctgcggcccaacagcttgagactggcaagtgactcagatgcagagtcagactctcgggcaagctctcccaactccaccgtctccaacaccagcaccgagggcttcgggggcatcatgtcttttgccagcagcctctatcggaaccacagtaccagcttcagtctttcaaacctcacactgcccaccaaaggtgcccgagagaaggccacgcccttccccagtctgaaaggaaacaggagggcgttagtggatcagaagtcatctgtcattaaacacagcccaacagtgaaaagagaacctccatcaccccagggtcgatccagcaattctagtgagaaccagcagttcctgaaggaggtggtgcacagcgtgctggacggccagggagttggctggctcaacatgaaaaaggtgcgccggctgctggagagcgagcagctgcgagtctttgtcctgagcaagctgaaccgcatggtgcagtcagaggacgatgcccggcaggacatcatcccggatgtggagatcagtcggaaggtgtacaagggaatgttagacctcctcaagtgtacagtcctcagcttggagcagtcctatgcccacgcgggtctgggtggcatggccagcatctttgggcttttggagattgcccagacccactactatagtaaagaaccagacaagcggaagagaagtccaacagaaagtgtaaataccccagttggcaaggatcctggcctagctgggcggggggacccaaaggctatggcacaactgagagttccacaactgggacctcgggcaccaagtgccacaggaaagggtcctaaggaactggacaccagaagtttaaaggaagaaaattttatagcatctattgggcctgaagtaatcaaacctgtctttgaccttggtgagacagaggagaaaaagtcccagatcagcgcagacagtggtgtgagcctgacgtctagttcccagaggactgatcaagactctgtcatcggcgtgagtccagctgttatgatccgcagctcaagtcaggattctgaagtgagtaatagctctggagagacccttggagctgacagtgacttgagcagcaatgcaggtgatggaccaggtggcgagggcagtgttcacctggcaagctctcggggcactttgtctgatagtgaaattgagaccaactctgccacaagcaccatctttggtaaagcccacagcttgaagccaagcataaaggagaagctggcaggcagccccattcgtacttctgaagatgtgagccagcgagtctatctctatgagggactcctaggcaaagagcgttctactttatgggaccaaatgcaattctgggaagatgccttcttagatgctgtgatgttggagagagaagggatgggtatggaccagggtccccaggaaatgatcgacaggtacctgtcccttggagaacatgaccggaagcgcctggaagatgatgaagatcgcttgttggccacacttctgcacaacctcatctcctacatgctgctgatgaaggtaaataagaatgacatccgcaagaaggtgaggcgcctaatgggaaagtcgcacattgggcttgtgtacagccagcaaatcaatgaggtgcttgatcagctggcgaacctgaatggacgcgatctctctatctggtccagtggcagccggcacatgaagaagcagacatttgtggtacatgcagggacagatacaaacggagatatctttttcatggaggtgtgcgatgactgtgtggtgttgcgtagtaacatcggaacagtgtatgagcgctggtggtacgagaagctcatcaacatgacctactgtcccaagacgaaggtgttgtgcttgtggcgtagaaatggctctgagacccagctcaacaagttctatactaaaaagtgtcgggagctgtactactgtgtgaaggacagcatggagcgcgctgccgcccgacagcaaagcatcaaacccggacctgaattgggtggcgagttccctgtgcaggacctgaagactggtgagggtggcctgctgcaggtgaccctggaagggatcaacctcaaattcatgcacaatcaggttttcatagagctgaatcacattaaaaagtgcaatacagttcgaggcgtctttgtcctggaggaatttgttcctgaaattaaagaagtggtgagccacaagtacaagacaccaatggcccacgaaatctgctactccgtattatgtctcttctcgtacgtggctgcagttcatagcagtgaggaagatctcagaaccccgccccggcctgtctctagctgatggagaggggctacgcagctgccccagcccagggcacgcccctggccccttgctgttcccaagtgcacgatgctgctgtgactgaggagtggatgatgctcgtgtgtcctctgcaagccccctgctgtggcttggttggttaccggttatgtgtccctctgagtgtgtcttgagcgtgtccaccttctccctctccactcccagaag

SEQ ID NO: 17188 - DNA, 5823 bp, Homo sapiens
  source 1..5823: mol_type = unassigned DNA
cgctcggagcggcgccgcgctggggagcgactgacgccccgctgccgggggacgtcgggctgggcctggccagtcccccagagcttgggagacttcgattttcagaattcctcctgggaatgctgactccttgcttggtgccctgatgcttctctgagataaactgatgaattggaaccatggtgcaaaagaagaagttctgtcctcggttacttgactatctagtgatcgtaggggccaggcacccgagcagtgatagcgtggcccagactcctgaattgctacggcgataccccttggaggatcacactgagtttcccctgcccccagatgtagtgttcttctgccagcccgagggctgcctgagcgtgcggcagcggcgcatgagccttcgggatgatacctcttttgtcttcaccctcactgacaaggacactggagtcacgcgatatggcatctgtgttaacttctaccgctccttccaaaagcgaatctctaaggagaagggggaaggtggggcagggtcccgtgggaaggaaggaacccatgccacctgtgcctcagaagagggtggcactgagagctcagagagtggctcatccctgcagcctctcagtgctgactctacccctgatgtgaaccagtctcctcggggcaaacgccgggccaaggcggggagccgctcccgcaacagtactctcacgtccctgtgcgtgctcagccactaccctttcttctccaccttccgagagtgtttgtatactctcaagcgcctggtggactgctgtagtgagcgccttctgggcaagaaactgggcatccctcgaggcgtacaaagggacaccatgtggcggatctttactggatcgctgctggtagaggagaagtcaagtgcccttctgcatgaccttcgagagattgaggcctggatctatcgattgctgcgctccccagtacccgtctctgggcagaagcgagtagacatcgaggtcctaccccaagagctccagccagctctgacctttgctcttccagacccatctcgattcaccctagtggatttcccactgcaccttcccttggaacttctaggtgtggacgcctgtctccaggtgctaacctgcattctgttagagcacaaggtggtgctacagtcccgagactacaatgcactctccatgtctgtgatggcattcgtggcaatgatctacccactggagtatatgtttcctgtcatcccgctgctacccacctgcatggcatcagcagagcagctgctgttggctccaaccccgtacatcattggggttcctgccagcttcttcctctacaaactggacttcaaaatgcctgatgatgtatggctagtggatctggacagcaatagggtgattgcccccaccaatgcagaagtgctgcctatcctgccagaaccagaatcactagagctgaaaaagcatttaaagcaggccttggccagcatgagtctcaacacccagcccatcctcaatctggagaaatttcatgagggccaggagatcccccttctcttgggaaggccttctaatgacctgcagtccacaccgtccactgaattcaacccactcatctatggcaatgatgtggattctgtggatgttgcaaccagggttgccatggtacggttcttcaattccgccaacgtgctgcagggatttcagatgcacacgcgtaccctgcgcctctttcctcggcctgtggtagcttttcaagctggctcctttctagcctcacgtccccggcagactccttttgccgagaaattggccaggactcaggctgtggagtactttggggaatggatccttaaccccaccaactatgcctttcagcgaattcacaacaatatgtttgatccagccctgattggtgacaagccaaagtggtatgctcatcagctgcagcctatccactatcgcgtctatgacagcaattcccagctggctgaggccctgagtgtaccaccagagcgggactctgactccgaacctactgatgatagtggcagtgatagtatggattatgacgattcaagctcttcttactcctcccttggtgactttgtcagtgaaatgatgaaatgtgacattaatggtgatactcccaatgtggaccctctgacacatgcagcactgggggatgccagcgaggtggagattgacgagctgcagaatcagaaggaagcagaagagcctggcccagacagtgagaactctcaggaaaaccccccactgcgctccagctctagcaccacagccagcagcagccccagcactgtcatccacggagccaactctgaacctgctgactctacggagatggatgataaggcagcagtaggcgtctccaagcccctcccttccgtgcctcccagcattggcaaatcgaacgtggacagacgtcaggcagaaattggagaggggtcagtgcgccggcgaatctatgacaatccatacttcgagccccaatatggctttccccctgaggaagatgaggatgagcagggggaaagttacactccccgattcagccaacatgtcagtggcaatcgggctcaaaagctgctgcggcccaacagcttgagactggcaagtgactcagatgcagagtcagactctcgggcaagctctcccaactccaccgtctccaacaccagcaccgagggcttcgggggcatcatgtcttttgccagcagcctctatcggaaccacagtaccagcttcagtctttcaaacctcacactgcccaccaaaggtgcccgagagaaggccacgcccttccccagtctgaaaggaaacaggagggcgttagtggatcagaagtcatctgtcattaaacacagcccaacagtgaaaagagaacctccatcaccccagggtcgatccagcaattctagtgagaaccagcagttcctgaaggaggtggtgcacagcgtgctggacggccagggagttggctggctcaacatgaaaaaggtgcgccggctgctggagagcgagcagctgcgagtctttgtcctgagcaagctgaaccgcatggtgcagtcagaggacgatgcccggcaggacatcatcccggatgtggagatcagtcggaaggtgtacaagggaatgttagacctcctcaagtgtacagtcctcagcttggagcagtcctatgcccacgcgggtctgggtggcatggccagcatctttgggcttttggagattgcccagacccactactatagtaaagaaccagacaagcggaagagaagtccaacagaaagtgtaaataccccagttggcaaggatcctggcctagctgggcggggggacccaaaggctatggcacaactgagagttccacaactgggacctcgggcaccaagtgccacaggaaagggtcctaaggaactggacaccagaagtttaaaggaagaaaattttatagcatctattgggcctgaagtaatcaaacctgtctttgaccttggtgagacagaggagaaaaagtcccagatcagcgcagacagtggtgtgagcctgacgtctagttcccagaggactgatcaagactctgtcatcggcgtgagtccagctgttatgatccgcagctcaagtcaggattctgaagttagcaccgtgagtaatagctctggagagacccttggagctgacagtgacttgagcagcaatgcaggtgatggaccaggtggcgagggcagtgttcacctggcaagctctcggggcactttgtctgatagtgaaattgagaccaactctgccacaagcaccatctttggtaaagcccacagcttgaagccaagcataaaggagaagctggcaggcagccccattcgtacttctgaagatgtgagccagcgagtctatctctatgagggactcctaggcaaagagcgttctactttatgggaccaaatgcaattctgggaagatgccttcttagatgctgtgatgttggagagagaagggatgggtatggaccagggtccccaggaaatgatcgacaggtacctgtcccttggagaacatgaccggaagcgcctggaagatgatgaagatcgcttgttggccacacttctgcacaacctcatctcctacatgctgctgatgaaggtaaataagaatgacatccgcaagaaggtgaggcgcctaatgggaaagtcgcacattgggcttgtgtacagccagcaaatcaatgaggtgcttgatcagctggcgaacctgaatggacgcgatctctctatctggtccagtggcagccggcacatgaagaagcagacatttgtggtacatgcagggacagatacaaacggagatatctttttcatggaggtgtgcgatgactgtgtggtgttgcgtagtaacatcggaacagtgtatgagcgctggtggtacgagaagctcatcaacatgacctactgtcccaagacgaaggtgttgtgcttgtggcgtagaaatggctctgagacccagctcaacaagttctatactaaaaagtgtcgggagctgtactactgtgtgaaggacagcatggagcgcgctgccgcccgacagcaaagcatcaaacccggacctgaattgggtggcgagttccctgtgcaggacctgaagactggtgagggtggcctgctgcaggtgaccctggaagggatcaacctcaaattcatgcacaatcaggttttcatagagctgaatcacattaaaaagtgcaatacagttcgaggcgtctttgtcctggaggaatttgttcctgaaattaaagaagtggtgagccacaagtacaagacaccaatggcccacgaaatctgctactccgtattatgtctcttctcgtacgtggctgcagttcatagcagtgaggaagatctcagaaccccgccccggcctgtctctagctgatggagaggggctacgcagctgccccagcccagggcacgcccctggccccttgctgttcccaagtgcacgatgctgctgtgactgaggagtggatgatgctcgtgtgtcctctgcaagccccctgctgtggcttggttggttaccggttatgtgtccctctgagtgtgtcttgagcgtgtccaccttctccctctccactcccagaagaccaaactgccttcccctcagggctcaagaatgtgtacagtctgtggggccggtgtgaacccactattttgtgtccttgagacatttgtgttgtggttccttgtccttgtccctggcgttataactgtccactgcaagagtctggctctcccttctctgtgacccggcatgactgggcgcctggagcagtttcactctgtgaggagtgagggaaccctggggctcaccctctcagaggaagggcacagagaggaagggaagaattggggggcagccggagtgagtggcagcctccctgcttccttctgcattcccaagccggcagctactgcccagggcccgcagtgttggctgctgcctgccacagcctctgtgactgcagtggagcggcgaattccctgtggcctgccatgccttcggcatcagaggatggagtggtcgaggctagtggagtcccagggaccgctggctgctctgcctgagcatcagggagggggcaggaaagaccaagctgggtttgcacatctgtctgcaggctgtctctccaggcacggggtgtcaggagggagagacagcctgggtatgggcaagaaatgactgtaaatatttcagccccacattatttatagaaaatgtacagttgtgtgaatgtgaaataaatgtcctcaactcc

SEQ ID NO: 17189 - DNA, 5684 bp, Homo sapiens
  source 1..5684: mol_type = unassigned DNA
cccgctgcccaggattggtaggctccaccgctcggcagccggcttccctgctcggacgccgagcaccgccaaagcgcacttcgattttcagaattcctcctgggaatgctgactccttgcttggtgccctgatgcttctctgagataaactgatgaattggaaccatggtgcaaaagaagaagttctgtcctcggttacttgactatctagtgatcgtaggggccaggcacccgagcagtgatagcgtggcccagactcctgaattgctacggcgataccccttggaggatcacactgagtttcccctgcccccagatgtagtgttcttctgccagcccgagggctgcctgagcgtgcggcagcggcgcatgagccttcgggatgatacctcttttgtcttcaccctcactgacaaggacactggagtcacgcgatatggcatctgtgttaacttctaccgctccttccaaaagcgaatctctaaggagaagggggaaggtggggcagggtcccgtgggaaggaaggaacccatgccacctgtgcctcagaagagggtggcactgagagctcagagagtggctcatccctgcagcctctcagtgctgactctacccctgatgtgaaccagtctcctcggggcaaacgccgggccaaggcggggagccgctcccgcaacagtactctcacgtccctgtgcgtgctcagccactaccctttcttctccaccttccgagagtgtttgtatactctcaagcgcctggtggactgctgtagtgagcgccttctgggcaagaaactgggcatccctcgaggcgtacaaagggacaccatgtggcggatctttactggatcgctgctggtagaggagaagtcaagtgcccttctgcatgaccttcgagagattgaggcctggatctatcgattgctgcgctccccagtacccgtctctgggcagaagcgagtagacatcgaggtcctaccccaagagctccagccagctctgacctttgctcttccagacccatctcgattcaccctagtggatttcccactgcaccttcccttggaacttctaggtgtggacgcctgtctccaggtgctaacctgcattctgttagagcacaaggtggtgctacagtcccgagactacaatgcactctccatgtctgtgatggcattcgtggcaatgatctacccactggagtatatgtttcctgtcatcccgctgctacccacctgcatggcatcagcagagcagctgctgttggctccaaccccgtacatcattggggttcctgccagcttcttcctctacaaactggacttcaaaatgcctgatgatgtatggctagtggatctggacagcaatagggtgattgcccccaccaatgcagaagtgctgcctatcctgccagaaccagaatcactagagctgaaaaagcatttaaagcaggccttggccagcatgagtctcaacacccagcccatcctcaatctggagaaatttcatgagggccaggagatcccccttctcttgggaaggccttctaatgacctgcagtccacaccgtccactgaattcaacccactcatctatggcaatgatgtggattctgtggatgttgcaaccagggttgccatggtacggttcttcaattccgccaacgtgctgcagggatttcagatgcacacgcgtaccctgcgcctctttcctcggcctgtggtagcttttcaagctggctcctttctagcctcacgtccccggcagactccttttgccgagaaattggccaggactcaggctgtggagtactttggggaatggatccttaaccccaccaactatgcctttcagcgaattcacaacaatatgtttgatccagccctgattggtgacaagccaaagtggtatgctcatcagctgcagcctatccactatcgcgtctatgacagcaattcccagctggctgaggccctgagtgtaccaccagagcgggactctgactccgaacctactgatgatagtggcagtgatagtatggattatgacgattcaagctcttcttactcctcccttggtgactttgtcagtgaaatgatgaaatgtgacattaatggtgatactcccaatgtggaccctctgacacatgcagcactgggggatgccagcgaggtggagattgacgagctgcagaatcagaaggaagcagaagagcctggcccagacagtgagaactctcaggaaaaccccccactgcgctccagctctagcaccacagccagcagcagccccagcactgtcatccacggagccaactctgaacctgctgactctacggagatggatgataaggcagcagtaggcgtctccaagcccctcccttccgtgcctcccagcattggcaaatcgaacgtggacagacgtcaggcagaaattggagagggggctcaaaagctgctgcggcccaacagcttgagactggcaagtgactcagatgcagagtcagactctcgggcaagctctcccaactccaccgtctccaacaccagcaccgagggcttcgggggcatcatgtcttttgccagcagcctctatcggaaccacagtaccagcttcagtctttcaaacctcacactgcccaccaaaggtgcccgagagaaggccacgcccttccccagtctgaaaggaaacaggagggcgttagtggatcagaagtcatctgtcattaaacacagcccaacagtgaaaagagaacctccatcaccccagggtcgatccagcaattctagtgagaaccagcagttcctgaaggaggtggtgcacagcgtgctggacggccagggagttggctggctcaacatgaaaaaggtgcgccggctgctggagagcgagcagctgcgagtctttgtcctgagcaagctgaaccgcatggtgcagtcagaggacgatgcccggcaggacatcatcccggatgtggagatcagtcggaaggtgtacaagggaatgttagacctcctcaagtgtacagtcctcagcttggagcagtcctatgcccacgcgggtctgggtggcatggccagcatctttgggcttttggagattgcccagacccactactatagtaaagaaccagacaagcggaagagaagtccaacagaaagtgtaaataccccagttggcaaggatcctggcctagctgggcggggggacccaaaggctatggcacaactgagagttccacaactgggacctcgggcaccaagtgccacaggaaagggtcctaaggaactggacaccagaagtttaaaggaagaaaattttatagcatctattgggcctgaagtaatcaaacctgtctttgaccttggtgagacagaggagaaaaagtcccagatcagcgcagacagtggtgtgagcctgacgtctagttcccagaggactgatcaagactctgtcatcggcgtgagtccagctgttatgatccgcagctcaagtcaggattctgaagttagcaccgtggtgagtaatagctctggagagacccttggagctgacagtgacttgagcagcaatgcaggtgatggaccaggtggcgagggcagtgttcacctggcaagctctcggggcactttgtctgatagtgaaattgagaccaactctgccacaagcaccatctttggtaaagcccacagcttgaagccaagcataaaggagaagctggcaggcagccccattcgtacttctgaagatgtgagccagcgagtctatctctatgagggactcctaggcaaagagcgttctactttatgggaccaaatgcaattctgggaagatgccttcttagatgctgtgatgttggagagagaagggatgggtatggaccagggtccccaggaaatgatcgacaggtacctgtcccttggagaacatgaccggaagcgcctggaagatgatgaagatcgcttgttggccacacttctgcacaacctcatctcctacatgctgctgatgaaggtaaataagaatgacatccgcaagaaggtgaggcgcctaatgggaaagtcgcacattgggcttgtgtacagccagcaaatcaatgaggtgcttgatcagctggcgaacctgaatggacgcgatctctctatctggtccagtggcagccggcacatgaagaagcagacatttgtggtacatgcagggacagatacaaacggagatatctttttcatggaggtgtgcgatgactgtgtggtgttgcgtagtaacatcggaacagtgtatgagcgctggtggtacgagaagctcatcaacatgacctactgtcccaagacgaaggtgttgtgcttgtggcgtagaaatggctctgagacccagctcaacaagttctatactaaaaagtgtcgggagctgtactactgtgtgaaggacagcatggagcgcgctgccgcccgacagcaaagcatcaaacccggacctgaattgggtggcgagttccctgtgcaggacctgaagactggtgagggtggcctgctgcaggtgaccctggaagggatcaacctcaaattcatgcacaatcaggttttcatagagctgaatcacattaaaaagtgcaatacagttcgaggcgtctttgtcctggaggaatttgttcctgaaattaaagaagtggtgagccacaagtacaagacaccaatggcccacgaaatctgctactccgtattatgtctcttctcgtacgtggctgcagttcatagcagtgaggaagatctcagaaccccgccccggcctgtctctagctgatggagaggggctacgcagctgccccagcccagggcacgcccctggccccttgctgttcccaagtgcacgatgctgctgtgactgaggagtggatgatgctcgtgtgtcctctgcaagccccctgctgtggcttggttggttaccggttatgtgtccctctgagtgtgtcttgagcgtgtccaccttctccctctccactcccagaagaccaaactgccttcccctcagggctcaagaatgtgtacagtctgtggggccggtgtgaacccactattttgtgtccttgagacatttgtgttgtggttccttgtccttgtccctggcgttataactgtccactgcaagagtctggctctcccttctctgtgacccggcatgactgggcgcctggagcagtttcactctgtgaggagtgagggaaccctggggctcaccctctcagaggaagggcacagagaggaagggaagaattggggggcagccggagtgagtggcagcctccctgcttccttctgcattcccaagccggcagctactgcccagggcccgcagtgttggctgctgcctgccacagcctctgtgactgcagtggagcggcgaattccctgtggcctgccatgccttcggcatcagaggatggagtggtcgaggctagtggagtcccagggaccgctggctgctctgcctgagcatcagggagggggcaggaaagaccaagctgggtttgcacatctgtctgcaggctgtctctccaggcacggggtgtcaggagggagagacagcctgggtatgggcaagaaatgactgtaaatatttcagccccacattatttatagaaaatgtacagttgtgtgaatgtgaaataaatgtcctcaactccc

SEQ ID NO: 17190 - DNA, 5614 bp, Homo sapiens
  source 1..5614: mol_type = unassigned DNA
cccgctgcccaggattggtaggctccaccgctcggcagccggcttccctgctcggacgccgagcaccgccaaagcgcacttcgattttcagaattcctcctgggaatgctgactccttgcttggtgccctgatgcttctctgagataaactgatgaattggaaccatggtgcaaaagaagaagttctgtcctcggttacttgactatctagtgatcgtaggggccaggcacccgagcagtgatagcgtggcccagactcctgaattgctacggcgataccccttggaggatcacactgagtttcccctgcccccagatgtagtgttcttctgccagcccgagggctgcctgagcgtgcggcagcggcgcatgagccttcgggatgatacctcttttgtcttcaccctcactgacaaggacactggagtcacgcgatatggcatctgtgttaacttctaccgctccttccaaaagcgaatctctaaggagaagggggaaggtggggcagggtcccgtgggaaggaaggaacccatgccacctgtgcctcagaagagggtggcactgagagctcagagagtggctcatccctgcagcctctcagtgctgactctacccctgatgtgaaccagtctcctcggggcaaacgccgggccaaggcggggagccgctcccgcaacagtactctcacgtccctgtgcgtgctcagccactaccctttcttctccaccttccgagagtgtttgtatactctcaagcgcctggtggactgctgtagtgagcgccttctgggcaagaaactgggcatccctcgaggcgtacaaagggacaccatgtggcggatctttactggatcgctgctggtagaggagaagtcaagtgcccttctgcatgaccttcgagagattgaggcctggatctatcgattgctgcgctccccagtacccgtctctgggcagaagcgagtagacatcgaggtcctaccccaagagctccagccagctctgacctttgctcttccagacccatctcgattcaccctagtggatttcccactgcaccttcccttggaacttctaggtgtggacgcctgtctccaggtgctaacctgcattctgttagagcacaaggtggtgctacagtcccgagactacaatgcactctccatgtctgtgatggcattcgtggcaatgatctacccactggagtatatgtttcctgtcatcccgctgctacccacctgcatggcatcagcagagcagctgctgttggctccaaccccgtacatcattggggttcctgccagcttcttcctctacaaactggacttcaaaatgcctgatgatgtatggctagtggatctggacagcaatagggtgattgcccccaccaatgcagaagtgctgcctatcctgccagaaccagaatcactagagctgaaaaagcatttaaagcaggccttggccagcatgagtctcaacacccagcccatcctcaatctggagaaatttcatgagggccaggagatcccccttctcttgggaaggccttctaatgacctgcagtccacaccgtccactgaattcaacccactcatctatggcaatgatgtggattctgtggatgttgcaaccagggttgccatggtacggttcttcaattccgccaacgtgctgcagggatttcagatgcacacgcgtaccctgcgcctctttcctcggcctgtggtagcttttcaagctggctcctttctagcctcacgtccccggcagactccttttgccgagaaattggccaggactcaggctgtggagtactttggggaatggatccttaaccccaccaactatgcctttcagcgaattcacaacaatatgtttgatccagccctgattggtgacaagccaaagtggtatgctcatcagctgcagcctatccactatcgcgtctatgacagcaattcccagctggctgaggccctgagtgtaccaccagagcgggactctgactccgaacctactgatgatagtggcagtgatagtatggattatgacgattcaagctcttcttactcctcccttggtgactttgtcagtgaaatgatgaaatgtgacattaatggtgatactcccaatgtggaccctctgacacatgcagcactgggggatgccagcgaggtggagattgacgagctgcagaatcagaaggaagcagaagagcctggcccagacagtgagaactctcaggaaaaccccccactgcgctccagctctagcaccacagccagcagcagccccagcactgtcatccacggagccaactctgaacctgctgactctacggagatggatgataaggcagcagtaggcgtctccaagcccctcccttccgtgcctcccagcattggcaaatcgaacgtggacagacgtcaggcagaaattggagagggggctcaaaagctgctgcggcccaacagcttgagactggcaagtgactcagatgcagagtcagactctcgggcaagctctcccaactccaccgtctccaacaccagcaccgagggcttcgggggcatcatgtcttttgccagcagcctctatcggaaccacagtaccagcttcagtctttcaaacctcacactgcccaccaaaggtgcccgagagaaggccacgcccttccccagtctgaaaggaaacaggagggcgttagtggatcagaagtcatctgtcattaaacacagcccaacagtgaaaagagaacctccatcaccccagggtcgatccagcaattctagtgagaaccagcagttcctgaaggaggtggtgcacagcgtgctggacggccagggagttggctggctcaacatgaaaaaggtgcgccggctgctggagagcgagcagctgcgagtctttgtcctgagcaagctgaaccgcatggtgcagtcagaggacgatgcccggcaggacatcatcccggatgtggagatcagtcggaaggtgtacaagggaatgttagacctcctcaagtgtacagtcctcagcttggagcagtcctatgcccacgcgggtctgggtggcatggccagcatctttgggcttttggagattgcccagacccactactatagtaaagaaccagacaagcggaagagaagtccaacagaaagtgtaaataccccagttggcaaggatcctggcctagctgggcggggggacccaaaggctatggcacaactgagagttccacaactgggacctcgggcaccaagtgccacaggaaagggtcctaaggaactggacaccagaagtttaaaggaagaaaattttatagcatctattgggcctgaagtaatcaaacctgtctttgaccttggtgagacagaggagaaaaagtcccagatcagcgcagacagtggtgtgagcctgacgtctagttcccagaggactgatcaagactctgtcatcggcgtgagtccagctgttatgatccgcagctcaagtcaggattctgaagttagcaccgtggtgagtaatagctctggagagacccttggagctgacagtgacttgagcagcaatgcaggtgatggaccaggtggcgagggcagtgttcacctggcaagctctcggggcactttgtctgatagtgaaattgagaccaactctgccacaagcaccatctttggtaaagcccacagcttgaagccaagcataaaggagaagctggcaggcagccccattcgtacttctgaagatgtgagccagcgagtctatctctatgagggactcctaggcaaagagcgttctactttatgggaccaaatgcaattctgggaagatgccttcttagatgctgtgatgttggagagagaagggatgggtatggaccagggtccccaggaaatgatcgacaggtacctgtcccttggagaacatgaccggaagcgcctggaagatgatgaagatcgcttgttggccacacttctgcacaacctcatctcctacatgctgctgatgaaggtaaataagaatgacatccgcaagaaggtgaggcgcctaatgggaaagtcgcacattgggcttgtgtacagccagcaaatcaatgaggtgcttgatcagctggcgaacctgaatggacgcgatctctctatctggtccagtggcagccggcacatgaagaagcagacatttgtggtacatgcagggacagatacaaacggagatatctttttcatggaggtgtgcgatgactgtgtggtgttgcgtagtaacatcggaacagtgtatgagcgctggtggtacgagaagctcatcaacatgacctactgtcccaagacgaaggtgttgtgcttgtggcgtagaaatggctctgagacccagctcaacaagttctatactaaaaagtgtcgggagctgtactactgtgtgaaggacagcatggagcgcgctgccgcccgacagcaaagcatcaaacccggacctgaattgggtggcgagttccctgtgcaggacctgaagactggtgagggtggcctgctgcaggtgaccctggaagggatcaacctcaaattcatgcacaatcagttcctgaaattaaagaagtggtgagccacaagtacaagacaccaatggcccacgaaatctgctactccgtattatgtctcttctcgtacgtggctgcagttcatagcagtgaggaagatctcagaaccccgccccggcctgtctctagctgatggagaggggctacgcagctgccccagcccagggcacgcccctggccccttgctgttcccaagtgcacgatgctgctgtgactgaggagtggatgatgctcgtgtgtcctctgcaagccccctgctgtggcttggttggttaccggttatgtgtccctctgagtgtgtcttgagcgtgtccaccttctccctctccactcccagaagaccaaactgccttcccctcagggctcaagaatgtgtacagtctgtggggccggtgtgaacccactattttgtgtccttgagacatttgtgttgtggttccttgtccttgtccctggcgttataactgtccactgcaagagtctggctctcccttctctgtgacccggcatgactgggcgcctggagcagtttcactctgtgaggagtgagggaaccctggggctcaccctctcagaggaagggcacagagaggaagggaagaattggggggcagccggagtgagtggcagcctccctgcttccttctgcattcccaagccggcagctactgcccagggcccgcagtgttggctgctgcctgccacagcctctgtgactgcagtggagcggcgaattccctgtggcctgccatgccttcggcatcagaggatggagtggtcgaggctagtggagtcccagggaccgctggctgctctgcctgagcatcagggagggggcaggaaagaccaagctgggtttgcacatctgtctgcaggctgtctctccaggcacggggtgtcaggagggagagacagcctgggtatgggcaagaaatgactgtaaatatttcagccccacattatttatagaaaatgtacagttgtgtgaatgtgaaataaatgtcctcaactccc

SEQ ID NO: 17191 - DNA, 5744 bp, Homo sapiens
  source 1..5744: mol_type = unassigned DNA
cccgctgcccaggattggtaggctccaccgctcggcagccggcttccctgctcggacgccgagcaccgccaaagcgcacttcgattttcagaattcctcctgggaatgctgactccttgcttggtgccctgatgcttctctgagataaactgatgaattggaaccatggtgcaaaagaagaagttctgtcctcggttacttgactatctagtgatcgtaggggccaggcacccgagcagtgatagcgtggcccagactcctgaattgctacggcgataccccttggaggatcacactgagtttcccctgcccccagatgtagtgttcttctgccagcccgagggctgcctgagcgtgcggcagcggcgcatgagccttcgggatgatacctcttttgtcttcaccctcactgacaaggacactggagtcacgcgatatggcatctgtgttaacttctaccgctccttccaaaagcgaatctctaaggagaagggggaaggtggggcagggtcccgtgggaaggaaggaacccatgccacctgtgcctcagaagagggtggcactgagagctcagagagtggctcatccctgcagcctctcagtgctgactctacccctgatgtgaaccagtctcctcggggcaaacgccgggccaaggcggggagccgctcccgcaacagtactctcacgtccctgtgcgtgctcagccactaccctttcttctccaccttccgagagtgtttgtatactctcaagcgcctggtggactgctgtagtgagcgccttctgggcaagaaactgggcatccctcgaggcgtacaaagggacaccatgtggcggatctttactggatcgctgctggtagaggagaagtcaagtgcccttctgcatgaccttcgagagattgaggcctggatctatcgattgctgcgctccccagtacccgtctctgggcagaagcgagtagacatcgaggtcctaccccaagagctccagccagctctgacctttgctcttccagacccatctcgattcaccctagtggatttcccactgcaccttcccttggaacttctaggtgtggacgcctgtctccaggtgctaacctgcattctgttagagcacaaggtggtgctacagtcccgagactacaatgcactctccatgtctgtgatggcattcgtggcaatgatctacccactggagtatatgtttcctgtcatcccgctgctacccacctgcatggcatcagcagagcagctgctgttggctccaaccccgtacatcattggggttcctgccagcttcttcctctacaaactggacttcaaaatgcctgatgatgtatggctagtggatctggacagcaatagggtgattgcccccaccaatgcagaagtgctgcctatcctgccagaaccagaatcactagagctgaaaaagcatttaaagcaggccttggccagcatgagtctcaacacccagcccatcctcaatctggagaaatttcatgagggccaggagatcccccttctcttgggaaggccttctaatgacctgcagtccacaccgtccactgaattcaacccactcatctatggcaatgatgtggattctgtggatgttgcaaccagggttgccatggtacggttcttcaattccgccaacgtgctgcagggatttcagatgcacacgcgtaccctgcgcctctttcctcggcctgtggtagcttttcaagctggctcctttctagcctcacgtccccggcagactccttttgccgagaaattggccaggactcaggctgtggagtactttggggaatggatccttaaccccaccaactatgcctttcagcgaattcacaacaatatgtttgatccagccctgattggtgacaagccaaagtggtatgctcatcagctgcagcctatccactatcgcgtctatgacagcaattcccagctggctgaggccctgagtgtaccaccagagcgggactctgactccgaacctactgatgatagtggcagtgatagtatggattatgacgattcaagctcttcttactcctcccttggtgactttgtcagtgaaatgatgaaatgtgacattaatggtgatactcccaatgtggaccctctgacacatgcagcactgggggatgccagcgaggtggagattgacgagctgcagaatcagaaggaagcagaagagcctggcccagacagtgagaactctcaggaaaaccccccactgcgctccagctctagcaccacagccagcagcagccccagcactgtcatccacggagccaactctgaacctgctgactctacggagatggatgataaggcagcagtaggcgtctccaagcccctcccttccgtgcctcccagcattggcaaatcgaacgtggacagacgtcaggcagaaattggagagggggctcaaaagctgctgcggcccaacagcttgagactggcaagtgactcagatgcagagtcagactctcgggcaagctctcccaactccaccgtctccaacaccagcaccgagggcttcgggggcatcatgtcttttgccagcagcctctatcggaaccacagtaccagcttcagtctttcaaacctcacactgcccaccaaaggtgcccgagagaaggccacgcccttccccagtctgaaagtatttgggctaaatactctaatggagattgttactgaagccggccccgggagtggtgaaggaaacaggagggcgttagtggatcagaagtcatctgtcattaaacacagcccaacagtgaaaagagaacctccatcaccccagggtcgatccagcaattctagtgagaaccagcagttcctgaaggaggtggtgcacagcgtgctggacggccagggagttggctggctcaacatgaaaaaggtgcgccggctgctggagagcgagcagctgcgagtctttgtcctgagcaagctgaaccgcatggtgcagtcagaggacgatgcccggcaggacatcatcccggatgtggagatcagtcggaaggtgtacaagggaatgttagacctcctcaagtgtacagtcctcagcttggagcagtcctatgcccacgcgggtctgggtggcatggccagcatctttgggcttttggagattgcccagacccactactatagtaaagaaccagacaagcggaagagaagtccaacagaaagtgtaaataccccagttggcaaggatcctggcctagctgggcggggggacccaaaggctatggcacaactgagagttccacaactgggacctcgggcaccaagtgccacaggaaagggtcctaaggaactggacaccagaagtttaaaggaagaaaattttatagcatctattgggcctgaagtaatcaaacctgtctttgaccttggtgagacagaggagaaaaagtcccagatcagcgcagacagtggtgtgagcctgacgtctagttcccagaggactgatcaagactctgtcatcggcgtgagtccagctgttatgatccgcagctcaagtcaggattctgaagttagcaccgtggtgagtaatagctctggagagacccttggagctgacagtgacttgagcagcaatgcaggtgatggaccaggtggcgagggcagtgttcacctggcaagctctcggggcactttgtctgatagtgaaattgagaccaactctgccacaagcaccatctttggtaaagcccacagcttgaagccaagcataaaggagaagctggcaggcagccccattcgtacttctgaagatgtgagccagcgagtctatctctatgagggactcctaggcaaagagcgttctactttatgggaccaaatgcaattctgggaagatgccttcttagatgctgtgatgttggagagagaagggatgggtatggaccagggtccccaggaaatgatcgacaggtacctgtcccttggagaacatgaccggaagcgcctggaagatgatgaagatcgcttgttggccacacttctgcacaacctcatctcctacatgctgctgatgaaggtaaataagaatgacatccgcaagaaggtgaggcgcctaatgggaaagtcgcacattgggcttgtgtacagccagcaaatcaatgaggtgcttgatcagctggcgaacctgaatggacgcgatctctctatctggtccagtggcagccggcacatgaagaagcagacatttgtggtacatgcagggacagatacaaacggagatatctttttcatggaggtgtgcgatgactgtgtggtgttgcgtagtaacatcggaacagtgtatgagcgctggtggtacgagaagctcatcaacatgacctactgtcccaagacgaaggtgttgtgcttgtggcgtagaaatggctctgagacccagctcaacaagttctatactaaaaagtgtcgggagctgtactactgtgtgaaggacagcatggagcgcgctgccgcccgacagcaaagcatcaaacccggacctgaattgggtggcgagttccctgtgcaggacctgaagactggtgagggtggcctgctgcaggtgaccctggaagggatcaacctcaaattcatgcacaatcaggttttcatagagctgaatcacattaaaaagtgcaatacagttcgaggcgtctttgtcctggaggaatttgttcctgaaattaaagaagtggtgagccacaagtacaagacaccaatggcccacgaaatctgctactccgtattatgtctcttctcgtacgtggctgcagttcatagcagtgaggaagatctcagaaccccgccccggcctgtctctagctgatggagaggggctacgcagctgccccagcccagggcacgcccctggccccttgctgttcccaagtgcacgatgctgctgtgactgaggagtggatgatgctcgtgtgtcctctgcaagccccctgctgtggcttggttggttaccggttatgtgtccctctgagtgtgtcttgagcgtgtccaccttctccctctccactcccagaagaccaaactgccttcccctcagggctcaagaatgtgtacagtctgtggggccggtgtgaacccactattttgtgtccttgagacatttgtgttgtggttccttgtccttgtccctggcgttataactgtccactgcaagagtctggctctcccttctctgtgacccggcatgactgggcgcctggagcagtttcactctgtgaggagtgagggaaccctggggctcaccctctcagaggaagggcacagagaggaagggaagaattggggggcagccggagtgagtggcagcctccctgcttccttctgcattcccaagccggcagctactgcccagggcccgcagtgttggctgctgcctgccacagcctctgtgactgcagtggagcggcgaattccctgtggcctgccatgccttcggcatcagaggatggagtggtcgaggctagtggagtcccagggaccgctggctgctctgcctgagcatcagggagggggcaggaaagaccaagctgggtttgcacatctgtctgcaggctgtctctccaggcacggggtgtcaggagggagagacagcctgggtatgggcaagaaatgactgtaaatatttcagccccacattatttatagaaaatgtacagttgtgtgaatgtgaaataaatgtcctcaactccc

SEQ ID NO: 17192 - DNA, 1699 bp, Homo sapiens
  source 1..1699: mol_type = unassigned DNA
gtacccgaccgccagcgtcgcctgctgcgcaagtggggcctgcgagccaaccccgcctccgcccctcgattgggcgcgcatttaaatgtccggccccgccccgagctccgggcgcttatatataggcagctcggcgggcggcgggcggcattctggcgcggagcggagcggcggcgggcgcagctagcgggtcggccgcggagcggaggtgcagctcggcttcccccggcacccctccccctcgggcgccagccccacccctccgccggccgggccgaccccgccgtactatcccctgcggcgcgagcccggggcggctccaagcgccccccagcagacccccatcatgggcagccagagctccaaggctccccggggcgacgtgaccgccgaggaggcagcaggcgcttcccccgcgaaggccaacggccaggagaatggccacgtgaaaagcaatggagacttatcccccaagggtgaaggggagtcgccccctgtgaacggaacagatgaggcagccggggccactggcgatgccatcgagccagcaccccctagccagggtgctgaggccaagggggaggtcccccccaaggagacccccaagaagaagaagaaattctctttcaagaagcctttcaaattgagcggcctgtccttcaagagaaatcggaaggagggtgggggtgattcttctgcctcctcacccacagaggaagagcaggagcagggggagatcggtgcctgcagcgacgagggcactgctcaggaagggaaggccgcagccacccctgagagccaggaaccccaggccaagggggcagaggctagtgcagcctcagaagaagaggcagggccccaggctacagagccatccactccctcggggccggagagtggccctacaccagccagcgctgagcagaatgagtagctaggtaggggcaggtgggtgatctctaagctgcaaaaactgtgctgtccttgtgaggtcactgcctggacctggtgccctggctgccttcctgtgcccagaaaggaaggggctattgcctcctcccagccacgttccctttcctcctctccctcctgtggattctcccatcagccatctggttctcctcttaaggccagttgaagatggtcccttacagcttcccaagttaggttagtgatgtgaaatgctcctgtccctggccctacctccttccctgtccccacccctgcataaggcagttgttggttttcttccccaattcttttccaagtaggttttgtttaccctactccccaaatccctgagccagaagtggggtgcttatactcccaaaccttgagtgtccagccttcccctgttgtttttagtctcttgtgctgtgcctagtggcacctgggctggggaggacactgccccgtctaggtttttataaatgtcttactcaagttcaaacctccagcctgtgaatcaactgtgtctcttttttgacttggtaagcaagtattaggctttggggtggggggaggtctgtaatgtgaaacaacttcttgtctttttttctcccactgttgtaaataacttttaatggccaaaccccagatttgtactttttttttttttctaactgctaaaaccattctcttccacctggttttactgtaacatttggaaaaggaataaatgtcgtccctttagtggtgc

SEQ ID NO: 17193 - DNA, 1448 bp, Homo sapiens
  source 1..1448: mol_type = unassigned DNA
gcccgataccggtttcagagtcctgggcagcgtgcgcgctcttcctggcggctgcgcaggtgtgaaaatcacaaatgtcaaatgatggaagatccaggaatcgggacaggcgctacgatgaggtcccaagcgacctgccctatcaagataccaccataagaacccacccaactcttcatgacagtgagcgggcagtgagcgctgatcccttgccaccaccccctctcccattacagccaccattcggcccagacttctactcaagtgacacagaagaaccagctatagcgccagatctcaaaccagtaaggcgctttgtccctgactcctggaagaactttttcagagggaagaaaaaggaccccgaatgggataagccggtgtctgatatcaggtacatctccgatggagtggagtgttcaccaccagcctctccagcaagaccaaaccaccgttcgcccctcaactcctgcaaagatccctacggagggtcagaaggaacctttagttcccggaaagaggctgacgcagtgtttccccgggatccctatggatctctagaccgacacacacaaacagttcgaacatacagtgagaaggtggaggagtataacctgagatactcctacatgaagtcgtgggcaggcctgctgagaatactgggtgtggtggagctgcttttgggggccggtgtctttgcttgtgtcacagcttacattcacaaggacagtgagtggtacaacttgtttggatattcacaaccgtatggcatgggaggcgttggtggattgggcagtatgtatgggggctattactacactggccctaagaccccttttgtactcgtggttgctggattagcttggatcaccaccattattattctggttcttggcatgtccatgtattaccggaccattcttctggactctaattggtggcccctaactgaatttggaattaacgttgccttgtttattttgtatatggccgcagccatagtctatgtgaatgataccaaccgaggtggcctctgctactatccgttatttaatacaccagtgaatgcagtgttctgccgggtagaaggaggacagatagctgcaatgatcttcctgtttgtcaccatgatagtttatctcattagtgctttggtttgcctaaagttatggaggcatgaggcagctcggagacatagagaatatatggaacaacaggagataaatgagccatcattgtcatcgaaaaggaaaatgtgtgaaatggccaccagtggtgacagacaaagagactcagaagttaatttcaaggaactgagaacagcaaaaatgaaacctgaactactgagtggacacatccccccaccacgcccagctaatttttttgtatttttagtagagatggggtttcaccgtgttagccaggatgatcttgatctcctgacctcg

SEQ ID NO: 17194 - DNA, 2153 bp, Homo sapiens
  source 1..2153: mol_type = unassigned DNA
gcccgataccggtttcagagtcctgggcagcgtgcgcgctcttcctggcggctgcgcaggtgtgaaaatcacaaatgtcaaatgatggaagatccaggaatcgggacaggcgctacgatgaggtcccaagcgacctgccctatcaagataccaccataagaacccacccaactcttcatgacagtgagcgggcagtgagcgctgatcccttgccaccaccccctctcccattacagccaccattcggcccagacttctactcaagtgacacagaagaaccagctatagcgccagatctcaaaccagtaaggcgctttgtccctgactcctggaagaactttttcagagggaagaaaaaggaccccgaatgggataagccggtgtctgatatcaggtacatctccgatggagtggagtgttcaccaccagcctctccagcaagaccaaaccaccgttcgcccctcaactcctgcaaagatccctacggagggtcagaaggaacctttagttcccggaaagaggctgacgcagtgtttccccgggatccctatggatctctagaccgacacacacaaacagttcgaacatacagtgagaaggtggaggagtataacctgagatactcctacatgaagtcgtgggcaggcctgctgagaatactgggtgtggtggagctgcttttgggggccggtgtctttgcttgtgtcacagcttacattcacaaggacagtgagtggtacaacttgtttggatattcacaaccgtatggcatgggaggcgttggtggattgggcagtatgtatgggggctattactacactggccctaagaccccttttgtactcgtggttgctggattagcttggatcaccaccattattattctggttcttggcatgtccatgtattaccggaccattcttctggactctaattggtggcccctaactgaatttggaattaacgttgccttgtttattttgtatatggccgcagccatagtctatgtgaatgataccaaccgaggtggcctctgctactatccgttatttaatacaccagtgaatgcagtgttctgccgggtagaaggaggacagatagctgcaatgatcttcctgtttgtcaccatgatagtttatctcattagtgctttggtttgcctaaagttatggaggcatgaggcagctcggagacatagagaatatatggaacaacaggagataaatgagccatcattgtcatcgaaaaggaaaatgtgtgaaatggccaccagtggtgacagacaaagagactcagaagttaatttcaaggaactgagaacagcaaaaatgaaacctgaactactgagtggacacatccccccaggccacattcctaaacctatcgtgatgcccgactatgtggcaaaataccctgtgattcagacagatgatgagcgagaacgctataaagctgtgttccaagaccagttttcagagtacaaagagctgtctgcagaagttcaggctgtcctgaggaagtttgatgagctggatgcagtgatgagcagattgccacatcattcggaaagccgacaggaacatgagagaatttcaagaatccatgaagagtttaagaaaaaaaagaatgatcctacatttctggaaaaaaaagaacgctgtgattacctaaagaataaactttctcacataaagcaaagaattcaagaatatgataaagtaatgaattgggatgtacaaggttattcttaacgcttatttgaaaccactttatttttttattttattttatttttttgagatgaagtctcgctctgttacccaggctggaatgcagtggcacaatctcggctcactgcaacctccacctcccgggttcaagcaattctcctgttcaagcaattagcctccccagtagctgggattacaggcgtgcgctgccacaccccgctaatttttgtatttttagtagagacgaggtttcaccatgttggtcaggctgggaaactactttttttaaaaaatagcaagtttactatttatttactgcctttttaatgctagcctctgtggtagagaagcaagcgcttcccaaatcagcttccaattggtttaaccagtatgcaacattaaagattttactcagacattttt

SEQ ID NO: 17195 - DNA, 1584 bp, Homo sapiens
  source 1..1584: mol_type = unassigned DNA
caggtgtgaaaatcacaaatgtcaaatgatggaagatccaggaatcgggacaggcgctacgatgaggtcccaagcgacctgccctatcaagataccaccataagaacccacccaactcttcatgacagtgagcgggcagtgagcgctgatcccttgccaccaccccctctcccattacagccaccattcggcccagacttctactcaagtgacacagaagaaccagctatagcgccagatctcaaaccagtaaggcgctttgtccctgactcctggaagaactttttcagagggaagaaaaaggaccccgaatgggataagccggtgtctgatatcaggtacatctccgatggagtggagtgttcaccaccagcctctccagcaagaccaaaccaccgttcgcccctcaactcctgcaaagatccctacggagggtcagaaggaacctttagttcccggaaagaggctgacgcagtgtttccccgggatccctatggatctctagaccgacacacacaaacagttcgaacatacagtgagaaggtggaggagtataacctgagatactcctacatgaagtcgtgggcaggcctgctgagaatactgggtgtggtggagctgcttttgggggccggtgtctttgcttgtgtcacagcttacattcacaaggacagtgagtggtacaacttgtttggatattcacaaccgtatggcatgggaggcgttggtggattgggcagtattgctttggtttgcctaaagttatggaggcatgaggcagctcggagacatagagaatatatggaacaacaggagataaatgagccatcattgtcatcgaaaaggaaaatgtgtgaaatggccaccagtggtgacagacaaagagactcagaagttaatttcaaggaactgagaacagcaaaaatgaaacctgaactactgagtggacacatccccccaggccacattcctaaacctatcgtgatgcccgactatgtggcaaaataccctgtgattcagacagatgatgagcgagaacgctataaagctgtgttccaagaccagttttcagagtacaaagagctgtctgcagaagttcaggctgtcctgaggaagtttgatgagctggatgcagtgatgagcagattgccacatcattcggaaagccgacaggaacatgagagaatttcaagaatccatgaagagtttaagaaaaaaaagaatgatcctacatttctggaaaaaaaagaacgctgtgattacctaaagaataaactttctcacataaagcaaagaattcaagaatatgataaagtaatgaattgggatgtacaaggttattcttaacgcttatttgaaaccactttatttttttattttattttatttttttgagatgaagtctcgctctgttacccaggctggaatgcagtggcacaatctcggctcactgcaacctccacctcccgggttcaagcaattctcctgttcaagcaattagcctccccacctcccaaagtgttgggattacaggcgtgagtcaccgcgcccagctggtattgcttttctattccctttggacat

SEQ ID NO: 17196 - DNA, 4376 bp, Homo sapiens
  source 1..4376: mol_type = unassigned DNA
cagagtcctgggcagcgtgcgcgctcttcctggcggctgcgcaggtgtgaaaatcacaaatgtcaaatgatggaagatccaggaatcgggacaggcgctacgatgaggtcccaagcgacctgccctatcaagataccaccataagaacccacccaactcttcatgacagtgagcgggcagtgagcgctgatcccttgccaccaccccctctcccattacagccaccattcggcccagacttctactcaagtgacacagaagaaccagctatagcgccagatctcaaaccagtaaggcgctttgtccctgactcctggaagaactttttcagagggaagaaaaaggaccccgaatgggataagccggtgtctgatatcaggtacatctccgatggagtggagtgttcaccaccagcctctccagcaagaccaaaccaccgttcgcccctcaactcctgcaaagatccctacggagggtcagaaggaacctttagttcccggaaagaggctgacgcagtgtttccccgggatccctatggatctctagaccgacacacacaaacagttcgaacatacagtgagaaggtggaggagtataacctgagatactcctacatgaagtcgtgggcaggcctgctgagaatactgggtgtggtggagctgcttttgggggccggtgtctttgcttgtgtcacagcttacattcacaaggacagtgagtggtacaacttgtttggatattcacaaccgtatggcatgggaggcgttggtggattgggcagtatgtatgggggctattactacactggccctaagaccccttttgtactcgtggttgctggattagcttggatcaccaccattattattctggttcttggcatgtccatgtattaccggaccattcttctggactctaattggtggcccctaactgaatttggaattaacgttgccttgtttattttgtatatggccgcagccatagtctatgtgaatgataccaaccgaggtggcctctgctactatccgttatttaatacaccagtgaatgcagtgttctgccgggtagaaggaggacagatagctgcaatgatcttcctgtttgtcaccatgatagtttatctcattagtgctttggtttgcctaaagttatggaggcatgaggcagctcggagacatagagaatatatggaacaacaggagtgtgaaatggccaccagtggtgacagacaaagagactcagaagttaatttcaaggaactgagaacagcaaaaatgaaacctgaactactgagtggacacatccccccaggccacattcctaaacctatcgtgatgcccgactatgtggcaaaataccctgtgattcagacagatgatgagcgagaacgctataaagctgtgttccaagaccagttttcagagtacaaagagctgtctgcagaagttcaggctgtcctgaggaagtttgatgagctggatgcagtgatgagcagattgccacatcattcggaaagccgacaggaacatgagagaatttcaagaatccatgaagagtttaagaaaaaaaagaatgatcctacatttctggaaaaaaaagaacgctgtgattacctaaagaataaactttctcacataaagcaaagaattcaagaatatgataaagtaatgaattgggatgtacaaggttattcttaacgcttatttgaaaccactttatttttttattttattttatttttttgagatgaagtctcgctctgttacccaggctggaatgcagtggcacaatctcggctcactgcaacctccacctcccgggttcaagcaattctcctgttcaagcaattagcctccccagtagctgggattacaggcgtgcgctgccacaccccgctaatttttgtatttttagtagagacgaggtttcaccatgttggtcaggctgggaaactactttttttaaaaaatagcaagtttactatttatttactgcctttttaatgctagcctctgtggtagagaagcaagcgcttcccaaatcagcttccaattggtttaaccagtatgcaacattaaagattttactcagacatttttaaacgaattcaaatgttctaagggcctttactaagaatggaaaaaatcctgtgttcatctttcatctgtgaccaatttcatattcatctatctcatttaaatgtgtcatcattttagagatcgtatcctggcagtgtgatgggcaagtggaccatcaattctggtgctactttttccttttttactcaggcaggttcctaggatttttctgggacaaatttctcttcctagagaaattcctaggggatttctaaaggatttttctaagggaaaaagggtgacatctttcaaaggtgtcatttattcccttgaaaggtgtttgaatcccagatcaacattttcagacatcctgatcttgggcaaattgcttaatctctctgtgcctgtttcctcttctgtaaaatggggctaataatagttccttcctcatagagttgttaggattaaaggagttactaatatggtaggaactatattagtgtttgtgaagtctactgaagtgtttgtgaaatgaataaattataaagaatgagtctcaagaaaaggtccttaatgagcaagcccaacctacttaaccaaaagcccaagtgtctggtgcctttctggtttgtggtgttaactcatggccttagcctggtgcttcactgtggctctgtggcccctggggttccacatggcctccctgtctttcatcagtgtgactgtacatctctccatctccccatagtccagcctgccctggacacattgaattgtatgaatggtattgcttttttttttttttttttgtgagacagagtcttactctgttgcccagactggagtgcagtggtgcgatctcggctcactgcaagctccgcctcccaagttcacgtcattttcctgcctcagcctcccgagtagctgggactacaggcacctgccaccacgcccagctaatttttttgtatttttagtagagatggggtttcaccgtgttagccaggatgatctcgatctcctgacctcatgatccacccgcctcagcctcccaaagtgttgggattacaggcgtgagtcaccgcgcccagctggtattgcttttctattccctttggacatacatgctacagtcccacaatgtagcatttccttggaaactccctttttttttttttttgagatggagtttcgctcttgttgcccaggctggagtacagtggtatgatcttggctcactgcagcctctgcctcctgggttcaagcgattctcctgcctctgcctcccaagtagctgggattacaggcacccaccaccatgcccagctaattttttgtatttttagtagagacaggatttcactatgttggccaggttggtctcaagctcctgacctcagatgatctaccagcctcggccttctgaagtgctgggattcaggtgtgagccactgtgcccagcagggatgcttcatctttctaagaattatcttggctttggactttattcataaatgttttatttctgttagtatgaacaatagactgccttaacaaagtttttttttaaacaaaatcgttcttgttggattttattcagcagcatctatcatgtagataaattcccaggtgtagcattacagcttctgactaatatagctgccattcagacaattaatgttcaaagagttttctaaagtgataaaaccaaagaaaagcatgtggaaaagcagaagcttagaaagttgtggtcactgaatgcactccctggtttttatttgtcagtgaaatctttatgcattcattgttaatattttaattccatggctttgtaggctgtgctgtgtctgaaggggtaacacctagggaaacatgaggccccttatgggaccccccaaatggaacaacttcactttctcttttatgtattgagccctgtgttaacatttcacttaagaagagcaccagtgctttaaaaaaaaaaaaaggtaaaatattaccattttgatagactgtaaagagttagattcctgttgaagtgttaaggaaatttaactttgtgaaacttttaaaataaagtttataaatgtagctaatctttgaaaaaccaatgcagtaacactgatttgtaaatgttgtggtcaatccctaggtgcattaaagtttcagtcacctgccgtgtgtgtgtgtgcccttttatgtttgccttcctagcattcctgtgttcactgtgcatgttcttgaaaatattttcacttgtcagaaaataaactggaaagtcattgaaaacccgta

SEQ ID NO: 17197 - DNA, 1908 bp, Homo sapiens
  source 1..1908: mol_type = unassigned DNA
gcggggcggggcgcgcacctcggggcgatctcggtgctccttacctgggaggtctcccggcttagtttcggcctcgttgggtcggaatctccaaagacagtgggtttcagccagaaacgcgaagacgaacgcctagccggcgcgggcagaaccgaggacacaatgagatttgtgggaccgggcgcccagaggctggcgcgggggagaccccacagctaaaatgctcggtacccccgggcagtcgtgggttagttagaaccgcagagcctttcccgacccctcggaagcgcagaagtatccgaaatctacccgtttcttgggtccagcaaaacttttaagccaggtgtgaaaatcacaaatgtcaaatgatggaagatccaggaatcgggacaggcgctacgatgaggtcccaagcgacctgccctatcaagataccaccataagaacccacccaactcttcatgacagtgagcgggcagtgagcgctgatcccttgccaccaccccctctcccattacagccaccattcggcccagacttctactcaagtgacacagaagaaccagctatagcgccagatctcaaaccagtaaggcgctttgtccctgactcctggaagaactttttcagagggaagaaaaaggaccccgaatgggataagccggtgtctgatatcaggtacatctccgatggagtggagtgttcaccaccagcctctccagcaagaccaaaccaccgttcgcccctcaactcctgcaaagatccctacggagggtcagaaggaacctttagttcccggaaagaggctgacgcagtgtttccccgggatccctatggatctctagaccgacacacacaaacagttcgaacatacagtgagaaggtggaggagtataacctgagatactcctacatgaagtcgtgggcaggcctgctgagaatactgggtgtggtggagctgcttttgggggccggtgtctttgcttgtgtcacagcttacattcacaaggacagtgagtggtacaacttgtttggatattcacaaccgtatggcatgggaggcgttggtggattgggcagtatgtatgggggctattactacactggccctaagaccccttttgtactcgtggttgctggattagcttggatcaccaccattattattctggttcttggcatgtccatgtattaccggaccattcttctggactctaattggtggcccctaactgaatttggaattaacgttgccttgtttattttgtatatggccgcagccatagtctatgtgaatgataccaaccgaggtggcctctgctactatccgttatttaatacaccagtgaatgcagtgttctgccgggtagaaggaggacagatagctgcaatgatcttcctgtttgtcaccatgatagtttatctcattagtgctttggtttgcctaaagttatggaggcatgaggcagctcggagacatagagaatatatggaacaacaggagataaatgagccatcattgtcatcgaaaaggaaaatgtgtgaaatggccaccagtggtgacagacaaagagactcagaagttaatttcaaggaactgagaacagcaaaaatgaaacctgaactactgagtggacacatccccccaggccacattcctaaacctatcgtgatgcccgactatgtggcaaaataccctgtgattcagacagatgatgagcgagaacgctataaagctgtgttccaagaccagttttcagagtacaaagagctgtctgcagaagttcaggctgtcctgaggaagtttgatgagctggatgcagtgatgagcagattgccacatcattcggaaagccgacaggaacatgagagaatttcaagaatccatgaagagtttaagaaaaaaaa

SEQ ID NO: 17198 - DNA, 576 bp, Homo sapiens
  source 1..576: mol_type = unassigned DNA
cccaggtgtgctgcgacggacggctgcccgcgctcggcgctcagcctgccatagcccgcgggggaggccggagccagggatccggggaggcccgcgtcccgccaggtttcgctctgcggacgcaggtgtgaaaatcacaaatgtcaaatgatggaagatccaggaatcgggacaggcgctacgatgaggtcccaagcgacctgccctatcaagataccaccataagaacccacccaactcttcatgacagtgagcgggcagtgagcgctgatcccttgccaccaccccctctcccattacagccaccattcggcccagacttctactcaagtgacacagaagaaccagctatagcgccagatctcaaaccagtaaggcgctttgtccctgactcctggaagaactttttcagagggaagaaaaaggaccccgaatgggataagccggtgtctgatatcaggtacatctccgatggagtggagtgttcaccaccagcctctccagcaagaccaaaccaccgttcgcccctcaactcctgcaaagatccctacggagggtcagaaggaacctttagtt

SEQ ID NO: 17199 - DNA, 2912 bp, Homo sapiens
  source 1..2912: mol_type = unassigned DNA
tgttgccctcaggtcgctcccgggcggggacacggaacccggccatggaagatccgtcgggggctcgcgagccccgggcccggccgagagagcgggacccgggacggcgcccccacccagaccaaggccgcacccacgatcgaccgcgggaccgacccggggacccgcgcaggaagcgaagcagcgacgggaaccggcgaagggacggggaccgggacccggagagagaccaggagagggacgggaaccgcgaccggaaccgggaccgggagagggagagagagagggaaagagacccggaccgaggcccccgccgggacacacacagggacgcgggccctcgcgcaggtgaacacggagtttgggaaaaaccgcgccaaagccggacgcgggacggagcccggggactgacctgggacgcagccgcgcctcctgggcccgcgccctgggaagccccggagccgccgcagccgcagaggaagggagaccccgggcgccgcagacccgaaagtgaacccccttcggagagatatctgccctcgacccccaggcctggacgagaggaggtggaatattaccagtcagaggcggaaggactcctggaatgccacaaatgcaaatacttgtgcactgggagagcctgctgccaaatgctggaggttctcctgaacttgctgatcctggcctgcagctctgtgtcttacagttccacagggggctacacgggcatcaccagcttggggggcatttactactatcagttcggaggggcttacagtggctttgatggtgctgacggggagaaggcccagcaactggatgtccagttctaccagctaaagctgcccatggtcactgtggcaatggcctgtagtggagccctcacagccctctgctgcctcttcgttgccatgggtgtcctgcgggtcccgtggcattgtccactgttgctggtgaccgaaggcttgttggacatgctcatcgcgggggggtacatcccggccttgtacttctacttccactacctctctgctgcctatggctctcctgtgtgtaaagagaggcaggcgctgtaccaaagcaaaggctacagcggtttcggctgcagtttccacggagcagatataggagctggaatctttgctgccctgggcattgtggtctttgccctgggggctgtcctggccataaagggctaccgaaaagttaggaagctaaaagagaagccagcagaaatgtttgaattttaagggtttctaaaacgctctgacagatgcaagtggtggtggaaggtagtctgagccactgcctttcccaagaatcccttgttgtggaagtttccagtgctggaaaagcagcgagccagcgttggtgtggtgggcggagctcccagtcgcatggagcggtgttcatggatgcaacagaccctggcttctggagtcctctgtgagtgagggaccaatcaaaattatttttcaaaaagcaaaaaaatggccggcctcggcggctcacacctgtaaccccagcactttgggaggctgaggtgggtggatcacttgaggtcaggagctcgagaccagcttggccaacatggtgagcccccgtctctactaaaatacaaaaaaattagccaggcgtggtggcgggcgcctgtaatcccagctacttgggaggctgaggcaggagaatcgcttgaatctgggaggcggagattgcagtgagccgagatcccgccactgcactccagcccaggtgacagagcgagactccatctcaaaaaaaaaaaaaagcaaaaaaactggaccccaagagccacaaggaaaaagcatgtactacaacagagtgcacctcttcattcagtaaagggaggtcaccaagagaatttgatgaaccttaccttcaaagttcctgggcacagtggctcacacctgtaatcccagagctttgggaggctgaggtaggaggattgcttgaacccaggagttcaagtttgcagtgcgctatgattgtcccactacactctagcctgagcaacagaccaagaccgtattgccaaaataccaaaaaaaaaaaaagttcatggagagccacatagacatgagaccacacttcagcctgaatttttctaaaacacagttgtctcaagcagattactccacacgtttttccacactgaactctccagtccttccacttccttaattctgcaaatggagggggtggggactcttgggaaactactcctgtaaaattgaagttggaggtaggcgtgggctgaggaaagaggaatcagattaattctctgggttgcaaagaggctattctgcaagccccttacagtggccctgaaagctcaataagtgttttgtacctcttgtaaatgtgccattgtgtgaagcattaaacccaacatctagaattcaggattcatccagaataaaaggatgtaaaatctttcccaacagaagagtgttacttttggtcagacaacttcatgggttcttactgcacattaaattatgacttatggaacattgcaatatattctcggtccttaagttatgacttatggaacattacaatatattctcggtccaagtgagtaagttctttgctttatgtgaatccaataaaaaatccaaagaattttaatttggagttgatgtcctctttacaatacatttataatattctcttaaatacagacaatttttcacatttaaaaggtgagttccatttgagtttagaaaaggaaatatatatatacatgcttgtatatgattggaaaatttcttgaagaataacatcagaaagtattaagttttgcttttgaagagaaggggacttttcatttatacatggcttgactgcacatgtattaattttagaaaaataaaaagtaaaaaagttga

SEQ ID NO: 17200 - DNA, 2214 bp, Homo sapiens
  source 1..2214: mol_type = unassigned DNA
gttgccctcaggtcgctcccgggcggggacacggaacccggccatggaagatccgtcgggggctcgcgagccccgggcccggccgagagagcgggacccgggacggcgcccccacccagaccaaggccgcacccacgatcgaccgcgggaccgacccggggacccgcgcaggaagcgaagcagcgacgggaaccggcgaagggacggggaccgggacccggagagagaccaggagagggacgggaaccgcgaccggaaccgggaccgggagagggagagagagagggaaagagacccggaccgaggcccccgccgggacacacacagggacgcgggccctcgcgcaggtgaacacggagtttgggaaaaaccgcgccaaagccggacgcgggacggagcccggggactgacctgggacgcagccgcgcctcctgggcccgcgccctgggaagccccggagccgccgcagccgcagaggaagggagaccccgggcgccgcagacccgaaagtgaacccccttcggagagatatctgccctcgacccccaggcctggacgagaggaggtggaatattaccagtcagaggcggaaggactcctggaatgccacaaatgcaaatacttgtgcactgggagaggtgtggtgcagatagtggaggtggtcttgaatgggatggttctcatatgcatcgtggcctcctactttgtccttgccggattcagtgccagcttttccagcggcggtggctttgggaacaactactactcaccgttcgagggcactgagctagagcaggttcggcagctggaccagcagtacacgatcctccgctcgcccctgatatacggtggcgtggctgtttctctgggtctgggggtcctcaccatgggtgttttactccaaggagccaagagtcgaacaatgttgtcagggaagtggctcctcacggaggccgccttcagcctcctagcggcagtgggctactgcacaggcattggtgtttacctccacgtggctctgcagatcaatagcaccgacacttgcaaaacaagagagaggctctatgcccgcaagggtctcacctggatggactgccagctggcaggcaccgacggagcagcagccacctttgcttgtcttctcgtgatcatgtacggcgccagcgtggtgctggccctgcgtagctaccgagaacagaagcgctacaaaggcagccgagaacagcccggaagttacagtgatgcaccggaatatctgtggtctggaactctttgagatcttccggaacctaaatgtgaacgcacattgtttctctcaaaaagacaggtcttttaaaactccgcattagacaactatggttttcacacacttgactttataaatgctctctttggactgaggcaaagttaaagaattgaggacgggcatggtggctcatgcctgtaatcccagcactttgggaggctgaggtgggcggatcgcttgaggtcagcagattgagtccagcctggctcacatagcgaaaccctgtctctactaaaaatacaaaaaatcgccgggcatggtggctcacgcctgtaatcccagcactttaggaggccaaggcaggcagatcacctgaggtcaggtgtttgaaaccagtctggcaaacatggtgaaaccccatctctactaaaaatacaaaaattagctgggcgtggtggcaggcacctgtaattccagctactctggaggctgaggcaggagaatctcttaaacccgggaggcagaggttgcagtgagccaagaccattgcactccagcctgggcaacaagagcgagactccgtctcaaaaaaatacaaaaaatcatctgggcttggtggtgaacgcctgtaatcccagttactcaggaggctaaaccacaagaatcacttgaacctgggaggcagaggttgcagtgagcaaactccactccacgtcactgcactccagcctgggtaacagagcgaggctctgtctcaaaaacaacaactacaacaaaaaagataggacagtagattttattagaccctgaagcatactggaggctttttcatttctgcattccctgacagtgctccatagagtaggtcttcaaaggtagatagtaatctcattaccctggactgttctcataatgtaacagatcactaacactgaatcttaaaaataaagttcttttagtaattttaa

SEQ ID NO: 17201 - DNA, 1135 bp, Homo sapiens
  source 1..1135: mol_type = unassigned DNA
cctgaggcctcctcatggatgggtcaaacgtgacatcatttgttgttgaggaacccacgaacatctcaactggcaggaacgcctcagtcgggaatgcacatcggcaaatccccatcgtgcactgggtcattatgagcatctccccagtggggtttgttgagaatgggattctcctctggttcctgtgcttccggatgagaagaaatcccttcactgtctacatcacccacctgtctatcgcagacatctcactgctcttctgtattttcatcttgtctatcgactatgctttagattatgagctttcttctggccattactacacaattgtcacattatcagtgacttttctgtttggctacaacacgggcctctatctgctgacggccattagtgtggagaggtgcctgtcagtcctttaccccatctggtaccgatgccatcgccccaagtaccagtcggcattggtctgtgcccttctgtgggctctttcttgcttggtgaccaccatggagtatgtcatgtgcatcgacagagaagaagagagtcactctcggaatgactgccgagcagtcatcatctttatagccatcctgagcttcctggtcttcacgcccctcatgctggtgtccagcaccatcttggtcgtgaagatccggaagaacacgtgggcttcccattcctccaagctttacatagtcatcatggtcaccatcattatattcctcatcttcgctatgcccatgagactcctttacctgctgtactatgagtattggtcgacctttgggaacctacaccacatttccctgctcttctccacaatcaacagtagcgccaaccctttcatttacttctttgtgggaagcagtaagaagaagagattcaaggagtccttaaaagttgttctgaccagggctttcaaagatgaaatgcaacctcggcgccagaaagacaattgtaatacggtcacagttgagactgtcgtctaagaactgtgagggaagttgtggataaaaatggtggaacacaggtcatttttagtttgtgcttggaatatgacttaagtatctcctaaatgtgatacagaagaacatctcatcccatatgcatgagatactaattaatgatgaaa

SEQ ID NO: 17202 - DNA, 1265 bp, Homo sapiens
  source 1..1265: mol_type = unassigned DNA
actagatggaccactgctcctgactgtgatgttgtggcccactcaggtcccagcaccccatggtctgggggaaaatttgctggttcagccagagggctggatggacagtgtttgctgagtcacagatatctctctcatgtagcctttgtctccacagtggtgaccaggaggcacagaacccaaacctggtatctcagctctgtggcgtctttcttcaaaatgagacgaatgaaaccatacatatgcagatgagcatggcagtgggacagcaggccctgcccttgaatatcattgcccccaaggctgtgctggtctccctctgtggggtcttattgaatggcactgtcttctggctgctttgctgtggggccacgaatccctacatggtatacatcctccacctggtcgctgctgacgtgatctatctttgctgctcggcagtggggttcttacaggtgactctgctaacttatcatggagtcgtgttttttatccctgatttcctggccatattgtctcccttctcctttgaggtgtgtctctgtctcctggtggccatcagcacagagcggtgtgtgtgtgtcctcttccccatctggtacagatgccaccgcccaaaatacacatctaatgttgtctgcaccctcatctggggcctgcctttttgcatcaacatagtaaaatcacttttcctaacttactggaaacatgtaaaggcatgtgtcatatttctaaagctttctgggctcttccatgctatcctttcacttgtgatgtgtgtgtcgagtctgactctactcattagattcctgtgctgctcccagcagcaaaaggccaccagggtctatgcggtggtgcagatctcggcccccatgttcctactctgggccctacccctgagcgtggcacccctcataacagatttcaaaatgtttgtcaccacctcctatttaatttccttgttcctcattataaacagcagcgccaaccctatcatttatttctttgtggggagcctcagaaagaaaaggctgaaggaatctctcagagtgattctccaacgggcgttagcagataagccagaggtggggaggaacaaaaaggcagctggcatcgacccaatggagcaaccacactctactcagcatgtggagaaccttcttcccagggagcacagggtcgatgtggaaacataatttcccacatctgagctggggaattgtacacatagtaacccagcctgttctgcatcataaggctgctgc

SEQ ID NO: 17203 - DNA, 1265 bp, Homo sapiens; identical to SEQ ID NO: 17202
  source 1..1265: mol_type = unassigned DNA

SEQ ID NO: 17204 - DNA, 1265 bp, Homo sapiens; identical to SEQ ID NO: 17202
  source 1..1265: mol_type = unassigned DNA

SEQ ID NO: 17205 - DNA, 1265 bp, Homo sapiens; identical to SEQ ID NO: 17202
  source 1..1265: mol_type = unassigned DNA

SEQ ID NO: 17206 - DNA, 1265 bp, Homo sapiens; identical to SEQ ID NO: 17202
  source 1..1265: mol_type = unassigned DNA

SEQ ID NO: 17207 - DNA, 1265 bp, Homo sapiens; identical to SEQ ID NO: 17202
  source 1..1265: mol_type = unassigned DNA

SEQ ID NO: 17208 - DNA, 1265 bp, Homo sapiens; identical to SEQ ID NO: 17202
  source 1..1265: mol_type = unassigned DNA

SEQ ID NO: 17209 - DNA, 1265 bp, Homo sapiens; identical to SEQ ID NO: 17202
  source 1..1265: mol_type = unassigned DNA

SEQ ID NO: 17210 - DNA, 966 bp, Homo sapiens
  source 1..966: mol_type = unassigned DNA
atgaaccagactttgaatagcagtgggaccgtggagtcagccctaaactattccagagggagcacagtgcacacggcctacctggtgctgagctccctggccatgttcacctgcctgtgcgggatggcaggcaacagcatggtgatctggctgctgggctttcgaatgcacaggaaccccttctgcatctatatcctcaacctggcggcagccgacctcctcttcctcttcagcatggcttccacgctcagcctggaaacccagcccctggtcaataccactgacaaggtccacgagctgatgaagagactgatgtactttgcctacacagtgggcctgagcctgctgacggccatcagcacccagcgctgtctctctgtcctcttccctatctggttcaagtgtcaccggcccaggcacctgtcagcctgggtgtgtggcctgctgtggacactctgtctcctgatgaacgggttgacctcttccttctgcagcaagttcttgaaattcaatgaagatcggtgcttcagggtggacatggtccaggccgccctcatcatgggggtcttaaccccagtgatgactctgtccagcctgaccctctttgtctgggtgcggaggagctcccagcagtggcggcggcagcccacacggctgttcgtggtggtcctggcctctgtcctggtgttcctcatctgttccctgcctctgagcatctactggtttgtgctctactggttgagcctgccgcccgagatgcaggtcctgtgcttcagcttgtcacgcctctcctcgtccgtaagcagcagcgccaaccccgtcatctacttcctggtgggcagccggaggagccacaggctgcccaccaggtccctggggactgtgctccaacaggcgcttcgcgaggagcccgagctggaaggtggggagacgcccaccgtgggcaccaatgagatgggggcttga

SEQ ID NO: 17211 - DNA, 1409 bp, Homo sapiens
  source 1..1409: mol_type = unassigned DNA
aggttcagggtttctcttgctgtccacacctgggcgagagctgagcggaagagaaggggtcctcagagagacaccttcctgaccggccccattccagctggatgccatgtgactcggaggagctggtggacactgaacaggagccgcccagaggctctggggactggagccctcggccgcggccaggatagatccaaggcccagggtcagagcaggcagggctcggccagtcctctgccccaaacggggcatcaggagagagagcgagcagaacacactcctgcagcatcccctggccccccgccccatgatggagcccagagaagctggacagcacgtgggggccgccaacggcgcccaggaggatgtggccttcaacctcatcatcctgtccctcaccgaggggctcggcctcggtgggctgctggggaatggggcagtcctctggctgctcagctccaatgtctacagaaaccccttcgccatctacctcctggacgtggcctgcgcggatctcatcttccttggctgccacatggtggccatcgtccccgacttgctgcaaggccggctggacttcccgggcttcgtgcagaccagcctggcaacgctgcgcttcttctgctacatcgtgggcctgagtctcctggcggccgtcagcgtggagcagtgcctggccgccctcttcccagcctggtactcgtgccgccgcccacgccacctgaccacctgtgtgtgcgccctcacctgggccctctgcctgctgctgcacctgctgctcagcggcgcctgcacccagttcttcggggagcccagccgccacttgtgccggacgctgtggctggtggcagcggtgctgctggctctgctgtgttgcaccatgtgtggggccagccttatgctgctgctgcgggtggagcgaggcccccagcggcccccaccccggggcttccctgggctcatcctcctcaccgtcctcctcttcctcttctgcggcctgcccttcggcatctactggctgtcccggaacctgctctggtacatcccccactacttctaccacttcagcttcctcatggccgccgtgcactgcgcggccaagcccgtcgtctacttctgcctgggcagtgcccagggccgcaggctgcccctccggctggtcctccagcgagcgctgggagacgaggctgagctgggggccgtcagggagacctcccgccggggcctggtggacatagcagcctgagccctggggcccccgaccccagctgcagcccccgtgaggcaagagggtgacttggggaaggtggtggggtcagaggctggggccagccggacctggaggaggccttggtgggtgacccggtcatgtgctgtcaaagttgtgacccttggtctggagcatgagg

SEQ ID NO: 17212 - DNA, 1454 bp, Homo sapiens
  source 1..1454: mol_type = unassigned DNA
aggttcagggtttctcttgctgtccacacctgggcgagagctgagcggaagagaaggggtcctcagagagacaccttcctgaccggccccattccagctggatgccatgtgactcggaggagctggtggacactgaacaggagccgcccagaggctctggggactggagccctcggccgcggccaggatagatccaaggcccagggtcagagcaggcagggctcggccagtcctctgccccaaacggggcatcaggagagagagcgagcagaacacactcctgcagcatcccctggccccccgccccatgatggagcccagagaagctggacagcacgtgggggccgccaacggcgcccaggaggatgtggccttcaacctcatcatcctgtccctcaccgaggggctcggcctcggtgggctgctggggaatggggcagtcctctggctgctcagctccaatgtctacagaaaccccttcgccatctacctcctggacgtggcctgcgcggatctcatcttccttggctgccacatggtggccatcgtccccgacttgctgcaaggccggctggacttcccgggcttcgtgcagaccagcctggcaacgctgcgcttcttctgctacatcgtgggcctgagtctcctggcggccgtcagcgtggagcagtgcctggccgccctcttcccagcctggtactcgtgccgccgcccacgccacctgaccacctgtgtgtgcgccctcacctgggccctctgcctgctgctgcacctgctgctcagcggcgcctgcacccagttcttcggggagcccagccgccacttgtgccggacgctgtggctggtggcagcggtgctgctggctctgctgtgttgcaccatgtgtggggccagccttatgctgctgctgcgggtggagcgaggcccccagcggcccccaccccggggcttccctgggctcatcctcctcaccgtcctcctcttcctcttctgcggcctgcccttcggcatctactggctgtcccggaacctgctctggtacatcccccactacttctaccacttcagcttcctcatggccgccgtgcactgcgcggccaagcccgtcgtctacttctgcctgggcagtgcccagggccgcaggctgcccctccggctggtcctccagcgagcgctgggagacgaggctgagctgggggccgtcagggagacctcccgccggggcctggtggacatagcagcctgagccctggggcccccgaccccagctgcagcccccgtgaggcaagagggtgacttggggaaggtggtggggtcagaggctggggccagccggacctggaggaggccttggtgggtgacccggtcatgtgctgtcaaagttgtgacccttggtctggagcatgaggctcccctgggaggcagctggaaaggcaaggtctctacatgcccag

SEQ ID NO: 17213 - DNA, 2295 bp, Homo sapiens
  source 1..2295: mol_type = unassigned DNA
gatgagttcccggtggggctctggggggggctcctgagcggggcattccttcctgaagcctcatccccgctcagccctgctcagcccctcctcctactcccctccccctccccctcctgccgggccaggaattgggtttggggcgggttctgcttccaaagccatctcttccagcaggagagggctctactctgagctcctattttccaaggctccgggccgcgctcggcgctggcctgctgccccggcgggtccgccggccggaggcgggagtcacaggaagagccctccacaaaaggaggcctcggcggatcaggacagctgcaggtgggtgtgcagactggtgagctgccagcaggggcccagacgcgccaggcctggagatggctggaaactgctcctgggaggcccatcccggcaacaggaacaagatgtgccctggcctgagcgaggccccggaactctacagccggggcttcctgaccatcgagcagatcgcgatgctgccgcctccggccgtcatgaactacatcttcctgctcctctgcctgtgtggcctggtgggcaacgggctggtcctctggtttttcggcttctccatcaagaggaaccccttctccatctacttcctgcacctggccagcgccgatgtgggctacctcttcagcaaggcggtgttctccatcctgaacacggggggcttcctgggcacgtttgccgactacatccgcagcgtgtgccgggtcctggggctctgcatgttccttaccggcgtgagcctcctgccggccgtcagcgccgagcgctgcgcctcggtcatcttccccgcctggtactggcgccggcggcccaagcgcctgtcggccgtggtgtgcgccctgctgtgggtcctgtccctcctggtcacctgcctgcacaactacttctgcgtgttcctgggccgcggggcccccggcgcggcctgcaggcacatggacatcttcctgggcatcctcctgttcctgctctgctgcccgctcatggtgctgccctgcctggccctcatcctgcacgtggagtgccgggcccgacggcgccagcgctctgccaagctcaaccacgtcatcctggccatggtctccgtcttcctggtgtcctccatctacttagggatcgactggttcctcttctgggtcttccagatcccggcccccttccccgagtacgtcactgacctgtgcatctgcatcaacagcagcgccaagcccatcgtctacttcctggccgggagggacaagtcgcagcggctgtgggagccgctcagggtggtcttccagcgggccctgcgggacggcgctgagctgggggaggccgggggcagcacgcccaacacagtcaccatggagatgcagtgtcccccggggaacgcctcctgagactccagcgcctggaggaggcaggggcaggaagcggcctccaagacccttcgccttgggacaggaatgggcacctgcttctgagtccatacaggagaagaaagatctgtttcctctcctcgggcctccttctccctgggctggggactccaggggtggctgggagactgggcagccaccagcaaacagaccctgtggcccctgcccggctcccccacccattctgctcccctagagacctcttgtacagaagttgcccccaggtggtggggcccctccttgccctaggctggttggtaaaagagaggaggtcaacacccagcctagccacctctgcctcttgggtcagccctccttgactgtgtcccagccagcaccaggccagcagcctcatccctgccattcagggctgttccagagattcgatcctcttaaggcattatcagtgagcaaatgtgaaggaaatggtgtctggaagaaagttctggttcacatgccttgtagctaagtctttctgcaaacaacctcccttccccccgtcgagtcatttggtgactttgatggggggatttctggttatgtcaaggctctggagacaggaagggcctttggccgccttgggtagttgacctgccttttctgactccgggacgagccagtcctaggctgcctccgggagcacttgaggtatcccgcaggccatgaggacccactgggcagctcctggacagcctcttggctccagcccccacccgaaagtggacactggctccgccctggccacctggggactggcactgtggtgcacagtggcccaatgtggccaacggaagttttataaaagacaaaatgtatatcaataaacattttataacttgca

SEQ ID NO: 17214 - DNA, 1301 bp, Homo sapiens
  source 1..1301: mol_type = unassigned DNA
atctcttccagcaggagagggctctactctgagctcctattttccaaggctccgggccgcgctcggcgctggcctgctgccccggcgggtccgccggccggaggcgggagtcacaggaagagccctccacaaaaggaggcctcggcggatcaggacagctgcaggtgggtgtgcagactggtgagctgccagcaggggcccagacgcgccaggcctggagatggctggaaactgctcctgggaggcccatcccggcaacaggaacaagatgtgccctggcctgagcgaggccccggaactctacagccggggcttcctgaccatcgagcagatcgcgatgctgccgcctccggccgtcatgaactacatcttcctgctcctctgcctgtgtggcctggtgggcaacgggctggtcctctggtttttcggcttctccatcctgaacacggggggcttcctgggcacgtttgccgactacatccgcagcgtgtgccgggtcctggggctctgcatgttccttaccggcgtgagcctcctgccggccgtcagcgccgagcgctgcgcctcggtcatcttccccgcctggtactggcgccggcggcccaagcgcctgtcggccgtggtgtgcgccctgctgtgggtcctgtccctcctggtcacctgcctgcacaactacttctgcgtgttcctgggccgcggggcccccggcgcggcctgcaggcacatggacatcttcctgggcatcctcctgttcctgctctgctgcccgctcatggtgctgccctgcctggccctcatcctgcacgtggagtgccgggcccgacggcgccagcgctctgccaagctcaaccacgtcatcctggccatggtctccgtcttcctggtgtcctccatctacttagggatcgactggttcctcttctgggtcttccagatcccggcccccttccccgagtacgtcactgacctgtgcatctgcatcaacagcagcgccaagcccatcgtctacttcctggccgggagggacaagtcgcagcggctgtgggagccgctcagggtggtcttccagcgggccctgcgggacggcgctgagctgggggaggccgggggcagcacgcccaacacagtcaccatggagatgcagtgtcccccggggaacgcctcctgagactccagcgcctggaggaggcaggggcaggaagcggcctccaagacccttcgccttgggacaggaatgggcacctgcttctgagtccatacaggagaagaaagatctgtttcctctcctcgggcctccttct

SEQ ID NO: 17215 - DNA, 2282 bp, Homo sapiens
  source 1..2282: mol_type = unassigned DNA
gggctcctgagcggggcattccttcctgaagcctcatccccgctcagccctgctcagcccctcctcctactcccctccccctccccctcctgccgggccaggaattgggtttggggcgggttctgcttccaaagccatctcttccagcaggagagggctctactctgagctcctattttccaaggctccgggccgcgctcggcgctggcctgctgccccggcgggtccgccggccggaggcgggagtcacaggaagagccctccacaaaaggaggcctcggcggatcaggacagctgcaggcttctgccaggtgggtgtgcagactggtgagctgccagcaggggcccagacgcgccaggcctggagatggctggaaactgctcctgggaggcccatcccggcaacaggaacaagatgtgccctggcctgagcgaggccccggaactctacagccggggcttcctgaccatcgagcagatcgcgatgctgccgcctccggccgtcatgaactacatcttcctgctcctctgcctgtgtggcctggtgggcaacgggctggtcctctggtttttcggcttctccatcaagaggaaccccttctccatctacttcctgcacctggccagcgccgatgtgggctacctcttcagcaaggcggtgttctccatcctgaacacggggggcttcctgggcacgtttgccgactacatccgcagcgtgtgccgggtcctggggctctgcatgttccttaccggcgtgagcctcctgccggccgtcagcgccgagcgctgcgcctcggtcatcttccccgcctggtactggcgccggcggcccaagcgcctgtcggccgtggtgtgcgccctgctgtgggtcctgtccctcctggtcacctgcctgcacaactacttctgcgtgttcctgggccgcggggcccccggcgcggcctgcaggcacatggacatcttcctgggcatcctcctgttcctgctctgctgcccgctcatggtgctgccctgcctggccctcatcctgcacgtggagtgccgggcccgacggcgccagcgctctgccaagctcaaccacgtcatcctggccatggtctccgtcttcctggtgtcctccatctacttagggatcgactggttcctcttctgggtcttccagatcccggcccccttccccgagtacgtcactgacctgtgcatctgcatcaacagcagcgccaagcccatcgtctacttcctggccgggagggacaagtcgcagcggctgtgggagccgctcagggtggtcttccagcgggccctgcgggacggcgctgagctgggggaggccgggggcagcacgcccaacacagtcaccatggagatgcagtgtcccccggggaacgcctcctgagactccagcgcctggaggaggcaggggcaggaagcggcctccaagacccttcgccttgggacaggaatgggcacctgcttctgagtccatacaggagaagaaagatctgtttcctctcctcgggcctccttctccctgggctggggactccaggggtggctgggagactgggcagccaccagcaaacagaccctgtggcccctgcccggctcccccacccattctgctcccctagagacctcttgtacagaagttgcccccaggtggtggggcccctccttgccctaggctggttggtaaaagagaggaggtcaacacccagcctagccacctctgcctcttgggtcagccctccttgactgtgtcccagccagcaccaggccagcagcctcatccctgccattcagggctgttccagagattcgatcctcttaaggcattatcagtgagcaaatgtgaaggaaatggtgtctggaagaaagttctggttcacatgccttgtagctaagtctttctgcaaacaacctcccttccccccgtcgagtcatttggtgactttgatggggggatttctggttatgtcaaggctctggagacaggaagggcctttggccgccttgggtagttgacctgccttttctgactccgggacgagccagtcctaggctgcctccgggagcacttgaggtatcccgcaggccatgaggacccactgggcagctcctggacagcctcttggctccagcccccacccgaaagtggacactggctccgccctggccacctggggactggcactgtggtgcacagtggcccaatgtggccaacggaagttttataaaagacaaaatgtatatcaataaacattttataacttgcagcc

SEQ ID NO: 17216 - DNA, 870 bp, Homo sapiens
  source 1..870: mol_type = unassigned DNA
atgtttgggctgttcggcctctggagaaccttcgacagtgtggtcttctacctgacgctgatcgtgggcctcgggggaccggtaggtaacgggctggtgctctggaacctcggcttccgcatcaagaagggccccttctccatctacctgctgcacctggccgccgccgacttcctgttcctctcctgccgtgtgggcttctccgtggctcaggctgccctgggcgcccaggacacactctacttcgtgctcaccttcctgtggttcgcggtggggctctggctgctggcggccttcagcgtggagcgctgcctctccgacctcttccccgcctgctaccagggctgccggcccagacacgcctcggccgtcctctgcgccctggtgtggaccccgaccctgccggccgtgccgctgcccgccaacgcctgcggcctgctgcgcaacagcgcgtgccccctggtctgcccgcgctaccacgtggccagcgtcacctggttcctggtgctggcccgcgtcgcctggacggctggcgtggtcctctttgtctgggtgacctgctgctccactcgcccgcggcccaggctctacggcatcgtcctgggcgcgctgctcctgctcttcttctgtggcctgccctcggtcttctactggagcctgcagcccctgctgaacttcctgctgcccgtgttttccccgctggccacgctgctggcctgcgtcaacagcagctccaagcccctcatctactcggggttgggccgacagcccgggaagcgggagccgctgaggtcggtactgcggagggccctgggggagggcgccgagctgggtgccaggggacagtccctgcccatgggtctcctataa

SEQ ID NO: 17217 - DNA, 1197 bp, Homo sapiens
  source 1..1197: mol_type = unassigned DNA
tagagagaggtcaggcttcagagtcagcaagaactggatttcaaactggatttgaggacccccaccttttgataggtgacttattctctgtgagtctctgatctgccctctttaaatgaggaagtaaatcccacatggcagggtggtggggagaatcagagatcatacagctggtgatcacaactggtttctgtttccagggtcaccagactagggtttctgagcatggatccaaccatctcaaccttggacacagaactgacaccaatcaacggaactgaggagactctttgctacaagcagaccttgagcctcacggtgctgacgtgcatcgtttcccttgtcgggctgacaggaaacgcagttgtgctctggctcctgggctgccgcatgcgcaggaacgccttctccatctacatcctcaacttggccgcagcagacttcctcttcctcagcggccgccttatatattccctgttaagcttcatcagtatcccccataccatctctaaaatcctctatcctgtgatgatgttttcctactttgcaggcctgagctttctgagtgccgtgagcaccgagcgctgcctgtccgtcctgtggcccatctggtaccgctgccaccgccccacacacctgtcagcggtggtgtgtgtcctgctctgggccctgtccctgctgcggagcatcctggagtggatgttatgtggcttcctgttcagtggtgctgattctgcttggtgtcaaacatcagatttcatcacagtcgcgtggctgatttttttatgtgtggttctctgtgggtccagcctggtcctgctgatcaggattctctgtggatcccggaagataccgctgaccaggctgtacgtgaccatcctgctcacagtactggtcttcctcctctgtggcctgccctttggcattcagtttttcctatttttatggatccacgtggacagggaagtcttattttgtcatgttcatctagtttctattttcctgtccgctcttaacagcagtgccaaccccatcatttacttcttcgtgggctcctttaggcagcgtcaaaataggcagaacctgaagctggttctccagagggctctgcaggacgcgtctgaggtggatgaaggtggagggcagcttcctgaggaaatcctggagctgtcgggaagcagattggagcagtgagga

SEQ ID NO: 17218 - DNA, 2036 bp, Homo sapiens
  source 1..2036: mol_type = unassigned DNA
gtttgccagtcccaggaaagcacttctcaactcaccaactccagtagaaagaagggtgttaaggggcaccagtggaggttttctgagcatggatccaaccaccccggcctggggaacagaaagtacaacagtgaatggaaatgaccaagcccttcttctgctttgtggcaaggagaccctgatcccggtcttcctgatccttttcattgccctggtcgggctggtaggaaacgggtttgtgctctggctcctgggcttccgcatgcgcaggaacgccttctctgtctacgtcctcagcctggccggggccgacttcctcttcctctgcttccagattataaattgcctggtgtacctcagtaacttcttctgttccatctccatcaatttccctagcttcttcaccactgtgatgacctgtgcctaccttgcaggcctgagcatgctgagcaccgtcagcaccgagcgctgcctgtccgtcctgtggcccatctggtatcgctgccgccgccccagacacctgtcagcggtcgtgtgtgtcctgctctgggccctgtccctactgctgagcatcttggaagggaagttctgtggcttcttatttagtgatggtgactctggttggtgtcagacatttgatttcatcactgcagcgtggctgatttttttattcatggttctctgtgggtccagtctggccctgctggtcaggatcctctgtggctccaggggtctgccactgaccaggctgtacctgaccatcctgctcacagtgctggtgttcctcctctgcggcctgccctttggcattcagtggttcctaatattatggatctggaaggattctgatgtcttattttgtcatattcatccagtttcagttgtcctgtcatctcttaacagcagtgccaaccccatcatttacttcttcgtgggctcttttaggaagcagtggcggctgcagcagccgatcctcaagctggctctccagagggctctgcaggacattgctgaggtggatcacagtgaaggatgcttccgtcagggcaccccggagatgtcgagaagcagtctggtgtagagatggacagcctctacttccatcagatatatgtggctttgagaggcaactttgcccctgtctgtctgatttgctgaactttctcagtcctgattttaaaacagttaagagagtccttgtgaggattaagtgagacagtgcctatgaaacaaacactaagtgcagtgtctctggaactgccttactcacaggcttccaccacagccctatgagagctttgccaactctgcggtccatgactgttcccacttttaatgaatcctacctttcgcagaaggctgaaagcagggcagaaaagatctacatttctttggacactgcacttgatagggactcaaagaatgttatatttttaattaatttctttttctcttccgtacaatttctgtctcaacaaaattagaagaattaaatttaaaactagctccaaaagagcagtcgtctttcattttggcagaccttagaatatccccctagcttaataaatctttgttgaatggcttaatgaatgaataaactggttaatgtttaagttaaacctctgaaaagtctccatttaccagatttgagtcactaaatttattgctttcactacttttgaattttgcaaacatgaaattaagttttataattagataaatcaatgtcaacacatatttaaagtttgaggtacactgtcttcctgtggtttcctttcacatgccatcccttaaaatcccagctacacgccttcccattccttcccctttgcctttgttctaatcttccctctctgggggctctctaattcgtcctggaagtttccagtggtcttatagactccatgttcttggaggacaggctgtatgtcagatttaccttttattccgaagaactcggagcatttattttgttaattaaattgcacatatttttaaaagttacgtgttccacagaataaaatactaattgtaaa

SEQ ID NO: 17219 - DNA, 1639 bp, Homo sapiens
  source 1..1639: mol_type = unassigned DNA
gcccagtctggaaagtgaggagcgtctttgcccggccgccatcccatctaggaagtgaggagcgcctcttcccggccgccatcccatctaggaagtgaggagcgtctctgcccggccgcccatcgtctgagatgtggggagtgcctttgccccgccgccccgtctgggatgtgaggagcgcctctgcccggtcgcgaccccgtctgggagctcctgtaggcatctcctgaattaagcaacacagaaaagtcctctgaagtcactgaatcccataaaggctctctacctttagcacaagggaggtcttcaccactggacaaagaaggaacgataaggggtcatcagactggggtttctgagcatggattcaaccatcccagtcttgggtacagaactgacaccaatcaacggacgtgaggagactccttgctacaagcagaccctgagcttcacggggctgacgtgcatcgtttcccttgtcgcgctgacaggaaacgcggttgtgctctggctcctgggctgccgcatgcgcaggaacgctgtctccatctacatcctcaacctggtcgcggccgacttcctcttccttagcggccacattatatgttcgccgttacgcctcatcaatatccgccatcccatctccaaaatcctcagtcctgtgatgacctttccctactttataggcctaagcatgctgagcgccatcagcaccgagcgctgcctgtccatcctgtggcccatctggtaccactgccgccgccccagatacctgtcatcagtcatgtgtgtcctgctctgggccctgtccctgctgcggagtatcctggagtggatgttctgtgacttcctgtttagtggtgctaattctgtttggtgtgaaacgtcagatttcattacaatcgcgtggctggtttttttatgtgtggttctctgtgggtccagcctggtcctgctggtcaggattctctgtggatcccggaagatgccgctgaccaggctgtacgtgaccatcctcctcacagtgctggtcttcctcctctgtggcctgccctttggcattcagtgggccctgttttccaggatccacctggattggaaagtcttattttgtcatgtgcatctagtttccattttcctgtccgctcttaacagcagtgccaaccccatcatttacttcttcgtgggctcctttaggcagcgtcaaaataggcagaacctgaagctggttctccagagggctctgcaggacacgcctgaggtggatgaaggtggagggtggcttcctcaggaaaccctggagctgtcgggaagcagattggagcagtgaggaagaacctctgccctgtcagacaggactttgagagcaatgctgccctgccacccttgacaattatatgcatttttcttagccttctgcctcagaaatgtctcagtggtccctcaaggtcttcgaatagatgtttatctaacctgacagttgcagttttcacccatggaaagcattagtctgacagtacaatgtttggattctccttgatattaccaatacattttccctgttatcttgcactgaatctttcctactgaacactttttctgcacttttcattgtaataaaaggagttgctgtccacaa

SEQ ID NO: 17220 - DNA, 991 bp, Homo sapiens
  source 1..991: mol_type = unassigned DNA
aaatacctctggcctctgatttgcccatagtcctcatacaggaaataacaagactgtccagcatcttcgtaagcctggattgctcaccagctttcatttcagctcctgtaggcatctcctgaattaagcaacacagaaaagtcctctgaagtcactgaatcccataaaggctctctacctttagcacaagggaggtcttcaccactggacaaagaaggaacgataaggggtcatcagactggggtttctgagcatggattcaaccatcccagtcttgggtacagaactgacaccaatcaacggacgtgaggagactccttgctacaagcagaccctgagcttcacggggctgacgtgcatcgtttcccttgtcgcgctgacaggaaacgcggttgtgctctggctcctgggctgccgcatgcgcaggaacgctgtctccatctacatcctcaacctggtcgcggccgacttcctcttccttagcggccacattatatgttcgccgttacgcctcatcaatatccgccatcccatctccaaaatcctcagtcctgtgatgacctttccctactttataggcctaagcatgctgagcgccatcagcaccgagcgctgcctgtccatcctgtggcccatctggtaccactgccgccgccccagatacctgtcatcagtcatgtgtgtcctgctctgggccctgtccctgctgcggagtatcctggagtggatgttctgtgacttcctgtttagtggtgctaattctgtttggtgtgaaacgtcagatttcattacaatcgcgtggctggtttttttatgtgtggttctctgtgggtccagcctggtcctgctggtcaggattctctgtggatcccggaagatgccgctgaccaggctgtacgtgaccatcctcctcacagtgctggtcttcctcctctgtggcctgccctttggcattcagtgggccctgttttccaggatccacctggattgg

SEQ ID NO: 17221 - DNA, 1444 bp, Homo sapiens
  source 1..1444: mol_type = unassigned DNA
cttcctgtccatggatgaccagtcctagtcacgagtgtgtcacaaccacctctttgtgtatctgaattcctccacctgaaagaaaatttcagacccaggatagattaatcatcgggtccaaagccctggccggatgagtgggggtgttttgatcctaatgttattcccatgtcagcacagaacttgtgtggcagtagagagatgtcaggcttcagagtcaacaagaactggatttcaaactggatttgaggacccccacctttggtaagtgacttattatctgcgagcctctgtttctctcttctttaaatgaggacagtaaatcccatacggcagggtggtggggagaatcagagatgatacagctggtgatcacatctggtttgtgttcccaggggcaccagactagggtttctgagcatggatccaaccgtcccagtcttcggtacaaaactgacaccaatcaacggacgtgaggagactccttgctacaatcagaccctgagcttcacggtgctgacgtgcatcatttcccttgtcggactgacaggaaacgcggttgtgctctggctcctgggctaccgcatgcgcaggaacgctgtctccatctacatcctcaacctggccgcagcagacttcctcttcctcagcttccagattatacgtttgccattacgcctcatcaatatcagccatctcatccgcaaaatcctcgtttctgtgatgacctttccctactttacaggcctgagtatgctgagcgccatcagcaccgagcgctgcctgtctgttctgtggcccatctggtaccgctgccgccgccccacacacctgtcagcggtcgtgtgtgtcctgctctggggcctgtccctgctgtttagtatgctggagtggaggttctgtgacttcctgtttagtggtgctgattctagttggtgtgaaacgtcagatttcatcccagtcgcgtggctgatttttttatgtgtggttctctgtgtttccagcctggtcctgctggtcaggatcctctgtggatcccggaagatgccgctgaccaggctgtacgtgaccatcctgctcacagtgctggtcttcctcctctgcggcctgcccttcggcattctgggggccctaatttacaggatgcacctgaatttggaagtcttatattgtcatgtttatctggtttgcatgtccctgtcctctctaaacagtagtgccaaccccatcatttacttcttcgtgggctcctttaggcagcgtcaaaataggcagaacctgaagctggttctccagagggctctgcaggacaagcctgaggtggataaaggtgaagggcagcttcctgaggaaagcctggagctgtcgggaagcagattggggccatgagggagagcctctgccctgtcagtcagacgggactttgagagcaacactgtcctgc

SEQ ID NO: 17222 - DNA, 5723 bp, Homo sapiens
  source 1..5723: mol_type = unassigned DNA
cggccgcggcggtagcgcggaaaacaatggggccggggcggtggggagaggccgaggcttgaggtaggcagcaagcgccggctgggggtcgggccgagcggggcaggaggaaaacccgccgccgcgcgcgagcccgctccgctgccctcgggggcatggcgcggccgtgaggcggagaggggtagccgcggggagcgaagcccgcagtgccagccggccccgagaggcccggccccgggcccggcccgtgcagcccgcggcccatggtgctgcccacctgccccatggcggagttcgcgctgccgcggcacagcgcggtcatggagcgccttcgccggcgcatcgagctgtgccggcgccaccacagcacctgcgaggcccgctacgaggccgtgtcgcccgagcgcctggagctggagcgccaacacaccttcgccctgcaccagcgctgcatccaggccaaggccaagcgcgccgggaagcacaggcagccgcccgccgccacggccccggcgcccgccgccccggccccgcgcctggacgccgctgacggccccgagcacggccgcccggccacgcatcttcatgatacagttaagaggaatcttgacagcgccacttcccctcagaatggcgatcaacagaatggctacggggacctctttcctgggcataagaagactcgccgggaggcccctctgggagttgccatctcttccaatggactgcctccagcctcccccctcggtcagtctgacaagccttctggagccgacgccctgcagtccagtgggaagcactctctggggctagactctctcaacaaaaagcgtctggctgactccagccttcacttgaatggaggcagtaaccccagtgagtcatttcctctgagcctgaataaagaactgaagcaggagcctgtcgaagacctgccttgcatgatcactgggactgtcggctccatatcgcaaagcaacctcatgccagacctcaaccttaacgagcaggagtggaaggagctcatcgaggagctgaacaggtcggtgcccgatgaagacatgaaggacctgtttaatgaggacttcgaggagaagaaggacccagagtcttctggctctgccacacaaacccccttggcacaggacattaatattaagacggaattctctccagcagcctttgagcaagaacagttaggctctccacaagtgagggccgggtctgcagggcagacctttctggggccttcctctgcccctgtgagtacagattcccccagcctagggggctcccaaaccttattccacacctctggtcagccccgggcggacaatcccagtccaaacctgatgccggcatcagcccaggcccagaacgcacaaagagcccttgcaggtgtggtattgcccagtcagggcccaggaggggcctcagagctgtcctctgcccaccagctccagcagatcgctgccaagcagaagcgcgagcagatgctccagaacccacagcaggccaccccggcaccagccccgggccagatgtccacatggcagcagacggggccctcccacagttccttagatgtcccttaccccatggagaagcctgccagcccttccagctacaagcaagacttcactaactccaaactgctcatgatgcctagtgtgaataagagttcccctcggcccggaggcccctacctccagcccagccatgtgaacctgctgagtcaccagccaccgagtaacttgaatcagaactccgcgaataaccaggggtctgtgctggactacggcaatacaaaacccctttctcattacaaagcggactgtgggcaaggcagcccggggtctggccagagcaagccagccctgatggcttatcttccccagcagctgtcccatataagtcacgagcagaactccctgtttctgatgaagccaaagccaggaaatatgcctttccgatcactggttccacctggccaggagcagaacccttccagtgtccctgtgcaagcccaggctaccagtgttgggacccagccgcctgccgtgtccgtggccagctcccacaacagctccccctatctcagcagccagcaacaggccgctgtaatgaagcagcatcagttgcttttggaccaacagaaacaaagggagcagcagcaaaagcatttacagcaacagcagttccttcagaggcaacagcaccttctcgcggaacaggagaagcaacagtttcagcgccatctgacccgcccaccaccccagtaccaagacccgacacaaggcagcttcccacagcaggttggacagttcacagggtcctctgctgccgtgcccggcatgaacaccttgggtccatccaactccagctgtcctcgagtgttccctcaggctgggaatctgatgccaatgggccctggacatgcttcagtttcctctctccccacaaactcaggccaacaggaccggggtgtggctcagttccctggctcccaaaacatgcctcagagcagcctctatggcatggcttctggcataacccagatagttgcccagcccccgccacaggccaccaatggacatgcccacattccacggcagaccaacgtgggccagaacacctccgtctcagctgcctatgggcagaactctctgggaagctctggcctctcccagcagcacaataaggggaccctgaaccctggtttaacaaagccaccggtcccaagggtgtcaccagccatgggaggccagaattcctcctggcagcatcagggaatgccgaacctcagtggccagaccccagggaacagcaacgtgagtcccttcactgcagcctccagtttccacatgcagcagcaggcccacctgaaaatgtctagcccgcaattctcccaggcagtgcccaacaggcccatggctcccatgagctcagcagctgccgtggggtccttgctacccccagtgagtgcacagcagaggaccagcgcccctgccccagcaccacccccaacagcccctcagcagggcttgcctggcctgagcccagcagggcctgagctgggggccttcagccagagccctgcctcacagatgggcggtcgggcggggctgcactgcacccaggcctaccctgtgcggaccgcgggccaggagctgccttttgcctatagcgggcagccaggtggcagtgggctctctagtgtggctggacacaccgatctgatcgactccctgctgaagaacaggacttcagaggagtggatgagtgatttggacgacctgttagggtctcagtaatggaaggatttgtagtgtttttagtgttcattcatcctatatttttattctcagattcaaagaaagagcaactactttggaccaaaagcccatggcctggggagctgggcaggtagagcccaagctccaggtgaggcctggccctgggcagggtctgtggctgcgcccctcaggccagcagttgaggtccatcgggctggccccagcccatctgctggcatcagtacctggtgttgggacagcaggatagggttctaaaggtggttttctatccaaacgaccaaaaaaccaacagtaacaccagtgaaaccccacactgtcgggcttataaaaatctgtgccatcatggtgattttatccaagactgctccacttaccccagtgctggggacaagtttctgttgaaactttagatagcagaattatttgcaatttgtagcatagaaaagatttttaaatttttttacaaaaggtttttaaacagattagggtaggtgatggtttaaatcaattaagtggcattggaaacctagggtttccttttgattaagagccttttttgtttctgctctttgtcagctttcaggggagaaggaggccactggaaaattatttccctaagtgcaggctgttgactgcgtatgccaaaaagggacaggaggcatgggatagcaggtctggtgacacagctagggtcttcctagcagctcctcctcctccctcccaaggcccccaggaatcccttcctcccatgtcctggcagcaggaccccaggctacatatggaaggtagagatgtgggggtcctgtatcctggagtattatgtctccccaccttctgcagttttctctgaacatgtatgttgcccatggtgggagcgtggtcactgtgcagttgtgcacagatgtctttcctttaccgttggcctttctgtctgcctctccttcctctctgcagcccaaatggaaaacaattatttactccattggagggaaaggaagagtcttagaattcctaagggaaccttagcataaaggttttggggaaggaggccgtaggccggcccggaggaagcaattccacttggtttgacaacttctgccactcccatgtcagatgacttgcacttcttaaagagattgctttataacactaagacatcctttctaaagattcaagtggacttgactaagctgagggtccacgaaatagaatatgacatgtgagctgtttttggaaaacgaagatggagagagcacttccccgtaacgaaagcaaagtggtaagcacagggtgagacccttttacacagaatggtggagagaaaagagaatgctgaaaagtggctcagatgcagagtgttctgtggagaaactgcagccccacttctgtttccctggagtctcccaatggatcattcaggagtgtcctatgtgagaattgagccaaggaaaatactcatgcaaccagcctgagtcgcggtgaggggacgagaggttgtacacacattggtagttattttgcaccagcagtgcctttctcactgggggtacttggaccctcagatcttcttttctaatagccatttgccaccccaagtggtatgtcggccatttctccttaaaacaccttccctacctttcccatgtactcagtttagctctcaaagaaggggtgaatcataaagccagtgaaaatttcaccctctgagggagttccccaatctgaaggggaagagggtgacctcagcggcttttctcccaaaaatcggctgaaggctggttgtggatccttgttcctctcctgaccccatctggctgctgccccgtctcccacccctgtccccggggctcgctggccctgcactccgccttagtcctggggccggcgacacagtgggggctcctcacttgctgcagtgtcatagcaataaaatgtgattcttggggtccccccagggagctgcccatggctttatttatgaacctggttttcgggagtcaggggaggagatgactttgcttctgtgcacagccccgtcttccaggagccacaactcagaagaaaagggtgctcagacttttgttatacacatttgctttgtgtaaataaatgtttacaattttatatgaaagatggaataagcgctagagcttccaactgtatattttttacttttatagattttaaaactatgatcctttatatgtgtgttttgggggagctatgataagttttatggcaaacggttggtattgttaactttttattgtcatcaaaagttcataaaagtcctattaatccccatattcttctactgcccttaactctggtatacaccaaaaagaaatctttactttccttgttttatcattataaaaataaagtattttgctagtatggaaacaa

SEQ ID NO: 17223 - DNA, 2286 bp, Homo sapiens
  source 1..2286: mol_type = unassigned DNA
cgcggaaaacaatggggccggggcggtggggagaggccgaggcttgaggtaggcagcaagcgccggctgggggtcgggccgagcggggcaggaggaaaacccgccgccgcgcgcgagcccgctccgctgccctcgggggcatggcgcggccgtgaggcggagaggggtagccgcggggagcgaagcccgcagtgccagccggccccgagaggcccggccccgggcccggcccgtgcagcccgcggcccatggtgctgcccacctgccccatggcggagttcgcgctgccgcggcacagcgcggtcatggagcgccttcgccggcgcatcgagctgtgccggcgccaccacagcacctgcgaggcccgccgccccggccccgcgcctggacgccgctgacggccccgagcacggccgcccggccacgcatcttcatgatacagttaagaggaatcttgacagcgccacttcccctcagaatggcgatcaacagaatggctacggggacctctttcctgggcataagaagactcgccgggaggcccctctgggagttgccatctcttccaatggactgcctccagcctcccccctcggtcagtctgacaagccttctggagccgacgccctgcagtccagtgggaagcactctctggggctagactctctcaacaaaaagcgtctggctgactccagccttcacttgaatggaggcagtaaccccagtgagtcatttcctctgagcctgaataaagaactgaagcaggagcctgtcgaagacctgccttgcatgatcactgggactgtcggctccatatcgcaaagcaacctcatgccagacctcaaccttaacgagcaggagtggaaggagctcatcgaggagctgaacaggtcggtgcccgatgaagacatgaaggacctgtttaatgaggacttcgaggagaagaaggacccagagtcttctggctctgccacacaaacccccttggcacaggacattaatattaagacggaattctctccagcagcctttgagcaagaacagttaggctctccacaagtgagggccgggtctgcagggcagacctttctggggccttcctctgcccctgtgagtacagattcccccagcctagggggctcccaaaccttattccacacctctggtcagccccgggcggacaatcccagtccaaacctgatgccggcatcagcccaggcccagaacgcacaaagagcccttgcaggtgtggtattgcccagtcagggcccaggaggggcctcagagctgtcctctgcccaccagctccagcagatcgctgccaagcagaagcgcgagcagatgctccagaacccacagcaggccaccccggcaccagccccgggccagatgtccacatggcagcagacggggccctcccacagttccttagatgtcccttaccccatggagaagcctgccagcccttccagctacaagcaagacttcactaactccaaactgctcatgatgcctagtgtgaataagagttcccctcggcccggaggcccctacctccagcccagccatgtgaacctgctgagtcaccagccaccgagtaacttgaatcagaactccgcgaataaccaggggtctgtgctggactacggcaatacaaaacccctttctcattacaaagcggactgtgggcaaggcagcccggggtctggccagagcaagccagccctgatggcttatcttccccagcagctgtcccatataagtcacgagcagaactccctgtttctgatgaagccaaagccaggaaatatgcctttccgatcactggttccacctggccaggagcagaacccttccagtgtccctgtgcaagcccaggctaccagtgttgggacccagccgcctgccgtgtccgtggccagctcccacaacagctccccctatctcagcagccagcaacaggccgctgtaatgaagcagcatcagttgcttttggaccaacagaaacaaagggagcagcagcaaaagcatttacagcaacagcagttccttcagaggcaacagcaccttctcgcggaacaggagaagcaacagtttcagcgccatctgacccgcccaccaccccagtaccaagacccgacacaaggcagcttcccacagcaggttggacagttcacagctcagggtctgagttgtgcactgcctatgatccactccacagaagttctgatttcttctctgtgcaatggttctgccggcctttctgccgcccagaggtcctggtga

SEQ ID NO: 17224 - DNA, 4534 bp, Homo sapiens
  source 1..4534: mol_type = unassigned DNA
ctctctttctccttctctgtctcactctctctctttctctccctctcctatcggagcacaatgaaagcctgtgtatcgccgtgactccgggcgcgagccagtgtcagcaaagcggctaacaacagacgagaaagagaaaggaaaatacaagctactttttttttccatctataaagcggagcaaatacaggagatagaaccagattgcttattgcgagtccagaccctcagatccactggccggggatggaatgtacaaaagtggacagaaaagtggctggacatgactcggtgcaatttgctggaagtttgtaagtttgaccatcgtttgtaaattactctcggaagagtttgtctctcttgatactgtattagaatagagccggggcgaaaggaaagggaggaaaaattaaaagccaaaagacagtctcccttgatttttgcacattttgaacagtgacttaaacatcttctgaaacagcactgttttgttttgttttggttttttatttaacctgaggaaaagtcaaggctgctggttacatagacatggtagaaatgtgtttctctgcagaaacatccccataaagaattgtcggaaacaactaggtgagggggagtcctctctattaatacctctctcaataccttttgctgtgtgtttctgtctcttgctggacaatccctgaattcttgatctaacccccagatcgtgtgtttacaaagtacctagtggctcttgtcagcttggtggaggaaaaaaaatccaccaactctgtccaacttctccagagctgtcaaatgcaattagagtaagttaatcagggtttgtttccaacttatcctccccccagttggtttctattctttctccccaccctctttttactaactcccctcccccacaacttctccacggctcccccacaacctctgaagacctctattcatgtggccctgaacactgagctcacattgtcaaaaacagacttgcctgcaatagccagcagtagcctctttccacctcaccatcccagaggcagcaatcattgtgtccggtaagatgggggacacagcgcccccgcaggcccccgcaggagggctagggggggcctctggggcggggctccttggagggggctcagtcaccccgagagtgcacagtgctatcgtggagcgcctccgggctcggatcgctgtctgccgccaacaccacctgagctgtgaaggacgatatgaacgaggtagggccgagagctcagaccgggaaagagaaagcaccttgcagctcctgagccttgtacagcatggccagggggcaaggaaagctggcaaacacaccaaggccaccgccactgctgccaccactacagcccctccaccgccccctgctgcccctcctgcggcctcccaagcagcagcaacagcagccccaccgcccccaccagactatcaccatcaccaccagcagcacctgctgaacagtagcaataatggtggcagtggtgggataaacggagagcagcagccgcccgcttcaaccccaggggaccagaggaactcagccctgattgcgctccagggttccttgaaaagaaaacaggtagttaacctatctcctgccaacagcaagcgacccaatggctttgtggacaactcatttcttgatatcaaaagaattcgtgttggggagaatctctctgcaggacaaggtggcctccaaataaacaatggacaaagtcagattatgtcagggaccttgcctatgagccaagcacccctgcgaaagactaacactctgccatcccatacacattctcctggcaatggcctgtttaacatgggcttaaaggaggtaaagaaggagccaggagagactctgtcttgcagtaagcacatggatggccaaatgacccaagagaatatttttcctaataggtacggagacgaccctggagaacaactgatggatcctgagctgcaggaactgttcaatgaactgaccaacatatctgtgcctcccatgagtgaccttgaactggagaacatgatcaatgccaccataaagcaggatgacccatttaacattgacttgggtcagcaaagccagaggagcacacctaggccctccttacccatggagaaaatagtgatcaaaagtgaatactcaccgggcttgactcagggcccctcaggctctcctcagctgaggcccccatcagctggccccgcattctccatggccaactctgccctctccacttcgtctccaatcccttcagtccctcagagccaggctcagcctcagacaggctccggagcaagccgggccttgccaagctggcaggaagtatcccatgcccagcagctcaaacagatagctgctaatcgtcagcagcatgcccggatgcagcagcaccagcagcagcaccagcctaccaactggtcagccttgccctcttctgctggaccatcaccaggtccatttgggcaggagaaaatccccagcccttcttttggtcagcagacattcagcccacagagctcccccatgcctggggtagctggcggcagcggccagtcgaaagtaatggctaactacatgtacaaggccggcccctcagcccagggtgggcacctagatgtcctcatgcagcaaaagcctcaggatctcagtcgaagttttattaacaacccgcacccagccatggagccccgtcagggcaacaccaagcctttgtttcattttaactcagatcaagcgaaccagcagatgccttctgttttgccttcccagaacaagccttctctcctacactacacccaacagcaacagcagcaacagcagcagcagcagcagcagcagcagcagcagcagcagcaacagcagcagcagcagcaacagcaacagcaacagcaacagcagagttcaatttcagctcaacaacagcaacagcagcagagctcaatttcagcccaacagcagcagcagcagcaacaacagcagcagcagcagcaacaacaacagcaacaacagcagcagcagcagcagcaacaaccatcttctcagcctgcccaatctctaccaagccagcctttgctaaggtcacctttgccacttcagcaaaagctcctacttcagcaaatgcagaatcagcccattgcaggaatgggataccaagtctcccaacaacagagacaggatcaacactctgtggtaggccagaacacaggccccagtccaagtcctaacccctgctcaaatccaaacactggaagtggttacatgaactcccagcaatcactgttgaatcagcaattgatgggaaagaagcagactctacagaggcagatcatggagcagaaacagcaacttcttctccagcagcagatgctggctgacgcggagaaaattgctccacaagatcagataaaccgacatttgtcaaggccacctccagattataaagaccaaagaagaaatgtgggcaatatgcaaccaactgctcagtattctggtggctcatccacaataagcttaaactctaaccaggctttggcaaacccagtttcaacacacaccattttaactcccaattccagcctcctgtctacttctcacgggacaagaatgccatcattatctacagcagttcagaatatggggatgtatggaaatctgccttgtaatcaacctaacacatacagtgtcacttcaggaatgaatcaattgacccaacagagaaacccaaagcaattgttagcaaatcaaaacaaccctatgatgccacggccacctaccttagggccaagtaataataacaatgtagccacttttggagctggatctgttggtaattcacaacaattgagaccaaatttaacccatagtatggcaagcatgccaccacagagaacatcaaacgtaatgatcacatccaacacaactgcaccaaactgggcctctcaagaaggaacaagcaaacagcaagaagccctgacgtctgcaggagtccgcttccccacaggtacacctgcagcctataccccaaatcagtcactgcaacaggcagtaggtagccagcaattttcccagagggcagtggctcctcctaaccagttaacaccagcagtgcaaatgagacccatgaaccaaatgagccaaacactaaatgggcaaaccatgggtcccctcaggggtctgaatctcagacccaatcagctaagcacacagattttgcctaatttgaatcagtcaggaacagggttgaatcagtcgaggacgggcatcaaccagccaccatccctgacgcccagcaattttccttcacccaaccaaagttccagggcttttcaaggaactgaccacagcagtgacttagcttttgacttcctcagccaacaaaatgataacatgggccctgccctaaacagtgatgctgatttcattgattctttattgaagacagagcctggtaatgatgactggatgaaagacatcaatcttgatgaaatcttggggaacaattcctaa

SEQ ID NO: 17225 - DNA, 7106 bp, Homo sapiens
  source 1..7106: mol_type = unassigned DNA
ctccctctcctatcggagcacaatgaaagcctgtgtatcgccgtgactccgggcgcgagccagtgtcagcaaagcggctaacaacagacgagaaagagaaaggaaaatacaagctactttttttttccatctataaagcggagcaaatacaggagatagaaccagattgcttattgcgagtccagaccctcagatccactggccggggatggaatgtacaaaagtggacagaaaagtggctggacatgactcggtgcaatttgctggaagtttgtaagtttgaccatcgtttgtaaattactctcggaagagtttgtctctcttgatactgtattagaatagagccgggggtgaggaatagaaacgtaagcgggaaagaaaaaaatgtgttgaaggatctctctcagtggctagcgacttaagattgcttttcatttaaggctaggaaaccttagagggagtgaggattttaccggtgattggattagctgaagaaaaaagcatggtccaaaagtccaattactgacattgttaacagttgaaaagctgtctccctcttttgggagaagacaacatcctacagtaccccaaagaggagaaaacaccggagcgaaaggaaagggaggaaaaattaaaagccaaaagacagtctcccttgatttttgcacattttgaacagtgacttaaacatcttctgaaacagcactgttttgttttgttttggttttttatttaacctgaggaaaagtcaaggctgctggttacatagacatggtagaaatgtgtttctctgcagaaacatccccataaagaattgtcggaaacaactaggtgagggggagtcctctctattaatacctctctcaataccttttgctgtgtgtttctgtctcttgctggacaatccctgaattcttgatctaacccccagatcgtgtgtttacaaagtacctagtggctcttgtcagcttggtggaggaaaaaaaatccaccaactctgtccaacttctccagagctgtcaaatgcaattagagtaagttaatcagggtttgtttccaacttatcctccccccagttggtttctattctttctccccaccctctttttactaactcccctcccccacaacttctccacggctcccccacaacctctgaagacctctattcatgtggccctgaacactgagctcacattgtcaaaaacagacttgcctgcaatagccagcagtagcctctttccacctcaccatcccagaggcagcaatcattgtgtccggtaagatgggggacacagcgcccccgcaggcccccgcaggagggctagggggggcctctggggcggggctccttggagggggctcagtcaccccgagagtgcacagtgctatcgtggagcgcctccgggctcggatcgctgtctgccgccaacaccacctgagctgtgaaggacgatatgaacgaggtagggccgagagctcagaccgggaaagagaaagcaccttgcagctcctgagccttgtacagcatggccagggggcaaggaaagctggcaaacacaccaaggccaccgccactgctgccaccactacagcccctccaccgccccctgctgcccctcctgcggcctcccaagcagcagcaacagcagccccaccgcccccaccagactatcaccatcaccaccagcagcacctgctgaacagtagcaataatggtggcagtggtgggataaacggagagcagcagccgcccgcttcaaccccaggggaccagaggaactcagccctgattgcgctccagggttccttgaaaagaaaacaggtagttaacctatctcctgccaacagcaagcgacccaatggctttgtggacaactcatttcttgatatcaaaagaattcgtgttggggagaatctctctgcaggacaaggtggcctccaaataaacaatggacaaagtcagattatgtcagggaccttgcctatgagccaagcacccctgcgaaagactaacactctgccatcccatacacattctcctggcaatggcctgtttaacatgggcttaaaggaggtaaagaaggagccaggagagactctgtcttgcagtaagcacatggatggccaaatgacccaagagaatatttttcctaataggtacggagacgaccctggagaacaactgatggatcctgagctgcaggaactgttcaatgaactgaccaacatatctgtgcctcccatgagtgaccttgaactggagaacatgatcaatgccaccataaagcaggatgacccatttaacattgacttgggtcagcaaagccagaggagcacacctaggccctccttacccatggagaaaatagtgatcaaaagtgaatactcaccgggcttgactcagggcccctcaggctctcctcagctgaggcccccatcagctggccccgcattctccatggccaactctgccctctccacttcgtctccaatcccttcagtccctcagagccaggctcagcctcagacaggctccggagcaagccgggccttgccaagctggcaggaagtatcccatgcccagcagctcaaacagatagctgctaatcgtcagcagcatgcccggatgcagcagcaccagcagcagcaccagcctaccaactggtcagccttgccctcttctgctggaccatcaccaggtccatttgggcaggagaaaatccccagcccttcttttggtcagcagacattcagcccacagagctcccccatgcctggggtagctggcggcagcggccagtcgaaagtaatggctaactacatgtacaaggccggcccctcagcccagggtgggcacctagatgtcctcatgcagcaaaagcctcaggatctcagtcgaagttttattaacaacccgcacccagccatggagccccgtcagggcaacaccaagcctttgtttcattttaactcagatcaagcgaaccagcagatgccttctgttttgccttcccagaacaagccttctctcctacactacacccaacagcaacagcagcaacagcagcagcagcagcagcagcagcagcagcagcagcagcaacagcagcagcagcagcaacagcaacagcaacagcaacagcagagttcaatttcagctcaacaacagcaacagcagcagagctcaatttcagcccaacagcagcagcagcagcaacaacagcagcagcagcagcaacaacaacagcaacaacagcagcagcagcagcagcaacaaccatcttctcagcctgcccaatctctaccaagccagcctttgctaaggtcacctttgccacttcagcaaaagctcctacttcagcaaatgcagaatcagcccattgcaggaatgggataccaagtctcccaacaacagagacaggatcaacactctgtggtaggccagaacacaggccccagtccaagtcctaacccctgctcaaatccaaacactggaagtggttacatgaactcccagcaatcactgttgaatcagcaattgatgggaaagaagcagactctacagaggcagatcatggagcagaaacagcaacttcttctccagcagcagatgctggctgacgcggagaaaattgctccacaagatcagataaaccgacatttgtcaaggccacctccagattataaagaccaaagaagaaatgtgggcaatatgcaaccaactgctcagtattctggtggctcatccacaataagcttaaactctaaccaggctttggcaaacccagtttcaacacacaccattttaactcccaattccagcctcctgtctacttctcacgggacaagaatgccatcattatctacagcagttcagaatatggggatgtatggaaatctgccttgtaatcaacctaacacatacagtgtcacttcaggaatgaatcaattgacccaacagagaaacccaaagcaattgttagcaaatcaaaacaaccctatgatgccacggccacctaccttagggccaagtaataataacaatgtagccacttttggagctggatctgttggtaattcacaacaattgagaccaaatttaacccatagtatggcaagcatgccaccacagagaacatcaaacgtaatgatcacatccaacacaactgcaccaaactgggcctctcaagaaggaacaagcaaacagcaagaagccctgacgtctgcaggagtccgcttccccacaggtacacctgcagcctataccccaaatcagtcactgcaacaggcagtaggtagccagcaattttcccagagggcagtggctcctcctaaccagttaacaccagcagtgcaaatgagacccatgaaccaaatgagccaaacactaaatgggcaaaccatgggtcccctcaggggtctgaatctcagacccaatcagctaagcacacagattttgcctaatttgaatcagtcaggaacagggttgaatcagtcgaggacgggcatcaaccagccaccatccctgacgcccagcaattttccttcacccaaccaaagttccagggcttttcaaggaactgaccacagcagtgacttagcttttgacttcctcagccaacaaaatgataacatgggccctgccctaaacagtgatgctgatttcattgattctttattgaagacagagcctggtaatgatgactggatgaaagacatcaatcttgatgaaatcttggggaacaattcctaaagaagaaagggaagacaatttacaaactccaagcactaaaaggcagtatattacagaaactctgtagaggctgaactgttgatgttcaggtggactacatgaagataacatgcttaaaaatggaaagcagaaagtaactgcagtgatgaacattttggtccaaattcttgttttaaatcttacacctgaaagtaaaatattgggatcacttttccctgtctaaactccaggatacagtatccaatttatccaaacagaactgtggtgtcaatgtgtaattaattgtgtaaaatagccttcccaagtttctttttccctggaaaataaaaaaggtaatagaacttgtagtttatttaaaccccatgtcatgaggaggtactagttccaagcaacaaactccttaatttgctctaatagataggtatggtttaatctttccattgtgtcttttcatttaattttcctgaagcttgcaggatagattgaaatgttataggtttgtttggagtaaccaaacagtatgcaaattaagaaaaagccagagaacctagaaaacatccagtggattacagaatttcttccccatattcactcctcacttttacaattttcccacaatcctctacttcagtgggatgctgtgtctagtgattaaacaaaaatatagagctgtgcaatttgattttggcttccacaacgaatatctgaatccattccaaatgaaattttagatataacaaagacttgtcctaatcatactgaaatattggtgcacacctctctgcattagatttcacttttttaaaaaacccagtggacattgctataaataagatttatttggctacaaataacctgggatgttgcttattatgattgatgcctgctggtttgttcccaagctgagtgaaattgaacctcgtcctccctactcattttgatgactgaggctggtttataagaaaaggaagtttggagaagaaaaccgagattagaaaatatcatgttttggttggagataagaaccagggatggcaagtaccagtgtgtacaaatgtatttcacggagtttgaaggaacgcataatcaagagggaaaacaatttgtccttcattggacgtattatttggatttgggtgagcaacaaaatggaatgtggtctgttaggagcattctgtttgttcttttgtccctgatgtgatgaatcattgccacatgctagatggactcttcatatccaggttttgtccctcagggctgagcactgtattaaagagtttttgttgagtcatttaaccttagtgtccacatccagatcagctgtaaaatggggaagacgtgtgctgatttggaatgaatgcaaaatatcactatcattttcctaattacagaggagcaaaggttatcttcagccctttcagttctatgctcacatattcaaatatcaaatgtaatttagctgaagttatttaataatcaagtctttcaatatctgttcaaagaaaaagaacacactttgaaaattctgcaaagctgtctcccagtctttaaaatgtctggaagcactctccttctttacaataccaacatcactggcccagaatcttccctgtgctagtttgtaaatataaataaattacttgttttgtaaacttttgtaaagaatattttggtagaaatacttcaaacatattctttgggttatatttatacatatgtgaaataaatatactatcaaaaggttatattttatacaaaaagtaaattgctaccttttgtatgctaatatgcaaagttttgtataatatgatggtttatttttagctctacacttaaaccataggtggttgagtgggaacttttgaaaactatcaagaggcttgttagacaaatttatattctgaaacctcaataagaaagcattccaggtttcaatccttgttttttgtcctgctcccaaattcttttttaaacccatagttcttgtgtcttatttgattcttctgctgtgcacattgtattggtccttgttgcatgtagtctactgtgtgttttccgattttataaggcagcatttctccatacaaaaagaaaaaaaatgatgtacatataaacgcttttgttgtatggctcctccatgttactgtatatatctgccagcacttcccagttacactcctgtgagtcagcttatttttaccctaacataaatagtatgttttgtagtagttatcaaatttaagagataaagcaatcagaatgtttggattttcttctatcttaatgtgaatttcataattaatgtctatttattcagctattcattaaaatacaggattctttgggaaaa

SEQ ID NO: 17226 - DNA, 1629 bp, Homo sapiens
  source 1..1629: mol_type = unassigned DNA
ctacaagagactgtgaaaaggaagttggaaggagctcgatcaccacttaatggagaccagcagaatggtgcttgtgatgggaatttttctccgactagcaaacgaattcgaaaggacatttctgcggggatggaagccatcaacaatttgcccagtaacatgccactgccttcagcttctcctcttcaccaacttgacctgaaaccttctttgcccttgcagaacagtggaactcacactcctgggcttctagaagatctaagtaagaatggtaggctccctgagattaaacttcctgtcaacggttgcagtgacctggaggatagcttcaccatcttgcagagcaaagacctcaaacaagaacctctcgatgaccctacttgcatagacacatcagaaacatctctttcaaatcagaacaagctgttctcagacattaatctgaatgatcaggagtggcaagaattaatagatgaattggccaacacggttcctgaggatgacatacaggacctgttcaacgaagactttgaagagaagaaggagccagaattctcgcagccagcaactgagacccctctctcccaggagagtgcgagcgtgaagagcgacccctctcactctcccttcgcacatgtctccatgggatctccccaggcgaggccttcttcttctggtcctcccttttctactgtctccacggccactagtttaccttctgttgccagcactcccgcagctccaaaccctgcaagctcaccagcaaactgtgctgtccagtcccctcaaactccaaaccaagcccacactccaggccaagctccacctcggcctggaaatggttatctcctgaatccggcagcagtgacagtggccggttcagcgtcagggcctgtggctgtgcccagctctgacatgtctccagcagaacagctcaaacagatggctgcacagcagcaacaaagggccaaactcatgcagcagaaacagcaacagcaacagcagcagcagcagcagcagcagcagcagcagcagcagcagcagcagcagcagcagcaacagcactcaaatcagacttcaaattggtctcccttaggacctccctctagtccatatggagcagcttttactgcagaaaaaccaaatagcccaatgatgtacccccaagcctttaacaaccaaaaccctatagtgcctccaatggcaaacaacctgcagaagacaacaatgaataactacctccctcagaatcacatgaatatgatcaatcagcagccaaataacttgggtacaaactccttaaacaaacagcacaatattctgacttatggcaacactaaacccctgacccacttcaatgcagacctgagtcagaggatgacaccaccagtggccaaccccaacaaaaaccccttgatgccgtatatccagcagcagcaacagcagcagcaacagcaacagcagcagcagcagcagcagcagccgccacctccacagctccaggcccccagggcacacctgagcgaagaccagaaacgcctgcttctcatgaagcagaaaggagtgatgaatcagcccatggcttacgctgcacttccatcccacggtcaggagcagcaaccagtcggg

SEQ ID NO: 17227 - DNA, 831 bp, Homo sapiens
  source 1..831: mol_type = unassigned DNA
atgtctccagcagaacagctcaaacagatggctgcacagcagcaacaaagggccaaactcatgcagcagaaacagcaacagcaacagcagcagcagcagcagcagcagcaacagcactcaaatcagacttcaaattggtctcccttaggacctccctctagtccatatggagcagcttttactgcagaaaaaccaaatagcccaatgatgtacccccaagcctttaacaaccaaaaccctatagtgcctccaatggcaaacaacctgcagaagacaacaatgaataactacctccctcagaatcacatgaatatgatcaatcagcagccaaataacttgggtacaaactccttaaacaaacagcacaatattctgacttatggcaacactaaacccctgacccacttcaatgcagacctgagtcagaggatgacaccaccagtggccaaccccaacaaaaaccccttgatgccgtatatccagcagcagcaacagcagcagcaacagcaacagcagcagcagcagcagcagcagccgccacctccacagctccaggcccccagggcacacctgagcgaagaccagaaacgcctgcttctcatgaagcagaaaggagtgatgaatcagcccatggcttacgctgcacttccatcccacggtcaggtaagtgtgaaagtgacacactcttcgagcagttcttgtggtgcatttgactgtcgatgtgtgatgttctacaagtccactgtagtggggtctaattgcctgcagaaaacctctttacatcctcaggtagtggccaggtttggagtgttctttttccatttctcctaa

SEQ ID NO: 17228 - DNA, 4332 bp, Homo sapiens
  source 1..4332: mol_type = unassigned DNA
actccgctggcatggaggaggaggaggaggtggaggagcgagaggaggaggaggaggcggcggcggcggcggcggcgagcagttgatcattgtgatggtggcaggagcagcggcggcagcggcagcccagccgagcgttaggtgctgctctctgcgcggcgttttgcaaaggacttcaccgatctacttttgcagtcgcctcggactgtccatgtgtttacttcccccagcccgaggattcgatatctaggttcctgtgaaatgcaactgagcagccaaagtactttgagaacacggggcggcataaacaccaaaacttttttgtggaaggaaaatgcaataagcaagcttgccgttttccgatgcggtgtggagtgagtgtgtgtcgcgcgtgtccgcactggaggcatatgcttgtgtgtgtacatggggtgtgtttttcggtatgtagggagaaaatgcttgccaaccaccggaaatctcctggaatttattagaaaataatggattataaaaagaaggcaagcaaggagcggatctccccttgagttgcaacccgatttgctgctggctcagtttgttgtgattctttttgttgataggtgtctgatggtattccgataacgttccccccttttcttccccttgagcttttacagtttaaaaaaaggaaacaaaaaccaccccaaaatctccccccccgtttttttcgccccgtcgggatcgccgtttccatccatgtgcttgcgtctcccccgcgttccacttaaactattttaatccttggacccaaggaggaggctgataggggggtggataaaaaaagttcttccaaaatagtgtgcccggggagcaggatgggggatttcgcagcccccgctgctgccgcgaatggcagtagtatttgcatcaacagtagcctgaacagcagcctcggcggggccgggatcggtgtgaataatactcccaatagtactcccgctgctccgagtagcaatcacccggcagccggtggatgcggcggctccgggggccccggcggcggttcggcggccgttcccaagcacagcaccgtggtggagcggctccgccagcgcatcgagggctgccgtcggcaccacgtcaactgcgagaacaggtaccagcaggctcaggtggagcagctggagctggagcgccgggacaccgtgagcctctaccagcggaccctggagcagagggccaagaaatcgggcgccggcaccggcaaacagcagcacccgagcaaaccccagcaagatgcggaggctgcctcggcggagcagaggaaccacacgctgatcatgctacaagagactgtgaaaaggaagttggaaggagctcgatcaccacttaatggagaccagcagaatggtgcttgtgatgggaatttttctccgactagcaaacgaattcgaaaggacatttctgcggggatggaagccatcaacaatttgcccagtaacatgccactgccttcagcttctcctcttcaccaacttgacctgaaaccttctttgcccttgcagaacagtggaactcacactcctgggcttctagaagatctaagtaagaatggtaggctccctgagattaaacttcctgtcaacggttgcagtgacctggaggatagcttcaccatcttgcagagcaaagacctcaaacaagaacctctcgatgaccctacttgcatagacacatcagaaacatctctttcaaatcagaacaagctgttctcagacattaatctgaatgatcaggagtggcaagaattaatagatgaattggccaacacggttcctgaggatgacatacaggacctgttcaacgaagactttgaagagaagaaggagccagaattctcgcagccagcaactgagacccctctctcccaggagagtgcgagcgtgaagagcgacccctctcactctcccttcgcacatgtctccatgggatctccccaggcgaggccttcttcttctggtcctcccttttctactgtctccacggccactagtttaccttctgttgccagcactcccgcagctccaaaccctgcaagctcaccagcaaactgtgctgtccagtcccctcaaactccaaaccaagcccacactccaggccaagctccacctcggcctggaaatggttatctcctgaatccggcagcagtgacagtggccggttcagcgtcagggcctgtggctgtgcccagctctgacatgtctccagcagaacagctcaaacagatggctgcacagcagcaacaaagggccaaactcatgcagcagaaacagcaacagcaacagcagcagcagcagcagcagcagcagcagcagcagcagcagcagcagcagcagcagcaacagcactcaaatcagacttcaaattggtctcccttaggacctccctctagtccatatggagcagcttttactgcagaaaaaccaaatagcccaatgatgtacccccaagcctttaacaaccaaaaccctatagtgcctccaatggcaaacaacctgcagaagacaacaatgaataactacctccctcagaatcacatgaatatgatcaatcagcagccaaataacttgggtacaaactccttaaacaaacagcacaatattctgacttatggcaacactaaacccctgacccacttcaatgcagacctgagtcagaggatgacaccaccagtggccaaccccaacaaaaaccccttgatgccgtatatccagcagcagcaacagcagcagcaacagcaacagcagcagcagcagcagcagcagccgccacctccacagctccaggcccccagggcacacctgagcgaagaccagaaacgcctgcttctcatgaagcagaaaggagtgatgaatcagcccatggcttacgctgcacttccatcccacggtcaggagcagcatccagttggacttccccgaaccacaggccccatgcagtcctccgtgcccccaggctcaggtggcatggtctcaggagccagtcccgcaggccccggcttcctgggcagccagccccaagcagccatcatgaagcagatgctcattgatcagcgggcccagttgatagagcagcagaagcaacagttcctgcgggagcaaaggcagcagcagcagcagcagcagcagcagattttggcggaacagcagttgcagcaatcacatctaccccggcagcacctccagccacagcggaatccatacccagtgcagcaggtcaatcagtttcaaggttctccccaggatatagcagccgtaagaagccaagcagccctccagagcatgcgaacgtcacggctgatggcacagaacgcaggcatgatgggaataggaccctcccagaaccctgggacgatggccaccgcagctgcgcagtcggagatgggactggccccttatagcaccacgcctaccagccaaccaggaatgtacaatatgagcacaggcatgacccaaatgttgcagcatccaaaccaaagtggcatgagcatcacacataaccaagcccagggaccgaggcaacctgcctctgggcagggggttggaatggtgagtggctttggtcagagcatgctggtgaactcagccattacccagcaacatccacagatgaaagggccagtaggccaggccttgcctaggccccaagcccctccaaggctgcagagccttatgggaacagtccagcaaggagcacaaagctggcaacagaggagcttgcagggcatgcctgggaggactagtggagaattgggaccattcaacaatggcgccagctaccctcttcaagctgggcagccgagactgaccaagcagcacttcccacagggactgagccagtcagtcgtggatgctaacacgggcacagtgaggaccctcaacccagctgccatgggtcggcagatgatgccatcgctcccggggcagcaaggcaccagccaggcgaggccaatggtcatgtctggcctgagccagggagtcccaggcatgccagcgttcagccagcccccagcacagcagcagatacccagtggcagctttgctccaagcagccagagccaagcctatgagcggaatgcccctcaggacgtgtcatacaattacagtggcgacggagctgggggttccttccctggcctcccggacggtgcagaccttgtggactccatcatcaaaggcgggccaggggacgagtggatgcaggagcttgatgaattgtttggtaacccctaatcaagagaggccccaagatccacaactcgagtggttaaagcttaaaaagtgaaaaaga

SEQ ID NO: 17229 - DNA, 1381 bp, Homo sapiens
  source 1..1381: mol_type = unassigned DNA
gagcagcatccagttggacttccccgaaccacaggccccatgcagtcctccgtgcccccaggctcaggtggcatggtctcaggagccagtcccgcaggccccggcttcctgggcagccagccccaagcagccatcatgaagcagatgctcattgatcagcgggcccagttgatagagcagcagaagcaacagttcctgcgggagcaaaggcagcagcagcagcagcagcagcagcagattttggcggaacagcagttgcagcaatcacatctaccccggcagcacctccagccacagcggaatccatacccagtgcagcaggtcaatcagtttcaaggttctccccaggatatagcagccgtaagaagccaagcagccctccagagcatgcgaacgtcacggctgatggcacagaacgcaggcatgatgggaataggaccctcccagaaccctgggacgatggccaccgcagctgcgcagtcggagatgggactggccccttatagcaccacgcctaccagccaaccaggaatgtacaatatgagcacaggcatgacccaaatgttgcagcatccaaaccaaagtggcatgagcatcacacataaccaagcccagggaccgaggcaacctgcctctgggcagggggttggaatggtgagtggctttggtcagagcatgctggtgaactcagccattacccagcaacatccacagatgaaagggccagtaggccaggccttgcctaggccccaagcccctccaaggctgcagagccttatgggaacagtccagcaaggagcacaaagctggcaacagaggagcttgcagggcatgcctgggaggactagtggagaattgggaccattcaacaatggcgccagctaccctcttcaagctgggcagccgagactgaccaagcagcacttcccacagggactgagccagtcagtcgtggatgctaacacgggcacagtgaggaccctcaacccagctgccatgggtcggcagatgatgccatcgctcccggggcagcaaggcaccagccaggcgaggccaatggtcatgtctggcctgagccagggagtcccaggcatgccagcgttcagccagcccccagcacagcagcagatacccagtggcagctttgctccaagcagccagagccaagcctatgagcggaatgcccctcaggacgtgtcatacaattacagtggcgacggagctgggggttccttccctggcctcccggacggtgcagaccttgtggactccatcatcaaaggcgggccaggggacgagtggatgcaggagcttgatgaattgtttggtaacccctaatcaagagaggccccaagatccacaactcgagtggttaaagctt

SEQ ID NO: 17230 - DNA, 4607 bp, Homo sapiens
  source 1..4607: mol_type = unassigned DNA
ccctgtgtctaggtcgtttgggaaacgccttggagagtcaagaataaatttgcaggtcaaacaatggatgactggaaaagtcggcttgtaatcaagagcatgcttccccatttcgccatggtgggaaatcgtcaggagcccagaaagctccaggaatcgggaaagaagccctcgtggatggaggaagaagatttatcttttctctacaagagcagcccaggaagaaagcatcagggaactgttaagaggagacaagaagaagaccacttccagtttccagacatggctgatgggggctaccctaataaaattaagaggccttgccttgaagatgtcacccttgcaatgggcccaggtgctcatcctagtactgcttgtgcagaactgcaggtccctccattgacaataaatcctagccctgcggctatgggagtggctggccagtcattactgctggagaataaccctatgaatggcaacatcatgggctcaccatttgtagtaccacagactacagaagtgggactgaaagggcccactgttccttactatgagaaaatcaacagcgtgccggctgtagaccaggagcttcaagagctgctagaggagctcaccaaaattcaagacccttctccaaatgagctagatcttgagaagatactggggacgaagccagaagagccactggttttagatcatccccaggcaaccctaagcacaactcccaagccttcggttcagatgtcacacttggagagcctggcttccagcaaggagtttgcttctagttgcagccaagttactggcatgtcacttcagatcccatcctcctccacagggatcagctattcgattccttccaccagtaagcagatagtgtcaccgagttcttcaatggcacagtccaagagccaggtccaggccatgctccctgtcgctctgccccccttaccagtgcctcagtggcatcacgcccaccagctgaaggcgttggcagccagcaagcaggggtctgctacaaagcagcaagggcccacccccagttggtctggtctgcctcctccaggactctctccaccttaccgcccagtgccatcaccacacccaccaccgctgccactgccaccaccaccacccccattcagcccccagagcctcatggtgtcctgcatgtcgtccaataccttgtcgggtagcactctccgaggctctcccaatgccttactgtcaagcatgacgtccagcagcaatgctgccctggggcccgccatgccctatgctcctgagaagctccccagccctgctctcactcaacagccgcagttcggccctcagagctccattcttgccaacctcatgtcctctaccatcaaaacccctcaaggacacctgatgtctgctctgcctgccagcaaccctgggccgtccccaccctatcgcccagagaagctctctagcccaggcttgccacagcagtccttcaccccacagtgttccctgatccgaagcctcactcccaccagtaatcttctaagccagcaacagcagcagcagcagcagcagcagcaagcaaatgtgatctttaagcccataagcagcaactcatccaaaaccctgagcatgatcatgcagcaggggatggcaagctccagcccaggagccacggagccatttacttttggcaacaccaagcccttgtcccattttgtttctgagccgggtccccagaagatgccctccatgcctaccacctctaggcagccttccctgctccactacctgcagcagccgacaccaacgcaggcctcctcagccactgcctcctccacggccactgccaccttgcagctgcagcagcagcagcagcaacagcagcagcagcctgaccattcttcattccttctgcagcagatgatgcagcaaccccagcgttttcagcgatcagtggcctcagattccatgcctgctctgcccagacagggctgttgccatctgtttgcatggacttctgcagctagctcggtgaagccccagcatcaacacgggaactctttcactagcaggcaagatcctcagcctggagacgtgtcaccgtctaacattactcatgtagacaaagcctgcaagcttggggaagccaggcacccccaggtcagcctcgggcgacagcccccgtcctgccaggccctggggagtgagtccttcctgcccggcagctcctttgctcatgagctggcccgagtcacctcctcgtacagcacctcagaggcagcgccctggggcagctgggatccgaaggcctggaggcaggtgcccgctccactactgcctagctgcgacgccacagcaagaggaacagagatcaggtcttatggcaatgacccctgaacggcagaatgcatatatctcccaacagatgagtccatttgaagccgtccaagaacaagtcacctccaagtgtagccggatcaaggcaagccccccatctagcaagcacttgatgccacccagaactgggcttcttcagaacaatctgagtccaggaatgatcccactcaccaggcaccagagctgcgagggcatgggagtgatctcaccaactctggggaagcggcaaggaattttcacctccagcccccagtgtcccatcctctcacactcaggccagactcccctgggcagacttgactctgtctgccagcatatgcagagccccaaggccaccccaccagaagtgcccctgcctgggttctgtcccagctccctgggcacccagtccttgagtccccaccagctcagacggcctagtgtgccaagaatgcccactgcgttcaacaatgctgcatgggtcacagcggcagcagctgtgaccacagcagtttcggggaaaacacccctcagccaagtggataatagcgttcagcagcactcaccttctggccaggcctgccttcagaggccatctgattgggaggcacaagtgcccgctgcgatgggaacacaagtgcccctggccaacaaccccagcttcagcctgctgggcagccagagcctcaggcagagcccggtacagggcccggtgcctgtagcaaacaccaccaagttcctccagcagggtatggccagctttagtcccctgagccccatacagggcatcgagccaccaagctatgtggctgctgctgccaccgctgctgctgcttctgccgttgctgccagccagttcccaggtccgttcgacagaacggatattccccctgagctgccacctgccgactttttgcgccagccccaacccccactaaatgatctgatttcgtcacctgactgcaatgaggtagatttcattgaagctctcttgaaaggctcctgtgtgagcccagatgaagactgggtgtgcaacttgaggctgatcgacgacattttggaacagcatgctgctgctcaaaatgccacagcccagaattctgggcaagtcacccaggatgctggggcactttaaatctgagcaggatgcccatagaaacccccatggtgacatcactctaggaagtggtgtcgatccatacccgcagttgtctcccgttacaatttgagtggtgttgtcagcccatgcttatccctctctctacctgtgacaaaatggaaagctggtgatttttcaagctacgtgtacatatttgaaaattttgtaaatggttttcctaaacattaatgacagaagtatttatacttcattttgtgactttgtaaataaagcgacggcttttgtttcagtagagttgtgtttactatgcattgttttgtgtttattatacaatgttacaaatatgcagaccgtgttgtttgctccagtgataccttgttaagctaggtggctgagtcgcttatggttttaatgcaatgagcaatgtggatatgaccaagagttgttgtgcaagttgacaaatgccaaatagaaaaccacttggccatttatttctatgttcactaaaaatcctattgccttgtgtgattcttaatctcttttgcgaacctttcagtctccgctagctctttcctaatgagctttacagcagaagctgttttatcgttaagtgccccacagagacactttaccaggaggctgggagagttctccagatttgggagaggcgcagagacagtgtgtgagccgagccctgtctcagcaatccacctggaggagctagagtatcctcctccctttaccattcagaccgagagaaaaagcccagcttgtgtgcaccctcgtggggttaaggcgagctgttcctggtttaaagcctttcagtatttgttttgatgtaaggctctgtggtttgggggggaacatctgtaaacattattagttgatttggggtttgtctttgatggtttctatctgcaattatcgtcatgtatatttaagtgtctgttatagaaaacccacacccactgtcctgtaaacttttctcagtgtccagactttctgtaatcacattttaattgccacctcgtatttcacctctacatttgaaatctggcgtctgtttcaagccagtgtgttttttcttcgttctgtaataaacagccaggagaaaagtgcc

SEQ ID NO: 17231 - DNA, 591 bp, Homo sapiens
  source 1..591: mol_type = unassigned DNA
aatcaagcctgggcaatggcgggcgcccctcccccagcctcgctgctgccttgcagtttgatctgactgctgtgctagcaatcagcgagactccgtgggcgtaggaccctctgagccagccctgtgtctaggtcgtttgggaaacgccttggagagtcaagaataaatttgcaggtcaaacaatggatgactggaaaagtcggcttgtaatcaagagcatgcttccccatttcgccatggtgggaaatcgtcaggagcccagaaagctccaggaatcgggaaagaagccctcgtggatggaggaagaagatttatcttttctctacaagagcagcccaggaagaaagcatcagggaactgttaagaggagacaagaagaagaccacttccagtttccagacatggctgatgggggctaccctaataaaattaagaggccttgccttgaagatgtcacccttgcaatgggcccaggtgctcatcctagtactgcttgtgcagaactgcaggtccctccattgacaataaatcctagccctgcggctatgggagtggctggccagtcattactgctggagaataaccctatga

SEQ ID NO: 17232 - DNA, 4854 bp, Homo sapiens
  source 1..4854: mol_type = unassigned DNA
ggcgcggagccgggcggtgggaatggagcgagcagattgaggccgccactgcagcgccgccagcatgaacttggccgcgagctgaagcggccggcggcgggcgggcgcgggggcaccggccgctagccagggggtgatctgcaacagggctgggttccttggcggccgcctgagtccaggctgcccgcgccggcggccgcccgcccctcggacactgcccccgccgccgccggagctctgcagcacgccctgtgtctaggtcgtttgggaaacgccttggagagtcaagaataaatttgcaggtcaaacaatggatgactggaaaagtcggcttgtaatcaagagcatgcttccccatttcgccatggtgggaaatcgtcaggagcccagaaagctccaggaatcgggaaagaagccctcgtggatggaggaagaagatttatcttttctctacaagagcagcccaggaagaaagcatcagggaactgttaagaggagacaagaagaagaccacttccagtttccagacatggctgatgggggctaccctaataaaattaagaggccttgccttgaagatgtcacccttgcaatgggcccaggtgctcatcctagtactgcttgtgcagaactgcaggtccctccattgacaataaatcctagccctgcggctatgggagtggctggccagtcattactgctggagaataaccctatgaatggcaacatcatgggctcaccatttgtagtaccacagactacagaagtgggactgaaagggcccactgttccttactatgagaaaatcaacagcgtgccggctgtagaccaggagcttcaagagctgctagaggagctcaccaaaattcaagacccttctccaaatgagctagatcttgagaagatactggggacgaagccagaagagccactggttttagatcatccccaggcaaccctaagcacaactcccaagccttcggttcagatgtcacacttggagagcctggcttccagcaaggagtttgcttctagttgcagccaagttactggcatgtcacttcagatcccatcctcctccacagggatcagctattcgattccttccaccagtaagcagatagtgtcaccgagttcttcaatggcacagtccaagagccaggtccaggccatgctccctgtcgctctgccccccttaccagtgcctcagtggcatcacgcccaccagctgaaggcgttggcagccagcaagcaggggtctgctacaaagcagcaagggcccacccccagttggtctggtctgcctcctccaggactctctccaccttaccgcccagtgccatcaccacacccaccaccgctgccactgccaccaccaccacccccattcagcccccagagcctcatggtgtcctgcatgtcgtccaataccttgtcgggtagcactctccgaggctctcccaatgccttactgtcaagcatgacgtccagcagcaatgctgccctggggcccgccatgccctatgctcctgagaagctccccagccctgctctcactcaacagccgcagttcggccctcagagctccattcttgccaacctcatgtcctctaccatcaaaacccctcaaggacacctgatgtctgctctgcctgccagcaaccctgggccgtccccaccctatcgcccagagaagctctctagcccaggcttgccacagcagtccttcaccccacagtgttccctgatccgaagcctcactcccaccagtaatcttctaagccagcaacagcagcagcagcagcagcagcagcaagcaaatgtgatctttaagcccataagcagcaactcatccaaaaccctgagcatgatcatgcagcaggggatggcaagctccagcccaggagccacggagccatttacttttggcaacaccaagcccttgtcccattttgtttctgagccgggtccccagaagatgccctccatgcctaccacctctaggcagccttccctgctccactacctgcagcagccgacaccaacgcaggcctcctcagccactgcctcctccacggccactgccaccttgcagctgcagcagcagcagcagcaacagcagcagcagcctgaccattcttcattccttctgcagcagatgatgcagcaaccccagcgttttcagcgatcagtggcctcagattccatgcctgctctgcccagacagggctgttgccatctgtttgcatggacttctgcagctagctcggtgaagccccagcatcaacacgggaactctttcactagcaggcaagatcctcagcctggagacgtgtcaccgtctaacattactcatgtagacaaagcctgcaagcttggggaagccaggcacccccaggtcagcctcgggcgacagcccccgtcctgccaggccctggggagtgagtccttcctgcccggcagctcctttgctcatgagctggcccgagtcacctcctcgtacagcacctcagaggcagcgccctggggcagctgggatccgaaggcctggaggcaggtgcccgctccactactgcctagctgcgacgccacagcaagaggaacagagatcaggtcttatggcaatgacccctgaacggcagaatgcatatatctcccaacagatgagtccatttgaagccgtccaagaacaagtcacctccaagtgtagccggatcaaggcaagccccccatctagcaagcacttgatgccacccagaactgggcttcttcagaacaatctgagtccaggaatgatcccactcaccaggcaccagagctgcgagggcatgggagtgatctcaccaactctggggaagcggcaaggaattttcacctccagcccccagtgtcccatcctctcacactcaggccagactcccctgggcagacttgactctgtctgccagcatatgcagagccccaaggccaccccaccagaagtgcccctgcctgggttctgtcccagctccctgggcacccagtccttgagtccccaccagctcagacggcctagtgtgccaagaatgcccactgcgttcaacaatgctgcatgggtcacagcggcagcagctgtgaccacagcagtttcggggaaaacacccctcagccaagtggataatagcgttcagcagcactcaccttctggccaggcctgccttcagaggccatctgattgggaggcacaagtgcccgctgcgatgggaacacaagtgcccctggccaacaaccccagcttcagcctgctgggcagccagagcctcaggcagagcccggtacagggcccggtgcctgtagcaaacaccaccaagttcctccagcagggtatggccagctttagtcccctgagccccatacagggcatcgagccaccaagctatgtggctgctgctgccaccgctgctgctgcttctgccgttgctgccagccagttcccaggtccgttcgacagaacggatattccccctgagctgccacctgccgactttttgcgccagccccaacccccactaaatgatctgatttcgtcacctgactgcaatgaggtagatttcattgaagctctcttgaaaggctcctgtgtgagcccagatgaagactgggtgtgcaacttgaggctgatcgacgacattttggaacagcatgctgctgctcaaaatgccacagcccagaattctgggcaagtcacccaggatgctggggcactttaaatctgagcaggatgcccatagaaacccccatggtgacatcactctaggaagtggtgtcgatccatacccgcagttgtctcccgttacaatttgagtggtgttgtcagcccatgcttatccctctctctacctgtgacaaaatggaaagctggtgatttttcaagctacgtgtacatatttgaaaattttgtaaatggttttcctaaacattaatgacagaagtatttatacttcattttgtgactttgtaaataaagcgacggcttttgtttcagtagagttgtgtttactatgcattgttttgtgtttattatacaatgttacaaatatgcagaccgtgttgtttgctccagtgataccttgttaagctaggtggctgagtcgcttatggttttaatgcaatgagcaatgtggatatgaccaagagttgttgtgcaagttgacaaatgccaaatagaaaaccacttggccatttatttctatgttcactaaaaatcctattgccttgtgtgattcttaatctcttttgcgaacctttcagtctccgctagctctttcctaatgagctttacagcagaagctgttttatcgttaagtgccccacagagacactttaccaggaggctgggagagttctccagatttgggagaggcgcagagacagtgtgtgagccgagccctgtctcagcaatccacctggaggagctagagtatcctcctccctttaccattcagaccgagagaaaaagcccagcttgtgtgcaccctcgtggggttaaggcgagctgttcctggtttaaagcctttcagtatttgttttgatgtaaggctctgtggtttgggggggaacatctgtaaacattattagttgatttggggtttgtctttgatggtttctatctgcaattatcgtcatgtatatttaagtgtctgttatagaaaacccacacccactgtcctgtaaacttttctcagtgtccagactttctgtaatcacattttaattgccacctcgtatttcacctctacatttgaaatctggcgtctgtttcaagccagtgtgttttttcttcgttctgtaataaacagccaggagaaaagtgcc

SEQ ID NO: 17233 - DNA, 4532 bp, Homo sapiens
  source 1..4532: mol_type = unassigned DNA
ccctgtgtctaggtcgtttgggaaacgccttggagagtcaagaataaatttgcaggtcaaacaatggatgactggaaaagtcggcttgtaatcaagagcatgcttccccatttcgccatggtgggaaatcgtcaggagcccagaaagctccaggaatcgggaactgttaagaggagacaagaagaagaccacttccagtttccagacatggctgatgggggctaccctaataaaattaagaggccttgccttgaagatgtcacccttgcaatgggcccaggtgctcatcctagtactgcttgtgcagaactgcaggtccctccattgacaataaatcctagccctgcggctatgggagtggctggccagtcattactgctggagaataaccctatgaatggcaacatcatgggctcaccatttgtagtaccacagactacagaagtgggactgaaagggcccactgttccttactatgagaaaatcaacagcgtgccggctgtagaccaggagcttcaagagctgctagaggagctcaccaaaattcaagacccttctccaaatgagctagatcttgagaagatactggggacgaagccagaagagccactggttttagatcatccccaggcaaccctaagcacaactcccaagccttcggttcagatgtcacacttggagagcctggcttccagcaaggagtttgcttctagttgcagccaagttactggcatgtcacttcagatcccatcctcctccacagggatcagctattcgattccttccaccagtaagcagatagtgtcaccgagttcttcaatggcacagtccaagagccaggtccaggccatgctccctgtcgctctgccccccttaccagtgcctcagtggcatcacgcccaccagctgaaggcgttggcagccagcaagcaggggtctgctacaaagcagcaagggcccacccccagttggtctggtctgcctcctccaggactctctccaccttaccgcccagtgccatcaccacacccaccaccgctgccactgccaccaccaccacccccattcagcccccagagcctcatggtgtcctgcatgtcgtccaataccttgtcgggtagcactctccgaggctctcccaatgccttactgtcaagcatgacgtccagcagcaatgctgccctggggcccgccatgccctatgctcctgagaagctccccagccctgctctcactcaacagccgcagttcggccctcagagctccattcttgccaacctcatgtcctctaccatcaaaacccctcaaggacacctgatgtctgctctgcctgccagcaaccctgggccgtccccaccctatcgcccagagaagctctctagcccaggcttgccacagcagtccttcaccccacagtgttccctgatccgaagcctcactcccaccagtaatcttctaagccagcaacagcagcagcagcagcagcagcagcaagcaaatgtgatctttaagcccataagcagcaactcatccaaaaccctgagcatgatcatgcagcaggggatggcaagctccagcccaggagccacggagccatttacttttggcaacaccaagcccttgtcccattttgtttctgagccgggtccccagaagatgccctccatgcctaccacctctaggcagccttccctgctccactacctgcagcagccgacaccaacgcaggcctcctcagccactgcctcctccacggccactgccaccttgcagctgcagcagcagcagcagcaacagcagcagcagcctgaccattcttcattccttctgcagcagatgatgcagcaaccccagcgttttcagcgatcagtggcctcagattccatgcctgctctgcccagacagggctgttgccatctgtttgcatggacttctgcagctagctcggtgaagccccagcatcaacacgggaactctttcactagcaggcaagatcctcagcctggagacgtgtcaccgtctaacattactcatgtagacaaagcctgcaagcttggggaagccaggcacccccaggtcagcctcgggcgacagcccccgtcctgccaggccctggggagtgagtccttcctgcccggcagctcctttgctcatgagctggcccgagtcacctcctcgtacagcacctcagaggcagcgccctggggcagctgggatccgaaggcctggaggcaggtgcccgctccactactgcctagctgcgacgccacagcaagaggaacagagatcaggtcttatggcaatgacccctgaacggcagaatgcatatatctcccaacagatgagtccatttgaagccgtccaagaacaagtcacctccaagtgtagccggatcaaggcaagccccccatctagcaagcacttgatgccacccagaactgggcttcttcagaacaatctgagtccaggaatgatcccactcaccaggcaccagagctgcgagggcatgggagtgatctcaccaactctggggaagcggcaaggaattttcacctccagcccccagtgtcccatcctctcacactcaggccagactcccctgggcagacttgactctgtctgccagcatatgcagagccccaaggccaccccaccagaagtgcccctgcctgggttctgtcccagctccctgggcacccagtccttgagtccccaccagctcagacggcctagtgtgccaagaatgcccactgcgttcaacaatgctgcatgggtcacagcggcagcagctgtgaccacagcagtttcggggaaaacacccctcagccaagtggataatagcgttcagcagcactcaccttctggccaggcctgccttcagaggccatctgattgggaggcacaagtgcccgctgcgatgggaacacaagtgcccctggccaacaaccccagcttcagcctgctgggcagccagagcctcaggcagagcccggtacagggcccggtgcctgtagcaaacaccaccaagttcctccagcagggtatggccagctttagtcccctgagccccatacagggcatcgagccaccaagctatgtggctgctgctgccaccgctgctgctgcttctgccgttgctgccagccagttcccaggtccgttcgacagaacggatattccccctgagctgccacctgccgactttttgcgccagccccaacccccactaaatgatctgatttcgtcacctgactgcaatgaggtagatttcattgaagctctcttgaaaggctcctgtgtgagcccagatgaagactgggtgtgcaacttgaggctgatcgacgacattttggaacagcatgctgctgctcaaaatgccacagcccagaattctgggcaagtcacccaggatgctggggcactttaaatctgagcaggatgcccatagaaacccccatggtgacatcactctaggaagtggtgtcgatccatacccgcagttgtctcccgttacaatttgagtggtgttgtcagcccatgcttatccctctctctacctgtgacaaaatggaaagctggtgatttttcaagctacgtgtacatatttgaaaattttgtaaatggttttcctaaacattaatgacagaagtatttatacttcattttgtgactttgtaaataaagcgacggcttttgtttcagtagagttgtgtttactatgcattgttttgtgtttattatacaatgttacaaatatgcagaccgtgttgtttgctccagtgataccttgttaagctaggtggctgagtcgcttatggttttaatgcaatgagcaatgtggatatgaccaagagttgttgtgcaagttgacaaatgccaaatagaaaaccacttggccatttatttctatgttcactaaaaatcctattgccttgtgtgattcttaatctcttttgcgaacctttcagtctccgctagctctttcctaatgagctttacagcagaagctgttttatcgttaagtgccccacagagacactttaccaggaggctgggagagttctccagatttgggagaggcgcagagacagtgtgtgagccgagccctgtctcagcaatccacctggaggagctagagtatcctcctccctttaccattcagaccgagagaaaaagcccagcttgtgtgcaccctcgtggggttaaggcgagctgttcctggtttaaagcctttcagtatttgttttgatgtaaggctctgtggtttgggggggaacatctgtaaacattattagttgatttggggtttgtctttgatggtttctatctgcaattatcgtcatgtatatttaagtgtctgttatagaaaacccacacccactgtcctgtaaacttttctcagtgtccagactttctgtaatcacattttaattgccacctcgtatttcacctctacatttgaaatctggcgtctgtttcaagccagtgtgttttttcttcgttctgtaataaacagccaggagaaaagtgcc

SEQ ID NO: 17234 - DNA, 3224 bp, Homo sapiens
  source 1..3224: mol_type = unassigned DNA
gatctgcaacagggctgggttccttggcggccgcctgagtccaggctgcccgcgccggcggccgcccgcccctcggacactgcccccgccgccgccggagctctgcagcacgccctgtgtctaggtcgtttgggaaacgccttggagagtcaagaataaatttgcaggtcaaacaatggatgactggaaaagtcggcttgtaatcaagagcatgcttccccatttcgccatggtgggaaatcgtcaggagcccagaaagctccaggaatcgggaactgttaagaggagacaagaagaagaccacttccagtttccagacatggctgatgggggctaccctaataaaattaagaggccttgccttgaagatgtcacccttgcaatgggcccaggtgctcatcctagtactgcttgtgcagaactgcaggtccctccattgacaataaatcctagccctgcggctatgggagtggctggccagtcattactgctggagaataaccctatgaatggcaacatcatgggctcaccatttgtagtaccacagactacagaagtgggactgaaagggcccactgttccttactatgagaaaatcaacagcgtgccggctgtagaccaggagcttcaagagctgctagaggagctcaccaaaattcaagacccttctccaaatgagctagatcttgagaagatactggggacgaagccagaagagccactggttttagatcatccccaggcaaccctaagcacaactcccaagccttcggttcagatgtcacacttggagagcctggcttccagcaaggagtttgcttctagttgcagccaagttactggcatgtcacttcagatcccatcctcctccacagggatcagctattcgattccttccaccagtaagcagatagtgtcaccgagttcttcaatggcacagtccaagagccaggtccaggccatgctccctgtcgctctgccccccttaccagtgcctcagtggcatcacgcccaccagctgaaggcgttggcagccagcaagcaggggtctgctacaaagcagcaagggcccacccccagttggtctggtctgcctcctccaggactctctccaccttaccgcccagtgccatcaccacacccaccaccgctgccactgccaccaccaccacccccattcagcccccagagcctcatggtgtcctgcatgtcgtccaataccttgtcgggtagcactctccgaggctctcccaatgccttactgtcaagcatgacgtccagcagcaatgctgccctggggcccgccatgccctatgctcctgagaagctccccagccctgctctcactcaacagccgcagttcggccctcagagctccattcttgccaacctcatgtcctctaccatcaaaacccctcaaggacacctgatgtctgctctgcctgccagcaaccctgggccgtccccaccctatcgcccagagaagctctctagcccaggcttgccacagcagtccttcaccccacagtgttccctgatccgaagcctcactcccaccagtaatcttctaagccagcaacagcagcagcagcagcagcagcagcaagcaaatgtgatctttaagcccataagcagcaactcatccaaaaccctgagcatgatcatgcagcaggggatggcaagctccagcccaggagccacggagccatttacttttggcaacaccaagcccttgtcccattttgtttctgagccgggtccccagaagatgccctccatgcctaccacctctaggcagccttccctgctccactacctgcagcagccgacaccaacgcaggcctcctcagccactgcctcctccacggccactgccaccttgcagctgcagcagcagcagcagcaacagcagcagcagcctgaccattcttcattccttctgcagcagatgatgcagcaaccccagcgttttcagcgatcagtggcctcagattccatgcctgctctgcccagacagcaagaggaacagagatcaggtcttatggcaatgacccctgaacggcagaatgcatatatctcccaacagatgagtccatttgaagccgtccaagaacaagtcacctccaagtgtagccggatcaaggcaagccccccatctagcaagcacttgatgccacccagaactgggcttcttcagaacaatctgagtccaggaatgatcccactcaccaggcaccagagctgcgagggcatgggagtgatctcaccaactctggggaagcggcaaggaattttcacctccagcccccagtgtcccatcctctcacactcaggccagactcccctgggcagacttgactctgtctgccagcatatgcagagccccaaggccaccccaccagaagtgcccctgcctgggttctgtcccagctccctgggcacccagtccttgagtccccaccagctcagacggcctagtgtgccaagaatgcccactgcgttcaacaatgctgcatgggtcacagcggcagcagctgtgaccacagcagtttcggggaaaacacccctcagccaagtggataatagcgttcagcagcactcaccttctggccaggcctgccttcagaggccatctgattgggaggcacaagtgcccgctgcgatgggaacacaagtgcccctggccaacaaccccagcttcagcctgctgggcagccagagcctcaggcagagcccggtacagggcccggtgcctgtagcaaacaccaccaagttcctccagcagggtatggccagctttagtcccctgagccccatacagggcatcgagccaccaagctatgtggctgctgctgccaccgctgctgctgcttctgccgttgctgccagccagttcccaggtccgttcgacagaacggatattccccctgagctgccacctgccgactttttgcgccagccccaacccccactaaatgatctgatttcgtcacctgactgcaatgaggtagatttcattgaagctctcttgaaaggctcctgtgtgagcccagatgaagactgggtgtgcaacttgaggctgatcgacgacattttggaacagcatgctgctgctcaaaatgccacagcccagaattctgggcaagtcacccaggatgctggggcactttaaatctgagcaggatgcccatagaaacccccatggtgacatcactctaggaagt

SEQ ID NO: 17235 - DNA, 2434 bp, Homo sapiens
  source 1..2434: mol_type = unassigned DNA
accagatgtgttggtgacaggttgctactcagaggtgcggacaggagctgagcgctgctgctgtcggagcagacgcggcgttcccgggttgtgctcagcccctgcagctgccatcggctggagaagtccagcgcaccgcctaggcaagccagctgacgccgggggcacagaccaccctccactgagtgcggagcagccaagggaaagaagccctcgtggatggaggaagaagatttatcttttctctacaagagcagcccaggaagaaagcatcagggaactgttaagaggagacaagaagaagaccacttccagtttccagacatggctgatgggggctaccctaataaaattaagaggccttgccttgaagatgtcacccttgcaatgggcccaggtgctcatcctagtactgcttgtgcagaactgcaggtccctccattgacaataaatcctagccctgcggctatgggagtggctggccagtcattactgctggagaataaccctatgaatggcaacatcatgggctcaccatttgtagtaccacagactacagaagtgggactgaaagggcccactgttccttactatgagaaaatcaacagcgtgccggctgtagaccaggagcttcaagagctgctagaggagctcaccaaaattcaagacccttctccaaatgagctagatcttgagaagatactggggacgaagccagaagagccactggttttagatcatccccaggcaaccctaagcacaactcccaagccttcggttcagatgtcacacttggagagcctggcttccagcaaggagtttgcttctagttgcagccaagttactggcatgtcacttcagatcccatcctcctccacagggatcagctattcgattccttccaccagtaagcagatagtgtcaccgagttcttcaatggcacagtccaagagccaggtccaggccatgctccctgtcgctctgccccccttaccagtgcctcagtggcatcacgcccaccagctgaaggcgttggcagccagcaagcaggggtctgctacaaagcagcaagggcccacccccagttggtctggtctgcctcctccaggactctctccaccttaccgcccagtgccatcaccacacccaccaccgctgccactgccaccaccaccacccccattcagcccccagagcctcatggtgtcctgcatgtcgtccaataccttgtcgggtagcactctccgaggctctcccaatgccttactgtcaagcatgacgtccagcagcaatgctgccctggggcccgccatgccctatgctcctgagaagctccccagccctgctctcactcaacagccgcagttcggccctcagagctccattcttgccaacctcatgtcctctaccatcaaaacccctcaaggacacctgatgtctgctctgcctgccagcaaccctgggccgtccccaccctatcgcccagagaagctctctagcccaggcttgccacagcagtccttcaccccacagtgttccctgctccactacctgcagcagccgacaccaacgcaggcctcctcagccactgcctcctccacggccactgccaccttgcagctgcagcagcagcagcagcaacagcagcagcagcctgaccattcttcattccttctgcagcagatgatgcagcaaccccagcgttttcagcgatcagtggcctcagattccatgcctgctctgcccagacagggctgttgccatctgtttgcatggacttctgcagctagctcggtgaagccccagcatcaacacgggaactctttcactagcaggcaagatcctcagcctggagacgtgtcaccgtctaacattactcatgtagacaaagcctgcaagcttggggaagccaggcacccccaggtcagcctcgggcgacagcccccgtcctgccaggccctggggagtgagtccttcctgcccggcagctcctttgctcatgagctggcccgagtcacctcctcgtacagcacctcagaggcagcgccctggggcagctgggatccgaaggcctggaggcaggtgcccgctccactactgcctagctgcgacgccacagcaagaggaacagagatcaggtcttatggcaatgacccctgaacggcagaatgcatatatctcccaacagatgagtccatttgaagccgtccaagaacaagtcacctccaagtgtagccggatcaaggcaagccccccatctagcaagcacttgatgccacccagaactgggcttcttcagaacaatctgagtccaggaatgatcccactcaccaggcaccagagctgcgagggcatgggagtgatctcaccaactctggggaagcggcaaggaattttcacctccagcccccagtgtcccatcctctcacactca

SEQ ID NO: 17236 - DNA, 1051 bp, Homo sapiens
  source 1..1051: mol_type = unassigned DNA
ctgatccgaagcctcactcccaccagtaatcttctaagccagcaacagcagcagcagcagcagcagcagcaagcaaatgtgatctttaagcccataagcagcaactcatccaaaaccctgagcatgatcatgcagcaggggatggcaagctccagcccaggagccacggagccatttacttttggcaacaccaagcccttgtcccattttgtttctgagccgggtccccagaagatgccctccatgcctaccacctctaggcagccttccctgctccactacctgcagcagccgacaccaacgcaggcctcctcagccactgcctcctccacggccactgccaccttgcagctgcagcagcagcagcagcaacagcagcagcagcctgaccattcttcattccttctgcagcagatgatgcagcaaccccagcgttttcagcgatcagtggcctcagattccatgcctgctctgcccagacagactcatgtagacaaagcctgcaagcttggggaagccaggcacccccaggtcagcctcgggcgacagcccccgtcctgccaggccctggggagtgagtccttcctgcccggcagctcctttgctcatgagctggcccgagtcacctcctcgtacagcacctcagaggcagcgccctggggcagctgggatccgaaggcctggaggcaggtgcccgctccactactgcctagctgcgacgccacagcaagaggaacagagatcaggtcttatggcaatgacccctgaacggcagaatgcatatatctcccaacagatgagtccatttgaagccgtccaagaacaagtcacctccaagtgtagccggatcaaggcaagccccccatctagcaagcacttgatgccacccagaactgggcttcttcagaacaatctgagtccaggaatgatcccactcaccaggcaccagagctgcgagggcatgggagtgatctcaccaactctggggaagcggcaaggaattttcacctccagcccccagtgtcccatcctctcacactcaggccagact

SEQ ID NO: 17237 - DNA, 2309 bp, Homo sapiens
  source 1..2309: mol_type = unassigned DNA
gagatttgattcccttggcgggcggaagcggccacaacccggcgatcgaaaagattcttaggaacgccgtaccagccgcgtctctcaggacagcaggcccctgtccttctgtcgggcgccgctcagccgtgccctccgcccctcaggttctttttctaattccaaataaacttgcaagaggactatgaaagattatgatgaacttctcaaatattatgaattacatgaaactattgggacaggtggctttgcaaaggtcaaacttgcctgccatatccttactggagagatggtagctataaaaatcatggataaaaacacactagggagtgatttgccccggatcaaaacggagattgaggccttgaagaacctgagacatcagcatatatgtcaactctaccatgtgctagagacagccaacaaaatattcatggttcttgagtactgccctggaggagagctgtttgactatataatttcccaggatcgcctgtcagaagaggagacccgggttgtcttccgtcagatagtatctgctgttgcttatgtgcacagccagggctatgctcacagggacctcaagccagaaaatttgctgtttgatgaatatcataaattaaagctgattgactttggtctctgtgcaaaacccaagggtaacaaggattaccatctacagacatgctgtgggagtctggcttatgcagcacctgagttaatacaaggcaaatcatatcttggatcagaggcagatgtttggagcatgggcatactgttatatgttcttatgtgtggatttctaccatttgatgatgataatgtaatggctttatacaagaagattatgagaggaaaatatgatgttcccaagtggctctctcccagtagcattctgcttcttcaacaaatgctgcaggtggacccaaagaaacggatttctatgaaaaatctattgaaccatccctggatcatgcaagattacaactatcctgttgagtggcaaagcaagaatccttttattcacctcgatgatgattgcgtaacagaactttctgtacatcacagaaacaacaggcaaacaatggaggatttaatttcactgtggcagtatgatcacctcacggctacctatcttctgcttctagccaagaaggctcggggaaaaccagttcgtttaaggctttcttctttctcctgtggacaagccagtgctaccccattcacagacatcaagtcaaataattggagtctggaagatgtgaccgcaagtgataaaaattatgtggcgggattaatagactatgattggtgtgaagatgatttatcaacaggtgctgctactccccgaacatcacagtttaccaagtactggacagaatcaaatggggtggaatctaaatcattaactccagccttatgcagaacacctgcaaataaattaaagaacaaagaaaatgtatatactcctaagtctgctgtaaagaatgaagagtactttatgtttcctgagccaaagactccagttaataagaaccagcataagagagaaatactcactacgccaaatcgttacactacaccctcaaaagctagaaaccagtgcctgaaagaaactccaattaaaataccagtaaattcaacaggaacagacaagttaatgacaggtgtcattagccctgagaggcggtgccgctcagtggaattggatctcaaccaagcacatatggaggagactccaaaaagaaagggagccaaagtgtttgggagccttgaaagggggttggataaggttatcactgtgctcaccaggagcaaaaggaagggttctgccagagacgggcccagaagactaaagcttcactataacgtgactacaactagattagtgaatccagatcaactgttgaatgaaataatgtctattcttccaaagaagcatgttgactttgtacaaaagggttatacactgaagtgtcaaacacagtcagattttgggaaagtgacaatgcaatttgaattagaagtgtgccagcttcaaaaacccgatgtggtgggtatcaggaggcagcggcttaagggcgatgcctgggtttacaaaagattagtggaagacatcctatctagctgcaaggtataattgatggattcttccatcctgccggatgagtgtgggtgtgatacagcctacataaagactgttatgatcgctttgattttaaagttcattggaactaccaacttgtttctaaagagctatcttaagaccaatatctctttgtttttaaacaaaagatattattttgtgt

SEQ ID NO: 17238 - DNA, 2232 bp, Homo sapiens
  source 1..2232: mol_type = unassigned DNA
gaaaagattcttaggaacgccgtaccagccgcgtctctcaggacagcaggcccctgtccttctgtcgggcgccgctcagccgtgccctccgcccctcaggttctttttctaattccaaataaacttgcaagaggactatgaaagattatgatgaacttctcaaatattatgaattacatgaaactattgggacagtactgccctggaggagagctgtttgactatataatttcccaggatcgcctgtcagaagaggagacccgggttgtcttccgtcagatagtatctgctgttgcttatgtgcacagccagggctatgctcacagggacctcaagccagaaaatttgctgtttgatgaatatcataaattaaagctgattgactttggtctctgtgcaaaacccaagggtaacaaggattaccatctacagacatgctgtgggagtctggcttatgcagcacctgagttaatacaaggcaaatcatatcttggatcagaggcagatgtttggagcatgggcatactgttatatgttcttatgtgtggatttctaccatttgatgatgataatgtaatggctttatacaagaagattatgagaggaaaatatgatgttcccaagtggctctctcccagtagcattctgcttcttcaacaaatgctgcaggtggacccaaagaaacggatttctatgaaaaatctattgaaccatccctggatcatgcaagattacaactatcctgttgagtggcaaagcaagaatccttttattcacctcgatgatgattgcgtaacagaactttctgtacatcacagaaacaacaggcaaacaatggaggatttaatttcactgtggcagtatgatcacctcacggctacctatcttctgcttctagccaagaaggctcggggaaaaccagttcgtttaaggctttcttctttctcctgtggacaagccagtgctaccccattcacagacatcaagtcaaataattggagtctggaagatgtgaccgcaagtgataaaaattatgtggcgggattaatagactatgattggtgtgaagatgatttatcaacaggtgctgctactccccgaacatcacagtttaccaagtactggacagaatcaaatggggtggaatctaaatcattaactccagccttatgcagaacacctgcaaataaattaaagaacaaagaaaatgtatatactcctaagtctgctgtaaagaatgaagagtactttatgtttcctgagccaaagactccagttaataagaaccagcataagagagaaatactcactacgccaaatcgttacactacaccctcaaaagctagaaaccagtgcctgaaagaaactccaattaaaataccagtaaattcaacaggaacagacaagttaatgacaggtgtcattagccctgagaggcggtgccgctcagtggaattggatctcaaccaagcacatatggaggagactccaaaaagaaagggagccaaagtgtttgggagccttgaaagggggttggataaggttatcactgtgctcaccaggagcaaaaggaagggttctgccagagacgggcccagaagactaaagcttcactataacgtgactacaactagattagtgaatccagatcaactgttgaatgaaataatgtctattcttccaaagaagcatgttgactttgtacaaaagggttatacactgaagtgtcaaacacagtcagattttgggaaagtgacaatgcaatttgaattagaagtgtgccagcttcaaaaacccgatgtggtgggtatcaggaggcagcggcttaagggcgatgcctgggtttacaaaagattagtggaagacatcctatctagctgcaaggtataattgatggattcttccatcctgccggatgagtgtgggtgtgatacagcctacataaagactgttatgatcgctttgattttaaagttcattggaactaccaacttgtttctaaagagctatcttaagaccaatatctctttgtttttaaacaaaagatattattttgtgtatgaatctaaatcaagcccatctgtcattatgttactgtcttttttaatcatgtggttttgtatattaataattgttgactttcttagattcacttccatatgtgaatgtaagctcttaactatgtctctttgtaatgtgtaatttctttctgaaataaaaccatttgtgaat

SEQ ID NO: 17239 - DNA, 2271 bp, Homo sapiens
  source 1..2271: mol_type = unassigned DNA
aacccggcgatcgaaaagattcttaggaacgccgtaccagccgcgtctctcaggacagcaggcccctgtccttctgtcgggcgccgctcagccgtgccctccgcccctcaggttctttttctaattccaaataaacttgcaagaggactatgaaagattatgatgaacttctcaaatattatgaattacatgaaactattgggacaggtggctttgcaaaggtcaaacttgcctgccatatccttactggagagatggtagctataaaaatcatggataaaaacacactagggagtgatttgccccggatcaaaacggagattgaggccttgaagaacctgagacatcagcatatatgtcaactctaccatgtgctagagacagccaacaaaatattcatggttcttgaggaaaatttgctgtttgatgaatatcataaattaaagctgattgactttggtctctgtgcaaaacccaagggtaacaaggattaccatctacagacatgctgtgggagtctggcttatgcagcacctgagttaatacaaggcaaatcatatcttggatcagaggcagatgtttggagcatgggcatactgttatatgttcttatgtgtggatttctaccatttgatgatgataatgtaatggctttatacaagaagattatgagaggaaaatatgatgttcccaagtggctctctcccagtagcattctgcttcttcaacaaatgctgcaggtggacccaaagaaacggatttctatgaaaaatctattgaaccatccctggatcatgcaagattacaactatcctgttgagtggcaaagcaagaatccttttattcacctcgatgatgattgcgtaacagaactttctgtacatcacagaaacaacaggcaaacaatggaggatttaatttcactgtggcagtatgatcacctcacggctacctatcttctgcttctagccaagaaggctcggggaaaaccagttcgtttaaggctttcttctttctcctgtggacaagccagtgctaccccattcacagacatcaagtcaaataattggagtctggaagatgtgaccgcaagtgataaaaattatgtggcgggattaatagactatgattggtgtgaagatgatttatcaacaggtgctgctactccccgaacatcacagtttaccaagtactggacagaatcaaatggggtggaatctaaatcattaactccagccttatgcagaacacctgcaaataaattaaagaacaaagaaaatgtatatactcctaagtctgctgtaaagaatgaagagtactttatgtttcctgagccaaagactccagttaataagaaccagcataagagagaaatactcactacgccaaatcgttacactacaccctcaaaagctagaaaccagtgcctgaaagaaactccaattaaaataccagtaaattcaacaggaacagacaagttaatgacaggtgtcattagccctgagaggcggtgccgctcagtggaattggatctcaaccaagcacatatggaggagactccaaaaagaaagggagccaaagtgtttgggagccttgaaagggggttggataaggttatcactgtgctcaccaggagcaaaaggaagggttctgccagagacgggcccagaagactaaagcttcactataacgtgactacaactagattagtgaatccagatcaactgttgaatgaaataatgtctattcttccaaagaagcatgttgactttgtacaaaagggttatacactgaagtgtcaaacacagtcagattttgggaaagtgacaatgcaatttgaattagaagtgtgccagcttcaaaaacccgatgtggtgggtatcaggaggcagcggcttaagggcgatgcctgggtttacaaaagattagtggaagacatcctatctagctgcaaggtataattgatggattcttccatcctgccggatgagtgtgggtgtgatacagcctacataaagactgttatgatcgctttgattttaaagttcattggaactaccaacttgtttctaaagagctatcttaagaccaatatctctttgtttttaaacaaaagatattattttgtgtatgaatctaaatcaagcccatctgtcattatgttactgtcttttttaatcatgtggttttgtatattaataattgttgactttcttagattcacttccatatgtgaatgtaagctcttaactatgtctctttgtaatgtgt

SEQ ID NO: 17240 - DNA, 2125 bp, Homo sapiens
  source 1..2125: mol_type = unassigned DNA
acaacccggcgatcgaaaagattcttaggaacgccgtaccagccgcgtctctcaggacagcaggcccctgtccttctgtcgggcgccgctcagccgtgccctccgcccctcagagtgatttgccccggatcaaaacggagattgaggccttgaagaacctgagacatcagcatatatgtcaactctaccatgtgctagagacagccaacaaaatattcatggttcttgaggaaaatttgctgtttgatgaatatcataaattaaagctgattgactttggtctctgtgcaaaacccaagggtaacaaggattaccatctacagacatgctgtgggagtctggcttatgcagcacctgagttaatacaaggcaaatcatatcttggatcagaggcagatgtttggagcatgggcatactgttatatgttcttatgtgtggatttctaccatttgatgatgataatgtaatggctttatacaagaagattatgagaggaaaatatgatgttcccaagtggctctctcccagtagcattctgcttcttcaacaaatgctgcaggtggacccaaagaaacggatttctatgaaaaatctattgaaccatccctggatcatgcaagattacaactatcctgttgagtggcaaagcaagaatccttttattcacctcgatgatgattgcgtaacagaactttctgtacatcacagaaacaacaggcaaacaatggaggatttaatttcactgtggcagtatgatcacctcacggctacctatcttctgcttctagccaagaaggctcggggaaaaccagttcgtttaaggctttcttctttctcctgtggacaagccagtgctaccccattcacagacatcaagtcaaataattggagtctggaagatgtgaccgcaagtgataaaaattatgtggcgggattaatagactatgattggtgtgaagatgatttatcaacaggtgctgctactccccgaacatcacagtttaccaagtactggacagaatcaaatggggtggaatctaaatcattaactccagccttatgcagaacacctgcaaataaattaaagaacaaagaaaatgtatatactcctaagtctgctgtaaagaatgaagagtactttatgtttcctgagccaaagactccagttaataagaaccagcataagagagaaatactcactacgccaaatcgttacactacaccctcaaaagctagaaaccagtgcctgaaagaaactccaattaaaataccagtaaattcaacaggaacagacaagttaatgacaggtgtcattagccctgagaggcggtgccgctcagtggaattggatctcaaccaagcacatatggaggagactccaaaaagaaagggagccaaagtgtttgggagccttgaaagggggttggataaggttatcactgtgctcaccaggagcaaaaggaagggttctgccagagacgggcccagaagactaaagcttcactataacgtgactacaactagattagtgaatccagatcaactgttgaatgaaataatgtctattcttccaaagaagcatgttgactttgtacaaaagggttatacactgaagtgtcaaacacagtcagattttgggaaagtgacaatgcaatttgaattagaagtgtgccagcttcaaaaacccgatgtggtgggtatcaggaggcagcggcttaagggcgatgcctgggtttacaaaagattagtggaagacatcctatctagctgcaaggtataattgatggattcttccatcctgccggatgagtgtgggtgtgatacagcctacataaagactgttatgatcgctttgattttaaagttcattggaactaccaacttgtttctaaagagctatcttaagaccaatatctctttgtttttaaacaaaagatattattttgtgtatgaatctaaatcaagcccatctgtcattatgttactgtcttttttaatcatgtggttttgtatattaataattgttgactttcttagattcacttccatatgtgaatgtaagctcttaactatgtctctttgtaatgtgtaatttctttctgaaataaaaccatttgtgaatat

SEQ ID NO: 17241 - DNA, 2268 bp, Homo sapiens
  source 1..2268: mol_type = unassigned DNA
agatttgattcccttggcgggcggaagcggccacaacccggcgatcgaaaagattcttaggaacgccgtaccagccgcgtctctcaggacagcaggcccctgtccttctgtcgggcgccgctcagccgtgccctccgcccctcaggttctttttctaattccaaataaacttgcaagaggactatgaaagattatgatgaacttctcaaatattatgaattacatgaaactattgggacagagtgatttgccccggatcaaaacggagattgaggccttgaagaacctgagacatcagcatatatgtcaactctaccatgtgctagagacagccaacaaaatattcatggttcttgagtactgccctggaggagagctgtttgactatataatttcccaggatcgcctgtcagaagaggagacccgggttgtcttccgtcagatagtatctgctgttgcttatgtgcacagccagggctatgctcacagggacctcaagccagaaaatttgctgtttgatgaatatcataaattaaagctgattgactttggtctctgtgcaaaacccaagggtaacaaggattaccatctacagacatgctgtgggagtctggcttatgcagcacctgagttaatacaaggcaaatcatatcttggatcagagacggagtttcgctcttgttgcccaggctggagtgcaatggtgtgatcttggctcactgcaacctctgcctcccgagttcaagcgattctcctgcctcagcctcccgaattgctggaattacaggcagatgtttggagcatgggcatactgttatatgttcttatgtgtggatttctaccatttgatgatgataatgtaatggctttatacaagaagattatgagaggaaaatatgatgttcccaagtggctctctcccagtagcattctgcttcttcaacaaatgctgcaggtggacccaaagaaacggatttctatgaaaaatctattgaaccatccctggatcatgcaagattacaactatcctgttgagtggcaaagcaagaatccttttattcacctcgatgatgattgcgtaacagaactttctgtacatcacagaaacaacaggcaaacaatggaggatttaatttcactgtggcagtatgatcacctcacggctacctatcttctgcttctagccaagaaggctcggggaaaaccagttcgtttaaggctttcttctttctcctgtggacaagccagtgctaccccattcacagacatcaagtcaaataattggagtctggaagatgtgaccgcaagtgataaaaattatgtggcgggattaatagactatgattggtgtgaagatgatttatcaacaggtgctgctactccccgaacatcacagtttaccaagtactggacagaatcaaatggggtggaatctaaatcattaactccagccttatgcagaacacctgcaaataaattaaagaacaaagaaaatgtatatactcctaagtctgctgtaaagaatgaagagtactttatgtttcctgagccaaagactccagttaataagaaccagcataagagagaaatactcactacgccaaatcgttacactacaccctcaaaagctagaaaccagtgcctgaaagaaactccaattaaaataccagtaaattcaacaggaacagacaagttaatgacaggtgtcattagccctgagaggcggtgccgctcagtggaattggatctcaaccaagcacatatggaggagactccaaaaagaaagggagccaaagtgtttgggagccttgaaagggggttggataaggttatcactgtgctcaccaggagcaaaaggaagggttctgccagagacgggcccagaagactaaagcttcactataacgtgactacaactagattagtgaatccagatcaactgttgaatgaaataatgtctattcttccaaagaagcatgttgactttgtacaaaagggttatacactgaagtgtcaaacacagtcagattttgggaaagtgacaatgcaatttgaattagaagtgtgccagcttcaaaaacccgatgtggtgggtatcaggaggcagcggcttaagggcgatgcctgggtttacaaaagattagtggaagacatcctatctagctgcaaggtataattgatggattcttccatcctgccggatgagtgtgggtgtgatacagcctacataaagactgttatgatcgctttgattttaaagttcattgg

SEQ ID NO: 17242 - DNA, 2291 bp, Homo sapiens
  source 1..2291: mol_type = unassigned DNA
aaaagattcttaggaacgccgtaccagccgcgtctctcaggacagcaggcccctgtccttctgtcgggcgccgctcagccgtgccctccgcccctcaggttctttttctaattccaaataaacttgcaagaggactatgaaagattatgatgaacttctcaaatattatgaattacatgaaactattgggacaggtggctttgcaaaggtcaaacttgcctgccatatccttactggagagatggtagctataaaaatcatggataaaaacacactagggagtgatttgccccggatcaaaacggagattgaggccttgaagaacctgagacatcagcatatatgtcaactctaccatgtgctagagacagccaacaaaatattcatggttcttgagtactgccctggaggagagctgtttgactatataatttcccaggatcgcctgtcagaagaggagacccgggttgtcttccgtcagatagtatctgctgttgcttatgtgcacagccagggctatgctcacagggacctcaagccagaaaatttgctgtttgatgaatatcataaattaaagctgattgactttggtctctgtgcaaaacccaagggtaacaaggattaccatctacagacatgctgtgggagtctggcttatgcagcacctgagttaatacaaggcaaatcatatcttggatcagaggcagatgtttggagcatgggcatactgttatatgttcttatgtgtggatttctaccatttgatgatgataatgtaatggctttatacaagaagattatgagaggaaaatatgatgttcccaagtggctctctcccagtagcattctgcttcttcaacaaatgctgcaggtggacccaaagaaacggatttctatgaaaaatctattgaaccatccctggatcatgcaagattacaactatcctgttgagtggcaaagcaagaatccttttattcacctcgatgatgattgcgtaacagaactttctgtacatcacagaaacaacaggcaaacaatggaggatttaatttcactgtggcagtatgatcacctcacggctacctatcttctgcttctagccaagaaggctcggggaaaaccagttcgtttaaggctttcttctttctcctgtggacaagccagtgctaccccattcacagacatcaagtttaccaagtactggacagaatcaaatggggtggaatctaaatcattaactccagccttatgcagaacacctgcaaataaattaaagaacaaagaaaatgtatatactcctaagtctgctgtaaagaatgaagagtactttatgtttcctgagccaaagactccagttaataagaaccagcataagagagaaatactcactacgccaaatcgttacactacaccctcaaaagctagaaaccagtgcctgaaagaaactccaattaaaataccagtaaattcaacaggaacagacaagttaatgacaggtgtcattagccctgagaggcggtgccgctcagtggaattggatctcaaccaagcacatatggaggagactccaaaaagaaagggagccaaagtgtttgggagccttgaaagggggttggataaggttatcactgtgctcaccaggagcaaaaggaagggttctgccagagacgggcccagaagactaaagcttcactataacgtgactacaactagattagtgaatccagatcaactgttgaatgaaataatgtctattcttccaaagaagcatgttgactttgtacaaaagggttatacactgaagtgtcaaacacagtcagattttgggaaagtgacaatgcaatttgaattagaagtgtgccagcttcaaaaacccgatgtggtgggtatcaggaggcagcggcttaagggcgatgcctgggtttacaaaagattagtggaagacatcctatctagctgcaaggtataattgatggattcttccatcctgccggatgagtgtgggtgtgatacagcctacataaagactgttatgatcgctttgattttaaagttcattggaactaccaacttgtttctaaagagctatcttaagaccaatatctctttgtttttaaacaaaagatattattttgtgtatgaatctaaatcaagcccatctgtcattatgttactgtcttttttaatcatgtggttttgtatattaataattgttgactttcttagattcacttccatatgtgaatgtaagctcttaactatgtctctttgtaatgtgtaatttctttctg

SEQ ID NO: 17243 - DNA, 2347 bp, Homo sapiens
  source 1..2347: mol_type = unassigned DNA
aaagattcttaggaacgccgtaccagccgcgtctctcaggacagcaggcccctgtccttctgtcgggcgccgctcagccgtgccctccgcccctcaggttctttttctaattccaaataaacttgcaagaggactatgaaagattatgatgaacttctcaaatattatgaattacatgaaactattgggacagagtgatttgccccggatcaaaacggagattgaggccttgaagaacctgagacatcagcatatatgtcaactctaccatgtgctagagacagccaacaaaatattcatggttcttgagtactgccctggaggagagctgtttgactatataatttcccaggatcgcctgtcagaagaggagacccgggttgtcttccgtcagatagtatctgctgttgcttatgtgcacagccagggctatgctcacagggacctcaagccagaaaatttgctgtttgatgaatatcataaattaaagctgattgactttggtctctgtgcaaaacccaagggtaacaaggattaccatctacagacatgctgtgggagtctggcttatgcagcacctgagttaatacaaggcaaatcatatcttggatcagaggcagatgtttggagcatgggcatactgttatatgttcttatgtgtggatttctaccatttgatgatgataatgtaatggctttatacaagaagattatgagaggaaaatatgatgttcccaagtggctctctcccagtagcattctgcttcttcaacaaatgctgcaggtggacccaaagaaacggatttctatgaaaaatctattgaaccatccctggatcatgcaagattacaactatcctgttgagtggcaaagcaagaatccttttattcacctcgatgatgattgcgtaacagaactttctgtacatcacagaaacaacaggcaaacaatggaggatttaatttcactgtggcagtatgatcacctcacggctacctatcttctgcttctagccaagaaggctcggggaaaaccagttcgtttaaggctttcttctttctcctgtggacaagccagtgctaccccattcacagacatcaagtcaaataattggagtctggaagatgtgaccgcaagtgataaaaattatgtggcgggattaatagactatgattggtgtgaagatgatttatcaacaggtgctgctactccccgaacatcacagtttaccaagtactggacagaatcaaatggggtggaatctaaatcattaactccagccttatgcagaacacctgcaaataaattaaagaacaaagaaaatgtatatactcctaagtctgctgtaaagaatgaagagtactttatgtttcctgagccaaagactccagttaataagaaccagcataagagagaaatactcactacgccaaatcgttacactacaccctcaaaagctagaaaccagtgcctgaaagaaactccaattaaaataccagtaaattcaacaggaacagacaagttaatgacaggtgtcattagccctgagaggcggtgccgctcagtggaattggatctcaaccaagcacatatggaggagactccaaaaagaaagggagccaaagtgtttgggagccttgaaagggggttggataaggttatcactgtgctcaccaggagcaaaaggaagggttctgccagagacgggcccagaagactaaagcttcactataacgtgactacaactagattagtgaatccagatcaactgttgaatgaaataatgtctattcttccaaagaagcatgttgactttgtacaaaagggttatacactgaagtgtcaaacacagtcagattttgggaaagtgacaatgcaatttgaattagaagtgtgccagcttcaaaaacccgatgtggtgggtatcaggaggcagcggcttaagggcgatgcctgggtttacaaaagattagtggaagacatcctatctagctgcaaggtataattgatggattcttccatcctgccggatgagtgtgggtgtgatacagcctacataaagactgttatgatcgctttgattttaaagttcattggaactaccaacttgtttctaaagagctatcttaagaccaatatctctttgtttttaaacaaaagatattattttgtgtatgaatctaaatcaagcccatctgtcattatgttactgtcttttttaatcatgtggttttgtatattaataattgttgactttcttagattcacttccatatgtgaatgtaagctcttaactatgtctctttgtaatgtgtaatttctttctgaaataaaaccatttgtgaat

SEQ ID NO: 17244 - DNA, 2236 bp, Homo sapiens
  source 1..2236: mol_type = unassigned DNA
aacccggcgatcgaaaagattcttaggaacgccgtaccagccgcgtctctcaggacagcaggcccctgtccttctgtcgggcgccgctcagccgtgccctccgcccctcaggttctttttctaattccaaataaacttgcaagaggactatgaaagattatgatgaacttctcaaatattatgaattacatgaaactattgggacaggtggctttgcaaaggtcaaacttgcctgccatatccttactggagagatggtagctataaaaatcatggataaaaacacactagggagtgatttgccccggatcaaaacggagattgaggccttgaagaacctgagacatcagcatatatgtcaactctaccatgtgctagagacagccaacaaaatattcatggttcttgagggtaacaaggattaccatctacagacatgctgtgggagtctggcttatgcagcacctgagttaatacaaggcaaatcatatcttggatcagaggcagatgtttggagcatgggcatactgttatatgttcttatgtgtggatttctaccatttgatgatgataatgtaatggctttatacaagaagattatgagaggaaaatatgatgttcccaagtggctctctcccagtagcattctgcttcttcaacaaatgctgcaggtggacccaaagaaacggatttctatgaaaaatctattgaaccatccctggatcatgcaagattacaactatcctgttgagtggcaaagcaagaatccttttattcacctcgatgatgattgcgtaacagaactttctgtacatcacagaaacaacaggcaaacaatggaggatttaatttcactgtggcagtatgatcacctcacggctacctatcttctgcttctagccaagaaggctcggggaaaaccagttcgtttaaggctttcttctttctcctgtggacaagccagtgctaccccattcacagacatcaagtcaaataattggagtctggaagatgtgaccgcaagtgataaaaattatgtggcgggattaatagactatgattggtgtgaagatgatttatcaacaggtgctgctactccccgaacatcacagtttaccaagtactggacagaatcaaatggggtggaatctaaatcattaactccagccttatgcagaacacctgcaaataaattaaagaacaaagaaaatgtatatactcctaagtctgctgtaaagaatgaagagtactttatgtttcctgagccaaagactccagttaataagaaccagcataagagagaaatactcactacgccaaatcgttacactacaccctcaaaagctagaaaccagtgcctgaaagaaactccaattaaaataccagtaaattcaacaggaacagacaagttaatgacaggtgtcattagccctgagaggcggtgccgctcagtggaattggatctcaaccaagcacatatggaggagactccaaaaagaaagggagccaaagtgtttgggagccttgaaagggggttggataaggttatcactgtgctcaccaggagcaaaaggaagggttctgccagagacgggcccagaagactaaagcttcactataacgtgactacaactagattagtgaatccagatcaactgttgaatgaaataatgtctattcttccaaagaagcatgttgactttgtacaaaagggttatacactgaagtgtcaaacacagtcagattttgggaaagtgacaatgcaatttgaattagaagtgtgccagcttcaaaaacccgatgtggtgggtatcaggaggcagcggcttaagggcgatgcctgggtttacaaaagattagtggaagacatcctatctagctgcaaggtataattgatggattcttccatcctgccggatgagtgtgggtgtgatacagcctacataaagactgttatgatcgctttgattttaaagttcattggaactaccaacttgtttctaaagagctatcttaagaccaatatctctttgtttttaaacaaaagatattattttgtgtatgaatctaaatcaagcccatctgtcattatgttactgtcttttttaatcatgtggttttgtatattaataattgttgactttcttagattcacttccatatgtgaatgtaagctcttaactatgtctctttgtaatgtgtaatttctttctgaaataaaaccatttgtgaatat

SEQ ID NO: 17245 - DNA, 3832 bp, Homo sapiens
  source 1..3832: mol_type = unassigned DNA
acaaccgtgccggctgctgcccgtgctgccagaactatgagggtcctctctggcactagcctcatgctctgcagcctgctgctgctgctccaggccctgtgcagccctggcctcgccccccagtccagaggccatctctgccggacgcggcccacagacctggtgtttgttgtcgacagctctcgcagcgttcggcctgttgaatttgagaaagtgaaggtattcctgtcccaggtcatcgagtcgctggacgtggggcccaatgccacccgggtgggcatggtcaactatgccagcaccgtgaagcaggagttctcgctgcgggctcatgtctccaaggccgcactgctgcaggctgtgcgccgtatccagccgctgtccacaggcaccatgaccggcctggccatccagttcgctatcaccaaagccttcggcgatgcagagggtggtcgttccaggtcccctgacatcagcaaggtggtcatcgtggtgacagacgggaggccccaggacagcgtgcaggacgtgtctgcgcgggcccgggccagcggcgtcgagctgttcgccatcggagtgggcagcgtggacaaggccacgctgcggcagatcgccagcgagccgcaggacgaacacgtcgattacgtggagagctacagcgtcatcgagaagctgtccaggaagttccaggaggccttctgcgtggtgtcagacctgtgcgccacaggggaccatgactgtgagcaggtgtgcatcagctcccccggttcctacacctgcgcctgccacgagggcttcactctgaacagcgacggcaagacctgcaatgtctgcagtggtggtggtggcagctcggccactgacctggtcttcctcattgacggatccaagagtgtgaggccagagaactttgagctggtgaagaagttcatcagtcagatcgtggatacgctggacgtgtcagacaagctggcccaggtggggctggtgcagtactcaagctctgtgcgccaggagttccccctgggtcgcttccacaccaagaaggacatcaaggcggctgtgcggaatatgtcctacatggagaagggcacaatgactggggctgctctcaagtacctcattgacaattccttcactgtgtccagtggggctaggcccggggcccagaaggtgggcattgtcttcactgatggccggagccaggactacattaatgatgctgccaagaaggccaaagacctcggctttaagatgtttgctgtgggtgtgggcaatgccgtggaggatgagctgagggaaatagcctcagagcctgtggcagagcactacttctacacggctgacttcaagaccatcaaccagataggcaagaagttgcagaagaagatctgtgtggaggaagacccgtgtgcctgcgagtccctggtgaaattccaagccaaagtggaggggctgctgcaggccctgaccaggaaactggaagctgtgagtaagcggctggccatcctggagaacacagttgtctaaggctgcctgtcaccactgtggcctctccaagcgtcctgcacgtgtccgccgtagctttaccattttagtgagggaagccagcccgggggtgggagggggtgtgtctgggtgtgcctattgagagcgtgtaatggcgtttgggagctcgtgtgtgtatgtgtgcgtgtgtgtatgtgtgcatgtgtgtgtgtgtgtgtgtgtgtgcacgtgcgcctgagggtgggcatgagtcttgccagaatgtgagtgtgagagtgataatgcaggggtgagtgtgagagggactgcgtttgcatttttataatcaaaagcttaatatattcccatcttttttagttaaccctttcttgactctgagtgctgtgaatttctttactgatttctctattctccggtgagaaacaattaaatgtgatttaacgtaagcagtgaatggggctagaggcagtgtggttatttggggaccagggaaaaggatggatgaagatgtggtgggaggggatggttggaaggatggtaacagtggtggtgacagtgatgacagtgaccacaccaaaaccagctggtgtttgtcctgccttttcagttacatattcatttagttgacctcatttcacttccagtaaccttacccagaaaagactcaaattatccccattacaaatgggaaagctgagagtctaaatgatgaaatgacttgctcagcagtgggtcgctgagagacaggacttgaatctaggactgaagaacatcaaaagaaaaaggcttcagagaaaaagggcaatgacaccagataggactcatttgttcattcattcattcgttcactcattcgttcaggtatcatgtacttacagggcaatggcggtggggggggatggtgctgtatgagacagacgtagttcctgccctaagagacatacagttgagcagggtgctcatgtcacccccaccagccagagggaccagccagaggaaaagagagtgggtttaggtcgtaccaggggtttgtgcctcctcttgatacctgggagcccacggggtgagtgtgtgtgtgagatgatgggaagggctccagcctgggcctgggctgccctaggtgcctctcccctcccgcccccaacatgccctgttggagttctgtttgtttcctgtgcacaggcggcatcacccccaacccaaagtccccaacgcagatggcagcagccccacctcagagactgcacaagagaaagactcctggccccatgttcccttcctccagccctatgtggggtctgcaggtcacaccctgagatctcggccacctcccccaggcccctgttggaccagtgctgctccggaatctccatctctgtcctctcagagggggagctttggtgattttctgaacctattcttgtttaatggagcatttttagtgttactactagattcacacttgagagcatgtctaaaaggcttttacaagaagctcagaccacaccgaaagatcttcctcggaggcagttcaaagaggcagaataacaacacgaacggtacccaagagctacatcagtacaacagcacaaatacacaagcgcgacttaactggggcacagccaccctcgcccccatgacctgactccacctcctacacagttcaccaaaccctttctctctgtccgtccctggggcaggagtttttctgctgtccaaggaggctccttgacacagccacctgagaagttatgactctgctcattcttcctttcttctgagattatccactcccctctcctccccacacaggtggggagggggagaggcagccatgttgatatggactgagaaggctcagcagtgtgtccccaaggaggaggagagggtcattagcggacgccatggcctgggagctggcgggcagaagcaacagatgtccctgatgagtggagtcagagatggggtggaagccctgcctgggaataggacctcgttcttccctgcccggtgggtggagtagtggcaggaccttgtcaccaggctctgatgaaggcagggaccagcttcttgggatctttcaatcccaaactcttgcccttcactcatcgcagttctccccacggctactccaggtcctcttgaaatccgtcctctccatggacttcccacatccctctctgctctaggtttgattaacagaaggttgtaaatgaaaaccagcatctcccgagggcagccatggtctactgacagatggcaagttactttgtaacctgtaattttgtttttttgaattttgtataaataaacaggactaaactaa

SEQ ID NO: 17246 - DNA, 4109 bp, Homo sapiens
  source 1..4109: mol_type = unassigned DNA
gcgagcgaagggagcgctctgggatgggacttggagcaagcggcggcggcggagacagaggcagaggcagaagctggggctccgtcctcgcctcccacgagcgatccccgaggagagccgcggccctcggcgaggcgaagaggccgacgaggaagacccgggtggctgcgcccctgcctcgcttcccaggcgccggcggctgcagccttgcccctcttgctcgccttgaaaatggaaaagatgctcgcaggctgctttctgctgatcctcggacagatcgtcctcctccctgccgaggccagggagcggtcacgtgggaggtccatctctaggggcagacacgctcggacccacccgcagacggcccttctggagagttcctgtgagaacaagcgggcagacctggttttcatcattgacagctctcgcagtgtcaacacccatgactatgcaaaggtcaaggagttcatcgtggacatcttgcaattcttggacattggtcctgatgtcacccgagtgggcctgctccaatatggcagcactgtcaagaatgagttctccctcaagaccttcaagaggaagtccgaggtggagcgtgctgtcaagaggatgcggcatctgtccacgggcaccatgactgggctggccatccagtatgccctgaacatcgcattctcagaagcagagggggcccggcccctgagggagaatgtgccacgggtcataatgatcgtgacagatgggagacctcaggactccgtggccgaggtggctgctaaggcacgggacacgggcatcctaatctttgccattggtgtgggccaggtagacttcaacaccttgaagtccattgggagtgagccccatgaggaccatgtcttccttgtggccaatttcagccagattgagacgctgacctccgtgttccagaagaagttgtgcacggcccatatgtgcagcaccctggagcataactgtgcccacttctgcatcaacatccctggctcatacgtctgcaggtgcaaacaaggctacattctcaactcggatcagacgacttgcagaatccaggatctgtgtgccatggaggaccacaactgtgagcagctctgtgtgaatgtgccgggctccttcgtctgccagtgctacagtggctacgccctggctgaggatgggaagaggtgtgtggctgtggactactgtgcctcagaaaaccacggatgtgaacatgagtgtgtaaatgctgatggctcctacctttgccagtgccatgaaggatttgctcttaacccagataaaaaaacgtgcacaaagatagactactgtgcctcatctaatcacggatgtcagcacgagtgtgttaacacagatgattcctattcctgccactgcctgaaaggctttaccctgaatccagataagaaaacctgcagaaggatcaactactgtgcactgaacaaaccgggctgtgagcatgagtgcgtcaacatggaggagagctactactgccgctgccaccgtggctacactctggaccccaatggcaaaacctgcagccgagtggaccactgtgcacagcaggaccatggctgtgagcagctgtgtctgaacacggaggattccttcgtctgccagtgctcagaaggcttcctcatcaacgaggacctcaagacctgctcccgggtggattactgcctgctgagtgaccatggttgtgaatactcctgtgtcaacatggacagatcctttgcctgtcagtgtcctgagggacacgtgctccgcagcgatgggaagacgtgtgcaaaattggactcttgtgctctgggggaccacggttgtgaacattcgtgtgtaagcagtgaagattcgtttgtgtgccagtgctttgaaggttatatactccgtgaagatggaaaaacctgcagaaggaaagatgtctgccaagctatagaccatggctgtgaacacatttgtgtgaacagtgatgactcatacacgtgcgagtgcttggagggattccggctcgctgaggatgggaaacgctgccgaaggaaggatgtctgcaaatcaacccaccatggctgcgaacacatttgtgttaataatgggaattcctacatctgcaaatgctcagagggatttgttctagctgaggacggaagacggtgcaagaaatgcactgaaggcccaattgacctggtctttgtgatcgatggatccaagagtcttggagaagagaattttgaggtcgtgaagcagtttgtcactggaattatagattccttgacaatttcccccaaagccgctcgagtggggctgctccagtattccacacaggtccacacagagttcactctgagaaacttcaactcagccaaagacatgaaaaaagccgtggcccacatgaaatacatgggaaagggctctatgactgggctggccctgaaacacatgtttgagagaagttttacccaaggagaaggggccaggcccctttccacaagggtgcccagagcagccattgtgttcaccgacggacgggctcaggatgacgtctccgagtgggccagtaaagccaaggccaatggtatcactatgtatgctgttggggtaggaaaagccattgaggaggaactacaagagattgcctctgagcccacaaacaagcatctcttctatgccgaagacttcagcacaatggatgagataagtgaaaaactcaagaaaggcatctgtgaagctctagaagactccgatggaagacaggactctccagcaggggaactgccaaaaacggtccaacagccaacagaatctgagccagtcaccataaatatccaagacctactttcctgttctaattttgcagtgcaacacagatatctgtttgaagaagacaatcttttacggtctacacaaaagctttcccattcaacaaaaccttcaggaagccctttggaagaaaaacacgatcaatgcaaatgtgaaaaccttataatgttccagaaccttgcaaacgaagaagtaagaaaattaacacagcgtttactagaagaaatgacacagagaatggaagccctggaaaatcgcctgagatacagatgaagattagaaatcgcgacacatttgtagtcattgtatcacggattacaatgaacgcagtgcagagccccaaagctcaggctattgttaaatcaataatgttgtgaagtaaaacaatcagtactgagaaacctggtttgccacagaacaaagacaagaagtatacactaacttgtataaatttatctaggaaaaaaatccttcagaattctaagatgaatttaccaggtgagaatgaataagctatgcaaggtattttgtaatatactgtggacacaacttgcttctgcctcatcctgccttagtgtgcaatctcatttgactatacgataaagtttgcacagtcttacttctgtagaacactggccataggaaatgctgtttttttgtactggactttaccttgatatatgtatatggatgtatgcataaaatcataggacatatgtacttgtggaacaagttggattttttatacaatattaaaattcaccacttcagagaatggtattcagtgcaaaaattcttagtttaactttaaatggaagatatgtatgtatgagaaatggccaacatgcctatgaaaaaaatgctgaatctcatcagtaatcaggaaaatgcaggttaaaacaataccatttttcacccatcagcttagcaaaaatgagtatattttttaacaagtgttggtaaggatgtggaaatgtgaggttcttgtagtaagaatgcaaatggcactctttgtagagtaagtctgttgacatctcataaaactgaaaatgcacacaaccctgtaaatctagcaactgcactcagttgatttcagcccatacatacaaagagacctgcataagaatgttactaggctttgtaaaagcaaaaaataaggaacaacttaaacatcatcagaaggggaactgataaactctggtgtaatccataccacagaaatacaacaccgcatgtacaggaatgtgctacatctatacaaataaatggtcaaactc

SEQ ID NO: 17247 - DNA, 2985 bp, Homo sapiens
  source 1..2985: mol_type = unassigned DNA
gcgagcgaagggagcgctctgggatgggacttggagcaagcggcggcggcggagacagaggcagaggcagaagctggggctccgtcctcgcctcccacgagcgatccccgaggagagccgcggccctcggcgaggcgaagaggccgacgaggaagacccgggtggctgcgcccctgcctcgcttcccaggcgccggcggctgcagccttgcccctcttgctcgccttgaaaatggaaaagatgctcgcaggctgctttctgctgatcctcggacagatcgtcctcctccctgccgaggccagggagcggtcacgtgggaggtccatctctaggggcagacacgctcggacccacccgcagacggcccttctggagagttcctgtgagaacaagcgggcagacctggttttcatcattgacagctctcgcagtgtcaacacccatgactatgcaaaggtcaaggagttcatcgtggacatcttgcaattcttggacattggtcctgatgtcacccgagtgggcctgctccaatatggcagcactgtcaagaatgagttctccctcaagaccttcaagaggaagtccgaggtggagcgtgctgtcaagaggatgcggcatctgtccacgggcaccatgactgggctggccatccagtatgccctgaacatcgcattctcagaagcagagggggcccggcccctgagggagaatgtgccacgggtcataatgatcgtgacagatgggagacctcaggactccgtggccgaggtggctgctaaggcacgggacacgggcatcctaatctttgccattggtgtgggccaggtagacttcaacaccttgaagtccattgggagtgagccccatgaggaccatgtcttccttgtggccaatttcagccagattgagacgctgacctccgtgttccagaagaagttgtgcacggcccatatgtgcagcaccctggagcataactgtgcccacttctgcatcaacatccctggctcatacgtctgcaggtgcaaacaaggctacattctcaactcggatcagacgacttgcagaatccaggatctgtgtgccatggaggaccacaactgtgagcagctctgtgtgaatgtgccgggctccttcgtctgccagtgctacagtggctacgccctggctgaggatgggaagaggtgtgtggctgtggactactgtgcctcagaaaaccacggatgtgaacatgagtgtgtaaatgctgatggctcctacctttgccagtgccatgaaggatttgctcttaacccagataaaaaaacgtgcacaaggatcaactactgtgcactgaacaaaccgggctgtgagcatgagtgcgtcaacatggaggagagctactactgccgctgccaccgtggctacactctggaccccaatggcaaaacctgcagccgagtggaccactgtgcacagcaggaccatggctgtgagcagctgtgtctgaacacggaggattccttcgtctgccagtgctcagaaggcttcctcatcaacgaggacctcaagacctgctcccgggtggattactgcctgctgagtgaccatggttgtgaatactcctgtgtcaacatggacagatcctttgcctgtcagtgtcctgagggacacgtgctccgcagcgatgggaagacgtgtgcaaaattggactcttgtgctctgggggaccacggttgtgaacattcgtgtgtaagcagtgaagattcgtttgtgtgccagtgctttgaaggttatatactccgtgaagatggaaaaacctgcagaaggaaagatgtctgccaagctatagaccatggctgtgaacacatttgtgtgaacagtgatgactcatacacgtgcgagtgcttggagggattccggctcgctgaggatgggaaacgctgccgaaggaaggatgtctgcaaatcaacccaccatggctgcgaacacatttgtgttaataatgggaattcctacatctgcaaatgctcagagggatttgttctagctgaggacggaagacggtgcaagaaatgcactgaaggcccaattgacctggtctttgtgatcgatggatccaagagtcttggagaagagaattttgaggtcgtgaagcagtttgtcactggaattatagattccttgacaatttcccccaaagccgctcgagtggggctgctccagtattccacacaggtccacacagagttcactctgagaaacttcaactcagccaaagacatgaaaaaagccgtggcccacatgaaatacatgggaaagggctctatgactgggctggccctgaaacacatgtttgagagaagttttacccaaggagaaggggccaggcccctttccacaagggtgcccagagcagccattgtgttcaccgacggacgggctcaggatgacgtctccgagtgggccagtaaagccaaggccaatggtatcactatgtatgctgttggggtaggaaaagccattgaggaggaactacaagagattgcctctgagcccacaaacaagcatctcttctatgccgaagacttcagcacaatggatgagataagtgaaaaactcaagaaaggcatctgtgaagctctagaagactccgatggaagacaggactctccagcaggggaactgccaaaaacggtccaacagccaacagaatctgagccagtcaccataaatatccaagacctactttcctgttctaattttgcagtgcaacacagatatctgtttgaagaagacaatcttttacggtctacacaaaagctttcccattcaacaaaaccttcaggaagccctttggaagaaaaacacgatcaatgcaaatgtgaaaaccttataatgttccagaaccttgcaaacgaagaagtaagaaaattaacacagcgctatttactagaagaaatgacacagagaatggaagccctggaaaatcgcctgagatacagatga

SEQ ID NO: 17248 - DNA, 600 bp, Homo sapiens
  source 1..600: mol_type = unassigned DNA
aggtgatggctggtgggttcagagtaattaagactgatggataactgcagagaggaaatctagttttcagggcaaacagatgcgtccaagagagagcccacacacgtggttggatgcagctggagatggagaattccagttcaaggaaaaggcctgggcagtatgtgtttggtggtggtcgttgaccctgaaaatagatggaatcttggagggagaaagcgagtgtggaaagtgaagtccaggatctgtgtgccatggaggaccacaactgtgagcagctctgtgtgaatgtgccgggctccttcgtctgccagtgctacagtggctacgccctggctgaggatgggaagaggtgtgtggctgtggactactgtgcctcagaaaaccacggatgtgaacatgagtgtgtaaatgctgatggctcctacctttgccagtgccatgaaggatttgctcttaacccagataaaaaaacgtgcacaaagatagactactgtgcctcatctaatcacggatgtcagcacgagtgtgttaacacagatgattcctattcctgccactgcctgaaaggctttaccctgaatccagataagaaaacct

SEQ ID NO: 17249 - DNA, 3495 bp, Homo sapiens
  source 1..3495: mol_type = unassigned DNA
gaactctgaaaaggcggggcagcgggcctgcagctcctggagttcagggagacccggaaatctcaccctgccctcttcttgtgttgtgtttgtcacagccttgcccctcttgctcgccttgaaaatggaaaagatgctcgcaggctgctttctgctgatcctcggacagatcgtcctcctccctgccgaggccagggagcggtcacgtgggaggtccatctctaggggcagacacgctcggacccacccgcagacggcccttctggagagttcctgtgagaacaagcgggcagacctggttttcatcattgacagctctcgcagtgtcaacacccatgactatgcaaaggtcaaggagttcatcgtggacatcttgcaattcttggacattggtcctgatgtcacccgagtgggcctgctccaatatggcagcactgtcaagaatgagttctccctcaagaccttcaagaggaagtccgaggtggagcgtgctgtcaagaggatgcggcatctgtccacgggcaccatgactgggctggccatccagtatgccctgaacatcgcattctcagaagcagagggggcccggcccctgagggagaatgtgccacgggtcataatgatcgtgacagatgggagacctcaggactccgtggccgaggtggctgctaaggcacgggacacgggcatcctaatctttgccattggtgtgggccaggtagacttcaacaccttgaagtccattgggagtgagccccatgaggaccatgtcttccttgtggccaatttcagccagattgagacgctgacctccgtgttccagaagaagttgtgcacggcccatatgtgcagcaccctggagcataactgtgcccacttctgcatcaacatccctggctcatacgtctgcaggtgcaaacaaggctacattctcaactcggatcagacgacttgcagaatccaggatctgtgtgccatggaggaccacaactgtgagcagctctgtgtgaatgtgccgggctccttcgtctgccagtgctacagtggctacgccctggctgaggatgggaagaggtgtgtggctgtggactactgtgcctcagaaaaccacggatgtgaacatgagtgtgtaaatgctgatggctcctacctttgccagtgccatgaaggatttgctcttaacccagataaaaaaacgtgcacaaagatagactactgtgcctcatctaatcacggatgtcagcacgagtgtgttaacacagatgattcctattcctgccactgcctgaaaggctttaccctgaatccagataagaaaacctgcagaaggatcaactactgtgcactgaacaaaccgggctgtgagcatgagtgcgtcaacatggaggagagctactactgccgctgccaccgtggctacactctggaccccaatggcaaaacctgcagccgagtggaccactgtgcacagcaggaccatggctgtgagcagctgtgtctgaacacggaggattccttcgtctgccagtgctcagaaggcttcctcatcaacgaggacctcaagacctgctcccgggtggattactgcctgctgagtgaccatggttgtgaatactcctgtgtcaacatggacagatcctttgcctgtcagtgtcctgagggacacgtgctccgcagcgatgggaagacgtgtgcaaaattggactcttgtgctctgggggaccacggttgtgaacattcgtgtgtaagcagtgaagattcgtttgtgtgccagtgctttgaaggttatatactccgtgaagatggaaaaacctgcagaaggaaagatgtctgccaagctatagaccatggctgtgaacacatttgtgtgaacagtgatgactcatacacgtgcgagtgcttggagggattccggctcgctgaggatgggaaacgctgccgaaggaaggatgtctgcaaatcaacccaccatggctgcgaacacatttgtgttaataatgggaattcctacatctgcaaatgctcagagggatttgttctagctgaggacggaagacggtgcaagaaatgcactgaaggcccaattgacctggtctttgtgatcgatggatccaagagtcttggagaagagaattttgaggtcgtgaagcagtttgtcactggaattatagattccttgacaatttcccccaaagccgctcgagtggggctgctccagtattccacacaggtccacacagagttcactctgagaaacttcaactcagccaaagacatgaaaaaagccgtggcccacatgaaatacatgggaaagggctctatgactgggctggccctgaaacacatgtttgagagaagttttacccaaggagaaggggccaggcccctttccacaagggtgcccagagcagccattgtgttcaccgacggacgggctcaggatgacgtctccgagtgggccagtaaagccaaggccaatggtatcactatgtatgctgttggggtaggaaaagccattgaggaggaactacaagagattgcctctgagcccacaaacaagcatctcttctatgccgaagacttcagcacaatggatgagataagtgaaaaactcaagaaaggcatctgtgaagctctagaagactccgatggaagacaggactctccagcaggggaactgccaaaaacggtccaacagccaacagaatctgagccagtcaccataaatatccaagacctactttcctgttctaattttgcagtgcaacacagatatctgtttgaagaagacaatcttttacggtctacacaaaagctttcccattcaacaaaaccttcaggaagccctttggaagaaaaacacgatcaatgcaaatgtgaaaaccttataatgttccagaaccttgcaaacgaagaagtaagaaaattaacacagcgcttagaagaaatgacacagagaatggaagccctggaaaatcgcctgagatacagatgaagattagaaatcgcgacacatttgtagtcattgtatcacggattacaatgaacgcagtgcagagccccaaagctcaggctattgttaaatcaataatgttgtgaagtaaaacaatcagtactgagaaacctggtttgccacagaacaaagacaagaagtatacactaacttgtataaatttatctaggaaaaaaatccttcagaattctaagatgaatttaccaggtgagaatgaataagctatgcaaggtattttgtaatatactgtggacacaacttgcttctgcctcatcctgccttagtgtgcaatctcatttgactatacgataaagtttgcacagtcttacttctgtagaacactggccataggaaatgctgtttttttgtactggactttaccttgatatatgtatatggatgtatgcataaaatcataggacatatgtacttgtggaacaagttggattttttatacaatattaaaattcaccacttcagag

SEQ ID NO: 17250 - DNA, 3554 bp, Homo sapiens
  source 1..3554: mol_type = unassigned DNA
gatgcccgcctgggctcaggcacggacggagtggagccaggtggcagcaggcagggcgcgccgccagagtgcccagctcccggggctgcccacagggtggggccgccctcgccgccgctccctctccgcgccttccccatccccaaagaggacacccctccttccgcccggcccgctccccacccccgccgcggcaccgcctccccagccgcccgcccttgcccagcgcctcccaggcagccagcgagcgaagggagcgctctgggatgggacttggagcaagcggcggcggcggagacagaggcagaggcagaagctggggctccgtcctcgcctcccacgagcgatccccgaggagagccgcggccctcggcgaggcgaagaggccgacgaggaagacccgggtggctgcgcccctgcctcgcttcccaggcgccggcggctgcagccttgcccctcttgctcgccttgaaaatggaaaagatgctcgcaggctgctttctgctgatcctcggacagatcgtcctcctccctgccgaggccagggagcggtcacgtgggaggtccatctctaggggcagacacgctcggacccacccgcagacggcccttctggagagttcctgtgagaacaagcgggcagacctggttttcatcattgacagctctcgcagtgtcaacacccatgactatgcaaaggtcaaggagttcatcgtggacatcttgcaattcttggacattggtcctgatgtcacccgagtgggcctgctccaatatggcagcactgtcaagaatgagttctccctcaagaccttcaagaggaagtccgaggtggagcgtgctgtcaagaggatgcggcatctgtccacgggcaccatgactgggctggccatccagtatgccctgaacatcgcattctcagaagcagagggggcccggcccctgagggagaatgtgccacgggtcataatgatcgtgacagatgggagacctcaggactccgtggccgaggtggctgctaaggcacgggacacgggcatcctaatctttgccattggtgtgggccaggtagacttcaacaccttgaagtccattgggagtgagccccatgaggaccatgtcttccttgtggccaatttcagccagattgagacgctgacctccgtgttccagaagaagttgtgcacggcccatatgtgcagcaccctggagcataactgtgcccacttctgcatcaacatccctggctcatacgtctgcaggtgcaaacaaggctacattctcaactcggatcagacgacttgcagaatccaggatctgtgtgccatggaggaccacaactgtgagcagctctgtgtgaatgtgccgggctccttcgtctgccagtgctacagtggctacgccctggctgaggatgggaagaggtgtgtggctgtggactactgtgcctcagaaaaccacggatgtgaacatgagtgtgtaaatgctgatggctcctacctttgccagtgccatgaaggatttgctcttaacccagataaaaaaacgtgcacaaagatagactactgtgcctcatctaatcacggatgtcagcacgagtgtgttaacacagatgattcctattcctgccactgcctgaaaggctttaccctgaatccagataagaaaacctgcagaaggatcaactactgtgcactgaacaaaccgggctgtgagcatgagtgcgtcaacatggaggagagctactactgccgctgccaccgtggctacactctggaccccaatggcaaaacctgcagccgagtggaccactgtgcacagcaggaccatggctgtgagcagctgtgtctgaacacggaggattccttcgtctgccagtgctcagaaggcttcctcatcaacgaggacctcaagacctgctcccgggtggattactgcctgctgagtgaccatggttgtgaatactcctgtgtcaacatggacagatcctttgcctgtcagtgtcctgagggacacgtgctccgcagcgatgggaagacgtgtgcaaaattggactcttgtgctctgggggaccacggttgtgaacattcgtgtgtaagcagtgaagattcgtttgtgtgccagtgctttgaaggttatatactccgtgaagatggaaaaacctgcagaaggaaagatgtctgccaagctatagaccatggctgtgaacacatttgtgtgaacagtgatgactcatacacgtgcgagtgcttggagggattccggctcgctgaggatgggaaacgctgccgaaggaaggatgtctgcaaatcaacccaccatggctgcgaacacatttgtgttaataatgggaattcctacatctgcaaatgctcagagggatttgttctagctgaggacggaagacggtgcaagaaatgcactgaaggcccaattgacctggtctttgtgatcgatggatccaagagtcttggagaagagaattttgaggtcgtgaagcagtttgtcactggaattatagattccttgacaatttcccccaaagccgctcgagtggggctgctccagtattccacacaggtccacacagagttcactctgagaaacttcaactcagccaaagacatgaaaaaagccgtggcccacatgaaatacatgggaaagggctctatgactgggctggccctgaaacacatgtttgagagaagttttacccaaggagaaggggccaggcccctttccacaagggtgcccagagcagccattgtgttcaccgacggacgggctcaggatgacgtctccgagtgggccagtaaagccaaggccaatggtatcactatgtatgctgttggggtaggaaaagccattgaggaggaactacaagagattgcctctgagcccacaaacaagcatctcttctatgccgaagacttcagcacaatggatgagataagtgaaaaactcaagaaaggcatctgtgaagctctagaagactccgatggaagacaggactctccagcaggggaactgccaaaaacggtccaacagccaacagtgcaacacagatatctgtttgaagaagacaatcttttacggtctacacaaaagctttcccattcaacaaaaccttcaggaagccctttggaagaaaaacacgatcaatgcaaatgtgaaaaccttataatgttccagaaccttgcaaacgaagaagtaagaaaattaacacagcgcttagaagaaatgacacagagaatggaagccctggaaaatcgcctgagatacagatgaagattagaaatcgcgacacatttgtagtcattgtatcacggattacaatgaacgcagtgcagagccccaaagctcaggctattgttaaatcaataatgttgtgaagtaaaacaatcagtactgagaaacctggtttgccacagaacaaagacaagaagtatacactaacttgtataaatttatctaggaaaaaaatccttcagaattctaagatgaatttaccaggtgagaatgaataagctatgcaaggtattttgtaatatact

SEQ ID NO: 17251 - DNA, 2728 bp, Homo sapiens
  source 1..2728: mol_type = unassigned DNA
agctggggctccgtcctcgcctcccacgagcgatccccgaggagagccgcggccctcggcgaggcgaagaggccgacgaggaagacccgggtgcataactgtgcccacttctgcatcaacatccctggctcatacgtctgcaggtgcaaacaaggctacattctcaactcggatcagacgacttgcagaatccaggatctgtgtgccatggaggaccacaactgtgagcagctctgtgtgaatgtgccgggctccttcgtctgccagtgctacagtggctacgccctggctgaggatgggaagaggtgtgtggctgtggactactgtgcctcagaaaaccacggatgtgaacatgagtgtgtaaatgctgatggctcctacctttgccagtgccatgaaggatttgctcttaacccagataaaaaaacgtgcacaaagatagactactgtgcctcatctaatcacggatgtcagcacgagtgtgttaacacagatgattcctattcctgccactgcctgaaaggctttaccctgaatccagataagaaaacctgcagaaggatcaactactgtgcactgaacaaaccgggctgtgagcatgagtgcgtcaacatggaggagagctactactgccgctgccaccgtggctacactctggaccccaatggcaaaacctgcagccgagtggaccactgtgcacagcaggaccatggctgtgagcagctgtgtctgaacacggaggattccttcgtctgccagtgctcagaaggcttcctcatcaacgaggacctcaagacctgctcccgggtggattactgcctgctgagtgaccatggttgtgaatactcctgtgtcaacatggacagatcctttgcctgtcagtgtcctgagggacacgtgctccgcagcgatgggaagacgtgtgcaaaattggactcttgtgctctgggggaccacggttgtgaacattcgtgtgtaagcagtgaagattcgtttgtgtgccagtgctttgaaggttatatactccgtgaagatggaaaaacctgcagaaggaaagatgtctgccaagctatagaccatggctgtgaacacatttgtgtgaacagtgatgactcatacacgtgcgagtgcttggagggattccggctcgctgaggatgggaaacgctgccgaaggaaggatgtctgcaaatcaacccaccatggctgcgaacacatttgtgttaataatgggaattcctacatctgcaaatgctcagagggatttgttctagctgaggacggaagacggtgcaagaaatgcactgaaggcccaattgacctggtctttgtgatcgatggatccaagagtcttggagaagagaattttgaggtcgtgaagcagtttgtcactggaattatagattccttgacaatttcccccaaagccgctcgagtggggctgctccagtattccacacaggtccacacagagttcactctgagaaacttcaactcagccaaagacatgaaaaaagccgtggcccacatgaaatacatgggaaagggctctatgactgggctggccctgaaacacatgtttgagagaagttttacccaaggagaaggggccaggcccctttccacaagggtgcccagagcagccattgtgttcaccgacggacgggctcaggatgacgtctccgagtgggccagtaaagccaaggccaatggtatcactatgtatgctgttggggtaggaaaagccattgaggaggaactacaagagattgcctctgagcccacaaacaagcatctcttctatgccgaagacttcagcacaatggatgagataagtgaaaaactcaagaaaggcatctgtgaagctctagaagactccgatggaagacaggactctccagcaggggaactgccaaaaacggtccaacagccaacagaatctgagccagtcaccataaatatccaagacctactttcctgttctaattttgcagtgcaacacagatatctgtttgaagaagacaatcttttacggtctacacaaaagctttcccattcaacaaaaccttcaggaagccctttggaagaaaaacacgatcaatgcaaatgtgaaaaccttataatgttccagaaccttgcaaacgaagaagtaagaaaattaacacagcgcttagaagaaatgacacagagaatggaagccctggaaaatcgcctgagatacagatgaagattagaaatcgcgacacatttgtagtcattgtatcacggattacaatgaacgcagtgcagagccccaaagctcaggctattgttaaatcaataatgttgtgaagtaaaacaatcagtactgagaaacctggtttgccacagaacaaagacaagaagtatacactaacttgtataaatttatctaggaaaaaaatccttcagaattctaagatgaatttaccaggtgagaatgaataagctatgcaaggtattttgtaatatactgtggacacaacttgcttctgcctcatcctgccttagtgtgcaatctcatttgactatacgataaagtttgcacagtcttacttctgtagaacactggccataggaaatgctgtttttttgtactggactttaccttgatatatgtatatggatgtatgcataaaatcataggacatatgtacttgtggaacaagttggattttttatacaatattaaaattcaccacttcagagaa

SEQ ID NO: 17252 - DNA, 3449 bp, Homo sapiens
  source 1..3449: mol_type = unassigned DNA
acttggagcaagcggcggcggcggagacagaggcagaggcagaagctggggctccgtcctcgcctcccacgagcgatccccgaggagagccgcggccctcggcgaggcgaagaggccgacgaggaagacccgggtggctgcgcccctgcctcgcttcccaggcgccggcggctgcagccttgcccctcttgctcgccttgaaaatggaaaagatgctcgcaggctgctttctgctgatcctcggacagatcgtcctcctccctgccgaggccagggagcggtcacgtgggaggtccatctctaggggcagacacgctcggacccacccgcagacggcccttctggagagttcctgtgagaacaagcgggcagacctggttttcatcattgacagctctcgcagtgtcaacacccatgactatgcaaaggtcaaggagttcatcgtggacatcttgcaattcttggacattggtcctgatgtcacccgagtgggcctgctccaatatggcagcactgtcaagaatgagttctccctcaagaccttcaagaggaagtccgaggtggagcgtgctgtcaagaggatgcggcatctgtccacgggcaccatgactgggctggccatccagtatgccctgaacatcgcattctcagaagcagagggggcccggcccctgagggagaatgtgccacgggtcataatgatcgtgacagatgggagacctcaggactccgtggccgaggtggctgctaaggcacgggacacgggcatcctaatctttgccattggtgtgggccaggtagacttcaacaccttgaagtccattgggagtgagccccatgaggaccatgtcttccttgtggccaatttcagccagattgagacgctgacctccgtgttccagaagaagttgtgcacggcccatatgtgcagcaccctggagcataactgtgcccacttctgcatcaacatccctggctcatacgtctgcaggtgcaaacaaggctacattctcaactcggatcagacgacttgcagaatccaggatctgtgtgccatggaggaccacaactgtgagcagctctgtgtgaatgtgccgggctccttcgtctgccagtgctacagtggctacgccctggctgaggatgggaagaggtgtgtggctgtggactactgtgcctcagaaaaccacggatgtgaacatgagtgtgtaaatgctgatggctcctacctttgccagtgccatgaaggatttgctcttaacccagataaaaaaacgtgcacaaggatcaactactgtgcactgaacaaaccgggctgtgagcatgagtgcgtcaacatggaggagagctactactgccgctgccaccgtggctacactctggaccccaatggcaaaacctgcagccgagtggaccactgtgcacagcaggaccatggctgtgagcagctgtgtctgaacacggaggattccttcgtctgccagtgctcagaaggcttcctcatcaacgaggacctcaagacctgctcccgggtggattactgcctgctgagtgaccatggttgtgaatactcctgtgtcaacatggacagatcctttgcctgtcagtgtcctgagggacacgtgctccgcagcgatgggaagacgtgtgcaaaattggactcttgtgctctgggggaccacggttgtgaacattcgtgtgtaagcagtgaagattcgtttgtgtgccagtgctttgaaggttatatactccgtgaagatggaaaaacctgcagaaggaaagatgtctgccaagctatagaccatggctgtgaacacatttgtgtgaacagtgatgactcatacacgtgcgagtgcttggagggattccggctcgctgaggatgggaaacgctgccgaaggaaggatgtctgcaaatcaacccaccatggctgcgaacacatttgtgttaataatgggaattcctacatctgcaaatgctcagagggatttgttctagctgaggacggaagacggtgcaagaaatgcactgaaggcccaattgacctggtctttgtgatcgatggatccaagagtcttggagaagagaattttgaggtcgtgaagcagtttgtcactggaattatagattccttgacaatttcccccaaagccgctcgagtggggctgctccagtattccacacaggtccacacagagttcactctgagaaacttcaactcagccaaagacatgaaaaaagccgtggcccacatgaaatacatgggaaagggctctatgactgggctggccctgaaacacatgtttgagagaagttttacccaaggagaaggggccaggcccctttccacaagggtgcccagagcagccattgtgttcaccgacggacgggctcaggatgacgtctccgagtgggccagtaaagccaaggccaatggtatcactatgtatgctgttggggtaggaaaagccattgaggaggaactacaagagattgcctctgagcccacaaacaagcatctcttctatgccgaagacttcagcacaatggatgagataagtgaaaaactcaagaaaggcatctgtgaagctctagaagactccgatggaagacaggactctccagcaggggaactgccaaaaacggtccaacagccaacagaatctgagccagtcaccataaatatccaagacctactttcctgttctaattttgcagtgcaacacagatatctgtttgaagaagacaatcttttacggtctacacaaaagctttcccattcaacaaaaccttcaggaagccctttggaagaaaaacacgatcaatgcaaatgtgaaaaccttataatgttccagaaccttgcaaacgaagaagtaagaaaattaacacagcgcttagaagaaatgacacagagaatggaagccctggaaaatcgcctgagatacagatgaagattagaaatcgcgacacatttgtagtcattgtatcacggattacaatgaacgcagtgcagagccccaaagctcaggctattgttaaatcaataatgttgtgaagtaaaacaatcagtactgagaaacctggtttgccacagaacaaagacaagaagtatacactaacttgtataaatttatctaggaaaaaaatccttcagaattctaagatgaatttaccaggtgagaatgaataagctatgcaaggtattttgtaatatactgtggacacaacttgcttctgcctcatcctgccttagtgtgcaatctcatttgactatacgataaagtttgcacagtcttacttctgtagaacactggccataggaaatgctgtttttttgtactggactttaccttgatatatgtatatggatgtatgcataaaatcataggacatatgtacttgtggaacaagttggattttttatacaatattaaaattcaccacttcag

SEQ ID NO: 17253 - DNA, 2524 bp, Homo sapiens
  source 1..2524: mol_type = unassigned DNA
aaatccgagcctcgcgtgggctcctggcccccgacggacaccaccaggcccacggagcccaccatgccgcgcccggcccccgcgcgccgcctcccgggactcctcctgctgctctggccgctgctgctgctgccctccgccgcccccgaccccgtggcccgcccgggcttccggaggctggagacccgaggtcccgggggcagccctggacgccgcccctctcctgcggctcccgacggcgcgcccgcttccgggaccagcgagcctggccgcgcccgcggtgcaggtgtttgcaagagcagacccttggacctggtgtttatcattgatagttctcgtagcgtacggcccctggaattcaccaaagtgaaaacttttgtctcccggataatcgacactctggacattgggccagccgacacgcgggtggcagtggtgaactatgctagcactgtgaagatcgagttccaactccaggcctacacagataagcagtccctgaagcaggccgtgggtcgaatcacacccttgtcaacaggcaccatgtcaggcctagccatccagacagcaatggacgaagccttcacagtggaggcaggggctcgagagccctcttctaacatccctaaggtggccatcattgttacagatgggaggccccaggaccaggtgaatgaggtggcggctcgggcccaagcatctggtattgagctctatgctgtgggcgtggaccgggcagacatggcgtccctcaagatgatggccagtgagcccctagaggagcatgttttctacgtggagacctatggggtcattgagaaactttcctctagattccaggaaaccttctgtgcgctggacccctgtgtgcttggaacacaccagtgccagcacgtctgcatcagtgatggggaaggcaagcaccactgtgagtgtagccaaggatacaccttgaatgccgacaagaaaacgtgttcagctcttgataggtgtgctcttaacacccacggatgtgagcacatctgtgtgaatgacagaagtggctcttatcattgtgagtgctatgaaggttataccttgaatgaagacaggaaaacttgttcagctcaagataaatgtgctttgggtacccatgggtgtcagcacatttgtgtgaatgacagaacagggtcccatcattgtgaatgctatgagggctacactctgaatgcagataaaaaaacatgttcagtccgtgacaagtgtgccctaggctctcatggttgccagcacatttgtgtgagtgatggggccgcatcctaccactgtgattgctatcctggctacaccttaaatgaggacaagaaaacatgttcagccactgaggaagcacgaagacttgtttccactgaagatgcttgtggatgtgaagctacactggcattccaggacaaggtcagctcgtatcttcaaagactgaacactaaacttgatgacattttggagaagttgaaaataaatgaatatggacaaatacatcgttaaattgctccaatttctcacctgaaaatgtggacagcttggtgtacttaatactcatgcattcttttgcacacctgttattgccaatgttcctgctaataatttgccattatctgtattaatgcttgaatattactggataaattgtatgaagatcttctgcagaatcagcatgattcttccaaggaaatacatatgcagatacttattaagagcaaactttagtgtctctaagttatgactgtgaaatgattggtaggaaatagaatgaaaagtttagtgtttctttatctactaattgagccatttaatttttaaatgtttatattagataaccatattcacaatggaaactttaggtctagtttcttttgatagtatttataatataaatcaatcttattactgagagtgcaaattgtacaaggtatttacacatacaacttcatataactgagatgaatgtaattttgaactgtttaacactttttgttttttgcttattttgttggagtattattgaagatgtgatcaatagattgtaatacacatatctaaaaatagttaacacagatcaagtgaacattacattgccatttttaattcattctggtctttgaaagaaatgtactactaaagagcactagttgtgaatttagggtgttaaactttttaccaagtacaaaaatcccaaattcactttattattttgcttcaggatccaagtgacaaagttatatatttataaaattgctataaatcgacaaaatctaatgttgtctttttaatgttagtgatccacctgcctcagcctcccaaagtgctgggattacaggcttgaaagtctaacttttttttacttatatatttgatacatataattcttttggctttgaaacttgcaactttgagaacaaaacagtcctttaaattttgcactgctcaattctgtttttcgtttgcattgtctttaatataataaaagttattacctttacatatt

SEQ ID NO: 17254 - DNA, 1443 bp, Homo sapiens
  source 1..1443: mol_type = unassigned DNA
cccgacggacaccaccaggcccacggagcccaccatgccgcgcccggcccccgcgcgccgcctcccgggactcctcctgctgctctggccgctgctgctgctgccctccgccgcccccgaccccgtggcccgcccgggcttccggaggctggagacccgaggtcccgggggcagccctggacgccgcccctctcctgcggctcccgacggcgcgcccgcttccgggaccagcgagcctggccgcgcccgcggtgcaggtgtttgcaagagcagacccttggacctggtgtttatcattgatagttctcgtagcgtacggcccctggaattcaccaaagtgaaaacttttgtctcccggataatcgacactctggacattgggccagccgacacgcgggtggcagtggtgaactatgctagcactgtgaagatcgagttccaactccaggcctacacagataagcagtccctgaagcaggccgtgggtcgaatcacacccttgtcaacaggcaccatgtcaggcctagccatccagacagcaatggacgaagccttcacagtggaggcaggggctcgagagccctcttctaacatccctaaggtggccatcattgttacagatgggaggccccaggaccaggtgaatgaggtggcggctcgggcccaagcatctggtattgagctctatgctgtgggcgtggaccgggcagacatggcgtccctcaagatgatggccagtgagcccctagaggagcatgttttctacgtggagacctatggggtcattgagaaactttcctctagattccaggaaaccttctgtgctcttgataggtgtgctcttaacacccacggatgtgagcacatctgtgtgaatgacagaagtggctcttatcattgtgagtgctatgaaggttataccttgaatgaagacaggaaaacttgttcagctcaagataaatgtgctttgggtacccatgggtgtcagcacatttgtgtgaatgacagaacagggtcccatcattgtgaatgctatgagggctacactctgaatgcagataaaaaaacatgttcagtccgtgacaagtgtgccctaggctctcatggttgccagcacatttgtgtgagtgatggggccgcatcctaccactgtgattgctatcctggctacaccttaaatgaggacaagaaaacatgttcagccactgaggaagcacgaagacttgtttccactgaagatgcttgtggatgtgaagctacactggcattccaggacaaggtcagctcgtatcttcaaagactgaacactaaacttgatgacattttggagaagttgaaaataaatgaatatggacaaatacatcgttaaattgctccaatttctcacctgaaaatgtggacagcttggtgtacttaatactcatgcattcttttgcacacctg

SEQ ID NO: 17255 - DNA, 2056 bp, Homo sapiens
  source 1..2056: mol_type = unassigned DNA
aaatgcggccgttgcctctgtgtgctccagctgcctggcagtccccacctagggcacgctgccacgccgccgttacctggtccaagtgcccgggaggctccgcctgtcggcttcgctctgcagctgcatctctgatctgtcctgcaggctcaggctctgacacctccattctctgtccccaagcgccatgagaggccttctttgctggcccgtgttgctgctccttcttcagccctgggaaacccagctccagttgacaggtcccaggtgtcacactgggcccctggatctggtgttcgtgattgacagctcccgcagcgtgcgccctttcgagttcgagaccatgcggcagttcctcatgggcctcctccgaggcctgaacgtgggtcccaacgccacgcgcgttggcgtgatccagtattcgagtcaagtgcagagcgtcttccctctccgcgcgttctctcgccgcgaggacatggagcgcgccatccgcgacctggtgcctctggcgcaaggcaccatgacgggactggcaatccagtacgccatgaacgtggccttcagtgtggccgagggcgcgcgaccgccagaggagcgcgtgccgcgtgtcgctgtcatcgtgacagacgggcggccccaggaccgcgtggccgaggtggcggcacaggcgcgcgcccgcggcattgaaatttacgcggtgggggtgcagcgcgcggacgtgggctccctgcgcgccatggcatcgcccccgctagacgagcacgtcttcctcgtagagtccttcgacctcatccaggagttcggcctgcagttccagagccggctgtgtgggaaggaccagtgtgctgaggggggacatggttgccagcaccaatgtgtcaatgcctgggccatgttccactgcacctgcaacccaggctacaagctagcagcagataacaagagctgtttggccattgatctgtgtgctgaagggacccatggatgtgagcaccactgcgtcaattccccaggctcctatttctgtcactgccaagttggctttgtactccagcaggaccagaggagctgcagggccattgactactgcagctttgggaaccatagctgtcagcatgagtgtgttagcacccctggtgggccacggtgccactgcagagagggccatgacttgcagcctgatgggaggagctgtcaggtccgggacctttgcaatggcgtggaccatggctgtgagttccagtgtgtgagcgagggcctctcctaccgctgcctgtgccccgaggggcggcaacttcaggcagatggcaagagctgcaaccggtgccgggaaggccacgtggaccttgttctgctggttgatggctccaagagcgtgcgtccacaaaacttcgagctagtgaagcgcttcgtgaaccagattgtggacttcctagatgtgtcccccgagggcacgcgggtggggctggtgcagttctcgagccgcgtgcgcaccgagttccctctgggtcgctacggcaccgcagccgaggtgaagcaggcggtcctggccgtggagtacatggaacgcggcaccatgacagggctggcgttgcggcacatggtggagcacagcttctccgaggcgcagggtgcacggccccgtgcccttaacgtgcctcgtgttggcctggtcttcacggatggccgctcccaggatgacatctcggtgtgggcagcgcgcgccaaggaggaaggcatcgtcatgtacgccgtgggcgtgggcaaggcggtggaggcggagctgcgcgagatcgcctcggagccagcggaactgcacgtgtcctatgccccggacttcggcaccatgacgcacctgctggagaacctcagaggcagcatctgtccagaggagggcatcagcgcagggacagagcttcggagcccatgcgaatgcgaaagcctcgtggagttccagggccgcacgctgggggcgctcgagagcctgacgctgaacctggcccagctgacggcgcgcctggaggatctggagaaccagctggccaaccagaagtga

SEQ ID NO: 17256 - DNA, 2253 bp, Homo sapiens
  source 1..2253: mol_type = unassigned DNA
aaatgcggccgttgcctctgtgtgctccagctgcctggcagtccccacctagggcacgctgccacgccgccgttacctggtccaagtgcccgggaggctccgcctgtcggcttcgctctgcagctgcatctctgatctgtcctgcaggctcaggctctgacacctccattctctgtccccaagcgccatgagaggccttctttgctggcccgtgttgctgctccttcttcagccctgggaaacccagctccagttgacaggtcccaggtgtcacactgggcccctggatctggtgttcgtgattgacagctcccgcagcgtgcgccctttcgagttcgagaccatgcggcagttcctcatgggcctcctccgaggcctgaacgtgggtcccaacgccacgcgcgttggcgtgatccagtattcgagtcaagtgcagagcgtcttccctctccgcgcgttctctcgccgcgaggacatggagcgcgccatccgcgacctggtgcctctggcgcaaggcaccatgacgggactggcaatccagtacgccatgaacgtggccttcagtgtggccgagggcgcgcgaccgccagaggagcgcgtgccgcgtgtcgctgtcatcgtgacagacgggcggccccaggaccgcgtggccgaggtggcggcacaggcgcgcgcccgcggcattgaaatttacgcggtgggggtgcagcgcgcggacgtgggctccctgcgcgccatggcatcgcccccgctagacgagcacgtcttcctcgtagagtccttcgacctcatccaggagttcggcctgcagttccagagccggctgtgtgccattgatctgtgtgctgaagggacccatggatgtgagcaccactgcgtcaattccccaggctcctatttctgtcactgccaagttggctttgtactccagcaggaccagaggagctgcagggccattgactactgcagctttgggaaccatagctgtcagcatgagtgtgttagcacccctggtgggccacggtgccactgcagagagggccatgacttgcagcctgatgggaggagctgtcaggtccgggacctttgcaatggcgtggaccatggctgtgagttccagtgtgtgagcgagggcctctcctaccgctgcctgtgccccgaggggcggcaacttcaggcagatggcaagagctgcaaccggtgccgggaaggccacgtggaccttgttctgctggttgatggctccaagagcgtgcgtccacaaaacttcgagctagtgaagcgcttcgtgaaccagattgtggacttcctagatgtgtcccccgagggcacgcgggtggggctggtgcagttctcgagccgcgtgcgcaccgagttccctctgggtcgctacggcaccgcagccgaggtgaagcaggcggtcctggccgtggagtacatggaacgcggcaccatgacagggctggcgttgcggcacatggtggagcacagcttctccgaggcgcagggtgcacggccccgtgcccttaacgtgcctcgtgttggcctggtcttcacggatggccgctcccaggatgacatctcggtgtgggcagcgcgcgccaaggaggaaggcatcgtcatgtacgccgtgggcgtgggcaaggcggtggaggcggagctgcgcgagatcgcctcggagccagcggaactgcacgtgtcctatgccccggacttcggcaccatgacgcacctgctggagaacctcagaggcagcatctgtccagaggagggcatcagcgcagggacagagcttcggagcccatgcgaatgcgaaagcctcgtggagttccagggccgcacgctgggggcgctcgagagcctgacgctgaacctggcccagctgacggcgcgcctggaggatctggagaaccagctggccaaccagaagtgagggccacggacggcccagacccgggctggggcgcggcaccacggacggtgccccttgcgcgccatcggtgcgccggggccaggcagaacctgggcccgtccggcttgggctgtcggggcggaggcgctggcgggcttccggcattgagctgagttggcctcgcccggaccattaggcggactgcggcgtcagggggatagcgggtggtgagggaaggggcacgtgctagaccggcacgccctcgccgcgtgctgcgctcagttctttgttggatttcttgtttgtgttcttaaaaaaataaaaaaaactgatttccacgg

SEQ ID NO: 17257 - DNA, 2007 bp, Homo sapiens
  source 1..2007: mol_type = unassigned DNA
aaatgcggccgttgcctctgtgtgctccagctgcctggcagtccccacctagggcacgctgccacgccgccgttacctggtccaagtgcccgggaggctccgcctgtcggcttcgctctgcagctgcatctctgatctgtcctgcaggctcaggctctgacacctccattctctgtccccaagcgccatgagaggccttctttgctggcccgtgttgctgctccttcttcagccctgggaaacccagctccagttgacaggtcccaggtgtcacactgggcccctggatctggtgttcgtgattgacagctcccgcagcgtgcgccctttcgagttcgagaccatgcggcagttcctcatgggcctcctccgaggcctgaacgtgggtcccaacgccacgcgcgttggcgtgatccagtattcgagtcaagtgcagagcgtcttccctctccgcgcgttctctcgccgcgaggacatggagcgcgccatccgcgacctggtgcctctggcgcaaggcaccatgacgggactggcaatccagtacgccatgaacgtggccttcagtgtggccgagggcgcgcgaccgccagaggagcgcgtgccgcgtgtcgctgtcatcgtgacagacgggcggccccaggaccgcgtggccgaggtggcggcacaggcgcgcgcccgcggcattgaaatttacgcggtgggggtgcagcgcgcggacgtgggctccctgcgcgccatggcatcgcccccgctagacgagcacgtcttcctcgtagagtccttcgacctcatccaggagttcggcctgcagttccagagccggctgtgtgtccgggacctttgcaatggcgtggaccatggctgtgagttccagtgtgtgagcgagggcctctcctaccgctgcctgtgccccgaggggcggcaacttcaggcagatggcaagagctgcaaccggtgccgggaaggccacgtggaccttgttctgctggttgatggctccaagagcgtgcgtccacaaaacttcgagctagtgaagcgcttcgtgaaccagattgtggacttcctagatgtgtcccccgagggcacgcgggtggggctggtgcagttctcgagccgcgtgcgcaccgagttccctctgggtcgctacggcaccgcagccgaggtgaagcaggcggtcctggccgtggagtacatggaacgcggcaccatgacagggctggcgttgcggcacatggtggagcacagcttctccgaggcgcagggtgcacggccccgtgcccttaacgtgcctcgtgttggcctggtcttcacggatggccgctcccaggatgacatctcggtgtgggcagcgcgcgccaaggaggaaggcatcgtcatgtacgccgtgggcgtgggcaaggcggtggaggcggagctgcgcgagatcgcctcggagccagcggaactgcacgtgtcctatgccccggacttcggcaccatgacgcacctgctggagaacctcagaggcagcatctgtccagaggagggcatcagcgcagggacagagcttcggagcccatgcgaatgcgaaagcctcgtggagttccagggccgcacgctgggggcgctcgagagcctgacgctgaacctggcccagctgacggcgcgcctggaggatctggagaaccagctggccaaccagaagtgagggccacggacggcccagacccgggctggggcgcggcaccacggacggtgccccttgcgcgccatcggtgcgccggggccaggcagaacctgggcccgtccggcttgggctgtcggggcggaggcgctggcgggcttccggcattgagctgagttggcctcgcccggaccattaggcggactgcggcgtcagggggatagcgggtggtgagggaaggggcacgtgctagaccggcacgccctcgccgcgtgctgcgctcagttctttgttggatttcttgtttgtgttcttaaaaaaataaaaaaaactgatttccacgg

SEQ ID NO: 17258 - DNA, 2130 bp, Homo sapiens
  source 1..2130: mol_type = unassigned DNA
aaatgcggccgttgcctctgtgtgctccagctgcctggcagtccccacctagggcacgctgccacgccgccgttacctggtccaagtgcccgggaggctccgcctgtcggcttcgctctgcagctgcatctctgatctgtcctgcaggctcaggctctgacacctccattctctgtccccaagcgccatgagaggccttctttgctggcccgtgttgctgctccttcttcagccctgggaaacccagctccagttgacaggtcccaggtgtcacactgggcccctggatctggtgttcgtgattgacagctcccgcagcgtgcgccctttcgagttcgagaccatgcggcagttcctcatgggcctcctccgaggcctgaacgtgggtcccaacgccacgcgcgttggcgtgatccagtattcgagtcaagtgcagagcgtcttccctctccgcgcgttctctcgccgcgaggacatggagcgcgccatccgcgacctggtgcctctggcgcaaggcaccatgacgggactggcaatccagtacgccatgaacgtggccttcagtgtggccgagggcgcgcgaccgccagaggagcgcgtgccgcgtgtcgctgtcatcgtgacagacgggcggccccaggaccgcgtggccgaggtggcggcacaggcgcgcgcccgcggcattgaaatttacgcggtgggggtgcagcgcgcggacgtgggctccctgcgcgccatggcatcgcccccgctagacgagcacgtcttcctcgtagagtccttcgacctcatccaggagttcggcctgcagttccagagccggctgtgtgccattgactactgcagctttgggaaccatagctgtcagcatgagtgtgttagcacccctggtgggccacggtgccactgcagagagggccatgacttgcagcctgatgggaggagctgtcaggtccgggacctttgcaatggcgtggaccatggctgtgagttccagtgtgtgagcgagggcctctcctaccgctgcctgtgccccgaggggcggcaacttcaggcagatggcaagagctgcaaccggtgccgggaaggccacgtggaccttgttctgctggttgatggctccaagagcgtgcgtccacaaaacttcgagctagtgaagcgcttcgtgaaccagattgtggacttcctagatgtgtcccccgagggcacgcgggtggggctggtgcagttctcgagccgcgtgcgcaccgagttccctctgggtcgctacggcaccgcagccgaggtgaagcaggcggtcctggccgtggagtacatggaacgcggcaccatgacagggctggcgttgcggcacatggtggagcacagcttctccgaggcgcagggtgcacggccccgtgcccttaacgtgcctcgtgttggcctggtcttcacggatggccgctcccaggatgacatctcggtgtgggcagcgcgcgccaaggaggaaggcatcgtcatgtacgccgtgggcgtgggcaaggcggtggaggcggagctgcgcgagatcgcctcggagccagcggaactgcacgtgtcctatgccccggacttcggcaccatgacgcacctgctggagaacctcagaggcagcatctgtccagaggagggcatcagcgcagggacagagcttcggagcccatgcgaatgcgaaagcctcgtggagttccagggccgcacgctgggggcgctcgagagcctgacgctgaacctggcccagctgacggcgcgcctggaggatctggagaaccagctggccaaccagaagtgagggccacggacggcccagacccgggctggggcgcggcaccacggacggtgccccttgcgcgccatcggtgcgccggggccaggcagaacctgggcccgtccggcttgggctgtcggggcggaggcgctggcgggcttccggcattgagctgagttggcctcgcccggaccattaggcggactgcggcgtcagggggatagcgggtggtgagggaaggggcacgtgctagaccggcacgccctcgccgcgtgctgcgctcagttctttgttggatttcttgtttgtgttcttaaaaaaataaaaaaaactgatttccacgg

SEQ ID NO: 17259 - DNA, 1486 bp, Homo sapiens
  source 1..1486: mol_type = unassigned DNA
aaatgcggccgttgcctctgtgtgctccagctgcctggcagtccccacctagggcacgctgccacgccgccgttacctggtccaagtgcccgggaggctccgcctgtcggcttcgctctgcagctgcatctctgatctgtcctgcaggctcaggctctgacacctccattctctgtccccaagcgccatgagaggccttctttgctggcccgtgttgctgctccttcttcagccctgggaaacccagctccagttgacagggaaggaccagtgtgctgaggggggacatggttgccagcaccaatgtgtcaatgcctgggccatgttccactgcacctgcaacccaggctacaagctagcagcagataacaagagctgtttggccattgatctgtgtgctgaagggacccatggatgtgagcaccactgcgtcaattccccaggctcctatttctgtcactgccaagttggctttgtactccagcaggaccagaggagctgcagggccattgactactgcagctttgggaaccatagctgtcagcatgagtgtgttagcacccctggtgggccacggtgccactgcagagagggccatgacttgcagcctgatgggaggagctgtcaggtccgggacctttgcaatggcgtggaccatggctgtgagttccagtgtgtgagcgagggcctctcctaccgctgcctgtgccccgaggggcggcaacttcaggcagatggcaagagctgcaaccggtgccgggaaggccacgtggaccttgttctgctggttgatggctccaagagcgtgcgtccacaaaacttcgagctagtgaagcgcttcgtgaaccagattgtggacttcctagatgtgtcccccgagggcacgcgggtggggctggtgcagttctcgagccgcgtgcgcaccgagttccctctgggtcgctacggcaccgcagccgaggtgaagcaggcggtcctggccgtggagtacatggaacgcggcaccatgacagggctggcgttgcggcacatggtggagcacagcttctccgaggcgcagggtgcacggccccgtgcccttaacgtgcctcgtgttggcctggtcttcacggatggccgctcccaggatgacatctcggtgtgggcagcgcgcgccaaggaggaaggcatcgtcatgtacgccgtgggcgtgggcaaggcggtggaggcggagctgcgcgagatcgcctcggagccagcggaactgcacgtgtcctatgccccggacttcggcaccatgacgcacctgctggagaacctcagaggcagcatctgtccagaggagggcatcagcgcagggacagagcttcggagcccatgcgaatgcgaaagcctcgtggagttccagggccgcacgctgggggcgctcgagagcctgacgctgaacctggcccagctgacggcgcgcctggaggatctggagaaccagctggccaaccagaagtga

SEQ ID NO: 17260 - DNA, 1630 bp, Homo sapiens
  source 1..1630: mol_type = unassigned DNA
ccaagcgccatgagaggccttctttgctggcccgtgttgctgctccttcttcagccctgggaaacccagctccagttgacagggaaggaccagtgtgctgaggggggacatggttgccagcaccaatgtgtcaatgcctgggccatgttccactgcacctgcaacccaggctacaagctagcagcagataacaagagctgtttggccattgatctgtgtgctgaagggacccatggatgtgagcaccactgcgtcaattccccaggctcctatttctgtcactgccaagttggctttgtactccagcaggaccagaggagctgcagggccattgactactgcagctttgggaaccatagctgtcagcatgagtgtgttagcacccctggtgggccacggtgccactgcagagagggccatgacttgcagcctgatgggaggagctgtcaggtccgggacctttgcaatggcgtggaccatggctgtgagttccagtgtgtgagcgagggcctctcctaccgctgcctgtgccccgaggggcggcaacttcaggcagatggcaagagctgcaaccggtgccgggaaggccacgtggaccttgttctgctggttgatggctccaagagcgtgcgtccacaaaacttcgagctagtgaagcgcttcgtgaaccagattgtggacttcctagatgtgtcccccgagggcacgcgggtggggctggtgcagttctcgagccgcgtgcgcaccgagttccctctgggtcgctacggcaccgcagccgaggtgaagcaggcggtcctggccgtggagtacatggaacgcggcaccatgacagggctggcgttgcggcacatggtggagcacagcttctccgaggcgcagggtgcacggccccgtgcccttaacgtgcctcgtgttggcctggtcttcacggatggccgctcccaggatgacatctcggtgtgggcagcgcgcgccaaggaggaaggcatcgtcatgtacgccgtgggcgtgggcaaggcggtggaggcggagctgcgcgagatcgcctcggagccagcggaactgcacgtgtcctatgccccggacttcggcaccatgacgcacctgctggagaacctcagaggcagcatctgtccagaggagggcatcagcgcagggacagagcttcggagcccatgcgaatgcgaaagcctcgtggagttccagggccgcacgctgggggcgctcgagagcctgacgctgaacctggcccagctgacggcgcgcctggaggatctggagaaccagctggccaaccagaagtgagggccacggacggcccagacccgggctggggcgcggcaccacggacggtgccccttgcgcgccatcggtgcgccggggccaggcagaacctgggcccgtccggcttgggctgtcggggcggaggcgctggcgggcttccggcattgagctgagttggcctcgcccggaccattaggcggactgcggcgtcagggggatagcgggtggtgagggaaggggcacgtgctagaccggcacgccctcgccgcgtgctgcgctcagttctttgttggatttcttgtttgtgttcttaaaaaaataaaaaaaactgatttccacgggg

SEQ ID NO: 17261 - DNA, 2200 bp, Homo sapiens
  source 1..2200: mol_type = unassigned DNA
ccaagcgccatgagaggccttctttgctggcccgtgttgctgctccttcttcagccctgggaaacccagctccagttgacaggtcccaggtgtcacactgggcccctggatctggtgttcgtgattgacagctcccgcagcgtgcgccctttcgagttcgagaccatgcggcagttcctcatgggcctcctccgaggcctgaacgtgggtcccaacgccacgcgcgttggcgtgatccagtattcgagtcaagtgcagagcgtcttccctctccgcgcgttctctcgccgcgaggacatggagcgcgccatccgcgacctggtgcctctggcgcaaggcaccatgacgggactggcaatccagtacgccatgaacgtggccttcagtgtggccgagggcgcgcgaccgccagaggagcgcgtgccgcgtgtcgctgtcatcgtgacagacgggcggccccaggaccgcgtggccgaggtggcggcacaggcgcgcgcccgcggcattgaaatttacgcggtgggggtgcagcgcgcggacgtgggctccctgcgcgccatggcatcgcccccgctagacgagcacgtcttcctcgtagagtccttcgacctcatccaggagttcggcctgcagttccagagccggctgtgtgggaaggaccagtgtgctgaggggggacatggttgccagcaccaatgtgtcaatgcctgggccatgttccactgcacctgcaacccaggctacaagctagcagcagataacaagagctgtttggccattgatctgtgtgctgaagggacccatggatgtgagcaccactgcgtcaattccccaggctcctatttctgtcactgccaagttggctttgtactccagcaggaccagaggagctgcagggccattgactactgcagctttgggaaccatagctgtcagcatgagtgtgttagcacccctggtgggccacggtgccactgcagagagggccatgacttgcagcctgatgggaggagctgtcaggtccgggacctttgcaatggcgtggaccatggctgtgagttccagtgtgtgagcgagggcctctcctaccgctgcctgtgccccgaggggcggcaacttcaggcagatggcaagagctgcaaccggtgccgggaaggccacgtggaccttgttctgctggttgatggctccaagagcgtgcgtccacaaaacttcgagctagtgaagcgcttcgtgaaccagattgtggacttcctagatgtgtcccccgagggcacgcgggtggggctggtgcagttctcgagccgcgtgcgcaccgagttccctctgggtcgctacggcaccgcagccgaggtgaagcaggcggtcctggccgtggagtacatggaacgcggcaccatgacagggctggcgttgcggcacatggtggagcacagcttctccgaggcgcagggtgcacggccccgtgcccttaacgtgcctcgtgttggcctggtcttcacggatggccgctcccaggatgacatctcggtgtgggcagcgcgcgccaaggaggaaggcatcgtcatgtacgccgtgggcgtgggcaaggcggtggaggcggagctgcgcgagatcgcctcggagccagcggaactgcacgtgtcctatgccccggacttcggcaccatgacgcacctgctggagaacctcagaggcagcatctgtccagaggagggcatcagcgcagggacagagcttcggagcccatgcgaatgcgaaagcctcgtggagttccagggccgcacgctgggggcgctcgagagcctgacgctgaacctggcccagctgacggcgcgcctggaggatctggagaaccagctggccaaccagaagtgagggccacggacggcccagacccgggctggggcgcggcaccacggacggtgccccttgcgcgccatcggtgcgccggggccaggcagaacctgggcccgtccggcttgggctgtcggggcggaggcgctggcgggcttccggcattgagctgagttggcctcgcccggaccattaggcggactgcggcgtcagggggatagcgggtggtgagggaaggggcacgtgctagaccggcacgccctcgccgcgtgctgcgctcagttctttgttggatttcttgtttgtgttcttaaaaaaataaaaaaaactgatttccacgggg

SEQ ID NO: 17262 - DNA, 2282 bp, Homo sapiens
  source 1..2282: mol_type = unassigned DNA
agtgtggctgccccggtctccccagtctcccgctgtagctgaattccagcctggcccgcagctagccctgtctgcagctccaagcgtgctgcctggcagtccccacctagggcacgctgccacgccgccgttacctggtccaagtgcccgggaggctccgcctgtcggcttcgctctgcagctgcatctctgatctgtcctgcaggctcaggctctgacacctccattctctgtccccaagcgccatgagaggccttctttgctggcccgtgttgctgctccttcttcagccctgggaaacccagctccagttgacaggtcccaggtgtcacactgggcccctggatctggtgttcgtgattgacagctcccgcagcgtgcgccctttcgagttcgagaccatgcggcagttcctcatgggcctcctccgaggcctgaacgtgggtcccaacgccacgcgcgttggcgtgatccagtattcgagtcaagtgcagagcgtcttccctctccgcgcgttctctcgccgcgaggacatggagcgcgccatccgcgacctggtgcctctggcgcaaggcaccatgacgggactggcaatccagtacgccatgaacgtggccttcagtgtggccgagggcgcgcgaccgccagaggagcgcgtgccgcgtgtcgctgtcatcgtgacagacgggcggccccaggaccgcgtggccgaggtggcggcacaggcgcgcgcccgcggcattgaaatttacgcggtgggggtgcagcgcgcggacgtgggctccctgcgcgccatggcatcgcccccgctagacgagcacgtcttcctcgtagagtccttcgacctcatccaggagttcggcctgcagttccagagccggctgtgtgccattgatctgtgtgctgaagggacccatggatgtgagcaccactgcgtcaattccccaggctcctatttctgtcactgccaagttggctttgtactccagcaggaccagaggagctgcagggccattgactactgcagctttgggaaccatagctgtcagcatgagtgtgttagcacccctggtgggccacggtgccactgcagagagggccatgacttgcagcctgatgggaggagctgtcaggtccgggacctttgcaatggcgtggaccatggctgtgagttccagtgtgtgagcgagggcctctcctaccgctgcctgtgccccgaggggcggcaacttcaggcagatggcaagagctgcaaccggtgccgggaaggccacgtggaccttgttctgctggttgatggctccaagagcgtgcgtccacaaaacttcgagctagtgaagcgcttcgtgaaccagattgtggacttcctagatgtgtcccccgagggcacgcgggtggggctggtgcagttctcgagccgcgtgcgcaccgagttccctctgggtcgctacggcaccgcagccgaggtgaagcaggcggtcctggccgtggagtacatggaacgcggcaccatgacagggctggcgttgcggcacatggtggagcacagcttctccgaggcgcagggtgcacggccccgtgcccttaacgtgcctcgtgttggcctggtcttcacggatggccgctcccaggatgacatctcggtgtgggcagcgcgcgccaaggaggaaggcatcgtcatgtacgccgtgggcgtgggcaaggcggtggaggcggagctgcgcgagatcgcctcggagccagcggaactgcacgtgtcctatgccccggacttcggcaccatgacgcacctgctggagaacctcagaggcagcatctgtccagaggagggcatcagcgcagggacagagcttcggagcccatgcgaatgcgaaagcctcgtggagttccagggccgcacgctgggggcgctcgagagcctgacgctgaacctggcccagctgacggcgcgcctggaggatctggagaaccagctggccaaccagaagtgagggccacggacggcccagacccgggctggggcgcggcaccacggacggtgccccttgcgcgccatcggtgcgccggggccaggcagaacctgggcccgtccggcttgggctgtcggggcggaggcgctggcgggcttccggcattgagctgagttggcctcgcccggaccattaggcggactgcggcgtcagggggatagcgggtggtgagggaaggggcacgtgctagaccggcacgccctcgccgcgtgctgcgctcagttctttgttggatttcttgtttgtgttctt

SEQ ID NO: 17263 - DNA, 2129 bp, Homo sapiens
  source 1..2129: mol_type = unassigned DNA
gcgtcccgctcgctgggagagaggtacctctccttttccctctccctttccctaagagttgtctgctggttctcagcttgaagaagattctgcagtccttattgatcctttttcttggcgttaccatttttgaagcaaagttaacctagctttctagtttgagctttctttttggccgtctttaaaaaaatttttttttttaatctataaaatagacaagagctagttctacaatgtccaagtcattccagcagtcatctctcagtagggactcacagggtcatgggcgtgacctgtctgcggcaggaataggccttcttgctgctgctacccagtctttaagtatgcttcttgaatctgaagatgagctacttgtagatgaagaagaagcagcagcactgctagaaagtggcagttcagtgggagacgagaccgatcttgctaatttaggtgatgtggcttctgatgggaaaaaggaaccatcagataaagctgtgaaaaaagatggaagtgcttcagcagcagcaaagaaaaagcttaaaaagcgtcgttttccagggagtatggaaggttttgtcactctagatgaggttggtgatgaggaagattcggaacttcagaaacttcgtaaatcgggcatggcatttaaatctggtgacaaaaatgatgatggtttggttgaaattaaggtggacaagatcgaggaacttgatcaagaaaacgaagcagcgttggaaaatggaattaaaaatgaggaaaacacagaaccaggtgctgaatcttctgagaacgctgatgatcccaacaaagatacaagtgaaaacgcagatggtcaaagtgatgagaacaaggacgactatacaatcccagatgagtatagaattggaccatatcagcccaatgttcctgttggtatagactatgtgatacctaaaacagggttttactgtaagctgtgttcactcttttatacaaatgaagaagttgcaaagaatactcattgcagcagccttcctcattatcagaaattaaagaaatttctgaataaattggcagaagaacgcagacagaagaaggaaacttaagatgtgcaaggagatttaatgatttcaaagaaaataatggttctttgtttttaatgttaaccttttttaaatacaatactgatagttagaagaaaactattgtactcttttgttttagtggagaaataatagatgtctgttcatgtgttaagtgttatagcaaaaaaaatacacatatggttaagttaatgaatagtttttgttttatcagaatggcaacagacagaagtactttgtagagattgacttcctaagctacttaagacaacttgcaccactaagaaaaaaatgtagaaccatttggaaaaatgaaatttagtagttccaagtttcaaagaaatgtcaacattttattccattcaataaagaacaaaaccaatagtgtttttattactttcatctgaaacattccatgttttaatctgagccttgcagactttcatttggagtttgaacccgttttggttgcatttcatttttggagaacttaattaacgtgagattggcaattgaaatgcaggtgcagttttctgttaatgtcatgctgttgtttaggtaataagaaatattaagtaattggctttagattttgtaatttttttccctgagttcctgctagatttcgtattctagtagtcaatgtattttcagtgaaatgcaaaaatattcccgttatctttgaccagtattaatttttgagatcttactgcttgtcacttgaatcccgtgattgtcatacatctctggtataagcaacatttgatttttgaagtgtgtagaccatctcttcatattttcaagatgtaattttacatttctgcatttttaaaacagtttggccataatcctagatgcacgcttctaattcatgtacctgcacatgtgacctttgtgaacagaaatttgcatgtataatttgtgtttacttgtaactttctggttatatactgcttatatctgtggattcaagttactgaagtgaataccaataaaaagaaaaccctaggccatgttaattggttatacatgtttggaatgttaacc

SEQ ID NO: 17264 - DNA, 4015 bp, Homo sapiens
  source 1..4015: mol_type = unassigned DNA
ctttcccctccggcctctgccggtgctgctgcgccctgcggagctccgaacacgtgcgcagaggctggctgtggcagatgcaactgcaggatgacttgaaagtagggcatccttcacccatctgaagggaggaaatagtggcaggtgacagtctgcatgtgcagttttcagatgccttcacctgaatgacatctacctccatcaggaccccagatgtctgacagccctgtgtgacaccaagataagtaacagttgtctgctggttctcagcttgaagaagattctgcagtccttattgatcctttttcttggcgttaccatttttgaagcaaagttaacctagctttctagtttgagctttctttttggccgtctttaaaaaaatttttttttttaatctataaaatagacaagagctagttctacaatgtccaagtcattccagcagtcatctctcagtagggactcacagggtcatgggcgtgacctgtctgcggcaggaataggccttcttgctgctgctacccagtctttaagtatgccagcatctcttggaaggatgaaccagggtactgcacgccttgctagtttaatgaatcttggaatgagttcttcattgaatcaacaaggagctcatagtgcactgtcttctgctagtacttcttcccataatttgcagtctatatttaacattggaagtagaggtccactccctttatcttctcaacaccgtggagatgcagaccaggccagtaacattttggccagctttggtctgtctgctagagacttagatgaactgagtcgttatccagaggacaagattactcctgagaatttgccccaaatccttctacagcttaaaaggaggagaactgaagaaggccctaccttgagttatggtagagatggcagatctgctacacgggagccaccatacagagtacctagggatgattgggaagaaaaaaggcactttagaagagatagttttgatgatcgtggtcctagtctcaacccagtgcttgattatgaccatggaagtcgttctcaagaatctggttattatgacagaatggattatgaagatgacagattaagagatggagaaaggtgtagggatgattctttttttggtgagacctcgcataactatcataaatttgacagtgagtatgagagaatgggacgtggtcctggccccttacaagagagatctctctttgagaaaaagagaggcgctcctccaagtagcaatattgaagacttccatggactcttaccgaagggttatccccatctgtgctctatatgtgatttgccagttcattctaataaggagtggagtcaacatatcaatggagcaagtcacagtcgtcgatgccagcttcttcttgaaatctacccagaatggaatcctgacaatgatacaggacacacaatgggtgatccattcatgttgcagcagtctacaaatccagcaccaggaattctgggacctccacctccctcatttcatcttgggggaccagcagttggaccaagaggaaatctgggtgctggaaatggaaacctgcaaggacctagacacatgcagaaaggcagagtggaaactagcagagttgttcacatcatggattttcaacgagggaaaaacttgagataccagctattacagctggtagaaccatttggagtcatttcaaatcatctgattctaaataaaattaatgaggcatttattgaaatggcaaccacagaggatgctcaggccgcagtggattattacacaaccacaccagcgttagtatttggcaagccagtgagagttcatttatcccagaagtataaaagaataaagaaacctgaaggaaagccagatcagaagtttgatcaaaagcaagagcttggacgtgtgatacatctcagcaatttgccgcattctggctattctgatagtgctgttctcaagcttgctgagccttatgggaaaataaagaattacatattgatgaggatgaaaagtcaggcttttattgagatggagacaagagaagatgcaatggcaatggttgaccattgtttgaaaaaagccctttggtttcaggggagatgtgtgaaggttgacctgtctgagaaatataaaaaactggttctgaggattccaaacagaggcattgatttactgaaaaaagataaatcccgaaaaagatcttactctccagatggcaaagaatctccaagtgataagaaatccaaaactgatggttcccagaagactgagagttcaaccgaaggtaaagaacaagaagagaagtccggtgaagatggtgagaaagacacaaaggatgaccagacagagcaggaacctaatatgcttcttgaatctgaagatgagctacttgtagatgaagaagaagcagcagcactgctagaaagtggcagttcagtgggagacgagaccgatcttgctaatttaggtgatgtggcttctgatgggaaaaaggaaccatcagataaagctgtgaaaaaagatggaagtgcttcagcagcagcaaagaaaaagcttaaaaaggtggacaagatcgaggaacttgatcaagaaaacgaagcagcgttggaaaatggaattaaaaatgaggaaaacacagaaccaggtgctgaatcttctgagaacgctgatgatcccaacaaagatacaagtgaaaacgcagatggtcaaagtgatgagaacaaggacgactatacaatcccagatgagtatagaattggaccatatcagcccaatgttcctgttggtatagactatgtgatacctaaaacagggttttactgtaagctgtgttcactcttttatacaaatgaagaagttgcaaagaatactcattgcagcagccttcctcattatcagaaattaaagaaatttctgaataaattggcagaagaacgcagacagaagaaggaaacttaagatgtgcaaggagatttaatgatttcaaagaaaataatggttctttgtttttaatgttaaccttttttaaatacaatactgatagttagaagaaaactattgtactcttttgttttagtggagaaataatagatgtctgttcatgtgttaagtgttatagcaaaaaaaatacacatatggttaagttaatgaatagtttttgttttatcagaatggcaacagacagaagtactttgtagagattgacttcctaagctacttaagacaacttgcaccactaagaaaaaaatgtagaaccatttggaaaaatgaaatttagtagttccaagtttcaaagaaatgtcaacattttattccattcaataaagaacaaaaccaatagtgtttttattactttcatctgaaacattccatgttttaatctgagccttgcagactttcatttggagtttgaacccgttttggttgcatttcatttttggagaacttaattaacgtgagattggcaattgaaatgcaggtgcagttttctgttaatgtcatgctgttgtttaggtaataagaaatattaagtaattggctttagattttgtaatttttttccctgagttcctgctagatttcgtattctagtagtcaatgtattttcagtgaaatgcaaaaatattcccgttatctttgaccagtattaatttttgagatcttactgcttgtcacttgaatcccgtgattgtcatacatctctggtataagcaacatttgatttttgaagtgtgtagaccatctcttcatattttcaagatgtaattttacatttctgcatttttaaaacagtttggccataatcctagatgcacgcttctaattcatgtacctgcacatgtgacctttgtgaacagaaatttgcatgtataatttgtgtttacttgtaactttctggttatatactgcttatatctgtggattcaagttactgaagtgaataccaataaaaagaaaaccctaggccatgttaattggttatacatgtttggaatgttaacc

SEQ ID NO: 17265 - DNA, 4843 bp, Homo sapiens
  source 1..4843: mol_type = unassigned DNA
gtgggggcgagctctctcgcgagagtgggtttgttcttgggctgcagccgctgccgccgcttctcgccagcgccgttgctgcgggggattgtgggagtctccgcgtcccgctcgctgggagagaggtacctctccttttccctctccctttccctaagagttgtctgctggttctcagcttgaagaagattctgcagtccttattgatcctttttcttggcgttaccatttttgaagcaaagttaacctagctttctagtttgagctttctttttggccgtctttaaaaaaatttttttttttaatctataaaatagacaagagctagttctacaatgtccaagtcattccagcagtcatctctcagtagggactcacagggtcatgggcgtgacctgtctgcggcaggaataggccttcttgctgctgctacccagtctttaagtatgccagcatctcttggaaggatgaaccagggtactgcacgccttgctagtttaatgaatcttggaatgagttcttcattgaatcaacaaggagctcatagtgcactgtcttctgctagtacttcttcccataatttgcagtctatatttaacattggaagtagaggtccactccctttatcttctcaacaccgtggagatgcagaccaggccagtaacattttggccagctttggtctgtctgctagagacttagatgaactgagtcgttatccagaggacaagattactcctgagaatttgccccaaatccttctacagcttaaaaggaggagaactgaagaaggccctaccttgagttatggtagagatggcagatctgctacacgggagccaccatacagagtacctagggatgattgggaagaaaaaaggcactttagaagagatagttttgatgatcgtggtcctagtctcaacccagtgcttgattatgaccatggaagtcgttctcaagaatctggttattatgacagaatggattatgaagatgacagattaagagatggagaaaggtgtagggatgattctttttttggtgagacctcgcataactatcataaatttgacagtgagtatgagagaatgggacgtggtcctggccccttacaagagagatctctctttgagaaaaagagaggcgctcctccaagtagcaatattgaagacttccatggactcttaccgaagggttatccccatctgtgctctatatgtgatttgccagttcattctaataaggagtggagtcaacatatcaatggagcaagtcacagtcgtcgatgccagcttcttcttgaaatctacccagaatggaatcctgacaatgatacaggacacacaatgggtgatccattcatgttgcagcagtctacaaatccagcaccaggaattctgggacctccacctccctcatttcatcttgggggaccagcagttggaccaagaggaaatctgggtgctggaaatggaaacctgcaaggacctagacacatgcagaaaggcagagtggaaactagcagagttgttcacatcatggattttcaacgagggaaaaacttgagataccagctattacagctggtagaaccatttggagtcatttcaaatcatctgattctaaataaaattaatgaggcatttattgaaatggcaaccacagaggatgctcaggccgcagtggattattacacaaccacaccagcgttagtatttggcaagccagtgagagttcatttatcccagaagtataaaagaataaagaaacctgaaggaaagccagatcagaagtttgatcaaaagcaagagcttggacgtgtgatacatctcagcaatttgccgcattctggctattctgatagtgctgttctcaagcttgctgagccttatgggaaaataaagaattacatattgatgaggatgaaaagtcaggcttttattgagatggagacaagagaagatgcaatggcaatggttgaccattgtttgaaaaaagccctttggtttcaggggagatgtgtgaaggttgacctgtctgagaaatataaaaaactggttctgaggattccaaacagaggcattgatttactgaaaaaagataaatcccgaaaaagatcttactctccagatggcaaagaatctccaagtgataagaaatccaaaactgatggttcccagaagactgagagttcaaccgaaggtaaagaacaagaagagaagtccggtgaagatggtgagaaagacacaaaggatgaccagacagagcaggaacctaatatgcttcttgaatctgaagatgagctacttgtagatgaagaagaagcagcagcactgctagaaagtggcagttcagtgggagacgagaccgatcttgctaatttaggtgatgtggcttctgatgggaaaaaggaaccatcagataaagctgtgaaaaaagatggaagtgcttcagcagcagcaaagaaaaagcttaaaaaggtggacaagatcgaggaacttgatcaagaaaacgaagcagcgttggaaaatggaattaaaaatgaggaaaacacagaaccaggtgctgaatcttctgagaacgctgatgatcccaacaaagatacaagtgaaaacgcagatggtcaaagtgatgagaacaaggacgactatacaatcccagatgagtatagaattggaccatatcagcccaatgttcctgttggtatagactatgtgatacctaaaacagggttttactgtaagctgtgttcactcttttatacaaatgaagaagttgcaaagaatactcattgcagcagccttcctcattatcagaaattaaagaaatttctgaataaattggcagaagaacgcagacagaagaaggaaacttaagatgtgcaaggagatttaatgatttcaaagaaaataatggttctttgtttttaatgttaaccttttttaaatacaatactgatagttagaagaaaactattgtactcttttgttttagtggagaaataatagatgtctgttcatgtgttaagtgttatagcaaaaaaaatacacatatggttaagttaatgaatagtttttgttttatcagaatggcaacagacagaagtactttgtagagattgacttcctaagctacttaagacaacttgcaccactaagaaaaaaatgtagaaccatttggaaaaatgaaatttagtagttccaagtttcaaagaaatgtcaacattttattccattcaataaagaacaaaaccaatagtgtttttattactttcatctgaaacattccatgttttaatctgagccttgcagactttcatttggagtttgaacccgttttggttgcatttcatttttggagaacttaattaacgtgagattggcaattgaaatgcaggtgcagttttctgttaatgtcatgctgttgtttaggtaataagaaatattaagtaattggctttagattttgtaatttttttccctgagttcctgctagatttcgtattctagtagtcaatgtattttcagtgaaatgcaaaaatattcccgttatctttgaccagtattaatttttgagatcttactgcttgtcacttgaatcccgtgattgtcatacatctctggtataagcaacatttgatttttgaagtgtgtagaccatctcttcatattttcaagatgtaattttacatttctgcatttttaaaacagtttggccataatcctagatgcacgcttctaattcatgtacctgcacatgtgacctttgtgaacagaaatttgcatgtataatttgtgtttacttgtaactttctggttatatactgcttatatctgtggattcaagttactgaagtgaataccaataaaaagaaaaccctaggccatgttaattggttatacatgtttggaatgttaaccaacgtatttgtcagttgtggtttttattcgctcttaaactttgtgcatgctttaacaatttattacttttaaatctagagtgaattctaaagactgccgctaaagatctgagttttaaaaatgttgttgctggtggatttcttgttcctgttacataactaaaagtgaggccatttgtggtttttaaaaaccttatgaattaaaaatgctacaggtgaacaaacagaagcttatgtttagagatattgatgacttaacagtacaattggaagtaatacggatgagcaagaattagttctgcagcttttcaaaataattacgtagagactcttggtatattggattatctgttgtaaacaatttttttttcttccctgacacagggtctcactctgtcacccagactggagtgcagtggcacagttctctgcaacctcagcctttgggctcaaatgaccctcctacctcagtctcctgagtagctgggactacaggctcatgccactatacctggctagtttttggtttttttgtatagatggggctttgccatgttgcccaggttgatcttgaattcctgggcccaagtgatctgctcgcttcagcctcccaaagtgctgggactgtaggcatgagccaccatccctggccaagaaacaaagttttaatttcaaaaaaatctacaaaaacaggataggcattgtctttcaaatgttcagaccccagtttattaaaggatacttcaaatagttggctaaattttatgatctctcccgttgaaaagtaggtgatgattttaatgtgacatgcacaaaaaatccttgccagtttacttctgcaatttaattttagcctttactaattacccacttctgtttaattccaatttttaacagcaggtacataaagcattatgtgca

SEQ ID NO: 17266 - DNA, 589 bp, Homo sapiens
  source 1..589: mol_type = unassigned DNA
gtttcattgcagagaggctggctgtggcagatgcaactgcaggtgccgtcatttaatttcccagacacttgacctccttctgatttgtgtactccctccaaggctgagttgcaagttgtctgctggttctcagcttgaagaagattctgcagtccttattgatcctttttcttggcgttaccatttttgaagcaaagttaacctagctttctagtttgagctttctttttggccgtctttaaaaaaatttttttttttaatctataaaatagacaagagctagttctacaatgtccaagtcattccagcagtcatctctcagtagggactcacagggtcatgggcgtgacctgtctgcggcaggaataggccttcttgctgctgctacccagtctttaagtatgccagcatctcttggaaggatgaaccagggtactgcacgccttgctagtttaatgaatcttggaatgagttcttcattgaatcaacaaggagctcatagtgcactgtcttctgctagtacttcttcccataatttgcagtctatatttaacattggaagtagaggtccactccctttatcttctca

SEQ ID NO: 17267 - DNA, 2664 bp, Homo sapiens
  source 1..2664: mol_type = unassigned DNA
gttgctgcgggggattgtgggagtctccgcgtcccgctcgctgggagagaggtacctctccttttccctctccctttccctaagctacccagaatggaatcctgacaatgatacaggacacacaatgggtgatccattcatgttgcagcagtctacaaatccagcaccaggaattctgggacctccacctccctcatttcatcttgggggaccagcagttggaccaagaggaaatctgggtgctggaaatggaaacctgcaaggacctagacacatgcagaaaggcagagtggaaactagcagagttgttcacatcatggattttcaacgagggaaaaacttgagataccagctattacagctggtagaaccatttggagtcatttcaaatcatctgattctaaataaaattaatgaggcatttattgaaatggcaaccacagaggatgctcaggccgcagtggattattacacaaccacaccagcgttagtatttggcaagccagtgagagttcatttatcccagaagtataaaagaataaagaaacctgaaggaaagccagatcagaagtttgatcaaaagcaagagcttggacgtgtgatacatctcagcaatttgccgcattctggctattctgatagtgctgttctcaagcttgctgagccttatgggaaaataaagaattacatattgatgaggatgaaaagtcaggcttttattgagatggagacaagagaagatgcaatggcaatggttgaccattgtttgaaaaaagccctttggtttcaggggagatgtgtgaaggttgacctgtctgagaaatataaaaaactggttctgaggattccaaacagaggcattgatttactgaaaaaagataaatcccgaaaaagatcttactctccagatggcaaagaatctccaagtgataagaaatccaaaactgatggttcccagaagactgagagttcaaccgaaggtaaagaacaagaagagaagtccggtgaagatggtgagaaagacacaaaggatgaccagacagagcaggaacctaatatgcttcttgaatctgaagatgagctacttgtagatgaagaagaagcagcagcactgctagaaagtggcagttcagtgggagacgagaccgatcttgctaatttaggtgatgtggcttctgatgggaaaaaggaaccatcagataaagctgtgaaaaaagatggaagtgcttcagcagcagcaaagaaaaagcttaaaaaggtggacaagatcgaggaacttgatcaagaaaacgaagcagcgttggaaaatggaattaaaaatgaggaaaacacagaaccaggtgctgaatcttctgagaacgctgatgatcccaacaaagatacaagtgaaaacgcagatggtcaaagtgatgagaacaaggacgactatacaatcccagatgagtatagaattggaccatatcagcccaatgttcctgttggtatagactatgtgatacctaaaacagggttttactgtaagctgtgttcactcttttatacaaatgaagaagttgcaaagaatactcattgcagcagccttcctcattatcagaaattaaagaaatttctgaataaattggcagaagaacgcagacagaagaaggaaacttaagatgtgcaaggagatttaatgatttcaaagaaaataatggttctttgtttttaatgttaaccttttttaaatacaatactgatagttagaagaaaactattgtactcttttgttttagtggagaaataatagatgtctgttcatgtgttaagtgttatagcaaaaaaaatacacatatggttaagttaatgaatagtttttgttttatcagaatggcaacagacagaagtactttgtagagattgacttcctaagctacttaagacaacttgcaccactaagaaaaaaatgtagaaccatttggaaaaatgaaatttagtagttccaagtttcaaagaaatgtcaacattttattccattcaataaagaacaaaaccaatagtgtttttattactttcatctgaaacattccatgttttaatctgagccttgcagactttcatttggagtttgaacccgttttggttgcatttcatttttggagaacttaattaacgtgagattggcaattgaaatgcaggtgcagttttctgttaatgtcatgctgttgtttaggtaataagaaatattaagtaattggctttagattttgtaatttttttccctgagttcctgctagatttcgtattctagtagtcaatgtattttcagtgaaatgcaaaaatattcccgttatctttgaccagtattaatttttgagatcttactgcttgtcacttgaatcccgtgattgtcatacatctctggtataagcaacatttgatttttgaagtgtgtagaccatctcttcatattttcaagatgtaattttacatttctgcatttttaaaacagtttggccataatcctagatgcacgcttctaattcatgtacctgcacatgtgacctttgtgaacagaaatttgcatgtataatttgtgtttacttgtaactttctggttatatactgcttatatctgtggattcaagttactgaagtgaataccaataaaaagaaaaccctaggcca

SEQ ID NO: 17268 - DNA, 696 bp, Homo sapiens
  source 1..696: mol_type = unassigned DNA
gtggaacaagccgcctgcagtacagtgcgaggcgggtgatttgcacttgtttagtcaagtcacctcacatcctttttctctttatcaaaatagtattagtccaggttcctccagagaggatcgtgtggtgtgggaccttccggtttccagacaaagggttttggagtaccgtggtgtagtcgccgcatcgttctttgcatttcgagctctgtgccatgttctgtgttcggcatttaccgtggatgaatatcccctagagttgtctgctggttctcagcttgaagaagattctgcagtccttattgatcctttttcttggcgttaccatttttgaagcaaagttaacctagctttctagtttgagctttctttttggccgtctttaaaaaaatttttttttttaatctataaaatagacaagagctagttctacaatgtccaagtcattccagcagtcatctctcagtagggactcacagggtcatgggcgtgacctgtctgcggcaggaataggccttcttgctgctgctacccagtctttaagtatgccagcatctcttggaaggatgaaccagggtactgcacgccttgctagtttaatgaatcttggaatgagttcttcattgaatcaacaaggagctcatagtgcactgtcttctgctagtacttcttcccataatttgcagtctatattta

SEQ ID NO: 17269 - DNA, 2518 bp, Homo sapiens
  source 1..2518: mol_type = unassigned DNA
gcgtcccgctcgctgggagagaggtacctctccttttccctctccctttccctaaggtaggcgtgaagcgggtaagagtcggggtcgggtggctgggggttctccgtgtccgccgggaggggacaacgacggcgacaggggctgcggggagccggcggcgcgcctttcttgctcgctcccgctctgcctccctccgcgttgcgtatgtgagccgcctgatcggcggccgccatgttaggagcgcagtggcggcgcaaccagccttctagggcggcggaggagtggagtcaacatatcaatggagcaagtcacagtcgtcgatgccagcttcttcttgaaatctacccagaatggaatcctgacaatgatacaggacacacaatgggtgatccattcatgttgcagcagtctacaaatccagcaccaggaattctgggacctccacctccctcatttcatcttgggggaccagcagttggaccaagaggaaatctgggtgctggaaatggaaacctgcaaggacctagacacatgcagaaaggcagagtggaaactagcagagttgttcacatcatggattttcaacgagggaaaaacttgagataccagctattacagctggtagaaccatttggagtcatttcaaatcatctgattctaaataaaattaatgaggcatttattgaaatggcaaccacagaggatgctcaggccgcagtggattattacacaaccacaccagcgttagtatttggcaagccagtgagagttcatttatcccagaagtataaaagaataaagaaacctgaaggaaagccagatcagaagtttgatcaaaagcaagagcttggacgtgtgatacatctcagcaatttgccgcattctggctattctgatagtgctgttctcaagcttgctgagccttatgggaaaataaagaattacatattgatgaggatgaaaagtcaggcttttattgagatggagacaagagaagatgcaatggcaatggttgaccattgtttgaaaaaagccctttggtttcaggggagatgtgtgaaggttgacctgtctgagaaatataaaaaactggttctgaggattccaaacagaggcattgatttactgaaaaaagataaatcccgaaaaagatcttactctccagatggcaaagaatctccaagtgataagaaatccaaaactgatggttcccagaagactgagagttcaaccgaaggtaaagaacaagaagagaagtccggtgaagatggtgagaaagacacaaaggatgaccagacagagcaggaacctaatatgcttcttgaatctgaagatgagctacttgtagatgaagaagaagcagcagcactgctagaaagtggcagttcagtgggagacgagaccgatcttgctaatttaggtgatgtggcttctgatgggaaaaaggaaccatcagataaagctgtgaaaaaagatggaagtgcttcagcagcagcaaagaaaaagcttaaaaaggtggacaagatcgaggaacttgatcaagaaaacgaagcagcgttggaaaatggaattaaaaatgaggaaaacacagaaccaggtgctgaatcttctgagaacgctgatgatcccaacaaagatacaagtgaaaacgcagatggtcaaagtgatgagaacaaggacgactatacaatcccagatgagtatagaattggaccatatcagcccaatgttcctgttggtatagactatgtgatacctaaaacagggttttactgtaagctgtgttcactcttttatacaaatgaagaagttgcaaagaatactcattgcagcagccttcctcattatcagaaattaaagaaatttctgaataaattggcagaagaacgcagacagaagaaggaaacttaagatgtgcaaggagatttaatgatttcaaagaaaataatggttctttgtttttaatgttaaccttttttaaatacaatactgatagttagaagaaaactattgtactcttttgttttagtggagaaataatagatgtctgttcatgtgttaagtgttatagcaaaaaaaatacacatatggttaagttaatgaatagtttttgttttatcagaatggcaacagacagaagtactttgtagagattgacttcctaagctacttaagacaacttgcaccactaagaaaaaaatgtagaaccatttggaaaaatgaaatttagtagttccaagtttcaaagaaatgtcaacattttattccattcaataaagaacaaaaccaatagtgtttttattactttcatctgaaacattccatgttttaatctgagccttgcagactttcatttggagtttgaacccgttttggttgcatttcatttttggagaacttaattaacgtgagattggcaattgaaatgcaggtgcagttttctgttaatgtcatgctgttgtttaggtaataagaaatattaagtaattggctttagattttgtaatttttttccctg

SEQ ID NO: 17270 - DNA, 770 bp, Homo sapiens
  source 1..770: mol_type = unassigned DNA
agtcaagtcacctcacatcctttttctctttatcaaaatagtattagtccaggttcctccagagaggatcgtgtggtgtgggaccttccggtttccagacaaagggttttggagtaccgtggtgtagtcgccgcatcgttctttgcatttcgagctctgtgccatgttctgtgttcggcatttaccgtggatgaatatcccctaggtgtttatcctgctctgtggccctgttctgtggaatattcctattggatcagttacagttttttagccagatatttctagaacggttatggtggttctgaaatggctagtctttcgggcgcgctggaataatgtgaagaatcgttgatttcgtagagttgtctgctggttctcagcttgaagaagattctgcagtccttattgatcctttttcttggcgttaccatttttgaagcaaagttaacctagctttctagtttgagctttctttttggccgtctttaaaaaaatttttttttttaatctataaaatagacaagagctagttctacaatgtccaagtcattccagcagtcatctctcagtagggactcacagggtcatgggcgtgacctgtctgcggcaggaataggccttcttgctgctgctacccagtctttaagtatgccagcatctcttggaaggatgaaccagggtactgcacgccttgctagtttaatgaatcttggaatgagttcttcattgaatcaacaaggagctcatagtgcactgtcttctgctagtac

SEQ ID NO: 17271 - DNA, 1530 bp, Homo sapiens
  source 1..1530: mol_type = unassigned DNA
cgccgttgctgcgggggattgtgggagtctccgcgtcccgctcgctgggagagagttgtctgctggttctcagcttgaagaagattctgcagtccttattgatcctttttcttggcgttaccatttttgaagcaaagttaacctagctttctagtttgagctttctttttggccgtctttaaaaaaatttttttttttaatctataaaatagacaagagctagttctacaatgtccaagtcattccagcagtcatctctcagtagggactcacagggtcatgggcgtgacctgtctgcggcaggaataggccttcttgctgctgctacccagtctttaagtatgccagcatctcttggaaggatgaaccagggtactgcacgccttgctagtttaatgaatcttggaatgagttcttcattgaatcaacaaggagctcatagtgcactgtcttctgctagtacttcttcccataatttgcagtctatatttaacattggaagtagaggtccactccctttatcttctcaacaccgtggagatgcagaccaggccagtaacattttggccagctttggtctgtctgctagagacttagatgaactgagtcgttatccagaggacaagattactcctgagaatttgccccaaatccttctacagcttaaaaggaggagaactgaagaaggccctaccttgagttatggtagagatggcagatctgctacacgggagccaccatacagagtacctagggatgattgggaagaaaaaaggcactttagaagagatagttttgatgatcgtggtcctagtctcaacccagtgcttgattatgaccatggaagtcgttctcaagaatctggttattatgacagaatggattatgaagatgacagattaagagatggagaaaggtgtagggatgattctttttttggtgagacctcgcataactatcataaatttgacagtgagtatgagagaatgggacgtggtcctggccccttacaagagagatctctctttgagaaaaagagaggcgctcctccaagtagcaatattgaagacttccatggactcttaccgaagggttatccccatctgtgctctatatgtgatttgccagttcattctaataaggagtggagtcaacatatcaatggagcaagtcacagtcgtcgatgccagcttcttcttgaaatctacccagaatggaatcctgacaatgatacaggacacacaatgggtgatccattcatgttgcagcagtctacaaatccagcaccaggaattctgggacctccacctccctcatttcatcttgggggaccagcagttggaccaagaggaaatctgggtgctggaaatggaaacctgcaaggacctagacacatgcagaaaggcagagtggaaactagcagagttgttcacatcatggattttcaacgagggaaaaacttgagataccagctattacagctggtagaaccatttggagtcatttcaaatcatctgattctaaataaaa

SEQ ID NO: 17272 - DNA, 2243 bp, Homo sapiens
  source 1..2243: mol_type = unassigned DNA
tttcccctccggcctctgccggtgctgctgcgccctgcggagctccgaacacgtgcgcagaggctggctgtggcagatgcaactgcaggatgacttgaaagtagggcatccttcacccatctgaagggaggaaatagtggcaggtgacagtctgcatgtgcagttttcagatgccttcacctgaatgacatctacctccatcaggaccccagatgtctgacagccctgtgtgacaccaagataagtaacgagtggagtcaacatatcaatggagcaagtcacagtcgtcgatgccagcttcttcttgaaatctacccagaatggaatcctgacaatgatacaggacacacaatgggtgatccattcatgttgcagcagtctacaaatccagcaccaggaattctgggacctccacctccctcatttcatcttgggggaccagcagttggaccaagaggaaatctgggtgctggaaatggaaacctgcaaggacctagacacatgcagaaaggcagagtggaaactagcagagttgttcacatcatggattttcaacgagggaaaaacttgagataccagctattacagctggtagaaccatttggagtcatttcaaatcatctgattctaaataaaattaatgaggcatttattgaaatggcaaccacagaggatgctcaggccgcagtggattattacacaaccacaccagcgttagtatttggcaagccagtgagagttcatttatcccagaagtataaaagaataaagaaacctgaaggaaagccagatcagaagtttgatcaaaagcaagagcttggacgtgtgatacatctcagcaatttgccgcattctggctattctgatagtgctgttctcaagcttgctgagccttatgggaaaataaagaattacatattgatgaggatgaaaagtcaggcttttattgagatggagacaagagaagatgcaatggcaatggttgaccattgtttgaaaaaagccctttggtttcaggggagatgtgtgaaggttgacctgtctgagaaatataaaaaactggttctgaggattccaaacagaggcattgatttactgaaaaaagataaatcccgaaaaagatcttactctccagatggcaaagaatctccaagtgataagaaatccaaaactgatggttcccagaagactgagagttcaaccgaaggtaaagaacaagaagagaagtccggtgaagatggtgagaaagacacaaaggatgaccagacagagcaggaacctaatatgcttcttgaatctgaagatgagctacttgtagatgaagaagaagcagcagcactgctagaaagtggcagttcagtgggagacgagaccgatcttgctaatttaggtgatgtggcttctgatgggaaaaaggaaccatcagataaagctgtgaaaaaagatggaagtgcttcagcagcagcaaagaaaaagcttaaaaaggtggacaagatcgaggaacttgatcaagaaaacgaagcagcgttggaaaatggaattaaaaatgaggaaaacacagaaccaggtgctgaatcttctgagaacgctgatgatcccaacaaagatacaagtgaaaacgcagatggtcaaagtgatgagaacaaggacgactatacaatcccagatgagtatagaattggaccatatcagcccaatgttcctgttggtatagactatgtgatacctaaaacagggttttactgtaagctgtgttcactcttttatacaaatgaagaagttgcaaagaatactcattgcagcagccttcctcattatcagaaattaaagaaatttctgaataaattggcagaagaacgcagacagaagaaggaaacttaagatgtgcaaggagatttaatgatttcaaagaaaataatggttctttgtttttaatgttaaccttttttaaatacaatactgatagttagaagaaaactattgtactcttttgttttagtggagaaataatagatgtctgttcatgtgttaagtgttatagcaaaaaaaatacacatatggttaagttaatgaatagtttttgttttatcagaatggcaacagacagaagtactttgtagagattgacttcctaagctacttaagacaacttgcaccactaagaaaaaaatgtagaaccatttggaaaaatgaaatttagtagttccaagtttcaaagaaatgtcaacattttattccattca

SEQ ID NO: 17273 - DNA, 664 bp, Homo sapiens
  source 1..664: mol_type = unassigned DNA
ctgcgccctgcggagctccgaacacgtgcgcagaggctggctgtggcagatgcaactgcaggatgacttgaaagtagggcatccttcacccatctgaagggaggaaatagtggcaggtgacagtctgcatgtgcagttttcagatgccttcacctgaatgacatctacctccatcaggaccccagatgtctgacagccctgtgtgacaccaagataagtaacaatctggctgctgactaccctattggacaactccaatattagagaacatttccaccaattcagaaagtttattatgcactgctgttctagagcagggatcagcaaacttgctgtaaagagccagagttgtctgctggttctcagcttgaagaagattctgcagtccttattgatcctttttcttggcgttaccatttttgaagcaaagttaacctagctttctagtttgagctttctttttggccgtctttaaaaaaatttttttttttaatctataaaatagacaagagctagttctacaatgtccaagtcattccagcagtcatctctcagtagggactcacagggtcatgggcgtgacctgtctgcggcaggaataggccttcttgctgctgctacccagtctttaagtatgccagcatctcttggaaggatgaaccag

SEQ ID NO: 17274 - DNA, 561 bp, Homo sapiens
  source 1..561: mol_type = unassigned DNA
gtatgtgagccgcctgatcggcggccgccatgttaggagcgcagtggcggcgcaaccagccttctagggcggcggaggtgagcggtccgggagggaaacacgcggccggccaagggcccagggtgcggcgggagattttgggtgaagagagttgtctgctggttctcagcttgaagaagattctgcagtccttattgatcctttttcttggcgttaccatttttgaagcaaagttaacctagctttctagtttgagctttctttttggccgtctttaaaaaaatttttttttttaatctataaaatagacaagagctagttctacaatgtccaagtcattccagcagtcatctctcagtagggactcacagggtcatgggcgtgacctgtctgcggcaggaataggccttcttgctgctgctacccagtctttaagtatgccagcatctcttggaaggatgaaccagggtactgcacgccttgctagtttaatgaatcttggaatgagttcttcattgaatcaacaaggagctcatagtgcactgtcttctgctagtactt

SEQ ID NO: 17275 - DNA, 3249 bp, Homo sapiens
  source 1..3249: mol_type = unassigned DNA
gcagcaacggaaaggcgccacgctcgtgagcggaaccagcgttccgggggcgctcagtgtgggcaggcaggaagcctggctccactaggacacacagattctctcctgagcagctgcgaactatgcgccccttctacccttaagagatgggatgggagtccaacaaacccagccattgctcagaccccagcccttctctcctctaagaagcaggttcacctctgccaccgcactcgcatttttttttttttttaaagcccggcctttcctaggcggggtcaagggccccgcccaccgaagccacgcccagtagccgccccggggcggggttcccctcggctcccggctgccctttcccctccggcctctgccggtgctgctgcgccctgcggagctccgaacacgtgcgcagaggctggctgtggcagatgcaactgcagatgccttcacctgaatgacatctacctccatcaggaccccagatgtctgacagccctgtgtgacaccaagataagtaacagttgtctgctggttctcagcttgaagaagattctgcagtccttattgatcctttttcttggcgttaccatttttgaagcaaagttaacctagctttctagtttgagctttctttttggccgtctttaaaaaaatttttttttttaatctataaaatagacaagagctagttctacaatgtccaagtcattccagcagtcatctctcagtagggactcacagggtcatgggcgtgacctgtctgcggcaggaataggccttcttgctgctgctacccagtctttaagtatgccagcatctcttggaaggatgaaccagggtactgcacgccttgctagtttaatgaatcttggaatgagttcttcattgaatcaacaaggagctcatagtgcactgtcttctgctagtacttcttcccataatttgcagtctatatttaacattggaagtagaggtccactccctttatcttctcaacaccgtggagatgcagaccaggccagtaacattttggccagctttggtctgtctgctagagacttagatgaactgagtcgttatccagaggacaagattactcctgagaatttgccccaaatccttctacagcttaaaaggaggagaactgaagaaggccctaccttgagttatggtagagatggcagatctgctacacgggagccaccatacagagtacctagggatgattgggaagaaaaaaggcactttagaagagatagttttgatgatcgtggtcctagtctcaacccagtgcttgattatgaccatggaagtcgttctcaagaatctggttattatgacagaatggattatgaagatgacagattaagagatggagaaaggtgtagggatgattctttttttggtgagacctcgcataactatcataaatttgacagtgagtatgagagaatgggacgtggtcctggccccttacaagagagatctctctttgagaaaaagagaggcgctcctccaagtagcaatattgaagacttccatggactcttaccgaagggttatccccatctgtgctctatatgtgatttgccagttcattctaataaggagtggagtcaacatatcaatggagcaagtcacagtcgtcgatgccagcttcttcttgaaatctacccagaatggaatcctgacaatgatacaggacacacaatgggtgatccattcatgttgcagcagtctacaaatccagcaccaggaattctgggacctccacctccctcatttcatcttgggggaccagcagttggaccaagaggaaatctgggtgctggaaatggaaacctgcaaggacctagacacatgcagaaaggcagagtggaaactagcagagttgttcacatcatggattttcaacgagggaaaaacttgagataccagctattacagctggtagaaccatttggagtcatttcaaatcatctgattctaaataaaattaatgaggcatttattgaaatggcaaccacagaggatgctcaggccgcagtggattattacacaaccacaccagcgttagtatttggcaagccagtgagagttcatttatcccagaagtataaaagaataaagaaacctgaaggaaagccagatcagaagtttgatcaaaagcaagagcttggacgtgtgatacatctcagcaatttgccgcattctggctattctgatagtgctgttctcaagcttgctgagccttatgggaaaataaagaattacatattgatgaggatgaaaagtcaggcttttattgagatggagacaagagaagatgcaatggcaatggttgaccattgtttgaaaaaagccctttggtttcaggggagatgtgtgaaggttgacctgtctgagaaatataaaaaactggttctgaggattccaaacagaggcattgatttactgaaaaaagataaatcccgaaaaagatcttactctccagatggcaaagaatctccaagtgataagaaatccaaaactgatggttcccagaagactgagagttcaaccgaaggtaaagaacaagaagagaagtccggtgaagatggtgagaaagacacaaaggatgaccagacagagcaggaacctaatatgcttcttgaatctgaagatgagctacttgtagatgaagaagaagcagcagcactgctagaaagtggcagttcagtgggagacgagaccgatcttgctaatttaggtgatgtggcttctgatgggaaaaaggaaccatcagataaagctgtgaaaaaagatggaagtgcttcagcagcagcaaagaaaaagcttaaaaaggtggacaagatcgaggaacttgatcaagaaaacgaagcagcgttggaaaatggaattaaaaatgaggaaaacacagaaccaggtgctgaatcttctgagaacgctgatgatcccaacaaagatacaagtgaaaacgcagatggtcaaagtgatgagaacaaggacgactatacaatcccagatgagtatagaattggaccatatcagcccaatgttcctgttggtatagactatgtgatacctaaaacagggttttactgtaagctgtgttcactcttttatacaaatgaagaagttgcaaagaatactcattgcagcagccttcctcattatcagaaattaaagaaatttctgaataaattggcagaagaacgcagacagaagaaggaaacttaagatgtgcaa

SEQ ID NO: 17276 - DNA, 455 bp, Homo sapiens
  source 1..455: mol_type = unassigned DNA
tctccttttccctctccctttccctaaggtaggcgtgaagcgggtaagagtcggggtcgggtggctgggggttctccgtgtccgccgggaggggacaacgacggcgacaggggctgcggggagccggcggcgcgcctttcttgctcgctcccgctctgcctccctccgcgttgcgtatgtgagccgcctgatcggcggccgccatgttaggagcgcagtggcggcgcaaccagccttctagggcggcggagagttgtctgctggttctcagcttgaagaagattctgcagtccttattgatcctttttcttggcgttaccatttttgaagcaaagttaacctagctttctagtttgagctttctttttggccgtctttaaaaaaatttttttttttaatctataaaatagacaagagctagttctacaatgtccaagtcattccagcagtcatct

SEQ ID NO: 17277 - DNA, 564 bp, Homo sapiens
  source 1..564: mol_type = unassigned DNA
atcgcgtaaaaatggccgaaaaatgaaacgttaacgcttgtttttcgtactgcgtcgtggaacaagccgcctgcagtacagtgcgagagttgtctgctggttctcagcttgaagaagattctgcagtccttattgatcctttttcttggcgttaccatttttgaagcaaagttaacctagctttctagtttgagctttctttttggccgtctttaaaaaaatttttttttttaatctataaaatagacaagagctagttctacaatgtccaagtcattccagcagtcatctctcagtagggactcacagggtcatgggcgtgacctgtctgcggcaggaataggccttcttgctgctgctacccagtctttaagtatgccagcatctcttggaaggatgaaccagggtactgcacgccttgctagtttaatgaatcttggaatgagttcttcattgaatcaacaaggagctcatagtgcactgtcttctgctagtacttcttcccataatttgcagtctatatttaacattggaagtagaggtccactccctttatcttctcaa

SEQ ID NO: 17278 - DNA, 587 bp, Homo sapiens
  source 1..587: mol_type = unassigned DNA
tttcccctccggcctctgccggtgctgctgcgccctgcggagctccgaacacgtgcgcagaggctggctgtggcagatgcaactgcagagttgtctgctggttctcagcttgaagaagattctgcagtccttattgatcctttttcttggcgttaccatttttgaagcaaagttaacctagctttctagtttgagctttctttttggccgtctttaaaaaaatttttttttttaatctataaaatagacaagagctagttctacaatgtccaagtcattccagcagtcatctctcagtagggactcacagggtcatgggcgtgacctgtctgcggcaggaataggccttcttgctgctgctacccagtctttaagtatgccagcatctcttggaaggatgaaccagggtactgcacgccttgctagtttaatgaatcttggaatgagttcttcattgaatcaacaaggagctcatagtgcactgtcttctgctagtacttcttcccataatttgcagtctatatttaacattggaagtagaggtccactccctttatcttctcaacaccgtggagatgcagaccagg

SEQ ID NO: 17279 - DNA, 1986 bp, Homo sapiens
  source 1..1986: mol_type = unassigned DNA
caggtattctgaaggtgaaagataccagagattctcaaagatgcgagttttctgtgtgggactactccttttcagtgtgacctgggcagcaccaacatttcaaccacagactgagaaaactaagcaaagctgtgtggaagagcagaggcaggaagaaaaaaacaaagacaatattggttttcaccatttgggcaagagaataaatcaagagctatcatctaaagaaaatattgtccaggaaagaaagaaagatttgtccctttctgaagccagtgagaataagggaagtagtaaatctcaaaattatttcacaaatagacagagactgaataaagaatatagtatcagtaacaaagagaatactcacaatggcctgaggatgtcaatttatcctaagtcaactgggaataaagggtttgaggatggagatgatgctatcagcaaactacatgaccaagaagaatatggcgcagctctcatcagaaataacatgcaacatataatggggccagtgactgcgattaaactcctgggggaagaaaacaaagagaacacacctaggaatgttctaaacataatcccagcaagtatgaattatgctaaagcacactcgaaggataaaaagaagcctcaaagagattcccaagcccagaaaagtccagtaaaaagcaaaagcacccatcgtattcaacacaacattgactacctaaaacatctctcaaaagtcaaaaaaatccccagtgattttgaaggcagcggttatacagatcttcaagagagaggggacaatgatatatctcctttcagtggggacggccaaccttttaaggacattcctggtaaaggagaagctactggtcctgacctagaaggcaaagatattcaaacagggtttgcaggcccaagtgaagctgagagtactcatcttgacacaaaaaagccaggttataatgagatcccagagagagaagaaaatggtggaaataccattggaactagggatgaaactgcgaaagaggcagatgctgttgatgtcagccttgtagagggcagcaacgatatcatgggtagtaccaattttaaggagctccctggaagagaaggaaacagagtggatgctggcagccaaaatgctcaccaagggaaggttgagtttcattaccctcctgcaccctcaaaagagaaaagaaaagaaggcagtagtgatgcagctgaaagtaccaactataatgaaattcctaaaaatggcaaaggcagtaccagaaagggtgtagatcattctaataggaaccaagcaaccttaaatgaaaaacaaaggtttcctagtaagggcaaaagtcagggcctgcccattccttctcgtggtcttgataatgaaatcaaaaacgaaatggattcctttaatggccccagtcatgagaatataataacacatggcagaaaatatcattatgtaccccacagacaaaataattctacacggaataagggtatgccacaagggaaaggctcctggggtagacaaccccattccaacaggaggtttagttcccgtagaagggatgacagtagtgagtcatctgacagtggcagttcaagtgagagcgatggtgactagtccaccaggagttcccagcggggtgacagtctgaagacctcgtcacctgtgagttgatgtagaggagagccacctgacagctgaccaggtgaagagaggatagagtgaagaactgagtgagccaagaatcctggtctccttgggggaatttttgctatcttaatagtcacagtataaaattctattaaaggctataatgtttttaagcaaaaaaaaatcattacagatctatgaaataggtaacatttgagtaggtgtcatttaaaaatagttggtgaatgtcacaaatgccttctatgttgtttgctctgtagacatgaaaataaacaatatctctcgatgataatttgtattaagtaatctataag

SEQ ID NO: 17280 - DNA, 2022 bp, Homo sapiens
  source 1..2022: mol_type = unassigned DNA
atgcagtgctcccctggcctgccggcagctatccacaccagaaagaggaaaaggtagactgagattctcaaagatgcgagttttctgtgtgggactactccttttcagtgtgacctgggcagcaccaacatttcaaccacagactgagaaaactaagcaaagctgtgtggaagagcagaggcaggaagaaaaaaacaaagacaatattggttttcaccatttgggcaagagaataaatcaagagctatcatctaaagaaaatattgtccaggaaagaaagaaagatttgtccctttctgaagccagtgagaataagggaagtagtaaatctcaaaattatttcacaaatagacagagactgaataaagaatatagtatcagtaacaaagagaatactcacaatggcctgaggatgtcaatttatcctaagtcaactgggaataaagggtttgaggatggagatgatgctatcagcaaactacatgaccaagaagaatatggcgcagctctcatcagaaataacatgcaacatataatggggccagtgactgcgattaaactcctgggggaagaaaacaaagagaacacacctaggaatgttctaaacataatcccagcaagtatgaattatgctaaagcacactcgaaggataaaaagaagcctcaaagagattcccaagcccagaaaagtccagtaaaaagcaaaagcacccatcgtattcaacacaacattgactacctaaaacatctctcaaaagtcaaaaaaatccccagtgattttgaaggcagcggttatacagatcttcaagagagaggggacaatgatatatctcctttcagtggggacggccaaccttttaaggacattcctggtaaaggagaagctactggtcctgacctagaaggcaaagatattcaaacagggtttgcaggcccaagtgaagctgagagtactcatcttgacacaaaaaagccaggttataatgagatcccagagagagaagaaaatggtggaaataccattggaactagggatgaaactgcgaaagaggcagatgctgttgatgtcagccttgtagagggcagcaacgatatcatgggtagtaccaattttaaggagctccctggaagagaaggaaacagagtggatgctggcagccaaaatgctcaccaagggaaggttgagtttcattaccctcctgcaccctcaaaagagaaaagaaaagaaggcagtagtgatgcagctgaaagtaccaactataatgaaattcctaaaaatggcaaaggcagtaccagaaagggtgtagatcattctaataggaaccaagcaaccttaaatgaaaaacaaaggtttcctagtaagggcaaaagtcagggcctgcccattccttctcgtggtcttgataatgaaatcaaaaacgaaatggattcctttaatggccccagtcatgagaatataataacacatggcagaaaatatcattatgtaccccacagacaaaataattctacacggaataagggtatgccacaagggaaaggctcctggggtagacaaccccattccaacaggaggtttagttcccgtagaagggatgacagtagtgagtcatctgacagtggcagttcaagtgagagcgatggtgactagtccaccaggagttcccagcggggtgacagtctgaagacctcgtcacctgtgagttgatgtagaggagagccacctgacagctgaccaggtgaagagaggatagagtgaagaactgagtgagccaagaatcctggtctccttgggggaatttttgctatcttaatagtcacagtataaaattctattaaaggctataatgtttttaagcaaaaaaaaatcattacagatctatgaaataggtaacatttgagtaggtgtcatttaaaaatagttggtgaatgtcacaaatgccttctatgttgtttgctctgtagacatgaaaataaacaatatctctcgatgataatttgtattaagtaatctataagaaa

SEQ ID NO: 17281 - DNA, 2031 bp, Homo sapiens
  source 1..2031: mol_type = unassigned DNA
tttacataaacaaatgcagtgctcccctggcctgccggcagctatccacaccagaaagaggaaaaggtagactgagattctcaaagatgcgagttttctgtgtgggactactccttttcagtgtgacctgggcagcaccaacatttcaaccacagactgagaaaactaagcaaagctgtgtggaagagcagaggcaggaagaaaaaaacaaagacaatattggttttcaccatttgggcaagagaataaatcaagagctatcatctaaagaaaatattgtccaggaaagaaagaaagatttgtccctttctgaagccagtgagaataagggaagtagtaaatctcaaaattatttcacaaatagacagagactgaataaagaatatagtatcagtaacaaagagaatactcacaatggcctgaggatgtcaatttatcctaagtcaactgggaataaagggtttgaggatggagatgatgctatcagcaaactacatgaccaagaagaatatggcgcagctctcatcagaaataacatgcaacatataatggggccagtgactgcgattaaactcctgggggaagaaaacaaagagaacacacctaggaatgttctaaacataatcccagcaagtatgaattatgctaaagcacactcgaaggataaaaagaagcctcaaagagattcccaagcccagaaaagtccagtaaaaagcaaaagcacccatcgtattcaacacaacattgactacctaaaacatctctcaaaagtcaaaaaaatccccagtgattttgaaggcagcggttatacagatcttcaagagagaggggacaatgatatatctcctttcagtgggacggccaaccttttaaggacattcctggtaaaggagaagctactggtcctgacctagaaggcaaagatattcaaacagggtttgcaggcccaagtgaagctgagagtactcatcttgacacaaaaaagccaggttataatgagatcccagagagagaagaaaatggtggaaataccattggaactagggatgaaactgcgaaagaggcagatgctgttgatgtcagccttgtagagggcagcaacgatatcatgggtagtaccaattttaaggagctccctggaagagaaggaaacagagtggatgctggcagccaaaatgctcaccaagggaaggttgagtttcattaccctcctgcaccctcaaaagagaaaagaaaagaaggcagtagtgatgcagctgaaagtaccaactataatgaaattcctaaaaatggcaaaggcagtaccagaaagggtgtagatcattctaataggaaccaagcaaccttaaatgaaaaacaaaggtttcctagtaagggcaaaagtcagggcctgcccattccttctcgtggtcttgataatgaaatcaaaaacgaaatggattcctttaatggccccagtcatgagaatataataacacatggcagaaaatatcattatgtaccccacagacaaaataattctacacggaataagggtatgccacaagggaaaggctcctggggtagacaaccccattccaacaggaggtttagttcccgtagaagggatgacagtagtgagtcatctgacagtggcagttcaagtgagagcgatggtgactagtccaccaggagttcccagcggggtgacagtctgaagacctcgtcacctgtgagttgatgtagaggagagccacctgacagctgaccaggtgaagagaggatagagtgaagaactgagtgagccaagaatcctggtctccttgggggaatttttgctatcttaatagtcacagtataaaattctattaaaggctataatgtttttaagcaaaaaaaaatcattacagatctatgaaataggtaacatttgagtaggtgtcatttaaaaatagttggtgaatgtcacaaatgccttctatgttgtttgctctgtagacatgaaaataaacaatatctctcgatgataatttgtattaagtaatctataag

SEQ ID NO: 17282 - DNA, 2135 bp, Homo sapiens
  source 1..2135: mol_type = unassigned DNA
aatcctgcaacaagaagccaggtattctgaaggtgaaagataccagagattctcaaagatgcgagttttctgtgtgggactactccttttcagtgtgacctgggcagcaccaacatttcaaccacagactgagaaaactaagcaaagctgtgtggaagagcagagggctcctcaagcctctctactacaaaactctgggtcccagaatcttcctgatccccatcccatgcctcggcccacatctcgctctgcttcaggacctgtggctgcaggtgtgatactcatggacctcagcaggaagaaaaaaacaaagacaatattggttttcaccatttgggcaagagaataaatcaagagctatcatctaaagaaaatattgtccaggaaagaaagaaagatttgtccctttctgaagccagtgagaataagggaagtagtaaatctcaaaattatttcacaaatagacagagactgaataaagaatatagtatcagtaacaaagagaatactcacaatggcctgaggatgtcaatttatcctaagtcaactgggaataaagggtttgaggatggagatgatgctatcagcaaactacatgaccaagaagaatatggcgcagctctcatcagaaataacatgcaacatataatggggccagtgactgcgattaaactcctgggggaagaaaacaaagagaacacacctaggaatgttctaaacataatcccagcaagtatgaattatgctaaagcacactcgaaggataaaaagaagcctcaaagagattcccaagcccagaaaagtccagtaaaaagcaaaagcacccatcgtattcaacacaacattgactacctaaaacatctctcaaaagtcaaaaaaatccccagtgattttgaaggcagcggttatacagatcttcaagagagaggggacaatgatatatctcctttcagtggggacggccaaccttttaaggacattcctggtaaaggagaagctactggtcctgacctagaaggcaaagatattcaaacagggtttgcaggcccaagtgaagctgagagtactcatcttgacacaaaaaagccaggttataatgagatcccagagagagaagaaaatggtggaaataccattggaactagggatgaaactgcgaaagaggcagatgctgttgatgtcagccttgtagagggcagcaacgatatcatgggtagtaccaattttaaggagctccctggaagagaaggaaacagagtggatgctggcagccaaaatgctcaccaagggaaggttgagtttcattaccctcctgcaccctcaaaagagaaaagaaaagaaggcagtagtgatgcagctgaaagtaccaactataatgaaattcctaaaaatggcaaaggcagtaccagaaagggtgtagatcattctaataggaaccaagcaaccttaaatgaaaaacaaaggtttcctagtaagggcaaaagtcagggcctgcccattccttctcgtggtcttgataatgaaatcaaaaacgaaatggattcctttaatggccccagtcatgagaatataataacacatggcagaaaatatcattatgtaccccacagacaaaataattctacacggaataagggtatgccacaagggaaaggctcctggggtagacaaccccattccaacaggaggtttagttcccgtagaagggatgacagtagtgagtcatctgacagtggcagttcaagtgagagcgatggtgactagtccaccaggagttcccagcggggtgacagtctgaagacctcgtcacctgtgagttgatgtagaggagagccacctgacagctgaccaggtgaagagaggatagagtgaagaactgagtgagccaagaatcctggtctccttgggggaatttttgctatcttaatagtcacagtataaaattctattaaaggctataatgtttttaagcaaaaaaaaatcattacagatctatgaaataggtaacatttgagtaggtgtcatttaaaaatagttggtgaatgtcacaaatgccttctatgttgtttgctctgtagacatgaaaataaacaatatctctcgatgataatttgtattaagtaatctataagaaa

SEQ ID NO: 17283 - DNA, 2206 bp, Homo sapiens
  source 1..2206: mol_type = unassigned DNA
aatcctgcaacaagaagccaggtattctgaaggtgaaagataccagagattctcaaagatgcgagttttctgtgtgggactactccttttcagtgtgacctgggcagcaccaacatttcaaccacagactgagaaaactaagcaaagctgtgtggaagagcagaggataacatacaagggtcactatgagaaacatgggcattatgtttttaagtgtgtttacatgtcacctgagaagaaaaatcaaactgatgtaaaggctcctcaagcctctctactacaaaactctgggtcccagaatcttcctgatccccatcccatgcctcggcccacatctcgctctgcttcaggacctgtggctgcagcaggaagaaaaaaacaaagacaatattggttttcaccatttgggcaagagaataaatcaagagctatcatctaaagaaaatattgtccaggaaagaaagaaagatttgtccctttctgaagccagtgagaataagggaagtagtaaatctcaaaattatttcacaaatagacagagactgaataaagaatatagtatcagtaacaaagagaatactcacaatggcctgaggatgtcaatttatcctaagtcaactgggaataaagggtttgaggatggagatgatgctatcagcaaactacatgaccaagaagaatatggcgcagctctcatcagaaataacatgcaacatataatggggccagtgactgcgattaaactcctgggggaagaaaacaaagagaacacacctaggaatgttctaaacataatcccagcaagtatgaattatgctaaagcacactcgaaggataaaaagaagcctcaaagagattcccaagcccagaaaagtccagtaaaaagcaaaagcacccatcgtattcaacacaacattgactacctaaaacatctctcaaaagtcaaaaaaatccccagtgattttgaaggcagcggttatacagatcttcaagagagaggggacaatgatatatctcctttcagtggggacggccaaccttttaaggacattcctggtaaaggagaagctactggtcctgacctagaaggcaaagatattcaaacagggtttgcaggcccaagtgaagctgagagtactcatcttgacacaaaaaagccaggttataatgagatcccagagagagaagaaaatggtggaaataccattggaactagggatgaaactgcgaaagaggcagatgctgttgatgtcagccttgtagagggcagcaacgatatcatgggtagtaccaattttaaggagctccctggaagagaaggaaacagagtggatgctggcagccaaaatgctcaccaagggaaggttgagtttcattaccctcctgcaccctcaaaagagaaaagaaaagaaggcagtagtgatgcagctgaaagtaccaactataatgaaattcctaaaaatggcaaaggcagtaccagaaagggtgtagatcattctaataggaaccaagcaaccttaaatgaaaaacaaaggtttcctagtaagggcaaaagtcagggcctgcccattccttctcgtggtcttgataatgaaatcaaaaacgaaatggattcctttaatggccccagtcatgagaatataataacacatggcagaaaatatcattatgtaccccacagacaaaataattctacacggaataagggtatgccacaagggaaaggctcctggggtagacaaccccattccaacaggaggtttagttcccgtagaagggatgacagtagtgagtcatctgacagtggcagttcaagtgagagcgatggtgactagtccaccaggagttcccagcggggtgacagtctgaagacctcgtcacctgtgagttgatgtagaggagagccacctgacagctgaccaggtgaagagaggatagagtgaagaactgagtgagccaagaatcctggtctccttgggggaatttttgctatcttaatagtcacagtataaaattctattaaaggctataatgtttttaagcaaaaaaaaatcattacagatctatgaaataggtaacatttgagtaggtgtcatttaaaaatagttggtgaatgtcacaaatgccttctatgttgtttgctctgtagacatgaaaataaacaatatctctcgatgataatttgtattaagtaatctataagaaa

SEQ ID NO: 17284 - DNA, 1405 bp, Homo sapiens
  source 1..1405: mol_type = unassigned DNA
tctcccactggttcctcccctctcaactgctctggttcttataaaaacctcacagccttccactaacatcccgtaggagcctctctccctactgctgctacacaagaccctgagactgacctgcaggacgaaaccatgaagagcctgatccttcttgccatcctggccgccttagcggtagtaactttgtgttatgaatcacatgaaagcatggaatcttatgaacttaatcccttcattaacaggagaaatgcaaataccttcatatcccctcagcagagatggagagctaaagtccaagagaggatccgagaacgctctaagcctgtccacgagctcaatagggaagcctgtgatgactacagactttgcgaacgctacgccatggtttatggatacaatgctgcctataatcgctacttcaggaagcgccgagggaccaaatgagactgagggaagaaaaaaaatctctttttttctggaggctggcacctgattttgtatccccctgtagcagcattacagaaatacataggcttatatacaatgcttctttcctgtatattctcttgtctggctgcacccctttttcccgcccccagattgataagtaatgaaagtgcactgcagtgagggtcaaaggagagtcaacatatgtgattgttccataataaacttctggtgtgatactttcatcttgtaaatctgctttcttttgggaagatattgagatatttaaatcatggcccaccttacccaaaataggagattctgttcatctcatatctagtattaattagaaaaataactacataaaaagaaggaagctaagaaggcactcactcagccataaattctctaaaccctctctaccttggaatccgtgaatggaatctggtatgttttttgcaggattttcctattgtaaattgtggcaaatacagggctcccttcatttgcttttcatctcttatgcatcaaagtcaaaaacatttctgaatcaagataatctagaagagaaaaaaggaggaaaaggaaaagagaaagcagaagggacaaataaaagcaattggcaaaaactgtcaataatagtttatacacttaactatatcaataatcacattatatgtaaatagtctaaacaatccaattattttttacttctacttatgttatatttttacttctacatttgttaaaggttccacgctacatttttactattcttgctttaaataattttaataatttcttttaaagtttagataataagaaaatatcccgggccaggcacagtggccacacctgtaatctcagtagccatgaccataccaatgcactccagcctgtgaaacagagtgagactctgtctctacagaaaaataaaaaagaaaagaaagaaaag

SEQ ID NO: 17285 - DNA, 694 bp, Homo sapiens
  source 1..694: mol_type = unassigned DNA
cccgtaggagcctctctccctactgctgctacacaagaccctgagactgacctgcaggacgaaaccatgaagagcctgatccttcttgccatcctggccgccttagcggtagtaactttgtgttatggagagtggcagaaagaagaaaacttcggctttgatatcgtttcagttctctctctgaactggcatcgtgcccaggaatcacatgaaagcatggaatcttatgaacttaatcccttcattaacaggagaaatgcaaataccttcatatcccctcagcagagatggagagctaaagtccaagagaggatccgagaacgctctaagcctgtccacgagctcaatagggaagcctgtgatgactacagactttgcgaacgctacgccatggtttatggatacaatgctgcctataatcgctacttcaggaagcgccgagggaccaaatgagactgagggaagaaaaaaaatctctttttttctggaggctggcacctgattttgtatccccctgtagcagcattacagaaatacataggcttatatacaatgcttctttcctgtatattctcttgtctggctgcacccctttttcccgcccccagattgataagtaatgaaagtgcactgcagtgagggtcaaaggagagtcaacatatgtgattgttccataataaacttctggtgtgat

SEQ ID NO: 17286 - DNA, 4996 bp, Homo sapiens
  source 1..4996: mol_type = unassigned DNA
cggcggccgggggcagcgcggctccttcccttgttgtgtgtgtcggtgcctcctcgccatcttgttgcaaagccctttcttgtcggcgggactcccgggggccgcggggcgggaggcatcggaagggaggtagagagggaggggaagaagggaggcagtgccgccttttttttttttttgcatcccatttttttaaatttgcaattttatattttgcaaatattttgagagacattgatttttctccccgtgctcccccgttcttccctgcggagtgcgctgcgccgcccagccctgtcgccccccggaggtgatccctccctcctgcctgcccgccagcctgacctgtgcccggctcgcgggccgcagcctcggccccggcgcgcccccggcagctctcggcgcgatgagcatagagacgctactggaggcggcccgcttcctggaatggcaagcgcagcaacaacagagagcacgtgaggagcaggagcggcttcgcttggagcaggagcgagagcaggaacagaagaaggccaatagcctggccaggctggcacatacccttcctgtggaggaaccccgcatggaggcgccacccctgcctctgtctccaccggctcccccgccggcacccccaccaccacttgccacccctgccccactgactgtcatccctatccctgtggtgaccaactcccctcagcctctacccccacccccacccttgcccgcggcagcccagcctctgcccctggcgcctcgtcagccggccctggttggcgcccccggactcagcattaaggagcctgcccccctgcccagcaggccgcaggtgcccacccctgctcccctactgccggactcgaaggccaccattccacccaatggcagccccaagcctttgcagcccctccccacgcctgtcctgaccatagcgccacaccctggagtccagcctcagctggccccccagcagccgcccccacccacgctggggaccctgaagttggcaccagctgaagaagtcaaatccagtgaacagaagaagaggcccggggggatcggaaccagagaagtccacaacaaattggagaagaacaggagggcccatctgaaagagtgctttgagaccctgaagcggaacatccccaacgtggatgacaagaagacgtccaatctgagcgtgctgcggacggcgctgcggtacatccagtccctgaagaggaaggagaaggaatatgagcatgaaatggagcggctggcacgtgagaagattgccacgcagcagcggctggcagagctcaagcacgagctgagccagtggatggacgtactggagattgaccgcgtgctgcggcagacgggccagcccgaggatgaccaggcctccacctccaccgcctctgagggtgaggacaacatagacgaggatatggaggaggaccgggcgggcctgggcccacctaagctgagccatcgtccccagccggagctgctgaagtccaccctgccaccccccagcaccacccctgcgcctctgcctccacacccacaccctcacccccactccgtggccctacctcctgcccacctccccgtgcagcagcagcagccacagcagaagacccctctgccagcccctcctcccccaccggctgcccctgcccagacactggtgccagctccagcccatctggtggcgacggctgggggtggctccacggtcatcgcccacacagccaccactcacgcttcagtcatccagactgtgaaccacgttctgcaggggccaggcggcaagcacatcgcccacatcgccccctcggcccccagccctgcggtgcaactggcgcctgccacaccccccattgggcacatcactgtgcaccctgccaccctcaaccatgtggcccacctgggctcccagctgcccttgtacccgcagcccgtggcagtgagccacatcgcccacaccctctcgcaccagcaagtcaacggcacggccggcctggggcccccggctactgtcatggcaaagccggccgtgggggctcaggtggtgcaccacccccagctggtgggccagaccgtgctcaaccctgtgaccatggtcaccatgccctccttcccagtcagcacactcaagctggcttgaggacgaggccactcagaggcccccagtggggacagggagggggacctgtcccccactctctcacccaccagctccacacattccagccaggcccaggccagcccccccacccacccccaggcctcctaggggaagggggtgcaaagactctgagccaagggagggaagggccaccctgctgcactaggacttggtaagatgactctgagaaaatgcgagactctgatggaatgtgccacctgtccggcccagtgccagctccagtgccgctcctgcttcccctccctaccctcggaaatcagtgcgatgtggacgtcacgctccctgacttctcccccgccctgccccgccttcgtgtgctgctgctgctattgctgtctggtgaggtggcccaggcccccggctttcctccggagcctcatgttctcttcccaggcctttggaggggaaatggggaaagcagaactgaagccacttggcccagaaagctgcggattggggtgataaggggccttgctctgagcacaggtgacagatcataggaagtggctggtctggagtcccacccggacaggtggggcctcagcctggggctctctgacccggttgcagtcactgtgattcgttaccgtagatactacttaaaatgattctctaccaacaataaaccaaacccagccactgccaagcttcctgtgccctcaccccaatccctgccactgggctctggacctcaggagggcaggctgaggtggggaaggagggacttggctgtccttccccttccccgtcccctgcagcctgggtctggatgggaggagagccactgggcccctgtccccagtccccagtccccagccctgggcttggctcttggcttccagaaggcagcaaagaggggcgctgtcctgcgttcagcccctgatctctgacctctgctgagtgctgggcactgctccaagggacaggtgggcctggcggcctgtgggtttgggtgcctcctgcagtttgggagacatggaccagcatctggtcttgtttccaggagcatagaagccacatcgttgagacatcaggaaggtaaaaacccagcggcttagccaagccctaagcctgtccccagaccaaccctgggacctatacagaacagagggccagagctagggctgctgcttctgctccagcccctttgcctctgtcctcccatcccctcaacaccctgcttctcccggggacgcttttgagtgggccctgcccggggagctgcagagcagcagcacctttctctgagaagaggtccttggttgggtcaaggacagggctgagcgtggaagggggaggagtcaggggctctgtgttaggatgcggctttctctgcctctgggcagcctgctttggcctttccttgtatgtgggtgtttattacaagtggctttgtgtcagacacgctcggctccccacctggacacacactcaccagtggcctttcagtgtagcgggaggaagccggtgtccctggatgtgaagctcacactgatgggctggggcaggggcctgggccggcgagggggccggggggaggggacagagctgaggatttcctggagtgccctgcaggcacagaggaggtcagcaaaggtcttgaatagattttctctggaaataaagaatccttagatgcctaaaaattcccttcctgttccctcctggtcctggacacctcccaggggactgttccttatttctctctcctggtgtgggtaaagggacagttacaaaccaggtcaccatcctcagaggctgagccctgtacccaccccagcacagccacctccgccagaccccgtggctctgggagagccagctttgctattcccattgtgacagcgatggcaggcctgacccacggggcagttagagcagcctcgtggagctcgcccctcccctcagcctgcccacctctccctgcatcctgaggccagtggcccccgggcctgcacagatacctcatcatccacccgctgcccctccccgtccctgtcccccagcatcgggggcctgcaaatctagtgccgaatgactatgtccagattggtgacgatgggtgttgctgtttttcttgtcgtttgtgaacgctgtgatgctgtgtgcccaagtgggcagtcaccacccagcccttccttgggcgtctcccccagagtgctgtcgggaccacatctgtcctcaccctgtgggaccgcctggccctccctccctagcccttccagcctgggacacacacacacacacacacacacacacacgcacgcacacgcacacatcttacctctcatgcgtgttttaccttttgatgttcagagtggctcactggctgggagtccttacctcggggagagggggaggttggttccttggggggccaaagaaggcagggaatgcctggagggtaactggggggccaccatgaccccttctctctccagaaacagctgcttctccccccatcccagggtcccacccccaacccccagaggtggcccttgtttacagtgaggactcggccactgtgtctctgtttcctgaaatataaactgtagcgaccccagactgtagagatttttatgtgtttggatacatctgctgtgtggaaaaaaaaaaaaactacaaaaaccctaattttgtacatactgtatttttactattgaactgtattctagtggctgttcatgctccaagactttagttaccgagacatgaatactatccatgtaataagcacttgcctggaataaaatataaaactgaaataaacctgcactgaaacctgagatggagctgcca

SEQ ID NO: 17287 - DNA, 2438 bp, Homo sapiens
  source 1..2438: mol_type = unassigned DNA
atcttgttgcaaagccctttcttgtcggcgggactcccgggggccgcggggcgggaggcatcggaagggaggtagagagggaggggaagaagggaggcagtgccgccttttttttttttttgcatcccatttttttaaatttgcaattttatattttgcaaatattttgagagacattgatttttctccccgtgctcccccgttcttccctgcggagtgcgctgcgccgcccagccctgtcgccccccggaggtgatccctccctcctgcctgcccgccagcctgacctgtgcccggctcgcgggccgcagcctcggccccggcgcgcccccggcagctctcggcgcgatgagcatagagacgctactggaggcggcccgcttcctggaatggcaagcgcagcaacaacagagagcacgtgaggagcaggagcggcttcgcttggagcaggagcgagagcaggaacagaagaaggccaatagcctggccaggctggcacatacccttcctgtggaggaaccccgcatggaggcgccacccctgcctctgtctccaccggctcccccgccggcacccccaccaccacttgccacccctgccccactgactgtcatccctatccctgtggtgaccaactcccctcagcctctacccccacccccacccttgcccgcggcagcccagcctctgcccctggcgcctcgtcagccggccctggttggcgcccccggactcagcattaaggagcctgcccccctgcccagcaggccgcaggtgcccacccctgctcccctactgccggactcgaaggccaccattccacccaatggcagccccaagcctttgcagcccctccccacgcctgtcctgaccatagcgccacaccctggagtccagcctcagctggccccccagcagccgcccccacccacgctggggaccctgaagttggcaccagctgaagaagtcaaatccagtgaacagaagaagaggcccggggggatcggaaccagagaagtccacaacaaattggagaagaacaggagggcccatctgaaagagtgctttgagaccctgaagcggaacatccccaacgtggatgacaagaagacgtccaatctgagcgtgctgcggacggcgctgcggtacatccagtccctgaagaggaaggagaaggaatatgagcatgaaatggagcggctggcacgtgagaagattgccacgcagcagcggctggcagagctcaagcacgagctgagccagtggatggacgtactggagattgaccgcgtgctgcggcagacgggccagcccgaggatgaccaggcctccacctccaccgcctctgagggtgaggacaacatagacgaggatatggaggaggaccgggcgggcctgggcccacctaagctgagccatcgtccccagccggagctgctgaagtccaccctgccaccccccagcaccacccctgcgcctctgcctccacacccacaccctcacccccactccgtggccctacctcctgcccacctccccgtgcagcagcagcagccacagcagaagacccctctgccagcccctcctcccccaccggctgcccctgcccagacactggtgccagctccagcccatctggtggcgacggctgggggtggctccacggtcatcgcccacacagccaccactcacgcttcagtcatccagactgtgaaccacgttctgcaggggccaggcggcaagcacatcgcccacatcgccccctcggcccccagccctgcggtgcaactggcgcctgccacaccccccattgggcacatcactgtgcaccctgccaccctcaaccatgtggcccacctgggctcccagctgcccttgtacccgcagcccgtggcagtgagccacatcgcccacaccctctcgcaccagcaagtcaacggcacggccggcctggggcccccggctactgtcatggcaaagccggccgtgggggctcaggtggtgcaccacccccagctggtgggccagaccgtgctcaaccctgtgaccatggtcaccatgccctccttcccagtcagcacactcaagctggcttgaggacgaggccactcagaggcccccagtggggacagggagggggacctgtcccccactctctcacccaccagctccacacattccagccagccctgccccgccttcgtgtgctgctgctgctattgctgtctggtgaggtggcccaggcccccggctttcctccggagcctcatgttctcttcccaggcctttggaggggaaatggggaaagcagaactgaagccacttggcccagaaagctgcggattggggtgataaggggccttgctctgagcacaggtgacagatcataggaagtggctggtctggagtcccacccggacaggtggggcctcagcctg

SEQ ID NO: 17288 - DNA, 1033 bp, Homo sapiens
  source 1..1033: mol_type = unassigned DNA
aaaagtgctgcagccgcttgctccggccggcaccctaggccggcccgccgccagctgtcgccgacatggaacccttggccagcaacatccaggtcctgctgcaggcggccgagttcctggagcgccgtgagagagaggccgagcatggttatgcgtccctgtgcccgcatcgcagtccaggccccatccacaggaggaagaagcgacccccccaggctcctggcgcgcaggacagcgggcggtggagggcccagttgaagcggtgcctggagcggctgaagcagcagatgcccctgggggccgactgtgcccggtacaccacgctgagcctgctgcgccgtgccaggatgcacatccagaagctggaggatcaggagcagcgggcccgacagctcaaggagaggctgcgcagcaagcagcagagcctgcagcggcagctggagcagctccgggggctggcaggggcggccgagcgggagcggctgcgggcggacagtctggactcctcaggcctctcctctgagcgctcagactcagaccaagaggagctggaggtggatgtggagagcctggtgtttgggggtgaggccgagctgctgcggggcttcgtcgccggccaggagcacagctactcgcacggcggcggcgcctggctatgatgttcctcacccagggcgggcctctgccctctactcgtgccaggcccacttgccaggcaggagccctccccaagccttcagggctgctcggagtcacctgttggaatggactaaaaggacccttgtgtgggaacaggtgctccccaaacaccctgctgctggctgccaggcaggccctctggaagggaaggggcaggactcatcaggacctccctggacccctgcagggcaggcagcttgggcccgagcccaagcatttggctctgctgcccccaaggggacaggaagcctcttgggcctcttcccttcctggacaaggccccctgcctttgcctcacataaactgtacagtattttcattaaaagcctctttc

SEQ ID NO: 17289 - DNA, 1534 bp, Homo sapiens
  source 1..1534: mol_type = unassigned DNA
aaaagtgctgcagccgcttgctccggccggcaccctaggccggcccgccgccagctgtcgccgacatggaacccttggccagcaacatccaggtcctgctgcaggcggccgagttcctggagcgccgtgagagagaggccgagcatggttatgcgtccctgtgcccgcatcgcagtccaggccccatccacaggaggaagaagcgacccccccaggctcctggcgcgcaggacagcgggcggtcagtgcacaatgaactggagaagcgcaggagggcccagttgaagcggtgcctggagcggctgaagcagcagatgcccctgggggccgactgtgcccggtacaccacgctgagcctgctgcgccgtgccaggatgcacatccagaagctggaggatcaggagcagcgggcccgacagctcaaggagaggctgcgcagcaagcagcagagcctgcagcggcagctggagcagctccgggggctggcaggggcggccgagcgggagcggctgcgggcggacagtctggactcctcaggcctctcctctgagcgctcagactcagaccaaggtgagtgccccgaggctgaggggttgtgtggccctcggggcgagccaggtcttctgaccggacccctccccgcgcagaggagctggaggtggatgtggagagcctggtgtttgggggtgaggccgagctgctgcggggcttcgtcgccggccaggagcacagctactcgcacggcggcggcgcctggctatgatgttcctcacccagggcgggcctctgccctctactcgtgccaggcccacttgccaggcaggagccctccccaagccttcagggctgctcggagtcacctgttggaatggactaaaaggacccttgtgtgggaacaggtgctccccaaacaccctgctgctggctgccaggcaggccctctggaagggaaggggcaggactcatcaggacctccctggacccctgcagggcaggcagcttgggcccgagcccaagcatttggctctgctgcccccaaggggacaggaagcctcttgggcctcttcccttcctggacaaggccccctgcctttgcctcacataaactgtacagtattttcattaaaagcctctttcataacttcccgtccatagtcttgcctaatgaaaacgggggaactcccaaccacagacccactggaagaggaaataatatcagttcccatcactgacactgttggccgtgccaggcagtgcacttaattctcacaacttgaggctgttctgtctccacttcacggatggtagaaatgaggctgagtgacgtgactcgcctgaggtccaaaaacagtgaagccaagattcaaaccagagccttccgactccagagctggggccaactgaattcaacaagtatttattgagtgtctattatgtgctagatactgagacacatcagagaacaaaaccaaaagccctgcccttgtcgggcttacagtctagcacttaccgccagttaacctgcaggctacct

SEQ ID NO: 17290 - DNA, 2269 bp, Homo sapiens
  source 1..2269: mol_type = unassigned DNA
aacaaaagtgctgcagccgcttgctccggccggcaccctaggccggcccgccgccagctgtcgccgacatggaacccttggccagcaacatccaggtcctgctgcaggcggccgagttcctggagcgccgtgagagagaggccgagcatggttatgcgtccctgtgcccgcatcgcagtccaggccccatccacaggaggaagaagcgacccccccaggctcctggcgcgcaggacagcgggcggtcagtgcacaatgaactggagaagcgcaggagggcccagttgaagcggtgcctggagcggctgaagcagcagatgcccctgggggccgactgtgcccggtacaccacgctgagcctgctgcgccgtgccaggatgcacatccagaagctggaggatcaggagcagcgggcccgacagctcaaggagaggctgcgcagcaagcagcagagcctgcagcggcagctggagcagctccgggggctggcaggggcggccgagcgggagcggctgcgggcggacagtctggactcctcaggcctctcctctgagcgctcagactcagaccaagtcttgcctaatgaaaacgggggaactcccaaccacagacccactggaagaggaaataatatcagttcccatcactgacactgttggccgtgccaggcagtgcacttaattctcacaacttgaggctgttctgtctccacttcacggatggtagaaatgaggctgagtgacgtgactcgcctgaggtccaaaaacagtgaagccaagattcaaaccagagccttccgactccagagctggggccaactgaattcaacaagtatttattgagtgtctattatgtgctagatactgagacacatcagagaacaaaaccaaaagccctgcccttgtcgggcttacagtctagcacttaccgccagttaacctgcaggctacctggagccccgggcaagtcaccgcacctctgtgcctcggtcctcagctgcccaatgggagaataagcagacctggctcagacatgaatcatgtgcttggtgtactgcagatgccaaactgcatccccacaacccaccacgtagacagcagacagggctggaagttgatttttaatgataaagtacaatgaagggagggcagagaggctaagcctagctgtctggggtgctgtggtggtggtagactggctacacaaactgttgctgctgctgctgcttcttggtggccgccttgctggcgaggtccttggccttctctgtagctgccagtgccgtctcctttgccttctccttggcttccttggctgtctcaacaagtgttttggaaggggcctcgcctgtcgcgaacggcaggtggctgcctttagaagatgcctgaaagaccaacctaatttccctcccccatgacaccaatctcctctgggccaggctccactaaaaaggtggtattcaccctcctcccacccccagtacagacaaggagtcccagctcagagcagggcaatgactaacccagactccacgcccgctaggctgaatgagcctctccctatgaggaatatccacatacccagaaactcaccttgcagcttagccaagatatattcaaaacccttcatagtcttggtcacgttgcttttgaatcgggcaagaccaaattcctggcatgagatgagaatgggaaggatactgagttgcccactgaccccagcccagccccaacaccgaaagcactgggtcccagagccccagcagccccaacaacactgctcacctggacagctctggagacaccaaataagctagaggagacccaggcttcccggcggatttcagtccagccactgttgtcagagttcacacagtaaacacatcgttcctccaccacctatgcagaggccaaccacaatcgtggaacagtctttcattttgccaacttgcacataaatctgactccctgtcacttttcatgaggcgaagcaatacaatgaaaatccattccttcccctgactgcacctccaagtggcactgacagaacaagaagccataaataaggtcgttttgctctcgaaaacctctcttctgactcttaaactagaaggcaaaaggtctctctcttgagatcaacaaagggccttccagcccatcctgctcctggattttgttttgtgcatctagacgcatgcagtgttttagccgccttccaccagctgcagctctggagcttcctgacagtccaaataaaaacatttgcccgg

SEQ ID NO: 17291 - DNA, 1483 bp, Homo sapiens
  source 1..1483: mol_type = unassigned DNA
cggccggaggccccgcccccgcggcacccacgtgcagcggctgggcccggcgctttcaggggaccaccaggcccccagagcgccgtgctatgttgggggctagtcactagcacggggctggaagctgagatcaaagacgccaatgagccggcgtgggtggatgagtgaggcgggcaagaagcagcaccggttagcctgagggttcgctccagggccaggcctggagccagcgcccttacctgcccctggaaagtctgagaccactcggggcggggcggctgccggagggtgggctgcggctccgtggcgggttccagaggggcggagccaagggctgggcgttcccgcgggcggggcgtcccgggggcggggcgggcccctgtgtttgttgcaccgtgtcagttactttgtaacaaaagtgctgcagccgcttgctccggccggcaccctaggccggcccgccgccagctgtcgccgacatggaacccttggccagcaacatccaggtcctgctgcaggcggccgagttcctggagcgccgtgagagagaggccgagcatggttatgcgtccctgtgcccgcatcgcagtccaggccccatccacaggaggaagaagcgacccccccaggctcctggcgcgcaggacagcgggcggtcagtgcacaatgaactggagaagcgcaggagggcccagttgaagcggtgcctggagcggctgaagcagcagatgcccctgggggccgactgtgcccggtacaccacgctgagcctgctgcgccgtgccaggatgcacatccagaagctggaggatcaggagcagcgggcccgacagctcaaggagaggctgcgcagcaagcagcagagcctgcagcggcagctggagcagctccgggggctggcaggggcggccgagcgggagcggctgcgggcggacagtctggactcctcaggcctctcctctgagcgctcagactcagaccaagaggagctggaggtggatgtggagagcctggtgtttgggggtgaggccgagctgctgcggggcttcgtcgccggccaggagcacagctactcgcacggcggcggcgcctggctatgatgttcctcacccagggcgggcctctgccctctactcgtgccaggcccacttgccaggcaggagccctccccaagccttcagggctgctcggagtcacctgttggaatggactaaaaggacccttgtgtgggaacaggtgctccccaaacaccctgctgctggctgccaggcaggccctctggaagggaaggggcaggactcatcaggacctccctggacccctgcagggcaggcagcttgggcccgagcccaagcatttggctctgctgcccccaaggggacaggaagcctcttgggcctcttcccttcctggacaaggccccctgcctttgcctcacataaactgtacagtattttcattaaaagcctctttcataacttcc

SEQ ID NO: 17292 - DNA, 861 bp, Homo sapiens
  source 1..861: mol_type = unassigned DNA
gaaaaggccatttcgcgtgcctccaggtgctgcagccgcttgctccggccggcaccctaggccggcccgccgccagctgtcgccgacatggaacccttggccagcaacatccaggtcctgctgcaggcggccgagttcctggagcgccgtgagagagaggccgagcatggttatgcgtccctgtgcccgcatcgcagtccaggccccatccacaggaggaagaagcgacccccccaggctcctggcgcgcaggacagcgggcggtcagtgcacaatgaactggagaagcgcaggagggcccagttgaagcggtgcctggagcggctgaagcagcagatgcccctgggggccgactgtgcccggtacaccacgctgagcctgctgcgccgtgccaggatgcacatccagaagctggaggatcaggagcagcgggcccgacagctcaaggagaggctgcgcagcaagcagcagagcctgcagcggcagctggagcagctccgggggctggcaggggcggccgagcgggagcggctgcgggcggacagtctggactcctcaggcctctcctctgagcgctcagactcagaccaagaggagctggaggtggatgtggagagcctggtgtttgggggtgaggccgagctgctgcggggcttcgtcgccggccaggagcacagctactcgcacggcggcggcgcctggctatgatgttcctcacccagggcgggcctctgccctctactcgtgccaggcccacttgccaggcaggagccctccccaagccttcagggctgctcggagtcacctgttggaatggactaaaaggacccttgtgtgggaacaggtgctccccaaacaccc

SEQ ID NO: 17293 - DNA, 12042 bp, Homo sapiens
  source 1..12042: mol_type = unassigned DNA
gcgcgcgcgcaggctcttcagctggagcggacacacggtgtgcgaaccgaacagaataacccgcccccagcgggatgtgaaggactccgggtgaggccggccacgccccgcacggatgggaaggccattgtgactatgtggtgattacagttgtcttactactgagtttcctactgaaatcatggaggagaaacagcagattatattggctaatcaagatggtggaacagtggcaggagcagcacctaccttctttgtcatcttaaagcagccaggaaatggcaaaactgatcaaggaattttggttactaatcaggatgcctgtgctttggctagtagtgtgtcatcaccagtaaaatctaaagggaagatttgccttccagctgattgtactgtgggtggaatcactgttaccctcgataacaatagtatgtggaatgagttctatcatcgaagcacagagatgattctgaccaagcaaggaagacgcatgtttccttactgtcgttattggataacaggtttagattcaaatttgaagtatattcttgtcatggatatatctcctgtggataaccatcgttataagtggaatggtcgttggtgggaacctagtgggaaggctgaacctcatgttttggggagggttttcattcatccagaatctccttccacaggtcattattggatgcatcaaccagtatctttctataaactcaaacttaccaacaatacactggaccaagaagggcatatcatcttgcactctatgcatcgttacctgccgaggcttcatttggtgcctgcagaaaaggctgtggaggtgatacaattaaatggccctggtgtccacacttttaccttcccacagactgaattctttgcagtaacagcttatcagaacattcagattactcagctgaaaatagattacaatccatttgccaaaggctttcgggatgatgggctgaataataagccccagagagatggaaaacaaaagaacagctctgaccaagaagggaataatatttccagttcttctggtcatcgggtccgtcttacagaaggtcaggggtcagagatacaaccaggtgatttggatcctttgtcaaggggtcatgaaacatcaggcaagggtttggagaagacttcccttaatataaaacgagactttcttggtttcatggatactgattcagcacttagtgaagttcctcaattgaagcaagagatttctgaatgtcttattgccagcagttttgaagatgactcccgtgtagcctcaccgttagaccagaacggaagcttcaatgttgttattaaagaggaacctctagatgattatgactacgaacttggtgagtgcccagaaggggtcactgtgaaacaggaagagacagatgaagagacggatgtatactcaaacagtgatgatgatcctatactagagaaacagctaaagaggcacaataaagttgacaacccagaagctgaccatctatcttctaaatggcttccaagcagcccatcaggtgttgctaaagctaaaatgttcaaattagacactggaaagatgccagtagtctatctggagccctgtgctgtcaccagaagcacagttaagatttctgaactccccgataacatgctttccacatctcgaaaggataaatcttctatgttggcagaattggaatatttgcctacatacattgaaaattccaatgagactgccttctgcttaggcaaggaatcagaaaatggtcttagaaaacattcaccagatctcagagtggtacaaaaatatcccttactgaaagagcctcagtggaaatatcctgatatatctgacagcattagcacagaaagaatactcgacgattcaaaggattcagttggagactcactttcaggaaaagaggacttgggcagaaagagaacaactatgcttaagattgcaacagccgcaaaggtagtgaatgctaatcagaatgcctctccaaatgtccctggaaaaagaggaaggccacgaaaattgaaactctgtaaggcaggacgaccacctaagaacacaggaaagtctttaatttctacaaagaatacacctgtaagccctgggagtacctttccagatgtgaagcctgatctggaagatgtggatggtgttctctttgtttcctttgaatcaaaggaagctctagacattcatgcagttgatgggacaacagaagaatcttctagtctccaggcatcaaccacaaatgactcaggttacagagcaagaatttcccagttggaaaaggaattgatagaagatttgaagactttgcggcacaagcaggtgatacatcctggtcttcaagaagtgggcttaaaattgaattcagtggatccaacaatgagcattgatcttaaatacttgggagtacagttacctttggctccagctactagctttcctttttggaaccttacaggaaccaaccctgcctctcctgatgcgggatttccctttgtttctaggacagggaaaaccaatgatttcactaagatcaagggatggaggggaaaatttcatagtgcttctgcatctaggaatgaaggtggaaattcagaaagttcactgaaaaatcgttctgctttctgtagtgataagctagatgaatacttggaaaatgaaggcaagctgatggaaacaagcatgggtttttcttctaatgctcccacatctcctgtggtgtaccagcttcccactaagagtaccagttatgtacgaacacttgatagtgtactaaagaagcaatctactatttccccttctacctcttattctttgaaacctcattctgtaccccctgtctctcgaaaggcaaagtctcaaaacagacaggcaactttcagtggccgaactaaatcatcttataaatccattttaccataccctgtttcaccaaagcagaaatactctcatgtgattctaggagataaggttaccaagaattcttcaggcatcatctcagaaaatcaggcgaataactttgttgtgccaactttggatgaaaatatatttccaaagcagattagtttgcggcaggcacagcagcagcagcaacagcaacagggaagtcgccctccaggcttgtctaaatctcaggtgaagctaatggacctggaagactgtgcactttgggaaggaaaaccaaggacatacatcacagaagagcgagcagatgtatccttaacaactctacttacagctcaagcatccctcaaaactaaacctatccacacaatcataaggaaacgagcccctccctgcaacaatgacttctgtcgactgggttgtgtatgttccagtctagctttggagaagcgccaacctgctcactgccgccgaccagactgcatgtttggttgtacttgtttgaaaagaaaagttgtacttgttaaaggaggatccaaaactaagcattttcagaggaaggctgctcatcgagatccagtattttatgatactctgggagaggaggcaagggaggaggaagaaggaatcagggaggaggaggaacaattgaaagagaaaaagaagagaaagaagctagaatacactatatgtgagacagagcctgaacagcctgttcgacattacccattatgggtaaaagtagaaggtgaagtagatccagaaccagtttatatccccacgccttctgtcattgagcctatgaaaccattgttattgcctcagccagaagttttatctcctactgtgaagggcaaactgctcactggaattaaatctccacggtcatatactcccaaacccaatcctgtgattcgggaagaggacaaagatccagtctacttgtactttgaaagtatgatgacttgtgctcgagttcgagtatatgagcgaaaaaaagaggaccagagacaaccatcttcctcctcctccccatctccatcatttcagcagcaaacttcatgtcattctagccctgagaaccataataatgcaaaggaacctgattctgaacagcagcccttaaaacaactcacctgtgacttggaggatgattctgataaattacaagaaaagagctggaagtcttcctgcaatgaaggagaatcctcttctacttcttatatgcatcagaggtcacctggtggtcccaccaaactgattgagatcatctcagactgcaactgggaggaagatcggaacaagattttgagcatcttatcccagcacatcaatagcaacatgccacaatcacttaaggtgggcagcttcatcattgagttggcttctcagcgaaagagccggggtgagaagaaccctcctgtttattcttctcgtgtgaaaatctctatgccatcatgtcaagaccaagatgatatggctgagaaatctggatcagagactcctgatggtccattgtcccctgggaaaatggaggatatctctcctgtgcagacagatgccctggattcagtgagggagagattacatggaggcaaaggtctgcctttttatgcagggctttctcctgcagggaagcttgtggcctataaacgtaaacccagttcaagtacatctgggcttatccaggtagcatccaatgccaaggtggctgcatccaggaaaccacgtaccctgttgccttcaacatccaattccaaaatggcatcctcctctggcactgcaacaaatcgccctgggaagaatctgaaggcgtttgtcccagcaaaacggccaattgcggctcgaccctctcctggtggtgtgttcacacagtttgtgatgagtaaagttggagccttgcagcagaagatacctggagttagcacaccccaaaccctggcagggacacagaagttcagtatcagaccttctccagtaatggtcgtcacacctgtggtttcttctgagccagttcaggtgtgcagccctgtgactgctgctgtcactactaccacccctcaagtgtttttagaaaatactactgctgtgacacctatgactgctatttctgacgtggaaactaaagaaactacttattcttctggtgccaccactacaggggttgttgaggtctctgaaactaataccagcacctctgtaacatctacccagtctacagccactgtgaaccttaccaaaaccactgggataactacccctgtggcttcagttgcttttcctaagtctttggtagcatctccttcaaccataactcttcctgttgcttccactgcttccacctccttagtcgtggtgactgcagctgcatcttcctccatggtgaccacaccaacttcatctctgggctctgttcctattatactctcaggaattaatgggagtccaccagtgagccagagaccagaaaatgctgctcaaattccagtggctactccacaggtctctcctaacacagtgaaacgtgctggacctcgattgttgttgattccagtgcagcagggttctcctactcttagacctgtctcaaacacacaacttcagggacatcggatggtcttgcagcctgttaggagtccaagtggaatgaacttattcaggcaccctaatgggcagattgtccagcttctacctttgcatcagcttcgaggctctaatacccagcccaacttacagcctgtcatgtttcggaacccagggtctgtgatgggaatccggttacctgctccttccaaaccctctgagactccgccatcttccacttcgtcctctgctttctctgtcatgaatcctgtaattcaagctgttgggtcttcttcagcagtgaatgttatcactcaggcaccatcattgctttcctctggagctagttttgtgtctcaggctggtacattgaccctgaggatttctcctcctgaaccacaaagctttgcaagtaaaacaggctctgaaaccaaaataacttatagctcaggaggacagcctgttggtacagccagtcttattcctctccagtctggtagttttgccttgttacagctcccaggacaaaagcctgttcctagctccattcttcagcatgttgcttcccttcagatgaagagagaatctcagaatccagaccagaaagatgaaacaaactcaataaaaagagagcaagaaacgaagaaggttctacagtcagaaggagaggctgtagaccctgaggctaatgtaataaaacaaaactcaggagctgctacctcagaagaaactctgaatgattccttggaagataggggtgatcatttggatgaagaatgccttccagaagaaggttgtgcaactgtcaaaccatctgagcattcctgtatcactgggtcacatacagatcaagattataaagatgttaatgaagaatatggggctaggaatcgtaagagttccaaagaaaaagtggctgttctggaagttaggaccatttctgaaaaagccagtaataagacagtccaaaatttaagtaaagtacagcatcaaaaacttggtgatgtgaaggtggaacagcagaaaggatttgacaatccagaagaaaactcaagtgaatttccagtcacctttaaggaagaaagtaaatttgaattgtcaggaagcaaagttatggagcagcaatctaatctacagccagaggccaaagagaaggaatgtggagactctctggagaaagacagggaaagatggagaaaacatctgaagggccccttaaccaggaaatgtgttggagcttcacaggaatgtaagaaagaggcagacgagcagttaattaaagaaacaaagacatgtcaggaaaattcagatgtgtttcagcaagaacaaggcatctctgacttacttggaaaaagtggaattactgaagatgccagagttttgaaaactgaatgtgattcttggagtaggatttctaatccttcagccttctccattgttcctaggagagctgcaaaaagcagcagagggaatggacattttcagggtcacttactgctacctggagaacagatacaaccaaagcaagagaagaagggtgggagaagcagtgctgacttcactgttttggatttggaagaagatgatgaagatgataatgagaaaactgatgattctattgatgaaattgtggatgttgtttctgactaccagagtgaggaggttgatgatgtagaaaagaataactgtgtagaatacattgaggatgatgaggagcacgtggacattgagactgtagaagagctctcagaggaaattaatgttgctcacctgaagaccacagcggcccacacacagtcattcaaacagccgtcctgtactcacatctctgcagatgaaaaagcagctgaaaggagtcgaaaggctccaccaattcctctaaaactgaagcctgattactggagtgacaaactacagaaagaagcagaagcgtttgcttattatcgccggacacacactgccaatgagcggcggcggcgtggtgaaatgagggatctctttgagaaattaaagatcacattgggattacttcattcttccaaggtttccaaaagtctcattcttactcgagccttcagtgaaattcagggactaacagatcaggcagacaaattgataggacagaaaaatctcctgactcgaaaacggaatattctgatacggaaagtatcgtctctttcaggtaagacagaagaagtggtcctgaagaagctagagtatatttatgcaaaacagcaagcactagaggcacaaaaaagaaaaaagaagatgggatcagatgagtttgacatatctcccagaattagcaaacagcaggaaggatcttctgcatcatctgtagatcttggacagatgtttataaataacaggagggggaaacctttgattctttccagaaaaaaagaccaggccacagaaaatacctcacccttgaacactccacacacctctgccaaccttgtgatgactccgcaagggcaattgctcaccctaaaaggtcccctattctcaggaccagtggtagctgtttctcctgatctcttagaatctgatcttaagcctcaagttgccggtagtgctgtggctctaccagaaaatgacgacttatttatgatgccacgaattgttaatgtgacatcattggccacagagggaggtttggtagatatgggtggcagcaaatatcctcatgaagttcctgatagcaagccatctgaccatctgaaagacaccgtcaggaatgaagataattccttagaggataagggtagaatctcttccagaggaaacagagatggcagagtgacgttgggtccaacgcaggtttttctggcaaacaaagattctggttatccacaaatagttgacgtttccaatatgcagaaagcacaagagttcttacctaaaaagatttctggtgatatgagagggattcagtataaatggaaagagagtgaatcaagaggggagagagtgaagtcaaaggattcttcatttcataaattaaagatgaaagatctcaaggactcaagcatagagatggaactgaggaaagtaacatcagctatagaggaagcagctcttgattccagtgaactgctgactaacatggaagatgaggatgatactgatgagacactgacttcactgctcaatgaaattgcctttcttaatcaacaactaaatgatgactctgttggcctggctgaactacccagctctatggatacagagttcccaggggatgctcggcgggcttttattagtaaggttcctcctggaagcagagcaactttccaggttgagcacttgggaactggtttgaaagagttgcctgatgttcaaggggagagtgactctatcagtcccctcctcttgcacttggaagacgatgacttttctgagaatgaaaaacaacttgcagaaccagcctctgagccagatgtccttaagattgttattgactctgaaataaaggattccctcctttccaacaagaaagctattgatggagggaagaatacttctggcctccctgcagagcccgaaagtgtgtcctcaccccccaccctacacatgaagactggcttggagaacagcaacagcacagacactttgtggaggcctatgccaaagttggcccctctaggtttaaaagtagctaatccttccagtgatgcagatggtcagagtctcaaggtgatgccttgtttggcacctatagctgccaaagttgggtcagttggacacaaaatgaacttaacagggaatgaccaggaaggccgggaaagcaaggtgatgcctacattggcacctgttgtggctaaattgggcaactcgggggcctcaccaagttctgcagggaaatgaacttacttgtccttaagcagaagccaggctgtgaggggaaatagatctcacctcctttctctgcaggcatctgtttgtttgtgtcttagaacttggatccttgacttcaatgatgcagtggataatgatgggagaaagggggtagggtgctgaccctggtataagaagtactctgaaattctgatcatgttaaaatgtgttacctcacttgtggtgctgggtcccctcatcctctctaagaagatgtgatccattactgaacatgaggtgcccctcttacccaaggaatttataacatgactctggctccacagtggtttctagttcttcccccacaagcgaaagagctgtttgcaactttggagttgctgtagactgaactgtagcttgtagctgttgaattaagtccaaaatctaaggaatgcgatggacttgtgcaaagggatccagaagagacactttttagttgatgtttcaagaatagggagagagaggatgggtaccatggaataccaaagtgaaggactttgtgtcattcagtaaaattttcttttttcatatcctaagtagctcccattccctcaccttttcaatcagaattaacaaattcaagccttcagtaaagtagggatgcttttaacttttattattaattattttgagatcttaaaaaaatagtagttctcccttattatttttgtgggcattgaaaagctcatttcacagtaccagagatttttactgggagtatatattttggaggtaggcatagagggagccctaccccttccacaaattacgttactcaagagacagctaaaataaaatgcattatctccccagaccagagacagtggccaaaataaaaaatcatggggctggaaatttcccaaatcaaaccagcctcctggtgcttgaaggtttcattcactattacctgcacaggatgtaaagaaaagtcacagtaggcactctttaccagggaaataaggcagtatttgaatcacaagatatattttttatctgcaaccatggatccaatgatctgtagagctttttcactcattaactgtcaggatatgaaggactgacagtctgtaaagatatttatatttttgtatagttgttttcatagatttctcaaaggctgaagttttcaacctagaagatgagatttgtattgagtatagaaatgatgtttcctatctagtttgtaaataatcatggtgcacttgaggggtctcttggaaactcctagggggtcaagaatcactattctgaaactgtatagactgggatttagctgctgcattttgcctttcttaaataattatattttggaatgtaacccctgttctgtcttcattgacaggatttgcttgtgttgttaaaacactaacacaagagcttccagtgcctgggccgtgcctaggtgatgctatttcttctatatctcctgtcttctttatcccaaatcccactcagcatatcttcagacctaggttgtaagaccaactttggattggatctagccagtgaattattatttccatggttggttccctttctgttaactctggtaatcaacagattgaaaacggtggaagaacttctgaaaattgcagtgggagcaaattcttgttggttttgtgctgcttgcctttctagatctgctcatcagcacttaaccttccctcctctaaaggttactaaagaagcctgaagtaggtaaagagtgctcctcagcttcttatccttccactctttacccagcagatttcattcaatgccttagccaaggagtccagcacctgtctcccctgctaataattgtccttagagatgctagtactttaatccaggtatagcagtttcccgttattttcttgcttgtcgttcccctacatttcctcctgatttcccaagactctctttgtggcttttgagggtcagccaaggagcaggcaagtgagtgaacaatcctcaggaaaagaaggaccattttagcttaacacttccttttttttttttttttttttaagaagaatataggtaaacaggtaatgattcttgattggagataccatttgactcttgatgagagttgtacgaagatggaaatgagggatgattccaggcgttttagggggaaggctgcagataccattctaacccccaagatactgtgttctcaagacctcttagaactaggtgttgtcagggataatttgaggagggcttagtcttcagaacaatcctgcagtcttgacagaaatctaaaatctccaaaaactcctaccctttaaccttaccctagggggaactgatctatgaatattacatgtgtgattatgaaaggtgaagttgagtgagaggagttgaggaacgtggaagacagtgagctctcaccctaacactataagaagcatgatctcaatagaccaataattcacctttttatacatctgtaaataaatggaatgtttttaagaatataattatgtcagatttagcattttcttttatatattaaatatatatatctttccttttctgctttcgaaaagtgactatttttttagaaatctaagaacagaagtttggtgattgaaaggtagaatatataaacctgaaataaagcagttaaaacaattaaagcagaa

SEQ ID NO: 17294 - DNA, 11921 bp, Homo sapiens
  source 1..11921: mol_type = unassigned DNA
gcgcgcgcgcaggctcttcagctggagcggacacacggtgtgcgaaccgaacagaataacccgcccccagcgggatgtgaaggactccgggtgaggccggccacgccccgcacggatgggaaggccattgtgactatgtggtgattacagttgtcttactactgagtttcctactgaaatcatggaggagaaacagcagattatattggctaatcaagatggtggaacagtggcaggagcagcacctaccttctttgtcatcttaaagcagccaggaaatggcaaaactgatcaaggaattttggttactaatcaggatgcctgtgctttggctagtagtgtgtcatcaccagtaaaatctaaagggaagatttgccttccagctgattgtactgtgggtggaatcactgttaccctcgataacaatagtatgtggaatgagttctatcatcgaagcacagagatgattctgaccaagcaaggaagacgcatgtttccttactgtcgttattggataacaggtttagattcaaatttgaagtatattcttgtcatggatatatctcctgtggataaccatcgttataagtggaatggtcgttggtgggaacctagtgggaaggctgaacctcatgttttggggagggttttcattcatccagaatctccttccacaggtcattattggatgcatcaaccagtatctttctataaactcaaacttaccaacaatacactggaccaagaagggcatatcatcttgcactctatgcatcgttacctgccgaggcttcatttggtgcctgcagaaaaggctgtggaggtgatacaattaaatggccctggtgtccacacttttaccttcccacagactgaattctttgcagtaacagcttatcagaacattcagattactcagctgaaaatagattacaatccatttgccaaaggctttcgggatgatgggctgaataataagccccagagagatggaaaacaaaagaacagctctgaccaagaagggaataatatttccagttcttctggtcatcgggtccgtcttacagaaggtcaggggtcagagatacaaccaggtgatttggatcctttgtcaaggggtcatgaaacatcaggcaagggtttggagaagacttcccttaatataaaacgagactttcttggtttcatggatactgattcagcacttagtgaagttcctcaattgaagcaagagatttctgaatgtcttattgccagcagttttgaagatgactcccgtgtagcctcaccgttagaccagaacggaagcttcaatgttgttattaaagaggaacctctagatgattatgactacgaacttggtgagtgcccagaaggggtcactgtgaaacaggaagagacagatgaagagacggatgtatactcaaacagtgatgatgatcctatactagagaaacagctaaagaggcacaataaagttgacaacccagaagctgaccatctatcttctaaatggcttccaagcagcccatcaggtgttgctaaagctaaaatgttcaaattagacactggaaagatgccagtagtctatctggagccctgtgctgtcaccagaagcacagttaagatttctgaactccccgataacatgctttccacatctcgaaaggataaatcttctatgttggcagaattggaatatttgcctacatacattgaaaattccaatgagactgccttctgcttaggcaaggaatcagaaaatggtcttagaaaacattcaccagatctcagagtggtacaaaaatatcccttactgaaagagcctcagtggaaatatcctgatatatctgacagcattagcacagaaagaatactcgacgattcaaaggattcagttggagactcactttcaggaaaagaggacttgggcagaaagagaacaactatgcttaagattgcaacagccgcaaaggtagtgaatgctaatcagaatgcctctccaaatgtccctggaaaaagaggaaggccacgaaaattgaaactctgtaaggcaggacgaccacctaagaacacaggaaagtctttaatttctacaaagaatacacctgtaagccctgggagtacctttccagatgtgaagcctgatctggaagatgtggatggtgttctctttgtttcctttgaatcaaaggaagctctagacattcatgcagttgatgggacaacagaagaatcttctagtctccaggcatcaaccacaaatgactcaggttacagagcaagaatttcccagttggaaaaggaattgatagaagatttgaagactttgcggcacaagcaggtgatacatcctggtcttcaagaagtgggcttaaaattgaattcagtggatccaacaatgagcattgatcttaaatacttgggagtacagttacctttggctccagctactagctttcctttttggaaccttacaggaaccaaccctgcctctcctgatgcgggatttccctttgtttctaggacagggaaaaccaatgatttcactaagatcaagggatggaggggaaaatttcatagtgcttctgcatctaggaatgaaggtggaaattcagaaagttcactgaaaaatcgttctgctttctgtagtgataagctagatgaatacttggaaaatgaaggcaagctgatggaaacaagcatgggtttttcttctaatgctcccacatctcctgtggtgtaccagcttcccactaagagtaccagttatgtacgaacacttgatagtgtactaaagaagcaatctactatttccccttctacctcttattctttgaaacctcattctgtaccccctgtctctcgaaaggcaaagtctcaaaacagacaggcaactttcagtggccgaactaaatcatcttataaatccattttaccataccctgtttcaccaaagcagaaatactctcatgtgattctaggagataaggttaccaagaattcttcaggcatcatctcagaaaatcaggcgaataactttgttgtgccaactttggatgaaaatatatttccaaagcagattagtttgcggcaggcacagcagcagcagcaacagcaacagggaagtcgccctccaggcttgtctaaatctcaggtgaagctaatggacctggaagactgtgcactttgggaaggaaaaccaaggacatacatcacagaagagcgagcagatgtatccttaacaactctacttacagctcaagcatccctcaaaactaaacctatccacacaatcataaggaaacgagcccctccctgcaacaatgacttctgtcgactgggttgtgtatgttccagtctagctttggagaagcgccaacctgctcactgccgccgaccagactgcatgtttggttgtacttgtttgaaaagaaaagttgtacttgttaaaggaggatccaaaactaagcattttcagaggaaggctgctcatcgagatccagtattttatgatactctgggagaggaggcaagggaggaggaagaaggaatcagggaggaggaggaacaattgaaagagaaaaagaagagaaagaagctagaatacactatatgtgagacagagcctgaacagcctgttcgacattacccattatgggtaaaagtagaaggtgaagtagatccagaaccagtttatatccccacgccttctgtcattgagcctatgaaaccattgttattgcctcagccagaagttttatctcctactgtgaagggcaaactgctcactggaattaaatctccacggtcatatactcccaaacccaatcctgtgattcgggaagaggacaaagatccagtctacttgtactttgaaagtatgatgacttgtgctcgagttcgagtatatgagcgaaaaaaagaggaccagagacaaccatcttcctcctcctccccatctccatcatttcagcagcaaacttcatgtcattctagccctgagaaccataataatgcaaaggaacctgattctgaacagcagcccttaaaacaactcacctgtgacttggaggatgattctgataaattacaagaaaagagctggaagtcttcctgcaatgaaggagaatcctcttctacttcttatatgcatcagaggtcacctggtggtcccaccaaactgattgagatcatctcagactgcaactgggaggaagatcggaacaagattttgagcatcttatcccagcacatcaatagcaacatgccacaatcacttaaggtgggcagcttcatcattgagttggcttctcagcgaaagagccggggtgagaagaaccctcctgtttattcttctcgtgtgaaaatctctatgccatcatgtcaagaccaagatgatatggctgagaaatctggatcagagactcctgatggtccattgtcccctgggaaaatggaggatatctctcctgtgcagacagatgccctggattcagtgagggagagattacatggaggcaaaggtctgcctttttatgcagggctttctcctgcagggaagcttgtggcctataaacgtaaacccagttcaagtacatctgggcttatccaggtagcatccaatgccaaggtggctgcatccaggaaaccacgtaccctgttgccttcaacatccaattccaaaatggcatcctcctctggcactgcaacaaatcgccctgggaagaatctgaaggcgtttgtcccagcaaaacggccaattgcggctcgaccctctcctggtggtgtgttcacacagtttgtgatgagtaaagttggagccttgcagcagaagatacctggagttagcacaccccaaaccctggcagggacacagaagttcagtatcagaccttctccagtaatggtcgtcacacctgtggtttcttctgagccagttcaggtgtgcagccctgtgactgctgctgtcactactaccacccctcaagtgtttttagaaaatactactgctgtgacacctatgactgctatttctgacgtggaaactaaagaaactacttattcttctggtgccaccactacaggggttgttgaggtctctgaaactaataccagcacctctgtaacatctacccagtctacagccactgtgaaccttaccaaaaccactgggataactacccctgtggcttcagttgcttttcctaagtctttggtagcatctccttcaaccataactcttcctgttgcttccactgcttccacctccttagtcgtggtgactgcagctgcatcttcctccatggtgaccacaccaacttcatctctgggctctgttcctattatactctcaggaattaatgggagtccaccagtgagccagagaccagaaaatgctgctcaaattccagtggctactccacaggtctctcctaacacagtgaaacgtgctggacctcgattgttgcaccctaatgggcagattgtccagcttctacctttgcatcagcttcgaggctctaatacccagcccaacttacagcctgtcatgtttcggaacccagggtctgtgatgggaatccggttacctgctccttccaaaccctctgagactccgccatcttccacttcgtcctctgctttctctgtcatgaatcctgtaattcaagctgttgggtcttcttcagcagtgaatgttatcactcaggcaccatcattgctttcctctggagctagttttgtgtctcaggctggtacattgaccctgaggatttctcctcctgaaccacaaagctttgcaagtaaaacaggctctgaaaccaaaataacttatagctcaggaggacagcctgttggtacagccagtcttattcctctccagtctggtagttttgccttgttacagctcccaggacaaaagcctgttcctagctccattcttcagcatgttgcttcccttcagatgaagagagaatctcagaatccagaccagaaagatgaaacaaactcaataaaaagagagcaagaaacgaagaaggttctacagtcagaaggagaggctgtagaccctgaggctaatgtaataaaacaaaactcaggagctgctacctcagaagaaactctgaatgattccttggaagataggggtgatcatttggatgaagaatgccttccagaagaaggttgtgcaactgtcaaaccatctgagcattcctgtatcactgggtcacatacagatcaagattataaagatgttaatgaagaatatggggctaggaatcgtaagagttccaaagaaaaagtggctgttctggaagttaggaccatttctgaaaaagccagtaataagacagtccaaaatttaagtaaagtacagcatcaaaaacttggtgatgtgaaggtggaacagcagaaaggatttgacaatccagaagaaaactcaagtgaatttccagtcacctttaaggaagaaagtaaatttgaattgtcaggaagcaaagttatggagcagcaatctaatctacagccagaggccaaagagaaggaatgtggagactctctggagaaagacagggaaagatggagaaaacatctgaagggccccttaaccaggaaatgtgttggagcttcacaggaatgtaagaaagaggcagacgagcagttaattaaagaaacaaagacatgtcaggaaaattcagatgtgtttcagcaagaacaaggcatctctgacttacttggaaaaagtggaattactgaagatgccagagttttgaaaactgaatgtgattcttggagtaggatttctaatccttcagccttctccattgttcctaggagagctgcaaaaagcagcagagggaatggacattttcagggtcacttactgctacctggagaacagatacaaccaaagcaagagaagaagggtgggagaagcagtgctgacttcactgttttggatttggaagaagatgatgaagatgataatgagaaaactgatgattctattgatgaaattgtggatgttgtttctgactaccagagtgaggaggttgatgatgtagaaaagaataactgtgtagaatacattgaggatgatgaggagcacgtggacattgagactgtagaagagctctcagaggaaattaatgttgctcacctgaagaccacagcggcccacacacagtcattcaaacagccgtcctgtactcacatctctgcagatgaaaaagcagctgaaaggagtcgaaaggctccaccaattcctctaaaactgaagcctgattactggagtgacaaactacagaaagaagcagaagcgtttgcttattatcgccggacacacactgccaatgagcggcggcggcgtggtgaaatgagggatctctttgagaaattaaagatcacattgggattacttcattcttccaaggtttccaaaagtctcattcttactcgagccttcagtgaaattcagggactaacagatcaggcagacaaattgataggacagaaaaatctcctgactcgaaaacggaatattctgatacggaaagtatcgtctctttcaggtaagacagaagaagtggtcctgaagaagctagagtatatttatgcaaaacagcaagcactagaggcacaaaaaagaaaaaagaagatgggatcagatgagtttgacatatctcccagaattagcaaacagcaggaaggatcttctgcatcatctgtagatcttggacagatgtttataaataacaggagggggaaacctttgattctttccagaaaaaaagaccaggccacagaaaatacctcacccttgaacactccacacacctctgccaaccttgtgatgactccgcaagggcaattgctcaccctaaaaggtcccctattctcaggaccagtggtagctgtttctcctgatctcttagaatctgatcttaagcctcaagttgccggtagtgctgtggctctaccagaaaatgacgacttatttatgatgccacgaattgttaatgtgacatcattggccacagagggaggtttggtagatatgggtggcagcaaatatcctcatgaagttcctgatagcaagccatctgaccatctgaaagacaccgtcaggaatgaagataattccttagaggataagggtagaatctcttccagaggaaacagagatggcagagtgacgttgggtccaacgcaggtttttctggcaaacaaagattctggttatccacaaatagttgacgtttccaatatgcagaaagcacaagagttcttacctaaaaagatttctggtgatatgagagggattcagtataaatggaaagagagtgaatcaagaggggagagagtgaagtcaaaggattcttcatttcataaattaaagatgaaagatctcaaggactcaagcatagagatggaactgaggaaagtaacatcagctatagaggaagcagctcttgattccagtgaactgctgactaacatggaagatgaggatgatactgatgagacactgacttcactgctcaatgaaattgcctttcttaatcaacaactaaatgatgactctgttggcctggctgaactacccagctctatggatacagagttcccaggggatgctcggcgggcttttattagtaaggttcctcctggaagcagagcaactttccaggttgagcacttgggaactggtttgaaagagttgcctgatgttcaaggggagagtgactctatcagtcccctcctcttgcacttggaagacgatgacttttctgagaatgaaaaacaacttgcagaaccagcctctgagccagatgtccttaagattgttattgactctgaaataaaggattccctcctttccaacaagaaagctattgatggagggaagaatacttctggcctccctgcagagcccgaaagtgtgtcctcaccccccaccctacacatgaagactggcttggagaacagcaacagcacagacactttgtggaggcctatgccaaagttggcccctctaggtttaaaagtagctaatccttccagtgatgcagatggtcagagtctcaaggtgatgccttgtttggcacctatagctgccaaagttgggtcagttggacacaaaatgaacttaacagggaatgaccaggaaggccgggaaagcaaggtgatgcctacattggcacctgttgtggctaaattgggcaactcgggggcctcaccaagttctgcagggaaatgaacttacttgtccttaagcagaagccaggctgtgaggggaaatagatctcacctcctttctctgcaggcatctgtttgtttgtgtcttagaacttggatccttgacttcaatgatgcagtggataatgatgggagaaagggggtagggtgctgaccctggtataagaagtactctgaaattctgatcatgttaaaatgtgttacctcacttgtggtgctgggtcccctcatcctctctaagaagatgtgatccattactgaacatgaggtgcccctcttacccaaggaatttataacatgactctggctccacagtggtttctagttcttcccccacaagcgaaagagctgtttgcaactttggagttgctgtagactgaactgtagcttgtagctgttgaattaagtccaaaatctaaggaatgcgatggacttgtgcaaagggatccagaagagacactttttagttgatgtttcaagaatagggagagagaggatgggtaccatggaataccaaagtgaaggactttgtgtcattcagtaaaattttcttttttcatatcctaagtagctcccattccctcaccttttcaatcagaattaacaaattcaagccttcagtaaagtagggatgcttttaacttttattattaattattttgagatcttaaaaaaatagtagttctcccttattatttttgtgggcattgaaaagctcatttcacagtaccagagatttttactgggagtatatattttggaggtaggcatagagggagccctaccccttccacaaattacgttactcaagagacagctaaaataaaatgcattatctccccagaccagagacagtggccaaaataaaaaatcatggggctggaaatttcccaaatcaaaccagcctcctggtgcttgaaggtttcattcactattacctgcacaggatgtaaagaaaagtcacagtaggcactctttaccagggaaataaggcagtatttgaatcacaagatatattttttatctgcaaccatggatccaatgatctgtagagctttttcactcattaactgtcaggatatgaaggactgacagtctgtaaagatatttatatttttgtatagttgttttcatagatttctcaaaggctgaagttttcaacctagaagatgagatttgtattgagtatagaaatgatgtttcctatctagtttgtaaataatcatggtgcacttgaggggtctcttggaaactcctagggggtcaagaatcactattctgaaactgtatagactgggatttagctgctgcattttgcctttcttaaataattatattttggaatgtaacccctgttctgtcttcattgacaggatttgcttgtgttgttaaaacactaacacaagagcttccagtgcctgggccgtgcctaggtgatgctatttcttctatatctcctgtcttctttatcccaaatcccactcagcatatcttcagacctaggttgtaagaccaactttggattggatctagccagtgaattattatttccatggttggttccctttctgttaactctggtaatcaacagattgaaaacggtggaagaacttctgaaaattgcagtgggagcaaattcttgttggttttgtgctgcttgcctttctagatctgctcatcagcacttaaccttccctcctctaaaggttactaaagaagcctgaagtaggtaaagagtgctcctcagcttcttatccttccactctttacccagcagatttcattcaatgccttagccaaggagtccagcacctgtctcccctgctaataattgtccttagagatgctagtactttaatccaggtatagcagtttcccgttattttcttgcttgtcgttcccctacatttcctcctgatttcccaagactctctttgtggcttttgagggtcagccaaggagcaggcaagtgagtgaacaatcctcaggaaaagaaggaccattttagcttaacacttccttttttttttttttttttttaagaagaatataggtaaacaggtaatgattcttgattggagataccatttgactcttgatgagagttgtacgaagatggaaatgagggatgattccaggcgttttagggggaaggctgcagataccattctaacccccaagatactgtgttctcaagacctcttagaactaggtgttgtcagggataatttgaggagggcttagtcttcagaacaatcctgcagtcttgacagaaatctaaaatctccaaaaactcctaccctttaaccttaccctagggggaactgatctatgaatattacatgtgtgattatgaaaggtgaagttgagtgagaggagttgaggaacgtggaagacagtgagctctcaccctaacactataagaagcatgatctcaatagaccaataattcacctttttatacatctgtaaataaatggaatgtttttaagaatataattatgtcagatttagcattttcttttatatattaaatatatatatctttccttttctgctttcgaaaagtgactatttttttagaaatctaagaacagaagtttggtgattgaaaggtagaatatataaacctgaaataaagcagttaaaacaattaaagc

SEQ ID NO: 17295 - DNA, 11411 bp, Homo sapiens
  source 1..11411: mol_type = unassigned DNA
gcgcgcgcgcaggctcttcagctggagcggacacacggtgtgcgaaccgaacagaataacccgcccccagcgggatgtgaaggactccgggtgaggccggccacgccccgcacggatgggaaggccattgtgactatgtggtgattacagttgtcttactactgagtttcctactgaaatcatggaggagaaacagcagattatattggctaatcaagatggtggaacagtggcaggagcagcacctaccttctttgtcatcttaaagcagccaggaaatggcaaaactgatcaaggaattttggttactaatcaggatgcctgtgctttggctagtagtgtgtcatcaccagtaaaatctaaagggaagatttgccttccagctgattgtactgtgggtggaatcactgttaccctcgataacaatagtatgtggaatgagttctatcatcgaagcacagagatgattctgaccaagcaaggaagacgcatgtttccttactgtcgttattggataacaggtttagattcaaatttgaagtatattcttgtcatggatatatctcctgtggataaccatcgttataagtggaatggtcgttggtgggaacctagtgggaaggctgaacctcatgttttggggagggttttcattcatccagaatctccttccacaggtcattattggatgcatcaaccagtatctttctataaactcaaacttaccaacaatacactggaccaagaagggcatatcatcttgcactctatgcatcgttacctgccgaggcttcatttggtgcctgcagaaaaggctgtggaggtgatacaattaaatggccctggtgtccacacttttaccttcccacagactgaattctttgcagtaacagcttatcagaacattcagattactcagctgaaaatagattacaatccatttgccaaaggctttcgggatgatgggctgaataataagccccagagagatggaaaacaaaagaacagctctgaccaagaagggaataatatttccagttcttctggtcatcgggtccgtcttacagaaggtcaggggtcagagatacaaccaggtgatttggatcctttgtcaaggggtcatgaaacatcaggcaagggtttggagaagacttcccttaatataaaacgagactttcttggtttcatggatactgattcagcacttagtgaagttcctcaattgaagcaagagatttctgaatgtcttattgccagcagttttgaagatgactcccgtgtagcctcaccgttagaccagaacggaagcttcaatgttgttattaaagaggaacctctagatgattatgactacgaacttggtgagtgcccagaaggggtcactgtgaaacaggaagagacagatgaagagacggatgtatactcaaacagtgatgatgatcctatactagagaaacagctaaagaggcacaataaagttgacaacccagaagctgaccatctatcttctaaatggcttccaagcagcccatcaggtgttgctaaagctaaaatgttcaaattagacactggaaagatgccagtagtctatctggagccctgtgctgtcaccagaagcacagttaagatttctgaactccccgataacatgctttccacatctcgaaaggataaatcttctatgttggcagaattggaatatttgcctacatacattgaaaattccaatgagactgccttctgcttaggcaaggaatcagaaaatggtcttagaaaacattcaccagatctcagagtggtacaaaaatatcccttactgaaagagcctcagtggaaatatcctgatatatctgacagcattagcacagaaagaatactcgacgattcaaaggattcagttggagactcactttcaggaaaagaggacttgggcagaaagagaacaactatgcttaagattgcaacagccgcaaaggtagtgaatgctaatcagaatgcctctccaaatgtccctggaaaaagaggaaggccacgaaaattgaaactctgtaaggcaggacgaccacctaagaacacaggaaagtctttaatttctacaaagaatacacctgtaagccctgggagtacctttccagatgtgaagcctgatctggaagatgtggatggtgttctctttgtttcctttgaatcaaaggaagctctagacattcatgcagttgatgggacaacagaagaatcttctagtctccaggcatcaaccacaaatgactcaggttacagagcaagaatttcccagttggaaaaggaattgatagaagatttgaagactttgcggcacaagcaggtgatacatcctggtcttcaagaagtgggcttaaaattgaattcagtggatccaacaatgagcattgatcttaaatacttgggagtacagttacctttggctccagctactagctttcctttttggaaccttacaggaaccaaccctgcctctcctgatgcgggatttccctttgtttctaggacagggaaaaccaatgatttcactaagatcaagggatggaggggaaaatttcatagtgcttctgcatctaggaatgaaggtggaaattcagaaagttcactgaaaaatcgttctgctttctgtagtgataagctagatgaatacttggaaaatgaaggcaagctgatggaaacaagcatgggtttttcttctaatgctcccacatctcctgtggtgtaccagcttcccactaagagtaccagttatgtacgaacacttgatagtgtactaaagaagcaatctactatttccccttctacctcttattctttgaaacctcattctgtaccccctgtctctcgaaaggcaaagtctcaaaacagacaggcaactttcagtggccgaactaaatcatcttataaatccattttaccataccctgtttcaccaaagcagaaatactctcatgtgattctaggagataaggttaccaagaattcttcaggcatcatctcagaaaatcaggcgaataactttgttgtgccaactttggatgaaaatatatttccaaagcagattagtttgcggcaggcacagcagcagcagcaacagcaacagggaagtcgccctccaggcttgtctaaatctcaggtgaagctaatggacctggaagactgtgcactttgggaaggaaaaccaaggacatacatcacagaagagcgagcagatgtatccttaacaactctacttacagctcaagcatccctcaaaactaaacctatccacacaatcataaggaaacgagcccctccctgcaacaatgacttctgtcgactgggttgtgtatgttccagtctagctttggagaagcgccaacctgctcactgccgccgaccagactgcatgtttggttgtacttgtttgaaaagaaaagttgtacttgttaaaggaggatccaaaactaagcattttcagaggaaggctgctcatcgagatccagtattttatgatactctgggagaggaggcaagggaggaggaagaaggaatcagggaggaggaggaacaattgaaagagaaaaagaagagaaagaagctagaatacactatatgtgagacagagcctgaacagcctgttcgacattacccattatgggtaaaagtagaaggtgaagtagatccagaaccagtttatatccccacgccttctgtcattgagcctatgaaaccattgttattgcctcagccagaagttttatctcctactgtgaagggcaaactgctcactggaattaaatctccacggtcatatactcccaaacccaatcctgtgattcgggaagaggacaaagatccagtctacttgtactttgaaagtatgatgacttgtgctcgagttcgagtatatgagcgaaaaaaagaggaccagagacaaccatcttcctcctcctccccatctccatcatttcagcagcaaacttcatgtcattctagccctgagaaccataataatgcaaaggaacctgattctgaacagcagcccttaaaacaactcacctgtgacttggaggatgattctgataaattacaagaaaagagctggaagtcttcctgcaatgaaggagaatcctcttctacttcttatatgcatcagaggtcacctggtggtcccaccaaactgattgagatcatctcagactgcaactgggaggaagatcggaacaagattttgagcatcttatcccagcacatcaatagcaacatgccacaatcacttaaggtgggcagcttcatcattgagttggcttctcagcgaaagagccggggtgagaagaaccctcctgtttattcttctcgtgtgaaaatctctatgccatcatgtcaagaccaagatgatatggctgagaaatctggatcagagactcctgatggtccattgtcccctgggaaaatggaggatatctctcctgtgcagacagatgccctggattcagtgagggagagattacatggaggcaaaggtctgcctttttatgcagggctttctcctgcagggaagcttgtggcctataaacgtaaacccagttcaagtacatctgggcttatccaggtagcatccaatgccaaggtggctgcatccaggaaaccacgtaccctgttgccttcaacatccaattccaaaatggcatcctcctctggcactgcaacaaatcgccctgggaagaatctgaaggcgtttgtcccagcaaaacggccaattgaaaatgctgctcaaattccagtggctactccacaggtctctcctaacacagtgaaacgtgctggacctcgattgttgttgattccagtgcagcagggttctcctactcttagacctgtctcaaacacacaacttcagggacatcggatggtcttgcagcctgttaggagtccaagtggaatgaacttattcaggcaccctaatgggcagattgtccagcttctacctttgcatcagcttcgaggctctaatacccagcccaacttacagcctgtcatgtttcggaacccagggtctgtgatgggaatccggttacctgctccttccaaaccctctgagactccgccatcttccacttcgtcctctgctttctctgtcatgaatcctgtaattcaagctgttgggtcttcttcagcagtgaatgttatcactcaggcaccatcattgctttcctctggagctagttttgtgtctcaggctggtacattgaccctgaggatttctcctcctgaaccacaaagctttgcaagtaaaacaggctctgaaaccaaaataacttatagctcaggaggacagcctgttggtacagccagtcttattcctctccagtctggtagttttgccttgttacagctcccaggacaaaagcctgttcctagctccattcttcagcatgttgcttcccttcagatgaagagagaatctcagaatccagaccagaaagatgaaacaaactcaataaaaagagagcaagaaacgaagaaggttctacagtcagaaggagaggctgtagaccctgaggctaatgtaataaaacaaaactcaggagctgctacctcagaagaaactctgaatgattccttggaagataggggtgatcatttggatgaagaatgccttccagaagaaggttgtgcaactgtcaaaccatctgagcattcctgtatcactgggtcacatacagatcaagattataaagatgttaatgaagaatatggggctaggaatcgtaagagttccaaagaaaaagtggctgttctggaagttaggaccatttctgaaaaagccagtaataagacagtccaaaatttaagtaaagtacagcatcaaaaacttggtgatgtgaaggtggaacagcagaaaggatttgacaatccagaagaaaactcaagtgaatttccagtcacctttaaggaagaaagtaaatttgaattgtcaggaagcaaagttatggagcagcaatctaatctacagccagaggccaaagagaaggaatgtggagactctctggagaaagacagggaaagatggagaaaacatctgaagggccccttaaccaggaaatgtgttggagcttcacaggaatgtaagaaagaggcagacgagcagttaattaaagaaacaaagacatgtcaggaaaattcagatgtgtttcagcaagaacaaggcatctctgacttacttggaaaaagtggaattactgaagatgccagagttttgaaaactgaatgtgattcttggagtaggatttctaatccttcagccttctccattgttcctaggagagctgcaaaaagcagcagagggaatggacattttcagggtcacttactgctacctggagaacagatacaaccaaagcaagagaagaagggtgggagaagcagtgctgacttcactgttttggatttggaagaagatgatgaagatgataatgagaaaactgatgattctattgatgaaattgtggatgttgtttctgactaccagagtgaggaggttgatgatgtagaaaagaataactgtgtagaatacattgaggatgatgaggagcacgtggacattgagactgtagaagagctctcagaggaaattaatgttgctcacctgaagaccacagcggcccacacacagtcattcaaacagccgtcctgtactcacatctctgcagatgaaaaagcagctgaaaggagtcgaaaggctccaccaattcctctaaaactgaagcctgattactggagtgacaaactacagaaagaagcagaagcgtttgcttattatcgccggacacacactgccaatgagcggcggcggcgtggtgaaatgagggatctctttgagaaattaaagatcacattgggattacttcattcttccaaggtttccaaaagtctcattcttactcgagccttcagtgaaattcagggactaacagatcaggcagacaaattgataggacagaaaaatctcctgactcgaaaacggaatattctgatacggaaagtatcgtctctttcaggtaagacagaagaagtggtcctgaagaagctagagtatatttatgcaaaacagcaagcactagaggcacaaaaaagaaaaaagaagatgggatcagatgagtttgacatatctcccagaattagcaaacagcaggaaggatcttctgcatcatctgtagatcttggacagatgtttataaataacaggagggggaaacctttgattctttccagaaaaaaagaccaggccacagaaaatacctcacccttgaacactccacacacctctgccaaccttgtgatgactccgcaagggcaattgctcaccctaaaaggtcccctattctcaggaccagtggtagctgtttctcctgatctcttagaatctgatcttaagcctcaagttgccggtagtgctgtggctctaccagaaaatgacgacttatttatgatgccacgaattgttaatgtgacatcattggccacagagggaggtttggtagatatgggtggcagcaaatatcctcatgaagttcctgatagcaagccatctgaccatctgaaagacaccgtcaggaatgaagataattccttagaggataagggtagaatctcttccagaggaaacagagatggcagagtgacgttgggtccaacgcaggtttttctggcaaacaaagattctggttatccacaaatagttgacgtttccaatatgcagaaagcacaagagttcttacctaaaaagatttctggtgatatgagagggattcagtataaatggaaagagagtgaatcaagaggggagagagtgaagtcaaaggattcttcatttcataaattaaagatgaaagatctcaaggactcaagcatagagatggaactgaggaaagtaacatcagctatagaggaagcagctcttgattccagtgaactgctgactaacatggaagatgaggatgatactgatgagacactgacttcactgctcaatgaaattgcctttcttaatcaacaactaaatgatgactctgttggcctggctgaactacccagctctatggatacagagttcccaggggatgctcggcgggcttttattagtaaggttcctcctggaagcagagcaactttccaggttgagcacttgggaactggtttgaaagagttgcctgatgttcaaggggagagtgactctatcagtcccctcctcttgcacttggaagacgatgacttttctgagaatgaaaaacaacttgcagaaccagcctctgagccagatgtccttaagattgttattgactctgaaataaaggattccctcctttccaacaagaaagctattgatggagggaagaatacttctggcctccctgcagagcccgaaagtgtgtcctcaccccccaccctacacatgaagactggcttggagaacagcaacagcacagacactttgtggaggcctatgccaaagttggcccctctaggtttaaaagtagctaatccttccagtgatgcagatggtcagagtctcaaggtgatgccttgtttggcacctatagctgccaaagttgggtcagttggacacaaaatgaacttaacagggaatgaccaggaaggccgggaaagcaaggtgatgcctacattggcacctgttgtggctaaattgggcaactcgggggcctcaccaagttctgcagggaaatgaacttacttgtccttaagcagaagccaggctgtgaggggaaatagatctcacctcctttctctgcaggcatctgtttgtttgtgtcttagaacttggatccttgacttcaatgatgcagtggataatgatgggagaaagggggtagggtgctgaccctggtataagaagtactctgaaattctgatcatgttaaaatgtgttacctcacttgtggtgctgggtcccctcatcctctctaagaagatgtgatccattactgaacatgaggtgcccctcttacccaaggaatttataacatgactctggctccacagtggtttctagttcttcccccacaagcgaaagagctgtttgcaactttggagttgctgtagactgaactgtagcttgtagctgttgaattaagtccaaaatctaaggaatgcgatggacttgtgcaaagggatccagaagagacactttttagttgatgtttcaagaatagggagagagaggatgggtaccatggaataccaaagtgaaggactttgtgtcattcagtaaaattttcttttttcatatcctaagtagctcccattccctcaccttttcaatcagaattaacaaattcaagccttcagtaaagtagggatgcttttaacttttattattaattattttgagatcttaaaaaaatagtagttctcccttattatttttgtgggcattgaaaagctcatttcacagtaccagagatttttactgggagtatatattttggaggtaggcatagagggagccctaccccttccacaaattacgttactcaagagacagctaaaataaaatgcattatctccccagaccagagacagtggccaaaataaaaaatcatggggctggaaatttcccaaatcaaaccagcctcctggtgcttgaaggtttcattcactattacctgcacaggatgtaaagaaaagtcacagtaggcactctttaccagggaaataaggcagtatttgaatcacaagatatattttttatctgcaaccatggatccaatgatctgtagagctttttcactcattaactgtcaggatatgaaggactgacagtctgtaaagatatttatatttttgtatagttgttttcatagatttctcaaaggctgaagttttcaacctagaagatgagatttgtattgagtatagaaatgatgtttcctatctagtttgtaaataatcatggtgcacttgaggggtctcttggaaactcctagggggtcaagaatcactattctgaaactgtatagactgggatttagctgctgcattttgcctttcttaaataattatattttggaatgtaacccctgttctgtcttcattgacaggatttgcttgtgttgttaaaacactaacacaagagcttccagtgcctgggccgtgcctaggtgatgctatttcttctatatctcctgtcttctttatcccaaatcccactcagcatatcttcagacctaggttgtaagaccaactttggattggatctagccagtgaattattatttccatggttggttccctttctgttaactctggtaatcaacagattgaaaacggtggaagaacttctgaaaattgcagtgggagcaaattcttgttggttttgtgctgcttgcctttctagatctgctcatcagcacttaaccttccctcctctaaaggttactaaagaagcctgaagtaggtaaagagtgctcctcagcttcttatccttccactctttacccagcagatttcattcaatgccttagccaaggagtccagcacctgtctcccctgctaataattgtccttagagatgctagtactttaatccaggtatagcagtttcccgttattttcttgcttgtcgttcccctacatttcctcctgatttcccaagactctctttgtggcttttgagggtcagccaaggagcaggcaagtgagtgaacaatcctcaggaaaagaaggaccattttagcttaacacttccttttttttttttttttttttaagaagaatataggtaaacaggtaatgattcttgattggagataccatttgactcttgatgagagttgtacgaagatggaaatgagggatgattccaggcgttttagggggaaggctgcagataccattctaacccccaagatactgtgttctcaagacctcttagaactaggtgttgtcagggataatttgaggagggcttagtcttcagaacaatcctgcagtcttgacagaaatctaaaatctccaaaaactcctaccctttaaccttaccctagggggaactgatctatgaatattacatgtgtgattatgaaaggtgaagttgagtgagaggagttgaggaacgtggaagacagtgagctctcaccctaacactataagaagcatgatctcaatagaccaataattcacctttttatacatctgtaaataaatggaatgtttttaagaatataattatgtcagatttagcattttcttttatatattaaatatatatatctttccttttctgctttcgaaaagtgactatttttttagaaatctaagaacagaagtttggtgattgaaaggtagaatatataaacctgaaataaagcagttaaaacaattaaagc

SEQ ID NO: 17296 - DNA, 2424 bp, Homo sapiens
  source 1..2424: mol_type = unassigned DNA
ggtaaacaaaccacgcgcgggctgcccgcggcacggcgggcgcggctggcgcggctggggcggcaggggcggcggagagcgcgccgagccgcggccgagctggcccgcccgcccgtcgcacatgttccggaacggcgcccggccgtagccgcctgcggcgcctcctgtcggcccgagaagggagtgcggagaggcgccggtcgccacccgcggtgcccatggagcgggtgaagatgatcaacgtgcagcgtctgctggaggctgccgagtttttggagcgccgggagcgagagtgtgaacatggctacgcctcttcattcccgtccatgccgagcccccgactgcagcattcaaagcccccacggaggttgagccgggcacagaaacacagcagcgggagcagcaacaccagcactgccaacagatctacacacaatgagctggaaaagaatcgacgagctcatctgcgcctttgtttagaacgcttaaaagttctgattccactaggaccagactgcacccggcacacaacacttggtttgctcaacaaagccaaagcacacatcaagaaacttgaagaagctgaaagaaaaagccagcaccagctcgagaatttggaacgagaacagagatttttaaagtggcgactggaacagctgcagggtcctcaggagatggaacgaatacgaatggacagcattggatcaactatttcttcagatcgttctgattcagagcgagaggagattgaagtggatgttgaaagcacagagttctcccatggagaagtggacaatataagtaccaccagcatcagtgacattgatgaccacagcagcctgccgagtattgggagtgacgagggttactccagtgccagtgtcaaactttcattcacttcatagaacccagcatgacataacagtgcagggcaaaatattcactgggccaattcaatacaaacaatctcttaaattgggttcatgatgcagtctcctctttaaaacaaaacaaaacaaaacaaaactatacttgaacaaaagggtcagaggacctgtatttaagcaaatacttagcaaaaagtggggcagagcctcccaaggagaacaaatattcagaatattcatattggaaaaatcacaatttttaatggcagcagaaaacttgtgtgaaattttcttgatttgagttgattgagaagaggacattggagatgccatcctctttctcttttctagtttgctcatactacattgagtagacacatttaaggatggggttatgaacccttcctgagctttatggtcctaaaagcaaaataaaaactattcgaatgaaaagacaagaaaatcaggtattaatcttggatagctaataatgagctattaaaactcagcctgggacagtttatcatgaagcctgtggatgatcaatcctttattattattttttttttttgaaaaaagctcatttcatgctctgcaaaaggagagactcccatgaagccttttgaaagggatcatcatgcagctcaactttctgttggattccatgctaagcaagctaaccttatcctgcattgttagcactaggcacccagctgccacctctccatcctgctgcccttaggccacatgggagcagtccatgcatgacagcctctatcctacaaggcctatgagtatggattgggggggccaaaaggaaaaagctccatgtgcctctttgtctgcgtgggtcagaagagttgtgcacgcagattagcaggccaaggtctgagccacagcagcatttttatttcagattttgataactgtttatatgtgttgaaaaccaaaatgacatctttttaaagcttatccataaaaaaaaatagatgtcttttatagtggaaaaacacatggggaaaaaaatcatctattttgatgcagcatttgataatgataaaacacctcacacctcactctttatagtgcacaaaatgaatgaggtctgggctaggtagaaaaagggtcaatgctatttttgtttttagaatcattaccttttaccagcttttaaccatctgatatctatagtagacacactatcatagttaacatagtaagttcagcacttgtctcattttaatgtaaagatttgcttccattttcctacaggcagtctctctcttcctcacagtcccactgtgcaggtgctattgttactcttacgaatattttcagtaatgttattttcttctaagtgaaatttctagcctgcactttgatgtcatgtgttccctttgtctttcaaactccaaggttcccttgtggccctctcccttaccctgggaaggcctcttggagaccttacccctggctgtttggactttgtatactttaaataatttaactacccttaattacttaaaaaaaaaaaaaa

SEQ ID NO: 17297 - DNA, 3470 bp, Homo sapiens
  source 1..3470: mol_type = unassigned DNA
atacacacagactcacagcgagaccgacacacactcccatacactcacacacacaactgcaggcagcgaggctcgggaagtcaggccggcttttcgccccggcgccttctctgctccagccggccgggtctccctgggggcccggagctcggccgggccgcgcagccccgttagaggacgagctcggcggacccccgctcctccatgggcaaacgcgggcggccgcgcaaggaggcgcgctgcgagggcgcggggctggcccccgccgcgcccccggctgtgccccccgccgtggccgcgccccagcccccggccctgcccgaggaccccgctggggccaagcccaggtgccccttctcagacattttcaacaccagcgagaactcgatggagaagcacatcaacacttttctgcagaacgtgcagattctgctcgaggccgccagctacctggagcagatcgagaaagaaaacaaaaagtgtgaacatggctacgcctcttcattcccgtccatgccgagcccccgactgcagcattcaaagcccccacggaggttgagccgggcacagaaacacagcagcgggagcagcaacaccagcactgccaacagatctacacacaatgagctggaaaagaatcgacgagctcatctgcgcctttgtttagaacgcttaaaagttctgattccactaggaccagactgcacccggcacacaacacttggtttgctcaacaaagccaaagcacacatcaagaaacttgaagaagctgaaagaaaaagccagcaccagctcgagaatttggaacgagaacagagatttttaaagtggcgactggaacagctgcagggtcctcaggagatggaacgaatacgaatggacagcattggatcaactatttcttcagatcgttctgattcagagcgagaggagattgaagtggatgttgaaagcacagagttctcccatggagaagtggacaatataagtaccaccagcatcagtgacattgatgaccacagcagcctgccgagtattgggagtgacgagggttactccagtgccagtgtcaaactttcattcacttcatagaacccagcatgacataacagtgcagggcaaaatattcactgggccaattcaatacaaacaatctcttaaattgggttcatgatgcagtctcctctttaaaacaaaacaaaacaaaacaaaactatacttgaacaaaagggtcagaggacctgtatttaagcaaatacttagcaaaaagtggggcagagcctcccaaggagaacaaatattcagaatattcatattggaaaaatcacaatttttaatggcagcagaaaacttgtgtgaaattttcttgatttgagttgattgagaagaggacattggagatgccatcctctttctcttttctagtttgctcatactacattgagtagacacatttaaggatggggttatgaacccttcctgagctttatggtcctaaaagcaaaataaaaactattcgaatgaaaagacaagaaaatcaggtattaatcttggatagctaataatgagctattaaaactcagcctgggacagtttatcatgaagcctgtggatgatcaatcctttattattattttttttttttgaaaaaagctcatttcatgctctgcaaaaggagagactcccatgaagccttttgaaagggatcatcatgcagctcaactttctgttggattccatgctaagcaagctaaccttatcctgcattgttagcactaggcacccagctgccacctctccatcctgctgcccttaggccacatgggagcagtccatgcatgacagcctctatcctacaaggcctatgagtatggattgggggggccaaaaggaaaaagctccatgtgcctctttgtctgcgtgggtcagaagagttgtgcacgcagattagcaggccaaggtctgagccacagcagcatttttatttcagattttgataactgtttatatgtgttgaaaaccaaaatgacatctttttaaagcttatccataaaaaaaaatagatgtcttttatagtggaaaaacacatggggaaaaaaatcatctattttgatgcagcatttgataatgataaaacacctcacacctcactctttatagtgcacaaaatgaatgaggtctgggctaggtagaaaaagggtcaatgctatttttgtttttagaatcattaccttttaccagcttttaaccatctgatatctatagtagacacactatcatagttaacatagtaagttcagcacttgtctcattttaatgtaaagatttgcttccattttcctacaggcagtctctctcttcctcacagtcccactgtgcaggtgctattgttactcttacgaatattttcagtaatgttattttcttctaagtgaaatttctagcctgcactttgatgtcatgtgttccctttgtctttcaaactccaaggttcccttgtggccctctcccttaccctgggaaggcctcttggagaccttacccctggctgtttggactttgtatactttaaataatttaactacccttaattacttaaaaaaaaaaaaaagctttatgattttcataacttattgctgattttaatggattgttaatttcagtcctgtagttttattttatgtttagatagggctgggcaaggaaaaagaaaataaagacaaccatatttagcagtgcagttgagttgtgtgttaatgttagactatccctttgtgagtgacactttaacagcattcactgcttctatatatagtgtaccatcttggtcatacattacgcctcaacatatacttgtgctcttcctttgcctccagaagaagtttttccttgattgtgctatgtttcagtggaagaaattctttgaagtagatgtgagtgaaaaactgcatgcctttagaagcccagtatcagaacttgctacgtttcaggtgctagggacttaatgaaaaacaggacaaaacaattcctttttgtggcccaggtaaattatttctggtttcacttataattactaatggctgagtcaagatgttgtctctgtgtttgcttactcttgatcaagtgtgagacagtttgaagactgtgctaccatacaaagtgaatgaagccagtgactaagcttctgtttgttttgttattctcatggccttcgcttgcattatttgggccttcattcagatgaacttgaggtgccattttgttgcatatgtacaggattatgggctggaaagcatttgttataaacctatagtgcacattttaactgccccctaaattacccttccctgggtttgttttccttggggtggtgtagattgtatgagtaagaagtattaattttttaaaagacaaatcaactttgaagacacaaaagttaattggaagaaataaaaactgtgaacgaagaa

SEQ ID NO: 17298 - DNA, 2188 bp, Homo sapiens
  source 1..2188: mol_type = unassigned DNA
catcgcccgaggcgtccgccctgcaaatctgccagcccccgagaggggtttggaaccttagcacccaagtctaagtcaacttcatagtgtgaacatggctacgcctcttcattcccgtccatgccgagcccccgactgcagcattcaaagcccccacggaggttgagccgggcacagaaacacagcagcgggagcagcaacaccagcactgccaacagacgagctcatctgcgcctttgtttagaacgcttaaaagttctgattccactaggaccagactgcacccggcacacaacacttggtttgctcaacaaagccaaagcacacatcaagaaacttgaagaagctgaaagaaaaagccagcaccagctcgagaatttggaacgagaacagagatttttaaagtggcgactggaacagctgcagggtcctcaggagatggaacgaatacgaatggacagcattggatcaactatttcttcagatcgttctgattcagagcgagaggagattgaagtggatgttgaaagcacagagttctcccatggagaagtggacaatataagtaccaccagcatcagtgacattgatgaccacagcagcctgccgagtattgggagtgacgagggttactccagtgccagtgtcaaactttcattcacttcatagaacccagcatgacataacagtgcagggcaaaatattcactgggccaattcaatacaaacaatctcttaaattgggttcatgatgcagtctcctctttaaaacaaaacaaaacaaaacaaaactatacttgaacaaaagggtcagaggacctgtatttaagcaaatacttagcaaaaagtggggcagagcctcccaaggagaacaaatattcagaatattcatattggaaaaatcacaatttttaatggcagcagaaaacttgtgtgaaattttcttgatttgagttgattgagaagaggacattggagatgccatcctctttctcttttctagtttgctcatactacattgagtagacacatttaaggatggggttatgaacccttcctgagctttatggtcctaaaagcaaaataaaaactattcgaatgaaaagacaagaaaatcaggtattaatcttggatagctaataatgagctattaaaactcagcctgggacagtttatcatgaagcctgtggatgatcaatcctttattattattttttttttttgaaaaaagctcatttcatgctctgcaaaaggagagactcccatgaagccttttgaaagggatcatcatgcagctcaactttctgttggattccatgctaagcaagctaaccttatcctgcattgttagcactaggcacccagctgccacctctccatcctgctgcccttaggccacatgggagcagtccatgcatgacagcctctatcctacaaggcctatgagtatggattgggggggccaaaaggaaaaagctccatgtgcctctttgtctgcgtgggtcagaagagttgtgcacgcagattagcaggccaaggtctgagccacagcagcatttttatttcagattttgataactgtttatatgtgttgaaaaccaaaatgacatctttttaaagcttatccataaaaaaaaatagatgtcttttatagtggaaaaacacatggggaaaaaaatcatctattttgatgcagcatttgataatgataaaacacctcacacctcactctttatagtgcacaaaatgaatgaggtctgggctaggtagaaaaagggtcaatgctatttttgtttttagaatcattaccttttaccagcttttaaccatctgatatctatagtagacacactatcatagttaacatagtaagttcagcacttgtctcattttaatgtaaagatttgcttccattttcctacaggcagtctctctcttcctcacagtcccactgtgcaggtgctattgttactcttacgaatattttcagtaatgttattttcttctaagtgaaatttctagcctgcactttgatgtcatgtgttccctttgtctttcaaactccaaggttcccttgtggccctctcccttaccctgggaaggcctcttggagaccttacccctggctgtttggactttgtatactttaaataatttaactacccttaattacttaaaaaaaaaaaaaa

SEQ ID NO: 17299 - DNA, 879 bp, Homo sapiens
  source 1..879: mol_type = unassigned DNA
ccctttagcggtggcagcccaaggggctgtagagatggcgcagaaagaccaggaactcggagactgtggtgtcgagagagaaaatgtctttctaagacttgttcgaagtacacaaaaatattgggcttaaagagactctttagaacagagagagttgaaagtaaaggggaatttttgaggcaagcgaagtcaatgaggtgaatgagtgtgaacatggctacgcctcttcattcccgtccatgccgagcccccgactgcagcattcaaagcccccacggaggttgagccgggcacagaaacacagcagcgggagcagcaacaccagcactgccaacagatctacacacaatgagctggaaaagaatcgacgagctcatctgcgcctttgtttagaacgcttaaaagttctgattccactaggaccagactgcacccggcacacaacacttggtttgctcaacaaagccaaagcacacatcaagaaacttgaagaagctgaaagaaaaagccagcaccagctcgagaatttggaacgagaacagagatttttaaagtggcgactggaacagctgcagggtcctcaggagatggaacgaatacgaatggacagcattggatcaactatttcttcagatcgttctgattcagagcgagaggagattgaagtggatgttgaaagcacagagttctcccatggagaagtggacaatataagtaccaccagcatcagtgacattgatgaccacagcagcctgccgagtattgggagtgacgagggttactccagtgccagtgtcaaactttcattcacttcatagaacccagcatgacataacagtgcagggcaaaatattcactgggccaattcaatacaaacaa

SEQ ID NO: 17300 - DNA, 893 bp, Homo sapiens
  source 1..893: mol_type = unassigned DNA
gcgcgcgtgcgtggggagagtgtgaacatggctacgcctcttcattcccgtccatgccgagcccccgactgcagcattcaaagcccccacggaggttgagccgggcacagaaacacagcagcgggagcagcaacaccagcactgccaacagatctacacacaatgagctggaaaagaatcgacgagctcatctgcgcctttgtttagaacgcttaaaagttctgattccactaggaccagactgcacccggcacacaacacttggtttgctcaacaaagccaaagcacacatcaagaaacttgaagaagctgaaagaaaaagccagcaccagctcgagaatttggaacgagaacagagatttttaaagtggcgactggaacagctgcagggtcctcaggagatggaacgaatacgaatggacagcattggatcaactatttcttcagatcgttctgattcagagcgagaggagattgaagtggatgttgaaagcacagagttctcccatggagaagtggacaatataagtaccaccagcatcagtgacattgatgaccacagcagcctgccgagtattgggagtgacgagggttactccagtgccagtgtcaaactttcattcacttcatagaacccagcatgacataacagtgcagggcaaaatattcactgggccaattcaatacaaacaatctcttaaattgggttcatgatgcagtctcctctttaaaacaaaacaaaacaaaacaaaactatacttgaacaaaagggtcagaggacctgtatttaagcaaatacttagcaaaaagtggggcagagcctcccaaggagaacaaatattcagaatattcatattggaaaaatcacaatttttaatggcagcagaaaactt

SEQ ID NO: 17301 - DNA, 774 bp, Homo sapiens
  source 1..774: mol_type = unassigned DNA
gtgtgtgtgagggcagggagtgtgaacatggctacgcctcttcattcccgtccatgccgagcccccgactgcagcattcaaagcccccacggaggttgagccgggcacagaaacacagcagcgggagcagcaacaccagcactgccaacagatctacacacaatgagctggaaaagaatcgacgagctcatctgcgcctttgtttagaacgcttaaaagttctgattccactaggaccagactgcacccggcacacaacacttggtttgctcaacaaagccaaagcacacatcaagaaacttgaagaagctgaaagaaaaagccagcaccagctcgagaatttggaacgagaacagagatttttaaagtggcgactggaacagctgcagggtcctcaggagatggaacgaatacgaatggacagcattggatcaactatttcttcagatcgttctgattcagagcgagaggagattgaagtggatgttgaaagcacagagttctcccatggagaagtggacaatataagtaccaccagcatcagtgacattgatgaccacagcagcctgccgagtattgggagtgacgagggttactccagtgccagtgtcaaactttcattcacttcatagaacccagcatgacataacagtgcagggcaaaatattcactgggccaattcaatacaaacaatctcttaaattgggttcatgatgcagtctcctctttaaaacaaaacaaaacaaaacaaaactatacttgaacaaaagggtc

SEQ ID NO: 17302 - DNA, 1156 bp, Homo sapiens
  source 1..1156: mol_type = unassigned DNA
aaaccacgcgcgggctgcccgcggcacggcgggcgcggctggcgcggctgcggcgcctcctgtcggcccgagaagggagtgcggagaggcgccggtcgccacccgcggtgcccatggagcgggtgaagatgatcaacgtgcagcgtctgctggaggctgccgagtttttggagcgccgggagcgagagtgtgaacatggctacgcctcttcattcccgtccatgccgagcccccgactgcagcattcaaagcccccacggaggttgagccgggcacagaaacacagcagcgggagcagcaacaccagcactgccaacagacgagctcatctgcgcctttgtttagaacgcttaaaagttctgattccactaggaccagactgcacccggcacacaacacttggtttgctcaacaaagccaaagcacacatcaagaaacttgaagaagctgaaagaaaaagccagcaccagctcgagaatttggaacgagaacagagatttttaaagtggcgactggaacagctgcagggtcctcaggagatggaacgaatacgaatggacagcattggatcaactatttcttcagatcgttctgattcagagcgagaggagattgaagtggatgttgaaagcacagagttctcccatggagaagtggacaatataagtaccaccagcatcagtgacattgatgaccacagcagcctgccgagtattgggagtgacgagggttactccagtgccagtgtcaaactttcattcacttcatagaacccagcatgacataacagtgcagggcaaaatattcactgggccaattcaatacaaacaatctcttaaattgggttcatgatgcagtctcctctttaaaacaaaacaaaacaaaacaaaactatacttgaacaaaagggtcagaggacctgtatttaagcaaatacttagcaaaaagtggggcagagcctcccaaggagaacaaatattcagaatattcatattggaaaaatcacaatttttaatggcagcagaaaacttgtgtgaaattttcttgatttgagttgattgagaagaggacattggagatgccatcctctttctcttttctagtttgctcatactacattgagtagacacatttaaggatggggttatgaaccctt

SEQ ID NO: 17303 - DNA, 889 bp, Homo sapiens
  source 1..889: mol_type = unassigned DNA
cggccgagctggcccgcccgcccgtcgcacatgttccggaacggcgcccggccgtagccgcctgcggcgcctcctgtcggcccgagaagggagtgcggagaggcgccggtcgccacccgcggtgcccatggagcgggtgaagatgatcaacgtgcagcgtctgctggaggctgccgagtttttggagcgccgggagcgagagtgtgaacatggctacgcctcttcattcccgtccatgccgagcccccgactgcagcattcaaagcccccacggaggttgagccgggcacagaaacacagcagcgggagcagcaacaccagcactgccaacagacgagctcatctgcgcctttgtttagaacgcttaaaagttctgattccactaggaccagactgcacccggcacacaacacttggtttgctcaacaaagccaaagcacacatcaagaaacttgaagaagctgaaagaaaaagccagcaccagctcgagaatttggaacgagaacagagatttttaaagtggcgactggaacagctgcagggtcctcaggagatggaacgaatacgaatggacagcattggatcaactatttcttcagatcgttctgattcagagcgagaggagattgaagtggatgttgaaagcacagagttctcccatggagaagtggacaatataagtaccaccagcatcagtgacattgatgaccacagcagcctgccgagtattgggagtgacgagggttactccagtgccagtgtcaaactttcattcacttcatagaacccagcatgacataacagtgcagggcaaaatattcactgggccaattcaatacaaacaatctcttaaattgggttcatgatgcagtctcctctttaaaacaaa

SEQ ID NO: 17304 - DNA, 634 bp, Homo sapiens
  source 1..634: mol_type = unassigned DNA
gggtgctgggagataagaggaaggaggaacacggatgctggggggggtcaggggaagggacgaggccgggagaacactgagcgggggaaaaccggtggagaggggcctttgaatacctgcggggtgatgagatggggtccctttagcggtggcagcccaaggggctgtagagatggcgcagaaagaccaggaactcggagactgtggtgtcgagagagaaaatgtctttctaagacttgttcgaaagtgtgaacatggctacgcctcttcattcccgtccatgccgagcccccgactgcagcattcaaagcccccacggaggttgagccgggcacagaaacacagcagcgggagcagcaacaccagcactgccaacagatctacacacaatgagctggaaaagaatcgacgagctcatctgcgcctttgtttagaacgcttaaaagttctgattccactaggaccagactgcacccggcacacaacacttggtttgctcaacaaagccaaagcacacatcaagaaacttgaagaagctgaaagaaaaagccagcaccagctcgagaatttggaacgagaacagagatttttaaagtggcgactggaacagctgcagggtcctcaggagatggaa

SEQ ID NO: 17305 - DNA, 803 bp, Homo sapiens
  source 1..803: mol_type = unassigned DNA
gtcaggccggcttttcgccccggcgccttctctgctccagccggccgggtctccctgggggcccggagctcggccgggccgcgcagccccgttagaggacgagctcggcggacccccgctcctccatgggcaaacgcgggcggccgcgcaaggaggcgcgctgcgagggcgcggggctggcccccgccgcgcccccggctgtgccccccgccgtggccgcgccccagcccccggccctgcccgaggaccccgctggggccaagcccaggtgccccttctcagacattttcaacaccagcgagaactcgatggagaagcacatcaacacttttctgcagaacgtgcagattctgctcgaggccgccagctacctggagcagatcgagaaagaaaacaaaaagtgtgaacatggctacgcctcttcattcccgtccatgccgagcccccgactgcagcattcaaagcccccacggaggttgagccgggcacagaaacacagcagcgggagcagcaacaccagcactgccaacagacgagctcatctgcgcctttgtttagaacgcttaaaagttctgattccactaggaccagactgcacccggcacacaacacttggtttgctcaacaaagccaaagcacacatcaagaaacttgaagaagctgaaagaaaaagccagcaccagctcgagaatttggaacgagaacagagatttttaaagtggcgactggaacagctgcagggtcctcaggagatggaacgaatacgaatggacagcattggatcaactatttcttcagatcgt

SEQ ID NO: 17306 - DNA, 2561 bp, Homo sapiens
  source 1..2561: mol_type = unassigned DNA
cgccacccgcttcctcgccgcagggggcccgcccgctggcccgtttccggtccggtgggtacaagatgacggagccgggcgcctctcccgaggacccttgggtcaaggcaagccccgtgggcgcgcacgccggcgaggggagggcgggtcgggctcgtgcacgtaggggggccggaagacgaggggcttccctcctgtccccaaagtcccccacgctctccgtgccccggggctgcagagaagacagctctcaccccgcgtgtgccaaggtggagtatgcctacagcgacaacagcctggaccccgggctttttgtagaaagcacccgcaaggggagtgtagtgtccagagctaatagcatcggttccaccagtgcctcttctgtccccaacacagatgatgaggacagtgattaccaccaggaggcctacaaggagtcctacaaagaccggcggcggcgcgcacacactcaggctgagcagaagaggagggacgccatcaagagaggctatgatgaccttcagaccatcgtccccacttgccagcagcaggacttctccattggctcccaaaagctcagcaaagccatcgttctacaaaagaccattgactacattcagtttttgcacaaggagaagaaaaagcaggaggaggaggtgtccacgttacgcaaggatgtcaccgccctaaagatcatgaaagtgaactatgagcagattgtgaaggcacaccaggacaacccccatgaaggggaggaccaggtctctgaccaggtcaagttcaacgtgtttcaaggcatcatggattccctgttccagtccttcaatgcctccatctcagtggccagcttccaggagctgtcagcgtgtgtcttcagctggatcgaggagcactgtaagcctcagaccctgcgggagattgtgattggcgtcctgcaccaattgaaaaaccagctttactgaccggttcttggaaacctggagaacagccaacaagaggcccttgaatctctacgtggccactgaactgctgggcccgggagactggactacaacacctcacactggtcagctggtttctacttggtgtttggtttttcccagccccattttatcttcagcggagccgcggtgtttgttttgtgaaagcttctgattaatttattatattgacgataaaactcaaacctacccagccttccccccactccatggaagtccttgggatgggcgtctgctctggacaccccaaagagctcctgccctctcagccctttattcaagcctcagatttctgctcatgatctacatagatttggaaactgttttcctctgttttggtctcttgggcaacatttttggcccaagtttgggcaacatttggcccaagtttgggcattttggcagtagctgtatgggagaaaaagagtaagaggaaatattcccacagccatgaagggtgaaagggcaccttgtgcctagactagggctgcctggtcagtcccaggtgaggccaagggctttctggccatctcagggaggggccaccaggttcctcccctcaccccatattccatcaccttcctcctctgctctgggtggtaagggaagccctcccggttcccacaggctatgatgctgcatggcagaggcaggtataacacagcactacatattggaaattttttatttttctaaataccaatgcagttttgctacggttacaattttgaaatattaactgagcctcaaaatcaccctttctgtcaagcatatcttggcctctcccatgtctcagtgttgcctgcatttctcccaggacttgggggtggggtgaaaagcgtacaaaagatacttaaaagggctcctggggtacacaagcccagcaggtcctgagtgaagccgtgggccctccaaatgctcgttttatagcaacctctctctaccctagttctccaaattcacttctgccttcctcaggtttgatatctggcaggtttgactatccagaggaaattaaatatttttatataaaattaaattataataaatattgccaaatgctttcctttagcattgttccaagtctaaatgttaacctcaagctactgcaatttagacaatgaaatgggctgggtctacccccagccaccagccctcatcctctctacccagtgctctggtttatgcttgtctcctgactgctctgcttaaaggtgaaagtagcaggaacaacaacaaaagccaaccaaaaacaaggtagccagtgcaagacatctcactcttctgacatcctgcagtccccaccagtcctgaccgtgggcccctcaggggtctgggagtgtgacgttgtaatcttcatccgtctctatcccaacttcctcctgtgagacagggagacaagtgaatgagatgtcaccaggataagaccacagggaagcaaagaaggaagagagctccacttacaaagaactgcttcttgctcttggggtatccttcaagtattgcatcagacagctctgtagcctgacaagaaataaaaccacccgttttcagatgggc

SEQ ID NO: 17307 - DNA, 2309 bp, Homo sapiens
  source 1..2309: mol_type = unassigned DNA
cgccacccgcttcctcgccgcagggggcccgcccgctggcccgtttccggtccggtgggtacaagatgacggagccgggcgcctctcccgaggacccttgggtcaaggtggagtatgcctacagcgacaacagcctggaccccgatgatgaggacagtgattaccaccaggaggcctacaaggagtcctacaaagaccggcggcggcgcgcacacactcaggctgagcagaagaggagggacgccatcaagagaggctatgatgaccttcagaccatcgtccccacttgccagcagcaggacttctccattggctcccaaaagctcagcaaagccatcgttctacaaaagaccattgactacattcagtttttgcacaaggagaagaaaaagcaggaggaggaggtgtccacgttacgcaaggatgtcaccgccctaaagatcatgaaagtgaactatgagcagattgtgaaggcacaccaggacaacccccatgaaggggaggaccaggtctctgaccaggtcaagttcaacgtgtttcaaggcatcatggattccctgttccagtccttcaatgcctccatctcagtggccagcttccaggagctgtcagcgtgtgtcttcagctggatcgaggagcactgtaagcctcagaccctgcgggagattgtgattggcgtcctgcaccaattgaaaaaccagctttactgaccggttcttggaaacctggagaacagccaacaagaggcccttgaatctctacgtggccactgaactgctgggcccgggagactggactacaacacctcacactggtcagctggtttctacttggtgtttggtttttcccagccccattttatcttcagcggagccgcggtgtttgttttgtgaaagcttctgattaatttattatattgacgataaaactcaaacctacccagccttccccccactccatggaagtccttgggatgggcgtctgctctggacaccccaaagagctcctgccctctcagccctttattcaagcctcagatttctgctcatgatctacatagatttggaaactgttttcctctgttttggtctcttgggcaacatttttggcccaagtttgggcaacatttggcccaagtttgggcattttggcagtagctgtatgggagaaaaagagtaagaggaaatattcccacagccatgaagggtgaaagggcaccttgtgcctagactagggctgcctggtcagtcccaggtgaggccaagggctttctggccatctcagggaggggccaccaggttcctcccctcaccccatattccatcaccttcctcctctgctctgggtggtaagggaagccctcccggttcccacaggctatgatgctgcatggcagaggcaggtataacacagcactacatattggaaattttttatttttctaaataccaatgcagttttgctacggttacaattttgaaatattaactgagcctcaaaatcaccctttctgtcaagcatatcttggcctctcccatgtctcagtgttgcctgcatttctcccaggacttgggggtggggtgaaaagcgtacaaaagatacttaaaagggctcctggggtacacaagcccagcaggtcctgagtgaagccgtgggccctccaaatgctcgttttatagcaacctctctctaccctagttctccaaattcacttctgccttcctcaggtttgatatctggcaggtttgactatccagaggaaattaaatatttttatataaaattaaattataataaatattgccaaatgctttcctttagcattgttccaagtctaaatgttaacctcaagctactgcaatttagacaatgaaatgggctgggtctacccccagccaccagccctcatcctctctacccagtgctctggtttatgcttgtctcctgactgctctgcttaaaggtgaaagtagcaggaacaacaacaaaagccaaccaaaaacaaggtagccagtgcaagacatctcactcttctgacatcctgcagtccccaccagtcctgaccgtgggcccctcaggggtctgggagtgtgacgttgtaatcttcatccgtctctatcccaacttcctcctgtgagacagggagacaagtgaatgagatgtcaccaggataagaccacagggaagcaaagaaggaagagagctccacttacaaagaactgcttcttgctcttggggtatccttcaagtattgcatcagacagctctgtagcctgacaagaaataaaaccacccgttttcagatgggc

SEQ ID NO: 17308 - DNA, 2399 bp, Homo sapiens
  source 1..2399: mol_type = unassigned DNA
cgccacccgcttcctcgccgcagggggcccgcccgctggcccgtttccggtccggtgggtacaagatgacggagccgggcgcctctcccgaggacccttgggtcaaggtggagtatgcctacagcgacaacagcctggaccccgggctttttgtagaaagcacccgcaaggggagtgtagtgtccagagctaatagcatcggttccaccagtgcctcttctgtccccaacacagatgatgaggacagtgattaccaccaggaggcctacaaggagtcctacaaagaccggcggcggcgcgcacacactcaggctgagcagaagaggagggacgccatcaagagaggctatgatgaccttcagaccatcgtccccacttgccagcagcaggacttctccattggctcccaaaagctcagcaaagccatcgttctacaaaagaccattgactacattcagtttttgcacaaggagaagaaaaagcaggaggaggaggtgtccacgttacgcaaggatgtcaccgccctaaagatcatgaaagtgaactatgagcagattgtgaaggcacaccaggacaacccccatgaaggggaggaccaggtctctgaccaggtcaagttcaacgtgtttcaaggcatcatggattccctgttccagtccttcaatgcctccatctcagtggccagcttccaggagctgtcagcgtgtgtcttcagctggatcgaggagcactgtaagcctcagaccctgcgggagattgtgattggcgtcctgcaccaattgaaaaaccagctttactgaccggttcttggaaacctggagaacagccaacaagaggcccttgaatctctacgtggccactgaactgctgggcccgggagactggactacaacacctcacactggtcagctggtttctacttggtgtttggtttttcccagccccattttatcttcagcggagccgcggtgtttgttttgtgaaagcttctgattaatttattatattgacgataaaactcaaacctacccagccttccccccactccatggaagtccttgggatgggcgtctgctctggacaccccaaagagctcctgccctctcagccctttattcaagcctcagatttctgctcatgatctacatagatttggaaactgttttcctctgttttggtctcttgggcaacatttttggcccaagtttgggcaacatttggcccaagtttgggcattttggcagtagctgtatgggagaaaaagagtaagaggaaatattcccacagccatgaagggtgaaagggcaccttgtgcctagactagggctgcctggtcagtcccaggtgaggccaagggctttctggccatctcagggaggggccaccaggttcctcccctcaccccatattccatcaccttcctcctctgctctgggtggtaagggaagccctcccggttcccacaggctatgatgctgcatggcagaggcaggtataacacagcactacatattggaaattttttatttttctaaataccaatgcagttttgctacggttacaattttgaaatattaactgagcctcaaaatcaccctttctgtcaagcatatcttggcctctcccatgtctcagtgttgcctgcatttctcccaggacttgggggtggggtgaaaagcgtacaaaagatacttaaaagggctcctggggtacacaagcccagcaggtcctgagtgaagccgtgggccctccaaatgctcgttttatagcaacctctctctaccctagttctccaaattcacttctgccttcctcaggtttgatatctggcaggtttgactatccagaggaaattaaatatttttatataaaattaaattataataaatattgccaaatgctttcctttagcattgttccaagtctaaatgttaacctcaagctactgcaatttagacaatgaaatgggctgggtctacccccagccaccagccctcatcctctctacccagtgctctggtttatgcttgtctcctgactgctctgcttaaaggtgaaagtagcaggaacaacaacaaaagccaaccaaaaacaaggtagccagtgcaagacatctcactcttctgacatcctgcagtccccaccagtcctgaccgtgggcccctcaggggtctgggagtgtgacgttgtaatcttcatccgtctctatcccaacttcctcctgtgagacagggagacaagtgaatgagatgtcaccaggataagaccacagggaagcaaagaaggaagagagctccacttacaaagaactgcttcttgctcttggggtatccttcaagtattgcatcagacagctctgtagcctgacaagaaataaaaccacccgttttcagatgggc

SEQ ID NO: 17309 - DNA, 2826 bp, Homo sapiens
  source 1..2826: mol_type = unassigned DNA
atggcagaagcaaatccccggagaggcaagatgaggttcagaaggaatgcggcttccttccctgggaacttgcacttggttttggttttacgtcctaccagctttcttcaacgaacgttcacagacattggattttggtttagtcaggaggattttatgcttaaattaccagttgttatgctgagctcagttagtgatttgctgacatacattgatgacaagcaattaacccctgagttaggcggcaccttgcagtactgccacagtgaatggatcatcttcagaaatgctatagaaaattttgccctcacagtgaaagaaatggctcagatgttacagtcctttggaactgaactggctgagacagaactaccagatgatattccctcaatagaagaaattctggcaattcgtgctgaaaggtatcatctgttgaagaatgatattacagctgtaaccaaagaaggaaaaattctgctaacaaatctggaagtgcctgacactgaaggagctgtcagttcaagactagaatgtcatcggcaaataagtggtgactggcaaactattaataagttgctgactcaagtacatgatatggaaacagcttttgatggattttgggaaaaacatcaattaaaaatggagcagtatctgcaactatggaagtttgagcaggattttcaacagcttgtgactgaagttgaatttctattaaaccaacaagcagaactggctgatgtaacagggactatagctcaagtaaaacaaaaaataaaaaaattggaaaacttagatgaaaattctcaggagctattatcaaaggcccagtttgtgatattacatggacacaagcttgcagcaaatcaccattatgcacttgatttaatctgccagaggtgcaatgagctacgttacctttctgatattttggttaatgagataaaagcaaaacggatacaactcagcaggaccttcaaaatgcataaactcctacagcaggctcgtcaatgctgtgatgaaggggaatgtcttctagctaatcaggaaatagataagtttcagtctaaagaagatgctcagaaagctctccaagacattgaaaattttcttgaaatggctctaccctttataaattatgaacctgaaacactgcagtatgaatttgatgtaatattatctcctgagcttaaggttcaaatgaagactatacaactcaagcttgaaaacattcgaagtatatttgagaaccagcaggctggtttcaggaacctggcagataagcatgtgaggccaatccaatttgtggtacccacacctgaaaatttggtcacatctgggacaccatttttttcatctaaacaagtgggagttggatactctttctttcaagcatgtaaacttttttcaaaagggaagaagacttggagacaaaatcagagcaacttaaaaattgaagtggtgcctgattgtcaggagaagagaagttctggtccatcctccagtttggacaatggcaatagcttggatgttttaaagaaccacgtactaaatgaactgatacagactgagagagtttatgttcgagaactgtatactgttttgttgggttatagagcggagatggataatccagagatgtttgatcttatgccacctctcctgagaaataaaaaggacattctctttggaaacatggcagaaatatatgaattccataacgacattttcttgagcagcctggaaaattgtgctcatgctccagaaagagtgggaccttgtttcctggaaaggaaggatgattttcagatgtatgcaaaatattgtcagaataagcccagatcagaaacaatttggaggaagtattcagaatgcgcatttttccaggaatgtcaaagaaagttaaaacacagacttagactggattcctatttactcaaaccagtgcaacgaatcactaaatatcagttattgttgaaggagctattaaaatatagcaaagactgtgaaggatctgctctgttgaagaaggcactcgatgcaatgctggatttactgaagtcagttaatgattctatgcatcagattgcaataaatggctatattggaaacttaaatgaactgggcaagatgataatgcaaggtggattcagcgtttggatagggcacaagaaaggtgctacaaaaatgaaggatttggctagattcaaaccaatgcagcgacaccttttcttgtatgaaaaagccattgttttttgcaaaaggcgtgttgaaagtggagaaggctctgacagatacccgtcatacagttttaaacactgttggaaaatggatgaagttggaatcactgaatatgtaaaaggtgataaccgcaagtttgaaatctggtatggtgaaaaggaagaagtttatattgtccaggcttctaatgtagatgtgaagatgacgtggctaaaagaaataagaaatattttgttgaagcagcaggaacttttgacagttaaaaaaagaaagcaacaggatcaattaacagaacgggataagtttcagatttctcttcagcagaatgatgaaaagcaacagggagcttttataagtactgaggaaactgaattggaacacaccagcactgtggtggaggtctgtgaggcaattgcgtcagttcaggcagaagcaaatacagtttggactgaggcatcacaatctgcagaaatctctgaagaacctgcggaatggtcaagcaactatttctaccctacttatgatgaaaatgaagaagaaaataggcccctcatgagacctgtgtcggagatggctctcctatattga

SEQ ID NO: 17310 - DNA, 2583 bp, Homo sapiens
  source 1..2583: mol_type = unassigned DNA
atggcagaagcaaatccccggagaggcaagatgaggttcagaaggaatgcggcttccttccctgggaacttgcacttggttttggttttacgtcctaccagctttcttcaacgaacgttcacagacattggattttggtttagtcaggaggattttatgcttaaattaccagttgttatgctgagctcagttagtgatttgctgacatacattgatgacaagcaattaacccctgagttaggcggcaccttgcagtactgccacagtgaatggatcatcttcagaaatgctatagaaaattttgccctcacagtgaaagaaatggctcagatgttacagtcctttggaactgaactggctgagacagaactaccagatgatattccctcaatagaagaaattctggcaattcgtgctgaaaggtatcatctgttgaagaatgatattacagctgtaaccaaagaaggaaaaattctgctaacaaatctggaagtgcctgacactgaaggagctgtcagttcaagactagaatgtcatcggcaaataagtggtgactggcaaactattaataagttgctgactcaagtacatgatatggaaacagcttttgatggattttgggaaaaacatcaattaaaaatggagcagtatctgcaactatggaagtttgagcaggattttcaacagcttgtgactgaagttgaatttctattaaaccaacaagcagaactggctgatgtaacagggactatagctcaagtaaaacaaaaaataaaaaaattggaaaacttagatgaaaattctcaggagctattatcaaaggcccagtttgtgatattacatggacacaagcttgcagcaaatcaccattatgcacttgatttaatctgccagaggtgcaatgagctacgttacctttctgatattttggttaatgagataaaagcaaaacggatacaactcagcaggaccttcaaaatgcataaactcctacagcaggctcgtcaatgctgtgatgaaggggaatgtcttctagctaatcaggaaatagataagtttcagtctaaagaagatgctcagaaagctctccaagacattgaaaattttcttgaaatggctctaccctttataaattatgaacctgaaacactgcagtatgaatttgatgtaatattatctcctgagcttaaggttcaaatgaagactatacaactcaagcttgaaaacattcgaagtatatttgagaaccagcaggctggtttcaggaacctggcagataagcatgtgaggccaatccaatttgtggtacccacacctgaaaatttggtcacatctgggacaccatttttttcatctaaacaagggaagaagacttggagacaaaatcagagcaacttaaaaattgaagtggtgcctgattgtcaggagaagagaagttctggtccatcctccagtttggacaatggcaatagcttggatgttttaaagaaccacgtactaaatgaactgatacagactgagagagtttatgttcgagaactgtatactgttttgttgggttatagagcggagatggataatccagagatgtttgatcttatgccacctctcctgagaaataaaaaggacattctctttggaaacatggcagaaatatatgaattccataacgacattttcttgagcagcctggaaaattgtgctcatgctccagaaagagtgggaccttgtttcctggaaaggaaggatgattttcagatgtatgcaaaatattgtcagaataagcccagatcagaaacaatttggaggaagtattcagaatgcgcatttttccaggaatgtcaaagaaagttaaaacacagacttagactggattcctatttactcaaaccagtgcaacgaatcactaaatatcagttattgttgaaggagctattaaaatatagcaaagactgtgaaggatctgctctgttgaagaaggcactcgatgcaatgctggatttactgaagtcagttaatgattctatgcatcagattgcaataaatggctatattggaaacttaaatgaactgggcaagatgataatgcaaggtggattcagcgtttggatagggcacaagaaaggtgctacaaaaatgaaggatttggctagattcaaaccaatgcagcgacaccttttcttgtatgaaaaagccattgttttttgcaaaaggcgtgttgaaagtggagaaggctctgacagatacccgtcatacagttttaaacactgttggaaaatggatgaagttggaatcactgaatatgtaaaaggtgataaccgcaagtttgaaatctggtatggtgaaaaggaagaagtttatattgtccaggcttctaatgtagatgtgaagatgacgtggctaaaagaaataagaaatattttgttgaagcagcaggaacttttgacagttaaaaaaagaaagcaacaggatcaattaacagaacgggataagtttcagatttctcttcagcagaatgatgaagacctgtgtcggagatggctctcctatattgatgaagctactatgtcaaatggcaagtag

SEQ ID NO: 17311 - DNA, 3688 bp, Homo sapiens
  source 1..3688: mol_type = unassigned DNA
gatctgtcagctgactaatcagggatagtggtttttttttttttttcctccccagcattgctgccactgtgctaatggaagcagccacggcagctttgtttgatagagatttttggctgccgtttttaaatactacccaagaagcagctcgtatttcatcaacgttgcgttgacaattggaaaagaaaagtgtaattgcgtacaggcgaaatggcagaagcaaatccccggagaggcaagatgaggttcagaaggaatgcggcttccttccctgggaacttgcacttggttttggttttacgtcctaccagctttcttcaacgaacgttcacagacattggattttggtttagtcaggaggattttatgcttaaattaccagttgttatgctgagctcagttagtgatttgctgacatacattgatgacaagcaattaacccctgagttaggcggcaccttgcagtactgccacagtgaatggatcatcttcagaaatgctatagaaaattttgccctcacagtgaaagaaatggctcagatgttacagtcctttggaactgaactggctgagacagaactaccagatgatattccctcaatagaagaaattctggcaattcgtgctgaaaggtatcatctgttgaagaatgatattacagctgtaaccaaagaaggaaaaattctgctaacaaatctggaagtgcctgacactgaaggagctgtcagttcaagactagaatgtcatcggcaaataagtggtgactggcaaactattaataagttgctgactcaagtacatgatatggaaacagcttttgatggattttgggaaaaacatcaattaaaaatggagcagtatctgcaactatggaagtttgagcaggattttcaacagcttgtgactgaagttgaatttctattaaaccaacaagcagaactggctgatgtaacagggactatagctcaagtaaaacaaaaaataaaaaaattggaaaacttagatgaaaattctcaggagctattatcaaaggcccagtttgtgatattacatggacacaagcttgcagcaaatcaccattatgcacttgatttaatctgccagaggtgcaatgagctacgttacctttctgatattttggttaatgagataaaagcaaaacggatacaactcagcaggaccttcaaaatgcataaactcctacagcaggctcgtcaatgctgtgatgaaggggaatgtcttctagctaatcaggaaatagataagtttcagtctaaagaagatgctcagaaagctctccaagacattgaaaattttcttgaaatggctctaccctttataaattatgaacctgaaacactgcagtatgaatttgatgtaatattatctcctgagcttaaggttcaaatgaagactatacaactcaagcttgaaaacattcgaagtatatttgagaaccagcaggctggtttcaggaacctggcagataagcatgtgaggccaatccaatttgtggtacccacacctgaaaatttggtcacatctgggacaccatttttttcatctaaacaagggaagaagacttggagacaaaatcagagcaacttaaaaattgaagtggtgcctgattgtcaggagaagagaagttctggtccatcctccagtttggacaatggcaatagcttggatgttttaaagaaccacgtactaaatgaactgatacagactgagagagtttatgttcgagaactgtatactgttttgttgggttatagagcggagatggataatccagagatgtttgatcttatgccacctctcctgagaaataaaaaggacattctctttggaaacatggcagaaatatatgaattccataacgacattttcttgagcagcctggaaaattgtgctcatgctccagaaagagtgggaccttgtttcctggaaaggaaggatgattttcagatgtatgcaaaatattgtcagaataagcccagatcagaaacaatttggaggaagtattcagaatgcgcatttttccaggaatgtcaaagaaagttaaaacacagacttagactggattcctatttactcaaaccagtgcaacgaatcactaaatatcagttattgttgaaggagctattaaaatatagcaaagactgtgaaggatctgctctgttgaagaaggcactcgatgcaatgctggatttactgaagtcagttaatgattctatgcatcagattgcaataaatggctatattggaaacttaaatgaactgggcaagatgataatgcaaggtggattcagcgtttggatagggcacaagaaaggtgctacaaaaatgaaggatttggctagattcaaaccaatgcagcgacaccttttcttgtatgaaaaagccattgttttttgcaaaaggcgtgttgaaagtggagaaggctctgacagatacccgtcatacagttttaaacactgttggaaaatggatgaagttggaatcactgaatatgtaaaaggtgataaccgcaagtttgaaatctggtatggtgaaaaggaagaagtttatattgtccaggcttctaatgtagatgtgaagatgacgtggctaaaagaaataagaaatattttgttgaagcagcaggaacttttgacagttaaaaaaagaaagcaacaggatcaattaacagaacgggataagtttcagatttctcttcagcagaatgatgaaaagcaacagggagcttttataagtactgaggaaactgaattggaacacaccagcactgtggtggaggtctgtgaggcaattgcgtcagttcaggcagaagcaaatacagtttggactgaggcatcacaatctgcagaaatctctgaagaacctgcggaatggtcaagcaactatttctaccctacttatgatgaaaatgaagaagaaaataggcccctcatgagacctgtgtcggagatggctctcctatattgatgaagctactatgtcaaatggcaagtagctctttcctgcctgcttctcagctcatttggaaaaatactgcgcaaaagacattgagctcaaatgatgcagatgttgttttcaggttaatggacacgcaaagaaaccacagcacatacttcttttctttcatttaataaagcttttaattatggtacgctgtctttttaaaatcatgtatttaatgtgtcagatattgtgcttgaaagattctcatctcagaatacttttggacttgaaaattatttcttctctactttgtaaccaaatgcaatcggtgtgccttggattatttagtttattaatgaattaagtcaaaattacggctgcaaaatggctaaggtcaagtaaagcacaacattatgatttaatatgcttttgttgaaaccacagcttttgtgcccattgttttaacttgtgtgaaacaatacaaagcccagaaattcttttcggggcatgagtaaattttgttcagggctactgtctgtatgtgcccagataaaattttcatgagagtagtttacaaaagccgtatttaaaagttaatattttcacactttttttctggatttctgcttataattaatgtaacttaaattagttgtgctctgctattttctgtatatttcatgttgtaattctttttttcaaataaaaattaattcttcaggtt

SEQ ID NO: 17312 - DNA, 3913 bp, Homo sapiens
  source 1..3913: mol_type = unassigned DNA
atgccccaagctgccgcttcggcgccgtggacctcagtgtcctgcggcaggatcccaggcctgccccagaacccagatggctgcactttcatgccgatagcccaggcgatccctctgcaggtggacatggccatggccctgcagcgcgtgaggattgccgagaagtacgggaagaactacctctgcctcctgcaagcagtcttcgtggcagaaaccgatctgctcctccgtataaaggacatcagtcatttcttaatgcaagacatcgccttcttgtctggtggccggggaaaggacaatgcttggatcattacgtttccagaaaactgtaattttagatgtataccagaggaagtaatagcaaaagtacttacttacctgacatctattgcaaggcaaaatggatcagactcccggtttaccattattctggatcgaagattggatacatggtcttctctcaaaatctctctccaaaaaatctcggcttccttccctgggaacttgcacttggttttggttttacgtcctaccagctttcttcaacgaacgttcacagacattggattttggtttagtcaggaggattttatgcttaaattaccagttgttatgctgagctcagttagtgatttgctgacatacattgatgacaagcaattaacccctgagttaggcggcaccttgcagtactgccacagtgaatggatcatcttcagaaatgctatagaaaattttgccctcacagtgaaagaaatggctcagatgttacagtcctttggaactgaactggctgagacagaactaccagatgatattccctcaatagaagaaattctggcaattcgtgctgaaaggtatcatctgttgaagaatgatattacagctgtaaccaaagaaggaaaaattctgctaacaaatctggaagtgcctgacactgaaggagctgtcagttcaagactagaatgtcatcggcaaataagtggtgactggcaaactattaataagttgctgactcaagtacatgatatggaaacagcttttgatggattttgggaaaaacatcaattaaaaatggagcagtatctgcaactatggaagtttgagcaggattttcaacagcttgtgactgaagttgaatttctattaaaccaacaagcagaactggctgatgtaacagggactatagctcaagtaaaacaaaaaataaaaaaattggaaaacttagatgaaaattctcaggagctattatcaaaggcccagtttgtgatattacatggacacaagcttgcagcaaatcaccattatgcacttgatttaatctgccagaggtgcaatgagctacgttacctttctgatattttggttaatgagataaaagcaaaacggatacaactcagcaggaccttcaaaatgcataaactcctacagcaggctcgtcaatgctgtgatgaaggggaatgtcttctagctaatcaggaaatagataagtttcagtctaaagaagatgctcagaaagctctccaagacattgaaaattttcttgaaatggctctaccctttataaattatgaacctgaaacactgcagtatgaatttgatgtaatattatctcctgagcttaaggttcaaatgaagactatacaactcaagcttgaaaacattcgaagtatatttgagaaccagcaggctggtttcaggaacctggcagataagcatgtgaggccaatccaatttgtggtacccacacctgaaaatttggtcacatctgggacaccatttttttcatctaaacaagggaagaagacttggagacaaaatcagagcaacttaaaaattgaagtggtgcctgattgtcaggagaagagaagttctggtccatcctccagtttggacaatggcaatagcttggatgttttaaagaaccacgtactaaatgaactgatacagactgagagagtttatgttcgagaactgtatactgttttgttgggttatagagcggagatggataatccagagatgtttgatcttatgccacctctcctgagaaataaaaaggacattctctttggaaacatggcagaaatatatgaattccataacgacattttcttgagcagcctggaaaattgtgctcatgctccagaaagagtgggaccttgtttcctggaaaggaaggatgattttcagatgtatgcaaaatattgtcagaataagcccagatcagaaacaatttggaggaagtattcagaatgcgcatttttccaggaatgtcaaagaaagttaaaacacagacttagactggattcctatttactcaaaccagtgcaacgaatcactaaatatcagttattgttgaaggagctattaaaatatagcaaagactgtgaaggatctgctctgttgaagaaggcactcgatgcaatgctggatttactgaagtcagttaatgattctatgcatcagattgcaataaatggctatattggaaacttaaatgaactgggcaagatgataatgcaaggtggattcagcgtttggatagggcacaagaaaggtgctacaaaaatgaaggatttggctagattcaaaccaatgcagcgacaccttttcttgtatgaaaaagccattgttttttgcaaaaggcgtgttgaaagtggagaaggctctgacagatacccgtcatacagttttaaacactgttggaaaatggatgaagttggaatcactgaatatgtaaaaggtgataaccgcaagtttgaaatctggtatggtgaaaaggaagaagtttatattgtccaggcttctaatgtagatgtgaagatgacgtggctaaaagaaataagaaatattttgttgaagcagcaggaacttttgacagttaaaaaaagaaagcaacaggatcaattaacagaacgggataagtttcagatttctcttcagcagaatgatgaaaagcaacagggagcttttataagtactgaggaaactgaattggaacacaccagcactgtggtggaggtctgtgaggcaattgcgtcagttcaggcagaagcaaatacagtttggactgaggcatcacaatctgcagaaatctctgaagaacctgcggaatggtcaagcaactatttctaccctacttatgatgaaaatgaagaagaaaataggcccctcatgagacctgtgtcggagatggctctcctatattgatgaagctactatgtcaaatggcaagtagctctttcctgcctgcttctcagctcatttggaaaaatactgcgcaaaagacattgagctcaaatgatgcagatgttgttttcaggttaatggacacgcaaagaaaccacagcacatacttcttttctttcatttaataaagcttttaattatggtacgctgtctttttaaaatcatgtatttaatgtgtcagatattgtgcttgaaagattctcatctcagaatacttttggacttgaaaattatttcttctctactttgtaaccaaatgcaatcggtgtgccttggattatttagtttattaatgaattaagtcaaaattacggctgcaaaatggctaaggtcaagtaaagcacaacattatgatttaatatgcttttgttgaaaccacagcttttgtgcccattgttttaacttgtgtgaaacaatacaaagcccagaaattcttttcggggcatgagtaaattttgttcagggctactgtctgtatgtgcccagataaaattttcatgagagtagtttacaaaagccgtatttaaaagttaatattttcacactttttttctggatttctgcttataattaatgtaacttaaattagttgtgctctgctattttctgtatatttcatgttgtaattctttttttcaaataaaaattaattcttcaggtt

SEQ ID NO: 17313 - DNA, 3813 bp, Homo sapiens
  source 1..3813: mol_type = unassigned DNA
catgttaagagcaagaaggcttttgttcttggagcaggcagagagtattgtacattcttttggccgaggaaacagaatgagctgcgacagtcttaaggacaaacatttgtgaaaccgatctgctcctccgtataaaggacatcagtcatttcttaatgcaagacatcgccttcttgtctggtggccggggaaaggacaatgcttggatcattacgtttccagaaaactgtaattttagatgtataccagaggaagtaatagcaaaagtacttacttacctgacatctattgcaaggcaaaatggatcagactcccggtttaccattattctggatcgaagattggatacatggtcttctctcaaaatctctctccaaaaaatctcggcttccttccctgggaacttgcacttggttttggttttacgtcctaccagctttcttcaacgaacgttcacagacattggattttggtttagtcaggaggattttatgcttaaattaccagttgttatgctgagctcagttagtgatttgctgacatacattgatgacaagcaattaacccctgagttaggcggcaccttgcagtactgccacagtgaatggatcatcttcagaaatgctatagaaaattttgccctcacagtgaaagaaatggctcagatgttacagtcctttggaactgaactggctgagacagaactaccagatgatattccctcaatagaagaaattctggcaattcgtgctgaaaggtatcatctgttgaagaatgatattacagctgtaaccaaagaaggaaaaattctgctaacaaatctggaagtgcctgacactgaaggagctgtcagttcaagactagaatgtcatcggcaaataagtggtgactggcaaactattaataagttgctgactcaagtacatgatatggaaacagcttttgatggattttgggaaaaacatcaattaaaaatggagcagtatctgcaactatggaagtttgagcaggattttcaacagcttgtgactgaagttgaatttctattaaaccaacaagcagaactggctgatgtaacagggactatagctcaagtaaaacaaaaaataaaaaaattggaaaacttagatgaaaattctcaggagctattatcaaaggcccagtttgtgatattacatggacacaagcttgcagcaaatcaccattatgcacttgatttaatctgccagaggtgcaatgagctacgttacctttctgatattttggttaatgagataaaagcaaaacggatacaactcagcaggaccttcaaaatgcataaactcctacagcaggctcgtcaatgctgtgatgaaggggaatgtcttctagctaatcaggaaatagataagtttcagtctaaagaagatgctcagaaagctctccaagacattgaaaattttcttgaaatggctctaccctttataaattatgaacctgaaacactgcagtatgaatttgatgtaatattatctcctgagcttaaggttcaaatgaagactatacaactcaagcttgaaaacattcgaagtatatttgagaaccagcaggctggtttcaggaacctggcagataagcatgtgaggccaatccaatttgtggtacccacacctgaaaatttggtcacatctgggacaccatttttttcatctaaacaagggaagaagacttggagacaaaatcagagcaacttaaaaattgaagtggtgcctgattgtcaggagaagagaagttctggtccatcctccagtttggacaatggcaatagcttggatgttttaaagaaccacgtactaaatgaactgatacagactgagagagtttatgttcgagaactgtatactgttttgttgggttatagagcggagatggataatccagagatgtttgatcttatgccacctctcctgagaaataaaaaggacattctctttggaaacatggcagaaatatatgaattccataacgacattttcttgagcagcctggaaaattgtgctcatgctccagaaagagtgggaccttgtttcctggaaaggaaggatgattttcagatgtatgcaaaatattgtcagaataagcccagatcagaaacaatttggaggaagtattcagaatgcgcatttttccaggaatgtcaaagaaagttaaaacacagacttagactggattcctatttactcaaaccagtgcaacgaatcactaaatatcagttattgttgaaggagctattaaaatatagcaaagactgtgaaggatctgctctgttgaagaaggcactcgatgcaatgctggatttactgaagtcagttaatgattctatgcatcagattgcaataaatggctatattggaaacttaaatgaactgggcaagatgataatgcaaggtggattcagcgtttggatagggcacaagaaaggtgctacaaaaatgaaggatttggctagattcaaaccaatgcagcgacaccttttcttgtatgaaaaagccattgttttttgcaaaaggcgtgttgaaagtggagaaggctctgacagatacccgtcatacagttttaaacactgttggaaaatggatgaagttggaatcactgaatatgtaaaaggtgataaccgcaagtttgaaatctggtatggtgaaaaggaagaagtttatattgtccaggcttctaatgtagatgtgaagatgacgtggctaaaagaaataagaaatattttgttgaagcagcaggaacttttgacagttaaaaaaagaaagcaacaggatcaattaacagaacgggataagtttcagatttctcttcagcagaatgatgaaaagcaacagggagcttttataagtactgaggaaactgaattggaacacaccagcactgtggtggaggtctgtgaggcaattgcgtcagttcaggcagaagcaaatacagtttggactgaggcatcacaatctgcagaaatctctgaagaacctgcggaatggtcaagcaactatttctaccctacttatgatgaaaatgaagaagaaaataggcccctcatgagacctgtgtcggagatggctctcctatattgatgaagctactatgtcaaatggcaagtagctctttcctgcctgcttctcagctcatttggaaaaatactgcgcaaaagacattgagctcaaatgatgcagatgttgttttcaggttaatggacacgcaaagaaaccacagcacatacttcttttctttcatttaataaagcttttaattatggtacgctgtctttttaaaatcatgtatttaatgtgtcagatattgtgcttgaaagattctcatctcagaatacttttggacttgaaaattatttcttctctactttgtaaccaaatgcaatcggtgtgccttggattatttagtttattaatgaattaagtcaaaattacggctgcaaaatggctaaggtcaagtaaagcacaacattatgatttaatatgcttttgttgaaaccacagcttttgtgcccattgttttaacttgtgtgaaacaatacaaagcccagaaattcttttcggggcatgagtaaattttgttcagggctactgtctgtatgtgcccagataaaattttcatgagagtagtttacaaaagccgtatttaaaagttaatattttcacactttttttctggatttctgcttataattaatgtaacttaaattagttgtgctctgctattttctgtatatttcatgttgtaattctttttttcaaataaaaattaattcttcaggtt

SEQ ID NO: 17314 - DNA, 1988 bp, Homo sapiens
  source 1..1988: mol_type = unassigned DNA
ccacgtactaaatgaactgatacagactgagagagtttatgttcgagaactgtatactgttttgttgggttatagagcggagatggataatccagagatgtttgatcttatgccacctctcctgagaaataaaaaggacattctctttggaaacatggcagaaatatatgaattccataacgacattttcttgagcagcctggaaaattgtgctcatgctccagaaagagtgggaccttgtttcctggaaaggaaggatgattttcagatgtatgcaaaatattgtcagaataagcccagatcagaaacaatttggaggaagtattcagaatgcgcatttttccaggaatgtcaaagaaagttaaaacacagacttagactggattcctatttactcaaaccagtgcaacgaatcactaaatatcagttattgttgaaggagctattaaaatatagcaaagactgtgaaggatctgctctgttgaagaaggcactcgatgcaatgctggatttactgaagtcagttaatgattctatgcatcagattgcaataaatggctatattggaaacttaaatgaactgggcaagatgataatgcaaggtggattcagcgtttggatagggcacaagaaaggtgctacaaaaatgaaggatttggctagattcaaaccaatgcagcgacaccttttcttgtatgaaaaagccattgttttttgcaaaaggcgtgttgaaagtggagaaggctctgacagatacccgtcatacagttttaaacactgttggaaaatggatgaagttggaatcactgaatatgtaaaaggtgataaccgcaagtttgaaatctggtatggtgaaaaggaagaagtttatattgtccaggcttctaatgtagatgtgaagatgacgtggctaaaagaaataagaaatattttgttgaagcagcaggaacttttgacagttaaaaaaagaaagcaacaggatcaattaacagaacgggataagtttcagatttctcttcagcagaatgatgaaaagcaacagggagcttttataagtactgaggaaactgaattggaacacaccagcactgtggtggaggtctgtgaggcaattgcgtcagttcaggcagaagcaaatacagtttggactgaggcatcacaatctgcagaaatctctgaagaacctgcggaatggtcaagcaactatttctaccctacttatgatgaaaatgaagaagaaaataggcccctcatgagacctgtgtcggagatggctctcctatattgatgaagctactatgtcaaatggcaagtagctctttcctgcctgcttctcagctcatttggaaaaatactgcgcaaaagacattgagctcaaatgatgcagatgttgttttcaggttaatggacacgcaaagaaaccacagcacatacttcttttctttcatttaataaagcttttaattatggtacgctgtctttttaaaatcatgtatttaatgtgtcagatattgtgcttgaaagattctcatctcagaatacttttggacttgaaaattatttcttctctactttgtaaccaaatgcaatcggtgtgccttggattatttagtttattaatgaattaagtcaaaattacggctgcaaaatggctaaggtcaagtaaagcacaacattatgatttaatatgcttttgttgaaaccacagcttttgtgcccattgttttaacttgtgtgaaacaatacaaagcccagaaattcttttcggggcatgagtaaattttgttcagggctactgtctgtatgtgcccagataaaattttcatgagagtagtttacaaaagccgtatttaaaagttaatattttcacactttttttctggatttctgcttataattaatgtaacttaaattagttgtgctctgctattttctgtatatttcatgttgtaattctttttttcaaataaaaattaattcttcaggtt

SEQ ID NO: 17315 - DNA, 1916 bp, Homo sapiens
  source 1..1916: mol_type = unassigned DNA
gttcaaatgaagactatacaactcaagcttgaaaacattcgaagtatatttgagaaccagcaggctggtttcaggaacctggcagataagcatgtgaggccaatccaatttgtggtacccacacctgaaaatttggtcacatctgggacaccatttttttcatctaaacaagggaagaagacttggagacaaaatcagagcaacttaaaaattgaagtggtgcctgattgtcaggagaagagaagttctggtccatcctccagtttggacaatggcaatagcttggatgttttaaagaaccacgtactaaatgaactgatacagactgagagagtttatgttcgagaactgtatactgttttgttgggttatagagcggagatggataatccagagatgtttgatcttatgccacctctcctgagaaataaaaaggacattctctttggaaacatggcagaaatatatgaattccataacgacattttcttgagcagcctggaaaattgtgctcatgctccagaaagagtgggaccttgtttcctggaaaggaaggatgattttcagatgtatgcaaaatattgtcagaataagcccagatcagaaacaatttggaggaagtattcagaatgcgcatttttccaggaatgtcaaagaaagttaaaacacagacttagactggattcctatttactcaaaccagtgcaacgaatcactaaatatcagttattgttgaaggagctattaaaatatagcaaagactgtgaaggatctgctctgttgaagaaggcactcgatgcaatgctggatttactgaagtcagttaatgattctatgcatcagattgcaataaatggctatattggaaacttaaatgaactgggcaagatgataatgcaaggtggattcagcgtttggatagggcacaagaaaggtgctacaaaaatgaaggatttggctagattcaaaccaatgcagcgacaccttttcttgtatgaaaaagccattgttttttgcaaaaggcgtgttgaaagtggagaaggctctgacagatacccgtcatacagttttaaacactgttggaaaatggatgaagttggaatcactgaatatgtaaaaggtgataaccgcaagtttgaaatctggtatggtgaaaaggaagaagtttatattgtccaggcttctaatgtagatgtgaagatgacgtggctaaaagaaataagaaatattttgttgaagcagcaggaacttttgacagttaaaaaaagaaagcaacaggatcaattaacagaacgggataagtttcagatttctcttcagcagaatgatgaaaagcaacagggagcttttataagtactgaggaaactgaattggaacacaccagcactgtggtggaggtctgtgaggcaattgcgtcagttcaggcagaagcaaatacagtttggactgaggcatcacaatctgcagaaatctctgaagaacctgcggaatggtcaagcaactatttctaccctacttatgatgaaaatgaagaagaaaataggcccctcatgagacctgtgtcggagatggctctcctatattgatgaagctactatgtcaaatggcaagtagctctttcctgcctgcttctcagctcatttggaaaaatactgcgcaaaagacattgagctcaaatgatgcagatgttgttttcaggttaatggacacgcaaagaaaccacagcacatacttcttttctttcatttaataaagcttttaattatggtacgctgtctttttaaaatcatgtatttaatgtgtcagatattgtgcttgaaagattctcatctcagaatacttttggacttgaaaattatttcttctctactttgtaaccaaatgcaatcggtgtgccttggattatttagtttat

SEQ ID NO: 17316 - DNA, 3346 bp, Homo sapiens
  source 1..3346: mol_type = unassigned DNA
aaactttttttcatgttaagagcaagaaggcttttgttcttggagcaggcagagagtattgtacattcttttggccgaggaaacagaatgagctgcgacagtcttaaggacaaacatttgtgaaaccgatctgctcctccgtataaaggacatcagtcatttcttaatgcaagacatcgccttcttgtctggtggccggggaaaggacaatgcttggatcattacgtttccagaaaactgtaattttagatgtataccagaggaagtaatagcaaaagtacttacttacctgacatctattgcaaggcaaaatggatcagactcccggtttaccattattctggatcgaagattggatacatggtcttctctcaaaatctctctccaaaaaatctcggcttccttccctgggaacttgcacttggttttggttttacgtcctaccagctttcttcaacgaacgttcacagacattggattttggtttagtcaggaggattttatgcttaaattaccagttgttatgctgagctcagttagtgatttgctgacatacattgatgacaagcaattaacccctgagttaggcggcaccttgcagtactgccacagtgaatggatcatcttcagaaatgctatagaaaattttgccctcacagtgaaagaaatggctcagatgttacagtcctttggaactgaactggctgagacagaactaccagatgatattccctcaatagaagaaattctggcaattcgtgctgaaaggtatcatctgttgaagaatgatattacagctgtaaccaaagaaggaaaaattctgctaacaaatctggaagtgcctgacactgaaggagctgtcagttcaagactagaatgtcatcggcaaataagtggtgactggcaaactattaataagttgctgactcaagtacatgatatggaaacagcttttgatggattttgggaaaaacatcaattaaaaatggagcagtatctgcaactatggaagtttgagcaggattttcaacagcttgtgactgaagttgaatttctattaaaccaacaagcagaactggctgatgtaacagggactatagctcaagtaaaacaaaaaataaaaaaattggaaaacttagatgaaaattctcaggagctattatcaaaggcccagtttgtgatattacatggacacaagcttgcagcaaatcaccattatgcacttgatttaatctgccagaggtgcaatgagctacgttacctttctgatattttggttaatgagataaaagcaaaacggatacaactcagcaggaccttcaaaatgcataaactcctacagcaggctcgtcaatgctgtgatgaaggggaatgtcttctagctaatcaggaaatagataagtttcagtctaaagaagatgctcagaaagctctccaagacattgaaaattttcttgaaatggctctaccctttataaattatgaacctgaaacactgcagtatgaatttgatgtaatattatctcctgagcttaaggttcaaatgaagactatacaactcaagcttgaaaacattcgaagtatatttgagaaccagcaggctggtttcaggaacctggcagataagcatgtgaggccaatccaatttgtggtacccacacctgaaaatttggtcacatctgggacaccatttttttcatctaaacaagtgggagttggatactctttctttcaagcatgtaaacttttttcaaaagggaagaagacttggagacaaaatcagagcaacttaaaaattgaagtggtgcctgattgtcaggagaagagaagttctggtccatcctccagtttggacaatggcaatagcttggatgttttaaagaaccacgtactaaatgaactgatacagactgagagagtttatgttcgagaactgtatactgttttgttgggttatagagcggagatggataatccagagatgtttgatcttatgccacctctcctgagaaataaaaaggacattctctttggaaacatggcagaaatatatgaattccataacgacattttcttgagcagcctggaaaattgtgctcatgctccagaaagagtgggaccttgtttcctggaaaggaaggatgattttcagatgtatgcaaaatattgtcagaataagcccagatcagaaacaatttggaggaagtattcagaatgcgcatttttccaggaatgtcaaagaaagttaaaacacagacttagactggattcctatttactcaaaccagtgcaacgaatcactaaatatcagttattgttgaaggagctattaaaatatagcaaagactgtgaaggatctgctctgttgaagaaggcactcgatgcaatgctggatttactgaagtcagttaatgattctatgcatcagattgcaataaatggctatattggaaacttaaatgaactgggcaagatgataatgcaaggtggattcagcgtttggatagggcacaagaaaggtgctacaaaaatgaaggatttggctagattcaaaccaatgcagcgacaccttttcttgtatgaaaaagccattgttttttgcaaaaggcgtgttgaaagtggagaaggctctgacagatacccgtcatacagttttaaacactgttggaaaatggatgaagttggaatcactgaatatgtaaaaggtgataaccgcaagtttgaaatctggtatggtgaaaaggaagaagtttatattgtccaggcttctaatgtagatgtgaagatgacgtggctaaaagaaataagaaatattttgttgaagcagcaggaacttttgacagttaaaaaaagaaagcaacaggatcaattaacagaacgggataagtttcagatttctcttcagcagaatgatgaaaagcaacagggagcttttataagtactgaggaaactgaattggaacacaccagcactgtggtggaggtctgtgaggcaattgcgtcagttcaggcagaagcaaatacagtttggactgaggcatcacaatctgcagaaatctctgaagaacctgcggaatggtcaagcaactatttctaccctacttatgatgaaaatgaagaagaaaataggcccctcatgagacctgtgtcggagatggctctcctatattgatgaagctactatgtcaaatggcaagtagctctttcctgcctgcttctcagctcatttggaaaaatactgcgcaaaagacattgagctcaaatgatgcagatgttgttttcaggttaatggacacgcaaagaaaccacagcacatacttcttttctttcatttaataaagctttt

SEQ ID NO: 17317 - DNA, 3945 bp, Homo sapiens
  source 1..3945: mol_type = unassigned DNA
cctgggttcgccaaggcgggcggccaggcacatgccccaagctgccgcttcggcgccgtggacctcagtgtcctgcggcaggatcccaggcctgccccagaacccagatggctgcactttcatgccgatagcccaggcgatccctctgcaggtggacatggccatggccctgcagcgcgtgaggattgccgagaagtacgggaagaactacctctgcctcctgcaagcagtcttcgtggcagaaaccgatctgctcctccgtataaaggacatcagtcatttcttaatgcaagacatcgccttcttgtctggtggccggggaaaggacaatgcttggatcattacgtttccagaaaactgtaattttagatgtataccagaggaagtaatagcaaaagtacttacttacctgacatctattgcaaggcaaaatggatcagactcccggtttaccattattctggatcgaagattggatacatggtcttctctcaaaatctctctccaaaaaatctcggcttccttccctgggaacttgcacttggttttggttttacgtcctaccagctttcttcaacgaacgttcacagacattggattttggtttagtcaggaggattttatgcttaaattaccagttgttatgctgagctcagttagtgatttgctgacatacattgatgacaagcaattaacccctgagttaggcggcaccttgcagtactgccacagtgaatggatcatcttcagaaatgctatagaaaattttgccctcacagtgaaagaaatggctcagatgttacagtcctttggaactgaactggctgagacagaactaccagatgatattccctcaatagaagaaattctggcaattcgtgctgaaaggtatcatctgttgaagaatgatattacagctgtaaccaaagaaggaaaaattctgctaacaaatctggaagtgcctgacactgaaggagctgtcagttcaagactagaatgtcatcggcaaataagtggtgactggcaaactattaataagttgctgactcaagtacatgatatggaaacagcttttgatggattttgggaaaaacatcaattaaaaatggagcagtatctgcaactatggaagtttgagcaggattttcaacagcttgtgactgaagttgaatttctattaaaccaacaagcagaactggctgatgtaacagggactatagctcaagtaaaacaaaaaataaaaaaattggaaaacttagatgaaaattctcaggagctattatcaaaggcccagtttgtgatattacatggacacaagcttgcagcaaatcaccattatgcacttgatttaatctgccagaggtgcaatgagctacgttacctttctgatattttggttaatgagataaaagcaaaacggatacaactcagcaggaccttcaaaatgcataaactcctacagcaggctcgtcaatgctgtgatgaaggggaatgtcttctagctaatcaggaaatagataagtttcagtctaaagaagatgctcagaaagctctccaagacattgaaaattttcttgaaatggctctaccctttataaattatgaacctgaaacactgcagtatgaatttgatgtaatattatctcctgagcttaaggttcaaatgaagactatacaactcaagcttgaaaacattcgaagtatatttgagaaccagcaggctggtttcaggaacctggcagataagcatgtgaggccaatccaatttgtggtacccacacctgaaaatttggtcacatctgggacaccatttttttcatctaaacaagggaagaagacttggagacaaaatcagagcaacttaaaaattgaagtggtgcctgattgtcaggagaagagaagttctggtccatcctccagtttggacaatggcaatagcttggatgttttaaagaaccacgtactaaatgaactgatacagactgagagagtttatgttcgagaactgtatactgttttgttgggttatagagcggagatggataatccagagatgtttgatcttatgccacctctcctgagaaataaaaaggacattctctttggaaacatggcagaaatatatgaattccataacgacattttcttgagcagcctggaaaattgtgctcatgctccagaaagagtgggaccttgtttcctggaaaggaaggatgattttcagatgtatgcaaaatattgtcagaataagcccagatcagaaacaatttggaggaagtattcagaatgcgcatttttccaggaatgtcaaagaaagttaaaacacagacttagactggattcctatttactcaaaccagtgcaacgaatcactaaatatcagttattgttgaaggagctattaaaatatagcaaagactgtgaaggatctgctctgttgaagaaggcactcgatgcaatgctggatttactgaagtcagttaatgattctatgcatcagattgcaataaatggctatattggaaacttaaatgaactgggcaagatgataatgcaaggtggattcagcgtttggatagggcacaagaaaggtgctacaaaaatgaaggatttggctagattcaaaccaatgcagcgacaccttttcttgtatgaaaaagccattgttttttgcaaaaggcgtgttgaaagtggagaaggctctgacagatacccgtcatacagttttaaacactgttggaaaatggatgaagttggaatcactgaatatgtaaaaggtgataaccgcaagtttgaaatctggtatggtgaaaaggaagaagtttatattgtccaggcttctaatgtagatgtgaagatgacgtggctaaaagaaataagaaatattttgttgaagcagcaggaacttttgacagttaaaaaaagaaagcaacaggatcaattaacagaacgggataagtttcagatttctcttcagcagaatgatgaaaagcaacagggagcttttataagtactgaggaaactgaattggaacacaccagcactgtggtggaggtctgtgaggcaattgcgtcagttcaggcagaagcaaatacagtttggactgaggcatcacaatctgcagaaatctctgaagaacctgcggaatggtcaagcaactatttctaccctacttatgatgaaaatgaagaagaaaataggcccctcatgagacctgtgtcggagatggctctcctatattgatgaagctactatgtcaaatggcaagtagctctttcctgcctgcttctcagctcatttggaaaaatactgcgcaaaagacattgagctcaaatgatgcagatgttgttttcaggttaatggacacgcaaagaaaccacagcacatacttcttttctttcatttaataaagcttttaattatggtacgctgtctttttaaaatcatgtatttaatgtgtcagatattgtgcttgaaagattctcatctcagaatacttttggacttgaaaattatttcttctctactttgtaaccaaatgcaatcggtgtgccttggattatttagtttattaatgaattaagtcaaaattacggctgcaaaatggctaaggtcaagtaaagcacaacattatgatttaatatgcttttgttgaaaccacagcttttgtgcccattgttttaacttgtgtgaaacaatacaaagcccagaaattcttttcggggcatgagtaaattttgttcagggctactgtctgtatgtgcccagataaaattttcatgagagtagtttacaaaagccgtatttaaaagttaatattttcacactttttttctggatttctgcttataattaatgtaacttaaattagttgtgctctgctattttctgtatatttcatgttgtaattctttttttcaaataaaaattaattcttcaggtta

SEQ ID NO: 17318 - DNA, 3461 bp, Homo sapiens
  source 1..3461: mol_type = unassigned DNA
aggacatgcctgatcttcttgagcagtccagcacaagctaatccacaaggttcaatcaggctaagtaattggaggaatgtgttaactctgaattacaaggagcagaagggaaggatctgtcagctgactaatcagggatagtggtttttttttttttttcctccccagcattgctgccactgtgctaatggaagcagccacggcagctttgtttgatagagatttttggctgccgtttttaaatactacccaagaagcagctcgtatttcatcaacgttgcgttgacaattggaaaagaaaagtgtaattgcgtacaggcgaaatggcagaagcaaatccccggagaggcaagatgaggttcagaaggaatgcggcttccttccctgggaacttgcacttggttttggttttacgtcctaccagctttcttcaacgaacgttcacagacattggattttggtttagtcaggaggattttatgcttaaattaccagctatagaaaattttgccctcacagtgaaagaaatggctcagatgttacagtcctttggaactgaactggctgagacagaactaccagatgatattccctcaatagaagaaattctggcaattcgtgctgaaaggtatcatctgttgaagaatgatattacagctgtaaccaaagaaggaaaaattctgctaacaaatctggaagtgcctgacactgaaggagctgtcagttcaagactagaatgtcatcggcaaataagtggtgactggcaaactattaataagttgctgactcaagtacatgatatggaaacagcttttgatggattttgggaaaaacatcaattaaaaatggagcagtatctgcaactatggaagtttgagcaggattttcaacagcttgtgactgaagttgaatttctattaaaccaacaagcagaactggctgatgtaacagggactatagctcaagtaaaacaaaaaataaaaaaattggaaaacttagatgaaaattctcaggagctattatcaaaggcccagtttgtgatattacatggacacaagcttgcagcaaatcaccattatgcacttgatttaatctgccagaggtgcaatgagctacgttacctttctgatattttggttaatgagataaaagcaaaacggatacaactcagcaggaccttcaaaatgcataaactcctacagcaggctcgtcaatgctgtgatgaaggggaatgtcttctagctaatcaggaaatagataagtttcagtctaaagaagatgctcagaaagctctccaagacattgaaaattttcttgaaatggctctaccctttataaattatgaacctgaaacactgcagtatgaatttgatgtaatattatctcctgagcttaaggttcaaatgaagactatacaactcaagcttgaaaacattcgaagtatatttgagaaccagcaggctggtttcaggaacctggcagataagcatgtgaggccaatccaatttgtggtacccacacctgaaaatttggtcacatctgggacaccatttttttcatctaaacaagggaagaagacttggagacaaaatcagagcaacttaaaaattgaagtggtgcctgattgtcaggagaagagaagttctggtccatcctccagtttggacaatggcaatagcttggatgttttaaagaaccacgtactaaatgaactgatacagactgagagagtttatgttcgagaactgtatactgttttgttgggttatagagcggagatggataatccagagatgtttgatcttatgccacctctcctgagaaataaaaaggacattctctttggaaacatggcagaaatatatgaattccataacgacattttcttgagcagcctggaaaattgtgctcatgctccagaaagagtgggaccttgtttcctggaaaggaaggatgattttcagatgtatgcaaaatattgtcagaataagcccagatcagaaacaatttggaggaagtattcagaatgcgcatttttccaggaatgtcaaagaaagttaaaacacagacttagactggattcctatttactcaaaccagtgcaacgaatcactaaatatcagttattgttgaaggagctattaaaatatagcaaagactgtgaaggatctgctctgttgaagaaggcactcgatgcaatgctggatttactgaagtcagttaatgattctatgcatcagattgcaataaatggctatattggaaacttaaatgaactgggcaagatgataatgcaaggtggattcagcgtttggatagggcacaagaaaggtgctacaaaaatgaaggatttggctagattcaaaccaatgcagcgacaccttttcttgtatgaaaaagccattgttttttgcaaaaggcgtgttgaaagtggagaaggctctgacagatacccgtcatacagttttaaacactgttggaaaatggatgaagttggaatcactgaatatgtaaaaggtgataaccgcaagtttgaaatctggtatggtgaaaaggaagaagtttatattgtccaggcttctaatgtagatgtgaagatgacgtggctaaaagaaataagaaatattttgttgaagcagcaggaacttttgacagttaaaaaaagaaagcaacaggatcaattaacagaacgggataagtttcagatttctcttcagcagaatgatgaagacctgtgtcggagatggctctcctatattgatgaagctactatgtcaaatggcaagtagctctttcctgcctgcttctcagctcatttggaaaaatactgcgcaaaagacattgagctcaaatgatgcagatgttgttttcaggttaatggacacgcaaagaaaccacagcacatacttcttttctttcatttaataaagcttttaattatggtacgctgtctttttaaaatcatgtatttaatgtgtcagatattgtgcttgaaagattctcatctcagaatacttttggacttgaaaattatttcttctctactttgtaaccaaatgcaatcggtgtgccttggattatttagtttattaatgaattaagtcaaaattacggctgcaaaatggctaaggtcaagtaaagcacaacattatgatttaatatgcttttgttgaaaccacagcttttgtgcccattgttttaacttgtgtgaaacaatacaaagcccagaaattcttttcggggcatgagtaaattttgttcagggctactgtctgtatgtgcccagataaaattttcatgagagtagtttacaaaagccgtatttaaaagttaatattttcacactttttttctggatttctgcttataattaatgtaacttaaattagttgtgctctgctattttctgtatatttcatgttgtaattctttttttcaaataaaaattaattcttcaggtt

SEQ ID NO: 17319 - DNA, 3413 bp, Homo sapiens
  source 1..3413: mol_type = unassigned DNA
ggctgccctgcagaggccaggtctgcccagcaaacccaggaaggtgtggcgtccccgcttcgcggccaagatggtgctggtgctgcgccatcctttgtgtgcccgggaagggcgttccgggagccgggtcgggggctcctgactcgcactgggcagcatgacggtgcgccggctgtcactgctgtgccgggacctctgggcgctgtggctgctgctgaaggccggcgcagatgaaatcatgcaccaggacatcgtcccgctctgtgctgccgacatccaggaccagctaaagaagcgctttgcttacctgtccggtgggcgggggcaggacggaagcccggttatcaccttccctgactacccggccttcagcgagattccggacaaggagttccagaatgtcatgacctacctcaccagcatccccagcctgcaggacgctggcatcggattcatcctggtgatagaccggcgacgggacaaatggacctccgtgaaggcgtccgtcctgcgcatcgcagcatctttcccggcaaacctgcagctcgtcctcgtgcttcgcccgacgggttttttccaaaggactctctccgacatcgctttcaaattcaatagagatgactttaagatgaaggtgccggtcataatgctgagctccgtaccagacttacacggttacatcgataagtcgcagctgaccgaggacctgggtgggaccctggactactgccactcccggtggctgtgccagcgcacggccatcgaaagtttcgccctcatggtgaagcagacggctcagatgctgcagtccttcgggaccgagctggctgaaacagagctgcccaatgacgtccagtcgacaagctcagtgctgtgtgcgcacacagagaagaaggacaaggcgaaggaggatttgaggctggcactgaaagaggggcacagtgtcctggagagcctcagggagctgcaggctgagggctcagagcccagtgtgaaccaggaccagcttgacaaccaggccaccgtgcagaggctcctggcccagctgaacgaaaccgaggctgccttcgatgagttctgggcaaagcatcagcagaaactggagcagtgtctgcagctccggcactttgagcagggcttccgggaggtcaaagccatcttggacgcagcgtcccagaagatagcaaccttcacagacatcggcaacagcctggcgcatgtggagcacctgctgagggacctggccagcttcgaggagaaatcaggcgtggccgtggagagggcccgggccctgtctctggacggcgagcagctcattgggaacaagcactacgcggtagactccatccgcccaaagtgccaggagctccggcacctctgtgaccagttctctgcggagatcgcaaggaggagggggctgctcagcaagtccctggagctgcaccgccgcctggagacgtccatgaagtggtgtgatgaagggatttacctgctggcctcacaacctgtggacaagtgccagtcccaggacggcgcggaggctgccctccaggaaatcgagaagtttttggagaccggtgcggaaaataagatccaggagctcaacgcgatttacaaggaatacgaatccatcctcaaccaagatctcatggagcacgtgcgaaaggtcttccagaagcaggcaagcatggaggaggtgttccaccgcaggcaggccagcctgaagaagctggcggccaggcagacgcggcccgtgcagccggtggcccccagacccgaggcactggcaaagtcgccctgcccctccccaggcattcggcgaggctctgagaactccagctccgagggcggtgcgctccggagagggccctaccggagggccaagagtgagatgagtgagagccggcagggccgcggctcagcgggggaggaggaggaaagcctggccatcctgcgcaggcacgtgatgagcgagctcctggacacagaacgggcctacgtggaggagctgctgtgcgtcctggagggctacgccgcggagatggataacccactgatggctcacctcctgtcaacaggccttcacaacaagaaggatgttttgtttggaaacatggaggaaatctatcacttccacaacaggatattcctcagggagctggaaaactacactgactgcccagaactggttggaagatgctttctggagaggatggaagatttccagatctatgagaagtactgtcagaacaagccccgctctgagagcctgtggagacagtgctccgactgcccgtttttccaggaatgccagagaaagctggaccacaagctgagcctggactcctacctgctgaagccagtgcagaggatcaccaagtaccagctgctgctcaaggaaatgctgaaatacagcaggaactgcgagggggctgaggacctgcaggaggcgctgagctccatcctgggcatcctgaaggccgtgaacgactccatgcacctcatcgctatcaccggctatgacgggaatctcggcgacctgggcaagctgctgatgcagggctcgttcagcgtctggaccgaccacaagaggggccacaccaaggtgaaggagctggccaggttcaagcccatgcagcggcacctgttcctgcacgagaaggcagtgctcttctgcaagaagagggaggagaatggggaggggtatgagaaagctccctcctacagctacaagcagtccttaaacatggctgccgttggcattacggagaacgtgaagggagatgctaagaagttcgagatctggtacaacgcgcgcgaggaggtctacatcgtccaggcgccaactcctgagattaaagccgcgtgggtgaatgaaattcggaaagtgctgaccagccagctgcaggcttgtagagaagccagccagcaccgggcgctggagcagtcacagagcctgcccctgccggccccgaccagcaccagtccctcaagaggaaactcaaggaacatcaagaagctggaagaaaggaaaacagaccccctaagcctggagggatacgtcagctcagcgccactgacaaagccccccgaaaagggcaaagagccctaggaccccacagaagagcccctccctctccattgctctgcacccctgcatcagcaaggccagccccagaaggagcctcggccgagcgtgcaacccggagccgccttgggccctccctgcgacagccggacccgcctccgcatcgggttgcgatgccctctgcatagtttctttctcttccttcatagatgacacggtcactagctctgcctcagaaagctctgcgctttccagaaagcgctttaccctgcagggttttgctaacctcaaaggtcagaaaggtaaaagtagtgcctgccccaaa

SEQ ID NO: 17320 - DNA, 5406 bp, Homo sapiens
  source 1..5406: mol_type = unassigned DNA
ggctgggtttctctagcacctcggcattgtctgcctgctcttccaggcgtgcagggcagtggtggctcgggccaggctctgggaggccgggcactctgaggaggtggctcagccctcttgggttctttcttgtgagttggcgaagcccagagtcaccagggtcctgagcacctgtctcttgtgaccatgcggcacccgcccggcttttagctgtcgcagcagagacccgaaggctgtggctctagcatcagggggtcgcctgtggtccctgcgtgaagaaccagagctgcctccgctttgtagcagcctttgtgacagggcggttcgatggccgagaagggagcatcccggggaaccctgcggcggctgtggtcactgcccaggaggcgccggggaactgcagggcgctcgaggccagatgaaatcatgcaccaggacatcgtcccgctctgtgctgccgacatccaggaccagctaaagaagcgctttgcttacctgtccggtgggcgggggcaggacggaagcccggttatcaccttccctgactacccggccttcagcgagattccggacaaggagttccagaatgtcatgacctacctcaccagcatccccagcctgcaggacgctggcatcggattcatcctggtgatagaccggcgacgggacaaatggacctccgtgaaggcgtccgtcctgcgcatcgcagcatctttcccggcaaacctgcagctcgtcctcgtgcttcgcccgacgggttttttccaaaggactctctccgacatcgctttcaaattcaatagagatgactttaagatgaaggtgccggtcataatgctgagctccgtaccagacttacacggttacatcgataagtcgcagctgaccgaggacctgggtgggaccctggactactgccactcccggtggctgtgccagcgcacggccatcgaaagtttcgccctcatggtgaagcagacggctcagatgctgcagtccttcgggaccgagctggctgaaacagagctgcccaatgacgtccagtcgacaagctcagtgctgtgtgcgcacacagagaagaaggacaaggcgaaggaggatttgaggctggcactgaaagaggggcacagtgtcctggagagcctcagggagctgcaggctgagggctcagagcccagtgtgaaccaggaccagcttgacaaccaggccaccgtgcagaggctcctggcccagctgaacgaaaccgaggctgccttcgatgagttctgggcaaagcatcagcagaaactggagcagtgtctgcagctccggcactttgagcagggcttccgggaggtcaaagccatcttggacgcagcgtcccagaagatagcaaccttcacagacatcggcaacagcctggcgcatgtggagcacctgctgagggacctggccagcttcgaggagaaatcaggcgtggccgtggagagggcccgggccctgtctctggacggcgagcagctcattgggaacaagcactacgcggtagactccatccgcccaaagtgccaggagctccggcacctctgtgaccagttctctgcggagatcgcaaggaggagggggctgctcagcaagtccctggagctgcaccgccgcctggagacgtccatgaagtggtgtgatgaagggatttacctgctggcctcacaacctgtggacaagtgccagtcccaggacggcgcggaggctgccctccaggaaatcgagaagtttttggagaccggtgcggaaaataagatccaggagctcaacgcgatttacaaggaatacgaatccatcctcaaccaagatctcatggagcacgtgcgaaaggtcttccagaagcaggcaagcatggaggaggtgttccaccgcaggcaggccagcctgaagaagctggcggccaggcagacgcggcccgtgcagccggtggcccccagacccgaggcactggcaaagtcgccctgcccctccccaggcattcggcgaggctctgagaactccagctccgagggcggtgcgctccggagagggccctaccggagggccaagagtgagatgagtgagagccggcagggccgcggctcagcgggggaggaggaggaaagcctggccatcctgcgcaggcacgtgatgagcgagctcctggacacagaacgggcctacgtggaggagctgctgtgcgtcctggagggctacgccgcggagatggataacccactgatggctcacctcctgtcaacaggccttcacaacaagaaggatgttttgtttggaaacatggaggaaatctatcacttccacaacaggatattcctcagggagctggaaaactacactgactgcccagaactggttggaagatgctttctggagaggatggaagatttccagatctatgagaagtactgtcagaacaagccccgctctgagagcctgtggagacagtgctccgactgcccgtttttccaggaatgccagagaaagctggaccacaagctgagcctggactcctacctgctgaagccagtgcagaggatcaccaagtaccagctgctgctcaaggaaatgctgaaatacagcaggaactgcgagggggctgaggacctgcaggaggcgctgagctccatcctgggcatcctgaaggccgtgaacgactccatgcacctcatcgctatcaccggctatgacgggaatctcggcgacctgggcaagctgctgatgcagggctcgttcagcgtctggaccgaccacaagaggggccacaccaaggtgaaggagctggccaggttcaagcccatgcagcggcacctgttcctgcacgagaaggcagtgctcttctgcaagaagagggaggagaatggggaggggtatgagaaagctccctcctacagctacaagcagtccttaaacatggctgccgttggcattacggagaacgtgaagggagatgctaagaagttcgagatctggtacaacgcgcgcgaggaggtctacatcgtccaggcgccaactcctgagattaaagccgcgtgggtgaatgaaattcggaaagtgctgaccagccagctgcaggcttgtagagaagccagccagcaccgggcgctggagcagtcacagagcctgcccctgccggccccgaccagcaccagtccctcaagaggaaactcaaggaacatcaagaagctggaagaaaggaaaacagaccccctaagcctggagggatacgtcagctcagcgccactgacaaagccccccgaaaagggcaaaggttggagcaaaacgtcccactcactggaggcacctgaggacgacgggggctggtcaagtgcagaggagcagattaactcgtccgacgcagaggaggacggcgggttgggccccaagaagctggttccaggtaaatacacggtcgtggcggaccacgagaagggaggccccgatgcgctgcgcgtgaggagcggggacgtggtggagctggtgcaggagggcgacgagggcctctggtacgtcagggacccgaccactggcaaggagggctgggtgccggccagcagcctgtccgtccggctcggcccgtccggctcggcccagtgcctgagcagctcagagtcgagcccggggtcggccgtgctgagcaactcgtccagctgcagcgagggcggccaggcccccttctccgacctgcaggggtagcgcggcctcggcgccggagacccgcgcgctgtctggggctgcggtggcgtggggagggcgcggcccccggacgccccgaggaaggggcacctcaccgcccccacccagagcgcctggccgtgcgggctgcagaggacccctccggggcagaggcaggttccacggaagaccccggcccgctggggcttccccggagactccagagcccacagaggaggggccgcagggaacagccccgggcggcaggcgccgggcagcggcatctcgtcctggctccaccgtgctgcttctgcctctggacggtgctttcaggggacgcgcggaccgtggtggagctgcttccggagaagtggaggatcctctggccaacggcctgaggagagcggggcacggggtctctttagcttttacaagttttaggattttttcaagcagggatcaatcccgtggccattttttgtggtactttggcctcaattcttcaccaggaatcactgtgtttacatgaaatgacaatttgatactgtatttgatagaaaactatttttttgttaccggggtttacatagaagcacgttgtttataccactaagtgactttgggggggctctcccatggaaacggatggcactccctgaagctccctggtcacaggtggatgaaaacgtgtccgtgggtgacatcaggtggtgtctccaccaccaaaagcagttagaagccaaggagattcctttatctacctagggttcattttcaaaagaaaatttaaactataatttaaacaattaacgttcttttctacaaaaaaaatgcagggacttgatttttttaaagagcttcactgaattaggatatttttattgcttttaaagaaaatacaaagatgcagtttctgcagggtgtggcgtggaccagtgctgccgaccatagctcagagagccctgcccctgcctcactgcactgcagcctcctcggaggccgcacctccactccactccccacgcgccccctgcctcccacccaggtccacctgccacctggtgaccaccttgagtacagaagtgaaagtggggagagtattttattcaagtcacagcagaactggaaaaaaactcttctgttttaccaacttcttgtgtttcagaaacatattctgttcaaaacttttgaagccctttcggtgtctagtctgcagatgtttttgtatgtgtgcacctctgaccatgtgtgtacatatgtgtcttgctggaaaggacatattcgctgtccccgtgctgctgggagggccgcctcacagcctcacggttcccagccccagcacagtggaggcaggcgtggctgcattcccctcacgctaccctcccagcggcttgtagccgtcactggccagacctccagggtgcggaatcaaataggaagcatgcagagactcggcagcttttcctctgatgtgtaagttatttggaacgcgtgctgtgtcccgcgatgtccctgatgtactgtgcaggcgcggtgcctccgtctcgtcgcacagctgcgcgcccttgtgtgaccctccccataaaggcactttacagcttcatgtttcatccactgtcacttttttttaactgctgatgtaaatggaattttaaaagcagagttctttattgtatggatgacgtttgaataaatatcagcaactcctgc

SEQ ID NO: 17321 - DNA, 5260 bp, Homo sapiens
  source 1..5260: mol_type = unassigned DNA
acagtgtggcttggtgccaaccatggcgagggtggagagccccgtgcctgcagcgcgcgcttccctcactgggtcctgcgtccttgggcaggcgatgcccctgcggggaggggctggtccatccccggccagccacggacccacgcatggacccagcgacccacggacctgcttacctgggcgcggcgcgggtggcatgcggccacacggaaggggcgcgctgggctgctgcggcctctgcagcttctacacctgccacggggcggccggagatgaaatcatgcaccaggacatcgtcccgctctgtgctgccgacatccaggaccagctaaagaagcgctttgcttacctgtccggtgggcgggggcaggacggaagcccggttatcaccttccctgactacccggccttcagcgagattccggacaaggagttccagaatgtcatgacctacctcaccagcatccccagcctgcaggacgctggcatcggattcatcctggtgatagaccggcgacgggacaaatggacctccgtgaaggcgtccgtcctgcgcatcgcagcatctttcccggcaaacctgcagctcgtcctcgtgcttcgcccgacgggttttttccaaaggactctctccgacatcgctttcaaattcaatagagatgactttaagatgaaggtgccggtcataatgctgagctccgtaccagacttacacggttacatcgataagtcgcagctgaccgaggacctgggtgggaccctggactactgccactcccggtggctgtgccagcgcacggccatcgaaagtttcgccctcatggtgaagcagacggctcagatgctgcagtccttcgggaccgagctggctgaaacagagctgcccaatgacgtccagtcgacaagctcagtgctgtgtgcgcacacagagaagaaggacaaggcgaaggaggatttgaggctggcactgaaagaggggcacagtgtcctggagagcctcagggagctgcaggctgagggctcagagcccagtgtgaaccaggaccagcttgacaaccaggccaccgtgcagaggctcctggcccagctgaacgaaaccgaggctgccttcgatgagttctgggcaaagcatcagcagaaactggagcagtgtctgcagctccggcactttgagcagggcttccgggaggtcaaagccatcttggacgcagcgtcccagaagatagcaaccttcacagacatcggcaacagcctggcgcatgtggagcacctgctgagggacctggccagcttcgaggagaaatcaggcgtggccgtggagagggcccgggccctgtctctggacggcgagcagctcattgggaacaagcactacgcggtagactccatccgcccaaagtgccaggagctccggcacctctgtgaccagttctctgcggagatcgcaaggaggagggggctgctcagcaagtccctggagctgcaccgccgcctggagacgtccatgaagtggtgtgatgaagggatttacctgctggcctcacaacctgtggacaagtgccagtcccaggacggcgcggaggctgccctccaggaaatcgagaagtttttggagaccggtgcggaaaataagatccaggagctcaacgcgatttacaaggaatacgaatccatcctcaaccaagatctcatggagcacgtgcgaaaggtcttccagaagcaggcaagcatggaggaggtgttccaccgcaggcaggccagcctgaagaagctggcggccaggcagacgcggcccgtgcagccggtggcccccagacccgaggcactggcaaagtcgccctgcccctccccaggcattcggcgaggctctgagaactccagctccgagggcggtgcgctccggagagggccctaccggagggccaagagtgagatgagtgagagccggcagggccgcggctcagcgggggaggaggaggaaagcctggccatcctgcgcaggcacgtgatgagcgagctcctggacacagaacgggcctacgtggaggagctgctgtgcgtcctggagggctacgccgcggagatggataacccactgatggctcacctcctgtcaacaggccttcacaacaagaaggatgttttgtttggaaacatggaggaaatctatcacttccacaacaggatattcctcagggagctggaaaactacactgactgcccagaactggttggaagatgctttctggagaggatggaagatttccagatctatgagaagtactgtcagaacaagccccgctctgagagcctgtggagacagtgctccgactgcccgtttttccaggaatgccagagaaagctggaccacaagctgagcctggactcctacctgctgaagccagtgcagaggatcaccaagtaccagctgctgctcaaggaaatgctgaaatacagcaggaactgcgagggggctgaggacctgcaggaggcgctgagctccatcctgggcatcctgaaggccgtgaacgactccatgcacctcatcgctatcaccggctatgacgggaatctcggcgacctgggcaagctgctgatgcagggctcgttcagcgtctggaccgaccacaagaggggccacaccaaggtgaaggagctggccaggttcaagcccatgcagcggcacctgttcctgcacgagaaggcagtgctcttctgcaagaagagggaggagaatggggaggggtatgagaaagctccctcctacagctacaagcagtccttaaacatggctgccgttggcattacggagaacgtgaagggagatgctaagaagttcgagatctggtacaacgcgcgcgaggaggtctacatcgtccaggcgccaactcctgagattaaagccgcgtgggtgaatgaaattcggaaagtgctgaccagccagctgcaggcttgtagagaagccagccagcaccgggcgctggagcagtcacagagcctgcccctgccggccccgaccagcaccagtccctcaagaggaaactcaaggaacatcaagaagctggaagaaaggaaaacagaccccctaagcctggagggatacgtcagctcagcgccactgacaaagccccccgaaaagggcaaaggttggagcaaaacgtcccactcactggaggcacctgaggacgacgggggctggtcaagtgcagaggagcagattaactcgtccgacgcagaggaggacggcgggttgggccccaagaagctggttccaggtaaatacacggtcgtggcggaccacgagaagggaggccccgatgcgctgcgcgtgaggagcggggacgtggtggagctggtgcaggagggcgacgagggcctctggtacgtcagggacccgaccactggcaaggagggctgggtgccggccagcagcctgtccgtccggctcggcccgtccggctcggcccagtgcctgagcagctcagagtcgagcccggggtcggccgtgctgagcaactcgtccagctgcagcgagggcggccaggcccccttctccgacctgcaggggtagcgcggcctcggcgccggagacccgcgcgctgtctggggctgcggtggcgtggggagggcgcggcccccggacgccccgaggaaggggcacctcaccgcccccacccagagcgcctggccgtgcgggctgcagaggacccctccggggcagaggcaggttccacggaagaccccggcccgctggggcttccccggagactccagagcccacagaggaggggccgcagggaacagccccgggcggcaggcgccgggcagcggcatctcgtcctggctccaccgtgctgcttctgcctctggacggtgctttcaggggacgcgcggaccgtggtggagctgcttccggagaagtggaggatcctctggccaacggcctgaggagagcggggcacggggtctctttagcttttacaagttttaggattttttcaagcagggatcaatcccgtggccattttttgtggtactttggcctcaattcttcaccaggaatcactgtgtttacatgaaatgacaatttgatactgtatttgatagaaaactatttttttgttaccggggtttacatagaagcacgttgtttataccactaagtgactttgggggggctctcccatggaaacggatggcactccctgaagctccctggtcacaggtggatgaaaacgtgtccgtgggtgacatcaggtggtgtctccaccaccaaaagcagttagaagccaaggagattcctttatctacctagggttcattttcaaaagaaaatttaaactataatttaaacaattaacgttcttttctacaaaaaaaatgcagggacttgatttttttaaagagcttcactgaattaggatatttttattgcttttaaagaaaatacaaagatgcagtttctgcagggtgtggcgtggaccagtgctgccgaccatagctcagagagccctgcccctgcctcactgcactgcagcctcctcggaggccgcacctccactccactccccacgcgccccctgcctcccacccaggtccacctgccacctggtgaccaccttgagtacagaagtgaaagtggggagagtattttattcaagtcacagcagaactggaaaaaaactcttctgttttaccaacttcttgtgtttcagaaacatattctgttcaaaacttttgaagccctttcggtgtctagtctgcagatgtttttgtatgtgtgcacctctgaccatgtgtgtacatatgtgtcttgctggaaaggacatattcgctgtccccgtgctgctgggagggccgcctcacagcctcacggttcccagccccagcacagtggaggcaggcgtggctgcattcccctcacgctaccctcccagcggcttgtagccgtcactggccagacctccagggtgcggaatcaaataggaagcatgcagagactcggcagcttttcctctgatgtgtaagttatttggaacgcgtgctgtgtcccgcgatgtccctgatgtactgtgcaggcgcggtgcctccgtctcgtcgcacagctgcgcgcccttgtgtgaccctccccataaaggcactttacagcttcatgtttcatccactgtcacttttttttaactgctgatgtaaatggaattttaaaagcagagttctttattgtatggatgacgtttgaataaatatcagcaactcctgc

SEQ ID NO: 17322 - DNA, 3648 bp, Homo sapiens
  source 1..3648: mol_type = unassigned DNA
acctgcggggcgcggagctcggcggacgcgggagggcagcaccacgggcggcagcctcatgtttgactgttggagatttatcctgtgcaagagacctggaagcaacagttattcttccccacaacggcccaatgaggccaaaaaggaggaaacggatcaccaaattgatgtgtctgacgtcatcaggcttgttcaagacacaccggaggcgacggccatggccacagatgaaatcatgcaccaggacatcgtcccgctctgtgctgccgacatccaggaccagctaaagaagcgctttgcttacctgtccggtgggcgggggcaggacggaagcccggttatcaccttccctgactacccggccttcagcgagattccggacaaggagttccagaatgtcatgacctacctcaccagcatccccagcctgcaggacgctggcatcggattcatcctggtgatagaccggcgacgggacaaatggacctccgtgaaggcgtccgtcctgcgcatcgcagcatctttcccggcaaacctgcagctcgtcctcgtgcttcgcccgacgggttttttccaaaggactctctccgacatcgctttcaaattcaatagagatgactttaagatgaaggtgccggtcataatgctgagctccgtaccagacttacacggttacatcgataagtcgcagctgaccgaggacctgggtgggaccctggactactgccactcccggtggctgtgccagcgcacggccatcgaaagtttcgccctcatggtgaagcagacggctcagatgctgcagtccttcgggaccgagctggctgaaacagagctgcccaatgacgtccagtcgacaagctcagtgctgtgtgcgcacacagagaagaaggacaaggcgaaggaggatttgaggctggcactgaaagaggggcacagtgtcctggagagcctcagggagctgcaggctgagggctcagagcccagtgtgaaccaggaccagcttgacaaccaggccaccgtgcagaggctcctggcccagctgaacgaaaccgaggctgccttcgatgagttctgggcaaagcatcagcagaaactggagcagtgtctgcagctccggcactttgagcagggcttccgggaggtcaaagccatcttggacgcagcgtcccagaagatagcaaccttcacagacatcggcaacagcctggcgcatgtggagcacctgctgagggacctggccagcttcgaggagaaatcaggcgtggccgtggagagggcccgggccctgtctctggacggcgagcagctcattgggaacaagcactacgcggtagactccatccgcccaaagtgccaggagctccggcacctctgtgaccagttctctgcggagatcgcaaggaggagggggctgctcagcaagtccctggagctgcaccgccgcctggagacgtccatgaagtggtgtgatgaagggatttacctgctggcctcacaacctgtggacaagtgccagtcccaggacggcgcggaggctgccctccaggaaatcgagaagtttttggagaccggtgcggaaaataagatccaggagctcaacgcgatttacaaggaatacgaatccatcctcaaccaagatctcatggagcacgtgcgaaaggtcttccagaagcaggcaagcatggaggaggtgttccaccgcaggcaggccagcctgaagaagctggcggccaggcagacgcggcccgtgcagccggtggcccccagacccgaggcactggcaaagtcgccctgcccctccccaggcattcggcgaggctctgagaactccagctccgagggcggtgcgctccggagagggccctaccggagggccaagagtgagatgagtgagagccggcagggccgcggctcagcgggggaggaggaggaaagcctggccatcctgcgcaggcacgtgatgagcgagctcctggacacagaacgggcctacgtggaggagctgctgtgcgtcctggagggctacgccgcggagatggataacccactgatggctcacctcctgtcaacaggccttcacaacaagaaggatgttttgtttggaaacatggaggaaatctatcacttccacaacaggatattcctcagggagctggaaaactacactgactgcccagaactggttggaagatgctttctggagaggatggaagatttccagatctatgagaagtactgtcagaacaagccccgctctgagagcctgtggagacagtgctccgactgcccgtttttccaggaatgccagagaaagctggaccacaagctgagcctggactcctacctgctgaagccagtgcagaggatcaccaagtaccagctgctgctcaaggaaatgctgaaatacagcaggaactgcgagggggctgaggacctgcaggaggcgctgagctccatcctgggcatcctgaaggccgtgaacgactccatgcacctcatcgctatcaccggctatgacgggaatctcggcgacctgggcaagctgctgatgcagggctcgttcagcgtctggaccgaccacaagaggggccacaccaaggtgaaggagctggccaggttcaagcccatgcagcggcacctgttcctgcacgagaaggcagtgctcttctgcaagaagagggaggagaatggggaggggtatgagaaagctccctcctacagctacaagcagtccttaaacatggctgccgttggcattacggagaacgtgaagggagatgctaagaagttcgagatctggtacaacgcgcgcgaggaggtctacatcgtccaggcgccaactcctgagattaaagccgcgtgggtgaatgaaattcggaaagtgctgaccagccagctgcaggcttgtagagaagccagccagcaccgggcgctggagcagtcacagagcctgcccctgccggccccgaccagcaccagtccctcaagaggaaactcaaggaacatcaagaagctggaagaaaggaaaacagaccccctaagcctggagggatacgtcagctcagcgccactgacaaagccccccgaaaagggcaaaggttggagcaaaacgtcccactcactggaggcacctgaggacgacgggggctggtcaagtgcagaggagcagattaactcgtccgacgcagaggaggacggcgggttgggccccaagaagctggttccaggtaaatacacggtcgtggcggaccacgagaagggaggccccgatgcgctgcgcgtgaggagcggggacgtggtggagctggtgcaggagggcgacgagggcctctggtacgtcagggacccgaccactggcaaggagggctgggtgccggccagcagcctgtccgtccggctcggcccgtccggctcggcccagtgcctgagcagctcaggtaaggcccacgtgccccgagcccacccgtgacgctgccaagggcccgggcgaggaagctgccccgtgtgtgcccggcagagccgacgccgaagcccgtccccgcctgatctccccgcagagtcgagcccggggtcggccgtgctgagcaactcgtccagctgcagcgagggcggccaggcccccttctccgacctgcaggggtagcg

SEQ ID NO: 17323 - DNA, 3903 bp, Homo sapiens
  source 1..3903: mol_type = unassigned DNA
gtcccagaagatagcaaccttcacagacatcggcaacagcctggcgcatgtggagcacctgctgagggacctggccagcttcgaggagaaatcaggcgtggccgtggagagggcccgggccctgtctctggacggcgagcagctcattgggaacaagcactacgcggtagactccatccgcccaaagtgccaggagctccggcacctctgtgaccagttctctgcggagatcgcaaggaggagggggctgctcagcaagtccctggagctgcaccgccgcctggagacgtccatgaagtggtgtgatgaagggatttacctgctggcctcacaacctgtggacaagtgccagtcccaggacggcgcggaggctgccctccaggaaatcgagaagtttttggagaccggtgcggaaaataagatccaggagctcaacgcgatttacaaggaatacgaatccatcctcaaccaagatctcatggagcacgtgcgaaaggtcttccagaagcaggcaagcatggaggaggtgttccaccgcaggcaggccagcctgaagaagctggcggccaggcagacgcggcccgtgcagccggtggcccccagacccgaggcactggcaaagtcgccctgcccctccccaggcattcggcgaggctctgagaactccagctccgagggcggtgcgctccggagagggccctaccggagggccaagagtgagatgagtgagagccggcagggccgcggctcagcgggggaggaggaggaaagcctggccatcctgcgcaggcacgtgatgagcgagctcctggacacagaacgggcctacgtggaggagctgctgtgcgtcctggagggctacgccgcggagatggataacccactgatggctcacctcctgtcaacaggccttcacaacaagaaggatgttttgtttggaaacatggaggaaatctatcacttccacaacaggatattcctcagggagctggaaaactacactgactgcccagaactggttggaagatgctttctggagaggatggaagatttccagatctatgagaagtactgtcagaacaagccccgctctgagagcctgtggagacagtgctccgactgcccgtttttccaggaatgccagagaaagctggaccacaagctgagcctggactcctacctgctgaagccagtgcagaggatcaccaagtaccagctgctgctcaaggaaatgctgaaatacagcaggaactgcgagggggctgaggacctgcaggaggcgctgagctccatcctgggcatcctgaaggccgtgaacgactccatgcacctcatcgctatcaccggctatgacgggaatctcggcgacctgggcaagctgctgatgcagggctcgttcagcgtctggaccgaccacaagaggggccacaccaaggtgaaggagctggccaggttcaagcccatgcagcggcacctgttcctgcacgagaaggcagtgctcttctgcaagaagagggaggagaatggggaggggtatgagaaagctccctcctacagctacaagcagtccttaaacatggctgccgttggcattacggagaacgtgaagggagatgctaagaagttcgagatctggtacaacgcgcgcgaggaggtctacatcgtccaggcgccaactcctgagattaaagccgcgtgggtgaatgaaattcggaaagtgctgaccagccagctgcaggcttgtagagaagccagccagcaccgggcgctggagcagtcacagagcctgcccctgccggccccgaccagcaccagtccctcaagaggaaactcaaggaacatcaagaagctggaagaaaggaaaacagaccccctaagcctggagggatacgtcagctcagcgccactgacaaagccccccgaaaagggcaaagcttctcctaccagtcctgacaaaaaagccaagcggcatgaagtaaagagcgacccgactccctttggtgtgcgaggttggagcaaaacgtcccactcactggaggcacctgaggacgacgggggctggtcaagtgcagaggagcagattaactcgtccgacgcagaggaggacggcgggttgggccccaagaagctggttccaggtaaatacacggtcgtggcggaccacgagaagggaggccccgatgcgctgcgcgtgaggagcggggacgtggtggagctggtgcaggagggcgacgagggcctctggtacgtcagggacccgaccactggcaaggagggctgggtgccggccagcagcctgtccgtccggctcggcccgtccggctcggcccagtgcctgagcagctcaggtaaggcccacgtgccccgagcccacccgtgacgctgccaagggcccgggcgaggaagctgccccgtgtgtgcccggcagagccgacgccgaagcccgtccccgcctgatctccccgcagagtcgagcccggggtcggccgtgctgagcaactcgtccagctgcagcgagggcggccaggcccccttctccgacctgcaggggtagcgcggcctcggcgccggagacccgcgcgctgtctggggctgcggtggcgtggggagggcgcggcccccggacgccccgaggaaggggcacctcaccgcccccacccagagcgcctggccgtgcgggctgcagaggacccctccggggcagaggcaggttccacggaagaccccggcccgctggggcttccccggagactccagagcccacagaggaggggccgcagggaacagccccgggcggcaggcgccgggcagcggcatctcgtcctggctccaccgtgctgcttctgcctctggacggtgctttcaggggacgcgcggaccgtggtggagctgcttccggagaagtggaggatcctctggccaacggcctgaggagagcggggcacggggtctctttagcttttacaagttttaggattttttcaagcagggatcaatcccgtggccattttttgtggtactttggcctcaattcttcaccaggaatcactgtgtttacatgaaatgacaatttgatactgtatttgatagaaaactatttttttgttaccggggtttacatagaagcacgttgtttataccactaagtgactttgggggggctctcccatggaaacggatggcactccctgaagctccctggtcacaggtggatgaaaacgtgtccgtgggtgacatcaggtggtgtctccaccaccaaaagcagttagaagccaaggagattcctttatctacctagggttcattttcaaaagaaaatttaaactataatttaaacaattaacgttcttttctacaaaaaaaatgcagggacttgatttttttaaagagcttcactgaattaggatatttttattgcttttaaagaaaatacaaagatgcagtttctgcagggtgtggcgtggaccagtgctgccgaccatagctcagagagccctgcccctgcctcactgcactgcagcctcctcggaggccgcacctccactccactccccacgcgccccctgcctcccacccaggtccacctgccacctggtgaccaccttgagtacagaagtgaaagtggggagagtattttattcaagtcacagcagaactggaaaaaaactcttctgttttaccaacttcttgtgtttcagaaacatattctgttcaaaacttttgaagccctttcggtgtctagtctgcagatgtttttgtatgtgtgcacctctgaccatgtgtgtacatatgtgtcttgctggaaaggacatattcgctgtccccgtgctgctgggagggccgcctcacagcctcacggttcccagccccagcacagtggaggcaggcgtggctgcattcccc

SEQ ID NO: 17324 - DNA, 6580 bp, Homo sapiens
  source 1..6580: mol_type = unassigned DNA
cgcttccctcactgggtcctgcgtccttgggcaggcgatgcccctgcggggaggggctggtccatccccggccagccacggacccacgcatggacccagcgacccacggacctgcttacctgggcgcggcgcgggtggcatgcggccacacggaaggggcgcgctgggctgctgcggcctctgcagcttctacacctgccacggggcggccggagatgaaatcatgcaccaggacatcgtcccgctctgtgctgccgacatccaggaccagctaaagaagcgctttgcttacctgtccggtgggcgggggcaggacggaagcccggttatcaccttccctgactacccggccttcagcgagattccggacaaggagttccagaatgtcatgacctacctcaccagcatccccagcctgcaggacgctggcatcggattcatcctggtgatagaccggcgacgggacaaatggacctccgtgaaggcgtccgtcctgcgcatcgcagcatctttcccggcaaacctgcagctcgtcctcgtgcttcgcccgacgggttttttccaaaggactctctccgacatcgctttcaaattcaatagagatgactttaagatgaaggtgccggtcataatgctgagctccgtaccagacttacacggttacatcgataagtcgcagctgaccgaggacctgggtgggaccctggactactgccactcccggtggctgtgccagcgcacggccatcgaaagtttcgccctcatggtgaagcagacggctcagatgctgcagtccttcgggaccgagctggctgaaacagagctgcccaatgacgtccagtcgacaagctcagtgctgtgtgcgcacacagagaagaaggacaaggcgaaggaggatttgaggctggcactgaaagaggggcacagtgtcctggagagcctcagggagctgcaggctgagggctcagagcccagtgtgaaccaggaccagcttgacaaccaggccaccgtgcagaggctcctggcccagctgaacgaaaccgaggctgccttcgatgagttctgggcaaagcatcagcagaaactggagcagtgtctgcagctccggcactttgagcagggcttccgggaggtcaaagccatcttggacgcagcgtcccagaagatagcaaccttcacagacatcggcaacagcctggcgcatgtggagcacctgctgagggacctggccagcttcgaggagaaatcaggcgtggccgtggagagggcccgggccctgtctctggacggcgagcagctcattgggaacaagcactacgcggtagactccatccgcccaaagtgccaggagctccggcacctctgtgaccagttctctgcggagatcgcaaggaggagggggctgctcagcaagtccctggagctgcaccgccgcctggagacgtccatgaagtggtgtgatgaagggatttacctgctggcctcacaacctgtggacaagtgccagtcccaggacggcgcggaggctgccctccaggaaatcgagaagtttttggagaccggtgcggaaaataagatccaggagctcaacgcgatttacaaggaatacgaatccatcctcaaccaagatctcatggagcacgtgcgaaaggtcttccagaagcaggcaagcatggaggaggtgttccaccgcaggcaggccagcctgaagaagctggcggccaggcagacgcggcccgtgcagccggtggcccccagacccgaggcactggcaaagtcgccctgcccctccccaggcattcggcgaggctctgagaactccagctccgagggcggtgcgctccggagagggccctaccggagggccaagagtgagatgagtgagagccggcagggccgcggctcagcgggggaggaggaggaaagcctggccatcctgcgcaggcacgtgatgagcgagctcctggacacagaacgggcctacgtggaggagctgctgtgcgtcctggagggctacgccgcggagatggataacccactgatggctcacctcctgtcaacaggccttcacaacaagaaggatgttttgtttggaaacatggaggaaatctatcacttccacaacaggatattcctcagggagctggaaaactacactgactgcccagaactggttggaagatgctttctggagaggatggaagatttccagatctatgagaagtactgtcagaacaagccccgctctgagagcctgtggagacagtgctccgactgcccgtttttccaggaatgccagagaaagctggaccacaagctgagcctggactcctacctgctgaagccagtgcagaggatcaccaagtaccagctgctgctcaaggaaatgctgaaatacagcaggaactgcgagggggctgaggacctgcaggaggcgctgagctccatcctgggcatcctgaaggccgtgaacgactccatgcacctcatcgctatcaccggctatgacgggaatctcggcgacctgggcaagctgctgatgcagggctcgttcagcgtctggaccgaccacaagaggggccacaccaaggtgaaggagctggccaggttcaagcccatgcagcggcacctgttcctgcacgagaaggcagtgctcttctgcaagaagagggaggagaatggggaggggtatgagaaagctccctcctacagctacaagcagtccttaaacatggctgccgttggcattacggagaacgtgaagggagatgctaagaagttcgagatctggtacaacgcgcgcgaggaggtctacatcgtccaggcgccaactcctgagattaaagccgcgtgggtgaatgaaattcggaaagtgctgaccagccagctgcaggcttgtagagaagccagccagcaccgggcgctggagcagtcacagagcctgcccctgccggccccgaccagcaccagtccctcaagaggaaactcaaggaacatcaagaagctggaagaaaggaaaacagaccccctaagcctggagggatacgtcagctcagcgccactgacaaagccccccgaaaagggcaaaggttggagcaaaacgtcccactcactggaggcacctgaggacgacgggggctggtcaagtgcagaggagcagattaactcgtccgacgcagaggaggacggcgggttgggccccaagaagctggttccaggtaaatacacggtcgtggcggaccacgagaagggaggccccgatgcgctgcgcgtgaggagcggggacgtggtggagctggtgcaggagggcgacgagggcctctggtaagaccccgcgctcagccccggactgccccgcacgtggctgccgctgaccctcgccccttgcaggtacgtcagggacccgaccactggcaaggagggctgggtgccggccagcagcctgtccgtccggctcggcccgtccggctcggcccagtgcctgagcagctcaggtaaggcccacgtgccccgagcccacccgtgacgctgccaagggcccgggcgaggaagctgccccgtgtgtgcccggcagagccgacgccgaagcccgtccccgcctgatctccccgcagagtcgagcccggggtcggccgtgctgagcaactcgtccagctgcagcgagggcggccaggcccccttctccgacctgcaggggtagcgcggcctcggcgccggagacccgcgcgctgtctggggctgcggtggcgtggggagggcgcggcccccggacgccccgaggaaggggcacctcaccgcccccacccagagcgcctggccgtgcgggctgcagaggacccctccggggcagaggcaggttccacggaagaccccggcccgctggggcttccccggagactccagagcccacagaggaggggccgcagggaacagccccgggcggcaggcgccgggcagcggcatctcgtcctggctccaccgtgctgcttctgcctctggacggtgctttcaggggacgcgcggaccgtggtggagctgcttccggagaagtggaggatcctctggccaacggcctgaggagagcggggcacggggtctctttagcttttacaagttttaggattttttcaagcagggatcaatcccgtggccattttttgtggtactttggcctcaattcttcaccaggaatcactgtgtttacatgaaatgacaatttgatactgtatttgatagaaaactatttttttgttaccggggtttacatagaagcacgttgtttataccactaagtgactttgggggggctctcccatggaaacggatggcactccctgaagctccctggtcacaggtggatgaaaacgtgtccgtgggtgacatcaggtggtgtctccaccaccaaaagcagttagaagccaaggagattcctttatctacctagggttcattttcaaaagaaaatttaaactataatttaaacaattaacgttcttttctacaaaaaaaatgcagggacttgatttttttaaagagcttcactgaattaggatatttttattgcttttaaagaaaatacaaagatgcagtttctgcagggtgtggcgtggaccagtgctgccgaccatagctcagagagccctgcccctgcctcactgcactgcagcctcctcggaggccgcacctccactccactccccacgcgccccctgcctcccacccaggtccacctgccacctggtgaccaccttgagtacagaagtgaaagtggggagagtattttattcaagtcacagcagaactggaaaaaaactcttctgttttaccaacttcttgtgtttcagaaacatattctgttcaaaacttttgaagccctttcggtgtctagtctgcagatgtttttgtatgtgtgcacctctgaccatgtgtgtacatatgtgtcttgctggaaaggacatattcgctgtccccgtgctgctgggagggccgcctcacagcctcacggttcccagccccagcacagtggaggcaggcgtggctgcattcccctcacgctaccctcccagcggcttgtagccgtcactggccagacctccagggtgcggaatcaaataggaagcatgcagagactcggcagcttttcctctgatgtgtaagttatttggaacgcgtgctgtgtcccgcgatgtccctgatgtactgtgcaggcgcggtgcctccgtctcgtcgcacagctgcgcgcccttgtgtgaccctccccataaaggcactttacagcttcatgtttcatccactgtcacttttttttaactgctgatgtaaatggaattttaaaagcagagttctttattgtatggatgacgtttgaataaatatcagcaactcctgccatctgcctttgtctgtcaagacacagaacgtctcagcagtcggggtttccagggccgcagtgcactgtgcttgcacatggtaagtcattgttgggacggaaaagaagccggcagtgggcagggcccagcgtgcggctcaggcaccgagcaaccgctttgctttcttctgtcagacggcgatgatgacaaaatagcaacaaggttgtgcgtgtcagaaacgcaaaggcagcagaggaagcgtagtggaaccattacagaatcacaatgcagccgacactctccagaccagaaaagggagcataaagaaagggtattgatccaatagaagaagggaagggtggagaaaggggaaagcatggttaacaggaaacaacatgtaacggaagagacagcccagatgtgtctggctcacaacagacgtgatcatgttatgctggcctggaagagcatcggatcagacgtgacaagtcactgcttagagaccatcaagcaaatttatatatagattggagatttaaaataaaagaagacagaacagacaaacaccataagaaagctggtgtagcagtatcgatgacctgaaatgggattcaggacagttcatagagtaaagggggctgcgtggcaatcaggaactcataagccactgactataaagctcaaaacacagcaaagttggcagtcggcagacagcaatgttgactgtcatgaaaagtgatccctgtttgcccctaaacgtagagaaatctgcgttattttccagcacacatggagcacaaacaaaatatttgcaaaacaatgggaagatcattgaaacactgtttggcaatttaaaagcttgtttctaactcacgggatgcgggcagtctgctctctagaactggacagcgtgcacagagccacgggagggagcagccacggccagctcagattggtgtcgacagcttagtggtgtctgattttatacatgacaaaatgaacgagttaaccatttaagccaaaaaaataagactagcgtaacccaaagaaagtatttaaatacttctgtcaattaggacagttgagaaaagagaataacaaaatcaaaagcaaaactcaaactttgtacctgaaaaatctaataaaactgactaatttatagaaaacctaagaaactccatatcaaataaaaaattttaaatatgagagaa

SEQ ID NO: 17325 - DNA, 574 bp, Homo sapiens
  source 1..574: mol_type = unassigned DNA
aaggaactcagtgaccacagacggatgagaacagcggacgcagctgcctcccaggcactcaaaggctcaactccccacaggcgtgtgttgccaggggcagaaggcttggcccctgggtcagcatactctccggacagctcatccctgccagcccagatgaaatcatgcaccaggacatcgtcccgctctgtgctgccgacatccaggaccagctaaagaagcgctttgcttacctgtccggtgggcgggggcaggacggaagcccggttatcaccttccctgactacccggccttcagcgagattccggacaaggagttccagaatgtcatgacctacctcaccagcatccccagcctgcaggacgctggcatcggattcatcctggtgatagaccggcgacgggacaaatggacctccgtgaaggcgtccgtcctgcgcatcgcagcatctttcccggcaaacctgcagctcgtcctcgtgcttcgcccgacgggttttttccaaaggactctctccgacatcgctttcaaattcaatagagatgactttaagatgaaggtgccggtcataat

SEQ ID NO: 17326 - DNA, 3617 bp, Homo sapiens
  source 1..3617: mol_type = unassigned DNA
gacatcgaatcggaggccctgggaggagcagccggctggctgccctgcagaggccaggtctgcccagcaaacccaggaaggtgtggcgtccccgcttcgcggccaagatggtgctggtgctgcgccatcctttgtgtgcccgggaagggcgttccgggagccgggtcgggggctcctgactcgcactgggcagcatgacggtgcgccggctgtcactgctgtgccgggacctctgggcgctgtggctgctgctgaaggccggcgcagatgaaatcatgcaccaggacatcgtcccgctctgtgctgccgacatccaggaccagctaaagaagcgctttgcttacctgtccggtgggcgggggcaggacggaagcccggttatcaccttccctgactacccggccttcagcgagattccggacaaggagttccagaatgtcatgacctacctcaccagcatccccagcctgcaggacgctggcatcggattcatcctggtgatagaccggcgacgggacaaatggacctccgtgaaggcgtccgtcctgcgcatcgcagcatctttcccggcaaacctgcagctcgtcctcgtgcttcgcccgacgggttttttccaaaggactctctccgacatcgctttcaaattcaatagagatgactttaagatgaaggtgccggtcataatgctgagctccgtaccagacttacacggttacatcgataagtcgcagctgaccgaggacctgggtgggaccctggactactgccactcccggtggctgtgccagcgcacggccatcgaaagtttcgccctcatggtgaagcagacggctcagatgctgcagtccttcgggaccgagctggctgaaacagagctgcccaatgacgtccagtcgacaagctcagtgctgtgtgcgcacacagagaagaaggacaaggcgaaggaggatttgaggctggcactgaaagaggggcacagtgtcctggagagcctcagggagctgcaggctgagggctcagagcccagtgtgaaccaggaccagcttgacaaccaggccaccgtgcagaggctcctggcccagctgaacgaaaccgaggctgccttcgatgagttctgggcaaagcatcagcagaaactggagcagtgtctgcagctccggcactttgagcagggcttccgggaggtcaaagccatcttggacgcagcgtcccagaagatagcaaccttcacagacatcggcaacagcctggcgcatgtggagcacctgctgagggacctggccagcttcgaggagaaatcaggcgtggccgtggagagggcccgggccctgtctctggacggcgagcagctcattgggaacaagcactacgcggtagactccatccgcccaaagtgccaggagctccggcacctctgtgaccagttctctgcggagatcgcaaggaggagggggctgctcagcaagtccctggagctgcaccgccgcctggagacgtccatgaagtggtgtgatgaagggatttacctgctggcctcacaacctgtggacaagtgccagtcccaggacggcgcggaggctgccctccaggaaatcgagaagtttttggagaccggtgcggaaaataagatccaggagctcaacgcgatttacaaggaatacgaatccatcctcaaccaagatctcatggagcacgtgcgaaaggtcttccagaagcaggcaagcatggaggaggtgttccaccgcaggcaggccagcctgaagaagctggcggccaggcagacgcggcccgtgcagccggtggcccccagacccgaggcactggcaaagtcgccctgcccctccccaggcattcggcgaggctctgagaactccagctccgagggcggtgcgctccggagagggccctaccggagggccaagagtgagatgagtgagagccggcagggccgcggctcagcgggggaggaggaggaaagcctggccatcctgcgcaggcacgtgatgagcgagctcctggacacagaacgggcctacgtggaggagctgctgtgcgtcctggagggctacgccgcggagatggataacccactgatggctcacctcctgtcaacaggccttcacaacaagaaggatgttttgtttggaaacatggaggaaatctatcacttccacaacaggatattcctcagggagctggaaaactacactgactgcccagaactggttggaagatgctttctggagaggatggaagatttccagatctatgagaagtactgtcagaacaagccccgctctgagagcctgtggagacagtgctccgactgcccgtttttccaggaatgccagagaaagctggaccacaagctgagcctggactcctacctgctgaagccagtgcagaggatcaccaagtaccagctgctgctcaaggaaatgctgaaatacagcaggaactgcgagggggctgaggacctgcaggaggcgctgagctccatcctgggcatcctgaaggccgtgaacgactccatgcacctcatcgctatcaccggctatgacgggaatctcggcgacctgggcaagctgctgatgcagggctcgttcagcgtctggaccgaccacaagaggggccacaccaaggtgaaggagctggccaggttcaagcccatgcagcggcacctgttcctgcacgagaaggcagtgctcttctgcaagaagagggaggagaatggggaggggtatgagaaagctccctcctacagctacaagcagtccttaaacatggctgccgttggcattacggagaacgtgaagggagatgctaagaagttcgagatctggtacaacgcgcgcgaggaggtctacatcgtccaggcgccaactcctgagattaaagccgcgtgggtgaatgaaattcggaaagtgctgaccagccagctgcaggcttgtagagaagccagccagcaccgggcgctggagcagtcacagagcctgcccctgccggccccgaccagcaccagtccctcaagaggaaactcaaggaacatcaagaagctggaagaaaggaaaacagaccccctaagcctggagggatacgtcagctcagcgccactgacaaagccccccgaaaagggcaaaggttggagcaaaacgtcccactcactggaggcacctgaggacgacgggggctggtcaagtgcagaggagcagattaactcgtccgacgcagaggaggacggcgggttgggccccaagaagctggttccaggtaaatacacggtcgtggcggaccacgagaagggaggccccgatgcgctgcgcgtgaggagcggggacgtggtggagctggtgcaggagggcgacgagggcctctggtacgtcagggacccgaccactggcaaggagggctgggtgccggccagcagcctgtccgtccggctcggcccgtccggctcggcccagtgcctgagcagctcagagtcgagcccggggtcggccgtgctgagcaactcgtccagctgcagcgagggcggccaggcccccttctccgacctgcaggggtagcgcggcctcggcgccggagacccgcgcgctgtctggggctgcggtggcgtg

SEQ ID NO: 17327 - DNA, 898 bp, Homo sapiens
  source 1..898: mol_type = unassigned DNA
caatcctgggcagggaggcggcggctggaggctgaaagcgctgccgtggccccctccccgcctccgccgcgccccctccgcactcgcacggccccacccgcaggcgccccccgtgcggaggaagcggatctgccaggatcatttttgttgtgtcggaggatgaggttttggctgaggactgaagagatggccttggaagaaatggtgcagagattaaatgcggtttccaagcacacggatgaaatcatgcaccaggacatcgtcccgctctgtgctgccgacatccaggaccagctaaagaagcgctttgcttacctgtccggtgggcgggggcaggacggaagcccggttatcaccttccctgactacccggccttcagcgagattccggacaaggagttccagaatgtcatgacctacctcaccagcatccccagcctgcaggacgctggcatcggattcatcctggtgatagaccggcgacgggacaaatggacctccgtgaaggcgtccgtcctgcgcatcgcagcatctttcccggcaaacctgcagctcgtcctcgtgcttcgcccgacgggttttttccaaaggactctctccgacatcgctttcaaattcaatagagatgactttaagatgaaggtgccggtcataatgctgagctccgtaccagacttacacggttacatcgataagtcgcagctgaccgaggacctgggtgggaccctggactactgccactcccggtggctgtgccagcgcacggccatcgaaagtttcgccctcatggtgaagcagacggctcagatgctgcagtccttcgggaccgagctggctgaaacagagctgcccaatgacgtccagtcgacaagctcagtgctgtgtgcgcacacagaga

SEQ ID NO: 17328 - DNA, 3602 bp, Homo sapiens
  source 1..3602: mol_type = unassigned DNA
cctcaagttcctctcgggcgggcacggtgtgtcgcctggacctgcatgtaaacatcagggcggagcaggaatcggcctccaggagggtaattgcctggcgtactctgtcccaggtagtgggtgaaatgaaagtaaaaagccagctggtccctcatgcagattttaggggacaaagttcagcatagaaaggtcctgttacaaggagagggttgtggcgagcccagggcagcgcgcgtcctccccggcagctgatcctcgccatgggggacggaaaggctgtccggatttccgtggcggaaatgaaaagctactacctgtattctgagtggtgctcctggctgctgtccgtggctgaggatgaaatcatgcaccaggacatcgtcccgctctgtgctgccgacatccaggaccagctaaagaagcgctttgcttacctgtccggtgggcgggggcaggacggaagcccggttatcaccttccctgactacccggccttcagcgagattccggacaaggagttccagaatgtcatgacctacctcaccagcatccccagcctgcaggacgctggcatcggattcatcctggtgatagaccggcgacgggacaaatggacctccgtgaaggcgtccgtcctgcgcatcgcagcatctttcccggcaaacctgcagctcgtcctcgtgcttcgcccgacgggttttttccaaaggactctctccgacatcgctttcaaattcaatagagatgactttaagatgaaggtgccggtcataatgctgagctccgtaccagacttacacggttacatcgataagtcgcagctgaccgaggacctgggtgggaccctggactactgccactcccggtggctgtgccagcgcacggccatcgaaagtttcgccctcatggtgaagcagacggctcagatgctgcagtccttcgggaccgagctggctgaaacagagctgcccaatgacgtccagtcgacaagctcagtgctgtgtgcgcacacagagaagaaggacaaggcgaaggaggatttgaggctggcactgaaagaggggcacagtgtcctggagagcctcagggagctgcaggctgagggctcagagcccagtgtgaaccaggaccagcttgacaaccaggccaccgtgcagaggctcctggcccagctgaacgaaaccgaggctgccttcgatgagttctgggcaaagcatcagcagaaactggagcagtgtctgcagctccggcactttgagcagggcttccgggaggtcaaagccatcttggacgcagcgtcccagaagatagcaaccttcacagacatcggcaacagcctggcgcatgtggagcacctgctgagggacctggccagcttcgaggagaaatcaggcgtggccgtggagagggcccgggccctgtctctggacggcgagcagctcattgggaacaagcactacgcggtagactccatccgcccaaagtgccaggagctccggcacctctgtgaccagttctctgcggagatcgcaaggaggagggggctgctcagcaagtccctggagctgcaccgccgcctggagacgtccatgaagtggtgtgatgaagggatttacctgctggcctcacaacctgtggacaagtgccagtcccaggacggcgcggaggctgccctccaggaaatcgagaagtttttggagaccggtgcggaaaataagatccaggagctcaacgcgatttacaaggaatacgaatccatcctcaaccaagatctcatggagcacgtgcgaaaggtcttccagaagcaggcaagcatggaggaggtgttccaccgcaggcaggccagcctgaagaagctggcggccaggcagacgcggcccgtgcagccggtggcccccagacccgaggcactggcaaagtcgccctgcccctccccaggcattcggcgaggctctgagaactccagctccgagggcggtgcgctccggagagggccctaccggagggccaagagtgagatgagtgagagccggcagggccgcggctcagcgggggaggaggaggaaagcctggccatcctgcgcaggcacgtgatgagcgagctcctggacacagaacgggcctacgtggaggagctgctgtgcgtcctggagggctacgccgcggagatggataacccactgatggctcacctcctgtcaacaggccttcacaacaagaaggatgttttgtttggaaacatggaggaaatctatcacttccacaacaggatattcctcagggagctggaaaactacactgactgcccagaactggttggaagatgctttctggagaggatggaagatttccagatctatgagaagtactgtcagaacaagccccgctctgagagcctgtggagacagtgctccgactgcccgtttttccaggaatgccagagaaagctggaccacaagctgagcctggactcctacctgctgaagccagtgcagaggatcaccaagtaccagctgctgctcaaggaaatgctgaaatacagcaggaactgcgagggggctgaggacctgcaggaggcgctgagctccatcctgggcatcctgaaggccgtgaacgactccatgcacctcatcgctatcaccggctatgacgggaatctcggcgacctgggcaagctgctgatgcagggctcgttcagcgtctggaccgaccacaagaggggccacaccaaggtgaaggagctggccaggttcaagcccatgcagcggcacctgttcctgcacgagaaggcagtgctcttctgcaagaagagggaggagaatggggaggggtatgagaaagctccctcctacagctacaagcagtccttaaacatggctgccgttggcattacggagaacgtgaagggagatgctaagaagttcgagatctggtacaacgcgcgcgaggaggtctacatcgtccaggcgccaactcctgagattaaagccgcgtgggtgaatgaaattcggaaagtgctgaccagccagctgcaggcttgtagagaagccagccagcaccgggcgctggagcagtcacagagcctgcccctgccggccccgaccagcaccagtccctcaagaggaaactcaaggaacatcaagaagctggaagaaaggaaaacagaccccctaagcctggagggatacgtcagctcagcgccactgacaaagccccccgaaaagggcaaaggttggagcaaaacgtcccactcactggaggcacctgaggacgacgggggctggtcaagtgcagaggagcagattaactcgtccgacgcagaggaggacggcgggttgggccccaagaagctggttccaggtaaatacacggtcgtggcggaccacgagaagggaggccccgatgcgctgcgcgtgaggagcggggacgtggtggagctggtgcaggagggcgacgagggcctctggtacgtcagggacccgaccactggcaaggagggctgggtgccggccagcagcctgtccgtccggctcggcccgtccggctcggcccagtgcctgagcagctcaggtaaggcccacgtgccccgagcccacccgtga

SEQ ID NO: 17329 - DNA, 4590 bp, Homo sapiens
  source 1..4590: mol_type = unassigned DNA
ttgaagatgccggtcataatgctgagctccgtaccagacttacacggttacatcgataagtcgcagctgaccgaggacctgggtgggaccctggactactgccactcccggtggctgtgccagcgcacggccatcgaaagtttcgccctcatggtgaagcagacggctcagatgctgcagtccttcgggaccgagctggctgaaacagagctgcccaatgacgtccagtcgacaagctcagtgctgtgtgcgcacacagagaagaaggacaaggcgaaggaggatttgaggctggcactgaaagaggggcacagtgtcctggagagcctcagggagctgcaggctgagggctcagagcccagtgtgaaccaggaccagcttgacaaccaggccaccgtgcagaggctcctggcccagctgaacgaaaccgaggctgccttcgatgagttctgggcaaagcatcagcagaaactggagcagtgtctgcagctccggcactttgagcagggcttccgggaggtcaaagccatcttggacgcagcgtcccagaagatagcaaccttcacagacatcggcaacagcctggcgcatgtggagcacctgctgagggacctggccagcttcgaggagaaatcaggcgtggccgtggagagggcccgggccctgtctctggacggcgagcagctcattgggaacaagcactacgcggtagactccatccgcccaaagtgccaggagctccggcacctctgtgaccagttctctgcggagatcgcaaggaggagggggctgctcagcaagtccctggagctgcaccgccgcctggagacgtccatgaagtggtgtgatgaagggatttacctgctggcctcacaacctgtggacaagtgccagtcccaggacggcgcggaggctgccctccaggaaatcgagaagtttttggagaccggtgcggaaaataagatccaggagctcaacgcgatttacaaggaatacgaatccatcctcaaccaagatctcatggagcacgtgcgaaaggtcttccagaagcaggcaagcatggaggaggtgttccaccgcaggcaggccagcctgaagaagctggcggccaggcagacgcggcccgtgcagccggtggcccccagacccgaggcactggcaaagtcgccctgcccctccccaggcattcggcgaggctctgagaactccagctccgagggcggtgcgctccggagagggccctaccggagggccaagagtgagatgagtgagagccggcagggccgcggctcagcgggggaggaggaggaaagcctggccatcctgcgcaggcacgtgatgagcgagctcctggacacagaacgggcctacgtggaggagctgctgtgcgtcctggagggctacgccgcggagatggataacccactgatggctcacctcctgtcaacaggccttcacaacaagaaggatgttttgtttggaaacatggaggaaatctatcacttccacaacaggatattcctcagggagctggaaaactacactgactgcccagaactggttggaagatgctttctggagaggatggaagatttccagatctatgagaagtactgtcagaacaagccccgctctgagagcctgtggagacagtgctccgactgcccgtttttccaggaatgccagagaaagctggaccacaagctgagcctggactcctacctgctgaagccagtgcagaggatcaccaagtaccagctgctgctcaaggaaatgctgaaatacagcaggaactgcgagggggctgaggacctgcaggaggcgctgagctccatcctgggcatcctgaaggccgtgaacgactccatgcacctcatcgctatcaccggctatgacgggaatctcggcgacctgggcaagctgctgatgcagggctcgttcagcgtctggaccgaccacaagaggggccacaccaaggtgaaggagctggccaggttcaagcccatgcagcggcacctgttcctgcacgagaaggcagtgctcttctgcaagaagagggaggagaatggggaggggtatgagaaagctccctcctacagctacaagcagtccttaaacatggctgccgttggcattacggagaacgtgaagggagatgctaagaagttcgagatctggtacaacgcgcgcgaggaggtctacatcgtccaggcgccaactcctgagattaaagccgcgtgggtgaatgaaattcggaaagtgctgaccagccagctgcaggcttgtagagaagccagccagcaccgggcgctggagcagtcacagagcctgcccctgccggccccgaccagcaccagtccctcaagaggaaactcaaggaacatcaagaagctggaagaaaggaaaacagaccccctaagcctggagggatacgtcagctcagcgccactgacaaagccccccgaaaagggcaaaggttggagcaaaacgtcccactcactggaggcacctgaggacgacgggggctggtcaagtgcagaggagcagattaactcgtccgacgcagaggaggacggcgggttgggccccaagaagctggttccaggtaaatacacggtcgtggcggaccacgagaagggaggccccgatgcgctgcgcgtgaggagcggggacgtggtggagctggtgcaggagggcgacgagggcctctggtacgtcagggacccgaccactggcaaggagggctgggtgccggccagcagcctgtccgtccggctcggcccgtccggctcggcccagtgcctgagcagctcagagtcgagcccggggtcggccgtgctgagcaactcgtccagctgcagcgagggcggccaggcccccttctccgacctgcaggggtagcgcggcctcggcgccggagacccgcgcgctgtctggggctgcggtggcgtggggagggcgcggcccccggacgccccgaggaaggggcacctcaccgcccccacccagagcgcctggccgtgcgggctgcagaggacccctccggggcagaggcaggttccacggaagaccccggcccgctggggcttccccggagactccagagcccacagaggaggggccgcagggaacagccccgggcggcaggcgccgggcagcggcatctcgtcctggctccaccgtgctgcttctgcctctggacggtgctttcaggggacgcgcggaccgtggtggagctgcttccggagaagtggaggatcctctggccaacggcctgaggagagcggggcacggggtctctttagcttttacaagttttaggattttttcaagcagggatcaatcccgtggccattttttgtggtactttggcctcaattcttcaccaggaatcactgtgtttacatgaaatgacaatttgatactgtatttgatagaaaactatttttttgttaccggggtttacatagaagcacgttgtttataccactaagtgactttgggggggctctcccatggaaacggatggcactccctgaagctccctggtcacaggtggatgaaaacgtgtccgtgggtgacatcaggtggtgtctccaccaccaaaagcagttagaagccaaggagattcctttatctacctagggttcattttcaaaagaaaatttaaactataatttaaacaattaacgttcttttctacaaaaaaaatgcagggacttgatttttttaaagagcttcactgaattaggatatttttattgcttttaaagaaaatacaaagatgcagtttctgcagggtgtggcgtggaccagtgctgccgaccatagctcagagagccctgcccctgcctcactgcactgcagcctcctcggaggccgcacctccactccactccccacgcgccccctgcctcccacccaggtccacctgccacctggtgaccaccttgagtacagaagtgaaagtggggagagtattttattcaagtcacagcagaactggaaaaaaactcttctgttttaccaacttcttgtgtttcagaaacatattctgttcaaaacttttgaagccctttcggtgtctagtctgcagatgtttttgtatgtgtgcacctctgaccatgtgtgtacatatgtgtcttgctggaaaggacatattcgctgtccccgtgctgctgggagggccgcctcacagcctcacggttcccagccccagcacagtggaggcaggcgtggctgcattcccctcacgctaccctcccagcggcttgtagccgtcactggccagacctccagggtgcggaatcaaataggaagcatgcagagactcggcagcttttcctctgatgtgtaagttatttggaacgcgtgctgtgtcccgcgatgtccctgatgtactgtgcaggcgcggtgcctccgtctcgtcgcacagctgcgcgcccttgtgtgaccctccccataaaggcactttacagcttcatgtttcatccactgtcacttttttttaactgctgatgtaaatggaattttaaaagcagagttctttattgtatggatgacgtttgaataaatatcagcaactcctgc

SEQ ID NO: 17330 - DNA, 3424 bp, Homo sapiens
  source 1..3424: mol_type = unassigned DNA
ctgcagcctcatgtttgactgttggagatttatcctgtgcaagagacctggaagcaacagttattcttccccacaacggcccaatgaggccaaaaaggaggaaacggatcaccaaattgatgtgtctgacgtcatcaggcttgttcaagacacaccggaggcgacggccatggccacagatgaaatcatgcaccaggacatcgtcccgctctgtgctgccgacatccaggaccagctaaagaagcgctttgcttacctgtccggtgggcgggggcaggacggaagcccggttatcaccttccctgactacccggccttcagcgagattccggacaaggagttccagaatgtcatgacctacctcaccagcatccccagcctgcaggacgctggcatcggattcatcctggtgatagaccggcgacgggacaaatggacctccgtgaaggcgtccgtcctgcgcatcgcagcatctttcccggcaaacctgcagctcgtcctcgtgcttcgcccgacgggttttttccaaaggactctctccgacatcgctttcaaattcaatagagatgactttaagatgaaggtgccggtcataatgctgagctccgtaccagacttacacggttacatcgataagtcgcagctgaccgaggacctgggtgggaccctggactactgccactcccggtggctgtgccagcgcacggccatcgaaagtttcgccctcatggtgaagcagacggctcagatgctgcagtccttcgggaccgagctggctgaaacagagctgcccaatgacgtccagtcgacaagctcagtgctgtgtgcgcacacagagaagaaggacaaggcgaaggaggatttgaggctggcactgaaagaggggcacagtgtcctggagagcctcagggagctgcaggctgagggctcagagcccagtgtgaaccaggaccagcttgacaaccaggccaccgtgcagaggctcctggcccagctgaacgaaaccgaggctgccttcgatgagttctgggcaaagcatcagcagaaactggagcagtgtctgcagctccggcactttgagcagggcttccgggaggtcaaagccatcttggacgcagcgtcccagaagatagcaaccttcacagacatcggcaacagcctggcgcatgtggagcacctgctgagggacctggccagcttcgaggagaaatcaggcgtggccgtggagagggcccgggccctgtctctggacggcgagcagctcattgggaacaagcactacgcggtagactccatccgcccaaagtgccaggagctccggcacctctgtgaccagttctctgcggagatcgcaaggaggagggggctgctcagcaagtccctggagctgcaccgccgcctggagacgtccatgaagtggtgtgatgaagggatttacctgctggcctcacaacctgtggacaagtgccagtcccaggacggcgcggaggctgccctccaggaaatcgagaagtttttggagaccggtgcggaaaataagatccaggagctcaacgcgatttacaaggaatacgaatccatcctcaaccaagatctcatggagcacgtgcgaaaggtcttccagaagcaggcaagcatggaggaggtgttccaccgcaggcaggccagcctgaagaagctggcggccaggcagacgcggcccgtgcagccggtggcccccagacccgaggcactggcaaagtcgccctgcccctccccaggcattcggcgaggctctgagaactccagctccgagggcggtgcgctccggagagggccctaccggagggccaagagtgagatgagtgagagccggcagggccgcggctcagcgggggaggaggaggaaagcctggccatcctgcgcaggcacgtgatgagcgagctcctggacacagaacgggcctacgtggaggagctgctgtgcgtcctggagggctacgccgcggagatggataacccactgatggctcacctcctgtcaacaggccttcacaacaagaaggatgttttgtttggaaacatggaggaaatctatcacttccacaacaggatattcctcagggagctggaaaactacactgactgcccagaactggttggaagatgctttctggagaggatggaagatttccagatctatgagaagtactgtcagaacaagccccgctctgagagcctgtggagacagtgctccgactgcccgtttttccaggaatgccagagaaagctggaccacaagctgagcctggactcctacctgctgaagccagtgcagaggatcaccaagtaccagctgctgctcaaggaaatgctgaaatacagcaggaactgcgagggggctgaggacctgcaggaggcgctgagctccatcctgggcatcctgaaggccgtgaacgactccatgcacctcatcgctatcaccggctatgacgggaatctcggcgacctgggcaagctgctgatgcagggctcgttcagcgtctggaccgaccacaagaggggccacaccaaggtgaaggagctggccaggttcaagcccatgcagcggcacctgttcctgcacgagaaggcagtgctcttctgcaagaagagggaggagaatggggaggggtatgagaaagctccctcctacagctacaagcagtccttaaacatggctgccgttggcattacggagaacgtgaagggagatgctaagaagttcgagatctggtacaacgcgcgcgaggaggtctacatcgtccaggcgccaactcctgagattaaagccgcgtgggtgaatgaaattcggaaagtgctgaccagccagctgcaggcttgtagagaagccagccagcaccgggcgctggagcagtcacagagcctgcccctgccggccccgaccagcaccagtccctcaagaggaaactcaaggaacatcaagaagctggaagaaaggaaaacagaccccctaagcctggagggatacgtcagctcagcgccactgacaaagccccccgaaaagggcaaaggttggagcaaaacgtcccactcactggaggcacctgaggacgacgggggctggtcaagtgcagaggagcagattaactcgtccgacgcagaggaggacggcgggttgggccccaagaagctggttccaggtaaatacacggtcgtggcggaccacgagaagggaggccccgatgcgctgcgcgtgaggagcggggacgtggtggagctggtgcaggagggcgacgagggcctctggtacgtcagggacccgaccactggcaaggagggctgggtgccggccagcagcctgtccgtccggctcggcccgtccggctcggcccagtgcctgagcagctcaggtaaggcccacgtgccccgagcccacccgtga

SEQ ID NO: 17331 - DNA, 5067 bp, Homo sapiens
  source 1..5067: mol_type = unassigned DNA
atgaggttttggctgaggactgaagagatggccttggaagaaatggtgcagagattaaatgcggtttccaagcacacggatgaaatcatgcaccaggacatcgtcccgctctgtgctgccgacatccaggaccagctaaagaagcgctttgcttacctgtccggtgggcgggggcaggacggaagcccggttatcaccttccctgactacccggccttcagcgagattccggacaaggagttccagaatgtcatgacctacctcaccagcatccccagcctgcaggacgctggcatcggattcatcctggtgatagaccggcgacgggacaaatggacctccgtgaaggcgtccgtcctgcgcatcgcagcatctttcccggcaaacctgcagctcgtcctcgtgcttcgcccgacgggttttttccaaaggactctctccgacatcgctttcaaattcaatagagatgactttaagatgaaggtgccggtcataatgctgagctccgtaccagacttacacggttacatcgataagtcgcagctgaccgaggacctgggtgggaccctggactactgccactcccggtggctgtgccagcgcacggccatcgaaagtttcgccctcatggtgaagcagacggctcagatgctgcagtccttcgggaccgagctggctgaaacagagctgcccaatgacgtccagtcgacaagctcagtgctgtgtgcgcacacagagaagaaggacaaggcgaaggaggatttgaggctggcactgaaagaggggcacagtgtcctggagagcctcagggagctgcaggctgagggctcagagcccagtgtgaaccaggaccagcttgacaaccaggccaccgtgcagaggctcctggcccagctgaacgaaaccgaggctgccttcgatgagttctgggcaaagcatcagcagaaactggagcagtgtctgcagctccggcactttgagcagggcttccgggaggtcaaagccatcttggacgcagcgtcccagaagatagcaaccttcacagacatcggcaacagcctggcgcatgtggagcacctgctgagggacctggccagcttcgaggagaaatcaggcgtggccgtggagagggcccgggccctgtctctggacggcgagcagctcattgggaacaagcactacgcggtagactccatccgcccaaagtgccaggagctccggcacctctgtgaccagttctctgcggagatcgcaaggaggagggggctgctcagcaagtccctggagctgcaccgccgcctggagacgtccatgaagtggtgtgatgaagggatttacctgctggcctcacaacctgtggacaagtgccagtcccaggacggcgcggaggctgccctccaggaaatcgagaagtttttggagaccggtgcggaaaataagatccaggagctcaacgcgatttacaaggaatacgaatccatcctcaaccaagatctcatggagcacgtgcgaaaggtcttccagaagcaggcaagcatggaggaggtgttccaccgcaggcaggccagcctgaagaagctggcggccaggcagacgcggcccgtgcagccggtggcccccagacccgaggcactggcaaagtcgccctgcccctccccaggcattcggcgaggctctgagaactccagctccgagggcggtgcgctccggagagggccctaccggagggccaagagtgagatgagtgagagccggcagggccgcggctcagcgggggaggaggaggaaagcctggccatcctgcgcaggcacgtgatgagcgagctcctggacacagaacgggcctacgtggaggagctgctgtgcgtcctggagggctacgccgcggagatggataacccactgatggctcacctcctgtcaacaggccttcacaacaagaaggatgttttgtttggaaacatggaggaaatctatcacttccacaacaggatattcctcagggagctggaaaactacactgactgcccagaactggttggaagatgctttctggagaggatggaagatttccagatctatgagaagtactgtcagaacaagccccgctctgagagcctgtggagacagtgctccgactgcccgtttttccaggaatgccagagaaagctggaccacaagctgagcctggactcctacctgctgaagccagtgcagaggatcaccaagtaccagctgctgctcaaggaaatgctgaaatacagcaggaactgcgagggggctgaggacctgcaggaggcgctgagctccatcctgggcatcctgaaggccgtgaacgactccatgcacctcatcgctatcaccggctatgacgggaatctcggcgacctgggcaagctgctgatgcagggctcgttcagcgtctggaccgaccacaagaggggccacaccaaggtgaaggagctggccaggttcaagcccatgcagcggcacctgttcctgcacgagaaggcagtgctcttctgcaagaagagggaggagaatggggaggggtatgagaaagctccctcctacagctacaagcagtccttaaacatggctgccgttggcattacggagaacgtgaagggagatgctaagaagttcgagatctggtacaacgcgcgcgaggaggtctacatcgtccaggcgccaactcctgagattaaagccgcgtgggtgaatgaaattcggaaagtgctgaccagccagctgcaggcttgtagagaagccagccagcaccgggcgctggagcagtcacagagcctgcccctgccggccccgaccagcaccagtccctcaagaggaaactcaaggaacatcaagaagctggaagaaaggaaaacagaccccctaagcctggagggatacgtcagctcagcgccactgacaaagccccccgaaaagggcaaaggttggagcaaaacgtcccactcactggaggcacctgaggacgacgggggctggtcaagtgcagaggagcagattaactcgtccgacgcagaggaggacggcgggttgggccccaagaagctggttccaggtaaatacacggtcgtggcggaccacgagaagggaggccccgatgcgctgcgcgtgaggagcggggacgtggtggagctggtgcaggagggcgacgagggcctctggtacgtcagggacccgaccactggcaaggagggctgggtgccggccagcagcctgtccgtccggctcggcccgtccggctcggcccagtgcctgagcagctcagagtcgagcccggggtcggccgtgctgagcaactcgtccagctgcagcgagggcggccaggcccccttctccgacctgcaggggtagcgcggcctcggcgccggagacccgcgcgctgtctggggctgcggtggcgtggggagggcgcggcccccggacgccccgaggaaggggcacctcaccgcccccacccagagcgcctggccgtgcgggctgcagaggacccctccggggcagaggcaggttccacggaagaccccggcccgctggggcttccccggagactccagagcccacagaggaggggccgcagggaacagccccgggcggcaggcgccgggcagcggcatctcgtcctggctccaccgtgctgcttctgcctctggacggtgctttcaggggacgcgcggaccgtggtggagctgcttccggagaagtggaggatcctctggccaacggcctgaggagagcggggcacggggtctctttagcttttacaagttttaggattttttcaagcagggatcaatcccgtggccattttttgtggtactttggcctcaattcttcaccaggaatcactgtgtttacatgaaatgacaatttgatactgtatttgatagaaaactatttttttgttaccggggtttacatagaagcacgttgtttataccactaagtgactttgggggggctctcccatggaaacggatggcactccctgaagctccctggtcacaggtggatgaaaacgtgtccgtgggtgacatcaggtggtgtctccaccaccaaaagcagttagaagccaaggagattcctttatctacctagggttcattttcaaaagaaaatttaaactataatttaaacaattaacgttcttttctacaaaaaaaatgcagggacttgatttttttaaagagcttcactgaattaggatatttttattgcttttaaagaaaatacaaagatgcagtttctgcagggtgtggcgtggaccagtgctgccgaccatagctcagagagccctgcccctgcctcactgcactgcagcctcctcggaggccgcacctccactccactccccacgcgccccctgcctcccacccaggtccacctgccacctggtgaccaccttgagtacagaagtgaaagtggggagagtattttattcaagtcacagcagaactggaaaaaaactcttctgttttaccaacttcttgtgtttcagaaacatattctgttcaaaacttttgaagccctttcggtgtctagtctgcagatgtttttgtatgtgtgcacctctgaccatgtgtgtacatatgtgtcttgctggaaaggacatattcgctgtccccgtgctgctgggagggccgcctcacagcctcacggttcccagccccagcacagtggaggcaggcgtggctgcattcccctcacgctaccctcccagcggcttgtagccgtcactggccagacctccagggtgcggaatcaaataggaagcatgcagagactcggcagcttttcctctgatgtgtaagttatttggaacgcgtgctgtgtcccgcgatgtccctgatgtactgtgcaggcgcggtgcctccgtctcgtcgcacagctgcgcgcccttgtgtgaccctccccataaaggcactttacagcttcatgtttcatccactgtcacttttttttaactgctgatgtaaatggaattttaaaagcagagttctttattgtatggatgacgtttgaataaatatcagcaactcctgc

SEQ ID NO: 17332 - DNA, 2539 bp, Homo sapiens
  source 1..2539: mol_type = unassigned DNA
gtgccctcgcgcgacgcgaaggttgtcgggatccgcggcagcagcggctgcttgagatctgtttctggggcctctggcggtggcggcctggggcggcgcgacggctggtgcgcaggtacactgatgctgaagtactatgagccttcggaacttgtggagagactacaaagttttggttgttatggtccctttagttgggctcatacatttggggtggtacagaatcaaaagcagccctgttttccaaatacctaaaaacgacgacattcctgagcaagatagtctgggactttcaaatcttcagaagagccaaatccaggggaagtagcaggcttgcaatcttcaggtaaagaagcagctttgaatctgagcttcatatcgaaagaagagatgaaaaataccagttggattagaaagaactggcttcttgtagctgggatatctttcataggtgtccatcttggaacatactttttgcagaggtctgcaaagcagtctgtaaaatttcagtctcaaagcaaacaaaagagtattgaagagtgaagtaaaataaatatttggaattactaatttgtcattaaatcattctatgctgattagcttcataaacattgaactttttgattttatagccacaatgctgcatattcatactttaattcctaaagaataatttttaatgttaaaacgtgataatgcaataaatagaaaaatgtggtttacaaaataaaaacggtcttcactagttaccacctgaagtaagatgtctcgtttggaagctaagaagccatcattgtgtaagagtgaaccactgacaactgagagagtcaggaccacactttctgtcttgaaaagaattgtaacatcatgctatggcccctcaggtaggctgaagcagctgcacaatggctttggaggttacgtgtgtacaacctcacagtcctcagctctgctcagtcaccttttggtcacacatcccattttaaagatcctgacagcctccatacagaatcatgtgtcaagcttcagtgattgtggcttattcacagctattctttgctgcaacctgattgaaaatgttcagagattaggcttgacacccaccactgtcattagattaaataaacatcttttgagtctttgcatcagttatctcaagtctgagacctgtggttgtcgaatcccagtggactttagtagtactcagatcctcctttgtttggtgcgtagtatattaacaagtaaacctgcctgtatgctcaccagaaaggaaacagagcatgtcagtgctttgatcctgagagcctttttgcttacaattccagaaaatgctgaaggccacatcattttaggaaagagtttaattgtacctttaaaaggtcaaagagttatagattccactgtattacctgggatactcattgaaatgtcagaagttcaattaatgaggctattacctatcaaaaaatcaactgccctcaaggtggcactcttttgtacaactttatccggagacacttctgacactggagaaggaactgtggtggtcagttatggggtttctcttgaaaatgcagtcttggaccagctgcttaacctaggaaggcagctaatcagtgaccacgtagatcttgtcctgtgccaaaaagttatacatccatctttgaagcagtttctcaatatgcatcgtattattgccatagacagaattggagtgactctgatggaacccctgactaaaatgacaggaacacagcctattggatccctaggctcaatatgtcctaatagttatggaagtgtgaaagatgtgtgcactgcaaaatttggctccaaacatttttttcatcttattcctaatgaagcaacaatctgcagcttgcttctctgcaacagaaatgacactgcctgggatgagctgaagctcacgtgtcagacggcactgcatgtcctgcagttaacactcaaggaaccatgggctttgttgggaggtggctgtactgaaactcatttggctgcatatatcagacacaagactcacaacgacccagaaagcattctcaaagatgatgaatgtactcaaacagaacttcaattaattgctgaagcattttgcagtgccctagaatctgttgttggctctttagaacatgatggaggtgaaattctcactgacatgaagtatggacacctttggtcagttcaggcagattctccctgtgttgctaactggccagatttgctttcacagtgtggctgtggattatacaatagccaggaagaactcaactggtctttcttaagaagcacacgtcgtccatttgtgccacaaagctgccttccacatgaagctgtgggctcagccagcaacctgaccttggactgtttgactgcaaagcttagtggcctacaggtggctgtagagacagccaatttgattttggatctttcatatgttattgaagataaaaactaagagaatagcatgttcgtattacaagagaaacaaataaactagtctgttggcaattgagaaaaa

SEQ ID NO: 17333 - DNA, 2663 bp, Homo sapiens
  source 1..2663: mol_type = unassigned DNA
gggaaaacactttaggttgagtgctgagagaaaggctctctgagtaggtgacatctgaactaagagctgaagcagaagaataagccatcctctgtggaccaaaggggacaagattctctacttttctgctacgcactaggaatatagcagagaagacaagtggctgctaccttctgttatcgtgggtggcagtgactagtttttctagatcttgactccctgccgtaactaaagatggagtacactgatgctgaagtactatgagccttcggaacttgtggagagactacaaagttttggttgttatggtccctttagttgggctcatacatttggggtggtacagaatcaaaagcagccctgttttccaaatacctaaaaacgacgacattcctgagcaagatagtctgggactttcaaatcttcagaagagccaaatccaggggaagtagcaggcttgcaatcttcaggtaaagaagcagctttgaatctgagcttcatatcgaaagaagagatgaaaaataccagttggattagaaagaactggcttcttgtagctgggatatctttcataggtgtccatcttggaacatactttttgcagaggtctgcaaagcagtctgtaaaatttcagtctcaaagcaaacaaaagagtattgaagagtgaagtaaaataaatatttggaattactaatttgtcattaaatcattctatgctgattagcttcataaacattgaactttttgattttatagccacaatgctgcatattcatactttaattcctaaagaataatttttaatgttaaaacgtgataatgcaataaatagaaaaatgtggtttacaaaataaaaacggtcttcactagttaccacctgaagtaagatgtctcgtttggaagctaagaagccatcattgtgtaagagtgaaccactgacaactgagagagtcaggaccacactttctgtcttgaaaagaattgtaacatcatgctatggcccctcaggtaggctgaagcagctgcacaatggctttggaggttacgtgtgtacaacctcacagtcctcagctctgctcagtcaccttttggtcacacatcccattttaaagatcctgacagcctccatacagaatcatgtgtcaagcttcagtgattgtggcttattcacagctattctttgctgcaacctgattgaaaatgttcagagattaggcttgacacccaccactgtcattagattaaataaacatcttttgagtctttgcatcagttatctcaagtctgagacctgtggttgtcgaatcccagtggactttagtagtactcagatcctcctttgtttggtgcgtagtatattaacaagtaaacctgcctgtatgctcaccagaaaggaaacagagcatgtcagtgctttgatcctgagagcctttttgcttacaattccagaaaatgctgaaggccacatcattttaggaaagagtttaattgtacctttaaaaggtcaaagagttatagattccactgtattacctgggatactcattgaaatgtcagaagttcaattaatgaggctattacctatcaaaaaatcaactgccctcaaggtggcactcttttgtacaactttatccggagacacttctgacactggagaaggaactgtggtggtcagttatggggtttctcttgaaaatgcagtcttggaccagctgcttaacctaggaaggcagctaatcagtgaccacgtagatcttgtcctgtgccaaaaagttatacatccatctttgaagcagtttctcaatatgcatcgtattattgccatagacagaattggagtgactctgatggaacccctgactaaaatgacaggaacacagcctattggatccctaggctcaatatgtcctaatagttatggaagtgtgaaagatgtgtgcactgcaaaatttggctccaaacatttttttcatcttattcctaatgaagcaacaatctgcagcttgcttctctgcaacagaaatgacactgcctgggatgagctgaagctcacgtgtcagacggcactgcatgtcctgcagttaacactcaaggaaccatgggctttgttgggaggtggctgtactgaaactcatttggctgcatatatcagacacaagactcacaacgacccagaaagcattctcaaagatgatgaatgtactcaaacagaacttcaattaattgctgaagcattttgcagtgccctagaatctgttgttggctctttagaacatgatggaggtgaaattctcactgacatgaagtatggacacctttggtcagttcaggcagattctccctgtgttgctaactggccagatttgctttcacagtgtggctgtggattatacaatagccaggaagaactcaactggtctttcttaagaagcacacgtcgtccatttgtgccacaaagctgccttccacatgaagctgtgggctcagccagcaacctgaccttggactgtttgactgcaaagcttagtggcctacaggtggctgtagagacagccaatttgattttggatctttcatatgttattgaagataaaaactaagagaatagcatgttcgtattacaagagaaacaaataaactagtctgttggcaattgagaaaaa

SEQ ID NO: 17334 - DNA, 2918 bp, Homo sapiens
  source 1..2918: mol_type = unassigned DNA
gctagggaacactgttatcgccccgccccctcggagctttttctccagttaactgtcggagtagcgggggctccggcgccgggcgacatgccggtgcgcttcaaggggctgagtgaataccagaggaacttcctgtggaaaaagtcttatttgtccgagtcttgtaattcctccgtggggcgaaagtacccatgggctggacttagatcagatcaattaggcatcacgaaagagccaagttttatttcaaaaagaagagtcccttaccatgacccacagatttcaaaatctctggagtggaatggagctatctcagagagcaatgtggttgcatcaccagaaccagaagccccggaaacaccaaaatcacaagaagcagaacaaaaggatgttactcaagaaagagttcactcactagaagcttccagggttcccaaaagaaccagatctcactctgcagactccagagctgaaggggcttcagatgtggaaaataatgagggtgtaacaaaccatacaccagttaatgaaaatgtggaactggaacattctaccaaggttctttcagaaaatgtagataatgggttggatagacttctgcgtaagaaagctggattgactgttgttccttcatataatgccttgagaaattctgaatatcaaaggcagtttgtttggaagacttctaaagaaactgctccagcttttgcagccaatcaggttttccacaataaaagccagtttgttccaccattcaaaggtaactcagtcatccatgaaactgaatacaaaagaaatttcaagggtttatctccagtgaaagaaccaaaattaagaaatgatttgagagaaaacagaaatcttgaaacagtgtctcctgaaaggaagagtaataaaatagacgatcgtttaaaattggaagcagagatggaattaaaagacttacaccagcctaaaaggaagcttactccttggaaacatcaaaggcttgggaaggtgaattccgaatatagagcaaaatttctgagcccagctcagtatttatataaagctggggcttggacacatgtaaagggaaacatgccaaatcaggttaaagaactccgagaaaaggctgagttttataggaagcgagttcaggggacgcatttttctcgggaccatctgaatcagattttatctgatagcaactgctgttgggatgtctcctcaaccacaagctcagaaggaaccgttagtagcaacatcagagcattagatcttgctggagatcctacaagccataagactttgcagaaatgtccttctacagaaccagaagaaaaaggaaatatcgtggaagaacagccccagaaaaataccacggagaaattgggtgtgtcagctcccaccatacccgttagaaggcggctggcttgggatacagagaacacaagtgaagacgtacagaaacagcccggggagaaagaggaggaggacgacaatgaagaggaaggggacaggaaaacgggcaagcaggcttttatgggagagcaagagaagttggatgtacgtgagaaatctaaggcagataagatgaaagaagggtcagattcttctgtatcctcagaaaaaggaggccggcttcctactcccaagctgagagaacttggtggaatccagaggactcatcatgatctcactactccagctgttggtggtgctgttttagtgtctccatctaagatgaagcctccagccccagaacagaggaaaagaatgacctctcaggattgtttagaaacttcaaagaatgattttactaagaaagaaagtcgtgctgtatccctactgacttctccagctgctggtataaaaacagttgatcctctgcctttgcgggaagattctgaagacaatatccacaaatttgctgaggcaactcttccagtttcaaaaattccaaaatacccaacaaatccccctggacagttgccttctccaccacatgttccatcctactggcatccctctcgacgaattcagggctctcttagagatccagagtttcagcacaatgtgggaaaagcaaggatgaacaatttgcagttacctcaacatgaagcctttaatgatgaagatgaggacagattgtctgagatttctgctcgctctgcagcttctagtctccgggcttttcaaactctggcacgagctaagaaaaggaaggagaatttctggggtaaaacataaacctagctgagttgcctttatctaaggaaacattggcataatttttctttattgcttactgtgttaaaattttttgagtgaagtttttcctaacgttttctactttgaaatatttaatttccaatagaacagtttacttggaaattgttaacataggcttatacaaatttaacttttaaagaattctttttacatctatcccagagtacaaagacctagattattgaattcttcacatgtaactttcgtaataggtgtcatggatagattttcacctatccagagagtattctaaaaaaataaacaaagtgaagtaaaagttaagatcccagtgtgaagtatatattcccctaagatttgatatatgtatctttataattgatgatgttgtaaaatgaatttgttgttcctttaacctttgctgtagtgtttctttttattttagttccttctatacatgtttgcagtgttaagataattgtactttgaaaacaccagctgtatatatttttcttatttatgtaacaaagtttgctgaaagatatgtatatttttgatctttgagtgtattctatttgtgtaaggactttggcttacatttgaataatgtctagattttgaaaaattacctgtataatggagaattaaaactttgtagacattttgaaataaaaatggatcaagtg

SEQ ID NO: 17335 - DNA, 2718 bp, Homo sapiens
  source 1..2718: mol_type = unassigned DNA
acactgttatcgccccgccccctcggagctttttctccagttaactgtcggagtagcgggggctccggcgccgggcgacatgccggtgcgcttcaaggggctgagtgaataccagaggaacttcctgtggaaaaagtcttatttgtccgagtcttgtaattcctccgtggggcgaaagtacccatgggctggacttagatcagatcaattaggaaatcaaggcagatgtagaaccaagatccagcacagtgacatctcatcccttctcatcttggtctgctccacataagagaagctttgtgaaaagttccaaattttgacagtaccagggcccattgttctgttaagtagcacaggaaagtaattagaaacgaggcagcatgtactgcctggcctgccaggtctatcacgttgcaattctagtgacttttgttaggataactggaacattttgtgaccccctgatttttaattttttgttatggtcaaatttttaatgcttttaaaagcaaaattaaatattttatgttgaaaagctgtacttttaaaatcctataatctgaaggatattgtgtgtatatataggtacatatatctgaactaaatttaaaatttcatttctcctccacaagtgttcttaaaagttgtctttgtaactttttgctttagtagctactatttttgtataccgtgttttgtaggcatcacgaaagagccaagttttatttcaaaaagaagagtcccttaccatgacccacagatttcaaaatctctggagtggaatggagctatctcagagagcaatgtggttgcatcaccagaaccagaagccccggaaacaccaaaatcacaagaagcagaacaaaaggatgttactcaagaaagagttcactcactagaagcttccagggttcccaaaagaaccagatctcactctgcagactccagagctgaaggggcttcagatgtggaaaataatgagggtgtaacaaaccatacaccagttaatgaaaatgtggaactggaacattctaccaaggttctttcagaaaatgtagataatggggtaggcatattcactgcatttcttttcaaaagcatagaattcttcattggtttcattgtcatttctgtaatattacattttgtgtttcagaattttccattgttgttttcttgtctaatgtctataagaatagttgataacaggctgttgactttagttattgtgaattagttctattctgactactcgctattttgtagtagttgtactatgataatctgtttattggatggacctcctgcgtctggattttattcatcatatattagcacctgagtcctaagggagagatcaagttgagacagagaagggaagtaggcccttacttctggcagggtgctgagctgacttctacctagccccttttcagtttcttatcgtgtacaagaagacaaacagaaattcaattgatgaaatgcaaaaggaaggagagctctggctgtctctcagagatcttgcatttctgctctcttatgtcacagctggcctgcagcaggtccctgtgagcacataagcagaggctgcaggaacttgtgtggggatctcaatgctttccacatttctttctccattctgttccactgctcttctctggttcatgtccaccactgactgggaccctgaagaggcatttcagagtgttggagaagaatctgtagcttgttgaaaaagctgggggtgaaagggaacaaggaaggtgatgtgtgagtctggcaggcaggagaaggggtgttcatagaagcagtgtgcaggtgaggcaaagtgctgggactttttggtaatagatttaattatgaatgattagtaggaaaggactgagagtattatatttttcctgggatgcctaatagtcctttgatagaaaggaattttaaatagtttgacacttgaaaaaagatactatttataagttgaagaaagtttgctgtaccacaatgcgcatgtagttaacaattttgcactgtagatttaacattttgttaagaggatagatttcatgttatgcattttttaccacaatttttaaaaagtttgaatagaaatttttaatgtctttgagtggattttgttttttgaacagttggatagacttctgcgtaagaaagctggattgactgttgttccttcatataatgccttgagaaattctgaatatcaaaggcagtttgtttggaagacttctaaagaaactgctccagcttttgcagccaatcaggtagcttaatggatgtaatacatttctgagtaccattatcttatctagtaatgtagatttacatagaattaagagttgaaagaaattaagtacttaagtagcctggaggtaggttctagaaaaccaaaatgagagttttgctaaaatcatcctattacttatgatttatggtagtaatattatactgtcctaggcttctgatgatcattgttgccagatgcagcacatatactaaatatgagacagggtaatgaaaacttggggaactggtaagtttttgcatgctacaagatttttttacttattaaaaaattattaaattgattttattctaaaatgttgtgttttgttgactaatatattgcgtgtttcctgtattctaagaaaggcgtaactgctttgaatatttaataaatacaaaatatgttgacagtaa

SEQ ID NO: 17336 - DNA, 2170 bp, Homo sapiens
  source 1..2170: mol_type = unassigned DNA
aagcgcggagtgcgccggcgcgtagtcggggacgccgggccgaggctttgctagggaacactgttatcgccccgccccctcggagctttttctccagttaactgtcggagtagcgggggctccggcgccgggcgacatgccggtgcgcttcaaggggctgagtgaataccagaggaacttcctgtggaaaaagtcttatttgtccgagtcttgtaattcctccgtggggcgaaagtacccatgggctggacttagatcagatcaattaggcatcacgaaagagccaagttttatttcaaaaagaagagtcccttaccatgacccacagatttcaaaatctctggagtggaatggagctatctcagagagcaatgtggttgcatcaccagaaccagaagccccggaaacaccaaaatcacaagaagcagaacaaaaggatgttactcaagaaagagttcactcactagaagcttccagggttcccaaaagaaccagatctcactctgcagactccagagctgaaggggcttcagatgtggaaaataatgagggtgtaacaaaccatacaccagttaatgaaaatgtggaactggaacattctaccaaggttctttcagaaaatgtagataatggggtaggcatattcactgcatttcttttcaaaagcatagaattcttcattggtttcattgtcatttctgtaatattacattttgtgtttcagaattttccattgttgttttcttgtctaatgtctataagaatagttgataacaggctgttgactttagttattgtgaattagttctattctgactactcgctattttgtagtagttgtactatgataatctgtttattggatggacctcctgcgtctggattttattcatcatatattagcacctgagtcctaagggagagatcaagttgagacagagaagggaagtaggcccttacttctggcagggtgctgagctgacttctacctagccccttttcagtttcttatcgtgtacaagaagacaaacagaaattcaattgatgaaatgcaaaaggaaggagagctctggctgtctctcagagatcttgcatttctgctctcttatgtcacagctggcctgcagcaggtccctgtgagcacataagcagaggctgcaggaacttgtgtggggatctcaatgctttccacatttctttctccattctgttccactgctcttctctggttcatgtccaccactgactgggaccctgaagaggcatttcagagtgttggagaagaatctgtagcttgttgaaaaagctgggggtgaaagggaacaaggaaggtgatgtgtgagtctggcaggcaggagaaggggtgttcatagaagcagtgtgcaggtgaggcaaagtgctgggactttttggtaatagatttaattatgaatgattagtaggaaaggactgagagtattatatttttcctgggatgcctaatagtcctttgatagaaaggaattttaaatagtttgacacttgaaaaaagatactatttataagttgaagaaagtttgctgtaccacaatgcgcatgtagttaacaattttgcactgtagatttaacattttgttaagaggatagatttcatgttatgcattttttaccacaatttttaaaaagtttgaatagaaatttttaatgtctttgagtggattttgttttttgaacagttggatagacttctgcgtaagaaagctggattgactgttgttccttcatataatgccttgagaaattctgaatatcaaaggcagtttgtttggaagacttctaaagaaactgctccagcttttgcagccaatcaggtagcttaatggatgtaatacatttctgagtaccattatcttatctagtaatgtagatttacatagaattaagagttgaaagaaattaagtacttaagtagcctggaggtaggttctagaaaaccaaaatgagagttttgctaaaatcatcctattacttatgatttatggtagtaatattatactgtcctaggcttctgatgatcattgttgccagatgcagcacatatactaaatatgagacagggtaatgaaaacttggggaactggtaagtttttgcatgctacaagatttttttacttattaaaaaattattaaa

SEQ ID NO: 17337 - DNA, 2472 bp, Homo sapiens
  source 1..2472: mol_type = unassigned DNA
agttaactgtcggagtagcgggggctccggcgccgggcgacatgccggtgcgcttcaaggggctgagtgaataccagaggaacttcctgtggaaaaagtcttatttgtccgagtcttgtaattcctccgtggggcgaaagtacccatgggctggacttagatcagatcaattaggcatcacgaaagagccaagttttatttcaaaaagaagagtcccttaccatgacccacagatttcaaaatctctggagtggaatggagctatctcagagagcaatgtggttgcatcaccagaaccagaagccccggaaacaccaaaatcacaagaagcagaacaaaaggatgttactcaagaaagagttcactcactagaagcttccagggttcccaaaagaaccagatctcactctgcagactccagagctgaaggggcttcagatgtggaaaataatgagggtgtaacaaaccatacaccagttaatgaaaatgtggaactggaacattctaccaaggttctttcagaaaatgtagataatggggttttccacaataaaagccagtttgttccaccattcaaaggtaactcagtcatccatgaaactgaatacaaaagaaatttcaagggtttatctccagtgaaagaaccaaaattaagaaatgatttgagagaaaacagaaatcttgaaacagtgtctcctgaaaggaagagtaataaaatagacgatcgtttaaaattggaagcagagatggaattaaaagacttacaccagcctaaaaggaagcttactccttggaaacatcaaaggcttgggaaggtgaattccgaatatagagcaaaatttctgagcccagctcagtatttatataaagctggggcttggacacatgtaaagggaaacatgccaaatcagggttctctaaatgccatgtggtatgctgaggttaaagaactccgagaaaaggctgagttttataggaagcgagttcaggggacgcatttttctcgggaccatctgaatcagattttatctgatagcaactgctgttgggatgtctcctcaaccacaagctcagaaggaaccgttagtagcaacatcagagcattagatcttgctggagatcctacaagccataagactttgcagaaatgtccttctacagaaccagaagaaaaaggaaatatcgtggaagaacagccccagaaaaataccacggagaaattgggtgtgtcagctcccaccatacccgttagaaggcggctggcttgggatacagagaacacaagtgaagacgtacagaaacagcccggggagaaagaggaggaggacgacaatgaagaggaaggggacaggaaaacgggcaagcaggcttttatgggagagcaagagaagttggatgtacgtgagaaatctaaggcagataagatgaaagaagggtcagattcttctgtatcctcagaaaaaggaggccggcttcctactcccaagctgagagaacttggtggaatccagaggactcatcatgatctcactactccagctgttggtggtgctgttttagtgtctccatctaagatgaagcctccagccccagaacagaggaaaagaatgacctctcaggattgtttagaaacttcaaagaatgattttactaagaaagaaagtcgtgctgtatccctactgacttctccagctgctggtataaaaacagttgatcctctgcctttgcgggaagattctgaagacaatatccacaaatttgctgaggcaactcttccagtttcaaaaattccaaaatacccaacaaatccccctggacagttgccttctccaccacatgttccatcctactggcatccctctcgacgaattcagggctctcttagagatccagagtttcagcacaatgtgggaaaagcaaggatgaacaatttgcagttacctcaacatgaagcctttaatgatgaagatgaggacagattgtctgagatttctgctcgctctgcagcttctagtctccgggcttttcaaactctggcacgagctaagaaaaggaaggagaatttctggggtaaaacataaacctagctgagttgcctttatctaaggaaacattggcataatttttctttattgcttactgtgttaaaattttttgagtgaagtttttcctaacgttttctactttgaaatatttaatttccaatagaacagtttacttggaaattgttaacataggcttatacaaatttaacttttaaagaattctttttacatctatcccagagtacaaagacctagattattgaattcttcacatgtaactttcgtaataggtgtcatggatagattttcacctatccagagagtattctaaaaaaataaacaaagtgaagtaaaagttaagatcccagtgtgaagtatatattcccctaagatttgatatatgtatctttataattgatgatgttgt

SEQ ID NO: 17338 - DNA, 3059 bp, Homo sapiens
  source 1..3059: mol_type = unassigned DNA
gatgtggaagccgagacctaaagttggggggtgatctctgaggagatggatcggtacctgctgctggtgatctggggggaaggaaaattcccgtcggcggccagtagggaggcagaacatgggccagaggtgtcgtcgggtgagggtactgagaatcagccggacttcacagcagcaaatgtttatcacctcttgaaaagaagcattagtgcttcaattaatccagaagatagtactttccctgcctgttcagtgggaggtatacctggttccaagaagtggttctttgcagtgcaggcaatatatggattttatcagttttgtagttctgattggcaagagatacattttgatacagaaaaagataaaattgaagatgttcttcaaacgaatatcgaagaatgtttgggtgctgttgagtgttttgaagaagaagacagtaatagcagggaatcattatccttggctgatctctatgaagaagctgcagaaaatttgcatcagctgtcagacaagcttcctgctcctggtagagcaatggtagatataatactgttgctttctgacaaagatcctcctaaattgaaagactatttacctactgtaggagcattaaaacatttgagagaatggtattcagcaaagatcactatagcaggaaatcattgtgaaataaactgtcagaaaattgcagaatacctttctgctaatgttgtatctttagaagatctcagaaatgttattgactcaaaggaattatggagggggaaaatacagatatgggaaagaaagtttggatttgaaattagttttcctgaattttgtttaaagggagtcacacttaagaattttagtacttctaatttaaatactgacttccttgccaaaaagatcataccatcaaaggataagaatattttgccaaaggttttccattattatggccctgctttagaatttgtgcagatgataaaattatcagatctaccctcctgctatatgtcggatattgaatttgagttaggattgacaaacagtaccaaacagaattctgtgttgctgttggagcagatttcttctctgtgtagcaaggttggtgctctttttgtattgccatgtaccattagtaacatactgattccacctcccaaccaactcagttcaagaaaatggaaggaatatatagctaaaaagcctaaaacaatcagtgttccagatgttgaagtgaaaggagagtgttctagctattatctcttgttacaaggtaatggcaatagaagatgtaaagccacattgattcactcagccaaccagatcaatggctcatttgcactcaatttaattcatggaaagatgaaaacaaagacagaagaagccaaattgagttttccttttgacttattatcacttccacatttttctggggagcagattgtacagagagagaaacagttagctaatgttcaagttttagctttggaagaatgcctaaaaagacgaaagttggcaaagcagcctgaaacagtttctgttgctgaactcaaaagtctgttagtactcacaaggaaacactttttagattattttgatgctgtgattcctaaaatgattctaagaaagatggacaaaattaaaaccttcaatatattaaatgattttagtccagtggaacctaattcctcaagtctaatggaaaccaatcctctggaatggccagaaaggcatgttcttcaaaatttggaaacttttgaaaaaactaaacaaaaaatgagaactggttcattacctcattcatctgaacagttgctgggccacaaagagggtcctcgggactcaatcacattgttggatgctaaagaattgctgaagtactttacctcagatggattacccattggagatcttcaacctttaccgattcaaaagggggaaaagacttttgttttgacaccagaacttagtcctgggaaacttcaggtcttaccttttgagaaagcctcagtatgtcattatcatggaattgaatattgcttggatgaccgaaaagctttggaaagagatggaggattttctgaacttcagtctcgtcttattcgttatgaaactcaaactacctgcaccagagaaagttttccagtacctactgtgttgagccctcttccatctcctgtagtttcgtcagatcctggaagtgtccctgacggagaagttttacaaaatgaacttcgaactgaagtatcccgattgaaacggagatctaaagatctgaattgcctttatcccagaaaaagacttgtgaaatctgaaagttcagagtctcttctttctcagacaactggtaatagtaatcactatcatcatcatgtgacatccagaaagccacaaacagaacggtccttaccagtgacttgtccattggttccaattcctagctgtgaaactccaaaacttgctacaaagaccagttcaggtcaaaaaagtatgcatgaatcaaaaacatcaaggcaaattaaggaatcaagatcacagaaacacacacggatactgaaagaagtagttactgaaaccctgaagaaacacagtattaccgagactcatgaatgtttcactgcatgcagccagcgtctctttgaaatctctaagttctatctaaaggatcttaaaacttcaaggggtctatttgaagaaatgaagaaaacagcaaacaacaatgctgtacaggtgattgactgggtattagaaaagacaagcaagaaatgatacataatcattctctttaagacaattataaattggatggagctattattcactacttcttttcttagtttgaaaattataaacaaattttaagctttattcaaagaatagatgttatatttctaaagaatttcatgaatatatattctatatttgtatagtttgagggatgctatgttaatgtatttttaattagatacatattttgtaaagtgttactatattttaaagttatttttatatgttttaaaatgtttactcttatttaattattacaataaacagaatttttttttttt

SEQ ID NO: 17339 - DNA, 2091 bp, Homo sapiens
  source 1..2091: mol_type = unassigned DNA
tcatggcggagaccgtctggagcactgacaccggggaggcagtgtatcgctcccgggaccccgtgcgcaacttgcgcctccgagtccacctgcaaagaatcacatcaagcaactttcttcattatcagcctgctgccgagctcgggaaggacctcatagacttggccacttttaggcctcagccaactgccagtggacaccgcccagaggaagacgaagaggaggagattgtgattgggtggcaggagaagctctttagccagtttgaagtagatctgtaccaaaatgaaacagcctgtcagagtcctttggattatcagtaccgtcaggagatcctgaagctggagaattcgggtggcaagaaaaaccgacgaatctttacctacactgactctgatagatacaccaatttggaggagcactgtcagagaatgaccactgcagccagcgaggtgccttcattcttggtcgagcgaatggcaaatgtcaggcgtcgccggcaggacaggcgagggatggagggcggcatcctcaagtcacgcatcgtcacctgggagccctcagaagagtttgtcaggaacaaccacgtcattaacacccctcttcagacaatgcacatcatggcagacctggggccctataaaaagcttggctataagaagtatgaacatgtcctgtgtactctgaaggtggatagcaatggtgtgatcacagtaaagcctgacttcacgggcctcaaaggaccctacaggattgagacggagggggagaagcaggagctgtggaaatatacgatcgacaatgtttccccccacgcacagccggaggaggaggagcgggaacggcgagtgttcaaggatctttatggccggcacaaggagtatctcagcagcctcgtaggcaccgactttgagatgactgtcccaggtgccctccggctctttgtaaatggagaggtcgtttcagcccaaggctatgagtatgacaatctctacgtccacttctttgtagaattgccaactgctcactggtcaagcccagcattccagcagctctcaggagtaacacagacctgcaccaccaagtccctggcaatggacaaggtggctcacttctcctacccattcacgtttgaagccttcttcctccatgaggatgaatcttctgatgcactcccggagtggcctgtgctctactgtgaggtcctctcgctggacttctggcagaggtaccgtgtggaaggctatggggctgtggtgctgcctgccactccagggccttcatggaatcgagctcccttcagaaaaggatgcggagtgtgttggaccgtctggaagggttcagccagcagagttccattcacaatgtgctagaggccttccgtcgagcccggcgccgcatgcaggaggcccgggaaagcctcccgcaggacctagtgagcccctctggaaccctggtctcctagctcacagcagccctggcccacagtgcaagaggacaagatgggggatatctgaggccagtgctctcctgcctcttcgtctttctgattagagaccacgttggtctgctgagaaccagaaaagctgggaaattcccggctggcccctctgcctagccttctgcagggtcttctccctaccctgtggaaataaagccagagaccctgtggccccccctttatatttgcagccactgtcaatgggcatcacagcaaggcaggctttttgatctgaagctgtttggggtgaccccatagtgagtctggccttgactcacttttctggcttgtctcacagtagcaggggatctgctgttctccaccctttaaaaatggagcctttcatcttccaagaccaaagaaggaaggaaggtggacggtgagagggtcttaaatccccagcctgtgagtctcagcctctttccagggaagcctcattctactgcttggggcttgctgaggttgagatatgagttatttctgagtaagtgaaggctgaaggcagtgctgagtcctttctgctagctgggtggtatcttttactgtgtttttttgtttgtttgtttttttgttttttgttacataaaccc

SEQ ID NO: 17340 - DNA, 1576 bp, Homo sapiens
  source 1..1576: mol_type = unassigned DNA
cgcagctgtcatggcggagaccgtctggagcactgacaccggggaggcagtgtatcgctcccgggaccccgtgcgcaacttgcgcctccgagtccacctgcaaagaatcacatcaagcaactttcttcattatcagcctgctgccgagctcgggaaggacctcatagacttggccacttttaggcctcagccaactgccagtggacaccgcccagaggaagacgaagaggaggagattgtgattgggtggcaggagaagctctttagccagtttgaagtagatctgtaccaaaatgaaacagcctgtcagagtcctttggattatcagtaccgtcaggagatcctgaagctggagaattcgggtggcaagaaaaaccgacgaatctttacctacactgactctgatagatacaccaatttggaggagcactgtcagagaatgaccactgcagccagcgaggtgccttcattcttggtcgagcgaatggcaaatgtcaggcgtcgccggcaggacaggcgagggatggagggcggcatcctcaagtcacgcatcgtcacctgggagccctcagaagagtttgtcaggaacaaccacgtcattaacacccctcttcagacaatgcacatcatggcagacctggggccctataaaaagcttggctataagaagtatgaacatgtcctgtgtactctgaaggtggatagcaatggtgtgatcacagtaaagcctgacttcacgggcctcaaaggaccctacaggattgagacggagggggagaagcaggagctgtggaaatatacgatcgacaatgtttccccccacgcacagccggaggaggaggagcgggaacggcgagtgttcaaggatctttatggccggcacaaggagtatctcagcagcctcgtaggcaccgactttgagatgactgtcccaggtgccctccggctctttgtaaatggagaggtcgtttcagcccaaggctatgagtatgacaatctctacgtccacttctttgtagaattgccaactgctcactggtcaagcccagcattccagcagctctcaggagtaacacagacctgcaccaccaagtccctggcaatggacaaggtggctcacttctcctacccattcacgtttgaagccttcttcctccatgaggatgaatcttctgatgcactcccggagtggcctgtgctctactgtgaggtcctctcgctggacttctggcagaggtaccgtgtggaaggctatggggctgtggtgctgcctgccactccaggctcacacaccctgacagtctccacgtggagacctgtggagcttggcacggtggctgagctgaggaggtttttcattggcggttctctggaactggaggacctctcctatgtacggataccaggatccttcaaggcactcctttcatcttccaagaccaaagaaggaaggaaggtggacggtgagagggtcttaaatccccagcctgtgagtctcagcctctttccagggaagcctcattctactgcttggggcttgctgaggttgagatatgagttatttctgagtaagtga

SEQ ID NO: 17341 - DNA, 2392 bp, Homo sapiens
  source 1..2392: mol_type = unassigned DNA
ccgatccagcgtctccgttgccaggaaaacagagcggcgcgctttccggcgcagtcgcggcgcgtcgcagctgtcatggcggagaccgtctggagcactgacaccggggaggcagtgtatcgctcccgggaccccgtgcgcaacttgcgcctccgagtccacctgcaaagaatcacatcaagcaactttcttcattatcagcctgctgccgagctcgggaaggacctcatagacttggccacttttaggcctcagccaactgccagtggacaccgcccagaggaagacgaagaggaggagattgtgattgggtggcaggagaagctctttagccagtttgaagtagatctgtaccaaaatgaaacagcctgtcagagtcctttggattatcagtaccgtcaggagatcctgaagctggagaattcgggtggcaagaaaaaccgacgaatctttacctacactgactctgatagatacaccaatttggaggagcactgtcagagaatgaccactgcagccagcgaggtgccttcattcttggtcgagcgaatggcaaatgtcaggcgtcgccggcaggacaggcgagggatggagggcggcatcctcaagtcacgcatcgtcacctgggagccctcagaagagtttgtcaggaacaaccacgtcattaacacccctcttcagacaatgcacatcatggcagacctggggccctataaaaagcttggctataagaagtatgaacatgtcctgtgtactctgaaggtggatagcaatggtgtgatcacagtaaagcctgacttcacgggcctcaaaggaccctacaggattgagacggagggggagaagcaggagctgtggaaatatacgatcgacaatgtttccccccacgcacagccggaggaggaggagcgggaacggcgagtgttcaaggatctttatggccggcacaaggagtatctcagcagcctcgtaggcaccgactttgagatgactgtcccaggtgccctccggctctttgtaaatggagaggtcgtttcagcccaaggctatgagtatgacaatctctacgtccacttctttgtagaattgccaactgctcactggtcaagcccagcattccagcagctctcaggagtaacacagacctgcaccaccaagtccctggcaatggacaaggtggctcacttctcctacccattcacgtttgaagccttcttcctccatgaggatgaatcttctgatgcactcccggagtggcctgtgctctactgtgaggtcctctcgctggacttctggcagaggtaccgtgtggaaggctatggggctgtggtgctgcctgccactccaggctcacacaccctgacagtctccacgtggagacctgtggagcttggcacggtggctgagctgaggaggtttttcattggcggttctctggaactggaggacctctcctatgtacggataccaggatccttcaagggggaacgcctgagccgctttggactccgcacagagaccacaggcactgtcaccttccgcttgcactgtctgcagcagtccagggccttcatggaatcgagctcccttcagaaaaggatgcggagtgtgttggaccgtctggaagggttcagccagcagagttccattcacaatgtgctagaggccttccgtcgagcccggcgccgcatgcaggaggcccgggaaagcctcccgcaggacctagtgagcccctctggaaccctggtctcctagctcacagcagccctggcccacagtgcaagaggacaagatgggggatatctgaggccagtgctctcctgcctcttcgtctttctgattagagaccacgttggtctgctgagaaccagaaaagctgggaaattcccggctggcccctctgcctagccttctgcagggtcttctccctaccctgtggaaataaagccagagaccctgtggccccccctttatatttgcagccactgtcaatgggcatcacagcaaggcaggctttttgatctgaagctgtttggggtgaccccatagtgagtctggccttgactcacttttctggcttgtctcacagtagcaggggatctgctgttctccaccctttaaaaatggagcctttcatcttccaagaccaaagaaggaaggaaggtggacggtgagagggtcttaaatccccagcctgtgagtctcagcctctttccagggaagcctcattctactgcttggggcttgctgaggttgagatatgagttatttctgagtaagtgaaggctgaaggcagtgctgagtcctttctgctagctgggtggtatcttttactgtgtttttttgtttgtttgtttttttgttttttgttacataaaccccttttattttg

SEQ ID NO: 17342 - DNA, 1748 bp, Homo sapiens
  source 1..1748: mol_type = unassigned DNA
ccgatccagcgtctccgttgccaggaaaacagagcggcgcgctttccggcgcagtcgcggcgcgtcgcagctgtcatggcggagaccgtctggagcactgacaccggggaggcagtgtatcgctcccgggaccccgtgcgcaacttgcgcctccgagtccacctgcaaagaatcacatcaagcaactttcttcattatcagcctgctgccgagctcgggaaggacctcatagacttggccacttttaggcctcagccaactgccagtggacaccgcccagaggaagacgaagaggaggagattgtgattgggtggcaggagaagctctttagccagtttgaagtagatctgtaccaaaatgaaacagcctgtcagagtcctttggattatcagtaccgtcaggagatcctgaagctggagaattcgggtggcaagaaaaaccgacgaatctttacctacactgactctgatagatacaccaatttggaggagcactgtcagagaatgaccactgcagccagcgaggtgccttcattcttggtcgagcgaatggcaaatgtcaggcgtcgccggcaggacaggcgagggatggagggcggcatcctcaagtcacgcatcgtcacctgggagccctcagaagagtttgtcaggaacaaccacgtcattaacacccctcttcagacaatgcacatcatggcagacctggggccctataaaaagcttggctataagaagtatgaacatgtcctgtgtactctgaaggtggatagcaatggtgtgatcacagtaaagcctgacttcacgggcctcaaaggaccctacaggattgagacggagggggagaagcaggagctgtggaaatatacgatcgacaatgtttccccccacgcacagccggaggaggaggagcgggaacggcgagtgttcaaggatctttatggccggcacaaggagtatctcagcagcctcgtaggcaccgactttgagatgactgtcccaggtgccctccggctctttgtaaatggagaggtcgtttcagcccaaggctatgagtatgacaatctctacgtccacttctttgtagaattgccaactgctcactggtcaagcccagcattccagcagctctcaggagtaacacagacctgcaccaccaagtccctggcaatggacaaggtggctcacttctcctacccattcacgtttgaagccttcttcctccatgaggatgaatcttctgatgcactcccggagtggcctgtgctctactgtgaggtcctctcgctggacttctggcagaggtaccgtgtggaaggctatggggctgtggtgctgcctgccactccaggctcacacaccctgacagtctccacgtggagacctgtggagcttggcacggtggctgagctgaggaggtttttcattggcggttctctggaactggaggacctctcctatgtacggataccaggatccttcaagggcctttcatcttccaagaccaaagaaggaaggaaggtggacggtgagagggtcttaaatccccagcctgtgagtctcagcctctttccagggaagcctcattctactgcttggggcttgctgaggttgagatatgagttatttctgagtaagtgaaggctgaaggcagtgctgagtcctttctgctagctgggtggtatcttttactgtgtttttttgtttgtttgtttttttgttttttgttacataaaccccttttattttga

SEQ ID NO: 17343 - DNA, 2385 bp, Homo sapiens
  source 1..2385: mol_type = unassigned DNA
agtgtggcatggtggaaaaggtagagggcgaagactcaggccacctggtccccgtcatcatttctgcatctatctgtctatatgaagtgggctgatggctgtgccagtttcctcatttgcacagcgcacgaggtcccgctttcgagtccacctgcaaagaatcacatcaagcaactttcttcattatcagcctgctgccgagctcgggaaggacctcatagacttggccacttttaggcctcagccaactgccagtggacaccgcccagaggaagacgaagaggaggagattgtgattgggtggcaggagaagctctttagccagtttgaagtagatctgtaccaaaatgaaacagcctgtcagagtcctttggattatcagtaccgtcaggagatcctgaagctggagaattcgggtggcaagaaaaaccgacgaatctttacctacactgactctgatagatacaccaatttggaggagcactgtcagagaatgaccactgcagccagcgaggtgccttcattcttggtcgagcgaatggcaaatgtcaggcgtcgccggcaggacaggcgagggatggagggcggcatcctcaagtcacgcatcgtcacctgggagccctcagaagagtttgtcaggaacaaccacgtcattaacacccctcttcagacaatgcacatcatggcagacctggggccctataaaaagcttggctataagaagtatgaacatgtcctgtgtactctgaaggtggatagcaatggtgtgatcacagtaaagcctgacttcacgggcctcaaaggaccctacaggattgagacggagggggagaagcaggagctgtggaaatatacgatcgacaatgtttccccccacgcacagccggaggaggaggagcgggaacggcgagtgttcaaggatctttatggccggcacaaggagtatctcagcagcctcgtaggcaccgactttgagatgactgtcccaggtgccctccggctctttgtaaatggagaggtcgtttcagcccaaggctatgagtatgacaatctctacgtccacttctttgtagaattgccaactgctcactggtcaagcccagcattccagcagctctcaggagtaacacagacctgcaccaccaagtccctggcaatggacaaggtggctcacttctcctacccattcacgtttgaagccttcttcctccatgaggatgaatcttctgatgcactcccggagtggcctgtgctctactgtgaggtcctctcgctggacttctggcagaggtaccgtgtggaaggctatggggctgtggtgctgcctgccactccaggctcacacaccctgacagtctccacgtggagacctgtggagcttggcacggtggctgagctgaggaggtttttcattggcggttctctggaactggaggacctctcctatgtacggataccaggatccttcaagggggaacgcctgagccgctttggactccgcacagagaccacaggcactgtcaccttccgcttgcactgtctgcagcagtccagggccttcatggaatcgagctcccttcagaaaaggatgcggagtgtgttggaccgtctggaagggttcagccagcagagttccattcacaatgtgctagaggccttccgtcgagcccggcgccgcatgcaggaggcccgggaaagcctcccgcaggacctagtgagcccctctggaaccctggtctcctagctcacagcagccctggcccacagtgcaagaggacaagatgggggatatctgaggccagtgctctcctgcctcttcgtctttctgattagagaccacgttggtctgctgagaaccagaaaagctgggaaattcccggctggcccctctgcctagccttctgcagggtcttctccctaccctgtggaaataaagccagagaccctgtggccccccctttatatttgcagccactgtcaatgggcatcacagcaaggcaggctttttgatctgaagctgtttggggtgaccccatagtgagtctggccttgactcacttttctggcttgtctcacagtagcaggggatctgctgttctccaccctttaaaaatggagcctttcatcttccaagaccaaagaaggaaggaaggtggacggtgagagggtcttaaatccccagcctgtgagtctcagcctctttccagggaagcctcattctactgcttggggcttgctgaggttgagatatgagttatttctgagtaagtgaaggctgaaggcagtgctgagtcctttctgctagctgggtggtatcttttactgtgtttttttgtttgtttgtttttttgttttttgttacataaaccccttttattttgactg

SEQ ID NO: 17344 - DNA, 1926 bp, Homo sapiens
  source 1..1926: mol_type = unassigned DNA
gctgtcatggcggagaccgtctggagcactgacaccggggaggcagtgtatcgctcccgggaccccgtgcgcaacttgcgcctccgagtccacctgcaaagaatcacatcaagcaactttcttcattatcagcctgctgccgagctcgggaaggacctcatagacttggccacttttaggcctcagccaactgccagtggacaccgcccagaggaagacgaagaggaggagattgtgattgggtggcaggagaagctctttagccagtttgaagtagatctgtaccaaaatgaaacagcctgtcagagtcctttggattatcagtaccgtcaggagatcctgaagctggagaattcgggtggcaagaaaaaccgacgaatctttacctacactgactctgatagatacaccaatttggaggagggagggcggcatcctcaagtcacgcatcgtcacctgggagccctcagaagagtttgtcaggaacaaccacgtcattaacacccctcttcagacaatgcacatcatggcagacctggggccctataaaaagcttggctataagaagtatgaacatgtcctgtgtactctgaaggtggatagcaatggtgtgatcacagtaaagcctgacttcacgggcctcaaaggaccctacaggattgagacggagggggagaagcaggagctgtggaaatatacgatcgacaatgtttccccccacgcacagccggaggaggaggagcgggaacggcgagtgttcaaggatctttatggccggcacaaggagtatctcagcagcctcgtaggcaccgactttgagatgactgtcccaggtgccctccggctctttgtaaatggagaggtcgtttcagcccaaggctatgagtatgacaatctctacgtccacttctttgtagaattgccaactgctcactggtcaagcccagcattccagcagctctcaggagtaacacagacctgcaccaccaagtccctggcaatggacaaggtggctcacttctcctacccattcacgtttgaagccttcttcctccatgaggatgaatcttctgatgcactcccggagtggcctgtgctctactgtgaggtcctctcgctggacttctggcagaggtaccgtgtggaaggctatggggctgtggtgctgcctgccactccaggctcacacaccctgacagtctccacgtggagacctgtggagcttggcacggtggctgagctgaggaggtttttcattggcggttctctggaactggaggacctctcctatgtacggataccaggatccttcaagggggaacgcctgagccgctttggactccgcacagagaccacaggcactgtcaccttccgcttgcactgtctgcagcagtccagggccttcatggaatcgagctcccttcagaaaaggatgcggagtgtgttggaccgtctggaagggttcagccagcagagttccattcacaatgtgctagaggccttccgtcgagcccggcgccgcatgcaggaggcccgggaaagcctcccgcaggacctagtgagcccctctggaaccctggtctcctagctcacagcagccctggcccacagtgcaagaggacaagatgggggatatctgaggccagtgctctcctgcctcttcgtctttctgattagagaccacgttggtctgctgagaaccagaaaagctgggaaattcccggctggcccctctgcctagccttctgcagggtcttctccctaccctgtggaaataaagccagagaccctgtggccccccctttatatttgcagccactgtcaatgggcatcacagcaaggcaggctttttgatctgaagctgtttggggtgaccccatagtgagtctggccttgactcacttttctggcttgtctcacagtagc

SEQ ID NO: 17345 - DNA, 5826 bp, Homo sapiens
  source 1..5826: mol_type = unassigned DNA
tttgggaagttccgttggggaagatggcggcggcctcgagcacccttctcttcttgccgccggggacttcagattgatccttcccgggaagagtagggactgctggtgccctgcgtcccgggatcccgagccaacttgtttcctccgttagtggtggggaagggcttatccttttgtggcggatctagcttctcctcgccttcaggatgaaagctcagggggaaaccgaggagtcagaaaagctgagtaagatgagttctctcctggaacggctccatgcaaaatttaaccaaaatagaccctggagtgaaaccattaagcttgtgcgtcaagtcatggagaagagggttgtgatgagttctggagggcatcaacatttggtcagctgtttggagacattgcagaaggctctcaaagtaacatctttaccagcaatgactgatcgtttggagtccatagcaagacagaatggactgggctctcatctcagtgccagtggcactgaatgttacatcacgtcagatatgttctatgtggaagtgcagttagatcctgcaggacagctttgtgatgtaaaagtggctcaccatggggagaatcctgtgagctgtccggagcttgtacagcagctaagggaaaaaaattttgatgaattttctaagcaccttaagggccttgttaatctgtataaccttccaggggacaacaaactgaagactaaaatgtacttggctctccaatccttagaacaagatctttctaaaatggcaattatgtactggaaagcaactaatgctggtcccttggataagattcttcatggaagtgttggctatctcacaccaaggagtgggggtcatttaatgaacctgaagtactatgtctctccttctgacctactggatgacaagactgcatctcccatcattttgcatgagaataatgtttctcgatctttgggcatgaatgcatcagtgacaattgaaggaacatctgctgtgtacaaactcccaattgcaccattaattatggggtcacatccagttgacaataaatggaccccttccttctcctcaatcaccagtgccaacagtgttgatcttcctgcctgtttcttcttgaaatttccccagccaatcccagtatctagagcatttgttcagaaactgcagaactgcacaggaattccattgtttgaaactcaaccaacttatgcacccctgtatgaactgatcactcagtttgagctatcaaaggaccctgaccccatacctttgaatcacaacatgagattttatgctgctcttcctggtcagcagcactgctatttcctcaacaaggatgctcctcttccagatggccgaagtctacagggaacccttgttagcaaaatcacctttcagcaccctggccgagttcctcttatcctaaatctgatcagacaccaagtggcctataacaccctcattggaagctgtgtcaaaagaactattctgaaagaagattctcctgggcttctccaatttgaagtgtgtcctctctcagagtctcgtttcagcgtatcttttcagcaccctgtgaatgactccctggtgtgtgtggtaatggatgtgcaggactcaacacatgtgagctgtaaactctacaaagggctgtcggatgcactgatctgcacagatgacttcattgccaaagttgttcaaagatgtatgtccatccctgtgacgatgagggctattcggaggaaagctgaaaccattcaagccgacaccccagcactgtccctcattgcagagacagttgaagacatggtgaaaaagaacctgcccccggctagcagcccagggtatggcatgaccacaggcaacaacccaatgagtggtaccactacaccaaccaacacctttccggggggtcccattaccaccttgtttaatatgagcatgagcatcaaagatcggcatgagtcggtgggccatggggaggacttcagcaaggtgtctcagaacccaattcttaccagtttgttgcaaatcacagggaacggggggtctaccattggctcgagtccgacccctcctcatcacacgccgccacctgtctcttcgatggccggcaacaccaagaaccacccgatgctcatgaaccttcttaaagataatcctgcccaggatttctcaaccctttatggaagcagccctttagaaaggcagaactcctcttccggctcaccccgcatggaaatatgctcggggagcaacaagaccaagaaaaagaagtcatcaagattaccacctgagaaaccaaagcaccagactgaagatgactttcagagggagctattttcaatggatgttgactcacagaaccctatctttgatgtcaacatgacagctgacacgctggatacgccacacatcactccagctccaagccagtgtagcactcccccaacaacttacccacaaccagtacctcacccccaacccagtattcaaaggatggtccgactatccagttcagacagcattggcccagatgtaactgacatcctttcagacattgcagaagaagcttctaaacttcccagcactagtgatgattgcccagccattggcacccctcttcgagattcttcaagctctgggcattctcagagtaccctgtttgactctgatgtctttcaaactaacaataatgaaaatccatacactgatccagctgatcttattgcagatgctgctggaagccccagtagtgactctcctaccaatcatttttttcatgatggagtagatttcaatcctgatttattgaacagccagagccaaagtggttttggagaagaatattttgatgaaagcagccaaagtggggataatgatgatttcaaaggatttgcatctcaggcactaaatactttgggggtgccaatgcttggaggtgataatggggagaccaagtttaagggcaataaccaagccgacacagttgatttcagtattatttcagtagccggcaaagctttagctcctgcagatcttatggagcatcacagtggtagtcagggtcctttactgaccactggggacttagggaaagaaaagactcaaaagagggtaaaggaaggcaatggcaccagtaatagtactctctcggggcccggattagacagcaaaccagggaagcgcagtcggaccccttctaatgatgggaaaagcaaagataagcctccaaagcggaagaaggcagacactgagggaaagtctccatctcatagttcttctaacagaccttttaccccacctaccagtacaggtggatctaaatcgccaggcagtgcaggaagatctcagactcccccaggtgttgccacaccacccattcccaaaatcactattcagattcctaagggaacagtgatggtgggcaagccttcctctcacagtcagtataccagcagtggttctgtgtcttcctcaggcagcaaaagccaccatagccattcttcctcctcttcctcatctgcttccacctcagggaagatgaaaagcagtaaatcagaaggttcatcaagttccaagttaagtagcagtatgtattctagccaggggtcttctggatctagccagtccaaaaattcatcccagtctggggggaagccaggctcctctcccataaccaagcatggactgagcagtggctctagcagcaccaagatgaaacctcaaggaaagccatcatcacttatgaatccttctttaagtaaaccaaacatatccccttctcattcaaggccacctggaggctctgacaagcttgcctctccaatgaagcctgttcctggaactcctccatcctctaaagccaagtcccctatcagttcaggttctggtggttctcatatgtctggaactagttcaagctctggcatgaagtcatcttcagggttaggatcctcaggctcgttgtcccagaaaactcccccatcatctaattcctgtacggcatcttcctcctccttttcctcaagtggctcttccatgtcatcctctcagaaccagcatgggagttctaaaggaaaatctcccagcagaaacaagaagccgtccttgacagctgtcatagataaactgaagcatggggttgtcaccagtggccctgggggtgaagacccactggacggccagatgggggtgagcacaaattcttccagccatcctatgtcctccaaacataacatgtcaggaggagagtttcagggcaagcgtgagaaaagtgataaagacaaatcaaaggtttccacctccgggagttcagtggattcttctaagaagacctcagagtcaaaaaatgtggggagcacaggtgtggcaaaaattatcatcagtaagcatgatggaggctcccctagcattaaagccaaagtgactttgcagaaacctggggaaagtagtggagaagggcttaggcctcaaatggcttcttctaaaaactatggctctccactcatcagtggttccactccaaagcatgagcgtggctctcccagccatagtaagtcaccagcatataccccccagaatctggacagtgaaagtgagtcaggctcctccatagcagagaaatcttatcagaatagtcccagctcagacgatggtatccgaccacttccagaatacagcacagagaaacataagaagcacaaaaaggaaaagaagaaagtaaaagacaaagatagggaccgagaccgggacaaagaccgagacaagaaaaaatctcatagcatcaagccagagagttggtccaaatcacccatctcttcagaccagtccttgtctatgacaagtaacacaatcttatctgcagacagaccctcaaggctcagcccagactttatgattggggaggaagatgatgatcttatggatgtggccctgattgggaattaggaaccttatttcctaaaagaaacagggccagaggaaaaaaaactattgataagtttataggcaaaccaccataaggggtgagtcagacaggtctgatttggttaagaatcctaaatggcatggctttgacatcaagctgggtgaattagaaaggcatatccagaccctattaaagaaaccacagggtttgattctggttaccaggaagtcttctttgttcctgtgccagaaagaaagttaaaatacttgcttaagaaagggaggggggtgggaggggtgtagggagagggaagggagggaaacagttttgtgggaaatattcatatatattttcttctccctttttccatttttaggccatgttttaaactcattttagtgcatgtatatgaagggctgggcagaaaatgaaaaagcaatacattccttgatgcatttgcatgaaggttgttcaactttgtttgaggtagttgtccgtttgagtcatgggcaaatgaaggactttggtcattttggacacttaagtaatgtttggtgtctgtttcttaggagtgactgggggagggaagattattttagctatttatttgtaatattttaaccctttatctgtttgtttttatacagtgtttcgttctaaatctatgaggtttagggttcaaaatgatggaaggccgaagagcaaggcttatatggtggtagggagcttatagcttgtgctaatactgtagcatcaagcccaagcaaattagtcagagcccgcctttagagttaaatataatagaaaaaccaaaatgatatttttattttaggagggtttaaatagggttcagagatcataggaatattaggagttacctctctgtggaggtat

SEQ ID NO: 17346 - DNA, 2870 bp, Homo sapiens
  source 1..2870: mol_type = unassigned DNA
tttgggaagttccgttggggaagatggcggcggcctcgagcacccttctcttcttgccgccggggacttcagattgatccttcccgggaagagtagggactgctggtgccctgcgtcccgggatcccgagccaacttgtttcctccgttagtggtggggaagggcttatccttttgtggcggatctagcttctcctcgccttcaggatgaaagctcagggggaaaccgaggagtcagaaaagctgagtaagatgagttctctcctggaacggctccatgcaaaatttaaccaaaatagaccctggagtgaaaccattaagcttgtgcgtcaagtcatggagaagagggttgtgatgagttctggagggcatcaacatttggtcagctgtttggagacattgcagaaggctctcaaagtaacatctttaccagcaatgactgatcgtttggagtccatagcaagacagaatggactgggctctcatctcagtgccagtggcactgaatgttacatcacgtcagatatgttctatgtggaagtgcagttagatcctgcaggacagctttgtgatgtaaaagtggctcaccatggggagaatcctgtgagctgtccggagcttgtacagcagctaagggaaaaaaattttgatgaattttctaagcaccttaagggccttgttaatctgtataaccttccaggggacaacaaactgaagactaaaatgtacttggctctccaatccttagaacaagatctttctaaaatggcaattatgtactggaaagcaactaatgctggtcccttggataagattcttcatggaagtgttggctatctcacaccaaggagtgggggtcatttaatgaacctgaagtactatgtctctccttctgacctactggatgacaagactgcatctcccatcattttgcatgagaataatgtttctcgatctttgggcatgaatgcatcagtgacaattgaaggaacatctgctgtgtacaaactcccaattgcaccattaattatggggtcacatccagttgacaataaatggaccccttccttctcctcaatcaccagtgccaacagtgttgatcttcctgcctgtttcttcttgaaatttccccagccaatcccagtatctagagcatttgttcagaaactgcagaactgcacaggaattccattgtttgaaactcaaccaacttatgcacccctgtatgaactgatcactcagtttgagctatcaaaggaccctgaccccatacctttgaatcacaacatgagattttatgctgctcttcctggtcagcagcactgctatttcctcaacaaggatgctcctcttccagatggccgaagtctacagggaacccttgttagcaaaatcacctttcagcaccctggccgagttcctcttatcctaaatctgatcagacaccaagtggcctataacaccctcattggaagctgtgtcaaaagaactattctgaaagaagattctcctgggcttctccaatttgaagtgtgtcctctctcagagtctcgtttcagcgtatcttttcagcaccctgtgaatgactccctggtgtgtgtggtaatggatgtgcaggactcaacacatgtgagctgtaaactctacaaagggctgtcggatgcactgatctgcacagatgacttcattgccaaagttgttcaaagatgtatgtccatccctgtgacgatgagggctattcggaggaaagctgaaaccattcaagccgacaccccagcactgtccctcattgcagagacagttgaagacatggtgaaaaagaacctgcccccggctagcagcccaggatcaaagaatcccgagttaggatctggatgaaggataagcccctgaattgtcgatgggctcacccccacactgacccagcatctgaacttgcttaacagggagccggggctaaactgcttcaccctgcctgagaaccagggagcactgcatttctccacagggtggaggagaagaggcagaataaaccaagcctgggacacctccctcctgtctaggtgtactcattcttctgtttcaaaagaaggcaaggacatgaagtcaacttctacctatcttctgctgctggtgtcttatgtattctcagtttgacctgattcctcttctgtcttttgacttaacattaggggttcttggtcataacctgctctgatgtacataaagatttcaggttcaatatcaatgtgtcttaaaacagaagtattttagcgggtggggggtggggtggtggggacaaacaacgcaggatataattgccaaaaccaggcttgaggttggtgactcttgaaagattttctttcttcaggcctagatcagaaaattaagtgcagcaatatcatgaattctcagaagccctttcagggagccagtgagtcatacagtatccacagttgagtcacttaaagatgtcagtatacgaaacattattcacaatccttgggcaatctcatttttttttccttctcccctcctcccctgccccccatacatttctatccttgagttagttttggaggggcaggaagtacttaacatctcagaagctagattgggaaacatgctcagctataagaactgagctttaaattttgagtttaaaaatgtacatcaggagcagctggggagggtctttttttaaaaaaatctttcaaatttggttttctgtgcatatggccgttttgtaaatactttggggtttttcatttttttgaaagtagatgaaatctgttgtgggatttttttcccgaaacattacaaaataacctgtttatttacatgcaaataaacttctttgataaaaagtaa

SEQ ID NO: 17347 - DNA, 1141 bp, Homo sapiens
  source 1..1141: mol_type = unassigned DNA
cagaggaaacggaagtcgtatctgtccggacggaagcaggaagcgggagcgtagggccacgcctgcggcgctgctggttgaggctgtgtgggtcggggacgggccgaggcgatggcggagaagtttgaccacctagaggagcacctggagaagttcgtggagaacattcggcagctcggcatcatcgtcagtgacttccagcccagcagccaggccgggctcaaccaaaagctgaattttattgttactggcttacaggatattgacaagtgcagacagcagcttcatgatattactgtaccgttagaagtttttgaatatatagatcaaggtcgaaatccccagctctacaccaaagagtgcctggagagggctctagctaaaaatgagcaagttaaaggcaagatcgacaccatgaagaaatttaaaagcctgttgattcaagaactttctaaagtatttccggaagacatggctaagtatcgaagcatccggggggaggatcacccgccttcttaaccagctcaccctccctgtgtgaagatcccctgggactgcgatgcggcgtgaggctgggactgcgagtgctgacgccaccttcctgctgaggtgggactgggccctggacacacccctcagcccctctgtcctcattgtttggcctcatgggaccgaggggctggaggagaggcggagctgtgccccagctgttccagcagcttgtctggcgtcaactggctttcagagtgctgacccctcatcactgtggggatcattctctctgagggcagatgaggcgcaggaaaatagtcttggaaatgttaaatatgatgggtaaattaaaagttttacaacattctacctaatatttttcttttaacatactctttctgttctattgtattatggtgtccgaaagctaaataacgactaggaaaaatttttttaaaaaaagaaaaatcagtttaatgtgggaagtacttaagtggtattatattttacattttcaagtatagtgcataaagaatgttttaaatgtaactgttttcatggatttcaattagacatgcctataataaactaagtatgtggcttattccatgtaattatttttgtaatataatacaatgtgtcttgtaaa

SEQ ID NO: 17348 - DNA, 822 bp, Homo sapiens
  source 1..822: mol_type = unassigned DNA
acttccggaacaagcgtcgcgtttctgaggagaaactcttggtgagaattcccagagtgataatggctacctacagcctggcgaacgagagactacgcgctctggaagacattgaacgggaaatcggcgccatccttcagaatgcaggtactgtgatcctagaattgtccaaggaaaaaactaacgagcggctcctagaccggcaggcggcggccttcaccgcttcagtgcaacacgtggaggcggagctgtcagctcagatccgctacctcacccaggtggccacagggcagccccatgagggctccagctactcttcgaggaaggactgtcagatggctctgaagcgagtggactatgcccgcctcaagctcagtgatgtggctcgaacctgtgagcagatgctggagaactaggccagggagatggacccagagctgagagggagaccatcacctgtgccatgggacagaacctgggaacatgtagggtggggagtatgagcaccaacataccctgctggtcaaagtaccctaggacaaaggggcaaatggtgggcatggaaaaactgaagcccgagcctgcccacagctatgctttggcctctccagcagggtgctcctgctctgcactccagaaacaccctgacaggctcagagaggagatggaaactgacatacccaacccacttcctcaaacacttcatgctgctgccccagccttcccgcagacttggcctaatgaaaatacatacttcttcattcggagagacaaaacaagaactagagttttaatgataataaaagcaataataataaaagc

SEQ ID NO: 17349 - DNA, 6977 bp, Homo sapiens
  source 1..6977: mol_type = unassigned DNA
attgtccgatggttcccggcgtacctcggcttccctcggtagtttccggcaatggtcgagagtttctaacgtgcccccttgttgtctctcggccgccgtcctctcaaccaccgccccccttttcggctccctctcccccttcccgttcccccagtcagcctggccctgctggtgcctccggcgctacgggctgggcaagatggcggccttcgggatcttgagctacgaacaccggcccctgaagcggccgcggctggggcctcccgatgtttaccctcaggaccccaaacagaaggaggatgaactgacggccttgaatgtaaaacaaggtttcaataaccagcctgctgtctctggggatgagcatggcagtgccaagaacgtcagcttcaatcctgccaagatcagttccaacttcagcagcattattgcagagaaattacgttgtaatacccttcctgacactggtcgcaggaagccccaagtgaaccagaaggataacttctggctggtgactgcacgatcccagagtgccattaacacttggttcactgacttggctggcaccaagccactcacgcaactagccaaaaaggtccccattttcagtaagaaggaagaggtgtttgggtacttagccaaatacacagtgcctgtgatgcgggctgcctggctcattaagatgacctgtgcctactatgcagcaatctctgagaccaaggttaagaagagacatgttgaccctttcatggaatggactcagatcatcaccaagtacttatgggagcagttacagaagatggctgaatactaccggccagggcctgcaggaagtgggggctgtggttccacgatagggcccttgccccatgatgtagaggtggcaatccggcagtgggattacaccgagaagctggccatgttcatgtttcaggatggaatgctggacagacatgagttcctgacctgggtgcttgagtgttttgagaagatccgccctggagaggatgaattgcttaaactgctgctgcctctgcttctccgatactctggggaatttgttcagtctgcatacctgtcccgccggcttgcctacttctgtacacggagactggccctgcagctggatggtgtgagcagtcactcatctcatgttatatctgctcagtcaacaagcacgctacccaccacccctgctcctcagcccccaactagcagcacaccctcgactccctttagtgacctgcttatgtgccctcagcaccggcccctggtttttggcctcagctgtatcctacagaccatcctcctgtgctgtcctagtgccttggtttggcactactcactgactgatagcagaattaagaccggctcaccacttgaccacttgcctattgccccgtccaacctgcccatgccagagggtaacagtgccttcactcagcaggtccgtgcaaagttgcgggagatcgagcagcagatcaaggagcggggacaggcagttgaagttcgctggtctttcgataaatgccaggaagctactgcaggcttcaccattggacgggtacttcatactttggaagtgctggacagccatagttttgaacgctctgacttcagcaactctcttgactccctttgtaaccgaatctttggattgggacctagcaaggatgggcatgagatctcctcagatgatgatgctgtggtgtcattgctatgtgaatgggctgtcagctgcaagcgttctggtcggcatcgtgctatggtggtagccaagctcctggagaagagacaggcggagattgaggctgagcgttgtggagaatcagaagccgcagatgagaagggttccatcgcctctggctccctttctgctcccagtgctcccattttccaggatgtcctcctgcagtttctggatacacaggctcccatgctgacggaccctcgaagtgagagtgagcgggtggaattctttaacttagtactgctgttctgtgaactgattcgacatgatgttttctcccacaacatgtatacttgcactctcatctcccgaggggaccttgcctttggagcccctggtccccggcctccctctccctttgatgatcctgccgatgacccagagcacaaggaggctgaaggcagcagcagcagcaagctggaagatccagggctctcagaatctatggacattgaccctagttccagtgttctctttgaggacatggagaagcctgatttctcattgttctcccctactatgccctgtgaggggaagggcagtccatcccctgagaagccagatgtcgagaaggaggtgaagcccccacccaaggagaagattgaagggacccttggggttctttacgaccagccacgacacgtgcagtacgccacccattttcccatcccccaggaggagtcatgcagccatgagtgcaaccagcggttggtcgtactgtttggggtgggaaagcagcgagatgatgcccgccatgccatcaagaaaatcaccaaggatatcttgaaggttctgaaccgcaaagggacagcagaaactgaccagcttgctcctattgtgcctctgaatcctggagacctgacattcttaggtggggaggatgggcagaagcggcgacgcaaccggcctgaagccttccccactgctgaagatatctttgctaagttccagcacctttcacattatgaccaacaccaggtcacggctcaggtctcccggaatgttctggagcagatcacgagctttgcccttggcatgtcataccacttgcctctggtgcagcatgtgcagttcatcttcgacctcatggaatattcactcagcatcagtggcctcatcgactttgccattcagctgctgaatgaactgagtgtagttgaggctgagctgcttctcaaatcctcggatctggtgggcagctacactactagcctgtgcctgtgcatcgtggctgtcctgcggcactatcatgcctgcctcatcctcaaccaggaccagatggcacaggtctttgaggggctgtgtggcgtcgtgaagcatgggatgaaccggtccgatggctcctctgcagagcgctgtatccttgcttatctctatgatctgtacacctcctgtagccatttaaagaacaaatttggggagctcttcagcgacttttgctcaaaggtgaagaacaccatctactgcaacgtggagccatcggaatcaaatatgcgctgggcacctgagttcatgatcgacactctagagaaccctgcagctcacaccttcacctacacggggctaggcaagagtcttagtgagaaccctgctaaccgctacagctttgtctgcaatgcccttatgcacgtctgtgtggggcaccatgatcccgatagggtgaatgacatcgcaatcctgtgtgcagagctgaccggctattgcaagtcactgagtgcagaatggctaggagtgcttaaggccttgtgctgctcctctaacaatggcacttgtggtttcaacgatctcctctgcaatgttgatgtcagtgacctatcttttcatgactcgctggctacttttgttgccatcctcatcgctcggcagtgtttgctcctggaagatctgattcgctgtgctgccatcccttcactccttaatgctgcttgtagtgaacaggactctgagccaggggcccggcttacctgccgcatcctccttcaccttttcaagacaccgcagctcaatccttgccagtctgatggaaacaagcctacagtaggaatccgctcctcctgcgaccgccacctgctggctgcctcccagaaccgcatcgtggatggagccgtgtttgctgttctcaaggctgtgtttgtacttggggatgcggaactgaaaggttcaggcttcactgtgacaggaggaacagaagaacttccagaggaggagggaggaggtggcagtggtggtcggaggcagggtggccgcaacatctctgtggagacagccagtctggatgtctatgccaagtacgtgctgcgcagcatctgccaacaggaatgggtaggagaacgttgccttaagtctctgtgtgaggacagcaatgacctgcaagacccagtgttgagtagtgcccaggcgcagcgcctcatgcagctcatttgctatccacatcgactgctggacaatgaggatggggaaaacccccagcggcagcgcataaagcgcattctccagaacttggaccagtggaccatgcgccagtcttccttggagctgcagctcatgatcaagcagacccctaacaatgagatgaactccctcttggagaacatcgccaaggccacaatcgaggttttccaacagtcagcagagacagggtcatcttctggaagtactgcaagcaacatgcccagcagcagcaagaccaagcctgtgctcagctctctagagcgctctggtgtatggctggtggcccccctcattgctaaactgcccacctcagtccagggacatgtgttaaaggctgctggggaagaattggagaagggtcagcacctgggttcctcttcacgcaaagaacgtgatcgacaaaagcagaagagcatgtccctattgagccagcagcccttcttatcgctggtgctaacatgtctgaaagggcaggatgaacaacgcgagggactccttacctccctctacagccaggtgcaccagattgtgaataattggcgagatgaccagtacttagatgattgcaaaccaaagcagcttatgcatgaggcactcaaactgcggctcaacctggtggggggcatgtttgacacggtgcagcgcagcacccagcagaccacggagtgggccatgctcctcctggagatcatcatcagcggcactgtcgacatgcagtccaacaatgagctcttcactactgtgttggacatgctgagcgtgctcatcaatgggacattggctgcagacatgtctagcatctcgcaaggtagcatggaggaaaacaagcgtgcatacatgaacctggcgaagaagttgcagaaggagttgggggagcgccagtcagacagtctggaaaaggttcgccagctgctgccactgcccaagcagacccgagatgtcatcacgtgtgagccacagggctcccttatcgataccaagggcaacaagattgctggcttcgattccatcttcaagaaggagggtctacaggtttccaccaaacagaagatctcgccctgggatctttttgaggggttgaagccgtcagcaccactctcttggggctggtttggaacagtccgagtggaccggcgagtggctcgaggagaggagcagcagcggttgctgctctaccacacacacctgaggccccggccccgcgcctattacctggagccactgccactgcccccagaagatgaggagccgcctgctcctaccctgctagagcctgagaaaaaggctccagagccccccaaaactgacaaaccgggggctgctccacccagtactgaggaacgcaagaagaagtccaccaagggcaagaaacgcagccagccagctaccaagacagaggactatggaatgggcccgggtcggagcggcccttatggtgtgacagtgcctccggacctcctgcaccacccaaaccctggttctataacacaccttaactacaggcaaggctccataggcctgtacacccagaaccagccactacctgcaggtggccctcgtgtggacccataccgtcctgtgcgcttaccaatgcagaagctgcccacccgaccaacttaccctggagtgctgcccacaaccatgactggcgtcatgggtttagaaccctcctcttataagacctctgtgtaccggcagcagcaacctgcggtgccccaaggacagcgccttcgccaacagctccaggcaaagatacagagtcagggcatgttgggacagtcatctgtccatcagatgactcccagctcttcctacggtttgcagacttcccagggctatactccttatgtttctcatgtgggattgcagcaacacacaggccctgcaggtaccatggtgccccccagctactccagccagccttaccagagcacccacccttctaccaatcctactcttgtagatcctacccgccacctgcaacagcggcccagtggctatgtgcaccagcaggcccccacctatggacatggactgacctccactcaaaggttttcacaccagacactgcagcagacacccatgataagtaccatgactccaatgagtgcccagggcgtccaggcaggcgtccgttcaacagccatcctacctgagcagcagcagcagcagcaacagcagcaacagcaacagcagcagcagcagcaacagcaacagcagcagcagcagcagcagtaccacatccggcagcagcagcagcagcagatcctgcggcagcagcagcaacagcaacagcagcagcagcagcagcagcaacagcaacagcagcagcagcaacagcaacaacagcaacaccagcagcaacagcagcaacaggcggctcctccccaaccccagccccagtcccagccccagttccagcgccaggggcttcagcagacccagcagcagcaacagacagcagctttggtccggcaacttcaacaacagctctctaatacccagccacagcccagtaccaacatatttggacgctactgagccacctggaggaactgcttgtgcactggatgtggccccaccctttcctcttaattcccaatcccattcctgggctagcaccagtagtggttggggccctcccctcaggctccatttttaataagtttttagtatttttgttaatgtgaggcattgagctgttgggttttgtatattatttatatagagaccccagagctgttgcacccaatacacagagcttctttgcaaaggg

SEQ ID NO: 17350 - DNA, 6795 bp, Homo sapiens
  source 1..6795: mol_type = unassigned DNA
gctggtgcctccggcgctacgggctgggcaagatggcggccttcgggatcttgagctacgaacaccggcccctgaagcggccgcggctggggcctcccgatgtttaccctcaggaccccaaacagaaggaggatgaactgacggccttgaatgtaaaacaaggtttcaataaccagcctgctgtctctggggatgagcatggcagtgccaagaacgtcagcttcaatcctgccaagatcagttccaacttcagcagcattattgcagagaaattacgttgtaatacccttcctgacactggtcgcaggaagccccaagtgaaccagaaggataacttctggctggtgactgcacgatcccagagtgccattaacacttggttcactgacttggctggcaccaagccactcacgcaactagccaaaaaggtccccattttcagtaagaaggaagaggtgtttgggtacttagccaaatacacagtgcctgtgatgcgggctgcctggctcattaagatgacctgtgcctactatgcagcaatctctgagaccaaggttaagaagagacatgttgaccctttcatggaatggactcagatcatcaccaagtacttatgggagcagttacagaagatggctgaatactaccggccagggcctgcaggaagtgggggctgtggttccacgatagggcccttgccccatgatgtagaggtggcaatccggcagtgggattacaccgagaagctggccatgttcatgtttcaggatggaatgctggacagacatgagttcctgacctgggtgcttgagtgttttgagaagatccgccctggagaggatgaattgcttaaactgctgctgcctctgcttctccgatactctggggaatttgttcagtctgcatacctgtcccgccggcttgcctacttctgtacacggagactggccctgcagctggatggtgtgagcagtcactcatctcatgttatatctgctcagtcaacaagcacgctacccaccacccctgctcctcagcccccaactagcagcacaccctcgactccctttagtgacctgcttatgtgccctcagcaccggcccctggtttttggcctcagctgtatcctacagaccatcctcctgtgctgtcctagtgccttggtttggcactactcactgactgatagcagaattaagaccggctcaccacttgaccacttgcctattgccccgtccaacctgcccatgccagagggtaacagtgccttcactcagcaggtccgtgcaaagttgcgggagatcgagcagcagatcaaggagcggggacaggcagttgaagttcgctggtctttcgataaatgccaggaagctactgcaggcttcaccattggacgggtacttcatactttggaagtgctggacagccatagttttgaacgctctgacttcagcaactctcttgactccctttgtaaccgaatctttggattgggacctagcaaggatgggcatgagatctcctcagatgatgatgctgtggtgtcattgctatgtgaatgggctgtcagctgcaagcgttctggtcggcatcgtgctatggtggtagccaagctcctggagaagagacaggcggagattgaggctgagcgttgtggagaatcagaagccgcagatgagaagggttccatcgcctctggctccctttctgctcccagtgctcccattttccaggatgtcctcctgcagtttctggatacacaggctcccatgctgacggaccctcgaagtgagagtgagcgggtggaattctttaacttagtactgctgttctgtgaactgattcgacatgatgttttctcccacaacatgtatacttgcactctcatctcccgaggggaccttgcctttggagcccctggtccccggcctccctctccctttgatgatcctgccgatgacccagagcacaaggaggctgaaggcagcagcagcagcaagctggaagatccagggctctcagaatctatggacattgaccctagttccagtgttctctttgaggacatggagaagcctgatttctcattgttctcccctactatgccctgtgaggggaagggcagtccatcccctgagaagccagatgtcgagaaggaggtgaagcccccacccaaggagaagattgaagggacccttggggttctttacgaccagccacgacacgtgcagtacgccacccattttcccatcccccaggaggagtcatgcagccatgagtgcaaccagcggttggtcgtactgtttggggtgggaaagcagcgagatgatgcccgccatgccatcaagaaaatcaccaaggatatcttgaaggttctgaaccgcaaagggacagcagaaactgaccagcttgctcctattgtgcctctgaatcctggagacctgacattcttaggtggggaggatgggcagaagcggcgacgcaaccggcctgaagccttccccactgctgaagatatctttgctaagttccagcacctttcacattatgaccaacaccaggtcacggctcaggtctcccggaatgttctggagcagatcacgagctttgcccttggcatgtcataccacttgcctctggtgcagcatgtgcagttcatcttcgacctcatggaatattcactcagcatcagtggcctcatcgactttgccattcagctgctgaatgaactgagtgtagttgaggctgagctgcttctcaaatcctcggatctggtgggcagctacactactagcctgtgcctgtgcatcgtggctgtcctgcggcactatcatgcctgcctcatcctcaaccaggaccagatggcacaggtctttgaggggctgtgtggcgtcgtgaagcatgggatgaaccggtccgatggctcctctgcagagcgctgtatccttgcttatctctatgatctgtacacctcctgtagccatttaaagaacaaatttggggagctcttcagcgacttttgctcaaaggtgaagaacaccatctactgcaacgtggagccatcggaatcaaatatgcgctgggcacctgagttcatgatcgacactctagagaaccctgcagctcacaccttcacctacacggggctaggcaagagtcttagtgagaaccctgctaaccgctacagctttgtctgcaatgcccttatgcacgtctgtgtggggcaccatgatcccgatagggtgaatgacatcgcaatcctgtgtgcagagctgaccggctattgcaagtcactgagtgcagaatggctaggagtgcttaaggccttgtgctgctcctctaacaatggcacttgtggtttcaacgatctcctctgcaatgttgatgtcagtgacctatcttttcatgactcgctggctacttttgttgccatcctcatcgctcggcagtgtttgctcctggaagatctgattcgctgtgctgccatcccttcactccttaatgctgcttgtagtgaacaggactctgagccaggggcccggcttacctgccgcatcctccttcaccttttcaagacaccgcagctcaatccttgccagtctgatggaaacaagcctacagtaggaatccgctcctcctgcgaccgccacctgctggctgcctcccagaaccgcatcgtggatggagccgtgtttgctgttctcaaggctgtgtttgtacttggggatgcggaactgaaaggttcaggcttcactgtgacaggaggaacagaagaacttccagaggaggagggaggaggtggcagtggtggtcggaggcagggtggccgcaacatctctgtggagacagccagtctggatgtctatgccaagtacgtgctgcgcagcatctgccaacaggaatgggtaggagaacgttgccttaagtctctgtgtgaggacagcaatgacctgcaagacccagtgttgagtagtgcccaggcgcagcgcctcatgcagctcatttgctatccacatcgactgctggacaatgaggatggggaaaacccccagcggcagcgcataaagcgcattctccagaacttggaccagtggaccatgcgccagtcttccttggagctgcagctcatgatcaagcagacccctaacaatgagatgaactccctcttggagaacatcgccaaggccacaatcgaggttttccaacagtcagcagagacagggtcatcttctggaagtactgcaagcaacatgcccagcagcagcaagaccaagcctgtgctcagctctctagagcgctctggtgtatggctggtggcccccctcattgctaaactgcccacctcagtccagggacatgtgttaaaggctgctggggaagaattggagaagggtcagcacctgggttcctcttcacgcaaagaacgtgatcgacaaaagcagaagagcatgtccctattgagccagcagcccttcttatcgctggtgctaacatgtctgaaagggcaggatgaacaacgcgagggactccttacctccctctacagccaggtgcaccagattgtgaataattggcgagatgaccagtacttagatgattgcaaaccaaagcagcttatgcatgaggcactcaaactgcggctcaacctggtggggggcatgtttgacacggtgcagcgcagcacccagcagaccacggagtgggccatgctcctcctggagatcatcatcagcggcactgtcgacatgcagtccaacaatgagctcttcactactgtgttggacatgctgagcgtgctcatcaatgggacattggctgcagacatgtctagcatctcgcaaggtagcatggaggaaaacaagcgtgcatacatgaacctggcgaagaagttgcagaaggagttgggggagcgccagtcagacagtctggaaaaggttcgccagctgctgccactgcccaagcagacccgagatgtcatcacgtgtgagccacagggctcccttatcgataccaagggcaacaagattgctggcttcgattccatcttcaagaaggagggtctacaggtttccaccaaacagaagatctcgccctgggatctttttgaggggttgaagccgtcagcaccactctcttggggctggtttggaacagtccgagtggaccggcgagtggctcgaggagaggagcagcagcggttgctgctctaccacacacacctgaggccccggccccgcgcctattacctggagccactgccactgcccccagaagatgaggagccgcctgctcctaccctgctagagcctgagaaaaaggctccagagccccccaaaactgacaaaccgggggctgctccacccagtactgaggaacgcaagaagaagtccaccaagggcaagaaacgcagccagccagctaccaagacagaggactatggaatgggcccgggtcggagcggcccttatggtgtgacagtgcctccggacctcctgcaccacccaaaccctggttctataacacaccttaactacaggcaaggctccataggcctgtacacccagaaccagccactacctgcaggtggccctcgtgtggacccataccgtcctgtgcgcttaccaatgcagaagctgcccacccgaccaacttaccctggagtgctgcccacaaccatgactggcgtcatgggtttagaaccctcctcttataagacctctgtgtaccggcagcagcaacctgcggtgccccaaggacagcgccttcgccaacagctccagcagagtcagggcatgttgggacagtcatctgtccatcagatgactcccagctcttcctacggtttgcagacttcccagggctatactccttatgtttctcatgtgggattgcagcaacacacaggccctgcaggtaccatggtgccccccagctactccagccagccttaccagagcacccacccttctaccaatcctactcttgtagatcctacccgccacctgcaacagcggcccagtggctatgtgcaccagcaggcccccacctatggacatggactgacctccactcaaaggttttcacaccagacactgcagcagacacccatgataagtaccatgactccaatgagtgcccagggcgtccaggcaggcgtccgttcaacagccatcctacctgagcagcagcagcagcagcaacagcagcaacagcaacagcagcagcagcagcaacagcaacagcagcagcagcagcagcagtaccacatccggcagcagcagcagcagcagatcctgcggcagcagcagcaacagcaacagcagcagcagcagcagcagcaacagcaacagcagcagcagcaacagcaacaacagcaacaccagcagcaacagcagcaacaggcggctcctccccaaccccagccccagtcccagccccagttccagcgccaggggcttcagcagacccagcagcagcaacagacagcagctttggtccggcaacttcaacaacagctctctaatacccagccacagcccagtaccaacatatttggacgctactgagccacctggaggaactgcttgtgcactggatgtggccccaccctttcctcttaattcccaatcccattcctgggctagcaccagtagtggttggggccctcccctcaggctccatttttaataagtttttagtatttttgttaatgtgaggcattgagctgttgggttttgtatattatttatatagagaccccagagctgttgcacccaatacacagagcttctttgc

SEQ ID NO: 17351 - DNA, 6823 bp, Homo sapiens
  source 1..6823: mol_type = unassigned DNA
ttcccgttcccccagtcagcctggccctgctggtgcctccggcgctacgggctgggcaagatggcggccttcgggatcttgagctacgaacaccggcccctgaagcggccgcggctggggcctcccgatgtttaccctcaggaccccaaacagaaggaggatgaactgacggccttgaatgtaaaacaaggtttcaataaccagcctgctgtctctggggatgagcatggcagtgccaagaacgtcagcttcaatcctgccaagatcagttccaacttcagcagcattattgcagagaaattacgttgtaatacccttcctgacactggtcgcaggaagccccaagtgaaccagaaggataacttctggctggtgactgcacgatcccagagtgccattaacacttggttcactgacttggctggcaccaagccactcacgcaactagccaaaaaggtccccattttcagtaagaaggaagaggtgtttgggtacttagccaaatacacagtgcctgtgatgcgggctgcctggctcattaagatgacctgtgcctactatgcagcaatctctgagaccaaggttaagaagagacatgttgaccctttcatggaatggactcagatcatcaccaagtacttatgggagcagttacagaagatggctgaatactaccggccagggcctgcaggaagtgggggctgtggttccacgatagggcccttgccccatgatgtagaggtggcaatccggcagtgggattacaccgagaagctggccatgttcatgtttcaggatggaatgctggacagacatgagttcctgacctgggtgcttgagtgttttgagaagatccgccctggagaggatgaattgcttaaactgctgctgcctctgcttctccgatactctggggaatttgttcagtctgcatacctgtcccgccggcttgcctacttctgtacacggagactggccctgcagctggatggtgtgagcagtcactcatctcatgttatatctgctcagtcaacaagcacgctacccaccacccctgctcctcagcccccaactagcagcacaccctcgactccctttagtgacctgcttatgtgccctcagcaccggcccctggtttttggcctcagctgtatcctacagaccatcctcctgtgctgtcctagtgccttggtttggcactactcactgactgatagcagaattaagaccggctcaccacttgaccacttgcctattgccccgtccaacctgcccatgccagagggtaacagtgccttcactcagcaggtccgtgcaaagttgcgggagatcgagcagcagatcaaggagcggggacaggcagttgaagttcgctggtctttcgataaatgccaggaagctactgcaggcttcaccattggacgggtacttcatactttggaagtgctggacagccatagttttgaacgctctgacttcagcaactctcttgactccctttgtaaccgaatctttggattgggacctagcaaggatgggcatgagatctcctcagatgatgatgctgtggtgtcattgctatgtgaatgggctgtcagctgcaagcgttctggtcggcatcgtgctatggtggtagccaagctcctggagaagagacaggcggagattgaggctgagcgttgtggagaatcagaagccgcagatgagaagggttccatcgcctctggctccctttctgctcccagtgctcccattttccaggatgtcctcctgcagtttctggatacacaggctcccatgctgacggaccctcgaagtgagagtgagcgggtggaattctttaacttagtactgctgttctgtgaactgattcgacatgatgttttctcccacaacatgtatacttgcactctcatctcccgaggggaccttgcctttggagcccctggtccccggcctccctctccctttgatgatcctgccgatgacccagagcacaaggaggctgaaggcagcagcagcagcaagctggaagatccagggctctcagaatctatggacattgaccctagttccagtgttctctttgaggacatggagaagcctgatttctcattgttctcccctactatgccctgtgaggggaagggcagtccatcccctgagaagccagatgtcgagaaggaggtgaagcccccacccaaggagaagattgaagggacccttggggttctttacgaccagccacgacacgtgcagtacgccacccattttcccatcccccaggaggagtcatgcagccatgagtgcaaccagcggttggtcgtactgtttggggtgggaaagcagcgagatgatgcccgccatgccatcaagaaaatcaccaaggatatcttgaaggttctgaaccgcaaagggacagcagaaactgaccagcttgctcctattgtgcctctgaatcctggagacctgacattcttaggtggggaggatgggcagaagcggcgacgcaaccggcctgaagccttccccactgctgaagatatctttgctaagttccagcacctttcacattatgaccaacaccaggtcacggctcaggtctcccggaatgttctggagcagatcacgagctttgcccttggcatgtcataccacttgcctctggtgcagcatgtgcagttcatcttcgacctcatggaatattcactcagcatcagtggcctcatcgactttgccattcagctgctgaatgaactgagtgtagttgaggctgagctgcttctcaaatcctcggatctggtgggcagctacactactagcctgtgcctgtgcatcgtggctgtcctgcggcactatcatgcctgcctcatcctcaaccaggaccagatggcacaggtctttgaggggctgtgtggcgtcgtgaagcatgggatgaaccggtccgatggctcctctgcagagcgctgtatccttgcttatctctatgatctgtacacctcctgtagccatttaaagaacaaatttggggagctcttcagcgacttttgctcaaaggtgaagaacaccatctactgcaacgtggagccatcggaatcaaatatgcgctgggcacctgagttcatgatcgacactctagagaaccctgcagctcacaccttcacctacacggggctaggcaagagtcttagtgagaaccctgctaaccgctacagctttgtctgcaatgcccttatgcacgtctgtgtggggcaccatgatcccgatagggtgaatgacatcgcaatcctgtgtgcagagctgaccggctattgcaagtcactgagtgcagaatggctaggagtgcttaaggccttgtgctgctcctctaacaatggcacttgtggtttcaacgatctcctctgcaatgttgatgtcagtgacctatcttttcatgactcgctggctacttttgttgccatcctcatcgctcggcagtgtttgctcctggaagatctgattcgctgtgctgccatcccttcactccttaatgctgcttgtagtgaacaggactctgagccaggggcccggcttacctgccgcatcctccttcaccttttcaagacaccgcagctcaatccttgccagtctgatggaaacaagcctacagtaggaatccgctcctcctgcgaccgccacctgctggctgcctcccagaaccgcatcgtggatggagccgtgtttgctgttctcaaggctgtgtttgtacttggggatgcggaactgaaaggttcaggcttcactgtgacaggaggaacagaagaacttccagaggaggagggaggaggtggcagtggtggtcggaggcagggtggccgcaacatctctgtggagacagccagtctggatgtctatgccaagtacgtgctgcgcagcatctgccaacaggaatgggtaggagaacgttgccttaagtctctgtgtgaggacagcaatgacctgcaagacccagtgttgagtagtgcccaggcgcagcgcctcatgcagctcatttgctatccacatcgactgctggacaatgaggatggggaaaacccccagcggcagcgcataaagcgcattctccagaacttggaccagtggaccatgcgccagtcttccttggagctgcagctcatgatcaagcagacccctaacaatgagatgaactccctcttggagaacatcgccaaggccacaatcgaggttttccaacagtcagcagagacagggtcatcttctggaagtactgcaagcaacatgcccagcagcagcaagaccaagcctgtgctcagctctctagagcgctctggtgtatggctggtggcccccctcattgctaaactgcccacctcagtccagggacatgtgttaaaggctgctggggaagaattggagaagggtcagcacctgggttcctcttcacgcaaagaacgtgatcgacaaaagcagaagagcatgtccctattgagccagcagcccttcttatcgctggtgctaacatgtctgaaagggcaggatgaacaacgcgagggactccttacctccctctacagccaggtgcaccagattgtgaataattggcgagatgaccagtacttagatgattgcaaaccaaagcagcttatgcatgaggcactcaaactgcggctcaacctggtggggggcatgtttgacacggtgcagcgcagcacccagcagaccacggagtgggccatgctcctcctggagatcatcatcagcggcactgtcgacatgcagtccaacaatgagctcttcactactgtgttggacatgctgagcgtgctcatcaatgggacattggctgcagacatgtctagcatctcgcaaggtagcatggaggaaaacaagcgtgcatacatgaacctggcgaagaagttgcagaaggagttgggggagcgccagtcagacagtctggaaaaggttcgccagctgctgccactgcccaagcagacccgagatgtcatcacgtgtgagccacagggctcccttatcgataccaagggcaacaagattgctggcttcgattccatcttcaagaaggagggtctacaggtttccaccaaacagaagatctcgccctgggatctttttgaggggttgaagccgtcagcaccactctcttggggctggtttggaacagtccgagtggaccggcgagtggctcgaggagaggagcagcagcggttgctgctctaccacacacacctgaggccccggccccgcgcctattacctggagccactgccactgcccccagaagatgaggagccgcctgctcctaccctgctagagcctgagaaaaaggctccagagccccccaaaactgacaaaccgggggctgctccacccagtactgaggaacgcaagaagaagtccaccaagggcaagaaacgcagccagccagctaccaagacagaggactatggaatgggcccgggtcggagcggcccttatggtgtgacagtgcctccggacctcctgcaccacccaaaccctggttctataacacaccttaactacaggcaaggctccataggcctgtacacccagaaccagccactacctgcaggtggccctcgtgtggacccataccgtcctgtgcgcttaccaatgcagaagctgcccacccgaccaacttaccctggagtgctgcccacaaccatgactggcgtcatgggtttagaaccctcctcttataagacctctgtgtaccggcagcagcaacctgcggtgccccaaggacagcgccttcgccaacagctccagagtcagggcatgttgggacagtcatctgtccatcagatgactcccagctcttcctacggtttgcagacttcccagggctatactccttatgtttctcatgtgggattgcagcaacacacaggccctgcaggtaccatggtgccccccagctactccagccagccttaccagagcacccacccttctaccaatcctactcttgtagatcctacccgccacctgcaacagcggcccagtggctatgtgcaccagcaggcccccacctatggacatggactgacctccactcaaaggttttcacaccagacactgcagcagacacccatgataagtaccatgactccaatgagtgcccagggcgtccaggcaggcgtccgttcaacagccatcctacctgagcagcagcagcagcagcaacagcagcaacagcaacagcagcagcagcagcaacagcaacagcagcagcagcagcagcagtaccacatccggcagcagcagcagcagcagatcctgcggcagcagcagcaacagcaacagcagcagcagcagcagcagcaacagcaacagcagcagcagcaacagcaacaacagcaacaccagcagcaacagcagcaacaggcggctcctccccaaccccagccccagtcccagccccagttccagcgccaggggcttcagcagacccagcagcagcaacagacagcagctttggtccggcaacttcaacaacagctctctaatacccagccacagcccagtaccaacatatttggacgctactgagccacctggaggaactgcttgtgcactggatgtggccccaccctttcctcttaattcccaatcccattcctgggctagcaccagtagtggttggggccctcccctcaggctccatttttaataagtttttagtatttttgttaatgtgaggcattgagctgttgggttttgtatattatttatatagagaccccagagctgttgcacccaatacacagagcttctttgcaaa

SEQ ID NO: 17352 - DNA, 389 bp, Homo sapiens
  source 1..389: mol_type = unassigned DNA
ggaccccaaacagaaggaggaaaaaacaactaaacgccgctttcctgcctcaggatgaactgacggccttgaatgtaaaacaaggtttcaataaccagcctgctgtctctggggatgagcatggcagtgccaagaacgtcagcttcaatcctgccaagatcagttccaacttcagcagcattattgcagagaaattacgttgtaatacccttcctgacactggtcgcaggaagccccaagtgaaccagaaggataacttctggctggtgactgcacgatcccagagtgccattaacacttggttcactgacttggctggcaccaagccactcacgcaactagccaaaaaggtccccattttcagtaagaaggaagaggtgtttgggtac

SEQ ID NO: 17353 - DNA, 6422 bp, Homo sapiens
  source 1..6422: mol_type = unassigned DNA
gaggatgaactgacggccttgaatgtaaaacaaggtttcaataaccagcctgctgtctctggggatgagcatggcagtgccaagaacgtcagcttcaatcctgccaagatcagttccaacttcagcagcattattgcagagaaattacgttgtaatacccttcctgacactggtcgcaggaagccccaagtgaaccagaaggataacttctggctggtgactgcacgatcccagagtgccattaacacttggttcactgacttggctggcaccaagccactcacgcaactagccaaaaaggtccccattttcagtaagaaggaagaggtgtttgggtacttagccaaatacacagtgcctgtgatgcgggctgcctggctcattaagatgacctgtgcctactatgcagcaatctctgagaccaaggttaagaagagacatgttgaccctttcatggaatggactcagatcatcaccaagtacttatgggagcagttacagaagatggctgaatactaccggccagggcctgcaggaagtgggggctgtggttccacgatagggcccttgccccatgatgtagaggtggcaatccggcagtgggattacaccgagaagctggccatgttcatgtttcaggatggaatgctggacagacatgagttcctgacctgggtgcttgagtgttttgagaagatccgccctggagaggatgaattgcttaaactgctgctgcctctgcttctccgatactctggggaatttgttcagtctgcatacctgtcccgccggcttgcctacttctgtacacggagactggccctgcagctggatggtgtgagcagtcactcatctcatgttatatctgctcagtcaacaagcacgctacccaccacccctgctcctcagcccccaactagcagcacaccctcgactccctttagtgacctgcttatgtgccctcagcaccggcccctggtttttggcctcagctgtatcctacagaccatcctcctgtgctgtcctagtgccttggtttggcactactcactgactgatagcagaattaagaccggctcaccacttgaccacttgcctattgccccgtccaacctgcccatgccagagggtaacagtgccttcactcagcaggtccgtgcaaagttgcgggagatcgagcagcagatcaaggagcggggacaggcagttgaagttcgctggtctttcgataaatgccaggaagctactgcaggcttcaccattggacgggtacttcatactttggaagtgctggacagccatagttttgaacgctctgacttcagcaactctcttgactccctttgtaaccgaatctttggattgggacctagcaaggatgggcatgagatctcctcagatgatgatgctgtggtgtcattgctatgtgaatgggctgtcagctgcaagcgttctggtcggcatcgtgctatggtggtagccaagctcctggagaagagacaggcggagattgaggctgagcgttgtggagaatcagaagccgcagatgagaagggttccatcgcctctggctccctttctgctcccagtgctcccattttccaggatgtcctcctgcagtttctggatacacaggctcccatgctgacggaccctcgaagtgagagtgagcgggtggaattctttaacttagtactgctgttctgtgaactgattcgacatgatgttttctcccacaacatgtatacttgcactctcatctcccgaggggaccttgcctttggagcccctggtccccggcctccctctccctttgatgatcctgccgatgacccagagcacaaggaggctgaaggcagcagcagcagcaagctggaagatccagggctctcagaatctatggacattgaccctagttccagtgttctctttgaggacatggagaagcctgatttctcattgttctcccctactatgccctgtgaggggaagggcagtccatcccctgagaagccagatgtcgagaaggaggtgaagcccccacccaaggagaagattgaagggacccttggggttctttacgaccagccacgacacgtgcagtacgccacccattttcccatcccccaggaggagtcatgcagccatgagtgcaaccagcggttggtcgtactgtttggggtgggaaagcagcgagatgatgcccgccatgccatcaagaaaatcaccaaggatatcttgaaggttctgaaccgcaaagggacagcagaaactgaccagcttgctcctattgtgcctctgaatcctggagacctgacattcttaggtggggaggatgggcagaagcggcgacgcaaccggcctgaagccttccccactgctgaagatatctttgctaagttccagcacctttcacattatgaccaacaccaggtcacggctcaggtctcccggaatgttctggagcagatcacgagctttgcccttggcatgtcataccacttgcctctggtgcagcatgtgcagttcatcttcgacctcatggaatattcactcagcatcagtggcctcatcgactttgccattcagctgctgaatgaactgagtgtagttgaggctgagctgcttctcaaatcctcggatctggtgggcagctacactactagcctgtgcctgtgcatcgtggctgtcctgcggcactatcatgcctgcctcatcctcaaccaggaccagatggcacaggtctttgaggggctgtgtggcgtcgtgaagcatgggatgaaccggtccgatggctcctctgcagagcgctgtatccttgcttatctctatgatctgtacacctcctgtagccatttaaagaacaaatttggggagctcttcagcgacttttgctcaaaggtgaagaacaccatctactgcaacgtggagccatcggaatcaaatatgcgctgggcacctgagttcatgatcgacactctagagaaccctgcagctcacaccttcacctacacggggctaggcaagagtcttagtgagaaccctgctaaccgctacagctttgtctgcaatgcccttatgcacgtctgtgtggggcaccatgatcccgatagggtgaatgacatcgcaatcctgtgtgcagagctgaccggctattgcaagtcactgagtgcagaatggctaggagtgcttaaggccttgtgctgctcctctaacaatggcacttgtggtttcaacgatctcctctgcaatgttgatgtcagtgacctatcttttcatgactcgctggctacttttgttgccatcctcatcgctcggcagtgtttgctcctggaagatctgattcgctgtgctgccatcccttcactccttaatgctgcttgtagtgaacaggactctgagccaggggcccggcttacctgccgcatcctccttcaccttttcaagacaccgcagctcaatccttgccagtctgatggaaacaagcctacagtaggaatccgctcctcctgcgaccgccacctgctggctgcctcccagaaccgcatcgtggatggagccgtgtttgctgttctcaaggctgtgtttgtacttggggatgcggaactgaaaggttcaggcttcactgtgacaggaggaacagaagaacttccagaggaggagggaggaggtggcagtggtggtcggaggcagggtggccgcaacatctctgtggagacagccagtctggatgtctatgccaagtacgtgctgcgcagcatctgccaacaggaatgggtaggagaacgttgccttaagtctctgtgtgaggacagcaatgacctgcaagacccagtgttgagtagtgcccaggcgcagcgcctcatgcagctcatttgctatccacatcgactgctggacaatgaggatggggaaaacccccagcggcagcgcataaagcgcattctccagaacttggaccagtggaccatgcgccagtcttccttggagctgcagctcatgatcaagcagacccctaacaatgagatgaactccctcttggagaacatcgccaaggccacaatcgaggttttccaacagtcagcagagacagggtcatcttctggaagtactgcaagcaacatgcccagcagcagcaagaccaagcctgtgctcagctctctagagcgctctggtgtatggctggtggcccccctcattgctaaactgcccacctcagtccagggacatgtgttaaaggctgctggggaagaattggagaagggtcagcacctgggttcctcttcacgcaaagaacgtgatcgacaaaagcagaagagcatgtccctattgagccagcagcccttcttatcgctggtgctaacatgtctgaaagggcaggatgaacaacgcgagggactccttacctccctctacagccaggtgcaccagattgtgaataattggcgagatgaccagtacttagatgattgcaaaccaaagcagcttatgcatgaggcactcaaactgcggctcaacctggtggggggcatgtttgacacggtgcagcgcagcacccagcagaccacggagtgggccatgctcctcctggagatcatcatcagcggcactgtcgacatgcagtccaacaatgagctcttcactactgtgttggacatgctgagcgtgctcatcaatgggacattggctgcagacatgtctagcatctcgcaaggtagcatggaggaaaacaagcgtgcatacatgaacctggcgaagaagttgcagaaggagttgggggagcgccagtcagacagtctggaaaaggttcgccagctgctgccactgcccaagcagacccgagatgtcatcacgtgtgagccacagggctcccttatcgataccaagggcaacaagattgctggcttcgattccatcttcaagaaggagggtctacaggtttccaccaaacagaagatctcgccctgggatctttttgaggggttgaagccgtcagcaccactctcttggggctggtttggaacagtccgagtggaccggcgagtggctcgaggagaggagcagcagcggttgctgctctaccacacacacctgaggccccggccccgcgcctattacctggagccactgccactgcccccagaagatgaggagccgcctgctcctaccctgctagagcctgagaaaaaggctccagagccccccaaaactgacaaaccgggggctgctccacccagtactgaggaacgcaagaagaagtccaccaagggcaagaaacgcagccagccagctaccaagacagaggactatggaatgggcccgggtcggagcggcccttatggtgtgacagtgcctccggacctcctgcaccacccaaaccctggttctataacacaccttaactacaggcaaggctccataggcctgtacacccagaaccagccactacctgcaggtggccctcgtgtggacccataccgtcctgtgcgcttaccaatgcagaagctgcccacccgaccaacttaccctggagtgctgcccacaaccatgactggcgtcatgggtttagaaccctcctcttataagacctctgtgtaccggcagcagcaacctgcggtgccccaaggacagcgccttcgccaacagctccagcagagtcagggcatgttgggacagtcatctgtccatcagatgactcccagctcttcctacggtttgcagacttcccagctctctccttcttccctccagggctatactccttatgtttctcatgtgggattgcagcaacacacaggccctgcagatcctacccgccacctgcaacagcggcccagtggctatgtgcaccagcaggcccccacctatggacatggactgacctccactcaaaggttttcacaccagacactgcagcagacacccatgataagtaccatgactccaatgagtgcccagggcgtccaggcaggcgtccgttcaacagccatcctacctgagcagcagcagcagcagcaacagcagcaacagcaacagcagcagcagcagcaacagcaacagcagcagcagcagcagcagtaccacatccggcagcagcagcagcagcagatcctgcggcagcagcagcaacagcaacagcagcagcagcagcagcagcaacagcaacagcagcagcagcaacagcaacaacagcaacaccagcagcaacagcagcaacaggcggctcctccccaaccccagccccagtcccagccccagttccagcgccaggggcttcagcagacccagcagcagcaacagacagcagctttggtccggcaacttcaacaacagctctctaatacccagccacagcccagtaccaacatatttggacgctactgagccacctggaggaactgcttgtgcactggatgtggccc

SEQ ID NO: 17354 - DNA, 3010 bp, Homo sapiens
  source 1..3010: mol_type = unassigned DNA
ggtggcagtggtggtcggaggcagggtggccgcaacatctctgtggagacagccagtctggatgtctatgccaagtacgtgctgcgcagcatctgccaacaggaatgggtaggagaacgttgccttaagtctctgtgtgaggacagcaatgacctgcaagacccagtgttgagtagtgcccaggcgcagcgcctcatgcagctcatttgctatccacatcgactgctggacaatgaggatggggaaaacccccagcggcagcgcataaagcgcattctccagaacttggaccagtggaccatgcgccagtcttccttggagctgcagctcatgatcaagcagacccctaacaatgagatgaactccctcttggagaacatcgccaaggccacaatcgaggttttccaacagtcagcagagacagggtcatcttctggaagtactgcaagcaacatgcccagcagcagcaagaccaagcctgtgctcagctctctagagcgctctggtgtatggctggtggcccccctcattgctaaactgcccacctcagtccagggacatgtgttaaaggctgctggggaagaattggagaagggtcagcacctgggttcctcttcacgcaaagaacgtgatcgacaaaagcagaagagcatgtccctattgagccagcagcccttcttatcgctggtgctaacatgtctgaaagggcaggatgaacaacgcgagggactccttacctccctctacagccaggtgcaccagattgtgaataattggcgagatgaccagtacttagatgattgcaaaccaaagcagcttatgcatgaggcactcaaactgcggctcaacctggtggggggcatgtttgacacggtgcagcgcagcacccagcagaccacggagtgggccatgctcctcctggagatcatcatcagcggcactgtcgacatgcagtccaacaatgagctcttcactactgtgttggacatgctgagcgtgctcatcaatgggacattggctgcagacatgtctagcatctcgcaaggtagcatggaggaaaacaagcgtgcatacatgaacctggcgaagaagttgcagaaggagttgggggagcgccagtcagacagtctggaaaaggttcgccagctgctgccactgcccaagcagacccgagatgtcatcacgtgtgagccacagggctcccttatcgataccaagggcaacaagattgctggcttcgattccatcttcaagaaggagggtctacaggtttccaccaaacagaagatctcgccctgggatctttttgaggggttgaagccgtcagcaccactctcttggggctggtttggaacagtccgagtggaccggcgagtggctcgaggagaggagcagcagcggttgctgctctaccacacacacctgaggccccggccccgcgcctattacctggagccactgccactgcccccagaagatgaggagccgcctgctcctaccctgctagagcctgagaaaaaggctccagagccccccaaaactgacaaaccgggggctgctccacccagtactgaggaacgcaagaagaagtccaccaagggcaagaaacgcagccagccagctaccaagacagaggactatggaatgggcccgggtcggagcggcccttatggtgtgacagtgcctccggacctcctgcaccacccaaaccctggttctataacacaccttaactacaggcaaggctccataggcctgtacacccagaaccagccactacctgcaggtggccctcgtgtggacccataccgtcctgtgcgcttaccaatgcagaagctgcccacccgaccaacttaccctggagtgctgcccacaaccatgactggcgtcatgggtttagaaccctcctcttataagacctctgtgtaccggcagcagcaacctgcggtgccccaaggacagcgccttcgccaacagctccaggcaaagatacagagtcagggcatgttgggacagtcatctgtccatcagatgactcccagctcttcctacggtttgcagacttcccagggctatactccttatgtttctcatgtgggattgcagcaacacacaggccctgcaggtaccatggtgccccccagctactccagccagccttaccagagcacccacccttctaccaatcctactcttgtagatcctacccgccacctgcaacagcggcccagtggctatgtgcaccagcaggcccccacctatggacatggactgacctccactcaaaggttttcacaccagacactgcagcagacacccatgataagtaccatgactccaatgagtgcccagggcgtccaggcaggcgtccgttcaacagccatcctacctgagcagcagcagcagcagcaacagcagcaacagcaacagcagcagcagcagcaacagcaacagcagcagcagcagcagcagtaccacatccggcagcagcagcagcagcagatcctgcggcagcagcagcaacagcaacagcagcagcagcagcagcagcaacagcaacagcagcagcagcaacagcaacaacagcaacaccagcagcaacagcagcaacaggcggctcctccccaaccccagccccagtcccagccccagttccagcgccaggggcttcagcagacccagcagcagcaacagacagcagctttggtccggcaacttcaacaacagctctctaatacccagccacagcccagtaccaacatatttggacgctactgagccacctggaggaactgcttgtgcactggatgtggccccaccctttcctcttaattcccaatcccattcctgggctagcaccagtagtggttggggccctcccctcaggctccatttttaataagtttttagtatttttgttaatgtgaggcattgagctgttgggttttgtatattatttatatagagaccccagagctgttgcacccaatacacagagcttctttgcaaa

SEQ ID NO: 17355 - DNA, 752 bp, Homo sapiens
  source 1..752: mol_type = unassigned DNA
aggaacgcaagaagaagtccaccaagggcaagaaacgcagccagccagctaccaagacagaggactatggaatgggcccgggtcggagcggcccttatggtgtgacagtgcctccggacctcctgcaccacccaaaccctggttctataacacaccttaactacaggcaaggctccataggcctgtacacccagaaccagccactacctgcaggtggccctcgtgtggacccataccgtcctgtgcgcttaccaatgcagaagctgcccacccgaccaacttaccctggagtgctgcccacaaccatgactggcgtcatgggtttagaaccctcctcttataagacctctgtgtaccggcagcagcaacctgcggtgccccaaggacagcgccttcgccaacagctccagcagagtcagggcatgttgggacagtcatctgtccatcagatgactcccagctcttcctacggtttgcagacttcccagggctatactccttatgtttctcatgtgggattgcagcaacacacaggccctgcagatcctacccgccacctgcaacagcggcccagtggctatgtgcaccagcaggcccccacctatggacatggactgacctccactcaaaggttttcacaccagacactgcagcagacacccatgataagtaccatgactccaatgagtgcccagggcgtccaggcaggcgtccgttcaacagccatcctacctgagcagcagcagcagcag

SEQ ID NO: 17356 - DNA, 6763 bp, Homo sapiens
  source 1..6763: mol_type = unassigned DNA
attgtccgatggttcccggcgtacctcggcttccctcggtagtttccggcaatggtcgagagtttctaacgtgcccccttgttgtctctcggccgccgtcctctcaaccaccgccccccttttcggctccctctcccccttcccgttcccccagtcagcctggccctgctggtgcctccggcgctacgggctgggcaagatggcggccttcgggatcttgagctacgaacaccggcccctgaagcggccgcggctggggcctcccgatgtttaccctcaggaccccaaacagaaggaggatgaactgacggccttgaatgtaaaacaaggtttcaataaccagcctgctgtctctggggatgagcatggcagtgccaagaacgtcagcttcaatcctgccaagatcagttccaacttcagcagcattattgcagagaaattacgttgtaatacccttcctgacactggtcgcaggaagccccaagtgaaccagaaggataacttctggctggtgactgcacgatcccagagtgccattaacacttggttcactgacttggctggcaccaagccactcacgcaactagccaaaaaggtccccattttcagtaagaaggaagaggtgtttgggtacttagccaaatacacagtgcctgtgatgcgggctgcctggctcattaagatgacctgtgcctactatgcagcaatctctgagaccaaggttaagaagagacatgttgaccctttcatggaatggactcagatcatcaccaagtacttatgggagcagttacagaagatggctgaatactaccggccagggcctgcaggaagtgggggctgtggttccacgatagggcccttgccccatgatgtagaggtggcaatccggcagtgggattacaccgagaagctggccatgttcatgtttcaggatggaatgctggacagacatgagttcctgacctgggtgcttgagtgttttgagaagatccgccctggagaggatgaattgcttaaactgctgctgcctctgcttctccgatactctggggaatttgttcagtctgcatacctgtcccgccggcttgcctacttctgtacacggagactggccctgcagctggatggtgtgagcagtcactcatctcatgttatatctgctcagtcaacaagcacgctacccaccacccctgctcctcagcccccaactagcagcacaccctcgactccctttagtgacctgcttatgtgccctcagcaccggcccctggtttttggcctcagctgtatcctacagaccatcctcctgtgctgtcctagtgccttggtttggcactactcactgactgatagcagaattaagaccggctcaccacttgaccacttgcctattgccccgtccaacctgcccatgccagagggtaacagtgccttcactcagcaggtccgtgcaaagttgcgggagatcgagcagcagatcaaggagcggggacaggcagttgaagttcgctggtctttcgataaatgccaggaagctactgcaggcttcaccattggacgggtacttcatactttggaagtgctggacagccatagttttgaacgctctgacttcagcaactctcttgactccctttgtaaccgaatctttggattgggacctagcaaggatgggcatgagatctcctcagatgatgatgctgtggtgtcattgctatgtgaatgggctgtcagctgcaagcgttctggtcggcatcgtgctatggtggtagccaagctcctggagaagagacaggcggagattgaggctgagcgttgtggagaatcagaagccgcagatgagaagggttccatcgcctctggctccctttctgctcccagtgctcccattttccaggatgtcctcctgcagtttctggatacacaggctcccatgctgacggaccctcgaagtgagagtgagcgggtggaattctttaacttagtactgctgttctgtgaactgattcgacatgatgttttctcccacaacatgtatacttgcactctcatctcccgaggggaccttgcctttggagcccctggtccccggcctccctctccctttgatgatcctgccgatgacccagagcacaaggaggctgaaggcagcagcagcagcaagctggaagatccagggctctcagaatctatggacattgaccctagttccagtgttctctttgaggacatggagaagcctgatttctcattgttctcccctactatgccctgtgaggggaagggcagtccatcccctgagaagccagatgtcgagaaggaggtgaagcccccacccaaggagaagattgaagggacccttggggttctttacgaccagccacgacacgtgcagtacgccacccattttcccatcccccaggaggagtcatgcagccatgagtgcaaccagcggttggtcgtactgtttggggtgggaaagcagcgagatgatgcccgccatgccatcaagaaaatcaccaaggatatcttgaaggttctgaaccgcaaagggacagcagaaactgaccagcttgctcctattgtgcctctgaatcctggagacctgacattcttaggtggggaggatgggcagaagcggcgacgcaaccggcctgaagccttccccactgctgaagatatctttgctaagttccagcacctttcacattatgaccaacaccaggtcacggctcaggtctcccggaatgttctggagcagatcacgagctttgcccttggcatgtcataccacttgcctctggtgcagcatgtgcagttcatcttcgacctcatggaatattcactcagcatcagtggcctcatcgactttgccattcagctgctgaatgaactgagtgtagttgaggctgagctgcttctcaaatcctcggatctggtgggcagctacactactagcctgtgcctgtgcatcgtggctgtcctgcggcactatcatgcctgcctcatcctcaaccaggaccagatggcacaggtctttgaggggctgtgtggcgtcgtgaagcatgggatgaaccggtccgatggctcctctgcagagcgctgtatccttgcttatctctatgatctgtacacctcctgtagccatttaaagaacaaatttggggagctcttcagcgacttttgctcaaaggtgaagaacaccatctactgcaacgtggagccatcggaatcaaatatgcgctgggcacctgagttcatgatcgacactctagagaaccctgcagctcacaccttcacctacacggggctaggcaagagtcttagtgagaaccctgctaaccgctacagctttgtctgcaatgcccttatgcacgtctgtgtggggcaccatgatcccgatagggtgaatgacatcgcaatcctgtgtgcagagctgaccggctattgcaagtcactgagtgcagaatggctaggagtgcttaaggccttgtgctgctcctctaacaatggcacttgtggtttcaacgatctcctctgcaatgttgatgtcagtgacctatcttttcatgactcgctggctacttttgttgccatcctcatcgctcggcagtgtttgctcctggaagatctgattcgctgtgctgccatcccttcactccttaatgctgcttgtagtgaacaggactctgagccaggggcccggcttacctgccgcatcctccttcaccttttcaagacaccgcagctcaatccttgccagtctgatggaaacaagcctacagtaggaatccgctcctcctgcgaccgccacctgctggctgcctcccagaaccgcatcgtggatggagccgtgtttgctgttctcaaggctgtgtttgtacttggggatgcggaactgaaaggttcaggcttcactgtgacaggaggaacagaagaacttccagaggaggagggaggaggtggcagtggtggtcggaggcagggtggccgcaacatctctgtggagacagccagtctggatgtctatgccaagtacgtgctgcgcagcatctgccaacaggaatgggtaggagaacgttgccttaagtctctgtgtgaggacagcaatgacctgcaagacccagtgttgagtagtgcccaggcgcagcgcctcatgcagctcatttgctatccacatcgactgctggacaatgaggatggggaaaacccccagcggcagcgcataaagcgcattctccagaacttggaccagtggaccatgcgccagtcttccttggagctgcagctcatgatcaagcagacccctaacaatgagatgaactccctcttggagaacatcgccaaggccacaatcgaggttttccaacagtcagcagagacagggtcatcttctggaagtactgcaagcaacatgcccagcagcagcaagaccaagcctgtgctcagctctctagagcgctctggtgtatggctggtggcccccctcattgctaaactgcccacctcagtccagggacatgtgttaaaggctgctggggaagaattggagaagggtcagcacctgggttcctcttcacgcaaagaacgtgatcgacaaaagcagaagagcatgtccctattgagccagcagcccttcttatcgctggtgctaacatgtctgaaagggcaggatgaacaacgcgagggactccttacctccctctacagccaggtgcaccagattgtgaataattggcgagatgaccagtacttagatgattgcaaaccaaagcagcttatgcatgaggcactcaaactgcggctcaacctggtggggggcatgtttgacacggtgcagcgcagcacccagcagaccacggagtgggccatgctcctcctggagatcatcatcagcggcactgtcgacatgcagtccaacaatgagctcttcactactgtgttggacatgctgagcgtgctcatcaatgggacattggctgcagacatgtctagcatctcgcaaggtagcatggaggaaaacaagcgtgcatacatgaacctggcgaagaagttgcagaaggagttgggggagcgccagtcagacagtctggaaaaggttcgccagctgctgccactgcccaagcagacccgagatgtcatcacgtgtgagccacagggctcccttatcgataccaagggcaacaagattgctggcttcgattccatcttcaagaaggagggtctacaggtttccaccaaacagaagatctcgccctgggatctttttgaggggttgaagccgtcagcaccactctcttggggctggtttggaacagtccgagtggaccggcgagtggctcgaggagaggagcagcagcggttgctgctctaccacacacacctgaggccccggccccgcgcctattacctggagccactgccactgcccccagaagatgaggagccgcctgctcctaccctgctagagcctgagaaaaaggctccagagccccccaaaactgacaaaccgggggctgctccacccagtactgaggaacgcaagaagaagtccaccaagggcaagaaacgcagccagccagctaccaagacagaggactatggaatgggcccgggtcggagcggcccttatggtgtgacagtgcctccggacctcctgcaccacccaaaccctggttctataacacaccttaactacaggcaaggctccataggcctgtacacccagaaccagccactacctgcaggtggccctcgtgtggacccataccgtcctgtgcgcttaccaatgcagaagctgcccacccgaccaacttaccctggagtgctgcccacaaccatgactggcgtcatgggtttagaaccctcctcttataagacctctgtgtaccggcagcagcaacctgcggtgccccaaggacagcgccttcgccaacagctccagcagagtcagggcatgttgggacagtcatctgtccatcagatgactcccagctcttcctacggtttgcagacttcccagggctatactccttatgtttctcatgtgggattgcagcaacacacaggccctgcagatcctacccgccacctgcaacagcggcccagtggctatgtgcaccagcaggcccccacctatggacatggactgacctccactcaaagttttcacaccagacactgcagcagacacccatgataagtaccatgactccaatgagtgcccagggcgtccaggcaggcgtccgttcaacagccatcctacctgagcagcagcagcagcagcaacagcagcaacagcaacagcagcagcagcagcaacagcaacagcagcagcagcagcagcagtaccacatccggcagcagcagcagcagcagatcctgcggcagcagcagcaacagcaacagcagcagcagcagcagcagcaacagcaacagcagcagcagcaacagcaacaacagcaacaccagcagcaacagcagcaacaggcggctcctccccaaccccagccccagtcccagccccagttccagcgccaggggcttcagcagacccagcagcagcaacagacagcagctttggtccggcaacttcaacaacagctctctaatacccagccacagcccagtaccaacatatttggacgctactgagccacctggaggaactgcttgtgcactggatgtggccccaccctttcctcttaattcccaatcccattcctgggctagcaccagtagtggttggggccctcccctc

SEQ ID NO: 17357 - DNA, 2862 bp, Homo sapiens
  source 1..2862: mol_type = unassigned DNA
gtccgctccacagcttcttcccgggaggggagggccaccctcgccttgggcgagcacttcagccaccagcctaggcgccaagaaaagtttttttttttttttttccagtgccccacccccacccccatcctgcgcccagctggggtgggtttgggtccattggtgaaaaaagtcacacgttcccatcagctgctcctccccctggagacaaggtaggggggagcagaggaggcaggcgccgcggaggaccctggccgacctctagtccctccgccgccgccaccggagcggtgcgtcccggggctcgagcgcagccgagtacccgccgaaggctgtccccatcagtgcgtgtctgctgccgggcagcggcagcatccaacctgctttattcctcctgcctgcagcgccacagcgagcgagcgagcgaggagggggagagagggagtctgtctgcaaagtgctgctccctggtgctcagaggcggctgctccagctccaactctcattcatttcgccggttaacatgagagatcatggccgccttcgggcttctcagctatgagcagagaccgctgaagcgcccccggctcgggccgcccgacgtctacccacaggaccccaagcagaaggaggatgaacttactgctgtgaatgtaaagcaaggcttcaataatcagccagccttcactggagatgaacatggctcagccagaaatattgtaattaacccatcaaagattggagcttattttagcagcatattagctgagaaactgaagcttaacactttccaggacacgggaaagaagaaaccacaagttaatgctaaagataattattggctggttactgctcgatcccagagtgcaattcatagttggttttctgacttagcaggaaataagccactttctattttggcaaaaaaggttcctatccttagtaaaaaagaggatgtttttgcatatttagctaaatattctgtgccaatggttcgagcaacgtggctgatcaagatgacttgtgcctattattctgctatatctgaagctaaaattaagaaacgtcaggctcctgatccgaatttggagtggacacagatatctaccagatatcttcgagagcagttggccaagatttctgacttttaccacatggcctccagcacgggcgatggccctgtccctgtgccaccagaggtggagcaagccatgaagcaatgggaatacaacgaaaagctagcatttcacatgttccaggaaggaatgttagaaaaacacgaatatttgacatggatcctggatgttttagaaaagatcagaccaatggatgatgatcttcttaaactcttgctaccactaatgctgcagtattcagatgagtttgttcagtcggcctacctgtctcgtcgtcttgcctacttttgtgcccggcgtctttccttgctgctgagcgatagccccaacctccttgctgcccactcaccccacatgatgataggaccaaacaactcgagtatcggggcccccagccctggcccccccggccctggcatgagccccgtgcagctggccttctcagattttctttcctgtgcacagcatggtcccctggtttatggacttagttgtatgttgcagactgtcactctctgttgcccaagtgccttggtgtggaattattccacaaatgaaaataagagcgcaaacccaggctcacccctggatctgctgcaggtggccccgtccagcctccccatgccgggtgggaacacggctttcaatcagcaggttcgggcaaggatttatgaagtagaacaacagataaaacaaagaggccgtgcagtggaagttcggtggtcatttgacaagtgccaagaatccacagcaggggtgactattagtcgggttttgcacacgttggaagttttggatcgtcactgttttgaccgaactgattccagcaattccatggagacactttatcataagattttctgggcaaaccaaaacaaagataaccaagaggttgcgcccaacgatgaagctgtggtgacgctgttatgtgaatgggccgtgagctgcaaacggtctggcaagcacagggccatggctgtggcaaaactcctggagaagaggcaagcagaaattgaggcagagagatgtggtgaatcagaagtcttagatgagaaggagtctatttcttcatcctctcttgctggatccagtttgcctgttttccagaatgtgctgttaaggtttttagatacacaggccccctctttgtcggacccaaacagtgaatgtgaaaaggtggaatttgtgaacctggtgctgctcttctgcgagttcatccgccatgatgtcttctcccatgacgcatacatgtgtaccctcatatctcgaggagatttgtcagtcactgcctcaactcggccgcggtcaccagtaggggaaaatgcagatgaacactattcaaaggaccatgatgtgaaaatggaggaacagagtattatggcgcatatgggcattgactcaggaaccactaacatttttgatgaagtagacaagagtgactttaaaactgactttggttcggaatttccaattttttctcctatgcctggagaatcctgtgagaatgccaacacttcgttgggcagaagaatgtcagttaattgtgagaagttggtgaagagggaaaagccaagggaattaatttttccatctaattatgacctccttcgccacttacagtatgcaacacattttcctatacctctggtaagtcattgcttcagttaatctataccctgattattttattataagatcaataactgttgaacgtcagattattcaa

SEQ ID NO: 17358 - DNA, 2757 bp, Homo sapiens
  source 1..2757: mol_type = unassigned DNA
gtccgctccacagcttcttcccgggaggggagggccaccctcgccttgggcgagcacttcagccaccagcctaggcgccaagaaaagtttttttttttttttttccagtgccccacccccacccccatcctgcgcccagctggggtgggtttgggtccattggtgaaaaaagtcacacgttcccatcagctgctcctccccctggagacaaggtaggggggagcagaggaggcaggcgccgcggaggaccctggccgacctctagtccctccgccgccgccaccggagcggtgcgtcccggggctcgagcgcagccgagtacccgccgaaggctgtccccatcagtgcgtgtctgctgccgggcagcggcagcatccaacctgctttattcctcctgcctgcagcgccacagcgagcgagcgagcgaggagggggagagagggagtctgtctgcaaagtgctgctccctggtgctcagaggcggctgctccagctccaactctcattcatttcgccggttaacatgagagatcatggccgccttcgggcttctcagctatgagcagagaccgctgaagcgcccccggctcgggccgcccgacgtctacccacaggaccccaagcagaaggaggatgaacttactgctgtgaatgtaaagcaaggcttcaataatcagccagccttcactggagatgaacatggctcagccagaaatattgtaattaacccatcaaagattggagcttattttagcagcatattagctgagaaactgaagcttaacactttccaggacacgggaaagaagaaaccacaagttaatgctaaagataattattggctggttactgctcgatcccagagtgcaattcatagttggttttctgacttagcaggaaataagccactttctattttggcaaaaaaggttcctatccttagtaaaaaagaggatgtttttgcatatttagctaaatattctgtgccaatggttcgagcaacgtggctgatcaagatgacttgtgcctattattctgctatatctgaagctaaaattaagaaacgtcaggctcctgatccgaatttggagtggacacagatatctaccagatatcttcgagagcagttggccaagatttctgacttttaccacatggcctccagcacgggcgatggccctgtccctgtgccaccagaggtggagcaagccatgaagcaatgggaatacaacgaaaagctagcatttcacatgttccaggaaggaatgttagaaaaacacgaatatttgacatggatcctggatgttttagaaaagatcagaccaatggatgatgatcttcttaaactcttgctaccactaatgctgcagtattcagatgagtttgttcagtcggcctacctgtctcgtcgtcttgcctacttttgtgcccggcgtctttccttgctgctgagcgatagccccaacctccttgctgcccactcaccccacatgatgataggaccaaacaactcgagtatcggggcccccagccctggcccccccggccctggcatgagccccgtgcagctggccttctcagattttctttcctgtgcacagcatggtcccctggtttatggacttagttgtatgttgcagactgtcactctctgttgcccaagtgccttggtgtggaattattccacaaatgaaaataagagcgcaaacccaggctcacccctggatctgctgcaggtggccccgtccagcctccccatgccgggtgggaacacggctttcaatcagcaggttcgggcaaggatttatgaagtagaacaacagataaaacaaagaggccgtgcagtggaagttcggtggtcatttgacaagtgccaagaatccacagcaggggtgactattagtcgggttttgcacacgttggaagttttggatcgtcactgttttgaccgaactgattccagcaattccatggagacactttatcataagattttctgggcaaaccaaaacaaagataaccaagaggttgcgcccaacgatgaagctgtggtgacgctgttatgtgaatgggccgtgagctgcaaacggtctggcaagcacagggccatggctgtggcaaaactcctggagaagaggcaagcagaaattgaggcagagagatgtggtgaatcagaagtcttagatgagaaggagtctatttcttcatcctctcttgctggatccagtttgcctgttttccagaatgtgctgttaaggtttttagatacacaggccccctctttgtcggacccaaacagtgaatgtgaaaaggtggaatttgtgaacctggtgctgctcttctgcgagttcatccgccatgatgtcttctcccatgacgcatacatgtgtaccctcatatctcgaggagatttgtcagtcactgcctcaactcggccgcggtcaccagtaggggaaaatgcagatgaacactattcaaaggaccatgatgtgaaaatggagattttttctcctatgcctggagaatcctgtgagaatgccaacacttcgttgggcagaagaatgtcagttaattgtgagaagttggtgaagagggaaaagccaagggaattaatttttccatctaattatgacctccttcgccacttacagtatgcaacacattttcctatacctctggtaagtcattgcttcagttaatctataccctgattattttattataagatcaataactgttgaacgtcagattattcaa

SEQ ID NO: 17359 - DNA, 10744 bp, Homo sapiens
  source 1..10744: mol_type = unassigned DNA
ccaactctcattcatttcgccggttaacatgagagatcatggccgccttcgggcttctcagctatgagcagagaccgctgaagcgcccccggctcgggccgcccgacgtctacccacaggaccccaagcagaaggaggatgaacttactgctgtgaatgtaaagcaaggcttcaataatcagccagccttcactggagatgaacatggctcagccagaaatattgtaattaacccatcaaagattggagcttattttagcagcatattagctgagaaactgaagcttaacactttccaggacacgggaaagaagaaaccacaagttaatgctaaagataattattggctggttactgctcgatcccagagtgcaattcatagttggttttctgacttagcaggaaataagccactttctattttggcaaaaaaggttcctatccttagtaaaaaagaggatgtttttgcatatttagctaaatattctgtgccaatggttcgagcaacgtggctgatcaagatgacttgtgcctattattctgctatatctgaagctaaaattaagaaacgtcaggctcctgatccgaatttggagtggacacagatatctaccagatatcttcgagagcagttggccaagatttctgacttttaccacatggcctccagcacgggcgatggccctgtccctgtgccaccagaggtggagcaagccatgaagcaatgggaatacaacgaaaagctagcatttcacatgttccaggaaggaatgttagaaaaacacgaatatttgacatggatcctggatgttttagaaaagatcagaccaatggatgatgatcttcttaaactcttgctaccactaatgctgcagtattcagatgagtttgttcagtcggcctacctgtctcgtcgtcttgcctacttttgtgcccggcgtctttccttgctgctgagcgatagccccaacctccttgctgcccactcaccccacatgatgataggaccaaacaactcgagtatcggggcccccagccctggcccccccggccctggcatgagccccgtgcagctggccttctcagattttctttcctgtgcacagcatggtcccctggtttatggacttagttgtatgttgcagactgtcactctctgttgcccaagtgccttggtgtggaattattccacaaatgaaaataagagcgcaaacccaggctcacccctggatctgctgcaggtggccccgtccagcctccccatgccgggtgggaacacggctttcaatcagcaggttcgggcaaggatttatgaagtagaacaacagataaaacaaagaggccgtgcagtggaagttcggtggtcatttgacaagtgccaagaatccacagcaggggtgactattagtcgggttttgcacacgttggaagttttggatcgtcactgttttgaccgaactgattccagcaattccatggagacactttatcataagattttctgggcaaaccaaaacaaagataaccaagaggttgcgcccaacgatgaagctgtggtgacgctgttatgtgaatgggccgtgagctgcaaacggtctggcaagcacagggccatggctgtggcaaaactcctggagaagaggcaagcagaaattgaggcagagagatgtggtgaatcagaagtcttagatgagaaggagtctatttcttcatcctctcttgctggatccagtttgcctgttttccagaatgtgctgttaaggtttttagatacacaggccccctctttgtcggacccaaacagtgaatgtgaaaaggtggaatttgtgaacctggtgctgctcttctgcgagttcatccgccatgatgtcttctcccatgacgcatacatgtgtaccctcatatctcgaggagatttgtcagtcactgcctcaactcggccgcggtcaccagtaggggaaaatgcagatgaacactattcaaaggaccatgatgtgaaaatggagattttttctcctatgcctggagaatcctgtgagaatgccaacacttcgttgggcagaagaatgtcagttaattgtgagaagttggtgaagagggaaaagccaagggaattaatttttccatctaattatgacctccttcgccacttacagtatgcaacacattttcctatacctctggatgaatcttcaagtcatgaatgtaaccagcgcacaatccttctctatggagtcggcaaagagcgtgatgaagcaaggcatcagctgaagaagattaccaaagatatcctgaaaattctaaataagaagagcaccacagagacaggggttggggacgaaggacaaaaagccaggaagaacaaacaggagacatttccaacactggagactgtgttcactaaactccagctcctttcatattttgatcaacatcaagtgacatctcagatttctaacaatgtgctagaacaaatcacaagctttgcgtcaggaacatcctatcatctccctttggctcaccacattcagctcatctttgatctcatggagccagcactgaacatcaacggactaattgacttcgcaatacagttactaaatgaactgagtgttgtggaagctgaactgctcctaaaatcctccagcctggcaggaagttatacaacaggactgtgtgtctgcatcgtggctgttctcaggcgctatcacagttgtctaatcttgaatcctgatcagacagcccaggtgtttgaagggttgtgtggtgtggtcaagcatgtcgtaaacccctcagaatgttcttcccctgaaagatgcattttagcctacctctatgatctctatgtgtcatgtagccacctcagaagtaaatttggagacctcttcagtagtgcctgttcaaaagtaaagcaaaccatatataataacgtgatgcctgcaaattcgaacttgcgatgggatccagacttcatgatggattttattgagaatccctcagcccgcagcatcaactactcaatgctgggcaagatcctcagtgacaatgcggccaatcgctacagctttgtctgcaatacactcatgaatgtatgtatgggccatcaggatgctggcaggattaacgacatagccaatttctcctctgagcttacggcttgctgcactgttcttagttcagaatggctgggggttctgaaggctctttgttgttcttcaaatcacgtgtgggggtttaatgatgtactttgcactgtagatgtgagtgacctttcattccatgattcattagctactttcattgctattctgatagcacgacagtgtttttccctggaggacgtcgtgcagcatgtcgcacttccctctcttctagcagcagcttgtggggatgcggacgccgagcctggggcgagaatgacatgccgactcttgcttcatctcttccgagctccccaggcctgcttcttacctcaagcaacgggcaaacctttccctggaataagatcatcttgtgatagacacctcttagccgctgctcacaacagcattgaagtgggagccgtgtttgctgtcttaaaagcaattatgatgcttggagatgccaaaattggcaataacagtgtcagctctttaaagaatgatgacttcaccatgagaggtttgcgatgtgatgggaatgctgatgatatctggactgcctcacaaaatccaaaatcctgtgggaaaagcatttccatagaaactgccaatttaagagaatacgctagatatgtactgaggactatctgtcaacaggaatgggtaggagagcattgcttaaaagaacctgaaagattatgtacagacaaagaacttatattggaccctgtgctttcaaatatgcaagcacagaaattactgcagcttatctgttatcctcatggcattaaagaatgtaccgagggggacaatctgcaaagacagcacattaagcgtattcttcagaatcttgagcagtggacactgaggcaatcctggttagaactccagctaatgatcaaacagtgcttgaaggaccctggctctggttctgtggccgaaatgaacaacttactggacaatattgcaaaggcaacaatagaggtattccagcagtctgcagacctaaataattcttctaattctggcatgagcctcttcaacccaaacagtattggaagtgctgatacaagtagcacgagacagaatggaataaagacattcctaagttcctccgaacgcaggggtgtatggttggtggcccccctcatcgccaggttgccaacttctgtgcaaggaagagtgctgaaagccgctggggaagagctggagaagggacagcacttgggttcttcttccaaaaaggaaagggacagacagaaacagaaaagtatgtctcttttgagtcaacaacccttcctctcactggtacttacctgccttaagggacaagatgaacaaagggaaggcctcctaacatctctccagaatcaagttaaccagattttaagtaactggagagaagaacgataccaagatgacataaaagcgcggcagatgatgcacgaagcattgcaactccgcctaaatttggtaggaggaatgtttgacacggtgcagaggagcacccagtggactacagactgggccctgctactccttcagatcattacttcaggaactgttgacatgcacactaacaatgaattattcacaacagttcttgacatgctgggtgttttaatcaatggaacgttagcctctgacctatcaaatgcatcccctgggggatctgaagagaacaagcgtgcatacatgaatttagtaaagaaactgaaaaaagagctaggagacaagcgatcagaaagtattgacaaagttcgacagttactacctttgccgaaacagacatgtgatgtcatcacttgtgaacctatgggttccttgattgacacaaaaggaaacaaaattgctggatttgactctatagataaaaaacagggtctccaggtctctacgaagcagaaggtgtccccgtgggacttgtttgagggtcagaagaacccagctcctttgtcctgggcctggtttgggacagtccgagtggaccgaagagtgatcaagtacgaggagcagcatcacctcctgctgtatcacacacaccccatgcccaagccccgcagttactacctccagccactgcccctgcctcctgaggaggaagaggaagagcccacatctccagtttctcaggaaccagaaaggaagtccgctgagctgtcagatcagggaaaaaccacaacagatgaagaaaagaaaacaaaaggaaggaagcgcaagacgaaatctagctcaagagttgatgaatatccacagagcaacatataccgagtgcctcctaattactcgcctatctcctcccaaatgatgcaccatccacagtccaccttgtggggttacaacctcgtgggccagccccagcagcccggctttttccttcagaaccaatctcttactccaggtggctccagattggaccctgcaggctcctttgtcccaaccaacaccaaacaagctctgtcaaacatgctacagcggcgctcaggcgccatgatgcagccgccttctcttcatgcaatcacatcgcagcagcagttgatacagatgaagcttctgcagcagcagcagcaacagcgacttctcaggcaagcccagactcggcctttccaacagggccagccgggggaccaggctgctctctttgctgcgcaagcacggccctcccctcagctccctcagtatccagggctgcagcaagcacagaccatgccacagggctatacaatgtatgggacacagatgcctttgcagcagacatcgcagcagcaggctggcagtgtggtcctgtctcccagctataactccagagcctatccggccgcacattccaaccccgtgctaatggaaagactcagacagattcagcagcagccgagtggctatgttcagcagcaggcctcgccgtacctgcagcccctgactggctctcagagactgaaccatcaggctctacagcagagccctctggtgggcgggggaattgatgctgtgctgacttctgcacatccaaaccttccctccgtgcccctgcctcaggatcccatgagacccagacagccgcaagttcgacagcagcagagactcctccagatgcagcagccccagcagccccagccccagcagcctccccagccccagcagtcctcgcagtcccagagtcagacccttggtctccaagcaatgcagccccagcagcccttgtttcccaggcaaggcttgcagcagacccagcagcagcagcagacggccgccttggtgcggcagctccagaagcagctttccagcaaccagccacagcaaggagtgactccgtatgggcatccttcacacttctgaatctgcaagaggagaagacatgacgttttatgtttgcactgaaaaacagaaaatcaaatttaatgcattagtcatcttaaaaatgtccctttttttcatttctttgacattttactatattttatgctacatctcacaaaaaaaaaaaaaggtgtttaaacaaaaagccaaggagaagttgtggtttgattttgttgaattcacctttaaagtaggtttacaaatgtgaatcatgcaggcaggcctactcccggaagagtgtgctagcagaccttttgaaattggtgctttttttgaatctcacatttctagaaagaatggattatgatggatctaaggtatttatgtatttcattcattaatgatgacgttgtttttttttttttaattttattttccaaactgtgctggaccaaactactgatttgaaaggcatgtcagatcttgacagaaacatggcctgtttattctgcattcacctgtgatggtgaaacggacatttatttgcatcgctctaatttgaaatgtttgtaatctcataagcactttataaactttgttcttatttatgtaggactcttctttgcttttgttgtggtcaaaaggtgctgaaacagattgttgcttcgtacttaaacttcttaaaccaagaacctaaaccaaggtttctttgagagccgccctaagatgtgcggaaacctgttagaagtagctgtactcaaatttgttttgaggcaagatcattgatgagagtcattgtgaaggtacaacatgtaaatcctaaaggcctgaaagaactgcagtggaatcgtccaactatttattgccagttttggttctcctgaaccttatgccaccttaaggggaaaaaaaaatccagtagctggcttgagattccagtgctcacacttgacatggtttccagagaatctggccccaaagtccagaaggctctggttttcataaaaggtgtatttgctgtttattttgtatggtaagtatttgctcttttgaatttaattattactgtcagtgtcagtcttggttgtgtattgcatatactgtatttataaattggtgcaaaaagcacaagtaaattatacatcaaatttattataaagaaatagtaactattttaactttgttcaagtatgtggtaatttgctcctattagagtaaaaaagaaaccagtaaattatcagtttgtgtaacttaagagtattctatataatatttttttagatttagatgcataaaattttgaatgtgaaaattgcagggcattttaaaacatatgtgggggatattttcccatgttctctgttatttcattttcttttgccatatgattttacatataatatagtcaagcatactgtgaatagacttgtctataatgagcagaccatgtaaatctactttttttaaaatgtagctagtacaactttagtagacattttcttttgcaaatcattatctataaataatttatatcttcctgggtgagttactcattgcaaagtttgactcatgcaaatgacctcaaatacatgtcagcttactttgctgtggcaacatccatgtgaactgctttgtacactgtgaaaatatttcactccagcctgcccattttgtgtttactctgggctggaaaagactttgccaaaacattaaaaactattcttttcactaaattaatagtctatctgctttcagaagatgtatcatctatctgtacacatttttgctggttttgtatatcagattttttcctctcaagaaacatacttagataagctaatgaagttgttttcttcaaagtaatatatctatataatgactgcattggcaaatcaaccgaaatgtgaatgttgtgcctagtgagtgagtcatgttccatcattatttctttccaaatttctttgccagttcagtttgaaccatatattttgtagctcagcattgcaaacaacagtaatactgttttaagaatgagtgttataattgcatagcatttgtatgcactttatactttgcagaggtgagttaaattattaatcattttgcacatgaaagctgtggggcatatcttttttctttttttaggtgaggaagttatgctacgactctaattaattccacgattctattgaaagttgaggaatgctgttttacccctgcgcattataaagaaaataactagaattactttagtcttcagattttctccctgttaattctgtatcttgagaggtttcttttttttttttttttttttcttttcttgcaaatgcattcttttgcattaagatggtcacaaggtaaagccctgtggcagaacctggtactttaccttaccagaggaaattaccttagaataagatggagcgagaccccagctccccttaaagacaagaccttgaaatcaaatggagtcagctatacctatcaatcaatcacagttcttggatataagaagcccatagactctcttgtttacactgtaggctttttcttaatagggttgcatttgtcagtcattgcatttacccttcttggcctggaagtagaggagatcaatgcgtagctttgaccacttccagccacagggtactaacatcagacataagttgcaaccaggtcacattttaggctgagatggggctaactgaaagtcagtgtgatgaaaacccaagggcgctattccacatgtctcaaatgattggcaggggctaacttattagtaattctcggttttgtgcactgagatatctaagacctatggcatttttttcccatttataaagctcctataattcttaagtaagtactaggtgaatgtttgaatagatgctggagaaattacactggaaaaccccacccctagatttagataagatcaatcatttaatattccccaaattaattcaggttgaattaagcatgtaatataaattcagtgaattacaaaaacacattttgtgtaggattgatcagattttaaatacagtgaaacttcattatatataatagacctagaccctcccaagcattttcccatcccataaagaattaatgaaatgaaatgcttatagagcaacgattcctgctcagaaaaatttccttataaacagctccaaaccaggggtgcctgagctagattttaaagttataaagaagtttcattgtatttttaaaacctttttaatgggtgtatttggacaaaaataacccccttttcacattttatgatgtgcaggtattacattgctttttacatgtggaaaagtgagcctgcatttatttttaaatgcagttattaaaacatttttgtattccccatcaatgaaaattttcagtgtgaacaaatggtgaatcataagacagttcagtgcttattttctgtaggttttagcaaaaaaatttataaaccacaaaatatttatacatcaggatggtaaatttacatcataaagattgcagatttaatattttccattgtctctgttctgagtgccatgcttgtaacattgataggaggtggacactaggcaactggtattagaagttcatttttttactgaaaaattcaggtacattagccatttgttattttatagtgaaccgtttcaatgtttgtttattgttatttgttggcaaaataaaagtgccttaagttaaaagtttgttttgagatccattaaataaatcagtatcatcagttcataatgcatttatttacaagtccttttattttgcatgttcattgtaaatttaatactgtaaatgtattcaaattcatttacatgcctatggctgcctttgattaaacttcttccaaaaaataaattctgcccagatgttgttgactttattatttcatgtcagattacttgaatatacgttgctgcataatcactaccaagtgggttctttgctgtgcatttgtatatcccagaatcggaggtttggggattctgaatgactagggtaccttgtaagtgaagctgctcacttccatgtgtcctctctttacttgccgttgagagaagggagtggtcaggcatctcccatgtgatttctggcttgggaactcccaaggccacacagtggagctgaaaggctgcccctgtcctggtgacaatactcctgggtggacgatttgtaattcggggagggtaggctacaatcattactggaacagtaatcagtgtatgaccaacactattttgagccttacagatatagtttcctctgtcataagctgt

SEQ ID NO: 17360 - DNA, 7386 bp, Homo sapiens
  source 1..7386: mol_type = unassigned DNA
gtttctctctctggtcggaggcggcggtaatggcggatggtgggttgtggcgccggcggcggctgctgtgagggacgatgagtgcctccttcgtgccgaacggggccagcctggaagattgtcactgtaacctcttctgcctggctgacttgacaggaattaagtggaaaaaatatgtatggcaaggcccaacttctgcccctattctgtttcctgtgacagaagaagaccccattttgagcagttttagtcgctgccttaaggcagatgtacttggtgtttggcggcgagatcaaagacctggaagaagagaattgtggatattttggtggggtgaagacccagttttgctgaccttattcaccatgacttatcagaagaagaagatggagtgtgggagaatggactttcctatgaatgccgtactctgctttcaagcagttcacaatctattggaacggtgtttaatgaacaggaattttgtacgtattggcaagtggtttgtaaagccttatgaaaaagatgaaaaacctataaataaaagtgaacacttgtcctgctccttcacctttttcttgcatggagacagcaatgtttgtaccagtgtggaaattaaccaacatcaacctgtataccttctcagtgaagagcatatcacccttgctcaacagtctaatagcccatttcaagttatcttatgcccatttggactaaatggcactctcacaggacaggcattcaagatgtctgattcagctacaaaaaaattaattggtgaatggaaacagttctatcctatctcatgttgcttgaaggagatgtctgaagaaaaacaggaagatatggattgggaagatgattctttagctgcagtagaagttcttgttgctggtgtccgaatgatctacccagcatgctttgttctagtccctcagtcagacattcctactcctagccctgtgggatccactcactgttcatcttcttgcttgggtgtccaccaagtgcctgcttccacaagagatcctgctatgtcttcggttacgcttacaccacctacgtctcctgaggaagtccaaacagttgatcctcagtctgtccagaagtgggtcaaattttcttcagtatctgatggcttcaactccgatagtactagccaccatggtgggaaaatacccagaaaattagcaaatcatgtggtggatagagtttggcaagaatgcaatatgaacagagcacagaacaagaggaagtattctgcttcatcaggtggtctatgcgaagaagcgacagctgctaaagtggcatcctgggattttgttgaagccacacaaagaacaaattgcagttgtttgaggcacaaaaatctcaagtcaagaaatgctggacaacaaggacaggcaccatctttaggtcagcaacaacaaatacttcctaagcacaagaccaatgagaagcaagaaaagagtgaaaagccacagaaacgccccttgactccttttcaccatcgtgtgtctgttagtgatgatgttggcatggacgcagattcagccagccaaagacttgtgatctctgctccagacagtcaagtgagattttcaaatatccgaactaatgatgtagcaaagactcctcagatgcatggcaccgaaatggcaaattcacctcaaccacccccacttagtcctcacccttgtgatgtggttgatgaaggagtgactaaaacaccttcaactcctcagagtcaacatttttatcaaatgccaacaccagatcccttggttccttctaaaccaatggaagataggatagacagtttgtcccagtctttcccacctcaatatcaggaagctgtagaacctacagtatatgttggtacagcagtaaacttggaagaagatgaagccaatatagcctggaagtattacaagttcccaaagaaaaaagatgtagagtttttaccacctcaacttccaagtgataaattcaaggatgatccagttggaccttttggacaggaaagtgtaacatcagttacagagttaatggtgcaatgtaagaaacctttaaaagtttctgatgaattagtgcagcaatatcaaattaaaaaccagtgtctttcagcaatagcatctgatgcagaacaagaacctaaaattgatccatatgcatttgttgaaggagatgaggaattcctttttcctgataaaaaagatagacaaaatagtgagagagaagctggaaaaaaacacaaggtagaagatgggacatctagtgtaacagtgttatcacatgaagaagatgctatgtcattatttagtccctctatcaagcaagatgctccacgccctactagtcatgcccgtcctccatcaacaagtttgatttatgactcagacctggctgtctcttatactgaccttgataatctcttcaattctgatgaagatgaactaacacctggatctaaaaaatcagcaaatggatcagatgataaagccagctgcaaggaatcaaagacaggaaatctggacccgttatcttgcataagcactgcagatcttcataaaatgtatcctacaccaccatcattggaacaacatattatgggattttccccaatgaatatgaataataaagaatatggtagtatggatacaacacctggaggaactgttctagaaggaaatagttctagtataggagcgcagttcaaaattgaggttgatgagggattctgtagccccaaaccttctgaaattaaagatttttcttatgtctataagcctgaaaattgtcaaattctagtgggatgttccatgtttgcacctctaaaaactctaccaagccaatatctgccccctatcaaattgccagaagagtgtatttaccgtcagagttggactgttggaaaattggaattgctttcttcagggccttcaatgccattcatcaaagagggtgatggaagtaatatggatcaagaatatggcactgcttatacacctcaaactcatacttcttttgggatgcctcctagcagtgcacctcctagtaacagcggagcaggaattcttccttctccatccacccctcggtttccaactccaaggactccaaggactcctcggactcctcgtggagctggtggacctgctagtgctcaaggttcagtcaaatatgaaaattcagacttgtattcaccagcttctaccccatctacatgcagaccccttaattctgttgaacctgcaactgtcccttccatccctgaagcacacagtctttatgtaaacctcatcctttcagaatcagttatgaatttgtttaaagactgtaactttgatagttgttgcatctgtgtttgcaacatgaacatcaagggtgccgatgttggagtttacattccagatccaacgcaggaagcacaatataggtgtacctgtggcttcagtgctgtcatgaacagaaaatttggaaacaattcaggattatttcttgaagatgaactagatatcataggacgcaatacagactgtggcaaagaagcagaaaaacgttttgaagctctcagggctacctctgctgaacatgttaatggaggactaaaggaatctgaaaaattatctgatgatttgatattattgctacaagatcagtgcactaatttattttcaccctttggagcagcagaccaagatccttttcctaaaagtggtgtaattagcaattgggtacgtgttgaagagcgtgactgttgcaatgactgctaccttgcattagaacatgggcgtcagttcatggataacatgtcaggaggaaaagttgatgaagcacttgtgaaaagttcatgcttacacccctggtccaaaagaaacgatgtgagtatgcagtgctcacaggatatacttcgaatgctcctctctcttcagccagttcttcaggatgccattcagaaaaaaagaacagtaagaccttggggtgttcagggtcctctcacttggcaacaatttcataaaatggctggccgaggctcttatggaactgatgaatccccagaaccactgccaatccccacatttttgttgggttatgattatgattatctggtgctttctccatttgctcttccttattgggagagacttatgctggaaccctatggatctcaaagagatatagcctatgttgtactgtgtccagaaaatgaagccttgttaaatggagcaaaaagcttttttagagatcttactgcaatatatgagtcctgtcgattaggtcaacatagacctgtttctcgactgttaacagatgggatcatgagagttggatctactgcatcaaagaaactatcagaaaagttggtagcagaatggttttctcaggcagctgacggtaacaatgaagcattttctaaactcaagctttatgcacaagtctgcagatatgacctaggtccttatcttgcttccctgccattggacagctctctactttcccagccaaatttagttgcccctacaagtcagtctttgattactccacctcagatgacaaatactggaaatgctaatactccatctgccaccttagcatctgcagcgagcagcactatgacagtgacttcaggtgttgccatatctacttcagttgccacagctaattcaactttgaccacagcttcaacttcatcttcatcatcctccaacttgaatagtggagtatcatcaaataaactaccttcgtttccaccctttggcagtatgaacagtaatgctgcaggatccatgtctacacaagcaaatacagttcagagtggtcagctaggagggcaacagacatcagctctacagacagctgggatttctggagaatcatcttcacttcccactcagccgcatcctgatgtgtctgaaagcacgatggatcgggataaagtgggaatccccacagatggtgattcacatgcagtcacgtatccacctgcaattgttgtttatataattgatccttttacatacgaaaatacagacgagagcactaactcttctagtgtgtggacattggggctacttcgatgctttctagaaatggtccagactcttcctcctcatatcaagagtactgtttctgtacagattattccttgtcagtacctgttgcaacctgtgaagcatgaagatagagaaatctatccccagcatttaaaatccctggctttttcggcctttacccagtgtcggaggccacttccaacatcaaccaatgtgaaaacattgactggctttggtccaggtttagccatggaaactgcccttagaagtcctgatagaccagagtgtattcgactttatgcacctccttttattctggctccagtgaaggacaaacagacagagctaggagaaacatttggagaagctggacagaaatataatgttctttttgtgggatactgtttatcacatgatcaaaggtggattcttgcatcttgcacagatctatatggagaacttttagaaacttgtatcattaacatcgatgttccaaatagggctcgtcggaaaaaaagttctgctagaaaatttggtctacagaaactttgggagtggtgcttaggacttgtacaaatgagttcattgccatggagagttgtaattggtcgtctaggaaggattggtcatggagaattgaaagattggagctgtttgctgagtcgtcgaaacttgcagtctctaagtaaaaggctcaaagacatgtgtagaatgtgtggtatatctgctgcagactcccctagcattctcagtgcttgcttggtggcaatggagccgcaaggctcttttgttattatgccagattctgtgtcaactggttctgtatttggaagaagcacgactctaaatatgcagacatctcagctaaataccccacaggatacatcatgtactcatatacttgtgtttcctacttctgcttctgtgcaagtagcttcagctacttataccactgaaaatttggatttagctttcaatcccaacaatgatggagcagatggaatgggtatctttgatttgttagacacaggagatgatcttgaccctgatatcattaatatccttcctgcttctccaactggttctcctgtacattctccaggatctcattacccccatggaggtgatgcgggcaagggtcagagtactgatcggctactatcaacagaacctcatgaggaagtacctaatattcttcagcaaccattggcccttggttactttgtatcaactgccaaagcaggtccattacctgactggttctggtcagcatgtcctcaagcacaatatcagtgtcccctttttcttaaggcctctttgcacctccacgtgccttcagtgcaatctgacgagctgcttcacagtaaacactcccacccacttgactcaaatcagacttcagatgtcctcaggtttgttttggaacagtacaatgcactctcctggctaacctgtgaccctgcaacccaggacagacgctcatgtctcccaattcattttgtggtgctgaatcagttatataactttattatgaatatgctgtgatcttcatttgatggaactgtgcaagaaaagaacaaggaaaaatggatgtttcgctgcaggattaagttacaattatcttctcagtgaaggtcatttgtgatggggtctaattcttattacttcaacaaatattgttttgacttggggggaggggctataaccctgctatttttcattgactctattgaactctttaggatgatgactgatcatacaaaacgtattataacattttcgtagcaaaattaaccttttttttttccagtcacagtatttgtgaaaagtaatgagccatagtacccagtcatgttaaatgaatattaaaagcatggagaggaaacatgaggaacaatgaatttcaacatatggcttcagaacatgaagatgttcttgtatggattatagtatctagtattcaaaaatgcctgcatctcttctcttatttattgtaagtttttaaatgtataaattgtcttatatttcttaacctcttttataaaaattttcctagaaggtttatactgccttcttgctttaaagcaattggtctaaaatatatgtaatcgtcttaattaaaaagttgcagtagggttgcttttagagtattatttttttgtaagggggtgggtgggacagtaaatttgtattgtctcgatgtacagtttaacggggatagagggggaataatgtccataccattgtgtgtggaggatttacagctaagctgtagttgcagagtacatgtacagtaatgaagttcactgtgtttataaattgaaaaggtacc

SEQ ID NO: 17361 - DNA, 10464 bp, Homo sapiens
  source 1..10464: mol_type = unassigned DNA
gtttctctctctggtcggaggcggcggtaatggcggatggtgggttgtggcgccggcggcggctgctgtgagggacgatgagtgcctccttcgtgccgaacggggccagcctggaagattgtcactgtaacctcttctgcctggctgacttgacaggaattaagtggaaaaaatatgtatggcaaggcccaacttctgcccctattctgtttcctgtgacagaagaagaccccattttgagcagttttagtcgctgccttaaggcagatgtacttggtgtttggcggcgagatcaaagacctggaagaagagaattgtggatattttggtggggtgaagaccccagttttgctgaccttattcaccatgacttatcagaagaagaagatggagtgtgggagaatggactttcctatgaatgccgtactctgcttttcaaagcagttcacaatctattggaacggtgtttaatgaacaggaattttgtacgtattggcaagtggtttgtaaagccttatgaaaaagatgaaaaacctataaataaaagtgaacacttgtcctgctccttcacctttttcttgcatggagacagcaatgtttgtaccagtgtggaaattaaccaacatcaacctgtataccttctcagtgaagagcatatcacccttgctcaacagtctaatagcccatttcaagttatcttatgcccatttggactaaatggcactctcacaggacaggcattcaagatgtctgattcagctacaaaaaaattaattggtgaatggaaacagttctatcctatctcatgttgcttgaaggagatgtctgaagaaaaacaggaagatatggattgggaagatgattctttagctgcagtagaagttcttgttgctggtgtccgaatgatctacccagcatgctttgttctagtccctcagtcagacattcctactcctagccctgtgggatccactcactgttcatcttcttgcttgggtgtccaccaagtgcctgcttccacaagagatcctgctatgtcttcggttacgcttacaccacctacgtctcctgaggaagtccaaacagttgatcctcagtctgtccagaagtgggtcaaattttcttcagtatctgatggcttcaactccgatagtactagccaccatggtgggaaaatacccagaaaattagcaaatcatgtggtggatagagtttggcaagaatgcaatatgaacagagcacagaacaagaggaagtattctgcttcatcaggtggtctatgcgaagaagcgacagctgctaaagtggcatcctgggattttgttgaagccacacaaagaacaaattgcagttgtttgaggcacaaaaatctcaagtcaagaaatgctggacaacaaggacaggcaccatctttaggtcagcaacaacaaatacttcctaagcacaagaccaatgagaagcaagaaaagagtgaaaagccacagaaacgccccttgactccttttcaccatcgtgtgtctgttagtgatgatgttggcatggacgcagattcagccagccaaagacttgtgatctctgctccagacagtcaagtgagattttcaaatatccgaactaatgatgtagcaaagactcctcagatgcatggcaccgaaatggcaaattcacctcaaccacccccacttagtcctcacccttgtgatgtggttgatgaaggagtgactaaaacaccttcaactcctcagagtcaacatttttatcaaatgccaacaccagatcccttggttccttctaaaccaatggaagataggatagacagtttgtcccagtctttcccacctcaatatcaggaagctgtagaacctacagtatatgttggtacagcagtaaacttggaagaagatgaagccaatatagcctggaagtattacaagttcccaaagaaaaaagatgtagagtttttaccacctcaacttccaagtgataaattcaaggatgatccagttggaccttttggacaggaaagtgtaacatcagttacagagttaatggtgcaatgtaagaaacctttaaaagtttctgatgaattagtgcagcaatatcaaattaaaaaccagtgtctttcagcaatagcatctgatgcagaacaagaacctaaaattgatccatatgcatttgttgaaggagatgaggaattcctttttcctgataaaaaagatagacaaaatagtgagagagaagctggaaaaaaacacaaggtagaagatgggacatctagtgtaacagtgttatcacatgaagaagatgctatgtcattatttagtccctctatcaagcaagatgctccacgccctactagtcatgcccgtcctccatcaacaagtttgatttatgactcagacctggctgtctcttatactgaccttgataatctcttcaattctgatgaagatgaactaacacctggatctaaaaaatcagcaaatggatcagatgataaagccagctgcaaggaatcaaagacaggaaatctggacccgttatcttgcataagcactgcagatcttcataaaatgtatcctacaccaccatcattggaacaacatattatgggattttccccaatgaatatgaataataaagaatatggtagtatggatacaacacctggaggaactgttctagaaggaaatagttctagtataggagcgcagttcaaaattgaggttgatgagggattctgtagccccaaaccttctgaaattaaagatttttcttatgtctataagcctgaaaattgtcaaattctagtgggatgttccatgtttgcacctctaaaaactctaccaagccaatatctgccccctatcaaattgccagaagagtgtatttaccgtcagagttggactgttggaaaattggaattgctttcttcagggccttcaatgccattcatcaaagagggtgatggaagtaatatggatcaagaatatggcactgcttatacacctcaaactcatacttcttttgggatgcctcctagcagtgcacctcctagtaacagcggagcaggaattcttccttctccatccacccctcggtttccaactccaaggactccaaggactcctcggactcctcgtggagctggtggacctgctagtgctcaaggttcagtcaaatatgaaaattcagacttgtattcaccagcttctaccccatctacatgcagaccccttaattctgttgaacctgcaactgtcccttccatccctgaagcacacagtctttatgtaaacctcatcctttcagaatcagttatgaatttgtttaaagactgtaactttgatagttgttgcatctgtgtttgcaacatgaacatcaagggtgccgatgttggagtttacattccagatccaacgcaggaagcacaatataggtgtacctgtggcttcagtgctgtcatgaacagaaaatttggaaacaattcaggattatttcttgaagatgaactagatatcataggacgcaatacagactgtggcaaagaagcagaaaaacgttttgaagctctcagggctacctctgctgaacatgttaatggaggactaaaggaatctgaaaaattatctgatgatttgatattattgctacaagatcagtgcactaatttattttcaccctttggagcagcagaccaagatccttttcctaaaagtggtgtaattagcaattgggtacgtgttgaagagcgtgactgttgcaatgactgctaccttgcattagaacatgggcgtcagttcatggataacatgtcaggaggaaaagttgatgaagcacttgtgaaaagttcatgcttacacccctggtccaaaagaaacgatgtgagtatgcagtgctcacaggatatacttcgaatgctcctctctcttcagccagttcttcaggatgccattcagaaaaaaagaacagtaagaccttggggtgttcagggtcctctcacttggcaacaatttcataaaatggctggccgaggctcttatggaactgatgaatccccagaaccactgccaatccccacatttttgttgggttatgattatgattatctggtgctttctccatttgctcttccttattgggagagacttatgctggaaccctatggatctcaaagagatatagcctatgttgtactgtgtccagaaaatgaagccttgttaaatggagcaaaaagcttttttagagatcttactgcaatatatgagtcctgtcgattaggtcaacatagacctgtttctcgactgttaacagatgggatcatgagagttggatctactgcatcaaagaaactatcagaaaagttggtagcagaatggttttctcaggcagctgacggtaacaatgaagcattttctaaactcaagctttatgcacaagtctgcagatatgacctaggtccttatcttgcttccctgccattggacagctctctactttcccagccaaatttagttgcccctacaagtcagtctttgattactccacctcagatgacaaatactggaaatgctaatactccatctgccaccttagcatctgcagcgagcagcactatgacagtgacttcaggtgttgccatatctacttcagttgccacagctaattcaactttgaccacagcttcaacttcatcttcatcatcctccaacttgaatagtggagtatcatcaaataaactaccttcgtttccaccctttggcagtatgaacagtaatgctgcaggatccatgtctacacaagcaaatacagttcagagtggtcagctaggagggcaacagacatcagctctacagacagctgggatttctggagaatcatcttcacttcccactcagccgcatcctgatgtgtctgaaagcacgatggatcgggataaagtgggaatccccacagatggtgattcacatgcagtcacgtatccacctgcaattgttgtttatataattgatccttttacatacgaaaatacagacgagagcactaactcttctagtgtgtggacattggggctacttcgatgctttctagaaatggtccagactcttcctcctcatatcaagagtactgtttctgtacagattattccttgtcagtacctgttgcaacctgtgaagcatgaagatagagaaatctatccccagcatttaaaatccctggctttttcggcctttacccagtgtcggaggccacttccaacatcaaccaatgtgaaaacattgactggctttggtccaggtttagccatggaaactgcccttagaagtcctgatagaccagagtgtattcgactttatgcacctccttttattctggctccagtgaaggacaaacagacagagctaggagaaacatttggagaagctggacagaaatataatgttctttttgtgggatactgtttatcacatgatcaaaggtggattcttgcatcttgcacagatctatatggagaacttttagaaacttgtatcattaacatcgatgttccaaatagggctcgtcggaaaaaaagttctgctagaaaatttggtctacagaaactttgggagtggtgcttaggacttgtacaaatgagttcattgccatggagagttgtaattggtcgtctaggaaggattggtcatggagaattgaaagattggagctgtttgctgagtcgtcgaaacttgcagtctctaagtaaaaggctcaaagacatgtgtagaatgtgtggtatatctgctgcagactcccctagcattctcagtgcttgcttggtggcaatggagccgcaaggctcttttgttattatgccagattctgtgtcaactggttctgtatttggaagaagcacgactctaaatatgcagacatctcagctaaataccccacaggatacatcatgtactcatatacttgtgtttcctacttctgcttctgtgcaagtagcttcagctacttataccactgaaaatttggatttagctttcaatcccaacaatgatggagcagatggaatgggtatctttgatttgttagacacaggagatgatcttgaccctgatatcattaatatccttcctgcttctccaactggttctcctgtacattctccaggatctcattacccccatggaggtgatgcgggcaagggtcagagtactgatcggctactatcaacagaacctcatgaggaagtacctaatattcttcagcaaccattggcccttggttactttgtatcaactgccaaagcaggtccattacctgactggttctggtcagcatgtcctcaagcacaatatcagtgtcccctttttcttaaggcctctttgcacctccacgtgccttcagtgcaatctgacgagctgcttcacagtaaacactcccacccacttgactcaaatcagacttcagatgtcctcaggtttgttttggaacagtacaatgcactctcctggctaacctgtgaccctgcaacccaggacagacgctcatgtctcccaattcattttgtggtgctgaatcagttatataactttattatgaatatgctgtgatcttcatttgatggaactgtgcaagaaaagaacaaggaaaaatggatgtttcgctgcaggattaagttacaattatcttctcagtgaaggtcatttgtgatggggtctaattcttattacttcaacaaatattgttttgacttggggggaggggctataaccctgctatttttcattgactctattgaactctttaggatgatgactgatcatacaaaacgtattataacattttcgtagcaaaattaaccttttttttttccagtcacagtatttgtgaaaagtaatgagccatagtacccagtcatgttaaatgaatattaaaagcatggagaggaaacatgaggaacaatgaatttcaacatatggcttcagaacatgaagatgttcttgtatggattatagtatctagtattcaaaaatgcctgcatctcttctcttatttattgtaagtttttaaatgtataaattgtcttatatttcttaacctcttttataaaaattttcctagaaggtttatactgccttcttgctttaaagcaattggtctaaaatatatgtaatcgtcttaattaaaaagttgcagtagggttgcttttagagtattatttttttgtaagggggtgggtgggacagtaaatttgtattgtctcgatgtacagtttaacggggatagagggggaataatgtccataccattgtgtgtggaggatttacagctaagctgtagttgcagagtacatgtacagtaatgaagttcactgtgtttataaattgaaaaggtaccaggtcttacagcattttatatatcacatctttacagaataacatgatggcaatatacaagtggtattgttaggtggtttaacttagaataaaatgagaattcttcagttatattttgtactatggtttagggctatgactaatatttcaggccatttccggtgaaagaaacttagttttacaagaaaaaccatttgctactgaatgcttaaactaattttagtgtttaatgttacatgcttaaatttttttcagttttaacagtggcatatttaggcatggaaatattattatgaaatttattttcaggatctgctataaggttgaaatttagcccagctctaggcattttacaaattatttttcaagcagtcattcttgattgtttgacttttttttttaaattaaagattgggaatgtatgtgagagtatgcatatgtatgggtgtgtgtgtgtgcgcgcaatcaaactgtggtgtaaatagattctcagtgaattctggtattcagactctattccactagtgaaagaaccattttttaaacttcccttgccttttttatttatttaattttcttggtttggagatgtcagtcccaaacaccagagtctgtacttttctataacacagctcagattaaggtagggcatatgccaaggaggttctcacctccctaaagaagggacttgaattttagggactttaattcacccctccttcaatacaactttcccccttcttgtttgcacatgccaagataactgcttttatgcaggctgtacccccttgaaaaatcctttctacagtgctgctcacaaaagagcccaagttcgcctcctacctgcattgctgacttgaattcacagtcgccgagtctacctagctttcttggaagcagtctagcaaaatttctatttgtacgttcactaattatctacaaggacaaaatcagttgtatttacaaaactctacttcagtgtttgttttagtttttttttttactgaaacttgtttttgtgaatactctgtgcttagaattaaatatcactttcttatgaacaacataacttcttcagattgtgtatatgaaaacattagcaagtcttgttttttctatgaagcaaacacaattggtgacaaaggttgtcaatcatttcttcaaaattataatgcagttctaatggtcagcatattttgatattaaatttaaagatcacctctctgcatttgtttttaaattatgctaatacaccacacattatgttggtatgttttgttctgtactttctttaaaaaaaaaaaaaaaacttgtctgagatttgaaggaaaatgtgcttatttggaatttccataaaaagagtatcctttttatacacttaatagtgactttacaaaataaaagttatattctcagttgtttaaaatcactaacctatgataaccacacctcaatttgaaagtagatttaaaattattccctgacaggttatttaatatggagccataaggagggaacccagtacacaattattttttatttgggaatcagggaatagttcccaaatatacaggatttattgataagattttttttcttcccttcatatatccattcaaactcaatggaaagttattaaataaccattagaaaagctcagtagacttatttgagaaattaagccttgtgcaggatgatggatttgacttactaatgtactgtcacagacaaatatgggtagttttgtttaaataggtaagcaaaatattatactttatagcagtggattaccaacaccttgacttctttgttacagtgctaacatctttttttttgtgcaggtatccatgattattaagcagggtggaagttcagtattttgtcatttaaaaagattagttatataatgtctgcttccagccagtgagaaacatctagccatacctttcttatgcaagccattgagttatcaggactgtgaattaacactgtatgaataaatttctgtacaccttattgtttggccagaaggccaccaagtgtacttatatgtaatccttaaattttaaagtagctgtaatttttaaatatttctaaacttttcttaaaccactaaaattaagctcttactacttagtcaactatcctcagctgtattcgtactcaattgtcagtatggcacagattactgtattaaaatattctcctttcgtcttcatatttaccttctgaggtaattttttaacttaatgtgttactacaaagatttgcagatctttaatcaagcactatgttaatactgtaatatcagaatactatgttgcattatttaaaatgttcaaattgaatagattaaaaagtttttaaatgctattgcatcatataatttgctattcatccactatggcattgcatatcaatcagttaatacacttaatgttgcatgagtgatattttggtctgggtttcctcttaagattttagtttgtctgaattaaggaaaaatgtttttaatatacattcttattttgtcccacccctccagaaataagctggaaatcttaactttttggggggtcttttttggtgttttaatgggcccagaactgtggtttaaatttttatgtatgtattttcttttttgtggagtataaatttaaaaactggatttgggacctaaaatactcctcaggttgatgtattcatgaagttttaaaacatctttagttttcaaagtaaactggatatgtggaccttaaagttattgagtttaagctacaaattgtaacgtcattactggacatgtcagcatcaaccctctcaaaatagcttggtcactttatgaaggggcgttttaaagttgttgtttagcagtgacatttaatatggtccaattgcttttctttttaacgtgacaaaaagagaataaggaacaaacactattgctgccgaatgccataacactgagttgtacaaattgtgattgaggaaatgaaaaggtttatactttttaaaaaaaaaaaaacaaaaacaaaaaacaaaacttcaaatggaataaattattcatgaagccttc

SEQ ID NO: 17362 - DNA, 9530 bp, Homo sapiens
  source 1..9530: mol_type = unassigned DNA
cccccccgccagcccgggcccgctgcccccggcgcggcgtcgccgcggcgcctcccgcctgcccgccggccctcgcgccctcccccggcggcggcggcggcccggccgccccgcgctccccggcgaggcgccgccgcccggcccggcctcgcctcggacgcctcgctccgacatgccccgctctggcggccgggctcgcggaggatcatgactgcggcagcgaactgggtggcgaacggggcgagcctggaggattgtcactccaacctcttttcgctggctgaactcacgggaatcaaatggcgtaggtacaattttggagggcatggggactgtggacccataatttcagccccagcccaagatgatccaattctgttaagtttcatccgctgtctgcaagctaacctgctttgtgtatggcgtcgtgatgtcaaaccagattgcaaagagttatggatattctggtggggagatgaacccaacctagtgggtgtaatacatcatgaactgcaggttgtggaagaaggactctgggaaaatggcctttcctatgaatgtaggacgctgctcttcaaagcgatccacaatctgttagaaaggtgcctaatggataagaacttcgttaggattgggaaatggtttgtccgaccctacgaaaaggatgaaaagccagtcaacaaaagtgagcatttgtcctgtgctttcacattctttctgcatggagaaagtaatgtatgcacaagtgtggagattgcccagcaccagccaatttatttgatcaatgaggagcatatacacatggctcagtcttcacctgcaccatttcaagtactggtaagtccttatggcttaaatgggacgctaacaggccaagcatacaagatgtcagacccagccactcgtaagttgattgaggaatggcagtatttctacccgatggtgctaaaaaagaaagaagaatcgaaagaggaagacgagttgggatatgatgatgatttccctgtggcagttgaagtaattgttggtggtgttcggatggtttacccttcagcatttgttttgatctctcagaatgacatcccggttcctcagagtgttgccagtgctggaggccacattgcagttgggcagcaagggcttggtagtgtgaaggacccaagtaactgtgggatgcctctgacccctcccacctctccagaacaggctatcctaggtgagagtggaggtatgcagagtgctgccagtcacctggtttcccaagatggagggatgataacgatgcacagtccaaagagatcggggaagattcctccaaaactccacaatcatatggtccatcgagtctggaaggaatgcatcctcaacagaacccagtccaagaggagccaaatgtcaactccaactcttgaagaagagcctgctagcaatcctgctacttgggattttgtggatccaacccaaagagtcagctgttcttgttccaggcataagcttttaaaacgttgtgcagtcgggcccaatcgacctcccacagtatctcaaccagggttcagtgcaggaccatcatcatcttcatctttaccacctcctgcttcttctaagcacaaaacagcagaaagacaggaaaaaggagacaagctgcaaaagagacccttaataccatttcaccataggccctctgtggccgaagaattatgcatggagcaagatacaccaggacagaaactagggttggcagggatagactcctccttagaggtgtctagcagtaggaaatatgataagcaaatggccgtgccttccagaaatacaagcaagcaaatgaatctgaatcctatggattcacctcattcccctatatcccctctgccaccaacactcagccctcagccacgaggtcaggaaacagagagtttggacccaccatcggtccctgtgaatccagccctttatggaaatggactagaactccagcagttgtctactctggatgacagaactgtcctcgtaggccaaagactgcctctcatggcagaggtcagcgagacagccttatattgtgggattaggccctcgaacccggagtcatcagaaaagtggtggcatagttatcgtctcccacccagtgatgatgctgagttcaggcctccagagctccagggtgagagatgtgatgccaaaatggaggtaaactcagagagcactgcattgcaaagactcttagcacaacctaacaaacggtttaaaatctggcaagacaaacagccccagttgcagccactccacttccttgacccattgcctctatcacaacaacctggagacagtttgggagaagtgaatgacccatatacctttgaagatggtgacataaaatacatctttacagccaacaagaaatgcaaacaagggacggagaaagattccctgaaaaagaataagtcagaggatggatttggtaccaaggatgtcactacaccaggtcattccacgccggtgcctgatgggaaaaatgccatgtctattttcagttctgctactaaaacagatgtccggcaggataatgctgctggcagagctggctccagtagccttacacaggtaacagatttggcaccttccctgcatgacttagacaacatctttgataattctgatgacgacgaacttggggctgtatcacctgctctgcgctcatcaaaaatgcctgcagttgggacagaagaccgacctcttgggaaggatggaagagctgctgttccttatccaccaacagttgcagacttgcaaaggatgtttcccactccaccatctttggaacagcatcctgcattttctcctgtgatgaattataaagatgggatcagctcagagacagtgacagcattaggcatgatggagagccctatggtcagtatggtttcaacacaactcacagaattcaaaatggaagtggaagatggattaggaagtcccaagcccgaggaaattaaggacttttcatatgtgcacaaagttccatcctttcaaccttttgtgggatcctccatgtttgctccactgaagatgttgccgagccattgtttgctacctctgaagatacctgatgcctgtctgtttcggccttcatgggcaattcctcctaaaattgaacaactgcccatgccccctgcagccactttcattagagatggctacaataacgtgcctagtgttgggagcctagcagatccagactatctgaacacaccacagatgaacacacccgtgacgttgaacagcgctgccccagccagcaatagtggggcaggagtcctaccatctccagcaacccctcgcttctctgtccccacaccacgaacccccaggaccccaagaactcccagaggtgggggcactgccagtggtcaagggtctgttaagtatgatagcaccgatcaaggatcaccagcctccaccccctctactacacggcccctcaactctgtggagcccgccaccatgcagccaattcccgaagcccacagcctctatgttaccctgattctctccgattccgtgatgaatatctttaaagacagaaactttgacagctgttgcatctgtgcctgcaacatgaacatcaaaggggcggatgtcgggctttacatccccgattcttccaatgaggaccagtaccgctgtacctgtgggtttagtgcgattatgaaccgcaaacttggctacaattcaggactcttccttgaagatgagttggatatttttgggaagaattctgatattggtcaggctgcagagaggcgcttaatgatgtgtcagtccaccttccttcctcaggtggaaggaaccaaaaaaccccaggagccacccataagccttctcctcctcctccagaatcaacacacacaaccttttgcttcactgaatttcctggactacatttcctctaacaatcgccaaactcttccctgtgtaagctggagttatgaccgggtgcaagcagataataatgattactggacggaatgctttaatgcgttggagcaggggcggcagtatgtggataaccccactggtggaaaagtggacgaagctctggtgagaagtgccactgtgcactcttggcctcacagcaatgtgctggacatcagcatgctctcctcccaggatgtggttcgtatgctgttgtccctgcagccctttctccaagatgccatccaaaagaagcgcacgggcaggacctgggagaacatccagcatgtgcagggaccactcacttggcagcagttccataaaatggcaggacggggaacctacggttcggaagaatctcctgagccgttgcccatccccactctgctggtaggctatgacaaggatttcctcaccatctcgccattctccttgccgttttgggagaggctcttgttggacccatatgggggccaccgtgatgttgcctatattgtggtgtgtccagaaaatgaggccttgctcgaaggagccaaaactttcttcagggacttgagtgctgtatacgagatgtgtaggcttgggcagcacaagcccatctgcaaagtgctacgtgacgggatcatgcgcgtgggaaaaactgtggcacagaagctgacagatgagcttgtgagtgagtggtttaaccagccttggagcggcgaggagaatgacaatcattccagactcaaactttatgcgcaagtttgccgccatcacctagcaccttatttagccactctgcagcttgatagcagcctattgataccacctaaataccagaccccaccagcagcagcacagggacaagctacgccagggaatgctgggcccttagctccaaatggatcagcagctcccccagctggcagtgcatttaatcccacctcgaatagtagttctacaaatcctgcagcaagtagttctgcatctggttcctctgtgccaccggtctcatcgtctgcctctgctcctggtattagccagataagcactacctcttcttcaggattcagtggtagtgttggagggcagaaccccagcactgggggcatttctgcggatagaacgcaagggaacataggctgtggtggagacactgaccctgggcagagctcttctcagccctcacaggatggacaagagagtgttacagaaagggagagaataggaattcccacggagcctgactctgcagacagccatgcccaccctccagctgttgtcatttacatggtggacccgttcacgtatgctgcagaggaggactccacttctgggaacttttggctgttgagcttgatgcgctgctacacagaaatgctggataatttacctgagcatatgagaaattctttcattctccagattgtgccttgccagtacatgctgcagacaatgaaggatgagcaagttttctacattcaatacttgaagtccatggcattttcagtgtactgccagtgcaggcgaccactgcctacacagatccacattaaatccctcacgggatttgggcctgcagccagcattgagatgaccctcaagaaccctgagcggcccagcccaatccagctttactcccctccctttatattggccccaatcaaagacaagcagacagagctgggagagacgtttggtgaggcgagccagaaatacaatgtgctcttcgtgggctattgtctgtctcacgaccagcgctggcttttggcttcctgcactgacctccatggggaattattagagacctgcgttgtaaatattgctttaccaaacaggtcacggaggagtaaagtatctgcacgtaaaattggactacagaagttatgggagtggtgcatagggattgtccaaatgacatctctaccctggagagttgtaatcgggcgacttgggcgtcttggccatggggagcttaaagattggagtatcctccttggagaatgttcactacagacaatcagcaaaaagctcaaggatgtgtgccggatgtgtggaatctctgccgcagactctccttctatccttagtgcctgcctggttgccatggagccccaggggtcctttgtagtgatgccagatgctgtcacaatgggctctgtttttggccgaagtactgcactgaacatgcagtcatctcagctcaacacccctcaagatgcttcttgtacacacatcttggtgttcccaacatcatcaaccatccaggtggctccagccaactaccccaatgaagatgggtttagccccaacaatgatgatatgtttgttgaccttccattcccagatgatatggacaatgatattggcatattaatgactgggaacctccattcctctcccaactcttccccagtaccctccccaggctctccttctggaattggtgtgggctctcacttccagcatagtcggagccagggtgagcgtcttctttctagagaagcaccagaggagctaaagcagcagcccctggcccttgggtattttgtatcaactgccaaagctgagaatcttccccagtggttttggtcatcgtgtccccaggctcaaaaccagtgccctctcttcttaaaggcttcgctgcatcaccacatttcagtagcacagacagacgaacttctgcctgccaggaattctcagcgggttccacaccctcttgactccaaaaccacgtcggatgttttaaggtttgttttggagcagtacaacgctctgtcctggctcacgtgcaatccggccacccaggaccgtacttcctgccttcccgtccactttgtggtgctcactcagttgtacaatgccatcatgaatatactttaattggaaaagcacttgttctctctggctcagttccttctccctgcaacctcagtccaaggaacctgctacactctgcaaataacccacatccttttcttcagaccactctccacagtcctgcactgtgattccttctcagcaggcacatgtcaattctgcagtgttcattaccagagtgactccttgacacttctctcatggacctggaaacttccataagtggtgactttcagccagtgcggtggtgtgtgtagccccaaccactggtccccaggaagtggtggtggttgatggcttttcagcgggaaacagaagagacagtgtccttttgcacaagagtctgtgttttcagcctctgtatacaattgagggcagtctagccctttggatgaaatcctcttagttactggtgtatggcctgtgggttacctgaactccataatctgggactttttaaaaataagaaccagctcaagtacatggtttcatactggggtttctgtctccctagtgttcccatccagattagcatgagtgctttggttgacttcaaacctgtgtgtcaatgcagaaggtctggagacagcttcattttgtttatttattttaatttgttttgtcatatggtttttgtgactttatttttttaattcacaaggaccaggtacagtagctgaaacccaattcagatccaccataggattctttgactacatacctctgtcctagaagccggaaaaggagtaaaaacacattggggagatcatgcctaaaagtaatatattcaaaaccacccagcagtaggttttgttaacaacaaactggattttaaaagttctgccatgttaagtggccagcatttcatgaaggataacatttttatacagaaggcagtcaagctcaactcagagccatggaggcaagtaccttaattagttttatatagtcacaacggaaatatattttctagtgaattcttattggaagccaggtctctcctctcattagatcaaaagggacttatgtacatacaacaattgaaagtgtttgctcatgaaatcagttataaatatggtgaattttttctggaccataggaatattatttcaaagaaatattacaacttaaccattaaattagtacttgaagttgagcctttgtggtgggactttttaaaaaaatgcctttttaaagcattaatggctaattgaagtattttatgactcctcattcctggcccagagggttgtctttgaaaccctgtttctaacccttgtgttgtgtgtttctgtctgaggacagtgggtgtgtactggcctcccgggagccactgtgaccaggcctttgagctcttgtcatctgtggagagaatcatgcaaattttaaaagttcttccaagagacttccatgtcctggttattaacaaaaaaggaaaaatgtaataattgatatgattttgtaaaagtatttttcttgaaataatctaaagtttaaaacattatattaaaaaaaaagttgtgtggtgggaatgtgaaagcagagaaataacttgtaaatggataattttgttctctgtaccaccagttgaagggggggttgactttcgcaatgtataggataaaaaatctgatatatcaaaccatttgtatctaatgtgtacagtgtaaaattgactttaaaaatattgcagtgctattttttcttaatcagaaaggaaaattctcaaggccttttgaagagcataagaagatgaagattgtaaacttgtataaaattatcttggtgagaagacaaattgtaaagtagatatttgtaatcttttaccactttggggttgcttttttcccggaattcatcagaactttgaattttttttttaaatgggctgtttttaatgcaggggcttttcttccctagaaacccaattctaagcagaaaaagaaaaaaaacacaaaaaataaaaaacccctacaaaaaaactttaaaaaaaatggcagcaaagggtagttttcatctggtgtcttttatttaagttttttaagttaagaaaagctggtgacatatttatacgtttttgtgcaaaaataaatgaatggcaatagattttaaaaaatcttattatgtacttctgtgtgaaaaagtctgtataatatttcccttaaatatgcattattttacttgtgagttttttactgaattaatctgaaatgtacaagccctggatttgctacagagtgagaagttattttatttttttttatttttaattttggaaattctgcagaaatcagaactcttaccatggtttgaacaaaaaaaggggaaatggggaggggaaaagggtgggattgtccagcatgcttgtatgtatatttcagaaccttttttaaatgtaaaagctgtacatttctgggaagttctgaatttcttttgtttccttttttccttcaagcattttgcagtgagcttcttttatatatagcaaacaatttgaaagaatacaaaaatatgtgaagttcatttaaaaaaataactacagtatagcgctggtacagtacactaaaagactttgataaaaagaaacaataataaaaggcctccattttaaatgtcattcatatataccttgtggatgagagctatatacttttacacacttttttagaggaataaattattgaattactgaa

SEQ ID NO: 17363 - DNA, 7984 bp, Homo sapiens
  source 1..7984: mol_type = unassigned DNA
cggcccggcggtaggcggtggcgactctgcccgctcccgtttcggcgcggtgaccgagcgcccgggaggctcgaggaccgcatcgtgtgccgttgcgccaagcccggtcctgcgccgccatggccccagtgcagctggagaaccaccagctggtcccgcccggaggcggcggcgggggcagcggcggacccccgtcagccccagcccctcctcccccgggagccgccgtggcggcggccgctgcagctgcggctagcccgggctaccggctgagcaccctcattgaatttctgctgcaccgggcctactcggagcttatggtgttgacggacctactgccaaggaaatctgatgtggaaaggaaaatagaaatagtgcagtttgctagccggacacgccaactcttcgttcgattattagctttagtgaaatgggctaataatgctggcaaagtggaaaaatgtgcgatgatttcaagctttttagatcagcaagccatcctgtttgtggacactgctgatcgcctggcctcgttagctagagatgctctggtccatgcacgcctgcctagttttgccatcccatatgccattgatgtactaactactggatcttacccacggctgccaacctgcattagggacaaaattattcctccagacccaattaccaaaattgaaaaacaagccacactccatcagctgaatcagattcttagacatcggcttgtaaccacagatcttcctcctcagttagcaaatcttacagttgcaaatggccgggtgaagtttcgtgttgaaggagaatttgaagccaccttgactgtgatgggagatgaccctgatgttccatggcgtcttctcaagctagaaattctagttgaggataaggaaacaggagatgggcgagctttggttcatagcatgcaaatcagcttcatccatcaactggtgcagtctaggctctttgctgatgagaaacctcttcaggatatgtacaactgcctacattctttctgtttatcacttcagttagaagtgttacattcccaaactctaatgttaatccgagaacggtggggagaccttgtgcaggtggaaaggtatcatgctggaaagtgcctctccctttcagtttggaatcaacaggttcttgggagaaaaactggaacagcatctgttcacaaagttacaattaaaattgatgagaatgatgtctccaagcctttacagatttttcacgatcctcctttgccagcttctgattccaaattagtagaaagagccatgaagatcgaccacttatcaatagaaaaactcctgattgacagtgtccatgcaagagctcatcagaagctccaagaactgaaggccattcttagaggcttcaatgccaatgaaaactcttccatagagactgcactcccagctcttgttgttcccatcttggagccctgtggtaattcagagtgtctgcacatttttgtagatttacattctggaatgtttcaattgatgctttatggacttgaccaggccactctggatgacatggagaagtctgtgaatgatgatatgaaacgaatcataccctggattcagcaacttaagttttggcttggacaacagcgttgcaagcagtctataaaacatctgcctacgataagcagtgaaacattgcagctttccaattactcaactcatcctattggaaacctttctaagaataaactgttcattaaacttacccgccttccacaatactacattgttgtggagatgttggaggttcccaataaacccacacaactgtcgtacaagtactactttatgtctgtgaatgctgcagatcgtgaagacagccctgcaatggcattgctgctgcagcagttcaaggaaaacattcaggacttggtttttcgtacaaaaaccgggaaacagaccagaaccaatgccaagcgcaagttgtctgatgatccatgtccagtagaatccaagaaaacaaaacgagcaggagaaatgtgtgccttcaataaagttttagcccacttcgtcgctatgtgtgatacaaatatgccatttgtaggacttcggttggagttgtccaatctggagattccacatcaaggagtgcaagtggaaggtgatggcttcagccatgcaattcgcttattaaaaattcctccctgtaagggtataactgaggaaacccaaaaggctctggaccgctctcttcttgattgcactttccgattacaaggtagaaataaccgcacttgggtagcagagttagtgtttgcaaattgtccacttaatggcacttctactagggagcaaggaccatcccggcacgtttacctgacatatgaaaatctgttgtctgagcctgttggtggtagaaaggtggttgaaatgtttcttaatgactggaatagcattgcacgattatatgagtgtgtgttggaatttgcacgttctctaccagacatacctgctcatctaaatattttctcagaagttcgtgtttataattaccgaaaacttatcttgtgttatggaaccaccaagggaagctcaattagtatccaatggaattcgatccatcaaaaattccacatttctttgggaactgttggcccaaactcaggttgcagtaactgtcacaataccattctccatcagcttcaagaaatgttcaacaaaacaccaaatgtggttcagttattacaggtactgtttgatactcaggctccattaaatgccatcaacaaactccccactgtgccgatgttgggcttgacccagagaaccaatactgcctaccagtgcttctccattctgccacagtcgtccacccacatcagactggccttcaggaacatgtattgcattgatatatactgccggagtcgaggtgttgtggcaatacgggatggtgcctatagtctttttgataacagcaaactagttgaaggtttctatcctgcaccaggactaaagacgttcctgaatatgtttgttgacagcaatcaggatgctcgaagaaggtctgtaaatgaggacgataatcccccttctcctataggaggagatatgatggattctttaatatcgcagctccagccaccaccccagcaacagccatttccaaagcagccaggaacatcaggtgcttatcctcttacttcaccccctacatcttatcatagcacagtcaatcagtctccctcaatgatgcacacacagtctccaggaaatctgcatgctgccagctcccccagtggggctttgagagccccatcaccagcgtcatttgttccaactcctcccccatcctcgcatggaatctcaataggaccaggggccagttttgctagtccacatggaactcttgaccctagttccccatacactatggtgtcaccaagtggacgagcagggaactggccaggatctcctcaagtgtctggcccctcaccagcagcacgcatgcctggaatgtcaccagccaacccctcactacattctccggttccagatgcttctcattcccctcgagctggaacaagttctcaaacaatgccaacaaacatgcctccacctcgtaaactacctcagcgctcttgggcggcatccatacctaccatcctcactcacagtgccttgaacattttactgctgccctctccaactccaggccttgtgcccggcctggcaggtagttacctttgttctccacttgagagattccttggatcagtcatcatgagacgacatcttcaaagaattattcaacaagaaacgctgcagctgataaattctaatgaacccggagtgatcatgtttaagactgatgcactgaaatgcagagtagctcttagtcccaaaaccaaccaaacgcttcagctaaaagtgacacctgaaaatgcaggacagtggaaacctgatgaacttcaagttttggagaaattctttgaaacaagagttgcaggaccaccatttaaagctaatacgttaatagccttcaccaagctattaggagctcctacacacatcctcagggattgtgtgcacattatgaagctggagctgttccctgaccaagcaacacagctaaaatggaatgttcagttttgcctgacgatccctcccagcgcgccgccgattgcacctcctgggacgcctgctgtggtgctgaaatccaaaatgctattttttcttcaactaactcagaaaacatcggtccctccccaagaacctgttagtattatagttccaatcatttatgacatggcttcaggtacaacccagcaggcagacattcccagacagcagaactcttctgttgctgctcccatgatggtcagcaacattctgaagaggtttgcagagatgaatccaccacgacaaggtgaatgcacaatatttgcagctgttcgtgatttaatggctaatcttacactgccccctggtgggcgtccatagacactattgtttttaaaccaggaaggctgacagatgagacaacaaaaaaaatctgaattcagccttcagtttaaaaaaggaaaaggactttttttttaaactttaagagctaaatattctaaactggcaaaaattttcagggtgcacttctttcatcaaaatgatcatccatcttttgtataatgaacttgtatagtgtgtttaaatgggacacatttcaaaggaaataaatcagtgtccgtttgccagtaataaatttaatattctgttttatactataaagttatgaaaatgccaaacttgtttatttaattgttttcttatgttttgggtgtaatagtccttttttggtttttgttttgttttttaaggcaggtctgtcatttttgaatactgtaaaactgtgataaactttatattgaagctgtattttaatatgaccgctttgaatccttacatgaaatgttctgggagttgttataaacacaccccaaggaagcaatatttaataaaactaggtcaaaaacaaaacaaaacagtgacactcacttgtgtgtatataaactctagagacatcttaggccctcccttcatctttaacctggtggatggagccagttattaatttataataatacatgtctgaaatttgaccaaaaacatcttctttatgtcaaggttaatatattttcttcagacattcctaacttgactagtggttaacatttagcaccttggttgtctttcaatatataggatttgggtgaaaaataaggaacttagtctttgagaagggacagtatgtggttcgtattgatcaaggatcccaaataatgcaatcattctcatctgttgaggatgtgggaacttttctgtcaggaaaatttagtttacagaatacttctgcatacaacattaattaggaaacaaagaactttaatgctgtacctctgcatgaagtttctgtgagctttctttatcttgcttaacttatcctcctttccttccccaccaaaattgggattgttctaaacaatttcaatttaattcattgtcaacaaaacgatagaatgttttgcttggaagaaacctggtccattcccctcattgtgaagaatcccgaatcctgggcctgtccagggtcaaatggagtttttggtattaatacatctctgcagggtttctttttggagcactgtgctgtctttcctagtcagtcagggacttttttaagcttcaaagaacatggtctgatgcaaaggtcttctaccgacttcatggtatttaggaaaaatttttaagtgataataccatgccgagttacctggtcactgtaatactggttctccattaaaatgtagatgctttgtctaattccacttcaagatgatttaattgagcttctataactatcaactatcaaattctagtttcaagtatctcactgtacctatatcatatctgttctcaactttgtttgattctccactcattttcaatcagagttgaagccttctttgcctttcttctttgtcttatttctgccttcatctcccacttctcacccaactctgccactgttcaggagcagttgactaaacttttatccttcctttaacttaatctttttatccttctgtttttagttcttacagtggtaatcacatcagtttggcaatctaagatgtctttatcaagggtcagcccttttctatttggagctgaatcttttctttcatgtagaaatctacatgtatatacaagaaatgtatttttatctgcaggataatattgtttcaaataattttattaagagttaactttttaggtattttcccttttaatgtggttttgaaatgttaattgcatttttacacatgatgcattcagtggacactcttttttcctaattataactcatctctgaatgcattgtgccaatcaagagtaagataggattcagtgcgcaaaatttgcttttgatgcttattaagagtaaacccatgaatttgaatttttatattatgcttggtacttggaattgatatataccttattaaagcttgaaaacatttagcatttgaatagtaagtttcatcacaaatcatgtcttttgcctcttttgttacccaggttcgatcaaggggactggatgcccaagtgattttctctaataatcgggttgggacttaactttaaggtgttttcaatgtgattttagtatttacagtaataaataaaatttatacaaagtttcagagaactaccaactctctagttaattttgatgaagatgttttcattaatagtctggtttagtattaatttaaccttgaaataagaaattggtcctgatttgccaccttcatttttccatctgctgaaatgccatttcagaatgtataaaagtactttcagaattagaagaaaagtgagagcttcagcagaacgtgtcaagtcgctaataacaggagtcgaaccttatgtttgaaaattaactgagtgagttaagtgcaagcataaactaaaatttatatgactttgaatttaagaaccactaataactgtgttctaattaacacagtaatctgttcagccaaaggatactaacagccattctttggactgtggttaatttgataacttcaagaagttataactttgctaccctggattctgatgcaatttcaatataaaaagttgttcctttcatagtttttccccccaaaagaagtgcctattacattttaccttaatgtttatttatcatccaagtgttcttgatataaaatcagtatacagaaaattttaagagaacttacattcaagggacatagagggaaaatgttaatgtgtatttcattgtttcttgtggaatttttttttcattcggtttgagaatggacagtgtgtctaaggatgtgatttaaatttacttaggatggatttagcattgaggttattaagacaaagttagcagaggccagccagcactgtgctgcacaactccaggaactccatggtatgctcacaattttctgcaagttgcctccacttccaagtggccagtgatttgttaaaataccttgcccaagaatataactgattgatgaaagggcatatttaggtcaatataaaataatagcaagtatttactgagagcttactgtgtgctaggcattttcttaatatttcaatgtgtatttaatcctcacaacaacccaatgtggtaggttattgatatcctcttcttaaaaatgagtaaatggaggcccagagaaatgtaatttgcctgagatcaaattaaggttgcttaagatcaaactgctaagaaggggcagtttgagtctgagctagtgctcctaaacactggacatttttgctgtgaaccacagtcgggaaggtttaatgtttagactctttcctcagaggcttttaactacacacaattttgacatgttttccaagctcagaaagctcattaaaaacaactaaaactg

SEQ ID NO: 17364 - DNA, 557 bp, Homo sapiens
  source 1..557: mol_type = unassigned DNA
gttgcaggaccaccatttaaagctaatacgttaatagccttcaccaagctattaggagctcctacacacatcctcagggattgtgtgcacattatgaagctggagctgttccctgaccaagcaacacagctaaaatggaatgttcagttttgcctgacgatccctcccagcgcgccgccgattgcacctcctgggacgcctgctgtggtgctgaaatccaaaatgctattttttcttcaactaactcagaaaacatcggtccctccccaagaacctgttagtattatagttccaatcatttatgacatggcttcaggtacaacccagcaggcagacattcccagacagcagaactcttctgttgctgctcccatgatggtcagcaacattctgaagaggtttgcagagatgaatccaccacgacaaggttcgatcaaggggactggatgcccaagtgattttctctaataatcgggttgggacttaactttaaggtgttttcaatgtgattttagtatttacagtaataaataaaatttatacaaagtttcagagaa

SEQ ID NO: 17365 - DNA, 1480 bp, Homo sapiens
  source 1..1480: mol_type = unassigned DNA
ccaagtggacgagcagggaactggccaggatctcctcaagtgtctggcccctcaccagcagcacgcatgcctggaatgtcaccagccaacccctcactacattctccggttccagatgcttctcattcccctcgagctggaacaagttctcaaacaatgccaacaaacatgcctccacctcgtaaactacctcagcgctcttgggcggcatccatacctaccatcctcactcacagtgccttgaacattttactgctgccctctccaactccaggccttgtgcccggcctggcaggtagttacctttgttctccacttgagagattccttggatcagtcatcatgagacgacatcttcaaagaattattcaacaagaaacgctgcagctgataaattctaatgaacccggagtgatcatgtttaagactgatgcactgaaatgcagagtagctcttagtcccaaaaccaaccaaacgcttcagctaaaagtgacacctgaaaatgcaggacagtggaaacctgatgaacttcaagttttggagaaattctttgaaacaagagttgcaggaccaccatttaaagctaatacgttaatagccttcaccaagctattaggagctcctacacacatcctcagggattgtgtgcacattatgaagctggagctgttccctgaccaagcaacacagctaaaatggaatgttcagttttgcctgacgatccctcccagcgcgccgccgattgcacctcctgggacgcctgctgtggtgctgaaatccaaaatgctattttttcttcaactaactcagaaaacatcggtccctccccaagaacctgttagtattatagttccaatcatttatgacatggcttcaggtacaacccagcaggcagacattcccagacagcagaactcttctgttgctgctcccatgatggtcagcaacattctgaagaggtttgcagagatgaatccaccacgacaaggtacatgaccagtagacaatattttattgcatatatgttataaaagttcttttgagagacacccctttctcctcttctcttctccctccttacctactctaccacccaatcatagcaatagaggtctggttgccgtggccctcttaatgtctgcctgtcgctttcttcctttctcactggttcttcatttttgtccatttctctgctgcctggactttttgttagtgatttactattgggactgacccagttgctaatgccagaagcttgtatttatagcacacattgccacaaagacctaggttaggatgatagaattttccacggctgtgaattcctgccctaccatcaatacctgccactctgtacatcacaaagttgaaatgcatgttggtttctcatatttcatggttcaatcacgaatagaagaatattattaaaagttctgtatcttctaaatgttttgtgaagaataaaagctgatacaaatgg

SEQ ID NO: 17366 - DNA, 3351 bp, Homo sapiens
  source 1..3351: mol_type = unassigned DNA
ggctctgtgactgaggcggcggcggtggcggccaagcgggatacgggcggcgggagctggggaacaggcatggacgtttccgggcaagagaccgactggcggagcaccgccttccggcagaagctggtcagtcaaatcgaggatgccatgaggaaagctggtgtggcacacagtaaatccagcaaggatatggagagccatgttttcctgaaggccaagacccgggacgaatacctttctctcgtggccaggctcattatccattttcgagacattcataacaagaaatctcaagcttccgtcagtgatcctatgaatgcactccagagcctgactggcggacctgctgcgggagccgctggaattggcatgcctcctcggggcccgggacagtctctgggcgggatgggtagccttggtgccatgggacagccaatgtctctctcagggcagccgcctcctgggacctcggggatggcccctcacagcatggctgtcgtgtctacggcaactccacagacccagctgcagctccagcaggtggcgctgcagcagcagcagcaacagcagcagttccagcagcagcagcaggcggcgctacagcagcagcagcagcagcagcaacagcagcagttccaggctcagcagagtgccatgcagcagcagttccaagcagtagtgcagcagcagcagcagctccagcagcagcagcagcagcagcagcatctaattaaattgcatcatcaaaatcagcaacagatacagcagcagcaacagcagctgcagcgaatagcacagctgcagctccaacaacagcaacagcagcagcagcagcagcagcagcagcagcagcaggctttgcaggcccagccaccaattcagcagccaccgatgcagcagccacagcctccgccctcccaggctctgccccagcagctgcagcagatgcatcacacacagcaccaccagccgccaccacagccccagcagcctccagttgctcagaaccaaccatcacaactcccgccacagtcgcagacccagcctttggtgtcacaggcgcaagctctccctggacaaatgttgtatacccaaccaccactgaaatttgtccgagctccgatggtggtgcagcagcccccagtgcagccccaggtgcagcagcagcagacagcagtacagacagctcaggctgcccagatggtggctcccggagtccagatgatcacggaagccttggcccaaggtgggatgcacataagagcccggttcccgcctaccaccgctgtgtccgccatcccgtcaagctccatccctttgggcagacagcccatggcacaggtcagccagagcagcctccccatgctgtcctcgccgtcaccgggccagcaggtgcagaccccgcagtcgatgccccctcccccccagccgtccccgcagcccggccagcccagctcacagcccaactccaacgtcagctctggccctgccccatctcccagtagcttcctgcccagcccctcaccgcagccctcccagagcccagtgacggcgcggaccccacagaacttcagtgtcccctcacctggacctttaaacacacctgtgaaccccagctctgtcatgagcccagctggctccagccaggctgaggagcagcagtacctggacaagctgaagcagctgtcgaagtacatcgagcccctgcgccgcatgatcaacaagatcgacaagaacgaagacagaaaaaaggacctgagtaagatgaagagccttctggacattctgacagacccctcgaagcggtgtcccctgaagaccttgcaaaagtgtgagatcgccctggagaaactcaagaatgacatggcggtgcccactcccccaccgcccccggtgccaccgaccaaacagcagtacctatgccagccgctcctggatgccgtcctggccaacatccgctcacctgtcttcaaccattccctgtaccgcacattcgttccagccatgaccgccattcacggcccacccatcacggccccagtggtgtgcacccggaagcgcaggcttgaggatgatgagcggcagagcatccccagtgtgctccagggtgaggtggccaggctggaccccaagttcctggtaaacctggacccttctcactgcagcaacaatggcactgtccacctgatctgcaagctggatgacaaggacctcccaagtgtgccaccactggagctcagtgtgcccgctgactatcctgcccaaagcccgctgtggatagaccggcagtggcagtacgacgccaaccccttcctccagtcggtgcaccgctgcatgacctccaggctgctgcagctcccggacaagcactcggtcaccgccttgctcaacacctgggcccagagcgtccaccaggcctgcctctcagccgcctagccaagactgcagggatggcccgcagcctcatcggggccaaggacacacgcctcctgtcagacacttctaggtgttggcttccttagagagcctggggttaggttagctttcctgcttttatcttctgccttggggacctgccaaacgaaatcccacacctgtacagaactgggataggcgcagtggagcgggttgcttggggggcgttggccgacttcttagagaaggccctccatgtgacttcctcccaggagccagatgcgatcctcaggctgctctcaccgtggcctgtccacggtccaggtccatctcagcagcgtgagggtgcactcagggtgttgttagagcgtctcgtgtgtgctagacgcacccctactcgttcctatagaacacagaggacataggaaacccttaaaacacacatgggattctctggtcacagttttgggttcaggctatgctgctttgggcaggtggagcaccccccgaggaagcctgcaagtccagggcacaggctgccttttggagggagggctggcccataggtgctgctggctccccgccaccagctgggcctcagccctcacggcattcctgctgagcaccgtggggcacccagggagcaggggcgtcagggatcctgctgccggcacccctgtgccgctggcatgagggccgtgtccccactgtgaaggatgaagagcaaggccctcaggacccgtgtcctcagagcaccacacactgagcacccagagacagcgggcctggcagcgggccgggccatgcagggagcgcctccctatgttgcctgccactctgggcaccggccagcaccctctggtgagaagaggtcccccctttttatgtgcactaccccaccatctgtgattataataaatttattattcctgtgtt

SEQ ID NO: 17367 - DNA, 3252 bp, Homo sapiens
  source 1..3252: mol_type = unassigned DNA
ttgggcctggctctgtgactgaggcggcggcggtggcggccaagcgggatacgggcggcgggagctggggaacaggcatggacgtttccgggcaagagaccgactggcggagcaccgccttccggcagaagctggtcagtcaaatcgaggatgccatgaggaaagctggtgtggcacacagtaaatccagcaaggatatggagagccatgttttcctgaaggccaagacccgggacgaatacctttctctcgtggccaggctcattatccattttcgagacattcataacaagaaatctcaagcttccgtcagtgatcctatgaatgcactccagagcctgactggcggacctgctgcgggagccgctggaattggcatgcctcctcggggcccgggacagtctctgggcgggatgggtagccttggtgccatgggacagccaatgtctctctcagggcagccgcctcctgggacctcggggatggcccctcacagcatggctgtcgtgtctacggcaactccacagacccagctgcagctccagcaggtggcgctgcagcagcagcagcaacagcagcagttccagcagcagcagcaggcggcgctacagcagcagcagcagcagcagcaacagcagcagttccaggctcagcagagtgccatgcagcagcagttccaagcagtagtgcagcagcagcagcagctccagcagcagcagcagcagcagcagcatctaattaaattgcatcatcaaaatcagcaacagatacagcagcagcaacagcagctgcagcgaatagcacagctgcagctccaacaacagcaacagcagcagcagcagcagcagcagcagcagcagcaggctttgcaggcccagccaccaattcagcagccaccgatgcagcagccacagcctccgccctcccaggctctgccccagcagctgcagcagatgcatcacacacagcaccaccagccgccaccacagccccagcagcctccagttgctcagaaccaaccatcacaactcccgccacagtcgcagacccagcctttggtgtcacaggcgcaagctctccctggacaaatgttgtatacccaaccaccactgaaatttgtccgagctccgatggtggtgcagcagcccccagtgcagccccaggtgcagcagcagcagacagcagtacagacagctcaggctgcccagatggtggctcccggagtccaggtcagccagagcagcctccccatgctgtcctcgccgtcaccgggccagcaggtgcagaccccgcagtcgatgccccctcccccccagccgtccccgcagcccggccagcccagctcacagcccaactccaacgtcagctctggccctgccccatctcccagtagcttcctgcccagcccctcaccgcagccctcccagagcccagtgacggcgcggaccccacagaacttcagtgtcccctcacctggacctttaaacacacctgtgaaccccagctctgtcatgagcccagctggctccagccaggctgaggagcagcagtacctggacaagctgaagcagctgtcgaagtacatcgagcccctgcgccgcatgatcaacaagatcgacaagaacgaagacagaaaaaaggacctgagtaagatgaagagccttctggacattctgacagacccctcgaagcggtgtcccctgaagaccttgcaaaagtgtgagatcgccctggagaaactcaagaatgacatggcggtgcccactcccccaccgcccccggtgccaccgaccaaacagcagtacctatgccagccgctcctggatgccgtcctggccaacatccgctcacctgtcttcaaccattccctgtaccgcacattcgttccagccatgaccgccattcacggcccacccatcacggccccagtggtgtgcacccggaagcgcaggcttgaggatgatgagcggcagagcatccccagtgtgctccagggtgaggtggccaggctggaccccaagttcctggtaaacctggacccttctcactgcagcaacaatggcactgtccacctgatctgcaagctggatgacaaggacctcccaagtgtgccaccactggagctcagtgtgcccgctgactatcctgcccaaagcccgctgtggatagaccggcagtggcagtacgacgccaaccccttcctccagtcggtgcaccgctgcatgacctccaggctgctgcagctcccggacaagcactcggtcaccgccttgctcaacacctgggcccagagcgtccaccaggcctgcctctcagccgcctagccaagactgcagggatggcccgcagcctcatcggggccaaggacacacgcctcctgtcagacacttctaggtgttggcttccttagagagcctggggttaggttagctttcctgcttttatcttctgccttggggacctgccaaacgaaatcccacacctgtacagaactgggataggcgcagtggagcgggttgcttggggggcgttggccgacttcttagagaaggccctccatgtgacttcctcccaggagccagatgcgatcctcaggctgctctcaccgtggcctgtccacggtccaggtccatctcagcagcgtgagggtgcactcagggtgttgttagagcgtctcgtgtgtgctagacgcacccctactcgttcctatagaacacagaggacataggaaacccttaaaacacacatgggattctctggtcacagttttgggttcaggctatgctgctttgggcaggtggagcaccccccgaggaagcctgcaagtccagggcacaggctgccttttggagggagggctggcccataggtgctgctggctccccgccaccagctgggcctcagccctcacggcattcctgctgagcaccgtggggcacccagggagcaggggcgtcagggatcctgctgccggcacccctgtgccgctggcatgagggccgtgtccccactgtgaaggatgaagagcaaggccctcaggacccgtgtcctcagagcaccacacactgagcacccagagacagcgggcctggcagcgggccgggccatgcagggagcgcctccctatgttgcctgccactctgggcaccggccagcaccctctggtgagaagaggtcccccctttttatgtgcactaccccaccatctgtgattataataaatttattattcctgtgtttgtcagttgttca

SEQ ID NO: 17368 - DNA, 2235 bp, Homo sapiens
  source 1..2235: mol_type = unassigned DNA
ccaagcgggatacgggcggcgggagctggggaacaggcatggacgtttccgggcaagagaccgactggcggagcaccgccttccggcagaagctggtcagtcaaatcgaggatgccatgaggaaagctggtgtggcacacagtaaatccagcaaggatatggagagccatgttttcctgaaggccaagacccgggacgaatacctttctctcgtggccaggctcattatccattttcgagacattcataacaagaaatctcaagcttccgtcagtgcccagctgcagctccagcaggtggcgctgcagcagcagcagcaacagcagcagttccagcagcagcagcaggcggcgctacagcagcagcagcagcagcagcaacagcagcagttccaggctcagcagagtgccatgcagcagcagttccaagcagtagtgcagcagcagcagcagctccagcagcagcagcagcagcagcagcatctaattaaattgcatcatcaaaatcagcaacagatacagcagcagcaacagcagctgcagcgaatagcacagctgcagctccaacaacagcaacagcagcagcagcagcagcagcagcagcagcagcaggctttgcaggcccagccaccaattcagcagccaccgatgcagcagccacagcctccgccctcccaggctctgccccagcagctgcagcagatgcatcacacacagcaccaccagccgccaccacagccccagcagcctccagttgctcagaaccaaccatcacaactcccgccacagtcgcagacccagcctttggtgtcacaggcgcaagctctccctggacaaatgttgtatacccaaccaccactgaaatttgtccgagctccgatggtggtgcagcagcccccagtgcagccccaggtgcagcagcagcagacagcagtacagacagctcaggctgcccagatggtggctcccggagtccaggtcagccagagcagcctccccatgctgtcctcgccgtcaccgggccagcaggtgcagaccccgcagtcgatgccccctcccccccagccgtccccgcagcccggccagcccagctcacagcccaactccaacgtcagctctggccctgccccatctcccagtagcttcctgcccagcccctcaccgcagccctcccagagcccagtgacggcgcggaccccacagaacttcagtgtcccctcacctggacctttaaacacacctgtgaaccccagctctgtcatgagcccagctggctccagccaggctgaggagcagcagtacctggacaagctgaagcagctgtcgaagtacatcgagcccctgcgccgcatgatcaacaagatcgacaagaacgaagacagaaaaaaggacctgagtaagatgaagagccttctggacattctgacagacccctcgaagcggtgtcccctgaagaccttgcaaaagtgtgagatcgccctggagaaactcaagaatgacatggcggtgcccactcccccaccgcccccggtgccaccgaccaaacagcagtacctatgccagccgctcctggatgccgtcctggccaacatccgctcacctgtcttcaaccattccctgtaccgcacattcgttccagccatgaccgccattcacggcccacccatcacggccccagtggtgtgcacccggaagcgcaggcttgaggatgatgagcggcagagcatccccagtgtgctccagggtgaggtggccaggctggaccccaagttcctggtaaacctggacccttctcactgcagcaacaatggcactgtccacctgatctgcaagctggatgacaaggacctcccaagtgtgccaccactggagctcagtgtgcccgctgactatcctgcccaaagcccgctgtggatagaccggcagtggcagtacgacgccaaccccttcctccagtcggtgcaccgctgcatgacctccaggctgctgcagctcccggacaagcactcggtcaccgccttgctcaacacctgggcccagagcgtccaccaggcctgcctctcagccgcctagccaagactgcagggatggcccgcagcctcatcggggccaaggacacacgcctcctgtcagacacttctaggtgttggcttccttagagagcctggggttaggttagctttcctgcttttatcttctgccttggggacctgccaaacgaaatcccacacctgta

SEQ ID NO: 17369 - DNA, 3210 bp, Homo sapiens
  source 1..3210: mol_type = unassigned DNA
gactgaggcggcggcggtggcggccaagcgggatacgggcggcgggagctggggaacaggcatggacgtttccgggcaagagaccgactggcggagcaccgccttccggcagaagctgcgaggatgccatgaggaaagctggtgtggcacacagtaaatccagcaaggatatggagagccatgttttcctgaaggccaagacccgggacgaatacctttctctcgtggccaggctcattatccattttcgagacattcataacaagaaatctcaagcttccgtcagtgatcctatgaatgcactccagagcctgactggcggacctgctgcgggagccgctggaattggcatgcctcctcggggcccgggacagtctctgggcgggatgggtagccttggtgccatgggacagccaatgtctctctcagggcagccgcctcctgggacctcggggatggcccctcacagcatggctgtcgtgtctacggcaactccacagacccagctgcagctccagcaggtggcgctgcagcagcagcagcaacagcagcagttccagcagcagcagcaggcggcgctacagcagcagcagcagcagcagcaacagcagcagttccaggctcagcagagtgccatgcagcagcagttccaagcagtagtgcagcagcagcagcagctccagcagcagcagcagcagcagcagcatctaattaaattgcatcatcaaaatcagcaacagatacagcagcagcaacagcagctgcagcgaatagcacagctgcagctccaacaacagcaacagcagcagcagcagcagcagcagcagcagcagcaggctttgcaggcccagccaccaattcagcagccaccgatgcagcagccacagcctccgccctcccaggctctgccccagcagctgcagcagatgcatcacacacagcaccaccagccgccaccacagccccagcagcctccagttgctcagaaccaaccatcacaactcccgccacagtcgcagacccagcctttggtgtcacaggcgcaagctctccctggacaaatgttgtatacccaaccaccactgaaatttgtccgagctccgatggtggtgcagcagcccccagtgcagccccaggtgcagcagcagcagacagcagtacagacagctcaggctgcccagatggtggctcccggagtccaggtcagccagagcagcctccccatgctgtcctcgccgtcaccgggccagcaggtgcagaccccgcagtcgatgccccctcccccccagccgtccccgcagcccggccagcccagctcacagcccaactccaacgtcagctctggccctgccccatctcccagtagcttcctgcccagcccctcaccgcagccctcccagagcccagtgacggcgcggaccccacagaacttcagtgtcccctcacctggacctttaaacacacctgtgaaccccagctctgtcatgagcccagctggctccagccaggctgaggagcagcagtacctggacaagctgaagcagctgtcgaagtacatcgagcccctgcgccgcatgatcaacaagatcgacaagaacgaagacagaaaaaaggacctgagtaagatgaagagccttctggacattctgacagacccctcgaagcggtgtcccctgaagaccttgcaaaagtgtgagatcgccctggagaaactcaagaatgacatggcggtgcccactcccccaccgcccccggtgccaccgaccaaacagcagtacctatgccagccgctcctggatgccgtcctggccaacatccgctcacctgtcttcaaccattccctgtaccgcacattcgttccagccatgaccgccattcacggcccacccatcacggccccagtggtgtgcacccggaagcgcaggcttgaggatgatgagcggcagagcatccccagtgtgctccagggtgaggtggccaggctggaccccaagttcctggtaaacctggacccttctcactgcagcaacaatggcactgtccacctgatctgcaagctggatgacaaggacctcccaagtgtgccaccactggagctcagtgtgcccgctgactatcctgcccaaagcccgctgtggatagaccggcagtggcagtacgacgccaaccccttcctccagtcggtgcaccgctgcatgacctccaggctgctgcagctcccggacaagcactcggtcaccgccttgctcaacacctgggcccagagcgtccaccaggcctgcctctcagccgcctagccaagactgcagggatggcccgcagcctcatcggggccaaggacacacgcctcctgtcagacacttctaggtgttggcttccttagagagcctggggttaggttagctttcctgcttttatcttctgccttggggacctgccaaacgaaatcccacacctgtacagaactgggataggcgcagtggagcgggttgcttggggggcgttggccgacttcttagagaaggccctccatgtgacttcctcccaggagccagatgcgatcctcaggctgctctcaccgtggcctgtccacggtccaggtccatctcagcagcgtgagggtgcactcagggtgttgttagagcgtctcgtgtgtgctagacgcacccctactcgttcctatagaacacagaggacataggaaacccttaaaacacacatgggattctctggtcacagttttgggttcaggctatgctgctttgggcaggtggagcaccccccgaggaagcctgcaagtccagggcacaggctgccttttggagggagggctggcccataggtgctgctggctccccgccaccagctgggcctcagccctcacggcattcctgctgagcaccgtggggcacccagggagcaggggcgtcagggatcctgctgccggcacccctgtgccgctggcatgagggccgtgtccccactgtgaaggatgaagagcaaggccctcaggacccgtgtcctcagagcaccacacactgagcacccagagacagcgggcctggcagcgggccgggccatgcagggagcgcctccctatgttgcctgccactctgggcaccggccagcaccctctggtgagaagaggtcccccctttttatgtgcactaccccaccatctgtgattataataaatttattattcctgtg

SEQ ID NO: 17370 - DNA, 3041 bp, Homo sapiens
  source 1..3041: mol_type = unassigned DNA
ggtttgggcctggctctgtgactgaggcggcggcggtggcggccaagcgggatacgggcggcgggagctggggaacaggcatggacgtttccgggcaagagaccgactggcggagcaccgccttccggcagaagctggtcagtcaaatcgaggatgccatgaggaaagctggtgtggcacacagtaaatccagcaaggatatggagagccatgttttcctgaaggccaagacccgggacgaatacctttctctcgtggccaggctcattatccattttcgagacattcataacaagaaatctcaagcttccgtcagtgcccagctgcagctccagcaggtggcgctgcagcagcagcagcaacagcagcagttccagcagcagcagcaggcggcgctacagcagcagcagcagcagcagcaacagcagcagttccaggctcagcagagtgccatgcagcagcagttccaagcagtagtgcagcagcagcagcagctccagcagcagcagcagcagcagcagcatctaattaaattgcatcatcaaaatcagcaacagatacagcagcagcaacagcagctgcagcgaatagcacagctgcagctccaacaacagcaacagcagcagcagcagcagcagcagcagcagcagcaggctttgcaggcccagccaccaattcagcagccaccgatgcagcagccacagcctccgccctcccaggctctgccccagcagctgcagcagatgcatcacacacagcaccaccagccgccaccacagccccagcagcctccagttgctcagaaccaaccatcacaactcccgccacagtcgcagacccagcctttggtgtcacaggcgcaagctctccctggacaaatgttgtatacccaaccaccactgaaatttgtccgagctccgatggtggtgcagcagcccccagtgcagccccaggtgcagcagcagcagacagcagtacagacagctcaggctgcccagatggtggctcccggagtccaggtcagccagagcagcctccccatgctgtcctcgccgtcaccgggccagcaggtgcagaccccgcagtcgatgccccctcccccccagccgtccccgcagcccggccagcccagctcacagcccaactccaacgtcagctctggccctgccccatctcccagtagcttcctgcccagcccctcaccgcagccctcccagagcccagtgacggcgcggaccccacagaacttcagtgtcccctcacctggacctttaaacacacctgtgaaccccagctctgtcatgagcccagctggctccagccaggctgaggagcagcagtacctggacaagctgaagcagctgtcgaagtacatcgagcccctgcgccgcatgatcaacaagatcgacaagaacgaagacagaaaaaaggacctgagtaagatgaagagccttctggacattctgacagacccctcgaagcggtgtcccctgaagaccttgcaaaagtgtgagatcgccctggagaaactcaagaatgacatggcggtgcccactcccccaccgcccccggtgccaccgaccaaacagcagtacctatgccagccgctcctggatgccgtcctggccaacatccgctcacctgtcttcaaccattccctgtaccgcacattcgttccagccatgaccgccattcacggcccacccatcacggccccagtggtgtgcacccggaagcgcaggcttgaggatgatgagcggcagagcatccccagtgtgctccagggtgaggtggccaggctggaccccaagttcctggtaaacctggacccttctcactgcagcaacaatggcactgtccacctgatctgcaagctggatgacaaggacctcccaagtgtgccaccactggagctcagtgtgcccgctgactatcctgcccaaagcccgctgtggatagaccggcagtggcagtacgacgccaaccccttcctccagtcggtgcaccgctgcatgacctccaggctgctgcagctcccggacaagcactcggtcaccgccttgctcaacacctgggcccagagcgtccaccaggcctgcctctcagccgcctagccaagactgcagggatggcccgcagcctcatcggggccaaggacacacgcctcctgtcagacacttctaggtgttggcttccttagagagcctggggttaggttagctttcctgcttttatcttctgccttggggacctgccaaacgaaatcccacacctgtacagaactgggataggcgcagtggagcgggttgcttggggggcgttggccgacttcttagagaaggccctccatgtgacttcctcccaggagccagatgcgatcctcaggctgctctcaccgtggcctgtccacggtccaggtccatctcagcagcgtgagggtgcactcagggtgttgttagagcgtctcgtgtgtgctagacgcacccctactcgttcctatagaacacagaggacataggaaacccttaaaacacacatgggattctctggtcacagttttgggttcaggctatgctgctttgggcaggtggagcaccccccgaggaagcctgcaagtccagggcacaggctgccttttggagggagggctggcccataggtgctgctggctccccgccaccagctgggcctcagccctcacggcattcctgctgagcaccgtggggcacccagggagcaggggcgtcagggatcctgctgccggcacccctgtgccgctggcatgagggccgtgtccccactgtgaaggatgaagagcaaggccctcaggacccgtgtcctcagagcaccacacactgagcacccagagacagcgggcctggcagcgggccgggccatgcagggagcgcctccctatgttgcctgccactctgggcaccggccagcaccctctggtgagaagaggtcccccctttttatgtgcactaccccaccatctgtgattataataaatttattattcctgtgtttgtcagttgttc

SEQ ID NO: 17371 - DNA, 2703 bp, Homo sapiens
  source 1..2703: mol_type = unassigned DNA
acactgaatagggaaagggagagaagcagccggctgtagtgggtttagcagggctgggtgcttcatggtttctcttccagaaaagcgcatcaacggtgaaagaaagtgatgggaggagggtggatgtaagatgagattgggaaggtagttgtttggggtgtgggcggtgggacggaggatctgagggtgaccccccgaaggaatgtggactttgccgaaggatggcaggaagccgctgtcaggaagcgatcgtcgtttctggaggagagcgtgaagagctggggtcagtggccccgctcagaggaactctagcccctcaccaccgactgcttgtttctgttagcagtttttttcatgcgcgtccgtgtgaagagaccaccaaacaggctttgtcgaggatgccatgaggaaagctggtgtggcacacagtaaatccagcaaggatatggagagccatgttttcctgaaggccaagacccgggacgaatacctttctctcgtggccaggctcattatccattttcgagacattcataacaagaaatctcaagcttccgtcagtgatcctatgaatgcactccagagcctgactggcggacctgctgcgggagccgctggaattggcatgcctcctcggggcccgggacagtctctgggcgggatgggtagccttggtgccatgggacagccaatgtctctctcagggcagccgcctcctgggacctcggggatggcccctcacagcatggctgtcgtgtctacggcaactccacagacccagctgcagctccagcaggtggcgctgcagcagcagcagcaacagcagcagttccagcagcagcagcaggcggcgctacagcagcagcagcagcagcagcaacagcagcagttccaggctcagcagagtgccatgcagcagcagttccaagcagtagtgcagcagcagcagcagctccagcagcagcagcagcagcagcagcatctaattaaattgcatcatcaaaatcagcaacagatacagcagcagcaacagcagctgcagcgaatagcacagctgcagctccaacaacagcaacagcagcagcagcagcagcagcagcagcagcagcaggctttgcaggcccagccaccaattcagcagccaccgatgcagcagccacagcctccgccctcccaggctctgccccagcagctgcagcagatgcatcacacacagcaccaccagccgccaccacagccccagcagcctccagttgctcagaaccaaccatcacaactcccgccacagtcgcagacccagcctttggtgtcacaggcgcaagctctccctggacaaatgttgtatacccaaccaccactgaaatttgtccgagctccgatggtggtgcagcagcccccagtgcagccccaggtgcagcagcagcagacagcagtacagacagctcaggctgcccagatggtggctcccggagtccaggtcagccagagcagcctccccatgctgtcctcgccgtcaccgggccagcaggtgcagaccccgcagtcgatgccccctcccccccagccgtccccgcagcccggccagcccagctcacagcccaactccaacgtcagctctggccctgccccatctcccagtagcttcctgcccagcccctcaccgcagccctcccagagcccagtgacggcgcggaccccacagaacttcagtgtcccctcacctggacctttaaacacacctgtgaaccccagctctgtcatgagcccagctggctccagccaggctgaggagcagcagtacctggacaagctgaagcagctgtcgaagtacatcgagcccctgcgccgcatgatcaacaagatcgacaagaacgaagacagaaaaaaggacctgagtaagatgaagagccttctggacattctgacagacccctcgaagcggtgtcccctgaagaccttgcaaaagtgtgagatcgccctggagaaactcaagaatgacatggcggtgcccactcccccaccgcccccggtgccaccgaccaaacagcagtacctatgccagccgctcctggatgccgtcctggccaacatccgctcacctgtcttcaaccattccctgtaccgcacattcgttccagccatgaccgccattcacggcccacccatcacggccccagtggtgtgcacccggaagcgcaggcttgaggatgatgagcggcagagcatccccagtgtgctccagggtgaggtggccaggctggaccccaagttcctggtaaacctggacccttctcactgcagcaacaatggcactgtccacctgatctgcaagctggatgacaaggacctcccaagtgtgccaccactggagctcagtgtgcccgctgactatcctgcccaaagcccgctgtggatagaccggcagtggcagtacgacgccaaccccttcctccagtcggtgcaccgctgcatgacctccaggctgctgcagctcccggacaagcactcggtcaccgccttgctcaacacctgggcccagagcgtccaccaggcctgcctctcagccgcctagccaagactgcagggatggcccgcagcctcatcggggccaaggacacacgcctcctgtcagacacttctaggtgttggcttccttagagagcctggggttaggttagctttcctgcttttatcttctgcctt

SEQ ID NO: 17372 - DNA, 2752 bp, Homo sapiens
  source 1..2752: mol_type = unassigned DNA
acatgcttgcctggtggtgaatgggacactttcaggcgagacctaggggagccccaggccagcaccaggacagagatctcgaggcctttccaactctgctggttcttcagaagtcaaaccaacagattggagtatgtgaaggaagctcgtgtattcttctgaactagcttagacaacagtacacagtttgaagggcagcagccttttctgcagcgaggatgccatgaggaaagctggtgtggcacacagtaaatccagcaaggatatggagagccatgttttcctgaaggccaagacccgggacgaatacctttctctcgtggccaggctcattatccattttcgagacattcataacaagaaatctcaagcttccgtcagtgatcctatgaatgcactccagagcctgactggcggacctgctgcgggagccgctggaattggcatgcctcctcggggcccgggacagtctctgggcgggatgggtagccttggtgccatgggacagccaatgtctctctcagggcagccgcctcctgggacctcggggatggcccctcacagcatggctgtcgtgtctacggcaactccacagacccagctgcagctccagcaggtggcgctgcagcagcagcagcaacagcagcagttccagcagcagcagcaggcggcgctacagcagcagcagcagcagcagcaacagcagcagttccaggctcagcagagtgccatgcagcagcagttccaagcagtagtgcagcagcagcagcagctccagcagcagcagcagcagcagcagcatctaattaaattgcatcatcaaaatcagcagcagcagcagcagcaggctttgcaggcccagccaccaattcagcagccaccgatgcagcagccacagcctccgccctcccaggctctgccccagcagctgcagcagatgcatcacacacagcaccaccagccgccaccacagccccagcagcctccagttgctcagaaccaaccatcacaactcccgccacagtcgcagacccagcctttggtgtcacaggcgcaagctctccctggacaaatgttgtatacccaaccaccactgaaatttgtccgagctccgatggtggtgcagcagcccccagtgcagccccaggtgcagcagcagcagacagcagtacagacagctcaggctgcccagatggtggctcccggagtccagatgatcacggaagccttggcccaaggtgggatgcacataagagcccggttcccgcctaccaccgctgtgtccgccatcccgtcaagctccatccctttgggcagacagcccatggcacagcaggtgcagaccccgcagtcgatgccccctcccccccagccgtccccgcagcccggccagcccagctcacagcccaactccaacgtcagctctggccctgccccatctcccagtagcttcctgcccagcccctcaccgcagccctcccagagcccagtgacggcgcggaccccacagaacttcagtgtcccctcacctggacctttaaacacacctgtgaaccccagctctgtcatgagcccagctggctccagccaggctgaggagcagcagtacctggacaagctgaagcagctgtcgaagtacatcgagcccctgcgccgcatgatcaacaagatcgacaagaacgaagacagaaaaaaggacctgagtaagatgaagagccttctggacattctgacagacccctcgaagcggtgtcccctgaagaccttgcaaaagtgtgagatcgccctggagaaactcaagaatgacatggcggtgcccactcccccaccgcccccggtgccaccgaccaaacagcagtacctatgccagccgctcctggatgccgtcctggccaacatccgctcacctgtcttcaaccattccctgtaccgcacattcgttccagccatgaccgccattcacggcccacccatcacggccccagtggtgtgcacccggaagcgcaggcttgaggatgatgagcggcagagcatccccagtgtgctccagggtgaggtggccaggctggaccccaagttcctggtaaacctggacccttctcactgcagcaacaatggcactgtccacctgatctgcaagctggatgacaaggacctcccaagtgtgccaccactggagctcagtgtgcccgctgactatcctgcccaaagcccgctgtggatagaccggcagtggcagtacgacgccaaccccttcctccagtcggtgcaccgctgcatgacctccaggctgctgcagctcccggacaagcactcggtcaccgccttgctcaacacctgggcccagagcgtccaccaggcctgcctctcagccgcctagccaagactgcagggatggcccgcagcctcatcggggccaaggacacacgcctcctgtcagacacttctaggtgttggcttccttagagagcctggggttaggttagctttcctgcttttatcttctgccttggggacctgccaaacgaaatcccacacctgtacagaactgggataggcgcagtggagcgggttgcttggggggcgttggccgacttcttagagaaggccctccatgtgacttcctcccaggagccagatgcgatcctcaggctgctctcaccgtggcctgtccacggtccaggtccatctcagcagcgtgagggtgcactcagggtgttgttagagcgtctcgtgtgtgctagacgcaccc

SEQ ID NO: 17373 - DNA, 2149 bp, Homo sapiens
  source 1..2149: mol_type = unassigned DNA
gggcctggctctgtgactgaggcggcggcggtggcggccaagcgggatacgggcggcgggagctggggaacaggcatggacgtttccgggcaagagaccgactggcggagcaccgccttccggcagaagctggtcagtcaaatcgaggatgccatgaggaaagctggtgtggcacacagtaaatccagcaaggatatggagagccatgttttcctgaaggccaagacccggcccagctgcagctccagcaggtggcgctgcagcagcagcagcaacagcagcagttccagcagcagcagcaggcggcgctacagcagcagcagcagcagcagcaacagcagcagttccaggctcagcagagtgccatgcagcagcagttccaagcagtagtgcagcagcagcagcagctccagcagcagcagcagcagcagcagcatctaattaaattgcatcatcaaaatcagcaacagatacagcagcagcaacagcagctgcagcgaatagcacagctgcagctccaacaacagcaacagcagcagcagcagcagcagcagcagcagcagcaggctttgcaggcccagccaccaattcagcagccaccgatgcagcagccacagcctccgccctcccaggctctgccccagcagctgcagcagatgcatcacacacagcaccaccagccgccaccacagccccagcagcctccagttgctcagaaccaaccatcacaactcccgccacagtcgcagacccagcctttggtgtcacaggcgcaagctctccctggacaaatgttgtatacccaaccaccactgaaatttgtccgagctccgatggtggtgcagcagcccccagtgcagccccaggtgcagcagcagcagacagcagtacagacagctcaggctgcccagatggtggctcccggagtccagtgaaccccagctctgtcatgagcccagctggctccagccaggctgaggagcagcagtacctggacaagctgaagcagctgtcgaagtacatcgagcccctgcgccgcatgatcaacaagatcgacaagaacgaagacagaaaaaaggacctgagtaagatgaagagccttctggacattctgacagacccctcgaagcggtgtcccctgaagaccttgcaaaagtgtgagatcgccctggagaaactcaagaatgacatggcggtgcccactcccccaccgcccccggtgccaccgaccaaacagcagtacctatgccagccgctcctggatgccgtcctggccaacatccgctcacctgtcttcaaccattccctgtaccgcacattcgttccagccatgaccgccattcacggcccacccatcacgtatgtccagctgggctgggctttgcggagggcggccagccctgggccgcgtgtgccaggtgtggtcaccatgccgcctccccagggccccagtggtgtgcacccggaagcgcaggcttgaggatgatgagcggcagagcatccccagtgtgctccagggtgaggtggccaggctggaccccaagttcctggtaaacctggacccttctcactgcagcaacaatggcactgtccacctgatctgcaagctggatgacaaggacctcccaagtgtgccaccactggagctcagtgtgcccgctgactatcctgcccaaagcccgctgtggatagaccggcagtggcagtacgacgccaaccccttcctccagtcggtgcaccgctgcatgacctccaggctgctgcagctcccggacaagcactcggtcaccgccttgctcaacacctgggcccagagcgtccaccaggcctgcctctcagccgcctagccaagactgcagggatggcccgcagcctcatcggggccaaggacacacgcctcctgtcagacacttctaggtgttggcttccttagagagcctggggttaggttagctttcctgcttttatcttctgccttggggacctgccaaacgaaatcccacacctgtacagaactgggataggcgcagtggagcgggttgcttggggggcgttggccgacttcttagagaaggccctccatgtgacttcctcccaggagccagatgcgatcctcaggctgctctcaccgtggcctgtccacggtcca

SEQ ID NO: 17374 - DNA, 4874 bp, Homo sapiens
  source 1..4874: mol_type = unassigned DNA
gcaccgtgattcaccggaagcgctctagggaaccctggagcttccgcgcctgcccagttttgctccgaaagacttaccgaggagggagcttgcggtgcgttctgggaaagttgctgggccagctcctttgtttccagtctgagcgttgcgttcggtttcccgagggtcttctgaggcaccgcggctgcgggcttctgagttcccggctctccgcagggaagcctcctcttcgtacctcgttttttggctcgtggggggtcctcccaccgctggccgacgcagccagcatgtccggggtgcgcgcagtgcggatcagcatcgaatcggcctgcgagaagcaggtccatgaggtgggcctggatggcaccgagacgtacctgcccccgctgtccatgtcgcagaatctggcgcgtctggcccagcggatagacttcagccagggttcgggctccgaggaggaggaggcggcggggaccgagggcgacgcgcaggagtggccgggcgccgggtccagcgcagaccaggacgacgaggaaggagtggtaaaatttcagccttccctttggccttgggactcagtgaggaacaatttgagaagtgccctgacagagatgtgtgttctctatgatgttctcagtattgttagggataaaaaatttatgactcttgatcctgtctctcaggatgcacttcctccaaaacagaatcctcagacgttgcaattgatatctaaaaagaagtcacttgctggagcagcacaaatcttattgaagggggcagaaagactgactaaatcagttaccgaaaaccaagaaaacaagctacaaagagacttcaattctgagcttttgcgattacggcaacactggaaacttcgaaaagttggagataaaattctcggagatctgagctacagaagtgcaggatctctctttcctcatcatggtacatttgaagtaataaagaatacagatctcgatctggataaaaagatacctgaagattactgtcctcttgatgtccaaattcctagtgatttagaggggtctgcatatatcaaggtttcaatacaaaaacaggctccagatataggtgacctcggcacagttaacctcttcaaacgacctttgcccaaatccaaaccaggttccccacattggcagacaaaattagaagcggcacagaatgttctcttatgtaaagaaatttttgcacagctctctcgggaagctgttcaaattaaatcacaagtccctcacattgtggtgaaaaaccagattatctctcagccctttccgagcttgcagttatctatttctttgtgccattcctcaaatgataagaaatcccaaaaatttgctactgagaagcaatgtccggaggaccacctttatgtcctagagcataatttgcatctactgattagagagtttcataaacagaccttgagttccatcatgatgcctcatccagcaagtgcaccttttggccacaagagaatgagactttcgggtcctcaagcttttgataaaaatgaaattaattcattacagtccagtgaagggcttctggaaaaaataattaaacaagcaaagcatatttttctaaggagtagagctgctgcaaccattgacagcttagcaagccgaattgaggatcctcagatacaggctcattggtcaaatatcaatgatgtttatgaatctagtgtgaaagttttaatcacatcacaaggctatgaacaaatatgcaagtccattcaactgcaattgaatattggagttgagcagattcgagttgtacatagagatggaagagtaattacactgtcttatcaggagcaggagctacaggattttcttctgtctcagatgtcacagcaccaggtacatgcagttcagcaactcgccaaggttatgggctggcaagtactgagcttcagtaatcatgtgggacttggacctatagagagcattggtaatgcatctgccatcacggtggcctccccaagtggtgactatgctatttcagttcgtaatggacctgaaagtggcagcaagattatggttcagtttcctcgtaaccaatgtaaagaccttccaaaaagtgatgttttacaagataacaaatggagtcatcttcgtgggccattcaaagaagttcagtggaataaaatggaaggtcgaaattttgtttataaaatggagctgcttatgtctgcacttagcccttgtctactatgattttttccagatgtttcctaaagaagtttccagaaactttgacttgaaatgtttgcagatcaactataagcacaaagaagagataacttccaaaagagtgctgtttttaaaaataataattaggaaatgtttatttagcactttcaaacttttcactttataaatgacaagtgctttgaaatgcagaagtttatgtacagttgtatatacagtatgacaagatgtaaaataatatgtttttcatgcagtttaaaatattactaacttaagggtttctatgtgctttttaaaatattccttctttgatgttgacatcaaataaagtatgtggtttaaaaaaatctccaaatacctttttttccccccaaatactttctaaactttttttttttgagatggtatctcactctgtagcccagtctggagtgcagtggtgtgatcatggttcactgcagtcttgacctcccaggcttaggtgatccttctgtctcagccttccgagtagctgggaccacaggcatgcacaaccacgcctggctaatttttgtattttttataaagacagggtttttccatgttgcccaggctggtttcgaactcggctcaagtgatctacctgcctctgcctcccaaagtgctaggattacaggcgtgagccaccatgcccagcctactctaaattattgataacctcttcctccagttgtctcctttaagctttcctgggtctaacctacataggtaatttaagaacatcctcagaaaggacagctgaaggcaataggaggcagattatctctttagggcgtcctcaagtttttttggtctgttctcccacttgattgacctcaccagttgagacacctagtgtatggctcatgcccagccttccacctgggattctccagcctccacccagcagccctggattgctttctccaattaaggcctttccatcagctctctgctttttcaaagcgaaaaaactaatggattagtgggttatcttttccaaggaacaggtttgcacttcttggaaaaagtgcctaaagtgtgcccattaatatgaggatagatttaggctcataagccttttggtaacactgaaagtagtatcatataggcaagctctccttataagtaaggctttcaatttttaaaacagacatcctgctttaacaatttgtaagatgactgtgcagtaataaaagtcctttgtatttctccaccgtgttttcattaaagaaaaatggagcttgtgggccacgatagaacaactttgtgcttttttccccttctgatcaagatcttgcatctttctatccatggaaattaaaataattggtatgaatttgcagttatttaaaaatcttgagtgcttcaaaaattattgttgcctgcaaaatttgccttggtcaataggctaatctgcacaattccactcacataaggagtcttttatgtgattttgaaggctcaggctagaagagtgagtctgagacttttgctgaatgaccagtttttgtttatataaacttctcccattgcagattgatactttggtaaactaataaaaatgaattcctaaaatgaaattttgaaaagatacaaaataaaagccccatttatttgattataacttgattaaattgcatcaaatactagaatttatagacagagtctcactctgttccccaggctggagtgcagcagcactgttttggctcactgcaacctctgcctcctgggttcaaatgactctcatgcctcagcctcccgagtaactgggattacaggtgtgtgccaccacgaccgtctaatttttgtaattttgataagagggttttgccatcttggccaggctggtcttgaactcctggcctcaattgatccgcccacctcggcctcccaaagtgctaggattacaggcataagccacagtgcccagcccccccaaatataaacatttctgaatgctttattttttatttctctgcttgtcatgaatcagtaacaaatcatggaccaggaccacaccttgagtagaatggctgagaatacatgtgcagatactaccgtctgttcttttaaaccccatctgagtagagtgggataactgaagactttacgttcttcatgtcttactttccctgtttggtacgtcgctgtagtgagtagccagtaccgacctaaagaattgtagaaactaaagcaaatgtgtgggaaaatggtagcttagttgctgtggtagcaattcttatgccttgtatttatttacattttctagtttaatgttttaacctgaatttcctggagtttgaaggatgtgctatggaaacttgggagacagtttgaagaaaaccaattagcccctcaacaagtattaacaggttggcaaggagctgtgtttgaatcttggctctgctactggcttgctgtatgaacttggcaaggattctctgtgaacttgtttccttatatataaatgaagatagaggtgcctcctctactaacctcagtggtgattgagaagtttcagtaacgttggtaataaatgttaaattctaaagtactacataaatataaagcattaagcaagtgtgcttctaagagtcaagccaattagaaaaa

SEQ ID NO: 17375 - DNA, 2432 bp, Homo sapiens
  source 1..2432: mol_type = unassigned DNA
agttttgctccgaaagacttaccgaggagggagcttgcggtgcgttctgggaaagttgctgggccagctcctttgtttccagtctgagcgttgcgttcggtttcccgagggtcttctgaggcaccgcggctgcgggcttctgagttcccggctctccgcagggaagcctcctcttcgtacctcgttttttggctcgtggggggtcctcccaccgctggccgacgcagccagcatgtccggggtgcgcgcagtgcggatcagcatcgaatcggcctgcgagaagcaggtccatgaggtgggcctggatggcaccgagacgtacctgcccccgctgtccatgtcgcaggagtggccgggcgccgggtccagcgcagaccaggacgacgaggaaggagtggtaaaatttcagccttccctttggccttgggactcagtgaggaacaatttgagaagtgccctgacagagatgtgtgttctctatgatgttctcagtattgttagggataaaaaatttatgactcttgatcctgtctctcaggatgcacttcctccaaaacagaatcctcagacgttgcaattgatatctaaaaagaagtcacttgctggagcagcacaaatcttattgaagggggcagaaagactgactaaatcagttaccgaaaaccaagaaaacaagctacaaagagacttcaattctgagcttttgcgattacggcaacactggaaacttcgaaaagttggagataaaattctcggagatctgagctacagaagtgcaggatctctctttcctcatcatggtacatttgaagtaataaagaatacagatctcgatctggataaaaagatacctgaagattactgtcctcttgatgtccaaattcctagtgatttagaggggtctgcatatatcaaggtttcaatacaaaaacaggctccagatataggtgacctcggcacagttaacctcttcaaacgacctttgcccaaatccaaaccaggttccccacattggcagacaaaattagaagcggcacagaatgttctcttatgtaaagaaatttttgcacagctctctcgggaagctgttcaaattaaatcacaagtccctcacattgtggtgaaaaaccagattatctctcagccctttccgagcttgcagttatctatttctttgtgccattcctcaaatgataagaaatcccaaaaatttgctactgagaagcaatgtccggaggaccacctttatgtcctagagcataatttgcatctactgattagagagtttcataaacagaccttgagttccatcatgatgcctcatccagcaagtgcaccttttggccacaagagaatgagactttcgggtcctcaagcttttgataaaaatgaaattaattcattacagtccagtgaagggcttctggaaaaaataattaaacaagcaaagcatatttttctaaggagtagagctgctgcaaccattgacagcttagcaagccgaattgaggatcctcagatacaggctcattggtcaaatatcaatgatgtttatgaatctagtgtgaaagttttaatcacatcacaaggctatgaacaaatatgcaagtccattcaactgcaattgaatattggagttgagcagattcgagttgtacatagagatggaagagtaattacactgtcttatcaggagcaggagctacaggattttcttctgtctcagatgtcacagcaccaggtacatgcagttcagcaactcgccaaggttatgggctggcaagtactgagcttcagtaatcatgtgggacttggacctatagagagcattggtaatgcatctgccatcacggtggcctccccaagtggtgactatgctatttcagttcgtaatggacctgaaagtggcagcaagattatggttcagtttcctcgtaaccaatgtaaagaccttccaaaaagtgatgttttacaagataacaaatggagtcatcttcgtgggccattcaaagaagttcagtggaataaaatggaaggtcgaaattttgtttataaaatggagctgcttatgtctgcacttagcccttgtctactatgattttttccagatgtttcctaaagaagtttccagaaactttgacttgaaatgtttgcagatcaactataagcacaaagaagagataacttccaaaagagtgctgtttttaaaaataataattaggaaatgtttatttagcactttcaaacttttcactttataaatgacaagtgctttgaaatgcagaagtttatgtacagttgtatatacagtatgacaagatgtaaaataatatgtttttcatgcagtttaaaatattactaacttaagggtttctatgtgctttttaaaatattccttctttgatgttgacatcaaataaagtatgtggttt

SEQ ID NO: 17376 - DNA, 2278 bp, Homo sapiens
  source 1..2278: mol_type = unassigned DNA
agttttgctccgaaagacttaccgaggagggagcttgcggtgcgttctgggaaagttgctgggccagctcctttgtttccagtctgagcgttgcgttcggtttcccgagggtcttctgaggcaccgcggctgcgggcttctgagttcccggctctccgcagggaagcctcctcttcgtacctcgttttttggctcgtggggggtcctcccaccgctggccgacgcagccagcatgtccggggtgcgcgcagtgcggatcagcatcgaatcggcctgcgagaagcaggtccatgaggtgggcctggatggcaccgagacgtacctgcccccgctgtccatgtcgcagaatctggcgcgtctggcccagcggatagacttcagccagggttcgggctccgaggaggaggaggcggcggggaccgagggcgacgcgcaggagtggccgggcgccgggtccagcgcagaccaggacgacgaggaaggagtggtaaaatttcagccttccctttggccttgggactcagtgaggaacaatttgagaagtgccctgacagagatgtgtgttctctatgatgttctcagtattgttagggataaaaaatttatgactcttgatcctgtctctcaggatgcacttcctccaaaacaggtatttgtggactttaattgaataataaaattttatttattaaatcccaggacccttttttggctttgtgcctgttgttccattttcctttcttgcaaaattaagtccagatgaagatttaaagactaactggtctaaaacaaagccatacaactgcatttcctttatttttttattatatacctatgatccttggaagagttaagtttcattaagaatgtaatacctttaaggccaggcgtggtggctcacgcctgtaatcccagcactttgggaggccaaggcgggcagatcacgaggtcaggagatcgagaccatcctggctaatgctgtgaaaccttgtctctattaaaaataacaaaaataagccaggcgtggtggtgggcacctgtagtcccagctactcagaaggctgaggcaggagaattgcttgagcctgggaggcgggggttgcagtgagctgagatcgcgccactgcactccagcctgggcgacagagcgagattccatcccaaaaaaaaaaaaaaaaagaatgtaatactttaaaggttaccaaatcttaacaaattcttatagcctgggtccttggtctgtgatatattacacaaaaatgtgatgatataatggctttggaatcaggtagacctggattcgaatcctgcctctgccttcattaactgtgtgaccttaaattaagcaagttattttctcttaagtccctgtttttccatctaatccttccttccctttttttttaagggatggattagaaaagttaggcgaaattatggagcatattgagagctgggtagaattgctgctatttcataaacagtgtattcaatttttgaacatttgaagatgaaagagaagtagcaggaagatgagttggtgaatagtctgaaatcattgaggctacttgggtccttaaggaaaacaagtgtcaagaccataaccaaattagtcatggagaagaagtaatgactgttagaacccatttgtaaataaaattaattgaatagaattactcacatagtaatagtttcagaatctagaaacattgtgctgggggactaatagagttccctaaatctgcattcttcattttatagagagaaaactaaagcttaaagagatttgtaatatgttcaagttgctgtcaagccagtagttagggagccaagactagaactccagcacctaactcatagccccactgccttttctactattctgtgcttttcccagaagggagtctccaggaatttcttaatatctccaggaactcttttatttacgttccctaatacaatcaaaagattattttgatatgtttatgaagctttttatgtgatttttgactctcatacagccagaaaactgtattaaactggttagtaaaatacacaaattatggtgattgtggatatttatatatgcatatgtgatacatagatagtgacttctgatcagttttccaaaaaattaggattcagtgaagtacatttaatattaacaatggcagggcacggtggcttatgcctgtaattccaacactttggggaaccaaagcaggaagccaggagtttgagactttcccaggcaacatagcaagaccctgtctctacc

SEQ ID NO: 17377 - DNA, 1831 bp, Homo sapiens
  source 1..1831: mol_type = unassigned DNA
gaagttggctggttgcaccgatctgggggcttcccgggctcgggtaaccggagtgctggtatctaatcgtcgctcaaaagctcctaggtgcgcgggtggatataattcccggcttctcgagaagacactacagcctcaaggaggtatatcccgtgccttacctgactgggggctctgagtccagttgtgttgtcttcaacttagacaccatggaggcacctccagtcaccatgatgcctgtcactgggggcaccattaacatgatggagtacctgttgcagggaagtgttttagatcacagtttggaaagcctcatccaccgccttcgtggtttgtgtgacaacatggaacctgagactttccttgaccatgagatggtattcctccttaagggccagcaagccagcccatttgttctcagggcccgacgctctatggacagggcaggggcaccctggcatctgcgctacctgggacagccagaaatgggagacaagaaccgccatgccctggtgcgaaactgcgtggacattgccacatctgagaacctcaccgacttcttgatggaaatgggcttccgcatggaccatgagtttgttgctaagggacatttgttccgtaagggcatcatgaagattatggtgtacaagattttccgcatcctggtgccagggaacacagacagcactgaggccttgtcactctcctatctcgtggaattaagtgtggtagcacccgctgggcaggacatggtctctgatgacatgaagaacttcgcagaacagctaaaacctctggttcacctagagaaaatagaccccaagaggctcatgtgactaagaggatctgtccacatttggggcctatccttacttgtttgaaaaaatatgtttgctttttttggtttttgttttgttttgtttttgagacagagtctcgctttgtttcccaggctggagtgcagtggcacgatctcggctcactgcaacctctgcctcctgggttcaagcaattctcccacctcagcctcctgagtagctgggattacaggcacatgccaccatgctcagctaatttttgtatttttagtagaaatggggattcaccatgttggtcaggctattctcgaactcctgacctcgtgatccacccaccttggcctcccaaagtgctgggattacaggcatgagccaccacgcctggccaaaaaaatatgttttaaatgtcccatttcaccattgccaggcaggcattcttccttcagggagaggatggtgagaattaattggttctttgcactgttctcctcatgtggcgatttcactttcatgacagcctttctatattaaaggctcaggatgtcacggagaatctatctaatcccactgtattaagaggggaaaccgggccaagcgcagtggctcacacctctaatcccagcactttgggaggctgaggtaggtggatcacccaaggtcaggagtttgagaccagcctggccaaatggtgaaaccccatctctacgaaaaatacaaaatttagccgggcatggtagcaggcgcttgtaatcccagctacttgggaggctgaggctggagaatcgcttgaacccaggaggtgaaggttgcagtgaccagagatgacgccattgcactccagcctgggtgagaagagcgaaactccgtctcaaaaaaaaataaaaatgaagaggggaaaccagaataaattatcttttggaaaggacaatttcttgtttggccatttgtgtataaggttggtaacattagaggctgtgagcttgtgttacatggtaataaagccaatgaagaga

SEQ ID NO: 17378 - DNA, 1106 bp, Homo sapiens
  source 1..1106: mol_type = unassigned DNA
ccgatctgggggcttcccgggctcgggtaaccggagtgctggtatctaatcgtcgctcaaaagctcctaggtgcgcgggtggatataattcccggcttctcgagaagacactacagcctcaaggaggtatatcccgtgccttacctgactgggggctctgagtccagttgtgttgtcttcaacttagacaccatggaggcacctccagtcaccatgatgcctgtcactgggggcaccattaacatgatggagtacctgttgcagggaagtgttttagatcacagtttggaaagcctcatccaccgccttcgtggtttgtgtgacaacatggaacctgagactttccttgaccatgagatggtattcctccttaagggccagcaagccagcccatttgttctcagggcccgacgctctatggacagggcaggggcaccctggcatctgcgctacctgggacagccagaaatgggagacaagaaccgccatgccctggtgcgaaactgcgtggacattgccacatctgagaacctcaccgacttcttgatggaaatgggcttccgcatggaccatgagtttgttgctaagggacatttgttccgtaagggcatcatgaagattatggtgtacaagattttccgcatcctggtgccagggaacacagacagcactgaggccttgtcactctcctatctcgtggaattaagtgtggtagcacccgctgggcaggacatggtctctgatgacatgaagaacttcgcagaacagctaaaacctctggttcacctagagaaaatagaccccaagaggctcatgtgactaagaggatctgtccacatttggggcctatccttacttgtttgaaaaaatatgtttgctttttttggtttttgttttgttttgtttttgagacagagtctcgctttgtttcccagcctgggtgagaagagcgaaactccgtctcaaaaaaaaataaaaatgaagaggggaaaccagaataaattatcttttggaaaggacaatttcttgtttggccatttgtgtataaggttggtaacattagaggctgtgagcttgtgttacatggtaataaagccaatgaagag

SEQ ID NO: 17379 - DNA, 1515 bp, Homo sapiens
  source 1..1515: mol_type = unassigned DNA
cagcgccggggcggagggtacgatggagaatttcacggcactgtttggggctcaggctgacccaccaccgcccccaaccgcactcggcttcggaccaggaaagcctccacccccgccaccgcctcctgcgggcgggggacccggcacggccccgcctcccaccgcggccacggctcctcctggcgcggacaagtcaggagctggctgtggccctttttacctcatgagggaactgccaggtagcacagagctgacaggcagcacgaatctgatcacacactacaacttggaacaagcctataataaattctgtgggaagaaggtgaaggagaagctaagtaacttcctgcctgacctgccagggatgattgatctgcctggttcccatgataacagcagcctccgctctctcattgagaagccccctattctcagtagctctttcaatcctatcacagggaccatgctggccggcttccgcctccacactggcccgttgccggagcagtgtcgtctgatgcatattcagcctcccaagaagaagaataagcacaagcacaaacagagccgtacccaggatcctgtccccccaggtaaacccagttaagttccgtatggagctctggactcctaaattcccctgaagaagaaaccaatgtactgtggtctcttgggacttgggacagggactctagcagcacctctgtatcctttctggccatttggacaaaagcagttgccccgacttgggattttcctgtagtcttcagtggttcataacagtagaggattttgagctttacaggtgataggtacctaatgtctcctacagaaacaccatctgattcagatcacaagaagaagaaaaagaaaaaagaagaggatcctgaacggaaaaggaagaagaaagagaagaagaaaaagaaggtagagtagaggcctattgccacaacccagtgagtttccccagatctcacccctgtcctaaataccctagagttctttgcctcaagttggacccaagattgaaaacccaaggcaggttgcaggtttctcctgtacagcctgatcaaagccaaggctagttcctagttgttcttaccctgcttctttctcccccagaatcgacatagtccagaccacccaggtatgggcagctcccaggccagcagcagcagcagcctacgctaataggaccactggactctttgccaggatggcttttcctgctgtactgaacctgctgataaaagctgccttccaggctcttggacactgccttgggagcatcctgcagctgggacagaggccagctcctgttgggctcagttgagactaagtaaattaggagagagagggacatgcttttgtaggctcatcccagttggttttctcatggacatctcttcctctcccaggaagcttacaattttcttctctctcttttgtgcaatttgtctgatttaggacttgttctgtgttttctttaaaaaaaaaaaaattacatttatcaaa

SEQ ID NO: 17380 - DNA, 1089 bp, Homo sapiens
  source 1..1089: mol_type = unassigned DNA
cacggagacagcgccggggcggagggtacgatggagaatttcacggcactgtttggggctcaggctgacccaccaccgcccccaaccgcactcggcttcggaccaggaaagcctccacccccgccaccgcctcctgcgggcgggggacccggcacggccccgcctcccaccgcggccacggctcctcctggcgcggacaagtcaggagctggctgtggccctttttacctcatgagggaactgccaggtagcacagagctgacaggcagcacgaatctgatcacacactacaacttggaacaagcctataataaattctgtgggaagaaggtgaaggagaagctaagtaacttcctgcctgacctgccagggatgattgatctgcctggttcccatgataacagcagcctccgctctctcattgagaagccccctattctcagtagctctttcaatcctatcacagggaccatgctggccggcttccgcctccacactggcccgttgccggagcagtgtcgtctgatgcatattcagcctcccaagaagaagaataagcacaagcacaaacagagccgtacccaggatcctgtccccccagaaacaccatctgattcagatcacaagaagaagaaaaagaaaaaagaagaggatcctgaacggaaaaggaagaagaaagagaagaagaaaaagaagaatcgacatagtccagaccacccaggtatgggcagctcccaggccagcagcagcagcagcctacgctaataggaccactggactctttgccaggatggcttttcctgctgtactgaacctgctgataaaagctgccttccaggctcttggacactgccttgggagcatcctgcagctgggacagaggccagctcctgttgggctcagttgagactaagtaaattaggagagagagggacatgcttttgtaggctcatcccagttggttttctcatggacatctcttcctctcccaggaagcttacaattttcttctctctcttttgtgcaatttgtctgatttaggacttgttctgtgttttctttaaaaaaaaaaaaattacatttatcaaa

SEQ ID NO: 17381 - DNA, 2438 bp, Homo sapiens
  source 1..2438: mol_type = unassigned DNA
ggaactgaaggagtttctgtgggcggacagggaaccctgcgtttctactgtgtgattctgccaccttcctggcccgacgccatgggagtgacttgtgtgtcccagatgcctgtggccgagggcaagagtgttcagcaaaccgtagagctccttacccggaaattggagatgcttggggcagagaagcaaggaacattttgtgtggactgtgagacttaccatacggccgcctctacccttggcagccaaggtcagaccgggaagctgatgtatgtgatgcacaactcagagtacccattgagctgtttcgccctctttgagaatggcccttgccttattgctgacaccaactttgatgtgcttatggtgaagctcaagggctttttccagagtgctaaggccagcaagattgagacccggggcaccaggtaccagtactgtgacttcctggtgaaggtgggcacggtcacaatggggcccagtgcccggggcatctctgtggaggtggagtatggcccctgtgtggtagctagtgactgctggagtctgctgctcgagttcctacagagttttctaggcagccacacaccaggggctcccgcagtgtttgggaacagacatgatgcggtctacggcccagcagataccatggtccagtacatggaactcttcaacaagatccgcaagcagcagcaggtgccggtggctgggattcgttagtgatgagcagctgccagctgagctctgtcaccaggggtactccacaggaggagcaggtgctgactttcaggtccctggaccccagaaacccagggtagacatggactctactctccttctctggttctcagctgtggcttttgttctggggctgagtcccctccccaaccccctgactctcacacatagccccccatcagctgttttactccgtgccttactggatttggcctgtcctcaagaatggtaattatgaagagtggagaagtttggaccttgcctcctttaggggaaaggtaggacaggaatgtccctgcctggtactggtgggggaaatagtccgtatccccaactattaaggatttgtcccaggccaatggtgaacatgctgcattttatgtttggattgtgctgtaataagagcctcttccttccctcagaggatgtggctgggcttctatcctagagatggagtagaaggcacaactggtttgatagttactattttctgacctgtttgctgaagtgatttgcgaattgactttcctagggtgttgcctgagtcctttgaaatctccttctgacatctttcccttctgttgtgaaatatgttaagccacaggccaaactgctataagatcgaagtttgtttttttctcacctaataatagagaggtaatcagatggtctagggcagatttaactctacaaggttatcaggaactttgtttccttctgtcttattcagccattcccagtatgttttcttacccataagatcaaagcagactcatcagctccatatctgcattccactggggaaagagagagagaaaagagcagattttaaaaaaaagatatgactgagcattgctcagatcactgtggccacactttgctgaaagagatgctgggacatagaacctcttatctgggcagtcatgtgctgagttaaaactcagggattctgtgactacaagatgaaagacaatttggttgctgagatgcagttaatggcttctgttacatggagctcaatggacgtgcccaggaatgcttttggctgttattttgcagttaatacctcctgtaactaaagcatttgtttatgagttgacttgagagaagggctgatctcagagccgctttgagctaagttggattagtcacactaggaagttaattccacacctttcgtctaagtctcagtattgaggcctctccagttctcatgcaccctgatcttagggttagaatacttgaccctgatacctgcaccatgcttcatggttcctgagctctttctcctgtttcatttgagcctccaaactacatatttggtcatattgcctgcctaccccatgcctgctgcagaaatattcatccaggttaaccttgatatacacagagatggtcttggagaattgtgaatgtatgtactgtattgtcatcaaggatactgtcccttatttgaaggcatctaaagagaaactgttttcagatccaagtgctcagatctaaagcctctgcaacaagtcaggtggtggtcatgtttcccttctagttttggctgacaggaagctcagttcagtaccataactacagaacctgtcatctgtattttttgttctcaccccgtttttgttattttgtttctggttttttatattgaggtatgttttagatatagtttacaaaaataaaacgcacagatctta

SEQ ID NO: 17382 - DNA, 531 bp, Homo sapiens
  source 1..531: mol_type = unassigned DNA
ctggtgcgagaatcctgagaactgtgctccagttcttagaggggctctcagggactgtggtcctctattccttgtctttacaatgggggactggtccaagttgtgtcccagatgcctgtggccgagggcaagagtgttcagcaaaccgtagagctccttacccggaaattggagatgcttggggcagagaagcaaggaacattttgtgtggactgtgagacttaccatacggccgcctctacccttggcagccaaggtcagaccgggaagctgatgtatgtgatgcacaactcagagtacccattgagctgtttcgccctctttgagaatggcccttgccttattgctgacaccaactttgatgtgcttatggtgaagctcaagggctttttccagagtgctaaggccagcaagattgagacccggggcaccaggtaccagtactgtgacttcctggtgaaggtgggcacggtcacaatggggcccagtgcccggggcatctctgtggaggtggagtatggcccctgtgtg

SEQ ID NO: 17383 - DNA, 815 bp, Homo sapiens
  source 1..815: mol_type = unassigned DNA
gaaggagtttctgtgggcggacagggaaccctgcgtttctactgtgtgattctgccaccttcctggcccgacgccatgggagtgacttgtgtgtcccagatgcctgtggccgagggcaagagtgttcagcaaaccgtagagctccttacccggaaattggagatgcttggggcagagaagcaaggaacattttgtgtggactgtgagacttaccatacggccgcctctacccttggcagccaaggtcagaccgggaagctgatgtatgtgatgcacaactcagagtacccattgagctgtttcgccctctttgagaatggcccttgccttattgctgacaccaactttgatgtgcttatggtgaagctcaagggctttttccagagtgctaaggccagcaagattgagacccggggcaccaggtaccagtactgtgacttcctggtgaaggtgggcacggtcacaatggggcccagtgcccggggcatctctgtggaggtaagaccttggtgaaaataggagcaggatgttctgagggggctgcttagcaaagggctctgaagattttccagttcttctctttttttttttttgagacagagtcttgttctgtcacccaggctggaatgcaatggcacaatcttggcacactgtagcctcgacctccagggctcaagtgatccttccgcctcagtctcccaagtacctgggactacacccaccgaattaaatttttttttttttttagtagaaatgaggtcttactatgttgcccaggctgatctcagactcctgggctcaattgatcctcccat

SEQ ID NO: 17384 - DNA, 932 bp, Homo sapiens
  source 1..932: mol_type = unassigned DNA
gagacagaaggttgtgttggggaactgaaggagtttctgtgggcggacagggaaccctgcgtttctactgtgtgattctgccaccttcctggcccgacgccatgggagtgacttgtgtgtcccagatgcctgtggccgagggcaagagtgttcagcaaaccgtagagctccttacccggaaattggagatgcttggggcagagaagcaaggaacattttgtgtggactgtgagacttaccatacggccgcctctacccttggcagccaaggtcagaccgggaagctgatgtatgtgatgcacaactcagagtacccattgagctgtttcgccctctttgagaatggcccttgccttattgctgacaccaactttgatgtgcttatggtgaagctcaagggctttttccagagtgctaaggccagcaagattgagacccggggcaccaggtggagtatggcccctgtgtggtagctagtgactgctggagtctgctgctcgagttcctacagagttttctaggcagccacacaccaggggctcccgcagtgtttgggaacagacatgatgcggtctacggcccagcagataccatggtccagtacatggaactcttcaacaagatccgcaagcagcagcaggtgccggtggctgggattcgttagtgatgagcagctgccagctgagctctgtcaccaggggtactccacaggaggagcaggtgctgactttcaggtccctggaccccagaaacccagggtagacatggactctactctccttctctggttctcagctgtggcttttgttctggggctgagtcccctccccaaccccctgactctcacacatagccccccatcagctgttttactccgtgccttactggatttggcctgtcctcaagaatggtaattatgaagagtggagaag

SEQ ID NO: 17385 - DNA, 1753 bp, Homo sapiens
  source 1..1753: mol_type = unassigned DNA
gttttggcgtctgtttgctgcggtaggaacatggcggatcggctcacgcagcttcaggacgctgtgaattcgcttgcagatcagttttgtaatgccattggagtattgcagcaatgtggtcctcctgcctctttcaataatattcagacagcaattaacaaagaccagccagctaaccctacagaagagtatgcccagctttttgcagcactgattgcacgaacagcaaaagacattgatgttttgatagattccttacccagtgaagaatctacagctgctttacaggctgctagcttgtataagctagaagaagaaaaccatgaagctgctacatgtctggaggatgttgtttatcgaggagacatgcttctggagaagatacaaagcgcacttgctgatattgcacagtcacagctgaagacaagaagtggtacccatagccagtctcttccagactcatagcatcagtggataccatgtggctgagaaaagaactgtttgagtgccattaagaattctgcatcagacttagatacaagccttaccaacaattacagaaacattaaacactatgacacattacctttttagctatttttaatagtcttctattttcactcttgataagcttataaaatcatgattgaatcagctttaaagcatcataccatcattttttaactgagtgaaattattaaggcatgtaatacattaatgaacataatataaggaaacatatgtaaaattctgttatgacataatttatgtctccattttgttgtattggccagtacttttacaaatcaaaacatctctcaagccaaaggagaagacagtaagaacagacataagggacattttagtttgggctagtgtcctgcctcttagaggtggcattgtgtaaatctgagctttgagcaagaaagttttggaaattgtgttgcttttaagaaatagagttagtgtggctggataagaaagtcacatttatgcaaatgtttcttctgctagaacctcatacctgttctagttcatctccacgtttattttaccaagagatcctctgtcaagagaatttcctggctgttgtgaaagaatttttctacatcctgaactatttttcctatttcttttcaccttgctttttttcatccttaatttgcttgtcatcacaatgaagtatgttttttgaatcatcaattctttctcattctccatttatctgaaggttcttttgcccttattaacctctcaacttttattgctgtattctagtcagaccagaacatacttccactacatcagttacttggcatcatttcacctcagtttattattgccaaataataatttgtgtcagcattttcaactatggttattcatccaacccttggatctctttgagtctactgataatctccactggaaaggtggaattgaaatgtggtccacattttaactagctatttcctggggctgtatttttcagaatatgctgagctacatttgctgcaatctgttgctattcagagtttaagtttcaggagaaaacaggaacaatagaacactctgcctgttatttttgttgtaatcaagcttttccacagttcttgaaaagtactatgtttcaaatttcaggaacaccagcgttagctgtaaaagttgcagcaatttattggctagtcatagaaaatttttgaacttttaactgtattttaattgatgtttattaaaaacactttgctatcag

SEQ ID NO: 17386 - DNA, 4581 bp, Homo sapiens
  source 1..4581: mol_type = unassigned DNA
gagggaacgctccaggtaaagcgctgggggaggaagcgacgccgaggagctacggtttcctccagaggtctccgcccctctgcccctatattcccagagctcgagtctgatccgggccttgccgggcaccctggaaaggcgggggtgatagtacagatggagacgcaactgcagagcattttcgaagaggtggtgaaaacggaagttatagaagaggcttttcctggcatgtttatggatactcctgaagatgagaaaacaaaactaattagctgtttgggggccttcagacagttttggggtggtctttctcaggagtctcatgaacagtgtatccagtggattgttaagtttattcatggtcagcatagtcctaaaagaatttcttttctttatgactgcttagcaatggcagttgagactggtctccttccacccaggctggtttgtgaatccctgataaactctgacactcttgagtgggaaagaacacagctttgggccttaacatttaaactggttcggaaaataattgggggagtggattacaagggtgttcgagatctcttaaaagtgattttggagaagattttgacaattcctaatacagtgagctctgctgttgtacagcagcttctggcagcaagagaggttatagcatatatcttggaaagaaatgcctgcttattaccagcctattttgcagtcactgagatcaggaaactgtatcctgaaggcaaacttccacactggttacttggaaacctagtatcagactttgtggataccttcaggcccacagcaaggataaactccatttgtggtcgctgtagtcttctgccagttgtaaataattcgggtgccatttgtaattcatggaaactggatcctgctactcttcgttttcctttgaaaggccttttgccatatgataaggatctgtttgaaccacagactgctttgttgagatatgtattggagcagccttattccagggatatggtctgcaatatgctaggtttaaataagcagaccttgaacattgctcagcacaagcagcgctgccctgtgctggaggaccagttggtggatctggttgtttatgccatggagcgatctgagaccgaggagaagtttgacgatgggggaacaagccaactcctgtggcagcatctctcaagtcagctcattttctttgtgcttttccagtttgcaagttttccacatatggtgctttctcttcatcagaagttagcagggcgaggactgattaaaggcagagatcatcttatgtgggttctcctgcaattcatttctggaagtattcagaaaaatgcactagctgattttctccctgtgatgaagctcttcgacttgctatacccagaaaaagaatatatcccagttcctgatattaacaaaccccagtcaacccatgcctttgcaatgacctgtatttggattcatctcaatagaaaagctcaaaatgacaactccaagctacagattccaatacctcattccctaagacttcaccatgagttcctgcagcagagtctaagaaataaaagtttacagatgaatgactataagattgctctattgtgtaatgcatactctacaaattcagaatgttttacattacccatgggagctctggtagaaactatttatggaaatggaattatgaggatacctctccctggaacaaactgtatggcttcaggatctattacccccttacctatgaacctcctggattcactgacagttcatgccaaaatgagccttattcacagcattgcaaccagggtgataaaacttgctcatgcaaagtccagtgtggccttggctccagccctagtggaaacttacagtcgtttattggtctatatggaaatagagtctttgggcatcaaaggatttatcagtcagcttttgccaactgttttcaaatcacatgcatgggggatcttacacacactccttgagatgtttagctaccggatgcatcatattcagcctcattacagagttcagctcctgagtcatcttcatactttggctgcagttgcacaaacaaaccagaaccagctccatctttgtgtcgagagcactgctctcaggcttataacagcattaggtagctcagaggtacaaccgcagtttacacgcttccttagtgatcccaaaacagtgctctcagcagaatctgaagaactgaaccgagccttgatattgaccttggctagagcaactcatgtaacagatttttttacaggctctgattcaattcagggaacttggtgtaaagacatacttcagaccatcatgagtttcactcctcataattgggcttcacacaccctgagctgttttccaggcccactacaggcattcttcaaacaaaataatgtgcctcaggaaagccgttttaatctgaaaaaaaatgtggaggaggagtataggaagtggaagtcaatgagcaacgaaaacgacattattacccacttctctatgcagggctcccctcctctctttctttgtcttctctggaaaatgctcttggaaacagatcatattaatcagattggctatagagtattagagagaattggagccagggccttggtagcccatgtgaggacatttgcagatttcctggtatatgagttttctacatcagcagggggtcagcaactcaataaatgcattgaaattcttaatgacatggtatggaagtataacattgttacactggacagattaattctctgcctggccatgcgtagtcacgaaggaaatgaagcccaggtttgttatttcataattcagttgctgttactcaaaccaaacgattttagaaatcgagtaagtgactttgtgaaggaaaattccccagagcactggttacagaatgactggcacaccaagcacatgaattatcacaagaaatatccagagaagttgtattttgagggcctcgcggaacaggtggatcctcctgtacagatccagtctccctatctgcccatctattttgggaatgtgtgtcttcgattccttccagtatttgatatagtaatccacagatttttagagttgcttccggtatccaaatcactggagactctactggatcatctaggaggcttatataaatttcatgatcgtccagtgacttatctgtataacactctgcactattatgaaatgcacctgagagaccgcgcatttctcaaacgaaaactcgtccatgcgatcattggctctctgaaggataatcgaccgcagggctggtgtctaagtgacacttacctgaaatgcgctatgaatgcacgagaggaaaatccttgggttccagatgacacctactattgcagattgattggcagactagtcgatacgatggctggcaaatctcctggtccctttccaaactgtgactggagattcaatgagtttcccaacccagctgcccatgctctccatgttacttgtgtggagctcatggccttggcagtttcaggcaaagaagttgggaatgcccttctaaatgttgtcctaaaaagtcagcctttagtgccaagagagaacattacagcatggatgaatgcaattggtttgatcatcactgccctaccagagccatattggattgttcttcatgatcgaattgtgagtgtcatcagcagccccagcttgacgtctgaaacagagtgggttggctatccattccgcctctttgatttcactgcctgtcatcagtcctactctgagatgagttgtagctatacgttagctcttgcacatgctgtgtggcaccattctagcatcggacaactttctctcattccaaagtttcttactgaagtacttcttcctatagtgaagaccgaattccagttgctttatgtataccatcttgttggaccatttttacaaagatttcagcaagagagaactcgttgtatgatagagattggtgtggcgttttatgacatgctgctgaatgttgaccagtgtagcacccatttaaattacatggatcccatctgtgacttcctctatcacatgaagtatatgtttactggtgacagcgtgaaagagcaagtagagaagattatctgtaacttaaaaccagctttaaaacttcgtcttcgattcatcacacacattagcaagatggagccagctgcagtgcctccacaagccatgaacagtgggtctccagcacctcagtctaatcagtaaaaagtcagagtacacagcaagggttccaaattaagaggaagcaaaacgctgcccagatcctgagaaacctggagaaaatcaaccttagtagtttcaactcatacattgtcttgtttgattttgttctttgttttttatcctctttaagcacagatgcgtgttgaagtctaaggtgttctgtcatcacactctctttactagaataagtgtgcccaggcagaaaaaaaagtgtattcaatgttgctggcatgtgtggattcacagctcgtggctgtaaggaaatctgggggtttcataaatccattaaaatccttttagagttgccaa

SEQ ID NO: 17387 - DNA, 2811 bp, Homo sapiens
  source 1..2811: mol_type = unassigned DNA
acgctccaggtaaagcgctgggggaggaagcgacgccgaggagctacggtttcctccagaggtctccgcccctctgcccctatattcccagagctcgagtctgatccgggccttgccgggcaccctggaaaggcgggggtgatagtacagatggagacgcaactgcagagcattttcgaagaggtggtgaaaacggaagttatagaagaggcttttcctggcatgtttatggatactcctgaagatgagaaaacaaaactaattagctgtttgggggccttcagacagttttggggtggtctttctcaggagtctcatgaacagtgtatccagtggattgttaagtttattcatggtcagcatagtcctaaaagaatttcttttctttatgactgcttagcaatggcagttgagactggtctccttccacccaggctggtttgtgaatccctgataaactctgacactcttgagtgggaaagaacacagctttgggccttaacatttaaactggttcggaaaataattgggggagtggattacaagggtgttcgagatctcttaaaagtgattttggagaagattttgacaattcctaatacagtgagctctgctgttgtacagcagcttctggcagcaagagaggttatagcatatatcttggaaagaaatgcctgcttattaccagcctattttgcagtcactgagatcaggaaactgtatcctgaaggcaaacttccacactggttacttggaaacctagtatcagactttgtggataccttcaggcccacagcaaggataaactccatttgtggtcgctgtagtcttctgccagttgtaaataattcgggtgccatttgtaattcatggaaactggatcctgctactcttcgttttcctttgaaaggccttttgccatatgataaggatctgtttgaaccacagactgctttgttgagatatgtattggagcagccttattccagggatatggtctgcaatatgctaggtttaaataagcagaccttgaacattgctcagcacaagcagcgctgccctgtgctggaggaccagttggtggatctggttgtttatgccatggagcgatctgagaccgaggagaagtttgacgatgggggaacaagccaactcctgtggcagcatctctcaagtcagctcattttctttgtgcttttccagtttgcaagttttccacatatggtgctttctcttcatcagaagttagcagggcgaggactgattaaaggcagagatcatcttatgtgggttctcctgcaattcatttctggaagtattcagaaaaatgcactagctgattttctccctgtgatgaagctcttcgacttgctatacccagaaaaagaatatatcccagttcctgatattaacaaaccccagtcaacccatgcctttgcaatgacctgtatttggattcatctcaatagaaaagctcaaaatgacaactccaagctacagattccaatacctcattccctaagacttcaccatgagttcctgcagcagagtctaagaaataaaagtttacagatgaatgactataagattgctctattgtgtaatgcatactctacaaattcagaatgttttacattacccatgggagctctggtagaaactatttatggaaatggaattatgaggatacctctccctggaacaaactgtatggcttcaggatctattacccccttacctatgaacctcctggattcactgacagttcatgccaaaatgagccttattcacagcattgcaaccagggtgataaaacttgctcatgcaaagtccagtgtggccttggctccagccctagtggaaacttacagtcgtttattggtctatatggaaatagagtctttgggcatcaaaggatttatcagtcagcttttgccaactgttttcaaatcacatgcatgggggatcttacacacactccttgagatgtttagctaccggatgcatcatattcagcctcattacagagttcagctcctgagtcatcttcatactttggctgcagttgcacaaacaaaccagaaccagctccatctttgtgtcgagagcactgctctcaggcttataacagcattaggtagctcagaggtacaaccgcagtttacacgcttccttagtgatcccaaaacagtgctctcagcagaatctgaagaactgaaccgagccttgatattgaccttggctagagcaactcatgtaacagatttttttacaggctctgattcaattcagggaacttggtgtaaagacatacttcagaccatcatgagtttcactcctcataattgggcttcacacaccctgagctgttttccaggcccactacaggcattcttcaaacaaaataatgtgcctcaggaaagccgttttaatctgaaaaaaaatgtggaggaggagtataggaagtggaagtcaatgagcaacgaaaacgacattattacccacttctctatgcagggctcccctcctctctttctttgtcttctctggaaaatgctcttggaaacagatcatattaatcagattggctatagagtattagagagaattggagccagggccttggtagcccatgtgaggacatttgcagatttcctggtatatgagttttctacatcagcagggggtcagcaactcaataaatgcattgaaattcttaatgacatggtatggaagtataacattgttacactggacagattaattctctgcctggtaagaataaatacatttctaagcttattctcttag

SEQ ID NO: 17388 - DNA, 4576 bp, Homo sapiens
  source 1..4576: mol_type = unassigned DNA
cgggggtgatagtacagatggagacgcaactgcagagcattttcgaagaggtggtgaaaacggaagttatagaagaggcttttcctggcatgtttatggatactcctgaagatgagaaaacaaaactaattagctgtttgggggccttcagacagttttggggtggtctttctcaggagtctcatgaacagtgtatccagtggattgttaagtttattcatggtcagcatagtcctaaaagaatttcttttctttatgactgcttagcaatggcagttgagactggtctccttccacccaggctggtttgtgaatccctgataaactctgacactcttgagtgggaaagaacacagctttgggccttaacatttaaactggttcggaaaataattgggggagtggattacaagggtgttcgagatctcttaaaagtgattttggagaagattttgacaattcctaatacagtgagctctgctgttgtacagcagcttctggcagcaagagaggttatagcatatatcttggaaagaaatgcctgcttattaccagcctattttgcagtcactgagatcaggaaactgtatcctgaaggcaaacttccacactggttacttggaaacctagtatcagactttgtggataccttcaggcccacagcaaggataaactccatttgtggtcgctgtagtcttctgccagttgtaaataattcgggtgccatttgtaattcatggaaactggatcctgctactcttcgttttcctttgaaaggccttttgccatatgataaggatctgtttgaaccacagactgctttgttgagatatgtattggagcagccttattccagggatatggtctgcaatatgctaggtttaaataagcagaccttgaacattgctcagcacaagcagcgctgccctgtgctggaggaccagttggtggatctggttgtttatgccatggagcgatctgagaccgaggagaagtttgacgatgggggaacaagccaactcctgtggcagcatctctcaagtcagctcattttctttgtgcttttccagtttgcaagttttccacatatggtgctttctcttcatcagaagttagcagggcgaggactgattaaaggcagagatcatcttatgtgggttctcctgcaattcatttctggaagtattcagaaaaatgcactagctgattttctccctgtgatgaagctcttcgacttgctatacccagaaaaagaatatatcccagttcctgatattaacaaaccccagtcaacccatgcctttgcaatgacctgtatttggattcatctcaatagaaaagctcaaaatgacaactccaagctacagattccaatacctcattccctaagacttcaccatgagttcctgcagcagagtctaagaaataaaagtttacagatgaatgactataagattgctctattgtgtaatgcatactctacaaattcagaatgttttacattacccatgggagctctggtagaaactatttatggaaatggaattatgaggatacctctccctggaacaaactgtatggcttcaggatctattacccccttacctatgaacctcctggattcactgacagttcatgccaaaatgagccttattcacagcattgcaaccagggtgataaaacttgctcatgcaaagtccagtgtggccttggctccagccctagtggaaacttacagtcgtttattggtctatatggaaatagagtctttgggcatcaaaggatttatcagtcagcttttgccaactgttttcaaatcacatgcatgggggatcttacacacactccttgagatgtttagctaccggatgcatcatattcagcctcattacagagttcagctcctgagtcatcttcatactttggctgcagttgcacaaacaaaccagaaccagctccatctttgtgtcgagagcactgctctcaggcttataacagcattaggtagctcagaggtacaaccgcagtttacacgcttccttagtgatcccaaaacagtgctctcagcagaatctgaagaactgaaccgagccttgatattgaccttggctagagcaactcatgtaacagatttttttacaggctctgattcaattcagggaacttggtgtaaagacatacttcagaccatcatgagtttcactcctcataattgggcttcacacaccctgagctgttttccaggcccactacaggcattcttcaaacaaaataatgtgcctcaggaaagccgttttaatctgaaaaaaaatgtggaggaggagtataggaagtggaagtcaatgagcaacgaaaacgacattattacccacttctctatgcagggctcccctcctctctttctttgtcttctctggaaaatgctcttggaaacagatcatattaatcagattggctatagagtattagagagaattggagccagggccttggtagcccatgtgaggacatttgcagatttcctggtatatgagttttctacatcagcagggggtcagcaactcaataaatgcattgaaattcttaatgacatggtatggaagtataacattgttacactggacagattaattctctgcctggccatgcgtagtcacgaaggaaatgaagcccaggtttgttatttcataattcagttgctgttactcaaaccaaacgattttagaaatcgagtaagtgactttgtgaaggaaaattccccagagcactggttacagaatgactggcacaccaagcacatgaattatcacaagaaatatccagagaagttgtattttgagggcctcgcggaacaggtggatcctcctgtacagatccagtctccctatctgcccatctattttgggaatgtgtgtcttcgattccttccagtatttgatatagtaatccacagatttttagagttgcttccggtatccaaatcactggagactctactggatcatctaggaggcttatataaatttcatgatcgtccagtgacttatctgtataacactctgcactattatgaaatgcacctgagagaccgcgcatttctcaaacgaaaactcgtccatgcgatcattggctctctgaaggataatcgaccgcagggctggtgtctaagtgacacttacctgaaatgcgctatgaatgcacgagaggaaaatccttgggttccagatgacacctactattgcagattgattggcagactagtcgatacgatggctggcaaatctcctggtccctttccaaactgtgactggagattcaatgagtttcccaacccagctgcccatgctctccatgttacttgtgtggagctcatggccttggcagtttcaggcaaagaagttgggaatgcccttctaaatgttgtcctaaaaagtcagcctttagtgccaagagagaacattacagcatggatgaatgcaattggtttgatcatcactgccctaccagagccatattggattgttcttcatgatcgaattgtgagtgtcatcagcagccccagcttgacgtctgaaacagagtgggttggctatccattccgcctctttgatttcactgcctgtcatcagtcctactctgagatgagttgtagctatacgttagctcttgcacatgctgtgtggcaccattctagcatcggacaactttctctcattccaaagtttcttactgaagtacttcttcctatagtgaagaccgaattccagttgctttatgtataccatcttgttggaccatttttacaaagatttcagcaagagagaactcgttgtatgatagagattggtgtggcgttttatgacatgctgctgaatgttgaccagtgtagcacccatttaaattacatggatcccatctgtgacttcctctatcacatgaagtatatgtttactggtgacagcgtgaaagagcaagtaaagaagattatctgtaacttaaaaccagctttaaaacttcgtcttcgattcatcacacacattagcaagatggagccagctgcagtgcctccacaagccatgaacagtgggtctccagcacctcagtctaatcaggtgcccgtgtctttaccagtaactcagtgaagccagactgtactgtggagaaagtagaaatatatccgtctttgagagtggactcaaaccttttaaatctgaatgcgatcacactgtagtgatatagtagaagcagtgatgatattcagattgttttattttgattcaaatgatgaatctgttgacaccttataactcccatctccctatctatatttttgtctctaagagatcaagtaagatacatgttgttcatattcataacaacttattagagctatgtaggaacatagaggtatctgtgatcaaatgacttgtcattggcactttcagtctttcctattctagccgttgtttttgtttgtattttttattattaatgacatatttagtcttcagatatattattttaaaggcaccacacatgtaaaacagttattacaaatattttatacataaatctc

SEQ ID NO: 17389 - DNA, 4446 bp, Homo sapiens
  source 1..4446: mol_type = unassigned DNA
gttcctgctgttggctgggctcgggagggaacgctccaggtaaagcgctgggggaggaagcgacgccgaggagctacggtttcctccagaggtctccgcccctctgcccctatattcccagagctcgagtctgatccgggccttgccgggcaccctggaaaggcgggggtgatagtacagatggagacgcaactgcagagcattttcgaagaggtggtgaaaacggaagttatagaagaggcttttcctggcatgtttatggatactcctgaagatgagaaaacaaaactaattagctgtttgggggccttcagacagttttggggtggtctttctcaggagtctcatgaacagtgtatccagtggattgttaagtttattcatggtcagcatagtcctaaaagaatttcttttctttatgactgcttagcaatggcagttgagactggtctccttccacccaggctggtttgtgaatccctgataaactctgacactcttgagtgggaaagaacacagctttgggccttaacatttaaactggttcggaaaataattgggggagtggattacaagggtgttcgagatctcttaaaagtgattttggagaagattttgacaattcctaatacagtgagctctgctgttgtacagcagcttctggcagcaagagaggttatagcatatatcttggaaagaaatgcctgcttattaccagcctattttgcagtcactgagatcaggaaactgtatcctgaaggcaaacttccacactggttacttggaaacctagtatcagactttgtggataccttcaggcccacagcaaggataaactccatttgtggtcgctgtagtcttctgccagttgtaaataattcgggtgccatttgtaattcatggaaactggatcctgctactcttcgttttcctttgaaaggccttttgccatatgataaggatctgtttgaaccacagactgctttgttgagatatgtattggagcagccttattccagggatatggtctgcaatatgctaggtttaaataagcagcacaagcagcgctgccctgtgctggaggaccagttggtggatctggttgtttatgccatggagcgatctgagaccgaggagaagtttgacgatgggggaacaagccaactcctgtggcagcatctctcaagtcagctcattttctttgtgcttttccagtttgcaagttttccacatatggtgctttctcttcatcagaagttagcagggcgaggactgattaaaggcagagatcatcttatgtgggttctcctgcaattcatttctggaagtattcagaaaaatgcactagctgattttctccctgtgatgaagctcttcgacttgctatacccagaaaaagaatatatcccagttcctgatattaacaaaccccagtcaacccatgcctttgcaatgacctgtatttggattcatctcaatagaaaagctcaaaatgacaactccaagctacagattccaatacctcattccctaagacttcaccatgagttcctgcagcagagtctaagaaataaaagtttacagatgaatgactataagattgctctattgtgtaatgcatactctacaaattcagaatgttttacattacccatgggagctctggtagaaactatttatggaaatggaattatgaggatacctctccctggaacaaactgtatggcttcaggatctattacccccttacctatgaacctcctggattcactgacagttcatgccaaaatgagccttattcacagcattgcaaccagggtgataaaacttgctcatgcaaagtccagtgtggccttggctccagccctagtggaaacttacagtcgtttattggtctatatggaaatagagtctttgggcatcaaaggatttatcagtcagcttttgccaactgttttcaaatcacatgcatgggggatcttacacacactccttgagatgtttagctaccggatgcatcatattcagcctcattacagagttcagctcctgagtcatcttcatactttggctgcagttgcacaaacaaaccagaaccagctccatctttgtgtcgagagcactgctctcaggcttataacagcattaggtagctcagaggtacaaccgcagtttacacgcttccttagtgatcccaaaacagtgctctcagcagaatctgaagaactgaaccgagccttgatattgaccttggctagagcaactcatgtaacagatttttttacaggctctgattcaattcagggaacttggtgtaaagacatacttcagaccatcatgagtttcactcctcataattgggcttcacacaccctgagctgttttccaggcccactacaggcattcttcaaacaaaataatgtgcctcaggaaagccgttttaatctgaaaaaaaatgtggaggaggagtataggaagtggaagtcaatgagcaacgaaaacgacattattacccacttctctatgcagggctcccctcctctctttctttgtcttctctggaaaatgctcttggaaacagatcatattaatcagattggctatagagtattagagagaattggagccagggccttggtagcccatgtgaggacatttgcagatttcctggtatatgagttttctacatcagcagggggtcagcaactcaataaatgcattgaaattcttaatgacatggtatggaagtataacattgttacactggacagattaattctctgcctggccatgcgtagtcacgaaggaaatgaagcccaggtttgttatttcataattcagttgctgttactcaaaccaaacgattttagaaatcgagtaagtgactttgtgaaggaaaattccccagagcactggttacagaatgactggcacaccaagcacatgaattatcacaagaaatatccagagaagttgtattttgagggcctcgcggaacaggtggatcctcctgtacagatccagtctccctatctgcccatctattttgggaatgtgtgtcttcgattccttccagtatttgatatagtaatccacagatttttagagttgcttccggtatccaaatcactggagactctactggatcatctaggaggcttatataaatttcatgatcgtccagtgacttatctgtataacactctgcactattatgaaatgcacctgagagaccgcgcatttctcaaacgaaaactcgtccatgcgatcattggctctctgaaggataatcgaccgcagggctggtgtctaagtgacacttacctgaaatgcgctatgaatgcacgagaggaaaatccttgggttccagatgacacctactattgcagattgattggcagactagtcgatacgatggctggcaaatctcctggtccctttccaaactgtgactggagattcaatgagtttcccaacccagctgcccatgctctccatgttacttgtgtggagctcatggccttggcagtttcaggcaaagaagttgggaatgcccttctaaatgttgtcctaaaaagtcagcctttagtgccaagagagaacattacagcatggatgaatgcaattggtttgatcatcactgccctaccagagccatattggattgttcttcatgatcgaattgtgagtgtcatcagcagccccagcttgacgtctgaaacagagtgggttggctatccattccgcctctttgatttcactgcctgtcatcagtcctactctgagatgagttgtagctatacgttagctcttgcacatgctgtgtggcaccattctagcatcggacaactttctctcattccaaagtttcttactgaagtacttcttcctatagtgaagaccgaattccagttgctttatgtataccatcttgttggaccatttttacaaagatttcagcaagagagaactcgttgtatgatagagattggtgtggcgttttatgacatgctgctgaatgttgaccagtgtagcacccatttaaattacatggatcccatctgtgacttcctctatcacatgaagtatatgtttactggtgacagcgtgaaagagcaagtagagaagattatctgtaacttaaaaccagctttaaaacttcgtcttcgattcatcacacacattagcaagatggagccagctgcagtgcctccacaagccatgaacagtgggtctccagcacctcagtctaatcaggttgacactctcacctgacagatgatgtaattcttcaatttttataatcttaaaatttttaaattttatatttgtaaatacagtacacattttatttcttggattttgagagacattgttaattttgggggaattggcattgcgaaagacttgaaaactaatgagtaaagtctgctgaatgaataaacc

SEQ ID NO: 17390 - DNA, 5233 bp, Homo sapiens
  source 1..5233: mol_type = unassigned DNA
gttcctgctgttggctgggctcgggagggaacgctccaggtaaagcgctgggggaggaagcgacgccgaggagctacggtttcctccagaggtctccgcccctctgcccctatattcccagagctcgagtctgatccgggccttgccgggcaccctggaaaggcgggggtgatagtacagatggagacgcaactgcagagcattttcgaagaggtggtgaaaacggaagttatagaagaggcttttcctggcatgtttatggatactcctgaagatgagaaaacaaaactaattagctgtttgggggccttcagacagttttggggtggtctttctcaggagtctcatgaacagtgtatccagtggattgttaagtttattcatggtcagcatagtcctaaaagaatttcttttctttatgactgcttagcaatggcagttgagactggtctccttccacccaggctggtttgtgaatccctgataaactctgacactcttgagtgggaaagaacacagctttgggccttaacatttaaactggttcggaaaataattgggggagtggattacaagggtgttcgagatctcttaaaagtgattttggagaagattttgacaattcctaatacagtgagctctgctgttgtacagcagcttctggcagcaagagaggttatagcatatatcttggaaagaaatgcctgcttattaccagcctattttgcagtcactgagatcaggaaactgtatcctgaaggcaaacttccacactggttacttggaaacctagtatcagactttgtggataccttcaggcccacagcaaggataaactccatttgtggtcgctgtagtcttctgccagttgtaaataattcgggtgccatttgtaattcatggaaactggatcctgctactcttcgttttcctttgaaaggccttttgccatatgataaggatctgtttgaaccacagactgctttgttgagatatgtattggagcagccttattccagggatatggtctgcaatatgctaggtttaaataagcagcacaagcagcgctgccctgtgctggaggaccagttggtggatctggttgtttatgccatggagcgatctgagaccgaggagaagtttgacgatgggggaacaagccaactcctgtggcagcatctctcaagtcagctcattttctttgtgcttttccagtttgcaagttttccacatatggtgctttctcttcatcagaagttagcagggcgaggactgattaaaggcagagatcatcttatgtgggttctcctgcaattcatttctggaagtattcagaaaaatgcactagctgattttctccctgtgatgaagctcttcgacttgctatacccagaaaaagaatatatcccagttcctgatattaacaaaccccagtcaacccatgcctttgcaatgacctgtatttggattcatctcaatagaaaagctcaaaatgacaactccaagctacagattccaatacctcattccctaagacttcaccatgagttcctgcagcagagtctaagaaataaaagtttacagatgaatgactataagattgctctattgtgtaatgcatactctacaaattcagaatgttttacattacccatgggagctctggtagaaactatttatggaaatggaattatgaggatacctctccctggaacaaactgtatggcttcaggatctattacccccttacctatgaacctcctggattcactgacagttcatgccaaaatgagccttattcacagcattgcaaccagggtgataaaacttgctcatgcaaagtccagtgtggccttggctccagccctagtggaaacttacagtcgtttattggtctatatggaaatagagtctttgggcatcaaaggatttatcagtcagcttttgccaactgttttcaaatcacatgcatgggggatcttacacacactccttgagatgtttagctaccggatgcatcatattcagcctcattacagagttcagctcctgagtcatcttcatactttggctgcagttgcacaaacaaaccagaaccagctccatctttgtgtcgagagcactgctctcaggcttataacagcattaggtagctcagaggtacaaccgcagtttacacgcttccttagtgatcccaaaacagtgctctcagcagaatctgaagaactgaaccgagccttgatattgaccttggctagagcaactcatgtaacagatttttttacaggctctgattcaattcagggaacttggtgtaaagacatacttcagaccatcatgagtttcactcctcataattgggcttcacacaccctgagctgttttccaggcccactacaggcattcttcaaacaaaataatgtgcctcaggaaagccgttttaatctgaaaaaaaatgtggaggaggagtataggaagtggaagtcaatgagcaacgaaaacgacattattacccacttctctatgcagggctcccctcctctctttctttgtcttctctggaaaatgctcttggaaacagatcatattaatcagattggctatagagtattagagagaattggagccagggccttggtagcccatgtgaggacatttgcagatttcctggtatatgagttttctacatcagcagggggtcagcaactcaataaatgcattgaaattcttaatgacatggtatggaagtataacattgttacactggacagattaattctctgcctggccatgcgtagtcacgaaggaaatgaagcccaggtttgttatttcataattcagttgctgttactcaaaccaaacgattttagaaatcgagtaagtgactttgtgaaggaaaattccccagagcactggttacagaatgactggcacaccaagcacatgaattatcacaagaaatatccagagaagttgtattttgagggcctcgcggaacaggtggatcctcctgtacagatccagtctccctatctgcccatctattttgggaatgtgtgtcttcgattccttccagtatttgatatagtaatccacagatttttagagttgcttccggtatccaaatcactggagactctactggatcatctaggaggcttatataaatttcatgatcgtccagtgacttatctgtataacactctgcactattatgaaatgcacctgagagaccgcgcatttctcaaacgaaaactcgtccatgcgatcattggctctctgaaggataatcgaccgcagggctggtgtctaagtgacacttacctgaaatgcgctatgaatgcacgagaggaaaatccttgggttccagatgacacctactattgcagattgattggcagactagtcgatacgatggctggcaaatctcctggtccctttccaaactgtgactggagattcaatgagtttcccaacccagctgcccatgctctccatgttacttgtgtggagctcatggccttggcagtttcaggcaaagaagttgggaatgcccttctaaatgttgtcctaaaaagtcagcctttagtgccaagagagaacattacagcatggatgaatgcaattggtttgatcatcactgccctaccagagccatattggattgttcttcatgatcgaattgtgagtgtcatcagcagccccagcttgacgtctgaaacagagtgggttggctatccattccgcctctttgatttcactgcctgtcatcagtcctactctgagatgagttgtagctatacgttagctcttgcacatgctgtgtggcaccattctagcatcggacaactttctctcattccaaagtttcttactgaagtacttcttcctatagtgaagaccgaattccagttgctttatgtataccatcttgttggaccatttttacaaagatttcagcaagagagaactcgttgtatgatagagattggtgtggcgttttatgacatgctgctgaatgttgaccagtgtagcacccatttaaattacatggatcccatctgtgacttcctctatcacatgaagtatatgtttactggtgacagcgtgaaagagcaagtagagaagattatctgtaacttaaaaccagctttaaaacttcgtcttcgattcatcacacacattagcaagatggagccagctgcagtgcctccacaagccatgaacagtgggtctccagcacctcagtctaatcaggtgcccgtgtctttaccagtaactcagtgaagccagactgtactgtggagaaagtagaaatatatccgtctttgagagtggactcaaaccttttaaatctgaatgcgatcacactgtagtgatatagtagaagcagtgatgatattcagattgttttattttgattcaaatgatgaatctgttgacaccttataactcccatctccctatctatatttttgtctctaagagatcaagtaagatacatgttgttcatattcataacaacttattagagctatgtaggaacatagaggtatctgtgatcaaatgacttgtcattggcactttcagtctttcctattctagccgttgtttttgtttgtattttttattattaatgacatatttagtcttcagatatattattttaaaggcaccacacatgtaaaacagttattacaaatattttatacataaatctcttggtagattttcagaataatagagatttatatcaagaaaaggaatctagattttgttgcattgtaggagcaaacaaggcttcatattctttttaaaatgacttgaaattttattataaatttccatagtttctatcaaggtcaactggcagttttattacctttgctatggacttgaacttactgtataaaattagttggaagccatgtaagaaaataacatctgaaaattcttgaacttaaaatcatgcttaaatggttgattctccaatttctttttttaaaaataagttaattgcttttgcaggttgacactctcacctgacagatgatgtaattcttcaatttttataatcttaaaatttttaaattttatatttgtaaatacagtacacattttatttcttggattttgagagacattgttaattttgggggaattggcattgcgaaagacttgaaaactaatgagtaaagtctgctgaatgaataaaccgtgtgattgtttcccg

SEQ ID NO: 17391 - DNA, 5245 bp, Homo sapiens
  source 1..5245: mol_type = unassigned DNA
gctgttggctgggctcgggagggaacgctccaggtaaagcgctgggggaggaagcgacgccgaggagctacggtttcctccagaggtctccgcccctctgcccctatattcccagagctcgagtctgatccgggccttgccgggcaccctggaaaggcgggggtgatagtacagatggagacgcaactgcagagcattttcgaagaggtggtgaaaacggaagttatagaagaggcttttcctggcatgtttatggatactcctgaagatgagaaaacaaaactaattagctgtttgggggccttcagacagttttggggtggtctttctcaggagtctcatgaacagtgtatccagtggattgttaagtttattcatggtcagcatagtcctaaaagaatttcttttctttatgactgcttagcaatggcagttgagactggtctccttccacccaggctggtttgtgaatccctgataaactctgacactcttgagtgggaaagaacacagctttgggccttaacatttaaactggttcggaaaataattgggggagtggattacaagggtgttcgagatctcttaaaagtgattttggagaagattttgacaattcctaatacagtgagctctgctgttgtacagcagcttctggcagcaagagaggttatagcatatatcttggaaagaaatgcctgcttattaccagcctattttgcagtcactgagatcaggaaactgtatcctgaaggcaaacttccacactggttacttggaaacctagtatcagactttgtggataccttcaggcccacagcaaggataaactccatttgtggtcgctgtagtcttctgccagttgtaaataattcgggtgccatttgtaattcatggaaactggatcctgctactcttcgttttcctttgaaaggccttttgccatatgataaggatctgtttgaaccacagactgctttgttgagatatgtattggagcagccttattccagggatatggtctgcaatatgctaggtttaaataagcagttaatctctgccctacagcacaagcagcgctgccctgtgctggaggaccagttggtggatctggttgtttatgccatggagcgatctgagaccgaggagaagtttgacgatgggggaacaagccaactcctgtggcagcatctctcaagtcagctcattttctttgtgcttttccagtttgcaagttttccacatatggtgctttctcttcatcagaagttagcagggcgaggactgattaaaggcagagatcatcttatgtgggttctcctgcaattcatttctggaagtattcagaaaaatgcactagctgattttctccctgtgatgaagctcttcgacttgctatacccagaaaaagaatatatcccagttcctgatattaacaaaccccagtcaacccatgcctttgcaatgacctgtatttggattcatctcaatagaaaagctcaaaatgacaactccaagctacagattccaatacctcattccctaagacttcaccatgagttcctgcagcagagtctaagaaataaaagtttacagatgaatgactataagattgctctattgtgtaatgcatactctacaaattcagaatgttttacattacccatgggagctctggtagaaactatttatggaaatggaattatgaggatacctctccctggaacaaactgtatggcttcaggatctattacccccttacctatgaacctcctggattcactgacagttcatgccaaaatgagccttattcacagcattgcaaccagggtgataaaacttgctcatgcaaagtccagtgtggccttggctccagccctagtggaaacttacagtcgtttattggtctatatggaaatagagtctttgggcatcaaaggatttatcagtcagcttttgccaactgttttcaaatcacatgcatgggggatcttacacacactccttgagatgtttagctaccggatgcatcatattcagcctcattacagagttcagctcctgagtcatcttcatactttggctgcagttgcacaaacaaaccagaaccagctccatctttgtgtcgagagcactgctctcaggcttataacagcattaggtagctcagaggtacaaccgcagtttacacgcttccttagtgatcccaaaacagtgctctcagcagaatctgaagaactgaaccgagccttgatattgaccttggctagagcaactcatgtaacagatttttttacaggctctgattcaattcagggaacttggtgtaaagacatacttcagaccatcatgagtttcactcctcataattgggcttcacacaccctgagctgttttccaggcccactacaggcattcttcaaacaaaataatgtgcctcaggaaagccgttttaatctgaaaaaaaatgtggaggaggagtataggaagtggaagtcaatgagcaacgaaaacgacattattacccacttctctatgcagggctcccctcctctctttctttgtcttctctggaaaatgctcttggaaacagatcatattaatcagattggctatagagtattagagagaattggagccagggccttggtagcccatgtgaggacatttgcagatttcctggtatatgagttttctacatcagcagggggtcagcaactcaataaatgcattgaaattcttaatgacatggtatggaagtataacattgttacactggacagattaattctctgcctggccatgcgtagtcacgaaggaaatgaagcccaggtttgttatttcataattcagttgctgttactcaaaccaaacgattttagaaatcgagtaagtgactttgtgaaggaaaattccccagagcactggttacagaatgactggcacaccaagcacatgaattatcacaagaaatatccagagaagttgtattttgagggcctcgcggaacaggtggatcctcctgtacagatccagtctccctatctgcccatctattttgggaatgtgtgtcttcgattccttccagtatttgatatagtaatccacagatttttagagttgcttccggtatccaaatcactggagactctactggatcatctaggaggcttatataaatttcatgatcgtccagtgacttatctgtataacactctgcactattatgaaatgcacctgagagaccgcgcatttctcaaacgaaaactcgtccatgcgatcattggctctctgaaggataatcgaccgcagggctggtgtctaagtgacacttacctgaaatgcgctatgaatgcacgagaggaaaatccttgggttccagatgacacctactattgcagattgattggcagactagtcgatacgatggctggcaaatctcctggtccctttccaaactgtgactggagattcaatgagtttcccaacccagctgcccatgctctccatgttacttgtgtggagctcatggccttggcagtttcaggcaaagaagttgggaatgcccttctaaatgttgtcctaaaaagtcagcctttagtgccaagagagaacattacagcatggatgaatgcaattggtttgatcatcactgccctaccagagccatattggattgttcttcatgatcgaattgtgagtgtcatcagcagccccagcttgacgtctgaaacagagtgggttggctatccattccgcctctttgatttcactgcctgtcatcagtcctactctgagatgagttgtagctatacgttagctcttgcacatgctgtgtggcaccattctagcatcggacaactttctctcattccaaagtttcttactgaagtacttcttcctatagtgaagaccgaattccagttgctttatgtataccatcttgttggaccatttttacaaagatttcagcaagagagaactcgttgtatgatagagattggtgtggcgttttatgacatgctgctgaatgttgaccagtgtagcacccatttaaattacatggatcccatctgtgacttcctctatcacatgaagtatatgtttactggtgacagcgtgaaagagcaagtagagaagattatctgtaacttaaaaccagctttaaaacttcgtcttcgattcatcacacacattagcaagatggagccagctgcagtgcctccacaagccatgaacagtgggtctccagcacctcagtctaatcaggtgcccgtgtctttaccagtaactcagtgaagccagactgtactgtggagaaagtagaaatatatccgtctttgagagtggactcaaaccttttaaatctgaatgcgatcacactgtagtgatatagtagaagcagtgatgatattcagattgttttattttgattcaaatgatgaatctgttgacaccttataactcccatctccctatctatatttttgtctctaagagatcaagtaagatacatgttgttcatattcataacaacttattagagctatgtaggaacatagaggtatctgtgatcaaatgacttgtcattggcactttcagtctttcctattctagccgttgtttttgtttgtattttttattattaatgacatatttagtcttcagatatattattttaaaggcaccacacatgtaaaacagttattacaaatattttatacataaatctcttggtagattttcagaataatagagatttatatcaagaaaaggaatctagattttgttgcattgtaggagcaaacaaggcttcatattctttttaaaatgacttgaaattttattataaatttccatagtttctatcaaggtcaactggcagttttattacctttgctatggacttgaacttactgtataaaattagttggaagccatgtaagaaaataacatctgaaaattcttgaacttaaaatcatgcttaaatggttgattctccaatttctttttttaaaaataagttaattgcttttgcaggttgacactctcacctgacagatgatgtaattcttcaatttttataatcttaaaatttttaaattttatatttgtaaatacagtacacattttatttcttggattttgagagacattgttaattttgggggaattggcattgcgaaagacttgaaaactaatgagtaaagtctgctgaatgaataaaccgtgtgattgtttcccg

SEQ ID NO: 17392 - DNA, 1206 bp, Homo sapiens
  source 1..1206: mol_type = unassigned DNA
gagctacggtttcctccagaggtctccgcccctctgcccctatattcccagagctcgagtctgatccgggccttgccgggcaccctggaaaggcgggggtgatagtacagatggagacgcaactgcagagcattttcgaagaggtggtgaaaacggaagttatagaagaggcttttcctggcatgtttatggatactcctgaagatgagaaaagctcaaaatgacaactccaagctacagattccaatacctcattccctaagacttcaccatgagttcctgcagcagagtctaagaaataaaagtttacagatgaatgactataagattgctctattgtgtaatgcatactctacaaattcagaatgttttacattacccatgggagctctggtagaaactatttatggaaatggaattatgaggatacctctccctggaacaaactgtatggcttcaggatctattacccccttacctatgaacctcctggattcactgacagttcatgccaaaatgagccttattcacagcattgcaaccagggtgataaaacttgctcatgcaaagtccagtgtggccttggctccagccctagtggaaacttacagtcgtttattggtctatatggaaatagagtctttgggcatcaaaggatttatcagtcagcttttgccaactgttttcaaatcacatgcatgggggatcttacacacactccttgagatgtttagctaccggatgcatcatattcagcctcattacagagttcagctcctgagtcatcttcatactttggctgcagttgcacaaacaaaccagaaccagctccatctttgtgtcgagagcactgctctcaggcttataacagcattaggtagctcagaggtacaaccgcagtttacacgcttccttagtgatcccaaaacagtgctctcagcagaatctgaagaactgaaccgagccttgatattgaccttggctagagcaactcatgtaacagatttttttacaggctctgattcaattcagggaacttggtgtaaagacatacttcagaccatcatgagtttcactcctcataattgggcttcacacaccctgagctgttttccaggcccactacaggcattcttcaaacaaaataatgtgcctcaggaaagccgttttaatctgaaaaaaaatgtggaggaggagtataggaag

SEQ ID NO: 17393 - DNA, 641 bp, Homo sapiens
  source 1..641: mol_type = unassigned DNA
tgatagtacagatggagacgcaactgcagagcattttcgaagaggtggtgaaaacggaagttatagaagaggcttttcctggcatgtttatggatactcctgaagatgagaaaacaaaactatttatggaaatggaattatgaggatacctctccctggaacaaactgtatggcttcaggatctattacccccttacctatgaacctcctggattcactgacagttcatgccaaaatgagccttattcacagcattgcaaccagggtgataaaacttgctcatgcaaagtccagtgtggccttggctccagccctagtggaaacttacagtcgtttattggtctatatggaaatagagtctttgggcatcaaaggatttatcagtcagcttttgccaactgttttcaaatcacatgcatgggggatcttacacacactccttgagatgtttagctaccggatgcatcatattcagcctcattacagagttcagctcctgagtcatcttcatactttggctgcagttgcacaaacaaaccagaaccagctccatctttgtgtcgagagcactgctctcaggcttataacagcattaggtagctcagaggtacaaccgcagtttacacgcttccttagtgatc

SEQ ID NO: 17394 - DNA, 1636 bp, Homo sapiens
  source 1..1636: mol_type = unassigned DNA
tgatagtacagatggagacgcaactgcagagcattttcgaagaggtggtgaaaacggaagttatagaagaggcttttcctggcatgtttatggatactcctgaagatgagaaaacaaaactaattagctgtttgggggccttcagacagttttggggtggtctttctcaggagtctcatgaacagtgtatccagtggattgttaagtttattcatggtcagcatagtcctaaaagaatttcttttctttatgactgcttagcaatggcagttgagactggtctccttccacccaggctggtttgtgaatccctgataaactctgacactcttgagtgggaaagaacacagctttgggccttaacatttaaactggttcggaaaataattgggggagtggattacaagggtgttcgagatctcttaaaagtgattttggagaagattttgacaattcctaatacagtgagctctgctgttgtacagcagcttctggcagcaagagaggttatagcatatatcttggaaagaaatgcctgcttattaccagcctattttgcagtcactgagatcaggaaactgtatcctgaaggcaaacttccacactggttacttggaaacctagtatcagactttgtggataccttcaggcccacagcaaggataaactccatttgtggtcgctgtagtcttctgccagttgtaaataattcgggtgccatttgtaattcatggaaactggatcctgctactcttcgttttcctttgaaaggccttttgccatatgataaggatctgtttgaaccacagactgctttgttgagatatgtattggagcagccttattccagggatatggtctgcaatatgctaggtttaaataagcagcacaagcagcgctgccctgtgctggaggaccagttggtggatctggttgtttatgccatggagcgatctgagaccgaggagaagtttgacgatgggggaacaagccaactcctgtggcagcatctctcaagtcagctcattttctttgtgcttttccagtttgcaagttttccacatatggtgctttctcttcatcagaagttagcagggcgaggactgattaaaggcagagatcatcttatgtgggttctcctgcaattcatttctggaagtattcagaaaaatgcactagctgattttctccctgtgatgaagctcttcgacttgctatacccagaaaaagaatatatcccagttcctgatattaacaaaccccagtcaacccatgcctttgcaatgacctgtatttggattcatctcaatagaaaagctcaaaatgacaactccaagctacagattccaatacctcattccctaagacttcaccatgagtcagcttttgccaactgttttcaaatcacatgcatgggggatcttacacacactccttgagatgtttagctaccggatgcatcatattcagcctcattacagagttcagctcctgagtcatcttcatactttggctgcagttgcacaaacaaaccagaaccagctccatctttgtgtcgagagcactgctctcaggcttataacagcattaggtagctcagaggtacaaccgcagtttacacgcttccttagtgatc

SEQ ID NO: 17395 - DNA, 2430 bp, Homo sapiens
  source 1..2430: mol_type = unassigned DNA
acgctccaggtaaagcgctgggggaggaagcgacgccgaggagctacggtttcctccagaggtctccgcccctctgcccctatattcccagagctcgagtctgatccgggccttgccgggcaccctggaaaggcgggggtgatagtacagatggagacgcaactgcagagcattttcgaagaggtggtgaaaacggaagttatagaagaggcttttcctggcatgtttatggatactcctgaagatgagaaaacaaaactaattagctgtttgggggccttcagacagttttggggtggtctttctcaggagtctcatgaacagtgtatccagtggattgttaagtttattcatggtcagcatagtcctaaaagaatttcttttctttatgactgcttagcaatggcagttgagactggtctccttccacccaggctggtttgtgaatccctgataaactctgacactcttgagtgggaaagaacacagctttgggccttaacatttaaactggttcggaaaataattgggggagtggattacaagggtgttcgagatctcttaaaagtgattttggagaagattttgacaattcctaatacagtgagctctgctgttgtacagcagcttctggcagcaagagaggttatagcatatatcttggaaagaaatgcctgcttattaccagcctattttgcagtcactgagatcaggaaactgtatcctgaaggcaaacttccacactggttacttggaaacctagtatcagactttgtggataccttcaggcccacagcaaggataaactccatttgtggtcgctgtagtcttctgccagttgtaaataattcgggtgccatttgtaattcatggaaactggatcctgctactcttcgttttcctttgaaaggccttttgccatatgataaggatctgtttgaaccacagactgctttgttgagatatgtattggagcagccttattccagggatatggtctgcaatatgctaggtttaaataagcagaccttgaacattgctcagcacaagcagcgctgccctgtgctggaggaccagttggtggatctggttgtttatgccatggagcgatctgagaccgaggagaagtttgacgatgggggaacaagccaactcctgtggcagcatctctcaagtcagctcattttctttgtgcttttccagtttgcaagttttccacatatggtgctttctcttcatcagaagttagcagggcgaggactgattaaaggcagagatcatcttatgtgggttctcctgcaattcatttctggaagtattcagaaaaatgcactagctgattttctccctgtgatgaagctcttcgacttgctatacccagaaaaagaatatatcccagttcctgatattaacaaaccccagtcaacccatgcctttgcaatgacctgtatttggattcatctcaatagaaaagctcaaaatgacaactccaagctacagattccaatacctcattccctaagacttcaccatgagttcctgcagcagagtctaagaaataaaagtttacagatgaatgactataagattgctctattgtgtaatgcatactctacaaattcagaatgttttacattacccatgggagctctggtagaaactatttatggaaatggaattatgaggatacctctccctggaacaaactgtatggcttcaggatctattacccccttacctatgaacctcctggattcactgacagttcatgccaaaatgagccttattcacagcattgcaaccagggtgataaaacttgctcatgcaaagtccagtgtggccttggctccagccctagtggaaacttacagtcgtttattggtctatatggaaatagagtctttgggcatcaaaggatttatcagtcagcttttgccaactgttttcaaatcacatgcatgggggatcttacacacactccttgagatgtttagctaccggatgcatcatattcagcctcattacagagttcagctcctgagtcatcttcatactttggctgcagttgcacaaacaaaccagaaccagctccatctttgtgtcgagagcactgctctcaggcttataacagcattaggtagctcagaggtacaaccgcagtttacacgcttccttagtgatcccaaaacagtgctctcagcagaatctgaagaactgaaccgagccttgatattgaccttggctagagcaactcatgtaacagatttttttacaggctctgattcaattcagggaacttggtgtaaagacatacttcagaccatcatgagtttcactcctcataattgggcttcacacaccctgagctgttttccaggcccactacagacattgttaattttgggggaattggcattgcgaaagacttga

SEQ ID NO: 17396 - DNA, 2835 bp, Homo sapiens
  source 1..2835: mol_type = unassigned DNA
gctgttggctgggctcgggagggaacgctccaggtaaagcgctgggggaggaagcgacgccgaggagctacggtttcctccagaggtctccgcccctctgcccctatattcccagagctcgagtctgatccgggccttgccgggcaccctggaaaggcgggggtgatagtacagatggagacgcaactgcagagcattttcgaagaggtggtgaaaacggaagttatagaagaggcttttcctggcatgtttatggatactcctgaagatgagaaaacaaaactaattagctgtttgggggccttcagacagttttggggtggtctttctcaggagtctcatgaacagtgtatccagtggattgttaagtttattcatggtcagcatagtcctaaaagaatttcttttctttatgactgcttagcaatggcagttgagactggtctccttccacccaggctggtttgtgaatccctgataaactctgacactcttgagtgggaaagaacacagctttgggccttaacatttaaactggttcggaaaataattgggggagtggattacaagggtgttcgagatctcttaaaagtgattttggagaagattttgacaattcctaatacagtgagctctgctgttgtacagcagcttctggcagcaagagaggttatagcatatatcttggaaagaaatgcctgcttattaccagcctattttgcagtcactgagatcaggaaactgtatcctgaaggcaaacttccacactggttacttggaaacctagtatcagactttgtggataccttcaggcccacagcaaggataaactccatttgtggtcgctgtagtcttctgccagttgtaaataattcgggtgccatttgtaattcatggaaactggatcctgctactcttcgttttcctttgaaaggccttttgccatatgataaggatctgtttgaaccacagactgctttgttgagatatgtattggagcagccttattccagggatatggtctgcaatatgctaggtttaaataagcaggtactaaaaatttttaaacacaagcagcgctgccctgtgctggaggaccagttggtggatctggttgtttatgccatggagcgatctgagaccgaggagaagtttgacgatgggggaacaagccaactcctgtggcagcatctctcaagtcagctcattttctttgtgcttttccagtttgcaagttttccacatatggtgctttctcttcatcagaagttagcagggcgaggactgattaaaggcagagatcatcttatgtgggttctcctgcaattcatttctggaagtattcagaaaaatgcactagctgattttctccctgtgatgaagctcttcgacttgctatacccagaaaaagaatatatcccagttcctgatattaacaaaccccagtcaacccatgcctttgcaatgacctgtatttggattcatctcaatagaaaagctcaaaatgacaactccaagctacagattccaatacctcattccctaagacttcaccatgagttcctgcagcagagtctaagaaataaaagtttacagatgaatgactataagattgctctattgtgtaatgcatactctacaaattcagaatgttttacattacccatgggagctctggtagaaactatttatggaaatggaattatgaggatacctctccctggaacaaactgtatggcttcaggatctattacccccttacctatgaacctcctggattcactgacagttcatgccaaaatgagccttattcacagcattgcaaccagggtgataaaacttgctcatgcaaagtccagtgtggccttggctccagccctagtggaaacttacagtcgtttattggtctatatggaaatagagtctttgggcatcaaaggatttatcagtcagcttttgccaactgttttcaaatcacatgcatgggggatcttacacacactccttgagatgtttagctaccggatgcatcatattcagcctcattacagagttcagctcctgagtcatcttcatactttggctgcagttgcacaaacaaaccagaaccagctccatctttgtgtcgagagcactgctctcaggcttataacagcattaggtagctcagaggtacaaccgcagtttacacgcttccttagtgatcccaaaacagtgctctcagcagaatctgaagaactgaaccgagccttgatattgaccttggctagagcaactcatgtaacagatttttttacaggctctgattcaattcagggaacttggtgtaaagacatacttcagaccatcatgagtttcactcctcataattgggcttcacacaccctgagctgttttccaggcccactacaggcattcttcaaacaaaataatgtgcctcaggaaagccgttttaatctgaaaaaaaatgtggaggaggagtataggaagtggaagtcaatgagcaacgaaaacgacattattacccacttctctatgcagggctcccctcctctctttctttgtcttctctggaaaatgctcttggaaacagatcatattaatcagattggctatagagtattagagagaattggagccagggccttggtagcccatgtgaggacatttgcagatttcctggtatatgagttttctacatcagcagggggtcagcaactcaataaatgcattgaaattcttaatgacatggtatggaagtataacattgttacactggacagattaattctctgcctggtaagaataaatacatttctaagcttattctcttag

SEQ ID NO: 17397 - DNA, 3290 bp, Homo sapiens
  source 1..3290: mol_type = unassigned DNA
tatgccatggagcgatctgagaccgaggagaagtttgacgatgggggaacaagccaactcctgtggcagcatctctcaagtcagctcattttctttgtgcttttccagtttgcaagttttccacatatggtgctttctcttcatcagaagtatatcccagttcctgatattaacaaaccccagtcaacccatgcctttgcaatgacctgtatttggattcatctcaatagaaaagctcaaaatgacaactccaagctacagattccaatacctcattccctaagacttcaccatgagttcctgcagcagagtctaagaaataaaagtttacagatgaatgactataagattgctctattgtgtaatgcatactctacaaattcagaatgttttacattacccatgggagctctggtagaaactatttatggaaatggaattatgaggatacctctccctggaacaaactgtatggcttcaggatctattacccccttacctatgaacctcctggattcactgacagttcatgccaaaatgagccttattcacagcattgcaaccagggtgataaaacttgctcatgcaaagtccagtgtggccttggctccagccctagtggaaacttacagtcgtttattggtctatatggaaatagagtctttgggcatcaaaggatttatcagtcagcttttgccaactgttttcaaatcacatgcatgggggatcttacacacactccttgagatgtttagctaccggatgcatcatattcagcctcattacagagttcagctcctgagtcatcttcatactttggctgcagttgcacaaacaaaccagaaccagctccatctttgtgtcgagagcactgctctcaggcttataacagcattaggtagctcagaggtacaaccgcagtttacacgcttccttagtgatcccaaaacagtgctctcagcagaatctgaagaactgaaccgagccttgatattgaccttggctagagcaactcatgtaacagatttttttacaggctctgattcaattcagggaacttggtgtaaagacatacttcagaccatcatgagtttcactcctcataattgggcttcacacaccctgagctgttttccaggcccactacaggcattcttcaaacaaaataatgtgcctcaggaaagccgttttaatctgaaaaaaaatgtggaggaggagtataggaagtggaagtcaatgagcaacgaaaacgacattattacccacttctctatgcagggctcccctcctctctttctttgtcttctctggaaaatgctcttggaaacagatcatattaatcagattggctatagagtattagagagaattggagccagggccttggtagcccatgtgaggacatttgcagatttcctggtatatgagttttctacatcagcagggggtcagcaactcaataaatgcattgaaattcttaatgacatggtatggaagtataacattgttacactggacagattaattctctgcctggccatgcgtagtcacgaaggaaatgaagcccaggtttgttatttcataattcagttgctgttactcaaaccaaacgattttagaaatcgagtaagtgactttgtgaaggaaaattccccagagcactggttacagaatgactggcacaccaagcacatgaattatcacaagaaatatccagagaagttgtattttgagggcctcgcggaacaggtggatcctcctgtacagatccagtctccctatctgcccatctattttgggaatgtgtgtcttcgattccttccagtatttgatatagtaatccacagatttttagagttgcttccggtatccaaatcactggagactctactggatcatctaggaggcttatataaatttcatgatcgtccagtgacttatctgtataacactctgcactattatgaaatgcacctgagagaccgcgcatttctcaaacgaaaactcgtccatgcgatcattggctctctgaaggataatcgaccgcagggctggtgtctaagtgacacttacctgaaatgcgctatgaatgcacgagaggaaaatccttgggttccagatgacacctactattgcagattgattggcagactagtcgatacgatggctggcaaatctcctggtccctttccaaactgtgactggagattcaatgagtttcccaacccagctgcccatgctctccatgttacttgtgtggagctcatggccttggcagtttcaggcaaagaagttgggaatgcccttctaaatgttgtcctaaaaagtcagcctttagtgccaagagagaacattacagcatggatgaatgcaattggtttgatcatcactgccctaccagagccatattggattgttcttcatgatcgaattgtgagtgtcatcagcagccccagcttgacgtctgaaacagagtgggttggctatccattccgcctctttgatttcactgcctgtcatcagtcctactctgagatgagttgtagctatacgttagctcttgcacatgctgtgtggcaccattctagcatcggacaactttctctcattccaaagtttcttactgaagtacttcttcctatagtgaagaccgaattccagttgctttatgtataccatcttgttggaccatttttacaaagatttcagcaagagagaactcgttgtatgatagagattggtgtggcgttttatgacatgctgctgaatgttgaccagtgtagcacccatttaaattacatggatcccatctgtgacttcctctatcacatgaagtatatgtttactggtgacagcgtgaaagagcaagtagagaagattatctgtaacttaaaaccagctttaaaacttcgtcttcgattcatcacacacattagcaagatggagccagctgcagtgcctccacaagccatgaacagtgggtctccagcacctcagtctaatcaggtgcccgtgtctttaccagtaactcagtgaagccagactgtactgtggagaaagtagaaatatatccgtctttgagagtggactcaaaccttttaaatctgaatgcgatcacactgtagtgatatagtagaagcagtgatgatattcagattgttttattttgattcaaatgatgaatctgttgacaccttataactcccatctccctatctatatttttgtctctaagagatcaagtaagatacatgttgttcatattcataacaacttattagagctatgta

SEQ ID NO: 17398 - DNA, 3506 bp, Homo sapiens
  source 1..3506: mol_type = unassigned DNA
aagtgccaaaatggcgatgcctaccacctagaactggattgtgcgctccatttctttcacctcaaagctggccgccaccgctgccacctgctcagagtgaaataatgaaggtggtcaacctgaagcaagccattttgcaagcctggaaggagcgctggagtgactaccaatgggcaatcaacatgaagaaattctttcctaaaggagccacctgggatattctcaacctggcagatgcgttactagagcaggccatgattggaccatcccccaatcctctcatcttgtcctacctgaagtatgccattagttcccagatggtgtcctactcttctgtcctcacagccatcagtaagtttgatgacttttctcgggacctgtgtgtccaggcattgctggacatcatggacatgttttgtgaccgtctgagctgtcacggcaaagcagaggaatgcatcggactgtgccgagcccttcttagcgccctccactggctgctgcgctgcacggcagcctctgcagagcggctgcgggaggggctggaggccggcactccagccgctggggagaagcagcttgccatgtgccttcagcgcctggagaaaaccctcagcagcaccaagaaccgggccctgctgcacatcgccaaactagaggaggcctcttcttggactgccatcgagcattctctcttgaaacttggagagatcctggccaatctcagcaacccgcagctccggagtcaggccgagcagtgtggcaccctcattaggagcatccccacgatgctgtctgtgcatgcggagcagatgcacaagaccggcttccccactgtccacgccgtgatcctgctcgagggcaccatgaacctgacaggcgagacgcagtccctggtggagcagctgacgatggtgaagcgcatgcagcatatccccaccccactttttgtcctggagatctggaaagcttgcttcgtggggctcattgagtctcccgagggtacggaggagctcaagtggacagctttcactttcctcaagattccacaggttttggtgaagttgaagaagtactctcatggagacaaggacttcactgaggatgtcaactgtgcttttgagttcctgctgaagctcacccccttgttggacaaagctgaccagcgctgcaactgtgactgtacaaacttcctgctccaagaatgtggcaagcaggggcttctgtctgaggccagcgtcaacaaccttatggctaagcgcaaagcggaccgagagcacgcaccccagcagaaatcgggagagaatgccaacatccagcccaacatccagctgatcctccgggcggagcccactgtcacaaacatcctcaagacgatggatgcagaccactctaagtcaccggagggactgctgggagtcctgggccacatgctgtccgggaagagtctggacttgctgctggctgccgccgccgccactggaaagctgaaatccttcgcccggaaattcatcaatttgaatgaattcacaacctatggcagcgaagaaagcaccaaaccggcctccgtccgggccctgctgtttgacatctccttcctcatgctgtgccatgtggcccagacctatggttcagaggtgattctgtccgagtcgcgcacaggagctgaggtgcccttcttcgagacctggatgcagacctgcatgcctgaggagggcaagatcctgaaccctgaccacccctgcttccgccccgactccaccaaagtggagtccctggtggccctgctcaacaactcctcggagatgaagctagtgcagatgaagtggcatgaggcctgtctcagcatctcagccgccatcttggaaatcctcaatgcctgggagaatggggtcctggccttcgagtccatccagaaaatcactgataacatcaaagggaaggtatgcagtctggcggtgtgtgctgtggcttggcttgtggcccacgtccggatgctggggctggatgagcgtgagaagtcgctgcagatgatccgccagctggcagggccactgtttagtgagaacaccctgcagttctacaatgagagggtggtgatcatgaactcgatcctggagcgcatgtgtgccgacgtgctgcagcagacagccacgcagatcaagtttccctccaccggggtggacacaatgccctactggaacctgctgccccccaagcggcccatcaaagaggtgctgacggacatttttgccaaggtgctggagaagggctgggtggacagccgctccatccacatctttgacaccctgctgcacatgggcggcgtctactggttctgcaacaacctgattaaggagctgctgaaggagacgcggaaggagcacacgctgcgggcagtggagctgctctactccatcttctgcctggacatgcagcaagtgaccctggtcctgctgggccacatcctacctggcctgctcactgactcctccaagtggcacagcctcatggaccccccgggcactgctcttgccaagctggccgtgtggtgtgccctcagttcctactcctcccacaagggacaggcgtccacccgccagaagaagagacaccgcgaagacattgaggattatatcagcctcttccccctggacgatgtgcagccttcgaagttgatgcgactgctgagctctaatgaggacgatgccaacatcctttcgagccccacagaccgatccatgagcagctccctctcagcctctcagctccacacggtcaacatgcgggaccctctgaaccgagtcctggccaacctgttcctgctcatctcctccatcctggggtctcgcaccgctggcccccacacccagttcgtgcagtggttcatggaggagtgtgtggactgcctggagcagggtggccgtggcagcgtcctgcagttcatgcccttcaccaccgtgtcggaactggtgaaggtgtcagccatgtccagccccaaggtggttctggccatcacggacctcagcctgcccctgggccgccaggtggctgctaaagccattgctgcactctgaggggcttggcatggccgcagtgggggctggggactggcgcagccccaggcgcctccaagggaagcagtgaggaaagatgaggcatcgtgcctcacatccgctccacatggtgcaagagcctctagcggcttccagttccccgctcctgactcctgacctccaggatgtctcccggtttcttctttcaaaatttcctctccatctgctggcacctgaggagagtgagcagcctggaccacaagcccagtggtcacccctgtgtgcgcccgccccagcccaggagtagtcttacctctgaggaactttctagatgcaaagtgtgtatgtgtgtgtgtgtgtgtgtgtgtgtgtgtttgtgtgtattttgtaatatgtgagggaaatctaccttcgttcatgtataaataaagctcctcgtggctccctttgtga

SEQ ID NO: 17399 - DNA, 3896 bp, Homo sapiens
  source 1..3896: mol_type = unassigned DNA
ggtgcgatctcggctcaccccaacaacctccgcctcccgggttcaagcgattctactgcctcagcctcccgagtagctgggattacaggcatgcaccaccaagcccggctaattttgtatttttagtggagacgaggtttctccatgttggtcaggctagtctcgaactcctgacctccggtgattcgcccgcctctgcctcccgaagtgctgggattacaggtgcgagccactgcgctcggccgatactttcttagtgccccagtttaaggaagggcggttcaggaggagagagtctgacaggatcttactttatccctttagctctttttctttcaaattcctctgtctcgcttaaatcttcccgcatcttctcctttctatttaattctgccttccccggttctccttagaacctcatgtccttttctttagctccatttctttcacctcaaagctggccgccaccgctgccacctgctcagagtgaaataatgaaggtggtcaacctgaagcaagccattttgcaagcctggaaggagcgctggagtgactaccaatgggcaatcaacatgaagaaattctttcctaaaggagccacctgggatattctcaacctggcagatgcgttactagagcaggccatgattggaccatcccccaatcctctcatcttgtcctacctgaagtatgccattagttcccagatggtgtcctactcttctgtcctcacagccatcagtaagtttgatgacttttctcgggacctgtgtgtccaggcattgctggacatcatggacatgttttgtgaccgtctgagctgtcacggcaaagcagaggaatgcatcggactgtgccgagcccttcttagcgccctccactggctgctgcgctgcacggcagcctctgcagagcggctgcgggaggggctggaggccggcactccagccgctggggagaagcagcttgccatgtgccttcagcgcctggagaaaaccctcagcagcaccaagaaccgggccctgctgcacatcgccaaactagaggaggcctcttcttggactgccatcgagcattctctcttgaaacttggagagatcctggccaatctcagcaacccgcagctccggagtcaggccgagcagtgtggcaccctcattaggagcatccccacgatgctgtctgtgcatgcggagcagatgcacaagaccggcttccccactgtccacgccgtgatcctgctcgagggcaccatgaacctgacaggcgagacgcagtccctggtggagcagctgacgatggtgaagcgcatgcagcatatccccaccccactttttgtcctggagatctggaaagcttgcttcgtggggctcattgagtctcccgagggtacggaggagctcaagtggacagctttcactttcctcaagattccacaggttttggtgaagttgaagaagtactctcatggagacaaggacttcactgaggatgtcaactgtgcttttgagttcctgctgaagctcacccccttgttggacaaagctgaccagcgctgcaactgtgactgtacaaacttcctgctccaagaatgtggcaagcaggggcttctgtctgaggccagcgtcaacaaccttatggctaagcgcaaagcggaccgagagcacgcaccccagcagaaatcgggagagaatgccaacatccagcccaacatccagctgatcctccgggcggagcccactgtcacaaacatcctcaagacgatggatgcagaccactctaagtcaccggagggactgctgggagtcctgggccacatgctgtccgggaagagtctggacttgctgctggctgccgccgccgccactggaaagctgaaatccttcgcccggaaattcatcaatttgaatgaattcacaacctatggcagcgaagaaagcaccaaaccggcctccgtccgggccctgctgtttgacatctccttcctcatgctgtgccatgtggcccagacctatggttcagaggtgattctgtccgagtcgcgcacaggagctgaggtgcccttcttcgagacctggatgcagacctgcatgcctgaggagggcaagatcctgaaccctgaccacccctgcttccgccccgactccaccaaagtggagtccctggtggccctgctcaacaactcctcggagatgaagctagtgcagatgaagtggcatgaggcctgtctcagcatctcagccgccatcttggaaatcctcaatgcctgggagaatggggtcctggccttcgagtccatccagaaaatcactgataacatcaaagggaaggtatgcagtctggcggtgtgtgctgtggcttggcttgtggcccacgtccggatgctggggctggatgagcgtgagaagtcgctgcagatgatccgccagctggcagggccactgtttagtgagaacaccctgcagttctacaatgagagggtggtgatcatgaactcgatcctggagcgcatgtgtgccgacgtgctgcagcagacagccacgcagatcaagtttccctccaccggggtggacacaatgccctactggaacctgctgccccccaagcggcccatcaaagaggtgctgacggacatttttgccaaggtgctggagaagggctgggtggacagccgctccatccacatctttgacaccctgctgcacatgggcggcgtctactggttctgcaacaacctgattaaggagctgctgaaggagacgcggaaggagcacacgctgcgggcagtggagctgctctactccatcttctgcctggacatgcagcaagtgaccctggtcctgctgggccacatcctacctggcctgctcactgactcctccaagtggcacagcctcatggaccccccgggcactgctcttgccaagctggccgtgtggtgtgccctcagttcctactcctcccacaagggacaggcgtccacccgccagaagaagagacaccgcgaagacattgaggattatatcagcctcttccccctggacgatgtgcagccttcgaagttgatgcgactgctgagctctaatgaggacgatgccaacatcctttcgagccccacagaccgatccatgagcagctccctctcagcctctcagctccacacggtcaacatgcgggaccctctgaaccgagtcctggccaacctgttcctgctcatctcctccatcctggggtctcgcaccgctggcccccacacccagttcgtgcagtggttcatggaggagtgtgtggactgcctggagcagggtggccgtggcagcgtcctgcagttcatgcccttcaccaccgtgtcggaactggtgaaggtgtcagccatgtccagccccaaggtggttctggccatcacggacctcagcctgcccctgggccgccaggtggctgctaaagccattgctgcactctgaggggcttggcatggccgcagtgggggctggggactggcgcagccccaggcgcctccaagggaagcagtgaggaaagatgaggcatcgtgcctcacatccgctccacatggtgcaagagcctctagcggcttccagttccccgctcctgactcctgacctccaggatgtctcccggtttcttctttcaaaatttcctctccatctgctggcacctgaggagagtgagcagcctggaccacaagcccagtggtcacccctgtgtgcgcccgccccagcccaggagtagtcttacctctgaggaactttctagatgcaaagtgtgtatgtgtgtgtgtgtgtgtgtgtgtgtgtgtttgtgtgtattttgtaatatgtgagggaaatctaccttcgttcatgtataaataaagctcctcgtggctccctttgtga

SEQ ID NO: 17400 - DNA, 3456 bp, Homo sapiens
  source 1..3456: mol_type = unassigned DNA
aagtgccaaaatggcgatgcctaccacctagaactggattgtgcgctccatttctttcacctcaaagctggccgccaccgctgccacctgctcagagtgaaataatgaaggtggtcaacctgaagcaagccattttgcaagcctggaaggagcgctggagtgactaccaatgggcaatcaacatgaagaaattctttcctaaaggagccacctgggatattctcaacctggcagatgcgttactagagcaggccatgattggaccatcccccaatcctctcatcttgtcctacctgaagtatgccattagttcccagtttgatgacttttctcgggacctgtgtgtccaggcattgctggacatcatggacatgttttgtgaccgtctgagctgtcacggcaaagcagaggaatgcatcggactgtgccgagcccttcttagcgccctccactggctgctgcgctgcacggcagcctctgcagagcggctgcgggaggggctggaggccggcactccagccgctggggagaagcagcttgccatgtgccttcagcgcctggagaaaaccctcagcagcaccaagaaccgggccctgctgcacatcgccaaactagaggaggcctcttcttggactgccatcgagcattctctcttgaaacttggagagatcctggccaatctcagcaacccgcagctccggagtcaggccgagcagtgtggcaccctcattaggagcatccccacgatgctgtctgtgcatgcggagcagatgcacaagaccggcttccccactgtccacgccgtgatcctgctcgagggcaccatgaacctgacaggcgagacgcagtccctggtggagcagctgacgatggtgaagcgcatgcagcatatccccaccccactttttgtcctggagatctggaaagcttgcttcgtggggctcattgagtctcccgagggtacggaggagctcaagtggacagctttcactttcctcaagattccacaggttttggtgaagttgaagaagtactctcatggagacaaggacttcactgaggatgtcaactgtgcttttgagttcctgctgaagctcacccccttgttggacaaagctgaccagcgctgcaactgtgactgtacaaacttcctgctccaagaatgtggcaagcaggggcttctgtctgaggccagcgtcaacaaccttatggctaagcgcaaagcggaccgagagcacgcaccccagcagaaatcgggagagaatgccaacatccagcccaacatccagctgatcctccgggcggagcccactgtcacaaacatcctcaagacgatggatgcagaccactctaagtcaccggagggactgctgggagtcctgggccacatgctgtccgggaagagtctggacttgctgctggctgccgccgccgccactggaaagctgaaatccttcgcccggaaattcatcaatttgaatgaattcacaacctatggcagcgaagaaagcaccaaaccggcctccgtccgggccctgctgtttgacatctccttcctcatgctgtgccatgtggcccagacctatggttcagaggtgattctgtccgagtcgcgcacaggagctgaggtgcccttcttcgagacctggatgcagacctgcatgcctgaggagggcaagatcctgaaccctgaccacccctgcttccgccccgactccaccaaagtggagtccctggtggccctgctcaacaactcctcggagatgaagctagtgcagatgaagtggcatgaggcctgtctcagcatctcagccgccatcttggaaatcctcaatgcctgggagaatggggtcctggccttcgagtccatccagaaaatcactgataacatcaaagggaaggtatgcagtctggcggtgtgtgctgtggcttggcttgtggcccacgtccggatgctggggctggatgagcgtgagaagtcgctgcagatgatccgccagctggcagggccactgtttagtgagaacaccctgcagttctacaatgagagggtggtgatcatgaactcgatcctggagcgcatgtgtgccgacgtgctgcagcagacagccacgcagatcaagtttccctccaccggggtggacacaatgccctactggaacctgctgccccccaagcggcccatcaaagaggtgctgacggacatttttgccaaggtgctggagaagggctgggtggacagccgctccatccacatctttgacaccctgctgcacatgggcggcgtctactggttctgcaacaacctgattaaggagctgctgaaggagacgcggaaggagcacacgctgcgggcagtggagctgctctactccatcttctgcctggacatgcagcaagtgaccctggtcctgctgggccacatcctacctggcctgctcactgactcctccaagtggcacagcctcatggaccccccgggcactgctcttgccaagctggccgtgtggtgtgccctcagttcctactcctcccacaagggacaggcgtccacccgccagaagaagagacaccgcgaagacattgaggattatatcagcctcttccccctggacgatgtgcagccttcgaagttgatgcgactgctgagctctaatgaggacgatgccaacatcctttcgagccccacagaccgatccatgagcagctccctctcagcctctcagctccacacggtcaacatgcgggaccctctgaaccgagtcctggccaacctgttcctgctcatctcctccatcctggggtctcgcaccgctggcccccacacccagttcgtgcagtggttcatggaggagtgtgtggactgcctggagcagggtggccgtggcagcgtcctgcagttcatgcccttcaccaccgtgtcggaactggtgaaggtgtcagccatgtccagccccaaggtggttctggccatcacggacctcagcctgcccctgggccgccaggtggctgctaaagccattgctgcactctgaggggcttggcatggccgcagtgggggctggggactggcgcagccccaggcgcctccaagggaagcagtgaggaaagatgaggcatcgtgcctcacatccgctccacatggtgcaagagcctctagcggcttccagttccccgctcctgactcctgacctccaggatgtctcccggtttcttctttcaaaatttcctctccatctgctggcacctgaggagagtgagcagcctggaccacaagcccagtggtcacccctgtgtgcgcccgccccagcccaggagtagtcttacctctgaggaactttctagatgcaaagtgtgtatgtgtgtgtgtgtgtgtgtgtgtgtgtgtttgtgtgtattttgtaatatgtgagggaaatctaccttcgttcatgtataaataaagctcctcgtggc

SEQ ID NO: 17401 - DNA, 3479 bp, Homo sapiens
  source 1..3479: mol_type = unassigned DNA
aagtgccaaaatggcgatgcctaccacctagaactggattgtgcgctggccgccaccgctgccacctgctcagagtgaaataatgaaggtggtcaacctgaagcaagccattttgcaagcctggaaggagcgctggagtgactaccaatgggcaatcaacatgaagaaattctttcctaaaggagccacctgggatattctcaacctggcagatgcgttactagagcaggccatgattggaccatcccccaatcctctcatcttgtcctacctgaagtatgccattagttcccagatggtgtcctactcttctgtcctcacagccatcagtaagtttgatgacttttctcgggacctgtgtgtccaggcattgctggacatcatggacatgttttgtgaccgtctgagctgtcacggcaaagcagaggaatgcatcggactgtgccgagcccttcttagcgccctccactggctgctgcgctgcacggcagcctctgcagagcggctgcgggaggggctggaggccggcactccagccgctggggagaagcagcttgccatgtgccttcagcgcctggagaaaaccctcagcagcaccaagaaccgggccctgctgcacatcgccaaactagaggaggcctcttcttggactgccatcgagcattctctcttgaaacttggagagatcctggccaatctcagcaacccgcagctccggagtcaggccgagcagtgtggcaccctcattaggagcatccccacgatgctgtctgtgcatgcggagcagatgcacaagaccggcttccccactgtccacgccgtgatcctgctcgagggcaccatgaacctgacaggcgagacgcagtccctggtggagcagctgacgatggtgaagcgcatgcagcatatccccaccccactttttgtcctggagatctggaaagcttgcttcgtggggctcattgagtctcccgagggtacggaggagctcaagtggacagctttcactttcctcaagattccacaggttttggtgaagttgaagaagtactctcatggagacaaggacttcactgaggatgtcaactgtgcttttgagttcctgctgaagctcacccccttgttggacaaagctgaccagcgctgcaactgtgactgtacaaacttcctgctccaagaatgtggcaagcaggggcttctgtctgaggccagcgtcaacaaccttatggctaagcgcaaagcggaccgagagcacgcaccccagcagaaatcgggagagaatgccaacatccagcccaacatccagctgatcctccgggcggagcccactgtcacaaacatcctcaagacgatggatgcagaccactctaagtcaccggagggactgctgggagtcctgggccacatgctgtccgggaagagtctggacttgctgctggctgccgccgccgccactggaaagctgaaatccttcgcccggaaattcatcaatttgaatgaattcacaacctatggcagcgaagaaagcaccaaaccggcctccgtccgggccctgctgtttgacatctccttcctcatgctgtgccatgtggcccagacctatggttcagaggtgattctgtccgagtcgcgcacaggagctgaggtgcccttcttcgagacctggatgcagacctgcatgcctgaggagggcaagatcctgaaccctgaccacccctgcttccgccccgactccaccaaagtggagtccctggtggccctgctcaacaactcctcggagatgaagctagtgcagatgaagtggcatgaggcctgtctcagcatctcagccgccatcttggaaatcctcaatgcctgggagaatggggtcctggccttcgagtccatccagaaaatcactgataacatcaaagggaaggtatgcagtctggcggtgtgtgctgtggcttggcttgtggcccacgtccggatgctggggctggatgagcgtgagaagtcgctgcagatgatccgccagctggcagggccactgtttagtgagaacaccctgcagttctacaatgagagggtggtgatcatgaactcgatcctggagcgcatgtgtgccgacgtgctgcagcagacagccacgcagatcaagtttccctccaccggggtggacacaatgccctactggaacctgctgccccccaagcggcccatcaaagaggtgctgacggacatttttgccaaggtgctggagaagggctgggtggacagccgctccatccacatctttgacaccctgctgcacatgggcggcgtctactggttctgcaacaacctgattaaggagctgctgaaggagacgcggaaggagcacacgctgcgggcagtggagctgctctactccatcttctgcctggacatgcagcaagtgaccctggtcctgctgggccacatcctacctggcctgctcactgactcctccaagtggcacagcctcatggaccccccgggcactgctcttgccaagctggccgtgtggtgtgccctcagttcctactcctcccacaagggacaggcgtccacccgccagaagaagagacaccgcgaagacattgaggattatatcagcctcttccccctggacgatgtgcagccttcgaagttgatgcgactgctgagctctaatgaggacgatgccaacatcctttcgagccccacagaccgatccatgagcagctccctctcagcctctcagctccacacggtcaacatgcgggaccctctgaaccgagtcctggccaacctgttcctgctcatctcctccatcctggggtctcgcaccgctggcccccacacccagttcgtgcagtggttcatggaggagtgtgtggactgcctggagcagggtggccgtggcagcgtcctgcagttcatgcccttcaccaccgtgtcggaactggtgaaggtgtcagccatgtccagccccaaggtggttctggccatcacggacctcagcctgcccctgggccgccaggtggctgctaaagccattgctgcactctgaggggcttggcatggccgcagtgggggctggggactggcgcagccccaggcgcctccaagggaagcagtgaggaaagatgaggcatcgtgcctcacatccgctccacatggtgcaagagcctctagcggcttccagttccccgctcctgactcctgacctccaggatgtctcccggtttcttctttcaaaatttcctctccatctgctggcacctgaggagagtgagcagcctggaccacaagcccagtggtcacccctgtgtgcgcccgccccagcccaggagtagtcttacctctgaggaactttctagatgcaaagtgtgtatgtgtgtgtgtgtgtgtgtgtgtgtgtgtttgtgtgtattttgtaatatgtgagggaaatctaccttcgttcatgtataaataaagctcctcgtggctccctt

SEQ ID NO: 17402 - DNA, 888 bp, Homo sapiens
  source 1..888: mol_type = unassigned DNA
caacctgattaaggagctgctgaaggagacgcggaaggagcacacgctgcgggcagtggagctgctctactccatcttctgcctggacatgcagcaagtgaccctggtcctgctgggccacatcctacctggcctgctcactgactcctccaagtggcacagcctcatggaccccccgggcactgctcttgccaagctggccgtgtggtgtgccctcagttcctactcctcccacaagggacaggcgtccacccgccagaagaagagacaccgcgaagacattgaggattatatcagcctcttccccctggacgatgtgcagccttcgaagttgatgcgactgctgagctctaatgaggacgatgccaacatcctttcgagccccaggtcttctctgggctctccatgtaccagttacctccgatgggtgaaggtcgggttggggcatccccggggagcaccacttttgcactcggcaggctgtttcccagcgctccatctgctccgtcccacagcagaccgatccatgagcagctccctctcagcctctcagctccacacggtcaacatgcgggaccctctgaaccgagtcctggccaacctgttcctgctcatctcctccatcctggggtctcgcaccgctggcccccacacccagttcgtgcagtggttcatggaggagtgtgtggactgcctggagcagggtggccgtggcagcgtcctgcagttcatgcccttcaccaccgtgtcggaactggtgaaggtgtcagccatgtccagccccaaggtggttctggccatcacggacctcagcctgcccctgggccgccaggtggctgctaaagccattgctgcactctgaggggcttggcatggccgcagtggggg

SEQ ID NO: 17403 - DNA, 994 bp, Homo sapiens
  source 1..994: mol_type = unassigned DNA
ggcgatgcctaccacctagaactggattgtgcgctccatttctttcacctcaaagctggccgccaccgctgccacctgctcagagtgaaataatgaaggtggtcaacctgaagcaagccattttgcaagcctggaaggagcgctggagtgactaccaatgggcaatcaacatgaagaaattctttcctaaaggagccacctgggatattctcaacctggcagatgcgttactagagcaggccatgattggaccatcccccaatcctctcatcttgtcctacctgaagtatgccattagttcccagatggtgtcctactcttctgtcctcacagccatcagtaagtttgatgacttttctcgggacctgtgtgtccaggcattgctggacatcatggacatgttttgtgaccgtctgagctgtcacggcaaagcagaggaatgcatcggactgtgccgagcccttcttagcgccctccactggctgctgcgctgcacggcagcctctgcagagcggctgcgggaggggctggaggccggcactccagccgctggggagaagcagcttgccatgtgccttcagcgcctggagaaaaccctcagcagcaccaagaaccgggccctgctgcacatcgccaaactagaggaggcctcattgcacacatcccagggacttgggcagggtggcacccgagccaatcaaccaacagcttcttggactgccatcgagcattctctcttgaaacttggagagatcctggccaatctcagcaacccgcagctccggagtcaggccgagcagtgtggcaccctcattaggagcatccccacgatgctgtctgtgcatgcggagcagatgcacaagaccggcttccccactgtccacgccgtgatcctgctcgagggcaccatgaacctgacaggcgagacgcagtccctggtggagcagctgacgatggtgaagcgcatgcagcatatccccaccccactttttgt

SEQ ID NO: 17404 - DNA, 3334 bp, Homo sapiens
  source 1..3334: mol_type = unassigned DNA
aagtgccaaaatggcgatgcctaccacctagaactggattgtgcgctggccgccaccgctgccacctgctcagagtgaaataatgaaggtggtcaacctgaagcaagccattttgcaagcctggaaggagcgctggagtgactaccaatgggcaatcaacatgaagaaattctttcctaaaggagccacctgggatattctcaacctggcagatgcgttactagagcaggccatgattggaccatcccccaatcctctcatcttgtcctacctgaagtatgccattagttcccagatggtgtcctactcttctgtcctcacagccatcagtaagctgtcacggcaaagcagaggaatgcatcggactgtgccgagcccttcttagcgccctccactggctgctgcgctgcacggcagcctctgcagagcggctgcgggaggggctggaggccggcactccagccgctggggagaagcagcttgccatgtgccttcagcgcctggagaaaaccctcagcagcaccaagaaccgggccctgctgcacatcgccaaactagaggaggcctcttcttggactgccatcgagcattctctcttgaaacttggagagatcctggccaatctcagcaacccgcagctccggagtcaggccgagcagtgtggcaccctcattaggagcatccccacgatgctgtctgtgcatgcggagcagatgcacaagaccggcttccccactgtccacgccgtgatcctgctcgagggcaccatgaacctgacaggcgagacgcagtccctggtggagcagctgacgatggtgaagcgcatgcagcatatccccaccccactttttgtcctggagatctggaaagcttgcttcgtggggctcattgagtctcccgagggtacggaggagctcaagtggacagctttcactttcctcaagattccacaggttttggtgaagttgaagaagtactctcatggagacaaggacttcactgaggatgtcaactgtgcttttgagttcctgctgaagctcacccccttgttggacaaagctgaccagcgctgcaactgtgactgtacaaacttcctgctccaagaatgtggcaagcaggggcttctgtctgaggccagcgtcaacaaccttatggctaagcgcaaagcggaccgagagcacgcaccccagcagaaatcgggagagaatgccaacatccagcccaacatccagctgatcctccgggcggagcccactgtcacaaacatcctcaagacgatggatgcagaccactctaagtcaccggagggactgctgggagtcctgggccacatgctgtccgggaagagtctggacttgctgctggctgccgccgccgccactggaaagctgaaatccttcgcccggaaattcatcaatttgaatgaattcacaacctatggcagcgaagaaagcaccaaaccggcctccgtccgggccctgctgtttgacatctccttcctcatgctgtgccatgtggcccagacctatggttcagaggtgattctgtccgagtcgcgcacaggagctgaggtgcccttcttcgagacctggatgcagacctgcatgcctgaggagggcaagatcctgaaccctgaccacccctgcttccgccccgactccaccaaagtggagtccctggtggccctgctcaacaactcctcggagatgaagctagtgcagatgaagtggcatgaggcctgtctcagcatctcagccgccatcttggaaatcctcaatgcctgggagaatggggtcctggccttcgagtccatccagaaaatcactgataacatcaaagggaaggtatgcagtctggcggtgtgtgctgtggcttggcttgtggcccacgtccggatgctggggctggatgagcgtgagaagtcgctgcagatgatccgccagctggcagggccactgtttagtgagaacaccctgcagttctacaatgagagggtggtgatcatgaactcgatcctggagcgcatgtgtgccgacgtgctgcagcagacagccacgcagatcaagtttccctccaccggggtggacacaatgccctactggaacctgctgccccccaagcggcccatcaaagaggtgctgacggacatttttgccaaggtgctggagaagggctgggtggacagccgctccatccacatctttgacaccctgctgcacatgggcggcgtctactggttctgcaacaacctgattaaggagctgctgaaggagacgcggaaggagcacacgctgcgggcagtggagctgctctactccatcttctgcctggacatgcagcaagtgaccctggtcctgctgggccacatcctacctggcctgctcactgactcctccaagtggcacagcctcatggaccccccgggcactgctcttgccaagctggccgtgtggtgtgccctcagttcctactcctcccacaagggacaggcgtccacccgccagaagaagagacaccgcgaagacattgaggattatatcagcctcttccccctggacgatgtgcagccttcgaagttgatgcgactgctgagctctaatgaggacgatgccaacatcctttcgagccccacagaccgatccatgagcagctccctctcagcctctcagctccacacggtcaacatgcgggaccctctgaaccgagtcctggccaacctgttcctgctcatctcctccatcctggggtctcgcaccgctggcccccacacccagttcgtgcagtggttcatggaggagtgtgtggactgcctggagcagggtggccgtggcagcgtcctgcagttcatgcccttcaccaccgtgtcggaactggtgaaggtgtcagccatgtccagccccaaggtggttctggccatcacggacctcagcctgcccctgggccgccaggtggctgctaaagccattgctgcactctgaggggcttggcatggccgcagtgggggctggggactggcgcagccccaggcgcctccaagggaagcagtgaggaaagatgaggcatcgtgcctcacatccgctccacatggtgcaagagcctctagcggcttccagttccccgctcctgactcctgacctccaggatgtctcccggtttcttctttcaaaatttcctctccatctgctggcacctgaggagagtgagcagcctggaccacaagcccagtggtcacccctgtgtgcgcccgccccagcccaggagtagtcttacctctgaggaactttctagatgcaaagtgtgtatgtgtgtgtgtgtgtgtgtgtgtgtgtgtttg

SEQ ID NO: 17405 - DNA, 1986 bp, Homo sapiens
  source 1..1986: mol_type = unassigned DNA
aagtgccaaaatggcgatgcctaccacctagaactggattgtgcgctccatttctttcacctcaaagctggccgccaccgctgccacctgctcagagtgaaataatgaaggtggtcaacctgaagcaagccattttgcaagcctggaaggagcgctggagtgactaccaatgggcaatcaacatgaagaaattctttcctaaaggagccacctgggatattctcaacctggcagatgcgttactagagcaggccatgattggaccatcccccaatcctctcatcttgtcctacctgaagtatgccattagttcccagatggtgtcctactcttctgtcctcacagccatcatggaaatcctcaatgcctgggagaatggggtcctggccttcgagtccatccagaaaatcactgataacatcaaagggaaggtatgcagtctggcggtgtgtgctgtggcttggcttgtggcccacgtccggatgctggggctggatgagcgtgagaagtcgctgcagatgatccgccagctggcagggccactgtttagtgagaacaccctgcagttctacaatgagagggtggtgatcatgaactcgatcctggagcgcatgtgtgccgacgtgctgcagcagacagccacgcagatcaagtttccctccaccggggtggacacaatgccctactggaacctgctgccccccaagcggcccatcaaagaggtgctgacggacatttttgccaaggtgctggagaagggctgggtggacagccgctccatccacatctttgacaccctgctgcacatgggcggcgtctactggttctgcaacaacctgattaaggagctgctgaaggagacgcggaaggagcacacgctgcgggcagtggagctgctctactccatcttctgcctggacatgcagcaagtgaccctggtcctgctgggccacatcctacctggcctgctcactgactcctccaagtggcacagcctcatggaccccccgggcactgctcttgccaagctggccgtgtggtgtgccctcagttcctactcctcccacaagggacaggcgtccacccgccagaagaagagacaccgcgaagacattgaggattatatcagcctcttccccctggacgatgtgcagccttcgaagttgatgcgactgctgagctctaatgaggacgatgccaacatcctttcgagccccacagaccgatccatgagcagctccctctcagcctctcagctccacacggtcaacatgcgggaccctctgaaccgagtcctggccaacctgttcctgctcatctcctccatcctggggtctcgcaccgctggcccccacacccagttcgtgcagtggttcatggaggagtgtgtggactgcctggagcagggtggccgtggcagcgtcctgcagttcatgcccttcaccaccgtgtcggaactggtgaaggtgtcagccatgtccagccccaaggtggttctggccatcacggacctcagcctgcccctgggccgccaggtggctgctaaagccattgctgcactctgaggggcttggcatggccgcagtgggggctggggactggcgcagccccaggcgcctccaagggaagcagtgaggaaagatgaggcatcgtgcctcacatccgctccacatggtgcaagagcctctagcggcttccagttccccgctcctgactcctgacctccaggatgtctcccggtttcttctttcaaaatttcctctccatctgctggcacctgaggagagtgagcagcctggaccacaagcccagtggtcacccctgtgtgcgcccgccccagcccaggagtagtcttacctctgaggaactttctagatgcaaagtgtgtatgtgtgtgtgtgtgtgtgtgtgtgtgtgtttgtgtgtattttgtaatatgtgagggaaatctaccttcgttcatgtataaataaagctcctcgtggc

SEQ ID NO: 17406 - DNA, 2961 bp, Homo sapiens
  source 1..2961: mol_type = unassigned DNA
gacaagtgccaaaatggcgatgcctaccacctagaactggattgtgcgatgcgttactagagcaggccatgattggaccatcccccaatcctctcatcttgtcctacctgaagtatgccattagttcccagatggtgtcctactcttctgtcctcacagccatcagtaagtttgatgacttttctcgggacctgtgtgtccaggcattgctggacatcatggacatgttttgtgaccgtctgagctgtcacggcaaagcagaggaatgcatcggactgtgccgagcccttcttagcgccctccactggctgctgcgctgcacggcagcctctgcagagcggctgcgggaggggctggaggccggcactccagccgctggggagaagcagcttgccatgtgccttcagcgcctggagaaaaccctcagcagcaccaagaaccgggccctgctgcacatcgccaaactagaggaggcctcttcttggactgccatcgagcattctctcttgaaacttggagagatcctggccaatctcagcaacccgcagctccggagtcaggccgagcagtgtggcaccctcattaggagcatccccacgatgctgtctgtgcatgcggagcagatgcacaagaccggcttccccactgtccacgccgtgatcctgctcgagggcaccatgaacctgacaggcgagacgcagtccctggtggagcagctgacgatggtgaagcgcatgcagcatatccccaccccactttttgtcctggagatctggaaagcttgcttcgtggggctcattgagtctcccgagggtacggaggagctcaagtggacagctttcactttcctcaagattccacaggttttggtgaagttgaagaagtactctcatggagacaaggacttcactgaggatgtcaactgtgcttttgagttcctgctgaagctcacccccttgttggacaaagctgaccagcgctgcaactgtgactgtacaaacttcctgctccaagaatgtggcaagcaggggcttctgtctgaggccagcgtcaacaaccttatggctaagcgcaaagcggaccgagagcacgcaccccagcagaaatcgggagagaatgccaacatccagcccaacatccagctgatcctccgggcggagcccactgtcacaaacatcctcaagacgatggatgcagaccactctaagtcaccggagggactgctgggagtcctgggccacatgctgtccgggaagagtctggacttgctgctggctgccgccgccgccactggaaagctgaaatccttcgcccggaaattcatcaatttgaatgaattcacaacctatggcagcgaagaaagcaccaaaccggcctccgtccgggccctgctgtttgacatctccttcctcatgctgtgccatgtggcccagacctatggttcagaggtgattctgtccgagtcgcgcacaggagctgaggtgcccttcttcgagacctggatgcagacctgcatgcctgaggagggcaagatcctgaaccctgaccacccctgcttccgccccgactccaccaaagtggagtccctggtggccctgctcaacaactcctcggagatgaagctagtgcagatgaagtggcatgaggcctgtctcagcatctcagccgccatcttggaaatcctcaatgcctgggagaatggggtcctggccttcgagtccatccagaaaatcactgataacatcaaagggaaggtatgcagtctggcggtgtgtgctgtggcttggcttgtggcccacgtccggatgctggggctggatgagcgtgagaagtcgctgcagatgatccgccagctggcagggccactgtttagtgagaacaccctgcagttctacaatgagagggtggtgatcatgaactcgatcctggagcgcatgtgtgccgacgtgctgcagcagacagccacgcagatcaagtttccctccaccggggtggacacaatgccctactggaacctgctgccccccaagcggcccatcaaagaggtgctgacggacatttttgccaaggtgctggagaagggctgggtggacagccgctccatccacatctttgacaccctgctgcacatgggcggcgtctactggttctgcaacaacctgattaaggagctgctgaaggagacgcggaaggagcacacgctgcgggcagtggagctgctctactccatcttctgcctggacatgcagcaagtgaccctggtcctgctgggccacatcctacctggcctgctcactgactcctccaagtggcacagcctcatggaccccccgggcactgctcttgccaagctggccgtgtggtgtgccctcagttcctactcctcccacaagggacaggcgtccacccgccagaagaagagacaccgcgaagacattgaggattatatcagccccaaggtggttctggccatcacggacctcagcctgcccctgggccgccaggtggctgctaaagccattgctgcactctgaggggcttggcatggccgcagtgggggctggggactggcgcagccccaggcgcctccaagggaagcagtgaggaaagatgaggcatcgtgcctcacatccgctccacatggtgcaagagcctctagcggcttccagttccccgctcctgactcctgacctccaggatgtctcccggtttcttctttcaaaatttcctctccatctgctggcacctgaggagagtgagcagcctggaccacaagcccagtggtcacccctgtgtgcgcccgccccagcccaggagtagtcttacctctgaggaactttctagatgcaaagtgtgtatgtgtgtgtgtgtgtgtgtgtgtgtgtgtttgtgtgtattttgtaatatgtgagggaaatctaccttcgttcatgtataaataaagctcctcgtggctccctt

SEQ ID NO: 17407 - DNA, 2256 bp, Homo sapiens
  source 1..2256: mol_type = unassigned DNA
aagtgccaaaatggcgatgcctaccacctagaactggattgtgcgctccatttctttcacctcaaagctggccgccaccgctgccacctgctcagagtgaaataatgaaggtggtcaacctgaagcaagccattttgcaagcctggaaggagcgctggagtgactaccaatgggcaatcaacatgaagaaattctttcctaaaggagccacctgggatattctcaacctggcagatgcgttactagagcaggccatgattggaccatcccccaatcctctcatcttgtcctacctgaagtatgccattagttcccagatggtgtcctactcttctgtcctcacagccatcagtaagtttgatgacttttctcgggacctgtgtgtccaggcattgctggacatcatggacatgttttgtgaccgtctgagctgtcacggcaaagcagaggaatgcatcggactgtgccgagcccttcttagcgccctccactggctgctgcgctgcacggcagcctctgcagagcggctgcgggaggggctggaggccggcactccagccgctggggagaagcagcttgccatgtgccttcagcgcctggagaaaaccctcagcagcaccaagaaccgggccctgctgcacatcgccaaactagaggaggcctcttcttggactgccatcgagcattctctcttgaaacttggagagatcctggccaatctcagcaacccgcagctccggagtcaggccgagcagtgtggcaccctcattaggagcatccccacgatgctgtctgtgcatgcggagcagatgcacaagaccggcttccccactgtccacgccgtgatcctgctcgagggcaccatgaacctgacaggcgagacgcagtccctggtggagcagcagacagccacgcagatcaagtttccctccaccggggtggacacaatgccctactggaacctgctgccccccaagcggcccatcaaagaggtgctgacggacatttttgccaaggtgctggagaagggctgggtggacagccgctccatccacatctttgacaccctgctgcacatgggcggcgtctactggttctgcaacaacctgattaaggagctgctgaaggagacgcggaaggagcacacgctgcgggcagtggagctgctctactccatcttctgcctggacatgcagcaagtgaccctggtcctgctgggccacatcctacctggcctgctcactgactcctccaagtggcacagcctcatggaccccccgggcactgctcttgccaagctggccgtgtggtgtgccctcagttcctactcctcccacaagggacaggcgtccacccgccagaagaagagacaccgcgaagacattgaggattatatcagcctcttccccctggacgatgtgcagccttcgaagttgatgcgactgctgagctctaatgaggacgatgccaacatcctttcgagccccacagaccgatccatgagcagctccctctcagcctctcagctccacacggtcaacatgcgggaccctctgaaccgagtcctggccaacctgttcctgctcatctcctccatcctggggtctcgcaccgctggcccccacacccagttcgtgcagtggttcatggaggagtgtgtggactgcctggagcagggtggccgtggcagcgtcctgcagttcatgcccttcaccaccgtgtcggaactggtgaaggtgtcagccatgtccagccccaaggtggttctggccatcacggacctcagcctgcccctgggccgccaggtggctgctaaagccattgctgcactctgaggggcttggcatggccgcagtgggggctggggactggcgcagccccaggcgcctccaagggaagcagtgaggaaagatgaggcatcgtgcctcacatccgctccacatggtgcaagagcctctagcggcttccagttccccgctcctgactcctgacctccaggatgtctcccggtttcttctttcaaaatttcctctccatctgctggcacctgaggagagtgagcagcctggaccacaagcccagtggtcacccctgtgtgcgcccgccccagcccaggagtagtcttacctctgaggaactttctagatgcaaagtgtgtatgtgtgtgtgtgtgtgtgtgtgtgtgtgtttgtgtgtattttgtaatatgtgagggaaatctaccttcgttcatgtataaataaagctcctcgtggc

SEQ ID NO: 17408 - DNA, 3321 bp, Homo sapiens
  source 1..3321: mol_type = unassigned DNA
aagtgccaaaatggcgatgcctaccacctagaactggattgtgcgctccatttctttcacctcaaagctggccgccaccgctgccacctgctcagagtgaaataatgaaggtggtcaacctgaagcaagccattttgcaagcctggaaggagcgctggagtgactaccaatgggcaatcaacatgaagaaattctttcctaaaggagccacctgggatattctcaacctggcagatgcgttactagagcaggccatgattggaccatcccccaatcctctcatcttgtcctacctgaagtatgccattagttcccagatggtgtcctactcttctgtcctcacagccatcatgtgccttcagcgcctggagaaaaccctcagcagcaccaagaaccgggccctgctgcacatcgccaaactagaggaggcctcattgcacacatcccagggacttgggcagggtggcacccgagccaatcaaccaacagcttcttggactgccatcgagcattctctcttgaaacttggagagatcctggccaatctcagcaacccgcagctccggagtcaggccgagcagtgtggcaccctcattaggagcatccccacgatgctgtctgtgcatgcggagcagatgcacaagaccggcttccccactgtccacgccgtgatcctgctcgagggcaccatgaacctgacaggcgagacgcagtccctggtggagcagctgacgatggtgaagcgcatgcagcatatccccaccccactttttgtcctggagatctggaaagcttgcttcgtggggctcattgagtctcccgagggtacggaggagctcaagtggacagctttcactttcctcaagattccacaggttttggtgaagttgaagaagtactctcatggagacaaggacttcactgaggatgtcaactgtgcttttgagttcctgctgaagctcacccccttgttggacaaagctgaccagcgctgcaactgtgactgtacaaacttcctgctccaagaatgtggcaagcaggggcttctgtctgaggccagcgtcaacaaccttatggctaagcgcaaagcggaccgagagcacgcaccccagcagaaatcgggagagaatgccaacatccagcccaacatccagctgatcctccgggcggagcccactgtcacaaacatcctcaagacgatggatgcagaccactctaagtcaccggagggactgctgggagtcctgggccacatgctgtccgggaagagtctggacttgctgctggctgccgccgccgccactggaaagctgaaatccttcgcccggaaattcatcaatttgaatgaattcacaacctatggcagcgaagaaagcaccaaaccggcctccgtccgggccctgctgtttgacatctccttcctcatgctgtgccatgtggcccagacctatggttcagaggtgattctgtccgagtcgcgcacaggagctgaggtgcccttcttcgagacctggatgcagacctgcatgcctgaggagggcaagatcctgaaccctgaccacccctgcttccgccccgactccaccaaagtggagtccctggtggccctgctcaacaactcctcggagatgaagctagtgcagatgaagtggcatgaggcctgtctcagcatctcagccgccatcttggaaatcctcaatgcctgggagaatggggtcctggccttcgagtccatccagaaaatcactgataacatcaaagggaaggtatgcagtctggcggtgtgtgctgtggcttggcttgtggcccacgtccggatgctggggctggatgagcgtgagaagtcgctgcagatgatccgccagctggcagggccactgtttagtgagaacaccctgcagttctacaatgagagggtggtgatcatgaactcgatcctggagcgcatgtgtgccgacgtgctgcagcagacagccacgcagatcaagtttccctccaccggggtggacacaatgccctactggaacctgctgccccccaagcggcccatcaaagaggtgctgacggacatttttgccaaggtgctggagaagggctgggtggacagccgctccatccacatctttgacaccctgctgcacatgggcggcgtctactggttctgcaacaacctgattaaggagctgctgaaggagacgcggaaggagcacacgctgcgggcagtggagctgctctactccatcttctgcctggacatgcagcaagtgaccctggtcctgctgggccacatcctacctggcctgctcactgactcctccaagtggcacagcctcatggaccccccgggcactgctcttgccaagctggccgtgtggtgtgccctcagttcctactcctcccacaagggacaggcgtccacccgccagaagaagagacaccgcgaagacattgaggattatatcagcctcttccccctggacgatgtgcagccttcgaagttgatgcgactgctgagctctaatgaggacgatgccaacatcctttcgagccccacagaccgatccatgagcagctccctctcagcctctcagctccacacggtcaacatgcgggaccctctgaaccgagtcctggccaacctgttcctgctcatctcctccatcctggggtctcgcaccgctggcccccacacccagttcgtgcagtggttcatggaggagtgtgtggactgcctggagcagggtggccgtggcagcgtcctgcagttcatgcccttcaccaccgtgtcggaactggtgaaggtgtcagccatgtccagccccaaggtggttctggccatcacggacctcagcctgcccctgggccgccaggtggctgctaaagccattgctgcactctgaggggcttggcatggccgcagtgggggctggggactggcgcagccccaggcgcctccaagggaagcagtgaggaaagatgaggcatcgtgcctcacatccgctccacatggtgcaagagcctctagcggcttccagttccccgctcctgactcctgacctccaggatgtctcccggtttcttctttcaaaatttcctctccatctgctggcacctgaggagagtgagcagcctggaccacaagcccagtggtcacccctgtgtgcgcccgccccagcccaggagtagtcttacctctgaggaactttctagatgcaaagtgtgtatgtgtgtgtgtgtgtgtgtgtgtgtgtgtttgtgtgtattttgtaatatgtgagggaaatctaccttcgttcatgtataaataaagctcctcgtggc

SEQ ID NO: 17409 - DNA, 1047 bp, Homo sapiens
  source 1..1047: mol_type = unassigned DNA
aagtgccaaaatggcgatgcctaccacctagaactggattgtgcgctccatttctttcacctcaaagctggccgccaccgctgccacctgctcagagtgaaataatgaaggtggtcaacctgaagcaagccattttgcaagcctggaaggagcgctggagtgactaccaatgggcaatcaacatgaagaaattctttcctaaaggagccacctgggatattctcaacctggcagatgcgttactagagcaggccatgattggaccatcccccaatcctctcatcttgtcctacctgaagtatgccattagttcccagatggtgtcctactcttctgtcctcacagccatcagtaagtttgatgacttttctcgggacctgtgtgtccaggcattgctggacatcatggacatgttttgtgaccgtctgagctgtcacggcaaagcagaggaatgcatcggactgtgccgagcccttcttagcgccctccacttcatgcccttcaccaccgtgtcggaactggtgaaggtgtcagccatgtccagccccaaggtggttctggccatcacggacctcagcctgcccctgggccgccaggtggctgctaaagccattgctgcactctgaggggcttggcatggccgcagtgggggctggggactggcgcagccccaggcgcctccaagggaagcagtgaggaaagatgaggcatcgtgcctcacatccgctccacatggtgcaagagcctctagcggcttccagttccccgctcctgactcctgacctccaggatgtctcccggtttcttctttcaaaatttcctctccatctgctggcacctgaggagagtgagcagcctggaccacaagcccagtggtcacccctgtgtgcgcccgccccagcccaggagtagtcttacctctgaggaactttctagatgcaaagtgtgtatgtgtgtgtgtgtgtgtgtgtgtgtgtgtttgtgtgtattttgtaatatgtgagggaaatctaccttcgttcatgtataaataaagctcctcgtggc

SEQ ID NO: 17410 - DNA, 1524 bp, Homo sapiens
  source 1..1524: mol_type = unassigned DNA
aagtgccaaaatggcgatgcctaccacctagaactggattgtgcgctccatttctttcacctcaaagctggccgccaccgctgccacctgctcagagtgaaataatgaaggtggtcaacctgaagcaagccattttgcaagcctggaaggagcgctggagtgactaccaatgggcaatcaacatgaagaaattctttcctaaaggagccacctgggatattctcaacctggcagatgcgttactagagcaggccatgattggaccatcccccaatcctctcatcttgtcctacctgaagtatgccattagttcccagatggtgtcctactcttctgtcctcacagccatcagtaagtttgatgacttttctcgggacctgtgtgtccaggcattgctggacatcatggacatgttttgtgaccgtctgagctgtcacggcaaagcagaggaatgcatcggactgtgccgagcccttcttagcgccctccactggctgctgcgctgcacggcagcctctgcagagcggctgcgggaggggctggaggccggcactccagccgctggggagaagcagcttgccatgtgccttcagcgcctggagaaaaccctcagcagcaccaagaaccgggccctgctgcacatcgccaaactagaggaggcctcttcttggactgccatcgagcattctctcttgaaacttggagagatcctggccaatctcagcaacccgcagctccggagtcaggccgagcagtgtggcaccctcattaggagcatccccacgatgctgtctgtgcatgcggagcagatgcacaagaccggcttccccactgtccacgccgtgatcctgctcgagggcaccatgaacctgacaggcgagacgcagtccctggtggagcagctgacgatggtgaagcgcatgcagcatatccccaccccactttttggccgtggcagcgtcctgcagttcatgcccttcaccaccgtgtcggaactggtgaaggtgtcagccatgtccagccccaaggtggttctggccatcacggacctcagcctgcccctgggccgccaggtggctgctaaagccattgctgcactctgaggggcttggcatggccgcagtgggggctggggactggcgcagccccaggcgcctccaagggaagcagtgaggaaagatgaggcatcgtgcctcacatccgctccacatggtgcaagagcctctagcggcttccagttccccgctcctgactcctgacctccaggatgtctcccggtttcttctttcaaaatttcctctccatctgctggcacctgaggagagtgagcagcctggaccacaagcccagtggtcacccctgtgtgcgcccgccccagcccaggagtagtcttacctctgaggaactttctagatgcaaagtgtgtatgtgtgtgtgtgtgtgtgtgtgtgtgtgtttgtgtgtattttgtaatatgtgagggaaatctaccttcgttcatgtataaataaagctcctcgtggc

SEQ ID NO: 17411 - DNA, 2341 bp, Homo sapiens
  source 1..2341: mol_type = unassigned DNA
atttctgctcattccgcggcgtcggctgcggctgcagtggtggtggcgggtaccgcacggggtatggtccccgggtccgagggcccggcccgcgccgggagcgtggtggccgacgtggtgtttgtgattgagggtacggccaacctgggaccctacttcgaggggctccgcaagcactacctgctcccggccatcgagtattttaatggtggtcctcctgctgagacggacttcgggggagactatggggggacccagtacagcctcgtggtgttcaacacagtggactgcgctcccgagtcctacgtacaatgtcacgctcccaccagcagcgcctatgagtttgtcacctggctcgatggcattaagttcatgggcgggggtggtgagagctgcagcctcatcgcggaaggactcagcacagccttgcagctgtttgatgacttcaagaagatgcgcgagcagattggccagacgcaccgggtctgcctcctcatctgcaactcacccccatacttgttgcctgctgttgagagcaccacgtactctggatgcacaactgagaatcttgtgcagcagattggggagcgggggatccacttctccattgtgtctccccggaagctgcctgcgcttcggcttctgtttgagaaggcagcccccccggccttgctggagccgctgcagcctccgacagatgtgagccaggacccgaggcacatggtgctggttcggggactcgtgctgcctgttgggggtggctcagccccaggccccctccagtcaaagcagccagtccccctgcctcccgccgcaccctcaggtgccactctctcagcagccccccagcagcctctgccccccgtccccccgcagtaccaggttcccgggaacctgagtgcagctcaggtggccgcgcagaatgcagtggaggctgccaagaaccagaaggctgggctgggccctcgcttctcgcccatcacccctctccaacaagctgctcccggagtgggtccccccttcagccaggccccagctccccaactacccccaggaccccctggcgcccccaagccaccacctgcttcccagcccagtctggtctccactgtggcccctggctccggcctggctcccacggcacagcccggggcaccgtccatggcaggcactgtggccccaggaggggtgagcggcccttccccagcccagctgggagccccagccctcggtgggcagcagtcagtctccaataagcttctggcctggagcggggtcctggagtggcaagagaaacccaaacctgcctcagtggatgccaacaccaagctgacgcggtcactgccctgccaggtctacgtgaatcatggcgagaacctgaagacggagcagtggccccagaagctgatcatgcagctcatcccccagcagctgctgaccaccctgggccctttgttccggaactcaaggatggtccagttccatttcaccaacaaggacctggagtctctcaaaggcctctaccgcatcatgggcaacggcttcgcgggctgcgtgcacttcccccacacggcgccctgtgaggtgcgcgtgctcatgctcctgtactcgtccaagaagaagatcttcatgggcctcatcccctacgaccagagcggcttcgtcaacggcatccggcaggtcatcaccaaccacaagcaggtccagcagcagaagctggagcagcagcagcgaggaatggggggacagcaggcacccccagggctggggcccattctggaggaccaagccaggccctcacagaatctgctccagctccgcccaccgcagccccagcctcagggtaccgtaggggcctctggggccacggggcagccccagccccaaggtactgcccagcccccgccaggtgcccctcaaggccctcctggagcagcttctggcccaccccctcctggacccatccttcggccccagaaccctggggccaaccctcagctgcgaagcctcctcctcaacccaccaccgccgcagactggggtgcccccaccccaggcctccctccaccacctccagccaccaggggctcctgcgctgctgcctccgccgcaccagggcctggggcagccccagttggggcccccactcctgcatccaccacctgcccagtcctggcccgcacaacttccccctcgggctccactgccaggtcagatgctgctgagcgggggtccccggggcccggtcccccagccgggcctgcagcccagcgtcatggaggacgacatcctcatggatctcatctgaatccccaacacccaataaagttcctttttaacac

SEQ ID NO: 17412 - DNA, 2331 bp, Homo sapiens
  source 1..2331: mol_type = unassigned DNA
atttctgctcattccgcggcgtcggctgcggctgcagtggtggtggcgggtaccgcacggggtatggtccccgggtccgagggcccggcccgcgccgggagcgtggtggccgacgtggtgtttgtgattgagggtacggccaacctgggaccctacttcgaggggctccgcaagcactacctgctcccggccatcgagtattttaatggtggtcctcctgctgagacggacttcgggggagactatggggggacccagtacagcctcgtggtgttcaacacagtggactgcgctcccgagtcctacgtacaatgtcacgctcccaccagcagcgcctatgagtttgtcacctggctcgatggcattaagttcatgggcgggggtggtgagagctgcagcctcatcgcggaaggactcagcacagccttgcagctgtttgatgacttcaagaagatgcgcgagcagattggccagacgcaccgggtctgcctcctcatctgcaactcacccccatacttgttgcctgctgttgagagcaccacgtactctggatgcacaactgagaatcttgtgcagcagattggggagcgggggatccacttctccattgtgtctccccggaagctgcctgcgcttcggcttctgtttgagaaggcagcccccccggccttgctggagccgctgcagcctccgacagatgtgagccaggacccgaggcacatggtgctggttcggggactcgtgctgcctgttgggggtggctcagccccaggccccctccagtcaaagcagccagtccccctgcctcccgccgcaccctcaggtgccactctctcagcagccccccagcagcctctgccccccgtccccccgcagtaccaggttcccgggaacctgagtgcagctcaggtggccgcgcagaatgcagtggaggctgccaagaaccagaaggctgggctgggccctcgcttctcgcccatcacccctctccaacaagctgctcccggagtgggtccccccttcagccaggccccagctccccaactacccccaggaccccctggcgcccccaagccaccacctgcttcccagcccagtctggtctccactgtggcccctggctccggcctggctcccacggcacagcccggggcaccgtccatggcaggcactgtggccccaggaggggtgagcggcccttccccagcccagctgggagccccagccctcggtgggcagcagtcagtctccaataagcttctggcctggagcggggtcctggagtggcaagagaaacccaaacctgcctcagtggatgccaacaccaagctgacgcggtcactgccctgccaggtctacgtgaatcatggcgagaacctgaagacggagcagtggccccagaagctgatcatgcagctcatcccccagcagctgctgaccaccctgggccctttgttccggaactcaaggatggtccagttccatttcaccaacaaggacctggagtctctcaaaggcctctaccgcatcatgggcaacggcttcgcgggctgcgtgcacttcccccacacggcgccctgtgaggtgcgcgtgctcatgctcctgtactcgtccaagaagaagatcttcatgggcctcatcccctacgaccagagcggcttcgtcaacggcatccggcaggtcatcaccaaccacaagcaggtccagcagcagaagctggagcagcagcagcgaggaatggggggacagcaggcacccccagggctggggcccattctggaggaccaagccaggccctcacagaatctgctccagctccgcccaccgcagccccagcctcagggtaccgtaggggcctctggggccacggggcagccccagccccaaggtactgcccagcccccgccaggtgcccctcaaggccctcctggagcagcttctggcccaccccctcctggacccatccttcggccccagaaccctggggccaaccctcagctgcgaagcctcctcctcaacccaccaccgccgcagactggggtgcccccaccccaggcctccctccaccaccacctgcccagtcctggcccgcacaacttccccctcgggctccactgccaggtaaggggacccgggggagggcagaggtctggactgagtgtcccagcagctcctgggctagagcaccaagaccgagtgctcctgggaagtaaagacataggatccaagaatgagggttcccccatccgggcctgcagcccagcgtcatggaggacgacatcctcatggatctcatctgaatccccaacacccaataaagttcctttttaa

SEQ ID NO: 17413 - DNA, 2409 bp, Homo sapiens
  source 1..2409: mol_type = unassigned DNA
atttctgctcattccgcggcgtcggctgcggctgcagtggtggtggcgggtaccgcacggggtatggtccccgggtccgagggcccggcccgcgccgggagcgtggtggccgacgtggtgtttgtgattgagggtacggccaacctgggaccctacttcgaggggctccgcaagcactacctgctcccggccatcgagtattttaatggtggtcctcctgctgagacggacttcgggggagactatggggggacccagtacagcctcgtggtgttcaacacagtggactgcgctcccgagtcctacgtacaatgtcacgctcccaccagcagcgcctatgagtttgtcacctggctcgatggcattaagttcatgggcgggggtggtgagagctgcagcctcatcgcggaaggactcagcacagccttgcagctgtttgatgacttcaagaagatgcgcgagcagattggccagacgcaccgggtctgcctcctcatctgcaactcacccccatacttgttgcctgctgttgagagcaccacgtactctggatgcacaactgagaatcttgtgcagcagattggggagcgggggatccacttctccattgtgtctccccggaagctgcctgcgcttcggcttctgtttgagaaggcagcccccccggccttgctggagccgctgcagcctccgacagatgtgagccaggacccgaggcacatggtgctggttcggggactcgtgctgcctgttgggggtggctcagccccaggccccctccagtcaaagcagccagtccccctgcctcccgccgcaccctcaggtgccactctctcagcagccccccagcagcctctgccccccgtccccccgcagtaccaggttcccgggaacctgagtgcagctcaggtggccgcgcagaatgcagtggaggctgccaagaaccagaaggctgggctgggccctcgcttctcgcccatcacccctctccaacaagctgctcccggagtgggtccccccttcagccaggccccagctccccaactacccccaggaccccctggcgcccccaagccaccacctgcttcccagcccagtctggtctccactgtggcccctggctccggcctggctcccacggcacagcccggggcaccgtccatggcaggcactgtggccccaggaggggtgagcggcccttccccagcccagctgggagccccagccctcggtgggcagcagtcagtctccaataagcttctggcctggagcggggtcctggagtggcaagagaaacccaaacctgcctcagtggatgccaacaccaagctgacgcggtcactgccctgccaggtctacgtgaatcatggcgagaacctgaagacggagcagtggccccagaagctgatcatgcagctcatcccccagcagctgctgaccaccctgggccctttgttccggaactcaaggatggtccagttccatttcaccaacaaggacctggagtctctcaaaggcctctaccgcatcatgggcaacggcttcgcgggctgcgtgcacttcccccacacggcgccctgtgaggtgcgcgtgctcatgctcctgtactcgtccaagaagaagatcttcatgggcctcatcccctacgaccagagcggcttcgtcaacggcatccggcaggtcatcaccaaccacaagcaggtccagcagcagaagctggagcagcagcagcgaggaatggggggacagcaggcacccccagggctggggcccattctggaggaccaagccaggccctcacagaatctgctccagctccgcccaccgcagccccagcctcagggtaccgtaggggcctctggggccacggggcagccccagccccaaggtactgcccagcccccgccaggtgcccctcaaggccctcctggagcagcttctggcccaccccctcctggacccatccttcggccccagaaccctggggccaaccctcagctgcgaagcctcctcctcaacccaccaccgccgcagactggggtgcccccaccccaggcctccctccaccacctccagccaccaggggctcctgcgctgctgcctccgccgcaccagggcctggggcagccccagttggggcccccactcctgcatccaccacctgcccagtcctggcccgcacaacttccccctcgggctccactgccagcggcaaaacgaaagagagaaggagagggccgtgtgtttcgagaaaaatgggagcgagcctatttctttgtggaagtgaagagcatgcctatgtgtttaatatgcaaacaaatcgtgtctgtgttgaaagaatacaacctgaaacgccactatgaatcaaagcatagtaagagctacgaccagtacacagaacagactcga

SEQ ID NO: 17414 - DNA, 1467 bp, Homo sapiens
  source 1..1467: mol_type = unassigned DNA
atggtccccgggtccgagggcccggcccgcgccgggagcgtggtggccgacgtggtgtttgtgattgagggtacggccaacctgggaccctacttcgaggggctccgcaagcactacctgctcccggccatcgagtattttaatggtggtcctcctgcccccttcagccaggccccagctccccaactacccccaggaccccctggcgcccccaagccaccacctgcttcccagcccagtctggtctccactgtggcccctggctccggcctggctcccacggcacagcccggggcaccgtccatggcaggcactgtggccccaggaggggtgagcggcccttccccagcccagctgggagccccagccctcggtgggcagcagtcagtctccaataagcttctggcctggagcggggtcctggagtggcaagagaaacccaaacctgcctcagtggatgccaacaccaagctgacgcggtcactgccctgccaggtctacgtgaatcatggcgagaacctgaagacggagcagtggccccagaagctgatcatgcagctcatcccccagcagctgctgaccaccctgggccctttgttccggaactcaaggatggtccagttccatttcaccaacaaggacctggagtctctcaaaggcctctaccgcatcatgggcaacggcttcgcgggctgcgtgcacttcccccacacggcgccctgtgaggtgcgcgtgctcatgctcctgtactcgtccaagaagaagatcttcatgggcctcatcccctacgaccagagcggcttcgtcaacggcatccggcaggtcatcaccaaccacaagcaggtccagcagcagaagctggagcagcagcagcgaggaatggggggacagcaggcacccccagggctggggcccattctggaggaccaagccaggccctcacagaatctgctccagctccgcccaccgcagccccagcctcagggtaccgtaggggcctctggggccacggggcagccccagccccaaggtactgcccagcccccgccaggtgcccctcaaggccctcctggagcagcttctggcccaccccctcctggacccatccttcggccccagaaccctggggccaaccctcagctgcgaagcctcctcctcaacccaccaccgccgcagactggggtgcccccaccccaggcctccctccaccacctccagccaccaggggctcctgcgctgctgcctccgccgcaccagggcctggggcagccccagttggggcccccactcctgcatccaccacctgcccagtcctggcccgcacaacttccccctcgggctccactgccaggtcagatgctgctgagcgggggtccccggggcccggtcccccagccgggcctgcagcccagcgtcatggaggacgacatcctcatggatctcatctgaatccccaacacccaataa

SEQ ID NO: 17415 - DNA, 2448 bp, Homo sapiens
  source 1..2448: mol_type = unassigned DNA
atttctgctcattccgcggcgtcggctgcggctgcagtggtggtggcgggtaccgcacggggtatggtccccgggtccgagggcccggcccgcgccgggagcgtggtggccgacgtggtgtttgtgattgagggtacggccaacctgggaccctacttcgaggggctccgcaagcactacctgctcccggccatcgagtattttaatggtggtcctcctgctgagacggacttcgggggagactatggggggacccagtacagcctcgtggtgttcaacacagtggactgcgctcccgagtcctacgtacaatgtcacgctcccaccagcagcgcctatgagtttgtcacctggctcgatggcattaagttcatgggcgggggtggtgagagctgcagcctcatcgcggaaggactcagcacagccttgcagctgtttgatgacttcaagaagatgcgcgagcagattggccagacgcaccgggtctgcctcctcatctgcaactcacccccatacttgttgcctgctgttgagagcaccacgtactctggatgcacaactgagaatcttgtgcagcagattggggagcgggggatccacttctccattgtgtctccccggaagctgcctgcgcttcggcttctgtttgagaaggcagcccccccggccttgctggagccgctgcagcctccgacagatgtgagccaggacccgaggcacatggtgctggttcggggactcgtgctgcctgttgggggtggctcagccccaggccccctccagtcaaagcagccagtccccctgcctcccgccgcaccctcaggtgccactctctcagcagccccccagcagcctctgccccccgtccccccgcagtaccaggttcccgggaacctgagtgcagctcaggtggccgcgcagaatgcagtggaggctgccaagaaccagaaggctgggctgggccctcgcttctcgcccatcacccctctccaacaagctgctcccggagtgggtccccccttcagccaggccccagctccccaactacccccaggaccccctggcgcccccaagccaccacctgcttcccagcccagtctggtctccactgtggcccctggctccggcctggctcccacggcacagcccggggcaccgtccatggcaggcactgtggccccaggaggggtgagcggcccttccccagcccagctgggagccccagccctcggtgggcagcagtcagtctccaataagcttctggcctggagcggggtcctggagtggcaagagaaacccaaacctgcctcagtggatgccaacaccaagctgacgcggtcactgccctgccaggtctacgtgaatcatggcgagaacctgaagacggagcagtggccccagaagctgatcatgcagctcatcccccagcagctgctgaccaccctgggccctttgttccggaactcaaggatggtccagttccatttcaccaacaaggacctggagtctctcaaaggcctctaccgcatcatgggcaacggcttcgcgggctgcgtgcacttcccccacacggcgccctgtgaggtgcgcgtgctcatgctcctgtactcgtccaagaagaagatcttcatgggcctcatcccctacgaccagagcggcttcgtcaacggcatccggcaggtcatcaccaaccacaagcaggtccagcagcagaagctggagcagcagcagcgaggaatggggggacagcaggcacccccagggctggggcccattctggaggaccaagccaggccctcacagaatctgctccagctccgcccaccgcagccccagcctcagggtaccgtaggggcctctggggccacggggcagccccagccccaaggtactgcccagcccccgccaggtgcccctcaaggccctcctggagcagcttctggcccaccccctcctggacccatccttcggccccagaaccctggggccaaccctcagctgcgaagcctcctcctcaacccaccaccgccgcagactggggtgcccccaccccaggcctccctccaccacctccagccaccaggggctcctgcgctgctgcctccgccgcaccagggcctggggcagccccagttggggcccccactcctgcatccaccacctgatggggccagaaggtcagatgctgctgagcgggggtccccggggcccggtcgttcgccacagtccccaccactccctcttggcttccctgtgaggcagagagtcactgccttccatgtctctatcacaagcggcaaaacgaaagagagaaggagagggccgtgtgtttcgagaaaaatgggagcgagcctatttctttgtggaagtgaagagcatgcctatgtgtttaatatgcaaacaaatcgtgtctgtgttgaaagaatacaacctgaaacgccactatga

SEQ ID NO: 17416 - DNA, 2710 bp, Homo sapiens
  source 1..2710: mol_type = unassigned DNA
attccgcggcgtcggctgcggctgcagtggtggtggcgggtaccgcacggggtatggtccccgggtccgagggcccggcccgcgccgggagcgtggtggccgacgtggtgtttgtgattgagggtacggccaacctgggaccctacttcgaggggctccgcaagcactacctgctcccggccatcgagtattttaatggtggtcctcctgctgagacggacttcgggggagactatggggggacccagtacagcctcgtggtgttcaacacagtggactgcgctcccgagtcctacgtacaatgtcacgctcccaccagcagcgcctatgagtttgtcacctggctcgatggcattaagttcatgggcgggggtggtgagagctgcagcctcatcgcggaaggactcagcacagccttgcagctgtttgatgacttcaagaagatgcgcgagcagattggccagacgcaccgggtctgcctcctcatctgcaactcacccccatacttgttgcctgctgttgagagcaccacgtactctggatgcacaactgagaatcttgtgcagcagattggggagcgggggatccacttctccattgtgtctccccggaagctgcctgcgcttcggcttctgtttgagaaggcagcccccccggccttgctggagccgctgcagcctccgacagatgtgagccaggacccgaggcacatggtgctggttcggggactcgtgctgcctgttgggggtggctcagccccaggccccctccagtcaaagcagccagtccccctgcctcccgccgcaccctcaggtgccactctctcagcagccccccagcagcctctgccccccgtccccccgcagtaccaggttcccgggaacctgagtgcagctcaggtggccgcgcagaatgcagtggaggctgccaagaaccagaaggctgggctgggccctcgcttctcgcccatcacccctctccaacaagctgctcccggagtgggtccccccttcagccaggccccagctccccaactacccccaggaccccctggcgcccccaagccaccacctgcttcccagcccagtctggtctccactgtggcccctggctccggcctggctcccacggcacagcccggggcaccgtccatggcaggcactgtggccccaggaggggtgagcggcccttccccagcccagctgggagccccagccctcggtgggcagcagtcagtctccaataagcttctggcctggagcggggtcctggagtggcaagagaaacccaaacctgcctcagtggatgccaacaccaagctgacgcggtcactgccctgccaggtctacgtgaatcatggcgagaacctgaagacggagcagtggccccagaagctgatcatgcagctcatcccccagcagctgctgaccaccctgggccctttgttccggaactcaaggatggtccagttccatttcaccaacaaggacctggagtctctcaaaggcctctaccgcatcatgggcaacggcttcgcgggctgcgtgcacttcccccacacggcgccctgtgaggtgcgcgtgctcatgctcctgtactcgtccaagaagaagatcttcatgggcctcatcccctacgaccagagcggcttcgtcaacggcatccggcaggtcatcaccaaccacaagcaggtccagcagcagaagctggagcagcagcagcgaggaatggggggacagcaggcacccccagggctggggcccattctggaggaccaagccaggccctcacagaatctgctccagctccgcccaccgcagccccagcccccgccaggtgcccctcaaggccctcctggagcagcttctggcccaccccctcctggacccatccttcggccccagaaccctggggccaaccctcagctgcgaagcctcctcctcaacccaccaccgccgcagactggggtgcccccaccccaggcctccctccaccacctccagccaccaggggctcctgcgctgctgcctccgccgcaccagggcctggggcagccccagttggggcccccactcctgcatccaccacctgcccagtcctggcccgcacaacttccccctcgggctccactgccaggtaaggggacccgggggagggcagaggtctggactgagtgtcccagcagctcctgggctagagcaccaagaccgagtgctcctgggaagtaaagacataggatccaagaatgagggttcccccatggcctttgcggagctctgagggctccgggaaagtacagcccatgggtccaaggacctagtgggttaagagcgtttcccatgatcctcctgtgtgtgctcctgggattgctgggaaatgtggtcttagggccagagaagtagttttggagaagggcccccaaaggctcatgggaaacagcatatttgtaactagatggggccagaaggtgcttctgttgggtcccccaagggctgcctagaaaacttagtgcctctgggccctcctgggcccaagggcctactgggagatgcagtcccttccccactgcccctcaggtcagatgctgctgagcgggggtccccggggcccggtcccccagccgggcctgcagcccagcgtcatggaggacgacatcctcatggatctcatctgaatccccaacacccaataaagttcctttttaacacac

SEQ ID NO: 17417 - DNA, 3332 bp, Homo sapiens
  source 1..3332: mol_type = unassigned DNA
ggtggcatcgctccagggtcttcctccatcccgcagctgtcttccctctgtgtgtgtctccacatggcattctctctgtatctttgtgtctgtgcttataaggacatcagtaattttggattaggccccattttcctgacctcatcttactacaattgcaaagaccctctttccagatagagtcaccttcacaggtgctggggactggaacctcagcttagctttctggttttgttttttgagacagagtttcactgttgtcagccaggctggagtgcagtggtgcaatcttggctcacagcaacttccgtctcctgggttcaagcgattctcctgcctcagcctcccaagtagctgggattacaggcatgtgccactatgcccagctaatttctgtattttttagtagagacagggtttcaccatgttggccaggttggtctcgaacttctgacctcaagtgatctgcctgcctcggcctcccaaagtgctaggattaccggtgtgagccaccgcgcccagcctcagcatagctttctgggagtcacagttcacactttgtaactcggggaaggagcagatcagttacttccgtgcaccaggcactcctgcaggaaagagaaccttagggggatcacctcacgagaccctcacagaaccttgtgaagaaggcattcctgagagttagtacttccggctgcaaatcacgtagtttcccaaacacatagataattgggggcactcggaaaaaatgttctcttatgattctgtgggtcacctgggctcagtgggccatctcgcttggcgactctcacggggttgccatcagatggcagctgagactctggtcatctgaaacctttactgggctggatgttcaaaacagctcctcacacagccctggctgttggctggggcttggctaggaccggccatcccagtgtctgcacatggcctgtccacgtggccacactgtggcagctgggttctgagagggcaggcgttgtaggagcaggcatttatattttgcacaggacaggacatctagagggggccagctattgggattggtttcataggtctgtgacatcagggacagggccctgtggttctcttggcctctcctttatagtcacaaggtagctctcatggctccacgcatcctgtgtgctttcatgaaggaggggaagggggctgtgtgtttccctttcttcaagacagcagaaactttctcagattccagagcaggcattcctttcacctcctatcccggacctaggccactgggcagcccctagttgatgggaggctgctgggagcaggtatccgtgactgtctggggctgggacatgttacagccccagacagcattgggaatgcaggggaggaggacacttggatatggaataggcagctagcagggtctgtctcaggcaggaaaccgaggctcagagaagtcaattcacttggccaaggtcagcctcgcctccctcaggagcccctgccctgaatgctccatgtgttacccccctgatgaccagtgatgtttcctgggtgcttcctgtgggctgagcctcaggcagggctcttgctgtggatcagacatcgcatagtcacagcgaccctgtgatgtgggagcactccccgtggtgtacactggccggtgctgagggctggaggatctcttggatacccggggtccgacccaccgttgatcacaggcctgtgggtaccacgctgtgcatctaggccgctctcccggccgtgaccctcagccgccctctgaggaggccgccgtggcattttatgcccaagaaactgggtccatgaggagcaggtggtggctgaaggttgaagagctgggctccagcactttctctccgctttccctctcagtgggcagctggaaccctagcttgccctgagcgcctcagtttctgtctccagagcaacccatagcacacctgttctccttaaccttctatagcagaaacctcacctcaccttgcctgtggggcctctagagccttctggaatggggagggggtcagggctgcctctttcagggcctgaatggttctgaagagctgttgtccacccaggcgggctgcgtgcacttcccccacacggcgccctgtgaggtgcgcgtgctcatgctcctgtactcgtccaagaagaagatcttcatgggcctcatcccctacgaccagagcggcttcgtcaacggcatccggcaggtcatcaccaaccacaagcaggtccagcagcagaagctggagcagcagcagcgaggaatggggggacagcaggcacccccagggctggggcccattctggaggaccaagccaggccctcacagaatctgctccagctccgcccaccgcagccccagcctcagggtaccgtaggggcctctggggccacggggcagccccagccccaaggtactgcccagcccccgccaggtgcccctcaaggccctcctggagcagcttctggcccaccccctcctggacccatcttcggccccagaaccctggggccaaccctcagctgcgaagcctcctcctcaacccaccaccgccgcagactggggtgcccccaccccaggcctccctccaccacctccagccaccaggggctcctgcgctgctgcctccgccgccagggcctggggcagccccagttggggccccactcctgcatccaccacctgcccagtcctggcccgcacaacttccccctcgggctccactgccaggtaaggggacccgggggagggcagaggtctggactgagtgtcccagcagctcctgggctagagcaccaagaccgagtgctcctgggaagtaaagacataggatccaagaatgagggttcccccatggcctttgcggagctctgagggctccgggaaagtacagcccatgggtccaaggacctagtgggttaagagcgtttcccatgatcctcctgtgtgtgctcctgggattgctgggaaatgtggtcttagggccagagaagtagttttggagaagggcccccaaaggctcatgggaaacagcatatttgtaactagatggggccagaaggtgcttctgttgggtcccccaagggctgcctagaaaacttagtgcctctgggccctcctgggcccaagggcctactgggagatgcagtcccttccccactgcccctcaggtcagatgctgctgagcgggggtccccggggcccggtcccccagccgggcctgcagcccagcgtcatggaggacgacatcctcatggatctcatctgaatccccaacacccaataaagttcctttttaac

SEQ ID NO: 17418 - DNA, 1623 bp, Homo sapiens
  source 1..1623: mol_type = unassigned DNA
atggtccccgggtccgagggcccggcccgcgccgggagcgtggtggccgacgtggtgtttgtgattgagggtacggccaacctgggaccctacttcgaggggctccgcaagcactacctgctcccggccatcgagtattttaatggtggtcctcctgctgagacggacttcgggggagacgttcccgggaacctgagtgcagctcaggtggccgcgcagaatgcagtggaggctgccaagaaccagaaggctgggctgggccctcgcttctcgcccatcacccctctccaacaagctgctcccggagtgggtccccccttcagccaggccccagctccccaactacccccaggaccccctggcgcccccaagccaccacctgcttcccagcccagtctggtctccactgtggcccctggctccggcctggctcccacggcacagcccggggcaccgtccatggcaggcactgtggccccaggaggggtgagcggcccttccccagcccagctgggagccccagccctcggtgggcagcagtcagtctccaataagcttctggcctggagcggggtcctggagtggcaagagaaacccaaacctgcctcagtggatgccaacaccaagctgacgcggtcactgccctgccaggtctacgtgaatcatggcgagaacctgaagacggagcagtggccccagaagctgatcatgcagctcatcccccagcagctgctgaccaccctgggccctttgttccggaactcaaggatggtccagttccatttcaccaacaaggacctggagtctctcaaaggcctctaccgcatcatgggcaacggcttcgcgggctgcgtgcacttcccccacacggcgccctgtgaggtgcgcgtgctcatgctcctgtactcgtccaagaagaagatcttcatgggcctcatcccctacgaccagagcggcttcgtcaacggcatccggcaggtcatcaccaaccacaagcaggtccagcagcagaagctggagcagcagcagcgaggaatggggggacagcaggcacccccagggctggggcccattctggaggaccaagccaggccctcacagaatctgctccagctccgcccaccgcagccccagcctcagggtaccgtaggggcctctggggccacggggcagccccagccccaaggtactgcccagcccccgccaggtgcccctcaaggccctcctggagcagcttctggcccaccccctcctggacccatccttcggccccagaaccctggggccaaccctcagctgcgaagcctcctcctcaacccaccaccgccgcagactggggtgcccccaccccaggcctccctccaccacctccagccaccaggggctcctgcgctgctgcctccgccgcaccagggcctggggcagccccagttggggcccccactcctgcatccaccacctgcccagtcctggcccgcacaacttccccctcgggctccactgccaggtcagatgctgctgagcgggggtccccggggcccggtcccccagccgggcctgcagcccagcgtcatggaggacgacatcctcatggatctcatctgaatccccaacacccaataa

SEQ ID NO: 17419 - DNA, 1212 bp, Homo sapiens
  source 1..1212: mol_type = unassigned DNA
atggtccccgggtccgagggcccggcccgcgccgggagcgtggtggccgacgtggtgtttgtgattgagggtacggccaacctgggaccctacttcgaggggctccgcaagcactacctgctcccggccatcgagtattttaatggtggtcctcctgctgagacggacttcgggggagactatggggggacccagtacagcctcgtggtgttcaacacagtggactgcgctcccgagtcctacgtacaatgtcacgctcccaccagcagcgcctatgagtttgtcacctggctcgatggcattaagttcatgggcgggggtggtgagagctgcagcctcatcgcggaaggactcagcacagccttgcagctgtttgatgacttcaagaagatgcgcgagcagattggccagacgcaccgggtctgcctcctcatctgcaactcacccccatacttgttgcctgctgttgagagcaccacgtactctggatgcacaactgagaatcttgtgcagcagattggggagcgggggatccacttctccattgtgtctccccggaagctgcctgcgcttcggcttctgtttgagaaggcagcccccccggccttgctggagccgctgcagcctccgacagatgtgagccaggacccgaggcacatggtgctggttcggggactcgtgctgcctgttgggggtggctcagccccaggccccctccagtcaaagcagccagtccccctgcctcccgccgcaccctcaggtgccactctctcagcagccccccagcagcctctgccccccgtccccccgcagtaccaggttcccgggaacctgagtgcagctcaggtggccgcgcagaatgcagtggaggctgccaagaaccagaaggctgggctgggccctcgcttctcgcccatcacccctctccaacaagctgctcccggagtgggtccccccttcagccaggccccagctcctgcgctgctgcctccgccgcaccagggcctggggcagccccagttggggcccccactcctgcatccaccacctgcccagtcctggcccgcacaacttccccctcgggctccactgccaggtcagatgctgctgagcgggggtccccggggcccggtcccccagccgggcctgcagcccagcgtcatggaggacgacatcctcatggatctcatctgaatccccaacacccaataa

SEQ ID NO: 17420 - DNA, 881 bp, Homo sapiens
  source 1..881: mol_type = unassigned DNA
atggtccccgggtccgagggcccggcccgcgccgggagcgtggtggccgacgtggtgtttgtgattgagggtacggccaacctgggaccctacttcgaggggctccgcaagcactacctgctcccggccatcgagtattttaatggtggtcctcctgctgagacggacttcgggggagactatggggggacccagtacagcctcgtggtgttcaacacagtggactgcgctcccgagtcctacgtacaatgtcacgctcccaccagcagcgcctatgagtttgtcacctggctcgatggcattaagttcatgggcgggggtggtgagagctgcagcctcatcgcggaaggactcagcacagccttgcagctgtttgatgacttcaagaagatgcgcgagcagattggccagacgcaccgggtctgcctcctcatctgcaactcacccccatacttgttgcctgctgttgagagcaccacgtactctggatgcacaactgagaatcttgtgcagcagattggggagcgggggatccacttctccattgtgtctccccggaagctgcctgcgcttcggcttctgtttgagaaggcagcccccggccttgctggagccgctgcagcctccgacagatgtgagccaggacccgaggcacatggtgctggttcggggactcgtgctgcctgttgggggtggctcagccccaggccccctccagtcaaagcagccagtccccctgcctcccgccgcaccctcaggtgccaggtcagatgctgctgagcgggggtccccggggcccggtcccccagccgggcctgcagcccagcgtcatggaggacgacatcctcatggatctcatctgaatccccaacacccaataa

SEQ ID NO: 17421 - DNA, 3184 bp, Homo sapiens
  source 1..3184: mol_type = unassigned DNA
actggagtttggttctcgaggcggcggcagcgagcggcggcggctccggcggctcctcctcctcctttggtggcggcggcggcccgggaccgagacccggccccggctcccctctccgccaccccgcgcgcccccaaccccccggcgccgcggggaacatgcggctccggctcccggaggccggcgagtgagtgacccccgtcccccgcctcagcccgcccgcccgctggcccggccgcaaccccccgcctcgcccaggcaatgacagcggctccggcgtctccgcagcagatcagggaccggctgctgcaggccatcgacccccagagcaacatccggaacatggtggcggtgctggaagtcatctccagcctggagaaataccctattaccaaagaggcacttgaggaaacacgacttgggaagctcatcaacgacgtccgcaagaaaaccaagaacgaggagctcgccaagcgggccaagaagctgctgcggagctggcagaagctcatcgagccggcacaccagcatgaggcggcgctgcgggggctggcgggggccaccggctctgccaacgggggcgcacacaactgccggccggaggtgggggcggctggcccacccaggagcatccatgacctgaagagccgcaatgacctccagaggctgcccgggcagcggctggacaggctgggcagccgcaagcgccggggtgaccagcgtgacctcggccacccagggccgccacccaaggtctccaaagctagccacgaccccctggtccccaactcatcccccctccccaccaacgggatcagtgggagtccagagagcttcgccagctccctggatggcagtgggcatgcaggcccagagggcagccgcctggagcgtgacgagaatgacaagcacagtggcaagatccccgtcaacgccgtgcgaccgcacaccagctccccgggcctgggcaagccccctggaccctgcttgcagccaaaggcttcggtgctgcagcagctggacagggtggacgagactccggggcctccccatcccaagggaccccctcgctgctctttcagtcctcggaactcacggcatgagggctcctttgcccggcagcagagcttgtatgcacccaagggctccgtgcccagcccctcaccgcggccccaggcactcgatgccacacaggtgccgtcaccgcttccactggcacagccgtccacaccccccgtacggcggctcgagctgctgcccagtgcggaaagcccagtgtgctggcttgagcagcctgagagccaccagcggctggcggggccgggctgcaaggcagggctgtccccagccgagcccctcctgtcccgggcaggcttttccccagactcctccaaggcggacagtgatgctgcctcctcagggggctcggacagtaaaaagaagaagaggtaccgacctcgagactatacggttaacttggacgggcaggtggctgaggcgggcgtcaagcctgtccggttaaaagagcggaagctcacctttgaccccatgacgagacagatcaaacctctgacccagaaagagccagtgcgggcagacagccctgtgcacatggagcagcagtccaggacagagctggacaagcaggaggccaaggccagcctccagagccccttcgaacagacgaactggaaggagctgtcacgcaacgagatcatccagtcctacctgagccggcagagcagcctgctctcatcatcgggcgcgcagaccccaggggctcaccacttcatgtctgagtacctgaagcaggaggagagcacccggcaaggggccaggcagctgcatgtgctggtgcctcaaagcccgcccacggacctccctggtctgacccgggaggtcacacaggacgatctcgacagaatccaggccagccagtggccgggggtgaacgggtgtcaggacacacagggtaactggtatgactggacgcagtgcatatcgctcgatccgcacggcgacgacgggcgcttgaacattctgccttatgtctgcttggactgaccggcctgtcagccacaaagtgcattcccatcttgcagaagccgggtgggcgggcaggcaggtgggcaggtggccggggcccagctgcctcctgcgctgggaactcggggagtccggcccaggcgggagggagggggcgggagtcacgcggtctctctgcgctcttccctcaaaactctttttgtgaaatgctgctaccagtttactaacaaaattgcgaagaaggaccgcgtggaaggaaggacggcaaagtgagttcagaactctatagcaaaccagctataaaaagcgttagtccctcacccccaaagaggtgcggacactttccagcacctgaaagctggggcctcagttgcaggcaggcacagaaaacctgtgggagaggtcacctttaacacagcaacagaagcacgcatctcatctctcttgcattttctgttctttaatttggccctgagtgtcttgagacagtgggccatgccactgcctctgtttgctccctacccagccactgtcaggccagtgttgtctgtcatgtgccagaagcttctcagctgtggtgagccactggcattgggcaggcgggccagctggccagccagtgtgacccacactccatgggcagccacctgtttatatctggtttcagttataacccagtttttaaagaaatgctgcaaaaatttaagttttctcatgtttattttaaacaattcctcttccatcagaccaccagacaaaaaaacctttcctttcttcctcccttttcttttttcccttcctgtacacatctagaaaacttcacctttctagagtccccccaaaacaacacaaaagttattgtgggtgctactggttttatgctgtactgtggggcgagggggaagacctgtctgtacgctggaaacactcataaccattcctttagattcgtttgccttatggttatttgtcataaacgcgatttgcaaaaacaaggagccttagtgaatgtacagtacctagacttctgtgttctcaggacgcagaagggagcaactttgctatttggtccagtaagtggacaccttgtgatataaatgtggaaataaaaaaaaaaaaaaaaccatttgcacaaacc

SEQ ID NO: 17422 - DNA, 1447 bp, Homo sapiens
  source 1..1447: mol_type = unassigned DNA
atgacagcggctccggcgtctccgcagcagatcagggaccggctgctgcaggccatcgacccccagagcaacatccggaacatggtggcggtgctggaagtcatctccagcctggagaaataccctattaccaaagaggcacttgaggaaacacgacttgggaagctcatcaacgacgtccgcaagaaaaccaagaacgaggagctcgccaagcgggccaagaagctgctccctggatggcagtgggcatgcaggcccagagggcagccgcctggagcgtgacgagaatgacaagcacagtggcaagatccccgtcaacgccgtgcgaccgcacaccagctccccgggcctgggcaagccccctggaccctgcttgcagccaaaggcttcggtgctgcagcagctggacagggtggacgagactccggggcctccccatcccaagggaccccctcgctgctctttcagtcctcggaactcacggcatgagggctcctttgcccggcagcagagcttgtatgcacccaagggctccgtgcccagcccctcaccgcggccccaggcactcgatgccacacaggtgccgtcaccgcttccactggcacagccgtccacaccccccgtacggcggctcgagctgctgcccagtgcggaaagcccagtgtgctggcttgagcagcctgagagccaccagcggctggcggggccgggctgcaaggcagggctgtccccagccgagcccctcctgtcccgggcaggcttttccccagactcctccaaggcggacagtgatgctgcctcctcagggggctcggacagtaaaaagaagaagaggtaccgacctcgagactatacggttaacttggacgggcaggtggctgaggcgggcgtcaagcctgtccggttaaaagagcggaagctcacctttgaccccatgacgagacagatcaaacctctgacccagaaagagccagtgcgggcagacagccctgtgcacatggagcagcagtccaggacagagctggacaagcaggaggccaaggccagcctccagagccccttcgaacagacgaactggaaggagctgtcacgcaacgagatcatccagtcctacctgagccggcagagcagcctgctctcatcatcgggcgcgcagaccccaggggctcaccacttcatgtctgagtacctgaagcaggaggagagcacccggcaaggggccaggcagctgcatgtgctggtgcctcaaagcccgcccacggacctccctggtctgacccgggaggtcacacaggacgatctcgacagaatccaggccagccagtggccgggggtgaacgggtgtcaggacacacagggtaactggtatgactggacgcagtgcatatcgctcgatccgcacggcgacgacgggcgcttgaacattctgccttatgtctgcttggac

SEQ ID NO: 17423 - DNA, 1431 bp, Homo sapiens
  source 1..1431: mol_type = unassigned DNA
atcagcgagcgcggcttttttgcttgcgaagccggctttggagagctgctgtggcggcggcaacatggcggacgtgataaatgtcagtgtgaacctggaggccttttcccaggccattagtgccatccaggcgctgcgctccagcgtgagcagggtgttcgactgcctgaaggatgggatgcggaacaaggagacgctggagggccgggagaaggcctttattgcgcacttccaggacaacttacattcggtcaaccgggacctcaatgagctggaacgtctgagcaatctggtaggcaagccatctgagaaccatcctcttcataacagtgggctgttaagcctggatcctgtgcaggacaaaactcctctctatagtcaactccttcaagcatataagtggtcaaacaagttgcagtaccatgcaggactagcatctggccttttaaatcagcagtcattgaagcgttccgctaatcagatgggagtatctgccaaacgtagaccaaaggctcagcccacaactcttgtcctaccacctcaatatgttgatgatgtgatcagccgcattgacaggatgtttcctgaaatgtccatccacttatccagacccaatggaacatcagcaatgcttctggtgaccttgggaaaggtgttgaaagtgatcgtcgtcatgcggagcctgttcattgatcgaacaatagtaaagggatataacgagaatgtctacacagaagatggcaagcttgatatatggtccaaatccaactatcaagtattccagaaggtgacagaccatgccaccactgccctgctccactatcagctgccccagatgccggatgtcgtggtccgatccttcatgacctggttaagaagttacataaagctgttccaggccccgtgccagcgctgcgggaagtttctgcaggacggccttcccccgacatggagggatttccgaaccctcgaagccttccatgacacctgccggcagtagcccccacgctggccccagcctcagaccccacccagcaccttcccagacacgcaggaagcccacagaaggctcagctggttcctcactgcccagatgtgtacagctgctcctccctttcataaagcagcgccatgtgtgcagaggccactcttgaagagcagactccctctgtggctgatgggactaattattcccactagccagcggactgaaggcaaagaagacctttctagaacctggtagaaggaagctgtgcagcatgctcctcgtccatgtgtgtcggcagtgctggtgtctgtcgtctccgcgagctgttactggaatgagcccttgtgttcatgggtatcgtcatgcggggttcttgtgttttgtggggcttgggttttggtaacttatttttataagcaataaaccttttgtatcctggataa

SEQ ID NO: 17424 - DNA, 1281 bp, Homo sapiens
  source 1..1281: mol_type = unassigned DNA
gagctgctgtggcggcggcaacatggcggacgtgataaatgtcagtgtgaacctggaggccttttcccaggccattagtgccatccaggcgctgcgctccagcgtgagcagggtgttcgactgcctgaaggatgggatgcggaacaaggagacgctggagggccgggagaaggcctttattgcgcacttccaggacaacttacattcggtcaaccgggacctcaatgagctggaacgtctgagcaatctggtaggcaagccatctgagaaccatcctcttcataacagtgggctgttaagcctggatcctgtgcaggacaaaactcctctctatagtcaactccttcaagcatataagtggtcaaacaagttgcagtaccatgcaggactagcatctggccttttaaatcagcagtcattgaagcgttccgctaatcagatgggagtatctgccaaacgtagaccaaaggctcagcccacaactcttgtcctaccacctcaatatgttgatgatgtgatcagccgcattgacaggatgtttcctgaaatgtccatccacttatccagacccaatggaacatcagcaatgcttctgcttgatatatggtccaaatccaactatcaagtattccagaaggtgacagaccatgccaccactgccctgctccactatcagctgccccagatgccggatgtcgtggtccgatccttcatgacctggttaagaagttacataaagctgttccaggccccgtgccagcgctgcgggaagtttctgcaggacggccttcccccgacatggagggatttccgaaccctcgaagccttccatgacacctgccggcagtagcccccacgctggccccagcctcagaccccacccagcaccttcccagacacgcaggaagcccacagaaggctcagctggttcctcactgcccagatgtgtacagctgctcctccctttcataaagcagcgccatgtgtgcagaggccactcttgaagagcagactccctctgtggctgatgggactaattattcccactagccagcggactgaaggcaaagaagacctttctagaacctggtagaaggaagctgtgcagcatgctcctcgtccatgtgtgtcggcagtgctggtgtctgtcgtctccgcgagctgttactggaatgagcccttgtgttcatgggtatcgtcatgcggggttcttgtgttttgtggggcttgggttttggtaacttatttttataagcaataaaccttttgtatcctggataa

SEQ ID NO: 17425 - DNA, 1278 bp, Homo sapiens
  source 1..1278: mol_type = unassigned DNA
gagagctgctgtggcggcggcaacatggcggacgtgataaatgtcagtgtgaacctggaggccttttcccaggccattagtgccatccaggcgctgcgctccagcgtgagcagggtgttcgactgcctgaaggatgggatgcggaacaaggagacgctggagggccgggagaaggcctttattgcgcacttccaggacaacttacattcggtcaaccgggacctcaatgagctggaacgtctgagcaatctggtaggcaagccatctgagaaccatcctcttcataacagtgggctgttaagcctggatcctgtgcaggacaaaactcctctctatagtcaactccttcaagcatataagtggtcaaacaagttgcagtaccatgcaggactagcatctggccttttaaatcagcagtcattgaagcgttccgctaatcagatgggagtatctgccaaacgtagaccaaaggctcagcccacaactcttgtcctaccacctcaatatgttgatgatgtgatcagccgcattgacaggatgtttcctgaaatgtccatccacttatccagacccaatggaacatcagcaatgcttctgcttgatatatggtccaaatccaactatcaagtattccagaaggtgacagaccatgccaccactgccctgctccactatcagctgccccagatgccggatgtcgtggtccgatccttcatgacctggttaagaagttacataaagctgttccaggccccgtgccagcgctgcgggaagtttctgcaggacggccttcccccgacatggagggatttccgaaccctcgaagccttccatgacacctgccggcagtagcccccacgctggccccagcctcagaccccacccagcaccttcccagacacgcaggaagcccacagaaggctcagctggttcctcactgcccagatgtgtacagctgctcctccctttcataaagcagcgccatgtgtgcagaggccactcttgaagagcagactccctctgtggctgatgggactaattattcccactagccagcggactgaaggcaaagaagacctttctagaacctggtagaaggaagctgtgcagcatgctcctcgtccatgtgtgtcggcagtgctggtgtctgtcgtctccgcgagctgttactggaatgagcccttgtgttcatgggtatcgtcatgcggggttcttgtgttttgtggggcttgggttttggtaacttatttttataagcaataaaccttttgtatcctg

SEQ ID NO: 17426 - DNA, 3565 bp, Homo sapiens
  source 1..3565: mol_type = unassigned DNA
ggcgggactaactagcaaacggggactagaaatagggatgctgaaaagcaacggggagagacgcagtcgtaacgcacttccggcggtctacgcgaggaagatggctgcatcccagcagcaagcttcagcggcttcctcagctgctggtgtatcgggtcctagttcggctggcggcccgggtccccagcagcagccgcaaccgccagcacaactggtgggccctgcccagagcggcctcctgcagcaacagcaacaggacttcgatcctgtgcagcgttataagatgctcatcccgcagctgaaggagagtctacagaccttgatgaaggttgcggcccaaaacttgattcagaacactaacatcgacaatggacaaaagagcagtgatggacccatacagcgctttgacaagtgcctggaagagttctatgcactctgtgaccagctggagctgtgcctgcgcctggcgcatgagtgcctgtcacagagttgtgacagtgccaagcactctccaacgttggtgcccacagccaccaagcccgacgcagtgcagcctgacagcctcccctacccacagtacctggcggtcatcaaagcccagatttcctgtgccaaggacattcacaccgccctgctggactgtgccaacaaggtcacgggcaagacacccgcaccacctgctggccctgggggcactctgtgaagtgggggacagggagtggggcaggcagtggttggtgggtggtgtgcaaagggaatgaagagcgtcctgggcctaaacacagcagcctcctctcttcctgcctgagcaccgcagcgggagccagcagggggcagcagaggccaacagggagctcgcaggccgggcccctgcgtccctgccccttcttcctgctccccctcctagcctagggtagactttgaactgtgtgtgttgatgacttctctgttccacaggccctcccccattcttgcctgggtgtggagccctggctgtcccctctccctcagtccttcctgactgtctccagctgggaggtggtctctgtgtgccactcctctgtgtctctattacagttgtgtctctctcatcctgtctctttttcccttgtttctctgttcctgttaatgtgtttctccccatggtcctatttctctcactctgacctctctctcttagtcccctttagctgtcttctatccccagctcctaactgggactctgtgtctatgcagggggccagcacccctgggttatctggggctaagggaagggacttcatttccaggggccacagccaagcccagagtcccccagcggctcgcatgtcagcccagaccccagggtccttggcctaggagaggagcagtggaggggcccaggctctgagctccacaggtctgagcagggagcaactcaggcccccacccaagcctgcgtcagcggaacttgagtgaggggcgttgtgcaatttgtggcaaggctggcccagctggatgcctgggtcccagtatttttagccccaaaggagaagtgaaaaggccccagccggggtgaatcatcagtcctggggaagaacccaggcgcctgagccccagctccgggaagcaggcactggggagggggcttcaaggagggagtgccccctcagactccctgcttccctggaagcttcaggaagctcagcctcagccttcaggcctgagcaagtgcagggcggagctaccagcccaggctcagatgttggggtgtgaaagcctcaagtgactcagcctggttggagaactgccccacccagtatcttctgtgccatggttcccacattcgcactccatggcctcctgtcctggaccccacgtctgcaaggaaaccctaggaccatggatacctctgtgattcacgctgagcccaagtccccacactggaaaactgggaaatggccagctgtgtgtcccaggaaattcctccccttattcttccttgaagtgcccgagcatgtagggcaagaaggaaggctgaagcgctgtccctaggaggaatttctccttcaggggagcctcagttttgcccatttatctaattgaatcagttttttacccaatcccccgattttgtaggataatctcccttatctaaagtcaactgattatggactttaatcacatctacaaaacacttccatggcgacagctagatgagtgtttgaataactgggactgtagcccgtccaagttgacacataaaactgaccatcgggccgggggcggtggctcacgcctgtaatcccaacactttgggagcccgaggcgggcggatcacaaggtcaggagttcgagaccagcctggccaacacggtgaaaccccgactctactaaaaatacaaaaaattagccgggtgtggtggcacacacctgtagtcccagctactcgggaggctgaggcaggagaatcgtttgaacctgggaggcagaggttgcagtgagccaagatcacactattgcactccagcctgggcgacagggcaagactctgtctcaaaaaaaataaaaaactgaccatctagtccttgtcatctgggcaccctcacacatctccttaaccacacttaatctccaaataagtacgataacatagtcatagtcccacccaacatgatgcagttatcttgcatacaactgaagacaactaaccctttccccaacagagcccaccagcagtggtggagatgtcggtccatgagcgcacacacaagactgagggactgtcggccctcccaggtggtgtcaacacaacatcacacacaggtgggggggcctgatagcccagcacccatgatacagggcctaccaatgcttaaaaccacacccagggagcccacagaggcactcagtgggtggtggggtgatggatacacatctatcaggcacagggcggaggtgggcaccactgagttgcactcagcaaacacattgggtatcttgtgcccaaggcctgtatttgtggagctgatgttctagtgagagacagtaaatgtgacaaaagtaaaatatatcagatggtgagaaaacagaaaaatgagatcagaagtggagatgttggggccaggcacagtggcccaggcctgtaatcccatcactttgggaggtgcaggcaggcagatggcttgagcccaggaattcaagaccagtccgagcaacatagcaaaagcccttatctgcaaaaaattcaaaaattagccaggtgtggtggtgcgtgcccaggttcccaggtactcggaggctgagaggtgggaggatgccttgagcttgagaggttgaagctgcagtgagctgtgatcgcaccactgcactccagcttggttcatggagaccctgtttttttaaaaaaagaagtggaggtgtttacaccagcaaaatactcattttttaagtgtaattaagttgaagatcaaaaaatggaaatgtataattaaatcatacttagcaaatctaacacatgaaatgtaacatctgcatatggagaatcgtgttactttattgaaaaacattaaaagtttgagaactt

SEQ ID NO: 17427 - DNA, 1482 bp, Homo sapiens
  source 1..1482: mol_type = unassigned DNA
ctacgcgaggaagatggctgcatcccagcagcaagcttcagcagccgcaaccgccagcacaactggtgggccctgcccagagcggcctcctgcagcaacagcaacaggacttcgatcctgtgcagcgttataagatgctcatcccgcagctgaaggagagtctacagaccttgatgaaggttgcggcccaaaacttgattcagaacactaacatcgacaatggacaaaagagcagtgatggacccatacagcgctttgacaagtgcctggaagagttctatgcactctgtgaccagctggagctgtgcctgcgcctggcgcatgagtgcctgtcacagagttgtgacagtgccaagcactctccaacgttggtgcccacagccaccaagcccgacgcagtgcagcctgacagcctcccctacccacagtacctggcggtcatcaaagcccagatttcctgtgccaaggacattcacaccgccctgctggactgtgccaacaaggtcacgggcaagacacccgcaccacctgctggccctgggggcactctgtgaagtgggggacagggagtggggcaggcagtggttggtgggtggtgtgcaaagggaatgaagagcgtcctgggcctaaacacagcagcctcctctcttcctgcctgagcaccgcagcgggagccagcagggggcagcagaggccaacagggagctcgcaggccgggcccctgcgtccctgccccttcttcctgctccccctcctagcctagggtagactttgaactgtgtgtgttgatgacttctctgttccacaggccctcccccattcttgcctgggtgtggagccctggctgtcccctctccctcagtccttcctgactgtctccagctgggaggtggtctctgtgtgccactcctctgtgtctctattacagttgtgtctctctcatcctgtctctttttcccttgtttctctgttcctgttaatgtgtttctccccatggtcctatttctctcactctgacctctctctcttagtcccctttagctgtcttctatccccagctcctaactgggactctgtgtctatgcagggggccagcacccctgggttatctggggctaagggaagggacttcatttccaggggccacagccaagcccagagtcccccagcggctcgcatgtcagcccagaccccagggtccttggcctaggagaggagcagtggaggggcccaggctctgagctccacaggtctgagcagggagcaactcaggcccccacccaagcctgcgtcagcggaacttgagtgaggggcgttgtgcaatttgtggcaaggctggcccagctggatgcctgggtcccagtatttttagccccaaaggagaagtgaaaaggccccagccggggtgaatcatcagtcctggggaagaacccaggcgcctgagccccagctccgggaagcaggcactggggagggggcttc

SEQ ID NO: 17428 - DNA, 985 bp, Homo sapiens
  source 1..985: mol_type = unassigned DNA
gtgttacgtcacagtgggcggaagtcgcggccgctgttttgaaatcgggccgcggggggtctctcaagctggttccaacgctgaggccccacagcctcccaattccgggcagacccctgacacctgctgtctggccccttccggcctgaagctgcagccgcgccatgtccacccctccgttggccgcgtcggggatggcgcccgggcccttcgccgggccccaggctcagcaggccgcccgggaagtcaacacggcgtcgctgtgccgcatcgggcaggagacagtgcaggacatcgtgtaccgcaccatggagatcttccagctcctgaggaacatgcagctgccaaatggtgtcacttaccacactggaacatatcaagaccggttaacaaagctacaggataatcttcgccaactttcagttctcttcaggaagctgagattggtatatgacaaatgcaatgaaaactgtggtgggatggatcccattccagtcgagcaacttattccatatgtggaagaagatggctcaaagaatgatgatcgggctggcccacctcgttttgctagtgaagagaggcgagaaattgctgaagtaaataaaaaactcaaacagaagaatcaacagctgaaacaaattatggatcaattacgaaatctcatctgggatataaatgccatgttggcaatgaggaactaagctgatatttaaatttcctgctttacacatgttataccattgttttttccctcaagtattttttccctgtgaagaagattatttatctgcttttattttagtcactaaaactaaagtttttatttttacattgtgatttttacattaaaatattaactttttttaatgctattttatgaaagattattgtaataaactttgatggggtttgtattttggttaatcttcatgaattgaataattgtttttttaaagcaaaataaagttttttaaataaatgttaa

SEQ ID NO: 17429 - DNA, 2022 bp, Homo sapiens
  source 1..2022: mol_type = unassigned DNA
gcgccggtggcgggactctggggaaaatggctgcgtcttcgagtggtgagaaggagaaggagcggctgggaggcggtttgggagtggcgggtggtaacagcacacgagagcggctgctgtctgcgcttgaggacttggaggtcctgtctagggaacttatagaaatgctggcaatttcaagaaaccaaaagttgttacaggctggagaggaaaaccaggtcctggagttgttaattcaccgagatggggaatttcaagaactaatgaaattggcacttaatcagggaaaaattcatcatgaaatgcaagttttagaaaaagaagtagagaagagagacagtgatattcagcagctacaaaaacagctaaaggaagcagaacaaatactggcaacagctgtttaccaagcgaaggagaaactcaagtcaatagaaaaagcaagaaaaggtgctatctcctctgaagaaataattaagtatgcacataggatcagtgcaagtaatgctgtatgtgctccactgacctgggttccaggggacccccggagaccctacccaactgatttagagatgagaagtgggttactgggtcagatgaacaatccttccactaatggcgtgaatggccatttaccaggagatgcacttgcagcaggaagattgccagatgtccttgctccacagtatccatggcagtcaaatgacatgtcgatgaatatgttaccaccaaatcatagtagtgactttttgttggaacctcctgggcataataaagaaaatgaagatgatgtagagattatgtcaacggactcctcaagcagtagtagtgagtctgattgaaaaaccttaaaagacaatatacagaattgaatactgtagaattctgtttctttaacagtagcagggaaatgtaaactacaggtgacaaaaaatacccaggtaaacactggctttggtagaattgtgcagtcattaaaagtcaaaattttttgactttctttttaaagccaaagaccatagttttagttttaagccactaggtagatatttaggggaatagtcaaaatttactgttgaaaaagcagttgctatgtgctttcttaccctgttctgttccagttttgctggatttgtacatagccattctagaaatagagttgagggaaattatccatatacatatcactaataggcttcttggaattatttagaaaagcatttttaaactggcagtggatgactgaataggcatcatatttctttttgtgtgtcatttaaaagtaacaaaaactgccatttgacagtaaaggctcttggcttctgttggaggcatgggaaattgtctcaatttgtacagtttgtaattgtaatttttgtaaataaatttgtttgtacattgtatgctttttttttagtttaaatatactgtcagtgtaggtaggaaattatttctgtaaatccagttgcattttataatacttgagtgactaactgaattgaaacctattacaattaatagggttctcaaaggcctattcctattagaagaaataattttttttaataattgaaaaaatttaccacagccttgtctgattttaagaatagattgtgtgaagatttagaatggaaagcaaccatttcttcccttcaccttcctcttcttacagttccccaggagtcatttttaaccacttttaatttctgttggtaacctctgtgtttaggtaatatgcttatacaactatttcttgatgtatcagttttagacaatgtatcttctgatttcaaaggtaatacaacatttaatgtgaaacatttagtgaatacagtaaaggagaaaataaaattgttagcattctacccagagataatatcaattcatattgtagtgtagatttttttaaagttcacatacacttttttgtaaaatgagaataatgtttatttcctgagatactgctgtattttttaattgctaatctgtattcttcaaatgaactgagaattccatttttccatc

SEQ ID NO: 17430 - DNA, 931 bp, Homo sapiens
  source 1..931: mol_type = unassigned DNA
gcacctgcgtcagctcgctctgcgcgtgcgccggtggcgggactctggggaaaatggctgcgtcttcgagtgggaacttatagaaatgctggcaatttcaagaaaccaaaagttgttacaggctggagaggaaaaccaggtcctggagttgttaattcaccgagatggggaatttcaagaactaatgaaattggcacttaatcagggaaaaattcatcatgaaatgcaagttttagaaaaagaagtagagaagagagacagtgatattcagcagctacaaaaacagctaaaggaagcagaacaaatactggcaacagctgtttaccaagcgaaggagaaactcaagtcaatagaaaaagcaagaaaaggtgctatctcctctgaagaaataattaagtatgcacataggatcagtgcaagtaatgctgtatgtgctccactgacctgggttccaggggacccccggagaccctacccaactgatttagagatgagaagtgggttactgggtcagatgaacaatccttccactaatggcgtgaatggccatttaccaggagatgcacttgcagcaggaagattgccagatgtccttgctccacagtatccatggcagtcaaatgacatgtcgatgaatatgttaccaccaaatcatagtagtgactttttgttggaacctcctgggcataataaagaaaatgaagatgatgtagagattatgtcaacggactcctcaagcagtagtagtgagtctgattgaaaaaccttaaaagacaatatacagaattgaatactgtagaattctgtttctttaacagtagcagggaaatgtaaactacaggtgacaaaaaatacccaggtaaacactggctttggtagaattgtgcagtcattaaaagtcaaaattttttgactttctttttaaagccaa

SEQ ID NO: 17431 - DNA, 1306 bp, Homo sapiens
  source 1..1306: mol_type = unassigned DNA
atgaagctgctctggtggtgtgactggcttccagaaaggtctcatgtgttcactcagagggaacttatagaaatgctggcaatttcaagaaaccaaaagttgttacaggctggagaggaaaaccaggtcctggagttgttaattcaccgagatggggaatttcaagaactaatgaaattggcacttaatcagggaaaaattcatcatgaaatgcaagttttagaaaaagaagtagagaagagagacagtgatattcagcagctacaaaaacagctaaaggaagcagaacaaatactggcaacagctgtttaccaagcgaaggagaaactcaagtcaatagaaaaagcaagaaaaggtgctatctcctctgaagaaataattaagtatgcacataggatcagtgcaagtaatgctgtatgtgctccactgacctgggttccaggggacccccggagaccctacccaactgatttagagatgagaagtgggttactgggtcagatgaacaatccttccactaatggcgtgaatggccatttaccaggagatgcacttgcagcaggaagattgccagatgtccttgctccacagtatccatggcagtcaaatgacatgtcgatgaatatgttaccaccaaatcatagtagtgactttttgttggaacctcctgggcataataaagaaaatgaagatgatgtagagattatgtcaacggactcctcaagcagtagtagtgagtctgattgaaaaaccttaaaagacaatatacagaattgaatactgtagaattctgtttctttaacagtagcagggaaatgtaaactacaggtgacaaaaaatacccaggtaaacactggctttggtagaattgtgcagtcattaaaagtcaaaattttttgactttctttttaaagccaaagaccatagttttagttttaagccactaggtagatatttaggggaatagtcaaaatttactgttgaaaaagcagttgctatgtgctttcttaccctgttctgttccagttttgctggatttgtacatagccattctagaaatagagttgagggaaattatccatatacatatcactaataggcttcttggaattatttagaaaagcatttttaaactggcagtggatgactgaataggcatcatatttctttttgtgtgtcatttaaaagtaacaaaaactgccatttgacagtaaaggctcttggcttctgttggaggcatgggaaattgtctcaatttgtacagtttgtaattgtaatttttgtaaataaatttgtttgtacattg

SEQ ID NO: 17432 - DNA, 911 bp, Homo sapiens
  source 1..911: mol_type = unassigned DNA
cttcgagtggtgagaaggagaaggagcggctgggaggcggtttgggagtggcgggtggtaacagcacacgagagcggctgctgtctgcgcttgaggacttggaggtcctgtctagggccgggtgtggtggctcacgcctataatccgagcactttgggaggccaaggcgggcggatcattggaacttcttcacagaatgaagctgctctggtggtgtgactggcttccagaaaggtctcatgtgttcactcagagggaacttatagaaatgctggcaatttcaagaaaccaaaagttgttacaggctggagaggaaaaccaggtcctggagttgttaattcaccgagatggggaatttcaagaactaatgaaattggcacttaatcagggaaaaattcatcatgaaatgcaagttttagaaaaagaagtagagaagagagacagtgatattcagcagctacaaaaacagctaaaggaagcagaacaaatactggcaacagctgtttaccaagcgaaggagaaactcaagtcaatagaaaaagcaagaaaaggtgctatctcctctgaagaaataattaagtatgcacataggatcagtgcaagtaatgctgtatgtgctccactgacctgggttccaggggacccccggagaccctacccaactgatttagagatgagaagtgggttactgggtcagatgaacaatccttccactaatggcgtgaatggccatttaccaggagatgcacttgcagcaggaagattgccagatgtccttgctccacagtatccatggcagtcaaatgacatgtcgatgaatatgttaccaccaaatcatagtagtgactttttgttggaacctcctgggcataataaagaaaatgaagatgatgtagagattatgtcaacgg

SEQ ID NO: 17433 - DNA, 2402 bp, Homo sapiens
  source 1..2402: mol_type = unassigned DNA
ttcacgttaagtcttacaagagcatgttaaacattaaaacataagattgtttctggtcaataaggggtctataaaaaataaagcaataaggtgtcttgttcaattttatgccttaattcaaaaagaaacgaagaaacggaaccctcagctacgacttttaaaagtcagtaacgggtggatgggaggagtcaaacatacgtaggcgcaacagcgagggatcggtctgaggcggagctagaatttcgttaaaggacagctcttacagccaatcaaggacagagtcggtggcttcttcccggaggagaccggaagttggtttcggctgcagaggggaaggcggctaccagtgtaaagccagagctgaggttcttgatagtccacaatgggtgaaccacagcaagtgagtgcacttccaccacctccaatgcaatatatcaaggaatatacggatgaaaatattcaagaaggcttagctcccaagcctccccctccaataaaagacagttacatgatgtttggcaatcagttccaatgtgatgatcttatcatccgccctttggaaagtcagggcatcgaacggcttcatcctatgcagtttgatcacaagaaagaactgagaaaacttaatatgtctatccttattaatttcttggaccttttagatattttaataaggagccctgggagtataaaacgagaagagaaactagaagatcttaagctgctttttgtacacgtgcatcatcttataaatgaataccgaccccaccaagcaagagagaccttgagagtcatgatggaggtccagaaacgtcaacggcttgaaacagctgagagatttcaaaagcacctggaacgagtaattgaaatgattcagaattgcttggcttctttgcctgatgatttgcctcattcagaagcaggaatgagagtaaaaactgaaccaatggatgctgatgatagcaacaattgtactggacagaatgaacatcaaagagaaaattcaggtcataggagagatcagattatagagaaagatgctgccttgtgtgtcctaattgatgagatgaatgaaagaccatgaaagatgtttctttttctttttttccttttgataatagcatcatatattagttcattttcttttggacagtcttaagagaagtttcactaaaaatgtaaacagctttaatcttgactccaaatttttcaattatgagatgtcataggcagtaatttcgctgtataacaagcatagacaaatgagtgtccctgcactaagaagaatcactttaaaaagcaaagtgttagctgctgttgtatgggacattcctatgttttagagttgcagtaaaactttgatgataacctcaataatagcaaagttttcgtctttgaaaaggggatttagcatttgctttaagaatgatagataaatggatattaagctctctacatgtaaaactatgaaatctttagacttattccattaaaaattttgcttaagctccaaaaagtagcataacatgttgatagagaggagcccagtagagttataaaatagaaacttcattttttcctcatgactgcttctgtaaacccactagctcagtcttttctccctatcctgaatggactcttgcagggaagtcccataaattgttgtttttttttccagtcactcaggtaataagtcctttggtcactttaagttacagacattaattttagtaattaagatgtctgtgtcattagctatacattttctttaaagctaagctcagacttgtttaagtccacaatgggaaaggggtttgatggcagagactgctaggtgtctaccaaagattcttgctctttgaagatatgttgtcaagatgtggcaatccagccagggacatttccctactcccagcatctctgtgagaacatatgactaagtcgtaggcggtgaaatgtgggcataggaatccaggcttgccccataaacatttcttgcatgatcctccattctcttctcccagctgctggttggacggtcgtatccaggataagtttggaagccaccgaagatggcaaagattgtcagtctggttctttgaatgaccgtgaggactaagtcttcctttcagtaactccactctgcccctagctaattggactttatatgagcactttcttctcttcttcccccgactgtccatctgctcttccaccaaggtgttagtggagagttgaccttgtgtctgaggatctctgcctgccgttttcttaatgtaggcccgtggttcttaaagtgtgtggtcctggaccagcagcattggtatcacttggggacttactagaaataaaagttttagtataatccgtaggttcagaaaaataaaaaataaatgagggtt

SEQ ID NO: 17434 - DNA, 1382 bp, Homo sapiens
  source 1..1382: mol_type = unassigned DNA
ttttcttccggaccccgcagcttcctctgtgctgggctgggaactggggaggcatggctgagttcggcctccaaaggcggtctttcgtctttctctcccgagtctctccgagagtgcggtctctccgagagcgcggaggcctcggggtggacagcctggaggagggggctctaagcgtggcagtctcggggcttcctccgtgttgggacgccgagccggagtggaggttgggagacctggcgtctagtccccgcgccgctgtttttctaagctgtgtggccttgggcgagtcatttgccctctccggctctttgtaacatgagagtagccctccctgcccttccttcttctgggagcagttatgaaacagctgaggttcttgatagtccacaatgggtgaaccacagcaagtgagtgcacttccaccacctccaatgcaatatatcaaggaatatacggatgaaaatattcaagaaggcttagctcccaagcctccccctccaataaaagacagttacatgatgtttggcaatcagttccaatgtgatgatcttatcatccgccctttggaaagtcagggcatcgaacggcttcatcctatgcagtttgatcacaagaaagaactgagaaaacttaatatgtctatccttattaatttcttggaccttttagatattttaataaggagccctgggagtataaaacgagaagagaaactagaagatcttaagctgctttttgtacacgtgcatcatcttataaatgaataccgaccccaccaagcaagagagaccttgagagtcatgatggaggtccagaaacgtcaacggcttgaaacagctgagagatttcaaaagcacctggaacgagtaattgaaatgattcagaattgcttggcttctttgcctgatgatttgcctcattcagaagcaggaatgagagtaaaaactgaaccaatggatgctgatgatagcaacaattgtactggacagaatgaacatcaaagagaaaattcaggtcataggagagatcagattatagagaaagatgctgccttgtgtgtcctaattgatgagatgaatgaaagaccatgaaagatgtttctttttctttttttccttttgataatagcatcatatattagttcattttcttttggacagtcttaagagaagtttcactaaaaatgtaaacagctttaatcttgactccaaatttttcaattatgagatgtcataggcagtaatttcgctgtataacaagcatagacaaatgagtgtccctgcactaagaagaatcactttaaaaagcaaagtgttagctgctgttgtatgggacattcctatgttttagagttgcagtaaaactttgatgataacctc

SEQ ID NO: 17435 - DNA, 979 bp, Homo sapiens
  source 1..979: mol_type = unassigned DNA
gatctataaaatgagattacaggagatgttttgaaagacatgttcccattagaaatgtccatgtgatggctgggtgctgtggctcatggctgtaatcccagcactttcggaggctgaggctggcggatcacctgagaaacgaagaaacggaaccctcagctacgacttttaaaagtcagtaacgggtggatgggaggagtcaaacatacgtaggcgcaacagcgagggatcggtctgaggcggagctagaatttcgttaaaggacagctcttacagccaatcaaggacagagtcggtggcttcttcccggaggagaccggaagttggtttcggctgcagaggggaaggcggctaccagtgtaaagccagagctgaggttcttgatagtccacaatgggtgaaccacagcaagtgagtgcacttccaccacctccaatgcaatatatcaaggaatatacggatgaaaatattcaagaaggcttagctcccaagcctccccctccaataaaagacagttacatgatgtttggcaatcagttccaatgtgatgatcttatcatccgccctttggaaagtcagggcatcgaacggcttcatcctatgcagtttgatcacaagaaagaactgagaaaacttaatatgtctatccttattaatttcttggaccttttagatattttaataaggagccctgggagtataaaacgagaagagaaactagaagatcttaagctgctttttgtacacgtgcatcatcttataaatgaataccgaccccaccaagcaagagagaccttgagagtcatgatggaggtccagaaacgtcaacggcttgaaacagctgagagatttcaaaagcacctggaacgagtaattgaaatgattcagaattgcttggcttctttgcctgatgatttgcctcattcagaagcaggaatgagagtaaaaactgaaccaatggatgctgatgatagcaaca

SEQ ID NO: 17436 - DNA, 2223 bp, Homo sapiens
  source 1..2223: mol_type = unassigned DNA
gtagagtgcgcgacgcttttggcgacccgacctctggctaacctacccccggagccatggcctctgctggggtggcagccgggcgacaggcggaggatgtattgccgccaacgtccgaccagccgctgcctgacaccaagccgctgccgcctcctcagccgccgccggtccctgcgcctcaaccgcagcagtcgccggcgccacggcctcagtcacctgcccgcgcgagggaggaagagaactactcctttttacctttggttcacaacatcatcaaatgcatggacaaggacagcccggaggtccaccaggacctgaacgccctcaaaagcaagttccaggagatgcgcaagctcatcagcaccatgcccggcatccacctgagccccgaacagcagcagcagcagctgcagagcctccgggagcaagtcaggaccaagaatgagcttctgcaaaagtacaagagcctctgcatgttcgaaatccccaaggagtagagtgaggctgacttccttagaaagagggggaagccaatggcctgtctccccactaccatccccaaacgctccttggggcgtggttcctgtggaccccagctcagctcgtcaagctgcaggggcggggctcctgtgctgctgcgcgcgcttcgcctgtgcgggagccagcgcagagcttggctgcgccgggggttcctcgtgtagatccatatgtctagatgcataataactggagtgcctgctggtggaagtcagaatgctcctggaggctgcagagggggtggaggactctcccctgcctctggggagggggccatctgctgcgcccggccccactgacagatctgaagagcacagtaggaagggaggcggctcctctttgcttccttccctctctctcctcccacccccataggatcagtgtgtaccaggtacacattgttcctgttaacagcagcttcttgaaacatttgcatagaattcactggacgaattaagcctgcactcatatggcatagaattgtgagagaatgttttgaaaggccagagggtggcctttttccccaaacagtttggttccttttatgtttgagccagtgaagggaactacgctttgggggcttcagcctagagccctgccaggcagcccctggctccaggttccctgcctcctagcgctctcctcgccttcagctcttgctcccttcctcgttcatcaccctcagtcagtgcccaagagtggccaaaccgcttcacatctgcagtgcttccccagggttgacaaggggccgtcctttccacacaggccagaagaggtcttcaggcgaaccgaccttcccccttctggcatttcagattccccttgctctggttaaaaggtctttccctcgtggcctttgcacttgcggcagcaacgtgtactacactgcagaagggttcagtatgcaccttgtgttgagagagaggcaaccctgggggccagttcaggtggtccccaaccataagctaggtctgaaagttacacagccaagtttgagctcttaaaagttgatgaacagcctcatttccccagcttccctgatttcttccagatgggacgttttatttgtgtgctctcccttgactgtcagattgaagtaagagcagttctctccgttgcctctcgaggaggaggtgcgaagtcctggagtattgtttgggtctcggaatgggcgcataacctgcgctgaccagtttaggggcttagcagatgcctgccagctgacctcgttggcaggagggttgggtggagatgtttttagcagagcttccattagtgtagacctgtagccacctgtcagaaggtgggtggcatattggggacctgggaatgtgtgaaggaggagatcaaatttcagtggctttggacagaaaagaaggctctggatttaagcgggtggtcacctgtgagaccaggtctaccttgggactgttatttaactgaatcagttatttccttgaaatttcacagtagtgggtgggcctgttttaaggctctgacagataccacgaaacatgaagcacgtggaactacaagacccccggggtctttctgagtgcaaggctgaaatggacaagggctcctcacgggggtggagggagccggagcctgccttgtgttccttttttgacttgtgacatttttcaaacacataattaaaaggacttatgctctgctgtctcagga

SEQ ID NO: 17437 - DNA, 1756 bp, Homo sapiens
  source 1..1756: mol_type = unassigned DNA
gggacgccgggggccggggccagggctttccgggcttcggtgaggccgccgtgggccccatcttccggcggtcgccggagtttgtggtgattgttgctgccgccgccaccgccccggctgccatctcctcctcctgggccgccgcctcctcctcttcctcctcctcctgggccgggctgatcccctccccgctgccgcctcctcctgggctgggcccgcggtgtctcgtcccctcgcggagccgctcctgccgccgccgccgccgcctcctcattcatcctcgtgcaccataggcggcacaggcaccaagatgtccaaccgagtggtctgccgagaagccagtcacgccgggagctggtacacagcctcaggaccgcagctgaatgcacagctagaaggttggctttcacaagtacagtctacaaaaagacctgctagagccattattgccccccatgcaggatatacgtactgtgggtcttgtgctgcccatgcttataaacaagtggatccgtctattacccggagaattttcatccttgggccttctcatcatgtgcccctctctcgatgtgcactttccagtgtggatatatataggacacctctgtatgaccttcgtattgaccaaaagatttacggagaactgtggaagacaggaatgtttgaacgcatgtctctgcagacagatgaagatgaacacagtattgaaatgcatttgccttatacagctaaagccatggaaagccataaggatgagtttaccattattcctgtactggttggagctctgagtgagtcaaaagaacaggaattcggaaaactcttcagtaaatatctagcggatcctagtaatctctttgtggtttcttctgatttctgccattggggtcaaaggttccgttacagttactatgatgaatcccagggggagatttatagatccattgaacatctagataaaatgggtatgagtattatagaacaattagaccctgtatcttttagcaattacttgaagaaataccataatactatatgtggaagacatcccattggggtgttattaaatgctatcacagagctccagaagaatggaatgaatatgagtttttcgtttttgaattatgcccagtcgagccagtgtagaaactggcaagacagttcagtgagttatgcagctggagcactcacggtccactgaagctctgaatcctcagggatgccacctgcacattctcatactctgtccggggtcccagcctagcctttaccacgatactggtcctggtttggggggattctgaaacctcaaactaatagaactttcttctctttttttctagtaggtgtagtccttccttaatttcaactcattaaaaaatgctttatagtttagggcagtggaaggaaggctggcatcaaaatattttgatcaaaaaagatgacaatgtaaaggctcagttgtggcagacagttttttgaaagtaacttgtaaagcatttaccatatcctaaatttgcactctttgcagacttgtgcacatatattccgctttcagaatagttttgcaaattgtacacaaacaaacaaaaaggtggaagctttttaataaagaaattgcatttataaatgatctgtattagaatataataaatctccagttatagtcaattactacccatgttgtacaacagataccttctattttagttgctaataaagggctacacaactcaaaatagtctgatttaaa

SEQ ID NO: 17438 - DNA, 1498 bp, Homo sapiens
  source 1..1498: mol_type = unassigned DNA
cctatctgtagatctgtttatcttcaatatagaaagagatttatttggaattgactcatgccattatggagggctgacaagtgccaagatgtgcagtcagcaagctggagacccaggagagctgacggaccgcagctgaatgcacagctagaaggttggctttcacaagtacagtctacaaaaagacctgctagagccattattgccccccatgcaggatatacgtactgtgggtcttgtgctgcccatgcttataaacaagtggatccgtctattacccggagaattttcatccttgggccttctcatcatgtgcccctctctcgatgtgcactttccagtgtggatatatataggacacctctgtatgaccttcgtattgaccaaaagatttacggagaactgtggaagacaggaatgtttgaacgcatgtctctgcagacagatgaagatgaacacagtattgaaatgcatttgccttatacagctaaagccatggaaagccataaggatgagtttaccattattcctgtactggttggagctctgagtgagtcaaaagaacaggaattcggaaaactcttcagtaaatatctagcggatcctagtaatctctttgtggtttcttctgatttctgccattggggtcaaaggttccgttacagttactatgatgaatcccagggggagatttatagatccattgaacatctagataaaatgggtatgagtattatagaacaattagaccctgtatcttttagcaattacttgaagaaataccataatactatatgtggaagacatcccattggggtgttattaaatgctatcacagagctccagaagaatggaatgaatatgagtttttcgtttttgaattatgcccagtcgagccagtgtagaaactggcaagacagttcagtgagttatgcagctggagcactcacggtccactgaagctctgaatcctcagggatgccacctgcacattctcatactctgtccggggtcccagcctagcctttaccacgatactggtcctggtttggggggattctgaaacctcaaactaatagaactttcttctctttttttctagtaggtgtagtccttccttaatttcaactcattaaaaaatgctttatagtttagggcagtggaaggaaggctggcatcaaaatattttgatcaaaaaagatgacaatgtaaaggctcagttgtggcagacagttttttgaaagtaacttgtaaagcatttaccatatcctaaatttgcactctttgcagacttgtgcacatatattccgctttcagaatagttttgcaaattgtacacaaacaaacaaaaaggtggaagctttttaataaagaaattgcatttataaatgatctgtattagaatataataaatctccagttatagtcaattactacccatgttgtacaacagataccttctattttagttgctaataaagggctacacaactcaaaa

SEQ ID NO: 17439 - DNA, 1482 bp, Homo sapiens
  source 1..1482: mol_type = unassigned DNA
atgctcagtgggcaggacccgttagagtggcgagcggcacaggcaccaagatgtccaaccgagtggtctgccgagaagccagtcacgccgggagctggtacacagcctcaggaccgcagctgaatgcacagctagaaggttggctttcacaagtacagtctacaaaaagacctgctagagccattattgccccccatgcaggatatacgtactgtgggtcttgtgctgcccatgcttataaacaagtggatccgtctattacccggagaattttcatccttgggccttctcatcatgtgcccctctctcgatgtgcactttccagtgtggatatatataggacacctctgtatgaccttcgtattgaccaaaagatttacggagaactgtggaagacaggaatgtttgaacgcatgtctctgcagacagatgaagatgaacacagtattgaaatgcatttgccttatacagctaaagccatggaaagccataaggatgagtttaccattattcctgtactggttggagctctgagtgagtcaaaagaacaggaattcggaaaactcttcagtaaatatctagcggatcctagtaatctctttgtggtttcttctgatttctgccattggggtcaaaggttccgttacagttactatgatgaatcccagggggagatttatagatccattgaacatctagataaaatgggtatgagtattatagaacaattagaccctgtatcttttagcaattacttgaagaaataccataatactatatgtggaagacatcccattggggtgttattaaatgctatcacagagctccagaagaatggaatgaatatgagtttttcgtttttgaattatgcccagtcgagccagtgtagaaactggcaagacagttcagtgagttatgcagctggagcactcacggtccactgaagctctgaatcctcagggatgccacctgcacattctcatactctgtccggggtcccagcctagcctttaccacgatactggtcctggtttggggggattctgaaacctcaaactaatagaactttcttctctttttttctagtaggtgtagtccttccttaatttcaactcattaaaaaatgctttatagtttagggcagtggaaggaaggctggcatcaaaatattttgatcaaaaaagatgacaatgtaaaggctcagttgtggcagacagttttttgaaagtaacttgtaaagcatttaccatatcctaaatttgcactctttgcagacttgtgcacatatattccgctttcagaatagttttgcaaattgtacacaaacaaacaaaaaggtggaagctttttaataaagaaattgcatttataaatgatctgtattagaatataataaatctccagttatagtcaattactacccatgttgtacaacagataccttctattttagttgctaataaagggctacacaactcaaaa

SEQ ID NO: 17440 - DNA, 1336 bp, Homo sapiens
  source 1..1336: mol_type = unassigned DNA
ccctccccgctgccgcctcctcctgggctgggcccgcggtgtctcgtcccctcgcggagccgctcctgccgccgccgccgccgcctcctcattcatcctcgtgcaccataggcggcacaggcaccaagatgtccaaccgagtggtctgccgagaagccagtcacgccgggagctggtacacagcctcaggaccgcagctgaatgcacagctagaaggttggctttcacaagtacagtctacaaaaagacctgctagagccattattgccccccggagaattttcatccttgggccttctcatcatgtgcccctctctcgatgtgcactttccagtgtggatatatataggacacctctgtatgaccttcgtattgaccaaaagatttacggagaactgtggaagacaggaatgtttgaacgcatgtctctgcagacagatgaagatgaacacagtattgaaatgcatttgccttatacagctaaagccatggaaagccataaggatgagtttaccattattcctgtactggttggagctctgagtgagtcaaaagaacaggaattcggaaaactcttcagtaaatatctagcggatcctagtaatctctttgtggtttcttctgatttctgccattggggtcaaaggttccgttacagttactatgatgaatcccagggggagatttatagatccattgaacatctagataaaatgggtatgagtattatagaacaattagaccctgtatcttttagcaattacttgaagaaataccataatactatatgtggaagacatcccattggggtgttattaaatgctatcacagagctccagaagaatggaatgaatatgagtttttcgtttttgaattatgcccagtcgagccagtgtagaaactggcaagacagttcagtgagttatgcagctggagcactcacggtccactgaagctctgaatcctcagggatgccacctgcacattctcatactctgtccggggtcccagcctagcctttaccacgatactggtcctggtttggggggattctgaaacctcaaactaatagaactttcttctctttttttctagtaggtgtagtccttccttaatttcaactcattaaaaaatgctttatagtttagggcagtggaaggaaggctggcatcaaaatattttgatcaaaaaagatgacaatgtaaaggctcagttgtggcagacagttttttgaaagtaacttgtaaagcatttaccatatcctaaatttgcactctttgcagacttgtgcacatatattccgctttcagaatagttttgcaaattgtacacaaac

SEQ ID NO: 17441 - DNA, 315 bp, Homo sapiens
  source 1..315: mol_type = unassigned DNA
gagaccttgggggtgcaaatcgatgagagatgcctgtatatgatggatacccgcgggactgtcctcgtggaaagccgcatccgcgagccctaggtgctctccatttgaggaagttggctgggggagggggcttgccttgcggctgcgtcctgctccccgcgccctgcccccacctcccagcctctgctgccgctaaaccccggagagcggagcgtgcacgttgagattcctcggcgggcggcacaggcaccaagatgtccaaccgagtggtctgccgagaagccagtcacgccgggagctggtacacagcctcag

SEQ ID NO: 17442 - DNA, 6575 bp, Homo sapiens
  source 1..6575: mol_type = unassigned DNA
caccatgtctaggaggaccgaggaaaggcgctctggccttaccagacacgtcggacgtctatgacacagcccctctatccgttgccggcagctggcgccagactctctggtcgcggtttggaactgcgcgggaagtgggtggtgggcgggcaagcggtagtgggttgtcccttggagctgcccaatcgacgtgcattattctgttggcgcacggcggccttcaattaccgtctcattaactgatctcagcagcctgggagacaccacctatttgaactctaagggggcggggctttgggtgtgcctccgctcgactggctgcggttgtgaaagacagcggcagaagccaatcagcaaataagctctttttcggcacacgcagtcgctccacctgggtcgcgaccgttactggtggcgcgcgcggggacttaaagtagatcatggaggacacccaggctattgactgggatgttgaagaagaggaggagacagagcaatccagtgaatccttgaggtgtaacgtggagccagtagggcggctacatatctttagtggtgcccatggaccagaaaaagatttcccactacacctcgggaagaatgtggtaggccgaatgcctgactgctctgtggccctgccctttccatctatctccaaacaacatgcagagattgaaatcttagcctgggacaaggcacctatcctccgagactgtgggagccttaatggtactcaaatcctgagacctcctaaggttttgagccctggggtgagtcaccgtctgagggaccaggaattgattctctttgctgacttgctctgccagtaccatcgcctggatgtctctctgccctttgtctcccggggccctctgacagtagaagagacacccagagtacagggagaaactcaaccccagaggcttctgttggctgaggactcggaggaggaagtagattttctttctgaaaggcgtatggtaaaaaaatcaaggaccacatcttcctctgtgatagttccagagagtgatgaagaggggcattccccggtcctgggcggccttgggccgccttttgccttcaatttgaacagtgacacagatgtggaagaaggtcagcaaccagccacagaggaggcctcctcagctgccagaagaggtgccactgtagaggcaaagcagtctgaagctgaagttgtaactgaaatccagcttgaaaaggatcagcctttagtgaaggagagggacaatgatacaaaagtcaagaggggtgcagggaatggggtggttccagctggggtgattctggagaggagccaacctcctggagaggacagtgacacagatgtggatgatgacagcaggcctcctggaaggccagctgaggtccatttggaaagggctcagccttttggcttcatcgacagcgacactgatgcggaagaagagaggatcccagcaaccccagttgtcattcctatgaagaagaggaagatcttccatggagtaggtacaaggggtcctggagcaccaggcctggcccatctgcaggagagccaggctggtagtgatacagatgtggaagaaggcaaggccccacaggctgtccctctggagaaaagccaagcttccatggttatcaacagcgatacagatgacgaggaagaagtctcagcagcgctgactttggcacatctgaaagagagccagcctgctatatggaacagagatgcagaagaggacatgccccaacgtgtggtccttctgcagcgaagccaaaccaccactgagagagacagtgacacagacgtggaggaggaagagctcccagtggaaaatagagaagctgtcctcaaggatcacacaaagattagagcccttgttagagcacattcagaaaaggaccaacctccttttggggacagtgatgacagtgtggaagcagataagagctcacctgggatccacctggagagaagccaagcctccaccacagtggacatcaacacacaagtggagaaggaagtcccgccagggtcagccattatacatataaagaagcatcaggtgtctgtggaggggacaaatcaaacagatgtgaaagcagttgggggaccagcaaagctgcttgtggtatctctagaggaagcctggcctctgcatggggactgtgaaacagatgcagaggagggcacctccctaacagcctcagtagttgcagatgtaagaaagagccagcttccagcagaaggggatgctggggcagagtgggctgcagctgttcttaagcaggagagagctcatgaggtgggggcccagggtgggccacctgtggcacaagtggagcaggacctccctatctcaagagagaacctcacagatctggtggtggacacagacactctaggggaatccacccagccacagagagagggagcccaggtccccacaggaagggagagagaacaacatgtgggtgggaccaaggactctgaagacaactatggtgattctgaagatctggacctacaagctacccagtgctttctggagaatcagggcctggaagcagtccagagcatggaggatgaacctacccaggccttcatgttgactccaccccaagagcttggcccttcccattgcagcttccagacaacaggcctcctgaattgcaagatgccacctgctgagaaggcttccaggatcagagctgctgagaaggtttccaggggcgatcaggaatctccagatgcttgtctgcctcctacagtacctgaagccccagccccaccccaaaagccccttaactctcagagccagaaacatcttgcacctccgccccttctttctccccttttaccttctatcaagccaaccgttcgtaagaccaggcaagatgggagtcaggaagctccagaggctcccttgtcctcagagctggagcctttccacccaaagcctaaaattagaactcggaagtcctccagaatgacaccctttccagctacctctgctgcccctgagccccacccttccacctccacagcccagccagtcactcccaagcccacatctcaggccactaggagcaggacaaataggtcctctgtcaagacccctgaaccagttgtccccacagcccctgagctccagccttccacctccacagaccagcctgtcacctctgagcccacatctcaggttactaggggaagaaaaagtagatcctctgtcaagacccctgaaacagttgtgcccacagcccttgagctccagccttccacctccaccgaccgacctgtcacctctgaacccacctctcaggctactaggggaagaaaaaatagatcctctgtcaagacccctgaaccagttgtccccacagcccctgagctccagccttccacctccacagaccagcctgtcacttctgagcccacatatcaggctactaggggaagaaaaaatagatcctctgtcaagacccctgaaccagttgtgcccacagcccctgagctccggccttccacctccacagaccgacctgtcacccccaagcccacatctcggaccactaggagcaggacaaatatgtcctctgtcaagacccctgaaacagttgtccccacagcccctgagctccagatttccacctccacagaccaacctgtcacccctaagcccacatctcggaccactaggagcaggacaaatatgtcctctgtgaagaaccctgaatcaactgtccctatagcccctgagctcccaccttccacctccacagagcagcctgtcacccctgagcccacatctcgggctactaggggaagaaaaaatagatcctctggcaagacccctgaaacacttgtccccacagcccctaagctcgagccttccacttccacagaccaacctgtcactcctgagcccacatctcaggccaccaggggcaggacaaataggtcctctgtgaagacccctgaaacagttgtccccacagcccctgagctccagccttccacctccacagaccagcctgttacccctgagcctacgtctcaggctactaggggaagaacagatagatcctctgtcaagactcctgaaacagttgtccccacagcccctgagctacaggcttccgcctccacagaccagcctgtcacctctgagcccacatctcggaccactaggggaagaaaaaatcggtcctctgtcaagacccctgaaacagttgtgcccgcagcccctgagctccagccttccacctccacagaccaacctgtcacccctgagcccacatctcgggccactaggggcaggacaaataggtcctctgtcaagacccctgaatcaattgtccctatagcccctgagcttcagccttccacctccagaaaccagcttgtcacccctgagcccacatctcgggccactaggtgcaggacaaataggtcctctgtcaagacccctgagccagttgtccccacagcccctgagccccatcctaccacctccacagaccagcctgtcacccccaagctcacatctagggccactaggagaaagacaaataggtcctctgtcaagactcccaaaccagttgaaccagcagcctctgatcttgagccttttacccccacagaccagtccgtcacccctgaggccatagctcagggtggtcagagcaaaacactgaggtcttccacagtaagagctatgccggttcctaccacccctgaattccaatctcctgtcaccacagaccagcctatttcccctgagcctattactcaacccagttgcatcaagaggcagagagccgctgggaaccctggctccctcgcagctcccattgaccataagccttgctctgcacccttggaacctaaatcccaggcctcaaggaaccaaagatggggagcagtgagagcagctgaatcccttacagccattcctgagcctgcctctccccagcttcttgagacaccaattcatgcctcccagatccaaaaggtggaaccagcaggtagatctaggttcaccccggagctccagcctaaggcctctcaaagccgcaagaggtctttagctaccatggattcaccaccacatcaaaaacagccccaaagaggggaagtctcccagaagacagtgattatcaaggaagaggaagaagatactgcagagaagccagggaaggaagaggatgtcgtgactccaaaaccaggcaagagaaagagagaccaggcagaggaggagcccaacagaataccaagccgcagcctccgacggaccaaacttaaccaagaatcaacagcccccaaagtgctcttcacaggagtggtggatgctcggggagagcgggctgtgctggcactggggggaagtctggctggttcagcggcagaggcttcccacctggtcactgatcgcatccgccggacagtcaagttcctgtgtgccctggggcggggaatccccattctgtccctggactggctgcatcagtcccgcaaggctggtttcttcttacccccggatgaatatgtggtgaccgaccctgagcaagagaagaactttggctttagccttcaagacgcactgagcagggctcgggagcgaaggctgctagagggctatgagatctatgtgacccctggagtccagccaccaccacctcagatgggagagattattagctgctgtggaggcacatacctacccagcatgcctcggtcctataagcctcagagagttgtgatcacatgccctcaggacttccctcattgctccattccactacgggttgggctgcccctcctctcgcctgagttcctgctgactggagtgctgaagcaggaagccaagccagaggcctttgtcctctcccctttggagatgtcatccacctgagaactccactacccttttccctcccagaccacgaattagaagatatgtggaagaaagaactcagggcgttagaaaggattggggtatattgatacaacttgtcctggaacatgggtgggaccagaaatctttatgaataaatgaaaagataagggatttggaagccacaggttgttttttgtttgtttgtttgtttttttaatggccattttattttatttgtatttatagttttttatttgtatagatttaggggatacaagatttcttacatgcatgtattaaatggccattttaaaattagctagtttcatgctcagatgtcataagtggcagctatctttagccagactgttgcagttattgctcgatgccactcatggtgtcctacctcctatttggaaaccatctctatttttttcttactgagattcttactttggggtcaggaacttgaagggatgcttggagtgagtagatttgagggtccagttatggagtgctactaaaacattttcttctctcctggcctctggaagcatctttagctttgactttgggcaagtctctgtacttttctggccagcttttccaggatttataaaattagagcttcggcttgacctctgtgataaataaatattcactctgtgcctt

SEQ ID NO: 17443 - DNA, 7576 bp, Homo sapiens
  source 1..7576: mol_type = unassigned DNA
ttggatttaagaaaatgacctcaaaatgtccgtcagagacgtattcccaggaagaaagatattacttctactacaaaccaaatcaaaaggaaatgaaattccaatgcaacaggagtgaactgccacgcctacgggctgttctccaaactgcagcctccagccacgactgcaacgcgcaacccactttcatttctcatgagtcagcggacaccatgtctaggaggaccgaggaaaggcgctctggccttaccagacacgtcggacgtctatgacacagcccctctatccgttgccggcagctggcgccagactctctggtcgcggtttggaactgcgcgggaagtgggtggtgggcgggcaagcggtagtgggttgtcccttggagctgcccaatcgacgtgcattattctgttggcgcacggcggccttcaattaccgtctcattaactgatctcagcagcctgggagacaccacctatttgaactctaagggggcggggctttgggtgtgcctccgctcgactggctgcggttgtgaaagacagcggcagaagccaatcagcaaataagctctttttcggcacacgcagtcgctccacctgggtcgcgaccgttactggtggcgcgcgcggggacttaaagtagatcatggaggacacccaggctattgactgggatgttgaagaagaggaggagacagagcaatccagtgaatccttgaggtgtaacgtggagccagtagggcggctacatatctttagtggtgcccatggaccagaaaaagatttcccactacacctcgggaagaatgtggtaggccgaatgcctgactgctctgtggccctgccctttccatctatctccaaacaacatgcagagattgaaatcttagcctgggacaaggcacctatcctccgagactgtgggagccttaatggtactcaaatcctgagacctcctaaggttttgagccctggggtgagtcaccgtctgagggaccaggaattgattctctttgctgacttgctctgccagtaccatcgcctggatgtctctctgccctttgtctcccggggccctctgacagtagaagagacacccagagtacagggagaaactcaaccccagaggcttctgttggctgaggactcggaggaggaagtagattttctttctgaaaggcgtatggtaaaaaaatcaaggaccacatcttcctctgtgatagttccagagagtgatgaagaggggcattccccggtcctgggcggccttgggccgccttttgccttcaatttgaacagtgacacagatgtggaagaaggtcagcaaccagccacagaggaggcctcctcagctgccagaagaggtgccactgtagaggcaaagcagtctgaagctgaagttgtaactgaaatccagcttgaaaaggatcagcctttagtgaaggagagggacaatgatacaaaagtcaagaggggtgcagggaatggggtggttccagctggggtgattctggagaggagccaacctcctggagaggacagtgacacagatgtggatgatgacagcaggcctcctggaaggccagctgaggtccatttggaaagggctcagccttttggcttcatcgacagcgacactgatgcggaagaagagaggatcccagcaaccccagttgtcattcctatgaagaagaggaagatcttccatggagtaggtacaaggggtcctggagcaccaggcctggcccatctgcaggagagccaggctggtagtgatacagatgtggaagaaggcaaggccccacaggctgtccctctggagaaaagccaagcttccatggttatcaacagcgatacagatgacgaggaagaagtctcagcagcgctgactttggcacatctgaaagagagccagcctgctatatggaacagagatgcagaagaggacatgccccaacgtgtggtccttctgcagcgaagccaaaccaccactgagagagacagtgacacagacgtggaggaggaagagctcccagtggaaaatagagaagctgtcctcaaggatcacacaaagattagagcccttgttagagcacattcagaaaaggaccaacctccttttggggacagtgatgacagtgtggaagcagataagagctcacctgggatccacctggagagaagccaagcctccaccacagtggacatcaacacacaagtggagaaggaagtcccgccagggtcagccattatacatataaagaagcatcaggtgtctgtggaggggacaaatcaaacagatgtgaaagcagttgggggaccagcaaagctgcttgtggtatctctagaggaagcctggcctctgcatggggactgtgaaacagatgcagaggagggcacctccctaacagcctcagtagttgcagatgtaagaaagagccagcttccagcagaaggggatgctggggcagagtgggctgcagctgttcttaagcaggagagagctcatgaggtgggggcccagggtgggccacctgtggcacaagtggagcaggacctccctatctcaagagagaacctcacagatctggtggtggacacagacactctaggggaatccacccagccacagagagagggagcccaggtccccacaggaagggagagagaacaacatgtgggtgggaccaaggactctgaagacaactatggtgattctgaagatctggacctacaagctacccagtgctttctggagaatcagggcctggaagcagtccagagcatggaggatgaacctacccaggccttcatgttgactccaccccaagagcttggcccttcccattgcagcttccagacaacaggtaccctagatgaaccatgggaggtcctggctacacagccattctgtctgagagagtctgaggactctgagacccagccttttgacacgcaccttgaggcctatggaccttgcctgtctccacctagggcaataccaggagaccaacatccagagagcccagttcacacagagccaatggggattcaaggcagagggaggcagactgtggataaagtcatgggtataccaaaagaaacagcagagagggtgggccctgagagagggccattggagagagaaactgagaaactgctaccagaaagacagacagatgtgacaggagaggaagaattaaccaaggggaaacaggacagagaacaaaaacagttgttagctagagacacccagagacaagaatctgacaaaaatggggaaagtgcaagtcctgaaagagatagggagagtttgaaggtagaaattgagacatctgaggaaatacaagagaaacaagtacagaagcagacccttccaagcaaagcatttgagagagaagtagagagaccagtagcaaacagagagtgcgatccagccgagttagaagagaaggtgcccaaagtgatcctggagagagatacacagagaggggagccagagggagggagccaggaccagaaagggcaggcctccagcccaacaccagagcctggggtgggggcgggggaccttccgggacctacctcagcccccgtaccttctgggagccagtcaggtggaaggggatccccagtgagccccaggaggcatcagaaaggcctcctgaattgcaagatgccacctgctgagaaggcttccaggatcagagctgctgagaaggtttccaggggcgatcaggaatctccagatgcttgtctgcctcctacagtacctgaagccccagccccaccccaaaagccccttaactctcagagccagaaacatcttgcacctccgccccttctttctccccttttaccttctatcaagccaaccgttcgtaagaccaggcaagatgggagtcaggaagctccagaggctcccttgtcctcagagctggagcctttccacccaaagcctaaaattagaactcggaagtcctccagaatgacaccctttccagctacctctgctgcccctgagccccacccttccacctccacagcccagccagtcactcccaagcccacatctcaggccactaggagcaggacaaataggtcctctgtcaagacccctgaaccagttgtccccacagcccctgagctccagccttccacctccacagaccagcctgtcacctctgagcccacatctcaggttactaggggaagaaaaagtagatcctctgtcaagacccctgaaacagttgtgcccacagcccttgagctccagccttccacctccaccgaccgacctgtcacctctgaacccacctctcaggctactaggggaagaaaaaatagatcctctgtcaagacccctgaaccagttgtccccacagcccctgagctccagccttccacctccacagaccagcctgtcacttctgagcccacatatcaggctactaggggaagaaaaaatagatcctctgtcaagacccctgaaccagttgtgcccacagcccctgagctccggccttccacctccacagaccgacctgtcacccccaagcccacatctcggaccactaggagcaggacaaatatgtcctctgtcaagacccctgaaacagttgtccccacagcccctgagctccagatttccacctccacagaccaacctgtcacccctaagcccacatctcggaccactaggagcaggacaaatatgtcctctgtgaagaaccctgaatcaactgtccctatagcccctgagctcccaccttccacctccacagagcagcctgtcacccctgagcccacatctcgggctactaggggaagaaaaaatagatcctctggcaagacccctgaaacacttgtccccacagcccctaagctcgagccttccacttccacagaccaacctgtcactcctgagcccacatctcaggccaccaggggcaggacaaataggtcctctgtgaagacccctgaaacagttgtccccacagcccctgagctccagccttccacctccacagaccagcctgttacccctgagcctacgtctcaggctactaggggaagaacagatagatcctctgtcaagactcctgaaacagttgtccccacagcccctgagctacaggcttccgcctccacagaccagcctgtcacctctgagcccacatctcggaccactaggggaagaaaaaatcggtcctctgtcaagacccctgaaacagttgtgcccgcagcccctgagctccagccttccacctccacagaccaacctgtcacccctgagcccacatctcgggccactaggggcaggacaaataggtcctctgtcaagacccctgaatcaattgtccctatagcccctgagcttcagccttccacctccagaaaccagcttgtcacccctgagcccacatctcgggccactaggtgcaggacaaataggtcctctgtcaagacccctgagccagttgtccccacagcccctgagccccatcctaccacctccacagaccagcctgtcacccccaagctcacatctagggccactaggagaaagacaaataggtcctctgtcaagactcccaaaccagttgaaccagcagcctctgatcttgagccttttacccccacagaccagtccgtcacccctgaggccatagctcagggtggtcagagcaaaacactgaggtcttccacagtaagagctatgccggttcctaccacccctgaattccaatctcctgtcaccacagaccagcctatttcccctgagcctattactcaacccagttgcatcaagaggcagagagccgctgggaaccctggctccctcgcagctcccattgaccataagccttgctctgcacccttggaacctaaatcccaggcctcaaggaaccaaagatggggagcagtgagagcagctgaatcccttacagccattcctgagcctgcctctccccagcttcttgagacaccaattcatgcctcccagatccaaaaggtggaaccagcaggtagatctaggttcaccccggagctccagcctaaggcctctcaaagccgcaagaggtctttagctaccatggattcaccaccacatcaaaaacagccccaaagaggggaagtctcccagaagacagtgattatcaaggaagaggaagaagatactgcagagaagccagggaaggaagaggatgtcgtgactccaaaaccaggcaagagaaagagagaccaggcagaggaggagcccaacagaataccaagccgcagcctccgacggaccaaacttaaccaagaatcaacagcccccaaagtgctcttcacaggagtggtggatgctcggggagagcgggctgtgctggcactggggggaagtctggctggttcagcggcagaggcttcccacctggtcactgatcgcatccgccggacagtcaagttcctgtgtgccctggggcggggaatccccattctgtccctggactggctgcatcagtcccgcaaggctggtttcttcttacccccggatgaatatgtggtgaccgaccctgagcaagagaagaactttggctttagccttcaagacgcactgagcagggctcgggagcgaaggctgctagagggctatgagatctatgtgacccctggagtccagccaccaccacctcagatgggagagattattagctgctgtggaggcacatacctacccagcatgcctcggtcctataagcctcagagagttgtgatcacatgccctcaggacttccctcattgctccattccactacgggttgggctgcccctcctctcgcctgagttcctgctgactggagtgctgaagcaggaagccaagccagaggcctttgtcctctcccctttggagatgtcatccacctgagaactccactacccttttccctcccagaccacgaattagaagatatgtggaagaaagaactcagggcgttagaaaggattggggtatattgatacaacttgtcctggaacatgggtgggaccagaaatctttatgaataaatgaaaagataagggatttggaagccacaggttgttttttgtttgtttgtttgtttttttaatggccattttattttatttgtatttatagttttttatttgtatagatttaggggatacaagatttcttacatgcatgtattaaatggccattttaaaattagctagtttcatgctcagatgtcataagtggcagctatctttagccagactgttgcagttattgctcgatgccactcatggtgtcctacctcctatttggaaaccatctctatttttttcttactgagattcttactttggggtcaggaacttgaagggatgcttggagtgagtagatttgagggtccagttatggagtgctactaaaacattttcttctctcctggcctctggaagcatctttagctttgactttgggcaagtctctgtacttttctggccagcttttccaggatttataaaattagagcttcggcttgacctctgtgataaataaatattcactctgtgcctta

SEQ ID NO: 17444 - DNA, 582 bp, Homo sapiens
  source 1..582: mol_type = unassigned DNA
gtaccttgggtgcgactgggcggaggtgacttggaagttcgcttctcggactgtaatactcatccttacctggcgccccgctccgagtttagatcatggaggacacccaggctattgactgggatgttgaagaagaggaggagacagagcaatccagtgaatccttgaggtgtaacgtggagccagtagggcggctacatatctttagtggtgcccatggaccagaaaaagatttcccactacacctcgggaagaatgtggtaggccgaatgcctgactgctctgtggccctgccctttccatctatctccaaacaacatgcagagattgaaatcttagcctgggacaaggcacctatcctccgagactgtgggagccttaatggtactcaaatcctgagacctcctaaggttttgagccctggggtgagtcaccgtctgagggaccaggaattgattctctttgctgacttgctctgccagtaccatcgcctggatgtctctctgccctttgtctcccggggccctctgacagtagaagagacacccagagtacagggagaaactcaaccccagaggcttc

SEQ ID NO: 17445 - DNA, 583 bp, Homo sapiens
  source 1..583: mol_type = unassigned DNA
aatactcatccttacctggcgccccgctccgagtttaggtatgaagacacagggagacgtcgggccacaagggaacccactgaggtggggaccaaagatggtggctctttgaattggagccaagcgtggtgggcacccgctgagttggcctgtcataaagacggagttgacactttatccatggggcatcctactttccctacctgtcaacagtttccctctagagtggcatattttcagatcatggaggacacccaggctattgactgggatgttgaagaagaggaggagacagagcaatccagtgaatccttgaggtgtaacgtggagccagtagggcggctacatatctttagtggtgcccatggaccagaaaaagatttcccactacacctcgggaagaatgtggtaggccgaatgcctgactgctctgtggccctgccctttccatctatctccaaacaacatgcagagattgaaatcttagcctgggacaaggcacctatcctccgagactgtgggagccttaatggtactcaaatcctgagacctcctaaggttttgagccctggggtgagtcacc

SEQ ID NO: 17446 - DNA, 582 bp, Homo sapiens
  source 1..582: mol_type = unassigned DNA
attaactgatctcagcagcctgggagacaccacctatttgaactctaagggggcggggctttgggtgtgcctccgctcgactggctgcggttgtgaaagacagcggcagaagccaatcagcaaataagctctttttcggcacacgcagtcgctccacccgggtcgcgaccgttactggtggcgcgcgcggggacttaaaatcatggaggacacccaggctattgactgggatgttgaagaagaggaggagacagagcaatccagtgaatccttgaggtgtaacgtggagccagtagggcggctacatatctttagtggtgcccatggaccagaaaaagatttcccactacacctcgggaagaatgtggtaggccgaatgcctgactgctctgtggccctgccctttccatctatctccaaacaacatgcagagattgaaatcttagcctgggacaaggcacctatcctccgagactgtgggagccttaatggtactcaaatcctgagacctcctaaggttttgagccctggggtgagtcaccgtctgagggaccaggaattgattctctttgctgacttgct

SEQ ID NO: 17447 - DNA, 582 bp, Homo sapiens; identical to SEQ ID NO: 17444
  source 1..582: mol_type = unassigned DNA

SEQ ID NO: 17448 - DNA, 916 bp, Homo sapiens
  source 1..916: mol_type = unassigned DNA
acatgtgggtgggaccaaggactctgaagacaactatggtgattctgaagatctggacctacaagctacccagtgctttctggagaatcagggcctggaagcagtccagagcatggaggatgaacctacccaggccttcatgttgactccaccccaagagcttggcccttcccattgcagcttccagacaacaggcctcctgaattgcaagatgccacctgctgagaaggcttccaggatcagagctgctgagaaggtttccaggggcgatcaggaatctccagatgcttgtctgcctcctacagtacctgaagccccagccccaccccaaaagccccttaactctcagagccagaaacatcttgcacctccgccccttctttctccccttttaccttctatcaagccaaccgttcgtaagaccaggcaagatgggagtcaggaagctccagaggctcccttgtcctcagagctggagcctttccacccaaagcctaaaattagaactcggaagtcctccagaatgacaccctttccagctacctctgctgcccctgagccccacccttccacctccacagcccagccagtcactcccaagcccacatctcaggccactaggagcaggacaaataggtcctctgtcaagacccctgaaccagttgtccccacagcccctgagctccagccttccacctccacagaccagcctgtcacctctgagcccacatctcaggttactaggggaagaaaaagtagatcctctgtcaagacccctgaaacagttgtgcccacagcccttgagctccagccttccacctccaccgaccgacctgtcacctctgaacccacctctcaggctactaggggaagaaaaaatagatcctctgtcaagacccctgaaccagttgtcccc

SEQ ID NO: 17449 - DNA, 582 bp, Homo sapiens; identical to SEQ ID NO: 17446
  source 1..582: mol_type = unassigned DNA

SEQ ID NO: 17450 - DNA, 916 bp, Homo sapiens; identical to SEQ ID NO: 17448
  source 1..916: mol_type = unassigned DNA

SEQ ID NO: 17451 - DNA, 916 bp, Homo sapiens; identical to SEQ ID NO: 17448
  source 1..916: mol_type = unassigned DNA

SEQ ID NO: 17452 - DNA, 7576 bp, Homo sapiens
  source 1..7576: mol_type = unassigned DNA
ttggatttaagaaaatgacctcaaaatgtccgtcagagacgtattcccaggaagaaagatattacttctactacaaaccaaatcaaaaggaaatgaaattccaatgcaacaggagtgaactgccacgcctacgggctgttctccaaactgcagcctccagccacgactgcaacgcgcaacccactttcatttctcatgagtcagcggacaccatgtctaggaggaccgaggaaaggcgctctggccttaccagacacgtcggacgtctatgacacagcccctctatccgttgccggcagctggcgccagactctctggtcgcggtttggaactgcgcgggaagtgggtggtgggcgggcaagcggtagtgggttgtcccttggagctgcccaatcgacgtgcattattctgttggcgcacggcggccttcaattaccgtctcattaactgatctcagcagcctgggagacaccacctatttgaactctaagggggcggggctttgggtgtgcctccgctcgactggctgcggttgtgaaagacagcggcagaagccaatcagcaaataagctctttttcggcacacgcagtcgctccacccgggtcgcgaccgttactggtggcgcgcgcggggacttaaagtagatcatggaggacacccaggctattgactgggatgttgaagaagaggaggagacagagcaatccagtgaatccttgaggtgtaacgtggagccagtagggcggctacatatctttagtggtgcccatggaccagaaaaagatttcccactacacctcgggaagaatgtggtaggccgaatgcctgactgctctgtggccctgccctttccatctatctccaaacaacatgcagagattgaaatcttagcctgggacaaggcacctatcctccgagactgtgggagccttaatggtactcaaatcctgagacctcctaaggttttgagccctggggtgagtcaccgtctgagggaccaggaattgattctctttgctgacttgctctgccagtaccatcgcctggatgtctctctgccctttgtctcccggggccctctgacagtagaagagacacccagagtacagggagaaactcaaccccagaggcttctgttggctgaggactcggaggaggaagtagattttctttctgaaaggcgtatggtaaaaaaatcaaggaccacatcttcctctgtgatagttccagagagtgatgaagaggggcattccccggtcctgggcggccttgggccgccttttgccttcaatttgaacagtgacacagatgtggaagaaggtcagcaaccagccacagaggaggcctcctcagctgccagaagaggtgccactgtagaggcaaagcagtctgaagctgaagttgtaactgaaatccagcttgaaaaggatcagcctttagtgaaggagagggacaatgatacaaaagtcaagaggggtgcagggaatggggtggttccagctggggtgattctggagaggagccaacctcctggagaggacagtgacacagatgtggatgatgacagcaggcctcctggaaggccagctgaggtccatttggaaagggctcagccttttggcttcatcgacagcgacactgatgcggaagaagagaggatcccagcaaccccagttgtcattcctatgaagaagaggaagatcttccatggagtaggtacaaggggtcctggagcaccaggcctggcccatctgcaggagagccaggctggtagtgatacagatgtggaagaaggcaaggccccacaggctgtccctctggagaaaagccaagcttccatggttatcaacagcgatacagatgacgaggaagaagtctcagcagcgctgactttggcacatctgaaagagagccagcctgctatatggaacagagatgcagaagaggacatgccccaacgtgtggtccttctgcagcgaagccaaaccaccactgagagagacagtgacacagacgtggaggaggaagagctcccagtggaaaatagagaagctgtcctcaaggatcacacaaagattagagcccttgttagagcacattcagaaaaggaccaacctccttttggggacagtgatgacagtgtggaagcagataagagctcacctgggatccacctggagagaagccaagcctccaccacagtggacatcaacacacaagtggagaaggaagtcccgccagggtcagccattatacatataaagaagcatcaggtgtctgtggaggggacaaatcaaacagatgtgaaagcagttgggggaccagcaaagctgcttgtggtatctctagaggaagcctggcctctgcatggggactgtgaaacagatgcagaggagggcacctccctaacagcctcagtagttgcagatgtaagaaagagccagcttccagcagaaggggatgctggggcagagtgggctgcagctgttcttaagcaggagagagctcatgaggtgggggcccagggtgggccacctgtggcacaagtggagcaggacctccctatctcaagagagaacctcacagatctggtggtggacacagacactctaggggaatccacccagccacagagagagggagcccaggtccccacaggaagggagagagaacaacatgtgggtgggaccaaggactctgaagacaactatggtgattctgaagatctggacctacaagctacccagtgctttctggagaatcagggcctggaagcagtccagagcatggaggatgaacctacccaggccttcatgttgactccaccccaagagcttggcccttcccattgcagcttccagacaacaggtaccctagatgaaccatgggaggtcctggctacacagccattctgtctgagagagtctgaggactctgagacccagccttttgacacgcaccttgaggcctatggaccttgcctgtctccacctagggcaataccaggagaccaacatccagagagcccagttcacacagagccaatggggattcaaggcagagggaggcagactgtggataaagtcatgggtataccaaaagaaacagcagagagggtgggccctgagagagggccattggagagagaaactgagaaactgctaccagaaagacagacagatgtgacaggagaggaagaattaaccaaggggaaacaggacagagaacaaaaacagttgttagctagagacacccagagacaagaatctgacaaaaatggggaaagtgcaagtcctgaaagagatagggagagtttgaaggtagaaattgagacatctgaggaaatacaagagaaacaagtacagaagcagacccttccaagcaaagcatttgagagagaagtagagagaccagtagcaaacagagagtgcgatccagccgagttagaagagaaggtgcccaaagtgatcctggagagagatacacagagaggggagccagagggagggagccaggaccagaaagggcaggcctccagcccaacaccagagcctggggtgggggcgggggaccttccgggacctacctcagcccccgtaccttctgggagccagtcaggtggaaggggatccccagtgagccccaggaggcatcagaaaggcctcctgaattgcaagatgccacctgctgagaaggcttccaggatcagagctgctgagaaggtttccaggggcgatcaggaatctccagatgcttgtctgcctcctacagtacctgaagccccagccccaccccaaaagccccttaactctcagagccagaaacatcttgcacctccgccccttctttctccccttttaccttctatcaagccaaccgttcgtaagaccaggcaagatgggagtcaggaagctccagaggctcccttgtcctcagagctggagcctttccacccaaagcctaaaattagaactcggaagtcctccagaatgacaccctttccagctacctctgctgcccctgagccccacccttccacctccacagcccagccagtcactcccaagcccacatctcaggccactaggagcaggacaaataggtcctctgtcaagacccctgaaccagttgtccccacagcccctgagctccagccttccacctccacagaccagcctgtcacctctgagcccacatctcaggttactaggggaagaaaaagtagatcctctgtcaagacccctgaaacagttgtgcccacagcccttgagctccagccttccacctccaccgaccgacctgtcacctctgaacccacctctcaggctactaggggaagaaaaaatagatcctctgtcaagacccctgaaccagttgtccccacagcccctgagctccagccttccacctccacagaccagcctgtcacttctgagcccacatatcaggctactaggggaagaaaaaatagatcctctgtcaagacccctgaaccagttgtgcccacagcccctgagctccggccttccacctccacagaccgacctgtcacccccaagcccacatctcggaccactaggagcaggacaaatatgtcctctgtcaagacccctgaaacagttgtccccacagcccctgagctccagatttccacctccacagaccaacctgtcacccctaagcccacatctcggaccactaggagcaggacaaatatgtcctctgtgaagaaccctgaatcaactgtccctatagcccctgagctcccaccttccacctccacagagcagcctgtcacccctgagcccacatctcgggctactaggggaagaaaaaatagatcctctggcaagacccctgaaacacttgtccccacagcccctaagctcgagccttccacttccacagaccaacctgtcactcctgagcccacatctcaggccaccaggggcaggacaaataggtcctctgtgaagacccctgaaacagttgtccccacagcccctgagctccagccttccacctccacagaccagcctgttacccctgagcctacgtctcaggctactaggggaagaacagatagatcctctgtcaagactcctgaaacagttgtccccacagcccctgagctacaggcttccgcctccacagaccagcctgtcacctctgagcccacatctcggaccactaggggaagaaaaaatcggtcctctgtcaagacccctgaaacagttgtgcccgcagcccctgagctccagccttccacctccacagaccaacctgtcacccctgagcccacatctcgggccactaggggcaggacaaataggtcctctgtcaagacccctgaatcaattgtccctatagcccctgagcttcagccttccacctccagaaaccagcttgtcacccctgagcccacatctcgggccactaggtgcaggacaaataggtcctctgtcaagacccctgagccagttgtccccacagcccctgagccccatcctaccacctccacagaccagcctgtcacccccaagctcacatctagggccactaggagaaagacaaataggtcctctgtcaagactcccaaaccagttgaaccagcagcctctgatcttgagccttttacccccacagaccagtccgtcacccctgaggccatagctcagggtggtcagagcaaaacactgaggtcttccacagtaagagctatgccggttcctaccacccctgaattccaatctcctgtcaccacagaccagcctatttcccctgagcctattactcaacccagttgcatcaagaggcagagagccgctgggaaccctggctccctcgcagctcccattgaccataagccttgctctgcacccttggaacctaaatcccaggcctcaaggaaccaaagatggggagcagtgagagcagctgaatcccttacagccattcctgagcctgcctctccccagcttcttgagacaccaattcatgcctcccagatccaaaaggtggaaccagcaggtagatctaggttcaccccggagctccagcctaaggcctctcaaagccgcaagaggtctttagctaccatggattcaccaccacatcaaaaacagccccaaagaggggaagtctcccagaagacagtgattatcaaggaagaggaagaagatactgcagagaagccagggaaggaagaggatgtcgtgactccaaaaccaggcaagagaaagagagaccaggcagaggaggagcccaacagaataccaagccgcagcctccgacggaccaaacttaaccaagaatcaacagcccccaaagtgctcttcacaggagtggtggatgctcggggagagcgggctgtgctggcactggggggaagtctggctggttcagcggcagaggcttcccacctggtcactgatcgcatccgccggacagtcaagttcctgtgtgccctggggcggggaatccccattctgtccctggactggctgcatcagtcccgcaaggctggtttcttcttacccccggatgaatatgtggtgaccgaccctgagcaagagaagaactttggctttagccttcaagacgcactgagcagggctcgggagcgaaggctgctagagggctatgagatctatgtgacccctggagtccagccaccaccacctcagatgggagagattattagctgctgtggaggcacatacctacccagcatgcctcggtcctataagcctcagagagttgtgatcacatgccctcaggacttccctcattgctccattccactacgggttgggctgcccctcctctcgcctgagttcctgctgactggagtgctgaagcaggaagccaagccagaggcctttgtcctctcccctttggagatgtcatccacctgagaactccactacccttttccctcccagaccacgaattagaagatatgtggaagaaagaactcagggcgttagaaaggattggggtatattgatacaacttgtcctggaacatgggtgggaccagaaatctttatgaataaatgaaaagataagggatttggaagccacaggttgttttttgtttgtttgtttgtttttttaatggccattttattttatttgtatttatagttttttatttgtatagatttaggggatacaagatttcttacatgcatgtattaaatggccattttaaaattagctagtttcatgctcagatgtcataagtggcagctatctttagccagactgttgcagttattgctcgatgccactcatggtgtcctacctcctatttggaaaccatctctatttttttcttactgagattcttactttggggtcaggaacttgaagggatgcttggagtgagtagatttgagggtccagttatggagtgctactaaaacattttcttctctcctggcctctggaagcatctttagctttgactttgggcaagtctctgtacttttctggccagcttttccaggatttataaaattagagcttcggcttgacctctgtgataaataaatattcactctgtgcctta

SEQ ID NO: 17453 - DNA, 7576 bp, Homo sapiens
  source 1..7576: mol_type = unassigned DNA
ttggatttaagaaaatgacctcaaaatgtccgtcagagacgtattcccaggaagaaagatattacttctactacaaaccaaatcaaaaggaaatgaaattccaatgcaacaggagtgaactgccacgcctacgggctgttctccaaactgcagcctccagccacgactgcaacgcgcaacccactttcatttctcatgagtcagcggacaccatgtctaggaggaccgaggaaaggcgctctggccttaccagacacgtcggacgtctatgacacagcccctctatccgttgccggcagctggcgccagactctctggtcgcggtttggaactgcgcgggaagtgggtggtgggcgggcaagcggtagtgggttgtcccttggagctgcccaatcgacgtgcattattctgttggcgcacggcggccttcaattaccgtctcattaactgatctcagcagcctgggagacaccacctatttgaactctaagggggcggggctttgggtgtgcctccgctcgactggctgcggttgtgaaagacagcggcagaagccaatcagcaaataagctctttttcggcacacgcagtcgctccacccgggtcgcgaccgttactggtggcgcgcgcggggacttaaagtagatcatggaggacacccaggctattgactgggatgttgaagaagaggaggagacagagcaatccagtgaatccttgaggtgtaacgtggagccagtagggcggctacatatctttagtggtgcccatggaccagaaaaagatttcccactacacctcgggaagaatgtggtaggccgaatgcctgactgctctgtggccctgccctttccatctatctccaaacaacatgcagagattgaaatcttagcctgggacaaggcacctatcctccgagactgtgggagccttaatggtactcaaatcctgagacctcctaaggttttgagccctggggtgagtcaccgtctgagggaccaggaattgattctctttgctgacttgctctgccagtaccatcgcctggatgtctctctgccctttgtctcccggggccctctgacagtagaagagacacccagagtacagggagaaactcaaccccagaggcttctgttggctgaggactcggaggaggaagtagattttctttctgaaaggcgtatggtaaaaaaatcaaggaccacatcttcctctgtgatagttccagagagtgatgaagaggggcattccccggtcctgggcggccttgggccgccttttgccttcaatttgaacagtgacacagatgtggaagaaggtcagcaaccagccacagaggaggcctcctcagctgccagaagaggtgccactgtagaggcaaagcagtctgaagctgaagttgtaactgaaatccagcttgaaaaggatcagcctttagtgaaggagagggacaatgatacaaaagtcaagaggggtgcagggaatggggtggttccagctggggtgattctggagaggagccaacctcctggagaggacagtgacacagatgtggatgatgacagcaggcctcctggaaggccagctgaggtccatttggaaagggctcagccttttggcttcatcgacagcgacactgatgcggaagaagagaggatcccagcaaccccagttgtcattcctatgaagaagaggaagatcttccatggagtaggtacaaggggtcctggagcaccaggcctggcccatctgcaggagagccaggctggtagtgatacagatgtggaagaaggcaaggccccacaggctgtccctctggagaaaagccaagcttccatggttatcaacagcgatacagatgacgaggaagaagtctcagcagcgctgactttggcacatctgaaagagagccagcctgctatatggaacagagatgcagaagaggacatgccccaacgtgtggtccttctgcagcgaagccaaaccaccactgagagagacagtgacacagacgtggaggaggaagagctcccagtggaaaatagagaagctgtcctcaaggatcacacaaagattagagcccttgttagagcacattcagaaaaggaccaacctccttttggggacagtgatgacagtgtggaagcagataagagctcacctgggatccacctggagagaagccaagcctccaccacagtggacatcaacacacaagtggagaaggaagtcccgccagggtcagccattatacatataaagaagcatcaggtgtctgtggaggggacaaatcaaacagatgtgaaagcagttgggggaccagcaaagctgcttgtggtatctctagaggaagcctggcctctgcatggggactgtgaaacagatgcagaggagggcacctccctaacagcctcagtagttgcagatgtaagaaagagccagcttccagcagaaggggatgctggggcagagtgggctgcagctgttcttaagcaggagagagctcatgaggtgggggcccagggtgggccacctgtggcacaagtggagcaggacctccctatctcaagagagaacctcacagatctggtggtggacacagacactctaggggaatccacccagccacagagagagggagcccaggtccccacaggaagggagagagaacaacatgtgggtgggaccaaggactctgaagacaactatggtgattctgaagatctggacctacaagctacccagtgctttctggagaatcagggcctggaagcagtccagagcatggaggatgaacctacccaggccttcatgttgactccaccccaagagcttggcccttcccattgcagcttccagacaacaggtaccctagatgaaccatgggaggtcctggctacacagccattctgtctgagagagtctgaggactctgagacccagccttttgacacgcaccttgaggcctatggaccttgcctgtctccacctagggcaataccaggagaccaacatccagagagcccagttcacacagagccaatggggattcaaggcagagggaggcagactgtggataaagtcatgggtataccaaaagaaacagcagagagggtgggccctgagagagggccattggagagagaaactgagaaactgctaccagaaagacagacagatgtgacaggagaggaagaattaaccaaggggaaacaggacagagaacaaaaacagttgttagctagagacacccagagacaagaatctgacaaaaatggggaaagtgcaagtcctgaaagagatagggagagtttgaaggtagaaattgagacatctgaggaaatacaagagaaacaagtacagaagcagacccttccaagcaaagcatttgagagagaagtagagagaccagtagcaaacagagagtgcgatccagccgagttagaagagaaggtgcccaaagtgatcctggagagagatacacagagaggggagccagagggagggagccaggaccagaaagggcaggcctccagcccaacaccagagcctggggtgggggcgggggaccttccgggacctacctcagcccccgtaccttctgggagccagtcaggtggaaggggatccccagtgagccccaggaggcatcagaaaggcctcctgaattgcaagatgccacctgctgagaaggcttccaggatcagagctgctgagaaggtttccaggggcgatcaggaatctccagatgcttgtctgcctcctacagtacctgaagccccagccccaccccaaaagccccttaactctcagagccagaaacatcttgcacctccgccccttctttctccccttttaccttctatcaagccaaccgttcgtaagaccaggcaagatgggagtcaggaagctccagaggctcccttgtcctcagagctggagcctttccacccaaagcctaaaattagaactcggaagtcctccagaatgacaccctttccagctacctctgctgcccctgagccccacccttccacctccacagcccagccagtcactcccaagcccacatctcaggccactaggagcaggacaaataggtcctctgtcaagacccctgaaccagttgtccccacagcccctgagctccagccttccacctccacagaccagcctgtcacctctgagcccacatctcaggttactaggggaagaaaaagtagatcctctgtcaagacccctgaaacagttgtgcccacagcccttgagctccagccttccacctccaccgaccgacctgtcacctctgaacccacctctcaggctactaggggaagaaaaaatagatcctctgtcaagacccctgaaccagttgtccccacagcccctgagctccagccttccacctccacagaccagcctgtcacttctgagcccacatatcaggctactaggggaagaaaaaatagatcctctgtcaagacccctgaaccagttgtgcccacagcccctgagctccggccttccacctccacagaccgacctgtcacccccaagcccacatctcggaccactaggagcaggacaaatatgtcctctgtcaagacccctgaaacagttgtccccacagcccctgagctccagatttccacctccacagaccaacctgtcacccctaagcccacatctcggaccactaggagcaggacaaatatgtcctctgtgaagaaccctgaatcaactgtccctatagcccctgagctcccaccttccacctccacagagcagcctgtcacccctgagcccacatctcgggctactaggggaagaaaaaatagatcctctggcaagacccctgaaacacttgtccccacagcccctaagctcgagccttccacttccacagaccaacctgtcactcctgagcccacatctcaggccaccaggggcaggacaaataggtcctctgtgaagacccctgaaacagttgtccccacagcccctgagctccagccttccacctccacagaccagcctgttacccctgagcctacgtctcaggctactaggggaagaacagatagatcctctgtcaagactcctgaaacagttgtccccacagcccctgagctacaggcttccgcctccacagaccagcctgtcacctctgagcccacatctcggaccactaggggaagaaaaaatcggtcctctgtcaagacccctgaaacagttgtgcccgcagcccctgagctccagccttccacctccacagaccaacctgtcacccctgagcccacatctcgggccactaggggcaggacaaataggtcctctgtcaagacccctgaatcaattgtccctatagcccctgagcttcagccttccacctccagaaaccagcttgtcacccctgagcccacatctcgggccactaggtgcaggacaaataggtcctctgtcaagacccctgagccagttgtccccacagcccctgagccccatcctaccacctccacagaccagcctgtcacccccaagctcacatctagggccactaggagaaagacaaataggtcctctgtcaagactcccaaaccagttgaaccagcagcgtctgatcttgagccttttacccccacagaccagtccgtcacccctgaggccatagctcagggtggtcagagcaaaacactgaggtcttccacagtaagagctatgccggttcctaccacccctgaattccaatctcctgtcaccacagaccagcctatttcccctgagcctattactcaacccagttgcatcaagaggcagagagccgctgggaaccctggctccctcgcagctcccattgaccataagccttgctctgcacccttggaacctaaatcccaggcctcaaggaaccaaagatggggagcagtgagagcagctgaatcccttacagccattcctgagcctgcctctccccagcttcttgagacaccaattcatgcctcccagatccaaaaggtggaaccagcaggtagatctaggttcaccccggagctccagcctaaggcctctcaaagccgcaagaggtctttagctaccatggattcaccaccacatcaaaaacagccccaaagaggggaagtctcccagaagacagtgattatcaaggaagaggaagaagatactgcagagaagccagggaaggaagaggatgtcgtgactccaaaaccaggcaagagaaagagagaccaggcagaggaggagcccaacagaataccaagccgcagcctccgacggaccaaacttaaccaagaatcaacagcccccaaagtgctcttcacaggagtggtggatgctcggggagagcgggctgtgctggcactggggggaagtctggctggttcagcggcagaggcttcccacctggtcactgatcgcatccgccggacagtcaagttcctgtgtgccctggggcggggaatccccattctgtccctggactggctgcatcagtcccgcaaggctggtttcttcttacccccggatgaatatgtggtgaccgaccctgagcaagagaagaactttggctttagccttcaagacgcactgagcagggctcgggagcgaaggctgctagagggctatgagatctatgtgacccctggagtccagccaccaccacctcagatgggagagattattagctgctgtggaggcacatacctacccagcatgcctcggtcctataagcctcagagagttgtgatcacatgccctcaggacttccctcattgctccattccactacgggttgggctgcccctcctctcgcctgagttcctgctgactggagtgctgaagcaggaagccaagccagaggcctttgtcctctcccctttggagatgtcatccacctgagaactccactacccttttccctcccagaccacgaattagaagatatgtggaagaaagaactcagggcgttagaaaggattggggtatattgatacaacttgtcctggaacatgggtgggaccagaaatctttatgaataaatgaaaagataagggatttggaagccacaggttgttttttgtttgtttgtttgtttttttaatggccattttattttatttgtatttatagttttttatttgtatagatttaggggatacaagatttcttacatgcatgtattaaatggccattttaaaattagctagtttcatgctcagatgtcataagtggcagctatctttagccagactgttgcagttattgctcgatgccactcatggtgtcctacctcctatttggaaaccatctctatttttttcttactgagattcttactttggggtcaggaacttgaagggatgcttggagtgagtagatttgagggtccagttatggagtgctactaaaacattttcttctctcctggcctctggaagcatctttagctttgactttgggcaagtctctgtacttttctggccagcttttccaggatttataaaattagagcttcggcttgacctctgtgataaataaatattcactctgtgcctta

SEQ ID NO: 17454 - DNA, 5648 bp, Homo sapiens
  source 1..5648: mol_type = unassigned DNA
ccacggctccccgggagccatcttggttcccccagaaggcgggaggggcgtaccttgggtgcgactgggcggaggtgacttggaagttcgcttctcggactgtaatactcatccttacctggcgccccgctccgagtttagatcatggaggacacccaggctattgactgggatgttgaagaagaggaggagacagagcaatccagtgaatccttgaggtgtaacgtggagccagtagggcggctacatatctttagtggtgcccatggaccagaaaaagatttcccactacacctcgggaagaatgtggtaggccgaatgcctgactgctctgtggccctgccctttccatctatctccaaacaacatgcagagattgaaatcttagcctgggacaaggcacctatcctccgagactgtgggagccttaatgtaccatcgcctggatgtctctctgccctttgtctcccggggccctctgacagtagaagagacacccagagtacagggagaaactcaaccccagaggcttctgttggctgaggactcggaggaggaagtagattttctttctgaaaggcgtatggtaaaaaaatcaaggaccacatcttcctctgtgatagttccagagagtgatgaagaggggcattccccggtcctgggcggccttgggccgccttttgccttcaatttgaacagtgacacagatgtggaagaaggtcagcaaccagccacagaggaggcctcctcagctgccagaagaggtgccactgtagaggcaaagcagtctgaagctgaagttgtaactgaaatccagcttgaaaaggatcagcctttagtgaaggagagggacaatgatacaaaagtcaagaggggtgcagggaatggggtggttccagctggggtgattctggagaggagccaacctcctggagaggacagtgacacagatgtggatgatgacagcaggcctcctggaaggccagctgaggtccatttggaaagggctcagccttttggcttcatcgacagcgacactgatgcggaagaagagaggatcccagcaaccccagttgtcattcctatgaagaagaggaagatcttccatggagtaggtacaaggggtcctggagcaccaggcctggcccatctgcaggagagccaggctggtagtgatacagatgtggaagaaggcaaggccccacaggctgtccctctggagaaaagccaagcttccatggttatcaacagcgatacagatgacgaggaagaagtctcagcagcgctgactttggcacatctgaaagagagccagcctgctatatggaacagagatgcagaagaggacatgccccaacgtgtggtccttctgcagcgaagccaaaccaccactgagagagacagtgacacagacgtggaggaggaagagctcccagtggaaaatagagaagctgtcctcaaggatcacacaaagattagagcccttgttagagcacattcagaaaaggaccaacctccttttggggacagtgatgacagtgtggaagcagataagagctcacctgggatccacctggagagaagccaagcctccaccacagtggacatcaacacacaagtggagaaggaagtcccgccagggtcagccattatacatataaagaagcatcaggtgtctgtggaggggacaaatcaaacagatgtgaaagcagttgggggaccagcaaagctgcttgtggtatctctagaggaagcctggcctctgcatggggactgtgaaacagatgcagaggagggcacctccctaacagcctcagtagttgcagatgtaagaaagagccagcttccagcagaaggggatgctggggcagagtgggctgcagctgttcttaagcaggagagagctcatgaggtgggggcccagggtgggccacctgtggcacaagtggagcaggacctccctatctcaagagagaacctcacagatctggtggtggacacagacactctaggggaatccacccagccacagagagagggagcccaggtccccacaggaagggagagagaacaacatgtgggtgggaccaaggactctgaagacaactatggtgattctgaagatctggacctacaagctacccagtgctttctggagaatcagggcctggaagtccagagcatggaggatgaacctacccaggccttcatgttgactccaccccaagagcttggcccttcccattgcagcttccagacaacaggcctcctgaattgcaagatgccacctgctgagaaggcttccaggatcagagctgctgagaaggtttccaggggcgatcaggaatctccagatgcttgtctgcctcctacagtacctgaagccccagccccaccccaaaagccccttaactctcagagccagaaacatcttgcacctccgccccttctttctccccttttaccttctatcaagccaaccgttcgtaagaccaggcaagatgggagtcaggaagctccagaggctcccttgtcctcagagctggagcctttccacccaaagcctaaaattagaactcggaagtcctccagaatgacaccctttccagctacctctgctgcccctgagccccacccttccacctccacagcccagccagtcactcccaagcccacatctcaggccactaggagcaggacaaataggtcctctgtcaagacccctgaaccagttgtccccacagcccctgagctccagccttccacctccacagaccagcctgtcacctctgagcccacatctcaggttactaggggaagaaaaagtagatcctctgtcaagacccctgaaacagttgtgcccacagcccttgagctccagccttccacctccaccgaccgacctgtcacctctgaacccacctctcaggctactaggggaagaaaaaatagatcctctgtcaagacccctgaaccagttgtccccacagcccctgagctccagccttccacctccacagaccagcctgtcacttctgagcccacatatcaggctactaggggaagaaaaaatagatcctctgtcaagacccctgaaccagttgtgcccacagcccctgagctccggccttccacctccacagaccgacctgtcacccctaagcccacatctcggaccactaggagcaggacaaatatgtcctctgtgaagaaccctgaatcaactgtccctatagcccctgagctcccaccttccacctccacagagcagcctgtcacccctgagcccacatctcgggctactaggggaagaaaaaatagatcctctggcaagacccctgaaacacttgtccccacagcccctaagctcgagccttccacttccacagaccaacctgtcactcctgagcccacatctcaggccaccaggggcaggacaaataggtcctctgtgaagacccctgaaacagttgtccccacagcccctgagctccagccttccacctccacagaccagcctgttacccctgagcctacgtctcaggctactaggggaagaacagatagatcctctgtcaagactcctgaaacagttgtccccacagcccctgagctacaggcttccgcctccacagaccagcctgtcacctctgagcccacatctcggaccactaggggaagaaaaaatcggtcctctgtcaagacccctgaaacagttgtgcccgcagcccctgagctccagccttccacctccacagaccaacctgtcacccctgagcccacatctcgggccactaggggcaggacaaataggtcctctgtcaagacccctgaatcaattgtccctatagcccctgagcttcagccttccacctccagaaaccagcttgtcacccctgagcccacatctcgggccactaggtgcaggacaaataggtcctctgtcaagacccctgagccagttgtccccacagcccctgagccccatcctaccacctccacagaccagcctgtcacccccaagctcacatctagggccactaggagaaagacaaataggtcctctgtcaagactcccaaaccagttgaaccagcagcctctgatcttgagccttttacccccacagaccagtccgtcacccctgaggccatagctcagggtggtcagagcaaaacactgaggtcttccacagtaagagctatgccggttcctaccacccctgaattccaatctcctgtcaccacagaccagcctatttcccctgagcctattactcaacccagttgcatcaagaggcagagagccgctgggaaccctggctccctcgcagctcccattgaccataagccttgctctgcacccttggaacctaaatcccaggcctcaaggaaccaaagatggggagcagtgagagcagctgaatcccttacagccattcctgagcctgcctctccccagcttcttgagacaccaattcatgcctcccagatccaaaaggtggaaccagcaggtagatctaggttcaccccggagctccagcctaaggcctctcaaagccgcaagaggtctttagctaccatggattcaccaccacatcaaaaacagccccaaagaggggaagtctcccagaagacagtgattatcaaggaagaggaagaagatactgcagagaagccagggaaggaagaggatgtcgtgactccaaaaccaggcaagagaaagagagaccaggcagaggaggagcccaacagaataccaagccgcagcctccgacggaccaaacttaaccaagaatcaacagcccccaaagtgctcttcacaggagtggtggatgctcggggagagcgggctgtgctggcactggggggaagtctggctggttcagcggcagaggcttcccacctggtcactgatcgcatccgccggacagtcaagttcctgtgtgccctggggcggggaatccccattctgtccctggactggctgcatcagtcccgcaaggctggtttcttcttacccccggatgaatatgtggtgaccgaccctgagcaagagaagaactttggctttagccttcaagacgcactgagcagggctcgggagcgaaggctgctagagggctatgagatctatgtgacccctggagtccagccaccaccacctcagatgggagagattattagctgctgtggaggcacatacctacccagcatgcctcggtcctataagcctcagagagttgtgatcacatgccctcaggacttccctcattgctccattccactacgggttgggctgcccctcctctcgcctgagttcctgctgactggagtgctgaagcaggaagccaagccagaggcctttgtcctctcccctttggagatgtcatccacctgagaactccactacccttttccctcccagaccacgaattagaagatatgtggaagaaagaactcagggcgttagaaaggattggggtatattgatacaacttgtcctggaacatgggtgggaccagaaatctttatgaataaatgaaaagataagggatttggaagccacaggttgttttttgtttgtttgtttgtttttttaatggccattttattttatttgtatttatagttttttatttgtatagatt

SEQ ID NO: 17455 - DNA, 582 bp, Homo sapiens; identical to SEQ ID NO: 17444
  source 1..582: mol_type = unassigned DNA

SEQ ID NO: 17456 - DNA, 583 bp, Homo sapiens; identical to SEQ ID NO: 17445
  source 1..583: mol_type = unassigned DNA

SEQ ID NO: 17457 - DNA, 583 bp, Homo sapiens; identical to SEQ ID NO: 17445
  source 1..583: mol_type = unassigned DNA

SEQ ID NO: 17458 - DNA, 582 bp, Homo sapiens; identical to SEQ ID NO: 17446
  source 1..582: mol_type = unassigned DNA

SEQ ID NO: 17459 - DNA, 582 bp, Homo sapiens; identical to SEQ ID NO: 17444
  source 1..582: mol_type = unassigned DNA

SEQ ID NO: 17460 - DNA, 583 bp, Homo sapiens
  source 1..583: mol_type = unassigned DNA
aatactcatccttacctggcgccccgctccgagtttaggtatgaagacacagggagacgtcgggccacaagggaacccactgaggtggggaccaaagatggtggctctttgaattggagccaagcgtggtgggcacccgctgagttggcctgtcataaagacggagttgacactttatccatggggcatcctactttccctacctgtcaacaatttccctctagagtggcatattttcagatcatggaggacacccaggctattgactgggatgttgaagaagaggaggagacagagcaatccagtgaatccttgaggtgtaacgtggagccagtagggcggctacatatctttagtggtgcccatggaccagaaaaagatttcccactacacctcgggaagaatgtggtaggccgaatgcctgactgctctgtggccctgccctttccatctatctccaaacaacatgcagagattgaaatcttagcctgggacaaggcacctatcctccgagactgtgggagccttaatggtactcaaatcctgagacctcctaaggttttgagccctggggtgagtcacc

SEQ ID NO: 17461 - DNA, 582 bp, Homo sapiens; identical to SEQ ID NO: 17444
  source 1..582: mol_type = unassigned DNA

SEQ ID NO: 17462 - DNA, 582 bp, Homo sapiens
  source 1..582: mol_type = unassigned DNA
attaactgatctcagcagcctgggagacaccacctatttgaactctaagggggcggggctttgggtgtgcctccgctcgactggctgcggttgtgaaagacagcggcagaagccaatcagcaaataagctctttttcggcacacgcagtcgctccacctgggtcgcgaccgttactggtggcgcgcgcggggacttaaaatcatggaggacacccaggctattgactgggatgttgaagaagaggaggagacagagcaatccagtgaatccttgaggtgtaacgtggagccagtagggcggctacatatctttagtggtgcccatggaccagaaaaagatttcccactacacctcgggaagaatgtggtaggccgaatgcctgactgctctgtggccctgccctttccatctatctccaaacaacatgcagagattgaaatcttagcctgggacaaggcacctatcctccgagactgtgggagccttaatggtactcaaatcctgagacctcctaaggttttgagccctggggtgagtcaccgtctgagggaccaggaattgattctctttgctgacttgct

SEQ ID NO: 17463 - DNA, 916 bp, Homo sapiens; identical to SEQ ID NO: 17448
  source 1..916: mol_type = unassigned DNA

SEQ ID NO: 17464 - DNA, 7576 bp, Homo sapiens; identical to SEQ ID NO: 17453
  source 1..7576: mol_type = unassigned DNA

SEQ ID NO: 17465 - DNA, 6506 bp, Homo sapiens
  source 1..6506: mol_type = unassigned DNA
caccatgtctaggaggaccgaggaaaggcgctctggccttaccagacacgtcggacgtctatgacacagcccctctatccgttgccggcagctggcgccagactctctggtcgcggtttggaactgcgcgggaagtgggtggtgggcgggcaagcggtagtgggttgtcccttggagctgcccaatcgacgtgcattattctgttggcgcacggcggccttcaattaccgtctcattaactgatctcagcagcctgggagacaccacctatttgaactctaagggggcggggctttgggtgtgcctccgctcgactggctgcggttgtgaaagacagcggcagaagccaatcagcaaataagctctttttcggcacacgcagtcgctccacctgggtcgcgaccgttactggtggcgcgcgcggggacttaaagtagatcatggaggacacccaggctattgactgggatgttgaagaagaggaggagacagagcaatccagtgaatccttgaggtgtaacgtggagccagtagggcggctacatatctttagtggtgcccatggaccagaaaaagatttcccactacacctcgggaagaatgtggtaggccgaatgcctgactgctctgtggccctgccctttccatctatctccaaacaacatgcagagattgaaatcttagcctgggacaaggcacctatcctccgagactgtgggagccttaatggtactcaaatcctgagacctcctaaggttttgagccctggggtgagtcaccgtctgagggaccaggaattgattctctttgctgacttgctctgccagtaccatcgcctggatgtctctctgccctttgtctcccggggccctctgacagtagaagagacacccagagtacagggagaaactcaaccccagaggcttctgttggctgaggactcggaggaggaagtagattttctttctgaaaggcgtatggtaaaaaaatcaaggaccacatcttcctctgtgatagttccagagagtgatgaagaggggcattccccggtcctgggcggccttgggccgccttttgccttcaatttgaacagtgacacagatgtggaagaaggtcagcaaccagccacagaggaggcctcctcagctgccagaagaggtgccactgtagaggcaaagcagtctgaagctgaagttgtaactgaaatccagcttgaaaaggatcagcctttagtgaaggagagggacaatgatacaaaagtcaagaggggtgcagggaatggggtggttccagctggggtgattctggagaggagccaacctcctggagaggacagtgacacagatgtggatgatgacagcaggcctcctggaaggccagctgaggtccatttggaaagggctcagccttttggcttcatcgacagcgacactgatgcggaagaagagaggatcccagcaaccccagttgtcattcctatgaagaagaggaagatcttccatggagtaggtacaaggggtcctggagcaccaggcctggcccatctgcaggagagccaggctggtagtgatacagatgtggaagaaggcaaggccccacaggctgtccctctggagaaaagccaagcttccatggttatcaacagcgatacagatgacgaggaagaagtctcagcagcgctgactttggcacatctgaaagagagccagcctgctatatggaacagagatgcagaagaggacatgccccaacgtgtggtccttctgcagcgaagccaaaccaccactgagagagacagtgacacagacgtggaggaggaagagctcccagtggaaaatagagaagctgtcctcaaggatcacacaaagattagagcccttgttagagcacattcagaaaaggaccaacctccttttggggacagtgatgacagtgtggaagcagataagagctcacctgggatccacctggagagaagccaagcctccaccacagtggacatcaacacacaagtggagaaggaagtcccgccagggtcagccattatacatataaagaagcatcaggtgtctgtggaggggacaaatcaaacagatgtgaaagcagttgggggaccagcaaagctgcttgtggtatctctagaggaagcctggcctctgcatggggactgtgaaacagatgcagaggagggcacctccctaacagcctcagtagttgcagatgtaagaaagagccagcttccagcagaaggggatgctggggcagagtgggctgcagctgttcttaagcaggagagagctcatgaggtgggggcccagggtgggccacctgtggcacaagtggagcaggacctccctatctcaagagagaacctcacagatctggtggtggacacagacactctaggggaatccacccagccacagagagagggagcccaggtccccacaggaagggagagagaacaacatgtgggtgggaccaaggactctgaagacaactatggtgattctgaagatctggacctacaagctacccagtgctttctggagaatcagggcctggaagcagtccagagcatggaggatgaacctacccaggccttcatgttgactccaccccaagagcttggcccttcccattgcagcttccagacaacaggtaccctagatgaaccatgggaggtcctggctacacagccattctgtctgagagagtctgaggactctgagacccagccttttgacacgcaccttgaggcctatggaccttgcctgtctccacctagggcaataccaggagaccaacatccagagagcccagttcacacagagccaatggggattcaaggcagagggaggcagactgtggataaagtcatgggtataccaaaagaaacagcagagagggtgggccctgagagagggccattggagagagaaactgagaaactgctaccagaaagacagacagatgtgacaggagaggaagaattaaccaaggggaaacaggacagagaacaaaaacagttgttagctagagacacccagagacaagaatctgacaaaaatggggaaagtgcaagtcctgaaagagatagggagagtttgaaggtagaaattgagacatctgaggaaatacaagagaaacaagtacagaagcagacccttccaagcaaagcatttgagagagaagtagagagaccagtagcaaacagagagtgcgatccagccgagttagaagagaaggtgcccaaagtgatcctggagagagatacacagagaggggagccagagggagggagccaggaccagaaagggcaggcctccagcccaacaccagagcctggggtgggggcgggggaccttccgggacctacctcagcccccgtaccttctgggagccagtcaggtggaaggggatccccagtgagccccaggaggcatcagaaaggcctcctgaattgcaagatgccacctgctgagaaggcttccaggatcagagctgctgagaaggtttccaggggcgatcaggaatctccagatgcttgtctgcctcctacagtacctgaagccccagccccaccccaaaagccccttaactctcagagccagaaacatcttgcacctccgccccttctttctccccttttaccttctatcaagccaaccgttcgtaagaccaggcaagatgggagtcaggaagctccagaggctcccttgtcctcagagctggagcctttccacccaaagcctaaaattagaactcggaagtcctccagaatgacaccctttccagctacctctgctgcccctaagctcgagccttccacttccacagaccaacctgtcactcctgagcccacatctcaggccaccaggggcaggacaaataggtcctctgtgaagacccctgaaacagttgtccccacagcccctgagctccagccttccacctccacagaccagcctgttacccctgagcctacgtctcaggctactaggggaagaacagatagatcctctgtcaagactcctgaaacagttgtccccacagcccctgagctacaggcttccgcctccacagaccagcctgtcacctctgagcccacatctcggaccactaggggaagaaaaaatcggtcctctgtcaagacccctgaaacagttgtgcccgcagcccctgagctccagccttccacctccacagaccaacctgtcacccctgagcccacatctcgggccactaggggcaggacaaataggtcctctgtcaagacccctgaatcaattgtccctatagcccctgagcttcagccttccacctccagaaaccagcttgtcacccctgagcccacatctcgggccactaggtgcaggacaaataggtcctctgtcaagacccctgagccagttgtccccacagcccctgagccccatcctaccacctccacagaccagcctgtcacccccaagctcacatctagggccactaggagaaagacaaataggtcctctgtcaagactcccaaaccagttgaaccagcagcctctgatcttgagccttttacccccacagaccagtccgtcacccctgaggccatagctcagggtggtcagagcaaaacactgaggtcttccacagtaagagctatgccggttcctaccacccctgaattccaatctcctgtcaccacagaccagcctatttcccctgagcctattactcaacccagttgcatcaagaggcagagagccgctgggaaccctggctccctcgcagctcccattgaccataagccttgctctgcacccttggaacctaaatcccaggcctcaaggaaccaaagatggggagcagtgagagcagctgaatcccttacagccattcctgagcctgcctctccccagcttcttgagacaccaattcatgcctcccagatccaaaaggtggaaccagcaggtagatctaggttcaccccggagctccagcctaaggcctctcaaagccgcaagaggtctttagctaccatggattcaccaccacatcaaaaacagccccaaagaggggaagtctcccagaagacagtgattatcaaggaagaggaagaagatactgcagagaagccagggaaggaagaggatgtcgtgactccaaaaccaggcaagagaaagagagaccaggcagaggaggagcccaacagaataccaagccgcagcctccgacggaccaaacttaaccaagaatcaacagcccccaaagtgctcttcacaggagtggtggatgctcggggagagcgggctgtgctggcactggggggaagtctggctggttcagcggcagaggcttcccacctggtcactgatcgcatccgccggacagtcaagttcctgtgtgccctggggcggggaatccccattctgtccctggactggctgcatcagtcccgcaaggctggtttcttcttacccccggatgaatatgtggtgaccgaccctgagcaagagaagaactttggctttagccttcaagacgcactgagcagggctcgggagcgaaggctgctagagggctatgagatctatgtgacccctggagtccagccaccaccacctcagatgggagagattattagctgctgtggaggcacatacctacccagcatgcctcggtcctataagcctcagagagttgtgatcacatgccctcaggacttccctcattgctccattccactacgggttgggctgcccctcctctcgcctgagttcctgctgactggagtgctgaagcaggaagccaagccagaggcctttgtcctctcccctttggagatgtcatccacctgagaactccactacccttttccctcccagaccacgaattagaagatatgtggaagaaagaactcagggcgttagaaaggattggggtatattgatacaacttgtcctggaacatgggtgggaccagaaatctttatgaataaatgaaaagataagggatttggaagccacaggttgttttttgtttgtttgtttgtttttttaatggccattttattttatttgtatttatagttttttatttgtatagatttaggggatacaagatttcttacatgcatgtattaaatggccattttaaaattagctagtttcatgctcagatgtcataagtggcagctatctttagccagactgttgcagttattgctcgatgccactcatggtgtcctacctcctatttggaaaccatctctatttttttcttactgagattcttactttggggtcaggaacttgaagggatgcttggagtgagtagatttgagggtccagttatggagtgctactaaaacattttcttctctcctggcctctggaagcatctttagctttgactttgggcaagtctctgtacttttctggccagcttttccaggatttataaaattagagcttcggcttgacctctgtgataaataaatattcactctgtgcctt

SEQ ID NO: 17466 - DNA, 583 bp, Homo sapiens; identical to SEQ ID NO: 17445
  source 1..583: mol_type = unassigned DNA

SEQ ID NO: 17467 - DNA, 7576 bp, Homo sapiens
  source 1..7576: mol_type = unassigned DNA
ttggatttaagaaaatgacctcaaaatgtccgtcagagacgtattcccaggaagaaagatattacttctactacaaaccaaatcaaaaggaaatgaaattccaatgcaacaggagtgaactgccacgcctacgggctgttctccaaactgcagcctccagccacgactgcaacgcgcaacccactttcatttctcatgagtcagcggacaccatgtctaggaggaccgaggaaaggcgctctggccttaccagacacgtcggacgtctatgacacagcccctctatccgttgccggcagctggcgccagactctctggtcgcggtttggaactgcgcgggaagtgggtggtgggcgggcaagcggtagtgggttgtcccttggagctgcccaatcgacgtgcattattctgttggcgcacggcggccttcaattaccgtctcattaactgatctcagcagcctgggagacaccacctatttgaactctaagggggcggggctttgggtgtgcctccgctcgactggctgcggttgtgaaagacagcggcagaagccaatcagcaaataagctctttttcggcacacgcagtcgctccacccgggtcgcgaccgttactggtggcgcgcgcggggacttaaagtagatcatggaggacacccaggctattgactgggatgttgaagaagaggaggagacagagcaatccagtgaatccttgaggtgtaacgtggagccagtagggcggctacatatctttagtggtgcccatggaccagaaaaagatttcccactacacctcgggaagaatgtggtaggccgaatgcctgactgctctgtggccctgccctttccatctatctccaaacaacatgcagagattgaaatcttagcctgggacaaggcacctatcctccgagactgtgggagccttaatggtactcaaatcctgagacctcctaaggttttgagccctggggtgagtcaccgtctgagggaccaggaattgattctctttgctgacttgctctgccagtaccatcgcctggatgtctctctgccctttgtctcccggggccctctgacagtagaagagacacccagagtacagggagaaactcaaccccagaggcttctgttggctgaggactcggaggaggaagtagattttctttctgaaaggcgtatggtaaaaaaatcaaggaccacatcttcctctgtgatagttccagagagtgatgaagaggggcattccccggtcctgggcggccttgggccgccttttgccttcaatttgaacagtgacacagatgtggaagaaggtcagcaaccagccacagaggaggcctcctcagctgccagaagaggtgccactgtagaggcaaagcagtctgaagctgaagttgtaactgaaatccagcttgaaaaggatcagcctttagtgaaggagagggacaatgatacaaaagtcaagaggggtgcagggaatggggtggttccagctggggtgattctggagaggagccaacctcctggagaggacagtgacacagatgtggatgatgacagcaggcctcctggaaggccagctgaggtccatttggaaagggctcagccttttggcttcatcgacagcgacactgatgcggaagaagagaggatcccagcaaccccagttgtcattcctatgaagaagaggaagatcttccatggagtaggtacaaggggtcctggagcaccaggcctggcccatctgcaggagagccaggctggtagtgatacagatgtggaagaaggcaaggccccacaggctgtccctctggagaaaagccaagcttccatggttatcaacagcgatacagatgacgaggaagaagtctcagcagcgctgactttggcacatctgaaagagagccagcctgctatatggaacagagatgcagaagaggacatgccccaacgtgtggtccttctgcagcgaagccaaaccaccactgagagagacagtgacacagacgtggaggaggaagagctcccagtggaaaatagagaagctgtcctcaaggatcacacaaagattagagcccttgttagagcacattcagaaaaggaccaacctccttttggggacagtgatgacagtgtggaagcagataagagctcacctgggatccacctggagagaagccaagcctccaccacagtggacatcaacacacaagtggagaaggaagtcccgccagggtcagccattatacatataaagaagcatcaggtgtctgtggaggggacaaatcaaacagatgtgaaagcagttgggggaccagcaaagctgcttgtggtatctctagaggaagcctggcctctgcatggggactgtgaaacagatgcagaggagggcacctccctaacagcctcagtagttgcagatgtaagaaagagccagcttccagcagaaggggatgctggggcagagtgggctgcagctgttcttaagcaggagagagctcatgaggtgggggcccagggtgggccacctgtggcacaagtggagcaggacctccctatctcaagagagaacctcacagatctggtggtggacacagacactctaggggaatccacccagccacagagagagggagcccaggtccccacaggaagggagagagaacaacatgtgggtgggaccaaggactctgaagacaactatggtgattctgaagatctggacctacaagctacccagtgctttctggagaatcagggcctggaagcagtccagagcatggaggatgaacctacccaggccttcatgttgactccaccccaagagcttggcccttcccattgcagcttccagacaacaggtaccctagatgaaccatgggaggtcctggctacacagccattctgtctgagagagtctgaggactctgagacccagccttttgacacgcaccttgaggcctatggaccttgcctgtctccacctagggcaataccaggagaccaacatccagagagcccagttcacacagagccaatggggattcaaggcagagggaggcagactgtggataaagtcatgggtataccaaaagaaacagcagagagggtgggccctgagagagggccattggagagagaaactgagaaactgctaccagaaagacagacagatgtgacaggagaggaagaattaaccaaggggaaacaggacagagaacaaaaacagttgttagctagagacacccagagacaagaatctgacaaaaatggggaaagtgcaagtcctgaaagagatagggagagtttgaaggtagaaattgagacatctgaggaaatacaagagaaacaagtacagaagcagacccttccaagcaaagcatttgagagagaagtagagagaccagtagcaaacagagagtgcgatccagccgagttagaagagaaggtgcccaaagtgatcctggagagagatacacagagaggggagccagagggagggagccaggaccagaaagggcaggcctccagcccaacaccagagcctggggtgggggcgggggaccttccgggacctacctcagcccccgtaccttctgggagccagtcaggtggaaggggatccccagtgagccccaggaggcatcagaaaggcctcctgaattgcaagatgccacctgctgagaaggcttccaggatcagagctgctgagaaggtttccaggggcgatcaggaatctccagatgcttgtctgcctcctacagtacctgaagccccagccccaccccaaaagccccttaactctcagagccagaaacatcttgcacctccgccccttctttctccccttttaccttctatcaagccaaccgttcgtaagaccaggcaagatgggagtcaggaagctccagaggctcccttgtcctcagagctggagcctttccacccaaagcctaaaattagaactcggaagtcctccagaatgacaccctttccagctacctctgctgcccctgagccccacccttccacctccacagcccagccagtcactcccaagcccacatctcaggccactaggagcaggacaaataggtcctctgtcaagacccctgaaccagttgtccccacagcccctgagctccagccttccacctccacagaccagcctgtcacctctgagcccacatctcaggttactaggggaagaaaaagtagatcctctgtcaagacccctgaaacagttgtgcccacagcccttgagctccagccttccacctccaccgaccgacctgtcacctctgaacccacctctcaggctactaggggaagaaaaaatagatcctctgtcaagacccctgaaccagttgtccccacagcccctgagctccagccttccacctccacagaccagcctgtcacttctgagcccacatatcaggctactaggggaagaaaaaatagatcctctgtcaagacccctgaaccagttgtgcccacagcccctgagctccggccttccacctccacagaccgacctgtcacccccaagcccacatctcggaccactaggagcaggacaaatatgtcctctgtcaagacccctgaaacagttgtccccacagcccctgagctccagatttccacctccacagaccaacctgtcacccctaagcccacatctcggaccactaggagcaggacaaatatgtcctctgtgaagaaccctgaatcaactgtccctatagcccctgagctcccaccttccacctccacagagcagcctgtcacccctgagcccacatctcgggctactaggggaagaaaaaatagatcctctggcaagacccctgaaacacttgtccccacagcccctaagctcgagccttccacttccacagaccaacctgtcactcctgagcccacatctcaggccaccaggggcaggacaaataggtcctctgtgaagacccctgaaacagttgtccccacagcccctgagctccagccttccacctccacagaccagcctgttacccctgagcctacgtctcaggctactaggggaagaacagatagatcctctgtcaagactcctgaaacagttgtccccacagcccctgagctacaggcttccgcctccacagaccagcctgtcacctctgagcccacatctcggaccactaggggaagaaaaaatcggtcctctgtcaagacccctgaaacagttgtgcccgcagcccctgcgctccagccttccacctccacagaccaacctgtcacccctgagcccacatctcgggccactaggggcaggacaaataggtcctctgtcaagacccctgaatcaattgtccctatagcccctgagcttcagccttccacctccagaaaccagcttgtcacccctgagcccacatctcgggccactaggtgcaggacaaataggtcctctgtcaagacccctgagccagttgtccccacagcccctgagccccatcctaccacctccacagaccagcctgtcacccccaagctcacatctagggccactaggagaaagacaaataggtcctctgtcaagactcccaaaccagttgaaccagcagcctctgatcttgagccttttacccccacagaccagtccgtcacccctgaggccatagctcagggtggtcagagcaaaacactgaggtcttccacagtaagagctatgccggttcctaccacccctgaattccaatctcctgtcaccacagaccagcctatttcccctgagcctattactcaacccagttgcatcaagaggcagagagccgctgggaaccctggctccctcgcagctcccattgaccataagccttgctctgcacccttggaacctaaatcccaggcctcaaggaaccaaagatggggagcagtgagagcagctgaatcccttacagccattcctgagcctgcctctccccagcttcttgagacaccaattcatgcctcccagatccaaaaggtggaaccagcaggtagatctaggttcaccccggagctccagcctaaggcctctcaaagccgcaagaggtctttagctaccatggattcaccaccacatcaaaaacagccccaaagaggggaagtctcccagaagacagtgattatcaaggaagaggaagaagatactgcagagaagccagggaaggaagaggatgtcgtgactccaaaaccaggcaagagaaagagagaccaggcagaggaggagcccaacagaataccaagccgcagcctccgacggaccaaacttaaccaagaatcaacagcccccaaagtgctcttcacaggagtggtggatgctcggggagagcgggctgtgctggcactggggggaagtctggctggttcagcggcagaggcttcccacctggtcactgatcgcatccgccggacagtcaagttcctgtgtgccctggggcggggaatccccattctgtccctggactggctgcatcagtcccgcaaggctggtttcttcttacccccggatgaatatgtggtgaccgaccctgagcaagagaagaactttggctttagccttcaagacgcactgagcagggctcgggagcgaaggctgctagagggctatgagatctatgtgacccctggagtccagccaccaccacctcagatgggagagattattagctgctgtggaggcacatacctacccagcatgcctcggtcctataagcctcagagagttgtgatcacatgccctcaggacttccctcattgctccattccactacgggttgggctgcccctcctctcgcctgagttcctgctgactggagtgctgaagcaggaagccaagccagaggcctttgtcctctcccctttggagatgtcatccacctgagaactccactacccttttccctcccagaccacgaattagaagatatgtggaagaaagaactcagggcgttagaaaggattggggtatattgatacaacttgtcctggaacatgggtgggaccagaaatctttatgaataaatgaaaagataagggatttggaagccacaggttgttttttgtttgtttgtttgtttttttaatggccattttattttatttgtatttatagttttttatttgtatagatttaggggatacaagatttcttacatgcatgtattaaatggccattttaaaattagctagtttcatgctcagatgtcataagtggcagctatctttagccagactgttgcagttattgctcgatgccactcatggtgtcctacctcctatttggaaaccatctctatttttttcttactgagattcttactttggggtcaggaacttgaagggatgcttggagtgagtagatttgagggtccagttatggagtgctactaaaacattttcttctctcctggcctctggaagcatctttagctttgactttgggcaagtctctgtacttttctggccagcttttccaggatttataaaattagagcttcggcttgacctctgtgataaataaatattcactctgtgcctta

SEQ ID NO: 17468 - DNA, 3751 bp, Homo sapiens
  source 1..3751: mol_type = unassigned DNA
caccatgtctaggaggaccgaggaaaggcgctctggccttaccagacacgtcggacgtctatgacacagcccctctatccgttgccggcagctggcgccagactctctggtcgcggtttggaactgcgcgggaagtgggtggtgggcgggcaagcggtagtgggttgtcccttggagctgcccaatcgacgtgcattattctgttggcgcacggcggccttcaattaccgtctcattaactgatctcagcagcctgggagacaccacctatttgaactctaagggggcggggctttgggtgtgcctccgctcgactggctgcggttgtgaaagacagcggcagaagccaatcagcaaataagctctttttcggcacacgcagtcgctccacctgggtcgcgaccgttactggtggcgcgcgcggggacttaaagtagatcatggaggacacccaggctattgactgggatgttgaagaagaggaggagacagagcaatccagtgaatccttgaggtgtaacgtggagccagtagggcggctacatatctttagtggtgcccatggaccagaaaaagatttcccactacacctcgggaagaatgtggtaggccgaatgcctgactgctctgtggccctgccctttccatctatctccaaacaacatgcagagattgaaatcttagcctgggacaaggcacctatcctccgagactgtgggagccttaatggtactcaaatcctgagacctcctaaggttttgagccctggggtgagtcaccgtctgagggaccaggaattgattctctttgctgacttgctctgccagtaccatcgcctggatgtctctctgccctttgtctcccggggccctctgacagtagaagagacacccagagtacagggagaaactcaaccccagaggcttctgttggctgaggactcggaggaggaagtagattttctttctgaaaggcgtatggtaaaaaaatcaaggaccacatcttcctctgtgatagttccagagagtgatgaagaggggcattccccggtcctgggcggccttgggccgccttttgccttcaatttgaacagtgacacagatgtggaagaaggtcagcaaccagccacagaggaggcctcctcagctgccagaagaggtgccactgtagaggcaaagcagtctgaagctgaagttgtaactgaaatccagcttgaaaaggatcagcctttagtgaaggagagggacaatgatacaaaagtcaagaggggtgcagggaatggggtggttccagctggggtgattctggagaggagccaacctcctggagaggacagtgacacagatgtggatgatgacagcaggcctcctggaaggccagctgaggtccatttggaaagggctcagccttttggcttcatcgacagaccaacctgtcacccctaagcccacatctcggaccactaggagcaggacaaatatgtcctctgtgaagaaccctgaatcaactgtccctatagcccctgagctcccaccttccacctccacagagcagcctgtcacccctgagcccacatctcgggctactaggggaagaaaaaatagatcctctggcaagacccctgaaacacttgtccccacagcccctaagctcgagccttccacttccacagaccaacctgtcactcctgagcccacatctcaggccaccaggggcaggacaaataggtcctctgtgaagacccctgaaacagttgtccccacagcccctgagctccagccttccacctccacagaccagcctgttacccctgagcctacgtctcaggctactaggggaagaacagatagatcctctgtcaagactcctgaaacagttgtccccacagcccctgagctacaggcttccgcctccacagaccagcctgtcacctctgagcccacatctcggaccactaggggaagaaaaaatcggtcctctgtcaagacccctgaaacagttgtgcccgcagcccctgagctccagccttccacctccacagaccaacctgtcacccctgagcccacatctcgggccactaggggcaggacaaataggtcctctgtcaagacccctgaatcaattgtccctatagcccctgagcttcagccttccacctccagaaaccagcttgtcacccctgagcccacatctcgggccactaggtgcaggacaaataggtcctctgtcaagacccctgagccagttgtccccacagcccctgagccccatcctaccacctccacagaccagcctgtcacccccaagctcacatctagggccactaggagaaagacaaataggtcctctgtcaagactcccaaaccagttgaaccagcagcctctgatcttgagccttttacccccacagaccagtccgtcacccctgaggccatagctcagggtggtcagagcaaaacactgaggtcttccacagtaagagctatgccggttcctaccacccctgaattccaatctcctgtcaccacagaccagcctatttcccctgagcctattactcaacccagttgcatcaagaggcagagagccgctgggaaccctggctccctcgcagctcccattgaccataagccttgctctgcacccttggaacctaaatcccaggcctcaaggaaccaaagatggggagcagtgagagcagctgaatcccttacagccattcctgagcctgcctctccccagcttcttgagacaccaattcatgcctcccagatccaaaaggtggaaccagcaggtagatctaggttcaccccggagctccagcctaaggcctctcaaagccgcaagaggtctttagctaccatggattcaccaccacatcaaaaacagccccaaagaggggaagtctcccagaagacagtgattatcaaggaagaggaagaagatactgcagagaagccagggaaggaagaggatgtcgtgactccaaaaccaggcaagagaaagagagaccaggcagaggaggagcccaacagaataccaagccgcagcctccgacggaccaaacttaaccaagaatcaacagcccccaaagtgctcttcacaggagtggtggatgctcggggagagcgggctgtgctggcactggggggaagtctggctggttcagcggcagaggcttcccacctggtcactgatcgcatccgccggacagtcaagttcctgtgtgccctggggcggggaatccccattctgtccctggactggctgcatcagtcccgcaaggctggtttcttcttacccccggatgaatatgtggtgaccgaccctgagcaagagaagaactttggctttagccttcaagacgcactgagcagggctcgggagcgaaggctgctagagggctatgagatctatgtgacccctggagtccagccaccaccacctcagatgggagagattattagctgctgtggaggcacatacctacccagcatgcctcggtcctataagcctcagagagttgtgatcacatgccctcaggacttccctcattgctccattccactacgggttgggctgcccctcctctcgcctgagttcctgctgactggagtgctgaagcaggaagccaagccagaggcctttgtcctctcccctttggagatgtcatccacctgagaactccactacccttttccctcccagaccacgaattagaagatatgtggaagaaagaactcagggcgtt

SEQ ID NO: 17469 - DNA, 583 bp, Homo sapiens; identical to SEQ ID NO: 17445
  source 1..583: mol_type = unassigned DNA

SEQ ID NO: 17470 - DNA, 582 bp, Homo sapiens; identical to SEQ ID NO: 17446
  source 1..582: mol_type = unassigned DNA

SEQ ID NO: 17471 - DNA, 7576 bp, Homo sapiens; identical to SEQ ID NO: 17452
  source 1..7576: mol_type = unassigned DNA

SEQ ID NO: 17472 - DNA, 582 bp, Homo sapiens; identical to SEQ ID NO: 17444
  source 1..582: mol_type = unassigned DNA

SEQ ID NO: 17473 - DNA, 916 bp, Homo sapiens; identical to SEQ ID NO: 17448
  source 1..916: mol_type = unassigned DNA

SEQ ID NO: 17474 - DNA, 916 bp, Homo sapiens; identical to SEQ ID NO: 17448
  source 1..916: mol_type = unassigned DNA

SEQ ID NO: 17475 - DNA, 582 bp, Homo sapiens; identical to SEQ ID NO: 17446
  source 1..582: mol_type = unassigned DNA

SEQ ID NO: 17476 - DNA, 916 bp, Homo sapiens; identical to SEQ ID NO: 17448
  source 1..916: mol_type = unassigned DNA

SEQ ID NO: 17477 - DNA, 582 bp, Homo sapiens; identical to SEQ ID NO: 17444
  source 1..582: mol_type = unassigned DNA

SEQ ID NO: 17478 - DNA, 7576 bp, Homo sapiens; identical to SEQ ID NO: 17452
  source 1..7576: mol_type = unassigned DNA

SEQ ID NO: 17479 - DNA, 1172 bp, Homo sapiens
  source 1..1172: mol_type = unassigned DNA
caccatgtctaggaggaccgaggaaaggcgctctggccttaccagacacgtcggacgtctatgacacagcccctctatccgttgccggcagctggcgccagactctctggtcgcggtttggaactgcgcgggaagtgggtggtgggcgggcaagcggtagtgggttgtcccttggagctgcccaatcgacgtgcattattctgttggcgcacggcggccttcaattaccgtctcattaactgatctcagcagcctgggagacaccacctatttgaactctaagggggcggggctttgggtgtgcctccgctcgactggctgcggttgtgaaagacagcggcagaagccaatcagcaaataagctctttttcggcacacgcagtcgctccacctgggtcgcgaccgttactggtggcgcgcgcggggacttaaagtagatcatggaggacacccaggctattgactgggatgttgaagaagaggaggagacagagcaatccagtgaatccttgaggtgtaacgtggagccagtagggcggctacatatctttagtggtgcccatggaccagaaaaagatttcccactacacctcgggaagaatgtggtaggccgaatgcctgactgctctgtggccctgccctttccatctatctccaaacaacatgcagagattgaaatcttagcctgggacaaggcacctatcctccgagactgtgggagccttaatggtactcaaatcctgagacctcctaaggttttgagccctggggtgagtcaccgtctgagggaccaggaattgattctctttgctgacttgctctgccagtaccatcgcctggatgtctctctgccctttgtctcccggggccctctgacagtagaagagacacccagagtacagggagaaactcaaccccagaggcttctgttggctgaggactcggaggaggaagtagattttctttctgaaaggcgtatggtaaaaaaatcaaggaccacatcttcctctgtgatagttccagagagtgatgaagaggggcattccccggtcctgggcggccttgggccgccttttgccttcaatttgaacagtgacacagatgtggaagaaggtcagcaaccacacagaggaggcctcctcagctgccagaagaggtgccactgtagaggc

SEQ ID NO: 17480 - DNA, 582 bp, Homo sapiens; identical to SEQ ID NO: 17446
  source 1..582: mol_type = unassigned DNA

SEQ ID NO: 17481 - DNA, 583 bp, Homo sapiens; identical to SEQ ID NO: 17445
  source 1..583: mol_type = unassigned DNA

SEQ ID NO: 17482 - DNA, 6506 bp, Homo sapiens
  source 1..6506: mol_type = unassigned DNA
caccatgtctaggaggaccgaggaaaggcgctctggccttaccagacacgtcggacgtctatgacacagcccctctatccgttgccggcagctggcgccagactctctggtcgcggtttggaactgcgcgggaagtgggtggtgggcgggcaagcggtagtgggttgtcccttggagctgcccaatcgacgtgcattattctgttggcgcacggcggccttcaattaccgtctcattaactgatctcagcagcctgggagacaccacctatttgaactctaagggggcggggctttgggtgtgcctccgctcgactggctgcggttgtgaaagacagcggcagaagccaatcagcaaataagctctttttcggcacacgcagtcgctccacccgggtcgcgaccgttactggtggcgcgcgcggggacttaaagtagatcatggaggacacccaggctattgactgggatgttgaagaagaggaggagacagagcaatccagtgaatccttgaggtgtaacgtggagccagtagggcggctacatatctttagtggtgcccatggaccagaaaaagatttcccactacacctcgggaagaatgtggtaggccgaatgcctgactgctctgtggccctgccctttccatctatctccaaacaacatgcagagattgaaatcttagcctgggacaaggcacctatcctccgagactgtgggagccttaatggtactcaaatcctgagacctcctaaggttttgagccctggggtgagtcaccgtctgagggaccaggaattgattctctttgctgacttgctctgccagtaccatcgcctggatgtctctctgccctttgtctcccggggccctctgacagtagaagagacacccagagtacagggagaaactcaaccccagaggcttctgttggctgaggactcggaggaggaagtagattttctttctgaaaggcgtatggtaaaaaaatcaaggaccacatcttcctctgtgatagttccagagagtgatgaagaggggcattccccggtcctgggcggccttgggccgccttttgccttcaatttgaacagtgacacagatgtggaagaaggtcagcaaccagccacagaggaggcctcctcagctgccagaagaggtgccactgtagaggcaaagcagtctgaagctgaagttgtaactgaaatccagcttgaaaaggatcagcctttagtgaaggagagggacaatgatacaaaagtcaagaggggtgcagggaatggggtggttccagctggggtgattctggagaggagccaacctcctggagaggacagtgacacagatgtggatgatgacagcaggcctcctggaaggccagctgaggtccatttggaaagggctcagccttttggcttcatcgacagcgacactgatgcggaagaagagaggatcccagcaaccccagttgtcattcctatgaagaagaggaagatcttccatggagtaggtacaaggggtcctggagcaccaggcctggcccatctgcaggagagccaggctggtagtgatacagatgtggaagaaggcaaggccccacaggctgtccctctggagaaaagccaagcttccatggttatcaacagcgatacagatgacgaggaagaagtctcagcagcgctgactttggcacatctgaaagagagccagcctgctatatggaacagagatgcagaagaggacatgccccaacgtgtggtccttctgcagcgaagccaaaccaccactgagagagacagtgacacagacgtggaggaggaagagctcccagtggaaaatagagaagctgtcctcaaggatcacacaaagattagagcccttgttagagcacattcagaaaaggaccaacctccttttggggacagtgatgacagtgtggaagcagataagagctcacctgggatccacctggagagaagccaagcctccaccacagtggacatcaacacacaagtggagaaggaagtcccgccagggtcagccattatacatataaagaagcatcaggtgtctgtggaggggacaaatcaaacagatgtgaaagcagttgggggaccagcaaagctgcttgtggtatctctagaggaagcctggcctctgcatggggactgtgaaacagatgcagaggagggcacctccctaacagcctcagtagttgcagatgtaagaaagagccagcttccagcagaaggggatgctggggcagagtgggctgcagctgttcttaagcaggagagagctcatgaggtgggggcccagggtgggccacctgtggcacaagtggagcaggacctccctatctcaagagagaacctcacagatctggtggtggacacagacactctaggggaatccacccagccacagagagagggagcccaggtccccacaggaagggagagagaacaacatgtgggtgggaccaaggactctgaagacaactatggtgattctgaagatctggacctacaagctacccagtgctttctggagaatcagggcctggaagcagtccagagcatggaggatgaacctacccaggccttcatgttgactccaccccaagagcttggcccttcccattgcagcttccagacaacaggtaccctagatgaaccatgggaggtcctggctacacagccattctgtctgagagagtctgaggactctgagacccagccttttgacacgcaccttgaggcctatggaccttgcctgtctccacctagggcaataccaggagaccaacatccagagagcccagttcacacagagccaatggggattcaaggcagagggaggcagactgtggataaagtcatgggtataccaaaagaaacagcagagagggtgggccctgagagagggccattggagagagaaactgagaaactgctaccagaaagacagacagatgtgacaggagaggaagaattaaccaaggggaaacaggacagagaacaaaaacagttgttagctagagacacccagagacaagaatctgacaaaaatggggaaagtgcaagtcctgaaagagatagggagagtttgaaggtagaaattgagacatctgaggaaatacaagagaaacaagtacagaagcagacccttccaagcaaagcatttgagagagaagtagagagaccagtagcaaacagagagtgcgatccagccgagttagaagagaaggtgcccaaagtgatcctggagagagatacacagagaggggagccagagggagggagccaggaccagaaagggcaggcctccagcccaacaccagagcctggggtgggggcgggggaccttccgggacctacctcagcccccgtaccttctgggagccagtcaggtggaaggggatccccagtgagccccaggaggcatcagaaaggcctcctgaattgcaagatgccacctgctgagaaggcttccaggatcagagctgctgagaaggtttccaggggcgatcaggaatctccagatgcttgtctgcctcctacagtacctgaagccccagccccaccccaaaagccccttaactctcagagccagaaacatcttgcacctccgccccttctttctccccttttaccttctatcaagccaaccgttcgtaagaccaggcaagatgggagtcaggaagctccagaggctcccttgtcctcagagctggagcctttccacccaaagcctaaaattagaactcggaagtcctccagaatgacaccctttccagctacctctgctgcccctaagctcgagccttccacttccacagaccaacctgtcactcctgagcccacatctcaggccaccaggggcaggacaaataggtcctctgtgaagacccctgaaacagttgtccccacagcccctgagctccagccttccacctccacagaccagcctgttacccctgagcctacgtctcaggctactaggggaagaacagatagatcctctgtcaagactcctgaaacagttgtccccacagcccctgagctacaggcttccgcctccacagaccagcctgtcacctctgagcccacatctcggaccactaggggaagaaaaaatcggtcctctgtcaagacccctgaaacagttgtgcccgcagcccctgagctccagccttccacctccacagaccaacctgtcacccctgagcccacatctcgggccactaggggcaggacaaataggtcctctgtcaagacccctgaatcaattgtccctatagcccctgagcttcagccttccacctccagaaaccagcttgtcacccctgagcccacatctcgggccactaggtgcaggacaaataggtcctctgtcaagacccctgagccagttgtccccacagcccctgagccccatcctaccacctccacagaccagcctgtcacccccaagctcacatctagggccactaggagaaagacaaataggtcctctgtcaagactcccaaaccagttgaaccagcagcctctgatcttgagccttttacccccacagaccagtccgtcacccctgaggccatagctcagggtggtcagagcaaaacactgaggtcttccacagtaagagctatgccggttcctaccacccctgaattccaatctcctgtcaccacagaccagcctatttcccctgagcctattactcaacccagttgcatcaagaggcagagagccgctgggaaccctggctccctcgcagctcccattgaccataagccttgctctgcacccttggaacctaaatcccaggcctcaaggaaccaaagatggggagcagtgagagcagctgaatcccttacagccattcctgagcctgcctctccccagcttcttgagacaccaattcatgcctcccagatccaaaaggtggaaccagcaggtagatctaggttcaccccggagctccagcctaaggcctctcaaagccgcaagaggtctttagctaccatggattcaccaccacatcaaaaacagccccaaagaggggaagtctcccagaagacagtgattatcaaggaagaggaagaagatactgcagagaagccagggaaggaagaggatgtcgtgactccaaaaccaggcaagagaaagagagaccaggcagaggaggagcccaacagaataccaagccgcagcctccgacggaccaaacttaaccaagaatcaacagcccccaaagtgctcttcacaggagtggtggatgctcggggagagcgggctgtgctggcactggggggaagtctggctggttcagcggcagaggcttcccacctggtcactgatcgcatccgccggacagtcaagttcctgtgtgccctggggcggggaatccccattctgtccctggactggctgcatcagtcccgcaaggctggtttcttcttacccccggatgaatatgtggtgaccgaccctgagcaagagaagaactttggctttagccttcaagacgcactgagcagggctcgggagcgaaggctgctagagggctatgagatctatgtgacccctggagtccagccaccaccacctcagatgggagagattattagctgctgtggaggcacatacctacccagcatgcctcggtcctataagcctcagagagttgtgatcacatgccctcaggacttccctcattgctccattccactacgggttgggctgcccctcctctcgcctgagttcctgctgactggagtgctgaagcaggaagccaagccagaggcctttgtcctctcccctttggagatgtcatccacctgagaactccactacccttttccctcccagaccacgaattagaagatatgtggaagaaagaactcagggcgttagaaaggattggggtatattgatacaacttgtcctggaacatgggtgggaccagaaatctttatgaataaatgaaaagataagggatttggaagccacaggttgttttttgtttgtttgtttgtttttttaatggccattttattttatttgtatttatagttttttatttgtatagatttaggggatacaagatttcttacatgcatgtattaaatggccattttaaaattagctagtttcatgctcagatgtcataagtggcagctatctttagccagactgttgcagttattgctcgatgccactcatggtgtcctacctcctatttggaaaccatctctatttttttcttactgagattcttactttggggtcaggaacttgaagggatgcttggagtgagtagatttgagggtccagttatggagtgctactaaaacattttcttctctcctggcctctggaagcatctttagctttgactttgggcaagtctctgtacttttctggccagcttttccaggatttataaaattagagcttcggcttgacctctgtgataaataaatattcactctgtgcctt

SEQ ID NO: 17483 - DNA, 1172 bp, Homo sapiens
  source 1..1172: mol_type = unassigned DNA
caccatgtctaggaggaccgaggaaaggcgctctggccttaccagacacgtcggacgtctatgacacagcccctctatccgttgccggcagctggcgccagactctctggtcgcggtttggaactgcgcgggaagtgggtggtgggcgggcaagcggtagtgggttgtcccttggagctgcccaatcgacgtgcattattctgttggcgcacggcggccttcaattaccgtctcattaactgatctcagcagcctgggagacaccacctatttgaactctaagggggcggggctttgggtgtgcctccgctcgactggctgcggttgtgaaagacagcggcagaagccaatcagcaaataagctctttttcggcacacgcagtcgctccacccgggtcgcgaccgttactggtggcgcgcgcggggacttaaagtagatcatggaggacacccaggctattgactgggatgttgaagaagaggaggagacagagcaatccagtgaatccttgaggtgtaacgtggagccagtagggcggctacatatctttagtggtgcccatggaccagaaaaagatttcccactacacctcgggaagaatgtggtaggccgaatgcctgactgctctgtggccctgccctttccatctatctccaaacaacatgcagagattgaaatcttagcctgggacaaggcacctatcctccgagactgtgggagccttaatggtactcaaatcctgagacctcctaaggttttgagccctggggtgagtcaccgtctgagggaccaggaattgattctctttgctgacttgctctgccagtaccatcgcctggatgtctctctgccctttgtctcccggggccctctgacagtagaagagacacccagagtacagggagaaactcaaccccagaggcttctgttggctgaggactcggaggaggaagtagattttctttctgaaaggcgtatggtaaaaaaatcaaggaccacatcttcctctgtgatagttccagagagtgatgaagaggggcattccccggtcctgggcggccttgggccgccttttgccttcaatttgaacagtgacacagatgtggaagaaggtcagcaaccacacagaggaggcctcctcagctgccagaagaggtgccactgtagaggc

SEQ ID NO: 17484 - DNA, 6506 bp, Homo sapiens; identical to SEQ ID NO: 17482
  source 1..6506: mol_type = unassigned DNA

SEQ ID NO: 17485 - DNA, 1172 bp, Homo sapiens; identical to SEQ ID NO: 17483
  source 1..1172: mol_type = unassigned DNA

SEQ ID NO: 17486 - DNA, 1172 bp, Homo sapiens; identical to SEQ ID NO: 17483
  source 1..1172: mol_type = unassigned DNA

SEQ ID NO: 17487 - DNA, 3751 bp, Homo sapiens
  source 1..3751: mol_type = unassigned DNA
caccatgtctaggaggaccgaggaaaggcgctctggccttaccagacacgtcggacgtctatgacacagcccctctatccgttgccggcagctggcgccagactctctggtcgcggtttggaactgcgcgggaagtgggtggtgggcgggcaagcggtagtgggttgtcccttggagctgcccaatcgacgtgcattattctgttggcgcacggcggccttcaattaccgtctcattaactgatctcagcagcctgggagacaccacctatttgaactctaagggggcggggctttgggtgtgcctccgctcgactggctgcggttgtgaaagacagcggcagaagccaatcagcaaataagctctttttcggcacacgcagtcgctccacccgggtcgcgaccgttactggtggcgcgcgcggggacttaaagtagatcatggaggacacccaggctattgactgggatgttgaagaagaggaggagacagagcaatccagtgaatccttgaggtgtaacgtggagccagtagggcggctacatatctttagtggtgcccatggaccagaaaaagatttcccactacacctcgggaagaatgtggtaggccgaatgcctgactgctctgtggccctgccctttccatctatctccaaacaacatgcagagattgaaatcttagcctgggacaaggcacctatcctccgagactgtgggagccttaatggtactcaaatcctgagacctcctaaggttttgagccctggggtgagtcaccgtctgagggaccaggaattgattctctttgctgacttgctctgccagtaccatcgcctggatgtctctctgccctttgtctcccggggccctctgacagtagaagagacacccagagtacagggagaaactcaaccccagaggcttctgttggctgaggactcggaggaggaagtagattttctttctgaaaggcgtatggtaaaaaaatcaaggaccacatcttcctctgtgatagttccagagagtgatgaagaggggcattccccggtcctgggcggccttgggccgccttttgccttcaatttgaacagtgacacagatgtggaagaaggtcagcaaccagccacagaggaggcctcctcagctgccagaagaggtgccactgtagaggcaaagcagtctgaagctgaagttgtaactgaaatccagcttgaaaaggatcagcctttagtgaaggagagggacaatgatacaaaagtcaagaggggtgcagggaatggggtggttccagctggggtgattctggagaggagccaacctcctggagaggacagtgacacagatgtggatgatgacagcaggcctcctggaaggccagctgaggtccatttggaaagggctcagccttttggcttcatcgacagaccaacctgtcacccctaagcccacatctcggaccactaggagcaggacaaatatgtcctctgtgaagaaccctgaatcaactgtccctatagcccctgagctcccaccttccacctccacagagcagcctgtcacccctgagcccacatctcgggctactaggggaagaaaaaatagatcctctggcaagacccctgaaacacttgtccccacagcccctaagctcgagccttccacttccacagaccaacctgtcactcctgagcccacatctcaggccaccaggggcaggacaaataggtcctctgtgaagacccctgaaacagttgtccccacagcccctgagctccagccttccacctccacagaccagcctgttacccctgagcctacgtctcaggctactaggggaagaacagatagatcctctgtcaagactcctgaaacagttgtccccacagcccctgagctacaggcttccgcctccacagaccagcctgtcacctctgagcccacatctcggaccactaggggaagaaaaaatcggtcctctgtcaagacccctgaaacagttgtgcccgcagcccctgagctccagccttccacctccacagaccaacctgtcacccctgagcccacatctcgggccactaggggcaggacaaataggtcctctgtcaagacccctgaatcaattgtccctatagcccctgagcttcagccttccacctccagaaaccagcttgtcacccctgagcccacatctcgggccactaggtgcaggacaaataggtcctctgtcaagacccctgagccagttgtccccacagcccctgagccccatcctaccacctccacagaccagcctgtcacccccaagctcacatctagggccactaggagaaagacaaataggtcctctgtcaagactcccaaaccagttgaaccagcagcgtctgatcttgagccttttacccccacagaccagtccgtcacccctgaggccatagctcagggtggtcagagcaaaacactgaggtcttccacagtaagagctatgccggttcctaccacccctgaattccaatctcctgtcaccacagaccagcctatttcccctgagcctattactcaacccagttgcatcaagaggcagagagccgctgggaaccctggctccctcgcagctcccattgaccataagccttgctctgcacccttggaacctaaatcccaggcctcaaggaaccaaagatggggagcagtgagagcagctgaatcccttacagccattcctgagcctgcctctccccagcttcttgagacaccaattcatgcctcccagatccaaaaggtggaaccagcaggtagatctaggttcaccccggagctccagcctaaggcctctcaaagccgcaagaggtctttagctaccatggattcaccaccacatcaaaaacagccccaaagaggggaagtctcccagaagacagtgattatcaaggaagaggaagaagatactgcagagaagccagggaaggaagaggatgtcgtgactccaaaaccaggcaagagaaagagagaccaggcagaggaggagcccaacagaataccaagccgcagcctccgacggaccaaacttaaccaagaatcaacagcccccaaagtgctcttcacaggagtggtggatgctcggggagagcgggctgtgctggcactggggggaagtctggctggttcagcggcagaggcttcccacctggtcactgatcgcatccgccggacagtcaagttcctgtgtgccctggggcggggaatccccattctgtccctggactggctgcatcagtcccgcaaggctggtttcttcttacccccggatgaatatgtggtgaccgaccctgagcaagagaagaactttggctttagccttcaagacgcactgagcagggctcgggagcgaaggctgctagagggctatgagatctatgtgacccctggagtccagccaccaccacctcagatgggagagattattagctgctgtggaggcacatacctacccagcatgcctcggtcctataagcctcagagagttgtgatcacatgccctcaggacttccctcattgctccattccactacgggttgggctgcccctcctctcgcctgagttcctgctgactggagtgctgaagcaggaagccaagccagaggcctttgtcctctcccctttggagatgtcatccacctgagaactccactacccttttccctcccagaccacgaattagaagatatgtggaagaaagaactcagggcgtt

SEQ ID NO: 17488 - DNA, 6575 bp, Homo sapiens
  source 1..6575: mol_type = unassigned DNA
caccatgtctaggaggaccgaggaaaggcgctctggccttaccagacacgtcggacgtctatgacacagcccctctatccgttgccggcagctggcgccagactctctggtcgcggtttggaactgcgcgggaagtgggtggtgggcgggcaagcggtagtgggttgtcccttggagctgcccaatcgacgtgcattattctgttggcgcacggcggccttcaattaccgtctcattaactgatctcagcagcctgggagacaccacctatttgaactctaagggggcggggctttgggtgtgcctccgctcgactggctgcggttgtgaaagacagcggcagaagccaatcagcaaataagctctttttcggcacacgcagtcgctccacccgggtcgcgaccgttactggtggcgcgcgcggggacttaaagtagatcatggaggacacccaggctattgactgggatgttgaagaagaggaggagacagagcaatccagtgaatccttgaggtgtaacgtggagccagtagggcggctacatatctttagtggtgcccatggaccagaaaaagatttcccactacacctcgggaagaatgtggtaggccgaatgcctgactgctctgtggccctgccctttccatctatctccaaacaacatgcagagattgaaatcttagcctgggacaaggcacctatcctccgagactgtgggagccttaatggtactcaaatcctgagacctcctaaggttttgagccctggggtgagtcaccgtctgagggaccaggaattgattctctttgctgacttgctctgccagtaccatcgcctggatgtctctctgccctttgtctcccggggccctctgacagtagaagagacacccagagtacagggagaaactcaaccccagaggcttctgttggctgaggactcggaggaggaagtagattttctttctgaaaggcgtatggtaaaaaaatcaaggaccacatcttcctctgtgatagttccagagagtgatgaagaggggcattccccggtcctgggcggccttgggccgccttttgccttcaatttgaacagtgacacagatgtggaagaaggtcagcaaccagccacagaggaggcctcctcagctgccagaagaggtgccactgtagaggcaaagcagtctgaagctgaagttgtaactgaaatccagcttgaaaaggatcagcctttagtgaaggagagggacaatgatacaaaagtcaagaggggtgcagggaatggggtggttccagctggggtgattctggagaggagccaacctcctggagaggacagtgacacagatgtggatgatgacagcaggcctcctggaaggccagctgaggtccatttggaaagggctcagccttttggcttcatcgacagcgacactgatgcggaagaagagaggatcccagcaaccccagttgtcattcctatgaagaagaggaagatcttccatggagtaggtacaaggggtcctggagcaccaggcctggcccatctgcaggagagccaggctggtagtgatacagatgtggaagaaggcaaggccccacaggctgtccctctggagaaaagccaagcttccatggttatcaacagcgatacagatgacgaggaagaagtctcagcagcgctgactttggcacatctgaaagagagccagcctgctatatggaacagagatgcagaagaggacatgccccaacgtgtggtccttctgcagcgaagccaaaccaccactgagagagacagtgacacagacgtggaggaggaagagctcccagtggaaaatagagaagctgtcctcaaggatcacacaaagattagagcccttgttagagcacattcagaaaaggaccaacctccttttggggacagtgatgacagtgtggaagcagataagagctcacctgggatccacctggagagaagccaagcctccaccacagtggacatcaacacacaagtggagaaggaagtcccgccagggtcagccattatacatataaagaagcatcaggtgtctgtggaggggacaaatcaaacagatgtgaaagcagttgggggaccagcaaagctgcttgtggtatctctagaggaagcctggcctctgcatggggactgtgaaacagatgcagaggagggcacctccctaacagcctcagtagttgcagatgtaagaaagagccagcttccagcagaaggggatgctggggcagagtgggctgcagctgttcttaagcaggagagagctcatgaggtgggggcccagggtgggccacctgtggcacaagtggagcaggacctccctatctcaagagagaacctcacagatctggtggtggacacagacactctaggggaatccacccagccacagagagagggagcccaggtccccacaggaagggagagagaacaacatgtgggtgggaccaaggactctgaagacaactatggtgattctgaagatctggacctacaagctacccagtgctttctggagaatcagggcctggaagcagtccagagcatggaggatgaacctacccaggccttcatgttgactccaccccaagagcttggcccttcccattgcagcttccagacaacaggcctcctgaattgcaagatgccacctgctgagaaggcttccaggatcagagctgctgagaaggtttccaggggcgatcaggaatctccagatgcttgtctgcctcctacagtacctgaagccccagccccaccccaaaagccccttaactctcagagccagaaacatcttgcacctccgccccttctttctccccttttaccttctatcaagccaaccgttcgtaagaccaggcaagatgggagtcaggaagctccagaggctcccttgtcctcagagctggagcctttccacccaaagcctaaaattagaactcggaagtcctccagaatgacaccctttccagctacctctgctgcccctgagccccacccttccacctccacagcccagccagtcactcccaagcccacatctcaggccactaggagcaggacaaataggtcctctgtcaagacccctgaaccagttgtccccacagcccctgagctccagccttccacctccacagaccagcctgtcacctctgagcccacatctcaggttactaggggaagaaaaagtagatcctctgtcaagacccctgaaacagttgtgcccacagcccttgagctccagccttccacctccaccgaccgacctgtcacctctgaacccacctctcaggctactaggggaagaaaaaatagatcctctgtcaagacccctgaaccagttgtccccacagcccctgagctccagccttccacctccacagaccagcctgtcacttctgagcccacatatcaggctactaggggaagaaaaaatagatcctctgtcaagacccctgaaccagttgtgcccacagcccctgagctccggccttccacctccacagaccgacctgtcacccccaagcccacatctcggaccactaggagcaggacaaatatgtcctctgtcaagacccctgaaacagttgtccccacagcccctgagctccagatttccacctccacagaccaacctgtcacccctaagcccacatctcggaccactaggagcaggacaaatatgtcctctgtgaagaaccctgaatcaactgtccctatagcccctgagctcccaccttccacctccacagagcagcctgtcacccctgagcccacatctcgggctactaggggaagaaaaaatagatcctctggcaagacccctgaaacacttgtccccacagcccctaagctcgagccttccacttccacagaccaacctgtcactcctgagcccacatctcaggccaccaggggcaggacaaataggtcctctgtgaagacccctgaaacagttgtccccacagcccctgagctccagccttccacctccacagaccagcctgttacccctgagcctacgtctcaggctactaggggaagaacagatagatcctctgtcaagactcctgaaacagttgtccccacagcccctgagctacaggcttccgcctccacagaccagcctgtcacctctgagcccacatctcggaccactaggggaagaaaaaatcggtcctctgtcaagacccctgaaacagttgtgcccgcagcccctgagctccagccttccacctccacagaccaacctgtcacccctgagcccacatctcgggccactaggggcaggacaaataggtcctctgtcaagacccctgaatcaattgtccctatagcccctgagcttcagccttccacctccagaaaccagcttgtcacccctgagcccacatctcgggccactaggtgcaggacaaataggtcctctgtcaagacccctgagccagttgtccccacagcccctgagccccatcctaccacctccacagaccagcctgtcacccccaagctcacatctagggccactaggagaaagacaaataggtcctctgtcaagactcccaaaccagttgaaccagcagcgtctgatcttgagccttttacccccacagaccagtccgtcacccctgaggccatagctcagggtggtcagagcaaaacactgaggtcttccacagtaagagctatgccggttcctaccacccctgaattccaatctcctgtcaccacagaccagcctatttcccctgagcctattactcaacccagttgcatcaagaggcagagagccgctgggaaccctggctccctcgcagctcccattgaccataagccttgctctgcacccttggaacctaaatcccaggcctcaaggaaccaaagatggggagcagtgagagcagctgaatcccttacagccattcctgagcctgcctctccccagcttcttgagacaccaattcatgcctcccagatccaaaaggtggaaccagcaggtagatctaggttcaccccggagctccagcctaaggcctctcaaagccgcaagaggtctttagctaccatggattcaccaccacatcaaaaacagccccaaagaggggaagtctcccagaagacagtgattatcaaggaagaggaagaagatactgcagagaagccagggaaggaagaggatgtcgtgactccaaaaccaggcaagagaaagagagaccaggcagaggaggagcccaacagaataccaagccgcagcctccgacggaccaaacttaaccaagaatcaacagcccccaaagtgctcttcacaggagtggtggatgctcggggagagcgggctgtgctggcactggggggaagtctggctggttcagcggcagaggcttcccacctggtcactgatcgcatccgccggacagtcaagttcctgtgtgccctggggcggggaatccccattctgtccctggactggctgcatcagtcccgcaaggctggtttcttcttacccccggatgaatatgtggtgaccgaccctgagcaagagaagaactttggctttagccttcaagacgcactgagcagggctcgggagcgaaggctgctagagggctatgagatctatgtgacccctggagtccagccaccaccacctcagatgggagagattattagctgctgtggaggcacatacctacccagcatgcctcggtcctataagcctcagagagttgtgatcacatgccctcaggacttccctcattgctccattccactacgggttgggctgcccctcctctcgcctgagttcctgctgactggagtgctgaagcaggaagccaagccagaggcctttgtcctctcccctttggagatgtcatccacctgagaactccactacccttttccctcccagaccacgaattagaagatatgtggaagaaagaactcagggcgttagaaaggattggggtatattgatacaacttgtcctggaacatgggtgggaccagaaatctttatgaataaatgaaaagataagggatttggaagccacaggttgttttttgtttgtttgtttgtttttttaatggccattttattttatttgtatttatagttttttatttgtatagatttaggggatacaagatttcttacatgcatgtattaaatggccattttaaaattagctagtttcatgctcagatgtcataagtggcagctatctttagccagactgttgcagttattgctcgatgccactcatggtgtcctacctcctatttggaaaccatctctatttttttcttactgagattcttactttggggtcaggaacttgaagggatgcttggagtgagtagatttgagggtccagttatggagtgctactaaaacattttcttctctcctggcctctggaagcatctttagctttgactttgggcaagtctctgtacttttctggccagcttttccaggatttataaaattagagcttcggcttgacctctgtgataaataaatattcactctgtgcctt

SEQ ID NO: 17489 - DNA, 3751 bp, Homo sapiens
  source 1..3751: mol_type = unassigned DNA
caccatgtctaggaggaccgaggaaaggcgctctggccttaccagacacgtcggacgtctatgacacagcccctctatccgttgccggcagctggcgccagactctctggtcgcggtttggaactgcgcgggaagtgggtggtgggcgggcaagcggtagtgggttgtcccttggagctgcccaatcgacgtgcattattctgttggcgcacggcggccttcaattaccgtctcattaactgatctcagcagcctgggagacaccacctatttgaactctaagggggcggggctttgggtgtgcctccgctcgactggctgcggttgtgaaagacagcggcagaagccaatcagcaaataagctctttttcggcacacgcagtcgctccacccgggtcgcgaccgttactggtggcgcgcgcggggacttaaagtagatcatggaggacacccaggctattgactgggatgttgaagaagaggaggagacagagcaatccagtgaatccttgaggtgtaacgtggagccagtagggcggctacatatctttagtggtgcccatggaccagaaaaagatttcccactacacctcgggaagaatgtggtaggccgaatgcctgactgctctgtggccctgccctttccatctatctccaaacaacatgcagagattgaaatcttagcctgggacaaggcacctatcctccgagactgtgggagccttaatggtactcaaatcctgagacctcctaaggttttgagccctggggtgagtcaccgtctgagggaccaggaattgattctctttgctgacttgctctgccagtaccatcgcctggatgtctctctgccctttgtctcccggggccctctgacagtagaagagacacccagagtacagggagaaactcaaccccagaggcttctgttggctgaggactcggaggaggaagtagattttctttctgaaaggcgtatggtaaaaaaatcaaggaccacatcttcctctgtgatagttccagagagtgatgaagaggggcattccccggtcctgggcggccttgggccgccttttgccttcaatttgaacagtgacacagatgtggaagaaggtcagcaaccagccacagaggaggcctcctcagctgccagaagaggtgccactgtagaggcaaagcagtctgaagctgaagttgtaactgaaatccagcttgaaaaggatcagcctttagtgaaggagagggacaatgatacaaaagtcaagaggggtgcagggaatggggtggttccagctggggtgattctggagaggagccaacctcctggagaggacagtgacacagatgtggatgatgacagcaggcctcctggaaggccagctgaggtccatttggaaagggctcagccttttggcttcatcgacagaccaacctgtcacccctaagcccacatctcggaccactaggagcaggacaaatatgtcctctgtgaagaaccctgaatcaactgtccctatagcccctgagctcccaccttccacctccacagagcagcctgtcacccctgagcccacatctcgggctactaggggaagaaaaaatagatcctctggcaagacccctgaaacacttgtccccacagcccctaagctcgagccttccacttccacagaccaacctgtcactcctgagcccacatctcaggccaccaggggcaggacaaataggtcctctgtgaagacccctgaaacagttgtccccacagcccctgagctccagccttccacctccacagaccagcctgttacccctgagcctacgtctcaggctactaggggaagaacagatagatcctctgtcaagactcctgaaacagttgtccccacagcccctgagctacaggcttccgcctccacagaccagcctgtcacctctgagcccacatctcggaccactaggggaagaaaaaatcggtcctctgtcaagacccctgaaacagttgtgcccgcagcccctgagctccagccttccacctccacagaccaacctgtcacccctgagcccacatctcgggccactaggggcaggacaaataggtcctctgtcaagacccctgaatcaattgtccctatagcccctgagcttcagccttccacctccagaaaccagcttgtcacccctgagcccacatctcgggccactaggtgcaggacaaataggtcctctgtcaagacccctgagccagttgtccccacagcccctgagccccatcctaccacctccacagaccagcctgtcacccccaagctcacatctagggccactaggagaaagacaaataggtcctctgtcaagactcccaaaccagttgaaccagcagcctctgatcttgagccttttacccccacagaccagtccgtcacccctgaggccatagctcagggtggtcagagcaaaacactgaggtcttccacagtaagagctatgccggttcctaccacccctgaattccaatctcctgtcaccacagaccagcctatttcccctgagcctattactcaacccagttgcatcaagaggcagagagccgctgggaaccctggctccctcgcagctcccattgaccataagccttgctctgcacccttggaacctaaatcccaggcctcaaggaaccaaagatggggagcagtgagagcagctgaatcccttacagccattcctgagcctgcctctccccagcttcttgagacaccaattcatgcctcccagatccaaaaggtggaaccagcaggtagatctaggttcaccccggagctccagcctaaggcctctcaaagccgcaagaggtctttagctaccatggattcaccaccacatcaaaaacagccccaaagaggggaagtctcccagaagacagtgattatcaaggaagaggaagaagatactgcagagaagccagggaaggaagaggatgtcgtgactccaaaaccaggcaagagaaagagagaccaggcagaggaggagcccaacagaataccaagccgcagcctccgacggaccaaacttaaccaagaatcaacagcccccaaagtgctcttcacaggagtggtggatgctcggggagagcgggctgtgctggcactggggggaagtctggctggttcagcggcagaggcttcccacctggtcactgatcgcatccgccggacagtcaagttcctgtgtgccctggggcggggaatccccattctgtccctggactggctgcatcagtcccgcaaggctggtttcttcttacccccggatgaatatgtggtgaccgaccctgagcaagagaagaactttggctttagccttcaagacgcactgagcagggctcgggagcgaaggctgctagagggctatgagatctatgtgacccctggagtccagccaccaccacctcagatgggagagattattagctgctgtggaggcacatacctacccagcatgcctcggtcctataagcctcagagagttgtgatcacatgccctcaggacttccctcattgctccattccactacgggttgggctgcccctcctctcgcctgagttcctgctgactggagtgctgaagcaggaagccaagccagaggcctttgtcctctcccctttggagatgtcatccacctgagaactccactacccttttccctcccagaccacgaattagaagatatgtggaagaaagaactcagggcgtt

SEQ ID NO: 17490 - DNA, 6506 bp, Homo sapiens; identical to SEQ ID NO: 17482
  source 1..6506: mol_type = unassigned DNA

SEQ ID NO: 17491 - DNA, 3751 bp, Homo sapiens; identical to SEQ ID NO: 17489
  source 1..3751: mol_type = unassigned DNA

SEQ ID NO: 17492 - DNA, 6506 bp, Homo sapiens
  source 1..6506: mol_type = unassigned DNA
caccatgtctaggaggaccgaggaaaggcgctctggccttaccagacacgtcggacgtctatgacacagcccctctatccgttgccggcagctggcgccagactctctggtcgcggtttggaactgcgcgggaagtgggtggtgggcgggcaagcggtagtgggttgtcccttggagctgcccaatcgacgtgcattattctgttggcgcacggcggccttcaattaccgtctcattaactgatctcagcagcctgggagacaccacctatttgaactctaagggggcggggctttgggtgtgcctccgctcgactggctgcggttgtgaaagacagcggcagaagccaatcagcaaataagctctttttcggcacacgcagtcgctccacccgggtcgcgaccgttactggtggcgcgcgcggggacttaaagtagatcatggaggacacccaggctattgactgggatgttgaagaagaggaggagacagagcaatccagtgaatccttgaggtgtaacgtggagccagtagggcggctacatatctttagtggtgcccatggaccagaaaaagatttcccactacacctcgggaagaatgtggtaggccgaatgcctgactgctctgtggccctgccctttccatctatctccaaacaacatgcagagattgaaatcttagcctgggacaaggcacctatcctccgagactgtgggagccttaatggtactcaaatcctgagacctcctaaggttttgagccctggggtgagtcaccgtctgagggaccaggaattgattctctttgctgacttgctctgccagtaccatcgcctggatgtctctctgccctttgtctcccggggccctctgacagtagaagagacacccagagtacagggagaaactcaaccccagaggcttctgttggctgaggactcggaggaggaagtagattttctttctgaaaggcgtatggtaaaaaaatcaaggaccacatcttcctctgtgatagttccagagagtgatgaagaggggcattccccggtcctgggcggccttgggccgccttttgccttcaatttgaacagtgacacagatgtggaagaaggtcagcaaccagccacagaggaggcctcctcagctgccagaagaggtgccactgtagaggcaaagcagtctgaagctgaagttgtaactgaaatccagcttgaaaaggatcagcctttagtgaaggagagggacaatgatacaaaagtcaagaggggtgcagggaatggggtggttccagctggggtgattctggagaggagccaacctcctggagaggacagtgacacagatgtggatgatgacagcaggcctcctggaaggccagctgaggtccatttggaaagggctcagccttttggcttcatcgacagcgacactgatgcggaagaagagaggatcccagcaaccccagttgtcattcctatgaagaagaggaagatcttccatggagtaggtacaaggggtcctggagcaccaggcctggcccatctgcaggagagccaggctggtagtgatacagatgtggaagaaggcaaggccccacaggctgtccctctggagaaaagccaagcttccatggttatcaacagcgatacagatgacgaggaagaagtctcagcagcgctgactttggcacatctgaaagagagccagcctgctatatggaacagagatgcagaagaggacatgccccaacgtgtggtccttctgcagcgaagccaaaccaccactgagagagacagtgacacagacgtggaggaggaagagctcccagtggaaaatagagaagctgtcctcaaggatcacacaaagattagagcccttgttagagcacattcagaaaaggaccaacctccttttggggacagtgatgacagtgtggaagcagataagagctcacctgggatccacctggagagaagccaagcctccaccacagtggacatcaacacacaagtggagaaggaagtcccgccagggtcagccattatacatataaagaagcatcaggtgtctgtggaggggacaaatcaaacagatgtgaaagcagttgggggaccagcaaagctgcttgtggtatctctagaggaagcctggcctctgcatggggactgtgaaacagatgcagaggagggcacctccctaacagcctcagtagttgcagatgtaagaaagagccagcttccagcagaaggggatgctggggcagagtgggctgcagctgttcttaagcaggagagagctcatgaggtgggggcccagggtgggccacctgtggcacaagtggagcaggacctccctatctcaagagagaacctcacagatctggtggtggacacagacactctaggggaatccacccagccacagagagagggagcccaggtccccacaggaagggagagagaacaacatgtgggtgggaccaaggactctgaagacaactatggtgattctgaagatctggacctacaagctacccagtgctttctggagaatcagggcctggaagcagtccagagcatggaggatgaacctacccaggccttcatgttgactccaccccaagagcttggcccttcccattgcagcttccagacaacaggtaccctagatgaaccatgggaggtcctggctacacagccattctgtctgagagagtctgaggactctgagacccagccttttgacacgcaccttgaggcctatggaccttgcctgtctccacctagggcaataccaggagaccaacatccagagagcccagttcacacagagccaatggggattcaaggcagagggaggcagactgtggataaagtcatgggtataccaaaagaaacagcagagagggtgggccctgagagagggccattggagagagaaactgagaaactgctaccagaaagacagacagatgtgacaggagaggaagaattaaccaaggggaaacaggacagagaacaaaaacagttgttagctagagacacccagagacaagaatctgacaaaaatggggaaagtgcaagtcctgaaagagatagggagagtttgaaggtagaaattgagacatctgaggaaatacaagagaaacaagtacagaagcagacccttccaagcaaagcatttgagagagaagtagagagaccagtagcaaacagagagtgcgatccagccgagttagaagagaaggtgcccaaagtgatcctggagagagatacacagagaggggagccagagggagggagccaggaccagaaagggcaggcctccagcccaacaccagagcctggggtgggggcgggggaccttccgggacctacctcagcccccgtaccttctgggagccagtcaggtggaaggggatccccagtgagccccaggaggcatcagaaaggcctcctgaattgcaagatgccacctgctgagaaggcttccaggatcagagctgctgagaaggtttccaggggcgatcaggaatctccagatgcttgtctgcctcctacagtacctgaagccccagccccaccccaaaagccccttaactctcagagccagaaacatcttgcacctccgccccttctttctccccttttaccttctatcaagccaaccgttcgtaagaccaggcaagatgggagtcaggaagctccagaggctcccttgtcctcagagctggagcctttccacccaaagcctaaaattagaactcggaagtcctccagaatgacaccctttccagctacctctgctgcccctaagctcgagccttccacttccacagaccaacctgtcactcctgagcccacatctcaggccaccaggggcaggacaaataggtcctctgtgaagacccctgaaacagttgtccccacagcccctgagctccagccttccacctccacagaccagcctgttacccctgagcctacgtctcaggctactaggggaagaacagatagatcctctgtcaagactcctgaaacagttgtccccacagcccctgagctacaggcttccgcctccacagaccagcctgtcacctctgagcccacatctcggaccactaggggaagaaaaaatcggtcctctgtcaagacccctgaaacagttgtgcccgcagcccctgcgctccagccttccacctccacagaccaacctgtcacccctgagcccacatctcgggccactaggggcaggacaaataggtcctctgtcaagacccctgaatcaattgtccctatagcccctgagcttcagccttccacctccagaaaccagcttgtcacccctgagcccacatctcgggccactaggtgcaggacaaataggtcctctgtcaagacccctgagccagttgtccccacagcccctgagccccatcctaccacctccacagaccagcctgtcacccccaagctcacatctagggccactaggagaaagacaaataggtcctctgtcaagactcccaaaccagttgaaccagcagcctctgatcttgagccttttacccccacagaccagtccgtcacccctgaggccatagctcagggtggtcagagcaaaacactgaggtcttccacagtaagagctatgccggttcctaccacccctgaattccaatctcctgtcaccacagaccagcctatttcccctgagcctattactcaacccagttgcatcaagaggcagagagccgctgggaaccctggctccctcgcagctcccattgaccataagccttgctctgcacccttggaacctaaatcccaggcctcaaggaaccaaagatggggagcagtgagagcagctgaatcccttacagccattcctgagcctgcctctccccagcttcttgagacaccaattcatgcctcccagatccaaaaggtggaaccagcaggtagatctaggttcaccccggagctccagcctaaggcctctcaaagccgcaagaggtctttagctaccatggattcaccaccacatcaaaaacagccccaaagaggggaagtctcccagaagacagtgattatcaaggaagaggaagaagatactgcagagaagccagggaaggaagaggatgtcgtgactccaaaaccaggcaagagaaagagagaccaggcagaggaggagcccaacagaataccaagccgcagcctccgacggaccaaacttaaccaagaatcaacagcccccaaagtgctcttcacaggagtggtggatgctcggggagagcgggctgtgctggcactggggggaagtctggctggttcagcggcagaggcttcccacctggtcactgatcgcatccgccggacagtcaagttcctgtgtgccctggggcggggaatccccattctgtccctggactggctgcatcagtcccgcaaggctggtttcttcttacccccggatgaatatgtggtgaccgaccctgagcaagagaagaactttggctttagccttcaagacgcactgagcagggctcgggagcgaaggctgctagagggctatgagatctatgtgacccctggagtccagccaccaccacctcagatgggagagattattagctgctgtggaggcacatacctacccagcatgcctcggtcctataagcctcagagagttgtgatcacatgccctcaggacttccctcattgctccattccactacgggttgggctgcccctcctctcgcctgagttcctgctgactggagtgctgaagcaggaagccaagccagaggcctttgtcctctcccctttggagatgtcatccacctgagaactccactacccttttccctcccagaccacgaattagaagatatgtggaagaaagaactcagggcgttagaaaggattggggtatattgatacaacttgtcctggaacatgggtgggaccagaaatctttatgaataaatgaaaagataagggatttggaagccacaggttgttttttgtttgtttgtttgtttttttaatggccattttattttatttgtatttatagttttttatttgtatagatttaggggatacaagatttcttacatgcatgtattaaatggccattttaaaattagctagtttcatgctcagatgtcataagtggcagctatctttagccagactgttgcagttattgctcgatgccactcatggtgtcctacctcctatttggaaaccatctctatttttttcttactgagattcttactttggggtcaggaacttgaagggatgcttggagtgagtagatttgagggtccagttatggagtgctactaaaacattttcttctctcctggcctctggaagcatctttagctttgactttgggcaagtctctgtacttttctggccagcttttccaggatttataaaattagagcttcggcttgacctctgtgataaataaatattcactctgtgcctt

SEQ ID NO: 17493 - DNA, 6575 bp, Homo sapiens
  source 1..6575: mol_type = unassigned DNA
caccatgtctaggaggaccgaggaaaggcgctctggccttaccagacacgtcggacgtctatgacacagcccctctatccgttgccggcagctggcgccagactctctggtcgcggtttggaactgcgcgggaagtgggtggtgggcgggcaagcggtagtgggttgtcccttggagctgcccaatcgacgtgcattattctgttggcgcacggcggccttcaattaccgtctcattaactgatctcagcagcctgggagacaccacctatttgaactctaagggggcggggctttgggtgtgcctccgctcgactggctgcggttgtgaaagacagcggcagaagccaatcagcaaataagctctttttcggcacacgcagtcgctccacccgggtcgcgaccgttactggtggcgcgcgcggggacttaaagtagatcatggaggacacccaggctattgactgggatgttgaagaagaggaggagacagagcaatccagtgaatccttgaggtgtaacgtggagccagtagggcggctacatatctttagtggtgcccatggaccagaaaaagatttcccactacacctcgggaagaatgtggtaggccgaatgcctgactgctctgtggccctgccctttccatctatctccaaacaacatgcagagattgaaatcttagcctgggacaaggcacctatcctccgagactgtgggagccttaatggtactcaaatcctgagacctcctaaggttttgagccctggggtgagtcaccgtctgagggaccaggaattgattctctttgctgacttgctctgccagtaccatcgcctggatgtctctctgccctttgtctcccggggccctctgacagtagaagagacacccagagtacagggagaaactcaaccccagaggcttctgttggctgaggactcggaggaggaagtagattttctttctgaaaggcgtatggtaaaaaaatcaaggaccacatcttcctctgtgatagttccagagagtgatgaagaggggcattccccggtcctgggcggccttgggccgccttttgccttcaatttgaacagtgacacagatgtggaagaaggtcagcaaccagccacagaggaggcctcctcagctgccagaagaggtgccactgtagaggcaaagcagtctgaagctgaagttgtaactgaaatccagcttgaaaaggatcagcctttagtgaaggagagggacaatgatacaaaagtcaagaggggtgcagggaatggggtggttccagctggggtgattctggagaggagccaacctcctggagaggacagtgacacagatgtggatgatgacagcaggcctcctggaaggccagctgaggtccatttggaaagggctcagccttttggcttcatcgacagcgacactgatgcggaagaagagaggatcccagcaaccccagttgtcattcctatgaagaagaggaagatcttccatggagtaggtacaaggggtcctggagcaccaggcctggcccatctgcaggagagccaggctggtagtgatacagatgtggaagaaggcaaggccccacaggctgtccctctggagaaaagccaagcttccatggttatcaacagcgatacagatgacgaggaagaagtctcagcagcgctgactttggcacatctgaaagagagccagcctgctatatggaacagagatgcagaagaggacatgccccaacgtgtggtccttctgcagcgaagccaaaccaccactgagagagacagtgacacagacgtggaggaggaagagctcccagtggaaaatagagaagctgtcctcaaggatcacacaaagattagagcccttgttagagcacattcagaaaaggaccaacctccttttggggacagtgatgacagtgtggaagcagataagagctcacctgggatccacctggagagaagccaagcctccaccacagtggacatcaacacacaagtggagaaggaagtcccgccagggtcagccattatacatataaagaagcatcaggtgtctgtggaggggacaaatcaaacagatgtgaaagcagttgggggaccagcaaagctgcttgtggtatctctagaggaagcctggcctctgcatggggactgtgaaacagatgcagaggagggcacctccctaacagcctcagtagttgcagatgtaagaaagagccagcttccagcagaaggggatgctggggcagagtgggctgcagctgttcttaagcaggagagagctcatgaggtgggggcccagggtgggccacctgtggcacaagtggagcaggacctccctatctcaagagagaacctcacagatctggtggtggacacagacactctaggggaatccacccagccacagagagagggagcccaggtccccacaggaagggagagagaacaacatgtgggtgggaccaaggactctgaagacaactatggtgattctgaagatctggacctacaagctacccagtgctttctggagaatcagggcctggaagcagtccagagcatggaggatgaacctacccaggccttcatgttgactccaccccaagagcttggcccttcccattgcagcttccagacaacaggcctcctgaattgcaagatgccacctgctgagaaggcttccaggatcagagctgctgagaaggtttccaggggcgatcaggaatctccagatgcttgtctgcctcctacagtacctgaagccccagccccaccccaaaagccccttaactctcagagccagaaacatcttgcacctccgccccttctttctccccttttaccttctatcaagccaaccgttcgtaagaccaggcaagatgggagtcaggaagctccagaggctcccttgtcctcagagctggagcctttccacccaaagcctaaaattagaactcggaagtcctccagaatgacaccctttccagctacctctgctgcccctgagccccacccttccacctccacagcccagccagtcactcccaagcccacatctcaggccactaggagcaggacaaataggtcctctgtcaagacccctgaaccagttgtccccacagcccctgagctccagccttccacctccacagaccagcctgtcacctctgagcccacatctcaggttactaggggaagaaaaagtagatcctctgtcaagacccctgaaacagttgtgcccacagcccttgagctccagccttccacctccaccgaccgacctgtcacctctgaacccacctctcaggctactaggggaagaaaaaatagatcctctgtcaagacccctgaaccagttgtccccacagcccctgagctccagccttccacctccacagaccagcctgtcacttctgagcccacatatcaggctactaggggaagaaaaaatagatcctctgtcaagacccctgaaccagttgtgcccacagcccctgagctccggccttccacctccacagaccgacctgtcacccccaagcccacatctcggaccactaggagcaggacaaatatgtcctctgtcaagacccctgaaacagttgtccccacagcccctgagctccagatttccacctccacagaccaacctgtcacccctaagcccacatctcggaccactaggagcaggacaaatatgtcctctgtgaagaaccctgaatcaactgtccctatagcccctgagctcccaccttccacctccacagagcagcctgtcacccctgagcccacatctcgggctactaggggaagaaaaaatagatcctctggcaagacccctgaaacacttgtccccacagcccctaagctcgagccttccacttccacagaccaacctgtcactcctgagcccacatctcaggccaccaggggcaggacaaataggtcctctgtgaagacccctgaaacagttgtccccacagcccctgagctccagccttccacctccacagaccagcctgttacccctgagcctacgtctcaggctactaggggaagaacagatagatcctctgtcaagactcctgaaacagttgtccccacagcccctgagctacaggcttccgcctccacagaccagcctgtcacctctgagcccacatctcggaccactaggggaagaaaaaatcggtcctctgtcaagacccctgaaacagttgtgcccgcagcccctgagctccagccttccacctccacagaccaacctgtcacccctgagcccacatctcgggccactaggggcaggacaaataggtcctctgtcaagacccctgaatcaattgtccctatagcccctgagcttcagccttccacctccagaaaccagcttgtcacccctgagcccacatctcgggccactaggtgcaggacaaataggtcctctgtcaagacccctgagccagttgtccccacagcccctgagccccatcctaccacctccacagaccagcctgtcacccccaagctcacatctagggccactaggagaaagacaaataggtcctctgtcaagactcccaaaccagttgaaccagcagcctctgatcttgagccttttacccccacagaccagtccgtcacccctgaggccatagctcagggtggtcagagcaaaacactgaggtcttccacagtaagagctatgccggttcctaccacccctgaattccaatctcctgtcaccacagaccagcctatttcccctgagcctattactcaacccagttgcatcaagaggcagagagccgctgggaaccctggctccctcgcagctcccattgaccataagccttgctctgcacccttggaacctaaatcccaggcctcaaggaaccaaagatggggagcagtgagagcagctgaatcccttacagccattcctgagcctgcctctccccagcttcttgagacaccaattcatgcctcccagatccaaaaggtggaaccagcaggtagatctaggttcaccccggagctccagcctaaggcctctcaaagccgcaagaggtctttagctaccatggattcaccaccacatcaaaaacagccccaaagaggggaagtctcccagaagacagtgattatcaaggaagaggaagaagatactgcagagaagccagggaaggaagaggatgtcgtgactccaaaaccaggcaagagaaagagagaccaggcagaggaggagcccaacagaataccaagccgcagcctccgacggaccaaacttaaccaagaatcaacagcccccaaagtgctcttcacaggagtggtggatgctcggggagagcgggctgtgctggcactggggggaagtctggctggttcagcggcagaggcttcccacctggtcactgatcgcatccgccggacagtcaagttcctgtgtgccctggggcggggaatccccattctgtccctggactggctgcatcagtcccgcaaggctggtttcttcttacccccggatgaatatgtggtgaccgaccctgagcaagagaagaactttggctttagccttcaagacgcactgagcagggctcgggagcgaaggctgctagagggctatgagatctatgtgacccctggagtccagccaccaccacctcagatgggagagattattagctgctgtggaggcacatacctacccagcatgcctcggtcctataagcctcagagagttgtgatcacatgccctcaggacttccctcattgctccattccactacgggttgggctgcccctcctctcgcctgagttcctgctgactggagtgctgaagcaggaagccaagccagaggcctttgtcctctcccctttggagatgtcatccacctgagaactccactacccttttccctcccagaccacgaattagaagatatgtggaagaaagaactcagggcgttagaaaggattggggtatattgatacaacttgtcctggaacatgggtgggaccagaaatctttatgaataaatgaaaagataagggatttggaagccacaggttgttttttgtttgtttgtttgtttttttaatggccattttattttatttgtatttatagttttttatttgtatagatttaggggatacaagatttcttacatgcatgtattaaatggccattttaaaattagctagtttcatgctcagatgtcataagtggcagctatctttagccagactgttgcagttattgctcgatgccactcatggtgtcctacctcctatttggaaaccatctctatttttttcttactgagattcttactttggggtcaggaacttgaagggatgcttggagtgagtagatttgagggtccagttatggagtgctactaaaacattttcttctctcctggcctctggaagcatctttagctttgactttgggcaagtctctgtacttttctggccagcttttccaggatttataaaattagagcttcggcttgacctctgtgataaataaatattcactctgtgcctt

SEQ ID NO: 17494 - DNA, 5648 bp, Homo sapiens
  source 1..5648: mol_type = unassigned DNA
ccacggctccccgggagccatcttggttcccccagaaggcgggaggggcgtaccttgggtgcgactgggcggaggtgacttggaagttcgcttctcggactgtaatactcatccttacctggcgccccgctccgagtttagatcatggaggacacccaggctattgactgggatgttgaagaagaggaggagacagagcaatccagtgaatccttgaggtgtaacgtggagccagtagggcggctacatatctttagtggtgcccatggaccagaaaaagatttcccactacacctcgggaagaatgtggtaggccgaatgcctgactgctctgtggccctgccctttccatctatctccaaacaacatgcagagattgaaatcttagcctgggacaaggcacctatcctccgagactgtgggagccttaatgtaccatcgcctggatgtctctctgccctttgtctcccggggccctctgacagtagaagagacacccagagtacagggagaaactcaaccccagaggcttctgttggctgaggactcggaggaggaagtagattttctttctgaaaggcgtatggtaaaaaaatcaaggaccacatcttcctctgtgatagttccagagagtgatgaagaggggcattccccggtcctgggcggccttgggccgccttttgccttcaatttgaacagtgacacagatgtggaagaaggtcagcaaccagccacagaggaggcctcctcagctgccagaagaggtgccactgtagaggcaaagcagtctgaagctgaagttgtaactgaaatccagcttgaaaaggatcagcctttagtgaaggagagggacaatgatacaaaagtcaagaggggtgcagggaatggggtggttccagctggggtgattctggagaggagccaacctcctggagaggacagtgacacagatgtggatgatgacagcaggcctcctggaaggccagctgaggtccatttggaaagggctcagccttttggcttcatcgacagcgacactgatgcggaagaagagaggatcccagcaaccccagttgtcattcctatgaagaagaggaagatcttccatggagtaggtacaaggggtcctggagcaccaggcctggcccatctgcaggagagccaggctggtagtgatacagatgtggaagaaggcaaggccccacaggctgtccctctggagaaaagccaagcttccatggttatcaacagcgatacagatgacgaggaagaagtctcagcagcgctgactttggcacatctgaaagagagccagcctgctatatggaacagagatgcagaagaggacatgccccaacgtgtggtccttctgcagcgaagccaaaccaccactgagagagacagtgacacagacgtggaggaggaagagctcccagtggaaaatagagaagctgtcctcaaggatcacacaaagattagagcccttgttagagcacattcagaaaaggaccaacctccttttggggacagtgatgacagtgtggaagcagataagagctcacctgggatccacctggagagaagccaagcctccaccacagtggacatcaacacacaagtggagaaggaagtcccgccagggtcagccattatacatataaagaagcatcaggtgtctgtggaggggacaaatcaaacagatgtgaaagcagttgggggaccagcaaagctgcttgtggtatctctagaggaagcctggcctctgcatggggactgtgaaacagatgcagaggagggcacctccctaacagcctcagtagttgcagatgtaagaaagagccagcttccagcagaaggggatgctggggcagagtgggctgcagctgttcttaagcaggagagagctcatgaggtgggggcccagggtgggccacctgtggcacaagtggagcaggacctccctatctcaagagagaacctcacagatctggtggtggacacagacactctaggggaatccacccagccacagagagagggagcccaggtccccacaggaagggagagagaacaacatgtgggtgggaccaaggactctgaagacaactatggtgattctgaagatctggacctacaagctacccagtgctttctggagaatcagggcctggaagtccagagcatggaggatgaacctacccaggccttcatgttgactccaccccaagagcttggcccttcccattgcagcttccagacaacaggcctcctgaattgcaagatgccacctgctgagaaggcttccaggatcagagctgctgagaaggtttccaggggcgatcaggaatctccagatgcttgtctgcctcctacagtacctgaagccccagccccaccccaaaagccccttaactctcagagccagaaacatcttgcacctccgccccttctttctccccttttaccttctatcaagccaaccgttcgtaagaccaggcaagatgggagtcaggaagctccagaggctcccttgtcctcagagctggagcctttccacccaaagcctaaaattagaactcggaagtcctccagaatgacaccctttccagctacctctgctgcccctgagccccacccttccacctccacagcccagccagtcactcccaagcccacatctcaggccactaggagcaggacaaataggtcctctgtcaagacccctgaaccagttgtccccacagcccctgagctccagccttccacctccacagaccagcctgtcacctctgagcccacatctcaggttactaggggaagaaaaagtagatcctctgtcaagacccctgaaacagttgtgcccacagcccttgagctccagccttccacctccaccgaccgacctgtcacctctgaacccacctctcaggctactaggggaagaaaaaatagatcctctgtcaagacccctgaaccagttgtccccacagcccctgagctccagccttccacctccacagaccagcctgtcacttctgagcccacatatcaggctactaggggaagaaaaaatagatcctctgtcaagacccctgaaccagttgtgcccacagcccctgagctccggccttccacctccacagaccgacctgtcacccctaagcccacatctcggaccactaggagcaggacaaatatgtcctctgtgaagaaccctgaatcaactgtccctatagcccctgagctcccaccttccacctccacagagcagcctgtcacccctgagcccacatctcgggctactaggggaagaaaaaatagatcctctggcaagacccctgaaacacttgtccccacagcccctaagctcgagccttccacttccacagaccaacctgtcactcctgagcccacatctcaggccaccaggggcaggacaaataggtcctctgtgaagacccctgaaacagttgtccccacagcccctgagctccagccttccacctccacagaccagcctgttacccctgagcctacgtctcaggctactaggggaagaacagatagatcctctgtcaagactcctgaaacagttgtccccacagcccctgagctacaggcttccgcctccacagaccagcctgtcacctctgagcccacatctcggaccactaggggaagaaaaaatcggtcctctgtcaagacccctgaaacagttgtgcccgcagcccctgagctccagccttccacctccacagaccaacctgtcacccctgagcccacatctcgggccactaggggcaggacaaataggtcctctgtcaagacccctgaatcaattgtccctatagcccctgagcttcagccttccacctccagaaaccagcttgtcacccctgagcccacatctcgggccactaggtgcaggacaaataggtcctctgtcaagacccctgagccagttgtccccacagcccctgagccccatcctaccacctccacagaccagcctgtcacccccaagctcacatctagggccactaggagaaagacaaataggtcctctgtcaagactcccaaaccagttgaaccagcagcgtctgatcttgagccttttacccccacagaccagtccgtcacccctgaggccatagctcagggtggtcagagcaaaacactgaggtcttccacagtaagagctatgccggttcctaccacccctgaattccaatctcctgtcaccacagaccagcctatttcccctgagcctattactcaacccagttgcatcaagaggcagagagccgctgggaaccctggctccctcgcagctcccattgaccataagccttgctctgcacccttggaacctaaatcccaggcctcaaggaaccaaagatggggagcagtgagagcagctgaatcccttacagccattcctgagcctgcctctccccagcttcttgagacaccaattcatgcctcccagatccaaaaggtggaaccagcaggtagatctaggttcaccccggagctccagcctaaggcctctcaaagccgcaagaggtctttagctaccatggattcaccaccacatcaaaaacagccccaaagaggggaagtctcccagaagacagtgattatcaaggaagaggaagaagatactgcagagaagccagggaaggaagaggatgtcgtgactccaaaaccaggcaagagaaagagagaccaggcagaggaggagcccaacagaataccaagccgcagcctccgacggaccaaacttaaccaagaatcaacagcccccaaagtgctcttcacaggagtggtggatgctcggggagagcgggctgtgctggcactggggggaagtctggctggttcagcggcagaggcttcccacctggtcactgatcgcatccgccggacagtcaagttcctgtgtgccctggggcggggaatccccattctgtccctggactggctgcatcagtcccgcaaggctggtttcttcttacccccggatgaatatgtggtgaccgaccctgagcaagagaagaactttggctttagccttcaagacgcactgagcagggctcgggagcgaaggctgctagagggctatgagatctatgtgacccctggagtccagccaccaccacctcagatgggagagattattagctgctgtggaggcacatacctacccagcatgcctcggtcctataagcctcagagagttgtgatcacatgccctcaggacttccctcattgctccattccactacgggttgggctgcccctcctctcgcctgagttcctgctgactggagtgctgaagcaggaagccaagccagaggcctttgtcctctcccctttggagatgtcatccacctgagaactccactacccttttccctcccagaccacgaattagaagatatgtggaagaaagaactcagggcgttagaaaggattggggtatattgatacaacttgtcctggaacatgggtgggaccagaaatctttatgaataaatgaaaagataagggatttggaagccacaggttgttttttgtttgtttgtttgtttttttaatggccattttattttatttgtatttatagttttttatttgtatagatt

SEQ ID NO: 17495 - DNA, 5648 bp, Homo sapiens
  source 1..5648: mol_type = unassigned DNA
ccacggctccccgggagccatcttggttcccccagaaggcgggaggggcgtaccttgggtgcgactgggcggaggtgacttggaagttcgcttctcggactgtaatactcatccttacctggcgccccgctccgagtttagatcatggaggacacccaggctattgactgggatgttgaagaagaggaggagacagagcaatccagtgaatccttgaggtgtaacgtggagccagtagggcggctacatatctttagtggtgcccatggaccagaaaaagatttcccactacacctcgggaagaatgtggtaggccgaatgcctgactgctctgtggccctgccctttccatctatctccaaacaacatgcagagattgaaatcttagcctgggacaaggcacctatcctccgagactgtgggagccttaatgtaccatcgcctggatgtctctctgccctttgtctcccggggccctctgacagtagaagagacacccagagtacagggagaaactcaaccccagaggcttctgttggctgaggactcggaggaggaagtagattttctttctgaaaggcgtatggtaaaaaaatcaaggaccacatcttcctctgtgatagttccagagagtgatgaagaggggcattccccggtcctgggcggccttgggccgccttttgccttcaatttgaacagtgacacagatgtggaagaaggtcagcaaccagccacagaggaggcctcctcagctgccagaagaggtgccactgtagaggcaaagcagtctgaagctgaagttgtaactgaaatccagcttgaaaaggatcagcctttagtgaaggagagggacaatgatacaaaagtcaagaggggtgcagggaatggggtggttccagctggggtgattctggagaggagccaacctcctggagaggacagtgacacagatgtggatgatgacagcaggcctcctggaaggccagctgaggtccatttggaaagggctcagccttttggcttcatcgacagcgacactgatgcggaagaagagaggatcccagcaaccccagttgtcattcctatgaagaagaggaagatcttccatggagtaggtacaaggggtcctggagcaccaggcctggcccatctgcaggagagccaggctggtagtgatacagatgtggaagaaggcaaggccccacaggctgtccctctggagaaaagccaagcttccatggttatcaacagcgatacagatgacgaggaagaagtctcagcagcgctgactttggcacatctgaaagagagccagcctgctatatggaacagagatgcagaagaggacatgccccaacgtgtggtccttctgcagcgaagccaaaccaccactgagagagacagtgacacagacgtggaggaggaagagctcccagtggaaaatagagaagctgtcctcaaggatcacacaaagattagagcccttgttagagcacattcagaaaaggaccaacctccttttggggacagtgatgacagtgtggaagcagataagagctcacctgggatccacctggagagaagccaagcctccaccacagtggacatcaacacacaagtggagaaggaagtcccgccagggtcagccattatacatataaagaagcatcaggtgtctgtggaggggacaaatcaaacagatgtgaaagcagttgggggaccagcaaagctgcttgtggtatctctagaggaagcctggcctctgcatggggactgtgaaacagatgcagaggagggcacctccctaacagcctcagtagttgcagatgtaagaaagagccagcttccagcagaaggggatgctggggcagagtgggctgcagctgttcttaagcaggagagagctcatgaggtgggggcccagggtgggccacctgtggcacaagtggagcaggacctccctatctcaagagagaacctcacagatctggtggtggacacagacactctaggggaatccacccagccacagagagagggagcccaggtccccacaggaagggagagagaacaacatgtgggtgggaccaaggactctgaagacaactatggtgattctgaagatctggacctacaagctacccagtgctttctggagaatcagggcctggaagtccagagcatggaggatgaacctacccaggccttcatgttgactccaccccaagagcttggcccttcccattgcagcttccagacaacaggcctcctgaattgcaagatgccacctgctgagaaggcttccaggatcagagctgctgagaaggtttccaggggcgatcaggaatctccagatgcttgtctgcctcctacagtacctgaagccccagccccaccccaaaagccccttaactctcagagccagaaacatcttgcacctccgccccttctttctccccttttaccttctatcaagccaaccgttcgtaagaccaggcaagatgggagtcaggaagctccagaggctcccttgtcctcagagctggagcctttccacccaaagcctaaaattagaactcggaagtcctccagaatgacaccctttccagctacctctgctgcccctgagccccacccttccacctccacagcccagccagtcactcccaagcccacatctcaggccactaggagcaggacaaataggtcctctgtcaagacccctgaaccagttgtccccacagcccctgagctccagccttccacctccacagaccagcctgtcacctctgagcccacatctcaggttactaggggaagaaaaagtagatcctctgtcaagacccctgaaacagttgtgcccacagcccttgagctccagccttccacctccaccgaccgacctgtcacctctgaacccacctctcaggctactaggggaagaaaaaatagatcctctgtcaagacccctgaaccagttgtccccacagcccctgagctccagccttccacctccacagaccagcctgtcacttctgagcccacatatcaggctactaggggaagaaaaaatagatcctctgtcaagacccctgaaccagttgtgcccacagcccctgagctccggccttccacctccacagaccgacctgtcacccctaagcccacatctcggaccactaggagcaggacaaatatgtcctctgtgaagaaccctgaatcaactgtccctatagcccctgagctcccaccttccacctccacagagcagcctgtcacccctgagcccacatctcgggctactaggggaagaaaaaatagatcctctggcaagacccctgaaacacttgtccccacagcccctaagctcgagccttccacttccacagaccaacctgtcactcctgagcccacatctcaggccaccaggggcaggacaaataggtcctctgtgaagacccctgaaacagttgtccccacagcccctgagctccagccttccacctccacagaccagcctgttacccctgagcctacgtctcaggctactaggggaagaacagatagatcctctgtcaagactcctgaaacagttgtccccacagcccctgagctacaggcttccgcctccacagaccagcctgtcacctctgagcccacatctcggaccactaggggaagaaaaaatcggtcctctgtcaagacccctgaaacagttgtgcccgcagcccctgcgctccagccttccacctccacagaccaacctgtcacccctgagcccacatctcgggccactaggggcaggacaaataggtcctctgtcaagacccctgaatcaattgtccctatagcccctgagcttcagccttccacctccagaaaccagcttgtcacccctgagcccacatctcgggccactaggtgcaggacaaataggtcctctgtcaagacccctgagccagttgtccccacagcccctgagccccatcctaccacctccacagaccagcctgtcacccccaagctcacatctagggccactaggagaaagacaaataggtcctctgtcaagactcccaaaccagttgaaccagcagcctctgatcttgagccttttacccccacagaccagtccgtcacccctgaggccatagctcagggtggtcagagcaaaacactgaggtcttccacagtaagagctatgccggttcctaccacccctgaattccaatctcctgtcaccacagaccagcctatttcccctgagcctattactcaacccagttgcatcaagaggcagagagccgctgggaaccctggctccctcgcagctcccattgaccataagccttgctctgcacccttggaacctaaatcccaggcctcaaggaaccaaagatggggagcagtgagagcagctgaatcccttacagccattcctgagcctgcctctccccagcttcttgagacaccaattcatgcctcccagatccaaaaggtggaaccagcaggtagatctaggttcaccccggagctccagcctaaggcctctcaaagccgcaagaggtctttagctaccatggattcaccaccacatcaaaaacagccccaaagaggggaagtctcccagaagacagtgattatcaaggaagaggaagaagatactgcagagaagccagggaaggaagaggatgtcgtgactccaaaaccaggcaagagaaagagagaccaggcagaggaggagcccaacagaataccaagccgcagcctccgacggaccaaacttaaccaagaatcaacagcccccaaagtgctcttcacaggagtggtggatgctcggggagagcgggctgtgctggcactggggggaagtctggctggttcagcggcagaggcttcccacctggtcactgatcgcatccgccggacagtcaagttcctgtgtgccctggggcggggaatccccattctgtccctggactggctgcatcagtcccgcaaggctggtttcttcttacccccggatgaatatgtggtgaccgaccctgagcaagagaagaactttggctttagccttcaagacgcactgagcagggctcgggagcgaaggctgctagagggctatgagatctatgtgacccctggagtccagccaccaccacctcagatgggagagattattagctgctgtggaggcacatacctacccagcatgcctcggtcctataagcctcagagagttgtgatcacatgccctcaggacttccctcattgctccattccactacgggttgggctgcccctcctctcgcctgagttcctgctgactggagtgctgaagcaggaagccaagccagaggcctttgtcctctcccctttggagatgtcatccacctgagaactccactacccttttccctcccagaccacgaattagaagatatgtggaagaaagaactcagggcgttagaaaggattggggtatattgatacaacttgtcctggaacatgggtgggaccagaaatctttatgaataaatgaaaagataagggatttggaagccacaggttgttttttgtttgtttgtttgtttttttaatggccattttattttatttgtatttatagttttttatttgtatagatt

SEQ ID NO: 17496 - DNA, 850 bp, Homo sapiens
  source 1..850: mol_type = unassigned DNA
gaccgttactggtggcgcgcgcggggacttaaagtagatcatggaggacacccaggctattgactgggatgttgaagaagaggaggagacagagcaatccagtgaatccttgaggtgtaacgtggagccagtagggcggctacatatctttagtggtgcccatggaccagaaaaagatttcccactacacctcgggaagaatgtggtaggccgaatgcctgactgctctgtggccctgccctttccatctatctccaaacaacatgcagagattgaaatcttagcctgggacaaggcacctatcctccgagactgtgggagccttaatggtactcaaatcctgagctccagccttccacctccacagaccagcctgttacccctgagcctacgtctcaggctactaggggaagaacagatagatcctctgtcaagactcctgaaacagttgtccccacagcccctgagctacaggcttccgcctccacagaccagcctgtcacctctgagcccacatctcggaccactaggggaagaaaaaatcggtcctctgtcaagacccctgaaacagttgtgcccgcagcccctgagctccagccttccacctccacagaccaacctgtcacccctgagcccacatctcgggccactaggggcaggacaaataggtcctctgtcaagacccctgaatcaattgtccctatagcccctgagcttcagccttccacctccagaaaccagcttgtcacccctgagcccacatctcgggccactaggtgcaggacaaataggtcctctgtcaagacccctgagccagttgtccccacagcccctgagccccatcctacca

SEQ ID NO: 17497 - DNA, 850 bp, Homo sapiens; identical to SEQ ID NO: 17496
  source 1..850: mol_type = unassigned DNA

SEQ ID NO: 17498 - DNA, 3751 bp, Homo sapiens; identical to SEQ ID NO: 17487
  source 1..3751: mol_type = unassigned DNA

SEQ ID NO: 17499 - DNA, 5648 bp, Homo sapiens; identical to SEQ ID NO: 17494
  source 1..5648: mol_type = unassigned DNA

SEQ ID NO: 17500 - DNA, 6575 bp, Homo sapiens; identical to SEQ ID NO: 17493
  source 1..6575: mol_type = unassigned DNA

SEQ ID NO: 17501 - DNA, 5648 bp, Homo sapiens; identical to SEQ ID NO: 17454
  source 1..5648: mol_type = unassigned DNA

SEQ ID NO: 17502 - DNA, 5648 bp, Homo sapiens; identical to SEQ ID NO: 17454
  source 1..5648: mol_type = unassigned DNA

SEQ ID NO: 17503 - DNA, 1172 bp, Homo sapiens; identical to SEQ ID NO: 17483
  source 1..1172: mol_type = unassigned DNA

SEQ ID NO: 17504 - DNA, 6506 bp, Homo sapiens
  source 1..6506: mol_type = unassigned DNA
caccatgtctaggaggaccgaggaaaggcgctctggccttaccagacacgtcggacgtctatgacacagcccctctatccgttgccggcagctggcgccagactctctggtcgcggtttggaactgcgcgggaagtgggtggtgggcgggcaagcggtagtgggttgtcccttggagctgcccaatcgacgtgcattattctgttggcgcacggcggccttcaattaccgtctcattaactgatctcagcagcctgggagacaccacctatttgaactctaagggggcggggctttgggtgtgcctccgctcgactggctgcggttgtgaaagacagcggcagaagccaatcagcaaataagctctttttcggcacacgcagtcgctccacccgggtcgcgaccgttactggtggcgcgcgcggggacttaaagtagatcatggaggacacccaggctattgactgggatgttgaagaagaggaggagacagagcaatccagtgaatccttgaggtgtaacgtggagccagtagggcggctacatatctttagtggtgcccatggaccagaaaaagatttcccactacacctcgggaagaatgtggtaggccgaatgcctgactgctctgtggccctgccctttccatctatctccaaacaacatgcagagattgaaatcttagcctgggacaaggcacctatcctccgagactgtgggagccttaatggtactcaaatcctgagacctcctaaggttttgagccctggggtgagtcaccgtctgagggaccaggaattgattctctttgctgacttgctctgccagtaccatcgcctggatgtctctctgccctttgtctcccggggccctctgacagtagaagagacacccagagtacagggagaaactcaaccccagaggcttctgttggctgaggactcggaggaggaagtagattttctttctgaaaggcgtatggtaaaaaaatcaaggaccacatcttcctctgtgatagttccagagagtgatgaagaggggcattccccggtcctgggcggccttgggccgccttttgccttcaatttgaacagtgacacagatgtggaagaaggtcagcaaccagccacagaggaggcctcctcagctgccagaagaggtgccactgtagaggcaaagcagtctgaagctgaagttgtaactgaaatccagcttgaaaaggatcagcctttagtgaaggagagggacaatgatacaaaagtcaagaggggtgcagggaatggggtggttccagctggggtgattctggagaggagccaacctcctggagaggacagtgacacagatgtggatgatgacagcaggcctcctggaaggccagctgaggtccatttggaaagggctcagccttttggcttcatcgacagcgacactgatgcggaagaagagaggatcccagcaaccccagttgtcattcctatgaagaagaggaagatcttccatggagtaggtacaaggggtcctggagcaccaggcctggcccatctgcaggagagccaggctggtagtgatacagatgtggaagaaggcaaggccccacaggctgtccctctggagaaaagccaagcttccatggttatcaacagcgatacagatgacgaggaagaagtctcagcagcgctgactttggcacatctgaaagagagccagcctgctatatggaacagagatgcagaagaggacatgccccaacgtgtggtccttctgcagcgaagccaaaccaccactgagagagacagtgacacagacgtggaggaggaagagctcccagtggaaaatagagaagctgtcctcaaggatcacacaaagattagagcccttgttagagcacattcagaaaaggaccaacctccttttggggacagtgatgacagtgtggaagcagataagagctcacctgggatccacctggagagaagccaagcctccaccacagtggacatcaacacacaagtggagaaggaagtcccgccagggtcagccattatacatataaagaagcatcaggtgtctgtggaggggacaaatcaaacagatgtgaaagcagttgggggaccagcaaagctgcttgtggtatctctagaggaagcctggcctctgcatggggactgtgaaacagatgcagaggagggcacctccctaacagcctcagtagttgcagatgtaagaaagagccagcttccagcagaaggggatgctggggcagagtgggctgcagctgttcttaagcaggagagagctcatgaggtgggggcccagggtgggccacctgtggcacaagtggagcaggacctccctatctcaagagagaacctcacagatctggtggtggacacagacactctaggggaatccacccagccacagagagagggagcccaggtccccacaggaagggagagagaacaacatgtgggtgggaccaaggactctgaagacaactatggtgattctgaagatctggacctacaagctacccagtgctttctggagaatcagggcctggaagcagtccagagcatggaggatgaacctacccaggccttcatgttgactccaccccaagagcttggcccttcccattgcagcttccagacaacaggtaccctagatgaaccatgggaggtcctggctacacagccattctgtctgagagagtctgaggactctgagacccagccttttgacacgcaccttgaggcctatggaccttgcctgtctccacctagggcaataccaggagaccaacatccagagagcccagttcacacagagccaatggggattcaaggcagagggaggcagactgtggataaagtcatgggtataccaaaagaaacagcagagagggtgggccctgagagagggccattggagagagaaactgagaaactgctaccagaaagacagacagatgtgacaggagaggaagaattaaccaaggggaaacaggacagagaacaaaaacagttgttagctagagacacccagagacaagaatctgacaaaaatggggaaagtgcaagtcctgaaagagatagggagagtttgaaggtagaaattgagacatctgaggaaatacaagagaaacaagtacagaagcagacccttccaagcaaagcatttgagagagaagtagagagaccagtagcaaacagagagtgcgatccagccgagttagaagagaaggtgcccaaagtgatcctggagagagatacacagagaggggagccagagggagggagccaggaccagaaagggcaggcctccagcccaacaccagagcctggggtgggggcgggggaccttccgggacctacctcagcccccgtaccttctgggagccagtcaggtggaaggggatccccagtgagccccaggaggcatcagaaaggcctcctgaattgcaagatgccacctgctgagaaggcttccaggatcagagctgctgagaaggtttccaggggcgatcaggaatctccagatgcttgtctgcctcctacagtacctgaagccccagccccaccccaaaagccccttaactctcagagccagaaacatcttgcacctccgccccttctttctccccttttaccttctatcaagccaaccgttcgtaagaccaggcaagatgggagtcaggaagctccagaggctcccttgtcctcagagctggagcctttccacccaaagcctaaaattagaactcggaagtcctccagaatgacaccctttccagctacctctgctgcccctaagctcgagccttccacttccacagaccaacctgtcactcctgagcccacatctcaggccaccaggggcaggacaaataggtcctctgtgaagacccctgaaacagttgtccccacagcccctgagctccagccttccacctccacagaccagcctgttacccctgagcctacgtctcaggctactaggggaagaacagatagatcctctgtcaagactcctgaaacagttgtccccacagcccctgagctacaggcttccgcctccacagaccagcctgtcacctctgagcccacatctcggaccactaggggaagaaaaaatcggtcctctgtcaagacccctgaaacagttgtgcccgcagcccctgagctccagccttccacctccacagaccaacctgtcacccctgagcccacatctcgggccactaggggcaggacaaataggtcctctgtcaagacccctgaatcaattgtccctatagcccctgagcttcagccttccacctccagaaaccagcttgtcacccctgagcccacatctcgggccactaggtgcaggacaaataggtcctctgtcaagacccctgagccagttgtccccacagcccctgagccccatcctaccacctccacagaccagcctgtcacccccaagctcacatctagggccactaggagaaagacaaataggtcctctgtcaagactcccaaaccagttgaaccagcagcgtctgatcttgagccttttacccccacagaccagtccgtcacccctgaggccatagctcagggtggtcagagcaaaacactgaggtcttccacagtaagagctatgccggttcctaccacccctgaattccaatctcctgtcaccacagaccagcctatttcccctgagcctattactcaacccagttgcatcaagaggcagagagccgctgggaaccctggctccctcgcagctcccattgaccataagccttgctctgcacccttggaacctaaatcccaggcctcaaggaaccaaagatggggagcagtgagagcagctgaatcccttacagccattcctgagcctgcctctccccagcttcttgagacaccaattcatgcctcccagatccaaaaggtggaaccagcaggtagatctaggttcaccccggagctccagcctaaggcctctcaaagccgcaagaggtctttagctaccatggattcaccaccacatcaaaaacagccccaaagaggggaagtctcccagaagacagtgattatcaaggaagaggaagaagatactgcagagaagccagggaaggaagaggatgtcgtgactccaaaaccaggcaagagaaagagagaccaggcagaggaggagcccaacagaataccaagccgcagcctccgacggaccaaacttaaccaagaatcaacagcccccaaagtgctcttcacaggagtggtggatgctcggggagagcgggctgtgctggcactggggggaagtctggctggttcagcggcagaggcttcccacctggtcactgatcgcatccgccggacagtcaagttcctgtgtgccctggggcggggaatccccattctgtccctggactggctgcatcagtcccgcaaggctggtttcttcttacccccggatgaatatgtggtgaccgaccctgagcaagagaagaactttggctttagccttcaagacgcactgagcagggctcgggagcgaaggctgctagagggctatgagatctatgtgacccctggagtccagccaccaccacctcagatgggagagattattagctgctgtggaggcacatacctacccagcatgcctcggtcctataagcctcagagagttgtgatcacatgccctcaggacttccctcattgctccattccactacgggttgggctgcccctcctctcgcctgagttcctgctgactggagtgctgaagcaggaagccaagccagaggcctttgtcctctcccctttggagatgtcatccacctgagaactccactacccttttccctcccagaccacgaattagaagatatgtggaagaaagaactcagggcgttagaaaggattggggtatattgatacaacttgtcctggaacatgggtgggaccagaaatctttatgaataaatgaaaagataagggatttggaagccacaggttgttttttgtttgtttgtttgtttttttaatggccattttattttatttgtatttatagttttttatttgtatagatttaggggatacaagatttcttacatgcatgtattaaatggccattttaaaattagctagtttcatgctcagatgtcataagtggcagctatctttagccagactgttgcagttattgctcgatgccactcatggtgtcctacctcctatttggaaaccatctctatttttttcttactgagattcttactttggggtcaggaacttgaagggatgcttggagtgagtagatttgagggtccagttatggagtgctactaaaacattttcttctctcctggcctctggaagcatctttagctttgactttgggcaagtctctgtacttttctggccagcttttccaggatttataaaattagagcttcggcttgacctctgtgataaataaatattcactctgtgcctt

SEQ ID NO: 17505 - DNA, 5648 bp, Homo sapiens; identical to SEQ ID NO: 17454
  source 1..5648: mol_type = unassigned DNA

SEQ ID NO: 17506 - DNA, 6506 bp, Homo sapiens; identical to SEQ ID NO: 17504
  source 1..6506: mol_type = unassigned DNA

SEQ ID NO: 17507 - DNA, 850 bp, Homo sapiens
  source 1..850: mol_type = unassigned DNA
gaccgttactggtggcgcgcgcggggacttaaagtagatcatggaggacacccaggctattgactgggatgttgaagaagaggaggagacagagcaatccagtgaatccttgaggtgtaacgtggagccagtagggcggctacatatctttagtggtgcccatggaccagaaaaagatttcccactacacctcgggaagaatgtggtaggccgaatgcctgactgctctgtggccctgccctttccatctatctccaaacaacatgcagagattgaaatcttagcctgggacaaggcacctatcctccgagactgtgggagccttaatggtactcaaatcctgagctccagccttccacctccacagaccagcctgttacccctgagcctacgtctcaggctactaggggaagaacagatagatcctctgtcaagactcctgaaacagttgtccccacagcccctgagctacaggcttccgcctccacagaccagcctgtcacctctgagcccacatctcggaccactaggggaagaaaaaatcggtcctctgtcaagacccctgaaacagttgtgcccgcagcccctgcgctccagccttccacctccacagaccaacctgtcacccctgagcccacatctcgggccactaggggcaggacaaataggtcctctgtcaagacccctgaatcaattgtccctatagcccctgagcttcagccttccacctccagaaaccagcttgtcacccctgagcccacatctcgggccactaggtgcaggacaaataggtcctctgtcaagacccctgagccagttgtccccacagcccctgagccccatcctacca

SEQ ID NO: 17508 - DNA, 850 bp, Homo sapiens; identical to SEQ ID NO: 17496
  source 1..850: mol_type = unassigned DNA

SEQ ID NO: 17509 - DNA, 3751 bp, Homo sapiens
  source 1..3751: mol_type = unassigned DNA
caccatgtctaggaggaccgaggaaaggcgctctggccttaccagacacgtcggacgtctatgacacagcccctctatccgttgccggcagctggcgccagactctctggtcgcggtttggaactgcgcgggaagtgggtggtgggcgggcaagcggtagtgggttgtcccttggagctgcccaatcgacgtgcattattctgttggcgcacggcggccttcaattaccgtctcattaactgatctcagcagcctgggagacaccacctatttgaactctaagggggcggggctttgggtgtgcctccgctcgactggctgcggttgtgaaagacagcggcagaagccaatcagcaaataagctctttttcggcacacgcagtcgctccacccgggtcgcgaccgttactggtggcgcgcgcggggacttaaagtagatcatggaggacacccaggctattgactgggatgttgaagaagaggaggagacagagcaatccagtgaatccttgaggtgtaacgtggagccagtagggcggctacatatctttagtggtgcccatggaccagaaaaagatttcccactacacctcgggaagaatgtggtaggccgaatgcctgactgctctgtggccctgccctttccatctatctccaaacaacatgcagagattgaaatcttagcctgggacaaggcacctatcctccgagactgtgggagccttaatggtactcaaatcctgagacctcctaaggttttgagccctggggtgagtcaccgtctgagggaccaggaattgattctctttgctgacttgctctgccagtaccatcgcctggatgtctctctgccctttgtctcccggggccctctgacagtagaagagacacccagagtacagggagaaactcaaccccagaggcttctgttggctgaggactcggaggaggaagtagattttctttctgaaaggcgtatggtaaaaaaatcaaggaccacatcttcctctgtgatagttccagagagtgatgaagaggggcattccccggtcctgggcggccttgggccgccttttgccttcaatttgaacagtgacacagatgtggaagaaggtcagcaaccagccacagaggaggcctcctcagctgccagaagaggtgccactgtagaggcaaagcagtctgaagctgaagttgtaactgaaatccagcttgaaaaggatcagcctttagtgaaggagagggacaatgatacaaaagtcaagaggggtgcagggaatggggtggttccagctggggtgattctggagaggagccaacctcctggagaggacagtgacacagatgtggatgatgacagcaggcctcctggaaggccagctgaggtccatttggaaagggctcagccttttggcttcatcgacagaccaacctgtcacccctaagcccacatctcggaccactaggagcaggacaaatatgtcctctgtgaagaaccctgaatcaactgtccctatagcccctgagctcccaccttccacctccacagagcagcctgtcacccctgagcccacatctcgggctactaggggaagaaaaaatagatcctctggcaagacccctgaaacacttgtccccacagcccctaagctcgagccttccacttccacagaccaacctgtcactcctgagcccacatctcaggccaccaggggcaggacaaataggtcctctgtgaagacccctgaaacagttgtccccacagcccctgagctccagccttccacctccacagaccagcctgttacccctgagcctacgtctcaggctactaggggaagaacagatagatcctctgtcaagactcctgaaacagttgtccccacagcccctgagctacaggcttccgcctccacagaccagcctgtcacctctgagcccacatctcggaccactaggggaagaaaaaatcggtcctctgtcaagacccctgaaacagttgtgcccgcagcccctgcgctccagccttccacctccacagaccaacctgtcacccctgagcccacatctcgggccactaggggcaggacaaataggtcctctgtcaagacccctgaatcaattgtccctatagcccctgagcttcagccttccacctccagaaaccagcttgtcacccctgagcccacatctcgggccactaggtgcaggacaaataggtcctctgtcaagacccctgagccagttgtccccacagcccctgagccccatcctaccacctccacagaccagcctgtcacccccaagctcacatctagggccactaggagaaagacaaataggtcctctgtcaagactcccaaaccagttgaaccagcagcctctgatcttgagccttttacccccacagaccagtccgtcacccctgaggccatagctcagggtggtcagagcaaaacactgaggtcttccacagtaagagctatgccggttcctaccacccctgaattccaatctcctgtcaccacagaccagcctatttcccctgagcctattactcaacccagttgcatcaagaggcagagagccgctgggaaccctggctccctcgcagctcccattgaccataagccttgctctgcacccttggaacctaaatcccaggcctcaaggaaccaaagatggggagcagtgagagcagctgaatcccttacagccattcctgagcctgcctctccccagcttcttgagacaccaattcatgcctcccagatccaaaaggtggaaccagcaggtagatctaggttcaccccggagctccagcctaaggcctctcaaagccgcaagaggtctttagctaccatggattcaccaccacatcaaaaacagccccaaagaggggaagtctcccagaagacagtgattatcaaggaagaggaagaagatactgcagagaagccagggaaggaagaggatgtcgtgactccaaaaccaggcaagagaaagagagaccaggcagaggaggagcccaacagaataccaagccgcagcctccgacggaccaaacttaaccaagaatcaacagcccccaaagtgctcttcacaggagtggtggatgctcggggagagcgggctgtgctggcactggggggaagtctggctggttcagcggcagaggcttcccacctggtcactgatcgcatccgccggacagtcaagttcctgtgtgccctggggcggggaatccccattctgtccctggactggctgcatcagtcccgcaaggctggtttcttcttacccccggatgaatatgtggtgaccgaccctgagcaagagaagaactttggctttagccttcaagacgcactgagcagggctcgggagcgaaggctgctagagggctatgagatctatgtgacccctggagtccagccaccaccacctcagatgggagagattattagctgctgtggaggcacatacctacccagcatgcctcggtcctataagcctcagagagttgtgatcacatgccctcaggacttccctcattgctccattccactacgggttgggctgcccctcctctcgcctgagttcctgctgactggagtgctgaagcaggaagccaagccagaggcctttgtcctctcccctttggagatgtcatccacctgagaactccactacccttttccctcccagaccacgaattagaagatatgtggaagaaagaactcagggcgtt

SEQ ID NO: 17510 - DNA, 6575 bp, Homo sapiens; identical to SEQ ID NO: 17488
  source 1..6575: mol_type = unassigned DNA

SEQ ID NO: 17511 - DNA, 1172 bp, Homo sapiens; identical to SEQ ID NO: 17483
  source 1..1172: mol_type = unassigned DNA

SEQ ID NO: 17512 - DNA, 1172 bp, Homo sapiens; identical to SEQ ID NO: 17483
  source 1..1172: mol_type = unassigned DNA

SEQ ID NO: 17513 - DNA, 850 bp, Homo sapiens; identical to SEQ ID NO: 17496
  source 1..850: mol_type = unassigned DNA

SEQ ID NO: 17514 - DNA, 850 bp, Homo sapiens; identical to SEQ ID NO: 17496
  source 1..850: mol_type = unassigned DNA

SEQ ID NO: 17515 - DNA, 6575 bp, Homo sapiens; identical to SEQ ID NO: 17493
  source 1..6575: mol_type = unassigned DNA

SEQ ID NO: 17516 - DNA, 3751 bp, Homo sapiens; identical to SEQ ID NO: 17489
  source 1..3751: mol_type = unassigned DNA

SEQ ID NO: 17517 - DNA, 3499 bp, Homo sapiens
  source 1..3499: mol_type = unassigned DNA
gaagccagacagctggctcgagcctctcctgctcagcaccatggctaagacccctagtgaccatctgctgtccaccctggaggagctggtgccctatgacttcgagaagttcaagttcaagctgcagaacaccagtgtgcagaaggagcactccaggatcccccggagccagatccagagagccaggccggtgaagatggccactctgctggtcacctactatggggaagagtacgccgtgcagctcaccctgcaggtcctgcgggccatcaaccagcgcctgctggccgaggagctccacagggcagccattcaggaatattccacacaagaaaacggcacagatgattccgcagcgtccagctccctgggggagaacaagcccaggagcctgaagactccagaccaccccgaggggaacgaggggaacggccctcggccgtacgggggcggagctgccagcctgcggtgcagccagcccgaggccgggagggggctgtcgaggaagcccctgagcaaacgcagagagaaggcctcggagggcctggacgcgcagggcaagcctcggacccggagcccggccctgccgggcgggagaagccccggcccctgcagggcgctagaggggggccaggccgaggtccggctgcgcagaaacgccagctccgcggggaggctgcaggggctggcggggggcgccccggggcagaaggagtgcaggcccttcgaagtgtacctgccctcgggaaagatgcgacctagaagccttgaggtcaccatttctacaggggagaaggcgcccgcaaatccagaaattctcctgactctagaggaaaagacagctgcgaatctggactcggcaacagaaccccgggcaaggcccactccggatggaggggcatctgcggacctgaaggaaggccctggaaatccagaacattcggtcaccggaaggccaccagacacggctgcgagtccccgctgccacgcccaggaaggagacccagttgacggtacctgtgtgcgtgattcctgcagcttccccgaggcagtttctgggcacccccaggcctcaggcagccgctcacctggctgcccccggtgccaggactcccatgaaaggaagagcccgggaagcctaagcccccagcccctgccacagtgtaagcgccacctgaagcaggtccagctgctcttctgtgaggatcacgatgagcccatctgcctcatctgcagtctgagtcaggagcaccaaggccaccgggtgcgccccattgaggaggtcgccctggaacacaagaagaaaattcagaagcagctggagcatctgaagaagctgagaaaatcaggggaggagcagcgatcctatggggaggagaaggcagtgagctttctgaaacaaactgaagcgctgaagcagcgggtgcagaggaagctggagcaggtgtactacttcctggagcagcaagagcatttctttgtggcctcactggaggacgtgggccagatggttgggcagatcaggaaggcatatgacacccgcgtatcccaggacatcgccctgctcgatgcgctgattggggaactggaggccaaggagtgccagtcagaatgggaacttctgcaggacattggagacatcttgcacagggctaagacagtgcctgtccctgaaaagtggaccactcctcaagagataaaacaaaagatccaactcctccaccagaagtcagagtttgtggagaagagcacaaagtacttctcagaaaccctgcgttcagaaatggaaatgttcaatgttccggagctgattggcgctcaggcacatgctgttaatgtgattctggatgcagaaaccgcttaccccaacctcatcttctctgatgatctgaagagtgttagacttggaaacaagtgggagaggctgcctgatggcccgcaaagatttgacagctgtatcattgttctgggctctccgagtttcctctctggccgccgttactgggaggtggaggttggagacaagacagcatggatcctgggagcctgcaagacatccataagcaggaaagggaacatgactctgtcgccagagaatggctactgggtggtgataatgatgaaggaaaatgagtaccaggcgtccagcgttcccccgacccgcctgctaataaaggagcctcccaagcgtgtgggcatcttcgtggactacagagttggaagcatctccttttacaatgtgacagccagatcccacatctatacattcgccagctgctctttctctgggccccttcaacctatcttcagccctgggacacgtgatggagggaagaacacagctcctctgactatctgtccagtgggtggtcaggggcctgactgaatgcccaacactgcatctctcttcctgcttctggccttgtatcttgcattcacactcaatagtcacggaatgccgactaggtgctagctgctatgggaaatgcaaaaataacaaaatagttactgtgcccacggagcctacccgattatagcagaggtaagttaggaacgaacatgttagtcaatccgggtgaagacatgtactgatgacacaccatggatttcagaggaggaagtacggagtcgttgcataatccgcccctggtgggtggcactctcaggtgctcctgaacagaagatttggccctcattttccctcagaaccccacggcaaggatatatgtccccttgttctctctgcttctgtcttgaggatatgggaagcctagagaaacgcaagcagactggattgggatagaagtatttgtgtacctggattaatgaactatgattttttttttttttttttgagaccaaatcttgctctgtggcccaggctggagtgcagtggcacgatctcagctcactgcaacctccacctcccaggttcaagcgattctcctgcctcagcctcctgagcagctgggattacaggtgcgtgccaccacaccaggctggttttcttgtatttttagtagagacgggggtttcaccatgttagccaggctggtctcgaactcctgacctcaggtgatccacccgcctcagcctcccaaagtgctgggattacaggcatgagccactgtgcccggcctatgattcttttttttttttttttttgagacaaagttttgctcttgtcacccaggctggagtgcagtggtgcaatcttggctcgcaacctccgcctcccaggttcaagagattctcctgcctcagcctccgaagtagctgggattacaggcgcccgccaccatgcccggctaattttttgcatttttagtagacatgaggtttcatcatgttggccaggccggtctcaaactcctgacctcaggtgatgcacccacctcagcctcccaaagtgcagggattacaggcatgagccaccatgccgggccatgattcttaagagaattgactgggcctcatgaataaaaaaattagaaaatct

SEQ ID NO: 17518 - DNA, 2959 bp, Homo sapiens
  source 1..2959: mol_type = unassigned DNA
gaagccagacagctggctcgagcctctcctgctcagcaccatggctaagacccctagtgaccatctgctgtccaccctggaggagctggtgccctatgacttcgagaagttcaagttcaagctgcagaacaccagtgtgcagaaggagcactccaggatcccccggagccagatccagagagccaggccggtgaagatggccactctgctggtcacctactatggggaagagtacgccgtgcagctcaccctgcaggtcctgcgggccatcaaccagcgcctgctggccgaggagctccacagggcagccattcaggatatggggtcttgctatgttgcccaggttggtctcgaactcctgatctcaaacaatcctcccatctttgcctccgaaactgctgggattacaggaaggccaccagacacggctgcgagtccccgctgccacgcccaggaaggagacccagttgacggtacctgtgtgcgtgattcctgcagcttccccgaggcagtttctgggcacccccaggcctcaggcagccgctcacctggctgcccccggtgccaggactcccatgaaaggaagagcccgggaagcctaagcccccagcccctgccacagtgtaagcgccacctgaagcaggtccagctgctcttctgtgaggatcacgatgagcccatctgcctcatctgcagtctgagtcaggagcaccaaggccaccgggtgcgccccattgaggaggtcgccctggaacacaagaagaaaattcagaagcagctggagcatctgaagaagctgagaaaatcaggggaggagcagcgatcctatggggaggagaaggcagtgagctttctgaaacaaactgaagcgctgaagcagcgggtgcagaggaagctggagcaggtgtactacttcctggagcagcaagagcatttctttgtggcctcactggaggacgtgggccagatggttgggcagatcaggaaggcatatgacacccgcgtatcccaggacatcgccctgctcgatgcgctgattggggaactggaggccaaggagtgccagtcagaatgggaacttctgcaggacattggagacatcttgcacagggctaagacagtgcctgtccctgaaaagtggaccactcctcaagagataaaacaaaagatccaactcctccaccagaagtcagagtttgtggagaagagcacaaagtacttctcagaaaccctgcgttcagaaatggaaatgttcaatgttccggagctgattggcgctcaggcacatgctgttaatgtgattctggatgcagaaaccgcttaccccaacctcatcttctctgatgatctgaagagtgttagacttggaaacaagtgggagaggctgcctgatggcccgcaaagatttgacagctgtatcattgttctgggctctccgagtttcctctctggccgccgttactgggaggtggaggttggagacaagacagcatggatcctgggagcctgcaagacatccataagcaggaaagggaacatgactctgtcgccagagaatggctactgggtggtgataatgatgaaggaaaatgagtaccaggcgtccagcgttcccccgacccgcctgctaataaaggagcctcccaagcgtgtgggcatcttcgtggactacagagttggaagcatctccttttacaatgtgacagccagatcccacatctatacattcgccagctgctctttctctgggccccttcaacctatcttcagccctgggacacgtgatggagggaagaacacagctcctctgactatctgtccagtgggtggtcaggggcctgactgaatgcccaacactgcatctctcttcctgcttctggccttgtatcttgcattcacactcaatagtcacggaatgccgactaggtgctagctgctatgggaaatgcaaaaataacaaaatagttactgtgcccacggagcctacccgattatagcagaggtaagttaggaacgaacatgttagtcaatccgggtgaagacatgtactgatgacacaccatggatttcagaggaggaagtacggagtcgttgcataatccgcccctggtgggtggcactctcaggtgctcctgaacagaagatttggccctcattttccctcagaaccccacggcaaggatatatgtccccttgttctctctgcttctgtcttgaggatatgggaagcctagagaaacgcaagcagactggattgggatagaagtatttgtgtacctggattaatgaactatgattttttttttttttttttgagaccaaatcttgctctgtggcccaggctggagtgcagtggcacgatctcagctcactgcaacctccacctcccaggttcaagcgattctcctgcctcagcctcctgagcagctgggattacaggtgcgtgccaccacaccaggctggttttcttgtatttttagtagagacgggggtttcaccatgttagccaggctggtctcgaactcctgacctcaggtgatccacccgcctcagcctcccaaagtgctgggattacaggcatgagccactgtgcccggcctatgattcttttttttttttttttttgagacaaagttttgctcttgtcacccaggctggagtgcagtggtgcaatcttggctcgcaacctccgcctcccaggttcaagagattctcctgcctcagcctccgaagtagctgggattacaggcgcccgccaccatgcccggctaattttttgcatttttagtagacatgaggtttcatcatgttggccaggccggtctcaaactcctgacctcaggtgatgcacccacctcagcctcccaaagtgcagggattacaggcatgagccaccatgccgggccatgattcttaagagaattgactgggcctcatgaataaaaaaattagaaaatct

SEQ ID NO: 17519 - DNA, 1279 bp, Homo sapiens
  source 1..1279: mol_type = unassigned DNA
gaagccagacagctggctcgagcctctcctgctcagcaccatggctaagacccctagtgaccatctgctgtccaccctggaggagctggtgccctatgacttcgagaagttcaagttcaagctgcagaacaccagtgtgcagaaggagcactccaggatcccccggagccagatccagagagccaggccggtgaagatggccactctgctggtcacctactatggggaagagtacgccgtgcagctcaccctgcaggtcctgcgggccatcaaccagcgcctgctggccgaggagctccacagggcagccattcagggaaggccaccagacacggctgcgagtccccgctgccacgcccaggaaggagacccagttgacggtacctgtgtgcgtgattcctgcagcttccccgaggcagtttctgggcacccccaggcctcaggcagccgctcacctggctgcccccggtgccaggactcccatgaaaggaagagcccgggaagcctaagcccccagcccctgccacagtgtaagcgccacctgaagcaggtccagctgctcttctgtgaggatcacgatgagcccatctgcctcatctgcagtctgagtcaggagcaccaaggccaccgggtgcgccccattgaggaggtcgccctggaacacaagaagaaaattcagaagcagctggagcatctgaagaagctgagaaaatcaggggaggagcagcgatcctatggggaggagaaggcagtgagctttctgaaacaaactgaagcgctgaagcagcgggtgcagaggaagctggagcaggtgtactacttcctggagcagcaagagcatttctttgtggcctcactggaggacgtgggccagatggttgggcagatcaggaaggcatatgacacccgcgtatcccaggacatcgccctgctcgatgcgctgattggggaactggaggccaaggagtgccagtcagaatgggaacttctgcaggacattggagacatcttgcacagggctaagacagtgcctgtccctgaaaagtggaccactcctcaagagataaaacaaaagatccaactcctccaccagaagtcagagtttgtggagaagagcacaaagtacttctcagaaaccctgcgttcagaaatggaaatgttcaatgaccacagtccccaacatggcctgggttcctgggaggaacgggattatacccaacatagcatgcagggccctaagcagggggttccttgtttccttgttgtcaggacagtgtaa

SEQ ID NO: 17520 - DNA, 1713 bp, Homo sapiens
  source 1..1713: mol_type = unassigned DNA
atggctaagacccctagtgaccatctgctgtccaccctggaggagctggtgccctatgacttcgagaagttcaagttcaagctgcagaacaccagtgtgcagaaggagcactccaggatcccccggagccagatccagagagccaggccggtgaagatggccactctgctggtcacctactatggggaagagtacgccgtgcagctcaccctgcaggtcctgcgggccatcaaccagcgcctgctggccgaggagctccacagggcagccattcagggaaggccaccagacacggctgcgagtccccgctgccacgcccaggaaggagacccagttgacggtacctgtgtgcgtgattcctgcagcttccccgaggcagtttctgggcacccccaggcctcaggcagccgctcacctggctgcccccggtgccaggactcccatgaaaggaagagcccgggaagcctaagcccccagcccctgccacagtgtaagcgccacctgaagcaggtccagctgctcttctgtgaggatcacgatgagcccatctgcctcatctgcagtctgagtcaggagcaccaaggccaccgggtgcgccccattgaggaggtcgccctggaacacaagaagaaaattcagaagcagctggagcatctgaagaagctgagaaaatcaggggaggagcagcgatcctatggggaggagaaggcagtgagctttctgaaacaaactgaagcgctgaagcagcgggtgcagaggaagctggagcaggtgtactacttcctggagcagcaagagcatttctttgtggcctcactggaggacgtgggccagatggttgggcagatcaggaaggcatatgacacccgcgtatcccaggacatcgccctgctcgatgcgctgattggggaactggaggccaaggagtgccagtcagaatgggaacttctgcaggacattggagacatcttgcacagggctaagacagtgcctgtccctgaaaagtggaccactcctcaagagataaaacaaaagatccaactcctccaccagaagtcagagtttgtggagaagagcacaaagtacttctcagaaaccctgcgttcagaaatggaaatgttcaatgttccggagctgattggcgctcaggcacatgctgttaatgtgattctggatgcagaaaccgcttaccccaacctcatcttctctgatgatctgaagagtgttagacttggaaacaagtgggagaggctgcctgatggcccgcaaagatttgacagctgtatcattgttctgggctctccgagtttcctctctggccgccgttactgggaggtggaggttggagacaagacagcatggatcctgggagcctgcaagacatccataagcaggaaagggaacatgactctgtcgccagagaatggctactgggtggtgataatgatgaaggaaaatgagtaccaggcgtccagcgttcccccgacccgcctgctaataaaggagcctcccaagcgtgtgggcatcttcgtggactacagagttggaagcatctccttttacaatgtgacagccagatcccacatctatacattcgccagctgctctttctctgggccccttcaacctatcttcagccctgggacacgtgatggagggaagaacacagctcctctgactatctgtccagtgggtggtcaggggcctgactga

SEQ ID NO: 17521 - DNA, 2984 bp, Homo sapiens
  source 1..2984: mol_type = unassigned DNA
gaagccagacagctggctcgagcctctcctgctcagcaccatggctaagacccctagtgaccatctgctgtccaccctggaggagctggtgccctatgacttcgagaagttcaagttcaagctgcagaacaccagtgtgcagaaggagcactccaggatcccccggagccagatccagagagccaggccggtgaagatggccactctgctggtcacctactatggggaagagtacgccgtgcagctcaccctgcaggtcctgcgggccatcaaccagcgcctgctggccgaggagctccacagggcagccattcagggaaggccaccagacacggctgcgagtccccgctgccacgcccaggaaggagacccagttgacggtacctgtgtgcgtgattcctgcagcttccccgaggcagtttctgggcacccccaggcctcaggcagccgctcacctggctgcccccggtgccaggactcccatgaaaggaagagcccgggaagcctaagcccccagcccctgccacagtgtaagcgccacctgaagcaggtccagctgctcttctgtgaggatcacgatgagcccatctgcctcatctgcagtctgagtcaggagcaccaaggccaccgggtgcgccccattgaggaggtcgccctggaacacaagaagaaaattcagaagcagctggagcatctgaagaagctgagaaaatcaggggaggagcagcgatcctatggggaggagaaggcagtgagctttctgaaacaaactgaagcgctgaagcagcgggtgcagaggaagctggagcaggtgtactacttcctggagcagcaagagcatttctttgtggcctcactggaggacgtgggccagatggttgggcagatcaggaaggcatatgacacccgcgtatcccaggacatcgccctgctcgatgcgctgattggggaactggaggccaaggagtgccagtcagaatgggaacttctgcaggacattggagacatcttgcacagggctaagacagtgcctgtccctgaaaagtggaccactcctcaagagataaaacaaaagatccaactcctccaccagaagtcagagtttgtggagaagagcacaaagtacttctcagaaaccctgcgttcagaaatggaaatgttcaatggtgagtccagcggtaatggtgtgtgctggcctggggttgttgcagtgttcccttgtgctgttgacttgaggggccctatttagaagacaaaaaaaaaaaccaaacacctggagcaaagttccggagctgattggcgctcaggcacatgctgttaatgtgattctggatgcagaaaccgcttaccccaacctcatcttctctgatgatctgaagagtgttagacttggaaacaagtgggagaggctgcctgatggcccgcaaagatttgacagctgtatcattgttctgggctctccgagtttcctctctggccgccgttactgggaggtggaggttggagacaagacagcatggatcctgggagcctgcaagacatccataagcaggaaagggaacatgactctgtcgccagagaatggctactgggtggtgataatgatgaaggaaaatgagtaccaggcgtccagcgttcccccgacccgcctgctaataaaggagcctcccaagcgtgtgggcatcttcgtggactacagagttggaagcatctccttttacaatgtgacagccagatcccacatctatacattcgccagctgctctttctctgggccccttcaacctatcttcagccctgggacacgtgatggagggaagaacacagctcctctgactatctgtccagtgggtggtcaggggcctgactgaatgcccaacactgcatctctcttcctgcttctggccttgtatcttgcattcacactcaatagtcacggaatgccgactaggtgctagctgctatgggaaatgcaaaaataacaaaatagttactgtgcccacggagcctacccgattatagcagaggtaagttaggaacgaacatgttagtcaatccgggtgaagacatgtactgatgacacaccatggatttcagaggaggaagtacggagtcgttgcataatccgcccctggtgggtggcactctcaggtgctcctgaacagaagatttggccctcattttccctcagaaccccacggcaaggatatatgtccccttgttctctctgcttctgtcttgaggatatgggaagcctagagaaacgcaagcagactggattgggatagaagtatttgtgtacctggattaatgaactatgattttttttttttttttttgagaccaaatcttgctctgtggcccaggctggagtgcagtggcacgatctcagctcactgcaacctccacctcccaggttcaagcgattctcctgcctcagcctcctgagcagctgggattacaggtgcgtgccaccacaccaggctggttttcttgtatttttagtagagacgggggtttcaccatgttagccaggctggtctcgaactcctgacctcaggtgatccacccgcctcagcctcccaaagtgctgggattacaggcatgagccactgtgcccggcctatgattcttttttttttttttttttgagacaaagttttgctcttgtcacccaggctggagtgcagtggtgcaatcttggctcgcaacctccgcctcccaggttcaagagattctcctgcctcagcctccgaagtagctgggattacaggcgcccgccaccatgcccggctaattttttgcatttttagtagacatgaggtttcatcatgttggccaggccggtctcaaactcctgacctcaggtgatgcacccacctcagcctcccaaagtgcagggattacaggcatgagccaccatgccgggccatgattcttaagagaattgactgggcctcatgaataaaaaaattagaaaatct

SEQ ID NO: 17522 - DNA, 1888 bp, Homo sapiens
  source 1..1888: mol_type = unassigned DNA
atggctaagacccctagtgaccatctgctgtccaccctggaggagctggtgccctatgacttcgagaagttcaagttcaagctgcagaacaccagtgtgcagaaggagcactccaggatcccccggagccagatccagagagccaggccggtgaagatggccactctgctggtcacctactatggggaagagtacgccgtgcagctcaccctgcaggtcctgcgggccatcaaccagcgcctgctggccgaggagctccacagggcagccattcagggaaggccaccagacacggctgcgagtccccgctgccacgcccaggaaggagacccagttgacggtacctgtgtgcgtgattcctgcagcttccccgaggcagtttctgggcacccccaggcctcaggcagccgctcacctggctgcccccggtgccaggactcccatgaaaggaagagcccgggaagcctaagcccccagcccctgccacagtgtaagcgccacctgaagcaggtccagctgctcttctgtgaggatcacgatgagcccatctgcctcatctgcagtctgagtcaggagcaccaaggccaccgggtgcgccccattgaggaggtcgccctggaacacaagaagaaaattcagaagcagctggagcatctgaagaagctgagaaaatcaggggaggagcagcgatcctatggggaggagaaggcagtgagctttctgaaacaaactgaagcgctgaagcagcgggtgcagaggaagctggagcaggtgtactacttcctggagcagcaagagcatttctttgtggcctcactggaggacgtgggccagatggttgggcagatcaggaaggcatatgacacccgcgtatcccaggacatcgccctgctcgatgcgctgattggggaactggaggccaaggagtgccagtcagaatgggaacttctgcaggacattggagacatcttgcacagggctaagacagtgcctgtccctgaaaagtggaccactcctcaagagataaaacaaaagatccaactcctccaccagaagtcagagtttgtggagaagagcacaaagtacttctcagaaaccctgcgttcagaaatggaaatgttcaatgaccacagtccccaacatggcctgggttcctgggaggaacgggattatacccaacatagcatgcagggccctaagcagggggttccttgtctttccttgttgtcaggacagtgtaatttagcccctcttaatgctaatgctcaggatttttttccctatctgatttttctccgtagttccggagctgattggcgctcaggcacatgctgttaatgtgattctggatgcagaaaccgcttaccccaacctcatcttctctgatgatctgaagagtgttagacttggaaacaagtgggagaggctgcctgatggcccgcaaagatttgacagctgtatcattgttctgggctctccgagtttcctctctggccgccgttactgggaggtggaggttggagacaagacagcatggatcctgggagcctgcaagacatccataagcaggaaagggaacatgactctgtcgccagagaatggctactgggtggtgataatgatgaaggaaaatgagtaccaggcgtccagcgttcccccgacccgcctgctaataaaggagcctcccaagcgtgtgggcatcttcgtggactacagagttggaagcatctccttttacaatgtgacagccagatcccacatctatacattcgccagctgctctttctctgggccccttcaacctatcttcagccctgggacacgtgatggagggaagaacacagctcctctgactatctgtccagtgggtggtcaggggcctgactga

SEQ ID NO: 17523 - DNA, 2273 bp, Homo sapiens
  source 1..2273: mol_type = unassigned DNA
agacagctggctcgagcctctcctgctcagcaccatggctaagacccctagtgaccatctgctgtccaccctggaggagctggtgccctatgacttcgagaagttcaagttcaagctgcagaacaccagtgtgcagaaggagcactccaggatcccccggagccagatccagagagccaggccggtgaagatggccactctgctggtcacctactatggggaagagtacgccgtgcagctcaccctgcaggtcctgcgggccatcaaccagcgcctgctggccgaggagctccacagggcagccattcaggaatattccacacaagaaaacggcacagatgattccgcagcgtccagctccctgggggagaacaagcccaggagcctgaagactccagaccaccccgaggggaacgaggggaacggccctcggccgtacgggggcggagctgccagcctgcggtgcagccagcccgaggccgggagggggctgtcgaggaagcccctgagcaaacgcagagagaaggcctcggagggcctggacgcgcagggcaagcctcggacccggagcccggccctgccgggcgggagaagccccggcccctgcagggcgctagaggggggccaggccgaggtccggctgcgcagaaacgccagctccgcggggaggctgcaggggctggcggggggcgccccggggcagaaggagtgcaggcccttcgaagtgtacctgccctcgggaaagatgcgacctagaagccttgaggtcaccatttctacaggggagaaggcgcccgcaaatccagaaattctcctgactctagaggaaaagacagctgcgaatctggactcggcaacagaaccccgggcaaggcccactccggatggaggggcatctgcggacctgaaggaaggccctggaaatccagaacattcggtcaccggaaggccaccagacacggctgcgagtccccgctgccacgcccaggaaggagacccagttgacggtacctgtgtgcgtgattcctgcagcttccccgaggcagtttctgggcacccccaggcctcaggcagccgctcacctggctgcccccggtgccaggactcccatgaaaggaagagcccgggaagcctaagcccccagcccctgccacagtgtaagcgccacctgaagcaggtccagctgctcttctgtgaggatcacgatgagcccatctgcctcatctgcagtctgagtcaggagcaccaaggccaccgggtgcgccccattgaggaggtcgccctggaacacaagaagaaaattcagaagcagctggagcatctgaagaagctgagaaaatcaggggaggagcagcgatcctatggggaggagaaggcagtgagctttctgaaacaaactgaagcgctgaagcagcgggtgcagaggaagctggagcaggtgtactacttcctggagcagcaagagcatttctttgtggcctcactggaggacgtgggccagatggttgggcagatcaggaaggcatatgacacccgcgtatcccaggacatcgccctgctcgatgcgctgattggggaactggaggccaaggagtgccagtcagaatgggaacttctgcaggacattggagacatcttgcacagggctaagacagtgcctgtccctgaaaagtggaccactcctcaagagataaaacaaaagatccaactcctccaccagaagtcagagtttgtggagaagagcacaaagtacttctcagaaaccctgcgttcagaaatggaaatgttcaatgttccggagctgattggcgctcaggcacatgctgttaatgtgattctggatgcagaaaccgcttaccccaacctcatcttctctgatgatctgaagagtgttagacttggaaacaagtgggagaggctgcctgatggcccgcaaagatttgacagctgtatcattgttctgggctctccgagtttcctctctggccgccgttactgggaggtggaggttggagacaagagattctcctgcctcagcctccgaagtagctgggattacaggcgcccgccaccatgcccggctaattttttgcatttttagtagacatgaggtttcatcatgttggccaggccggtctcaaactcctgacctcaggtgatgcacccacctcagcctcccaaagtgcagggattacaggcatgagccaccatgccgggccatgattcttaagagaattgactgggcctcatgaataaaaaaattagaaaatctg

SEQ ID NO: 17524 - DNA, 4496 bp, Homo sapiens
  source 1..4496: mol_type = unassigned DNA
ggcggcagtgtctgtggtggccgcggcggcgagagcgacggtcccatctttcccaccctcttggttgccgctggccacacgccctccgctggcggcgacttctcagctccgtgcgcccgggctggacagtgagcctcgagaggagacgcgggcggctagagccggagtggggcgagccgcggaacccggccgggagccgcgcgaggcgtgatcggagggtatggttggcatggaattgaatttcatctgtctgtgggaattgtaagcaagattgccatcacgaaagccaaagtggatttctccagtgtggtgtgcctgcccccttccgtcattgctgtgaatgggctggacggaggaggggccggcgaaaatgatgatgaaccagtgctcgtgtccttatctgcggcacccagtccccagagtgaagctgttgccaatgaactgcaggagctctccttgcagcccgagctgaccctaggcctccaccctggcaggaatcccaatttgcctccacttagtgagcggaagaatgtgctacagttgaaactccagcagcgccggacccgggaagaactggtgagccaagggatcatgccgcctttgaaaagtccagccgcatttcatgagcagagaaggagcttggagcgggccaggacagaggactatctcaaacggaagattcgttcccggccggagagatcggagctggtcaggatgcacattttggaagagacctcggctgagccatccctccaggccaagcagctgaagctgaagagagccagactagccgatgacctcaatgagaagattgcacagaggcctggccccatggagctggtggagaagaacatccttcctgttgagtccagcctgaaggaagccatcattgtgggccaggtgaactatcccaaagtagcagacagctcttccttcgatgaggacagcagcgatgccttatcccccgagcagcctgccagccatgagtcccagggttctgtgccgtcacccctggaggcccgagtcagcgaaccactgctcagtgccacctctgcatcccccacccaggttgtgtctcaacttccgatgggccgggattccagagaaatgcttttcctggcagagcagcctcctctgcctcccccacctctgctgcctcccagcctcaccaatggaaccactatccccactgccaagtccacccccacactcattaagcaaagccaacccaagtctgccagtgagaagtcacagcgcagcaagaaggccaaggagctgaagccaaaggtgaagaagctcaagtaccaccagtacatccccccggaccagaagcaggacaggggggcaccccccatggactcatcctacgccaagatcctgcagcagcagcagctcttcctccagctgcagatcctcaaccagcagcagcagcagcaccacaactaccaggccatcctgcctgccccgccaaagtcagcaggcgaggccctgggaagcagcgggacccccccagtacgcagcctctccactaccaatagcagctccagctcgggcgcccctgggccctgtgggctggcacgtcagaacagcacctcactgactggcaagccgggagccctgccggccaacctggacgacatgaaggtggcagagctgaagcaggagctgaagttgcgatcactgcctgtctcgggcaccaaaactgagctgattgagcgccttcgagcctatcaagaccaaatcagccctgtgccaggagcccccaaggcccctgccgccacctctatcctgcacaaggctggcgaggtggtggtagccttcccagcggcccggctgagcacggggccagccctggtggcagcaggcctggctccagctgaggtggtggtggccacggtggccagcagtggggtggtgaagtttggcagcacgggctccacgccccccgtgtctcccaccccctcggagcgctcactgctcagcacgggcgatgaaaactccacccccggggacacctttggtgagatggtgacatcacctctgacgcagctgaccctgcaggcctcgccactgcagatcctcgtgaaggaggagggcccccgggccgggtcctgttgcctgagccctggggggcgggcggagctagaggggcgcgacaaggaccagatgctgcaggagaaagacaagcagatcgaggcgctgacgcgcatgctccggcagaagcagcagctggtggagcggctcaagctgcagctggagcaggagaagcgagcccagcagcccgcccccgcccccgcccccctcggcacccccgtgaagcaggagaacagcttctccagctgccagctgagccagcagcccctgggccccgctcacccattcaaccccagcctggcggccccagccaccaaccacatagacccttgtgctgtggccccggggcccccgtccgtggtggtgaagcaggaagccttgcagcctgagcccgagccggtccccgccccccagttgcttctggggcctcagggccccagcctcatcaagggggttgcacctcccaccctcatcaccgactccacagggacccaccttgtcctcaccgtgaccaataagaatgcagacagccctggcctgtccagtgggagcccccagcagccctcgtcccagcctggctctccagcgcctgccccctctgcccagatggacctggagcacccactgcagcccctctttgggacccccacttctctgctgaagaaggaaccacctggctatgaggaagccatgagccagcagcccaaacagcaggaaaatggttcctcaagccagcagatggacgacctgtttgacattctcattcagagcggagaaatttcagcagatttcaaggagccgccatccctgccagggaaggagaagccatccccgaagacagtctgtgggtcccccctggcagcacagccatcaccttctgctgagctcccccaggctgccccacctcctccaggctcaccctccctccctggacgcctggaggacttcctggagagcagcacggggctgcccctgctgaccagtgggcatgacgggccagagcccctttccctcattgacgacctccatagccagatgctgagcagcactgccatcctggaccaccccccgtcacccatggacacctcggaattgcactttgttcctgagcccagcagcaccatgggcctggacctggctgatggccacctggacagcatggactggctggagctgtcgtcaggtggtcccgtgctgagcctagcccccctcagcaccacagcccccagcctcttctccacagacttcctcgatggccatgatttgcagctgcactgggattcctgcttgtagctctctggctcaagacggggtggggaaggggctgggagccagggtactccaatgcgtggctctcctgcgtgattcggcctctccacatggttgtgagtcttgacaatcacagcccctgctttttcccttccctgggaggctagaacagagaagcccttactcctggttcagtgccacgcagggcagaggagagcagctgtcaagaagcagccctggctctcacgctggggttttggacacacggtcagggtcagggccatttcagcttgacctccttttttgaggtcagggggcactgtctgtctggctacaatttggctaaggtaggtgaagcctggccaggcgggaggcttctcttctgacccagggctgagacaggttaaggggtgaatctccttcctttctctccctgctttgctgtgaagggagaaattagcctgggcctctaccccctattccctgtgtctgccaaccccaggatcccagggctccctgccattttagtgtcttggtgtagtgtaaccatttagtggttggtggcaacaattttatgtacaggtgtatatacctctatattatatatcgacatacatatatatttttgggggggggcggacaggagatgggtgcaactccctcccatcctactctcacagaagggcctggatgcaaggttacccttgagctgtgtgccacagtctggtgcccagtctggcatgcagctacccaggcccacccatcacgtgtgattgacatgtaggtaccctgccacggcctatgccccacctgccctgcttcctggctccttatcagtgccatgagggcagaggtgctacctggccttcctgccaggagctctccacccactcacattccgtccccgccgcctcactgcagccagcgtggccctaggacaggaggagcttcgggcccagcttcaccctgcggtggggctgaggggtggccatctcctgccctggggccactggcttcacattctgggctgactcataggggagtaggggtggagtcaccaaaaccagtgctgggacaaagatggggaaggtgtgtgaactttttaaaataaacacaaaaacacaggcctgtta

SEQ ID NO: 17525 - DNA, 4505 bp, Homo sapiens
  source 1..4505: mol_type = unassigned DNA
ggcggcagtgtctgtggtggccgcggcggcgagagcgacggtcccatctttcccaccctcttggttgccgctggccacacgccctccgctggcggcgacttctcagctccgtgcgcccgggctggacagtgagcctcgagaggagacgcgggcggctagagccggagtggggcgagccgcggaacccggccgggagccgcgcgaggcgtgatcggagggtatggttggcatggaattgaatttcatctgtctgtgggaattgtaagcaagattgccatcacgaaagccaaagtggatttctccagtgtggtgtgcctgcccccttccgtcattgctgtgaatgggctggacggaggaggggccggcgaaaatgatgatgaaccagtgctcgtgtccttatctgcggcacccagtccccagagtgaagctgttgccaatgaactgcaggagctctccttgcagcccgagctgaccctaggcctccaccctggcaggaatcccaatttgcctccacttagtgagcggaagaatgtgctacagttgaaactccagcagcgccggacccgggaagaactggtgagccaagggatcatgccgcctttgaaaagtccagccgcatttcatgagcagagaaggagcttggagcgggccaggacagaggactatctcaaacggaagattcgttcccggccggagagatcggagctggtcaggatgcacattttggaagagacctcggctgagccatccctccaggccaagcagctgaagctgaagagagccagactagccgatgacctcaatgagaagattgcacagaggcctggccccatggagctggtggagaagaacatccttcctgttgagtccagcctgaaggaagccatcattgtgggccaggtgaactatcccaaagtagcagacagctcttccttcgatgaggacagcagcgatgccttatcccccgagcagcctgccagccatgagtcccagggttctgtgccgtcacccctggaggcccgagtcagcgaaccactgctcagtgccacctctgcatcccccacccaggttgtgtctcaacttccgatgggccgggattccagagaaatgcttttcctggcagagcagcctcctctgcctcccccacctctgctgcctcccagcctcaccaatggaaccactatccccactgccaagtccacccccacactcattaagcaaagccaacccaagtctgccagtgagaagtcacagcgcagcaagaaggccaaggagctgaagccaaaggtgaagaagctcaagtaccaccagtacatccccccggaccagaagcaggacaggggggcaccccccatggactcatcctacgccaagatcctgcagcagcagcagctcttcctccagctgcagatcctcaaccagcagcagcagcagcaccacaactaccaggccatcctgcctgccccgccaaagtcagcaggcgaggccctgggaagcagcgggacccccccagtacgcagcctctccactaccaatagcagctccagctcgggcgcccctgggccctgtgggctggcacgtcagaacagcacctcactgactggcaagccgggagccctgccggccaacctggacgacatgaaggtggcagagctgaagcaggagctgaagttgcgatcactgcctgtctcgggcaccaaaactgagctgattgagcgccttcgagcctatcaagaccaaatcagccctgtgccaggagcccccaaggcccctgccgccacctctatcctgcacaaggctggcgaggtggtggtagccttcccagcggcccggctgagcacggggccagccctggtggcagcaggcctggctccagctgaggtggtggtggccacggtggccagcagtggggtggtgaagtttggcagcacgggctccacgccccccgtgtctcccaccccctcggagcgctcactgctcagcacgggcgatgaaaactccacccccggggacacctttggtgagatggtgacatcacctctgacgcagctgaccctgcaggcctcgccactgcagatcctcgtgaaggaggagggcccccgggccgggtcctgttgcctgagccctggggggcgggcggagctagaggggcgcgacaaggaccagatgctgcaggagaaagacaagcagatcgaggcgctgacgcgcatgctccggcagaagcagcagctggtggagcggctcaagctgcagctggagcaggagaagcgagcccagcagcccgcccccgcccccgcccccctcggcacccccgtgaagcaggagaacagcttctccagctgccagctgagccagcagcccctgggccccgctcacccattcaaccccagcctggcggccccagccaccaaccacatagacccttgtgctgtggccccggggcccccgtccgtggtggtgaagcaggaagccttgcagcctgagcccgagccggtccccgccccccagttgcttctggggcctcagggccccagcctcatcaagggggttgcacctcccaccctcatcaccgactccacagggacccaccttgtcctcaccgtgaccaataagaatgcagacagccctggcctgtccagtgggagcccccagcagccctcgtcccagcctggctctccagcgcctgccccctctgcccagatggacctggagcacccactgcagcccctctttgggacccccacttctctgctgaagaaggaaccacctggctatgaggaagccatgagccagcagcccaaacagcaggaaaatggttcctcaagccagcagatggacgacctgtttgacattctcattcagagcggaggtaaccccagaaatttcagcagatttcaaggagccgccatccctgccagggaaggagaagccatccccgaagacagtctgtgggtcccccctggcagcacagccatcaccttctgctgagctcccccaggctgccccacctcctccaggctcaccctccctccctggacgcctggaggacttcctggagagcagcacggggctgcccctgctgaccagtgggcatgacgggccagagcccctttccctcattgacgacctccatagccagatgctgagcagcactgccatcctggaccaccccccgtcacccatggacacctcggaattgcactttgttcctgagcccagcagcaccatgggcctggacctggctgatggccacctggacagcatggactggctggagctgtcgtcaggtggtcccgtgctgagcctagcccccctcagcaccacagcccccagcctcttctccacagacttcctcgatggccatgatttgcagctgcactgggattcctgcttgtagctctctggctcaagacggggtggggaaggggctgggagccagggtactccaatgcgtggctctcctgcgtgattcggcctctccacatggttgtgagtcttgacaatcacagcccctgctttttcccttccctgggaggctagaacagagaagcccttactcctggttcagtgccacgcagggcagaggagagcagctgtcaagaagcagccctggctctcacgctggggttttggacacacggtcagggtcagggccatttcagcttgacctccttttttgaggtcagggggcactgtctgtctggctacaatttggctaaggtaggtgaagcctggccaggcgggaggcttctcttctgacccagggctgagacaggttaaggggtgaatctccttcctttctctccctgctttgctgtgaagggagaaattagcctgggcctctaccccctattccctgtgtctgccaaccccaggatcccagggctccctgccattttagtgtcttggtgtagtgtaaccatttagtggttggtggcaacaattttatgtacaggtgtatatacctctatattatatatcgacatacatatatatttttgggggggggcggacaggagatgggtgcaactccctcccatcctactctcacagaagggcctggatgcaaggttacccttgagctgtgtgccacagtctggtgcccagtctggcatgcagctacccaggcccacccatcacgtgtgattgacatgtaggtaccctgccacggcctatgccccacctgccctgcttcctggctccttatcagtgccatgagggcagaggtgctacctggccttcctgccaggagctctccacccactcacattccgtccccgccgcctcactgcagccagcgtggccctaggacaggaggagcttcgggcccagcttcaccctgcggtggggctgaggggtggccatctcctgccctggggccactggcttcacattctgggctgactcataggggagtaggggtggagtcaccaaaaccagtgctgggacaaagatggggaaggtgtgtgaactttttaaaataaacacaaaaacacaggcctgtt

SEQ ID NO: 17526 - DNA, 4343 bp, Homo sapiens
  source 1..4343: mol_type = unassigned DNA
gccggcggcggcagtgtctgtggtggccgcggcggcgagagcgacggtcccatctttcccaccctcttggttgccgctggccacacgccctccgctggcggcgacttctcagctccgtgcgcccgggctggacagtgagcctcgagaggagacgcgggcggctagagccggagtggggcgagccgcggaacccggccgggagccgcgcgaggcgtgatcggagggtatggttggcatggaattgaatttcatctgtctgtgggaattgtaagcaagattgccatcacgaaagccaaagtggatttctccagtgtggtgtgcctgcccccttccgtcattgctgtgaatgggctggacggaggaggggccggcgaaaatgatgatgaaccagtgctcgtgtccttatctgcggcacccagtccccagagtgaagctgttgccaatgaactgcaggagctctccttgcagcccgagctgaccctaggcctccaccctggcaggaatcccaatttgcctccacttagtgagcggaagaatgtgctacagttgaaactccagcagcgccggacccgggaagaactggtgagccaagggatcatgccgcctttgaaaagtccagccgcatttcatgagcagagaaggagcttggagcgggccaggacagaggactatctcaaacggaagattcgttcccggccggagagatcggagctggtcaggatgcacattttggaagagacctcggctgagccatccctccaggccaagcagctgaagctgaagagagccagactagccgatgacctcaatgagaagattgcacagaggcctggccccatggagctggtggagaagaacatccttcctgttgagtccagcctgaaggaagccatcattgtgggccaggtgaactatcccaaagtagcagacagctcttccttcgatgaggacagcagcgatgccttatcccccgagcagcctgccagccatgagtcccagggttctgtgccgtcacccctggaggcccgagtcagcgaaccactgctcagtgccacctctgcatcccccacccagcaaagccaacccaagtctgccagtgagaagtcacagcgcagcaagaaggccaaggagctgaagccaaaggtgaagaagctcaagtaccaccagtacatccccccggaccagaagcaggacaggggggcaccccccatggactcatcctacgccaagatcctgcagcagcagcagctcttcctccagctgcagatcctcaaccagcagcagcagcagcaccacaactaccaggccatcctgcctgccccgccaaagtcagcaggcgaggccctgggaagcagcgggacccccccagtacgcagcctctccactaccaatagcagctccagctcgggcgcccctgggccctgtgggctggcacgtcagaacagcacctcactgactggcaagccgggagccctgccggccaacctggacgacatgaaggtggcagagctgaagcaggagctgaagttgcgatcactgcctgtctcgggcaccaaaactgagctgattgagcgccttcgagcctatcaagaccaaatcagccctgtgccaggagcccccaaggcccctgccgccacctctatcctgcacaaggctggcgaggtggtggtagccttcccagcggcccggctgagcacggggccagccctggtggcagcaggcctggctccagctgaggtggtggtggccacggtggccagcagtggggtggtgaagtttggcagcacgggctccacgccccccgtgtctcccaccccctcggagcgctcactgctcagcacgggcgatgaaaactccacccccggggacacctttggtgagatggtgacatcacctctgacgcagctgaccctgcaggcctcgccactgcagatcctcgtgaaggaggagggcccccgggccgggtcctgttgcctgagccctggggggcgggcggagctagaggggcgcgacaaggaccagatgctgcaggagaaagacaagcagatcgaggcgctgacgcgcatgctccggcagaagcagcagctggtggagcggctcaagctgcagctggagcaggagaagcgagcccagcagcccgcccccgcccccgcccccctcggcacccccgtgaagcaggagaacagcttctccagctgccagctgagccagcagcccctgggccccgctcacccattcaaccccagcctggcggccccagccaccaaccacatagacccttgtgctgtggccccggggcccccgtccgtggtggtgaagcaggaagccttgcagcctgagcccgagccggtccccgccccccagttgcttctggggcctcagggccccagcctcatcaagggggttgcacctcccaccctcatcaccgactccacagggacccaccttgtcctcaccgtgaccaataagaatgcagacagccctggcctgtccagtgggagcccccagcagccctcgtcccagcctggctctccagcgcctgccccctctgcccagatggacctggagcacccactgcagcccctctttgggacccccacttctctgctgaagaaggaaccacctggctatgaggaagccatgagccagcagcccaaacagcaggaaaatggttcctcaagccagcagatggacgacctgtttgacattctcattcagagcggagaaatttcagcagatttcaaggagccgccatccctgccagggaaggagaagccatccccgaagacagtctgtgggtcccccctggcagcacagccatcaccttctgctgagctcccccaggctgccccacctcctccaggctcaccctccctccctggacgcctggaggacttcctggagagcagcacggggctgcccctgctgaccagtgggcatgacgggccagagcccctttccctcattgacgacctccatagccagatgctgagcagcactgccatcctggaccaccccccgtcacccatggacacctcggaattgcactttgttcctgagcccagcagcaccatgggcctggacctggctgatggccacctggacagcatggactggctggagctgtcgtcaggtggtcccgtgctgagcctagcccccctcagcaccacagcccccagcctcttctccacagacttcctcgatggccatgatttgcagctgcactgggattcctgcttgtagctctctggctcaagacggggtggggaaggggctgggagccagggtactccaatgcgtggctctcctgcgtgattcggcctctccacatggttgtgagtcttgacaatcacagcccctgctttttcccttccctgggaggctagaacagagaagcccttactcctggttcagtgccacgcagggcagaggagagcagctgtcaagaagcagccctggctctcacgctggggttttggacacacggtcagggtcagggccatttcagcttgacctccttttttgaggtcagggggcactgtctgtctggctacaatttggctaaggtaggtgaagcctggccaggcgggaggcttctcttctgacccagggctgagacaggttaaggggtgaatctccttcctttctctccctgctttgctgtgaagggagaaattagcctgggcctctaccccctattccctgtgtctgccaaccccaggatcccagggctccctgccattttagtgtcttggtgtagtgtaaccatttagtggttggtggcaacaattttatgtacaggtgtatatacctctatattatatatcgacatacatatatatttttgggggggggcggacaggagatgggtgcaactccctcccatcctactctcacagaagggcctggatgcaaggttacccttgagctgtgtgccacagtctggtgcccagtctggcatgcagctacccaggcccacccatcacgtgtgattgacatgtaggtaccctgccacggcctatgccccacctgccctgcttcctggctccttatcagtgccatgagggcagaggtgctacctggccttcctgccaggagctctccacccactcacattccgtccccgccgcctcactgcagccagcgtggccctaggacaggaggagcttcgggcccagcttcaccctgcggtggggctgaggggtggccatctcctgccctggggccactggcttcacattctgggctgactcataggggagtaggggtggagtcaccaaaaccagtgctgggacaaagatggggaaggtgtgtgaactttttaaaataaacacaaaaacaca

SEQ ID NO: 17527 - DNA, 4091 bp, Homo sapiens
  source 1..4091: mol_type = unassigned DNA
gcaattacagacagttgcacttcaaggggacccttctttcacactacatccttctgtttttagactttttttgcgtttgaaaatgtgttttttgaggtggaatacccaactgacccctcatctctcctctctctctgctgccctgcagtgctacagttgaaactccagcagcgccggacccgggaagaactggtgagccaagggatcatgccgcctttgaaaagtccagccgcatttcatgagcagagaaggagcttggagcgggccaggacagaggactatctcaaacggaagattcgttcccggccggagagatcggagctggtcaggatgcacattttggaagagacctcggctgagccatccctccaggccaagcagctgaagctgaagagagccagactagccgatgacctcaatgagaagattgcacagaggcctggccccatggagctggtggagaagaacatccttcctgttgagtccagcctgaaggaagccatcattgtgggccaggtgaactatcccaaagtagcagacagctcttccttcgatgaggacagcagcgatgccttatcccccgagcagcctgccagccatgagtcccagggttctgtgccgtcacccctggaggcccgagtcagcgaaccactgctcagtgccacctctgcatcccccacccaggttgtgtctcaacttccgatgggccgggattccagagaaatgcttttcctggcagagcagcctcctctgcctcccccacctctgctgcctcccagcctcaccaatggaaccactatccccactgccaagtccacccccacactcattaagcaaagccaacccaagtctgccagtgagaagtcacagcgcagcaagaaggccaaggagctgaagccaaaggtgaagaagctcaagtaccaccagtacatccccccggaccagaagcaggacaggggggcaccccccatggactcatcctacgccaagatcctgcagcagcagcagctcttcctccagctgcagatcctcaaccagcagcagcagcagcaccacaactaccaggccatcctgcctgccccgccaaagtcagcaggcgaggccctgggaagcagcgggacccccccagtacgcagcctctccactaccaatagcagctccagctcgggcgcccctgggccctgtgggctggcacgtcagaacagcacctcactgactggcaagccgggagccctgccggccaacctggacgacatgaaggtggcagagctgaagcaggagctgaagttgcgatcactgcctgtctcgggcaccaaaactgagctgattgagcgccttcgagcctatcaagaccaaatcagccctgtgccaggagcccccaaggcccctgccgccacctctatcctgcacaaggctggcgaggtggtggtagccttcccagcggcccggctgagcacggggccagccctggtggcagcaggcctggctccagctgaggtggtggtggccacggtggccagcagtggggtggtgaagtttggcagcacgggctccacgccccccgtgtctcccaccccctcggagcgctcactgctcagcacgggcgatgaaaactccacccccggggacacctttggtgagatggtgacatcacctctgacgcagctgaccctgcaggcctcgccactgcagatcctcgtgaaggaggagggcccccgggccgggtcctgttgcctgagccctggggggcgggcggagctagaggggcgcgacaaggaccagatgctgcaggagaaagacaagcagatcgaggcgctgacgcgcatgctccggcagaagcagcagctggtggagcggctcaagctgcagctggagcaggagaagcgagcccagcagcccgcccccgcccccgcccccctcggcacccccgtgaagcaggagaacagcttctccagctgccagctgagccagcagcccctgggccccgctcacccattcaaccccagcctggcggccccagccaccaaccacatagacccttgtgctgtggccccggggcccccgtccgtggtggtgaagcaggaagccttgcagcctgagcccgagccggtccccgccccccagttgcttctggggcctcagggccccagcctcatcaagggggttgcacctcccaccctcatcaccgactccacagggacccaccttgtcctcaccgtgaccaataagaatgcagacagccctggcctgtccagtgggagcccccagcagccctcgtcccagcctggctctccagcgcctgccccctctgcccagatggacctggagcacccactgcagcccctctttgggacccccacttctctgctgaagaaggaaccacctggctatgaggaagccatgagccagcagcccaaacagcaggaaaatggttcctcaagccagcagatggacgacctgtttgacattctcattcagagcggagaaatttcagcagatttcaaggagccgccatccctgccagggaaggagaagccatccccgaagacagtctgtgggtcccccctggcagcacagccatcaccttctgctgagctcccccaggctgccccacctcctccaggctcaccctccctccctggacgcctggaggacttcctggagagcagcacggggctgcccctgctgaccagtgggcatgacgggccagagcccctttccctcattgacgacctccatagccagatgctgagcagcactgccatcctggaccaccccccgtcacccatggacacctcggaattgcactttgttcctgagcccagcagcaccatgggcctggacctggctgatggccacctggacagcatggactggctggagctgtcgtcaggtggtcccgtgctgagcctagcccccctcagcaccacagcccccagcctcttctccacagacttcctcgatggccatgatttgcagctgcactgggattcctgcttgtagctctctggctcaagacggggtggggaaggggctgggagccagggtactccaatgcgtggctctcctgcgtgattcggcctctccacatggttgtgagtcttgacaatcacagcccctgctttttcccttccctgggaggctagaacagagaagcccttactcctggttcagtgccacgcagggcagaggagagcagctgtcaagaagcagccctggctctcacgctggggttttggacacacggtcagggtcagggccatttcagcttgacctccttttttgaggtcagggggcactgtctgtctggctacaatttggctaaggtaggtgaagcctggccaggcgggaggcttctcttctgacccagggctgagacaggttaaggggtgaatctccttcctttctctccctgctttgctgtgaagggagaaattagcctgggcctctaccccctattccctgtgtctgccaaccccaggatcccagggctccctgccattttagtgtcttggtgtagtgtaaccatttagtggttggtggcaacaattttatgtacaggtgtatatacctctatattatatatcgacatacatatatatttttgggggggggcggacaggagatgggtgcaactccctcccatcctactctcacagaagggcctggatgcaaggttacccttgagctgtgtgccacagtctggtgcccagtctggcatgcagctacccaggcccacccatcacgtgtgattgacatgtaggtaccctgccacggcctatgccccacctgccctgcttcctggctccttatcagtgccatgagggcagaggtgctacctggccttcctgccaggagctctccacccactcacattccgtccccgccgcctcactgcagccagcgtggccctaggacaggaggagcttcgggcccagcttcaccctgcggtggggctgaggggtggccatctcctgccctggggccactggcttcacattctgggctgactcataggggagtaggggtggagtcaccaaaaccagtgctgggacaaagatggggaaggtgtgtgaactttttaaaataaa

SEQ ID NO: 17528 - DNA, 1842 bp, Homo sapiens
  source 1..1842: mol_type = unassigned DNA
cgtcattgctgtgaatgggctggacggaggaggggccggcgaaaatgatgatgaaccagtgctcgtgtccttatctgcggcacccagtccccaaagtgctgggattacagacgtgagccactgcacccagcccattgtaactaaccatttttaagtgtatggttcagtggtattaaatacattcataatgtgtacagccatcactgccatccatctccctttcttttgatctcgtaaaactgaaactatccccattaaacagtaacttcccatttggcccttccgccagcctgtagcaactgccattctactttctgtctctatgattttgactaagtgcaatcatgaattgtcttttgtgacaggctgttgcactaagcatagtatcacttccttcatccattgatggacataggttgcttccacattctactgttgtgaatgcacttatcaacacctgtgtacaaatacctgagaccctgcttccaattcttttgggtatatgcccagcagtggaattgctagatcatatggtaattctatttttaagtaagtaagtgttggaggaacctccatactgtttttcatagcagctgcaccattttgcatttctaccacagggcacaagggctccagtttctctgtatcctcaccaatactttcttaaaaatttaattttacagtagccactccagtgggtttgaggtgtatctcactgtggtctccctcatgactagtgatattgagctcttttcatgtgctgttggccatttgtatatcatctttggaaaaatgtctgttcaaatctttcttttacctattcttgagtcaagtttggttttttgttgttgagttttagaagttctctgtgtattccggatatcacttctttatcaaatatgtgatttgcaaatatttttaaagagttttatagtcttagctcttacatttaagtaagtctttgatccgttttatttttgtaaatggtgtgacgttggggggtccaccttcattcttttgcatgtagatatacaggcttggcttctgatatccatttactctcttgattgattggcagaaatttcagcagatttcaaggagccgccatccctgccagggaaggagaagccatccccgaagacagtctgtgggtcccccctggcagcacagccatcaccttctgctgagctcccccaggctgccccacctcctccaggctcaccctccctccctggacgcctggaggacttcctggagagcagcacggggctgcccctgctgaccagtgggcatgacgggccagagcccctttccctcattgacgacctccatagccagatgctgagcagcactgccatcctggaccaccccccgtcacccatggacacctcggaattgcactttgttcctgagcccagcagcaccatgggcctggacctggctgatggccacctggacagcatggactggctggagctgtcgtcaggtggtcccgtgctgagcctagcccccctcagcaccacagcccccagcctcttctccacagacttcctcgatggccatgatttgcagctgcactgggattcctgcttgtagctctctggctcaagacggggtggggaaggggctgggagccagggtactccaatgcgtggctctcctgcgtgattcggcctctccacatggttgtgagtcttgacaatcacagcccctgctttttcccttccctgggaggctagaacagagaagcccttactcctggttcagtgccacgcagggcagaggagagcagctgtcaagaagcagccctggctctcacgctggggttttggacacacggtc

SEQ ID NO: 17529 - DNA, 2137 bp, Homo sapiens
  source 1..2137: mol_type = unassigned DNA
gggccggcggcggcggcggcgcgcggaggagaccgcagtgcggccggcgctaggacccgcgggggcctcccaggccgcggcgcctcccgctttcccccactccccgacccttcttcgcccccaaaatgaggaaacggagcaactcgctccaagttgtgcagccgggaccgcctcggggtgtgcagccggctcgcggaggccctcctgggggcgggcgcggggcgcggctcgggggcgccccctgagcagaaaacaggaagaaccaggctcggtccagtggcacccagctccctacctcctgtgccagccgactggcctgtggcaggccattcccagcgtccccgactgtgaccacttgctcagtgtgcctctcacctgcctcagtttccctctgggggcgatggcggggcgaggctctctggtttcctggcgggcatttcacggctgtgattctgctgaggaacttccccgggtgagcccccgcttcctccgagcctggcacccccctcccgtctcagccaggatgccaacgaggcgctgggccccgggcacccagtgtatcaccaaatgcgagcacacccgccccaagccaggggagctggccttccgcaagggcgacgtggtcaccatcctggaggcctgcgagaacaagagctggtaccgcgtcaagcaccacaccagtggacaggaggggctgctggcagctggggcgctgcgggagcgggaggccctctccgcagaccccaagctcagcctcatgccgtggttccacgggaagatctcgggccaggaggctgtccagcagctgcagcctcccgaggatgggctgttcctggtgcgggagtccgcgcgccaccccggcgactacgtcctgtgcgtgagctttggccgcgacgtcatccactaccgcgtgctgcaccgcgacggccacctcacaatcgatgaggccgtgttcttctgcaacctcatggacatggtggagcattacagcaaggacaagggcgctatctgcaccaagctggtgagaccaaagcggaaacacgggaccaagtcggccgaggaggagctggccagggcgggctggttactgaacctgcagcatttgacattgggagcacagatcggagagggagagtttggagctgtcctgcagggtgagtacctggggcaaaaggtggccgtgaagaatatcaagtgtgatgtgacagcccaggccttcctggacgagacggccgtcatgacgaagatgcaacacgagaacctggtgcgtctcctgggcgtgatcctgcaccaggggctgtacattgtcatggagcacgtgagcaagggcaacctggtgaactttctgcggacccggggtcgagccctcgtgaacaccgctcagctcctgcagttttctctgcacgtggccgagggcatggagtacctggagagcaagaagcttgtgcaccgcgacctggccgcccgcaacatcctggtctcagaggacctggtggccaaggtcagcgactttggcctggccaaagccgagcggaaggggctagactcaagccggctgcccgtcaagtggacggcgcccgaggctctcaaacacgggaagttcaccagcaagtcggatgtctggagttttggggtgctgctctgggaggtcttctcatatggacgggctccgtaccctaaaatgtcactgaaagaggtgtcggaggccgtggagaaggggtaccgcatggaaccccccgagggctgtccaggccccgtgcacgtcctcatgagcagctgctgggaggcagagcccgcccgccggccacccttccgcaaactggccgagaagctggcccgggagctacgcagtgcaggtgccccagcctccgtctcagggcaggacgccgacggctccacctcgccccgaagccaggagccctgaccccacccggtggggcccttggccccagaggaccgagagagtggagagtgcggcgtgggggcactgaccaggcccaaggagggtccaggcgggcaagtcatcctcctggtgcccacagcaggggctggcccacgtagggggctctgggcggcccgtggacaccccagacctgcgaaggatgatcgcccgataaagacggattctaaggactct

SEQ ID NO: 17530 - DNA, 1914 bp, Homo sapiens
  source 1..1914: mol_type = unassigned DNA
gggccggcggcggcggcggcgcgcggaggagaccgcagtgcggccggcgctaggacccgcgggggcctcccaggccgcggcgcctcccgctttcccccactccccgacccttcttcgcccccaaaatgaggaaacggagcaactcgctccaagttgtgcagccgggaccgcctcggggtgtgcagccggctcgcggaggccctcctgggggcgggcgcggggcgcggctcgggggcgccccctgagcaggtgagcccccgcttcctccgagcctggcacccccctcccgtctcagccaggatgccaacgaggcgctgggccccgggcacccagtgtatcaccaaatgcgagcacacccgccccaagccaggggagctggccttccgcaagggcgacgtggtcaccatcctggaggcctgcgagaacaagagctggtaccgcgtcaagcaccacaccagtggacaggaggggctgctggcagctggggcgctgcgggagcgggaggccctctccgcagaccccaagctcagcctcatgccgtggttccacgggaagatctcgggccaggaggctgtccagcagctgcagcctcccgaggatgggctgttcctggtgcgggagtccgcgcgccaccccggcgactacgtcctgtgcgtgagctttggccgcgacgtcatccactaccgcgtgctgcaccgcgacggccacctcacaatcgatgaggccgtgttcttctgcaacctcatggacatggtggagcattacagcaaggacaagggcgctatctgcaccaagctggtgagaccaaagcggaaacacgggaccaagtcggccgaggaggagctggccagggcgggctggttactgaacctgcagcatttgacattgggagcacagatcggagagggagagtttggagctgtcctgcagggtgagtacctggggcaaaaggtggccgtgaagaatatcaagtgtgatgtgacagcccaggccttcctggacgagacggccgtcatgacgaagatgcaacacgagaacctggtgcgtctcctgggcgtgatcctgcaccaggggctgtacattgtcatggagcacgtgagcaagggcaacctggtgaactttctgcggacccggggtcgagccctcgtgaacaccgctcagctcctgcagttttctctgcacgtggccgagggcatggagtacctggagagcaagaagcttgtgcaccgcgacctggccgcccgcaacatcctggtctcagaggacctggtggccaaggtcagcgactttggcctggccaaagccgagcggaaggggctagactcaagccggctgcccgtcaagtggacggcgcccgaggctctcaaacacgggaagttcaccagcaagtcggatgtctggagttttggggtgctgctctgggaggtcttctcatatggacgggctccgtaccctaaaatgtcactgaaagaggtgtcggaggccgtggagaaggggtaccgcatggaaccccccgagggctgtccaggccccgtgcacgtcctcatgagcagctgctgggaggcagagcccgcccgccggccacccttccgcaaactggccgagaagctggcccgggagctacgcagtgcaggtgccccagcctccgtctcagggcaggacgccgacggctccacctcgccccgaagccaggagccctgaccccacccggtggggcccttggccccagaggaccgagagagtggagagtgcggcgtgggggcactgaccaggcccaaggagggtccaggcgggcaagtcatcctcctggtgcccacagcaggggctggcccacgtagggggctctgggcggcccgtggacaccccagacctgcgaaggatgatcgcccgataaagacggattctaaggactct

SEQ ID NO: 17531 - DNA, 2078 bp, Homo sapiens
  source 1..2078: mol_type = unassigned DNA
agcaaaatcaagcagttggttagcgaagggattcggtgcagatggatggaccgtctgggctgcggagtccacgggcctgaaacgcggtcgctcctgacccgtcctccgcaaccctcgtcccaccaggccgcggttcccggagcaggccggcgggtggcaggaagacaccaggctgcagggggctggagaagcaacacccctctccctccccgccagagaactggagcgcggggacctcggttgcggatgctagctgcgagccgggttgctaggcgacatcgagagaggaagaggagaaagtcttcatggggtgctagagcatcttaaatgtccctctcatgcagggacatttccctgctgaacgaagagaaggcagacctcggcgagggacccgtggtcagcagcagcttctggtgagcccccgcttcctccgagcctggcacccccctcccgtctcagccaggatgccaacgaggcgctgggccccgggcacccagtgtatcaccaaatgcgagcacacccgccccaagccaggggagctggccttccgcaagggcgacgtggtcaccatcctggaggcctgcgagaacaagagctggtaccgcgtcaagcaccacaccagtggacaggaggggctgctggcagctggggcgctgcgggagcgggaggccctctccgcagaccccaagctcagcctcatgccgtggttccacgggaagatctcgggccaggaggctgtccagcagctgcagcctcccgaggatgggctgttcctggtgcgggagtccgcgcgccaccccggcgactacgtcctgtgcgtgagctttggccgcgacgtcatccactaccgcgtgctgcaccgcgacggccacctcacaatcgatgaggccgtgttcttctgcaacctcatggacatggtggagcattacagcaaggacaagggcgctatctgcaccaagctggtgagaccaaagcggaaacacgggaccaagtcggccgaggaggagctggccagggcgggctggttactgaacctgcagcatttgacattgggagcacagatcggagagggagagtttggagctgtcctgcagggtgagtacctggggcaaaaggtggccgtgaagaatatcaagtgtgatgtgacagcccaggccttcctggacgagacggccgtcatgacgaagatgcaacacgagaacctggtgcgtctcctgggcgtgatcctgcaccaggggctgtacattgtcatggagcacgtgagcaagggcaacctggtgaactttctgcggacccggggtcgagccctcgtgaacaccgctcagctcctgcagttttctctgcacgtggccgagggcatggagtacctggagagcaagaagcttgtgcaccgcgacctggccgcccgcaacatcctggtctcagaggacctggtggccaaggtcagcgactttggcctggccaaagccgagcggaaggggctagactcaagccggctgcccgtcaagtggacggcgcccgaggctctcaaacacgggaagttcaccagcaagtcggatgtctggagttttggggtgctgctctgggaggtcttctcatatggacgggctccgtaccctaaaatgtcactgaaagaggtgtcggaggccgtggagaaggggtaccgcatggaaccccccgagggctgtccaggccccgtgcacgtcctcatgagcagctgctgggaggcagagcccgcccgccggccacccttccgcaaactggccgagaagctggcccgggagctacgcagtgcaggtgccccagcctccgtctcagggcaggacgccgacggctccacctcgccccgaagccaggagccctgaccccacccggtggggcccttggccccagaggaccgagagagtggagagtgcggcgtgggggcactgaccaggcccaaggagggtccaggcgggcaagtcatcctcctggtgcccacagcaggggctggcccacgtagggggctctgggcggcccgtggacaccccagacctgcgaaggatgatcgcccgataaagacggattctaaggactct

SEQ ID NO: 17532 - DNA, 3933 bp, Homo sapiens
  source 1..3933: mol_type = unassigned DNA
aaagggggcagcaggaccgggcccaccagccatccgggctgcccacgcaaaccacagggccgaatccggagccgcccaaggccacacagctaagccgagtgcgtgaatgcttatgtgaccgtgtgaaggaggttcccaccgtgtggctgtgggggatggaaaaaggctacttggaaagatgtagaagaccttcgagtaaacagttacgtttcagaaacagagcctgctcagaatgtgtacttggtgggattctattcttagggacgcttctttcttctgagagacccgagctctgtggcgagtggcacaggcagggccccttcctttcctagttgggttctgacagctccgaggcagtggtttacacaaccaacacgaaacatttctacgatccacccgattcctcccctcattgatattcaggaagcagctctccttcccctgccttcagctcaagtttgctgagcttttgtttcatttgtgaatacttcttgctggaagtccctcacccagagaccagtgctcccaacggcagagcagcgggggagataaagaactggtgacacgtggctgtacattcagcacagctgtggtgtccccaagtgccatgacccaggagccattcagagaggagctggcctatgaccggatgcccacgctggagcggggccggcaagaccccgccagctatgccccagacgcgaagccgagcgacctgcagctgtcgaagagactgcccccctgcttcagccacaagacgtgggtcttctctgtgctgatggggagctgcctcctggtgacctcggggttttcgctgtacctggggaacgtgttcccggctgagatggattacttgcgctgtgctgcaggctcttgcatcccctcggcaattgtgagcttcaccgtctccaggaggaacgccaatgtgattcccaactttcagatattgtttgtttccacgtttgctgtgaccactacgtgtttaatttggtttggatgcaaactagtcctgaacccatcagcaataaacatcaacttcaacctcatcctgctgctcctgctggagctgctcatggcggccacggtgatcatcgctgcacggtccagcgaggaggactgcaagaaaaagaagggctccatgtctgacagcgccaacattctggacgaagtgccatttcctgctcgggtcctgaaatcttactcagtcgtcgaggtaatcgcaggcatctctgccgtcctcggggggatcattgccctgaacgtggatgactcagtttcaggcccacacctctcagtgacgttcttttggatcctagtggcctgctttccaagtgccattgccagtcatgtggcagcagagtgtcccagcaagtgtctggtggaggtcctgattgccataagcagcctcacgtctccgctgctgttcacagcctctggatatctgtcattcagcatcatgagaatcgtggagatgtttaaggattacccgccagccataaaaccatcctacgatgtgctgctgctgctgctgctgctagtgctcctgctgcaggccggcctcaacacgggcaccgccatccagtgcgtgcgcttcaaggtcagtgcaaggctgcagggtgcatcctgggacacccagaacggcccgcaggagcgcctggctggggaggtggccaggagccccctgaaggagttcgacaaggagaaagcctggagagccgtcgtggtgcaaatggcccagtgacccccagacgcggaaaccgggtggcagcgcccagcctggccccaagcatggaaacgcacaacccctaatcgccctgagctactgcttctaacacctcttttcccttgtgtgagggcaaaccaggctgcaggtggggttttcacttcctagggtagtttaattttaaaataggccaatgttggctagtctgtgcctcagtgagatcagtcagctccgagtggctcccgtgtcgtaacagcaggagcatggccgcaacttcccaggccgaggaagggcccccggctcggcctcttgagagccccacccctgaactggccccagctcctcttcctgcctctctcatggcttgggctggagtgggctctctggacctgaccagactgtgggtccctgcgtctcctgcccactctgaccgggcttcctccctccacgcttagggtctgtcccgggtactcagtcagcccagtgggatcttacccacttccctgcaaggtgcacctgccccaggctcaggctgcccagcggctcttcctggacagtgagagcagggctgggcgcctctgtcctggcccgggagccgcaggggcccctcctccagagcctgggcgcaagcgacacaggctgccgctgctctcccaggtgaaatccacaccagtccacgccgggtcgcctgccctgtctccctacttagacccagtcattctagagggatccaccgccacactggccggcccacgtcctgggtgctgtcatgcccagcttggagtgccacgtggccgctgcccacgtcccgggcactgtcatgcccagcttggagtgccacatggccgctgcccacgtcccgggcactgtcatgcccagcttggagtgccacgtggccgctgctgtgacaggcagtgttcttgggggtggggctgcatccaaggctttgtaaaccggctggaccacgtctccctggccccagtgaccgggggaagctgagcccctccctcctgtgtttgctcccattactcaaaatgcaggacagatcaggtcagagcccaggaattctcacaggttcacccagcgccctctacctcctagcaagtactttgtcttgatcctcactgagaaggccccagggcagcggtcttctccatctccgctgttttggggtcttagggtacagcccaggcggtcactgcccacctgccaggctgcagggacagttgggtgtgagaataacactggctttgggtagtgccatggccaggagtgggtttccctgcgtctcctcgtcccgagggcgcctgggtcctcccagctgacggcagtaaatccacagtgagttggggcgactgtgaaactggaatgctgttactttgataattactttccagcaggtgttttccttcacaatggttttgtttctttccttctgatctgagaagacatgaacgttttctcttcaccgccgtggggtgtattgactggtcccccatgggctgctggaaaggcccggagatgcatctgtggcctggggccatcaagatcaaagaaccaggaggcctgggagatgcagctggatggggcggcctgcagaccctgccagggggtttgaggaccctcccaggtttcccactgcggaacaggagtgactctggctgccaagataccttcatggtgttcatgacaagtggaatcattattttcaaccattgaagggggatgcaggcaagacaccttcccagctgctcctagaggggacaagccaggccctctctgcagtcctcggcagctccggaaggacacagtcaggggccgggcaaacactttggccacagccccaaacaagcgccaccgtgggagaggagaggctgctgtcactggtaccggatgcagaccccaccctgtctgcaggccacccccacctccctgcagctttgaggctggcggggtctgctcctgggaatggggtgggagccacagggacgacccggggcgggctgatgtcttcttgggggcagaccagagagctcaagtttcagagtcagaattaggcacttggagcgtttttgctggcttgcactttcttattttcttattttagagcgcttaaaaaatccggaaaaatggggtttaaaagaactgtctctttcagtctacatttttgtttaatacgcttgagcaataaacgctgacttgcagacgtg

SEQ ID NO: 17533 - DNA, 3601 bp, Homo sapiens
  source 1..3601: mol_type = unassigned DNA
gtaagtgctcagacattaagccgttgagtagaggcatgttttgcaatctctcgtttagctaccaattggagcagtttaacgtgcttgagtccccggcgtgatgtgttcatggacgaagttgccgatggatgttgtcaggtgttgcacctggagggcccagatggatcaatgaggcatttaaagtgtagaatctcaccctgaacccagactattcagataaagaactggtgacacgtggctgtacattcagcacagctgtggtgtccccaagtgccatgacccaggagccattcagagaggagctggcctatgaccggatgcccacgctggagcggggccggcaagaccccgccagctatgccccagacgcgaagccgagcgacctgcagctgtcgaagagactgcccccctgcttcagccacaagacgtgggtcttctctgtgctgatggggagctgcctcctggtgacctcggggttttcgctgtacctggggaacgtgttcccggctgagatggattacttgcgctgtgctgcaggctcttgcatcccctcggcaattgtgagcttcaccgtctccaggaggaacgccaatgtgattcccaactttcagatattgtttgtttccacgtttgctgtgaccactacgtgtttaatttggtttggatgcaaactagtcctgaacccatcagcaataaacatcaacttcaacctcatcctgctgctcctgctggagctgctcatggcggccacggtgatcatcgctgcacggtccagcgaggaggactgcaagaaaaagaagggctccatgtctgacagcgccaacattctggacgaagtgccatttcctgctcgggtcctgaaatcttactcagtcgtcgaggtaatcgcaggcatctctgccgtcctcggggggatcattgccctgaacgtggatgactcagtttcaggcccacacctctcagtgacgttcttttggatcctagtggcctgctttccaagtgccattgccagtcatgtggcagcagagtgtcccagcaagtgtctggtggaggtcctgattgccataagcagcctcacgtctccgctgctgttcacagcctctggatatctgtcattcagcatcatgagaatcgtggagatgtttaaggattacccgccagccataaaaccatcctacgatgtgctgctgctgctgctgctgctagtgctcctgctgcaggccggcctcaacacgggcaccgccatccagtgcgtgcgcttcaaggtcagtgcaaggctgcagggtgcatcctgggacacccagaacggcccgcaggagcgcctggctggggaggtggccaggagccccctgaaggagttcgacaaggagaaagcctggagagccgtcgtggtgcaaatggcccagtgacccccagacgcggaaaccgggtggcagcgcccagcctggccccaagcatggaaacgcacaacccctaatcgccctgagctactgcttctaacacctcttttcccttgtgtgagggcaaaccaggctgcaggtggggttttcacttcctagggtagtttaattttaaaataggccaatgttggctagtctgtgcctcagtgagatcagtcagctccgagtggctcccgtgtcgtaacagcaggagcatggccgcaacttcccaggccgaggaagggcccccggctcggcctcttgagagccccacccctgaactggccccagctcctcttcctgcctctctcatggcttgggctggagtgggctctctggacctgaccagactgtgggtccctgcgtctcctgcccactctgaccgggcttcctccctccacgcttagggtctgtcccgggtactcagtcagcccagtgggatcttacccacttccctgcaaggtgcacctgccccaggctcaggctgcccagcggctcttcctggacagtgagagcagggctgggcgcctctgtcctggcccgggagccgcaggggcccctcctccagagcctgggcgcaagcgacacaggctgccgctgctctcccaggtgaaatccacaccagtccacgccgggtcgcctgccctgtctccctacttagacccagtcattctagagggatccaccgccacactggccggcccacgtcctgggtgctgtcatgcccagcttggagtgccacgtggccgctgcccacgtcccgggcactgtcatgcccagcttggagtgccacatggccgctgcccacgtcccgggcactgtcatgcccagcttggagtgccacgtggccgctgctgtgacaggcagtgttcttgggggtggggctgcatccaaggctttgtaaaccggctggaccacgtctccctggccccagtgaccgggggaagctgagcccctccctcctgtgtttgctcccattactcaaaatgcaggacagatcaggtcagagcccaggaattctcacaggttcacccagcgccctctacctcctagcaagtactttgtcttgatcctcactgagaaggccccagggcagcggtcttctccatctccgctgttttggggtcttagggtacagcccaggcggtcactgcccacctgccaggctgcagggacagttgggtgtgagaataacactggctttgggtagtgccatggccaggagtgggtttccctgcgtctcctcgtcccgagggcgcctgggtcctcccagctgacggcagtaaatccacagtgagttggggcgactgtgaaactggaatgctgttactttgataattactttccagcaggtgttttccttcacaatggttttgtttctttccttctgatctgagaagacatgaacgttttctcttcaccgccgtggggtgtattgactggtcccccatgggctgctggaaaggcccggagatgcatctgtggcctggggccatcaagatcaaagaaccaggaggcctgggagatgcagctggatggggcggcctgcagaccctgccagggggtttgaggaccctcccaggtttcccactgcggaacaggagtgactctggctgccaagataccttcatggtgttcatgacaagtggaatcattattttcaaccattgaagggggatgcaggcaagacaccttcccagctgctcctagaggggacaagccaggccctctctgcagtcctcggcagctccggaaggacacagtcaggggccgggcaaacactttggccacagccccaaacaagcgccaccgtgggagaggagaggctgctgtcactggtaccggatgcagaccccaccctgtctgcaggccacccccacctccctgcagctttgaggctggcggggtctgctcctgggaatggggtgggagccacagggacgacccggggcgggctgatgtcttcttgggggcagaccagagagctcaagtttcagagtcagaattaggcacttggagcgtttttgctggcttgcactttcttattttcttattttagagcgcttaaaaaatccggaaaaatggggtttaaaagaactgtctctttcagtctacatttttgtttaatacgcttgagcaataaacgctgacttgcagacgtg

SEQ ID NO: 17534 - DNA, 1594 bp, Homo sapiens
  source 1..1594: mol_type = unassigned DNA
tttgtgaatacttcttgctggaagtccctcacccagagaccagtgctcccaacggcagagcagcgggggagataaagaactggtgacacgtggctgtacattcagcacagctgtggtgtccccaagtgccatgacccaggagccattcagagaggagctggcctatgaccggatgcccacgctggagcggggccggcaagaccccgccagctatgccccagacgcgaagccgagcgacctgcagctgtcgaagagactgcccccctgcttcagccacaagacgtgggtcttctctgtgctgatggggtgcatcccctcggcaattgtgagcttcaccgtctccaggaggaacgccaatgtgattcccaactttcagatattgtttgtttccacgtttgctgtgaccactacgtgtttaatttggtttggatgcaaactagtcctgaacccatcagcaataaacatcaacttcaacctcatcctgctgctcctgctggagctgctcatggcggccacggtgatcatcgctgcacggtccagcgaggaggactgcaagaaaaagaagggctccatgtctgacagcgccaacattctggacgaagtgccatttcctgctcgggtcctgaaatcttactcagtcgtcgaggtaatcgcaggcatctctgccgtcctcggggggatcattgccctgaacgtggatgactcagtttcaggcccacacctctcagtgacgttcttttggatcctagtggcctgctttccaagtgccattgccagtcatgtggcagcagagtgtcccagcaagtgtctggtggaggtcctgattgccataagcagcctcacgtctccgctgctgttcacagcctctggatatctgtcattcagcatcatgagaatcgtggagatgtttaaggattacccgccagccataaaaccatcctacgatgtgctgctgctgctgctgctgctagtgctcctgctgcaggccggcctcaacacgggcaccgccatccagtgcgtgcgcttcaaggtcagtgcaaggctgcagggtgcatcctgggacacccagaacggcccgcaggagcgcctggctggggaggtggccaggagccccctgaaggagttcgacaaggagaaagcctggagagccgtcgtggtgcaaatggcccagtgacccccagacgcggaaaccgggtggcagcgcccagcctggccccaagcatggaaacgcacaacccctaatcgccctgagctactgcttctaacacctcttttcccttgtgtgagggcaaaccaggctgcaggtggggttttcacttcctagggtagtttaattttaaaataggccaatgttggctagtctgtgcctcagtgagatcagtcagctccgagtggctcccgtgtcgtaacagcaggagcatggccgcaacttcccaggccgaggaagggcccccggctcggcctcttgagagccccacccctgaactggccccagctcctcttcctgcctctctcatggcttgggctggagtgggctctctggacctgaccagactgtgggtccctgcgtctcctgcccactctgaccgggctt

SEQ ID NO: 17535 - DNA, 758 bp, Homo sapiens
  source 1..758: mol_type = unassigned DNA
agtgctcccaacggcagagcagcgggggagataaagaactggtgacacgtggctgtacattcagcacagctgtggtgtccccaagtgccatgacccaggagccattcagagaggagctggcctatgaccggatgcccacgctggagcggggccggcaagaccccgccagctatgccccagacgcgaagccgagcgacctgcagctgtcgaagagactgcccccctgcttcagccacaagacgtgggtcttctctgtgctgatggggtgcatcccctcggcaattgtgagcttcaccgtctccaggaggaacgccaatgtgattcccaactttcagatattgtttgtttccacgtttgctgtgaccactacgtgtttaatttggtttggatgcaaactagtcctgaacccatcagcaataaacatcaacttcaacctcatcctgctgctcctgctggagctgctcatggcggccacggtgatcatcgctgcacggtccagcgaggaggactgcaagaaaaagaagggctccatgtctgacagcgccaacattctggacgaagtgccatttcctgctcgggtcctgaaatcttactcagtcgtcgaggtaatcgcaggcatctctgccgtcctcggggggatcattgccctgaacgtggatgactcagtttcaggcccacacctctcagtgacgttcttttggatcctagtggcctgctttccaagtgccattgccagtcatgtggcagcagagtgtccc

SEQ ID NO: 17536 - DNA, 1287 bp, Homo sapiens
  source 1..1287: mol_type = unassigned DNA
gcgtgatgtgttcatggacgaagttgccgatggatgttgtcaggtgttgcacctggagggcccagatggatcaatgaggcatttaaagtgtagaatctcaccctgaacccagactattcagataaagaactggtgacacgtggctgtacattcagcacagctgtggtgtccccaagtgccatgacccaggagccattcagagaggagctggcctatgaccggatgcccacgctggagcggggccggcaagaccccgccagctatgccccagacgcgaagccgagcgacctgcagctgtcgaagagactgcccccctgcttcagccacaagacgtgggtcttctctgtgctgatggggagctgcctcctggtgacctcggggttttcgctgtacctggggaacgtgttcccggctgagatggattacttgcgctgtgctgcaggctctatcaacttcaacctcatcctgctgctcctgctggagctgctcatggcggccacggtgatcatcgctgcacggtccagcgaggaggactgcaagaaaaagaagggctccatgtctgacagcgccaacattctggacgaagtgccatttcctgctcgggtcctgaaatcttactcagtcgtcgaggtaatcgcaggcatctctgccgtcctcggggggatcattgccctgaacgtggatgactcagtttcaggcccacacctctcagtgacgttcttttggatcctagtggcctgctttccaagtgccattgccagtcatgtggcagcagagtgtcccagcaagtgtctggtggaggtcctgattgccataagcagcctcacgtctccgctgctgttcacagcctctggatatctgtcattcagcatcatgagaatcgtggagatgtttaaggattacccgccagccataaaaccatcctacgatgtgctgctgctgctgctgctgctagtgctcctgctgcaggccggcctcaacacgggcaccgccatccagtgcgtgcgcttcaaggtcagtgcaaggctgcagggtgcatcctgggacacccagaacggcccgcaggagcgcctggctggggaggtggccaggagccccctgaaggagttcgacaaggagaaagcctggagagccgtcgtggtgcaaatggcccagtgacccccagacgcggaaaccgggtggcagcgcccagcctggccccaagcatggaaacgcacaacccctaatcgccctgagctactgcttctaacacctcttttcccttgtgtgagggcaaaccaggctgca

SEQ ID NO: 17537 - DNA, 1336 bp, Homo sapiens
  source 1..1336: mol_type = unassigned DNA
gaatacttcttgctggaagtccctcacccagagaccagtgctcccaacggcagagcagcgggggagctgcctcctggtgacctcggggttttcgctgtacctggggaacgtgttcccggctgagatggattacttgcgctgtgctgcaggctcttgcatcccctcggcaattgtgagcttcaccgtctccaggaggaacgccaatgtgattcccaactttcagatattgtttgtttccacgtttgctgtgaccactacgtgtttaatttggtttggatgcaaactagtcctgaacccatcagcaataaacatcaacttcaacctcatcctgctgctcctgctggagctgctcatggcggccacggtgatcatcgctgcacggtccagcgaggaggactgcaagaaaaagaagggctccatgtctgacagcgccaacattctggacgaagtgccatttcctgctcgggtcctgaaatcttactcagtcgtcgaggtaatcgcaggcatctctgccgtcctcggggggatcattgccctgaacgtggatgactcagtttcaggcccacacctctcagtgacgttcttttggatcctagtggcctgctttccaagtgccattgccagtcatgtggcagcagagtgtcccagcaagtgtctggtggaggtcctgattgccataagcagcctcacgtctccgctgctgttcacagcctctggatatctgtcattcagcatcatgagaatcgtggagatgtttaaggattacccgccagccataaaaccatcctacgatgtgctgctgctgctgctgctgctagtgctcctgctgcaggccggcctcaacacgggcaccgccatccagtgcgtgcgcttcaaggtcagtgcaaggctgcagggtgcatcctgggacacccagaacggcccgcaggagcgcctggctggggaggtggccaggagccccctgaaggagttcgacaaggagaaagcctggagagccgtcgtggtgcaaatggcccagtgacccccagacgcggaaaccgggtggcagcgcccagcctggccccaagcatggaaacgcacaacccctaatcgccctgagctactgcttctaacacctcttttcccttgtgtgagggcaaaccaggctgcaggtggggttttcacttcctagggtagtttaattttaaaataggccaatgttggctagtctgtgcctcagtgagatcagtcagctccgagtggctcccgtgtcgtaacagcaggagcatggccgcaacttcccaggccgaggaagggcccccggctcggcctcttgagagccccacccctgaactgg

SEQ ID NO: 17538 - DNA, 1656 bp, Homo sapiens
  source 1..1656: mol_type = unassigned DNA
agagaccagtgctcccaacggcagagcagcgggggagataaagaactggtgacacgtggctgtacattcagcacagctgtggtgtccccaagtgccatgacccaggagccattcagagaggagctggcctatgaccggatgcccacgctggagcggggccggcaagaccccgccagctatgccccagacgcgaagccgagcgacctgcagctgtcgaagagactgcccccctgcttcagccacaagacgtgggtcttctctgtgctgatggggagctgcctcctggtgacctcggggttttcgctgtacctggggaacgtgttcccggctgagatggattacttgcgctgtgctgcaggctcttgcatcccctcggcaattgtgagcttcaccgtctccaggaggaacgccaatgtgatcaacttcaacctcatcctgctgctcctgctggagctgctcatggcggccacggtgatcatcgctgcacggtccagcgaggaggactgcaagaaaaagaagggctccatgtctgacagcgccaacattctggacgaagtgccatttcctgctcgggtcctgaaatcttactcagtcgtcgaggtaatcgcaggcatctctgccgtcctcggggggatcattgccctgaacgtggatgactcagtttcaggcccacacctctcagtgacgttcttttggatcctagtggcctgctttccaagtgccattgccagtcatgtggcagcagagtgtcccagcaagtgtctggtggaggtcctgattgccataagcagcctcacgtctccgctgctgttcacagcctctggatatctgtcattcagcatcatgagaatcgtggagatgtttaaggattacccgccagccataaaaccatcctacgatgtgctgctgctgctgctgctgctagtgctcctgctgcaggccggcctcaacacgggcaccgccatccagtgcgtgcgcttcaaggtcagtgcaaggctgcagggtgcatcctgggacacccagaacggcccgcaggagcgcctggctggggaggtggccaggagccccctgaaggagttcgacaaggagaaagcctggagagccgtcgtggtgcaaatggcccagtgacccccagacgcggaaaccgggtggcagcgcccagcctggccccaagcatggaaacgcacaacccctaatcgccctgagctactgcttctaacacctcttttcccttgtgtgagggcaaaccaggctgcaggtggggttttcacttcctagggtagtttaattttaaaataggccaatgttggctagtctgtgcctcagtgagatcagtcagctccgagtggctcccgtgtcgtaacagcaggagcatggccgcaacttcccaggccgaggaagggcccccggctcggcctcttgagagccccacccctgaactggccccagctcctcttcctgcctctctcatggcttgggctggagtgggctctctggacctgaccagactgtgggtccctgcgtctcctgcccactctgaccgggcttcctccctccacgcttagggtctgtcccgggtactcagtcagcccagtgggatcttacccacttccctgcaaggtgcacctgccccaggctcaggctgcccagcggctc

SEQ ID NO: 17539 - DNA, 507 bp, Homo sapiens
  source 1..507: mol_type = unassigned DNA
gatattattgataataaggcctctgtaaccatggctagttctgacgtaaaaccaaaatcagtaagtcatgccaaaaaatggtcagaagagatagaaaatctgtacagatttcaacaagcaggatatcgggatgaaaccgaatatagacaagtgaaacaagtttctatggtagatcgttggccggagacaggatatgtgaagaaacttcagagaagggacaatacgttctattactacaacaaacagagggaatgtgatgacaaagaagtccacaaagtgaaaatttatgcttactagcctgtcttctttgtattacttgtcaattatattttaagtattcatcatttccttctacatcatgtgtttgtcatttgatgaaataattcaagatgcagtctgcagtttaatgttttgtgaaacacaaaagccatgagaattggtatctgctaatcaccttgtcctgttctaagaactggctgcagatgcattaaagttgtactttcttgg

SEQ ID NO: 17540 - DNA, 625 bp, Homo sapiens
  source 1..625: mol_type = unassigned DNA
cctgctcgcggatcccgagtagagaacgcaagcacccacgcccgcctgcaagctcccgggcgcccccggcctctcctgctcggcggaacgaggataacccagtagagccggacccagggatattattgataataaggcctctgtaaccatggctagttctgacgtaaaaccaaaatcagtaagtcatgccaaaaaatggtcagaagagatagaaaatctgtacagatttcaacaagcaggatatcgggatgaaaccgaatatagacaagtgaaacaagtttctatggtagatcgttggccggagacaggatatgtgaagaaacttcagagaagggacaatacgttctattactacaacaaacagagggaatgtgatgacaaagaagtccacaaagtgaaaatttatgcttactagcctgtcttctttgtattacttgtcaattatattttaagtattcatcatttccttctacatcatgtgtttgtcatttgatgaaataattcaagatgcagtctgcagtttaatgttttgtgaaacacaaaagccatgagaattggtatctgctaatcaccttgtcctgttctaagaactggctgcagatgcattaaagttgtactttcttgg

SEQ ID NO: 17541 - DNA, 2023 bp, Homo sapiens
  source 1..2023: mol_type = unassigned DNA
acttttggtcgagcggagggcgcgcagctccaccgttgccaagacgccgcgtaaacacccgagcgcgcgcagccaggtgcgctccttggggctgctggctgctgcgtttgcggcgggaggtggtggccgcggtcccacgagagggggtatttttcgtcagccaagatgggttccaaaaggagaaatttgagctgtagtgaaaggcatcagaaattagtagatgaaaactactgcaaaaaattacatgtccaagctctaaaaaacgtcaacagtcaaatcaggaatcaaatggtgcagaatgaaaatgataaccgtgttcagcgcaagcaatttctcagattattacaaaatgaacaatttgagttggatatggaagaggccattcaaaaggcagaagaaaacaagagattgaaagaactccagctcaaacaagaagaaaaactggctatggaattggcaaaactgaaacatgaaagtctaaaggacgaaaagatgaggcaacaagtaagagaaaacagcattgagcttagagaattggagaagaaattaaaagcagcttacatgaataaagaaagggcagctcagattgctgaaaaggatgccattaaatatgaacaaatgaaacgtgatgctgaaatagccaaaaccatgatggaagaacacaagagaataataaaggaagagaatgctgcagaagacaaacgaaacaaagcgaaagcacagtactatcttgacttagagaaacaacttgaagaacaagaaaaaaaaaagcaggaagcttatgagcagctgctaaaagagaaactcatgattgatgaaattgttaggaagatctatgaagaagatcagttggaaaaacaacaaaagttagaaaaaatgaatgcaatgcgaaggtatatagaagagtttcagaaagagcaggctctctggagaaaaaagaaacgtgaggagatggaagaagaaaacagaaaaatcatagagtttgctaacatgcagcagcaaagagaagaagatcggatggcaaaagttcaagaaaatgaggagaaaaggctacagcttcagaatgcgttgacacagaaattagaagaaatgctgcggcaacgtgaagatttggaacaagtgcgacaagaattataccaggaagaacaagctgaaatatataagagcaagctaaaagaagaagcagaaaagaaattgagaaagcaaaaagagatgaagcaagattttgaagaacaaatggccttgaaggaattagtgctacaggctgcaaaagaggaagaggagaactttagaaaaactatgctagctaaatttgctgaggatgatcgaatagaattaatgaatgctcagaaacaaagaatgaagcagctggaacacaggagggctgtggaaaaacttattgaagagcgtcgccaacaattccttgcagacaaacaacgtgaactagaagagtggcagttgcagcaaaggcggcaaggatttattaatgcaattattgaagaagaaaggctaaaacttcttaaagagcatgctacaaacttactaggctatctccctaaaggagtatttaaaaaagaggatgatattgatctgcttggtgaagagttcaggaaagtatatcaacaaaggagtgaaatttgtgaagagaaatgatatcatcaaaattgggtaaagcatagattttttgcatgttaccactagatgtcagcataacttttgttttacagttcagtggcattaggtatccattgtctgtttggattttgtaaatcatcactgaatttcataacttgtaaacaattatcagatacaaattaattttaatcaagctgttatttttgtactgataatttcaaaatccgatttctacaacactacagagcactgtttgcatccccatcctcaagacagtatatttaccttgactaatacagaactctaccccaaagtgaactgccttctgtctgtgtttacgaactttacttacttgatttagccagggaaataaatatttggaattttc

SEQ ID NO: 17542 - DNA, 3147 bp, Homo sapiens
  source 1..3147: mol_type = unassigned DNA
atttgaggtgttctgaccagaagaagacagagcggatgatcattcattcaccacgttgacaacctcgcctgtgattgacagctggagtggcagaaagccatgagatttggtagttgggtctgaggggcgctcttttttttccttttctttctttctttctttttttttttttaaactgatttttgggggagagaagatctgcttttttttgcccccgctgctgtcttggaaacggagcgcttttatgctcagtgactcgggcgctttgcttcaggtcccgtagaccgaagatctgggaccagtagctcacgttgctggagacgttaagggatttttcgtcgtgcttttttttttttttttttttttttccgggggagtttgaatatttgtttcttttcacactggccttaaagaggatatattagaagttgaagtaggaagggagccagagaggccgatggcgcaaaggtacgacgatctaccccattacgggggcatggatggagtaggcatcccctccacgatgtatggggacccgcatgcagccaggtccatgcagccggtccaccacctgaaccacgggcctcctctgcactcgcatcagtacccgcacacagctcataccaacgccatggcccccagcatgggctcctctgtcaatgacgctttaaagagagataaagatgccatttatggacaccccctcttccctctcttagcactgatttttgagaaatgtgaattagctacttgtaccccccgcgagccgggggtggcgggcggggacgtctgctcgtcagagtcattcaatgaagatatagccgtgttcgccaaacagattcgcgcagaaaaacctctattttcttctaatccagaactggataacttgatgattcaagccatacaagtattaaggtttcatctattggaattagagaaggtacacgaattatgtgacaatttctgccaccggtatattagctgtttgaaagggaaaatgcctatcgatttggtgatagacgatagagaaggaggatcaaaatcagacagtgaagatataacaagatcagcaaatctaactgaccagccctcttggaacagagatcatgatgacacggcatctactcgttcaggaggaaccccaggcccttccagcggtggccacacgtcacacagtggggacaacagcagtgagcaaggtgatggcttggacaacagtgtagcttcccccagcacaggtgacgatgatgaccctgataaggacaaaaagcgtcacaaaaagcgtggcatctttcccaaagtagccacaaatatcatgagggcgtggctgttccagcatctaacacacccttacccttctgaagaacagaaaaagcagttggcacaagacacgggactcaccatccttcaagtgaacaattggtttattaatgcccggagaagaatagtgcagcccatgatagaccagtccaaccgagcagtaagtcaaggaacaccttataatcctgatggacagcccatgggaggtttcgtaatggacggtcagcaacatatgggaattagagcaccaggacctatgagtggaatgggcatgaatatgggcatggaggggcagtggcactacatgtaaccttcatctagttaaccaatcgcaaagcaagggggaaggctgcaaagtatgccaggggagtatgtagcccggggtggtccaatgggtgtgagtatgggacagccaagttatacccaaccccagatgcccccccatcctgctcagctgcgtcatgggccccccatgcatacgtacattcctggacaccctcaccacccaacagtgatgatgcatggaggaccgccccaccctggaatgccaatgtcagcatcaagccccacagttcttaatacaggagacccaacaatgagtggacaagtcatggacattcatgctcagtagcttaagggaatatgcattgtctgcaatggtgactgatttcaaatcatgttttttctgcaatgactgtggagttccattcttggcatctactctggaccaaggagcatccctaattcttcatagggacctttaaaaagcaggaaataccaactgaagtcaatttgggggacatgctaaataactatataagacattaagagaacaaagagtgaaatattgtaaatgctattatactgttatccatattacgttgtttcttatagattttttaaaaaaaatgtgaaatttttccacactatgtgtgttgtttccatagctcttcacttcctccagaagcctccttacattaaaaagccttacagttatcctgcaagggacaggaaggtctgatttgcaggatttttagagcattaaaataactatcaggcagaagaatctttcttctcgcctaggatttcagccatgcgcgcgctctctctctttctctctcttttcctctctctccctctttctagcctggggcttgaatttgcatgtctaattcatttactcaccatatttgaattggcctgaacagatgtaaatcgggaaggatgggaaaaactgcagtcatcaacaatgattaatcagctgttgcaggcagtgtcttaaggagactggtaggaggaggcatggaaaccaaaaggccgtgtgtttagaagcctaattgtcacatcaagcatcattgtccccatgcaacaaccaccaccttatacatcacttcctgttttaagcagctctaaaacatagactgaagatttatttttaatatgttgactttatttctgagcaaagcatcggtcatgtgtgtattttttcatagtcccaccttggagcatttatgtagacattgtaaataaattttgtgcaaaaaggactggaaaaatgaactgtattattgcaatttttttttgtaaaagtagcagtttggtatgagttggcatgcatacaagatttactaagtgggataagctaattatactttttgttgtggataaacaaatgcttgttgatagcctttttctatcaagaaaccaaggagctaattattaataacaatcattgcacactgagtcttagcgtttctgatggaaacagtttggattgtataataacgccaagcccagttgtagtcgtttgagtgcagtaatgaaatc

SEQ ID NO: 17543 - DNA, 2659 bp, Homo sapiens
  source 1..2659: mol_type = unassigned DNA
gagacatgcccgtttcaccttctaccctcgggagaatgcttctctttctctctttctttcttctttccttcttgccaaaggagcctgaatttctaaactagttgatagggacacaagttagggcaagatcattcatcccagacgagtctcgctgagaattctgtattttttacttaaagctttaattttaaaataagaaaaactcagctttatagatgcaaggccaccgaattccgggtggaaggacccagctgtattgaccttatataagctcggtgccttgccgttctcccatttgcccgcctggcctcctgaaccttctttctctcctgtttgtcatgcagtacgacgatctaccccattacgggggcatggatggagtaggcatcccctccacgatgtatggggacccgcatgcagccaggtccatgcagccggtccaccacctgaaccacgggcctcctctgcactcgcatcagtacccgcacacagctcataccaacgccatggcccccagcatgggctcctctgtcaatgacgctttaaagagagataaagatgccatttatggacaccccctcttccctctcttagcactgatttttgagaaatgtgaattagctacttgtaccccccgcgagccgggggtggcgggcggggacgtctgctcgtcagagtcattcaatgaagatatagccgtgttcgccaaacagattcgcgcagaaaaacctctattttcttctaatccagaactggataacttgatgattcaagccatacaagtattaaggtttcatctattggaattagagaaggtacacgaattatgtgacaatttctgccaccggtatattagctgtttgaaagggaaaatgcctatcgatttggtgatagacgatagagaaggaggatcaaaatcagacagtgaagatataacaagatcagcaaatctaactgaccagccctcttggaacagagatcatgatgacacggcatctactcgttcaggaggaaccccaggcccttccagcggtggccacacgtcacacagtggggacaacagcagtgagcaaggtgatggcttggacaacagtgtagcttcccccagcacaggtgacgatgatgaccctgataaggacaaaaagcgtcacaaaaagcgtggcatctttcccaaagtagccacaaatatcatgagggcgtggctgttccagcatctaacacacccttacccttctgaagaacagaaaaagcagttggcacaagacacgggactcaccatccttcaagtgaacaattggtttattaatgcccggagaagaatagtgcagcccatgatagaccagtccaaccgagcagtaagtcaaggaacaccttataatcctgatggacagcccatgggaggtttcgtaatggacggtcagcaacatatgggaattagagcaccagggctgcaaagtatgccaggggagtatgtagcccggggtggtccaatgggtgtgagtatgggacagccaagttatacccaaccccagatgcccccccatcctgctcagctgcgtcatgggccccccatgcatacgtacattcctggacaccctcaccacccaacagtgatgatgcatggaggaccgccccaccctggaatgccaatgtcagcatcaagccccacagttcttaatacaggagacccaacaatgagtggacaagtcatggacattcatgctcagtagcttaagggaatatgcattgtctgcaatggtgactgatttcaaatcatgttttttctgcaatgactgtggagttccattcttggcatctactctggaccaaggagcatccctaattcttcatagggacctttaaaaagcaggaaataccaactgaagtcaatttgggggacatgctaaataactatataagacattaagagaacaaagagtgaaatattgtaaatgctattatactgttatccatattacgttgtttcttatagattttttaaaaaaaatgtgaaatttttccacactatgtgtgttgtttccatagctcttcacttcctccagaagcctccttacattaaaaagccttacagttatcctgcaagggacaggaaggtctgatttgcaggatttttagagcattaaaataactatcaggcagaagaatctttcttctcgcctaggatttcagccatgcgcgcgctctctctctttctctctcttttcctctctctccctctttctagcctggggcttgaatttgcatgtctaattcatttactcaccatatttgaattggcctgaacagatgtaaatcgggaaggatgggaaaaactgcagtcatcaacaatgattaatcagctgttgcaggcagtgtcttaaggagactggtaggaggaggcatggaaaccaaaaggccgtgtgtttagaagcctaattgtcacatcaagcatcattgtccccatgcaacaaccaccaccttatacatcacttcctgttttaagcagctctaaaacatagactgaagatttatttttaatatgttgactttatttctgagcaaagcatcggtcatgtgtgtattttttcatagtcccaccttggagcatttatgtagacattgtaaataaattttgtgcaaaaaggactggaaaaatgaa

SEQ ID NO: 17544 - DNA, 2373 bp, Homo sapiens
  source 1..2373: mol_type = unassigned DNA
aagccatgcatgttacctccaacctcagattttctctctgtctgagtgtctgtttgcagataacttaaaatcacccatctgcatccccactcaccctccagaaagcaaacgtggagagctcactctgcagaataaaatcaagaacaccacggttgtagctgctgtggactcggcggtctgagcagcctccccgagagccgtagttgctagtagaaattcgcgcagaaaaacctctattttcttctaatccagaactggataacttgatgattcaagccatacaagtattaaggtttcatctattggaattagagaaggtacacgaattatgtgacaatttctgccaccggtatattagctgtttgaaagggaaaatgcctatcgatttggtgatagacgatagagaaggaggatcaaaatcagacagtgaagatataacaagatcagcaaatctaactgaccagccctcttggaacagagatcatgatgacacggcatctactcgttcaggaggaaccccaggcccttccagcggtggccacacgtcacacagtggggacaacagcagtgagcaaggtgatggcttggacaacagtgtagcttcccccagcacaggtgacgatgatgaccctgataaggacaaaaagcgtcacaaaaagcgtggcatctttcccaaagtagccacaaatatcatgagggcgtggctgttccagcatctaacacacccttacccttctgaagaacagaaaaagcagttggcacaagacacgggactcaccatccttcaagtgaacaattggtttattaatgcccggagaagaatagtgcagcccatgatagaccagtccaaccgagcagtaagtcaaggaacaccttataatcctgatggacagcccatgggaggtttcgtaatggacggtcagcaacatatgggaattagagcaccaggacctatgagtggaatgggcatgaatatgggccccccatgcatacgtacattcctggacaccctcaccacccaacagtgatgatgcatggaggaccgccccaccctggaatgccaatgtcagcatcaagccccacagttcttaatacaggagacccaacaatgagtggacaagtcatggacattcatgctcagtagcttaagggaatatgcattgtctgcaatggtgactgatttcaaatcatgttttttctgcaatgactgtggagttccattcttggcatctactctggaccaaggagcatccctaattcttcatagggacctttaaaaagcaggaaataccaactgaagtcaatttgggggacatgctaaataactatataagacattaagagaacaaagagtgaaatattgtaaatgctattatactgttatccatattacgttgtttcttatagattttttaaaaaaaatgtgaaatttttccacactatgtgtgttgtttccatagctcttcacttcctccagaagcctccttacattaaaaagccttacagttatcctgcaagggacaggaaggtctgatttgcaggatttttagagcattaaaataactatcaggcagaagaatctttcttctcgcctaggatttcagccatgcgcgcgctctctctctttctctctcttttcctctctctccctctttctagcctggggcttgaatttgcatgtctaattcatttactcaccatatttgaattggcctgaacagatgtaaatcgggaaggatgggaaaaactgcagtcatcaacaatgattaatcagctgttgcaggcagtgtcttaaggagactggtaggaggaggcatggaaaccaaaaggccgtgtgtttagaagcctaattgtcacatcaagcatcattgtccccatgcaacaaccaccaccttatacatcacttcctgttttaagcagctctaaaacatagactgaagatttatttttaatatgttgactttatttctgagcaaagcatcggtcatgtgtgtattttttcatagtcccaccttggagcatttatgtagacattgtaaataaattttgtgcaaaaaggactggaaaaatgaactgtattattgcaatttttttttgtaaaagtagcagtttggtatgagttggcatgcatacaagatttactaagtgggataagctaattatactttttgttgtggataaacaaatgcttgttgatagcctttttctatcaagaaaccaaggagctaattattaataacaatcattgcacactgagtcttagcgtttctgatggaaacagtttggattgtataataacgccaagcccagttgtagtcgtttgagtgcagtaatgaaatctgaatctaaaataaaaacaagattatttttgtc

SEQ ID NO: 17545 - DNA, 3084 bp, Homo sapiens
  source 1..3084: mol_type = unassigned DNA
atttgaggtgttctgaccagaagaagacagagcggatgatcattcattcaccacgttgacaacctcgcctgtgattgacagctggagtggcagaaagccatgagatttggtagttgggtctgaggggcgctcttttttttccttttctttctttctttctttttttttttttaaactgatttttgggggagagaagatctgcttttttttgcccccgctgctgtcttggaaacggagcgcttttatgctcagtgactcgggcgctttgcttcaggtcccgtagaccgaagatctgggaccagtagctcacgttgctggagacgttaagggatttttcgtcgtgcttttttttttttttttttttttttccgggggagtttgaatatttgtttcttttcacactggccttaaagaggatatattagaagttgaagtaggaagggagccagagaggccgatggcgcaaaggtacgacgatctaccccattacgggggcatggatggagtaggcatcccctccacgatgtatggggacccgcatgcagccaggtccatgcagccggtccaccacctgaaccacgggcctcctctgcactcgcatcagtacccgcacacagctcataccaacgccatggcccccagcatgggctcctctgtcaatgacgctttaaagagagataaagatgccatttatggacaccccctcttccctctcttagcactgatttttgagaaatgtgaattagctacttgtaccccccgcgagccgggggtggcgggcggggacgtctgctcgtcagagtcattcaatgaagatatagccgtgttcgccaaacagattcgcgcagaaaaacctctattttcttctaatccagaactggataacttgatgattcaagccatacaagtattaaggtttcatctattggaattagagaaggtacacgaattatgtgacaatttctgccaccggtatattagctgtttgaaagggaaaatgcctatcgatttggtgatagacgatagagaaggaggatcaaaatcagacagtgaagatataacaagatcagcaaatctaactgaccagccctcttggaacagagatcatgatgacacggcatctactcgttcaggaggaaccccaggcccttccagcggtggccacacgtcacacagtggggacaacagcagtgagcaaggtgatggcttggacaacagtgtagcttcccccagcacaggtgacgatgatgaccctgataaggacaaaaagcgtcacaaaaagcgtggcatctttcccaaagtagccacaaatatcatgagggcgtggctgttccagcatctaacacacccttacccttctgaagaacagaaaaagcagttggcacaagacacgggactcaccatccttcaagtgaacaattggtttattaatgcccggagaagaatagtgcagcccatgatagaccagtccaaccgagcagtaagtcaaggaacaccttataatcctgatggacagcccatgggaggtttcgtaatggacggtcagcaacatatgggaattagagcaccagggctgcaaagtatgccaggggagtatgtagcccggggtggtccaatgggtgtgagtatgggacagccaagttatacccaaccccagatgcccccccatcctgctcagctgcgtcatgggccccccatgcatacgtacattcctggacaccctcaccacccaacagtgatgatgcatggaggaccgccccaccctggaatgccaatgtcagcatcaagccccacagttcttaatacaggagacccaacaatgagtggacaagtcatggacattcatgctcagtagcttaagggaatatgcattgtctgcaatggtgactgatttcaaatcatgttttttctgcaatgactgtggagttccattcttggcatctactctggaccaaggagcatccctaattcttcatagggacctttaaaaagcaggaaataccaactgaagtcaatttgggggacatgctaaataactatataagacattaagagaacaaagagtgaaatattgtaaatgctattatactgttatccatattacgttgtttcttatagattttttaaaaaaaatgtgaaatttttccacactatgtgtgttgtttccatagctcttcacttcctccagaagcctccttacattaaaaagccttacagttatcctgcaagggacaggaaggtctgatttgcaggatttttagagcattaaaataactatcaggcagaagaatctttcttctcgcctaggatttcagccatgcgcgcgctctctctctttctctctcttttcctctctctccctctttctagcctggggcttgaatttgcatgtctaattcatttactcaccatatttgaattggcctgaacagatgtaaatcgggaaggatgggaaaaactgcagtcatcaacaatgattaatcagctgttgcaggcagtgtcttaaggagactggtaggaggaggcatggaaaccaaaaggccgtgtgtttagaagcctaattgtcacatcaagcatcattgtccccatgcaacaaccaccaccttatacatcacttcctgttttaagcagctctaaaacatagactgaagatttatttttaatatgttgactttatttctgagcaaagcatcggtcatgtgtgtattttttcatagtcccaccttggagcatttatgtagacattgtaaataaattttgtgcaaaaaggactggaaaaatgaactgtattattgcaatttttttttgtaaaagtagcagtttggtatgagttggcatgcatacaagatttactaagtgggataagctaattatactttttgttgtggataaacaaatgcttgttgatagcctttttctatcaagaaaccaaggagctaattattaataacaatcattgcacactgagtcttagcgtttctgatggaaacagtttggattgtataataacgccaagcccagttgtagtcgtttgagtgcagtaatgaaatctgaatctaaaataaaaacaagattatttttgtc

SEQ ID NO: 17546 - DNA, 579 bp, Homo sapiens
  source 1..579: mol_type = unassigned DNA
acagatcatagcggaatcagaatttccagcaaggaaaatcttttcatggtgaattaagtggtggatgaagaaaaatggtgatgaaaaaagccctcttggaacagagatcatgatgacacggcatctactcgttcaggaggaaccccaggcccttccagcggtggccacacgtcacacagtggggacaacagcagtgagcaagcacccttacccttctgaagaacagaaaaagcagttggcacaagacacgggactcaccatccttcaagtgaacaattggtttattaatgcccggagaagaatagtgcagcccatgatagaccagtccaaccgagcagtaagtcaaggaacaccttataatcctgatggacagcccatgggaggtttcgtaatggacggtcagcaacatatgggaattagagcaccaggacctatgagtggaatgggcatgaatatgggcatggaggggcagtggcactacatgtaaccttcatctagttaaccaatcgcaaagcaagggggaaggctgcaaagtatgccaggggagtatgtagcccggggtggtccaatgggtgtgag

SEQ ID NO: 17547 - DNA, 1499 bp, Homo sapiens
  source 1..1499: mol_type = unassigned DNA
atgcagccaggtccatgcagccggtccaccacctgaaccacgggcctcctctgcactcgcatcagtacccgcacacagctcataccaacgccatggcccccagcatgggctcctctgtcaatgacgctttaaagagagataaagatgccatttatggacaccccctcttccctctcttagcactgatttttgagaaatgtgaattagctacttgtaccccccgcgagccgggggtggcgggcggggacgtctgctcgtcagagtcattcaatgaagatatagccgtgttcgccaaacagattcgcgcagaaaaacctctattttcttctaatccagaactggataacttgatgattcaagccatacaagtattaaggtttcatctattggaattagagaaggtacacgaattatgtgacaatttctgccaccggtatattagctgtttgaaagggaaaatgcctatcgatttggtgatagacgatagagaaggaggatcaaaatcagacagtgaagatataacaagatcagcaaatctaactgaccagccctcttggaacagagatcatgatgacacggcatctactcgttcaggaggaaccccaggcccttccagcggtggccacacgtcacacagtggggacaacagcagtgagcaagcacccttacccttctgaagaacagaaaaagcagttggcacaagacacgggactcaccatccttcaagtgaacaattggtttattaatgcccggagaagaatagtgcagcccatgatagaccagtccaaccgagcagtaagtcaaggaacaccttataatcctgatggacagcccatgggaggtttcgtaatggacggtcagcaacatatgggaattagagcaccagggctgcaaagtatgccaggggagtatgtagcccggggtggtccaatgggtgtgagtatgggacagccaagttatacccaaccccagatgcccccccatcctgctcagctgcgtcatgggccccccatgcatacgtacattcctggacaccctcaccacccaacagtgatgatgcatggaggaccgccccaccctggaatgccaatgtcagcatcaagccccacagttcttaatacaggagacccaacaatgagtggacaagtcatggacattcatgctcagtagcttaagggaatatgcattgtctgcaatggtgactgatttcaaatcatgttttttctgcaatgactgtggagttccattcttggcatctactctggaccaaggagcatccctaattcttcatagggacctttaaaaagcaggaaataccaactgaagtcaatttgggggacatgctaaataactatataagacattaagagaacaaagagtgaaatattgtaaatgctattatactgttatccatattacgttgtttcttatagattttttaaaaaaaatgtgaaatttttccacactatgtgtgttgtttccatagctcttcacttcct

SEQ ID NO: 17548 - DNA, 558 bp, Homo sapiens
  source 1..558: mol_type = unassigned DNA
ggagaagtcagctccaggaatgaagtcactgctgacattttacaaatgtggttcagagctgctgcctgctgccgtgtggtcggccggcggttctccaagtttgtttagtgatctcaaaagtaaaaaaggaaagaaattctcgagagaccacattgaggtgactatatcaaattgcggagtgaatggaaatgctaaaggtgatggcttggacaacagtgtagcttcccccagcacaggtgacgatgatgaccctgataaggacaaaaagcgtcacaaaaagcgtggcatctttcccaaagtagccacaaatatcatgagggcgtggctgttccagcatctaacacacccttacccttctgaagaacagaaaaagcagttggcacaagacacgggactcaccatccttcaagtgaacaattggtttattaatgcccggagaagaatagtgcagcccatgatagaccagtccaaccgagcagtaagtcaaggaacaccttataatcctgatggacagcccatgggaggtttcgtaatggacggtcagcaacatatgggaat

SEQ ID NO: 17549 - DNA, 1913 bp, Homo sapiens
  source 1..1913: mol_type = unassigned DNA
gttgacagtcggccccacggccatggacgtcctttccccaagttagctgagcgcctgccaccgagatcccccgagcctgggcttcgcgcggccgcctaggaggaacccgcaggaaccagccctccccaactctccgcccggcgcctttctcctccaccggatcctggatgtgcagtggaggggacgagggcttgtcgggtgggaaacttaattcaaaatggctgctggaaacgcttgggttttattcgtagcaaatgttgccaatttctccggccagatacgctaaaccgatcctcagataccgtccatggctcagggcctccgacttcagggctccaggaggaaggggagacaccccctcttccctctcttagcactgatttttgagaaatgtgaattagctacttgtaccccccgcgagccgggggtggcgggcggggacgtctgctcgtcagagtcattcaatgaagatatagccgtgttcgccaaacagattcgcgcagaaaaacctctattttcttctaatccagaactggataacttgatgattcaagccatacaagtattaaggtttcatctattggaattagagaaggtacacgaattatgtgacaatttctgccaccggtatattagctgtttgaaagggaaaatgcctatcgatttggtgatagacgatagagaaggaggatcaaaatcagacagtgaagatataacaagatcagcaaatctaactgaccagccctcttggaacagagatcatgatgacacggcatctactcgttcaggaggaaccccaggcccttccagcggtggccacacgtcacacagtggggacaacagcagtgagcaaggtgatggcttggacaacagtgtagcttcccccagcacaggtgacgatgatgaccctgataaggacaaaaagcgtcacaaaaagcgtggcatctttcccaaagtagccacaaatatcatgagggcgtggctgttccagcatctaacacacccttacccttctgaagaacagaaaaagcagttggcacaagacacgggactcaccatccttcaagtgaacaattggtttattaatgcccggagaagaatagtgcagcccatgatagaccagtccaaccgagcagtaagtcaaggaacaccttataatcctgatggacagcccatgggaggtttcgtaatggacggtcagcaacatatgggaattagagcaccaggacctatgagtggaatgggcatgaatatgggcatggaggggcagtggcactacatgtaaccttcatctagttaaccaatcgcaaagcaagggggaaggctgcaaagtatgccaggggagtatgtagcccggggtggtccaatgggtgtgagtatgggacagccaagttatacccaaccccagatgcccccccatcctgctcagctgcgtcatgggccccccatgcatacgtacattcctggacaccctcaccacccaacagtgatgatgcatggaggaccgccccaccctggaatgccaatgtcagcatcaagccccacagttcttaatacaggagacccaacaatgagtggacaagtcatggacattcatgctcagtagcttaagggaatatgcattgtctgcaatggtgactgatttcaaatcatgttttttctgcaatgactgtggagttccattcttggcatctactctggaccaaggagcatccctaattcttcatagggacctttaaaaagcaggaaataccaactgaagtcaatttgggggacatgctaaataactatataagacattaagagaacaaagagtgaaatattgtaaatgctattatactgttatccatattacgttgtttcttatagattttttaaaaaaaatgtgaaatttttccacactatgtgtgttg

SEQ ID NO: 17550 - DNA, 2392 bp, Homo sapiens
  source 1..2392: mol_type = unassigned DNA
cggaatccacctctccgcctgtgcaacacacactttacacacgcacggggactgcaagcgggcagcatcgatcgtggctcctttaagacaaactcagacagacattttttttaaccctccttctctaatctccttccagtgcagcacttgcaaagagggagagagagggagagaaagaaagagagagagagaagagagaaactgattaggaattaggactgattcaagggaagcgagcgctagggctttgtgcatttgaatattaacatttgaggtgttctgaccagaagaagacagagcggatgatcattcattcaccacgttgacaacctcgcctgtgattgacagctggagtggcagaaagccatgagatttggtagttgggtctgaggggcgctcttttttttccttttctttctttctttctttttttttttttaaactgatttttgggggagagaagatctgcttttttttgcccccgctgctgtcttggaaacggagcgcttttatgctcagtgactcgggcgctttgcttcaggtcccgtagaccgaagatctgggaccagtagctcacgttgctggagacgttaagggatttttcgtcgtgcttttttttttttttttttttttttccgggggagtttgaatatttgtttcttttcacactggccttaaagaggatatattagaagttgaagtaggaagggagccagagaggccgatggcgcaaaggtacgacgatctaccccattacgggggcatggatggagtaggcatcccctccacgatgtatggggacccgcatgcagccaggtccatgcagccggtccaccacctgaaccacgggcctcctctgcactcgcatcagtacccgcacacagctcataccaacgccatggcccccagcatgggctcctctgtcaatgacgctttaaagagagataaagatgccatttatggacaccccctcttccctctcttagcactgatttttgagaaatgtgaattagctacttgtaccccccgcgagccgggggtggcgggcggggacgtctgctcgtcagagtcattcaatgaagatatagccgtgttcgccaaacagattcgcgcagaaaaacctctattttcttctaatccagaactggataacttgatgattcaagccatacaagtattaaggtttcatctattggaattagagaaggtacacgaattatgtgacaatttctgccaccggtatattagctgtttgaaagggaaaatgcctatcgatttggtgatagacgatagagaaggaggatcaaaatcagacagtgaagatataacaagatcagcaaatctaactgaccagccctcttggaacagagatcatgatgacacggcatctactcgttcaggaggaaccccaggcccttccagcggtggccacacgtcacacagtggggacaacagcagtgagcaaggtgatggcttggacaacagtgtagcttcccccagcacaggtgacgatgatgaccctgataaggacaaaaagcgtcacaaaaagcgtggcatctttcccaaagtagccacaaatatcatgagggcgtggctgttccagcatctaacacacccttacccttctgaagaacagaaaaagcagttggcacaagacacgggactcaccatccttcaagtgaacaattggtttattaatgcccggagaagaatagtgcagcccatgatagaccagtccaaccgagcaggcaagtcccccatagtgactgtattcaagtcacgcaagcgaaaaccatcctcaagccattcaccgggaggtccgctacctggtaaataaactgggagtgagtataggaacgcctggcaattaaaattaaaccagtttcgtttcataacaacactaatcaatttaacatcattataaaacgtttggagaaggtggaaaaaaaaagccaacagagaaaagtaactcttaaataatatgctcagttacaatattctttgtacacattcaatatattaatgttattttttttctgagtttgccttcccagctctttctgctactatgaccactccctggtgcatggcttggtgtggaattgctgtaaactttattacctgtcaaaagggcaaaggggtcaggattgcttgtgggactcagtaaagttcaaagacattcaatgaggtagagcttttgtgtgctttaataacccaaggcagcttacttctgaagcagcttttcatgtacagttaaaacacgggattcaggtagtggtataaatacatggttcttatttctcagaccttctcttgttaatatccatcttctggtgttcgactttttttttttttaataacagtctttttgttttgtttttaaattatgagc

SEQ ID NO: 17551 - DNA, 2321 bp, Homo sapiens
  source 1..2321: mol_type = unassigned DNA
attggagcgcagactgatggcgcaaaggtacgatgagctgccccattacggcgggatggacggagtaggggttcccgcttccatgtacggagaccctcacgcgccgcggccgatccccccggttcaccacctgaaccacgggccgccgctccacgccacacagcactacggcgcgcacgccccgcaccccaatgtcatgccggccagtatgggatccgctgtcaacgacgccttgaagcgggacaaggacgcgatctatgggttcgcgccgaaaagccacttttttcctcaaatccagagctggacaatttgatgatacaagcaatacaagtactaaggtttcatcttttggagttagaaaaggtccacgaactgtgcgataacttctgccaccgatacattagctgtttgaaggggaaaatgcccatcgacctcgtcattgatgaaagagacggcagctccaagtcagatcatgaagaactttcaggctcctccacaaatctcgctgaccataacccttcttcttggcgagaccacgatgatgcaacctcaacccactcagcaggcaccccagggccctccagtgggggccatgcttcccagagcggagacaacagcagtgagcaaggggatggtttagacaacagtgtagcttcacctggtacaggtgacgatgatgatccggataaggacaaaaaacgccagaagaaaagaggcattttccccaaagtagcaacaaatatcatgagagcatggctcttccagcatctcacacatccgtacccttccgaagagcagaagaaacagttagcgcaagacacaggacttacaattctccaagtaaacaactggtttattaatgccagaagaagaatagtacagcccatgattgaccagtcaaatcgagcaggttttcttcttgatccttcagtgagccaaggagcagcatatagtccagagggtcagcccatggggagctttgtgttggatggtcagcaacacatggggatccggcctgcaggacctatgagtggaatgggcatgaatatgggcatggatgggcaatggcactacatgtaaccttcatcatgtaaagcaatcgcaaagcaagggggaagtttgcagagcatgccaggggactacgtttctcagggtggtcctatgggaatgagtatggcacagccaagttacactcctccccagatgaccccacaccctactcaattaagacatggacccccaatgcattcatatttgccaagccatccccaccacccagccatgatgatgcacggaggaccccctacccaccctggaatgactatgtcagcacagagccccacaatgttaaattctgtagatcccaatgttggcggacaggttatggacattcatgcccaatagtataagggaactcaagggaaaaggaaacacacgcaaaaactattttaagactttctgaactttgaccagatgttgacacttaatatgaaattccagacagctgtgattattttttacttttgtcatttttcatcaagcaacagaggaccaatgcaacaagaacacaaatgtgaaatcatgggctgactgagacaattctgtccatgtaaagatcctctggaaaaagactccgagagttataactactgtagtataaatataggaactaagttaaacttgtacatttctgttgatcacgccgttatgttgcctcaaatagttttagaagagaaaaaaaaatatatccttgttttccacactatgtgtgttgttcccaaaagaatgactgttttggttcatcagtgaattcaccatccaggagagactgtggtatatattttaaacctgttgggccaatgagaaaagaaccacactggagatcatgatgaacttttggctgaacctcatcactcgaactccagcttcaagaatgtgttttcatgcccggcctttgttcctccataaatgtgtcctttagtttcaaacagatctttatagttcgtgcttcataagccaattcttattattatttttgggggactcttcttcaaagagcttgccaatgaagatttaaagacagagcaggagcttcttccaggagttctgagccttggttgtggacaaaacaatcttaagttgggcagctttcctcaacacaaaaaaaagttattaatggtcattgaaccataactaggactttatcagaaactcaaagcttgggggataaaaaggagcaagagaatactgtaacaaacttcgtacagagttcggtctattaattgtttcatgttagatattctatgtgtttacctcaattg

SEQ ID NO: 17552 - DNA, 3007 bp, Homo sapiens
  source 1..3007: mol_type = unassigned DNA
accgcttggagggagtgtgctctgagttaagctggtctcttctggtcctggaaaaaaatgagtattgacaaggttgctggatctgcgcagaaaagaaagtgccacttaataaaaaatttagcccggcagtggtaccgtctgcagagcttgctgcccttggacgttagcaggaagccttcggggtgctgtaatcggcgggcagaggagagggaggccgcggaattaaaaggaacaaaagctagagcgccatgccaaacgtccccggcaagacccagttaggcaggagccgggagtgatgggaaaatgaactagaacatattggagaattgggagaagtctctttggtttggaaaaaaaaaaaaggaatcttcagcctagatcactttcttatccggactgggatattaaatatacgacacatccaggagtttattggagcgcagactgatggcgcaaaggtacgatgagctgccccattacggcgggatggacggagtaggggttcccgcttccatgtacggagaccctcacgcgccgcggccgatccccccggttcaccacctgaaccacgggccgccgctccacgccacacagcactacggcgcgcacgccccgcaccccaatgtcatgccggccagtatgggatccgctgtcaacgacgccttgaagcgggacaaggacgcgatctatgggcacccgttgtttcctctgttagctctggtctttgagaagtgcgagctggcgacctgcactccccgggaacctggagtggctggcggagacgtctgctcctccgactccttcaacgaggacatcgcggtcttcgccaagcaggttcgcgccgaaaagccacttttttcctcaaatccagagctggacaatttgatgatacaagcaatacaagtactaaggtttcatcttttggagttagaaaaggtccacgaactgtgcgataacttctgccaccgatacattagctgtttgaaggggaaaatgcccatcgacctcgtcattgatgaaagagacggcagctccaagtcagatcatgaagaactttcaggctcctccacaaatctcgctgaccataacccttcttcttggcgagaccacgatgatgcaacctcaacccactcagcaggcaccccagggccctccagtgggggccatgcttcccagagcggagacaacagcagtgagcaaggggatggtttagacaacagtgtagcttcacctggtacaggtgacgatgatgatccggataaggacaaaaaacgccagaagaaaagaggcattttccccaaagtagcaacaaatatcatgagagcatggctcttccagcatctcacacatccgtacccttccgaagagcagaagaaacagttagcgcaagacacaggacttacaattctccaagtaaacaactggtttattaatgccagaagaagaatagtacagcccatgattgaccagtcaaatcgagcagtgagccaaggagcagcatatagtccagagggtcagcccatggggagctttgtgttggatggtcagcaacacatggggatccggcctgcaggtttgcagagcatgccaggggactacgtttctcagggtggtcctatgggaatgagtatggcacagccaagttacactcctccccagatgaccccacaccctactcaattaagacatggacccccaatgcattcatatttgccaagccatccccaccacccagccatgatgatgcacggaggaccccctacccaccctggaatgactatgtcagcacagagccccacaatgttaaattctgtagatcccaatgttggcggacaggttatggacattcatgcccaatagtataagggaactcaagggaaaaggaaacacacgcaaaaactattttaagactttctgaactttgaccagatgttgacacttaatatgaaattccagacagctgtgattattttttacttttgtcatttttcatcaagcaacagaggaccaatgcaacaagaacacaaatgtgaaatcatgggctgactgagacaattctgtccatgtaaagatcctctggaaaaagactccgagagttataactactgtagtataaatataggaactaagttaaacttgtacatttctgttgatcacgccgttatgttgcctcaaatagttttagaagagaaaaaaaaatatatccttgttttccacactatgtgtgttgttcccaaaagaatgactgttttggttcatcagtgaattcaccatccaggagagactgtggtatatattttaaacctgttgggccaatgagaaaagaaccacactggagatcatgatgaacttttggctgaacctcatcactcgaactccagcttcaagaatgtgttttcatgcccggcctttgttcctccataaatgtgtcctttagtttcaaacagatctttatagttcgtgcttcataagccaattcttattattatttttgggggactcttcttcaaagagcttgccaatgaagatttaaagacagagcaggagcttcttccaggagttctgagccttggttgtggacaaaacaatcttaagttgggcagctttcctcaacacaaaaaaaagttattaatggtcattgaaccataactaggactttatcagaaactcaaagcttgggggataaaaaggagcaagagaatactgtaacaaacttcgtacagagttcggtctattaattgtttcatgttagatattctatgtgtttacctcaattgaaaaaaaaaagaatgtttttgctagtatcagatctgctgtggaattggtattgtatgtccatgaattcttcttttctcagcacgtgttcctcactagaagaaaatgctgttacctttaagctttgtcaaatttacattaaaatacttgtatgaggactgtgacgttatgttaaaaaaaaaaaggtgttaagtcacaaaaagcggtaataaatatttcatttttgattttt

SEQ ID NO: 17553 - DNA, 3050 bp, Homo sapiens
  source 1..3050: mol_type = unassigned DNA
gcctttggctacatcggacccagatgactgcctcctcacttcctccctcccgattccgccgcggcccccaaagactctcggggtggccccttgtccgcaccgcttggagggagtgtgctctgagttaagctggtctcttctggtcctggaaaaaaatgagtattgacaaggttgctggatctgcgcagaaaagaaagtgccacttaataaaaaatttagcccggcagtggtaccgtctgcagagcttgctgcccttggacgttagcaggaagccttcggggtgctgtaatcggcgggcagaggagagggaggccgcggaattaaaaggaacaaaagctagagcgccatgccaaacgtccccggcaagacccagttaggcaggagccgggagtgatgggaaaatgaactagaatacgatgagctgccccattacggcgggatggacggagtaggggttcccgcttccatgtacggagaccctcacgcgccgcggccgatccccccggttcaccacctgaaccacgggccgccgctccacgccacacagcactacggcgcgcacgccccgcaccccaatgtcatgccggccagtatgggatccgctgtcaacgacgccttgaagcgggacaaggacgcgatctatgggcacccgttgtttcctctgttagctctggtctttgagaagtgcgagctggcgacctgcactccccgggaacctggagtggctggcggagacgtctgctcctccgactccttcaacgaggacatcgcggtcttcgccaagcaggttcgcgccgaaaagccacttttttcctcaaatccagagctggacaatttgatgatacaagcaatacaagtactaaggtttcatcttttggagttagaaaaggtccacgaactgtgcgataacttctgccaccgatacattagctgtttgaaggggaaaatgcccatcgacctcgtcattgatgaaagagacggcagctccaagtcagatcatgaagaactttcaggctcctccacaaatctcgctgaccataacccttcttcttggcgagaccacgatgatgcaacctcaacccactcagcaggcaccccagggccctccagtgggggccatgcttcccagagcggagacaacagcagtgagcaaggggatggtttagacaacagtgtagcttcacctggtacaggtgacgatgatgatccggataaggacaaaaaacgccagaagaaaagaggcattttccccaaagtagcaacaaatatcatgagagcatggctcttccagcatctcacacatccgtacccttccgaagagcagaagaaacagttagcgcaagacacaggacttacaattctccaagtaaacaactggtttattaatgccagaagaagaatagtacagcccatgattgaccagtcaaatcgagcagtgagccaaggagcagcatatagtccagagggtcagcccatggggagctttgtgttggatggtcagcaacacatggggatccggcctgcaggacctatgagtggaatgggcatgaatatgggcatggatgggcaatggcactacatgtaaccttcatcatgtaaagcaatcgcaaagcaagggggaagtttgcagagcatgccaggggactacgtttctcagggtggtcctatgggaatgagtatggcacagccaagttacactcctccccagatgaccccacaccctactcaattaagacatggacccccaatgcattcatatttgccaagccatccccaccacccagccatgatgatgcacggaggaccccctacccaccctggaatgactatgtcagcacagagccccacaatgttaaattctgtagatcccaatgttggcggacaggttatggacattcatgcccaatagtataagggaactcaagggaaaaggaaacacacgcaaaaactattttaagactttctgaactttgaccagatgttgacacttaatatgaaattccagacagctgtgattattttttacttttgtcatttttcatcaagcaacagaggaccaatgcaacaagaacacaaatgtgaaatcatgggctgactgagacaattctgtccatgtaaagatcctctggaaaaagactccgagagttataactactgtagtataaatataggaactaagttaaacttgtacatttctgttgatcacgccgttatgttgcctcaaatagttttagaagagaaaaaaaaatatatccttgttttccacactatgtgtgttgttcccaaaagaatgactgttttggttcatcagtgaattcaccatccaggagagactgtggtatatattttaaacctgttgggccaatgagaaaagaaccacactggagatcatgatgaacttttggctgaacctcatcactcgaactccagcttcaagaatgtgttttcatgcccggcctttgttcctccataaatgtgtcctttagtttcaaacagatctttatagttcgtgcttcataagccaattcttattattatttttgggggactcttcttcaaagagcttgccaatgaagatttaaagacagagcaggagcttcttccaggagttctgagccttggttgtggacaaaacaatcttaagttgggcagctttcctcaacacaaaaaaaagttattaatggtcattgaaccataactaggactttatcagaaactcaaagcttgggggataaaaaggagcaagagaatactgtaacaaacttcgtacagagttcggtctattaattgtttcatgttagatattctatgtgtttacctcaattgaaaaaaaaaagaatgtttttgctagtatcagatctgctgtggaattggtattgtatgtccatgaattcttcttttctcagcacgtgttcctcactagaagaaaatgctgttacctttaagctttgtcaaatttacattaaaatacttgtatgaggactgtgacgttatgttaaaaaaaaaaaggtgttaagtcacaaaaagcggtaataaatatttcatttttg

SEQ ID NO: 17554 - DNA, 3591 bp, Homo sapiens
  source 1..3591: mol_type = unassigned DNA
tcccgctccccactcccgggatgtgtctccgccgtacgacgggctatggccaccacgacttccgggttccgtcatttcgttctcccgccgccgacccgcgccgccaaactgaggctcttcaataagccaggcagcagccaacctgccaacacctactgacactcactcatctcccagagagagaaagagagcgagagagagcgagcgcgagagagcgagcgcgagtgagagcgagcgagcgagcgagaaagagagagagggagagacaaaatacctaccaggaaagggggggaggaagtccaatttttgcaaactattcatttttttttcttgatttttctcactgctttctttgaacaatactttaaagagagaggatcgtattatagataccgcgggggcaaagctaaaaaaggggggaggggggaggaaaaaattcaagaagcagaaacccctcgcggagttttactggaagaaaaaaacgggtctgaaagattcctcctcttcatcatcatcaaccatcattcattcactaccttgacattccgggctttgattgacagctggagtggcaaaaagccatgaaacacgacagttcggttacatgtgggctgctgacgggccgctcgtaaccttcagttcgggggcttgacaatttttttcttctttttcttctttttcttttctttctttttttttccaactgaggggaagagaagagaaagagggggaaaggaggaccgaagaggaggaggaggggaggggggaggaggaggaggtggaggaggaggaggaagatcaggaggaggaggaagaagaggaaaaaagagaaaaagaagaaatatcacagaaaaaaaaattcttcgttgtctagactgggctttttttcccccctaaaaaatagcatattggagaattgggagaagtctctttggtttggaaaaaaaaaaaaggaatcttcagcctagatcactttcttatccggactgggatattaaatatacgacacatccaggagtttattggagcgcagactgatggcgcaaaggtacgatgagctgccccattacggcgggatggacggagtaggggttcccgcttccatgtacggagaccctcacgcgccgcggccgatccccccggttcaccacctgaaccacgggccgccgctccacgccacacagcactacggcgcgcacgccccgcaccccaatgtcatgccggccagtatgggatccgctgtcaacgacgccttgaagcgggacaaggacgcgatctatgggcacccgttgtttcctctgttagctctggtctttgagaagtgcgagctggcgacctgcactccccgggaacctggagtggctggcggagacgtctgctcctccgactccttcaacgaggacatcgcggtcttcgccaagcaggttcgcgccgaaaagccacttttttcctcaaatccagagctggacaatttgatgatacaagcaatacaagtactaaggtttcatcttttggagttagaaaaggtccacgaactgtgcgataacttctgccaccgatacattagctgtttgaaggggaaaatgcccatcgacctcgtcattgatgaaagagacggcagctccaagtcagatcatgaagaactttcaggctcctccacaaatctcgctgaccataacccttcttcttggcgagaccacgatgatgcaacctcaacccactcagcaggcaccccagggccctccagtgggggccatgcttcccagagcggagacaacagcagtgagcaaggggatggtttagacaacagtgtagcttcacctggtacaggtgacgatgatgatccggataaggacaaaaaacgccagaagaaaagaggcattttccccaaagtagcaacaaatatcatgagagcatggctcttccagcatctcacacatccgtacccttccgaagagcagaagaaacagttagcgcaagacacaggacttacaattctccaagtaaacaactggtttattaatgccagaagaagaatagtacagcccatgattgaccagtcaaatcgagcagtgagccaaggagcagcatatagtccagagggtcagcccatggggagctttgtgttggatggtcagcaacacatggggatccggcctgcaggtttgcagagcatgccaggggactacgtttctcagggtggtcctatgggaatgagtatggcacagccaagttacactcctccccagatgaccccacaccctactcaattaagacatggacccccaatgcattcatatttgccaagccatccccaccacccagccatgatgatgcacggaggaccccctacccaccctggaatgactatgtcagcacagagccccacaatgttaaattctgtagatcccaatgttggcggacaggttatggacattcatgcccaatagtataagggaactcaagggaaaaggaaacacacgcaaaaactattttaagactttctgaactttgaccagatgttgacacttaatatgaaattccagacagctgtgattattttttacttttgtcatttttcatcaagcaacagaggaccaatgcaacaagaacacaaatgtgaaatcatgggctgactgagacaattctgtccatgtaaagatcctctggaaaaagactccgagagttataactactgtagtataaatataggaactaagttaaacttgtacatttctgttgatcacgccgttatgttgcctcaaatagttttagaagagaaaaaaaaatatatccttgttttccacactatgtgtgttgttcccaaaagaatgactgttttggttcatcagtgaattcaccatccaggagagactgtggtatatattttaaacctgttgggccaatgagaaaagaaccacactggagatcatgatgaacttttggctgaacctcatcactcgaactccagcttcaagaatgtgttttcatgcccggcctttgttcctccataaatgtgtcctttagtttcaaacagatctttatagttcgtgcttcataagccaattcttattattatttttgggggactcttcttcaaagagcttgccaatgaagatttaaagacagagcaggagcttcttccaggagttctgagccttggttgtggacaaaacaatcttaagttgggcagctttcctcaacacaaaaaaaagttattaatggtcattgaaccataactaggactttatcagaaactcaaagcttgggggataaaaaggagcaagagaatactgtaacaaacttcgtacagagttcggtctattaattgtttcatgttagatattctatgtgtttacctcaattgaaaaaaaaaagaatgtttttgctagtatcagatctgctgtggaattggtattgtatgtccatgaattcttcttttctcagcacgtgttcctcactagaagaaaatgctgttacctttaagctttgtcaaatttacattaaaatacttgtatgaggactgtgacgttatgttaaaaaaaaaaaggtgttaagtcacaaaaagcggtaataaatatttcatttttg

SEQ ID NO: 17555 - DNA, 2295 bp, Homo sapiens
  source 1..2295: mol_type = unassigned DNA
cccgatgcctcctctcccttcaacgcttctgctgctgctcgctgcttgatgatggcggccagtattttaaaaaatagcaaaattattcatcggcttctttccctcccgtgcctctgcgtgtgtgcgagtgtgtgtgcgtgcgtgtgtgcgtgtctgggcgcgcgtgttccagcgctgtgcgagcgggcgggcggcgagtgcgtgtgagtggtgtgtgtgtgtgcgtgtgcaatcgttacacgctttcgcctcgctccagcttttaccccagcagcgcgattcccccggttctcctgctgccgctgctgcgccgctgccgccgtggctcgcgcggctcggggcgggcacgggctgcgtaggagccgccgccggggccgccgctggggccgcgctgccgcagccgctgcgccgccgcctagactactagcctgggctgcttgttttgtctctgaaattgacaaggacgcagggaatccgctgctaaataatgtttctgtacgatgagctgccccattacggcgggatggacggagtaggggttcccgcttccatgtacggagaccctcacgcgccgcggccgatccccccggttcaccacctgaaccacgggccgccgctccacgccacacagcactacggcgcgcacgccccgcaccccaatgtcatgccggccagtatgggatccgctgtcaacgacgccttgaagcgggacaaggacgcgatctatggctctggtctttgagaagtgcgagctggcgacctgcactccccgggaacctggagtggctggcggagacgtctgctcctccgactccttcaacgaggacatcgcggtcttcgccaagcaggttcgcgccgaaaagccacttttttcctcaaatccagagctggacaatttgatgatacaagcaatacaagtactaaggtttcatcttttggagttagaaaaggtccacgaactgtgcgataacttctgccaccgatacattagctgtttgaaggggaaaatgcccatcgacctcgtcattgatgaaagagacggcagctccaagtcagatcatgaagaactttcaggctcctccacaaatctcgctgaccataacccttcttcttggcgagaccacgatgatgcaacctcaacccactcagcaggcaccccagggccctccagtgggggccatgcttcccagagcggagacaacagcagtgagcaaggggatggtttagacaacagtgtagcttcacctggtacaggtgacgatgatgatccggataaggacaaaaaacgccagaagaaaagaggcattttccccaaagtagcaacaaatatcatgagagcatggctcttccagcatctcacacatccgtacccttccgaagagcagaagaaacagttagcgcaagacacaggacttacaattctccaagtaaacaactggtttattaatgccagaagaagaatagtacagcccatgattgaccagtcaaatcgagcagtgagccaaggagcagcatatagtccagagggtcagcccatggggagctttgtgttggatggtcagcaacacatggggatccggcctgcaggacctatgagtggaatgggcatgaatatgggcatggatgggcaatggcactacatgtaaccttcatcatgtaaagcaatcgcaaagcaagggggaagtttgcagagcatgccaggggactacgtttctcagggtggtcctatgggaatgagtatggcacagccaagttacactcctccccagatgaccccacaccctactcaattaagacatggacccccaatgcattcatatttgccaagccatccccaccacccagccatgatgatgcacggaggaccccctacccaccctggaatgactatgtcagcacagagccccacaatgttaaattctgtagatcccaatgttggcggacaggttatggacattcatgcccaatagtataagggaactcaagggaaaaggaaacacacgcaaaaactattttaagactttctgaactttgaccagatgttgacacttaatatgaaattccagacagctgtgattattttttacttttgtcatttttcatcaagcaacagaggaccaatgcaacaagaacacaaatgtgaaatcatgggctgactgagacaattctgtccatgtaaagatcctctggaaaaagactccgagagttataactactgtagtataaatataggaactaagttaaacttgtacatttctgttgatcacgccgttatgttgcctcaaatagttttag

SEQ ID NO: 17556 - DNA, 2738 bp, Homo sapiens
  source 1..2738: mol_type = unassigned DNA
catctttatcccttcctctcttttctgttcgccctcttctccctgctctttttccctttccacccccctcctctgttctccctcacctcctgcgccccctcccccttcccgggttctgacagtacgatgagctgccccattacggcgggatggacggagtaggggttcccgcttccatgtacggagaccctcacgcgccgcggccgatccccccggttcaccacctgaaccacgggccgccgctccacgccacacagcactacggcgcgcacgccccgcaccccaatgtcatgccggccagtatgggatccgctgtcaacgacgccttgaagcgggacaaggacgcgatctatggctctggtctttgagaagtgcgagctggcgacctgcactccccgggaacctggagtggctggcggagacgtctgctcctccgactccttcaacgaggacatcgcggtcttcgccaagcaggttcgcgccgaaaagccacttttttcctcaaatccagagctggacaatttgatgatacaagcaatacaagtactaaggtttcatcttttggagttagaaaaggtccacgaactgtgcgataacttctgccaccgatacattagctgtttgaaggggaaaatgcccatcgacctcgtcattgatgaaagagacggcagctccaagtcagatcatgaagaactttcaggctcctccacaaatctcgctgaccataacccttcttcttggcgagaccacgatgatgcaacctcaacccactcagcaggcaccccagggccctccagtgggggccatgcttcccagagcggagacaacagcagtgagcaaggggatggtttagacaacagtgtagcttcacctggtacaggtgacgatgatgatccggataaggacaaaaaacgccagaagaaaagaggcattttccccaaagtagcaacaaatatcatgagagcatggctcttccagcatctcacacatccgtacccttccgaagagcagaagaaacagttagcgcaagacacaggacttacaattctccaagtaaacaactggtttattaatgccagaagaagaatagtacagcccatgattgaccagtcaaatcgagcagtgagccaaggagcagcatatagtccagagggtcagcccatggggagctttgtgttggatggtcagcaacacatggggatccggcctgcaggacctatgagtggaatgggcatgaatatgggcatggatgggcaatggcactacatgtaaccttcatcatgtaaagcaatcgcaaagcaagggggaagtttgcagagcatgccaggggactacgtttctcagggtggtcctatgggaatgagtatggcacagccaagttacactcctccccagatgaccccacaccctactcaattaagacatggacccccaatgcattcatatttgccaagccatccccaccacccagccatgatgatgcacggaggaccccctacccaccctggaatgactatgtcagcacagagccccacaatgttaaattctgtagatcccaatgttggcggacaggttatggacattcatgcccaatagtataagggaactcaagggaaaaggaaacacacgcaaaaactattttaagactttctgaactttgaccagatgttgacacttaatatgaaattccagacagctgtgattattttttacttttgtcatttttcatcaagcaacagaggaccaatgcaacaagaacacaaatgtgaaatcatgggctgactgagacaattctgtccatgtaaagatcctctggaaaaagactccgagagttataactactgtagtataaatataggaactaagttaaacttgtacatttctgttgatcacgccgttatgttgcctcaaatagttttagaagagaaaaaaaaatatatccttgttttccacactatgtgtgttgttcccaaaagaatgactgttttggttcatcagtgaattcaccatccaggagagactgtggtatatattttaaacctgttgggccaatgagaaaagaaccacactggagatcatgatgaacttttggctgaacctcatcactcgaactccagcttcaagaatgtgttttcatgcccggcctttgttcctccataaatgtgtcctttagtttcaaacagatctttatagttcgtgcttcataagccaattcttattattatttttgggggactcttcttcaaagagcttgccaatgaagatttaaagacagagcaggagcttcttccaggagttctgagccttggttgtggacaaaacaatcttaagttgggcagctttcctcaacacaaaaaaaagttattaatggtcattgaaccataactaggactttatcagaaactcaaagcttgggggataaaaaggagcaagagaatactgtaacaaacttcgtacagagttcggtctattaattgtttcatgttagatattctatgtgtttacctcaattgaaaaaaaaaagaatgtttttgctagtatcagatctgctgtggaattggtattgtatgtccatgaattcttcttttctcagcacgtgttcctcactagaagaaaatgctgttacctttaagctttgtcaaatttacattaaaatacttgtatgaggactgtgacgttatgttaaaaaaaaaaaggtgttaagtcacaaaaagcggtaataaatatttcatttttga

SEQ ID NO: 17557 - DNA, 2917 bp, Homo sapiens
  source 1..2917: mol_type = unassigned DNA
ggctcggcgcggcgcgctcctcctcgctcccgctccccactcccgggatgtgtctccgccgtacgacgggctatggccaccacgacttccgggttccgtcatttcgttctcccgccgccgacccgcgccgccaaactgaggctcttcaataagccaggcagcagccaacctgccaacacctactgacactcactcatctcccagagagagaaagagagcgagagagagcgagcgcgagagagcgagcgcgagtgagagcgagcgagcgagcgagaaagagagagagggagagacaaaatacctaccaggaaagggggggaggaagtccaatttttgcaaactattcatttttttttcttgatttttctcactgctttctttgaacaatactttaaagagagaggatcgtattatagataccgcgggggcaaagctaaaaaaggggggaggggggaggaaaaaattcaagaagcagaaacccctcgcggagttttactggaagaaaaaaacgggtctgaaagattcctcctcttcatcatcatcaaccatcattcattcactaccttgacattccgggctttgattgacagctggagtggcaaaaagccatgaaacacgacagttcggttacatgtgggctgctgacgggccgctcgtaaccttcagttcgggggcttgacaatttttttcttctttttcttctttttcttttctttctttttttttccaactgaggggaagagaagagaaagagggggaaaggaggaccgaagaggaggaggaggggaggggggaggaggaggaggtggaggaggaggaggaagatcaggaggaggaggaagaagaggaaaaaagagaaaaagaagaaatatcacagaaaaaaaaattcttcgttgtctagactgggctttttttcccccctaaaaaatagcatattggagaattgggagaagtctctttggtttggaaaaaaaaaaaaggaatcttcagcctagatcactttcttatccggactgggatattaaatatacgacacatccaggagtttattggagcgcagactgatggcgcaaaggtacgatgagctgccccattacggcgggatggacggagtaggggttcccgcttccatgtacggagaccctcacgcgccgcggccgatccccccggttcaccacctgaaccacgggccgccgctccacgccacacagcactacggcgcgcacgccccgcaccccaatgtcatgccggccagtatgggatccgctgtcaacgacgccttgaagcgggacaaggacgcgatctatgggcacccgttgtttcctctgttagctctggtctttgagaagtgcgagctggcgacctgcactccccgggaacctggagtggctggcggagacgtctgctcctccgactccttcaacgaggacatcgcggtcttcgccaagcaggttcgcgccgaaaagccacttttttcctcaaatccagagctggacaatttgatgatacaagcaatacaagtactaaggtttcatcttttggagttagaaaaggtccacgaactgtgcgataacttctgccaccgatacattagctgtttgaaggggaaaatgcccatcgacctcgtcattgatgaaagagacggcagctccaagtcagatcatgaagaactttcaggctcctccacaaatctcgctgaccataacccttcttcttggcgagaccacgatgatgcaacctcaacccactcagcaggcaccccagggccctccagtgggggccatgcttcccagagcggagacaacagcagtgagcaaggggatggtttagacaacagtgtagcttcacctggtacaggtgacgatgatgatccggataaggacaaaaaacgccagaagaaaagaggcattttccccaaagtagcaacaaatatcatgagagcatggctcttccagcatctcacacatccgtacccttccgaagagcagaagaaacagttagcgcaagacacaggacttacaattctccaagtaaacaactggtttattaatgccagaagaagaatagtacagcccatgattgaccagtcaaatcgagcaggttttcttcttgatccttcagtgagccaaggagcagcatatagtccagagggtcagcccatggggagctttgtgttggatggtcagcaacacatggggatccggcctgcaggacctatgagtggaatgggcatgaatatgggcatggatgggcaatggcactacatgtaaccttcatcatgtaaagcaatcgcaaagcaagggggaagtttgcagagcatgccaggggactacgtttctcagggtggtcctatgggaatgagtatggcacagccaagttacactcctccccagatgaccccacaccctactcaattaagacatggacccccaatgcattcatatttgccaagccatccccaccacccagccatgatgatgcacggaggaccccctacccaccctggaatgactatgtcagcacagagccccacaatgttaaattctgtagatcccaatgttggcggacaggttatggacattcatgcccaatagtataagggaactcaagggaaaaggaaacacacgcaaaaactattttaagactttctgaactttgaccagatgttgacacttaatatgaaattccagacagctgtgattattttttacttttgtcatttttcatcaagcaacagaggaccaatgcaacaagaacacaaatgtgaaatcatgggctgactgagacaattctgtccatgtaaagatcctctggaaaaagactccgagagttataactactgtagtataaatataggaactaagttaaacttgtacatttctgttgatcacgccgttatgttgcctcaaatagtttt

SEQ ID NO: 17558 - DNA, 3687 bp, Homo sapiens
  source 1..3687: mol_type = unassigned DNA
tcccgctccccactcccgggatgtgtctccgccgtacgacgggctatggccaccacgacttccgggttccgtcatttcgttctcccgccgccgacccgcgccgccaaactgaggctcttcaataagccaggcagcagccaacctgccaacacctactgacactcactcatctcccagagagagaaagagagcgagagagagcgagcgcgagagagcgagcgcgagtgagagcgagcgagcgagcgagaaagagagagagggagagacaaaatacctaccaggaaagggggggaggaagtccaatttttgcaaactattcatttttttttcttgatttttctcactgctttctttgaacaatactttaaagagagaggatcgtattatagataccgcgggggcaaagctaaaaaaggggggaggggggaggaaaaaattcaagaagcagaaacccctcgcggagttttactggaagaaaaaaacgggtctgaaagattcctcctcttcatcatcatcaaccatcattcattcactaccttgacattccgggctttgattgacagctggagtggcaaaaagccatgaaacacgacagttcggttacatgtgggctgctgacgggccgctcgtaaccttcagttcgggggcttgacaatttttttcttctttttcttctttttcttttctttctttttttttccaactgaggggaagagaagagaaagagggggaaaggaggaccgaagaggaggaggaggggaggggggaggaggaggaggtggaggaggaggaggaagatcaggaggaggaggaagaagaggaaaaaagagaaaaagaagaaatatcacagaaaaaaaaattcttcgttgtctagactgggctttttttcccccctaaaaaatagcatattggagaattgggagaagtctctttggtttggaaaaaaaaaaaaggaatcttcagcctagatcactttcttatccggactgggatattaaatatacgacacatccaggagtttattggagcgcagactgatggcgcaaaggtacgatgagctgccccattacggcgggatggacggagtaggggttcccgcttccatgtacggagaccctcacgcgccgcggccgatccccccggttcaccacctgaaccacgggccgccgctccacgccacacagcactacggcgcgcacgccccgcaccccaatgtcatgccggccagtatgggatccgctgtcaacgacgccttgaagcgggacaaggacgcgatctatgggcacccgttgtttcctctgttagctctggtctttgagaagtgcgagctggcgacctgcactccccgggaacctggagtggctggcggagacgtctgctcctccgactccttcaacgaggacatcgcggtcttcgccaagcaggttcgcgccgaaaagccacttttttcctcaaatccagagctggacaatttgatgatacaagcaatacaagtactaaggtttcatcttttggagttagaaaaggtccacgaactgtgcgataacttctgccaccgatacattagctgtttgaaggggaaaatgcccatcgacctcgtcattgatgaaagagacggcagctccaagtcagatcatgaagaactttcaggctcctccacaaatctcgctgaccataacccttcttcttggcgagaccacgatgatgcaacctcaacccactcagcaggcaccccagggccctccagtgggggccatgcttcccagagcggagacaacagcagtgagcaaggggatggtttagacaacagtgtagcttcacctggtacaggtgacgatgatgatccggataaggacaaaaaacgccagaagaaaagaggcattttccccaaagtagcaacaaatatcatgagagcatggctcttccagcatctcacacatccgtacccttccgaagagcagaagaaacagttagcgcaagacacaggacttacaattctccaagtaaacaactggtttattaatgccagaagaagaatagtacagcccatgattgaccagtcaaatcgagcagtgagccaaggagcagcatatagtccagagggtcagcccatggggagctttgtgttggatggtcagcaacacatggggatccggcctgcaggacctatgagtggaatgggcatgaatatgggcatggatgggcaatggcactacatgtaaccttcatcatgtaaagcaatcgcaaagcaagggggaagtttgcagagcatgccaggggactacgtttctcagggtggtcctatgggaatgagtatggcacagccaagttacactcctccccagatgaccccacaccctactcaattaagacatggacccccaatgcattcatatttgccaagccatccccaccacccagccatgatgatgcacggaggaccccctacccaccctggaatgactatgtcagcacagagccccacaatgttaaattctgtagatcccaatgttggcggacaggttatggacattcatgcccaatagtataagggaactcaagggaaaaggaaacacacgcaaaaactattttaagactttctgaactttgaccagatgttgacacttaatatgaaattccagacagctgtgattattttttacttttgtcatttttcatcaagcaacagaggaccaatgcaacaagaacacaaatgtgaaatcatgggctgactgagacaattctgtccatgtaaagatcctctggaaaaagactccgagagttataactactgtagtataaatataggaactaagttaaacttgtacatttctgttgatcacgccgttatgttgcctcaaatagttttagaagagaaaaaaaaatatatccttgttttccacactatgtgtgttgttcccaaaagaatgactgttttggttcatcagtgaattcaccatccaggagagactgtggtatatattttaaacctgttgggccaatgagaaaagaaccacactggagatcatgatgaacttttggctgaacctcatcactcgaactccagcttcaagaatgtgttttcatgcccggcctttgttcctccataaatgtgtcctttagtttcaaacagatctttatagttcgtgcttcataagccaattcttattattatttttgggggactcttcttcaaagagcttgccaatgaagatttaaagacagagcaggagcttcttccaggagttctgagccttggttgtggacaaaacaatcttaagttgggcagctttcctcaacacaaaaaaaagttattaatggtcattgaaccataactaggactttatcagaaactcaaagcttgggggataaaaaggagcaagagaatactgtaacaaacttcgtacagagttcggtctattaattgtttcatgttagatattctatgtgtttacctcaattgaaaaaaaaaagaatgtttttgctagtatcagatctgctgtggaattggtattgtatgtccatgaattcttcttttctcagcacgtgttcctcactagaagaaaatgctgttacctttaagctttgtcaaatttacattaaaatacttgtatgaggactgtgacgttatgttaaaaaaaaaaaggtgttaagtcacaaaaagcggtaataaatatttcatttttg

SEQ ID NO: 17559 - DNA, 1238 bp, Homo sapiens
  source 1..1238: mol_type = unassigned DNA
cccgatgcctcctctcccttcaacgcttctgctgctgctcgctgcttgatgatggcggccagtattttaaaaaatagcaaaattattcatcggcttctttccctcccgtgcctctgcgtgtgtgcgagtgtgtgtgcgtgcgtgtgtgcgtgtctgggcgcgcgtgttccagcgctgtgcgagcgggcgggcggcgagtgcgtgtgagtggtgtgtgtgtgtgcgtgtgcaatcgttacacgctttcgcctcgctccagcttttaccccagcagcgcgattcccccggttctcctgctgccgctgctgcgccgctgccgccgtggctcgcgcggctcggggcgggcacgggctgcgtaggagccgccgccggggccgccgctggggccgcgctgccgcagccgctgcgccgccgcctagactactagcctgggctgcttgttttgtctctgaaattgacaaggacgcagggaatccgctgctaaataatgtttctgtacgatgagctgccccattacggcgggatggacggagtaggggttcccgcttccatgtacggagaccctcacgcgccgcggccgatccccccggttcaccacctgaaccacgggccgccgctccacgccacacagcactacggcgcgcacgccccgcaccccaatgtcatgccggccagtatgggatccgctgtcaacgacgccttgaagcgggacaaggacgcgatctatgggcacccgttgtttcctctgttagctctggtctttgagaagtgcgagctggcgacctgcactccccgggaacctggagtggctggcggagacgtctgctcctccgactccttcaacgaggacatcgcggtcttcgccaagcaggttcgcgccgaaaagccacttttttcctcaaatccagagctggacaatttgatgatacaagcaatacaagtactaaggtttcatcttttggagttagaaaaggtccacgaactgtgcgataacttctgccaccgatacattagctgtttgaaggggaaaatgcccatcgacctcgtcattgatgaaagagacggcagctccaagtcagatcatgaagaactttcaggctcctccacaaatctcgctgaccataacccttcttcttggcgagaccacgatgatgcaacctcaacccactcagcaggcaccccagggccctccagtgggggccatgcttcccagagcggagacaacagcagtgagcaag

SEQ ID NO: 17560 - DNA, 854 bp, Homo sapiens
  source 1..854: mol_type = unassigned DNA
tgactgcctcctcacttcctccctcccgattccgccgcggcccccaaagactctcggggtggccccttgtccgcaccgcttggagggagtgtgctctgagttaagctggtctcttctggtcctggaaaaaaatgagtattgacaaggttgctggatctgcgcagaaaagaaagtgccacttaataaaaaatttagcccggcagtggtaccgtctgcagagcttgctgcccttggacgttagcaggaagccttcggggtgctgtaatcggcgggcagaggagagggaggccgcggaattaaaaggaacaaaagctagagcgccatgccaaacgtccccggcaagacccagttaggcaggagccgggagtgatgggaaaatgaactagaatacgatgagctgccccattacggcgggatggacggagtaggggttcccgcttccatgtacggagaccctcacgcgccgcggccgatccccccggttcaccacctgaaccacgggccgccgctccacgccacacagcactacggcgcgcacgccccgcaccccaatgtcatgccggccagtatgggatccgctgtcaacgacgccttgaagcgggacaaggacgcgatctatggctctggtctttgagaagtgcgagctggcgacctgcactccccgggaacctggagtggctggcggagacgtctgctcctccgactccttcaacgaggacatcgcggtcttcgccaagcaggttcgcgccgaaaagccacttttttcctcaaatccagagctggacaatttgatgatacaagcaatacaagtactaaggtttcatcttttggagttagaaaaggtaagcaggaaa

SEQ ID NO: 17561 - DNA, 2538 bp, Homo sapiens
  source 1..2538: mol_type = unassigned DNA
cttttctgttcgccctcttctccctgctctttttccctttccacccccctcctctgttctccctcacctcctgcgccccctcccccttcccgggttctgacagtacgatgagctgccccattacggcgggatggacggagtaggggttcccgcttccatgtacggagaccctcacgcgccgcggccgatccccccggttcaccacctgaaccacgggccgccgctccacgccacacagcactacggcgcgcacgccccgcaccccaatgtcatgccggccagtatgggatccgctgtcaacgacgccttgaagcgggacaaggacgcgatctatgggcacccgttgtttcctctgttagctctggtctttgagaagtgcgagctggcgacctgcactccccgggaacctggagtggctggcggagacgtctgctcctccgactccttcaacgaggacatcgcggtcttcgccaagcaggttcgcgccgaaaagccacttttttcctcaaatccagagctggacaatttgatgatacaagcaatacaagtactaaggtttcatcttttggagttagaaaaggtccacgaactgtgcgataacttctgccaccgatacattagctgtttgaaggggaaaatgcccatcgacctcgtcattgatgaaagagacggcagctccaagtcagatcatgaagaactttcaggctcctccacaaatctcgctgaccataacccttcttcttggcgagaccacgatgatgcaacctcaacccactcagcaggcaccccagggccctccagtgggggccatgcttcccagagcggagacaacagcagtgagcaaggggatggtttagacaacagtgtagcttcacctggtacaggtgacgatgatgatccggataaggacaaaaaacgccagaagaaaagaggcattttccccaaagtagcaacaaatatcatgagagcatggctcttccagcatctcacacatccgtacccttccgaagagcagaagaaacagttagcgcaagacacaggacttacaattctccaagtaaacaactggtttattaatgccagaagaagaatagtacagcccatgattgaccagtcaaatcgagcaggttttcttcttgatccttcagtgagccaaggagcagcatatagtccagagggtcagcccatggggagctttgtgttggatggtcagcaacacatggggatccggcctgcaggacctatgagtggaatgggcatgaatatgggcatggatgggcaatggcactacatgtaaccttcatcatgtaaagcaatcgcaaagcaagggggaagtttgcagagcatgccaggggactacgtttctcagggtggtcctatgggaatgagtatggcacagccaagttacactcctccccagatgaccccacaccctactcaattaagacatggacccccaatgcattcatatttgccaagccatccccaccacccagccatgatgatgcacggaggaccccctacccaccctggaatgactatgtcagcacagagccccacaatgttaaattctgtagatcccaatgttggcggacaggttatggacattcatgcccaatagtataagggaactcaagggaaaaggaaacacacgcaaaaactattttaagactttctgaactttgaccagatgttgacacttaatatgaaattccagacagctgtgattattttttacttttgtcatttttcatcaagcaacagaggaccaatgcaacaagaacacaaatgtgaaatcatgggctgactgagacaattctgtccatgtaaagatcctctggaaaaagactccgagagttataactactgtagtataaatataggaactaagttaaacttgtacatttctgttgatcacgccgttatgttgcctcaaatagttttagaagagaaaaaaaaatatatccttgttttccacactatgtgtgttgttcccaaaagaatgactgttttggttcatcagtgaattcaccatccaggagagactgtggtatatattttaaacctgttgggccaatgagaaaagaaccacactggagatcatgatgaacttttggctgaacctcatcactcgaactccagcttcaagaatgtgttttcatgcccggcctttgttcctccataaatgtgtcctttagtttcaaacagatctttatagttcgtgcttcataagccaattcttattattatttttgggggactcttcttcaaagagcttgccaatgaagatttaaagacagagcaggagcttcttccaggagttctgagccttggttgtggacaaaacaatcttaagttgggcagctttcctcaacacaaaaaaaagttattaatggtcattgaaccataactaggactttatcagaaactcaaagcttgggggataaaaaggagcaagagaatactgtaacaaacttcgtacagagttcggtctattaattgtttcatgttagatattctatgtgtttacctcaattg

SEQ ID NO: 17562 - DNA, 1442 bp, Homo sapiens
  source 1..1442: mol_type = unassigned DNA
aggaggaggaggaagatcaggaggaggaggaagaagaggaaaaaagagaaaaagaagaaatatcacagaaaaaaaaattcttcgttgtctagactgggctttttttcccccctaaaaaatagcatattggagaattgggagaagtctctttggtttggaaaaaaaaaaaaggaatcttcagcctagatcactttcttatccggactgggatattaaatatacgacacatccaggagtttattggagcgcagactgatggcgcaaaggtacgatgagctgccccattacggcgggatggacggagtaggggttcccgcttccatgtacggagaccctcacgcgccgcggccgatccccccggttcaccacctgaaccacgggccgccgctccacgccacacagcactacggcgcgcacgccccgcaccccaatgtcatgccggccagtatgggatccgctgtcaacgacgccttgaagcgggacaaggacgcgatctatgggcacccgttgtttcctctgttagctctggtctttgagaagtgcgagctggcgacctgcactccccgggaacctggagtggctggcggagacgtctgctcctccgactccttcaacgaggacatcgcggtcttcgccaagcaggttcgcgccgaaaagccacttttttcctcaaatccagagctggacaatttgatgatacaagcaatacaagtactaaggtttcatcttttggagttagaaaaggtccacgaactgtgcgataacttctgccaccgatacattagctgtttgaaggggaaaatgcccatcgacctcgtcattgatgaaagagacggcagctccaagtcagatcatgaagaactttcaggctcctccacaaatctcgctgaccataacccttcttcttggcgagaccacgatgatgcaacctcaacccactcagcaggcaccccagggccctccagtgggggccatgcttcccagagcggagacaacagcagtgagcaaggggatggtttagacaacagtgtagcttcacctggtacaggtgacgatgatgatccggataaggacaaaaaacgccagaagaaaagaggcattttccccaaagtagcaacaaatatcatgagagcatggctcttccagcatctcacacatccgtacccttccgaagagcagaagaaacagttagcgcaagacacaggacttacaattctccaagtaaacaactggtttattaatgccagaagaagaatagtacagcccatgattgaccagtcaaatcgagcagtgagccaaggagcagcatatagtccagagggtcagcccatggggagctttgtgttggatggtcagcaacacatggggatccggcctgcaggacctatgagtggaatgggcatgaatatgggcatggatgggcaatggcactacatgtaacc

SEQ ID NO: 17563 - DNA, 4818 bp, Homo sapiens
  source 1..4818: mol_type = unassigned DNA
cgggccgctcgtaaccttcagttcgggggcttgacaatttttttcttctttttcttctttttcttttctttctttttttttccaactgaggggaagagaagagaaagagggggaaaggaggaccgaagaggaggaggaggggaggggggaggaggaggaggtggaggaggaggaggaagatcaggaggaggaggaagaagaggaaaaaagagaaaaagaagaaatatcacagaaaaaaaaattcttcgttgtctagactgggctttttttcccccctaaaaaatagcatattggagaattgggagaagtctctttggtttggaaaaaaaaaaaaggaatcttcagcctagatcactttcttatccggactgggatattaaatatacgacacatccaggagtttattggagcgcagactgatggcgcaaaggtacgatgagctgccccattacggcgggatggacggagtaggggttcccgcttccatgtacggagaccctcacgcgccgcggccgatccccccggttcaccacctgaaccacgggccgccgctccacgccacacagcactacggcgcgcacgccccgcaccccaatgtcatgccggccagtatgggatccgctgtcaacgacgccttgaagcgggacaaggacgcgatctatgggcacccgttgtttcctctgttagctctggtctttgagaagtgcgagctggcgacctgcactccccgggaacctggagtggctggcggagacgtctgctcctccgactccttcaacgaggacatcgcggtcttcgccaagcaggttcgcgccgaaaagccacttttttcctcaaatccagagctggacaatttgatgatacaagcaatacaagtactaaggtttcatcttttggagttagaaaaggtccacgaactgtgcgataacttctgccaccgatacattagctgtttgaaggggaaaatgcccatcgacctcgtcattgatgaaagagacggcagctccaagtcagatcatgaagaactttcaggctcctccacaaatctcgctgaccataacccttcttcttggcgagaccacgatgatgcaacctcaacccactcagcaggcaccccagggccctccagtgggggccatgcttcccagagcggagacaacagcagtgagcaaggggatggtttagacaacagtgtagcttcacctggtacaggtgacgatgatgatccggataaggacaaaaaacgccagaagaaaagaggcattttccccaaagtagcaacaaatatcatgagagcatggctcttccagcatctcacacatccgtacccttccgaagagcagaagaaacagttagcgcaagacacaggacttacaattctccaagtaaacaactggtttattaatgccagaagaagaatagtacagcccatgattgaccagtcaaatcgagcaggttttcttcttgatccttcagtgagccaaggagcagcatatagtccagagggtcagcccatggggagctttgtgttggatggtcagcaacacatggggatccggcctgcaggtttgcagagcatgccaggggactacgtttctcagggtggtcctatgggaatgagtatggcacagccaagttacactcctccccagatgaccccacaccctactcaattaagacatggacccccaatgcattcatatttgccaagccatccccaccacccagccatgatgatgcacggaggaccccctacccaccctggaatgactatgtcagcacagagccccacaatgttaaattctgtagatcccaatgttggcggacaggttatggacattcatgcccaatagtataagggaactcaagggaaaaggaaacacacgcaaaaactattttaagactttctgaactttgaccagatgttgacacttaatatgaaattccagacagctgtgattattttttacttttgtcatttttcatcaagcaacagaggaccaatgcaacaagaacacaaatgtgaaatcatgggctgactgagacaattctgtccatgtaaagatcctctggaaaaagactccgagagttataactactgtagtataaatataggaactaagttaaacttgtacatttctgttgatcacgccgttatgttgcctcaaatagttttagaagagaaaaaaaaatatatccttgttttccacactatgtgtgttgttcccaaaagaatgactgttttggttcatcagtgaattcaccatccaggagagactgtggtatatattttaaacctgttgggccaatgagaaaagaaccacactggagatcatgatgaacttttggctgaacctcatcactcgaactccagcttcaagaatgtgttttcatgcccggcctttgttcctccataaatgtgtcctttagtttcaaacagatctttatagttcgtgcttcataagccaattcttattattatttttgggggactcttcttcaaagagcttgccaatgaagatttaaagacagagcaggagcttcttccaggagttctgagccttggttgtggacaaaacaatcttaagttgggcagctttcctcaacacaaaaaaaagttattaatggtcattgaaccataactaggactttatcagaaactcaaagcttgggggataaaaaggagcaagagaatactgtaacaaacttcgtacagagttcggtctattaattgtttcatgttagatattctatgtgtttacctcaattgaaaaaaaaaagaatgtttttgctagtatcagatctgctgtggaattggtattgtatgtccatgaattcttcttttctcagcacgtgttcctcactagaagaaaatgctgttacctttaagctttgtcaaatttacattaaaatacttgtatgaggactgtgacgttatgttaaaaaaaaaaaggtgttaagtcacaaaaagcggtaataaatatttcatttttgattttttgttaggcttttgcgtttttaatggttttaggacaagactgcacaatgccaactctatacagtgttaaaagtaggtttttccccccagcagttgagtatattttaaactcatcaataatttttaaggtaatcatctatagcctttcaatgtctatttgacctataagttccaccagcagaaaacttctaaaggtacgaaactatgtgtacatgatgagccaggttgaaagatccccttgaacatgctcaacctcctttttagatgcatgacgttaaaaaatatatactttcagataaagcttttcatgggcatcctctgccagaataaaggacttttcagggttaattttacaacataagaaataatgtctgtgctcaaaggtaatttatctgcctgtgtttttcctctgcctgtcttactacaatattgttggatatgtaaatgaaaatttacatatgggtgttcatagataagtaaacaacttctatggagtttgaaattctgactttaaaagattacttaatcattaatattttataaattatattgtggtatatttttatttcagacacatccatgtgcagggatgctagtgtgatgatttgataactaaacttaaacttttttctgaaaacaaaacaaaacaaaatggacggtataatgccattttcaaaattttatgcaacattcctggaaatctataccattagcttattgatactgcacaaacaatgtctgctaaagtgtgcaaaaagggtgaggcatgtcccctcaattttcaaataaatatactatcctggaattttttaactcttaaattttgaatctttgtttagaaagaataatgtcatatactttggctagatatgtgatgtcaaccggctaaggaaattattcatcatctctgcaaacttaaacttggaagaaatccatagttattatttggggctcttccatctttccatttcagacagcatttatggaggttctatataaatgaacgaggaaatacacttctattgttttgtgttatatttagtcaggtagaatttttacaaatacatttcagtttaagtgttgtgttgctgtttaaacatagaaataatgcttctgacacaaactaacttaatagagaaattcagtgccacttgggaaagagagatagcttccctctcatttttgctattctattttacatgaagtctttttgtaaattttaaatatttgcctatttttactttaaatacttttatgtaaactatgaaaattccccattataaatcaactctcacatcaggtgggaaaaagaacctttttttctttccactcagtaaattctgaagggtttccttggcaattggctcgtgtttaggatgtgttttatgcaattatcaagttatctcattgaagtttagagaccagagctctcaactcttggttttaatgaataaagtcatctcatgcttagtttattcgtcaaacccacgtcctatcatgttaactttaaccttcttaaatatttggagatgaatgataattgtaatatttgtttgcattaccttgctctcccccacccccaaccccatgataacacagagaagtgatagatttgtccaatttttataatgctttttttacaccaccccggaaggcacttgctcctatctcgggtttactatttagtgtaaagagttccgatttgggtatatttaagaaagactcagctgtcaaaagcaaagaaactgggaatggtgttttgacaaccatatagtgttaaaggaaatactgtagtctgaataaaattgcttatgttctcc

SEQ ID NO: 17564 - DNA, 4818 bp, Homo sapiens; identical to SEQ ID NO: 17563
  source 1..4818: mol_type = unassigned DNA

SEQ ID NO: 17565 - DNA, 1000 bp, Homo sapiens
  source 1..1000: mol_type = unassigned DNA
ctctcattaaggaaggtaagagcgttgccttctcgccataatcatagtcctcttctcccagaataggatttgggaaattctggctaagtcctctgcctaccctcattgccccgctgatgtgtgacatcaacagaatttctccgcaacgtttgtcagtctccaacctcagagggctcacaaagcctcctcctgaatcctctctcagtcctccaacactaccaagaagaaaagcaattattcaggatggcatcttgctggggagaagcagcctccctgaggtagatgtgttctcctgtcacttaaagaaccacttctcctggtctgagtagtaagaggcgcatttgctgttgctgcaccatttgccaaggctctgagtttgaggtgtcctgtgccctgaccctacaagatgccaagagaagatgctcacttcatctatggttaccccaagaaggggcacggccactcttacaccacggctgaagaggccgctgggatcggcatcctgacagtgatcctgggagtcttactgctcatcggctgttggtattgtagaagacgaaatggatacagagccttgatggataaaagtcttcatgttggcactcaatgtgccttaacaagaagatgcccacaagaagggtttgatcatcgggacagcaaagtgtctcttcaagagaaaaactgtgaacctgtggttcccaatgctccacctgcttatgagaaactctctgcagaacagtcaccaccaccttattcaccttaagagccagcgagacacctgagacatgctgaaattatttctctcacacttttgcttgaatttaatacagacatctaatgttctcctttggaatggtgtaggaaaaatgcaagccatctctaataataagtcagtgttaaaattttagtaggtccgctagcagtactaatcatgtgaggaaatgatgagaaatattaaattgggaaaactccatcaataaatgttgcaatgcatgatact

SEQ ID NO: 17566 - DNA, 791 bp, Homo sapiens
  source 1..791: mol_type = unassigned DNA
cagcagacagaggactctcattaaggaagaatttctccgcaacgtttgtcagtctccaacctcagagggctcacaaagcctcctcctgaatcctctctcagtcctccaacactaccaagaagaaaagcaattattcaggatggcatcttgctggggagaagcagcctccctgaggtgtcctgtgccctgaccctacaagatgccaagagaagatgctcacttcatctatggttaccccaagaaggggcacggccactcttacaccacggctgaagaggccgctgggatcggcatcctgacagtgatcctgggagtcttactgctcatcggctgttggtattgtagaagacgaaatggatacagagccttgatggataaaagtcttcatgttggcactcaatgtgccttaacaagaagatgcccacaagaagggtttgatcatcgggacagcaaagtgtctcttcaagagaaaaactgtgaacctgtggttcccaatgctccacctgcttatgagaaactctctgcagaacagtcaccaccaccttattcaccttaagagccagcgagacacctgagacatgctgaaattatttctctcacacttttgcttgaatttaatacagacatctaatgttctcctttggaatggtgtaggaaaaatgcaagccatctctaataataagtcagtgttaaaattttagtaggtccgctagcagtactaatcatgtgaggaaatgatgagaaatattaaattgggaaaactccatcaataaatgttgcaatgcatgata

SEQ ID NO: 17567 - DNA, 2415 bp, Homo sapiens
  source 1..2415: mol_type = unassigned DNA
ccgtcagaaatctaaacccgtgactatcatgggactcaaaaccaggaaaaaaaataagtcaaaacgattaagagccagagaagcagtcttcatacacgcggccagccagcagacagaggactctcattaaggaaggtgtcctgtgccctgaccctacaagatgccaagagaagatgctcacttcatctatggttaccccaagaaggggcacggccactcttacaccacggctgaagaggccgctgggatcggcatcctgacagtgatcctgggagtcttactgctcatcggctgttggtattgtagaagacgaaatggatacagagccttgatggataaaagtcttcatgttggcactcaatgtgccttaacaagaagatgcccacaagaagggtttgatcatcgggacagcaaagtgtctcttcaagagaaaaactgtgaacctgtggttcccaatgctccacctgcttatgagaaactctctgcagaacagtcaccaccaccttattcaccttaagagccagcgagacacctgagacatgctgaaattatttctctcacacttttgcttgaatttaatacagacatctaatgttctcctttggaatggtgtaggaaaaatgcaagccatctctaataataagtcagtgttaaaattttagtaggtccgctagcagtactaatcatgtgaggaaatgatgagaaatattaaattgggaaaactccatcaataaatgttgcaatgcatgatactatctgtgccagaggtaatgttagtaaatccatggtgttattttctgagagacagaattcaagtgggtattctggggccatccaatttctctttacttgaaatttggctaataacaaactagtcaggttttcgaaccttgaccgacatgaactgtacacagaattgttccagtactatggagtgctcacaaaggatacttttacaggttaagacaaagggttgactggcctatttatctgatcaagaacatgtcagcaatgtctctttgtgctctaaaattctattatactacaataatatattgtaaagatcctatagctctttttttttgagatggagtttcgcttttgttgcccaggctggagtgcaatggcgcgatcttggctcaccataacctccgcctcccaggttcaagcaattctcctgccttagcctcctgagtagctgggattacaggcgtgcgccactatgcctgactaattttgtagttttagtagagacggggtttctccatgttggtcaggctggtctcaaactcctgacctcaggtgatctgcccgcctcagcctcccaaagtgctggaattacaggcgtgagccaccacgcctggctggatcctatatcttaggtaagacatataacgcagtctaattacatttcacttcaaggctcaatgctattctaactaatgacaagtattttctactaaaccagaaattggtagaaggatttaaataagtaaaagctactatgtactgccttagtgctgatgcctgtgtactgccttaaatgtacctatggcaatttagctctcttgggttcccaaatccctctcacaagaatgtgcagaagaaatcataaaggatcagagattctggaatggtgtcattatttgcatagcaacattgcaatttgttttcctttggctacatcaacgtatcacctacactattatttatctaatatttctctttcaggcagctcatttaaactttttttggctttaattcctattgccatcctgagtggaaaaccagtatcattttccatagtagaggataactataacaacgaagataatgaaagtaatttttttaacctaagaaaatactaatggtcacagaaggctatgaacctgagacctgctctctttgtcaaacagagattaacaaggatcagagaaaagttaaaggctgtctttgacataactggaaggcttacaagagttttaaagaaattactttctcactatatgattcattgctatttaacggtgagtcagtaaaccacctaaaaatcatcttgtctcatcagaaacactagtgtaacataactgcatcattttctactaaagacaaaatttcaccaaaggggaaaaagaaaacacaggataaagagatgtattacacacatcgaaaaaaacaacatttaacaaaatattaaaatatttccccactcttctgatactgtcaagtcttactacttaaaataaggcttccacctctcccacttcaaacaaataaatgaattctaaaccaaagaaacttcatcaggcatttgggtacctcctcccctcaccacgaggtctctgctgaacctcaatcctgtacactgaggaacctgtggcttgaaccctacatccctccagaacccccagactg

SEQ ID NO: 17568 - DNA, 2851 bp, Homo sapiens
  source 1..2851: mol_type = unassigned DNA
cagatatttgtctcaaagagtcccaggccaaacctcagggacctcagagcgtttagaaaaataacacctctgtgagcttggtccaggcagatcccatgcagagaggagtttgtccccttccagtccccgaggtcctggctattgccagcatggagtgacctgtgtcacctctgagtgccaggcaagggttcagcagctgacgactcagcttctgcaggatgctggcagcatagccagcgagatagttggaagccgtcagggcacagggaaggggccgagggtgccctgagtgtgcatggggggcagccctgctgcagtccaagcctttgattcccaagctatgtgcacagtttcctctggactctgccatgtggcccagccacccatacctggaataggggctaagccaagctgctctctcctccaaagggaggcagcctgtgtgctttgtccgtttgcctttgcagagacctcgatcttcacgcaaggcaagcagcagcccctgtaagcacacgagacaatcccaagtgtcagtgggaaggagatccctttcctgatggggctgcctgtgtccagtccctcccagcttccccagggccctggggctctgcaggcattcagaagtggaagccagccacagcctgggactgaagaggttaatgtgcatctgcctccgaatgttaatgtgtctaggtgatgtcagtgggagccatgaagaagggagtggggagggcagttgggcttggaggcggcagcggctgccaggctacggaggaagacccccttcccaactgcggggcttgcgctccgggacaaggtggcaggcgctggaggctgccgcagcctgcgtgggtggaggggagctcagctcggttgtgggagcaggcgaccggcactggctggatggacctggaagcctcgctgctgcccactggtcccaacgccagcaacacctctgatggccccgataacctcacttcggcaggatcacctcctcgcacggggagcatctcctacatcaacatcatcatgccttcggtgttcggcaccatctgcctcctgggcatcatcgggaactccacggtcatcttcgcggtcgtgaagaagtccaagctgcactggtgcaacaacgtccccgacatcttcatcatcaacctctcggtagtagatctcctctttctcctgggcatgcccttcatgatccaccagctcatgggcaatggggtgtggcactttggggagaccatgtgcaccctcatcacggccatggatgccaatagtcagttcaccagcacctacatcctgaccgccatggccattgaccgctacctggccactgtccaccccatctcttccacgaagttccggaagccctctgtggccaccctggtgatctgcctcctgtgggccctctccttcatcagcatcacccctgtgtggctgtatgccagactcatccccttcccaggaggtgcagtgggctgcggcatacgcctgcccaacccagacactgacctctactggttcaccctgtaccagtttttcctggcctttgccctgccttttgtggtcatcacagccgcatacgtgaggatcctgcagcgcatgacgtcctcagtggcccccgcctcccagcgcagcatccggctgcggacaaagagggtgacccgcacagccatcgccatctgtctggtcttctttgtgtgctgggcaccctactatgtgctacagctgacccagttgtccatcagccgcccgaccctcacctttgtctacttatacaatgcggccatcagcttgggctatgccaacagctgcctcaacccctttgtgtacatcgtgctctgtgagacgttccgcaaacgcttggtcctgtcggtgaagcctgcagcccaggggcagcttcgcgctgtcagcaacgctcagacggctgacgaggagaggacagaaagcaaaggcacctgatacttcccctgccaccctgcacacctccaagtcagggcaccacaacacgccaccgggagagatgctgagaaaaacccaagaccgctcgggaaatgcaggaaggccgggttgtgaggggttgttgcaatgaaataaatacattccatggggctcacacgttgctggggaggcctggagtcaggtttggggttttcagatatcagaaatccccttgggggagcaggatgagacctttggatagaacagaagctgagcaagagaacatgttggtttggataaccggttgcactatatctgtgagctctcaaatgtcttcttcccaaggcaagaggtggaagggtactgactgggtttgtttaaagtcaggcagggctggagtgagcagccagggccatgttgcacaaggcctgagagacgggaaagggcccgatcgctctttcccgcctctcactggtgcgatggaaggtggcctttctcccaagctggtggataatgaaaaataaagcatcccatctctcggcgttccagcatcctgtcaatttcccttttgctctagaggatgcatgtttatttgaggggatgtggcactgagcccacaggagtaaaagcccagtttgctaggaggtctgcttactgaaaacaaggagacctggggtgggtgtggttgggggtcttaaaactaataaaagctggggtcggggggcttttgcagctctggtgacattctctccacggggcacatttgctcagtcactaatccagcttgagtgtccgtgtgttctgcatgtgcaggggtcattctagtgcccggtgtgttggcatcatctttttgctctagcccttcctctccaaaataaaatcaaataaaggaaaatctccacccaca

SEQ ID NO: 17569 - DNA, 1219 bp, Homo sapiens
  source 1..1219: mol_type = unassigned DNA
ccaagtgtcagtgggaaggagatccctttcctgatggggctgcctgtgtccagtccctcccagcttccccagggccctggggctctgcaggcattcagaagtggaagccagccacagcctgggactgaagaggttaatgtgcatctgcctccgaatgttaatgtgtctaggtgatgtcagtgggagccatgaagaagggagtggggagggcagttgggcttggaggcggcagcggctgccaggctacggaggaagacccccttcccaactgcggggcttgcgctccgggacaaggtggcaggcgctggaggctgccgcagcctgcgtgggtggaggggagctcagctcggttgtgggagcaggcgaccggcactggctggatggacctggaagcctcgctgctgcccactggtcccaacgccagcaacacctctgatggccccgataacctcacttcggcaggatcacctcctcgcacggggagcatctcctacatcaacatcatcatgccttcggtgttcggcaccatctgcctcctgggcatcatcgggaactccacggtcatcttcgcggtcgtgaagaagtccaagctgcactggtgcaacaacgtccccgacatcttcatcatcaacctctcgtttttcctggcctttgccctgccttttgtggtcatcacagccgcatacgtgaggatcctgcagcgcatgacgtcctcagtggcccccgcctcccagcgcagcatccggctgcggacaaagagggtgacccgcacagccatcgccatctgtctggtcttctttgtgtgctgggcaccctactatgtgctacagctgacccagttgtccatcagccgcccgaccctcacctttgtctacttatacaatgcggccatcagcttgggctatgccaacagctgcctcaacccctttgtgtacatcgtgctctgtgagacgttccgcaaacgcttggtcctgtcggtgaagcctgcagcccaggggcagcttcgcgctgtcagcaacgctcagacggctgacgaggagaggacagaaagcaaaggcacctgatacttcccctgccaccctgcacacctccaagtcagggcaccacaacacgccaccgggagagatgctgagaaaaacccaagaccgctcgggaaatgcaggaaggccgggttgtgaggggttgttgcaatgaaataaatacattccatggggctcac

SEQ ID NO: 17570 - DNA, 2368 bp, Homo sapiens
  source 1..2368: mol_type = unassigned DNA
agaaaagagcacgacgcacccgatgctcggattggatgaagtggcaaaggtaaccccgctggttcgggcgtttggctgttcctgtgcctggacccccgctttggaaatggaggtggggctggctcccaacctgtctcagagaccctcgcactcctcccccaccttccgtcagctgggacccgctgagagccgtttttggtcacgcgcgcttagcggatagacctgcagtcccgcagagaggaagggcgcccgggctgtccgccgcgcggggaggacgcgagcacccagctttaatccctggaaagtccacgaacaatgaatccatttcatgcatcttgttggaacacctctgccgaacttttaaacaaatcctggaataaagagtttgcttatcaaactgccagtgtggtagatacagtcatcctcccttccatgattgggattatctgttcaacagggctggttggcaacatcctcattgtattcactataataagatccaggaaaaaaacagtccctgacatctatatctgcaacctggctgtggctgatttggtccacatagttggaatgccttttcttattcaccaatgggcccgagggggagagtgggtgtttggggggcctctctgcaccatcatcacatccctggatacttgtaaccaatttgcctgtagtgccatcatgactgtaatgagtgtggacaggtactttgccctcgtccaaccatttcgactgacacgttggagaacaaggtacaagaccatccggatcaatttgggcctttgggcagcttcctttatcctggcattgcctgtctgggtctactcgaaggtcatcaaatttaaagacggtgttgagagttgtgcttttgatttgacatcccctgacgatgtactctggtatacactttatttgacgataacaactttttttttccctctacccttgattttggtgtgctatattttaattttatgctatacttgggagatgtatcaacagaataaggatgccagatgctgcaatcccagtgtaccaaaacagagagtgatgaagttgacaaagatggtgctggtgctggtggtagtctttatcctgagtgctgccccttatcatgtgatacaactggtgaacttacagatggaacagcccacactggccttctatgtgggttattacctctccatctgtctcagctatgccagcagcagcattaacccttttctctacatcctgctgagtggaaatttccagaaacgtctgcctcaaatccaaagaagagcgactgagaaggaaatcaacaatatgggaaacactctgaaatcacacttttaggaaagtacatggatcaccatgagtctagacatgattgtctatcttactggtattatcagaaagggcaggtgtaccgatatgtttatgcccattcttcttgtgtacttgtgactcttagcagcatggaagagaagtgtaaccatgcaaatacaatgagcttaatatgctaactttagcaagatgtaaaatgttgatctatattgtgggtagggaatgggatagtctgagatacccaggcttcatgatggtgtatattatttcagcatattataaactagtcactaatgaaaatggccatccatgaccattgactcaaaactcaccaaggaacctgaccttgccctccacactgtggcctcactgtaacagtttcctcaaggttcctaggagggtatcaccttagagtgaagtctaaaatttggctattttttatctataaaaaatgtcagttttatatggtccaatactaataccctcaacaactaagccccaccttttagaataagttaccatttattgcacacatgcaatgtgtaagattacatgtaacaaacctgtgaaataagtattattacctttgtttgctaaggctcagaaaggagaaatgataggcctaatgctgcaacagctatctaagagctgagctaacattcagctctgcctgtttcttttctactgcacgaccttgacaacctttacttatcatactggagaacccagtaacttggagtttcttttgctttctcctgtagccctacaagaggagaactaaagtctgatagaaatgagttgatgttttaagcatcattttggattatctttgttctcacacctgctaactgtagaaactggcatctgcactttaataataatactttacttctggactttaagcataattaggaaacattcctggccgggtgcagtggctcatgcctgtaatcccagcactttgggaggtggaggcaggtggatcacaaagtcagaagttcaagaccagtctggccaacatagtgagaccctgtctact

SEQ ID NO: 17571 - DNA, 1253 bp, Homo sapiens
  source 1..1253: mol_type = unassigned DNA
cgcccgggctgtccgccgcgcggggaggacgcgagcacccagatgaatccatttcatgcatcttgttggaacacctctgccgaacttttaaacaaatcctggaataaagagtttgcttatcaaactgccagtgtggtagatacagtcatcctcccttccatgattgggattatctgttcaacagggctggttggcaacatcctcattgtattcactataataagatccaggaaaaaaacagtccctgacatctatatctgcaacctggctgtggctgatttggtccacatagttggaatgccttttcttattcaccaatgggcccgagggggagagtgggtgtttggggggcctctctgcaccatcatcacatccctggatacttgtaaccaatttgcctgtagtgccatcatgactgtaatgagtgtggacaggtactttgccctcgtccaaccatttcgactgacacgttggagaacaaggtacaagaccatccggatcaatttgggcctttgggcagcttcctttatcctggcattgcctgtctgggtctactcgaaggtcatcaaatttaaagacggtgttgagagttgtgcttttgatttgacatcccctgacgatgtactctggtatacactttatttgacgataacaactttttttttccctctacccttgattttggtgtgctatattttaattttatgctatacttgggagatgtatcaacagaataaggatgccagatgctgcaatcccagtgtaccaaaacagagagtgatgaagttgacaaagatggtgctggtgctggtggtagtctttatcctgagtgctgccccttatcatgtgatacaactggtgaacttacagatggaacagcccacactggccttctatgtgggttattacctctccatctgtctcagctatgccagcagcagcattaacccttttctctacatcctgctgagtggaaatttccagaaacgtctgcctcaaatccaaagaagagcgactgagaaggaaatcaacaatatgggaaacactctgaaatcacacttttaggaaagtacatggatcaccatgagtctagacatgattgtctatcttactggtattatcagaaagggcaggtgtaccgatatgtttatgcccattcttcttgtgtacttgtgactcttagcagcatggaagagaagtgtaaccatgcaaatacaatgagcttaatatgctaactttagcaagatgtaaaa

SEQ ID NO: 17572 - DNA, 2144 bp, Homo sapiens
  source 1..2144: mol_type = unassigned DNA
gcaccccacgctcctagaaaagagcacgacgcacccgatgctcggattggatgaagtggcaaagctttaatccctggaaagtccacgaacaatgaatccatttcatgcatcttgttggaacacctctgccgaacttttaaacaaatcctggaataaagagtttgcttatcaaactgccagtgtggtagatacagtcatcctcccttccatgattgggattatctgttcaacagggctggttggcaacatcctcattgtattcactataataagatccaggaaaaaaacagtccctgacatctatatctgcaacctggctgtggctgatttggtccacatagttggaatgccttttcttattcaccaatgggcccgagggggagagtgggtgtttggggggcctctctgcaccatcatcacatccctggatacttgtaaccaatttgcctgtagtgccatcatgactgtaatgagtgtggacaggtactttgccctcgtccaaccatttcgactgacacgttggagaacaaggtacaagaccatccggatcaatttgggcctttgggcagcttcctttatcctggcattgcctgtctgggtctactcgaaggtcatcaaatttaaagacggtgttgagagttgtgcttttgatttgacatcccctgacgatgtactctggtatacactttatttgacgataacaactttttttttccctctacccttgattttggtgtgctatattttaattttatgctatacttgggagatgtatcaacagaataaggatgccagatgctgcaatcccagtgtaccaaaacagagagtgatgaagttgacaaagatggtgctggtgctggtggtagtctttatcctgagtgctgccccttatcatgtgatacaactggtgaacttacagatggaacagcccacactggccttctatgtgggttattacctctccatctgtctcagctatgccagcagcagcattaacccttttctctacatcctgctgagtggaaatttccagaaacgtctgcctcaaatccaaagaagagcgactgagaaggaaatcaacaatatgggaaacactctgaaatcacacttttaggaaagtacatggatcaccatgagtctagacatgattgtctatcttactggtattatcagaaagggcaggtgtaccgatatgtttatgcccattcttcttgtgtacttgtgactcttagcagcatggaagagaagtgtaaccatgcaaatacaatgagcttaatatgctaactttagcaagatgtaaaatgttgatctatattgtgggtagggaatgggatagtctgagatacccaggcttcatgatggtgtatattatttcagcatattataaactagtcactaatgaaaatggccatccatgaccattgactcaaaactcaccaaggaacctgaccttgccctccacactgtggcctcactgtaacagtttcctcaaggttcctaggagggtatcaccttagagtgaagtctaaaatttggctattttttatctataaaaaatgtcagttttatatggtccaatactaataccctcaacaactaagccccaccttttagaataagttaccatttattgcacacatgcaatgtgtaagattacatgtaacaaacctgtgaaataagtattattacctttgtttgctaaggctcagaaaggagaaatgataggcctaatgctgcaacagctatctaagagctgagctaacattcagctctgcctgtttcttttctactgcacgaccttgacaacctttacttatcatactggagaacccagtaacttggagtttcttttgctttctcctgtagccctacaagaggagaactaaagtctgatagaaatgagttgatgttttaagcatcattttggattatctttgttctcacacctgctaactgtagaaactggcatctgcactttaataataatactttacttctggactttaagcataattaggaaacattcctggccgggtgcagtggctcatgcctgtaatcccagcactttgggaggtggaggcaggtggatcacaaagtcagaagttcaagaccagtctggccaacatagtgagaccctgtctact

SEQ ID NO: 17573 - DNA, 935 bp, Homo sapiens
  source 1..935: mol_type = unassigned DNA
gacccacagacacacttggacgattcctgcagaaatcagtgaggcagtctcctcccaggggcttggcgcctggctcgaggcgaggctgccggcccggacgctgactgcccagtgccacagacatggccaacgggaccaacgcctctgccccatactacagctatgaatactacctggactatctggacctcattcccgtggacgagaagaagctgaaagcccacaaacattccatcgtgatcgcattctgggtgagcctggctgccttcgtggtgctgctcttcctcatcttgctctacatgtcctggtccgcctccccgcagatgaggaacagccccaagcaccaccaaacatgcccctggagtcacggcctcaacctccacctctgcatccagaagtgcctgccgtgccacagggaacccctggcaacctcacaggctcaggcgagctcagtggagccagggagcagaactggccctgaccagccgctacgacaggagagctcctccaccttgcccctcgggggtttccagacccaccccactctcctctgggaactgaccctcaatgggggtcccctcgtcaggagcaagcccagcgagcctccccctggagacaggacctctcaattgcagagctgatgtcagtaaatcgtggccatagctgagtgaactggtgaaatcaagccaacctggacacatacgttcctcgttcttcttagaggccatttgcatgtagcagaaagggcacctaggtcaagtgcaactagagcaggagcatcctatgcctttgacaaagattgcagtggcccctcgagtgcagaggtcatcccaggtgttgctgagtttattgagcacacctagcctgcttgcttactgcttatatttgctcagggaagagtaggaaaataaaatatatgcaaatcaagaggaaaa

SEQ ID NO: 17574 - DNA, 440 bp, Homo sapiens
  source 1..440: mol_type = unassigned DNA
atggccaacgggaccaacgcctctgccccatactacagctatgaatactacctggactatctggacctcattcccgtggacgagaagaagctgaaagcccacaaacattccatcgtgatcgcattctgggtgagcctggctgccttcgtggtgctgctcttcctcatcttgctctacatgtcctggtccgcctccccgcagatgagctttaacacagatgaatctcttctgcattcagaagtgctgcctcaaactcgagctatttcctgtgatgagctccaagcccctagagaggaaggggcggcctgacgaggcactggatgggcctcatggcctagaagtccccacattccttgcaactctgatgctgggcacctacaggcccgagtttatcatttactgggcagttcaataaagtcctctcaacttttcttgtcaaa

SEQ ID NO: 17575 - DNA, 1000 bp, Homo sapiens
  source 1..1000: mol_type = unassigned DNA
ggataatggggaggctatgcaggtgtgtgggctggagggactttgcagatgtgattaaggattgtgagatggaaaaattatccttgattacctgcacggacccagtataatcacaactgtccttataagaagaggagctttggaagaagagagagttgactacggaagagggaaaagtgccacagacatggccaacgggaccaacgcctctgccccatactacagctatgaatactacctggactatctggacctcattcccgtggacgagaagaagctgaaagcccacaaacattccatcgtgatcgcattctgggtgagcctggctgccttcgtggtgctgctcttcctcatcttgctctacatgtcctggtccgcctccccgcagatgaggaacagccccaagcaccaccaaacatgcccctggagtcacggcctcaacctccacctctgcatccagaagtgcctgccgtgccacagggaacccctggcaacctcacaggctcaggcgagctcagtggagccagggagcagaactggccctgaccagccgctacgacaggagagctcctccaccttgcccctcgggggtttccagacccaccccactctcctctgggaactgaccctcaatgggggtcccctcgtcaggagcaagcccagcgagcctccccctggagacaggacctctcaattgcagagctgatgtcagtaaatcgtggccatagctgagtgaactggtgaaatcaagccaacctggacacatacgttcctcgttcttcttagaggccatttgcatgtagcagaaagggcacctaggtcaagtgcaactagagcaggagcatcctatgcctttgacaaagattgcagtggcccctcgagtgcagaggtcatcccaggtgttgctgagtttattgagcacacctagcctgcttgcttactgcttatatttgctcagggaagagtaggaaaataaaatatatgcaaatcaagaggaaaa

SEQ ID NO: 17576 - DNA, 624 bp, Homo sapiens
  source 1..624: mol_type = unassigned DNA
ggataatggggaggctatgcaggtgtgtgggctggagggactttgcagatgtgattaaggattgtgagatggaaaaattatccttgattacctgcacggacccagtataatcacaactgtccttataagaagaggagctttggaagaagagagagttgactacggaagagggaaaagtgccacagacatggccaacgggaccaacgcctctgccccatactacagctatgaatactacctggactatctggacctcattcccgtggacgagaagaagctgaaagcccacaaacattccatcgtgatcgcattctgggtgagcctggctgccttcgtggtgctgctcttcctcatcttgctctacatgtcctggtccgcctccccgcagatgagctttaacacagatgaatctcttctgcattcagaagtgctgcctcaaactcgagctatttcctgtgatgagctccaagcccctagagaggaaggggcggcctgacgaggcactggatgggcctcatggcctagaagtccccacattccttgcaactctgatgctgggcacctacaggcccgagtttatcatttactgggcagttcaataaagtcctctcaacttttcttgtc

SEQ ID NO: 17577 - DNA, 1591 bp, Homo sapiens
  source 1..1591: mol_type = unassigned DNA
gagaagcgaggttctcgttctgagggacaggcttgagatcggctgaagagagcgggcccaggctctgtgaggaggcaagggaggtgagaaccttgctctcagagggtgactcaagtcaacacagggaacccctcttttctacagacacagtgggtcgcaggatctgacaagagtccaggagctccagggactgtgaggtgaggccttggtctaaggcagtgttttcaggtcacagagcagaaagggcccagacagtgccaggagtcaaggttctcaggggacagggagagcaagaggtcaagagctgtgggacaccacagagcagcactgaaggagaagacctgcctgtgggtccccatcgcccaagtcctgcccacactcccacctgctaccctgatcagagtcatcatgcctcgagctccaaagcgtcagcgctgcatgcctgaagaagatcttcaatcccaaagtgagacacagggcctcgagggtgcacaggctcccctggctgtggaggaggatgcttcatcatccacttccaccagctcctcttttccatcctcttttccctcctcctcctcttcctcctcctcctcctgctatcctctaataccaagcaccccagaggaggtttctgctgatgatgagacaccaaatcctccccagagtgctcagatagcctgctcctccccctcggtcgttgcttcccttccattagatcaatctgatgagggctccagcagccaaaaggaggagagtccaagcaccctacaggtcctgccagacagtgagtctttacccagaagtgagatagatgaaaaggtgactgatttggtgcagtttctgctcttcaagtatcaaatgaaggagccgatcacaaaggcagaaatactggagagtgtcataagaaattatgaagaccacttccctttgttgtttagtgaagcctccgagtgcatgctgctggtctttggcattgatgtaaaggaagtggatcccactggccactcctttgtccttgtcacctccctgggcctcacctatgatgggatgctgagtgatgtccagagcatgcccaagactggcattctcatacttatcctaagcatagtcttcatagagggctactgcacccctgaggaggtcatctgggaagcactgaatatgatggggctgtatgatgggatggagcacctcatttatggggagcccaggaagctgctcacccaagattgggtgcaggaaaactacctggagtaccggcaggtgcctggcagtgatcctgcacggtatgagtttctgtggggtccaagggctcatgctgaaattaggaagatgagtctcctgaaatttttggccaaggtaaatgggagtgatccaagatccttcccactgtggtatgaggaggctttgaaagatgaggaagagagagcccaggacagaattgccaccacagatgatactactgccatggccagtgcaagttctagcgctacaggtagcttctcctaccctgaataaagtaagacagattcttcactgtgttttaaaaggcaagtcaaataccacatgattttactcatatgtggaatct

SEQ ID NO: 17578 - DNA, 2631 bp, Homo sapiens
  source 1..2631: mol_type = unassigned DNA
agagagaagcgaggttctcgttctgagggacaggcttgagatcggctgaagagagcgggcccaggctctgtgaggaggcaagggaggtgagaaccttgctctcagagggtgactcaagtcaacacagggaacccctcttttctacagacacagtgggtcgcaggatctgacaagagtccaggttctcaggggacagggagagcaagaggtcaagagctgtgggacaccacagagcagcactgaaggagaagacctgcctgtgggtccccatcgcccaagtcctgcccacactcccacctgctaccctgatcagagtcatcatgcctcgagctccaaagcgtcagcgctgcatgcctgaagaagatcttcaatcccaaagtgagacacagggcctcgagggtgcacaggctcccctggctgtggaggaggatgcttcatcatccacttccaccagctcctcttttccatcctcttttccctcctcctcctcttcctcctcctcctcctgctatcctctaataccaagcaccccagaggaggtttctgctgatgatgagacaccaaatcctccccagagtgctcagatagcctgctcctccccctcggtcgttgcttcccttccattagatcaatctgatgagggctccagcagccaaaaggaggagagtccaagcaccctacaggtcctgccagacagtgagtctttacccagaagtgagatagatgaaaaggtgactgatttggtgcagtttctgctcttcaagtatcaaatgaaggagccgatcacaaaggcagaaatactggagagtgtcataagaaattatgaagaccacttccctttgttgtttagtgaagcctccgagtgcatgctgctggtctttggcattgatgtaaaggaagtggatcccactggccactcctttgtccttgtcacctccctgggcctcacctatgatgggatgctgagtgatgtccagagcatgcccaagactggcattctcatacttatcctaagcatagtcttcatagagggctactgcacccctgaggaggtcatctgggaagcactgaatatgatggggctgtatgatgggatggagcacctcatttatggggagcccaggaagctgctcacccaagattgggtgcaggaaaactacctggagtaccggcaggtgcctggcagtgatcctgcacggtatgagtttctgtggggtccaagggctcatgctgaaattaggaagatgagtctcctgaaatttttggccaaggtaaatgggagtgatccaagatccttcccactgtggtatgaggaggctttgaaagatgaggaagagagagcccaggacagaattgccaccacagatgatactactgccatggccagtgcaagttctagcgctacaggtagcttctcctaccctgaataaagtaagacagattcttcactgtgttttaaaaggcaagtcaaataccacatgattttactcatatgtggaatctaaaaaaaaaaaaaaaaaaagttggtatcatggaagtagagagtagagcagtagttacattacaattaaataggaggaataagttctagtgttctattgcacagtaggatgactatagttaacattaagatattgtatattacaaaacagctagaaggaaggcttttcaatattgtcaccaaaaagaaatgataaatgcatgaggtgatggatacactacctgatttgatcattatactacatatacatgaatcagaacatcaaattgtacctcataaatatctacaattacatgtcagtttttgtttatgtttttgtttttttttaatttatgaaaacaaatgagaatggaaatcaatgatgtatgtggtggagggccaggctgaggctgaggaaaatacagtgcataacatctttgtcttactgttttctttggataacctggggacttcttttcttttcttcttggtattttattttctttttcttcttcttctttttttttttttaacaaagtctcactctattgctctggcaggagtgcagtggtgcagtctcggctcactgcaacttccgcctcctgggttcaagcgattctcctgcctcagtctcctgagtagctgggattacaagtgtgcaccaccatacccggctaattttgtattttttagtagagatggggtttcaccatgttggccaggctggtctcaaactcctgacctcaggtaatctgcccgcctcagcctcccaaagtgctgggataacaggtgtgagccactgcacccagcctcttcttggtattttaaaatgttgttacttttactagaatgtttatgagcttcagaatctaaggtcacacgttcgtttctgtttatccagtttaagaaacagttttgctattttgtaaaacaaattgggaacccttccatcatatttgtaatctgtaataaaataacatggaattggaatagtaattttcttggaaatatgaaaaaaatagtaaaatagagaaaataattttaagtgttagtatttttatttctttattatttttagtttatcatcctgcaaaattaaaagttatatccctggatcttgttaagtcgaaattaaactgtaataaatgaaa

SEQ ID NO: 17579 - DNA, 898 bp, Homo sapiens
  source 1..898: mol_type = unassigned DNA
ggatcagagagaagcgaggttctcgttctgagggacaggcttgagatcggctgaagagagcgggcccaggctctgtgaggaggcaagggaggtgagaaccttgctctcagagggtgactcaagtcaacacagggaacccctcttttctacagacacagtgggtcgcaggatctgacaagagtccaggagctccagggactgtgaggtgaggccttggtctaaggcagtgttttcaggtcacagagcagaaagggcccagacagtgccaggagtcaaggttctcaggggacagggagagcaagaggtcaagagctgtgggacaccacagagcagcactgaaggagaagacctgcctgtgggtccccatcgcccaagtcctgcccacactcccacctgctaccctgatcagagtcatcatgcctcgagctccaaagcgtcagcgctgcatgcctgaagaagatcttcaatcccaaagtgagacacagggcctcgagggtgcacaggctcccctggctgtggaggaggatgcttcatcatccacttccaccagctcctcttttccatcctcttttccctcctcctcctcttcctcctcctcctcctgctatcctctaataccaagcaccccagaggaggtttctgctgatgatgagacaccaaatcctccccagagtgctcagatagcctgctcctccccctcggtcgttgcttcccttccattagatcaatctgatgagggctccagcagccaaaaggaggagagtccaagcaccctacaggtcctgccagacagtgagtctttacccagaagtgagatagatgaaaaggtgactgatttggtgcagtttctgctcttcaagtatcaaatgaaggagccgatcacaaaggcagaaatact

SEQ ID NO: 17580 - DNA, 798 bp, Homo sapiens
  source 1..798: mol_type = unassigned DNA
tgaagagagcgggcccaggctctgtgaggaggcaagacacagtgggtcgcaggatctgacaagagtccaggagctccagggactgtgaggttctcaggggacagggagagcaagaggtcaagagctgtgggacaccacagagcagcactgaaggagaagacctgcctgtgggtccccatcgcccaagtcctgcccacactcccacctgctaccctgatcagagtcatcatgcctcgagctccaaagcgtcagcgctgcatgcctgaagaagatcttcaatcccaaagtgagacacagggcctcgagggtgcacaggctcccctggctgtggaggaggatgcttcatcatccacttccaccagctcctcttttccatcctcttttccctcctcctcctcttcctcctcctcctcctgctatcctctaataccaagcaccccagaggaggtttctgctgatgatgagacaccaaatcctccccagagtgctcagatagcctgctcctccccctcggtcgttgcttcccttccattagatcaatctgatgagggctccagcagccaaaaggaggagagtccaagcaccctacaggtcctgccagacagtgagtctttacccagaagtgagatagatgaaaaggtgactgatttggtgcagtttctgctcttcaagtatcaaatgaaggagccgatcacaaaggcagaaatactggagagtgtcataagaaattatgaagaccacttccctttgttgtttagtgaagcctccgagtgcatgctgctggtctttggcattgat

SEQ ID NO: 17581 - DNA, 1845 bp, Homo sapiens
  source 1..1845: mol_type = unassigned DNA
tgcactctcaccagggcagggagctgtcttgacccccagtggaggctgacaatttttttcctgtgtacactggacccctttcatagaggtgggtgctatgcaagtggagctggtgactgatggctgaccattgatacaggctaggaataccaatgagcaaggtgagcactatgttctcagaggacgacttccagtcaacagaaagagccccatatggtccacaactacagtggtcccaggatctgccaagagtccaggtttttagagaacaggccaacctggaggacaggagtcccaggagaacccagaggatcactggaggagaacaagtgctgtggggccccatcacccagatatttcccacagttcggcctgctgacctaaccagagtcatcatgcctcttgagcaaagaagtcagcactgcaagcctgaggaaggccttcaggcccaagaagaagacctgggcctggtgggtgcacaggctctccaagctgaggagcaggaggctgccttcttctcctctactctgaatgtgggcactctagaggagttgcctgctgctgagtcaccaagtcctccccagagtcctcaggaagagtccttctctcccactgccatggatgccatctttgggagcctatctgatgagggctctggcagccaagaaaaggaggggccaagtacctcgcctgacctgatagaccctgagtccttttcccaagatatactacatgacaagataattgatttggttcatttattgctccgcaagtatcgagtcaaggggctgatcacaaaggcagaaatgctggggagtgtcatcaaaaattatgaggactactttcctgagatatttagggaagcctctgtatgcatgcaactgctctttggcattgatgtgaaggaagtggaccccactagccactcctatgtccttgtcacctccctcaacctctcttatgatggcatacagtgtaatgagcagagcatgcccaagtctggcctcctgataatagtcctgggtgtaatcttcatggaggggaactgcatccctgaagaggttatgtgggaagtcctgagcattatgggggtgtatgctggaagggagcacttcctctttggggagcccaagaggctccttacccaaaattgggtgcaggaaaagtacctggtgtaccggcaggtgcccggcactgatcctgcatgctatgagttcctgtggggtccaagggcccacgctgagaccagcaagatgaaagttcttgagtacatagccaatgccaatgggagggatcccacttcttacccatccctgtatgaagatgctttgagagaggagggagagggagtctgagcatgagatgcaaccagggccagcgggcagggaaatgggccaatgcatgcttcagggccacacccagcagtttccctgtcctgtgtgaaatcaggcccattcttccctctgtgtttgatgagagaagtcagtgttctcagtagtagaaggcacagtgaatggaagggaacacattgtatactgcctttaggtttctcttccatcgggtgacttggagatttctttttgtttccctttggtaattttcaaatattgttcctgtaataaaagttttagttagcttcaacatctaagtgtatggatgatactgaccacacatgttgttttgcttatccatttcaagtgcaagtgtttgccattttgtaaaacattttgggaaatcttccatcttgctgtgatttgcaataggtattttcttggagaatgtaagaacttaacaataaagctgaactggtgttgtgaaacagagaaataaaaggagaaggtcatt

SEQ ID NO: 17582 - DNA, 1864 bp, Homo sapiens
  source 1..1864: mol_type = unassigned DNA
gatctgagagaagcgaaagcgtctttctgaggggtgtcttgagagtggcagagggcagcgggtccaggctccatgaggaggcaagccttgggaatctgagggatggagactcagttccgcagagggggtctggggtgcagccctgccagcatcaagaggaagaagaagagggaggactcaggagactttggactccaggtgagcactatgttctcagaggacgacttccagtcaacagaaagagccccatatggtccacaactacagtggtcccaggatctgccaagagtccaggtttttagagaacaggccaacctggaggacaggagtcccaggagaacccagaggatcactggaggagaacaagtgctgtggggccccatcacccagatatttcccacagttcggcctgctgacctaaccagagtcatcatgcctcttgagcaaagaagtcagcactgcaagcctgaggaaggccttcaggcccaagaagaagacctgggcctggtgggtgcacaggctctccaagctgaggagcaggaggctgccttcttctcctctactctgaatgtgggcactctagaggagttgcctgctgctgagtcaccaagtcctccccagagtcctcaggaagagtccttctctcccactgccatggatgccatctttgggagcctatctgatgagggctctggcagccaagaaaaggaggggccaagtacctcgcctgacctgatagaccctgagtccttttcccaagatatactacatgacaagataattgatttggttcatttattgctccgcaagtatcgagtcaaggggctgatcacaaaggcagaaatgctggggagtgtcatcaaaaattatgaggactactttcctgagatatttagggaagcctctgtatgcatgcaactgctctttggcattgatgtgaaggaagtggaccccactagccactcctatgtccttgtcacctccctcaacctctcttatgatggcatacagtgtaatgagcagagcatgcccaagtctggcctcctgataatagtcctgggtgtaatcttcatggaggggaactgcatccctgaagaggttatgtgggaagtcctgagcattatgggggtgtatgctggaagggagcacttcctctttggggagcccaagaggctccttacccaaaattgggtgcaggaaaagtacctggtgtaccggcaggtgcccggcactgatcctgcatgctatgagttcctgtggggtccaagggcccacgctgagaccagcaagatgaaagttcttgagtacatagccaatgccaatgggagggatcccacttcttacccatccctgtatgaagatgctttgagagaggagggagagggagtctgagcatgagatgcaaccagggccagcgggcagggaaatgggccaatgcatgcttcagggccacacccagcagtttccctgtcctgtgtgaaatcaggcccattcttccctctgtgtttgatgagagaagtcagtgttctcagtagtagaaggcacagtgaatggaagggaacacattgtatactgcctttaggtttctcttccatcgggtgacttggagatttctttttgtttccctttggtaattttcaaatattgttcctgtaataaaagttttagttagcttcaacatctaagtgtatggatgatactgaccacacatgttgttttgcttatccatttcaagtgcaagtgtttgccattttgtaaaacattttgggaaatcttccatcttgctgtgatttgcaataggtattttcttggagaatgtaagaacttaacaataaagctgaactggtgttgtgaaacagagaaa

SEQ ID NO: 17583 - DNA, 1664 bp, Homo sapiens
  source 1..1664: mol_type = unassigned DNA
agagaacagcgagattctcgccctgagcaacggcctgacgtcggtggagggaagcaggcgcaggctccgtgaggaggcaaggttctgaggagacaggccccggagcagcactagctcctgcccacactcctacctgctgccctgaccagagtcatcatgccacttgagcagaggagtcagcactgcaagcctgaggaaggccttgaggcccaaggagaggccctgggcttggtgggtgcgcaggctcctgctactgaggagcaggagactgcctcctcctcctctactctagtggaagtcaccctgcgggaggtgcctgctgccgagtcaccaagtcctccccacagtcctcagggagcctccaccctccccactaccatcaactatactctctggagtcaatccgatgagggctccagcaacgaagaacaggaagggccaagcacctttcctgacctggagacgagcttccaagtagcactcagtaggaagatggctgagttggttcattttctgctcctcaagtatcgagccagggagccattcacaaaggcagaaatgctggggagtgtcatcagaaatttccaggacttctttcctgtgatcttcagcaaagcctccgagtacttgcagctggtctttggcatcgaggtggtggaagtggtccgcatcggccacttgtacatccttgtcacctgcctgggcctctcctacgatggcctgctgggcgacaatcagatcgtgcccaagacaggcctcctgataatcgtcctggccataatcgcaaaagagggcgactgtgcccctgaggagaaaatctgggaggagctgagtgtgttggaggcatctgatgggagggaggacagtgtctttgcgcatcccaggaagctgctcacccaagatttggtgcaggaaaactacctggagtaccggcaggtccccggcagtgatcctgcatgctacgagttcctgtggggtccaagggccctcgttgaaaccagctatgtgaaagtcctgcaccatttgctaaagatcagtggaggacctcacatttcctacccacccctgcatgaatgggcttttagagagggggaagagtgagtctgagcacgagttgcagccagggccagtgggagggggtctgggccagtgcaccttccaaggccccatccattagtttccactgcctcgtgtgatatgaggcccattcttcactctttgaagagagcagtcagtattgttagtagtgagtttctgttctattggatgactttgagatttatctttgtttcctgttggaattgttcaaatgttccttttaacggatggttgaatgaacttcagcatccaagtttatgaatgacagtagtcacacatagtgctgtttatatagtttaggagtaagagtgttgttttttattcagattgggaaatccattccattttgtgaattgtgacaaataacagcagtggaaaaagtatgtgcttagaattgtgaaagaattagcagtaaaatacatgagataaagacctcaagaagttaaaagatacttaattcttgccttatacctcactctattctgtaaatttgaaaaaaaagcatggatacctggatatccttggcttctttgagaatttaagagaaattaaatctgaataaataa

SEQ ID NO: 17584 - DNA, 1761 bp, Homo sapiens
  source 1..1761: mol_type = unassigned DNA
agagaacagcgagattctcgccctgagcaacggcctgacgtcggtggagggaagcaggcgcaggctccgtgaggaggcaagatctcagggagttgaggaccttttcttcagagggtgactcaggtcaacacaggggcccccatgtagtcgacagacacagtggtcctaagatctaccaagcatccaggttctgaggagacaggccccggagcagcactagctcctgcccacactcctacctgctgccctgaccagagtcatcatgccacttgagcagaggagtcagcactgcaagcctgaggaaggccttgaggcccaaggagaggccctgggcttggtgggtgcgcaggctcctgctactgaggagcaggagactgcctcctcctcctctactctagtggaagtcaccctgcgggaggtgcctgctgccgagtcaccaagtcctccccacagtcctcagggagcctccaccctccccactaccatcaactatactctctggagtcaatccgatgagggctccagcaacgaagaacaggaagggccaagcacctttcctgacctggagacgagcttccaagtagcactcagtaggaagatggctgagttggttcattttctgctcctcaagtatcgagccagggagccattcacaaaggcagaaatgctggggagtgtcatcagaaatttccaggacttctttcctgtgatcttcagcaaagcctccgagtacttgcagctggtctttggcatcgaggtggtggaagtggtccgcatcggccacttgtacatccttgtcacctgcctgggcctctcctacgatggcctgctgggcgacaatcagatcgtgcccaagacaggcctcctgataatcgtcctggccataatcgcaaaagagggcgactgtgcccctgaggagaaaatctgggaggagctgagtgtgttggaggcatctgatgggagggaggacagtgtctttgcgcatcccaggaagctgctcacccaagatttggtgcaggaaaactacctggagtaccggcaggtccccggcagtgatcctgcatgctacgagttcctgtggggtccaagggccctcgttgaaaccagctatgtgaaagtcctgcaccatttgctaaagatcagtggaggacctcacatttcctacccacccctgcatgaatgggcttttagagagggggaagagtgagtctgagcacgagttgcagccagggccagtgggagggggtctgggccagtgcaccttccaaggccccatccattagtttccactgcctcgtgtgatatgaggcccattcttcactctttgaagagagcagtcagtattgttagtagtgagtttctgttctattggatgactttgagatttatctttgtttcctgttggaattgttcaaatgttccttttaacggatggttgaatgaacttcagcatccaagtttatgaatgacagtagtcacacatagtgctgtttatatagtttaggagtaagagtgttgttttttattcagattgggaaatccattccattttgtgaattgtgacaaataacagcagtggaaaaagtatgtgcttagaattgtgaaagaattagcagtaaaatacatgagataaagacctcaagaagttaaaagatacttaattcttgccttatacctcactctattctgtaaatttgaaaaaaaagcatggatacctggatatccttggcttctttgagaatttaagagaaattaaatctg

SEQ ID NO: 17585 - DNA, 1853 bp, Homo sapiens
  source 1..1853: mol_type = unassigned DNA
aagatgccgagggaggactgaggcgggcctcaccccagacagagggcccccaataatccagcgctgcctctgctgccaggcctggaccaccctgcaggggaagacttctcaggctcagtcgccaccacctcaccccgccaccccccgccgctttaaccgcagggaactctggtatctcagggagttgaggaccttttcttcagagggtgactcaggtcaacacaggggcccccatgtagtcgacagacacagtggtcctaagatctaccaagcatccaggttctgaggagacaggccccggagcagcactagctcctgcccacactcctacctgctgccctgaccagagtcatcatgccacttgagcagaggagtcagcactgcaagcctgaggaaggccttgaggcccaaggagaggccctgggcttggtgggtgcgcaggctcctgctactgaggagcaggagactgcctcctcctcctctactctagtggaagtcaccctgcgggaggtgcctgctgccgagtcaccaagtcctccccacagtcctcagggagcctccaccctccccactaccatcaactatactctctggagtcaatccgatgagggctccagcaacgaagaacaggaagggccaagcacctttcctgacctggagacgagcttccaagtagcactcagtaggaagatggctgagttggttcattttctgctcctcaagtatcgagccagggagccattcacaaaggcagaaatgctggggagtgtcatcagaaatttccaggacttctttcctgtgatcttcagcaaagcctccgagtacttgcagctggtctttggcatcgaggtggtggaagtggtccgcatcggccacttgtacatccttgtcacctgcctgggcctctcctacgatggcctgctgggcgacaatcagatcgtgcccaagacaggcctcctgataatcgtcctggccataatcgcaaaagagggcgactgtgcccctgaggagaaaatctgggaggagctgagtgtgttggaggcatctgatgggagggaggacagtgtctttgcgcatcccaggaagctgctcacccaagatttggtgcaggaaaactacctggagtaccggcaggtccccggcagtgatcctgcatgctacgagttcctgtggggtccaagggccctcgttgaaaccagctatgtgaaagtcctgcaccatttgctaaagatcagtggaggacctcacatttcctacccacccctgcatgaatgggcttttagagagggggaagagtgagtctgagcacgagttgcagccagggccagtgggagggggtctgggccagtgcaccttccaaggccccatccattagtttccactgcctcgtgtgatatgaggcccattcttcactctttgaagagagcagtcagtattgttagtagtgagtttctgttctattggatgactttgagatttatctttgtttcctgttggaattgttcaaatgttccttttaacggatggttgaatgaacttcagcatccaagtttatgaatgacagtagtcacacatagtgctgtttatatagtttaggagtaagagtgttgttttttattcagattgggaaatccattccattttgtgaattgtgacaaataacagcagtggaaaaagtatgtgcttagaattgtgaaagaattagcagtaaaatacatgagataaagacctcaagaagttaaaagatacttaattcttgccttatacctcactctattctgtaaatttgaaaaaaaagcatggatacctggatatccttggcttctttgagaatttaagagaaattaaatctg

SEQ ID NO: 17586 - DNA, 1661 bp, Homo sapiens
  source 1..1661: mol_type = unassigned DNA
agcaggcgcaggctccgtgaggaggcaaggttctgagggggacaggctgacaagtaggacccgaggcactggaggagcattgaaggagaagatctgcctgtgggtcttcattgcccagctcctgcccgcactcctgcctgctgccctgaccagagtcatcatgcctcttgagcagaggagtcagcactgcaagcctgaagaaggccttgaggcccgaggagaggccctgggcctggtgggtgcgcaggctcctgctactgaggagcagcagaccgcttcttcctcttctactctagtggaagttaccctgggggaggtgcctgctgccgactcaccgagtcctccccacagtcctcagggagcctccagcttctcgactaccatcaactacactctttggagacaatccgatgagggctccagcaaccaagaagaggaggggccaagaatgtttcccgacctggagtccgagttccaagcagcaatcagtaggaagatggttgagttggttcattttctgctcctcaagtatcgagccagggagccggtcacaaaggcagaaatgctggagagtgtcctcagaaattgccaggacttctttcccgtgatcttcagcaaagcctccgagtacttgcagctggtctttggcatcgaggtggtggaagtggtccccatcagccacttgtacatccttgtcacctgcctgggcctctcctacgatggcctgctgggcgacaatcaggtcatgcccaagacaggcctcctgataatcgtcctggccataatcgcaatagagggcgactgtgcccctgaggagaaaatctgggaggagctgagtatgttggaggtgtttgaggggagggaggacagtgtcttcgcacatcccaggaagctgctcatgcaagatctggtgcaggaaaactacctggagtaccggcaggtgcccggcagtgatcctgcatgctacgagttcctgtggggtccaagggccctcattgaaaccagctatgtgaaagtcctgcaccatacactaaagatcggtggagaacctcacatttcctacccacccctgcatgaacgggctttgagagagggagaagagtgagtctcagcacatgttgcagccagggccagtgggagggggtctgggccagtgcaccttccagggccccatccattagcttccactgcctcgtgtgatatgaggcccattcctgcctctttgaagagagcagtcagcattcttagcagtgagtttctgttctgttggatgactttgagatttatctttgtttcctgttggaattgttcaaatgttccttttaacaaatggttggatgaacttcagcatccaagtttatgaatgacagtagtcacacatagtgctgtttatatagtttaggggtaagagtcctgttttttattcagattgggaaatccattccattttgtgagttgtcacataataacagcagtggaatatgtatttgcctatattgtgaacgaattagcagtaaaatacatgatacaaggaactcaaaagatagttaattcttgccttatacctcagtctattatgtaaaattaaaaatatgtgtatgtttttgcttctttgagaatgcaaaagaaattaaatctgaataaataattcttcctgttca

SEQ ID NO: 17587 - DNA, 1965 bp, Homo sapiens
  source 1..1965: mol_type = unassigned DNA
aacggcctgacgtcggcggagggaagcaggcgcaggctccgtgaggaggcaagggaactctggcgtaagagctttgtgtgaccagggcagggctggttagaagtgctcagggcccagactcagccaggaatcaagaatccgggctttgcccctgcaatcaacccacggaagctccgggaatggcggccaagcacgcggatcctgacgttcacatatctcagggagttgatgaccttgttttcagaaggtgactcaggtcaacacaggggcccccatctggtcgacagatgcagtggttctaggatctgccaagcatccaggtggagagcctgaggttctgagggggacaggctgacaagtaggacccgaggcactggaggagcattgaaggagaagatctgcctgtgggtcttcattgcccagctcctgcccgcactcctgcctgctgccctgaccagagtcatcatgcctcttgagcagaggagtcagcactgcaagcctgaagaaggccttgaggcccgaggagaggccctgggcctggtgggtgcgcaggctcctgctactgaggagcagcagaccgcttcttcctcttctactctagtggaagttaccctgggggaggtgcctgctgccgactcaccgagtcctccccacagtcctcagggagcctccagcttctcgactaccatcaactacactctttggagacaatccgatgagggctccagcaaccaagaagaggaggggccaagaatgtttcccgacctggagtccgagttccaagcagcaatcagtaggaagatggttgagttggttcattttctgctcctcaagtatcgagccagggagccggtcacaaaggcagaaatgctggagagtgtcctcagaaattgccaggacttctttcccgtgatcttcagcaaagcctccgagtacttgcagctggtctttggcatcgaggtggtggaagtggtccccatcagccacttgtacatccttgtcacctgcctgggcctctcctacgatggcctgctgggcgacaatcaggtcatgcccaagacaggcctcctgataatcgtcctggccataatcgcaatagagggcgactgtgcccctgaggagaaaatctgggaggagctgagtatgttggaggtgtttgaggggagggaggacagtgtcttcgcacatcccaggaagctgctcatgcaagatctggtgcaggaaaactacctggagtaccggcaggtgcccggcagtgatcctgcatgctacgagttcctgtggggtccaagggccctcattgaaaccagctatgtgaaagtcctgcaccatacactaaagatcggtggagaacctcacatttcctacccacccctgcatgaacgggctttgagagagggagaagagtgagtctcagcacatgttgcagccagggccagtgggagggggtctgggccagtgcaccttccagggccccatccattagcttccactgcctcgtgtgatatgaggcccattcctgcctctttgaagagagcagtcagcattcttagcagtgagtttctgttctgttggatgactttgagatttatctttgtttcctgttggaattgttcaaatgttccttttaacaaatggttggatgaacttcagcatccaagtttatgaatgacagtagtcacacatagtgctgtttatatagtttaggggtaagagtcctgttttttattcagattgggaaatccattccattttgtgagttgtcacataataacagcagtggaatatgtatttgcctatattgtgaacgaattagcagtaaaatacatgatacaaggaactcaaaagatagttaattcttgccttatacctcagtctattatgtaaaattaaaaatatgtgtatgtttttgcttctttgagaatgcaaaagaaattaaatctgaataaataattcttcctgttc

SEQ ID NO: 17588 - DNA, 1979 bp, Homo sapiens
  source 1..1979: mol_type = unassigned DNA
aacggcctgacgtcggcggagggaagcaggcgcaggctccgtgaggaggcaaggtaagacgccgagggaggactgaggcgggcctcaccccagacagagggcccccaataatccagcgctgcctctgctgccgggcctggaccaccctgcaggggaagacttctcaggctcagtcgccaccacctcaccccgccaccccccgccgctttaaccgcagggaactctggcatctcagggagttgatgaccttgttttcagaaggtgactcaggtcaacacaggggcccccatctggtcgacagatgcagtggttctaggatctgccaagcatccaggtggagagcctgaggttctgagggggacaggctgacaagtaggacccgaggcactggaggagcattgaaggagaagatctgcctgtgggtcttcattgcccagctcctgcccgcactcctgcctgctgccctgaccagagtcatcatgcctcttgagcagaggagtcagcactgcaagcctgaagaaggccttgaggcccgaggagaggccctgggcctggtgggtgcgcaggctcctgctactgaggagcagcagaccgcttcttcctcttctactctagtggaagttaccctgggggaggtgcctgctgccgactcaccgagtcctccccacagtcctcagggagcctccagcttctcgactaccatcaactacactctttggagacaatccgatgagggctccagcaaccaagaagaggaggggccaagaatgtttcccgacctggagtccgagttccaagcagcaatcagtaggaagatggttgagttggttcattttctgctcctcaagtatcgagccagggagccggtcacaaaggcagaaatgctggagagtgtcctcagaaattgccaggacttctttcccgtgatcttcagcaaagcctccgagtacttgcagctggtctttggcatcgaggtggtggaagtggtccccatcagccacttgtacatccttgtcacctgcctgggcctctcctacgatggcctgctgggcgacaatcaggtcatgcccaagacaggcctcctgataatcgtcctggccataatcgcaatagagggcgactgtgcccctgaggagaaaatctgggaggagctgagtatgttggaggtgtttgaggggagggaggacagtgtcttcgcacatcccaggaagctgctcatgcaagatctggtgcaggaaaactacctggagtaccggcaggtgcccggcagtgatcctgcatgctacgagttcctgtggggtccaagggccctcattgaaaccagctatgtgaaagtcctgcaccatacactaaagatcggtggagaacctcacatttcctacccacccctgcatgaacgggctttgagagagggagaagagtgagtctcagcacatgttgcagccagggccagtgggagggggtctgggccagtgcaccttccagggccccatccattagcttccactgcctcgtgtgatatgaggcccattcctgcctctttgaagagagcagtcagcattcttagcagtgagtttctgttctgttggatgactttgagatttatctttgtttcctgttggaattgttcaaatgttccttttaacaaatggttggatgaacttcagcatccaagtttatgaatgacagtagtcacacatagtgctgtttatatagtttaggggtaagagtcctgttttttattcagattgggaaatccattccattttgtgagttgtcacataataacagcagtggaatatgtatttgcctatattgtgaacgaattagcagtaaaatacatgatacaaggaactcaaaagatagttaattcttgccttatacctcagtctattatgtaaaattaaaaatatgtgtatgtttttgcttctttgagaatgcaaaagaaattaaatctgaataaataattcttcctgttc

SEQ ID NO: 17589 - DNA, 1981 bp, Homo sapiens
  source 1..1981: mol_type = unassigned DNA
aacggcctgacgtcggcggagggaagcaggcgcaggctccgtgaggaggcaagaatccgggctttgcccctgcaatcaacccacggaagctccgggaatggcggccaagcacgcggatcctgacgttcacatatctcagggagttgatgaccttgttttcagaaggtgactcaggtcaacacaggggcccccatctggtcgacagatgcagtggttctaggatctgccaagcatccaggtggagagcctgaggaatcaggagctccaggaaccaggcagtgaggccttggtctgagtcagtgtcctcaggtcacagagcagaggggacgcagacagtgccaacactgaaggttctgagggggacaggctgacaagtaggacccgaggcactggaggagcattgaaggagaagatctgcctgtgggtcttcattgcccagctcctgcccgcactcctgcctgctgccctgaccagagtcatcatgcctcttgagcagaggagtcagcactgcaagcctgaagaaggccttgaggcccgaggagaggccctgggcctggtgggtgcgcaggctcctgctactgaggagcagcagaccgcttcttcctcttctactctagtggaagttaccctgggggaggtgcctgctgccgactcaccgagtcctccccacagtcctcagggagcctccagcttctcgactaccatcaactacactctttggagacaatccgatgagggctccagcaaccaagaagaggaggggccaagaatgtttcccgacctggagtccgagttccaagcagcaatcagtaggaagatggttgagttggttcattttctgctcctcaagtatcgagccagggagccggtcacaaaggcagaaatgctggagagtgtcctcagaaattgccaggacttctttcccgtgatcttcagcaaagcctccgagtacttgcagctggtctttggcatcgaggtggtggaagtggtccccatcagccacttgtacatccttgtcacctgcctgggcctctcctacgatggcctgctgggcgacaatcaggtcatgcccaagacaggcctcctgataatcgtcctggccataatcgcaatagagggcgactgtgcccctgaggagaaaatctgggaggagctgagtatgttggaggtgtttgaggggagggaggacagtgtcttcgcacatcccaggaagctgctcatgcaagatctggtgcaggaaaactacctggagtaccggcaggtgcccggcagtgatcctgcatgctacgagttcctgtggggtccaagggccctcattgaaaccagctatgtgaaagtcctgcaccatacactaaagatcggtggagaacctcacatttcctacccacccctgcatgaacgggctttgagagagggagaagagtgagtctcagcacatgttgcagccagggccagtgggagggggtctgggccagtgcaccttccagggccccatccattagcttccactgcctcgtgtgatatgaggcccattcctgcctctttgaagagagcagtcagcattcttagcagtgagtttctgttctgttggatgactttgagatttatctttgtttcctgttggaattgttcaaatgttccttttaacaaatggttggatgaacttcagcatccaagtttatgaatgacagtagtcacacatagtgctgtttatatagtttaggggtaagagtcctgttttttattcagattgggaaatccattccattttgtgagttgtcacataataacagcagtggaatatgtatttgcctatattgtgaacgaattagcagtaaaatacatgatacaaggaactcaaaagatagttaattcttgccttatacctcagtctattatgtaaaattaaaaatatgtgtatgtttttgcttctttgagaatgcaaaagaaattaaatctgaataaataattcttcctgttc

SEQ ID NO: 17590 - DNA, 1724 bp, Homo sapiens
  source 1..1724: mol_type = unassigned DNA
gagattctcgccctgagcaacgagcgacggcctgacgtcggcggagggaagccggcccaggctcggtgaggaggcaaggttctgaggggacaggctgacctggaggaccagaggcccccggaggagcactgaaggagaagatctgccagtgggtctccattgcccagctcctgcccacactcccgcctgttgccctgaccagagtcatcatgcctcttgagcagaggagtcagcactgcaagcctgaagaaggccttgaggcccgaggagaggccctgggcctggtgggtgcgcaggctcctgctactgaggagcaggaggctgcctcctcctcttctactctagttgaagtcaccctgggggaggtgcctgctgccgagtcaccagatcctccccagagtcctcagggagcctccagcctccccactaccatgaactaccctctctggagccaatcctatgaggactccagcaaccaagaagaggaggggccaagcaccttccctgacctggagtccgagttccaagcagcactcagtaggaaggtggccgagttggttcattttctgctcctcaagtatcgagccagggagccggtcacaaaggcagaaatgctggggagtgtcgtcggaaattggcagtatttctttcctgtgatcttcagcaaagcttccagttccttgcagctggtctttggcatcgagctgatggaagtggaccccatcggccacttgtacatctttgccacctgcctgggcctctcctacgatggcctgctgggtgacaatcagatcatgcccaaggcaggcctcctgataatcgtcctggccataatcgcaagagagggcgactgtgcccctgaggagaaaatctgggaggagctgagtgtgttagaggtgtttgaggggagggaagacagtatcttgggggatcccaagaagctgctcacccaacatttcgtgcaggaaaactacctggagtaccggcaggtccccggcagtgatcctgcatgttatgaattcctgtggggtccaagggccctcgttgaaaccagctatgtgaaagtcctgcaccatatggtaaagatcagtggaggacctcacatttcctacccacccctgcatgagtgggttttgagagagggggaagagtgagtctgagcacgagttgcagccagggccagtgggagggggtctgggccagtgcaccttccggggccgcatcccttagtttccactgcctcctgtgacgtgaggcccattcttcactctttgaagcgagcagtcagcattcttagtagtgggtttctgttctgttggatgactttgagattattctttgtttcctgttggagttgttcaaatgttccttttaacggatggttgaatgagcgtcagcatccaggtttatgaatgacagtagtcacacatagtgctgtttatatagtttaggagtaagagtcttgttttttactcaaattgggaaatccattccattttgtgaattgtgacataataatagcagtggtaaaagtatttgcttaaaattgtgagcgaattagcaataacatacatgagataactcaagaaatcaaaagatagttgattcttgccttgtacctcaatctattctgtaaaattaaacaaatatgcaaaccaggatttccttgacttctttgagaatgcaagcgaaattaaatctgaataaataattcttcctcttca

SEQ ID NO: 17591 - DNA, 2082 bp, Homo sapiens
  source 1..2082: mol_type = unassigned DNA
ggaggcaaggtaagacgctgagggaggactgaggcgggcctcacctcagacagagggcctcaaataatccagtgctgcctctgctgccgggcctgggccaccccgcaggggaagacttccaggctgggtcgccactacctcaccccgccgacccccgccgctttagccacggggaactctggggacagagcttaatgtggccagggcagggctggttagaagaggtcagggcccacgctgtggcaggaatcaaggtcaggaccccgagagggaactgagggcagcctaaccaccaccctcaccaccattcccgtcccccaacaccaaccccacccccatcccccattcccatccccacccccacccctatcctggcagaatccgggctttgcccctggtatcaagtcacggaagctccgggaatggcggccaggcacgttctgaggggacaggctgacctggaggaccagaggcccccggaggagcactgaaggagaagatctgccagtgggtctccattgcccagctcctgcccacactcccgcctgttgccctgaccagagtcatcatgcctcttgagcagaggagtcagcactgcaagcctgaagaaggccttgaggcccgaggagaggccctgggcctggtgggtgcgcaggctcctgctactgaggagcaggaggctgcctcctcctcttctactctagttgaagtcaccctgggggaggtgcctgctgccgagtcaccagatcctccccagagtcctcagggagcctccagcctccccactaccatgaactaccctctctggagccaatcctatgaggactccagcaaccaagaagaggaggggccaagcaccttccctgacctggagtccgagttccaagcagcactcagtaggaaggtggccgagttggttcattttctgctcctcaagtatcgagccagggagccggtcacaaaggcagaaatgctggggagtgtcgtcggaaattggcagtatttctttcctgtgatcttcagcaaagcttccagttccttgcagctggtctttggcatcgagctgatggaagtggaccccatcggccacttgtacatctttgccacctgcctgggcctctcctacgatggcctgctgggtgacaatcagatcatgcccaaggcaggcctcctgataatcgtcctggccataatcgcaagagagggcgactgtgcccctgaggagaaaatctgggaggagctgagtgtgttagaggtgtttgaggggagggaagacagtatcttgggggatcccaagaagctgctcacccaacatttcgtgcaggaaaactacctggagtaccggcaggtccccggcagtgatcctgcatgttatgaattcctgtggggtccaagggccctcgttgaaaccagctatgtgaaagtcctgcaccatatggtaaagatcagtggaggacctcacatttcctacccacccctgcatgagtgggttttgagagagggggaagagtgagtctgagcacgagttgcagccagggccagtgggagggggtctgggccagtgcaccttccggggccgcatcccttagtttccactgcctcctgtgacgtgaggcccattcttcactctttgaagcgagcagtcagcattcttagtagtgggtttctgttctgttggatgactttgagattattctttgtttcctgttggagttgttcaaatgttccttttaacggatggttgaatgagcgtcagcatccaggtttatgaatgacagtagtcacacatagtgctgtttatatagtttaggagtaagagtcttgttttttactcaaattgggaaatccattccattttgtgaattgtgacataataatagcagtggtaaaagtatttgcttaaaattgtgagcgaattagcaataacatacatgagataactcaagaaatcaaaagatagttgattcttgccttgtacctcaatctattctgtaaaattaaacaaatatgcaaaccaggatttccttgacttctttgagaatgcaagcgaaattaaatctgaataaataattcttcctcttc

SEQ ID NO: 17592 - DNA, 853 bp, Homo sapiens
  source 1..853: mol_type = unassigned DNA
agcaacgagcgacggcctgacgtcggcggagggaagccggcccaggctcggtgaggaggcaagtcctgcagcctcagcatgcgctggccggatgtaccctgaggtgccctctcacttcctccttcaggttctgaggggacaggctgacctggaggaccagaggcccccggaggagcactgaaggagaagatctgccagtgggtctccattgcccagctcctgcccacactcccgcctgttgccctgaccagagtcatcatgcctcttgagcagaggagtcagcactgcaagcctgaagaaggccttgaggcccgaggagaggccctgggcctggtgggtgcgcaggctcctgctactgaggagcaggaggctgcctcctcctcttctactctagttgaagtcaccctgggggaggtgcctgctgccgagtcaccagatcctccccagagtcctcagggagcctccagcctccccactaccatgaactaccctctctggagccaatcctatgaggactccagcaaccaagaagaggaggggccaagcaccttccctgacctggagtccgagttccaagcagcactcagtaggaaggtggccgagttggttcattttctgctcctcaagtatcgagccagggagccggtcacaaaggcagaaatgctggggagtgtcgtcggaaattggcagtatttctttcctgtgatcttcagcaaagcttccagttccttgcagctggtctttggcatcgagctgatggaagtggaccccatcggccacttgtacatctttgccacctgcctgggcctctcctacgatggcctgctgggtgacaatcagatcatgcccaagg

SEQ ID NO: 17593 - DNA, 1724 bp, Homo sapiens
  source 1..1724: mol_type = unassigned DNA
agagacaagcgagcttctgcgtctgactcgcagcttgagactggcggagggaagcccgcccaggctctataaggagacaaggttctgagcagacaggccaaccggaggacaggattccctggaggccacagaggagcaccaaggagaagatctgcctgtgggtccccattgcccagcttttgcctgcactcttgcctgctgccctgaccagagtcatcatgtcttctgagcagaagagtcagcactgcaagcctgaggaaggcgttgaggcccaagaagaggccctgggcctggtgggtgcacaggctcctactactgaggagcaggaggctgctgtctcctcctcctctcctctggtccctggcaccctggaggaagtgcctgctgctgagtcagcaggtcctccccagagtcctcagggagcctctgccttacccactaccatcagcttcacttgctggaggcaacccaatgagggttccagcagccaagaagaggaggggccaagcacctcgcctgacgcagagtccttgttccgagaagcactcagtaacaaggtggatgagttggctcattttctgctccgcaagtatcgagccaaggagctggtcacaaaggcagaaatgctggagagagtcatcaaaaattacaagcgctgctttcctgtgatcttcggcaaagcctccgagtccctgaagatgatctttggcattgacgtgaaggaagtggaccccgccagcaacacctacacccttgtcacctgcctgggcctttcctatgatggcctgctgggtaataatcagatctttcccaagacaggccttctgataatcgtcctgggcacaattgcaatggagggcgacagcgcctctgaggaggaaatctgggaggagctgggtgtgatgggggtgtatgatgggagggagcacactgtctatggggagcccaggaaactgctcacccaagattgggtgcaggaaaactacctggagtaccggcaggtacccggcagtaatcctgcgcgctatgagttcctgtggggtccaagggctctggctgaaaccagctatgtgaaagtcctggagcatgtggtcagggtcaatgcaagagttcgcattgcctacccatccctgcgtgaagcagctttgttagaggaggaagagggagtctgagcatgagttgcagccagggctgtggggaaggggcagggctgggccagtgcatctaacagccctgtgcagcagcttcccttgcctcgtgtaacatgaggcccattcttcactctgtttgaagaaaatagtcagtgttcttagtagtgggtttctattttgttggatgacttggagatttatctctgtttccttttacaattgttgaaatgttccttttaatggatggttgaattaacttcagcatccaagtttatgaatcgtagttaacgtatattgctgttaatatagtttaggagtaagagtcttgttttttattcagattgggaaatccgttctattttgtgaatttgggacataataacagcagtggagtaagtatttagaagtgtgaattcaccgtgaaataggtgagataaattaaaagatacttaattcccgccttatgcctcagtctattctgtaaaatttaaaaaatatatatgcatacctggatttccttggcttcgtgaatgtaagagaaattaaatctgaataaataattctttctgttaa

SEQ ID NO: 17594 - DNA, 1773 bp, Homo sapiens
  source 1..1773: mol_type = unassigned DNA
agaaagcctcaggggcccggatgtgatgccactgacttgcgcattgggggttagagagaagcgagctgctgtctgaccagcagcttgggattggtggaaggaagcaggccaggccctgtgaggagtcaaggttctgagcagacaggccaaccggaggacaggattccctggaggccacagaggagcaccaaggagaagatctgcctgtgggtccccattgcccagcttttgcctgcactcttgcctgctgccctgaccagagtcatcatgtcttctgagcagaagagtcagcactgcaagcctgaggaaggcgttgaggcccaagaagaggccctgggcctggtgggtgcacaggctcctactactgaggagcaggaggctgctgtctcctcctcctctcctctggtccctggcaccctggaggaagtgcctgctgctgagtcagcaggtcctccccagagtcctcagggagcctctgccttacccactaccatcagcttcacttgctggaggcaacccaatgagggttccagcagccaagaagaggaggggccaagcacctcgcctgacgcagagtccttgttccgagaagcactcagtaacaaggtggatgagttggctcattttctgctccgcaagtatcgagccaaggagctggtcacaaaggcagaaatgctggagagagtcatcaaaaattacaagcgctgctttcctgtgatcttcggcaaagcctccgagtccctgaagatgatctttggcattgacgtgaaggaagtggaccccgccagcaacacctacacccttgtcacctgcctgggcctttcctatgatggcctgctgggtaataatcagatctttcccaagacaggccttctgataatcgtcctgggcacaattgcaatggagggcgacagcgcctctgaggaggaaatctgggaggagctgggtgtgatgggggtgtatgatgggagggagcacactgtctatggggagcccaggaaactgctcacccaagattgggtgcaggaaaactacctggagtaccggcaggtacccggcagtaatcctgcgcgctatgagttcctgtggggtccaagggctctggctgaaaccagctatgtgaaagtcctggagcatgtggtcagggtcaatgcaagagttcgcattgcctacccatccctgcgtgaagcagctttgttagaggaggaagagggagtctgagcatgagttgcagccagggctgtggggaaggggcagggctgggccagtgcatctaacagccctgtgcagcagcttcccttgcctcgtgtaacatgaggcccattcttcactctgtttgaagaaaatagtcagtgttcttagtagtgggtttctattttgttggatgacttggagatttatctctgtttccttttacaattgttgaaatgttccttttaatggatggttgaattaacttcagcatccaagtttatgaatcgtagttaacgtatattgctgttaatatagtttaggagtaagagtcttgttttttattcagattgggaaatccgttctattttgtgaatttgggacataataacagcagtggagtaagtatttagaagtgtgaattcaccgtgaaataggtgagataaattaaaagatacttaattcccgccttatgcctcagtctattctgtaaaatttaaaaaatatatatgcatacctggatttccttggcttcgtgaatgtaagagaaattaaatctgaataaataattctttctgttaa

SEQ ID NO: 17595 - DNA, 1773 bp, Homo sapiens; identical to SEQ ID NO: 17594
  source 1..1773: mol_type = unassigned DNA

SEQ ID NO: 17596 - DNA, 1727 bp, Homo sapiens
  source 1..1727: mol_type = unassigned DNA
ggttagagagaagcgagctgctctgtctgaccagcagcttgggattggcggagggaagcgggccaggccctgtgaggagtcaaggttctgagcagacaggccaaccggaggacaggattccctggaggccacagaggagcaccaaggagaagatctgcctgtgggtccccattgcccagcttttgcctgcactcttgcctgctgccctgaccagagtcatcatgtcttctgagcagaagagtcagcactgcaagcctgaggaaggcgttgaggcccaagaagaggccctgggcctggtgggtgcacaggctcctactactgaggagcaggaggctgctgtctcctcctcctctcctctggtccctggcaccctggaggaagtgcctgctgctgagtcagcaggtcctccccagagtcctcagggagcctctgccttacccactaccatcagcttcacttgctggaggcaacccaatgagggttccagcagccaagaagaggaggggccaagcacctcgcctgacgcagagtccttgttccgagaagcactcagtaacaaggtggatgagttggctcattttctgctccgcaagtatcgagccaaggagctggtcacaaaggcagaaatgctggagagagtcatcaaaaattacaagcgctgctttcctgtgatcttcggcaaagcctccgagtccctgaagatgatctttggcattgacgtgaaggaagtggaccccgccagcaacacctacacccttgtcacctgcctgggcctttcctatgatggcctgctgggtaataatcagatctttcccaagacaggccttctgataatcgtcctgggcacaattgcaatggagggcgacagcgcctctgaggaggaaatctgggaggagctgggtgtgatgggggtgtatgatgggagggagcacactgtctatggggagcccaggaaactgctcacccaagattgggtgcaggaaaactacctggagtaccggcaggtacccggcagtaatcctgcgcgctatgagttcctgtggggtccaagggctctggctgaaaccagctatgtgaaagtcctggagcatgtggtcagggtcaatgcaagagttcgcattgcctacccatccctgcgtgaagcagctttgttagaggaggaagagggagtctgagcatgagttgcagccagggctgtggggaaggggcagggctgggccagtgcatctaacagccctgtgcagcagcttcccttgcctcgtgtaacatgaggcccattcttcactctgtttgaagaaaatagtcagtgttcttagtagtgggtttctattttgttggatgacttggagatttatctctgtttccttttacaattgttgaaatgttccttttaatggatggttgaattaacttcagcatccaagtttatgaatcgtagttaacgtatattgctgttaatatagtttaggagtaagagtcttgttttttattcagattgggaaatccgttctattttgtgaatttgggacataataacagcagtggagtaagtatttagaagtgtgaattcaccgtgaaataggtgagataaattaaaagatacttaattcccgccttatgcctcagtctattctgtaaaatttaaaaaatatatatgcatacctggatttccttggcttcgtgaatgtaagagaaattaaatctgaataaataattctttctgttaa

SEQ ID NO: 17597 - DNA, 1773 bp, Homo sapiens; identical to SEQ ID NO: 17594
  source 1..1773: mol_type = unassigned DNA

SEQ ID NO: 17598 - DNA, 1721 bp, Homo sapiens
  source 1..1721: mol_type = unassigned DNA
ttagagagaagcgagctgctctgaccagccgcttgggattggcggagggaagcgggccaggccctgtgaggagtcaaggttctgagcagacaggccaaccggaggacaggattccctggaggccacagaggagcaccaaggagaagatctgcctgtgggtccccattgcccagcttttgcctgcactcttgcctgctgccctgaccagagtcatcatgtcttctgagcagaagagtcagcactgcaagcctgaggaaggcgttgaggcccaagaagaggccctgggcctggtgggtgcacaggctcctactactgaggagcaggaggctgctgtctcctcctcctctcctctggtccctggcaccctggaggaagtgcctgctgctgagtcagcaggtcctccccagagtcctcagggagcctctgccttacccactaccatcagcttcacttgctggaggcaacccaatgagggttccagcagccaagaagaggaggggccaagcacctcgcctgacgcagagtccttgttccgagaagcactcagtaacaaggtggatgagttggctcattttctgctccgcaagtatcgagccaaggagctggtcacaaaggcagaaatgctggagagagtcatcaaaaattacaagcgctgctttcctgtgatcttcggcaaagcctccgagtccctgaagatgatctttggcattgacgtgaaggaagtggaccccgccagcaacacctacacccttgtcacctgcctgggcctttcctatgatggcctgctgggtaataatcagatctttcccaagacaggccttctgataatcgtcctgggcacaattgcaatggagggcgacagcgcctctgaggaggaaatctgggaggagctgggtgtgatgggggtgtatgatgggagggagcacactgtctatggggagcccaggaaactgctcacccaagattgggtgcaggaaaactacctggagtaccggcaggtacccggcagtaatcctgcgcgctatgagttcctgtggggtccaagggctctggctgaaaccagctatgtgaaagtcctggagcatgtggtcagggtcaatgcaagagttcgcattgcctacccatccctgcgtgaagcagctttgttagaggaggaagagggagtctgagcatgagttgcagccagggctgtggggaaggggcagggctgggccagtgcatctaacagccctgtgcagcagcttcccttgcctcgtgtaacatgaggcccattcttcactctgtttgaagaaaatagtcagtgttcttagtagtgggtttctattttgttggatgacttggagatttatctctgtttccttttacaattgttgaaatgttccttttaatggatggttgaattaacttcagcatccaagtttatgaatcgtagttaacgtatattgctgttaatatagtttaggagtaagagtcttgttttttattcagattgggaaatccgttctattttgtgaatttgggacataataacagcagtggagtaagtatttagaagtgtgaattcaccgtgaaataggtgagataaattaaaagatacttaattcccgccttatgcctcagtctattctgtaaaatttaaaaaatatatatgcatacctggatttccttggcttcgtgaatgtaagagaaattaaatctgaataaataattctttctgttaa

SEQ ID NO: 17599 - DNA, 1727 bp, Homo sapiens; identical to SEQ ID NO: 17596
  source 1..1727: mol_type = unassigned DNA

SEQ ID NO: 17600 - DNA, 1029 bp, Homo sapiens
  source 1..1029: mol_type = unassigned DNA
ccccaggggcccggatgtgatgccactgacttgcgcattgggggttagagagaagcgagctgctctgtctgaccagcagcttgggattggcggagggaagcgggccaggccctgtgaggagtcaaggttctgagcagacaggccaaccggaggacaggattccctggaggccacagaggagcaccaaggagaagatctgtaagtaagcctttgttagagcctctaagatttggttctcagctgaggtctctcacatgctccctctctccgtaggcctgtgggtccccattgcccagcttttgcctgcactcttgcctgctgccctgaccagagtcatcatgtcttctgagcagaagagtcagcactgcaagcctgaggaaggcgttgaggcccaagaagaggccctgggcctggtgggtgcacaggctcctactactgaggagcaggaggctgctgtctcctcctcctctcctctggtccctggcaccctggaggaagtgcctgctgctgagtcagcaggtcctccccagagtcctcagggagcctctgccttacccactaccatcagcttcacttgctggaggcaacccaatgagggttccagcagccaagaagaggaggggccaagcacctcgcctgacgcagagtccttgttccgagaagcactcagtaacaaggtggatgagttggctcattttctgctccgcaagtatcgagccaaggagctggtcacaaaggcagaaatgctggagagagtcatcaaaaattacaagcgctgctttcctgtgatcttcggcaaagcctccgagtccctgaagatgatctttggcattgacgtgaaggaagtggaccccgccagcaacacctacacccttgtcacctgcctgggcctttcctatgatggcctgctgggtaataatcagatctttcccaagacaggccttctgataatcgtcctgggcacaattgcaatggagggcgacagcgcctctgaggaggaaatctgggaggagctgggtgtgatggggg

SEQ ID NO: 17601 - DNA, 914 bp, Homo sapiens
  source 1..914: mol_type = unassigned DNA
ccccaggggcccggatgtgatgccactgacttgcgcattgggggttagagagaagcgagctgctctgtctgaccagcagcttgggattggcggagggaagcgggccaggccctgtgaggagtcaaggttctgagcagacaggccaaccggaggacaggattccctggaggccacagaggagcaccaaggagaagatctgcctgtgggtccccattgcccagcttttgcctgcactcttgcctgctgccctgaccagagtcatcatgtcttctgagcagaagagtcagcactgcaagcctgaggaaggcgttgaggcccaagaagaggccctgggcctggtgggtgcacaggctcctactactgaggagcaggaggctgctgtctcctcctcctctcctctggtccctggcaccctggaggaagtgcctgctgctgagtcagcaggtcctccccagagtcctcagggagcctctgccttacccactaccatcagcttcacttgctggaggcaacccaatgagggttccagcagccaagaagaggaggggccaagcacctcgcctgacgcagagtccttgttccgagaagcactcagtaacaaggtggatgagttggctcattttctgctccgcaagtatcgagccaaggagctggtcacaaaggcagaaatgctggagagagtcatcaaaaattacaagcgctgctttcctgtgatcttcggcaaagcctccgagtccctgaagatgatctttggcattgacgtgaaggaagtggaccccgccagcaacacctacacccttgtcacctgcctgggcctttcctatgatggcctgctgggtaataatcagatctttcccaagacaggccttctgataatcgtcctgggcacaattgcaatggagggcgacagcgcc

SEQ ID NO: 17602 - DNA, 986 bp, Homo sapiens
  source 1..986: mol_type = unassigned DNA
cccaggggcccggatgtgatgccactgacttgcgcattgggggttagagagaagcgagctgctctgtctgaccagcagcttgggattggcggagggaagcgggccaggccctgtgaggagtcaaggttctgagcagacaggccaaccggaggacaggattccctggaggccacagaggagcaccaaggagaagatctgcctgtgggtccccattgcccagcttttgcctgcactcttgcctgctgccctgaccagagtcatcatgtcttctgagcagaagagtcagcactgcaagcctgaggaaggcgttgaggcccaagaagaggccctgggcctggtgggtgcacaggctcctactactgaggagcaggaggctgctgtctcctcctcctctcctctggtccctggcaccctggaggaagtgcctgctgctgagtcagcaggtcctccccagagtcctcagggagcctctgccttacccactaccatcagcttcacttgctggaggcaacccaatgagggttccagcagccaagaagaggaggggccaagcacctcgcctgacgcagagtccttgttccgagaagcactcagtaacaaggtggatgagttggctcattttctgctccgcaagtatcgagccaaggagctggtcacaaaggcagaaatgctggagagagtcatcaaaaattacaagcgctgctttcctgtgatcttcggcaaagcctccgagtccctgaagatgatctttggcattgacgtgaaggaagtggaccccgccagcaacacctacacccttgtcacctgcctgggcctttcctatgatggcctgctgggtaataatcagatctttcccaagacaggccttctgataatcgtcctgggcacaattgcaatggagggcgacagcgcctctgaggaggaaatctgggaggagctgggtgtgatgggggtgtatgatgggagggagcacactgtctatgggg

SEQ ID NO: 17603 - DNA, 854 bp, Homo sapiens
  source 1..854: mol_type = unassigned DNA
agggaagcaggcgcaggctctgtgaggaggcaaggcaggatccccggttccgcccccgctttcaaccaaggaaagccccagctgcccggatgtgatgccactgacttgcgcactgggggttagagacaagcgagcttctgcgtctgactcgcagcttgagactggcggagggaagcccgcccaggctctataaggagacaaggttctgagcagacaggccaaccggaggacaggattccctggaggccacagaggagcaccaaggagaagatctgcctgtgggtccccattgcccagcttttgcctgcactcttgcctgctgccctgaccagagtcatcatgtcttctgagcagaagagtcagcactgcaagcctgaggaaggcgttgaggcccaagaagaggccctgggcctggtgggtgcacaggctcctactactgaggagcaggaggctgctgtctcctcctcctctcctctggtccctggcaccctggaggaagtgcctgctgctgagtcagcaggtcctccccagagtcctcagggagcctctgccttacccactaccatcagcttcacttgctggaggcaacccaatgagggttccagcagccaagaagaggaggggccaagcacctcgcctgacgcagagtccttgttccgagaagcactcagtaacaaggtggatgagttggctcattttctgctccgcaagtatcgagccaaggagctggtcacaaaggcagaaatgctggagagagtcatcaaaaattacaagcgctgctttcctgtgatcttcggcaaagcctccgagtccctgaagatgatctttggcattgacgtgaaggaagtggaccc

SEQ ID NO: 17604 - DNA, 997 bp, Homo sapiens
  source 1..997: mol_type = unassigned DNA
aacccaagaaagccccaggggcccggatgtgatgccactgacttgcgcattcggggttagagagaagcgagctgctctgtgaccagccgcttgggattggtggagggaagcgggccaggccctgtgaggagtcaaggttctgagcagacaggccaaccggaggacaggattccctggaggccacagaggagcaccaaggagaagatctgcctgtgggtccccattgcccagcttttgcctgcactcttgcctgctgccctgaccagagtcatcatgtcttctgagcagaagagtcagcactgcaagcctgaggaaggcgttgaggcccaagaagaggccctgggcctggtgggtgcacaggctcctactactgaggagcaggaggctgctgtctcctcctcctctcctctggtccctggcaccctggaggaagtgcctgctgctgagtcagcaggtcctccccagagtcctcagggagcctctgccttacccactaccatcagcttcacttgctggaggcaacccaatgagggttccagcagccaagaagaggaggggccaagcacctcgcctgacgcagagtccttgttccgagaagcactcagtaacaaggtggatgagttggctcattttctgctccgcaagtatcgagccaaggagctggtcacaaaggcagaaatgctggagagagtcatcaaaaattacaagcgctgctttcctgtgatcttcggcaaagcctccgagtccctgaagatgatctttggcattgacgtgaaggaagtggaccccgccagcaacacctacacccttgtcacctgcctgggcctttcctatgatggcctgctgggtaataatcagatctttcccaagacaggccttctgataatcgtcctgggcacaattgcaatggagggcgacagcgcctctgaggaggaaatctgggaggagctgggtgtgatgggggtgtatgatgggagggagcacactgtctatgggg

SEQ ID NO: 17605 - DNA, 990 bp, Homo sapiens
  source 1..990: mol_type = unassigned DNA
aagaaagtcccaggtgcccggatgtgatgccactgacttgcgcattgggggttagagagaagcgagctgctctgaccagccgcttgggattggcggagggaagcgggccaggccctgtgaggagtcaaggttctgagcagacaggccaaccggaggacaggattccctggaggccacagaggagcaccaaggagaagatctgcctgtgggtccccattgcccagcttttgcctgcactcttgcctgctgccctgaccagagtcatcatgtcttctgagcagaagagtcagcactgcaagcctgaggaaggcgttgaggcccaagaagaggccctgggcctggtgggtgcacaggctcctactactgaggagcaggaggctgctgtctcctcctcctctcctctggtccctggcaccctggaggaagtgcctgctgctgagtcagcaggtcctccccagagtcctcagggagcctctgccttacccactaccatcagcttcacttgctggaggcaacccaatgagggttccagcagccaagaagaggaggggccaagcacctcgcctgacgcagagtccttgttccgagaagcactcagtaacaaggtggatgagttggctcattttctgctccgcaagtatcgagccaaggagctggtcacaaaggcagaaatgctggagagagtcatcaaaaattacaagcgctgctttcctgtgatcttcggcaaagcctccgagtccctgaagatgatctttggcattgacgtgaaggaagtggaccccgccagcaacacctacacccttgtcacctgcctgggcctttcctatgatggcctgctgggtaataatcagatctttcccaagacaggccttctgataatcgtcctgggcacaattgcaatggagggcgacagcgcctctgaggaggaaatctgggaggagctgggtgtgatgggggtgtatgatgggagggagcacactgtctatgggg

SEQ ID NO: 17606 - DNA, 914 bp, Homo sapiens; identical to SEQ ID NO: 17601
  source 1..914: mol_type = unassigned DNA

SEQ ID NO: 17607 - DNA, 990 bp, Homo sapiens; identical to SEQ ID NO: 17605
  source 1..990: mol_type = unassigned DNA

SEQ ID NO: 17608 - DNA, 1740 bp, Homo sapiens
  source 1..1740: mol_type = unassigned DNA
gaggtcagaagaccgcgagattctcgccctgagcaacgagcgacggcctgacgtcggcggagggaagccggcccaggctcggtgaggaggcaaggttctgaggggacaggctgacctggaggaccagaggcccccggaggagcactgaaggagaagatctgccagtgggtctccattgcccagctcctgcccacactcccgcctgttgccctgaccagagtcatcatgcctcttgagcagaggagtcagcactgcaagcctgaagaaggccttgaggcccgaggagaggccctgggcctggtgggtgcgcaggctcctgctactgaggagcaggaggctgcctcctcctcttctactctagttgaagtcaccctgggggaggtgcctgctgccgagtcaccagatcctccccagagtcctcagggagcctccagcctccccactaccatgaactaccctctctggagccaatcctatgaggactccagcaaccaagaagaggaggggccaagcaccttccctgacctggagtctgagttccaagcagcactcagtaggaaggtggccaagttggttcattttctgctcctcaagtatcgagccagggagccggtcacaaaggcagaaatgctggggagtgtcgtcggaaattggcagtacttctttcctgtgatcttcagcaaagcttccgattccttgcagctggtctttggcatcgagctgatggaagtggaccccatcggccacgtgtacatctttgccacctgcctgggcctctcctacgatggcctgctgggtgacaatcagatcatgcccaagacaggcttcctgataatcatcctggccataatcgcaaaagagggcgactgtgcccctgaggagaaaatctgggaggagctgagtgtgttagaggtgtttgaggggagggaagacagtatcttcggggatcccaagaagctgctcacccaatatttcgtgcaggaaaactacctggagtaccggcaggtccccggcagtgatcctgcatgctatgagttcctgtggggtccaagggccctcattgaaaccagctatgtgaaagtcctgcaccatatggtaaagatcagtggaggacctcgcatttcctacccactcctgcatgagtgggctttgagagagggggaagagtgagtctgagcacgagttgcagccagggccagtgggagggggtttgggccagtgcaccttccggggccccatcccttagtttccactgcctcctgtgacgtgaggcccattcttcactctttgaagcgagcagtcagcattcttagtagtgggtttctgttctgttggatgactttgagattattctttgtttcctgttggagttgttcaaatgttccttttaacggatggttgaatgagcgtcagcatccaggtttatgaatgacagtagtcacacatagtgctgtttatatagtttaggagtaagagtcttgttttttattcagattgggaaatccattccattttgtgaattgtgacataataatagcagtggaaaaagtatttgcttaaaattgtgagcgaattagcaataacatacatgagataactcaagaaatcaaaagatagttgattcttgccttgtacctcaatctattctgtaaaattaaacaaatatgcaaaccaggatttccttgacttctttgagaatgcaagcgaaattaaatctgaataaataattcttcctcttca

SEQ ID NO: 17609 - DNA, 862 bp, Homo sapiens
  source 1..862: mol_type = unassigned DNA
agcaacgagcgacggcctgacgtcggcggagggaagccggcccaggctcggtgaggaggcaagtcctgcagcctcagcatgcgctggccggatgtaccctgaggtgccctctcacttcctccttcaggttctgaggggacaggctgacctggaggaccagaggcccccggaggagcactgaaggagaagatctgccagtgggtctccattgcccagctcctgcccacactcccgcctgttgccctgaccagagtcatcatgcctcttgagcagaggagtcagcactgcaagcctgaagaaggccttgaggcccgaggagaggccctgggcctggtgggtgcgcaggctcctgctactgaggagcaggaggctgcctcctcctcttctactctagttgaagtcaccctgggggaggtgcctgctgccgagtcaccagatcctccccagagtcctcagggagcctccagcctccccactaccatgaactaccctctctggagccaatcctatgaggactccagcaaccaagaagaggaggggccaagcaccttccctgacctggagtctgagttccaagcagcactcagtaggaaggtggccaagttggttcattttctgctcctcaagtatcgagccagggagccggtcacaaaggcagaaatgctggggagtgtcgtcggaaattggcagtacttctttcctgtgatcttcagcaaagcttccgattccttgcagctggtctttggcatcgagctgatggaagtggaccccatcggccacgtgtacatctttgccacctgcctgggcctctcctacgatggcctgctgggtgacaatcagatcatgcccaagacaggcttcc

SEQ ID NO: 17610 - DNA, 921 bp, Homo sapiens
  source 1..921: mol_type = unassigned DNA
gcccaggctcggtgaggaggcaagaatccgggctttgcccctggtatcaagtcacggaagctccgggaatggcggccaggcacgttctgaggggacaggctgacctggaggaccagaggcccccggaggagcactgaaggagaagatctgccagtgggtctccattgcccagctcctgcccacactcccgcctgttgccctgaccagagtcatcatgcctcttgagcagaggagtcagcactgcaagcctgaagaaggccttgaggcccgaggagaggccctgggcctggtgggtgcgcaggctcctgctactgaggagcaggaggctgcctcctcctcttctactctagttgaagtcaccctgggggaggtgcctgctgccgagtcaccagatcctccccagagtcctcagggagcctccagcctccccactaccatgaactaccctctctggagccaatcctatgaggactccagcaaccaagaagaggaggggccaagcaccttccctgacctggagtctgagttccaagcagcactcagtaggaaggtggccaagttggttcattttctgctcctcaagtatcgagccagggagccggtcacaaaggcagaaatgctggggagtgtcgtcggaaattggcagtacttctttcctgtgatcttcagcaaagcttccgattccttgcagctggtctttggcatcgagctgatggaagtggaccccatcggccacgtgtacatctttgccacctgcctgggcctctcctacgatggcctgctgggtgacaatcagatcatgcccaagacaggcttcctgataatcatcctggccataatcgcaaaagagggcgactgtgcccctgaggagaaaatctgggaggagctgagtgtgttagaggtgtttgaggggagggaaga

SEQ ID NO: 17611 - DNA, 1778 bp, Homo sapiens
  source 1..1778: mol_type = unassigned DNA
gcggggatcagagagaagcgagggcctggttctgaggggtcggcttgagatcggctgagggaagcgggctcagggtctgtgaggaggcaaggttcgcagagaacaggccagccaggaggtcaggaggccccagagaagcactgaagaagacctgcctgtgggtctcaattgcccagctccggcccacactctcctgctgccctgacctgagtcatcatgcttcttgggcagaagagtcagcgctacaaggctgaggaaggccttcaggcccaaggagaggcaccagggcttatggatgtgcagattcccacagctgaggagcagaaggctgcatcctcctcctctactctgatcatgggaacccttgaggaggtgactgattctgggtcaccaagtcctccccagagtcctgagggtgcctcctcttccctgactgtcaccgacagcactctgtggagccaatccgatgagggttccagcagcaatgaagaggaggggccaagcacctccccggacccagctcacctggagtccctgttccgggaagcacttgatgagaaagtggctgagttagttcgtttcctgctccgcaaatatcaaattaaggagccggtcacaaaggcagaaatgcttgagagtgtcatcaaaaattacaagaaccactttcctgatatcttcagcaaagcctctgagtgcatgcaggtgatctttggcattgatgtgaaggaagtggaccctgccggccactcctacatccttgtcacctgcctgggcctctcctatgatggcctgctgggtgatgatcagagtacgcccaagaccggcctcctgataatcgtcctgggcatgatcttaatggagggcagccgcgccccggaggaggcaatctgggaagcattgagtgtgatggggctgtatgatgggagggagcacagtgtctattggaagctcaggaagctgctcacccaagagtgggtgcaggagaactacctggagtaccgccaggcgcccggcagtgatcctgtgcgctacgagttcctgtggggtccaagggcccttgctgaaaccagctatgtgaaagtcctggagcatgtggtcagggtcaatgcaagagttcgcatttcctacccatccctgcatgaagaggctttgggagaggagaaaggagtttgagcaggagttgcagctagggccagtggggcaggttgtgggagggcctgggccagtgcacgttccagggccacatccaccactttccctgctctgttacatgaggcccattcttcactctgtgtttgaagagagcagtcacagttctcagtagtggggagcatgttgggtgtgagggaacacagtgtggaccatctctcagttcctgttctattgggcgatttggaggtttatctttgtttccttttggaattgttccaatgttccttctaatggatggtgtaatgaacttcaacattcattttatgtatgacagtagacagacttactgctttttatatagtttaggagtaagagtcttgcttttcatttatactgggaaacccatgttatttcttgaattcagacactacaagagcagaggattaaggtttttttagaaatgtgaaacaacatagcagtaaaatacatgagataaagacataaagaaattaaacaatagttaattcttgccttacctgtacctcttagtgtaccctatgtacctgaatttgcttggcttctttgagaatgaaattgaattaaatatgaataaataagtccccctg

SEQ ID NO: 17612 - DNA, 2112 bp, Homo sapiens
  source 1..2112: mol_type = unassigned DNA
gttgtccacccaggtgagccctgggtggacggatgtgacgccactgacgtggccgcggggatcagagagaagcgagggcctggttctgaggggtcggcttgagatcggctgagggaagcgggctcagggtctgtgaggaggcaagcaggcaaaaaacagatgggggcccaacagaaatctgcccggcctcttttgtcacccctgagagcatgagcaggactatcagctgaggcccctgtgttataccagactcattggtctcagggagaagaaggccttggtctgagggcactgcattcaggtcagcagagcgggggtccaaggccctgccaggagtcagggactcagaggacaccactcaccaaacacacaggaccgaaccccaccctgcaccttctgtcagccatgggaagtgcagggaaaggttcgcagagaacaggccagccaggaggtcaggaggccccagagaagcactgaagaagacctgcctgtgggtctcaattgcccagctccggcccacactctcctgctgccctgacctgagtcatcatgcttcttgggcagaagagtcagcgctacaaggctgaggaaggccttcaggcccaaggagaggcaccagggcttatggatgtgcagattcccacagctgaggagcagaaggctgcatcctcctcctctactctgatcatgggaacccttgaggaggtgactgattctgggtcaccaagtcctccccagagtcctgagggtgcctcctcttccctgactgtcaccgacagcactctgtggagccaatccgatgagggttccagcagcaatgaagaggaggggccaagcacctccccggacccagctcacctggagtccctgttccgggaagcacttgatgagaaagtggctgagttagttcgtttcctgctccgcaaatatcaaattaaggagccggtcacaaaggcagaaatgcttgagagtgtcatcaaaaattacaagaaccactttcctgatatcttcagcaaagcctctgagtgcatgcaggtgatctttggcattgatgtgaaggaagtggaccctgccggccactcctacatccttgtcacctgcctgggcctctcctatgatggcctgctgggtgatgatcagagtacgcccaagaccggcctcctgataatcgtcctgggcatgatcttaatggagggcagccgcgccccggaggaggcaatctgggaagcattgagtgtgatggggctgtatgatgggagggagcacagtgtctattggaagctcaggaagctgctcacccaagagtgggtgcaggagaactacctggagtaccgccaggcgcccggcagtgatcctgtgcgctacgagttcctgtggggtccaagggcccttgctgaaaccagctatgtgaaagtcctggagcatgtggtcagggtcaatgcaagagttcgcatttcctacccatccctgcatgaagaggctttgggagaggagaaaggagtttgagcaggagttgcagctagggccagtggggcaggttgtgggagggcctgggccagtgcacgttccagggccacatccaccactttccctgctctgttacatgaggcccattcttcactctgtgtttgaagagagcagtcacagttctcagtagtggggagcatgttgggtgtgagggaacacagtgtggaccatctctcagttcctgttctattgggcgatttggaggtttatctttgtttccttttggaattgttccaatgttccttctaatggatggtgtaatgaacttcaacattcattttatgtatgacagtagacagacttactgctttttatatagtttaggagtaagagtcttgcttttcatttatactgggaaacccatgttatttcttgaattcagacactacaagagcagaggattaaggtttttttagaaatgtgaaacaacatagcagtaaaatacatgagataaagacataaagaaattaaacaatagttaattcttgccttacctgtacctcttagtgtaccctatgtacctgaatttgcttggcttctttgagaatgaaattgaattaaatatgaataaataagtccccctgc

SEQ ID NO: 17613 - DNA, 2084 bp, Homo sapiens
  source 1..2084: mol_type = unassigned DNA
gttgtccacccaggtgagccctgggtggacggatgtgacgccactgacgtggccgcggggatcagagagaagcgagggcctggttctgaggggtcggcttgagatcggctgagggaagcgggctcagggtctgtgaggaggcaaggagctccaggaaccaggctgtgaggtcttggtctgaggcagtatcttcaatcacagagcataagaggcccaggcagtagtagcagtcaagctgaggtggtgtttcccctgtatgtataccagaggcccctctggcatcagaacagcaggaaccccacagttcctggccctaccagcccttttgtcagtcctggagccttggcctttgccaggaggctgcaccctgagatgccctctcaatttctccttcaggttcgcagagaacaggccagccaggaggtcaggaggccccagagaagcactgaagaagacctgcctgtgggtctcaattgcccagctccggcccacactctcctgctgccctgacctgagtcatcatgcttcttgggcagaagagtcagcgctacaaggctgaggaaggccttcaggcccaaggagaggcaccagggcttatggatgtgcagattcccacagctgaggagcagaaggctgcatcctcctcctctactctgatcatgggaacccttgaggaggtgactgattctgggtcaccaagtcctccccagagtcctgagggtgcctcctcttccctgactgtcaccgacagcactctgtggagccaatccgatgagggttccagcagcaatgaagaggaggggccaagcacctccccggacccagctcacctggagtccctgttccgggaagcacttgatgagaaagtggctgagttagttcgtttcctgctccgcaaatatcaaattaaggagccggtcacaaaggcagaaatgcttgagagtgtcatcaaaaattacaagaaccactttcctgatatcttcagcaaagcctctgagtgcatgcaggtgatctttggcattgatgtgaaggaagtggaccctgccggccactcctacatccttgtcacctgcctgggcctctcctatgatggcctgctgggtgatgatcagagtacgcccaagaccggcctcctgataatcgtcctgggcatgatcttaatggagggcagccgcgccccggaggaggcaatctgggaagcattgagtgtgatggggctgtatgatgggagggagcacagtgtctattggaagctcaggaagctgctcacccaagagtgggtgcaggagaactacctggagtaccgccaggcgcccggcagtgatcctgtgcgctacgagttcctgtggggtccaagggcccttgctgaaaccagctatgtgaaagtcctggagcatgtggtcagggtcaatgcaagagttcgcatttcctacccatccctgcatgaagaggctttgggagaggagaaaggagtttgagcaggagttgcagctagggccagtggggcaggttgtgggagggcctgggccagtgcacgttccagggccacatccaccactttccctgctctgttacatgaggcccattcttcactctgtgtttgaagagagcagtcacagttctcagtagtggggagcatgttgggtgtgagggaacacagtgtggaccatctctcagttcctgttctattgggcgatttggaggtttatctttgtttccttttggaattgttccaatgttccttctaatggatggtgtaatgaacttcaacattcattttatgtatgacagtagacagacttactgctttttatatagtttaggagtaagagtcttgcttttcatttatactgggaaacccatgttatttcttgaattcagacactacaagagcagaggattaaggtttttttagaaatgtgaaacaacatagcagtaaaatacatgagataaagacataaagaaattaaacaatagttaattcttgccttacctgtacctcttagtgtaccctatgtacctgaatttgcttggcttctttgagaatgaaattgaattaaatatgaataaataagtccccctgc

SEQ ID NO: 17614 - DNA, 1805 bp, Homo sapiens
  source 1..1805: mol_type = unassigned DNA
ctgggggtcagagagaagggagaggcctccttctgaggggcggcttgataccggtggaggagctccaggaagcaggcaggccttggtctgagacagtgtcctcaggtcgcagagcagaggagacccaggcagtgtcagcagtgaaggttctcgggacaggctaaccaggaggacaggagccccaagaggccccagagcagcactgacgaagacctgcctgtgggtctccatcgcccagctcctgcccacgctcctgactgctgccctgaccagagtcatcatgtctctcgagcagaggagtccgcactgcaagcctgatgaagaccttgaagcccaaggagaggacttgggcctgatgggtgcacaggaacccacaggcgaggaggaggagactacctcctcctctgacagcaaggaggaggaggtgtctgctgctgggtcatcaagtcctccccagagtcctcagggaggcgcttcctcctccatttccgtctactacactttatggagccaattcgatgagggctccagcagtcaagaagaggaagagccaagctcctcggtcgacccagctcagctggagttcatgttccaagaagcactgaaattgaaggtggctgagttggttcatttcctgctccacaaatatcgagtcaaggagccggtcacaaaggcagaaatgctggagagcgtcatcaaaaattacaagcgctactttcctgtgatcttcggcaaagcctccgagttcatgcaggtgatctttggcactgatgtgaaggaggtggaccccgccggccactcctacatccttgtcactgctcttggcctctcgtgcgatagcatgctgggtgatggtcatagcatgcccaaggccgccctcctgatcattgtcctgggtgtgatcctaaccaaagacaactgcgcccctgaagaggttatctgggaagcgttgagtgtgatgggggtgtatgttgggaaggagcacatgttctacggggagcccaggaagctgctcacccaagattgggtgcaggaaaactacctggagtaccggcaggtgcccggcagtgatcctgcgcactacgagttcctgtggggttccaaggcccacgctgaaaccagctatgagaaggtcataaattatttggtcatgctcaatgcaagagagcccatctgctacccatccctttatgaagaggttttgggagaggagcaagagggagtctgagcaccagccgcagccggggccaaagtttgtggggtcagggccccatccagcagctgccctgccccatgtgacatgaggcccattcttcgctctgtgtttgaagagagcaatcagtgttctcagtggcagtgggtggaagtgagcacactgtatgtcatctctgggttccttgtctattgggtgatttggagatttatccttgctcccttttggaattgttcaaatgttcttttaatggtcagtttaatgaacttcaccatcgaagttaatgaatgacagtagtcacacatattgctgtttatgttatttaggagtaagattcttgcttttgagtcacatggggaaatccctgttattttgtgaattgggacaagataacatagcagaggaattaataatttttttgaaacttgaacttagcagcaaaatagagctcataaagaaatagtgaaatgaaaatgtagttaattcttgccttatacctctttctctctcctgtaaaattaaaacatatacatgtatacctggatttgcttggcttctttgagcatgtaagagaaataaaaattgaaagaat

SEQ ID NO: 17615 - DNA, 551 bp, Homo sapiens
  source 1..551: mol_type = unassigned DNA
gtcactgacgtgcgcactgggggtcagagagaagggagaggcctccttctgaggggcggcttgataccggtggaggttctcgggacaggctaaccaggaggacaggagccccaagaggccccagagcagcactgacgaagacctgcctgtgggtctccatcgcccagctcctgcccacgctcctgactgctgccctgaccagagtcatcatgtctctcgagcagaggagtccgcactgcaagcctgatgaagaccttgaagcccaaggagaggacttgggcctgatgggtgcacaggaacccacaggcgaggaggaggagactacctcctcctctgacagcaaggaggaggaggtgtctgctgctgggtcatcaagtcctccccagagtcctcagggaggcgcttcctcctccatttccgtctactacactttatggagccaattcgatgagggctccagcagtcaagaagaggaagagccaagctcctcggtcgacccagctcagctggagttcatgttccaagaagcactgaaattgaaggtggctgag

SEQ ID NO: 17616 - DNA, 1139 bp, Homo sapiens
  source 1..1139: mol_type = unassigned DNA
gagaagggagaggcctccttctgaggggcggcttgataccggtggaggtaagctggccgaggctctgtgaggagtcaaggttctcgggacaggctaaccaggaggacaggagccccaagaggccccagagcagcactgacgaagacctgcctgtgggtctccatcgcccagctcctgcccacgctcctgactgctgccctgaccagagtcatcatgtctctcgagcagaggagtccgcactgcaagcctgatgaagaccttgaagcccaaggagaggacttgggcctgatgggtgcacaggaacccacaggcgaggaggaggagactacctcctcctctgacagcaaggaggaggaggtgtctgctgctgggtcatcaagtcctccccagagtcctcagggaggcgcttcctcctccatttccgtctactacactttatggagccaattcgatgagggctccagcagtcaagaagaggaagagccaagctcctcggtcgacccagctcagctggagttcatgttccaagaagcactgaaattgaaggtggctgagttggttcatttcctgctccacaaatatcgagtcaaggagccggtcacaaaggcagaaatgctggagagcgtcatcaaaaattacaagcgctactttcctgtgatcttcggcaaagcctccgagttcatgcaggtgatctttggcactgatgtgaaggaggtggaccccgccggccactcctacatccttgtcactgctcttggcctctcgtgcgatagcatgctgggtgatggtcatagcatgcccaaggccgccctcctgatcattgtcctgggtgtgatcctaaccaaagacaactgcgcccctgaagaggttatctgggaagcgttgagtgtgatgggggtgtatgttgggaaggagcacatgttctacggggagcccaggaagctgctcacccaagattgggtgcaggaaaactacctggagtaccggcaggtgcccggcagtgatcctgcgcactacgagttcctgtggggttccaaggcccacgctgaaaccagctatgagaaggtcataaattatttggtcatgctcaatgcaagagagcccatctgctacccatccctttatgaagaggttttggg

SEQ ID NO: 17617 - DNA, 887 bp, Homo sapiens
  source 1..887: mol_type = unassigned DNA
gagaagggagaggcctccttctgaggggcggcttgataccggtggaggtaagctggccgaggctctgtgaggagtcaaggagctccaggaagcaggcaggccttggtctgagacagtgtcctcaggtcgcagagcagaggagacccaggcagtgtcagcagtgaaggttctcgggacaggctaaccaggaggacaggagccccaagaggccccagagcagcactgacgaagacctgcctgtgggtctccatcgcccagctcctgcccacgctcctgactgctgccctgaccagagtcatcatgtctctcgagcagaggagtccgcactgcaagcctgatgaagaccttgaagcccaaggagaggacttgggcctgatgggtgcacaggaacccacaggcgaggaggaggagactacctcctcctctgacagcaaggaggaggaggtgtctgctgctgggtcatcaagtcctccccagagtcctcagggaggcgcttcctcctccatttccgtctactacactttatggagccaattcgatgagggctccagcagtcaagaagaggaagagccaagctcctcggtcgacccagctcagctggagttcatgttccaagaagcactgaaattgaaggtggctgagttggttcatttcctgctccacaaatatcgagtcaaggagccggtcacaaaggcagaaatgctggagagcgtcatcaaaaattacaagcgctactttcctgtgatcttcggcaaagcctccgagttcatgcaggtgatctttggcactgatgtgaaggaggtggaccccgccggccactcctacatccttgtcactgctcttggcctctcgtgcgatagcatgctgggtgatggtcatagcatgcc

SEQ ID NO: 17618 - DNA, 594 bp, Homo sapiens
  source 1..594: mol_type = unassigned DNA
agagagtagcgggggcctcgctgtgaggggcgggtcgatatcggtggagggaagcgggcccaggctctgtgaggaggcaaggagctccaggaagcaggcaggccttggtctgagacagtgtcctcaggtcgcagagcagaggagacccaggcagtgtcagcagtgaaggttctcgggacaggctaaccaggaggacaggagccccaagaggccccagagcagcactgacgaagacctgcctgtgggtctccatcgcccagctcctgcccacgctcctgactgctgccctgaccagagtcatcatgtctctcgagcagaggagtccgcactgcaagcctgatgaagaccttgaagcccaaggagaggacttgggcctgatgggtgcacaggaacccacaggcgaggaggaggagactacctcctcctctgacagcaaggaggaggaggtgtctgctgctgggtcatcaagtcctccccagagtcctcagggaggcgcttcctcctccatttccgtctactacactttatggagccaattcgatgagggctccagcagtcaagaagaggaagagccaagctcctcggtcgacccag

SEQ ID NO: 17619 - DNA, 1814 bp, Homo sapiens
  source 1..1814: mol_type = unassigned DNA
gtgcgcactgggggtcagagagaagggagaggcctccttctgaggggcggcttgataccggtggaggagctccaggaagcaggcaggccttggtctgagacagtgtcctcaggtcgcagagcagaggagacccaggcagtgtcagcagtgaaggttctcgggacaggctaaccaggaggacaggagccccaagaggccccagagcagcactgacgaagacctgcctgtgggtctccatcgcccagctcctgcccacgctcctgactgctgccctgaccagagtcatcatgtctctcgagcagaggagtccgcactgcaagcctgatgaagaccttgaagcccaaggagaggacttgggcctgatgggtgcacaggaacccacaggcgaggaggaggagactacctcctcctctgacagcaaggaggaggaggtgtctgctgctgggtcatcaagtcctccccagagtcctcagggaggcgcttcctcctccatttccgtctactacactttatggagccaattcgatgagggctccagcagtcaagaagaggaagagccaagctcctcggtcgacccagctcagctggagttcatgttccaagaagcactgaaattgaaggtggctgagttggttcatttcctgctccacaaatatcgagtcaaggagccggtcacaaaggcagaaatgctggagagcgtcatcaaaaattacaagcgctactttcctgtgatcttcggcaaagcctccgagttcatgcaggtgatctttggcactgatgtgaaggaggtggaccccgccggccactcctacatccttgtcactgctcttggcctctcgtgcgatagcatgctgggtgatggtcatagcatgcccaaggccgccctcctgatcattgtcctgggtgtgatcctaaccaaagacaactgcgcccctgaagaggttatctgggaagcgttgagtgtgatgggggtgtatgttgggaaggagcacatgttctacggggagcccaggaagctgctcacccaagattgggtgcaggaaaactacctggagtaccggcaggtgcccggcagtgatcctgcgcactacgagttcctgtggggttccaaggcccacgctgaaaccagctatgagaaggtcataaattatttggtcatgctcaatgcaagagagcccatctgctacccatccctttatgaagaggttttgggagaggagcaagagggagtctgagcaccagccgcagccggggccaaagtttgtggggtcagggccccatccagcagctgccctgccccatgtgacatgaggcccattcttcgctctgtgtttgaagagagcaatcagtgttctcagtggcagtgggtggaagtgagcacactgtatgtcatctctgggttccttgtctattgggtgatttggagatttatccttgctcccttttggaattgttcaaatgttcttttaatggtcagtttaatgaacttcaccatcgaagttaatgaatgacagtagtcacacatattgctgtttatgttatttaggagtaagattcttgcttttgagtcacatggggaaatccctgttattttgtgaattgggacaagataacatagcagaggaattaataatttttttgaaacttgaacttagcagcaaaatagagctcataaagaaatagtgaaatgaaaatgtagttaattcttgccttatacctctttctctctcctgtaaaattaaaacatatacatgtatacctggatttgcttggcttctttgagcatgtaagagaaataaaaattgaaagaataa

SEQ ID NO: 17620 - DNA, 1866 bp, Homo sapiens
  source 1..1866: mol_type = unassigned DNA
cagtgttgcaactgggcctggcatgtttcagtgtggtgtccagcagtgtctcccactccttgtgaagtctgaggttgcaaaaggactgtgatcatatgaagatcatccaggagtacaactcgaaattctcagaaaacaggaccttgatgtgagaggagcaggttcaggtaaacaaagggcgaggacccgagcgagcttaaggagtggggtgcagcgtctggtcagcggagggtgaattctcaggactggtcgggagtcaaggtgccacatctcctgcctttctgctcactttcctgcctgttttgcctgaccacagccatcatgcctcggggtcagaagagtaagctccgtgctcgtgagaaacgccgcaaggcgcgagaggagacccagggtctcaaggttgctcacgccactgcagcagagaaagaggagtgcccctcctcctctcctgttttaggggatactcccacaagctcccctgctgctggcattccccagaagcctcagggagctccacccaccaccactgctgctgcagctgtgtcatgtaccgaatctgacgaaggtgccaaatgccaaggtgaggaaaatgcaagtttctcccaggccacaacatccactgagagctcagtcaaagatcctgtagcctgggaggcaggaatgctgatgcacttcattctacgtaagtataaaatgagagagcccattatgaaggcagatatgctgaaggttgttgatgaaaagtacaaggatcacttcactgagatcctcaatggagcctctcgccgcttggagctcgtctttggccttgatttgaaggaagacaaccctagtggccacacctacaccctcgtcagtaagctaaacctcaccaatgatggaaacctgagcaatgattgggactttcccaggaatgggcttctgatgcctctcctgggtgtgatcttcttaaagggcaactctgccaccgaggaagagatctggaaattcatgaatgtgttgggagcctatgatggagaggagcacttaatctatggggaaccccgtaagttcatcacccaagatctggtgcaggaaaaatatctgaagtacgagcaggtgcccaacagtgatcccccacgctatcaattcctatggggtccgagagcctatgctgaaaccaccaagatgaaagtcctcgagtttttggccaagatgaatggtgccactccccgtgacttcccatcccattatgaagaggctttgagagatgaggaagagagagcccaagtccgatccagtgttagagccaggcgtcgcactactgccacgacttttagagcgcgttctagagccccattcagcaggtcctcccaccccatgtgagaactcaggcagattgttcactttgtttttgtggcaagatgccaaccttttgaagtagtgagcagccaagatatggctagagagatcatcatatatatctcctttgtgttcctgttaaacattagtatctttcaagtgtttttcttttaatagaatgtttatttagagttgggatctatgtctatgagcgacatggatcacacatttattggtgctgccagctttaagcatatgagttttgatattctatatttttcaaatccttgaatcttttttgggttgaagaagaagaaagcatagctttagaatagagattttctcagaaatgtgtgaaagaacctcacacaacataattggagtcttaaaatagaggaagagtaagcaaagcatgtcaagtttttgttttctgcattcagttttgtttttgtaaaatccaaagatacatacctggttgtttttagccttttcaagaatgcagataaaataaatagtaataaatta

SEQ ID NO: 17621 - DNA, 1708 bp, Homo sapiens
  source 1..1708: mol_type = unassigned DNA
ttccgctttgaaggcgaggaccccagcgagcgtaagggcgcagtgtccgcctggcggatttgggtcagcaggcggaagtcgtcccaggctgctagatactaaggtgccacatctcctgcctttctgctcactttcctgcctgttttgcctgaccacagccatcatgcctcggggtcagaagagtaagctccgtgctcgtgagaaacgccgcaaggcgcgagaggagacccagggtctcaaggttgctcacgccactgcagcagagaaagaggagtgcccctcctcctctcctgttttaggggatactcccacaagctcccctgctgctggcattccccagaagcctcagggagctccacccaccaccactgctgctgcagctgtgtcatgtaccgaatctgacgaaggtgccaaatgccaaggtgaggaaaatgcaagtttctcccaggccacaacatccactgagagctcagtcaaagatcctgtagcctgggaggcaggaatgctgatgcacttcattctacgtaagtataaaatgagagagcccattatgaaggcagatatgctgaaggttgttgatgaaaagtacaaggatcacttcactgagatcctcaatggagcctctcgccgcttggagctcgtctttggccttgatttgaaggaagacaaccctagtggccacacctacaccctcgtcagtaagctaaacctcaccaatgatggaaacctgagcaatgattgggactttcccaggaatgggcttctgatgcctctcctgggtgtgatcttcttaaagggcaactctgccaccgaggaagagatctggaaattcatgaatgtgttgggagcctatgatggagaggagcacttaatctatggggaaccccgtaagttcatcacccaagatctggtgcaggaaaaatatctgaagtacgagcaggtgcccaacagtgatcccccacgctatcaattcctatggggtccgagagcctatgctgaaaccaccaagatgaaagtcctcgagtttttggccaagatgaatggtgccactccccgtgacttcccatcccattatgaagaggctttgagagatgaggaagagagagcccaagtccgatccagtgttagagccaggcgtcgcactactgccacgacttttagagcgcgttctagagccccattcagcaggtcctcccaccccatgtgagaactcaggcagattgttcactttgtttttgtggcaagatgccaaccttttgaagtagtgagcagccaagatatggctagagagatcatcatatatatctcctttgtgttcctgttaaacattagtatctttcaagtgtttttcttttaatagaatgtttatttagagttgggatctatgtctatgagcgacatggatcacacatttattggtgctgccagctttaagcatatgagttttgatattctatatttttcaaatccttgaatcttttttgggttgaagaagaagaaagcatagctttagaatagagattttctcagaaatgtgtgaaagaacctcacacaacataattggagtcttaaaatagaggaagagtaagcaaagcatgtcaagtttttgttttctgcattcagttttgtttttgtaaaatccaaagatacatacctggttgtttttagccttttcaagaatgcagataaaataaatagtaataaatta

SEQ ID NO: 17622 - DNA, 1782 bp, Homo sapiens
  source 1..1782: mol_type = unassigned DNA
agtgttgcaactgggcctggcatgtttcagtgtggtgtccagcagtgtctcccactccttgtgaagtctgaggttgcaaaaggactgtgatcatatgaagatcatccaggagtacaactcgaaattctcagaaaacaggaccttgatgtgagaggagcaggttcaggtaaacaaagggtgccacatctcctgcctttctgctcactttcctgcctgttttgcctgaccacagccatcatgcctcggggtcagaagagtaagctccgtgctcgtgagaaacgccgcaaggcgcgagaggagacccagggtctcaaggttgctcacgccactgcagcagagaaagaggagtgcccctcctcctctcctgttttaggggatactcccacaagctcccctgctgctggcattccccagaagcctcagggagctccacccaccaccactgctgctgcagctgtgtcatgtaccgaatctgacgaaggtgccaaatgccaaggtgaggaaaatgcaagtttctcccaggccacaacatccactgagagctcagtcaaagatcctgtagcctgggaggcaggaatgctgatgcacttcattctacgtaagtataaaatgagagagcccattatgaaggcagatatgctgaaggttgttgatgaaaagtacaaggatcacttcactgagatcctcaatggagcctctcgccgcttggagctcgtctttggccttgatttgaaggaagacaaccctagtggccacacctacaccctcgtcagtaagctaaacctcaccaatgatggaaacctgagcaatgattgggactttcccaggaatgggcttctgatgcctctcctgggtgtgatcttcttaaagggcaactctgccaccgaggaagagatctggaaattcatgaatgtgttgggagcctatgatggagaggagcacttaatctatggggaaccccgtaagttcatcacccaagatctggtgcaggaaaaatatctgaagtacgagcaggtgcccaacagtgatcccccacgctatcaattcctatggggtccgagagcctatgctgaaaccaccaagatgaaagtcctcgagtttttggccaagatgaatggtgccactccccgtgacttcccatcccattatgaagaggctttgagagatgaggaagagagagcccaagtccgatccagtgttagagccaggcgtcgcactactgccacgacttttagagcgcgttctagagccccattcagcaggtcctcccaccccatgtgagaactcaggcagattgttcactttgtttttgtggcaagatgccaaccttttgaagtagtgagcagccaagatatggctagagagatcatcatatatatctcctttgtgttcctgttaaacattagtatctttcaagtgtttttcttttaatagaatgtttatttagagttgggatctatgtctatgagcgacatggatcacacatttattggtgctgccagctttaagcatatgagttttgatattctatatttttcaaatccttgaatcttttttgggttgaagaagaagaaagcatagctttagaatagagattttctcagaaatgtgtgaaagaacctcacacaacataattggagtcttaaaatagaggaagagtaagcaaagcatgtcaagtttttgttttctgcattcagttttgtttttgtaaaatccaaagatacatacctggttgtttttagccttttcaagaatgcagataaaataaatagtaataaatta

SEQ ID NO: 17623 - DNA, 1953 bp, Homo sapiens
  source 1..1953: mol_type = unassigned DNA
gattggtatctggtcagcagagaaaggcatccaggccccgccaggagagacggtgcctcgctctgttgcccagactggagtgcagtggtgtgatcataactcagtatagcctagaactcctgagctcaagcaatcctcccacctcagcctttcaagcagctaggagtacagttgggagccactgtacctggttactgtcacgggatcacctgcctttttggctgctgcacctgaacagagtcatcatgcctcgaggtcagaagagtaaactccgtgccagggaaaaacgccgtcaggcccgaggagggctggaagatttgatagatgctctggacattttagaagaggaggaagaatctcccccctctgcctctgcttgtttgaaggatgttttccagagttcacttgatggggcatccaacaatccccatggacttcgggaagcccaatccaccagcacatctgctacagctgcttcacacacaagacatcccgaaggagtcaacgaccaaatggaagaaaggccaatatgcacacaagatctagaagccactgatagctttcccagaggccctgtagatgagaaagtaattatattggtgcattacttgctgtacaagtaccaaatgaaagagcccattacaaaggcagatatgctgagaaatgtaacccaaatgtccaagagccagttccctgtaatcctgagcagagcttctgagcacctggagctgatctttggtcttgacctgaaggaagtggagcctaataagcacatctatgtccttgtcaacaaactagatctaggctgtgatgcaaagctgagtgatgaaacaggcgtgcccaagactggcctgctgatgactgtcctgggtattatcttcacaaatggcaattgtgtcgctgaggaggaagtctggaaagtgtttaacacgatggggttatatgacggaattgagcacttcatgtttggggagcccaggaagctccttaccaaagatttggtgaaagaaaattacctggagtaccagcaagtgcccaacagtgatcctccacgctatcaattcctatggggcccaagagcccatgctgaaaccagcaagatgaaagttcttgagtttttggccaaggtaaatgatacagctcccagtgaattctcaaactggtatacagaggctttacaagatgaggaagagagagccagagccagagttgcagccaaggctcgcgttagtgccacagccggtgcacgttccaaggttaagtccagcaagtcctcccaactgcagtaaagtctgagggagattcttcatttgtgtttgaaaagaaatgcacattctgagctgtgggaggtcagggtgggactggagacaacacagtgaataatatgtttgtgttaatgttctatgtgatggcttggaatttttgaagatgttgttcctttaatagatggttaaagtagcttcactatctaagtttatgaatgacattgctcaaatttttctgtatgtgagattaagagtaagcgatttattgctttataagtctaattgggaaactctccatttatttagtgatcgaaacacgatagcatggtagtaaattaggcatttcctaattcaatgtgaaataatttaggagtgtaataaatgggatcaagaaatagagcaaagagggtcgggtgcggtggctcacacctgtaatcctagcactttgggaggccgaggcaggcggatcatgaggtcaggagatcaagaccatcttggctaacacagtgaaaccccgtctctactaaaaatacaaaaaattagccaggcgtggtggcgggttcctgtagtcctagctgctcaggaggctgaggcaggagaatggcgtaaacccgggaggcggagcttgcagtgagccaagatcacacgactgcattctagcctgggtgacagagcgagactctgtctc

SEQ ID NO: 17624 - DNA, 1667 bp, Homo sapiens
  source 1..1667: mol_type = unassigned DNA
agtctgatataggcagtgtcgtgtcggcagaggaaggcatctcaggccctgcaggagtccaggcagtgattcttcattgcctgccctcctgtccacactcctgcctactgccacccacaagggtcatcatgtctcaggatcaggagagtccacgatgcacacatgatcagcaccttcagaccttcagtgagacccagagcctggaggttgcacaggtctccaaggctctggagaagaccctcctctcctcctcccatcctctagtgcctggcaaactgaaggaagctcctgctgctaaggcagagagtcctcttgaggttcctcagagtttctgctcctcttccattgccgtcacaaccacctcatcaagtgaatctgatgaggcttccagcaatcaagaagaggaagatagtccaagctcctcagaggatacatcagaccccaggaatgtgcccgcagatgctctcgaccagaaagtggcttttttggtgaatttcatgctgcacaagtgtcagatgaaaaagccaataacaaaggcagatatgttgaagattatcatcaaagatgatgagagccacttctctgagatcctcctgagagcttctgagcacctagagatgatatttggccttgatgtggtggaggtggaccccaccacccattgctatggcctcttcatcaaactgggcctcacctatgatgggatgctgagtggtgaaaagggtgtgcccaagactggcctcctgataattgtcctgggtgtgatcttcatgaagggcaaccgtgccactgaagaggaagtctgggaagtgctgaatttgacgggagtatattctgggaagaagcacttcatctttggagagcccagaatgctcatcaccaaagattttgtgaaggagaagtacctggagtaccagcaggtggccaacagtgatcctgcacgatatgaattcctgtggggcccaagagccaaagctgaaaccagcaagatgaaagtcctggagtttgtggccaaagttcatgggtcttacccacattctttcccatctcagtatgcggaagctctgaaagaggaagaagagagagctagagccagaatttgagtcagggctgactccatttccacagccactgtgagttccagtgctatgtctggtagcttctcccatacctagtgaagacaaggatagatgttttatgtaacatttgcagaaggcagttagtgttcaaggatgcaggtccagggtggggctggaggaaaaatagtatatatcatctatatccctattttgtatgtgtaacttgacagtttattcttttattttttaatggctatattattcagatgatgtttcttttaatagaagtttaggtagtttccagatctcttaagttttgaataatattggtcatccatttaatgtttttcatgaggtttagtggcatatgttttgctgattttgtaaaacagattgggaaaccatctatattgtgttctgatataggatgacatgacattactaagaactctgcttttaaatatccgtttaatgttttgcatgcagtttagtagcaaaggttttgttaattttgtaaaacagattagaaaaccatccatctatattgtgttctagtatagcatgacatgacattgctaagaactttgc

SEQ ID NO: 17625 - DNA, 1736 bp, Homo sapiens
  source 1..1736: mol_type = unassigned DNA
tgtgacgaccttatctgaggaaggtgcaccctagtcatcagaggaacgagtcgctgcaggcactgtcaggtgtcgaggtgactcaggaggatgaggtattcttgaaggtggagagtggcattagtatactggcagtgattcttcattgcctgccctcctgtccacactcctgcctactgccacccacaagggtcatcatgtctcaggatcaggagagtccacgatgcacacatgatcagcaccttcagaccttcagtgagacccagagcctggaggttgcacaggtctccaaggctctggagaagaccctcctctcctcctcccatcctctagtgcctggcaaactgaaggaagctcctgctgctaaggcagagagtcctcttgaggttcctcagagtttctgctcctcttccattgccgtcacaaccacctcatcaagtgaatctgatgaggcttccagcaatcaagaagaggaagatagtccaagctcctcagaggatacatcagaccccaggaatgtgcccgcagatgctctcgaccagaaagtggcttttttggtgaatttcatgctgcacaagtgtcagatgaaaaagccaataacaaaggcagatatgttgaagattatcatcaaagatgatgagagccacttctctgagatcctcctgagagcttctgagcacctagagatgatatttggccttgatgtggtggaggtggaccccaccacccattgctatggcctcttcatcaaactgggcctcacctatgatgggatgctgagtggtgaaaagggtgtgcccaagactggcctcctgataattgtcctgggtgtgatcttcatgaagggcaaccgtgccactgaagaggaagtctgggaagtgctgaatttgacgggagtatattctgggaagaagcacttcatctttggagagcccagaatgctcatcaccaaagattttgtgaaggagaagtacctggagtaccagcaggtggccaacagtgatcctgcacgatatgaattcctgtggggcccaagagccaaagctgaaaccagcaagatgaaagtcctggagtttgtggccaaagttcatgggtcttacccacattctttcccatctcagtatgcggaagctctgaaagaggaagaagagagagctagagccagaatttgagtcagggctgactccatttccacagccactgtgagttccagtgctatgtctggtagcttctcccatacctagtgaagacaaggatagatgttttatgtaacatttgcagaaggcagttagtgttcaaggatgcaggtccagggtggggctggaggaaaaatagtatatatcatctatatccctattttgtatgtgtaacttgacagtttattcttttattttttaatggctatattattcagatgatgtttcttttaatagaagtttaggtagtttccagatctcttaagttttgaataatattggtcatccatttaatgtttttcatgaggtttagtggcatatgttttgctgattttgtaaaacagattgggaaaccatctatattgtgttctgatataggatgacatgacattactaagaactctgcttttaaatatccgtttaatgttttgcatgcagtttagtagcaaaggttttgttaattttgtaaaacagattagaaaaccatccatctatattgtgttctagtatagcatgacatgacattgctaagaactttgc

SEQ ID NO: 17626 - DNA, 1682 bp, Homo sapiens
  source 1..1682: mol_type = unassigned DNA
tgtgacgaccttatctgaggaaggtgcaccctagtcatcagaggaacgagtcgctgcaggcactgtcaggtgtcgaggcagtgattcttcattgcctgccctcctgtccacactcctgcctactgccacccacaagggtcatcatgtctcaggatcaggagagtccacgatgcacacatgatcagcaccttcagaccttcagtgagacccagagcctggaggttgcacaggtctccaaggctctggagaagaccctcctctcctcctcccatcctctagtgcctggcaaactgaaggaagctcctgctgctaaggcagagagtcctcttgaggttcctcagagtttctgctcctcttccattgccgtcacaaccacctcatcaagtgaatctgatgaggcttccagcaatcaagaagaggaagatagtccaagctcctcagaggatacatcagaccccaggaatgtgcccgcagatgctctcgaccagaaagtggcttttttggtgaatttcatgctgcacaagtgtcagatgaaaaagccaataacaaaggcagatatgttgaagattatcatcaaagatgatgagagccacttctctgagatcctcctgagagcttctgagcacctagagatgatatttggccttgatgtggtggaggtggaccccaccacccattgctatggcctcttcatcaaactgggcctcacctatgatgggatgctgagtggtgaaaagggtgtgcccaagactggcctcctgataattgtcctgggtgtgatcttcatgaagggcaaccgtgccactgaagaggaagtctgggaagtgctgaatttgacgggagtatattctgggaagaagcacttcatctttggagagcccagaatgctcatcaccaaagattttgtgaaggagaagtacctggagtaccagcaggtggccaacagtgatcctgcacgatatgaattcctgtggggcccaagagccaaagctgaaaccagcaagatgaaagtcctggagtttgtggccaaagttcatgggtcttacccacattctttcccatctcagtatgcggaagctctgaaagaggaagaagagagagctagagccagaatttgagtcagggctgactccatttccacagccactgtgagttccagtgctatgtctggtagcttctcccatacctagtgaagacaaggatagatgttttatgtaacatttgcagaaggcagttagtgttcaaggatgcaggtccagggtggggctggaggaaaaatagtatatatcatctatatccctattttgtatgtgtaacttgacagtttattcttttattttttaatggctatattattcagatgatgtttcttttaatagaagtttaggtagtttccagatctcttaagttttgaataatattggtcatccatttaatgtttttcatgaggtttagtggcatatgttttgctgattttgtaaaacagattgggaaaccatctatattgtgttctgatataggatgacatgacattactaagaactctgcttttaaatatccgtttaatgttttgcatgcagtttagtagcaaaggttttgttaattttgtaaaacagattagaaaaccatccatctatattgtgttctagtatagcatgacatgacattgctaagaactttgc

SEQ ID NO: 17627 - DNA, 1818 bp, Homo sapiens
  source 1..1818: mol_type = unassigned DNA
tgtgacgaccttatctgaggaaggtgcaccctagtcatcagaggaacgagtcgctgcaggcactgtcaggtgtcgaggtaaaactctgagactgagggaaatagagcgccctgcagataagagccccaggccctgcagtcaactctgggaggccgtgggctggactttcaggctgaacccaccccacatttctccctcgggaatctgattaaggcagtgattcttcattgcctgccctcctgtccacactcctgcctactgccacccacaagggtcatcatgtctcaggatcaggagagtccacgatgcacacatgatcagcaccttcagaccttcagtgagacccagagcctggaggttgcacaggtctccaaggctctggagaagaccctcctctcctcctcccatcctctagtgcctggcaaactgaaggaagctcctgctgctaaggcagagagtcctcttgaggttcctcagagtttctgctcctcttccattgccgtcacaaccacctcatcaagtgaatctgatgaggcttccagcaatcaagaagaggaagatagtccaagctcctcagaggatacatcagaccccaggaatgtgcccgcagatgctctcgaccagaaagtggcttttttggtgaatttcatgctgcacaagtgtcagatgaaaaagccaataacaaaggcagatatgttgaagattatcatcaaagatgatgagagccacttctctgagatcctcctgagagcttctgagcacctagagatgatatttggccttgatgtggtggaggtggaccccaccacccattgctatggcctcttcatcaaactgggcctcacctatgatgggatgctgagtggtgaaaagggtgtgcccaagactggcctcctgataattgtcctgggtgtgatcttcatgaagggcaaccgtgccactgaagaggaagtctgggaagtgctgaatttgacgggagtatattctgggaagaagcacttcatctttggagagcccagaatgctcatcaccaaagattttgtgaaggagaagtacctggagtaccagcaggtggccaacagtgatcctgcacgatatgaattcctgtggggcccaagagccaaagctgaaaccagcaagatgaaagtcctggagtttgtggccaaagttcatgggtcttacccacattctttcccatctcagtatgcggaagctctgaaagaggaagaagagagagctagagccagaatttgagtcagggctgactccatttccacagccactgtgagttccagtgctatgtctggtagcttctcccatacctagtgaagacaaggatagatgttttatgtaacatttgcagaaggcagttagtgttcaaggatgcaggtccagggtggggctggaggaaaaatagtatatatcatctatatccctattttgtatgtgtaacttgacagtttattcttttattttttaatggctatattattcagatgatgtttcttttaatagaagtttaggtagtttccagatctcttaagttttgaataatattggtcatccatttaatgtttttcatgaggtttagtggcatatgttttgctgattttgtaaaacagattgggaaaccatctatattgtgttctgatataggatgacatgacattactaagaactctgcttttaaatatccgtttaatgttttgcatgcagtttagtagcaaaggttttgttaattttgtaaaacagattagaaaaccatccatctatattgtgttctagtatagcatgacatgacattgctaagaactttgc

SEQ ID NO: 17628 - DNA, 1734 bp, Homo sapiens
  source 1..1734: mol_type = unassigned DNA
tgtgacgaccttatctgaggaaggtgcaccctagtcatcagaggaacgagtcgctgcaggcactgtcaggtgtcgaggagtggcattagctatcagaagatggggactgaagcccaaccagtagtcaaagcagtgattcttcattgcctgccctcctgtccacactcctgcctactgccacccacaagggtcatcatgtctcaggatcaggagagtccacgatgcacacatgatcagcaccttcagaccttcagtgagacccagagcctggaggttgcacaggtctccaaggctctggagaagaccctcctctcctcctcccatcctctagtgcctggcaaactgaaggaagctcctgctgctaaggcagagagtcctcttgaggttcctcagagtttctgctcctcttccattgccgtcacaaccacctcatcaagtgaatctgatgaggcttccagcaatcaagaagaggaagatagtccaagctcctcagaggatacatcagaccccaggaatgtgcccgcagatgctctcgaccagaaagtggcttttttggtgaatttcatgctgcacaagtgtcagatgaaaaagccaataacaaaggcagatatgttgaagattatcatcaaagatgatgagagccacttctctgagatcctcctgagagcttctgagcacctagagatgatatttggccttgatgtggtggaggtggaccccaccacccattgctatggcctcttcatcaaactgggcctcacctatgatgggatgctgagtggtgaaaagggtgtgcccaagactggcctcctgataattgtcctgggtgtgatcttcatgaagggcaaccgtgccactgaagaggaagtctgggaagtgctgaatttgacgggagtatattctgggaagaagcacttcatctttggagagcccagaatgctcatcaccaaagattttgtgaaggagaagtacctggagtaccagcaggtggccaacagtgatcctgcacgatatgaattcctgtggggcccaagagccaaagctgaaaccagcaagatgaaagtcctggagtttgtggccaaagttcatgggtcttacccacattctttcccatctcagtatgcggaagctctgaaagaggaagaagagagagctagagccagaatttgagtcagggctgactccatttccacagccactgtgagttccagtgctatgtctggtagcttctcccatacctagtgaagacaaggatagatgttttatgtaacatttgcagaaggcagttagtgttcaaggatgcaggtccagggtggggctggaggaaaaatagtatatatcatctatatccctattttgtatgtgtaacttgacagtttattcttttattttttaatggctatattattcagatgatgtttcttttaatagaagtttaggtagtttccagatctcttaagttttgaataatattggtcatccatttaatgtttttcatgaggtttagtggcatatgttttgctgattttgtaaaacagattgggaaaccatctatattgtgttctgatataggatgacatgacattactaagaactctgcttttaaatatccgtttaatgttttgcatgcagtttagtagcaaaggttttgttaattttgtaaaacagattagaaaaccatccatctatattgtgttctagtatagcatgacatgacattgctaagaactttgc

SEQ ID NO: 17629 - DNA, 993 bp, Homo sapiens
  source 1..993: mol_type = unassigned DNA
atgcctcgcggtcaggcgagtaagcgccgtgcccgtgagaaacgccgccaggctcgaggtgaagaccaatgtctcgggggtgctcaagccaccgcagcagagaaggaaaagctgccatcctcctcctctcctgcatgccagagtcctccccagagcttccccaatgcaggcattcctcaggagtcccagagagccagctaccccagctctcctgcttcagctgtttcactcacaagttctgatgaaggtgccaagggccaaaagggggaaagtcccaactccttccatggcccgtcctcctctgagagcacaggaagagatcttctgaacacgaagacgggcgaattggtgcagttcctcctcaacaagtatataaggaaagagcccattacgagggaagccatgctgaaggttatcaacagaaagtacaagcagcacttccctgagatcctccggagaagcactgagaacgtagaggtggtctttggcctctacctgaaggaaatggaccccagccgtcagtcctatgtgcttgttggcaagctggactttcccaatcaaggaagcttgagcgatggcgggggctttcccctgagcgggctcctgatggttctcctgagcaccatcttcatgcatggcaaccgtgccactgaggaagagatgtgggaatgcctgaatgcattggggatgtataagggtaggaagcacttcatctatggggagccccaggagcttgtcaccaaagatttggtgcgagaggggtacctggagtaccagcaggtgcccagcagcgatcctccacgctacgagttcctgtggggtcccagggcccgtgctgaaaccagcaaaatgaaagtcctggagtttgtggccaagctcaatgataccgttgccagtacctacaagtcccggtatgaggaggctctgagagaggaggaagagcaagccagagccagagcggtagccagggatagcgccagggccagggctagc

SEQ ID NO: 17630 - DNA, 1379 bp, Homo sapiens
  source 1..1379: mol_type = unassigned DNA
ggaagtgaggatcttcgtctgagggacgccacctcaggctaccagaaccccaagactggttgggtatcaagggtgttgcctgtagtgagctgaggatggagtcccaggactggtcaagtagcaaggtgaagatcctgagccctcagtagacagggctgcacggagcgtttcagcagagggctttggttgcaagactggctgccccaggtcagcggagaaaggagtcccaggctctgtggggagtgaaggtgcccacctcctgcaccctcttgcctgctgcccctaagcacagtcatcatgcctcgcggtcaggcgagtaagcgccgtgcccgtgagaaacgccgccaggctcgaggtgaagaccaatgtctcgggggtgctcaagccaccgcagcagagaaggaaaagctgccatcctcctcctctcctgcatgccagagtcctccccagagcttccccaatgcaggcattcctcaggagtcccagagagccagctaccccagctctcctgcttcagctgtttcactcacaagttctgatgaaggtgccaagggccaaaagggggaaagtcccaactccttccatggcccgtcctcctctgagagcacaggaagagatcttctgaacacgaagacgggcgaattggtgcagttcctcctcaacaagtatataaggaaagagcccattacgagggaagccatgctgaaggttatcaacagaaagtacaagcagcacttccctgagatcctccggagaagcactgagaacgtagaggtggtctttggcctctacctgaaggaaatggaccccagccgtcagtcctatgtgcttgttggcaagctggactttcccaatcaaggaagcttgagcgatggcgggggctttcccctgagcgggctcctgatggttctcctgagcaccatcttcatgcatggcaaccgtgccactgaggaagagatgtgggaatgcctgaatgcattggggatgtataagggtaggaagcacttcatctatggggagccccaggagcttgtcaccaaagatttggtgcgagaggggtacctggagtaccagcaggtgcccagcagcgatcctccacgctacgagttcctgtggggtcccagggcccgtgctgaaaccagcaaaatgaaagtcctggagtttgtggccaagctcaatgataccgttgccagtacctacaagtcccggtatgaggaggctctgagagaggaggaagagcaagccagagccagagcggtagccagggatagcgccagggccagggctagcaggtcctttcagccctagtgaagtctcaggcaatcctcactaagagattgaaaagcctgtccaccatctcagtatttgggggtgaggtg

SEQ ID NO: 17631 - DNA, 1434 bp, Homo sapiens
  source 1..1434: mol_type = unassigned DNA
gatgctctaacgagggtagtgactctgtctaaaggcaaaagcacagttcagctgagggaggagaactggacactcattggagtcccggagaggacactgagtacactggagaggacttctatgcaaaaagggggcccgagcagagccccgccccgctttcagccctgggagacccagcagggacttgattggatgtggctcactccgacatccgcccgcctgggaagctgccggaagtgaggatcttcgtctgagggacgccacctcaggctaccagaaccccaagactggttgggtatcaaggtgcccacctcctgcaccctcttgcctgctgcccctaagcacagtcatcatgcctcgcggtcaggcgagtaagcgccgtgcccgtgagaaacgccgccaggctcgaggtgaagaccaatgtctcgggggtgctcaagccaccgcagcagagaaggaaaagctgccatcctcctcctctcctgcatgccagagtcctccccagagcttccccaatgcaggcattcctcaggagtcccagagagccagctaccccagctctcctgcttcagctgtttcactcacaagttctgatgaaggtgccaagggccaaaagggggaaagtcccaactccttccatggcccgtcctcctctgagagcacaggaagagatcttctgaacacgaagacgggcgaattggtgcagttcctcctcaacaagtatataaggaaagagcccattacgagggaagccatgctgaaggttatcaacagaaagtacaagcagcacttccctgagatcctccggagaagcactgagaacgtagaggtggtctttggcctctacctgaaggaaatggaccccagccgtcagtcctatgtgcttgttggcaagctggactttcccaatcaaggaagcttgagcgatggcgggggctttcccctgagcgggctcctgatggttctcctgagcaccatcttcatgcatggcaaccgtgccactgaggaagagatgtgggaatgcctgaatgcattggggatgtataagggtaggaagcacttcatctatggggagccccaggagcttgtcaccaaagatttggtgcgagaggggtacctggagtaccagcaggtgcccagcagcgatcctccacgctacgagttcctgtggggtcccagggcccgtgctgaaaccagcaaaatgaaagtcctggagtttgtggccaagctcaatgataccgttgccagtacctacaagtcccggtatgaggaggctctgagagaggaggaagagcaagccagagccagagcggtagccagggatagcgccagggccagggctagcaggtcctttcagccctagtgaagtctcaggcaatcctcactaagagattgaaaagcctgtccaccatctcagtatttgggggtgaggtg

SEQ ID NO: 17632 - DNA, 1610 bp, Homo sapiens
  source 1..1610: mol_type = unassigned DNA
ctgacttccgctttggaggcgaggacccgagcgagtgtagggggtgcggcgtctggtcagccaggggtgaattctcaggactggtcggcagtcaagccatcatgcctcgtggtcagaagagtaagctccgtgcccgtgagaaacgccgcaaggcccgagatgagacccggggtctcaatgttcctcaggtcactgaagcagaggaagaagaggccccctgctgttcctcttctgtttctgggggtgctgcttcaagctctcctgctgctggcattccccaggagcctcagagagccccaaccactgccgctgctgcggctgcgggtgtttcatccacaaaatctaaaaaaggtgccaagagccaccaaggtgagaaaaatgcaagttcctcccaggcctcaacatccactaagagcccaagcgaagatcctctaaccaggaagtcagggtcgttggtgcagttcctgttgtacaagtataaaataaaaaagtccgttacaaagggagaaatgctgaaaattgttggcaaaaggttcagggagcacttccctgagatcctcaagaaagcctctgagggcctcagtgttgtctttggccttgagctgaataaagtcaaccccaacggccacacttacaccttcatcgacaaggtagacctcactgatgaggaatccctgctcagttcctgggactttcccaggagaaagcttctgatgcctctcctgggtgtgatcttcttaaatggcaactcagctactgaggaagagatctgggaattcctgaatatgttgggagtctatgatggagaggagcactcagtctttggggaaccctggaagctcatcaccaaagatctggtgcaggaaaaatatctggagtacaagcaggtgcccagcagtgatcccccacgctttcaattcctgtggggtccgagagcctatgctgaaaccagcaagatgaaagtcctggagtttttggccaaggtaaatggtaccaccccctgtgccttcccaacccattacgaagaagctttgaaagatgaagagaaagccggagtctgagccagagttgtagccaggccttgcactactgccatagccaatcaatctcccaaagccaagtttacctgctgttctcacccccaatgaggtcttaggcagattctttactttgtaattcaaaaggcctgttaacctttgttcttgttatgcatgaataacttgttgactttttttttttctctttttcaactagtgtttcaacaggtttatttagattcagaatgtaaatttacaaatgatatagatcaccctgttattgctgtttttcagggacagtagaaagtgttttgttttttgagtgaaacaacttattaataaaaatccttaaatcacttttgtaatccaggacaagaaaatgtggcattagagtagaaatatctttggaaatgtgaaagaccccatagtgaaatatttgggatcagaagccagaggtgtaaaagtggtcaattcttggtttacttcatttaatctttcttttcataaagatacatacctggatttgtttatgttattcaagaatgtgtgagaaattaaaccatagttagttaa

SEQ ID NO: 17633 - DNA, 2303 bp, Homo sapiens
  source 1..2303: mol_type = unassigned DNA
ataacggggcaatctacccaaacctcttctcagcctagaatgccccaggcagtgcagtcagactgagcatcctctcttttacccttcagagttctcagtgaagtgagagttttgacctaaggtgacctcagttaactagagggaggatccagggtctggcagatatcagggaggaccttgaatgaagaacaggaggagccagaacagtgatgtcccatagaaacccgactccgctgtctgccctcacaggacccaaacatccctggcctaatgtggctcatcaaaacttcagcctagatctcggaggaccttgatctgagcaggattcatggcatggaatgtggagtcccaggactggccagcagcgaagtgaggttcttgagcagggctctggctcacgcttgtaatcccaacattttgggaggacgaagccagcctcatcgcttaagcacaggagttcgaggactgggaggtggaggttgtggcagggctgtggctcacgcttgtaatcccaacattttgggcggaggaagccagcctcatcgcttaagcacaggagttcgcggactgggaggcagggctctggctcacgcttgtaatcccaacattttgggaggacgaagccagcctcatcgcttaagcacaggagttcgaggactgggaggtggaggttgtggtgcctgtatcacctgcccttctgctgacactcctgcctgctgttcctgactacagccatcatgcctcggggtcagaagagtacgctccatgcacgtgagaaacgccagcagacccggggtcagacccaggatcaccagggtgctcagatcactgcaactaacaagaaaaaagtatccttttcatcccctcttattttgggggctactatccagaaaaagtctgctggtaggtcacgtagtgctctcaagaagcctcagagagcactatccaccactacatctgtagatgtttcttacaaaaagtcatacaagggagccaacagcaaaattgagaaaaagcaaagcttctctcagggtctatcctccactgtgcagtctcgcacagaccctctaatcatgaagacaaatatgttggtgcagttcctgatggaaatgtacaagatgaaaaagcccattatgaaagcagatatgctaaaaattgtccaaaaaagccataagaattgcttccctgagatccttaaaaaagcttctttcaacatggaggtggtatttggtgttgatttaaagaaagttgattctaccaaggactcctatgtccttgtcagcaaaatggatctccccaacaatgggacagtgactcgtgggaggggatttcccaagacaggtctcctgctgaatctcctgggcgtgatcttcatgaagggcaactgtgccactgaggagaagatctgggaattcctgaataagatgagaatatatgatgggaagaaacacttcatatttggggagcccagaaagctcatcacccaagatttggtgaagcttaaatacctggagtaccgacaagtgcccaacagtaatcctgcacgctatgaattcctgtggggtccaagagcccatgctgaaaccagcaagatgaaggtcctggagttttgggccaaggtcaataaaactgtccccagtgcgttccagttctggtatgaagaggctttgagagatgaggaagaaagagtccaagctgcagctatgctcaatgatggcagtagtgccatgggcagaaagtgttccaaggccaaggctagcagctcttcccacgcctagtgaagttgaagcaaattttgcattttgtggttaaagagggcagtcactgttccaaggagtgaaggactgggtgttactggagggaacacactgtataataccttttgtttctgttctaaatggataatttgaagttttatctgtattttggggcatatttttcaaatgttccttttatttaacattgtaatctaagtttaggattgatactggtcacatttgttgtttaagagtaaaaattttgctgttttgtaaaacagattgagaaaaattcgatcttatttagtgatctgttgcaagataacttggaattagaataagcatttccttgaaaatgtttaaaaaaaaaaagtcagcagtaaaatgtatggcattaagaaatagagaaagagtgtaagatggtcaatatttggtttcctaaatgcttttactctgtgctttaagaaaatgaaagataaataaccatatatgtctggcttacttaagaatgtagaattaaatcataataaattagacctcatgctg

SEQ ID NO: 17634 - DNA, 2302 bp, Homo sapiens
  source 1..2302: mol_type = unassigned DNA
ataacggggcaatctacccaaacctcttctcagcctagaatgccccaggcagtgcagtcagactgagcatcctctcttttacccttcagagttctcagtgaagtgagagttttgacctaaggtgacctcagttaactagagggaggatccagggtctggcagatatcagggaggaccttgaatgaagaacaggaggagccagaacagtgatgtcccatagaaacccgactccgctgtctgccctcacaggacccaaacatccctggcctaatgtggctcatcaaaacttcagcctagatctcggaggaccttgatctgagcaggattcatggcatggaatgtggagtcccaggactggccagcagcgaagtgaggttcttgacagggctctggctcacgcttgtaatcccaacattttgggaggacgaagccagcctcatcgcttaagcacaggagttcgaggactgggaggtggaggttgtggcagggctgtggctcacgcttgtaatcccaacattttgggcggaggaagccagcctcatcgcttaagcacaggagttcgcggactgggaggcagggctctggctcacgcttgtaatcccaacattttgggaggacgaagccagcctcatcgcttaagcacaggagttcgaggactgggaggtggaggttgtggtgcctgtatcacctgcccttctgctgacactcctgcctgctgttcctgactacagccatcatgcctcggggtcagaagagtacgctccatgcacgtgagaaacgccagcagacccggggtcagacccaggatcaccagggtgctcagatcactgcaactaacaagaaaaaagtatccttttcatcccctcttattttgggggctactatccagaaaaagtctgctggtaggtcacgtagtgctctcaagaagcctcagagagcactatccaccactacatctgtagatgtttcttacaaaaagtcatacaagggagccaacagcaaaattgagaaaaagcaaagcttctctcagggtctatcctccactgtgcagtctcgcacagaccctctaatcatgaagacaaatatgttggtgcagttcctgatggaaatgtacaagatgaaaaagcccattatgaaagcagatatgctaaaaattgtccaaaaaagccataagaattgcttccctgagatccttaaaaaagcttctttcaacatggaggtggtatttggtgttgatttaaagaaagttgattctaccaaggactcctatgtccttgtcagcaaaatggatctccccaacaatgggacagtgactcgtgggaggggatttcccaagacaggtctcctgctgaatctcctgggcgtgatcttcatgaagggcaactgtgccactgaggagaagatctgggaattcctgaataagatgagaatatatgatgggaagaaacacttcatatttggggagcccagaaagctcatcacccaagatttggtgaagcttaaatacctggagtaccgacaagtgcccaacagtaatcctgcacgctatgaattcctgtggggtccaagagcccatgctgaaaccagcaagatgaaggtcctggagttttgggccaaggtcaataaaactgtccccagtgcgttccagttctggtatgaagaggctttgagagatgaggaagaaagagtccaagctgcagctatgctcaatgatggcagtagtgccatgggcagaaagtgttccaaggccaaggctagcagctcttcccacgcctagtgaagttgaagcaaattttgcattttgtggttaaagagggcagtcactgttccaaggagtgaaggactgggtgttactggagggaacacactgtataataccttttgtttctgttctaaatggataatttgaagttttatctgtattttggggcatatttttcaaatgttccttttatttaacattgtaatctaagtttaggattgatactggtcacatttgttgtttaagagtaaaaattttgctgttttgtaaaacagattgagaaaaattcgatcttatttagtgatctgttgcaagataacttggaattagaataagcatttccttgaaaatgtttaaaaaaaaaaagtcagcagtaaaatgtatggcattaagaaatagagaaagagtgtaagatggtcaatatttggtttcctaaatgcttttactctgtgctttaagaaaatgaaagataaataaccatatatgtctggcttacttaagaatgtagaattaaatcataataaattagacctcatgctg

SEQ ID NO: 17635 - DNA, 2237 bp, Homo sapiens
  source 1..2237: mol_type = unassigned DNA
agaatgactaagaacaatagcccagtgaatacttagagcagtgttctcaaggaatcctgcagaggcggcttctgaaaagccaaggtagtatctgcctgctgaaggtgttctcaggatttcatttgctcttctccaggaaccacatcacctgcccttctgcctacactcctgcctgctgtgcctaaccacagccatcatgcctcggggtcagaagagtaagctccgtgcccgtgagaaacgccagcggacccgtggtcagacccaggatctcaaggttggtcagcctactgcagcagagaaagaagagtctccttcctcttcctcatctgttttgagggatactgcctccagctcccttgcttttggcattccccaggagcctcagagagagccacccaccacctctgctgctgcagctatgtcatgcactggatctgataaaggcgacgagagccaagatgaggaaaatgcaagttcctcccaggcctcaacatccactgagagatcactcaaagattctctaaccaggaagacgaagatgttagtgcagttcctgctgtacaagtataaaatgaaagagcccactacaaaggcagaaatgctgaagatcatcagcaaaaagtacaaggagcacttccctgagatcttcaggaaagtctctcagcgcacggagctggtctttggccttgccttgaaggaggtcaaccccaccactcactcctacatcctcgtcagcatgctaggccccaacgatggaaaccagagcagtgcctggacccttccaaggaatgggcttctgatgcctctactgagtgtgatcttcttaaatggcaactgtgcccgtgaagaggaaatctgggaattcctgaatatgctggggatctatgatggaaagaggcaccttatctttggggaaccccgaaagctcatcacccaagatctggtacaggaaaaatatctggaataccagcaggtgcccaacagtgatcccccacgctatcaattcctgtggggtccaagagctcatgcagaaaccagcaagatgaaagtcctggagtttttggccaaggtgaatgacaccacccccaataacttcccactgctttatgaagaggctttgagagatgaagaagagagagctggagcccggcccagagttgcagccaggcgtggcactacagccatgactagtgcgtattccagggccacatccagtagctcttcccaacccatgtgagatctaaggcaaattgttcactttgtggttgaaagacctgctgctttctctgttcctgtgatgcatgaataactcattgatttatctctttgttgtattttccatgatgtttcttaaaatagaaagtttatttagattcagaatataaatttagaaatggcatgcatcacacatttattgctgtttatcaggttggtttagtgataataattttgtttttgaaatacaaatagaaaatcctgaaataatttttgtgatacagagcaaaataacacggcatgggagtaaggttatccttagaaatttaaaataactccacagtaaaataggtagaatctgaagatagaaagggaagaaaagtaaaagttgctttattcgtggtttgtcttactcagttcagtctttttttgctcataaatttaaaagttacatacctggtttgcttagattattcaagaatgtggaggcctgggccaaggtcaatgacagtgtctccattgtcttccctccattaagagaagactttaagagatgagggagagagagccagagacagtgttgcaactgggcctggcatgtttcagtgtggtgtccagcagtgtctcccactccttgtgaagtctgaggtatattctttacttttgattaagaaaacacttaaccttctaattaatggagagccaaaggggagttggtgggaacaccatgtataacatatttgtatgtaaaatgatttatcttttctttttcctgtttttcagtgttctttttttaaattgtagatttatttagtttcagaatctaagtttatgaatggcatgaatcactcatttattaaaatatatcaggttggagagtgagaatttttgcattatgtaaaacaatttaaaaatcttttaagtctttttctgtgatctagaacaagataatatggcattggaatatggaatttgtgaaaaggaaattaccttgcaataaagttggtgggaccaggaagtag

SEQ ID NO: 17636 - DNA, 969 bp, Homo sapiens
  source 1..969: mol_type = unassigned DNA
atgacttctgcaggtgtttttaatgcaggatctgacgaaagggctaacagtagagatgaggagtacccatgttcctcagaggtctcaccctccactgagagttcatgcagcaatttcataaatattaaggtgggtttgttggagcagttcctgctctacaagttcaaaatgaaacagcgtattttgaaggaagatatgctgaagattgtcaacccaagataccaaaaccagtttgctgagattcacagaagagcttctgagcacattgaggttgtctttgcagttgacttgaaggaagtcaacccaacttgtcacttatatgaccttgtcagcaagctgaaactccccaacaatgggaggattcatgttggcaaagtgttacccaagactggtctcctcatgactttcctggttgtgatcttcctgaaaggcaactgtgccaacaaggaagatacctggaaatttctggatatgatgcaaatatatgatgggaagaagtactacatctatggagagcccaggaagctcatcactcaggatttcgtgaggctaacgtacctggagtaccaccaggtgccctgcagttatcctgcacactatcaattcctttggggtccaagagcctatactgaaaccagcaagatgaaagtcctggaatatttggccaaggtcaatgatattgctccaggtgccttctcatcacaatatgaagaggctttgcaagatgaggaagagagcccaagccagagatgcagccgaaactggcactactgcagtggccaagactgtctcagggcgaagttcagcagcttctctcaaccctattgaagtctgaagcttttttcatccagtcaagcaaatataacatcaccaaaagggattttttttggaaatacaaaagaacccccagtaaaataattgagataatgaaatagaaaaaaataataaaacatgatcttggttttcttc

SEQ ID NO: 17637 - DNA, 1949 bp, Homo sapiens
  source 1..1949: mol_type = unassigned DNA
aataaaggggtctgagccggtcgcctgagcctgaaaagtgctgtcacgtcagcggaaggaggcgtcccagatcttctcagctgtcttggtgccagccttcctagtcttcctacccacactcctacctgctgtcacaggccacagccatcatgcctcggggtcacaagagtaagctccgtacctgtgagaaacgccaagagaccaatggtcagccacagggtctcacgggtccccaggccactgcagagaagcaggaagagtcccactcttcctcatcctcttctcgcgcttgtctgggtgattgtcgtaggtcttctgatgcctccattcctcaggagtctcagggagtgtcacccactgggtctcctgatgcagttgtttcatattcaaaatccgatgtggctgccaacggccaagatgagaaaagtccaagcacctcccgtgatgcctccgttcctcaggagtctcagggagcttcacccactggctctcctgatgcaggtgtttcaggctcaaaatatgatgtggctgccaacggccaagatgagaaaagtccaagcacttcccatgatgtctccgttcctcaggagtctcagggagcttcacccactggctcgcctgatgcaggtgtttcaggctcaaaatatgatgtggctgccgagggtgaagatgaggaaagtgtaagcgcctcacagaaagccatcatttttaagcgcttaagcaaagatgctgtaaagaagaaggcgtgcacgttggcgcaattcctgcagaagaagtttgagaagaaagagtccattttgaaggcagacatgctgaagtgtgtccgcagagagtacaagccctacttccctcagatcctcaacagaacctcccaacatttggtggtggcctttggcgttgaattgaaagaaatggattccagcggcgagtcctacacccttgtcagcaagctaggcctccccagtgaaggaattctgagtggtgataatgcgctgccgaagtcgggtctcctgatgtcgctcctggttgtgatcttcatgaacggcaactgtgccactgaagaggaggtctgggagttcctgggtctgttggggatatatgatgggatcctgcattcaatctatggggatgctcggaagatcattactgaagatttggtgcaagataagtacgtggtttaccggcaggtgtgcaacagtgatcctccatgctatgagttcctgtggggtccacgagcctatgctgaaaccaccaagatgagagtcctgcgtgttttggccgacagcagtaacaccagtcccggtttatacccacatctgtatgaagacgctttgatagatgaggtagagagagcattgagactgagagcttaaggcagggctggcactatttccttggccagggtaccttatggggccatatcctacagatcctcccatttctagggaggtctgaagtagaattttcactttatgttagaagagagtagtgagctttctaagtagtgcagtatagtagaggctggagggaacaagatatgtatctttcttttgttacacatgagtaacttgcagatttatgttttatctctgtcagttatcaacattgttcctgttaagtgaaggtttattttgcttcagattatacaattatcaataacatagctctcacattcatggctgtttaaccaatctgaaagttacggtttgggaattaataaaacaaagtcatacaacacattttctttgtaattgagaactagataacatggtaacagagaattgattttcatatgaatcttaactccacagtaaaatagttgacatcataatatgaagagaaagaaaaggaaaaacagaaatgtaaaagttgtttaattcttggtttgcctaattcgttttcctatttcttttcatacaaataaaggatacctggatttatttaggtta

SEQ ID NO: 17638 - DNA, 4270 bp, Homo sapiens
  source 1..4270: mol_type = unassigned DNA
gtctgaaggacctgaggcattttgtgacgaggatcgtctcaggtcagcggagggaggagacttatagacctatccagtcttcaaggtgctccagaaagcaggagttgaagacctgggtgtgagggacacatacatcctaaaagcaccacagcagaggaggcccaggcagtgccaggagtcaaggttcccagaagacaaaccccctaggaagacaggcgacctgtgaggccctagagcaccaccttaagagaagaagagctgtaagccggcctttgtcagagccatcatgggggacaaggatatgcctactgctgggatgccgagtcttctccagagttcctctgagagtcctcagagttgtcctgagggggaggactcccagtctcctctccagattccccagagttctcctgagagcgacgacaccctgtatcctctccagagtcctcagagtcgttctgagggggaggactcctcggatcctctccagagacctcctgaggggaaggactcccagtctcctctccagattccccagagttctcctgagggcgacgacacccagtctcctctccagaattctcagagttctcctgaggggaaggactccctgtctcctctagagatttctcagagccctcctgagggtgaggatgtccagtctcctctgcagaatcctgcgagttccttcttctcctctgctttattgagtattttccagagttcccctgagagtactcaaagtccttttgagggttttccccagtctgttctccagattcctgtgagcgccgcctcctcctccactttagtgagtattttccagagttcccctgagagtactcaaagtccttttgagggttttccccagtctccactccagattcctgtgagccgctccttctcctccactttattgagtattttccagagttcccctgagagaactcagagtacttttgagggttttgcccagtctcctctccagattcctgtgagcccctcctcctcctccactttactgagtcttttccagagtttctctgagagaactcagagtacttttgagggttttgcccagtcttctctccagattcctgtgagcccctccttctcctccactttagtgagtcttttccagagttcccctgagagaactcagagtacttttgagggttttccccagtctcctctccagattcctgtgagctcctcctcctcctccactttattgagtcttttccagagttcccctgagagaactcacagtacttttgagggttttccccagtctcttctccagattcctatgacctcctccttctcctctactttattgagtattttccagagttctcctgagagtgctcaaagtacttttgagggttttccccagtctcctctccagattcctgggagcccctccttctcctccactttactgagtcttttccagagttcccctgagagaactcacagtacttttgagggttttccccagtctcctctccagattcctatgacctcctccttctcctctactttattgagtattttacagagttctcctgagagtgctcaaagtgcttttgagggttttccccagtctcctctccagattcctgtgagctcctctttctcctacactttattgagtcttttccagagttcccctgagagaactcacagtacttttgagggttttccccagtctcctctccagattcctgtgagctcctcctcctcctcctccactttattgagtcttttccagagttcccctgagtgtactcaaagtacttttgagggttttccccagtctcctctccagattcctcagagtcctcctgaaggggagaatacccattctcctctccagattgttccaagtcttcctgagtgggaggactccctgtctcctcactactttcctcagagccctcctcagggggaggactccctatctcctcactactttcctcagagccctcctcagggggaggactccctgtctcctcactactttcctcagagccctcagggggaggactccctgtctcctcactactttcctcagagccctcctcagggggaggactccatgtctcctctctactttcctcagagtcctcttcagggggaggaattccagtcttctctccagagccctgtgagcatctgctcctcctccactccatccagtcttccccagagtttccctgagagttctcagagtcctcctgaggggcctgtccagtctcctctccatagtcctcagagccctcctgaggggatgcactcccaatctcctctccagagtcctgagagtgctcctgagggggaggattccctgtctcctctccaaattcctcagagtcctcttgagggagaggactccctgtcttctctccattttcctcagagtcctcctgagtgggaggactccctctctcctctccactttcctcagtttcctcctcagggggaggacttccagtcttctctccagagtcctgtgagtatctgctcctcctccacttctttgagtcttccccagagtttccctgagagtcctcagagtcctcctgaggggcctgctcagtctcctctccagagacctgtcagctccttcttctcctacactttagcgagtcttctccaaagttcccatgagagtcctcagagtcctcctgaggggcctgcccagtctcctctccagagtcctgtgagctccttcccctcctccacttcatcgagtctttcccagagttctcctgtgagctccttcccctcctccacttcatcgagtctttccaagagttcccctgagagtcctctccagagtcctgtgatctccttctcctcctccacttcattgagcccattcagtgaagagtccagcagcccagtagatgaatatacaagttcctcagacaccttgctagagagtgattccttgacagacagcgagtccttgatagagagcgagcccttgttcacttatacactggatgaaaaggtggacgagttggcgcggtttcttctcctcaaatatcaagtgaagcagcctatcacaaaggcagagatgctgacgaatgtcatcagcaggtacacgggctactttcctgtgatcttcaggaaagcccgtgagttcatagagatactttttggcatttccctgagagaagtggaccctgatgactcctatgtctttgtaaacacattagacctcacctctgaggggtgtctgagtgatgagcagggcatgtcccagaaccgcctcctgattcttattctgagtatcatcttcataaagggcacctatgcctctgaggaggtcatctgggatgtgctgagtggaataggggtgcgtgctgggagggagcactttgcctttggggagcccagggagctcctcactaaagtttgggtgcaggaacattacctagagtaccgggaggtgcccaactcttctcctcctcgttacgaattcctgtggggtccaagagctcattcagaagtcattaagaggaaagtagtagagtttttggccatgctaaagaataccgtccctattacctttccatcctcttacaaggatgctttgaaagatgtggaagagagagcccaggccataattgacaccacagatgattcgactgccacagaaagtgcaagctccagtgtcatgtcccccagcttctcttctgagtgaagtctagggcagattcttccctctgagtttgaagggggcagtcgagtttctacgtggtggagggcctggttgaggctggagagaacacagtgctatttgcatttctgttccatatgggtagttatggggtttacctgttttacttttgggtatttttcaaatgcttttcctattaataacaggtttaaatagcttcagaatcctagtttatgcacatgagtcgcacatgtattgctgtttttctggtttaagagtaacagtttgatattttgtaaaaacaaaaacacacccaaacacaccacattgggaaaaccttctgcctcattttgtgatgtgtcacaggttaatgtggtgttactgtaggaattttcttgaaactgtgaaggaactctgcagttaaatagtggaataaagtaaaggattgttaatgtttgcatttcctcaggtcctttagtctgttgttcttgaaaactaaagatacatacctggtttgcttggcttacgtaagaaagtagaagaaagtaaactgtaataaataaaagtgtcagtgactca

SEQ ID NO: 17639 - DNA, 351 bp, Homo sapiens
  source 1..351: mol_type = unassigned DNA
ggggacaaggatatgcctactgctgggatgccgagtcttctccagagttcctctgagagtcctcagagttgtcctgagggggaggactcccaatctcctctccagattcctgtgagcccctcctcctcctccactttactgagtcttttccagagtttctctgagagaactcagagtacttttgagggttttgcccagtcttctctccagattcctgtgagcccctccttctcctccactttagtgagtcttttccagagttcccctgagagaactcagagtacttttgagggttttccccagtctcctctccagattcctgtgagctcctcctcctcctccactttattg

SEQ ID NO: 17640 - DNA, 613 bp, Homo sapiens
  source 1..613: mol_type = unassigned DNA
gaggatcgtctcaggtcagcggagggaggagacttatagacctatccagtcttcaaggtgctccagaaagcaggagttgaagacctgggtgtgagggacacatacatcctaaaagcaccacagcagaggaggcccaggcagtgccaggagtcaaggttcccagaagacaaaccccctaggaagacaggcgacctgtgaggccctagagcaccaccttaagagaagaagagctgtaagccggcctttgtcagagccatcatgggggacaaggatatgcctactgctgggatgccgagtcttctccagagttcctctgagagtcctcagagttgtcctgagggggaggactcccagtctcctctccagattcctgtgagcccctcctcctcctccactttactgagtcttttccagagtttctctgagagaactcagagtacttttgagggttttgcccagtcttctctccagattcctgtgagcccctccttctcctccactttagtgagtcttttccagagttcccctgagagaactcagagtacttttgagggttttccccagtctcctctccagattcctgtgagctcctcctcctcctccactttattga

SEQ ID NO: 17641 - DNA, 1084 bp, Homo sapiens
  source 1..1084: mol_type = unassigned DNA
gccaggagtcaaggttcccagaagacaaaccccctaggaagacaggcgacctgtgaggccctagagcaccaccttaagagaagaagagctgtaagccggcctttgtcagagccatcatgggggacaaggatatgcctactgctgggatgccgagtcttctccagagttcctctgagagtcctcagagttgtcctgagggggaggactcccagtctcctctccagattccccagagttctcctgagagcgacgacacccttccttgatagagagcgagcccttgttcacttatacactggatgaaaaggtggacgagttggcgcggtttcttctcctcaaatatcaagtgaagcagcctatcacaaaggcagagatgctgacgaatgtcatcagcaggtacacgggctactttcctgtgatcttcaggaaagcccgtgagttcatagagatactttttggcatttccctgagagaagtggaccctgatgactcctatgtctttgtaaacacattagacctcacctctgaggggtgtctgagtgatgagcagggcatgtcccagaaccgcctcctgattcttattctgagtatcatcttcataaagggcacctatgcctctgaggaggtcatctgggatgtgctgagtggaataggggtgcgtgctgggagggagcactttgcctttggggagcccagggagctcctcactaaagtttgggtgcaggaacattacctagagtaccgggaggtgcccaactcttctcctcctcgttacgaattcctgtggggtccaagagctcattcagaagtcattaagaggaaagtagtagagtttttggccatgctaaagaataccgtccctattacctttccatcctcttacaaggatgctttgaaagatgtggaagagagagcccaggccataattgacaccacagatgattcgactgccacagaaagtgcaagctccagtgtcatgtcccccagcttctcttctgagtgaagtctagggcagattcttccctctgagtttgaagggggcagtcgagtttctacgtggtggagggcctggttgaggctggag

SEQ ID NO: 17642 - DNA, 1991 bp, Homo sapiens
  source 1..1991: mol_type = unassigned DNA
gctttcccgacggccatcttgggaatctgacggatcgaaggcatttgtgaggaggcgcgaatcaagttagcggggggaagagtcttagacctggccagtcctcagggtgagggccctgaggaagaactgagggacctcccaccatagagagaagaaaccccggcctgtactgcgctgccgtgagactggtgctccaggaaccaggtggtgacgaactgggtgtgaggcacacagcctaaagtcagcacagcagaggaggcccaggcagtgccaggagtcaaggcctgttggatctcatcatccatatccctgttgatacgtttacctgctgctcctgaagaagtcgtcatgcctcccgttccaggcgttccattccgcaacgttgacaacgactccccgacctcagttgagttagaagactgggtagatgcacagcatcccacagatgaggaagaggaggaagcctcctccgcctcttccactttgtacttagtattttccccctcttctttctccacatcctcttctctgattcttggtggtcctgaggaggaggaggtgccctctggtgtgataccaaatcttaccgagagcattcccagtagtcctccacagggtcctccacagggtccttcccagagtcctctgagctcctgctgctcctctttttcatggagctcattcagtgaggagtccagcagccagaaaggggaggatacaggcacctgtcagggcctgccagacagtgagtcctctttcacatatacactagatgaaaaggtggccgagttagtggagttcctgctcctcaaatacgaagcagaggagcctgtaacagaggcagagatgctgatgattgtcatcaagtacaaagattactttcctgtgatactcaagagagcccgtgagttcatggagcttctttttggccttgccctgatagaagtgggccctgaccacttctgtgtgtttgcaaacacagtaggcctcaccgatgagggtagtgatgatgagggcatgcccgagaacagcctcctgattattattctgagtgtgatcttcataaagggcaactgtgcctctgaggaggtcatctgggaagtgctgaatgcagtaggggtatatgctgggagggagcacttcgtctatggggagcctagggagctcctcactaaagtttgggtgcagggacattacctggagtatcgggaggtgccccacagttctcctccatattatgaattcctgtggggtccgagagcccattcagaaagcatcaagaagaaagtactagagtttttagccaagctgaacaacactgttcctagttcctttccatcctggtacaaggatgctttgaaagatgtggaagagagagtccaggccacaattgataccgcagatgatgccactgtcatggccagtgaaagcctcagtgtcatgtccagcaacgtctccttttctgagtgaagtctaggatagtttcttccccttgtgtttgaacagggcagtttaggttctaggtagtggagggccaggtggggctcgaggaacgtagtgttctttgcatttctgtcccatatgggtgatgtagagatttacctgtttttcagtattttctaaatgcttttcctttgaatagcaggtagttagcttcagagtgttaatttatgaatattagtcgcacatgtattgctctttatctggtttaagagtaacagtttgatattttgttaaaaaaatggaaataccttctcccttattttgtgatctgtaacagggtagtgtggtattgtaataggcatttttttttttttttacaatgtgcaataactcagcagttaaatagtggaacaaaattgaagggtggtcagtagtttcatttccttgtcctgcttattcttttgttcttgaaaattatatatacctggctttgcttagcttgttgaagaaagtagcagaaattaaatcttaataaaagaaagccccac

SEQ ID NO: 17643 - DNA, 1932 bp, Homo sapiens
  source 1..1932: mol_type = unassigned DNA
atgctgctgccctgccactgggtgttggatgccaccttcagtgatggcagtctaggccagtgggtgaaaaacacatgtgccacatatgccttatccccagtggtgctcccacctcagccccagccccggaaaaaggccacagataaggactattctgcctttcatcttgggcatctgagggaggtgaggctttttctgaggggtggaacttcagatcagcgaatggatagtcttgtcctctgccccacatacttcaagctctggaggaccctatcagggtccccaggtttacaactttctgacttgcattttgggagtcagccggaggggaagttttctctgaggagggcagtttcagttaagcagagggaggaaccccaggactggccactcaacgagaagagaactctgtggaaggacagtgaccttccaacatggaggagaggcacaggctacaccctttcccttcctgccgtcagccctggaaaaaggttgtggggggagaaagcggggagcttgccagagagcgagcccttgttcacttatacactggatgaaaaggtggacaagttggtgcagtttcttctcctcaaatatcaagcaaaagagcctctcacaagagcagagatgcagatgaatgtcatcaacacatacacgggctactttcctatgatcttcaggaaagcccgtgagttcatagagattctttttggcatttccctgacagaagtggaccccgaccatttctatgtctttgtaaacacattagacctcacctgtgaggggagtctgagtgatgagcagggcatgccccagaaccgcctcctgattcttattctgagtgtgatcttcataaagggcaactgtgcatctgaggaggtcatctgggaagtgctgaatgcaatagggccctggtcagccttggcagggttcgcggatgtgctttcccgacttgcactgtgggagtctgaaggacctgaagcattttgcgaggagtctggactcaggtcagcagagggaagcgtcttagacctggccaatcctcaaggacttgcaggccacagacaggaagatggccgccgagggctgaccgaggcgtccccacaacagaagaagggaggagaagatgaggatatgcctgctgctgggatgccacctcttccccagagtcctcctgagattcctccccagggtcctcccaagatctctccccagggtcctccgcagagtcctccccagagtcctctagactcctgctcatcccctcttttgtggacccgattggatgaggagtccagcagtgaagaggaggatacagctacttggcatgccttgccagaaagtgaatccttgcccaggtatgccctggatgaaaaggtggctgagttggtgcagtttcttctcctcaaatatcaaacaaaagagcctgtcacaaaggcagagatgctgacgactgtcatcaagaagtataaggactattttcccatgatcttcgggaaagcccatgagttcatagagctaatttttggcattgccctgactgatatggaccccgacaaccactcctatttctttgaagacacattagacctcacctatgagggaagcctgattgatgaccagggcatgcccaagaactgtctcctgattcttattctcagtatgatcttcataaagggcagctgtgtccccgaggaggtcatctgggaagtgttgagtgcaatagggcccattcagaggccagcaagagaagtcttagagtttttatccaagctatccagtatcatccctagtgcctttccatcctggtacatggatgctttgaaagatatggaagacagagcccaggccataattgacaccacagatgatgctactgccatggccagtgcaagccccagtgtcatgtccaccaacttctgtcctgagtga

SEQ ID NO: 17644 - DNA, 1100 bp, Homo sapiens
  source 1..1100: mol_type = unassigned DNA
gtcagcacagcagaggaggcccaggcaatatcaggagtcaaggttctgagggagcaaacctcttaggaagacaggcgacctgtgaggccctagagcaccaccttaagagaagaagagctgtaagccagcctttgtcagaaccatcatagaagatgaggatatgcctgctgctgggatgccacctcttccccagagtcctcctgagattcctccccagggtcctcccaagatctctccccagggtcctccgcagagtcctccccagagtcctctagactcctgctcatcccctcttttgtggacccgattggatgaggagtccagcagtgaagaggaggatacagctacttggcatgccttgccagaaagtgaatccttgcccaggtatgccctggatgaaaaggtggctgagttggtgcagtttcttctcctcaaatatcaaacaaaagagcctgtcacaaaggcagagatgctgacgactgtcatcaagaagtataaggactattttcccatgatcttcgggaaagcccatgagttcatagagctaatttttggcattgccctgactgatatggaccccgacaaccactcctatttctttgaagacacattagacctcacctatgagggaagcctgattgatgaccagggcatgcccaagaactgtctcctgattcttattctcagtatgatcttcataaagggcagctgtgtccccgaggaggtcatctgggaagtgttgagtgcaataggggtgtgtgctgggagggagcactttatatatggggatcccagaaagctgctcactatacattgggtgcagagaaagtacctggagtaccgggaggtgcccaacagtgctcctccacgttatgaatttttgtggggtccaagagcccattcagaggccagcaagagaagtcttagagtttttatccaagctatccagtatcatccctagtgcctttccatcctggtacatggatgctttgaaagatatggaagacagagcccaggccataattgacaccacagatgatgctactgccatggccagtgcaagccccagtgtcatgtccaccaacttctgtcctgagtga

SEQ ID NO: 17645 - DNA, 966 bp, Homo sapiens
  source 1..966: mol_type = unassigned DNA
ttaaattctgatgggaccatgcagtccagaactgtggggctctgggagtctggtcagccccagctgtcagccttgggaggcccaagactctgcttgcagtctttagcctgaggggctccctcacttcctcttgcaggtgctccaggaaccaggagttgaagacctgggtctgaggcacacttcctaaagtcagcacagcagaggaggcccaggcaatatcaggagtcaaggttcccaggggacaaaccccctaggatggcaggtgacccgtgaggccctagagcaccaccttaagagaagaagagctgtaagccggcctttgtcagaaccaccatggacacggggcagcttcagttaagcagagaaaggagccccggggctggccaacaagcaagaagggaactctgtggaaggatagctatctcccaacacggagggaaggcccaggcgtcgcccagccactccttgctgtcacccctggacaaaacagatggagagccctggtcagccttggcagggttcgcggatgtgctttcccgacttgcactgtgggagtctgaaggacctgaagcattttgcgaggagtctggactcaggtcagcagagggaagcgtcttagacctggccaatcctcaaggtaagggccctaagggagaactgagggacttcgcaccaaggacagaagaagccccggtctgccctgcgctgccataggacttgcaggccacagacaggaagatggccgccgagggctgaccgaggcgtccccacaacagaagaagggaggaggtgccagccctctagggaataaataggaagacattgaggaggactgggggaacccccacctcagaggacagcttcccagagattcccaccctgctcctcatatcagccctcgtagagctcctcagtcagctcaggctgagcggcagtcctctcattgctgggggaggggtggagggg

SEQ ID NO: 17646 - DNA, 1290 bp, Homo sapiens
  source 1..1290: mol_type = unassigned DNA
gtcagcacagcagaggaggcccaggcaatatcaggagtcaaggcctgtgggatcccatcatccccatccctgctcacacgtttacctgctgctcctgaacaacaggcctcatgcctctctttccaaaccttccacgcctcagctttgaggaagacttccagaacccgagtgtgacagaggacttggtagatgcacaggattccatagatgaggaggaggaggatgcctcctccacttcctcttcctctttccactttttattcccctcctcctcttccttgtcctcatcctcacccttgtcctcacccttaccctctactctcattctgggtgttccagaagatgaggatatgcctgctgctgggatgccacctcttccccagagtcctcctgagattcctccccagggtcctcccaagatctctccccagggtcctccgcagagtcctccccagagtcctctagactcctgctcatcccctcttttgtggacccgattggatgaggagtccagcagtgaagaggaggatacagctacttggcatgccttgccagaaagtgaatccttgcccaggtatgccctggatgaaaaggtggctgagttggtgcagtttcttctcctcaaatatcaaacaaaagagcctgtcacaaaggcagagatgctgacgactgtcatcaagaagtataaggactattttcccatgatcttcgggaaagcccatgagttcatagagctaatttttggcattgccctgactgatatggaccccgacaaccactcctatttctttgaagacacattagacctcacctatgagggaagcctgattgatgaccagggcatgcccaagaactgtctcctgattcttattctcagtatgatcttcataaagggcagctgtgtccccgaggaggtcatctgggaagtgttgagtgcaataggggtgtgtgctgggagggagcactttatatatggggatcccagaaagctgctcactatacattgggtgcagagaaagtacctggagtaccgggaggtgcccaacagtgctcctccacgttatgaatttttgtggggtccaagagcccattcagaggccagcaagagaagtcttagagtttttatccaagctatccagtatcatccctagtgcctttccatcctggtacatggatgctttgaaagatatggaagacagagcccaggccataattgacaccacagatgatgctactgccatggccagtgcaagccccagtgtcatgtccaccaacttctgtcctgagtga

SEQ ID NO: 17647 - DNA, 1707 bp, Homo sapiens
  source 1..1707: mol_type = unassigned DNA
gaaaggagccccggggctggccaacaagcaagaagggaactctgtggaaggatagctatctcccaacacggagggaaggcccaggcgtcgcccagccactccttgctgtcacccctggacaaaacagatggagaggtgaaaacggagagccctggtcagccttggcagggttcgcggatgtgctttcccgacttgcactgtgggagtctgaaggacctgaagcattttgcgaggagtctggactcaggtcagcagagggaagcgtcttagacctggccaatcctcaaggtgctccaggaaccaggagttgaagacctgggtctgaggcacacttcctaaagtcagcacagcagaggaggcccaggcaatatcaggagtcaaggttctgagggagcaaacctcttaggaagacaggcgacctgtgaggccctagagcaccaccttaagagaagaagagctgcctgtgggatcccatcatccccatccctgctcacacgtttacctgctgctcctgaacaacaggcctcatgcctctctttccaaaccttccacgcctcagctttgaggaagacttccagaacccgagtgtgacagaggacttggtagatgcacaggattccatagatgaggaggaggaggatgcctcctccacttcctcttcctctttccactttttattcccctcctcctcttccttgtcctcatcctcacccttgtcctcacccttaccctctactctcattctgggtgttccagaagatgaggatatgcctgctgctgggatgccacctcttccccagagtcctcctgagattcctccccagggtcctcccaagatctctccccagggtcctccgcagagtcctccccagagtcctctagactcctgctcatcccctcttttgtggacccgattggatgaggagtccagcagtgaagaggaggatacagctacttggcatgccttgccagaaagtgaatccttgcccaggtatgccctggatgaaaaggtggctgagttggtgcagtttcttctcctcaaatatcaaacaaaagagcctgtcacaaaggcagagatgctgacgactgtcatcaagaagtataaggactattttcccatgatcttcgggaaagcccatgagttcatagagctaatttttggcattgccctgactgatatggaccccgacaaccactcctatttctttgaagacacattagacctcacctatgagggaagcctgattgatgaccagggcatgcccaagaactgtctcctgattcttattctcagtatgatcttcataaagggcagctgtgtccccgaggaggtcatctgggaagtgttgagtgcaataggggtgtgtgctgggagggagcactttatatatggggatcccagaaagctgctcactatacattgggtgcagagaaagtacctggagtaccgggaggtgcccaacagtgctcctccacgttatgaatttttgtggggtccaagagcccattcagaggccagcaagagaagtcttagagtttttatccaagctatccagtatcatccctagtgcctttccatcctggtacatggatgctttgaaagatatggaagacagagcccaggccataattgacaccacagatgatgctactgccatggccagtgcaagccccagtgtcatgtccaccaacttctgtcctgagtga

SEQ ID NO: 17648 - DNA, 2747 bp, Homo sapiens
  source 1..2747: mol_type = unassigned DNA
ggcgaagaggcggggtcgcccaagctgccgcgctggcattttctcctggacaaggagagagtgcggctgctgagagccgagcccagcaatcccgatcctctgagtcgtgaagaagggaggcagcgagggggttggggttggggcctgaggcaagcccccaggctccgctcttgccagagggacaggagccatggctcagaaaatggactgtggtgcgggcctcctcggcttccaggctgaggcctccgtagaagacagcgccttgcttatgcagaccttgatggaggccatccagatctcagaggctccacctactaaccaggccaccgcagctgctagtccccagagttcacagcccccaactgccaatgagatggctgacattcaggtttcagcagctgccgctaggcctaagtcagcctttaaagtccagaatgccaccacaaaaggcccaaatggtgtctatgatttctctcaggctcataatgccaaggatgtgcccaacacgcagcccaaggcagcctttaagtcccaaaatgctaccccaaagggtccaaatgctgcctatgatttttcccaggcagcaaccactggtgagttagctgctaacaagtctgagatggccttcaaggcccagaatgccactactaaagtgggcccaaatgccacctacaatttctctcagtctctcaatgccaatgacctggccaacagcaggcctaagacccctttcaaggcttggaatgataccactaaggccccaacagctgatacccagacccagaatgtaaatcaggccaaaatggccacttcccaggctgacatagagaccgacccaggtatctctgaacctgacggtgcaactgcacagacatcagcagatggttcccaggctcagaatctggagtcccggacaataattcggggcaagaggacccgcaagattaataacttgaatgttgaagagaacagcagtggggatcagaggcgggccccactggctgcagggacctggaggtctgcaccagttccagtgaccactcagaacccacctggcgcaccccccaatgtgctctggcagacgccattggcttggcagaacccctcaggctggcaaaaccagacagccaggcagaccccaccagcacgtcagagccctccagctaggcagaccccaccagcctggcagaacccagtcgcttggcagaacccagtgatttggccaaacccagtaatctggcagaacccagtgatctggccaaaccccattgtctggcccggccctgttgtctggccgaatccactggcctggcagaatccacctggatggcagactccacctggatggcagaccccaccgggctggcagggtcctccagactggcaaggtcctcctgactggccgctaccacccgactggccactgccacctgattggccacttcccactgactggccactaccacctgactggatccccgctgattggccaattccacctgactggcagaacctgcgcccctcgcctaacctgcgcccttctcccaactcgcgtgcctcacagaacccaggtgctgcacagccccgagatgtggcccttcttcaggaaagagcaaataagttggtcaagtacttgatgcttaaggactacacaaaggtgcccatcaagcgctcagaaatgctgagagatatcatccgtgaatacactgatgtttatccagaaatcattgaacgtgcatgctttgtcctagagaagaaatttgggattcaactgaaagaaattgacaaagaagaacacctgtatattctcatcagtacccccgagtccctggctggcatactgggaacgaccaaagacacacccaagctcggtctcctcttggtgattctgggtgtcatcttcatgaatggcaaccgtgccagtgaggctgtcctctgggaggcactacgcaagatgggactgcgtcctggggtgagacatcccctccttggagatctaaggaaacttctcacctatgagtttgtaaagcagaaatacctggactacagacgagtgcccaacagcaaccccccggagtatgagttcctctggggcctccgttcctaccatgagactagcaagatgaaagtgctgagattcattgcagaggttcagaaaagagaccctcgtgactggactgcacagttcatggaggctgcagatgaggccttggatgctctggatgctgctgcagctgaggccgaagcccgggctgaagcaagaacccgcatgggaattggagatgaggctgtgtctgggccctggagctgggatgacattgagtttgagctgctgacctgggatgaggaaggagattttggagatccctggtccagaattccatttaccttctgggccagataccaccagaatgcccgctccagattccctcagacctttgccggtcccattattggtcctggtggtacagccagtgccaacttcgctgccaactttggtgccattggtttcttctgggttgagtgagatgttggatattgctatcaatcgcagtagtctttcccctgtgtgaggctgaagcctcagattccttctaaacacagctatctagagagccacatcctgttgactgaaagtggcatgcaagataaatttatttgctgttccttgtctactgctttttttccccttgtgtgctgtcaagttttggtatcagaaataaacattgaaattgcaaagtgaatta

SEQ ID NO: 17649 - DNA, 2875 bp, Homo sapiens
  source 1..2875: mol_type = unassigned DNA
attttctcctggacaaggagagagtgcggctgctgagagccgagcccagcaatcccgatcctctgagtcgtgaagaagggaggcagcgagggggttggggttggggcctgaggcaagcccccaggctccgctcttgccagagggacaggagccatggctcagaaaatggactgtggtgcgggcctcctcggcttccagaatcctgacgcttgtagagcagtctgtcaccccctcccccagcctcctgcctccaccctccctctttctgcattccccactctgtgcgaccccccttattctcaactccgcgatccgcctgccgtcctgagctgctactgcacgcctcttggagcgtccccggctcctgctgaggcctccgtagaagacagcgccttgcttatgcagaccttgatggaggccatccagatctcagaggctccacctactaaccaggccaccgcagctgctagtccccagagttcacagcccccaactgccaatgagatggctgacattcaggtttcagcagctgccgctaggcctaagtcagcctttaaagtccagaatgccaccacaaaaggcccaaatggtgtctatgatttctctcaggctcataatgccaaggatgtgcccaacacgcagcccaaggcagcctttaagtcccaaaatgctaccccaaagggtccaaatgctgcctatgatttttcccaggcagcaaccactggtgagttagctgctaacaagtctgagatggccttcaaggcccagaatgccactactaaagtgggcccaaatgccacctacaatttctctcagtctctcaatgccaatgacctggccaacagcaggcctaagacccctttcaaggcttggaatgataccactaaggccccaacagctgatacccagacccagaatgtaaatcaggccaaaatggccacttcccaggctgacatagagaccgacccaggtatctctgaacctgacggtgcaactgcacagacatcagcagatggttcccaggctcagaatctggagtcccggacaataattcggggcaagaggacccgcaagattaataacttgaatgttgaagagaacagcagtggggatcagaggcgggccccactggctgcagggacctggaggtctgcaccagttccagtgaccactcagaacccacctggcgcaccccccaatgtgctctggcagacgccattggcttggcagaacccctcaggctggcaaaaccagacagccaggcagaccccaccagcacgtcagagccctccagctaggcagaccccaccagcctggcagaacccagtcgcttggcagaacccagtgatttggccaaacccagtaatctggcagaacccagtgatctggccaaaccccattgtctggcccggccctgttgtctggccgaatccactggcctggcagaatccacctggatggcagactccacctggatggcagaccccaccgggctggcagggtcctccagactggcaaggtcctcctgactggccgctaccacccgactggccactgccacctgattggccacttcccactgactggccactaccacctgactggatccccgctgattggccaattccacctgactggcagaacctgcgcccctcgcctaacctgcgcccttctcccaactcgcgtgcctcacagaacccaggtgctgcacagccccgagatgtggcccttcttcaggaaagagcaaataagttggtcaagtacttgatgcttaaggactacacaaaggtgcccatcaagcgctcagaaatgctgagagatatcatccgtgaatacactgatgtttatccagaaatcattgaacgtgcatgctttgtcctagagaagaaatttgggattcaactgaaagaaattgacaaagaagaacacctgtatattctcatcagtacccccgagtccctggctggcatactgggaacgaccaaagacacacccaagctcggtctcctcttggtgattctgggtgtcatcttcatgaatggcaaccgtgccagtgaggctgtcctctgggaggcactacgcaagatgggactgcgtcctggggtgagacatcccctccttggagatctaaggaaacttctcacctatgagtttgtaaagcagaaatacctggactacagacgagtgcccaacagcaaccccccggagtatgagttcctctggggcctccgttcctaccatgagactagcaagatgaaagtgctgagattcattgcagaggttcagaaaagagaccctcgtgactggactgcacagttcatggaggctgcagatgaggccttggatgctctggatgctgctgcagctgaggccgaagcccgggctgaagcaagaacccgcatgggaattggagatgaggctgtgtctgggccctggagctgggatgacattgagtttgagctgctgacctgggatgaggaaggagattttggagatccctggtccagaattccatttaccttctgggccagataccaccagaatgcccgctccagattccctcagacctttgccggtcccattattggtcctggtggtacagccagtgccaacttcgctgccaactttggtgccattggtttcttctgggttgagtgagatgttggatattgctatcaatcgcagtagtctttcccctgtgtgaggctgaagcctcagattccttctaaacacagctatctagagagccacatcctgttgactgaaagtggcatgcaagataaatttatttgctgttccttgtctactgctttttttccccttgtgtgctgtcaagttttggtatcagaaataaacattgaaattgcaaagtgaa

SEQ ID NO: 17650 - DNA, 2806 bp, Homo sapiens
  source 1..2806: mol_type = unassigned DNA
cgggactgactttggctcttcagtgtttgcgcatgcgcgtaacgtcctgaggcggtgggtggtatattaggcgaagaggcggggtcgcccaagctgccgcgctggcattttctcctggacaaggagagagtgcggctgctgagagccgagcccagcaatcccgatcctctgagtcgtgaagaagggaggcagcgagggggttggggttggggcctgaggcaaggctccgctcttgccagagggacaggagccatggctcagaaaatggactgtggtgcgggcctcctcggcttccaggctgaggcctccgtagaagacagcgccttgcttatgcagaccttgatggaggccatccagatctcagaggctccacctactaaccaggccaccgcagctgctagtccccagagttcacagcccccaactgccaatgagatggctgacattcaggtttcagcagctgccgctaggcctaagtcagcctttaaagtccagaatgccaccacaaaaggcccaaatggtgtctatgatttctctcaggctcataatgccaaggatgtgcccaacacgcagcccaaggcagcctttaagtcccaaaatgctaccccaaagggtccaaatgctgcctatgatttttcccaggcagcaaccactggtgagttagctgctaacaagtctgagatggccttcaaggcccagaatgccactactaaagtgggcccaaatgccacctacaatttctctcagtctctcaatgccaatgacctggccaacagcaggcctaagacccctttcaaggcttggaatgataccactaaggccccaacagctgatacccagacccagaatgtaaatcaggccaaaatggccacttcccaggctgacatagagaccgacccaggtatctctgaacctgacggtgcaactgcacagacatcagcagatggttcccaggctcagaatctggagtcccggacaataattcggggcaagaggacccgcaagattaataacttgaatgttgaagagaacagcagtggggatcagaggcgggccccactggctgcagggacctggaggtctgcaccagttccagtgaccactcagaacccacctggcgcaccccccaatgtgctctggcagacgccattggcttggcagaacccctcaggctggcaaaaccagacagccaggcagaccccaccagcacgtcagagccctccagctaggcagaccccaccagcctggcagaacccagtcgcttggcagaacccagtgatttggccaaacccagtaatctggcagaacccagtgatctggccaaaccccattgtctggcccggccctgttgtctggccgaatccactggcctggcagaatccacctggatggcagactccacctggatggcagaccccaccgggctggcagggtcctccagactggcaaggtcctcctgactggccgctaccacccgactggccactgccacctgattggccacttcccactgactggccactaccacctgactggatccccgctgattggccaattccacctgactggcagaacctgcgcccctcgcctaacctgcgcccttctcccaactcgcgtgcctcacagaacccaggtgctgcacagccccgagatgtggcccttcttcaggaaagagcaaataagttggtcaagtacttgatgcttaaggactacacaaaggtgcccatcaagcgctcagaaatgctgagagatatcatccgtgaatacactgatgtttatccagaaatcattgaacgtgcatgctttgtcctagagaagaaatttgggattcaactgaaagaaattgacaaagaagaacacctgtatattctcatcagtacccccgagtccctggctggcatactgggaacgaccaaagacacacccaagctcggtctcctcttggtgattctgggtgtcatcttcatgaatggcaaccgtgccagtgaggctgtcctctgggaggcactacgcaagatgggactgcgtcctggggtgagacatcccctccttggagatctaaggaaacttctcacctatgagtttgtaaagcagaaatacctggactacagacgagtgcccaacagcaaccccccggagtatgagttcctctggggcctccgttcctaccatgagactagcaagatgaaagtgctgagattcattgcagaggttcagaaaagagaccctcgtgactggactgcacagttcatggaggctgcagatgaggccttggatgctctggatgctgctgcagctgaggccgaagcccgggctgaagcaagaacccgcatgggaattggagatgaggctgtgtctgggccctggagctgggatgacattgagtttgagctgctgacctgggatgaggaaggagattttggagatccctggtccagaattccatttaccttctgggccagataccaccagaatgcccgctccagattccctcagacctttgccggtcccattattggtcctggtggtacagccagtgccaacttcgctgccaactttggtgccattggtttcttctgggttgagtgagatgttggatattgctatcaatcgcagtagtctttcccctgtgtgaggctgaagcctcagattccttctaaacacagctatctagagagccacatcctgttgactgaaagtggcatgcaagataaatttatttgctgttccttgtctactgctttttttccccttgtgtgctgtcaagttttggtatcagaaataaacattgaaattgcaaagtgaa

SEQ ID NO: 17651 - DNA, 2701 bp, Homo sapiens
  source 1..2701: mol_type = unassigned DNA
gaagttgcctgaagtgaaggagggggtagcggctgcagaagctaaagcttccgccaaacaaaagaggacagcacttccggtcacgccatcgttgctgccttcttcgtcaagcccccaggctccgctcttgccagagggacaggagccatggctcagaaaatggactgtggtgcgggcctcctcggcttccaggctgaggcctccgtagaagacagcgccttgcttatgcagaccttgatggaggccatccagatctcagaggctccacctactaaccaggccaccgcagctgctagtccccagagttcacagcccccaactgccaatgagatggctgacattcaggtttcagcagctgccgctaggcctaagtcagcctttaaagtccagaatgccaccacaaaaggcccaaatggtgtctatgatttctctcaggctcataatgccaaggatgtgcccaacacgcagcccaaggcagcctttaagtcccaaaatgctaccccaaagggtccaaatgctgcctatgatttttcccaggcagcaaccactggtgagttagctgctaacaagtctgagatggccttcaaggcccagaatgccactactaaagtgggcccaaatgccacctacaatttctctcagtctctcaatgccaatgacctggccaacagcaggcctaagacccctttcaaggcttggaatgataccactaaggccccaacagctgatacccagacccagaatgtaaatcaggccaaaatggccacttcccaggctgacatagagaccgacccaggtatctctgaacctgacggtgcaactgcacagacatcagcagatggttcccaggctcagaatctggagtcccggacaataattcggggcaagaggacccgcaagattaataacttgaatgttgaagagaacagcagtggggatcagaggcgggccccactggctgcagggacctggaggtctgcaccagttccagtgaccactcagaacccacctggcgcaccccccaatgtgctctggcagacgccattggcttggcagaacccctcaggctggcaaaaccagacagccaggcagaccccaccagcacgtcagagccctccagctaggcagaccccaccagcctggcagaacccagtcgcttggcagaacccagtgatttggccaaacccagtaatctggcagaacccagtgatctggccaaaccccattgtctggcccggccctgttgtctggccgaatccactggcctggcagaatccacctggatggcagactccacctggatggcagaccccaccgggctggcagggtcctccagactggcaaggtcctcctgactggccgctaccacccgactggccactgccacctgattggccacttcccactgactggccactaccacctgactggatccccgctgattggccaattccacctgactggcagaacctgcgcccctcgcctaacctgcgcccttctcccaactcgcgtgcctcacagaacccaggtgctgcacagccccgagatgtggcccttcttcaggaaagagcaaataagttggtcaagtacttgatgcttaaggactacacaaaggtgcccatcaagcgctcagaaatgctgagagatatcatccgtgaatacactgatgtttatccagaaatcattgaacgtgcatgctttgtcctagagaagaaatttgggattcaactgaaagaaattgacaaagaagaacacctgtatattctcatcagtacccccgagtccctggctggcatactgggaacgaccaaagacacacccaagctcggtctcctcttggtgattctgggtgtcatcttcatgaatggcaaccgtgccagtgaggctgtcctctgggaggcactacgcaagatgggactgcgtcctggggtgagacatcccctccttggagatctaaggaaacttctcacctatgagtttgtaaagcagaaatacctggactacagacgagtgcccaacagcaaccccccggagtatgagttcctctggggcctccgttcctaccatgagactagcaagatgaaagtgctgagattcattgcagaggttcagaaaagagaccctcgtgactggactgcacagttcatggaggctgcagatgaggccttggatgctctggatgctgctgcagctgaggccgaagcccgggctgaagcaagaacccgcatgggaattggagatgaggctgtgtctgggccctggagctgggatgacattgagtttgagctgctgacctgggatgaggaaggagattttggagatccctggtccagaattccatttaccttctgggccagataccaccagaatgcccgctccagattccctcagacctttgccggtcccattattggtcctggtggtacagccagtgccaacttcgctgccaactttggtgccattggtttcttctgggttgagtgagatgttggatattgctatcaatcgcagtagtctttcccctgtgtgaggctgaagcctcagattccttctaaacacagctatctagagagccacatcctgttgactgaaagtggcatgcaagataaatttatttgctgttccttgtctactgctttttttccccttgtgtgctgtcaagttttggtatcagaaataaacattgaaattgcaaagtgaa

SEQ ID NO: 17652 - DNA, 1528 bp, Homo sapiens
  source 1..1528: mol_type = unassigned DNA
attttctcctggacaaggagagagtgcggctgctgagagccgagcccagcaatcccgatcctctgagtcgtgaagaagggaggcagcgagggggttggggttggggcctgaggcaagcccccaggctccgctcttgccagagggacaggagccatggctcagaaaatggactgtggtgcgggcctcctcggcttccaggctgaggcctccgtagaagacagcgccttgcttatgcagaccttgatggaggccatccagatctcagaggctccacctactaaccaggccaccgcagctgctagtccccagagttcacagcccccaactgccaatgagatggctgacattcaggtttcagcagctgccgctaggcctaagtcagcctttaaagtccagaatgccaccacaaaaggcccaaatggtgtctatgatttctctcagtctctcaatgccaatgacctggccaacagcaggcctaagacccaggtatctctgaacctgacggtgcaactgcacagacatcagcagatggttcccaggctcagaatctggagtcccggacaataattcggggcaagaggacccgcaagattaataacttgaatgttgaagagaacagcagtggggatcagaggcgggccccactggctgcagggacctggaggtctgcaccagttccagtgaccactcagaacccacctggcgcaccccccaatgtgctctggcagacgccattggcttggcagaacccctcaggctggcaaaaccagacagccaggcagaccccaccagcacgtcagagccctccagctaggcagaccccaccagcctggcagaacccagtcgcttggcagaacccagtgatttggccaaacccagtaatctggcagaacccagtgatctggccaaaccccattgtctggcccggccctgttgtctggccgaatccactggcctggcagaatccacctggatggcagactccacctggatggcagaccccaccgggctggcagggtcctccagactggcaaggtcctcctgactggccgctaccacccgactggccactgccacctgattggccacttcccactgactggccactaccacctgactggatccccgctgattggccaattccacctgactggcagaacctgcgcccctcgcctaacctgcgcccttctcccaactcgcgtgcctcacagaacccaggtgctgcacagccccgagatgtggcccttcttcaggaaagagcaaataagttggtcaagtacttgatgcttaaggactacacaaaggtgcccatcaagcgctcagaaatgctgagagatatcatccgtgaatacactgatgtttatccagaaatcattgaacgtgcatgctttgtcctagagaagaaatttgggattcaactgaaagaaattgacaaagaagaacacctgtatattctcatcagtacccccgagtccctggctggcatactgggaacgaccaaagacacacccaagctcggtctcctctt

SEQ ID NO: 17653 - DNA, 1932 bp, Homo sapiens
  source 1..1932: mol_type = unassigned DNA
ggagggcagtctccgagtttcggaggggcttggagtgagtggacgcactcgggaattgtaggaggacgaggctcagctcttgccaggccaaattgagacatgtctgacacaagcgagagtggtgcaggtctaactcgcttccaggctgaagcttcagaaaaggacagtagctcgatgatgcagactctgttgacagtgacccagaatgtggaggtcccagagacaccgaaggcctcaaaggcactggaggtctcagaggatgtgaaggtctcaaaagcctctggggtctcaaaggccacagaggtctcaaagaccccagaggctcgggaggcacctgccacccaggcctcatctactactcagctgactgatacccaggttctggcagctgaaaacaagagtctagcagctgacaccaagaaacagaatgctgacccgcaggctgtgacaatgcctgccactgagaccaaaaaggtcagccatgtggctgatacaaaggtcaatacaaaggctcaggagactgaggctgcaccctctcaggccccagcagatgaacctgagcctgagagtgcagctgcccagtctcaggagaatcaggatactcggcccaaggtcaaagccaagaaagcccgaaaggtgaagcatctggatggggaagaggatggcagcagtgatcagagtcaggcttctggaaccacaggtggccgaagggtctcaaaggccctaatggcctcaatggcccgcagggcttcaaggggtcccatagccttttgggcccgcagggcatcaaggactcggttggctgcttgggcccggagagccttgctctccctgagatcacctaaagcccgtaggggcaaggctcgccgtagagctgccaagctccagtcatcccaagagcctgaagcaccaccacctcgggatgtggcccttttgcaagggagggcaaatgatttggtgaagtaccttttggctaaagaccagacgaagattcccatcaagcgctcggacatgctgaaggacatcatcaaagaatacactgatgtgtaccccgaaatcattgaacgagcaggctattccttggagaaggtatttgggattcaattgaaggaaattgataagaatgaccacttgtacattcttctcagcaccttagagcccactgatgcaggcatactgggaacgactaaggactcacccaagctgggtctgctcatggtgcttcttagcatcatcttcatgaatggaaatcggtccagtgaggctgtcatctgggaggtgctgcgcaagttggggctgcgccctgggatacatcattcactctttggggacgtgaagaagctcatcactgatgagtttgtgaagcagaagtacctggactatgccagagtccccaatagcaatccccctgaatatgagttcttctggggcctgcgctcttactatgagaccagcaagatgaaagtcctcaagtttgcctgcaaggtacaaaagaaggatcccaaggaatgggcagctcagtaccgagaggcgatggaagcggatttgaaggctgcagctgaggctgcagctgaagccaaggctagggccgagattagagctcgaatgggcattgggctcggctcggagaatgctgccgggccctgcaactgggacgaagctgatatcggaccctgggccaaagcccggatccaggcgggagcagaagctaaagccaaagcccaagagagtggcagtgccagcactggtgccagtaccagtaccaataacagtgccagtgccagtgccagcaccagtggtggcttcagtgctggtgccagcctgaccgccactctcacatttgggctcttcgctggccttggtggagctggtgccagcaccagtggcagctctggtgcctgtggtttctcctacaagtgagattttaggtat

SEQ ID NO: 17654 - DNA, 1848 bp, Homo sapiens
  source 1..1848: mol_type = unassigned DNA
tagagaaggcagacgcatcccgaactcgctggaggacaaggctcagctcttgccaggccaaattgagacatgtctgacacaagcgagagtggtgcaggtctaactcgcttccaggctgaagcttcagaaaaggacagtagctcgatgatgcagactctgttgacagtgacccagaatgtggaggtcccagagacaccgaaggcctcaaaggccacagaggtctcaaagaccccagaggctcgggaggcacctgccacccaggcctcatctactactcagctgactgatacccaggttctggcagctgaaaacaagagtctagcagctgacaccaagaaacagaatgctgacccgcaggctgtgacaatgcctgccactgagaccaaaaaggtcagccatgtggctgatacaaaggtcaatacaaaggctcaggagactgaggctgcaccctctcaggccccagcagatgaacctgagcctgagagtgcagctgcccagtctcaggagaatcaggatactcggcccaaggtcaaagccaagaaagcccgaaaggtgaagcatctggatggggaagaggatggcagcagtgatcagagtcaggcttctggaaccacaggtggccgaagggtctcaaaggccctaatggcctcaatggcccgcagggcttcaaggggtcccatagccttttgggcccgcagggcatcaaggactcggttggctgcttgggcccggagagccttgctctccctgagatcacctaaagcccgtaggggcaaggctcgccgtagagctgccaagctccagtcatcccaagagcctgaagcaccaccacctcgggatgtggcccttttgcaagggagggcaaatgatttggtgaagtaccttttggctaaagaccagacgaagattcccatcaagcgctcggacatgctgaaggacatcatcaaagaatacactgatgtgtaccccgaaatcattgaacgagcaggctattccttggagaaggtatttgggattcaattgaaggaaattgataagaatgaccacttgtacattcttctcagcaccttagagcccactgatgcaggcatactgggaacgactaaggactcacccaagctgggtctgctcatggtgcttcttagcatcatcttcatgaatggaaatcggtccagtgaggctgtcatctgggaggtgctgcgcaagttggggctgcgccctgggatacatcattcactctttggggacgtgaagaagctcatcactgatgagtttgtgaagcagaagtacctggactatgccagagtccccaatagcaatccccctgaatatgagttcttctggggcctgcgctcttactatgagaccagcaagatgaaagtcctcaagtttgcctgcaaggtacaaaagaaggatcccaaggaatgggcagctcagtaccgagaggcgatggaagcggatttgaaggctgcagctgaggctgcagctgaagccaaggctagggccgagattagagctcgaatgggcattgggctcggctcggagaatgctgccgggccctgcaactgggacgaagctgatatcggaccctgggccaaagcccggatccaggcgggagcagaagctaaagccaaagcccaagagagtggcagtgccagcactggtgccagtaccagtaccaataacagtgccagtgccagtgccagcaccagtggtggcttcagtgctggtgccagcctgaccgccactctcacatttgggctcttcgctggccttggtggagctggtgccagcaccagtggcagctctggtgcctgtggtttctcctacaagtgagattttaggtat

SEQ ID NO: 17655 - DNA, 2169 bp, Homo sapiens
  source 1..2169: mol_type = unassigned DNA
gacttcgagagggacttagagaaggcagacgcatcccgaactcgctggaggacaaggctcagctcttgccaggccaaattgagacatgtctgacacaagcgagagtggtgcaggtctaactcgcttccaggctgaagcttcagaaaaggacagtagctcgatgatgcagactctgttgacagtgacccagaatgtggaggtcccagagacaccgaaggcctcaaagggtctcaaagaccccagaggctcgggaggcacctgccacccaggcctcatctactactcagctgactgatacccaggttctggcagctgaaaacaagagtctagcagctgacaccaagaaacagaatgctgacccgcaggctgtgacaatgcctgccactgagaccaaaaaggtcagccatgtggctgatacaaaggtcaatacaaaggctcaggagactgaggctgcaccctctcaggccccagcagatgaacctgagcctgagagtgcagctgcccagtctcaggagaatcaggatactcggcccaaggtcaaagccaagaaagcccgaaaggtgaagcatctggatggggaagaggatggcagcagtgatcagagtcaggcttctggaaccacaggtggccgaagggtctcaaaggccctaatggcctcaatggcccgcagggcttcaaggggtcccatagccttttgggcccgcagggcatcaaggactcggttggctgcttgggcccggagagccttgctctccctgagatcacctaaagcccgtaggggcaaggctcgccgtagagctgccaagctccagtcatcccaagagcctgaagcaccaccacctcgggatgtggcccttttgcaagggagggcaaatgatttggtgaagtaccttttggctaaagaccagacgaagattcccatcaagcgctcggacatgctgaaggacatcatcaaagaatacactgatgtgtaccccgaaatcattgaacgagcaggctattccttggagaaggtatttgggattcaattgaaggaaattgataagaatgaccacttgtacattcttctcagcaccttagagcccactgatgcaggcatactgggaacgactaaggactcacccaagctgggtctgctcatggtgcttcttagcatcatcttcatgaatggaaatcggtccagtgaggctgtcatctgggaggtgctgcgcaagttggggctgcgccctgggatacatcattcactctttggggacgtgaagaagctcatcactgatgagtttgtgaagcagaagtacctggactatgccagagtccccaatagcaatccccctgaatatgagttcttctggggcctgcgctcttactatgagaccagcaagatgaaagtcctcaagtttgcctgcaaggtacaaaagaaggatcccaaggaatgggcagctcagtaccgagaggcgatggaagcggatttgaaggctgcagctgaggctgcagctgaagccaaggctagggccgagattagagctcgaatgggcattgggctcggctcggagaatgctgccgggccctgcaactgggacgaagctgatatcggaccctgggccaaagcccggatccaggcgggagcagaagctaaagccaaagcccaagagagtggcagtgccagcactggtgccagtaccagtaccaataacagtgccagtgccagtgccagcaccagtggtggcttcagtgctggtgccagcctgaccgccactctcacatttgggctcttcgctggccttggtggagctggtgccagcaccagtggcagctctggtgcctgtggtttctcctacaagtgagattttaggtatctgccttggtttcagtggggacatctggggcttatggggctgggatgaggagctggatgattctaggaaggcccaagttggagaatgatgtggagagtgtgccaagacactgcttttggcattttattcctttctgtttgctggatgtcaattgacccttttattttctcttacttgtgttttcagatattgttaatcctgccagtctttctcttcaagccagggtgcatcctcagaaacctactcaacacagcactctaggcagccactatcaatcaattgaagttgacactctgcattaaatctatttgcc

SEQ ID NO: 17656 - DNA, 1927 bp, Homo sapiens
  source 1..1927: mol_type = unassigned DNA
ggaggctgagacttcgagagggacttagagaaggcagacgcatcccgaactcgctggaggacaaggctcagctcttgccaggccaaattgagacatgtctgacacaagcgagagtggtgcaggtctaactcgcttccaggctgaagcttcagaaaaggacagtagctcgatgatgcagactctgttgacagtgacccagaatgtggaggtcccagagacaccgaaggcctcaaaggcactggaggtctcagaggatgtgaaggtctcaaaagcctctggggtctcaaaggccacagaggtctcaaagaccccagaggctcgggaggcacctgccacccaggcctcatctactactcagctgactgatacccaggttctggcagctgaaaacaagagtctagcagctgacaccaagaaacagaatgctgacccgcaggctgtgacaatgcctgccactgagaccaaaaaggtcagccatgtggctgatacaaaggtcaatacaaaggctcaggagactgaggctgcaccctctcaggccccagcagatgaacctgagcctgagagtgcagctgcccagtctcaggagaatcaggatactcggcccaaggtcaaagccaagaaagcccgaaaggtgaagcatctggatggggaagaggatggcagcagtgatcagagtcaggcttctggaaccacaggtggccgaagggtctcaaaggccctaatggcctcaatggcccgcagggcttcaaggggtcccatagccttttgggcccgcagggcatcaaggactcggttggctgcttgggcccggagagccttgctctccctgagatcacctaaagcccgtaggggcaaggctcgccgtagagctgccaagctccagtcatcccaagagcctgaagcaccaccacctcgggatgtggcccttttgcaagggagggcaaatgatttggtgaagtaccttttggctaaagaccagacgaagattcccatcaagcgctcggacatgctgaaggacatcatcaaagaatacactgatgtgtaccccgaaatcattgaacgagcaggctattccttggagaaggtatttgggattcaattgaaggaaattgataagaatgaccacttgtacattcttctcagcaccttagagcccactgatgcaggcatactgggaacgactaaggactcacccaagctgggtctgctcatggtgcttcttagcatcatcttcatgaatggaaatcggtccagtgaggctgtcatctgggaggtgctgcgcaagttggggctgcgccctgggatacatcattcactctttggggacgtgaagaagctcatcactgatgagtttgtgaagcagaagtacctggactatgccagagtccccaatagcaatccccctgaatatgagttcttctggggcctgcgctcttactatgagaccagcaagatgaaagtcctcaagtttgcctgcaaggtacaaaagaaggatcccaaggaatgggcagctcagtaccgagaggcgatggaagcggatttgaaggctgcagctgaggctgcagctgaagccaaggctagggccgagattagagctcgaatgggcattgggctcggctcggagaatgctgccgggccctgcaactgggacgaagctgatatcggaccctgggccaaagcccggatccaggcgggagcagaagctaaagccaaagcccaagagagtggcagtgccagcactggtgccagtaccagtaccaataacagtgccagtgccagtgccagcaccagtggtggcttcagtgctggtgccagcctgaccgccactctcacatttgggctcttcgctggccttggtggagctggtgccagcaccagtggcagctctggtgcctgtggtttctcctacaagtgagattttaggtat

SEQ ID NO: 17657 - DNA, 2048 bp, Homo sapiens
  source 1..2048: mol_type = unassigned DNA
agtctccgagtttcggaggggcttggagtgagtggacgcactcgggaattgtaggaggacgaggctcagctcttgccaggccaaattgagacatgtctgacacaagcgagagtggtgcaggtctaactcgcttccaggctgaagcttcagaaaaggacagtagctcgatgatgcagactctgttgacagtgacccagaatgtggaggtcccagagacaccgaaggcctcaaaggcactggaggtctcagaggatgtgaaggtctcaaaagcctctggggtctcaaaggccacagaggtctcaaagaccccagaggctcgggaggcacctgccacccaggcctcatctactactcagctgactgatacccaggttctggcagctgaaaacaagagtctagcagctgacaccaagaaacagaatgctgacccgcaggctgtgacaatgcctgccactgagaccaaaaaggtcagccatgtggctgatacaaaggtcaatacaaaggctcaggagactgaggctgcaccctctcaggccccagcagatgaacctgagcctgagagtgcagctgcccagtctcaggagaatcaggatactcggcccaaggtcaaagccaagaaagcccgaaaggtgaagcatctggatggggaagaggatggcagcagtgatcagagtcaggcttctggaaccacaggtggccgaagggtctcaaaggccctaatggcctcaatggcccgcagggcttcaaggggtcccatagccttttgggcccgcagggcatcaaggactcggttggctgcttgggcccggagagccttgctctccctgagatcacctaaagcccgtaggggcaaggctcgccgtagagctgccaagctccagtcatcccaagagcctgaagcaccaccacctcgggatgtggcccttttgcaagggagggcaaatgatttggtgaagtaccttttggctaaagaccagacgaagattcccatcaagcgctcggacatgctgaaggacatcatcaaagaatacactgatgtgtaccccgaaatcattgaacgagcaggctattccttggagaaggtatttgggattcaattgaaggaaattgataagaatgaccacttgtacattcttctcagcaccttagagcccactgatgcaggcatactgggaacgactaaggactcacccaagctgggtctgctcatggtgcttcttagcatcatcttcatgaatggaaatcggtccagtgaggctgtcatctgggaggtgctgcgcaagttggggctgcgccctgggatacatcattcactctttggggacgtgaagaagctcatcactgatgagtttgtgaagcagaagtacctggactatgccagagtccccaatagcaatccccctgaatatgagttcttctggggcctgcgctcttactatgagaccagcaagatgaaagtcctcaagtttgcctgcaaggtacaaaagaaggatcccaaggaatgggcagctcagtaccgagaggcgatggaagcggatttgaaggctgcagctgaggctgcagctgaagccaaggctagggccgagattagagctcgaatgggcattgggctcggctcggagaatgctgccgggccctgcaactgggacgaagctgatatcggaccctgggccaaagcccggatccaggcgggagcagaagctaaagccaaagcccaagagagtggcagtgccagcactggtgccagtaccagtaccaataacagtgccagtgccagtgccagcaccagtggtggcttcagtgctggtgccagcctgaccgccactctcacatttgggctcttcgctggccttggtggagctggtgccagcaccagtggcagctctggtgcctgtggtttctcctacaagtgagattttagatattgttaatcctgccagtctttctcttcaagccagggtgcatcctcagaaacctactcaacacagcactctaggcagccactatcaatcaattgaagttgacactctgcattaaatctatttgcc

SEQ ID NO: 17658 - DNA, 1798 bp, Homo sapiens
  source 1..1798: mol_type = unassigned DNA
agtctccgagtttcggaggggcttggagtgagtggacgcactcgggaattgtaggaggacgaggctcagctcttgccaggccaaattgagacatgtctgacacaagcgagagtggtgcaggtctaactcgcttccaggctgaagcttcagaaaaggacagtagctcgatgatgcagactctgttgacagtgacccagaatgtggaggtcccagagacaccgaaggcctcatctactactcagctgactgatacccaggttctggcagctgaaaacaagagtctagcagctgacaccaagaaacagaatgctgacccgcaggctgtgacaatgcctgccactgagaccaaaaaggtcagccatgtggctgatacaaaggtcaatacaaaggctcaggagactgaggctgcaccctctcaggccccagcagatgaacctgagcctgagagtgcagctgcccagtctcaggagaatcaggatactcggcccaaggtcaaagccaagaaagcccgaaaggtgaagcatctggatggggaagaggatggcagcagtgatcagagtcaggcttctggaaccacaggtggccgaagggtctcaaaggctcgccgtagagctgccaagctccagtcatcccaagagcctgaagcaccaccacctcgggatgtggcccttttgcaagggagggcaaatgatttggtgaagtaccttttggctaaagaccagacgaagattcccatcaagcgctcggacatgctgaaggacatcatcaaagaatacactgatgtgtaccccgaaatcattgaacgagcaggctattccttggagaaggtatttgggattcaattgaaggaaattgataagaatgaccacttgtacattcttctcagcaccttagagcccactgatgcaggcatactgggaacgactaaggactcacccaagctgggtctgctcatggtgcttcttagcatcatcttcatgaatggaaatcggtccagtgaggctgtcatctgggaggtgctgcgcaagttggggctgcgccctgggatacatcattcactctttggggacgtgaagaagctcatcactgatgagtttgtgaagcagaagtacctggactatgccagagtccccaatagcaatccccctgaatatgagttcttctggggcctgcgctcttactatgagaccagcaagatgaaagtcctcaagtttgcctgcaaggtacaaaagaaggatcccaaggaatgggcagctcagtaccgagaggcgatggaagcggatttgaaggctgcagctgaggctgcagctgaagccaaggctagggccgagattagagctcgaatgggcattgggctcggctcggagaatgctgccgggccctgcaactgggacgaagctgatatcggaccctgggccaaagcccggatccaggcgggagcagaagctaaagccaaagcccaagagagtggcagtgccagcactggtgccagtaccagtaccaataacagtgccagtgccagtgccagcaccagtggtggcttcagtgctggtgccagcctgaccgccactctcacatttgggctcttcgctggccttggtggagctggtgccagcaccagtggcagctctggtgcctgtggtttctcctacaagtgagattttagatattgttaatcctgccagtctttctcttcaagccagggtgcatcctcagaaacctactcaacacagcactctaggcagccactatcaatcaattgaagttgacactctgcattaaatctatttgccatttc

SEQ ID NO: 17659 - DNA, 1647 bp, Homo sapiens
  source 1..1647: mol_type = unassigned DNA
tagagaaggcagacgcatcccgaactcgctggaggacaaggctcagctcttgccaggccaaattgagacatgtctgacacaagcgagagtggtgcaggtctaactcgcttccaggctgaagcttcagaaaaggacagtagctcgatgatgcagactctgttgacagtgacccagaatgtggaggtcccagagacaccgaaggcctcatctactactcagctgactgatacccaggttctggcagctgaaaacaagagtctagcagctgacaccaagaaacagaatgctgacccgcaggctgtgacaatgcctgccactgagaccaaaaaggtcagccatgtggctgatacaaaggtcaatacaaaggctcaggagactgaggctgcaccctctcaggccccagcagatgaacctgagcctgagagtgcagctgcccagtctcaggagaatcaggatactcggcccaaggtcaaagccaagaaagcccgaaaggtgaagcatctggatggggaagaggatggcagcagtgatcagagtcaggcttctggaaccacaggtggccgaagggtctcaaaggctcgccgtagagctgccaagctccagtcatcccaagagcctgaagcaccaccacctcgggatgtggcccttttgcaagggagggcaaatgatttggtgaagtaccttttggctaaagaccagacgaagattcccatcaagcgctcggacatgctgaaggacatcatcaaagaatacactgatgtgtaccccgaaatcattgaacgagcaggctattccttggagaaggtatttgggattcaattgaaggaaattgataagaatgaccacttgtacattcttctcagcaccttagagcccactgatgcaggcatactgggaacgactaaggactcacccaagctgggtctgctcatggtgcttcttagcatcatcttcatgaatggaaatcggtccagtgaggctgtcatctgggaggtgctgcgcaagttggggctgcgccctgggatacatcattcactctttggggacgtgaagaagctcatcactgatgagtttgtgaagcagaagtacctggactatgccagagtccccaatagcaatccccctgaatatgagttcttctggggcctgcgctcttactatgagaccagcaagatgaaagtcctcaagtttgcctgcaaggtacaaaagaaggatcccaaggaatgggcagctcagtaccgagaggcgatggaagcggatttgaaggctgcagctgaggctgcagctgaagccaaggctagggccgagattagagctcgaatgggcattgggctcggctcggagaatgctgccgggccctgcaactgggacgaagctgatatcggaccctgggccaaagcccggatccaggcgggagcagaagctaaagccaaagcccaagagagtggcagtgccagcactggtgccagtaccagtaccaataacagtgccagtgccagtgccagcaccagtggtggcttcagtgctggtgccagcctgaccgccactctcacatttgggctcttcgctggccttggtggagctggtgccagcaccagtggcagctctggtgcctgtggtttctcctacaagtgagattttaggtat

SEQ ID NO: 17660 - DNA, 2189 bp, Homo sapiens
  source 1..2189: mol_type = unassigned DNA
agtggcataaacatgggctttggcgtcagacagccctgagcggggccccattgccccacccccgaggaaggcgagggggggtggcagggggctgcggaaaggggctgggctgggttgggctgtctgcagctctagtccaggaggctgagacttcgagagggacttagagaaggcagacgcatcccgaactcgctggaggacaaggctcagctcttgccaggccaaattgagacatgtctgacacaagcgagagtggtgcaggtctaactcgcttccaggctgaagcttcagaaaaggacagtagctcgatgatgcagactctgttgacagtgacccagaatgtggaggtcccagagacaccgaaggcctcaaaggcactggaggtctcagaggatgtgaaggtctcaaaagcctctggggtctcaaaggccacagaggtctcaaagaccccagaggctcgggaggcacctgccacccaggcctcatctactactcagctgactgatacccaggttctggcagctgaaaacaagagtctagcagctgacaccaagaaacagaatgctgacccgcaggctgtgacaatgcctgccactgagaccaaaaaggtcagccatgtggctgatacaaaggtcaatacaaaggctcaggagactgaggctgcaccctctcaggccccagcagatgaacctgagcctgagagtgcagctgcccagtctcaggagaatcaggatactcggcccaaggtcaaagccaagaaagcccgaaaggtgaagcatctggatggggaagaggatggcagcagtgatcagagtcaggcttctggaaccacaggtggccgaagggtctcaaaggccctaatggcctcaatggcccgcagggcttcaaggggtcccatagccttttgggcccgcagggcatcaaggactcggttggctgcttgggcccggagagccttgctctccctgagatcacctaaagcccgtaggggcaaggctcgccgtagagctgccaagctccagtcatcccaagagcctgaagcaccaccacctcgggatgtggcccttttgcaagggagggcaaatgatttggtgaagtaccttttggctaaagaccagacgaagattcccatcaagcgctcggacatgctgaaggacatcatcaaagaatacactgatgtgtaccccgaaatcattgaacgagcaggctattccttggagaaggtatttgggattcaattgaaggaaattgataagaatgaccacttgtacattcttctcagcaccttagagcccactgatgcaggcatactgggaacgactaaggactcacccaagctgggtctgctcatggtgcttcttagcatcatcttcatgaatggaaatcggtccagtgaggctgtcatctgggaggtgctgcgcaagttggggctgcgccctgggatacatcattcactctttggggacgtgaagaagctcatcactgatgagtttgtgaagcagaagtacctggactatgccagagtccccaatagcaatccccctgaatatgagttcttctggggcctgcgctcttactatgagaccagcaagatgaaagtcctcaagtttgcctgcaaggtacaaaagaaggatcccaaggaatgggcagctcagtaccgagaggcgatggaagcggatttgaaggctgcagctgaggctgcagctgaagccaaggctagggccgagattagagctcgaatgggcattgggctcggctcggagaatgctgccgggccctgcaactgggacgaagctgatatcggaccctgggccaaagcccggatccaggcgggagcagaagctaaagccaaagcccaagagagtggcagtgccagcactggtgccagtaccagtaccaataacagtgccagtgccagtgccagcaccagtggtggcttcagtgctggtgccagcctgaccgccactctcacatttgggctcttcgctggccttggtggagctggtgccagcaccagtggcagctctggtgcctgtggtttctcctacaagtgagattttagatattgttaatcctgccagtctttctcttcaagccagggtgcatcctcagaaacctactcaacacagcactctaggcagccactatcaatcaattgaagttgacactctgcattaaatctatttgcc

SEQ ID NO: 17661 - DNA, 2026 bp, Homo sapiens
  source 1..2026: mol_type = unassigned DNA
gggaaaaggggcggggtcctcagagctgccgcgctggcacatcttcctggagaaggggagggtgcggctgcagagaattgagacttagaagctttgaattcctgtatctgagaacggagtcgttgggggtggtggagggggttggaattggggacctacggaaggctcagctcttgccaggccaaattgagacatgtctgacacaagcgagagtggtgcaggtctaactcgcttccaggctgaagcttcagaaaaggacagtagctcgatgatgcagactctgttgacagtgacccagaatgtggaggtcccagagacaccgaaggcctcaaaggcactggaggtctcagaggatgtgaaggtctcaaaagcctctggggtctcaaaggccacagaggtctcaaagaccccagaggctcgggaggcacctgccacccaggcctcatctactactcagctgactgatacccaggttctggcagctgaaaacaagagtctagcagctgacaccaagaaacagaatgctgacccgcaggctgtgacaatgcctgccactgagaccaaaaaggtcagccatgtggctgatacaaaggtcaatacaaaggctcaggagactgaggctgcaccctctcaggccccagcagatgaacctgagcctgagagtgcagctgcccagtctcaggagaatcaggatactcggcccaaggtcaaagccaagaaagcccgaaaggtgaagcatctggatggggaagaggatggcagcagtgatcagagtcaggcttctggaaccacaggtggccgaagggtctcaaaggccctaatggcctcaatggcccgcagggcttcaaggggtcccatagccttttgggcccgcagggcatcaaggactcggttggctgcttgggcccggagagccttgctctccctgagatcacctaaagcccgtaggggcaaggctcgccgtagagctgccaagctccagtcatcccaagagcctgaagcaccaccacctcgggatgtggcccttttgcaagggagggcaaatgatttggtgaagtaccttttggctaaagaccagacgaagattcccatcaagcgctcggacatgctgaaggacatcatcaaagaatacactgatgtgtaccccgaaatcattgaacgagcaggctattccttggagaaggtatttgggattcaattgaaggaaattgataagaatgaccacttgtacattcttctcagcaccttagagcccactgatgcaggcatactgggaacgactaaggactcacccaagctgggtctgctcatggtgcttcttagcatcatcttcatgaatggaaatcggtccagtgaggctgtcatctgggaggtgctgcgcaagttggggctgcgccctgggatacatcattcactctttggggacgtgaagaagctcatcactgatgagtttgtgaagcagaagtacctggactatgccagagtccccaatagcaatccccctgaatatgagttcttctggggcctgcgctcttactatgagaccagcaagatgaaagtcctcaagtttgcctgcaaggtacaaaagaaggatcccaaggaatgggcagctcagtaccgagaggcgatggaagcggatttgaaggctgcagctgaggctgcagctgaagccaaggctagggccgagattagagctcgaatgggcattgggctcggctcggagaatgctgccgggccctgcaactgggacgaagctgatatcggaccctgggccaaagcccggatccaggcgggagcagaagctaaagccaaagcccaagagagtggcagtgccagcactggtgccagtaccagtaccaataacagtgccagtgccagtgccagcaccagtggtggcttcagtgctggtgccagcctgaccgccactctcacatttgggctcttcgctggccttggtggagctggtgccagcaccagtggcagctctggtgcctgtggtttctcctacaagtgagattttaggtat

SEQ ID NO: 17662 - DNA, 2495 bp, Homo sapiens
  source 1..2495: mol_type = unassigned DNA
gcggctgcggggttcctggtgctgaggacggacgccattggagttcccgagaagcatggctgagggaagcttcagcgtgcaatcggaaagctacagtgttgaagacatggatgagggtagcgacgaagtcggggaggaagagatggttgaaggcaacgactatgaagaattcggtgcgtttggtggctatggcaccctcaccagctttgacatccatatcctcagagccttcggaagcttgggtccaggccttcgcatcttatcgaatgagccctgggaactggaaaaccctgtgctggcccagaccctggtggaggcattgcagctggatccggaaacacttgccaatgagacggccgcccgtgctgccaacgtagcccgcgccgccgcctccaaccgtgcggctcgggccgctgccgccgctgcccgtaccgccttcagtcaggtggtcgctagccaccgggtggccacgccgcaggtctcaggagaggatacccagcccacgacctacgccgccgaggctcaggggcccacccctgagccaccccttgcttctccgcagacctcccagatgttagtcaccagtaagatggctgcccccgaggctccggcaacctccgcacagtcccagacaggctccccggcccaggaggctgctactgagggccctagtagcgcctgtgctttctctcaggctccgtgtgccagggaggtggacgccaaccggcccagcacagccttcctgggccagaatgatgtcttcgatttcactcagccggcaggtgtcagtggcatggccttcccgcgccccaagagacctgccccagcccaagaggctgccacagagggccccagtgctgcctctggtgtgccccagacgggacctggcagggaggtggcagccacccggcccaagaccaccaagtcggggaaggcgctggccaagactcggtgggtggagcctcagaatgttgtggcagcagctgctgccaaggccaagatggccacgagcatccctgagccggagggtgcagctgctgccactgctcagcacagtgctgagccctgggccaggatgggaggcaagaggaccaagaagtccaagcacctggatgatgagtatgagagcagcgaggaggagagagagactcccgcggtcccacccacctggagagcatcacagccctcattgacggtgcgggctcagttggcccctcggcccccgatggccccgaggtcccagataccctcaaggcacgtactgtgcctgcccccccgcaacgtgacccttctgcaggagagggcaaataagttggtgaaatacctgatgattaaggactacaagaagatccccatcaagcgcgcagacatgctgaaggatgtcatcagagaatatgatgaacatttccctgagatcattgaacgagcaacgtacaccctggaaaagaagtttgggatccacctgaaggagatcgacaaggaagaacacctgtatattcttgtctgcacacgggactcctcagctcgcctccttggaaaaaccaaggacactcccaggctgagtctcctcttggtgattctgggcgtcatcttcatgaatggcaaccgtgccagcgaggctgtcctctgggaggcactacgcaagatgggactgcgccctggggtgaggcacccattcctcggcgatctgaggaagctcatcacagatgactttgtgaagcagaagtacctggaatacaagaagatccccaacagcaacccacctgagtatgaattcctctggggcctgcgagcccgccatgagaccagcaagatgagggtcctgagattcatcgcccagaatcagaaccgagacccccgggaatggaaggctcatttcttggaggctgtggatgatgctttcaagacaatggatgtggatatggccgaggaacatgccagggcccagatgagggcccagatgaatatcggggatgaagcgctgattggacggtggagctgggatgacatacaagtcgagctcctgacctgggatgaggacggagattttggcgatgcctgggccaggatcccctttgctttctgggccagataccatcagtacattctgaatagcaaccgtgccaacaggagggccacgtggagagctggcgtcagcagtggcaccaatggaggggccagcaccagcgtcctagatggccccagcaccagctccaccatccggaccagaaatgctgccagagctggcgccagcttcttctcctggatccagtaagagtttcggcaccgttgacgaactgcagcgatcttactggccaagccagagcgcctcctctcagattccttctcgacacagcaccctaggcggcttcttcctgtcagtcggaggtggcatgcaagatgaagctctctttgctcttcctgctttcattttgtgcttttccttgtgttttcatgttttgggtatcagtgttacattaaagttgcaaaattaa

SEQ ID NO: 17663 - DNA, 2650 bp, Homo sapiens
  source 1..2650: mol_type = unassigned DNA
gcatgcgcaggctacccagccgcggggggtgcacggagaaaaggggcggggtggtccgggctgctgtgctggcagcagtaggcgagggcgcggctgcggggttcctggtgctgaggacggacgccattggagttcccgagaaggctgagctctcatctccctgggacccgcagcatggctgagggaagcttcagcgtgcaatcggaaagctacagtgttgaagacatggatgagggtagcgacgaagtcggggaggaagagatggttgaaggcaacgactatgaagaattcggtgcgtttggtggctatggcaccctcaccagctttgacatccatatcctcagagccttcggaagcttgggtccaggccttcgcatcttatcgaatgagccctgggaactggaaaaccctgtgctggcccagaccctggtggaggcattgcagctggatccggaaacacttgccaatgagacggccgcccgtgctgccaacgtagcccgcgccgccgcctccaaccgtgcggctcgggccgctgccgccgctgcccgtaccgccttcagtcaggtggtcgctagccaccgggtggccacgccgcaggtctcaggagaggatacccagcccacgacctacgccgccgaggctcaggggcccacccctgagccaccccttgcttctccgcagacctcccagatgttagtcaccagtaagatggctgcccccgaggctccggcaacctccgcacagtcccagacaggctccccggcccaggaggctgctactgagggccctagtagcgcctgtgctttctctcaggctccgtgtgccagggaggtggacgccaaccggcccagcacagccttcctgggccagaatgatgtcttcgatttcactcagccggcaggtgtcagtggcatggccttcccgcgccccaagagacctgccccagcccaagaggctgccacagagggccccagtgctgcctctggtgtgccccagacgggacctggcagggaggtggcagccacccggcccaagaccaccaagtcggggaaggcgctggccaagactcggtgggtggagcctcagaatgttgtggcagcagctgctgccaaggccaagatggccacgagcatccctgagccggagggtgcagctgctgccactgctcagcacagtgctgagccctgggccaggatgggaggcaagaggaccaagaagtccaagcacctggatgatgagtatgagagcagcgaggaggagagagagactcccgcggtcccacccacctggagagcatcacagccctcattgacggtgcgggctcagttggcccctcggcccccgatggccccgaggtcccagataccctcaaggcacgtactgtgcctgcccccccgcaacgtgacccttctgcaggagagggcaaataagttggtgaaatacctgatgattaaggactacaagaagatccccatcaagcgcgcagacatgctgaaggatgtcatcagagaatatgatgaacatttccctgagatcattgaacgagcaacgtacaccctggaaaagaagtttgggatccacctgaaggagatcgacaaggaagaacacctgtatattcttgtctgcacacgggactcctcagctcgcctccttggaaaaaccaaggacactcccaggctgagtctcctcttggtgattctgggcgtcatcttcatgaatggcaaccgtgccagcgaggctgtcctctgggaggcactacgcaagatgggactgcgccctggggtgaggcacccattcctcggcgatctgaggaagctcatcacagatgactttgtgaagcagaagaacccggagctcagagaggagacgcctctgagcatggctcccagctggtacctggaatacaagaagatccccaacagcaacccacctgagtatgaattcctctggggcctgcgagcccgccatgagaccagcaagatgagggtcctgagattcatcgcccagaatcagaaccgagacccccgggaatggaaggctcatttcttggaggctgtggatgatgctttcaagacaatggatgtggatatggccgaggaacatgccagggcccagatgagggcccagatgaatatcggggatgaagcgctgattggacggtggagctgggatgacatacaagtcgagctcctgacctgggatgaggacggagattttggcgatgcctgggccaggatcccctttgctttctgggccagataccatcagtacattctgaatagcaaccgtgccaacaggagggccacgtggagagctggcgtcagcagtggcaccaatggaggggccagcaccagcgtcctagatggccccagcaccagctccaccatccggaccagaaatgctgccagagctggcgccagcttcttctcctggatccagcaccgttgacgaactgcagcgatcttactggccaagccagagcgcctcctctcagattccttctcgacacagcaccctaggcggcttcttcctgtcagtcggaggtggcatgcaagatgaagctctctttgctcttcctgctttcattttgtgcttttccttgtgttttcatgttttgggtatcagtgttacattaaagttgcaaaattaa

SEQ ID NO: 17664 - DNA, 2578 bp, Homo sapiens
  source 1..2578: mol_type = unassigned DNA
gggggtgcacggagaaaaggggcggggtggtccgggctgctgtgctggcagcagtaggcgagggcgcggctgcggggttcctggtgctgaggacggacgccattggagttcccgagaaggctgagctctcatctccctgggacccgcagcatggctgagggaagcttcagcgtgcaatcggaaagctacagtgttgaagacatggatgagggtagcgacgaagtcggggaggaagagatggttgaaggcaacgactatgaagaattcggtgcgtttggtggctatggcaccctcaccagctttgacatccatatcctcagagccttcggaagcttgggtccaggccttcgcatcttatcgaatgagccctgggaactggaaaaccctgtgctggcccagaccctggtggaggcattgcagctggatccggaaacacttgccaatgagacggccgcccgtgctgccaacgtagcccgcgccgccgcctccaaccgtgcggctcgggccgctgccgccgctgcccgtaccgccttcagtcaggtggtcgctagccaccgggtggccacgccgcaggtctcaggagaggatacccagcccacgacctacgccgccgaggctcaggggcccacccctgagccaccccttgcttctccgcagacctcccagatgttagtcaccagtaagatggctgcccccgaggctccggcaacctccgcacagtcccagacaggctccccggcccaggaggctgctactgagggccctagtagcgcctgtgctttctctcaggctccgtgtgccagggaggtggacgccaaccggcccagcacagccttcctgggccagaatgatgtcttcgatttcactcagccggcaggtgtcagtggcatggccttcccgcgccccaagagacctgccccagcccaagaggctgccacagagggccccagtgctgcctctggtgtgccccagacgggacctggcagggaggtggcagccacccggcccaagaccaccaagtcggggaaggcgctggccaagactcggtgggtggagcctcagaatgttgtggcagcagctgctgccaaggccaagatggccacgagcatccctgagccggagggtgcagctgctgccactgctcagcacagtgctgagccctgggccaggatgggaggcaagaggaccaagaagtccaagcacctggatgatgagtatgagagcagcgaggaggagagagagactcccgcggtcccacccacctggagagcatcacagccctcattgacggtgcgggctcagttggcccctcggcccccgatggccccgaggtcccagataccctcaaggcacgtactgtgcctgcccccccgcaacgtgacccttctgcaggagagggcaaataagttggtgaaatacctgatgattaaggactacaagaagatccccatcaagcgcgcagacatgctgaaggatgtcatcagagaatatgatgaacatttccctgagatcattgaacgagcaacgtacaccctggaaaagaagtttgggatccacctgaaggagatcgacaaggaagaacacctgtatattcttgtctgcacacgggactcctcagctcgcctccttggaaaaaccaaggacactcccaggctgagtctcctcttggtgattctgggcgtcatcttcatgaatggcaaccgtgccagcgaggctgtcctctgggaggcactacgcaagatgggactgcgccctggggtgaggcacccattcctcggcgatctgaggaagctcatcacagatgactttgtgaagcagaagtacctggaatacaagaagatccccaacagcaacccacctgagtatgaattcctctggggcctgcgagcccgccatgagaccagcaagatgagggtcctgagattcatcgcccagaatcagaaccgagacccccgggaatggaaggctcatttcttggaggctgtggatgatgctttcaagacaatggatgtggatatggccgaggaacatgccagggcccagatgagggcccagatgaatatcggggatgaagcgctgattggacggtggagctgggatgacatacaagtcgagctcctgacctgggatgaggacggagattttggcgatgcctgggccaggatcccctttgctttctgggccagataccatcagtacattctgaatagcaaccgtgccaacaggagggccacgtggagagctggcgtcagcagtggcaccaatggaggggccagcaccagcgtcctagatggccccagcaccagctccaccatccggaccagaaatgctgccagagctggcgccagcttcttctcctggatccagcaccgttgacgaactgcagcgatcttactggccaagccagagcgcctcctctcagattccttctcgacacagcaccctaggcggcttcttcctgtcagtcggaggtggcatgcaagatgaagctctctttgctcttcctgctttcattttgtgcttttccttgtgttttcatgttttgggtatcagtgttacattaaagttgcaaaattaa

SEQ ID NO: 17665 - DNA, 2510 bp, Homo sapiens
  source 1..2510: mol_type = unassigned DNA
gcagtaggcgagggcgcggctgcggggttcctggtgctgaggacggacgccattggagttcccgagaagcatggctgagggaagcttcagcgtgcaatcggaaagctacagtgttgaagacatggatgagggtagcgacgaagtcggggaggaagagatggttgaaggcaacgactatgaagaattcggtgcgtttggtggctatggcaccctcaccagctttgacatccatatcctcagagccttcggaagcttgggtccaggccttcgcatcttatcgaatgagccctgggaactggaaaaccctgtgctggcccagaccctggtggaggcattgcagctggatccggaaacacttgccaatgagacggccgcccgtgctgccaacgtagcccgcgccgccgcctccaaccgtgcggctcgggccgctgccgccgctgcccgtaccgccttcagtcaggtggtcgctagccaccgggtggccacgccgcaggtctcaggagaggatacccagcccacgacctacgccgccgaggctcaggggcccacccctgagccaccccttgcttctccgcagacctcccagatgttagtcaccagtaagatggctgcccccgaggctccggcaacctccgcacagtcccagacaggctccccggcccaggaggctgctactgagggccctagtagcgcctgtgctttctctcaggctccgtgtgccagggaggtggacgccaaccggcccagcacagccttcctgggccagaatgatgtcttcgatttcactcagccggcaggtgtcagtggcatggccttcccgcgccccaagagacctgccccagcccaagaggctgccacagagggccccagtgctgcctctggtgtgccccagacgggacctggcagggaggtggcagccacccggcccaagaccaccaagtcggggaaggcgctggccaagactcggtgggtggagcctcagaatgttgtggcagcagctgctgccaaggccaagatggccacgagcatccctgagccggagggtgcagctgctgccactgctcagcacagtgctgagccctgggccaggatgggaggcaagaggaccaagaagtccaagcacctggatgatgagtatgagagcagcgaggaggagagagagactcccgcggtcccacccacctggagagcatcacagccctcattgacggtgcgggctcagttggcccctcggcccccgatggccccgaggtcccagataccctcaaggcacgtactgtgcctgcccccccgcaacgtgacccttctgcaggagagggcaaataagttggtgaaatacctgatgattaaggactacaagaagatccccatcaagcgcgcagacatgctgaaggatgtcatcagagaatatgatgaacatttccctgagatcattgaacgagcaacgtacaccctggaaaagaagtttgggatccacctgaaggagatcgacaaggaagaacacctgtatattcttgtctgcacacgggactcctcagctcgcctccttggaaaaaccaaggacactcccaggctgagtctcctcttggtgattctgggcgtcatcttcatgaatggcaaccgtgccagcgaggctgtcctctgggaggcactacgcaagatgggactgcgccctggggtgaggcacccattcctcggcgatctgaggaagctcatcacagatgactttgtgaagcagaagtacctggaatacaagaagatccccaacagcaacccacctgagtatgaattcctctggggcctgcgagcccgccatgagaccagcaagatgagggtcctgagattcatcgcccagaatcagaaccgagacccccgggaatggaaggctcatttcttggaggctgtggatgatgctttcaagacaatggatgtggatatggccgaggaacatgccagggcccagatgagggcccagatgaatatcggggatgaagcgctgattggacggtggagctgggatgacatacaagtcgagctcctgacctgggatgaggacggagattttggcgatgcctgggccaggatcccctttgctttctgggccagataccatcagtacattctgaatagcaaccgtgccaacaggagggccacgtggagagctggcgtcagcagtggcaccaatggaggggccagcaccagcgtcctagatggccccagcaccagctccaccatccggaccagaaatgctgccagagctggcgccagcttcttctcctggatccagtaagagtttcggcaccgttgacgaactgcagcgatcttactggccaagccagagcgcctcctctcagattccttctcgacacagcaccctaggcggcttcttcctgtcagtcggaggtggcatgcaagatgaagctctctttgctcttcctgctttcattttgtgcttttccttgtgttttcatgttttgggtatcagtgttacattaaagttgcaaaattaa

SEQ ID NO: 17666 - DNA, 2650 bp, Homo sapiens; identical to SEQ ID NO: 17663
  source 1..2650: mol_type = unassigned DNA

SEQ ID NO: 17667 - DNA, 2482 bp, Homo sapiens
  source 1..2482: mol_type = unassigned DNA
cggctgcggggttcctggtgctgaggacggacgccattggagttcccgagaagcatggctgagggaagcttcagcgtgcaatcggaaagctacagtgttgaagacatggatgagggtagcgacgaagtcggggaggaagagatggttgaaggcaacgactatgaagaattcggtgcgtttggtggctatggcaccctcaccagctttgacatccatatcctcagagccttcggaagcttgggtccaggccttcgcatcttatcgaatgagccctgggaactggaaaaccctgtgctggcccagaccctggtggaggcattgcagctggatccggaaacacttgccaatgagacggccgcccgtgctgccaacgtagcccgcgccgccgcctccaaccgtgcggctcgggccgctgccgccgctgcccgtaccgccttcagtcaggtggtcgctagccaccgggtggccacgccgcaggtctcaggagaggatacccagcccacgacctacgccgccgaggctcaggggcccacccctgagccaccccttgcttctccgcagacctcccagatgttagtcaccagtaagatggctgcccccgaggctccggcaacctccgcacagtcccagacaggctccccggcccaggaggctgctactgagggccctagtagcgcctgtgctttctctcaggctccgtgtgccagggaggtggacgccaaccggcccagcacagccttcctgggccagaatgatgtcttcgatttcactcagccggcaggtgtcagtggcatggccttcccgcgccccaagagacctgccccagcccaagaggctgccacagagggccccagtgctgcctctggtgtgccccagacgggacctggcagggaggtggcagccacccggcccaagaccaccaagtcggggaaggcgctggccaagactcggtgggtggagcctcagaatgttgtggcagcagctgctgccaaggccaagatggccacgagcatccctgagccggagggtgcagctgctgccactgctcagcacagtgctgagccctgggccaggatgggaggcaagaggaccaagaagtccaagcacctggatgatgagtatgagagcagcgaggaggagagagagactcccgcggtcccacccacctggagagcatcacagccctcattgacggtgcgggctcagttggcccctcggcccccgatggccccgaggtcccagataccctcaaggcacgtactgtgcctgcccccccgcaacgtgacccttctgcaggagagggcaaataagttggtgaaatacctgatgattaaggactacaagaagatccccatcaagcgcgcagacatgctgaaggatgtcatcagagaatatgatgaacatttccctgagatcattgaacgagcaacgtacaccctggaaaagaagtttgggatccacctgaaggagatcgacaaggaagaacacctgtatattcttgtctgcacacgggactcctcagctcgcctccttggaaaaaccaaggacactcccaggctgagtctcctcttggtgattctgggcgtcatcttcatgaatggcaaccgtgccagcgaggctgtcctctgggaggcactacgcaagatgggactgcgccctggggtgaggcacccattcctcggcgatctgaggaagctcatcacagatgactttgtgaagcagaagtacctggaatacaagaagatccccaacagcaacccacctgagtatgaattcctctggggcctgcgagcccgccatgagaccagcaagatgagggtcctgagattcatcgcccagaatcagaaccgagacccccgggaatggaaggctcatttcttggaggctgtggatgatgctttcaagacaatggatgtggatatggccgaggaacatgccagggcccagatgagggcccagatgaatatcggggatgaagcgctgattggacggtggagctgggatgacatacaagtcgagctcctgacctgggatgaggacggagattttggcgatgcctgggccaggatcccctttgctttctgggccagataccatcagtacattctgaatagcaaccgtgccaacaggagggccacgtggagagctggcgtcagcagtggcaccaatggaggggccagcaccagcgtcctagatggccccagcaccagctccaccatccggaccagaaatgctgccagagctggcgccagcttcttctcctggatccagcaccgttgacgaactgcagcgatcttactggccaagccagagcgcctcctctcagattccttctcgacacagcaccctaggcggcttcttcctgtcagtcggaggtggcatgcaagatgaagctctctttgctcttcctgctttcattttgtgcttttccttgtgttttcatgttttgggtatcagtgttacattaaagttgcaaaattaa

SEQ ID NO: 17668 - DNA, 3699 bp, Homo sapiens
  source 1..3699: mol_type = unassigned DNA
agagccagtctgcgcctgcgcggactgcggcagagggcggggtgtgagaagcagagtacagtgagactagcattcactgctggccagtgcctgcctttttcaccacctctaatttcagcttcagcagttgcttggaactttggttctggcagcagcagcaacatcattaccgctagcggcagttttgtgccgaggcacctacacacctcccgtcctctctgccagatcgcgggcctgtcggtgtctgctcctacacgccaacgccggtgggcaggaccatgtctctggtaagccagaattcgcgccgccgccgccgccgcgttgcaaaggctactgcgcacaacagcagctggggcgaaatgcaggcccctaatgcccccggtctccccgctgatgtgccaggctcagacgtcccccagggtcccagcgattcccagatcctccagggcctctgcgcctctgagggcccaagcacctccgttctgcccacctccgctgagggcccaagcacctttgtgccgcccaccatctctgaggcctcaagcgcctccgggcagcccaccatctctgagggacctggcacctccgtgctgcccacccccagtgagggcctaagcacctccgggcctcccaccatctctaaggggctgtgcacctctgtgacgcttgccgcctctgagggccggaacacctccaggccgcccacttcctctgaggaacctagcacctccgtgccgcccaccgcctctgaggtaccgagcacctccctgccgcccacccctggtgagggaacgagcacctccgtgccgcccacagcctatgagggaccaagcacctccgtggtgcccacccctgatgagggaccaagcacctccgtgctgcctacacctggtgagggaccaggcacctccgtgccgctcgccgccactgagggcctgagcacctccgtgcaggccactcctgatgagggaccgagcacctccgtgccgcccaccgccactgagggcctaagcacccccgtgccacccacccgtgatgagggaccgagcacctccgtgccggccactcctggtgagggaccgagcacctccgtgctgcccgccgcctctgacggacaaagcatctccttggtgcccacccgcggtaagggatcaagcacctccgtgccccccaccgccaccgagggcctgagcacctccgtgcagcccactgctggtgagggatcgagcacctccgtgccgcccacccctggtgggggactgagcacctccgtgccgcccaccgccactgaggagttgagcacctccgtgccgcccactcccggtgagggaccaagcacttccgtactgccaatccccggtgagggactgagcacctctgtgccgcccaccgcctctgatggatcggacacctccgtgccgcccactcctggtgagggcgcaagcaccttagtgcagcccaccgcccctgacggaccgggaagctccgtgctgcctaaccctggtgagggcccgagcacattgtttagctctagtgcttctgtggaccggaacccctccaagtgttcccttgttttgccaagccctagggtaaccaaggcctccgtggactcagattctgagggtcctaagggtgcagaaggccctatagaattcgaggtcctgagagactgtgagagccccaactccattagtattatgggcctcaatacttcccgggttgcaattaccctgaagccccaagaccctatggaacagaacgtagctgagctgttgcagttcctgctggtgaaggatcagagcaagtaccctatccgggagtctgaaatgcgggaatatattgttaaagaatatcgcaaccagtttcctgagatactcaggcgagcagcagcccacctggagtgcatttttaggtttgaattgagagaacttgaccctgaggcacacacctacattctgttaaacaaactgggacctgtgccctttgaagggttagaagagagcccaaatgggccaaagatgggcctcctgatgatgattctaggccaaatattcctgaatggcaaccaagccaaggaggctgagatttgggaaatgctctggaggatgggggtgcagcgggaaaggaggctttccatttttgggaacccaaagagacttctgtctgtggagtttgtatggcagcgttacttagactacaggccagtaactgactgtaaaccagtggagtatgagtttttctggggcccaagatcccacctagaaaccaccaagatgaaaattctgaagttcatggcgaaaatatataacaaagatcctatggattggccagagaaatacaacgaagctctggaagaagatgctgccagagcctttgctgagggttggcaggctctccctcactttaggaggcccttttttgaggaagctgctgcagaggtaccatcccctgattcagaggtttccagctattcctcaaaatatgccccacattcatggcctgagtcaagattggagagcaaggcaaggaagctggtgcagttatttctgcttatggattcaactaagctgcctataccaaagaaaggaattctgtactacattggccgagagtgcagcaaagtgttccctgacctcctgaatcgtgctgcccgcaccctgaaccatgtctatgggacagaactagtggtacttgatcccaggaatcactcctatactctgtacaaccgaagggagatggaagaaactgaggagatcgtagacagtccaaacaggcctggcaacaactttttgatgcaggtcctaagcttcatctttattatgggcaaccatgccagggagtctgcagtctgggcctttctgcggggcttaggggttcaagctgggagaaagcatgtgattacctgcagatacttgagtcagcgctatatagacagtttacgggttcctgacagtgatccagtgcaatatgagtttgtatggggtcctagagcccgtttggaaacctctaagatgaaagccttgcgatatgtggccagaatccacagaaaggaaccacaggactggccacagcagtacagggaggcaatggaagatgaggccaatagagctgatgttgggcacaggcaaatctttgttcacaacttcaggtagaggaatgcatggcagtcagaggggccttgcaaggaggggcctttgagcctcagttctcatgtattggggggtgggggtgggtacatattgtatttggtatttgtgttccagttatatttatgtcttttcatatttagttctggtgtggtgtctggaaatgtttcaactgttttaatatattgtctgattgggtaaatgtgattgaccacttgctgtctctgttgtattttggtatgagttttgatagctctataaaatgttttggaaatctttccatcttgttgcattatctagaaaagaatatagcatatagctatagatataggcttttccttgaaagcttgaaaaaaattcgccagtaaaataatctagcttaaagtgataaactaacaaacaaatataacaacaactgaaaaggcactctaaattgtggctggcttccctttctgtctgctattgtatgaagaatactgatgtttacctgtatttgctttgctgtactaaaatgtaatgaaaaataaaagattaataaatgaaacataatgct

SEQ ID NO: 17669 - DNA, 2257 bp, Homo sapiens
  source 1..2257: mol_type = unassigned DNA
aacgctctgaggcttgcagtcgttgctggccagcacttgtgtagaaagatcgctcttcacaccagatttcacttttgatccttccagctccagggtctcgggcttcagctttgtgccgaggcaccaacactgctgcggtcctctctccgactgatcgctgatctcaccgttcccgctcctgtctcctggaaccatgtctctggtaagccagaatgcacgccactgtagcgcagagatcactgcagattacggcgacggcagaggtgaaatacaagctactaacgcctccgggtcccccacctccatgctagtcgttgatgccccccagtgccctcaggcgccaatcaactctcagtgtgtcaacacttcccaggccgttcaggacccgaatgacctggaggtcctgatcgacgagcagtccagacgtttgggggcgctcagggtccatgaccctctagaagacaggtcgattgctttggtgaatttcatgagaatgaaaagccagacggaggggtctatccagcagtccgagatgctggagtttctcagagagtactcagatcagttccctgagatcctcagacgagcctcagctcacctggaccaggtctttgggttgaacctgagagttattgatcctcaggctgacacctacaatttagtcagcaaacggggtttccagatcaccgataggatagcggagtccctggacatgccaaaagcaagtctcctggccctagtcctaggccacatcctcttgaatgggaaccgagcaagagaggcctccatttgggacttgctgctaaaagttgatatgtgggataagcctcagaggatcaacaacctctttgggaacacaaggaacctcctcactactgactttgtgtgcatgcgattcttggagtactggccggtgtatggcactaatccccttgagtttgagttcttgtggggctctagagcccacagggaaatcacaaagatggaagccctgaagtttgtgtcagatgcccatgatgaagaaccctggagctggccagaagaatataataaggccctggaaggtgacaaaaccaaagaaagaagcctgactgctggcttagagttctggtcggaggacactatgaatgataaggcaaatgatttggtccagttggctattagtgtcactgaggagatgctgcctatacatcaggatgagctattggctcacactggcaaagaatttgaggatgtgttcccaaatatcctcaatagagctactctaattcttgatatgttctatgggttgtctctgattgaggttgataccagtgagcacatctacctccttgtccagcaaccagaatcagaggaagagcaagtgatgctagagagcctggggagacccactcaagaatatgtaatgccaatcctaggtttgatcttcctgatgggcaaccgtgtcaaagaggccaatgtctggaacttgcttcgaagatttagtgtggatgtagggagaaagcattccatcacccgtaagcttatgagacagcgctatctggaatgcaggccactgtcctactctaatccagttgaatatgagcttctatggggtcctcgagctcaccatgaaaccatcaaaatgaaagtcttggagtacatggccaggctctacagaaagcgaccacagaactggccagaacaatatagggaggctgtggaagatgaggaggccagagccaaatctgaggcaactatcatgtttttccttgaccccacgtgaagtctagggaatatgtatcacttcagctgagtggcataagttaaagatgccttggtaaaataggcattggggctctaaattagaatccaggtagggcttgtgtgggaagtacaaattgtgcttgctgtctgtgttccaattctagtagtatttccttccttttaatatactcttggattaggttaatgaccaatatttataaatggaatttttcatttgccatcccggtcttgtttcagcataaaagttcagacagctctgtaaaatgtattgataatatttacatctttgaaataatcagtaaaatggtctggtacaggagttaaataacaatgacacacacacaacaaaacaaacacaaaaccactgatctgtgattgctctccctttgtgtctactgccgtatacatatatacaactatatatacacaaatatatatatacacaaaactgtcatttacctgtatttgcaataaaagcataatgaattag

SEQ ID NO: 17670 - DNA, 1681 bp, Homo sapiens
  source 1..1681: mol_type = unassigned DNA
gcgggcgcggactgaggctgcgcgccgcaggttccggctgctggcggcgttgcggccgcaggtttgactcccgtgcggtgcggcccagcagccacaaagctcccgctgccattgctccttgtactcccgccgtcactgccgctgtccaacccctcccccggggcttgcgcggcggctcccacacccctcggcccgtgtacgcgctctgcacctgcctgcccgaaaacatgttgcagacaccagagagcagggggctcccggtcccgcaggccgagggggagaaggatggcggccatgatggtgagacccgggccccgaccgcctcgcaggagcgccccaaggaggagcttggcgccgggagggaggagggggctgcggagcccgccctcacccggaaaggcgcgagggccttggcggccaaagccttggcaaggcgcagggcctaccgccggctgaatcggacggtggcggagttggtgcagttcctcctggtgaaagacaagaagaagagtcccatcacacgctcggagatggtgaaatacgttattggagacttgaagattctgttcccggacatcatcgcaagggccgcagagcatctgcggtatgtctttggttttgagctgaaacagtttgaccgcaagcaccacacttacatcctgatcaacaaactaaaacctctggaggaggaggaggaggaggatctgggaggagatggccccagattgggtctgttaatgatgatcctgggccttatctatatgagaggtaatagcgccagggaggcccaggtctgggagatgctgcgtcggttgggggtgcaaccctcaaagtatcatttcctctttgggtatccgaagaggcttattatggaagattttgtgcagcagcgatatctcagttacaggcgggtgcctcacaccaatccaccagaatatgaattctcttggggtccccgaagcaacctggaaatcagcaagatggaagtcctggggttcgtggccaaactgcataagaaggaaccgcagcactggccagtgcagtaccgtgaggccctagcagacgaggccgacagggccagagccaaggccagagctgaagccagtatgagggccagggccagtgctagggccggcatccacctctggtgagggttggtgaaaagttggccagtgggtccccgtgaggacgaactactgtcctgagtcataagtaatatgggtggggcgagggtcttatttctgtagaaatcgtgtgactttaaggatttagattttgtatcttatgttttgtaacatttaataattactgttaaaatgctgtttgtaaatgagattggtctactttttcctgtaggattttattgtagagttttgctggttttgtaaaatggatggaagaactttgtatttatactgtgattttgaacagattatgcaacattggaaggaaggctgtactttgatggtttgaaggaactcagcagtatgatgatctggttccaggggaaaaaaatagctggttggtgtctagccccccaacacttttgtctgttgtgtataaaagaagaaagactggcatgtaccttcatttgcttagctatttgagtatctagagaaaaattaaaatgcaatgagttagcagtataccctggcacacttaataaattaaacatttgtgg

SEQ ID NO: 17671 - DNA, 611 bp, Homo sapiens
  source 1..611: mol_type = unassigned DNA
cttctaggtggtgtgggcgaagtttgggactggtttagggcggggacaagaccaagaacacaagtttccttgtactacgggagagagggaggggaggaaattggagaccccagcacccccttgctcactctcttgctcacagtccacgatggcccggtccctggtgtgccttggtgtcatcatcttgctgtctgccttctccggacctggtgtcaggggtggtcctatgcccaagctggctgaccggaagctgtgtgcggaccaggagtgcagccaccctatctccatggctgtggcccttcaggactacatggcccccgactgccgattcctgaccattcaccggggccaagtggtgtatgtcttctccaagctgaagggccgtgggcggctcttctggggaggcagcgttcagggagattactatggagatctggctgctcgcctgggctatttccccagtagcattgtccgagaggaccagaccctgaaacctggcaaagtcgatgtgaagacagacaaatgggatttctactgccagtgagctcagcctaccgctggccctgccgtttcccctccttggctttatgcaaatacaatcagcccagtgc

SEQ ID NO: 17672 - DNA, 1140 bp, Homo sapiens
  source 1..1140: mol_type = unassigned DNA
ccggggagtaggaaggagccggggctgtagccggagtggagcggctgccagccgaggagcaggcgcggccgcggcgccatattgcggccctcagcggccgcgaccgagtcatggctgagacctacgacttcctcttcaaattcctggtgattggcagtgcaggaactggcaaatcatgtctccttcatcagttcattgagaataagttcaaacaggactccaaccacacaatcggcgtggagtttggatcccgggtggtcaacgtgggtgggaagactgtgaagctacagatttgggacacggctggccaggagcggtttcggtcagtgacgcggagttattaccgaggggcggctggagccctgctggtgtacgacatcaccagccgggagacatacaactcactggctgcctggctgacggatgcccgcaccctggccagccccaacatcgtggtcatcctctgtggcaacaagaaggacctggaccctgagcgggaggtcactttcctggaggcctcccgctttgcccaggagaatgagctgatgttcctggagaccagcgctctcacaggcgagaacgtggaggaggcgttcctcaagtgtgcccgcactatcctcaacaagattgactcaggcgagctagacccggagaggatgggctctggcattcagtacggggatgcgtccctccgccagcttcggcagcctcggagtgcccaggccgtggcccctcagccgtgtggctgctgagctctgtggagccagctcacctgttctccaggaccagccctgctggggcccaggcccaggctctgagaggccgtgtcctaacctgccctggccccggagaagctacgttgccacctgtcccccttccctggcctggtggggcctggctttggggcaagactgagccacgggggaagggggaatcccgtacctgctgctgcttcctctgtcttggctaacgtctgtccccctgaacccctaaccataccccaagagctcccaaagcctgagaccagggtcatttgtccccaactccccatctggccctgctgttgctagtacctgttatttattacctggaggcctgtccagcacccaccctacccccataaagcattgtttacacctg

SEQ ID NO: 17673 - DNA, 943 bp, Homo sapiens
  source 1..943: mol_type = unassigned DNA
ggctgccagccgaggagcaggcgcggccgcggcgccatattgcggccctcagcggccgcgaccgagtcatggctgagacctacgacttcctcttcaaattcctggtgattggcagtgcaggaactggcaaatcatgtctccttcatcagttcattgagaataagttcaaacaggactccaaccacacaatcggcgtggagtttggatcccgggtggtcaacgtgggtgggaagactgtgaagctacagatttgggacacggctggccaggagcggtttcggtcagtgacgcggagttattaccgaggggcggctggagccctgctggtgtacgacatcaccagagctgatgttcctggagaccagcgctctcacaggcgagaacgtggaggaggcgttcctcaagtgtgcccgcactatcctcaacaagattgactcaggcgagctagacccggagaggatgggctctggcattcagtacggggatgcgtccctccgccagcttcggcagcctcggagtgcccaggccgtggcccctcagccgtgtggctgctgagctctgtggagccagctcacctgttctccaggaccagccctgctggggcccaggcccaggctctgagaggccgtgtcctaacctgccctggccccggagaagctacgttgccacctgtcccccttccctggcctggtggggcctggctttggggcaagactgagccacgggggaagggggaatcccgtacctgctgctgcttcctctgtcttggctaacgtctgtccccctgaacccctaaccataccccaagagctcccaaagcctgagaccagggtcatttgtccccaactccccatctggccctgctgttgctagtacctgttatttattacctggaggcctgtccagcacccaccctacccccataaagcattgtttacacctg

SEQ ID NO: 17674 - DNA, 1015 bp, Homo sapiens
  source 1..1015: mol_type = unassigned DNA
aggtagacagaaaagttctccaagtcctcaccggcccagaggcccagccatcttcacctctcaagctgtctgtagaggtccacgtgtcaagaaaactgaggacagaggccctcagtccagttcccacaagcaactgcatctccccaacagctgcctgaatgagtttggaagcagtcctcccaccattcagccttcagatgaaactgcacccctggctgacaggctgattgcagccttatagcagaccttaagcctgagacattcgacccacagaaaaggtgataattttggtctttttttttctaaacaggttcttgctctagagtgcagtggcacgatcatggctcactgcggcctctacatcctgggttcaagtggtcctcccacctcaacctcctgagtggctgggactacagtccacgatggcccggtccctggtgtgccttggtgtcatcatcttgctgtctgccttctccggacctggtgtcaggggtggtcctatgcccaagctggctgaccggaagctgtgtgcggaccaggagtgcagccaccctatctccatggctgtggcccttcaggactacatggcccccgactgccgattcctgaccattcaccggggccaagtggtgtatgtcttctccaagctgaagggccgtgggcggctcttctggggaggcagcgttcagggagattactatggagatctggctgctcgcctgggctatttccccagtagcattgtccgagaggaccagaccctgaaacctggcaaagtcgatgtgaagacagacacttcctcttcaaattcctggtgattggcagtgcaggaactggcaaatcatgtctccttcatcagttcattgagaataagttcaaacaggactccaaccacacaatcggcgtggagtttggatcccgggtggtcaacgtgggtgggaagactgtgaagctacagatttgggacacggctggccaggagcggtttcggtcagtgacgcggagttattaccga

SEQ ID NO: 17675 - DNA, 4748 bp, Homo sapiens
  source 1..4748: mol_type = unassigned DNA
atggactcagtacctgccactgtgccttctatcgccgctaccccgggggacccggaacttgtgggacccttgtctgtgctctacgcagccttcatagccaagctgctggagctagttgctacattgcctgatgatgttcagcctgggcctgatttttatggactgccatggaaacctgtatttatcactgccttcttgggaattgcttcgtttgccattttcttatggagaactgtccttgttgtgactgatacattggtttcagtcacggaacagcaaatttctgagaagttgaagactatcatgaaagaaaatacagaacttgtacaaaaattgtcaaattatgaacagaagatcaaggaatcaaagaaacatgttcaggaaaccaggaaacaaaatatgattctctctgatgaagcaattaaatataaggataaaatcaagacacttgaaaaaaatcaggaaattctggatgacacagctaaaaatcttcgtgttatgctagaatctgagagagaacagaatgtcaagaatcaggacttgatatcagaaaacaagaaatctatagagaagttaaaggatgttatttcaatgaatgcctcagaattttcagaggttcagattgcacttaatgaagctaagcttagtgaagagaaggtgaagtctgaatgccatcgggttcaagaagaaaatgctaggcttaagaagaaaaaagagcagttgcagcaggaaatcgaagactggagtaaattacatgctgagctcagtgagcaaatcaaatcatttgagaagtctcagaaagatttggaagtagctcttactcacaaggatgataatattaatgctttgactaactgcattacacagttgaatctgttagagtgtgaatctgaatctgagggtcaaaataaaggtggaaatgattcagatgaattagcaaatggagaagtgggaggtgaccggaatgagaagatgaaaaatcaaattaagcagatgatggatgtctctcggacacagactgcaatatcggtagttgaagaggatctaaagcttttacagcttaagctaagagcctccgtgtccactaaatgtaacctggaagaccaggtaaagaaattggaagatgaccgcaactcactacaagctgccaaagctggactggaagatgaatgcaaaaccttgaggcagaaagtggagattctgaatgagctctatcagcagaaggagatggctttgcaaaagaaactgagtcaagaagagtatgaacggcaagaaagagagcacaggctgtcagctgcagatgaaaaggcagtttcggctgcagaggaagtaaaaacttacaagcggagaattgaagaaatggaggatgaattacagaagacagagcggtcatttaaaaaccagatcgctacccatgagaagaaagctcatgaaaactggctcaaagctcgtgctgcagaaagagctatagctgaagagaaaagggaagctgccaatttgagacacaaattattagaattaacacaaaagatggcaatgctgcaagaagaacctgtgattgtaaaaccaatgccaggaaaaccaaatacacaaaaccctccacggagaggtcctctgagccagaatggctcttttggcccatcccctgtgagtggtggagaatgctcccctccattgacagtggagccacctgtgagacctctctctgctactctcaatcgaagagatatgcctagaagtgaatttggatcagtggacgggcctctacctcatcctcgatggtcagctgaggcatctgggaaaccctctccttctgatccaggatctggtacagctaccatgatgaacagcagctcaagaggctcttcccctaccagggtactcgatgaaggcaaggttaatatggctccaaaagggccccctcctttcccaggagtccctctcatgagcacccccatgggaggccctgtaccaccacccattcgatatggaccaccacctcagctctgcggaccttttgggcctcggccacttcctccaccctttggccctggtatgcgtccaccactaggcttaagagaatttgcaccaggcgttccaccaggaagacgggacctgcctctccaccctcggggatttttacctggacacgcaccatttagacctttaggttcacttggcccaagagagtactttattcctggtacccgattaccacccccaacccatggtccccaggaatacccaccaccacctgctgtaagagacttactgccgtcaggctctagagatgagcctccacctgcctctcagagcactagccaggactgttcacaggctttaaaacagagcccataaaactatgacctctgaggtttcattggaaagaaagtgtactgtgcattatccattacagtaaaggatttcattggcttcaaaatccaaaagtttattttaaaaggtttgttgttagaactaagctgccttggcagtgtgcatttttgagccaaacaattcaaaaatgtcatttcttccctaaataaaaatcaccttttaagctagagcgtccttacaactttgaaatgtgcaataaagaatacctgtgttttagctaatgtagcatatgtaattgcaaaatgatttagaatgtcatgaaaaatatgaacatttcctgtggaaatgctttaagaacatgtatttccattatcctatttttagtgtacaccagctgaatacggagcaatggtgtttataagcgtttttttaaactatctggtcacaaagactgttacgctaaaaatgtttactaaaagatcactaaactatctcccctcttgctgaagttctttgtagtaatagctcataaaaatttgtttattaatatttcccaagtgtctgttgactcattggactgttatgaggcttgtgccatttggggaacatgtaaactcaggctcccagaactgaagatggtggctggtggcacacttccggctgctcctccgtcacctgtgaactctacaagtgacgtctttttatttcaaagaagtttatttcccacttgtatagcattcacatgctttctttacgatcctcattgtctatttgagaatggttttctgagagtgagtttacattagtagcaagagttgtttgacctgatgttccattgtttttaccattcctgtagaaaaagggtgcacaacagaaaaatgaaaatgatgtgtcatggccataaaagtatagaaatctttaaaaattttaaaatgtacagtcccttatctatctttcccattccttgccactgatttttgaggaatataataaaaagattggaagagtataatgccatgagaaagaatgatttaggactgtgagggttataacatgccctaggtcagcaaccaagggttgaaatcagttctgttttagggggaaatgggggcgacagatattattccaaaattaatattaattaatatttaaacgttggtgtttttatttaaaaatcagtaactaaccatctggaattgcaccatacttaaagtcttatccattactacactgtctttaaaacaatgtttctttaaatactctacaacgtttctaagaacgaacttcagacattttaattacagtaataatagcactccttttaaggagtttcagatccacactaaaactaaaatcataaaaggctgatacttttgtttgctgctaggctatattcttccattctttgaagtcctatgatgtaatatttttgaaacctagtgtatgtcttgtcactgttgtgatatttaatcgattaagaataccttgtaaaaaggagcaaaagcttcaatgtgaaacaattttctctctttatactaaacaactgaagatagatagtttagaaagataaggacctttgaaagaagacaactctgtcaaagttcataaggaatataaaaattcttcaggaaaagagaattcaatctatatgtcctcccgtttaatatcaagaatagaagaaattaagaggaaaactccacagaagagcataggccacttttagccatgtaaaaataagattaagtcacaaatacaacttttgaatttacctgtcaatatctctttaggacacaaaacaatgctgaagttaatataatttctaattttaaatgtcatttaagtgtagattatgccatctaggaaggtaagtaggaaaggtaaattaaatctatttttaaaattcaaaatattagagtatttttcccctctaaagccttttttggtgattattctgtatctgacataattgagaaactggtaagctgtaaagattccagtgtagcttctctgagaagttgtgagccagtccataactgcttcctcacatccatctgattgcaccatttctgcagcaaaccccaaagcagggtgccaatatgcagatggcatagggagtatcatccctcagccaaatcacttttccatctctaaagtttcatctattttggaagtcatctccaactaattgtgtctggatttagttgctaaaattgtcttatttatgaagcagcaatattcagcctgaaagcatttctgccatagttgttgtagttatatcgccaatggctgatttttttcattggaaagtaaatttaagtaattcgtgggatgtggtatattctgtgtcaacttcaagataatcactcattttctcgttatattcaggtctgaattaaagttaagttaatcacaca

SEQ ID NO: 17676 - DNA, 7946 bp, Homo sapiens
  source 1..7946: mol_type = unassigned DNA
gaccacaacatggctgcggcgcctgggctgctcgtctggctgctcgtgctccggctgccctggcgggtgccgggccagctggaccccagcactggccggcggttctcggagcacaaactctgcgcggacgacgaatgcagcatgttaatgtaccgcggtgaggctcttgaagatttcacaggcccggattgtcgttttgtgaattttaaaaaaggtgatcctgtatatgtttactataaactggcaagaggatggcctgaagtttgggctggaagtgttggacgcacttttggatattttccaaaagatttaatccaggtagttcatgaatataccaaagaagagctacaagttccaacagatgagacggattttgtttgttttgatggaggaagagatgattttcataattataatgtagaagaacttttagggtttttggaactgtacaattctgcagctacagattctgagaaagctgtagaaaaaactttacaggatatggaaaaaaaccctgaattatctaaggaaagggaacctgaacctgaaccagtagaagccaactcagaggaaagtgatagtgtattctcagaaaacactgaggatcttcaggaacagtttacaactcagaagcaccactcccatgcaaacagccaagcaaatcatgctcagggagagcaggcttcatttgaatcttttgaagaaatgctgcaagataaactaaaagtgccagaaagtgaaaacaacaaaaccagcaatagttctcaggtctcaaatgaacaggataagattgatgcctataaacttttgaaaaaagaaatgactctagacttgaaaaccaaatttggctcaacagctgatgcacttgtatctgatgatgagacaaccagactcgttacttcattagaagatgattttgatgaggaattggatactgagtattatgcagttggaaaggaagatgaggagaaccaagaagactttgatgagttgccattacttacctttacagatggggaagatatgaaaactccagcaaagtctggcgttgagaaatatccaacagataaagagcagaattcaaatgaagaggacaaggttcagctaactgtgccccctggcatcaaaaatgatgataaaaatatactaacaacctggggggacactatcttctctattgtcacaggaggtgaagaaacaagagatacgatggatttagagagctctagttcagaggaagaaaaagaagatgatgatgatgcattagtcccagatagcaaacaggggaaaccacagtcagcaacagattatagtgaccctgacaatgtagatgatggtctttttattgtagacattcctaaaacaaataatgacaaagaagtaaacgcagaacatcacattaaaggaaaagggaggggagttcaggaatccaagaggggcctggtacaagataagacagaattagaggatgaaaatcaagaaggcatgactgtgcacagttctgttcacagcaataacctcaactctatgccagctgctgaaaagggtaaagacacattaaaatcagcttatgatgatacagaaaatgacctaaaaggagcagctattcatatctcaaaaggaatgctccacgaagaaaagcctggagagcagattttggaaggtggctcagagagtgaatctgcacagaaagctgcagggaatcaaatgaatgacagaaagattcaacaggaatccctgggtagtgcaccactcatgggagatgaccaccctaacgcatccagagacagtgtggagggagacgctttggtaaatggggccaaactgcacacgctttcagtggagcatcaacgtgaggaattgaaagaggaattagttcttaaaactcaaaaccaacctagattctcctctccagatgagattgatttgcccagagaactggaagacgaggttcccattctgggaagaaatcttccctggcaacaagaaagagatgtggctgccacagccagtaagcaaatgagtgagaagataaggctctctgagggagaagccaaagaggactccttggatgaagagttttttcatcacaaggcaatgcagggcacagaggtaggacagacagaccaaactgacagcacaggaggaccagctttcctttctaaagtagaagaggatgattatccctctgaagaactactagaggatgaaaacgctataaatgcaaaacggtctaaagaaaaaaaccctgggaatcagggcaggcagtttgatgttaatctgcaagtccctgacagagcagttttagggaccattcatccagatccagaaattgaagaaagcaagcaagaaactagtatgattttggatagcgaaaaaacaagtgagactgctgccaaaggggtcaacacaggaggcagggaaccaaatacaatggtggaaaaagaacgccctctggcagataagaaagcacagagaccatttgaacgaagtgacttttctgacagcataaaaattcagactccagaattaggtgaagtgtttcagaataaagattctgattatctgaagaacgacaaccctgaggaacatctgaagacctcagggcttgcaggggagcctgagggagaactctcaaaagaggaccatgagaacacagagaagtacatgggcacagaaagccaggggtctgctgctgcagaacctgaagatgactcgttccactggactccacatacaagtgtagagccagggcatagtgacaagagggaggacttacttatcataagcagcttctttaaagaacaacagtctttgcagcggttccagaagtactttaatgtccatgagctggaagccttgctacaagaaatgtcatcaaaactgaagtcagcgcagcaggagagcctgccctataatatggaaaaagtcctagataaggtcttccgtgcttctgagtcacaaattctgagcatagcagaaaaaatgcttgatactcgtgtggctgaaaatagagatctgggaatgaacgaaaataacatatttgaagaggctgcagtgcttgatgacattcaagacctcatctattttgtcaggtacaagcactccacagcagaggagacagccacactggtgatggcaccacctctagaggaaggcttgggtggagcaatggaagagatgcaaccactgcatgaagataatttctcacgagagaagacagcagaacttaatgtgcaggttcctgaagaacccacccacttggaccaacgtgtgattggggacactcatgcctcagaagtgtcacagaagccaaatactgagaaagacctggacccagggccagttacaacagaagacactcctatggatgctattgatgcaaacaagcaaccagagacagccgccgaagagccggcaagtgtcacacctttggaaaacgcaatccttctaatatattcattcatgttttatttaactaagtcgctagttgctacattgcctgatgatgttcagcctgggcctgatttttatggactgccatggaaacctgtatttatcactgccttcttgggaattgcttcgtttgccattttcttatggagaactgtccttgttgtgagtaatacagtatattatgtcacggaacagcaaatttctgagaagttgaagactatcatgaaagaaaatacagaacttgtacaaaaattgtcaaattatgaacagaagatcaaggaatcaaagaaacatgttcaggaaaccaggaaacaaaatatgattctctctgatgaagcaattaaatataaggataaaatcaagacacttgaaaaaaatcaggaaattctggatgacacagctaaaaatcttcgtgttatgctagaatctgagagagaacagaatgtcaagaatcaggacttgttgcagcaggaaatcgaagactggagtaaattacatgctgagctcagtgagcaaatcaaatcatttgagaagtctcagaaagatttggaagtagctcttactcacaaggatgataatattaatgctttgactaactgcattacacagttgaatctgttagagtgtgaatctgaatctgagggtcaaaataaaggtggaaatgattcagatgaattagcaaatggagaagtgggaggtgaccggaatgagaagatgaaaaatcaaattaagcagatgatggatgtctctcggacacagactgcaatatcggtagttgaagaggatctaaagcttttacagcttaagctaagagcctccgtgtccactaaatgtaacctggaagaccaggtaaagaaattggaagatgaccgcaactcactacaagctgccaaagctggactggaagatgaatgcaaaaccttgaggcagaaagtggagattctgaatgagctctatcagcagaaggagatggctttgcaaaagaaactgagtcaagaagagtatgaacggcaagaaagagagcacaggctgtcagctgcagatgaaaaggcagtttcggctgcagaggaagtaaaaacttacaagcggagaattgaagaaatggaggatgaattacagaagacagagcggtcatttaaaaaccagatcgctacccatgagaagaaagctcatgaaaactggctcaaagctcgtgctgcagaaagagctatagctgaagagaaaagggaagctgccaatttgagacacaaattattagaattaacacaaaagatggcaatgctgcaagaagaacctgtgattgtaaaaccaatgccaggaaaaccaaatacacaaaaccctccacggagaggtcctctgagccagaatggctcttttggcccatcccctgtgagtggtggagaatgctcccctccattgacagtggagccacctgtgagacctctctctgctactctcaatcgaagagatatgcctagaagtgaatttggatcagtggacgggcctctacctcatcctcgatggtcagctgaggcatctgggaaaccctctccttctgatccaggatctggtacagctaccatgatgaacagcagctcaagaggctcttcccctaccagggtactcgatgaaggcaaggttaatatggctccaaaagggccccctcctttcccaggagtccctctcatgagcacccccatgggaggccctgtaccaccacccattcgatatggaccaccacctcagctctgcggaccttttgggcctcggccacttcctccaccctttggccctggtatgcgtccaccactaggcttaagagaatttgcaccaggcgttccaccaggaagacgggacctgcctctccaccctcggggatttttacctggacacgcaccatttagacctttaggttcacttggcccaagagagtactttattcctggtacccgattaccacccccaacccatggtccccaggaatacccaccaccacctgctgtaagagacttactgccgtcaggctctagagatgagcctccacctgcctctcagagcactagccaggactgttcacaggctttaaaacagagcccataaaactatgacctctgaggtttcattggaaagaaagtgtactgtgcattatccattacagtaaaggatttcattggcttcaaaatccaaaagtttattttaaaaggtttgttgttagaactaagctgccttggcagtgtgcatttttgagccaaacaattcaaaaatgtcatttcttccctaaataaaaatcaccttttaagctagagcgtccttacaactttgaaatgtgcaataaagaatacctgtgttttagctaatgtagcatatgtaattgcaaaatgatttagaatgtcatgaaaaatatgaacatttcctgtggaaatgctttaagaacatgtatttccattatcctatttttagtgtacaccagctgaatacggagcaatggtgtttataagcgtttttttaaactatctggtcacaaagactgttacgctaaaaatgtttactaaaagatcactaaactatctcccctcttgctgaagttctttgtagtaatagctcataaaaatttgtttattaatatttcccaagtgtctgttgactcattggactgttatgaggcttgtgccatttggggaacatgtaaactcaggctcccagaactgaagatggtggctggtggcacacttccggctgctcctccgtcacctgtgaactctacaagtgacgtctttttatttcaaagaagtttatttcccacttgtatagcattcacatgctttctttacgatcctcattgtctatttgagaatggttttctgagagtgagtttacattagtagcaagagttgtttgacctgatgttccattgtttttaccattcctgtagaaaaagggtgcacaacagaaaaatgaaaatgatgtgtcatggccataaaagtatagaaatctttaaaaattttaaaatgtacagtcccttatctatctttcccattccttgccactgatttttgaggaatataataaaaagattggaagagtataatgccatgagaaagaatgatttaggactgtgagggttataacatgccctaggtcagcaaccaagggttgaaatcagttctgttttagggggaaatgggggcgacagatattattccaaaattaatattaattaatatttaaacgttggtgtttttatttaaaaatcagtaactaaccatctggaattgcaccatacttaaagtcttatccattactacactgtctttaaaacaatgtttctttaaatactctacaacgtttctaagaacgaacttcagacattttaattacagtaataatagcactccttttaaggagtttcagatccacactaaaactaaaatcataaaaggctgatacttttgtttgctgctaggctatattcttccattctttgaagtcctatgatgtaatatttttgaaacctagtgtatgtcttgtcactgttgtgatatttaatcgattaagaataccttgtaaaaaggagcaaaagcttcaatgtgaaacaattttctctctttatactaaacaactgaagatagatagtttagaaagataaggacctttgaaagaagacaactctgtcaaagttcataaggaatataaaaattcttcaggaaaagagaattcaatctatatgtcctcccgtttaatatcaagaatagaagaaattaagaggaaaactccacagaagagcataggccacttttagccatgtaaaaataagattaagtcacaaatacaacttttgaatttacctgtcaatatctctttaggacacaaaacaatgctgaagttaatataatttctaattttaaatgtcatttaagtgtagattatgccatctaggaaggtaagtaggaaaggtaaattaaatctatttttaaaattcaaaatattagagtatttttcccctctaaagccttttttggtgattattctgtatctgacataattgagaaactggtaagctgtaaagattccagtgtagcttctctgagaagttgtgagccagtccataactgcttcctcacatccatctgattgcaccatttctgcagcaaaccccaaagcagggtgccaatatgcagatggcatagggagtatcatccctcagccaaatcacttttccatctctaaagtttcatctattttggaagtcatctccaactaattgtgtctggatttagttgctaaaattgtcttatttatgaagcagcaatattcagcctgaaagcatttctgccatagttgttgtagttatatcgccaatggctgatttttttcattggaaagtaaatttaagtaattcgtgggatgtggtatattctgtgtcaacttcaagataatcactcattttctcgttatattcaggtctgaattaaagttaagttaatcacaca

SEQ ID NO: 17677 - DNA, 2735 bp, Homo sapiens
  source 1..2735: mol_type = unassigned DNA
gacgtgttttataggcggcataaagcgaaagtgcaggcagctgtggaaggcgaagttcaatcccagagtccgccccctgaattggggcctttccggaggaggaagctctgaaaaacagggggcccagtgccattccgcagggaattgtcgcttgcgttcagctgttctacacaatggactcagtacctgccactgtgccttctatcgccgctaccccgggggacccggaacttgtgggacccttgtctgtgctctacgcagccttcatagccaagctgctggagctagttgctacattgcctgatgatgttcagcctgggcctgatttttatggactgccatggaaacctgtatttatcactgccttcttgggaattgcttcgtttgccattttcttatggagaactgtccttgttgtgaaggatagagtatatcaagtcacggaacagcaaatttctgagaagttgaagactatcatgaaagaaaatacagaacttgtacaaaaattgtcaaattatgaacagaagatcaaggaatcaaagaaacatgttcaggaaaccaggaaacaaaatatgattctctctgatgaagcaattaaatataaggataaaatcaagacacttgaaaaaaatcaggaaattctggatgacacagctaaaaatcttcgtgttatgctagaatctgagagagaacagaatgtcaagaatcaggacttgatatcagaaaacaagaaatctatagagaagttaaaggatgttatttcaatgaatgcctcagaattttcagaggttcagattgcacttaatgaagctaagcttagtgaagagaaggtgaagtctgaatgccatcgggttcaagaagaaaatgctaggcttaagaagaaaaaagagcagttgcagcaggaaatcgaagactggagtaaattacatgctgagctcagtgagcaaatcaaatcatttgagaagtctcagaaagatttggaagtagctcttactcacaaggatgataatattaatgctttgactaactgcattacacagttgaatctgttagagtgtgaatctgaatctgagggtcaaaataaaggtggaaatgattcagatgaattagcaaatggagaagtgggaggtgaccggaatgagaagatgaaaaatcaaattaagcagatgatggatgtctctcggacacagactgcaatatcggtagttgaagaggatctaaagcttttacagcttaagctaagagcctccgtgtccactaaatgtaacctggaagaccaggtaaagaaattggaagatgaccgcaactcactacaagctgccaaagctggactggaagatgaatgcaaaaccttgaggcagaaagtggagattctgaatgagctctatcagcagaaggagatggctttgcaaaagaaactgagtcaagaagagtatgaacggcaagaaagagagcacaggctgtcagctgcagatgaaaaggcagtttcggctgcagaggaagtaaaaacttacaagcggagaattgaagaaatggaggatgaattacagaagacagagcggtcatttaaaaaccagatcgctacccatgagaagaaagctcatgaaaactggctcaaagctcgtgctgcagaaagagctatagctgaagagaaaagggaagctgccaatttgagacacaaattattagaattaacacaaaagatggcaatgctgcaagaagaacctgtgattgtaaaaccaatgccaggaaaaccaaatacacaaaaccctccacggagaggtcctctgagccagaatggctcttttggcccatcccctgtgagtggtggagaatgctcccctccattgacagtggagccacctgtgagacctctctctgctactctcaatcgaagagatatgcctagaagtgaatttggatcagtggacgggcctctacctcatcctcgatggtcagctgaggcatctgggaaaccctctccttctgatccaggatctggtacagctaccatgatgaacagcagctcaagaggctcttcccctaccagggtactcgatgaaggcaaggttaatatggctccaaaagggccccctcctttcccaggagtccctctcatgagcacccccatgggaggccctgtaccaccacccattcgatatggaccaccacctcagctctgcggaccttttgggcctcggccacttcctccaccctttggccctggtatgcgtccaccactaggcttaagagaatttgcaccaggcgttccaccaggaagacgggacctgcctctccaccctcggggatttttacctggacacgcaccatttagacctttaggttcacttggcccaagagagtactttattcctggtacccgattaccacccccaacccatggtccccaggaatacccaccaccacctgctgtaagagacttactgccgtcaggctctagagatgagcctccacctgcctctcagagcactagccaggactgttcacaggctttaaaacagagcccataaaactatgacctctgaggtttcattggaaagaaagtgtactgtgcattatccattacagtaaaggatttcattggcttcaaaatccaaaagtttattttaaaaggtttgttgttagaactaagctgccttggcagtgtgcatttttgagccaaacaattcaaaaatgtcatttcttccctaaataaaaatcaccttttaagctag

SEQ ID NO: 17678 - DNA, 8123 bp, Homo sapiens
  source 1..8123: mol_type = unassigned DNA
gaccacaacatggctgcggcgcctgggctgctcgtctggctgctcgtgctccggctgccctggcgggtgccgggccagctggaccccagcactggccggcggttctcggagcacaaactctgcgcggacgacgaatgcagcatgttaatgtaccgcggtgaggctcttgaagatttcacaggcccggattgtcgttttgtgaattttaaaaaaggtgatcctgtatatgtttactataaactggcaagaggatggcctgaagtttgggctggaagtgttggacgcacttttggatattttccaaaagatttaatccaggtagttcatgaatataccaaagaagagctacaagttccaacagatgagacggattttgtttgttttgatggaggaagagatgattttcataattataatgtagaagaacttttagggtttttggaactgtacaattctgcagctacagattctgagaaagctgtagaaaaaactttacaggatatggaaaaaaaccctgaattatctaaggaaagggaacctgaacctgaaccagtagaagccaactcagaggaaagtgatagtgtattctcagaaaacactgaggatcttcaggaacagtttacaactcagaagcaccactcccatgcaaacagccaagcaaatcatgctcagggagagcaggcttcatttgaatcttttgaagaaatgctgcaagataaactaaaagtgccagaaagtgaaaacaacaaaaccagcaatagttctcaggtctcaaatgaacaggataagattgatgcctataaacttttgaaaaaagaaatgactctagacttgaaaaccaaatttggctcaacagctgatgcacttgtatctgatgatgagacaaccagactcgttacttcattagaagatgattttgatgaggaattggatactgagtattatgcagttggaaaggaagatgaggagaaccaagaagactttgatgagttgccattacttacctttacagatggggaagatatgaaaactccagcaaagtctggcgttgagaaatatccaacagataaagagcagaattcaaatgaagaggacaaggttcagctaactgtgccccctggcatcaaaaatgatgataaaaatatactaacaacctggggggacactatcttctctattgtcacaggaggtgaagaaacaagagatacgatggatttagagagctctagttcagaggaagaaaaagaagatgatgatgatgcattagtcccagatagcaaacaggggaaaccacagtcagcaacagattatagtgaccctgacaatgtagatgatggtctttttattgtagacattcctaaaacaaataatgacaaagaagtaaacgcagaacatcacattaaaggaaaagggaggggagttcaggaatccaagaggggcctggtacaagataagacagaattagaggatgaaaatcaagaaggcatgactgtgcacagttctgttcacagcaataacctcaactctatgccagctgctgaaaagggtaaagacacattaaaatcagcttatgatgatacagaaaatgacctaaaaggagcagctattcatatctcaaaaggaatgctccacgaagaaaagcctggagagcagattttggaaggtggctcagagagtgaatctgcacagaaagctgcagggaatcaaatgaatgacagaaagattcaacaggaatccctgggtagtgcaccactcatgggagatgaccaccctaacgcatccagagacagtgtggagggagacgctttggtaaatggggccaaactgcacacgctttcagtggagcatcaacgtgaggaattgaaagaggaattagttcttaaaactcaaaaccaacctagattctcctctccagatgagattgatttgcccagagaactggaagacgaggttcccattctgggaagaaatcttccctggcaacaagaaagagatgtggctgccacagccagtaagcaaatgagtgagaagataaggctctctgagggagaagccaaagaggactccttggatgaagagttttttcatcacaaggcaatgcagggcacagaggtaggacagacagaccaaactgacagcacaggaggaccagctttcctttctaaagtagaagaggatgattatccctctgaagaactactagaggatgaaaacgctataaatgcaaaacggtctaaagaaaaaaaccctgggaatcagggcaggcagtttgatgttaatctgcaagtccctgacagagcagttttagggaccattcatccagatccagaaattgaagaaagcaagcaagaaactagtatgattttggatagcgaaaaaacaagtgagactgctgccaaaggggtcaacacaggaggcagggaaccaaatacaatggtggaaaaagaacgccctctggcagataagaaagcacagagaccatttgaacgaagtgacttttctgacagcataaaaattcagactccagaattaggtgaagtgtttcagaataaagattctgattatctgaagaacgacaaccctgaggaacatctgaagacctcagggcttgcaggggagcctgagggagaactctcaaaagaggaccatgagaacacagagaagtacatgggcacagaaagccaggggtctgctgctgcagaacctgaagatgactcgttccactggactccacatacaagtgtagagccagggcatagtgacaagagggaggacttacttatcataagcagcttctttaaagaacaacagtctttgcagcggttccagaagtactttaatgtccatgagctggaagccttgctacaagaaatgtcatcaaaactgaagtcagcgcagcaggagagcctgccctataatatggaaaaagtcctagataaggtcttccgtgcttctgagtcacaaattctgagcatagcagaaaaaatgcttgatactcgtgtggctgaaaatagagatctgggaatgaacgaaaataacatatttgaagaggctgcagtgcttgatgacattcaagacctcatctattttgtcaggtacaagcactccacagcagaggagacagccacactggtgatggcaccacctctagaggaaggcttgggtggagcaatggaagagatgcaaccactgcatgaagataatttctcacgagagaagacagcagaacttaatgtgcaggttcctgaagaacccacccacttggaccaacgtgtgattggggacactcatgcctcagaagtgtcacagaagccaaatactgagaaagacctggacccagggccagttacaacagaagacactcctatggatgctattgatgcaaacaagcaaccagagacagccgccgaagagccggcaagtgtcacacctttggaaaacgcaatccttctaatatattcattcatgttttatttaactaagtcgctagttgctacattgcctgatgatgttcagcctgggcctgatttttatggactgccatggaaacctgtatttatcactgccttcttgggaattgcttcgtttgccattttcttatggagaactgtccttgttgtgagtaatacagtatattatgtcacggaacagcaaatttctgagaagttgaagactatcatgaaagaaaatacagaacttgtacaaaaattgtcaaattatgaacagaagatcaaggaatcaaagaaacatgttcaggaaaccaggaaacaaaatatgattctctctgatgaagcaattaaatataaggataaaatcaagacacttgaaaaaaatcaggaaattctggatgacacagctaaaaatcttcgtgttatgctagaatctgagagagaacagaatgtcaagaatcaggacttgatatcagaaaacaagaaatctatagagaagttaaaggatgttatttcaatgaatgcctcagaattttcagaggttcagattgcacttaatgaagctaagcttagtgaagagaaggtgaagtctgaatgccatcgggttcaagaagaaaatgctaggcttaagaagaaaaaagagcagttgcagcaggaaatcgaagactggagtaaattacatgctgagctcagtgagcaaatcaaatcatttgagaagtctcagaaagatttggaagtagctcttactcacaaggatgataatattaatgctttgactaactgcattacacagttgaatctgttagagtgtgaatctgaatctgagggtcaaaataaaggtggaaatgattcagatgaattagcaaatggagaagtgggaggtgaccggaatgagaagatgaaaaatcaaattaagcagatgatggatgtctctcggacacagactgcaatatcggtagttgaagaggatctaaagcttttacagcttaagctaagagcctccgtgtccactaaatgtaacctggaagaccaggtaaagaaattggaagatgaccgcaactcactacaagctgccaaagctggactggaagatgaatgcaaaaccttgaggcagaaagtggagattctgaatgagctctatcagcagaaggagatggctttgcaaaagaaactgagtcaagaagagtatgaacggcaagaaagagagcacaggctgtcagctgcagatgaaaaggcagtttcggctgcagaggaagtaaaaacttacaagcggagaattgaagaaatggaggatgaattacagaagacagagcggtcatttaaaaaccagatcgctacccatgagaagaaagctcatgaaaactggctcaaagctcgtgctgcagaaagagctatagctgaagagaaaagggaagctgccaatttgagacacaaattattagaattaacacaaaagatggcaatgctgcaagaagaacctgtgattgtaaaaccaatgccaggaaaaccaaatacacaaaaccctccacggagaggtcctctgagccagaatggctcttttggcccatcccctgtgagtggtggagaatgctcccctccattgacagtggagccacctgtgagacctctctctgctactctcaatcgaagagatatgcctagaagtgaatttggatcagtggacgggcctctacctcatcctcgatggtcagctgaggcatctgggaaaccctctccttctgatccaggatctggtacagctaccatgatgaacagcagctcaagaggctcttcccctaccagggtactcgatgaaggcaaggttaatatggctccaaaagggccccctcctttcccaggagtccctctcatgagcacccccatgggaggccctgtaccaccacccattcgatatggaccaccacctcagctctgcggaccttttgggcctcggccacttcctccaccctttggccctggtatgcgtccaccactaggcttaagagaatttgcaccaggcgttccaccaggaagacgggacctgcctctccaccctcggggatttttacctggacacgcaccatttagacctttaggttcacttggcccaagagagtactttattcctggtacccgattaccacccccaacccatggtccccaggaatacccaccaccacctgctgtaagagacttactgccgtcaggctctagagatgagcctccacctgcctctcagagcactagccaggactgttcacaggctttaaaacagagcccataaaactatgacctctgaggtttcattggaaagaaagtgtactgtgcattatccattacagtaaaggatttcattggcttcaaaatccaaaagtttattttaaaaggtttgttgttagaactaagctgccttggcagtgtgcatttttgagccaaacaattcaaaaatgtcatttcttccctaaataaaaatcaccttttaagctagagcgtccttacaactttgaaatgtgcaataaagaatacctgtgttttagctaatgtagcatatgtaattgcaaaatgatttagaatgtcatgaaaaatatgaacatttcctgtggaaatgctttaagaacatgtatttccattatcctatttttagtgtacaccagctgaatacggagcaatggtgtttataagcgtttttttaaactatctggtcacaaagactgttacgctaaaaatgtttactaaaagatcactaaactatctcccctcttgctgaagttctttgtagtaatagctcataaaaatttgtttattaatatttcccaagtgtctgttgactcattggactgttatgaggcttgtgccatttggggaacatgtaaactcaggctcccagaactgaagatggtggctggtggcacacttccggctgctcctccgtcacctgtgaactctacaagtgacgtctttttatttcaaagaagtttatttcccacttgtatagcattcacatgctttctttacgatcctcattgtctatttgagaatggttttctgagagtgagtttacattagtagcaagagttgtttgacctgatgttccattgtttttaccattcctgtagaaaaagggtgcacaacagaaaaatgaaaatgatgtgtcatggccataaaagtatagaaatctttaaaaattttaaaatgtacagtcccttatctatctttcccattccttgccactgatttttgaggaatataataaaaagattggaagagtataatgccatgagaaagaatgatttaggactgtgagggttataacatgccctaggtcagcaaccaagggttgaaatcagttctgttttagggggaaatgggggcgacagatattattccaaaattaatattaattaatatttaaacgttggtgtttttatttaaaaatcagtaactaaccatctggaattgcaccatacttaaagtcttatccattactacactgtctttaaaacaatgtttctttaaatactctacaacgtttctaagaacgaacttcagacattttaattacagtaataatagcactccttttaaggagtttcagatccacactaaaactaaaatcataaaaggctgatacttttgtttgctgctaggctatattcttccattctttgaagtcctatgatgtaatatttttgaaacctagtgtatgtcttgtcactgttgtgatatttaatcgattaagaataccttgtaaaaaggagcaaaagcttcaatgtgaaacaattttctctctttatactaaacaactgaagatagatagtttagaaagataaggacctttgaaagaagacaactctgtcaaagttcataaggaatataaaaattcttcaggaaaagagaattcaatctatatgtcctcccgtttaatatcaagaatagaagaaattaagaggaaaactccacagaagagcataggccacttttagccatgtaaaaataagattaagtcacaaatacaacttttgaatttacctgtcaatatctctttaggacacaaaacaatgctgaagttaatataatttctaattttaaatgtcatttaagtgtagattatgccatctaggaaggtaagtaggaaaggtaaattaaatctatttttaaaattcaaaatattagagtatttttcccctctaaagccttttttggtgattattctgtatctgacataattgagaaactggtaagctgtaaagattccagtgtagcttctctgagaagttgtgagccagtccataactgcttcctcacatccatctgattgcaccatttctgcagcaaaccccaaagcagggtgccaatatgcagatggcatagggagtatcatccctcagccaaatcacttttccatctctaaagtttcatctattttggaagtcatctccaactaattgtgtctggatttagttgctaaaattgtcttatttatgaagcagcaatattcagcctgaaagcatttctgccatagttgttgtagttatatcgccaatggctgatttttttcattggaaagtaaatttaagtaattcgtgggatgtggtatattctgtgtcaacttcaagataatcactcattttctcgttatattcaggtctgaattaaagttaagttaatcacaca

SEQ ID NO: 17679 - DNA, 2026 bp, Homo sapiens
  source 1..2026: mol_type = unassigned DNA
aacatggctgcggcgcctgggctgctcgtctggctgctcgtgctccggctgccctggcgggtgccgggccagctggaccccagcactggccggcggttctcggagcacaaactctgcgcggacgacgaatgcagcatgttaatgtaccgcggtgaggctcttgaagatttcacaggcccggattgtcgttttgtgaattttaaaaaaggtgatcctgtatatgtttactataaactggcaagaggatggcctgaagtttgggctggaagtgttggacgcacttttggatattttccaaaagatttaatccaggtagttcatgaatataccaaagaagagctacaagttccaacagatgagacggattttgtttgttttgatggaggaagagatgattttcataattataatgtagaagaacttttagggtttttggaactgtacaattctgcagctacagattctgagaaagctgtagaaaaaactttacaggatatggaaaaaaaccctgaattatctaaggaaagggaacctgaacctgaaccagtagaagccaactcagaggaaagtgatagtgtattctcagaaaacactgaggatcttcaggaacagtttacaactcagaagcaccactcccatgcaaacagccaagcaaatcatgctcagggagagcaggcttcatttgaatcttttgaagaaatgctgcaagataaactaaaagtgccagaaagtgaaaacaacaaaaccagcaatagttctcaggtctcaaatgaacaggataagattgatgcctataaacttttgaaaaaagaaatgactctagacttgaaaaccaaatttggctcaacagctgatgcacttgtatctgatgatgagacaaccagactcgttacttcattagaagatgattttgatgaggaattggatactgagtattatgcagttggaaaggaagatgaggagaaccaagaagactttgatgagttgccattacttacctttacagatggggaagatatgaaaactccagcaaagtctggcgttgagaaatatccaacagataaagagcagaattcaaatgaagaggacaaggttcagctaactgtgccccctggcatcaaaaatgatgataaaaatatactaacaacctggggggacactatcttctctattgtcacaggaggtgaagaaacaagagatacgatggatttagagagctctagttcagaggaagaaaaagaagatgatgatgatgcattagtcccagatagcaaacaggggaaaccacagtcagcaacagattatagtgaccctgacaatgtagatgatggtctttttattgtagacattcctaaaacaaataatgacaaagaagtaaacgcagaacatcacattaaaggaaaagggaggggagttcaggaatccaagaggggcctggtacaagataagacagaattagaggatgaaaatcaagaaggctttaaaacagagcccataaaactatgacctctgaggtttcattggaaagaaagtgtactgtgcattatccattacagtaaaggatttcattggcttcaaaatccaaaagtttattttaaaaggtttgttgttagaactaagctgccttggcagtgtgcatttttgagccaaacaattcaaaaatgtcatttcttccctaaataaaaatcaccttttaagctagagcgtccttacaactttgaaatgtgcaataaagaatacctgtgttttagctaatgtagcatatgtaattgcaaaatgatttagaatgtcatgaaaaatatgaacatttcctgtggaaatgctttaagaacatgtatttccattatcctatttttagtgtacaccagctgaatacggagcaatggtgtttataagcgtttttttaaactatctggtcacaaagactgttacgctaaaaatgtttactaaaagatcactaaactatctcccctcttgctgaagttctttgtagtaatagctcataaaaatttgtttattaatattt

SEQ ID NO: 17680 - DNA, 8142 bp, Homo sapiens
  source 1..8142: mol_type = unassigned DNA
accggctccccgaggtgaccacaacatggctgcggcgcctgggctgctcgtctggctgctcgtgctccggctgccctggcgggtgccgggccagctggaccccagcactggccggcggttctcggagcacaaactctgcgcggacgacgaatgcagcatgttaatgtaccgcggtgaggctcttgaagatttcacaggcccggattgtcgttttgtgaattttaaaaaaggtgatcctgtatatgtttactataaactggcaagaggatggcctgaagtttgggctggaagtgttggacgcacttttggatattttccaaaagatttaatccaggtagttcatgaatataccaaagaagagctacaagttccaacagatgagacggattttgtttgttttgatggaggaagagatgattttcataattataatgtagaagaacttttagggtttttggaactgtacaattctgcagctacagattctgagaaagctgtagaaaaaactttacaggatatggaaaaaaaccctgaattatctaaggaaagggaacctgaacctgaaccagtagaagccaactcagaggaaagtgatagtgtattctcagaaaacactgaggatcttcaggaacagtttacaactcagaagcaccactcccatgcaaacagccaagcaaatcatgctcagggagagcaggcttcatttgaatcttttgaagaaatgctgcaagataaactaaaagtgccagaaagtgaaaacaacaaaaccagcaatagttctcaggtctcaaatgaacaggataagattgatgcctataaacttttgaaaaaagaaatgactctagacttgaaaaccaaatttggctcaacagctgatgcacttgtatctgatgatgagacaaccagactcgttacttcattagaagatgattttgatgaggaattggatactgagtattatgcagttggaaaggaagatgaggagaaccaagaagactttgatgagttgccattacttacctttacagatggggaagatatgaaaactccagcaaagtctggcgttgagaaatatccaacagataaagagcagaattcaaatgaagaggacaaggttcagctaactgtgccccctggcatcaaaaatgatgataaaaatatactaacaacctggggggacactatcttctctattgtcacaggaggtgaagaaacaagagatacgatggatttagagagctctagttcagaggaagaaaaagaagatgatgatgatgcattagtcccagatagcaaacaggggaaaccacagtcagcaacagattatagtgaccctgacaatgtagatgatggtctttttattgtagacattcctaaaacaaataatgacaaagaagtaaacgcagaacatcacattaaaggaaaagggaggggagttcaggaatccaagaggggcctggtacaagataagacagaattagaggatgaaaatcaagaaggcatgactgtgcacagttctgttcacagcaataacctcaactctatgccagctgctgaaaagggtaaagacacattaaaatcagcttatgatgatacagaaaatgacctaaaaggagcagctattcatatctcaaaaggaatgctccacgaagaaaagcctggagagcagattttggaaggtggctcagagagtgaatctgcacagaaagctgcagggaatcaaatgaatgacagaaagattcaacaggaatccctgggtagtgcaccactcatgggagatgaccaccctaacgcatccagagacagtgtggagggagacgctttggtaaatggggccaaactgcacacgctttcagtggagcatcaacgtgaggaattgaaagaggaattagttcttaaaactcaaaaccaacctagattctcctctccagatgagattgatttgcccagagaactggaagacgaggttcccattctgggaagaaatcttccctggcaacaagaaagagatgtggctgccacagccagtaagcaaatgagtgagaagataaggctctctgagggagaagccaaagaggactccttggatgaagagttttttcatcacaaggcaatgcagggcacagaggtaggacagacagaccaaactgacagcacaggaggaccagctttcctttctaaagtagaagaggatgattatccctctgaagaactactagaggatgaaaacgctataaatgcaaaacggtctaaagaaaaaaaccctgggaatcagggcaggcagtttgatgttaatctgcaagtccctgacagagcagttttagggaccattcatccagatccagaaattgaagaaagcaagcaagaaactagtatgattttggatagcgaaaaaacaagtgagactgctgccaaaggggtcaacacaggaggcagggaaccaaatacaatggtggaaaaagaacgccctctggcagataagaaagcacagagaccatttgaacgaagtgacttttctgacagcataaaaattcagactccagaattaggtgaagtgtttcagaataaagattctgattatctgaagaacgacaaccctgaggaacatctgaagacctcagggcttgcaggggagcctgagggagaactctcaaaagaggaccatgagaacacagagaagtacatgggcacagaaagccaggggtctgctgctgcagaacctgaagatgactcgttccactggactccacatacaagtgtagagccagggcatagtgacaagagggaggacttacttatcataagcagcttctttaaagaacaacagtctttgcagcggttccagaagtactttaatgtccatgagctggaagccttgctacaagaaatgtcatcaaaactgaagtcagcgcagcaggagagcctgccctataatatggaaaaagtcctagataaggtcttccgtgcttctgagtcacaaattctgagcatagcagaaaaaatgcttgatactcgtgtggctgaaaatagagatctgggaatgaacgaaaataacatatttgaagaggctgcagtgcttgatgacattcaagacctcatctattttgtcaggtacaagcactccacagcagaggagacagccacactggtgatggcaccacctctagaggaaggcttgggtggagcaatggaagagatgcaaccactgcatgaagataatttctcacgagagaagacagcagaacttaatgtgcaggttcctgaagaacccacccacttggaccaacgtgtgattggggacactcatgcctcagaagtgtcacagaagccaaatactgagaaagacctggacccagggccagttacaacagaagacactcctatggatgctattgatgcaaacaagcaaccagagacagccgccgaagagccggcaagtgtcacacctttggaaaacgcaatccttctaatatattcattcatgttttatttaactaagtcgctagttgctacattgcctgatgatgttcagcctgggcctgatttttatggactgccatggaaacctgtatttatcactgccttcttgggaattgcttcgtttgccattttcttatggagaactgtccttgttgtgaaggatagagtatatcaagtcacggaacagcaaatttctgagaagttgaagactatcatgaaagaaaatacagaacttgtacaaaaattgtcaaattatgaacagaagatcaaggaatcaaagaaacatgttcaggaaaccaggaaacaaaatatgattctctctgatgaagcaattaaatataaggataaaatcaagacacttgaaaaaaatcaggaaattctggatgacacagctaaaaatcttcgtgttatgctagaatctgagagagaacagaatgtcaagaatcaggacttgatatcagaaaacaagaaatctatagagaagttaaaggatgttatttcaatgaatgcctcagaattttcagaggttcagattgcacttaatgaagctaagcttagtgaagagaaggtgaagtctgaatgccatcgggttcaagaagaaaatgctaggcttaagaagaaaaaagagcagttgcagcaggaaatcgaagactggagtaaattacatgctgagctcagtgagcaaatcaaatcatttgagaagtctcagaaagatttggaagtagctcttactcacaaggatgataatattaatgctttgactaactgcattacacagttgaatctgttagagtgtgaatctgaatctgagggtcaaaataaaggtggaaatgattcagatgaattagcaaatggagaagtgggaggtgaccggaatgagaagatgaaaaatcaaattaagcagatgatggatgtctctcggacacagactgcaatatcggtagttgaagaggatctaaagcttttacagcttaagctaagagcctccgtgtccactaaatgtaacctggaagaccaggtaaagaaattggaagatgaccgcaactcactacaagctgccaaagctggactggaagatgaatgcaaaaccttgaggcagaaagtggagattctgaatgagctctatcagcagaaggagatggctttgcaaaagaaactgagtcaagaagagtatgaacggcaagaaagagagcacaggctgtcagctgcagatgaaaaggcagtttcggctgcagaggaagtaaaaacttacaagcggagaattgaagaaatggaggatgaattacagaagacagagcggtcatttaaaaaccagatcgctacccatgagaagaaagctcatgaaaactggctcaaagctcgtgctgcagaaagagctatagctgaagagaaaagggaagctgccaatttgagacacaaattattagaattaacacaaaagatggcaatgctgcaagaagaacctgtgattgtaaaaccaatgccaggaaaaccaaatacacaaaaccctccacggagaggtcctctgagccagaatggctcttttggcccatcccctgtgagtggtggagaatgctcccctccattgacagtggagccacctgtgagacctctctctgctactctcaatcgaagagatatgcctagaagtgaatttggatcagtggacgggcctctacctcatcctcgatggtcagctgaggcatctgggaaaccctctccttctgatccaggatctggtacagctaccatgatgaacagcagctcaagaggctcttcccctaccagggtactcgatgaaggcaaggttaatatggctccaaaagggccccctcctttcccaggagtccctctcatgagcacccccatgggaggccctgtaccaccacccattcgatatggaccaccacctcagctctgcggaccttttgggcctcggccacttcctccaccctttggccctggtatgcgtccaccactaggcttaagagaatttgcaccaggcgttccaccaggaagacgggacctgcctctccaccctcggggatttttacctggacacgcaccatttagacctttaggttcacttggcccaagagagtactttattcctggtacccgattaccacccccaacccatggtccccaggaatacccaccaccacctgctgtaagagacttactgccgtcaggctctagagatgagcctccacctgcctctcagagcactagccaggactgttcacaggctttaaaacagagcccataaaactatgacctctgaggtttcattggaaagaaagtgtactgtgcattatccattacagtaaaggatttcattggcttcaaaatccaaaagtttattttaaaaggtttgttgttagaactaagctgccttggcagtgtgcatttttgagccaaacaattcaaaaatgtcatttcttccctaaataaaaatcaccttttaagctagagcgtccttacaactttgaaatgtgcaataaagaatacctgtgttttagctaatgtagcatatgtaattgcaaaatgatttagaatgtcatgaaaaatatgaacatttcctgtggaaatgctttaagaacatgtatttccattatcctatttttagtgtacaccagctgaatacggagcaatggtgtttataagcgtttttttaaactatctggtcacaaagactgttacgctaaaaatgtttactaaaagatcactaaactatctcccctcttgctgaagttctttgtagtaatagctcataaaaatttgtttattaatatttcccaagtgtctgttgactcattggactgttatgaggcttgtgccatttggggaacatgtaaactcaggctcccagaactgaagatggtggctggtggcacacttccggctgctcctccgtcacctgtgaactctacaagtgacgtctttttatttcaaagaagtttatttcccacttgtatagcattcacatgctttctttacgatcctcattgtctatttgagaatggttttctgagagtgagtttacattagtagcaagagttgtttgacctgatgttccattgtttttaccattcctgtagaaaaagggtgcacaacagaaaaatgaaaatgatgtgtcatggccataaaagtatagaaatctttaaaaattttaaaatgtacagtcccttatctatctttcccattccttgccactgatttttgaggaatataataaaaagattggaagagtataatgccatgagaaagaatgatttaggactgtgagggttataacatgccctaggtcagcaaccaagggttgaaatcagttctgttttagggggaaatgggggcgacagatattattccaaaattaatattaattaatatttaaacgttggtgtttttatttaaaaatcagtaactaaccatctggaattgcaccatacttaaagtcttatccattactacactgtctttaaaacaatgtttctttaaatactctacaacgtttctaagaacgaacttcagacattttaattacagtaataatagcactccttttaaggagtttcagatccacactaaaactaaaatcataaaaggctgatacttttgtttgctgctaggctatattcttccattctttgaagtcctatgatgtaatatttttgaaacctagtgtatgtcttgtcactgttgtgatatttaatcgattaagaataccttgtaaaaaggagcaaaagcttcaatgtgaaacaattttctctctttatactaaacaactgaagatagatagtttagaaagataaggacctttgaaagaagacaactctgtcaaagttcataaggaatataaaaattcttcaggaaaagagaattcaatctatatgtcctcccgtttaatatcaagaatagaagaaattaagaggaaaactccacagaagagcataggccacttttagccatgtaaaaataagattaagtcacaaatacaacttttgaatttacctgtcaatatctctttaggacacaaaacaatgctgaagttaatataatttctaattttaaatgtcatttaagtgtagattatgccatctaggaaggtaagtaggaaaggtaaattaaatctatttttaaaattcaaaatattagagtatttttcccctctaaagccttttttggtgattattctgtatctgacataattgagaaactggtaagctgtaaagattccagtgtagcttctctgagaagttgtgagccagtccataactgcttcctcacatccatctgattgcaccatttctgcagcaaaccccaaagcagggtgccaatatgcagatggcatagggagtatcatccctcagccaaatcacttttccatctctaaagtttcatctattttggaagtcatctccaactaattgtgtctggatttagttgctaaaattgtcttatttatgaagcagcaatattcagcctgaaagcatttctgccatagttgttgtagttatatcgccaatggctgatttttttcattggaaagtaaatttaagtaattcgtgggatgtggtatattctgtgtcaacttcaagataatcactcattttctcgttatattcaggtctgaattaaagttaagttaatcacacagtg

SEQ ID NO: 17681 - DNA, 3045 bp, Homo sapiens
  source 1..3045: mol_type = unassigned DNA
attagtcccagatagcaaacaggggaaaccacagtcagcaacagattatagtgaccctgacaatgtagatgatggtctttttattgtagacattcctaaaacaaataatgacaaagaagtaaacgcagaacatcacattaaaggaaaagggaggggagttcaggaatccaagaggggcctggtacaagataagacagaattagaggatgaaaatcaagaaggcatgactgtgcacagttctgttcacagcaataacctcaactctatgccagctgctgaaaagggtaaagacacattaaaatcagcttatgatgatacagaaaatgacctaaaaggagcagctattcatatctcaaaaggaatgctccacgaagaaaagcctggagagcagattttggaaggtggctcagagagtgaatctgcacagaaagctgcagggaatcaaatgaatgacagaaagattcaacaggaatccctgggtagtgcaccactcatgggagatgaccaccctaacgcatccagagacagtgtggagggagacgctttggtaaatggggccaaactgcacacgctttcagtggagcatcaacgtgaggaattgaaagaggaattagttcttaaaactcaaaaccaacctagattctcctctccagatgagattgatttgcccagagaactggaagacgaggttcccattctgggaagaaatcttccctggcaacaagaaagagatgtggctgccacagccagtaagcaaatgagtgagaagataaggctctctgagggagaagccaaagaggactccttggatgaagagttttttcatcacaaggcaatgcagggcacagaggtaggacagacagaccaaactgacagcacaggaggaccagctttcctttctaaagtagaagaggatgattatccctctgaagaactactagaggatgaaaacgctataaatgcaaaacggtctaaagaaaaaaaccctgggaatcagggcaggcagtttgatgttaatctgcaagtccctgacagagcagttttagggaccattcatccagatccagaaattgaagaaagcaagcaagaaactagtatgattttggatagcgaaaaaacaagtgagactgctgccaaaggggtcaacacaggaggcagggaaccaaatacaatggtggaaaaagaacgccctctggcagataagaaagcacagagaccatttgaacgaagtgacttttctgacagcataaaaattcagactccagaattaggtgaagtgtttcagaataaagattctgattatctgaagaacgacaaccctgaggaacatctgaagacctcagggcttgcaggggagcctgagggagaactctcaaaagaggaccatgagaacacagagaagtacatgggcacagaaagccaggggtctgctgctgcagaacctgaagatgactcgttccactggactccacatacaagtgtagagccagggcatagtgacaagagggaggacttacttatcataagcagcttctttaaagaacaacagtctttgcagcggttccagaagtactttaatgtccatgagctggaagccttgctacaagaaatgtcatcaaaactgaagtcagcgcagcaggagagcctgccctataatatggaaaaagtcctagataaggtcttccgtgcttctgagtcacaaattctgagcatagcagaaaaaatgcttgatactcgtgtggctgaaaatagagatctgggaatgaacgaaaataacatatttgaagaggctgcagtgcttgatgacattcaagacctcatctattttgtcaggtacaagcactccacagcagaggagacagccacactggtgatggcaccacctctagaggaaggcttgggtggagcaatggaagagatgcaaccactgcatgaagataatttctcacgagagaagacagcagaacttaatgtgcaggttcctgaagaacccacccacttggaccaacgtgtgattggggacactcatgcctcagaagtgtcacagaagccaaatactgagaaagacctggacccagggccagttacaacagaagacactcctatggatgctattgatgcaaacaagcaaccagagacagccgccgaagagccggcaagtgtcacacctttggaaaacgcaatccttctaatatattcattcatgttttatttaactaagtcgctagttgctacattgcctgatgatgttcagcctgggcctgatttttatggactgccatggaaacctgtatttatcactgccttcttgggaattgcttcgtttgccattttcttatggagaactgtccttgttgtgaaggatagagtatatcaagtcacggaacagcaaatttctgagaagttgaagactatcatgaaagaaaatacagaacttgtacaaaaattgtcaaattatgaacagaagatcaaggaatcaaagaaacatgttcaggaaaccaggaaacaaaatatgattctctctgatgaagcaattaaatataaggataaaatcaagacacttgaaaaaaatcaggaaattctggatgacacagctaaaaatcttcgtgttatgctagaatctgagagagaacagaatgtcaagaatcaggacttgttgcagcaggaaatcgaagactggagtaaattacatgctgagctcagtgagcaaatcaaatcatttgagaagtctcagaaagatttggaagtagctcttactcacaaggatgataatattaatgctttgactaactgcattacacagttgaatctgttagagtgtgaatctgaatctgagggtcaaaataaaggtggaaatgattcagatgaattagcaaatggagaagtgggaggtgaccggaatgagaagatgaaaaatcaaattaagcagatgatggatgtctctcggacacagactgcaatatcggtagttgaagaggatctaaagcttttacagcttaagctaagagcctccgtgtccactaaatgtaacctggaagaccaggt

SEQ ID NO: 17682 - DNA, 605 bp, Homo sapiens
  source 1..605: mol_type = unassigned DNA
gtcagctgaggcatctgggaaaccctctccttctgatccaggatctggtacagctaccatgatgaacagcagctcaagaggctcttcccctaccagggtactcgatgaaggcaaggttaatatggctccaaaagggccccctcctttcccaggagtccctctcatgagcacccccatgggaggccctgtaccaccacccattcgatatggaccaccacctcagctctgcggaccttttgggcctcggccacttcctccaccctttgataaagatggcaggccaggcacagtggctcacgcctgtaatcccagcactttatgaatcccagcattcattagacgaggctgaggcaggtggatcccttgagcctaggagtttgagaccagcctgggcaacatggtgaaacccccatctctacaaaaaatccaaaaattagctgggagtggtggcgtgcacctgtagtcccagctactggggagtctgaggtgggaggattgattgagtccgggagattgaggctgcagtgagccatgatcactcattacactccagcccatgtgacaggcaagaccctgccgccaaaaaaaaaaaaaaaaaaaaaaaa

SEQ ID NO: 17683 - DNA, 3823 bp, Homo sapiens
  source 1..3823: mol_type = unassigned DNA
atccagaggtgtccgcgctcccggagctgggcggagcggggcgcagcccacgtggttcgggcgggaggcgccgggacgtggccagttgcccgcctgccccggagagccaggcgctaaccagccgctctgcgccccgcgccctgcttgcccccattatccagccttgccccggcgccctgacctgacgccctggcctgacgccctgcttcgtcgcctcctttctctcccaggtgctggaccagggactgagcgtcccccggagagggtccggtgtgaccccgacaagaagcagaaatggggaagaaactggatctttccaagctcactgatgaagaggcccagcatgtcttggaagttgttcaacgagattttgacctccgaaggaaagaagaggaacggctagaggcgttgaagggcaagattaagaaggaaagctccaagagggagctgctttccgacactgcccatctgaacgagacccactgcgcccgctgcctgcagccctaccagctgcttgtgaatagcaaaaggcagtgcctggaatgtggcctcttcacctgcaaaagctgtggccgcgtccacccggaggagcagggctggatctgtgacccctgccatctggccagagtcgtgaagatcggctcactggagtggtactatgagcatgtgaaagcccgcttcaagaggttcggaagtgccaaggtcatccggtccctccacgggcggctgcagggtggagctgggcctgaactgatatctgaagagagaagtggagacagcgaccagacagatgaggatggagaacctggctcagaggcccaggcccaggcccagccctttggcagcaaaaaaaagcgcctcctctccgtccacgacttcgacttcgagggagactcagatgactccactcagcctcaaggtcactccctgcacctgtcctcagtccctgaggccagggacagcccacagtccctcacagatgagtcctgctcagagaaggcagcccctcacaaggctgagggcctggaggaggctgatactggggcctctgggtgccactcccatccggaagagcagccgaccagcatctcaccttccagacacggcgccctggctgagctctgcccgcctggaggctcccacaggatggccctggggactgctgctgcactcgggtcgaatgtcatcaggaatgagcagctgcccctgcagtacttggccgatgtggacacctctgatgaggaaagcatccgggctcacgtgatggcctcccaccattccaagcggagaggccgggcgtcttctgagagtcagatctttgagctgaataagcatatttcagctgtggaatgcctgctgacctacctggagaacacagttgtgcctcccttggccaagggtctaggtgctggagtgcgcacggaggccgatgtagaggaggaggccctgaggaggaagctggaggagctgaccagcaacgtcagtgaccaggagacctcgtccgaggaggaggaagccaaggacgaaaaggcagagcccaacagggacaaatcagttgggcctctcccccaggcggacccggaggtgggcacggctgcccatcaaaccaacagacaggaaaaaagcccccaggaccctggggaccccgtccagtacaacaggaccacagatgaggagctgtcagagctggaggacagagtggcagtgacggcctcagaagtccagcaggcagagagcgaggtttcagacattgaatccaggattgcagccctgagggccgcagggctcacggtgaagccctcgggaaagccccggaggaagtcaaacctcccgatatttctccctcgagtggctgggaaacttggcaagagaccagaggacccaaatgcagacccttcaagtgaggccaaggcaatggctgtgccctatcttctgagaagaaagttcagtaattccctgaaaagtcaaggtaaagatgatgattcttttgatcggaaatcagtgtaccgaggctcgctgacacagagaaaccccaacgcgaggaaaggaatggccagccacaccttcgcgaaacctgtggtggcccaccagtcctaacgggacaggacagagagacagagcagccctgcactgttttccctccaccacagccatcctgtccctcattggctctgtgctttccactatacacagtcaccgtcccaatgagaaacaagaaggagcaccctccacatggactcccacctgcaagtggacagcgacattcagtcctgcactgctcacctgggtttactgatgactcctggctgccccaccatcctctctgatctgtgagaaacagctaagctgctgtgacttccctttaggacaatgttgtgtaaatctttgaaggacacaccgaagacctttatactgtgatcttttacccctttcactcttggctttcttatgttgctttcatgaatggaatggaaaaaagatgactcagttaaggcaccagccatatgtgtattcttgatggtctatatcggggtgtgagcagatgtttgcgtatttcttgtgggtgtgactggatattagacatccggacaagtgactgaactaatgatctgctgaataatgaaggaggaatagacaccccagtccccaccctacgtgcacccgctctgcaagttcccatgtgatctgtagaccaggggaaattacactgcggtcaagggcagagcctgcacatgacagcaagtgagcatttgatagatgctcagatgctagtgcagagagcctgctgggagacgaagagacagcaggcagagctccagatgggcaaggaagaggcttggttctagcctggctctgcccctcactgcagtggatccagtggggcagaggacagagggtcacaaccaatgagggatgtctgccaaggatgggggtgcagaggccacaggagtcagcttgccactcgcccattggttacatagatgatctctcagacaggctgggactcagagttatttcctagtatcggtgtgccccatccagttttaagtggagccctccaagactctccagagctgcctttgaacatcctaacagtaatcacatctcaccctccctgaggttcactttagacaggacccaatggctgcactgcctttgtcagagggggtgctgagaggagtggcttcttttagaatcaaacagtagagacaagagtcaagccttgtgtcttcaagcattgaccaagttaagtgtttccttccctctctcaataagacacttccaggagctttccaatctctcacttaaaactaaggtttgaatctcaaagtgttgctgggaggctgatactcctgcaacttcaggagacctgtgagcacacattagcagctgtttctctgactccttgtggcatcagataaaaacgtgggagtttttccatataattcccagccttacttataaattctattctttgaaaaaattattcaggctaggtaaggtggctcatacctataatcccagccctttgagaggccaaggtgggagaattgcttgaggccaggagtttgagacctcctgggcaacatagtgagatcccatctctacaaaaaacaaaacaaaaaaattacccaagcatgatggtatatgcctgtagtcgtacctacttacttaggaggctgaggcaggaggatcacttgagccctggaggttggggctgcagtgagccatgatcgcatcactatactcgagcctgggcaacagagtgagaccttgtctcttaaaaaaattaataataaataaatgaaaataattcttcaga

SEQ ID NO: 17684 - DNA, 2332 bp, Homo sapiens
  source 1..2332: mol_type = unassigned DNA
agttgcccgcctgccccggagagccaggcgctaaccagccgctctgcgccccgcgccctgcttgcccccattatccagccttgccccggcgccctgacctgacgccctggcctgacgccctgcttcgtcgcctcctttctctcccaggtgctggaccagggactgagcgtcccccggagagggtccggtgtgaccccgacaagaagcagaaatggggaagaaactggatctttccaagctcactgatgaagaggcccagcatgtcttggaagttgttcaacgagattttgacctccgaaggaaagaagaggaacggctagaggcgttgaagggcaagattaagaaggaaagctccaagagggagctgctttccgacactgcccatctgaacgagacccactgcgcccgctgcctgcagccctaccagctgcttgtgaatagcaaaaggcagtgcctggaatgtggcctcttcacctgcaaaagctgtggccgcgtccacccggaggagcagggctggatctgtgacccctgccatctggccagagtcgtgaagatcggctcactggagtggtactatgagcatgtgaaagcccgcttcaagaggttcggaagtgccaaggtcatccggtccctccacgggcggctgcagggtggagctgggcctgaactgatatctgaagagagaagtggagacagcgaccagacagatgaggatggagaacctggctcagaggcccaggcccaggcccagccctttggcagcaaaaaaaagcgcctcctctccgtccacgacttcgacttcgagggagactcagatgactccactcagcctcaaggtcactccctgcacctgtcctcagtccctgaggccagggacagcccacagtccctcacagatgagtcctgctcagagaaggcagcccctcacaaggctgagggcctggaggaggctgatactggggcctctgggtgccactcccatccggaagagcagccgaccagcatctcaccttccagacacggcgccctggctgagctctgcccgcctggaggctcccacaggatggccctggggactgctgctgcactcgggtcgaatgtcatcaggaatgagcagctgcccctgcagtacttggccgatgtggacacctctgatgaggaaagcatccgggctcacgtgatggcctcccaccattccaagcggagaggccgggcgtcttctgagagtcagggtctaggtgctggagtgcgcacggaggccgatgtagaggaggaggccctgaggaggaagctggaggagctgaccagcaacgtcagtgaccaggagacctcgtccgaggaggaggaagccaaggacgaaaaggcagagcccaacagggacaaatcagttgggcctctcccccaggcggacccggaggtgggcacggctgcccatcaaaccaacagacaggaaaaaagcccccaggaccctggggaccccgtccagtacaacaggaccacagatgaggagctgtcagagctggaggacagagtggcagtgacggcctcagaagtccagcaggcagagagcgaggtttcagacattgaatccaggattgcagccctgagggccgcagggctcacggtgaagccctcgggaaagccccggaggaagtcaaacctcccgatatttctccctcgagtggctgggaaacttggcaagagaccagaggacccaaatgcagacccttcaagtgaggccaaggcaatggctgtgccctatcttctgagaagaaagttcagtaattccctgaaaagtcaaggtaaagatgatgattcttttgatcggaaatcagtgtaccgaggctcgctgacacagagaaaccccaacgcgaggaaaggaatggccagccacaccttcgcgaaacctgtggtggcccaccagtcctaacgggacaggacagagagacagagcagccctgcactgttttccctccaccacagccatcctgtccctcattggctctgtgctttccactatacacagtcaccgtcccaatgagaaacaagaaggagcaccctccacatggactcccacctgcaagtggacagcgacattcagtcctgcactgctcacctgggtttactgatgactcctggctgccccaccatcctctctgatctgtgagaaacagctaagctgctgtgacttccctttaggacaatgttgtgtaaatctttgaaggacacaccgaagacctttatactgtgatcttttacccctttcactcttggctttcttatgttgctttcatgaatggaatggaaaaaagatgactcagttaaggcacca

SEQ ID NO: 17685 - DNA, 744 bp, Homo sapiens
  source 1..744: mol_type = unassigned DNA
attgattcacaacacccttatgtgtaactcccattactattctcatcatggagaagagagaaaaaagtcagtagaagattcagtaacaggtccaagatgacacagcttgtgggccacactcctagttggaattccgactcttgcagttggtttgagcccacatgcttaacctcacacacacacacaccattcagaaagaatatagaagacaccattaataatgattgctttctggtcatggagataggaaaactgaattgcaaaagcggttcctggagaacagaatgtgctggaccagggactgagcgtcccccggagagggtccggtgtgaccccgacaagaagcagaaatggggaagaaactggatctttccaagctcactgatgaagaggcccagcatgtcttggaagttgttcaacgagattttgacctccgaaggaaagaagaggaacggctagaggcgttgaagggcaagattaagaaggaaagctccaagagggagctgctttccgacactgcccatctgaacgagacccactgcgcccgctgcctgcagccctaccagctgcttgtgaatagcaaaaggcagtgcctggaatgtggcctcttcacctgcaaaagctgtggccgcgtccacccggaggagcagggctggatctgtgacccctgccatctggccagagtcgtgaagatcggctcactggagtggtactatgagcatgtgaaagcccgcttcaagaggt

SEQ ID NO: 17686 - DNA, 565 bp, Homo sapiens
  source 1..565: mol_type = unassigned DNA
cattggaattcggaaggacaggcaggccgggcggactggagacggcggctcgccttgggaccctctgagcttgcgggccccgctgagcacccaaaggccggccctagagtccaggagaagagcgcagcggcgcggagctcccaggcgttccccgcagcgcgtcctcggtcctggaaccaccgcgccgcgcgtcctggcttccacatctgccccatttgcccgcggatcttgactttttcttggcgggcaaggcctcggtctcctccccgcagcagggctgcccgcggctgcgggaccctcctggtcctgatgcctggcagaatcgaaggggtgtgaccccgacaagaagcagaaatggggaagaaactggatctttccaagctcactgatgaagaggcccagcatgtcttggaagttgttcaacgagattttgacctccgaaggaaagaagaggaacggctagaggcgttgaagggcaagattaagaaggaaagctccaagagggagctgctttccgacactgcccatctgaacgagacccactgcgcccgctgcctgcagccct

SEQ ID NO: 17687 - DNA, 2274 bp, Homo sapiens
  source 1..2274: mol_type = unassigned DNA
cagttgcccgcctgccccggagagccaggcgctaaccagccgctctgcgccccgcgccctgcttgcccccattatccagccttgccccggcgccctgacctgacgccctggcctgacgccctgcttcgtcgcctcctttctctcccaggtgctggaccagggactgagcgtcccccggagagggtccggtgtgaccccgacaagaagcagaaatggggaagaaactggatctttccaagctcactgatgaagaggcccagcatgtcttggaagttgttcaacgagattttgacctccgaaggaaagaagaggaacggctagaggcgttgaagggcaagattaagaaggaaagctccaagagggagctgctttccgacactgcccatctgaacgagacccactgcgcccgctgcctgcagccctaccagctgcttgtgaatagcaaaaggcagtgcctggaatgtggcctcttcacctgcaaaagctgtggccgcgtccacccggaggagcagggctggatctgtgacccctgccatctggccagagtcgtgaagatcggctcactggagtggtactatgagcatgtgaaagcccgcttcaagaggttcggaagtgccaaggtcatccggtccctccacgggcggctgcagggtggagctgggcctgaactgatatctgaagagagaagtggagacagcgaccagacagatgaggatggagaacctggctcagaggcccaggcccaggcccagccctttggcagcaaaaaaaagcgcctcctctccgtccacgacttcgacttcgagggagactcagatgactccactcagcctcaaggtcactccctgcacctgtcctcagtccctgaggccagggacagcccacagtccctcacagatgagtcctgctcagagaaggcagcccctcacaaggctgagggcctggaggaggctgatactggggcctctgggtgccactcccatccggaagagcagccgaccagcatctcaccttccagacacggcgccctggctgagctctgcccgcctggaggctcccacaggatggccctggggactgctgctgcactcgggtcgaatgtcatcaggaatgagcagctgcccctgcagtacttggccgatgtggacacctctgatgaggaaagcatccgggctcacgtgatggcctcccaccattccaagcggagaggccgggcgtcttctgagagtcagatctttgagctgaataagcatatttcagctgtggaatgcctgctgacctacctggagaacacagttgtgcctcccttggccaagggtctaggtgctggagtgcgcacggaggccgatgtagaggaggaggccctgaggaggaagctggaggagctgaccagcaacgtcagtgaccaggagacctcgtccgaggaggaggaagccaaggacgaaaaggcagagcccaacagggacaaatcagttgggcctctcccccaggcggacccggaggtgggcacggctgcccatcaaaccaacagacaggaaaaaagcccccaggaccctggggaccccgtccagtacaacaggaccacagatgaggagctgtcagagctggaggacagagtggcagtgacggcctcagaagtccagcaggcagagagcgaggtttcagacattgaatccaggattgcagccctgagggccgcagggctcacggtgaagccctcgggaaagccccggaggaagtcaaacctcccggctctttatgaggggactctgagcctctgctctgaggatctgaaacacacacaccctgacagtgtaaaatccaaaaggagccgcctgaatcatgttgcctcatgtggaaatccttagtccgccgccacgtgaagatggatgtgactagaacggagggcgcgggaggctcacatcagaggagctgctcacatatttctccctcgagtggctgggaaacttggcaagagaccagaggacccaaatgcagacccttcaagtgaggccaaggcaatggctgtgccctatcttctgagaagaaagttcagtaattccctgaaaagtcaaggtaaagatgatgattcttttgatcggaaatcagtgtaccgaggctcgctgacacagagaaaccccaacgcgaggaaaggaatggccagccacaccttcgcgaaacctgtggtggcccaccagtcctaacgggacaggacagagagacagagcagccctgcactgttttccctccaccacagccatcctgtccctcatt

SEQ ID NO: 17688 - DNA, 971 bp, Homo sapiens
  source 1..971: mol_type = unassigned DNA
cggggcgtctcgtggacgcatgcgccccaaattgcgctcggggaattaaaagaggggaaaaaaagcccgaagaaaactcacgccccaaacaaaacgcaaggagaggagggcgcgcggcctgcagccctcgcccgcgtccccggccgcggcgtgatgcgcgcggaccagcccgcgacgcccgggctgccgctgtccccgcacctggacgctggcgcggtggccgcgccccagcctcgatcgctcgccgcggcgactcggccccaggcttccggcgccggtgggggccctcgctctccatggggctgagggactggctgagaaccgtgtgctgctgctgcgggtgcgagtgcttggaggagcgcgccctgcctgagaaggagcccctcgtcagtgataacaatccatattcctcatttggagcaactctggtgagggatgatgagaagaatttatggagtatgccccatgatgtgtcccacacagaggcagacgacgacagaaccctgtacaatttgatagtcattcgtaatcagcaggccaaagactcagaggagtggcagaagctcaactatgatatccataccctgcggcaggttcgaagggaagtaagaaacagatggaagtgcatcttagaagatttaggttttcaaaaggaagctgactctttgttgtcagtgactaaactcagcaccatcagtgattctaaaaacacaaggaaagctcgagagatgttgttaaaactggctgaagaaaccaatattttcccaacaagttgggagctctcagagagatatctctttgttgtggaccgtctcattgcacttgatgctgcagaagagttctttaagcttgctcgtcgaacttaccccaagaagcctggggttccatgcctggcagatggccagaaagaactgcacctgtggggggacctctcatgcagacttgcacatatgcagggagtattgcactga

SEQ ID NO: 17689 - DNA, 1314 bp, Homo sapiens
  source 1..1314: mol_type = unassigned DNA
cggggcgtctcgtggacgcatgcgccccaaattgcgctcggggaattaaaagaggggaaaaaaagcccgaagaaaactcacgccccaaacaaaacgcaaggagaggagggcgcgcggcctgcagccctcgcccgcgtccccggccgcggcgtgatgcgcgcggaccagcccgcgacgcccgggctgccgctgtccccgcacctggacgctggcgcggtggccgcgccccagcctcgatcgctcgccgcggcgactcggccccaggcttccggcgccggtgggggccctcgctctccatggggctgagggactggctgagaaccgtgtgctgctgctgcgggtgcgagtgcttggaggagcgcgccctgcctgagaaggagcccctcgtcagtgataacaatccatattcctcatttggagcaactctggtgagggatgatgagaagaatttatggagtatgccccatgatgtgtcccacacagaggcagacgacgacagaaccctgtacaatttgatagtcattcgtaatcagcaggccaaagactcagaggagtggcagaagctcaactatgatatccataccctgcggcaggttcgaagggaagtaagaaacagatggaagtgcatcttagaagatttaggttttcaaaaggaagctgactctttgttgtcagtgactaaactcagcaccatcagtgattctaaaaacacaaggaaagctcgagagatgttgttaaaactggctgaagaaaccaatattttcccaacaagttgggagctctcagagagatatctctttgttgtggaccgtctcattgcacttgatgctgcagaagagttctttaagcttgctcgtcgaacttaccccaagaagcctggggttccatgcctggcagatggccagaaagaactgcactaccttccgtttccaagtccctaaaggagaggctcaggggcagaatgggaattcttccatgaggactcagcagtcaaccaaagttggacaattacatgtagaagagagtgagcaaatagagtttgcttagtgaaaaatgatactgaattctacataaatgtaaagtctttaatctgaggaccctgccccatgaattgtgcaggctgcattgaaacgccttggtgatctcatatttaggaagaaagttaaagagttggtcagatggatagttcataatgggtggttccattctgagagcccattgccccagctttggttttagttgtgtcataatctctgatcattaatcctactgactgagtggactatttcagttaataaaacaatatgattaata

SEQ ID NO: 17690 - DNA, 2183 bp, Homo sapiens
  source 1..2183: mol_type = unassigned DNA
gaggagggcgcgcggcctgcagccctcgcccgcgtccccggccgcggcgtgatgcgcgcggaccagcccgcgacgcccgggctgccgctgtccccgcacctggacgctggcgcggtggccgcgccccagcctcgatcgctcgccgcggcgactcggccccaggcttccggcgccggtgggggccctcgctctccatggggctgagggactggctgagaaccgtgtgctgctgctgcgggtgcgagtgcttggaggagcgcgccctgcctgagaaggagcccctcgtcagtgataacaatccatattcctcatttggagcaactctggtgagggatgatgagaagaatttatggagtatgccccatgatgtgtcccacacagaggcagacgacgacagaaccctgtacaatttgatagtcattcgtaatcagcaggccaaagactcagaggagtggcagaagctcaactatgatatccataccctgcggcaggttcgaagggaagtaagaaacagatggaagtgcatcttagaagatttaggttttcaaaaggaagctgactctttgttgtcagtgactaaactcagcaccatcagtgattctaaaaacacaaggaaagctcgagagatgttgttaaaactggctgaagaaaccaatattttcccaacaagttgggagctctcagagagatatctctttgttgtggaccgtctcattgcacttgatgctgcagaagagttctttaagcttgctcgtcgaacttaccccaagaagcctggggttccatgcctggcagatggccagaaagaactgcactaccttccgtttccaagtccctaaaggagaggctcaggggcagaatgggaattcttccatgaggactcagcagtcaaccaaagttggacaattacatgtagaagagagtgagcaaatagagtttgcttagtgaaaaatgatactgaattctacataaatgtaaagtctttaatctgaggaccctgccccatgaattgtgcaggctgcattgaaacgccttggtgatctcatatttaggaagaaagttaaagagttggtcagatggatagttcataatgggtggttccattctgagagcccattgccccagctttggttttagttgtgtcataatctctgatcattaatcctactgactgagtggactatttcagttaataaaacaatatgattaatagagagagctgtcattgagtcccaaaatggattgccagttttaaaataattattataaaatgtatgctaaccccaaaataatactaggcatgaggtgacctctctgatttggtcaccttgtagaaccttggagggtgtcagggcatctctttgagtatcagttatgattattcagaagtatagatgtatcaaatgatagaaatgacaaggaatggctgggcgtggcgtgagtcaccgcgcccggccaagcccttggcattttatctggaatagcatctgtaaactgaagtgtttgacctctgttttcttctctcctctttcatctgtttctgattcgttggctggcagctgcacctgtggggggacctctcatgcagacttgcacatatgcagggagtattgcactgaagatctttgctggaccttcttctcttcagaagataattttcaaaagggagcaatgctgtgaatgcagcttgcttctctctacagattgagaagtccagcttcaaaagttacttgccacttaagcaaggaacttgtcaagagatcatggttcatgttactgaaaagactttaaggatttgtaaggttaatccatagattgctgagaaaaatggaaatatttttatttttacagattttgcacttctgaattcaggttaaaaactaacttgtatttagtctgcttagaggactgtgacttgaaaatttttatataccaatgagctttttggtagcgtccacaatgtttaaaatatttcataggcgagatccgtgttctccatttattaatgcattgtagaccaatttaactgctgtgtttcaggaaaattcttcctagtttaataagcaagctaaaagttttattttttatatttagtgcttaatctttgcctcatgttatgtaaaattagcctgcagatattttctctcaattctgtagactctcgcaagataaacattcaaaca

SEQ ID NO: 17691 - DNA, 1289 bp, Homo sapiens
  source 1..1289: mol_type = unassigned DNA
gggaatccaagcgggctcgcggcggacaccaggtgtcacctggccgtggcgtccggcgcggcgtgggcgtccgggggcgcggcgtggaggagcgcgcgggatggggcgtgggcgcggggagcgccgggcggagccttaacaagtggtcgggcgggcggacgaggcgggcgatggccccgcggccgggacgcgcacagggaccatgcagggcaacggcagcgcgctgcccaacgcctcccagcccgtgctccgcggggacggcgcgcggccctcgtggctggcgtccgccctggcctgcgtcctcatcttcaccatcgtggtggacatcctgggcaacctcctggtcatcctgtcggtgtatcggaacaagaagctcaggaacgcaggaaacatctttgtggtgagcttagcggtggcagacctggtggtggccatttatccgtacccgttggtgctgatgtcgatatttaacaacgggtggaacctgggctatctgcactgccaagtcagtgggttcctgatgggcctgagcgtcatcggctccatattcaacatcaccggcatcgccatcaaccgctactgctacatctgccacagtctcaagtacgacaaactgtacagcagcaagaactccctctgctacgtgctcctcatatggctcctgacgctggcggccgtcctgcccaacctccgtgcagggactctccagtacgacccgaggatctactcgtgcaccttcgcccagtccgtcagctccgcctacaccatcgccgtggtggttttccacttcctcgtccccatgatcatagtcatcttctgttacctgagaatatggatcctggttctccaggtcagacagagggtgaaacctgaccgcaaacccaaactgaaaccacaggacttcaggaattttgtcaccatgtttgtggtttttgtcctttttgccatttgctgggctcctctgaacttcattggcctggccgtggcctctgaccccgccagcatggtgcctaggatcccagagtggctgtttgtggccagttactacatggcgtatttcaacagctgcctcaatgccattatatacgggctactgaaccaaaatttcaggaaggaatacaggagaattatagtctcgctctgtacagccagggtgttctttgtggacagctctaacgacgtggccgatagggttaaatggaaaccgtctccactgatgaccaacaataatgtagtaaaggtggactccgtttaaaaaagcaccacgttccgggtgagatggacacgct

SEQ ID NO: 17692 - DNA, 1565 bp, Homo sapiens
  source 1..1565: mol_type = unassigned DNA
tctgcgatgtcagagaacggctccttcgccaactgctgcgaggcgggcgggtgggcagtgcgcccgggctggtcgggggctggcagcgcgcggccctccaggacccctcgacctccctgggtggctccagcgctgtccgcggtgctcatcgtcaccaccgccgtggacgtcgtgggcaacctcctggtgatcctctccgtgctcaggaaccgcaagctccggaacgcaggtaatttgttcttggtgagtctggcattggctgacctggtggtggccttctacccctacccgctaatcctcgtggccatcttctatgacggctgggccctgggggaggagcactgcaaggccagcgcctttgtgatgggcctgagcgtcatcggctctgtcttcaatatcactgccatcgccattaaccgctactgctacatctgccacagcatggcctaccaccgaatctaccggcgctggcacacccctctgcacatctgcctcatctggctcctcaccgtggtggccttgctgcccaacttctttgtggggtccctggagtacgacccacgcatctattcctgcaccttcatccagaccgccagcacccagtacacggcggcagtggtggtcatccacttcctcctccctatcgctgtcgtgtccttctgctacctgcgcatctgggtgctggtgcttcaggcccgcaggaaagccaagccagagagcaggctgtgcctgaagcccagcgacttgcggagctttctaaccatgtttgtggtgtttgtgatctttgccatctgctgggctccacttaactgcatcggcctcgctgtggccatcaacccccaagaaatggctccccagatccctgaggggctatttgtcactagctacttactggcttatttcaacagctgcctgaatgccattgtctatgggctcttgaaccaaaacttccgcagggaatacaagaggatcctcttggccctttggaacccacggcactgcattcaagatgcttccaagggcagccacgcggaggggctgcagagcccagctccacccatcattggtgtgcagcaccaggcagatgctctctagcctggatctgaggcacaccagcagcatgacaaactcatgaaatggtgggagagagtctgctgcaagggtgagaccaggcagcctgctgggccacactgtcctgttggcatcacagccccaaggctgggggaacttcatgctgggacaagcagcccatcaacgccatgggttcaggctgatccaggagatgctcacaggccacaggacctggaaaacactcttggtggtgtcttggggatttggtgcacacaagaccaaggaaaggacagaatgaggaaaggcctggggcagaagagcccaactccttctcatagctgaccctcatcctcctgccttggcctcctggctgctttctccccttccccccagcgtggcaggatctcttcctgttagcaaggatgaaagagagaggtcagtaggactggaacttggtaactgcaagggcctcaggtggggcaggtgcagagggc

SEQ ID NO: 17693 - DNA, 4562 bp, Homo sapiens
  source 1..4562: mol_type = unassigned DNA
atgtccaaagtgatccagaagaagaaccactggactagcagggttcacgaatgcaccgtgaagcggggaccccagggcgagctgggggtgacggtgctgggaggcgcggagcacggggagtttccgtacgtcggagcggtggcggcggtcgaggcagcggggcttcccggcggcggcgagggcccgaggctgggcgaaggggagctgcttctggaggtgcagggggtccgggtgtccggcttgccccgctatgacgtgctgggggtcatcgacagctgcaaggaggccgtcaccttcaaggccgtcagacaaggaggaaggctgaacaaggacctgcgacattttctcaatcagcgattccagaaggggtctcctgatcatgagctccagcagaccataagggataacctttaccgccatgctgtgccttgcacaacccgatctcccagagaaggagaagtgcctggcgtggactataactttctgactgtgaaggagttcttggacctcgagcagagtgggactcttctggaagtcggcacctatgaaggaaactattatgggacacccaagcctcctagccagccagtcagtgggaaagtgatcacgacggatgccttgcacagccttcagtctggctctaagcagtcgaccccgaagcgaaccaagtcctacaatgatatgcaaaatgctggcatagtccacgcggagaatgaggaggaggatgacgttcctgaaatgaacagcagctttacagccgattctggtgaacaagaggagcacactctccaagaaacagcattaccacctgtgaatagtagcatcatcgctgctcccatcacggacccttctcagaagttccctcaatacctacctctttctgcagaggataatttaggtcctctacctgaaaactgggagatggcctatactgaaaatggagaagtctattttatagaccataacacgaaaacaacatcttggttagaccctcggtgcctaaacaagcagcagaagccactggaagagtgtgaagatgatgaaggggtacacaccgaggagctggacagtgaactagaactgcctgctggttgggaaaagattgaagaccctgtctatggtatctactatgtagaccacatcaacaggaagacacaatatgagaacccggttctagaagccaaacggaagaagcagcttgagcagcagcagcagcagcaacagcagcagcaacagcagcagcagcagcagcagcagcagcagacagaagaatggacagaagatcactcagcccttgtgcctcctgttattccaaaccaccctccaagcaatccagagccagccagagaagttccacttcagggcaaacccttttttacacgaaacccttctgagttgaaaggcaagttcattcacacaaagctgcggaaaagcagtcgtggctttggcttcacggtggttggaggggatgaacctgatgagtttctccagatcaagagcttggtcctagatggtcctgctgcattggatggcaagatggaaacaggggatgtgattgtaagtgtgaatgacacctgtgttttgggacacacacatgctcaagttgtgaagatcttccagtccatccccattggtgccagcgtggaccttgaactctgccgaggttatccattgccttttgatccagatgaccccaatacaagtttagtgacctcggtagccattttggataaagaaccaattattgtgaatgggcaagagacctatgattcaccagctagccacagtagtaaaacaggcaaagtcaatggcatgaaggatgccaggccaagcagcccagcggacgtggcttcaaatagttctcatggttatcctaatgacactgtttctttggcttcctccatagccactcagccagaactcataactgttcatattgtcaaagggccaatgggctttggttttactatcgcagacagtcctggtgggggtggccaaagagtgaaacagattgttgacagcccaaggtgccgaggcctgaaagaaggggatctcatagtggaagttaataagaagaacgtgcaggccctaactcacaaccaagtggtggatatgctggttgagtgtcctaagggaagtgaggtcacattgttggtgcaacgaggagggctgccagttcccaagaagagcccaaagtcgcaaccactggaaaggaaagacagccagaatagttctcagcacagtgtttccagccaccgaagcctgcacacagcatccccaagccacagcacacaggtgctccccgagttcccacctgcagaggcccaagctccagatcaaactgacagctctggccagaaaaaaccagatccttttaaaatctgggcccagtccaggagcatgtatgaaaaccgacctatgtcaccttcacctgcgtcgggattgagcaagggtgagagagagagagaaatcaattccacgaattttggagaatgtccgattccagattaccaggaacaggacatcttcctctggagaaaagagactggatttggatttaggattctgggtggaaatgaaccaggggaacctatttatattggtcacatcgtaccactgggtgctgctgatactgacggccgcctgaggtctggagatgaattaatctgtgtggatgggacgccagtaattggaaaatcacaccagcttgtggtccagcttatgcaacaagctgccaagcaaggccacgtcaatctcacggtgcggcgtaaagtggtttttgcggtgcccaaaaccgagaacgaggtgccctcgccagcctcctctcatcacagtagcaaccagccggcctcgctgacagaagagaagcgcactccgcagggcagccagaactcgctgaacacggtgagctcgggcagcggcagcaccagcggcatcggcagtggcggcggcgggggcagcggcgtggtcagcaccgtggtgcagccctacgacgtggagatccggcgcggggagaacgagggcttcggcttcgtcatcgtgtcctcggtgagcaggcccgaagcaggcacgacctttggcaatgcatgtgtggctatgcctcacaaaataggtcggattattgaggggagccctgctgaccgctgtggcaagctgaaagtaggagaccggatcttggcagtaaatggatgttccatcaccaacaaatcccattcagacattgtgaacctaatcaaggaagcgggaaacacagttaccctccgcatcattcctggggatgagtcctcgaatgccaccttgctgaccaatgcagagaagattgccaccatcaccaccacacacaccccttctcagcaagggacccaggagacaaggaataccaccaaaccaaagcaggaatctcaatttgagttcaaagcaccccaagcaacacaggagcaagatttttacactgtggaactggaaagaggagccaagggatttggctttagccttcgaggaggccgagagtataacatggacctctatgttctgcgcttagcagaggacggtcctgcggagaggtgtggaaagatgaggattggtgatgaaattttagagatcaatggtgagaccaccaaaaacatgaagcattctcgagctatagaactgattaagaatggtggccgcagagttcgtctgtttctgaagcggggagacggctcagtaccagaatatgcgatgatacctcctaatatcgctgcatgtatgagaaatgaaaagctcggggaggcttgcttctaccttatgggccataatcaaactacgaccccagcagcgaccgccacggccccgccaccggtccacaaggtgttccggaagtgagggccgggcccgaccgccggcagcatccgtcattggagtccagttacccacccgatcttcacaaatcatcaccacatggggaaaagcgggcacacgcaagggatccgaaaggcagcagagagtatagcagacaacccaatgaacaccacacctggaatgggacttcgaggaaacccgacagcggggcatgccgacccaaggaccgggcgccggagggacggagggacgcgcaggccgagcgcgcggcagccgccaacggccccaagaggcggtccccagagaagcggagggagggcacccgcagcgccgacaacactttggagaggagggagaagcacgagaagagacgagacgtctctccggagcggaggcgagagcggtcacccacccgcaggagagacggctcccccagccggcggagacggtctctggagagactcctggagcagaggaggtcccccgagcgcaggagagggggctcgcccgagcgcagggccaagtccaccgaccggaggcgcgcacgctcccccgagcgcaggagagagcggtccctggacaaaaggaacagagaggacagagccagccaccgagaaagggaagaggcgaatctgaaacaggatgccggcagaagttccagacatcccccggagcagagaaggcgaccttacaaagaatgtagcaccgacctcagtatctga

SEQ ID NO: 17694 - DNA, 4389 bp, Homo sapiens
  source 1..4389: mol_type = unassigned DNA
atgtccaaagtgatccagaagaagaaccactggactagcagggttcacgaatgcaccgtgaagcggggaccccagggcgagctgggggtgacggtgctgggaggcgcggagcacggggagtttccgtacgtcggagcggtggcggcggtcgaggcagcggggcttcccggcggcggcgagggcccgaggctgggcgaaggggagctgcttctggaggtgcagggggtccgggtgtccggcttgccccgctatgacgtgctgggggtcatcgacagctgcaaggaggccgtcaccttcaaggccgtcagacaaggaggaaggctgaacaaggacctgcgacattttctcaatcagcgattccagaaggggtctcctgatcatgagctccagcagaccataagggataacctttaccgccatgctgtgccttgcacaacccgatctcccagagaaggagaagtgcctggcgtggactataactttctgactgtgaaggagttcttggacctcgagcagagtgggactcttctggaagtcggcacctatgaaggaaactattatgggacacccaagcctcctagccagccagtcagtgggaaagtgatcacgacggatgccttgcacagccttcagtctggctctaagcagtcgaccccgaagcgaaccaagtcctacaatgatatgcaaaatgctggcatagtccacgcggagaatgaggaggaggatgacgttcctgaaatgaacagcagctttacagccgattctggtgaacaagaggagcacactctccaagaaacagcattaccacctgtgaatagtagcatcatcgctgctcccatcacggacccttctcagaagttccctcaatacctacctctttctgcagaggataatttaggtcctctacctgaaaactgggagatggcctatactgaaaatggagaagtctattttatagaccataacacgaaaacaacatcttggttagaccctcggtgcctaaacaagcagcagaagccactggaagagtgtgaagatgatgaaggggtacacaccgaggagctggacagtgaactagaactgcctgctggttgggaaaagattgaagaccctgtctatggtatctactatgtagaccacatcaacaggaagacacaatatgagaacccggttctagaagccaaacggaagaagcagcttgagcagcagcagcagcagcaacagcagcagcaacagcagcagcagcagcagcagcagcagcagacagaagaatggacagaagatcactcagcccttgtgcctcctgttattccaaaccaccctccaagcaatccagagccagccagagaagttccacttcagggcaaacccttttttacacgaaacccttctgagttgaaaggcaagttcattcacacaaagctgcggaaaagcagtcgtggctttggcttcacggtggttggaggggatgaacctgatgagtttctccagatcaagagcttggtcctagatggtcctgctgcattggatggcaagatggaaacaggggatgtgattgtaagtgtgaatgacacctgtgttttgggacacacacatgctcaagttgtgaagatcttccagtccatccccattggtgccagcgtggaccttgaactctgccgaggttatccattgccttttgatccagatgaccccaatacaagtttagtgacctcggtagccattttggataaagaaccaattattgtgaatgggcaagagacctatgattcaccagctagccacagtagtaaaacaggcaaagtcaatggcatgaaggatgccaggccaagcagcccagcggacgtggcttcaaatagttctcatggttatcctaatgacactgtttctttggcttcctccatagccactcagccagaactcataactgttcatattgtcaaagggccaatgggctttggttttactatcgcagacagtcctggtgggggtggccaaagagtgaaacagattgttgacagcccaaggtgccgaggcctgaaagaaggggatctcatagtggaagttaataagaagaacgtgcaggccctaactcacaaccaagtggtggatatgctggttgagtgtcctaagggaagtgaggtcacattgttggtgcaacgaggagggctgccagttcccaagaagagcccaaagtcgcaaccactggaaaggaaagacagccagaatagttctcagcacagtgtttccagccaccgaagcctgcacacagcatccccaagccacagcacacaggtgctccccgagttcccacctgcagaggcccaagctccagatcaaactgacagctctggccagaaaaaaccagatccttttaaaatctgggcccagtccaggagcatgtatgaaaaccgacttccagattaccaggaacaggacatcttcctctggagaaaagagactggatttggatttaggattctgggtggaaatgaaccaggggaacctatttatattggtcacatcgtaccactgggtgctgctgatactgacggccgcctgaggtctggagatgaattaatctgtgtggatgggacgccagtaattggaaaatcacaccagcttgtggtccagcttatgcaacaagctgccaagcaaggccacgtcaatctcacggtgcggcgtaaagtggtttttgcggtgcccaaaaccgagaacgaggtgccctcgccagcctcctctcatcacagtagcaaccagccggcctcgctgacagaagagaagcgcactccgcagggcagccagaactcgctgaacacggtgagctcgggcagcggcagcaccagcggcatcggcagtggcggcggcgggggcagcggcgtggtcagcaccgtggtgcagccctacgacgtggagatccggcgcggggagaacgagggcttcggcttcgtcatcgtgtcctcggtgagcaggcccgaagcaggcacgacctttggcaatgcatgtgtggctatgcctcacaaaataggtcggattattgaggggagccctgctgaccgctgtggcaagctgaaagtaggagaccggatcttggcagtaaatggatgttccatcaccaacaaatcccattcagacattgtgaacctaatcaaggaagcgggaaacacagttaccctccgcatcattcctggggatgagtcctcgaatgccaccttgctgaccaatgcagagaagattgccaccatcaccaccacacacaccccttctcagcaagggacccaggagacaaggaataccaccaaaccaaagcaggaatctcaatttgagttcaaagcaccccaagcaacacaggagcaagatttttacactgtggaactggaaagaggagccaagggatttggctttagccttcgaggaggccgagagtataacatggacctctatgttctgcgcttagcagaggacggtcctgcggagaggtgtggaaagatgaggattggtgatgaaattttagagatcaatggtgagaccaccaaaaacatgaagcattctcgagctatagaactgattaagaatggtggccgcagagttcgtctgtttctgaagcggggagacggctcagtaccagaatatgaccccagcagcgaccgccacggccccgccaccggtccacaaggtgttccggaagtgagggccgggcccgaccgccggcagcatccgtcattggagtccagttacccacccgatcttcacaaatcatcaccacatggggaaaagcgggcacacgcaagggatccgaaaggcagcagagagtatagcagacaacccaatgaacaccacacctggaatgggacttcgaggaaacccgacagcggggcatgccgacccaaggaccgggcgccggagggacggagggacgcgcaggccgagcgcgcggcagccgccaacggccccaagaggcggtccccagagaagcggagggagggcacccgcagcgccgacaacactttggagaggagggagaagcacgagaagagacgagacgtctctccggagcggaggcgagagcggtcacccacccgcaggagagacggctcccccagccggcggagacggtctctggagagactcctggagcagaggaggtcccccgagcgcaggagagggggctcgcccgagcgcagggccaagtccaccgaccggaggcgcgcacgctcccccgagcgcaggagagagcggtccctggacaaaaggaacagagaggacagagccagccaccgagaaagggaagaggcgaatctgaaacaggatgccggcagaagttccagacatcccccggagcagagaaggcgaccttacaaagaatgtagcaccgacctcagtatctga

SEQ ID NO: 17695 - DNA, 4250 bp, Homo sapiens
  source 1..4250: mol_type = unassigned DNA
ggaggaaggctgaacaaggacctgcgacattttctcaatcagcgattccagaaggggtctcctgatcatgagctccagcagaccataagggataacctttaccgccatgctgtgccttgcacaacccgatctcccagagaaggagaagtgcctggcgtggactataactttctgactgtgaaggagttcttggacctcgagcagagtgggactcttctggaagtcggcacctatgaaggaaactattatgggacacccaagcctcctagccagccagtcagtgggaaagtgatcacgacggatgccttgcacagccttcagtctggctctaagcagtcgaccccgaagcgaaccaagtcctacaatgatatgcaaaatgctggcatagtccacgcggagaatgaggaggaggatgacgttcctgaaatgaacagcagctttacagccgattctggtgaacaagaggagcacactctccaagaaacagcattaccacctgtgaatagtagcatcatcgctgctcccatcacggacccttctcagaagttccctcaatacctacctctttctgcagaggataatttaggtcctctacctgaaaactgggagatggcctatactgaaaatggagaagtctattttatagaccataacacgaaaacaacatcttggttagaccctcggtgcctaaacaagcagcagaagccactggaagagtgtgaagatgatgaaggggtacacaccgaggagctggacagtgaactagaactgcctgctggttgggaaaagattgaagaccctgtctatggtatctactatgtagaccacatcaacaggaagacacaatatgagaacccggttctagaagccaaacggaagaagcagcttgagcagcagcagcagcagcaacagcagcagcaacagcagcagcagcagcagcagcagcagcagacagaagaatggacagaagatcactcagcccttgtgcctcctgttattccaaaccaccctccaagcaatccagagccagccagagaagttccacttcagggcaaacccttttttacacgaaacccttctgagttgaaaggcaagttcattcacacaaagctgcggaaaagcagtcgtggctttggcttcacggtggttggaggggatgaacctgatgagtttctccagatcaagagcttggtcctagatggtcctgctgcattggatggcaagatggaaacaggggatgtgattgtaagtgtgaatgacacctgtgttttgggacacacacatgctcaagttgtgaagatcttccagtccatccccattggtgccagcgtggaccttgaactctgccgaggttatccattgccttttgatccagatgaccccaatacaagtttagtgacctcggtagccattttggataaagaaccaattattgtgaatgggcaagagacctatgattcaccagctagccacagtagtaaaacaggcaaagtcaatggcatgaaggatgccaggccaagcagcccagcggacgtggcttcaaatagttctcatggttatcctaatgacactgtttctttggcttcctccatagccactcagccagaactcataactgttcatattgtcaaagggccaatgggctttggttttactatcgcagacagtcctggtgggggtggccaaagagtgaaacagattgttgacagcccaaggtgccgaggcctgaaagaaggggatctcatagtggaagttaataagaagaacgtgcaggccctaactcacaaccaagtggtggatatgctggttgagtgtcctaagggaagtgaggtcacattgttggtgcaacgaggagggctgccagttcccaagaagagcccaaagtcgcaaccactggaaaggaaagacagccagaatagttctcagcacagtgtttccagccaccgaagcctgcacacagcatccccaagccacagcacacaggtgctccccgagttcccacctgcagaggcccaagctccagatcaaactgacagctctggccagaaaaaaccagatccttttaaaatctgggcccagtccaggagcatgtatgaaaaccgacctatgtcaccttcacctgcgtcgggattgagcaagggtgagagagagagagaaatcaattccacgaattttggagaatgtccgattccagattaccaggaacaggacatcttcctctggagaaaagagactggatttggatttaggattctgggtggaaatgaaccaggggaacctatttatattggtcacatcgtaccactgggtgctgctgatactgacggccgcctgaggtctggagatgaattaatctgtgtggatgggacgccagtaattggaaaatcacaccagcttgtggtccagcttatgcaacaagctgccaagcaaggccacgtcaatctcacggtgcggcgtaaagtggtttttgcggtgcccaaaaccgagaacgaggtgccctcgccagcctcctctcatcacagtagcaaccagccggcctcgctgacagaagagaagcgcactccgcagggcagccagaactcgctgaacacggtgagctcgggcagcggcagcaccagcggcatcggcagtggcggcggcgggggcagcggcgtggtcagcaccgtggtgcagccctacgacgtggagatccggcgcggggagaacgagggcttcggcttcgtcatcgtgtcctcggtgagcaggcccgaagcaggcacgacctttggcaatgcatgtgtggctatgcctcacaaaataggtcggattattgaggggagccctgctgaccgctgtggcaagctgaaagtaggagaccggatcttggcagtaaatggatgttccatcaccaacaaatcccattcagacattgtgaacctaatcaaggaagcgggaaacacagttaccctccgcatcattcctggggatgagtcctcgaatgccaccttgctgaccaatgcagagaagattgccaccatcaccaccacacacaccccttctcagcaagggacccaggagacaaggaataccaccaaaccaaagcaggaatctcaatttgagttcaaagcaccccaagcaacacaggagcaagatttttacactgtggaactggaaagaggagccaagggatttggctttagccttcgaggaggccgagagtataacatggacctctatgttctgcgcttagcagaggacggtcctgcggagaggtgtggaaagatgaggattggtgatgaaattttagagatcaatggtgagaccaccaaaaacatgaagcattctcgagctatagaactgattaagaatggtggccgcagagttcgtctgtttctgaagcggggagacggctcagtaccagaatatgcgatgatacctcctaatatcgctgcatgtatgagaaatgaaaagctcggggaggcttgcttctaccttatgggccataatcaaactacgaccccagcagcgaccgccacggccccgccaccggtccacaaggtgttccggaagtgagggccgggcccgaccgccggcagcatccgtcattggagtccagttacccacccgatcttcacaaatcatcaccacatggggaaaagcgggcacacgcaagggatccgaaaggcagcagagagtatagcagacaacccaatgaacaccacacctggaatgggacttcgaggaaacccgacagcggggcatgccgacccaaggaccgggcgccggagggacggagggacgcgcaggccgagcgcgcggcagccgccaacggccccaagaggcggtccccagagaagcggagggagggcacccgcagcgccgacaacactttggagaggagggagaagcacgagaagagacgagacgtctctccggagcggaggcgagagcggtcacccacccgcaggagagacggctcccccagccggcggagacggtctctggagagactcctggagcagaggaggtcccccgagcgcaggagagggggctcgcccgagcgcagggccaagtccaccgaccggaggcgcgcacgctcccccgagcgcaggagagagcggtccctggacaaaaggaacagagaggacagagccagccaccgagaaagggaagaggcgaatctgaaacaggatgccggcagaagttccagacatcccccggagcagagaaggcgaccttacaaagaatgtagcaccgacctcagtatctga

SEQ ID NO: 17696 - DNA, 4791 bp, Homo sapiens
  source 1..4791: mol_type = unassigned DNA
cggaatgcaaacaaagctcgcgggcgcctgtgcggggctcgcggggaagcccagaaagtttgttttatgatggcttgagtgcgcgagcgtgtgcaggggagcgaggctgccaagtttctctctcctgttttgtgatttggggagagatgtttctcccatgaacaagcggaggcttgggggctcgtgctgtggggggcacctgtctctcgttttatttttttggaggaggggtgtaactcatcatgtccaaagtgatccagaagaagaaccactggactagcagggttcacgaatgcaccgtgaagcggggaccccagggcgagctgggggtgacggtgctgggaggcgcggagcacggggagtttccgtacgtcggagcggtggcggcggtcgaggcagcggggcttcccggcggcggcgagggcccgaggctgggcgaaggggagctgcttctggaggtgcagggggtccgggtgtccggcttgccccgctatgacgtgctgggggtcatcgacagctgcaaggaggccgtcaccttcaaggccgtcagacaaggaggaaggctgaacaaggacctgcgacattttctcaatcagcgattccagaaggggtctcctgatcatgagctccagcagaccataagggataacctttaccgccatgctgtgccttgcacaacccgatctcccagagaaggagaagtgcctggcgtggactataactttctgactgtgaaggagttcttggacctcgagcagagtgggactcttctggaagtcggcacctatgaaggaaactattatgggacacccaagcctcctagccagccagtcagtgggaaagtgatcacgacggatgccttgcacagccttcagtctggctctaagcagtcgaccccgaagcgaaccaagtcctacaatgatatgcaaaatgctggcatagtccacgcggagaatgaggaggaggatgacgttcctgaaatgaacagcagctttacagccgattctggtgaacaagaggagcacactctccaagaaacagcattaccacctgtgaatagtagcatcatcgctgctcccatcacggacccttctcagaagttccctcaatacctacctctttctgcagaggataatttaggtcctctacctgaaaactgggagatggcctatactgaaaatggagaagtctattttatagaccataacacgaaaacaacatcttggttagaccctcggtgcctaaacaagcagcagaagccactggaagagtgtgaagatgatgaaggggtacacaccgaggagctggacagtgaactagaactgcctgctggttgggaaaagattgaagaccctgtctatggtatctactatgtagaccacatcaacaggaagacacaatatgagaacccggttctagaagccaaacggaagaagcagcttgagcagcagcagcagcagcaacagcagcagcaacagcagcagcagcagcagcagcagcagcagacagaagaatggacagaagatcactcagcccttgtgcctcctgttattccaaaccaccctccaagcaatccagagccagccagagaagttccacttcagggcaaacccttttttacacgaaacccttctgagttgaaaggcaagttcattcacacaaagctgcggaaaagcagtcgtggctttggcttcacggtggttggaggggatgaacctgatgagtttctccagatcaagagcttggtcctagatggtcctgctgcattggatggcaagatggaaacaggggatgtgattgtaagtgtgaatgacacctgtgttttgggacacacacatgctcaagttgtgaagatcttccagtccatccccattggtgccagcgtggaccttgaactctgccgaggttatccattgccttttgatccagatgaccccaatacaagtttagtgacctcggtagccattttggataaagaaccaattattgtgaatgggcaagagacctatgattcaccagctagccacagtagtaaaacaggcaaagtcaatggcatgaaggatgccaggccaagcagcccagcggacgtggcttcaaatagttctcatggttatcctaatgacactgtttctttggcttcctccatagccactcagccagaactcataactgttcatattgtcaaagggccaatgggctttggttttactatcgcagacagtcctggtgggggtggccaaagagtgaaacagattgttgacagcccaaggtgccgaggcctgaaagaaggggatctcatagtggaagttaataagaagaacgtgcaggccctaactcacaaccaagtggtggatatgctggttgagtgtcctaagggaagtgaggtcacattgttggtgcaacgaggagggctgccagttcccaagaagagcccaaagtcgcaaccactggaaaggaaagacagccagaatagttctcagcacagtgtttccagccaccgaagcctgcacacagcatccccaagccacagcacacaggtgctccccgagttcccacctgcagaggcccaagctccagatcaaactgacagctctggccagaaaaaaccagatccttttaaaatctgggcccagtccaggagcatgtatgaaaaccgacctatgtcaccttcacctgcgtcgggattgagcaagggtgagagagagagagaaatcaattccacgaattttggagaatgtccgattccagattaccaggaacaggacatcttcctctggagaaaagagactggatttggatttaggattctgggtggaaatgaaccaggggaacctatttatattggtcacatcgtaccactgggtgctgctgatactgacggccgcctgaggtctggagatgaattaatctgtgtggatgggacgccagtaattggaaaatcacaccagcttgtggtccagcttatgcaacaagctgccaagcaaggccacgtcaatctcacggtgcggcgtaaagtggtttttgcggtgcccaaaaccgagaacgaggtgccctcgccagcctcctctcatcacagtagcaaccagccggcctcgctgacagaagagaagcgcactccgcagggcagccagaactcgctgaacacggtgagctcgggcagcggcagcaccagcggcatcggcagtggcggcggcgggggcagcggcgtggtcagcaccgtggtgcagccctacgacgtggagatccggcgcggggagaacgagggcttcggcttcgtcatcgtgtcctcggtgagcaggcccgaagcaggcacgacctttgcaggcaatgcatgtgtggctatgcctcacaaaataggtcggattattgaggggagccctgctgaccgctgtggcaagctgaaagtaggagaccggatcttggcagtaaatggatgttccatcaccaacaaatcccattcagacattgtgaacctaatcaaggaagcgggaaacacagttaccctccgcatcattcctggggatgagtcctcgaatgccaccttgctgaccaatgcagagaagattgccaccatcaccaccacacacaccccttctcagcaagggacccaggagacaaggaataccaccaaaccaaagcaggaatctcaatttgagttcaaagcaccccaagcaacacaggagcaagatttttacactgtggaactggaaagaggagccaagggatttggctttagccttcgaggaggccgagagtataacatggacctctatgttctgcgcttagcagaggacggtcctgcggagaggtgtggaaagatgaggattggtgatgaaattttagagatcaatggtgagaccaccaaaaacatgaagcattctcgagctatagaactgattaagaatggtggccgcagagttcgtctgtttctgaagcggggagacggctcagtaccagaatatggtgggtcaaactatgaaaacattccttccttccctggcatgactccatgaatttgtctccagaacggcagcaggaaagtcttttttgtttcccctattcaccagtgtcttaccagcctctcgcaccatgtgattatttgcctcgcttgttctgaaatctctacacatttcatccttttgcttgcttacgtggactggggcatggcctaagacaagatctttatagccccctttctgataatcagagagaacgttttgtctagtccgaccaagagcgaaggaatgtttgtttgtactgtgccaaactgttcctcagatccaattgttagcacaaaatgactatatactccttttaagaagcaggaaagcaggtttcctgagtgatatgttgaggcacaattattttttcctttttggttacttggtgtctttatttaagaggcatgaaattttgagagatttgggggctttgctaacctcccttatgctctgtatacaacacttctccatcccccaactggtgtcttaccccaaatcagaccatctgagcccactactatcaaacaaacaaacaaaaactgttaatatattagccataatgtttttaaatgataaaggatgaaataaattcccagtgctcatcatgagggaaacatgtgactatacctttcctatgaggaaagccaggttatacatagagttcctttgtcatatctttagacttgatttgagtagacagcaatgatctttacatagcttagtgttctgatggcaaaatattgtatatgataataattatgtcctatttatttgagatttgtgtttaaaa

SEQ ID NO: 17697 - DNA, 1794 bp, Homo sapiens
  source 1..1794: mol_type = unassigned DNA
gagagtttgcgccggttcgcattccccggcctcccgttcgctcccccgcgaaccaggcggccgtgcgcctctcggggcaaccacccaagagcacccgggcgggaggacgccgagcagggggtgttgcgggctgggacaggggcagccacctcccgaagatgcaggatggcagcagagccgcagccgtccagcctttcctaccgcaccacgggctccacctacctgcacccgctcagcgagctcctgggcatcccgctggaccaggtgaattttgtggtatgccagcttgttgctctgtttgctgctttctggtttcgcatctacttacgtcctggtacaaccagctctgatgtccggcatgcggttgccaccatttttggcatctattttgtcatcttttgtttcggctggtactctgtgcatctttttgtgctggtgttaatgtgctatgcaatcatggtcactgctagtgtatccaatattcacagatattccttttttgtagcaatgggatatcttacaatatgccacatcagccgaatatacatcttccactatggaattctcactacggatttttctgggcctctgatgattgtcactcagaagatcacaaccttggcattccaggttcatgatggattaggtcgaagagctgaagacctttctgctgaacaacatcgacttgctatcaaagtgaaaccctcttttttggaatacttaagttaccttctcaatttcatgagtgtcatagctggtccttgtaacaatttcaaggactacatagccttcattgaggggaagcatatacacatgaagttgctggaggtgaactggaagcgaaaaggtttccacagcttgccagaaccttctcccacaggagctgtgatacacaagttgggcatcaccttggtgtctctccttttgtttttgacgctaacgaagacctttcctgtcacctgccttgtggatgactggtttgtccataaagcaagctttccggctcgactctgctacttatatgttgtcatgcaagcctcaaagcccaagtattactttgcatggacattagctgatgcagtgaataacgcagctggctttgggttcagcggagtggataagaatgggaatttctgttgggatctgctttcgaacctaaacatctggaaaattgagactgccacaagtttcaaaatgtacttggaaaactggaatattcagacagctacttggctaaagtgtgtgtgctatcagcgggttccatggtaccccacggtgctaaccttcatcctgtctgctttgtggcatggtgtctaccctggatactattttaccttcttaactggaattcttgtcacattagcagctagagcggtcaggaacaactacagacattacttcctttcttcaagagctctcaaggctgtgtatgatgcaggcacctgggccgtcactcagctggctgtctcttacacggtagcaccctttgtgatgttggcagttgaaccgaccatcagcttatacaagtccatgtacttttatttgcacatcataagtctcctgataatactatttctgccaatgaaaccacaagctcatacgcaaaggcggcctcagactctgaactctattaataagagaaaaacagattgatacctccaagagaagcggaacaagcaaaactgcagaacgttcgaaagatgagatgacaaggcttcaagggctcctccggtggcttagaggcgatgtttacatgcatctttattttgttcttttttaaagtgcagggagtat

SEQ ID NO: 17698 - DNA, 931 bp, Homo sapiens
  source 1..931: mol_type = unassigned DNA
agcgccaaagccaagtttgcgcctcgagagtttgcgcctcgagagtttgcgccggttcgcattccccggcctcccgttcgctcccccgcgaaccaggcggccgtgcgcctctcggggcaaccacccaagagcacccgggcgggaggacgccgagcagggggtgttgcgggctgggacaggggcagccacctcccgaagatgcaggatggcagcagagccgcagccgtccagcctttcctaccgcaccacgggctccacctacctgcacccgctcagcgagctcctgggcatcccgctggaccaggtgaattttgtggtatgccagcttgttgctctgtttgctgctttctggtttcgcatctacttacgtcctggtacaaccagctctgatgtccggcatgcggttgccaccatttttggcatctattttgtcatcttttgtttcggctggtactctgtgcatctttttgtgctggtgttaatgtgctatgcaatcatggtcactgctagtgtatccaatattcacagatattccttttttgtagcaatgggatatcttacaatatgccacatcagccgaatatacatcttccactatggaattctcactacggatttttctgggcctctgatgattgtcactcagaagatcacaaccttggcattccaggttcatgatggattaggtcgaagagctgaagacctttctgctgaacaacatcgacttgctatcaaagtgaaaccctcttttttggaatacttaagttaccttctcaatttcatgagtgtcatagctggtccttgtaacaatttcaaggactacatagccttcattgaggggaagcatatacacatgaagttgctggaggtgaactggaagcgaaaaggtttccacagcttgccagaaccttctcccacaggacatttgtaa

SEQ ID NO: 17699 - DNA, 3219 bp, Homo sapiens
  source 1..3219: mol_type = unassigned DNA
agcgccaaagccaagtttgcgcctcgagagtttgcgcctcgagagtttgcgccggttcgcattccccggcctcccgttcgctcccccgcgaaccaggcggccgtgcgcctctcggggcaaccacccaagagcacccgggcgggaggacgccgagcagggggtgttgcgggctgggacaggggcagccacctcccgaagatgcaggatggcagcagagccgcagccgtccagcctttcctaccgcaccacgggctccacctacctgcacccgctcagcgagctcctgggcatcccgctggaccaggtgaattttgtggtatgccagcttgttgctctgtttgctgctttctggtttcgcatctacttacgtcctggtacaaccagctctgatgtccggcatgcggttgccaccatttttggcatctattttgtcatcttttgtttcggctggtactctgtgcatctttttgtgctggtgttaatgtgctatgcaatcatggtcactgctagtgtatccaatattcacagatattccttttttgtagcaatgggatatcttacaatatgccacatcagccgaatatacatcttccactatggaattctcactacggatttttctgggattaggtcgaagagctgaagacctttctgctgaacaacatcgacttgctatcaaagtgaaaccctcttttttggaatacttaagttaccttctcaatttcatgagtgtcatagctggtccttgtaacaatttcaaggactacatagccttcattgaggggaagcatatacacatgaagttgctggaggtgaactggaagcgaaaaggtttccacagcttgccagaaccttctcccacaggagctgtgatacacaagttgggcatcaccttggtgtctctccttttgtttttgacgctaacgaagacctttcctgtcacctgccttgtggatgactggtttgtccataaagcaagctttccggctcgactctgctacttatatgttgtcatgcaagcctcaaagcccaagtattactttgcatggacattagctgatgcagtgaataacgcagctggctttgggttcagcggagtggataagaatgggaatttctgttgggatctgctttcgaacctaaacatctggaaaattgagactgccacaagtttcaaaatgtacttggaaaactggaatattcagacagctacttggctaaagtgtgtgtgctatcagcgggttccatggtaccccacggtgctaaccttcatcctgtctgctttgtggcatggtgtctaccctggatactattttaccttcttaactggaattcttgtcacattagcagctagagcggtcaggaacaactacagacattacttcctttcttcaagagctctcaaggctgtgtatgatgcaggcacctgggccgtcactcagctggctgtctcttacacggtagcaccctttgtgatgttggcagttgaaccgaccatcagcttatacaagtccatgtacttttatttgcacatcataagtctcctgataatactatttctgccaatgaaaccacaagctcatacgcaaaggcggcctcagactctgaactctattaataagagaaaaacagattgatacctccaagagaagcggaacaagcaaaactgcagaacgttcgaaagatgagatgacaaggcttcaagggctcctccggtggcttagaggcgatgtttacatgcatctttattttgttcttttttaaagtgcagggagtatttttttttttttttttttttttttttttttgagacggagtctcgctctgtcgcccaggctggagtgcagtggcgggatctcggctcactgcaagctccgcctcccgggttcacgccattctcctgcctcagcctcccaagtagctgggactacaggcgcccgccactacgcccggctaattttttgtatttttagtagagacggggtttcaccgttttagccgggatggtctcgatctcctgacctcgtgatccgcccgcctcggcctcccaaagtgctgggattacaggcgtgagccaccgcgcccggccgggagtatttttataaagcctttttgtacagattaatcggccatgtccaggttattggttttgatattttataggacatttgagtggtgtggcgatgtgtagagaatgtgccagagctgcagagacagtccattctgggctgctggctttttgcccttcctgcatgatttccagctactgtgacctggatgctgggaacccaggcatcggctccaaaaattagaaggcgagtgctgagaagacttgtcacaggtttctcaaatcagaatatactcagtcatagtggttccctgggaagccccagaccctttgacttgtgacattactggtttgcagacataataactacactcagaggaccatggaggcagagggatcatggtttcagggcactgaaaactctacgagccaagaggactagtgcatggactgaaagtcaggcatgccctcaaataggctgtattttctttccaggaatgtaacctttcccctttttcttctgacctgagccaagattggaaatcagaaagtctcctgtacatggagctgaagaggggctgctgttttccgaatgttttccatttcacaggcgccacctgcttgcccggggttggtcttgagaagacacccaaatgttcatgcctcagaaaggcagcagaatgccttttaggaaatttttttaaagtaatttgaagttatatagaagtttggtaagaagaagcagttgtttctctcttttctccctcatttcatggaggtgttaatgatcatggctggccgtgatgtacacatgggctgattttcattttttcagtttcatagctgagaaattcagctttgttttagttgaatcatcatattggaaagcagacattgaaagttttcttttctatctttgttatgaatgtgctatggccccttttggagacttctattgggtaatattctatgtgagagaaggaaacttggtattaaatgttgtggaaaataataatgatgataataataaagtatatgctgcaatggtgtactgccaatcagattgcttgggagaagaaaatttattcaaatccaacgataaaaaattaatttcttattgaataaacagtatgttcccatataaaagaaat

SEQ ID NO: 17700 - DNA, 7751 bp, Homo sapiens
  source 1..7751: mol_type = unassigned DNA
cgggcgcgggaggaggtggcggcggagggggaggtgcgagccgggcaccgcccccggcccctccccggccttccccgcgcagagctccgaccgcgggcggcccaggggcgggcgcgccgctgcatccccatcctcgtcgtcgcccggcacagcgcgagcgggcgagcggcgcgggcggccggagcgccgaggcccggccatggccaccaccagcaccacgggctccaccctgctgcagcccctcagcaacgccgtgcagctgcccatcgaccaggtcaactttgtagtgtgccaactctttgccttgctagcagccatttggtttcgaacttatctacattcaagcaaaactagctcttttataagacatgtagttgctacccttttgggcctttatcttgcacttttttgctttggatggtatgccttacactttcttgtacaaagtggaatttcctactgtatcatgatcatcataggagtggagaacatgcacaattactgctttgtgtttgctctgggatacctcacagtgtgccaagttactcgagtctatatctttgactatggacaatattctgctgatttttcaggcccaatgatgatcattactcagaagatcactagtttggcttgcgaaattcatgatgggatgtttcggaaggatgaagaactgacttcctcacagagggatttagctgtaaggcgcatgccaagcttactggagtatttgagttacaactgtaacttcatggggatcctggcaggcccactttgctcttacaaagactacattactttcattgaaggcagatcataccatatcacacaatctggtgaaaatggaaaagaagagacacagtatgaaagaacagagccatctccaaatactgcggttgttcagaagctcttagtttgtgggctgtccttgttatttcacttgaccatctgtacaacattacctgtggagtacaacattgatgagcattttcaagctacagcttcgtggccaacaaagattatctatctgtatatctctcttttggctgccagacccaaatactattttgcatggacgctagctgatgccattaataatgctgcaggctttggtttcagagggtatgacgaaaatggagcagctcgctgggacttaatttccaatttgagaattcaacaaatagagatgtcaacaagtttcaagatgtttcttgataattggaatattcagacagctctttggctcaaaagggtgtgttatgaacgaacctccttcagtccaactatccagacgttcattctctctgccatttggcacggggtatacccaggatattatctaacgtttctaacaggggtgttaatgacattagcagcaagagctatgagaaataactttagacattatttcattgaaccttcccaactgaaattattttatgatgttataacatggatagtaactcaagtagcaataagttacacagttgtgccatttgtgcttctttctataaaaccatcactcacgttttacagctcctggtattattgcctgcacattcttggtatcttagtattattgttgttgccagtgaaaaaaactcaaagaagaaagaatacacatgaaaacattcagctctcacaatccaaaaagtttgatgaaggagaaaattctttgggacagaacagtttttctacaacaaacaatgtttgcaatcagaatcaagaaatagcctcgagacattcatcactaaagcagtgatcgggaaggctctgagggctgttttttttttttgatgttaacagaaaccaatcttagcaccttttcaaggggtttgagtttgttggaaaagcagttaactggggggaaatggacagttatagataaggaatttcctgtacaccagattggaaatggagtgaaacaagccctcccatgccatgtctccgtgggccacgccttatgtaagaatatttccatatttcagtgggcactcccaacctcagcacttgtccgtagggtcacacgcgtgccctgttgctgaatgtatgttgcgtatcccaaggcactgaagaggtggaaaaataatcgtgtcaatctggatgatagagagaaattaacttttccaaatgaatgtcttgccttaaaccctctatttcctaaaatattgttcctaaatggtattttcaagtgtaatattgtgagaacgctactgcagtagttgatgttgtgtgctgtaaaggattttaggaggaatttgaaacaggatatttaagagtgtggatatttttaaaatgcaataaacatctcagtatttgaagggttttcttaaagtatgtcaaatgactacaatccatagtgaaactgtaaacagtaatggacgccaaattataggtagctgattttgctggagagtttaattaccttgtgcagtcaaagagcgcttccagaaggaatctcttaaaacataatgagaggtttggtaatgtgatattttaagcttattctttttcttaaaagagagaggtgacgaaggaaggcaggaatgaagaagcactgcgtggcctccggtggaatgcacggggcacagccgcgactctgcaggcagcttcccccccatgccagggctctgcgccgtcatgtgagacttaaaaaaaaagttgaatgacttcgtgatactttggacttctaaattaaatttatcaggcataaattatgtagaattagaggctttgaaaataatactggtaggttgctcaaaggttttgaaagagaaatcgctaggtaggttactatctggctaatccatttcttatccttgacaatttaattcatatttgggaaacttttagggaaatgaaaaataaaagtcactgagtctgggtgacattttttaagaataatataaattcagtttcaaactcttctcacattaaaattttgctgtgaactcttactaaaatgagttttaggttctgtaagtggaaaaatgtgcttttattttatgggccatttttaccacaactaatcttgccttggattactaagcatctcctgcgatcccacagaggactgtggtggccacaggagctgaaagcagaagagtgggatttgatgccaggcagtggagtggcctcagccccagattgtacctcctgccctgtaggaggggagggggcaaagccttctgacttcacctttgtttgacctatgtatggaacttacttttactttttgccttaaatttttaatgaaatgcaaattttctgtgatggggttctctctctctttttttcggggggtggagtcactaataaatttgcaaatgaagttaaagacaaggcaaccatctggcttatgctatataatacttcatttaaagaagaaaggaaaagcaaatgcacttgcagcttttgaggtctcagcaaaaatgggcatgtgtcttttttgaagtttagaaatatcctaatctatttttatttatctaaaagtaagtgttttccggctgataaggctaaccctacccaggaaaggattgataactaaataaatttcctctgttttcccatgcattgaaattatgttggctgagcatggtggctcacacctgtaatcctagcactttgggaggccgaggtgggcggatcacttgaggtcaggagttggagaccagcctggccaacgtggtgaatccccgtctctactgaaaacacaaaaattagacgggcatggtggcgcacacctgtaatcccagctacttgggaggctgaggcaggagaattgcttgaacctgggaggtggaggttgcagtgagctaaaattgtgccactgcactccagcctgggtgacagaggaagactccgtctcacaaaaaaaaaaaaagaaaaaagaaattatgccagctgtttaatgtgagagaatagaaagaatgttcatggaatgtacctgccctgtaaaatgtttgatcattttcattaatgttgcagagaatccgactgctattaagagaaagtgaacaaattaagaatttaaaagacaggttcaggcatgtcataagtgaaaacaagaaggcttaatacaaacttgttgggttttgttcgtgtgtgtgtgtgtgtgtgtgtgtgtgtttttttttggttcagcctatctagccacctacaaataatcacatttctgttacctgaatttatttctcagcctgtaaaccttagtcactgttacctgtttcttgctcagtgaatatgatcttggcactgtcatctagaaagcaagatatttgattggttttctggttccttcgaagataataattccatatccagtttgactgattttcatacccctgaatcaactagttattttcatgaaatggtttttggatatctctcctctagtttggagaagtaataatcacaaagattaatattttgcttctagtacttacagtagaagaattttaaactggtacgtctactcctgttaaatagaaaggggattcgttgtattatgtgcttgcttttttttaatcaatagaataagattcaatgcatatttatgttttatattttccactattcaggtatcatgaaatcactctagagatgatcaatcaacatcatatttatacttttggttaattatatactactcagggaaaaaatgaacaaaaataactactcatccttcaatttcattttcttgaaacagtaagagtataatttggtatgcctcagctgtcaccattttataagtggctcattctgttcttaaagtaagtatttttattggaactcagggtaattgggggaatttatttagcttctaaaatatccggcaggatagagaagatttatttggcttcaaaaatgtctggtgaccacttctcttattagccactactgcccatttgcttcaaaaatatatttattggtctccaccatgtgtgacacacacaggatttccaaacataccacttttgagaaaaatgtgcagtaaaaaggaggtttctagaaagtgacagtaactcacatttaagcactagctgacctaggaggagacctggatcttcattctggttctgcctttcatgagacttaagacttggaggagccacctgtcctgtagaccccaagttcctcagccataagcaaacgggttaatcctaagagttcaggaccagttgggtgtcgtgaacggagccattagcaaggtctgtaggattcaaggacttgggcacattcacagtccacactattgtcatggtcattgacttactacttgagctcaaagccctgacatttcaaaaggttgtcatgataacagtgaaacctctgaatcccttaaatcagaaggcatggcaacatactttttctactggcaatagctcttacaatgagtgtttcataatgaaatagtctctgctgaagaaaacatgttttccttttgctctctctgctttgttggtttctgtgctgtgtggaattggagaagatatatgctctgaaatattttatacagattactgactactggacagggtttaccactatataacatctcaaagttattcaaggatatttaaagcatatttagtttagttacaccttattttaaaccgcagaaaacaatagctttaaaatttttgccattaaaataattataaatttatacttttactcaaggactagatcacagttttaggacaaaaatctctcctatttaaagttcataccttgtaagtatttagtttgtatattcatgaacaaatctggacatttatactttttttgtttccttatcaactgttcacaattattagttaattggtcttaacagttctacattataattgaaagaaaaattacttgagaaaataattgtttcagaatagtgcctactatatctgtgtcagctaaaaatttgtccagagttttagatataagctagtattttgtggagttttatccaggcgttaatagttcttcctggctgaaatttaatataggtgcagaatcctaaataacactgtgagatgtaatcttaactgccctcaataccttataaaactgctgcatttaacccagtgtgcatttaatgagtggctggtcgttgatacactcatcttagatgctgaaatttctgttttctccagcccttgtaaaagtgggtttcttgatgaacgcgtgctcccaatgctgaagcaaaagatttgcatttaaggagagaaatacaccctgaaatttgagtttgaaagattagaacatagagggtctctacagtgtttttctgcaacaccaagtagtcaaatctatttatagaaactctgattacaacagaaattttaaaatgaaattttccacatcggtattttgtaggaaagctcttataatcaatgcttaagctgctttttgaggcttttcttgtacagaggttgcagccaattacattttaattggtaggctgctgaataatgtttttgtatgttttaaaataatatttattttaataggttttttaacattatgcaaatcccaataaagaactgacacgttccataggccattgactgggaaattttgtgaaacacagcctaaatacacagtttttacaccaactaatttgtcttgcctttaaaactgattataactcttctttaagtacaacttttataaagaaaaaatacaacactaagactgtatgttctgtaaattatagtgtgatgacccatgcagaaccgctgtctgaagcttactcagcgattcatagccatctccagccatgttttatcaaatcacacactaaaaataaatggaaatgctacagtgaaaaaccaaaagttacagagcaacataagtaaaatgactaggcagtttcttagtaacatgtttgaaatgggaaaggtgactgactgcctttcaccagagtcttagctgtttcacgttcactattttaggttaattttcttgggaaatcaatttgaatattcccccctgtccttttgcattaaaggacgaaaatatatgttgagagtttgacagactttttaaatatgcctctttcccaattttatgtatttttggttctgcgcacacagatttatcaatgaagtacatttgcctctggctttatcacaaggaaaaaggaatcaaacattgaacacaaatgtgttccaaaccagtcttgtccatcttgtcacttttatgtgactgctcctctgaaccagaaggggcacgatagaaggccataggaatgaaagtaaatcattcaggtgaagtgagaaattcttccatatacagagtgaaaatgtgtgatttcattcctgccttcctttaaacgttgtcttgatctctgcctagtagtagttgagccctcagtcgcccaaacatgaggagagacccaactccagcagccagaatttagtatttacatttgccttcccaagttgagaatagaatgtggtgttctgtgctttctgtttttattattccaaaatatttttttaaagaagtgttatttttcaacagattcataaattagttcctgatgtacggtaaattaaaactcccactgtgtcagtcaaactgagatgtgctcatttcataaccactcatttctagtctgtcagagctgcactggtggcttattgctggtttttaaaggtgtttttaacttacatgtaacatgtttaggacatgttttttttttctaatttgtgtgtctttacaactgattaaacagtagtttaaaaata

SEQ ID NO: 17701 - DNA, 1512 bp, Homo sapiens
  source 1..1512: mol_type = unassigned DNA
agagacagcctggttgagattactcttggaggaaggcatcagttaaggacactggaaaagacaggctcttttgttctggttcctaatggagtggctttggctgttctttctccatcctatatcgttttaccagggggctgcatttccctttgcacttctcttcaattatctctgcatcatggattcattctccactcgtgccaggtacctctttctcctgactggaggaggtgccctggccgtggctgccatgggttcctacgccgtgctcgtcttcacccctgctgtctgcgctgtggctctcctctgttccctggctcctcagcaagtccacaggtggaccttctgctttcagatgagctggcagaccttgtgtcacctaggtctgcactacactgagtattatctgcatgagcctccttctgtgaggttctgcatcactctttcttctctcatgctcttgacccagagggtcacgtccctctctctggacatttgtgaggggaaagtgaaggcagcatctggaggcttcaggagcaggagctctttgtctgagcatgtgtgtaaggcactgccctatttcagctacttgctctttttccctgctctcctgggaggctctctgtgctccttccagcgatttcaggctcgtgttcaagggtccagtgctttgcatcccagacactctttctgggctctgagctggaggggtctgcagattcttggactagaatgcctaaacgtggcagtgagcagggtggtggatgcaggagcgggactgactgattgccagcaattcgagtgcatctatgtcgtgtggaccacagctgggcttttcaagctcacctactactcccactggatcctggacgactccctcctccacgcagcgggctttgggcctgagcttggtcagagccctggagaggagggatatgtccccgatgcagacatctggaccctggaaagaacccacaggatatctgtgttctcaagaaagtggaaccaaagcacagctcgatggctccgacggcttgtattccagcacagcagggcttggccgttgttgcagacatttgccttctctgcctggtggcatggactccatccaggacaggtgtttggtttcgtttgctgggccgtgatggtggaagctgactacctgattcactcctttgccaatgagtttatcagatcctggccgatgaggctgttctatagaaccctcacctgggcccacacccagttgatcattgcctacatcatgctggctgtggaggtcaggagtctctcctctctctggttgctctgtaattcgtacaacagtgtctttcccatggtgtactgtattctgcttttgctattggcgaagagaaagcacaaatgtaactgacatctttccctggctttcaccttaaacacccaggaaacattttagaaagtgccagatgacgcatcgataatgcatacatttgaacttttccataataaaattttttctaaagttttgga

SEQ ID NO: 17702 - DNA, 1389 bp, Homo sapiens
  source 1..1389: mol_type = unassigned DNA
ttccagtgttccagcttctgcgagatgaccctcaaggcgagcgagggcgagagtgggggcagcatgcacacggcgctctccgacctctacctggagcatttgctgcagaagcgtagtcggccagaggctgtatcgcatccattgaatactgtgaccgaggacatgtacaccaacgggtctcctgccccaggtagccctgcccaggtcaagggacaggaggtgcggaaagtgcgactcatacagtttgagaaggtcacagaagagcccatgggaatcacgctgaagctgaatgaaaaacagtcctgtacggtggccagaattcttcatggtggcatgatccatagacaaggctcccttcacgtgggggatgagatcctagaaatcaatggcacaaatgtgacaaatcattcagtggatcagctgcagaaggcgatgaaagaaaccaaaggaatgatctcattaaaagtaattcccaaccagcaaagccgtcttcctgcactacaggaggcgggactgaagtttgctactggggacattatccagattatcaacaaggatgacagcaattggtggcagggacgggtggaaggctcctccaaggagtcagcaggattgatcccttcccctgagctgcaggaatggcgagtggcaagtatggctcagtcagctcctagcgaagccccgagctgcagtccctttgggaagaagaagaagtacaaagacaaatatctggccaagcacagctcgatttttgatcagttggatgttgtttcctacgaggaagtcgttcggctccctgcattcaagaggaagaccctggtgctgatcggagccagtggggtgggtcgcagccacattaagaatgccctgctcagccagaatccggagaagtttgtgtaccctgtcccatatacaacacggccgccaaggaagagtgaggaagatgggaaggagtaccactttatctcaacggaggagatgacgaggaacatctctgccaatgagttcttggagtttggcagctaccaaggcaacatgtttggcaccaaatttgaaacagtgcaccagatccataagcagaacaagattgccatccttgacattgagccccagaccctgaaaattgttcggacagcagaactttcgcctttcattgtgttcattgcacctactgaccagggcactcagacagaagccctgcagcagctgcagaaggactctgaggccatccgcagccagtacgctcactactttgacctctcactggtcaataatggtgttgatgaaacccttaagaaattacaagaagccttcgaccaagcgtgcagttctccacagtgggtgcctgtctcctgggtttactaagcttgtagaatgggggaacccact

SEQ ID NO: 17703 - DNA, 2042 bp, Homo sapiens
  source 1..2042: mol_type = unassigned DNA
gtccgcgccctcccggcgcaccgcctgcggggcggtgactggcccagccgcaccgcgtctcccgccttctccgcagccccgcaggccccgggccctgtcattcccagcgctgccctgtcttgcgttccagtgttccagcttctgcgagatgaccctcaaggcgagcgagggcgagagtgggggcagcatgcacacggcgctctccgacctctacctggagcatttgctgcagaagcgtagtcggccagaggctgtatcgcatccattgaatactgtgaccgaggacatgtacaccaacgggtctcctgccccaggtagccctgcccaggtcaagggacaggaggtgcggaaagtgcgactcatacagtttgagaaggtcacagaagagcccatgggaatcacgctgaagctgaatgaaaaacagtcctgtacggtggccagaattcttcatggtggcatgatccatagacaaggctcccttcacgtgggggatgagatcctagaaatcaatggcacaaatgtgacaaatcattcagtggatcagctgcagaaggcgatgaaagaaaccaaaggaatgatctcattaaaagtaattcccaaccagcaaagccgtcttcctgcactacagatgttcatgagagcgcagtttgactatgatcccaaaaaggacaatctgatcccttgcaaggaggcgggactgaagtttgctactggggacattatccagattatcaacaaggatgacagcaattggtggcagggacgggtggaaggctcctccaaggagtcagcaggattgatcccttcccctgagctgcaggaatggcgagtggcaagtatggctcagtcagctcctagcgaagccccgagctgcagtccctttgggaagaagaagaagtacaaagacaaatatctggccaagcacagctcgatttttgatcagttggatgttgtttcctacgaggaagtcgttcggctccctgcattcaagaggaagaccctggtgctgatcggagccagtggggtgggtcgcagccacattaagaatgccctgctcagccagaatccggagaagtttgtgtaccctgtcccatatacaacacggccgccaaggaagagtgaggaagatgggaaggagtaccactttatctcaacggaggagatgacgaggaacatctctgccaatgagttcttggagtttggcagctaccaaggcaacatgtttggcaccaaatttgaaacagtgcaccagatccataagcagaacaagattgccatccttgacattgagccccagaccctgaaaattgttcggacagcagaactttcgcctttcattgtgttcattgcacctactgaccagggcactcagacagaagccctgcagcagctgcagaaggactctgaggccatccgcagccagtacgctcactactttgacctctcactggtcaataatggtgttgatgaaacccttaagaaattacaagaagccttcgaccaagcgtgcagttctccacagtgggtgcctgtctcctgggtttactaagcttgtagaatgggggaacccactgtatgcccctctccagcatttggaattccacccgccttgctttaagacaaacagggctgctccaactagttttgtgtcagcttccagctctctgcagctatcctaattcagccagtaaggttcagtcttcttgctcaggctcctgaagggttgattctcctgatagatggggccccactgatctggatttgaaaaggatttctagaaattgggggtaagaagtactaccaaaatgtaactgctaatcaagggtgatgcacagcaaaagcaatggaccccatccctctaaagcctgccctcctttgccttcaactgtatatgctgggtatttcatttgtctttttattttggagaaagcgtttttaactgcaactttctataatgccaaaatgacacatctgtgcaatagaatgatgtctgctctagggaaaccttcaaaagcaataaaaatgctgtgttgaaatgccaa

SEQ ID NO: 17704 - DNA, 2195 bp, Homo sapiens
  source 1..2195: mol_type = unassigned DNA
agctccgtccgcgccctcccggcgcaccgcctgcggggcggtgactggcccagccgcaccgcgtctcccgccttctccgcagccccgcaggccccgggccctgtcattcccagcgctgccctgtcttgcgttccagtgttccagcttctgcgagatgaccctcaaggcgagcgagggcgagagtgggggcagcatgcacacggcgctctccgacctctacctggagcatttgctgcagaagcgtagtcggccagagcttcctttgagcaactgcctctgccctttgaaccctgctgcagatgtttcctctgaaggggctttcagagcggcaggcattgccactccagcactttgtctgattaaaggccagaggctgcagaacaaaggccagacatggagtcctgggctgtatcgcatccattgaatactgtgaccgaggacatgtacaccaacgggtctcctgccccaggtagccctgcccaggtcaagggacaggaggtgcggaaagtgcgactcatacagtttgagaaggtcacagaagagcccatgggaatcacgctgaagctgaatgaaaaacagtcctgtacggtggccagaattcttcatggtggcatgatccatagacaaggctcccttcacgtgggggatgagatcctagaaatcaatggcacaaatgtgacaaatcattcagtggatcagctgcagaaggcgatgaaagaaaccaaaggaatgatctcattaaaagtaattcccaaccagcaaagccgtcttcctgcactacagatgttcatgagagcgcagtttgactatgatcccaaaaaggacaatctgatcccttgcaaggaggcgggactgaagtttgctactggggacattatccagattatcaacaaggatgacagcaattggtggcagggacgggtggaaggctcctccaaggagtcagcaggattgatcccttcccctgagctgcaggaatggcgagtggcaagtatggctcagtcagctcctagcgaagccccgagctgcagtccctttgggaagaagaagaagtacaaagacaaatatctggccaagcacagctcgatttttgatcagttggatgttgtttcctacgaggaagtcgttcggctccctgcattcaagaggaagaccctggtgctgatcggagccagtggggtgggtcgcagccacattaagaatgccctgctcagccagaatccggagaagtttgtgtaccctgtcccatatacaacacggccgccaaggaagagtgaggaagatgggaaggagtaccactttatctcaacggaggagatgacgaggaacatctctgccaatgagttcttggagtttggcagctaccaaggcaacatgtttggcaccaaatttgaaacagtgcaccagatccataagcagaacaagattgccatccttgacattgagccccagaccctgaaaattgttcggacagcagaactttcgcctttcattgtgttcattgcacctactgaccagggcactcagacagaagccctgcagcagctgcagaaggactctgaggccatccgcagccagtacgctcactactttgacctctcactggtcaataatggtgttgatgaaacccttaagaaattacaagaagccttcgaccaagcgtgcagttctccacagtgggtgcctgtctcctgggtttactaagcttgtagaatgggggaacccactgtatgcccctctccagcatttggaattccacccgccttgctttaagacaaacagggctgctccaactagttttgtgtcagcttccagctctctgcagctatcctaattcagccagtaaggttcagtcttcttgctcaggctcctgaagggttgattctcctgatagatggggccccactgatctggatttgaaaaggatttctagaaattgggggtaagaagtactaccaaaatgtaactgctaatcaagggtgatgcacagcaaaagcaatggaccccatccctctaaagcctgccctcctttgccttcaactgtatatgctgggtatttcatttgtctttttattttggagaaagcgtttttaactgcaactttctataatgccaaaatgacacatctgtgcaatagaatgatgtctgctctagggaaaccttcaaaagcaataaaaatgctgtgttgaaatgcc

SEQ ID NO: 17705 - DNA, 4414 bp, Homo sapiens
  source 1..4414: mol_type = unassigned DNA
cttcccagtgggactccagcagggcgtcgtggtctgtgcggtgtctcccaaaccactacctggctgcccccgtaccagctgctgggaaagactacttcctccgagttgtgccggcctccgcgttctcctcacctcccctctcctccggacctccgccccctcgcggagaggccttgccgctttaagagccgggctagcgattgacaagcaataaacgctgagcgcccggctgcgctggagccgcccggagctaggggcttcccggggcgcaggagagacgtttcagagcccttgcctccttcaccatgccggttgccgccaccaactctgaaactgccatgcagcaagtcctggacaacttgggatccctccccagtgccacgggggctgcagagctggacctgatcttccttcgaggcattatggaaagtcccatagtaagatccctggccaaggcccatgagaggctggaggagacgaagctggaggccgtgagagacaacaacctggagctggtgcaggagatcctgcgggacctggcgcacgtggctgagcagagcagcacagccgccgagctggcccacatcctccaggagccccacttccagtccctcctggagacgcacgactctgtggcctcaaagacctatgagacaccaccccccagccctggcctggaccctacattcagcaaccagcctgtacctcccgatgctgtgcgcatggtgggcatccgcaagacagccggagaacatctgggtgtaacgttccgcgtggagggcggcgagctggtgatcgcgcgcattctgcatgggggcatggtggctcaacaaggcctgctgcatgtgggtgacatcatcaaggaggtgaacgggcagccagtgggcagtgacccccgcgcactgcaggagctcctgcgcaatgccagtggcagtgtcatcctcaagatcctgcccagctaccaggagccccatctgccccgccaggtatttgtgaaatgtcactttgactatgacccggcccgagacagcctcatcccctgcaaggaagcaggcctgcgcttcaacgccggggacttgctccagatcgtaaaccaggatgatgccaactggtggcaggcatgccatgtcgaagggggcagtgctgggctcattcccagccagctgctggaggagaagcggaaagcatttgtcaagagggacctggagctgacaccaaactcagggaccctatgcggcagcctttcaggaaagaaaaagaagcgaatgatgtatttgaccaccaagaatgcagagtttgaccgtcatgagctgctcatttatgaggaggtggcccgcatgcccccgttccgccggaaaaccctggtactgattggggctcagggcgtgggacggcgcagcctgaagaacaagctcatcatgtgggatccagatcgctatggcaccacggtgccctacacctcccggcggccgaaagactcagagcgggaaggtcagggttacagctttgtgtcccgtggggagatggaggctgacgtccgtgctgggcgctacctggagcatggcgaatacgagggcaacctgtatggcacacgtattgactccatccggggcgtggtcgctgctgggaaggtgtgcgtgctggatgtcaacccccaggcggtgaaggtgctacgaacggccgagtttgtcccttacgtggtgttcatcgaggccccagacttcgagaccctgcgggccatgaacagggctgcgctggagagtggaatatccaccaagcagctcacggaggcggacctgagacggacagtggaggagagcagccgcatccagcggggctacgggcactactttgacctctgcctggtcaatagcaacctggagaggaccttccgcgagctccagacagccatggagaagctacggacagagccccagtgggtgcctgtcagctgggtgtactgagcctgttcacctggtctttggctcactctgtgttgaaacccagaacctgaatccatccccctcctgacctgtgaccccctgccacaatccttagcccccatatctggctgtccttgggtaacagctcccagcaggccctaagtctggcttcagcacagaggcgtgcactgccagggaggtgggcattcatggggtaccttgtgcccaggtgctgcccactcctgatgcccattggtcaccagatatctctgagggccaagctatgcccaggaatgtgtcagagtcacctccataatggtcagtacagagaagagaaaagctgctttgggaccacatggtcagtaggcacactgccccctgccacccctccccagtcaccagttctcctctggactggccacacccaccccattcctggactcctcccacctctcacccctgtgtcggaggaacaggccttgggctgtttccgtgtgaccaggggaatgtgtggcccgctggcagccaggcaggcccgggtggtggtgccagcctggtgccatcttgaaggctggaggagtcagagtgagagctagtggccacagctgcagagcactgcagctcccagctcctttggaaagggacagggtcgcagggcagatgctgctcggtccttccctcatccacagcttctcactgccgaagtttctccagatttctccaatgtgtcctgacaggtcagccctgctccccacagggccaggctggcaggggccagtgggctcagcccaggtaggggcaggatggagggctgagccctgtgacaacctgctgttaccaactgaagagccccaagctctccatggcccacagcaggcacaggtctgagctctatgtccttgaccttggtccatttggttttctgtctagccaggtccaggtagcccacttgcatcagggctgctgggttggaggggctaaggaggagtgcagaggggaccttgggagcctgggcttgaaggacagttgccctccaggaggttcctcacacacaactccagaggcgccatttacactgtagtctgtacaacctgtggttccacgtgcatgttcggcacctgtctgtgcctctggcaccaggttgtgtgtatgtgtgtgcgtgtgcacgtgcgtgtgtgtgtgtgtgtgtcaggtttaatttggggaggaagcaaagggttttgttttggaggtcactctttggggcccctttctgggggttccccatcagccctcatttcttataataccctgatcccagactccaaagccctggtcctttcctgatgtctcctcccttgtcttattgtccccctaccctaaatgcccccctgccataacttggggagggcagttttgtaaaataggagactccctttaagaaagaatgctgtcctagatgtacttgggcatctcatccttcattattctctgcattccttccggggggagcctgtcctcagaggggacaacctgtgacaccctgagtccaaacccttgtgcctcccagttcttccaagtgtctaactagtcttcgctgcagcgtcagccaaagctggcccctgaaccactgtgtgcccatttcctagggaaggggaaggagaataaacagaatatttattacaaatgttagaatatatttcttatactaggaatctcatttgcatttgcatagactatacacatggggtggaaaggccaggcctgcccccatctcgttggtgtggctctgcgtatactacacactcattctcctgctcctcttttcccttagtcagtgtcctttcatcctgattcagctctgccttgcatcaccctcagcctaagggagtgggaaggaaatggggtgttttcttgctgacctgaggctatagggtcacttgccatttcctaccttctctgggggatttgagggtagaggcaggggaagatctgttgttgcagctgcttctgcccccttgatccaaatgaccatcatctctgatggagatgggttgggtacctggccttcatggcaccttcactgctagggatgctcaaggggcaggcctggggcccttccctcctgtctcttctcggtctttcctctctgagcagcctcctacctcccctgcctgagccctcactccacagccctcccaggtacctagcagaggctgtcagtccttggctcacctggaacagggctggggctgggttggaacaggtgtgtgcccccaccacagctctatgactctgttctccctccctgccattgtggactcttgtatttgagggacctcaagagagtgaggaccctaccatccactgtccatattcagtcccagccccagtgcgcttcctctgttccctccctcagccatccaattcttgagttttctcactgattggttttctttctttttccttggattaaatgtgaaagcaaaggc

SEQ ID NO: 17706 - DNA, 3462 bp, Homo sapiens
  source 1..3462: mol_type = unassigned DNA
gagcgcccggctgcgctggagccgcccggagctaggggcttcccggggcgcaggagagacgtttcagagcccttgcctccttcaccatgccggttgccgccaccaactctgaaactgccatgcagcaagtcctggacaacttgggatccctccccagtgccacgggggctgcagagctggacctgatcttccttcgaggcattatggaaagtcccatagtaagatccctggccaaggtgataatggtattgtggtttatgcagcagaatgtctttgttcctatgaaatacatgctgaaatactttggggcccatgagaggctggaggagacgaagctggaggccgtgagagacaacaacctggagctggtgcaggagatcctgcgggacctggcgcacgtggctgagcagagcagcacagccgccgagctggcccacatcctccaggagccccacttccagtccctcctggagacgcacgactctgtggcctcaaagacctatgagacaccaccccccagccctggcctggaccctacattcagcaaccagcctgtacctcccgatgctgtgcgcatggtgggcatccgcaagacagccggagaacatctgggtgtaacgttccgcgtggagggcggcgagctggtgatcgcgcgcattctgcatgggggcatggtggctcaacaaggcctgctgcatgtgggtgacatcatcaaggaggtgaacgggcagccagtgggcagtgacccccgcgcactgcaggagctcctgcgcaatgccagtggcagtgtcatcctcaagatcctgcccagctaccaggagccccatctgccccgccaggtatttgtgaaatgtcactttgactatgacccggcccgagacagcctcatcccctgcaaggaagcaggcctgcgcttcaacgccggggacttgctccagatcgtaaaccaggatgatgccaactggtggcaggcatgccatgtcgaagggggcagtgctgggctcattcccagccagctgctggaggagaagcggaaagcatttgtcaagagggacctggagctgacaccaaactcagggaccctatgcggcagcctttcaggaaagaaaaagaagcgaatgatgtatttgaccaccaagaatgcagagtttgaccgtcatgagctgctcatttatgaggaggtggcccgcatgcccccgttccgccggaaaaccctggtactgattggggctcagggcgtgggacggcgcagcctgaagaacaagctcatcatgtgggatccagatcgctatggcaccacggtgccctacacctcccggcggccgaaagactcagagcgggaaggtcagggttacagctttgtgtcccgtggggagatggaggctgacgtccgtgctgggcgctacctggagcatggcgaatacgagggcaacctgtatggcacacgtattgactccatccggggcgtggtcgctgctgggaaggtgtgcgtgctggatgtcaacccccaggcggtgaaggtgctacgaacggccgagtttgtcccttacgtggtgttcatcgaggccccagacttcgagaccctgcgggccatgaacagggctgcgctggagagtggaatatccaccaagcagctcacggaggcggacctgagacggacagtggaggagagcagccgcatccagcggggctacgggcactactttgacctctgcctggtcaatagcaacctggagaggaccttccgcgagctccagacagccatggagaagctacggacagagccccagtgggtgcctgtcagctgggtgtactgagcctgttcacctggtctttggctcactctgtgttgaaacccagaacctgaatccatccccctcctgacctgtgaccccctgccacaatccttagcccccatatctggctgtccttgggtaacagctcccagcaggccctaagtctggcttcagcacagaggcgtgcactgccagggaggtgggcattcatggggtaccttgtgcccaggtgctgcccactcctgatgcccattggtcaccagatatctctgagggccaagctatgcccaggaatgtgtcagagtcacctccataatggtcagtacagagaagagaaaagctgctttgggaccacatggtcagtaggcacactgccccctgccacccctccccagtcaccagttctcctctggactggccacacccaccccattcctggactcctcccacctctcacccctgtgtcggaggaacaggccttgggctgtttccgtgtgaccaggggaatgtgtggcccgctggcagccaggcaggcccgggtggtggtgccagcctggtgccatcttgaaggctggaggagtcagagtgagagctagtggccacagctgcagagcactgcagctcccagctcctttggaaagggacagggtcgcagggcagatgctgctcggtccttccctcatccacagcttctcactgccgaagtttctccagatttctccaatgtgtcctgacaggtcagccctgctccccacagggccaggctggcaggggccagtgggctcagcccaggtaggggcaggatggagggctgagccctgtgacaacctgctgttaccaactgaagagccccaagctctccatggcccacagcaggcacaggtctgagctctatgtccttgaccttggtccatttggttttctgtctagccaggtccaggtagcccacttgcatcagggctgctgggttggaggggctaaggaggagtgcagaggggaccttgggagcctgggcttgaaggacagttgccctccaggaggttcctcacacacaactccagaggcgccatttacactgtagtctgtacaacctgtggttccacgtgcatgttcggcacctgtctgtgcctctggcaccaggttgtgtgtatgtgtgtgcgtgtgcacgtgcgtgtgtgtgtgtgtgtgtcaggtttaatttggggaggaagcaaagggttttgttttggaggtcactctttggggcccctttctgggggttccccatcagccctcatttcttataataccctgatcccagactccaaagccctggtcctttcctgatgtctcctcccttgtcttattgtccccctaccctaaatgcccccctgccataacttggggagggcagttttgtaaaataggagactccctttaagaaagaatgctgtcctagatgtacttgggcatctcatccttcattattctctgcattccttccggggggagcctgtcctcagaggggacaacctgtgacaccctgagtccaaacccttgtgcctcccagttcttccaagtgtctaactagtcttcgctgcagcgtcagccaaagctggcccctgaaccactgtgtgcccatttcctagggaaggggaaggagaataaacagaatatttattacaaa

SEQ ID NO: 17707 - DNA, 543 bp, Homo sapiens
  source 1..543: mol_type = unassigned DNA
aggcgtcccccggcccccgggccagctcctatcccaagacctccgccttcttttcgtcctgacacggcacttaggaccctattcactgggtttaaactccacaggcccctttcacccaggcccgttccctccctgtccacccgcccccgcccctgggccctctttctggggtgctggttgggagaaccaagccccgctgcccattgacactggtccccgcccctgcggtaggggctccaaagtggcttcaggcaccaaggtggtgagctgtgaggggccccggtatctgcgcggcctccccgggggctgtgcgggttgggggtacttagaagcccggcattacggaaggaggacttctggagtcccttctctgaccctgtgagggagagcagcgccagccaggagaaggctccaggagagacgtttcagagcccttgcctccttcaccatgccggttgccgccaccaactctgaaactgccatgcagcaagtcctggacaacttgggatccctccccagtgccacgggggctgcagagctgga

SEQ ID NO: 17708 - DNA, 741 bp, Homo sapiens
  source 1..741: mol_type = unassigned DNA
gtcccccggcccccgggccagctcctatcccaagacctccgccttcttttcgtcctgacacggcacttaggaccctattcactgggtttaaactccacaggcccctttcacccaggcccgttccctccctgtccacccgcccccgcccctgggccctctttctggggtgctggttgggagaaccaagccccgctgcccattgacactggtccccgcccctgcggtaggggctccaaagtggcttcaggcaccaaggagagacgtttcagagcccttgcctccttcaccatgccggttgccgccaccaactctgaaactgccatgcagcaagtcctggacaacttgggatccctccccagtgccacgggggctgcagagctggacctgatcttccttcgaggcattatggaaagtcccatagtaagatccctggccaaggcccatgagaggctggaggagacgaagctggaggccgtgagagacaacaacctggagctggtgcaggagatcctgcgggacctggcgcacgtggctgagcagagcagcacagccgccgagctggcccacatcctccaggagccccacttccagtccctcctggagacgcacgactctgtggcctcaaagacctatgagacaccaccccccagccctggcctggaccctacattcagcaaccagcctgtacctcccgatgctgtgcgcatggtgggcatccgcaagacagccggagaacatctg

SEQ ID NO: 17709 - DNA, 545 bp, Homo sapiens
  source 1..545: mol_type = unassigned DNA
ataaacgctgagcgcccggctgcgctggagccgcccggagctaggggcttcccggggcgcagggaaggaggacttctggagtcccttctctgaccctgtgagggagagcagcgccagccaggagaaggctccaggagagacgtttcagagcccttgcctccttcaccatgccggttgccgccaccaactctgaaactgccatgcagcaagtcctggacaacttgggatccctccccagtgccacgggggctgcagagctggacctgatcttccttcgaggcattatggaaagtcccatagtaagatccctggccaaggcccatgagaggctggaggagacgaagctggaggccgtgagagacaacaacctggagctggtgcaggagatcctgcgggacctggcgcacgtggctgagcagagcagcacagccgccgagctggcccacatcctccaggagccccacttccagtccctcctggagacgcacgactctgtggcctcaaagacctatgagacaccaccccccagccctggcctggaccct

SEQ ID NO: 17710 - DNA, 588 bp, Homo sapiens
  source 1..588: mol_type = unassigned DNA
aggtaggcgtcccccggcccccgggccagctcctatcccaagacctccgccttcttttcgtcctgacacggcacttaggaccctattcactgggtttaaactccacaggcccctttcacccaggcccgttccctccctgtccacccgcccccgcccctgggccctctttctggggtgctggttgggagaaccaagccccgctgcccattgacactggtccccgcccctgcggtaggggctccaaagtggcttcaggcaccaagggaaggaggacttctggagtcccttctctgaccctgtgagggagagcagcgccagccaggagaaggctccaggagagacgtttcagagcccttgcctccttcaccatgccggttgccgccaccaactctgaaactgccatgcagcaagtcctggacaacttgggatccctccccagtgccacgggggctgcagagctggacctgatcttccttcgaggcattatggaaagtcccatagtaagatccctggccaaggcccatgagaggctggaggagacgaagctggaggccgtgagagacaacaacctggagctggtgcaggaga

SEQ ID NO: 17711 - DNA, 584 bp, Homo sapiens
  source 1..584: mol_type = unassigned DNA
aaagtggcttcaggcaccaaggtggtgagctgtgaggggccccggtatctgcgcggcctccccgggggctgtgcgggttgggggtacttagaagcccggcattacgagagacgtttcagagcccttgcctccttcaccatgccggttgccgccaccaactctgaaactgccatgcagcaagtcctggacaacttgggatccctccccagtgccacgggggctgcagagctggacctgatcttccttcgaggcattatggaaagtcccatagtaagatccctggccaaggcccatgagaggctggaggagacgaagctggaggccgtgagagacaacaacctggagctggtgcaggagatcctgcgggacctggcgcacgtggctgagcagagcagcacagccgccgagctggcccacatcctccaggagccccacttccagtccctcctggagacgcacgactctgtggcctcaaagacctatgagacaccaccccccagccctggcctggaccctacattcagcaaccagcctgtacctcccgatgctgtgcgcatggtgggcatccgcaagacagccggaga

SEQ ID NO: 17712 - DNA, 2275 bp, Homo sapiens
  source 1..2275: mol_type = unassigned DNA
gacctggtgccactcctcagggaatgtctgagtggaggctgcagtaccctgatggtggcctcttgggcacaagatctcagaggaatggggtcaccggagcggagctgagtccttcccttctgcccacacttttccctgtgtgcaaatgtgccctcatttttcctttctggggaactgagttccaagatgcctgacttgcttcctgggcatcatccccttcattaagaggaagaactcatgggagatgggggaggggaagaagctgctgtgaggcgagggccatgcagcaagtcctggacaacttgggatccctccccagtgccacgggggctgcagagctggacctgatcttccttcgaggcattatggaaagtcccatagtaagatccctggccaaggcccatgagaggctggaggagacgaagctggaggccgtgagagacaacaacctggagctggtgcaggagatcctgcgggacctggcgcacgtggctgagcagagcagcacagccgccgagctggcccacatcctccaggagccccacttccagtccctcctggagacgcacgactctgtggcctcaaagacctatgagacaccaccccccagccctggcctggaccctacattcagcaaccagcctgtacctcccgatgctgtgcgcatggtgggcatccgcaagacagccggagaacatctgggtgtaacgttccgcgtggagggcggcgagctggtgatcgcgcgcattctgcatgggggcatggtggctcaacaaggcctgctgcatgtgggtgacatcatcaaggaggtgaacgggcagccagtgggcagtgacccccgcgcactgcaggagctcctgcgcaatgccagtggcagtgtcatcctcaagatcctgcccagctaccaggagccccatctgccccgccaggtatttgtgaaatgtcactttgactatgacccggcccgagacagcctcatcccctgcaaggaagcaggcctgcgcttcaacgccggggacttgctccagatcgtaaaccaggatgatgccaactggtggcaggcatgccatgtcgaagggggcagtgctgggctcattcccagccagctgctggaggagaagcggaaagcatttgtcaagagggacctggagctgacaccaaactcagggaccctatgcggcagcctttcaggaaagaaaaagaagcgaatgatgtatttgaccaccaagaatgcagagtttgaccgtcatgagctgctcatttatgaggaggtggcccgcatgcccccgttccgccggaaaaccctggtactgattggggctcagggcgtgggacggcgcagcctgaagaacaagctcatcatgtgggatccagatcgctatggcaccacggtgccctacacctcccggcggccgaaagactcagagcgggaaggtcagggttacagctttgtgtcccgtggggagatggaggctgacgtccgtgctgggcgctacctggagcatggcgaatacgagggcaacctgtatggcacacgtattgactccatccggggcgtggtcgctgctgggaaggtgtgcgtgctggatgtcaacccccaggcggtgaaggtgctacgaacggccgagtttgtcccttacgtggtgttcatcgaggccccagacttcgagaccctgcgggccatgaacagggctgcgctggagagtggaatatccaccaagcagctcacggaggcggacctgagacggacagtggaggagagcagccgcatccagcggggctacgggcactactttgacctctgcctggtcaatagcaacctggagaggaccttccgcgagctccagacagccatggagaagctacggacagagccccagtgggtgcctgtcagctgggtgtactgagcctgttcacctggtctttggctcactctgtgttgaaacccagaacctgaatccatccccctcctgacctgtgaccccctgccacaatccttagcccccatatctggctgtccttgggtaacagctcccagcaggccctaagtctggcttcagcacagaggcgtgcactgccagggaggtgggcattcatggggtaccttgtgcccaggtgctgcccactcctgatgcccattggtcaccagatatctctgagggccaagctatgcccaggaatgtgtcagagtcacctccataatggtcagtacagagaagagaaaagctgctttgggaccacatggtcagtaggcacactgccccctgccacccct

SEQ ID NO: 17713 - DNA, 1434 bp, Homo sapiens
  source 1..1434: mol_type = unassigned DNA
actcgcgcggctcccgttcgcggagcacacatcccggcgcgacgaggttccttcggagagcgagcgggagtcggtgctcggcctcctgcggggagcagcccgaggcctggtctcagagaacacagtagatgtgtagtcagtttgttcaataaatatgcttgatggagcttcaatacccacctccacccccttctcccagaatctgcagggagaggtcgggaggtgacaacgccagcatgccagtgctatcggaggactctggtttgcatgaaaccctggccctgctgacctcccagctcagacctgactccaaccacaaggaggagatgggcttcctgagggatgttttcagtgaaaaaagcctcagttacttaatgaagattcatgagaagcttcgctattatgaaaggcaaagtccaaccccagttctgcacagcgctgtggccctcgctgaggacgtgatggaggagttgcaggccgcctccgtgcacagtgatgagagggagctgctccagctgctgtccaccccgcacctgagggctgtgctcatggtacatgacacggttgcccagaagaattttgaccccgttctcccgcctctgcctgacaatatcgatgaggattttgatgaggaatcggtgaagatcgtccgcttggtgaagaacaaggaacccctgggtgccaccatccggcgggacgagcactcaggggctgttgtggtggccaggatcatgcgaggaggcgcagcagacaggagcggcctggtccacgttggagatgagctccgagaagtgaacgggatcgcagtcctgcacaagcggcccgacgagatcagccagattctggcccagtcccagggatccatcaccctaaaaatcatcccagccacccaggaggaagatcgcttaaaggagagcaaggtgttcatgcgcgccctcttccactacaaccctcgggaggaccgggccatcccttgccaggaggcgggcctgcccttccagcgcaggcaggtcctggaggtggtgagccaggacgaccccacgtggtggcaggccaagcgagtcggggacaccaaccttcgagccggcctcatcccctccaaggggttccaggagagacgactaagctaccggagagcctatgggacccccatctctcctcagttctctcaacccaagcaggagctgagcctgcccaggcattgggcccccacccagcttttacccagctgtggggcacactgccctggcgggaaaggcacacacacccctacattaataccaattctattatcaccatcattgcaattggagtttattcaatattaacaccactaccacgcagtgaggggtgtttgcggctctccagagccccttttcacttgttttggtcagttttttcaaaggtcttagagataggcaaaaagtttttttt

SEQ ID NO: 17714 - DNA, 2182 bp, Homo sapiens
  source 1..2182: mol_type = unassigned DNA
ccagcggcggcccaggctctgggcactcgcgcggctcccgttcgcggagcacacatcccggcgcgacgaggttccttcggagagcgagcgggagtcggtgctcggcctcctgcggggagcagcccgaggaatctgcagggagaggtcgggaggtgacaacgccagcatgccagtgctatcggaggactctggtttgcatgaaaccctggccctgctgacctcccagctcagacctgactccaaccacaaggaggagatgggcttcctgagggatgttttcagtgaaaaaagcctcagttacttaatgaagattcatgagaagcttcgctattatgaaaggcaaagtccaaccccagttctgcacagcgctgtggccctcgctgaggacgtgatggaggagttgcaggccgcctccgtgcacagtgatgagagggagctgctccagctgctgtccaccccgcacctgagggctgtgctcatggtacatgacacggttgcccagaagaattttgaccccgttctcccgcctctgcctgacaatatcgatgaggattttgatgaggaatcggtgaagatcgtccgcttggtgaagaacaaggaacccctgggtgccaccatccggcgggacgagcactcaggggctgttgtggtggccaggatcatgcgaggaggcgcagcagacaggagcggcctggtccacgttggagatgagctccgagaagtgaacgggatcgcagtcctgcacaagcggcccgacgagatcagccagattctggcccagtcccagggatccatcaccctaaaaatcatcccagccacccaggaggaagatcgcttaaaggagagcaaggtgttcatgcgcgccctcttccactacaaccctcgggaggaccgggccatcccttgccaggaggcgggcctgcccttccagcgcaggcaggtcctggaggtggtgagccaggacgaccccacgtggtggcaggccaagcgagtcggggacaccaaccttcgagccggcctcatcccctccaaggggttccaggagagacgactaagctaccggagagccgcgggcaccctgccgagcccccagagcctcaggaagcccccctatgatcagccttgtgacaaagagacctgtgactgtgagggctacctcaaagggcactatgtggctggtcttcggaggagcttccggctgggctgtagggagagactgggtggctcgcaggaaggaaagatgtcctccggagctgagtctccggagctgctgacttacgaagaggtggccaggtaccaacaccagcccggagagcggccccgcctggtggttctgatcgggtctctgggagcccgactgcacgagctgaagcaaaaggtggtggctgagaacccacagcactttggcgtcgctgttccacataccaccaggccccgaaagagccatgagaaggaaggagtggaatatcactttgtgtctaagcaagcatttgaggccgacttacatcacaacaagttcctggaacatggtgaatataaggaaaatctgtatggaaccagcctggaggccattcaggctgttatggccaaaaacaaagtttgtttggtggatgtggagccagaagcactgaaacaactgaggacctcagaatttaaaccctatattatatttgtaaagcctgcaattcaggaaaaaagaaaaacgccacctatgtccccagcttgtgaggacacagcagccccatttgatgagcagcagcaagagatggccgcttctgccgccttcatagaccggcattacgggcacctggtagacgccgtgctggtgaaggaggatctccagggtgcctacagccagctcaaagtggtcttagagaagctgagcaaggacactcactgggtacctgttagttgggtcaggtaactttatcccagaacatccaagctggacgggaccttgaagatcatctagtccagactccctcattttaccatcaaggaatctcaagcgcagagagggagagaattctccacaaattccatcatcgagaagagtataagtgggaagtcttgtttgttgttggtttttgtctgttgtttttcactgcacctctttggatcatgatttgaaaggggcatatcagaaaacaacacatttcatttattaaagtatcacaggcaa

SEQ ID NO: 17715 - DNA, 2996 bp, Homo sapiens
  source 1..2996: mol_type = unassigned DNA
agcttccacgccgctgtttcttcatcaataaaatgggaacattcgcagtcatttctcaggactttgtgcagacaaaaagtttatcatagaaatcaccccacacaatgcttggcacatcgaggacactcagcacatcttagctttatttccttcctctctgaaaaaagtaagcagagttatttgttcccatcctctctgtccacagcctggtctcagagaacacagtagatgtgtagtcagtttgttcaataaatatgcttgatggagcttcaatacccacctccacccccttctcccagaatctgcagggagaggtcgggaggtgacaacgccagcatgccagtgctatcggaggactctggtttgcatgaaaccctggccctgctgacctcccagctcagacctgactccaaccacaaggaggagatgggcttcctgagggatgttttcagtgaaaaaagcctcagttacttaatgaagattcatgagaagcttcgctattatgaaaggcaaagtccaaccccagttctgcacagcgctgtggccctcgctgaggacgtgatggaggagttgcaggccgcctccgtgcacagtgatgagagggagctgctccagctgctgtccaccccgcacctgagggctgtgctcatggtacatgacacggttgcccagaagaattttgaccccgttctcccgcctctgcctgacaatatcgatgaggattttgatgaggaatcggtgaagatcgtccgcttggtgaagaacaaggaacccctgggtgccaccatccggcgggacgagcactcaggggctgttgtggtggccaggatcatgcgaggaggcgcagcagacaggagcggcctggtccacgttggagatgagctccgagaagtgaacgggatcgcagtcctgcacaagcggcccgacgagatcagccagattctggcccagtcccagggatccatcaccctaaaaatcatcccagccacccaggaggaagatcgcttaaaggagagcaaggtgttcatgcgcgccctcttccactacaaccctcgggaggaccgggccatcccttgccaggaggcgggcctgcccttccagcgcaggcaggtcctggaggtggtgagccaggacgaccccacgtggtggcaggccaagcgagtcggggacaccaaccttcgagccggcctcatcccctccaaggggttccaggagagacgactaagctaccggagagccgcgggcaccctgccgagcccccagagcctcaggaagcccccctatgatcagccttgtgacaaagagacctgtgactgtgagggctacctcaaagggcactatgtggctggtcttcggaggagcttccggctgggctgtagggagagactgggtggctcgcaggaaggaaagatgtcctccggagctgagtctccggagctgctgacttacgaagaggtggccaggtaccaacaccagcccggagagcggccccgcctggtggttctgatcgggtctctgggagcccgactgcacgagctgaagcaaaaggtggtggctgagaacccacagcactttggcgtcgctgttccacataccaccaggccccgaaagagccatgagaaggaaggagtggaatatcactttgtgtctaagcaagcatttgaggccgacttacatcacaacaagttcctggaacatggtgaatataaggaaaatctgtatggaaccagcctggaggccattcaggctgttatggccaaaaacaaagtttgtttggtggatgtggagccagaagcactgaaacaactgaggacctcagaatttaaaccctatattatatttgtaaagcctgcaattcaggaaaaaagaaaaacgccacctatgtccccagcttgtgaggacacagcagccccatttgatgagcagcagcaagagatggccgcttctgccgccttcatagaccggcattacgggcacctggtagacgccgtgctggtgaaggaggatctccagggtgcctacagccagctcaaagtggtcttagagaagctgagcaaggacactcactgggtacctgttagttgggtcaggtaactttatcccagaacatccaagctggacgggaccttgaagatcatctagtccagactccctcattttaccatcaaggaatctcaagcgcagagagggagagaattctccacaaattccatcatcgagaagagtataagtgggaagtcttgtttgttgttggtttttgtctgttgtttttcactgcacctctttggatcatgatttgaaaggggcatatcagaaaacaacacatttcatttattaaagtatcacaggcaagctgaccctgattctttgtaccaaagttaagtagccactgtcttttgtgggtggtagtggttaatttatacagtactgattcgcagaatgtttaagctttttaaacatagtgacgcttagtagtttttttggaagctaacttgttttatccaaggggattttacatgtaactgaagttcccctgtcttcaagcactaaaacgttgatcttaaccttttttttgaagtgcttgcctggtaatagaaaacgggttctctgcctattttaaaatagtgaatatacgtaaattttctctggaaggctgaggcacacttcaccatcaacatgaattactgtactatcctgtactgcagtggtgccttcagggactcgaggaatgtaaggttgcctttcccctttctaaataccctcagattcctaacatcgagcccatgctttgtttgatttgttctattccatccattgtcccttttgttactgacagttgccttggtcctagccagtccctgccatgagatcataggggttcccattgtgctagatcttgggaaaccagatgactctccctgtcaaaactatggctacgtcactgtaaaccatttctgtcaagaataaaagtatgtagacccagagtgtgggcctaa

SEQ ID NO: 17716 - DNA, 2330 bp, Homo sapiens
  source 1..2330: mol_type = unassigned DNA
gagattttatcgggagcagtgaggtgactttggcagctaacaggccactagtatcctactaaagcttttgtctggataggagcaacatgcatgtttacagtcttgcagtgtgctgagagctggtggccagtgggactgagtgagctgtgtgccgtgtattgacccgcttcctagtcctgaattcctttcagaagctccggcagggaggatgatacagtcagacaaaggagcagatccaccagacaagaaggacatgaagctttctacagccaccaatccacagaatggcctctcccagatcctgaggcttgtgctgcaagagctgagtctgttctacggcagagatgtgaatggagtgtgtctcttgtacgatctcctccactcgccgtggcttcaggctctgctaaagatttatgactgcctccaggaatttaaagaaaagaaactagttcctgccacaccacatgcacaggtgttatcctatgaggtagtggagttattacgtgaaacccctacttcccctgagatccaagagctgagacaaatgctccaggctccacacttcaaggccttgctcagtgcccatgacacgatagctcagaaagattttgaaccccttctccctccactgccagacaatatccctgagagtgaggaagcaatgaggattgtttgtttagtgaaaaaccaacagcccctgggagccaccatcaagcgccacgagatgacaggggacatcttggtggccaggatcatccacggtgggctggcggagagaagtgggttgctatatgctggagacaaactggtagaagtgaatggagtttcagttgagggactggaccctgaacaagtgatccatattctggccatgtctcgaggcacaatcatgttcaaggtggttccagtctctgaccctcctgtgaatagccagcagatggatcccgacatcccctgcatggacgctggattgcctttccagaagggggacatcctccagattgtggaccagaatgatgccctctggtggcaggcccgaaaaatctcagaccctgctacctgcgctgggcttgtcccttctaaccaccttctgaagaggaagcaacgggaattctggtggtctcagccgtaccagcctcacacctgcctcaagtcaaccctatacaaggaggagtttgttggctacggtcagaagttctttatagctggcttccgccgcagcatgcgcctttgtcgcaggaagtctcacctcagcccgctgcatgccagtgtgtgctgcaccggcagctgctacagtgcagtgggtgccccttacgaggaggtggtgaggtaccagcgacgcccttcagacaagtaccgcctcatagtgctcatgggaccctctggtgttggagtaaatgagctcagaagacaacttattgaatttaatcccagccattttcaaagtgctgtgccacacactactcgtactaaaaagagttacgaaatgaatgggcgtgagtatcactatgtgtccaaggaaacatttgaaaacctcatatatagtcacaggatgctggagtatggtgagtacaaaggccacctgtatggcactagtgtggatgctgttcaaacagtccttgtcgaaggaaagatctgtgtcatggacctagagcctcaggatattcaaggggttcgaacccatgaactgaagccctatgtcatatttataaagccatcgaatatgaggtgtatgaaacaatctcggaaaaatgccaaggttattactgactactatgtggacatgaagttcaaggatgaagacctacaagagatggaaaatttagcccaaagaatggaaactcagtttggccaattttttgatcatgtgattgtgaatgacagcttgcacgatgcatgtgcccagttgttgtctgccatacagaaggctcaggaggagcctcagtgggtaccagcaacatggatttcctcagatactgagtctcaatgagacttcttgtttaatgctggagttttaacactgtacccttgatacagcgatccatagttgcaatctaaaacaacagtatttgacccattttaatgtgtacaactttaaaagtgcagcaatttattaattaatcttatttgaaaaaaatttttattgtatggttatgtggttacctattttaacttaattttttttcctttacctcatatgcagctgtggtagaaatatgaataatgttaagtcactgagtatgagaacctttcgcagatttcacatgatctttttaagatttaaataaagagctttcctaaataaaataagcaatagttaactttagaaa

SEQ ID NO: 17717 - DNA, 2352 bp, Homo sapiens
  source 1..2352: mol_type = unassigned DNA
gagattttatcgggagcagtgaggtgactttggcagctaacaggccactagtatcctactaaagcttttgtctggataggagcaacatgcatgtttacagtcttgcagtgtgctgagagctggtggccagtgggactgagtgagctgtgtgccgtgtattgacccgcttcctagtcctgaattcctttcagaagctccggcagggaggatgatacagtcagacaaaggagcagatccaccagacaagaaggacatgaagctttctacagccaccaatccacagaatggcctctcccagatcctgaggcttgtgctgcaagagctgagtctgttctacggcagagatgtgaatggagtgtgtctcttgtacgatctcctccactcgccgtggcttcaggctctgctaaagatttatgactgcctccaggaatttaaagaaaagaaactagttcctgccacaccacatgcacaggtgttatcctatgaggtagtggagttattacgtgaaacccctacttcccctgagatccaagagctgagacaaatgctccaggctccacacttcaagggagccaccatcaagcgccacgagatgacaggggacatcttggtggccaggatcatccacggtgggctggcggagagaagtgggttgctatatgctggagacaaactggtagaagtgaatggagtttcagttgagggactggaccctgaacaagtgatccatattctggccatgtctcgaggcacaatcatgttcaaggtggttccagtctctgaccctcctgtgaatagccagcagatggtgtacgtccgtgccatgactgagtactggccccaggaggatcccgacatcccctgcatggacgctggattgcctttccagaagggggacatcctccagattgtggaccagaatgatgccctctggtggcaggcccgaaaaatctcagaccctgctacctgcgctgggcttgtcccttctaaccaccttctgaagagatggagtttcgctcttgttgcccaggctggagtgcaatggcactatctcgactcactgcaacctctgcctcccgggttcaaacgattctcctgcctcagcctcccacgtagctgggattatatagaagatgacatgaagattgatgagaaatgtgtggaagcagaaaaagaaagcattgagacagacaaggaggagtttgttggctacggtcagaagttctttatagctggcttccgccgcagcatgcgcctttgtcgcaggaagtctcacctcagcccgctgcatgccagtgtgtgctgcaccggcagctgctacagtgcagtgggtgccccttacgaggaggtggtgaggtaccagcgacgcccttcagacaagtaccgcctcatagtgctcatgggaccctctggtgttggagtaaatgagctcagaagacaacttattgaatttaatcccagccattttcaaagtgctgtgccacacactactcgtactaaaaagagttacgaaatgaatgggcgtgagtatcactatgtgtccaaggaaacatttgaaaacctcatatatagtcacaggatgctggagtatggtgagtacaaaggccacctgtatggcactagtgtggatgctgttcaaacagtccttgtcgaaggaaagatctgtgtcatggacctagagcctcaggatattcaaggggttcgaacccatgaactgaagccctatgtcatatttataaagccatcgaatatgaggtgtatgaaacaatctcggaaaaatgccaaggttattactgactactatgtggacatgaagttcaaggatgaagacctacaagagatggaaaatttagcccaaagaatggaaactcagtttggccaattttttgatcatgtgattgtgaatgacagcttgcacgatgcatgtgcccagttgttgtctgccatacagaaggctcaggaggagcctcagtgggtaccagcaacatggatttcctcagatactgagtctcaatgagacttcttgtttaatgctggagttttaacactgtacccttgatacagcgatccatagttgcaatctaaaacaacagtatttgacccattttaatgtgtacaactttaaaagtgcagcaatttattaattaatcttatttgaaaaaaatttttattgtatggttatgtggttacctattttaacttaattttttttcctttacctcatatgcagctgtggtagaaatatgaataatgttaagtcactgagtatgagaacctttcgcagatttcacatgatctttttaagatttaaataaagagctttcctaaataaaataagcaatagttaacttt

SEQ ID NO: 17718 - DNA, 2457 bp, Homo sapiens
  source 1..2457: mol_type = unassigned DNA
gagattttatcgggagcagtgaggtgactttggcagctaacaggccactagtatcctactaaagcttttgtctggataggagcaacatgcatgtttacagtcttgcagtgtgctgagagctggtggccagtgggactgagtgagctgtgtgccgtgtattgacccgcttcctagtcctgaattcctttcagaagctccggcagggaggatgatacagtcagacaaaggagcagatccaccagacaagaaggacatgaagctttctacagccaccaatccacagaatggcctctcccagatcctgaggcttgtgctgcaagagctgagtctgttctacggcagagatgtgaatggagtgtgtctcttgtacgatctcctccactcgccgtggcttcaggctctgctaaagatttatgactgcctccaggaatttaaagaaaagaaactagttcctgccacaccacatgcacaggtgttatcctatgaggtagtggagttattacgtgaaacccctacttcccctgagatccaagagctgagacaaatgctccaggctccacacttcaaggccttgctcagtgcccatgacacgatagctcagaaagattttgaaccccttctccctccactgccagacaatatccctgagagtgaggaagcaatgaggattgtttgtttagtgaaaaaccaacagcccctgggagccaccatcaagcgccacgagatgacaggggacatcttggtggccaggatcatccacggtgggctggcggagagaagtgggttgctatatgctggagacaaactggtagaagtgaatggagtttcagttgagggactggaccctgaacaagtgatccatattctggccatgtctcgaggcacaatcatgttcaaggtggttccagtctctgaccctcctgtgaatagccagcagatggtgtacgtccgtgccatgactgagtactggccccaggaggatcccgacatcccctgcatggacgctggattgcctttccagaagggggacatcctccagattgtggaccagaatgatgccctctggtggcaggcccgaaaaatctcagaccctgctacctgcgctgggcttgtcccttctaaccaccttctgaagaggaagcaacgggaattctggtggtctcagccgtaccagcctcacacctgcctcaagtcaaccctatcaatctccttgaagggagaagatgacatgaagattgatgagaaatgtgtggaagcagagaacagcactgcagagtctgaggagctcaattcagacaaggaggagtttgttggctacggtcagaagttctttatagctggcttccgccgcagcatgcgcctttgtcgcaggaagtctcacctcagcccgctgcatgccagtgtgtgctgcaccggcagctgctacagtgcagtgggtgccccttacgaggaggtggtgaggtaccagcgacgcccttcagacaagtaccgcctcatagtgctcatgggaccctctggtgttggagtaaatgagctcagaagacaacttattgaatttaatcccagccattttcaaagtgctgtgccacacactactcgtactaaaaagagttacgaaatgaatgggcgtgagtatcactatgtgtccaaggaaacatttgaaaacctcatatatagtcacaggatgctggagtatggtgagtacaaaggccacctgtatggcactagtgtggatgctgttcaaacagtccttgtcgaaggaaagatctgtgtcatggacctagagcctcaggatattcaaggggttcgaacccatgaactgaagccctatgtcatatttataaagccatcgaatatgaggtgtatgaaacaatctcggaaaaatgccaaggttattactgactactatgtggacatgaagttcaaggatgaagacctacaagagatggaaaatttagcccaaagaatggaaactcagtttggccaattttttgatcatgtgattgtgaatgacagcttgcacgatgcatgtgcccagttgttgtctgccatacagaaggctcaggaggagcctcagtgggtaccagcaacatggatttcctcagatactgagtctcaatgagacttcttgtttaatgctggagttttaacactgtacccttgatacagcgatccatagttgcaatctaaaacaacagtatttgacccattttaatgtgtacaactttaaaagtgcagcaatttattaattaatcttatttgaaaaaaatttttattgtatggttatgtggttacctattttaacttaattttttttcctttacctcatatgcagctgtggtagaaatatgaataatgttaagtcactgagtatgagaacctttcgcagatttcacatgatctttttaagatttaaataaagagctttcctaaataaaataagcaatagttaacttt

SEQ ID NO: 17719 - DNA, 2244 bp, Homo sapiens
  source 1..2244: mol_type = unassigned DNA
gagattttatcgggagcagtgaggtgactttggcagctaacaggccactagtatcctactaaagcttttgtctggataggagcaacatgcatgtttacagtcttgcagtgtgctgagagctggtggccagtgggactgagtgagctgtgtgccgtgtattgacccgcttcctagtcctgaattcctttcagaagctccggcagggaggatgatacagtcagacaaaggagcagatccaccagacaagaaggacatgaagctttctacagccaccaatccacagaatggcctctcccagatcctgaggcttgtgctgcaagagctgagtctgttctacggcagagatgtgaatggagtgtgtctcttgtacgatctcctccactcgccgtggcttcaggctctgctaaagatttatgactgcctccaggaatttaaagaaaagaaactagttcctgccacaccacatgcacaggtgttatcctatgagggagccaccatcaagcgccacgagatgacaggggacatcttggtggccaggatcatccacggtgggctggcggagagaagtgggttgctatatgctggagacaaactggtagaagtgaatggagtttcagttgagggactggaccctgaacaagtgatccatattctggccatgtctcgaggcacaatcatgttcaaggtggttccagtctctgaccctcctgtgaatagccagcagatggtgtacgtccgtgccatgactgagtactggccccaggaggatcccgacatcccctgcatggacgctggattgcctttccagaagggggacatcctccagattgtggaccagaatgatgccctctggtggcaggcccgaaaaatctcagaccctgctacctgcgctgggcttgtcccttctaaccaccttctgaagaggaagcaacgggaattctggtggtctcagccgtaccagcctcacacctgcctcaagtcaaccctatcaatctccttgaagggagaagatgacatgaagattgatgagaaatgtgtggaagcagagaacagcactgcagagtctgaggagctcaattcagacaaggaggagtttgttggctacggtcagaagttctttatagctggcttccgccgcagcatgcgcctttgtcgcaggaagtctcacctcagcccgctgcatgccagtgtgtgctgcaccggcagctgctacagtgcagtgggtgccccttacgaggaggtggtgaggtaccagcgacgcccttcagacaagtaccgcctcatagtgctcatgggaccctctggtgttggagtaaatgagctcagaagacaacttattgaatttaatcccagccattttcaaagtgctgtgccacacactactcgtactaaaaagagttacgaaatgaatgggcgtgagtatcactatgtgtccaaggaaacatttgaaaacctcatatatagtcacaggatgctggagtatggtgagtacaaaggccacctgtatggcactagtgtggatgctgttcaaacagtccttgtcgaaggaaagatctgtgtcatggacctagagcctcaggatattcaaggggttcgaacccatgaactgaagccctatgtcatatttataaagccatcgaatatgaggtgtatgaaacaatctcggaaaaatgccaaggttattactgactactatgtggacatgaagttcaaggatgaagacctacaagagatggaaaatttagcccaaagaatggaaactcagtttggccaattttttgatcatgtgattgtgaatgacagcttgcacgatgcatgtgcccagttgttgtctgccatacagaaggctcaggaggagcctcagtgggtaccagcaacatggatttcctcagatactgagtctcaatgagacttcttgtttaatgctggagttttaacactgtacccttgatacagcgatccatagttgcaatctaaaacaacagtatttgacccattttaatgtgtacaactttaaaagtgcagcaatttattaattaatcttatttgaaaaaaatttttattgtatggttatgtggttacctattttaacttaattttttttcctttacctcatatgcagctgtggtagaaatatgaataatgttaagtcactgagtatgagaacctttcgcagatttcacatgatctttttaagatttaaataaagagctttcctaaataaaataagcaatagttaacttt

SEQ ID NO: 17720 - DNA, 2462 bp, Homo sapiens
  source 1..2462: mol_type = unassigned DNA
gagattttatcgggagcagtgaggtgactttggcagctaacaggccactagtatcctactaaagcttttgtctggataggagcaacatgcatgtttacagtcttgcagtgtgctgagagctggtggccagtgggactgagtgagctgtgtgccgtgtattgacccgcttcctagtcctgaattcctttcagaagctccggcagggaggatgatacagtcagacaaaggagcagatccaccagacaagaaggacatgaagctttctacagccaccaatccacagaatggcctctcccagatcctgaggcttgtgctgcaagagctgagtctgttctacggcagagatgtgaatggagtgtgtctcttgtacgatctcctccactcgccgtggcttcaggctctgctaaagatttatgactgcctccaggaatttaaagaaaagaaactagttcctgccacaccacatgcacaggtgttatcctatgaggtagtggagttattacgtgaaacccctacttcccctgagatccaagagctgagacaaatgctccaggctccacacttcaaggccttgctcagtgcccatgacacgatagctcagaaagattttgaaccccttctccctccactgccagacaatatccctgagagtgaggaagcaatgaggattgtttgtttagtgaaaaaccaacagcccctgggagccaccatcaagcgccacgagatgacaggggacatcttggtggccaggatcatccacggtgggctggcggagagaagtgggttgctatatgctggagacaaactggtagaagtgaatggagtttcagttgagggactggaccctgaacaagtgatccatattctggccatgtctcgaggcacaatcatgttcaaggtggttccagtctctgaccctcctgtgaatagccagcagatggtgtacgtccgtgccatgactgagtactggccccaggaggatcccgacatcccctgcatggacgctggattgcctttccagaagggggacatcctccagattgtggaccagaatgatgccctctggtggcaggcccgaaaaatctcagaccctgctacctgcgctgggcttgtcccttctaaccaccttctgaagaggaagcaacgggaattctggtggtctcagccgtaccagcctcacacctgcctcaagtcaaccctatcaatttctatggaagaagaagatgacatgaagattgatgagaaatgtgtggaagcagatgaagaaacatttgaatctgaggaactttcagaagacaaggaggagtttgttggctacggtcagaagttctttatagctggcttccgccgcagcatgcgcctttgtcgcaggaagtctcacctcagcccgctgcatgccagtgtgtgctgcaccggcagctgctacagtgcagtgggtgccccttacgaggaggtggtgaggtaccagcgacgcccttcagacaagtaccgcctcatagtgctcatgggaccctctggtgttggagtaaatgagctcagaagacaacttattgaatttaatcccagccattttcaaagtgctgtgccacacactactcgtactaaaaagagttacgaaatgaatgggcgtgagtatcactatgtgtccaaggaaacatttgaaaacctcatatatagtcacaggatgctggagtatggtgagtacaaaggccacctgtatggcactagtgtggatgctgttcaaacagtccttgtcgaaggaaagatctgtgtcatggacctagagcctcaggatattcaaggggttcgaacccatgaactgaagccctatgtcatatttataaagccatcgaatatgaggtgtatgaaacaatctcggaaaaatgccaaggttattactgactactatgtggacatgaagttcaaggatgaagacctacaagagatggaaaatttagcccaaagaatggaaactcagtttggccaattttttgatcatgtgattgtgaatgacagcttgcacgatgcatgtgcccagttgttgtctgccatacagaaggctcaggaggagcctcagtgggtaccagcaacatggatttcctcagatactgagtctcaatgagacttcttgtttaatgctggagttttaacactgtacccttgatacagcgatccatagttgcaatctaaaacaacagtatttgacccattttaatgtgtacaactttaaaagtgcagcaatttattaattaatcttatttgaaaaaaatttttattgtatggttatgtggttacctattttaacttaattttttttcctttacctcatatgcagctgtggtagaaatatgaataatgttaagtcactgagtatgagaacctttcgcagatttcacatgatctttttaagatttaaataaagagctttcctaaataaaataagcaatagttaactttagaaa

SEQ ID NO: 17721 - DNA, 5552 bp, Homo sapiens
  source 1..5552: mol_type = unassigned DNA
gttttagacttagaggcgcgcgactgcgcgcacccggctggagctgcggagaggaccaatgagcgggcgctctctccgctccggctcgggattgggcaagccgcgccagcctctcacgggcggggtgggactcggatccgcgcgcccactgcgccagagtcccgggggcgcgtgcgcggtctcgcggcggccgcaggggccggtctcgcgcggtctagaagtggagttgctggcggctgcggcggtgacggcggcgacggaggaggcaggcggtggggcgggggcggggactaaggattctgaggtggggagtcgggagtttctggattctttatccggaatttcaagggccgccggagggctgtcgcttctgcagtgcgtaggagcggccggggcgggaggctccgcggagccgaggcgtggagaataagaaagccttgagttttgtgaaaaaccggagaagagaaactaaaaggacagtagaaaaggcttttccagtttgcataatatttccttcatggatactttttcatagcattattatgtgatgtgagaagtttttttttttgaagtaacatggattttatactacagaatcaagagaattggcttataggaaaaattgatttataaaaagtggtacaggttttcatagataaccatgacaacatcccatatgaatgggcatgttacagaggaatcagacagcgaagtaaaaaatgttgatcttgcatcaccagaggaacatcagaagcaccgagagatggctgttgactgccctggagatttgggcaccaggatgatgccaatacgtcgaagtgcacagttggagcgtattcggcaacaacaggaggacatgaggcgtaggagagaggaagaagggaaaaagcaagaacttgaccttaattcttccatgagacttaagaaactagcccaaattcctccaaagaccggaatagataaccctatgtttgatacagaggaaggaattgtcttagaaagtcctcattatgctgtgaaaatattagaaatagaagacttgttttcttcacttaaacatatccaacatactttggtagattctcagagccaggaggatatttcactgcttttacaacttgttcaaaataaggatttccagaatgcatttaagatacacaatgccatcacagtacacatgaacaaggccagtcctccatttcctcttatctccaacgcacaagatcttgctcaagaggtacaaactgttttgaagccagttcatcataaggaaggacaagaactaactgctttgctgaatactccacatattcaggcacttttactggcccacgataaggttgctgagcaggaaatgcagctagagcccattacagatgagagagtttatgaaagtattggccagtatggaggagaaactgtaaaaatagttcgtatagaaaaggctcgtgatattccgttgggtgctacagttcgtaatgaaatggactctgtcatcattagccggatagtaaaagggggtgctgcagagaaaagtggtctgttgcatgaaggagatgaagttctagagattaatggcattgaaattcgggggaaagatgtcaatgaggtttttgacttgttgtctgatatgcatggtactttgacttttgtcctgattcccagtcaacagatcaagccgcctcctgccaaggaaacagtaatccatgtaaaagctcattttgactatgacccctcagatgacccttatgttccatgtcgagagttaggtctgtcttttcaaaaaggtgatatacttcatgtgatcagtcaagaagatccaaactggtggcaggcctacagggaaggggacgaagataatcaacctctagccgggcttgttccagggaaaagctttcagcagcaaagggaagccatgaaacaaaccatagaagaagataaggagccagaaaaatcaggaaaactgtggtgtgcaaagaagaataaaaagaagaggaaaaaggttttatataatgccaataaaaatgatgattatgacaacgaggagatcttaacctatgaggaaatgtcactttatcatcagccagcaaataggaagagacctatcatcttgattggtccacagaactgtggccagaatgaattgcgtcagaggctcatgaacaaagaaaaggaccgctttgcatctgcagttcctcatacaacccggagtaggcgagaccaagaagtagccggtagagattaccactttgtttcgcggcaagcattcgaggcagacatagcagctggaaagttcattgagcatggtgaatttgagaagaatttgtatggaactagcatagattctgtacggcaagtgatcaactctggcaaaatatgtcttttaagtcttcgtacacagtcattgaagactctccggaattcagatttgaaaccatatattatcttcattgcacccccttcacaagaaagacttcgggcattattggccaaagaaggcaagaatccaaagcctgaagagttgagagaaatcattgagaagacaagagagatggagcagaacaatggccactactttgatacggcaattgtgaattccgatcttgataaagcctatcaggaattgcttaggttaattaacaaacttgatactgaacctcagtgggtaccatccacttggctgaggtgaaagaaacatccattctgtggcatgttggacttgatctggcaaaaactgccaataggaggactgcccgacactgcagcaagattgaggataagatggaaggcagcagtataagctgtagatctgttcttagatctcttgaattagtgagacgacagttcccttaggcagtttgtgcatggcatcctttattctctatacatggctttagcggttcttgcctcattttgggattctaaatggaagctttcaacagagcattccattttgtcctgttaaaaccttttgttttcacctaaaccctttctgcttagttgtatctctgtgaaaaacttgtatacacaagcgtccatgtctcacacaaatattgatgtgattattcttaagtgttaaatcattaacacttaaatgacttcattgggaatattgagcagagggactgtgcttctatgcactgggcaaggcagtatttgcttaggaaactaatttagtcatcagagatactttcctaaaaaggaaaaataaaaaacaaaatggtgccactttgggttgaagctactttgttaggcttgaattcatttatatgtcttttgattcttaaaaaaacaaaaaacattccattagaagcaccagtttttttgctcagactttgtggatcagactctacactcaacacactctaatctacttaaaggtatacaaaatatgctgatcttttttaaattatgatttcctgaatttttttcttaagtcgtctcaactgatttactcacttagcttcccttccctcatcagcatagtataatagaatgtatgttacatttttatgaatggcaggtgttcattataatctgtattgacttaaaaagtttcttcctcatgatgctaatagttttttgtatacatgggaggatagcacatttgacagtttttgcatttttatgtatgagcacagtatcctatgactgtgctacgtatatataggtaataaactggaattctgttgatgaatatagctgctgtactgtatattaatatttaatagatcaacaaatggtcattgaaaacacttgtttagcattagaataaaattatatatgtccttgggaaatattatgacagttgactttaagatcaaaaggaagggaagacctgaaagtcatttgaacattttaggaaaagaatattggagagaaaaaggtattaaatatatagaaataggtttttaacctaacaaggtctgcctcttatgacgagaatgcaacagcttggtaaatcataaaagaaacatttaagctaataggattttcgtactgtctctatagctgtagctttaaaattcaacgtatataattggcatggaaacttaatttgcagtcttttcaagcctttaggatagtgtgatgtgtaacaaacaacctcaaatgtgaatgccttgattttatttttatggtgactttagctacagcatttcctatacccagagctaaacactggaataatactgacatcatttaatttaacataagcaattatgtttaaggagtaatttgtgtcatgtacatatttgattgattttttttcttctacataattttatttgaacaaatgtagacagtttatatgtcgcctttttctgttcaaatttgcatggcctattaagttggctggagagtgttttatgtggaaatattttcaagataatgttccttaggaagaaaataacattcttgggttgagggaaggaatgccatacactactgtctcttcagatctgaaatactccagtttagagccaggaaatttcacaggtcacaccgatttttagcattaaaaactaaggaatatacttagcacttacttaatcttttcagttttccagtttacgtctcaggaatgaagtgtagtctatggttgacaatggagttttgtgatcctgcttattgtaactgacaactgttttcaactccaagagctaaactattggcagttcatgttaagttagagtgagggtgtaggtagtgtcagtgagtggctcttgtgcctgctgtagacattaggcctgcactagggccatgtgctgtcaagattcaggaacatggctttaacaagcagatcttgtatcaaggcagaggtgatgccatgccatacttttaggaagtctgagatgataaatatttcaaggtcagtgaagtctatcaatcattctccccttcctcatcagcaatggtagatagaaatgtcctaaacttttctaaatcctagtgatgaggatgtgctgatattcaacatagtccttaaagtgaaaactgagttgttgctgacctccacaaaagaatatggaaaaaagccttgctgtacacctagttgtacagccactctggccaattccatttcctgtccctctgtggttctgactggagaccccagtgtgggggaggtcttaccatttaatatagaaatgatatcaataactaatgctatgtacttggaaaatccaaataaggaagttttaggttggtgcataactttgtttctcaaattttcgttgtcagaacaaatggaaggagaatattatttagactaatccagatttgctttctatgaaaatctaatgtctggattatcttccttttctcatggcctaagaaataaggatcaataaggaatgatttgaatgtaattttgtgaatgtgtggaaaatataaagcagggatttagccttaataaaggtaaccttctgacatctgttgttaatccccctttgtactcttttcctgtatctgcactgttattttgagatgtcatactgtacactgtattgtaaaaataaaaagtaaaattatatttcaaattttaaaagcca

SEQ ID NO: 17722 - DNA, 5006 bp, Homo sapiens
  source 1..5006: mol_type = unassigned DNA
gggagtttctggattctttatccggaatttcaagggccgccggagggctgtcgcttctgcagtgcgtaggagcggccggggcgggaggctccgcggagccgaggcgtggagaataagaaagccttgagttttgtgaaaaaccggagaagagaaactaaaaggacagtagaaaaggcttttccagtttgcataataggaacatcagaagcaccgagagatggctgttgactgccctggagatttgggcaccaggatgatgccaatacgtcgaagtgcacagttggagcgtattcggcaacaacaggaggacatgaggcgtaggagagaggaagaagggaaaaagcaagaacttgaccttaattcttccatgagacttaagaaactagcccaaattcctccaaagaccggaatagataaccctatgtttgatacagaggaaggaattgtcttagaaagtcctcattatgctgtgaaaatattagaaatagaagacttgttttcttcacttaaacatatccaacatactttggtagattctcagagccaggaggatatttcactgcttttacaacttgttcaaaataaggatttccagaatgcatttaagatacacaatgccatcacagtacacatgaacaaggccagtcctccatttcctcttatctccaacgcacaagatcttgctcaagaggtacaaactgttttgaagccagttcatcataaggaaggacaagaactaactgctttgctgaatactccacatattcaggcacttttactggcccacgataaggttgctgagcaggaaatgcagctagagcccattacagatgagagagtttatgaaagtattggccagtatggaggagaaactgtaaaaatagttcgtatagaaaaggctcgtgatattccgttgggtgctacagttcgtaatgaaatggactctgtcatcattagccggatagtaaaagggggtgctgcagagaaaagtggtctgttgcatgaaggagatgaagttctagagattaatggcattgaaattcgggggaaagatgtcaatgaggtttttgacttgttgtctgatatgcatggtactttgacttttgtcctgattcccagtcaacagatcaagccgcctcctgccaaggaaacagtaatccatgtaaaagctcattttgactatgacccctcagatgacccttatgttccatgtcgagagttaggtctgtcttttcaaaaaggtgatatacttcatgtgatcagtcaagaagatccaaactggtggcaggcctacagggaaggggacgaagataatcaacctctagccgggcttgttccagggaaaagctttcagcagcaaagggaagccatgaaacaaaccatagaagaagataaggagccagaaaaatcaggaaaactgtggtgtgcaaagaagaataaaaagaagaggaaaaaggttttatataatgccaataaaaatgatgattatgacaacgaggagatcttaacctatgaggaaatgtcactttatcatcagccagcaaataggaagagacctatcatcttgattggtccacagaactgtggccagaatgaattgcgtcagaggctcatgaacaaagaaaaggaccgctttgcatctgcagttcctcatacaacccggagtaggcgagaccaagaagtagccggtagagattaccactttgtttcgcggcaagcattcgaggcagacatagcagctggaaagttcattgagcatggtgaatttgagaagaatttgtatggaactagcatagattctgtacggcaagtgatcaactctggcaaaatatgtcttttaagtcttcgtacacagtcattgaagactctccggaattcagatttgaaaccatatattatcttcattgcacccccttcacaagaaagacttcgggcattattggccaaagaaggcaagaatccaaagcctgaagagttgagagaaatcattgagaagacaagagagatggagcagaacaatggccactactttgatacggcaattgtgaattccgatcttgataaagcctatcaggaattgcttaggttaattaacaaacttgatactgaacctcagtgggtaccatccacttggctgaggtgaaagaaacatccattctgtggcatgttggacttgatctggcaaaaactgccaataggaggactgcccgacactgcagcaagattgaggataagatggaaggcagcagtataagctgtagatctgttcttagatctcttgaattagtgagacgacagttcccttaggcagtttgtgcatggcatcctttattctctatacatggctttagcggttcttgcctcattttgggattctaaatggaagctttcaacagagcattccattttgtcctgttaaaaccttttgttttcacctaaaccctttctgcttagttgtatctctgtgaaaaacttgtatacacaagcgtccatgtctcacacaaatattgatgtgattattcttaagtgttaaatcattaacacttaaatgacttcattgggaatattgagcagagggactgtgcttctatgcactgggcaaggcagtatttgcttaggaaactaatttagtcatcagagatactttcctaaaaaggaaaaataaaaaacaaaatggtgccactttgggttgaagctactttgttaggcttgaattcatttatatgtcttttgattcttaaaaaaacaaaaaacattccattagaagcaccagtttttttgctcagactttgtggatcagactctacactcaacacactctaatctacttaaaggtatacaaaatatgctgatcttttttaaattatgatttcctgaatttttttcttaagtcgtctcaactgatttactcacttagcttcccttccctcatcagcatagtataatagaatgtatgttacatttttatgaatggcaggtgttcattataatctgtattgacttaaaaagtttcttcctcatgatgctaatagttttttgtatacatgggaggatagcacatttgacagtttttgcatttttatgtatgagcacagtatcctatgactgtgctacgtatatataggtaataaactggaattctgttgatgaatatagctgctgtactgtatattaatatttaatagatcaacaaatggtcattgaaaacacttgtttagcattagaataaaattatatatgtccttgggaaatattatgacagttgactttaagatcaaaaggaagggaagacctgaaagtcatttgaacattttaggaaaagaatattggagagaaaaaggtattaaatatatagaaataggtttttaacctaacaaggtctgcctcttatgacgagaatgcaacagcttggtaaatcataaaagaaacatttaagctaataggattttcgtactgtctctatagctgtagctttaaaattcaacgtatataattggcatggaaacttaatttgcagtcttttcaagcctttaggatagtgtgatgtgtaacaaacaacctcaaatgtgaatgccttgattttatttttatggtgactttagctacagcatttcctatacccagagctaaacactggaataatactgacatcatttaatttaacataagcaattatgtttaaggagtaatttgtgtcatgtacatatttgattgattttttttcttctacataattttatttgaacaaatgtagacagtttatatgtcgcctttttctgttcaaatttgcatggcctattaagttggctggagagtgttttatgtggaaatattttcaagataatgttccttaggaagaaaataacattcttgggttgagggaaggaatgccatacactactgtctcttcagatctgaaatactccagtttagagccaggaaatttcacaggtcacaccgatttttagcattaaaaactaaggaatatacttagcacttacttaatcttttcagttttccagtttacgtctcaggaatgaagtgtagtctatggttgacaatggagttttgtgatcctgcttattgtaactgacaactgttttcaactccaagagctaaactattggcagttcatgttaagttagagtgagggtgtaggtagtgtcagtgagtggctcttgtgcctgctgtagacattaggcctgcactagggccatgtgctgtcaagattcaggaacatggctttaacaagcagatcttgtatcaaggcagaggtgatgccatgccatacttttaggaagtctgagatgataaatatttcaaggtcagtgaagtctatcaatcattctccccttcctcatcagcaatggtagatagaaatgtcctaaacttttctaaatcctagtgatgaggatgtgctgatattcaacatagtccttaaagtgaaaactgagttgttgctgacctccacaaaagaatatggaaaaaagccttgctgtacacctagttgtacagccactctggccaattccatttcctgtccctctgtggttctgactggagaccccagtgtgggggaggtcttaccatttaatatagaaatgatatcaataactaatgctatgtacttggaaaatccaaataaggaagttttaggttggtgcataactttgtttctcaaattttcgttgtcagaacaaatggaaggagaatattatttagactaatccagatttgctttctatgaaaatctaatgtctggattatcttccttttctcatggcctaagaaataaggatcaataaggaatgatttgaatgtaattttgtgaatgtgtggaaaatataaagcagggatttagccttaataaaggtaaccttctgacatctgttgttaatccccctttgtactcttttcctgtatctgcactgttattttgagatgtcatactgtacactgtattgtaaaaataaaaagtaaaattatatttcaaattttaaaagcca

SEQ ID NO: 17723 - DNA, 479 bp, Homo sapiens
  source 1..479: mol_type = unassigned DNA
cttcccccacacgctgcgcaaactccggccagcgggagacccctggcagccaggcgggcttcctcaggcgcgcgagctgcggccgtggagggtgtgagcccaacctttgtccctcggagcaacgctgcctgcgcggtgcccgctccttctgcttggctgggcatgcaccttggcgcgggccacagccagccgagcccgaggtgcagggggcgcggcggggagtcgtctgccccctgcgccctctctccgaggtcgcgacgcgcgggactctcccggccgggtctgggaaatcggcgagggaacgctttcctttagaagtcagaatgtagtcagcgttcctctgcctgactcagctgctgaataagaaagccttgagttttgtgaaaaaccggagaagagaaactaaaaggacagtagaaaaggcttttccagtttgcataataggaacatcagaagcaccgagagatggctgttgactg

SEQ ID NO: 17724 - DNA, 567 bp, Homo sapiens
  source 1..567: mol_type = unassigned DNA
ctttatccggaatttcaagggccgccggagggctgtcgcttctgcagtgcgtaggagcggccggggcgggaggctccgcggagccgaggcgtggagaggaacatcagaagcaccgagagatggctgttgactgccctggagatttgggcaccaggatgatgccaatacgtcgaagtgcacagttggagcgtattcggcaacaacaggaggacatgaggcgtaggagagaggaagaagggaaaaagcaagaacttgaccttaattcttccatgagacttaagaaactagcccaaattcctccaaagaccggaatagataaccctatgtttgatacagaggaaggaattgtcttagaaagtcctcattatgctgtgaaaatattagaaatagaagacttgttttcttcacttaaacatatccaacatactttggtagattctcagagccaggaggatatttcactgcttttacaacttgttcaaaataaggatttccagaatgcatttaagatacacaatgccatcacagtacacatgaacaaggccagtcctccatttcctcttatct

SEQ ID NO: 17725 - DNA, 3799 bp, Homo sapiens
  source 1..3799: mol_type = unassigned DNA
ggctggctgcgcgcgcggaggcagcggcgggggcgaccggagctggggcagagtggggagcgagggagggggaggagagagagggaggcggagggcagtgagagacgcatttccagttctcaactacgagccacgagtttgcagatggggctgctcggcggcgcctgtggctgagggagagcagcggcggcggggagcgaccgggagcggcggcagcggcggcgcggaggcggctgaggtgcgagccgcaatgcagcaagtcttggaaaaccttacggagctgccctcgtctactggagcagaagaaatagacctaattttcctcaagggaattatggagaatcctattgtaaaatcacttgctaaggctcatgagaggctagaagattccaaactagaagctgtcagtgacaataacttggaattagtcaatgaaattcttgaagacatcactcctctaataaatgtggatgaaaatgtggcagaattggttggtatactcaaagaacctcacttccagtcactgttggaggcccatgatattgtggcatcaaagtgttatgattcacctccatcaagcccagaaatgaataattcttctatcaataatcagttattaccagtagatgccattcgtattcttggtattcacaaaagagctggggaaccactgggtgtgacatttagggttgaaaataatgatctggtaattgcccgaatcctccatgggggaatgatagatcgacaaggtctacttcatgtgggagatataattaaagaagtcaatggccatgaggttggaaataatccaaaggaattacaagaattactgaaaaatattagtggaagtgtcaccctaaaaatcttaccaagttatagagataccattactcctcaacaggtatttgtgaagtgtcattttgattataatccatacaatgacaacctaataccttgcaaagaagcaggattgaagttttccaaaggagagattcttcagattgtaaatagagaagatccaaattggtggcaggctagccatgtaaaagagggaggaagcgctggtctcattccaagccagttcctggaagagaagagaaaggcatttgttagaagagactgggacaattcaggacctttttgtggaactataagtagcaaaaaaaagaaaaagatgatgtatctcacaaccagaaatgcagaatttgatcgtcatgaaatccagatatatgaggaggtagccaaaatgcctcccttccagagaaaaacattagtattgataggagctcaaggtgtaggccgaagaagcttgaaaaacaggttcatagtattgaatcccactagatttggaactacggtgccatttacttcacggaaaccaagggaagatgaaaaagatggccaggcatataagtttgtgtcacgatctgagatggaagcagatattaaagctggaaagtatttggaacatggggaatatgaaggaaatctctatggaaccaaaattgattctattcttgaggttgtccaaactggacggacttgcattctggatgtcaacccacaagcactgaaagtattgaggacatcagagtttatgccctatgtggtatttattgcggctccggagctagagacgttacgtgccatgcacaaggctgtggtggatgcaggaatcactaccaagcttctgaccgactctgacttgaagaaaacagtggatgaaagtgcacggattcagagagcatacaaccactattttgatttgatcatcataaatgataatctagacaaagcctttgaaaaactgcaaactgccatagagaaactgagaatggaaccacagtgggtcccaatcagctgggtttactgatgattcagtaaggttaacaatgaaaattaaactcttaaaaagtgactgcaacaaataaaccttctactgagaaaatacatcacagatagaagattatctgctaagtccaggcatttttatggtgtagattgaaataatagtacacttctgaatttttatataaaatgtggttggaaggtgtactaatatataatttatcttaatttttctaactttgtatggataatctttctattcatatcacataaagaaatgcgttgaagcattttgtatatgttttgatttagtacccttgcctttttcatcaaaggaattttcaaatcattcactctaacattggtctcatattttcactgtgataatgaatattacttgaaatagttttgtaaagctgtcatttagttcagtattcaaatagtgaagggttagtcttaatagaagaaaatatagttattgaccttccttcttataaatttcttacaaaagcagaattttaagtcagtgttatagctagtctactaccatctaaatctgacatcaaaagtctgatcagtttacgtattttcattatttcggagatgtatggctatccattctaatttatacagctatattagttttgtctcttcatttctatctttactgaaaaattgaagagcaataccttgcactctcttttgaggttattctttttatttgttgcagtgatatgatgctaactaatttaacatgtacacagtaagctctggggctggaagcaaggtcatgcagactgagagagtgccttatcctgtaaaaccttacagcaaaatgacacttgaagaaagtttattttcacatgtaaaattttgactgacaaaaggaacctactactttaaacaatggttttattagaacatggtcagcaaatgtatcatgcctctgcaaattttagtgatgtttagagatgcctctaagtttgcagttggaggtttttgtgcttttagaaatgtgatgtgatccttagggtacctgttttgtctgttgtgttgagaaccaaacccattgaacaacttaaaaaattgggaaataattgtcagctattttgtatacatacacacaaaatatatacattatataatatgtatattatgtattatataatatatataaaatgttttgtatattttttacatatctgttaaaaaatgtactttgtttttttgtttgtttgttttgagatggagtctctctctgtcacccatgctggagtacagtggcgcgatctcagcccgctgcaacctctgcctcctgggttcatgcgactctcgtgcctcagcctcccaagtaattgagattacagttgggtgccaccatgtccggctaatttttgtatttttagtacagatggggtttcaccatgttggccagggtggtctcgagctcctgacctcaagtgatccacccaccttggcctcccaaagtgctgagattacaagcatgagccactgcacctagccaagaagtgtactttttgtttaatgattaccgaaagaagttctcctttagaagcattgacttatacaaattcccacattcacctcagttaatatcttcctttaggattcttggataatagaaattcttcctaaaacatactcagagatgcagctcattattaaattaaggtaaccacattctgtattgttgctagcttttcatgtaaacattattcacactttaaaggattaggtgtttaaatattgatggtcatctttgtctggtgttaggtgccagacacctggctgctgaatttgttttttccctcaccaaagttgtcatttggaacgccagctgggaggactttgaaggaaaagaaaatatatgacaataggcagtattgacacattgtttaaaatctttttcacaataaaacaaaacacccaa

SEQ ID NO: 17726 - DNA, 3848 bp, Homo sapiens
  source 1..3848: mol_type = unassigned DNA
caactacgagccacgagtttgcagatggggctgctcggcggcgcctgtggctgagggagagcagcggcggcggggagcgaccgggagcggcggcagcggcggcgcggaggcggctgaggtgcgagccggactaaatcattttgctactttaaaaaaatcacgaaagtacattatttgaagtttggagaagaaagggatttggtaacaaaggacagccatttccattttaagcagctaaacagcaggagagatttctgtaagaaggtaccagctcagattccattgttcatcattttgcaatgcagcaagtcttggaaaaccttacggagctgccctcgtctactggagcagaagaaatagacctaattttcctcaagggaattatggagaatcctattgtaaaatcacttgctaaggctcatgagaggctagaagattccaaactagaagctgtcagtgacaataacttggaattagtcaatgaaattcttgaagacatcactcctctaataaatgtggatgaaaatgtggcagaattggttggtatactcaaagaacctcacttccagtcactgttggaggcccatgatattgtggcatcaaagtgttatgattcacctccatcaagcccagaaatgaataattcttctatcaataatcagttattaccagtagatgccattcgtattcttggtattcacaaaagagctggggaaccactgggtgtgacatttagggttgaaaataatgatctggtaattgcccgaatcctccatgggggaatgatagatcgacaaggtctacttcatgtgggagatataattaaagaagtcaatggccatgaggttggaaataatccaaaggaattacaagaattactgaaaaatattagtggaagtgtcaccctaaaaatcttaccaagttatagagataccattactcctcaacaggtatttgtgaagtgtcattttgattataatccatacaatgacaacctaataccttgcaaagaagcaggattgaagttttccaaaggagagattcttcagattgtaaatagagaagatccaaattggtggcaggctagccatgtaaaagagggaggaagcgctggtctcattccaagccagttcctggaagagaagagaaaggcatttgttagaagagactgggacaattcaggacctttttgtggaactataagtagcaaaaaaaagaaaaagatgatgtatctcacaaccagaaatgcagaatttgatcgtcatgaaatccagatatatgaggaggtagccaaaatgcctcccttccagagaaaaacattagtattgataggagctcaaggtgtaggccgaagaagcttgaaaaacaggttcatagtattgaatcccactagatttggaactacggtgccatttacttcacggaaaccaagggaagatgaaaaagatggccaggcatataagtttgtgtcacgatctgagatggaagcagatattaaagctggaaagtatttggaacatggggaatatgaaggaaatctctatggaaccaaaattgattctattcttgaggttgtccaaactggacggacttgcattctggatgtcaacccacaagcactgaaagtattgaggacatcagagtttatgccctatgtggtatttattgcggctccggagctagagacgttacgtgccatgcacaaggctgtggtggatgcaggaatcactaccaagcttctgaccgactctgacttgaagaaaacagtggatgaaagtgcacggattcagagagcatacaaccactattttgatttgatcatcataaatgataatctagacaaagcctttgaaaaactgcaaactgccatagagaaactgagaatggaaccacagtgggtcccaatcagctgggtttactgatgattcagtaaggttaacaatgaaaattaaactcttaaaaagtgactgcaacaaataaaccttctactgagaaaatacatcacagatagaagattatctgctaagtccaggcatttttatggtgtagattgaaataatagtacacttctgaatttttatataaaatgtggttggaaggtgtactaatatataatttatcttaatttttctaactttgtatggataatctttctattcatatcacataaagaaatgcgttgaagcattttgtatatgttttgatttagtacccttgcctttttcatcaaaggaattttcaaatcattcactctaacattggtctcatattttcactgtgataatgaatattacttgaaatagttttgtaaagctgtcatttagttcagtattcaaatagtgaagggttagtcttaatagaagaaaatatagttattgaccttccttcttataaatttcttacaaaagcagaattttaagtcagtgttatagctagtctactaccatctaaatctgacatcaaaagtctgatcagtttacgtattttcattatttcggagatgtatggctatccattctaatttatacagctatattagttttgtctcttcatttctatctttactgaaaaattgaagagcaataccttgcactctcttttgaggttattctttttatttgttgcagtgatatgatgctaactaatttaacatgtacacagtaagctctggggctggaagcaaggtcatgcagactgagagagtgccttatcctgtaaaaccttacagcaaaatgacacttgaagaaagtttattttcacatgtaaaattttgactgacaaaaggaacctactactttaaacaatggttttattagaacatggtcagcaaatgtatcatgcctctgcaaattttagtgatgtttagagatgcctctaagtttgcagttggaggtttttgtgcttttagaaatgtgatgtgatccttagggtacctgttttgtctgttgtgttgagaaccaaacccattgaacaacttaaaaaattgggaaataattgtcagctattttgtatacatacacacaaaatatatacattatataatatgtatattatgtattatataatatatataaaatgttttgtatattttttacatatctgttaaaaaatgtactttgtttttttgtttgtttgttttgagatggagtctctctctgtcacccatgctggagtacagtggcgcgatctcagcccgctgcaacctctgcctcctgggttcatgcgactctcgtgcctcagcctcccaagtaattgagattacagttgggtgccaccatgtccggctaatttttgtatttttagtacagatggggtttcaccatgttggccagggtggtctcgagctcctgacctcaagtgatccacccaccttggcctcccaaagtgctgagattacaagcatgagccactgcacctagccaagaagtgtactttttgtttaatgattaccgaaagaagttctcctttagaagcattgacttatacaaattcccacattcacctcagttaatatcttcctttaggattcttggataatagaaattcttcctaaaacatactcagagatgcagctcattattaaattaaggtaaccacattctgtattgttgctagcttttcatgtaaacattattcacactttaaaggattaggtgtttaaatattgatggtcatctttgtctggtgttaggtgccagacacctggctgctgaatttgttttttccctcaccaaagttgtcatttggaacgccagctgggaggactttgaaggaaaagaaaatatatgacaataggcagtattgacacattgtttaaaatctttttcacaataaaacaaaacacccaa

SEQ ID NO: 17727 - DNA, 1703 bp, Homo sapiens
  source 1..1703: mol_type = unassigned DNA
gggaggagagagagggaggcggagggcagtgagagacgcatttccagttctcaactacgagccacgagtttgcagatggggctgctcggcggcgcctgtggctgagggagagcagcggcggcggggagcgaccgggagcggcggcagcggcggcgcggaggcggctgaggtgcgagccggctcatgagaggctagaagattccaaactagaagctgtcagtgacaataacttggaattagtcaatgaaattcttgaagacatcactcctctaataaatgtggatgaaaatgtggcagaattggttggtatactcaaagaacctcacttccagtcactgttggaggcccatgatattgtggcatcaaagtgttatgattcacctccatcaagcccagaaatgaataattcttctatcaataatcagttattaccagtagatgccattcgtattcttggtattcacaaaagagctggggaaccactgggtgtgacatttagggttgaaaataatgatctggtaattgcccgaatcctccatgggggaatgatagatcgacaaggtctacttcatgtgggagatataattaaagaagtcaatggccatgaggttggaaataatccaaaggaattacaagaattactgaaaaatattagtggaagtgtcaccctaaaaatcttaccaagttatagagataccattactcctcaacaggtatttgtgaagtgtcattttgattataatccatacaatgacaacctaataccttgcaaagaagcaggattgaagttttccaaaggagagattcttcagattgtaaatagagaagatccaaattggtggcaggctagccatgtaaaagagggaggaagcgctggtctcattccaagccagttcctggaagagaagagaaaggcatttgttagaagagactgggacaattcaggacctttttgtggaactataagtagcaaaaaaaagaaaaagatgatgtatctcacaaccagaaatgcagaatttgatcgtcatgaaatccagatatatgaggaggtagccaaaatgcctcccttccagagaaaaacattagtattgataggagctcaaggtgtaggccgaagaagcttgaaaaacaggttcatagtattgaatcccactagatttggaactacggtgccatttacttcacggaaaccaagggaagatgaaaaagatggccaggcatataagtttgtgtcacgatctgagatggaagcagatattaaagctggaaagtatttggaacatggggaatatgaaggaaatctctatggaaccaaaattgattctattcttgaggttgtccaaactggacggacttgcattctggatgtcaacccacaagcactgaaagtattgaggacatcagagtttatgccctatgtggtatttattgcggctccggagctagagacgttacgtgccatgcacaaggctgtggtggatgcaggaatcactaccaagcttctgaccgactctgacttgaagaaaacagtggatgaaagtgcacggattcagagagcatacaaccactattttgatttgatcatcataaatgataatctagacaaagcctttgaaaaactgcaaactgccatagagaaactgagaatggaaccacagtgggtcccaatcagctgggtttactgatgattcagtaaggttaac

SEQ ID NO: 17728 - DNA, 1191 bp, Homo sapiens
  source 1..1191: mol_type = unassigned DNA
gggagtcgcggtggagcctgaatggagagccggcctgggggcggcgttgctgtgactgacacctccggggtctgtcccgagagggggtgattccgccggctcccggttctctcccgagctcggagttggtaggggaggaggctttctccaactaccgccgctacttccgaggtacgagactccagttgtttggccaaagtggctgtgggccgagcacaggctgccgcgggggcgttcgctgctgagatcgtgctcgcggattctcgcaatgcagcaagtcttggaaaaccttacggagctgccctcgtctactggagcagaagaaatagacctaattttcctcaagggaattatggagaatcctattgtaaaatcacttgctaaggctcatgagaggctagaagattccaaactagaagctgtcagtgacaataacttggaattagtcaatgaaattcttgaagacatcactcctctaataaatgtggatgaaaatgtggcagaattggttggtatactcaaagaacctcacttccagtcactgttggaggcccatgatattgtggcatcaaagtgttatgattcacctccatcaagcccagaaatgaataattcttctatcaataatcagttattaccagtagatgccattcgtattcttggtattcacaaaagagctggggaaccactgggtgtgacatttagggttgaaaataatgatctggtaattgcccgaatcctccatgggggaatgatagatcgacaaggtctacttcatgtgggagatataattaaagaagtcaatggccatgaggttggaaataatccaaaggaattacaagaattactgaaaaatattagtggaagtgtcaccctaaaaatcttaccaagttatagagataccattactcctcaacaggtatttgtgaagtgtcattttgattataatccatacaatgacaacctaataccttgcaaagaagcaggattgaagttttccaaaggagagattcttcagattgtaaatagagaagatccaaattggtggcaggctagccatgtaaaagagggaggaagcgctggtctcattccaagccagttcctggaagagaagagaaaggcatttgttagaagagactgggacaattcaggacctttttgtggaactataagtagcaaaaaaaagaaaaa

SEQ ID NO: 17729 - DNA, 982 bp, Homo sapiens
  source 1..982: mol_type = unassigned DNA
cgcgcccaagcggcggcggcggcggcggctggaggaggaggaggaggaggaggaggaggaggagggcggctgaggcgcggctggctgcgcgcgcggaggcagcggcgggggcgaccggagctggggcagagtggggagcgagggagggggaggagagagagggaggcggagggcagtgagagacgcatttccagttctcaactacgagccacgagtttgcagatggggctgctcggcggcgcctgtggctgagggagagcagcggcggcggggagcgaccgggagcggcggcagcggcggcgcggaggcggctgaggtgcgagccgcagcaatgcagcaagtcttggaaaaccttacggagctgccctcgtctactggagcagaagaaatagacctaattttcctcaagggaattatggagaatcctattgtaaaatcacttgctaaggctcatgagaggctagaagattccaaactagaagctgtcagtgacaataacttggaattagtcaatgaaattcttgaagacatcactcctctaataaatgtggatgaaaatgtggcagaattggttggtatactcaaagaacctcacttccagtcactgttggaggcccatgatattgtggcatcaaagtgttatgattcacctccatcaagcccagaaatgaataattcttctatcaataatcagttattaccagtagatgccattcgtattcttggtattcacaaaagagctggggaaccactgggtgtgacatttagggttgaaaataatgatctggtaattgcccgaatcctccatgggggaatgatagatcgacaaggtctacttcatgtgggagatataattaaagaagtcaatggccatgaggttggaaataatccaaaggaattacaagaattactgaaaaatattagtggaagtgtcaccctaaaaatcttaccaagttatagagataccattactcctcaacag

SEQ ID NO: 17730 - DNA, 5080 bp, Homo sapiens
  source 1..5080: mol_type = unassigned DNA
aggtatagcagtcttggcagttgctgaactgaattcctggctgatttccttactgcataaactcaactgctctcactgaggtcgtcattaagtcctgtgtgtgtttgggcaggccgacttgatttacagccagcactccactgcggaaacggcttacaaaatatacagatcttggtagacaacgtggctgcaggctgttgaattggaattccctgtggctgtccgaaggcagggtgtccggagagcggtgggctgacctgttcctacaccttgcatcatgccagctttgtcaacgggatctgggagtgacactggtctgtatgagctgttggctgctctgccagcccagctgcagccacatgtggatagccaggaagacctgaccttcctctgggatatgtttggtgaaaaaagcctgcattcattggtaaagattcatgaaaaactacactactatgagaagcagagtccggtgcccattctccatggtgcggcggccttggccgatgatctggccgaagagcttcagaacaagccattaaacagtgagatcagagagctgttgaaactactgtcaaaacccaatgtgaaggctttgctctctgtacatgatactgtggctcagaagaattacgacccagtgttgcctcctatgcctgaagatattgacgatgaggaagactcagtaaaaataatccgtctggtcaaaaatagagaaccactgggagctaccattaagaaggatgaacagaccggggcgatcattgtggccagaatcatgagaggaggagctgcagatagaagtggtcttattcatgttggtgatgaacttagggaagtcaacgggataccagtggaggataaaaggcctgaggaaataatacagattttggctcagtctcagggagcaattacatttaagattatacccggcagcaaagaggagacaccatcaaaagaaggcaagatgtttatcaaagccctctttgactataatcctaatgaggataaggcaattccatgtaaggaagctgggctttctttcaaaaagggagatattcttcagattatgagccaagatgatgcaacttggtggcaagcgaaacacgaagctgatgccaaccccagggcaggcttgatcccctcaaagcatttccaggaaaggagattggctttgagacgaccagaaatattggttcagcccctgaaagtttccaacaggaaatcatctggttttagaaaaagttttcgtcttagtagaaaagataagaaaacaaataaatccatgtatgaatgcaagaagagtgatcagtacgacacagctgacgtacccacatacgaagaagtgacaccgtatcggcgacaaactaatgaaaaatacagactcgttgtcttggttggtcccgtgggagtagggctgaatgaactgaaacgaaagctgctgatcagtgacacccagcactatggcgtgacagtgccccataccaccagagcaagaagaagccaggagagtgatggtgttgaatacattttcatttccaagcatttgtttgagacagatgtacaaaataacaagtttattgaatatggagaatataaaaacaactactacggcacaagtatagactcagttcggtctgtccttgctaaaaacaaagtttgtttgttggatgttcagcctcatacagtgaagcatttaaggacactagaatttaagccctatgtgatatttataaagcctccatcaatagagcgtttgagagaaacaagaaaaaatgcaaagattatttcaagcagagatgaccaaggtgctgcaaaacccttcacagaagaagattttcaagaaatgattaaatctgcacagataatggaaagtcaatatggtcatctttttgacaaaattataataaatgatgacctcactgtggcattcaatgagctcaaaacaacttttgacaaattagagacagagacccattgggtgccagtgagctggttacattcataactaagagaaatttccataattgtctttttctatagagtgcatgatgaaatcaattacagttttggtagtagggtttttaaatctatatcactgtcatagatgtacaatcttggttcaagttgaatgctggttttgtttgtatctttttacagccttatttcaaacgccatgtgttagtataagatccgaaatcaaaatatgcacagtactgtattctaagcaaaacctcaaaccttctcgttgtcttcaataccgctctatctccaagatgaggctgaaattttcagagagacttagctagaggcttagtatgtatgggagttcagcgcttctgctggtctcaggtgtggctgctgctgtcgagtttgaatgttagctgttgaaggtatcaattcagcagccatgagcagctccagacagacaggtgagctctgctgtttctgggtggatcatcacagatttagccgggcaggcagtaaggtgtcctcttactattcaaaaagtgtagactttcttacatattcgcaatacgttcacagtgtgtgcattttaaaataattcttaaaggagtaactgaaattttaccttgagtgaatggccttcataatatagcttgagaagtccttttgagtacctgtcagtgactcaacaacatttaataagggaaagtagacttttaacagttattatatatgtaacgaaaagcctttcctttgggattaatataagtaagaatggtagccttgtggcaagaaatgattacaaaggatatttttatttgtaattcctcagaagacaatttatgaagtcacccaaaatgttattttagctggttttggatttttccaataaattagaagaaggatttctattctaaaacatgtaaaacctgttttacatattactgatacaattaaagattatttttcatctatgtgcaatagatcacccctctttaaattgctctaagatttattttagaaaacttttcatgtgatgttatttctttgtcatcaaaatgcttgttaacactgtccagacaccatcctaaccttgccattgttaaagaagtttaggaaagactcttatattgtaaatatttagatgggttctctcacttttctttgatactactgattttcagcaagtgaattatataattcaaaatgctagaaatgtctatccgttctataagagagcatatcctgccgttcttgcatgcagtgaagccctgcccgtcgaaaatcattgcatctgtgactttcaaagtggaaaaaaaaatgttatttttttgttgatttgtaaagagagtttaaatgtcatgtgaaaaaaaatagaatgtagtaaaattctatatatttatgaaatattttaaaggcatatttttttaaatatcaaacggggctattcataaaataaactgattgtatgtcaagatgtcctaatttaaaagagtagttttataaatcatggtcaacattccatgtaaatatttgagctttacaaagatagatccaagtgtgcgatctgtgcactgcacatttgatagcattattcactggttttccttcatacttgtcaagttcatattagaagcagagacaaaaaccactccaatggccttgacacatagtcacaccaaaatagataatcagactaagtattatataacaacgtgatccagacagtgagttctaagtgtattaattaaatagcaaaaaattttgtttttaaaaaatgaaagagggagggttgccaacctgaagtcttaagtagattgtttgggtagcatatttccttctttgaacattgtctgaaattttctataaatcaagacttcttgtacaaagaatgatgggacatatgtaataattcaggcaatcacctgagtaatttaggcagtccaaattctttaccctgaaatacccacattttaaaaaaattgcagataattgcttcagttatttactttggggacagagatatagtgtaaagtgggagaaactgagtccttttttggtggtggtaataataagatgttataaaaatataacattttaaaaaagaaaggtccagaccttaagcgcagagctagaacaatattttttaaataatggggggaaaagggggcactttggtaattttagaaatcaggtagtatacttttttttttttttttgagacagggtcttgccatgttgctcaggctggtcttgaactcctgggctcaagcaatcctcctgccttggcctcccaaagtgctgggattacaggcatgatccaccgtgcccagccggtagacgtggtcttaaaaacagtgtttacatggccatcttgatgcttagaaagataattgattaaaatttaataaggcagggccaactccgagagttcattgacaacggcagcaaaaaggccctgaattctgtactttcttcccccagcctccttctccagcaaggagaatagcactcctccctccagaagccagctccctaagttggagccactatgtaagagaagaggaacgttcactttttaaaattcatatatttaaaaatcaagaccaaaaagtaaattctgtactcctattattgactgtagtcaatcaaacataaaaaggtgaaagtaaaatttaattttttacccttattttactgaccaatatggaagttcttggtatctttaaggctgaccttcctggtattgtgtaatgattgaatgtatctaaactgtaataatttgaaactgacaaacataaccttctcagacttacaaaactatgttctttctaaagatacagatttttattattttattttgactaggaaggatttataaataaatgtaatgaaaaatctttgatcttaataaagtaccttcaaacagtgtgtgtacttacttgaaaattgtttttgcacttggatattctattttattatactactattgtgatctattccattatactatttcccatggtagaacaaattatattttctactgtgatatgaagtgatgtaattgaacttgccatgtctaaaattaaatttcatatttttttcaatcaaa

SEQ ID NO: 17731 - DNA, 2090 bp, Homo sapiens
  source 1..2090: mol_type = unassigned DNA
ataaacagcaggttctcctaggctttgaacaaaatttagcttctccaaggccaaaagcctcattgtgaagagaaagaaaggtatagcagtcttggcagttgctgaactgaattcctggctgatttccttactgcataaactcaactgctctcactgaggtcgtcattaagtcctgtgtgtgtttgggcaggccgacttgatttacagccagcactccactgcggaaacggcttacaaaatatacagatcttggtagacaacgtggctgcaggctgttgaattggaattccctgtggctgtccgaaggcagggtgtccggagagcggtgggctgacctgttcctacaccttgcatcatgccagctttgtcaacgggatctgggagtgacactggtctgtatgagctgttggctgctctgccagcccagctgcagccacatgtggatagccaggaagacctgaccttcctctgggatatgtttggtgaaaaaagcctgcattcattggtaaagattcatgaaaaactacactactatgagaagcagagtccggtgcccattctccatggtgcggcggccttggccgatgatctggccgaagagcttcagaacaagccattaaacagtgagatcagagagctgttgaaactactgtcaaaacccaatgtgaaggctttgctctctgtacatgatactgtggctcagaagaattacgacccagtgttgcctcctatgcctgaagatattgacgatgaggaagactcagtaaaaataatccgtctggtcaaaaatagagaaccactgggagctaccattaagaaggatgaacagaccggggcgatcattgtggccagaatcatgagaggaggagctgcagatagaagtggtcttattcatgttggtgatgaacttagggaagtcaacgggataccagtggaggataaaaggcctgaggaaataatacagattttggctcagtctcagggagcaattacatttaagattatacccggcagcaaagaggagacaccatcaaaagaaggcaagatgtttatcaaagccctctttgactataatcctaatgaggataaggcaattccatgtaaggaagctgggctttctttcaaaaagggagatattcttcagattatgagccaagatgatgcaacttggtggcaagcgaaacacgaagctgatgccaaccccagggcaggcttgatcccctcaaagcatttccaggaaaggagattggctttgagacgaccagaaatattggttcagcccctgaaagtttccaacaggaaatcatctggttttagaaaaagttttcgtcttagtagaaaagataagaaaacaaataaatccatgtatgaatgcaagaagagtgatcagtacgacacagctgacgtacccacatacgaagaagtgacaccgtatcggcgacaaactaatgaaaaatacagactcgttgtcttggttggtcccgtgggagtagggctgaatgaactgaaacgaaagctgctgatcagtgacacccagcactatggcgtgacagtgccccataccaccagagcaagaagaagccaggagagtgatggtgttgaatacattttcatttccaagcatttgtttgagacagatgtacaaaataacaagtttattgaatatggagaatataaaaacaactactacggcacaagtatagactcagttcggtctgtccttgctaaaaacaaagtttgtttgttggatgttcagcctcatacagtgaagcatttaaggacactagaatttaagccctatgtgatatttataaagcctccatcaatagagcgtttgagagaaacaagaaaaaatgcaaagattatttcaagcagagatgaccaaggtgctgcaaaacccttcacagaagaagattttcaagaaatgattaaatctgcacagataatggaaagtcaatatggtcatctttttgacaaaattataataaatgatgacctcactgtggcattcaatgagctcaaaacaacttttgacaaattagagacagagacccattgggtgccagtgagctggttacattcataactaa

SEQ ID NO: 17732 - DNA, 5063 bp, Homo sapiens
  source 1..5063: mol_type = unassigned DNA
aatggaactaacaggaaccacctgtgcacttccttttacaggaatgttcataaacagcaggttctcctaggctttgaacaaaatttagcttctccaaggccaaaagcctcattgtgaagagaaagaaagaaacggcttacaaaatatacagatcttggtagacaacgtggctgcaggctgttgaattggaattccctgtggctgtccgaaggcagggtgtccggagagcggtgggctgacctgttcctacaccttgcatcatgccagctttgtcaacgggatctgggagtgacactggtctgtatgagctgttggctgctctgccagcccagctgcagccacatgtggatagccaggaagacctgaccttcctctgggatatgtttggtgaaaaaagcctgcattcattggtaaagattcatgaaaaactacactactatgagaagcagagtccggtgcccattctccatggtgcggcggccttggccgatgatctggccgaagagcttcagaacaagccattaaacagtgagatcagagagctgttgaaactactgtcaaaacccaatgtgaaggctttgctctctgtacatgatactgtggctcagaagaattacgacccagtgttgcctcctatgcctgaagatattgacgatgaggaagactcagtaaaaataatccgtctggtcaaaaatagagaaccactgggagctaccattaagaaggatgaacagaccggggcgatcattgtggccagaatcatgagaggaggagctgcagatagaagtggtcttattcatgttggtgatgaacttagggaagtcaacgggataccagtggaggataaaaggcctgaggaaataatacagattttggctcagtctcagggagcaattacatttaagattatacccggcagcaaagaggagacaccatcaaaagaaggcaagatgtttatcaaagccctctttgactataatcctaatgaggataaggcaattccatgtaaggaagctgggctttctttcaaaaagggagatattcttcagattatgagccaagatgatgcaacttggtggcaagcgaaacacgaagctgatgccaaccccagggcaggcttgatcccctcaaagcatttccaggaaaggagattggctttgagacgaccagaaatattggttcagcccctgaaagtttccaacaggaaatcatctggttttagaaaaagttttcgtcttagtagaaaagataagaaaacaaataaatccatgtatgaatgcaagaagagtgatcagtacgacacagctgacgtacccacatacgaagaagtgacaccgtatcggcgacaaactaatgaaaaatacagactcgttgtcttggttggtcccgtgggagtagggctgaatgaactgaaacgaaagctgctgatcagtgacacccagcactatggcgtgacagtgccccataccaccagagcaagaagaagccaggagagtgatggtgttgaatacattttcatttccaagcatttgtttgagacagatgtacaaaataacaagtttattgaatatggagaatataaaaacaactactacggcacaagtatagactcagttcggtctgtccttgctaaaaacaaagtttgtttgttggatgttcagcctcatacagtgaagcatttaaggacactagaatttaagccctatgtgatatttataaagcctccatcaatagagcgtttgagagaaacaagaaaaaatgcaaagattatttcaagcagagatgaccaaggtgctgcaaaacccttcacagaagaagattttcaagaaatgattaaatctgcacagataatggaaagtcaatatggtcatctttttgacaaaattataataaatgatgacctcactgtggcattcaatgagctcaaaacaacttttgacaaattagagacagagacccattgggtgccagtgagctggttacattcataactaagagaaatttccataattgtctttttctatagagtgcatgatgaaatcaattacagttttggtagtagggtttttaaatctatatcactgtcatagatgtacaatcttggttcaagttgaatgctggttttgtttgtatctttttacagccttatttcaaacgccatgtgttagtataagatccgaaatcaaaatatgcacagtactgtattctaagcaaaacctcaaaccttctcgttgtcttcaataccgctctatctccaagatgaggctgaaattttcagagagacttagctagaggcttagtatgtatgggagttcagcgcttctgctggtctcaggtgtggctgctgctgtcgagtttgaatgttagctgttgaaggtatcaattcagcagccatgagcagctccagacagacaggtgagctctgctgtttctgggtggatcatcacagatttagccgggcaggcagtaaggtgtcctcttactattcaaaaagtgtagactttcttacatattcgcaatacgttcacagtgtgtgcattttaaaataattcttaaaggagtaactgaaattttaccttgagtgaatggccttcataatatagcttgagaagtccttttgagtacctgtcagtgactcaacaacatttaataagggaaagtagacttttaacagttattatatatgtaacgaaaagcctttcctttgggattaatataagtaagaatggtagccttgtggcaagaaatgattacaaaggatatttttatttgtaattcctcagaagacaatttatgaagtcacccaaaatgttattttagctggttttggatttttccaataaattagaagaaggatttctattctaaaacatgtaaaacctgttttacatattactgatacaattaaagattatttttcatctatgtgcaatagatcacccctctttaaattgctctaagatttattttagaaaacttttcatgtgatgttatttctttgtcatcaaaatgcttgttaacactgtccagacaccatcctaaccttgccattgttaaagaagtttaggaaagactcttatattgtaaatatttagatgggttctctcacttttctttgatactactgattttcagcaagtgaattatataattcaaaatgctagaaatgtctatccgttctataagagagcatatcctgccgttcttgcatgcagtgaagccctgcccgtcgaaaatcattgcatctgtgactttcaaagtggaaaaaaaaatgttatttttttgttgatttgtaaagagagtttaaatgtcatgtgaaaaaaaatagaatgtagtaaaattctatatatttatgaaatattttaaaggcatatttttttaaatatcaaacggggctattcataaaataaactgattgtatgtcaagatgtcctaatttaaaagagtagttttataaatcatggtcaacattccatgtaaatatttgagctttacaaagatagatccaagtgtgcgatctgtgcactgcacatttgatagcattattcactggttttccttcatacttgtcaagttcatattagaagcagagacaaaaaccactccaatggccttgacacatagtcacaccaaaatagataatcagactaagtattatataacaacgtgatccagacagtgagttctaagtgtattaattaaatagcaaaaaattttgtttttaaaaaatgaaagagggagggttgccaacctgaagtcttaagtagattgtttgggtagcatatttccttctttgaacattgtctgaaattttctataaatcaagacttcttgtacaaagaatgatgggacatatgtaataattcaggcaatcacctgagtaatttaggcagtccaaattctttaccctgaaatacccacattttaaaaaaattgcagataattgcttcagttatttactttggggacagagatatagtgtaaagtgggagaaactgagtccttttttggtggtggtaataataagatgttataaaaatataacattttaaaaaagaaaggtccagaccttaagcgcagagctagaacaatattttttaaataatggggggaaaagggggcactttggtaattttagaaatcaggtagtatacttttttttttttttttgagacagggtcttgccatgttgctcaggctggtcttgaactcctgggctcaagcaatcctcctgccttggcctcccaaagtgctgggattacaggcatgatccaccgtgcccagccggtagacgtggtcttaaaaacagtgtttacatggccatcttgatgcttagaaagataattgattaaaatttaataaggcagggccaactccgagagttcattgacaacggcagcaaaaaggccctgaattctgtactttcttcccccagcctccttctccagcaaggagaatagcactcctccctccagaagccagctccctaagttggagccactatgtaagagaagaggaacgttcactttttaaaattcatatatttaaaaatcaagaccaaaaagtaaattctgtactcctattattgactgtagtcaatcaaacataaaaaggtgaaagtaaaatttaattttttacccttattttactgaccaatatggaagttcttggtatctttaaggctgaccttcctggtattgtgtaatgattgaatgtatctaaactgtaataatttgaaactgacaaacataaccttctcagacttacaaaactatgttctttctaaagatacagatttttattattttattttgactaggaaggatttataaataaatgtaatgaaaaatctttgatcttaataaagtaccttcaaacagtgtgtgtacttacttgaaaattgtttttgcacttggatattctattttattatactactattgtgatctattccattatactatttcccatggtagaacaaattatattttctactgtgatatgaagtgatgtaattgaacttgccatgtctaaaattaaatttcatatttttttcaatcaaa

SEQ ID NO: 17733 - DNA, 1067 bp, Homo sapiens
  source 1..1067: mol_type = unassigned DNA
aaacggcttacaaaatatacagatcttggtagacaacgtggctgcaggctgttgaattggaattccctgtggctgtccgaaggcagggtgtccggagagcggtgggctgacctgttcctacaccttgcatcatgccagctttgtcaacgggatctgggagtgacactggtctgtatgagctgttggctgctctgccagcccagctgcagccacatgtggatagccaggaagacctgaccttcctctgggatatgtttggtgaaaaaagcctgcattcattggtaaagcatttccaggaaaggagattggctttgagacgaccagaaatattggttcagcccctgaaagtttccaacaggaaatcatctggttttagaaaaagttttcgtcttagtagaaaagataagaaaacaaataaatccatgtatgaatgcaagaagagtgatcagtacgacacagctgacgtacccacatacgaagaagtgacaccgtatcggcgacaaactaatgaaaaatacagactcgttgtcttggttggtcccgtgggagtagggctgaatgaactgaaacgaaagctgctgatcagtgacacccagcactatggcgtgacagtgccccataccaccagagcaagaagaagccaggagagtgatggtgttgaatacattttcatttccaagcatttgtttgagacagatgtacaaaataacaagtttattgaatatggagaatataaaaacaactactacggcacaagtatagactcagttcggtctgtccttgctaaaaacaaagtttgtttgttggatgttcagcctcatacagtgaagcatttaaggacactagaatttaagccctatgtgatatttataaagcctccatcaatagagcgtttgagagaaacaagaaaaaatgcaaagattatttcaagcagagatgaccaaggtgctgcaaaacccttcacagaagaagattttcaagaaatgattaaatctgcacagataatggaaagtcaatatggtcatctttttgacaaaattataataaatgatgacctcactgtggca

SEQ ID NO: 17734 - DNA, 1856 bp, Homo sapiens
  source 1..1856: mol_type = unassigned DNA
gtgttggttactagccgggctggaggcgggggccgggctcccactgggctcgtgcgttctgcgcccgccgcggcggtgccgagcccgctggctcccgattgtcctctgcggcggtggcggtcgctgcctccttgcctccgggcccggggctgcaggggccagagcgagtgcgcctcctgcccgcggaccgcggcagcccagagcagaaacggcttacaaaatatacagatcttggtagacaacgtggctgcaggctgttgaattggaattccctgtggctgtccgaaggcagggtgtccggagagcggtgggctgacctgttcctacaccttgcatcatgccagctttgtcaacgggatctgggagtgacactgattcatgaaaaactacactactatgagaagcagagtccggtgcccattctccatggtgcggcggccttggccgatgatctggccgaagagcttcagaacaagccattaaacagtgagatcagagagctgttgaaactactgtcaaaacccaatgtgaaggctttgctctctgtacatgatactgtggctcagaagaattacgacccagtgttgcctcctatgcctgaagatattgacgatgaggaagactcagtaaaaataatccgtctggtcaaaaatagagaaccactgggagctaccattaagaaggatgaacagaccggggcgatcattgtggccagaatcatgagaggaggagctgcagatagaagtggtcttattcatgttggtgatgaacttagggaagtcaacgggataccagtggaggataaaaggcctgaggaaataatacagattttggctcagtctcagggagcaattacatttaagattatacccggcagcaaagaggagacaccatcaaaagaaggcaagatgtttatcaaagccctctttgactataatcctaatgaggataaggcaattccatgtaaggaagctgggctttctttcaaaaagggagatattcttcagattatgagccaagatgatgcaacttggtggcaagcgaaacacgaagctgatgccaaccccagggcaggcttgatcccctcaaagcatttccaggaaaggagattggctttgagacgaccagaaatattggttcagcccctgaaagtttccaacaggaaatcatctggttttagaaaaagttttcgtcttagtagaaaagataagaaaacaaataaatccatgtatgaatgcaagaagagtgatcagtacgacacagctgacgtacccacatacgaagaagtgacaccgtatcggcgacaaactaatgaaaaatacagactcgttgtcttggttggtcccgtgggagtagggctgaatgaactgaaacgaaagctgctgatcagtgacacccagcactatggcgtgacagtgccccataccaccagagcaagaagaagccaggagagtgatggtgttgaatacattttcatttccaagcatttgtttgagacagatgtacaaaataacaagtttattgaatatggagaatataaaaacaactactacggcacaagtatagactcagttcggtctgtccttgctaaaaacaaagtttgtttgttggatgttcagcctcatggaccatggtttctccttccactgatggctgtaccctggggtgcaaaacctccaaatgctagaatgacctgcggaagccctttggacctctaaaggaagatgaatctggagtaaaagtgtttcaagaatcaggaaggctgcctcctgacttgggcactgtgttagtcccttgttgcactgctctgaagaaatacctgaaactggacagtgaagcatttaaggacactagaa

SEQ ID NO: 17735 - DNA, 4760 bp, Homo sapiens
  source 1..4760: mol_type = unassigned DNA
agaaacggcttacaaaatatacagatcttggtagacaacgtggctgcaggctgttgaattggaattccctgtggctgtccgaaggcagggtgtccggagagcggtgggctgacctgttcctacaccttgcatcatgccagctttgtcaacgggatctgggagtgacactggtctgtatgagctgttggctgctctgccagcccagctgcagccacatgtggatagccaggaagacctgaccttcctctgggatatgtttggtgaaaaaagcctgcattcattggtaaagattcatgaaaaactacactactatgagaagcagagtccggtgcccattctccatggtgcggcggccttggccgatgatctggccgaagagcttcagaacaagccattaaacagtgagatcagagagctgttgaaactactgtcaaaacccaatgtgaaggctttgctctctgtacatgatactgtggctcagaagaattacgacccagtgttgcctcctatgcctgaagatattgacgatgaggaagactcagtaaaaataatccgtctggtcaaaaatagagaaccactgggagctaccattaagaaggatgaacagaccggggcgatcattgtggccagaatcatgagaggaggagctgcagatagaagtggtcttattcatgttggtgatgaacttagggaagtcaacgggataccagtggaggataaaaggcctgaggaaataatacagattttggctcagtctcagggagcaattacatttaagattatacccggcagcaaagaggagacaccatcaaaagaaggcaagatgtttatcaaagccctctttgactataatcctaatgaggataaggcaattccatgtaaggaagctgggctttctttcaaaaagggagatattcttcagattatgagccaagatgatgcaacttggtggcaagcgaaacacgaagctgatgccaaccccagggcaggcttgatcccctcaaagcatttccaggaaaggagattggctttgagacgaccagaaatattggttcagcccctgaaagtttccaacaggaaatcatctggttttagaaaaagttttcgtcttagtagaaaagataagaaaacaaataaatccatgtatgaatgcaagaagagtgatcagtacgacacagctgacgtacccacatacgaagaagtgacaccgtatcggcgacaaactaatgaaaaatacagactcgttgtcttggttggtcccgtgggagtagggctgaatgaactgaaacgaaagctgctgatcagtgacacccagcactatggcgtgacagtgccccataccaccagagcaagaagaagccaggagagtgatggtgttgaatacattttcatttccaagcatttgtttgagacagatgtacaaaataacaagtttattgaatatggagaatataaaaacaactactacggcacaagtatagactcagttcggtctgtccttgctaaaaacaaagtttgtttgttggatgttcagcctcatacagtgaagcatttaaggacactagaatttaagccctatgtgatatttataaagcctccatcaatagagcgtttgagagaaacaagaaaaaatgcaaagattatttcaagcagagatgaccaaggtgctgcaaaacccttcacagaagaagattttcaagaaatgattaaatctgcacagataatggaaagtcaatatggtcatctttttgacaaaattataataaatgatgacctcactgtggcattcaatgagctcaaaacaacttttgacaaattagagacagagacccattgggtgccagtgagctggttacattcataactaagagaaatttccataattgtctttttctatagagtgcatgatgaaatcaattacagttttggtagtagggtttttaaatctatatcactgtcatagatgtacaatcttggttcaagttgaatgctggttttgtttgtatctttttacagccttatttcaaacgccatgtgttagtataagatccgaaatcaaaatatgcacagtactgtattctaagcaaaacctcaaaccttctcgttgtcttcaataccgctctatctccaagatgaggctgaaattttcagagagacttagctagaggcttagtatgtatgggagttcagcgcttctgctggtctcaggtgtggctgctgctgtcgagtttgaatgttagctgttgaaggtatcaattcagcagccatgagcagctccagacagacaggtgagctctgctgtttctgggtggatcatcacagatttagccgggcaggcagtaaggtgtcctcttactattcaaaaagtgtagactttcttacatattcgcaatacgttcacagtgtgtgcattttaaaataattcttaaaggagtaactgaaattttaccttgagtgaatggccttcataatatagcttgagaagtccttttgagtacctgtcagtgactcaacaacatttaataagggaaagtagacttttaacagttattatatatgtaacgaaaagcctttcctttgggattaatataagtaagaatggtagccttgtggcaagaaatgattacaaaggatatttttatttgtaattcctcagaagacaatttatgaagtcacccaaaatgttattttagctggttttggatttttccaataaattagaagaaggatttctattctaaaacatgtaaaacctgttttacatattactgatacaattaaagattatttttcatctatgtgcaatagatcacccctctttaaattgctctaagatttattttagaaaacttttcatgtgatgttatttctttgtcatcaaaatgcttgttaacactgtccagacaccatcctaaccttgccattgttaaagaagtttaggaaagactcttatattgtaaatatttagatgggttctctcacttttctttgatactactgattttcagcaagtgaattatataattcaaaatgctagaaatgtctatccgttctataagagagcatatcctgccgttcttgcatgcagtgaagccctgcccgtcgaaaatcattgcatctgtgactttcaaagtggaaaaaaaaatgttatttttttgttgatttgtaaagagagtttaaatgtcatgtgaaaaaaaatagaatgtagtaaaattctatatatttatgaaatattttaaaggcatatttttttaaatatcaaacggggctattcataaaataaactgattgtatgtcaagatgtcctaatttaaaagagtagttttataaatcatggtcaacattccatgtaaatatttgagctttacaaagatagatccaagtgtgcgatctgtgcactgcacatttgatagcattattcactggttttccttcatacttgtcaagttcatattagaagcagagacaaaaaccactccaatggccttgacacatagtcacaccaaaatagataatcagactaagtattatataacaacgtgatccagacagtgagttctaagtgtattaattaaatagcaaaaaattttgtttttaaaaaatgaaagagggagggttgccaacctgaagtcttaagtagattgtttgggtagcatatttccttctttgaacattgtctgaaattttctataaatcaagacttcttgtacaaagaatgatgggacatatgtaataattcaggcaatcacctgagtaatttaggcagtccaaattctttaccctgaaatacccacattttaaaaaaattgcagataattgcttcagttatttactttggggacagagatatagtgtaaagtgggagaaactgagtccttttttggtggtggtaataataagatgttataaaaatataacattttaaaaaagaaaggtccagaccttaagcgcagagctagaacaatattttttaaataatggggggaaaagggggcactttggtaattttagaaatcaggtagtatacttttttttttttttttgagacagggtcttgccatgttgctcaggctggtcttgaactcctgggctcaagcaatcctcctgccttggcctcccaaagtgctgggattacaggcatgatccaccgtgcccagccggtagacgtggtcttaaaaacagtgtttacatggccatcttgatgcttagaaagataattgattaaaatttaataaggcagggccaactccgagagttcattgacaacggcagcaaaaaggccctgaattctgtactttcttcccccagcctccttctccagcaaggagaatagcactcctccctccagaagccagctccctaagttggagccactatgtaagagaagaggaacgttcactttttaaaattcatatatttaaaaatcaagaccaaaaagtaaattctgtactcctattattgactgtagtcaatcaaacataaaaaggtgaaagtaaaatttaattttttacccttattttactgaccaatatggaagttcttggtatctttaaggctgaccttcctggtattgtgtaatgattgaatgtatctaaactgtaataatttgaaactgacaaacataaccttctcagacttacaaaactatgttctttctaaagatacagatttttattattttattttgactaggaaggatttataaataaatgtaatgaaaaatctttgatcttaataaagtaccttcaaacagtgtgtgt

SEQ ID NO: 17736 - DNA, 5367 bp, Homo sapiens
  source 1..5367: mol_type = unassigned DNA
tattttcagaatttcagaaattgaaaagggataagaggaaggagaaaatgctgggctggtgtgaagcgatagcccgtaaccctcacagaattccaaacaacacgcgaacacccgagatctcaggggatttggctgacgcctcacaaacctccacattgaatgaaaaatccccagggcgatctgcaagtcgatcaagtaacatttcaaaagcaagcagcccaacaacagggacagctcccaggagccagtcaaggttgtctgtctgtccatccactcaggacatctgcagaatctgtcactgcgaaggggatgaagagagccccctcatcacaccctgtcgctgcactgggacactgcgctttgtccaccagtcctgcctccaccagtggataaagagctcagatacacgctgctgtgagctctgcaagtatgacttcataatggagaccaagctcaaacccctccggaagtgggagaaactacagatgaccacaagtgaaaggaggaaaatattctgctctgtcacattccacgtaatcgcgatcacctgtgtggtttggtctttgtatgtattgatagaccggacagcggaggaaatcaagcaaggcaatgacaatggtgtccttgaatggccattttggacaaaactggttgtggtagccattggcttcacaggaggtcttgtcttcatgtacgtacagtgtaaagtctatgttcagttgtggcgcaggctgaaggcctacaaccgtgtgatctttgtacaaaattgcccagacactgccaaaaaactggagaagaacttctcatgtaatgtaaacacagacatcaaagatgctgtggtagtgcctgtaccacaaacaggtgcaaattcactgccatctgcagagggtggcccccctgaagttgtatcagtctgatggaacctgttgggagtttcttcaccgaagaatatctttctagccctcagccactacaaatgacagaagtgatcttgaattatttactcccttcagctcctcctttctcctactgacacatttttcctgactttgttcaaagaggaaaggagaaaaacaaacagaccaaatgcccaggagcccatgaagtaatagcgtaaagtaaagtatgatatggaaatgtgaagtttgcaagagaatgatttccaagacaattaagaactactggggcaatgaatgcttttaggcagtaatcaaagattaaatggacccatgatactcttcttcacagtaacaggggaaaagttcaagaatacagacttgaattgcgatgtgtattacttctagggccttgtaatgttaactgtctcatctggaaataactaacatatttggttttaagcctgaaattgtctgcattatccctaagtcacattggaagtgaacttggaggatgcatattttgatatgctttgacagctaacagatttgtatggtttagtggagtctggttattttgacagatgcatgttttttttaaatagatgcaatatacatttgaagacattgatatttggaattaattacgtttgtttaagtcacgcaaaagattttcagaaaatgttcggatataattagctctgttaaatacccacagaactgttatcaggtcttatatttattttcatctggttcctctaatacagtgctgtccaatagaaacacaacagccacaaatgcaggccacagatgcaaatatttaacttcccagtagccctattttaaaaagtaaaaataaatgtttgtttgttaaaatgaattttgattttttaaaaacactatatgttatttcaacatgtcatcaatataaaaaattgattgattgattgatagtttacatctgtttcttgaaccaagttttcaaaatccagttggtaatttaaaagtacacttcaacttgaattaactatattggatagcacagccgtaaaattagagactaagcttctgctttatttaacagttgttgagtatttcaaaacagtttaattcattcttttatttcaaagtcacaaaagttagttatgatttttaaaagcattaaattaagtgtcctcattttaaagtcagatgaagttcacatctctaaagggtaaaaatccaaaagtatagaaagataaaacaatcaatctgcctatagcagagttgtgaaataaataaattgttactatgaagtacttacaataggggaataaaattacctatttttgttattaaatcaaatgtgtaaggcttatttcatccatatgaggtgtcaacttgacagatgatgagtaattatgactaagaatctagcccttacttttaaaagctgacaggatttcccttgctcagttagaaaacaaaaatattcaacagattctgtgataagtaattaatcgtttaggtttgacagttgattattgtgttctttgcatattcatgtaaaactgatgtgtgaatgacattgcagtgagctagattaacggtgattatagatacagtagcctgtcaaagaaagatgtcctacattaaaaaaggtgacttatttttgttagctgtcattatttattaacatgaaaaggcaatgatggccataagaaccaaagcatgagtatcacactgcacaaatctgggtatcacatggatgcactttgtaattatcagtgtgcttgttcttcacagatcataggaaaaagggaaaaaaaaaacaaacctttaaatgaggagaaagatggtataaatattagtagtggctgacactgagtccagatagtcttgattcctagaaataaacaaaaggtaaacaatgtcaattttgtgtgtgtgtatggcgtgtgtgtagtcatgtatatatgcggggaaaatgttaaggtattcagtcaggaaacaaaaggtttaaaactcatctttcttaaaacttgttataagcacagggaaagcaaagttgaggtaactaaactgaaccaaaaattctgtataaataaggatataagtaattaacgttttaaaaaacatgtggaccttaaacaaactgtatattaaattcctcttaaatgcccattttaaatatttaagataaatacatttatgaataacaaatctgtgggtgatttaaccatggcaccatatccaagggattaaccttaatgcaattttcctgttaattgtcctaagctttttactaatccattttccctgtgggttagtaatggcaacatgctgcttacagatattcccggggaaaaacatccagacaccagcaaacaaagaaatgttgatttctcttttgtttgctctgaaagtaaaataattatttactttaattaacatggaaaatattgtttaaattctgtacgaacctaaacaagatacgttgcagggctgatttcacagtggaggatgatcggctaaaataaagcctcatttattaagggctacacttttaacactaagaaaacatttctagaataaaaagcaaaggtaagcattattctattaatagtaaaagaggacatgggattttaaaactatacctaaattcttgcaattaacttttatgggcttggacattgttgaaatgagaaaataatataatatagcttcctggcaggttaaaagtcaacacttgattttgctattcttctgactttttgaaaccctgaagttctgaatttcaagcttttaagaagcttttcagcaatggttgtttgtttatggttcaaacatctgaaataactacctgcatttaaaatctaatgttgattattttctttttacattctgtgtggcaatggaacatttgccctttcaaacaataaaacgatttagctttgtggcagtgcttttttgtagactgactgactatacccttcaaaaagaaaaactgctctacggaatgcaaattttgaggcatgtttacctgctcgtggaagaaataaaatggaattgaaaaaaaaaggactaaaattgaagaatgaaattacagttgtgttaaaaaccttggctctttataatcatgaatcttcagtattaaaccagacattgatgctgttaatttttttaaagaactatcactcttatcgtacaggagtaaagattaaattgtaaaagaaagaaattccaattttttaaaaagtaaagcccaaaaggcaattaagcttaagtacaaaaacaaaataaaaatgaacaaaatctaaactaaagtgagcccaacaacctgagatacagcaatgtgtaacctgaaggaagataggtgtagactgaaggagtctttcaaaacaccccagcattaaatctcactctgcgctgcttctacacgtgattatagtcccagacagacgacctcatggttttttatcttgttttacaaaaggtccttgggtactctttaaaacatctattctttggcaggaaaattagctcattagaacaatgacaccattaagggacattataagggtcctggggctgaggtgggaagatttttctatctgccccatatagtttacccttccttgccttgaaaatgaatattatagaacagagtacagctcttaaaagttattagtatcattattattatagttgttatataatactttaattaagaaagatgaaaaccttttttctttcctaagtcagcccaatggtgctattttacatatcaacacagttgaaaggaagtactgttattttgggctgcagtgtttcctccacatctaaagaaagcccattttgaaactggatactgcattaaaacaaagaaggaaaaattattttaactgtgtgcagtttttgaaattaggcatttgtactattttggttttacataattctcttgcattaacaatttactgttttgtgaatcatgtgtactaaagcaaattaagaaaaagaaaataattatctgtgaaagactttgtatattaaacaagtgacgcaaaccttagttgtggtttccacaatttttgcctaacagactgatatttgtatttgcaacatccaaacacacatacattttttaagattttacaagggtctgaacatataattattttaaagcaaacctacgttgactaactcatgacatggtacaaataaataaatacacaaacagagggaaaccaatgaaaataaactatgtggactttcaaacctgctttaaaaaaagagttcaagagaaatcacaatgtaatctaaagcgggactgtctcaagaataagtcttggatatagaaaaataagcatataacagcatttttctgttcagagataatagtggattcagataattgcatggataataaacattaaaagcaagatattagaatctaagaggtttggtgatagcaaaaaacaaagctgtttcc

SEQ ID NO: 17737 - DNA, 2476 bp, Homo sapiens
  source 1..2476: mol_type = unassigned DNA
ctatattctctgttctgcattataagcaacatgaccagcagccacgtttgttgtaattttttaaatatgtggaaaaaaagcaagatatcaaccatgtattaccttaaccaagatgccaaattatctaacttgtttctccaggcaagcagcccaacaacagggacagctcccaggagccagtcaaggttgtctgtctgtccatccactcaggacatctgcagaatctgtcactgcgaaggggatgaagagagccccctcatcacaccctgtcgctgcactgggacactgcgctttgtccaccagtcctgcctccaccagtggataaagagctcagatacacgctgctgtgagctctgcaagtatgacttcataatggagaccaagctcaaacccctccggaagtgggagaaactacagatgaccacaagtgaaaggaggaaaatattctgctctgtcacattccacgtaatcgcgatcacctgtgtggtttggtctttgtatgtattgatagaccggacagcggaggaaatcaagcaaggcaatgacaatggtgtccttgaatggccattttggacaaaactggttgtggtagccattggcttcacaggaggtcttgtcttcatgtacgtacagtgtaaagtctatgttcagttgtggcgcaggctgaaggcctacaaccgtgtgatctttgtacaaaattgcccagacactgccaaaaaactggagaagaacttctcatgtaatgtaaacacagacatcaaagatgctgtggtagtgcctgtaccacaaacaggtgcaaattcactgccatctgcagagggtggcccccctgaagttgtatcagtctgatggaacctgttgggagtttcttcaccgaagaatatctttctagccctcagccactacaaatgacagaagtgatcttgaattatttactcccttcagctcctcctttctcctactgacacatttttcctgactttgttcaaagaggaaaggagaaaaacaaacagaccaaatgcccaggagcccatgaagtaatagcgtaaagtaaagtatgatatggaaatgtgaagtttgcaagagaatgatttccaagacaattaagaactactggggcaatgaatgcttttaggcagtaatcaaagattaaatggacccatgatactcttcttcacagtaacaggggaaaagttcaagaatacagacttgaattgcgatgtgtattacttctagggccttgtaatgttaactgtctcatctggaaataactaacatatttggttttaagcctgaaattgtctgcattatccctaagtcacattggaagtgaacttggaggatgcatattttgatatgctttgacagctaacagatttgtatggtttagtggagtctggttattttgacagatgcatgttttttttaaatagatgcaatatacatttgaagacattgatatttggaattaattacgtttgtttaagtcacgcaaaagattttcagaaaatgttcggatataattagctctgttaaatacccacagaactgttatcaggtcttatatttattttcatctggttcctctaatacagtgctgtccaatagaaacacaacagccacaaatgcaggccacagatgcaaatatttaacttcccagtagccctattttaaaaagtaaaaataaatgtttgtttgttaaaatgaattttgattttttaaaaacactatatgttatttcaacatgtcatcaatataaaaaattgattgattgattgatagtttacatctgtttcttgaaccaagttttcaaaatccagttggtaatttaaaagtacacttcaacttgaattaactatattggatagcacagccgtaaaattagagactaagcttctgctttatttaacagttgttgagtatttcaaaacagtttaattcattcttttatttcaaagtcacaaaagttagttatgatttttaaaagcattaaattaagtgtcctcattttaaagtcagatgaagttcacatctctaaagggtaaaaatccaaaagtatagaaagataaaacaatcaatctgcctatagcagagttgtgaaataaataaattgttactatgaagtacttacaataggggaataaaattacctatttttgttattaaatcaaatgtgtaaggcttatttcatccatatgaggtgtcaacttgacagatgatgagtaattatgactaagaatctagcccttacttttaaaagctgacaggatttcccttgctcagttagaaaacaaaaatattcaacagattctgtgataagtaattaatcgtttaggtttgacagttgattattgtgttctttgcatattcatgtaaaactgatgtgtgaatgacattgcagtgagctagattaacggtgattatagatacagtagcctgtcaaagaaagatgtcctacattaaaaaaggtgactta

SEQ ID NO: 17738 - DNA, 5877 bp, Homo sapiens
  source 1..5877: mol_type = unassigned DNA
agaggaggggagaggactggggagccgagccagagccgggctgcctgccacccggctgctcgtccgctagctggggaggagcgctccacccgcaactgacaaaggatgggagaatgcccgcgccccgggatgccggccgcacgcagcctggcggccgcctgagctacttcaccctccgccggtaagtgactgcaaacatcattcattcaatcagcctcactgggagccccttctctccggctggtagtcctgggcggcttgtccctgatcccgagcggggcttggcacagcatcagccctggagggcaggcagcaggtgcctttgcctggtgggtccactggggagcgtggctggggttcgcggcgggtgctgccacccaacctgcgggcggcgggctcgcccagtaggcgcctctctggtgagaggaggcggctccagcccgcagcctggggtagttgctactattggcccccagcgcccgctctgcgcgcgcgccgtttctggcggatccccagtgcgcggcgcgctgtttacaccggcgtggtactagtcacggagccgcacccctcggaaagcgcggagtcgatgacagccacttcacaggctcacgcgctcctagtgtgggcttgaaggggacggggaccgattaccaaaggagagcgctgagtacggaagacacagggcagcctttgtcttgggtttagcgctgatgcgctcaaccctgagtcgggttcactgcaactgttgtgtccgatttcggttccctgcaaccgccctcctgggcgagagatgtcattgtgttcctgcggccagcgggactgagagctgggacttaagacgccaggagggtcctgcgctcacgggaaatgtaccccaaaagaactctgagagaatatactcaactgtcctgctgtgattaaacaagactgctgtattttaatttcagaaattgaaaagggataagaggaaggagaaaatgctgggctggtgtgaagcgatagcccgtaaccctcacagaattccaaacaacacgcgaacacccgagatctcaggggatttggctgacgcctcacaaacctccacattgaatgaaaaatccccagggcgatctgcaagtcgatcaagtaacatttcaaaagcaagcagcccaacaacagggacagctcccaggagccagtcaaggttgtctgtctgtccatccactcaggacatctgcagaatctgtcactgcgaaggggatgaagagagccccctcatcacaccctgtcgctgcactgggacactgcgctttgtccaccagtcctgcctccaccagtggataaagagctcagatacacgctgctgtgagctctgcaagtatgacttcataatggagaccaagctcaaacccctccggaagtgggagaaactacagatgaccacaagtgaaaggaggaaaatattctgctctgtcacattccacgtaatcgcgatcacctgtgtggtttggtctttgtatgtattgatagaccggacagcggaggaaatcaagcaaggcaatgacaatggtgtccttgaatggccattttggacaaaactggttgtggtagccattggcttcacaggaggtcttgtcttcatgtacgtacagtgtaaagtctatgttcagttgtggcgcaggctgaaggcctacaaccgtgtgatctttgtacaaaattgcccagacactgccaaaaaactggagaagaacttctcatgtaatgtaaacacagacatcaaagatgctgtggtagtgcctgtaccacaaacaggtgcaaattcactgccatctgcagagggtggcccccctgaagttgtatcagtctgatggaacctgttgggagtttcttcaccgaagaatatctttctagccctcagccactacaaatgacagaagtgatcttgaattatttactcccttcagctcctcctttctcctactgacacatttttcctgactttgttcaaagaggaaaggagaaaaacaaacagaccaaatgcccaggagcccatgaagtaatagcgtaaagtaaagtatgatatggaaatgtgaagtttgcaagagaatgatttccaagacaattaagaactactggggcaatgaatgcttttaggcagtaatcaaagattaaatggacccatgatactcttcttcacagtaacaggggaaaagttcaagaatacagacttgaattgcgatgtgtattacttctagggccttgtaatgttaactgtctcatctggaaataactaacatatttggttttaagcctgaaattgtctgcattatccctaagtcacattggaagtgaacttggaggatgcatattttgatatgctttgacagctaacagatttgtatggtttagtggagtctggttattttgacagatgcatgttttttttaaatagatgcaatatacatttgaagacattgatatttggaattaattacgtttgtttaagtcacgcaaaagattttcagaaaatgttcggatataattagctctgttaaatacccacagaactgttatcaggtcttatatttattttcatctggttcctctaatacagtgctgtccaatagaaacacaacagccacaaatgcaggccacagatgcaaatatttaacttcccagtagccctattttaaaaagtaaaaataaatgtttgtttgttaaaatgaattttgattttttaaaaacactatatgttatttcaacatgtcatcaatataaaaaattgattgattgattgatagtttacatctgtttcttgaaccaagttttcaaaatccagttggtaatttaaaagtacacttcaacttgaattaactatattggatagcacagccgtaaaattagagactaagcttctgctttatttaacagttgttgagtatttcaaaacagtttaattcattcttttatttcaaagtcacaaaagttagttatgatttttaaaagcattaaattaagtgtcctcattttaaagtcagatgaagttcacatctctaaagggtaaaaatccaaaagtatagaaagataaaacaatcaatctgcctatagcagagttgtgaaataaataaattgttactatgaagtacttacaataggggaataaaattacctatttttgttattaaatcaaatgtgtaaggcttatttcatccatatgaggtgtcaacttgacagatgatgagtaattatgactaagaatctagcccttacttttaaaagctgacaggatttcccttgctcagttagaaaacaaaaatattcaacagattctgtgataagtaattaatcgtttaggtttgacagttgattattgtgttctttgcatattcatgtaaaactgatgtgtgaatgacattgcagtgagctagattaacggtgattatagatacagtagcctgtcaaagaaagatgtcctacattaaaaaaggtgacttatttttgttagctgtcattatttattaacatgaaaaggcaatgatggccataagaaccaaagcatgagtatcacactgcacaaatctgggtatcacatggatgcactttgtaattatcagtgtgcttgttcttcacagatcataggaaaaagggaaaaaaaaaacaaacctttaaatgaggagaaagatggtataaatattagtagtggctgacactgagtccagatagtcttgattcctagaaataaacaaaaggtaaacaatgtcaattttgtgtgtgtgtatggcgtgtgtgtagtcatgtatatatgcggggaaaatgttaaggtattcagtcaggaaacaaaaggtttaaaactcatctttcttaaaacttgttataagcacagggaaagcaaagttgaggtaactaaactgaaccaaaaattctgtataaataaggatataagtaattaacgttttaaaaaacatgtggaccttaaacaaactgtatattaaattcctcttaaatgcccattttaaatatttaagataaatacatttatgaataacaaatctgtgggtgatttaaccatggcaccatatccaagggattaaccttaatgcaattttcctgttaattgtcctaagctttttactaatccattttccctgtgggttagtaatggcaacatgctgcttacagatattcccggggaaaaacatccagacaccagcaaacaaagaaatgttgatttctcttttgtttgctctgaaagtaaaataattatttactttaattaacatggaaaatattgtttaaattctgtacgaacctaaacaagatacgttgcagggctgatttcacagtggaggatgatcggctaaaataaagcctcatttattaagggctacacttttaacactaagaaaacatttctagaataaaaagcaaaggtaagcattattctattaatagtaaaagaggacatgggattttaaaactatacctaaattcttgcaattaacttttatgggcttggacattgttgaaatgagaaaataatataatatagcttcctggcaggttaaaagtcaacacttgattttgctattcttctgactttttgaaaccctgaagttctgaatttcaagcttttaagaagcttttcagcaatggttgtttgtttatggttcaaacatctgaaataactacctgcatttaaaatctaatgttgattattttctttttacattctgtgtggcaatggaacatttgccctttcaaacaataaaacgatttagctttgtggcagtgcttttttgtagactgactgactatacccttcaaaaagaaaaactgctctacggaatgcaaattttgaggcatgtttacctgctcgtggaagaaataaaatggaattgaaaaaaaaaggactaaaattgaagaatgaaattacagttgtgttaaaaaccttggctctttataatcatgaatcttcagtattaaaccagacattgatgctgttaatttttttaaagaactatcactcttatcgtacaggagtaaagattaaattgtaaaagaaagaaattccaattttttaaaaagtaaagcccaaaaggcaattaagcttaagtacaaaaacaaaataaaaatgaacaaaatctaaactaaagtgagcccaacaacctgagatacagcaatgtgtaacctgaaggaagataggtgtagactgaaggagtctttcaaaacaccccagcattaaatctcactctgcgctgcttctacacgtgattatagtcccagacagacgacctcatggttttttatcttgttttacaaaaggtccttgggtactctttaaaacatctattctttggcaggaaaattagctcattagaacaatgacaccattaagggacattataagggtcctggggctgaggtgggaagatttttctatctgccccatatagtttacccttccttgccttgaaaatgaatattatagaacagagtacagctcttaaaagttattagtatcattattattatagttgttatataatactttaattaagaaagatgaaaaccttttttctttcctaagtcagcccaatggtgctattttacatatcaacacagttgaaaggaagtactgttattttgggctgcagtgtttcctccacatctaaagaaagcccattttgaaactggatactgcattaaaacaaagaaggaaaaattattttaactgtgtgcagtttttgaaattaggcatttgtactattttggttttacataattctcttgcattaacaatttactgttttgtgaatcatgtgtactaaagcaaattaagaaaaagaaaataattatctgtgaaagactttgtatattaaacaagtgacgcaaacctta

SEQ ID NO: 17739 - DNA, 656 bp, Homo sapiens
  source 1..656: mol_type = unassigned DNA
gtccgctagctggggaggagcgctccacccgcaactgacaaaggatgggagaatgcccgcgccccgggatgccggccgcacgcagcctggcggccgcctgagctacttcaccctccgccggaaatgtaccccaaaagaactctgagagaatatactcaactgtcctgctgtgattaaacaagactgctgtattttaatttcagaaattgaaaagggataagaggaaggagaaaatgctgggctggtgtgaagcgatagcccgtaaccctcacagaattccaaacaacacgcgaacacccgagatctcaggggatttggctgacgcctcacaaacctccacattgaatgaaaaatccccagggcgatctgcaagtcgatcaagtaacatttcaaaagcaagcagcccaacaacagggacagctcccaggagccagtcaaggttgtctgtctgtccatccactcaggacatctgcagaatctgtcactgcgaaggggatgaagagagccccctcatcacaccctgtcgctgcactgggacactgcgctttgtccaccagtcctgcctccaccagtggataaagagctcagatacacgctgctgtgagctctgcaagtatgacttcataatggagaccaagctcaaacccctccggaag

SEQ ID NO: 17740 - DNA, 3100 bp, Homo sapiens
  source 1..3100: mol_type = unassigned DNA
ggttgctagggaaaccggaggacgcccggtagccgcccccaccgcctccgccccaggcaaggccggccggcgccgcggaaagcagcctcggggaaggaggaggaagaggggcaggtgtagggagtgaagaagcaaaaagaggaggaggaagaggagctcagggccgtccccgcgcaattaatgggcggctcctgcgccctggaccggcccgcccgcccagcccctcgacccctgtagccccggcaggggaggaagggcagacccacaggtcagggattaggaatcatgttgcatgacgcaagggacaggcagaagttcttcagcgatgttcagtatctgcgggacatgcagcataaggtggactctgagtatcaggcttgtctgagacgacaggaatatagaagagacccaaatgagaagaaacgcgatcagttttgggggcaagagacaagttttgagagatcccggttttctagcaggtcatcttccaaacagagttctagtgaggaggatgctctaactgaaccaaggtcatctatcaagatatctgcatttaagtgtgactccaaacttccagcaattgaccaaacatcagtcaagcagaaacataaaagtaccatgactgtaaggaaagcagagaaagtggaccccagcgaaccctctccagcagaccaagcaccaatggttttattaagaaagaggaagccaaacctgaggagatttacagtcagcccagaatcgcacagcccgagagcatctggggacagaagcagacagaaacagcagtggcctgcaaaggtgccggttcccaggggagcagatcaagtagttcaacaagaaggcctgatgtgtaacactaagctgaagaggccaaatcaagagagaagaaacttggtcccatcgtcacagccaatgactgagaacgcccctgatagagccaaaaaaggagacccgagtgctccttcccagagtgagctgcatccagccctgtcccaggccttccaaggaaaaaatagtcctcaagtattgagtgagttctcggggccaccactcacacccaccactgtaggagggccaagaaaggcatcatttaggttccgagatgaagacttttattccattttgtcattgaacagcagaagagaaagcgatgacactgaagaggaaacccagtctgaagaatgtctgtgggttggtgtgcgctcaccctgttctccttcccatcacaaaagaagtagatttggggggacatcgacccctcaggccaaaaataaaaattttgaagaaaatgctgaaaattgcagaggtcattcttcaagaagaagtgagcccagtcatggctcattgagaataagcaatgcaatggagccagcaacagagcggccttctgctgggcaaaggttgtcccaagaccccgggctgcctgatagggaatctgctacagagaaggacagaggtggcagtgaaaatgcgaaaaagagccctctttcgtgggacaccaaatccgagcccagacaagaggttggtgtcaatgctgaaaatgtatggagtgattgtatttctgtggaacataggcctggcacccatgattctgaaggatactggaaagactatttaaacagttctcaaaattctcttgactactttatttctggcagaccaatatctccaagatcatcagtgaattcatcctataaccctcctgcatcattcatgcattctgctctgagagatgatattccagtagacttgtcaatgtcatcgacttcagttcacagctcagactcagagggaaactcagggtttcatgtttgccaaccactgtctcccattagaaataggactccatttgccagtgccgaaaaccataattatttcccagtaaacagtgcacacgaatttgctgtcagggaagcagaagatactactttaacaagccagcctcagggggctccactatatacagatctcttactaaatccacagggcaatttgtccttagtggattcttccagctcctctccatcaagaatgaactcagaaggccatttgcatgtgtctgggtctctgcaagaaaatacaccatttactttctttgcagtgtctcatttcccaaatcaaaatgataatgggagcaggatggcagcctctggtttcacagatgaaaaggaaaccagtaagataaaggcagaccctgagaaactcaagaaattgcaagaaagtctcctggaggaggactccgaggaggagggagacttgtgtcgcatctgtcagatagccgggggttccccaagcaaccccctcctggagccttgcggctgtgtgggaagcctgcagtttgttcatcaagagtgcctgaaaaagtggctgaaagtgaaaataacatcaggagcagatcttggtgccgtgaagacctgtgagatgtgtaagcaaggcctgctggttgacctgggtgactttaacatgattgagttctaccagaagcaccagcaatctcaggcacaaaacgagctgatgaattcaggcttgtacctggtgctgctgcttcacctctatgagcagaggtttgcagaactcatgaggctcaaccacaaccaggtggaaagagagaggttgtcaagaaattacccacaacccagaacagaggaaaatgaaaattcggagttgggagatggaaatgaaggcagcatttctcaaagccaggtcgtctagcaaggaagccaactgtggagctcggcggagacctctcctgccagcccttctttctacgtccccaagtgcctccctccctcctcctctttactgaaactgaaaccaaagcgttcacagttagattttcacctcgtgccactctcttttggggtctggcttgagcatctatgggcagccacagcgaccagtctagtcccagacagcacaggtcaagcagcgtgggactgtggagcccctggcaggctggcctggtgctgcccccttagcccagaagccctgccaggtccagtggcctggggtcccactgctgagggcacctgccaggcctcactccaccctgaatggactcgagccatgtattcattcagtaaactgacattattctccc

SEQ ID NO: 17741 - DNA, 3053 bp, Homo sapiens
  source 1..3053: mol_type = unassigned DNA
gccaagaagaattactcgctcttgctttcagcaaggcaggaccccctccttccttctccacctgcctccaactccctcctcctttctctctccctacttaatatggcttcttatgttgatttctaaagcacagatttggcacaagacattatcaccagaaagacttaaaacagaagtgtgcataaccatgagtgggttttaaattaagaagcagttcaaaggtcagggattaggaatcatgttgcatgacgcaagggacaggcagaagttcttcagcgatgttcagtatctgcgggacatgcagcataaggtggactctgagtatcaggcttgtctgagacgacaggaatatagaagagacccaaatgagaagaaacgcgatcagttttgggggcaagagacaagttttgagagatcccggttttctagcaggtcatcttccaaacagagttctagtgaggaggatgctctaactgaaccaaggtcatctatcaagatatctgcatttaagtgtgactccaaacttccagcaattgaccaaacatcagtcaagcagaaacataaaagtaccatgactgtaaggaaagcagagaaagtggaccccagcgaaccctctccagcagaccaagcaccaatggttttattaagaaagaggaagccaaacctgaggagatttacagtcagcccagaatcgcacagcccgagagcatctggggacagaagcagacagaaacagcagtggcctgcaaaggtgccggttcccaggggagcagatcaagtagttcaacaagaaggcctgatgtgtaacactaagctgaagaggccaaatcaagagagaagaaacttggtcccatcgtcacagccaatgactgagaacgcccctgatagagccaaaaaaggagacccgagtgctccttcccagagtgagctgcatccagccctgtcccaggccttccaaggaaaaaatagtcctcaagtattgagtgagttctcggggccaccactcacacccaccactgtaggagggccaagaaaggcatcatttaggttccgagatgaagacttttattccattttgtcattgaacagcagaagagaaagcgatgacactgaagaggaaacccagtctgaagaatgtctgtgggttggtgtgcgctcaccctgttctccttcccatcacaaaagaagtagatttggggggacatcgacccctcaggccaaaaataaaaattttgaagaaaatgctgaaaattgcagaggtcattcttcaagaagaagtgagcccagtcatggctcattgagaataagcaatgcaatggagccagcaacagagcggccttctgctgggcaaaggttgtcccaagaccccgggctgcctgatagggaatctgctacagagaaggacagaggtggcagtgaaaatgcgaaaaagagccctctttcgtgggacaccaaatccgagcccagacaagaggttggtgtcaatgctgaaaatgtatggagtgattgtatttctgtggaacataggcctggcacccatgattctgaaggatactggaaagactatttaaacagttctcaaaattctcttgactactttatttctggcagaccaatatctccaagatcatcagtgaattcatcctataaccctcctgcatcattcatgcattctgctctgagagatgatattccagtagacttgtcaatgtcatcgacttcagttcacagctcagactcagagggaaactcagggtttcatgtttgccaaccactgtctcccattagaaataggactccatttgccagtgccgaaaaccataattatttcccagtaaacagtgcacacgaatttgctgtcagggaagcagaagatactactttaacaagccagcctcagggggctccactatatacagatctcttactaaatccacagggcaatttgtccttagtggattcttccagctcctctccatcaagaatgaactcagaaggccatttgcatgtgtctgggtctctgcaagaaaatacaccatttactttctttgcagtgtctcatttcccaaatcaaaatgataatgggagcaggatggcagcctctggtttcacagatgaaaaggaaaccagtaagataaaggcagaccctgagaaactcaagaaattgcaagaaagtctcctggaggaggactccgaggaggagggagacttgtgtcgcatctgtcagatagccgggggttccccaagcaaccccctcctggagccttgcggctgtgtgggaagcctgcagtttgttcatcaagagtgcctgaaaaagtggctgaaagtgaaaataacatcaggagcagatcttggtgccgtgaagacctgtgagatgtgtaagcaaggcctgctggttgacctgggtgactttaacatgattgagttctaccagaagcaccagcaatctcaggcacaaaacgagctgatgaattcaggcttgtacctggtgctgctgcttcacctctatgagcagaggtttgcagaactcatgaggctcaaccacaaccaggtggaaagagagaggttgtcaagaaattacccacaacccagaacagaggaaaatgaaaattcggagttgggagatggaaatgaaggcagcatttctcaaagccaggtcgtctagcaaggaagccaactgtggagctcggcggagacctctcctgccagcccttctttctacgtccccaagtgcctccctccctcctcctctttactgaaactgaaaccaaagcgttcacagttagattttcacctcgtgccactctcttttggggtctggcttgagcatctatgggcagccacagcgaccagtctagtcccagacagcacaggtcaagcagcgtgggactgtggagcccctggcaggctggcctggtgctgcccccttagcccagaagccctgccaggtccagtggcctggggtcccactgctgagggcacctgccaggcctcactccaccctgaatggactcgagccatgtattcattcagtaaactgacattattctccc

SEQ ID NO: 17742 - DNA, 3324 bp, Homo sapiens
  source 1..3324: mol_type = unassigned DNA
aggcaaggccggccggcgccgcggaaagcagcctcggggaaggaggaggaagaggggcaggtgtagggagtgaagaagcaaaaagaggaggaggaagaggagctcagggccgtccccgcgcaattaatgggcggctcctgcgccctggaccggcccgcccgcccagcccctcgacccctgtagccccggcaggggaggaagggcagacccacagggccagatgataaaccatgtgagatttcataactaccagaccagacgctgggtcaccatgagtccggggcggcctgactctgccaatatctgcacaactgaataaacaggaggagcgagggaatgccgcagaacgtatacacctgaaggtcagggattaggaatcatgttgcatgacgcaagggacaggcagaagttcttcagcgatgttcagtatctgcgggacatgcagcataaggtggactctgagtatcaggcttgtctgagacgacaggaatatagaagagacccaaatgagaagaaacgcgatcagttttgggggcaagagacaagttttgagagatcccggttttctagcaggtcatcttccaaacagagttctagtgaggaggatgctctaactgaaccaaggtcatctatcaagatatctgcatttaagtgtgactccaaacttccagcaattgaccaaacatcagtcaagcagaaacataaaagtaccatgactgtaaggaaagcagagaaagtggaccccagcgaaccctctccagaccaagcaccaatggttttattaagaaagaggaagccaaacctgaggagatttacagtcagcccagaatcgcacagcccgagagcatctggggacagaagcagacagaaacagcagtggcctgcaaaggtgccggttcccaggggagcagatcaagtagttcaacaagaaggcctgatgtgtaacactaagctgaagaggccaaatcaagagagaagaaacttggtcccatcgtcacagccaatgactgagaacgcccctgatagagccaaaaaaggagacccgagtgctccttcccagagtgagctgcatccagccctgtcccaggccttccaaggaaaaaatagtcctcaagtattgagtgagttctcggggccaccactcacacccaccactgtaggagggccaagaaaggcatcatttaggttccgagatgaagacttttattccattttgtcattgaacagcagaagagaaagcgatgacactgaagaggaaacccagtctgaagaatgtctgtgggttggtgtgcgctcaccctgttctccttcccatcacaaaagaagtagatttggggggacatcgacccctcaggccaaaaataaaaattttgaagaaaatgctgaaaattgcagaggtcattcttcaagaagaagtgagcccagtcatggctcattgagaataagcaatgcaatggagccagcaacagagcggccttctgctgggcaaaggttgtcccaagaccccgggctgcctgatagggaatctgctacagagaaggacagaggtggcagtgaaaatgcgaaaaagagccctctttcgtgggacaccaaatccgagcccagacaagaggttggtgtcaatgctgaaaatgtatggagtgattgtatttctgtggaacataggcctggcacccatgattctgaaggatactggaaagactatttaaacagttctcaaaattctcttgactactttatttctggcagaccaatatctccaagatcatcagtgaattcatcctataaccctcctgcatcattcatgcattctgctctgagagatgatattccagtagacttgtcaatgtcatcgacttcagttcacagctcagactcagagggaaactcagggtttcatgtttgccaaccactgtctcccattagaaataggactccatttgccagtgccgaaaaccataattatttcccagtaaacagtgcacacgaatttgctgtcagggaagcagaagatactactttaacaagccagcctcagggggctccactatatacagatctcttactaaatccacagggcaatttgtccttagtggattcttccagctcctctccatcaagaatgaactcagaaggccatttgcatgtgtctgggtctctgcaagaaaatacaccatttactttctttgcagtgtctcatttcccaaatcaaaatgataatgggagcaggatggcagcctctggtttcacagatgaaaaggaaaccagtaagataaaggcagaccctgagaaactcaagaaattgcaagaaagtctcctggaggaggactccgaggaggagggagacttgtgtcgcatctgtcagatagccgggggttccccaagcaaccccctcctggagccttgcggctgtgtgggaagcctgcagtttgttcatcaagagtgcctgaaaaagtggctgaaagtgaaaataacatcaggagcagatcttggtgccgtgaagacctgtgagatgtgtaagcaaggcctgctggttgacctgggtgactttaacatgattgagttctaccagaagcaccagcaatctcaggcacaaaacgagctgatgaattcaggcttgtacctggtgctgctgcttcacctctatgagcagaggtttgcagaactcatgaggctcaaccacaaccaggtggaaagagagaggttgtcaagaaattacccacaacccagaacagaggaaaatgaaagtaggttttgggggccagtcctgccattttgagggtgtttgctaaattactctttttctgtgactgtgtggaaccaaatgccatggaaggaaggaatgaccaccacccagaggcaaaaataaccccgcaaagcttgggaaagtcagccgcagcaaacaatcaggaaggcgaggccaagttcactggatgcagagcagataagaattttaattcatcctgaacgcaaggaaaggcgccaacaaagggaagaggttatcttccggcatgagataagatttgttccttttccttgctgggattctccagcgtccagcacttggagagtttgggggttggtttttttactgccaggattcctctaggaaaaccctccccaagccctggcaggggctgtctggcccttacctgaagggaccacattcactcacaagctagtggccttggtggatttggggtctgctgaattcagaggttgaacaaagcaaacaggtctcccaagaaagggccctcaaagcgggcaagacggctctctgcaaacaggttcgagaaaagccttctccctgttcctttttccatt

SEQ ID NO: 17743 - DNA, 1757 bp, Homo sapiens
  source 1..1757: mol_type = unassigned DNA
agagccgagccggcggctccaccgaacggccgcgcctgccgccgccgcagctgcagaaccttccgcatcccctccccgtcccgccccctagccccaggcgtccgggccccctccctccttttcccctctccctcccgccccctccgcgctctctttccctgcagccagagcccggcccgccagccgggccggcaggagggcggcggcggcacaaccatgagctttgagggcggccacggcggcagtcggtgtcgcggggcggagagcggggacgccgagcctcccccgcaacctcccccgccgccgccgccgacgccgccgccgggagagccggccccggtccccgcggccccgcgctacctgccgccgctgcccgcgtcccccgagacccccgagcgcgccgcggggccaagcgagccgctaggggaggtggccccgcggtgcaggggagcggacgagctgccgcctccgcccctgcccctgcagcccgccggccaggaagtggcggcggccggcgactccggggaaggtccgaggcgcctcccggaggcggcagcagcgaaaggcggccccggggagtctgaggccggcgcgggcggcgagcgcgagcggcggggcgccggagaccagcccgagacgcgctcggtgtgcagcagccgcagcagcagcagtggcggcggcgaccagcgcgctgggcaccagcaccagcaccaccagcccatctgcaagatctgcttccagggcgcggagcagggtgagttgttgaacccctgccgatgtgatgggtcagttcggtatacacatcagctgtgcctgctaaaatggatcagtgagagaggttcctggacctgtgaactttgctgttatagataccatgttatagccattaaaatgaaacaaccttgccagtggcagagcatttctataacactggttgagaaagttcagatgattgctgtaatcctaggatccctgttcttaatagccagtgtgacttggctcctctggtcagccttcagcccctatgcagtgtggcagaggaaggacatcctttttcagatctgctatggaatgtatggttttatggatctagtgtgcataggtctcattgttcatgaaggagctgcagtttacagagtgtttaagcgctggcgagctgtgaatttgcactgggatgtgttaaattatgacaaagccacagacatcgaagaaagcagccggggagagtcttccacaagtaggactttgtggttgccattgacagctctgcggaacagaaacttggtccacccaactcagttaacctcaccaaggtttcagtgtggctatgtgttattgcacctgttcaatcggatgaggccccatgaagacttatcagaagataacagctcgggggaggttgtgatgagagtgacttcagtgtgacaaaagcataagatgatgcagtgtggaccaccctgcacattttgcaatgtaattgcagtgaatggcaaaaccatagcacttctaaaaacacatctatgaactttttaaaatttatgctttttatatgaacatttgaattgcaaatacatttttctgagaaaaagagtcctcttgttcttcgttgtctggtttgtcacatcttttataagttggtacttgaaatcattatacatataatttaactatacttggttaaaagaataatgaaagttatccttaaggccaaaactattttttcttgcttgttttaaatatatttttatgaaagcttt

SEQ ID NO: 17744 - DNA, 1376 bp, Homo sapiens
  source 1..1376: mol_type = unassigned DNA
ccggacgcaggtgccggccggagcggagctagtggcgccgacgggccgggccgggccgggaccggggccgaggcgaaccgaggggcctgtgcggccgcccggcccggccgcggatcaggctcctggaaccatgggcctcaggccctgaggatacggggctcccggtggccatgacgacgggtgactgctgccacctccccggctccctgtgtgactgctccggcagccctgccttctccaaggtcgtggaggctacgggcctcggaccgccccagtatgtggcacaggtgacttcaagggatggccggctcctctccaccgtcatccgtgccttggacacaccgagtgatggtcctttctgccggatctgccatgagggagcgaacggggagtgcttgctgtccccgtgtggctgcaccggcacgctgggtgccgtgcataagagctgtctggagaagtggctttcctcatctaacaccagctactgcgagctgtgccacacggagtttgcagtggagaaacggcctcgacccctcacagagtggctgaaggacccggggccgcggacggagaagcggacactgtgctgcgacatggtgtgtttcctgttcatcacaccgctggccgccatctcaggctggttgtgcctgcgcggggcccaggaccacctccggctccacagccagctggaggccgtgggtctcattgccctcaccatcgccctcttcaccatctatgtcctctggacgctggtctccttccgctaccactgccagctgtactccgagtggagaaagaccaaccagaaagttcgcctgaagatccgggaggcggacagccccgagggcccccagcattctccactggcagctggactcctgaagaaggtggcagaggagacaccagtatgaatgctgggctctccggaccctgcagcagagaggccagaggtagctggtgataccctgtcctgtggaaggacttccacttcaacacttccacttcaacagttcccgcacggcctgaacgcttcttaggccaagagacaccatgcagagcctagtctgtgatcctgtgtgaagatattttcagggtttttttttttttttttttgcatatggaggacaggtggacatggtcctgagctctggacggagcaggcaccctgatctcattctgaggtccacatggcaccttctgggccagcagctgtggccggtgtatcaagggcgcccttaaagctggaacattccagcaagcttcttgcgcttctctgcacccggcaggcccactttcctggcaccctcgactttatataaaagttgcactgcgtttcaaaaacccacccctgaatgaataaaaggagccctggctgg

SEQ ID NO: 17745 - DNA, 1166 bp, Homo sapiens
  source 1..1166: mol_type = unassigned DNA
ccggacgcaggtgccggccggagcggagctagtggcgccgacgggccgggccgggccgggaccggggccgaggcgaaccgaggggcctgtgcggccgcccggcccggccgcggatcaggctcctggaaccatgggcctcaggccctgaggatacggggctcccggtggccatgacgacgggtgactgctgccacctccccggctccctgtgtgactgctccggcagccctgccttctccaaggtcgtggaggctacgggcctcggaccgccccagtatgtggcacaggtgacttcaagggatggccggctcctctccaccgtcatccgtgccttggacacaccgagtgatggtcctttctgccggatctgccatgagggagcgaacggggagtgcttgctgtccccgtgtggctgcaccggcacgctgggtgccgtgcataagagctgtctggagaagtggctttcctcatctaacaccagctactgcgagctgtgccacacggagtttgcagtggagaaacggcctcgacccctcacagaggtctccttccgctaccactgccagctgtactccgagtggagaaagaccaaccagaaagttcgcctgaagatccgggaggcggacagccccgagggcccccagcattctccactggcagctggactcctgaagaaggtggcagaggagacaccagtatgaatgctgggctctccggaccctgcagcagagaggccagaggtagctggtgataccctgtcctgtggaaggacttccacttcaacacttccacttcaacagttcccgcacggcctgaacgcttcttaggccaagagacaccatgcagagcctagtctgtgatcctgtgtgaagatattttcagggtttttttttttttttttttgcatatggaggacaggtggacatggtcctgagctctggacggagcaggcaccctgatctcattctgaggtccacatggcaccttctgggccagcagctgtggccggtgtatcaagggcgcccttaaagctggaacattccagcaagcttcttgcgcttctctgcacccggcaggcccactttcctggcaccctcgactttatataaaagttgcactgcgtttcaaaaacccacccctgaatgaataaaaggagccctggctgg

SEQ ID NO: 17746 - DNA, 1647 bp, Homo sapiens
  source 1..1647: mol_type = unassigned DNA
ccggacgcaggtgccggccggagcggagctagtggcgccgacgggccgggccgggccgggaccggggccgaggcgaaccgaggggcctgtgcggccgcccggcccggccgcggatcagagactggagactgggtcttgctctgttacccaggctggagtgcagtggtgtgatcatagctcactacagccttgaactcctgggctcaagaggttgaggctccctcctcagcctcccaagtagctgggactacaggctttcagcaccatgcctggctaattcaaaaaaaccttcagagagatagggtctctctatgttgccctagctcgtctcaaactcctggcctcaagtgatcctcctgcttggacctcccaaagcgctgggattacaggctcctggaaccatgggcctcaggccctgaggatacggggctcccggtggccatgacgacgggtgactgctgccacctccccggctccctgtgtgactgctccggcagccctgccttctccaaggtcgtggaggctacgggcctcggaccgccccagtatgtggcacaggtgacttcaagggatggccggctcctctccaccgtcatccgtgccttggacacaccgagtgatggtcctttctgccggatctgccatgagggagcgaacggggagtgcttgctgtccccgtgtggctgcaccggcacgctgggtgccgtgcataagagctgtctggagaagtggctttcctcatctaacaccagctactgcgagctgtgccacacggagtttgcagtggagaaacggcctcgacccctcacagagtggctgaaggacccggggccgcggacggagaagcggacactgtgctgcgacatggtgtgtttcctgttcatcacaccgctggccgccatctcaggctggttgtgcctgcgcggggcccaggaccacctccggctccacagccagctggaggccgtgggtctcattgccctcaccatcgccctcttcaccatctatgtcctctggacgctggtctccttccgctaccactgccagctgtactccgagtggagaaagaccaaccagaaagttcgcctgaagatccgggaggcggacagccccgagggcccccagcattctccactggcagctggactcctgaagaaggtggcagaggagacaccagtatgaatgctgggctctccggaccctgcagcagagaggccagaggtagctggtgataccctgtcctgtggaaggacttccacttcaacacttccacttcaacagttcccgcacggcctgaacgcttcttaggccaagagacaccatgcagagcctagtctgtgatcctgtgtgaagatattttcagggtttttttttttttttttttgcatatggaggacaggtggacatggtcctgagctctggacggagcaggcaccctgatctcattctgaggtccacatggcaccttctgggccagcagctgtggccggtgtatcaagggcgcccttaaagctggaacattccagcaagcttcttgcgcttctctgcacccggcaggcccactttcctggcaccctcgactttatataaaagttgcactgcgtttcaaaaacccacccctgaatgaataaaaggagccctggctgg

SEQ ID NO: 17747 - DNA, 4196 bp, Homo sapiens
  source 1..4196: mol_type = unassigned DNA
gagtcccgcagcgcccgccggcagccacggcacttcgcaataaccaacttccccgccgccggcgcgtcccgccagcctgccctcggccgcaggcgactggacggcggttacggggcggtcccagcgccaccacgactggctgtcggctccgccagtcatgggctgatgacgccccggggctggctccgcccctagcggcagccccgcctcccctccagagcctggtcggcttagccctgctttccgcctcactcgttgagcaggtccgtgaattgtcagcgcgctgtgggcgactgtgtggccgcggcggccgccaggcttgccgcactccccctgaggtgcccgccggaaccaatgtgccctggtccactgggccgtgagcagccaccgactgggggcaacttggcacttagaaccgcagcagggacgtcggtttgctatcgggactcggcgaggacgatggaaatcctgtatgaatgtggaagccattagcagagtaattgctgtctgttaccatgacaaccagccgctgcagtcacctgcccgaagtcctgccagactgcaccagctcagctgcacccgtggtgaagacggtggaggattgtggcagcctagtgaatgggcagccgcagtatgtcatgcaagtttcagccaaggacgggcagctgctgtcaacagtagtgcggactcttgccacccagagccccttcaatgaccggccgatgtgcaggatctgccacgagggcagcagccaagaggacttgctctctccatgtgaatgtacagggaccttggggacaattcatcggagctgcctggagcactggctgtcatcctcaaacaccagctactgtgaactctgccacttcaggtttgcagtcgagcgcaaacccaggccgttagtggagtggctgagaaaccctggcccccagcatgagaagcggactctgtttggcgacatggtgtgcttcttgtttataactcccctggccaccatctcgggctggctgtgcctgcggggcgccgtggaccacctgcactttagtagtcggctggaagccgtcggactgattgcactcactgtcgcactcttcactatttacctcttttggacactagtgtcatttaggtaccactgtcgattgtacaacgagtggcgtcggaccaatcagagggtgattctcctcattccaaagtctgtcaatgtaccttctaaccagccgtccttgctgggcctccattcggtcaagaggaactcaaaggagacagttgtttgatgtttgtatggttggttggttgtttgattcattgtttggggtttggaagtgtctgcactggggtcatgcactgagcgacccccaagcccttccttaagcctgtgggtctaagaacatccagagcatattagcacatcactccaagcaacaacctccgccagaagaaagcaaatgctgttttacttcaaatgatggatgctgcaatcatatgatatttgctaagctgccaaacatgtttatttagcagatactgtatggaattttctgaacacctctttaacgtatgaggaaggttgtcctgctacggatgcaattcaattcttccttttttattactatttcaaacacacacacatatatatatatattaaacttagatgataatcaaaatcaaaaagtcaacgtaaaaactggtttcttggtttggttgggtcttatttgagttagtttgtttctcagtttctcgtatggattctttggggtactttggtagcctgagtggtctttttcatctctttcgcgtccattactcaaggagacagcataacagatgcagaacaagtcatatttgaagaatgttttgtactaaacttcatttaattattcagtttttaaagggaaaaagggcgtgagctcacacagtgagctgtttatttaaatatcattaaggagaaaaaaaaatatggtgagaagctcgctcctttcaacttgtttggtactgacagctgatagaagctattttctaataataaacatccagtgtgtgaaagacaaaacccactgattgcaatactctttttttaatgataaaacctgtgaagtttcccaaagcaggttttaaaaggaaaaaaaggaaaagcaaaaaggttgctgttctcactcccatctcatttagtgcatgtcttaattcgggattcgtaatgaattggaggatcattagacatttctaggaaccctagacctgttttgcatgtcaattagcattcccattgctctattgaatttctagcttgacaggtagatgtggcaaaaaaaaaaaaaaaaaaaaaagcctgtcctagcagccctgcacttattctaagacccctttgtctgattctttaaaaaggagccccacacagtgccttcccccaaccatgagccaattctgtcacagtccgaaatagactttttctaagggtttcgtgtccctcttttatccgtcgcagtgtaaagggtctgatccgcagcctgcattgtgcgcgcaccgaggcaggagcggatgtcttctgaggagagcgctggctggggttgactctcaggctcccggctgtccgcccgcccacacgcagcgaggaggggcggagccctgcttccggaatgcttaaaatatggaattctagaacatgacccacattctgagtatcactccagcatctgccttgtgttccaagtgggaaaacgagaagtgcaaaggaacaggcagcgaggagggtagcgatttttgtctgcaaattgatggagctgatgcaggtgtcccctttgtaggcgagccctccattcactggctgctcccagcgctgcctggggagggaaacagctgtactgctctccgctgcaaaactcagatgtgctttatggcttgtgacaatagatttcctccccaccacgcttcactgggacacttcaattccagtaatatatgtctcagcccttctgtttactgcgccctgctcacccccctgggctgtcattagctgcaccaccatcaaccgtttcttaattgacctttttaaaatgctggacatcaccggctgcacgcagctgccacacattaaatttccagagcaaagagtccaacttggtagctggtgaattgcagccctgtaatatacttaataaatgacgtccacccagccttagtccctgagctgtcaggtgaacccgtgacacgtctcaactgaatggcacaacattcatgagaggaccataccccttctccctgtttcttgcatgaattaaggaagcagcggatttccaggatgatttcctgtcaaggttggctgcagagaattcctgccatcttggttcatgagatgagatatgacatcatcaaaggcagccaggtcccaggccgttcaatggggatcctgcattaggaagggtttgcacattaaaactgtgcctgtgccacacctctttccttcgtgtttgcatccctgccctgtgaagtaaaacagagtccaagatgcaaggagtagattgtgtgtggggtggtgaaaggacacccctggcagccaggcagagcatcagtgcctcccttcccaggtcaccagcttgggacctccttgtgagaggctctgatctccatcagcatcagggcccataggggattctgaactcttggaggatatttcatcccctccaagccttgccccatggaaagggctacacctcctgcaggaaggggtgccttttgttaacaggtattaatgggtacagaggcaccatgcagcctaccagcacccttgctagcctagtcctcttcctgtgcttctttttgaaagatcaagaatgaagaggaagagatgaggagtgggggtcctttacctaaaggaccctcgtggttcattgcttctctttaactgactttttaaaaaaactccctcttccacactccttgctgtgattctgtcctaatcatttttcttgagaatgtcatgtagagataaatgtgtgtcacagtgaagccagaaggtgaattaacaactaagacaaatccagcatgctcttgcctgccctgcatatgtgctcatttggggaaggacggaggacacagagcatcgacacaaattctacagctcctcagagaacacagcagagactcagatgagctgtaaaatccattaaggaaaaataaatggcatgatttggaagtta

SEQ ID NO: 17748 - DNA, 4447 bp, Homo sapiens
  source 1..4447: mol_type = unassigned DNA
cccacctcggccacactgcttcgctcccccctccccaccttcagctggcaccgcaaacaagccttacctcgttgcatctgcgaggagaggtagcaacagcgagcctagccagccagaggcggtggagaggaggaaggggcggggtgggggggcagagagcgggccgaggccgcccttggtgggggtagcgggggcagagctgccgagcagacccggcagccgccctcctccgcccccaccctccagaagcactcttgcctgagaaccgaattattccactagtattatttcattttttattactccccctcctcactccccagccgcccccacccccacgccggcctcgcctctggttgcatggcagcgctgcccgggcgcgggggctcagggctggcccccagggaagggggaggaggaggaggatcatgaaggccggagtcgcgaccgcgccggacggcgggcagcagccagaggacgagccggagcagcccccgccccggagacacccggacgccgagcagcagtcgcctccgccgccgcagcagcagctgcgggcgcgggccgacccggagccggaggaggagggcgaccgcgacccagaggaggaagaggaggagaaggcgaggccactcgcccgcccggacctgcccttctctcggctcttgcccctcgaccgaagggacctttgatggaaccgaggggagggcgccacggatttgccgactgcagcaggggtgggctgggggctgagataatgtaaccactcctttctcctgttctctcccacacgcccctctcctctacccctattctctgctccactgccctctcaccccggtacacacacccttcctctagccaggatcttcatgctcaggaaggaggcgcctctgcaagggttaaacgatcttttctttttctcccatcctttttccttcccaaacctctattttacctcccttctcctaattggctttcccctcttcggtgtaaccctttggctgcggaggcaaagcacaagcccctagcccagtttcacctgcaacacccctcccccacccaactgctctcttaaaagcaactctggtgcttctgggggttaattgccccagttttctgcccaggagaattaaaacttctcccaatcttctctcctcccctaccttgactcccccaacccctaccacctgagaaaaacgatcttttctctctcacacatgcagtcctcaattcttcattgagctagttttctctaagcccagctcaatccactccagatttgatttacaattgtccccacccttttatataaaagaaagatttctcactgcgtaggaatttgagaagaacccaataatcctttcctggggaacttttaaacaattcgacattgatttaaacaattcgacagaggctctagtggcccctccaccacgcttcttcaatccctctgctcctaccagtgtcctcaggtcaaaagcagaaaggagacacactgaacaaagttggaggttggggtgggtgtgtgagggcaagaaaaacttttttgttattgggctttccaggtggagttcagaaccagtgactcacacttctcagtcctgggagcaatttatttgctacttggaggggttgtaagaaaagccagtgagaaagcagactccccccacaacacagatccactgtggacccccaaaacctgtcctgtccccctcttttaagactccagccacccctcttgggctctctacttccacggggcacatgctgatgcccctgtgtgggctgctctggtggtggtggtgctgctgctccggctggtactgctatggattgtgtgccccagccccccagatgttgcgccaccagggtctcctcaagtgccgctgccgcatgctcttcaatgacctgaaggttttcttactgcggcgccctcctcaagcgcccctgcccatgcacggcgacccccagccccccggtttggcggccaacaacacccttccggctctgggcgccggggggtgggcaggctggaggggcccccgagaagtggtgggcagggagccccctcctgtgccacctccaccccccttgccaccttcttctgtggaagatgactggggtggcccagccacagagccacctgcctcgctgctcagcagtgcctcctcagatgacttctgtaaggagaagaccgaggatcgctactcactgggcagcagcttggacagtggtatgaggaccccactctgccgcatctgcttccaggggccagaacagggggagctgctgagcccatgccgctgtgatggctcggtcaagtgcacacaccagccttgcctcatcaagtggatcagcgagcggggctgctggagctgcgagctgtgctactacaagtaccacgtcatcgccataagcacaaaaaatcctctgcagtggcaggccatctctctgacggtcattgagaaggttcaggttgcagccgccatcctgggctccctcttcctcatcgccagtatttcttggctcatctggtcaactttcagcccctcggcaagatggcagcgccaagaccttctcttccagatctgctacgggatgtatggcttcatggacgtggtgtgcataggtctcatcatccatgaaggaccctcggtgtaccgcatctttaaacggtggcaggctgtcaaccagcagtggaaagtgctgaactatgacaagacaaaagacctggaggatcaaaaggcaggaggcaggaccaacccccggacctcctcatccacccaggccaatatcccctcctcggaagaggagaccgcaggcacccctgcccctgagcagggccctgcccaggctgccggccacccctcaggccctctgtcccatcaccactgtgcttataccatcctgcacatcctgagtcacttgagacctcatgaacagcgaagtcccccaggcagcagccgagagctggtcatgagagtcacgacagtgtgagagcagaggcccggaaggaaggccatgaccaccactgagggcccggagcagggtggggaggtgcagtggcacccccagagccaacagagggagcaggcagagggtgggggacctggcgggagccctggggtagtgtcagagcgggagtgaggctggtgcaggagcagttctgctatttccaatcagtcaatgccactctccacaacaacaatgaaaaccaacaccaactcaacaacaaagtgcaatacaggctgaacctggcccaacagaaaaaccctgccccaatgcacctgcaggcaaggtacccgaagaagcagaggctgagggcaggcaaagcctgtgtgactgtggcagtgccggaggccaagggggccaagaggaaaagcatctgtggtctgctctgctctcaccctgtttggttttgtttctcctggggctgtgttctgcaggcagccagaaaaggaggaggcacgggtgagctggcagggacacactgcctttggggctcctgggctcatttggatgggcaagattcgctgacaaatggctgtggggatggtggggtggatggtcagggagggatgctcagggagggatatgctggtgtgagcagccagagggagagtgtgtctccttcctgaaggaacttccaaatggaactcccgatttcaggtgggctaaaagagggcttaggtttggaaaagggtgtccttctgtgcccttgttaatttattttatagtgatttggttcaaagatgtttacaggacacacacacacacacacacacacacacacacacacacccctagagaaaagtacagatttccagtggatatttcaagcacagttctgctgctgtggcttcagctttggaagctgtcaatcccggagcaactttcccaactacccaaccccaccatggccaggacatgtgcaatgccagccccttcttgtcttggcacatgcacagacccagtcccctcacggtagggcacccctgacctacgggcttccaagagagcagctgcagtggttgggaggagcttgaccagtgtgccccaaggagtggagtagagcccaatctaagtattccttgctgcttggaaccctccctgtttggaaccctccccaaagaggcagtcaggctgatgctcagtgctttgtgctccctgctccttcccgcgtagccaggtgggcccaagggtgcctggcagggagcactacccctggacccctcctgctcgctctggggaccctgccagggaaggccactgggtgttcacctgcaaagtttctggttgtcactgcacagtggtcgcgtcatccatgggtattaaaaggacactgtcaagtacttttttaaactagtttttagggttttttaaaactctctgttgtttgtaatattctcttaaaagcttgaaaataaaacttctttccctacca

SEQ ID NO: 17749 - DNA, 3926 bp, Homo sapiens
  source 1..3926: mol_type = unassigned DNA
tcttacctcacaaaggtagctcctccgccggcagcaactcggcgcccgcggtccatggaccggaacctcgggccgacggacgggaacccgggccgcgatcgccgcctccccgcctcaggctcctcctcctcgctctccgccgcctccgccggactcccgcaggccctgcaccgccgccgccaggctagcggagctgccccgggaagctgggtgacgggttcgcggctgccgccggactgcggcctactccgccgcctctcagtgctattgtccctgggcctggccttgagcgggtccactggggaaggccgtgtgcgccggctccgcggaagatgccggaccaagccctacagcagatgctggacagaagttgctgggtttgttttgctactgatgaagatgatagaacagctgaatgggtgagaccatgcaggtgcagaggatctacaaaatgggttcaccaggcctgtctacaacgctgggtggatgaaaagcaaagaggaaacagtacagccagagtggcatgtcctcagtgcaatgctgaatacctaatagtttttccaaaattgggtccagtggtttacgtcttggatcttgcagatagactgatctcaaaagcctgtccatttgctgcagcaggaataatggtcggctctatctattggacagctgtgacttatggagcagtgacagtgatgcaggttgtaggtcataaagaaggtctggatgttatggagagagctgatcctttattccttttaattggacttcctactattcctgtcatgctgatattaggcaagatgattcgctgggaggactatgtgcttagactgtggcgcaaatactcgaataaactacaaattttaaatagtatatttccagggataggttgtcctgttcctcgaattccagctgaggccaatcctttagcagatcatgtctctgctactcgaatcttgtgtggagcccttgtctttcctactattgctacaatagttggtaaattgatgttcagtagtgttaactctaatttacaaaggacaatcttgggtggaattgcgtttgttgccataaaaggagcatttaaagtttacttcaaacagcagcaatatttacgacaggcacaccgcaaaattctgaattatccagaacaagaagaagcataaaactgacttctggttgttctgcagttctctcatccttatgaatctgttgtgttgttttgattccatcattaatgcacttgtggagacttgtgataagctgctgctcctatattttttaagaaatataataaagcacttagggcaggggaaatcatctcggtaatcatggaacctaaggatgtgatttgttttcattgtttgtatgtactacttttatggcagtcatatgaaccattatcttagcatggtaaacctgggttttgttcatattttctccagacagaaatgcaaagatcaaactgtgcaaatattaaaaaaatgcacatgctgttttattcaaatgcctcttttgtacatgttcatgtttagtgttttctcagaatcagcaactcaaggtactatgaggatttttctcactgacataatttgattacatactaaataagaggatatgttaatatgaggaaatgtaaattaaattagttataaataaataaccaaaaatgtatgtaaacattcaaatgattatctgaacaaatgagattttgtggtgttttctttaacccatgtgatgtcctccaaaatgtgtagggtaaaaattcacagggcttccagatcactttttcaatattaaattttatttacataatgttgacatctcatacttcatgaagtaattttgactcatgcagtcgtgtgtgtgtgtgtgtgtgtgtgtgtgtgtgtgtgtgtatttgtgtgtttcagtgtttcatcaggtccttccatctctgggagttttttcaacccatatttctagaaattacagctgccagtttatagtagtttgagcagaggatgatttgcaaaaataaaaataaagttattttactctcctcttgcattgattcagttattgagatattcgttgatcacctcctatttcccaggcactgtgcagagtgctgtaggacatagtggtgaacaagacagacttggtccaagctcttacagagttgacagtctagtttcagcacatagaaaaccagcagtgaataaaccaaggtgaggccttgagctctttgtttttatattaatgaggagaaaagtatgaaaacaagaagtcttaagtaaatattgaggtcattgtttttggcttaagtttattatagaaaatcaacactaatgtttttagattttaattgtcctattgatgaggctagcaccttaatcactgtttagttttgtattcatttttaaaagcaattattgaagccattttcaatagattggccattttaatgttcagcaacctgaatggttatttttgttaattaaaattaaatttttaagagatattttcaaaaccctatttattttcttgttcacagtaatgcatgtcaataataaatgtttccccttactgataagcggccactttaggagtgtagcaaatatagattgagctatgttagtttgcaataatatatgttaactttagtaattaaagactggtttctatagtatgaatgtcttaattttgagttatatgatgtttatttgaatgactgttgaacattcaaatttgtattatttggagatgaagatttgactaacagtgagccttattaagaacactactacagttctgaaggggaaatataacatctatggttatatattttaaaaacttagattataggctgtaattataaaatatattggcttttgttttcaatgtgaaagatacattaaatggacacatatcttgcaaaattttgttgtatagaacagtttttaggcagcctttactaaagttatgcaaacacacagttccccatttactacattaatgcccttgacagggagtagctgcttggttttataggtattagggctcatgaaggccggggaacaactctaatccttttggggcaggagggagggtttttttagggttgcggggagggaactgcaagtgcctgaggaccagagtggcctctagccccgaattgaacacttttaaacctaaagagccttattattattagctcgagaaataccacatgccagtcttcccaggaaggtgacctgcctgaccatgaagcaacaaaagagcataggcagacttaaagttggatagacctgggttcaaatcatagttcagctttcaataactgtatgtatgattttggctaaaggatttgactttctctcaactgcagttttcttaatctttgaaatgcaaataatgtttatctcagaagactatttctaggattaactgagagattaaaggaacagcagcacttaggctcaaaatcgcccctacaaagcagtagttgtttcttaattgctaagtaatctgtttgcactctaggaaaagtaaatggagaggtaaaagaaaggcattggggacaaatgaaagagatgatgtagatttttcggatgggtgggtatattttattttccagtttattttcatatttctttactgtgttatttctggaaactttaatgttttaaacctcttttataaaattcaatgacgactactagaattcttttcaaaagttaacttatctccaaagtggctgaaaatattgtttaccattacatgattatgaaatgactgtgaagaatataaaattaaacttagtgacttaattagtcactgccttgctaactttgctgtaatttttttaaacgtcttgtttttaatatagcaaactatctcaatactggctggattaggttaaataaagaatttttatgttc

SEQ ID NO: 17750 - DNA, 4560 bp, Homo sapiens
  source 1..4560: mol_type = unassigned DNA
cctctcgcttcctctctcgcacctgagcgtacgcacctgcccgggcccggctccctcctcctctcccctccctctttccccgcccggccgcgggagcctcgtggctgcgtcaccgccgcccccccagacaagatggacaccgcggaggaagacatatgtagagtgtgtcggtcagaaggaacacctgagaaaccgctttatcatccttgtgtatgtactggcagtattaagtttatccatcaagaatgcttagttcaatggctgaaacacagtcgaaaagaatactgtgaattatgcaagcacagatttgcttttacaccaatttattctccagatatgccttcacggcttccaattcaagacatatttgctggactggttacaagtattggcactgcaatacgatattggtttcattatacacttgtggcctttgcatggttgggagttgttcctcttacagcatgccgcatctacaagtgcttgtttactggctccgtgagctcactactgacgctgccattagatatgctgtcaacggaaaatttgttggcagattgtttgcagggttgttttgtggtgacgtgcacactgtgtgcattcatcagcctggtgtggttgagagagcagatagtccatgggggagcaccaatttggttggagcatgctgccccaccgttcaatgctgcggggcatcaccaaaatgaggctccagcaggaggaaatggtgcagaaaatgttgctgctgatcagcctgctaacccaccagctgagaacgcagtggtgggggaaaaccctgatgcccaggatgaccaggcagaagaggaggaggaggacaatgaggaggaagatgacgctggtgtggaggatgcggcagatgctaataacggagcccaggatgacatgaattggaatgctttagaatgggaccgagctgctgaagagcttacatgggaaagaatgctaggacttgatggatcactagtttttctggaacatgtcttctgggtggtatctttaaatacactgttcattcttgtttttgcattttgcccttaccatattggtcatttctcccttgttggtttgggatttgaagaacacgtccaagcatctcattttgaaggcctaatcacaaccatagttgggtatatacttttagcaataacactgataatttgtcatggcttggcaactcttgtgaaatttcatagatctcgtcgcttactgggagtctgctatattgttgttaaggtctctttgttagtggtggtagaaattggagtattccctctcatttgtggttggtggctggatatctgttccttggaaatgtttgatgctactctgaaagatcgagaactgagctttcagtcggctccaggtactaccatgtttctgcattggctagtgggaatggtatatgtcttctactttgcctccttcattctactactgagagaggtacttcgacctggtgtcctgtggtttctaaggaatttgaatgatccagatttcaatccagtacaggaaatgatccatttgccaatatataggcatctccgaagatttattttgtcagtgattgtctttggctccattgtcctcctgatgctttggcttcctatacgtataattaagagtgtgctgcctaattttcttccatacaatgtcatgctctacagtgatgctccagtgagtgaactgtccctcgagctgcttctgcttcaggttgtcttgccagcattactcgaacagggacacacgaggcagtggctgaaggggctggtgcgagcgtggactgtgaccgccggatacttgctggatcttcattcttatttattgggagaccaggaagaaaatgaaaacagtgcaaatcaacaagttaacaataatcagcatgctcgaaataacaacgctattcctgtggtgggagaaggccttcatgcagcccaccaagccatactccagcagggagggcctgttggctttcagccttaccgccgacctttaaattttccactcaggatatttctgttgattgtcttcatgtgtataacattactgattgccagcctcatctgccttactttaccagtatttgctggccgttggttaatgtcgttttggacggggactgccaaaatccatgagctctacacagctgcttgtggtctctatgtttgctggctaaccataagggctgtgacggtgatggtggcatggatgcctcagggacgcagagtgatcttccagaaggttaaagagtggtctctcatgatcatgaagactttgatagttgcggtgctgttggctggagttgtccctctccttctggggctcctgtttgagctggtcattgtggctcccctgagggttcccttggatcagactcctcttttttatccatggcaggactgggcacttggagtcctgcatgccaaaatcattgcagctataacattgatgggtcctcagtggtggttgaaaactgtaattgaacaggtttacgcaaatggcatccggaacattgaccttcactatattgttcgtaaactggcagctcccgtgatctctgtgctgttgctttccctgtgtgtaccttatgtcatagcttctggtgttgttcctttactaggtgttactgcggaaatgcaaaacttagtccatcggcggatttatccatttttactgatggtcgtggtattgatggcaattttgtccttccaagtccgccagtttaagcgcctttatgaacatattaaaaatgacaagtaccttgtgggtcaacgactcgtgaactacgaacggaaatctggcaaacaaggctcatctccaccacctccacagtcatcccaagaataaagtagttgtctcaacaacttgaccttcccctttacatgtccttttttgtggacttctctctttggagatttttcccagtgatctctcagcgttgtttttaagttaaatgtatttgacttgtgttctcagcattcagagagcagcggtgtaagattctgctgttctccctggatcttctgacattactgctgtctgagatttgtatatgtgtaaatacaagttccttgataccctaaaaccttggattaaacagaatgtgcattgtacatctttaaacaaaatgtatattaatttattaaatctagttgtcactttattttggacctgctgtgatctcgacaggaaacgtgccacagagcagtagtgcgcaggcaagacttttcagtgacgccttgtggaacgcagttcatgatgtcctagcagctctcactaagggaactgtacattctttctttcttggctattcagaccttaccaagaacgttaaaggaaacaagtagaaatcagcagtggagtgtctgtggtaagaaaacatgaactttatgcttcactgttagttgtttgtggaagttattttgtataacaccaaagctgttgtacatttcctactgcctgatttttttcatgtgtctgtgtttgtaatattgtatagtatcttgtgctaggtgaggaaattatttttaattttgataatttaatattcctagtgtgatcagcattgggagttgggtttcagtggggcatgtctatacttagagaaaaaaagtccaaatgaagattttcatgagtcagcccccccgcccgcccccaccccacacccacatcctctcttttccacacacaactatctgtttattttttgtagcagtggccgaaagtcctgcaaggtcataaatctttcagagtgacatcaccaactgtactgcatcttactggatttaggacttctgagatgcttgtgaagtatagatgtggttgtggtcttagattgacagcattagagaagactggttagaacatctggtctcgctggttagtgcctcgttggctgaggactaggtgtgcatttctcctagcttttcatcaggaaatcccaaagtttccaaagctttttgtttacagaataaaacttcaaataaaaccaattcattatttgtccagaaggaagcttggctgagctggccttttaacataggaatgtatttcgttggaaacattctgaaaaatctcagagaactgaacccttacaaactttgttttccctcataaccaaagcttcaggttagaagtttagaaaaatagaatggttgggtacatgatctaaatgtttaatgctaaaggtatatcgtaagggtagtgtttgtttttgaacgataatttagaagttctcatagaaagcgtataacataggtcttcagaaactataaaagaattttcatatagtattaaaatccatagactaaaatctgagaattttttaacatatgcaagtcagccaaacataagctaccaaaataaagagcaatgtgttctggctgttttatacttcaacaattttttccctaagtggtaagcaattactttaaaacatatttttaaaaacatcggtatcgggagctgcggtggctccggccggttgtcctggcacacaaggaggcgaggctatgcgttcgaggccaacctaggcaaaattgg

SEQ ID NO: 17751 - DNA, 3743 bp, Homo sapiens
  source 1..3743: mol_type = unassigned DNA
ggtggctggttctgcgccggatccgggagaggggcgggcgccattgtgcttcgctgccgactgcatttcctcagtcacgggcctagaactccaaggagaaaggcggcgaaaaatctttaagaatggagtctaaaccttcaaggattccaagaagaatttctgttcaaccttccagctccttaagtgctaggatgatgtctggaagcagaggaagtagtttaaatgatacctatcactcaagagactcttcatttagattggattctgaatatcagtctacatcagcatcagcatctgcgtcaccatttcaatctgcatggtatagtgaatctgagataactcagggagcacgctcaagatcgcagaaccagcaacgggatcatgattcaaaaagacctaaactttcctgtacaaactgtactacctcagctgggagaaatgttggaaatggtttaaacacattatcagattcatcttggaggcatagtcaagttcctagatcttcatcaatggtacttggatcatttggaacagacttaatgagagagaggagagatttggagagaagaacagattcctctattagtaatcttatggattatagtcaccgaagtggtgatttcacaacttcatcatatgttcaagacagagttccttcatattcacaaggagcaagaccaaaagaaaactcaatgagcactttacagttgaatacatcatccacaaaccaccaattgccttctgaacatcagaccatactaagttctagggactccagaaattctttaagatcaaatttttcttcaagagaatcagaatcttcccgaagcaatacgcagcctggattttcttacagttcaagtagagatgaagccccaatcataagcaattcagaaagggttgtttcatctcaaagaccatttcaagaatcttctgacaatgaaggtaggcggacaacgaggagattgctgtcacgcatagcttctagcatgtcatctacttttttttcacgaagatctagtcaggattccttgaatacaagatcattgaattctgaaaattcttacgtttctccaagaatcttgacagcttcacagtcccgtagtaatgtaccatcagcttctgaagttcccgataatagggcatctgaagcttctcagggatttcgatttcttaggcgaagatggggtttgtcatctcttagccacaatcatagctctgagtcagattcagaaaattttaaccaagaatctgaaggtagaaatacaggaccatggttatcttcctcacttagaaatagatgcacacctttgttctctagaaggaggcgagagggaagagatgaatcttcaaggatacctacctctgatacatcatctagatctcatatttttagaagagaatcaaatgaagtggttcaccttgaagcacagaatgatcctcttggagctgctgccaacagaccacaagcatctgcagcatcaagcagtgccacaacaggtggctctacatcagattcggctcaaggtggaagaaatacaggaatatcagggattcttcctggttccttattccggtttgcagtccctccagcacttgggagtaatttgaccgacaatgtcatgatcacagtagatattattccttcaggttggaattcagctgatggtaaaagtgataaaactaaaagtgcgccttcaagagatccagaaagattgcagaaaataaaagagagcctccttttagaggactcagaagaagaagaaggtgacttatgtagaatttgtcaaatggcagctgcatcatcatctaatttgctgatagagccatgcaagtgcacaggaagtttgcagtatgtccaccaagactgtatgaaaaagtggttacaggccaaaattaactctggttcttcattagaagctgtaaccacctgtgaactatgtaaagagaagttggagcttaacctggaggattttgatattcatgaactacatagagctcatgcaaatgaacaagctgagtatgagtttatcagctctggtctctacctagtggtgttattgcacttgtgcgaacaaagcttttctgatatgatgggaaatacaaatgaaccaagcacacgtgtccgatttattaaccttgcaagaactcttcaggcacatatggaagatctcgaaacttcagaggatgattccgaagaagacggagaccataacaggacatttgatattgcctaacttcatataagacagatggatgatctgtgaacataagtgtttattaaaaatggcaattaaatataaattacttttgtgggggaatgcctaataaatacattgactatatataaaatgaatatatacatacacatgtatgcctgtatatatatattcattctccagtgttgctgaattaaaattctgctggactttttaacatagcaaatccgatgtttataaactggtaatcaaaaaggttttttcttttaggtgagtgggaaagtattacccttgttttaaatatctaagcaatgcctatcaacccttttttgtgttatgattactgtagtcatatttatgaaaaaaggtttgtgttttactcttgctagtgagaaaagtgggacaaaatatacttttgaaataaaatgctatatggcacctaattattttttcttttaaaatgccttaagttgcagtctcattttgataatcatttgcttccagtgtttaaaaattaaaaaaagaatggggagaaggttatgagaagagcattattaagtttccaaatttaatttgaattccaaattcacctagcaataaaatctaatttttaaaaagtatataaatataaaatgtataaatgatggatagatttttgtattgatttgcaaaatgcagattatatttgataggctatagtatgtagatattccttttaggaatattacagctgtaaattatatgagacttgccagtcaaatgctatttggtttaaaaaaattattgcaatctcaagttaatggaatatttttaaatcccacattcagagtttaaaacactggttttcaatgtgttttttagtgttgtcacttgtttatagataaatatataaataacctgtttggatcctggtcctttttaactgttccttggtaattctgagcatttatttgatgacttaatatttttcactacctttggagaacagatgaacattattcaccatgaatggatctatactgtgtggtcatgagttgtgtatacttccataacactgtatttttcttctgtcagtacccttaggatacactttaaaacaccttaaggtctgatgttatggcaacaaactactttttcaaacctaaataggaaccatgtaatttctcaaaagtgattgaacagtttgcccacacttagtttgttggtcttatgtaaaacattggctcaaaataaagtacacactgatttattttactgtttgaaatgtttccttttaaactggtgctcaaagaagacatcagacttcataaccaagaattttattacaatttcaaatctcattttaagcaataatataaatgttctaaaacatttgctcacctcttgccagttacctttgcattgtctgtcttaaagcaaaaatataaaatttaagggtggtagttttaatatattctgtgggtcctaagggatgctttgaatttgaagtatatatacttttaataaaattcagtatgacagttg

SEQ ID NO: 17752 - DNA, 2402 bp, Homo sapiens
  source 1..2402: mol_type = unassigned DNA
acttaacggtggtggctggttctgcgccggatccgggagaggggcgggcgccattgtgcttcgctgccgactgcatttcctcagtcacgggcctagaactccaaggagaaaggcggcggaattcatgatttgttcctgtagctgaaacatacattgaatgctttctgccctggcatgaacttacatggtcagagctggtttttcctgccctcaaatatatttctctgactctaccggttagactagaaaaatctttaagaatggagtctaaaccttcaaggattccaagaagaatttctgttcaaccttccagctccttaagtgctaggatgatgtctggaagcagaggaagtagtttaaatgatacctatcactcaagagactcttcatttagattggattctgaatatcagtctacatcagcatcagcatctgcgtcaccatttcaatctgcatggtatagtgaatctgagataactcagggagcacgctcaagatcgcagaaccagcaacgggatcatgattcaaaaagacctaaactttcctgtacaaactgtactacctcagctgggagaaatgttggaaatggtttaaacacattatcagattcatcttggaggcatagtcaagttcctagatcttcatcaatggtacttggatcatttggaacagacttaatgagagagaggagagatttggagagaagaacagattcctctattagtaatcttatggattatagtcaccgaagtggtgatttcacaacttcatcatatgttcaagacagagttccttcatattcacaaggagcaagaccaaaagaaaactcaatgagcactttacagttgaatacatcatccacaaaccaccaattgccttctgaacatcagaccatactaagttctagggactccagaaattctttaagatcaaatttttcttcaagagaatcagaatcttcccgaagcaatacgcagcctggattttcttacagttcaagtagagatgaagccccaatcataagcaattcagaaagggttgtttcatctcaaagaccatttcaagaatcttctgacaatgaaggtaggcggacaacgaggagattgctgtcacgcatagcttctagcatgtcatctacttttttttcacgaagatctagtcaggattccttgaatacaagatcattgaattctgaaaattcttacgtttctccaagaatcttgacagcttcacagtcccgtagtaatgtaccatcagcttctgaagttcccgataatagggcatctgaagcttctcagggatttcgatttcttaggcgaagatggggtttgtcatctcttagccacaatcatagctctgagtcagattcagaaaattttaaccaagaatctgaaggtagaaatacaggaccatggttatcttcctcacttagaaatagatgcacacctttgttctctagaaggaggcgagagggaagagatgaatcttcaaggatacctacctctgatacatcatctagatctcatatttttagaagagaatcaaatgaagtggttcaccttgaagcacagaatgatcctcttggagctgctgccaacagaccacaagcatctgcagcatcaagcagtgccacaacaggtggctctacatcagattcggctcaaggtggaagaaatacaggaatatcagggattcttcctggttccttattccggtttgcagtccctccagcacttgggagtaatttgaccgacaatgtcatgatcacagtagatattattccttcaggttggaattcagctgatggtaaaagtgataaaactaaaagtgcgccttcaagagatccagaaagattgcagaaaataaaagagagcctccttttagaggactcagaagaagaagaaggtgacttatgtagaatttgtcaaatggcagctgcatcatcatctaatttgctgatagagccatgcaagtgcacaggaagtttgcagtatgtccaccaagactgtatgaaaaagtggttacaggccaaaattaactctggttcttcattagaagctgtaaccacctgtgaactatgtaaagagaagttggagcttaacctggaggattttgatattcatgaactacatagagctcatgcaaatgaacaagctgagtatgagtttatcagctctggtctctacctagtggtgttattgcacttgtgcgaacaaagcttttctgatatgatgggaaatacaaatgaaccaagcacacgtgtccgatttattaaccttgcaagaactcttcaggcacatatggaagatctcgaaacttcagaggatgattccgaagaagacggagaccataacaggacatttgatattgcctaacttcatataagacagatggatgatctg

SEQ ID NO: 17753 - DNA, 559 bp, Homo sapiens
  source 1..559: mol_type = unassigned DNA
gttctgcgccggatccgggagaggggcgggcgccattgtgcttcgctgccgactgcatttcctcagtcacgggcctagaactccaaggagaaaggcggcggtgcgtgttgctgcgagtgggacgcgcactggtcggtgccggctcaggagccgggctttctgccctggcatgaacttacatggtcagagctggtttttcctgccctcaaatatatttctctgactctaccggttagactagaaaaatctttaagaatggagtctaaaccttcaaggattccaagaagaatttctgttcaaccttccagctccttaagtgctaggatgatgtctggaagcagaggaagtagtttaaatgatacctatcactcaagagactcttcatttagattggattctgaatatcagtctacatcagcatcagcatctgcgtcaccatttcaatctgcatggtatagtgaatctgagataactcagggagcacgctcaagatcgcagaaccagcaacgggatcatgattcaaaaagacctaaactttcctgtacaaactgtactacct

SEQ ID NO: 17754 - DNA, 2370 bp, Homo sapiens
  source 1..2370: mol_type = unassigned DNA
acttaacggtggtggctggttctgcgccggatccgggagaggggcgggcgccattgtgcttcgctgccgactgcatttcctcagtcacgggcctagaactccaaggagaaaggcggcgaaaaatctttaagaatggagtctaaaccttcaaggattccaagaagaatttctgttcaaccttccagctccttaagtgctaggatgatgtctggaagcagaggaagtagtttaaatgatacctatcactcaagagactcttcatttagattggattctgaatatcagtctacatcagcatcagcatctgcgtcaccatttcaatctgcatggtatagtgaatctgagataactcagggagcacgctcaagatcgcagaaccagcaacgggatcatgattcaaaaagacctaaactttcctgtacaaactgtactacctcagctgggagaaatgttggaaatggtttaaacacattatcagatgttcaagacagagttccttcatattcacaaggagcaagaccaaaagaaaactcaatgagcactttacagttgaatacatcatccacaaaccaccaattgccttctgaacatcagaccatactaagttctagggactccagaaattctttaagatcaaatttttcttcaagagaatcagaatcttcccgaagcaatacgcagcctggattttcttacagttcaagtagagatgaagccccaatcataagcaattcagaaagggttgtttcatctcaaagaccatttcaagaatcttctgacaatgaaggtaggcggacaacgaggagattgctgtcacgcatagcttctagcatgtcatctacttttttttcacgaagatctagtcaggattccttgaatacaagatcattgaattctgaaaattcttacgtttctccaagaatcttgacagcttcacagtcccgtagtaatgtaccatcagcttctgaagttcccgataatagggcatctgaagcttctcagggatttcgatttcttaggcgaagatggggtttgtcatctcttagccacaatcatagctctgagtcagattcagaaaattttaaccaagaatctgaaggtagaaatacaggaccatggttatcttcctcacttagaaatagatgcacacctttgttctctagaaggaggcgagagggaagagatgaatcttcaaggatacctacctctgatacatcatctagatctcatatttttagaagagaatcaaatgaagtggttcaccttgaagcacagaatgatcctcttggagctgctgccaacagaccacaagcatctgcagcatcaagcagtgccacaacaggtggctctacatcagattcggctcaaggtggaagaaatacaggaatatcagggattcttcctggttccttattccggtttgcagtccctccagcacttgggagtaatttgaccgacaatgtcatgatcacagtagatattattccttcaggttggaattcagctgatggtaaaagtgataaaactaaaagtgcgccttcaagagatccagaaagattgcagaaaataaaagagagcctccttttagaggactcagaagaagaagaaggtgacttatgtagaatttgtcaaatggcagctgcatcatcatctaatttgctgatagagccatgcaagtgcacaggaagtttgcagtatgtccaccaagactgtatgaaaaagtggttacaggccaaaattaactctggttcttcattagaagctgtaaccacctgtgaactatgtaaagagaagttggagcttaacctggaggattttgatattcatgaactacatagagctcatgcaaatgaacaagctgagtatgagtttatcagctctggtctctacctagtggtgttattgcacttgtgcgaacaaagcttttctgatatgatgggaaatacaaatgaaccaagcacacgtgtccgacttcagaggatgattccgaagaagacggagaccataacaggacatttgatattgcctaacttcatataagacagatggatgatctgtgaacataagtgtttattaaaaatggcaattaaatataaattacttttgtgggggaatgcctaataaatacattgactatatataaaatgaatatatacatacacatgtatgcctgtatatatatattcattctccagtgttgctgaattaaaattctgctggactttttaacatagcaaatccgatgtttataaactggtaatcaaaaaggttttttcttttaggtgagtgggaaagtattacccttgttttaaatatctaagcaatgcctatcaacccttttttgtgttatgattactgtagtcatattta

SEQ ID NO: 17755 - DNA, 2496 bp, Homo sapiens
  source 1..2496: mol_type = unassigned DNA
ctcggtgtcctcccgcggaggggcgtagggtgtaaacaggcgacgcgctgggggaggtgcggccttgctgcgtccacgtctcgggcatgctcgaggcgggccagggcggtagcgccgccagctcagagcccacctgaggtaactcctgcggcctctaggatcggagtcccccacgccgcgcgcagccgccgccgctggccgccaataagggcggccgagcccccggcccgggcagggggtgtggctgccggcagcgcgtcggctacaggtgggctgggctgggctgggctgggctgggctgggtgggggcggccgccaaggacccatccctgcgctgcgggcccggcgtggagcccgcggagaggcagcgcgactccaggcagtgggtctctctgccccggtgctcgcgtctgcccctggggccgggccgagcggaaccaggaatcgcagaaacggtcagcgcccagggctctaggccggccgccccgggtgccaggtgaattcctttccctgaccggctgtgagacgttggcccgtcagccgtcgtctttggcctgagtgtgcacatctgtaaaatggaagctcggactagtgatccgtgaggaccttccacgtctgacgtgtgatctcgagagacctgcgtacattcggggtgccagaaggaaagcatagcttgaaatccatggcccaaaatgactctaccagtggagactctcttctgtgaagaagacgaccagataagaggttgggatgagcatgccactgcatcagatctctgccattccatcccaggatgccatctctgctagagtctacagaagtaagaccaaagaaaaggagagggaagaacagaatgagaagactttgggacatttcatgagtcattcaagcaacatttctaaggctgggagtcctccgtcagcatcagctccggctccggtgtcctccttctctcgcacttctatcacgccatccagccaggacatctgcaggatctgccactgtgaaggagatgatgagagccccctgatcaccccctgccactgcacaggaagcctccacttcgtgcaccaggcctgcctgcagcagtggatcaagagctccgacacgcgctgctgcgagctctgcaagtatgagttcatcatggagaccaagctgaagccactgagaaaatgggagaagttgcagatgacgtccagcgagcgcaggaagatcatgtgctcagtgacattccacgtcattgccatcacatgtgtggtctggtccttgtatgtgctcattgaccgtactgctgaggagatcaagcaggggcaggcaacaggaatcctagaatggcccttttggactaaattggtggttgtggccatcggcttcaccggaggacttctttttatgtatgttcagtgtaaagtgtatgtgcaattgtggaagagactcaaggcctataatagagtgatctatgttcaaaactgtccagaaacaagcaaaaagaatatttttgaaaaatctccactaacagagcccaactttgaaaataaacatggatatggaatctgtcattccgacacaaactcttcttgttgcacagagcctgaagacactggagcagaaatcattcacgtctgattgtgtgcgggttgtcattttcctggacatccatgaagagctgaaggaaattgtttactgccaattgtatacctttcttatgtcctttaatagcatagactggacaggtgactatttatagtggcttctctttttctaaaccctccttagtctcctagaaaaccttcctgtgggccaggcatgcctgggtcctgcctctgcctggcagctctgtgggaaagtggaagaccccatgatgacatcatggggagccagcagagttcctgcccatggtcttgagctgaatgagagaataaaatgccaatcccaagggaagaggaggagcaggggtgcccaggccctgatacccagccgcctccagcttgcagtggtccccagcctggagcagagcattggggagtgtctagccatgacgagaagattccctctgcatcacggcgaaccccaggagatggtattgaaacagacccccaaacacagactcctgcctgccctctgccgatgctgcctcctccatgctcttgagcaggtggagccatggtgctctgtggtggcgcatgattcactgagcaaacagcactttacagaagaaaatctttattttgtaatatgtgtgtccagcgggattgacactcaaaaaaagtctcacttagaaatcttcccttccttacctttgtatctcctttacatcatgagagatcaaaaatccattttgccttacatatgctaagaagcgtggcattctttctgttcataaaacagactcatgacttttaagacaggacaagcaggccagaggctttttttttaatcacagatctcatgggaattagtggatgctaaatggcaattaaagcatgattcctatgc

SEQ ID NO: 17756 - DNA, 1848 bp, Homo sapiens
  source 1..1848: mol_type = unassigned DNA
atggtaggtatagggctgtggatatcgtcagtttgaccaagtattccaagaggccccatggagtttgtcatctgtaatagaggacgttagtgcattagtgatgaaaaaactgcttaccactgactattgtgatctcccagggagtataaggcagctccgcacttgaaatccatggcccaaaatgactctaccagtggagactctcttctgtgaagaagacgaccagataagaggttgggatgagcatgccactgcatcagatctctgccattccatcccaggatgccatctctgctagagtctacagaagtaagaccaaagaaaaggagagggaagaacagaatgagaagactttgggacatttcatgagtcattcaagcaacatttctaaggctgggagtcctccgtcagcatcagctccggctccggtgtcctccttctctcgcacttctatcacgccatccagccaggacatctgcaggatctgccactgtgaaggagatgatgagagccccctgatcaccccctgccactgcacaggaagcctccacttcgtgcaccaggcctgcctgcagcagtggatcaagagctccgacacgcgctgctgcgagctctgcaagtatgagttcatcatggagaccaagctgaagccactgagaaaatgggagaagttgcagatgacgtccagcgagcgcaggaagatcatgtgctcagtgacattccacgtcattgccatcacatgtgtggtctggtccttgtatgtgctcattgaccgtactgctgaggagatcaagcaggggcaggcaacaggaatcctagaatggcccttttggactaaattggtggttgtggccatcggcttcaccggaggacttctttttatgtatgttcagtgtaaagtgtatgtgcaattgtggaagagactcaaggcctataatagagtgatctatgttcaaaactgtccagaaacaagcaaaaagaatatttttgaaaaatctccactaacagagcccaactttgaaaataaacatggatatggaatctgtcattccgacacaaactcttcttgttgcacagagcctgaagacactggagcagaaatcattcacgtctgattgtgtgcgggttgtcattttcctggacatccatgaagagctgaaggaaattgtttactgccaattgtatacctttcttatgtcctttaatagcatagactggacaggtgactatttatagtggcttctctttttctaaaccctccttagtctcctagaaaaccttcctgtgggccaggcatgcctgggtcctgcctctgcctggcagctctgtgggaaagtggaagaccccatgatgacatcatggggagccagcagagttcctgcccatggtcttgagctgaatgagagaataaaatgccaatcccaagggaagaggaggagcaggggtgcccaggccctgatacccagccgcctccagcttgcagtggtccccagcctggagcagagcattggggagtgtctagccatgacgagaagattccctctgcatcacggcgaaccccaggagatggtattgaaacagacccccaaacacagactcctgcctgccctctgccgatgctgcctcctccatgctcttgagcaggtggagccatggtgctctgtggtggcgcatgattcactgagcaaacagcactttacagaagaaaatctttattttgtaatatgtgtgtccagcgggattgacactcaaaaaaagtctcacttagaaatcttcccttccttacctttgtatctcctttacatcatgagagatcaaaaatccattttgccttacatatgctaagaa

SEQ ID NO: 17757 - DNA, 2589 bp, Homo sapiens
  source 1..2589: mol_type = unassigned DNA
ctcggtgtcctcccgcggaggggcgtagggtgtaaacaggcgacgcgctgggggaggtgcggccttgctgcgtccacgtctcgggcatgctcgaggcgggccagggcggtagcgccgccagctcagagcccacctgaggtaactcctgcggcctctaggatcggagtcccccacgccgcgcgcagccgccgccgctggccgccaataagggcggccgagcccccggcccgggcagggggtgtggctgccggcagcgcgtcggctacaggtgggctgggctgggctgggctgggctgggctgggtgggggcggccgccaaggacccatccctgcgctgcgggcccggcgtggagcccgcggagaggcagcgcgactccaggcagtgggtctctctgccccggtgctcgcgtctgcccctggggccgggccgagcggaaccaggaatcgcagaaacggtcagcgcccagggctctaggccggccgccccgggtgccaggtgaattcctttccctgaccggctgtgagacgttggcccgtcagccgtcgtctttggcctgagtgtgcacatctgtaaaatggaagctcggactagtgatccgtgaggaccttccacgtctgacgtgtgatctcgagagacctgcgtacattcggggtgccagaaggaaagcatagagatggggtcttgctgtgttgcccagactggtctcaaactcctggcctcaagtgatccttctgcctcagcttcccaaagtactgggattacagcttgaaatccatggcccaaaatgactctaccagtggagactctcttctgtgaagaagacgaccagataagaggttgggatgagcatgccactgcatcagatctctgccattccatcccaggatgccatctctgctagagtctacagaagtaagaccaaagaaaaggagagggaagaacagaatgagaagactttgggacatttcatgagtcattcaagcaacatttctaaggctgggagtcctccgtcagcatcagctccggctccggtgtcctccttctctcgcacttctatcacgccatccagccaggacatctgcaggatctgccactgtgaaggagatgatgagagccccctgatcaccccctgccactgcacaggaagcctccacttcgtgcaccaggcctgcctgcagcagtggatcaagagctccgacacgcgctgctgcgagctctgcaagtatgagttcatcatggagaccaagctgaagccactgagaaaatgggagaagttgcagatgacgtccagcgagcgcaggaagatcatgtgctcagtgacattccacgtcattgccatcacatgtgtggtctggtccttgtatgtgctcattgaccgtactgctgaggagatcaagcaggggcaggcaacaggaatcctagaatggcccttttggactaaattggtggttgtggccatcggcttcaccggaggacttctttttatgtatgttcagtgtaaagtgtatgtgcaattgtggaagagactcaaggcctataatagagtgatctatgttcaaaactgtccagaaacaagcaaaaagaatatttttgaaaaatctccactaacagagcccaactttgaaaataaacatggatatggaatctgtcattccgacacaaactcttcttgttgcacagagcctgaagacactggagcagaaatcattcacgtctgattgtgtgcgggttgtcattttcctggacatccatgaagagctgaaggaaattgtttactgccaattgtatacctttcttatgtcctttaatagcatagactggacaggtgactatttatagtggcttctctttttctaaaccctccttagtctcctagaaaaccttcctgtgggccaggcatgcctgggtcctgcctctgcctggcagctctgtgggaaagtggaagaccccatgatgacatcatggggagccagcagagttcctgcccatggtcttgagctgaatgagagaataaaatgccaatcccaagggaagaggaggagcaggggtgcccaggccctgatacccagccgcctccagcttgcagtggtccccagcctggagcagagcattggggagtgtctagccatgacgagaagattccctctgcatcacggcgaaccccaggagatggtattgaaacagacccccaaacacagactcctgcctgccctctgccgatgctgcctcctccatgctcttgagcaggtggagccatggtgctctgtggtggcgcatgattcactgagcaaacagcactttacagaagaaaatctttattttgtaatatgtgtgtccagcgggattgacactcaaaaaaagtctcacttagaaatcttcccttccttacctttgtatctcctttacatcatgagagatcaaaaatccattttgccttacatatgctaagaagcgtggcattctttctgttcataaaacagactcatgacttttaagacaggacaagcaggccagaggctttttttttaatcacagatctcatgggaattagtggatgctaaatggcaattaaagcatgattcctatgc

SEQ ID NO: 17758 - DNA, 5021 bp, Homo sapiens
  source 1..5021: mol_type = unassigned DNA
tatctgtaaggacacattacaggcgtcaaagagaaattcctttggttcagaatgggcccaggccttgaagcctgctaagaataccaaagccagaagaacactaaagttctcaaggtccctcaatgatgtgggtgagaaggcgcaggatacttcagaaagttttgcctatgtggaaagaacttgttctgaagggaaattaatactccctcaagatacgtgtctcagaactaacaggtttcatcataaagaaaaaagaaccctgaaccacaaacctcttggcaattccaaacattcttgtgtttcatgcctttctgccggtcgctcaactgcctcagaggtggaagctggcaaggggggcaggcccggcctgctgctggaagagaaggcggatggtgaggccacgtcccgaagccggcaactgctccagtacctgttctcactctcgcacggcttgagcgccagcagcctgcacaggttccatgagctggagagctgcgctgctcgcctgcacactgccaagtcctccagcgggctggcagggagtatgggcttctgctctgacgagatgggagacgacgatgtctttgaggacagcacatctgcaaaactgaagagtagggttctgcgggcgcccctctgctccacggaaaaggacagcgacctggattgtccttctcccttctctgaaaaattaccccccatatctcccgtgtccacgtcaggggatgtctgcaggatctgccactgtgaaggagatgatgagagccccctgatcaccccctgccactgcacaggaagcctccacttcgtgcaccaggcctgcctgcagcagtggatcaagagctccgacacgcgctgctgcgagctctgcaagtatgagttcatcatggagaccaagctgaagccactgagaaaatgggagaagttgcagatgacgtccagcgagcgcaggaagatcatgtgctcagtgacattccacgtcattgccatcacatgtgtggtctggtccttgtatgtgctcattgaccgtactgctgaggagatcaagcaggggcaggcaacaggaatcctagaatggcccttttggactaaattggtggttgtggccatcggcttcaccggaggacttctttttatgtatgttcagtgtaaagtgtatgtgcaattgtggaagagactcaaggcctataatagagtgatctatgttcaaaactgtccagaaacaagcaaaaagaatatttttgaaaaatctccactaacagagcccaactttgaaaataaacatggatatggaatctgtcattccgacacaaactcttcttgttgcacagagcctgaagacactggagcagaaatcattcacgtctgattgtgtgcgggttgtcattttcctggacatccatgaagagctgaaggaaattgtttactgccaattgtatacctttcttatgtcctttaatagcatagactggacaggtgactatttatagtggcttctctttttctaaaccctccttagtctcctagaaaaccttcctgtgggccaggcatgcctgggtcctgcctctgcctggcagctctgtgggaaagtggaagaccccatgatgacatcatggggagccagcagagttcctgcccatggtcttgagctgaatgagagaataaaatgccaatcccaagggaagaggaggagcaggggtgcccaggccctgatacccagccgcctccagcttgcagtggtccccagcctggagcagagcattggggagtgtctagccatgacgagaagattccctctgcatcacggcgaaccccaggagatggtattgaaacagacccccaaacacagactcctgcctgccctctgccgatgctgcctcctccatgctcttgagcaggtggagccatggtgctctgtggtggcgcatgattcactgagcaaacagcactttacagaagaaaatctttattttgtaatatgtgtgtccagcgggattgacactcaaaaaaagtctcacttagaaatcttcccttccttacctttgtatctcctttacatcatgagagatcaaaaatccattttgccttacatatgctaagaagcgtggcattctttctgttcataaaacagactcatgacttttaagacaggacaagcaggccagaggctttttttttaatcacagatctcatgggaattagtggatgctaaatggcaattaaagcatgattcctatgcttttgagcctgttttatgacaaggtgttactttgtagacctggcccatacatttcttttttgtcaacactgaaaaagaacagtttctgagatcgaaatggaaggaaaggaagtgagtaatgacaacaaaactgaatatttaaaaaatattcctttatagttaaatctctccagttggtgttggcttcacattgaaagagcagccatgtgccaccctggccggggtgtgtgcactgcatgcaggttctcccttgcatgcaagatgggtgctggcccactgtgaggcttctgctcggggaagttctgtggagtcactaccagggccaagaggcaggtgggctggctctgggacgagggccaggtgtgagcaaactgccagggtccgctgtgccactgctccccggccacatgcccgcccagctgtcgccttaaccagactgaacagacaggatccttcagggcccttggccccactctcagtgcattctgtcatcagggattaccacctgtaccattttcataaaacaaaaccaaaatcactaccatcaaatggccttgtccctctaaaaagtctgcttaaaattctgtttttaaaacccagtttcctagttttccaggcaaatagttacctccgggaaagttgctgggggggcctgaagcacaatgtagcgcagatgcttcctttccaggccattctctcacccagcctgcacggaggagatgggagatgctgggggtcctgccctcagtctttttgggccttaggcgtttcgttcatcctgctaaggggatgaagcaaacacgaggtgattcctttgcctttcagagtggaagccctggagtttgttttgaaggccaggaggctgaaggatctctaagctacggtgtgggcttaatagcagcaggctttgtcctcctgtctcctccaagccagtgtctgattccttggcaacacaggtcttagtctgtggagtggctctgctgtggccttcctctggccgggcaggcactgtccagccatagccagctcctgagaataggtcagcctctcctttctgtctcccagggcacatccagcccgtgcctgtgttcactgtgccccgaagtgcaattacccataccccttctcagcctggggaccccaggcaaccacagactgtccactcaggggagctgaatcccaggtcagccctgccaatgtcccttaggaactgcccaggcaaggcccctggttttgtatacttgttcctgccacccagcagtagatgagtgtttcaggtgaagaccaggatagattttctaagtgtgaatccccacttcacatatggaaccccttatgctgaacttgaaaagcaccaagacttcctgtagacaagaaagtgcttaggtagggacagcccctgggcatcccacccaatgtagctggcaccccactatggcaaaggtgccttgataactgagccctgtatccctcccatgcccagccagattctcatgggaagccctctcccttcttttctgcctaacaccatctcatcgtttctggcctcactgtggacaatccacacacattcttctttcctctcctggcggggcacagagccacccccttgccttttcttttcttgaaggttctagttcagctcctgattcatcagacccttctagccccctgcatctagcagtgaagcatgaagcctggtggggatgtggtactcccatctggtgtggccaccagctctgccaatgttcctgtagccttggaaaacttgctctctcggttcttttgggtgctgtgtactccccagcttccccccttccccccccattttgcacctgggtttagtgaaaggatggcatttggttgacccatatagaaacccagaatgaggtctcagggccaggaggcctggtatttgtaggccagggaaggggaagaggcaagtggtctggggtatcaccagccagccctctctgatttggcctctactccccataagtcacagtaccataagcaggcttctggcctcagcaatttggtctttgtgcccaagtttattgtgagaatttcctgaaaactctataaaaggtctcttcctactgtaggcctctaatgtttctcccctttttgcttcagtccactcttcagtcttgtaggcctagttttcaaacctgcacatgtgtcctacctggccacaggcatgcaggcctcaggcagctgggccagtttgggagcctcgggtgatgtctgcacgatctggggctgcctctgcacccctgctgtgggcttcagggttggagaagggctgggaccaaccgggtgagatccacaagtctctggatgtggctgaaggcaaatacacaattgaagtactttctgttttgaagtgctttcccttttgaatctggtttgaaacatgcagcttctgtctctagcccaaggaaagaccaaaacatagggaaataaaagcatttatctttgtcttggaagtaattgttgaagttgtgcagttgatcagtgcacagttagatgcaatgtttatagaaattgattgttaaaccaaatttacactggcatgtgtggtgtagtttctaaaaggcacttcacatttgaaatttttcttaccttagaaagtttctagtgatctaaatgtctagttttgtattcttttgtgtgtgttcactgtttctcagtattaccacttgaataattctctgtacaggggggtttgtgctatacactgggatgtctaattgcagcaataaagcctttctttaaaaag

SEQ ID NO: 17759 - DNA, 441 bp, Homo sapiens
  source 1..441: mol_type = unassigned DNA
agtagagacagggtttcaccgtgttagccagggtggtctcgatctcctgacctcgtgatttgcccgccttggcctcccaaagtgctgggattacagcttgaaatccatggcccaaaatgactctaccagtggagactctcttctgtgaagaagacgaccagataagaggttgggatgagcatgccactgcatcagatctctgccattccatcccaggatgccatctctgctagagtctacagaagtaagaccaaagaaaaggagagggaagaacagaatgagaagactttgggacatttcatgagtcattcaagcaacatttctaaggctgggagtcctccgtcagcatcagctccggctccggtgtcctccttctctcgcacttctatcacgccatccagccaggacatctgcaggatctgccactgtgaaggagatgat

SEQ ID NO: 17760 - DNA, 2982 bp, Homo sapiens
  source 1..2982: mol_type = unassigned DNA
gaaggagccgccatttgccaccgccgagcgcacgggccgagccaagcctgatcccggagccggagggggactgggaccgagagaacggcgatggggggcggccccgccgcaggaggacccgggcgcgtaaccccgggggcccggcccgctccagacccagacccgcggggtgcggcaccctgagcccccctccccgccccctgccctggccatggccgcccaccccgccgcccccgggccgccagcccgctcggccccgcaagcaccggagccccggcggtggcagcagtgaacggctgtcgcaggccccgaagaccccggcccggctcggctctctagcgcgcgcccccttcccggccttgtcctctcccctccccccgccgctagcgagccccccttgcacgctgccccccgcccccggtgtccggacgatgctcaagtctcggctccgcatgtttctgaacgagctgaagctgctggtgctgacaggcggggggcggccccgggccgagccgcaaccccgggggggccggggaggcggctgcggctgggcgcccttcgctggctgctccacccgggacggcgacggcgacgaggaggagtactacgggtcggagccgcgggcccggggcctggccggcgacaaggagccgcgggccggacccctgccgccgcccgcgccgccgctgccgcccccgggcgcgctggacgccctgtcgctcagcagtagcctggacagcggactccgaacccctcagtgccggatctgcttccagggcccggagcagggggagctcttaagcccctgccgctgcgacggctcagtgcgctgcacgcatcagccctgcctcatccgctggatcagcgagaggggctcctggagctgtgagctctgctacttcaagtaccaggtcctggcgatcagcaccaagaacccactgcagtggcaggccatctccctgacggtcatcgagaaggtccagattgctgccatagttctgggctcgctcttcctggttgccagcatctcctggctcatctggtcctcactcagcccttcagccaagtggcaacgacaggatctgctctttcagatctgctacggcatgtatggcttcatggatgtcgtctgcataggcctcatcatccatgaaggctcctctgtctaccgcatcttcaagcgctggcaggcagtgaaccagcagtggaaggtcctaaattatgacaagaccaaggacataggaggagatgcagggggagggacggcagggaagtcaggccccaggaactcacggacgggccccacctctggggccacgagccgccccccagctgcccagcgcatgcggacgctcttgcctcagcgctgcggttatacaatcttgcacctccttgggcagctgcggccaccagatgcccgttccagctcccattctggccgagaggttgtcatgagggtcactacagtctgaactggactccaggagcagggatcttgagtcaatgcatcagtcagagaagaactctcatggctgctggaggtaccagctggacaaggtgtttggggcatgctgcccccgtcaccgaggatctgtgtgggtagcctcaagctggagacattgtctggcctcactgcccactgggtagagacacctggatgacatttcagtacccgctggcagctcctcccactcatccagagacggccggtgggcaggcggggagagcagctttccttccctggagagaaccgtctttacctcagctcctagggcctccagccccccagctccaccacggtgacttggtgaagggggaccaatgccagaagaaaggggctgtagacccctattccccaccccatggccacagggcatctggcaataagactagtatacattgacctcccgttccctgcatgagggcggggagttccccctgctccatcccccattgcatgggggaagggcataaagaatcatttatatgcacgtggagactcctttctcatctggggcttttctggagggttgggagatgtggggaggtttctctgcacaggttgcaaatcccaaatgcagcagtgggttctgagttgtaggtgtgactcccacttgctggtgaataattcatgttggctgctaggtggcagcactccgaggtatctaaagggtagacctggacctgccacctatgagttgtgtgatatagaaaaaaatctcttagctctggttttcctgtctacttcatagggttggaataaggataaatgagggacaggttggatgccgttgcagagaaaatcagcaatgacataaagagatttctagaatagttgatggtccatttatttcaaatagtagctggtgtaacaaattctaaaatgtgtttttcatctggagttgcacagaatcatggaattttgtgttgagtgacataataggtatggaaatatgaggggaaatagacattgcaaatgtgaagcatggtggttatttgttaagaatgagaactcctctgactctaaatatttgggcctgtgggctggggaaggctggagccatctgccttgttctggagatcatctgggttctatcagtccttctcaagtactgtgctcacccagaaaagcagtgtgaagtgaatttggactcatttggagtgagatggagggaatccccccactcagtgttatgagtctccaaccccagtttaagctatttccatggcagtttagggtcacaggtttgatcccggtgtgcccagccagtggtattaatggatggcattatgtttggaggcagcagcatagaggactgttgtttatagagaaaagatttgggaaggactgtttacaatgtgggtcagcctgaagcctgggcactttcttctgtgaccttggggttgtgtattatatgaatgatgctgtttttaagtaaaccattcaacagcaattaaataattccttcattcacggctaaa

SEQ ID NO: 17761 - DNA, 1668 bp, Homo sapiens
  source 1..1668: mol_type = unassigned DNA
actaagaatacaaaaattagccaggcgtggtggctcgtgcctgtaagctactcgcgaagctgaggcgggagaatccttgaacccgggaggcagaggttgcagtgagccgagatcacagccactgcactccagcctgggcaacagagcaagactccgtctcgaaggaaaaaaaaaaaaaagaaaagaaaaaatgatgttgatgatgatagcaaatatgtagtgttttctgtgtcaagttttggtgtgtattaactcttaatcttcacaataatcttattagatactattattatccccttttacaaacgaggacactgatgcacaaagatttgaaaacttacccaaggttacttagccagtaagtgatggagtcaagatttaggattcaaatctagatgttttggtttcagagcacttgcccaatcctgcctttctaaagtaagacaaatggtgtcagacaagtgccacattctagatttaatcaaggcacagagaagacagatgttgatcctgcctgaaggttttagggaaggttcctggagcaccctgctcttcagggccacccatcacctggccctccatccctttctgggactctttggagccctttctcccacacagtggcaggccatctccctgacggtcatcgagaaggtccagattgctgccatagttctgggctcgctcttcctggttgccagcatctcctggctcatctggtcctcactcagcccttcagccaagtggcaacgacaggatctgctctttcagatctgctacggcatgtatggcttcatggatgtcgtctgcataggcctcatcatccatgaaggctcctctgtctaccgcatcttcaagcgctggcaggcagtgaaccagcagtggaaggtcctaaattatgacaagaccaaggacataggaggagatgcagggggagggacggcagggaagtcaggccccaggaactcacggacgggccccacctctggggccacgagccgccccccagctgcccagcgcatgcggacgctcttgcctcagcgctgcggttatacaatcttgcacctccttgggcagctgcggccaccagatgcccgttccagctcccattctggccgagaggttgtcatgagggtcactacagtctgaactggactccaggagcagggatcttgagtcaatgcatcagtcagagaagaactctcatggctgctggaggtaccagctggacaaggtgtttggggcatgctgcccccgtcaccgaggatctgtgtgggtagcctcaagctggagacattgtctggcctcactgcccactgggtagagacacctggatgacatttcagtacccgctggcagctcctcccactcatccagagacggccggtgggcaggcggggagagcagctttccttccctggagagaaccgtctttacctcagctcctagggcctccagccccccagctccaccacggtgacttggtgaagggggaccaatgccagaagaaaggggctgtagacccctattccccaccccatggccacagggcatctggcaataagactagtatacattgacctcccgttccctgcatgagggcggggagttccccctgctccatcccccattgcatgggggaagggcataaagaatcatttatatgca

SEQ ID NO: 17762 - DNA, 4380 bp, Homo sapiens
  source 1..4380: mol_type = unassigned DNA
cagagcgcgcacgcaagccccgggagcgcgggacagacagggcacgctgggtcggcggagctgaggctcccagctgtgggcctcgctggcccggtcgcccagtctcgcgagagttgggagtaaacagccccgaatggagtgcccaggcgtgttcgccgcggaggcgccgttatcccgggcccgccggccctgagctcccggcggcgcagattggctcacagtggttgattgatcaaccccattggacgttggttctgtggtacaaatggagtacaggactcagtcgtcacggcctgagtgagagaagccttatttccaagatggagaagaagcggagaaagaaatgaaagcctctcttcaggctgaaccacaaaaggccatgggatttaacttttatttatgttgggcaagactgtaagatggctgattagtaatgttgcagcttttagctgaaacaaaaattcacttttaatcaagaagaaaaaagtgtgatttgaatatatgcaattttatgatcatattcgcttgtgaccatgaagcttgtcaacatctggctgcttctgctcgtggttttgctctgtgggaagaaacatctgggcgacagactggaaaagaaatcttttgaaaaggccccatgccctggctgttcccacctgactttgaaggtggaattctcatcaacagttgtggaatatgaatatattgtggctttcaatggatactttacagccaaagctagaaattcatttatttcaagtgccctgaagagcagtgaagtagacaattggagaattatacctcgaaacaatccatccagtgactaccctagtgattttgaggtgattcagataaaagaaaaacagaaagcggggctgctaacacttgaagatcatccaaacatcaaacgggtcacgccccaacgaaaagtctttcgttccctcaagtatgctgaatctgaccccacagtaccctgcaatgaaacccggtggagccagaagtggcaatcatcacgtcccctgcgaagagccagcctctccctgggctctggcttctggcatgctacgggaaggcattcgagcagacggctgctgagagccatcccgcgccaggttgcccagacactgcaggcagatgtgctctggcagatgggatatacaggtgctaatgtaagagttgctgtttttgacactgggctgagcgagaagcatccccacttcaaaaatgtgaaggagagaaccaactggaccaacgagcgaacgctggacgatgggttgggccatggcacattcgtggcaggtgtgatagccagcatgagggagtgccaaggatttgctccagatgcagaacttcacattttcagggtctttaccaataatcaggtatcttacacatcttggtttttggacgccttcaactatgccattttaaagaagatcgacgtgttaaacctcagcatcggcggcccggacttcatggatcatccgtttgttgacaaggtgtgggaattaacagctaacaatgtaatcatggtttctgctattggcaatgacggacctctttatggcactctgaataaccctgctgatcaaatggatgtgattggagtaggcggcattgactttgaagataacatcgcccgcttttcttcaaggggaatgactacctgggagctaccaggaggctacggtcgcatgaaacctgacattgtcacctatggtgctggcgtgcggggttctggcgtgaaaggggggtgccgggccctctcagggaccagtgttgcttctccagtggttgcaggtgctgtcaccttgttagtgagcacagtccagaagcgtgagctggtgaatcccgccagtatgaagcaggccctgatcgcgtcagcccggaggctccccggggtcaacatgtttgagcaaggccacggcaagctcgatctgctcagagcctatcagatcctcaacagctacaagccacaggcaagtttgagccccagctacatagatctgactgagtgtccctacatgtggccctactgctcccagcccatctactatggaggaatgccgacagttgttaatgtcaccatcctcaacggcatgggagtcacaggaagaattgtagataagcctgactggcagccctatttgccacagaacggagacaacattgaagttgccttctcctactcctcggtcttatggccttggtcgggctacctggccatctccatttctgtgaccaagaaagcggcttcctgggaaggcattgctcagggccatgtcatgatcactgtggcttccccagcagagacagagtcaaaaaatggtgcagaacagacttcaacagtaaagctccccattaaggtgaagataattcctactcccccgcgaagcaagagagttctctgggatcagtaccacaacctccgctatccacctggctatttccccagggataatttaaggatgaagaatgaccctttagactggaatggtgatcacatccacaccaatttcagggatatgtaccagcatctgagaagcatgggctactttgtagaggtcctcggggcccccttcacgtgttttgatgccagtcagtatggcactttgctgatggtggacagtgaggaggagtacttccctgaagagatcgccaagctccggagggacgtggacaacggcctctcgctcgtcatcttcagtgactggtacaacacttctgttatgagaaaagtgaagttttatgatgaaaacacaaggcagtggtggatgccggataccggaggagctaacatcccagctctgaatgagctgctgtctgtgtggaacatggggttcagcgatggcctgtatgaaggggagttcaccctggccaaccatgacatgtattatgcgtcagggtgcagcatcgcgaagtttccagaagatggcgtcgtgataacacagactttcaaggaccaaggattggaggttttaaagcaggaaacagcagttgttgaaaacgtccccattttgggactttatcagattccagctgagggtggaggccggattgtactgtatggggactccaattgcttggatgacagtcaccgacagaaggactgcttttggcttctggatgccctcctccagtacacatcgtatggggtgacaccgcctagcctcagtcactctgggaaccgccagcgccctcccagtggagcaggctcagtcactccagagaggatggaaggaaaccatcttcatcggtactccaaggttctggaggcccatttgggagacccaaaacctcggcctctaccagcctgtccacgcttgtcttgggccaagccacagcctttaaacgagacggcgcccagtaacctttggaaacatcagaagctactctccattgacctggacaaggtggtgttacccaactttcgatcgaatcgccctcaagtgaggcccttgtcccctggagagagcggcgcctgggacattcctggagggatcatgcctggccgctacaaccaggaggtgggccagaccattcctgtctttgccttcctgggagccatggtggtcctggccttctttgtggtacaaatcaacaaggccaagagcaggccgaagcggaggaagcccagggtgaagcgcccgcagctcatgcagcaggttcacccgccaaagaccccttcggtgtgaccggcagcctggctgaccgtgagggccagagagagccttcacggacggcgctggtgggtgagccgagctgtggtggcggctggtttaaaagggatccagtttccagctgcaggtttgttagagtctgttctacatgggcctgccctcctgtgatgggcagaggctcctggtacatcgagaagattcctgtggatcccgtcaggagggacttagtggctctgccgccagtgagacttcccgccggcagctgtgcgcaccaaagactcgggagaactggaaaggctgtctggggtcttctgactgcaggggaaggatgtactttccaaacaaatgatacaaccctgaccaagctaaaagacgcttgttaaaggctattttctatatttattgttgggaaaagtcactttaaagacttgtgctatttggaagcaaagctattttttttgtcagtggaatgcagtttttttactattccatcatgaggaacaacatagattccatgatctttttaatgacagtacagactgagatttgaaggaaacatgcacaaatctgtaaaacatagaccttcgctttatttttgtaagtatcacctgccaccatgttttgtaatttgaggtcttgatttcaccattgtcggtgaagaaaattttcaataaatatgtattacccgtctgaagcttaaaga

SEQ ID NO: 17763 - DNA, 3085 bp, Homo sapiens
  source 1..3085: mol_type = unassigned DNA
aacccaacacaaactcagttcagataaggggaaaccatgaaaccaacataattgccagagcacttgtgtcagcacttctgacacaaattatgtcagggtccccagcacctctcccaggctcggtgctttagggctcacgggactcagcctgtggtcatactcccagctaagattcattatagtggcacagcaaggatgcacagcggctctgtaagggaaaaagatgcctcacacggagaaagcctggagaaatccaggcgcagcttcctaagctctcccctctctcctgccaggcagggtctcacagagctggcccctttcctagcagcaagctgcattgacatgtgtacgtgtttttgcccagggaagccctctagagactcaagtccaagtttccattagggctggtcacgtactcattctctgccagtgacaactcccaaagctccagacttgcaaaagcagaggtgtccctgcacatcacactgtctgtatagacagcaggctggcacagaggccttatctgtgcaggagcattccagagccaagttcccagatgccagcctagggcagcgctgtaagcaagcccttctgaagctaggtctgctttgttaactctgtcttgtacagttgtgttgcttcattgtagttttctcatatgatctactctaacactgtattctttatttcagtttgagccccagctacatagatctgactgagtgtccctacatgtggccctactgctcccagcccatctactatggaggaatgccgacagttgttaatgtcaccatcctcaacggcatgggagtcacaggaagaattgtagataagcctgactggcagccctatttgccacagaacggagacaacattgaagttgccttctcctactcctcggtcttatggccttggtcgggctacctggccatctccatttctgtgaccaagaaagcggcttcctgggaaggcattgctcagggccatgtcatgatcactgtggcttccccagcagagacagagtcaaaaaatggtgcagaacagacttcaacagtaagctccccattaaggtgaagataattcctactcccccgcgaagcaagagagttctctgggatcagtaccacaacctccgctatccacctggctatttccccagggataatttaaggatgaagaatgaccctttagactggaatggtgatcacatccacaccaatttcagggatatgtaccagcatctgagaagcatgggctactttgtagaggtcctcggggcccccttcacgtgttttgatgccagtcagtatggcactttgctgatggtggacagtgaggaggagtacttccctgaagagatcgccaagctccggagggacgtggacaacggcctctcgctcgtcatcttcagtgactggtacaacacttctgttatgagaaaagtgaagttttatgatgaaaacacaaggcagtggtggatgccggataccggaggagctaacatcccagctctgaatgagctgctgtctgtgtggaacatggggttcagcgatggcctgtatgaaggggagttcaccctggccaaccatgacatgtattatgcgtcagggtgcagcatcgcgaagtttccagaagatggcgtcgtgataacacagactttcaaggaccaaggattggaggttttaaagcaggaaacagcagttgttgaaaacgtccccattttgggactttatcagattccagctgagggtggaggccggattgtactgtatggggactccaattgcttggatgacagtcaccgacagaaggactgcttttggcttctggatgccctcctccagtacacatcgtatggggtgacaccgcctagcctcagtcactctgggaaccgccagcgccctcccagtggagcaggctcagtcactccagagaggatggaaggaaaccatcttcatcggtactccaaggttctggaggcccatttgggagacccaaaacctcggcctctaccagcctgtccacgcttgtcttgggccaagccacagcctttaaacgagacggcgcccagtaacctttggaaacatcagaagctactctccattgacctggacaaggtggtgttacccaactttcgatcgaatcgccctcaagtgaggcccttgtcccctggagagagcggcgcctgggacattcctggagggatcatgcctggccgctacaaccaggaggtgggccagaccattcctgtctttgccttcctgggagccatggtggtcctggccttctttgtggtacaaatcaacaaggccaagagcaggccgaagcggaggaagcccagggtgaagcgcccgcagctcatgcagcaggttcacccgccaaagaccccttcggtgtgaccggcagcctggctgaccgtgagggccagagagagccttcacggacggcgctggtgggtgagccgagctgtggtggcggctggtttaaaagggatccagtttccagctgcaggtttgttagagtctgttctacatgggcctgccctcctgtgatgggcagaggctcctggtacatcgagaagattcctgtggatcccgtcaggagggacttagtggctctgccgccagtgagacttcccgccggcagctgtgcgcaccaaagactcgggagaactggaaaggctgtctggggtcttctgactgcaggggaaggatgtactttccaaacaaatgatacaaccctgaccaagctaaaagacgcttgttaaaggctattttctatatttattgttgggaaaagtcactttaaagacttgtgctatttggaagcaaagctattttttttgtcagtggaatgcagtttttttactattccatcatgaggaacaacatagattccatgatctttttaatgacagtacagactgagatttgaaggaaacatgcacaaatctgtaaaacatagaccttcgctttatttttgtaagtatcacctgccaccatgttttgtaatttgaggtcttgatttcaccattgtcggtgaagaaaattttcaataaatatgtattacccgtctgaagctt

SEQ ID NO: 17764 - DNA, 4457 bp, Homo sapiens
  source 1..4457: mol_type = unassigned DNA
aaggcgcgcgcggtcagctgttggcggtgcagggaggaggacgccggggctcgccttccctcctctgccgccgctgccgccatgattccggtgtcgctggtggtggtggtggtgggtggctggactgtcgtctacctgaccgacttggtgctgaagtcatctgtctattttaaacattcttatgaagactggctggaaaacaacggactgagcatctcccctttccacataagatggcaaactgctgttttcaatcgtgccttttacagttggggacggcggaaagcaaggatgctttaccaatggttcaattttggaatggtgtttggcgtaattgccatgtttagctcattttttctccttggaaaaacgctgatgcagactttggcacaaatgatggctgactctccctcttcttattcttcctcctcttcttcctcttcctcctcttcttcctcttcctcttcttcatcttcttcctcttcctcgcttcacaatgaacaggtgttacaagttgtggttcctggtataaatttacccgtcaatcaactgacctatttcttcacggcagttctcattagtggtgttgtacatgaaattggacatgggatagcagctattagggaacaagttcgatttaatggctttgggatttttctcttcattatttatcctggagcatttgttgatctgttcaccactcatttgcaacttatatcgccagtccagcagctaaggatattttgtgcaggtatctggcataattttgtccttgcactcttgggtattttagctcttgttctcctcccagtaattctcttgccattttactacactggagttggggtgctcatcactgaagttgctgaggactctcctgccattggacccagaggcctttttgtgggagaccttgtcacccatctacaggattgtcctgttactaatgtgcaagattggaatgaatgtttagataccatcgcctatgagccccaaattggttactgtataagtgcatcaactttacagcagttaagtttcccagttagaggtgtgtatatttcctcaatataatataatgcttcaagcaccagtacctgccattcactaatccttaaaccatgtctatacatttattctgttctaatctgtttaaagcaaatcagtaaagtaaatagattccaaccaatagacatttttcttggtaagttggatgctaatatgtgtttcctttattatatattgttgaacttctaactattttcattatatcatatttaacttttaggactctaatattttctgctttcaaaacacttgtattaaatcatagccgggcgcagtggctcacgcctgtaatcccagcactttgggaggctgaggcgggcggatcacttgaggtcaggagttcatgaccaacctggccaacatagtgaaaccccatctctactaaaaatacaaaaattagcagggcatggtgacgggtgcctgtgatttcagctgctcgggagtctgaggcaggagaatcgcttgaacccgggaggtggaggttgcaatgagccgagatcgggacatggaaagagactctgtctcaaaaaaaaaaaaaaaaatcagcattcaaggtcaatcataaccaattaactaattccaataatcaaataccccaatataatattatctttatgcatgtctgtagatatattatagtactttaaacttttataattgaaaaagggaatataagtaataagaaccggttctactttgcataagcttatgtcagaacagataaacaacgatagttaacaactaaatatataaaaatcaaagcataaacattctgtattaatatattgttagcccaacacagacatgcaataaggaaagattacaagaaataagaaggaacttggcaaacaaaaaaccccatctgggatttagaaaaaattcccttacttcttaaaaattcccttaatacttaaacagttctagtggaatcagtgttggcatgtctgattctatctggggtagagttattttatgtattttatgtggcagccatcctaaagaagttgtcttggcttccaaaaataccatgtgaagtcagatatgttgctctgtgcagcagatgacagagctgaggcaagtttcttctcggatcctgccaaacttatttagagttatttcagctctgaaaaatcagcttcccaattctttatacaaaatcagcttcccaattctttatacaaaattggaggtgttagaaaatagaaattatgctcacagactatatctttaagtaaaaaaatatcctgatacttgtccacatctattggtgtagggaaatatgattaataatcaagaatagttttagtaaagtactgtgtgcaacacaggcaaagtagtaagaactgatttttttaaaaaaactttttaaaatttactcatttgtaagaatttttttattatcaaaaatgtttagacacgatggagaatatatttcctcaatataatataatgcttcaagcaccagtacctgccattcactaatccttagaccatgtctatagatttattctgttctaatctgtttaaagtaaatcagtaaagtaaatagattcaaaccaatagacatttttcttggtaagttggatgctaatatgtgtgtttcctttattatatattgttgaacttctaactattttcataatatcatatttaacttttaggactctaatattttctagtataaacgagcccacatgtatctttctgccagcttcggcagttattaacattttgccaattttttcatctaagcagtccacttttaggggaagtattttaaagtacatcccaggcatcctatcatttcatccataacctttcagcctgcctttaacggatgatgactcattaaacacgaccacaatactgttataattcctaacaaaataacactaatttctgatatctggttggtattcagttgtttctaattcttttcattatagttgatttaaattagttaggatgtcttctaagactttttaaatttgtaacaattttccttgacctgtttttgaaatgttatttttttgttgaagaaactgaggcatttgttttgttgaatttcctaaattctgggtttttctggttatatcttatcctcatgatgtcattaacttgttcagatgtcttccaattttctataaactgctaattaggtccatggcgttgattagattcagaatcctttttttttgtttgggttttttttttggcaaaaacacttcataaacagcgcttggtacttcctgtggcatcatattgcatccagtatctattgttctctgttttaatggtgttaagattgttcagtggagcaatctgattctttaaggttgaaatatttataaattttccccattctcaggagcctcttaccatcttccaaaacttttaagatgacagaagattaatatgtaatccacaatgtgttcttctttaaagaaatgatccattattttccacttcttaagtcctttatccttttcttttggtttctctaaatttgatgtaatgtgtattgaattacaaaaaccaaagtgacacactagttaaataaagttctcttcagtaggattgttttacttaggatatctgcattttcagatgtttagggttttatccttttcctgacagacagactgtaaataaaaattttccctgaaacactcagaaactctcttcttattaactgtttgagtatttcactgttgtggatcatgtgctacattttggaggtatttgtttaaatacctaaagcagatattactctttttatactacaatcaatccagaagtaattcttttttttttttttcaagccctgggctgtcccagcccaagagtaattcttcaatatctattttgtctcagtatacatgtttattttacatgattactatatctgataaatctgtgcctctatttaagcttttgaaaatggagtatgtatacttagccagtttaaaggagtattaatgtctgtaaatatcacttaaaatacatactatggctggtccaaatgcagttgtgcttacaattaattgaacacaaccagttacagaattctttgttccttctctattcccactacatcacttgactagccttaaaaaaaaaatacatactagattaattttgatggcaggcttagcccctgggtctgtggacatttaagaaagctatggattgatggtattttatatgtttctaggtaacttcgttatccttcattgtaagtaggagtgaaagatatggtcagatatactattacagagtgtccaatgatccaaaagttattcatgttcaatttagagtagaattcagtacacataactaaattctaggaatttataccatttcagagcaataaagccacctaggaaaga

SEQ ID NO: 17765 - DNA, 4428 bp, Homo sapiens
  source 1..4428: mol_type = unassigned DNA
agcggatgctggggctgtaaggcgcgcgcggtcagctgttggcggtgcagggaggaggacgccggggctcgccttccctcctctgccgccgctgccgccatgattccggtgtcgctggtggtggtggtggtgggtggctggactgtcgtctacctgaccgacttggtgctgaagtcatctgtctattttaaacattcttatgaagactggctggaaaacaacggactgagcatctcccctttccacataagatggcaaactgctgttttcaatcgtgccttttacagttggggacggcggaaagcaaggatgctttaccaatggttcaattttggaatggtgtttggcgtaattgccatgtttagctcattttttctccttggaaaaacgctgatgcagactttggcacaaatgatggctgactctccctcttcttattcttcctcctcttcttcctcttcctcctcttcttcctcttcctcttcttcatcttcttcctcttcctcgcttcacaatgaacaggtgttacaagttgtggttcctggtataaatttacccgtcaatcaactgacctatttcttcacggcagttctcattagtggtgttgtacatgaaattggacatgggatagcagctattagggaacaagttcgatttaatggctttgggatttttctcttcattatttatcctggagcatttgttgatctgttcaccactcatttgcaacttatatcgccagtccagcagctaaggatattttgtgcaggtatctggcataattttgtccttgcactcttgggtattttagctcttgttctcctcccagtaattctcttgccattttactacactggagttggggtgctcatcactgaagttgctgaggactctcctgccattggacccagaggcctttttgtgggagaccttgtcacccatctacaggattgtcctgttactaatgtgcaagattggaatgaatgtttagataccatcgcctatgagccccaaattggttactgtataagtgcatcaactttacagcagttaagtttcccagttagagcatacaaacgactagatggttcaactgaatgctgtaacaatcacagcctcacagatgtgtgcttttcctacagaaataattttaataagcgtttgcatacatgtcttcctgcccggaaagcagttgaagcaactcaagtttgcagaaccaataaagactgtaaaaaaagctcaagttcaagtttctgtataataccttctttggaaactcacactcgcttaataaaagtaaaacacccacctcagattgatatgttatacgtaggacatcctctgcatcttcactacacagtgagcatcaccagttttatcccacgttttaactttctaagcatagatctgccagtggttgtggagacatttgtcaagtacctgatttccctctcaggagctctggctattgttaatgcagtaccctgctttgctttggatggacaatggattctaaactctttcttggatgccacccttacctcagtgattggagacaatgatgtcaaagatctaatagggtttttcatcttgctgggtggcagtgtacttttggctgccaatgtgaccctgggactctggatggttacagcacggtaatgtttgcactcatctgacagaatccctgagttacagtatacagctatgtggtaatattcattgccattgaaattcttacttggtatgaaatataaagtgtttccttaaaattacatcttagccaacaaccctgagctcctcccatatccagagtacccaaactctgtggtagaagataagcagaagaaatgaaaggcatagtccctgactatattctaatttaggactgaatgtacccagatgcttgtggaataatatctaagcaagtgcaaattcatgtaataccgttttgtctgattacatattgtgttgaaatagtataaaggagaacagaactgggtggaattaattgggaaaaacttcttacaaaagcatcattaatcaaaatttgaaggagaccagactttggccaagtggaaggatgaccattgtcttggcctgtatctcttgtcctttgtcttgtttgaaaagtattttaaaacttaatggtgtattattttgtgctctgaaagctgaggtctgattacaattagtaaaattctatagaagaatctgctgacgtgaaagggaaaaatctttgtcaaatgataccaaataaatgaacaaaacaggaagtagggcctatgatatcgtgagacatgttttgccccacaagagttgcatcttttataaggtgtctctgccccctcataaagcagcactagctttgacatccacggtgagctgcaggaagcatcacacaccagcagcatgtgagcagagggaggcagttggggttgaacttcggaactaggccgggtctcctgacagatcacaagacaccccagaggatcttcagcagtcctacttcccattctctatagagctttgaagcttggaacccttccagggtaaacattttctcttgtgctgctcaggacatctggggcctagctcctgggttcctgtctccaagaagcaatgaccttaaactctgagccatactctgtcctcaccagcggctcccatgtttttctgtgtcaggttattaagtacctagtccttgttttctgtctctctcctaagctacctctctgggtccacagaagacttggtagtatagtgagaatggctatacgtgagtacaaacgtggattttccagggcttgggaactgattcttgagcccagaagagccacgcctgctttgaggtcttttggagtggagatgcagccctgggaaatttggggagtcagcaggccagtgtgaagctattggtcctaggagtatatgagcttgctgtttctttgatggaaaatacatgcttctcttgtatactcagaagtgactaagggcaataactcattaatagccatctatccaacttctttactgagtgatgtattccatggggttacctttttcagattattgagttgctctgtaagcactaaaactttttaatcatttttaagaaactttttagattgtattacaaatttgccttaacagtaattagatgttgaatataattttaacattttattaatgacttgggtcatcagttaataccagtactaaaaccatacgaattattggtttattccagaaaatacagtatttgttctatttttaggtagacaatcatttgggatcagagtacattagcatagtaatgctcagtcagacctgttcaagtagtagagcttggagaatgccatgaaatacttatataattaatttgattgcatgaactaagcaattttactaatgaaaaggttgtatatgtgcaagtcacttttttaaaaaccaagaaaaaactttaatagaggaaatcttattcattaatttatttttctgagtaaaaaaacgaaacccaaatctcattttatttcaactgttaaacattttgatctgttgacccataggatcaggatttgggaaccactttactaggaaagagcagatcagtaccatttgtataaaaccggcctcattatgtaagaaagaaaatgttacgtgttttcttctttagcttggttgtgggcacttctacagcaaggaccatatcatattcatctttgcatccctggcacagtgcatgagacataagtacttaataaatgcagttgaatggataatgattagtgttatttatggattagaaaaagcatgtttctatttaagtaagctgtaaaaagtattattgaatatttactgtaaatatatgttcacataaaaaaataacttggagggtctttgtgtccctggcatattatcatcttcatggaaagaatccactgtggtttctgtagagtgattggaaaaatggattattttgaggattgaagaaagtgttctttctgcgttgtcactttgttcaacagtaaaactttattctcagtgttcctactctgcattgtttacatttttgacagttttttttaatcacctacaatctgtaaagaatgtatatattcttttcagcatctcagtttgaaaagacatgcagttaaacttgaccttttgataatcgctcttacaggtcattgtctgttctaacagcaaattgtaaacatgtgcttcatagatattgtggctctcagtcatcactttgtcctatggtatttattgaatgttcacatactaatggtgcacaggtgtttttttctataaatcttctgactgtcctgtaattcattcttaagctttaacttgaaggtatcgtaattgccggcatttgatgtttagcaataaaagaataaatgtgtaccagcattttatgtttat

SEQ ID NO: 17766 - DNA, 1676 bp, Homo sapiens
  source 1..1676: mol_type = unassigned DNA
gaacttgcccagagccctgcatgcatcagacctacagcagacattgcaggcctgaagaaaggtggtcacaagaggggtggaacattcctgcaaatggtttcaatatatgcagatgtctcaatataggaatgaaattacgtctttggaacaacttaaataagtcaaatatacttggagctttaaaaattaaaaggagagagattcgagcaccttttctgctgccatgacaaccatgcaaggaatggaacaggccatgccaggggctggccctggtgtgccccagctgggaaacatggctgtcatacattcacatctgtggaaaggattgcaagagaagttcttgaagggagaacccaaagtccttggggttgtgcagattctgactgccctgatgagccttagcatgggaataacaatgatgtgtatggcatctaatacttatggaagtaaccctatttccgtgtatatcgggtacacaatttgggggtcagtaatgtttattatttcaggatccttgtcaattgcagcaggaattagaactacaaaaggcctggtccgaggtagtctaggaatgaatatcaccagctctgtactggctgcatcagggatcttaatcaacacatttagcttggcgttttattcattccatcacccttactgtaactactatggcaactcaaataattgtcatgggactatgtccatcttaatgggtctggatggcatggtgctcctcctaagtgtgctggaattctgcattgctgtgtccctctctgcctttggatgtaaagtgctctgttgtacccctggtggggttgtgttaattctgccatcacattctcacatggcagaaacagcatctcccacaccacttaatgaggtttgaggccaccaaaagatcaacagacaaatgctccagaaatctatgctgactgtgacacaagagcctcacatgagaaattaccagtatccaacttcgatactgatagacttgttgatattattattatatgtaatccaattatgaactgtgtgtgtatagagagataataaattcaaaattatgttctcatttttttccctggaactcaataactcatttcactggctctttatcgagagtactagaagttaaattaataaataatgcatttaatgaggcaacagcacttgaaagtttttcattcatcataagaactttatataaaggcattacattggcaaataaggtttggaagcagaagagcaaaaaaaagatattgttaaaatgaggcctccatgcaaaacacatacttccctcccatttatttaactttttttttctcctacctatggggaccaaagtgctttttccttcaggaagtggagatgcatggccatctccccctccctttttccttctcctgcttttctttccccatagaaagtaccttgaagtagcacagcccgtccttgcatgtgcacgagctatcatttgagtaaaagtatacatggagtaaaaatcatattaagcatcagattcaacttatattttctatttcatcttcttcctttcccttctcccaccttctactgggcataattatatcttaatcatatatggaaatgtgcaacatatggtatttgttaaatacgtttgtttttattgcagagcaaaaataaatcaaattagaagc

SEQ ID NO: 17767 - DNA, 1284 bp, Homo sapiens
  source 1..1284: mol_type = unassigned DNA
tattagttggctcttttcatggttttactgaagttgctagaagtttacagaaaaggaagtgcaggaacatttcacaaatctacaatctttggcaacaccatcatgacatcacaacctgttcccaatgagaccatcatagtgctcccatcaaatgtcatcaacttctcccaagcagagaaacccgaacccaccaaccaggggcaggatagcctgaagaaacatctacacgcagaaatcaaagttattgggactatccagatcttgtgtggcatgatggtattgagcttggggatcattttggcatctgcttccttctctccaaattttacccaagtgacttctacactgttgaactctgcttacccattcataggaccctttttttttatcatctctggctctctatcaatcgccacagagaaaaggttaaccaagcttttggtgcatagcagcctggttggaagcattctgagtgctctgtctgccctggtgggtttcattatcctgtctgtcaaacaggccaccttaaatcctgcctcactgcagtgtgagttggacaaaaataatataccaacaagaagttatgtttcttacttttatcatgattcactttataccacggactgctatacagccaaagccagtctggctggaactctctctctgatgctgatttgcactctgctggaattctgcctagctgtgctcactgctgtgctgcggtggaaacaggcttactctgacttccctggggtgagtgtgctggccggcttcacttaaccttgcctagtgtatcttatccctgcactgtgttgagtatgtcaccaagagtggtagaaggaacaatcagtcagtcatgagatacacatgggagggcatttgcattgtgatggaagacagagaagaaaagcagatggcaattgagtagctgataagctgaaaattcactggatatgaaaatagttaatcatgagaaatcaactgattcaatcttcctattttgtcagcgaagggaatgagactctgggaagttaaatgactggcctggcattatgctatgagtttgtgcctttgctgaggacactagaacctggcttgcctcccttataagcagaaacaatttctgccacaaccactagtctctttaatagtattgacttggtaaagggcatttacacacgtaactggatccagtgaatgtcttatgctctgcatttgcccctggtgatcttaaaattcgtttgcctttttaaagctatattaaaaatgtattgttgaatcaaa

SEQ ID NO: 17768 - DNA, 2296 bp, Homo sapiens
  source 1..2296: mol_type = unassigned DNA
tctctggggagctccggcagcgcaagagggcaaagcacagctggaagctcagagctgcagtcccaggtcctgggccagggcccccatccagcatcaatgaaagcagaagccacagttattcccagccgttgtgctagggggctcccatcatggcaagtcctcagcccagtccagccctggcagacaagtgcaccccagaacacgacccagcccaagctcctggctccacaccagcacgagaagtcccagaagaagagcagccttcttaaggagctgggggccttccacatcaccatcgctctgctgcacctggtctttgggggctacctggcctctatagtcaagaaccttcacctggtggtgctgaagtcttggtatccattctggggggctgcctcttttctcatttcagggatcttggcgataacaatgaagaccttttctaaaacttacctgaagatgttgtgcctgatgacaaacctcatcagcctcttttgcgtgctgtctggcctcttcgtcatctccaaggatctctttctggagagcccatttgagtccccgatctggagaatgtaccccaactccacggtccacatccagaggctggagctggccttgctctgcttcactgtcctagagctcttcctgccagtgcccacagctgtcacagcctggagaggggactgcccatctgcaaagaatgatgatgcatgccttgttccgaatacaccattgcatctcaaaggcctgccggtggagcccccgccatcctaccagagtgtgattcaaggcgacgcacaacacaagcaacatcagaggctcagagaagttaagcaagttgccccggacacatggatagtcactgacggagctgcgatctggacccagactgcaaactgaagagccactgcctgacaatgcccaaacttggttggagcatagcccctgctctcccaaagttgcactttcactgggaagatgagatttgcacatacaaaaggctagagcgatggtctatacagcaaagtcagccctcacagctcctgggaacgctgtcctctcagataagccatttcttacatagttgatggctcgatatctgtggtggcccagattgttttgttttgtttcgctttgttttgttttcttttgttttgttgagatggagtctcgctctgttgcccagcccagagtacagtggcactatctcagctcactgcaatctccgcctccctggttcaagtgattctcctatctcagcctcccaagtagctgggactataggcacacgccaccacgcccagctaatttttatatttttagtagagacaggattgcaccatattggtcagcctggtctcaaactcctgacctcaggtgatccacctgcctcagcctcccaaagtgctgggattacaggcgtgagccactgtgcccagcccaggttttgaagttgtccgagatagcagtctgctctctactgccttataaaatccctgtgtgaagggatgctctcagtatcatttgcccttgcacagaatatccctggggtttgaggttctttgaattctccctctttgtcatctctttcgctgccacttctggctgtggtcactagcttggccatagcacctctcttctccacttctgatctgctgcttctaaccttctatagattgcagctggctttaaaatagattgtaaagtgtaaggcattaggttctgagacagcggcagagagagccatgcaaatgtttaggacaacccagtctttctttttttttttttttttttttttttttgagacggagtctcactctgtcacccaggctggagtgctgtggtgcaatctcggctcactgcaacctctgcctcccgagttcaagcaattctcctgcctcagcctcccgagtagctgggattacaggcgaccgccaccacgcctggctactttttgtatttttagtagagacagggtttcaccacgttagccatgatggtctcaaacttctgacctcataatccacccaccttggcctcccaaagtgctaggattacaggcatgagccaccacccctggctgaaacccaatctttcaaaacatgaaagggggtgatggagaaaaccttagcttggttgtctaaagacatgggtgcaaactctaggctagctctgccaatcacttactgtgcgggtttgactcagtcccttcccctcactaggtcccagtttctccatttgtaaaacaagcaattgtgctacattgatggtttacatcaataaaggttgaaacggc

SEQ ID NO: 17769 - DNA, 1167 bp, Homo sapiens
  source 1..1167: mol_type = unassigned DNA
acacaggttggagcagagaaagaggaaacatagaggtgccaaaggaacaaagacataatgatgtcatccaagccaacaagccatgctgaagtaaatgaaaccatacccaacccttacccaccaagcagctttatggctcctggatttcaacagcctctgggttcaatcaacttagaaaaccaagctcagggtgctcagcgtgctcagccctacggcatcacatctccgggaatctttgctagcagtcaaccgggtcaaggaaatatacaaatgataaatccaagtgtgggaacagcagtaatgaactttaaagaagaagcaaaggcactaggggtgatccagatcatggttggattgatgcacattggttttggaattgttttgtgtttaatatccttctcttttagagaagtattaggttttgcctctactgctgttattggtggatacccattctggggtggcctttcttttattatctctggctctctctctgtgtcagcatccaaggagctttcccgttgtctggtgaaaggcagcctgggaatgaacattgttagttctatcttggccttcattggagtgattctgctgctggtggatatgtgcatcaatggggtagctggccaagactactgggccgtgctttctggaaaaggcatttcagccacgctgatgatcttctccctcttggagttcttcgtagcttgtgccacagcccattttgccaaccaagcaaacaccacaaccaatatgtctgtcctggttattccaaatatgtatgaaagcaaccctgtgacaccagcgtcttcttcagctcctcccagatgcaacaactactcagctaatgcccctaaatagtaaaagaaaaaggggtatcagtctaatctcatggagaaaaactacttgcaaaaacttcttaagaagatgtcttttattgtctacaatgatttctagtctttaaaaactgtgtttgagatttgtttttaggttggtcgctaatgatggctgtatctcccttcactgtctcttcctacattaccactactacatgctggcaaaggtgaaggatcagaggactgaaaaatgattctgcaactctcttaaagttagaaatgtttctgttcatattactttttccttaataaaatgtcattagaaacaaaa

SEQ ID NO: 17770 - DNA, 582 bp, Homo sapiens
  source 1..582: mol_type = unassigned DNA
aggaaacatagaggtgccaaaggaacaaagtaagtccattgatacgttcttgcctatctctcctccaaatcaatgggcacaaactgtggctggtctacctgtgtgggttctgttctctagattggagggatgaagacaagttcttgactctatgttgaggccagttgaaaaatgagggagaataaaaccatgaacgaaacaagaaagaaacaaaacagaagaggaatgaaaaagacataatgatgtcatccaagccaacaagccatgctgaagtaaatgaaaccatacccaacccttacccaccaagcagctttatggctcctggatttcaacagcctctgggttcaatcaacttagaaaaccaagctcagggtgctcagcgtgctcagccctacggcatcacatctccgggaatctttgctagcagtcaaccgggtcaaggaaatatacaaatgataaatccaagtgtgggaacagcagtaatgaactttaaagaagaagcaaaggcactaggggtgatccagatcatggttggattgatgcacattggttttggaattgttttgtgtttaatatccttct

SEQ ID NO: 17771 - DNA, 1019 bp, Homo sapiens
  source 1..1019: mol_type = unassigned DNA
acacaggttggagcagagaaagaggaaacatagaggtgccaaaggaacaaagacataatgatgtcatccaagccaacaagccatgctgaagtaaatgaaaccatacccaacccttacccaccaagcagctttatggctcctggatttcaacagcctctgggttcaatcaacttagaaaaccaagctcagggtgctcagcgtgctcagccctacggcatcacatctccgggaatctttgctagcagtcaaccgggtcaaggaaatatacaaatgataaatccaagtgtgggaacagcagtaatgaactttaaagaagaagcaaaggcactagggtttattatctctggctctctctctgtgtcagcatccaaggagctttcccgttgtctggtgaaaggcagcctgggaatgaacattgttagttctatcttggccttcattggagtgattctgctgctggtggatatgtgcatcaatggggtagctggccaagactactgggccgtgctttctggaaaaggcatttcagccacgctgatgatcttctccctcttggagttcttcgtagcttgtgccacagcccattttgccaaccaagcaaacaccacaaccaatatgtctgtcctggttattccaaatatgtatgaaagcaaccctgtgacaccagcgtcttcttcagctcctcccagatgcaacaactactcagctaatgcccctaaatagtaaaagaaaaaggggtatcagtctaatctcatggagaaaaactacttgcaaaaacttcttaagaagatgtcttttattgtctacaatgatttctagtctttaaaaactgtgtttgagatttgtttttaggttggtcgctaatgatggctgtatctcccttcactgtctcttcctacattaccactactacatgctggcaaaggtgaaggatcagaggactgaaaaatgattctgcaactctcttaaagttagaaatgtttctgttcatattactttttccttaataaaatgtcatt

SEQ ID NO: 17772 - DNA, 969 bp, Homo sapiens
  source 1..969: mol_type = unassigned DNA
atgaccgaacaggtgattggagccaacagtgtacctggcattattgccccagataatgttcacgtcatccagcccagcaaccctgtggcctctggaaatcatctgcagccttcagaggtgaccacttacccaatctcaccaaaagtaatccactgtgatacaggaagagcaaacttacagaatctactcgtggtgaaccagaactcagcagcaggtgtacagagtcaacccattgggtatcagcgacagtatccagtgggaacagccagtttgcagacggtgcctggagtgatccaatacacacagggaaccacgaatctccagacatggcctggagaccttcagaatcctctgaatgctaaccctgggctgacacacacctcaaactcatcccagtggaacacgtcatttgcatcatttacttcatttaatcccaagaaattcataaatgaggaggtcagaacattaggggccatccagatcctcatcggcctgacgcacattttctctgcaattaaccctgtgctgtattactatccttttgtgacctggttgtcagggtacccgctctggggaggattatcctatattgtatctggatccctctcagtatgggctgcaaaggaccccagtccttgtgtggtgaacagcagcatcagcttcaacatcatcagcgcactcttcgcctttgccgggatcttcattatcattacagatctgagcctttactatgtgacgacatattcaaaggcggtttctggcggtcttctcccctttgccctcctggagttcatcctcacttgtgtggtctcacattttgggtgccaggctacctgctgcagacaatttgagaatgtggcagtgattccaaccgtattcagtttcaacccagccaataccaccaccagccctgtcaatgctaccactggtcctgtcaatgctgccactggccctgtcagtgccaccaat

SEQ ID NO: 17773 - DNA, 1152 bp, Homo sapiens
  source 1..1152: mol_type = unassigned DNA
aacccatttcaactgcctattcagagcatgcagtaagaggaaatccaccaagtctcaatataataatattctttattcctggacagctcggttaatgaaaaaatggacacagaaagtaataggagagcaaatcttgctctcccacaggagccttccagtgtgcctgcatttgaagtcttggaaatatctccccaggaagtatcttcaggcagactattgaagtcggcctcatccccaccactgcatacatggctgacagttttgaaaaaagagcaggagttcctgggggtaacacaaattctgactgctatgatatgcctttgttttggaacagttgtctgctctgtacttgatatttcacacattgagggagacattttttcatcatttaaagcaggttatccattctggggagccatatttttttctatttctggaatgttgtcaattatatctgaaaggagaaatgcaacatatctggtgagaggaagcctgggagcaaacactgccagcagcatagctgggggaacgggaattaccatcctgatcatcaacctgaagaagagcttggcctatatccacatccacagttgccagaaattttttgagaccaagtgctttatggcttccttttccactgaaattgtagtgatgatgctgtttctcaccattctgggacttggtagtgctgtgtcactcacaatctgtggagctggggaagaactcaaaggaaacaaggttccagaggatcgtgtttatgaagaattaaacatatattcagctacttacagtgagttggaagacccaggggaaatgtctcctcccattgatttataagaatcacgtgtccagaacactctgattcacagccaaggatccagaaggccaaggtcttgttaaggggctactggaaaaatttctattctctccacagcctgctggttttacattagatttattcgcctgataagaatattttgtttctgctgcttctgtccaccttaatattctccttctatttgtagatatgatagactcctatttttcttgttttatattatgaccacacacatctctgctggaaagtcaacatgtagtaagcaagatttaactgtttgattataactgtgcaaatacagaaaaaaagaaggc

SEQ ID NO: 17774 - DNA, 541 bp, Homo sapiens
  source 1..541: mol_type = unassigned DNA
ttcagttttgggtctatgtgtgaaaccaagcatgccttaaacaaggaagacaagcttttcaaaggtgcaattggataacttctgccatagaaatggctgaattgggacacaagtggggacaattccagaagaagggcacatctctttcttttctgcagttctttctcaccttctcaactcctactaaaatgtctcattttcaggttctgtaaatcctgctagtctcaggcaaaattatgctccaggagtctcaaattttcttatttcatattagtctttatttagtagacttcttaatttttctattcatcacaagtaaaagcctgttgatcttaatcagccaagaaacttatctgtctggcaaatgacttatgtataaagagaatcatcaatgtcatgagctcggttaatgaaaaaatggacacagaaagtaataggagagcaaatcttgctctcccacaggagccttccagtgtgcctgcatttgaagtcttggaaatatctccccaggaagtatcttcaggcagactattgaagtcgg

SEQ ID NO: 17775 - DNA, 1613 bp, Homo sapiens
  source 1..1613: mol_type = unassigned DNA
acttgcgacaaggtggacttgggaggaaagccgtctgccaaagcctgaagcctccaagccataaacaaccccaatggcctcccacgaagttgataatgcagagctggggtcagcctctgcccatggtaccccaggcagtgaggcgggaccagaagagctgaatacttctgtctaccagcccatagatggatcaccagattatcagaaagcaaaattacaagttcttggggccatccagatcctgaatgcagcaatgattctggctttgggtgtctttctgggttccttgcaatacccataccacttccaaaagcacttctttttcttcaccttctacacaggctacccgatttggggtgctgtgtttttctgtagttcaggaaccttgtctgttgtagcagggataaaacccacaagaacatggatacagaacagttttggaatgaacattgccagtgctacaattgcactagtggggactgcttttctctcactaaatatagcagttaatatccagtcattaaggagttgtcactcttcatcagagtcaccggacctatgcaattacatgggctccatatcaaatggcatggtgtctctactgctgattctcaccttgctggaattatgcgtaaccatctctaccatagccatgtggtgcaatgcaaactgctgtaattcaagagaggaaatttcctcacctcccaattctgtgtaatcaagaatacctccttaattctgagagcatgaatatttgaccttaaatctccagtgactcagagcttcacccacaaactcaggagaacataagcctgctcgtaaagctcaatccttctatcatggcaccaatcacaagaaccttggacgtttgactgactctatcctttctctcctaactataaatcctatttgtgtgtcgtgggtatggaaggacagatatatttctttaggcattcttggatatctgtaacttctatgatcattactccaaagttgtttccagaaattggttctatttcttcttatccacctactccattgctttatgaggtttaaggaaggaaggcggtataatccctattcaatatattttttctaaaatccaacttctgaccgcccagtaggaagaaaaatgagacattttttccattacagagaaatgcttcttgactttaacatcagcattataaaaagtgtcaaataaaaaattaccatcattatcattaaaataaattttcactgtatttgagatgggagggttaaggctcagggattttatttcagtgaactgctggaactcacacatgccctgatatgtaaatgatgatttatgttggcgagtctgagagcaagcccaaatgtgttcttcaaaggacaatgggaaactgtaaagtagagaactaaagaataaggcctttagaatctgacacatctgggttcaaattctgaaactgtcacttattacctgtatgaacatgggcaaattatctaatctctctgatctatttttcctcatctgtaaaataggtgtaataataacaactactttgtcggttgctctgagggttaaatgaaaataaaaagaaaatgtgaaacagcaccacaggtacttg

SEQ ID NO: 17776 - DNA, 1516 bp, Homo sapiens
  source 1..1516: mol_type = unassigned DNA
ggaggcttccgttatcgggaaaagatgctgtagtgatcttttctgagtgtctcctacttgcgacaaggtggacttgggaggaaagccgtctgccaaagcctgaagcctccaagccataaacaaccccaatggcctcccacgaagttgataatgcagagctggggtcagcctctgcccatggtaccccaggcagtgaggcgggaccagaagagctgaatacttctgtctaccagcccatagatggatcaccagattatcagaaagcaaaattacaagttcttgggttctgtagttcaggaaccttgtctgttgtagcagggataaaacccacaagaacatggatacagaacagttttggaatgaacattgccagtgctacaattgcactagtggggactgcttttctctcactaaatatagcagttaatatccagtcattaaggagttgtcactcttcatcagagtcaccggacctatgcaattacatgggctccatatcaaatggcatggtgtctctactgctgattctcaccttgctggaattatgcgtaaccatctctaccatagccatgtggtgcaatgcaaactgctgtaattcaagagaggaaatttcctcacctcccaattctgtgtaatcaagaatacctccttaattctgagagcatgaatatttgaccttaaatctccagtgactcagagcttcacccacaaactcaggagaacataagcctgctcgtaaagctcaatccttctatcatggcaccaatcacaagaaccttggacgtttgactgactctatcctttctctcctaactataaatcctatttgtgtgtcgtgggtatggaaggacagatatatttctttaggcattcttggatatctgtaacttctatgatcattactccaaagttgtttccagaaattggttctatttcttcttatccacctactccattgctttatgaggtttaaggaaggaaggcggtataatccctattcaatatattttttctaaaatccaacttctgaccgcccagtaggaagaaaaatgagacattttttccattacagagaaatgcttcttgactttaacatcagcattataaaaagtgtcaaataaaaaattaccatcattatcattaaaataaattttcactgtatttgagatgggagggttaaggctcagggattttatttcagtgaactgctggaactcacacatgccctgatatgtaaatgatgatttatgttggcgagtctgagagcaagcccaaatgtgttcttcaaaggacaatgggaaactgtaaagtagagaactaaagaataaggcctttagaatctgacacatctgggttcaaattctgaaactgtcacttattacctgtatgaacatgggcaaattatctaatctctctgatctatttttcctcatctgtaaaataggtgtaataataacaactactttgtcggttgctctgagggttaaatgaaaataaaaagaaaatgtgaaacagc

SEQ ID NO: 17777 - DNA, 867 bp, Homo sapiens
  source 1..867: mol_type = unassigned DNA
ctctaaagtgttgcataaggcaaagataacgttaagtctgtggaggcttccgttatcgggaaaagatgctgtagtgatcttttctgagtgtctcctacttgcgacaaggtggacttgggaggaaagccgtctgccaaagcctgaagcctccaagttctgtagttcaggaaccttgtctgttgtagcagggataaaacccacaagaacatggatacagaacagttttggaatgaacattgccagtgctacaattgcactagtggggactgcttttctctcactaaatatagcagttaatatccagtcattaaggagttgtcactcttcatcagagtcaccggacctatgcaattacatgggctccatatcaaatggcatggtgtctctactgctgattctcaccttgctggaattatgcgtaaccatctctaccatagccatgtggtgcaatgcaaactgctgtaattcaagagaggaaatttcctcacctcccaattctgtgtaatcaagaatacctccttaattctgagagcatgaatatttgaccttaaatctccagtgactcagagcttcacccacaaactcaggagaacataagcctgctcgtaaagctcaatccttctatcatggcaccaatcacaagaaccttggacgtttgactgactctatcctttctctcctaactataaatcctatttgtgtgtcgtgggtatggaaggacagatatatttctttaggcattcttggatatctgtaacttctatgatcattactccaaagttgtttccagaaattggttctatttcttcttatccacctactccattgctttatgaggtttaaggaaggaaggcggtataatcccta

SEQ ID NO: 17778 - DNA, 507 bp, Homo sapiens
  source 1..507: mol_type = unassigned DNA
atggcctcccacgaagttgataatgcagagctggggtcagcctctgcccatggtaccccaggcagtgaggcgggaccagaagagctgaatacttctgtctaccagcccatagatggatcaccagattatcagaaagcaaaattacaagttcttgggttctgtagttcaggaaccttgtctgttgtagcagggataaaacccacaagaacatggatacagaacagttttggaatgaacattgccagtgctacaattgcactagtggggactgcttttctctcactaaatatagcagttaatatccagtcattaaggagttgtcactcttcatcagagtcaccggacctatgcaattacatgggctccatatcaaatggcatggtgtctctactgctgattctcaccttgctggaattatgcgtaaccatctctaccatagccatgtggtgcaatgcaaactgctgtaattcaagagaggaaatttcctcacctcccaattctgtgtaa

SEQ ID NO: 17779 - DNA, 1604 bp, Homo sapiens
  source 1..1604: mol_type = unassigned DNA
aatgcagatttaaactgagtgaggtgtggagtgggggaagttgattgggtctagaccaaagaactttgaggaacttgcccagagccctgcatgcatcagacctacagcagacattgcaggcctgaagaaagcaccttttctgctgccatgacaaccatgcaaggaatggaacaggccatgccaggggctggccctggtgtgccccagctgggaaacatggctgtcatacattcacatctgtggaaaggattgcaagagaagttcttgaagggagaacccaaagtccttggggttgtgcagattctgactgccctgatgagccttagcatgggaataacaatgatgtgtatggcatctaatacttatggaagtaaccctatttccgtgtatatcgggtacacaatttgggggtcagtaatgtttattatttcaggatccttgtcaattgcagcaggaattagaactacaaaaggcctggtccgaggtagtctaggaatgaatatcaccagctctgtactggctgcatcagggatcttaatcaacacatttagcttggcgttttattcattccatcacccttactgtaactactatggcaactcaaataattgtcatgggactatgtccatcttaatgggtctggatggcatggtgctcctcctaagtgtgctggaattctgcattgctgtgtccctctctgcctttggatgtaaagtgctctgttgtacccctggtggggttgtgttaattctgccatcacattctcacatggcagaaacagcatctcccacaccacttaatgaggtttgaggccaccaaaagatcaacagacaaatgctccagaaatctatgctgactgtgacacaagagcctcacatgagaaattaccagtatccaacttcgatactgatagacttgttgatattattattatatgtaatccaattatgaactgtgtgtgtatagagagataataaattcaaaattatgttctcatttttttccctggaactcaataactcatttcactggctctttatcgagagtactagaagttaaattaataaataatgcatttaatgaggcaacagcacttgaaagtttttcattcatcataagaactttatataaaggcattacattggcaaataaggtttggaagcagaagagcaaaaaaaagatattgttaaaatgaggcctccatgcaaaacacatacttccctcccatttatttaactttttttttctcctacctatggggaccaaagtgctttttccttcaggaagtggagatgcatggccatctccccctccctttttccttctcctgcttttctttccccatagaaagtaccttgaagtagcacagcccgtccttgcatgtgcacgagctatcatttgagtaaaagtatacatggagtaaaaatcatattaagcatcagattcaacttatattttctatttcatcttcttcctttcccttctcccaccttctactgggcataattatatcttaatcatatatggaaatgtgcaacatatggtatttgttaaatacgtttgtttttattgcagagcaaaaataaatcaaattagaagcaata

SEQ ID NO: 17780 - DNA, 1676 bp, Homo sapiens; identical to SEQ ID NO: 17766
  source 1..1676: mol_type = unassigned DNA

SEQ ID NO: 17781 - DNA, 1596 bp, Homo sapiens
  source 1..1596: mol_type = unassigned DNA
aacattcctgcaaatggtttcaatatatgcagatgtctcaatataggaatgaaattacgtctttggaacaacttaaataagtcaaatatacttggagctttaaaaattaaaaggagagagattcgagcaccttttctgctgccatgacaaccatgcaaggaatggaacaggccatgccaggggctggccctggtgtgccccagctgggaaacatggctgtcatacattcacatctgtggaaaggattgcaagagaagttcttgaagggagaacccaaagtccttggggttgtgcagattctgactgccctgatgagccttagcatgggaataacaatgatgtgtatggcatctaatacttatggaagtaaccctatttccgtgtatatcgggtacacaatttgggggtcagtaatgtttattatttcaggatccttgtcaattgcagcaggaattagaactacaaaaggcctggtccgaggtagtctaggaatgaatatcaccagctctgtactggctgcatcagggatcttaatcaacacatttagcttggcgttttattcattccatcacccttactgtaactactatggcaactcaaataattgtcatgggactatgtccatcttaatgggtctggatggcatggtgctcctcctaagtgtgctggaattctgcattgctgtgtccctctctgcctttggatgtaaagtgctctgttgtacccctggtggggttgtgttaattctgccatcacattctcacatggcagaaacagcatctcccacaccacttaatgaggtttgaggccaccaaaagatcaacagacaaatgctccagaaatctatgctgactgtgacacaagagcctcacatgagaaattaccagtatccaacttcgatactgatagacttgttgatattattattatatgtaatccaattatgaactgtgtgtgtatagagagataataaattcaaaattatgttctcatttttttccctggaactcaataactcatttcactggctctttatcgagagtactagaagttaaattaataaataatgcatttaatgaggcaacagcacttgaaagtttttcattcatcataagaactttatataaaggcattacattggcaaataaggtttggaagcagaagagcaaaaaaaagatattgttaaaatgaggcctccatgcaaaacacatacttccctcccatttatttaactttttttttctcctacctatggggaccaaagtgctttttccttcaggaagtggagatgcatggccatctccccctccctttttccttctcctgcttttctttccccatagaaagtaccttgaagtagcacagcccgtccttgcatgtgcacgagctatcatttgagtaaaagtatacatggagtaaaaatcatattaagcatcagattcaacttatattttctatttcatcttcttcctttcccttctcccaccttctactgggcataattatatcttaatcatatatggaaatgtgcaacatatggtatttgttaaatacgtttgtttttattgcagagcaaaaataaatcaaattagaagc

SEQ ID NO: 17782 - DNA, 698 bp, Homo sapiens
  source 1..698: mol_type = unassigned DNA
attctcagcacagcctttaaggttccaaacatctgctagaagaggaatgcagatttaaactgagtgaggtgtggagtgggggaagttgattgggtctagaccaaagaactttgaggaacttgcccagagccctgcatgcatcagacctacagcagacattgcaggcctgaagaaagcaccttttctgctgccatgacaaccatgcaaggaatggaacaggccatgccaggggctggccctggtgtgccccagctgggaaacatggctgtcatacattcacatctgtggaaaggattgcaagagaagttcttgaagggagaacccaaagtccttggggttgtgcagattctgactgccctgatgagccttagcatgggaataacaatgatgtgtatggcatctaatacttatggaagtaaccctatttccgtgtatatcgggtacacaatttgggggtcagtaatgtttattatttcaggatccttgtcaattgcagcaggaattagaactacaaaaggcctgggtctggatggcatggtgctcctcctaagtgtgctggaattctgcattgctgtgtccctctctgcctttggatgtaaagtgctctgttgtacccctggtggggttgtgttaattctgccatcacattctcacatggcagaaacagcatctcccacaccacttaatgaggtttgagg

SEQ ID NO: 17783 - DNA, 479 bp, Homo sapiens
  source 1..479: mol_type = unassigned DNA
atgacaaccatgcaaggaatggaacagaccactccaggggctggccctgatgtgccccagctgggaaacatagatgtcatacattcatatctgtgtaaaggattgcaagagaagttcttcaagaggaaacccaaagtccttggggttgtgcggattctgattgccttgatgagccttagcatgggaataataatgatgtgtgttgcatttagttcttatgaagaacatcccatttttgtgtatgttgcgtacacaatttgggggtcagtgatgtatccttatcagttgcagcaggaattagaacaacaaaaggtctggaattatctgaagaatttaagctggagaataatgggatcatatttgtgttttggcgagagatcagagttgaaaccactataaggagacaagttagaagactattgaaataagataaaggttggaggtagtctaggaaagaatatcaccagttcagtcttggc

SEQ ID NO: 17784 - DNA, 384 bp, Homo sapiens
  source 1..384: mol_type = unassigned DNA
atgacaaccatgcaaggaatggaacagaccactccaggggctggccctgatgtgccccagctgggaaacatagatgtcatacattcatatctgtgtaaaggattgcaagagaagttcttcaagaggaaacccaaagtccttggggttttgtgtggacataagttttcaactcattcggtatccttatcagttgcagcaggaattagaacaacaaaaggtctggaattatctgaagaatttaagctggagaataatgggatcatatttgtgttttggcgagagatcagagttgaaaccactataaggagacaagttagaagactattgaaataagataaaggttggaggtagtctaggaaagaatatcaccagttcagtcttggc

SEQ ID NO: 17785 - DNA, 1125 bp, Homo sapiens
  source 1..1125: mol_type = unassigned DNA
agtgcagatttaaactgagtgaggtgtggagtgggggaagctgactgtgtctggaacaaagaactttgaggaacttgcccagagccctgcactcatcagacctgcagcagacattgcaggcctgaagaaagcaccttttctgctgccatgacaaccatgcaaggaatggaacagaccactccaggggctggccctgatgtgccccagctgggaaacatagatgtcatacattcatatctgtgtaaaggattgcaagagaagttcttcaagaggaaacccaaagtccttggggttttgtgtggacataagttttcaactcattcgggttgtgcggattctgattgccttgatgagccttagcatgggaataataatgatgtgtgttgcatttagttcttatgaagaacatcccatttttgtgtatgttgcgtacacaatttgggggtcagtgatgtatccttatcagttgcagcaggaattagaacaacaaaaggtctgtatttatcgagtgctcaatggtgcccaggctggagtgcagtggcgtgatctcggctccctacaacctccacctcccagccgcctgccttggcctcccaaagtgccgagagtgcagcctctgcccggccgccaccccgtctgggaagtgaggagcgtctctgcctggccgcctatcgtctgggacgtgaggagcccctctgcctggctgcccagtctggaaagtgaggagcgtctctgcccggctgccatcccatctaggaagtggggagcgcctcttcccggccaccatcccatctgggaggtgaggagtgtctccgcccggccgcccatcttctgagatgtggggagcgcctttgccccaccgccctgtctgggatgtgaggagcacctctgcccggccgcgaccccgtctgggaggtgaggagcgtctctgcccagccgccccatctgagaagggaggagaccctccgcctggcaaccgccccgtctgagaagtgaggagcccctccgcccggcagccaccccgtctgggaagtgaggagcgtctccgccaggcagccaccccgtccgggagggaggtgggggtcagcccccgccaggccagctgccccatccgggagggaggtg

SEQ ID NO: 17786 - DNA, 555 bp, Homo sapiens
  source 1..555: mol_type = unassigned DNA
atgacaaccatgcaaggaatggaacagaccactccaggggctggccctgatgtgccccagctgggaaacatagatgtcatacattcatatctgtgtaaaggattgcaagagaagttcttcaagaggaaacccaaagtccttggggttgtgcggattctgattgccttgatgagccttagcatgggaataataatgatgtgtgttgcatttagttcttatgaagaacatcccatttttgtgtatgttgcgtacacaatttgggggtcagtgatgtatccttatcagttgcagcaggaattagaacaacaaaaggtctggaattatctgaagaatttaagctggagaataatgggatcatatttgtgttttggcgagagatcagagttgaaaccactataaggagacaagttagaagactattgaaataagataaaggtagacagcagtgtaaagtaattaacagagatatatctgaggatgatgttggattgcttaattaattttcatttctttctaggttggaggtagtctaggaaagaatatcaccagttcagt

SEQ ID NO: 17787 - DNA, 722 bp, Homo sapiens
  source 1..722: mol_type = unassigned DNA
caggcagcctcagcacaagaaaagaacatggtctagactgaagtaccaactaaatcatctcctttcaaattatcaccgacaccatcatggattcaagcaccgcacacagtccggtgtttctggtatttcctccagaaatcactgcttcagaatatgagtccacagaactttcagccacgaccttttcaactcaaagccccttgcaaaaattatttgctagaaaaatgaaaatcttagggactatccagatcctgtttggaattatgaccttttcttttggagttatcttccttttcaccttgttaaaaccatatccaaggtttccctttatatttctttcaggatatccattctggggctctgttttgttcattaattctggagccttcctaattgcagtgaaaagaaaaaccacagaaactctgataatattgagccgaataatgaattttcttagtgccctgggagcaatagctggaatcattctcctcacatttggtttcatcctagatcaaaactacatttgtggttattctcaccaaaatagtcagtgtaaggctgttactgtcctgttcttgggaattttgattacattgatgactttcagcattattgaattattcatttctctgcctttctcaattttggggtgccactcagaggattgtgattgtgaacaatgttgttgactagcactgtgagaataaagatgtgttaaaata

SEQ ID NO: 17788 - DNA, 1535 bp, Homo sapiens
  source 1..1535: mol_type = unassigned DNA
ttttactgaagttgctagaagtttacagaaaaggaagtgcaggaacatttcacaaatctacaatctgtgagtatcacatcctgtatagctgtaaacactggaataaggaagggctgatgactttcagaagatgaaggtaagtagaaaccgttgatgggactgagaaaccagagttaaaacctctttggagcttctgaggactcagctggaaccaacgggcacagttggcaacaccatcatgacatcacaacctgttcccaatgagaccatcatagtgctcccatcaaatgtcatcaacttctcccaagcagagaaacccgaacccaccaaccaggggcaggatagcctgaagaaacatctacacgcagaaatcaaagttattgggactatccagatcttgtgtggcatgatggtattgagcttggggatcattttggcatctgcttccttctctccaaattttacccaagtgacttctacactgttgaactctgcttacccattcataggaccctttttttttatcatctctggctctctatcaatcgccacagagaaaaggttaaccaagcttttggtgcatagcagcctggttggaagcattctgagtgctctgtctgccctggtgggtttcattatcctgtctgtcaaacaggccaccttaaatcctgcctcactgcagtgtgagttggacaaaaataatataccaacaagaagttatgtttcttacttttatcatgattcactttataccacggactgctatacagccaaagccagtctggctggaactctctctctgatgctgatttgcactctgctggaattctgcctagctgtgctcactgctgtgctgcggtggaaacaggcttactctgacttccctgggagtgtacttttcctgcctcacagttacattggtaattctggcatgtcctcaaaaatgactcatgactgtggatatgaagaactattgacttcttaagaaaaaagggagaaatattaatcagaaagttgattcttatgataatatggaaaagttaaccattatagaaaagcaaagcttgagtttcctaaatgtaagcttttaaagtaatgaacattaaaaaaaaccattatttcactgtcatttaagatatgtgttcattggggatctcttgatttgcctgacattgacttcagcaaaagcacggggctgtaaattaccatttactagattagccaaatagtctgaatttccagaaaacaaggcagaatgatcattcccagaaacatttcccagaaaatgtttcccagaaaactagacagaatgatcattcaatggatcacagtgaagcaaaggacacaactttttattgtaccccttaattgtcaacaggagttaactgatttgttgtggtgctcagacttttttatacaggtgctagtgttttatcctatgtattttaactcattagtgcataaaggcaagccccatataatgaagtctcagggtatatgaaagtagctggcttcaaaataaaatttttgagtgc

SEQ ID NO: 17789 - DNA, 863 bp, Homo sapiens
  source 1..863: mol_type = unassigned DNA
gagaaaccagagttaaaacctctttggagcttctgaggactcagctggaaccaacgggcacagttggcaacaccatcatgacatcacaacctgttcccaatgagaccatcatagtgctcccatcaaatgtcatcaacttctcccaagcagagaaacccgaacccaccaaccaggggcaggatagcctgaagaaacatctacacgcagaaatcaaagttattgggactatccagatcttgtgtggcatgatggtattgagcttggggatcattttggcatctgcttccttctctccaaattttacccaagtgacttctacactgttgaactctgcttacccattcataggaccctttttttttatcatctctggctctctatcaatcgccacagagaaaaggttaaccaagcttttggtgcatagcagcctggttggaagcattctgagtgctctgtctgccctggtgggtttcattatcctgtctgtcaaacaggccaccttaaatcctgcctcactgcagtggaactctctctctgatgctgatttgcactctgctggaattctgcctagctgtgctcactgctgtgctgcggtggaaacaggcttactctgacttccctgggagtgtacttttcctgcctcacagttacattggtaattctggcatgtcctcaaaaatgactcatgactgtggatatgaagaactattgacttcttaagaaaaaagggagaaatattaatcagaaagttgattcttatgataatatggaaaagttaaccattatagaaaagcaaagcttgagtttcctaaatgtaagcttttaaagtaatgaacattaaaaaaaaccattatttcactgtc

SEQ ID NO: 17790 - DNA, 1536 bp, Homo sapiens
  source 1..1536: mol_type = unassigned DNA
aaaacctctttggagcttctgaggactcagctggaaccaacgggcacagttggcaacaccatcatgacatcacaacctgttcccaatgagaccatcatagtgctcccatcaaatgtcatcaacttctcccaagcagagaaacccgaacccaccaaccaggggcaggatagcctgaagaaacatctacacgcagaaatcaaagttattgggtttatcatctctggctctctatcaatcgccacagagaaaaggttaaccaagcttttggtgcatagcagcctggttggaagcattctgagtgctctgtctgccctggtgggtttcattatcctgtctgtcaaacaggccaccttaaatcctgcctcactgcagtgtgagttggacaaaaataatataccaacaagaagttatgtttcttacttttatcatgattcactttataccacggactgctatacagccaaagccagtctggctggaactctctctctgatgctgatttgcactctgctggaattctgcctagctgtgctcactgctgtgctgcggtggaaacaggcttactctgacttccctggggtgagtgtgctggccggcttcacttaaccttgcctagtgtatcttatccctgcactgtgttgagtatgtcaccaagagtggtagaaggaacaatcagtcagtcatgagatacacatgggagggcatttgcattgtgatggaagacagagaagaaaagcagatggcaattgagtagctgataagctgaaaattcactggatatgaaaatagttaatcatgagaaatcaactgattcaatcttcctattttgtcagcgaagggaatgagactctgggaagttaaatgactggcctggcattatgctatgagtttgtgcctttgctgaggacactagaacctggcttgcctcccttataagcagaaacaatttctgccacaaccactagtctctttaatagtattgacttggtaaagggcatttacacacgtaactggatccagtgaatgtcttatgctctgcatttgcccctggtgatcttaaaattcgtttgcctttttaaagctatattaaaaatgtattgttgaatcaaacccctatggacttatggctttatttaactgaattaaaaagccttgatttatccaaaattgtattatagagtgtagaatgaatactagggtgataaattgcaattatttgaagaacctggtgatatgctctacttatcttggattagctaagaattctatgtatacagttggaaaaatggcatatatacatctatcttgaacctgattgaagtctgaagacctaacatattttgtttcttctagagtgtacttttcctgcctcacagttacattggtaattctggcatgtcctcaaaaatgactcatgactgtggatatgaagaactattgacttcttaagaaaaaagggagaaatattaatcagaaagttgattcttatgataatatggaaaagttaaccattatagaaaagcaaagcttgagttt

SEQ ID NO: 17791 - DNA, 1806 bp, Homo sapiens
  source 1..1806: mol_type = unassigned DNA
ctggaataaggaagggctgatgactttcagaagatgaaggtaagtagaaaccgttgatgggactgagaaaccagagttaaaacctctttggagcttctgaggactcagctggaaccaacgggcacagttggcaacaccatcatgacatcacaacctgttcccaatgagaccatcatagtgctcccatcaaatgtcatcaacttctcccaagcagagaaacccgaacccaccaaccaggggcaggatagcctgaagaaacatctacacgcagaaatcaaagttattgggactatccagatcttgtgtggcatgatggtattgagcttggggatcattttggcatctgcttccttctctccaaattttacccaagtgacttctacactgttgaactctgcttacccattcataggaccctttttttttatcatctctggctctctatcaatcgccacagagaaaaggttaaccaagcttttggtgcatagcagcctggttggaagcattctgagtgctctgtctgccctggtgggtttcattatcctgtctgtcaaacaggccaccttaaatcctgcctcactgcagtgtgagttggacaaaaataatataccaacaagaagttatgtttcttacttttatcatgattcactttataccacggactgctatacagccaaagccagtctggctggaactctctctctgatgctgatttgcactctgctggaattctgcctagctgtgctcactgctgtgctgcggtggaaacaggcttactctgacttccctggggtgagtgtgctggccggcttcacttaaccttgcctagtgtatcttatccctgcactgtgttgagtatgtcaccaagagtggtagaaggaacaatcagtcagtcatgagatacacatgggagggcatttgcattgtgatggaagacagagaagaaaagcagatggcaattgagtagctgataagctgaaaattcactggatatgaaaatagttaatcatgagaaatcaactgattcaatcttcctattttgtcagcgaagggaatgagactctgggaagttaaatgactggcctggcattatgctatgagtttgtgcctttgctgaggacactagaacctggcttgcctcccttataagcagaaacaatttctgccacaaccactagtctctttaatagtattgacttggtaaagggcatttacacacgtaactggatccagtgaatgtcttatgctctgcatttgcccctggtgatcttaaaattcgtttgcctttttaaagctatattaaaaatgtattgttgaatcaaacccctatggacttatggctttatttaactgaattaaaaagccttgatttatccaaaattgtattatagagtgtagaatgaatactagggtgataaattgcaattatttgaagaacctggtgatatgctctacttatcttggattagctaagaattctatgtatacagttggaaaaatggcatatatacatctatcttgaacctgattgaagtctgaagacctaacatattttgtttcttctagagtgtacttttcctgcctcacagttacattggtaattctggcatgtcctcaaaaatgactcatgactgtggatatgaagaactattgacttcttaagaaaaaagggagaaatattaatcagaaagttgattcttatgataatatggaaaagttaaccattatagaaaagcaaagcttgagtttcctaaatgtaagcttttaaagtaatgaacattaaaaaaaaccattatttcactgtca

SEQ ID NO: 17792 - DNA, 1160 bp, Homo sapiens
  source 1..1160: mol_type = unassigned DNA
gtgttgtctcacataatccttaaaactcagaaatgattttaaattaaatagcacagagaggaaaactgactggagagggagcctttgcttagattagaaaactgaagcttcaagaacagacttgcctaacaacaggaaacttgtatgtctcgaagtggcaattcacacataaggctccatgactcctgaactctcacaaatattagttggctcttttcatggttttactgaagttgctagaagtttacagaaaaggaagtgcaggaacatttcacaaatctacaatctttggcaacaccatcatgacatcacaacctgttcccaatgagaccatcatagtgctcccatcaaatgtcatcaacttctcccaagcagagaaacccgaacccaccaaccaggggcaggatagcctgaagaaacatctacacgcagaaatcaaagttattgggactatccagatcttgtgtggcatgatggtattgagcttggggatcattttggcatctgcttccttctctccaaattttacccaagtgacttctacactgttgaactctgcttacccattcataggaccctttttttttatcatctctggctctctatcaatcgccacagagaaaaggttaaccaagcttttggtgcatagcagcctggttggaagcattctgagtgctctgtctgccctggtgggtttcattatcctgtctgtcaaacaggccaccttaaatcctgcctcactgcagtgtgagttggacaaaaataatataccaacaagaagttatgtttcttacttttatcatgattcactttataccacggactgctatacagccaaagccagtctggctggaactctctctctgatgctgatttgcactctgctggaattctgcctagctgtgctcactgctgtgctgcggtggaaacaggcttactctgacttccctgggagtgtacttttcctgcctcacagttacattggtaattctggcatgtcctcaaaaatgactcatgactgtggatatgaagaactattgacttcttaagaaaaaagggagaaatattaatcagaaagttgattcttatgataatatggaaaagttaaccattatagaaaagcaaagcttgagtttcctaaatgtaagcttttaaagtaa

SEQ ID NO: 17793 - DNA, 1383 bp, Homo sapiens
  source 1..1383: mol_type = unassigned DNA
attccgaagggttctgtgctaggaaccttacacgtgttgtctcacataatccttaaaactcagaaatgattttaaattaaatagcacagagaggaaaactgactggagagggagcctttgcttagattagaaaactgaagcttcaagaacagacttgcctaacaacaggaaacttgtatgtctcgaagtggcaattcacacataaggctccatgactcctgaactctcacaaatattagttggctcttttcatggttttactgaagttgctagaagtttacagaaaaggaagtgcaggaacatttcacaaatctacaatctgtgagtatcacatcctgtatagctgtaaacactggaataaggaagggctgatgactttcagaagatgaaggtaagtagaaaccgttgatgggactgagaaaccagagttaaaacctctttggagcttctgaggactcagctggaaccaacgggcacagttggcaacaccatcatgacatcacaacctgttcccaatgagaccatcatagtgctcccatcaaatgtcatcaacttctcccaagcagagaaacccgaacccaccaaccaggggcaggatagcctgaagaaacatctacacgcagaaatcaaagttattgggactatccagatcttgtgtggcatgatggtattgagcttggggatcattttggcatctgcttccttctctccaaattttacccaagtgacttctacactgttgaactctgcttacccattcataggaccctttttttttatcatctctggctctctatcaatcgccacagagaaaaggttaaccaagcttttggtgcatagcagcctggttggaagcattctgagtgctctgtctgccctggtgggtttcattatcctgtctgtcaaacaggccaccttaaatcctgcctcactgcagtgtgagttggacaaaaataatataccaacaagaagttatgtttcttacttttatcatgattcactttataccacggactgctatacagccaaagccagtctggctggaactctctctctgatgctgatttgcactctgctggaattctgcctagctgtgctcactgctgtgctgcggtggaaacaggcttactctgacttccctgggagtgtacttttcctgcctcacagttacattggtaattctggcatgtcctcaaaaatgactcatgactgtggatatgaagaactattgacttcttaagaaaaaagggagaaatattaatcagaaagttgattcttatgataatatggaaaagttaaccattatagaaaagcaaagcttgagtttcctaaatgtaagcttttaaagtaatgaacattaaaaaaaaccattatttcactgtc

SEQ ID NO: 17794 - DNA, 682 bp, Homo sapiens
  source 1..682: mol_type = unassigned DNA
gatacattgaagtcagcttccaaagaatgccacccaaggttttgaaggggcacagtgcctctgtcctcacaaaaccagcctgcatatgagtttactgaattcatttaggtcctgctgaatctttcccatttgttccttctctgtttcaatatttcaatgcttccctggaggggcccaacctttctggagggcaaagatctgttgttagagaaaaagagcagccagaggaggaagatgacttgaggattagaaaactgaagcttcaagaacagacttgcctaacaacaggaaacttgtatgtctcgaagtggcaattcacacataaggctccatgactcctgaactctcacaaatattagttggctcttttcatggttttactgaagttgctagaagtttacagaaaaggaagtgcaggaacatttcacaaatctacaatctgtgagtatcacatcctgtatagctgtaaacactggaataaggaagggctgatgactttcagaagatgaaggtaagtagaaaccgttgatgggactgagaaaccagagttaaaacctctttggagcttctgaggactcagctggaaccaacgggcacagttggcaacaccatcatgacatcacaacctgttcccaatgagaccatcatagtgctcccatcaaatgtcatcaacttctcccaa

SEQ ID NO: 17795 - DNA, 711 bp, Homo sapiens
  source 1..711: mol_type = unassigned DNA
aacttgggagctctgtacttttaagagctaaatctattttttcttccgtagttggcaacaccattatgacatcacaacctatttccaatgagaccatcataatgctcccatcaaatgtcatcaacttctcccaagcagagaaacccgaacccaccaaccaggggcaggatagcctgaagaaacgtctacaggcaaaagtcaaagttattggggtgcatagcagcctggctggaagcattctgagtgctctgtctgccctggtgggtttcattctcctgtctgtcaacccggctgcattaaatcctgcctcattgcagtgtaagttggacgaaaaggatataccaaccagacttcttctttcttatgattatcattcaccttacaccatggactgccatagagccaaagccagtctggctggaactctgtctctgatgctggtttctactgtgttggagttctgcctagctgtgctcactgctgtgctgcagtggaaacagactgtctgacttccctggttactcatgtcctcaaagacgactcatgatgctggatatgaagaactattgacttcttgggaaaaaacggagaaatattaattggaaagttgatttttatgataatatggaaaacctaaccattataaaaaagcaaacttgagtttcctaaatgtaagcatttaaagtaatgcatatttgttttaaaaaatta

SEQ ID NO: 17796 - DNA, 1869 bp, Homo sapiens
  source 1..1869: mol_type = unassigned DNA
aaaattcacatcctgtgtaatcataaatactgctctaagaaagggacaggaagtctcagaggctggagagcagagcaccaagatcgttctggcaggaacagccagtgggaggttccagctgagcgctccccagaggtgagctgatccccagccacagcacacaggaccaggctgcgagaacagcatcatcagcatcatgctattacaatcccaaaccatgggggtttctcacagctttacaccaaagggcatcactatccctcaaagagagaaacctggacacatgtaccaaaacgaagattacctgcagaacgggctgccaacagaaaccaccgttcttgggactgtccagatcctgtgttgcctgttgatttcaagtctgggggccatcttggtttttgctccctacccctcccacttcaatccagcaatttccaccactttgatgtctgggtacccatttttaggagctctgtgttttggcattactggatccctctcaattatctctggaaaacaatcaactaagccctttgacctgagcagcttgacctcaaatgcagtgagttctgttactgcaggagcaggcctcttcctccttgctgacagcatggtagccctgaggactgcctctcaacattgtggctcagaaatggattatctatcctcattgccttattcggagtactattatccaatatatgaaatcaaagattgtctcctgaccagtgtcagtttaacaggtgtcctagtggtgatgctcatcttcactgtgctggagctcttattagctgcatacagttctgtcttttggtggaaacagctctactccaacaaccctgggagttcattttcctcgacccagtcacaagatcatatccaacaggtcaaaaagagttcttcacggtcttggatataagtaactcttggcctcagaggaaggaaaagcaactcaacactcatggtcaagtgtgattagactttcctgaaatctctgccattttagatactgtgaaacaaactaaaaaaaaaaaagcttttgttttgtatttgtttactatgagtcgttatttaatttctcttgaaaataatttcctcaaagcccaagtcaataaatgttatcagccagtcttccaaaatggtcataaactttataaactgctttgggtaaactgagcagaaggtgatacacagaagggaaaatgtgcactcatgctagtgtgaatttggtaagttgcgtgactctgcaggctgtttctgtattattttcacactcatattgcttaaatattacatattagggattgtaagaaaactttaattaaaaattaaagactatatataattaaactactctgccctggacactctctgagaaacagatctactgggccctttttcatgagccattaggtggaagacagcaaagagatcttctcaagtgcttaggattacctctcaacacacagcaagcatgtccctgcctcccatgaatcttaccatgtaaatccaaatctctgcaatcctgtggcaccaaccagtggtgctcattctattgtttaaaaatggccttcttggctgggcgcggtggctcactcctgtaatcccagcactttggtaggccgaggtggacggatcacccgaggtcaggagtttgagaccagcctggccaacaaggtgaaaccctgtctctactaaaaatacaaaaaattagccaggcatggtggtgcgcacctgtagttccagctacttgggaggctgaggcagaagaatcacttgaacccgggaaggggaggttgcagtgagcggagactgcaccactgcattccagcccggcctacaagaacaaaactccatctcaaaataaat

SEQ ID NO: 17797 - DNA, 2871 bp, Homo sapiens
  source 1..2871: mol_type = unassigned DNA
attcacatcctgtgtaatcataaatactgctctaagaaagggacaggaagtctcagaggctggagagcagagcaccaagatcgttctggcaggaacagccagtgggaggttccagctgagcgctccccagaggtgagctgatccccagccacagcacacaggaccaggctgcgagaacagcatcatcagcatcatgctattacaatcccaaaccatgggggtttctcacagctttacaccaaagggcatcactatccctcaaagagagaaacctggacacatgtaccaaaacgaagattacctgcagaacgggctgccaacagaaaccaccgttcttgggtttggcattactggatccctctcaattatctctggaaaacaatcaactaagccctttgacctgagcagcttgacctcaaatgcagtgagttctgttactgcaggagcaggcctcttcctccttgctgacagcatggtagccctgaggactgcctctcaacattgtggctcagaaatggattatctatcctcattgccttattcggagtactattatccaatatatgaaatcaaagattgtctcctgaccagtgtcagtttaacaggtgtcctagtggtgatgctcatcttcactgtgctggagctcttattagctgcatacagttctgtcttttggtggaaacagctctactccaacaaccctgggagttcattttcctcgacccagtcacaagatcatatccaacaggtcaaaaagagttcttcacggtcttggatataagtaactcttggcctcagaggaaggaaaagcaactcaacactcatggtcaagtgtgattagactttcctgaaatctctgccattttagatactgtgaaacaaactaaaaaaaaaaaagcttttgttttgtatttgtttactatgagtcgttatttaatttctcttgaaaataatttcctcaaagcccaagtcaataaatgttatcagccagtcttccaaaatggtcataaactttataaactgctttgggtaaactgagcagaaggtgatacacagaagggaaaatgtgcactcatgctagtgtgaatttggtaagttgcgtgactctgcaggctgtttctgtattattttcacactcatattgcttaaatattacatattagggattgtaagaaaactttaattaaaaattaaagactatatataattaaactactctgccctggacactctctgagaaacagatctactgggccctttttcatgagccattaggtggaagacagcaaagagatcttctcaagtgcttaggattacctctcaacacacagcaagcatgtccctgcctcccatgaatcttaccatgtaaatccaaatctctgcaatcctgtggcaccaaccagtggtgctcattctattgtttaaaaatggccttcttggctgggcgcggtggctcactcctgtaatcccagcactttggtaggccgaggtggacggatcacccgaggtcaggagtttgagaccagcctggccaacaaggtgaaaccctgtctctactaaaaatacaaaaaattagccaggcatggtggtgcgcacctgtagttccagctacttgggaggctgaggcagaagaatcacttgaacccgggaaggggaggttgcagtgagcggagactgcaccactgcattccagcccggcctacaagaacaaaactccatctcaaaataaataaaaaaataaataaaaataaaaatagactatatatagtctttgaattcatttattttaaataaatgaataaaataaaataaaaaagaatattcagtcgttggcacataaactatgttctcttctgtcatttcagggtaggagtcaatgaagacatcttagtcttaacaagttacagataatctctgactggcatgttttctgcttctagcttggagctaaatgctgctcatgctgaaaagaataatgtctatttctttgtttgggtattagctctattttgatctatagcacagttttgtaattcagatcatcacccctgcactttgtaccacatgggcgtattctttcttcccagtcattgctgcaattatcttgtctgttctttgtgtaatatgttctgtgtgagcctctgcattaaactcgatttcttgggcaattatggaaattccagtgtggctgcagtttaactttgcactctctatgcatatgaggtttcctaaataaatgaggagtagcatagtttaaaatatatatatcttataactttctacaacaaagaattattgagtccaaatgtcatcagtgctcattttgagataccctgctatcgatggtcgctacaaaccaggaaatactcaagttattatgtgtatacattggttttagttttatgaaacaatttaccttcatgatctcatagttaaaattgtaataaatttaggaatataaaggatcaatatgggaagcaaaatttctaaaggcagtttctgttgttttaattagtatttgtgtagttcaaaccaggaaggatttgactatcattagattttgcttaactttatgaaagctaaaatattctctgttataaaggggcaactccatctggtcctatagcatctttactactgatttttttttgtttaatttgaaaatgcaaagaattgttaaatgttcttaaatgttctcactacaaaaaaagaaaaaagataactacgtgaggtgatggatatgttaattagctggattgtggtaatcattttggaatgtatatgtatatcaaaacatgtagtacaccctaaatatatataatttttatttgtcaaatatacctcaataaagatggaaaaaaatcgaaattc

SEQ ID NO: 17798 - DNA, 657 bp, Homo sapiens
  source 1..657: mol_type = unassigned DNA
caggaagtctcagaggctggagagcagagcaccaagatcgttctggcaggaacagccagtgggaggttccagctgagcgctccccagaggtgagctgatccccagccacagcacacaggaccaggctgcgagaacagcatcatcagcatcatgctattacaatcccaaaccatgggggtttctcacagctttacaccaaagggcatcactatccctcaaagagagaaacctggacacatgtaccaaaacgaagattacctgcagaacgggctgccaacagaaaccaccgttcttgggtttggcattactggatccctctcaattatctctggaaaacaatcaactaagccctttgacctgagcagcttgacctcaaatgcagtgagttctgttactgcaggagcaggcctcttcctccttgctgacagcatggtagccctgaggactgcctctcaacattgtggctcagaaatggattatctatcctcattgccttattcggagtactattatccaatatatgaaatcaaagattgtctcctgaccagtgtcagtttaacaggtgtcctagtggtgatgctcatcttcactgtgctggagctcttattagctgcatacagttctgtcttttggtggaaacagctctactccaacaac

SEQ ID NO: 17799 - DNA, 1378 bp, Homo sapiens
  source 1..1378: mol_type = unassigned DNA
atcataaatactgctctaagaaagggacaggaagtctcagaggctggagagcagagcaccaagatcgttctggcaggaacagccagtgggaggttccagctgagcgctccccagagcatcatcagcatcatgctattacaatcccaaaccatgggggtttctcacagctttacaccaaagggcatcactatccctcaaagagagaaacctggacacatgtaccaaaacgaagattacctgcagaacgggctgccaacagaaaccaccgttcttgggtttggcattactggatccctctcaattatctctggaaaacaatcaactaagccctttgacctgagcagcttgacctcaaatgcagtgagttctgttactgcaggagcaggcctcttcctccttgctgacagcatggtagccctgaggactgcctctcaacattgtggctcagaaatggattatctatcctcattgccttattcggagtactattatccaatatatgaaatcaaagattgtctcctgaccagtgtcagtttaacaggtgtcctagtggtgatgctcatcttcactgtgctggagctcttattagctgcatacagttctgtcttttggtggaaacagctctactccaacaaccctgggagttcattttcctcgacccagtcacaagatcatatccaacaggtcaaaaagagttcttcacggtcttggatataagtaactcttggcctcagaggaaggaaaagcaactcaacactcatggtcaagtgtgattagactttcctgaaatctctgccattttagatactgtgaaacaaactaaaaaaaaaaaagcttttgttttgtatttgtttactatgagtcgttatttaatttctcttgaaaataatttcctcaaagcccaagtcaataaatgttatcagccagtcttccaaaatggtcataaactttataaactgctttgggtaaactgagcagaaggtgatacacagaagggaaaatgtgcactcatgctagtgtgaatttggtaagttgcgtgactctgcaggctgtttctgtattattttcacactcatattgcttaaatattacatattagggattgtaagaaaactttaattaaaaattaaagactatatataattaaactactctgccctggacactctctgagaaacagatctactgggccctttttcatgagccattaggtggaagacagcaaagagatcttctcaagtgcttaggattacctctcaacacacagcaagcatgtccctgcctcccatgaatcttaccatgtaaatccaaatctctgcaatcctgtggcaccaaccagtggtgctcattctattgtttaaaaatggccttcttggct

SEQ ID NO: 17800 - DNA, 1353 bp, Homo sapiens
  source 1..1353: mol_type = unassigned DNA
aaacaggaaataaatacgaatgaaactgagctctaagcagcatgtaacctggcctgcatccaggaaatagaggacttcggatccttctaaccctaccacccaactggccccagtacattcattctctcaggaaaaaaaacaaggtccccacagcaaagaaaaggaataggatcaagagatacgtggctgctggcagagcaagcatgaattcgatgacttcagcagttccggtggccaattctgtgttggtggtggcaccccacaatggttatcctgtgaccccaggaattatgtctcacgtgcccctgtatccaaacagccagccgcaagtccacctagttcctgggaacccacctagtttggtgtcgaatgtgaatgggcagcctgtgcagaaagctctgaaagaaggcaaaaccttgggggccatccagatcatcattggcctggctcacatcggcctcggctccatcatggcgacggttctcgtaggggaatacctgtctatttcattctacggaggctttcccttctggggaggcttgtggtttatcatttcaggatctctctccgtggcagcagaaaatcagccatattcttattgcctgctgtctggcagtttgggcttgaacatcgtcagtgcaatctgctctgcagttggagtcatactcttcatcacagatctaagtattccccacccatatgcctaccccgactattatccttacgcctggggtgtgaaccctggaatggcgatttctggcgtgctgctggtcttctgcctcctggagtttggcatcgcatgcgcatcttcccactttggctgccagttggtctgctgtcaatcaagcaatgtgagtgtcatctatccaaacatctatgcagcaaacccagtgatcaccccagaaccggtgacctcaccaccaagttattccagtgagatccaagcaaataagtaaggctacagattctggaagcatctttcactgggaccaaaagaagtcctcctccctttctgggcttccataacccaggtcgttcctgttctgacagctgaggaaacgtctctcccactgtttgtactctcaccttcattcttcaattcagtctaggaaaccatgctgtttctctatcaagaagaagacagagattttaaacagatgttaaccaagagggactccctagggcacatgcatcagcacatatgtgggcatccagcctctggggccttggcacacacacattcgtgtgctctgctgcatgtgagcttgtgggttagaggaacaaatatctagacattcaatcttcactctttcaattgtgcattcatttaataaatagatactgagcattcaa

SEQ ID NO: 17801 - DNA, 4945 bp, Homo sapiens
  source 1..4945: mol_type = unassigned DNA
aggcagcagcagagggagagctcggggcttggaggggaaacagcggaagacctaagattatcgggagggcagcagaggcagagaacgaggacaggacccttggccgtcttcttccagggaacgagaggtcacagcctcgctctccgcttaggcttctggcgccccagcttaaagccgaggctgcggctgacaaagggctcgcgccggtgccgccgcccttctcatccgggcattcgggtccctgcggagagggagggggaagggcagagggggaggggaaggagccggaggggcgcacacttggagctgaagccctctccagggctccgggccggtgccccaacggacagaggtcgaggaggacccgcagaggtggcagcggccgggggcaggaggatggtgcagaaggagagtcaagcgacgttggaggagcgggagagcgagctcagctccaaccctgccgcctctgcgggggcatcgctggagccgccggcagctccggcacccggagaagacaaccccgccggggctgggggagcggcggtggccggggctgcaggaggggctcggcggttcctctgcggtgtggtggaaggattttatggaagaccttgggttatggaacagagaaaagaactctttagaaggctccagaaatgggaattaaatacatacttgtatgccccaaaagatgactacaaacataggatgttttggcgagagatgtattcagtggaggaagctgagcaacttatgactctcatctctgctgcacgagaatatgagatagagttcatctatgcgatctcacctggattggatatcactttttctaaccccaaggaagtatccacattgaaacgtaaattggaccaggtttctcagtttgggtgcagatcatttgctttgctttttgatgatatagaccataatatgtgtgcagcagacaaagaggtattcagttcttttgctcatgcccaagtctccatcacaaatgaaatctatcagtacctaggagagccagaaactttcctcttctgtcccacagaatactgtggcactttctgttatccaaatgtgtctcagtctccatatttaaggactgtgggtgaaaagcttctacctggaattgaagtgctttggacaggtcccaaagttgtttctaaagaaattccagtagagtccatcgaagaggtttctaagattattaagagagctccagtaatctgggataacattcatgctaatgattatgatcagaagagactgtttctgggcccgtacaaaggaagatccacagaactcatcccacggttaaaaggagtcctcactaatccaaattgtgaatttgaagccaactacgttgctatccacacccttgccacctggtacaaatcaaacatgaatggagtgagaaaagatgtagtgatgagtaggcaagttgcacacagtggagctaaagcaagtgtagttgatgggactcctttagttgcagcaccctctttaaatgccacaaccgtagtaacaacagtttatcaggagcccattatgagccagggagcagccttgagtggtgagcctactactctgaccaaggaagaagaaaagaaacagcctgatgaagaacccatggacatggtggtggaaaaacaagaagaaacggaccacaagaatgacaatcaaatactgagtgaaattgttgaagcgaaaatggcagaggaattgaaaccaatggacactgataaagagagcatagctgaatcaaaatccccagagatgtccatgcaagaagattgtattagtgacattgcccccatgcaaactgatgaacagacaaacaaggagcagtttgtgccaggtccaaatgaaaagcctttgtacactgcggaaccagtgaccctggaggatttgcagttacttgctgatctattctaccttccttacgagcatggacccaaaggagcacagatgttacgggaatttcaatggcttcgagcaaatagtagtgttgtcagtgtcaattgcaaaggaaaagactctgaaaaaattgaagaatggcggtcacgagcagccaagtttgaagagatgtgtggactagtgatgggaatgttcactcggctctccaattgtgccaacaggacaattctttatgacatgtactcctatgtttgggatatcaagagtataatgtctatggtgaagtcttttgtacagtggttagggtgtcgtagtcattcttcagcacaattcttaattggagaccaagaaccctgggcctttagaggtggtctagcaggagagttccagccacctccactgactcctacctccaaagtttatactatcagaccttattttcctaaggatgaggcatccgtgtacaagatttgcagagaaatgtatgacgatggagtgggtttaccctttcaaagtcagcctgatcttattggagacaagttagtaggagggctgctttccctcagcctggattactgctttgtcctagaagatgaagatggcatatgtggttatgccttgggcactgtagatgtgaccccctttattaaaaaatgtaaaatttcctggatccccttcatgcaggagaagtataccaagccaaatggtgacaaggaactctctgaggctgagaaaataatgttgagtttccatgaagaacaggaagtactgccagaaactttccttgctaatttcccttctctgataaagatggacattcacaaaaaagtaactgacccaagtgtggccaaaagcatgatggcttgcctcctgtcttcactgaaggctaatggctcccggggagctttctgtgaagtgagaccagatgataaaagaattctggaattttacagcaagttaggatgttttgaaattgcaaaaatggaaggatttccaaaggatgtggttatacttggtcggagcctgtgacatttgttgacactgtgaactgtccaaaagtctcttaactgcaccttgtgaatggtagttgaggtcttcatacagttcagcctctagaatggtaacaaatcagccaattggattcgaaacaaagaagactatgtaaaactcacccatcacactttgagactactcactggttggaagaatatagtattgcagcaaatcctgtatgaaagagagatgtgggcttcctttttgagtcttgtgttaggtgctgagaccttttacatgggcttatacagggagagagtcttcaataaatgtagtcagcactattttctgcatccagtgtggttgcgtttctcacctgagagtaatcaagataacatctgtcatcttccttggtttattgagtgaaatgcctctcagtcttaggggacatggcagagatgaaagaaagaaagagtgggtttcagaagtgtcagggtggagtgattccaagtgggatggttgtggcattagtttaagctgaataaataatttcaatttggggcagttattctgctttttgtaaagccgtggccaattgtctcctgtaatgactgttggttcaggcatgttgtactttgtagggacaaatgtgcatttgtttgtggcaaaagcctacaattgacaaacttgtaaatttctttgtatataaactagctgtaacctgactatcctttgtgtttactgtttttgtaaatttttttcctctataaatgaaagggtgttggttcagaatggcactttgaataatgtaaaccagtgaaaagtggattttctttacttttgtctttgggtttggggttgtttttgttctttttgaagttttattatttttaaagtgcctcccacctaggcgtaggccatgaccatttggggtacgagagcctaattttgtaggacttaatctgttgaaaagtgcagttacttctggaaattaacctcaatattaggtcagcatgtgaaatgttggatttgacatgtcaggtagggttcagggactgattggtcccatttgccctcaggtcagttgtttaatctcaagacctgttactactgattttattaaatcagagtctttaattcttgcatgtttgtatctaatttctgaatgaatgagcacactttaaccagttatttacagttacctttttcctttaaccggattgtgaaagcttcatgtattttaatttagattctgtgtttttaagggttctgagcatgaagctggcagatagtcggcaggactcattttttcatcatggctggctgatttctccatagattgataacagtattttgttatcttgcttctctgtagttttgcatcagctgtttaactttgagctgagtgaggggagaggggtaaagagaaagaaacttaagttttctttcacagaactccaccattgtgggctttgagagagccctaaagcattgtacctagtggtacctagtgacttccaaccaaagcctttgagtatgcactaaataggtgagaagaaaggagagaaggtttttaggttagaaacctttaaccgatagaaggatatggtatgttgtaaagctggaaccaagtttgcatttttgagggcttgagatgaagggaagactcttaccagatagtaagacagctgagttttcctcagttttctcgtcttaacactagtggacaattctagcattttgtttggaggatttcagagttaacctcatggaattcaggattttttagcaagtttgcttttggttttatcttggcttttagtaatcatgttggctggtctggtcacaggtgactgtgaaacagatgccctggtcttgctttcatcactctaggatcatgaagtgctatgctatttcctggttatgaatattaaggttggaattacatttttattgattgtttggatcagagctcagttcctgtagaaaacgaactgtaaaagaccatgcaagaggcaaaataaaacttgaagtg

SEQ ID NO: 17802 - DNA, 5146 bp, Homo sapiens
  source 1..5146: mol_type = unassigned DNA
aggcagcagcagagggagagctcggggcttggaggggaaacagcggaagacctaagattatcgggagggcagcagaggcagagaacgaggacaggacccttggccgtcttcttccagggaacgagaggtcacagcctcgctctccgcttaggcttctggcgccccagcttaaagccgaggctgcggctgacaaagggctcgcgccggtgccgccgcccttctcatccgggcattcgggtccctgcggagagggagggggaagggcagagggggaggggaaggagccggaggggcgcacacttggagctgaagccctctccagggctccgggccggtgccccaacggacagaggtcgaggaggacccgcagaggtggcagcggccgggggcaggaggatggtgcagaaggagagtcaagcgacgttggaggagcgggagagcgagctcagctccaaccctgccgcctctgcgggggcatcgctggagccgccggcagctccggcacccggagaagacaaccccgccggggctgggggagcggcggtggccggggctgcaggaggggctcggcggttcctctgcggtgtggtggaaggattttatggaagaccttgggttatggaacagagaaaagaactctttagaaggctccagaaatgggaattaaatacatacttgtatgccccaaaagatgactacaaacataggatgttttggcgagagatgtattcagtggaggaagctgagcaacttatgactctcatctctgctgcacgagaatatgagatagagttcatctatgcgatctcacctggattggatatcactttttctaaccccaaggaagtatccacattgaaacgtaaattggaccaggtttctcagtttgggtgcagatcatttgctttgctttttgatgatatagaccataatatgtgtgcagcagacaaagaggtattcagttcttttgctcatgcccaagtctccatcacaaatgaaatctatcagtacctaggagagccagaaactttcctcttctgtcccacagaatactgtggcactttctgttatccaaatgtgtctcagtctccatatttaaggactgtgggtgaaaagcttctacctggaattgaagtgctttggacaggtcccaaagttgtttctaaagaaattccagtagagtccatcgaagaggtttctaagattattaagagagctccagtaatctgggataacattcatgctaatgattatgatcagaagagactgtttctgggcccgtacaaaggaagatccacagaactcatcccacggttaaaaggagtcctcactaatccaaattgtgaatttgaagccaactacgttgctatccacacccttgccacctggtacaaatcaaacatgaatggagtgagaaaagatgtagtgatgactgacagtgaagatagtactgtgtccatccagataaaattagaaaatgaaggcagtgatgaagatattgaaactgatgtactctatagtccacagatggctctaaagctagcattaacagaatggttgcaagagtttggtgtgcctcatcaatacagcagtaggcaagttgcacacagtggagctaaagcaagtgtagttgatgggactcctttagttgcagcaccctctttaaatgccacaaccgtagtaacaacagtttatcaggagcccattatgagccagggagcagccttgagtggtgagcctactactctgaccaaggaagaagaaaagaaacagcctgatgaagaacccatggacatggtggtggaaaaacaagaagaaacggaccacaagaatgacaatcaaatactgagtgaaattgttgaagcgaaaatggcagaggaattgaaaccaatggacactgataaagagagcatagctgaatcaaaatccccagagatgtccatgcaagaagattgtattagtgacattgcccccatgcaaactgatgaacagacaaacaaggagcagtttgtgccaggtccaaatgaaaagcctttgtacactgcggaaccagtgaccctggaggatttgcagttacttgctgatctattctaccttccttacgagcatggacccaaaggagcacagatgttacgggaatttcaatggcttcgagcaaatagtagtgttgtcagtgtcaattgcaaaggaaaagactctgaaaaaattgaagaatggcggtcacgagcagccaagtttgaagagatgtgtggactagtgatgggaatgttcactcggctctccaattgtgccaacaggacaattctttatgacatgtactcctatgtttgggatatcaagagtataatgtctatggtgaagtcttttgtacagtggttagggtgtcgtagtcattcttcagcacaattcttaattggagaccaagaaccctgggcctttagaggtggtctagcaggagagttccagcgtttgctgccaattgatggggcaaatgatctcttttttcagccacctccactgactcctacctccaaagtttatactatcagaccttattttcctaaggatgaggcatccgtgtacaagatttgcagagaaatgtatgacgatggagtgggtttaccctttcaaagtcagcctgatcttattggagacaagttagtaggagggctgctttccctcagcctggattactgctttgtcctagaagatgaagatggcatatgtggttatgccttgggcactgtagatgtgaccccctttattaaaaaatgtaaaatttcctggatccccttcatgcaggagaagtataccaagccaaatggtgacaaggaactctctgaggctgagaaaataatgttgagtttccatgaagaacaggaagtactgccagaaactttccttgctaatttcccttctctgataaagatggacattcacaaaaaagtaactgacccaagtgtggccaaaagcatgatggcttgcctcctgtcttcactgaaggctaatggctcccggggagctttctgtgaagtgagaccagatgataaaagaattctggaattttacagcaagttaggatgttttgaaattgcaaaaatggaaggatttccaaaggatgtggttatacttggtcggagcctgtgacatttgttgacactgtgaactgtccaaaagtctcttaactgcaccttgtgaatggtagttgaggtcttcatacagttcagcctctagaatggtaacaaatcagccaattggattcgaaacaaagaagactatgtaaaactcacccatcacactttgagactactcactggttggaagaatatagtattgcagcaaatcctgtatgaaagagagatgtgggcttcctttttgagtcttgtgttaggtgctgagaccttttacatgggcttatacagggagagagtcttcaataaatgtagtcagcactattttctgcatccagtgtggttgcgtttctcacctgagagtaatcaagataacatctgtcatcttccttggtttattgagtgaaatgcctctcagtcttaggggacatggcagagatgaaagaaagaaagagtgggtttcagaagtgtcagggtggagtgattccaagtgggatggttgtggcattagtttaagctgaataaataatttcaatttggggcagttattctgctttttgtaaagccgtggccaattgtctcctgtaatgactgttggttcaggcatgttgtactttgtagggacaaatgtgcatttgtttgtggcaaaagcctacaattgacaaacttgtaaatttctttgtatataaactagctgtaacctgactatcctttgtgtttactgtttttgtaaatttttttcctctataaatgaaagggtgttggttcagaatggcactttgaataatgtaaaccagtgaaaagtggattttctttacttttgtctttgggtttggggttgtttttgttctttttgaagttttattatttttaaagtgcctcccacctaggcgtaggccatgaccatttggggtacgagagcctaattttgtaggacttaatctgttgaaaagtgcagttacttctggaaattaacctcaatattaggtcagcatgtgaaatgttggatttgacatgtcaggtagggttcagggactgattggtcccatttgccctcaggtcagttgtttaatctcaagacctgttactactgattttattaaatcagagtctttaattcttgcatgtttgtatctaatttctgaatgaatgagcacactttaaccagttatttacagttacctttttcctttaaccggattgtgaaagcttcatgtattttaatttagattctgtgtttttaagggttctgagcatgaagctggcagatagtcggcaggactcattttttcatcatggctggctgatttctccatagattgataacagtattttgttatcttgcttctctgtagttttgcatcagctgtttaactttgagctgagtgaggggagaggggtaaagagaaagaaacttaagttttctttcacagaactccaccattgtgggctttgagagagccctaaagcattgtacctagtggtacctagtgacttccaaccaaagcctttgagtatgcactaaataggtgagaagaaaggagagaaggtttttaggttagaaacctttaaccgatagaaggatatggtatgttgtaaagctggaaccaagtttgcatttttgagggcttgagatgaagggaagactcttaccagatagtaagacagctgagttttcctcagttttctcgtcttaacactagtggacaattctagcattttgtttggaggatttcagagttaacctcatggaattcaggattttttagcaagtttgcttttggttttatcttggcttttagtaatcatgttggctggtctggtcacaggtgactgtgaaacagatgccctggtcttgctttcatcactctaggatcatgaagtgctatgctatttcctggttatgaatattaaggttggaattacatttttattgattgtttggatcagagctcagttcctgtagaaaacgaactgtaaaagaccatgcaagaggcaaaataaaacttgaagtg

SEQ ID NO: 17803 - DNA, 3314 bp, Homo sapiens
  source 1..3314: mol_type = unassigned DNA
aggcagcagcagagggagagctcggggcttggaggggaaacagcggaagacctaagattatcgggagggcagcagaggcagagaacgaggacaggacccttggccgtcttcttccagggaacgagaggtcacagcctcgctctccgcttaggcttctggcgccccagcttaaagccgaggctgcggctgacaaagggctcgcgccggtgccgccgcccttctcatccgggcattcgggtccctgcggagagggagggggaagggcagagggggaggggaaggagccggaggggcgcacacttggagctgaagccctctccagggctccgggccggtgccccaacggacagaggtcgaggaggacccgcagaggtggcagcggccgggggcaggaggatggtgcagaaggagagtcaagcgacgttggaggagcgggagagcgagctcagctccaaccctgccgcctctgcgggggcatcgctggagccgccggcagctccggcacccggagaagacaaccccgccggggctgggggagcggcggtggccggggctgcaggaggggctcggcggttcctctgcggtgtggtggaaggattttatggaagaccttgggttatggaacagagaaaagaactctttagaaggctccagaaatgggaattaaatacatacttgtatgccccaaaagatgactacaaacataggatgttttggcgagagatgtattcagtggaggaagctgagcaacttatgactctcatctctgctgcacgagaatatgagatagagttcatctatgcgatctcacctggattggatatcactttttctaaccccaaggaagtatccacattgaaacgtaaattggaccaggtttctcagtttgggtgcagatcatttgctttgctttttgatgatatagaccataatatgtgtgcagcagacaaagaggtattcagttcttttgctcatgcccaagtctccatcacaaatgaaatctatcagtacctaggagagccagaaactttcctcttctgtcccacagaatactgtggcactttctgttatccaaatgtgtctcagtctccatatttaaggactgtgggtgaaaagcttctacctggaattgaagtgctttggacaggtcccaaagttgtttctaaagaaattccagtagagtccatcgaagaggtttctaagattattaagagagctccagtaatctgggataacattcatgctaatgattatgatcagaagagactgtttctgggcccgtacaaaggaagatccacagaactcatcccacggttaaaaggagtcctcactaatccaaattgtgaatttgaagccaactacgttgctatccacacccttgccacctggtacaaatcaaacatgaatggagtgagaaaagatgtagtgatgactgacagtgaagatagtactgtgtccatccagataaaattagaaaatgaaggcagtgatgaagatattgaaactgatgtactctatagtccacagatggctctaaagctagcattaacagaatggttgcaagagtttggtgtgcctcatcaatacagcagtaggcaagttgcacacagtggagctaaagcaagtgtagttgatgggactcctttagttgcagcaccctctttaaatgccacaaccgtagtaacaacagtttatcaggagcccattatgagccagggagcagccttgagtggtgagcctactactctgaccaaggaagaagaaaagaaacagcctgatgaagaacccatggacatggtggtggaaaaacaagaagaaacggaccacaagaatgacaatcaaatactgagtgaaattgttgaagcgaaaatggcagaggaattgaaaccaatggacactgataaagagagcatagctgaatcaaaatccccagagatgtccatgcaagaagattgtattagtgacattgcccccatgcaaactgatgaacagacaaacaaggagcagtttgtgccaggtccaaatgaaaagcctttgtacactgcggaaccagtgaccctggaggatttgcagttacttgctgatctattctaccttccttacgagcatggacccaaaggagcacagatgttacgggaatttcaatggcttcgagcaaatagtagtgttgtcagtgtcaattgcaaaggaaaagactctgaaaaaattgaagaatggcggtcacgagcagccaagtttgaagagatgtgtggactagtgatgggaatgttcactcggctctccaattgtgccaacaggacaattctttatgacatgtactcctatgtttgggatatcaagagtataatgtctatggtgaagtcttttgtacagtggttaggtaggtgcaccaggaataatctcttctcctcaaatatattgtccctttaaaaaaaattatcccacagggagaaaaacatttagggaattggcacatttccaagtctcttcaattcgttgcctaggtttctttcaaaaataggcattattgaagacttgagatgcaagtcttagtaaatacatcaagcacattaatttttctcccttgggctaattcagcataagtatcttaaaagtatgttagaaagtactgactttaacttgctctgactgaatgctttctggatggaaccctgtataccacttttatctgatttggagatgagacactatgaaatgtgactccacaagctttctgctgcttgctgtgtcttgataacattaatgctatgtttaacagaacaattgctgaaatgacctaaagggcctggcaagaggaagccatcctcccagccctgtgcgcatgcgagctttagtgtaaggctattctggtgctattcagtattatttcacgtggctttttctttatccttctaccaagtattggttttaccaggggatagaaattgtaatcccctaaacatctctgctacattaaatggacttttgtatgtctcctttgaacactgattttttttttttaaattgtcaaacttggtaaaaagcaccagcatggccaagtttctctagggacttcatttcattttcaggttttcaatccagctataaggaatatgtaatggacttatatacagcacacagcaggcagcaaggctgactgacatgtcatagttttcatagtagtcacaaatactatgatgggtttcatggtcttggttgtgaaatagatatctgaaacaccgtgagcttagaataaaaagtagtagtgagattttccactttctgcctgtatacctttgagctcttaaatattt

SEQ ID NO: 17804 - DNA, 1082 bp, Homo sapiens
  source 1..1082: mol_type = unassigned DNA
aaatgggattaggggaaaatgattcaaggcagaggggtgagctgagctccttggaatggtgtctttaccgaaccaagcctgggttaggcagatgtaatgagcccacctattacaagaatctccatagaaagtagggctccgggccggtgccccaacggacagaggtcgaggaggacccgcagaggtggcagcggccgggggcaggaggatggtgcagaaggagagtcaagcgacgttggaggagcgggagagcgagctcagctccaaccctgccgcctctgcgggggcatcgctggagccgccggcagctccggcacccggagaagacaaccccgccggggctgggggagcggcggtggccggggctgcaggaggggctcggcggttcctctgcggtgtggtggaaggattttatggaagaccttgggttatggaacagagaaaagaactctttagaaggctccagaaatgggaattaaatacatacttgtatgccccaaaagatgactacaaacataggatgttttggcgagagatgtattcagtggaggaagctggtagtttccttttcttctatctggtaactattcagttagctgagattgaaagagtgctctgcgctagcaaggtcatgaccatatgtgtgatatcatgggcgtgctaggctgactccatctgttctgtggtcatagattgtgctgcttacttctgccagtggattaaacagtgggccactgggcaaagaagtgctggagctgggctaggcccagggcaaggaagtatccacattgaaacgtaaattggaccaggtttctcagtttgggtgcagatcatttgctttgctttttgatgatatagaccataatatgtgtgcagcagacaaagaggtattcagttcttttgctcatgcccaagtctccatcacaaatgaaatctatcagtacctaggagagccagaaactttcctcttctgtcccacagaatactgtggcactttctgttatccaaatgtgtctcagtctccatatttaaggactgtgggtgaaaagcttctacctggaattgaagtgctttggacaggt

SEQ ID NO: 17805 - DNA, 769 bp, Homo sapiens
  source 1..769: mol_type = unassigned DNA
gctgcaggaggggctcggcggttcctctgcggtgtggtggaaggattttatggaagaccttgggttatggaacagagaaaagaactctttagaaggctccagaaatgggaattaaatacatacttgtatgccccaaaagatgactacaaacataggatgttttggcgagagatgtattcagtggaggaagctgagcaacttatgactctcatctctgctgcacgagaatatgagatagagttcatctatgcgatctcacctggattggatatcactttttctaaccccaaggaagtatccacattgaaacgtaaattggaccaggtttctcagtttgggtgcagatcatttgctttgctttttgatgatatagaccataatatgtgtgcagcagacaaagaggtattcagttcttttgctcatgcccaagtctccatcacaaatgaaatctatcagtacctaggagagccagaaactttcctcttctgtcccacaggtcccaaagttgtttctaaagaaattccagtagagtccatcgaagaggtttctaagattattaagagagctccagtaatctgggataacattcatgctaatgattatgatcagaagagactgtttctgggcccgtacaaaggaagatccacagaactcatcccacggttaaaaggagtcctcactaatccaaattgtgaatttgaagccaactacgttgctatccacacccttgccacctggtacaaatcaaacatgaatggagtgagaaaag

SEQ ID NO: 17806 - DNA, 5043 bp, Homo sapiens
  source 1..5043: mol_type = unassigned DNA
ggtctgcagcgcaagcgcagtgcggataaacaggaagcgggcggtggaggcagcagcagagggagagctcggggcttggaggggaaacagcggaagacctaagattatcgggagggcagcagaggcagagaacgaggacaggacccttggccgtcttcttccagggaacgagaggtcacagcctcgctctccgcttaggcttctggcgccccagcttaaagccgaggctgcggctgacaaagggctcgcgccggtgccgccgcccttctcatccgggcattcgggtccctgcggagagggagggggaagggcagagggggaggggaaggagccggaggggcgcacacttggagctgaagccctctccagggctccgggccggtgccccaacggacagaggtcgaggaggacccgcagaggtggcagcggccgggggcaggaggatggtgcagaaggagagtcaagcgacgttggaggagcgggagagcgagctcagctccaaccctgccgcctctgcgggggcatcgctggagccgccggcagctccggcacccggagaagacaaccccgccggggctgggggagcggcggtggccggggctgcaggaggggctcggcggttcctctgcggtgtggtggaaggattttatggaagaccttgggttatggaacagagaaaagaactctttagaaggctccagaaatgggaattaaatacatacttgtatgccccaaaagatgactacaaacataggatgttttggcgagagatgtattcagtggaggaagctgagcaacttatgactctcatctctgctgcacgagaatatgagatagagttcatctatgcgatctcacctggattggatatcactttttctaaccccaaggaagtatccacattgaaacgtaaattggaccaggtttctcagtttgggtgcagatcatttgctttgctttttgatgatatagaccataatatgtgtgcagcagacaaagaggtattcagttcttttgctcatgcccaagtctccatcacaaatgaaatctatcagtacctaggagagccagaaactttcctcttctgtcccacagaatactgtggcactttctgttatccaaatgtgtctcagtctccatatttaaggactgtgggtgaaaagcttctacctggaattgaagtgctttggacaggtcccaaagttgtttctaaagaaattccagtagagtccatcgaagaggtttctaagattattaagagagctccagtaatctgggataacattcatgctaatgattatgatcagaagagactgtttctgggcccgtacaaaggaagatccacagaactcatcccacggttaaaaggagtcctcactaatccaaattgtgaatttgaagccaactacgttgctatccacacccttgccacctggtacaaatcaaacatgaatggagtgagaaaagatgtagtgatgagtaggcaagttgcacacagtggagctaaagcaagtgtagttgatgggactcctttagttgcagcaccctctttaaatgccacaaccgtagtaacaacagtttatcaggagcccattatgagccagggagcagccttgagtggtgagcctactactctgaccaaggaagaagaaaagaaacagcctgatgaagaacccatggacatggtggtggaaaaacaagaagaaacggaccacaagaatgacaatcaaatactgagtgaaattgttgaagcgaaaatggcagaggaattgaaaccaatggacactgataaagagagcatagctgaatcaaaatccccagagatgtccatgcaagaagattgtattagtgacattgcccccatgcaaactgatgaacagacaaacaaggagcagtttgtgccaggtccaaatgaaaagcctttgtacactgcggaaccagtgaccctggaggatttgcagttacttgctgatctattctaccttccttacgagcatggacccaaaggagcacagatgttacgggaatttcaatggcttcgagcaaatagtagtgttgtcagtgtcaattgcaaaggaaaagactctgaaaaaattgaagaatggcggtcacgagcagccaagtttgaagagatgtgtggactagtgatgggaatgttcactcggctctccaattgtgccaacaggacaattctttatgacatgtactcctatgtttgggatatcaagagtataatgtctatggtgaagtcttttgtacagtggttagggtgtcgtagtcattcttcagcacaattcttaattggagaccaagaaccctgggcctttagaggtggtctagcaggagagttccagcgtttgctgccaattgatggggcaaatgatctcttttttcagccacctccactgactcctacctccaaagtttatactatcagaccttattttcctaaggatgaggcatccgtgtacaagatttgcagagaaatgtatgacgatggagtgggtttaccctttcaaagtcagcctgatcttattggagacaagttagtaggagggctgctttccctcagcctggattactgctttgtcctagaagatgaagatggcatatgtggttatgccttgggcactgtagatgtgaccccctttattaaaaaatgtaaaatttcctggatccccttcatgcaggagaagtataccaagccaaatggtgacaaggaactctctgaggctgagaaaataatgttgagtttccatgaagaacaggaagtactgccagaaactttccttgctaatttcccttctctgataaagatggacattcacaaaaaagtaactgacccaagtgtggccaaaagcatgatggcttgcctcctgtcttcactgaaggctaatggctcccggggagctttctgtgaagtgagaccagatgataaaagaattctggaattttacagcaagttaggatgttttgaaattgcaaaaatggaaggatttccaaaggatgtggttatacttggtcggagcctgtgacatttgttgacactgtgaactgtccaaaagtctcttaactgcaccttgtgaatggtagttgaggtcttcatacagttcagcctctagaatggtaacaaatcagccaattggattcgaaacaaagaagactatgtaaaactcacccatcacactttgagactactcactggttggaagaatatagtattgcagcaaatcctgtatgaaagagagatgtgggcttcctttttgagtcttgtgttaggtgctgagaccttttacatgggcttatacagggagagagtcttcaataaatgtagtcagcactattttctgcatccagtgtggttgcgtttctcacctgagagtaatcaagataacatctgtcatcttccttggtttattgagtgaaatgcctctcagtcttaggggacatggcagagatgaaagaaagaaagagtgggtttcagaagtgtcagggtggagtgattccaagtgggatggttgtggcattagtttaagctgaataaataatttcaatttggggcagttattctgctttttgtaaagccgtggccaattgtctcctgtaatgactgttggttcaggcatgttgtactttgtagggacaaatgtgcatttgtttgtggcaaaagcctacaattgacaaacttgtaaatttctttgtatataaactagctgtaacctgactatcctttgtgtttactgtttttgtaaatttttttcctctataaatgaaagggtgttggttcagaatggcactttgaataatgtaaaccagtgaaaagtggattttctttacttttgtctttgggtttggggttgtttttgttctttttgaagttttattatttttaaagtgcctcccacctaggcgtaggccatgaccatttggggtacgagagcctaattttgtaggacttaatctgttgaaaagtgcagttacttctggaaattaacctcaatattaggtcagcatgtgaaatgttggatttgacatgtcaggtagggttcagggactgattggtcccatttgccctcaggtcagttgtttaatctcaagacctgttactactgattttattaaatcagagtctttaattcttgcatgtttgtatctaatttctgaatgaatgagcacactttaaccagttatttacagttacctttttcctttaaccggattgtgaaagcttcatgtattttaatttagattctgtgtttttaagggttctgagcatgaagctggcagatagtcggcaggactcattttttcatcatggctggctgatttctccatagattgataacagtattttgttatcttgcttctctgtagttttgcatcagctgtttaactttgagctgagtgaggggagaggggtaaagagaaagaaacttaagttttctttcacagaactccaccattgtgggctttgagagagccctaaagcattgtacctagtggtacctagtgacttccaaccaaagcctttgagtatgcactaaataggtgagaagaaaggagagaaggtttttaggttagaaacctttaaccgatagaaggatatggtatgttgtaaagctggaaccaagtttgcatttttgagggcttgagatgaagggaagactcttaccagatagtaagacagctgagttttcctcagttttctcgtcttaacactagtggacaattctagcattttgtttggaggatttcagagttaacctcatggaattcaggattttttagcaagtttgcttttggttttatcttggcttttagtaatcatgttggctggtctggtcacaggtgactgtgaaacagatgccctggtcttgctttcatcactctaggatcatgaagtgctatgctatttcctggttatgaatattaaggttggaattacatttttattgattgtttggatcagagctcagttcctgtagaaaacgaactgtaaaagaccatgcaagaggcaaaataaaacttgaagtgaatgcttgt

SEQ ID NO: 17807 - DNA, 2892 bp, Homo sapiens
  source 1..2892: mol_type = unassigned DNA
cttgcagcaatggcttggattagatccacttgcattctcttttttaccttgctttttgcccacatagcagctgtaccgattaagtatcttcctgaagaaaatgtacatgatgcagattttggtgaacagaaggatatttcagaaatcaatttagctgcaggcttggacctctttcaaggggacatcctcttgcagaaatccagaaatggcctgagagacccaaacaccaggtggacgttccccattccttacatcttggctgataatttggggctgaatgctaaaggagccattctgtatgcctttgagatgttccgtctcaagtcctgtgtggatttcaagccctatgaaggagagagctcatatatcatatttcaacagtttgatgggtgctggtctgaggttggtgaccaacatgtgggacagaacatttccattggccaaggatgtgcctataaggccatcatagaacacgagatcctgcatgctttgggattttaccacgagcagtcaaggacggaccgggatgattatgtgaacatctggtgggaccaaattctttcaggttaccagcacaactttgacacctatgatgatagcttaatcacagacctcaatacaccctatgattatgagtctttgatgcactaccagcctttctcatttaacaagaatgcaagtgttcccaccatcacagccaagatccctgagtttaactccattatcggacagcgcctggatttcagtgccattgatttagagaggctgaaccgaatgtacaattgcaccacaactcacactcttttggaccactgtacttttgagaaggcaaacatctgtggaatgattcagggcaccagagatgacactgactgggcccatcaggacagtgctcaggctggagaagtggatcacaccttgttgggacaatgcacaggtgccggctacttcatgcagttcagcaccagctcggggtccgcggaagaggcagccctactggagtctcggattctttacccaaagaggaagcagcagtgcctgcaatttttctataaaatgacgggaagtccttcagacagactcgttgtctgggtcaggagggatgacagcacaggcaatgttcgcaagttggtgaaggtgcagacttttcaaggagatgatgaccacaattggaaaattgcccatgtggtgctcaaagaggaacagaagtttcgctaccttttccagggcacaaaaggcgaccctcagaactcaactgggggaatttacctagatgacatcactctgacagaaaccccctgccccacaggggtctggacagtccggaatttctcccaagtccttgagaacaccagcaaaggggacaagcttcagagccctcgattctacaattcggagggatatggttttggggtaactttatacccaaatagcagagaaagctctggttacttgagacttgcttttcatgtgtgcagtggggagaacgatgctatcctggagtggccggtagaaaacagacaggtgataattaccatccttgaccaggagcctgatgtccggaacaggatgtcctcaagcatggtgttcactacctcgaagtcgcacacatctccagcgataaatgacactgtcatctgggacaggccgtccagggtgggaacctatcatacggactgtaattgttttagaagcatcgacttgggctggagtggtttcatttcccaccaaatgctgaaaaggaggagtttcctgaaaaatgatgacctcatcatatttgtggactttgaagatatcacccacctcagccagactgaagttcccactaaaggcaaaagactgagcccccaaggcctcattctccaaggccaggagcagcaggtctccgaagaaggttcgggaaaggccatgttagaggaagccctacctgtcagcctgagccaggggcagcccagccgacagaagcggtcggtggagaacacaggccccctggaggaccataactggccacagtacttcagagacccatgtgacccaaacccttgccaaaatgacggcatctgtgtgaacgtgaaggggatggcgagctgcaggtgcatctctggacatgctttcttctacacgggggagcgctgtcaggccgtgcaggtgcacggcagtgtcctgggcatggtgatcggaggcacggctggcgtgatcttcttgaccttctccatcatcgccatcctttcccaaaggccaaggaagtgacctgcctgctggcattggccagaccacagcagcacctcctccatgcaggccttaactttcccatggtcaatgcagtttttatcagccttgctttggataggacctccaaggactaaggcctccagccccatgtgtgacccttgtcatctctctgccccacataattctgttactttgctatgtgctcctaatgtatctagtgtgtcctgtgacaacactcatcacacttcattgtaaatcacttgttttattgactgtctttcctatagactgtaagctccatgagggcaggcacatgttgttctcattgaccgtgctggccccagtgcctagatgcatggctggcacattgttggcactcaacaatggttgaatgaataaaacaataaatgaatgaataactaagatatagaaactctcatttatattgcagattgaatatatatgatgaaattcttatgttgaatatgttagaatcaaatactcatttttcattagatacagtagtgtcatcactcttttaagatcttgttaaagatttcaaataaaggtacttctgggcagccaggctgcacagcatttgctttcctctgagattctaagagaaggcctttaataaatttaataaatattgagttagca

SEQ ID NO: 17808 - DNA, 2309 bp, Homo sapiens
  source 1..2309: mol_type = unassigned DNA
tcaaccctgaatgtcatagttagctactttcaactggaagctacaacatggatttatggaatctgtcttggtttctgttcttggatgctcttctcgtgatttctggcttggcaactccagaaaactttgatgtagatggcggaatggaccaggacatatttgatatcaatgaaggtttgggactggatctttttgagggtgacatcagacttgatagggcacaaattagaaattccatcattggagaaaagtatagatggcctcataccattccatatgttctagaagatagcttggaaatgaatgctaagggagttatcctcaatgcatttgaacgttatcgccttaaaacatgtattgactttaagccttgggctggagaaacaaactatatatcagtgttcaagggcagtggctgctggtcttcagtaggaaataggcgggttgggaagcaagaactttccatcggggcaaactgtgaccgaatagcaacagttcaacacgagttcctccacgctctgggattctggcatgagcagtcgcgttctgaccgggatgactatgtcaggataatgtgggacagaattctgtcaggcagagagcacaattttaacacctatagtgacgatatatcagattccctgaatgttccctatgattacacttcagtaatgcactacagtaaaactgcattccaaaatggaacagagccgacaattgtcacaagaatctcagactttgaggatgtgatcggccaacgaatggatttcagtgactctgatctcctaaagttgaatcaactgtataactgctcctcttccttgagttttatggactcgtgcagttttgaactggaaaatgtgtgtggcatgatccaaagttcaggagataatgctgactggcaacgggtttcacaggttcccagggggccagagagtgatcactccaacatgggccagtgccaaggttctggtttcttcatgcatttcgatagcagctctgtaaatgtgggggccacagcagtgctggaaagtagaacgctgtaccctaaaagaggatttcagtgcctgcaattttacttatataacagtggcagtgaaagtgatcaactgaacatctatatcagggagtattctgcagacaatgtggatggcaatttaacccttgtggaagaaataaaagaaatacccactgggagctggcaactttatcatgtaacattgaaagtgaccaagaagtttagagtggtgtttgaaggacgcaaaggctctggtgcatcactgggtggtctgtctattgatgacatcaatctttcggaaacacggtgccctcatcatatctggcatataaggaatttcacacagttcattggcagcccaaatggaactctgtatagccctccattttactcttctaaaggttatgcctttcagatttacttaaatctagcccatgtgactaatgcagggatatatttccacttgatctctggagccaatgatgatcaattacagtggccatgtccttggcaacaagccacaatgacacttttggatcaaaatcctgacattcgacagcgtatgtccaatcagcggagtataactacagacccatttatgaccaccgataatggaaactatttctgggacaggccttctaaagtgggaacagtggctttgttctctaatggaactcagtttagaagaggtgggggctatggaaccagtgcctttataacccacgaaaggctgaaaagcagagattttataaaaggagatgatgtttatatcctactgacagtggaagacatatctcacctcaactctacacaaatccagctaacaccagcccctagtgttcaagacctctgctcaaaaaccacctgtaaaaatgacggtgtctgcactgttcgagatggcaaagctgagtgcaggtgccagtcaggggaagactggtggtacatgggagaaaggtgtgaaaagagaggctccacccgagacaccatagtcattgctgtttcatctactgttgctgtgtttgccttgatgctgatcatcacccttgtcagtgtctattgcaccaggaagaaatatcgtgaaaggatgagctcaaatcgaccaaatttgactccgcaaaatcagcatgctttttgaagattaactcgacaatatggccagctaatgaaattaaaaaggattcttcatcatggatttcgcctaagtgatattacagccacctcattcttctaaaagtggatatttttctgtaaatagctggaaatattataaatcactattttggtcaaagtc

SEQ ID NO: 17809 - DNA, 1504 bp, Homo sapiens
  source 1..1504: mol_type = unassigned DNA
gctgcaggttggtggcgggaggaggggacagctgcgggcgcggggagggggcgccgcgccgcgggggccatggcggagccaggaagccgggagtccgagacccgggtcgccaatataaatgcttgatgagtgaatgaatgacttccgtctgggacttggttgcaaataaagccgagctgcatcttagggaggggtggagactttgcccctgtttgtgccttgaagccagcagggccttgccctaggatacctccacccaccctcctgcccagcaagtggaggcccgcagcccgagtgtcgccgccatggcttcgccgcagctctgccgcgcgctggtgtcggcgcaatgggtggcggaggcgctgcgggccccgcgcgctgggcagcctctgcagctgctggacgcctcctggtacctgccgaagctggggcgcgacgcgcgacgcgagttcgaggagcgccacatcccgggcgccgctttcttcgacatcgaccagtgcagcgaccgcacctcgccctacgaccacatgctgcccggggccgagcatttcgcggagtacgcaggccgcctgggcgtgggcgcggccacccacgtcgtgatctacgacgccagcgaccagggcctctactccgccccgcgcgtctggtggatgttccgcgccttcggccaccacgccgtgtcactgcttgatggcggcctccgccactggctgcgccagaacctcccgctcagctccggcaagagccaacctgctcccgccgagttccgcgctcagctcgaccccgccttcatcaagacctacgaggacatcaaggagaacctggaatcccggcgcttccaggtggtggactcccgagccactggcaggttccgcggcaccgagcccgagccccgagacggcattgaacctggccacatcccaggtaccgtgaacatccccttcacagacttcctgagccaggaggggctggagaagagccctgaggagatccgccatctgttccaggagaagaaagtggacctgtctaagccactggtggccacgtgtggctctggcgtcacagcctgccacgtggcactaggggcctacctctgcggcaagccagacgtgcccatctacgatggctcctgggtggagtggtacatgcgcgcccggcccgaggatgtcatctcagagggccgggggaagacccactgaagctgggcaggacacaggcgagctcaggtgatgccggccaccagcaatgcctggcctggtagctccgcttctgctttcaccaagagagtgtttcttcactcaactcaggtggcatttggggtgacatctcaaaggccaggaattccgttgacttgttggctgccagtaggggcgggaggaaaggcggaggcgagccctggaggagggaggccacaactccgagctgcccacctggtgctgagctggggccccgcctcctttctgttttatttttgaggaaataaaataaccaagtgctaaatctt

SEQ ID NO: 17810 - DNA, 1437 bp, Homo sapiens
  source 1..1437: mol_type = unassigned DNA
gggcggagcgggcgtacccccacggcccggccagtggaaggcgcgggcagcagcggctccgagtggccgcggcggtgggctgtgccggagtctcctccctttggtccgctgcaggttggtggcgggaggaggggacagctgcgggcgcggggagggggcgccgcgccgcgggggccatggcggagccaggaagccgggagtccgagacccgggcccgcagcccgagtgtcgccgccatggcttcgccgcagctctgccgcgcgctggtgtcggcgcaatgggtggcggaggcgctgcgggccccgcgcgctgggcagcctctgcagctgctggacgcctcctggtacctgccgaagctggggcgcgacgcgcgacgcgagttcgaggagcgccacatcccgggcgccgctttcttcgacatcgaccagtgcagcgaccgcacctcgccctacgaccacatgctgcccggggccgagcatttcgcggagtacgcaggccgcctgggcgtgggcgcggccacccacgtcgtgatctacgacgccagcgaccagggcctctactccgccccgcgcgtctggtggatgttccgcgccttcggccaccacgccgtgtcactgcttgatggcggcctccgccactggctgcgccagaacctcccgctcagctccggcaagagccaacctgctcccgccgagttccgcgctcagctcgaccccgccttcatcaagacctacgaggacatcaaggagaacctggaatcccggcgcttccaggtggtggactcccgagccactggcaggttccgcggcaccgagcccgagccccgagacggcattgaacctggccacatcccaggtaccgtgaacatccccttcacagacttcctgagccaggaggggctggagaagagccctgaggagatccgccatctgttccaggagaagaaagtggacctgtctaagccactggtggccacgtgtggctctggcgtcacagcctgccacgtggcactaggggcctacctctgcggcaagccagacgtgcccatctacgatggctcctgggtggagtggtacatgcgcgcccggcccgaggatgtcatctcagagggccgggggaagacccactgaagctgggcaggacacaggcgagctcaggtgatgccggccaccagcaatgcctggcctggtagctccgcttctgctttcaccaagagagtgtttcttcactcaactcaggtggcatttggggtgacatctcaaaggccaggaattccgttgacttgttggctgccagtaggggcgggaggaaaggcggaggcgagccctggaggagggaggccacaactccgagctgcccacctggtgctgagctggggccccgcctcctttctgttttatttttgaggaaataaaataaccaagtgctaaatcttgt

SEQ ID NO: 17811 - DNA, 2116 bp, Homo sapiens
  source 1..2116: mol_type = unassigned DNA
ctctggtatgcaggaaagatagagaggagagggagggaggtgcgaagtcactgttgctgctgctagaagggccagagagagcccaggctggacaggcaaaacctggcctcgccagactcctggagcctgcacagagtgtgtgtctgagaagtccggattctggtgccagactgactgcctagtgagaagcctggcaccgccgggtcaggctagtgcactttttcttgtttgttttttgtttttgagacagagttttgctcttgttccccaggctggattgcaatggcacgatctcggctcactgcaacctccgcctcctgggttcaagcagttctcctgcctcagcctcccgagtagctgggattacaggtgccctccactaagcccggctaattttttgtatttttggtagagacggggtttcaccatgttggccagactggtttcaaacttctgacctcaggtgatccacctgcctgggcctcccaaagtgctgggattacaagcgtgagccaccgcaccaggccaggttagtgcacttctgtgagcctgagtgtcctccttgaaacggtgacaataatataccaggcctcttaagatcactcattcaacacatactggagagtctactgtgtcaggcattgttctaggatattgttaggattcagtggtacccagcaaggactcagtaaattccagctactgttcctattaggtcgccaatataaatgcttgatgagtgaatgaatgacttccgtctgggacttggttgcaaataaagccgagctgcatcttagggaggggtggagactttgcccctgtttgtgccttgaagccagcagggccttgccctaggatacctccacccaccctcctgcccagcaagtggaggcccgcagcccgagtgtcgccgccatggcttcgccgcagctctgccgcgcgctggtgtcggcgcaatgggtggcggaggcgctgcgggccccgcgcgctgggcagcctctgcagctgctggacgcctcctggtacctgccgaagctggggcgcgacgcgcgacgcgagttcgaggagcgccacatcccgggcgccgctttcttcgacatcgaccagtgcagcgaccgcacctcgccctacgaccacatgctgcccggggccgagcatttcgcggagtacgcaggccgcctgggcgtgggcgcggccacccacgtcgtgatctacgacgccagcgaccagggcctctactccgccccgcgcgtctggtggatgttccgcgccttcggccaccacgccgtgtcactgcttgatggcggcctccgccactggctgcgccagaacctcccgctcagctccggcaagagccaacctgctcccgccgagttccgcgctcagctcgaccccgccttcatcaagacctacgaggacatcaaggagaacctggaatcccggcgcttccaggtggtggactcccgagccactggcaggttccgcggcaccgagcccgagccccgagacggcattgaacctggccacatcccaggtaccgtgaacatccccttcacagacttcctgagccaggaggggctggagaagagccctgaggagatccgccatctgttccaggagaagaaagtggacctgtctaagccactggtggccacgtgtggctctggcgtcacagcctgccacgtggcactaggggcctacctctgcggcaagccagacgtgcccatctacgatggctcctgggtggagtggtacatgcgcgcccggcccgaggatgtcatctcagagggccgggggaagacccactgaagctgggcaggacacaggcgagctcaggtgatgccggccaccagcaatgcctggcctggtagctccgcttctgctttcaccaagagagtgtttcttcactcaactcaggtggcatttggggtgacatctcaaaggccaggaattccgttgacttgttggctgccagtaggggcgggaggaaaggcggaggcgagccctggaggagggaggccacaactccgagctgcccacctggtgctgagctggggccccgcctcctttctgttttatttttgaggaaataaaataaccaagtgctaaatcttgt

SEQ ID NO: 17812 - DNA, 1345 bp, Homo sapiens
  source 1..1345: mol_type = unassigned DNA
gcgcgggggccgcgcgggcctgggctgggcggagcgggcgtacccccacggcccggccagtggaaggcgcgggcagcagcggctccgagtggccgcggcggtgggctgtgccggagtctcctccctttggtccgctgcaggcccgcagcccgagtgtcgccgccatggcttcgccgcagctctgccgcgcgctggtgtcggcgcaatgggtggcggaggcgctgcgggccccgcgcgctgggcagcctctgcagctgctggacgcctcctggtacctgccgaagctggggcgcgacgcgcgacgcgagttcgaggagcgccacatcccgggcgccgctttcttcgacatcgaccagtgcagcgaccgcacctcgccctacgaccacatgctgcccggggccgagcatttcgcggagtacgcaggccgcctgggcgtgggcgcggccacccacgtcgtgatctacgacgccagcgaccagggcctctactccgccccgcgcgtctggtggatgttccgcgccttcggccaccacgccgtgtcactgcttgatggcggcctccgccactggctgcgccagaacctcccgctcagctccggcaagagccaacctgctcccgccgagttccgcgctcagctcgaccccgccttcatcaagacctacgaggacatcaaggagaacctggaatcccggcgcttccaggtggtggactcccgagccactggcaggttccgcggcaccgagcccgagccccgagacggcattgaacctggccacatcccaggtaccgtgaacatccccttcacagacttcctgagccaggaggggctggagaagagccctgaggagatccgccatctgttccaggagaagaaagtggacctgtctaagccactggtggccacgtgtggctctggcgtcacagcctgccacgtggcactaggggcctacctctgcggcaagccagacgtgcccatctacgatggctcctgggtggagtggtacatgcgcgcccggcccgaggatgtcatctcagagggccgggggaagacccactgaagctgggcaggacacaggcgagctcaggtgatgccggccaccagcaatgcctggcctggtagctccgcttctgctttcaccaagagagtgtttcttcactcaactcaggtggcatttggggtgacatctcaaaggccaggaattccgttgacttgttggctgccagtaggggcgggaggaaaggcggaggcgagccctggaggagggaggccacaactccgagctgcccacctggtgctgagctggggccccgcctcctttctgttttatttttgaggaaataaaat

SEQ ID NO: 17813 - DNA, 1453 bp, Homo sapiens
  source 1..1453: mol_type = unassigned DNA
ggaaggcgcgggcagcagcggctccgagtggccgcggcggtgggctgtgccggagtctcctccctttggtccgctgcaggtcgccaatataaatgcttgatgagtgaatgaatgacttccgtctgggacttggttgcaaataaagccgagctgcatcttagggaggggtggagactttgcccctgtttgtgccttgaagccagcagggccttgccctaggatacctccacccaccctcctgcccagcaagtggaggcccgcagcccgagtgtcgccgccatggcttcgccgcagctctgccgcgcgctggtgtcggcgcaatgggtggcggaggcgctgcgggccccgcgcgctgggcagcctctgcagctgctggacgcctcctggtacctgccgaagctggggcgcgacgcgcgacgcgagttcgaggagcgccacatcccgggcgccgctttcttcgacatcgaccagtgcagcgaccgcacctcgccctacgaccacatgctgcccggggccgagcatttcgcggagtacgcaggccgcctgggcgtgggcgcggccacccacgtcgtgatctacgacgccagcgaccagggcctctactccgccccgcgcgtctggtggatgttccgcgccttcggccaccacgccgtgtcactgcttgatggcggcctccgccactggctgcgccagaacctcccgctcagctccggcaagagccaacctgctcccgccgagttccgcgctcagctcgaccccgccttcatcaagacctacgaggacatcaaggagaacctggaatcccggcgcttccaggtggtggactcccgagccactggcaggttccgcggcaccgagcccgagccccgagacggcattgaacctggccacatcccaggtaccgtgaacatccccttcacagacttcctgagccaggaggggctggagaagagccctgaggagatccgccatctgttccaggagaagaaagtggacctgtctaagccactggtggccacgtgtggctctggcgtcacagcctgccacgtggcactaggggcctacctctgcggcaagccagacgtgcccatctacgatggctcctgggtggagtggtacatgcgcgcccggcccgaggatgtcatctcagagggccgggggaagacccactgaagctgggcaggacacaggcgagctcaggtgatgccggccaccagcaatgcctggcctggtagctccgcttctgctttcaccaagagagtgtttcttcactcaactcaggtggcatttggggtgacatctcaaaggccaggaattccgttgacttgttggctgccagtaggggcgggaggaaaggcggaggcgagccctggaggagggaggccacaactccgagctgcccacctggtgctgagctggggccccgcctcctttctgttttatttttgaggaa

SEQ ID NO: 17814 - DNA, 1331 bp, Homo sapiens
  source 1..1331: mol_type = unassigned DNA
gctgcaggttggtggcgggaggaggggacagctgcgggcgcggggagggggcgccgcgccgcgggggccatggcggagccaggaagccgggagtccgagacccgggcccgcagcccgagtgtcgccgccatggcttcgccgcagctctgccgcgcgctggtgtcggcgcaatgggtggcggaggcgctgcgggccccgcgcgctgggcagcctctgcagctgctggacgcctcctggtacctgccgaagctggggcgcgacgcgcgacgcgagttcgaggagcgccacatcccgggcgccgctttcttcgacatcgaccagtgcagcgaccgcacctcgccctacgaccacatgctgcccggggccgagcatttcgcggagtacgcaggccgcctgggcgtgggcgcggccacccacgtcgtgatctacgacgccagcgaccagggcctctactccgccccgcgcgtctggtggatgttccgcgccttcggccaccacgccgtgtcactgcttgatggcggcctccgccactggctgcgccagaacctcccgctcagctccggcaagagccaacctgctcccgccgagttccgcgctcagctcgaccccgccttcatcaagacctacgaggacatcaaggagaacctggaatcccggcgcttccaggtggtggactcccgagccactggcaggttccgcggcaccgagcccgagccccgagacggcattgaacctggccacatcccaggtaccgtgaacatccccttcacagacttcctgagccaggaggggctggagaagagccctgaggagatccgccatctgttccaggagaagaaagtggacctgtctaagccactggtggccacgtgtggctctggcgtcacagcctgccacgtggcactaggggcctacctctgcggcaagccagacgtgcccatctacgatggctcctgggtggagtggtacatgcgcgcccggcccgaggatgtcatctcagagggccgggggaagacccactgaagctgggcaggacacaggcgagctcaggtgatgccggccaccagcaatgcctggcctggtagctccgcttctgctttcaccaagagagtgtttcttcactcaactcaggtggcatttggggtgacatctcaaaggccaggaattccgttgacttgttggctgccagtaggggcgggaggaaaggcggaggcgagccctggaggagggaggccacaactccgagctgcccacctggtgctgagctggggccccgcctcctttctgttttatttttgaggaaataaaataaccaagtgctaaatcttgta

SEQ ID NO: 17815 - DNA, 738 bp, Homo sapiens
  source 1..738: mol_type = unassigned DNA
atggcttcgccgcagctctgccgcgcgctggtgtcggcgcaatgggtggcggaggcgctgcgggccccgcgcgctgggcagcctctgcagctgctggacgcctcctggtacctgccgaagctggggcgcgacgcgcgacgcgagttcgaggagcgccacatcccgggcgccgctttcttcgacatcgaccagtgcagcgaccgcacctcgccctacgaccacatgctgcccggggccgagcatttcgcggagtacgcaggccgcctgggcgtgggcgcggccacccacgtcgtgatctacgacgccagcgaccagggcctctactccgccccgcgcgtctggtggatgttccgcgccttcggccaccacgccgtgtcactgcttgatggcggcctccgccactggctgcgccagaacctcccgctcagctccggcaagagccaacctgctcccgccgagttccgcgctcagctcgaccccgccttcatcaagacctacgaggacatcaaggagaacctggaatcccggcgcttccaggtggtggactcccgagccactggcaggttccgcggcaccgagcccgagccccctgctgtaggcattgaacctggccacatcccaggtaccgtgaacatccccttcacagacttcctgagccaggatggctcctgggtggagtggtacatgcgcgcccggcccgaggatgtcatctcagagggccgggggaagacccactga

SEQ ID NO: 17816 - DNA, 2707 bp, Homo sapiens
  source 1..2707: mol_type = unassigned DNA
gatttaaaagtgtgtcccagcagccctggtccagccctctgcaggcatttgctctgggctccaggacgaactcctcgtcagctggtgcgtctgggttgggacagtgaaaatgtttagtgtcattggcgacaaatacacatacaggggatcccagtaggtaggctggtgcattggaggggcaggagcaagcccgacataggtgtgtgcacacacataggagtagctggccacatgtgtgtgtactttaaggagagactttagttttgggtttttttttttttttggttcctggggtaaattttctgttgaacatttttccctcctatttagttttttttcttttgcatttttaaaaatttgaacataaaaagtataaagaatcaaatctttgaaaggaccgaggcgtgcagcggacagcagatggatcccgcggccagcagctgcatgaggagcctccagcccccagcccctgtctggggctgccttcgaaacccccactcggaaggcaatggggcctcagggctaccccactacccgcccaccccgttctccttccaccagaaaccagacttcctggcgacagcgacggcagcgtaccctgacttctcagcctcctgcctggcagccaccccacacagcctgccccaggaggagcacatcttcactgagcagcaccccgctttcccacagtcccccaactggcacttccctgtctcagacgcccggcgcaggcccaactcaggcccggcagggggttccaaggaaatggggaccagcagcctgggcctggtggacaccacaggaggcccaggcgatgactacggggtgcttgggagcactgccaatgagacagagaagaaatcatccaggcggagaaaggagagttcagacaaccaggagaacagagggaagccggagggcagcagcaaagcccgcaaggagaggacggccttcaccaaggagcagctgcgagagctggaggcagagtttgcccatcataactacctgactcggctccgcagatatgagattgcggtaaacctggacctctctgagcgccaggtcaaagtgtggttccagaaccgaaggatgaagtggaagcgtgtgaagggaggtcagcccatctcccccaatgggcaggaccctgaggatggggactccacagcctctccaagttcagagtgagattctgcatggaggaaaaatgactaaggactgagccccctacccaactacccccaccccaatcccaccttcaccctcttccttccccagccagggcagcctctccacatctttccctgactcttggatatgaaactgcccagcattcctgggagtcttaggattttctaggaagttctgtccagcctcttagcagcctcttccctagggcctttgctcccacactctcatggaatcagacagagatcctaccgggccggatgaatctggaaacagcttcagagatactgcttctcagcgtctcttggctgccacccatgcctcctcctaccgctgttctcctaggtcagccaggcctcctcctggtctggacaccacctggcctggtgggagaggagctttggaaccagctggcgactcggaaagtaaatgcttcaaaaggaaggaaatgacagagacacacgcccttgcccaccttcctctgtaggctgcacatctgaggctttggggccccttagttgtcccgaaaccccaagaaaaatcagaatgaggagagtcaaggacagcaactcagctgctgcaagccagaaacacatccctgtctccaaatttgttggctaagtggagacacttctgagaactgactagagaagacagaaaaatagcccgatgtaggtttcggtgtccccatataggcccgtccacacaggcttgactgggtggacaagaatgaacccatgacagcacctgctgcttcaaaatcaaaatcaatttagggatacagcaggggctgttgggctgtgctccagagaaaaggagcagctactccttttaaatccacgatttctggattgaaaacctgtccagatgctgagttgttgggctgaacaactaggagctgaaaacaacgtagaggctggaaagtgtcccctgcattctggaggggaggggagataataaggagggctgctgggtgagggcctggagatgtggaaccctggagtggaaggttctccagtgacagtgtcctgtgactgcaaaaggggacaagaaaatccctcttcctccatgggatggatttaagctcttgctgtgtgttctacaaatgctgttattgtgggaggaaatgctaggtttttgtgtgtggactgcccagacctcagccaggtcttctggagatgacatttgaggactgatggccaaagagcatgggggactgaagccctggctgcctcagcgctctgtctcccaacaccagctggtgttgcagagggaggtcaacgtgagtttggatctcttgtacgcagatgtaatcattcacatgtaaaaataaccccacctccccaccccaaaaagggcaagagctgtggaaaatgattgccaaatgagatggctggttagagcatgattttttctaaagcatacttcatatattttcttaagattacatcaagctaattgtgcgagctcaattcactttgtaagaaaactctcggagaaataaaatcaataaaaagcaaag

SEQ ID NO: 17817 - DNA, 2129 bp, Homo sapiens
  source 1..2129: mol_type = unassigned DNA
aaaggaccgaggcgtgcagcggacagcagatggatcccgcggccagcagctgcatgaggagcctccagcccccagcccctgtctggggctgccttcgaaacccccactcggaaggcaatggggcctcagggctaccccactacccgcccaccccgttctccttccaccagaaaccagacttcctggcgacagcgacggcagcgtaccctgacttctcagcctcctgcctggcagccaccccacacagcctgccccaggaggagcacatcttcactgagcagcaccccgctttcccacagtcccccaactggcacttccctgtctcagacgcccggcgcaggcccaactcaggcccggcagggggttccaaggaaatggggaccagcagcctgggcctggtggacaccacaggaggcccaggcgatgactacggggtgcttgggagcactgccaatgagacagagaagaaatcatccaggcggagaaaggagagttcaggtcaaagtgtggttccagaaccgaaggatgaagtggaagcgtgtgaagggaggtcagcccatctcccccaatgggcaggaccctgaggatggggactccacagcctctccaagttcagagtgagattctgcatggaggaaaaatgactaaggactgagccccctacccaactacccccaccccaatcccaccttcaccctcttccttccccagccagggcagcctctccacatctttccctgactcttggatatgaaactgcccagcattcctgggagtcttaggattttctaggaagttctgtccagcctcttagcagcctcttccctagggcctttgctcccacactctcatggaatcagacagagatcctaccgggccggatgaatctggaaacagcttcagagatactgcttctcagcgtctcttggctgccacccatgcctcctcctaccgctgttctcctaggtcagccaggcctcctcctggtctggacaccacctggcctggtgggagaggagctttggaaccagctggcgactcggaaagtaaatgcttcaaaaggaaggaaatgacagagacacacgcccttgcccaccttcctctgtaggctgcacatctgaggctttggggccccttagttgtcccgaaaccccaagaaaaatcagaatgaggagagtcaaggacagcaactcagctgctgcaagccagaaacacatccctgtctccaaatttgttggctaagtggagacacttctgagaactgactagagaagacagaaaaatagcccgatgtaggtttcggtgtccccatataggcccgtccacacaggcttgactgggtggacaagaatgaacccatgacagcacctgctgcttcaaaatcaaaatcaatttagggatacagcaggggctgttgggctgtgctccagagaaaaggagcagctactccttttaaatccacgatttctggattgaaaacctgtccagatgctgagttgttgggctgaacaactaggagctgaaaacaacgtagaggctggaaagtgtcccctgcattctggaggggaggggagataataaggagggctgctgggtgagggcctggagatgtggaaccctggagtggaaggttctccagtgacagtgtcctgtgactgcaaaaggggacaagaaaatccctcttcctccatgggatggatttaagctcttgctgtgtgttctacaaatgctgttattgtgggaggaaatgctaggtttttgtgtgtggactgcccagacctcagccaggtcttctggagatgacatttgaggactgatggccaaagagcatgggggactgaagccctggctgcctcagcgctctgtctcccaacaccagctggtgttgcagagggaggtcaacgtgagtttggatctcttgtacgcagatgtaatcattcacatgtaaaaataaccccacctccccaccccaaaaagggcaagagctgtggaaaatgattgccaaatgagatggctggttagagcatgattttttctaaagcatacttcatatattttcttaagattacatcaagctaattgtgcgagctcaattcactttgtaagaaaactctcggagaaataaaatc

SEQ ID NO: 17818 - DNA, 1206 bp, Homo sapiens
  source 1..1206: mol_type = unassigned DNA
agccctctgcaggcatttgctctgggctccaggacgaactcctcgtcagctgaaaccagacttcctggcgacagcgacggcagcgtaccctgacttctcagcctcctgcctggcagccaccccacacagcctgccccaggaggagcacatcttcactgagcagcaccccgctttcccacagtcccccaactggcacttccctgtctcagacgcccggcgcaggcccaactcaggcccggcagggggttccaaggaaatggggaccagcagcctgggcctggtggacaccacaggaggcccaggcgatgactacggggtgcttgggagcactgccaatgagacagagaagaaatcatccaggcggagaaaggagagttcagacaaccaggagaacagagggaagccggagggcagcagcaaagcccgcaaggagaggacggccttcaccaaggagcagctgcgagagctggaggcagagtttgcccatcataactacctgactcggctccgcagatatgagattgcggtaaacctggacctctctgagcgccaggtcaaagtgtggttccagaaccgaaggatgaagtggaagcgtgtgaagggaggtcagcccatctcccccaatgggcaggaccctgaggatggggactccacagcctctccaagttcagagtgagattctgcatggaggaaaaatgactaaggactgagccccctacccaactacccccaccccaatcccaccttcaccctcttccttccccagccagggcagcctctccacatctttccctgactcttggatatgaaactgcccagcattcctgggagtcttaggattttctaggaagttctgtccagcctcttagcagcctcttccctagggcctttgctcccacactctcatggaatcagacagagatcctaccgggccggatgaatctggaaacagcttcagagatactgcttctcagcgtctcttggctgccacccatgcctcctcctaccgctgttctcctaggtcagccaggcctcctcctggtctggacaccacctggcctggtgggagaggagctttggaaccagctggcgactcggaaagtaaatgcttcaaaaggaaggaaatgacagagacacacgcccttgcccaccttcctctgtaggctgcacatctgaggctttggggccccttagttgtcccgaaac

SEQ ID NO: 17819 - DNA, 2500 bp, Homo sapiens
  source 1..2500: mol_type = unassigned DNA
ctgggagcgcgtggcgcaggctgagcgggagttttggagggagtttgcatgtggtcaactctgggctcctaagccagcccccagctcacgttacactctatttataacttctcagagccatttccccctgaaagcagttctctgggaccaccttcttttggcttcaacctctcccactcttgacatctgagtagctcagggaagctcttccaggtccgactgttcatatgtaaaggagactggccgctggggctcaggaccgggattatccgagctctgcagaagtgcaccgctattgctttgggaggttaaaaaaaaaatcacacggtttccagtgaaaaagtgacagagggtggtggcctttggaaccgccgtgaagtcttctgcctggaacccgaaacttgcatgctatggaacacccgctctttggctgcctgcgcagccctcacgccacggcgcaaggcttgcacccgttctcccaatcctctctcgccctccatggaagatctgaccatatgtcttaccccgagctctctacttcttcctcatcttgcataatcgcgggataccccaacgaagagggcatgtttgccagccagcatcacagggggcaccaccaccaccaccaccaccaccaccatcaccaccatcagcagcagcagcaccaggctctgcaaaccaactggcacctcccgcagatgtcttccccaccgagtgcggctcggcacagcctctgcctccagcccgactctggagggcccccagagttggggagcagcccgcccgtcctgtgctccaactcttccagcttgggctccagcaccccgactggggccgcgtgcgcgccgggggactacggccgccaggcactgtcacctgcggaggcggagaagcgaagcggcggcaagaggaaaagcgacagctcagactcccaggaaggaaattacaagtcagaagtcaacagcaaacccaggaaagaaaggacagcatttaccaaagagcaaatcagagaacttgaagcagaatttgcccatcataattatctcaccagactgaggcgatacgagatagcagtgaatctggatctcactgaaagacaggtgaaagtctggttccaaaacaggcggatgaagtggaagagggtaaagggtggacagcaaggagctgcggctcgggaaaaggaactggtgaatgtgaaaaagggaacacttctcccatcagagctgtcgggaattggtgcagccaccctccagcaaacaggggactctatagcaaatgaagacagtcacgacagtgaccacagctcagagcatgcgcacttatgatataaacagaggaccagctccattctcaggaaagaaatgttgtgatggcaagccttacccaaatatcgtttacacagagagatgactatggcagtgatgtttaatattattaaatccaggcatttcgaatctgtttttcatgatttatagagggtttacacaaagtgccacttattaaagagcttccacagtgaagatggagaaggtgaacttgctttgaatattccagatgtgtttggtcgtgcgtatggcagtgagcaggtatgtgtttgcttttgcttgcactgaaaattaaattgctatcaagagcaaactatgaacggttttttattcaagatgtctccagagtgaagatgccgaggatgaacttgcattgaacattccagatgtgtgagatcatgtgtattacagtgggcaggtatttgcttttgcttgcactgaaaattaaattgctatcaagaataaaccatgaaacattttatcctgaacagccacagtgcctgaattcactcaagtggataaaaagtgtattttaactctgtatatattacccttaagtcattttcctgtcttcactaatttagcaatgcattcatattagctgatgaaaataggcactcacaatgacaaccagagccagtttcttgtcttttttatacattttgtcatcccagagacaatcagtatgtgcttacctgtgttcaagtagagaaaaatacagtagagtctgataggacatattcttgtaccacagacaaaacaaatcttatgttgcatttactatcaactgctgctaatacgttattataaaacttacctagctcctgaattcttcctatcttatagcttaaaacaattaggatcataggcaaatcagttaccttgcagaaagagctttgtatgacagacattgtcttattttatttctgtaaaatattagctgtatgaatatgatttaattaacaagaaaacatttcttcctgattgacaacagtgttagacaaggtgcaaagcgaaactggttgctcaagttgatagaaaacaaaattctgaatatcttcaaattaaattcggtaaaaacacattattttttcatatgtgatgtattcatgcagaacaactatctttgtattttgtttttaaaatgtgtttaataaatgatcctttgtaaataa

SEQ ID NO: 17820 - DNA, 4257 bp, Homo sapiens
  source 1..4257: mol_type = unassigned DNA
aaggcggacaggaaggcgtgtgcaaggcggggtccggcccgcgcaggtcgggtaagcgcgtctagggcgctgcgcggcgcagcgaaaatggcggcttccaggtgggcgcgcaaggccgtggtcctgctttgtgcctctgacctgctgctgctgctgctactgctaccaccgcctgggtcctgcgcggccgaaggctcgcccgggacgcccgacgagtctaccccacctccccggaagaagaagaaggatattcgcgattacaatgatgcagacatggcgcgtcttctggagcaatgggagaaagatgatgacattgaagaaggagatcttccagagcacaagagaccttcagcacctgtcgacttctcaaagatagacccaagcaagcctgaaagcatattgaaaatgacgaaaaaagggaagactctcatgatgtttgtcactgtatcaggaagccctactgagaaggagacagaggaaattacgagcctctggcagggcagccttttcaatgccaactatgacgtccagaggttcattgtgggatcagaccgtgctatcttcatgcttcgcgatgggagctacgcctgggagatcaaggactttttggtcggtcaagacaggtgtgctgatgtaactctggagggccaggtgtaccccggcaaaggaggaggaagcaaagagaaaaataaaacaaagcaagacaagggcaaaaaaaagaaggaaggagatctgaaatctcggtcttccaaggaagaaaatcgagctgggaataaaagagaagacctgtgatggggcagcagtgacgcgctgtggggggacaggtggacgtggagagctctttgcccagctcctggggtgggagtggtctcaggcaactgcacaccggatgacattctagtgtcttctagaaagggtctgccacatgaccagtttgtggtcaaagaattactgcttaataggcttcaagtaagaagacagatgttttctaattaatactggacactgacaaattcatgtttactataaaatctccttacatggaaatgtgactgtgttgctttttcccatttacacttggtgagtcatcaactctactgagattccactcccctccaagcacctgctgtgattgggtggcctgctctgatcagatagcaaattctgatcagagaagactttaaaactcttgacttaattgagtaaactcttcatgccatatacatcattttcattatgttaaaggtaaaatatgctttgtgaactcagatgtctgtagccaggaagccagggtgtgtaaatccaaaatctatgcaggaaatgcggagaatagaaaatatgtcacttgaaatcctaagtagttttgaatttctttgacttgaatcttactcatcagtaagagaactcttggtgtctgtcaggttttatgtggtctgtaaagttaggggttctgttttgtttccttatttaggaaagagtactgctggtgtcgaggggttatatgttccatttaatgtgacagttttaaaggatttaagtagggaatcagagtcctttgcagagtgtgacagacgactcaataacctcatttgtttctaaacatttttctttgataaagtgcctaaatctgtgctttcgtatagagtaacatgatgtgctactgttgatgtctgattttgccgttcatgttagagcctactgtgaataagagttagaacatttatatacagatgtcatttctaagaactaaaattctttgggaaaaaccctcaattgtgattttaataaattaaaagtagcacattacatggttagaaaatgtcagtgttaaagaatggtacaaagtgaaaagtgtatccctctcttgccgccggtggtagcttgtcccagtggaagctgctgttaacaatttgtgcccccacatccccctccctgcccatccaccaaaaaaaagtacatttacttatgtaaatgtacttatggtgatgtatgtttgttttggcctcacagcatctgtttccccttaatttggtagctgctcacatttccctcgaaagaaccacaccctctgcattctcagttctctgctttggatgggacatttgccctgcagtccccccaccctccaggccatgccctctccagggtgaggcctgtgtgatctaccgtactagggtactaggccctgaaagaggcttttcttgttcctcctgcatcttgaacctggagcgggagctgttgtaggccccgcccttggagaagagaactgtctgacagtggggagagagcgccacaccctggtggcataaacgagtccctgaatcatgccgtggctgaaccaagccctgtctgtgggctttttctgttgtactcagggcagtttgatggggttactgtcctgcatagccataatggcccagtataaagcagctgttttgatgagataattgctttaattaagcaaaaggtagcaaagctttcactccgccctgtaccttctgtttccacttaggagccttcccatgtcagaatgtgcagatctgtctcattgtttcctgtgcagtgtgcccccacttcacccagtagtttctgtgtgtctgttatgtactaggtactacaaggtgccaggacggtgtagatacagcctctgctatcgtaaaactcaatgattcggtgggggaagacaaatgtcagtaatgtacaaagtaaaatggcagctgttagaagtatgaaaggggcagggtagggggaggtagaatcttccctgaccaggttaagaaaaccagaggccttctctgagggcaagaggaggagaggagaaatagagtaaggcaggcagaggaaacagtctgagctaagaccctgtggctagaagtggcagagggagaggcagcaggaaggccagcggggaggctggggcccagtgcaggcccaggttggaggagcgtagcacatggagtttggtaggagtttgggacgccctggtggatcttaattgtgatggggtgggtgtgaaaggcagtccaggttgcactggttgcacaggagaagtgatcagaagaggaccccagcaggtgtgagccgtgagctgggaggtgcttcagtagtgcaggccatagctgaaggtgtcctacatcagcagggtgatggtgaggtttgaaccactgtttcactgcatagtccctgctgatggacacttgagtgttcagattttttgctggtatattcagtgctgcagtggacattttcatacaaaatatttcggtacacttttgtttatatctgaaaggtaaattcctagcagtagaattattagagcaaacggaatttaacattttggtgtgtattgccaaattgccctcccaagtggtttagtcagcttacccttgccaacaatagatctatccttgccagccttgggcatcacatttaccagtttaatagattgtaaaaccatatcttaattggctaccctgaagccaccatactggagaggctgcgtacagtgtttcacgtagagagagggatacccaggaggcccacctgctccaaccccagctgcatgagtcttcccagcccaggcacagacatgtggataagatttaaacatttccagccccagccttcaagcaatcctagttgacactgaggggagccaacataagctgagctgagaaacagtctgcccagtctgcagattcatgagcaaaagaaatgttgggctgggtacagtggctcacgcctgtaatcccagtactttgggaggccgaggtgggtggatcagttgaggtcaggagtttgagaccagcctggccaacatggtgaagccctgtctctactaaaaattagccgagtgtggtggtgcgggcctgtaatcccagctactcaggtggctgaggcaggagaatggcttgaacccgggaggcggaggttgcagtgagccaagatcaggccactgcactccagcctggatgacgggatgagactctgtctcaaaaaaacgaaacaaaaattttttaagagaaatgtcatttgtttttgtttttgagacagggtctcactctgttgccctcactagagtgcagtaggatcacggctcactgaagtctctacctaccggctcaattgatcttcccaccacagcctcccaaatagctgggagaaatgtcctgtttttaatgaatttgtcttcctttttgtcttgtttgttttaatatctagtgatctaataaatttggatgatatcttttgactatc

SEQ ID NO: 17821 - DNA, 2941 bp, Homo sapiens
  source 1..2941: mol_type = unassigned DNA
ggtaagcgcgtctagggcgctgcgcggcgcagcgaaaatggcggcttccaggtgggcgcgcaaggccgtggtcctgctttgtgcctctgacctgctgctgctgctgctactgctaccaccgcctgggtcctgcgcggccgaaggctcgcccgggacgcccgacgagtctaccccacctccccggaagaagaagaaggatattcgcgattacaatgatgcagacatggcgcgtcttctggagcaatgggagaaagatgatgacattgaagaaggagatcttccagagcacaagagaccttcagcacctgtcgacttctcaaagatagacccaagcaagcctgaaagcatattgaaaatgacgaaaaaagggaagactctcatgatgtttgtcactgtatcaggaagccctactgagaaggagacagaggaaattacgagcctctggcagggcagccttttcaatgccaactatgacgtccagaggttcattgtgggatcagaccgtgctatcttcatgcttcgcgatgggagctacgcctgggagatcaaggactttttggtcggtcaagacaggtgtgctgatgtaactctggagggccaggtgtaccccggcaaaggaggaggaagcaaagagaaaaataaaacaaagcaagacaagggcaaaaaaaagaaggaaggagatctgaaatctcggtcttccaaggaagaaaatcgagctgggaataaaagagaagacctgtgatggggcagcagtgacgcgctgtggggggacaggtggacgtggagagctctttgcccagctcctggggtgggagtggtctcaggcaactgcacaccggatgacattctagtgtcttctagaaagggtctgccacatgaccagtttgtggtcaaagaattactgcttaataggcttcaagtaagaagacagatgttttctaattaatactggacactgacaaattcatgtttactataaaatctccttacatggaaatgtgactgtgttgctttttcccatttacacttgacccctgagccccttccagtgctgcctgaggtgccctctacctgtgcctgcctctcgtctgccagtttgatttggacctgtttttcccacctcagcccccatgctcttgtcaaacgtgtttggcctccagccaaacagggcctgggaggaaaagagagtcctgcttctgcctggcttccccatcggggaggggagttgaagtgacagcctcctgacagcttagaaatgtggaggacgcagcaagttctggacatggccagccatatgaatgatatcttctctttctttgaaccatctccacctgctcttatggacaccccgccttggggcaaggcaagggatgggcacaacttggaagattttggctttgtgatcctcagtgtccagtgtcacccagatgggccggaagctgcctttgaagccaacgaatgccatttgctctgaaaagcaatgatgagtctcctgagcaaaagccctatgagaggacggctgccccaccccgttccatggctccccatcgccagccccccacgcccaccaggtaccgcctagccacactgcactgtggccccttgggaagagctctgtgctcagctactgatggtgcctgacatgtgtttgtatggggcaggcagggtctcacctgagcctcactgccacctaggcagggtgatggctttgttgtagacaggggagccatgcacagcaggaaatggggcaaactgtaagggaggagacctcctaggaacctgcctacctttgagctgcccctaggacaaccagcaagtccctgcccctctctgaagcccagtgttcccatccatcaaatgatggcattgatctacaagatctccttccccactctatcactctgtggctctagaaagagttctgagaggtgaagaaatttgaccaagagtgtggagtaaatggtgcaccccagattagaactctaaacccctgaaacccacacagcactctccatcttgcagttcacagcttgagcatccgaggggcatgggaatccacgtctatactcagcccatcttggcaggcaacatgcatttatcaccaccgggaaagtgccattcaacttaggtcaccttacatacatcagcttttggcaaccgggatcttaatttaaaagacagaggctccaaaatgatttcaggactgggctggaaaggatacttctcttttccttatgtcctcctttggctggtttgaagggtttgcattgcttctgatttttctcattgccccatatgatgggtttctgattttgatgttttccatagtgaggatggtgtataactaagaagcccagctttgagttaggaagattaggatccaagtcctaaccttaagcaagtggcttggctgttaaattcttggtgtcctcatcttaaatggaaataatagtacctgctgcacaggttattaatgagtaagtgagataattataacatgttgtgcaaagtgcaaggctgaacattgaatagcaaccacaatgatcattatcattattgcccgtggagcttctctgccgcccatacagcctctctgaggactctccctgcacctagtttttgtgatgataatgggtgtcatgctgacatgtccctcctggatggcttcttccagcacagccagcaagcctgtgctaggcttcaccaccgaagctgcctggccttggacaagccatgtaggttctctgggctttagttttctggaacaaataagagttttgcaagctgcaaaggactgtacaaacgctaggcatcagctagaatgttgaagaagatgcaggacccctggccagtctgaatagcaggaattgggtaggagggtgagactaagccacttttcttatgatacttttgttgaataaagggccactttccaagcaaa

SEQ ID NO: 17822 - DNA, 1552 bp, Homo sapiens
  source 1..1552: mol_type = unassigned DNA
atggcccagtcgcctcctccgcagagcctcctcggccacgaccactggatcttcgcccagggctggggctgggccggccactgggactccacgtccccggcctcctcctccgattcgtcgggttcgtgcccctgcgacggcgcccgcggactcccgcagccacagcctccgagctgcagctcccgagccgcagaggcagccgcgacgacgcccagacgagcgcgcaccggaccagcgggcggacagcggcagagcgccagcgagcgggagaaactgcgcatgcgcacgctggcccgcgccctgcacgagttgcgccgctttctgcctccctccttggcgccggccggccagagcctgaccaagatcgagacgctgcgcctggccatccgctacatcggccacctatcggccgtgctgggtctcagcgaggagagtctgcagtgccggcgcaggcagcgcggggacgcggggtccccttggggctgcccgctgtgccccgaccgtggccccgcagaggcgcagacgcaggcggaggggcaggggcaagggcaggggcaggggcaggggcaagggcaggggcaaggacaggggcaaggacaggggcaagggcaggggcgcaggccgggcctggtctccgccgtcctcgccgaggcgtcctggggatccccgtccgcctgccccggagcccaagccgcacccgagcgcctggggaggggggtccacgacacggatccctgggcaacacccccttactgccccaagatacagtcgcccccgtattcgtcccaagggacaacctccgacgcgtctctttggacgccaccccaaggctgtccctggacgcagtcgtccccagagccccggaacccaccagtgccctggacggcggccccagcaactttggagctggccgcagtgtaccagggtctctctgtgtctccagagccctgtctgtcgctgggagctccatctctcctgccccacccatcatgccagagactgcagcctcagacccccgggaggtgctggagccacagtgcagaggtggtgcccaactcagaggaccagggaccgggcgccgccttccagctcagtgaagcaagccctccccagagctcaggcctgcggttcagtggctgccctgaactttggcaagaagatctggagggggcccgcctgggcatcttctactaaatggcctcggcttccctctttccatccaggaatcagtcctgtagcttgggtgcctccttatttgttaattagtggcttttcatgttctcctttagccaaggctccctttttccaagtgatgtctttcagggaagcagtgtttgaaatagatagcgggtaccttccctggatggagtcagggcgggggcactgtcctccactgctagacacccccagaatgcctggcgctctgcagagcacagtctgagctgctctaagaaggggtctcctttaccctaaaggcagctgggcagggacaggtgggagaatgggtgtaggaggcaggccccaggctctgcttcttggtgacagttggcca

SEQ ID NO: 17823 - DNA, 2465 bp, Homo sapiens
  source 1..2465: mol_type = unassigned DNA
caaccagcacaccccggcacctcctctgcggcagctgcgcctcgcaagcgcagtgccgcagcgcacgccggagtggctgtagctgcccggcgcggcgccgccctgcgcgggctgtgggctgcgggctgcgcccccgctgctggccagctctgcacggctgcgggctctgcggcgcccggtgctctgcaacgctgcggcgggcggcatgggataacgcggccatggtgcgccgagatcgcctccgcaggatgagggagtggtgggtccaggtggggctgctggccgtgcccctgcttgctgcgtacctgcacatcccaccccctcagctctcccctgcccttcactcatggaagtcttcaggcaagtttttcacttacaagggactgcgtatcttctaccaagactctgtgggtgtggttggaagtccagagatagttgtgcttttacacggttttccaacatccagctacgactggtacaagatttgggaaggtctgaccttgaggtttcatcgggtgattgcccttgatttcttaggctttggcttcagtgacaaaccgagaccacatcactattccatatttgagcaggccagcatcgtggaagcgcttttgcggcatctggggctccagaaccgcaggatcaaccttctttctcatgactatggagatattgttgctcaggagcttctctacaggtacaagcagaatcgatctggtcggcttaccataaagagtctctgtctgtcaaatggaggtatctttcctgagactcaccgtccactccttctccaaaagctactcaaagatggaggtgtgctgtcacccatcctcacacgactgatgaacttctttgtattctctcgaggtctcaccccagtctttgggccgtatactcggccctctgagagtgagctgtgggacatgtgggcagggatccgcaacaatgacgggaacttagtcattgacagtctcttacagtacatcaatcagaggaagaagttcagaaggcgctgggtgggagctcttgcctctgtaactatccccattcattttatctatgggccattggatcctgtaaatccctatccagagtttttggagctgtacaggaaaacgctgccgcggtccacagtgtcgattctggatgaccacattagccactatccacagctagaggatcccatgggcttcttgaatgcatatatgggcttcatcaactccttctgagctggaaagagtagcttccctgtattacctcccctactcccttatgtgttgtgtattccacttaggaagaaatgcccaaaagaggtcctggccatcaaacataattctctcacaaagtccactttactcaaattggtgaacagtgtataggaagaagccagcaggagctctgactaaggttgacataatagtccacctcccattactttgatatctgatcaaatgtatagacttggctttgttttttgtgctattaggaaattctgatgagcattactattcactgatgcagaaagacgttcttttgcataaaagacttttttttaacactttggacttctctgaaatatttagaagtgctaatttctggcccacccccaacaggaattctatagtaaggaggaggagaaggggggctccttccctctcctcgaatgacgttatgggcacatgccttttaaaagttctttaagcaacacagagctgagtcctctttgtcatacctttggatttagtgtttcatcagctgtttttagttataaacattttgttaaaatagatattggtttaaatgatacagtattttaggtatgatttaagactatgatttacctatacattatatatattttataaagatactaaaccagcatacccttactctgccagagtagtgaagctaattaaacacatttggtttctgaataaattgaactaaatccaaactatttcctaaaatcacaggacattaaggaccaatagcatctgtgccagagatgtactgttattagctgggaagaccaattctaacagcaaataacagtctgagactcctcatacctcagtggttagaagcatgtctctcttgagctacagtagaggggaagggattgttgtgtagtcaagtcaccatgctgaatgtacactgattcctttatgatgactgcttaactccccactgcctgtcccagagaggctttccaatgtagctcagtaattcctgttactttacagacaggaaagttccagaaactttaagaacaaactctgaaagacctatgagcaaatggtgctgaatactttttttttaaagccacatttcattgtcttagtcaaagcaggattattaagtgattatttaaaattcgtttttttaaattagcaacttcaagtataacaactttgaaactggaataagtgtttattttctattaataaaaatgaattgtgacaaaa

SEQ ID NO: 17824 - DNA, 2409 bp, Homo sapiens
  source 1..2409: mol_type = unassigned DNA
agcacatgctgggctcgggggcgatgggcttgtgcgcggacctggcgacgctctagccccgagccgcgtattcgtggccgggtcctccctgggaacagggtgaaggccgagaacctctggcctcaggaagcgcatgcgcaaccggttctccgaaacatggagtcctgtaggcaaggtcttacctgaatcaggatgagggagtggtgggtccaggtggggctgctggccgtgcccctgcttgctgcgtacctgcacatcccaccccctcagctctcccctgcccttcactcatggaagtcttcaggcaagtttttcacttacaagggactgcgtatcttctaccaagactctgtgggtgtggttggaagtccagagatagttgtgcttttacacggttttccaacatccagctacgactggtacaagatttgggaaggtctgaccttgaggtttcatcgggtgattgcccttgatttcttaggctttggcttcagtgacaaaccgagaccacatcactattccatatttgagcaggccagcatcgtggaagcgcttttgcggcatctggggctccagaaccgcaggatcaaccttctttctcatgactatggagatattgttgctcaggagcttctctacaggtacaagcagaatcgatctggtcggcttaccataaagagtctctgtctgtcaaatggaggtatctttcctgagactcaccgtccactccttctccaaaagctactcaaagatggaggtgtgctgtcacccatcctcacacgactgatgaacttctttgtattctctcgaggtctcaccccagtctttgggccgtatactcggccctctgagagtgagctgtgggacatgtgggcagggatccgcaacaatgacgggaacttagtcattgacagtctcttacagtacatcaatcagaggaagaagttcagaaggcgctgggtgggagctcttgcctctgtaactatccccattcattttatctatgggccattggatcctgtaaatccctatccagagtttttggagctgtacaggaaaacgctgccgcggtccacagtgtcgattctggatgaccacattagccactatccacagctagaggatcccatgggcttcttgaatgcatatatgggcttcatcaactccttctgagctggaaagagtagcttccctgtattacctcccctactcccttatgtgttgtgtattccacttaggaagaaatgcccaaaagaggtcctggccatcaaacataattctctcacaaagtccactttactcaaattggtgaacagtgtataggaagaagccagcaggagctctgactaaggttgacataatagtccacctcccattactttgatatctgatcaaatgtatagacttggctttgttttttgtgctattaggaaattctgatgagcattactattcactgatgcagaaagacgttcttttgcataaaagacttttttttaacactttggacttctctgaaatatttagaagtgctaatttctggcccacccccaacaggaattctatagtaaggaggaggagaaggggggctccttccctctcctcgaatgacgttatgggcacatgccttttaaaagttctttaagcaacacagagctgagtcctctttgtcatacctttggatttagtgtttcatcagctgtttttagttataaacattttgttaaaatagatattggtttaaatgatacagtattttaggtatgatttaagactatgatttacctatacattatatatattttataaagatactaaaccagcatacccttactctgccagagtagtgaagctaattaaacacatttggtttctgaataaattgaactaaatccaaactatttcctaaaatcacaggacattaaggaccaatagcatctgtgccagagatgtactgttattagctgggaagaccaattctaacagcaaataacagtctgagactcctcatacctcagtggttagaagcatgtctctcttgagctacagtagaggggaagggattgttgtgtagtcaagtcaccatgctgaatgtacactgattcctttatgatgactgcttaactccccactgcctgtcccagagaggctttccaatgtagctcagtaattcctgttactttacagacaggaaagttccagaaactttaagaacaaactctgaaagacctatgagcaaatggtgctgaatactttttttttaaagccacatttcattgtcttagtcaaagcaggattattaagtgattatttaaaattcgtttttttaaattagcaacttcaagtataacaactttgaaactggaataagtgtttattttctattaataaaaatgaattgtgacaaaa

SEQ ID NO: 17825 - DNA, 2367 bp, Homo sapiens
  source 1..2367: mol_type = unassigned DNA
cgctgctgtggccaggcgtctggcatgctgaccacgtcgcgctgctgtaaaggaaacctgccccgcgcagcggcggtggctggagcgggagaaaccggactttgtgcaactttggccatagtggccatcccatgaatctgtttactagcttggtggatgagggagtggtgggtccaggtggggctgctggccgtgcccctgcttgctgcgtacctgcacatcccaccccctcagctctcccctgcccttcactcatggaagtcttcaggcaagtttttcacttacaagggactgcgtatcttctaccaagactctgtgggtgtggttggaagtccagagatagttgtgcttttacacggttttccaacatccagctacgactggtacaagatttgggaaggtctgaccttgaggtttcatcgggtgattgcccttgatttcttaggctttggcttcagtgacaaaccgagaccacatcactattccatatttgagcaggccagcatcgtggaagcgcttttgcggcatctggggctccagaaccgcaggatcaaccttctttctcatgactatggagatattgttgctcaggagcttctctacaggtacaagcagaatcgatctggtcggcttaccataaagagtctctgtctgtcaaatggaggtatctttcctgagactcaccgtccactccttctccaaaagctactcaaagatggaggtgtgctgtcacccatcctcacacgactgatgaacttctttgtattctctcgaggtctcaccccagtctttgggccgtatactcggccctctgagagtgagctgtgggacatgtgggcagggatccgcaacaatgacgggaacttagtcattgacagtctcttacagtacatcaatcagaggaagaagttcagaaggcgctgggtgggagctcttgcctctgtaactatccccattcattttatctatgggccattggatcctgtaaatccctatccagagtttttggagctgtacaggaaaacgctgccgcggtccacagtgtcgattctggatgaccacattagccactatccacagctagaggatcccatgggcttcttgaatgcatatatgggcttcatcaactccttctgagctggaaagagtagcttccctgtattacctcccctactcccttatgtgttgtgtattccacttaggaagaaatgcccaaaagaggtcctggccatcaaacataattctctcacaaagtccactttactcaaattggtgaacagtgtataggaagaagccagcaggagctctgactaaggttgacataatagtccacctcccattactttgatatctgatcaaatgtatagacttggctttgttttttgtgctattaggaaattctgatgagcattactattcactgatgcagaaagacgttcttttgcataaaagacttttttttaacactttggacttctctgaaatatttagaagtgctaatttctggcccacccccaacaggaattctatagtaaggaggaggagaaggggggctccttccctctcctcgaatgacgttatgggcacatgccttttaaaagttctttaagcaacacagagctgagtcctctttgtcatacctttggatttagtgtttcatcagctgtttttagttataaacattttgttaaaatagatattggtttaaatgatacagtattttaggtatgatttaagactatgatttacctatacattatatatattttataaagatactaaaccagcatacccttactctgccagagtagtgaagctaattaaacacatttggtttctgaataaattgaactaaatccaaactatttcctaaaatcacaggacattaaggaccaatagcatctgtgccagagatgtactgttattagctgggaagaccaattctaacagcaaataacagtctgagactcctcatacctcagtggttagaagcatgtctctcttgagctacagtagaggggaagggattgttgtgtagtcaagtcaccatgctgaatgtacactgattcctttatgatgactgcttaactccccactgcctgtcccagagaggctttccaatgtagctcagtaattcctgttactttacagacaggaaagttccagaaactttaagaacaaactctgaaagacctatgagcaaatggtgctgaatactttttttttaaagccacatttcattgtcttagtcaaagcaggattattaagtgattatttaaaattcgtttttttaaattagcaacttcaagtataacaactttgaaactggaataagtgtttattttctattaataaaaatgaattgtg
